United States Patent Application Publication US 2025/0215492 A1 - sequence listing, part 5

SEQ ID NO: 66401 - DNA, 120 bp, synthetic construct
  source 1..120: mol_type = other DNA
tgctcatttctttttattcttttttctctaaacttcccttctcgcttcatttcattcatttcatcttccatcgctgataccctttcttccagttgatcgcatcggctcctgaggcttctg

SEQ ID NO: 66402 - DNA, 120 bp, synthetic construct
  source 1..120: mol_type = other DNA
tagtggggaaacaggtattttcagatgtaactgggacagtacaagttggcataaaaattctgttggccaattaggcagtaactctaaatttaaaatgcatttgcctccaccaacccttca

SEQ ID NO: 66403 - DNA, 120 bp, synthetic construct
  source 1..120: mol_type = other DNA
acagactaacaggccaacaaaagtcagatgctcaccatttttggacagcacactcctccattaaaaattaatggcaaccagtagacaacataaacaattcaagtttatgaaggcagagaa

SEQ ID NO: 66404 - DNA, 120 bp, synthetic construct
  source 1..120: mol_type = other DNA
agtattgtggctggtacctctaatctcagcaatttgggaaattgaggtggggggttttcttgatgccaggaatttgagatgagcccagaaaacatagccaaatcttgtctgtacaaatat

SEQ ID NO: 66405 - DNA, 120 bp, synthetic construct
  source 1..120: mol_type = other DNA
ttggctttggttgccattgcttttggtgttttggacatgaagtccttgcccatgcctatgtcctgaatggtaatgcctaggttttcttctagggtttttatggttttaggtctaacgttt

SEQ ID NO: 66406 - DNA, 120 bp, synthetic construct
  source 1..120: mol_type = other DNA
agagagggcatccctgtcttgtgccagttttcaaagggaatgcttccagtttttgcccattcagtatgatattggctgtgggtttgtcatagatagctcttattattttgagataagtcc

SEQ ID NO: 66407 - DNA, 120 bp, synthetic construct
  source 1..120: mol_type = other DNA
agggtgtcaattttggatctttcctgctttctcttgtaggcatttagtgctataaatttccctctacacactgctttgaatgcgtcccagagattctggtatgtggtgtctttgttctcg

SEQ ID NO: 66408 - DNA, 120 bp, synthetic construct
  source 1..120: mol_type = other DNA
tattgttatgtgtgaatttgatcctgtcattatgatgttagctggtgattttgctcattagttgatgcagtttcttcctagtctcgatggtctttacattttggcatgattttgcagcag

SEQ ID NO: 66409 - DNA, 120 bp, synthetic construct
  source 1..120: mol_type = other DNA
tgatcgtctgaagccttcttctctcagctcgtcaaaatcattctccatccagctttgttctgttgctggtgaggaactgcgttcctttggaggaggagaggcgctctgcgttttagagtt

SEQ ID NO: 66410 - DNA, 120 bp, synthetic construct
  source 1..120: mol_type = other DNA
tttgaaaatgctggagatgggtcccagcttggtatcatttgtaatgacaccaatatccttacctaagttttgcacagaagtatggaaaagggcatggtgagcttgcaccagtcactagat

SEQ ID NO: 66411 - DNA, 120 bp, synthetic construct
  source 1..120: mol_type = other DNA
atggaagtctgggaggcttacacctttcaagatgtcatcagttgatatagaaaaccatgaaactcaaaacaataaattcctgctggacaaaagtacaatttgtgtccagatgttgtgcat

SEQ ID NO: 66412 - DNA, 120 bp, synthetic construct
  source 1..120: mol_type = other DNA
atcagtaagccttctggtcaacaataggttattagtagtttggggggaatcaaaatttgtatgcagatttttcactgtgtgggaggccagctcccctaaccctatattgttcaaggggca

SEQ ID NO: 66413 - DNA, 120 bp, synthetic construct
  source 1..120: mol_type = other DNA
agtttgctgagaatgatggtttccagcttcatccatgtccctacaaaggacatgaactcatccttttttatggctgcatagtattccatggtgtatatgtgccacattttcttaatacag

SEQ ID NO: 66414 - DNA, 120 bp, synthetic construct
  source 1..120: mol_type = other DNA
tccccatttcttgcttttgtcaggtttgtcaaagatcagatggttgtagatgtgtggtgttatttctgagggctctgttctgttccattggtctatatctctgttttggtacaagtacca

SEQ ID NO: 66415 - DNA, 120 bp, synthetic construct
  source 1..120: mol_type = other DNA
gaaggtaaagcatgtcaagaaatctggccttaatgtccaatgaacttatgtcatattaagtagctggatagaaacatgcattccaaagtggatactgtttatcaggctcagtgctctatt

SEQ ID NO: 66416 - DNA, 120 bp, synthetic construct
  source 1..120: mol_type = other DNA
gacttcccagcctgcacaactgtaagaaatttctgttgtttataagttactcagcttgtggtattttgttacagcagcctacacagactaagacaagtagcattttgaggattaaaattt

SEQ ID NO: 66417 - DNA, 120 bp, synthetic construct
  source 1..120: mol_type = other DNA
atccaaacactttttctatcaatacatttaatttttaaatttgaccattacgcaatgtacacatgcactaaagcaccacactgtaccccataaacatgtgcaattattatgtcaattaaa

SEQ ID NO: 66418 - DNA, 120 bp, synthetic construct
  source 1..120: mol_type = other DNA
ttataatcccaacacttttggagactgaggtgggaggattgcttgagcccaggagtttgagaccaacctgggcaacacagtgagacctcatctctagaaaaaaaaaatacaaagcctagt

SEQ ID NO: 66419 - DNA, 120 bp, synthetic construct
  source 1..120: mol_type = other DNA
tcattcaaaaagcatgatatggtttccatgaaaggacattcatcccatttgactaactggaatttctttactccagctaatctttaccaaagagctgaattaattcaagttgacaccctg

SEQ ID NO: 66420 - DNA, 120 bp, synthetic construct
  source 1..120: mol_type = other DNA
ccattaaacctctttcttttgtaaattgcccggtctcaggtatgtctttatcagcagcatgaaaacagatgaatacaacaatactgtaacaaatcgactcacatctgttctctttatagg

SEQ ID NO: 66421 - DNA, 120 bp, synthetic construct
  source 1..120: mol_type = other DNA
tgggttttaaaatatctatgtcagagttcatttctagaactttatctctagaaaacatattttcacttctcaatacaggaaaatggagattggaaaaatgagtttggaaaatgatttcca

SEQ ID NO: 66422 - DNA, 120 bp, synthetic construct
  source 1..120: mol_type = other DNA
tcaacttctttgcctttggtttgaatgtcttcccatagctcagagtaatttgatcgtctgaagccttcttctctcagctcgtcaaaatcattctccatccagctttgttctgttgctggt

SEQ ID NO: 66423 - DNA, 120 bp, synthetic construct
  source 1..120: mol_type = other DNA
gaaggaagtgctaaacatggaaaggaacaaccagtaccagccgctgcaaaatcatgccaaaatgtaaagaccatcgagactaggaagaaactgcatcaactaatgagcaaaatcaccagc

SEQ ID NO: 66424 - DNA, 120 bp, synthetic construct
  source 1..120: mol_type = other DNA
agaccgctagcaagactaataaagaaaaaaagagagaagaatcaaatagacacaataaaaaatgataaaggggatatcaccaccgatcccacaggaatacaaactaccatcagagaatac

SEQ ID NO: 66425 - DNA, 120 bp, synthetic construct
  source 1..120: mol_type = other DNA
tggaagcattccctttgaaaactggcacaagacagggatgccctctctcaccgctcctattcaacatagtgttggaagttctggccagggcaatcaggcaggagaaggaaataaagggta

SEQ ID NO: 66426 - DNA, 120 bp, synthetic construct
  source 1..120: mol_type = other DNA
acgttaaacctaaaaccataaaaaccctagaagaaaacctaggcattaccattcaggacataggcgtgggcaaggacttcatgtccaaaacaccaaaagcaatggcaacaaaagacaaaa

SEQ ID NO: 66427 - DNA, 120 bp, synthetic construct
  source 1..120: mol_type = other DNA
ctcccccctcccccgaccccaccacagtccccagagtgtgatattccccttcctgtgtccatgtgatctcattgttcaattcccacctatgagtgagaatatgcggtgtttggttttttg

SEQ ID NO: 66428 - DNA, 120 bp, synthetic construct
  source 1..120: mol_type = other DNA
agagcagtggtgtgagtgtcttcacagcagtaaggagagcagtggtgtgagtgtcttcacagcagtaaggagagcagtggtgtgagtgtcttcacagcagtaacgagagcagtggtgtga

SEQ ID NO: 66429 - DNA, 120 bp, synthetic construct
  source 1..120: mol_type = other DNA
gtgtcttcacagcagtaacgagagcagtggtgtgagtgtcttcacagcagtaacgagagcagtggtgtgagtgtcttcacaccagtaacgagagcagtggtgtgagtgtcttcagagcag

SEQ ID NO: 66430 - DNA, 120 bp, synthetic construct
  source 1..120: mol_type = other DNA
gaaagagccccacggcagactggcatccctttgacgcagagctgctgcagctgcctctgagtgtttgcctcaggacgcttcatcttctcatccctcgtcctcaacattaaaaacagctca

SEQ ID NO: 66431 - DNA, 120 bp, synthetic construct
  source 1..120: mol_type = other DNA
ggctccatgtgctctgcctaatgggaacgttctggctggcaccgactgcgatagtttcgggcaatctgccgctgcctctgtgggagccgaatgagcacttcacagtacttaggtagactc

SEQ ID NO: 66432 - DNA, 120 bp, synthetic construct
  source 1..120: mol_type = other DNA
aatgtgagttactgttgcagccttagtcctacctgtatacaggaagcaatgtgagttactgtcctagccttagtcctacatgtatacaggaagcaatgtgagttactgttgcagccttag

SEQ ID NO: 66433 - DNA, 120 bp, synthetic construct
  source 1..120: mol_type = other DNA
gttactgttacagtcttagttctatgtgtctacaggaagcaatgtgaattactgttgtagccttaatgtgtccggcttcctgcgtactttcaggctgctcctggagacactttttctctc

SEQ ID NO: 66434 - DNA, 120 bp, synthetic construct
  source 1..120: mol_type = other DNA
actgtatctgaaattccagcattagggctccatccctgcagaccttgtagaaatcactagtggagttgcttattcactcaacaaacaccgacccagtgcccactttcagataagtctaaa

SEQ ID NO: 66435 - DNA, 120 bp, synthetic construct
  source 1..120: mol_type = other DNA
cacccaacttttcatctgttttctgattcttccttagctccaaaacatctaaggtttggctgcattcactcctctccagcccacagacgcccaactgggccaattcccaaattcatcatt

SEQ ID NO: 66436 - DNA, 120 bp, synthetic construct
  source 1..120: mol_type = other DNA
caccacacttaggctttttttttttttttttgaaacagactctcactcttttgcccaggctggagtgcagtggtgggatctttggctcactacaacctctgcctcctgttctcaagtatt

SEQ ID NO: 66437 - DNA, 120 bp, synthetic construct
  source 1..120: mol_type = other DNA
cctccctttctccattcattgattgacgaataaagtttctatcttgctttactgaacctggtcttgttctgttggtgcaaatggcaacccgcagagaaaggactcattagtctcaaacaa

SEQ ID NO: 66438 - DNA, 120 bp, synthetic construct
  source 1..120: mol_type = other DNA
taaataaataaataaataaataatgtttttgagatagtctcaaaagggtgttcaggcccttatgtgttccccccactcacacacacacacacacacacacacacacacacacacacacac

SEQ ID NO: 66439 - DNA, 120 bp, synthetic construct
  source 1..120: mol_type = other DNA
gggaaatatacaaatatacaaggtgttaggagagagttgctaatcgtgattcccccttaattgtccaaacagaccacctctggggatctattcgtaaaagactcgttagaagtgcagact

SEQ ID NO: 66440 - DNA, 120 bp, synthetic construct
  source 1..120: mol_type = other DNA
ctgccctcgtgatgcacccgcctgagcctcccgaagtgctcggattacaggcatgagccaccatgcacggcccagaaatggagatttttgagcaaacacattaaagaaaagaaacgcaaa

SEQ ID NO: 66441 - DNA, 120 bp, synthetic construct
  source 1..120: mol_type = other DNA
tttgacgtgcatttccccaggggagggacagtgaacgctttttgaagtggttctttacatcccctttgaggaaatgtctgctcaagtctctggctgggttttgaacagaatcatttgttt

SEQ ID NO: 66442 - DNA, 120 bp, synthetic construct
  source 1..120: mol_type = other DNA
ggtcagtcattgtcctctgagggtggctcaaacagggagagagcaaggcggggagctgccagtaacttccccaggcataaatgaaaccccgcagggacacccagaattggcacctgtatt

SEQ ID NO: 66443 - DNA, 120 bp, synthetic construct
  source 1..120: mol_type = other DNA
atgagagttggaaaactctccttgggtgtgaggagctggagaaagatgttgagatcccggagaggtggcacctctgtctacacaggtaacaaaggaatggggtcttaggattcgaatcac

SEQ ID NO: 66444 - DNA, 120 bp, synthetic construct
  source 1..120: mol_type = other DNA
aatgaatgcagtagggttagatttaaataattcattgggtttaaaatgagaaatgaaagtctggctttttacaacctacagtcttatcaccaaagttagctattgttaataacttcttgt

SEQ ID NO: 66445 - DNA, 120 bp, synthetic construct
  source 1..120: mol_type = other DNA
catgctccaaggctgtgtgagcatagcccttttccttgggatgtcaacaacactgggttttatcaaaatataatttttgccaatttattagttaacaaatgctaactcagtgctatttgg

SEQ ID NO: 66446 - DNA, 120 bp, synthetic construct
  source 1..120: mol_type = other DNA
gattgtggagcaaagactaacactggcaatgctttgaagtacttgagtcaaatgggtctctcatgtggtcattactatactcactctcaggctccaatgcaaattgtttccttacgccaa

SEQ ID NO: 66447 - DNA, 120 bp, synthetic construct
  source 1..120: mol_type = other DNA
gatatgtaccaacaactcaacctcagttatctctaatattatctcattaagtgccctctaactacagaatgactcctccttctgggtttcctctgcctgaatggcaccaccattcagtgg

SEQ ID NO: 66448 - DNA, 120 bp, synthetic construct
  source 1..120: mol_type = other DNA
tcacagaatttttttttttttttttgagacagagtccagcttgtcacccaggctggagtgcagtggtgcgatctcagctcactgcaacctccacctcctgggtttaatcacttgccttgg

SEQ ID NO: 66449 - DNA, 120 bp, synthetic construct
  source 1..120: mol_type = other DNA
agaggtaactaatgtaaaatgaggtcacatgtctgggtcctaatccaatatcactggtgtccttatttgaagaggaaatttaggtacagacatacatgtgcacagaaaaaagtccatgag

SEQ ID NO: 66450 - DNA, 120 bp, synthetic construct
  source 1..120: mol_type = other DNA
ctcaagtccctgatagaagatggcaccgtgtttgcatatagcctgtgcacatcctccagcacactttaattaattaattattcatttattttttgagacagggtctcactctgtcgccca

SEQ ID NO: 66451 - DNA, 120 bp, synthetic construct
  source 1..120: mol_type = other DNA
gtgaaaaaggaaatatcttctcataaaaactagactgaagtattctgtaaaactcctttgtgatgtttgcattcaactcagaaagttgaacttctctttatatagtccagttttcaaaca

SEQ ID NO: 66452 - DNA, 120 bp, synthetic construct
  source 1..120: mol_type = other DNA
acactcttttgtacaatctaccattggatatgtggaaggctttgatgcccatggtagaaatggaaacatcctcatataaaatctagacagaaggattcacagaaactgctgtgtgatgtg

SEQ ID NO: 66453 - DNA, 120 bp, synthetic construct
  source 1..120: mol_type = other DNA
taggtagaagcattctcagaaacttctttgtgatgtgtgaattcaactcacagagttgaaccttcctttaatagagcagttttgaaacactctttttgtagaatttgccagtagatattt

SEQ ID NO: 66454 - DNA, 120 bp, synthetic construct
  source 1..120: mol_type = other DNA
tgaggccttcgttggaaacgggattatcttcacataaaaactagactgaaggattcttagaaacttctttgtgatgtgtgcattcaactcaccgagtggaacctcacttttgatagagca

SEQ ID NO: 66455 - DNA, 120 bp, synthetic construct
  source 1..120: mol_type = other DNA
gatttgatgcccatggtagaaaaggaaacatcctcatataaaatctagacagaaggattcacagaaactgctgtgtgatgtgtgcatccaaatcacggagttgaacttttcttttgttag

SEQ ID NO: 66456 - DNA, 120 bp, synthetic construct
  source 1..120: mol_type = other DNA
cagttttgaaacactctttttgtagaatttgccagtagatatttggagcgctttgaggccttcgttggaaaccggaatatcttcacataaaaagtagatagagccattctcagaaactta

SEQ ID NO: 66457 - DNA, 120 bp, synthetic construct
  source 1..120: mol_type = other DNA
ttttgtagaatctgcaagtggatactgggactgctttgaggccttcgttggaaacgggattatcttcacatagaaactagactgaaggattcttagaaacttctttgtgatgtgtgcatt

SEQ ID NO: 66458 - DNA, 120 bp, synthetic construct; identical to SEQ ID NO: 66455
  source 1..120: mol_type = other DNA

SEQ ID NO: 66459 - DNA, 120 bp, synthetic construct; identical to SEQ ID NO: 66456
  source 1..120: mol_type = other DNA

SEQ ID NO: 66460 - DNA, 120 bp, synthetic construct; identical to SEQ ID NO: 66454
  source 1..120: mol_type = other DNA

SEQ ID NO: 66461 - DNA, 120 bp, synthetic construct; identical to SEQ ID NO: 66452
  source 1..120: mol_type = other DNA

SEQ ID NO: 66462 - DNA, 120 bp, synthetic construct
  source 1..120: mol_type = other DNA
aaacttctttgtgatgtgtgaattcaactcacagagttgaaccttcctttaatagagcagttttgaaacactctttttgtagaatctgccagtagatatttggagcgctttgaggccttc

SEQ ID NO: 66463 - DNA, 120 bp, synthetic construct
  source 1..120: mol_type = other DNA
tctgcaagtggatatttggaccacattgaggccttcataggaaacagtactatcttcacataaaaactaggtagaagcattgtcagaaacttctttgtgatgtgtgaattcaactcacag

SEQ ID NO: 66464 - DNA, 120 bp, synthetic construct
  source 1..120: mol_type = other DNA
agcagttttgaaacactctttctgtagagtctgcaagtggatatcaggagcgctttgaggcctatggtagaaaaagaaatatctgcatataaaaactagacagaagcattctgagaaact

SEQ ID NO: 66465 - DNA, 120 bp, synthetic construct
  source 1..120: mol_type = other DNA
gaaggctttgatgaccatggtagaaaaggaaagatcctcatataaaatctagacagaaggattcacagaaactgctgtgtgatgtgtgcatccaaatcacggagttgaacttttcttttg

SEQ ID NO: 66466 - DNA, 120 bp, synthetic construct; identical to SEQ ID NO: 66462
  source 1..120: mol_type = other DNA

SEQ ID NO: 66467 - DNA, 120 bp, synthetic construct
  source 1..120: mol_type = other DNA
taaactcacagagttgaacatacctttccatagagcagttttgaaacactctttttggggaatccgcaagtggatatttggactgctttgagacctttgctggaaatgggaatatcttca

SEQ ID NO: 66468 - DNA, 120 bp, synthetic construct
  source 1..120: mol_type = other DNA
atttggggcgctttgagtccttaggtggaaacgggaatatcttcgaataaaaactagacagaattattctcagaatcttctttgtgatgtgggcattcaactaacacagttgaacatttc

SEQ ID NO: 66469 - DNA, 120 bp, synthetic construct
  source 1..120: mol_type = other DNA
cagtgtttttgtagaatcaacaagtggatattgggagcgctttgaggcctctggtggaaagggaatgtcttcacataaaaactggacagaagcattctcagaaacatctttgtgatgttt

SEQ ID NO: 66470 - DNA, 120 bp, synthetic construct
  source 1..120: mol_type = other DNA
gcctatggcagaaaaagaaatatctggctctaaaaactagacagaagcattctgagaaacttctttgtgatgtttgcattcaactaccagagttgaaccttccttttgatagagcagttt

SEQ ID NO: 66471 - DNA, 120 bp, synthetic construct
  source 1..120: mol_type = other DNA
cacattaaaaactagccagaagcattctcagaaacttctttgtgatgtgtgcattgaacccagagagatgaaccgttcctttgagagagcagttttgaaacgtgtttttgtaagatctgc

SEQ ID NO: 66472 - DNA, 120 bp, synthetic construct
  source 1..120: mol_type = other DNA
gagttgaaccatcttttttatggagcggttttgaaacagtgttttttgtagaatcagcaattggatattgggagcgctttgaggcctctggtggaaagggaatgtcttcacataaaaact

SEQ ID NO: 66473 - DNA, 120 bp, synthetic construct; identical to SEQ ID NO: 66470
  source 1..120: mol_type = other DNA

SEQ ID NO: 66474 - DNA, 120 bp, synthetic construct; identical to SEQ ID NO: 66471
  source 1..120: mol_type = other DNA

SEQ ID NO: 66475 - DNA, 120 bp, synthetic construct
  source 1..120: mol_type = other DNA
atttttcagcagtgttttgtatttctccttgtagagatctttcatctactaggctagctgtattcctgggcatttttctggaagtgtatatatatgtatatatgtatatgtatgtatata

SEQ ID NO: 66476 - DNA, 120 bp, synthetic construct
  source 1..120: mol_type = other DNA
tgtacacattcacacatatatacatacatatatttacactcacaccaatatacatgtatgtgtgtatatacacatatgcatatatgtatatatacacatatgtatataggtgtgtgtgtg

SEQ ID NO: 66477 - DNA, 120 bp, synthetic construct
  source 1..120: mol_type = other DNA
atatctcatagtggttttgatttgcatttctctgatggccagtgatgatgagcatttcttcatgtgttttttggctgcataaatgtcttcttttgagaagtgtctgttcatgtccttcgc

SEQ ID NO: 66478 - DNA, 120 bp, synthetic construct
  source 1..120: mol_type = other DNA
actcctattcaacatagtgttggaagttctggccagggcaatcaggcaggagaaggaaataaagggtattcaattaggaaaagaggaagtcaaattgtccctgtttgcagacgacatgat

SEQ ID NO: 66479 - DNA, 120 bp, synthetic construct
  source 1..120: mol_type = other DNA
tacaaacaaatggaagaacattccatgctcatgggtaggaagaatcaatatcgtgaaaatggccatactgcccaaggtaatttacagattcaatgccatccccatcaagctaccaatgac

SEQ ID NO: 66480 - DNA, 120 bp, synthetic construct
  source 1..120: mol_type = other DNA
tctctgcttccccatctgagctttaaggtcctcatttcaataataaggaaggcagcctgagacctttctcatacctttcagttgcaaagccctatgttccaaacaagatgcgaagggcca

SEQ ID NO: 66481 - DNA, 120 bp, synthetic construct
  source 1..120: mol_type = other DNA
cattctccacccagcaggcagagggaggctaggtaaacctaagtcagttcatgtcactcctctgctccgaagactccaggaggtccccattctggagaataaaattctaagcccttccaa

SEQ ID NO: 66482 - DNA, 120 bp, synthetic construct
  source 1..120: mol_type = other DNA
tattgtgtgttgtgtgtggtatgtattgcatgtctgatatgttgagagggagagtgtgtgtggtacctgacgtgtagtatgtggcatacacactacatgtacacgtagtaattgtgcact

SEQ ID NO: 66483 - DNA, 120 bp, synthetic construct
  source 1..120: mol_type = other DNA
gtgaccatctgtgtctgtagcacctccccctcctagtcctggaggcccttcaggtagaaacagggtctgactcatgagggagctttgctcaagtgagccctgcatgtcctcacttgagca

SEQ ID NO: 66484 - DNA, 120 bp, synthetic construct
  source 1..120: mol_type = other DNA
acctttcatatcgcagttctcagtcatacccacgggcccaatttcctgtgtcccattgagcaggttgcaaactggctggggcatgcatccctggactctcagattggagaagatgcctcc

SEQ ID NO: 66485 - DNA, 120 bp, synthetic construct
  source 1..120: mol_type = other DNA
ctcctgggtctgagggaggaggggctgggggcctggactcctaggtctgagggaggaggaactggggacctggactcctgggcctgagggaggaggggctggggacctggactcctggct

SEQ ID NO: 66486 - DNA, 120 bp, synthetic construct
  source 1..120: mol_type = other DNA
agcatatatggaaggagaaagcttgacagtgacgtaatgtatttggagtgcaaaaatgcctgcagggaattcattctaaatggggagaaatacagaacaggccttaggaacaatgtgacc

SEQ ID NO: 66487 - DNA, 120 bp, synthetic construct
  source 1..120: mol_type = other DNA
actactgtcttggggaaagtctgagcatttttcccctcctccatccaaacccaaaatggacagagaaaactcactttgtgcaaaatggaaatccaaatggaaattggattccatttggat

SEQ ID NO: 66488 - DNA, 120 bp, synthetic construct
  source 1..120: mol_type = other DNA
ctgatcttcgacaaacctaccaaaaacaagcaatggggaaaggacctcctattcagtaaatggtacttggaaaactggctagccatatgcagaaaactgaaactggatcccttccttaca

SEQ ID NO: 66489 - DNA, 120 bp, synthetic construct
  source 1..120: mol_type = other DNA
ccgtcagagtgaacaggcgacccacagaatgggaggaaatttttgcaagcaaaagaaactatcgtcagagtgaacaggcgacccacagaatgggaggaaatttttgcaagcaaaagaaac

SEQ ID NO: 66490 - DNA, 120 bp, synthetic construct
  source 1..120: mol_type = other DNA
aaaccctaaccctagccctagccctagccctagccctaacccctaacccctaaccctaagccgaagcctaactcgtgtctgactttgagtattcagtgctgcaaacaggaagtattttat

SEQ ID NO: 66491 - DNA, 120 bp, synthetic construct
  source 1..120: mol_type = other DNA
gagacggacgtccccgggggcgcggcacagagacaggtggaacctcaataatccgaaaagccgggctcgggaaccccctgcttgcaaccgggcactacaggatccgcttgcccacggtgc

SEQ ID NO: 66492 - DNA, 120 bp, synthetic construct
  source 1..120: mol_type = other DNA
ctgcgcgcggcctgtggctagacgaggttcacgtgggtttacctggaggcgttgctgcgcacggcctgtggctggacgaggttcacgtgggtttgcctggaggcgttgctgcgcgcggcc

SEQ ID NO: 66493 - DNA, 120 bp, synthetic construct
  source 1..120: mol_type = other DNA
gagtaagaataagaagcagagagcacggactctctctgtgtggcgggaacagcctcagtcttagaataagaagcagagagtttggtatgttcccgtaggttctgagagagtttagtttgt

SEQ ID NO: 66494 - DNA, 120 bp, synthetic construct
  source 1..120: mol_type = other DNA
tgcagggggcgtgggttccagcgttggaggcagccgtgatggccgcgatgcaggggcgtgggttccagcgttggaggcagccgtgatggccgcgatgcagggagtgaataatcagcgtgt

SEQ ID NO: 66495 - DNA, 120 bp, synthetic construct
  source 1..120: mol_type = other DNA
agggaagatggacacagactcagagagcagagcccggggaagatggacacagactcagagagcagagctcggggaagatggacacagactcggagaggagagcccagggaagatggacac

SEQ ID NO: 66496 - DNA, 120 bp, synthetic construct
  source 1..120: mol_type = other DNA
ggtttaagcagaagataagctgattgaaaggacatcagtccatcacagaactgtcaggtggcccaaaccagcagtgtcaaggttacgcattaagaatcaaacccctaaccacgccccact

SEQ ID NO: 66497 - DNA, 120 bp, synthetic construct
  source 1..120: mol_type = other DNA
cagaggaaaggggagaaccagtgaccttcttcctctctgagtgtctgtctctcattgccacccatgcagaagggactcccttaaacacaaggagaagttcctgatgctggatgacaaggc

SEQ ID NO: 66498 - DNA, 120 bp, synthetic construct
  source 1..120: mol_type = other DNA
tatgtctgtagaaatatatctctgtatatattttggagcaggaaaactatagtaagtaggacccaggcttaggcatttatatatgtctttccctcccctcccctcccctttccccctccc

SEQ ID NO: 66499 - DNA, 120 bp, synthetic construct
  source 1..120: mol_type = other DNA
tatactcatttgggtatattcccagtaatgggatggctgggtcaaatggtatttctagttctagatccctgaggaatcgccacactgacttccacaatggttgaactagtttacagtccc

SEQ ID NO: 66500 - DNA, 120 bp, synthetic construct
  source 1..120: mol_type = other DNA
cttaggattgacttggcaatgcgggctcttttttggttccatatgaactttaaagtagttttttccaattctgtgaagaaagtcattggtagcttgatggggatggcattgaatctgtaa

SEQ ID NO: 66501 - DNA, 120 bp, synthetic construct
  source 1..120: mol_type = other DNA
agttcctccttgtacctctggtagaattcggctgtgaatccatctggtcctggactctttttggttggtaaactattgattattgccacaatttcagagcctgttattggtctattcaga

SEQ ID NO: 66502 - DNA, 120 bp, synthetic construct
  source 1..120: mol_type = other DNA
ttactgtagccctatagtatagtttgaagtcaggtagcgtgatgcctccagctttgttcttcgggcttagaattgacttggcaatgtgggctcttttttgattccatatgaactttaaag

SEQ ID NO: 66503 - DNA, 120 bp, synthetic construct
  source 1..120: mol_type = other DNA
gtatttctagttctagaaccctgaggaatcgccacactgacttccacaatggttgaactagtttacagtcccaccaacagtgtaaaagtgttcctatttctccacatcctctccagcacc

SEQ ID NO: 66504 - DNA, 120 bp, synthetic construct
  source 1..120: mol_type = other DNA
agtcattggtagcttgatggggatggcattgaatctgtaaattaccttgggcagtatggccattttcacgatgttgattcttcctacccatgagcatggaatgttcttccatttgtttgt

SEQ ID NO: 66505 - DNA, 120 bp, synthetic construct
  source 1..120: mol_type = other DNA
attggaatagtttcagaaggaatggtaccagttcctccttgtacctctggtagaattcggctgtgaatccatctggtcctggactcttttttgttggtaaactattgattattgccacaa

SEQ ID NO: 66506 - DNA, 120 bp, synthetic construct
  source 1..120: mol_type = other DNA
cctcttgttgaattgatccctttaccattatgtaatggccttctttgtctcttttgatatttgttggtttaaagtctgttttatcagagactaggattgcaacccctgcctttttttgtt

SEQ ID NO: 66507 - DNA, 120 bp, synthetic construct
  source 1..120: mol_type = other DNA
aaacttcccttctcgcttcatttcattcatttcatcttccattgctgataccctttcttccagttgatcgcatcggctcctgaggcttctgcattcttcacgtagttctcaagccttggt

SEQ ID NO: 66508 - DNA, 120 bp, synthetic construct; identical to SEQ ID NO: 48881
  source 1..120: mol_type = other DNA

SEQ ID NO: 66509 - DNA, 120 bp, synthetic construct; identical to SEQ ID NO: 48882
  source 1..120: mol_type = other DNA

SEQ ID NO: 66510 - DNA, 120 bp, synthetic construct
  source 1..120: mol_type = other DNA
gttgaattgatccctttaccattatgtaatggccttctttgtctcttttgatctttgttggtttaaagtctgttttgtcagagactaggattgcaacccctgcctttttttgttttccat

SEQ ID NO: 66511 - DNA, 120 bp, synthetic construct
  source 1..120: mol_type = other DNA
cctgcaaaggaaggacaattactttatcacagacttctcttcatcaacgagaacagacaatacaggaataacatctcccaagttgtgagggagactaacagatgacatgaaattctacga

SEQ ID NO: 66512 - DNA, 120 bp, synthetic construct
  source 1..120: mol_type = other DNA
atacataggtatatatctatatctatcgatacataggtatatatctatatctatcgatacataggtatatatctatatctatcgatacataggtatatatctatatctatcgatacatag

SEQ ID NO: 66513 - DNA, 120 bp, synthetic construct
  source 1..120: mol_type = other DNA
gtatatatctatatctatctatggatacatgggtatatatctatatctatctatggatacatgggtatatatctatatctatctatggatacatgggtatatatctatatctatctatag

SEQ ID NO: 66514 - DNA, 120 bp, synthetic construct
  source 1..120: mol_type = other DNA
ctgcacggggacatgatggccagcctaaaacagtaaggtcaagttgttgatctggttctcatttatccattgtccttatctttaaaatcacaagatattgagagttagcagtgccattgc

SEQ ID NO: 66515 - DNA, 120 bp, synthetic construct
  source 1..120: mol_type = other DNA
ctgatcaatgtactttgtaatctcccctacccttaagaaggtactttgtagtctcctccaccctcaagaagattctttgtaattctccccacccttgagaatgtactttgtgagatctac

SEQ ID NO: 66516 - DNA, 120 bp, synthetic construct
  source 1..120: mol_type = other DNA
aaacagctttattgctcacacaaagcctgtttggtggtctcttcacagggacgtgcatgaaatttggtgccgtgactcggatcgggggacctcccttgggagatcaatcccctgtcctcc

SEQ ID NO: 66517 - DNA, 120 bp, synthetic construct
  source 1..120: mol_type = other DNA
caaccaaaaagagtccaggaccagatggattcacagccgaattctaccagaggtacaaggaggaactggtaccattccttccgaaactattccaatcaatagaaaaagagggaatcctcc

SEQ ID NO: 66518 - DNA, 120 bp, synthetic construct
  source 1..120: mol_type = other DNA
cctacccatgagcatggaatgttcttccatttgtttgtgtcctcttttatttccttgagcagtggtttgtagttctccttgaagaggtccttcacatcccttgtaagttggattcctagg

SEQ ID NO: 66519 - DNA, 120 bp, synthetic construct
  source 1..120: mol_type = other DNA
gagagagaagcatattggggtcataaaatcataccttttctatgatgttgccattgcttatttatggccacaaggagaaaccaggtattcaaggatttgagattcatttttcataaaact

SEQ ID NO: 66520 - DNA, 120 bp, synthetic construct
  source 1..120: mol_type = other DNA
atctccttactcatcagtggtctgttcggattttctctttcttcatgattctgtcttggtaagtattatgtgtctaggaatttattcatttcttctaggttatccaatttgttggtgtag

SEQ ID NO: 66521 - DNA, 120 bp, synthetic construct
  source 1..120: mol_type = other DNA
agcccgcatcgccaagtcaatcctaagccaaaagaacaaagctggaggcatcacactacctgacttcaaactatactacaaggctacagtaaccaaaacagcatggtactggtatcaaaa

SEQ ID NO: 66522 - DNA, 120 bp, synthetic construct
  source 1..120: mol_type = other DNA
ggatatgaactcatcattttttatggctgcatagtattccatggtgtatatgtgccacattttcttaatccagtctatcattgttggacatttgggttggttccaagtctttgctattgt

SEQ ID NO: 66523 - DNA, 120 bp, synthetic construct
  source 1..120: mol_type = other DNA
ccctttatttccttctcctgcctgattgccctggccagaacttccaacactatgttgaataggagcggtgagagagggcatccctgtcttgtgccagttttcaaagggaatgcttccagt

SEQ ID NO: 66524 - DNA, 120 bp, synthetic construct
  source 1..120: mol_type = other DNA
tgcttttctagttcttttaattgtgatgttagggtgtcaattttggatctttcctgctttctcttgtaggcatttagtgctataaatttccctctacacactgctttgaatgcgtcccag

SEQ ID NO: 66525 - DNA, 120 bp, synthetic construct
  source 1..120: mol_type = other DNA
ggcaggtggatcatgaggtcaggagtttgagaccagcctggccaacatggtgaaacatggtctctactaaaaatacaaaaattagcctggggcagtggcagacgcctgtaatcccggcta

SEQ ID NO: 66526 - DNA, 120 bp, synthetic construct
  source 1..120: mol_type = other DNA
tcactgttactaccaggttttttataatatatatgagttgggctgttttttatttgaatgcttcacaagcaaatcttctctctcaataacattcggttttaaaaatcactttattgctac

SEQ ID NO: 66527 - DNA, 120 bp, synthetic construct
  source 1..120: mol_type = other DNA
ttatatggtggtcctgagtcttttctctggcttttcaaacctagtaagactatgacactaaagtaactttgcccgtggtttgataatgccttctaaagcacatcctaagctctcgtgcat

SEQ ID NO: 66528 - DNA, 120 bp, synthetic construct
  source 1..120: mol_type = other DNA
attgagaagggctggaaaagcaatgttagctgcaaagctgtcttggggagatttgcatcggtagagaatctgccctgatgcagccaggttttctctgaggtctgcccccttgtctggatc

SEQ ID NO: 66529 - DNA, 120 bp, synthetic construct
  source 1..120: mol_type = other DNA
gagaatttgtgacaaacctctttgcgtcatcacacttctggacccttttttgcctttaagtaacttcttgttgcaaagctccaaagggagttcacatccaaggatatttgggtctgtttc

SEQ ID NO: 66530 - DNA, 120 bp, synthetic construct; identical to SEQ ID NO: 66525
  source 1..120: mol_type = other DNA

SEQ ID NO: 66531 - DNA, 120 bp, synthetic construct
  source 1..120: mol_type = other DNA
aatcaattcttgaggccaagttgctttgccatttatttataggactgcgtggttaaacccttgctatcttttgtcctcatagtcaaagcttaggatgaaatggtcctcattggcaaatgg

SEQ ID NO: 66532 - DNA, 120 bp, synthetic construct
  source 1..120: mol_type = other DNA
tggtcaatgtccatgtgaagtagctggggcagcaaagattatgccaggggaaattgaagaagagcaacttgcagaaaactgctttgatgtagttgtactagttaaaagataggctcacta

SEQ ID NO: 66533 - DNA, 120 bp, synthetic construct
  source 1..120: mol_type = other DNA
tttctcaagttcctaaacataacattgtccccagccaatttcatcttattccctcctatgcattccttcttaatgaatgatccactgtccaccagatgtccaagccagaaattcaggcag

SEQ ID NO: 66534 - DNA, 120 bp, synthetic construct
  source 1..120: mol_type = other DNA
ccatgttcctgcaaatgcacatgtcatgtgacacaatcgtgatgtaatctatggtcttgcatatttacattacaccaccaggtaaatcagcacgagggaggtgaagactattctgaatct

SEQ ID NO: 66535 - DNA, 120 bp, synthetic construct
  source 1..120: mol_type = other DNA
tgtggaacactgaaaagctccttgaatcttagaatttgtttttaattaatagacttaatacatggcataacatgttgtactcaacttactcttcatgcaacgtgtaagcataaatgccaa

SEQ ID NO: 66536 - DNA, 120 bp, synthetic construct
  source 1..120: mol_type = other DNA
tgcctgccactttcaagaagtacttttatgttgacaggcaaggtgagaggcactgagaatacagcagtaaactaaacaaacatggtccttgctctcatggacctaatgacttaataggaa

SEQ ID NO: 66537 - DNA, 120 bp, synthetic construct
  source 1..120: mol_type = other DNA
aaagtagattagtggttggcaggaagtgaagtgaaggtgggggggtgaggtagaggaatggggagtcaccactagtgggtacaaggttcctttatggggtgaaaagatgttctaaaatta

SEQ ID NO: 66538 - DNA, 120 bp, synthetic construct
  source 1..120: mol_type = other DNA
aaataaactgccagccagatgagaattatagacaaataatatgcagggacccccccggattcatcttagtcttgagctcatatagaattcagagaaatcaaaggcagttgacaaggaggg

SEQ ID NO: 66539 - DNA, 120 bp, synthetic construct
  source 1..120: mol_type = other DNA
aggattattggtggatgctgcctgcttggctgtcagaaagggctccctaatttcttcccccttttggtaggtgccataataagataaacatttcatctccaaatgtctcagtgacctgta

SEQ ID NO: 66540 - DNA, 120 bp, synthetic construct
  source 1..120: mol_type = other DNA
ataatctagggggacatgcccatgacaaccctattttgcaaaatcctggaatagaacagtccattttcagaggttttcttcctgtcctttctaggtgtccctaatatatgggcatggatt

SEQ ID NO: 66541 - DNA, 120 bp, synthetic construct
  source 1..120: mol_type = other DNA
gggtttggagacccctgccctagctgaaaagaatggctcattgtgcctaaactgttgtacagtgtgatttatggtgaacatctgctttccttctgggaatctagaatgttgatacatgct

SEQ ID NO: 66542 - DNA, 120 bp, synthetic construct
  source 1..120: mol_type = other DNA
gaatcactggaacctaaaggtggttttgaagacccctgacacacatgagatcaaccaaaagttactacagtttacatcctttccctgagctacctccctccaaattttgttcctatagca

SEQ ID NO: 66543 - DNA, 120 bp, synthetic construct
  source 1..120: mol_type = other DNA
aaaataaactgcggcccattgaaatttgggattcttgtgagctacttcagcacctaggacacagcggctgcttagaggaaagagaaaaggcacaaatagaacacattcatttttttctgg

SEQ ID NO: 66544 - DNA, 120 bp, synthetic construct
  source 1..120: mol_type = other DNA
caaaagtctggaagctgggaagttaattggaaaatactagtgttcatactgacattggtaaatgtgttaattttaagcatagttattattcagaggaattttataataatttagaactct

SEQ ID NO: 66545 - DNA, 120 bp, synthetic construct
  source 1..120: mol_type = other DNA
actctctgcaagctccgcctcctgggttcacaccattctcctgcctcagcatcctgagtagctgggactacaagcacccaccaccatgcccagctaatttttttgtatttttagtagaga

SEQ ID NO: 66546 - DNA, 120 bp, synthetic construct
  source 1..120: mol_type = other DNA
tgaatattacacaaaatttgttttaaaacccatttataacaatgatctataaaaacaatttttaggcggggcacagtggttcatgcctgcaatcccagcactttgggaggctgagacagg

SEQ ID NO: 66547 - DNA, 120 bp, synthetic construct
  source 1..120: mol_type = other DNA
atacctacaactatctgatctttgacaaacctgagaaaaacaagcaatggggaaaggattccctatttaataaatggtgctgggaaaactggctagccatatgtagaaagctgaaactgg

SEQ ID NO: 66548 - DNA, 120 bp, synthetic construct
  source 1..120: mol_type = other DNA
tatctaagtgtcccctggtaaaagagagccatcaaccgaggttccatttgcatgaccacttggagtttgatggcctctaggcgagaaaaaacaaattttacaaggaggttaagtacacat

SEQ ID NO: 66549 - DNA, 120 bp, synthetic construct
  source 1..120: mol_type = other DNA
ttacaccagttactcattaaggaggtggagatcctggaccagtctccattccctgttgggtttctttctgtacttccaatattaggatattacaaggactgtcgcagggtttaacaaggc

SEQ ID NO: 66550 - DNA, 120 bp, synthetic construct
  source 1..120: mol_type = other DNA
cctgcatccttaggttattaatgatggcttctagttgtttcctagcttctggttttaggggatattgtctttaattagggaaggagatgagatccctgagatggatttggactggtgaga

SEQ ID NO: 66551 - DNA, 120 bp, synthetic construct
  source 1..120: mol_type = other DNA
cacagagaaggaaaatggtccaaaattccatatgtataggccttttttgccctgcagaataaccgcaagctctgtcagcaatgtataatagaccttgcacttatagcagtgatatccagc

SEQ ID NO: 66552 - DNA, 120 bp, synthetic construct
  source 1..120: mol_type = other DNA
ttcgttttttttttttttttttttttttttttgatgtggagtctcaccctgtcacctaggctggagtgcagtggtgtgatctcgtctcactgcaacctctacctcccaggttcaagcaat

SEQ ID NO: 66553 - DNA, 120 bp, synthetic construct
  source 1..120: mol_type = other DNA
gacacattcaaaagaatgaggctggactcaacacaatataacaagtgttggcaaaaatatggagagattggaactctcatgtattgctgatggggttgtataatggtgcagtcattatgg

SEQ ID NO: 66554 - DNA, 120 bp, synthetic construct
  source 1..120: mol_type = other DNA
ggctaatgtaactgcaggttattaacctccatgtttatttgctagctcattactgaattccagtggtcacatttaatgaggtacctgtggttttaatcagctatgagtatgctgtttatc

SEQ ID NO: 66555 - DNA, 120 bp, synthetic construct
  source 1..120: mol_type = other DNA
tactccaggctgggcagcagagcaagactctctcaaaaaaaaaaaatttttttaatgtacattctgacagtaattatataaaaaggcatatacatatgaattaaagatgaaatcttctat

SEQ ID NO: 66556 - DNA, 120 bp, synthetic construct
  source 1..120: mol_type = other DNA
ctaacagatggtcaaccacaaggtggattttcagaacacacatgaaaaaaattccttccactataactttttttttttttaagatggagtctcactcttgttgcccaggctggagtgcaa

SEQ ID NO: 66557 - DNA, 120 bp, synthetic construct
  source 1..120: mol_type = other DNA
aaagaaattttatgaaggaagatccacaacacatacccataacaaatataaaaatgaactaacttcaaagcaggttattttgggttttgttttttttatttccaatttaaagcaaacatt

SEQ ID NO: 66558 - DNA, 120 bp, synthetic construct
  source 1..120: mol_type = other DNA
gtcaatttgactgggctaagggatgcccagatagctggtaaacattgctttggggtgtgtctgtgaaggcatttccagaagagactagcatgtgaatcagtagactgagtaaagaagatt

SEQ ID NO: 66559 - DNA, 120 bp, synthetic construct
  source 1..120: mol_type = other DNA
gtctacataaatgagacgaattcatggttatgtggactaagtaaaaagttgtaggtacaaagttcccctggtgctggcagtggggagtgctccataatctctagccattgctattgttat

SEQ ID NO: 66560 - DNA, 120 bp, synthetic construct
  source 1..120: mol_type = other DNA
tccaatttcaaatgtgccatgcttggatatttgcttacattttgcacaatgacttttctgccatctcctgtgaacctctgagcaatcctgtaaagcagggatcatgcccattttccagat

SEQ ID NO: 66561 - DNA, 120 bp, synthetic construct
  source 1..120: mol_type = other DNA
ggcaaggattgggcaaatcaattccttctggttgtggaggagaagcccttctagggttgatgttaatgctgcattttaatgaaagtgacttttcaggcttataattggatgacatcagct

SEQ ID NO: 66562 - DNA, 120 bp, synthetic construct
  source 1..120: mol_type = other DNA
gttgacttggtccagaccaaatggaaatatatgtgattaaatctgttctctgcggagagggactaaaacaaagatcaatgccagatattgtcgtgatgatgaaatgtcagggcagagggc

SEQ ID NO: 66563 - DNA, 120 bp, synthetic construct
  source 1..120: mol_type = other DNA
aaccctgaaaaatgaacaagcccatcacattctattcatgtggttatagtttacctgaaacctcaactgctccacagaatcagatctctccgcagctcccaaaagtgtcccaagggttag

SEQ ID NO: 66564 - DNA, 120 bp, synthetic construct
  source 1..120: mol_type = other DNA
cttacccaacaaaccaatgagaacagcttgaggtctggaggacccgtgcttgatatctgtccactcttgtatttgagtaaggtagtggaggtcacaggctcacatcataaactttgtact

SEQ ID NO: 66565 - DNA, 120 bp, synthetic construct
  source 1..120: mol_type = other DNA
gtaaccagccgtctaatataaagaattaaggtagcagctgctttccaaatagcgcatttttttcacagacctattaaataagacaaataacatttaaactttatttttaaatttgcagaa

SEQ ID NO: 66566 - DNA, 120 bp, synthetic construct
  source 1..120: mol_type = other DNA
caaaaggcaaacataagaaactcatactgggctggtgaggatgtagagcatggatccagactggagaacctctcacacatgtgcacaaatattcactgcatcattatctgtagtgaaaaa

SEQ ID NO: 66567 - DNA, 120 bp, synthetic construct
  source 1..120: mol_type = other DNA
agactgataagagagtgaaagatttaagtcacctgtgtgggtggccctcaagacccctgcaatgaaaacccaaaggggtatcacagtgttttctggcaagaattggccattgcttaattt

SEQ ID NO: 66568 - DNA, 120 bp, synthetic construct
  source 1..120: mol_type = other DNA
actaccggtatgctccatcatgcctggctaatttttaagtaagaccagttgtctaccaaaaaaatttgaaaattagccaggcatgatggcacataacctgtagtcctagctacttggagg

SEQ ID NO: 66569 - DNA, 120 bp, synthetic construct
  source 1..120: mol_type = other DNA
ggcattgcaatgcttttaattagatttctgatccataggctgcagaatccagtaatgcctgataatccctttagttagctgagggtcttggggagaaggaaggagaaaatggatccaatt

SEQ ID NO: 66570 - DNA, 120 bp, synthetic construct
  source 1..120: mol_type = other DNA
ctaaaatatccctacctcagaggagtcgggctttcaggtatgattaaaaaggcataggtaaacgaaaggtctccctaggtacagctaagggattgagaaaaatatcgagtcagaggcttt

SEQ ID NO: 66571 - DNA, 120 bp, synthetic construct
  source 1..120: mol_type = other DNA
gtggatgctgcctgcttggctgtcagaaagggctccctaatttcttcccccttttggtaggtgccataataagataaacatttcatctccaaatgtctcagtgacctgtaaagccgcctg

SEQ ID NO: 66572 - DNA, 120 bp, synthetic construct
  source 1..120: mol_type = other DNA
gtgttctcatcatttagctcccacttataagtgagaacatgcgatatttggttttctgttcttgtgttagtttgctgagaataatggcctccagctccatccatgttcctgcaaatgcac

SEQ ID NO: 66573 - DNA, 120 bp, synthetic construct
  source 1..120: mol_type = other DNA
ctctgctaaggtggtgcaaatatagccacagaaaatagtaaaagaatgggtgtggccatgttccaataaaacttgatttataaaaataagcctgcttcatgggctatagtttgccaactc

SEQ ID NO: 66574 - DNA, 120 bp, synthetic construct
  source 1..120: mol_type = other DNA
acaagctcctggattcactgatgttttgaatagttttttgcatctctatctccttcagttcagctctgattttggttacttttttgtcttctgctagctttgggttttgtttgctcttgc

SEQ ID NO: 66575 - DNA, 120 bp, synthetic construct
  source 1..120: mol_type = other DNA
aggtgcatgatgctcatctgtcttggcctagagaagttgttcttaaactatgatctatggaccagccacatcactatcagcaccaccaaggaactcataagaaatgcaaattattaggct

SEQ ID NO: 66576 - DNA, 120 bp, synthetic construct
  source 1..120: mol_type = other DNA
aagaaggcagtggtccagaagtcccaggcagtggagccgaggaaggtgcaagaagctgcttccacctgaaaataattcaatcatagatatatcttttttcttgttattcttgtcattgtt

SEQ ID NO: 66577 - DNA, 120 bp, synthetic construct
  source 1..120: mol_type = other DNA
tcaggaagtcattacttccagtaggttatgttctggtcattcattcctctatcactattaccacccacagagctcatatgagctatgctggccctcaacatttctgatggaagagaataa

SEQ ID NO: 66578 - DNA, 120 bp, synthetic construct
  source 1..120: mol_type = other DNA
tcatcactttttgtaaatcttatgtgtttcactttttttttttcttgagacagtctctgtctgttactcaggctggagtgtagtggtgcaatctctgctcacagcaacctctgcctcctg

SEQ ID NO: 66579 - DNA, 120 bp, synthetic construct
  source 1..120: mol_type = other DNA
gatggagtgatgcaccagtgatgattccctggttccacagatgtattgggttatgtaggaaaatgtcttgtctgaaggaaatacatagcaaagtcttaaagggtggaactatgaggtcat

SEQ ID NO: 66580 - DNA, 120 bp, synthetic construct
  source 1..120: mol_type = other DNA
tgaaactgaagcctgaattaggataaatgtacaaccttaaataccccagaaccactcaggatcaattctcttcaaagtaggatgaagacaagatcacatcacctggggaattgctccgag

SEQ ID NO: 66581 - DNA, 120 bp, synthetic construct
  source 1..120: mol_type = other DNA
aaggatattgagcccagaagattttaaaccaaaggagatgaaatttggaacgatccatctgagaccctgaggagagttgccagagcattgtgtagtgaaaggaaatccatgaggtgcctg

SEQ ID NO: 66582 - DNA, 120 bp, synthetic construct
  source 1..120: mol_type = other DNA
ggggaggggcagatgagccaacacttgatttttttgtcccaaattgtgaagacagttagagattaaccctgaattagggtttatcccacctactgagtcaagatatgactaaaaaatgat

SEQ ID NO: 66583 - DNA, 120 bp, synthetic construct
  source 1..120: mol_type = other DNA
atgggtatttctgaagggatgaaggtgtttctgtgttcattgtgatccaaactatttctagacctaggggcctttgtaaacaatttgtgcccactgaccaaggatcactgtggcagaaag

SEQ ID NO: 66584 - DNA, 120 bp, synthetic construct
  source 1..120: mol_type = other DNA
aagtcagtggcttttagtatatgtacagataagtggagccaccatcacaatgaattttagagcattttcatcacttcaaaaagaaaccccaccttccctagctgttaacctcctatgcac

SEQ ID NO: 66585 - DNA, 120 bp, synthetic construct
  source 1..120: mol_type = other DNA
atttgagttaatatttttgtatgctttggggtaagggttctaatttattattttgcaagtggtgatccacgtgtacgttgttgacccagtgtgttcaaagactgtctcttcctcattgaa

SEQ ID NO: 66586 - DNA, 120 bp, synthetic construct
  source 1..120: mol_type = other DNA
acagacaaaaaagtttgaaaacacataaaatctaaggattacatgcatctcctccacaccaccgtggtgtttgcaggtttcccctccttctcagtgttttttgatgggaggatgctgact

SEQ ID NO: 66587 - DNA, 120 bp, synthetic construct
  source 1..120: mol_type = other DNA
ctttttataagggatgaaaattcttcccagaatctctgctcatccctcactccctgacatcttattgtggaaccaaactcatgtccccctaatttctgttcctgtcctgggctgagagaa

SEQ ID NO: 66588 - DNA, 120 bp, synthetic construct
  source 1..120: mol_type = other DNA
gtgtccccagggtcccagatcagagcagggtagcatcaacttacctgcagataatacatttctctttggtggccatactattacaaaacgtatttttgggacaatttccaaaattttaaa

SEQ ID NO: 66589 - DNA, 120 bp, synthetic construct
  source 1..120: mol_type = other DNA
accctaagagaagaatcatgggaaagagacctgcctataaagtactagaatcaaggttaaacaccggacttcttcttcaagtcgcccactttggtctctttcaagtgtactttcctttct

SEQ ID NO: 66590 - DNA, 120 bp, synthetic construct
  source 1..120: mol_type = other DNA
tggattttcagtcttggactcaagtcctcatgatctccagaggactgcaacagctctaagctaaggacattagtgtcatatccactaaaaactcttccaggaaaaaatgtggggcaaaat

SEQ ID NO: 66591 - DNA, 120 bp, synthetic construct
  source 1..120: mol_type = other DNA
tggaagcaaagggagagggtgagcaaatgtccccagggctcttgctgagccagattctgttctgatgacaaagaaatagagcacatgctcaacaaataatatatgcatacatattatgta

SEQ ID NO: 66592 - DNA, 120 bp, synthetic construct
  source 1..120: mol_type = other DNA
cagaagattctcatggcaggtcgcaggagtagacaaatcccaaaccaagctgacctgatacaattaagcccgagaatctctaacataggtacacacaactttaattgattctttcacttg

SEQ ID NO: 66593 - DNA, 120 bp, synthetic construct
  source 1..120: mol_type = other DNA
cttaatgaagttttcttgctatgaacccagagttgctcgtaagacgtgatagcacattcgagtatattctgggacaatctgtaactggcaaagttttgagccttgtggaaagagcaacct

SEQ ID NO: 66594 - DNA, 120 bp, synthetic construct
  source 1..120: mol_type = other DNA
ttggaggtttatgttatgacttgtaacactgtgggaggggtactgtaactctgttgacagtagtaagttgcaaaatcttcaggttgcagactgctgatggtgagagtgaaatctgtccca

SEQ ID NO: 66595 - DNA, 120 bp, synthetic construct
  source 1..120: mol_type = other DNA
ttcatgcatagggatattcagaaaatttaggaaacagctgaattatctaggaaagacagcgtcatcagaagggtctttataatagggaggagtgggggtaacagtcagagaggaataggg

SEQ ID NO: 66596 - DNA, 120 bp, synthetic construct
  source 1..120: mol_type = other DNA
acctcccgagtttaagggattctcctgtctcagcctcccgagtagcttggactacaggcacgtgccaccatgtctggctaattttttgtatttttcagaatttctgaaaaattttgtatt

SEQ ID NO: 66597 - DNA, 120 bp, synthetic construct
  source 1..120: mol_type = other DNA
ccagcttttggtggcttcaactttctttggcttgagtccacatcacttcaatctctgccactgtcttcaaattgccttctcttctgcagactttgttaaaatgtctgtctatgtctatct

SEQ ID NO: 66598 - DNA, 120 bp, synthetic construct
  source 1..120: mol_type = other DNA
actggtcatgacaacgctgaccagaacaggatctggacaaaacaggatgcactacagaaactggcccaaaccagctagaacaaagatggtgacaaaaacgacctctagagcacagtgtga

SEQ ID NO: 66599 - DNA, 120 bp, synthetic construct
  source 1..120: mol_type = other DNA
atggaaagctccaggtttgttttttttttttctgtttttgtttttagtctttagaagaaaacagctttctctccactctgtcccacctcatgctgctgaggatggctgggcaggcaatga

SEQ ID NO: 66600 - DNA, 120 bp, synthetic construct
  source 1..120: mol_type = other DNA
ccttagcctgtatcaggatcttgttctgttgattcagtcttttgtgtctctacaccgtgttatcacatgtgacagacatcactcattactcgggttcgtgtaaatttatttggcagaatg

SEQ ID NO: 66601 - DNA, 120 bp, synthetic construct
  source 1..120: mol_type = other DNA
acatccccacccaccataatcaagggcagtgtaattgaacaatagctgatctctcttatgttctcttcatgctcccattcctgcagtctgcccaatctcaaattctgaactttggaaaat

SEQ ID NO: 66602 - DNA, 120 bp, synthetic construct
  source 1..120: mol_type = other DNA
aggtttctgttcagggctgtaccactgtggaaggaaactctatacgttgcatgcagtaataaactccaacatcctcagcctccaccctgctgattttcagtgtgaaatcagtgcctgacc

SEQ ID NO: 66603 - DNA, 120 bp, synthetic construct
  source 1..120: mol_type = other DNA
aaaaaaaaaaaaagaagaaggtggtgaagaattttggcctgcattctttccagtaatcatgatgagaggaactgattcttagagccgctgcagccatcttaagaccatgaggcagtgagc

SEQ ID NO: 66604 - DNA, 120 bp, synthetic construct
  source 1..120: mol_type = other DNA
taagatccaagcatgggaaccatttatcaaagagccaagaaacctgagttgattcttagataggaagccccatctcatcagtggccaccaccatctgtcattcaagttgagattcacctt

SEQ ID NO: 66605 - DNA, 120 bp, synthetic construct
  source 1..120: mol_type = other DNA
tgttatttcactctttaaattcagttagtagtgcagaacctagcacttagtagatactcaaaaattatttgctgaataaaaaaaggttaaacatgtaatatatacaaaatgtactggaaa

SEQ ID NO: 66606 - DNA, 120 bp, synthetic construct
  source 1..120: mol_type = other DNA
tgtgattttttagttgatgctctctttctacacacacacacacacacacacacacacacacacgcaatttatacagaaggaaatctggagaatatatgtgggaatggatattaagtgtgt

SEQ ID NO: 66607 - DNA, 120 bp, synthetic construct
  source 1..120: mol_type = other DNA
ccctttggggaagactgggaaaaagattaactatgtaagtttttggcaatgtagcagcgtacttccccaagatcacccagcctccccttcacttaggggttgtgggcctgtgaactggct

SEQ ID NO: 66608 - DNA, 120 bp, synthetic construct
  source 1..120: mol_type = other DNA
ttgtatttctttttttagttgagacagggtttcaccatgttggccaggctggtccctgaccttgtgatccacccgcctcggcttcccaaagtgctgagatgacaggcatgagccaccccg

SEQ ID NO: 66609 - DNA, 120 bp, synthetic construct
  source 1..120: mol_type = other DNA
caccatggactactacgcaaccctgaaaaggaacaaaatcacggttgtttttttttttttttttctttttcttttttttttttttttttgcagcaacatggatgtagctggaggccatta

SEQ ID NO: 66610 - DNA, 120 bp, synthetic construct
  source 1..120: mol_type = other DNA
ccatcacactcactgacctgccctcctccttcctctcgctctccggggcccctgtggaaagagggtcttccctccgtgcagcaggaacccccaggaccatccccatgctcctgggttctg

SEQ ID NO: 66611 - DNA, 120 bp, synthetic construct
  source 1..120: mol_type = other DNA
ccattcgagtccatgcaatgatgagtccattcaattccgttcattgatgattccattcgatatcgttcgatgcttctattcgattccaatcaatgattccatctgattctgtgcaatgac

SEQ ID NO: 66612 - DNA, 120 bp, synthetic construct
  source 1..120: mol_type = other DNA
ttcggtgatgattccattcgagtacattcaatgattccattcaagtccagtcgattattccatttgattacattcgattccattcgatgatgattccacttgagtacattcaatgattcc

SEQ ID NO: 66613 - DNA, 120 bp, synthetic construct
  source 1..120: mol_type = other DNA
gaaacgggaatatcttcatataaaatctagacagaagcattctcagaaacatctgtgtgatgtttgaattcaagtcccagagttgaacattccctttcatagagcaggtttgaaatactc

SEQ ID NO: 66614 - DNA, 120 bp, synthetic construct
  source 1..120: mol_type = other DNA
ccttggggtgttagcattcaagtcacagagtggaacattcactttcatagagcaggtttgaaacactatttttgtggaatctggaagtggacattttgatcgctttgaggcctatggtga

SEQ ID NO: 66615 - DNA, 120 bp, synthetic construct
  source 1..120: mol_type = other DNA
ctagacggaagcagtcacccaaacttattgggaatgtgtgtactcaactaaccgatttggattttcctttgatagagcagttttgaaacactctttttgtggaatctgcaagtggatatt

SEQ ID NO: 66616 - DNA, 120 bp, synthetic construct
  source 1..120: mol_type = other DNA
gctttgaggatttcgttgggaatgggaatatgttcatataaaatatagacagaagcattctcaggaacatctctgtgaggattgcattcaagtcccagagttgaacattccctttcatag

SEQ ID NO: 66617 - DNA, 120 bp, synthetic construct
  source 1..120: mol_type = other DNA
gaatttgcatgtggatatttggacagcattgaggatgtcgttggaatcgggaaaatctgcatatgaaatggacacacaagcattctcagaaacctctttgggatgttagcattccagtcg

SEQ ID NO: 66618 - DNA, 120 bp, synthetic construct
  source 1..120: mol_type = other DNA
ttttggatcgctttgaggcctgtggtgaaaaagggtatatcctcgcattaaaaactagacagaagtattctcataaactaatttgtgatgtgtttgctcaacttacagagttaaaccttt

SEQ ID NO: 66619 - DNA, 120 bp, synthetic construct
  source 1..120: mol_type = other DNA
tctgaatcacaagggtactttggcacctaatttaatcaagctctttgtatcatcatctacagtttaattacttaacaaacatttctttgtgtgagaaagattgagcaggttattgtgctt

SEQ ID NO: 66620 - DNA, 120 bp, synthetic construct
  source 1..120: mol_type = other DNA
gaaaccccgtctctactaaaaatacaaaaattagttgggcatggtggtggacacctgtaatcccagctacttgggaggctgaggcaggaaaatcgcttgaacccggaaggcggaggttgc

SEQ ID NO: 66621 - DNA, 120 bp, synthetic construct
  source 1..120: mol_type = other DNA
gttcgagatcagcctgggcaacatgacgggactgatttctactaaaataaaataaaataaaataaatttgctgggtatggtggtgtacgccagtgatcccagatactcaggaggctaaga

SEQ ID NO: 66622 - DNA, 120 bp, synthetic construct
  source 1..120: mol_type = other DNA
ggagtgaccttccccagatcccaagggcagtgggagacagccaggccgctctcctcctcgtcggcactcagtctcaccaccgaaggctccaaatctctgggcaaaggttatagcacctgc

SEQ ID NO: 66623 - DNA, 120 bp, synthetic construct
  source 1..120: mol_type = other DNA
tttttgactgcttctaagagtaggaacaaaataagactttaagtcgtggcttgaaaagaaagatacacattttcagaagaaagaaaggggagggctgcagggaacctgtcttggagggag

SEQ ID NO: 66624 - DNA, 120 bp, synthetic construct
  source 1..120: mol_type = other DNA
atagatacatagatatgtagatagatatgtacctctagctctacctatggtatttctttctgactcgtcgtcactgttgctcaggctggagtgcagtgctgctatctcactcacttcaaa

SEQ ID NO: 66625 - DNA, 120 bp, synthetic construct
  source 1..120: mol_type = other DNA
gagagggcagagggaagaaaatgcctttccaaaaatagtatgccttgatatgactgttcatgaagtaacaactagcgttcttaaaagaaccttagtgccagggatacagtgagcttatac

SEQ ID NO: 66626 - DNA, 120 bp, synthetic construct
  source 1..120: mol_type = other DNA
catgtagatttgagaacgccccaagtcagcaacgaggattcattagaaagtgtgcaaggtaattaaaaaagagctgctgaaactgagtagggtgggagtttgcacacatcaataagcaag

SEQ ID NO: 66627 - DNA, 120 bp, synthetic construct
  source 1..120: mol_type = other DNA
cctatatgtaatctcactgtaatttttttggttttttttttttggttttgttttgagatggagtctcgctctgtcacccagagtggcccgcagtggcatgatctgggcttattgcaccct

SEQ ID NO: 66628 - DNA, 120 bp, synthetic construct
  source 1..120: mol_type = other DNA
actttttttttttttttttttgagacgaggtctcattctgtcacccaggctggagtactgtggtgcaatcttagcttattttagccttaaactcccagactgaaggggtcctcccatctc

SEQ ID NO: 66629 - DNA, 120 bp, synthetic construct
  source 1..120: mol_type = other DNA
agtttccccttctctctcctgctgcttcccctggtgattttcccaccatccaggaaacaacactttatctttcacctatccaggatttggaggtataaaaaaatcagaaattgagatgct

SEQ ID NO: 66630 - DNA, 120 bp, synthetic construct
  source 1..120: mol_type = other DNA
gaagaacacctgtgcacatgaatgttccacatcctgataccccatggtcagtcagtacctggattagctccacatctggtttatgggacttttccttcagctcctcatacattcctttta

SEQ ID NO: 66631 - DNA, 120 bp, synthetic construct
  source 1..120: mol_type = other DNA
agcttattgtaactacagacatctaaataattatttatgttagctctataagagatgcatatctgagagtatattcttatagaagcaaagatttcattttcagtagaagcttatgctcat

SEQ ID NO: 66632 - DNA, 120 bp, synthetic construct
  source 1..120: mol_type = other DNA
gaatttcaacctccactgacatcttaactctgttctctttcccttctaatgcatattttcccccgaaggccccatgttacactccttatgcaccctctatttaagatctggtttaattta

SEQ ID NO: 66633 - DNA, 120 bp, synthetic construct
  source 1..120: mol_type = other DNA
ggtttactaatatgtttgaaaatcaacctgaggttagtgccttctcagtataccttcattctcttaaacatttctggctattttcatattttgttctcatgaatataagcatcacagaag

SEQ ID NO: 66634 - DNA, 120 bp, synthetic construct
  source 1..120: mol_type = other DNA
tctgccctttgttctattcaggagctactggggagggaaacctactttacagagaccaattcaagctgacacataaaatttactatcacactttcattttcttacagattctggggattt

SEQ ID NO: 66635 - DNA, 120 bp, synthetic construct
  source 1..120: mol_type = other DNA
tgcacacatcaataagcaagagtgcaggataagataaaaagcggctgggaccatatggcttctacagctcttaaaataaccagcccaaattctcttccaggatcaaattccatactgaga

SEQ ID NO: 66636 - DNA, 120 bp, synthetic construct
  source 1..120: mol_type = other DNA
agatatgtagatagatatgtacctctagctctacctatggtatttctttctgactcgtcgtcactgttgctcaggctggagtgcagtgctgctatctcactcacttcaaattttgccccc

SEQ ID NO: 66637 - DNA, 120 bp, synthetic construct
  source 1..120: mol_type = other DNA
tttgtcattcaaaggcatctaagtacgcaaggaaatgatattccaccatttgaaaggaaagcagaaaaagagtacaaacagatccacagaggttcattagtagaaatatcactgttagat

SEQ ID NO: 66638 - DNA, 120 bp, synthetic construct
  source 1..120: mol_type = other DNA
tcatgtgactgttttcttattcctgcagcacatatttcccgggataataaaataaccacttcttgcatccccctcgtttgaagttctgagacagctactctttggttctgatgatctcag

SEQ ID NO: 66639 - DNA, 120 bp, synthetic construct
  source 1..120: mol_type = other DNA
cggaatttccttttctctgttccacatctgctaagtcacatttcatcaagtgtaagttccaatatttcttcagggaattctttctttagctcctgggctagattaggctatttgttttaa

SEQ ID NO: 66640 - DNA, 120 bp, synthetic construct
  source 1..120: mol_type = other DNA
tattgtctacttcacttatttatttatcatctgtctctccccagtagaaggtaagttacatgagggcaggaattcttggtagttttgcttactgctgtatccccagtgcctagaacagtg

SEQ ID NO: 66641 - DNA, 120 bp, synthetic construct
  source 1..120: mol_type = other DNA
gaaggacaataacaaacacaatcttgtacagaccaagagttcagtagcaccaaatccttgtctaatggtctgctgagaaccagttctgggaaggaagatcttcaagaatggatagtgact

SEQ ID NO: 66642 - DNA, 120 bp, synthetic construct
  source 1..120: mol_type = other DNA
aaggcatctcagatgcctgggtcctgacctctaaaccagggtcttttctgcaagtgaagatgggaaagggtgagtgctggcgcagtctcttcctctctctttgtggaaaggtatgatgag

SEQ ID NO: 66643 - DNA, 120 bp, synthetic construct
  source 1..120: mol_type = other DNA
tgcttaagtccgagtagcacgtttgaggcagttgatctgcccacactgtaatgggcattgccttaggagggagttaatggcctattgctatgctacaagtcttctttaaaaaaaaaattc

SEQ ID NO: 66644 - DNA, 120 bp, synthetic construct
  source 1..120: mol_type = other DNA
aagttttgggtaatttgttacatggcaatagagaactaacactaaactcttattctcacatctgctctgataaattccactcttggtcatataggtgttctgacaggagactcctcagag

SEQ ID NO: 66645 - DNA, 120 bp, synthetic construct
  source 1..120: mol_type = other DNA
cgtaatctgagcatccaccttatatgggattgcttttcacgatgaccaccatgaatagccagattataacatgttagaaaacaaaacacacaggggaacttaccaaaaggagtagaagat

SEQ ID NO: 66646 - DNA, 120 bp, synthetic construct
  source 1..120: mol_type = other DNA
aagcagaaaataatagcatcaacatcaacaaaaaggacatccacaccaaaaccccatctgtaggtcaccaacatcaaagaccaaaggtagataaaacaacaaacatggagagaaaccaga

SEQ ID NO: 66647 - DNA, 120 bp, synthetic construct
  source 1..120: mol_type = other DNA
caaaaacatgccaaattataaagaccattgatgctatgaagaaactgcatcaattaatgggcaaaatagccagcttacatcataatgtcaggatcaaattcacacataacaatattaacc

SEQ ID NO: 66648 - DNA, 120 bp, synthetic construct
  source 1..120: mol_type = other DNA
catatagtaagagtttttccaacaagaacagcaactctttcccactgacttgtgatgcaccttttatcatagatgaaatttccctctaaccagggatctcccctctccatgctgagttgt

SEQ ID NO: 66649 - DNA, 120 bp, synthetic construct
  source 1..120: mol_type = other DNA
atctgggtctgagagggatgcttcttttcaaatgtccaaattgcagcaaacaaccaccaccaccataacaaaatacgtttcttccaaagaagcagcacatctgacagctgaactctgaga

SEQ ID NO: 66650 - DNA, 120 bp, synthetic construct
  source 1..120: mol_type = other DNA
ctaggcttcacattaacaaaggaaatgacactgggaggcctgacttgtttttcatgactgcaactgtctcttgatgatcttctctcctttctaatcgtccccagctcagaattttgctag

SEQ ID NO: 66651 - DNA, 120 bp, synthetic construct
  source 1..120: mol_type = other DNA
ctccaaaagacctgcagctgagggtcctgactgttagaaggaaaactaacaagcagaaaataatagcatcaacatcaacaaaaaggacatccacaccaaaaccccatctgtaggtcacca

SEQ ID NO: 66652 - DNA, 120 bp, synthetic construct; identical to SEQ ID NO: 66645
  source 1..120: mol_type = other DNA

SEQ ID NO: 66653 - DNA, 120 bp, synthetic construct
  source 1..120: mol_type = other DNA
aggctggtgtctcctagtcagtcatcttgctgatatcactcccctaggacatcattttgatgatgcggtaacactatcatggaataatacttgggcatgttgaggtaagaattagagtgt

SEQ ID NO: 66654 - DNA, 120 bp, synthetic construct
  source 1..120: mol_type = other DNA
tgggcattcgaagaggcagaaaacaacaacaacaacaaaaaaaaaacaaaaaaacaaccatggtaatcttacataataagaacaagattggaagattaacacttcccagtattgaagctt

SEQ ID NO: 66655 - DNA, 120 bp, synthetic construct
  source 1..120: mol_type = other DNA
gcattaggagataggaatgtgcgattgtggataacctcaaatgagatataagttattgccccaacttgcattttgtgagttagagtcacaggagcttatcacattgctactaatcaccaa

SEQ ID NO: 66656 - DNA, 120 bp, synthetic construct
  source 1..120: mol_type = other DNA
tttcttcagagataaaaatcaggcttgcttcagcaatgtagtttacaaactctgttcccagagaacaatgtagtgatagctacataaccacaaaaagtcattatgcccatgcttgcgaac

SEQ ID NO: 66657 - DNA, 120 bp, synthetic construct
  source 1..120: mol_type = other DNA
gtcagggtgaagacaataaaaggagcagttttgctgttacgctaattaagtatatggtgaaaattaatcaccaattttttcttgactttggaaatacagaattgtagattcatgtaggct

SEQ ID NO: 66658 - DNA, 120 bp, synthetic construct
  source 1..120: mol_type = other DNA
agacgcaaaatggtggcgccaacacatttcaaatctgctacattttgaagacacttattggagaaaagaccttctcatcatttttctcttacaggaaaggaaataacacgtacagttgac

SEQ ID NO: 66659 - DNA, 120 bp, synthetic construct
  source 1..120: mol_type = other DNA
tcatctcaacatttcatttcgtcatttcactgtatctcatttcatcttttcatctcatgatttcatttcatctcatttcatttcatctcatttcatttcatctcatcatttcatttcatc

SEQ ID NO: 66660 - DNA, 120 bp, synthetic construct
  source 1..120: mol_type = other DNA
tcatttcatctcatttcaacatttcacttctttcatttcatttcatcatttcatctcaacatttcatttcatttcatcatttcatttcatctcatcatttcatcatttcacttcatctca

SEQ ID NO: 66661 - DNA, 120 bp, synthetic construct
  source 1..120: mol_type = other DNA
ttgtttgcctgaggagttgggcaaaatccaagtgacttctaataggcacagggtttcttaaggctgatggaaacgttctgtaagtgattcatgttataaaccccgaatatctgagacaag

SEQ ID NO: 66662 - DNA, 120 bp, synthetic construct
  source 1..120: mol_type = other DNA
gcaagtaggaaaaagactatgttttagtttcacctttcaatgagtaaaattgccagaggcttcagtgcagtcttgggggtagaaaatactttgaagcaaattgttcttgttctgtgaata

SEQ ID NO: 66663 - DNA, 120 bp, synthetic construct
  source 1..120: mol_type = other DNA
agaaattttccagtctttaagttctgctttccttttgattttctttaattcatatctctcttgtcaccttttatggtaagcagtcaagagaagccgtgttgcaccctcaacactttgctt

SEQ ID NO: 66664 - DNA, 120 bp, synthetic construct
  source 1..120: mol_type = other DNA
aggggtcaccaaagcagttgtccacaaaagcagcagctggcttgatcaaaagaaaaaaaaaatacctatggtgtttggaaaggttttgtttcatgctgaatgaacgttgtgggacacaca

SEQ ID NO: 66665 - DNA, 120 bp, synthetic construct
  source 1..120: mol_type = other DNA
gcactctgtttgtctgttgttggtgtataagaatgcttgtgatttttgtacattgattttgtatcctgagactttgctgaagttgcttatcagcttaaggagattttgggctgagacgat

SEQ ID NO: 66666 - DNA, 120 bp, synthetic construct
  source 1..120: mol_type = other DNA
agtcttgggagagtgtatgtgtcgaggaatgtatccatttcttctagattttctagtttatttgcgtagaggtgtttgtagtattctctgatggtagtttgtatttctgtgggatcggtg

SEQ ID NO: 66667 - DNA, 120 bp, synthetic construct
  source 1..120: mol_type = other DNA
agtggggtgttaaagtctcccattattaatgtgtgggagtctaagtctctttgtaggtcactcaggacttgctttatgaatctgagtgctcctgtattgggtgcataaatatttaggata

SEQ ID NO: 66668 - DNA, 120 bp, synthetic construct
  source 1..120: mol_type = other DNA
tgtgtcttggagttgctcttctcgaggagtatctttgtggagttctctgtatttcctgaatctgaacgttggtctgccttgctagattggggaagttctcctggataatatcctgcagag

SEQ ID NO: 66669 - DNA, 120 bp, synthetic construct
  source 1..120: mol_type = other DNA
tattttgatccttttcgcctcagattattctaagatcatagcaagactcgctgagctccgtgaagactgaactacaaactgggatggcatgaaacaatgggattcatgagagagctagtg

SEQ ID NO: 66670 - DNA, 120 bp, synthetic construct
  source 1..120: mol_type = other DNA
attataaacagaggaagctcctgctgctgtctacagaccctttgatttcagtgaccaagccgaactagctccctcccagcactgctgtgggtgtttgagttgtgagttggggagcctgcc

SEQ ID NO: 66671 - DNA, 120 bp, synthetic construct
  source 1..120: mol_type = other DNA
ttttgtaagaaacagccaaagtcttccaaagtaatggtgctgctttgcttttccaccagcaatgagtgagaattcctgttgctccacattctcaccagcattcgatgttatcagtgttct

SEQ ID NO: 66672 - DNA, 120 bp, synthetic construct
  source 1..120: mol_type = other DNA
gacaattctgaaatctacattaaacataccagctaattagtttctattacattccaataaatgtataaagaattagaacaaatgaactaattttccaaaactctcctgtaaacatgtaga

SEQ ID NO: 66673 - DNA, 120 bp, synthetic construct
  source 1..120: mol_type = other DNA
cctctccctgccctctcctgcttgtcaaggtgaggaataaccatggcagtgtaggtgggaaagtatgaacaggtttgacattttaaaggaggaattatattaacatcagacttcattcat

SEQ ID NO: 66674 - DNA, 120 bp, synthetic construct
  source 1..120: mol_type = other DNA
cctatagagttgtttgagctccttatgtattctagttattaatccattgtcagatgagcagtttgcaaatattttctcccattctgtgggttgtctctttacttgttgattgtttccttt

SEQ ID NO: 66675 - DNA, 120 bp, synthetic construct
  source 1..120: mol_type = other DNA
gccaacagtaaacaatctgaaaaagaaatcaaggaaataatcccatctacaatagctacaaataaaataaaatatctagaaataaacttaaccaaagaaatgaatgatctctacaatgaa

SEQ ID NO: 66676 - DNA, 120 bp, synthetic construct
  source 1..120: mol_type = other DNA
cagacacctcaccaagaatatataaagatggcaaataagcattaccaaaagcagctcaatagcatatgtcatcaggggattgcaagttacaacaacagtgaggtagctgtgtggctgtga

SEQ ID NO: 66677 - DNA, 120 bp, synthetic construct
  source 1..120: mol_type = other DNA
caaaactaccattggcactgccagtggctgtaccattatgccttccacccgcagtgataagctcctgttgttcctaatcctccatagcaattgctattgtcatttttttatatttgagtt

SEQ ID NO: 66678 - DNA, 120 bp, synthetic construct
  source 1..120: mol_type = other DNA
ttttatcttgtccttccattcaatgggtcttaagaaatgttttctagaacctcaaggggtggacgggacactttctttagggaaaggttttgtcacgtacatggcatgttccttggtccc

SEQ ID NO: 66679 - DNA, 120 bp, synthetic construct
  source 1..120: mol_type = other DNA
gatagttatggtgagtgacagttgctagaagaacactgtgacaatttctgttattttcaattgatccagtctcttgcccaccacacagactccttgatggaaagcccttcaggaataaga

SEQ ID NO: 66680 - DNA, 120 bp, synthetic construct; identical to SEQ ID NO: 21171
  source 1..120: mol_type = other DNA

SEQ ID NO: 66681 - DNA, 120 bp, synthetic construct
  source 1..120: mol_type = other DNA
gcctagagtatcagatctggatatttgggtaaagatgcagacaaattttgagttggaaaagaaagaacttaactcattactaaaagatgaccttgatagctatatatatgggaaacaaga

SEQ ID NO: 66682 - DNA, 120 bp, synthetic construct
  source 1..120: mol_type = other DNA
tcttatccaaggctcactttaattcttcttttttttctttagggacagggtctgtctcactctgttgcccaggttggagtgcagtggtgtgatcacagctcactgcagcctcaatctcct

SEQ ID NO: 66683 - DNA, 120 bp, synthetic construct
  source 1..120: mol_type = other DNA
aaagaaaaatggggaggaacgaacttctggattccctcggaatgttaggagacccttttcccgttacttgagccagaaatagagggcatcttctggagctctttctatctgcaccctggt

SEQ ID NO: 66684 - DNA, 120 bp, synthetic construct; identical to SEQ ID NO: 21172
  source 1..120: mol_type = other DNA

SEQ ID NO: 66685 - DNA, 120 bp, synthetic construct; identical to SEQ ID NO: 21173
  source 1..120: mol_type = other DNA

SEQ ID NO: 66686 - DNA, 120 bp, synthetic construct
  source 1..120: mol_type = other DNA
tcgcccccatccccgcccagaagactttggtagctgcctttgcttaaaaaaaaaaattctaaagttcttacaaatcgttagtatggcttgcaatttttaaccttttccacagatgtttta

SEQ ID NO: 66687 - DNA, 120 bp, synthetic construct
  source 1..120: mol_type = other DNA
aagaaaaactagagaaagaattatatttttttccttttttcttttttggagacagagtctcgctctgtcacacaggctggagtgcagtggcgcaatctctgctcaccacaacctctgcct

SEQ ID NO: 66688 - DNA, 120 bp, synthetic construct
  source 1..120: mol_type = other DNA
caatcaatcaatcagtgttttaagctgaaattgatgggattatctgaccagtttgaccacatttgagggtttaaattgctgagtttaagtaagcaagtagtaacacaacatacaagcaaa

SEQ ID NO: 66689 - DNA, 120 bp, synthetic construct
  source 1..120: mol_type = other DNA
atttctctctcttttttttttaattcaaacggagtctcaccctgtcgcccatcttgcacaatcaaatgaatctccctccccctaaaatcctccaaaaaagctgctgttctcaacaaaccc

SEQ ID NO: 66690 - DNA, 120 bp, synthetic construct; identical to SEQ ID NO: 21174
  source 1..120: mol_type = other DNA

SEQ ID NO: 66691 - DNA, 120 bp, synthetic construct
  source 1..120: mol_type = other DNA
cacatctgtaatcccagcactttcggagactgaggcgggtggatcacttgaagccaagagttcgagaccagcctggccaacatacagaaacctcctttctactaaaaatacaaaaattag

SEQ ID NO: 66692 - DNA, 120 bp, synthetic construct
  source 1..120: mol_type = other DNA
tacaaaaatagaaaaattagccaggcatgatggcgggtgcctgtaatcccagctactcaggaggctaaggcacaaaaatcagttgaacccaggaggtggaggttgcagtgagccagaggt

SEQ ID NO: 66693 - DNA, 120 bp, synthetic construct
  source 1..120: mol_type = other DNA
cgcttgagcccagaaggcagaggttacagtgagcaaagatggagccagctgctgcactccagccggagcaagagagacagatactgcctaaaaaaaaaaaaaagcctgcctccctcttaa

SEQ ID NO: 66694 - DNA, 120 bp, synthetic construct
  source 1..120: mol_type = other DNA
aaaaatttggtaaatgtgacatttaatggtaaaatgagtatgtggtcaactctatgtatgtgtttttaagtattacccatttctttctatgaatacttttgagttatctgtatgaatagt

SEQ ID NO: 66695 - DNA, 120 bp, synthetic construct; identical to SEQ ID NO: 21219
  source 1..120: mol_type = other DNA

SEQ ID NO: 66696 - DNA, 120 bp, synthetic construct
  source 1..120: mol_type = other DNA
aactatacatacacattgtaccaatgtcaaaattcctgattttgatactgtgctttggtcaggttaaacaggttgagtatcccttatccaaaatgcttgagaccagaagtatttcagatt

SEQ ID NO: 66697 - DNA, 120 bp, synthetic construct
  source 1..120: mol_type = other DNA
tgtacatgattgttcatagcagttgaacaatagccaaaacctagaaataaccaaaatgcccctcaaaagtgaatggttaaggctgggcacagtggctcacacctgtaatcccagcacttt

SEQ ID NO: 66698 - DNA, 120 bp, synthetic construct
  source 1..120: mol_type = other DNA
cacacactttcttctgtcaggcaaaaaatgctataatcccttatatccataattactgtttgcttacagatcccttcaactaattccctcttttcctcagaaccctcccaactggtttct

SEQ ID NO: 66699 - DNA, 120 bp, synthetic construct
  source 1..120: mol_type = other DNA
ggatgttcacatggacgtcatcaggtcttacataaagttctgactgaatcaagtcaaaaagtttattccatccatcttcaccttcacaatctagaagctgttcctatttagagaggaaaa

SEQ ID NO: 66700 - DNA, 120 bp, synthetic construct
  source 1..120: mol_type = other DNA
gatgacagatgaactttaattttcactaaagattatactattataaaaaaataaaatatgaaatagcagttagaacattcattttaagcttgactatgacaaaactgagtaaccataagg

SEQ ID NO: 66701 - DNA, 120 bp, synthetic construct
  source 1..120: mol_type = other DNA
catcctgaaccccgtctctactaaaaatacaaaaattagctgggcgtagtggtgtgtgcccgtggtcccagctacttgggaggctgaggcaggagaatcgcctgaacccgggaggcggag

SEQ ID NO: 66702 - DNA, 120 bp, synthetic construct
  source 1..120: mol_type = other DNA
agacagagcttgcagtgagccgagatggcgccactgcactccagcctgggcaacagagcgagactccatctcaaaaaaaaaaaagatcgagaccatcctggccaacatgatgaaaccctg

SEQ ID NO: 66703 - DNA, 120 bp, synthetic construct
  source 1..120: mol_type = other DNA
tgcaacctctgactcccaggttcaagcgattcttctgcctcagcctcccgagcagctgggactataggcgtgtaccaacatgcccggctaattttttgtatttttagtagagacaaggtt

SEQ ID NO: 66704 - DNA, 120 bp, synthetic construct
  source 1..120: mol_type = other DNA
taataattcttattccccgtgttataaattatgaatcatctaatgcttatttttatcctgcatacttcctatacttcatgcttaacctctcaaatgatgtcttattcccagttatttcca

SEQ ID NO: 66705 - DNA, 120 bp, synthetic construct
  source 1..120: mol_type = other DNA
ctgaggcaggagaatcactcgaacccaggaggtggaggctgcagtgagccgagatcacgccactgcactccagcctggcgacagagagagacttggtctcaaaaaaaataaaaaaataaa

SEQ ID NO: 66706 - DNA, 120 bp, synthetic construct
  source 1..120: mol_type = other DNA
ctctatgttggtcaggctggtcttgagctcctgaactcaggtgatctgcgcgtctcggcctctcaaagtgctgggattacaggcagtgagccagcatgccctgcctaatataaatctttt

SEQ ID NO: 66707 - DNA, 120 bp, synthetic construct
  source 1..120: mol_type = other DNA
agaggatcacttgagcccaggagttcgaggatgcagtgagttatgatcatgccactgcactccagccagagcaagagtgagactctgcctcccaaaactacatatcaaaaaattgtaggc

SEQ ID NO: 66708 - DNA, 120 bp, synthetic construct
  source 1..120: mol_type = other DNA
aggcgtggtggctcacacctataatcttagcactttgggaggctgaggcgggcggatcgcttaaggtcaggagtttgagaccatcctgaccaacatggtcaaaccccatctctagtaaca

SEQ ID NO: 66709 - DNA, 120 bp, synthetic construct
  source 1..120: mol_type = other DNA
attccattgtatggatgtactgtagttttggagtttttaaaaccagggtcctaaagccaggacattagcttgcttttacttttttttttaaatgctacttcaagtaatttagcaatgatt

SEQ ID NO: 66710 - DNA, 120 bp, synthetic construct
  source 1..120: mol_type = other DNA
ccattgcactccagcctgggtgaaagagcgagactccatcgcaaaaaaaaaaaaaaaaaagaggggccagacatgttggttcacacctgtaatcccagcactttgggaggccgaggtggg

SEQ ID NO: 66711 - DNA, 120 bp, synthetic construct
  source 1..120: mol_type = other DNA
tgcaacagacctttaggattcatcccaagccaaaaatgggggaaaaaatccacaaattccaagagcctaatataaggtaagtatatatcttctatcttcctcactatgctctcagctctt

SEQ ID NO: 66712 - DNA, 120 bp, synthetic construct
  source 1..120: mol_type = other DNA
gtcttactctgtcgcccaggctggagtgcagtggcgtgatctcggctcactgcaagctccgcctcccgggttcacgccattctcctccctcagcctccccagtagctgggactacaggca

SEQ ID NO: 66713 - DNA, 120 bp, synthetic construct
  source 1..120: mol_type = other DNA
aatcacttgaaccagggaggcagaggttacagtgagccgagatcgcaccactgcactccagcatgggcgccaagagcaaaacttggtctcaaaaacaacaacaacaacaacaaaaaatac

SEQ ID NO: 66714 - DNA, 120 bp, synthetic construct; identical to SEQ ID NO: 21175
  source 1..120: mol_type = other DNA

SEQ ID NO: 66715 - DNA, 120 bp, synthetic construct
  source 1..120: mol_type = other DNA
attccaggtaaagcaggcaatgaattccactgtaagccaagccaagtaagatgctgaagactaccattatgtgctcgaatagcacctgaaataaaatttaaaaattggcttaagggtttg

SEQ ID NO: 66716 - DNA, 120 bp, synthetic construct
  source 1..120: mol_type = other DNA
gagccaccgcacccggcctctacactcaacttttaaatgcttctaatgataccactctaacgtagcaatccaaactactttttaacagttgtcctttttagatagctgaaacctgcctct

SEQ ID NO: 66717 - DNA, 120 bp, synthetic construct; identical to SEQ ID NO: 21176
  source 1..120: mol_type = other DNA

SEQ ID NO: 66718 - DNA, 120 bp, synthetic construct
  source 1..120: mol_type = other DNA
gacgatgagaagaaatgctcttaagttgtcagcaacaactttcaatttcagcaaagttcattaagaattagtcctgaggttataatatttgttttgattacactgctaagataacaaaat

SEQ ID NO: 66719 - DNA, 120 bp, synthetic construct
  source 1..120: mol_type = other DNA
gtacagctagagaaattaagtgacttaccttaatggcctctacttgttggcaaatcatattcagtaaagaattccgatcttctgtccatcgaggtggtgtttcgggagaatactgaaaaa

SEQ ID NO: 66720 - DNA, 120 bp, synthetic construct; identical to SEQ ID NO: 21177
  source 1..120: mol_type = other DNA

SEQ ID NO: 66721 - DNA, 120 bp, synthetic construct
  source 1..120: mol_type = other DNA
tttcttaacacaactctgctgccttgacaagatggcagatagatccaatgccgtctagtgtagctatgtggctacttgatctctgctgaagaaaactaaatgacagcaccatacccaaca

SEQ ID NO: 66722 - DNA, 120 bp, synthetic construct
  source 1..120: mol_type = other DNA
tcaaataattttaatcatttaattatatcatgccagaaacagtgctggggaaacttactcttttaaatttaaataactgattttttctttttttcttttttgagatggtgtctcgatctg

SEQ ID NO: 66723 - DNA, 120 bp, synthetic construct
  source 1..120: mol_type = other DNA
gagagagagagaaaaaaaagggcactactactaccatttcagaagtctgtcgtacataaaaggaacaattttgttatttctggctgcctgggagcaatgtattatactggcaagtgcttt

SEQ ID NO: 66724 - DNA, 120 bp, synthetic construct; identical to SEQ ID NO: 21178
  source 1..120: mol_type = other DNA

SEQ ID NO: 66725 - DNA, 120 bp, synthetic construct
  source 1..120: mol_type = other DNA
aaaggatgtcataaataacataaaatgtgttccctggcttaaaataaaaagcacatcaacactcatacagatgtacaaactgtctgctccctctgtttggtctgttttaccaggaaacaa

SEQ ID NO: 66726 - DNA, 120 bp, synthetic construct
  source 1..120: mol_type = other DNA
tattattatcctcattttacatataaggcaactgatgcactgagaggttaagaaacttgcctgtggtcaaaataagcagaagagcaagggtctaaatgcaccccaacactctgtcctcaa

SEQ ID NO: 66727 - DNA, 120 bp, synthetic construct
  source 1..120: mol_type = other DNA
cgtcagagaaatcactggctgaccacatccatgctctatctgatccagagaggggcttcaggttcattgtagtcgttatccaatgattagcacacacttttagtacttgttctcttcgca

SEQ ID NO: 66728 - DNA, 120 bp, synthetic construct; identical to SEQ ID NO: 21086
  source 1..120: mol_type = other DNA

SEQ ID NO: 66729 - DNA, 120 bp, synthetic construct
  source 1..120: mol_type = other DNA
tcaagcgatcctcctgcctcaacctcctgagtagctgctaattataggcacgcaccaccatgcccggctcatttttgtattttcagtagaaacagggtttcaccatgttggccaggctgg

SEQ ID NO: 66730 - DNA, 120 bp, synthetic construct; identical to SEQ ID NO: 21179
  source 1..120: mol_type = other DNA

SEQ ID NO: 66731 - DNA, 120 bp, synthetic construct
  source 1..120: mol_type = other DNA
tgttctgatctactaatgtaaagaagaacttctggctaaaggagtttaataaagtaagccagtcatgaagcatgccatgtatagcaactggtgacagggaaacattctgagagctatggt

SEQ ID NO: 66732 - DNA, 120 bp, synthetic construct
  source 1..120: mol_type = other DNA
cacattcagtgccgcttgagtgtttctaagttccttgctctagctaatgtttctatttaaaaagtagacaaatttgatgactaacaacggagaacacgaaacaaatctggtgaataccag

SEQ ID NO: 66733 - DNA, 120 bp, synthetic construct
  source 1..120: mol_type = other DNA
ctagcaagactttgctgtttgctgataaactgtaaagtgttattttttctgagacagggtctcactctgtcacacaggttggagtgcagtggcacgatcttggctcacagcaacctctgc

SEQ ID NO: 66734 - DNA, 120 bp, synthetic construct
  source 1..120: mol_type = other DNA
gaaggttcttcaaagattgttgagaggaaactgggcctattagattttttttaaaggttaagtatgagattgttcaaaatctattgattcggccttacagaggtacacaaaatgaaaata

SEQ ID NO: 66735 - DNA, 120 bp, synthetic construct; identical to SEQ ID NO: 1095
  source 1..120: mol_type = other DNA

SEQ ID NO: 66736 - DNA, 120 bp, synthetic construct
  source 1..120: mol_type = other DNA
gtgtgtggagggtccagaaaaccaaactggcggttttcacggtggccaggttttctgatctcaccttaatttgctccataaggactgcattggttgcctctatttcccgaagcaggccgt

SEQ ID NO: 66737 - DNA, 120 bp, synthetic construct
  source 1..120: mol_type = other DNA
gtggcaggacagatctattaggagcagcaaagtacaggggaaaagcatgtacttttcagacagctatgagtctgaattttgttccaccatttaccagcttcaatttttctcttaaccagt

SEQ ID NO: 66738 - DNA, 120 bp, synthetic construct; identical to SEQ ID NO: 21320
  source 1..120: mol_type = other DNA

SEQ ID NO: 66739 - DNA, 120 bp, synthetic construct
  source 1..120: mol_type = other DNA
atttataacaggaagaagtctctctctttcactacctggcttcaagaaaatgaactgcagcaagacgttcttcaagtattccaggttagctgcagacttctctcgctcttgattcctttc

SEQ ID NO: 66740 - DNA, 120 bp, synthetic construct; identical to SEQ ID NO: 21180
  source 1..120: mol_type = other DNA

SEQ ID NO: 66741 - DNA, 120 bp, synthetic construct; identical to SEQ ID NO: 21214
  source 1..120: mol_type = other DNA

SEQ ID NO: 66742 - DNA, 120 bp, synthetic construct
  source 1..120: mol_type = other DNA
cttttttttttttttttttttgagataggagttttgctcttgttgcttgggctggagtgcaatggcaccatctcggctcactgcaacctctgcctcctgggttcaagcagttctcctacc

SEQ ID NO: 66743 - DNA, 120 bp, synthetic construct; identical to SEQ ID NO: 21181
  source 1..120: mol_type = other DNA

SEQ ID NO: 66744 - DNA, 120 bp, synthetic construct
  source 1..120: mol_type = other DNA
ggtgcatttgctcttgccttggaaggctgttttctgataaggttctatatcctctgcaaatcaaatcaggcacttacagtgtgagtatgcattctcttcctgccagtctggagatgatca

SEQ ID NO: 66745 - DNA, 120 bp, synthetic construct
  source 1..120: mol_type = other DNA
cagataaaaccagacagaacagaaaaataaaatgactttaactctagaaagtttccccatgtaaaattttgaaaatgctactctgcgtaaggtcaaactgtcatacatatatacgtatga

SEQ ID NO: 66746 - DNA, 120 bp, synthetic construct; identical to SEQ ID NO: 66370
  source 1..120: mol_type = other DNA

SEQ ID NO: 66747 - DNA, 120 bp, synthetic construct; identical to SEQ ID NO: 21182
  source 1..120: mol_type = other DNA

SEQ ID NO: 66748 - DNA, 120 bp, synthetic construct; identical to SEQ ID NO: 21183
  source 1..120: mol_type = other DNA

SEQ ID NO: 66749 - DNA, 120 bp, synthetic construct
  source 1..120: mol_type = other DNA
agcttgcagtgagccgagatcgcgccattgcactcacgcctgggcgacagagcaagactctgtctcaaaaaaaaaaaaaaaaattaatgacctctgcccctaactgaacaaagcccttca

SEQ ID NO: 66750 - DNA, 120 bp, synthetic construct
  source 1..120: mol_type = other DNA
tgtgagccatcgcgcccagcctatttataggaattttctgtaggtatataagtaataatttgaaggtcacaactagatgactttttgtgtaaccgtatcttgaatggaacaaacattttc

SEQ ID NO: 66751 - DNA, 120 bp, synthetic construct
  source 1..120: mol_type = other DNA
attatgtcatccaataactcacaactatgtaatttatttcctttttacagataaagaaatgggggctcagagcagtcaagaacatgccccaagttattcgtcagtgaggcagaaattgtg

SEQ ID NO: 66752 - DNA, 120 bp, synthetic construct
  source 1..120: mol_type = other DNA
cctcctggtctcaggtgattctcctgcctcagcctcccaagtagctgggactacaggtgtgcaccaccacatctggctaatttttgtttgtttttggtagagacgaggttttgccatgtt

SEQ ID NO: 66753 - DNA, 120 bp, synthetic construct; identical to SEQ ID NO: 2190
  source 1..120: mol_type = other DNA

SEQ ID NO: 66754 - DNA, 120 bp, synthetic construct
  source 1..120: mol_type = other DNA
tttcaaactattttgaagtcatcgtctataaggcaatatgaaagctgatctgaatgatttctccttttccaggaaaggaaacaaaaatgaaatcatgttagggctgcatattttatgggt

SEQ ID NO: 66755 - DNA, 120 bp, synthetic construct
  source 1..120: mol_type = other DNA
ttatatgattggcactaagatgggaatgactctggcctaatttcttcaatttacattttaaaacaggagcttagttagcccccaaataatatgtaattgatgtattagggttggggagtg

SEQ ID NO: 66756 - DNA, 120 bp, synthetic construct
  source 1..120: mol_type = other DNA
acatggagactttttggaaataccagaaagagaagaaaaagagaaagaaagctgggcgtggtggcttatgcctataatccccacactttgggaggctgaggcgggcagatcacaaggtca

SEQ ID NO: 66757 - DNA, 120 bp, synthetic construct
  source 1..120: mol_type = other DNA
gcctcccaaagtgctgggattacaggcatgagccactaggcctgcctaagtatatcttatctagacacagatctcaatcctttcacaaaaattaactcaaaagggatcatagacctaaat

SEQ ID NO: 66758 - DNA, 120 bp, synthetic construct
  source 1..120: mol_type = other DNA
agacctgagtacatgctatttataagaaaatcactttcaatataaagacttaattgattaaaagaatgggctgggcttggtggctcacacctgtaatcccagcactttgggaggccaagg

SEQ ID NO: 66759 - DNA, 120 bp, synthetic construct
  source 1..120: mol_type = other DNA
actccaaaagacgaaaagagtcatttaaaagactaatggagtcatatgaaaaggtcccaggagccaacagaaaggactccccttggccaaatctggaacattttgacagtttgagcatca

SEQ ID NO: 66760 - DNA, 120 bp, synthetic construct
  source 1..120: mol_type = other DNA
ggacaccatgaggaaacaatcagataaatacagaaagtgagaacattgacccaacttctgtaagtcaactggctaggtctctccaataagttcaaagtcaagaaaaaaaagggggggcca

SEQ ID NO: 66761 - DNA, 120 bp, synthetic construct
  source 1..120: mol_type = other DNA
gatctcctgacctcaggtgatctgcccaccctggcctcccaaagtgctgggattacaagcgtgagccactgtgcccagccagaaaagaatattttttaaaaaagaaaatccataatcgta

SEQ ID NO: 66762 - DNA, 120 bp, synthetic construct
  source 1..120: mol_type = other DNA
acccaggattatcctaccaactctttctccatacaggtgtcaacgctatcttggctggctacaaccatgaaacgtcagttttacagaaattcgtagtgcctaagcactcaaaataaatac

SEQ ID NO: 66763 - DNA, 120 bp, synthetic construct
  source 1..120: mol_type = other DNA
atgtatggatgtctcatctggacatttcatataaatggaatcacacagtatgtggccttttgtgtctaatttcacttagcacaaagttttcaaggctcatccccattgtagtgtgtatta

SEQ ID NO: 66764 - DNA, 120 bp, synthetic construct
  source 1..120: mol_type = other DNA
tatttctgagttctctattctcttccactgatttatgtttcttctgtttttgagacagaatcttgctctgtcacatagtggtgtgatctcggctcactgcaacctctgccccctggttca

SEQ ID NO: 66765 - DNA, 120 bp, synthetic construct
  source 1..120: mol_type = other DNA
ctatacaaaaatcttgctaacattttgataagaattacataaacctatagaccagtttggggtgaactgacatctttactatactgtcctgcaatccatgaacacagtatgtctgtccat

SEQ ID NO: 66766 - DNA, 120 bp, synthetic construct
  source 1..120: mol_type = other DNA
tccctacacacatgactcatgctgtttcatctcccttaggaatcagactcagattttttgatacaacagtatcaaaaattataaaataaatttgaattttatgtatcgttttatacctat

SEQ ID NO: 66767 - DNA, 120 bp, synthetic construct
  source 1..120: mol_type = other DNA
gagataggcagtggacatggtaaacagtggcttcataatgggtagagtttgaaggttgagccaactatacaaagcatgtagtgggtaccaaataaatacttgtttaacaagaataaaagc

SEQ ID NO: 66768 - DNA, 120 bp, synthetic construct
  source 1..120: mol_type = other DNA
agacgaaaccctacaaatctctctggataaacccttcactatcttgagcttctgctgagaggctgaggaaaaatactcttaagctccctagaggtttaattgtttgagacaatctgagag

SEQ ID NO: 66769 - DNA, 120 bp, synthetic construct
  source 1..120: mol_type = other DNA
aggtagaggttgcagtgagccgagatcgcgagactgcactccagcctgggtgacagagggagactccgtctcaaagaaaaaaaaaaaaaaattgaaataatcaatttaaatgttggaaag

SEQ ID NO: 66770 - DNA, 120 bp, synthetic construct
  source 1..120: mol_type = other DNA
aagacttttcttgtttctgatgaccttgacagttttggggatactggtgagatttattcctgttgatgctgaccttgatcacctggctgagacggtgtccattacgtttctccacagaaa

SEQ ID NO: 66771 - DNA, 120 bp, synthetic construct
  source 1..120: mol_type = other DNA
tcttgtgcctcagccatcagagtagctgggattacagacatgcaccaccacgcctggctgattttttttttttgtatgtttagtagagatgggttttcaccatgttggccaggctggtct

SEQ ID NO: 66772 - DNA, 120 bp, synthetic construct
  source 1..120: mol_type = other DNA
tgaaactggaccaccatcttttaccatataaaaaaatcaactcaagatgaattaaagatttaaatgtaagacccgaaactacaaaaacactagaagaaaatctggggaaaactcttccgg

SEQ ID NO: 66773 - DNA, 120 bp, synthetic construct
  source 1..120: mol_type = other DNA
ggaaatgaaagggtccgtggaagatgagctgtagctgtggaaggggcagaaaagccagagggtggctcaggagtctggtgttatatatgataacattttaaaaataagaggtgaggaaaa

SEQ ID NO: 66774 - DNA, 120 bp, synthetic construct
  source 1..120: mol_type = other DNA
ttttttattcacagaccactttgagactcaacacttacgacattcatagaagaaaatgcacaaaggcacatgcatagaaagtttttgtataacttccaggaattcatgcccccagtccag

SEQ ID NO: 66775 - DNA, 120 bp, synthetic construct
  source 1..120: mol_type = other DNA
atcatcagttcatagtaaactaaaaaaatgtctactttatccaaacttttttgtttataaatgaatttttgtcacctggtatgtcttagatatgatttgagactttttgttgttgttggc

SEQ ID NO: 66776 - DNA, 120 bp, synthetic construct
  source 1..120: mol_type = other DNA
gggatctaaaaatcaaaacaatttaactcatggacacagagagtagaaggatggttaccagaggctgcgaagtgtagtggtgagatggggaatgggaaaggaatggttaatgggtacaaa

SEQ ID NO: 66777 - DNA, 120 bp, synthetic construct
  source 1..120: mol_type = other DNA
ccaaaatggtgaaaccccatctctactaaaaatacaaaaaatcagccgggcgtggtggcgggtgcctgtagccccagctactcggtaggctggggcaggagaatcgcttgagcccaaaag

SEQ ID NO: 66778 - DNA, 120 bp, synthetic construct; identical to SEQ ID NO: 2187
  source 1..120: mol_type = other DNA

SEQ ID NO: 66779 - DNA, 120 bp, synthetic construct; identical to SEQ ID NO: 2188
  source 1..120: mol_type = other DNA

SEQ ID NO: 66780 - DNA, 120 bp, synthetic construct
  source 1..120: mol_type = other DNA
ttagcctacaaaagacacttaccacttcagagagtccaagagttttaggagtcctgtgccaggaaatgggggcggagaccaagaatagatttattattaaaagtcacaatatgacaggca

SEQ ID NO: 66781 - DNA, 120 bp, synthetic construct
  source 1..120: mol_type = other DNA
aaagtagaaagacttggtcccctgcttccagtcctatctggtacccactccctcatcttttctggctaaccattgtgcttcccagtaattatgtttaacattttctcacatagggattaa

SEQ ID NO: 66782 - DNA, 120 bp, synthetic construct
  source 1..120: mol_type = other DNA
gccagtgtttagttataactcttctactggactccagctaacctcaaagcttaggtgagccgatgtttctcagtctctatcatgactaaggaaactgttacatactttggcattcttgct

SEQ ID NO: 66783 - DNA, 120 bp, synthetic construct
  source 1..120: mol_type = other DNA
tgacttttatgcgaaattgtgagtgtctcctctcctggagtgccctcttccaggtccagcgttcttggctgtctgttcaggagccatcctgagctggcccatacaattttattgactgga

SEQ ID NO: 66784 - DNA, 120 bp, synthetic construct
  source 1..120: mol_type = other DNA
gtggaagtagatcagcttcatcagtcatgcctgtcctgacttttacatataaatatctatctatctatctatagatagatagatagatagatagatagatagatactcccccacttacat

SEQ ID NO: 66785 - DNA, 120 bp, synthetic construct
  source 1..120: mol_type = other DNA
agatgaaatatatgaagaaaacatggcctcccacagagatgtagttggaaaagaggacttttctgcctcctgaaagggtcatggtgacgctgacattttgaaaacgactgatttaggtga

SEQ ID NO: 66786 - DNA, 120 bp, synthetic construct
  source 1..120: mol_type = other DNA
caacatggctttgacaggcatacaattagatgaggatttcacgtgaagacctatttatttcttaaaagtcctagaaatggagaaggtcccccatgccaagcggtccttcaatttttggca

SEQ ID NO: 66787 - DNA, 120 bp, synthetic construct
  source 1..120: mol_type = other DNA
tcaggtgcctaacacatagtaggcactcactcatagtatattcagcaagaagaatgccaaaaatgttagaaacagaatcaaagtgggacacccttacagagcctcagatgctacggtaaa

SEQ ID NO: 66788 - DNA, 120 bp, synthetic construct
  source 1..120: mol_type = other DNA
ttattgttttgttttgtttgagacaaagtctcattgtatagcccaggctagagtgtagtggcatgattatagctcattgcagccttgaactgctaagctcaagtgatcctccagcctcag

SEQ ID NO: 66789 - DNA, 120 bp, synthetic construct; identical to SEQ ID NO: 35815
  source 1..120: mol_type = other DNA

SEQ ID NO: 66790 - DNA, 120 bp, synthetic construct
  source 1..120: mol_type = other DNA
aggcaaactgggtaagtttccaagctttcttttctggagaacaacttattgctggatataattgaaagtgaagattatttgttagcagccttggatagttttttttttctctaatatcat

SEQ ID NO: 66791 - DNA, 120 bp, synthetic construct; identical to SEQ ID NO: 1108
  source 1..120: mol_type = other DNA

SEQ ID NO: 66792 - DNA, 120 bp, synthetic construct
  source 1..120: mol_type = other DNA
cgataagcctgttagaaatattaatggtccaaattagtagtatttataaacaaaatgccttaagaaccctggggtcccaccgcttgtggaaatgggttgctttgtgtgggggaagatgag

SEQ ID NO: 66793 - DNA, 120 bp, synthetic construct
  source 1..120: mol_type = other DNA
ccctcctaggctacaaacctgtacagcatgttactatacagaatactgcaggcagttgtaacacaatggtgagtattgtgtatctaaaagtatccaagcagaaaaagtacagtaaatata

SEQ ID NO: 66794 - DNA, 120 bp, synthetic construct; identical to SEQ ID NO: 1109
  source 1..120: mol_type = other DNA

SEQ ID NO: 66795 - DNA, 120 bp, synthetic construct
  source 1..120: mol_type = other DNA
gtctgtttgttctagctcatggcataccctcactgtgacattgtgaaatacatatttggtcttcctcccagtttcttggcatacagctcctaaaatccttggaatcttaaaagtgatgtc

SEQ ID NO: 66796 - DNA, 120 bp, synthetic construct
  source 1..120: mol_type = other DNA
aagttacagttaggacgaataagttctagtgttctattgcacagtagagtgactttggttaataatatattgcatttcaaaatatttcaaaatagctatttcaaaatagctagaaaaggg

SEQ ID NO: 66797 - DNA, 120 bp, synthetic construct
  source 1..120: mol_type = other DNA
aggcagaggttacagtgagccaagattgtaccactgcactccagactgggcaacagagcgggactgggaaaaaaaaaagttatctttctaggagaaaatctgctttggttggttcaacag

SEQ ID NO: 66798 - DNA, 120 bp, synthetic construct
  source 1..120: mol_type = other DNA
tggataacctctccctccagaaaatatgcacatacatacaactctcctcccacatttttcaggtcgatatctgtaattctcactgtaacctcaaatatttacaaagggcaaatattctag

SEQ ID NO: 66799 - DNA, 120 bp, synthetic construct
  source 1..120: mol_type = other DNA
cagtcatttcacactggtgaagtatcgatggtaaaaatggtttttagtgctcattatgaataactgttggatacttcatcactcctcttccctattgttaacatagaacaagctggagga

SEQ ID NO: 66800 - DNA, 120 bp, synthetic construct
  source 1..120: mol_type = other DNA
caacaagagcgaaactgtctccaaaaaaaaaaaaagttcctctattgagaaaggcttcaacggtttttttcctcactgtttttccttaattgctctctcagtaaataaagtgccatgcct

SEQ ID NO: 66801 - DNA, 120 bp, synthetic construct
  source 1..120: mol_type = other DNA
ggtgaaacgagaatgtggactgtatacacacaagcatggcaaaatgtcaactggtgaaatgaaattaagggtatacaggtttcattatatcattctcctgactcttctataggtttaaaa

SEQ ID NO: 66802 - DNA, 120 bp, synthetic construct
  source 1..120: mol_type = other DNA
cgcctatagtcccagctacttgggaggctgaggcaggagaatggcaggaacccgggaggtggagcttgcagtgagccgagatcgcgtcactgcactccagcctgggagacagagcgagac

SEQ ID NO: 66803 - DNA, 120 bp, synthetic construct
  source 1..120: mol_type = other DNA
gaataccacaaactgggtaatttgtaaccaacagaagtttatttggctcatggttctggaggctgggaagtccaagatcaaggggctggcatctggtgaggaccttcttctgcatcatta

SEQ ID NO: 66804 - DNA, 120 bp, synthetic construct
  source 1..120: mol_type = other DNA
gctggatacagaccatggcacttcctgcttcaagaaggctttaggagcaaaagtgcacatcttgtatcattactgagacattcacaaaagcagtgtaccttctatattcttagctgtcag

SEQ ID NO: 66805 - DNA, 120 bp, synthetic construct
  source 1..120: mol_type = other DNA
tgataccgtactttaacccatttattccagttttatcacttgagtcagtaatatcctcacagcattttttccactcccagactggacccagcctagggctgtgatgtttctttagctttc

SEQ ID NO: 66806 - DNA, 120 bp, synthetic construct
  source 1..120: mol_type = other DNA
agtgtcataaatcagtaacaaatccaactctttgatattatcatcttactgctacagattacttggaaaatacgccaaagatagagaaaaagtaactgataacgatcacatttcaaacca

SEQ ID NO: 66807 - DNA, 120 bp, synthetic construct
  source 1..120: mol_type = other DNA
cgagatgggaccaggcgcagtggctcacacctgtaatcccaacactttgggaggccgaggcaggcagatcaactgaggtcaagagttcaagaccagtctggccaacatggtgaaacccca

SEQ ID NO: 66808 - DNA, 120 bp, synthetic construct
  source 1..120: mol_type = other DNA
tttcccaagtagctgggactacaggcgcgtgccaccatgcccagctaatttttgtatttagtagagacgagatttcaccatgttggccaagatggtcttgatctcttgaccttgtgatcc

SEQ ID NO: 66809 - DNA, 120 bp, synthetic construct
  source 1..120: mol_type = other DNA
tgtttttgttctgtttctgtcttttgctttcttccccccctgcaacttttgggcgtgtatttgtagtcatcagaaatttgggccaaggggagcggatcacgaggtcaggagatcgagact

SEQ ID NO: 66810 - DNA, 120 bp, synthetic construct
  source 1..120: mol_type = other DNA
atggtgtagtcttccctctactcaatgtaaatgctgggttttttaattattattattcttaagaaaggagatacaggccaggcacagtggctcacacctgtaatcccagcacgttgggag

SEQ ID NO: 66811 - DNA, 120 bp, synthetic construct; identical to SEQ ID NO: 35809
  source 1..120: mol_type = other DNA

SEQ ID NO: 66812 - DNA, 120 bp, synthetic construct
  source 1..120: mol_type = other DNA
tgtcactgtctcccatcaccctcagatgagaccatctagttgcgggaaaacaagctcaggacccccacagattctaccttatagtgagttgtgtaattatctcattatatattacaatgt

SEQ ID NO: 66813 - DNA, 120 bp, synthetic construct; identical to SEQ ID NO: 1110
  source 1..120: mol_type = other DNA

SEQ ID NO: 66814 - DNA, 120 bp, synthetic construct
  source 1..120: mol_type = other DNA
tacaaagcaaaaccaaaatgaaaaccacacaaatttcatgtttttgtttgggattattgcctgactctcattccacctctgagagatccctccaccactccagaaacaccagcacagcca

SEQ ID NO: 66815 - DNA, 120 bp, synthetic construct; identical to SEQ ID NO: 35807
  source 1..120: mol_type = other DNA

SEQ ID NO: 66816 - DNA, 120 bp, synthetic construct
  source 1..120: mol_type = other DNA
acttcatctcatcatttcatcatttcatctcatgatttcatttcatcacagttcatcatttcatttcattctttcatttcatttcatcatttcatctcaatatttcatttcatctcatca

SEQ ID NO: 66817 - DNA, 120 bp, synthetic construct
  source 1..120: mol_type = other DNA
aggcaacttctcatggctggctaagtctacagggatagcagcctctcctcaaccacccaatttcatttaaaacctcaaacagcacctcagtttcataaaaacctaaaacataaacacaac

SEQ ID NO: 66818 - DNA, 120 bp, synthetic construct
  source 1..120: mol_type = other DNA
gcccaggctggtcttcaactcctgagctcaagcgatacaaccgtctccgcctcccaaagtgctgagattgcaggcctgagacactgtgcctggccttaaacacaaatcttaattcattct

SEQ ID NO: 66819 - DNA, 120 bp, synthetic construct
  source 1..120: mol_type = other DNA
tatattgtccaggttggtctcaaactccttgactcaagggatccaggaaaggataacaggtgggagccaccacacctggctatgtgcatgaacttttaagacaaacacaaggccccacaa

SEQ ID NO: 66820 - DNA, 120 bp, synthetic construct
  source 1..120: mol_type = other DNA
cgcccggctggccgcagcccctgtgccaccctccgtggccgccgcatcacccccaccaccgccctccttcttctctcccatcgcctccacaggcagcgccactctatgcaggccacaggg

SEQ ID NO: 66821 - DNA, 120 bp, synthetic construct
  source 1..120: mol_type = other DNA
cggcggcggggggtaaaaagccgtggcgggcaacaagccgaggcggggtggggacaaaaagccgcggcggtgggggctaaaaagccgcggcgggcaaaaagccgaggcggggtgggggca

SEQ ID NO: 66822 - DNA, 120 bp, synthetic construct
  source 1..120: mol_type = other DNA
ctgactcttggtttcatttgctttcttttcacttttctaatcaattattggcttacagagaccccccctagggtagaaagtcataggagagaggagaacatcagtctagaggaactggtt

SEQ ID NO: 66823 - DNA, 120 bp, synthetic construct
  source 1..120: mol_type = other DNA
tacataccaagaaaagagagtctgttttagacaaataaattcccaatttatctaagggtaactcagttcctccccttcatcttgcagttcagtgcagggagacaacgctggtcttcaccc

SEQ ID NO: 66824 - DNA, 120 bp, synthetic construct
  source 1..120: mol_type = other DNA
atttgtttgtttgtttgtttgtttaggccccatgggggctgtgaactggagcttctatttatttatttattgtttaggcaccatggcctacactcctttattagagtgagggtcccgagg

SEQ ID NO: 66825 - DNA, 120 bp, synthetic construct
  source 1..120: mol_type = other DNA
agaaggatcgccatcacacggcgcactggtgcggcttctcccccgagtggatgaacatgtgcttggtgtcgtttttccttgagctgaacgtcttgcaacagtggccgcacgcataggcaa

SEQ ID NO: 66826 - DNA, 120 bp, synthetic construct
  source 1..120: mol_type = other DNA
ttttataaatggtgtgagggaggggactaacttcagtctgtacatgtgaacatcaatctgtcccaggacatttttgaaaagactattcactccccattgaattgccttgtctcccttgtc

SEQ ID NO: 66827 - DNA, 120 bp, synthetic construct
  source 1..120: mol_type = other DNA
aaaagattaactatgtaagtttttggcaatgtagcagcgtacttccccaagatcacccagcctccccttcacttaggggttgtgggcctgtgaactggctcaagtctgggaattgattga

SEQ ID NO: 66828 - DNA, 120 bp, synthetic construct
  source 1..120: mol_type = other DNA
ctgcaaggtggccattatgacaggctgggaagtgtggcctacagccaaggctagaggcaggcccttccagggagggaaggagaggacaggaatttgagctgaatgagttgactacatata

SEQ ID NO: 66829 - DNA, 120 bp, synthetic construct
  source 1..120: mol_type = other DNA
aattggcccctgtgactattggactaacatggctatgatctgtcagacagacttcaggctggcacccaggcaaaattctatactgtagtaaatgcatcatgcacatttgtaacaacatgt

SEQ ID NO: 66830 - DNA, 120 bp, synthetic construct
  source 1..120: mol_type = other DNA
tgccttgggctatgggtgggctcagggagtcagagagcaagggactagcctcccatcctacttctgaccagccctgtgactggggagagtcaccttacttctctgggcctcagtttcccc

SEQ ID NO: 66831 - DNA, 120 bp, synthetic construct
  source 1..120: mol_type = other DNA
cattcacagggcactgtcacagcctctgaaacgctgtctttaaagacatctgcaggctggacgcggtggctcactcctgtaatcccagcactttgggaggcagaagcaggtggctcactt

SEQ ID NO: 66832 - DNA, 120 bp, synthetic construct
  source 1..120: mol_type = other DNA
ttaaaagagaagcaccaacaatgtcagtgaccatgtaacatggatttaagctacaagtcatagaactgtgataagaagcctcagcgctgtaaaacagagggtggaggaaagcatttcctc

SEQ ID NO: 66833 - DNA, 120 bp, synthetic construct
  source 1..120: mol_type = other DNA
tcctgctttcctcaaggggtcttgggaggtggatcccattcagcttgccagaactctcaaaagacaaaattacaacaaatttagtttaaagatcttatttagcttttatttattatttca

SEQ ID NO: 66834 - DNA, 120 bp, synthetic construct
  source 1..120: mol_type = other DNA
atcaaaagaagtaaacgacagtccgagagccgccgacaagtctcctgaatcccagaatctcatcgacgggaccaaaaaaacatccctaaagcaactggatagtcccagaaacatctcaag

SEQ ID NO: 66835 - DNA, 120 bp, synthetic construct
  source 1..120: mol_type = other DNA
ataaggagaaaggggtggtaatgcaatgttcctactcaattttaaagccagtcccagcaggtcaaacgatagtttctccatcaaccaatacttcttcttcatcagaggaaaaatccactc

SEQ ID NO: 66836 - DNA, 120 bp, synthetic construct
  source 1..120: mol_type = other DNA
ggatgagctcagacgagaaatagccacagacgctccatgaggaaaatccctgtccacattggcataagacacttttgttacacaaagtttgcagtataatagagttaacaatactgtcta

SEQ ID NO: 66837 - DNA, 120 bp, synthetic construct
  source 1..120: mol_type = other DNA
cagaacaggaaacgccaactcttttgacagtaaaggattaagtcagctgatttttttttctatcaagagccagagaaatacttgatattcttagttgtgtttctgtaatagttaataaat

SEQ ID NO: 66838 - DNA, 120 bp, synthetic construct
  source 1..120: mol_type = other DNA
gagccagtttcattctgcctatggataggcagttatcccagcactatttattgaatacggagtcctttccctattgcttatttttgtcagcttcacggatgttcacttggttgtaggtgt

SEQ ID NO: 66839 - DNA, 120 bp, synthetic construct
  source 1..120: mol_type = other DNA
caacttgtatccagtttataaaactatctctaggctgctgatttcaggaggaggcttatgagtattctccttgcagagaatatatcaggagttaacagcagcttcaatatttgtggatga

SEQ ID NO: 66840 - DNA, 120 bp, synthetic construct
  source 1..120: mol_type = other DNA
tccaaattgcagattatgattgattcctaaacaaagacctaatttttgactcagagacgtggcaagctagtgaatcaccgttataatttaacaatcttcaagataaaattatctctgata

SEQ ID NO: 66841 - DNA, 120 bp, synthetic construct
  source 1..120: mol_type = other DNA
agttttttttctgacattgcagttttctgcacctatcacaacacttcaagaagactattacaagaatactacaaattttacacaaaatatcatcaaagtagtgacacgttggagaaaaat

SEQ ID NO: 66842 - DNA, 120 bp, synthetic construct
  source 1..120: mol_type = other DNA
caaatcaacaaaatttgcaggaaataaaaaaggagagtatatcaactggagcgggacttaccgtagacgcaaagaagcataattgggacacagcctgaggagaacattgtttgttccggt

SEQ ID NO: 66843 - DNA, 120 bp, synthetic construct
  source 1..120: mol_type = other DNA
tcaagtcacctcttcctccccatctgggtcaaggaggaggccggccagaggtttaactagaaatagcatgccccctacaaagtgtccagtacctgccacacctcaaggcacaaccaaaag

SEQ ID NO: 66844 - DNA, 120 bp, synthetic construct
  source 1..120: mol_type = other DNA
aaggttccaatctcacaggtccttggctggggtgatccctcagccaaggtgatccctcagccatccccaccaaacaactcaagccacagcaaatgcccaaaatgtactttaaccacaacc

SEQ ID NO: 66845 - DNA, 120 bp, synthetic construct
  source 1..120: mol_type = other DNA
cctgagctaagtgtgccatctgctcctgcccaaccctgtgacatgggtactactctcattcacaaagagcctcaggtcatcatcagtaaggtgcagagctgacattagagtacaagttta

SEQ ID NO: 66846 - DNA, 120 bp, synthetic construct
  source 1..120: mol_type = other DNA
ggctctgggtcagtgggtctgggtcgtagtagctccgagggcaggggaactgggtggcgtacttcgtgcctgagaagcaaagttcagaggaggggagcccagcttgctggttcctgaagg

SEQ ID NO: 66847 - DNA, 120 bp, synthetic construct
  source 1..120: mol_type = other DNA
ccactcagggagcctccagatgagtgttctagaaacctgcttccactccagctaagcttgttttcatttacatattcattatgtcatcacttatggtttgctcaaaccctttctgaatga

SEQ ID NO: 66848 - DNA, 120 bp, synthetic construct
  source 1..120: mol_type = other DNA
aggcaccagcagagatgggacatttcctgcatgtcagagaccctgcagagactggatcctacctttctctgttatgccctccgtccctgccgctcgcctgccctgcgggaggggccatcg

SEQ ID NO: 66849 - DNA, 120 bp, synthetic construct
  source 1..120: mol_type = other DNA
tggaggtgccccagtaagctcataacgtaggaccctctcaaatccacatcttcaaatctgtgtctcccacatggccgagtgaaggtggcagtgtgggcagcagcatagtggaggacggtg

SEQ ID NO: 66850 - DNA, 120 bp, synthetic construct
  source 1..120: mol_type = other DNA
aacttcagaaaaagaaagtaaattttgattgttaagttgttaaataacctaaccaattccaactctctgctaatatcaccaacacacagctttaattgtgatgaggtgcaactatcatct

SEQ ID NO: 66851 - DNA, 120 bp, synthetic construct
  source 1..120: mol_type = other DNA
gcttgtgtgacaaatgggtaatatttcccatgcatttgggaagagggcaagatcagcaagatttccccgaatagcatccaccttggggaaccactctctgccaaaaaaaaaaaaaaaaaa

SEQ ID NO: 66852 - DNA, 120 bp, synthetic construct
  source 1..120: mol_type = other DNA
ctatgtattggccagttgtaagataagaactgctggtcccagaaagctaaggatatagttcggaaagcagaactgaagttgtatatcttttggctgagctatacagaagggtgtgaaggc

SEQ ID NO: 66853 - DNA, 120 bp, synthetic construct
  source 1..120: mol_type = other DNA
gcagggagggatcctgggctaggctcctatggaaccaagactttttatcttaccatttttactaccacgctaaaatgaagacatttatctgcaagcgtaaataattcctggtattcccct

SEQ ID NO: 66854 - DNA, 120 bp, synthetic construct
  source 1..120: mol_type = other DNA
ttcaatgcttagaaatttcttctgccagataccccaaatcatctcttttaagttcagagtgccacagatctctaggacaggggtaaaatgccaccagtctctttgctaaagcatagcaag

SEQ ID NO: 66855 - DNA, 120 bp, synthetic construct
  source 1..120: mol_type = other DNA
gggcaatttatggcactaaattatgagaaatgaagcatcaaatcaataatgtaagcatttactttaagtaaaaaaagaaccaaataaactcaaatcaggcataagaaaaacagactaaat

SEQ ID NO: 66856 - DNA, 120 bp, synthetic construct
  source 1..120: mol_type = other DNA
acaaatatcttctgattgatgagtgaaatcattagaaggccagcaaaaatacaagtaagccagaatttctaaagcaccacaaaagaacactagttagtagtgcataaaggtatctcctaa

SEQ ID NO: 66857 - DNA, 120 bp, synthetic construct
  source 1..120: mol_type = other DNA
aaggatcatttccctcattcctaaagatctcttaggtccatcacaaaaaaaaaaggagcagcagccaggcgcaatggctcacacctgtaatcccagcactttgagaggccaaggggggag

SEQ ID NO: 66858 - DNA, 120 bp, synthetic construct
  source 1..120: mol_type = other DNA
gtgaggggccaagtcccaaagtctgctgctccgcctctctgtgtgcagagccatggggccttcacaggctgcagtgggtcccgagcccccagggctgtgcctgctggtcctgaccaagat

SEQ ID NO: 66859 - DNA, 120 bp, synthetic construct
  source 1..120: mol_type = other DNA
acttttcatagagagcagctgtcagtccaataacacacttaacaaatgatatacctagtcctcaaggttaacaaacacatgaagaccagcccaaccctgaaaatcagtttgcaaaccttc

SEQ ID NO: 66860 - DNA, 120 bp, synthetic construct
  source 1..120: mol_type = other DNA
tgtgagacaattttctattgaatacgatcgctttatcattgcaagacatcaaacatccctgtttcctgccaaataaatgtacaatagcaataaatgtaaaggtgtgttttgtaaaaaaga

SEQ ID NO: 66861 - DNA, 120 bp, synthetic construct
  source 1..120: mol_type = other DNA
tgcaattaattatggctaacattctcagcagtccaaacatcttgcaagtgacagcttgaaaaggcctaccagaatgatgttcactctgccacctgactagcttgtcttccatctagacat

SEQ ID NO: 66862 - DNA, 120 bp, synthetic construct
  source 1..120: mol_type = other DNA
acggaagatccactaaaacgtccacgggattaacagaacgtccttgcagactgagcgatgacaccacactttgtttggacatttaaattcactctgctgaataggaggaagcttttcttt

SEQ ID NO: 66863 - DNA, 120 bp, synthetic construct
  source 1..120: mol_type = other DNA
tcctaattgaataccctttatttccttctcctgcctaatttccctggccagaacttccacccagattcataaagcaagtcctgagtggcctacaaagagacttagcctcccacacaataa

SEQ ID NO: 66864 - DNA, 120 bp, synthetic construct
  source 1..120: mol_type = other DNA
aaaaaatgataaaggggacatcaccactgatcccacagaaatacaaactaccataagagaatactacaaacacctctacgcaaataaactagaaaatctagaagaaatggataaattcct

SEQ ID NO: 66865 - DNA, 120 bp, synthetic construct
  source 1..120: mol_type = other DNA
tggatcacctctgaaaaagaaaaactttcattctgtgaaattggatttctagaaaattccaggattccccacagttaaaggcacaaggcagggacaaattctggccatgtcacatgcagg

SEQ ID NO: 66866 - DNA, 120 bp, synthetic construct
  source 1..120: mol_type = other DNA
tttcatgacatgtaaaaggttgggaagtaaataaaatataagaaggttctactatgtgccaaggctgcttctgtttttattttttggctccactcctgcccaagtgcagtcacaacactc

SEQ ID NO: 66867 - DNA, 120 bp, synthetic construct
  source 1..120: mol_type = other DNA
gactgggtaaattataaagaaaaagaggtttaattgactcagagtttcacgtggatcatggcggaagcagaaaggcacatattacattggtggcaggcaaaagagagaatgacagccaag

SEQ ID NO: 66868 - DNA, 120 bp, synthetic construct
  source 1..120: mol_type = other DNA
gcagaaacacgttcacgttcttttgaataacctagatgttgcttaaccagtgatcagattgattaattatcatagtgagggtttgaaaggctaatgtaaaacggtgccaggtctgtgtcc

SEQ ID NO: 66869 - DNA, 120 bp, synthetic construct
  source 1..120: mol_type = other DNA
taagggccagaggtaatgcttctggccctttaattctggtgtctagacagacttttctcaaattccatttaatgtttaaatttttatgctccacttgccctggggatcgggaatggtatg

SEQ ID NO: 66870 - DNA, 120 bp, synthetic construct
  source 1..120: mol_type = other DNA
aattcagtgctagcaacagctagctacccctaaaatttgcctagctgctttaccaaattggctttaaggatctgagataatatcaacgggagtcacaatatccctgatgcatgtatgtcc

SEQ ID NO: 66871 - DNA, 120 bp, synthetic construct
  source 1..120: mol_type = other DNA
gccctaaatccattaaaccttgagtcaacacagcacatgcctctgcgagcacagggttggcgctagggttacagattaacagcatctcaaggcagaagaatttttcttagtacagaacga

SEQ ID NO: 66872 - DNA, 120 bp, synthetic construct
  source 1..120: mol_type = other DNA
accagtgcagcaggatggagttgaatggcaaaattagagtgatttcataaagcaaaatatgtcagatttttttgctctcctgagtacatggttcacaccctattgttaggaataacgctc

SEQ ID NO: 66873 - DNA, 120 bp, synthetic construct
  source 1..120: mol_type = other DNA
gtcattttccttcctccacacttttgttcacagagcaccttgagatagctcagttgatcctccattattgatctcaaagattaaggggcctgttgaaactcatttgagattcacacagtg

SEQ ID NO: 66874 - DNA, 120 bp, synthetic construct
  source 1..120: mol_type = other DNA
ggaagagaagtttcgcattctgtttggcacagcagcaactgccccaggatactgcaaattcctgaaaccaaagctggaaccagttcagaaggaacagggaccttgaaggtatggataagg

SEQ ID NO: 66875 - DNA, 120 bp, synthetic construct
  source 1..120: mol_type = other DNA
ccctgctccacagacctgccttagccaggcagacttggctcccagcctccctttccacactacaaattgagttttaattggcaattcttatctattattaagaacaattacatgaattcc

SEQ ID NO: 66876 - DNA, 120 bp, synthetic construct
  source 1..120: mol_type = other DNA
ttgaggttctgacaggtaacttggccgggatacaggtgttcatcattgcttcctgggggctagtccgggacctttaagtcaagcccttagggacatgagtcagactttggcatctctgcc

SEQ ID NO: 66877 - DNA, 120 bp, synthetic construct
  source 1..120: mol_type = other DNA
ggtctgtgtggaaagaccctgtcctcaggcctttcggcattgacaccagctctgagtcatccagttggggacacccttctttctccatctcagcccatccagttgggacaggcaaacatt

SEQ ID NO: 66878 - DNA, 120 bp, synthetic construct
  source 1..120: mol_type = other DNA
tcagcccagccacacctgttctgcaccgccaggaaccctctgggaaacactcaggaatttaacttcagaaaaagaaagtaaattttgattgttaagttgttaaataacctaaccaattcc

SEQ ID NO: 66879 - DNA, 120 bp, synthetic construct
  source 1..120: mol_type = other DNA
acccgtgactgctgtggtgggatcgggctctggaggtgccccagtaagctcataacgtaggaccctctcaaatccacatcttcaaatctgtgtctcccacatggccgagtgaaggtggca

SEQ ID NO: 66880 - DNA, 120 bp, synthetic construct; identical to SEQ ID NO: 66843
  source 1..120: mol_type = other DNA

SEQ ID NO: 66881 - DNA, 120 bp, synthetic construct
  source 1..120: mol_type = other DNA
gcccatgcaatattgggggtgcacttctactaaaatcattctcattgtttatttgaaatttgaataggactgggcatggagtatttcatctggtaagccccatcccgtgtctgggactaa

SEQ ID NO: 66882 - DNA, 120 bp, synthetic construct
  source 1..120: mol_type = other DNA
caaacgtgtactcgctccctcagggcaggcacatggaggaggtgctaagacatttaaaagttcctagtgtttttgagacccacgattacttccaatttatgtagtgaattctaacaatta

SEQ ID NO: 66883 - DNA, 120 bp, synthetic construct
  source 1..120: mol_type = other DNA
ctttctaccagtgccgggagtgtggcctctgctacatgtcacgtctctctgtccaggcacctctttgttgtacacaagttaaaggaacctcagccagtgtccaagcaaaacggggctggg

SEQ ID NO: 66884 - DNA, 120 bp, synthetic construct; identical to SEQ ID NO: 66835
  source 1..120: mol_type = other DNA

SEQ ID NO: 66885 - DNA, 120 bp, synthetic construct
  source 1..120: mol_type = other DNA
ttttatgcggactttggggattggtggtgtggaccctgcgggagaagccggggttcctttgatgctgttctcacttgagatgtttctgggactatccagttgctttagggatgttttttt

SEQ ID NO: 66886 - DNA, 120 bp, synthetic construct; identical to SEQ ID NO: 66832
  source 1..120: mol_type = other DNA

SEQ ID NO: 66887 - DNA, 120 bp, synthetic construct
  source 1..120: mol_type = other DNA
ctagggccatgccaggcaagggttaagtcttgtaccctactcttaaagaataaactagattctaactaccacatagtttttatttttctctagcagccaagcaagcactggctatgagag

SEQ ID NO: 66888 - DNA, 120 bp, synthetic construct; identical to SEQ ID NO: 66828
  source 1..120: mol_type = other DNA

SEQ ID NO: 66889 - DNA, 120 bp, synthetic construct
  source 1..120: mol_type = other DNA
gaaacggcagtagcgcagcgagaaggatcgccatcacacggcgcactggtgcggcttctcccccgagtggatgaacatgtgcttggtgtcgtttttccttgagctgaacgtcttgcaaca

SEQ ID NO: 66890 - DNA, 120 bp, synthetic construct
  source 1..120: mol_type = other DNA
atttgtaaggagctctgagaaaatcctcttctgtttcatcaatggggcaaggccagcacaggggtttatggagacttctaggcaagcagcatgttcctaaaagctaagactaatttaaat

SEQ ID NO: 66891 - DNA, 120 bp, synthetic construct
  source 1..120: mol_type = other DNA
catccatggccacttctaatagtcacagaggctcagtttccccctggggaactactcccttcctccaagtccatgtggttaagtaaggttggcttacttcctggttgcaggagacaggaa

SEQ ID NO: 66892 - DNA, 120 bp, synthetic construct
  source 1..120: mol_type = other DNA
agaaaagtgaaaagaaagcaaatgaaaccaagagtcagagtcttttagtgggctgggcttagggttccttcatcagatggatgtctctgtctttcttgcatattgatgactggatgcact

SEQ ID NO: 66893 - DNA, 120 bp, synthetic construct
  source 1..120: mol_type = other DNA
atcatgtggcatgatttattaaatcactggccactggtgactcactctatctccagccctcttctctccctgggggtgcagaggtcacacagactgtttcaaccctctcatcatgtgtgt

SEQ ID NO: 66894 - DNA, 120 bp, synthetic construct
  source 1..120: mol_type = other DNA
aggttatctggtgctattgtctcacagctcttaagattgtttcctctgtcttggctttagataacctgatgactatgtgcctaggttatggtctttttgcaatgaatttcccaggtgttc

SEQ ID NO: 66895 - DNA, 120 bp, synthetic construct
  source 1..120: mol_type = other DNA
cgagccagtatgatcttttgagggtgttctagaaccctgttttgtcatattaccagaattacttttcttccttctcaattgggtagactaatacagtggggagatctgaaagtcaaggcc

SEQ ID NO: 66896 - DNA, 120 bp, synthetic construct
  source 1..120: mol_type = other DNA
gaggaagatacaaacagccaggtctctgatggcctcttcaagagactactttttggtacctgcattcttggaaccatttggaccaaccttcagacttagaattatgtgagctatattgta

SEQ ID NO: 66897 - DNA, 120 bp, synthetic construct
  source 1..120: mol_type = other DNA
aagtggcttaaacagtagaaatgtgtttccttacagttctggaagccaaaattctgagatcaggatgcggcagggttggtttacagtaagggctctctgcttggctggtagctggccatc

SEQ ID NO: 66898 - DNA, 120 bp, synthetic construct
  source 1..120: mol_type = other DNA
tgatgctaatacacactacaatggggatgagccttgaaaactttgtgctaagtgaaattagacacaaaaggccacatactgtgtgattccatttatatgaaatgtccagatgagacatcc

SEQ ID NO: 66899 - DNA, 120 bp, synthetic construct
  source 1..120: mol_type = other DNA
ttattttgagtgcttaggcactacgaatttctgtaaaactgacgtttcatggttgtagccagccaagatagcgttgacacctgtatggagaaagagttggtaggataatcctgggtgctc

SEQ ID NO: 66900 - DNA, 120 bp, synthetic construct
  source 1..120: mol_type = other DNA
tgtatcccagtgtaatacatatattacttaacatgaaaaattttaagcacatagaaatttaaaggaaatatgttcatctatgaatattataaagccaccatctagatttagcagttaata

SEQ ID NO: 66901 - DNA, 120 bp, synthetic construct
  source 1..120: mol_type = other DNA
attacaggtatgagccaccacgcccagcctgatgccattttcttcacataatatctagtgtacccactattagagattctaagattatagggttaactatcgatttatcttcttgccact

SEQ ID NO: 66902 - DNA, 120 bp, synthetic construct
  source 1..120: mol_type = other DNA
tcatttgtagagaagggatctcattctgttgcccaggctggtctggaactcctagcctcaagaagtcttcctgccttggcctcccaaagtgctagaattacaggtgtaagctaccacacc

SEQ ID NO: 66903 - DNA, 120 bp, synthetic construct
  source 1..120: mol_type = other DNA
ctcccacccccgtttcccttattattaacatcttgcattagttatagtacatttgttataattgatgagccattattaaagctttgttaacaatagtgctttgtggattacattagagtt

SEQ ID NO: 66904 - DNA, 120 bp, synthetic construct
  source 1..120: mol_type = other DNA
acagaaatttatttctcacagttctaggggctgtgatgtccaagaccaaggcactagcagtgtctggtgaggccctccttcctcatagatggcacattctggctttgtcctcacatggtg

SEQ ID NO: 66905 - DNA, 120 bp, synthetic construct
  source 1..120: mol_type = other DNA
aattcctggttggacacttccaatatttctttcatatctgagtctggttctgatgcttgctctgtctcttcaaagtgtggggtttcttgtcttttagtatgctttgtaattttttgtttg

SEQ ID NO: 66906 - DNA, 120 bp, synthetic construct
  source 1..120: mol_type = other DNA
ccagtttggccaacatggcgaaaccccatctctgctaaaaatacaaaaaattagccaggcataatggcatgcacctgtagtcccagccacttgggaggctgaggcaggagaattgcttga

SEQ ID NO: 66907 - DNA, 120 bp, synthetic construct
  source 1..120: mol_type = other DNA
cactcctggctaattttctgtgtttttagtagagacggggtttcaccgtgttagccaggatggtctcggtctcctgacctcgtgatcctcccacctcagcctcccaaagtgctgggacta

SEQ ID NO: 66908 - DNA, 120 bp, synthetic construct
  source 1..120: mol_type = other DNA
atcacctgaggtcaggagttcgagaccagcctggccaacatgacaaaaccccgtatctactaaaaatacaacaattagccagacgtggtggtgcgcacctgtaatcccaactactaggga

SEQ ID NO: 66909 - DNA, 120 bp, synthetic construct
  source 1..120: mol_type = other DNA
tttttttttttttttttttttggattttagtagagacaaggtttcaccatgttgcccaggctggtcttgaactcctgagtgcaggcaatctgcccacctcaccctcccaaagtgctagga

SEQ ID NO: 66910 - DNA, 120 bp, synthetic construct
  source 1..120: mol_type = other DNA
gaagtgagagaatgctggcatgcctactctgtgctgggtttttttttttttgttttttttgttgagatggggtcttgctctgtcgcccaggctggagtgcagcggcgcaatctcggctca

SEQ ID NO: 66911 - DNA, 120 bp, synthetic construct
  source 1..120: mol_type = other DNA
tattattgaaactcagacgtatagtgtttcttcataggagttttctttccttatttgagatgggggtctcactttgttgcccaggctggagtgcagtggtgtgtgatcttggctcactgc

SEQ ID NO: 66912 - DNA, 120 bp, synthetic construct
  source 1..120: mol_type = other DNA
tgtatgaatttggctttatttttttgacagagtctcactctgtcgccaggctggagtgcagtagtgtgatctcagctcactggactctgccacctgggttcaagtgattctcctgcctca

SEQ ID NO: 66913 - DNA, 120 bp, synthetic construct; identical to SEQ ID NO: 21209
  source 1..120: mol_type = other DNA

SEQ ID NO: 66914 - DNA, 120 bp, synthetic construct; identical to SEQ ID NO: 21210
  source 1..120: mol_type = other DNA

SEQ ID NO: 66915 - DNA, 120 bp, synthetic construct; identical to SEQ ID NO: 21211
  source 1..120: mol_type = other DNA

SEQ ID NO: 66916 - DNA, 120 bp, synthetic construct; identical to SEQ ID NO: 21212
  source 1..120: mol_type = other DNA

SEQ ID NO: 66917 - DNA, 120 bp, synthetic construct
  source 1..120: mol_type = other DNA
cttctatcttgctagtggactctctctgtcttctctgcttgcacactttgttgaagcaagctaccatcccagaggcaaggaacacaggccatcagtttagcagccttgaggaactaaact

SEQ ID NO: 66918 - DNA, 120 bp, synthetic construct; identical to SEQ ID NO: 21213
  source 1..120: mol_type = other DNA

SEQ ID NO: 66919 - DNA, 120 bp, synthetic construct
  source 1..120: mol_type = other DNA
atttgcttccaaggacatgagagaggtaaaaggtacttgtttgctctgatgggccctgtttccttcagtgccaggaagagtggctctcagacctttcttctagcatccctcatgtatgca

SEQ ID NO: 66920 - DNA, 120 bp, synthetic construct
  source 1..120: mol_type = other DNA
agcagcagatttagataccttacattctctctttaagagagagaatgtaaggcctggtgcggtggctcacacctgtaatccagcactttggcaggccgaggagggtagatcacctgaggt

SEQ ID NO: 66921 - DNA, 120 bp, synthetic construct; identical to SEQ ID NO: 21214
  source 1..120: mol_type = other DNA

SEQ ID NO: 66922 - DNA, 120 bp, synthetic construct; identical to SEQ ID NO: 21180
  source 1..120: mol_type = other DNA

SEQ ID NO: 66923 - DNA, 120 bp, synthetic construct
  source 1..120: mol_type = other DNA
acttgctgcggttgctcaaggtgggtaaaaggagagtctcagaacttctgacttctaacttaaactaaacagcctggtggttgagaagttgtctgtatgtgtaacttttcaattttgctc

SEQ ID NO: 66924 - DNA, 120 bp, synthetic construct; identical to SEQ ID NO: 21320
  source 1..120: mol_type = other DNA

SEQ ID NO: 66925 - DNA, 120 bp, synthetic construct
  source 1..120: mol_type = other DNA
aatgaggtttttccaccctggctcactgataaatcacccctcagaatatagtcatactgcttgttgaggagttcttatgacccaggccctgggctttacatacgttatttaatctcatca

SEQ ID NO: 66926 - DNA, 120 bp, synthetic construct
  source 1..120: mol_type = other DNA
gctccgttccaccacaaaaagtgcagatcacttaaacggcctgcttcgggaaatagaggcaaccaatgcagtccttatggagcaaattaaggtgagatcagaaaacctggccaccgtgaa

SEQ ID NO: 66927 - DNA, 120 bp, synthetic construct
  source 1..120: mol_type = other DNA
aaggatgcaaagtattaatccgagtgttgtctgtgagggtgttgccaaagggattaacatttgagtcagtgggctggggaaggcagacccacccttaatctggtaggtgccatctaatca

SEQ ID NO: 66928 - DNA, 120 bp, synthetic construct
  source 1..120: mol_type = other DNA
aaccaggaggcggaggttgcagtgagccaagatcacgccaccgcactccagcctggcgacagagcgagacgccagctcaaaaaaaaaaaacaacaaaaaaaaacttactcatcaaacttt

SEQ ID NO: 66929 - DNA, 120 bp, synthetic construct; identical to SEQ ID NO: 21215
  source 1..120: mol_type = other DNA

SEQ ID NO: 66930 - DNA, 120 bp, synthetic construct; identical to SEQ ID NO: 21047
  source 1..120: mol_type = other DNA

SEQ ID NO: 66931 - DNA, 120 bp, synthetic construct; identical to SEQ ID NO: 21216
  source 1..120: mol_type = other DNA

SEQ ID NO: 66932 - DNA, 120 bp, synthetic construct; identical to SEQ ID NO: 21048
  source 1..120: mol_type = other DNA

SEQ ID NO: 66933 - DNA, 120 bp, synthetic construct
  source 1..120: mol_type = other DNA
agttactgaaatgtctttaactaagttctcttgctctttgaaacctcaccatgaacttattaagggagaaaaaaattgctcaaatattttaggggtgttcacaaagcatcgttcatatcc

SEQ ID NO: 66934 - DNA, 120 bp, synthetic construct; identical to SEQ ID NO: 20748
  source 1..120: mol_type = other DNA

SEQ ID NO: 66935 - DNA, 120 bp, synthetic construct; identical to SEQ ID NO: 21321
  source 1..120: mol_type = other DNA

SEQ ID NO: 66936 - DNA, 120 bp, synthetic construct
  source 1..120: mol_type = other DNA
atctttctttaacttctattgcttttgtatttatagctcttgcctagatagtcttaactgtagtatagactttaacagtgttttcttttcttttttttttttcagttgcaactactggcc

SEQ ID NO: 66937 - DNA, 120 bp, synthetic construct
  source 1..120: mol_type = other DNA
tgttccttgtgagatcctgtgcatgaatttgtcaggtaatttttttgacctgaacattctcataatagcttcaatttgcacaatgcaacctcgtcattttgcagattttcaaggctcact

SEQ ID NO: 66938 - DNA, 120 bp, synthetic construct
  source 1..120: mol_type = other DNA
gagaaacatggagactccaaatggattatttacaggttcacaaaacagctttgtggcactgaaagggcgagagccaagatctcctgatttctgttcctgtgttcatagattctttttcct

SEQ ID NO: 66939 - DNA, 120 bp, synthetic construct; identical to SEQ ID NO: 21051
  source 1..120: mol_type = other DNA

SEQ ID NO: 66940 - DNA, 120 bp, synthetic construct; identical to SEQ ID NO: 21052
  source 1..120: mol_type = other DNA

SEQ ID NO: 66941 - DNA, 120 bp, synthetic construct
  source 1..120: mol_type = other DNA
ataaagttttctaggtgattccactagtttcttatttcttggatgtgtatgtgtagcatctggactaggcactgtagatggatgagtgggggaaattttatttagcttgaaaattgagat

SEQ ID NO: 66942 - DNA, 120 bp, synthetic construct
  source 1..120: mol_type = other DNA
agcaactctcctgcctcagcctcccgagtagctgggattacaggcacccgccaccaggcccagctaatttttgtatttttagtagacacagagtttcaccatgttggccaggctggtttt

SEQ ID NO: 66943 - DNA, 120 bp, synthetic construct
  source 1..120: mol_type = other DNA
atgcttaattcagtcatgcaggaactcgaagactatagtgaaggaggtcctctctataaaaatggttctttgcgaaatgcagattcagaaataaaacattctacaccgtctcctaccaaa

SEQ ID NO: 66944 - DNA, 120 bp, synthetic construct; identical to SEQ ID NO: 21217
  source 1..120: mol_type = other DNA

SEQ ID NO: 66945 - DNA, 120 bp, synthetic construct
  source 1..120: mol_type = other DNA
actgttcttcttttttattatcttcaacaatggcaaaactttcttccaataatgaacacttctccctatgtattctcgttgatcataaaaagaattaagaccgctgccctaaaaaagaaa

SEQ ID NO: 66946 - DNA, 120 bp, synthetic construct
  source 1..120: mol_type = other DNA
cttcagaaaacggtgagttttaaagtataagcatttttaatgaacattaccttaattttttaaaatcatgaactttttattgaaagtttttttgttctgaaaacagcagcttggtcatat

SEQ ID NO: 66947 - DNA, 120 bp, synthetic construct; identical to SEQ ID NO: 21053
  source 1..120: mol_type = other DNA

SEQ ID NO: 66948 - DNA, 120 bp, synthetic construct
  source 1..120: mol_type = other DNA
aggttgcagtgagccaagatgacactgctgcactacagcctgggcgacagagcgagacttcgtctcaaaaacaaaaagtgttggaattataggcatgagccactgcatctggccatattt

SEQ ID NO: 66949 - DNA, 120 bp, synthetic construct
  source 1..120: mol_type = other DNA
gcaagcaagatttcttaaaagaggttgttgaaacttttgccaacaaaattgggcagtctgcgttatatgatgctctgttttctagtcagtcacctaaggatacatcttttcttggtagcg

SEQ ID NO: 66950 - DNA, 120 bp, synthetic construct; identical to SEQ ID NO: 21218
  source 1..120: mol_type = other DNA

SEQ ID NO: 66951 - DNA, 120 bp, synthetic construct
  source 1..120: mol_type = other DNA
tatcttctatcttcctcactatgctctcagttctttaagacagatgcgtatcttcttcatctttatatccccacagcagtgtttttagaatcagctggtgttaaatggttggcaaatcaa

SEQ ID NO: 66952 - DNA, 120 bp, synthetic construct; identical to SEQ ID NO: 66710
  source 1..120: mol_type = other DNA

SEQ ID NO: 66953 - DNA, 120 bp, synthetic construct; identical to SEQ ID NO: 66709
  source 1..120: mol_type = other DNA

SEQ ID NO: 66954 - DNA, 120 bp, synthetic construct
  source 1..120: mol_type = other DNA
atttccttttttttttttttgagatggagtctcgctctgtcgccaggctggagtgctgcagtggcacgatctcggctcactgcaacctccgcctcctggtttcaagcaattctcctgtct

SEQ ID NO: 66955 - DNA, 120 bp, synthetic construct; identical to SEQ ID NO: 66707
  source 1..120: mol_type = other DNA

SEQ ID NO: 66956 - DNA, 120 bp, synthetic construct
  source 1..120: mol_type = other DNA
caagtgattctcttgcttcagcctgtcacgtatctgggattacaggcacacaccaccatgcctggctaattttttgtattttttaatagagatggggtttcaccatgttagccaggatgg

SEQ ID NO: 66957 - DNA, 120 bp, synthetic construct; identical to SEQ ID NO: 66705
  source 1..120: mol_type = other DNA

SEQ ID NO: 66958 - DNA, 120 bp, synthetic construct; identical to SEQ ID NO: 66704
  source 1..120: mol_type = other DNA

SEQ ID NO: 66959 - DNA, 120 bp, synthetic construct
  source 1..120: mol_type = other DNA
ggctggagtgcagtgacacaatcttggcttactgcaacctctgactcccaggttcaagcgattcttctgcctcagcctcccgagcagctgggactataggcgcgtaccaacatgcccagc

SEQ ID NO: 66960 - DNA, 120 bp, synthetic construct
  source 1..120: mol_type = other DNA
gcctcagcctcccaaagtgctgggattacaggcatgagccaccacgcccggctggtctcggtctcttgacctcttgatccgtctaccttggcctcccaaagtactggaaggtctcaatct

SEQ ID NO: 66961 - DNA, 120 bp, synthetic construct
  source 1..120: mol_type = other DNA
gactctgtctcaaaaaaaaaaaaaaaaaattagccaggtgtggtgtcgggcacatgtagtcccacctattcaggaggcagagacaagagaatcacttgaacccaggaggcagaggttgca

SEQ ID NO: 66962 - DNA, 120 bp, synthetic construct
  source 1..120: mol_type = other DNA
ggtaaatcacatagttcagttattttgtttcttagctaaaacagtattttctgaaacaccagtgatgctaagtgcttatactagtacatgtgaacctagccatctgatgacagatgaact

SEQ ID NO: 66963 - DNA, 120 bp, synthetic construct
  source 1..120: mol_type = other DNA
ccttaaggtagataaaagctattgggtctttacatttctatgtaggcaattagcatacatctttttgtactaaagcagcagtgccccgcaggacttaaatttcttttatttaggtagaac

SEQ ID NO: 66964 - DNA, 120 bp, synthetic construct; identical to SEQ ID NO: 21081
  source 1..120: mol_type = other DNA

SEQ ID NO: 66965 - DNA, 120 bp, synthetic construct
  source 1..120: mol_type = other DNA
gtacagatttttgaagctgaaaaagcattgaagatgcttccaaagataaatattactgataagtttttctccccagtaataagcagctggattttaaatgttagtctaaagcgtgaggtc

SEQ ID NO: 66966 - DNA, 120 bp, synthetic construct
  source 1..120: mol_type = other DNA
ccaatgtcaaaattcctgattttgatactgtgctttggtcaggttaaacaggttgagtatcccttatccaaaatgcttgagaccagaagtatttcagattttgaactttttcagactttg

SEQ ID NO: 66967 - DNA, 120 bp, synthetic construct; identical to SEQ ID NO: 21219
  source 1..120: mol_type = other DNA

SEQ ID NO: 66968 - DNA, 120 bp, synthetic construct; identical to SEQ ID NO: 66694
  source 1..120: mol_type = other DNA

SEQ ID NO: 66969 - DNA, 120 bp, synthetic construct; identical to SEQ ID NO: 21220
  source 1..120: mol_type = other DNA

SEQ ID NO: 66970 - DNA, 120 bp, synthetic construct; identical to SEQ ID NO: 21324
  source 1..120: mol_type = other DNA

SEQ ID NO: 66971 - DNA, 120 bp, synthetic construct
  source 1..120: mol_type = other DNA
ctccaacctgggcaacagaatgattccatctcaaaaaaaaaaaaaaatgctgatacaaccagagtatgttccatccatgtgatagagtatacagctactcaaacatcttatttttgaaat

SEQ ID NO: 66972 - DNA, 120 bp, synthetic construct
  source 1..120: mol_type = other DNA
gcactccagcctggcgacagagcaagactccatctcaaaaaaaaaaaaaaaaaaggaaggggggaacaggccttgttcctttatgtgctgtcctgactgttgtgtattatttttgttaag

SEQ ID NO: 66973 - DNA, 120 bp, synthetic construct
  source 1..120: mol_type = other DNA
aagattggggaactcatggttcagtatctagacttttcctcattgtcctgtataatcgcggccttcacccttgttgggactccacagatttgtagctgatcagatgggtttgttgagaac

SEQ ID NO: 66974 - DNA, 120 bp, synthetic construct
  source 1..120: mol_type = other DNA
actgattgattgattgattgtctgtctacctggaatacccttactaaccaacttctccaacccggattggtttttcttcctctttgctacacagctgtgctcttgggacttccctttatc

SEQ ID NO: 66975 - DNA, 120 bp, synthetic construct
  source 1..120: mol_type = other DNA
tagaaaaactaaacagaagccatcgggaaaaagaaaaactagagaaagaattatatttttttccttttttcttttttggagacagagtctcgctctgtcacacaggctggagtgcagtgg

SEQ ID NO: 66976 - DNA, 120 bp, synthetic construct; identical to SEQ ID NO: 66686
  source 1..120: mol_type = other DNA

SEQ ID NO: 66977 - DNA, 120 bp, synthetic construct; identical to SEQ ID NO: 21173
  source 1..120: mol_type = other DNA

SEQ ID NO: 66978 - DNA, 120 bp, synthetic construct; identical to SEQ ID NO: 21221
  source 1..120: mol_type = other DNA

SEQ ID NO: 66979 - DNA, 120 bp, synthetic construct
  source 1..120: mol_type = other DNA
aacttagcaatgacctgagtgagtgcacactgtggaggagacaggcttcctgcatggagtccagccaggagacagtacagaatgcatggagcagctattggaagacattgaaaactaaat

SEQ ID NO: 66980 - DNA, 120 bp, synthetic construct
  source 1..120: mol_type = other DNA
tttgggaggctgaagcagaaggaccacttgagctcaggagttcaaaaacagcctgggcaacttggtgagacccccgtctgtacaaaaaaaaaatcaaaaaaggcatggtggtgcacactt

SEQ ID NO: 66981 - DNA, 120 bp, synthetic construct; identical to SEQ ID NO: 21222
  source 1..120: mol_type = other DNA

SEQ ID NO: 66982 - DNA, 120 bp, synthetic construct
  source 1..120: mol_type = other DNA
aatgtatgtcttaaacgctacctctctcaccatctaaatatgaagaggaagaaaagagaagctgattcctggggctaaggcattttagtgtggaagccaagtaaaggcctcagagtcact

SEQ ID NO: 66983 - DNA, 120 bp, synthetic construct
  source 1..120: mol_type = other DNA
aaaactcactgtcactaaggccaacaaaagacaaactggagaaatactagtcataaatacagaaaataaaggatgggtgaacaaattgagatccggcttgctgggcgtcatgtggagacc

SEQ ID NO: 66984 - DNA, 120 bp, synthetic construct
  source 1..120: mol_type = other DNA
gtgaataaaaaacaagctgaagcacattcacacaatggaatactactcatcgatgaaaaggaatgagctgtcaagtcgctcaaaggcaggagtgagccttcaatgtatatgaccaagtga

SEQ ID NO: 66985 - DNA, 120 bp, synthetic construct
  source 1..120: mol_type = other DNA
tgaagacctgatagtcaagtggggagccactggtgcagtctcagagtccaaaggcttgagaaccaggaaggacagaagacgaaagctgcaactcaaggagagagagactgcattgttcta

SEQ ID NO: 66986 - DNA, 120 bp, synthetic construct
  source 1..120: mol_type = other DNA
acactcagcgaggtcacaggatacaaaatcaacatacaaaaaagaaagtaaaaatatcagtgatccctgttaccatcactaaataatcactagcacctaaaaagcttcctcttttagttt

SEQ ID NO: 66987 - DNA, 120 bp, synthetic construct
  source 1..120: mol_type = other DNA
actgcaacctctgcctcccaggttcaagtgattctcctgcctcagcatcccgatgagctgggattacaggtgtccaccaccacgcctagctaatttttgtatttttaaattttgtatttt

SEQ ID NO: 66988 - DNA, 120 bp, synthetic construct
  source 1..120: mol_type = other DNA
ctttgtagttccattctgtgaaacttccatttctcataggtattttgttaaatatcacccctacccacaaggtttatcccaaagtatctacacagattccaccctcgcgttcttcctctg

SEQ ID NO: 66989 - DNA, 120 bp, synthetic construct
  source 1..120: mol_type = other DNA
cttttggggacttcactcaaggagttgtcttcccaccctgttcatgactcattatcactatctgtccatgcaatacatccaattattaacgttgttctggaaagtagtctactgttggca

SEQ ID NO: 66990 - DNA, 120 bp, synthetic construct
  source 1..120: mol_type = other DNA
atcaccatgtgacatgagtcaggtcctcctaggagttgccatcagggagggaattatatgatatccctgaaaaccaggtctaagcaaagcatacaacactataattgtcctcttattttt

SEQ ID NO: 66991 - DNA, 120 bp, synthetic construct
  source 1..120: mol_type = other DNA
aaacgtccatactactcaaagcaatctacaggttcaatgcaatccctaacaaaataccgaagacattcacagacatagaaaaaaaatcctaaaattttcatggaaccacacaagacccag

SEQ ID NO: 66992 - DNA, 120 bp, synthetic construct
  source 1..120: mol_type = other DNA
tttgtgggcatgtagtaggtacatattcatggagtatgtgagatgttttgattcaggcatgccctgcataataatcacatcagggtaaatggggtatccatcccctcaagcatttatact

SEQ ID NO: 66993 - DNA, 120 bp, synthetic construct
  source 1..120: mol_type = other DNA
cacagcagatttttagggcagtaaaactattttttatgattctgtgatgatggacatatgccattgtgcatttgtcagaagccctagaagtacaaaacataaaggcatagcccggcgggg

SEQ ID NO: 66994 - DNA, 120 bp, synthetic construct; identical to SEQ ID NO: 66671
  source 1..120: mol_type = other DNA

SEQ ID NO: 66995 - DNA, 120 bp, synthetic construct
  source 1..120: mol_type = other DNA
aaataattctccgaaagcagtttactgagagttcagcatgtctcctgagacatgctaggaagttatgtgcaggagtggagaatatgattcattggaagagttaagtgccctaaatgccag

SEQ ID NO: 66996 - DNA, 120 bp, synthetic construct
  source 1..120: mol_type = other DNA
cgggtgggatgtgcatcagaatatccatttccttgaaggatccaatgattaggctgaggcaaaatgttttagaccattcccaggtctaaaaataactccatcatcacctctaataaggac

SEQ ID NO: 66997 - DNA, 120 bp, synthetic construct
  source 1..120: mol_type = other DNA
taggatcactgaacaagggctccagtggcagtgcctgggagtggcagaacaaatagcacagtatcacatacaactgcagcaacagcagcagtacccgcagcaagtacaatgacacattta

SEQ ID NO: 66998 - DNA, 120 bp, synthetic construct
  source 1..120: mol_type = other DNA
ccttccacaccatcatgtcccttgtccattaactgaagattatcataactctggtctcacagtgctattaggaggattggctgagattactctaacccagtggtgacacttagaaaaatt

SEQ ID NO: 66999 - DNA, 120 bp, synthetic construct
  source 1..120: mol_type = other DNA
aggctcctgtgtgtgtgcaactctaatagcaggatttcaggcctcatttgtggccaagacagtgcggaggtgacctttggcgacaggcctatctcattagcgtgtagtctacaagattct

SEQ ID NO: 67000 - DNA, 120 bp, synthetic construct
  source 1..120: mol_type = other DNA
agaggaagacacagcctccctttggactcagatgcttattgcatagaatattttaaaagcaattggagaaattaaagggaaaaggtgctttggtcccagactttcactattccatggagc

SEQ ID NO: 67001 - DNA, 120 bp, synthetic construct
  source 1..120: mol_type = other DNA
agaggccctcataatgtaagagtgctttcccctccaaatgctgcaaagtcagaggaacaggggctgtttgaggatctttaatgctatttttattttctcagcatcatctccaatatttct

SEQ ID NO: 67002 - DNA, 120 bp, synthetic construct
  source 1..120: mol_type = other DNA
tggtttttaaaataccattacttattgaaaaagaacaagggtcctcaggcctcaaactctgtatattctaatgtacatgccaagcttggtcaagcaggcagaagccatggtcaggtctcc

SEQ ID NO: 67003 - DNA, 120 bp, synthetic construct
  source 1..120: mol_type = other DNA
ttcatatgaatatatacatttatgcatgcattcatatgaatatatacatttatgcatgcattcatatgaatatatacatttctgcatgcattcatatgaatatatacatttctccatgca

SEQ ID NO: 67004 - DNA, 120 bp, synthetic construct; identical to SEQ ID NO: 67003
  source 1..120: mol_type = other DNA

SEQ ID NO: 67005 - DNA, 120 bp, synthetic construct
  source 1..120: mol_type = other DNA
gtatataaaaccaatatataagaattctgagatggagaggaaagataaagactgcctagggatctcagaacccaaggaacaacagtggtgagtttgctgggttttctctttgcctcccac

SEQ ID NO: 67006 - DNA, 120 bp, synthetic construct
  source 1..120: mol_type = other DNA
gcatatacatatacgtggatacatatatgtgtattgcatatacatatacgtggatacatatatgtgtattgcatatacatatacgtggatacatatatgtgtattgcatatacatatacg

SEQ ID NO: 67007 - DNA, 120 bp, synthetic construct
  source 1..120: mol_type = other DNA
gtattgcatatacatctacgtggatacatatatgtgtattgtatatacatctacgtggatacatatatgtgtattgtatatacatctacgtggatacatatatgtgtattgtatatacat

SEQ ID NO: 67008 - DNA, 120 bp, synthetic construct
  source 1..120: mol_type = other DNA
ttagggtatttcgactcatgctttggaatggggtgaccagctacatcaagctaacttaaattcaaatttgtgttcataggataagaataattgggttaaataaaattcacttttaaccta

SEQ ID NO: 67009 - DNA, 120 bp, synthetic construct
  source 1..120: mol_type = other DNA
tttacttatttattttgagatggagttttgctctttttgcccaggctagagtgcaatggtgccaacctcgcctcactgcaacctctgcctcctgggttcaagcgattctcctgccttggc

SEQ ID NO: 67010 - DNA, 120 bp, synthetic construct
  source 1..120: mol_type = other DNA
cttacaaggagaaacatgtaaggatggcatgactcgccggcagccctgggcttgtccacggtacccccatgatgaacagtaactccactgtgtaaacgcccatgaacataagattacaag

SEQ ID NO: 67011 - DNA, 120 bp, synthetic construct
  source 1..120: mol_type = other DNA
ttgacccattttctttcagacttttattattgacatcaaagctggcttatgagtgctttagatatgaaagatttctatctcaacatactgttaggatatgatatatatgatctatcatat

SEQ ID NO: 67012 - DNA, 120 bp, synthetic construct
  source 1..120: mol_type = other DNA
tggtatcagaatgatgctggcctcataaaatgagttagggaggattccctctttttctattgattggaatagtttcagaggaatggtaccagttcctccttgtacctctggtagaattcg

SEQ ID NO: 67013 - DNA, 120 bp, synthetic construct
  source 1..120: mol_type = other DNA
tcttgccttctgctagcttttgaatgtgtttgctcttgcttttctagttcttttaattgtgatgttagggtgtcaattttggatctttcctgctttctcttgtaggcatttagtgctata

SEQ ID NO: 67014 - DNA, 120 bp, synthetic construct
  source 1..120: mol_type = other DNA
ttttccatttgcttggtagatcttcctccatccttttattttgagcctatgtgtgtctctgcacgtgagatgggtttcctgaatacagcacactgatgggtcttgactctttatccaact

SEQ ID NO: 67015 - DNA, 120 bp, synthetic construct
  source 1..120: mol_type = other DNA
tttctctaaacttcccttctcgcttcatttcattcatttcatcttccattgctgataccctttcttccagttgatcgcatcggctcctgaggcttctgcattcttcacgtagttctcgag

SEQ ID NO: 67016 - DNA, 120 bp, synthetic construct
  source 1..120: mol_type = other DNA
cagatgagtaggttgcgaaaattttctcccatgttgtaggttgcctgttcactctgatggtagtttcttttgctgtgcagaagctctttagtttaatgagatcccatttgtcaattttgg

SEQ ID NO: 67017 - DNA, 120 bp, synthetic construct; identical to SEQ ID NO: 66523
  source 1..120: mol_type = other DNA

SEQ ID NO: 67018 - DNA, 120 bp, synthetic construct
  source 1..120: mol_type = other DNA
ttttgaagggttttttgtgtctctatttccttcagttcggctctgattttagttatttcttgccttctgctagcttttgaatgtgtttgctcttgcttttctagttcttttaattgtgat

SEQ ID NO: 67019 - DNA, 120 bp, synthetic construct
  source 1..120: mol_type = other DNA
ttcttttctttaagaatgttgagggccgggcgcggtggctcacgcctgtaatcccagcactttgggaggccgaggcgggcggatcacgaggtcaggagatcgagaccatcccggctaaaa

SEQ ID NO: 67020 - DNA, 120 bp, synthetic construct
  source 1..120: mol_type = other DNA
gttgatcgcatcggctcctgaggcttctgcattcttcacgtagttctcgagccttggttttcagctccatcagctcctttaagcacttctctgtattggttattctagtaatacattctt

SEQ ID NO: 67021 - DNA, 120 bp, synthetic construct
  source 1..120: mol_type = other DNA
tacacccatcaacttgtcattttttttttttttattatactctaagttttagggtacatgtgcacattgtgcaggttagttacatatgtatacatgtgccatgctggtgcgctgcaccca

SEQ ID NO: 67022 - DNA, 120 bp, synthetic construct
  source 1..120: mol_type = other DNA
gtttaatgagatcccatttgtcaattttggcttttgttgccattgcttttggtgttttggacatgaagtccttgcccacgcctatgtcctgaatggtaatgcctaggttttcttgtaggg

SEQ ID NO: 67023 - DNA, 120 bp, synthetic construct
  source 1..120: mol_type = other DNA
ccatgatttggctctctgtttgtctgttgttggtgtataagaatgcttgtgatttttgtacattgattttgtatcctgagactttgctgaagttgcttatcagcttaaggagattttggg

SEQ ID NO: 67024 - DNA, 120 bp, synthetic construct
  source 1..120: mol_type = other DNA
gaatgcgtcccagagattctggtatgtggtgtctttgttctcgttggtttcaaagaatatctttatttctgccttcatttcgttatgtacccagtagtcattcaggagcaggttgttcag

SEQ ID NO: 67025 - DNA, 120 bp, synthetic construct
  source 1..120: mol_type = other DNA
ttgcagtttgatctcagactgctgtgctagcaatcagcgagattccgtgggcgtaggaccctctgagccaggtgtgggatatagtctcgtggtgcgccgtttcttaagccggtctgaaaa

SEQ ID NO: 67026 - DNA, 120 bp, synthetic construct
  source 1..120: mol_type = other DNA
tcttcagattagttcagggtattgctgaatgtggttgtttggaagtaaaatgctttagttttagttatatagattttaataagatactactttctatataatttatcaggtactttaggc

SEQ ID NO: 67027 - DNA, 120 bp, synthetic construct
  source 1..120: mol_type = other DNA
aaatacctgtgtcagggaactcctttcattcatcgcttggccagagtctgcgggacagatcagcataaaacacccattagttttcacctttactcttgcagcatgagttataaagccaaa

SEQ ID NO: 67028 - DNA, 120 bp, synthetic construct
  source 1..120: mol_type = other DNA
agctggcactggaaatcgctgtatttctgcacctgaagcaggagctgaaaaaggagagaggtcaccaataccactcactttccactggaatttccaaacatgaaaacaacctcattgaat

SEQ ID NO: 67029 - DNA, 120 bp, synthetic construct
  source 1..120: mol_type = other DNA
tccaaaggaagcttttaaactcagcagctgcaccccagaatctgtatgcctgcacctgcccaaggatttattcatagcttacctaagaatttcaaatttctaccataacactgaataaag

SEQ ID NO: 67030 - DNA, 120 bp, synthetic construct
  source 1..120: mol_type = other DNA
gtagctccatctggggcctgatgtctacctggtgactcctgtcctgtggtacctgggcggggggcttctgccaaatggccagaggcatctggggtgagggatgagcctacaagggcgtca

SEQ ID NO: 67031 - DNA, 120 bp, synthetic construct
  source 1..120: mol_type = other DNA
gatcacttgagcccaagagttctaggctgcagtgagctgtgatcacaccactgcactccaacctgagtgacggatcaagttcttgtctcaaaaataaaagtaataacaataataataaat

SEQ ID NO: 67032 - DNA, 120 bp, synthetic construct
  source 1..120: mol_type = other DNA
aagctatatttgacatgtacaattccataagctttgatatatacatatacacccttgaaaacgataccacaatcatgatagtgaatatattcatctcccaacgtttcttcatgtccctct

SEQ ID NO: 67033 - DNA, 120 bp, synthetic construct
  source 1..120: mol_type = other DNA
cctgccaccatgcctggctaattttttttttttttttttttgtatttttagtagagacagtttttcaccatgttggccaggctggtctcgaactcctgacctcatgtgatccacctgcct

SEQ ID NO: 67034 - DNA, 120 bp, synthetic construct
  source 1..120: mol_type = other DNA
ttacctttgccctcaagttaggttttatttttctagcagtctaaaggtcatgaaataaattataaaataaaaacagtgggtcttcaagctagaggatactgttttctttcttgcatggac

SEQ ID NO: 67035 - DNA, 120 bp, synthetic construct
  source 1..120: mol_type = other DNA
acttgtagtcattagggttcatatgaatataaattgctcttataaagcattagtactatccattaaaactgcttttaggctgggcacggtggctcatgcctgtaatcccagcacttcggg

SEQ ID NO: 67036 - DNA, 120 bp, synthetic construct
  source 1..120: mol_type = other DNA
ctctcaaagtgctaagattataggcatgagccaccacacccagctggttaatctttcagttgttcctcaagaaaagtaattcagtcgttttatgttttgaccttgaacataacctgttgt

SEQ ID NO: 67037 - DNA, 120 bp, synthetic construct
  source 1..120: mol_type = other DNA
ggactccgttgggggaggctgaggctatggggactccgtgcggggaggctgaggctatggggactccgtggggggacgctgaggctatggggactccgtggggggaggctgaggctatgg

SEQ ID NO: 67038 - DNA, 120 bp, synthetic construct
  source 1..120: mol_type = other DNA
ccgggaggctgaggctatggggactccgtggggggaggctgaggctatggggactccgtggggggaggctgaggctatgggcactccgtggggggaggctgaggctatggggactccgtg

SEQ ID NO: 67039 - DNA, 120 bp, synthetic construct
  source 1..120: mol_type = other DNA
acacacacgcgcacacacacacacacacacacacacacacacacacacatttgcatgcgctaggtagagctgttttccataattgccaacagaagactaactgtatttgaagaatgagct

SEQ ID NO: 67040 - DNA, 120 bp, synthetic construct
  source 1..120: mol_type = other DNA
ccttggggtttccatggcagtctactgacagtcaggggtgaggattaaatggtacagagtctcactgagtgctctttgagaggtcaagcaatgagaagtcctgcaaatgattattgagct

SEQ ID NO: 67041 - DNA, 120 bp, synthetic construct
  source 1..120: mol_type = other DNA
atccctgaccctttcctggaaaatttatgaataatccactccttgtttagcatacaatcaagaaataaccatagtgtactcagtcaagcagtccctgctgctgctctgcctatggagtag

SEQ ID NO: 67042 - DNA, 120 bp, synthetic construct
  source 1..120: mol_type = other DNA
gaaatacttggaaatatatctcaccctccataaacaaagctcggggtttaattctgacctgtatgagttcatggggtgaactgcagaccgctgtctgtggacaggaaaacgatatttcat

SEQ ID NO: 67043 - DNA, 120 bp, synthetic construct
  source 1..120: mol_type = other DNA
taatacatttttcttaaaagaaaaaaattttttttgagacagggtctcactctgtcacccaagcttgagtgcagtggcatgatcacagcttactgcagcctcgacttcccaagctcaagc

SEQ ID NO: 67044 - DNA, 120 bp, synthetic construct; identical to SEQ ID NO: 1231
  source 1..120: mol_type = other DNA

SEQ ID NO: 67045 - DNA, 120 bp, synthetic construct
  source 1..120: mol_type = other DNA
ttttgttgttgttttgttttgttttttgttttgtttgttttagagagacagagtctctgtcacccaggctggagtgcagtggcatgatcataacttactacagcctcaacctcctgggct

SEQ ID NO: 67046 - DNA, 120 bp, synthetic construct; identical to SEQ ID NO: 1232
  source 1..120: mol_type = other DNA

SEQ ID NO: 67047 - DNA, 120 bp, synthetic construct; identical to SEQ ID NO: 1233
  source 1..120: mol_type = other DNA

SEQ ID NO: 67048 - DNA, 120 bp, synthetic construct
  source 1..120: mol_type = other DNA
gtgcccctgggtaaagccgttgtatgcccttgtaagaccagaagattaagatctcaattgctgttcaattcaaaactgttttctctgcttggagagctggtggagaaaatgaaacaatga

SEQ ID NO: 67049 - DNA, 120 bp, synthetic construct
  source 1..120: mol_type = other DNA
attttgtacttgtaatttaatgacgtgaaatatgtaaaatctcaacctgcccatccttgcattgtagctgagtactcacattccatggggtggtcttgtccttgactcttggaggggcaa

SEQ ID NO: 67050 - DNA, 120 bp, synthetic construct
  source 1..120: mol_type = other DNA
aaagttggaagactggcaagttaaatcatccagccattgtttccagttccatttcttcctaatcctcactctaggactctaacttgccacgtttgtgatggttgctggtttttaagatac

SEQ ID NO: 67051 - DNA, 120 bp, synthetic construct
  source 1..120: mol_type = other DNA
aggaggcggaggttgcagtgagcagaggttgtgccattgcactccagcctgggcaataagagtgaaactccatctcaaaaaaaaaattataatatacatatacaatggagtattacacag

SEQ ID NO: 67052 - DNA, 120 bp, synthetic construct
  source 1..120: mol_type = other DNA
ctttggagagtgtttcatttgtgaagtcaacagatttaacattcagatcaggaggacgttggcatgagatgtggggaatcataagctccaaaacaatcgtgagacagaaggaaagatggc

SEQ ID NO: 67053 - DNA, 120 bp, synthetic construct
  source 1..120: mol_type = other DNA
aaaacaaagtttaaggtattcatagaaaaatacaaatactatttttaaggattctatatctggccacatggtgccatctcacgaagagtgtccccgtcccttgagggggagtggtcggga

SEQ ID NO: 67054 - DNA, 120 bp, synthetic construct
  source 1..120: mol_type = other DNA
tatccagcatttagggactcatctttagggaggttcaaaggaaagctcatggcctttagaactggaagaaccatgttccagttgggacttgatcatttactaattgtgggattacagcca

SEQ ID NO: 67055 - DNA, 120 bp, synthetic construct
  source 1..120: mol_type = other DNA
ccccactgtacttcccactgctcctgaacacccccactgtacttcccactgctcctgaacaacccactgtacttcccactgctcctgaacaccccactgtacttcccactgctcctgaac

SEQ ID NO: 67056 - DNA, 120 bp, synthetic construct
  source 1..120: mol_type = other DNA
aagacaaatgaaacaaaaaactggttttttttttattttctttttcagatggagtctctctgtcgcccaggctgcagtgaggtggcatgatctcggctcactacaatctctgcctcctgg

SEQ ID NO: 67057 - DNA, 120 bp, synthetic construct
  source 1..120: mol_type = other DNA
ttatccaggagaacttccccaatctagcaaggcaggccaacgttcagattcaggaaatacagagaacgccacaaagatactcctcgagaagagcaactccaagacacataatggtcagat

SEQ ID NO: 67058 - DNA, 120 bp, synthetic construct
  source 1..120: mol_type = other DNA
caaatgtaaaagaacagaaattataacaaactatctctcagaccacagtgcaatcaaactagaactcaggattaagaatctcactcaaagccgctcaactacatggaaactgaacaacct

SEQ ID NO: 67059 - DNA, 120 bp, synthetic construct
  source 1..120: mol_type = other DNA
aaaaaacccttcaaaaaatcaatgaatccaggagctggttttttgaaaggatcaacaaaattgatagaccgctagcaagactaataaagaaaaaaagagagaagaatcaaatagaccaat

SEQ ID NO: 67060 - DNA, 120 bp, synthetic construct
  source 1..120: mol_type = other DNA
attgaataccctttatttccttctcctgcctgattgccctggccagaacttccaacactatgttgaataggagcggtgagagagggcatccctgtcttgtgccagttttcaaagggaatg

SEQ ID NO: 67061 - DNA, 120 bp, synthetic construct
  source 1..120: mol_type = other DNA
caatagaaaaagagggaatcctccctaacttattttatgaggccagcatcattctgataccaaagccgggcagagacacaaccaaaaaagagaattttagaccaatatccttgatgaaca

SEQ ID NO: 67062 - DNA, 120 bp, synthetic construct
  source 1..120: mol_type = other DNA
ggcttaggattgacttggcgatgcgggctcttttttggttccatatgaactttaaagtagttttttccaattctgtgaagaaagtcattggtagcttgatggggatggcattgaatctgt

SEQ ID NO: 67063 - DNA, 120 bp, synthetic construct
  source 1..120: mol_type = other DNA
agacacagggtgctgattggtgtgtttacaaaccttgagctagataaagagtgcccgttggtgtatttacaatccctcagctagatataaaagttctccataaaggttctccaagtctcc

SEQ ID NO: 67064 - DNA, 120 bp, synthetic construct
  source 1..120: mol_type = other DNA
ttgattcttctctctttttttctttattagtcttgctagcggtctatcaattttgttgatcctttcaaaaaactagctcctggattcattgattttttgaagggttttttgtgtctctat

SEQ ID NO: 67065 - DNA, 120 bp, synthetic construct
  source 1..120: mol_type = other DNA
agactggcaagttggataaagagtcaagacccatcagtgtgctgtattcaggaaacccatctcacgtgcagagacacacataggctcaaaataaaaggatggaggaagatctaccaagcc

SEQ ID NO: 67066 - DNA, 120 bp, synthetic construct
  source 1..120: mol_type = other DNA
gtagggtgatgcctccagctttgttcttttggcttaggattgatttggcaatgagggctcttttttggttccatatgaactttaaagtagttttttccaattctgtgaagaaagtcattg

SEQ ID NO: 67067 - DNA, 120 bp, synthetic construct
  source 1..120: mol_type = other DNA
ttgatgtgctgctggatttggtttgccagtattttattgaggatttttgcatcaatgttcatcaaggatattggtctaaaattctctttttttgttgtgtctctgccaggctttggtatc

SEQ ID NO: 67068 - DNA, 120 bp, synthetic construct
  source 1..120: mol_type = other DNA
cttcctcttttcctaattgaatgccctttatttatttccttctcctacctaattgccctggccagaacttccaacactatgttgaataggagtggtgagagagggcatccctgtcttgtg

SEQ ID NO: 67069 - DNA, 120 bp, synthetic construct
  source 1..120: mol_type = other DNA
ggatacggaataaatcaatggttgcctggaattaagcatacagagggggcttgattacaaataagaagtccaagagtgttttttggggagatggaactgatatatattctgactgtagta

SEQ ID NO: 67070 - DNA, 120 bp, synthetic construct
  source 1..120: mol_type = other DNA
attgttcaattcccacctgtgagtgagaatatgcggtgtttggttttttgttcttgcaatagtttactgagaatgatggtttccaatttcatccatgtccctacaaaggatatgaactca

SEQ ID NO: 67071 - DNA, 120 bp, synthetic construct
  source 1..120: mol_type = other DNA
attttgtcttttgttgccattgcttttggtgttttggacatgaagtccttgcccacgcctatgtcctgaatggtaatgcctaggttttcttctagggtttttatggttttaggtttaacg

SEQ ID NO: 67072 - DNA, 120 bp, synthetic construct
  source 1..120: mol_type = other DNA
tgccacaatttcagagcctgttattggtctattcagagattcaacttcttcctggtttagtcttgggagagtgtatgtgtcaaggaatgtatccatttcttctagattttctagtttatt

SEQ ID NO: 67073 - DNA, 120 bp, synthetic construct
  source 1..120: mol_type = other DNA
actcaggacttgctttatgaatctgggtgctcctgtattgggtgcataaatatttaggatagttagctcctcttgttgaattgatccctttaccattatgtaatggccttctttgtctct

SEQ ID NO: 67074 - DNA, 120 bp, synthetic construct
  source 1..120: mol_type = other DNA
ttttctctaaacttcccttctcacttcatttcattcatttcatcttccattgctgataccctttcttccagttgatcgcatcggctcctgaggcttctgcattcttcacatagttcttga

SEQ ID NO: 67075 - DNA, 120 bp, synthetic construct
  source 1..120: mol_type = other DNA
gaatatgcggtgtttggttttttgttcttgcgatagtttactgagaatgatggtttccaatttcatccatgtccctacaaaggacatgaactcatcattttttatggctgcatagtattc

SEQ ID NO: 67076 - DNA, 120 bp, synthetic construct
  source 1..120: mol_type = other DNA
cagtaaccaaaacagcatggtactggtaccaaaacagagatatagatcaatggaacagaacagagccctcagaaataatgccgcatatctacaactatctgatctttgacaaacctgaga

SEQ ID NO: 67077 - DNA, 120 bp, synthetic construct
  source 1..120: mol_type = other DNA
gttagcagtctgtctcttataactcacatgctttcagtgtgagagagaatagtttcaaaatggatggggagcagtaaagaaggaagaaaatgacctaagacacacacacacacacacaca

SEQ ID NO: 67078 - DNA, 120 bp, synthetic construct
  source 1..120: mol_type = other DNA
agaagtgaggagcctctccgcccagcagccaccccatctgggaagtgaggagcgtctccgcccggcagccaccccgtccgggagggaggtggggggggggtcagcccccgcccggccagc

SEQ ID NO: 67079 - DNA, 120 bp, synthetic construct
  source 1..120: mol_type = other DNA
tttttttttcttaaaaagtgtcttgaattgggagttcaagaccagtctggccaacatggtgaaaactgtctctactaaaaatacgaaaaatcagctgggtgtggtggcaggcacctgtaa

SEQ ID NO: 67080 - DNA, 120 bp, synthetic construct
  source 1..120: mol_type = other DNA
gcaggtttctccctattcttttatagaaacataaaatgccagaagagtatgatttctacccaaaagaggactaagcagagtttacagatgttgcagactcctcccctgatacttctgggg

SEQ ID NO: 67081 - DNA, 120 bp, synthetic construct
  source 1..120: mol_type = other DNA
gggcatcagttctcaaacttttggcctgaggatctgtatttgttaaggtttgccagagaaatataatagaacgaatatgtgtgtgtgtgtctgtgtgtctgtgtgtgtgtgtgtgtctgt

SEQ ID NO: 67082 - DNA, 120 bp, synthetic construct
  source 1..120: mol_type = other DNA
gaggtgctccccacatctcagacgatgggcggccaggcagagacgctcctcacttcctagatgggatggcggtggggaagaggcgctcctcgcttcctagatgggatggcggccgggcag

SEQ ID NO: 67083 - DNA, 120 bp, synthetic construct
  source 1..120: mol_type = other DNA
aggatacaaaatcaatgtacaaaaatcacaagcattcttatacaccaacaagagacaaacagagagccagatcatgagtgaactcccattcacaattgcttcaaggagaataaaacacct

SEQ ID NO: 67084 - DNA, 120 bp, synthetic construct
  source 1..120: mol_type = other DNA
aaacaccaaaagcaatgacaacaaaagccaaaattgacaaatgggatctaattaaactaaagagcttctgcacagcaaaagaaactaccatcagagtgaacaggcaacctacagaatggg

SEQ ID NO: 67085 - DNA, 120 bp, synthetic construct
  source 1..120: mol_type = other DNA
gcagacttaagatttgtgtacttcacacactttatgtcacatgctcaaagtatatgcacatatgtaaacatatgttcaacatatgaatatatgcacacatatgcatgtatatatgttcaa

SEQ ID NO: 67086 - DNA, 120 bp, synthetic construct
  source 1..120: mol_type = other DNA
tgcccggccgcccatcgtctgagatgtggggagtgcctctgccccgccaccccatctgggatgtgaggagcgcctctgcccggccgagaccccgtctgggaggtgaggagcgtctctgcc

SEQ ID NO: 67087 - DNA, 120 bp, synthetic construct
  source 1..120: mol_type = other DNA
ttgtatcctgagactatgctgaagttgcttatcagcttaaggagattttgggctgagacgatgggcttttctagataaacaatcatgtcgtctgcaaacagggacaatttgacttcctct

SEQ ID NO: 67088 - DNA, 120 bp, synthetic construct
  source 1..120: mol_type = other DNA
gttttttgaaaggatcaacaaaattgatagaccactagcaagactaataaagaaataaagagagaagaatcaaatagacacaataaaaaatgataaaggggatatcaccaccgatcccac

SEQ ID NO: 67089 - DNA, 120 bp, synthetic construct
  source 1..120: mol_type = other DNA
atatttccagcttgcctagaaagttatatatatatataactgttctatttcccttgtgaaagaaaatgatcaaaagatcttgggcccccaaaatcactaagctaaagggaaaattcaagc

SEQ ID NO: 67090 - DNA, 120 bp, synthetic construct
  source 1..120: mol_type = other DNA
acataatggtaaagggatcaattcaacaagaggagctaactatcctaaatatttatgcacccaatacaggagcacccagattcataaagcaagtcctcagtgacctacaaagagacttag

SEQ ID NO: 67091 - DNA, 120 bp, synthetic construct
  source 1..120: mol_type = other DNA
atcttataaatatgaatgaatgagtggtcacatttataaagatataagattatatttatataatcttatatctttgtctttcgtctgtgaatcaaactaatggcatgtcaaagtattgtc

SEQ ID NO: 67092 - DNA, 120 bp, synthetic construct
  source 1..120: mol_type = other DNA
actcccactgcctccctactcccactgctgcctactcccactgcctccctactcccactgcctccctactcccattgctgcctactcccactgcctccctactcccactgcctccctact

SEQ ID NO: 67093 - DNA, 120 bp, synthetic construct
  source 1..120: mol_type = other DNA
ccctactcccactgcctccctactcccactgcctccctactcccactgcctccctactcccactgcctccctactcccactgcctccctactcccactgcctccctactcccactgcctc

SEQ ID NO: 67094 - DNA, 120 bp, synthetic construct; identical to SEQ ID NO: 67092
  source 1..120: mol_type = other DNA

SEQ ID NO: 67095 - DNA, 120 bp, synthetic construct
  source 1..120: mol_type = other DNA
tcccactgcctccctactcccactgctgcctactcccactgtctgcctactcccactgcctccctactcccactgcctccctactcccactacctccctactcccactgcctccctactc

SEQ ID NO: 67096 - DNA, 120 bp, synthetic construct
  source 1..120: mol_type = other DNA
ccctatccatcccagggacctcgttgtccctccctgataccagcctggaccagggcccccgagctcctcggggttcatcccccaactccaaagttcggaaggcaaactgtgtcactgttt

SEQ ID NO: 67097 - DNA, 120 bp, synthetic construct
  source 1..120: mol_type = other DNA
gttgcactatcacgagggtgcaccatcacgagggtgtgtcttcacgagggtgcactgtcacgagggtgcactgtcacgagggtgcactatcatgagggtgtgccatccctgttctcccca

SEQ ID NO: 67098 - DNA, 120 bp, synthetic construct
  source 1..120: mol_type = other DNA
cctgtattggagcatctgagagtcaagaaaaatgtaacagctctattgaagtgtagttgacaagtgcacacatttaaagtgcacagtttgggacgtttgacgtctgcgtagatacacaca

SEQ ID NO: 67099 - DNA, 120 bp, synthetic construct
  source 1..120: mol_type = other DNA
tcaccacaacaggtccagggctccacctgcccccaaatcctttgtgttatttcttttctttttttctttttctttcttcttcttctttttttttttgggtgaaatctcgctctgtcgccc

SEQ ID NO: 67100 - DNA, 120 bp, synthetic construct
  source 1..120: mol_type = other DNA
ggggggactgggatgcatttatgtttgcattcttgagagagaactgggacgcatgcatgtttacattctcgagggaggaactgggacatgtgcatgtttgcatttttgagggaggaactg

SEQ ID NO: 67101 - DNA, 120 bp, synthetic construct
  source 1..120: mol_type = other DNA
actctcttggatcactgagctctgcagatgggaatccccaccctgaggcttttgagagtggagagaactactgcaaaccccaggacagctgagttcaggtgggagacgggctataacttg

SEQ ID NO: 67102 - DNA, 120 bp, synthetic construct
  source 1..120: mol_type = other DNA
gtctcagccttagcacagcctcgcgcgatccttcgatgatccccttcggtccctgtagtcccacgagggatgcaatgcgttggaggaaggaggaggctggcagccagggactgagccaaa

SEQ ID NO: 67103 - DNA, 120 bp, synthetic construct
  source 1..120: mol_type = other DNA
acaagccatagagaaaacaactggtaaaacagtggacgcaaatcccaccttttcagtgatcacattcagtggaatcgcggccagaaagcaaagggcggcagaacaggaagcagcgcagcc

SEQ ID NO: 67104 - DNA, 120 bp, synthetic construct
  source 1..120: mol_type = other DNA
cagagatgggcttcccgcagcggagagagatgccggggcggcgatgcgcttcccacagcggagagagacgccggggcggcgatgggctccccgcagcggagagagacgccagagccgcga

SEQ ID NO: 67105 - DNA, 120 bp, synthetic construct
  source 1..120: mol_type = other DNA
tccctgcctggcatagaaacccggacatcggaccctgccctcccgctgcttccgcagggacagggggcagccagcagagcctccctctgggggtgccccccaatctggttgcctgggacg

SEQ ID NO: 67106 - DNA, 120 bp, synthetic construct
  source 1..120: mol_type = other DNA
gattttaggtttagctgattcattttgtctgttgacttataaagctgagaactggagtatttagtaaaaaattattatcccattctgttctttcccacattctgtctcctctgtgctcac

SEQ ID NO: 67107 - DNA, 120 bp, synthetic construct
  source 1..120: mol_type = other DNA
attttacagatgagtacgacttacataagttaagattggacaattagtgcactatcagacacctagttattcctgtttttaaaaattatgtgtggttccttttacatgacactgttttgg

SEQ ID NO: 67108 - DNA, 120 bp, synthetic construct
  source 1..120: mol_type = other DNA
ctctgtttccttctaggtaactgatttgggatcatccctcttttctaatataaacacataaagctctgtttccttcttggtaactgatttgggatcttccctcttttctaatataaacac

SEQ ID NO: 67109 - DNA, 120 bp, synthetic construct
  source 1..120: mol_type = other DNA
cctcttttctaatataaacacataaagctctgtttccttctaggtaactgatttgggatcttccctcttttctagtataaacacataaagctctgtttccttctaggtaactgatttgag

SEQ ID NO: 67110 - DNA, 120 bp, synthetic construct
  source 1..120: mol_type = other DNA
gaggggcacttctgccgggccgcccctactgggaagtgaggagcccctctgcccggccacgaccccgtctgggaggtgtgcccagcggctcattggggatgggccatgatgacaatggcg

SEQ ID NO: 67111 - DNA, 120 bp, synthetic construct
  source 1..120: mol_type = other DNA
gcagagacgctcctcacctcccagacagggttgcggcccagcagaggcgctcctcacatcccagacagggcggtggggcagaggtgctccccacatctcagacgatgggcggccaggcag

SEQ ID NO: 67112 - DNA, 120 bp, synthetic construct
  source 1..120: mol_type = other DNA
cttttgtctttggctctgtttatatgctggattacatttatcgatttgcgtatattgaaccagccttgcatcccagggatgaagcccacttgatcatggtggataagctttttgatgtgc

SEQ ID NO: 67113 - DNA, 120 bp, synthetic construct
  source 1..120: mol_type = other DNA
ctgctttgaatgcgtcccagagattctggtatgtggtgtctttgttctcgttggtttcaaagaacatctttatttctgccttcatttcgttatgtacccagtagtcattcaggagcaggt

SEQ ID NO: 67114 - DNA, 120 bp, synthetic construct
  source 1..120: mol_type = other DNA
ctggccctaatgcaccaggtcaccttcactcctcctgcagtctcatcacggggcccctgctggtcctaacacacccaagtcaccctcacccctccctcagccttaccacgtgtcccctgc

SEQ ID NO: 67115 - DNA, 120 bp, synthetic construct
  source 1..120: mol_type = other DNA
agtcttcctagaggcttgcaggactgagacaaaagcctttgaatccctcttcctataagaatcatgctgacctaatctggaccaatgctcttttagccctgaaatggtggaaacattctg

SEQ ID NO: 67116 - DNA, 120 bp, synthetic construct
  source 1..120: mol_type = other DNA
gttgtagatatgcggcattatttctgagggctctgttctgttccattgatctatatctctgttttggtaccagtgccatgctgttttggttactgtagccttgtagtatagtttgaagtc

SEQ ID NO: 67117 - DNA, 120 bp, synthetic construct
  source 1..120: mol_type = other DNA
atatattgaaccagccttgcatcccagggatgaagcccacttgatcatggtggataagctttttgatgtgctgctggattcggtttgccagtattttattgaggatttttgcatcaatgt

SEQ ID NO: 67118 - DNA, 120 bp, synthetic construct
  source 1..120: mol_type = other DNA
ctctacacactgctttgaatgcgtcccagagattctggtatgtggtgtctttgttctcgttggtttcaaagaacatctttatttctgccttcatttcattatgtacccagtagtcattca

SEQ ID NO: 67119 - DNA, 120 bp, synthetic construct
  source 1..120: mol_type = other DNA
aatctcgctgattgctagcacagcagtctgagatcaaactgcaaggcggcaacgaggctgggggaggggcgcccgccattgcccaggcttgcttaggtaaacaaagcagccgggaagctc

SEQ ID NO: 67120 - DNA, 120 bp, synthetic construct
  source 1..120: mol_type = other DNA
gtggagaatggaaccaagttggaaaacactctgcaggatattatccaggagaacttccccaatctagcaaggcaggccaacgttcagattcaggaaatacagagaacgccacaaagatac

SEQ ID NO: 67121 - DNA, 120 bp, synthetic construct
  source 1..120: mol_type = other DNA
tcaacgagacagaaagtcaacaaggatacccaggaattgaactcagctctgcaccaagcagacctaatagacatctacagaactctccaccccaaatcaacagaatatacattttttttc

SEQ ID NO: 67122 - DNA, 120 bp, synthetic construct
  source 1..120: mol_type = other DNA
atggatacattcctcgacacatacactctcccaagactaaaccaggaagaagttgaatctctgaatagaccaataacaggatctgaaattgtggcaataatcaatagtttaccaaccaaa

SEQ ID NO: 67123 - DNA, 120 bp, synthetic construct
  source 1..120: mol_type = other DNA
ctcaaggaaataaaagaggacacaaacaaatggaagaacattccatgctcatgggtaggaagaatcaatatcgtgaaaatggccatactgcccaaggtaatttacagattcaatgccatc

SEQ ID NO: 67124 - DNA, 120 bp, synthetic construct
  source 1..120: mol_type = other DNA
ccagtctatcattgttggacatttgggttggttccaagtctttgctattgtgaatagtgccgcaataaacatacgtgtgcatgtgtctttatagcagcatgatttatagtcctttgggta

SEQ ID NO: 67125 - DNA, 120 bp, synthetic construct
  source 1..120: mol_type = other DNA
gagacttagactcccacacattaataatgggagactttaacacccaatgtcaacattagacagatcaatgagacagaaagtcaacaaggatacccaggaattgaactcagctctgcacca

SEQ ID NO: 67126 - DNA, 120 bp, synthetic construct
  source 1..120: mol_type = other DNA
caacttcttcctggtttagtcttgggagagtgtatgtgtcgaggaatgtatccatttcttctagattttctagtttatttgcgtagaggtgtttgtagtattctctgatggtagtttgta

SEQ ID NO: 67127 - DNA, 120 bp, synthetic construct
  source 1..120: mol_type = other DNA
atccacggtgatcaagtgggcttcatccctgggatgcaaggctggttcaatatacgcaaatcaataaatgtaatccagcatataaacagagccaaagacaaaaaccacatgattatctca

SEQ ID NO: 67128 - DNA, 120 bp, synthetic construct
  source 1..120: mol_type = other DNA
aaagagcccgcatcgccaagtcaaccctaagccaaaagaacaaagctggaggcatcacaatacctgacttcaaactatactacaaggctacagtaaccaaaacagcatggtactggtacc

SEQ ID NO: 67129 - DNA, 120 bp, synthetic construct
  source 1..120: mol_type = other DNA
acatgggagccggaggttgcagtgagctgagatcacaccactgcactccagcccaggcaacagagcaagactccatctcaaaaaaaaaaaaaaaaaaaaaggccttgtaatgagcaacca

SEQ ID NO: 67130 - DNA, 120 bp, synthetic construct
  source 1..120: mol_type = other DNA
tcctagtcttttgagatctttaagaagttccgcaatcttaatattacatggtgtggcttccttcaggagtttgttagggatttggaaattcccaaatattctgctaacttatacccttga

SEQ ID NO: 67131 - DNA, 120 bp, synthetic construct
  source 1..120: mol_type = other DNA
tgtgtttggtgcagacactgtggagcaacatctgcaggtctaagatgtgaatggcagaacaattacacacagtgcgctccttgtgcaagtttatcttcctgtccagtctgctattgaaac

SEQ ID NO: 67132 - DNA, 120 bp, synthetic construct
  source 1..120: mol_type = other DNA
agaataatttaaactgtgagtctgcactcttgtaccactcacttgcaccttactgtccataaccaatgaattagcttagctctactctattttgtctttgtgaaacttactttgacaagt

SEQ ID NO: 67133 - DNA, 120 bp, synthetic construct
  source 1..120: mol_type = other DNA
ctttagtgctgccctaacaaatatggtagccacagccatgtgaatattgaacacttgaaatgtggctaggctggactgagatgtgctgtcagggtaaaacacacaccagattttgaagac

SEQ ID NO: 67134 - DNA, 120 bp, synthetic construct
  source 1..120: mol_type = other DNA
tgccctgacggccgacaatgagcaataatgagaccctggatagaggaactgccttgcctagaccagacagatttctggtaatgtggtaataatattttttcccttccttcatggaagtgg

SEQ ID NO: 67135 - DNA, 120 bp, synthetic construct
  source 1..120: mol_type = other DNA
gtgtactgtcatcattttatggatgaggaaactgaggctcagagagggtgaataatttgctcatccttccaaagaactaaagggaagagaagtgctatagctctggcgccttctattcct

SEQ ID NO: 67136 - DNA, 120 bp, synthetic construct
  source 1..120: mol_type = other DNA
accctaggcctcaaagcgctccaaaggtccacttccagatactacaaaaagagtgtttcaaaactgctgtatgaaagggaatgttcaactctgtgaattgaatgcaagcatcacaaagaa

SEQ ID NO: 67137 - DNA, 120 bp, synthetic construct
  source 1..120: mol_type = other DNA
gtctagttcttatgtgtagatattcccgtttccaatgaaagcctcaaagctatccaaatatccacttgaagattctaacaaaaagagtgtttcaaaactgctgcatcaaaaccacgtttc

SEQ ID NO: 67138 - DNA, 120 bp, synthetic construct
  source 1..120: mol_type = other DNA
aaagcgctccaaaggtccacttccagatactacaaaaagagtgtttgaaaactgctgtatgaaagggaatgttcaactcagtgagttgaatgcaagcatcacaaagaagtttatgagaat

SEQ ID NO: 67139 - DNA, 120 bp, synthetic construct
  source 1..120: mol_type = other DNA
gactgagcagttttgaaactctctttttgtagaatctgcaagtggacatttggagccacttgaggcctattgtggaaaagggaataaattcacataaaagctacacggaagcattctgac

SEQ ID NO: 67140 - DNA, 120 bp, synthetic construct
  source 1..120: mol_type = other DNA
ttctttgtgatgtgtgcattcatctcaccaagcggaaccattcttttgatggagctgttttgaaatactctttttgtagaatctgcaagtgaatatttggagtgctttcaggcctgtggt

SEQ ID NO: 67141 - DNA, 120 bp, synthetic construct; identical to SEQ ID NO: 67139
  source 1..120: mol_type = other DNA

SEQ ID NO: 67142 - DNA, 120 bp, synthetic construct
  source 1..120: mol_type = other DNA
ttccttgtgatgtgtgcattcatctcaccaagcggaaccattcttttgatggagctgttttgaaatactctttttgtagaatctgcaagtgaatatttggagtgctttcaggcctgtggt

SEQ ID NO: 67143 - DNA, 120 bp, synthetic construct
  source 1..120: mol_type = other DNA
caagtggatatttggagcgatttgtggtctatggtggaaaaggaaatatcttcacgtaaaaactagacagaagcactctgagaaacttccttgtgatgtgtgcattcatctcaccaagcg

SEQ ID NO: 67144 - DNA, 120 bp, synthetic construct; identical to SEQ ID NO: 67139
  source 1..120: mol_type = other DNA

SEQ ID NO: 67145 - DNA, 120 bp, synthetic construct; identical to SEQ ID NO: 67139
  source 1..120: mol_type = other DNA

SEQ ID NO: 67146 - DNA, 120 bp, synthetic construct; identical to SEQ ID NO: 67142
  source 1..120: mol_type = other DNA

SEQ ID NO: 67147 - DNA, 120 bp, synthetic construct
  source 1..120: mol_type = other DNA
attcatcagagagagtttaacatttcttttgactgagcagttttgaaactctctttttgtagaatctgcaagtggacatttggagccacttgaggcctattgtggaaaagggaataaatt

SEQ ID NO: 67148 - DNA, 120 bp, synthetic construct
  source 1..120: mol_type = other DNA
tcaaagggaatggaatggattgcactcgaatggaatggattgcaatggattcaaatggaaaggaacggaattcaatggactcaaaaggaatggaatgtaacggaatggaatggactccaa

SEQ ID NO: 67149 - DNA, 120 bp, synthetic construct
  source 1..120: mol_type = other DNA
tggaatggactcgaatggaatggaacggatttgactcaaatggaattgaatggagtgcacctgaatggaatggagtggaatgggatggaataaaatggaatagagtgggctcaaatagaa

SEQ ID NO: 67150 - DNA, 120 bp, synthetic construct
  source 1..120: mol_type = other DNA
gaattgaatggtctcgaaatgaatggaaaggtatgcaatggaatggacccgaattgaatggaatgggatggaacggactctaattgaactgcagggaattgattggtctcaaatggaatg

SEQ ID NO: 67151 - DNA, 120 bp, synthetic construct
  source 1..120: mol_type = other DNA
aatgagatggaattgaatggactcaaacggaatggaatggaaaagactcgaatgtaacaggttggaatggaatggactcgaatggaaaggaatgcaatggactcgaatggaatggaatgg

SEQ ID NO: 67152 - DNA, 120 bp, synthetic construct
  source 1..120: mol_type = other DNA
tggaatggaaattactcgagtggaatggcatggaattgaatggactcaaatggaatggagtggactcgaatggaatggaaaggattggacccaattggaatggaatggaatggaatagaa

SEQ ID NO: 67153 - DNA, 120 bp, synthetic construct
  source 1..120: mol_type = other DNA
tggagtcgaatgaaatggactaaataggaatggaattgaatggaatggaatcgaatggaatgaaaacgaatgtaatgtgttcggatggaatggaatcgaatggaatggtatgcaatggaa

SEQ ID NO: 67154 - DNA, 120 bp, synthetic construct
  source 1..120: mol_type = other DNA
aagccaccgtcattcagggtccttgtcacattcactgaggctgtaacataattgttagaaagaacaggagcgggaggggggatggagtcggagaggcaggcagaggtcagatcacatcgg

SEQ ID NO: 67155 - DNA, 120 bp, synthetic construct
  source 1..120: mol_type = other DNA
cgctccccagatctccagctccctgaccctcaaactccaactgcagcaccagctccgccccgggtctccagctccacaatcctcaaactacaacagcagcaccagctcccctgtggatct

SEQ ID NO: 67156 - DNA, 120 bp, synthetic construct
  source 1..120: mol_type = other DNA
taaataaataaatgttttcctttcaaattgatgtttcttttctgttcacgcaagtcagaaaacttttctactttccatcaaccttgcaacctgcttgcattcatttgtaagatggaaatc

SEQ ID NO: 67157 - DNA, 120 bp, synthetic construct
  source 1..120: mol_type = other DNA
gaaaaatggtaagttctcagtttctccattaatagcaactctcagattaatcgctgtcctccatcgcttctccatgaaacaactttttatagctttgcttgcgtctatttttccattttt

SEQ ID NO: 67158 - DNA, 120 bp, synthetic construct
  source 1..120: mol_type = other DNA
aggctgtggctgggttcacgcatagttagataaatctgatattaataataacccgaatgaaaaacatgtattgaatcccaagattatgatgtaggaagcacggattctgaagagatgtct

SEQ ID NO: 67159 - DNA, 120 bp, synthetic construct
  source 1..120: mol_type = other DNA
aaaccataaaaaccctagaagaaaacctaggcattaccattcaggacataggcgtgggcaaggacttcatgacagcaaaagaaactaccatcagagtgaacaggcaacctacaacatggg

SEQ ID NO: 67160 - DNA, 120 bp, synthetic construct
  source 1..120: mol_type = other DNA
agatatcggtctagatagtatctatctagatatcggtctagatagtatctatctagatatctgtgtagatgtctagatatctatctagatattatctatctagatatctgtcgctatcta

SEQ ID NO: 67161 - DNA, 120 bp, synthetic construct
  source 1..120: mol_type = other DNA
agagcagttgaatcattgtattcaagcccttagcatattatgcatattacattcagttttaaaaaattaaagggccaaggaggatcctacctcccttttaaacaattaataatttttatt

SEQ ID NO: 67162 - DNA, 120 bp, synthetic construct
  source 1..120: mol_type = other DNA
gagatgagtaaggaagtgatggggagagggtgagtggggaagtggtgagaggggaggaggtgagggggcaagggaggcgatgcggaggaaggaggtgatgggaaggaggtgagtgtgtag

SEQ ID NO: 67163 - DNA, 120 bp, synthetic construct
  source 1..120: mol_type = other DNA
gaaatggtgttctgattgaaactgaatttgattaaattaagatgaatctctgtgtagctccgcaaccctctcagatggccggaatcttattccctcttgaccttacttgtgtgtctcagg

SEQ ID NO: 67164 - DNA, 120 bp, synthetic construct
  source 1..120: mol_type = other DNA
tgataccgatcgtgggaatcttctgttaaaggatgtctctgagacatgataccgatcgtgggaatctgctgttaaacgatgtctctgagacatgataccgatcgtgggactcttctgtta

SEQ ID NO: 67165 - DNA, 120 bp, synthetic construct
  source 1..120: mol_type = other DNA
ggctagaattatgaagaaggcccaggtgtccccagtcttgcccctccctctgtcactaagaggggccttgtgtggcttctgcccaggaagaggagcctgtctcggaggggtcacttgagt

SEQ ID NO: 67166 - DNA, 120 bp, synthetic construct
  source 1..120: mol_type = other DNA
gtggagcttcagattctgggagaagtttccggggagtttggaaaacaaaagtgcaggtctagcttctagcttcagggcgtgaaaaaggtctggaggtgaggcattttgctgttagcttcc

SEQ ID NO: 67167 - DNA, 120 bp, synthetic construct
  source 1..120: mol_type = other DNA
agcatataatcaagaaatacgtgtaagtgaccttagtcagcagcccatgcggtggctctgcctatggagtccccgttcttttgttcttttactttcctaatttactttcactttatggac

SEQ ID NO: 67168 - DNA, 120 bp, synthetic construct
  source 1..120: mol_type = other DNA
cgtttctgcttctcctctttccggtccttgacagtgattccgtgcatcacaaacacacacgctccctcagttacacgaatcacaaacacacgctccctcagttttgtgcatcacaaacgc

SEQ ID NO: 67169 - DNA, 120 bp, synthetic construct
  source 1..120: mol_type = other DNA
ccctcagttttgtgtgtcacaaacacacacgctccttcagttttgtgcttcacaaacacacacgctccctcagttttgtgcatcacacacacattccctcagttttgtgcgccacaaaca

SEQ ID NO: 67170 - DNA, 120 bp, synthetic construct
  source 1..120: mol_type = other DNA
gaagtttctcagaatgcttctgtgcagtttttatgtgaagatacatgcttttccacagtaggcctcgaagcgcaccaaatatccacttgtagattctacaaaaagagtgtttccaaactg

SEQ ID NO: 67171 - DNA, 120 bp, synthetic construct
  source 1..120: mol_type = other DNA
ccacaataggcctcaaagagctccaaatatccacttgtagatacacaaaaagagtgtttcaaaacttctcaatcaaaggaaaggttcaactctttgagatgaatgcgcccatcacaaaga

SEQ ID NO: 67172 - DNA, 120 bp, synthetic construct
  source 1..120: mol_type = other DNA
ataataattatcattatttttgaagtgttcataatggattatccaggaagatacagatgtggattcacaacccaaaaccataagccaagggtcttgccatatttacctgcaggtcaatga

SEQ ID NO: 67173 - DNA, 120 bp, synthetic construct
  source 1..120: mol_type = other DNA
ttgtggcttttgaggtgttagtcataaattctttgcctagacaaaaggccaggaaatttttccctaggttttcttcaagtatttttatagtttcaggtcttctgtttaagtttttaatct

SEQ ID NO: 67174 - DNA, 120 bp, synthetic construct
  source 1..120: mol_type = other DNA
aaaaggccttcgataaaattcaccccttcatgctaaaaactctaaataaactaggtattgatggaacgtatctgaaaataataagagctatttatgacacacccacagccaatatcatac

SEQ ID NO: 67175 - DNA, 120 bp, synthetic construct
  source 1..120: mol_type = other DNA
aaaacagatatatagaccaatggaacagaaaagaggccttagaaataatgccacacatctacaaccatctgatctttaacaagcctgacaaaagcaagcaatgggaaaaggattccgtat

SEQ ID NO: 67176 - DNA, 120 bp, synthetic construct
  source 1..120: mol_type = other DNA
taaccactcatccatcaatattcacaagggctgctccctccctttgattattgtgaataatattgctaatggacacgctgcacaaacatctgtttggtccctctgctcatttattttgga

SEQ ID NO: 67177 - DNA, 120 bp, synthetic construct
  source 1..120: mol_type = other DNA
ctgctggagaataaacagcacctggattcaagacttagaacgttacagtaatacttaagacaatgtagtacaaatatagatatacacatgtatatcagctatcagctaatttttgataaa

SEQ ID NO: 67178 - DNA, 120 bp, synthetic construct
  source 1..120: mol_type = other DNA
gtagctatttgcaaaagtagcaatattctggctgggtgtggtggctcatgcctataatcccagcactttgtgaggccaagacaggcaggtcacctgaggtcagaggttcaagaccagcct

SEQ ID NO: 67179 - DNA, 120 bp, synthetic construct
  source 1..120: mol_type = other DNA
acagttagagtattgtgtgtacactttttaatggtaaacttaagctgaatgtgtaatggatttgtctatagttttacatatttggaagcattttaaaataggttttaatcttacataaaa

SEQ ID NO: 67180 - DNA, 120 bp, synthetic construct
  source 1..120: mol_type = other DNA
ctgccatagtccagggcccgagggggctgggtcctctggtgccttagtccatgacgcagggaggctgggtcctctgctgccatagtccaggatgcgaggggctgggtcctctgctgccat

SEQ ID NO: 67181 - DNA, 120 bp, synthetic construct
  source 1..120: mol_type = other DNA
atcgggggtccttctgtgctgtagtccagggcaccgcaaggtgtgggtcctctggtgccctagtccagggggcggcgagtcagaggttctcccgtgtctcagtctagggcctggtaggac

SEQ ID NO: 67182 - DNA, 120 bp, synthetic construct
  source 1..120: mol_type = other DNA
atcaatgggtttttggttaaagttttcagcagctgcctgcagttccatttttcttaccaggtaagagacatagcttcatgaaaacaaagggagaaggcttgtgaccagagaactcccagt

SEQ ID NO: 67183 - DNA, 120 bp, synthetic construct
  source 1..120: mol_type = other DNA
gttggtaatattttacctgtggttgaaagagttaccagcccttccttgatcacccatggtaagacccatgagcctctgaatataattatagaaaacatttggagagggatagagagagac

SEQ ID NO: 67184 - DNA, 120 bp, synthetic construct
  source 1..120: mol_type = other DNA
ggcaaggaagaagtgcaaacattagtaggtaagtccactagcaggaggaatgtgataagtagatccaacagggtacaacacagtatgatagaagcaaacaaggtagaaatgagttctgac

SEQ ID NO: 67185 - DNA, 120 bp, synthetic construct
  source 1..120: mol_type = other DNA
attgagaggagtgttatgttgatggaatgccctatcctgacttgccatctgattagaacttccctcaatttttaaaatgcttcttgaaatggtttggatttgtgcaccccccatccccaa

SEQ ID NO: 67186 - DNA, 120 bp, synthetic construct
  source 1..120: mol_type = other DNA
cagggaggttgaggctgcagtgagccatgatcgtgctgcccctctccaatctgggtgacagagcaagaccctgtctcaaaaaaaaaaaaaaaaaaaaaaaaggctatcactatactatct

SEQ ID NO: 67187 - DNA, 120 bp, synthetic construct
  source 1..120: mol_type = other DNA
acaagtctgcctatttacatgatgtacattgtgtcccactactggtaatagaagctcagcagctgattgactgttaggttattttcaaagctcaatattcacaataatctaacagacacc

SEQ ID NO: 67188 - DNA, 120 bp, synthetic construct
  source 1..120: mol_type = other DNA
cacacacacacaaagacacacatggagggagaggaagtaaagattagaaagcagcacataatgttatggtaggcaatgggaccactaatgattttcatattcttttttattttcttcttt

SEQ ID NO: 67189 - DNA, 120 bp, synthetic construct
  source 1..120: mol_type = other DNA
aaaaataattatgagagcagagcaaagacatactggcctaggaaagaatctcaaagggggaagctgataagaagaacttatttttctcatccccgttcctggagtccgttccttctgtgc

SEQ ID NO: 67190 - DNA, 120 bp, synthetic construct
  source 1..120: mol_type = other DNA
tggtcaatgtagtcttctctgggcattcttcacagatatctgctggcatggctcatcttctctttgattttgcatgtattgtcacccactgatgaagtttctggtcacctgccattttcc

SEQ ID NO: 67191 - DNA, 120 bp, synthetic construct
  source 1..120: mol_type = other DNA
tggcctatgatcaccccctcatcccagctcttaaaatctctactgctgtttgtttcagtggagctgagttcagactaagttctggcctctttgtccttttgcaatagccttcaataacag

SEQ ID NO: 67192 - DNA, 120 bp, synthetic construct
  source 1..120: mol_type = other DNA
cccagccagcaaatgttgcatcagtggagccattggaagacttacgtctaacatgggatttgggctctctctaacgttaaactggaatacgatgataagtccactcaaaatttcttaata

SEQ ID NO: 67193 - DNA, 120 bp, synthetic construct
  source 1..120: mol_type = other DNA
ctctcaaaggtcaaagacaaagagaagaccctgaaaggactaagaaaaaggaaacaacacataagagaattccattatgcctggcagcagacttctcagcagaagcactacaggccagga

SEQ ID NO: 67194 - DNA, 120 bp, synthetic construct
  source 1..120: mol_type = other DNA
atggaaaccaaaagaaagccggtatagatatatttatatcagataacatatacttcaagcaaaatcctataaaaacagacaaatatggccattatataatgataaaggggtcaatatcac

SEQ ID NO: 67195 - DNA, 120 bp, synthetic construct
  source 1..120: mol_type = other DNA
acttctcttcaacatagcactggaagtcctagccagagcaattaggccagcaaaagaaaagacatccaaattgaaaaacaaaaataaagtcaaattgtccctgtttgcagatgacatgat

SEQ ID NO: 67196 - DNA, 120 bp, synthetic construct
  source 1..120: mol_type = other DNA
tgacccctgtcaggcggagcagctggagctgacccacgggcctgggctttcgagcgctttgtccaggcgctaatgatgggaaggtgaaaggtgggggtggccacaccctgcagtcagggt

SEQ ID NO: 67197 - DNA, 120 bp, synthetic construct
  source 1..120: mol_type = other DNA
ggcccaagctcacacaccacacttacatggcttattcacacacttacacacattaacacacatacgcactcatatttacacatccacacgcagttatattccacatacacactcatactc

SEQ ID NO: 67198 - DNA, 120 bp, synthetic construct
  source 1..120: mol_type = other DNA
caatgataaatataagtcatctggaccagcacagagcagatacagtgccttctccacatgcagtgaatgaggttctcacgtctgttagtgtgtggaattgaacatcagtatcagaatcat

SEQ ID NO: 67199 - DNA, 120 bp, synthetic construct
  source 1..120: mol_type = other DNA
cacaggtggggaaatacagaggtcttgactttagtttgctagataacgacacaaaccttctcagatactgtgagcttggataataccatgtttaagttaaggtagttgaggcatacattc

SEQ ID NO: 67200 - DNA, 120 bp, synthetic construct
  source 1..120: mol_type = other DNA
cattttatttcatagctttttttttttttttttttttttaaggggcagtgtcttgttacattgcccaggctggtttccaactcctgggctcaagtgatcctcctgcctcagcctctcaag

SEQ ID NO: 67201 - DNA, 120 bp, synthetic construct
  source 1..120: mol_type = other DNA
tctgagttatcttagtcctttggtcgctagctccagttttttgtaatttcttttgcaacctaatatgtgtcccatttggtaagtattacatatactagaaaatgacgtatattcagcatt

SEQ ID NO: 67202 - DNA, 120 bp, synthetic construct
  source 1..120: mol_type = other DNA
aaccaatagttgtaagcatattggatattgctgtttttctcctggtgctctggttataatctctcctattaatacctgtagtcttattgttgtagttattttttctattgatttctgaga

SEQ ID NO: 67203 - DNA, 120 bp, synthetic construct
  source 1..120: mol_type = other DNA
caatgtttgttcacgtttctagttcttttagttttgttttgtttcttaccagtatggctctgggagttatttacaaaatttaattttaaaagagacactccccatcattagggttccttg

SEQ ID NO: 67204 - DNA, 120 bp, synthetic construct
  source 1..120: mol_type = other DNA
tgaaggtggggttgggacaagcaagagtggccatttgcaggcagtgtgggcaccaggccatctgcaggggaaaagcccagtgggaggatgagacgacagcagaaacctcgcaggggctat

SEQ ID NO: 67205 - DNA, 120 bp, synthetic construct
  source 1..120: mol_type = other DNA
atactaaaatggaagaaaacccagaatcccatcccctgacttgctccagaggcctccccaactccaggccaccaggagcaggggccctgcagaggaactctccctgggtagaaattcgct

SEQ ID NO: 67206 - DNA, 120 bp, synthetic construct
  source 1..120: mol_type = other DNA
atgcctggccagttttttggtattttttgtagaggtgggattttgccatgttgcgtaggctggtctggaactcctgagttcaagcaatccacccaccttggcctcctaaagtgctgggat

SEQ ID NO: 67207 - DNA, 120 bp, synthetic construct
  source 1..120: mol_type = other DNA
tactaagtacctgaacacaatgacaaattctatgatcttctgaaactaacctccgggtgtgagaatttgaaggttagtggatagaagatggccgaataggaacagctccgatctgcagct

SEQ ID NO: 67208 - DNA, 120 bp, synthetic construct
  source 1..120: mol_type = other DNA
gtacctgaaagtgacagggagaatggaaccaagttagaaaatattcttcaggatattatccaggagaatttccccaacctggcaaggcaggccaacatgcaaattcaggaaatacagaga

SEQ ID NO: 67209 - DNA, 120 bp, synthetic construct
  source 1..120: mol_type = other DNA
gactaaaccaacaaagatcgaaagagacaaggtcattacataatggtaaagggatcaattgaacaagaagagctaactattctaaatatatatgcacctaatacaggagcacccagattc

SEQ ID NO: 67210 - DNA, 120 bp, synthetic construct
  source 1..120: mol_type = other DNA
agaatcattctggctcctgtttggaaaatagctgggattgggttggaaaaaaaaaaagtaatggaaatagagggaacaatcagaaatgactgctgtaatttagaagagagataacggaaa

SEQ ID NO: 67211 - DNA, 120 bp, synthetic construct
  source 1..120: mol_type = other DNA
tttcccgtatgtatgtaggacttttaaacttgttccagtacaggtagggaaagaaaattcacattagtttattcacacacatatagagagagttggggtatctgcgtgctgcccaggctg

SEQ ID NO: 67212 - DNA, 120 bp, synthetic construct
  source 1..120: mol_type = other DNA
ttgggtatatacccagtaatgggatggctgggtcaaatggtatttctagttctagatccctgaggaaaaaaaaaaaaaaaaaaaaaaaaaaaaagagaataggcacagaagtgaatttgc

SEQ ID NO: 67213 - DNA, 120 bp, synthetic construct
  source 1..120: mol_type = other DNA
tggtaaatttagcatcttttaatttttcttcccctacagtaattacaaaattctggagggggaaaaatgtaatattctccaggagtgagaatggaagacaatactttgagctatactaga

SEQ ID NO: 67214 - DNA, 120 bp, synthetic construct
  source 1..120: mol_type = other DNA
aaccacaaagtgcagagcaaaagagagagtgagggacctgtgtgctaaagcttttattggagtccagggtattattaggtgggtttccatgggagttctaatttgcgagtttaaagcaag

SEQ ID NO: 67215 - DNA, 120 bp, synthetic construct
  source 1..120: mol_type = other DNA
tccctacaagccagcacaggcaaaaatctttcaggtataaaattctcttctttcttactgtagtgtatctttggcaacatgggtatacagactatggaaagcttaagaatgtaagttaca

SEQ ID NO: 67216 - DNA, 120 bp, synthetic construct
  source 1..120: mol_type = other DNA
gtctgacagctgggatgtaaagagacagtgaaaggattctgacttttggcattgtcagcagtttcccttgagagtggagccctgtctttctgcaacctgcagctctcgctttcctgctgt

SEQ ID NO: 67217 - DNA, 120 bp, synthetic construct
  source 1..120: mol_type = other DNA
tgtgtaactgagaaaaatcacttaacctgtctgaacctaggtttcctcaaatatattcagtctgcactcccaggacctcactttaagagaaacctgaatctcttgagcacgagcatgtgg

SEQ ID NO: 67218 - DNA, 120 bp, synthetic construct
  source 1..120: mol_type = other DNA
aaagattgtttagtgtgttagatgttaaatgctaagacaattttagaatttaaggaattgaatatacagtattttcatgactagtccctcacgttcctttacatgccaggatctcacatc

SEQ ID NO: 67219 - DNA, 120 bp, synthetic construct
  source 1..120: mol_type = other DNA
attgtgatgttcctggagtattggaacaatacctatgactttttgtttctattgatttttaactcttctaataaccacttctttaagaaaagtcatacatcatcactttggtgtatcaga

SEQ ID NO: 67220 - DNA, 120 bp, synthetic construct
  source 1..120: mol_type = other DNA
tccatctcaaaacaaaacaaaacaaaaacaaaacagtggaccttcagggacacccagtttacatcctcagcaatcccatgcaacagccaggaacttggtaaggaagaaatggcttcttaa

SEQ ID NO: 67221 - DNA, 120 bp, synthetic construct
  source 1..120: mol_type = other DNA
tgggaggcagaggtaggagaactgcttgagcccaagagtttgagaccagcctaggaaacatagagagatcccatttctacaaaaaaaaattaattaaaaaaattttataaatttgtaaag

SEQ ID NO: 67222 - DNA, 120 bp, synthetic construct
  source 1..120: mol_type = other DNA
agtgttgcctttgagactgaactctggacagcctttccatgttctcttttctgtaaaaaggagactttttatttctggcagcacttgcctaggagatagcaaagttaaatgttgtgtttc

SEQ ID NO: 67223 - DNA, 120 bp, synthetic construct
  source 1..120: mol_type = other DNA
ttaggtttatgagcaattagagggaaccgagtcttcacaaagaaacacaatatcctgatttcctgtctcatgcttgattttcctacattgtctcacctcagctgcgtgattccatgtatc

SEQ ID NO: 67224 - DNA, 120 bp, synthetic construct
  source 1..120: mol_type = other DNA
gaaaagagtaaaagaggcctttctttcacaacttgccaagacgtgcattacttatttaaaataaaaaaaaaatgctgtttgaaaaacaagaaggatggcaagaatgaagctccttcatgc

SEQ ID NO: 67225 - DNA, 120 bp, synthetic construct
  source 1..120: mol_type = other DNA
ccctggaggcagaggttgaagtgagctgagatcgtgccgctgcactccagcctgttgacagagcgagactctgtctcaaaaaataaaaattaaaaaaaagataatgtgatttttttatat

SEQ ID NO: 67226 - DNA, 120 bp, synthetic construct
  source 1..120: mol_type = other DNA
ctgggattacaggaatgagttactgtgcctggcccattcctcttttttaataccccaaaggcaactgatatcctaatttctcacacaagggattggttttgcctgggtgttgaactttat

SEQ ID NO: 67227 - DNA, 120 bp, synthetic construct
  source 1..120: mol_type = other DNA
ttaagatataccgatttctgggtgccacctgcagagattctgttgtaatcactcaggagtctgacatcagcatccagatttcaaaagttccccgagtgattctaaagcatcctgaagatc

SEQ ID NO: 67228 - DNA, 120 bp, synthetic construct
  source 1..120: mol_type = other DNA
tacgtttcccaatttccacatttgtaattatagcctaggaagcttctttgcttggagaaagatgttcttatattaaaacataaaactcttcccaagcatccactagttcatccagtaagc

SEQ ID NO: 67229 - DNA, 120 bp, synthetic construct
  source 1..120: mol_type = other DNA
gattcttcttttaggaatacatgttattttatcctctatgacacctagcacaatacaatgaagttagtagatactcagataatatctgtagtctgaacctatttccttatctaaacagta

SEQ ID NO: 67230 - DNA, 120 bp, synthetic construct
  source 1..120: mol_type = other DNA
caggagcagcccggccaggagcagctcataggggtagaggctcagcttaggctgccccaagaaggctcctccaccagccaggggtgtgcgcagcctcagggggctccgtgctgcatcttc

SEQ ID NO: 67231 - DNA, 120 bp, synthetic construct
  source 1..120: mol_type = other DNA
agttggtgagcgagataaaagtccatggtttcgacccctaaaacatgtgtgactgtacatttttatacatctccactctacggccttttacaggctttccaattttacaggcctttccaa

SEQ ID NO: 67232 - DNA, 120 bp, synthetic construct
  source 1..120: mol_type = other DNA
acatcgcgagtctccgtgctggtgtttaagtcattaaaaagatattcaaaaaaaaagtctctaaatacaggtttatggaataattcataacagctttaaggaactatcatggtatactgg

SEQ ID NO: 67233 - DNA, 120 bp, synthetic construct
  source 1..120: mol_type = other DNA
aaaacgcatcttgtcccgagaattttggataaggaatactcaaactgcatttcaattgtttgtttgtttgctctgtcttcaaaaatgagccaggtgcagtggctcatgcctgtactccca

SEQ ID NO: 67234 - DNA, 120 bp, synthetic construct
  source 1..120: mol_type = other DNA
agtcgaggcaatggtgaagctgcaggagggctgtaggtggtcatagctcaggaaggaagggtctttcagagactagaaactaggtctgagctaaaacatttgcaatcttggatttctttg

SEQ ID NO: 67235 - DNA, 120 bp, synthetic construct
  source 1..120: mol_type = other DNA
caatgtgtagtcctcagatgggcagcatccactggaaaactgctaggaatgcacattctcaggcctcacccaagatctgctgaatcagaagctctggggtggaacccaacaacctgcatt

SEQ ID NO: 67236 - DNA, 120 bp, synthetic construct
  source 1..120: mol_type = other DNA
tgcccgcctcggcctcccaaagtgctgggattacaggcgtgagccaccactcccggcgttctttcaatcttttactgtgaatagtacaatgaatcacctggtatatttataatgttgtag

SEQ ID NO: 67237 - DNA, 120 bp, synthetic construct
  source 1..120: mol_type = other DNA
gaacctattgatgacattaagggaggacttaatatatgtataaacaaatgtcacaatttctttatccattcatctgtccttgaatgggtaagtaaattgtccattaggacacttagtttg

SEQ ID NO: 67238 - DNA, 120 bp, synthetic construct
  source 1..120: mol_type = other DNA
aagatagaaagagagagacagacagacagagtgagagagatgagagagaagccagagggggaagagaggtccagaatttaatactttcccagtttttccaacttgcatctcaacccctta

SEQ ID NO: 67239 - DNA, 120 bp, synthetic construct
  source 1..120: mol_type = other DNA
tcgaatgccaggaacggctcaagtgccaggtgcaggtgggggcccccgaggaggaggaggaggacgcgggcctggtggccaaggccgaggccgtggctgcaggctggatgctcgatttcc

SEQ ID NO: 67240 - DNA, 120 bp, synthetic construct
  source 1..120: mol_type = other DNA
tttgctgcacccattaacttgtcatttaccttaggtatttctcctaatgctatccctccccgctcccccgaccccacaacaggccctatggtgtgatgttccctgccctgtgtccaaatg

SEQ ID NO: 67241 - DNA, 120 bp, synthetic construct
  source 1..120: mol_type = other DNA
atcaaaagtgtcattttctggccatttagaaccattctcgggttttggcaccaaatgtcgcgcacatccatgtgaagagaccaccaaacaggctttgtgtgagcaataaagctttttaat

SEQ ID NO: 67242 - DNA, 120 bp, synthetic construct
  source 1..120: mol_type = other DNA
aggttcaagcacttctcctgcctcagcctcctgagtagctgggattataggtacccgctactacagctggctaatttttgtatttttttttttttatagagatggggtttcactatgttg

SEQ ID NO: 67243 - DNA, 120 bp, synthetic construct
  source 1..120: mol_type = other DNA
gatagaaaatagagaatgagattaggcttccccttgctctcaaaaaatggtttgagagtcttggaactggttccactctatgatagccatgagtactgttcgcccaacttttggttctca

SEQ ID NO: 67244 - DNA, 120 bp, synthetic construct
  source 1..120: mol_type = other DNA
tcataaaactctcatcaacactgttcagacatgtcccaccccagcaggggacagcctgggctcaagctgggatccctactttatttattttctgctaattaaacttcctaatatactcca

SEQ ID NO: 67245 - DNA, 120 bp, synthetic construct
  source 1..120: mol_type = other DNA
atccccatctttgctcaattgccctgcactgtagtaatccattggcactcttgtcttctccaggagaaatagttggaggagaagtttatagggtttcctgggccagggctggtctacagt

SEQ ID NO: 67246 - DNA, 120 bp, synthetic construct
  source 1..120: mol_type = other DNA
tacaatcgcgacctcatctaaacctcccgaaacctcatctaaatctcacctccatactatcacattggggattaaggctttaacatgtggatttcaggggacaaaggacaaaagcattca

SEQ ID NO: 67247 - DNA, 120 bp, synthetic construct
  source 1..120: mol_type = other DNA
catgccagtaatcccagctactcaggaggttcttctggcttctcagcttgcagacagcctattgtgggaccttatgattgtgtgagttaatacttaataaactcctgtttatattatgtg

SEQ ID NO: 67248 - DNA, 120 bp, synthetic construct
  source 1..120: mol_type = other DNA
agataaccaggtagagcatagaggactttaagggcagcgaaaatgctctgtatattactacgatggtggatacatgtcattatacagcaggtccttggatgacactatctcattcaacat

SEQ ID NO: 67249 - DNA, 120 bp, synthetic construct
  source 1..120: mol_type = other DNA
ctgccgccccgtttacatccacgcaggcgttgccccttacctgcaccgagcctgccgccccgtttacatccacgcaggcgtttccccttacctgcaccgagcctccattcccgtttatat

SEQ ID NO: 67250 - DNA, 120 bp, synthetic construct
  source 1..120: mol_type = other DNA
tttatatccacgcaggcgtttccccttacctgcaccgagcctccattcccgtttatatccacgcaggcgtttccccttacctgcaccgagcctcccgccccgtttacatccacgcaggcg

SEQ ID NO: 67251 - DNA, 120 bp, synthetic construct
  source 1..120: mol_type = other DNA
agttttttctgttttttgagacagagtcacgctctgttgcccaggcagaagtgcagtggtgtgatctcagctcactgcaacttccaccgcctcctgggttcaagcaattctgctgcctca

SEQ ID NO: 67252 - DNA, 120 bp, synthetic construct
  source 1..120: mol_type = other DNA
aagtgctaggattataggtgtgagccatcgcacccggctgattcaacttatttttatttatttattttttgagacggaatctcgctctgtcacccaggctggagtgcagtggtgcaatct

SEQ ID NO: 67253 - DNA, 120 bp, synthetic construct
  source 1..120: mol_type = other DNA
gtttggttgagaaggttctgtcacatatgacgtgctagaaagaaaagaccttggactttaatttctttgggcgttagagaggagaaggcgatttcagctttagaccatgttttctcttag

SEQ ID NO: 67254 - DNA, 120 bp, synthetic construct
  source 1..120: mol_type = other DNA
agctaggaccacaggcatgtgccactgtacctggctggtttttaaatactttttgtagagatagggtttcaccatgttgcccaggctgctcttgaactcctgggctgatccacttcccta

SEQ ID NO: 67255 - DNA, 120 bp, synthetic construct
  source 1..120: mol_type = other DNA
gcaacaagaatgaaactccatctcaaaaacagaacaaaacaaaacaaaacaaaaagcaaacaggctggggatgggggctcacgcctataatcccagcactttgggaggttgaggcaggtg

SEQ ID NO: 67256 - DNA, 120 bp, synthetic construct
  source 1..120: mol_type = other DNA
gtgcccagcctcgatattttaaaataggcaaaagacttaaacccggcttcacagagagacatgcaaatgttaacagcaggaaaaagtgccggcctcattagtcatcagaaatacgaaaat

SEQ ID NO: 67257 - DNA, 120 bp, synthetic construct
  source 1..120: mol_type = other DNA
aaagtacagcttcccttctccagggtgacagatgagccttttctgaagttctcagctttctcttctatcgatatttcccatgtcagttaaagtgtttgtagagacagctgatgcgtttat

SEQ ID NO: 67258 - DNA, 120 bp, synthetic construct
  source 1..120: mol_type = other DNA
ttgcagacggtgtatcatgggacttcaccctgtgatggtgtgaactagttctccctaatatactccctttcatatatatgtctattctgttagttctgcccctctggagaaccctaacta

SEQ ID NO: 67259 - DNA, 120 bp, synthetic construct
  source 1..120: mol_type = other DNA
atcgcttgaactcgggaggtggaggttgcagtgagctgaaattgtgccactgcactccaatctgggcaacagagcgagactctatctaaaaaaaaaaaagtaaaagatttgtttaccttt

SEQ ID NO: 67260 - DNA, 120 bp, synthetic construct
  source 1..120: mol_type = other DNA
ctcattatggttttgatttgcatttctctgatggccagtgatgataagcattttttcatgtgtctgttggctgcataaatgtcttcttttgagaagtgtctgttcatatcctttgcccac

SEQ ID NO: 67261 - DNA, 120 bp, synthetic construct
  source 1..120: mol_type = other DNA
ctctctgtctgttattggtgtacaagaatgcttgtgatttttgcacattgattttgtatcctgagactttgctgaagttgcttatcagcttaaggagattttgggctgagacaatggggt

SEQ ID NO: 67262 - DNA, 120 bp, synthetic construct
  source 1..120: mol_type = other DNA
tcccaaagtgctgggattacaggtgtgagccaccatgccaggccgtaaaccacttttcgaaaagaatcaaagtaaaacagtaattgtctacggatgacaaaagacttatagtagccatag

SEQ ID NO: 67263 - DNA, 120 bp, synthetic construct
  source 1..120: mol_type = other DNA
aggagaatcatttgaatccaggaggcggaggttgtagtgagctgagatcacaccactacactccagactgggtgacagagcgagattccatctaaaaaaaaaaaaaaaggaaaaaagaaa

SEQ ID NO: 67264 - DNA, 120 bp, synthetic construct
  source 1..120: mol_type = other DNA
ctaagatcagagcagaactgaaggagatagagacacaaaaaacccttcaaaaaatcaatgaatccaggagctggttttttgaatagatcaacaaaattgatagaccgctagcaagactaa

SEQ ID NO: 67265 - DNA, 120 bp, synthetic construct
  source 1..120: mol_type = other DNA
gatatgaccagactgctctgaggaattcaggttggctttatagagtcaataaaaagctacctggaaagagtggccatgtaccttatctatacagttcccttacaaggttcctgatcttga

SEQ ID NO: 67266 - DNA, 120 bp, synthetic construct
  source 1..120: mol_type = other DNA
tgtcagcttcctaaggccttcctagaagctgaacagatgccagcaccatacttcctgtaaagcctgcagaaccatgtgccaattaaacctcttttcttatatattacccaatctcaggta

SEQ ID NO: 67267 - DNA, 120 bp, synthetic construct
  source 1..120: mol_type = other DNA
catttattcatccattcatccatccatctatccatcccactgagtcattcatccatctatccatccatccatctgtccgtccatccatcttatattttggggggcatgtctgatgtgtca

SEQ ID NO: 67268 - DNA, 120 bp, synthetic construct
  source 1..120: mol_type = other DNA
atcagaaactgcccttgttgaatgatgctctaatgcggtgttgacatctctgtcctactagactggggttgctttgaggactccaattctgtcttttcatcctgattccatgatggaaca

SEQ ID NO: 67269 - DNA, 120 bp, synthetic construct
  source 1..120: mol_type = other DNA
gggaactcgagccatgttttctgcatggtttaataatcctttgtatcagtgccaggaattcactgcagataagctggtctggaagaaaaacgaacattttgttatttctgcacagctgct

SEQ ID NO: 67270 - DNA, 120 bp, synthetic construct
  source 1..120: mol_type = other DNA
aaagcccatctatggcagaagaaggtgatagcaaaccgcattattgaccctcaaagtttatcaaccaaaagtggagtcaggagaaagtcacagagaagagatgctgaacctagaaatggg

SEQ ID NO: 67271 - DNA, 120 bp, synthetic construct
  source 1..120: mol_type = other DNA
taatcacttatgtctttagatggatgcacactcacacgtagacacacagctgagaaggtatagaagctctggaaaacgctgtcattttaagttggtctggtgataatttccaggccttct

SEQ ID NO: 67272 - DNA, 120 bp, synthetic construct
  source 1..120: mol_type = other DNA
gaagaaaatgattatgtgtacatgctggtggcacacataacttagtattaagtattacaaagtcttacaggcagggcacagtggctcacgcctataatcccagtattttgggaggctgag

SEQ ID NO: 67273 - DNA, 120 bp, synthetic construct
  source 1..120: mol_type = other DNA
agccactatgcccggcttggctctcactttcgtgttctttccatgtaatcacacatgaatggttgtcacaagatctcacagggaaataatttagcaagtgaatctcagttttaaaaagga

SEQ ID NO: 67274 - DNA, 120 bp, synthetic construct
  source 1..120: mol_type = other DNA
gcgccgcagtgccagcccggcgctggcgactgcctgccccagcccctcagtggcggcttgctctcttctctcgctccgaaccagacacagccgctgtcgctgccatgtggcgcgccgcag

SEQ ID NO: 67275 - DNA, 120 bp, synthetic construct
  source 1..120: mol_type = other DNA
gcttcccctgcgtcagtgagaccacattcgacgtcttcatctggttctgctgggccaactcctcactcaacccagtcactatgccttcaacgccgacttccggaaggtgtttgcccagct

SEQ ID NO: 67276 - DNA, 120 bp, synthetic construct
  source 1..120: mol_type = other DNA
ctttttattacttatacacatgttgggtctgtgctgaaacctggcttcaatggcatggcattagatcttctcaagcccagattttttttttcatttggaatcttttttgaagtaacatga

SEQ ID NO: 67277 - DNA, 120 bp, synthetic construct
  source 1..120: mol_type = other DNA
tcaatcaattttgatctctctaaggctaattttattgtcagtcttctgtgcagccaactgcaaaatgtgcagctcctggcacatcgtacttaataaatatttgttgaatgaatgactatt

SEQ ID NO: 67278 - DNA, 120 bp, synthetic construct
  source 1..120: mol_type = other DNA
gtcattagatgagggcccaccttctccagtgtgacctcatcttagcctcattacatctgcaaagaccccacttccaaataagatcacatccgtaggttttgaggttaggacttgaagaca

SEQ ID NO: 67279 - DNA, 120 bp, synthetic construct
  source 1..120: mol_type = other DNA
gaactttctattcctttttgtccaggtctcatggaacaaggaaatcaaaaaaacacccgcccgtgcacaaatggatttcctgaacccttctgtgcgccagtccttggggacgcaaatgtg

SEQ ID NO: 67280 - DNA, 120 bp, synthetic construct
  source 1..120: mol_type = other DNA
cccattaaacctctttttcttcccagtcttgagtatgtctttatctgaagcatgaaaacggactaatatacccaggttggagtgcagtggcgccatcttgacttactgcagccttgacct

SEQ ID NO: 67281 - DNA, 120 bp, synthetic construct
  source 1..120: mol_type = other DNA
gcattgatggttagttttgtttttttttttgagaaggagtctccctctgtcacccaggctggagagcagtggcacgatctcagctcaactgcaacctccacctctcaggttcaagcgatt

SEQ ID NO: 67282 - DNA, 120 bp, synthetic construct
  source 1..120: mol_type = other DNA
catgtttcaccatagttcgaaaaatactttaaaaaaagcaccatgtcccttggatttagtgataccgacccctctttgtccctctgcttcccagtggtttcttcttgcccctgggatttg

SEQ ID NO: 67283 - DNA, 120 bp, synthetic construct
  source 1..120: mol_type = other DNA
agtctcctatgtctacttctttctacacagacacagtaacaatctgatctttcttgcttttccccacaggatttaacaacaaatcctaatgcacgtgggggccagcggcagtgactgtag

SEQ ID NO: 67284 - DNA, 120 bp, synthetic construct
  source 1..120: mol_type = other DNA
aacataaaggttgccattttaaccatttccaagtgtacagttctgtggcattaagtacattcacaccgtttgcgaccatcaccgccacgtcacggtcagtttatgttatcttgattaggt

SEQ ID NO: 67285 - DNA, 120 bp, synthetic construct
  source 1..120: mol_type = other DNA
tgaatggatgaatgctataatcgctagaatacgtttgttatcgtgaatctgggctccttacgaaagggtgcgttgggtcccccctctctttgctcttccacctgctgctgcgggatgaca

SEQ ID NO: 67286 - DNA, 120 bp, synthetic construct
  source 1..120: mol_type = other DNA
catccctggtgtctctttctcttttcttataaggacgccagtcctattggattagagccccctgcttatgacctaatgtaatgttgattacctcctcctatctccaaatacagtcacact

SEQ ID NO: 67287 - DNA, 120 bp, synthetic construct
  source 1..120: mol_type = other DNA
agagacattttggtggagtcatggggccacagcctgattggtgagaacaggaagggaaattgcagatgggcctgggccccctggctcccgcatactccaggaccagggctgagtcatcgt

SEQ ID NO: 67288 - DNA, 120 bp, synthetic construct
  source 1..120: mol_type = other DNA
cctgcagattttggaagtgacaacccccacaattgcccgagccaatttcttcaaataaatctctttccctccatccatccattcatccttctgtccacctatcctatcggctctgttctg

SEQ ID NO: 67289 - DNA, 120 bp, synthetic construct
  source 1..120: mol_type = other DNA
tctttgaaggggaaacaagtgcccggggcaggccaggaccgcagactggatcttgaggactggcagcgcagtgttttgtgcagaaaagctaagggagatgttacgtgctcagaccacacg

SEQ ID NO: 67290 - DNA, 120 bp, synthetic construct
  source 1..120: mol_type = other DNA
ccccaggccccctcttcttggaaacctgggctaagacagtaactaagctgggttggttccaatcatgtgagattggtttagcattagacaactgattcataaagttctttgtattaacat

SEQ ID NO: 67291 - DNA, 120 bp, synthetic construct
  source 1..120: mol_type = other DNA
cacaggcggatttgtgtgtgagccccgcggggccctggagtggaaaattgcagcgccagcctttgtggggcagactgctggcgttacgggaatcctgtagatgaagtgaatgtggccttt

SEQ ID NO: 67292 - DNA, 120 bp, synthetic construct
  source 1..120: mol_type = other DNA
ggcacaggaagaagcttacctcacccttcagacatcctggggggtacccttgtttcctatatcatttcaaccttggggtcccagcattgctggcgacgaggccggctgcaggttttggct

SEQ ID NO: 67293 - DNA, 120 bp, synthetic construct
  source 1..120: mol_type = other DNA
tgaaaaaaaaaaaaaactcaagctaaagaggtatgacccttgcaaaaaagggagccatgcttatctgggttttgttctcagatccttcttcagaccgccccatatggaatggagctgaag

SEQ ID NO: 67294 - DNA, 120 bp, synthetic construct
  source 1..120: mol_type = other DNA
aaagggatagaatgaggacagaccttggggaatgtgtgaatgctgaatgctggcctttcttgttctgtgttctttttgtttgtttgtttgtgtttttgagacagagtcttgctctatcgc

SEQ ID NO: 67295 - DNA, 120 bp, synthetic construct
  source 1..120: mol_type = other DNA
tgacctttctccctcctggtctgacatggtcatgcacagacctgggctgtggcagcctccaggcaaagcccatgcagggaagatggcagagctggggaaacccctgagaaagggaaccac

SEQ ID NO: 67296 - DNA, 120 bp, synthetic construct
  source 1..120: mol_type = other DNA
ctccataccctgctggtcattacgcagccactctagcaattagacacctgggaatcaggtacccaggactgttttctgtaaagccctattaaaatattcatgagctccatgaattctccc

SEQ ID NO: 67297 - DNA, 120 bp, synthetic construct
  source 1..120: mol_type = other DNA
ttcagtagcgatggagctacagggaaaataaagcgggagccctgggcatggtggtttaaatagggaggtcctgcaggaaggtcctgacatgctgcttttgggcaaagaccttcaggcttg

SEQ ID NO: 67298 - DNA, 120 bp, synthetic construct
  source 1..120: mol_type = other DNA
tgaatcaaatggcaccgtcacccctgcagagcgcgagaagccacccgcccgggagctgctaaacgtcattaagtccctacggtgacggtgacgcaggcactgaaagctctgagaaatagg

SEQ ID NO: 67299 - DNA, 120 bp, synthetic construct
  source 1..120: mol_type = other DNA
tttagacacccatcccaggctgtgttcaggaaaaagtgaggtggggtgtcaggagctgtgtgagccttgtggtgctgagtggccatgggcaagcccctgccctctgggcctcggctggga

SEQ ID NO: 67300 - DNA, 120 bp, synthetic construct
  source 1..120: mol_type = other DNA
gtgtttgtgtgtccctgatgtgtgtgcatccctggtgtgtgtatgggtccctggtgtgtgtgctgtgcgtccctggtgtgtgtgcatcccttgtgtgtctgtccctggtgtgtgtccctg

SEQ ID NO: 67301 - DNA, 120 bp, synthetic construct
  source 1..120: mol_type = other DNA
ccctgtcccagggtaggtgatgagacaaagcccttcccttggccctggcagagaagtgaggagcagccgctctgccttagtttataaaatgggaagaacaagtccctgagggtcaacgtt

SEQ ID NO: 67302 - DNA, 120 bp, synthetic construct
  source 1..120: mol_type = other DNA
ttttagtgtaatacttttaaaaattaaaattaatgcacaattcatgatgaacgaaatgtcaaacttctaaacaagtcaaggcccgcctctgtgtggcacagccctgggggcgagtgctca

SEQ ID NO: 67303 - DNA, 120 bp, synthetic construct
  source 1..120: mol_type = other DNA
atatgtttagagaacaggcggtttacatacacggatatacgtttagagaacaggcggtttacatacacggatatacgtttagagaacaggcggtttacatacacggatatacgtttagac

SEQ ID NO: 67304 - DNA, 120 bp, synthetic construct
  source 1..120: mol_type = other DNA
aagtgttgcaatggattgagaacgcctcccggagtgtctgaggccacctgcattttcagaagaaagttccactttcttcagaacagataacgtggtgctttgactgccattgttatctgc

SEQ ID NO: 67305 - DNA, 120 bp, synthetic construct
  source 1..120: mol_type = other DNA
ggtgggatccacaaagccatttgtgaactaggcttggacatcactcactgtcacacaggccaactctgatacaatgataccaggacgctgtgatggccaatttcatgtgtcaccttgact

SEQ ID NO: 67306 - DNA, 120 bp, synthetic construct
  source 1..120: mol_type = other DNA
ttcgagctttcagctgggctgggctgcatttccacagttaaaagtgagcagacggccgggtgcggtggctcaacgcactctgggagaccaaggcgggtggatcacaaggtcagtagttca

SEQ ID NO: 67307 - DNA, 120 bp, synthetic construct
  source 1..120: mol_type = other DNA
tggtgtgtagacagcacggcccaggccggtgtcggtgtgtagacagcacggcccaggcaggtgacggtgtgtagacagcacggcccaggccggtgtagacagcacggcccaggccggtgt

SEQ ID NO: 67308 - DNA, 120 bp, synthetic construct
  source 1..120: mol_type = other DNA
cccacctccaacactgggaatgacaattctgcataaagtttgggtgagacagagccaaaccttgtcagtgtgcatgtatttgtctgatttaaggagctaatttatagcccagtaaataaa

SEQ ID NO: 67309 - DNA, 120 bp, synthetic construct
  source 1..120: mol_type = other DNA
tctctttggtcaaagagtccctggtgcagcggggtgactggtccataaagattgtgtccacttatgcgccaggcacgggcaaggggctggggataccgagagcctggaaatgcacaaccc

SEQ ID NO: 67310 - DNA, 120 bp, synthetic construct
  source 1..120: mol_type = other DNA
agaggtggttaaacacccacgacacacactcacagcaaccagacataattcacaaatagcccctcctgtgttctctcccagcagtgtgagggggacgcagaaccagtgtctcctcttaaa

SEQ ID NO: 67311 - DNA, 120 bp, synthetic construct
  source 1..120: mol_type = other DNA
ctctgtaatatttaaccataaaccaaggctgcggggaacccccagtttgcagtaaacttccatttctctccactggatgcgcaggactccactcagccaggtaggagaatctgcactcac

SEQ ID NO: 67312 - DNA, 120 bp, synthetic construct
  source 1..120: mol_type = other DNA
ggacaactttatgtgggtcacttaatgcctctgaacctcagcttcctcttctgcacgatggagacaaaaacatttgctcttcaagcctgtggtagggaccaggtcagagtaaacaggaag

SEQ ID NO: 67313 - DNA, 120 bp, synthetic construct
  source 1..120: mol_type = other DNA
ggaactgagaccatccacccgccggccccctctcgccggctccggcacccctgcctactgtgacttcctgccccggactcgctctgccagcttggggcaaaccacttccctctggggttt

SEQ ID NO: 67314 - DNA, 120 bp, synthetic construct
  source 1..120: mol_type = other DNA
aggccctcacctcccagggaaagcacttcacttcagtgcagctccttgctgcgacagccaagagcccccagaacagctccgaggaggtcgcaggacataagaagccccaaggttgtttct

SEQ ID NO: 67315 - DNA, 120 bp, synthetic construct
  source 1..120: mol_type = other DNA
acagtggcgttcaggacataaaccactgtggccaaagcctctgggacaggcctctgagcatatgcaatcaggagagtggggagaagccagtcgctgggtccaggaagcagaagggagggt

SEQ ID NO: 67316 - DNA, 120 bp, synthetic construct
  source 1..120: mol_type = other DNA
acatttttggttgtcacaactgggtgtcaggtgctcctgccgtcttctgggtagaggccaaagatgttgctaaacaacttatggtgcacagagaattatccggccccaaatacccatctt

SEQ ID NO: 67317 - DNA, 120 bp, synthetic construct
  source 1..120: mol_type = other DNA
accttgactccagggctgaagtgatcctcccacctcagcctcccaagtagctgggaccacaggcatatgccaccatgcccaggtaatttttttttttttttttttttttgtagagacggg

SEQ ID NO: 67318 - DNA, 120 bp, synthetic construct
  source 1..120: mol_type = other DNA
catgtggaatgtgtaagggtgttacacaatgagaatttaaaaatggtcttcttgtgactgtgcccttaagagctgagagtacagggcagaaccttcctgtttctatgtagtggttccatg

SEQ ID NO: 67319 - DNA, 120 bp, synthetic construct
  source 1..120: mol_type = other DNA
catgagtgagatctgctcagcatggagagggctctatttttctacacccttgataatttgtaggtttgggaaagcatgcccagtgtggcttgtcagggctaacacatatgccttcattca

SEQ ID NO: 67320 - DNA, 120 bp, synthetic construct
  source 1..120: mol_type = other DNA
agtatttgttgaatgaataaattagtggaatacaaaattaaaatacttgtctcatcaaacatctagagaaaaaggagacagatatagagctaacccatgcctgttataccatttaatgct

SEQ ID NO: 67321 - DNA, 120 bp, synthetic construct
  source 1..120: mol_type = other DNA
gggtgagtgccaggggcaggatatgaatcactactgtttgatttgaaagcctgtgctcatttctctattccaggatgcaaaccaggagacgttttctattctatgtttctttttcctttt

SEQ ID NO: 67322 - DNA, 120 bp, synthetic construct
  source 1..120: mol_type = other DNA
gtagagatggggtttctccatgttggtcatttttaaatgaaagaccctttgagacagttcatacctaaatatgtaaatagtgcacaagattttgcagcctgaacagaaatggccactata

SEQ ID NO: 67323 - DNA, 120 bp, synthetic construct
  source 1..120: mol_type = other DNA
acatcagaccaggaagaaaagggcttggttatgagtcccagttgtgtgattttaagtacatgattaaacgtttattaatttggttctctcatctctaataatgaaaccatcactcttaca

SEQ ID NO: 67324 - DNA, 120 bp, synthetic construct
  source 1..120: mol_type = other DNA
tgagaggaaagcaaacctggtggtggcaacgagggcatctaatattttggattccattttggactcatgtttaaagtgcatatgggctatacaggtgggtgtatgagccgaggacaagag

SEQ ID NO: 67325 - DNA, 120 bp, synthetic construct
  source 1..120: mol_type = other DNA
aactccttgaagttcgcaccaaagacgacgcatttggttcaggtcactgggagctcggtggagctgatttgttctggggcacatttctgctgagacggatttgcgttctcccctgagcct

SEQ ID NO: 67326 - DNA, 120 bp, synthetic construct
  source 1..120: mol_type = other DNA
gttattccggaagaaacacgaagaggccaactctgtttcttccaccccaagagagtcggttcctcttaggtcagattcagttcctgcctccgagggaggcgagcacgtgcagaaacaggt

SEQ ID NO: 67327 - DNA, 120 bp, synthetic construct
  source 1..120: mol_type = other DNA
agggcagaattctggagtcctacaaggcctgtgggaggctccccaaggggggctccaactttcaacctgagaagtctaagcctctatcaccatcatcatcgccatcgtcttcgccaccat

SEQ ID NO: 67328 - DNA, 120 bp, synthetic construct
  source 1..120: mol_type = other DNA
ttgtggtcccggcgcagtggctcacgcttgtaatctccacactttggggggctgaggtgggcggacctcaagtgtgaggtcagaagttcgagaccagtttggccaacatggtgaaacccc

SEQ ID NO: 67329 - DNA, 120 bp, synthetic construct
  source 1..120: mol_type = other DNA
gtgtacaaacctctctgggccctgccttcagttcttcagggtccataccattaggaggagcggccggatcaggtggtggttctaatctttgaggagctggtacactgctctcccataaag

SEQ ID NO: 67330 - DNA, 120 bp, synthetic construct
  source 1..120: mol_type = other DNA
aaacacgcctttaacgtcctccaaaagaggttccacagcaataagaaaaaacaaaaaccaccgtgaaagtaaagtgcttgtcattgcttcaaagaggaaacacacaatggtttctgaggc

SEQ ID NO: 67331 - DNA, 120 bp, synthetic construct
  source 1..120: mol_type = other DNA
catatacaggatttgctttaaaaaaaaaacaaaaacttaaaaacactgacctaaacctctcactttaccttccttgaacaaaacccaaaaagcctaggtggggggtggggaggggggtcc

SEQ ID NO: 67332 - DNA, 120 bp, synthetic construct
  source 1..120: mol_type = other DNA
aaaaagccaaaacacctaacgtattgcttatttcgcttctagaaagttcttggctttgaggccagatgtcttcacctcctctgaagttattgctgtaagagtcagtgtccgtgccaggat

SEQ ID NO: 67333 - DNA, 120 bp, synthetic construct
  source 1..120: mol_type = other DNA
ggaaccacttagcagatgaggttcctcgaggagataacctgccgtgtgcccacccggggtcccagggcgggggcaggccctacctctgctgctctagcacctcctccagcaggctccagc

SEQ ID NO: 67334 - DNA, 120 bp, synthetic construct
  source 1..120: mol_type = other DNA
agaaggtcagacaactgtcagagctggttccctctgcaggacttgccgtggtggagggggagacgactatacctgtggggggaggacagcgcttttgatgctgcagtgcaaaggaatagg

SEQ ID NO: 67335 - DNA, 120 bp, synthetic construct
  source 1..120: mol_type = other DNA
aaagaccttcctgaggcacctggggccggcagacgggaaagacgctgtcaggggagcgactccggaccaccagcgccatcaagagaagaaacaagctggcttctgtctggagtgcaagct

SEQ ID NO: 67336 - DNA, 120 bp, synthetic construct
  source 1..120: mol_type = other DNA
gccccacgtggtttgacacgccagggcccaggagcaggggccgggccatcggctcagtcctgccacccaaggggagccatcagccagggatccagaccctgggggctgccacactttgtg

SEQ ID NO: 67337 - DNA, 120 bp, synthetic construct
  source 1..120: mol_type = other DNA
ctcccacaccacgtggacagaggctctcctgacttgtagaaattcccaaatccaaaatctgagcggcaaagaaacagatggatgaggttaaacggcaaatggcaaggggctgcggtttcg

SEQ ID NO: 67338 - DNA, 120 bp, synthetic construct
  source 1..120: mol_type = other DNA
tatattagaattcccctctgtggtcatatttaattcaagacacctcacatacaatttgagaatgcttaggccggggcatggtggctcacgccctgtaatcccagcacttcgggaggccaa

SEQ ID NO: 67339 - DNA, 120 bp, synthetic construct; identical to SEQ ID NO: 1247
  source 1..120: mol_type = other DNA

SEQ ID NO: 67340 - DNA, 120 bp, synthetic construct; identical to SEQ ID NO: 1248
  source 1..120: mol_type = other DNA

SEQ ID NO: 67341 - DNA, 120 bp, synthetic construct
  source 1..120: mol_type = other DNA
agggaagccaccttcagaaattgcagacttatgctgttggaaataaaatataacacatttgccaggattagcagagaaaggcaagctgaccccttacctggtaaagctttatgatgtgtg

SEQ ID NO: 67342 - DNA, 120 bp, synthetic construct
  source 1..120: mol_type = other DNA
tccgcgctgaactccgacatgataaccatggctccgcgcgcacctgcggggccgcacagagctcagagcccaccagcgcccccgccgcccgcggtcggctccatccgtgcccgcggagcc

SEQ ID NO: 67343 - DNA, 120 bp, synthetic construct; identical to SEQ ID NO: 1249
  source 1..120: mol_type = other DNA

SEQ ID NO: 67344 - DNA, 120 bp, synthetic construct
  source 1..120: mol_type = other DNA
agccagagtcttccaaaaggtcttaggtatttgcaaacacctggctggctgtttggaaacattgcatcagcaccaaataaaaactgcagccaaaactgcctccgcagaacaggtccccaa

SEQ ID NO: 67345 - DNA, 120 bp, synthetic construct
  source 1..120: mol_type = other DNA
cttcctggctttgcttcaggtggttttgtactttttaaattttgttttggtttgtttaggcttcagcctagcggctttaggtgccagaaaatcagattaaccactgcagcggcatccttc

SEQ ID NO: 67346 - DNA, 120 bp, synthetic construct
  source 1..120: mol_type = other DNA
gatggagacgtctgagtgtcagctcaggtctcggtgtttccaggtgacatgctggctgctagtgtagagcatggtaaaccatcttttttttttttggttactatttacttatgcaaaata

SEQ ID NO: 67347 - DNA, 120 bp, synthetic construct
  source 1..120: mol_type = other DNA
aggagcaaggagctgcgatgggaagcgggtggcaggaaggagcgtgaggcctgtgggtggaaggtctctggccttggagattgaagcgtttcacttgtgcatctcacagcccagagaagc

SEQ ID NO: 67348 - DNA, 120 bp, synthetic construct
  source 1..120: mol_type = other DNA
ggtgtggctgccatgcagggtctgggagctacagagagtcgggaaccaagggcgcggtggctcacacctgtaatcccagcactttgggaggccaaggatcacgaggtcaggagatcgaga

SEQ ID NO: 67349 - DNA, 120 bp, synthetic construct
  source 1..120: mol_type = other DNA
tatattaaaggcatgaatcctttacctctttcttccatggttttttcttagttatttgtctctgtgggttttttttacaggaggccaaacgctgccttgtgagtgtggcattcctggggc

SEQ ID NO: 67350 - DNA, 120 bp, synthetic construct
  source 1..120: mol_type = other DNA
ctttttgcacagctggccggagaagctgctgtgcgtcagggccaggcctgtggctgggagagcaacaaagtgtagggagggtcacggggcaactgtggcccacgttactgcccagacggt

SEQ ID NO: 67351 - DNA, 120 bp, synthetic construct
  source 1..120: mol_type = other DNA
ggaagcagagtccagactctaaggaggggtttctttgtcatcttccaactcaggacccttgggccaatcggagcagctcagcctcagtttctctcttcttcatctcctgtgtacttgagg

SEQ ID NO: 67352 - DNA, 120 bp, synthetic construct
  source 1..120: mol_type = other DNA
taaacgccagccatgagcttgagcgaacgccagtgtgtcgtgaggctgagcacagcctggcccctccactccggctcctggtggctgtctgctgtgtcccctatcggggaagaggtttct

SEQ ID NO: 67353 - DNA, 120 bp, synthetic construct
  source 1..120: mol_type = other DNA
agtccacatataactaaaagcgagttactgagggttactttctttgcagagtggttcccctaaaggattcctttaaacatgatccggtcagccagtgctcacttacgttcaccaagtcac

SEQ ID NO: 67354 - DNA, 120 bp, synthetic construct
  source 1..120: mol_type = other DNA
ctgggttttctcttctcttcatgaaggcgcttgtccttcacaccaggcgctgtggtccagcctgacagcccaggacgatcacgctgccaggtcttgacctgattatatctgcaaagaccc

SEQ ID NO: 67355 - DNA, 120 bp, synthetic construct
  source 1..120: mol_type = other DNA
cacggaaggagctcactttgtcagctgtaatgtgctgtgactatcgtgtgagttcccgggtcactgtaacaagtcccacagcctgggggcttcaacagagagagcctgaatggctctctc

SEQ ID NO: 67356 - DNA, 120 bp, synthetic construct
  source 1..120: mol_type = other DNA
gaacacagcccgttccatgtgcttgtcctcgggacacattaggaatgaacccaggcctcagtcctggcctcctcctcaaggctgggtgctcagacgtccccctcagcccctttctctaga

SEQ ID NO: 67357 - DNA, 120 bp, synthetic construct
  source 1..120: mol_type = other DNA
cctccacccaggatcacacactcctatctctgcacttctgccctccatcctgctccacgccgcctctgcttgttattccagcacattccagggtgatgcctgctgaagccacgcagccag

SEQ ID NO: 67358 - DNA, 120 bp, synthetic construct
  source 1..120: mol_type = other DNA
ggatgaaagtgcacgctggtcccagatggggctgggggtgaaagctgcatgctgatccctgggccccctcactctatgagctcctgaaaggagggaagcccccacaccctactgagtgga

SEQ ID NO: 67359 - DNA, 120 bp, synthetic construct
  source 1..120: mol_type = other DNA
cggcacatggggcttctccagccagccagggggaagcaccctgcagactgctaacttttgcaaaatagagtaaaaaagatcagctagaaaaataaaacaaaaaaggaaagatatacaaaa

SEQ ID NO: 67360 - DNA, 120 bp, synthetic construct
  source 1..120: mol_type = other DNA
ctcccacagacggggttctgcatctcccgagcacgtccgaagccccctttccacaagggccactgctcgccaggctgacggtgaccgccacttccctagggacccaccttctgttcccaa

SEQ ID NO: 67361 - DNA, 120 bp, synthetic construct
  source 1..120: mol_type = other DNA
aggtgttggctgcctgggtggcacttcctgtgctgaggctcagggctctgagccctcatggcacataaggtcttgaggacagtgaccacacagcccaatcggccgggcaggtggacttag

SEQ ID NO: 67362 - DNA, 120 bp, synthetic construct
  source 1..120: mol_type = other DNA
tcccatataaaaatttcacctccatttccttgtagagaagaaacatttctgacagcaaggaagattctaatttgaaaagcaagtgattcatctcccggtgccaaacagcagacgcaggcg

SEQ ID NO: 67363 - DNA, 120 bp, synthetic construct
  source 1..120: mol_type = other DNA
cggctgccccgctgaccccaactctgaccctgtgccggtggtgggcagcatctggcatgggggaggtaccatttcttccacactcgcgcgtcctcagcccagatcatccggtgaagtttc

SEQ ID NO: 67364 - DNA, 120 bp, synthetic construct
  source 1..120: mol_type = other DNA
ccagaaaactgcagacactgcatgtcctctgggagccccggccctgggagacgatgtgcagtggctccagctctgacctcatgagcccaagctccgctacacactgggtcctgacctgac

SEQ ID NO: 67365 - DNA, 120 bp, synthetic construct
  source 1..120: mol_type = other DNA
ggagcaagaggaggaggctcggcccaggacgttggccacaggctgacccgtgcagggggcaagggcttaagacggccccatcttccactccaagtgtggtctcaatcttgttggccagtt

SEQ ID NO: 67366 - DNA, 120 bp, synthetic construct
  source 1..120: mol_type = other DNA
ggggggagaggtgcacagcactgacgggcccctgggccactcatctgaactcttgagtcctcctagagcggtgatcccagccgggcagttagcttgagcgagccgagtacttacaggatg

SEQ ID NO: 67367 - DNA, 120 bp, synthetic construct
  source 1..120: mol_type = other DNA
tccaacgggaatttagagtctgaaggctgaggaccctaggggaccacccattagggctgagggctctggaaagaagttcaggacaaaggagtttggggagagcgctgggctcattttcct

SEQ ID NO: 67368 - DNA, 120 bp, synthetic construct
  source 1..120: mol_type = other DNA
agcctggccaacatggtgaaaccccgtctctactaaaaatattaaaattagcctggcatggttgtggatgcctgtaatcccagctacttgggagggtgaggcaggagaatcacttgaacc

SEQ ID NO: 67369 - DNA, 120 bp, synthetic construct
  source 1..120: mol_type = other DNA
catttttcagagtcaattcattttctaggcagacacacacattcctacaactcttttctccagatcattccttcagccagctggttctccaccgggattccaggaaagaatgaggccttg

SEQ ID NO: 67370 - DNA, 120 bp, synthetic construct
  source 1..120: mol_type = other DNA
agtcacagagagccttggacttcgtactcaaacaaaccaactctgaaaagacaggagacaaccagggaaatttcaacactgctagcagattatcacaaagaattcaagggtcgtgtttta

SEQ ID NO: 67371 - DNA, 120 bp, synthetic construct
  source 1..120: mol_type = other DNA
aaaccatacacacagcacacaccacaccacacacaaccataccacacacaccataccacaaaccacacacaacacaccacataccacacaccacaaaccacacacaccacaaaccacaca

SEQ ID NO: 67372 - DNA, 120 bp, synthetic construct
  source 1..120: mol_type = other DNA
tagaactccaagagaggaaagcaagagctcccttgccatgcgtttgctcagaactttaattttttctcctcaaggaaagtaaaagaaacaggtcttccttccactgtgcaggcagtcagc

SEQ ID NO: 67373 - DNA, 120 bp, synthetic construct
  source 1..120: mol_type = other DNA
gctccaccctaaaaactcatcactcaccctcgtgtttcctagcagatagtgggaagagatgcaggcccatcgtgtgcacagaggttcagagtgagcgcactgtgagtggaaactgtcacg

SEQ ID NO: 67374 - DNA, 120 bp, synthetic construct
  source 1..120: mol_type = other DNA
tacaggccatcttcctggggtacaggccatcttcctgtgtgggaagtcaaggcaggagcagaaggtggctaagtgaatatttaaccactatgcaactatattgaaacatatacacatcaa

SEQ ID NO: 67375 - DNA, 120 bp, synthetic construct
  source 1..120: mol_type = other DNA
caggggttgggaggagggagggatgaattggcagagtgtggaggatttttagggcagtgaaactattccgtatgatgttataatgatgtcattatacatgtcattatatatttgccccaa

SEQ ID NO: 67376 - DNA, 120 bp, synthetic construct
  source 1..120: mol_type = other DNA
tgaaaggagaagaagtcaccacagaatcctacatccagtggagacagccttcaggaatagaagcaaaataaagacattctcaagtaaaggaactagaagagaattgtcaccagcaaggga

SEQ ID NO: 67377 - DNA, 120 bp, synthetic construct
  source 1..120: mol_type = other DNA
gatgatgaacgacacccccaaaagatttgtccaggtcctaacccgaggaactggagaatgggacctgatttagaaaaggggtctttgcagatagatgggattaagttaaggattttgaga

SEQ ID NO: 67378 - DNA, 120 bp, synthetic construct
  source 1..120: mol_type = other DNA
cttggctacttatcccccacctgccgtcagtcgctgtcaaggggctcccagggaccctgactgcccagcatgtctggcctggctggagggagtccccaggtagcgctgagccattgtaca

SEQ ID NO: 67379 - DNA, 120 bp, synthetic construct
  source 1..120: mol_type = other DNA
aatctgcaatcaaaagctacccagctttggaaggctgagtgggatcacttaaggccaggagtttgagtccagcctgggcaacacagcaagttcccgtctctgaaaaaaaaaaaaaaatta

SEQ ID NO: 67380 - DNA, 120 bp, synthetic construct
  source 1..120: mol_type = other DNA
gtggttcctagctcaggcccagcagcccaggcctcaacacagcccagaatctcctgcaggcctaatttctggagtctggccaggcacggtggctcacgtctgtaatcccagcactttggg

SEQ ID NO: 67381 - DNA, 120 bp, synthetic construct
  source 1..120: mol_type = other DNA
tgccctaccagcagggtcactgccccatcaccaggagcctctcaaggggtgtccccacgcacacagcagaaaatcccaaggactggcaactgcttgagcctcccgaagtcctgggattac

SEQ ID NO: 67382 - DNA, 120 bp, synthetic construct
  source 1..120: mol_type = other DNA
acgtcctgctgggagctagtggtgttcatcataactcagccccaaggcagccagcagcacaggtgccaccaacatacagggaaatctgcatcacttggtgcctgtctggtgttcagtttc

SEQ ID NO: 67383 - DNA, 120 bp, synthetic construct
  source 1..120: mol_type = other DNA
tgagctgatggaccccgcaccccacaataccactgtcctggggctttaacacttaagagaccagcactctccccaccgttttactttctgaacctttcaaacacatggcaatttatttag

SEQ ID NO: 67384 - DNA, 120 bp, synthetic construct
  source 1..120: mol_type = other DNA
tttagttgcttctgtgccttctgaaacttgttccctgggcatatctaacttactcaaaaacttactctttcataaaagacatcaactcctagacgtctgcgcgagagaagcggaaacaca

SEQ ID NO: 67385 - DNA, 120 bp, synthetic construct
  source 1..120: mol_type = other DNA
tcctgtacactcaggaagaccccatgacttcgcagggggtggcaaggacccaggaaatgtccatcccccattttatccacaacaacactgaggagccctcaggtcctggcttttacaccc

SEQ ID NO: 67386 - DNA, 120 bp, synthetic construct
  source 1..120: mol_type = other DNA
ctctgcttgtgtaaaccaccctagcttataacactgcctgttttgaagacttcttggagtttaagtaatattacgttcatactttgctggggttacagaagacctttgtgacccaaagga

SEQ ID NO: 67387 - DNA, 120 bp, synthetic construct
  source 1..120: mol_type = other DNA
ggttagtttatgacaatcagggtccaggcaaggtctgcgtgctgtgtttggcggctagagctcatctaccttttttttaatcaacagacaagattccttctctttttcctttcattgatt

SEQ ID NO: 67388 - DNA, 120 bp, synthetic construct
  source 1..120: mol_type = other DNA
ttactgtgcctaatttataaattaaactttaccacacatacgcatgcagaggacaaaacatggtctatctagggttctgtctagggttcaatgctatctgcggattcaggcatccaccgg

SEQ ID NO: 67389 - DNA, 120 bp, synthetic construct
  source 1..120: mol_type = other DNA
cctaaattacccacgtctgctggaagactcgggcgcatttcgtctgtaccgagagcaatcaggaagtttggggtctgtggtgctccccagcacagcaagccccagggctacaggggagtc

SEQ ID NO: 67390 - DNA, 120 bp, synthetic construct
  source 1..120: mol_type = other DNA
cacatatgtgggtctacgatctgttaaggttctgtatgcagtgaaaagtatgcagttccacttttgtgccagtggatacccaattgtctctgctccattgttaaaaagacttcccttttc

SEQ ID NO: 67391 - DNA, 120 bp, synthetic construct
  source 1..120: mol_type = other DNA
cccaggcattgtggagaccctgattccctagctgtgcagctgcaaggtcacagataaactcaagtcgcaaaacatgtttctccttaaaaagtaagaaatgacataatgcatgtctcaatt

SEQ ID NO: 67392 - DNA, 120 bp, synthetic construct
  source 1..120: mol_type = other DNA
agaaacacgtggtgaagctccatgatgaaacgctctgacccactctgcagggtacagcattagcgttcaggtcggcttcctgagcccaggaaatgtcctggccctggcacagcagtgggt

SEQ ID NO: 67393 - DNA, 120 bp, synthetic construct
  source 1..120: mol_type = other DNA
ctgcagatgaaacatcagataagcatgtccatacacttttgtatacagaaggtttctcagattctcagagtggcccatgaccctgtaacagctaagaaccacagttctagggcttatgat

SEQ ID NO: 67394 - DNA, 120 bp, synthetic construct
  source 1..120: mol_type = other DNA
gatctaagagcattaaatgtacatttatggcgggaaaagcagcaacttagggagctccactggaacaatataaaatcctataataaaggctattcatggccaggtgcagtagctcatgcc

SEQ ID NO: 67395 - DNA, 120 bp, synthetic construct
  source 1..120: mol_type = other DNA
agatgcatttcacacccattatcaatggctattatcaataaaacagaaaataacaaatgttgatgaacacgtggagaaactggagcccttgggcactgctgccggtggggatgtaaagtg

SEQ ID NO: 67396 - DNA, 120 bp, synthetic construct
  source 1..120: mol_type = other DNA
acactacatcagggtctatactcaggatcctacactggttggagaagttctgaggcattctcagcatctatgccatggaagaaaacagaacaaacttcaggacttctcagaaattagtaa

SEQ ID NO: 67397 - DNA, 120 bp, synthetic construct
  source 1..120: mol_type = other DNA
ctttccagacaaaacgaatgtatcttacatcctacatctattgattgatgtcttatgtctccctacaatgcataaaaccgaactgtggcccatccaccttgggcacatgttcccagaact

SEQ ID NO: 67398 - DNA, 120 bp, synthetic construct
  source 1..120: mol_type = other DNA
acacctgagatcaggagttcaacaccggcttggccaacatggccaaaccccatctctactaaaagtaacaaaaattaactaggcctggtggcgggtgcctgtaattccagtgactcagga

SEQ ID NO: 67399 - DNA, 120 bp, synthetic construct; identical to SEQ ID NO: 1250
  source 1..120: mol_type = other DNA

SEQ ID NO: 67400 - DNA, 120 bp, synthetic construct; identical to SEQ ID NO: 1251
  source 1..120: mol_type = other DNA

SEQ ID NO: 67401 - DNA, 120 bp, synthetic construct
  source 1..120: mol_type = other DNA
ctttcctctgtaactgaggcaggagtttcccaagtaactgagataacaggtgtgtgccaccatgcctcgctaattttttgtatttttagtagagatggagtttcatcatattggtcaggt

SEQ ID NO: 67402 - DNA, 120 bp, synthetic construct
  source 1..120: mol_type = other DNA
cttttctggaccaaaccaatgtatttcttaaatgtttttgattgatgtctcacacctctctaaaatgtataaagccaagccgcacccaactaccttgggcacatgttctcaggacctcac

SEQ ID NO: 67403 - DNA, 120 bp, synthetic construct
  source 1..120: mol_type = other DNA
ctcatcctaagctcaaggaaaggttagaggaatttgaagccagtgggatggaaggtacatacacaacaacaaaacccagacccaccttaactccccaacaatgaaaacccagcggaaaaa

SEQ ID NO: 67404 - DNA, 120 bp, synthetic construct
  source 1..120: mol_type = other DNA
cgccactgcactccagcctgggcaacaaagtgagactctgtctcaaaaacaaacaaacaaacaaacaaacaaacaaacaaaagaaggcaaaggaaacaaaaggctcattgtcaagtgaca

SEQ ID NO: 67405 - DNA, 120 bp, synthetic construct
  source 1..120: mol_type = other DNA
aaaggcagaaatgaaactgtctctatttgcagatgatatgattgtctatacagaaaatcccaaagaaactagaaaaaaagttattagaactaattgagtttagcaaagtcacagaataca

SEQ ID NO: 67406 - DNA, 120 bp, synthetic construct; identical to SEQ ID NO: 1252
  source 1..120: mol_type = other DNA

SEQ ID NO: 67407 - DNA, 120 bp, synthetic construct
  source 1..120: mol_type = other DNA
ggagaatcacttgaaccccagaggcagaggttgcagtgagctgaaatcacgccattgcactccaacctgggcgacagagttaagactgcatctcaaaactaaaaaaaaataaaaataata

SEQ ID NO: 67408 - DNA, 120 bp, synthetic construct
  source 1..120: mol_type = other DNA
gtatgaaaaaagaagttgagagtacagatgtcccctcttatctgttgctaaaactttctgtggtagtgccggcatgtgtcaaatacaatcaaacttgttcctgtcaggtgctttctgaca

SEQ ID NO: 67409 - DNA, 120 bp, synthetic construct
  source 1..120: mol_type = other DNA
tcccccagactactgtaatagccttcttggtggcttgcttatttaattttgcattcttgcctcttcctacccctatccatctgccatgctgcagctagaattaaactgtttgtttgtttg

SEQ ID NO: 67410 - DNA, 120 bp, synthetic construct
  source 1..120: mol_type = other DNA
tccattgatcctaggtcttcagacaacctcaaccagttgtcacccagaaaatgtttaaatttacctatcacttgaaagcccctgctttgggttgtccacctttctaaactaaaccaacgt

SEQ ID NO: 67411 - DNA, 120 bp, synthetic construct
  source 1..120: mol_type = other DNA
aaacacttttgaagaccaaagcccagagacacaggcccactaaaagattgagatgataaatacttctcctctccacacacaccttaaatcataccaacagagatgagagagcataacacg

SEQ ID NO: 67412 - DNA, 120 bp, synthetic construct
  source 1..120: mol_type = other DNA
aaacagaaatggaaattccagaaaagaatcacatttcagcttacatattctctcctcacagaggccatcccttatcgcccactcattgtcaagcccattaacctattttagttctctcaa

SEQ ID NO: 67413 - DNA, 120 bp, synthetic construct
  source 1..120: mol_type = other DNA
aaaaaaatcagtaaattggaagataggacgacagaaactacccattctgggtaacattatcaagatagccagctagaagtgcctagcattcaaccccctcacagagacagccagaacaat

SEQ ID NO: 67414 - DNA, 120 bp, synthetic construct
  source 1..120: mol_type = other DNA
accttacaggccaaacaactcaactgcctgcttccctagagctgaactagccccccaccccagtctgagctgctgagacacctctctccctgcagagtggagtcatggatacgctgcttc

SEQ ID NO: 67415 - DNA, 120 bp, synthetic construct
  source 1..120: mol_type = other DNA
atgcagggacacaagaaacatcaaaaagcaaggaaataggacaccaccaaaggaacataataactttctaggaatagaagaccccatcaaagagaaaatcagtgaactgccaaaaagaaa

SEQ ID NO: 67416 - DNA, 120 bp, synthetic construct; identical to SEQ ID NO: 1253
  source 1..120: mol_type = other DNA

SEQ ID NO: 67417 - DNA, 120 bp, synthetic construct; identical to SEQ ID NO: 1254
  source 1..120: mol_type = other DNA

SEQ ID NO: 67418 - DNA, 120 bp, synthetic construct; identical to SEQ ID NO: 1255
  source 1..120: mol_type = other DNA

SEQ ID NO: 67419 - DNA, 120 bp, synthetic construct
  source 1..120: mol_type = other DNA
agaaactgaagacacaaacaaatggaaagacatcccatgttcataaactagaacaataaatattgtaaaaatgaccatactaccaaaagcaatctacagaatcaatgcaatccttgccaa

SEQ ID NO: 67420 - DNA, 120 bp, synthetic construct
  source 1..120: mol_type = other DNA
ccaacatggtgaaacccatctctaccaaaaatacaaaaattagctgggcacctgtagtcccagctactctggaggctgaggtgggagaattgctggaacctgggaggtggaggttgcagt

SEQ ID NO: 67421 - DNA, 120 bp, synthetic construct
  source 1..120: mol_type = other DNA
gactggttatcattactggcaggcaacattcttccctactctctgcagggatttggggagaaaactcagaatgagaggtaaagatgtaaccatgcttcaataaaatgatgaggaacttta

SEQ ID NO: 67422 - DNA, 120 bp, synthetic construct
  source 1..120: mol_type = other DNA
caccagcagcccctcggcaaagccatgtcaccttgctaggcctttgttttctcatctataaactggttttaaattctctacaccactattataaagactaaataaaggaggagataccag

SEQ ID NO: 67423 - DNA, 120 bp, synthetic construct
  source 1..120: mol_type = other DNA
ctgtggcctcagtgcctagaacaggacctggcacgtagtggtgagtgaattagtgatgtttagtgatagacactgtttctaattatgtaattagaaagaaggaggactactactaagtgt

SEQ ID NO: 67424 - DNA, 120 bp, synthetic construct
  source 1..120: mol_type = other DNA
gaaaagcaaccagaacgctcctttgctgttggtaaatgttcacacctgatataaccactttgcaaaacagcccagcataaactactagaggtgaagacatgcacttctatagatcccaaa

SEQ ID NO: 67425 - DNA, 120 bp, synthetic construct
  source 1..120: mol_type = other DNA
gcaaatattccaaaatccaaaacaatctgaaatctgaaacacttcctgtcccaagcatttcaaataagggatattcaacctgtactatagagcagtggttctcaaccagggcgaggggca

SEQ ID NO: 67426 - DNA, 120 bp, synthetic construct
  source 1..120: mol_type = other DNA
cctgagcaacagagtgatactctgtgtccaaaaaaaaaaaaaaaagggttttgaggcttcaagatggctgactagacagatctggtgctcacctcttccacagagaagaaccaaaatagc

SEQ ID NO: 67427 - DNA, 120 bp, synthetic construct
  source 1..120: mol_type = other DNA
aacctgtcacagccgtcacaaacatcagcactttggaaaacagcccagcataagctaccagagatgaagaccccaaagggctgtcccaccactgctgttgccatcacccacaccacaact

SEQ ID NO: 67428 - DNA, 120 bp, synthetic construct
  source 1..120: mol_type = other DNA
aggaaagaggtttaactgaaagaggtttaattgactcatagttcagcatggctgaggaggcctcaagaaacttacaatcatggcagaaggtgaagcaaacacattcttcttcacacagag

SEQ ID NO: 67429 - DNA, 120 bp, synthetic construct
  source 1..120: mol_type = other DNA
tggacaagcaaaagctgagggaattcatcaccactagaccagtcctgtaaaaaatgcttaaggaagtcctacacccagaagtgaaagaacagtaactataatcatgaaaacatatgaaaa

SEQ ID NO: 67430 - DNA, 120 bp, synthetic construct
  source 1..120: mol_type = other DNA
ccaaatgggatacagcaaaagcaatgctaagatggaagtttatagtaacaaatgcctacatcagaaaaagtagaatgatttcaaataaataatctagcagtgcacctcgaggtactggaa

SEQ ID NO: 67431 - DNA, 120 bp, synthetic construct
  source 1..120: mol_type = other DNA
tagacttagaaattctcagcaaaatactagcaaactaaatccaacggcacatcagaaaaataacacatcattatcaaatggaacttaacttatcccagggattcaaggatggttcaacat

SEQ ID NO: 67432 - DNA, 120 bp, synthetic construct
  source 1..120: mol_type = other DNA
gaaacagcatggtactggtataaaaacagacacacacaccaatggaacagaatccagaatctagaaataaatccacgtatttacaacagaggtgcaagaatataccttgggggaaggaca

SEQ ID NO: 67433 - DNA, 120 bp, synthetic construct; identical to SEQ ID NO: 1256
  source 1..120: mol_type = other DNA

SEQ ID NO: 67434 - DNA, 120 bp, synthetic construct
  source 1..120: mol_type = other DNA
tcaagtactttgtactgtctgaatctagttcatttaagtcttgccttctcggcaaatttcaagttctgtcacacagtatgcaaggtggtaaccctcacagatccaaaccagtgctgtgta

SEQ ID NO: 67435 - DNA, 120 bp, synthetic construct
  source 1..120: mol_type = other DNA
attttcacgttgctgataaagacatatctaagactgggaagaaaaagaggtttaatggacttacagtttcacatggctagggaggcctcacaatcatggtggaaggtaaggaggaacaag

SEQ ID NO: 67436 - DNA, 120 bp, synthetic construct; identical to SEQ ID NO: 1257
  source 1..120: mol_type = other DNA

SEQ ID NO: 67437 - DNA, 120 bp, synthetic construct; identical to SEQ ID NO: 1258
  source 1..120: mol_type = other DNA

SEQ ID NO: 67438 - DNA, 120 bp, synthetic construct
  source 1..120: mol_type = other DNA
ttccgcacaacccactcctggtaccaatttactgtattagtccattttcacgctgctgataaagacatatccaagactgggaagaaaaagaggtttaatagacttacagttccacatggg

SEQ ID NO: 67439 - DNA, 120 bp, synthetic construct
  source 1..120: mol_type = other DNA
ggtagctgccattgtgtggaactaaggagaatgaagagaacaagtaataataaactgaaaagtcctccacagaagaaaacttctctccaccaaaatcaaatattcatcaagaatctgcta

SEQ ID NO: 67440 - DNA, 120 bp, synthetic construct
  source 1..120: mol_type = other DNA
gtctcaaaaaaataaataaaataaaaaataaaagtcatgctggctactgtgagcttcatttatgagccactaatgatggtgaagagaccaagtggctcccccaagccccactcacacagc

SEQ ID NO: 67441 - DNA, 120 bp, synthetic construct
  source 1..120: mol_type = other DNA
cctagttagggatttttctttttttttcttttttttttttttttttttgagaccaagtctccctctgtccccaggctggagtgcagtggtgtgatcttggctcactgcaacctccacatc

SEQ ID NO: 67442 - DNA, 120 bp, synthetic construct
  source 1..120: mol_type = other DNA
agccaggaatttgctccttttctaaaatatacttgcatggcagatgggtcagctctgatacatatgcagagcctgaatcacaaccagattagtcccacttccacacatgtcaaaatacat

SEQ ID NO: 67443 - DNA, 120 bp, synthetic construct
  source 1..120: mol_type = other DNA
aatatggcttctagcaccacaatgctactggttctgctttcttcaaggagcccagacatctggacactggctctcggggcctctactcagtcctcagcctcttggtcttgttttctgctc

SEQ ID NO: 67444 - DNA, 120 bp, synthetic construct
  source 1..120: mol_type = other DNA
gacacttgtcactgtttttgttgataatggatgtgaggtggttgtggggatttcttgccaggccttcccggggagctgctgttggcctctcgggtcatttcttggtggttttgctgtcct

SEQ ID NO: 67445 - DNA, 120 bp, synthetic construct
  source 1..120: mol_type = other DNA
gggcctcatgaggaatgagtttcactgcccagacaagcagtgttggccagccaggcctagttcctgattccagctcagcagctgactctcctgccatgggacctcagacaaatcatgtgc

SEQ ID NO: 67446 - DNA, 120 bp, synthetic construct
  source 1..120: mol_type = other DNA
atggtccaggaggccccaggaaggctcttgctgtccctaagcccagaggttttcaggggtctatgtgaattgtcactttttttctttttctttctcttttcctttttttttctttttttt

SEQ ID NO: 67447 - DNA, 120 bp, synthetic construct
  source 1..120: mol_type = other DNA
cccatggcccaggcacagaggttccagtacctgggctccaggcagagtgtatctagcaccccagagaccgaggcgggctgtaccgttggctgctgggagcgagagccctggctgggtagg

SEQ ID NO: 67448 - DNA, 120 bp, synthetic construct
  source 1..120: mol_type = other DNA
tcctgggcctcagcaccaggttctgggcccgcttccttgcagccccttccccagagcccaccaaagacccgaatcctcacactctcgggacaggtagctgtgggtggctgagagggactg

SEQ ID NO: 67449 - DNA, 120 bp, synthetic construct
  source 1..120: mol_type = other DNA
acgcggttggggtgctggacatgcggtggggggctggacacgggggctggacacgtggcgggggctggacacgcaggggggctggacacagcagggggctggacacgcagcaggggggct

SEQ ID NO: 67450 - DNA, 120 bp, synthetic construct
  source 1..120: mol_type = other DNA
cagaaccatgagggaataaactgtccttttaagccctctgctgtgtgatgattggcagtgccagcaatgggagctgatacagaccctgatcggggacccagacacctggcagcttgggct

SEQ ID NO: 67451 - DNA, 120 bp, synthetic construct
  source 1..120: mol_type = other DNA
agcgtggagattgttgtcagcacagaattgtggcaccagttgttgagacgcagtgacaggcagatgactggccaggcagtgacaggcagatggctgcccaggcagtgacaggcagatggc

SEQ ID NO: 67452 - DNA, 120 bp, synthetic construct
  source 1..120: mol_type = other DNA
ggcaccttcccaatcagtctagagcatttgggtggtcactgtattccaacattcactacaattagggactgccagaaaagcctgattgtcttcactggttatttataaccaaatcatagt

SEQ ID NO: 67453 - DNA, 120 bp, synthetic construct
  source 1..120: mol_type = other DNA
acattgagtgtggggaagtctgcacagttccacctgttggattgtttgatgtgtggtggtgcagacatggacacgatccatcttggtttttttgttttgttttgtttttgagatgatgtc

SEQ ID NO: 67454 - DNA, 120 bp, synthetic construct
  source 1..120: mol_type = other DNA
tcaaacctttcttaaggggcacagaataagacagtatacaccagtgtgaccgaagtttttatttctgctgaagaattcagctaaagtgcagctgcatgatcatagctcacgggaacctgg

SEQ ID NO: 67455 - DNA, 120 bp, synthetic construct
  source 1..120: mol_type = other DNA
tagagtggcactgactctgctgggaggatgtcctgccaccggggtttgtcttttataacaacttgtccctccttcccctccctgggtttgtgataacctggaggttaaaccttagagcag

SEQ ID NO: 67456 - DNA, 120 bp, synthetic construct
  source 1..120: mol_type = other DNA
cagaaccttagctccagggtgcagggactcgcccacgtggttccagcccagggcctggcccgagcaggtgctccctctgtgcttgttgaatgaaagcgaagtgaccaacagcacagactt

SEQ ID NO: 67457 - DNA, 120 bp, synthetic construct
  source 1..120: mol_type = other DNA
attatatgttaaacaaggagtggattattcatgaattttctgggaaagggtggtcaattcccagaactgaggcttcctctcctttttagaccgtgcagggtaactttcggacgttgccat

SEQ ID NO: 67458 - DNA, 120 bp, synthetic construct
  source 1..120: mol_type = other DNA
ttatgatccctcctgttttaatggaaaaatcttgtaaacactgggaggaccagtggtctttttctttcttaaatagagatgaggtctcactatgttgcccgggctgatctcaaactcctg

SEQ ID NO: 67459 - DNA, 120 bp, synthetic construct
  source 1..120: mol_type = other DNA
attttaagggggatttgagaaactgaaaaacacgacagcacccctcataggcgactttacccaataaagtcggtgatcataacattttctccagcacagacacacaggtgtgctcattca

SEQ ID NO: 67460 - DNA, 120 bp, synthetic construct
  source 1..120: mol_type = other DNA
tccaggatgacctcatctcgttctccactaatcacagctgcaaagatttatttccaaataaagtcgccttcttgggttccaggggacctgattttgggaggcgctgttcccccagcacag

SEQ ID NO: 67461 - DNA, 120 bp, synthetic construct
  source 1..120: mol_type = other DNA
ctcccttacacattatggcgtgggtgagcctcagaaacatggtgctaagtgactgcgtttatataaaaagcttgcactgatgtaaagtgtctagagtagagaaacccaggagatgaagtg

SEQ ID NO: 67462 - DNA, 120 bp, synthetic construct
  source 1..120: mol_type = other DNA
ttgattaaatagattcagatctgtcttcattctagaagttccttctcttacatactctatggctgcaccgttccggttgttcgagtttctttatctggaaaattgctccttcgcccagca

SEQ ID NO: 67463 - DNA, 120 bp, synthetic construct
  source 1..120: mol_type = other DNA
cagctcctgttccatccccgtctatttcatctgatgtctcaccagctcctgttccatccccagctatttcatctatttcatctaacatctcaccagctcctgttccatccccagctattt

SEQ ID NO: 67464 - DNA, 120 bp, synthetic construct
  source 1..120: mol_type = other DNA
tgttccattcctatttcatctgacatctcaccagctcctgttctattcctgtctatttcatctatttcatctgatgtgtcaccagctcctgttccattcccgtctatttcatctgatgtc

SEQ ID NO: 67465 - DNA, 120 bp, synthetic construct
  source 1..120: mol_type = other DNA
ggctgccactgtccaggtcagggaaggctcttcctacctggggagaggacgccctggccaggaactgtccctcagctttctgtggtctctgtgtcccccgtgccctccgggtgccctgct

SEQ ID NO: 67466 - DNA, 120 bp, synthetic construct
  source 1..120: mol_type = other DNA
ggtccccacaggcatgagctccttggctttgtttcacgacgatcgtgaacaccaagcaggcgtaaagcatcccgcagcgtttaggccctaccagagcatagccttggctgatgtggtcct

SEQ ID NO: 67467 - DNA, 120 bp, synthetic construct
  source 1..120: mol_type = other DNA
acccgcctcggcctcccaaagtgctgggattacaggtgcgagccactgctccttgtccactaatttctttttcatgctgatagatgtcctgttcctgaaccatctttgcatttctaaaat

SEQ ID NO: 67468 - DNA, 120 bp, synthetic construct
  source 1..120: mol_type = other DNA
atccatcacctttctaatttctcctgtggaaggcggactattcgaatattccagttcttctaggattgagtttggtgatttctattctgctggaaaagcagccctctctgttttcatggg

SEQ ID NO: 67469 - DNA, 120 bp, synthetic construct
  source 1..120: mol_type = other DNA
atctcctaacagatgtattatagcttttcttttcctttttcaaaaagtatagagataagggtctctctattttgcccaggctggtctcgaactcctgggctcaagtgatcctcctacctc

SEQ ID NO: 67470 - DNA, 120 bp, synthetic construct
  source 1..120: mol_type = other DNA
ccctttctgctctgatcaagctggacaaaacgtcgtggggccacagcacagggggccaacgcaagctgggatcgtcagacgttaggaaatcccaaggaagaagagaaaggggacacattc

SEQ ID NO: 67471 - DNA, 120 bp, synthetic construct
  source 1..120: mol_type = other DNA
ttcctgcccctgcacagacaaaacctcttcactgggcccaaggcattgctataaagagtttaatagacaccaggctggccatgccacgtgggagatggagttattactcaaatcaatctc

SEQ ID NO: 67472 - DNA, 120 bp, synthetic construct
  source 1..120: mol_type = other DNA
agctttaaaaccgaaagggaagtgggtgctgtgagcagctctgttcaggcctaaggccacgcatgtgtgccccgtgggggagacatgcaccagcgaatcaggaaacagtggtgacagccg

SEQ ID NO: 67473 - DNA, 120 bp, synthetic construct
  source 1..120: mol_type = other DNA
ctgactgtacaagcttaactggctgcccttgtcctgcaggtggtgtgggctgtgtggatttcggatgtgggcccataacatagccacactgctgcaaagcaagtgagtctgaggcaagaa

SEQ ID NO: 67474 - DNA, 120 bp, synthetic construct
  source 1..120: mol_type = other DNA
tctggaagagggttccccaagctcctgttcaacctgagtgagaggctcaggctgcccccaacacactgcacagaaaaatgggccattgattcagagccacccacgctaacagcagttcag

SEQ ID NO: 67475 - DNA, 120 bp, synthetic construct
  source 1..120: mol_type = other DNA
cctcataatgcaggctgcagttaactattttaaaagttaacatggtaagcagaagtgattcctctttggcttgaacatggactgtttggagggcactggagagaaccaaaagagtgacaa

SEQ ID NO: 67476 - DNA, 120 bp, synthetic construct
  source 1..120: mol_type = other DNA
aatttctgatattgaaattctcacaaatgtttaagttggtagtggaagacaaaggacatataatcttgggagtcctagggccctgcccgctgccagttcctccatgctactacagctgat

SEQ ID NO: 67477 - DNA, 120 bp, synthetic construct
  source 1..120: mol_type = other DNA
aattctctggaaagtctcagcaatagaattgaacaagtagaagaaagaaattcagaattcgaagacaaggtctttgatttaacccaatccaataaagacaaagaagaaagaacaagaaaa

SEQ ID NO: 67478 - DNA, 120 bp, synthetic construct
  source 1..120: mol_type = other DNA
gaatggataagaactcaccaactaactatctgctgccttcaggagactcacctaacacataatgacttacataaacttaaggaaagtggtagaaacaggcatttcatgcaaatggacacc

SEQ ID NO: 67479 - DNA, 120 bp, synthetic construct
  source 1..120: mol_type = other DNA
ccagcccagtacccagccccgagcccagtacccagcccccagcccagtacccagcctccagcccagtacccagcctccagcccagtacccagccccgagcccagtacccagcccccagcc

SEQ ID NO: 67480 - DNA, 120 bp, synthetic construct
  source 1..120: mol_type = other DNA
ccagcccagtacccatccccgagcccagtacccagcctccagcccagtacccatccccgagcccagtacccagcctccagcccagtacccatccccgagcccagtacccagcctccagcc

SEQ ID NO: 67481 - DNA, 120 bp, synthetic construct
  source 1..120: mol_type = other DNA
agtagggtctccccgcagtcgaccatacagtgggcccagcaggaacacacacatttagcaactggcggagtctcctctcttcactgtcgttgcagaaagggccgagtgagaccacgtgca

SEQ ID NO: 67482 - DNA, 120 bp, synthetic construct
  source 1..120: mol_type = other DNA
tgaagctgctctctggcaggccctctttgagcagctgacaagcaccctccgtgtagtgtccataccagcagagtgagtgccaccagctcctttgggggcctttaggccagaggtgtgcaa

SEQ ID NO: 67483 - DNA, 120 bp, synthetic construct
  source 1..120: mol_type = other DNA
ttactccgtcaggagttggctccaccttcttgacggctgagtgtctacatcaattatttggaattcttttgcaaaggagatttctatgcaactccatttgcttattcacctaggtataca

SEQ ID NO: 67484 - DNA, 120 bp, synthetic construct
  source 1..120: mol_type = other DNA
gagccctttgaggcctctggggaaataggtaatatcttcacatagaaactagaccaaaactttctgagaaactttcttgtgatatgtgcatgcgtcacacagaggtgaactttcttttga

SEQ ID NO: 67485 - DNA, 120 bp, synthetic construct
  source 1..120: mol_type = other DNA
agcccattgagacctatggtgaaagaagaaatatcttcacttaaaaactagacagaagccttctgagaagcttcttagtgatgtgtgctttcgtctcacagatttgagcctttcttttga

SEQ ID NO: 67486 - DNA, 120 bp, synthetic construct
  source 1..120: mol_type = other DNA
tcttagtgatgtgagctttcatctcacagatttgaacctttcttttgattgagaagtttggaaacagtctttttgtacaatctgcaaaggatattttgagcactttggagcctatggtga

SEQ ID NO: 67487 - DNA, 120 bp, synthetic construct
  source 1..120: mol_type = other DNA
ttcacataaaaactagacagaagcattctgagaaacttatttgtcctgtgtgcattcacctcacagagctgaacctttcttttgaaggagcagattggaaacagtctgtttgcagtatct

SEQ ID NO: 67488 - DNA, 120 bp, synthetic construct
  source 1..120: mol_type = other DNA
tgtgatgtgtgcattcaccacaaagagtagaacgtttctttggattgagcagtttggaaacagtcctttgtagaatctgtgaagggatatttctcagcccattgatgcctacagatgaaa

SEQ ID NO: 67489 - DNA, 120 bp, synthetic construct
  source 1..120: mol_type = other DNA
aattcttagtgctgtgtctgttcaactcacagagttgaacctttcttctgattgagcagttttgaaacactctttttttagaatttgcaagtggatatttcaagcactttgtggcctctg

SEQ ID NO: 67490 - DNA, 120 bp, synthetic construct
  source 1..120: mol_type = other DNA
cattgtggcaatgtgagcattcatctcacagagttgaaacattcttttgattgagcagtgtgtaacaagtctttttgtggaatctgcaaagggatatttgtgaatgctttgaggcctatg

SEQ ID NO: 67491 - DNA, 120 bp, synthetic construct
  source 1..120: mol_type = other DNA
gaaattttctgagtagttcctttgtgacatgtgcattcatcacacagaagtaaaagtttcttcccattgagcagttagtttttatgtgaagatatttccattttcaacatagacctcaaa

SEQ ID NO: 67492 - DNA, 120 bp, synthetic construct
  source 1..120: mol_type = other DNA
tctgtgagatgaatgcacaaatcacaaagaagtttctcagaaagcttctgtctagtttttatgtgaagatacttcctttttcaccatagacctcaaagcccaccaaatatccttttgcag

SEQ ID NO: 67493 - DNA, 120 bp, synthetic construct
  source 1..120: mol_type = other DNA
acactgtgagagtaatacacatgtcagaaagaagtttctcagaatgttccgtctagtttttatgtgaagacatttcctatctcaccttagtcctcaaaaggctgacaaatatccctttgc

SEQ ID NO: 67494 - DNA, 120 bp, synthetic construct
  source 1..120: mol_type = other DNA
tctgtgagatgaatgcacacctaaaaaagaagtttctcagcatgcttctgtctagtttttatgtgaagatatttctttttcatcataggcctcaaaccactcagaaatatccctatgcag

SEQ ID NO: 67495 - DNA, 120 bp, synthetic construct
  source 1..120: mol_type = other DNA
acacatcacaaagaagtttcttagaaagcttctgtctagttattatgtgaagatatttcatatttcaccgttggcctcaatgggctcagaaatatcccttttcagattctacaaaaggac

SEQ ID NO: 67496 - DNA, 120 bp, synthetic construct
  source 1..120: mol_type = other DNA
acataggcctgaaagctctccaaatatccctttgcagattctacaaaaggactttttccaaactactcaatcaaaacaaagattcagccctgtgagatgaatgcacacatcacaaagtag

SEQ ID NO: 67497 - DNA, 120 bp, synthetic construct
  source 1..120: mol_type = other DNA
accataggcctcaaaccgctccaaatacccatttgcggattctacaaaaagactgtttccaactgctcaatcaaaagaatggttcaactctgtgagatgagtgcatgcatcacaaaaaaa

SEQ ID NO: 67498 - DNA, 120 bp, synthetic construct
  source 1..120: mol_type = other DNA
gatcctacaagaacagagtttccaatctgctcaatgaaaagaaacatttacctctgtgacatgaacacccacatcacaaagcagtttctcataaatcttctttctagtttttatgtgaag

SEQ ID NO: 67499 - DNA, 120 bp, synthetic construct
  source 1..120: mol_type = other DNA
aatgatgctactgggaggccacccctacagtggctgcaccaagtctagggacatgctagctttgttaagttacatgagattgcctacgtactaaatggaggtggggcatgggtccgagga

SEQ ID NO: 67500 - DNA, 120 bp, synthetic construct
  source 1..120: mol_type = other DNA
agctgcattcttcattgatgcaggagctgagtgatccaccactaaaagtcatacaaggttgatttggcgagggcactcccaacaacgggaggccctcctggcacagcacgtcccccagag

SEQ ID NO: 67501 - DNA, 120 bp, synthetic construct
  source 1..120: mol_type = other DNA
tcaatctcaggtggctaaacttgtccctctaagaagttgggggatgccaaccactcgggggtcgcataactagttggcatgccagagtctcgttcattattggaattaaccagacaaatc

SEQ ID NO: 67502 - DNA, 120 bp, synthetic construct
  source 1..120: mol_type = other DNA
tctccagaattgaaccctaattccctgtcacccgtggtcaccatggtaggcacagcgactaccatagaaagttgatagggcagacgttcgaatgggtcatcgctgccacggggggcatgc

SEQ ID NO: 67503 - DNA, 120 bp, synthetic construct
  source 1..120: mol_type = other DNA
acgttgctcgtttctcatccatcctccaacccggtcaagctccaggagaccgacatgccccccacttgggatgcttcccagggccaggtggcccaacctcgtgccacgcaaacgcggtcg

SEQ ID NO: 67504 - DNA, 120 bp, synthetic construct
  source 1..120: mol_type = other DNA
gcttggtaggctcacgcctgtcatccctgcactttgggaggcaagggaaggtggatccctcgatccaagccttggcaacatggtgaaacctcttctctaaaaaaatacgaaaactaactg

SEQ ID NO: 67505 - DNA, 120 bp, synthetic construct
  source 1..120: mol_type = other DNA
gatcctatggcctcggcctcccaaagtgttggggttacaggcgtgagacaccagcacccgacctgagttaatacatctggtctcactatgtcttaaccacacacccatgaagaactcaag

SEQ ID NO: 67506 - DNA, 120 bp, synthetic construct
  source 1..120: mol_type = other DNA
gtactgcacccactaactcatcatctagcattaggtatatctcctaatgctatccctcctaccttcccccaccccacaacagtccccagagtgtgatgtgccccttcctgtgtccatgtg

SEQ ID NO: 67507 - DNA, 120 bp, synthetic construct
  source 1..120: mol_type = other DNA
tactgtgccaaattggaagggtctattttgaacttccagagtacatgcaagctgaaagaatattctcagaggtttgaaggatggagaattatagagtcgaaggcatggaaatctactcta

SEQ ID NO: 67508 - DNA, 120 bp, synthetic construct
  source 1..120: mol_type = other DNA
gttttcttaggaaatgtatgtctttaacaaaatcttcagttaactaatgataatagaataccagatccttatactgaacagtttcagtcttctaccaaacttttgcagatactgtaattg

SEQ ID NO: 67509 - DNA, 120 bp, synthetic construct
  source 1..120: mol_type = other DNA
ctttagcctacgaaggccgggctcccaagagtctccctggagtcggggccttgggcaggctcacaaggatgctgacggtgacggttggtgacggtgatgtaagttggaggcctcgggcca

SEQ ID NO: 67510 - DNA, 120 bp, synthetic construct
  source 1..120: mol_type = other DNA
aggcaggcagacagtcagagaaagagagtaagacagaaggcagaaacacacacacacacagagacagagacagatggacagacaaagagaaagaaagagagagacagacagagagaaaga

SEQ ID NO: 67511 - DNA, 120 bp, synthetic construct
  source 1..120: mol_type = other DNA
ctgcaagtgtcagtcagcagggaaaagaatgcatttatttatttatttatttatttatttagagacagagtctcactcaatctacagcccaggctgtagtgcagtggcgcgatctcggct

SEQ ID NO: 67512 - DNA, 120 bp, synthetic construct
  source 1..120: mol_type = other DNA
aatcacatcaagaactcaaccccttttacaatagctgcaaaaacaaacaaacaaacaaacaaacaaaaaacttaggaatatacctagcaaaggaatcaaaagacctctacgatgaaaatt

SEQ ID NO: 67513 - DNA, 120 bp, synthetic construct
  source 1..120: mol_type = other DNA
aggggaataaaactggattctcatctctcaccttatacaaaaatctactcaagatggattaaaaacttaaacctaattcctgaactataaaaattctagaagataacactggataaaccc

SEQ ID NO: 67514 - DNA, 120 bp, synthetic construct
  source 1..120: mol_type = other DNA
ctccgccctcccggtgcccccggcccgcccgggtctgtgccaaggagaacactgctccgccttcgctgtatctccgaagtctgtgcacaggagaactcagctccgccctcgcgatgctct

SEQ ID NO: 67515 - DNA, 120 bp, synthetic construct
  source 1..120: mol_type = other DNA
tccgccctcctccacatcaacccgctgaggagttctgtcttcccagggttgtgagggaaaccagctctgcaggcctatgtccaagtctaggcaccgcctcctccagggagccttccagac

SEQ ID NO: 67516 - DNA, 120 bp, synthetic construct
  source 1..120: mol_type = other DNA
cagagagactcagaaaaagaaatacagagacaggcagagagacagagaaaaacagagacagacagagacagagaaaaacagagacagacagagagagacagagagaaacagacagaaaga

SEQ ID NO: 67517 - DNA, 120 bp, synthetic construct
  source 1..120: mol_type = other DNA
tcctgtagagccacgggcctcagccctggagctgaaagtgtggctggagctagaggtggtagagaggggtgaccagcacagctccagccagaagctcccacactgctcccagtcctgggc

SEQ ID NO: 67518 - DNA, 120 bp, synthetic construct
  source 1..120: mol_type = other DNA
tgtgttttttttctgtgattaaattgccatctgatcaagtgatattgaaaacccttcaggtatggcttttagaagactttgacctatttttgcttttgttgactctccctccagctttgc

SEQ ID NO: 67519 - DNA, 120 bp, synthetic construct
  source 1..120: mol_type = other DNA
ttaagaaatctgctaaaaaatgaagtaaaacaggttcatcttcttgaaaggcacagtatttgctatggcagcaagaccaaaaggcttaagtagcaaaaatgcgcgtagtagttacaaaca

SEQ ID NO: 67520 - DNA, 120 bp, synthetic construct
  source 1..120: mol_type = other DNA
tctctttatccctgaatacgttttaaagttattcatgtcctcattttttataatccactttagtaacattttaaaatattttttcaacttcatcaagaatatctttgtgttccactgaat

SEQ ID NO: 67521 - DNA, 120 bp, synthetic construct
  source 1..120: mol_type = other DNA
ccggaggctcctatcccaccaggagcaggtataacacaaatcctccccaaagatcatgcggtacctgctgagtggaagacaccctcaactctttcctagaggcccagggttccatggggc

SEQ ID NO: 67522 - DNA, 120 bp, synthetic construct
  source 1..120: mol_type = other DNA
aataaaaataaatttaaaataaacagtgggagcttttaaaggtgaggtttgccctccagcactggtccctgacaggtgtgaccttcacgtcatctttccacatgatccaggcccccatct

SEQ ID NO: 67523 - DNA, 120 bp, synthetic construct
  source 1..120: mol_type = other DNA
aggtatttcctttttcaccacaggcctcaaaacgctcaaaatgtccatttccagatactacaaaaagagtttttgaaacctgctctatgaaagggaatgttcaactctgtgacttgaatg

SEQ ID NO: 67524 - DNA, 120 bp, synthetic construct
  source 1..120: mol_type = other DNA
ctgattccaacgaaatcgtcaaagctatgcaaatatccacttgcagattctacaaaaggactgtttcaaaccagctctatgaaatggaatgttcaactctgtgacttgaatgcacacatc

SEQ ID NO: 67525 - DNA, 120 bp, synthetic construct
  source 1..120: mol_type = other DNA
tatgggaagatatttccattttcaccataggcatcaaagcgctccaaatatccatttccagaagctacaaaaagtgtgtttcaaacttgctctatgaaatggaatgttcaactctgtgac

SEQ ID NO: 67526 - DNA, 120 bp, synthetic construct
  source 1..120: mol_type = other DNA
gaaagatgtttcctttttcaccataggcctcaaagcactccaaatgtccacttccagatgctacaaaatgagtgtttcaaacctgctctatgaaagggaatgttgaactctgtgacatga

SEQ ID NO: 67527 - DNA, 120 bp, synthetic construct
  source 1..120: mol_type = other DNA
ctgtgaaatggaatgttcaactctgtgacttgaatgcaaacgtcactaagaagtttctgagaatgtttctgtgtagattttatgtgaataaattcccctttccaacgaaatcctcaaagc

SEQ ID NO: 67528 - DNA, 120 bp, synthetic construct
  source 1..120: mol_type = other DNA
gcaagtggacatttggagcgactttagacctatggtggaaaaggaattatcttcacatgaaaagtagacagaagcattctcagaaactatttgtggtgcgtgtatttaactcagagagtt

SEQ ID NO: 67529 - DNA, 120 bp, synthetic construct
  source 1..120: mol_type = other DNA
caactcacagagttgaacattccatttcatatagcagttttgaaacactctttttgtagaatctgtaagtgaaaacttggagcgctttgaggcctatgttgaaaaaggatatatcttccc

SEQ ID NO: 67530 - DNA, 120 bp, synthetic construct
  source 1..120: mol_type = other DNA
tgacacggcagttttgaagcactcctcttgtagtatttacaagtggatattagcacagtattgaggatttccttggaaacgggaatatcttcacataaaagtagacagaagcattctcag

SEQ ID NO: 67531 - DNA, 120 bp, synthetic construct
  source 1..120: mol_type = other DNA
gcattctcagaaacttctttgtgatgtgggtactcaactgacagagctgaaacttacttttgatacagcattcttgaacctctctttttgtaggatctgcaagtggatatttggatagct

SEQ ID NO: 67532 - DNA, 120 bp, synthetic construct
  source 1..120: mol_type = other DNA
gcaagtggatattttgacagctatggggccttcactggaaacgggtatatcttcacataaaaagaagacagaagaattctcacaaacttctttgtgatgcttgcattcaactcacagagt

SEQ ID NO: 67533 - DNA, 120 bp, synthetic construct
  source 1..120: mol_type = other DNA
ttgcaagtggatatttggacagcttgaagccttcgctggaaacgggtatatcttcacatataaacaagacagaagcattctcaggaacttctttgtgatgcttgcattcaactgacagag

SEQ ID NO: 67534 - DNA, 120 bp, synthetic construct
  source 1..120: mol_type = other DNA
gaagcatctcagaaacttctttgtgatgtgggtactcagctcacacagttgaacctttcttttgatacagtagttttgaaacactctttgtgtagaatctgcaagtggatatttggatag

SEQ ID NO: 67535 - DNA, 120 bp, synthetic construct
  source 1..120: mol_type = other DNA
tgcttgcattcaactcacagaactgagcattccttttcatagagcagttttgatacactctttttgtagagtctgtaagtgtaaacttggagagatttgaggcctatggtgaaaaaggga

SEQ ID NO: 67536 - DNA, 120 bp, synthetic construct
  source 1..120: mol_type = other DNA
cactgaggtgaacattccttttcatagagcagttttgaaacactctttttgtagtatctgtaagtggaaacttggagtgctttgaggcctatggtgaaaaaggaaatatcttcccataaa

SEQ ID NO: 67537 - DNA, 120 bp, synthetic construct
  source 1..120: mol_type = other DNA
ttggtggcatcacactatctgacttcaaacaatactacaaggctacagttaccataacagcatggtactggtaccaaaacagagatgtagatcaatggaagagaacacagccctcagaaa

SEQ ID NO: 67538 - DNA, 120 bp, synthetic construct
  source 1..120: mol_type = other DNA
aggacagcagtgaggacttcgttggaaatgggaataacttcacataaatctagagagaaggattctcagaaactattttggaatgtttgcattcagctcactgttttgaaacttgccttt

SEQ ID NO: 67539 - DNA, 120 bp, synthetic construct
  source 1..120: mol_type = other DNA
ctggaagtggacatttggagcgctttgagtctcatggtgaaaaagcaaatatcttcacataaaaattacacagaagcattctcagaaacttcttggtgatgcttgcattcaacccactga

SEQ ID NO: 67540 - DNA, 120 bp, synthetic construct
  source 1..120: mol_type = other DNA
ggacagttttgaggccttcgctggaaaatctatatcttcacataaaaactggacagaagaatcctcagaaacttctttgagatgcctgcattcaactcacagagttgaaccctccttttc

SEQ ID NO: 67541 - DNA, 120 bp, synthetic construct
  source 1..120: mol_type = other DNA
gcagttttgaaacactctttttgtagtgtctgaaagtggacatttggagcgctttgaggcctgtggtgaaaaaggaaatatcttcccataaaaactagacagaagaattctcagaaacgt

SEQ ID NO: 67542 - DNA, 120 bp, synthetic construct
  source 1..120: mol_type = other DNA
tgtttgcattcaagtgagaggcgaacattccctttcatggagcagatttgaaacactctttttgtaccatctggaagtggacatttggagcgctttgaggcctatggtgaaaaagaaaat

SEQ ID NO: 67543 - DNA, 120 bp, synthetic construct
  source 1..120: mol_type = other DNA
ccagagtgtgatattccccttcctgggtccatgtgatctcattgttcaactcccacctatgagtgagaatatgcgttgtttggatttttgttcttgcgatagtttagtttactgagaatg

SEQ ID NO: 67544 - DNA, 120 bp, synthetic construct
  source 1..120: mol_type = other DNA
tttaataaatgttcaaaaatatctgtaattaagtttcattcagcagacatatgtctaatagagaacttgctaagtaagatataaaggatgattacatgaaaaaatcacaaaattgtcagt

SEQ ID NO: 67545 - DNA, 120 bp, synthetic construct
  source 1..120: mol_type = other DNA
ttgctcttgttgcccaggctggagtgcagtggcatgatcttggctcaccgcaacctccacttcccgggttcatgcgattctcctgcctcagcctcccgagtagctgggattacaggcatg

SEQ ID NO: 67546 - DNA, 120 bp, synthetic construct
  source 1..120: mol_type = other DNA
ttaagagtgaaagattatgtgtcatttattgtagtggtagaagaaaataaaaccaaaacagaatccaatccaaaagcttaggtttttgttgctactacagtaattacatcttcatatacg

SEQ ID NO: 67547 - DNA, 120 bp, synthetic construct
  source 1..120: mol_type = other DNA
actagaattctatgcctagcaaaaatatctttcaaaaatgaaggtgaaataaagacacaccagaaacataaataatgaaataattcatcaccaggagaccttcactgcaagaaatgttaa

SEQ ID NO: 67548 - DNA, 120 bp, synthetic construct
  source 1..120: mol_type = other DNA
caccactgcactctagcttgggtgacagagcaagaccccatcttggcaggtgggggatgcaagaaaaatgcaaggaacagatagagataaatagaaaacataagaagacaatcatattaa

SEQ ID NO: 67549 - DNA, 120 bp, synthetic construct
  source 1..120: mol_type = other DNA
gataaaacctgtgtttcttgggaagtcacataggttgttgtattttcattaagggggaaagaaggtagtctgtgtgatcctcatggaaggcacagcacataaggaagccggtacatggat

SEQ ID NO: 67550 - DNA, 120 bp, synthetic construct
  source 1..120: mol_type = other DNA
aggttgaggcaggagaatcacttgaacctgggaggcagaggttgcagtgagctgagatcacgccactgcattccagcccggtgatagtgtgagactccatctcaaaaaaataaaaaagaa

SEQ ID NO: 67551 - DNA, 120 bp, synthetic construct
  source 1..120: mol_type = other DNA
ttctaacagacaggaccctcagctgcaggtctgttggaataccctgccttgagaggtgtcagtgtgcccctgctgggggggtgcctcccagttaggctgctcaggggtcacgggtcaggg

SEQ ID NO: 67552 - DNA, 120 bp, synthetic construct
  source 1..120: mol_type = other DNA
gtgtactgaactaacagagttgaacctttcttttgacagagcagttttgaaacactctttttgtacaatctgcaagtggatatttggatagctttgaggatttcattggaaacgggaata

SEQ ID NO: 67553 - DNA, 120 bp, synthetic construct
  source 1..120: mol_type = other DNA
acatcttagtgatgtttccattcaagtcacagagttgaacattccatttcatagaggacgtttgaaacactctttctgtagtatctggaagtggacatttggagcgctttggggctttag

SEQ ID NO: 67554 - DNA, 120 bp, synthetic construct
  source 1..120: mol_type = other DNA
tgaagtcacagagttgaacattccatttcatagagcaggtttgaaacagactttttgtagtatctggaagttgacatttggagcgctttgaagcctatggtgaaaaaggaaatatcttcc

SEQ ID NO: 67555 - DNA, 120 bp, synthetic construct
  source 1..120: mol_type = other DNA
aaatctagacagaagcattctgagaaacatgtttctgatgtttgcattcatgtcacagagttcaacattccctttcatagagcaggttagaaacactctttttgtagtatctggaagtgg

SEQ ID NO: 67556 - DNA, 120 bp, synthetic construct
  source 1..120: mol_type = other DNA
ggaagtggacattttgagtgctttgaggcctatggtgaaaatggaaatatcttcccataaaaaatagacagaagaatcctcagaaactagtttgtgatgtgtgtcctcaactaacagagt

SEQ ID NO: 67557 - DNA, 120 bp, synthetic construct
  source 1..120: mol_type = other DNA
gtccacttgcagattctacaaaaacagtgcttcaaacctgctctatcaaaagaaaggtccaactctgtgggtttaatgcacacatcacaaagaagtttctcagaatgtttctctctcgtg

SEQ ID NO: 67558 - DNA, 120 bp, synthetic construct
  source 1..120: mol_type = other DNA
agtctgtgattgaatgcacacatcacaaagcagtttcggagaatgctgctgtctagttttaatgtgaaggtattcctgtttctaacgaaggcctcaaatcggtccaaatatccacttgca

SEQ ID NO: 67559 - DNA, 120 bp, synthetic construct
  source 1..120: mol_type = other DNA
gtttcaaacctgctgtatgaaaagaaaggttcaactctgtgagttgaatgcacacatcataaagaaggtcctgagaatgcttctgtctagtgtttatgtgaagataatcccgtttccaat

SEQ ID NO: 67560 - DNA, 120 bp, synthetic construct
  source 1..120: mol_type = other DNA
attccaccagaggcctcaaagcgttccaattgtcgagttgcagattctacaaaaagagtgtttcatatctgctctatgaaataaagttaactctgtgagttgaatgcacacatcacaaag

SEQ ID NO: 67561 - DNA, 120 bp, synthetic construct
  source 1..120: mol_type = other DNA
tttccacagtaggcctcagtgtgttccaaatgtccacttgcagattatacaaaaacagtgtctcaaaactgctctctcaaaaagaaggttcaactctgtgaattgaatgcacacatcaca

SEQ ID NO: 67562 - DNA, 120 bp, synthetic construct
  source 1..120: mol_type = other DNA
cttgagggcacaaatagctccaaatatccacttgtatattctacaaaaccagagattcaaaactgatcattgaaaagataagttcatctcagtgatttgaatgtacacatcacgcagaag

SEQ ID NO: 67563 - DNA, 120 bp, synthetic construct
  source 1..120: mol_type = other DNA
caatgagaagataagatcaactctgtgagttgagtgcacgcctcacaaagaaatttctcagaatgcttctgtgtagcttttatgtgaagatatttccttttccacaacaggcctcaaagc

SEQ ID NO: 67564 - DNA, 120 bp, synthetic construct
  source 1..120: mol_type = other DNA
ggcctccaagctctccaaacatccacatacagattctgcaaaaagagagattcaaaactgctcaatcaaaaattatgttcaactctgtgacttgaatgtacacatcacaaagaagtttct

SEQ ID NO: 67565 - DNA, 120 bp, synthetic construct
  source 1..120: mol_type = other DNA
caactctgtgagttgaatgcacacctcacaaataagtttctgagaatgcttctgtctagtttttatgtgaagatagttgcttttccactgttggcctcaaagggctcgaaatatccacct

SEQ ID NO: 67566 - DNA, 120 bp, synthetic construct
  source 1..120: mol_type = other DNA
cagagaactttctcagaatgcttctatctactttttatgtgaagacattcccttctccaccacagtcctcaaagtgctgccaaatgtccacttgcaggttctacaaaaagagagtttcca

SEQ ID NO: 67567 - DNA, 120 bp, synthetic construct
  source 1..120: mol_type = other DNA
tctgtgagatgaatgtacccatcactaagaagtttctctgattgcttctctctagattttatgtgaagatatttctttttcaaccataggccgcaaagcgctgcaaatgtccacttgcag

SEQ ID NO: 67568 - DNA, 120 bp, synthetic construct
  source 1..120: mol_type = other DNA
gatgaaagcacgcatcacaaagaagtttctcagaattcttctatctagtttttatgtgaagagatttccttttccaccacaggcctaaaagggctccaaatgtccacttgcagatactac

SEQ ID NO: 67569 - DNA, 120 bp, synthetic construct
  source 1..120: mol_type = other DNA
tgctgtgagatgaatgcacacgtcacaaaggagtttctcagattgcttctgtctagattttatgtgaagatattaccttttctaccacaggccttaagcgataaaaatgtccacatgcag

SEQ ID NO: 67570 - DNA, 120 bp, synthetic construct
  source 1..120: mol_type = other DNA
gaggctggaccgagggaggctggacttcccactctaccctacaggcaggaaaacgggcagccctgggaggctggagcgagggaggctgggcctcccactccgccctacaggccgggacac

SEQ ID NO: 67571 - DNA, 120 bp, synthetic construct
  source 1..120: mol_type = other DNA
gaatgcacacatcacaaagaagtttctcagattgattccatctagattttatgggaatatatttcttttctaacataggcggcaaagcgctccaaatgtccactggcagattccacaaaa

SEQ ID NO: 67572 - DNA, 120 bp, synthetic construct
  source 1..120: mol_type = other DNA
ttcccactgtaggcctcaaagcactcaaaatgtccacttgcagattctacaaaaagacggcttcaaaacgactcaaccaaaagaaaggtttgactctgtgagatgaatgcacacatcaca

SEQ ID NO: 67573 - DNA, 120 bp, synthetic construct
  source 1..120: mol_type = other DNA
gtgaaaatattcccgtttccaatgaaggctggtaagcagtccaaatatccactagcagatgctacgaaaagagtgtttcaaaactgctctgtgatacagtatgtccaaatatgtgagttg

SEQ ID NO: 67574 - DNA, 120 bp, synthetic construct
  source 1..120: mol_type = other DNA
cattcgattccattcgatgatgattccattcgagtccattcgcttattccattctattccattagatgacgattacattcgagtccattctatgattccattctattccattagatgatg

SEQ ID NO: 67575 - DNA, 120 bp, synthetic construct
  source 1..120: mol_type = other DNA
cgatgccattagatggggattccattctatttcattcaatgatcattccctttgattccacttgatgattcatttcgattccactcaatgatgactccatttgagtccattcgatgattc

SEQ ID NO: 67576 - DNA, 120 bp, synthetic construct
  source 1..120: mol_type = other DNA
cgatacgattcgatgatgattccatttggttccattccatggtgattccatttgataccattcgatgatgattcctttcaattcgtttcaatgattccatccaattccattcaatgattc

SEQ ID NO: 67577 - DNA, 120 bp, synthetic construct
  source 1..120: mol_type = other DNA
ccactcaagtccattcattgattccattcgattccgttcgatgatttcattagattccattcgaagataattccattcgatgtcattcgatgattccattcgaatccattcaacgatgat

SEQ ID NO: 67578 - DNA, 120 bp, synthetic construct
  source 1..120: mol_type = other DNA
tccagtcgattccattcgatgatgattccattcgatgattccattcaataccattcgatgtctcctttcgattccacttgatgttgatttcattggagtccattcaatgattgcagtcca

SEQ ID NO: 67579 - DNA, 120 bp, synthetic construct
  source 1..120: mol_type = other DNA
gagtccattcgatgatggttccattcgagtccattcgatgttgattccatccgattacattcgatgattctattcgattccaattaatgatgattccatcttattccattcgatgaatca

SEQ ID NO: 67580 - DNA, 120 bp, synthetic construct
  source 1..120: mol_type = other DNA
ttccatgtgatgattccattgagtccattcaatgattccatttgatttcatttgatgttgactgcattcggttccattctatgatgattccaacggactccattcgatgactccattcga

SEQ ID NO: 67581 - DNA, 120 bp, synthetic construct
  source 1..120: mol_type = other DNA
gattccattcgagtccattcgatgactccattcaagtccatgagatgattccgtctgattccatttgatgattccattagggtccattcgatgattccattctattccatttggtgatga

SEQ ID NO: 67582 - DNA, 120 bp, synthetic construct
  source 1..120: mol_type = other DNA
attccatccgtgtcccttcgatgattccatttggtaaaattggatgatgattccattcgattgcattcgatgattccattctattccttcgatgatgattgcatttgagtccattcgatg

SEQ ID NO: 67583 - DNA, 120 bp, synthetic construct
  source 1..120: mol_type = other DNA
cgagtccatttgataattccatttgagtccaatccatgatttcattcgagaccattcaatcattccatttgagtccattcgatgatgattccattcgagtccattcaatgattccatttg

SEQ ID NO: 67584 - DNA, 120 bp, synthetic construct
  source 1..120: mol_type = other DNA
catgattccattcgactcaattcgatggtgtttccattcgattccatttgatgttgattccattggattccattggatgattattacatttgagtccattcgatgatgattccattcgat

SEQ ID NO: 67585 - DNA, 120 bp, synthetic construct
  source 1..120: mol_type = other DNA
ctccatttgatgatgattccattcaatgattccattcgattctattcaatgatgatcccattcgatttcgtttgtttgctgattctattcaattccattccatcattcaatttgactcca

SEQ ID NO: 67586 - DNA, 120 bp, synthetic construct
  source 1..120: mol_type = other DNA
cattccgtgccattcgacaatgattccattcaattccattcgatgattccactcgattcctcttgacaatgattcccttccattccattcgatgattccctttgattccattcgatgatg

SEQ ID NO: 67587 - DNA, 120 bp, synthetic construct
  source 1..120: mol_type = other DNA
ttcgatgatgattccatttgagtccattcaatgattccattcgaatccattcgatgattccactcgattccattcaatgactccgttcgatcccgttcaatgattccatttgattccagt

SEQ ID NO: 67588 - DNA, 120 bp, synthetic construct
  source 1..120: mol_type = other DNA
atggaatggactagaaaggaatggaatggaaaggaatggaatggaatggaatggaatggactaggaaggaatggaatggaatcgaatggaagggaatggaatggaatggactcgaatgta

SEQ ID NO: 67589 - DNA, 120 bp, synthetic construct
  source 1..120: mol_type = other DNA
gagaggaatggaccggaatggaatggaatgaaatggaatggactggaatgcaaatcgaatggaatggaagtgagttgaatggaatagaatggaacagaatggactggaatcgaatggaat

SEQ ID NO: 67590 - DNA, 120 bp, synthetic construct
  source 1..120: mol_type = other DNA
agggaaagaactcgaatggaatggaatgttatgaaatcaactcgagtggaatggaatggaatggactcgaatggaaaggaatggaatggactcgaatggaaaggaatgtaatggactcga

SEQ ID NO: 67591 - DNA, 120 bp, synthetic construct
  source 1..120: mol_type = other DNA
aaaaccctaatggaatggaatggaatggaaagaaacggactcgaatggaatggaaaggaatggaatggacctgaacatagaggaatggaatggaatggacccgaatggaatggaattgaa

SEQ ID NO: 67592 - DNA, 120 bp, synthetic construct
  source 1..120: mol_type = other DNA
aatggactctcatggaatggaatagaatggactcgaatggaatagaatggaatggaatggaatggaatggaaatgactcgagtggaatggaaaggaatggaatggaatggactcgaatgg

SEQ ID NO: 67593 - DNA, 120 bp, synthetic construct
  source 1..120: mol_type = other DNA
ggagtggattggaatcgactagaatggaatggagtggaatacaatggactcgaaagaaatggaatgcaatggaatggactcgaatggaatgcaatggaatggaagggactcaaatcaaaa

SEQ ID NO: 67594 - DNA, 120 bp, synthetic construct
  source 1..120: mol_type = other DNA
ggaatggaatgtactcgaatggaatacactgggatttaatggaatggactctaacggaatggaatggaatggacttgaatggaagagaatggaatacactcgaatggaatggaatgcaat

SEQ ID NO: 67595 - DNA, 120 bp, synthetic construct
  source 1..120: mol_type = other DNA
gaatggtatggaatgcacacaaatggaatggaatattacggaaaggaatggaatggaatggaaccaaatggagtggaatggaatggaatagactcgaatggaatggaatggacccgaatg

SEQ ID NO: 67596 - DNA, 120 bp, synthetic construct
  source 1..120: mol_type = other DNA
aatggaattgacttgaatggaattgaatgcaatgaactccaacggaatagaatggacttgaacggaagtaaatgggatggaaactactcgagtggaatggaatggaatggaatggaatgg

SEQ ID NO: 67597 - DNA, 120 bp, synthetic construct
  source 1..120: mol_type = other DNA
tggactcgaatggaaaagaatggaatggagtcaaattgaatggagtggaatggaatggactagaatggaattgagtggaatggactcgaatagaatggaatggaagggaaaggacaggaa

SEQ ID NO: 67598 - DNA, 120 bp, synthetic construct
  source 1..120: mol_type = other DNA
tggactcgagggaatgcaatggaatggacccaagtggaatgtaatgaaatgaaatagactcgaaaggaaagcaatggaatggaatggactcgaatggaatggaatggaatggaatggaaa

SEQ ID NO: 67599 - DNA, 120 bp, synthetic construct
  source 1..120: mol_type = other DNA
actcgaatggagtggaaaggactcgaatggaaaggaatggaatggtatggactcgaaagcaatggagtggaatggagttgaatggaatggaaaaaaaattcatggactcaaatcgaatgg

SEQ ID NO: 67600 - DNA, 120 bp, synthetic construct
  source 1..120: mol_type = other DNA
tgtggaatggaatggactcgaatggaatggagtggaatggactcaaatgcaatggaatagaatggacttgactggaatggaatggaatgatttggactcgaatttaatggactggaatgg

SEQ ID NO: 67601 - DNA, 120 bp, synthetic construct
  source 1..120: mol_type = other DNA
aatgggagagaatggaatggaatggaatggactcgaagggaatggaatggaatggactcaaatggaatggaaaggactcgaatggaatggaatggaatttaattgaacggacactaatgg

SEQ ID NO: 67602 - DNA, 120 bp, synthetic construct
  source 1..120: mol_type = other DNA
tggactcgagaggaatggaattgaatggaatggaatggacacgaatggaatggaatggcatggacttgaatggaatggaatggactcaaaaggaatgtaatggaatggaaacaactagag

SEQ ID NO: 67603 - DNA, 120 bp, synthetic construct
  source 1..120: mol_type = other DNA
tggaatggactcaaatggaatggaatggaatagagtggcatgtgcacgaatggaatggaattggatggaatgaattcgaatggaatcgaatggaatggactcgaatgaaatgggtggaaa

SEQ ID NO: 67604 - DNA, 120 bp, synthetic construct
  source 1..120: mol_type = other DNA
ccgtctcaaaaggaatggaatggaatgcaatggaaaggactcgaatggaatggaatggaattgatttgaatggaattgaaaggaatggaaccgaaaggaatggattggaatggaatggac

SEQ ID NO: 67605 - DNA, 120 bp, synthetic construct
  source 1..120: mol_type = other DNA
aggacacgaatgcaatggaatgcaatggaatggaatggaatggaaaggattggaatggtatggaatgcaatggaatggaatggacttgaatggaatagaatggaatggaatggaatggac

SEQ ID NO: 67606 - DNA, 120 bp, synthetic construct
  source 1..120: mol_type = other DNA
ggaatagattggagtggaatggaatggaatagattcgaatgaaagggaatgcagtggaatgaactcgaatggcatgcaatgtaatggaatagactcgaatcgaatggattggagtggact

SEQ ID NO: 67607 - DNA, 120 bp, synthetic construct
  source 1..120: mol_type = other DNA
ggaatggaatggactcgaatgcaatggaaaggaatgcactcgaatggaatggaatggactcaaaagcaatggagtggaatggaatcgattggaatggaatagaattgaatggactcgaat

SEQ ID NO: 67608 - DNA, 120 bp, synthetic construct
  source 1..120: mol_type = other DNA
tggactcgaatggaatcatcattgaatggagtcgaatggaatgatcatcgaatagaatcgattggaatcaccgaatggaatcgaatggaatcatcatcaaaaggaatcgaagtgaatcat

SEQ ID NO: 67609 - DNA, 120 bp, synthetic construct
  source 1..120: mol_type = other DNA
atggaatcattgaatggcatcggatggaatcaccattgaatggaatcaaatggaatcatcgaatggcctcggatggaatcatcattgattggaatcacatgaaatcatcgaatggaatcg

SEQ ID NO: 67610 - DNA, 120 bp, synthetic construct
  source 1..120: mol_type = other DNA
tcatcgaatggaatcatcaaatggactcgaatggaatcatcaaatggaatcatatagaatcatcaaacggaatcgaatgaaccatcattgaatggaatggaatggaaacgtcaaatggac

SEQ ID NO: 67611 - DNA, 120 bp, synthetic construct
  source 1..120: mol_type = other DNA
gggatcatcatcgaatggagttgaatggaattatcaaagaatggaatccagtggtatcatcatcaaatggaaccgaatggaatcatcaaatggactcaaatggaatcattgaatagattc

SEQ ID NO: 67612 - DNA, 120 bp, synthetic construct
  source 1..120: mol_type = other DNA
ggaatccaatgggatcactgaattgaatggaatgatcatcgaatggaatcaaagggaatcatcaaatgggatagaagggaatcatagaatggaatcgaatggaatcatcgaatggattca

SEQ ID NO: 67613 - DNA, 120 bp, synthetic construct
  source 1..120: mol_type = other DNA
cattgaatggaaacgaatggaatcattgaatggaattgaatggaaacatcatcgaatgcaatcgaatggaatcatcaccgacttgaatagaaaagaatcatcagcaaatggaatcgaatg

SEQ ID NO: 67614 - DNA, 120 bp, synthetic construct
  source 1..120: mol_type = other DNA
atcatcaaaaggaatcgaagagaatcatggaatggaatcgattggaatcatcgaatggaatcgaatggaatcatcatcaaatggactcgactggaattatcatcgaatggattcgaatgg

SEQ ID NO: 67615 - DNA, 120 bp, synthetic construct
  source 1..120: mol_type = other DNA
cttgaatggaatcattgaatgggctcgattggaatcctcatcgaatggaatcatcgaatagactcgaatggaatcatcatcgaatggaatcgattgaaatcatcgaatggactcaaatgg

SEQ ID NO: 67616 - DNA, 120 bp, synthetic construct
  source 1..120: mol_type = other DNA
gaaaggagtcatcgaatggactcgaatggaatcatcgtcaaatggaatcaaatggaatcatcgaatggcatcagatggaatcatcattgaatggaatcgaatggaatcatcaaatggact

SEQ ID NO: 67617 - DNA, 120 bp, synthetic construct
  source 1..120: mol_type = other DNA
ggaatcatcgaatggaaacgaatggaatcataaacgaagggaatccaatggaatcatcatcaaatggaactgaatggaatcattgaatggaatcgaatcaaatcattgaatggactcaaa

SEQ ID NO: 67618 - DNA, 120 bp, synthetic construct
  source 1..120: mol_type = other DNA
ggaaacatcgaatggacacgaatggaatcctctttgaatggactcgaatggaatcatcctcgaatggaaacgaatagaatcatcattgaatggactctaatgaaatcatcaaatagactc

SEQ ID NO: 67619 - DNA, 120 bp, synthetic construct
  source 1..120: mol_type = other DNA
atcatcgttgaatgggctcgaatggaatcatcaaatggactggaatggaatcatcaaaaggacttgaatgcaatcataatcaatagaatcgaacggaatcagcatcgaacggaatcaaat

SEQ ID NO: 67620 - DNA, 120 bp, synthetic construct
  source 1..120: mol_type = other DNA
ttgaatgaaatcatcatcacatggaatcaaatggaatgatcgaatggaatcgcacggattcatcattgaatagaagtgaatggaatcatcaaatggaatcgaatggaatcatcgaatgga

SEQ ID NO: 67621 - DNA, 120 bp, synthetic construct
  source 1..120: mol_type = other DNA
tcccatggaatcaaatggaatcatcatcacatggaatcgaatggaatcattatcgaatggtatcaaaaggaaacatcgaatggaattgaatggaataaatctaatggaatcgaatggagt

SEQ ID NO: 67622 - DNA, 120 bp, synthetic construct
  source 1..120: mol_type = other DNA
ccaatggaatcgaatggaatcatcatcaaatggaatcaaatcgaatcatcaaatgcaatctaatggaatcatcatcgcatggaatccaatggactcatcatcacatggaatcgaatggag

SEQ ID NO: 67623 - DNA, 120 bp, synthetic construct
  source 1..120: mol_type = other DNA
ggaatcgaatggaatcatcgaatggaatcgaatggaatcatcaaatggaatcgaatggagtcatctgatggaattgaatggaatcatcatcgaatggaatcgaatgcaatcatgaaatgg

SEQ ID NO: 67624 - DNA, 120 bp, synthetic construct
  source 1..120: mol_type = other DNA
cattgaatggaatccaatggaatcatggaatggattcaacaaatggaatcgaatgaaatcatcatcgaatggaattgaatggaaccatcatcaaacggaatgaaatggaatcatcatcga

SEQ ID NO: 67625 - DNA, 120 bp, synthetic construct
  source 1..120: mol_type = other DNA
gcctgtttgattggttcctgacatacaagaaaatcactgtcaaaactttagcttaacatttgttatggaaacaaaaagacttcagtgacaccttataaagcaaacagttttgtaaatcac

SEQ ID NO: 67626 - DNA, 120 bp, synthetic construct
  source 1..120: mol_type = other DNA
attctcttttgagatttatagtcactctaagtaaagagataacccaaacataagcctcacaaacaggcttccataccattcttaatttggtcctgtaattcttcattgctgtattaactt

SEQ ID NO: 67627 - DNA, 120 bp, synthetic construct
  source 1..120: mol_type = other DNA
tactgtaatccagagaaaacaggtagtgacttaggtgagaatactgtgaggatgagtggtagtagtggtgagaagtcgttaggccatggatgtatttcataggactatccaagagaactg

SEQ ID NO: 67628 - DNA, 120 bp, synthetic construct
  source 1..120: mol_type = other DNA
aatctaaatatcagagataattttatcttgaagattgttaaattataatggtgattcactaccttgccacgtctctgagtcaaaaattaggtctttgtttaagaatcaatggtgctctgc

SEQ ID NO: 67629 - DNA, 120 bp, synthetic construct
  source 1..120: mol_type = other DNA
ctgctgccaggcagacaggtgtgcctttacatgtacaggaaggtcattgaaggctcagtgttttgtttcaaaaactgaatcccaagaccaaacattgttatgctgtgcttcttaaaataa

SEQ ID NO: 67630 - DNA, 120 bp, synthetic construct
  source 1..120: mol_type = other DNA
tctgacctttcaaaaactcagcacagacagtggcacttaggaccaacggcaggagatccctaatcccatcaccatggcgatagggcataaacattccagggtgaagacacaatccacatt

SEQ ID NO: 67631 - DNA, 120 bp, synthetic construct
  source 1..120: mol_type = other DNA
actgctgccatgaagacaggtgtgcttttacatgtacaggaaggtcattgaaggttcagggttttatttcaaaaactggatcccaagcccacacattattatgctgtgcttctcaaaata

SEQ ID NO: 67632 - DNA, 120 bp, synthetic construct
  source 1..120: mol_type = other DNA
agcattaactagtaatttgaaaagatcgcatttggcaggccagtatgaacataccttgaatgcagcaagacaggttccccataagaaaattcaaaatcagggaatatgaaaccacaaagg

SEQ ID NO: 67633 - DNA, 120 bp, synthetic construct
  source 1..120: mol_type = other DNA
gtgagccactgtgcctggccaataaggtgcattattaacatcaataaagctcaggaaacagctttcaccatatttttgtttaatttacagtttttcccagagtctttggaatagattcct

SEQ ID NO: 67634 - DNA, 120 bp, synthetic construct
  source 1..120: mol_type = other DNA
gcgtgttaacctcaagtctctgatggatctaagaaaagttgttaattttcagtttgttcaaggtgttttttgttgttgttgtgaggacaggagtgacagcttccaagctggaaaacagaa

SEQ ID NO: 67635 - DNA, 120 bp, synthetic construct
  source 1..120: mol_type = other DNA
agttggttgcagtcattacagtgttacaagattttgaccaacctatcaatattatatcagattctgcctatgtagtacaggctacaagggatgttgagacggctctaattaaatatagca

SEQ ID NO: 67636 - DNA, 120 bp, synthetic construct
  source 1..120: mol_type = other DNA
tactttaaattttttaaacatttatagaaatcagactactacttctgcagaacaacatcttactggtaaaaagaacagcccacatgaaggaaaactaatttggtggaaagataataaaaa

SEQ ID NO: 67637 - DNA, 120 bp, synthetic construct
  source 1..120: mol_type = other DNA
ttctttgccagcttccccagcccaccacccctctacagtgaggccaggggctgtctcacctcccacccacacccacacccaaaatgtggggctcagcctccacgaccagcatgccggtca

SEQ ID NO: 67638 - DNA, 120 bp, synthetic construct
  source 1..120: mol_type = other DNA
tttaaaaaagagaaaacaagagttgtacaaacagcttctatagaagccagtttttacaccatcgtacccactcgtgccacttggtgcagtggaccaggggcttctgcggggccttggcct

SEQ ID NO: 67639 - DNA, 120 bp, synthetic construct
  source 1..120: mol_type = other DNA
gagcactggaggccttggcctcatgggagacgtctcctccacgtgcactgctgccctcagaggctgtgaaaagtgaggtgtgggaacccgagctgtgcttcctctgccatggtcggaatt

SEQ ID NO: 67640 - DNA, 120 bp, synthetic construct
  source 1..120: mol_type = other DNA
gagaggtctccggcttgtcgtaacccaggggagtgacccactgcctcctgcagctctttcagacccagttgcaaagaagagctgcatgctcaacctgctgtcgtccctgccggaggccaa

SEQ ID NO: 67641 - DNA, 120 bp, synthetic construct
  source 1..120: mol_type = other DNA
agggggtgcctaggccacctcctggtcctgctggtgcaccttgctgggggcttaaaaccaccccaagtgttcgagtgtggtggctcatgcctgtaatcccagcactttgggaggccgagg

SEQ ID NO: 67642 - DNA, 120 bp, synthetic construct
  source 1..120: mol_type = other DNA
gccccaaaccagttcatctcggagtccaggcctggccctgggagacagggtgaaagcagtggtttttatgaacttaacttatagagtccaaaagatttctactgaatcacttgtcaagaa

SEQ ID NO: 67643 - DNA, 120 bp, synthetic construct
  source 1..120: mol_type = other DNA
aggaccattcgctaccccatctgccggcacctgcgggggagcccaggcattgtttgtaaaccctcctgactacctgactcaaagaaaacagaagcatggaggccgccaagtattttcaag

SEQ ID NO: 67644 - DNA, 120 bp, synthetic construct
  source 1..120: mol_type = other DNA
gcctagaggcctgggatctgggggagccacccctgggggcgagtgtctgccctggtgctgtatctgccatcttttcacactgggtgtgacctgaagagacagcctgaggtccgtcctcac

SEQ ID NO: 67645 - DNA, 120 bp, synthetic construct
  source 1..120: mol_type = other DNA
cgctggaaagccgcctccttctcctggtccaggtcttcagcagtgacccggtaccccagctctaagggaggtggcagcatcaaaggctcccctcgcctgcgtggcagcaggggaaacttg

SEQ ID NO: 67646 - DNA, 120 bp, synthetic construct
  source 1..120: mol_type = other DNA
tatcttccctggacacaagtctggggacagccgggtgttgtggaccccaaaggggtgactcccggctcctgggccccacagagagtccatgttctcagtgcagtggctgagctggaggac

SEQ ID NO: 67647 - DNA, 120 bp, synthetic construct
  source 1..120: mol_type = other DNA
gagtctccctctgtcgcccaggctggattccagtggcctgatctcggctcaccgcaagctccgcctaccgggttcacgccattctcctgcctcagcctctggagtagttgggactacagg

SEQ ID NO: 67648 - DNA, 120 bp, synthetic construct
  source 1..120: mol_type = other DNA
ttcgtctcacacacacacacacacacacacacacacacacacacacacacgaaagaaagaaagaaaaattagtggccaggcgtggaggctcacgcatcccagcactttgggaggtcgggg

SEQ ID NO: 67649 - DNA, 120 bp, synthetic construct
  source 1..120: mol_type = other DNA
ccctctgctggaatattcttctctcacttcatctgatcattgccttcaaaactcagctcattttcttatttccttgcccttttcatgtcccttgttttcctccgattaaattaatgttcc

SEQ ID NO: 67650 - DNA, 120 bp, synthetic construct
  source 1..120: mol_type = other DNA
tgggggtaggtgtctactgggggagagaggccaggcaagtctgtccttgttttcagtctagcaggagtgaaggggaggccagagtaactcctgagtggtcaatctagaaaggccttttgg

SEQ ID NO: 67651 - DNA, 120 bp, synthetic construct
  source 1..120: mol_type = other DNA
ggtggaagtagtactggaaaacgcccctaacaggagatgagaaagagactctggtgcacgtcatctttgttttaattaaaacgttatgcaatacaaacattcgccttcccactcttcccc

SEQ ID NO: 67652 - DNA, 120 bp, synthetic construct
  source 1..120: mol_type = other DNA
tctgcttataatttgaatgtgacttcatatgtgtgtcatctgttggactaaattggattgcagttgctcttcaaattgtcattcctttattttctatttctacctacctcctgatgttag

SEQ ID NO: 67653 - DNA, 120 bp, synthetic construct
  source 1..120: mol_type = other DNA
taaatattaagttgagctttattgccattttgataggtcagaagcagtcgaatgtcaataatgtcacatagttcaacctaatagttgctcagtcaatatgtattgaatgttgaatgcatg

SEQ ID NO: 67654 - DNA, 120 bp, synthetic construct
  source 1..120: mol_type = other DNA
actggactgcctctgataccctgattgaacaggactggagccaggtcatggggccacttctagttctacagtcaagtcttcagatatcaggcctattaccaagggcatggactggtatag

SEQ ID NO: 67655 - DNA, 120 bp, synthetic construct
  source 1..120: mol_type = other DNA
ttgctttcttcatgtttgaagaaggagtcatcttttccactctttactaacttcaggagagaaagaccatcaattagctaagctatagattctgggggtctctcagtccttttctgtggg

SEQ ID NO: 67656 - DNA, 120 bp, synthetic construct
  source 1..120: mol_type = other DNA
cattactgcctgagctccgcctcctgtcagatcagcagcagcattagaccttcacaggagcacaaaccctattgtgaactgcccatacaagggatctaggttatgttctccttatgagaa

SEQ ID NO: 67657 - DNA, 120 bp, synthetic construct
  source 1..120: mol_type = other DNA
ttgaagacataatgggtaaaaactttccaaattcttagaggcaagtgggcttccagacacatgaagttcagaggccccaaaaaaggccagcccaaagaccataataccaagatgtattat

SEQ ID NO: 67658 - DNA, 120 bp, synthetic construct
  source 1..120: mol_type = other DNA
gtcgaggtgggggggcggtttcgggggctgggaagctggggtgccggggacaggagggtgggggagctggggaaaggagggctggggggccggggacaggagggccatgcaggcagtggc

SEQ ID NO: 67659 - DNA, 120 bp, synthetic construct
  source 1..120: mol_type = other DNA
aatctcacttatgtgtggaacctaaagacgtcaaactcagaagaagagaacagaatggtggttgctgggagctggggaagagaaggaaatgggaagttgatggttaaagtgtacaaattt

SEQ ID NO: 67660 - DNA, 120 bp, synthetic construct
  source 1..120: mol_type = other DNA
atttacttttactggcatctttatttcttcatatggctttgagttactatctagtgttctttcttttcaacctgcatgattctctttaagatttcttgcagggcaggtctaatggtagca

SEQ ID NO: 67661 - DNA, 120 bp, synthetic construct
  source 1..120: mol_type = other DNA
aagtgctgggattacaggtgtgagtcaccgtgttcagcctcagccattatttcttcaaatgatctctctgcccctttccctctcttcttttgggacttccacaatgtctgcttgctattc

SEQ ID NO: 67662 - DNA, 120 bp, synthetic construct
  source 1..120: mol_type = other DNA
atctctgttaaacacagggtttgaacttggaacaacaaagaatgtagtacctgcaccacacacttcttaaaacagggttttggccgggtgtggtggctcacgcctgtaattccagcactt

SEQ ID NO: 67663 - DNA, 120 bp, synthetic construct
  source 1..120: mol_type = other DNA
gtccttctcttggttgtcctagattattttattttatttttttgagatacagtctcactctgtccccaaggctggagtgcagtggtgcaatctcagctcactgcaacctctgcctcctgg

SEQ ID NO: 67664 - DNA, 120 bp, synthetic construct
  source 1..120: mol_type = other DNA
agtaaatatttagcaagtactgacatgtcccagatgttgttttactcactggttatacaatgggagggagacagagaaagagagagagagagagagagagagagagagagagagagacgc

SEQ ID NO: 67665 - DNA, 120 bp, synthetic construct
  source 1..120: mol_type = other DNA
gatggcaccactgcactccagcctgggtgacagagcgagactccacctcagaaaaaaaaaaaaaggaagaaactgtgatgagatcaaaacagttaatgcatgagtgttctgaacctcgtt

SEQ ID NO: 67666 - DNA, 120 bp, synthetic construct
  source 1..120: mol_type = other DNA
gccattatgaccctggaatgcaccatctttcacatcactgcctggccttctagaatctcagcttcttaaatcaagaaattgtgtcttgttcatgtctgaattccccaagtgaacacagtg

SEQ ID NO: 67667 - DNA, 120 bp, synthetic construct
  source 1..120: mol_type = other DNA
ttagtcaggcaaatatcaggagtaaattattcttggaggaaagtaagcccatgcaaaggccctggggcagagtgggcttatttgataaagaggtaaaagggtcaggatatctgtagcaat

SEQ ID NO: 67668 - DNA, 120 bp, synthetic construct
  source 1..120: mol_type = other DNA
gcggaaccacagatctgagcctgaggaacatcccacaggaccctgagctcttcctccagctgctgcagtggccttggaagccatgtctgttctagaagtgtagctacagatggagaaggc

SEQ ID NO: 67669 - DNA, 120 bp, synthetic construct
  source 1..120: mol_type = other DNA
cattccagaccagtctgtccttttgtcaccttagctacagggaaggcccatgaccccagaagtgcccatcattatgctgaattcccgagcctcagtggtccactgaggtgtggaagcatg

SEQ ID NO: 67670 - DNA, 120 bp, synthetic construct
  source 1..120: mol_type = other DNA
tgctctatggctattaaataaaacttggcagccaccttggctggaggttttatgtcccagagcccaagggcggttgggagccaggggagcgctcagacggcagggccaggcgagctctgt

SEQ ID NO: 67671 - DNA, 120 bp, synthetic construct
  source 1..120: mol_type = other DNA
ctccccgacccctgagctgacctcttctttgagagcttagagaggagaatgacttgttccaggtcttactgcagggtctggggcttcctgtggggactcaggtgcaccttgtccctgaat

SEQ ID NO: 67672 - DNA, 120 bp, synthetic construct
  source 1..120: mol_type = other DNA
ccatgtggactcctccgggcaagtgcacttcgtgtcgcccctgctctatgagagcggccacgtccccttcaccatctcactggacgatggccactccttccctcgtgcgggcacttggct

SEQ ID NO: 67673 - DNA, 120 bp, synthetic construct
  source 1..120: mol_type = other DNA
tccatgcctggctaatctttgggaaaaaaatttatagagacagtttgtctctatattacccaggctggtctgtaactcatggactcaagaaattctcccacctcagcctcccaaagtact

SEQ ID NO: 67674 - DNA, 120 bp, synthetic construct
  source 1..120: mol_type = other DNA
ctttaattaaaggcctgactccctcgggctgcttcttcctctacacagaggcagcaaccagagggagatttttcttttcaggaatcggtcgtaaaaactcagtgactaatctacaagttc

SEQ ID NO: 67675 - DNA, 120 bp, synthetic construct
  source 1..120: mol_type = other DNA
ggcccctccaggcccgcccctgcccctgccgtggccagtcttcccgcggggaggaggcaagagaggagaccgcagacggtgcaggaccgcagtcctggaaatcgcaaaatcctctagcga

SEQ ID NO: 67676 - DNA, 120 bp, synthetic construct
  source 1..120: mol_type = other DNA
agatggagtctcgcgctgtcacccaggctggagtgcagaggcgcaatctccgttcattgcaacctccggctcccgggttcaagcgattctcctgcctcggcctcccaagtagctgggatt

SEQ ID NO: 67677 - DNA, 120 bp, synthetic construct
  source 1..120: mol_type = other DNA
aaaatagcagatttcaaaaatttgttctccctggcagcaacccagtaaagctagatctgggcggaaggtaatatggaaatataaaaactacagattagcagggatgggaagacccgccag

SEQ ID NO: 67678 - DNA, 120 bp, synthetic construct
  source 1..120: mol_type = other DNA
caggctaatcaccctgatacagtcctgaaatactgctgagcagttggcatgagggcaggaaggcttggtcttgttcactcttgtatccagcttatacatggcacaaagtaggttctcaat

SEQ ID NO: 67679 - DNA, 120 bp, synthetic construct
  source 1..120: mol_type = other DNA
caacatggcgaaaccctgtctctacaaatacaaaaaagaaaaaagccaggcccatggtggtgagtgcttgaagtcccagctactcaggagggtgaggtgggagaatagcttgagctcagg

SEQ ID NO: 67680 - DNA, 120 bp, synthetic construct
  source 1..120: mol_type = other DNA
gcagtggcaccatcttggctcacagcaacctccgcctcctgagttcaagtaattctcctgtctcagcctcctgagtagctgggactacaggtgtgcaccactacgcccagctaatttgtg

SEQ ID NO: 67681 - DNA, 120 bp, synthetic construct
  source 1..120: mol_type = other DNA
caagagaatcacttgaaactgggaggcagaggttgcggtgagccaagatcgcaccattgcactccagcctgggtgacagagactcagtctccaaaaaaaaaagtccaaaaataaaaaaaa

SEQ ID NO: 67682 - DNA, 120 bp, synthetic construct
  source 1..120: mol_type = other DNA
gctaaatgaccacacccctctccaaatctgagttattccctatgtaaaagggggaaataattaaactagctgggtatgctgtgctgagcaatatgtgagctcaggaaaggtcagttttcc

SEQ ID NO: 67683 - DNA, 120 bp, synthetic construct
  source 1..120: mol_type = other DNA
gccgggattacaggcgtgagccaccgtgcccggcctgttttaaattttttttgtagagacagagtctcaccatgttgcctaggcttgtctcgaactcctggtcgcaagtgatcctcccct

SEQ ID NO: 67684 - DNA, 120 bp, synthetic construct
  source 1..120: mol_type = other DNA
aggatcgacagcccaggaagtcaaggccgcagtgagcagtgagctgtggttgcgccactgtactccatactgtagcctgggtgacagagtgagaccttgtcttttttttttttttttttt

SEQ ID NO: 67685 - DNA, 120 bp, synthetic construct
  source 1..120: mol_type = other DNA
caattatctcaaaataaaaagtttaatttaaaaagcggtcacatcctttacgtttgcatttctgtgatattctgtaaaaagcaacagtatagggtcagaaagagaccagtggttgccgtg

SEQ ID NO: 67686 - DNA, 120 bp, synthetic construct
  source 1..120: mol_type = other DNA
ctggccaggcagaggggctcctcacttcccagtaggggcggccgggcagaggcgcccctcacctcctggatagggcggctggccgggcgggggactgttccccccacctccctcccggac

SEQ ID NO: 67687 - DNA, 120 bp, synthetic construct; identical to SEQ ID NO: 23840
  source 1..120: mol_type = other DNA

SEQ ID NO: 67688 - DNA, 120 bp, synthetic construct; identical to SEQ ID NO: 23841
  source 1..120: mol_type = other DNA

SEQ ID NO: 67689 - DNA, 120 bp, synthetic construct
  source 1..120: mol_type = other DNA
cttttattacgttgccatggatttcggaggtcatgggctctcgtcccattacagcccaggtgtcccatattacctccagacttttgtgagtgagatccgaagagttgtggcaggtaagaa

SEQ ID NO: 67690 - DNA, 120 bp, synthetic construct
  source 1..120: mol_type = other DNA
cactgagaatgatggcattcgttgaaccagatgaaactgccaaccccagatggttcgtggcctccggaccctaatttcatgcctttgcaaagcacttggcagttgacagagattcccctt

SEQ ID NO: 67691 - DNA, 120 bp, synthetic construct
  source 1..120: mol_type = other DNA
gggcagttacacacccagtcagtccacaaatctttatcaagacttcttatgggtcaggtaatgagctagactctaagaataaagtgtgaaacaaagacttattgaaaaagaaaagagcca

SEQ ID NO: 67692 - DNA, 120 bp, synthetic construct
  source 1..120: mol_type = other DNA
cagaccctcggtaagccaagtactgagaatggtactgaggaagcacgcttcactcaaaacttctcatgagcactctcttgcaaaatgatcaaagatttttcaaggaaaatattaaaagct

SEQ ID NO: 67693 - DNA, 120 bp, synthetic construct; identical to SEQ ID NO: 43775
  source 1..120: mol_type = other DNA

SEQ ID NO: 67694 - DNA, 120 bp, synthetic construct; identical to SEQ ID NO: 41682
  source 1..120: mol_type = other DNA

SEQ ID NO: 67695 - DNA, 120 bp, synthetic construct
  source 1..120: mol_type = other DNA
tttctagtgaatcaagattttaaatcagatttcctttggaggcctccgaataccaatcaaaaatggctgtcccctgggcctgatcaaccctattcccttggtaaagttagggcgtttaga

SEQ ID NO: 67696 - DNA, 120 bp, synthetic construct
  source 1..120: mol_type = other DNA
aaagtgcctctgagaagaaggggtgtttcccattggaggagagtggggaggccgagagcttcccggtggaggagaggagggaggcccagagcttcccggtggaggagaggagggaggccc

SEQ ID NO: 67697 - DNA, 120 bp, synthetic construct
  source 1..120: mol_type = other DNA
ctgggcaacacggccaaaccccgtcgctactaaaatgcaaaggaccagccgggcgcgatggcgggcgtctgtggtcccagccagcggcgaggctgaggcgcgggaactgcgtgaccccgg

SEQ ID NO: 67698 - DNA, 120 bp, synthetic construct
  source 1..120: mol_type = other DNA
ttagagtcttaggatggtcataacaaagtaccatagaccgagtggcttaaaacaacagaaatgctgttggatcactgttctggaagcctgaagtccaagttcgagttgctgacagggcaa

SEQ ID NO: 67699 - DNA, 120 bp, synthetic construct
  source 1..120: mol_type = other DNA
acaagaagagctaactatcctaaatatttatgcacccaatacaggagcacccagattcataaagcaagtcctcagtgacctacaaagagacttagactcccacacattaacaatgggaga

SEQ ID NO: 67700 - DNA, 120 bp, synthetic construct
  source 1..120: mol_type = other DNA
agttgaatctctgaatagaccaataacaggctctgaaattgtggcaataatcaatagtttaccaaccaaaaagagtccaggaccagatggattcacagccgaattctaccagaggtacat

SEQ ID NO: 67701 - DNA, 120 bp, synthetic construct
  source 1..120: mol_type = other DNA
tcgtgaaaatggccatactgcccaaggtaatttacagattcaatgccatccccatcaagctaccaatgactttcttcacagaattggaaaaaactactttaaagttcatacggaaccaaa

SEQ ID NO: 67702 - DNA, 120 bp, synthetic construct
  source 1..120: mol_type = other DNA
agtctttgctattgtgaatagtgccgcaataaacatacgtgtgcatgtgtctttatagcagcatgatttatactcatttgggtatatacccagtaatgggatggctgggtcaaatggtat

SEQ ID NO: 67703 - DNA, 120 bp, synthetic construct
  source 1..120: mol_type = other DNA
ggaaactgaacaacctgctcctgaatgactactgggtacataacgaaatgaaggcagaaataaagatgttctttgaaaccaacgagaacaaagacaccacataccagaatcgctgggacg

SEQ ID NO: 67704 - DNA, 120 bp, synthetic construct
  source 1..120: mol_type = other DNA
cagagccaaagacaaaaaccacatgattatctcaatagatgcagaaaaagcctttgacaaaattcaacaacccttcatgctaaaaactctcaataaattaggtattgatgggacgtattt

SEQ ID NO: 67705 - DNA, 120 bp, synthetic construct
  source 1..120: mol_type = other DNA
tcagctttctacatatggctagccagttttcccagcaccatttattaaatagggaatcctttccccattgcttgtttttctcaggtttgtcaaagatcagatagttgtagatatgtggca

SEQ ID NO: 67706 - DNA, 120 bp, synthetic construct
  source 1..120: mol_type = other DNA
taacagagaaatattaggttacagtagattaaaacatctgagatttacttcctactcacataaagtctaactgacatggcggtagcggcaggaaggctgctgtccatacaccacagcacg

SEQ ID NO: 67707 - DNA, 120 bp, synthetic construct
  source 1..120: mol_type = other DNA
ctagaacttgccaggcatggaggataaaagatgactgaggtcgggcatggtggctcacacctgtactcccagcactttgggaggccaaggcgggtggatcacttgaggtcaagagtttga

SEQ ID NO: 67708 - DNA, 120 bp, synthetic construct
  source 1..120: mol_type = other DNA
ctatgacaaacccacagccaatatcatactgaatgggcaaaaactggaagcattccctttgaaaaccggcacaagacagggatgccctctctcaccgctcctattcaacatagtgttgga

SEQ ID NO: 67709 - DNA, 120 bp, synthetic construct
  source 1..120: mol_type = other DNA
cacgcctatgtcctgaatggtaatgcctaggttttcttctagggtttttatggttttaggtttaacgtttaaatctttaatccatcttgaattgatttttgtataaggtgtaaggaaggg

SEQ ID NO: 67710 - DNA, 120 bp, synthetic construct; identical to SEQ ID NO: 54966
  source 1..120: mol_type = other DNA

SEQ ID NO: 67711 - DNA, 120 bp, synthetic construct
  source 1..120: mol_type = other DNA
tgtcgtctgcaaacagggacaatttgacttcctcttttcctaattgaataccctttatttccttctcctgcctgattgccctggccagaacttccaacactatgttgaataggagtggtg

SEQ ID NO: 67712 - DNA, 120 bp, synthetic construct
  source 1..120: mol_type = other DNA
aaaatcaatgaatccaggagctggttttttgaaaggatcaacaaaattgatagaccgctagcaagactaataaagaaaaaaagagagaagaatcaaatagacacagtaaaaaatgataaa

SEQ ID NO: 67713 - DNA, 120 bp, synthetic construct
  source 1..120: mol_type = other DNA
agacatttatgcagccaaaaaacacatgaaaaaatgctcatcatcactggccatcagagaaatgcaaatcaaaaccactatgagatatcatctcacaccagttagaatggcgatcattaa

SEQ ID NO: 67714 - DNA, 120 bp, synthetic construct
  source 1..120: mol_type = other DNA
ctctttgaggagaactgcaaaccactgctcaaggaaataaaagaggatacaaacaaatggaagaacattccatgctcatgggtaggaagaatcaatatcgtgaaaatggccatactaccc

SEQ ID NO: 67715 - DNA, 120 bp, synthetic construct
  source 1..120: mol_type = other DNA
catttcaactttggtgaatctgacaattatgtgtcttggagttgctcttctcgaggagtatctttgtcgcgttctctgtatttcctgaatctgaacgttggcctgccttgctagattggg

SEQ ID NO: 67716 - DNA, 120 bp, synthetic construct
  source 1..120: mol_type = other DNA
atatcccacacctggctcggagggtcctacgcccacggaatctcgctgattgctagcacagcagtctgagatcaaactgcaaggcggcaacgaggctgggggaggggcgcccgccattgc

SEQ ID NO: 67717 - DNA, 120 bp, synthetic construct
  source 1..120: mol_type = other DNA
cacaaatggaaaacttgataagaaaatcggtgggattttgctgcacccactgctgatatcaagactgaactctgtattatagcaagaaaagctctgttctgtggctacaggatacatgct

SEQ ID NO: 67718 - DNA, 120 bp, synthetic construct
  source 1..120: mol_type = other DNA
ccatccccagtgctacctcctaattgaggtcctcgacgctttttgcttgcatggctgccagagcctttgggcaggtctctgtgttgatgtgttcacccccactcctatctcctccatcca

SEQ ID NO: 67719 - DNA, 120 bp, synthetic construct
  source 1..120: mol_type = other DNA
ctcccattgacatgcatcacactccacatatgaaacccttctttttctgcactgtcactggggttagggattattactcactgcaacttagcctagcattaagttgcttgactaatacaa

SEQ ID NO: 67720 - DNA, 120 bp, synthetic construct
  source 1..120: mol_type = other DNA
ctcccccgaccccaccacagtccccagagtgtgatattccccttcctgtgtccatgtgatctcattgttcagttcccacctatgagtgagaatatgcggtgtttggttttttgttcttgc

SEQ ID NO: 67721 - DNA, 120 bp, synthetic construct; identical to SEQ ID NO: 43775
  source 1..120: mol_type = other DNA

SEQ ID NO: 67722 - DNA, 120 bp, synthetic construct
  source 1..120: mol_type = other DNA
aaatctagaagaaatggatacattcctcgacacatacactctcccaagactaaagcaggaagaagttgaatctctgaatagaccaataacaggctctgaaattgtggcaataatcaatag

SEQ ID NO: 67723 - DNA, 120 bp, synthetic construct
  source 1..120: mol_type = other DNA
tgctcaaggaaataaaagaggacacaaacaaatggaagaacattccatgctcatgggtaggaagaatcaatatcgtgaaaatggccatactgcccaaggtaatttacagattcaatgcca

SEQ ID NO: 67724 - DNA, 120 bp, synthetic construct
  source 1..120: mol_type = other DNA
ggctctctgtttgtctgttattggtgtataagaatgcttgtgatttttgtacattgattttgtatcctgagactttgctgaagttgctgatcagcttaaggagattttgggctgagacga

SEQ ID NO: 67725 - DNA, 120 bp, synthetic construct
  source 1..120: mol_type = other DNA
agctggttttttgaaaggatcaacaaaattgatagaccgctagcaagactaataaagaaaaaaagagagaagaatcaaatagacacaataaaaaatgataaaggggatatcaccaccaat

SEQ ID NO: 67726 - DNA, 120 bp, synthetic construct
  source 1..120: mol_type = other DNA
tctctgttttggtaccagtaccatgctgttttggttactgtagccttgtagtatagtttgaagtcaggtagaatgatgcctccagctttgttcttttggcttaggattgacttggtgatg

SEQ ID NO: 67727 - DNA, 120 bp, synthetic construct
  source 1..120: mol_type = other DNA
tcagcttaaggagattttgggctgagacgatggggttttctagatatacaatcatgtcgtctgcaaacagggacaatttgacttcctcttttcctaattgaataccctttatttccttct

SEQ ID NO: 67728 - DNA, 120 bp, synthetic construct
  source 1..120: mol_type = other DNA
gctaccaatgactttcttcagagaagtggaaaaaactactttaaagttcgtatggaaccaaaaaagagcccacgtcaccaaggcaatcctaagccaaaagaacaaagctggaggcataac

SEQ ID NO: 67729 - DNA, 120 bp, synthetic construct
  source 1..120: mol_type = other DNA
aaaggactataaatcatgctgctataaagacacatgcacacgtatgtttattgcggcattattcacaatagcaaagacttggaaccaacccaaatgtccaacgatagactggattaagaa

SEQ ID NO: 67730 - DNA, 120 bp, synthetic construct
  source 1..120: mol_type = other DNA
tacctgtatacacatagtataatacatgtattttatagtatatcatacatgtatacacatagcatatacgtgtattgtagtatataatacacgcatacacatagcatatacgtgtattat

SEQ ID NO: 67731 - DNA, 120 bp, synthetic construct
  source 1..120: mol_type = other DNA
gccctcagaaataacgctgcatacctacaactatctgatctttgacaaacctgagaaaaacaagcaatggggaaaggattccctatttaataaatggtgctgggaaaactggctagccat

SEQ ID NO: 67732 - DNA, 120 bp, synthetic construct
  source 1..120: mol_type = other DNA
aatactatgcagccataaaaaatgatgagttcatgtcctttgtagggacatggatgaaattggaaaccatcattctcagtaaactatcgcaagaacaaaaaaccaaacaccgcatattct

SEQ ID NO: 67733 - DNA, 120 bp, synthetic construct
  source 1..120: mol_type = other DNA
gctgcataaatgtcttcttttgagaagtgtctgctcatgtccttcgcccactttttgatggggttgtttgtttttttcttgtaaatttgtttgagttcattgtagattctggatattagc

SEQ ID NO: 67734 - DNA, 120 bp, synthetic construct
  source 1..120: mol_type = other DNA
agccaaagacaaaaaccacatgattatctcaatagatgcagaaaaagcctttgacaaaattcaacaacccttcatgctaaaaactctcaataaattaggtattgatgggacgtatttcaa

SEQ ID NO: 67735 - DNA, 120 bp, synthetic construct
  source 1..120: mol_type = other DNA
gagactaggattgcaacccctgcctttttttgttttccatttgcttggtagatcttcctccatccttttattttgagcctatgtgtgtctctgcacgtaagatgggtttcctgaatacag

SEQ ID NO: 67736 - DNA, 120 bp, synthetic construct; identical to SEQ ID NO: 41682
  source 1..120: mol_type = other DNA

SEQ ID NO: 67737 - DNA, 120 bp, synthetic construct
  source 1..120: mol_type = other DNA
atggcgatagagtgataaatgttacactggtcttcccatacattttacataaaatgaaacaatataaagtctaagtagattgtgaaaagttaagaatgtcacattgtaatccctgaagaa

SEQ ID NO: 67738 - DNA, 120 bp, synthetic construct
  source 1..120: mol_type = other DNA
gtagctgagattacaggcatgtgccaccacgcctggctaatttttttttgtatttttagtagagacatagtttcaccatgttggccaggctggtctctaactcccgacctcagatgatcc

SEQ ID NO: 67739 - DNA, 120 bp, synthetic construct
  source 1..120: mol_type = other DNA
ctactccctacccgcttttcctcacctcctactccctacccgcttttcttcacctcctattccctacccgcttttccatgcccaggagacacactgtgttgtgttcctcagtgatccctt

SEQ ID NO: 67740 - DNA, 120 bp, synthetic construct
  source 1..120: mol_type = other DNA
gcatattcacttcttttgtgattcttcagttacttcaggccatctgggcgtatacgtacgtggaagtcacaggggatgtgatggcttggcttgggctcagaggcctgacattcctgcctt

SEQ ID NO: 67741 - DNA, 120 bp, synthetic construct
  source 1..120: mol_type = other DNA
agggagacgctcctcactttccagactgggcagccaggcagaggggctcctcacatcccagacgatgggcggccaggcagagacactcctcacttcccagacggggtggcggccgggcag

SEQ ID NO: 67742 - DNA, 120 bp, synthetic construct
  source 1..120: mol_type = other DNA
gtttgtgccctcttgtatttccttgagcagtggtttgtagttctccttgaagaggtccttcacatcccttgtaagttggattcctaggtattttattctctttgaagcaattgtgaatgg

SEQ ID NO: 67743 - DNA, 120 bp, synthetic construct
  source 1..120: mol_type = other DNA
gatctgaaattgtggcaataatcaatagtttaccaaccaaaaagagtccaggaccagatggattcacagccgaattctaccagaggtacaaggaggaactggtaccattccttctgaaac

SEQ ID NO: 67744 - DNA, 120 bp, synthetic construct
  source 1..120: mol_type = other DNA
tgtggtcaattttggaataggtgtggtgtggtgttgaaaaaaatgtatattctgttgatttggggtggagagttctgtagatgtctattaggtccgcttggtgcagagctgagttcaatt

SEQ ID NO: 67745 - DNA, 120 bp, synthetic construct
  source 1..120: mol_type = other DNA
agacacataattgtcagattcaccaaagttgaaatgaaggaaaaaatgttaagggcagccagagagaaaggtcgggttaccctcaaaggaaagcccatcagactaacagcggatctctcg

SEQ ID NO: 67746 - DNA, 120 bp, synthetic construct
  source 1..120: mol_type = other DNA
acagaggcaggcaggcctccttgagctgtggtgggctccacccagttcgagcttcccggctgctttgtttacctaagcaagcctgggcaatggcgggcgcccctcccccagcctcgttgc

SEQ ID NO: 67747 - DNA, 120 bp, synthetic construct
  source 1..120: mol_type = other DNA
tgtagataggtctatagttagagttttccctgtatttaggattattttaatagcatgtatttccagttataattgtaattactagatcaaagtgtgtggacatttatggttatctataat

SEQ ID NO: 67748 - DNA, 120 bp, synthetic construct
  source 1..120: mol_type = other DNA
tccctttaagtattaatgccttgtcttttccaatgtcagcaatcccttagtaatgtagcttggtctagtgctgataaagcttttattttgttttctgtaacttccttttggggtctagct

SEQ ID NO: 67749 - DNA, 120 bp, synthetic construct
  source 1..120: mol_type = other DNA
tttaagtgtggtttaagttgactatttttatatgtgaggggatttagatatatgtctttccaaaatcttcattaatctaaaacaagttttaaaaattggcaatagtggcaatacttgagg

SEQ ID NO: 67750 - DNA, 120 bp, synthetic construct
  source 1..120: mol_type = other DNA
acagtgtgtgccataattcatatttgtcgccaagcatcttctcaggctgacactgtgccaaacaagggattatagagatgaagatgcagcttccatccctgaaagctcacagtccattct

SEQ ID NO: 67751 - DNA, 120 bp, synthetic construct
  source 1..120: mol_type = other DNA
tctgttagaaggaaaactaacaaacagaaaggacatccacaccgaaaacccatctgtacatcaccatcatcaaagaccaaaagtagataaagccacaaagatggggaaaaaacagaatag

SEQ ID NO: 67752 - DNA, 120 bp, synthetic construct
  source 1..120: mol_type = other DNA
atccgctgttagtctgatgggcttccctttgagggtaacccgacctttctctctggctgcccttaacattttttccttcatttcaactttggtgaatctgacaattatgtgtcttggagt

SEQ ID NO: 67753 - DNA, 120 bp, synthetic construct
  source 1..120: mol_type = other DNA
gagagaaagtcaacaaagatacccaggaattgaactcagctctgcaccaagcagacctaatagacatctacagaactctccaccccaaatcaacagaatatacatttttttcagcaccac

SEQ ID NO: 67754 - DNA, 120 bp, synthetic construct
  source 1..120: mol_type = other DNA
tctgaatagaccaataacaggagctgaaattgtggcaataatcaatagtttaccaaccaaaaagagtccaggaccagatggattcacagccgaattctaccagaggtacaaggaggaact

SEQ ID NO: 67755 - DNA, 120 bp, synthetic construct
  source 1..120: mol_type = other DNA
ttacaagggatgtgaaggacctctttgaggagaactgcaaaccactgctcaaggaaataaaagaggatacaaacaaatggaagaacattccatgctcatgggtaggaagaatcaatatcg

SEQ ID NO: 67756 - DNA, 120 bp, synthetic construct
  source 1..120: mol_type = other DNA
ctggatttggtttgccagtattttattgaggatttttgcatcaatgttcatcaaggatattggtctaaaattctcttttttggttgtgtctctgcccggctttggtatcagaatgatgct

SEQ ID NO: 67757 - DNA, 120 bp, synthetic construct
  source 1..120: mol_type = other DNA
gcggctttgagtgagattcttaatcctgagttctagtttgattgcactgtggtctgagagatagtttgttataatttctgttcttttacatttgctgaggagagctttacttccaactat

SEQ ID NO: 67758 - DNA, 120 bp, synthetic construct
  source 1..120: mol_type = other DNA
aatcttttccccacctttcccgcctttctattccacaaaaccgccattgtcatcctggcccgttctcaatgagctgttgggcacacctcccagacggggtggtggccgggcagaggggct

SEQ ID NO: 67759 - DNA, 120 bp, synthetic construct
  source 1..120: mol_type = other DNA
aaaaagacagcagtaacctctgcagacttaactgtccctgtctgacagctttgaagaaagcagtggttctcccagcacgcagctggagatctgagaacgggcagactgcctcctcaagtg

SEQ ID NO: 67760 - DNA, 120 bp, synthetic construct
  source 1..120: mol_type = other DNA
tgtggagaatggaaccaagttggaaaacactctgcaggatattatccaggagaacttccccaatctagcaaggcaggccaacgttcagattcaggaaatacagagaacgccacaaagata

SEQ ID NO: 67761 - DNA, 120 bp, synthetic construct
  source 1..120: mol_type = other DNA
acaaaaaacccttcaaaaaatcaatgaatccaggagctggttttttgaaaggatcaacaaaattgatagaccgctagcaagcctaataaagaaaaaaagagagaagaatcaaatagacac

SEQ ID NO: 67762 - DNA, 120 bp, synthetic construct
  source 1..120: mol_type = other DNA
atcgtctcagcccaaaatctccttaagctgataagcaacttcagcaaagtctcaggatacaaaatcaatgtacaaaaatcacaagcattcttatacaccaacaacagacaaacagagagc

SEQ ID NO: 67763 - DNA, 120 bp, synthetic construct
  source 1..120: mol_type = other DNA
tgcagacttaagtgtccctgtctgacagctttgaagagagcagtggttctcccagcacgcagctggagatctgagaacgggcagactgcctcctcaagtgggtccctgactcctgacccc

SEQ ID NO: 67764 - DNA, 120 bp, synthetic construct
  source 1..120: mol_type = other DNA
caaggcaggccaacgttcagattcaggaaatacagagaacgccacaaagatactcctcgagaggagcaactccaagacacataattgtcagattcaccaaagttgaaatgaaggaaaaaa

SEQ ID NO: 67765 - DNA, 120 bp, synthetic construct; identical to SEQ ID NO: 67090
  source 1..120: mol_type = other DNA

SEQ ID NO: 67766 - DNA, 120 bp, synthetic construct
  source 1..120: mol_type = other DNA
acacagtaaaaaatgataaaggggatatcaccaccgatcccacagaaatacaaactaccatcagagaatactacaaacacctctacgcaaataaactagaaaatctagaagaaatggata

SEQ ID NO: 67767 - DNA, 120 bp, synthetic construct
  source 1..120: mol_type = other DNA
accaacaacagacaaacagagagccaaatcatgggtgaactcccattcacaattgcttcaaagagaataaaatacctaggaatccaacttacaagggatgtgaaggacctcttcaaggag

SEQ ID NO: 67768 - DNA, 120 bp, synthetic construct
  source 1..120: mol_type = other DNA
tgttcatcaaagtcacaccctgcccctgcatccgcccctcactctgcacatgggagctcaagaagccaaggggcttgctctgtacccgggtcacccagcttcatcctgggcaaaatgaga

SEQ ID NO: 67769 - DNA, 120 bp, synthetic construct
  source 1..120: mol_type = other DNA
taaagaaggaaagttcctataagaggattgtcaagcgcaaatgaatatatatttcatgtgatctattgtgtaccatcaggaaattaagtgattcgaccaatataggttattttcaccacc

SEQ ID NO: 67770 - DNA, 120 bp, synthetic construct
  source 1..120: mol_type = other DNA
cgcatcctctccagcacctgttgtttcctgactttttaatgattgccattctaactggtgtgagatgatatctcatagtggttttgatttgcatttctctgatggccagtgatgatgagc

SEQ ID NO: 67771 - DNA, 120 bp, synthetic construct
  source 1..120: mol_type = other DNA
agagcctgttattggtctattcagagattcaacttcttcctggtttagtcttgggagagtgtatgtgtcgaggaatgtatccatttcttctagattttctagtttatttgcgtagaggtg

SEQ ID NO: 67772 - DNA, 120 bp, synthetic construct
  source 1..120: mol_type = other DNA
ggtattttattctctttgaagcaattgtgaatgggagttcacccatgatttggctctctgtttgtctgttgttggtgtataagaatgcttgtgatttttgtacattgattttgtatcctg

SEQ ID NO: 67773 - DNA, 120 bp, synthetic construct
  source 1..120: mol_type = other DNA
tgtgatattccccttcctgtgtccatgtgatctcattgttcaattcccacctatgagtgagaatatgcggtgtttggttttttgtacttgcgatagtttactgagaatgatggtttccaa

SEQ ID NO: 67774 - DNA, 120 bp, synthetic construct
  source 1..120: mol_type = other DNA
ccattgcttttggtgttttggacatgaagtccttgcccacgcctatgtcctgaatggtaatgcctaggttttcttccagggtttttatggttttaggtttaacgtttaaatctttaatcc

SEQ ID NO: 67775 - DNA, 120 bp, synthetic construct
  source 1..120: mol_type = other DNA
acaataaaaaatgataaaggggatatcaccaccgatcccacagaaatacaaactaccatcagagaatactacaaacacctctacacaaataaactagaaaatctagaagaaatggataca

SEQ ID NO: 67776 - DNA, 120 bp, synthetic construct
  source 1..120: mol_type = other DNA
aagaatgcttgtgatttttgtacattgattttgtatcctgagactttgctgaagttgcttatcagcttaaggagattttgggctgagacgatggggttttctagataaacaatcatgtcg

SEQ ID NO: 67777 - DNA, 120 bp, synthetic construct
  source 1..120: mol_type = other DNA
ggttgcgaaaattttctcccatgttgtaggttgcctgttcactctgatggtagtttcttttgctgtgcagaagctctttagtttaattagatcccatttgtcaattttggcttttgttgc

SEQ ID NO: 67778 - DNA, 120 bp, synthetic construct
  source 1..120: mol_type = other DNA
atcacttgaggtcaggagttccagactagcctgggcaacatggagaaaccccatctctacaaaaaataaaaaaattagccaggcatggtgacgcatgcctgtaatcctacctatttggga

SEQ ID NO: 67779 - DNA, 120 bp, synthetic construct
  source 1..120: mol_type = other DNA
caaagcatatgaactcatcattttttatggctgcatagtattccatggtgtatatgtgccacattttcttaatccagtctatcattgttggacatttgagttggttccaagtctttgcta

SEQ ID NO: 67780 - DNA, 120 bp, synthetic construct
  source 1..120: mol_type = other DNA
attgatttttgtataaggtgtaaggaagggatccagtttcagctttctacatatggctagccagtattcccagcaccatttattaaatagggaatcctttccccattgcttgtttttctc

SEQ ID NO: 67781 - DNA, 120 bp, synthetic construct
  source 1..120: mol_type = other DNA
gctctgtttatatgctggattacatttattgatttgcgtatattgaaccagccttgcatcccagggatgaagcccacttgatcatggtggataagctttttgatgtgctgctggattcgg

SEQ ID NO: 67782 - DNA, 120 bp, synthetic construct
  source 1..120: mol_type = other DNA
caccacataccagaatctctgggacgcattcaaagcagtgtgtagagggaaatttatagcactaaatgcctacaagagaaagcaggaaagatccaaaattgacaccctaacatcacaatt

SEQ ID NO: 67783 - DNA, 120 bp, synthetic construct
  source 1..120: mol_type = other DNA
cagactttaaaccaacaaagatcaaaagagacaaagaaggccattacataatggtaaagggatcaattcaacaagaagagctaactatcctaaatatttatgcacccaatacaggagcac

SEQ ID NO: 67784 - DNA, 120 bp, synthetic construct
  source 1..120: mol_type = other DNA
tctctgaatagaccaataacaggagctgaaattgtggcaataatcaatagcttaccaaccaaaaagagtccaggaccagatggattcacagccgaattctaccagaggtacaaggaggaa

SEQ ID NO: 67785 - DNA, 120 bp, synthetic construct
  source 1..120: mol_type = other DNA
ccagtgatgatgagcattttttcatgtgttttttggctgcataaatgtcttcttttgagaagtgtctgttcatgtccttcgcccactttttgatggggttgtttgattttttcttgtaaa

SEQ ID NO: 67786 - DNA, 120 bp, synthetic construct; identical to SEQ ID NO: 67723
  source 1..120: mol_type = other DNA

SEQ ID NO: 67787 - DNA, 120 bp, synthetic construct
  source 1..120: mol_type = other DNA
tttgattcttctctctttttttctttattagtcttgctagcggtctatcaattttgttgatcctttcaaaaaaccagctgctggattcattgattttttgaagggttttttgtgtctcta

SEQ ID NO: 67788 - DNA, 120 bp, synthetic construct
  source 1..120: mol_type = other DNA
tggcaagttggataaagagtcaagacccatcagtgtgctgtattcaggaaacccatctcacgtgcagagacacacataggctcaaaataaaaggatggaggaagatctaccaagcaaatg

SEQ ID NO: 67789 - DNA, 120 bp, synthetic construct
  source 1..120: mol_type = other DNA
gccttcccatcatgattgctaggcccatgatgagaagatattgcaggaaagcacgacctggaccatagaaagggcagatcaatgtgtgggcctttatgtgcttatccctcccaccaccct

SEQ ID NO: 67790 - DNA, 120 bp, synthetic construct
  source 1..120: mol_type = other DNA
tgtgtgtgtgtgtgtgtgtgtgtgtgtgtgtgagagagagagagagatgaccctttaaaaatgtacactccattcttctcatgagccatagtttgtcaacgcctggtctggcactcttca

SEQ ID NO: 67791 - DNA, 120 bp, synthetic construct
  source 1..120: mol_type = other DNA
agagggagagggagagggagaggggagagggagagggagagggagagggagagggagagggagagggagagggagagggagagggagagggagagggagagggagagggagagggagagg

SEQ ID NO: 67792 - DNA, 120 bp, synthetic construct
  source 1..120: mol_type = other DNA
aaggaaatagagacacaaaaaacccttcaaaaaatcaatgaatccaggagctggttttttgaaaggatcaacaaaattgatagaccgctagcaagactaataaagaaaaaaagagaggag

SEQ ID NO: 67793 - DNA, 120 bp, synthetic construct
  source 1..120: mol_type = other DNA
caccgctcctattcaacatagtgttggacgttctggccagggcaatcaggcaggagaaggaaataaagggtattcaattaggaaaagaggaagtcaaattgtccctgtttgcagacgaca

SEQ ID NO: 67794 - DNA, 120 bp, synthetic construct
  source 1..120: mol_type = other DNA
agctaagatggcgccactgcactccagcctgggcaacagagcaagaagactccatctcaaaaaatatattatgtacatatgtatatgtgtctatacatatgtatatacacacatgtatac

SEQ ID NO: 67795 - DNA, 120 bp, synthetic construct
  source 1..120: mol_type = other DNA
tacatctgcaaagactctgtttccagagatcacattctgaggtactacgggttagaaatcaaaataccgtttgcagggacaaaatgcaactcataatatttgcatccttgaaaaatgtat

SEQ ID NO: 67796 - DNA, 120 bp, synthetic construct
  source 1..120: mol_type = other DNA
ctctctccacggtctccctctccctctccctccacggtctccctctccctctccctctccctccacggtctccctctccctctccctccacggtctccctctccctctccctctccctct

SEQ ID NO: 67797 - DNA, 120 bp, synthetic construct
  source 1..120: mol_type = other DNA
actaatggaatatataatatagtctagcagtaactagcataaaaattaagtattaactcacacaatcacaagttcccacaataggccatctgctgaggagcaaggagagccagtccgagt

SEQ ID NO: 67798 - DNA, 120 bp, synthetic construct
  source 1..120: mol_type = other DNA
agagagaagatcagtcaatccaggcactgagaaactagaagtactttcctttctgtgactttattgagggccttttaataataaatatatataatatttaaaatattaaatgttattaaa

SEQ ID NO: 67799 - DNA, 120 bp, synthetic construct
  source 1..120: mol_type = other DNA
agggcaggcctggtggtgacaaaatctctcagcatttgcttgtctgtaaaggattttatttctccttaactcatgaagcttagtttggcaggatatgaaattctgggttgaaaattcttt

SEQ ID NO: 67800 - DNA, 120 bp, synthetic construct
  source 1..120: mol_type = other DNA
cctgctttctcttgtgggcatttagtgctataaatttccctctacacactgctttgaatgcgtcccagagattctggtatgttgtgtctttgttctcgttggtttcaaagaacatcttta

SEQ ID NO: 67801 - DNA, 120 bp, synthetic construct; identical to SEQ ID NO: 67704
  source 1..120: mol_type = other DNA

SEQ ID NO: 67802 - DNA, 120 bp, synthetic construct
  source 1..120: mol_type = other DNA
catacctacaactatctgatctttgacaaacctgagaaaaacaagcaatggggaaaggattccctatttaataaatggtgctgggaaaactggctagccatatgtagaaagctgaaactg

SEQ ID NO: 67803 - DNA, 120 bp, synthetic construct
  source 1..120: mol_type = other DNA
aaacaaaataacagtgcttacctaaccaggtcagctgtgagctgggacttcacagacaggcatagagagacatggatgcaggaagggcttccttagctgagagggtcgtgaaactggaag

SEQ ID NO: 67804 - DNA, 120 bp, synthetic construct
  source 1..120: mol_type = other DNA
tgcccagggcattgcccccacagcaaagagcgacattggaaggcaaaccaatgtcaggtttcctaatgtgcacggagtcatccctggaagagtgagtccggtgatcttaccagctaattg

SEQ ID NO: 67805 - DNA, 120 bp, synthetic construct
  source 1..120: mol_type = other DNA
gtggctttgagtgagattcttaatcctgagttctagtttgattgcactgaggtctgagagatagtttgttataatttctgttcttttacatttgctgaggagagctttacttccaagtat

SEQ ID NO: 67806 - DNA, 120 bp, synthetic construct
  source 1..120: mol_type = other DNA
ctgggttgaaaattcttttctttaagaatgttgaatattggcccccactctcttctggcttgtagggtttctgccgagagatccgctgttagtctgatgggcttccctttgagggtaacc

SEQ ID NO: 67807 - DNA, 120 bp, synthetic construct
  source 1..120: mol_type = other DNA
tactccccattctggtgtctttggagccctgggtaaggtgtgtgctgagtccggtctggtttggggtagatgttctttgatctgttaccacacctggagggaaagcccctggcccgcccc

SEQ ID NO: 67808 - DNA, 120 bp, synthetic construct
  source 1..120: mol_type = other DNA
agcccccagaggcccccggggggtttccgcctgagcctaaaccgaagacagggcatgttttcagtcatcccgaccccacagactcagcccgttagttcccgcgctgcccggcgccctagt

SEQ ID NO: 67809 - DNA, 120 bp, synthetic construct
  source 1..120: mol_type = other DNA
ggagctgaagacaatgaaggagccagtgtggctgttctgtgagactcgtggagctggagatccaggtgggagaggtgttttagctcggggaagagctgatgttctaccttgagggtcgtg

SEQ ID NO: 67810 - DNA, 120 bp, synthetic construct
  source 1..120: mol_type = other DNA
agctgatgttctagattgagggtcatgcagctgaatactcggggaggagctgatgttgtagtttgagggtcatgcagttgaggacttcgggaggagctgatgttgttcacgttgagggtc

SEQ ID NO: 67811 - DNA, 120 bp, synthetic construct
  source 1..120: mol_type = other DNA
gggccttgcttttatgctgagctcatgctcttctccaggtgaccctgtggccgatgactaagcaaagtggcatcacagtgacctcaccatttccaccccacaagactccgccaacaggca

SEQ ID NO: 67812 - DNA, 120 bp, synthetic construct
  source 1..120: mol_type = other DNA
tgctcagcccggcctccgcccttctccttacgcagatgccacatcctcctgcccggcccggcctccttctccttaccaggtgccacatcctccgcccagcctggcctccgcccttctcct

SEQ ID NO: 67813 - DNA, 120 bp, synthetic construct
  source 1..120: mol_type = other DNA
agggagtagtaacaagaataaatgaagccgtgaagccagggcccctttggcgcttgtgcaaccgccaacctgcgtagttctgtgagcactgggacacgtgttggtgctgactcatcaaaa

SEQ ID NO: 67814 - DNA, 120 bp, synthetic construct
  source 1..120: mol_type = other DNA
aagatgcagtcacccaggaaattcaaggacccccaacttaccaaaaggctttcggctggacagagctaaccttcctattcccctcctaaacctacaacctagttttcatttctcaagaag

SEQ ID NO: 67815 - DNA, 120 bp, synthetic construct
  source 1..120: mol_type = other DNA
gccctagaaagactccagataccgtgtctaactggagagagaaaagctcagacgtggaaggaaggagaggtcagaatcccagagtcggggctggagggcagctggaggatgatctcattc

SEQ ID NO: 67816 - DNA, 120 bp, synthetic construct; identical to SEQ ID NO: 67814
  source 1..120: mol_type = other DNA

SEQ ID NO: 67817 - DNA, 120 bp, synthetic construct
  source 1..120: mol_type = other DNA
gcgtgcaaatttagattctgctacaggatgtggacagtggggagagagacgcatgcaaatttagattctgctacagatgtgacagtgggaggggagacgcatgcaaatttagattccgct

SEQ ID NO: 67818 - DNA, 120 bp, synthetic construct
  source 1..120: mol_type = other DNA
ctacaggttgtggacagtgggaggggagacgcgtgcaaatttagattctgctatgcgatgtggacagtgggaggagagacgcgtgcaaatttagattctgctacaggatgtggacagtgg

SEQ ID NO: 67819 - DNA, 120 bp, synthetic construct
  source 1..120: mol_type = other DNA
gtggttggtttgttaatttttttaagtcagttcaaatgcctccaagttcggtttctgtttgcttagggaaggcctcaggctaacccccgccgtatttgctttaacatgtcaaaaccataa

SEQ ID NO: 67820 - DNA, 120 bp, synthetic construct
  source 1..120: mol_type = other DNA
cagttgcagtgagccaagatcatgccattgcactccagcctgggtgacaagagtgaaagtctgtctcaaaaaaataaaaaaaaaaaaatatatatatatatatatatacatatatatata

SEQ ID NO: 67821 - DNA, 120 bp, synthetic construct
  source 1..120: mol_type = other DNA
tttttagttttttctaaaataagtgtactttagtcatgttaaaaaaaaactttgtatttattactgtcccattgcctgcactgtctgaaaaaaaatacactcaaatgaaaagatacatta

SEQ ID NO: 67822 - DNA, 120 bp, synthetic construct
  source 1..120: mol_type = other DNA
agtgctgaagctgagagactgggtcttggtggaccccgagaggtctgtttctcctctactcattgttcctttttttcccaacagctggcattgctgtttaaatgggttgttctttgctgt

SEQ ID NO: 67823 - DNA, 120 bp, synthetic construct
  source 1..120: mol_type = other DNA
ccttccttcctttccttctttcccttccttcctttccttccctccttccctttttccctccttccctcctcccttccttttttctttccttccttttttcctttttataaattatgcagt

SEQ ID NO: 67824 - DNA, 120 bp, synthetic construct
  source 1..120: mol_type = other DNA
taaaactgctatatagttctgcctcactcttacaaagattcatctcttgagagttttgtgctctacccccagatgtggtctttctggttatgaagcttttgcttcagtcaccctgaattt

SEQ ID NO: 67825 - DNA, 120 bp, synthetic construct
  source 1..120: mol_type = other DNA
ataaagggaaagagtacaaaagagagaaattttaaagctggatgtccaggggagacatcacacgtcggcaggttccgtgatgccccccaagccgcaaaaccaacaagtttttattagtga

SEQ ID NO: 67826 - DNA, 120 bp, synthetic construct
  source 1..120: mol_type = other DNA
agcctgaccaacatggtgaaaccccgtttctactaaaaataacaacagttagctaggcattgtggcacacccctataattccagctactcgggaggccgaggcaggagaattgcttgaac

SEQ ID NO: 67827 - DNA, 120 bp, synthetic construct
  source 1..120: mol_type = other DNA
tgtcttgatgccaggagttttttttgttgttgttgtttttgtttttgttgttgttgttgttgttgacagtctcgctctgtcacccagggtggagtgcagtgatggggtccactgcaacct

SEQ ID NO: 67828 - DNA, 120 bp, synthetic construct
  source 1..120: mol_type = other DNA
ctgaatgtacgtatggagtttctacaccagattcttcagtgctctggatattaactgggtatcccatgactttattctgacactacctggagttagcacagaccccacaagttaggggct

SEQ ID NO: 67829 - DNA, 120 bp, synthetic construct
  source 1..120: mol_type = other DNA
cagcagcccgcgtgcgcccagctcctccctcacggtggcctgttgatgccaactcatgcctctggaccctgcacagagcgtgacgctgcctcacactggctactccacgctgagagaggt

SEQ ID NO: 67830 - DNA, 120 bp, synthetic construct
  source 1..120: mol_type = other DNA
ccttgcctcacaccggcccctcccacgctgagagaggtcagtgtgagcccttgcctcacaccggcccctcccacgcggacagaggtcagcgtgagccccttgcctcacaccggcccctcc

SEQ ID NO: 67831 - DNA, 120 bp, synthetic construct
  source 1..120: mol_type = other DNA
ggatgccgggtgttttcgggcatctggatgtgagtagatcaggttggatacagggtgttttcgggcatctggatgtgggtagatcaggttggatgcagggtgttttcgggcatctggatg

SEQ ID NO: 67832 - DNA, 120 bp, synthetic construct
  source 1..120: mol_type = other DNA
cggtgcctttgaatcccgcccccgccggggccccgtggcccggccgctctttgtgaagcgctgtcgctccatctcggcgcgagatcatttccaaattaaattttatggtccattacttat

SEQ ID NO: 67833 - DNA, 120 bp, synthetic construct
  source 1..120: mol_type = other DNA
accaagtcctaggaatggttccctgaggccacacctataattttattgttgtgtgaatattctgtttgaacgggagattacaattttacttcctgttcagtaaacatccccaccgcaggc

SEQ ID NO: 67834 - DNA, 120 bp, synthetic construct
  source 1..120: mol_type = other DNA
cggacccctgccccaggctctcagcaggacagccggacccctgccccaggctctcagcaggacagccggacccctgccccaggtactcagcaggacagccagacccgccccaggctctca

SEQ ID NO: 67835 - DNA, 120 bp, synthetic construct
  source 1..120: mol_type = other DNA
gcagaaccggacggcgcaacaagctagggagaaagcatccccggcgcggggtgcacggagccccagaccccacccgcctcccgcccggaccccgcctccactcagggagccgggccccac

SEQ ID NO: 67836 - DNA, 120 bp, synthetic construct
  source 1..120: mol_type = other DNA
aactgttacctgaattttctcttcctcgtggtcctgcatatctggaatattactggcaaaacccaattagacttttaagacatgtatgtgtttctaagcaggccaaatatctttttttgt

SEQ ID NO: 67837 - DNA, 120 bp, synthetic construct
  source 1..120: mol_type = other DNA
tcttgttagctcactcttgttagtcacttgttagtctcttgtggacccagactatatcttacaatagacctcaaagagggaggcagctgcgtgcattgcatagaaaatagaaaaagccat

SEQ ID NO: 67838 - DNA, 120 bp, synthetic construct
  source 1..120: mol_type = other DNA
cacaaaatatggcaaaagacacaggaagtcacctctgaaattaggttgcaaaaggacctgctatccctcttgctcatcttctcctgaaagacaggtggcagagctgccatgctgcgaagc

SEQ ID NO: 67839 - DNA, 120 bp, synthetic construct
  source 1..120: mol_type = other DNA
catgaagtgactctgggagagacaggctctgcttgtgagctgatgcccgcaggcaagtcccatctaccttcagggtcctcctgtcaacggcagcatccagtgatgaggctgagaggattc

SEQ ID NO: 67840 - DNA, 120 bp, synthetic construct
  source 1..120: mol_type = other DNA
ggtggcacgggaagagtggcatggcgggagggtggcatgggggagggtggcatgggggagtggcatgggggggagggtgccatggggggagggtggcatgggggagtggcatggggggag

SEQ ID NO: 67841 - DNA, 120 bp, synthetic construct
  source 1..120: mol_type = other DNA
tacaggtacctgccaccacacccggctactttttgtattttttttttttttttttttttagtagagatggaatttcaacatattggctaggctggtctcaaactcctgacctcaggtgac

SEQ ID NO: 67842 - DNA, 120 bp, synthetic construct
  source 1..120: mol_type = other DNA
tgcagtgagctgagatcacaccattggactacagcctgggtgacagaccaagactctatctcaaaaacaaaaacaaaaataaaaaacacagagggttcctgttgctacttccaattccaa

SEQ ID NO: 67843 - DNA, 120 bp, synthetic construct
  source 1..120: mol_type = other DNA
gttgcagtgagccgagattgtgccactgcactccagcctgggcaacatagtgagaccctgtctccaaaataaataaataaataaataaaagaagacggactgatgtttacaaagcattca

SEQ ID NO: 67844 - DNA, 120 bp, synthetic construct
  source 1..120: mol_type = other DNA
aaggtgcacccagtccctggtggagggtggcgttccggttcctgtcctgcaggactgggaatctgatgttgaggatgcaagggaacagcgccgcctggtggcatcggaacaccgggacca

SEQ ID NO: 67845 - DNA, 120 bp, synthetic construct; identical to SEQ ID NO: 67841
  source 1..120: mol_type = other DNA

SEQ ID NO: 67846 - DNA, 120 bp, synthetic construct
  source 1..120: mol_type = other DNA
gagttcaagaccagcctggccaatatggtgaaaccctgtctctactaaaaatgcaaaaaaaaaaaaaaaaaaaaaaaaatagctgggcaaggtggcaggctactctggtggctgaggcag

SEQ ID NO: 67847 - DNA, 120 bp, synthetic construct
  source 1..120: mol_type = other DNA
cgacgatggacagacagatggatacgttcaacagcagcatgaacaagttctacaactagaaatcattatttgtaaaggaaaaacccatttacgagttgaatcagaggagaggctcgtgtc

SEQ ID NO: 67848 - DNA, 120 bp, synthetic construct
  source 1..120: mol_type = other DNA
agaacagtgtgaacccaggaggcagagcttgcagtgaggcgagatggcgccactgccctccagcctgggcgacagagcgagactccgtctcaagaaaaaaaaaaaaaaaaaaaaggaaac

SEQ ID NO: 67849 - DNA, 120 bp, synthetic construct
  source 1..120: mol_type = other DNA
aatcgcttgaacccgggaggcagaggttgcagcgagccgagatcacgccactgcactccagcctggcagacagagccagattctgtctaaaaaaaaaaaaaaatgatggtgccaagcagc

SEQ ID NO: 67850 - DNA, 120 bp, synthetic construct
  source 1..120: mol_type = other DNA
ggtggagacgaggagatagcattctcttcacacaccaccccggatccagccagcggggggcccttctgcacttccatgtccttttttgttggtttgttttgagaccgagtctcactctct

SEQ ID NO: 67851 - DNA, 120 bp, synthetic construct
  source 1..120: mol_type = other DNA
ggccgaggccggtggatcacctgaggtcaggagttcaagaccagcctggccaatatggtgaaaccctgtctctactaaaaatgcaaaaaaaaaaaaaaaaaaaaaaaaatagctgggcaa

SEQ ID NO: 67852 - DNA, 120 bp, synthetic construct
  source 1..120: mol_type = other DNA
aaaaagagggaatcctccctaactcatttaatgaggccagcatcattctgataccaaagccgggcagagacacaaccaaaaaagagaattttagaccaatatccttgatgaacattgatg

SEQ ID NO: 67853 - DNA, 120 bp, synthetic construct
  source 1..120: mol_type = other DNA
atttacagattcaatgccatccccatcaagctaccaatgactttcttcacagaattggaaaaaactactttaaagttcatatggaaccaaaaaagagcccgcattgccaagtcaatccta

SEQ ID NO: 67854 - DNA, 120 bp, synthetic construct
  source 1..120: mol_type = other DNA
tagactgtcactggatttaactatgctttcctgaatctctagtctgttgttctcccccaccagattttggactcactaagcctccacaatggcatgagccatttccttaaaataaatctc

SEQ ID NO: 67855 - DNA, 120 bp, synthetic construct
  source 1..120: mol_type = other DNA
gatgtgtctattcaaatatttatccagttatccaggtttttgtttgttttgttttgttttgttttgttttgttttggtgagggggcaggattgtttgccttcctattattgagttgtaag

SEQ ID NO: 67856 - DNA, 120 bp, synthetic construct
  source 1..120: mol_type = other DNA
acgcagttcctcaccagcaacagaacaaagctggatggagaatgattttgacgagctgagagaagaaggcttcagacgatcaaattactctgagctacaggaggacattcaaaccaaagg

SEQ ID NO: 67857 - DNA, 120 bp, synthetic construct
  source 1..120: mol_type = other DNA
cattggcttggtagatcttcctccatccttttattttgagcctatgtgtgtctctgcacgtgagatgggtttcctgaatacagcacactgatgggtcttgactctttatccaacttgcca

SEQ ID NO: 67858 - DNA, 120 bp, synthetic construct
  source 1..120: mol_type = other DNA
attgtgtctatttgattcttctctctttttttctttattagtcttgctagtggtctatcaattttgttgatcctttcaaaaaaccagctcctggattcattgattttttgaagggttttt

SEQ ID NO: 67859 - DNA, 120 bp, synthetic construct
  source 1..120: mol_type = other DNA
cctgattgccctggccagaacttccaacactatgttgaataggagtggtgagagagggcatccctgtcttgtgccagttttcaaagggaatgcttccagtttttgcccattcagtatgat

SEQ ID NO: 67860 - DNA, 120 bp, synthetic construct
  source 1..120: mol_type = other DNA
cagcaccatttattaaatagggaatcctttccccattgcttgtttttctcaggtttgtgaaagatcagatagttgtagatatgcggcattatttctgagggctctgttctgttccattga

SEQ ID NO: 67861 - DNA, 120 bp, synthetic construct
  source 1..120: mol_type = other DNA
gcatgaaggttgttgaattttgtcaaaggccttttctgcatctattgagataatcatgtggttttggtctttggctctgtttatatgctggattacatttattgatttgcgtatattgaa

SEQ ID NO: 67862 - DNA, 120 bp, synthetic construct
  source 1..120: mol_type = other DNA
aattaatcatgccttcccacactcccctaaagtcttaactcatttcaacactaactcaaaaacccagaatccaaagtctcatttgagacaaggcaactcccttccacctatgagcctgta

SEQ ID NO: 67863 - DNA, 120 bp, synthetic construct
  source 1..120: mol_type = other DNA
gagtttcagttttgccagacgagagtaacctggaaatggatggtgtgatgtttgcacaatgtgaacgtactttactccactatacacttgaaagtgggtgcaatgggaaagtttatttga

SEQ ID NO: 67864 - DNA, 120 bp, synthetic construct
  source 1..120: mol_type = other DNA
tgaattgccacttgattctggtatttcggacagtgctatctttcttcaagtgggtccaaaaatgcaagccaagtatttcacccagtggtcaaccaaaaaggcaaccagggaaagacaact

SEQ ID NO: 67865 - DNA, 120 bp, synthetic construct
  source 1..120: mol_type = other DNA
gaccaataacaggctctgaaattgtggcaataatcaatagtttaccaacaaaaaagagtccaggaccagatggattcacagccgaattctaccagaggtacaaggaggaactggtaccat

SEQ ID NO: 67866 - DNA, 120 bp, synthetic construct
  source 1..120: mol_type = other DNA
cgacacaaacaaatggaagaacattccatgctcatgggtaggaagaatcaatatcgtgaaaatggccatactgaccaaggtaatttacagattcaatgccatccccatcaagctaccaat

SEQ ID NO: 67867 - DNA, 120 bp, synthetic construct
  source 1..120: mol_type = other DNA
gatatcatctcacaccagttagaatggcaatcattaaaaagtcaggaaacaacaggtgctggagaggatgtggagaaataggaacactttcacactgttggtgggactgtaaactagttc

SEQ ID NO: 67868 - DNA, 120 bp, synthetic construct
  source 1..120: mol_type = other DNA
tctcccatgttgtaggttgcccgttcactctgatggtagtttcttttgctgtgcagaagctctttagtttaattagatcccatttgtcaattttggcttttgttgccattgcttttggtg

SEQ ID NO: 67869 - DNA, 120 bp, synthetic construct
  source 1..120: mol_type = other DNA
gggctgagacgatggggttttctagataaacaatcatgtcgtctgcaaacagggacaatttgacttcctcttttcctaattgaataccctttatttccttctcctgcctgattgccctgg

SEQ ID NO: 67870 - DNA, 120 bp, synthetic construct
  source 1..120: mol_type = other DNA
acaaaaaacccttcaaaaaatcaatgaatccaggagctggttttttgaaaggatcaacaaaattgatagaccgctagcaagactaataaagaaaaaaagagagaagaatcaaatagacac

SEQ ID NO: 67871 - DNA, 120 bp, synthetic construct
  source 1..120: mol_type = other DNA
tttaaacgttagacctaaaaccataaaaaccctagaagaaaacctaggcattaccattgaggacataggcgtgggcaaggacttcatgtccaaaacaccaaaagcaatggcaacaaaagc

SEQ ID NO: 67872 - DNA, 120 bp, synthetic construct
  source 1..120: mol_type = other DNA
tctgccttcccctctcttcctgaatgctctgcttccccgccagactcagcctggtcccatcgcggcagtcctcggtgcaggctctggtgattgtccgcctattctccacaccctcccagc

SEQ ID NO: 67873 - DNA, 120 bp, synthetic construct
  source 1..120: mol_type = other DNA
cgctccggatggccggttgctgccatcaacagaatgaggtaaatgttgccctagaaaacttcaactctgtaatagaaaaccatggaaagatttcaagttctgacattggaggattttctg

SEQ ID NO: 67874 - DNA, 120 bp, synthetic construct
  source 1..120: mol_type = other DNA
gaggccagcatcatcctgataccaaagcagggcagagacacaaccaaaaaagagaatcttagactaatatccctgatgaacaccaatgcaaaaatccccaataaaaactggcaaactgaa

SEQ ID NO: 67875 - DNA, 120 bp, synthetic construct
  source 1..120: mol_type = other DNA
tttaaagttcatatggaaccaaaaaagagcccacatcgccaagtcaatcctaagccaaaagaacaaagctggaggtatcacactacctgacttcaaactatactacaaggctacagtatc

SEQ ID NO: 67876 - DNA, 120 bp, synthetic construct
  source 1..120: mol_type = other DNA
gtcgatcattgaaaagtcaggaaacaacaggtgctggagaggatgtggagaaataggaacacttttacactgttggtgggactgtaaactagttcaaccattgtggaagtcagtgtggcg

SEQ ID NO: 67877 - DNA, 120 bp, synthetic construct; identical to SEQ ID NO: 67874
  source 1..120: mol_type = other DNA

SEQ ID NO: 67878 - DNA, 120 bp, synthetic construct
  source 1..120: mol_type = other DNA
actgggaggcaccccccagcaggggcacactgacacctcacacggcagtgtattccaacagacctgcagctgagggtcctgtctgttagaaggaaaactaacaaccagaaaggacatcta

SEQ ID NO: 67879 - DNA, 120 bp, synthetic construct; identical to SEQ ID NO: 51914
  source 1..120: mol_type = other DNA

SEQ ID NO: 67880 - DNA, 120 bp, synthetic construct; identical to SEQ ID NO: 52018
  source 1..120: mol_type = other DNA

SEQ ID NO: 67881 - DNA, 120 bp, synthetic construct
  source 1..120: mol_type = other DNA
acagagccaaagacaaaaaccacatgattatctcaatagatgcagaaaaggcctttgacaaaattcaacaacccttcatgctaaaaactctcaataaattaggtattgatgggacgtatt

SEQ ID NO: 67882 - DNA, 120 bp, synthetic construct
  source 1..120: mol_type = other DNA
agagatatagatcaatggaacacaacagagccctcagaaataatgccgcatatctacaactatctgatctttgacaaacctgagaaaaacaagcaatggggaaaggattccctatttaat

SEQ ID NO: 67883 - DNA, 120 bp, synthetic construct
  source 1..120: mol_type = other DNA
gttccaagtctttgctattgtgaatagtgccgcaataaacatacgtgtgcatgtgtctttatagcagcatgatttatactcatttgggtatatacccagtaatgggatggctgggtcaaa

SEQ ID NO: 67884 - DNA, 120 bp, synthetic construct
  source 1..120: mol_type = other DNA
atggagctgaaaaccaaggctcgagaactacatgaagaatgcagaagcctcaggagccgatgcgatcaactggaagaaagggtatcagcaatggaagatgaaatgaatgaaatgaagcga

SEQ ID NO: 67885 - DNA, 120 bp, synthetic construct
  source 1..120: mol_type = other DNA
gacacagactggcaaactggataaagagtcaagacccatcagtgtgctgtattcaggaaacccatctcacgtgcagagacacacataggctcaaaataaaaggatggaggaagatctacc

SEQ ID NO: 67886 - DNA, 120 bp, synthetic construct; identical to SEQ ID NO: 67870
  source 1..120: mol_type = other DNA

SEQ ID NO: 67887 - DNA, 120 bp, synthetic construct
  source 1..120: mol_type = other DNA
cttcaaggagaactacaaaccactgctcaaggaaataaaaaaggacacaaacaaatggaagaacattccatgctcatgggtaggaagaatcaatatcgtgaaaatggccatactgcccaa

SEQ ID NO: 67888 - DNA, 120 bp, synthetic construct
  source 1..120: mol_type = other DNA
gcaataaacatacgtgtgcatgtgtctttatagcagcatgatttatagtcctttgggtatatacccagtaatgggatggctgggtcaaatggtatttctagttctagatccctgaggaat

SEQ ID NO: 67889 - DNA, 120 bp, synthetic construct
  source 1..120: mol_type = other DNA
ttgacacacacccacacaaatggtaactagatggtaactagatgtgatagaaatgttaattagctagagtgtggtgatcattttacaatgtatatgtatatgaaaacatcaagttgtaca

SEQ ID NO: 67890 - DNA, 120 bp, synthetic construct
  source 1..120: mol_type = other DNA
atgccactctggtctccactgtttgtgcatttcatagcttatcccttcattcaacactgttctaaaaacaagaaaagaaatccttgtccttatggagcttacattctagttggagagagt

SEQ ID NO: 67891 - DNA, 120 bp, synthetic construct
  source 1..120: mol_type = other DNA
aacacacatggaatttatgccaaactacttggtgctctcaaaacatgccatggtgtcttttgcctctgtgtcttcacatattgtgtgtctctgcctgaaatgcttttccccgccttgata

SEQ ID NO: 67892 - DNA, 120 bp, synthetic construct
  source 1..120: mol_type = other DNA
aggaagctgaggcaggaggattgtttgagcgcaggagttcaagacaagcctgggcagcacagtgagaacctatctctacaaaaaaaaaaaaaaaaaaaaaagttttggccaggcatggtg

SEQ ID NO: 67893 - DNA, 120 bp, synthetic construct
  source 1..120: mol_type = other DNA
caccaaacctcagcgacacgcaatttacccatgtaacaaatctgcatgcgtaccccttgaacctaaaatgaaagtttacagcaaaattaaaagaataagaataacttggtgcagattacc

SEQ ID NO: 67894 - DNA, 120 bp, synthetic construct
  source 1..120: mol_type = other DNA
ccgatgttcttccataggacgtagagcactgtggaggccaggatctgatactctatgttgaaggggtagaggtagtagatatagtagatcccgtgggagatggtggtgcagagagttggg

SEQ ID NO: 67895 - DNA, 120 bp, synthetic construct
  source 1..120: mol_type = other DNA
tcccagcactttgggaggccaaggcaggtggatcacttgaggtcgggagttcgagaccagcctggccaacatggcgaaacctcatctctattaaaactacaaaaattagccaggtgtggt

SEQ ID NO: 67896 - DNA, 120 bp, synthetic construct; identical to SEQ ID NO: 67772
  source 1..120: mol_type = other DNA

SEQ ID NO: 67897 - DNA, 120 bp, synthetic construct; identical to SEQ ID NO: 61534
  source 1..120: mol_type = other DNA

SEQ ID NO: 67898 - DNA, 120 bp, synthetic construct
  source 1..120: mol_type = other DNA
aaaagagagagtagagaaacggagggaagggatttgggggttcttatcttccagaaaagtgggaaaagtggttggggtgcagaaataagggattggggcacagagatataaaaggttggg

SEQ ID NO: 67899 - DNA, 120 bp, synthetic construct
  source 1..120: mol_type = other DNA
cttaatcactgaagtaatatgtactcaaatcagaaaatttcaaatacaatgaaaagcacaaagattaagagaaaactctgtaatgcctttcatatgcattgttagagttttgacatgttt

SEQ ID NO: 67900 - DNA, 120 bp, synthetic construct
  source 1..120: mol_type = other DNA
catacatgccttacaatttctcttccattcattgatgtggactgaagaataaaggtaactgaagtatattccatgttgactacagtatttcctcaagatgtgaggagatacatatacata

SEQ ID NO: 67901 - DNA, 120 bp, synthetic construct
  source 1..120: mol_type = other DNA
atacacacatatgtgtgtatatatacacatatatacacatacacacatatgtgtgtatatatacacatatatacacatacacacatgtgtgtatatatacacatatatacacatacacac

SEQ ID NO: 67902 - DNA, 120 bp, synthetic construct
  source 1..120: mol_type = other DNA
gtatatacacatatatacacacgtatgtgtatacatatgcgtatatacacacgtatgtgtatacatatgcgtatatacacacgtatgtgtatacatatgcgtatatacacacgtatgtgt

SEQ ID NO: 67903 - DNA, 120 bp, synthetic construct
  source 1..120: mol_type = other DNA
tatgtgaatgggagatatgtgaatgggagaatatgtgaatgggagaatatatatattcacacatatatattcacatatatatgtgaatgggagatattcacatatatatatctcccattc

SEQ ID NO: 67904 - DNA, 120 bp, synthetic construct
  source 1..120: mol_type = other DNA
gggaagtttagagaaaaaagaataaaaagaaatgagcaaagcctccaagaaatatgggactatgtgaaaagaccaaatctacgtctaattggtgtacctgaaagtgatgtggagaatgga

SEQ ID NO: 67905 - DNA, 120 bp, synthetic construct
  source 1..120: mol_type = other DNA
cctgagtgacctacaaagagacttagactcccacacattaataatgggagactttaacaccccactgtcaacattagacagatcaacgagacagaacgtcaacaaggatacccaggaatt

SEQ ID NO: 67906 - DNA, 120 bp, synthetic construct
  source 1..120: mol_type = other DNA
aaactagaaaatctagaagaaatggatacattcctcgacacatacactttcccaagactaaaccaggaagaagttgaatctctgaatagaccaataacaggatctgaaattgtggcaata

SEQ ID NO: 67907 - DNA, 120 bp, synthetic construct
  source 1..120: mol_type = other DNA
cttacctgcttaactgcataggagaggcaatatgtggtgctcatgaacaaagcaaacattaaaatcagaccaaacccaacatttgactcagtcttaatatccaggcgagcttgggcaaat

SEQ ID NO: 67908 - DNA, 120 bp, synthetic construct
  source 1..120: mol_type = other DNA
tggctgtgggtttgtcatagatagctcttattattttgagatatgtcccatcaatacctaatttattgagagtttttagcatgaagggttgttgaattttgtcaaaggctttttctgcat

SEQ ID NO: 67909 - DNA, 120 bp, synthetic construct
  source 1..120: mol_type = other DNA
actatctctcagaccacagtgcaatcaaactagaactcaggattaagaatctcactcaaagccgctcaactacatggaaactgaacaacctgctcctgaatgactactgggtacataacg

SEQ ID NO: 67910 - DNA, 120 bp, synthetic construct; identical to SEQ ID NO: 67883
  source 1..120: mol_type = other DNA

SEQ ID NO: 67911 - DNA, 120 bp, synthetic construct; identical to SEQ ID NO: 67853
  source 1..120: mol_type = other DNA

SEQ ID NO: 67912 - DNA, 120 bp, synthetic construct
  source 1..120: mol_type = other DNA
tcctaaaatcctgttctctaaagaataagagtgcagctggctgggtgcagtggctcacatctgtaatcccagcactttggaaggccgaggtgggtggatcacctgaggttgggagttcga

SEQ ID NO: 67913 - DNA, 120 bp, synthetic construct
  source 1..120: mol_type = other DNA
ggtaccagtggggctgcctggctcctcagggaccaggcctgcgataaaaatcctgcagtggcaactgcagtgatcagagtcaaaaaaaaaaaaaaaaaaaaaaaaaaaaaaaaaaaaaaa

SEQ ID NO: 67914 - DNA, 120 bp, synthetic construct
  source 1..120: mol_type = other DNA
aatcaatgaatccaggagctggttttttgaaaggatcaacaaaattgatagacggctagcaagactaataaagaaaaaaagagagaagaatcaaatagacacaataaaaaatgataaagg

SEQ ID NO: 67915 - DNA, 120 bp, synthetic construct
  source 1..120: mol_type = other DNA
cctcttttcctaattgaataccctttatttccttctcctgcctgattgccctggccagaacttccaacactatgttgaataggagtggtgagagagggcatccctgtcttgtgccagttt

SEQ ID NO: 67916 - DNA, 120 bp, synthetic construct; identical to SEQ ID NO: 67788
  source 1..120: mol_type = other DNA

SEQ ID NO: 67917 - DNA, 120 bp, synthetic construct
  source 1..120: mol_type = other DNA
cgcatcggctcctgaggcttctgcattcttcacgtagttctcgagccttggttttcagctccatcagctcctttaagcacttctctgtattggttattctagttatacattcttctaaat

SEQ ID NO: 67918 - DNA, 120 bp, synthetic construct
  source 1..120: mol_type = other DNA
ttgaactagtttacagtcccaccaacagtgtaaaagtgttcctatttctccgcatcctctccagcacctgttgtttcctgactttttaatgattgccattctaactggtgtgagatgata

SEQ ID NO: 67919 - DNA, 120 bp, synthetic construct
  source 1..120: mol_type = other DNA
gacaaacaaatggaagaacattccatgctcatgggtaggaagaatcaatatcgtgaaaatggccatactgcccaaggtaatttacagattcaatgccatccccatcaagctaccaatgac

SEQ ID NO: 67920 - DNA, 120 bp, synthetic construct
  source 1..120: mol_type = other DNA
tgattttgcagcggctggtaccggttgttcctttccatgtttagcgcttccttcaggagctcttttagggcaggcctggtggtgacaaaatctctcaacatttgcttgtctataaagtat

SEQ ID NO: 67921 - DNA, 120 bp, synthetic construct
  source 1..120: mol_type = other DNA
tcctgacccccgagcagcctaactgggaggcaccccccagcaggggcacactgacacctcacacggcagggtattccaacagacctgcagctgagggtcctgtctgttagaaggaaaact

SEQ ID NO: 67922 - DNA, 120 bp, synthetic construct
  source 1..120: mol_type = other DNA
tgctatcatatactacatgcacatgtattgctatcatacaaatatctatatacattacatgtatacatatacacacaatatatgcattgcatacacgtatacacacaatatatgcattgc

SEQ ID NO: 67923 - DNA, 120 bp, synthetic construct
  source 1..120: mol_type = other DNA
tgagatatcatctcacaccagttagaatggcaatcattaaaaagtcaggaaacaacaggtgctggagaggatgtggagaaataggaacacttttacactgttggtgggactgtcaactag

SEQ ID NO: 67924 - DNA, 120 bp, synthetic construct
  source 1..120: mol_type = other DNA
accaccttcaccaccaccatcaccatcaccaacatcaccacccccccaccaccatcaacaccatcaccaccaccatcactaccatcaccaccatcaccaacaccaccatcaccattacca

SEQ ID NO: 67925 - DNA, 120 bp, synthetic construct
  source 1..120: mol_type = other DNA
ggcgtggtggcaagcatctgtagtcccagctacttgggaggctggggcaggagaatggtgtgaacccaagaggcagaggttgcagtcaactgagattgcaccattgcactccagcatggg

SEQ ID NO: 67926 - DNA, 120 bp, synthetic construct
  source 1..120: mol_type = other DNA
gacaaagaggaatcaggcaatgcaaacaaaaagaaagttggaatggcaatattaatatcagaccatacgggatttaatgtattaagtaggataaagaatccttcctcttttatcactaca

SEQ ID NO: 67927 - DNA, 120 bp, synthetic construct
  source 1..120: mol_type = other DNA
cttgaacccccctcttagaggcggaaagtcccacagagttagtctgcattctatcccatgcaagaatgctttccaatgcatcatgaccggaagccatctgatctctacttggacaagccc

SEQ ID NO: 67928 - DNA, 120 bp, synthetic construct
  source 1..120: mol_type = other DNA
gacttcccagaactatcatcttcttccctggagcttctatcatcattcacttattcatccacccatctagtcatccatccatccacccaatcattcaatcatccaattattcagtagcta

SEQ ID NO: 67929 - DNA, 120 bp, synthetic construct
  source 1..120: mol_type = other DNA
ctgatgaggaaagcagaactcagaaaggtgaaggtgacagagctgagacctcaagccaagccctccagagccaacaccatttccatgatacacacacctcacttgaattacattattatg

SEQ ID NO: 67930 - DNA, 120 bp, synthetic construct
  source 1..120: mol_type = other DNA
ctgggccaacatggtgaaacactgtctctactaaaaaatacaaaaattagccaggtgtggtggcatgtgcacctgtagtcccagctaatcaggaggctgaggcaggagaatcacttgaac

SEQ ID NO: 67931 - DNA, 120 bp, synthetic construct
  source 1..120: mol_type = other DNA
aatttgggccaccctgcaatggtgtcaaatttccccaaaagcaagatgaactagatccagtccctgagcctaagaagtctaaaatctcttctggatgataaggctaatattcaacagtca

SEQ ID NO: 67932 - DNA, 120 bp, synthetic construct
  source 1..120: mol_type = other DNA
aaaagagagaagaatcaaatagatgcaataaaaaattataaaggggatatcaccaccaatcccacagaaaaagaaactaccatcagagaatactacaaacacctctatgcaaataaacta

SEQ ID NO: 67933 - DNA, 120 bp, synthetic construct
  source 1..120: mol_type = other DNA
tggaatagagatatatctatggaatagatatatatctatggaatagatgagatatatctatggaatagatgagatatacctatggaatagatgagatatatctatggaatagatatctat

SEQ ID NO: 67934 - DNA, 120 bp, synthetic construct
  source 1..120: mol_type = other DNA
tgggagatatacctaatgctagatgacacattagtgggtgcagcgcaccagcatggcacctaatgctaagtgacgcattaatgggtgcagcataccagcatggcacatgtatatatatgt

SEQ ID NO: 67935 - DNA, 120 bp, synthetic construct
  source 1..120: mol_type = other DNA
tcccacctatgagtgagaatatgtggtgtttggttttttgttcttgcgatagtttactgagaatgatggtttccaatttcatccatgtccctacaaaggatatgaactcatcatttttta

SEQ ID NO: 67936 - DNA, 120 bp, synthetic construct
  source 1..120: mol_type = other DNA
agatatgcggcgttatttctgagggctctgttctgttccattgatctatatctctgttttggtaccagtaccatgctgttttggttactgtagccttgtagtatagtttgaagtcaggta

SEQ ID NO: 67937 - DNA, 120 bp, synthetic construct
  source 1..120: mol_type = other DNA
ctagttatacattcttctaaatttttttcaaagttttcaacttctttgcctttggtttgaatgtcctcccgtagctcagagtaatttgatcgtctgaagccttcttctctcaactcgtca

SEQ ID NO: 67938 - DNA, 120 bp, synthetic construct; identical to SEQ ID NO: 67857
  source 1..120: mol_type = other DNA

SEQ ID NO: 67939 - DNA, 120 bp, synthetic construct
  source 1..120: mol_type = other DNA
gccggaaacccaacattcatctttgacacagtctctcccttctctctgtgtttatttttaaattatcttcattcctttctatttctgctgacccatgttagtcaaagctaacaatttgtt

SEQ ID NO: 67940 - DNA, 120 bp, synthetic construct; identical to SEQ ID NO: 67939
  source 1..120: mol_type = other DNA

SEQ ID NO: 67941 - DNA, 120 bp, synthetic construct
  source 1..120: mol_type = other DNA
attaagtcacttaatatcaaaagaaggcccaatgatgaaaacataaactaataggcttggagttggtctgtatggggagagatactaaaatatggaaaagtaaaaaatagatggaaatac

SEQ ID NO: 67942 - DNA, 120 bp, synthetic construct
  source 1..120: mol_type = other DNA
tttcatgagactccttgagccagacactcagctttgtcatgcctgaatccctgacccacggaaactgagagagtaaatgtttattgttttaagccactacgttttggggtataaagtcat

SEQ ID NO: 67943 - DNA, 120 bp, synthetic construct
  source 1..120: mol_type = other DNA
aggctccttccctgtgatcacggtgccctcagtgtgatgacatcaggtcccaggctccttccctgtgatcacggtgccctcagtgtgatgacatcaggtcccaggctccttccctgtgat

SEQ ID NO: 67944 - DNA, 120 bp, synthetic construct
  source 1..120: mol_type = other DNA
cgtccctgtgatcacggtgccctcagtgtgatgacatcaggtcccaggctccgtccctgtgatcacggtgccctcagtgtgatgacatcaggtcccaggctccttccctgtgatcacggg

SEQ ID NO: 67945 - DNA, 120 bp, synthetic construct
  source 1..120: mol_type = other DNA
caaagaaggggatcaaaggaaacgggccctcggtggccgggtgctagaaggctctgagtgtcaggagagggagcgtgacctccctcatggggtcagtagggccactgtatggctttaagc

SEQ ID NO: 67946 - DNA, 120 bp, synthetic construct
  source 1..120: mol_type = other DNA
ttcctaccccacgcccccaacaacctgccccgtctcctgtcacttcccgacgcccgccctcccctcttctgccccttcgtcctcagtcaaggtaccaccctgtccacttacccagcgccc

SEQ ID NO: 67947 - DNA, 120 bp, synthetic construct
  source 1..120: mol_type = other DNA
ctcgggtgccattaagtggaggtctgggaagtttctgcagaagagcgttctaccggtcgggcgtggctgacaggaggcggtggaccccagccccccagctgcaggttggagaggggagtt

SEQ ID NO: 67948 - DNA, 120 bp, synthetic construct
  source 1..120: mol_type = other DNA
tagagacaggggtctcgctgtgtttctcaggttgatctcaaactcctgggctcaagccatcctcctacctcagcctcccaaagcactgggattacaggctccagctaccacgtccagcct

SEQ ID NO: 67949 - DNA, 120 bp, synthetic construct
  source 1..120: mol_type = other DNA
caaaaaatagctggtgtggtggtgcacacctgtaatcccagctacttgggaggctgaggcaggagaatctcttgaacccaggaggcagaggttgcagtgagccaagattgtgccaccgga

SEQ ID NO: 67950 - DNA, 120 bp, synthetic construct
  source 1..120: mol_type = other DNA
tagttacatatgtatacatgtgccatgctggtgtgctgcacccactaatgtgtcatctagcattaggtatatctcccaatgctatccctcccccctcccccgaccccaccacagtcccca

SEQ ID NO: 67951 - DNA, 120 bp, synthetic construct
  source 1..120: mol_type = other DNA
cccctcccctccttctcctctcccctcccctccttctcctctcccctcccctcctcctctcccctcctccttcccctctcccctcctccttctcctctcccctcctccttctcctctccc

SEQ ID NO: 67952 - DNA, 120 bp, synthetic construct
  source 1..120: mol_type = other DNA
ctcctcctctcccctcctccttcccctctcccctcctccttctcctctcccctcctccttctcctctcccctccttctcctctcccctcctccttctcctctcccctcccctccttctcc

SEQ ID NO: 67953 - DNA, 120 bp, synthetic construct
  source 1..120: mol_type = other DNA
ttattctcaagccccccagggatgtgaagaggggtgcagagactcacgttttgcacccacggagtccaggactggggtgttagaagtggggtagatttagtggacacagcagatcaagtg

SEQ ID NO: 67954 - DNA, 120 bp, synthetic construct
  source 1..120: mol_type = other DNA
ccagccatccacctcccgccatccacctcccacctcccgccatccacctcccacctcccgccatccacctcccacctcccgccatccacctcccacctcccgccatccacccccagccat

SEQ ID NO: 67955 - DNA, 120 bp, synthetic construct
  source 1..120: mol_type = other DNA
agaccatgaattattcacccacacttctttaatgggcaatgagttgtttacaagaatttgctcattgtgaatggagctgctttaaacactcttggccaggtctcctgttgcatgagcagt

SEQ ID NO: 67956 - DNA, 120 bp, synthetic construct
  source 1..120: mol_type = other DNA
gcgtgtgaataacacaccggccagtacacagcatccactcaggactgacgcgcgtggtgaataacacaccggccagtacacagcatccactcaggagtgacgtgcatgtgaataacacac

SEQ ID NO: 67957 - DNA, 120 bp, synthetic construct
  source 1..120: mol_type = other DNA
acatgaagaggcaggcgacatgcgagtgctgaggaggagccccggaccgcaccatttcacatgaagaggcaggcgacatgcgagtgctgaagaggaactccggacgccaccatttcacat

SEQ ID NO: 67958 - DNA, 120 bp, synthetic construct
  source 1..120: mol_type = other DNA
gcttggctctctcccagcttctggtggctgcctggcagcccttggcggacctcggcccagcctgtctcagcatcactccaatctctgcctccgcctcctcctctgggtggccctgtctct

SEQ ID NO: 67959 - DNA, 120 bp, synthetic construct
  source 1..120: mol_type = other DNA
aaaatcaaccccatcaacaagtaggcaaaggatatgaacagacacttcgcaaaagaagacatttatgcagccaacagacatatgaaaaaatgctcaccatcactggccatcagagaaatg

SEQ ID NO: 67960 - DNA, 120 bp, synthetic construct
  source 1..120: mol_type = other DNA
ttgctgtgcagaagctctttagtttaattagatcccatttgtcgattttggcttttggtgttttagacatgaagtccttgccatgcctatgtcctgagtggtattgcctaggttttcttc

SEQ ID NO: 67961 - DNA, 120 bp, synthetic construct
  source 1..120: mol_type = other DNA
ctctgtgtagttatctgtgtgactcagcatggggagacgatagggaaaatcagggtctctgtgcagttatctgtgtgactcagcatggggagacgatagggaaaatcagggtctctgtgt

SEQ ID NO: 67962 - DNA, 120 bp, synthetic construct
  source 1..120: mol_type = other DNA
ctgtgtgactcagcatggggagacgatagggaaaatcagggtctctgtgtagttaatctgtgtgactcagcatggggagacgatagggaaaatcagggtctctgtgtagttatctgtgtg

SEQ ID NO: 67963 - DNA, 120 bp, synthetic construct
  source 1..120: mol_type = other DNA
atggggagatgatagggaaaatcagggtctctgtgtagttatctgtgtgactcagcatggggagacgatagggaaaatcagggtctctgtgtagttatctgtgtgactcagcatggggag

SEQ ID NO: 67964 - DNA, 120 bp, synthetic construct; identical to SEQ ID NO: 67961
  source 1..120: mol_type = other DNA

SEQ ID NO: 67965 - DNA, 120 bp, synthetic construct
  source 1..120: mol_type = other DNA
tggcacaggagttcccccacaggacagatgatatgagctcagaagcctacctgatggcacaggagttcccccacaggacagatgatatgagctcagaagcccacctggtggcttaggagt

SEQ ID NO: 67966 - DNA, 120 bp, synthetic construct
  source 1..120: mol_type = other DNA
ttctgctcagacccaggctttctgtcacattctccgaaatctaggtggaagttgccaaccttccttcacccttgcattctgtgcgcctgcgggtggaacaccgcatggaagttgtgaagg

SEQ ID NO: 67967 - DNA, 120 bp, synthetic construct
  source 1..120: mol_type = other DNA
ccaggctcccaatttttgaatcttctacactctacttcccttttaaatataagttccaactttaagtaatatctttgctcccacatctgagggtaggctgttcaaagtagccaggccacg

SEQ ID NO: 67968 - DNA, 120 bp, synthetic construct
  source 1..120: mol_type = other DNA
aaaatagaaggaaagaaggagggaaagaagaaaaaaggaaggaaggaaggaaagaagaaaaaaaggaaggaaggaatgggaagaagggaaggaagacaggaaggaagcaaggaaggaaga

SEQ ID NO: 67969 - DNA, 120 bp, synthetic construct
  source 1..120: mol_type = other DNA
taggtgggctgtggctgaccctcggtggtataggtgggctgtggctgaccctcactggtgtaggtgggctgtggctagccctcactggtgtaggtgggctgtggctgaccctcactggtg

SEQ ID NO: 67970 - DNA, 120 bp, synthetic construct
  source 1..120: mol_type = other DNA
agggggctcacgtgacttcaacaaggaaacacagttagtccttctatctgttactaaagcaagctcacatgacatcaacaaggaaacagagtccttctatctgttactaaagggggctca

SEQ ID NO: 67971 - DNA, 120 bp, synthetic construct
  source 1..120: mol_type = other DNA
ccattacagaatttaaaggcagggtatcatacagccagtaccttacagtcttcccattagcagcattcaacacatctgtccaggtagtaaacctaagtggcccagctctgggccattaaa

SEQ ID NO: 67972 - DNA, 120 bp, synthetic construct
  source 1..120: mol_type = other DNA
agtcagatgaagagctccacattcatccaaagttcttttcatactaattagatgctcttcaaaggtgtaattaccatttaaaaatgactttggagtgcaggatacacaatagatttttaa

SEQ ID NO: 67973 - DNA, 120 bp, synthetic construct
  source 1..120: mol_type = other DNA
acatgcgtgctggctacacataagataagtgaaaaactcaaaacactggttagactcaggggcttataaacgatgtgtgtaattctggaataatcctactgaccttgaagcaggcccaat

SEQ ID NO: 67974 - DNA, 120 bp, synthetic construct
  source 1..120: mol_type = other DNA
caattctactgccgccatatgaggacatacagaagactccatccatgaattggctctcagcaggcaccgagtctactgctgccatatgaggacatacagaagaatccatccatgatgcat

SEQ ID NO: 67975 - DNA, 120 bp, synthetic construct
  source 1..120: mol_type = other DNA
gagagccgattggtctgtttcacaaagagctgattggtcagttttgacagggtgctgattggttcgtttacaatccctgagctagacacaaaagttctccacatccccactagattagct

SEQ ID NO: 67976 - DNA, 120 bp, synthetic construct
  source 1..120: mol_type = other DNA
caagaaaggtcaataacacctatcattggctcatcatcatggtccttcaatcagctctctcctcattaggaaatttgctatctgtgagaaaaggagtctccttaatgggaaaacgtgctt

SEQ ID NO: 67977 - DNA, 120 bp, synthetic construct
  source 1..120: mol_type = other DNA
cttttgaaaggtcacctaattttttaaagtgagctaattactgtagtgagtaaaatagtcttgaatgattgcaggtggcaatactatcctattacccttctaaaggctaaggtgacacca

SEQ ID NO: 67978 - DNA, 120 bp, synthetic construct
  source 1..120: mol_type = other DNA
agggctgcgattacaggcatgagccactgtgcccggccagtaattttactctgtgtgttacttggcattttccacttttctgttctcttttgtgcatttgtattctattttatattagtc

SEQ ID NO: 67979 - DNA, 120 bp, synthetic construct
  source 1..120: mol_type = other DNA
gccatatctgcagaagccacctaattctatggtggtgaaggagaagatttagccgtatctgcagaagcctccaaattctacggtggtgaaggagaagatttagccatatctgcagaagcc

SEQ ID NO: 67980 - DNA, 120 bp, synthetic construct
  source 1..120: mol_type = other DNA
cgtcagagcattaccgtgtgagctccgcctcccggcagagcattaccgtgtgagctccgcctcctgtccaagcattactgtgtgagatccgccccctgtcatatcattactgggcgagct

SEQ ID NO: 67981 - DNA, 120 bp, synthetic construct
  source 1..120: mol_type = other DNA
atcttttacctccctcccaccctgcatctccccccaaccctgcacctccccccatcctttatttccccccaccctgcatctccccccaaccctgcacctccccccatcctttacctcccc

SEQ ID NO: 67982 - DNA, 120 bp, synthetic construct
  source 1..120: mol_type = other DNA
ccctcctggtcccctcgtatctgacatcccctcagcctggagggcgccctcctggtcccctcgtatctgacatcccctcagcctggagggcgccctcctggtcccctcgtatctgacatc

SEQ ID NO: 67983 - DNA, 120 bp, synthetic construct
  source 1..120: mol_type = other DNA
caggggacggcgccgacacaggcccccgcagaggggttcagctcaggggacggcgacgacacaggcccccgcagaggggttcagctcaggggacggcgccgacacaggcccccgcagagg

SEQ ID NO: 67984 - DNA, 120 bp, synthetic construct
  source 1..120: mol_type = other DNA
cccgcagaggggttcagctcaggggacggcgacgacacaggcccccgcagaggggttcagctcaggggagggcgacaacacaggctccccgcagaggggttcagctcaggggacggcgac

SEQ ID NO: 67985 - DNA, 120 bp, synthetic construct
  source 1..120: mol_type = other DNA
ggctcagctgacgggacggcgccgacacaggcccccgcagaggggctcagctcaggggacagcgccgacacaggcccccgcagaggggctcagctcaggggacggcgacgacacaggccc

SEQ ID NO: 67986 - DNA, 120 bp, synthetic construct
  source 1..120: mol_type = other DNA
gacacaggcccccgcagaggggcgcagctgacgggagggcgacaacacaggcccccgcagaggggctcagctcaggggacggcgacgacacaggcccccgcagaggggcgcagctgacgg

SEQ ID NO: 67987 - DNA, 120 bp, synthetic construct
  source 1..120: mol_type = other DNA
acccgggatggagctgctgggtggcatggaattccacctgtgacttactgaagagctgccaggcagtttcccagaggggcttcatcgctctgcctccccccgccgctcctcaccccgccg

SEQ ID NO: 67988 - DNA, 120 bp, synthetic construct
  source 1..120: mol_type = other DNA
gaattagatggtggtgatggtcacacaaggtggtgaattgaacatactaaaaaccactgacttgtaccttttaaactggtgaattttatcccaatgaaaaaaaaacaccttgttcctcct

SEQ ID NO: 67989 - DNA, 120 bp, synthetic construct
  source 1..120: mol_type = other DNA
cctgcttccgcacctgctcctcctgctttcgcacctgctcctcctgcttctgcatctgttcctcctgctccgccatttgctcctcctgcttccgcatctgctcctcctgcttccgcatct

SEQ ID NO: 67990 - DNA, 120 bp, synthetic construct
  source 1..120: mol_type = other DNA
atcaacattagacagatcaacaagacagaaagttaacaaggatatccaggaatggaactcacctctgtacaaagcagacctaatagacatctacagaactctccaccccaaatcaacaga

SEQ ID NO: 67991 - DNA, 120 bp, synthetic construct
  source 1..120: mol_type = other DNA
aactaaaatcagagcagaactgaaggaaatagagacacaaaaaacccttcaaaaaatcaatgaatccaggagctgtttttttaaaaagatcaacaaaattgatagaccgctagcaagact

SEQ ID NO: 67992 - DNA, 120 bp, synthetic construct
  source 1..120: mol_type = other DNA
caccctaacatcacaattaaaagaactagaaaagcaagagcaaacacattcaagagctagcagaaggcaagaaataactaaaatcagagcagaactgaaggaaatagagacacaaaaaac

SEQ ID NO: 67993 - DNA, 120 bp, synthetic construct
  source 1..120: mol_type = other DNA
tgaataccctttatttccttctcctgcctgattgccctggccagaacttccaacactatgttgaataggagcggtgagagagggcatccctgtcttgtgccagttttcaaagggaatgct

SEQ ID NO: 67994 - DNA, 120 bp, synthetic construct
  source 1..120: mol_type = other DNA
gggttgagtgatcagttggacatgggaggcaaagaagaaagaagaattaaatacaaatctggaatgtatgaggccttctctgataatctatgtaaaacagaaaatctggggggcagggag

SEQ ID NO: 67995 - DNA, 120 bp, synthetic construct
  source 1..120: mol_type = other DNA
accaccacagcacacacacacgcctatgtaataagccaccacagcacacacacctatgtaacaaaccgccacagcacacacacctatgtaataaaccaccacagcacacacacaccccta

SEQ ID NO: 67996 - DNA, 120 bp, synthetic construct
  source 1..120: mol_type = other DNA
agttagacagtgtattcacttcttttttttttttttttttttttttttttttgagacagaatcttactcttatcacccaggcgggagtgcagtggtgtgatcttggctcactgcaacctc

SEQ ID NO: 67997 - DNA, 120 bp, synthetic construct
  source 1..120: mol_type = other DNA
gcttgtgcccaggagttcaagaccaactgggcaacatggcaaaacctcaactctacaaaaaaataaaaataaaaaggctgagtgtggtggctcatgcctgtaatcccagcactttgggag

SEQ ID NO: 67998 - DNA, 120 bp, synthetic construct
  source 1..120: mol_type = other DNA
caaaacttggaaaaaatgaattgaaaatataaactttatgtctcaacataagctccatcaagttcaagacacttgtataagtcatgctacagccatttagcccatccttaaggaactgaa

SEQ ID NO: 67999 - DNA, 120 bp, synthetic construct
  source 1..120: mol_type = other DNA
tctcataccttcttaaaacaagttattcatttgtaagctgttgatttctttggggcattgttcccataaacttttcatgaagcattagtgattttaccatttttcacccaagcttcataa

SEQ ID NO: 68000 - DNA, 120 bp, synthetic construct
  source 1..120: mol_type = other DNA
ctgtcccgctacgaagtgtgtcgccggtcagcgttcccgagagcacgcgttgcgggtctgatgcgggctatcactggcagttcggtgtcggagaacgcggccattgccatggctggaata

SEQ ID NO: 68001 - DNA, 120 bp, synthetic construct
  source 1..120: mol_type = other DNA
cacagagagagcctattgacacttcactttcgctacacgtggtgatttttccagtgcttccggagacactgaaatttagttccaaacattgccttagaggattcttcattttattcattc

SEQ ID NO: 68002 - DNA, 120 bp, synthetic construct
  source 1..120: mol_type = other DNA
ctcattagattggggggtatcctgaaccaacggctgctaagggctgggtctaatccagtcatctgagccctttataagggaggactgaacccccctgtgattatgctcccctgtgggaga

SEQ ID NO: 68003 - DNA, 120 bp, synthetic construct; identical to SEQ ID NO: 68000
  source 1..120: mol_type = other DNA

SEQ ID NO: 68004 - DNA, 120 bp, synthetic construct; identical to SEQ ID NO: 68001
  source 1..120: mol_type = other DNA

SEQ ID NO: 68005 - DNA, 120 bp, synthetic construct
  source 1..120: mol_type = other DNA
ccgctgtaatccagcctgggggacagagcgaggcactgtctcagaaataaacaaataaaataaaataaaataaaataaagtgacgtaaaataaaattgaaataatattttcacgtttccc

SEQ ID NO: 68006 - DNA, 120 bp, synthetic construct
  source 1..120: mol_type = other DNA
aattcgttctgcattgacctaaaactaacatactctccttccacaagtttcttcacactgtggaagcgagaaaattcagtgtgtgtgtttgtgtgtgggaaggggcggccgggagccgtg

SEQ ID NO: 68007 - DNA, 120 bp, synthetic construct
  source 1..120: mol_type = other DNA
tagagcatcctgtggacaggcagctgcattcagagagggaagcccttcccaggagatctgtatggtttcctgctgaagcctggtgtagctctgtcttagcttgtaggcttatgtctgggt

SEQ ID NO: 68008 - DNA, 120 bp, synthetic construct; identical to SEQ ID NO: 68002
  source 1..120: mol_type = other DNA

SEQ ID NO: 68009 - DNA, 120 bp, synthetic construct; identical to SEQ ID NO: 68000
  source 1..120: mol_type = other DNA

SEQ ID NO: 68010 - DNA, 120 bp, synthetic construct
  source 1..120: mol_type = other DNA
ggccaggaagacagccttcaccaggaatgaaatctgccagtaaattaaccttgaacttcccagcctgcagaactatgagaaacaaattgtctgttgtttaagtcacccaatctatggtat

SEQ ID NO: 68011 - DNA, 120 bp, synthetic construct
  source 1..120: mol_type = other DNA
caagttgaatgacagtgaacagtgtgaatgactggctgttccccaaatcatatgaacatgtcctcacacttaacttgcttaacttgcaaagctttgaatggtgttcaaggtgagtctgga

SEQ ID NO: 68012 - DNA, 120 bp, synthetic construct
  source 1..120: mol_type = other DNA
ttgggctgagacgatggggttttctagataaacaatcatgtcatctgcaaacagggacaatttgacttcctcttttcctaattgaataccctttatttccttctcctgcctgattgccct

SEQ ID NO: 68013 - DNA, 120 bp, synthetic construct
  source 1..120: mol_type = other DNA
agagcagaactgaaggaaatagagacacaaaaaacccttcaaaaaatcaatgaatccaggagctggttttttgaaaggatcaacaaaattgatagaccgctagcaagactaataaagaaa

SEQ ID NO: 68014 - DNA, 120 bp, synthetic construct
  source 1..120: mol_type = other DNA
cactcaactccatggaaactgaacaacctgctcctgaatgactactgggtacataacgaaatgaaggcagaaataaagatgttctttgaaaccaacgagaacaaagacaccacataccag

SEQ ID NO: 68015 - DNA, 120 bp, synthetic construct; identical to SEQ ID NO: 67704
  source 1..120: mol_type = other DNA

SEQ ID NO: 68016 - DNA, 120 bp, synthetic construct
  source 1..120: mol_type = other DNA
aattatgcctaatcatgaaaaacaaatatagccatctgagacccaaatgggcttcctggtaaattacattgccctctggccctggagcattcaaatgcaagccagctgctaatctgtcaa

SEQ ID NO: 68017 - DNA, 120 bp, synthetic construct
  source 1..120: mol_type = other DNA
tgtcatgctttcagctagctggatgtttaaccattcacttcaaatttacgtgtccagccatgcacggtggcgtgggcctgtagtcccaactactttgaaggctgaggcaggaggatcact

SEQ ID NO: 68018 - DNA, 120 bp, synthetic construct
  source 1..120: mol_type = other DNA
taacaccaaacaaaagctgattgtgtcatccaacacatttttatgaggaagtcagaataattagaagatggtagaattttttttcccagttgggtaaaattgtccattcttcctgtattc

SEQ ID NO: 68019 - DNA, 120 bp, synthetic construct
  source 1..120: mol_type = other DNA
aaggaacgcagttcctcaccagcaacggaacaaagctggatggagaatgattttgacgagctgagagaagaaggcttcagacaatcaaattactctgagctacgggaggacattcaaacc

SEQ ID NO: 68020 - DNA, 120 bp, synthetic construct
  source 1..120: mol_type = other DNA
caacttgccagtctgtgtcttttaattgcagaatttagtccatttatatttaaagttaatattgttatgtgtgaatttgatcctgtcattatgatgttagctggtgattttgctcgttag

SEQ ID NO: 68021 - DNA, 120 bp, synthetic construct
  source 1..120: mol_type = other DNA
tgaacaacctgctcctgaatgactactgggtacataacgaaatgaaggcagaaataaagatgttctttgaaaccaacgagaacaaagacacagcataccagaatctctgggacgcattca

SEQ ID NO: 68022 - DNA, 120 bp, synthetic construct
  source 1..120: mol_type = other DNA
caacaacccttcatgctaaaaactctcattaaattaggtattgatgggacgtatttcaaaataataagagctatctatgacaaacccacagccaatatcatactgaatgggcaaaaactg

SEQ ID NO: 68023 - DNA, 120 bp, synthetic construct; identical to SEQ ID NO: 52077
  source 1..120: mol_type = other DNA

SEQ ID NO: 68024 - DNA, 120 bp, synthetic construct
  source 1..120: mol_type = other DNA
acaatattacatatacgtgtgtgcatatgtgtgtgtacacacatatacacacgcatgtgtgtgtacacatatatacacgcatatgtataaaatgtatacctatataatttttatttatat

SEQ ID NO: 68025 - DNA, 120 bp, synthetic construct
  source 1..120: mol_type = other DNA
agaatgtataactagaataaccaatacagagaagtgcttaaaggagctgatggagctgaaaaccaaggctcgagaactacatgaagaatgcagaagcctcaggagccaatgagatcaact

SEQ ID NO: 68026 - DNA, 120 bp, synthetic construct
  source 1..120: mol_type = other DNA
tatgtaatggccttctttgtctcttttgatctttgttggtttaaagtctgttttatcagagactaggattgcaacccctgcctttttttgttttccattggcttggtagatcttcctcca

SEQ ID NO: 68027 - DNA, 120 bp, synthetic construct
  source 1..120: mol_type = other DNA
tgaaaacagttatcacttataagctgctattctatatttcattgagaagaacactattcctgtcatcaaagtaaaattaaaacactttctaagtgtaaagattgttagtgactgaaattt

SEQ ID NO: 68028 - DNA, 120 bp, synthetic construct
  source 1..120: mol_type = other DNA
tcgaggcttcagtgagctgtgatcatgccactgcactccggcctgggtgacacagtgagaccctgtctccaaaaaaaaaaaaaaaaaaaaaaaaaatccaattgatataaagaaagaaaa

SEQ ID NO: 68029 - DNA, 120 bp, synthetic construct
  source 1..120: mol_type = other DNA
atggtgcagtaactgggagggagaatgaagggggttcccaatgtactggctcagtttacaccaatgctcacttcatgaaaattcattcatttcagttttttccacttttctatatgtatt

SEQ ID NO: 68030 - DNA, 120 bp, synthetic construct
  source 1..120: mol_type = other DNA
gggtgggtttgtgggtgattctgctgaagccagggagatgacgtctgtccaaggaccctcagcctggagcccaggctccaggaagctctgtgggggacagctgacgtcactgggcatctc

SEQ ID NO: 68031 - DNA, 120 bp, synthetic construct
  source 1..120: mol_type = other DNA
tttctgctaaaagatgaagaaaagaggctttagtgatgtgattttgtggccttgaaccaatcacacaagcaatggtgaaaggattgaggctaaactaggactgcccctgaatgatcagag

SEQ ID NO: 68032 - DNA, 120 bp, synthetic construct
  source 1..120: mol_type = other DNA
tatttccttttttaataattctaaaattttattaaagaacatttgagacagggtttcgctgtgttgccccagctggtctgaaactgctgggcacatgggattctcctgccttggcctcct

SEQ ID NO: 68033 - DNA, 120 bp, synthetic construct
  source 1..120: mol_type = other DNA
tgagaagaacctggtacctcagttggaagtgcagaaatcacccgtcttctgcaccgctcaggctgggagctgtagactggagctgttcctatttggccatcttggctcaaccccctagtt

SEQ ID NO: 68034 - DNA, 120 bp, synthetic construct; identical to SEQ ID NO: 7111
  source 1..120: mol_type = other DNA

SEQ ID NO: 68035 - DNA, 120 bp, synthetic construct
  source 1..120: mol_type = other DNA
cctaggaggtcaaggctgcagtaagccgtgatcatgccactgcactccaatctggacaacagagtgagactttgtctccaaataaaataaaataaaataaaataaaataaactcaatatt

SEQ ID NO: 68036 - DNA, 120 bp, synthetic construct
  source 1..120: mol_type = other DNA
aataaattttattttatctttttttttgagatggagttttgctagggttgcccaggctggagtgcaatggctcagtctgagctcaccacaacctccacctccagattcaaatgattctcc

SEQ ID NO: 68037 - DNA, 120 bp, synthetic construct
  source 1..120: mol_type = other DNA
cttcatagggagagaggggaggtgttatgagaaaatctctcatcaatctgacctagctcccccaaaagatgtaacttttaaaatgtcagatggaaatatttaaaaagtgttatatgcctg

SEQ ID NO: 68038 - DNA, 120 bp, synthetic construct
  source 1..120: mol_type = other DNA
taaaaaacaaaaacaaaaaaaagcctgacacagtggctcacacctgtaaccccagcactttggtaggcctacttgcttgaatcacccaaagtcaggagtttgagaccagcctgaccaaca

SEQ ID NO: 68039 - DNA, 120 bp, synthetic construct; identical to SEQ ID NO: 7112
  source 1..120: mol_type = other DNA

SEQ ID NO: 68040 - DNA, 120 bp, synthetic construct
  source 1..120: mol_type = other DNA
gcaggcgtccctgacatgcctgtatcatcagcaaaccatctatcactttcaccattctttgtgcctgcaccctgaccctctgtttcagaatcatgcattgcctagataattaatttacct

SEQ ID NO: 68041 - DNA, 120 bp, synthetic construct
  source 1..120: mol_type = other DNA
agaatgtccatacattgtcctgttggcggccctgtcctgaaatgggtatcatgcaaccatcccaatagaggcagagggatcagctaggggagatgctatagagaggttgccatactagga

SEQ ID NO: 68042 - DNA, 120 bp, synthetic construct
  source 1..120: mol_type = other DNA
tttttttgtttttttttttgagaccaagtctccctctgtcgcccaggctagagtgcagtggtgtgatgtcacctcactgcaacctctgcttcctgggttcaaatgattctcctgcctcaa

SEQ ID NO: 68043 - DNA, 120 bp, synthetic construct; identical to SEQ ID NO: 7113
  source 1..120: mol_type = other DNA

SEQ ID NO: 68044 - DNA, 120 bp, synthetic construct; identical to SEQ ID NO: 7114
  source 1..120: mol_type = other DNA

SEQ ID NO: 68045 - DNA, 120 bp, synthetic construct
  source 1..120: mol_type = other DNA
aacacagtgagactccatctccaccctcaaaaaaaacgttgtgtagaggagggtttttgtcatgttgcccaggttggtctcaaacccctgggctgaaatgatcctcccactttggcctcc

SEQ ID NO: 68046 - DNA, 120 bp, synthetic construct
  source 1..120: mol_type = other DNA
tcacatattaataaaaaaaaaatcagtgtttgtggagttcatgaatgaatgatttttttattttttgacagaatctccctccgtcacccagactggagtgcagtggcacaattctggctc

SEQ ID NO: 68047 - DNA, 120 bp, synthetic construct; identical to SEQ ID NO: 41
  source 1..120: mol_type = other DNA

SEQ ID NO: 68048 - DNA, 120 bp, synthetic construct; identical to SEQ ID NO: 7115
  source 1..120: mol_type = other DNA

SEQ ID NO: 68049 - DNA, 120 bp, synthetic construct
  source 1..120: mol_type = other DNA
cctgagaatagtgttgttgggagatctttggccacatcaatattttaaaaatgctttatagttaaaatagcttcctgaccttccttaacctgaactgcttggttccctagaagcagaaat

SEQ ID NO: 68050 - DNA, 120 bp, synthetic construct; identical to SEQ ID NO: 39
  source 1..120: mol_type = other DNA

SEQ ID NO: 68051 - DNA, 120 bp, synthetic construct
  source 1..120: mol_type = other DNA
ttaagagtcatcctggccattcgccctgtctctgtcatcctctccttcctcagcccctttttcatcatccttgatcaactccagctggttgtccccctgatcttcattatcatcatcaca

SEQ ID NO: 68052 - DNA, 120 bp, synthetic construct
  source 1..120: mol_type = other DNA
atcacttgaggttaggagttcaagaccagcctggccaacatggtgaaaccctgtttctaccaaaaatataaaaattagccaggcatggtggcgggtggctataatcgcagctactcagga

SEQ ID NO: 68053 - DNA, 120 bp, synthetic construct
  source 1..120: mol_type = other DNA
gtccacgacaaccccgtttcttgcagctatatgtgtgtatgtctacctattcatatctgtatctatttccatttattaccatgattcacttccactctcctttccatagacagccactct

SEQ ID NO: 68054 - DNA, 120 bp, synthetic construct; identical to SEQ ID NO: 7116
  source 1..120: mol_type = other DNA

SEQ ID NO: 68055 - DNA, 120 bp, synthetic construct; identical to SEQ ID NO: 7117
  source 1..120: mol_type = other DNA

SEQ ID NO: 68056 - DNA, 120 bp, synthetic construct
  source 1..120: mol_type = other DNA
aagacttgctgaacatgttgggggttattgagtgggtggaggatgaatctatccaacattgcatggatgcccctttggttttgatccttatgaccaagtatgagtctttcaaaacaattt

SEQ ID NO: 68057 - DNA, 120 bp, synthetic construct; identical to SEQ ID NO: 7118
  source 1..120: mol_type = other DNA

SEQ ID NO: 68058 - DNA, 120 bp, synthetic construct
  source 1..120: mol_type = other DNA
gagtcactgctcccttcaagaattttgaaacgacatcaaccaaagaacgatcaacttttttgaaataaagacagagctgtatttagaggaaaacattcaagctttaaattgttcatataa

SEQ ID NO: 68059 - DNA, 120 bp, synthetic construct; identical to SEQ ID NO: 7119
  source 1..120: mol_type = other DNA

SEQ ID NO: 68060 - DNA, 120 bp, synthetic construct
  source 1..120: mol_type = other DNA
tcaagaattttgaaatgacctaaaccaaagcacaatcaacttttttgaaataaagacagaactctatttagaggaaaacattcaaagcttcaaattgttcatatgaaaaaaaaaaggaca

SEQ ID NO: 68061 - DNA, 120 bp, synthetic construct
  source 1..120: mol_type = other DNA
tttacaaagacagagatgacagttcctaagaaaacacaatagtaatcttcatatatccagtgattacctgggtggcataattcttcttggtgttgagggagctgagtctcacttcgttgc

SEQ ID NO: 68062 - DNA, 120 bp, synthetic construct
  source 1..120: mol_type = other DNA
taacagtgtcacatagctttcaaagcttctcactgaaatattcgataataaggctggagtggaggctcacaactataatcccggtactttgggaggccaaggggggtggattgcttgaga

SEQ ID NO: 68063 - DNA, 120 bp, synthetic construct; identical to SEQ ID NO: 7120
  source 1..120: mol_type = other DNA

SEQ ID NO: 68064 - DNA, 120 bp, synthetic construct; identical to SEQ ID NO: 7121
  source 1..120: mol_type = other DNA

SEQ ID NO: 68065 - DNA, 120 bp, synthetic construct; identical to SEQ ID NO: 7126
  source 1..120: mol_type = other DNA

SEQ ID NO: 68066 - DNA, 120 bp, synthetic construct
  source 1..120: mol_type = other DNA
ctccttttttttttttaatgcggagtctctctctgtcacccaggctggagtgtagtggcatgatctctgctcactgcaacctacacctcctgggttcaagcgattcttctgcctcagctt

SEQ ID NO: 68067 - DNA, 120 bp, synthetic construct; identical to SEQ ID NO: 7122
  source 1..120: mol_type = other DNA

SEQ ID NO: 68068 - DNA, 120 bp, synthetic construct
  source 1..120: mol_type = other DNA
cagcctggggaagacagcgaggccttgtttctactaaaaaaaagtatccaggtgtggtggctcacacagctgtagtcctagctactcaggaggctgaggtgggaagatcgcctgaaccca

SEQ ID NO: 68069 - DNA, 120 bp, synthetic construct; identical to SEQ ID NO: 35
  source 1..120: mol_type = other DNA

SEQ ID NO: 68070 - DNA, 120 bp, synthetic construct
  source 1..120: mol_type = other DNA
tacaacacaaatatttgtactctaatagtattcacattatagtaaattttttttcatgctctgtcacccaggctggagtgcagtggcgcgatcttgtctcattgcaaccttcgcctcccg

SEQ ID NO: 68071 - DNA, 120 bp, synthetic construct
  source 1..120: mol_type = other DNA
gaattgtttgaaccctggaggcagaggttgcagtgagctgagatcgtaccactgcactccagcctgggtgaaagagtgagactccatctccaaaataaataaataaataaactcaaggct

SEQ ID NO: 68072 - DNA, 120 bp, synthetic construct
  source 1..120: mol_type = other DNA
ttgtattattggtagtgagctactgttgacgtccccacgttagcaatttagtggctatactgatgataagcatttccatgcatcatgtggtcaacagcatttgctaccaagtgccacgtt

SEQ ID NO: 68073 - DNA, 120 bp, synthetic construct; identical to SEQ ID NO: 7123
  source 1..120: mol_type = other DNA

SEQ ID NO: 68074 - DNA, 120 bp, synthetic construct
  source 1..120: mol_type = other DNA
tactgtccagcccaacctccacctcactttgtaatttaggcctgatttctttcagtgatgccttgaccttaaccttgagataaattacaccctcagtagttcctgtcttccacctgaatg

SEQ ID NO: 68075 - DNA, 120 bp, synthetic construct
  source 1..120: mol_type = other DNA
taacctgcacattgtgcacatgtaccctaaaacttaaagtataataaaaacaaatacaaaaattaactgggcgtggtggcaagtatcatcccaactactggggaggccgagggaggagaa

SEQ ID NO: 68076 - DNA, 120 bp, synthetic construct
  source 1..120: mol_type = other DNA
tatacataaattacaacacaaatatttatactcaactagtattcacattatagtaaattttcttttcttgctctgttgcccaggctggagtgcagtggtgcgatctcagctcactgcaac

SEQ ID NO: 68077 - DNA, 120 bp, synthetic construct
  source 1..120: mol_type = other DNA
catctgacatttaaaaagttacttcttattagggagctaggtcagatcgatgagagattttctcataacacctcccctctctccctatcaaggaagagaccagtgcagcgtgttctggaa

SEQ ID NO: 68078 - DNA, 120 bp, synthetic construct
  source 1..120: mol_type = other DNA
aagtagctgagattacaggcatgcaccaccatgcccagctaatttgtgtatgtttagtagcgacagggtttcctcactatgttggtcagactgttctcaaactcctgactttgggtgatc

SEQ ID NO: 68079 - DNA, 120 bp, synthetic construct
  source 1..120: mol_type = other DNA
ctcaatgccttcagcttctgtggaaatcccatctccatggccaccctggagaacctgctgagccacacaatcatactcaaaaacttatgcgtggaggtgtatcctgccccgcgggagagt

SEQ ID NO: 68080 - DNA, 120 bp, synthetic construct; identical to SEQ ID NO: 28
  source 1..120: mol_type = other DNA

SEQ ID NO: 68081 - DNA, 120 bp, synthetic construct; identical to SEQ ID NO: 23
  source 1..120: mol_type = other DNA

SEQ ID NO: 68082 - DNA, 120 bp, synthetic construct
  source 1..120: mol_type = other DNA
cagcacattgggaggctgaggccaagagttggaggccagcctgtccaacatggtaaaccccaactctactaaaaatacaaaaattagctgggcatggtggtgggttcctgtaatcccagc

SEQ ID NO: 68083 - DNA, 120 bp, synthetic construct
  source 1..120: mol_type = other DNA
acaaagaaagaagggagggagagagggaaagaaggaaagaagaaagagagagaaagagaaagcaagcttaaataatgaaaagaaaacaaatagaacctgttctagggatgccccatgaat

SEQ ID NO: 68084 - DNA, 120 bp, synthetic construct
  source 1..120: mol_type = other DNA
tttaagaaaggcaaaaatccaatcaggattaactgggtagagattaagaattctaatcaaatgtagctctctctgtctctctgttcaatctagcctatttcccaggctggagtggagtgg

SEQ ID NO: 68085 - DNA, 120 bp, synthetic construct
  source 1..120: mol_type = other DNA
aggtaaaggttgcagtgatttgagatcgtgccactgcactccagtctgggcaacacagtgagactccatccccaccctcaaaaaaaaaaaacgttgtgtagaggagggcttttgtcatgt

SEQ ID NO: 68086 - DNA, 120 bp, synthetic construct; identical to SEQ ID NO: 29
  source 1..120: mol_type = other DNA

SEQ ID NO: 68087 - DNA, 120 bp, synthetic construct
  source 1..120: mol_type = other DNA
agcactttgggaggccaaggcaggtggatcacttgaggtcaggtgttcgacaccaacctggccagcatggtgaaaccccacctctactaaaaatacaaaaattagcgaggcatggtttca

SEQ ID NO: 68088 - DNA, 120 bp, synthetic construct
  source 1..120: mol_type = other DNA
aggtgatctactcaccttgtccttccaaagtgctggaattacagctatgaaccacctcacccacccttgaatgaatgtattcttgacttctaccctatccctaccactgtcgatttcttg

SEQ ID NO: 68089 - DNA, 120 bp, synthetic construct
  source 1..120: mol_type = other DNA
aactgcattctttggtgagttggtgcattgcagggcccttcagatcagctggcatcagtagattcactgacatgcagaacctgaaagaatatctcagatgaaaaagttaatgttttacaa

SEQ ID NO: 68090 - DNA, 120 bp, synthetic construct
  source 1..120: mol_type = other DNA
tttatcttgtcatctaaagccaatgattgtaacctctgtattgtctcttccaatggaaaaaacgaaaacaaaaactcaactctatttgagccttgtcaggtcaataaaacaaaagaaaat

SEQ ID NO: 68091 - DNA, 120 bp, synthetic construct
  source 1..120: mol_type = other DNA
ctgaggcctgtaatccagcactttgggaggccgaggcaggcagaccacgaagtcaggagattgagaccatcctagttaatatggtgaaaccccgtctttactaaaaatacaaaaaattag

SEQ ID NO: 68092 - DNA, 120 bp, synthetic construct; identical to SEQ ID NO: 7147
  source 1..120: mol_type = other DNA

SEQ ID NO: 68093 - DNA, 120 bp, synthetic construct
  source 1..120: mol_type = other DNA
aaaactctcaatagatgcagaaaaagcctttgacaaaattcaacaacccttcatgctaaaaactctcaataaattaggtattgatgggacgtatttcaaaataataagagctatctatga

SEQ ID NO: 68094 - DNA, 120 bp, synthetic construct
  source 1..120: mol_type = other DNA
gattccctatttaacaaatggtgctgggaaaactggctagccatatgtagaaagctgaaactggatcccttccttacaccttatacaaaaatcaattcaagatggattaaagacttaaac

SEQ ID NO: 68095 - DNA, 120 bp, synthetic construct
  source 1..120: mol_type = other DNA
tttagcatgaagggttgttgaattttgtcaaaggcctttttctgcatctattgagataatcatgtggtttttgtcattggttctgtttatatgctggattacatttattgatttgcatat

SEQ ID NO: 68096 - DNA, 120 bp, synthetic construct
  source 1..120: mol_type = other DNA
aactacatggaaactgaacaacctgctcctgaatgactattgagtacataacgaaatgaaggcagaaataaagatgttctttgaaaccaatgataacaaagacacaacataccagaatct

SEQ ID NO: 68097 - DNA, 120 bp, synthetic construct
  source 1..120: mol_type = other DNA
tctgtaaaggattttatttctccttcacttatgaagcttagtttggctggatatgaaattctgggttgaaaattctttcctttcctttaagaatgttgaatattggcccccactctcttc

SEQ ID NO: 68098 - DNA, 120 bp, synthetic construct
  source 1..120: mol_type = other DNA
accctgtttgcctgggtatcagcagcggtggctgcagaacagtggattttcgtgaactgcgaatgctgctgtctgtttgttcctctggaagttttgtctcagaggagtacccggccgtgt

SEQ ID NO: 68099 - DNA, 120 bp, synthetic construct
  source 1..120: mol_type = other DNA
catcacacggccgggtactcctctgagacaaaacttccagaggaacaaacagacagcagcattcgcagttcacgaaaatccactgttctgcagccaccgctgctgatacccaggcaaaca

SEQ ID NO: 68100 - DNA, 120 bp, synthetic construct
  source 1..120: mol_type = other DNA
cctttgtgggaaacccgacctttctctctggctgcccttaacattttttccttcatttcaactttggtgaatctgacaattatgtgtcttggagttgctcttctcgaggagtatctttgt

SEQ ID NO: 68101 - DNA, 120 bp, synthetic construct
  source 1..120: mol_type = other DNA
gagatttagactcccacacagtaataatgggagactttaacaccccactgtcaacattagacagatcaacgagacagaaagttaacaaggatacccaggaattgaactcagctctgcacc

SEQ ID NO: 68102 - DNA, 120 bp, synthetic construct
  source 1..120: mol_type = other DNA
gagaattttagaccaatatccttgatgaacattgatgcaaaaatcctcaataaaatactggcaaaccgaatccagcagcacatcaaaaagcttatccgccatgatcaagtgggcttcacc

SEQ ID NO: 68103 - DNA, 120 bp, synthetic construct
  source 1..120: mol_type = other DNA
ctccattttagaatcaaaccaaaccaaatactgggcccccttctgcttctgtgaatgagaaaactctgccttcaccaattagccatttaaaaattatgagcgtggctgccagccttacaa

SEQ ID NO: 68104 - DNA, 120 bp, synthetic construct
  source 1..120: mol_type = other DNA
cctgatatattatcggaatggatgtgacatctgaatggggatgctgttgaggaaagagatttcatgaaatgtacagtgagtggcataattgtggctcactgtaaccttgaattcttgggc

SEQ ID NO: 68105 - DNA, 120 bp, synthetic construct
  source 1..120: mol_type = other DNA
gcttgacctttaattcccacatagactttatgctcctgggcttacgtttagctacactcagcaatgtccactagcttcagcgtttctttttcttttctttttttttcccccttggagaca

SEQ ID NO: 68106 - DNA, 120 bp, synthetic construct
  source 1..120: mol_type = other DNA
tatttctgggaggctttcctctgccccagctttcccagagtggaaggaagatgagaaatgctctgtttctagtttgatccttttgcagagctaaataccaatttctttccaaagaaatat

SEQ ID NO: 68107 - DNA, 120 bp, synthetic construct
  source 1..120: mol_type = other DNA
acgatgtcctttatacctaaaagtaaggaaacttgatcagtgccactggcatgggcatctgtccattaacatgcagataataaccaccagacctgtaatagtgaaagcctattcagtctc

SEQ ID NO: 68108 - DNA, 120 bp, synthetic construct
  source 1..120: mol_type = other DNA
ttttttaaagtttttttttgtagagatggggtcttgctttgttgcccaggctggtctcaaactcctggctccaaatgatccttctgcttcagcctcccaaagtacttggattacaggcat

SEQ ID NO: 68109 - DNA, 120 bp, synthetic construct
  source 1..120: mol_type = other DNA
ctttgttatgtatcctagagaaacacacatgagcactggaaaatatgtacaagaatgttcatagggcattatttgaatttgcaacactctgaaaacgacccacgaggttaatcaacagta

SEQ ID NO: 68110 - DNA, 120 bp, synthetic construct
  source 1..120: mol_type = other DNA
tcccaagtaaattccctctaaaaaataaaaatttttaaagctgtaatttaagctctctgctgcctcatgacttcaattccatcagagttacgcattgtttcctctgtacatctttgctct

SEQ ID NO: 68111 - DNA, 120 bp, synthetic construct
  source 1..120: mol_type = other DNA
aattgcttttggcatttttgtcatgaagtctttgcccaccatgcctatgtcctgaatgttgttgcctaggttttcttctagggtttttatggtttggggttttacatttaagtctttaat

SEQ ID NO: 68112 - DNA, 120 bp, synthetic construct
  source 1..120: mol_type = other DNA
atctgtggcataaatacatatttggtcaatgttccttgacccaaagtattaaggctgggttgtatttaattcagtgactaagtaatttagtcaggttattcaataaattaatgaggtaat

SEQ ID NO: 68113 - DNA, 120 bp, synthetic construct
  source 1..120: mol_type = other DNA
tatgacaatgtcattgggttaatagatagccttttcttacaaagatttgtaaaaaatgagaggccctagacatttgctgtgtatattatgcataaaaataccacctccagtgaattcgtt

SEQ ID NO: 68114 - DNA, 120 bp, synthetic construct
  source 1..120: mol_type = other DNA
caagcaaaacaatgtacatattctagagcttaatattttccctctccctgtttttttttccgtggctttctcttgctttcactattgcaaactctgaccctgagaggcaagagtcgtgac

SEQ ID NO: 68115 - DNA, 120 bp, synthetic construct
  source 1..120: mol_type = other DNA
gggaataagaaaaacaacatgaatataaaataatgaacaatttgtagcaaatatttttaaataattgcaattaaagagccctaagactttgtattgtttgggcttggtgttagtaaactt

SEQ ID NO: 68116 - DNA, 120 bp, synthetic construct
  source 1..120: mol_type = other DNA
agtactggctagatgttggaatccaaaaatgaactgtgaaaaaaggcccgtgtcctcaggaacttatgttcagaagaaatggaaaaacaaaattaaataagtggataaatacatgtgtgt

SEQ ID NO: 68117 - DNA, 120 bp, synthetic construct
  source 1..120: mol_type = other DNA
aactaaaatctagacacctgagcctacactgcatagcgaaacaggtcactagaaaaacacaagcaatttagaaaggcttttaatattgaacagttgcattttgtttctattcatgtctat

SEQ ID NO: 68118 - DNA, 120 bp, synthetic construct
  source 1..120: mol_type = other DNA
gtgaaaaatattatcttaaatgcaaagatattcattatttaaaaattgatcaatgacattcactaaattatcacagggacgaaaacataaaatgatcatctgtagagatgcagaaaaata

SEQ ID NO: 68119 - DNA, 120 bp, synthetic construct
  source 1..120: mol_type = other DNA
aagtagcacctttttttattgttacgtattatttcatttcatagacataccactataatttatttactaaactcttgaccagaggttctcaaatgagggacattttacctgccggggaca

SEQ ID NO: 68120 - DNA, 120 bp, synthetic construct
  source 1..120: mol_type = other DNA
cccagataacacatatatattaaataaataaatacatgtatatatatatatcatgcacacacatttaaatataatgtaaatgtgtgtgtgtgtgtgtgtgtgtgtgtgtatgtgtatgtg

SEQ ID NO: 68121 - DNA, 120 bp, synthetic construct
  source 1..120: mol_type = other DNA
atatatatatatacacacacacacacacacacacacatatatgtatgttgtgtgtatatgtatatacacacaacaatctataggcttgccttttaaaatagtataagcaacaaattttaa

SEQ ID NO: 68122 - DNA, 120 bp, synthetic construct
  source 1..120: mol_type = other DNA
tagtgtatatgtaccacattttctttatccaatccacctttgatgggcacctaggttcattccatgtctgtgctattgtgaataacatgctgatgaacgtacgagtgcatatatattttt

SEQ ID NO: 68123 - DNA, 120 bp, synthetic construct
  source 1..120: mol_type = other DNA
atcagatacatagtttgcaaatattttctcccattctgtaagttgtctgtttactctgtggatagtttctattgctgtgcagaagctttttagtttgattgactttcacttgtcaatttc

SEQ ID NO: 68124 - DNA, 120 bp, synthetic construct
  source 1..120: mol_type = other DNA
ctacaggcatgtgccaccatgcctcgctatttaaaaaaaaaaaaaaaatttgtatagatgaggttccactatgttgcctaggttggtctcaaactcctgggtccaagcgatatacctgcc

SEQ ID NO: 68125 - DNA, 120 bp, synthetic construct
  source 1..120: mol_type = other DNA
taagtcatatagtggcctgagggagagaactgcacgtcatgaaacatcctgaactctaagttgtaggcagtaactgggcaaaactttaagttgtttacagagggaagagaagtgaatttt

SEQ ID NO: 68126 - DNA, 120 bp, synthetic construct
  source 1..120: mol_type = other DNA
ttcttggctagaaacataaggtggtatgatttcaaaagaatggtcagagagacacagcatttctggtttgaacaaatgaaagaccataagctaacaaatcaggacagcctctggaggctg

SEQ ID NO: 68127 - DNA, 120 bp, synthetic construct
  source 1..120: mol_type = other DNA
actcactcactatcatgagaatagcatgtggaaatctgctcccatgatccagtcacctccacccaggcccctctcttgacatgagaggattacaatttgagatgagatttgggtggggac

SEQ ID NO: 68128 - DNA, 120 bp, synthetic construct
  source 1..120: mol_type = other DNA
gcctgagtagtgccttggacccttttagccacagttggagctgagcagctggaacactgggcaccatgtcccgaggctgcccagagcagcagggccctgggcccatcccactaaacaatt

SEQ ID NO: 68129 - DNA, 120 bp, synthetic construct
  source 1..120: mol_type = other DNA
aaacaccaaattattacactaatctgtaaagtagctataaaacgttatttttcagagtgaagtatctgtcaagatggctagttttggtgtataaaagaaacggtattttattccttttat

SEQ ID NO: 68130 - DNA, 120 bp, synthetic construct
  source 1..120: mol_type = other DNA
ttgctgcactcttcacaatagcaaagacttggaaccaaccgaaatgtccatcaatgatagactggattaagaaaatgtggcatacatacaccatggaatactatgctggcataaaaaatg

SEQ ID NO: 68131 - DNA, 120 bp, synthetic construct
  source 1..120: mol_type = other DNA
aacacagctgtgtatgaagtatttctctaaaatgtacattcaatagcaactggttttgttcagtcttatgtacccatattatttaaatgagcacctggagtctagaattaactaaaaaat

SEQ ID NO: 68132 - DNA, 120 bp, synthetic construct
  source 1..120: mol_type = other DNA
tgcatttgcaaagtctgtcctgccaggtaagctaacaaatttataaattatctggattaggaccgcatcatctctgaagagccattattctgactaccacatcagtatgttagtttatgt

SEQ ID NO: 68133 - DNA, 120 bp, synthetic construct
  source 1..120: mol_type = other DNA
actgagacattttacagttttgttaggattaatctgacgaaggttgagacaagttgtaaggatatagttatataaagatatacttaccaattttagcaaaattttcctccagctattggt

SEQ ID NO: 68134 - DNA, 120 bp, synthetic construct
  source 1..120: mol_type = other DNA
gaggcactaaaaggttgtgaaatttcctctatgccacagagctttttagtgatgatttggcatttggaagcacatctttgaaatgttcgtttttctctgatggccagtgatggtgagcat

SEQ ID NO: 68135 - DNA, 120 bp, synthetic construct
  source 1..120: mol_type = other DNA
ggcaacgcgggctcttttttggttccatacgaactttaaagtagttatttccaattctgtaaagaaagtcattggtagcttgatggggatggcattggatctataaattaccttgggcag

SEQ ID NO: 68136 - DNA, 120 bp, synthetic construct
  source 1..120: mol_type = other DNA
cactcattgcatatacttttaaggggtaaaataattactaaatttatgtacactattaatacttcattgtataaaattgcatatatacccatatgcaaatgtgcacagaatcagtagggt

SEQ ID NO: 68137 - DNA, 120 bp, synthetic construct
  source 1..120: mol_type = other DNA
gtgcttgcataaaagagttcacactatctgaaagatgtcacatgtaacattgactggcagccatttcagaatggcagacagccaataaatcattcagaactatgtgtcactcgttgtggc

SEQ ID NO: 68138 - DNA, 120 bp, synthetic construct
  source 1..120: mol_type = other DNA
actttgtgctgctgtcctggagtacagacatggtggctagaagcatgaaatcaccttgaaggtagaagtcatgcattgaagttagtaaaagtgaaatgtaagtgtatagtttcctgatga

SEQ ID NO: 68139 - DNA, 120 bp, synthetic construct
  source 1..120: mol_type = other DNA
cctgcttagatgacatcttaaatttgttaattggattattatgctctattctatacatttattgatttatagattttgtggacacaaatttcaaaacatattcgaaaatttggtgatagc

SEQ ID NO: 68140 - DNA, 120 bp, synthetic construct
  source 1..120: mol_type = other DNA
gtgtctgctctgttgctgtaggagaaaatccgtgctgtagcacatcaaagtttttccaaattttatttcttaggacatctttggggtttatgtaagtattaaatagagctcccctagccc

SEQ ID NO: 68141 - DNA, 120 bp, synthetic construct
  source 1..120: mol_type = other DNA
gagatggaggcgacagcatgggcagagcaagagcacagccgtggaagggaggtcctcccagctagcctttgggaggcccatggccagtctcggggcaggaggaaagaatgtgaaccaaaa

SEQ ID NO: 68142 - DNA, 120 bp, synthetic construct
  source 1..120: mol_type = other DNA
gcattgtgccactgaagcacgagctccagagtgcacctggatggcagcttctctcctggccaacaaacgcctggtgctggctgccctcccagcatctcccctcaactcctcagctccacc

SEQ ID NO: 68143 - DNA, 120 bp, synthetic construct
  source 1..120: mol_type = other DNA
cacagctgtaggcaaggctgctgggagccgccacgctccgcgatagcgagtctgcggcgccacctcgtgggtgctgcgtggaactccccgtggtgagggcggggaaggccgggtccccac

SEQ ID NO: 68144 - DNA, 120 bp, synthetic construct
  source 1..120: mol_type = other DNA
ctcggcccggcctctcccggtagactgctctggtgccctgaagcctcccttctccaaggccccatggacgcccccagaggggtgacgccctcgcccacgctgagctctgagtgctgcacg

SEQ ID NO: 68145 - DNA, 120 bp, synthetic construct
  source 1..120: mol_type = other DNA
aatccacattcttggcaccatgaagaatcacctctcacagacaccagcgaaaaccaagtctgtctgagagcagagggtgaggaggggaaagccgggctgcggatcacagtgggcggagga

SEQ ID NO: 68146 - DNA, 120 bp, synthetic construct
  source 1..120: mol_type = other DNA
agtggcaaaagcctgtaaacccggctactagggaggctgaggcaacaaaatcacctaaacttaggaggcagaggttgcagtgagatgagattgtgctactgcactccagcctgagcgaca

SEQ ID NO: 68147 - DNA, 120 bp, synthetic construct
  source 1..120: mol_type = other DNA
gttagggagggccagagcacaggggaagtggagtgtaattctttctacaagattagcaagctgaacttgaatctcacacacgcacacacaccacagtgacatggaaagaatccacaggac

SEQ ID NO: 68148 - DNA, 120 bp, synthetic construct
  source 1..120: mol_type = other DNA
ttctcctagtacaccctgattgtccaaggacttctgagaacaccattccagaagaggtcatgatctcaacaactgtcacagaaagaaagaatacaggaagacaagatgcgaaagttatgt

SEQ ID NO: 68149 - DNA, 120 bp, synthetic construct
  source 1..120: mol_type = other DNA
atttataaacaaaagaggcttacttgactcacaattccacatggctgaacttataagtgaacttataattaaacttataatcatggtggaaggtgaagggaaagcaaggcaagtcttaca

SEQ ID NO: 68150 - DNA, 120 bp, synthetic construct
  source 1..120: mol_type = other DNA
tgcaagagcaataataacaacaataaccacaacaaaggtatattattgggagcattagagaagaacaacagaaaactaaaaatgttgtggatgttacctccaagcaagaaaatgggacta

SEQ ID NO: 68151 - DNA, 120 bp, synthetic construct
  source 1..120: mol_type = other DNA
gctaggtagaagggcactttatctattcttatcacaaacgtaggacaacggctagcacaaggttaggaacttacacgctattcgattaattgttgtttaataattgattaaaaactccag

SEQ ID NO: 68152 - DNA, 120 bp, synthetic construct
  source 1..120: mol_type = other DNA
agaagagactgtgtgtttaagttgggagtgtattgtggagtaagaataagaaacaggatgggtgctatagggagagagagtaaaatctagaacacattattaagttaggtgatggaatac

SEQ ID NO: 68153 - DNA, 120 bp, synthetic construct
  source 1..120: mol_type = other DNA
cacccatgtcagcctcccaaagtgctgggattacgtgcgtgaaacactgcacctggccttttgttaacttttagtttaagttcaggagtacacgtgcaggtttgttatacaggtaaactc

SEQ ID NO: 68154 - DNA, 120 bp, synthetic construct
  source 1..120: mol_type = other DNA
ttaatagtccttttgaaaatttgactactcatttaccttcttgggttatttgaaattatctcctcttcactagattctatagaagcatagccatgcctgccctctttactgtttctctac

SEQ ID NO: 68155 - DNA, 120 bp, synthetic construct
  source 1..120: mol_type = other DNA
gctcttaacaaattagtgtgacttcagtccatagtaaattggagaggaactggtagaacataaaagaactggtaaaaagccattgtaaacactcaagtttcaaaaacaattttgtggtaa

SEQ ID NO: 68156 - DNA, 120 bp, synthetic construct
  source 1..120: mol_type = other DNA
aagtttaaaggccaaagcacaactcactcaggcattgtgaactatgtgtgcagacagatcacaactcatccttggtctctgggtgtgtctgcgtctattactgacttaccctggatatgt

SEQ ID NO: 68157 - DNA, 120 bp, synthetic construct
  source 1..120: mol_type = other DNA
ttggcagcccctcatccaccctacgtgagagcacagatcttattgtctttgaagaccctttctttttttttttttttttttttttttttgagaagcagtctcactgtcgcccaggctgga

SEQ ID NO: 68158 - DNA, 120 bp, synthetic construct
  source 1..120: mol_type = other DNA
tcatccttggctatgaaatagacaagaaaaaggcaagctagccatttccatctcactatagcagactctcatgtttgctttttgaccgtacgtgggaagcgggggcctgactgctttcct

SEQ ID NO: 68159 - DNA, 120 bp, synthetic construct
  source 1..120: mol_type = other DNA
tacttgggaggctgaggtgggaggactgcttcagtcccggaggtcaaagctgtggtttgcaccactacactccagcctgggtgacagaacaagaccctatctcatgaatgaatgaatgaa

SEQ ID NO: 68160 - DNA, 120 bp, synthetic construct
  source 1..120: mol_type = other DNA
ccacctccccagttcaagcgattctcctgctttagcctcctgagtagctgggattacaggtgcatgccaccacacccagctaatttctgtgttttcttagtagagacggggtttcaccat

SEQ ID NO: 68161 - DNA, 120 bp, synthetic construct
  source 1..120: mol_type = other DNA
cttcaacatcctcctcttagcaactgttaaaactaggcagaggccgggcacagtggctcatgcctgtaatcccagaactctgggaggcaaaaacaaaggatagcttgaggccaggagttc

SEQ ID NO: 68162 - DNA, 120 bp, synthetic construct
  source 1..120: mol_type = other DNA
acagagagagaggcggtctcaaaaacacataaaaatttggatttcttagaaagaccacttgggcacgggtgataggaggctgtctggaaacaaggccagtaaggagtccacctttgagga

SEQ ID NO: 68163 - DNA, 120 bp, synthetic construct
  source 1..120: mol_type = other DNA
ggccaatgcagtcattctcgcagataatctttttccgctttgtttggaagacagagtctcgctctgttgcccaggctagaatggagtggcacaataatgcaacctctgcctcccacgatc

SEQ ID NO: 68164 - DNA, 120 bp, synthetic construct
  source 1..120: mol_type = other DNA
gactgtgccactgcactccagcctgggcaacagagcaagactctatcttaaaaaaataataaaaaataaaaaagaatgctagtatcagccaggcacggtggctcatgcctgtaatcccag

SEQ ID NO: 68165 - DNA, 120 bp, synthetic construct
  source 1..120: mol_type = other DNA
gtgtctgagcctttcccggactgacggaacctgtgtcttctctcttttgtggacaggatggtgattgctcacaccaaagccttggacccctcccagcctgtgacctttgtgaccaactcc

SEQ ID NO: 68166 - DNA, 120 bp, synthetic construct
  source 1..120: mol_type = other DNA
aaaaggagttttttttttttgagacagtctcactctgtcacccaggatagagtgctgcggcatgatctcaattcaccgcagcccctgcctcctgggttcaagcaattcccctgcctcagc

SEQ ID NO: 68167 - DNA, 120 bp, synthetic construct
  source 1..120: mol_type = other DNA
ctttttttttttttttttttttttttgagatagaatctcgctctgtcacccaggctggagtgcagtggcatgatctggactcactgaaacctctgcctcccaggttcaagtgattctcct

SEQ ID NO: 68168 - DNA, 120 bp, synthetic construct
  source 1..120: mol_type = other DNA
tttctatatgaatgactacataattctgagaataccaaaagagacagacacagaaccaatcggattcctttcttcttgaagcttctgcacagcaaaagaaactatcaacagagtgaacag

SEQ ID NO: 68169 - DNA, 120 bp, synthetic construct
  source 1..120: mol_type = other DNA
gcattaacgttcatgaacctctgcctacatttcagaagatgtatgaaaatgcctggaaatccaggcaaaagtttgctgtgggggggaggggaggggagggggggccctcatggataacct

SEQ ID NO: 68170 - DNA, 120 bp, synthetic construct
  source 1..120: mol_type = other DNA
attttgtatttttactagagacgggctttcactatgttggccaggctggcctccaactcctgatctcgtgatccgtccaccccgacctcccaaagtgctaggatcataggcataagccac

SEQ ID NO: 68171 - DNA, 120 bp, synthetic construct; identical to SEQ ID NO: 68110
  source 1..120: mol_type = other DNA

SEQ ID NO: 68172 - DNA, 120 bp, synthetic construct
  source 1..120: mol_type = other DNA
aagcattatttaatggagtctttcctttcactaatgatcatcaggacagctagggaagtgagttgaaattttcaggccattaggttaatagttctagtaattctagtaatgtttcgacag

SEQ ID NO: 68173 - DNA, 120 bp, synthetic construct
  source 1..120: mol_type = other DNA
gaacagataattgtatgaaaaaggtatctgcacccatatgtttatcacagcactattcacaatagcaatgtgtccctcagtggatgattacattaataaatctggcacatatgcgctata

SEQ ID NO: 68174 - DNA, 120 bp, synthetic construct
  source 1..120: mol_type = other DNA
aattatgatttgctgaatgactttaaagtgatcggataaggaaacaattagggtttgcagtagctggagaaagaaaaaaaagaaatatttagatattgcatactcaatatggcacatact

SEQ ID NO: 68175 - DNA, 120 bp, synthetic construct
  source 1..120: mol_type = other DNA
taatgttacctccaggtttagactcccctaagtaattgactctacctattatgtttgtgttttgaaacatcactctatattgtaacaaaaagaaaaatgacacaattagtttcctatatg

SEQ ID NO: 68176 - DNA, 120 bp, synthetic construct
  source 1..120: mol_type = other DNA
caaaagctgaaaacaaggaggatcgactgtattttcgtagacaatctaatctcagaagatttcagttcagacaaaaatcatgataattactgtattacaaaagggcactagatagggggg

SEQ ID NO: 68177 - DNA, 120 bp, synthetic construct
  source 1..120: mol_type = other DNA
agcagattctcattattcagtgtagttacggtctagaaagttccatgaacaaataaaaagttaggtttcagcaagctactggtcacacttttgtaagcttaccaacacctacttttgttg

SEQ ID NO: 68178 - DNA, 120 bp, synthetic construct
  source 1..120: mol_type = other DNA
acagaccttgggggcactgcctcgctttgggacaactcagggccgcatggacagtgaataaaatccttcctgtttgcagccctgtttgtggttggtggcagcgatggacactgcagccag

SEQ ID NO: 68179 - DNA, 120 bp, synthetic construct
  source 1..120: mol_type = other DNA
caatattagagatcctggcctgtagtttccttctttgatgcttttgtctgattttggtatcacagtaataatggtctcatagaataagtttggaagtattccctcctgtttttcaaaata

SEQ ID NO: 68180 - DNA, 120 bp, synthetic construct
  source 1..120: mol_type = other DNA
acagagactgcaggacgaccagagtggtaggacaggggctatccagggctgcacctttcgcagtgtggggtgggttgagggcgctatccagggtgtcattgcctgcattaggggtactgg

SEQ ID NO: 68181 - DNA, 120 bp, synthetic construct
  source 1..120: mol_type = other DNA
ccagctgctctgtgccaggaggaggaggagacacctagagcctgcgacaccatggctcgcctcgctgcgggtgggcggcagtgacagagactgcggtgcgccagagtggtaggagagcgg

SEQ ID NO: 68182 - DNA, 120 bp, synthetic construct
  source 1..120: mol_type = other DNA
tcaccctgccctgctgcgctctggatgtgtcatcaccctgccctggccctactctgcctttgaccctgccctggccttaccttggccctcaccctagcctgcgctagaccctgctctgga

SEQ ID NO: 68183 - DNA, 120 bp, synthetic construct
  source 1..120: mol_type = other DNA
gtggccaggcacgatggctcacgcctgtaatcccagcacttcaggaggctgaggcaggcagatcactgaggtcaggggttcaagaacagcctggccaacatggcaaaaccccatttctac

SEQ ID NO: 68184 - DNA, 120 bp, synthetic construct
  source 1..120: mol_type = other DNA
gggtgtacaccactgtgcccggctaattttaaatgtttttgtagagatgggatctcactatgttgcccaggccagtctcaaactcttgagctcaagtgatcctcctgccttagcctccta

SEQ ID NO: 68185 - DNA, 120 bp, synthetic construct
  source 1..120: mol_type = other DNA
tattgtctttgaagaccctttctttttttttttttttttttttttttttgagaagcagtctcactgtcgcccaggctggagtgcagtggcacaatctcggctcactgcaagctccaactc

SEQ ID NO: 68186 - DNA, 120 bp, synthetic construct
  source 1..120: mol_type = other DNA
cagacagatcacaactcatccttggtctctgggtgtgtctgcgtctattactgacttaccctggatatgtaaaatgagtaagaaaaactttttgtgttagccactgggatttttggtttg

SEQ ID NO: 68187 - DNA, 120 bp, synthetic construct
  source 1..120: mol_type = other DNA
ctctccagaagaagatgccactgtgcttcctgtacagcctgcaggactgtgagtcaattaaacatttttataatatccagtctcagatatttcttcatagcaatacaagaacagcctaat

SEQ ID NO: 68188 - DNA, 120 bp, synthetic construct
  source 1..120: mol_type = other DNA
cattggtactctttctctctcccttttttattttattatttttttttgagacagagtctcactctttcacccaggctgtggtgccatcccagcacaccctgcaacccattgcctcccaga

SEQ ID NO: 68189 - DNA, 120 bp, synthetic construct
  source 1..120: mol_type = other DNA
agccgagattgtgccactgcactccagcctgggcaataagagtgaaactctgtctcaaaaaaaaaaaaaaaaaaaaaaaaaaaaagttaacaaaacgttcttctctagttctaaagcacc

SEQ ID NO: 68190 - DNA, 120 bp, synthetic construct
  source 1..120: mol_type = other DNA
ccttgtttattgtctaaactgctaggtagaagggcactttatctattcttatcacaaacgtaggacaacggctagcacaaggttaggaacttacacgctattcgattaattgttgtttaa

SEQ ID NO: 68191 - DNA, 120 bp, synthetic construct
  source 1..120: mol_type = other DNA
atacatcctgttatagaaaaaaaaatatgctattcccccaatgctgtcttttatctttcttactttgctcgaatattgccttcatggctacatataaaagccatcctattttctcagatt

SEQ ID NO: 68192 - DNA, 120 bp, synthetic construct
  source 1..120: mol_type = other DNA
tggaaattacgttttgaaagggcctcaattacattggcagtgggccgtcctctgagcaccataagaaaatgtaatttcattgaataattctagtgttgcattgactggaatcaaaaagtg

SEQ ID NO: 68193 - DNA, 120 bp, synthetic construct
  source 1..120: mol_type = other DNA
agtaaatattttagctttgtaggccactgagtctctgttgctttaaaaaatgtgaaaaccattcttagcttgagggctggacagtccagggccatactttactgaccgctgcttgaacta

SEQ ID NO: 68194 - DNA, 120 bp, synthetic construct
  source 1..120: mol_type = other DNA
tgaataaaaataaaaatctcaggaaagaagtttactgattggtgcttctaaggactggtttgcttgtacctgagacacgttgcctactatcagtttggtcctgcctgcactctggagaag

SEQ ID NO: 68195 - DNA, 120 bp, synthetic construct
  source 1..120: mol_type = other DNA
ttctcctccctaggcatcccaaagtgctgggatgataggtgtgagccgccaggcctggccttgtattaggtttttaaaaacactattagagttttagtgacaagaattaagtataaaact

SEQ ID NO: 68196 - DNA, 120 bp, synthetic construct
  source 1..120: mol_type = other DNA
agctgagattgtgccactgcactctagtctgggcaatggagtgagactctgtctcaaaacaaaacaaaaaacaaacaaggccaggcatggtggctcacgcctgtaatcccagcagttcgg

SEQ ID NO: 68197 - DNA, 120 bp, synthetic construct
  source 1..120: mol_type = other DNA
tttttttttttgagacaaggtctcactcttttgtccaggcttgagggtagtgacacgaccaaggatcaatgtagcctccaactcccaggctcaagtgatcctcccacctcagcctcccaa

SEQ ID NO: 68198 - DNA, 120 bp, synthetic construct
  source 1..120: mol_type = other DNA
tgacaatagcacaaaggatgagaggggagaaatggaaatatactattgtatggttcatacattttatgtcaagtgttatatatttttttgacccagagtctcactgtgtcacccaggctg

SEQ ID NO: 68199 - DNA, 120 bp, synthetic construct
  source 1..120: mol_type = other DNA
aaataaaaaataaaataaaagaccccactgtgttgttgcctataacaattcactttaaggctgggtgcagtggctcatgcctgtaatctcaacacttagggtggcagaggtgggaggaca

SEQ ID NO: 68200 - DNA, 120 bp, synthetic construct
  source 1..120: mol_type = other DNA
acatcgtggagtaaaaccagccaattacaagaagaatcatgcagtatgcttcttatttgaacttcaagaatagacaaagctaaatatgtttaaggatgtatatgtagttggtaaaaccac

SEQ ID NO: 68201 - DNA, 120 bp, synthetic construct
  source 1..120: mol_type = other DNA
cctggcctttagtgtttttttgttaagagactgggtctcggctctgtcacccaggctggagcaagtgcagtggtacaatcctagctgactgtagcctcaaattcctgggctcaagtgatc

SEQ ID NO: 68202 - DNA, 120 bp, synthetic construct
  source 1..120: mol_type = other DNA
aggattgacaagcagaaaggcatggaacttctcgacagcacattaggaaccagtagaaatgtagcagtgcctctacaatttagaattaaaatgacttccaacctataattctacacctag

SEQ ID NO: 68203 - DNA, 120 bp, synthetic construct
  source 1..120: mol_type = other DNA
tttggaactagatagagggggtggttgcacaacattgttgttggtgggaatttaaaatggtgcaagcactgtggaaaaaacagtttagcatttcctcaaaaagttaaaacaggccaggcg

SEQ ID NO: 68204 - DNA, 120 bp, synthetic construct
  source 1..120: mol_type = other DNA
agcctagaagtctgagagcagcctgggcaacatagagagaccctgtctcttaaaaaaaaaaaaaaaaaaattagctgggtgtgaagacatgtgcctgtagtcccagctacttgggaggct

SEQ ID NO: 68205 - DNA, 120 bp, synthetic construct
  source 1..120: mol_type = other DNA
atgcagataataaccaccagacctgtaatagtgaaagcctattcagtctccagttgggttttgtgacagtcagaagttggttaccagtgaggcaattttctatataagactctgtccacc

SEQ ID NO: 68206 - DNA, 120 bp, synthetic construct
  source 1..120: mol_type = other DNA
gaccagtgtgctccccctcttcctttccaatcctccaccactccacacaaatcctaatcatctctgactgttttcagatcttgcaagctctaggatctcatatttctgggaggctttcct

SEQ ID NO: 68207 - DNA, 120 bp, synthetic construct
  source 1..120: mol_type = other DNA
atgcaagctgtgaatgtttatgcatactcaggaggaagccttctcagggtcactgtttccggaaactgaccttgaaaacagacctgcatttaaatatcacagatgtactttgacgaatga

SEQ ID NO: 68208 - DNA, 120 bp, synthetic construct
  source 1..120: mol_type = other DNA
aagcagattaatagacgaatggaggaatgtttggatgtataggtatatatgtgttcattgcacacatatggaggaatgtttggatgtatatgtatatgtgttcattgcacagttttcaac

SEQ ID NO: 68209 - DNA, 120 bp, synthetic construct
  source 1..120: mol_type = other DNA
aggagattaaggtaaggccaacattttaaatcgacctatgaggaaaaagtgttttttttctccctaaaaattacctcctccagaagaaaacaaaacacaaaaaaacataaaaataaaaag

SEQ ID NO: 68210 - DNA, 120 bp, synthetic construct
  source 1..120: mol_type = other DNA
ctacttcaaaattcagctgaaacaagaaagcaattggtggcagccagaataaccaaaggtcttttttttaatatacctttttttttccgtctctttttgcctgtgtttaatcaacagcgt

SEQ ID NO: 68211 - DNA, 120 bp, synthetic construct
  source 1..120: mol_type = other DNA
acaggccactctaatgatcccattttgacttgattacatctataaagatcctatctttcaataaggttgcatccttaattactggggtaaggacttcaacgtatgttttttttggcagac

SEQ ID NO: 68212 - DNA, 120 bp, synthetic construct
  source 1..120: mol_type = other DNA
cctcaggaaacttacaattataggagaaggtgaaagggatgcaatgcacctttttcacaaggcggcaggaaggagaagtaccaggcaaagctgggaagagcccctcataaaaccattaga

SEQ ID NO: 68213 - DNA, 120 bp, synthetic construct
  source 1..120: mol_type = other DNA
ctttggttttatacattccaaggagacaaccaactgcaggtaattgcaggtaggtcagggtaggagcttgtacgtcataaggggcttttagggatcctttagttgacaattggttgagag

SEQ ID NO: 68214 - DNA, 120 bp, synthetic construct
  source 1..120: mol_type = other DNA
gcaaccaagtcagatggctgtgatctggtgggattctagttccatttgcagcctccaaagcagtcttttacctaagaacactcaggcctccaaggttaagataacagtatactccaatgc

SEQ ID NO: 68215 - DNA, 120 bp, synthetic construct
  source 1..120: mol_type = other DNA
ctggccatggccctgcatcttccctggaccagcactggcactggcatggaccctggccctgacccttcgctacttaaggccataccctggcccagccctggtcctgaccctgtcctggcc

SEQ ID NO: 68216 - DNA, 120 bp, synthetic construct
  source 1..120: mol_type = other DNA
taatcccagcacattgggaggccaaggtgggaggatcacttgagcccaggagtttgagaccagcctgggcaacgtcgtaggactccatttctacaaaacaaaacaaaaagcctagaacgg

SEQ ID NO: 68217 - DNA, 120 bp, synthetic construct
  source 1..120: mol_type = other DNA
tctctgcgttctgagatcctgatttagtaactccagggttggaacctgagttttttgtttttttgtgtgtgtgtgtgaaggcaaggtcttactctgttgctctggctggagtgcagtggt

SEQ ID NO: 68218 - DNA, 120 bp, synthetic construct; identical to SEQ ID NO: 68183
  source 1..120: mol_type = other DNA

SEQ ID NO: 68219 - DNA, 120 bp, synthetic construct
  source 1..120: mol_type = other DNA
tctacaacaaatttaaaaattagggccgggcatggtggctcaagcctgtgagcactttgggaggccaaggcaggtggatcacgagctcaagagttcgagaccagcctggccaacatggtg

SEQ ID NO: 68220 - DNA, 120 bp, synthetic construct
  source 1..120: mol_type = other DNA
ggtagctgggattacagacgtccaccaccatgcccagctaatttttgtatttttagtagagacaggattcactacctgttgaccaggctggtctcgaactcctgacctcgggtgatccac

SEQ ID NO: 68221 - DNA, 120 bp, synthetic construct
  source 1..120: mol_type = other DNA
ccactgggcctgcagagaagcagcaaccagaggctctgcccttcactggctgaccctgggacctgcccttcaaaatcaggccttctccttgaccagacgaggtggctcatgcctggaatc

SEQ ID NO: 68222 - DNA, 120 bp, synthetic construct
  source 1..120: mol_type = other DNA
ctctcatttgcttctgttgctttttttttttttttttttgagatagaatctcgctctgtcacccaggctggagtgcagtggcatgatctggactcactgaaacctctgcctcccaggttc

SEQ ID NO: 68223 - DNA, 120 bp, synthetic construct; identical to SEQ ID NO: 68168
  source 1..120: mol_type = other DNA

SEQ ID NO: 68224 - DNA, 120 bp, synthetic construct
  source 1..120: mol_type = other DNA
tgaaaccccgtctctactaaaactacaaaaaaaaaaaaaaaaaattagccaggcatggtggcgcatgcctgtagtcttagctacttgggaggcgaaggcaggggaatcgcttgaacccag

SEQ ID NO: 68225 - DNA, 120 bp, synthetic construct
  source 1..120: mol_type = other DNA
tggacaaggtatgtgctttggctgactgaatgttagtggacatgagagaagcaatggcttaaaatgtacttccagaactggagtttccttgtgattctatcactgtgacagaaacacatt

SEQ ID NO: 68226 - DNA, 120 bp, synthetic construct; identical to SEQ ID NO: 68169
  source 1..120: mol_type = other DNA

SEQ ID NO: 68227 - DNA, 120 bp, synthetic construct; identical to SEQ ID NO: 68170
  source 1..120: mol_type = other DNA

SEQ ID NO: 68228 - DNA, 120 bp, synthetic construct
  source 1..120: mol_type = other DNA
tacactgagcacaaggactctgtggggcccaggagcaggtagtcacccctttggggtccacaacacccggctgtccccagacttgtgtccagggaagatagtgttgagggccctcaagga

SEQ ID NO: 68229 - DNA, 120 bp, synthetic construct
  source 1..120: mol_type = other DNA
tgtctgggaagaagcacagaccaccaggacccctgttctcctcctcagatccccttcctgccacctcttcccactccggggactcagcccaggacacctcgctgattcctgcccccttca

SEQ ID NO: 68230 - DNA, 120 bp, synthetic construct
  source 1..120: mol_type = other DNA
tatatatgtgccagattttcttaatccaggctatccttgacggacatttgggttggttccaagtctttgctattgtgaatagtgcctcaataaacatatatgtgcatgtgtctttatagt

SEQ ID NO: 68231 - DNA, 120 bp, synthetic construct
  source 1..120: mol_type = other DNA
ttctgtctctctgaatccctggcaaatggcaatggctagtgactttgcattcacctatcagaaaaacatgaatccggacacacttccgggagcgtgggacgtggtaggaatttactggat

SEQ ID NO: 68232 - DNA, 120 bp, synthetic construct
  source 1..120: mol_type = other DNA
acccagaagtcagaggttgcagtgagccgagatcatgtcactgcactccagcctggatgacagagagagaagctctcaaaaaaataaaaataaaaatacagccagagatcgatttaactg

SEQ ID NO: 68233 - DNA, 120 bp, synthetic construct
  source 1..120: mol_type = other DNA
tcatttaaataagtttcattatatactgtataaataattccaatgaaaaagaaaacaggccaggcatgatggctcacgcctgtaatcccagcactttgggaggccaaggcaggtggatta

SEQ ID NO: 68234 - DNA, 120 bp, synthetic construct
  source 1..120: mol_type = other DNA
atttggcccaggtccttttttttccccacagagcatcttgctgtacagaacacacgttaggaaatgctaatgtttggattattcctggaagagactattactaggaatccctttcccaaa

SEQ ID NO: 68235 - DNA, 120 bp, synthetic construct
  source 1..120: mol_type = other DNA
tacactggccttttctactctggccttgcccttccctggtcttgccttgccctggccttgccctgccctggccttggctttgccttatcctggtcctggttctgccctgaccctggcctt

SEQ ID NO: 68236 - DNA, 120 bp, synthetic construct
  source 1..120: mol_type = other DNA
cctttccaaattaatatttatttttagctctattagatttttctcagtgtaacaaacgtttattcctatgtaattaagggcgtatttcctgtacagaatattcatattacctaattgaaa

SEQ ID NO: 68237 - DNA, 120 bp, synthetic construct
  source 1..120: mol_type = other DNA
attttgagatgaaatggagagtggaaatgatgagattaaatgatgagatgaaatgacaaagttgaaaagaaattgaaaggagatgagatgagatgaaatgagatgaaatgatgagatgat

SEQ ID NO: 68238 - DNA, 120 bp, synthetic construct
  source 1..120: mol_type = other DNA
aatatatatgaatgaaaaggacagcataagtcatggatatataaaatatatattatatatatacacgtataatcttatatctgtagtttttgatacctagttcaaaggaccatgcatgat

SEQ ID NO: 68239 - DNA, 120 bp, synthetic construct
  source 1..120: mol_type = other DNA
tgagtctctgtggggattagttctgtatttccagaagtcacataaatagagggtggtagaggggtcaaagtggtctccttcatagaactgattagataaatatttaacttacttaggagt

SEQ ID NO: 68240 - DNA, 120 bp, synthetic construct
  source 1..120: mol_type = other DNA
aatcacatggagatcttgtgaaaaggcagaatttgattagtttaggggtgatacctgtggcattgcatttctaacacactctcaggagatactgttgcagaagccagtacctctactaag

SEQ ID NO: 68241 - DNA, 120 bp, synthetic construct
  source 1..120: mol_type = other DNA
ctcacttccttttgtatctttagactggggaagacacaacagcatcaaggatctaccagctatgtagaaagtaacttctactgcagcccagtgttctgtgtgtcatttctattgaatcac

SEQ ID NO: 68242 - DNA, 120 bp, synthetic construct
  source 1..120: mol_type = other DNA
tcaatcccttcagccctgtgagtggtatgcattcacttacttaatatcttcatatttgacttagtatcttcacattggaagacagtgctattggctttggaatcccatctacaaggattt

SEQ ID NO: 68243 - DNA, 120 bp, synthetic construct
  source 1..120: mol_type = other DNA
tggatgtgcaccaccatgcctggataatttttgtatttttttggtagagatggggtttcaccatgtagtccagggtggtctcaaactcctgatctcaagtaatccacctgcctcgtcttc

SEQ ID NO: 68244 - DNA, 120 bp, synthetic construct; identical to SEQ ID NO: 68241
  source 1..120: mol_type = other DNA

SEQ ID NO: 68245 - DNA, 120 bp, synthetic construct; identical to SEQ ID NO: 68240
  source 1..120: mol_type = other DNA

SEQ ID NO: 68246 - DNA, 120 bp, synthetic construct
  source 1..120: mol_type = other DNA
ccatctgtacatcaccatcatcaaagaccaaaagtagataaaaccacaaagatggggaaaaaacagaacagaaaaactggaaaccctaaaacgcagagcgcctctcctcctccaaaggaa

SEQ ID NO: 68247 - DNA, 120 bp, synthetic construct
  source 1..120: mol_type = other DNA
tgaaggaagcgctaaacatggaaaggaacaactggtaccagccgctgcaaaatcatgccaaaatgtaaagaccatcgagactaggaagaaactgcatcaactaatgagcaaaatcaccag

SEQ ID NO: 68248 - DNA, 120 bp, synthetic construct; identical to SEQ ID NO: 66407
  source 1..120: mol_type = other DNA

SEQ ID NO: 68249 - DNA, 120 bp, synthetic construct
  source 1..120: mol_type = other DNA
ggacgcacctggaaaatcgggtcactcccacccgaatattgcgcttttcagaccggcttaagaaacggcgcaccacgagactatatcccacacctggctcggagggtcctacgcccacgg

SEQ ID NO: 68250 - DNA, 120 bp, synthetic construct
  source 1..120: mol_type = other DNA
ctcgagaactacgtgaagaatgcagaagcctcaggagccgatgcgatcaactggaagaaagggtatcagcaatggaagatgaaatgaatgaaatgaagcgagaagggaagtttagagaaa

SEQ ID NO: 68251 - DNA, 120 bp, synthetic construct
  source 1..120: mol_type = other DNA
attttgcagcggctggtaccggttgttcctttccatgtttagcgcttccttcaggagctcttttagggcaggcctggtggtgacaaaatctctcaacatttgcttgtctataaagtattt

SEQ ID NO: 68252 - DNA, 120 bp, synthetic construct; identical to SEQ ID NO: 66407
  source 1..120: mol_type = other DNA

SEQ ID NO: 68253 - DNA, 120 bp, synthetic construct
  source 1..120: mol_type = other DNA
gcatcactttcttttttataattgcatatgaccttattcccatcagagaaatatgtgtgtgtgtggtaccaaaacagacagtatttcacttctaactatatgtgtgtgtttttgtatgtg

SEQ ID NO: 68254 - DNA, 120 bp, synthetic construct; identical to SEQ ID NO: 27009
  source 1..120: mol_type = other DNA

SEQ ID NO: 68255 - DNA, 120 bp, synthetic construct; identical to SEQ ID NO: 27010
  source 1..120: mol_type = other DNA

SEQ ID NO: 68256 - DNA, 120 bp, synthetic construct
  source 1..120: mol_type = other DNA
tgctcaaggaaataaaagaggacacaaacaaatggaagaacattccatgctcctgggtaggaagaatcaatatcgtgaaaatggccatactgcccaaggtaatttacagattcaatgcca

SEQ ID NO: 68257 - DNA, 120 bp, synthetic construct
  source 1..120: mol_type = other DNA
gtcatttgggtatatacccagtaatgggatggctgggtcaaatggtatttctagttctagatccctgaggaatcgccacactgacttccacaatggttgaactagtttacagtcccacca

SEQ ID NO: 68258 - DNA, 120 bp, synthetic construct
  source 1..120: mol_type = other DNA
aaatgaaatggaaatgagatgagatttgatgaaatgatgagatgatatgaaatgatgagatgagatgggatgagatgaaatgagataaaatgatgagatgaaatgatgaaatgatgagat

SEQ ID NO: 68259 - DNA, 120 bp, synthetic construct
  source 1..120: mol_type = other DNA
taatatttgtcatttttgttgtcgaaatcttttacttccttggttaaatttatttctaagtacatttttgtagctattgtaaaaggaattgctttcttaatttcttgtttcagctagttt

SEQ ID NO: 68260 - DNA, 120 bp, synthetic construct
  source 1..120: mol_type = other DNA
tatatattccatatatatatattccatatatatatattccatatatatatattccatatatatataatttgtgcatgtgtgtgtgacaaagacaggtttctccctgttgcccaggctagt

SEQ ID NO: 68261 - DNA, 120 bp, synthetic construct
  source 1..120: mol_type = other DNA
atgcttggatagaaagcaataatggagctatgttcaaagttctctgggagcactatcatgtaggagagaaaccaagagttttataaattggatgttattaaactacactaagaaacaggg

SEQ ID NO: 68262 - DNA, 120 bp, synthetic construct
  source 1..120: mol_type = other DNA
acccatcagactaacagcggatctctcggaagaaaccctacaagccagaagagagtgggggccaatattcaacattcttaaagaaaagaattttcaacccagaatttcatatccagccaa

SEQ ID NO: 68263 - DNA, 120 bp, synthetic construct
  source 1..120: mol_type = other DNA
tgcaccaagcagacctaatagacatctacagaactctccaccccaaatcaacagaatatacattcttttcagcaccacaccacacctattccaaaattgaccacatagttggaagtaaag

SEQ ID NO: 68264 - DNA, 120 bp, synthetic construct
  source 1..120: mol_type = other DNA
ttacagtcccaccaacagtgtaaaagtgttcctatttctccacatcctctccagcacctgttgtttcctgactttttaatgattgccattctaactggtgtgagatgatatctaatagtg

SEQ ID NO: 68265 - DNA, 120 bp, synthetic construct; identical to SEQ ID NO: 67123
  source 1..120: mol_type = other DNA

SEQ ID NO: 68266 - DNA, 120 bp, synthetic construct
  source 1..120: mol_type = other DNA
ttcacagctgaattctaccagaggtacaaggaggaactggtaccattccttctgaaactattccaatcaatagaaaaagagggaatcctccctaactcattttatgaggccagcatcatt

SEQ ID NO: 68267 - DNA, 120 bp, synthetic construct
  source 1..120: mol_type = other DNA
gctgctggatttggtttgccagtattttattgaggatttttgcatcaatgttcatcaaggatattggtctaaaattctcttttttggctgtgtctctgcccggctttggtatcagaatga

SEQ ID NO: 68268 - DNA, 120 bp, synthetic construct; identical to SEQ ID NO: 48995
  source 1..120: mol_type = other DNA

SEQ ID NO: 68269 - DNA, 120 bp, synthetic construct
  source 1..120: mol_type = other DNA
acttatgaagcttagtttggctggaaatgaaattctgggttgaaaattcttttctttaagaatgttgaatattggcccccactctcttctggcttgtagggtttctgccgagagatctgc

SEQ ID NO: 68270 - DNA, 120 bp, synthetic construct
  source 1..120: mol_type = other DNA
ctcttttcctaattgaataccctttatttccttctcctgcctgattgccctggccagaacttccaacactatgttgaataggagcggtgagagagggcatccctgtcttgcgccggtttt

SEQ ID NO: 68271 - DNA, 120 bp, synthetic construct
  source 1..120: mol_type = other DNA
tttctttattagtcttgctagcggtctatcaattttgttgatcctttcaaaaaatcagctcctggattcattgattttttgaagggttttttgtgtctctatttccttcagttctgctct

SEQ ID NO: 68272 - DNA, 120 bp, synthetic construct
  source 1..120: mol_type = other DNA
cagaaagtcaacaaggatacccaggaattgaactcagctctgcaccaagcagacctaatagacatctacagaactctccaccccaaatcaacagaatatacattcttttcagcaccacac

SEQ ID NO: 68273 - DNA, 120 bp, synthetic construct
  source 1..120: mol_type = other DNA
agtatctttgtggcgttctctgtatttcctgaatctgaacgttggcctgccttgctagattggggaagttctcctggataatatcctgcagagtgttttccaacttggttccattctcca

SEQ ID NO: 68274 - DNA, 120 bp, synthetic construct
  source 1..120: mol_type = other DNA
tgaaatattcagcatggtgttagagccaatatttcatttgtggctttagcctttgttttgtttccacgctggaccttccttatgacacaaacactgttggcactgccaacagatctcaca

SEQ ID NO: 68275 - DNA, 120 bp, synthetic construct
  source 1..120: mol_type = other DNA
tcactgccaccttggtttctgaattggttctgtagtgagattcatgggttttacttgctaaggtgaccaaaggtcccaatttgccaagaaaaatcccagtttataccagctgtactggtg

SEQ ID NO: 68276 - DNA, 120 bp, synthetic construct
  source 1..120: mol_type = other DNA
agtattggaagccttacctacacattaaattaagccttcaaatttttttttttttttttttaatttttttttttttattatactctaagttttagggtacatgtgcacattgtgcaggtt

SEQ ID NO: 68277 - DNA, 120 bp, synthetic construct
  source 1..120: mol_type = other DNA
gtaggttgcgaaaattttctcccatgttgtaggttgcctgttcactctgatggtagtttcttttgctgtgcagaagctctttagtttaattagatcccatttgtcaattttggcttttgt

SEQ ID NO: 68278 - DNA, 120 bp, synthetic construct; identical to SEQ ID NO: 59696
  source 1..120: mol_type = other DNA

SEQ ID NO: 68279 - DNA, 120 bp, synthetic construct
  source 1..120: mol_type = other DNA
tcgttgatctgtctaatgttgacagtggggtgttaaagtctcccattattaatgtgtgggagtctaagtctctttgtaggtcactcaggacttgctttatgaatctgagtgctcctgtat

SEQ ID NO: 68280 - DNA, 120 bp, synthetic construct
  source 1..120: mol_type = other DNA
ctccacatcactttcaggtacaccaatcagacgtagatttggtcttttcacatagtcccatatttcttggaggctttgctcatttctttttattcttttttctctaaacttcccttctcg

SEQ ID NO: 68281 - DNA, 120 bp, synthetic construct
  source 1..120: mol_type = other DNA
agaaacggcgcaccacgagactatatcccacacctggctcagagggtcctacgcccacggaatctcgctgattgctagcacagcagtctgagatcaaactgcaaggcggcaacgaggctg

SEQ ID NO: 68282 - DNA, 120 bp, synthetic construct
  source 1..120: mol_type = other DNA
cggagaaaaccacatagacattcaactgcaaagcagagaaacttgactattttctgcaattttaaagtgtatattgaataaaaccatctttttattttcttttttgctcactggcaaata

SEQ ID NO: 68283 - DNA, 120 bp, synthetic construct
  source 1..120: mol_type = other DNA
cttcatatacccaacaattgctctgtttttttgctggagcatgaaccttagctaaagccatccacaaattatggtcccatggattttcctggagagaaaaggaaaggattagggcagcag

SEQ ID NO: 68284 - DNA, 120 bp, synthetic construct
  source 1..120: mol_type = other DNA
tttggtaccagtaccatgctgttttggttactgtagccttgtagtatagtttgaagtcaggtagtgtgatgcctccagctttgttcttttggcttaggattcccgtggcgatgcgggctc

SEQ ID NO: 68285 - DNA, 120 bp, synthetic construct
  source 1..120: mol_type = other DNA
taaatgtaatccagcatataaacagagccaaagacaaaaaccacatgattatctcaatagatgcagaaaaagcctttgacaaaattcaacaacccttcatgctaaaaactctcaagaaat

SEQ ID NO: 68286 - DNA, 120 bp, synthetic construct
  source 1..120: mol_type = other DNA
tgagggtaacccgacctttctctctggttgcccttaacattttttccttcatttcaactttggtgaatctgacaattatgtgtcttggagttgctcttctcgaggagtatctttgtggcg

SEQ ID NO: 68287 - DNA, 120 bp, synthetic construct
  source 1..120: mol_type = other DNA
ggctgctttgtttacctaagcaagcctgggcaatggcgggcgcccctcccccagcctcgttgccgccttgcagtttgatctcagactgctgtgctagcaatcagcgagactccgtgggcg

SEQ ID NO: 68288 - DNA, 120 bp, synthetic construct
  source 1..120: mol_type = other DNA
cccacctccatcacagcacgcatcacccccccaccccacctccatcacagcacccatcaccccctcaccccacctccatcacagcatgcatcacattggaaagtacttgctgatttccct

SEQ ID NO: 68289 - DNA, 120 bp, synthetic construct
  source 1..120: mol_type = other DNA
acccaccctatctgactatgatttctctgcctcctgtctctattaataatgtgcccaaggtggttggggcatggcctagttttatacattttagggagacatgagatatcaataaagtac

SEQ ID NO: 68290 - DNA, 120 bp, synthetic construct
  source 1..120: mol_type = other DNA
aaattgttaacagtggttaccactgaagaaaaagacaaggggagaaggaaacactttcggttttcacaattctaaattgttggaactgtttttataattaataaaccttgtattagggaa

SEQ ID NO: 68291 - DNA, 120 bp, synthetic construct
  source 1..120: mol_type = other DNA
gacatattattcatgaataatgaacgactgctgtagcccagagaaatgatggtaagaactgattcccagcctttcattcttgtcttttagtgtcaacagagtaaagaaaagtgatggcct

SEQ ID NO: 68292 - DNA, 120 bp, synthetic construct
  source 1..120: mol_type = other DNA
gctttacaatgtcaggatcctctttaatcacacagagataggaggagaaactttagtgtcaagcatctacccagcctagttagaggtataggaaactgtgctagccatctccaaaatgtt

SEQ ID NO: 68293 - DNA, 120 bp, synthetic construct
  source 1..120: mol_type = other DNA
gaatgttcccaacacaaagatatgataaatgtttaagatgagggatatgctaattaccctgatctgatcattatacatgatatgtatcgaagcatcactgtgtactctatgaatatatac

SEQ ID NO: 68294 - DNA, 120 bp, synthetic construct
  source 1..120: mol_type = other DNA
tcatttgacaaaattcatcatcatatatggtacaaacttttggcaaactgtgaataatttatccccaactgataaaggatacctatctaaaaaaaaaaaaaaaaaaaaaaaagctgtagc

SEQ ID NO: 68295 - DNA, 120 bp, synthetic construct
  source 1..120: mol_type = other DNA
ggctttggagtcagaaaggcctcagcttaaattagtggctcttaactctttgagaatcacagacccctttgagaatctgtccaaagttttaggacttttactctgagaaacagacaaaag

SEQ ID NO: 68296 - DNA, 120 bp, synthetic construct
  source 1..120: mol_type = other DNA
tctggagcctgacgcaggagaattgcttgaacccaggaggcggaggctgcagtgagatgagatcacatactgcactccagtctgggtgacacgcgagaccctgctgaaaaaaaaaaaatt

SEQ ID NO: 68297 - DNA, 120 bp, synthetic construct
  source 1..120: mol_type = other DNA
aatagtacctaccttatgtgagaatgaaacaggctgatgcatgtgaaatgggttctgagcatacagtaggcacttaataaatggcactattctgtgccattccacactttaaaaaactca

SEQ ID NO: 68298 - DNA, 120 bp, synthetic construct
  source 1..120: mol_type = other DNA
gcatgagaatcatttgaacctaggaggcagtgagccaagatggcaccactgcattccagcctgggcaacaatgtgagacccccatttcaaaaaaaaaaaaaattgccttatcttctgaat

SEQ ID NO: 68299 - DNA, 120 bp, synthetic construct
  source 1..120: mol_type = other DNA
ctgaagagcacctggatggcagacacctgaggagccaggtgcctgaaacttcctccaccttcttgaggagggccaaagcccaggtgctggctggacaaccccttctggctgcctaagcag

SEQ ID NO: 68300 - DNA, 120 bp, synthetic construct
  source 1..120: mol_type = other DNA
gatctctgctcattgcaacctccgcctcctgggttcaagcagttctcctacctcagcctcccgagtagctggaattacaggcacctgccaccacacctggctaattttttgtatttttag

SEQ ID NO: 68301 - DNA, 120 bp, synthetic construct
  source 1..120: mol_type = other DNA
gagcatttagtgtcactccacagagggggaaactcggcccagagaagtaaggtgactctccccagtcacagagctggtcagcagtaggatgggaagctagtcccttgctgtctgactccc

SEQ ID NO: 68302 - DNA, 120 bp, synthetic construct
  source 1..120: mol_type = other DNA
agagaatctcaaatttctgacccgagtagctgaaaggacagagttgtcattaactgagatttttttttaaaagtaagccaacagcgggcgtggtggctcacgcctgtaattattctagca

SEQ ID NO: 68303 - DNA, 120 bp, synthetic construct
  source 1..120: mol_type = other DNA
tcttgccactggatcagagatttaagtgtaaggcctcaaaccataagaactctaaaagaaaacctaggaaataccattcaggacattggccttgggaaacaatctatgactaggtcgtcc

SEQ ID NO: 68304 - DNA, 120 bp, synthetic construct
  source 1..120: mol_type = other DNA
tgagggatgaaagactacatattaggtacagtgtacactgctcaggtgacggacccactagaatctcagaacacatccatgtaactgaaaaccacctgtacccaaaaactgttgaaataa

SEQ ID NO: 68305 - DNA, 120 bp, synthetic construct
  source 1..120: mol_type = other DNA
gattacatgcatgagccaccatgccaggctgtcatgatatttcaataaagtgatgtagaatcatgtaggccatgaccttccttaggtggagcagaaaatgtcacctccatgtaaaaaaag

SEQ ID NO: 68306 - DNA, 120 bp, synthetic construct
  source 1..120: mol_type = other DNA
ctcaactgatcctcccaccttagcctcctgagtaatcgggaatacagacaccacgccaggctaattttttttatttttattttttttgtagaaacagggttttgctatgttgcccaggct

SEQ ID NO: 68307 - DNA, 120 bp, synthetic construct
  source 1..120: mol_type = other DNA
tgtgggtgagggtgtgggtgggggtgtgggcgagggtgtgggtgggggtgtgagggtgggggtgtgtgggtgagggtgtgggtgggggtgtgtgggtgagggtgtgggtgggggtgtgtg

SEQ ID NO: 68308 - DNA, 120 bp, synthetic construct
  source 1..120: mol_type = other DNA
catctactcaaaatctttttatccaccctcttctttccctttctttttttcccaactgtatttttgcaaactttctctccctcctgctcacccccgttccccccaccaccctctctttcc

SEQ ID NO: 68309 - DNA, 120 bp, synthetic construct
  source 1..120: mol_type = other DNA
gctttcctaaatcggccggcggagctactctgttcccagctcagcagatcaagagaagggggagctggatgctggagcctgcaacactgtggctcgcctcgctacagttggcggtggtga

SEQ ID NO: 68310 - DNA, 120 bp, synthetic construct
  source 1..120: mol_type = other DNA
acaccctcacttgcctggccctgccacaccccacccttcctctaaacctactggggcagcagcttcccctacgttccgcctgctccacctcctcctagagttgggtcacacacagtttcc

SEQ ID NO: 68311 - DNA, 120 bp, synthetic construct; identical to SEQ ID NO: 68305
  source 1..120: mol_type = other DNA

SEQ ID NO: 68312 - DNA, 120 bp, synthetic construct
  source 1..120: mol_type = other DNA
ctttcatccctcatccccctcccatcctttcctctctgagtccccagcgtcaattatatcattcttaggcctttttatcggtgtagcttatctctaacttttaagtgagaacatatgatt

SEQ ID NO: 68313 - DNA, 120 bp, synthetic construct
  source 1..120: mol_type = other DNA
tatactcatgatcaccaggatttgaattataaaatgggccattaacatcccacttattccttaaataattaggtcgttgtggccaggtgcagtgcctcaggtctgtaatcccagcacttt

SEQ ID NO: 68314 - DNA, 120 bp, synthetic construct; identical to SEQ ID NO: 68302
  source 1..120: mol_type = other DNA

SEQ ID NO: 68315 - DNA, 120 bp, synthetic construct
  source 1..120: mol_type = other DNA
agcaaaggggcggagaaaaatcctgcatcattgtcggaacttgctgaggctgtttaaccttggcaaaataaactttccacgttgattgagatctgtctcaaatactttggattcacaact

SEQ ID NO: 68316 - DNA, 120 bp, synthetic construct; identical to SEQ ID NO: 68289
  source 1..120: mol_type = other DNA

SEQ ID NO: 68317 - DNA, 120 bp, synthetic construct
  source 1..120: mol_type = other DNA
tcaaagctcactgcagcctcaaatgcctgggctcaagtgatccttccacttcagcctcctgagtatctgggattaaggaatgtgttgtttaattttcatgtatttgtggatttttcagca

SEQ ID NO: 68318 - DNA, 120 bp, synthetic construct
  source 1..120: mol_type = other DNA
aagacttggttgaacctgggaggcggaagttgcagtgagccaagatcgcactgcactccagcctgggcaataggagcaaaacttcatctcaaaaaaaaattaaaaaataaaaaatataca

SEQ ID NO: 68319 - DNA, 120 bp, synthetic construct
  source 1..120: mol_type = other DNA
aaaacaaaaaatccatttttatttaaaaaaaaaaacaaaacctccagaccccttcttaacacctcttccctcactccacacccgctagcccttttcatgggacaagctcaccagctggtc

SEQ ID NO: 68320 - DNA, 120 bp, synthetic construct
  source 1..120: mol_type = other DNA
tgttgtgttggctggaatgacaagtcagactgataggtagtgaagtttgtagtatcatctcttttgctgagatcctggtatttggatggcgtgagatccagagtaggatgagccatgcca

SEQ ID NO: 68321 - DNA, 120 bp, synthetic construct
  source 1..120: mol_type = other DNA
ttcagaggagaaatatgagatctgctttccgtttgcagtcagtttgggctcatgatggataagtgtgtgtgtgtgtgaacaagtggagcataactcagactgcacagcagcgggtgaagg

SEQ ID NO: 68322 - DNA, 120 bp, synthetic construct
  source 1..120: mol_type = other DNA
tcagttgcatgtatattaggttgtttgaagttgttccatggtttactggcattcctttcattttttaagccatttttcctttgtgtgatttattttggatagtttctattgctgtgtctt

SEQ ID NO: 68323 - DNA, 120 bp, synthetic construct
  source 1..120: mol_type = other DNA
ctggctttttggttgtgtcaggtaagagtaaatccataccctgtgacaccatcttgctagaagtagaagtgttacctttttaatatattatttttccttcaaaacccacattagaaggaa

SEQ ID NO: 68324 - DNA, 120 bp, synthetic construct
  source 1..120: mol_type = other DNA
ccactgtcttctggcttgtaggattatctctgctcctccccctttctctgagtgagaaaggtgggaaataaaataatgaagccgtgagtaggtgaggtgttagggagacagcttgccagg

SEQ ID NO: 68325 - DNA, 120 bp, synthetic construct
  source 1..120: mol_type = other DNA
cctagctgtgccaatcatagcattccacctccacagcaatagtaattggtccaggcatgagcacatgactcaaaccaggccaatcacatccttttctgagattttttatttaaaattgga

SEQ ID NO: 68326 - DNA, 120 bp, synthetic construct
  source 1..120: mol_type = other DNA
attgatttttttttttttttttttgagatggagtctcgctctatcgcccaggcaggagtgcagtggtgcaatctcaactcactgcaacctccgcctttggggttcaagtgattcttctgc

SEQ ID NO: 68327 - DNA, 120 bp, synthetic construct
  source 1..120: mol_type = other DNA
ataaggcacttgttctcaaccagggttgagggtgtcaaagggggcaaaaattagttcttgtggagggagtgaataaatcttaggcaaatctctaaataagattcttttaaggccaggctt

SEQ ID NO: 68328 - DNA, 120 bp, synthetic construct
  source 1..120: mol_type = other DNA
gggtcatttgtctgtagagtctctcacagtgtggattttgtagattgcattcttgtggtatcatttaacatgttcctctgtgctttaatttgttgctcggcttttattggagtatggctg

SEQ ID NO: 68329 - DNA, 120 bp, synthetic construct
  source 1..120: mol_type = other DNA
cgggaggctgaggcaggagaatcgcttgaccccaggaggcggaggttgcagtgagtcaagatcgtgccactgggcaacaagggtgaaactccatctcaaaaaaaaaaaaaaaaaaaaaaa

SEQ ID NO: 68330 - DNA, 120 bp, synthetic construct
  source 1..120: mol_type = other DNA
tccctatctgtatttatgagcattattggtctgtagttttcttttctcacaatgtctttttctggttttggtatctgggtaatgcttgcttcatggaacaaattgggggaatatttgctc

SEQ ID NO: 68331 - DNA, 120 bp, synthetic construct
  source 1..120: mol_type = other DNA
ttaagatgtgattattttcttttcttcttttttcttttgagacaggttcttgctctgttacccaaactggagtacagctcactgtagcctcaacctcctgggctaaagcgatcctcccat

SEQ ID NO: 68332 - DNA, 120 bp, synthetic construct
  source 1..120: mol_type = other DNA
attaattgtccccctttattacaaaataaacttttttatcttataatagtttttgctctgaagtataccttgtctaatattaatatggccactccagctatctttgaactgtgttaacat

SEQ ID NO: 68333 - DNA, 120 bp, synthetic construct
  source 1..120: mol_type = other DNA
ttttagggtttataaggtatatgtttatttattgcaatctatcttcaagcaagtactattataccacttcatgtacagtataagcttagaataatgtacttctgttgcctccttcctatt

SEQ ID NO: 68334 - DNA, 120 bp, synthetic construct
  source 1..120: mol_type = other DNA
ctcactcctgttatttggtgactcaaattatatacataataggctgcttgaccttgtcccacaactcactgatacttttttaaaattaatagactttattttttagagcagttttagatg

SEQ ID NO: 68335 - DNA, 120 bp, synthetic construct
  source 1..120: mol_type = other DNA
accatttgttgaaaacactaccccttgctccattgcctttgctacccttgaattgcctttgctcctatgtcaaagatcagttgactacttgtataggtctatttctggtctctgttctgt

SEQ ID NO: 68336 - DNA, 120 bp, synthetic construct
  source 1..120: mol_type = other DNA
acttcgttatcttcaggcttatcacatcaaaggtttacttgcaaaattggacctttgttcttattcagtaaatccgtgttacaagatgagccaggatttagatatgtaaatatatgtaac

SEQ ID NO: 68337 - DNA, 120 bp, synthetic construct
  source 1..120: mol_type = other DNA
attccacttagccatggcatgtagttttttaaaaatacattgttgaatttgatttgctaatgttttgctgaagatttttgtatttatgttcttgaaagatgttgatctgaagtcttcctt

SEQ ID NO: 68338 - DNA, 120 bp, synthetic construct
  source 1..120: mol_type = other DNA
tcttacatctgtgtcagttcttggtcagtttgatttattgattattgtcctcattatagtttgtgtttttgccacctctatgcatgcttgataatccctgatgattgaatgccatatgtg

SEQ ID NO: 68339 - DNA, 120 bp, synthetic construct
  source 1..120: mol_type = other DNA
taatacggtgattggggaaaattacagggtttgtcttattttgcatctctcagagatcactgtcctttgttgttgtctggtgtccagtgtcttgaaaactgctatttcattattttattt

SEQ ID NO: 68340 - DNA, 120 bp, synthetic construct
  source 1..120: mol_type = other DNA
tgtgtgtgtgtgtgtgtgtgcacgcacgcctgccatgtttatatatttgctggaccatttgaaactaaattgtagaggtatcaggacatttcaccactaaatcactaactacattggcct

SEQ ID NO: 68341 - DNA, 120 bp, synthetic construct
  source 1..120: mol_type = other DNA
atgcccaaacactcatcaggcaagacaggtctgtaggcaaatattgatccctgtgcggctgcgggcggtgagggggcagcaggtgtggcacagagtcctgtttacctgccgctgagcctg

SEQ ID NO: 68342 - DNA, 120 bp, synthetic construct
  source 1..120: mol_type = other DNA
tggacatggatgtagtggtgtccaatgtggggtcagccctagaggagagacagagagagagacagaaaagtgagagtcctgacccttacgattaacatgggatctgcctgcaaatgctgt

SEQ ID NO: 68343 - DNA, 120 bp, synthetic construct
  source 1..120: mol_type = other DNA
ggagcgtggcagagggaatgatggccatggtgacactgaggagggagcgtggcagagggaatgatggccatggctgacattgaggagggagctggcagagggaatgatggccatggtgat

SEQ ID NO: 68344 - DNA, 120 bp, synthetic construct
  source 1..120: mol_type = other DNA
aggagggagcgtggcagagggaacgatggccgtggctgacactgaggagggagcgtggcagagggaacgatggccgtggctgacactgaggagggagcgtggcagagggaacgatggcca

SEQ ID NO: 68345 - DNA, 120 bp, synthetic construct
  source 1..120: mol_type = other DNA
gccgtggccaagtggacattcggacccagagcggccagatcttgtaatttccaagaaagccagaaacccagatttttatataaaatttctgaaatgttgaaagttggcaactaattgtct

SEQ ID NO: 68346 - DNA, 120 bp, synthetic construct
  source 1..120: mol_type = other DNA
catgagccaccgcgcccggcctcaatttatcttttatacttgcccagggccaaagggaagtcttacattagtcaaactcaccagattcagtaaaaactcaaccctaaaataattatttga

SEQ ID NO: 68347 - DNA, 120 bp, synthetic construct
  source 1..120: mol_type = other DNA
accatcccgcctggccaagtttttattttaacaactactgtgtgtgagagaagggggtgggctagagtagggtaatatgtacacgctatggctgaaacagaaaaatggtaactttatttt

SEQ ID NO: 68348 - DNA, 120 bp, synthetic construct
  source 1..120: mol_type = other DNA
tctctaaggtaagtctttgggagtgcatctgaactctgcatgggaagctctgtctcctgcattctgaggcctcgaggcaccttcttgactccacatactgagtgtgaggccaggaagaga

SEQ ID NO: 68349 - DNA, 120 bp, synthetic construct
  source 1..120: mol_type = other DNA
ttctacgtggacctcaggcctctgcctttcttccttgctgcttctattcctctttcttccagcaacggtatccctgattttcctctgactactccacactaattttttttttttttttga

SEQ ID NO: 68350 - DNA, 120 bp, synthetic construct
  source 1..120: mol_type = other DNA
ggagatgacccacagttcccatggggcgagttcttcctcaccgcaacaaggaacagacccaacttgtatcactcagtattatataatgaatgataatggcatcactcagtattatataat

SEQ ID NO: 68351 - DNA, 120 bp, synthetic construct
  source 1..120: mol_type = other DNA
ataatgataacggcgtcactcagtattatataatgaatgataacggcgtcactcagtattatataatgaatgataacggcgtcactcagtattatataatgaatgataacggcgtcactc

SEQ ID NO: 68352 - DNA, 120 bp, synthetic construct
  source 1..120: mol_type = other DNA
tatcactcagtattatataatgaatgataacggcgtcactcagtattatataatgaatgataacggcgtcactcagtattatataatgaatgataacggcgtcactcagtattatataat

SEQ ID NO: 68353 - DNA, 120 bp, synthetic construct
  source 1..120: mol_type = other DNA
atggcgtcactcagtattatataatgaatgataatggtatcgttcagtattagagaactgcaagttaaaacaatgagatttcactacatgttaaaatttgcagttacaggtgtgttgcag

SEQ ID NO: 68354 - DNA, 120 bp, synthetic construct
  source 1..120: mol_type = other DNA
gtggggagttcgtcatgctggtgtcaacagcaagtgaggtgggttccgttcttcccagatgccaatgattgcggcggaaaggcaacggtataaatacccttgatagccttttctccttaa

SEQ ID NO: 68355 - DNA, 120 bp, synthetic construct
  source 1..120: mol_type = other DNA
tttaagggtagtaatatagtttgtatttatgtcctcgtcaaaatttacgttgaaatgtaattcccaatattggaggtggggcctggtgggaggttattggatcatgaggatggatttctc

SEQ ID NO: 68356 - DNA, 120 bp, synthetic construct
  source 1..120: mol_type = other DNA
tgggcgacgcagccagagcctgatgactgaagagtgagcaggcggtggggcttcctaggaggcagtgaggagaggcagcccagacccagtgagatcacacctaggatgtccccaagaaac

SEQ ID NO: 68357 - DNA, 120 bp, synthetic construct
  source 1..120: mol_type = other DNA
aagtgctgaagctgagagactgggtcttggtggaccccgagaggtctgtttctcctctactcattgttcctttttttcccaacagctggcattgctgtttaaatgggttgttctttgctg

SEQ ID NO: 68358 - DNA, 120 bp, synthetic construct
  source 1..120: mol_type = other DNA
tttgacgtgatcctgttggactttgatggcttccttgctttctggcaaaaaagatgttccaggatcaatatactgcaccatacatggagtcagccgtttctctagggaaccttgattcct

SEQ ID NO: 68359 - DNA, 120 bp, synthetic construct
  source 1..120: mol_type = other DNA
actgcaaacctatataagaaataaagctctcctttctaaatttataaaattgtgtgatttttcagttgatgctctctttctacacacacacacacacgcaatttatacagaaggaaatct

SEQ ID NO: 68360 - DNA, 120 bp, synthetic construct
  source 1..120: mol_type = other DNA
ttaaagaaaagaaaattctcagatatttggggaattactggacactggctctcatttgacactattatcactatgttgcctaggatggattcatgctcctgggttcaagcagtcctccta

SEQ ID NO: 68361 - DNA, 120 bp, synthetic construct
  source 1..120: mol_type = other DNA
tttaataaaataaaataaatatagccaggcatgatggtatgtacctatggccccagttactcatgtggctgagatgggcagatctcttgattctaggagtttgaggccagcttgggcaac

SEQ ID NO: 68362 - DNA, 120 bp, synthetic construct
  source 1..120: mol_type = other DNA
agagatgggatttcaccatgttggccaggctcctctggagctcctgacctcaggcaatctgcctgcctcagcctcccaaaattcaaggagtacagatgtgaacaaccacgcccggcctcc

SEQ ID NO: 68363 - DNA, 120 bp, synthetic construct
  source 1..120: mol_type = other DNA
acctttgcccccagccttaggcaaccattgattaatttttttgtcactatagatttgcctaatctggacaaatagaattgtacaatatgtgatcttttgtggcttttcttccctcttagc

SEQ ID NO: 68364 - DNA, 120 bp, synthetic construct
  source 1..120: mol_type = other DNA
ccctcattcccagtctgtggaaaaattgtcttccacacattcactctgttttttggtagaggcagggtcttaatatattgcccagtctgatctcaaactcctggcctcaagtaatatacc

SEQ ID NO: 68365 - DNA, 120 bp, synthetic construct
  source 1..120: mol_type = other DNA
catcactgtccttgtcaaatagtttggaacaggtataatgatcacaataaccccaagcataatatttcgttaattctcacagaatcacatataggtgccacagttatccccattttatga

SEQ ID NO: 68366 - DNA, 120 bp, synthetic construct
  source 1..120: mol_type = other DNA
tgggattacagatgtgagccaccacatctggccagttcatttcctattactggttcattgtgaaggatacatctcagaaacagtcaatgaaagagacgtgcatgctggatgcagtggctc

SEQ ID NO: 68367 - DNA, 120 bp, synthetic construct
  source 1..120: mol_type = other DNA
gcatgtcacccatgcccagatcatttttgtagagtcagagtttcaccgtggtggccaggttggccatgttggccagatggggtcttcttttgttgcccaggctggccacaaattcctggg

SEQ ID NO: 68368 - DNA, 120 bp, synthetic construct
  source 1..120: mol_type = other DNA
agtgcctaataaatgcaaatgtgcttacatcttttggcccagctcctacctcccggcagcctctccaggcccagaactttctccagtcagcctctacagaccaagctcatgactcacaat

SEQ ID NO: 68369 - DNA, 120 bp, synthetic construct
  source 1..120: mol_type = other DNA
ctaacctgttttattttgtttttttttctgagacagggtctccctctgttgtccaaggctggagtgtagtagtgctatcgcagctgactgcagcctcaaccttccaggctgaagcgatcc

SEQ ID NO: 68370 - DNA, 120 bp, synthetic construct
  source 1..120: mol_type = other DNA
aaagaactcatattactttacttgtcacatttcaacatctttcctcagcttattagctctatttcttttctgtctgtaaatggttgttgctgttttggtctttgagacagggtcttgctc

SEQ ID NO: 68371 - DNA, 120 bp, synthetic construct
  source 1..120: mol_type = other DNA
ggtgggaccatccagttgcaggaaaacaagcttaacacgcccactaattctacattatggtgagttctataattattttattatatattacagtgtaataatggaaataaagtgcctaat

SEQ ID NO: 68372 - DNA, 120 bp, synthetic construct
  source 1..120: mol_type = other DNA
aaaacttcctcaaatcaggcttttgcccaacttctgtctactgtcggactctacaggtcagcctctgcctcacagtggaccctccagacccagatggtgtctcactgtggcatcctcagg

SEQ ID NO: 68373 - DNA, 120 bp, synthetic construct
  source 1..120: mol_type = other DNA
tcctggtggcctgtacagttctagcactggttggagaacagcctctgcaggcccctcccttgcctcccaggggcctctccaggcccagctcttgcccccacggcggcctcccggggccaa

SEQ ID NO: 68374 - DNA, 120 bp, synthetic construct
  source 1..120: mol_type = other DNA
actcacactgagaacatatgaacactacacacatgttctcacacagcacacgccccgtcacacccatgaactcacaccgagaacacaacatcacacacagggactcacgcacagaggaca

SEQ ID NO: 68375 - DNA, 120 bp, synthetic construct
  source 1..120: mol_type = other DNA
gttagccaggatggtctcgatctcctgacctcgtgatccacccgcctcggcctcccaaagtgctggaattacaggtgtgagccaccacgcccggccagggtacacttttaagcagagaca

SEQ ID NO: 68376 - DNA, 120 bp, synthetic construct
  source 1..120: mol_type = other DNA
atcattgaagactgaaagaaagaaaaaggtcttttcccttttctttaagaagcatcattagttaaaaacatgttagttgataccagagaactatatttaaagggacagcaataagcaaat

SEQ ID NO: 68377 - DNA, 120 bp, synthetic construct
  source 1..120: mol_type = other DNA
cagtccgaaccaatggagaactgcttcgcgatgggaagccgacaccagcagcgaaagcacaacttccggccaggggaaaagcacacctccaaccatgcggcgctaggcctcggctctcca

SEQ ID NO: 68378 - DNA, 120 bp, synthetic construct
  source 1..120: mol_type = other DNA
ccatagcggtttgctgcacccatcaacccatcatctacattagatatttctcataatgctgtccctcccccagtcccccacccctgcaataggccccagtgtgtgatgttcccctctctg

SEQ ID NO: 68379 - DNA, 120 bp, synthetic construct
  source 1..120: mol_type = other DNA
ggaataccacatgttctccactagataaagcaaatgtggtctttctacgtcatggaatactacacagccatgaaaaagaataatgtcatgtcctttgcagccacatggacacagctgaag

SEQ ID NO: 68380 - DNA, 120 bp, synthetic construct
  source 1..120: mol_type = other DNA
tgtgacccaggctggagtgcagtggtgcaatcttggctccctgcaacttctgcctcctggattcaagcaattcttctacttcagcctcccaagtagctgggactacaggcacctgccacc

SEQ ID NO: 68381 - DNA, 120 bp, synthetic construct
  source 1..120: mol_type = other DNA
ggccagctgccttctgctttctggatggtgcaggcgtgagctccaagcccaaatttcactggagctccaagaatcgagcctggcccaggcactcactgcacgggggccaagcgtgaagcc

SEQ ID NO: 68382 - DNA, 120 bp, synthetic construct
  source 1..120: mol_type = other DNA
ctcttctgaaagcccattcatgggaagcctccaggtctcctcagcaggcagcatcacgtctgatttaactgcgttatcaggtaatgcaggcctgttctacctgtgtgcgtgagcgcatgt

SEQ ID NO: 68383 - DNA, 120 bp, synthetic construct
  source 1..120: mol_type = other DNA
gtgtatgagtgtgtatgacatatatgagtgtctatgtgggtgagtagccatccacgtgtttatatgagagtgtttgcatgtttctgtttatgagtgactttgtatgtatacgtgtttgtg

SEQ ID NO: 68384 - DNA, 120 bp, synthetic construct
  source 1..120: mol_type = other DNA
tgcataattatatttctataaatacacgcttatgtgtgtatttatacatgaatgcctgtgtttgtgtgagtacatcagtgagtgcatgaatgtgtgtgtgtgcatgtgtgcctgtgtttg

SEQ ID NO: 68385 - DNA, 120 bp, synthetic construct
  source 1..120: mol_type = other DNA
ggactgctttactgttcctttcaaagcagactgggaggtaagattttattctgcttccagaggttcaggatttctgcagacggtcagcaactctttgcatcctactggtaaaagttttat

SEQ ID NO: 68386 - DNA, 120 bp, synthetic construct
  source 1..120: mol_type = other DNA
acagtgtattaagaagacagtgggtcctcacaggaaaataagaatatacatcatgtttatattatatataacataaacaactaattacatctgtatatagagcacaaacataaagtacaa

SEQ ID NO: 68387 - DNA, 120 bp, synthetic construct
  source 1..120: mol_type = other DNA
ctttctttttttcttttttctttgagacgggatcttgctcttttccccaggctggagtgcaatggcatgatctcagctcactgcaacctcctcctcccaggttcaagcagttcatcctgc

SEQ ID NO: 68388 - DNA, 120 bp, synthetic construct
  source 1..120: mol_type = other DNA
agccctggacaccagtgccagggtcatcgaaggaaggaggaacagagtgcgtcactgaaggtagcaggacaagaatccacatcgggaagccaccacttcctgagtcatattatttctgta

SEQ ID NO: 68389 - DNA, 120 bp, synthetic construct
  source 1..120: mol_type = other DNA
aagccaccacttcctgagtcatgttatttctgtatctggaaagcaagcttccagcagtccagtgtgctgttggagcaggacaagaatccacatcgggaagccaccacttcctgagtcatg

SEQ ID NO: 68390 - DNA, 120 bp, synthetic construct
  source 1..120: mol_type = other DNA
ctcacgggcacccttctcagctctgagcccctcacatcatgtcatcgatggtcttctcacctcagagcccctcacatcatctcatgggcgcctttctcagctcagagccccttacatcat

SEQ ID NO: 68391 - DNA, 120 bp, synthetic construct
  source 1..120: mol_type = other DNA
gtcttctcagctcagagcccctcacatcatctcatgggccccttctccctcagagcccctgacatcatgtcatcaacggtcttctcactcagagcccctcacatcccatgctgtccctca

SEQ ID NO: 68392 - DNA, 120 bp, synthetic construct
  source 1..120: mol_type = other DNA
ttaaggcataggcatatggcccatacataggtatatggccctctgttaaagcctttcttcacaaagcagctgcatccagcttccgtcagcattgaagactaaactcacaatcaagaaagc

SEQ ID NO: 68393 - DNA, 120 bp, synthetic construct
  source 1..120: mol_type = other DNA
ataggaagatgtttataagggaaggagtagaaagaaaaattcaaaggacttggtgggtgagggttaatcaggtggggattgtgccaattgaaggcgctaagtattcaatcaccatccctg

SEQ ID NO: 68394 - DNA, 120 bp, synthetic construct
  source 1..120: mol_type = other DNA
atgtgcgtatctagacccttcagcttccacgtatcaggcgatgcagccccctacagggacggtgacactgtttgctctcactccgcagcgtgccagatacaaacccccgcaagggccaca

SEQ ID NO: 68395 - DNA, 120 bp, synthetic construct
  source 1..120: mol_type = other DNA
ggatcacctgagttaggaagttcaagactagcctgaccaacatggagaaaccccgtcactactaaaaatacaaaattagccgggcgcggtggcgcacgcctgtaatcccagcactttggg

SEQ ID NO: 68396 - DNA, 120 bp, synthetic construct
  source 1..120: mol_type = other DNA
caaggcgggtggatcacctgagttaggaagttcaagactagcctgaccaacatggagaaaccccgtcactactaaaaatacaaaattagccgggcgcggtggcgcacgcctgtaatccca

SEQ ID NO: 68397 - DNA, 120 bp, synthetic construct
  source 1..120: mol_type = other DNA
gctctgtcaccccaggacagcaagaccaatccctcctcttcctccttttcaacctacacaacatgaagatgatgagagtgacaacctttataatgatacactttcaggtaatgaatagga

SEQ ID NO: 68398 - DNA, 120 bp, synthetic construct
  source 1..120: mol_type = other DNA
tcattcaggagcaggttgttcagtttccatgtagttgagcggctttgagtgagatttttaatcctgagttctagtttgattgcactgtggtctgagagatagtttgttataatttctgtt

SEQ ID NO: 68399 - DNA, 120 bp, synthetic construct; identical to SEQ ID NO: 49358
  source 1..120: mol_type = other DNA

SEQ ID NO: 68400 - DNA, 120 bp, synthetic construct
  source 1..120: mol_type = other DNA
tctttgatgatggtgatgtacagatgggtttttggtgtagatgtcctttctggttgttagttttccttctaacagacaggaccctcagctgcaggtctgttggaataccctgccgtgtga

SEQ ID NO: 68401 - DNA, 120 bp, synthetic construct; identical to SEQ ID NO: 27448
  source 1..120: mol_type = other DNA

SEQ ID NO: 68402 - DNA, 120 bp, synthetic construct
  source 1..120: mol_type = other DNA
atttgagtacctttttgctgtacactaagctctgtgctagcctctgagaactcagatgaatcaggtataaattcagccttgttgacttttacggcctatgaaaagcgatgagcgtcatca

SEQ ID NO: 68403 - DNA, 120 bp, synthetic construct
  source 1..120: mol_type = other DNA
attgtagattctggatattagccctttgtcagatgagtaggttgcgaaaattttctcccattttgtaggttgcctgttcacactgatggtagtttcttttgctgtgcagaagctctttag

SEQ ID NO: 68404 - DNA, 120 bp, synthetic construct
  source 1..120: mol_type = other DNA
actcatgatttggctctctgtttgttgttggtgtataagaatgcttgtgatttttgcacgttgattttgtatcctgagactttgctgaagttgcttatcagcttaaggagattttgggct

SEQ ID NO: 68405 - DNA, 120 bp, synthetic construct
  source 1..120: mol_type = other DNA
agtttatttgcatagaggtgtttgtagtattctctgatggtagtttgtatttctgtgggatcggtggtgatatcccctttatcattttttattgtgtctatttgattcttctctttttct

SEQ ID NO: 68406 - DNA, 120 bp, synthetic construct
  source 1..120: mol_type = other DNA
ctaagcattaaagatgacttctatagtgtaacagcttagtccctagtagctctacaacaagttggaaattatgcttgtgatgctggtggtgatgtgggtggtcaagatgatgctagggat

SEQ ID NO: 68407 - DNA, 120 bp, synthetic construct
  source 1..120: mol_type = other DNA
tgccgcaataaacatacgtgtgcatgtgtctttatagcagcatgatttatagtcctttgggtatatacccagtaatgggatggctggttcaaatggtatttctagttctagatccctgag

SEQ ID NO: 68408 - DNA, 120 bp, synthetic construct; identical to SEQ ID NO: 43768
  source 1..120: mol_type = other DNA

SEQ ID NO: 68409 - DNA, 120 bp, synthetic construct
  source 1..120: mol_type = other DNA
ttgcacttcagaagacatcattaagaaatgagaacacaagccatgtactagaaaaaaattatttgccaatgagatatctgacaaataacttgtattcaacatatattcaacatatgtatg

SEQ ID NO: 68410 - DNA, 120 bp, synthetic construct
  source 1..120: mol_type = other DNA
gatcaccctggctaacatggtgaaaccccgtctctactaaaaatacaaaaaattagccaggcgtggtggcgggcgcctgtagtcccagctacttgggaggctgaggcaggagaatggcgt

SEQ ID NO: 68411 - DNA, 120 bp, synthetic construct
  source 1..120: mol_type = other DNA
ctccaggagaaaaaaaaactaactggagccaagatggccgaataggaacagctccggtctacagctcccagcgtgagcgacgcagaagacgggtgatttctgcatttccatctgaggtac

SEQ ID NO: 68412 - DNA, 120 bp, synthetic construct
  source 1..120: mol_type = other DNA
ctacaccgaaaacccatctgtacatcaccatcatcaaagaccaaaagtagataaaaccacaaagatggggaaaaaacagaacagaaaaactggaaactctaaaacgcagagcacctctcc

SEQ ID NO: 68413 - DNA, 120 bp, synthetic construct
  source 1..120: mol_type = other DNA
caggtaggtggcaatggtgtttgtctgttgaggggtgccacgccagatggcattcactgcactctggttacatggttcaactatatctatatataagaaaccagtttaatcatatatgta

SEQ ID NO: 68414 - DNA, 120 bp, synthetic construct
  source 1..120: mol_type = other DNA
gcctcccaaagtgctgggattacaggtgtgagccactgcgcccagccggggttcatccttaatacatacattagagatatagattctgtttttatctaaaaagtctttataaggccgggc

SEQ ID NO: 68415 - DNA, 120 bp, synthetic construct
  source 1..120: mol_type = other DNA
atttttttttttttggcctgttttcaagtctccgatttttgtcacccttctcacaccaggtcagagagatagctaatggtcagaaggaatcttccagcaatgaccatagcgctttctcct

SEQ ID NO: 68416 - DNA, 120 bp, synthetic construct
  source 1..120: mol_type = other DNA
ccctagcacatagtcttgccatctgttttctccacaccaggtgattcctgtaacattcattcacataacaaatacaaataaatgagtggattcattcatcagatattaattcagaatccc

SEQ ID NO: 68417 - DNA, 120 bp, synthetic construct
  source 1..120: mol_type = other DNA
gactggtgacagcttcctgctggcattcagtatagtgtagatctactgtgtaattaattttctgtttcttcgaggagctgtgaaaccaaaggacatataaaactgctcttttctccctgt

SEQ ID NO: 68418 - DNA, 120 bp, synthetic construct
  source 1..120: mol_type = other DNA
cctgagcctctgttcagagacaataaaatcctcctttctctctatagttcagattatgtaggtattcgtgttctgttttcaagttcattgactttttccttagtcttctgcattcgatta

SEQ ID NO: 68419 - DNA, 120 bp, synthetic construct
  source 1..120: mol_type = other DNA
aacttttattcttatatataagtgtatagcaggtggctttctttagtcagcatatttatttttaacacattctgatgatctctagtttttaattaatgcgtttagattatttacatgtaa

SEQ ID NO: 68420 - DNA, 120 bp, synthetic construct
  source 1..120: mol_type = other DNA
ctcaggaggctgaggtgggaggatcgcttgaatctgggaggcggaggttgcagtgaacagagattgcaccggtgcctggacaacaaagtgagaccctgtcataaaataaaataaaataaa

SEQ ID NO: 68421 - DNA, 120 bp, synthetic construct
  source 1..120: mol_type = other DNA
gggaggatatgtttataagttcagtttgggttttttgttgagtgaatgtctccagtcatagagatgcaagtgtagatacaccgtaagagtagtatgaacaggagacaccttggaaggcta

SEQ ID NO: 68422 - DNA, 120 bp, synthetic construct
  source 1..120: mol_type = other DNA
tgtcttgacaaatactgtagatccttcctgcacagcatcaccagaatgtttttctttcttttcattcacctctgtcatcatccatgctatggtgtttatggaggatgtattctgcagcag

SEQ ID NO: 68423 - DNA, 120 bp, synthetic construct
  source 1..120: mol_type = other DNA
attatttaatcattttttaaaaatcagtgacactttagatgggcaggtctaggcagggcctcctttcctggaatgtgcctttttctgtcccggaataccctaaacttgacattttggcag

SEQ ID NO: 68424 - DNA, 120 bp, synthetic construct
  source 1..120: mol_type = other DNA
atataaaatcagacaaagtagatttgaaagcagagaaacttttcaggaataatgaggcctcctaaataattatgattgtcaatttttcaggagaatattgtcccaaatgtatatgaggac

SEQ ID NO: 68425 - DNA, 120 bp, synthetic construct
  source 1..120: mol_type = other DNA
tttatcttgtcttcgtttgaggtctggggtgtctatacttcctctgaattacctgatcttactacagtgtctggcacagagcatctccccagtgaatatgtactaaatgagtagaaagta

SEQ ID NO: 68426 - DNA, 120 bp, synthetic construct
  source 1..120: mol_type = other DNA
tgcaaaagaacgggcagaataactgagctggtacagagggaaaaaatcacatttaaaatctaaaaatatctgcttcttagttcaggctttcccacttagcagctttggcaccttaggaac

SEQ ID NO: 68427 - DNA, 120 bp, synthetic construct
  source 1..120: mol_type = other DNA
agttagtgtctgagaacaggatgctgctttggttcaagacgtaggagcagcaataatagagggctggtgatggctccctcttggcattcagtatagtgtagatctaccatgtaattaatt

SEQ ID NO: 68428 - DNA, 120 bp, synthetic construct
  source 1..120: mol_type = other DNA
aagttttacaaataaaatttaacacaaaacaatttttttgaaaaaccatgttgacttaagcagagccaatgatgcaaagcataatgtatcagaagattcctgattcaactgctagcttga

SEQ ID NO: 68429 - DNA, 120 bp, synthetic construct
  source 1..120: mol_type = other DNA
ctgggttttcaagcgattctcctgcctcagcctcccgagcccagctcaaatcactaaattgcttagattagaggcgcccaccaccacgccaggctaatttttgtatttttagtagagaca

SEQ ID NO: 68430 - DNA, 120 bp, synthetic construct
  source 1..120: mol_type = other DNA
tcagtgttgaaaatgagtccactcttctgggtctggagcaaaagtggcggagttcagaggctgacagctggggtctgggcctctgtgggcagccagaagatgagccaatagagtacccca

SEQ ID NO: 68431 - DNA, 120 bp, synthetic construct
  source 1..120: mol_type = other DNA
cctgcgttctcttggttttctttaccttttacagtcctttacttggagtgttagtgaaataattgccaagcccaacctgtacatgcccaatgaagaaagaaccaaaaaccccaacatcca

SEQ ID NO: 68432 - DNA, 120 bp, synthetic construct
  source 1..120: mol_type = other DNA
caaaacttacaggatacaagagcagttctaagagagttttcatcaaaaaagatgaaagatcacaaatagactacctagcatccattacacctcaaggactggaaaaacaatcaactaagc

SEQ ID NO: 68433 - DNA, 120 bp, synthetic construct
  source 1..120: mol_type = other DNA
tggggaaaaaaattgaaagctttccttttaagatcaggaataagacaaggatatccactcttgccacttctatttaacatagtactggaagtcctagccagagcaattaggcaagagaaa

SEQ ID NO: 68434 - DNA, 120 bp, synthetic construct
  source 1..120: mol_type = other DNA
tacaaaaatcaactaaaaattgattgaagacaaacataagatgtgagactctaaaacttctagaagaaaacatatggggaatgctccataacattggtctgtgcaatgattttttggata

SEQ ID NO: 68435 - DNA, 120 bp, synthetic construct
  source 1..120: mol_type = other DNA
ttaccacgctggcctaacacatggaaggtcctctatttgaaactcaacggaaacaacaggtttctctggtctcccagaatctgaccgggagtggccgcttcttcccgggagtccagagct

SEQ ID NO: 68436 - DNA, 120 bp, synthetic construct
  source 1..120: mol_type = other DNA
agacatcttgaataggcaaattcatgtagacagaaagaatagaggttgttggggagagggaaatgtggagttattgtttaatgggtacagagttgctgtttgggatgctgagaaacttct

SEQ ID NO: 68437 - DNA, 120 bp, synthetic construct
  source 1..120: mol_type = other DNA
acatcccaagtgaacaggcatgtttcctcacacaggaattcctacatctatgcctgttccttcaaactcatgtgcattcttcctcatctgcatccttcaaggttcatatttatcccttta

SEQ ID NO: 68438 - DNA, 120 bp, synthetic construct
  source 1..120: mol_type = other DNA
agtgtctggcacagagcatctctccagcaaatatgtactgaatgagtagaaaggaactgacggattcagaagagacctgcaagaataatgttcagtatttggcaaatcactgaatgtggt

SEQ ID NO: 68439 - DNA, 120 bp, synthetic construct
  source 1..120: mol_type = other DNA
tagcgcagctggcagcgcgtcagtctcataatctgaaggtcctgagttcaagcctcagagagggcatcacttctgccaaagaagttggatacactaaatatcggaacgcaacgcaaatgc

SEQ ID NO: 68440 - DNA, 120 bp, synthetic construct
  source 1..120: mol_type = other DNA
cttctccttgtggaaagctggcctctcacactgaatttgtatcataggcactcatgagggtcttgactacatcaatatctgatgggagactttagggcagttctgttgtcgtagctgatt

SEQ ID NO: 68441 - DNA, 120 bp, synthetic construct
  source 1..120: mol_type = other DNA
tatattctattcctccacaatctttattttatttttatgttcacagagacttgctggttccaactaaatgagcacaacagccagtgacaacagaactgcacttaaatagtccctcatcag

SEQ ID NO: 68442 - DNA, 120 bp, synthetic construct
  source 1..120: mol_type = other DNA
atcactgcttccctccatgtgtatttcacacacacacacacacacacacacacacactctccacttaaattgaacaggtttatttctttacacaagaattcttacaaacagcccggtttt

SEQ ID NO: 68443 - DNA, 120 bp, synthetic construct
  source 1..120: mol_type = other DNA
agactcctcgaataacaatactgagaggacacagatgtcaaaatcatctgacgcatacagtggagcagttatgataacaatgctcctagaattaggggataacattcgtgaagtgaatgg

SEQ ID NO: 68444 - DNA, 120 bp, synthetic construct
  source 1..120: mol_type = other DNA
tcttcccttgagttccttaaggtatgtttgatgattgaaagcaaaaattgtaactttatcagaagcagttgtcattgtatctagatgtactacatacagaagataaaagggtaagtgtaa

SEQ ID NO: 68445 - DNA, 120 bp, synthetic construct
  source 1..120: mol_type = other DNA
gccagaaagcaaagacaaaaattaaaagaaaagtaagatcatgttataaccaggaaattaagagtggtccatcatatagaagggtgctattattgaaagagtttgaaatagtgacttagt

SEQ ID NO: 68446 - DNA, 120 bp, synthetic construct
  source 1..120: mol_type = other DNA
tcacctgaggtcaggagtttgagaccagcctggccaacatggtggaaccccgtctctactaaaaattcaaaaactagcggggcacctgtagtcctagctactcgggaggctgaggcagaa

SEQ ID NO: 68447 - DNA, 120 bp, synthetic construct
  source 1..120: mol_type = other DNA
gtgagatggtatctcgctgtggttttggtttgcatttctctgacgattagtaatcctgagcattttttcatatgcttattgggctgcatatatgtcttcttttgagaagtgcgtaggcaa

SEQ ID NO: 68448 - DNA, 120 bp, synthetic construct
  source 1..120: mol_type = other DNA
acatgacgaaaccttatctctcaaaaaaaaaaaaaaaaaaaaaaaacagccaggtgtggtagcacatacccgtaggtccagctactcaggaggctaaggtgggaggatcacctgagtctg

SEQ ID NO: 68449 - DNA, 120 bp, synthetic construct
  source 1..120: mol_type = other DNA
acataggcaaatcaataaatgtgattcatcacataaacagaattaaaaacaaataccacatatcaggccagccgcaatagctcatgcctgtaaccccagcactttgggaggctgaggcag

SEQ ID NO: 68450 - DNA, 120 bp, synthetic construct
  source 1..120: mol_type = other DNA
ctatgaaattcccctctctgaatcctaaagcacatatcctcattccctttatgctgttactttttctatgtttgccttgtctttccccaaaagctgtaagatccttaagggcaggagcca

SEQ ID NO: 68451 - DNA, 120 bp, synthetic construct
  source 1..120: mol_type = other DNA
ctaccaattaccgagagaggagtgttagtgtcggcaactctaattggatttttctgtttttaccttgcgtatccaattttgtttatgagttttgaagctctatgttctcatatacacttg

SEQ ID NO: 68452 - DNA, 120 bp, synthetic construct
  source 1..120: mol_type = other DNA
tctctttcatttccctttggctgctttcaaaattgttttgtattttcttagttttcagcagtttgattatgatatgccttgctatgggtttctttgggtttatcctgattgacatttact

SEQ ID NO: 68453 - DNA, 120 bp, synthetic construct
  source 1..120: mol_type = other DNA
ctctaatcccgaacaacttacctaaaaagagcctgagagctgaactgtgcaatggcccactttccagtcctcactgaccactgggttgcacacactttggagatctctgaacagcagtgt

SEQ ID NO: 68454 - DNA, 120 bp, synthetic construct
  source 1..120: mol_type = other DNA
acgctgccaaaatgtgaagtttagggtattccaggacagaaaaagacacgtcccagcaaagaagacctatctagacctgcccagctaaagtgtcactgatttttaaaaaataattaaata

SEQ ID NO: 68455 - DNA, 120 bp, synthetic construct
  source 1..120: mol_type = other DNA
agatggttaagcagagaccctgaccagaatgtccgtggcggagagaaacaatcttgttgggaaaaggatgacaataattggggacttagaataaaggctaaaaatgattcaaagagaatg

SEQ ID NO: 68456 - DNA, 120 bp, synthetic construct
  source 1..120: mol_type = other DNA
caaccaaagcggtagctaatactgagcagttcctattgcccagatccatttctaggtgctgagatccagccagagaatcccacagtcctcatttttcatatgaagaaacatgtgagtgat

SEQ ID NO: 68457 - DNA, 120 bp, synthetic construct
  source 1..120: mol_type = other DNA
cataacatgcacattatatagcacataattaacaacaagcaacaaagcttaatcatttcctgtataggccatacacacacatacatacaaacacacgtatatacacacgtaagttatgta

SEQ ID NO: 68458 - DNA, 120 bp, synthetic construct
  source 1..120: mol_type = other DNA
tgactaaaagaaagggtgcgtgttctgtgttctcccgccggtgtgttcctcttcatgtccagccgcttgtgtctgtgcccgctagggtctcgggagtttttataggcacaggatgggggc

SEQ ID NO: 68459 - DNA, 120 bp, synthetic construct
  source 1..120: mol_type = other DNA
gaaagaagcagagataaagtctatagaggaagagagcatctgaatgacgtttgagtccctggatccactgtgtgaagccagagccactcctgcaagtgttttgtttaggtttaaatttga

SEQ ID NO: 68460 - DNA, 120 bp, synthetic construct
  source 1..120: mol_type = other DNA
aaaagaaacatcttcctataaaaactagacagaataattctcagaatctgctttgtgatgtgtgcgttcaactcatagagtaaaacttttcttttgatagagcagttttgaaacactctt

SEQ ID NO: 68461 - DNA, 120 bp, synthetic construct
  source 1..120: mol_type = other DNA
ttttgacgagtgcattcaactcacagagttgaaccttcctttcgatagggcagtttgaaaacactctttttgtaaaatttccaagtgaatatttagagcgcttggaggcctatggtagaa

SEQ ID NO: 68462 - DNA, 120 bp, synthetic construct
  source 1..120: mol_type = other DNA
tgtctgcactccactgaaacagttgaaccttccttttgatagagaagttttgaaacactctttttgtagaatgtgcaagtggatatttagagaacttagtggactatggtagaaaaggaa

SEQ ID NO: 68463 - DNA, 120 bp, synthetic construct
  source 1..120: mol_type = other DNA
tgatgtctgcactcaactcacagagttgaaactgccttttgatagagcagttttgaaacactctttttgtagtatttgcaagtggatatttagagcgctttgaggcctatggtagaaaag

SEQ ID NO: 68464 - DNA, 120 bp, synthetic construct
  source 1..120: mol_type = other DNA
ctgcaagtggaaatttggagtgctttgaggccaacggtggaaacgggaatatcttcacataaaaagtagaaagaagcattctcagaaactactttgtgatgtgtgtattcacctcacaga

SEQ ID NO: 68465 - DNA, 120 bp, synthetic construct
  source 1..120: mol_type = other DNA
gatgtgtgcattcaacacaccgagctgaacctttctttttatagagcagttttgaaacactctttttgtagagtctgaaagtggatatttggagcgctttgaggcctatagttgaaaagg

SEQ ID NO: 68466 - DNA, 120 bp, synthetic construct
  source 1..120: mol_type = other DNA
attcaacttacagagttgaacactccttttgacagagcagttatgaaacactcttttttgtagaatctgcaagtcgatatttggagcgctttgaggcctatggcggaaatgggaatatct

SEQ ID NO: 68467 - DNA, 120 bp, synthetic construct
  source 1..120: mol_type = other DNA
tctttgtgatgtgtgcattcaactcagagttgaacctttcttttgatagagaagttttgaaacattctttttgtagattctgcaagtggatatttggagcgcattgaggcctatggtgga

SEQ ID NO: 68468 - DNA, 120 bp, synthetic construct
  source 1..120: mol_type = other DNA
gatgtgtgcattcatctcacagagttgaacctttcttttgagagagcagttttgaaacactctttttctacaatctgcaatttggtaattggagcactttgaggcctatggtggaaaagg

SEQ ID NO: 68469 - DNA, 120 bp, synthetic construct
  source 1..120: mol_type = other DNA
ttttgtagtatctgcaaatgtttatgtggagcactttgaggcctgtagctgaaaaggaaatgtcttcacataaaaaccagaaagaagcattctgagaaacttctttggatgagtgcattc

SEQ ID NO: 68470 - DNA, 120 bp, synthetic construct
  source 1..120: mol_type = other DNA
actctttttgcagaatctgcaagtagatacttggaccgctttgaggccttcagtggaaatgggaatatcatcacataaaaactagacagaagcatactcagaaacttctttgtgatgagt

SEQ ID NO: 68471 - DNA, 120 bp, synthetic construct
  source 1..120: mol_type = other DNA
atatttgtactgctttgaggcctttggtggaaaaggaagtatctttccataaaaactagagagaagaattctcagattcttctttgtgatgtctgcattcaactcacagatttgaacgtt

SEQ ID NO: 68472 - DNA, 120 bp, synthetic construct
  source 1..120: mol_type = other DNA
tctgcaaggggatatttggagcactttggggcctatggtggaaaaggaaatatcttctcataaaacctagacagaagcattctcagatacttctttgtgatgtgtgcattcaactcaaag

SEQ ID NO: 68473 - DNA, 120 bp, synthetic construct
  source 1..120: mol_type = other DNA
ctttataatgtgtgcattctactcacagagttggacctttcctttggttgagcatttttgaaacactatttttgtagtatctgcatgtggatattccgagtgctttgaggcctatggtga

SEQ ID NO: 68474 - DNA, 120 bp, synthetic construct
  source 1..120: mol_type = other DNA
cttctttgtaatgtgtgcattctactcacagagttgaacctttactttgtgcacttacgaaacactctttttgtagaatctgcaagtggatatttggagcactgtgaggtctatggttgt

SEQ ID NO: 68475 - DNA, 120 bp, synthetic construct
  source 1..120: mol_type = other DNA
aatctgcaagtggatatttggagcgctatgagtcctatggtggaaaagaaaatatcttcacataaaacccagacagaagcaatctcagatgcgtctttgtgttgtgtgcattcatctcac

SEQ ID NO: 68476 - DNA, 120 bp, synthetic construct
  source 1..120: mol_type = other DNA
gtagtatctgcaagtggatatttggagcgtattgaggcctgtggtgcaaaagaaatatcttcacataaaaaccagacagaagagttctcagatacctctatgtgatgtgtgcattgaact

SEQ ID NO: 68477 - DNA, 120 bp, synthetic construct
  source 1..120: mol_type = other DNA
ctatgtgatgtgtgcattcagcttacagagatgaaccattcttttgactgagcagtttggaaacactctttttgtagtatctgcaaatggttatgtggagtgctttgatgcctgcagctg

SEQ ID NO: 68478 - DNA, 120 bp, synthetic construct
  source 1..120: mol_type = other DNA
taatgtgtgcattctactcaacgagtttaaactttcttttgatagagcagtttggaaacactctttttgtagtatgtgctagtggatatttgcagtgctttgaggcctatggtggaaaag

SEQ ID NO: 68479 - DNA, 120 bp, synthetic construct
  source 1..120: mol_type = other DNA
gtagaatctgcaagtggatatttggagcgctttgaggctcatggtgaaaaggcaaatatcttcccaaaaaaactagacagaagcattctgagaaacttctttgtgatgtgtgcattcaac

SEQ ID NO: 68480 - DNA, 120 bp, synthetic construct
  source 1..120: mol_type = other DNA
tgtgtgcacttaactgtcagttttgaacctttcttttgagtgaacagttggaagcactctttgtgtagtatctgcaaatgcatatttggagcactttgagccctatagctgaaaaggaaa

SEQ ID NO: 68481 - DNA, 120 bp, synthetic construct
  source 1..120: mol_type = other DNA
gatgtgtgcattcatctcagagtgttgaatcattcttttgaaagagcagtttggataccaacttttcgtagaatctacaaatgtatatttggagtgctttgaggcctatggtgaaaaagg

SEQ ID NO: 68482 - DNA, 120 bp, synthetic construct
  source 1..120: mol_type = other DNA
tctgaggtgtgcattcatctgacagagttgaactgttcttttgattgagcagtttgcaaacagtctttttgtagagtccgcaaatttatatttagagctctttgaggcccatggcaaaaa

SEQ ID NO: 68483 - DNA, 120 bp, synthetic construct
  source 1..120: mol_type = other DNA
acctgcagagggatatctgtgagccctttgaggtctatggagaaataggatatatcttcacataaaaactagacagaaggatcctgagaaacttctttgtgatgtgtacattcatctcac

SEQ ID NO: 68484 - DNA, 120 bp, synthetic construct
  source 1..120: mol_type = other DNA
ttctttgtgatgtgtgcattcatctgagagtgttgaacaattcttttgataaagcagtttggaaacagtcttttcatagcatctacaaatggatatttggtgcactttcagactcctatg

SEQ ID NO: 68485 - DNA, 120 bp, synthetic construct
  source 1..120: mol_type = other DNA
tctttgtgatgtgtgcattcatctcacagagttgaacctttcctttcattgagcagtttggaaaccgtctttttgtagaatctgcaaatggatatttggagtgctttgaggcctatgttg

SEQ ID NO: 68486 - DNA, 120 bp, synthetic construct
  source 1..120: mol_type = other DNA
agaaacttcatcatgatgtgtgctttcatctcacagagttgaactttcttttgattgagctgtttggaaacagtctttctgtggaatctgcagtggaatatttgtgagtggtttgagagc

SEQ ID NO: 68487 - DNA, 120 bp, synthetic construct
  source 1..120: mol_type = other DNA
agagggatattgtgactcctttgaggcctatggagaaataggaaatatcttcacctaaaaactagacagaaagagtctgagaaactgctttgagatgtgtagattcatcccaccgacttg

SEQ ID NO: 68488 - DNA, 120 bp, synthetic construct
  source 1..120: mol_type = other DNA
tggatatttggagcactttgtggcctatggtgaaaaaggaaatctcttcacgtaaaaaccagacagaagttttctgagaaacttatttgtgatgtgtgctttcatctcacagagttgaac

SEQ ID NO: 68489 - DNA, 120 bp, synthetic construct
  source 1..120: mol_type = other DNA
atggctttttgatgcatgcattcatctcacagaggtaaacgtttattttcattgagcagtttggaaagtctgttcttctagaatctgcaaaggaatatttgggagtgcatagaggcctag

SEQ ID NO: 68490 - DNA, 120 bp, synthetic construct
  source 1..120: mol_type = other DNA
atctgcaaagggatatttgggagagaatagaggcctagatagaaaaaggaaatatcttcagattcaaactggcgagtttctgagagactgctttgtgatgtatgcattcatcccacagag

SEQ ID NO: 68491 - DNA, 120 bp, synthetic construct
  source 1..120: mol_type = other DNA
gcagtatggaaacacagtgttagtagaatctgcaaaggattatttggatttgcattgaggcctgtgttgaaaaaggaaatatcttctgatacaaacaagatggaagctttctgagaaact

SEQ ID NO: 68492 - DNA, 120 bp, synthetic construct
  source 1..120: mol_type = other DNA
gaagggatatttggagtcacatggaggcctgtggtgaaaaaggaaatatcttctgacacaaactagacagaagcttcctgagagaatgctttgtaatgtgtgtattcatcccacagagtt

SEQ ID NO: 68493 - DNA, 120 bp, synthetic construct
  source 1..120: mol_type = other DNA
aatggctgtatgatgtgtgcattcatctcacagagctgaaccattcttttgattgagcagtttggaagcagagtgtttgtagaatctgtgaagggatatttgaatttgcatgaaggctag

SEQ ID NO: 68494 - DNA, 120 bp, synthetic construct
  source 1..120: mol_type = other DNA
atctgtgaatggacatttgggagctctttgagatgaatggaggaaaagtgaatatcccaggaaaaaaactacatggaagtaatctgagaaactgatttgtgatgtatgcattcatctcgc

SEQ ID NO: 68495 - DNA, 120 bp, synthetic construct
  source 1..120: mol_type = other DNA
ctttctgatgtgtgcattcatctccagagttaaatcttgcttttcattcagcagtttggaaacacggtttttgtagattatgccatgggatatctgggagcacattgagacctatggtgt

SEQ ID NO: 68496 - DNA, 120 bp, synthetic construct
  source 1..120: mol_type = other DNA
ctgtgaatggacatttgggagctcattgaggccaatggaggacaagtgaatatcccaagataaaaactacaagtaaggtatctgagaaactgatttgtgatgtgtgcattcatcttgcag

SEQ ID NO: 68497 - DNA, 120 bp, synthetic construct
  source 1..120: mol_type = other DNA
gtagaaaggaggtttctgagaaactgctctgtgatgggtgcattgacctcacagagttaaacctttcttttgatccagcagtttggaaacactgttttttagaatctgcaaagggctcca

SEQ ID NO: 68498 - DNA, 120 bp, synthetic construct
  source 1..120: mol_type = other DNA
agttgattgaggccactggcaaaaaatctaatatcccaggataaacacagcaaccaccttgtgatgtgtgcattcatctcaaagagttaaccctttcttttgattcaacagtttggaaac

SEQ ID NO: 68499 - DNA, 120 bp, synthetic construct
  source 1..120: mol_type = other DNA
actggacttttaggagctcattgaggccaatggagaaaaagaaaatatcacagaataaaaaccacaaggaagctatctgagaaaccactttgtgatgtgtgcattcacctcacagagttg

SEQ ID NO: 68500 - DNA, 120 bp, synthetic construct
  source 1..120: mol_type = other DNA
gtccattctgcaaatggacatttgggagatcattgaggctaatgacaaaaaatagaatatccgagggtaaacactagaaggaagctatctgagaaacaactctgtgatgtgtgcattcat

SEQ ID NO: 68501 - DNA, 120 bp, synthetic construct
  source 1..120: mol_type = other DNA
tgctttgtgatgtgtgcattcatctcacagagttaatcctttcttctcactcggaagtttggaaacactgtttttgtagaaactttgaagggatatttggaagtacattgaggcctaagg

SEQ ID NO: 68502 - DNA, 120 bp, synthetic construct
  source 1..120: mol_type = other DNA
acatttgggagctcattgaggccaatggtgaaaaagcgaatatcccagggtgaaaccagaaggaaactatctcagaaaccactttgtattgagtgcattcatctcacagagtgaaacgtt

SEQ ID NO: 68503 - DNA, 120 bp, synthetic construct
  source 1..120: mol_type = other DNA
gctgaagggacatagtgagaggtgagaggtgactagaactactgaatcaaaaggaaggtttaagtctgtgagatgaatgcatgcaacacaaaccaccttctcagaaatcttctttctact

SEQ ID NO: 68504 - DNA, 120 bp, synthetic construct
  source 1..120: mol_type = other DNA
attcactttttcgccattggcttcagtgagctctgaaatatccattcacagaatgggcaaaaagagtgtttccaaactgctgaatcaaaagaaaggtttaactgtatgagatgaatgggc

SEQ ID NO: 68505 - DNA, 120 bp, synthetic construct
  source 1..120: mol_type = other DNA
gtcagatagattccttctagtttttatcctgggatattcacttttttgccattggcattagtgacctccgaaatgtccactctcagaaaggacaaaaacactgtttccaagctgctgagt

SEQ ID NO: 68506 - DNA, 120 bp, synthetic construct
  source 1..120: mol_type = other DNA
gcgctctcaaatacctctttgcagattctacaaaaacagtgtttacaaactgcttagtgaaaaaaaacgttgaactttgtgagttgaatgcacacatcaaaaagcagtttctcagatagc

SEQ ID NO: 68507 - DNA, 120 bp, synthetic construct
  source 1..120: mol_type = other DNA
cagattctacctcaaatagcttccctctagtttttatcctgggttattcactttttcatcattgcctccaggtgctccctattgtccattcacctgactgacaaaagagtgtttccaaac

SEQ ID NO: 68508 - DNA, 120 bp, synthetic construct
  source 1..120: mol_type = other DNA
ctctgtgagatgaatgcatacatcacaaagcagtttctcagaaagcttcttttagtttttatgtgaagatatttactctttcaccataggcctcaatgggctcccaaatatccctttgca

SEQ ID NO: 68509 - DNA, 120 bp, synthetic construct
  source 1..120: mol_type = other DNA
gcacacaactgaaagcagtttctcagatatcttccttctaattttttcctgggatattctctttttctccactggcctcaatgagctcttaaatgtccatttgcagaatggacaaaaaca

SEQ ID NO: 68510 - DNA, 120 bp, synthetic construct
  source 1..120: mol_type = other DNA
cataagactcaaggtgctccccagtatccctttgcagattctacaaaaaaagtgtttctaaactgctgaataaaaagaaaggtttaactctatgagatgaaagcacacatcacaaagcag

SEQ ID NO: 68511 - DNA, 120 bp, synthetic construct
  source 1..120: mol_type = other DNA
agatgaatgcacacatcacaaagctgcttctcagatagcctacttctagtttttatccagggatactcacttttttgcctttggcctcaaagagctcctaaatgtacatttgccgaaagg

SEQ ID NO: 68512 - DNA, 120 bp, synthetic construct
  source 1..120: mol_type = other DNA
gaatggacaaaaaccgtgtttccaaactgctgagtgaaaagaaaggcttaactccatgagataaatgcaagcatcataaagctgttcctcacaaagtttctcccaactttttatatatag

SEQ ID NO: 68513 - DNA, 120 bp, synthetic construct
  source 1..120: mol_type = other DNA
gcaatatgaatacacacttcacaaagccatttctcagatagcttccttctagtttttatcctgggatattcactttttcacctttttcctcaatgagctccaaaatgtccatcctccgaa

SEQ ID NO: 68514 - DNA, 120 bp, synthetic construct
  source 1..120: mol_type = other DNA
tgctgaatgaaaaataaagtttaaatctgtgagataagtgcattcatcacaaagcggtttgtcagatagcttctttctactttttatcctggaatgtttgatttttcgccattggcctca

SEQ ID NO: 68515 - DNA, 120 bp, synthetic construct
  source 1..120: mol_type = other DNA
taagatagcttcctcctagtttttaacctgggatatacgctttttcacatttggcctcaatgagctcccaaatgtctgttcactgaaagggcaaaaccagtttttccaaactgctatatg

SEQ ID NO: 68516 - DNA, 120 bp, synthetic construct
  source 1..120: mol_type = other DNA
agtggggaaaacagacacataaaatcttagctttactagaggtaggagtgaggcaagtgtggctgtcagcaatatcaagcaacacctcagatgtgctattatctgaagtgatatcagaca

SEQ ID NO: 68517 - DNA, 120 bp, synthetic construct
  source 1..120: mol_type = other DNA
aaaccaagattttcttatagacaatttttggagtcctttccccagtatattctatgagcaaggttataagctaaagaacattctgatattttgggctataataaataattgtgggtctta

SEQ ID NO: 68518 - DNA, 120 bp, synthetic construct
  source 1..120: mol_type = other DNA
tcaatgaatccaggaactggttttttgaaaggatcaacaaaattgatagaccgctagcaagactaataaagaaaaaaagagagaagaatcaaatagacacaataaaaaatgataaagggg

SEQ ID NO: 68519 - DNA, 120 bp, synthetic construct; identical to SEQ ID NO: 66523
  source 1..120: mol_type = other DNA

SEQ ID NO: 68520 - DNA, 120 bp, synthetic construct
  source 1..120: mol_type = other DNA
gaaccaaaaaagagcccgcattgccaagtcaatcctaagccaaaagaacaaagctggaggcatcacactacctgacttcaaactattctacaaggctacagtaaccaaaacagcatggta

SEQ ID NO: 68521 - DNA, 120 bp, synthetic construct
  source 1..120: mol_type = other DNA
tttttttttttaatttttttttttttattatactctaagttttagggtacatgtgcacattgtgcaggttagttacatatgtatacatgtggcatgctggtgcgctgcacccactaacgt

SEQ ID NO: 68522 - DNA, 120 bp, synthetic construct; identical to SEQ ID NO: 68277
  source 1..120: mol_type = other DNA

SEQ ID NO: 68523 - DNA, 120 bp, synthetic construct; identical to SEQ ID NO: 66523
  source 1..120: mol_type = other DNA

SEQ ID NO: 68524 - DNA, 120 bp, synthetic construct
  source 1..120: mol_type = other DNA
aaagcaggaaagatccaaaattgacaccctaacatcacaattaaaagaactagaaaagcaagagcaaacacattcaaaagctagcagaagacaagaaataactaaaatcagagcagaacc

SEQ ID NO: 68525 - DNA, 120 bp, synthetic construct
  source 1..120: mol_type = other DNA
cagatgaggagaagtatattaaaaaatactgaaggtatcaaccctttgcttcatgtaacattttacatggaaaaggttagtacgctacccttggtaaaggttagtacgctacccttggta

SEQ ID NO: 68526 - DNA, 120 bp, synthetic construct
  source 1..120: mol_type = other DNA
aacttctccagtttaaataagtctatagtccaggctagctcaatacaacttctttagtactgtccatagtcttgctggccaatcctcatcctttcttctaagagataaggatatagaaca

SEQ ID NO: 68527 - DNA, 120 bp, synthetic construct
  source 1..120: mol_type = other DNA
caatgaatccaggagctggttttttgaaaggatcaacaaaattgatagaacactagcaagactaataaagaaaaaaagagagaagaatcaaatagacacaataaaaaatgataaagggga

SEQ ID NO: 68528 - DNA, 120 bp, synthetic construct
  source 1..120: mol_type = other DNA
cctttatttccttctcctgcctgattgccctggccagaacttccaacactatgttgaataggagcggtgagagagggcatccctgtcttgtgccagttttcaaagggaatgcttccagtt

SEQ ID NO: 68529 - DNA, 120 bp, synthetic construct
  source 1..120: mol_type = other DNA
cataagtgaaggagaaataaaatactttacagacaagaaaatgctgagagattttgtcaccaccaggcctgccctaaaagagctcctgaaggaagcgctaaacatggaaaggaacaaccg

SEQ ID NO: 68530 - DNA, 120 bp, synthetic construct
  source 1..120: mol_type = other DNA
actcaaagccgctcaactacatggaaactgaacaacctgctcctgaatgactactgggtacataacgaaatgaaggcagaaataaagatgttctttgaaaccaacgagaacaaagacaca

SEQ ID NO: 68531 - DNA, 120 bp, synthetic construct
  source 1..120: mol_type = other DNA
aaaaaatttggctctcaactcaaaattatcaaagtatatcctagatgtagtttgcttgtcaggcttctacatgaaaatctaaaatgctcctgcatttcagaatgagcctaacatatgtaa

SEQ ID NO: 68532 - DNA, 120 bp, synthetic construct
  source 1..120: mol_type = other DNA
ttcacagacagctgtctttttgctgtgtcctcacatggtggaaggggctaggaagttctctaaggtctcttttataagggcactaatctcattcatgagggctctgtcctcatgacctaa

SEQ ID NO: 68533 - DNA, 120 bp, synthetic construct; identical to SEQ ID NO: 8292
  source 1..120: mol_type = other DNA

SEQ ID NO: 68534 - DNA, 120 bp, synthetic construct
  source 1..120: mol_type = other DNA
ttttttatttttatttttttactttgaaacaaagtctcgctctgttgccaaagctggagtgcattggcatgatctcggctcactgcaacctctgcctcccaggttcaagtgattctcctg

SEQ ID NO: 68535 - DNA, 120 bp, synthetic construct; identical to SEQ ID NO: 8520
  source 1..120: mol_type = other DNA

SEQ ID NO: 68536 - DNA, 120 bp, synthetic construct
  source 1..120: mol_type = other DNA
cttccacaatattcacacgttctttcaccttgccaaaggccacatgcttgccatccaaccactcagtcttggcagtgcagatgaataactgggagccatttgtgttgggtccagcattta

SEQ ID NO: 68537 - DNA, 120 bp, synthetic construct
  source 1..120: mol_type = other DNA
ttttggagacagagtcttgctctgtcacccaggctggagtgaagtggcacaatctcagctcattgcaacctccgcctcccaggttcaagtgattctcttcctcagcctctggagtagctg

SEQ ID NO: 68538 - DNA, 120 bp, synthetic construct
  source 1..120: mol_type = other DNA
ataggtttagcaacatgttggactttaccactctcgcttacaaaagcctatttagctgtcaagactattaggtgtccaacacacaagcaacaaagtccaaggctaagcacacaataacat

SEQ ID NO: 68539 - DNA, 120 bp, synthetic construct; identical to SEQ ID NO: 8521
  source 1..120: mol_type = other DNA

SEQ ID NO: 68540 - DNA, 120 bp, synthetic construct; identical to SEQ ID NO: 8290
  source 1..120: mol_type = other DNA

SEQ ID NO: 68541 - DNA, 120 bp, synthetic construct
  source 1..120: mol_type = other DNA
ttattgagaaaagatctcactctgtcgcccaggctggagtgcagcggcacaatctcggctgcctgcagccttgtcctcccaaagccctagaccctgtaacataatggaatatgtatgttt

SEQ ID NO: 68542 - DNA, 120 bp, synthetic construct
  source 1..120: mol_type = other DNA
ataagaaagagacactggctattattttgagtggcaaaacaggttattcagtcccagtttaaaatggaaatgacagagaccaagatgaagatttttaatttgagatgtgcctgcgatgca

SEQ ID NO: 68543 - DNA, 120 bp, synthetic construct
  source 1..120: mol_type = other DNA
gaattttagaccaatatccttgatgaacattgatgcaaaaatcctcaaaaaaatactggcaaaccgaatccagcagcacatcaaaaagcttatccaccatgatcaagtgggcttcatccc

SEQ ID NO: 68544 - DNA, 120 bp, synthetic construct
  source 1..120: mol_type = other DNA
gatgacatgattgtttatctagaaaaccccatcgtctcagcccaaaatctccttaagctgataagcaacttcagcaaagtctcaggatacaaaatcaatgtacaaaaatcacaagcattc

SEQ ID NO: 68545 - DNA, 120 bp, synthetic construct; identical to SEQ ID NO: 68277
  source 1..120: mol_type = other DNA

SEQ ID NO: 68546 - DNA, 120 bp, synthetic construct
  source 1..120: mol_type = other DNA
tatttttgaggttttgggactcaaactggcttccttgctcattagcttgcagacagcttactgtggaacttcatcttctgatcatgtgagtcaatattccttaataaactccatttcata

SEQ ID NO: 68547 - DNA, 120 bp, synthetic construct
  source 1..120: mol_type = other DNA
agtcttcaatcacctctgaattctgacctcccatccattaacatctctcctttggcagaatatggagaccaacagaaatgcttcagactacataagaatcacagtctcctgacacattga

SEQ ID NO: 68548 - DNA, 120 bp, synthetic construct
  source 1..120: mol_type = other DNA
gggaagtttagagaaaaaagaataaaaagaaatgagcaaagcctccaagaaatatgggactatgtgaaaagaccaaatctacatctgattggtgtacctgaaagtgatgtggagaatgga

SEQ ID NO: 68549 - DNA, 120 bp, synthetic construct; identical to SEQ ID NO: 48995
  source 1..120: mol_type = other DNA

SEQ ID NO: 68550 - DNA, 120 bp, synthetic construct
  source 1..120: mol_type = other DNA
tttcagaaggaatggtaccagttcctccttgtacctctggtagaattcggctgtgaatccatctggtcctggactctttttggttggtaaactattgattattgccacaatttcagagcc

SEQ ID NO: 68551 - DNA, 120 bp, synthetic construct
  source 1..120: mol_type = other DNA
ttttcacgatattgattcttcctacccatgagcatggaatgttcttccatttgtttgtgtcctcttttatttccttgagcagtggtttgtagttctccttgaagaggtccttcacatccc

SEQ ID NO: 68552 - DNA, 120 bp, synthetic construct
  source 1..120: mol_type = other DNA
aaataatgctgcatatctacaactatctgatctttgacaaacctgagaaaaacaagcaatggggaaaggattccctatttaataaatggtgctgggaaaactggctagccatatgtagaa

SEQ ID NO: 68553 - DNA, 120 bp, synthetic construct
  source 1..120: mol_type = other DNA
tcgagactaggaagaaactgcatcaactaacgagcaaaataaccagctaacatcataatgacaggatcaaattcacacataacaacattaactttaaatgtaaatggactaactgctcca

SEQ ID NO: 68554 - DNA, 120 bp, synthetic construct
  source 1..120: mol_type = other DNA
atgttctttgaaaccaatgagaacaaagacacaacataccagaatctctgggacacatttaaagcagtgtgtagagggaaatttatagcactaaatgcccacaggagaaagcaggaaaga

SEQ ID NO: 68555 - DNA, 120 bp, synthetic construct
  source 1..120: mol_type = other DNA
gttgagaggggaaaggatggaggcctgggatggtggtcaccatctactttcctcatcttacagaacagggagaaggtagataatgtcaaaactcgataaatcaacagattaaaatttata

SEQ ID NO: 68556 - DNA, 120 bp, synthetic construct
  source 1..120: mol_type = other DNA
taaccttctctctctgtctctctctctatatatatctaaataaaatatatatatgtgtgtatgtgtgtgtctgtgtatgtgtgtatatgtgtatatataggtgtatctatatagagatac

SEQ ID NO: 68557 - DNA, 120 bp, synthetic construct
  source 1..120: mol_type = other DNA
atgttctctacatatctctatagatatagagctatatgttctctacatatctctatagatatagagctatatgttctctacatatctctatagatatagagctatatgttctctacatat

SEQ ID NO: 68558 - DNA, 120 bp, synthetic construct
  source 1..120: mol_type = other DNA
ctctatatctatagagatatatgttctctacatatctctatagatatagagatatatgttctctacatatctctatagatatagagatatatgttctctacatatctctatagatataga

SEQ ID NO: 68559 - DNA, 120 bp, synthetic construct
  source 1..120: mol_type = other DNA
ggcaaagaagttgaaaatttgaaaaaaatttagaagaatgtataactagaataaccaatacagagaagtgcttaaaggagctgatggagctgaaaaccaaggctcgagaactacgtgaag

SEQ ID NO: 68560 - DNA, 120 bp, synthetic construct
  source 1..120: mol_type = other DNA
tggcttggtagatcttcctccatccttttattttgagcctatgtgtgtctctgcacgtgagatgggtttcctgaatacagcacactgatgggtcttgactctttatccaacttgccagtc

SEQ ID NO: 68561 - DNA, 120 bp, synthetic construct
  source 1..120: mol_type = other DNA
aaaaaacccttcaaaaaatcaatgaatccaggagctggttttttgaaaggatcaacaaaattgatagaccgctagcaagactaataaagaaaaaaagagagaagaatcaaatagacacaa

SEQ ID NO: 68562 - DNA, 120 bp, synthetic construct; identical to SEQ ID NO: 66523
  source 1..120: mol_type = other DNA

SEQ ID NO: 68563 - DNA, 120 bp, synthetic construct
  source 1..120: mol_type = other DNA
ggatgagtatcctagggctgccataacaaattaccccaaacttgttgggttaaaacaacagaaattcattctctcacaggtctggaggccagagggccaaaatcaaggtgaccatgggct

SEQ ID NO: 68564 - DNA, 120 bp, synthetic construct
  source 1..120: mol_type = other DNA
gaaagagacacagatagaaatagggtgaccaatctttcaacttactcaggaatgaaggattttctggatgggggatttttgttgctaaaatcgggacagtaggggacatgttgggactgt

SEQ ID NO: 68565 - DNA, 120 bp, synthetic construct
  source 1..120: mol_type = other DNA
tcattctctctgactctcatctgcactgtcctctccctttctggggtcatcagccacaccaaggtcttggtcagttaactcagcgtgaccttgtctgcctctccaattatatcataaaca

SEQ ID NO: 68566 - DNA, 120 bp, synthetic construct
  source 1..120: mol_type = other DNA
ggcagcctcgggaaacttgagagaaacacagattctccagccccaccccagaccaaagaaatcagaagctctgggggtggggccaggaacctgtgttttaaccatctccccagctgattc

SEQ ID NO: 68567 - DNA, 120 bp, synthetic construct
  source 1..120: mol_type = other DNA
gtgcgttcctggactcccctgtgcttgatcatcctcttgcacatcctcttgtgccttccttttttttgtttttgtaaatgtcaaagctgtagactctgtgtgcaaaacatatttttcttg

SEQ ID NO: 68568 - DNA, 120 bp, synthetic construct
  source 1..120: mol_type = other DNA
tataccttcgagtatgtttagcatcaattgtgtttttaaaaccagaaatatatgacaaaacagagccctccgcagacttacaactgaactttggctcatcccaggcctgcggactggact

SEQ ID NO: 68569 - DNA, 120 bp, synthetic construct
  source 1..120: mol_type = other DNA
tcgccctccctacctcagaggtcggatgtggtgatcggggctttccacatgtctgaaatgtctgacatggatgtggtttttttaagcaaacttcttagaactctgttttattttacattt

SEQ ID NO: 68570 - DNA, 120 bp, synthetic construct
  source 1..120: mol_type = other DNA
ccaggccctggagccacgggaatgcactggaaatctaggagtggaatatttgggccccggagccacgggaacccactggaaatctaggagtggaatagccaggccctggagccacgggaa

SEQ ID NO: 68571 - DNA, 120 bp, synthetic construct
  source 1..120: mol_type = other DNA
ctggagccacaggaacgcactggaaatctaggagtggaatatttgggtcccggagacacaggaacacactggaaatctaggagtggaatagctgggccccggagccacgggaacgcactg

SEQ ID NO: 68572 - DNA, 120 bp, synthetic construct
  source 1..120: mol_type = other DNA
ctgtctgtaacgtttttgatccacatttttgccactcctacattgggtctgataagacaaaagtgactctctcagaaaagaaaacgggcacagtctaagggtggtgctcattttgtgatg

SEQ ID NO: 68573 - DNA, 120 bp, synthetic construct
  source 1..120: mol_type = other DNA
ccacaccgggagtcagtactgagagacccggaaggcggggagcactgaagactccacaccgggagtcagtactgagagacccggaaggcggggagcactgaagactccacaccgggagtc

SEQ ID NO: 68574 - DNA, 120 bp, synthetic construct
  source 1..120: mol_type = other DNA
ctccagccctccaggcccctgcagccgcccccagctccagccctcaccgcccctgcagccgcccccagctccagccctcgccacccccagcaactgtgcttatggcccctgttctttctg

SEQ ID NO: 68575 - DNA, 120 bp, synthetic construct
  source 1..120: mol_type = other DNA
cgcttcctgggacggtcccctgcgtccagcacactcaaggccagggccgcacgcaggcctgtgttgtctgcttcctgggacggtcctgtctgggaaacccggacagtcgttcctgtctct

SEQ ID NO: 68576 - DNA, 120 bp, synthetic construct
  source 1..120: mol_type = other DNA
ggacagtcgttcctgtctcttcagtcttggttttctgttagtatgacaccaatctcctacgttgagttgcctcctgtaattccctgcaggatctgtaatcacatggcgtctggtttgggt

SEQ ID NO: 68577 - DNA, 120 bp, synthetic construct
  source 1..120: mol_type = other DNA
gtatatttattcacttatatatatgttgtaaatattacagtttatgatttgtcaccttatgatatcttccaaatagagaagctttatattttgatgtagtcatatgttcatttttcctcc

SEQ ID NO: 68578 - DNA, 120 bp, synthetic construct
  source 1..120: mol_type = other DNA
gttattccactagtctatttttctactcatgaattatggtacatgagtttatttttgcaactttaagctcaataacatgttttaagatttcctcaactttctttttgcgcttcttcagaa

SEQ ID NO: 68579 - DNA, 120 bp, synthetic construct
  source 1..120: mol_type = other DNA
gttgaggtaaggaaaatatgtaaagacaaaaagaagtccatgcaagctgttttgaaacaaacatcattggtcacagggtctgatgcaggagctggtgttaacttactggcagaaacagcc

SEQ ID NO: 68580 - DNA, 120 bp, synthetic construct
  source 1..120: mol_type = other DNA
ccaagcttataggaatttctgaaaggtctgtaaatcttatccagatggacagtgggagctcataaaggattctgcaagccatcacatctgtcaaacctgctatgtctaatccttaagcct

SEQ ID NO: 68581 - DNA, 120 bp, synthetic construct
  source 1..120: mol_type = other DNA
aagaagaaattcacagtatcttataatctaatctcagaagtggcatctcatttcttttgttctattctattcaatagaaacaagtacctgggaccagcttacactataggaaagagatta

SEQ ID NO: 68582 - DNA, 120 bp, synthetic construct
  source 1..120: mol_type = other DNA
ccctattgcttgccatatatacttacaaataatctaagtcaacttaaagtaatgttatgatgcttcatgggtcatgcaggtaccttaaaaacaaaattcctaattcctttcttaccacct

SEQ ID NO: 68583 - DNA, 120 bp, synthetic construct
  source 1..120: mol_type = other DNA
gccttctttcattacaccacacacgtgtcctaattattccaaaggtgatacatttgcatgtttccctttaaactcctttccctctgtcactctgtggagggttcacatgctgcaatattt

SEQ ID NO: 68584 - DNA, 120 bp, synthetic construct
  source 1..120: mol_type = other DNA
tgctttttaatctttttttcctgtgtattatttccttcagggaccttatgcactcttacacatccgtctattatttttatatggattactatacaattacatgttgaattcgtacttttc

SEQ ID NO: 68585 - DNA, 120 bp, synthetic construct
  source 1..120: mol_type = other DNA
ttgaactgctgatctcaagcgatttgcttgctttggcctcccaaagtgctgggctgacaggcgtgagccactgcacctggcctgatttgttccacttctactatatgcatcacacatgcc

SEQ ID NO: 68586 - DNA, 120 bp, synthetic construct
  source 1..120: mol_type = other DNA
gggaggtattattatccctattttatgtatttatgtatttatttttgatttctattcttttggtttttttgttgttttttattgatgtatcatagttgtacatgttttggggtacatgtg

SEQ ID NO: 68587 - DNA, 120 bp, synthetic construct
  source 1..120: mol_type = other DNA
accaacttggataaaatggtctttatataatttcgtaggcatttcccttcccaagggcttgagtctttttcaacaattatagagttttccggtccctcttcccagtgcctcagcaccttg

SEQ ID NO: 68588 - DNA, 120 bp, synthetic construct
  source 1..120: mol_type = other DNA
gttggggtttgccctaggtctactctagaccctgtttgcctgggtatcaccagcagaggctggagaacagccaagattgctgcctgtttcttcctctggaagttttgtcccagaggggca

SEQ ID NO: 68589 - DNA, 120 bp, synthetic construct
  source 1..120: mol_type = other DNA
cttgcacttcttgggtgaggcaacgccccattctgctttggctcaccctccgtgggctgcacccactgtccaaccagtcccagtgagatgaaccaggtacctcagttggaaatgcagaaa

SEQ ID NO: 68590 - DNA, 120 bp, synthetic construct
  source 1..120: mol_type = other DNA
aatggctgcaattcaaagaatcttcacaggaaaacagggctcagagctcatccacaatggacagacagggagggaaacaggtggaggttagttcaccacttcctcataagaaggtaataa

SEQ ID NO: 68591 - DNA, 120 bp, synthetic construct
  source 1..120: mol_type = other DNA
gttactgtgaatgagattgatttctttatttttgtcatatagtttgttgtgagtgtaaagaaactactgagttttgtacattgattttgaattctgaaattttattgaattcatttatca

SEQ ID NO: 68592 - DNA, 120 bp, synthetic construct
  source 1..120: mol_type = other DNA
cggaatctacaatgaacccaaacaaatttacaagaaaaaaacaaacaaccccatcaaaaagtgggcaaaggatatgaacagacacttctcaaaagaagacatttatgcagccaaaaaaca

SEQ ID NO: 68593 - DNA, 120 bp, synthetic construct
  source 1..120: mol_type = other DNA
tcatttctgattttattgctttgagtattctctcatttttctagtctagctaatggtttgtcagttttatcttttcaaagaacaaattcttagtttcattgatctgttctattttctttc

SEQ ID NO: 68594 - DNA, 120 bp, synthetic construct
  source 1..120: mol_type = other DNA
tttctattatattatttctgctctgatctttgttatttgtttccttctgctatctttgggcttgtattgttctctaattttctcgctcctttaggcataatattaggttgcttatttgag

SEQ ID NO: 68595 - DNA, 120 bp, synthetic construct
  source 1..120: mol_type = other DNA
tcctttttttctctgtcccttcttctctgctttcttcttttctcctcctcctcctccctttactctccttcttctctctctgtttttctaatcatgaaaacaaatgaaaaaaactatgag

SEQ ID NO: 68596 - DNA, 120 bp, synthetic construct
  source 1..120: mol_type = other DNA
tgtttgtcctgatggtctcctaccccctgtccccctgagaggccctggtgtgtgttgttcccctccatgtacccacgtgtttgtcctgatggtctcctaccccccgtcccgctgagaggc

SEQ ID NO: 68597 - DNA, 120 bp, synthetic construct; identical to SEQ ID NO: 68596
  source 1..120: mol_type = other DNA

SEQ ID NO: 68598 - DNA, 120 bp, synthetic construct
  source 1..120: mol_type = other DNA
ctcctaccccctgtccccctgagaggccctggtgtgtgttgttcccctccatgtacccacatgtttgtcctgatggtctcctaccccctgtcccgctgagacgccctggtgtgtgttgtt

SEQ ID NO: 68599 - DNA, 120 bp, synthetic construct
  source 1..120: mol_type = other DNA
gctgagaggccctggtgtgtgttgttcccctccatgtacccacgtgtttgtcctgatggtctcctaccccctgtcccgctgagaggccctggtgtgtgttgttcccctccatgtgatggt

SEQ ID NO: 68600 - DNA, 120 bp, synthetic construct
  source 1..120: mol_type = other DNA
tggtctcctacccctgtccccctgagaggccctggtgtgtgttgttcccctccatgtatccacgtgtttgtcctgatggtctcctaccccccgtccccctgagaggccctggtgtgtgtt

SEQ ID NO: 68601 - DNA, 120 bp, synthetic construct
  source 1..120: mol_type = other DNA
accccctgtccccctgagaggtcctggtgtgtgttgttcccctccatgtacccacgtgtttgtcctgatggtctcctaccccctgtccccctgagaggccctggtgtgtggtgttcccct

SEQ ID NO: 68602 - DNA, 120 bp, synthetic construct
  source 1..120: mol_type = other DNA
ctggttctagatctttgaggaattttcacactgccttccacagtgaatgaactaatttacattcccacaaacagtgtaaaaacattcctatttctccacagccttaccagcaactgttgt

SEQ ID NO: 68603 - DNA, 120 bp, synthetic construct
  source 1..120: mol_type = other DNA
aaacaaaatgcaacaacttggctggggttgctcagattcacagtgaaaatgtcagttacagagggaggctctctgcctctctcacatactaggacttcgctcacttttataagctggttg

SEQ ID NO: 68604 - DNA, 120 bp, synthetic construct
  source 1..120: mol_type = other DNA
gggtgcccactctcagaacttctattcaacatagtactggatgtcctagccagagcaattaggcaaaagaaagaaataaaaggcatgaaaattggaaaggaagaagttaaattgtttctg

SEQ ID NO: 68605 - DNA, 120 bp, synthetic construct
  source 1..120: mol_type = other DNA
ctgggcaataatattttatgatatgactctaaagcacaggcaagaaaagcaacaaaacacaaatggaatagcatcaacctaaaaagcttctgcacagcaaaagaaagtcaacagagtgaa

SEQ ID NO: 68606 - DNA, 120 bp, synthetic construct
  source 1..120: mol_type = other DNA
caaaattgcattgtacaggaggaatgaattcaacagatctattgtgcaatatggtgactatagtggataacaatgtattgtttttaaatttaatttttgtgggtacatagcaggtgtata

SEQ ID NO: 68607 - DNA, 120 bp, synthetic construct
  source 1..120: mol_type = other DNA
aaatacctacttttatgaaatgatcagaaaaaaactagaaaaactgagtagtttttttttcattgtagaaattttatttagaaaatttttttttcctgtagaaagaactccagggctagg

SEQ ID NO: 68608 - DNA, 120 bp, synthetic construct
  source 1..120: mol_type = other DNA
tgataaaatccaacatctgtttatgataaaaaccctcaacaatataggtatagatggagtatacctcaaaaaatgagtcatctatgacaaagccacagccaacatcatcctggatgggca

SEQ ID NO: 68609 - DNA, 120 bp, synthetic construct
  source 1..120: mol_type = other DNA
gcatttcatggtaatgttgaataactcaataattttacttttaaatatataccccagaggatatcttgcacatatgaaccaggtgatttacaaaagaatgttcatagcagcattgtttgt

SEQ ID NO: 68610 - DNA, 120 bp, synthetic construct
  source 1..120: mol_type = other DNA
tctatttccactattcagttcagaccttgataatcactcatctgcattgtagttgcatttttctaattattctgtttctagtcttgttctaaaatcttttttcctcccacaatgcagctg

SEQ ID NO: 68611 - DNA, 120 bp, synthetic construct
  source 1..120: mol_type = other DNA
aacatcaaactccataaattactttccatctctgcctctctctctttctatatatataacatatacatgttacaaaaatgcacagggaataaatatgagcaaaatggtaagaagtgcagg

SEQ ID NO: 68612 - DNA, 120 bp, synthetic construct
  source 1..120: mol_type = other DNA
ttccacttggccactgcccaagaacaattagtgccgttagttaactacctttactatgacagcattttgtgtaactctttgcacaggggagttttatgcaacagacagaaactttctgag

SEQ ID NO: 68613 - DNA, 120 bp, synthetic construct
  source 1..120: mol_type = other DNA
gagaaggaaagagcatgtgagagagcacattgtatatttatgttgataatactgattctaatgtaactcagtgggctgcttctttccttgtcttattccatatctgtatctctgtccttt

SEQ ID NO: 68614 - DNA, 120 bp, synthetic construct
  source 1..120: mol_type = other DNA
ttccttttatggtttattgagtaaagtttggttattgatttgacatgtttcttttttaaaatgtaggtgttacaactctgagcactgcttttgatatatcacacccatcttgttatatct

SEQ ID NO: 68615 - DNA, 120 bp, synthetic construct
  source 1..120: mol_type = other DNA
gtaattactgataaagaggggcttactcctaccattttgcttttgttttctgtatgtcttatacctcctttgttcctaatttcctcaattatcgccttcttttgtgtttagttgctattt

SEQ ID NO: 68616 - DNA, 120 bp, synthetic construct
  source 1..120: mol_type = other DNA
gtcaaacttacggaggatcctttgtaaatgatgcattgcctttttcctaagctcttctgacatccatggattataatgcactatctgctgtcaaacttattgaggatcctttgtaaatga

SEQ ID NO: 68617 - DNA, 120 bp, synthetic construct
  source 1..120: mol_type = other DNA
aggagccaaaaaagaaaaaaatatgaaaaacatctcccagactttgcttactgactctgtattggggctccctcaacacttagcggagccatatataattctgccttagccttcattttt

SEQ ID NO: 68618 - DNA, 120 bp, synthetic construct
  source 1..120: mol_type = other DNA
tgtcaactttgttgatttgtttaaagaacaagatttttggtttactgatttgatctgttttttggcttcttattttattaattttcacttttttctactatgggttctttcttgtacttt

SEQ ID NO: 68619 - DNA, 120 bp, synthetic construct
  source 1..120: mol_type = other DNA
tgcgttagcaagttttatagcatctgagtcgctctgttggaggaaagtgcatgtgatgggcatttgcttgcttccccaccagattctctaccttcacccttcctgcaatattccctagga

SEQ ID NO: 68620 - DNA, 120 bp, synthetic construct
  source 1..120: mol_type = other DNA
gcagcaagggaatcatataaagataagatcattgagatatttttttcctccgtgattggcagtttatattttcttgggtctacaaatctgacagcatttattaaattttctagtttgata

SEQ ID NO: 68621 - DNA, 120 bp, synthetic construct
  source 1..120: mol_type = other DNA
cttcttcttttttttttttttttaaattttacagctgagggactgaggtatggagaggttaggtaacttgttcaaggacaccaagccagtcaggctgccactggacctaagacaaggtaa

SEQ ID NO: 68622 - DNA, 120 bp, synthetic construct
  source 1..120: mol_type = other DNA
tggtcttgaactcctgaccttgtgatctgactgcctcagactcccaaattgctgggcttacaggcatgagccactgagccctgccttcctagggaatcttgtaggaaagacaaaggtaga

SEQ ID NO: 68623 - DNA, 120 bp, synthetic construct
  source 1..120: mol_type = other DNA
tggccaatgaatagaagtctggttttctgagcatccttgcagctgcaggcttcagtctaccagagaatgtgaggtgttattcttctagggcagtggttagaaaagaaaatgaaagtagca

SEQ ID NO: 68624 - DNA, 120 bp, synthetic construct
  source 1..120: mol_type = other DNA
ttgggaagagatgtgcataattgaagtgggtgagagccagtccagcaccctgcagagaggtaacaataattttgtaggtacttcctcaaatttaactcaatggaggtttagattgggttt

SEQ ID NO: 68625 - DNA, 120 bp, synthetic construct
  source 1..120: mol_type = other DNA
gtcatgtcttacatggatggcagcaggcaagagaagataatgagagccaagcaaaaggggtttccccttataaaactatcaaatcctgtgagacttattcactaccacaagaacagtatg

SEQ ID NO: 68626 - DNA, 120 bp, synthetic construct
  source 1..120: mol_type = other DNA
agtatctctcccacctctcccctcatctcatactgccttatttttgttgcatgaggtttttttcctgccaaatgagttagaagagtggaagagatggaaatgtagtttgcatatacagaa

SEQ ID NO: 68627 - DNA, 120 bp, synthetic construct
  source 1..120: mol_type = other DNA
tacataagtcctgttcatttcacagagaatcgaaagggcagaagtaaagcagagtcaagctcctaggcattgagggcagtcattctttctttacttatttttgagacagggtctcactct

SEQ ID NO: 68628 - DNA, 120 bp, synthetic construct
  source 1..120: mol_type = other DNA
aaccctgtgagatcctaaacagacaatccagccatgcaacacccaaacttctgacctatagaaaccctgagataataaatgggcattgctctaaatcaccaagtttgtggtaatttgtta

SEQ ID NO: 68629 - DNA, 120 bp, synthetic construct
  source 1..120: mol_type = other DNA
gccaggcatggtggctcatgcctgtaatcccagcactttgggaggctaagcaggggcagatcacatgaggtcaggagttcaagaccagcctggccaacatggtgaaaccctgtctctatt

SEQ ID NO: 68630 - DNA, 120 bp, synthetic construct
  source 1..120: mol_type = other DNA
gtttaaggctgcagtgagctatgatggcaccactcaactccagcctggctgagcaacagaggagactctgtctctaagaaataaataaataacaaaaactaggtgtagtgtgtagtgggt

SEQ ID NO: 68631 - DNA, 120 bp, synthetic construct
  source 1..120: mol_type = other DNA
tgacacctggagggtgccaggcatgttcatggaaacagcagcattgcagccttccttccttccccacagctgtatccgtgtgagtctggacaacaaggacttgtcaacacgaatctctct

SEQ ID NO: 68632 - DNA, 120 bp, synthetic construct
  source 1..120: mol_type = other DNA
gcggagctgctgggtcatggggtgtggctgagtccattgctggtgctggggtttccttggtgtttgtacaccttgcattcccaccagcacatatgagagaatactttgtttcaaatctct

SEQ ID NO: 68633 - DNA, 120 bp, synthetic construct
  source 1..120: mol_type = other DNA
agttcaagaccagtataggcaacatagcaagagcccatctctaaaacaaaacaaaacaaaacaaaaaattagccaggtgtcgtggctggcacctgtgttccaacaacttgagagactgag

SEQ ID NO: 68634 - DNA, 120 bp, synthetic construct
  source 1..120: mol_type = other DNA
cgctcttcctggggctgcggttgatggctcatcatgatctttcccaaaatctgtcccatctcaccaaacctagtctctgttctgtccttggtcttcttctggacactgctgggatccaga

SEQ ID NO: 68635 - DNA, 120 bp, synthetic construct
  source 1..120: mol_type = other DNA
aacactgcctcatatccttccctggtccctggctctctgagtccctctttttttttttttttgtttcgagacagaatcttgctttgtcacccaggctggagtgtagtggtgcaatctcag

SEQ ID NO: 68636 - DNA, 120 bp, synthetic construct
  source 1..120: mol_type = other DNA
atgtttcttactgacttttctaaacctaagtgtttccatccatagtgagggataccaaggccatggtcacaccctgatgtgtgactgtctcatgaggaaatgatgggaattcctttatga

SEQ ID NO: 68637 - DNA, 120 bp, synthetic construct
  source 1..120: mol_type = other DNA
cctgtttctaagaagatttcaaaaatgagttgagcatggtagcatgtgcctagtcccagctcctcaggaggctaaggaaagaagattgcttgagcccaggaattagagtgagctatgatc

SEQ ID NO: 68638 - DNA, 120 bp, synthetic construct
  source 1..120: mol_type = other DNA
gacgtttccggttcttctctctctctccttcccacatcaaccgcaaaagccaccaacctcctctgggttcccgtgacagaggtcacagtccaggtcccccttgcatcacttgaatccact

SEQ ID NO: 68639 - DNA, 120 bp, synthetic construct
  source 1..120: mol_type = other DNA
gaccctcgtctctattaaaaatataaaaaatacaccagacgcggtggctcatgcctgtaatcccagcgctttggaaggctgaagcaggtggattgcttgagaccaggagtttgagaccag

SEQ ID NO: 68640 - DNA, 120 bp, synthetic construct
  source 1..120: mol_type = other DNA
gacctcccaggctccagcgatcctcccgcctcagcctcctgagtagttgggagtagagatgcctcccacatcgcctggctaatttttgtatttttgtggagaggggatctcgccacgttg

SEQ ID NO: 68641 - DNA, 120 bp, synthetic construct
  source 1..120: mol_type = other DNA
ttccagtgctaatggcagacatcaggaaggaggagaggagccatttgtgcagatcatctagaagaacctggaccattcttgacagagctgaatacagtgatcacgttgtcctccaaggag

SEQ ID NO: 68642 - DNA, 120 bp, synthetic construct; identical to SEQ ID NO: 29417
  source 1..120: mol_type = other DNA

SEQ ID NO: 68643 - DNA, 120 bp, synthetic construct
  source 1..120: mol_type = other DNA
ttcctctctcaatatctttctctcatttcctgctttaaaactctagcttggggtctgggcacagtagctcatgcctataatcccagcactttgggagactgaggcgggtggatcacttga

SEQ ID NO: 68644 - DNA, 120 bp, synthetic construct
  source 1..120: mol_type = other DNA
ctgtctctaatacaaatactaaaattagccaagcatggtggccactgcactccagcctgggtgacagagcaagactctgtctcaaataaagaaagagaaagtatcatgcttttcagagtt

SEQ ID NO: 68645 - DNA, 120 bp, synthetic construct
  source 1..120: mol_type = other DNA
caagaagtctgggtgtggtggctcgtgcctgtaatcccaggactttgggaggccaagatgggtggatcatgaggtcaggagttcaagaccagcctggcctagatggtgaaaccctgtctc

SEQ ID NO: 68646 - DNA, 120 bp, synthetic construct
  source 1..120: mol_type = other DNA
ttgtgccactgcactccagcctaggtaacagagcaggaccccatctcagtcaatcaatcaatctcagtggttgaactacccttgatatggttcagctctgtatccccaaccaaatctcat

SEQ ID NO: 68647 - DNA, 120 bp, synthetic construct; identical to SEQ ID NO: 29321
  source 1..120: mol_type = other DNA

SEQ ID NO: 68648 - DNA, 120 bp, synthetic construct
  source 1..120: mol_type = other DNA
tctcataaaaatataagtacataaggtcaggcatggtggctcacgcctgtaatcccagcactttgagaggccgaggtgggcggatcacctgagggcaggaattcgagaccagcctggcca

SEQ ID NO: 68649 - DNA, 120 bp, synthetic construct
  source 1..120: mol_type = other DNA
gcactgactactcttttcttcacttgcttttctctcaaaattttcttaaaaagctgatgatccctctgagataaccgagatctaaacggttgaggagtcatcacaaaatctaaggtctgg

SEQ ID NO: 68650 - DNA, 120 bp, synthetic construct
  source 1..120: mol_type = other DNA
gaagctgagatattgagatagaaaattgtaaataataatgattccaattaattttcagagaggtttttctaaggggtcaagtgaatggataaaaatattttatcacctcagtgcacaaag

SEQ ID NO: 68651 - DNA, 120 bp, synthetic construct
  source 1..120: mol_type = other DNA
tgggagaccaaagcgagcggatcacctgaggtcagtagttcgagaccagcctgaccaacgtagagaaactctatctctactaaaaatacaaaattagccaggcgtggtggtgcatgcctg

SEQ ID NO: 68652 - DNA, 120 bp, synthetic construct
  source 1..120: mol_type = other DNA
attttggacaggctggtctcgaattcctgacctcaggtatccacccgccttggcctcccaaagtgctgggattacaggcgtgagccaccacacccggcctgctttattttttaatagaga

SEQ ID NO: 68653 - DNA, 120 bp, synthetic construct
  source 1..120: mol_type = other DNA
agaggcaggtggatcacttgagatcaggagtttgagaccagcctggccaacgtcgtgaaaccctgtctctaccaaaaatacaaaaaattagccaggcatggtggtgggcgcctgtaatcc

SEQ ID NO: 68654 - DNA, 120 bp, synthetic construct
  source 1..120: mol_type = other DNA
tattattattattattattattattattattatttgagacagagtctcaccctgtcacctgggctagagtgcaatggcatgatctcggctcactgcaacctccacctcccaagttcaagt

SEQ ID NO: 68655 - DNA, 120 bp, synthetic construct
  source 1..120: mol_type = other DNA
tccgctgtccaggctggagtgcaggggcgcaatcatagctcactgcagccttgacctcccaggctcaagcaatcctcctgcttcagcctcccaagtagctgggacatgggcatgcatcat

SEQ ID NO: 68656 - DNA, 120 bp, synthetic construct; identical to SEQ ID NO: 29604
  source 1..120: mol_type = other DNA

SEQ ID NO: 68657 - DNA, 120 bp, synthetic construct
  source 1..120: mol_type = other DNA
atttgtatttttgatagagatggggtttcaccatattgcccaggctggtctcgaactcctgacctcaagtgatctgtctgcctcggcctcccaaagtactaggattagaggcatgagcca

SEQ ID NO: 68658 - DNA, 120 bp, synthetic construct
  source 1..120: mol_type = other DNA
gccatgggaagggcccttaaagatcatcttatctggttgggctcaatggctcacgcgtgtaattccagcactttgagaggccaaggcaagaggatcgcttgtgaccaagagttcaagacc

SEQ ID NO: 68659 - DNA, 120 bp, synthetic construct
  source 1..120: mol_type = other DNA
aggagttcgaggctgcagtgagctgtgatccaccactgcattccaggctgggcatcagagtgagacctgtctctaaaaaaacccttcactccccaaataaagggattttcaaataccagc

SEQ ID NO: 68660 - DNA, 120 bp, synthetic construct
  source 1..120: mol_type = other DNA
gagccgcagcccgttaggaagccatgtgggaactcatccacaggttctttttgtttgtttgtttgttttttttgagatgtagttttgctcttgttgcccaggctggagtgcaatggtgtg

SEQ ID NO: 68661 - DNA, 120 bp, synthetic construct
  source 1..120: mol_type = other DNA
ggatctcttgtacatgataatctcactcttgtaaggtttcatcgtttctgcttaccctacttttctttcccatcctgatccctctcccaccagactggactctgaaacgggcatgtacag

SEQ ID NO: 68662 - DNA, 120 bp, synthetic construct
  source 1..120: mol_type = other DNA
gtgctactgcactccagtctgggtgacagagtgagatgctatctcaaaaaaaaaaaagaagaaaaaaaaaaaaagaagaaaaaaaagaagggtcagaggtcaggaaggagaacctgggga

SEQ ID NO: 68663 - DNA, 120 bp, synthetic construct
  source 1..120: mol_type = other DNA
acttccaataaccacacttttccaatgggaataatatgccccagtgggtgagctctccatgcgggaggactctgaagtgatcactcatgagggacacttaggagacaacagaggattagg

SEQ ID NO: 68664 - DNA, 120 bp, synthetic construct
  source 1..120: mol_type = other DNA
acagagcaagactgtgtctcacaaaaaaaaacaaaaacaaaaacaaaaaaaaactgtaggagcatctggtgggaggtggtggacggagaactgtgggtttggaagctgcgccctctccct

SEQ ID NO: 68665 - DNA, 120 bp, synthetic construct
  source 1..120: mol_type = other DNA
ccccaacactgaggtcccttctctgatgggcaacccctccccagacccccattccactatatccacaatcttcctctcccaagatgtgacctctccctctctgtgttcctttctctccat

SEQ ID NO: 68666 - DNA, 120 bp, synthetic construct; identical to SEQ ID NO: 29602
  source 1..120: mol_type = other DNA

SEQ ID NO: 68667 - DNA, 120 bp, synthetic construct
  source 1..120: mol_type = other DNA
ttacatgaacccgagggccaggaagaactgctctcagatagccttgttccggaagtatcggttccacttcttttgttccatgcgctgcagggcttgggtttccctggaggagttggaaga

SEQ ID NO: 68668 - DNA, 120 bp, synthetic construct
  source 1..120: mol_type = other DNA
agagagacaatgtcacacttgaaggaggcagctctctagacaggaaggttattcacgtcccatgtcaagtctagagttcagagcaattgagaaatgcaattttatctgctgcctttcatt

SEQ ID NO: 68669 - DNA, 120 bp, synthetic construct
  source 1..120: mol_type = other DNA
aaaataaaccaataaaatagatagtatatattagacgtgttagtatatatatctgagacatgttaaaaatcacaactgaattctcacaagtcagtcacaaacctaaacagcaaataaaaa

SEQ ID NO: 68670 - DNA, 120 bp, synthetic construct
  source 1..120: mol_type = other DNA
gtttgtttgtttgtttgttttggagacagtctcgctctgtctcccaggctggagtgcagtggcacaacctcggctccctgcaactttcacctccgcgttcaagcaaattctcctgcctca

SEQ ID NO: 68671 - DNA, 120 bp, synthetic construct
  source 1..120: mol_type = other DNA
aggaattagaaaggcaagataagaagattgcttgagcttgagtctgagcccacagtgagctatgaccgcaccactgcaccccagtctgggtgacagcacaagaccccgactccaaaaata

SEQ ID NO: 68672 - DNA, 120 bp, synthetic construct
  source 1..120: mol_type = other DNA
atcgcgccactgcactctagcctgggcgacagagcaagactccgtctcgaaagaaagaaagagaaaggaaattcccccagggaagtacctcggcttatttcatgaagaggtactgaagga

SEQ ID NO: 68673 - DNA, 120 bp, synthetic construct
  source 1..120: mol_type = other DNA
gtatttcctttctattcatctctatttcccgggaggtgtttatccaagtgcaataggagatattggtgactgcagagtcccctcagtgttctgctagtaaatagttgaaggttgatcagt

SEQ ID NO: 68674 - DNA, 120 bp, synthetic construct
  source 1..120: mol_type = other DNA
gtcatgcttctgtatcgacttcatgctgaccaggggcacttagtcccctaaagtgagaggaatgaaactcttgggcttctgagttcagatgagttctggggtcacccggagtagcttgaa

SEQ ID NO: 68675 - DNA, 120 bp, synthetic construct
  source 1..120: mol_type = other DNA
gaggttgcagtgagccaagatcacaccactgcactccagcctgggcgacagagtgagaagactccgtctaaaaaaaaaagttaaaattagcaccaaacgctttacaagtaaaaaaagttt

SEQ ID NO: 68676 - DNA, 120 bp, synthetic construct
  source 1..120: mol_type = other DNA
ctctcactatgtttcccagtcctaataaacattatgtgataaaaagaaaaaagtaaatcatcctgaagttaagtctttaatgagaaatgcaaataaagcatttctcaataaattatggga

SEQ ID NO: 68677 - DNA, 120 bp, synthetic construct
  source 1..120: mol_type = other DNA
tgagtcacgaaagtcacttgaacctgggaggcagagactgcagtgagctgagactgtgccactgcactccagcctgggtgacagagtgcgactctgtctaaaaaaaaaaaaaaatatata

SEQ ID NO: 68678 - DNA, 120 bp, synthetic construct
  source 1..120: mol_type = other DNA
acccttcgcggccactagggaacctcaggagaggccgctgtggtggggtgggcggatccccccggagcaggcccaggcccctgctcctgagctctccggcagcgccgcctgctggccaca

SEQ ID NO: 68679 - DNA, 120 bp, synthetic construct
  source 1..120: mol_type = other DNA
gtgaaacgaagacaggccaggaaagggtcaccggtgcaggggactaaggaggcgtgagggccagtgcagcctctggggtcctgggcgtgagctgctgagatggcacccgcgtgagtgtcg

SEQ ID NO: 68680 - DNA, 120 bp, synthetic construct
  source 1..120: mol_type = other DNA
atggtggttcacgcctgtaattccaacagtttgggaggccaaggcaggcagataacttgaggtcaggaattcgagaccagcctggccaacagagtgaaaccctctctctactaaaaatac

SEQ ID NO: 68681 - DNA, 120 bp, synthetic construct
  source 1..120: mol_type = other DNA
aatcctaacactttgggaagccgaggcaggcagatcacctaaggtcaggagttcgagaccagcctggccaacatggtgaaatgctgtctctaccaaaaatacaaaaaattagctgggcat

SEQ ID NO: 68682 - DNA, 120 bp, synthetic construct
  source 1..120: mol_type = other DNA
atgttggtgggcacctgtaatcccagcttctcaggaggctgaggcaggagaaccacttgaacctgggaggtggaggttgcagtgagcggagatcacgccactgcactctagcctgggtga

SEQ ID NO: 68683 - DNA, 120 bp, synthetic construct
  source 1..120: mol_type = other DNA
cacaacccctagaaacatcctacctcagatgagatattgcctaattattttcagaagacagtgaaacatcatggatgtaaatgtttgctacaaaataaatacatgctagaaacagaagca

SEQ ID NO: 68684 - DNA, 120 bp, synthetic construct
  source 1..120: mol_type = other DNA
caacattctcatgctctccctctgcctctgaagaacttcctgccccatctctcatgacaaatcctttctacattctttaagatgcagcccctttgctccttccttaaggatgtctgtctg

SEQ ID NO: 68685 - DNA, 120 bp, synthetic construct
  source 1..120: mol_type = other DNA
ataatttattataataatgtgaaattatttacagtaccctaaccctaaccctaacccctaatcctaaccctaaccctaacccctaaccctaatcctaaccctaaccctaaccctaaccct

SEQ ID NO: 68686 - DNA, 120 bp, synthetic construct
  source 1..120: mol_type = other DNA
aattgggagtccagacagaaaacaatacctctatgctcaactgattttagacaaggtccattaccagtaaattggggaaagaatcctgtcctcaacaagtgatgtaaggcaacttgctat

SEQ ID NO: 68687 - DNA, 120 bp, synthetic construct
  source 1..120: mol_type = other DNA
tcctaaagagctaagtgcaggaacagcaaaatggtaaaacgaattcatttcttctttaagaaaatatgggtactaagttacaagactgtaaccacttaagatgccaaccacaaacagtag

SEQ ID NO: 68688 - DNA, 120 bp, synthetic construct
  source 1..120: mol_type = other DNA
tataaccccagcactttgggaggctgaagcgggtgagtcacctgaggtcaggaatttgagatcagcctggccaacatagtgataccccctctctactaaaaatacaaaaaaattagccag

SEQ ID NO: 68689 - DNA, 120 bp, synthetic construct
  source 1..120: mol_type = other DNA
aatctaactgtattaccaatgtatgttgcaagtggtgggccaaaggtgctgagctggaaatgagtagaatccatacactaaaaacaaaacgtactatatacacgaacagtggactctatt

SEQ ID NO: 68690 - DNA, 120 bp, synthetic construct
  source 1..120: mol_type = other DNA
agaacagaagccattcctattatccaggagattccaagagatttaggaactctgcgtcaggaaccagggccaaagaccaaatattagaacacaagatgctcctagcacccctactgttca

SEQ ID NO: 68691 - DNA, 120 bp, synthetic construct
  source 1..120: mol_type = other DNA
ttaacatcaacacaaccttaaatctgataagaaacatttacaatctattctctctgaagcctgctacctggaagcttcatttccatgataaaaccttggtctccataaccccttatcata

SEQ ID NO: 68692 - DNA, 120 bp, synthetic construct
  source 1..120: mol_type = other DNA
gttgcaatgagccgagatcacgccactgcactccagcctggttgagactctgtctgaaaaaaaaaaaaaaaaaaaaaaagatgttaaacctatctgatacatgttggtatgttaaaaagc

SEQ ID NO: 68693 - DNA, 120 bp, synthetic construct
  source 1..120: mol_type = other DNA
agtattaaatatgctgtcacaatagaagaaagctttactgacttcttaaatgacgtgttgagaccggaaccctaaaatgatagttactgaggatagtgctaatgccctaagaccggaaac

SEQ ID NO: 68694 - DNA, 120 bp, synthetic construct
  source 1..120: mol_type = other DNA
ggtggcggcagcctgcagtcccagctactcgggaggccgggacaggagaatggcatgaacccgggaggcggagcttgctgtgagctgagatcgcgccaccgcactccagcctgggcgaca

SEQ ID NO: 68695 - DNA, 120 bp, synthetic construct
  source 1..120: mol_type = other DNA
ggcaactatgaatataccaattagcatagaaaagctaagaaaggtccttaaagatctcccagtggaaaaaggccccaggaccatctgggtccatagcttagtgtaagctgacttaactaa

SEQ ID NO: 68696 - DNA, 120 bp, synthetic construct
  source 1..120: mol_type = other DNA
caggagaatcgcttgaactgggaggcagaggttgcagtgagccgagttcgcaccactgcactccagcctgggtgacagagcgagattccatctcaaacaaacagaaggaaatgtcgagcc

SEQ ID NO: 68697 - DNA, 120 bp, synthetic construct
  source 1..120: mol_type = other DNA
aaaaaaatgagtattggctcctgttatatggctcctcgatgtgttttagaaaccacacaaacacatcctcaactggacaaccatagagcaggttgaaaaattcctactctacctggcgga

SEQ ID NO: 68698 - DNA, 120 bp, synthetic construct
  source 1..120: mol_type = other DNA
ggctgatctccactgaggaagaggaaattctgccagcagactgcctttggactcaaactgcaacatcagctcttccctgagtctccagcctgcccacctaacctgcagattttggactta

SEQ ID NO: 68699 - DNA, 120 bp, synthetic construct
  source 1..120: mol_type = other DNA
taaagactgtgaatgtgaagagaaatggaatctgagcccagagtttagtagctggcagtttaaactttatatactttaggccgacaggcgtctggatctcctgtactttatatccagcgt

SEQ ID NO: 68700 - DNA, 120 bp, synthetic construct
  source 1..120: mol_type = other DNA
tggaggtagtggcagggcagaatgccaccaacataagccaggcttgctggagtggtcactcttcaagcattggagaaaaattcacagtgcttctaataacatatttttttttccagtaga

SEQ ID NO: 68701 - DNA, 120 bp, synthetic construct
  source 1..120: mol_type = other DNA
ggtccagggagcgctccccacattttagccagaagtaattaactaaaacataaaggccccactttctcttttcacactttgagccacagatcatctaattcctagcttgagacatcagat

SEQ ID NO: 68702 - DNA, 120 bp, synthetic construct
  source 1..120: mol_type = other DNA
tttcttttcttctgcttttcctcctaattcagtgtggaagatgatcaaagtatgacatttcttctaccccagaggctggcatttctgcaggcacaaatgagcttggttttcaagcactgc

SEQ ID NO: 68703 - DNA, 120 bp, synthetic construct
  source 1..120: mol_type = other DNA
agtgatgcttctaatttcacactcatttatttgttattcctaagcattggtatatatgcttagcatttacatctatgtcaggccctgtgctactttgagtgtgaatttatcttctgaaca

SEQ ID NO: 68704 - DNA, 120 bp, synthetic construct
  source 1..120: mol_type = other DNA
gtaggcaatggtgatgtgagtgtgtttgcatactttttttgttcttctcttgtttctgcacacagaaaagaccacatttcctggtacttaggggacttgtgacttgcactagctaatggg

SEQ ID NO: 68705 - DNA, 120 bp, synthetic construct
  source 1..120: mol_type = other DNA
gagctctcaagtgtgtatcgaagagctcctagtgtaacatttttcgtcattgagctaatctggcattatataggatgaaatcattttcttaaattgctaactaagagatgtcatggaata

SEQ ID NO: 68706 - DNA, 120 bp, synthetic construct
  source 1..120: mol_type = other DNA
catttaaggagcctgaggctcagaaaagataaagttgcctaagtccaaacagccagtaattgaattagaatttgaacttgagtttgaagttcttattctttccaatgtctcacaatgtct

SEQ ID NO: 68707 - DNA, 120 bp, synthetic construct
  source 1..120: mol_type = other DNA
tggatgatacatttagaacaaaaaagggaaccaaattgacacagaggcaggaaaaatgttgagccagatatgacagtaaaaagttcttgactgagtgtgtaaacaaatacaaatagtatt

SEQ ID NO: 68708 - DNA, 120 bp, synthetic construct
  source 1..120: mol_type = other DNA
tttgtttgcgcacagattgcatgactaacaaggacgatataaataaaaccattccaagctttatctgtgggtggacaacagtgcctgtgttcaagtgaagcctgagatggctcccacaca

SEQ ID NO: 68709 - DNA, 120 bp, synthetic construct
  source 1..120: mol_type = other DNA
atttttaaaagacttttcttcttctccataagaagttcaacaagcaagcactgatatttggagggctacacccaggacagggaatttgaaacaaaacagtcccctggctgccttcattgg

SEQ ID NO: 68710 - DNA, 120 bp, synthetic construct
  source 1..120: mol_type = other DNA
gatcccttcccaggcttttcaaccccatttcaaatcaaattgactatttccttgaacaagggcaattatattaattgcaaagagttttctgtttgccatctaccaaaggttacagctcaa

SEQ ID NO: 68711 - DNA, 120 bp, synthetic construct
  source 1..120: mol_type = other DNA
aacacacaagaggagagattttactgagaagtttaattggagatagtcattccccatccctgaaaaaaaaaaaaaaaagatacataaacaaaacaactcatatcctacctttagactgca

SEQ ID NO: 68712 - DNA, 120 bp, synthetic construct
  source 1..120: mol_type = other DNA
gtactcaaggtttatttgtcaattgaatgcctaacctattacaattaaggagagagaatactatcccctttcagtccaggtgtatggcaaatggagatgtctgtaggtattaggacatcc

SEQ ID NO: 68713 - DNA, 120 bp, synthetic construct
  source 1..120: mol_type = other DNA
ttgcaagcctgacagtctaacagttgaaaatctatgcaagaccataaggcagactaaagatgggtgagaaggcagggatgggggtaaccaaggacagagatactaagtatacaaatagat

SEQ ID NO: 68714 - DNA, 120 bp, synthetic construct
  source 1..120: mol_type = other DNA
cacagacactgtccacctcccacagacactgtctacctcccacagacactgtccacctcccacagacactgccggccggatgggcggtgtggggatcaggtgcaggtgtggggacagggc

SEQ ID NO: 68715 - DNA, 120 bp, synthetic construct
  source 1..120: mol_type = other DNA
tgtggggacagggcgagggtgtggaatggggtggggacggggtgcaggtgtggggatcaggtgcaggtgtggggacagggcgagggtgtggaatggggtggggacggggtgcaggtgtgg

SEQ ID NO: 68716 - DNA, 120 bp, synthetic construct
  source 1..120: mol_type = other DNA
agaatcatcgtcatcccatttacgagtgtggaaacggggcacagagaagtttcataacttgcccaaggccaggaagctggtcagtggtagagcctgggctctttcctcaacctggaaagt

SEQ ID NO: 68717 - DNA, 120 bp, synthetic construct
  source 1..120: mol_type = other DNA
aaccccgtctctactacaaatacaaaaattaagcaggcatggccaggcgtggtggctcacgcctgtaatcccagcactttgggaggccgaggcaggcagatcacgaggtcaagagttcga

SEQ ID NO: 68718 - DNA, 120 bp, synthetic construct
  source 1..120: mol_type = other DNA
aaaatatggacggatggcgaggcctcccacggtcggtccatggacacagggatccacacgccctctcttgctctcaccagcagaatacggtgttgccaattaaaagttgaatcaatgcaa

SEQ ID NO: 68719 - DNA, 120 bp, synthetic construct
  source 1..120: mol_type = other DNA
cacgactgagtttgtcctgagcaattgtggtagaattgacctcgaggtgcccaatctataatagttccgaattcattgttttgtaatatcaccgcactattggccacacattcttcccaa

SEQ ID NO: 68720 - DNA, 120 bp, synthetic construct
  source 1..120: mol_type = other DNA
gcttttatgagtgcagatgataccagtaagtcagcttgttcatttgctttagtcaaaggccctggtaaattagtgtgtgctcgaatatgtgtaatataaaatgggaaatttctttttctt

SEQ ID NO: 68721 - DNA, 120 bp, synthetic construct
  source 1..120: mol_type = other DNA
tagtgtttttaatgtgtcttttcttatttctattttttgtggcttaatttttctattttctatctgcatccctaaataatgaaaaggagtagaggtttggatcttatcagatgctattgc

SEQ ID NO: 68722 - DNA, 120 bp, synthetic construct
  source 1..120: mol_type = other DNA
atgctcctcccccaaatttgcctctgttctatcatcttaggtaaatatctgtcctcttcgattagctcatagcaactaatttatattttgcgtctttgtgtgactttcaaaagtattgca

SEQ ID NO: 68723 - DNA, 120 bp, synthetic construct
  source 1..120: mol_type = other DNA
cagtagacattatgctatcagctgggttggaaggagttgagaatgggattgactcataaggagatagatccgataaatcactaaatcacgaaatcctcttttttacctctcctaggtgag

SEQ ID NO: 68724 - DNA, 120 bp, synthetic construct
  source 1..120: mol_type = other DNA
tttgctccttaaatgtggcgctctcgccaagaaaaagcttggggactgaattcttgagatttatggtgcaccttattgatcaaatttatctggactttttttagttccccgatgtgtccc

SEQ ID NO: 68725 - DNA, 120 bp, synthetic construct
  source 1..120: mol_type = other DNA
ccaaaagtgctgggattacaggtgtgagccaccacgcccggcctgcaaaacatattttcaaagatttttaaagatatattctctctctctctctctctctctctctctctctctatatat

SEQ ID NO: 68726 - DNA, 120 bp, synthetic construct
  source 1..120: mol_type = other DNA
tccccagtgcttctcaccattccccagtgcccctcaccattccccagtgcttctcaccatttcccagtgcccctcaccattccccagtgcttctcaccatttcccagtgcttctcaccat

SEQ ID NO: 68727 - DNA, 120 bp, synthetic construct
  source 1..120: mol_type = other DNA
aaagttttgtcaatgaagggaaaagcaaagcaaaaggaagagagagagagatgggggtgatttcacaattgtgttttcattccaaccagattaaaagagagtattactggctgggcgcgg

SEQ ID NO: 68728 - DNA, 120 bp, synthetic construct
  source 1..120: mol_type = other DNA
caccacaccacacctattccaaaattgaccacatagttggaaataaagctctcctcagcaaatgtaaaagaacagaaattataacaaactatctctcagaccacagtgcaatcaaactag

SEQ ID NO: 68729 - DNA, 120 bp, synthetic construct
  source 1..120: mol_type = other DNA
gcagacgacatgattgtttatccagaaaaccccatcgtctcagcccaaaatctccttaagctgataagcaacttcagcaaagtctcaggatacaaaatcaatgtacaaaaatcacaagca

SEQ ID NO: 68730 - DNA, 120 bp, synthetic construct
  source 1..120: mol_type = other DNA
caaaagccaaaatcgacaaatgggatctaattaaactaaagagcttctgcacagcaaaagaaactaccatcagagtgaacaggcaacctacaacatgggagaaaattttcgcaacctact

SEQ ID NO: 68731 - DNA, 120 bp, synthetic construct
  source 1..120: mol_type = other DNA
tttggcttttttatttttatttattttttttaggcagagtctcactctgtcacccatgctggagtgcagtggcacaatatcggctcactgcaacctctgtcttcccagttgaagcaattc

SEQ ID NO: 68732 - DNA, 120 bp, synthetic construct
  source 1..120: mol_type = other DNA
tgtatatctatatatctatagagagatgtgtatatctatatatctatagagagatgtgtatatctatatatctatagagagatgtgtatatctatatatctatagagagatgtgtatatc

SEQ ID NO: 68733 - DNA, 120 bp, synthetic construct
  source 1..120: mol_type = other DNA
aatttacaagaaaaaaacaaacaaaccccatcaaaaagtgggcaaaggatatgaacagacacttctcaatagaagacatctatgcagccaaaagacacatgaaaaaatgctcatcatcac

SEQ ID NO: 68734 - DNA, 120 bp, synthetic construct
  source 1..120: mol_type = other DNA
agaaataaacacaaattaaaagattgttacatttacctacgtcattaaggccttaactctttgccagtccaagatgttggattagagggagcgtcagcaggcctctcccacttgggaaga

SEQ ID NO: 68735 - DNA, 120 bp, synthetic construct
  source 1..120: mol_type = other DNA
cagaaatcccataactatcattgtagcttgtgttcttttgtaagtaccacctcctggctggaggccaaccagccaaccaaatggactgtgtagtccattatagcatcttcaagtagaata

SEQ ID NO: 68736 - DNA, 120 bp, synthetic construct
  source 1..120: mol_type = other DNA
ccaccattgggtattgcatttacccatctactttagccatagccagtttttacccatggacataccccttattggcctgaaatagtcaacccagtaaataaaatactggggaacaaataa

SEQ ID NO: 68737 - DNA, 120 bp, synthetic construct
  source 1..120: mol_type = other DNA
ataagtctaaaagccgtgagacaaaatcatcaggtaacctataaagtaaaacatatcagagactaacagcagacttctcagcagaaaccttacaagccagaagggataggagtcctattg

SEQ ID NO: 68738 - DNA, 120 bp, synthetic construct
  source 1..120: mol_type = other DNA
atcatgaaaccaaaaatcatcaaggagaagtttgtttaattttcctgtatatgtatagttttgagggttccttttggggttgatttctagttttattccactcttgtgtgagaagacact

SEQ ID NO: 68739 - DNA, 120 bp, synthetic construct
  source 1..120: mol_type = other DNA
gacatatgcacacgtatgtttattgcagcagtattcacaatagcaaagacttggaacctacccaaatgtccaacaatgatagactggatcaagaaaatgtgacacatatacaccatggaa

SEQ ID NO: 68740 - DNA, 120 bp, synthetic construct
  source 1..120: mol_type = other DNA
ttgtgacctatcatatagtctgtcttggagaatgttctacgttctgatgagaagaatgtatattctgcagttcttgggtagaatgttctgtaaatatctattaggtccatttgttctgga

SEQ ID NO: 68741 - DNA, 120 bp, synthetic construct
  source 1..120: mol_type = other DNA
actgagggagaagaaaaagcaaaaagtttggaaaacttatttgagtgaataattgaggaaaacttccctgatcttgctagagatttagatattcaaatataagaagctcaaagaactcct

SEQ ID NO: 68742 - DNA, 120 bp, synthetic construct; identical to SEQ ID NO: 68736
  source 1..120: mol_type = other DNA

SEQ ID NO: 68743 - DNA, 120 bp, synthetic construct
  source 1..120: mol_type = other DNA
tagcatcttcaagtagaataacactgttcccagaaagaagaaaactcatgtgcaacttctgctatcgccattgcctgcatcaccctggccaaccaggaggtcctgagtctgtccacatga

SEQ ID NO: 68744 - DNA, 120 bp, synthetic construct; identical to SEQ ID NO: 68734
  source 1..120: mol_type = other DNA

SEQ ID NO: 68745 - DNA, 120 bp, synthetic construct
  source 1..120: mol_type = other DNA
tggcgatcattaaaaaggcaggaaacaacaggtgctggagaggatgtggagaaataggaacacttttacactgttggtgggactgtaaactagttcaaccattgtggaagtcagtgtggt

SEQ ID NO: 68746 - DNA, 120 bp, synthetic construct
  source 1..120: mol_type = other DNA
aagccagccgacgcttaggaaaatagaaaataacctacgtgattatcagggcaggtcccctgatacttggcaatgcaggctcttttttggttccatatgaactttaaagtagttttttcc

SEQ ID NO: 68747 - DNA, 120 bp, synthetic construct
  source 1..120: mol_type = other DNA
ctcacggatattcgtctaaaatcctctttttttgttgggtctctgccagtctgttgtgtcaagatgatgctggcctcataagatgagttagggaggattccctctttttctattgattga

SEQ ID NO: 68748 - DNA, 120 bp, synthetic construct
  source 1..120: mol_type = other DNA
agagcttggctcgagaaagttcggggcctacaaaggcggttttgagctgggcaggagttgagcccaaagagcttgcttacttgctgggaggcagggccgggagacgccgacttcaggacg

SEQ ID NO: 68749 - DNA, 120 bp, synthetic construct
  source 1..120: mol_type = other DNA
gagaccgtttggggcctggagacgccatcggagggcaggagctgatcctggagaggccaccgtgaggcctgacctgggcctggggagcttggcttgaggaagctgtgggccgaccaaggc

SEQ ID NO: 68750 - DNA, 120 bp, synthetic construct
  source 1..120: mol_type = other DNA
tattgaagtggttaaaggacctggagggttctatgatcaataactagctaccagctcctatccagcactgcttttataccatcatctttaaacatgtgcttgtctctgctctgcaagaga

SEQ ID NO: 68751 - DNA, 120 bp, synthetic construct
  source 1..120: mol_type = other DNA
ctctgtttgaacatgtctctgtgtctttaaatagccctcttttccccactgaagccctgtccctcccaccacgaataaagatgatctttgtcttctttaaaacttgccataagtttgcaa

SEQ ID NO: 68752 - DNA, 120 bp, synthetic construct
  source 1..120: mol_type = other DNA
ccgcacctggtccgtttttacttgcttatggtggtctggaagcaaacctgcattatcttcaaggtacacccatatattgatcttgcattgtccaatcttgctgaatgtgaacgtttttat

SEQ ID NO: 68753 - DNA, 120 bp, synthetic construct
  source 1..120: mol_type = other DNA
taatacagccagaaatccatcaggatctagggaaaataaaagtgcacaggcccctaccttggagtctagcaaatccatgcctgaaagtagcctcaggggcagtctttgtctaattaaaat

SEQ ID NO: 68754 - DNA, 120 bp, synthetic construct
  source 1..120: mol_type = other DNA
tgaccttgtgatttgcctgcctcagcctcccaaagtgctaggattacaggcgtgagccactgtgcctagccagcttggtagactgtcaaactctttttgaccatgacttccaggaagaaa

SEQ ID NO: 68755 - DNA, 120 bp, synthetic construct
  source 1..120: mol_type = other DNA
ccccatctacctctttttttgtttttttgagacagagtcttgctttgtcaccgaggctggagtacaatggcgtgatctcagcttaccccaacctccgcctcccaggttcaagggattctc

SEQ ID NO: 68756 - DNA, 120 bp, synthetic construct
  source 1..120: mol_type = other DNA
ctggctaatttttgaatttttagtacaggcggggtttcgccatgttggccaggatggtctcgatctcttgaccacgtgatctgcccacctcagcctcccaaagtgctaggattacaggca

SEQ ID NO: 68757 - DNA, 120 bp, synthetic construct
  source 1..120: mol_type = other DNA
tacaggaacatgccacgatgcctgtagttccagctacacaatttaaaaatttttttgtagagacagggtcttactatgttgcccagccctgtctcaaactcctgagctcaagtgatcctc

SEQ ID NO: 68758 - DNA, 120 bp, synthetic construct
  source 1..120: mol_type = other DNA
tgatgctttggtgactcacagccctacctccccccagggcgggtggggtggaagcttcccaaaccaatacacattatagccactttgggaggctgaagcggcagatcacaaggtcaagag

SEQ ID NO: 68759 - DNA, 120 bp, synthetic construct
  source 1..120: mol_type = other DNA
gttcaagcaattctcctgcctcagcctcccgagtagttggaattacaagtgcccaccaccacgcctggctaatttttgtatttttagtagagactgggttttgctatgttggccaggctg

SEQ ID NO: 68760 - DNA, 120 bp, synthetic construct
  source 1..120: mol_type = other DNA
ttgtcaattccatgacaacgggagacgcttttaagtcacaagtgattttcgcaagcaacaaactatatttttatcactccgaatcctcccaaatgactacttcctcaagggctgtgtttg

SEQ ID NO: 68761 - DNA, 120 bp, synthetic construct
  source 1..120: mol_type = other DNA
ccctgtccccaactctgacctcataatgatagctggaatccggtgggaatattgacaccatggaaattagcaactgctacaagtcagaacgctgggtgtgttaaatactgaccagtccag

SEQ ID NO: 68762 - DNA, 120 bp, synthetic construct
  source 1..120: mol_type = other DNA
tctcctgagcctgggacatctaggctgcagtgaggtatgatggcaccactgcactccagcctgggtgacagagcgagaccccaactcttaaaaaaaaaaaagaaaaaaaaaagaattggc

SEQ ID NO: 68763 - DNA, 120 bp, synthetic construct
  source 1..120: mol_type = other DNA
tacctgtcgggtactgtgcttattacctgggtgataaaataatctgtacaccaaactgccatgacacaaaatttacccatgtaacaaccctgcatgtgtgccctcagtatctaaaacaag

SEQ ID NO: 68764 - DNA, 120 bp, synthetic construct
  source 1..120: mol_type = other DNA
ccattctcccatctcagcttcccatatagctgggaccacgggtgtccactactgtgcctggcttctgccttgattactgtagttttatagtaaatattaaatcagtcttccaactttctt

SEQ ID NO: 68765 - DNA, 120 bp, synthetic construct
  source 1..120: mol_type = other DNA
tttgtatcctgcaaccttgctataatcgcttattagttccaggaagtttctgtgttgattctttgtaattttccatataggtaatcatgtcatcttggaacaataatgaagtcattggct

SEQ ID NO: 68766 - DNA, 120 bp, synthetic construct
  source 1..120: mol_type = other DNA
gtggcgttgggatttgaactgtgaagattgatcatctgaactgggtcattcttgtcatactcaactaaaacagcgtcaagaggccaggggggaaaaactgacacagaaccatgctccaaa

SEQ ID NO: 68767 - DNA, 120 bp, synthetic construct
  source 1..120: mol_type = other DNA
tatttttattgtatttatttataagagacaagagtcttgctctgtttcccagtctggagtgcagtgctgattgtagctcactgcagcctcgaatttccaagttcgagcagttttcctgcc

SEQ ID NO: 68768 - DNA, 120 bp, synthetic construct
  source 1..120: mol_type = other DNA
ataagaaaataatttccgatgtgatagaagttctgtaagcaaaacagagacactgcctgctttggtaattatgacagcaaaacaccatcatcacccaaaccaccaaccgccagcagggtc

SEQ ID NO: 68769 - DNA, 120 bp, synthetic construct
  source 1..120: mol_type = other DNA
agaatccttcccgccagcaccctttattctgtcgactcaggtgtgggttcttagtggcaccccacgtctcgtggcctaaggccccactccacccgcatctgtggtccggagatctgccca

SEQ ID NO: 68770 - DNA, 120 bp, synthetic construct
  source 1..120: mol_type = other DNA
tcccttcccagccccgcccccttccgctccctctaagtcctgagtcccgtctctcccaccccaactccgagtgtcctcagctccgccccagccacaagaggagctgcccctcacagcggc

SEQ ID NO: 68771 - DNA, 120 bp, synthetic construct
  source 1..120: mol_type = other DNA
aagcttcaaaacaaacacacaaaaatccctcagctctcaagatattggttgtttagtctttatttttactgtatgttactctcgctcaggctggggtgcagtggcacaatctcggcttac

SEQ ID NO: 68772 - DNA, 120 bp, synthetic construct
  source 1..120: mol_type = other DNA
ggattgcttgagcccaggagttcaagaccaacctgggcagcatagcaaaaccccatttcacaccgctctcacacagacacaaaaccatttagaagaagctaaactgggacggatctagaa

SEQ ID NO: 68773 - DNA, 120 bp, synthetic construct
  source 1..120: mol_type = other DNA
aagcccaccacagactgggtgagctgcagagggaggatggactgaactccacctccagggtcattctgtttttttgttttgttttgttttgtttttttaaaaaaaccacagtctcgtttg

SEQ ID NO: 68774 - DNA, 120 bp, synthetic construct
  source 1..120: mol_type = other DNA
gaattctgtcactttccacgatgaatttgtaaaaatcattatctgcactgcaagacctactcatccatattagcatgccacagcagggagagccaggtgaaaggttttgtttcccatcat

SEQ ID NO: 68775 - DNA, 120 bp, synthetic construct
  source 1..120: mol_type = other DNA
agtgctgggattacaagtgtgagccaccatacccagcctgcagagatttttttttagggatgggaagatcacagaaatgcatcaaagcacatattgtccaaataagaagaagtgaaaagg

SEQ ID NO: 68776 - DNA, 120 bp, synthetic construct
  source 1..120: mol_type = other DNA
tcacagtgttagccaggatggtcttgatctcctgacctcgtgatccacccaccttggcatcccatagtgctgggtaaaaaacaaaaaaaaaagttttaaaatagctcaaatttaagtaca

SEQ ID NO: 68777 - DNA, 120 bp, synthetic construct
  source 1..120: mol_type = other DNA
gaacacttttacactgttggtgggactgtaaagtagttcaacccttgtgtaagtcagtgtggtgattcctcagggatctagaactagaaataccatttgacccagccatcccattactgg

SEQ ID NO: 68778 - DNA, 120 bp, synthetic construct
  source 1..120: mol_type = other DNA
gagattgcaacgctgcactccagcctggcgacagagggagactccgtctcaaaaaaaaattaatgttttcctctatgttattttaggaatcaagcaacatgggaggtgttgagacagcac

SEQ ID NO: 68779 - DNA, 120 bp, synthetic construct
  source 1..120: mol_type = other DNA
atactagacaagaaactgtagattagctactactgaagctcataaaatctaaaagaaactgccttttagcaatattactaaggtaatatgtgagtttttattaatacataataatatatt

SEQ ID NO: 68780 - DNA, 120 bp, synthetic construct
  source 1..120: mol_type = other DNA
ggtaagtaggcagatggattacatgattttttgttaatttttaatttcgctaccttcagagaatatgatctgtaggttccagtattgatttatttttctgtgtagccttacataggatca

SEQ ID NO: 68781 - DNA, 120 bp, synthetic construct
  source 1..120: mol_type = other DNA
agcgagaccaatgggaggcttctctgctcaggtgagaggcggtggtcatctggattagggagaatttgaactcaaggctacaggaactgagaagacagttccagtttaccatatgagcag

SEQ ID NO: 68782 - DNA, 120 bp, synthetic construct
  source 1..120: mol_type = other DNA
tttttgaccaccactttcttttttccagctgcctcccaaatccaacacacttcaattactccaaattttcacttatgtgtctcactcactttcttgcaaatttcccctcctcccagctga

SEQ ID NO: 68783 - DNA, 120 bp, synthetic construct
  source 1..120: mol_type = other DNA
acattacctgacaaatttgcaggcagccatttatatttttcatcttacaaagcagcccttattgtacttgagaggaaatgcactcaagccgtgaggcgtagccccacctcccctacttca

SEQ ID NO: 68784 - DNA, 120 bp, synthetic construct
  source 1..120: mol_type = other DNA
gcctctgcccttttggccacgttgtctcctgcctcttagggtggtgggattctgggctctcattgcagcaggtggattcacttagctctcctccccttttagcattactgtcttctgtaa

SEQ ID NO: 68785 - DNA, 120 bp, synthetic construct
  source 1..120: mol_type = other DNA
gggcctcgtgtttacctggggcctgtatccacccactacccaaagtcaagttgggaaaagcgcccaggataggtgaggagcacagaacagggacctcattcataagaaattctgctgtag

SEQ ID NO: 68786 - DNA, 120 bp, synthetic construct
  source 1..120: mol_type = other DNA
agtccaattccactttgactcagagctgtgggatgtcaacaaggtgcttcccctctccggtcctcaatgtctttgtctattacaagagaggatggtgccagctcagcaagctccacgggg

SEQ ID NO: 68787 - DNA, 120 bp, synthetic construct
  source 1..120: mol_type = other DNA
catgcggtctgggttaacagaaacatcatttcgtggcacatgaatgtatttttatgggagagaaagatgatgagctgaaagagggaggcaatgagaagcaaggaggacctatgctgctca

SEQ ID NO: 68788 - DNA, 120 bp, synthetic construct
  source 1..120: mol_type = other DNA
gttcatctcgttcgtggctaaacaacttatcatatggtagtgaactatcttctggggccccaatattttgtttattttttaaaaataaaattagtaccattgtttattttctgaatgtac

SEQ ID NO: 68789 - DNA, 120 bp, synthetic construct
  source 1..120: mol_type = other DNA
ttgttcaagaatttggcatccaaattaatgagaaagattggcctgtaattttctgttcatgtaatgcccttgtcagaacaaaacaaattggtctcataaaacaagttgggaattgttctc

SEQ ID NO: 68790 - DNA, 120 bp, synthetic construct
  source 1..120: mol_type = other DNA
catgcactcccacacacataaacagacccacacttatccacatgtacccacccatacatacacagacctctctgtgtatctcccagagctacaaatgccaatcttgagaatgaagatttt

SEQ ID NO: 68791 - DNA, 120 bp, synthetic construct
  source 1..120: mol_type = other DNA
gcctcatagtccttcccacagtccctttttcttatctttttttagacaaggtaagctcagagggacttttaatatgccaatcgatgttaataaaacacaagtcaaagacaagtgcaaaca

SEQ ID NO: 68792 - DNA, 120 bp, synthetic construct
  source 1..120: mol_type = other DNA
ttgagatgtgtgcgttcaactcacagagtttaacatttcttttcatagaggagtttggaaacacactgtttgtaaagtctgcaattggatatatggacctgtttgaggccttcgttggaa

SEQ ID NO: 68793 - DNA, 120 bp, synthetic construct
  source 1..120: mol_type = other DNA
tgtgcgttccactcacagagtttaaactttcttttcatagaggagtttggaaacacactgtttgtaaagtctgcaagtggatatatggacctgtttgaggccttcgttggaaacgggatt

SEQ ID NO: 68794 - DNA, 120 bp, synthetic construct
  source 1..120: mol_type = other DNA
catcgaatggaatcaaatggaatcgaattgaatcatcgaatggactctaatggaatcatcatcgaatggaatcgaatggaatcatcgaatggactcgaatggaatcattgaatggactcg

SEQ ID NO: 68795 - DNA, 120 bp, synthetic construct
  source 1..120: mol_type = other DNA
aaaaatgttgagttttaactgacaattcattattaggaaagataagaggaaatgatatctagtgagaggctatatgactgaactctaagagcaaggtcacagcagaaattgtgtacttga

SEQ ID NO: 68796 - DNA, 120 bp, synthetic construct
  source 1..120: mol_type = other DNA
tctccacccttaactccttcttttttcctatgtgtggttgagaagcactggttagcctcaagaagcttgcaggcaggcccaaaaatcagaaagacaggcatgatgtggggagctctcagt

SEQ ID NO: 68797 - DNA, 120 bp, synthetic construct
  source 1..120: mol_type = other DNA
tgaagcattctttggaaacgagaatatcttcacatgaaacctagacagaagcattctcagaaacgtctttgtgatgtgtccattcaactcacagagttgatagaacagttttgataaagc

SEQ ID NO: 68798 - DNA, 120 bp, synthetic construct
  source 1..120: mol_type = other DNA
atagtgcagttttgaaacattctttttaaaaaatctgcagttggacatttggagctcttttaggctatcggttgaaaaggaaatatcttcacattaaaacaagacggaagcattctccga

SEQ ID NO: 68799 - DNA, 120 bp, synthetic construct
  source 1..120: mol_type = other DNA
tttgatagagcagttttgaaacagtctttccgaagaatcttcaagtgggcatttcgagggctttgaggaccattgcggataaggaaatatcttcccataaggagtagacagaagtataat

SEQ ID NO: 68800 - DNA, 120 bp, synthetic construct
  source 1..120: mol_type = other DNA
tactgcagttttgaaaccgtctttttgaggaatcttcgagtgggcattttgagggctttggggactattgtggataaggaaatatcttcacatgaatagtagacagaagtgttctcagaa

SEQ ID NO: 68801 - DNA, 120 bp, synthetic construct
  source 1..120: mol_type = other DNA
ttgaacctttcttttgttagagcagttttgaaacactccttttgtagaatctgcaggcagatatttaagtactctttgaagcattctttggaaacgagaatatcttcacctaaatcctag

SEQ ID NO: 68802 - DNA, 120 bp, synthetic construct
  source 1..120: mol_type = other DNA
tcttcacccaaaaactaaatggaagctttgtccgaaactttttgtgatgtgtgcgttcaactcacggagctgaaccttccttttcatagaccagttttgaatcactctttttgtagaatc

SEQ ID NO: 68803 - DNA, 120 bp, synthetic construct
  source 1..120: mol_type = other DNA
cgctttgaagccttcgttggaaacgggaatatcttccccttgaaaccacacagaagcattctcagaaacttctttgtgatgtgggcattgaactcacggagctgaaccttccttcggatt

SEQ ID NO: 68804 - DNA, 120 bp, synthetic construct
  source 1..120: mol_type = other DNA
tcccaggttgaacctttcttttgttagagcagtttttaaacactccttttgtagaatctgcaggcggatatttaagtactctttgaagcattctttggaaacgagaatatcttcacctaa

SEQ ID NO: 68805 - DNA, 120 bp, synthetic construct
  source 1..120: mol_type = other DNA
atagtgcagttttgaaacattctttttaaaaaatctgcagttggacatttggagctctttcaggctatcggttgaaaaggaaatatcttcacattaaaacaagacagaagcattctcaga

SEQ ID NO: 68806 - DNA, 120 bp, synthetic construct
  source 1..120: mol_type = other DNA
caggtggatatttggagtgctttgaagccttctttggaaacgggagtatcgtcacataaatatagacagaagtattcccagaaacttctttgtgatttgtgcattcaactcacagagttg

SEQ ID NO: 68807 - DNA, 120 bp, synthetic construct
  source 1..120: mol_type = other DNA
gtagaaaaggaaatatcttcatataaaaactagacagaagcattctcagaaacgactttgtgatgtgtgcattctacacacaaagttgaaactttcttttgatagagcagttttgaaacc

SEQ ID NO: 68808 - DNA, 120 bp, synthetic construct
  source 1..120: mol_type = other DNA
agaagcattctcagaaactcctttatgatgtctgcattcaactcacagagttgaaccttccttttgatagagcagttttgaaacactctttctgtagaatctggaggcggatattagggt

SEQ ID NO: 68809 - DNA, 120 bp, synthetic construct
  source 1..120: mol_type = other DNA
ctcacagagttgaaccttccttttgatagagcagttttgaaaccctctttttgtacaatctgcaagtggatatttggagcaaattgaagccttctttggaaatgggaatatcttaaatct

SEQ ID NO: 68810 - DNA, 120 bp, synthetic construct
  source 1..120: mol_type = other DNA
cactctttttgtagaatctgcaattggatatttggagcgctttcaggcctctggtagaaaaggaaatatcttcacataaaaactagacagaagcattctcagaaacgactttgtgatgtg

SEQ ID NO: 68811 - DNA, 120 bp, synthetic construct
  source 1..120: mol_type = other DNA
ttctactcacatagttgaaatttccttctgatactgcagttttgaaacagtctttttgagtgatcttcaagtgggcattttgagggctttggggactattgtggataaggaaatatcttc

SEQ ID NO: 68812 - DNA, 120 bp, synthetic construct
  source 1..120: mol_type = other DNA
ctttgtgatgtgtgcattcaactcccaggttgaacctttcttttgttagaacagttttgaaacactccttttatagaatctgcaggcggatatttaagtactctttgaagcattctttgg

SEQ ID NO: 68813 - DNA, 120 bp, synthetic construct
  source 1..120: mol_type = other DNA
tgatgtgtgcgttcaactcacagagctgaaccttccttttcatagaccagttttgaatcactctttttgtaggatccgcatttagatatttggagcgctttgaagacttcattgtaatcg

SEQ ID NO: 68814 - DNA, 120 bp, synthetic construct
  source 1..120: mol_type = other DNA
tatttggagtgctttgaagccttcttgggaaacgggactatcgtcacataaaaatagacagaagtattcccagaaacttctttgtgatttgtgcattcaactcacagagttgaagcttct

SEQ ID NO: 68815 - DNA, 120 bp, synthetic construct
  source 1..120: mol_type = other DNA
cacctaaaacctagacagaagcattctcagaaacatctttgtgatgtgtccattcatctcacagagttgatagaacagttttgatagagcagttttgaaacactctttttaaagaatctg

SEQ ID NO: 68816 - DNA, 120 bp, synthetic construct
  source 1..120: mol_type = other DNA
agagcagttttgaaaccctctttttgaagaatctgaaagtgcataattgcagcactttgacgcttaaggtcgaaaaggaaatatcttcatataaaaactagacagaagcattctcagaaa

SEQ ID NO: 68817 - DNA, 120 bp, synthetic construct
  source 1..120: mol_type = other DNA
gatgtgtgcattcaactcacagaattgaaccttccttttgatacagcagttttgaaacactcttttttcagaatctgcaagtggatatttggagcacatttatgcctgtggtagaaaagg

SEQ ID NO: 68818 - DNA, 120 bp, synthetic construct
  source 1..120: mol_type = other DNA
caagacagaagcattctcagaaactcctttatgatgtctgcattcaactcacagagttgaaccttcctttccatagagcagttttgaaacactctttctgtagaatctggagacggatat

SEQ ID NO: 68819 - DNA, 120 bp, synthetic construct
  source 1..120: mol_type = other DNA
cgtcacctgaaaactagaaagaagcattctctgaaaccactttgtgatgtgtgcattcatctcacagagttgaaccttccttttgatagagcagttttgaaaccctctttttgtacaatc

SEQ ID NO: 68820 - DNA, 120 bp, synthetic construct
  source 1..120: mol_type = other DNA
agtataatcagaaacttcattttgatgtgtacattcaactcacaaagcagacccttacttttgatagagaagttttgaaacactctttttgtagaatctgcaattggatgtttggagcgc

SEQ ID NO: 68821 - DNA, 120 bp, synthetic construct
  source 1..120: mol_type = other DNA
accttcctttccatagagcagttttgaaacactctttctgtagaatctggagacggatattagggtgctttgaagccttcttgggaaacaggattatcttcacataaaaattagacagaa

SEQ ID NO: 68822 - DNA, 120 bp, synthetic construct
  source 1..120: mol_type = other DNA
ctgcagttttgaaacagtctttttgagggatcttcaagcgggcattttgagggctttggggactgttgtggataaggaaatatcttcacatgaaaagtagacagaagtgttctcagaaac

SEQ ID NO: 68823 - DNA, 120 bp, synthetic construct
  source 1..120: mol_type = other DNA
gagcagtctggaaacactctgtttctaaaatctgcaaatggacatttggagcgctttgaaggttatgatggaaaagggaatatcttcgcattaaaactagacagaagcattctcagaaac

SEQ ID NO: 68824 - DNA, 120 bp, synthetic construct
  source 1..120: mol_type = other DNA
agtctgtggttgaaaaggtaatatcttcacctaaaaactaaatggaagcattgtccgaaactttttgtgatgtgtgcgttcaactcacagagctgaaccttccttttcatagaccagttt

SEQ ID NO: 68825 - DNA, 120 bp, synthetic construct
  source 1..120: mol_type = other DNA
agtacaaccttacttttatagagcagttttgaaacagtctttttgtagactctgcaagtggatatttggagcgctttgaagccttcgttggaaacgggaatatcttccccttgaaactag

SEQ ID NO: 68826 - DNA, 120 bp, synthetic construct
  source 1..120: mol_type = other DNA
tgaaacactccttttgtagaatctgcaggcggatatttaagtactctttgaagcattctttggaaacgagaatatcttcacctaaaacctagacagaagcattctcagaaacatctttgt

SEQ ID NO: 68827 - DNA, 120 bp, synthetic construct
  source 1..120: mol_type = other DNA
atatcttcacattaaaacaagacagaagcattctcagaaactcctttatgatgtctgcattcaactcacagagttgaaccttccttttgatagagcagttttgaaacactctttctgtag

SEQ ID NO: 68828 - DNA, 120 bp, synthetic construct
  source 1..120: mol_type = other DNA
cgtcacctaaaaactagaaagaagcattctctgaaaccactttgtgatgtgtgcattcatctcacagagttgaaccttccttttgatagagcagttttgaaaccctctttttgtacaatc

SEQ ID NO: 68829 - DNA, 120 bp, synthetic construct; identical to SEQ ID NO: 68810
  source 1..120: mol_type = other DNA

SEQ ID NO: 68830 - DNA, 120 bp, synthetic construct
  source 1..120: mol_type = other DNA
ttccactaaaaaagtacaaccttacttttatagagcagttttgaaacagtctttttgtagactctgcaagcggatatttggagcgctttgaagccttcgttggaaacgggaatatcttcc

SEQ ID NO: 68831 - DNA, 120 bp, synthetic construct
  source 1..120: mol_type = other DNA
ttgatagagcagtctggaaccactctgtttctaaaatctgcaaatggacatttggagcgctttgaaggttatgatggaaaagggaatatcttcgcattaaaactagacagaagcattctc

SEQ ID NO: 68832 - DNA, 120 bp, synthetic construct
  source 1..120: mol_type = other DNA
cattgtccgaaacgttttgtgatgtgtgcgttcaactcacagagctgaaccttccttttcatagaccagttttgaatcactctttttgtagaatccacatttagatatttggagcgcttt

SEQ ID NO: 68833 - DNA, 120 bp, synthetic construct
  source 1..120: mol_type = other DNA
gttggaaacgggaatatcttccccttgaaaccacacagaagcattctcagaaacttctttgtgatgtgggcattgaactcacggagctgaaccttcctttggattgagcagttttgacaa

SEQ ID NO: 68834 - DNA, 120 bp, synthetic construct
  source 1..120: mol_type = other DNA
ttgatagaacagttttgatagagcagttttgaaacactctttttaaagaatctgccaattcatatgtgcagtgctttgaggcttatggtagaaaaggaaatatcttcatataaaaagtag

SEQ ID NO: 68835 - DNA, 120 bp, synthetic construct
  source 1..120: mol_type = other DNA
attaaaacaagacagaagcattctcagaaactcctttatgatgtctgcattcaactcacagagttgaaccttcctttccatagagcagttttgaaacactctttctgtagaatctggagg

SEQ ID NO: 68836 - DNA, 120 bp, synthetic construct
  source 1..120: mol_type = other DNA
tggaaacgggaatatcgtcacctaaaaactagaaagaagcattctctgaaaccactttgcgatgtgtgcattcatctcacagagttgaaccttcctgttgatagagcagttttgaaaccc

SEQ ID NO: 68837 - DNA, 120 bp, synthetic construct
  source 1..120: mol_type = other DNA
actttgtgatgtgtgcattctacacacaaagttgaaactttcttttgatagagtagttttgaaatcgtctttccgaagaatcttcaagtgggcatttcgagggctttgaggaccattgcg

SEQ ID NO: 68838 - DNA, 120 bp, synthetic construct
  source 1..120: mol_type = other DNA
tgatgtctgcattcaactcacagagttgaaccttcctttccatagagcagttttgaaacactctttctgtagaatctggaggtggatattagggtgctttgaagccttcttgggaaacag

SEQ ID NO: 68839 - DNA, 120 bp, synthetic construct; identical to SEQ ID NO: 68819
  source 1..120: mol_type = other DNA

SEQ ID NO: 68840 - DNA, 120 bp, synthetic construct
  source 1..120: mol_type = other DNA
tgcggataaggaaatatcttcccataagaagtagacagaagtataatcagaaacttcatttcgatgtgtacattcaactcacaaagcagacccttacttttgatagagaagttttgaaac

SEQ ID NO: 68841 - DNA, 120 bp, synthetic construct
  source 1..120: mol_type = other DNA
tgatgtgtgcattcaactcacagcgttgaaacttccttttgccagagcagttttgaaaccctctttttgaagaatctgaaagtgcataattgcagcactttgaggcttaaggtcgaaaag

SEQ ID NO: 68842 - DNA, 120 bp, synthetic construct; identical to SEQ ID NO: 68819
  source 1..120: mol_type = other DNA

SEQ ID NO: 68843 - DNA, 120 bp, synthetic construct
  source 1..120: mol_type = other DNA
aacagtctttccgaagaatcttcaagtgggcatttcgagggctttgaggaccattgcggataaggaaatatcttcccataagaagtagacagaagtataatcagaaacttcattttgatg

SEQ ID NO: 68844 - DNA, 120 bp, synthetic construct
  source 1..120: mol_type = other DNA
cacataaaaattagacagaagcattctcagaaacttctttgtgatgtgtgcattcaactcacagcgttgaaacttccttttgccagagcagttttgaaaccctctttttgaaggatctga

SEQ ID NO: 68845 - DNA, 120 bp, synthetic construct
  source 1..120: mol_type = other DNA
agaaactactttgtgatgtgtgcattcaactcaccgaattgaaccttccttttgatacagcagttttgaaacactctttgtttagaatctgcaagtggatatttggagcacatttatgcc

SEQ ID NO: 68846 - DNA, 120 bp, synthetic construct
  source 1..120: mol_type = other DNA
ctgtggttgaaaaggtaatatcttcacctaaaaactaaatggaagcattgtccgaaactttttgtgatgtgtgcgttcaactcacagagctgaaccttccttttcatagaccagttttga

SEQ ID NO: 68847 - DNA, 120 bp, synthetic construct
  source 1..120: mol_type = other DNA
aaaagtagacagaagtgttctcagaaacttcattttgatgggtgcattccactaacaaaggacaaccttacttttatagagcagttttgaaacagtctttttgtagactctgcaagtgga

SEQ ID NO: 68848 - DNA, 120 bp, synthetic construct
  source 1..120: mol_type = other DNA
tggaaaagggaatatcttcgcattaaaactagacagaagcactctcagaaacttctttgtgatgtgtgcattcaactcccaggttgaacctttcttttgttagagcagtttcgaaacact

SEQ ID NO: 68849 - DNA, 120 bp, synthetic construct
  source 1..120: mol_type = other DNA
ggagctcttttaggctatcggttgaaaaggaaatatcttcacattaaaacaagacagaagcattctcagaaactcctttatgatgtctgcattcaactcacagagttgaaccttcctttc

SEQ ID NO: 68850 - DNA, 120 bp, synthetic construct
  source 1..120: mol_type = other DNA
actagaaagaagcattctctgaaaccactttgtgatgtgtgcattcatctcacagagttgaactttctttttgatagagcagttttgaaaccttctttttgtacaatctgcaagtggata

SEQ ID NO: 68851 - DNA, 120 bp, synthetic construct; identical to SEQ ID NO: 68810
  source 1..120: mol_type = other DNA

SEQ ID NO: 68852 - DNA, 120 bp, synthetic construct; identical to SEQ ID NO: 68825
  source 1..120: mol_type = other DNA

SEQ ID NO: 68853 - DNA, 120 bp, synthetic construct; identical to SEQ ID NO: 68826
  source 1..120: mol_type = other DNA

SEQ ID NO: 68854 - DNA, 120 bp, synthetic construct
  source 1..120: mol_type = other DNA
ctttttaaaggatctgccagttcatatgtgcagtgctttgaggcttatggtagaaaaggaaatatcttcatataaaaactagacagaagcattctcagaaacgactttgtgatgtgtgta

SEQ ID NO: 68855 - DNA, 120 bp, synthetic construct
  source 1..120: mol_type = other DNA
atatcttcacattaaaacaagacagaagcattctcagaaactcctttatgatgtctgcattcaactcacagagttgaaccttccttttcatagagcagttttgaaacactctttctgtag

SEQ ID NO: 68856 - DNA, 120 bp, synthetic construct
  source 1..120: mol_type = other DNA
atgtgtgcattcatctcacagagttgaaccttccttttgatagagcagttttgaaaccctctttttgtacaatctgcaagtggatatttggagcaaattgaagccttctttggaaattag

SEQ ID NO: 68857 - DNA, 120 bp, synthetic construct
  source 1..120: mol_type = other DNA
gaaacactctttttgtagaatctgcaattggatatttggagcgctttcaggcctctggtaaaaaaggaaatatcttcacataaaaactagacagaagcattctcagaaacgactttgtga

SEQ ID NO: 68858 - DNA, 120 bp, synthetic construct
  source 1..120: mol_type = other DNA
gagtgggcattttgagggctttggggactattgtggataaggaaatatcttcacatgaatagtagacagaagtgttctcagaaacttcattttgatgggtgcattcaagtaacaaagtac

SEQ ID NO: 68859 - DNA, 120 bp, synthetic construct
  source 1..120: mol_type = other DNA
cgcattaatactagacagaagcattctcagaaacttctttgtgatgtgtgcattcaactcccaggttgaacctttcttttgttagagcagttttgaaacactccttctgtagaatctgca

SEQ ID NO: 68860 - DNA, 120 bp, synthetic construct
  source 1..120: mol_type = other DNA
ccagttttgaatcactctttttgtagaatccgcatttagatatttggagcgctttgaagacttcattggaatcgcgaataccttcacataaaaactagacagaaccattctcagaaactt

SEQ ID NO: 68861 - DNA, 120 bp, synthetic construct
  source 1..120: mol_type = other DNA
ccccttgaaactagacagaagcattctcagaaacttctttgtgatgtgggcattgaactcacggagctgaaccttcctttggattgagcagttttgaaaaactcttcctttataatctgc

SEQ ID NO: 68862 - DNA, 120 bp, synthetic construct; identical to SEQ ID NO: 68834
  source 1..120: mol_type = other DNA

SEQ ID NO: 68863 - DNA, 120 bp, synthetic construct
  source 1..120: mol_type = other DNA
aatatcttcatataaaaactagacagaagcattctcagaaactactttgtgatgtgtgcattctactcacatagttgaaatttccttctgatgctgcagttttgaaacagtatttttgag

SEQ ID NO: 68864 - DNA, 120 bp, synthetic construct
  source 1..120: mol_type = other DNA
gcctacggtagaaaaggaaatatcttcacataacaactagacagaagcattctcagaaacgaatttgtgttgtgtgcattctactaccatagttgaaaatttcttttgatagagcagtct

SEQ ID NO: 68865 - DNA, 120 bp, synthetic construct
  source 1..120: mol_type = other DNA
ttcttgcagaatctgcaagtggacatttggagcgtttcgaaggctgtggttgaaaaggtaatatcttcacccaaaaactaaatggaagcattgtccgaaactttttgtgatgtgtgcgtt

SEQ ID NO: 68866 - DNA, 120 bp, synthetic construct
  source 1..120: mol_type = other DNA
tcaagtgggcattttgagggctttggggactattgtggataaggaaatatcttcacatgaaaagtagacagaagtgttctcagaaacttcattttgatgggtgcattccactaacaaagt

SEQ ID NO: 68867 - DNA, 120 bp, synthetic construct
  source 1..120: mol_type = other DNA
tccgcaggcggatatttaagtactctttgaagcattctttggaaacgagaatatcttcacctaaaacctagacagaagcattctcagaaacatccttgtgatgtgtccattcatctcaca

SEQ ID NO: 68868 - DNA, 120 bp, synthetic construct; identical to SEQ ID NO: 68827
  source 1..120: mol_type = other DNA

SEQ ID NO: 68869 - DNA, 120 bp, synthetic construct; identical to SEQ ID NO: 68828
  source 1..120: mol_type = other DNA

SEQ ID NO: 68870 - DNA, 120 bp, synthetic construct
  source 1..120: mol_type = other DNA
tatcttcatataaaacctagacagaagcattctcagaaacgactttgtgatgtgtgcattctacacacaaagttgaaactttcttttgatagagcagttttgaagcagtctttccgaaga

SEQ ID NO: 68871 - DNA, 120 bp, synthetic construct
  source 1..120: mol_type = other DNA
cggatattagggtgctttgaagccttcttgggaaacaggattatcttcacataaaaattagacagaaacattctcagaaacttctttgtgatgtgtgcattcaactcacagcgttgaacc

SEQ ID NO: 68872 - DNA, 120 bp, synthetic construct; identical to SEQ ID NO: 68828
  source 1..120: mol_type = other DNA

SEQ ID NO: 68873 - DNA, 120 bp, synthetic construct
  source 1..120: mol_type = other DNA
ttgaaacagtctttccgaagaatcttcaagtggacatttcgagggctttgaggaccattgcggataaggaaatatcttcccataagaagtagacagaagtataatcagaaacttcatttt

SEQ ID NO: 68874 - DNA, 120 bp, synthetic construct
  source 1..120: mol_type = other DNA
tttcatagagcagttttgaaacactctttctgtagaatctggaggcggatattagggtgctttgaagccttcttgggaaacaggattatcttcacataaaaattagacagaagcattctc

SEQ ID NO: 68875 - DNA, 120 bp, synthetic construct
  source 1..120: mol_type = other DNA
ctgcaagtggatatttggagcaaattgaagccttctttggaaatgggaatatctaaaaactaaaaattaggcagaagcattctcagaaactactttgtgatgtgtgcattcaactcacag

SEQ ID NO: 68876 - DNA, 120 bp, synthetic construct
  source 1..120: mol_type = other DNA
ttcaagtgggcatttcgagggctttgaggaccattgcggataaggaaatatcttcccataggaagtagacagaagtataatcagaaacttcattttgatgtgtacattcaactcacaaag

SEQ ID NO: 68877 - DNA, 120 bp, synthetic construct; identical to SEQ ID NO: 68827
  source 1..120: mol_type = other DNA

SEQ ID NO: 68878 - DNA, 120 bp, synthetic construct
  source 1..120: mol_type = other DNA
tccctctttttgtacaatctgcaagtggatatttggagcaaattgaagccttctttggaaatgggaatatcttaaaactaaaaattaggcagaagcattctcagaaactgctttgtgatg

SEQ ID NO: 68879 - DNA, 120 bp, synthetic construct; identical to SEQ ID NO: 68820
  source 1..120: mol_type = other DNA

SEQ ID NO: 68880 - DNA, 120 bp, synthetic construct; identical to SEQ ID NO: 68841
  source 1..120: mol_type = other DNA

SEQ ID NO: 68881 - DNA, 120 bp, synthetic construct
  source 1..120: mol_type = other DNA
gaaatatcttcacataaaaactagacagaagcattctcagaaacgaattagtgttgtgtgtattctactcccatagttgaaaatttcttttgatagagcagtctggaaccactctgtttc

SEQ ID NO: 68882 - DNA, 120 bp, synthetic construct
  source 1..120: mol_type = other DNA
acatttggagcgtttcgaaggctgtggttgtaaaggtaatatcttcacctaaaaactaaatggaagcattgtcggaaactttttgtgatgtgtgcgttcaactcacagagctgaaccttc

SEQ ID NO: 68883 - DNA, 120 bp, synthetic construct
  source 1..120: mol_type = other DNA
aaacgggaatatcttccccttgaaactagacagaagcattctcagaaacttctttgtgatgtgggcattgaactcacggagctgaaccttcctttggattgagcagttttgaaaaactct

SEQ ID NO: 68884 - DNA, 120 bp, synthetic construct; identical to SEQ ID NO: 68804
  source 1..120: mol_type = other DNA

SEQ ID NO: 68885 - DNA, 120 bp, synthetic construct
  source 1..120: mol_type = other DNA
tagatatttggagcgctttgaagacttcattggaatcgcgaataccttcacataaaaactagacagaaccattctcagaaacttctttgagatgtgtgcattcaactcacagagctgaac

SEQ ID NO: 68886 - DNA, 120 bp, synthetic construct
  source 1..120: mol_type = other DNA
cgttggaaacgggaatatcttcccattgaaactagacagaagcattctcagaaacttctttgtgatgtgggcattgaactcacggagctgaaccttcctttggattgagcagttttgaaa

SEQ ID NO: 68887 - DNA, 120 bp, synthetic construct
  source 1..120: mol_type = other DNA
agaaagatctttgtgatgtgtccattcatctcacagagttgatagaacagttttgatagagcagttttgaaacactctttttaaagaatctgccagttcatatgtgcagtgctttggggc

SEQ ID NO: 68888 - DNA, 120 bp, synthetic construct
  source 1..120: mol_type = other DNA
cagatattagggtgctttgaagccttcttgggaaacaggattatcttcacataaaaattagacagaagcattctcagaaacttctttgtgatgtgtgcattcaactcacagcgttgaaac

SEQ ID NO: 68889 - DNA, 120 bp, synthetic construct
  source 1..120: mol_type = other DNA
caactcacagaattgaaccttccttttgatacagcagttttgaaacactctttgtttagaatctgcaagtggatatttggagcacatttatgcctgtggtagaaaaggaaatatcttcac

SEQ ID NO: 68890 - DNA, 120 bp, synthetic construct
  source 1..120: mol_type = other DNA
ttcgaaggctgtggttgaaaaggtaatatcttcacctaaaaactaaatggaagcattctccgaaactttttgtgatgtgtgcgttcaactcacagagctgaaccttccttttcatagacc

SEQ ID NO: 68891 - DNA, 120 bp, synthetic construct
  source 1..120: mol_type = other DNA
gtacaaccttacttttatagagcagttttgaaacagtctttttgtagactctgcaagtggatatttggagcgctttgaagccttcgttggaaacgggaatatcttccccttgaaaccaga

SEQ ID NO: 68892 - DNA, 120 bp, synthetic construct
  source 1..120: mol_type = other DNA
tagacagaagcattctcagaaacttctttgtgatgtgtgcattcaactcccaggttgaacctttcttttgttagagcagttttgaaacactccttttgtagaatctgcaggtggatattg

SEQ ID NO: 68893 - DNA, 120 bp, synthetic construct
  source 1..120: mol_type = other DNA
gaagacttcattggaatcgcgaataccttcacataaaaactagacagaaccattctcagaaacttctttgagatgtgtgcattcaactcacagagcttaacctttcttttgatagtgcag

SEQ ID NO: 68894 - DNA, 120 bp, synthetic construct
  source 1..120: mol_type = other DNA
ggagctctttgagtgctacattggaaacgggaatatcgtcacctaaaaactagaaagaagcattctcggaaaccactttgtgatgtgtgcattcatctcacagagttgaaccttcctgtt

SEQ ID NO: 68895 - DNA, 120 bp, synthetic construct
  source 1..120: mol_type = other DNA
agaagcattctcagaaacgacattgtgatgtgtgcattctacacacaaagttgaaacttttttttgatagagcagttttgaaacagtctttccgaagaatcttcaagtgggcatttcgag

SEQ ID NO: 68896 - DNA, 120 bp, synthetic construct; identical to SEQ ID NO: 68841
  source 1..120: mol_type = other DNA

SEQ ID NO: 68897 - DNA, 120 bp, synthetic construct
  source 1..120: mol_type = other DNA
gtgtgcattcaactcacagaattgaaccttccttttgatacagcagttgtgaaacactctttttttagaatcagcaagtggatatttggagcacatttatgcctgtggtagaaaaggaaa

SEQ ID NO: 68898 - DNA, 120 bp, synthetic construct
  source 1..120: mol_type = other DNA
cagaagcattctcagaaacgactttgtgatgtgtgtattctactcccatagttgaacatttcttttgatagagccgcctggaaacaatcttcttgtacaatctgcaagtggacatttgga

SEQ ID NO: 68899 - DNA, 120 bp, synthetic construct
  source 1..120: mol_type = other DNA
ttttgatgggtgctttcaactaacaaagtacaaccttacttttatagagcagttttgaaacagtctttttgtagactctgcaagcggatatttggagcgctttgaagccttcgttggaaa

SEQ ID NO: 68900 - DNA, 120 bp, synthetic construct
  source 1..120: mol_type = other DNA
ttgtgtgcattctactcccatagttgaaaatttcttttgatagagcagtctggaaccactctgtttctaaaatctgcaaatggacatttggagcgctttgaaggttatgatggaaaaggg

SEQ ID NO: 68901 - DNA, 120 bp, synthetic construct; identical to SEQ ID NO: 68846
  source 1..120: mol_type = other DNA

SEQ ID NO: 68902 - DNA, 120 bp, synthetic construct
  source 1..120: mol_type = other DNA
gtgatgtgggcattgaactcacggagctgaaccttcctttggattgagcagttttgacaaactcttcctttataatctgcaggtggatatttggagtgctttgaagcctttttggaaacg

SEQ ID NO: 68903 - DNA, 120 bp, synthetic construct
  source 1..120: mol_type = other DNA
atctcacagagttgatagaacagttttgatagagcagttttgaaacactctttttaaagaatctgccagttcatatgtgcagtgctttgaggcttatggtagaaaaggaaatatcttcat

SEQ ID NO: 68904 - DNA, 120 bp, synthetic construct
  source 1..120: mol_type = other DNA
tttatgatgtctgcattcaactcacagagttgaaccttcctttccatagagcagttttgaaacactctttctgtagaatctggaggcggatattagggtgctttgaagctttcttgggaa

SEQ ID NO: 68905 - DNA, 120 bp, synthetic construct
  source 1..120: mol_type = other DNA
gggaatatcttaaatctaaaaattaggcagaagcattctcagaaactactttgtgatgtgtgcattcaactcacagaattgaaccttccttttgatacagcagttttgaaacactctttg

SEQ ID NO: 68906 - DNA, 120 bp, synthetic construct
  source 1..120: mol_type = other DNA
ttttgatagagccgcctggaaacaatcttcttgtagaatctgcaagtggacatttggagcgtttcgaaggctgtggttgaaaaggtaatatcttcacctaaaaactaaatggaagcattg

SEQ ID NO: 68907 - DNA, 120 bp, synthetic construct; identical to SEQ ID NO: 68825
  source 1..120: mol_type = other DNA

SEQ ID NO: 68908 - DNA, 120 bp, synthetic construct; identical to SEQ ID NO: 68831
  source 1..120: mol_type = other DNA

SEQ ID NO: 68909 - DNA, 120 bp, synthetic construct
  source 1..120: mol_type = other DNA
cttcacctaaaaactaaatggaagcattgtccgaaacgttttgtgatgtgtgcgttcaactcacagagctgaaccttccttttcatagaccagttttgaatcactctttttgtagaatac

SEQ ID NO: 68910 - DNA, 120 bp, synthetic construct
  source 1..120: mol_type = other DNA
gagggatcttcaagtgggcattttgagggctttggggactattgtggataaggaaatatcttcacatgaaaagtagacagaagtgttctcagaaacttcattttgatgggtgcattccac

SEQ ID NO: 68911 - DNA, 120 bp, synthetic construct
  source 1..120: mol_type = other DNA
ttagagcagttttgaaacactccttttgtagaatctgcaggtggatattgaagtactctttgaagcattctttggaaacgagaatatcttcacctaaaacctagacataatcattctcag

SEQ ID NO: 68912 - DNA, 120 bp, synthetic construct
  source 1..120: mol_type = other DNA
gctgaaccttccttttcatagaccagttttgaatcactctttttgtagaatccgcatttagatatttggagcactttgaagtcttcattggaatcgcgaataccttcacataaaaactag

SEQ ID NO: 68913 - DNA, 120 bp, synthetic construct
  source 1..120: mol_type = other DNA
agtctttttgtagactctgcaagtggatatttggagcgctttgaagccttcgttggaaacgggaatatcttccccttgaaaccagacagaagcattctcagaaacttctttgtgatgtgg

SEQ ID NO: 68914 - DNA, 120 bp, synthetic construct
  source 1..120: mol_type = other DNA
gcgctttgaaggttatgatggaaaagggaatatcttcgcattaaaactagacagaagcattctcagaaacttctttgtgatgtgtgcattcaactcccaggttgaacctttcttttcata

SEQ ID NO: 68915 - DNA, 120 bp, synthetic construct
  source 1..120: mol_type = other DNA
gtagaatccgcatttagatatttggagcgctttgaagacttcattggaatcgcgaataccttcacataaaaactagacagaaccattctcagaaacttctttgagatgtgtgcattcaac

SEQ ID NO: 68916 - DNA, 120 bp, synthetic construct; identical to SEQ ID NO: 68891
  source 1..120: mol_type = other DNA

SEQ ID NO: 68917 - DNA, 120 bp, synthetic construct; identical to SEQ ID NO: 68900
  source 1..120: mol_type = other DNA

SEQ ID NO: 68918 - DNA, 120 bp, synthetic construct
  source 1..120: mol_type = other DNA
tgaaaaggtaatatcttcacccaaaaactaaatggaagcattgtccgaaactttttgtgatgtgtgcgttgaactcacagagctgaaccttccttttcatagaccagttttgaatcactc

SEQ ID NO: 68919 - DNA, 120 bp, synthetic construct; identical to SEQ ID NO: 68861
  source 1..120: mol_type = other DNA

SEQ ID NO: 68920 - DNA, 120 bp, synthetic construct; identical to SEQ ID NO: 68826
  source 1..120: mol_type = other DNA

SEQ ID NO: 68921 - DNA, 120 bp, synthetic construct; identical to SEQ ID NO: 68835
  source 1..120: mol_type = other DNA

SEQ ID NO: 68922 - DNA, 120 bp, synthetic construct; identical to SEQ ID NO: 68850
  source 1..120: mol_type = other DNA

SEQ ID NO: 68923 - DNA, 120 bp, synthetic construct
  source 1..120: mol_type = other DNA
gtacattcaactcacaaagcacacccttacttttgatagagaagttttgaaacagtctttttgtagaatctgcaattggatatttggagcgctttcaggcctctggtagaaaaagaaata

SEQ ID NO: 68924 - DNA, 120 bp, synthetic construct
  source 1..120: mol_type = other DNA
cttctgatactgcagttttgaaacagtctttttgagggatcttcaagtgggcattttgagggctttcgggactattgtggataaggaaatatcttcacatgaaaagtagacagaagtgtt

SEQ ID NO: 68925 - DNA, 120 bp, synthetic construct
  source 1..120: mol_type = other DNA
cttcgcattaaaactagacagaagcattctcagaaacttctttgtgatgtgtgcattcaactcccaggttgaacttttcttttgttagagcagttttgaaacactccttttgtagaatcc

SEQ ID NO: 68926 - DNA, 120 bp, synthetic construct; identical to SEQ ID NO: 68827
  source 1..120: mol_type = other DNA

SEQ ID NO: 68927 - DNA, 120 bp, synthetic construct; identical to SEQ ID NO: 68828
  source 1..120: mol_type = other DNA

SEQ ID NO: 68928 - DNA, 120 bp, synthetic construct; identical to SEQ ID NO: 68895
  source 1..120: mol_type = other DNA

SEQ ID NO: 68929 - DNA, 120 bp, synthetic construct
  source 1..120: mol_type = other DNA
ccttcctttccatagagcagttttgaaacactctttctgtagaatctggaggcggatattagggtgctttgaagccttcttgggaaacaggattatcttcacataaaaattagacagaag

SEQ ID NO: 68930 - DNA, 120 bp, synthetic construct; identical to SEQ ID NO: 68819
  source 1..120: mol_type = other DNA

SEQ ID NO: 68931 - DNA, 120 bp, synthetic construct
  source 1..120: mol_type = other DNA
atttcgagggctttgaggaccattgcggataaagaaatatcttcccataagaagtagacagaagtataatcagaaacttcattttgatgtgtacattcaactcacaaagcacacccttac

SEQ ID NO: 68932 - DNA, 120 bp, synthetic construct; identical to SEQ ID NO: 68841
  source 1..120: mol_type = other DNA

SEQ ID NO: 68933 - DNA, 120 bp, synthetic construct
  source 1..120: mol_type = other DNA
gagtggatatttggagcaaattgaagccttctttggaaattagaatatcttaaatctaaaaattaggcagaagcattctcagaaactactttgtgatgtgtgcattcaactcacagaatt

SEQ ID NO: 68934 - DNA, 120 bp, synthetic construct
  source 1..120: mol_type = other DNA
atagagccgcctggaaacaatcttcttgtagaatctgcaagtggacatttggagcgtttcgaaggctgtggttgaaaaggtaatatcttcacctaaaaactaaatggaagcattgtccga

SEQ ID NO: 68935 - DNA, 120 bp, synthetic construct
  source 1..120: mol_type = other DNA
ttgagggctttggggactattgtggataaggaaatatcttcacatgaaaagtcgacagaagtgttctcagaaacttcattttgacgggtgcattccactaacaaagtacaaccttacttt

SEQ ID NO: 68936 - DNA, 120 bp, synthetic construct
  source 1..120: mol_type = other DNA
tttgtaaaatctgcaaatggacatttggagcgctttgaaggttatggtggaagagggaatatcttcgcattaaaactaatcagaagcattctcagaaacttctttgtgatgtgtgcattc

SEQ ID NO: 68937 - DNA, 120 bp, synthetic construct
  source 1..120: mol_type = other DNA
atgtttttttttttattatactctaagttttagggtacatgtgcacattgtgcaggttagttacatatgtatacatgtgccatgctggtgcgctgcacccactaactcgtcatctagcat

SEQ ID NO: 68938 - DNA, 120 bp, synthetic construct
  source 1..120: mol_type = other DNA
gatggggttgtttttttcttgtaaatttgtttgagttcattgtagattctggatattagccctttgtcagatgagtaggttgcgaaaattttctcccatgttgtaggttgcctgttcact

SEQ ID NO: 68939 - DNA, 120 bp, synthetic construct
  source 1..120: mol_type = other DNA
aacaaggtagaaccttacttttattgagcagttttgaaacagtctttttgtagactctgcaagtggatatttggagcgctttgaagccttcgttggaaacgggaatatcttccccttgaa

SEQ ID NO: 68940 - DNA, 120 bp, synthetic construct
  source 1..120: mol_type = other DNA
gaaacttctttgtgatgtgtgcattcaactcccaggttgaacttttcttttgttagagcagttttgaaacactccttttgtagaatctgcaggcggatatttaagtactctttgaagcat

SEQ ID NO: 68941 - DNA, 120 bp, synthetic construct
  source 1..120: mol_type = other DNA
cagaaagcttatccaccataatcaagtgggcttcatccctgggatgcaaggctggttcaatatacgcaaatcaataaatgtaatccagcatataaacagagccaaagacaaaaaccacat

SEQ ID NO: 68942 - DNA, 120 bp, synthetic construct
  source 1..120: mol_type = other DNA
ctaagccaaaagaacaaagctggaggcatcacactacctgacttcaaactatactacaaggctacagtaaccaaaacagcatggtactggtaccaaaacagagatatagatcaatggaac

SEQ ID NO: 68943 - DNA, 120 bp, synthetic construct
  source 1..120: mol_type = other DNA
aaagaaagttttaactctgtgaggtgaatacacacatcacaaagctgtttctctgatagcttccttctagtttttatcctgggacattcctgggatattcctgggagctcattgaggcca

SEQ ID NO: 68944 - DNA, 120 bp, synthetic construct
  source 1..120: mol_type = other DNA
tagcagtttgtaatcaccgtttttgtccattctgtaaatacacatttgggagctcattgaggccagtggtgaaaaagtgaatatctctagaagagagctatctgagaaaccgccctgtga

SEQ ID NO: 68945 - DNA, 120 bp, synthetic construct
  source 1..120: mol_type = other DNA
agaatctgcaaatggatatttggagcgcttagaggcctgtggtggaaagcaaacatcttcccataaaaactagactgaagcattctgagaaacttctttgtgatgtgtgcattgaactcc

SEQ ID NO: 68946 - DNA, 120 bp, synthetic construct
  source 1..120: mol_type = other DNA
agaaacttctctgtgatgtgcgcattcacctcacagaggtgaagctttcttttgattgagctgtttgtaaacactcattttgtagtatcggcaaatggatatttggagcgctttgacgcc

SEQ ID NO: 68947 - DNA, 120 bp, synthetic construct
  source 1..120: mol_type = other DNA
tttccccataggcctcaaagggctcacaagtatccctttgcggatcctacaaaatgactgtttcaaaactactcaatcaaaggaaatattcaactctgtgagatgaatgaacccatcaca

SEQ ID NO: 68948 - DNA, 120 bp, synthetic construct
  source 1..120: mol_type = other DNA
ctaacctgctcaatcaacagaaagtttcaactctgtggactgaaagcacacatcacaaagaaatttctcagaatgcgtctgtctagcttttctctgaggatatttcctatgtccccagag

SEQ ID NO: 68949 - DNA, 120 bp, synthetic construct
  source 1..120: mol_type = other DNA
ccctgtgagatgaaagcacacattacaaagcaatttctcagaatgcttccgtctagtttttatgtaaagatatttccattttcaccataggcctcaagccactcacaaatatccctctgc

SEQ ID NO: 68950 - DNA, 120 bp, synthetic construct
  source 1..120: mol_type = other DNA
cccatttgcagattctacaaaagcactgtttcaaaggattcaatcaaaagaatggttcaactctgtgagatgaaggcacaaaccagaagaagtttctcagaaggcttctctctggtattt

SEQ ID NO: 68951 - DNA, 120 bp, synthetic construct
  source 1..120: mol_type = other DNA
ataggcctcaaggtgctccaaatatccctttggagattccacaaaaagatcatttctaaactgctcaatgaaaagaaaggttgaactctgtgagatgaatgcacatatcacaaagaagtt

SEQ ID NO: 68952 - DNA, 120 bp, synthetic construct
  source 1..120: mol_type = other DNA
gcttcaaagcgctccaaatatccatttgcagattccacaaaggactgtttccaaactgcccaatcaaaacaaaggttcaactctgtgagatgaaagcccacatcacaaggaagtttctca

SEQ ID NO: 68953 - DNA, 120 bp, synthetic construct
  source 1..120: mol_type = other DNA
ccataagccccaaacggctcaaaagtatcccattgcagattctacaaaagactgtttccaaagtgctcaataaaaagaaaggttcgaagctgtgacatgaatgcacacatcacaaagaag

SEQ ID NO: 68954 - DNA, 120 bp, synthetic construct
  source 1..120: mol_type = other DNA
ctctgtgcggtgaatgcacacatcacaaaggcgtttctcaaaaagcatctgtctagtttttatgtgtagatatttcctattacaacatgggtctcaaaccgctcagaaatatgcctctgt

SEQ ID NO: 68955 - DNA, 120 bp, synthetic construct
  source 1..120: mol_type = other DNA
tcccagaccaccctgggctttccctgtaggccaatccttcatgttccagttattgaatgcccattctactgtaggaacagatcatagttattagagttcagaaaataaattttccctgtt

SEQ ID NO: 68956 - DNA, 120 bp, synthetic construct
  source 1..120: mol_type = other DNA
cataggcctcaatgggctcacatatatccctctgcagattctacaaaagactgtttccaaagtcctcaatcaaaagaaagtttcaacactttgagatgaatgcacacatcacagagaagt

SEQ ID NO: 68957 - DNA, 120 bp, synthetic construct
  source 1..120: mol_type = other DNA
gaactgctttgtgatgtgtgcatttatctcacagagttgaagctttcttttgattgagcagtttggaaacagttttttgtggaatctgcaaagggataattttgacccctttgaggccca

SEQ ID NO: 68958 - DNA, 120 bp, synthetic construct
  source 1..120: mol_type = other DNA
ctgcaaagagatatttgggagcccaatgaggcctgtggcgaaataggaaatatcttcactaaaaactagacagaagcattctgaggaacttctttgtcttgtgtcctttcgtctcactaa

SEQ ID NO: 68959 - DNA, 120 bp, synthetic construct
  source 1..120: mol_type = other DNA
ctatttcaccccaggactcaatgggctcacaaatatccatttgcaggttctacaaaaagactgtttcccaactgctcaatcaaaagaaacgttcaactctgtgagatgtatgcacacatc

SEQ ID NO: 68960 - DNA, 120 bp, synthetic construct
  source 1..120: mol_type = other DNA
cctcaaagctctcacaaatatccctttgcagtttctccaagaacagaatttccaaactcctcaatgaaaggaaatgtttagttctgtgagaggaacgaccacatcacaaagcagtttctc

SEQ ID NO: 68961 - DNA, 120 bp, synthetic construct
  source 1..120: mol_type = other DNA
tctgtgagatgaatgcacacctcacaaagcaatttctcagaaaccttctgtctagttcgtttctgaagatattacattttgaccataggactcaatgtgctcctaaaaaaacattgtttc

SEQ ID NO: 68962 - DNA, 120 bp, synthetic construct; identical to SEQ ID NO: 68944
  source 1..120: mol_type = other DNA

SEQ ID NO: 68963 - DNA, 120 bp, synthetic construct
  source 1..120: mol_type = other DNA
tgatgtgctttcccagttcctctaaaattggaaaactcttaaagattgagcccctgcccccctccatcattttattttttggcttagaagatacctctaaattgggggaactccttcatc

SEQ ID NO: 68964 - DNA, 120 bp, synthetic construct
  source 1..120: mol_type = other DNA
tggttgctagggggtggtggctggcagaaatgaagacacggtgatcaaaacttttagatataaaataaacaagttccggtgatttagtgcacagcatggatgttcacgaatgttgtctta

SEQ ID NO: 68965 - DNA, 120 bp, synthetic construct
  source 1..120: mol_type = other DNA
ctgtctgctatcaaaaaattgcctcagcttttatttacctgaaatgtcttttttatttatttttaattgatagtttttctgaggataaaatttttagtggacattttttcatctttgagc

SEQ ID NO: 68966 - DNA, 120 bp, synthetic construct
  source 1..120: mol_type = other DNA
tgaccgacagcaatgtgccaagtatcagtaaatactgttcactttcttacataagctacatcatcaggagtctgtctttcatgctgccactacttgcagatgtcttctttgtagcagtca

SEQ ID NO: 68967 - DNA, 120 bp, synthetic construct
  source 1..120: mol_type = other DNA
cagtttgacttatggtgttggatatctttctttattgctttttctttttttaatttggtgacggaatcttgctctgtcacccaggctggagtcttggctcgctgcaacctccgcctctcg

SEQ ID NO: 68968 - DNA, 120 bp, synthetic construct
  source 1..120: mol_type = other DNA
agtccccttgttctcgcacaatctctctaacctggtgggagactcctctgcactggaggtctgggaaggtctggccgtggatgaacttcaccttgatggtgtccatggaacatacgacca

SEQ ID NO: 68969 - DNA, 120 bp, synthetic construct
  source 1..120: mol_type = other DNA
ttgtgcctcttcccacacgtggtttcttgcacttggcccagctatattccactgttttgactccatgcttcttagcctggtggcagtggtgagggagtgaggagatctctaatgttctga

SEQ ID NO: 68970 - DNA, 120 bp, synthetic construct
  source 1..120: mol_type = other DNA
tttaaagtattgctgtgtgtttcaagtggaggaggtcatattacaactgacatttgtccttgactactggacatatcacaccagccctgattgcagttatacttgaagccagatctaccc

SEQ ID NO: 68971 - DNA, 120 bp, synthetic construct
  source 1..120: mol_type = other DNA
tttatattgtaccaaataggtagttttttcatccctcatccacctcccactctctgcttctgagtctccaaagtccattacatcactctgtatgcctttgcatacgcatagcttaactcc

SEQ ID NO: 68972 - DNA, 120 bp, synthetic construct
  source 1..120: mol_type = other DNA
ctcgtgagtgtccgaaactattagctcactcactgcctcatgtgaaggtacccagtctctggtaacctggcacttcccttttgaaaaccacctttttctctctctctgggctgccacgaa

SEQ ID NO: 68973 - DNA, 120 bp, synthetic construct
  source 1..120: mol_type = other DNA
caaatttgaggttttgaccaaattttgcaagttttcagctatgagttgtttatttgctcttgtatcatatttaatttttctgtctctccctctccttctcggactcagtcattccacagg

SEQ ID NO: 68974 - DNA, 120 bp, synthetic construct
  source 1..120: mol_type = other DNA
gtgcttacagttgggtagtgtcattcctataactgttcttttaaaatattttcttggttattctgagtcttttacctttccatataaactttagaatcagtttgtcaatatccacaaact

SEQ ID NO: 68975 - DNA, 120 bp, synthetic construct
  source 1..120: mol_type = other DNA
acaggcgtgaggcactgtgcccggccaggtgcaggtttttttaatagacattatttatgaaattgaggaagttttcctctatttctagtctgcggagagtttttctcatgaatgggtttt

SEQ ID NO: 68976 - DNA, 120 bp, synthetic construct
  source 1..120: mol_type = other DNA
tgtgggtacataggaagtacatggaaacagatgtttggcagagcttgccaacaaattcttttctgcatcaagaaggcatgcctctcagcatgacactcttaagaggcagaaatgtgacaa

SEQ ID NO: 68977 - DNA, 120 bp, synthetic construct
  source 1..120: mol_type = other DNA
agaaaggggaaagatgatgactgagagttggaaggttgcacattttcacagaaaagtagaacggaattgtaacaagcactctgataggaaatcatagtttatgtctcgcaactgtccctg

SEQ ID NO: 68978 - DNA, 120 bp, synthetic construct
  source 1..120: mol_type = other DNA
caaagcagtcatttctggtggggattatagaagagggagttatcatggtgagatggtggaactaatccagaacaagccagatttttagtattgacaaagggatttaatcagttgcccagg

SEQ ID NO: 68979 - DNA, 120 bp, synthetic construct
  source 1..120: mol_type = other DNA
catgatctcggctcactgcaacctccacctcccaggttcaagcgattctcctgtctcagcttcctgagaagctgggattacaggtgcacgccactatgcccagctaatttttgtattttt

SEQ ID NO: 68980 - DNA, 120 bp, synthetic construct
  source 1..120: mol_type = other DNA
ccttccgccttattaacccattgcacttattctcagaggctcctgccaaaaatagagacattattccacctccacctcctcaaattctaagccagaaatatgtgtgtgttatcattcaac

SEQ ID NO: 68981 - DNA, 120 bp, synthetic construct
  source 1..120: mol_type = other DNA
tattctgtgcccaatttaaaagtagcagttttccattacattcattgaatgggccacggtatcatactcaaactaggaatgggtttctcataacccaaagaaacctgccagctcttgcgc

SEQ ID NO: 68982 - DNA, 120 bp, synthetic construct
  source 1..120: mol_type = other DNA
ccacttgacagattattaaaactcacaccaaccccacaagtgagtgttgtaattattcccatcttaaaatgaaaacttgacactcagctatgttcagtaacctgcctggggtcatggagg

SEQ ID NO: 68983 - DNA, 120 bp, synthetic construct
  source 1..120: mol_type = other DNA
gtgctgggattataggcgtgagccaccacgcctggccgaattttctagaaagttttatatacaggatgtcatctgaataggcttccgatctttatctgaaggtcatgaatttatttttgt

SEQ ID NO: 68984 - DNA, 120 bp, synthetic construct
  source 1..120: mol_type = other DNA
taacagaagaaacttaccaattcattccatgaggccagtattgcccagacaaaagtcaggaaaaatcactacgagactatagactattatcccttatccatattgacacagaaatccaca

SEQ ID NO: 68985 - DNA, 120 bp, synthetic construct
  source 1..120: mol_type = other DNA
tgtgagccaccacaatcagccttaccttttgaaactattgtaaatggaattgtttcttcatgtcatgttgagattgttcattgctagtgtatagaatttttattaatatttttatattat

SEQ ID NO: 68986 - DNA, 120 bp, synthetic construct; identical to SEQ ID NO: 68980
  source 1..120: mol_type = other DNA

SEQ ID NO: 68987 - DNA, 120 bp, synthetic construct
  source 1..120: mol_type = other DNA
aaactctgacgctcaagtgagcctcctgtcttgtcattccaaaaggatggaattacacaggcttaagccattgtgctcagccaagattttaccttcaattagcacacatcttatttcaga

SEQ ID NO: 68988 - DNA, 120 bp, synthetic construct
  source 1..120: mol_type = other DNA
aaaaccaggatgcctcttctcctctaaatgatcacaactcctctccagcaagggcacaaaactgaaaggagaatgagtttgatgaattgacagaagtaggcttcagaagttgggtaataa

SEQ ID NO: 68989 - DNA, 120 bp, synthetic construct
  source 1..120: mol_type = other DNA
aagttctggccagggcagtgagggaagagaaagaaataaagggtattcgaataagaagagaggaagtcaaattgtctgtttgcgggcgacaagattgtatatttagaaaaccccattgtc

SEQ ID NO: 68990 - DNA, 120 bp, synthetic construct
  source 1..120: mol_type = other DNA
ttaattccgctggatagtctccttggcagaaacacccagggaatcctgggcctgtgctggatgttctgtaagtaccaaggaaagaggggtttgaaaactcaagaatataattaatattat

SEQ ID NO: 68991 - DNA, 120 bp, synthetic construct
  source 1..120: mol_type = other DNA
cactgcactccagcctgggcgacagagtgagactccacctcaaaaaccaaaccaaaccaaaaccaaacaacaacaacaacaaaccattagacatagcactcttatttcatttttaactta

SEQ ID NO: 68992 - DNA, 120 bp, synthetic construct
  source 1..120: mol_type = other DNA
taaatttttctctataaaaactccgggtcaattcaaaccccaacatatcagtacagttggccttccttcccaaatcagccaaggcacggactgactagcttccctatttatctcactttg

SEQ ID NO: 68993 - DNA, 120 bp, synthetic construct
  source 1..120: mol_type = other DNA
ctggaatgtgtgaaagatttatagatgccctgtaggagaggttaagcagatttttctattcctagatttctggaggctttattgttaatgagtaatggattttatccaatgcttttgtgt

SEQ ID NO: 68994 - DNA, 120 bp, synthetic construct
  source 1..120: mol_type = other DNA
aagtgagctaagaagatatgttagttaactttgtgcttaatccggatggaagtctgagtctaccttctctcttccatgaatatgtagtcaagtcaaggcacaaacataatttgaataagg

SEQ ID NO: 68995 - DNA, 120 bp, synthetic construct
  source 1..120: mol_type = other DNA
ccccatggaaattttttgttcttctgttttaccgaccattgctttccatcttctgactggcctttgtgggttgatggtaaactgagaagttgagacactagaatatgtggcctgaaaatg

SEQ ID NO: 68996 - DNA, 120 bp, synthetic construct
  source 1..120: mol_type = other DNA
aactcttctgtttacttctatctatctcatcttccttttgcgaccttttggtaccatgtgagagaacctaaaggaaacttctagcagccttggaccccttgaagaacacagataaagcac

SEQ ID NO: 68997 - DNA, 120 bp, synthetic construct
  source 1..120: mol_type = other DNA
caaagcaggcagatcacttaaggtcaggagttcaaaaccagcctggcaaacatggtgaaaccccatctctactaaaaatacgaaaaattagttgggcatggtggcactcgcctgtgatcc

SEQ ID NO: 68998 - DNA, 120 bp, synthetic construct
  source 1..120: mol_type = other DNA
atgtcttttaggatatttggtcacccctctatttatacacagctccgaagaaacccagcactggacaaattctctcaaacttttccccaagcttggccaccaatctgttttagatgaaga

SEQ ID NO: 68999 - DNA, 120 bp, synthetic construct
  source 1..120: mol_type = other DNA
ccctgacaggccccagtgtgtgatattccctgccctgtgtcccagtgttctcattgttcaactcccacgtgtaagtgagaacatgtggtgtttggttttctgtccttgtgatagtttgct

SEQ ID NO: 69000 - DNA, 120 bp, synthetic construct
  source 1..120: mol_type = other DNA
taaggtgtgtgtgcctagggaaaattagacgcgcgaagacttgtcacagcagagtgtcaggtgattaccctttgcttccctgtcatgtgaaatgttcacaaacagacacatatttttaga

SEQ ID NO: 69001 - DNA, 120 bp, synthetic construct
  source 1..120: mol_type = other DNA
actagtcaccatgcccggccctcttttgtcctcttatctgagtggatccaacccaaagacacacaaagctaaaattgatcaggattagcagtaaggagtgttattctgtcaaattaaatg

SEQ ID NO: 69002 - DNA, 120 bp, synthetic construct
  source 1..120: mol_type = other DNA
tgtgaatagtgccacaataaacatacaagtgcatgtgtctttttggtaaaacgatttatattcctctgggtatatacccagtaatggattgctgggcagaatggtagttccgttttaagt

SEQ ID NO: 69003 - DNA, 120 bp, synthetic construct
  source 1..120: mol_type = other DNA
agctagaaagatctcaaattaacaacctaacatcacacctagagaaactagaaaaacaagaacaaaccaaccccaaagccagcagaagaaataaccaaaatcagtgctgaactgaatgaa

SEQ ID NO: 69004 - DNA, 120 bp, synthetic construct
  source 1..120: mol_type = other DNA
ccgggccaatatccctaatgaacacagacacaaaaattctaaataaaatactaacaaactgaaccagcagcacattaaaaagctaatgcaggccagtgtggtggctcacacctgtaatct

SEQ ID NO: 69005 - DNA, 120 bp, synthetic construct
  source 1..120: mol_type = other DNA
taaagaaaatgtggcacatacacaccatgaaataccatgcagccataaaaaaggatgagttcatgttctttgcagggacatggatgaagaacgtgcaggtttgttgcataggtatacccg

SEQ ID NO: 69006 - DNA, 120 bp, synthetic construct
  source 1..120: mol_type = other DNA
acctcggcctcccaaagtgctgggattacaggcatgagccactgagcccagccaacattcagtaaatttttataaataataatttaaaattcagaaattatggcttccaatcacattcct

SEQ ID NO: 69007 - DNA, 120 bp, synthetic construct
  source 1..120: mol_type = other DNA
ttttctttcttttttttttttttgagacagagtttcactcctgttgcccaggctggagtacaatgatgcaatctctgctcactgaaacttctgcctcctgggttcaagcgattctcctga

SEQ ID NO: 69008 - DNA, 120 bp, synthetic construct
  source 1..120: mol_type = other DNA
aagacaaattaataatctgttttccattttaaagaaagtgtgacggtcttttttccagctagtcgccatcagttatagagacagatcagggtccctgagtgctggaaaaggggtcctgtg

SEQ ID NO: 69009 - DNA, 120 bp, synthetic construct
  source 1..120: mol_type = other DNA
ggaagccggcacggagacgtctatctcctctgtccccaggccctagtttctggccagctttggccaaagcaagaggttggactttggagggtgagtgtgagtgtgtgagctcatgtccag

SEQ ID NO: 69010 - DNA, 120 bp, synthetic construct
  source 1..120: mol_type = other DNA
cgtgggtgacagagcaagactccgtctcgataaatagataaataaaaaagacaggctcttgtggatatttcaggggaaaaaagtgagtccttctggctggcaggattcttgtgatcactg

SEQ ID NO: 69011 - DNA, 120 bp, synthetic construct
  source 1..120: mol_type = other DNA
gtcatcaaggtgcagcctgtccctgcctgctttcctgtctcccatgagccaaggatgaattttacatttccaaatggtcgaacaaaccaaaagaagaatcatacttgatgttttgaaatt

SEQ ID NO: 69012 - DNA, 120 bp, synthetic construct
  source 1..120: mol_type = other DNA
attctcacttaaccacttcattgtctgaaagcagacccaaaattgctccttgggctgaaaatagtcattttttccagccacctggagtggctacatctcctggagaactttgattttcta

SEQ ID NO: 69013 - DNA, 120 bp, synthetic construct
  source 1..120: mol_type = other DNA
gttgcataaatttcttttttgataccacgggataacttggggctcatgaacctgtcaaaaagtgacattatttacttaccccaggttaggaaccctgtatagggactgtgtagacaaggc

SEQ ID NO: 69014 - DNA, 120 bp, synthetic construct
  source 1..120: mol_type = other DNA
tgttttgttgttgttgttgtttgtttcagggacttcttttttgtttctttgggagtattttttttgagactgagtcttgctctgtgtcccaggctggagtgcagtagcatgaactcagct

SEQ ID NO: 69015 - DNA, 120 bp, synthetic construct
  source 1..120: mol_type = other DNA
tcagctccagagcctgacgacccaaatcgtctttggcccagctcggctctcgtcccctccagccgcaagatggtgcctgggccagcgcctgggaccctgggatttctgtctttttcctct

SEQ ID NO: 69016 - DNA, 120 bp, synthetic construct
  source 1..120: mol_type = other DNA
atcatttttccatttctttcttttttgagacggagtttcactcttgtttcctaggcaacaagagcaatggcacgatttcagctcacagcaacctctgcctcctggattcaaatgtttctc

SEQ ID NO: 69017 - DNA, 120 bp, synthetic construct
  source 1..120: mol_type = other DNA
tgtattttcatatgattacatatatttttcatcatgttgttttaagtggaaagacctcttttcagcattttatgtagggcacatacaatgattatgtgcttttccagcatttattcattc

SEQ ID NO: 69018 - DNA, 120 bp, synthetic construct
  source 1..120: mol_type = other DNA
ggtgagtttccttttttctcctgccttcatttccagtcctgtctctagagataagcattaaactggtgcaagtcttttgccatttttttatacttttatatacgccaggcattcccatgt

SEQ ID NO: 69019 - DNA, 120 bp, synthetic construct
  source 1..120: mol_type = other DNA
gcgggagcttttgtttcacctcatgagcctcaaggtgggagatggtcttggttactttctcatccaagtttgtgttaaaggcttctgtttctttgggtcttccaatttagaaggaaatag

SEQ ID NO: 69020 - DNA, 120 bp, synthetic construct
  source 1..120: mol_type = other DNA
tataactatgtatttgctaatttttaaagagtattaaaaaagcagaaagcatttagaaatttgatggcagatagtactacaaggtacacactgtttagaataaagggagaaaccttcatc

SEQ ID NO: 69021 - DNA, 120 bp, synthetic construct
  source 1..120: mol_type = other DNA
tgaaggtacccttagctcctctatggatatcctttaccaatgcagtgttcttggatatacatggggtggcaatactctgtattgtcagtcctccctcttctcatcatctattctatttca

SEQ ID NO: 69022 - DNA, 120 bp, synthetic construct
  source 1..120: mol_type = other DNA
acaacctctgcctcctgggttcaagtgattctcctgcctcggcctcctgagtagctgggactacaggagcatgtcaccacacccggctactttttgtattttttttttttttgagacgga

SEQ ID NO: 69023 - DNA, 120 bp, synthetic construct
  source 1..120: mol_type = other DNA
gaatcacttgaacccaagaggtggaggttgcagtaaaccgagatcacaccactgcactcaggtctgggcaacagagtgaggccctttctcaaaaaataaataagtaaataaataaataaa

SEQ ID NO: 69024 - DNA, 120 bp, synthetic construct
  source 1..120: mol_type = other DNA
gggtttcactatattggccaggctggtcttgaactcctgacctcgagatccacccacctcagcctccccaagtgctgggattacaagtgtgagccaccatacccagcctgcagagatttt

SEQ ID NO: 69025 - DNA, 120 bp, synthetic construct; identical to SEQ ID NO: 68774
  source 1..120: mol_type = other DNA

SEQ ID NO: 69026 - DNA, 120 bp, synthetic construct
  source 1..120: mol_type = other DNA
cctcatgagtagtggaattacaggtgcccaccaccatgcccggctaatttttgtatttttagtataaatgaggtttcattatgttggccaggctggtctcaaactgctgacctcaggtga

SEQ ID NO: 69027 - DNA, 120 bp, synthetic construct
  source 1..120: mol_type = other DNA
tggctcacacctgtaatcacagcactttgggagggtgagatgggaggatggcttgagctgaggagttcaagaccagcctgggaaaaataatgaggtatctacaaattaaaatttaacaat

SEQ ID NO: 69028 - DNA, 120 bp, synthetic construct; identical to SEQ ID NO: 68773
  source 1..120: mol_type = other DNA

SEQ ID NO: 69029 - DNA, 120 bp, synthetic construct
  source 1..120: mol_type = other DNA
cacaatgtgggactgtcctggagttctaggatgacagataaggctgcctgactcagggatcctgaattcctggaaaactaagctgtagcatcaaccgcctttcctcctgaccatgggcac

SEQ ID NO: 69030 - DNA, 120 bp, synthetic construct; identical to SEQ ID NO: 68771
  source 1..120: mol_type = other DNA

SEQ ID NO: 69031 - DNA, 120 bp, synthetic construct
  source 1..120: mol_type = other DNA
agagggagacaaggatgtggactgcacaagggccccagatcaccaaggtgtgaatcggaaagactggacttcagatcatctgtgggggtggtaaccgaggcttaagaagtgctgtgtatt

SEQ ID NO: 69032 - DNA, 120 bp, synthetic construct; identical to SEQ ID NO: 68769
  source 1..120: mol_type = other DNA

SEQ ID NO: 69033 - DNA, 120 bp, synthetic construct
  source 1..120: mol_type = other DNA
cctcctccctggtcccaaggcggctctcttgcctcatctgcagttgactaagctgcagccagtccagccttctcatccacccgggtaacagcctcaggatctctgctcctgcggttccct

SEQ ID NO: 69034 - DNA, 120 bp, synthetic construct
  source 1..120: mol_type = other DNA
agtcagggagatgccgtgaggagccctggcctcagagggcaaggcgggagcttggggtggcagcagcccagctcctggcatggcctctttccctttcttcttctgaaggaggaagcagca

SEQ ID NO: 69035 - DNA, 120 bp, synthetic construct
  source 1..120: mol_type = other DNA
atgtttattatcttattactagtatatattacttgttgccccatctgcccaaaaaagacaacactgaagtgtatatatgttgcaagttcctctccagtgaccctcctaccaactccacag

SEQ ID NO: 69036 - DNA, 120 bp, synthetic construct; identical to SEQ ID NO: 68768
  source 1..120: mol_type = other DNA

SEQ ID NO: 69037 - DNA, 120 bp, synthetic construct; identical to SEQ ID NO: 68767
  source 1..120: mol_type = other DNA

SEQ ID NO: 69038 - DNA, 120 bp, synthetic construct
  source 1..120: mol_type = other DNA
ccctgtctttttgaccaagattgcttgtttgattttgaacacagtcatttcccagggagcctggcgattttctatctcttctgtttaggccgacaccttcctcactgcagaaataggcct

SEQ ID NO: 69039 - DNA, 120 bp, synthetic construct
  source 1..120: mol_type = other DNA
tttccagtattaaggagctcaagacctgtgtccactctgatttggtaaatcagggttctttgaagtcatgataaaaatgcagggccaggtactttgtgaggccaaggcaggtggatcact

SEQ ID NO: 69040 - DNA, 120 bp, synthetic construct
  source 1..120: mol_type = other DNA
ctgggattacaggcgtgagccaccacacctggcagaatcaatcattttctacatgccagcaatgatagattagaaaaaacagtggtggaggggagacaccacaagactggcaggaaatca

SEQ ID NO: 69041 - DNA, 120 bp, synthetic construct
  source 1..120: mol_type = other DNA
tatcatgagatggttttctttttttttttctttttttcttttttttttttttttgagatggagcctccctgtgtcgcccaggctggagtgcagtggtgcaatctcagctcaccacaacct

SEQ ID NO: 69042 - DNA, 120 bp, synthetic construct
  source 1..120: mol_type = other DNA
ggattacaggcctgagccaccacgcctggccaacttctcactcttaaaggcaaaatagtgaacagcaacttaaagatcaaaaaagctaaggatggaatattcaacaaggcatcacattca

SEQ ID NO: 69043 - DNA, 120 bp, synthetic construct; identical to SEQ ID NO: 68764
  source 1..120: mol_type = other DNA

SEQ ID NO: 69044 - DNA, 120 bp, synthetic construct
  source 1..120: mol_type = other DNA
agggatgaaccacctcgcctgacctgcaatttttttttttttataaaaggagtttctccccattactgatgcaaacctgctggagagctcaagatatgctgcatggttttccaaaggaat

SEQ ID NO: 69045 - DNA, 120 bp, synthetic construct
  source 1..120: mol_type = other DNA
aataaaaaataaattaattaattaaacatttcattttaacaggctttcctatctcatcaccaactcagggcagtttctccaggaacctggcaggccccgccacagagagaccctgcttca

SEQ ID NO: 69046 - DNA, 120 bp, synthetic construct
  source 1..120: mol_type = other DNA
gtcacagcagccactagaaccaagacctccactgtcctggttctgtcctccttccggtcagcagcaacctgccattggtcattccctggccacttgtgcccggtacaaacaacatgtctg

SEQ ID NO: 69047 - DNA, 120 bp, synthetic construct; identical to SEQ ID NO: 68762
  source 1..120: mol_type = other DNA

SEQ ID NO: 69048 - DNA, 120 bp, synthetic construct
  source 1..120: mol_type = other DNA
tcataatgatagctggaatccggtgggaatattgacaccatggaaattagcaactgctacaagtcagaacgctgggtgtgttaaatactgaccagtccagcactgactgacaagtgtgtg

SEQ ID NO: 69049 - DNA, 120 bp, synthetic construct
  source 1..120: mol_type = other DNA
caaagtgctgggattacaggcatcagccaccacccacacagccacccacttttatctcccaggagggcccaacccttctcccttggtttcaatatgaaaaatcccaggggagaatctgat

SEQ ID NO: 69050 - DNA, 120 bp, synthetic construct
  source 1..120: mol_type = other DNA
aaaccaatacacattatagccactttgggaggctgaagcggcagatcacaaggtcaagagattgagaccatcctggccaacatggtgaaaccgccccccctactaaaaatacaaaagtta

SEQ ID NO: 69051 - DNA, 120 bp, synthetic construct
  source 1..120: mol_type = other DNA
acactgcacccagcctcagactatgtatctttgttcctgctgttttgtcttctaaaaaacaccagtccccttggaagccttcctgggctgtctgaacacggctgtggttattataattat

SEQ ID NO: 69052 - DNA, 120 bp, synthetic construct
  source 1..120: mol_type = other DNA
atacaaactcaaaattcatcactgtctaattatgtgactagggtctgcattctccgggttatttccatccctggtaccctgtaggatggaaacgccaaatgacagtgtgctatgcggctg

SEQ ID NO: 69053 - DNA, 120 bp, synthetic construct
  source 1..120: mol_type = other DNA
agataggaaaagagagtgggggtgtgagagagagggagagacagagggagacaggagcgaaagggagagagaagtggaggggcagaaagagagggagacagggaaaaagagattactcct

SEQ ID NO: 69054 - DNA, 120 bp, synthetic construct
  source 1..120: mol_type = other DNA
gagcaccctgccccaggacacacagcctgcaggtgcctggtcccacttcctggagctctgccgggcaccacggctccagggagtgctccggtgttttcccagcacttggcaacagatggc

SEQ ID NO: 69055 - DNA, 120 bp, synthetic construct
  source 1..120: mol_type = other DNA
agtgaggctggtagaagggaggagggagggaagagagagggaggactgagtaggagaatgaggaaagcggaggagggagggagagggaggaggggagagacaggaagggaggaagagtag

SEQ ID NO: 69056 - DNA, 120 bp, synthetic construct
  source 1..120: mol_type = other DNA
ctcctgagtagctaggaccacaggcacatgccaccaagcctggctaattttaaaaattgtttgtagagacaaacaatgttgcccaggctagtcttgaactcttagccccaagcaatcctc

SEQ ID NO: 69057 - DNA, 120 bp, synthetic construct
  source 1..120: mol_type = other DNA
ccaggatggtccttcacccacccctgtgtttcatggcagtgacattttgcaagggtccaggccaggctttgtagactttcttttttttcttttatctttttttttttttttgagatggag

SEQ ID NO: 69058 - DNA, 120 bp, synthetic construct
  source 1..120: mol_type = other DNA
gacagtgcgaggctctatctggaaaaaaaaaaatcgtaaagacaagatctcactttgtagcccaggatggtcttgaactcctagactcaagtgatcctcccttcttagcctcccaaagca

SEQ ID NO: 69059 - DNA, 120 bp, synthetic construct
  source 1..120: mol_type = other DNA
tttttgctggtggagagtcttacttcgatgttgatggctgctagactgatcagggttgtggttactgaaggttggggtgactgtggcaatttcttaaaatatgacaacaatgaaattgtc

SEQ ID NO: 69060 - DNA, 120 bp, synthetic construct
  source 1..120: mol_type = other DNA
catgaatcacaaatgttctttatggaatcgaaaatggtgaatcctttccagaaggaaaggatttctatttactttgcctagatctatcagaggaattaccatttacagcagctatagccg

SEQ ID NO: 69061 - DNA, 120 bp, synthetic construct
  source 1..120: mol_type = other DNA
agcctcctgagtgatggagactacaggaatgcaccaccatgcttggctaatctttaaattttttcttgtagagatgaggtctcattatgttgcccaggctgttctcaaattattaggctc

SEQ ID NO: 69062 - DNA, 120 bp, synthetic construct
  source 1..120: mol_type = other DNA
cctgtctctactaaaaatataaaaactagctgggtgtggtggcacacacaactgtgatcccagctactcaggagtctgaggcagaagaatggcttgaacctgggaggcagaggtttcagt

SEQ ID NO: 69063 - DNA, 120 bp, synthetic construct
  source 1..120: mol_type = other DNA
agtcaaacacttttctgggtgttgggaagacaaaagatttggctactgatctcagtgtaatagatgaagacaaactgtacagaaacttccaaagagtaattttgatgatagaatgaaagt

SEQ ID NO: 69064 - DNA, 120 bp, synthetic construct
  source 1..120: mol_type = other DNA
ctggtgtatgttgcagaatactttacaatttatgtctgttatctctgctaaacttgttacttttgaggagagtgatcacatcttgtttttttatcctgaataactaacaaattacttggc

SEQ ID NO: 69065 - DNA, 120 bp, synthetic construct
  source 1..120: mol_type = other DNA
acattcattcttacattataagaagggatattggcaagataattggtgtcctcttttggaaacctcaatgttccctctgccattcctgatttttgtgtgtcagtggggtggggggagggg

SEQ ID NO: 69066 - DNA, 120 bp, synthetic construct
  source 1..120: mol_type = other DNA
gggagttgtggagatcatgggaagctacagagttctgtctcagaaactcccacccgagcctggggctcccaataagaactctcatacacaaagcccaaggtgacaggttggtgacacgaa

SEQ ID NO: 69067 - DNA, 120 bp, synthetic construct; identical to SEQ ID NO: 68751
  source 1..120: mol_type = other DNA

SEQ ID NO: 69068 - DNA, 120 bp, synthetic construct
  source 1..120: mol_type = other DNA
ccagctcctatccagcactgcttttataccatcatctttaaacatgtgcttgtctctgctctgcaagagagatttcctgttatatggatgggatagagaagtggacacgtgatattcaaa

SEQ ID NO: 69069 - DNA, 120 bp, synthetic construct
  source 1..120: mol_type = other DNA
ctccgggcccagctcttcctcccggctgcgtctgcaggcccgactcctgcctcccaacaacgtctttggactcagtgcctgcccagctcgtggtggccttggtcggcccacagcttcttc

SEQ ID NO: 69070 - DNA, 120 bp, synthetic construct
  source 1..120: mol_type = other DNA
tgcatgggctccaaatcctgcacttcctccagtcgttctctccaggcccagctcttcctcccagcagcctctgcaggaccagactgtcgtcaagtaggcctgtccagggacagctcctgc

SEQ ID NO: 69071 - DNA, 120 bp, synthetic construct
  source 1..120: mol_type = other DNA
gcttgggcctcccggcggcctctgcaggcccaagtggtcctgaaggcagcctctccaggcccagctccggcctcccagcaagcaagctcttttggctcagctcctgcccagctcccgccg

SEQ ID NO: 69072 - DNA, 120 bp, synthetic construct; identical to SEQ ID NO: 69070
  source 1..120: mol_type = other DNA

SEQ ID NO: 69073 - DNA, 120 bp, synthetic construct; identical to SEQ ID NO: 69071
  source 1..120: mol_type = other DNA

SEQ ID NO: 69074 - DNA, 120 bp, synthetic construct
  source 1..120: mol_type = other DNA
cctctggcaccctttccagaggcgtgagcccctgcctcacattggcctctctcacgctgagggaggtcagcgtgagcccctgcctcacactggcctctctcacgctgcgggaggtcagcg

SEQ ID NO: 69075 - DNA, 120 bp, synthetic construct
  source 1..120: mol_type = other DNA
caggcccagcctctgcctcacagcggactccccacgcccagctcgctctcgcctgcggcctcccgagtcgaaagctccggcctctccgccgcttcggcaggcccagctcccgcctgccag

SEQ ID NO: 69076 - DNA, 120 bp, synthetic construct; identical to SEQ ID NO: 69074
  source 1..120: mol_type = other DNA

SEQ ID NO: 69077 - DNA, 120 bp, synthetic construct
  source 1..120: mol_type = other DNA
tcacaacggcctttcccggcccagtttttcccgtccggcggcctctccgggcccagaagctcctcaagtcggcctctccagacccacttgcagcctcctggcgtcctctccgggcccagc

SEQ ID NO: 69078 - DNA, 120 bp, synthetic construct
  source 1..120: mol_type = other DNA
cctgttggcggcctctacctcaacagtgggccctccacgcccacctcttgcctcgccgtggcctcctcgggccaggctcccgccttggggcagctcccgcaggcccagctcctgcctcac

SEQ ID NO: 69079 - DNA, 120 bp, synthetic construct
  source 1..120: mol_type = other DNA
tctccaggccccaaacggcctccggtcggtgggcttctccaggcccagcttgggcctcccggcggcctctgcaggcccaagtggtcctgaagtcagcctctccaggcccagctccggcct

SEQ ID NO: 69080 - DNA, 120 bp, synthetic construct
  source 1..120: mol_type = other DNA
ccaaatcctgcacttcctccagtcgttctctccaggcccagctcttcctcccagcagcctctgcaggaccagactgtcgtcaagtaggcctgtccagggacagctcctgcctcccggcag

SEQ ID NO: 69081 - DNA, 120 bp, synthetic construct
  source 1..120: mol_type = other DNA
taaagatcatagtacaggaataattattaatattcaaaatagctttaaagctgctcaccttttgaatgttgggaattgaccaggaggtggctgtaacctaggattgttccttcattaatg

SEQ ID NO: 69082 - DNA, 120 bp, synthetic construct
  source 1..120: mol_type = other DNA
tcggcccccaagacctggtcacctcccaagtgttctgctctccctgatctgtatcatatacagactctcttggattccttaccaattgcttgagagatcacagtgggtttggggggaaaa

SEQ ID NO: 69083 - DNA, 120 bp, synthetic construct
  source 1..120: mol_type = other DNA
tagatggtaaagtgataattactaaaatgtattgttggctttgtaactttaatagatgtaatgtgtaaagtgataatactttcaaatggaggaaataaaagagatttgtataagaatgat

SEQ ID NO: 69084 - DNA, 120 bp, synthetic construct
  source 1..120: mol_type = other DNA
ggaatatcaacaaagagataacagaaattcctgagtggaaaactacaatgataaaaattaaaaaatcaacagagggatttaagagtacatttgcacacgcagaagaagtcatgaacttga

SEQ ID NO: 69085 - DNA, 120 bp, synthetic construct
  source 1..120: mol_type = other DNA
atagcataatttttaggtgtacaatatttatggaatacattactggaacaaataaataatttagttaatgacatgacaaagaacagttgtatacactatagagcatagtaatggaataat

SEQ ID NO: 69086 - DNA, 120 bp, synthetic construct
  source 1..120: mol_type = other DNA
ttttgtggtgaccgatcttaagatttgaagcctacaccttcttaacttggtccatgggggcacaaaaggagagagagtataaatgctgaggatgaccttaacaaaagtgaacacgaaatt

SEQ ID NO: 69087 - DNA, 120 bp, synthetic construct
  source 1..120: mol_type = other DNA
aactctagggaatatttgctgcttccaactgtgttgaaggtgtaaaagaaaagagcataaaattataaatgatcgtctgagggctttatagtctttgctcaagagactagagtcttccat

SEQ ID NO: 69088 - DNA, 120 bp, synthetic construct
  source 1..120: mol_type = other DNA
cactaagaggtggcttagttaactggtcctccacaaatatcgaggctgttgttaactcctgatatattctctgcaaatagtatattcatgaacaacctcctgaaaccagcagcctagaga

SEQ ID NO: 69089 - DNA, 120 bp, synthetic construct
  source 1..120: mol_type = other DNA
agacagattcagaaagtatgtggggtggaaattgcagagggcctgagatagagccttgaggactcagaaatgtgttgaaggagaggaccctggcattccagtttctctagaaatcgtttt

SEQ ID NO: 69090 - DNA, 120 bp, synthetic construct
  source 1..120: mol_type = other DNA
taaagccattttggattggattttctatcatttgcagctgcaagcatcctaactaatactatgtattaaaaataagtggaaatgatttatttaacatggcatgaacatccctcattttaa

SEQ ID NO: 69091 - DNA, 120 bp, synthetic construct
  source 1..120: mol_type = other DNA
ccatgtatcactttccattaaatcttcgacccgtatataacctttagctgcaggtttgtttgcttacatcactgtgatcaaatggttagaactgtagattttcatttgggaaaatgatga

SEQ ID NO: 69092 - DNA, 120 bp, synthetic construct
  source 1..120: mol_type = other DNA
gaaaaacaaacaattcatattgactcaggatgctcacctaccccctcttttgcaggagtgttagtttgcgtgtcagtacatggccagcctccttggattctggcatgatgctttccatag

SEQ ID NO: 69093 - DNA, 120 bp, synthetic construct
  source 1..120: mol_type = other DNA
tagactacctcttccttagtccacctggcccttatccacatcccttgaatgagttttctttgtctggacacatttctgaagtaatgcttctctgcactcccaaaatatagctcttccttc

SEQ ID NO: 69094 - DNA, 120 bp, synthetic construct
  source 1..120: mol_type = other DNA
atcagcaagtgatttacaccatagtgttaaccagtgctcctgaggatgctgattttagcagaatcctagggaactaacagaaaaaaatcacagctaattttagtatttgtagggccttgt

SEQ ID NO: 69095 - DNA, 120 bp, synthetic construct
  source 1..120: mol_type = other DNA
gagttttgttatcatactctggatggaggccaatcagaaatgacccttaagatctgactctgtctagccagtctccccttgaccaaggagaacatctgggcatgaactgtagttttcatt

SEQ ID NO: 69096 - DNA, 120 bp, synthetic construct
  source 1..120: mol_type = other DNA
caaactgacagggaaaaaaaaaaacctctttgtgtacttaaagccccaaaccaaaagcaaaattaaaatttgtgctgacccttctcccttggggctgcagatgtcactgctgtccagggc

SEQ ID NO: 69097 - DNA, 120 bp, synthetic construct
  source 1..120: mol_type = other DNA
ttgcttcaaattggtgtaagctcttcacatgcagagggctcatgtgccttgatgtaacattagatcaagtggcagaagctaaatttggaattaaggcaatatttggttgtagggaacatc

SEQ ID NO: 69098 - DNA, 120 bp, synthetic construct
  source 1..120: mol_type = other DNA
tatagccataaaatatttaagaaaattctggaaataagagtaatagaattacttttttcagacatttcccaaatgtgttttaaatggctttcctgaaggagaaatagagagggagagaaa

SEQ ID NO: 69099 - DNA, 120 bp, synthetic construct
  source 1..120: mol_type = other DNA
atcgcttgaacccaggaaatggaggttgcagtgagccgagatggcgccactgcactcccgcctgtgcgacagagcaagactctgtctcaaaaaaacaacaaaaaagacatattaagatac

SEQ ID NO: 69100 - DNA, 120 bp, synthetic construct
  source 1..120: mol_type = other DNA
atcaaggaaagcaggcatttgcaccaataatgacagaacaaaacaacatgggggagagtagtagtataaacaactttgagagttcataggtgggctgccatactttcagctagagtgata

SEQ ID NO: 69101 - DNA, 120 bp, synthetic construct
  source 1..120: mol_type = other DNA
tataatctttagatcacctgttcagcaaatcgacaaacaccgaggacagtttctgtctgcaacgaagttgacagtcaggtagccagggatagctaatcagtgaataacaatacctggtac

SEQ ID NO: 69102 - DNA, 120 bp, synthetic construct
  source 1..120: mol_type = other DNA
ttcatagcattaactacctaaatttaggttgttaagtagtgctagtagtacagttggagagattccatcttaatctaaacatatttgtcttggttaaagtataccagaatgtagcttttt

SEQ ID NO: 69103 - DNA, 120 bp, synthetic construct
  source 1..120: mol_type = other DNA
ggagcagacccttgacaagaagctgatgtcagatctgagggtaccttttattcttcgttgtttaaactgggtttctgtaaccaatgtaggggggcagtattgtgagttgtgttgatttaa

SEQ ID NO: 69104 - DNA, 120 bp, synthetic construct
  source 1..120: mol_type = other DNA
taattttttttatctttagtagagatgaggtcttgctctgttcctcatgttggtcttgaactcctgagcccaggcagtcttcttgcctctgcctcccaaagtgctgggattacagatgtg

SEQ ID NO: 69105 - DNA, 120 bp, synthetic construct
  source 1..120: mol_type = other DNA
acgcaatgttgccaaatagaaaaatacttttactgggactgaagataatttttttttttgaggcagagtctcactctgtcgccaggctggagtgcagtggcatgatctcggctcactgca

SEQ ID NO: 69106 - DNA, 120 bp, synthetic construct
  source 1..120: mol_type = other DNA
gttcagtcaatctatatttaaattccagcatttttataaaacagggataataataactatctttctgagttgtgagaattaaatgaggttctgtatacataaagcacttggcataataca

SEQ ID NO: 69107 - DNA, 120 bp, synthetic construct
  source 1..120: mol_type = other DNA
tttggctggaaaacatctatttgtatacttagtatctctgtccttggttacccccatccctgccttctcacccatctttagtctgccttatggtcttgcatagattttcaactgttagac

SEQ ID NO: 69108 - DNA, 120 bp, synthetic construct
  source 1..120: mol_type = other DNA
ctccctttctgggttacttgtgatcaaggggcatggacttactcatctcttataattccaatcagtgcatgacacatcatagctgatcctcaattatgttttaagttaatgtactcaagg

SEQ ID NO: 69109 - DNA, 120 bp, synthetic construct; identical to SEQ ID NO: 69089
  source 1..120: mol_type = other DNA

SEQ ID NO: 69110 - DNA, 120 bp, synthetic construct; identical to SEQ ID NO: 69090
  source 1..120: mol_type = other DNA

SEQ ID NO: 69111 - DNA, 120 bp, synthetic construct
  source 1..120: mol_type = other DNA
caaaaaggggcaaactcattgctgttctcaatatctcccttctttcacttcaaacacagacactcacagcatgttctgtttctgataacttcctaatcacacaggagctccaggatttct

SEQ ID NO: 69112 - DNA, 120 bp, synthetic construct
  source 1..120: mol_type = other DNA
ttattatccacttaggcacctttgtgcactggatctctgatcaaattattttgaaattttaatatgaaatacataggagaaaaaattgaaaatgtgtagaggtaggcaagcttttctttg

SEQ ID NO: 69113 - DNA, 120 bp, synthetic construct
  source 1..120: mol_type = other DNA
agtagaccgtggggttagtcttggattgatttctatactcccctttgatgttgatagctgcttcctgttaggaacttctgttggaagcatacttcttacctgaagaaagttctgagttga

SEQ ID NO: 69114 - DNA, 120 bp, synthetic construct
  source 1..120: mol_type = other DNA
atgacgcaatatgtgcataaaatgttcaacaaatactgtgttccatttttttaaagcaaggataaggatgaaaaaaataaaacgatgaaagagtttatttaagctactgatatccagttg

SEQ ID NO: 69115 - DNA, 120 bp, synthetic construct
  source 1..120: mol_type = other DNA
caaagaaaagaaccaggatgagaaattccatatgtcttcttatcatacaattcaatcctgtgaattgttgattatttgctttactactctaaatgacttatgcatgtcgttttatttgtc

SEQ ID NO: 69116 - DNA, 120 bp, synthetic construct
  source 1..120: mol_type = other DNA
tatggtaataagaagtagctcaaaaagagcagaatgacctcttccttacccccttagtgatacagacaaatagagtatttgttcatgttatattttggcttttatttttaaatcaaggag

SEQ ID NO: 69117 - DNA, 120 bp, synthetic construct
  source 1..120: mol_type = other DNA
agagagagaaataggaaggccaggaatccaacaaggaatgggcattgaagaaagacttgcctcgtactgttagttagaagccaatggatatgggaagaaaatttgttagatttggtaatt

SEQ ID NO: 69118 - DNA, 120 bp, synthetic construct
  source 1..120: mol_type = other DNA
gacatggtttctagtcttaagaaattgttctaggagaggagacagtaaatgccatgtaagaaatggcttggtagctgttgcaaaaggaccacagagaagggcagctcagcattgaggaga

SEQ ID NO: 69119 - DNA, 120 bp, synthetic construct
  source 1..120: mol_type = other DNA
attatataggtgaggaagtatgtattgcttactactttttaagttcttcctagtattctggccctttaacagtttattctgtttgtttgtttttccttctttgattacttacagttgtaa

SEQ ID NO: 69120 - DNA, 120 bp, synthetic construct
  source 1..120: mol_type = other DNA
ctcgaggagcggcccggacacctcccttgaggccccagttcactcctggccgagttgcatccttgagcccgcgtcgcgcccttggaggcttcccctccctcctgcactcgctgatgcggc

SEQ ID NO: 69121 - DNA, 120 bp, synthetic construct
  source 1..120: mol_type = other DNA
gtggtggctcacacctgttatcctgtcctggatcccttgagtcaaagagtttgagaccaacctggacaatacagtgagaccccgtctctacaaaagataaaatattagccaggggtggct

SEQ ID NO: 69122 - DNA, 120 bp, synthetic construct
  source 1..120: mol_type = other DNA
aaaatgtggactatgccagccatgattgggaaaaataatttttcatacagcattatctgtagacttgtattagcagcatactggtcataagcgttttgctttcctcaaatatgatgaggt

SEQ ID NO: 69123 - DNA, 120 bp, synthetic construct
  source 1..120: mol_type = other DNA
ctgtagaacagcttcttagaatcttgacttaaatgtccacagtaatatttgactgaaaaaaatttagcacactgtcactatgatgaaaaaattactataaaattattttaaaaattttcc

SEQ ID NO: 69124 - DNA, 120 bp, synthetic construct
  source 1..120: mol_type = other DNA
tagagtgcatagtcagaatatagccagagcagctgacagaggtcaagattcatttttaagcaaagattcaagaagttaaaaccacacacaagtgttttactgggcatccttatccaacta

SEQ ID NO: 69125 - DNA, 120 bp, synthetic construct
  source 1..120: mol_type = other DNA
attctgagatttaatgtatttatagaagttcagtctggacacggtggtgcctgtaatcccagcacttttggaggccgaggtgggcggatcacctcgggtcaggagttcaagaccagcctg

SEQ ID NO: 69126 - DNA, 120 bp, synthetic construct
  source 1..120: mol_type = other DNA
cagtcttcattgactgttctcagtttattgagcctgcagccttacttacttatgtatttatttgtttattattattattattattatttgagatggagtctcgctctgttgcccaggctg

SEQ ID NO: 69127 - DNA, 120 bp, synthetic construct
  source 1..120: mol_type = other DNA
acacattgcttgttaagtttttacaaacattttgagaaactacagatggggcagtgtgacctgaatttaaaaccccagaatttctttttctttttcttttcttgagacagggtcttcctc

SEQ ID NO: 69128 - DNA, 120 bp, synthetic construct
  source 1..120: mol_type = other DNA
gtgaagttaggctggcttgtttcctaatgggctgagaggacatattcccattccagaattttgaagaatctaagtgcacacaacacagtgcctaaagcatgtcagctgtctgtttcggat

SEQ ID NO: 69129 - DNA, 120 bp, synthetic construct
  source 1..120: mol_type = other DNA
tcgtttagttctcacaacattttgcctatgaggcaagtactattattatccccatttcacaaaaagaaaataaaggctgagagaggccaggcaacttgcccaaagtcagagaggtgatgg

SEQ ID NO: 69130 - DNA, 120 bp, synthetic construct; identical to SEQ ID NO: 68709
  source 1..120: mol_type = other DNA

SEQ ID NO: 69131 - DNA, 120 bp, synthetic construct
  source 1..120: mol_type = other DNA
cattattcttatctctttggaaagtttaattcattagcaattaaaaactggtgcagaagaatggccaggcacctggaaaaggctcttcctagcacagcacaccccgaaagagcagtttgt

SEQ ID NO: 69132 - DNA, 120 bp, synthetic construct
  source 1..120: mol_type = other DNA
atctcccattaatcaaattaaattaatttttgaagcctcttgactgatggtgagtgaatcccagacaaaggcatcccagtgggctaccagtgcctcagatttctaccctgcttgacttga

SEQ ID NO: 69133 - DNA, 120 bp, synthetic construct
  source 1..120: mol_type = other DNA
gggatcaagtgatttgtgtataatctttcattaaaaattaattaatttttaaaaattgacacattggttgaactagtttacagtcccaccaacagtgtaaaagtgttcctatttctccac

SEQ ID NO: 69134 - DNA, 120 bp, synthetic construct
  source 1..120: mol_type = other DNA
gcagccataaaaaaggatgagttcatttcctttgtagggacatggatgaagctggaaaccatcattctcagcaaactatcgcaaggacaaaaaaccaaacaccgcatattctcgctcata

SEQ ID NO: 69135 - DNA, 120 bp, synthetic construct
  source 1..120: mol_type = other DNA
tccctccttgtgtccatgtgttcacattgttcaactctcacttataagtgagaacatatggtatttggctttctgttcttgtgttagtttgctgagagtgatggtttccagcttcatcca

SEQ ID NO: 69136 - DNA, 120 bp, synthetic construct
  source 1..120: mol_type = other DNA
ccttgctgtgcaggtctgcctgttttctgggtggttggtagcgctgtgtggggtctgatgctgaaatcatcgtcactctgtttgacctagactctatgtggatggggttatggtgctgca

SEQ ID NO: 69137 - DNA, 120 bp, synthetic construct
  source 1..120: mol_type = other DNA
tgttcaacctgtataatctttagatcacctgttcagcaaatcgacaaacaccgaggacagtttctgtctgcaacgaagttgacagtcaggtagccagggatagctaatcagtgaataaca

SEQ ID NO: 69138 - DNA, 120 bp, synthetic construct; identical to SEQ ID NO: 69102
  source 1..120: mol_type = other DNA

SEQ ID NO: 69139 - DNA, 120 bp, synthetic construct
  source 1..120: mol_type = other DNA
tctctactaaaaatacaaaaaaattagctggacatggtggcgggcacctgtaatccagctactcaggaggctgaggcaggagaattgcttgaacctgggtggcggaggttgcaatgagct

SEQ ID NO: 69140 - DNA, 120 bp, synthetic construct
  source 1..120: mol_type = other DNA
tcaactaaaaaacaaaaattagctaggtgtggtggcatgtgcctgtagtcccagctacttgggtgactgaggcagagaatcacttgaaccctggagaccagaggttgcagtgagccgaga

SEQ ID NO: 69141 - DNA, 120 bp, synthetic construct
  source 1..120: mol_type = other DNA
tggtatatgtctctcagctctttttctggtgcgtggtttttttgtttgtttgtttgttttgttttgttttgttttgttttgtttgagacagggtctcgctctgtcgcccaggctggagtg

SEQ ID NO: 69142 - DNA, 120 bp, synthetic construct
  source 1..120: mol_type = other DNA
actctcaaagagcagttttattttctgccttcccatgttctcagggttcatcttagtgttccttcatgaacctcctacaattggtaattgttgttgtcctctgcagaggaaacgtactgc

SEQ ID NO: 69143 - DNA, 120 bp, synthetic construct
  source 1..120: mol_type = other DNA
aggcagaggttgcagtgagctgagatcgtgccacagcactccagcctgggcaagcaacagagcaaaactctgtctcaaaaaataaataaataaataaataaatatagaaagatatttttg

SEQ ID NO: 69144 - DNA, 120 bp, synthetic construct
  source 1..120: mol_type = other DNA
gctggtctcaaacccctgagctcaacttatctgcgcgcttcagcctcccaaagtgccgggattacaggtgtgagccaccatacccagccactattatttttttaaatttctctgactcta

SEQ ID NO: 69145 - DNA, 120 bp, synthetic construct
  source 1..120: mol_type = other DNA
ttctccactagtgaagcaaaaaactcttctttttcactacttgaagcacaaaacctcttcttttcttttttctctctctctttttttttttttttttttgagacaggatcttgctctgtt

SEQ ID NO: 69146 - DNA, 120 bp, synthetic construct
  source 1..120: mol_type = other DNA
gccagagacctgtgccaggtcttaaaaatgcctatacaatcatacctcaggatagaactgcttcttagaagggcaagaatattatttttgaaagaaagtttttcatcagtagatgtaaga

SEQ ID NO: 69147 - DNA, 120 bp, synthetic construct
  source 1..120: mol_type = other DNA
caaaatccaggggttacaggcatgagtcactgcacccagccaccttcctattcttagtgcctggtacagagtggcctcacaacaaattctggttaaaatgaaaattggttttataaatat

SEQ ID NO: 69148 - DNA, 120 bp, synthetic construct
  source 1..120: mol_type = other DNA
tggtttggaaacaagataaaagagattggccgggcacggtggctcaggcccgtaatctgagtactttgggagaccaaggtgggtggatcacgaggtcaagagatcaagaccattctggcc

SEQ ID NO: 69149 - DNA, 120 bp, synthetic construct
  source 1..120: mol_type = other DNA
ctcggcctctcaaagtgctgggattacaggcatgagccaccgcgcctggctgaacaagttattgttgaaataaaaatgaaaatttcaaatcctcaaggaatttgaagatctctccaaatg

SEQ ID NO: 69150 - DNA, 120 bp, synthetic construct
  source 1..120: mol_type = other DNA
cctgtctctactaaaaatacaaaaattggccgggcatggtggctcacgcttgtaatcccagcactttgggaggccgaggcaggcggatcacgaggtcaggagatcgagaccatcctggct

SEQ ID NO: 69151 - DNA, 120 bp, synthetic construct
  source 1..120: mol_type = other DNA
ggagcctgaagagcccggtgggaagtggaggacggagaggaggggcatggacccagaaagtagcaggaagtcttcagagacccttatttttaaattatttatttttgtttgttttgtttt

SEQ ID NO: 69152 - DNA, 120 bp, synthetic construct
  source 1..120: mol_type = other DNA
gaactcaggtgatctgcccacctcagcctcccaaagggctgggattacaggtgtaatggttaaggaggcaaatcttaaataaaggccgggcacagtggctcacgcctgtaatcccagcta

SEQ ID NO: 69153 - DNA, 120 bp, synthetic construct
  source 1..120: mol_type = other DNA
ggttactgattaaatatcgctctccttcctacagtgtacacccccatccttctccatctgtcttttttttttttttttttttttggtagagacagggtctcactatgttgcccaagctgg

SEQ ID NO: 69154 - DNA, 120 bp, synthetic construct
  source 1..120: mol_type = other DNA
tcatggaaaccatccagtcctgcagaaaggagaaagtcactcaatatctcattacgcccattccaaatattctgttctcttagaatcagagcctcctaaagagagtgcctacgtagaggc

SEQ ID NO: 69155 - DNA, 120 bp, synthetic construct
  source 1..120: mol_type = other DNA
gtagctgggattacaggcgcccaccaccatgcctggctaattttttgtatttttggtagagacagggtttcacgacgttggccaggctggtctcaaactcctgatctcaagtgatccacc

SEQ ID NO: 69156 - DNA, 120 bp, synthetic construct
  source 1..120: mol_type = other DNA
ggggattgcttgaagccaagagttcaagaccaacctggccaacatggggagacctcgtctctattaaaaaataaagcaggccgggtgtggtggctcacgcctgtaatcccagcactttgg

SEQ ID NO: 69157 - DNA, 120 bp, synthetic construct
  source 1..120: mol_type = other DNA
gattacaggcatgcaccaccacgcctggctaattttgtatttttagtagagatagagtttctctacgttggtcaggctggtctcgaactactgacctcaggtgatccgctcgctttggtc

SEQ ID NO: 69158 - DNA, 120 bp, synthetic construct
  source 1..120: mol_type = other DNA
aatttttaaaattttttttaaagaatccaaaagatattataattaaaatgtatatgtagggcagggtacggtggctcgtgcctgtaattccagcactttgggaggccaaggagggcagat

SEQ ID NO: 69159 - DNA, 120 bp, synthetic construct
  source 1..120: mol_type = other DNA
ctcaggtgatcctcccacttcagcctcccaagtagctggaactacaggtgcatgccaccatgcccagtcaattttttttttaatttttcatagagacagactctcactatgtttcccagt

SEQ ID NO: 69160 - DNA, 120 bp, synthetic construct
  source 1..120: mol_type = other DNA
tttttttcttttttttttttttgagatagagttttgctcttgttgccgaggctgcggtgcaatggcacgatctcaactcactgcaacctccacctcccaggttcaagcgattctcctgcc

SEQ ID NO: 69161 - DNA, 120 bp, synthetic construct
  source 1..120: mol_type = other DNA
cactgtcttgggaaacacaaaaacagttttttaaagccagttactagatatcatgtatatttgttgttatagcacttgagatatcttagtccttactttacagtctctttcagctctgaa

SEQ ID NO: 69162 - DNA, 120 bp, synthetic construct
  source 1..120: mol_type = other DNA
gctgctgcccagagaaaggggctggctcaaccctagctcccaaatctttttcctatgcctttttcctttttcctcatctctttcctgaactatccagatatcttcctgcctcctgcctcc

SEQ ID NO: 69163 - DNA, 120 bp, synthetic construct
  source 1..120: mol_type = other DNA
catattgcattcaagactatcttcctctgcacatctataaaaacaatcatatattcccacgcatgctttaaaaatctcaggcctatgagggcgaggttggcagatcatctgaggtcagga

SEQ ID NO: 69164 - DNA, 120 bp, synthetic construct
  source 1..120: mol_type = other DNA
ggctccatgctctaaaaggaaaccttcttatgtcctgcatatcatggacattcaatgaatgcttgttccattgactcgtgtagacttcaataataaactgttcaatgcattatgccagat

SEQ ID NO: 69165 - DNA, 120 bp, synthetic construct
  source 1..120: mol_type = other DNA
gctgaggttaacctatgagttaagcattgacttttatcttctccactacaggactcctggaccaagataattttgttaccctgctacagaatttctcagccactttccatgccataatcc

SEQ ID NO: 69166 - DNA, 120 bp, synthetic construct
  source 1..120: mol_type = other DNA
aagtaaaggaaatgttataagattttctgaaaccaccaacctttagcgatattgtcagaccttctccaacattttccactgcatttgtcagcaatcagagatgacctccacaccgaggcg

SEQ ID NO: 69167 - DNA, 120 bp, synthetic construct
  source 1..120: mol_type = other DNA
tttgaaatttggtaagtaaaagccagtatttatgtctttaataacatatcaacaaagggccatgtctgaatgaagtatagaagttcgggaccagccgggtgcagtggctcacgcctgtaa

SEQ ID NO: 69168 - DNA, 120 bp, synthetic construct
  source 1..120: mol_type = other DNA
ctttgtgtctacattctcgagtacagtatggacaagctccctacggtcaagcaatatccacttcatattgaaggcattttgcttaggatatggggcaaatctgaagaacgagcctaaaaa

SEQ ID NO: 69169 - DNA, 120 bp, synthetic construct
  source 1..120: mol_type = other DNA
ataaaagcttttcattactttttttgtttttcttcgtatgtttgtttttttgagacagaatctcctttctgttgcccaggctggagtgcagtggcacgatcttggctcactgcgacctcc

SEQ ID NO: 69170 - DNA, 120 bp, synthetic construct
  source 1..120: mol_type = other DNA
ggggaaatggagcaaaagcagctatgcgtcatcactcaacagcataacctgcaaatccaattcacccagaagaaagagagcaaaaccaccacccagttctagtgaaatagtttaaatgca

SEQ ID NO: 69171 - DNA, 120 bp, synthetic construct
  source 1..120: mol_type = other DNA
ttgctcctggtgcctgagtagccctaggagcagagcatctcactaacttgtgatgagcatgtagtgaaacaaaatagaaacctttgttttgatgatccactgggattttagggttaattt

SEQ ID NO: 69172 - DNA, 120 bp, synthetic construct
  source 1..120: mol_type = other DNA
tggcgaaacttcagtcattcctgcaatggagaacattctgtttcctttggcttcttttttgacgtgactttgctcttatataagcagcagagaatggctgagttgtaagtcaaactcttc

SEQ ID NO: 69173 - DNA, 120 bp, synthetic construct
  source 1..120: mol_type = other DNA
agccccaatcctcaacccgatcttcaacttctggtacaccatgcattttatttggacgaaaagtaaaagtggaagaggttctctctgtatttcctctataattcacacgctgagatactg

SEQ ID NO: 69174 - DNA, 120 bp, synthetic construct
  source 1..120: mol_type = other DNA
tcagggccatggcaaggctgccgttggcaaaagcccagctctgccatgaatctccgttcagttactggtttcacactcatttgtgaggtcacagacttgccaaggatattcatgattcaa

SEQ ID NO: 69175 - DNA, 120 bp, synthetic construct
  source 1..120: mol_type = other DNA
acacgatgagctcaaatgccctggatctccgcagcaccaaatccccctcctcccctcaatcaaatgcaacaatgcctccattttaacattaatgtcttaataagttgttcccaaattaaa

SEQ ID NO: 69176 - DNA, 120 bp, synthetic construct
  source 1..120: mol_type = other DNA
cctatttatttatatttttgagatggagtttcgcttttattacccaggctggagtgcaataacatgatttcagctcactgaggcctccacttcccaggttcaagcaattctcctgcctca

SEQ ID NO: 69177 - DNA, 120 bp, synthetic construct
  source 1..120: mol_type = other DNA
agacagagattgcagtgagctgagattgcaccactgcagtctagcctgggtgacacagcaagactccatctcaaaaaaaaaaagaaaaaaaatcagaagtgaacctgtagcctgtagtgt

SEQ ID NO: 69178 - DNA, 120 bp, synthetic construct
  source 1..120: mol_type = other DNA
aaaaacctgagactgggtaatttataaagaaaagaggggtgttttgttttgttttgtttttggagatggagtttcgctgtcatcacccaggcaagagtgcaatggcacgatcttggctca

SEQ ID NO: 69179 - DNA, 120 bp, synthetic construct
  source 1..120: mol_type = other DNA
tcaccagacaccaatctgctggttcctcaatcttggaattgtgagagagaaatgtatgttgtttaagccacccagcctatggttttctgtaacagaagcccaagtagactaagatactca

SEQ ID NO: 69180 - DNA, 120 bp, synthetic construct
  source 1..120: mol_type = other DNA
agtggcccactgcaacctccacctcctgggttcaagttgttctcctgcctcagcttcctgtgtagctacaggtgcccacaaccacacccagctaatttttgtatttttagtagagatggg

SEQ ID NO: 69181 - DNA, 120 bp, synthetic construct
  source 1..120: mol_type = other DNA
actcagctatgtctgacatcagagaccacgattttttttttttttttgaaatggagtcttgctcttgtcacccaggctggagtgtaatgggacgatctcagctcactgcaacctgcgcct

SEQ ID NO: 69182 - DNA, 120 bp, synthetic construct
  source 1..120: mol_type = other DNA
tggcctcccaaagtgctgggattacagatgtaagccactacgcccagccccttttacttaattcatggtgtctcttgtcatagaaaattttatcttgatgtagtcagcgttattaatcct

SEQ ID NO: 69183 - DNA, 120 bp, synthetic construct
  source 1..120: mol_type = other DNA
aggtgtcaataggcagaaacgctggccactccagccttggccaacatggtgaaccccatctctacaaaaaatacaaaaattagctgggcatggtggcaggtgcttgtaatcccagctact

SEQ ID NO: 69184 - DNA, 120 bp, synthetic construct
  source 1..120: mol_type = other DNA
agtaaccaagcccatggacaggctgggtctgtccccactgcactgcactgtggcttctggcccagctccaggcacgacatgggccctcatcaaatatgcaccacaggaatggggaccttc

SEQ ID NO: 69185 - DNA, 120 bp, synthetic construct
  source 1..120: mol_type = other DNA
ctgtttatccaggggtttcccctgaagggtgtgggcaccatacaggaggggacagttttagtgtcaatcgggacaggagttcaacaggtcctttggatgcagctagagctagaccttctc

SEQ ID NO: 69186 - DNA, 120 bp, synthetic construct
  source 1..120: mol_type = other DNA
tggcctcccaggttcacgccattctgcctcagcctcccgagtagctgggactataggcgcccagcaccatgcccggctaattttttgtatttttagtagagacggggtttcaccgtgcta

SEQ ID NO: 69187 - DNA, 120 bp, synthetic construct
  source 1..120: mol_type = other DNA
tgtcacttggcaatcagcaggcagggtttaattcatacagtcctgggagggagacatttccttgcttttactgtttttctgataaaaatgtcccctatataatggctgtccagaagtgga

SEQ ID NO: 69188 - DNA, 120 bp, synthetic construct
  source 1..120: mol_type = other DNA
aattcccgacgtccagttttcagagtgctcttctacttttcctaagtccaaatggagtccttggtgccagaatcctgcatgtggtcataaaataacaaaaataaaggtctgtggatgtgc

SEQ ID NO: 69189 - DNA, 120 bp, synthetic construct
  source 1..120: mol_type = other DNA
gctccaaaaaatgtctctataattttaactgacctttactgataccaaatgagcctgttgcttcagtttttgtacgctggatataaagtacaggagatccagacgcctgtcggcctaaag

SEQ ID NO: 69190 - DNA, 120 bp, synthetic construct
  source 1..120: mol_type = other DNA
aagcccagctctgccatgaatctccgttcagttactggtttcacactcatttgtgaggtcacagacttgccaaggatattcatgattcaatccattacaacaattctgtgtgtacataac

SEQ ID NO: 69191 - DNA, 120 bp, synthetic construct; identical to SEQ ID NO: 69173
  source 1..120: mol_type = other DNA

SEQ ID NO: 69192 - DNA, 120 bp, synthetic construct
  source 1..120: mol_type = other DNA
ctgacttcgggtctcaagctactgctcctattataacttggccaaatttaagaaatctggactaacaggatcagacttgttaactctgcaagatgaacaaaagatctgcagctctgtgag

SEQ ID NO: 69193 - DNA, 120 bp, synthetic construct
  source 1..120: mol_type = other DNA
agcataacctgcaaatccaattcacccagaagaaagagagcaaaaccaccacccagttctagtgaaatagtttaaatgcacaatcctttgtcctgataaaaaagtcttggctgggcaagg

SEQ ID NO: 69194 - DNA, 120 bp, synthetic construct
  source 1..120: mol_type = other DNA
attgtgctcttaaaaaattccttaaaaaacaagtggaatggcctggtgctgtgtgagtcattgaaagtaatgagactgggcgcggtggctcacgcctgttatcccagcactttggaaggc

SEQ ID NO: 69195 - DNA, 120 bp, synthetic construct
  source 1..120: mol_type = other DNA
atactattgaaaatgacatcaacgttaaggaattgaaaggacatttgttcactcgctcagcaatatttgagagccccatgtgtgccaggcactgtgctgaaatactaacagaagcaggca

SEQ ID NO: 69196 - DNA, 120 bp, synthetic construct
  source 1..120: mol_type = other DNA
atttacgtactacaatgagaagtattatccgtgaccttataagcttatggaagagatagatacgtatcaataataagaacactgttagaaagtgttaagctactagtaaatggaggaaaa

SEQ ID NO: 69197 - DNA, 120 bp, synthetic construct
  source 1..120: mol_type = other DNA
ggtttttctacaaagtgctagagagtaaatattttagactttggaggccatgccttctcagtcccagctacttactcactgtgacaggaaagcagccatggataatacgggtgtagctgt

SEQ ID NO: 69198 - DNA, 120 bp, synthetic construct
  source 1..120: mol_type = other DNA
tagctgggattacagccacacacaaccaggcctggctaatttttcttgtatgtttagtagagtcagggtttcaccacgttggctaggctggttttgaattcctgacctcaagcgatcctc

SEQ ID NO: 69199 - DNA, 120 bp, synthetic construct
  source 1..120: mol_type = other DNA
gcgtgaaccaccatgcctggcctcaatggctattctttaaacaatgtttgtaaaccacagctgcacaatgcatgcctaagagcgtgtgttctatagcaatgaaaatacagaaaatacact

SEQ ID NO: 69200 - DNA, 120 bp, synthetic construct
  source 1..120: mol_type = other DNA
ttattcttatttctttttttaattttttttgagacagagtcttactctgtcatccaggctggagtgcaatggcacgatctcctccgcctcctgggttcaagtgattctcctgtctcagcc

SEQ ID NO: 69201 - DNA, 120 bp, synthetic construct
  source 1..120: mol_type = other DNA
cttcatccagtttccttactttttaatgatgaacttaattttggctttgtttctgagtatcttctccagcctcggaatgccaaaagtcgatggtcttcggaatggcacaccctcaggtaa

SEQ ID NO: 69202 - DNA, 120 bp, synthetic construct
  source 1..120: mol_type = other DNA
gttctaagtactttaaatgacagtatttataatcctcaccataacctcatgagaaagaaagtaatgttattaccattttgcacaaagggaaactgaggcagggtgtattcgcctgcccaa

SEQ ID NO: 69203 - DNA, 120 bp, synthetic construct
  source 1..120: mol_type = other DNA
cctggccaacgtggtaaaaccccgtctctactaaagatataaaaattagctggagttggtggtggacgcctgtaatcccagctacctgggaggctgaggcaggagaatcacttgacccgg

SEQ ID NO: 69204 - DNA, 120 bp, synthetic construct
  source 1..120: mol_type = other DNA
taaaataccttagaaagcaaagtaaacaactccaagccccacagagatattggccgattccgtatgatttaaggaatgcggataaagagtgtcttaatgcgctcaaataggatacggagt

SEQ ID NO: 69205 - DNA, 120 bp, synthetic construct
  source 1..120: mol_type = other DNA
gtacagtatggacaagctccctacggtcaagcaatatccacttcatattgaaggcattttgcttaggatatggggcaaatctgaagaacgagcctaaaaaataagtgcttttaggaggaa

SEQ ID NO: 69206 - DNA, 120 bp, synthetic construct; identical to SEQ ID NO: 69167
  source 1..120: mol_type = other DNA

SEQ ID NO: 69207 - DNA, 120 bp, synthetic construct
  source 1..120: mol_type = other DNA
aaatttaagtttacattgtaaataaagtgaaatttgtccacatgaaagagtgctcaaaatcagtgcttctcacacattcctccttggagaagtccctcagggaactcggtcagagcaggg

SEQ ID NO: 69208 - DNA, 120 bp, synthetic construct
  source 1..120: mol_type = other DNA
accaaagaggtggctcagcaggaagaagagagggccagatctgtggtggcaagggctgagcagcagaagacggcggccatcatctctgccgagggcgactccaaggccacggagttcatc

SEQ ID NO: 69209 - DNA, 120 bp, synthetic construct
  source 1..120: mol_type = other DNA
tttcaccaagctgaggacactgtgcacccgtggtgtgtttaagcagacaattctgatggccacaaaattcttttctcttgtggtctgtgactcgagttgtcctgtccaaagactaacgca

SEQ ID NO: 69210 - DNA, 120 bp, synthetic construct
  source 1..120: mol_type = other DNA
gcatttacacactacagggtatgggcatttattggttcttggcaacagaagttcctaaggtggctgatgatctacagagtgtggtcacttcctctgacattacacaacggcaaacaaaaa

SEQ ID NO: 69211 - DNA, 120 bp, synthetic construct
  source 1..120: mol_type = other DNA
tcttgaggacaaggagtgtgtcattaattttgtgtctccaaggccaagcccaggatttgatgtataggagatctttaaaacatggtccctgcaatggttaattttatgtgcgacttggct

SEQ ID NO: 69212 - DNA, 120 bp, synthetic construct
  source 1..120: mol_type = other DNA
gttgcttgctgtctgggaaaaaaagaaatgttggataagaaggtcaaaatgtgccaattcaatgccctgagaatggtcacctaatcttctatcaagagatgtgacataccatctaaagaa

SEQ ID NO: 69213 - DNA, 120 bp, synthetic construct
  source 1..120: mol_type = other DNA
tgcacaagtgaccgagctaggtgtgccatccttgccttctcccttaaaaacgctcaataacacttcgttgcatttttctattttttttttttttaattattttgagatggagtctcgctc

SEQ ID NO: 69214 - DNA, 120 bp, synthetic construct
  source 1..120: mol_type = other DNA
ttcagtgctccccaaggcttccgctggacaaaaatcaaagcaattcgggagactacatttgtattgaaatcagattttagtacaatccaaagaaaggcacaggtcaattttgttttactt

SEQ ID NO: 69215 - DNA, 120 bp, synthetic construct
  source 1..120: mol_type = other DNA
tgcagaaaagctgatccaccatctttcttaatttagtgattctggcataccattcttcctttactgtcaaaataacagtaatacaagtgttctcaatttaatgggtttaataacttgatt

SEQ ID NO: 69216 - DNA, 120 bp, synthetic construct
  source 1..120: mol_type = other DNA
atgcctgtaatcctagcactctgggaggccgaggtgggcagatcacctgaggtcagcagtttgagatcagcctggccaacatagtgaaaccctgtctctacgaaaaatacaaaaattagc

SEQ ID NO: 69217 - DNA, 120 bp, synthetic construct
  source 1..120: mol_type = other DNA
ccaagtagctgggattccaggcgcccaccaccacacctggtcaatttttgtatttttagtagagacagtgtttcaccattgttggcctggcttgtctcgaactcctgacctcgggtgatc

SEQ ID NO: 69218 - DNA, 120 bp, synthetic construct
  source 1..120: mol_type = other DNA
aggaatccaagagtcttacttcttaatcacaaaacgaatcctttcctttgcaagtaatatcctctccaggcgaggaattccgtaagtagatggccttctaaaaggaattccttcaggaag

SEQ ID NO: 69219 - DNA, 120 bp, synthetic construct
  source 1..120: mol_type = other DNA
caacttgtttacgtagatcagtgatgcgagcattccatttctctgaaaattgagcaaaagttaattctcattaagaagtccctaccatcggggcagcactagggtcttgggatgactgaa

SEQ ID NO: 69220 - DNA, 120 bp, synthetic construct
  source 1..120: mol_type = other DNA
tttattcaaaatatgaatcatcaacataatttgccgctaatatctcattcagtcccttgctaggatacatcatccattgagagctcacagattagcagctgcagtaacacagagcaaaaa

SEQ ID NO: 69221 - DNA, 120 bp, synthetic construct
  source 1..120: mol_type = other DNA
acaggcatgcaccaccacacccggctaattttgtatttttagtagagacagggttttaccatattagccaggctggtcttgaactcctgactttgtgatccgcctgcctcagcctcccaa

SEQ ID NO: 69222 - DNA, 120 bp, synthetic construct
  source 1..120: mol_type = other DNA
aaaatttcttgtagagacggggtctggctatgttgccccaaatggtcttgaattcctggcctcaagcgatcctcttgcctccacctcccaaagtgctgggattataggcgtgagccaccg

SEQ ID NO: 69223 - DNA, 120 bp, synthetic construct
  source 1..120: mol_type = other DNA
tgtactgagccgagattgcactgcactccagcctgggcaatagagtaagactccgtctcaaaaaaaaaaaaaatatgggaacatcagacactggggattccaatagaggggaggttggga

SEQ ID NO: 69224 - DNA, 120 bp, synthetic construct
  source 1..120: mol_type = other DNA
atgtgtcagaatttccttccttttcccccctgaataatattcctttgtgtgaatacatcccactttgttgatctgttcatccatcagtagacacctgggtcacttccatctttaggcctt

SEQ ID NO: 69225 - DNA, 120 bp, synthetic construct
  source 1..120: mol_type = other DNA
gtgaacccgggaggcagagtttgcagtgagccaagatctcaccactccactccagcctgggtgacagagccagactccatctcaaaaaaaaaatgcttttcaaaaagtttcaatttagca

SEQ ID NO: 69226 - DNA, 120 bp, synthetic construct
  source 1..120: mol_type = other DNA
ctgagatcacgccattgcattcccgcttgggtgacagagtgagaccctgtctcaaaaaacaaacaaaaccaacaaggcagagatgtggccagggcttctgaaggaatgcatgaagtccac

SEQ ID NO: 69227 - DNA, 120 bp, synthetic construct
  source 1..120: mol_type = other DNA
ccctggggccactggccagcaccagtttgtgagggcagagccagaaaagcccaggcttagaagactacacacacacataatcgcatcctgattctggaaagtggagatgctgtcactgct

SEQ ID NO: 69228 - DNA, 120 bp, synthetic construct
  source 1..120: mol_type = other DNA
cctgtagtcccagctattcgggcggctgaggcaggaggataccttgagcccaggaatttgaggctgcagtgagctatgatggtgccactgcactccagcctgggcaatagagcttgtctc

SEQ ID NO: 69229 - DNA, 120 bp, synthetic construct
  source 1..120: mol_type = other DNA
gagaggattgcttgagcctaggagttcgaggctgcagtgagctatgatggtgccactgtacttcagcctgggcaacagagaccccatctcttaaaaacaaacaaaaaaaagctctaagat

SEQ ID NO: 69230 - DNA, 120 bp, synthetic construct
  source 1..120: mol_type = other DNA
aggcaggagaatcacttgaacccaggaggtggaggctgcagtgagccgagatggcgccattgcactccagcccggacaagagcaaaactcagtctcaaaaaaaaaaaaaaaaaaaaaagt

SEQ ID NO: 69231 - DNA, 120 bp, synthetic construct
  source 1..120: mol_type = other DNA
ccgcagcctgagtcatcattctcatttgaatggtggccgagaaatcagccagggggctgcccagggctgagggccaaggctaggaaaaacaaggctgttctgttacctccaagctttgga

SEQ ID NO: 69232 - DNA, 120 bp, synthetic construct
  source 1..120: mol_type = other DNA
ggttgggcaaaacacccccccaccccctttccaggaccccaaggagaaagaatcacgtcctctgcagcccctccctggccctcgcccaccccccgtttcccccccgcaattccaggccgt

SEQ ID NO: 69233 - DNA, 120 bp, synthetic construct
  source 1..120: mol_type = other DNA
actatggagtgtcatctgctttactcaaagtcggctgatttcaatgtctcatttcatcaaaaaacactttcacagaaacgtcagaataatatttgaccaaatatctgggcaccatggccc

SEQ ID NO: 69234 - DNA, 120 bp, synthetic construct
  source 1..120: mol_type = other DNA
aaaaatagaaacagttacacatatggtacatattaatccaatgatatcaatagtcactttaaatgtgaatggtccaagtacaccaactaaaagacagagactggcagaatggaaaatgag

SEQ ID NO: 69235 - DNA, 120 bp, synthetic construct
  source 1..120: mol_type = other DNA
gccctcctctgttaggtaggaacatactaggttttgtcatttccacaaaagggtgaaaagcctgtaatctgtggtagatagatcttagagcatgcatatccccctcccactttattttct

SEQ ID NO: 69236 - DNA, 120 bp, synthetic construct
  source 1..120: mol_type = other DNA
ttctccgctgtgttcccattgtcagcaatagtgactggcctatgagagacactcattcaatatttgtggaatgcatcaatgcacctatctatgcctttagaatctagagatccagaaatc

SEQ ID NO: 69237 - DNA, 120 bp, synthetic construct
  source 1..120: mol_type = other DNA
aacaaggctaaaggcaagatttggctagttttctgacttctgctctggatggcctaaggtagcatttttcaatctgcagactgtgtatgacccatgtagtggatggtgaaatcaatttag

SEQ ID NO: 69238 - DNA, 120 bp, synthetic construct
  source 1..120: mol_type = other DNA
ctagaacttgatataaaggtatgttttactgtgggtcttggtaaaaaaaaaaaatatatatatatatatttttttttttttttttgagacagggtcttgctctgtcacccagggtagagt

SEQ ID NO: 69239 - DNA, 120 bp, synthetic construct
  source 1..120: mol_type = other DNA
ctgctaacagacggttggtacctccaaaggctgaactggggaaccattttattttgctgtccagcctctttcttttttttttctttttcttttttttcagatggagtctcactctgttgc

SEQ ID NO: 69240 - DNA, 120 bp, synthetic construct
  source 1..120: mol_type = other DNA
catcctcttcccttatcaggtaccgccaaccctgtggtgcagctgctgccccagtttccccttgtgctccaggtccccactgtggcagttgctcttctctgagatccagccagtgtagct

SEQ ID NO: 69241 - DNA, 120 bp, synthetic construct
  source 1..120: mol_type = other DNA
gagaccagcctggccaacatggtgaaaccccatctctactaaaaatacaaaaaggtagctgggcgtggtggtgcacctgtaatcccagctactcaggaggctgaagcaggagaatcactt

SEQ ID NO: 69242 - DNA, 120 bp, synthetic construct
  source 1..120: mol_type = other DNA
gctcagtaggggcgagtagagtgtggttggtcttatttccattctcttggttttccctcctcaccagcaccgagaagtccgcgtgaagtgcgtgaaggctctgaaagggctgtacggtaa

SEQ ID NO: 69243 - DNA, 120 bp, synthetic construct
  source 1..120: mol_type = other DNA
ggctctggcgttgctctcttccacccatcgttcttatctcgcactcagggtagaaaagtctggtggaatggacacaaggaaagggctcagcacaggaggaaacaaggaggtgtaatgatg

SEQ ID NO: 69244 - DNA, 120 bp, synthetic construct
  source 1..120: mol_type = other DNA
gttttcaccgtgttagccaggatggtcttgatctcttgaccttgtgatccacctgcctcatcatcccaaagtgctgggattacaggcgtgagccactgcgcccagcatgttagacaattt

SEQ ID NO: 69245 - DNA, 120 bp, synthetic construct
  source 1..120: mol_type = other DNA
gtctctgccagcacctgacacttcttttttttttttttttgtgagacagtctcactctgctgcccaggctggagtgcagtggtgcaatcttggctcactgcaacctccacctcccaggtt

SEQ ID NO: 69246 - DNA, 120 bp, synthetic construct
  source 1..120: mol_type = other DNA
cgctttatcacctaggctagagtgcagtgacacgatcttggctcactgcaacctccacttcccaggttcaaatgattctcctgcctcagccttccgagtatctgggattacaggcgtgca

SEQ ID NO: 69247 - DNA, 120 bp, synthetic construct
  source 1..120: mol_type = other DNA
ggacactagcctgtcagtaaagaagagtctagggtcagggagagctcagccctcctcaggccgcccccatgatgacatagccttgggctaggggaaatctgaggtcaggccagctgcctg

SEQ ID NO: 69248 - DNA, 120 bp, synthetic construct
  source 1..120: mol_type = other DNA
tggcagaggtggcagtgagatgagattgtgccactgcactcaagcctgggggacagagccaggctctgtctcaaaaaaaaaaaaaagaaaaagaaaaaagaagtgtacactacagcaaag

SEQ ID NO: 69249 - DNA, 120 bp, synthetic construct
  source 1..120: mol_type = other DNA
actggctaggcgcagtggctcacgcctgtaattccagcattttgggaggccaaggcgggcggatcacttaaggtcaggagttcgagaccagcctggtcaacatggtgaaaccccatctct

SEQ ID NO: 69250 - DNA, 120 bp, synthetic construct
  source 1..120: mol_type = other DNA
agacagggtttctccatgttggtcaggctggtctcgatctcctgacctcaggtgatcctgccaccttggcctctcaaagtgctgggattacaggcataagccaccgcgcctggcctgagc

SEQ ID NO: 69251 - DNA, 120 bp, synthetic construct
  source 1..120: mol_type = other DNA
cctgagtagctgggattacaggtccccgccaccacacctggctaattttcttatttatttatttatttttagtagagatggggttttgccatgttggccaggctggtctcgaactcctga

SEQ ID NO: 69252 - DNA, 120 bp, synthetic construct
  source 1..120: mol_type = other DNA
gcctggcggggggctgaccccccccacctccctccgggacagggtggctgccaggcggagacgctcctcacttcccagacggggtggctgccgggcggagggtctcctcacttctcagac

SEQ ID NO: 69253 - DNA, 120 bp, synthetic construct
  source 1..120: mol_type = other DNA
caacaggcaaaaatcaagattgtccttagtaaaccaggattcataccaggtcatctgatgtttagtatagcactcacccgactctgccttacattgcttatttaaaatgtctgcctcccc

SEQ ID NO: 69254 - DNA, 120 bp, synthetic construct
  source 1..120: mol_type = other DNA
aacgcagagcgcctctcctcctccaaaggaacgcagttcctcaccagcaacggaacaaagctggatggagaatgattttgacgagctgagagaagaaggcttcagacgatcaaattactc

SEQ ID NO: 69255 - DNA, 120 bp, synthetic construct
  source 1..120: mol_type = other DNA
ctggcaagttggataaagagtcaagacccatcagtgtgctgtattcaggaaacccatctcatgtgcagagacacacataggctcaaaataaaaggatggaggaagatctaccaagccaat

SEQ ID NO: 69256 - DNA, 120 bp, synthetic construct
  source 1..120: mol_type = other DNA
caggcccagcttcaccacagcttgtcatccttggtttatctgtcccaactacactgacagagacctgtagatagagataataggtcttattgctgtctatattgttagtatgcatacaga

SEQ ID NO: 69257 - DNA, 120 bp, synthetic construct
  source 1..120: mol_type = other DNA
gctggtctcaaactcctaacctcaagtgatccacccgccttggcctcccaaagtcctgggattacaggcgtgagccaccgtgcccggccctcctaggttctgacaagcagtacagatgcc

SEQ ID NO: 69258 - DNA, 120 bp, synthetic construct
  source 1..120: mol_type = other DNA
ctccatccaagcctccttggccctggaagccggcgtgtccatgttgcccacgttctggactgcctggaggtgacagcaggaaggaccaggttctgctaggttaggggcctagccactgca

SEQ ID NO: 69259 - DNA, 120 bp, synthetic construct
  source 1..120: mol_type = other DNA
cttcactcctcgccccagcccagtccaacccggcccagcctagcccagcgggtggagggcgcacctcgtgctgggcgccggggaagcgctcgcgcacgcgccggaagagctggcggaagg

SEQ ID NO: 69260 - DNA, 120 bp, synthetic construct
  source 1..120: mol_type = other DNA
acggctgctgggataccaggtactctccctgagcctattgatggcaaatttcatcctgtgaaaaatgggaacaagacacccacttcataggactattatatggttgaaattaaatatgtg

SEQ ID NO: 69261 - DNA, 120 bp, synthetic construct
  source 1..120: mol_type = other DNA
aggggctccctggcctgcctgcatctgcaaaccaactgtcactttttaccactctcactcctactccttcaccctccatcccagaagcatgcatgtcccatgtcaattgactttcctgga

SEQ ID NO: 69262 - DNA, 120 bp, synthetic construct
  source 1..120: mol_type = other DNA
agaccatatggcccagaaattctcatcaacatcccgcaaatccagcacttgaagtttccacctcctgtgggtaaagtaaggcagaggctcagaactttgaaggacaaatccctgaccttt

SEQ ID NO: 69263 - DNA, 120 bp, synthetic construct
  source 1..120: mol_type = other DNA
taattttcatccatggctccactgaatcccagtaccactggaaagtgtcactgaggatcctgaaagccaagctctacctctttgaggaaaattttcttgtcacttaccgccctaaagcaa

SEQ ID NO: 69264 - DNA, 120 bp, synthetic construct
  source 1..120: mol_type = other DNA
aaccaagcagtagctccaggcaccagggctttgggtctgtcctgtgcaaactcaggagcttttgttgatgtttctaaccacaccctccccttctcaatcaccagcttccaatcagaaagt

SEQ ID NO: 69265 - DNA, 120 bp, synthetic construct
  source 1..120: mol_type = other DNA
tgagggcagagaaggcagaaacagtcttggcccctactagaagggaaagcgtgtttactcccaaaaatgatgggctcgcctcagaaaatcagcctgggaagatggaatctgagaatctga

SEQ ID NO: 69266 - DNA, 120 bp, synthetic construct
  source 1..120: mol_type = other DNA
atacaatcatgtcgtctgcaaacagggacaatttgacttcctcttttcctaaatgaataccctttatttccttctcctgcctgattgccctggccagaacttcccacactatgttgaata

SEQ ID NO: 69267 - DNA, 120 bp, synthetic construct
  source 1..120: mol_type = other DNA
tacaatgaactcaaacaaatttacaagaaaaaaacaaacaaccccatcaaaaagtgggcgaaggacatgaacagacacttctcaaaagaagacatttatgcagccaaaaaacacatgaag

SEQ ID NO: 69268 - DNA, 120 bp, synthetic construct
  source 1..120: mol_type = other DNA
cccacctctaggtcacttcaaatgtatactttatcatgtctgtttcatatctcctaaagaatctagccacagtgaaattccacctcaatctgtagtatcaagaaagttcaaacatatact

SEQ ID NO: 69269 - DNA, 120 bp, synthetic construct
  source 1..120: mol_type = other DNA
gcagtgagccgagatcgcgccactgcactccagcctgggcgacagagcgagactccgtctcaaaaaaaaaaaaaaaaaaagatacagcatatatttatatgtgatataaagatacagcat

SEQ ID NO: 69270 - DNA, 120 bp, synthetic construct
  source 1..120: mol_type = other DNA
aattgtccaagaaactgcatcaatttgtgctcctatcagcaattaggaaaaggcctatttccatacacccttgccacagacatcttattctgctttttgatatttgccaatctagtaggg

SEQ ID NO: 69271 - DNA, 120 bp, synthetic construct
  source 1..120: mol_type = other DNA
tttttttttttttttttttttgttttttttttttttgacaaggtctcactctgttgcccaggctggtgtgcagtggtgtgatcaccactcactacagccttgacctcctgggctcaagca

SEQ ID NO: 69272 - DNA, 120 bp, synthetic construct
  source 1..120: mol_type = other DNA
gttttcatgacagctgctggttttaaagtgtggtacttcctcgctctctcttttctttctcctgctgccatgtaagatgtgtcttgcttccctttcatcttctgccataattgtaagttt

SEQ ID NO: 69273 - DNA, 120 bp, synthetic construct
  source 1..120: mol_type = other DNA
cgacatgattgtttatctagaaaaccccattgtctcagcccaaaatctccttaagctgataagcaacttcagcaaagtctcaggatacaaaatcaatgtacaaaaatcacaagcattctt

SEQ ID NO: 69274 - DNA, 120 bp, synthetic construct
  source 1..120: mol_type = other DNA
gcagaactgaaggaaatagagacacaaaaaacccttcaaaaaatcaatgaatccaggagctggttttttgaaaggatcaacaaaattgatagaccgctagcaagactaataaagaaaaaa

SEQ ID NO: 69275 - DNA, 120 bp, synthetic construct
  source 1..120: mol_type = other DNA
ctccccccttccccgaccccaccacagtccccagagtgtgatattccccttcctgtgtccatgtgatctcattgttcaattcccacctatgagtgagaatatgcggtgtttggttttttg

SEQ ID NO: 69276 - DNA, 120 bp, synthetic construct
  source 1..120: mol_type = other DNA
cattgaatctgtaaattaccttgggcagtatggccattttcacgatattgattcttcctacccatgagcatggaatgttcttccatttgtttgtctcctcttttatttccttgagcagtg

SEQ ID NO: 69277 - DNA, 120 bp, synthetic construct
  source 1..120: mol_type = other DNA
atttcagagcctgttattggtcgattcagagattcaacttcttcctggtttagtcttgggagagtgtatgtgtcgaggaatgtatccatttcttctagattttctagtttatttgcgtag

SEQ ID NO: 69278 - DNA, 120 bp, synthetic construct
  source 1..120: mol_type = other DNA
aattcctgggtatccttgttgactttctgtctcgttgatctgtctaatgttgacagtggggtgttaaagtctcccattattaatgtgtgggagtctaagtctctttgtaggtcattgagg

SEQ ID NO: 69279 - DNA, 120 bp, synthetic construct
  source 1..120: mol_type = other DNA
agcgagaagggaagtttagagaaaaaagaataaaaagaaatgagcaaagcctccaagaaatatgggactatgtgaaaagaccaaatctacgtctgattggtgtacctgaaagtgatgtgg

SEQ ID NO: 69280 - DNA, 120 bp, synthetic construct
  source 1..120: mol_type = other DNA
gcgtaggaccctccgagccaggtgtgggatatagtctcgtggtgcgccgtttcttaagccggtctgaaaagcgcaatattcgggtgggagtgacccgattttccaggtgcgtccgtcacc

SEQ ID NO: 69281 - DNA, 120 bp, synthetic construct
  source 1..120: mol_type = other DNA
cttctaagagattattagtgatgtcaaggacagagctgaagaagttacatagaatgcagcaccgaaaattaaatatgtaactttagaaagagcttaagggtggtttccagcatagtagaa

SEQ ID NO: 69282 - DNA, 120 bp, synthetic construct
  source 1..120: mol_type = other DNA
ttgaattctatttaaggcaagcagtcacccaaacaccccaccacctccttaaaaaaaaaaaaaaagcaaaatgccagacttggttaagagtggaggatggtttaacatgtacagacggcc

SEQ ID NO: 69283 - DNA, 120 bp, synthetic construct
  source 1..120: mol_type = other DNA
gaaggtggagtggcagcagctgagggggccaggaggtggtgtcccagctgggtacagggagggatggaagcccaatagtgtgttctccagatgactgttgggaaatcctggacctagctg

SEQ ID NO: 69284 - DNA, 120 bp, synthetic construct
  source 1..120: mol_type = other DNA
tacatacacgcatacctctataaatatatacacatacatacacgcatacctctataaatatatacacatacatacacgcatacctctataaatatatacacatacatacacgcatacctc

SEQ ID NO: 69285 - DNA, 120 bp, synthetic construct
  source 1..120: mol_type = other DNA
agaattgcttgaacctgggaggcgcaggttgcagtgagccaagattgtgccactgcactccaacctgggcgacagaataagactccatctcaaaaatatataatatatcatatattatgt

SEQ ID NO: 69286 - DNA, 120 bp, synthetic construct
  source 1..120: mol_type = other DNA
cacacatcaatgaacatctgccatgactggccaagtcctattttccccattatatgttccctaagaagatctatgtctgattacggttcatgcaaaaactgtcatctacagggtaggagt

SEQ ID NO: 69287 - DNA, 120 bp, synthetic construct; identical to SEQ ID NO: 69286
  source 1..120: mol_type = other DNA

SEQ ID NO: 69288 - DNA, 120 bp, synthetic construct
  source 1..120: mol_type = other DNA
ccccgaaagacgtccagccactcttcctcttccctctcatgctgtccctcgggggtctcgggtcccagtttcccggcctgctgggctcacacactccctcggcttcctagagacccggct

SEQ ID NO: 69289 - DNA, 120 bp, synthetic construct
  source 1..120: mol_type = other DNA
acacagctcagcccccttgggctcccctcctcctggcctctccccgttcccccaccctagatagaacctttgctatgggttaaatgtgttccccctaaaatttatatgttaacagcgtaa

SEQ ID NO: 69290 - DNA, 120 bp, synthetic construct
  source 1..120: mol_type = other DNA
ctgaaacaaacaaacaaaaaatacaaaagataaatgaaatgaaaacctggttctttgaaaagataaataaagctgccgggcgtggtggctcacgcctgtaatcccagcactttgggaggc

SEQ ID NO: 69291 - DNA, 120 bp, synthetic construct
  source 1..120: mol_type = other DNA
gacacagcacatgtttcagagagcatggggttgggggtaaggtcatagatcaacaggatcccaaggcagaagaatttttcttagtacagaacaaaatgaaaagtctcccatgtctacttc

SEQ ID NO: 69292 - DNA, 120 bp, synthetic construct
  source 1..120: mol_type = other DNA
accatcatcatcattatcaccatcatcaccaccatcatcatcattatcaccatcatcaccaccatcatcattatcaccatcatcattgccacctcctcatcatcactgtgtagtcctcct

SEQ ID NO: 69293 - DNA, 120 bp, synthetic construct
  source 1..120: mol_type = other DNA
gcagtctagaaaaacatcagagtaggctaacagaatacaactttgggtaaaacaagacagcaaaagataggatccgatgacctcaacgggagagaccctagggagtcagctgagaaacag

SEQ ID NO: 69294 - DNA, 120 bp, synthetic construct
  source 1..120: mol_type = other DNA
tggtgcgggtgtagacgtagaacaagtggggacgtcacaggtgtggacgtggtgcgggtgtagacgtagaacaagtggggacgtcacaggtgtggacacaatgcgggtgtagacgtagaa

SEQ ID NO: 69295 - DNA, 120 bp, synthetic construct
  source 1..120: mol_type = other DNA
ctgcaaaacctaaagaggatgctaatgtaactccataacacctgactgcaaaacctaaagaggatgctaatatgactccataacacctgactgcaaaacctaaagaggatgctaatatga

SEQ ID NO: 69296 - DNA, 120 bp, synthetic construct
  source 1..120: mol_type = other DNA
aaaaaaaaaaaaaaattaaaaaaaagtagccaggcatgggtggcgggcgcctgtagtcccagctactcgggaggctgaggcaggagaatggcgtgaacccgggaggcggagcttgcagtg

SEQ ID NO: 69297 - DNA, 120 bp, synthetic construct
  source 1..120: mol_type = other DNA
acggtctagcttctgcgtatcagcctctggtgacttggatttggggacctccggaggagtgcgaaggctggtggatgaagcttggaatgtggatttcggatggaaatcccagtgtggggg

SEQ ID NO: 69298 - DNA, 120 bp, synthetic construct
  source 1..120: mol_type = other DNA
ctcctcagtgggacccccctccacacccccatcttcatccacgctcccctctcctcagtgtggacccccctccacaccccccacgtgcgtccacgctcccctctcctcagtgggaccccc

SEQ ID NO: 69299 - DNA, 120 bp, synthetic construct
  source 1..120: mol_type = other DNA
ttcatcagtttaccacacggcggtcatctcacgttgatcagggtcggggttcatcagtttaccacacggcggtcatctcacgttgatcagggtcggggttcatcagtttaccacacggcg

SEQ ID NO: 69300 - DNA, 120 bp, synthetic construct
  source 1..120: mol_type = other DNA
cggggttcatcagtttaccacacggcggtcatctcacgttcatcagggtcggggttcatcagtttaccacacggcggtcatctcacgttcatcagggtcggggttcatcagtttaccaca

SEQ ID NO: 69301 - DNA, 120 bp, synthetic construct
  source 1..120: mol_type = other DNA
atagtcgctaccacctgttatttttggaaccgtagatagaccacatatagatataccatgaatatttatgtggaaattgtagataacttgttttaacattattaaaagataccttgaaaa

SEQ ID NO: 69302 - DNA, 120 bp, synthetic construct
  source 1..120: mol_type = other DNA
cacagacatggatgaaaggtcatgtttctcagacatcaagttaaaaaccaatagtgaccacagtcatgaaagaacattcagcctgagacaaaaggggttaacgcacagggaagataacga

SEQ ID NO: 69303 - DNA, 120 bp, synthetic construct
  source 1..120: mol_type = other DNA
gcagctttgcctttatttgtagatagcttttacacatatttgctcccaaatcaacaaggttttccccaggtaccacctggactattcttctgtcagcatttctcacgtgatactgagtca

SEQ ID NO: 69304 - DNA, 120 bp, synthetic construct
  source 1..120: mol_type = other DNA
aagttgatattccacctgtttgaacgctcaggagcacacaatatttccataaaccccagcgatcacagcatgcttcttagtcaccatggtatccaaatcacttaatagaggaatagctct

SEQ ID NO: 69305 - DNA, 120 bp, synthetic construct
  source 1..120: mol_type = other DNA
ggcaaatgacaaacctatgcaagtgacaaatttcttccaccattgaaaatcgatccattggaaatattcatcattccaatcaatagggagcttgcgtagggaaacatgtgtgactgggcc

SEQ ID NO: 69306 - DNA, 120 bp, synthetic construct
  source 1..120: mol_type = other DNA
gagcatttaaaaggtatcacaactaatcattcagctaaaaccagggctttatctgagctcctgcagacacaaacacattgatcctacagagatgctgatttctctggtgctgtaggaagc

SEQ ID NO: 69307 - DNA, 120 bp, synthetic construct
  source 1..120: mol_type = other DNA
taatctacatcctttggcatgcatcggcatatatgtaccatgcttgagtttgtgtgtgtatgggtcaccgtagtatatggggctactgtagaatatgtggtttgttgttgactcaagcat

SEQ ID NO: 69308 - DNA, 120 bp, synthetic construct
  source 1..120: mol_type = other DNA
aaaagccgttgatggggagatacaccacagctgtacgcacgactgaaaaatgctgctgaaacagttatgaccatgcttgatttgtacattttaaaaaactctttaagacatacacaaatg

SEQ ID NO: 69309 - DNA, 120 bp, synthetic construct
  source 1..120: mol_type = other DNA
gaatcttctgacaagagttcctatagattctcatttagtccaaattgttagcccagaagccccagtgaacacaacctgaatttcgggctttataccacacgatacaagaacctgcaaata

SEQ ID NO: 69310 - DNA, 120 bp, synthetic construct
  source 1..120: mol_type = other DNA
tgcattttcaaggtgaagtatttggtggggttttaggaattctactctgactgcagacagtagtgtggcccattttgctacagggcgctaatagacctttgtgatctttccatggtttag

SEQ ID NO: 69311 - DNA, 120 bp, synthetic construct
  source 1..120: mol_type = other DNA
tgcgagcagagcgtggatgtgtctggtggacttaaagatacgtgtacaggcaagagaaaacctcgtggaagaaataggttcatcttgaaggttaaagcagcttcagcttctctgtcactt

SEQ ID NO: 69312 - DNA, 120 bp, synthetic construct
  source 1..120: mol_type = other DNA
gatgtcttagaaatgagcaggaggatgactgcaatggcccttcagttaggttcaggcttctgcgggaaagcggcacccaggagcccagagcagggagacaaacctgcgtggaagtccagg

SEQ ID NO: 69313 - DNA, 120 bp, synthetic construct
  source 1..120: mol_type = other DNA
tcagtgggaaaattaagttccatagatgtttctaggatgtgggcatagagtgatccgaacgaggaactttgtaaagttggcatttaatcttctggttatttaatgggacagagcccctgg

SEQ ID NO: 69314 - DNA, 120 bp, synthetic construct
  source 1..120: mol_type = other DNA
aataatagctatattgattagataggaagatagatggatagaggatagataagaacagatgataggctgggcgtggtggctcatgcctgtaatcctaacactttgggaggccgaggcagg

SEQ ID NO: 69315 - DNA, 120 bp, synthetic construct
  source 1..120: mol_type = other DNA
gatttttcatgtgactcagtacaagggaggggacacgcgacatcccttaatccttcactaaacccaaagttagggttcttgcctgtagatttccacagaatatagcaccaagaacgttct

SEQ ID NO: 69316 - DNA, 120 bp, synthetic construct
  source 1..120: mol_type = other DNA
gtgcaggagagtggccatagcaaagtcttagaaaatcacaatctccacgtttgctccttatccccacccctaggtacacttcttctttgaatcctcttttcctaaggaaagatgttaaat

SEQ ID NO: 69317 - DNA, 120 bp, synthetic construct
  source 1..120: mol_type = other DNA
tcgatgctgaagatgtagctttaccacagttggtggtagccatcaggatcagagtgtctatcggttgtattttcttaatcgggataggaggattcatcaataaactccagaactatacag

SEQ ID NO: 69318 - DNA, 120 bp, synthetic construct
  source 1..120: mol_type = other DNA
cttgaagatgtcttctgggaacttcaattttgatttaaatcctaatttctttgctttggggaagagactttaagcctcaatttagcctgctgtaggactaggggagtcacgtgacctcac

SEQ ID NO: 69319 - DNA, 120 bp, synthetic construct
  source 1..120: mol_type = other DNA
gaacacctgctgctgatgctttaacccgtctgttcggttgtgttgttcagggatgaagacccacaggttttttaattattgaattctgcatctgacggcgttgattcataatgaaaaaca

SEQ ID NO: 69320 - DNA, 120 bp, synthetic construct
  source 1..120: mol_type = other DNA
agtgcccggcccaaacatggtttttaagaaaattggtttaatgcaattatcagtgtgatgtctgggaatctgagattgccatggacacacacagacacatgctcatatgcacactcatac

SEQ ID NO: 69321 - DNA, 120 bp, synthetic construct
  source 1..120: mol_type = other DNA
acgctagtcaaagctccaaaatactttaaacatggggaccaagaccaacagacaacaaggagatgctatcacccaatgggctccttaaaggatcctcctccacttcccatggaaatacta

SEQ ID NO: 69322 - DNA, 120 bp, synthetic construct
  source 1..120: mol_type = other DNA
ttcccctctctgctgctccgagttcaattgttttaattccacaagtaagtgaggatatgctgtgcttgtctttctgcgtttggcttatttcactcagcataatgttctacaattccatcc

SEQ ID NO: 69323 - DNA, 120 bp, synthetic construct
  source 1..120: mol_type = other DNA
tggaggtccatttgcacaaccaactgatatgctgggtggtgtcgtaaaaaagagaatgaccggaacttcaaatgaatgcgaaccttcgatcgtgataaataccatatacaatgatgcttg

SEQ ID NO: 69324 - DNA, 120 bp, synthetic construct
  source 1..120: mol_type = other DNA
aagattgtttcctttgccttatgaagtgttacccttatcagcatcagcatgaaatattatttattaagcctcctcttgggcctggtgccatgcagggtagtatttctctctgcagttacc

SEQ ID NO: 69325 - DNA, 120 bp, synthetic construct
  source 1..120: mol_type = other DNA
tcctgtgggcagctctgatgttggtcttctcctgctgaacttattttctttgttatgacggaattagcaagaattaaagggagggggtgttgaagatcattagcacctacttgtaacttt

SEQ ID NO: 69326 - DNA, 120 bp, synthetic construct
  source 1..120: mol_type = other DNA
agtttcatgcaaagtttgggtatttggtgtaagccagaaataaaattctaaagccccagttggctgaatggagccctgctcttggccaaggggatctgaaagaaacctgaaaaatgattt

SEQ ID NO: 69327 - DNA, 120 bp, synthetic construct
  source 1..120: mol_type = other DNA
gccaccttggacagcagttctcaggacctcctgaggctgtgtcacaggctgtggtcacttagattaggctcagaataaacttcttcaaatattttacagaatttggcttttttttaatca

SEQ ID NO: 69328 - DNA, 120 bp, synthetic construct
  source 1..120: mol_type = other DNA
tcacaccactcctcttcaacatagttctggaagtcctagccagagcaagacaagagaaagaaataaaggggatccaaattgttatagaggaagtcaaactgtcactatttgctgatgata

SEQ ID NO: 69329 - DNA, 120 bp, synthetic construct
  source 1..120: mol_type = other DNA
aattgcactgagatttctctgtgagggtctcagcatctgtccacatgtttctgaacctcctaggggttcttattgtattgagagttgaggatcactgctctagcaagtgatatttctttt

SEQ ID NO: 69330 - DNA, 120 bp, synthetic construct
  source 1..120: mol_type = other DNA
agtatcctcaaacctcaaacctctctggaaaaaaaaaaaaagtcctgtaccttttcggtttgattattaaactggagatagacaaattacaggagctgtccctcaatttaatgagaagcc

SEQ ID NO: 69331 - DNA, 120 bp, synthetic construct
  source 1..120: mol_type = other DNA
agctctaaccataaaacagagtgaagtagattagagaacctgcaagttaaatatggctaaggagagagagcaaggtgcggacggtgatgatgttgaaggagacagcaggaaaacacagga

SEQ ID NO: 69332 - DNA, 120 bp, synthetic construct
  source 1..120: mol_type = other DNA
tggatggggtccattggttgccagaatgaaaaagtctgaaaaacatctccaaagacaaatcttaggtcctgcaacagtgatgttatctataggagcaaccggagaagtcacaaatcttgt

SEQ ID NO: 69333 - DNA, 120 bp, synthetic construct
  source 1..120: mol_type = other DNA
ttttttgctttttgtagagttggcatcttactatgttgcccaggatggtcttaaactcctgagttcaagggactctctcacttcagcttcccaaagtactgaaattacaggcatgagtca

SEQ ID NO: 69334 - DNA, 120 bp, synthetic construct
  source 1..120: mol_type = other DNA
tgtcaccacttgatgtaactgcattgcctgaattgagtcagaatttagatatattgttagatttcctacgtctgttgtatttttgcatgaaagtctctcttttctgacctatcactggac

SEQ ID NO: 69335 - DNA, 120 bp, synthetic construct
  source 1..120: mol_type = other DNA
ctcttaagacttgattttgaattttgtggtgttacattttatttctctaaaatgaacattagaggctaggcacggtggctcacacctgtaatcccagcactttcagaggccaaggtggac

SEQ ID NO: 69336 - DNA, 120 bp, synthetic construct
  source 1..120: mol_type = other DNA
aaaaacatgaaattctactttggtatctaaacctcttaatcaacttactcaacgcacatccacatagcatcaccatgggccaccctgtgcagatgggacgaaccccaaaacattgaacaa

SEQ ID NO: 69337 - DNA, 120 bp, synthetic construct
  source 1..120: mol_type = other DNA
ccggggagcacagcttgcagtgaaccgagatcgcgccactgcactccagcctgggcgacaaagcaagacactgtctcaaaaaaaaaaaaaaaaaaaaaaaaaaaatcacaattaatttag

SEQ ID NO: 69338 - DNA, 120 bp, synthetic construct
  source 1..120: mol_type = other DNA
ctcactttatttcattagtttctaaaatgctgttacttaagatatttgggtggttttatggctcggggtgccagagaagcagatgctgttttcgccgttagtcttaggatccggaatcag

SEQ ID NO: 69339 - DNA, 120 bp, synthetic construct
  source 1..120: mol_type = other DNA
tcggcctcccaaagtgctgggattacaggcatgagccactgagcccggcctatacttgggttttagatggattattttgtaggagaaaggtgaaattattcttagtattttatctactat

SEQ ID NO: 69340 - DNA, 120 bp, synthetic construct
  source 1..120: mol_type = other DNA
tactttccccgggtgaattagctataaaccataagccttctccctgctgccatggccttcacctattttatcctcaaaaagagataagcagagaaaattgcagctttgcaagtgacattt

SEQ ID NO: 69341 - DNA, 120 bp, synthetic construct
  source 1..120: mol_type = other DNA
ttgatttggttttattttttccctgggtcatcggatcatgagaacacacacgagtcttcagcctcaatgggtggctccatcctgcccactggagaggtcagtttctcagcgcagctcatt

SEQ ID NO: 69342 - DNA, 120 bp, synthetic construct
  source 1..120: mol_type = other DNA
gccaaagcccttggcaatcatcaattagctaattcaaacagcatccctgtgagaggactgctcttgagaatattataatgcacaaccattatgtgctgacctttgactttgctgtgagaa

SEQ ID NO: 69343 - DNA, 120 bp, synthetic construct
  source 1..120: mol_type = other DNA
tttaaaagattgccacagggattttccagccccagataagtttacaggtgagtgctagcactcagataattacatggatgacttctgccaagattctaaagacagtttgtgtgagtctgt

SEQ ID NO: 69344 - DNA, 120 bp, synthetic construct
  source 1..120: mol_type = other DNA
ggagagatagcattgggagatatacctaatgctagatgacgagttagttggtgcagcgcaccggcatggcacacgtatacatatgtaactaacctgcacaatgtgcacatgtaccctaaa

SEQ ID NO: 69345 - DNA, 120 bp, synthetic construct
  source 1..120: mol_type = other DNA
accattcaggacataggcatgggcaaggacttcatgtctaaaacacaaaaagcaatggcaacaaaagccacaattgacaaatgggatctaattaaactaaggagcttctgcacagcaaaa

SEQ ID NO: 69346 - DNA, 120 bp, synthetic construct
  source 1..120: mol_type = other DNA
aggtattcatgggacatatctcaaaataataagagctacctatgacaaacccacagacaatatcaaactgaatgggcaaaaactggaagcattccctttgaaaactgacacaagacaggg

SEQ ID NO: 69347 - DNA, 120 bp, synthetic construct
  source 1..120: mol_type = other DNA
tgtgtctttgttctcgttggtttcaaagaacatctttatttctgccttcattttgttttgtaccccgtagtcattcaggagcaggttgtttagtttccatgtagttgagcagttttgagt

SEQ ID NO: 69348 - DNA, 120 bp, synthetic construct
  source 1..120: mol_type = other DNA
agtggatctctcggcagaaaccctaccagccagaagagagtgggggccaatattcaacattcttaaagaaaaaagttttcaacccagaattacatatccagccaaactaagcttcataag

SEQ ID NO: 69349 - DNA, 120 bp, synthetic construct
  source 1..120: mol_type = other DNA
tctgacagctttgaagagagcagtggttctcccagcacgcagctggagatatgggaaccggcagactgcctcctcaagtgggtctctgacccctgacccccaagcagcctaactgggagt

SEQ ID NO: 69350 - DNA, 120 bp, synthetic construct
  source 1..120: mol_type = other DNA
gctcatatgatttttaaattatatcttatgattgctgtttgtttgcagaaacacttgctaggccctccaataaaatgttacaggggtaccatgaaaggagacattcttgtttgtcttcct

SEQ ID NO: 69351 - DNA, 120 bp, synthetic construct
  source 1..120: mol_type = other DNA
aatggtttctagtatattcacagaattatgcatccatcaccactaccagttataaaacattttcactacctggaaaagaaacatggtactcagccatggccgctcaatctctggatcccc

SEQ ID NO: 69352 - DNA, 120 bp, synthetic construct
  source 1..120: mol_type = other DNA
cccatcttctccttctctcacaatgtagaaatacagcaacaagatggttgtagtgctattaaaaagaaagttttggctttttctggaacaaatttttgtgtaacgtgtagttgtcttctg

SEQ ID NO: 69353 - DNA, 120 bp, synthetic construct
  source 1..120: mol_type = other DNA
tggtctcagatctcatacttaagcctttatccatttccagtggatttttgtgtatgatgcaagataagagtccagtttttttcttctgcatgtggacatccagttcctgtcacactgttt

SEQ ID NO: 69354 - DNA, 120 bp, synthetic construct
  source 1..120: mol_type = other DNA
tcttaaagagatattttatatccacgttcatagcaacaccattcgtaacagccagagggtggaagcaacccaggtgtccatcaatggatgaatagatccacatactgtggcatctatgtg

SEQ ID NO: 69355 - DNA, 120 bp, synthetic construct
  source 1..120: mol_type = other DNA
gtattgctattcttccatactacatatggcaatttttgtctttcaaaacttctatactttggtgtagcagaatacatctagattttgtcttgcaaagcttctatactttggtgtagcaga

SEQ ID NO: 69356 - DNA, 120 bp, synthetic construct
  source 1..120: mol_type = other DNA
caagacgactgtgcctgttgccttttaacatcttatatttgatgctgaacccagaatgaaacttagagtgagctctttaccataaagtgatggagtaagctctaaacgaggtgtgggctt

SEQ ID NO: 69357 - DNA, 120 bp, synthetic construct
  source 1..120: mol_type = other DNA
tggggtgggggaggggggagggatagcattgggagatatacctaatgccagatgacgagttactgggtgcagcacaccagcatggcacatgtatacatatgtaactaacttgcacaatgt

SEQ ID NO: 69358 - DNA, 120 bp, synthetic construct
  source 1..120: mol_type = other DNA
gcatctgttgaggtaatcatgtggtttttgtctttggctctgtttatatgctggattacatttattgatttgtgtatattgaaccagccttgcatcccagggatgaagcccacttgatca

SEQ ID NO: 69359 - DNA, 120 bp, synthetic construct
  source 1..120: mol_type = other DNA
gcactgtggtctgagagatagtttgttataatgtctgttcttctacatttgctgaggagagctttacttccaagtatgtggtcaacttcggaataggtgtggtgtggtgctgaaaaacat

SEQ ID NO: 69360 - DNA, 120 bp, synthetic construct
  source 1..120: mol_type = other DNA
ctctctggctgcccttaacattttttccttcatttcaactttggtgaatctgacaattacctgtgttggagttgctcttctcgaggagtatctttgtggcgttctctgtatttcctgaat

SEQ ID NO: 69361 - DNA, 120 bp, synthetic construct
  source 1..120: mol_type = other DNA
tctcttcaaagctgtcagacagggacatttaagtctgcagaggttactgctgtctttttgtttgtctgtgcccggcccccaaggtggagcctacagaggcaggcaggcaggcctccttga

SEQ ID NO: 69362 - DNA, 120 bp, synthetic construct
  source 1..120: mol_type = other DNA
cacactttcagttcatattatttataatttaggaaatctgtttgcagtacaattcactgccctacaaaggcatgcctcttgctaatgaactggtaactccgtcttcctcaaaaacatatg

SEQ ID NO: 69363 - DNA, 120 bp, synthetic construct
  source 1..120: mol_type = other DNA
tcacgccatatggtccctaagccaatgaggtctcccgtgtcttcaaagttggcacttgttaaatgaaacatgctccaactcattttgaagcaaggtagggtccttatttaaatttgattc

SEQ ID NO: 69364 - DNA, 120 bp, synthetic construct
  source 1..120: mol_type = other DNA
ttccctgatctctcatccattaaactgtcccaacctagcccacaaacagctcactcttccccagcttcaaataacagccctcactgatccccaagtgtgttcagagatattcatccgatc

SEQ ID NO: 69365 - DNA, 120 bp, synthetic construct
  source 1..120: mol_type = other DNA
ttcaattcaagttaaattcatatttgccgttgcacatgagtatattgaatgttttagttacctttcctggtctgccaccagcaagctagagaagacctctgttttgcgggttgggatctg

SEQ ID NO: 69366 - DNA, 120 bp, synthetic construct
  source 1..120: mol_type = other DNA
gataggcattgagtactgtgcccacgtttttaaggtggcaaatcatgctcaggaaggttctatcaatagtaagtaatagaaatggggttcaactccagatctcatgccctcaaaactagt

SEQ ID NO: 69367 - DNA, 120 bp, synthetic construct
  source 1..120: mol_type = other DNA
gttgtttggggcatacacatttaagattgctatgtcctcttggtggattgacccttttgtcagtcttcagtatccctgtctgattaatgtagccactcctgttttcctttgattaatgca

SEQ ID NO: 69368 - DNA, 120 bp, synthetic construct
  source 1..120: mol_type = other DNA
ttagcacttgagaaatgtaatacttccttctggtctttacaatttccaggaacaaatccactgtaattagaatcactttttatctataggtaaggtgttactactctgtcaccactttca

SEQ ID NO: 69369 - DNA, 120 bp, synthetic construct
  source 1..120: mol_type = other DNA
tccactccactgactcaaatgttaatctcctttgaacacatccccacagacacacccaggaacagtactttgcatccttcaatccaatcaggttgacactcaatattacacaatgggcaa

SEQ ID NO: 69370 - DNA, 120 bp, synthetic construct
  source 1..120: mol_type = other DNA
aggggaggaagtagtccttaactgcaggacatcaaagcagaaattcttaaaagcaagcagagaatgaaaacaaactatgtgttactcagaaaagcctgaaaattaacacacagaggactc

SEQ ID NO: 69371 - DNA, 120 bp, synthetic construct
  source 1..120: mol_type = other DNA
cttctcttccaaaggatcacaactcctcaccagcaaagaaacaaaactagacagagaatgagtttgacaaattgatggaagtaggcttccgaaggtgggtaataaactcctctgagctaa

SEQ ID NO: 69372 - DNA, 120 bp, synthetic construct
  source 1..120: mol_type = other DNA
acttggcaatatccttcttgacacgtggcagctccaatgaggcacactcattacatagccacgtaaaagataaaaggtgaatctggaccaacttctggaaaatttggacttaaaacatgg

SEQ ID NO: 69373 - DNA, 120 bp, synthetic construct
  source 1..120: mol_type = other DNA
aactcctcaccagcaaagaaacaaaactagacagagaatgagtttgacaaattgatggaagtaggcttccgaaggtgggtaataaactcctctgagctaaaggagcatgttctaacccaa

SEQ ID NO: 69374 - DNA, 120 bp, synthetic construct; identical to SEQ ID NO: 69370
  source 1..120: mol_type = other DNA

SEQ ID NO: 69375 - DNA, 120 bp, synthetic construct; identical to SEQ ID NO: 69369
  source 1..120: mol_type = other DNA

SEQ ID NO: 69376 - DNA, 120 bp, synthetic construct
  source 1..120: mol_type = other DNA
taattcagaatgatattattacaggacacagaattctggtttgacattttttagcacttgagaaatgtaatacttccttctggtctttacaatttccaggaacaaatccactgtaattag

SEQ ID NO: 69377 - DNA, 120 bp, synthetic construct
  source 1..120: mol_type = other DNA
ggagtggctacattaatcagacagggatactgaagactgacaaaagggtcaatccaccaagaggacatagcaatcttaaatgtgtatgccccaaacaacaaagctgaaaaatatattaag

SEQ ID NO: 69378 - DNA, 120 bp, synthetic construct; identical to SEQ ID NO: 69366
  source 1..120: mol_type = other DNA

SEQ ID NO: 69379 - DNA, 120 bp, synthetic construct; identical to SEQ ID NO: 69365
  source 1..120: mol_type = other DNA

SEQ ID NO: 69380 - DNA, 120 bp, synthetic construct; identical to SEQ ID NO: 69364
  source 1..120: mol_type = other DNA

SEQ ID NO: 69381 - DNA, 120 bp, synthetic construct
  source 1..120: mol_type = other DNA
ttttcagggggacaccacaccgggagcatgactctgtttctgtgtatctactagatgtgtgtctgctagaataatcattacagtatcgttcttccaggagatataagggaaggaaaataa

SEQ ID NO: 69382 - DNA, 120 bp, synthetic construct
  source 1..120: mol_type = other DNA
ggctgaagtgcagtggctgcacggttttcatatgtaaatgttcaatgatgttaaatgttcatgaagtttaaactggccaagtatcctagtatagtattcaaggacagcataaatagaatc

SEQ ID NO: 69383 - DNA, 120 bp, synthetic construct
  source 1..120: mol_type = other DNA
gagatctgagaaggggcagactgcctcctcaagtgggtccctgacccctgacccccgagctgcctaaccgggaggcaccctccagcaggggcacactgacatctcacactgcagggtact

SEQ ID NO: 69384 - DNA, 120 bp, synthetic construct; identical to SEQ ID NO: 69360
  source 1..120: mol_type = other DNA

SEQ ID NO: 69385 - DNA, 120 bp, synthetic construct
  source 1..120: mol_type = other DNA
tgaaaaacatgtgtattctgttgatttggggtggagagttctgtagatgtctattaggtctgcttggtgcagagctgagttcaattcctgggtatccttgttgactttctctctcgttga

SEQ ID NO: 69386 - DNA, 120 bp, synthetic construct; identical to SEQ ID NO: 69357
  source 1..120: mol_type = other DNA

SEQ ID NO: 69387 - DNA, 120 bp, synthetic construct; identical to SEQ ID NO: 69356
  source 1..120: mol_type = other DNA

SEQ ID NO: 69388 - DNA, 120 bp, synthetic construct
  source 1..120: mol_type = other DNA
tatatatttcttaaggtatttttgaaatattaaaatgacttaaggcagatcataaaagttacttggcggagggatctcaagtgatttgaacaaaatgactttaagcagttcctgttgcaa

SEQ ID NO: 69389 - DNA, 120 bp, synthetic construct
  source 1..120: mol_type = other DNA
ggactctgcacaaaggctgagctctgctcagtagatttgcttctccgagaaggatacatcagcaattctgaacccgctttgtgtctatgccaggaatagaacaaataagtaaatatattg

SEQ ID NO: 69390 - DNA, 120 bp, synthetic construct
  source 1..120: mol_type = other DNA
aagagctcaggatgtccaagaggtgatgaaagacactgatgtttgcatgcttgttgactggcatttccatgccccctgtctctctctttccactgcccttctcctatctcatcccaaatg

SEQ ID NO: 69391 - DNA, 120 bp, synthetic construct
  source 1..120: mol_type = other DNA
tcagggaaagacttgaatgcctgggagagcccggttcctgttaaagcaagtacgttaaagtgttctgctgtgcaggagctttttagtttgatgtagttccacttgtttgttttcattttt

SEQ ID NO: 69392 - DNA, 120 bp, synthetic construct
  source 1..120: mol_type = other DNA
tagaacagcacctggcctgaggtaagaaatatacaaggcttgggtatttacaaatgctagtaacttttgtgtgtgttgctcctatatcctgcaagctttataagctctcccatcaacctc

SEQ ID NO: 69393 - DNA, 120 bp, synthetic construct
  source 1..120: mol_type = other DNA
tgtttcagagctcctagacagcaatccttcttactcctttgcctcttatctgcaccaatttccgggtaaaatacaggccagcaaatcctagaatttgcattcatctgaagaagtagaatg

SEQ ID NO: 69394 - DNA, 120 bp, synthetic construct
  source 1..120: mol_type = other DNA
gctgcttatgaacatgtttgtacaagtttttgtatgaacctgtgtttcctgtctctggactacacacctaggagtaagtcatttatttaaccacatgggggctgcaaacacctgcataca

SEQ ID NO: 69395 - DNA, 120 bp, synthetic construct
  source 1..120: mol_type = other DNA
ctccttgcagtttgatctcagactgctgtgctagcaatcagcgacactccatgggtctaggaccctcccagccaggtgtgggatataatctcctggtgcgctgttttttaagcccatcgg

SEQ ID NO: 69396 - DNA, 120 bp, synthetic construct
  source 1..120: mol_type = other DNA
aaaacaaaggctcgagaactacgtaaagaatgcagaagcctcaggagccgatgctatcaactggtagaaagggtatcagcgatggaagatgaagtgaatgaaatgaagtgagaagggaag

SEQ ID NO: 69397 - DNA, 120 bp, synthetic construct
  source 1..120: mol_type = other DNA
tttaagccaacaaagatcaaaagagacaaagaaggccattacatgatggtaaagggatcaattcaacaagaagagctaactatcctaaatatatatgcacccaatacaggagcacccaga

SEQ ID NO: 69398 - DNA, 120 bp, synthetic construct
  source 1..120: mol_type = other DNA
ctaccagaggtacaaggaggaactggtaccattccttctgaaactattccaatcaatagaaaaagagggaatcctccctaactcattttatgaggccagcatcaccctgataccaaaggc

SEQ ID NO: 69399 - DNA, 120 bp, synthetic construct
  source 1..120: mol_type = other DNA
aaaactgattcttcctaccgatgagcatggaatgttcttccatttgtttgtatcctcttttatttccttgagcagtggtttgtagttctccttgaagaggtccttcacatcccttgtaag

SEQ ID NO: 69400 - DNA, 120 bp, synthetic construct
  source 1..120: mol_type = other DNA
ttccaagtcttggctattgtgaataatgccgcaataaacatacatgtgcatgtgtctttatagcagcatgatttatagtcctttgggtatatacccagtaatggggtggctgggtcaaat

SEQ ID NO: 69401 - DNA, 120 bp, synthetic construct
  source 1..120: mol_type = other DNA
agatgtgcctttcaccatgattgtaagtttcctgaggcttcctcaggcaggtggaactgtgagtcagttaaacctcctttctttgtgaattacccagtttcgggtatttctttatagcaa

SEQ ID NO: 69402 - DNA, 120 bp, synthetic construct
  source 1..120: mol_type = other DNA
ttcagaggtcctaggccagcattgtgctggctcaaaataggcacttaggaaatgttcctggaatatacatttgcaacgtaaaatgggtaagacaaagtgtgcattgatgcaggagaaata

SEQ ID NO: 69403 - DNA, 120 bp, synthetic construct
  source 1..120: mol_type = other DNA
tcgatctgcctgcctcagactgccagagtgctgagattacaggtatgagccaccgtgcctggtcagaatgtcccaaatttatttaaggaaagaatcagtttggcatttttttaaaaaatt

SEQ ID NO: 69404 - DNA, 120 bp, synthetic construct
  source 1..120: mol_type = other DNA
aaggcaaataaaaaaggcaacagttaatgatctcggctactaacaacatggtagcgtcgctttcccacaccctgaagctgagggacattttcttcttggggtagccaattagtagcatta

SEQ ID NO: 69405 - DNA, 120 bp, synthetic construct
  source 1..120: mol_type = other DNA
ccacacgttctcatcaggaacctcttcattgtcttgggctgggctacaggattcctcacagagaagtcaagtcgccagtggctctctttccagtgactgcccatttctccgttccataca

SEQ ID NO: 69406 - DNA, 120 bp, synthetic construct
  source 1..120: mol_type = other DNA
atcagagacagggacttgaattctgggtcattttaaatactagttaaaagctttaaatggctaaacgtatttttaatactgggtctcatttatgtatttatttattgcatatggaatgat

SEQ ID NO: 69407 - DNA, 120 bp, synthetic construct
  source 1..120: mol_type = other DNA
aaaagggtacacacgtggaggaaaagtgccttctgtataacttgatagggtgttttgtaatcttctaaattttcaaggctgtacatttatgtcacgtttccattaggtggcactgtgcta

SEQ ID NO: 69408 - DNA, 120 bp, synthetic construct
  source 1..120: mol_type = other DNA
aaggagatctgtctttgcccacgttatataaatgacgattctaggtgaatgttgtaaagctcaaggtcatctgtcacgaaatctttaccaggtttgacacaatgtctgtctttaatccat

SEQ ID NO: 69409 - DNA, 120 bp, synthetic construct
  source 1..120: mol_type = other DNA
gtgcatctcatttttatgttttgactttatgtggggagctttcagttaactgtgatgagctccaacctgcctcagaagaagtaactacaaggtaattcagctcggtaccatctgcttagt

SEQ ID NO: 69410 - DNA, 120 bp, synthetic construct
  source 1..120: mol_type = other DNA
ttggaaaatcagacctgttttgtgaaaaaggtcaagtggctcctttgaacagctttgtctacggtagatgtttcagctgaacgtgagttgagatacggcctctgtgactctttaaaaaca

SEQ ID NO: 69411 - DNA, 120 bp, synthetic construct
  source 1..120: mol_type = other DNA
tgctgagaaaagtgtggaatccctggtttccacaggcttttgccaacacacctgactctttgtttgagagctaccatcattctggaggcaatttcttctttaatttactgtctttggata

SEQ ID NO: 69412 - DNA, 120 bp, synthetic construct
  source 1..120: mol_type = other DNA
tctttcttgactgtaataccagggtctcagtgaatttgtctgtgtggtgggcaggaagaacctgtcggacaatcacacccagctttcaatgtacattagatattttcttcttttacctgt

SEQ ID NO: 69413 - DNA, 120 bp, synthetic construct
  source 1..120: mol_type = other DNA
ccaagactgcacatcccaccatcatatctggcacgatttacacctcatccagaaatatttgcaccattcctgtctcatccagattgcaaacttcttgagacgagagatgcatgtcctttt

SEQ ID NO: 69414 - DNA, 120 bp, synthetic construct
  source 1..120: mol_type = other DNA
gaaatgagaaatcacctcatgtcgggagacaccatagacgcacattatttttcttgatgtgggagactgtgagaactcctacaggagttaaatctgatgagaacaatgtctttagcttag

SEQ ID NO: 69415 - DNA, 120 bp, synthetic construct
  source 1..120: mol_type = other DNA
accagcctgggcaacatggagaaccctcatctctataaaatgaaaataaaaataaaaagaactacctatgcagaggctgcccatcaaaccaattgcactgagatttctctgtgagggtct

SEQ ID NO: 69416 - DNA, 120 bp, synthetic construct
  source 1..120: mol_type = other DNA
attaatacaatgttcctgattctctgaattgcagatgggcagacaaaatgtacccaggaaaagtgacaccctcctataagaaaacatgtggtgggttatctctgagcccctgctgttaac

SEQ ID NO: 69417 - DNA, 120 bp, synthetic construct
  source 1..120: mol_type = other DNA
cacctccttataccctctcccattgcaattcaggtgcaaatgaccagcatttacatgaaacaacagagaacccaagactgacaaaacagattcttggtagcaataagatactcagttcca

SEQ ID NO: 69418 - DNA, 120 bp, synthetic construct
  source 1..120: mol_type = other DNA
tgttatgacggaattagcaagaattaaagggagggggtgttgaagatcattagcacctacttgtaactttcttcctgacataattctaagattgaaaagtatcagccagaccactacgga

SEQ ID NO: 69419 - DNA, 120 bp, synthetic construct
  source 1..120: mol_type = other DNA
acagctcaaaggctgtgcctgttgtgttgcattcatttttgcagaacatggtgaaaaggagatcgtaaatctggatttcatcactgaactcatgtttagaatcccatgcaactcctgaga

SEQ ID NO: 69420 - DNA, 120 bp, synthetic construct
  source 1..120: mol_type = other DNA
taataggacataaaacagacgtaggaggaatgtggaagaaagaggtacagtccctgctcttttctgatttatacccattgtaccttgccccaatgtggtcttcggttggtaattcaacat

SEQ ID NO: 69421 - DNA, 120 bp, synthetic construct
  source 1..120: mol_type = other DNA
aaccaattgctccacggagataacctcagttggtcgctttcatctcaacatagattaagcaatcactaaactctaggggttgccattcgctttctgcaggacaactgtgcagactacaaa

SEQ ID NO: 69422 - DNA, 120 bp, synthetic construct
  source 1..120: mol_type = other DNA
ctcgttaaaggcgctccataaagcagcttgcacacatgtttaaacagttcattgtcaataactttaacctcccgcaaaagccaaatacaatggtaatgtggctgtgcctgcctattacaa

SEQ ID NO: 69423 - DNA, 120 bp, synthetic construct
  source 1..120: mol_type = other DNA
tgcccagcttgtgtcagcagcttgcagaagtgtgtggatgggactccaaatggttcgtaccaaggagagaaaagcatctgaggtttccaaaaaatatttccttatcttcaaatatgtttg

SEQ ID NO: 69424 - DNA, 120 bp, synthetic construct
  source 1..120: mol_type = other DNA
gaaaattgaaggcgtatctctgcaaattggcaacaccccttctagaatttaggatatgtcctttaatacgaagaaactggcagttgcgacgctccccatcaacatgaaattcagtgaaac

SEQ ID NO: 69425 - DNA, 120 bp, synthetic construct
  source 1..120: mol_type = other DNA
ccttctggaggcgctttgcctgataaatttttgcaataacttatgaatgaggtcacattacttttccacccatagaggaagcacttagctgtattccagagatgctggtaaatcctccca

SEQ ID NO: 69426 - DNA, 120 bp, synthetic construct
  source 1..120: mol_type = other DNA
ttacataaaaaagcaaaaattttttttttttttaaggcagagtcttgctctgtcactcaggctggagtgcagtggtgcaagctcagctcactgcaacctccgcctcccaggttccagcga

SEQ ID NO: 69427 - DNA, 120 bp, synthetic construct
  source 1..120: mol_type = other DNA
tctgaccactgcaaactcttcaaggagctgatcaatacaaatgccttcagaagcttcagggtggagtacaccacgacttcaccacacatttaaaaggaagccattaggataagaattaat

SEQ ID NO: 69428 - DNA, 120 bp, synthetic construct
  source 1..120: mol_type = other DNA
ttgggtttagtgaaggattaagggatgtcgcgtgtcccctcccttgtactgagtcacatgaaaaatcacgcctgtagcaaaggcggacgttcccacacatgcgagaggcttccaaggcct

SEQ ID NO: 69429 - DNA, 120 bp, synthetic construct
  source 1..120: mol_type = other DNA
ttgagaccagcctgagcaacatggtgaaaccccgactctactaaaaatacaaaaattagctgggcatgatggcatgcctgtaatcccagctacccaggaggctgagtcaggagaatcact

SEQ ID NO: 69430 - DNA, 120 bp, synthetic construct; identical to SEQ ID NO: 69313
  source 1..120: mol_type = other DNA

SEQ ID NO: 69431 - DNA, 120 bp, synthetic construct
  source 1..120: mol_type = other DNA
tatagggtctctgggcgtttcgaggagtcctgtagaagagcttctaggaccagagagaaccccagggctaacgctctcccagctgagttttctgaggattggaaaggttatgtgagcaca

SEQ ID NO: 69432 - DNA, 120 bp, synthetic construct
  source 1..120: mol_type = other DNA
gctgcagttagctatgatagcaccgctgcactccagagcaagaccctgtctcaagaagaaaaaagaattctctctggctgaaattttctttctctctatacacccctttttagacaaaat

SEQ ID NO: 69433 - DNA, 120 bp, synthetic construct
  source 1..120: mol_type = other DNA
ccattccagaatgagaagctgttacagaatgaggagctgttccagaatgagaagccgttcaagcatggggaacttttccagaatgagaagctgttccagaatgaggagctgttccagagt

SEQ ID NO: 69434 - DNA, 120 bp, synthetic construct
  source 1..120: mol_type = other DNA
tctctggaattgccttatttggtctaaacccaagtcaaaacaccctacaagggaagagcagagagggcttgttacacccatttctcagacgagaagactgaggaacagaagagccgagaa

SEQ ID NO: 69435 - DNA, 120 bp, synthetic construct
  source 1..120: mol_type = other DNA
ctgggagaaagaaggaatgctgtctgaggatcttttcttgacaccttctggtaaaatcaagaattccagagaacatcagcactaagcgtgcagagccagtgtcggggttggaactgacta

SEQ ID NO: 69436 - DNA, 120 bp, synthetic construct
  source 1..120: mol_type = other DNA
gtcttaaagtcaaagtagatttttttgatctacctttaccatacatcccacaaatacagtcatgcaccccataacaatgcttgagtcaacaacaaaccacatattctacagtagccccat

SEQ ID NO: 69437 - DNA, 120 bp, synthetic construct
  source 1..120: mol_type = other DNA
atctgagctcctgcagacacaaacacattgatcctacagagatgctgatttctctggtgctgtaggaagcaccaatgggaaaaaactgactttaaaagtcagttaaggaagtttaagagt

SEQ ID NO: 69438 - DNA, 120 bp, synthetic construct
  source 1..120: mol_type = other DNA
tagatgacgtcaacagaaggaatgaataatcctgctgggagatactttctcctctcacgactttgctcagagcttgacacgaggattcgtgtttgatatgaaacaccattcaagagtttt

SEQ ID NO: 69439 - DNA, 120 bp, synthetic construct
  source 1..120: mol_type = other DNA
aaaagtaagctgcataagctgccattctttatgaggcctcgtttcattccccttaaacatggccttgaaattccgtatgtgggagaatacatgaatattgaatcaaaggtgcatggctgg

SEQ ID NO: 69440 - DNA, 120 bp, synthetic construct
  source 1..120: mol_type = other DNA
atgcattccataatagctttatgttaaattcatttctcatctttcattggcccttgggaagacgtccagatcccttaacatagcttacgaaaccctctcaaactcagggcccacctttct

SEQ ID NO: 69441 - DNA, 120 bp, synthetic construct
  source 1..120: mol_type = other DNA
tacgcaggtgctttgctacataggtaggcgggtgccgtgctgctttgttacctaggtacgtgggtgtgcagtggtttgttacatagctacgcgggtgccatggcggttcgttacataggt

SEQ ID NO: 69442 - DNA, 120 bp, synthetic construct
  source 1..120: mol_type = other DNA
gaaaaggaaatggaggacaaggtacaggagtaacaagaatttcttttaactctcaaagtaaattctgagcttatgtttcttgattctgcaagctcagcggcagcagatccggtggagtgt

SEQ ID NO: 69443 - DNA, 120 bp, synthetic construct
  source 1..120: mol_type = other DNA
tggaccattgagactcgattccacactctgtctcccatccatcccactagaccctgcagttctgcatgccggcctgtctcacctgaaagcggaagagcggcactttcatgccatgtaaag

SEQ ID NO: 69444 - DNA, 120 bp, synthetic construct
  source 1..120: mol_type = other DNA
attgaaagtatggggtacctcccattactcctcctttcatttgttgtaaaggagaaagggagaggccagaggccaaatgtcccattttatctgtagctgatgtttctgaaagataagcag

SEQ ID NO: 69445 - DNA, 120 bp, synthetic construct
  source 1..120: mol_type = other DNA
acatatagacaaatggaacagaacagagccctcataaataatgctacacatctacagctatctgatctttaacaaacctgacaaaaacgagaaatggggaaaggattccctatttaataa

SEQ ID NO: 69446 - DNA, 120 bp, synthetic construct
  source 1..120: mol_type = other DNA
ctgcatgattttacttatatgtggaatctaaagaagtagaactcacagaaatagagagtaggacagtggttatctggggatggggtgaaggaaagggaggggattggagacactggtcaa

SEQ ID NO: 69447 - DNA, 120 bp, synthetic construct
  source 1..120: mol_type = other DNA
ttaaacagattcttggactgatggttcatatccatcagctcattcaactttagcacgcatctcgtccctagtgggttttccagaatcaccaccatcaccaggaagctctattcctttcaa

SEQ ID NO: 69448 - DNA, 120 bp, synthetic construct
  source 1..120: mol_type = other DNA
gccatcttgtctggctgggacgccgagctccagatgggggcagatgggatagctcttgccaccgtatttggagagagatggcagggaagtcagcccccgtggagaagacaggagcaggca

SEQ ID NO: 69449 - DNA, 120 bp, synthetic construct
  source 1..120: mol_type = other DNA
catctcaagggccactggtgcaggaactattagaagccccacttctttcctctgtttctgctgccattgccccagtctctgaccctgccactcaatcactctataaacacagcaggtact

SEQ ID NO: 69450 - DNA, 120 bp, synthetic construct
  source 1..120: mol_type = other DNA
caataaacacttatgtgcaaatacatgtgcttgtgtgcacagaggaaaaagctgtggacagaaacagaaaaccaaacacggtgtgctctcactcataagtgggagttgaacaatgagaac

SEQ ID NO: 69451 - DNA, 120 bp, synthetic construct
  source 1..120: mol_type = other DNA
aaactcctggcctcaggtgatccgcccacctcggcctcccaaagtgctgggattacagatgtgagccaccatgcccgaccctcttgtactaactctgccatctctttgcagtctcccctg

SEQ ID NO: 69452 - DNA, 120 bp, synthetic construct
  source 1..120: mol_type = other DNA
ctggcaacagttttccgtttgtgcctactccacctgctgtctttgttgggtcagcgaacatcgcctccctctaccgctcaatcagcaaaagggaccgcccttgaggacctcacccgccgc

SEQ ID NO: 69453 - DNA, 120 bp, synthetic construct
  source 1..120: mol_type = other DNA
aaaaaagaacctgcaggcgacacaccaaggactccacgagggagtcctgagtactggagcgagttgcggccacgcggccgcagctcaccactggcctagagatgccctttgcgaggcggc

SEQ ID NO: 69454 - DNA, 120 bp, synthetic construct
  source 1..120: mol_type = other DNA
ttccgagcctgttgaccagggccagccgggcagagggctgggctcgctcaacgaggctcctctcgcacctcctggagcttcaggcttctttccgttgcagagaagctttatgggccaatt

SEQ ID NO: 69455 - DNA, 120 bp, synthetic construct
  source 1..120: mol_type = other DNA
ggcattgagaatggacattgtcaactgggccaaaggaggccaaggagaagtgctgggggcatgggaactgaaaaagagaggaggctcagcacgtctttgagctgggagagggacagcagc

SEQ ID NO: 69456 - DNA, 120 bp, synthetic construct
  source 1..120: mol_type = other DNA
taaagagggtaagtgacatacgcacactacaggggctggggtcaagtgatcagagcactcaatccccaaaggcaaggtggatgcagttaccataaaagacagcagagtcaaagctgcaac

SEQ ID NO: 69457 - DNA, 120 bp, synthetic construct
  source 1..120: mol_type = other DNA
aagggcagaaccaggatgcaaaccccagccgcctggctccagaatcgcattcccaaggtctcactacacttggcctctccaccgcattctggtatcctggtctttggcagagtccacgta

SEQ ID NO: 69458 - DNA, 120 bp, synthetic construct
  source 1..120: mol_type = other DNA
cccaccccaagcactgtaaccatgttgcacaacggtttccccactaagctcctaatggcagctcctatcctgctgtgctccctatttcaaccctaacagctctcacagtgggcagcacat

SEQ ID NO: 69459 - DNA, 120 bp, synthetic construct
  source 1..120: mol_type = other DNA
cttatatacaaaatggccatgttgagacttaaattcagggtatccaacttagaggctgtgctcttactcatgaaacattctgacactagtaaccaatttcaaaatgtaaacacctcctgg

SEQ ID NO: 69460 - DNA, 120 bp, synthetic construct
  source 1..120: mol_type = other DNA
ggtgacactatgcctggggcaatgggagcacatagaaggggcacccaatcggccaggtgcagttgttcatgcctgtattcccagcacttcgggaggccaaggtgggtggatcacttgagg

SEQ ID NO: 69461 - DNA, 120 bp, synthetic construct
  source 1..120: mol_type = other DNA
ggtggtgtgaatctgacgtggtgagccctggcagaagaggaaatcaggagaggaaaggtaagatgaggtcaatgcaagacagacagccaagtggagataacaactgggcagctggattca

SEQ ID NO: 69462 - DNA, 120 bp, synthetic construct
  source 1..120: mol_type = other DNA
tttgcagattgcatataatttcaccatttccatagcttcagcacgataattctggagaaaattcaggcaccaaggagacacttgaggcacactatgctggagacagatgttttagcgaat

SEQ ID NO: 69463 - DNA, 120 bp, synthetic construct
  source 1..120: mol_type = other DNA
ccagctgggctcctgagtctggtggggacttgtagaactttatgtctaggtaagggattggaaatacaccaattggcactctgtatctagctcaaggtttgtaaacacactaatcagcac

SEQ ID NO: 69464 - DNA, 120 bp, synthetic construct
  source 1..120: mol_type = other DNA
gcaaagttagtgccacattggtttcaattctgccactcatgagtgagacccgtgacctcctctctctaagactctgttgttcttatctgtagagtggaggaatagaaggaccttttaaag

SEQ ID NO: 69465 - DNA, 120 bp, synthetic construct
  source 1..120: mol_type = other DNA
ctaggaagcttgtctaggtaaacttccgggtcgaagtgcaccccgttcagatcagtggggtccaggggttcggtccccgcggggagtcccaccgcctccacttccgagaggccgttgtaa

SEQ ID NO: 69466 - DNA, 120 bp, synthetic construct
  source 1..120: mol_type = other DNA
gtaatttttatttatttatttttttgagacggagtcttgctctgttgcccaggcaggagtgcagtggcgtgatctcgattcactgcaacctctgtctcccggcttcaaaggagtctcctg

SEQ ID NO: 69467 - DNA, 120 bp, synthetic construct
  source 1..120: mol_type = other DNA
cacagggtgataataaggagaaggtcagcaacgaacatgtgagaaatagaatctacttcataaggaagttcaaggaaaggtactatgactggatgtgtacgtaagccagatttatgtttc

SEQ ID NO: 69468 - DNA, 120 bp, synthetic construct
  source 1..120: mol_type = other DNA
acatctgatcatcctgtttctaatttttccagtagacaccatactattttccccgttccttcacggttttacattccctctgatcagattcgagcattcctacttccctctagtctcacc

SEQ ID NO: 69469 - DNA, 120 bp, synthetic construct
  source 1..120: mol_type = other DNA
tactcgggaggtggaggcaggagaattgcttgaacccaggaggcagaggttgcggtgagccaacattgcaccatgacactccagcctgggcaacaagagcgaaactccatctcaaaacaa

SEQ ID NO: 69470 - DNA, 120 bp, synthetic construct
  source 1..120: mol_type = other DNA
aaatcagaatctcaggtattgagaaccagtcctcatcatgtgtaagctgcccaggtgatttgactcaaagccaagattgaggaacggcgacatggatatctacacagaacctgcctaaat

SEQ ID NO: 69471 - DNA, 120 bp, synthetic construct
  source 1..120: mol_type = other DNA
tgtcagaacaggcaagtttgagaagttgagaggggtcacagaccaaattagagatttccacattcttgatgatggttaattgtaacacaatccaactgtgcagctgggaatccaacaggc

SEQ ID NO: 69472 - DNA, 120 bp, synthetic construct
  source 1..120: mol_type = other DNA
gaggataacattgcctccaatttagcaggtggtttgacgccccttgtgctgttgttttaaatatccagcggggaagacagtagtactatttttgatagtccgattcatcctctccacctt

SEQ ID NO: 69473 - DNA, 120 bp, synthetic construct
  source 1..120: mol_type = other DNA
atcacactccatgcacttgaagggttaaaaagacatactgagaatcagtgtaagtgttgacagtctcaccctcactgagttctaaggcccaaatgaaagcattaagttcagctttctggg

SEQ ID NO: 69474 - DNA, 120 bp, synthetic construct
  source 1..120: mol_type = other DNA
gcaaatgacctgctttctttctgatctcgggctgcgttccgacccctgtcggatagtaaatcccaagtaacgtacctgctgtcggcagatctgagctttcttcttggacaccttctaccc

SEQ ID NO: 69475 - DNA, 120 bp, synthetic construct
  source 1..120: mol_type = other DNA
caagaacccttccgccaggttgagcagggccccttcctccttgtccggggcctccggctctgagtcaccttcttttcttttgagctgagggcatttgttcttccactgtcctatttcttt

SEQ ID NO: 69476 - DNA, 120 bp, synthetic construct
  source 1..120: mol_type = other DNA
tgtattgtttttccagttgagaaggtcgacgcaggtgaagggctggtacccaaaaacacgtctctccactacatgagcattttcatctatcccagtataccgctgctctctcaggggcat

SEQ ID NO: 69477 - DNA, 120 bp, synthetic construct
  source 1..120: mol_type = other DNA
ttctttccggatgtctgacaccatggttctccccctgatcctaagagtagctgaggtagagactcactgaaagatctaggcggggatgtcccatcatgcacaggctctctccattctctg

SEQ ID NO: 69478 - DNA, 120 bp, synthetic construct
  source 1..120: mol_type = other DNA
ctctgctgacagacttaccttggggaagaaagagaagctctgaagatggatcatggccgtgactgcatgtcaaggagagtctccttgatgacactgaggcctacgtcgagagagacaaaa

SEQ ID NO: 69479 - DNA, 120 bp, synthetic construct
  source 1..120: mol_type = other DNA
acacaagccgtaactactgctttgattggacaagagactgatttcagtagttttctcttgataagagaccactggccgtgggcgggttctggacagtttacagaagctatgcacttgatt

SEQ ID NO: 69480 - DNA, 120 bp, synthetic construct
  source 1..120: mol_type = other DNA
gttgtttcctctctttcaggttgcaagcgggccaatgccggtccacacaaccagtaagaggccgcgcttggaccctgtcctcgctgatcgctcagctaccgaaatgtctggcaggggctc

SEQ ID NO: 69481 - DNA, 120 bp, synthetic construct
  source 1..120: mol_type = other DNA
aggggactgtgggactgaggagcgcagagcagagagcagactctgtgcggtgactccgaagctccccggctgtggcgcttctgtggatgtgggagcccaggccaggcagggagcagatgc

SEQ ID NO: 69482 - DNA, 120 bp, synthetic construct
  source 1..120: mol_type = other DNA
acgtgcacgtaggccagatttatgtttctctccacacaaatatctcagcggagtaaagaataacaaggcagcattactgccaacatgtctcgcctcccgccacagggcagcttttctccg

SEQ ID NO: 69483 - DNA, 120 bp, synthetic construct; identical to SEQ ID NO: 69477
  source 1..120: mol_type = other DNA

SEQ ID NO: 69484 - DNA, 120 bp, synthetic construct
  source 1..120: mol_type = other DNA
gtgtctcagcaaatcccgctgagttccgaggccgcctaggtatgcaatcctgctgagagttgttcccaggtcagagaatggagagagcctgtgcatgatgggatatccctgcctagatct

SEQ ID NO: 69485 - DNA, 120 bp, synthetic construct; identical to SEQ ID NO: 69478
  source 1..120: mol_type = other DNA

SEQ ID NO: 69486 - DNA, 120 bp, synthetic construct
  source 1..120: mol_type = other DNA
gaacatgcatgtgttcagagaagacgtcccgagtacccttgagccagcaacctgccttgggaagggcattagtccgttccacttcatggaaggctgagtggaggcgctttgatccagtta

SEQ ID NO: 69487 - DNA, 120 bp, synthetic construct
  source 1..120: mol_type = other DNA
aggctccgattcaggcttgcctgaacttccccaagaaaccgagactgggtcccttccagatccccgaaagcgccatccagggaggtgagctgggggccccggagaatctccaacctccgc

SEQ ID NO: 69488 - DNA, 120 bp, synthetic construct
  source 1..120: mol_type = other DNA
ggtgcagcccttcctctgtgccccgccctgagagcagagtttcggacgctgggaagcgtgctgtgtgaagcgctctcggggtctttcctcagcctcgaaaactgggctctggaatgcctt

SEQ ID NO: 69489 - DNA, 120 bp, synthetic construct
  source 1..120: mol_type = other DNA
gggcagaggtccctgtggctttccacggtgcattgcgcccctggtttattgagactagggaatggcaatgactcctaccaagtatactgctcgtaaacatttggttaacaaggcgcgtcc

SEQ ID NO: 69490 - DNA, 120 bp, synthetic construct
  source 1..120: mol_type = other DNA
ccgtatccagaatgaataagatcaactctctgctcctctgacagcagagggagcaggaccataaggaaccaaagagcgtggaaggaaacgatgtgacaggaaagctcagagaacggccac

SEQ ID NO: 69491 - DNA, 120 bp, synthetic construct; identical to SEQ ID NO: 69488
  source 1..120: mol_type = other DNA

SEQ ID NO: 69492 - DNA, 120 bp, synthetic construct; identical to SEQ ID NO: 69489
  source 1..120: mol_type = other DNA

SEQ ID NO: 69493 - DNA, 120 bp, synthetic construct; identical to SEQ ID NO: 69490
  source 1..120: mol_type = other DNA

SEQ ID NO: 69494 - DNA, 120 bp, synthetic construct
  source 1..120: mol_type = other DNA
tgcagcatgctgaattggtgggtaaacggcaaaaggactttggaaaaaagggtggttggcccttgagccgtgtaagacgtcgatacgatatggcacttcttccccgtttgttcagatgaa

SEQ ID NO: 69495 - DNA, 120 bp, synthetic construct
  source 1..120: mol_type = other DNA
ctggtttattgagactagagaatggccacgacttttaccaagtatacggcttgtaaacatttggttaacaaggcacgtcctgcacagccctagatcccttaagccttgattttatacaac

SEQ ID NO: 69496 - DNA, 120 bp, synthetic construct
  source 1..120: mol_type = other DNA
gcttcaattgacaggatttttatgctctcatgctctggctccttggctccagaagcttctagaaccagtagggtgatacatcctttagcaactatattgtaaaacacatggtgggtaaaa

SEQ ID NO: 69497 - DNA, 120 bp, synthetic construct
  source 1..120: mol_type = other DNA
gctgggacaatggatgtccatgtagcagtacttttttttttttttttttttttttgggagacggagtctcactctgtaaccaggctgccctgcaatggcgcaatcttggctcaccgcaac

SEQ ID NO: 69498 - DNA, 120 bp, synthetic construct
  source 1..120: mol_type = other DNA
tgcttcaccttccatcacgattgtgagattcctgaggcctcctagccatgctttctgttaatccagcataactgggagtcaaagaaacctcttttatttataattatccagtctcaggta

SEQ ID NO: 69499 - DNA, 120 bp, synthetic construct
  source 1..120: mol_type = other DNA
caggttatactatagtacaagccactagcccgcctcttagaacctcttatttcctttccatcgtggaaatctatcctcaaggaaggaaataacttctcagtgttccatctgctattctac

SEQ ID NO: 69500 - DNA, 120 bp, synthetic construct
  source 1..120: mol_type = other DNA
aagataagtggcagcattagattctcataggactgcaaaccctattgtgaactgtgcgtgccagggatctaggttgcatgtttcttataagaatctaatgcctgatgatctgtcactctc

SEQ ID NO: 69501 - DNA, 120 bp, synthetic construct
  source 1..120: mol_type = other DNA
ctggccaatttttatttcaatatggcctttgcgaagttctgtgatgtcataacatctagatccacaagtcccgctcacacaaacttcagggaaatcccagatcagagccacatattctta

SEQ ID NO: 69502 - DNA, 120 bp, synthetic construct
  source 1..120: mol_type = other DNA
ttggtttgccattgcacagaatggcatgaggaactcatagcatgacttaaagaagatgcccagttttgagattgaattaatgggcaactgctcaaagatgtgatattcttaaatatactc

SEQ ID NO: 69503 - DNA, 120 bp, synthetic construct
  source 1..120: mol_type = other DNA
actcaagatgtgcagctccacccactcacgctagagaggaagaagaacttctgccataaacttttgttgttattgttttgtttggtttggtttgagacggggtctcgttctgttgctccg

SEQ ID NO: 69504 - DNA, 120 bp, synthetic construct
  source 1..120: mol_type = other DNA
gaagactactgatgtctaagaaatcccaaagccagcgggaggttgtggccttcctcctcctggctttgcccacaaagggccgcgaggggtgagaatccacttccgagtggggacttagac

SEQ ID NO: 69505 - DNA, 120 bp, synthetic construct
  source 1..120: mol_type = other DNA
tgacacatagatttgcataagctatccttagcatgtgagtagagatttcatccttctcttcccgtttccccatcatcaacagcttttttttcttcccacagccaaactcccttcattcca

SEQ ID NO: 69506 - DNA, 120 bp, synthetic construct
  source 1..120: mol_type = other DNA
gaccatatacaaaaggcgattgattccctgtatgtggacggaagaggagcttgaataagagaagggttctgtgatactttaatgctggaaaactgctgctatgcatttgtcaaatcccat

SEQ ID NO: 69507 - DNA, 120 bp, synthetic construct
  source 1..120: mol_type = other DNA
gagggggagaaccgcagggagttcaaataaaacattcacatttcacttcacacacaatgtcccttagactttctcttcctatttaaccacatacatccaaccacactcaatcgaatccct

SEQ ID NO: 69508 - DNA, 120 bp, synthetic construct
  source 1..120: mol_type = other DNA
ttctactaatctgaaagagccctggaccagacagaattttacagctgaattccaccagacgtgcaaagaagagctggtaccaatcttactaaaactattccaaaaaattggggatgaggg

SEQ ID NO: 69509 - DNA, 120 bp, synthetic construct
  source 1..120: mol_type = other DNA
tttgtcccgactagcactccagcttctaccctatactttgtgggcttaggcagtcttactagttcccatttggcatgtccaattaacatttctcaaaagagcagatttatatgccttcag

SEQ ID NO: 69510 - DNA, 120 bp, synthetic construct
  source 1..120: mol_type = other DNA
gaggttggagattctccggggcccgcagctcacctccctggatggcgctttcggggatctggaagggacccagtctcggttcttgggaagttcaggcaagcctgaatcggagcctgggca

SEQ ID NO: 69511 - DNA, 120 bp, synthetic construct
  source 1..120: mol_type = other DNA
caaatcctgtaacaatttagatatagaacaccaggcatttgttgcacttgatttataccctcgtcaggatgttatacctatggagaccaattggcccgaagtaaacgaagctgcaccctt

SEQ ID NO: 69512 - DNA, 120 bp, synthetic construct
  source 1..120: mol_type = other DNA
agtatcccaacagaaaatacagaataaaacacgtggcaacagccctgaaaatgaagtctttatggctgtttcagaaaaatatccgggatactctgcagcgaatctcccttctcagcagtt

SEQ ID NO: 69513 - DNA, 120 bp, synthetic construct
  source 1..120: mol_type = other DNA
ttctacaaagcttctagaactctttcactatcactgcttttcaaaatccatcagagacagcttcccaatactcaacgttaccttctttttcaacctcactctccctagctccctggctct

SEQ ID NO: 69514 - DNA, 120 bp, synthetic construct
  source 1..120: mol_type = other DNA
tcggaaacactcaacttgcaactggtggaagcagcctagccccactgcacgtaaaacactcgcgttgtggcaaacgcggagaccaaggctgcactggccggaagtggggacagatcccga

SEQ ID NO: 69515 - DNA, 120 bp, synthetic construct
  source 1..120: mol_type = other DNA
agtagcatttgatttctttcctgctccacctcatgccttcttggatcattaaggtacactgtcaccctctttttgtatctcaggaggtgttgaacctggattcttcaagttaggatcaaa

SEQ ID NO: 69516 - DNA, 120 bp, synthetic construct
  source 1..120: mol_type = other DNA
tagtgttgttcaagtccactgtttctttgttgtgtttctttctagatgacctatccaatgttgaaagtggggtgttgaagtctctgatattactgaattgctgttactcctttcagttct

SEQ ID NO: 69517 - DNA, 120 bp, synthetic construct
  source 1..120: mol_type = other DNA
taatttcatatccagccaaactaagcttcataagtgaaggagaaataaaatactttatagacaagcaaatgctgagagattttgtcaacaccaggcctgccctaaaagagctcctgaagg

SEQ ID NO: 69518 - DNA, 120 bp, synthetic construct
  source 1..120: mol_type = other DNA
cgagaacaaagacaccacataccagaatctctgggacgcattcaaagcagtgtgtagagggaaatttatagcactaaatgcctacaagagaaagcaggaaagatccaaaattgacaccct

SEQ ID NO: 69519 - DNA, 120 bp, synthetic construct
  source 1..120: mol_type = other DNA
tgcaacacaagcatatttctgacagagaggtacaaattacttcttagacactaaggaaatgaacataatcaccagaatactttgggtgccgtagggaatgcttaaacagggtatgagtaa

SEQ ID NO: 69520 - DNA, 120 bp, synthetic construct
  source 1..120: mol_type = other DNA
caaagggggatcttagggtcattgtgctggttattgatgactgttccatttactgaagccagaatggcctaggatcattagtatctctgatcaagtatccagaatttactgatttttctc

SEQ ID NO: 69521 - DNA, 120 bp, synthetic construct
  source 1..120: mol_type = other DNA
aaggaactaaagagaaacatgagaatgatatctcacaaaaatagagaatatcaacaagagacaattaaaaaaaacatgagaatgatatctcacaaaatagaggctatcaataattttttt

SEQ ID NO: 69522 - DNA, 120 bp, synthetic construct; identical to SEQ ID NO: 31290
  source 1..120: mol_type = other DNA

SEQ ID NO: 69523 - DNA, 120 bp, synthetic construct; identical to SEQ ID NO: 31291
  source 1..120: mol_type = other DNA

SEQ ID NO: 69524 - DNA, 120 bp, synthetic construct; identical to SEQ ID NO: 31292
  source 1..120: mol_type = other DNA

SEQ ID NO: 69525 - DNA, 120 bp, synthetic construct; identical to SEQ ID NO: 31293
  source 1..120: mol_type = other DNA

SEQ ID NO: 69526 - DNA, 120 bp, synthetic construct; identical to SEQ ID NO: 31294
  source 1..120: mol_type = other DNA

SEQ ID NO: 69527 - DNA, 120 bp, synthetic construct
  source 1..120: mol_type = other DNA
cctttaagcgctgtaacactcactgcgaaggtctgcaacttcacttctgaggccagccagaccatgaacccactgggaggaataagcaactctggacacaccatctttaagaattgttaa

SEQ ID NO: 69528 - DNA, 120 bp, synthetic construct
  source 1..120: mol_type = other DNA
ttaaagtatttggggtgtctcccaggtcctgcaagagcagtctgcttccttcggagggtctgtgggtcctgtcaggattgctggtctgctcttgcagtccatctggagctaaaattcaca

SEQ ID NO: 69529 - DNA, 120 bp, synthetic construct; identical to SEQ ID NO: 31295
  source 1..120: mol_type = other DNA

SEQ ID NO: 69530 - DNA, 120 bp, synthetic construct; identical to SEQ ID NO: 31296
  source 1..120: mol_type = other DNA

SEQ ID NO: 69531 - DNA, 120 bp, synthetic construct; identical to SEQ ID NO: 31112
  source 1..120: mol_type = other DNA

SEQ ID NO: 69532 - DNA, 120 bp, synthetic construct; identical to SEQ ID NO: 31297
  source 1..120: mol_type = other DNA

SEQ ID NO: 69533 - DNA, 120 bp, synthetic construct; identical to SEQ ID NO: 31298
  source 1..120: mol_type = other DNA

SEQ ID NO: 69534 - DNA, 120 bp, synthetic construct; identical to SEQ ID NO: 31299
  source 1..120: mol_type = other DNA

SEQ ID NO: 69535 - DNA, 120 bp, synthetic construct; identical to SEQ ID NO: 31300
  source 1..120: mol_type = other DNA

SEQ ID NO: 69536 - DNA, 120 bp, synthetic construct; identical to SEQ ID NO: 31301
  source 1..120: mol_type = other DNA

SEQ ID NO: 69537 - DNA, 120 bp, synthetic construct; identical to SEQ ID NO: 31238
  source 1..120: mol_type = other DNA

SEQ ID NO: 69538 - DNA, 120 bp, synthetic construct; identical to SEQ ID NO: 31302
  source 1..120: mol_type = other DNA

SEQ ID NO: 69539 - DNA, 120 bp, synthetic construct; identical to SEQ ID NO: 31303
  source 1..120: mol_type = other DNA

SEQ ID NO: 69540 - DNA, 120 bp, synthetic construct
  source 1..120: mol_type = other DNA
tttgggtatatacccagtaatgggattgctgggtcaagtggtatttctggttgtaggtctttgaggaatcaccatactgtcttccacaatagttgaactaaattgcattcccaccaacag

SEQ ID NO: 69541 - DNA, 120 bp, synthetic construct; identical to SEQ ID NO: 31304
  source 1..120: mol_type = other DNA

SEQ ID NO: 69542 - DNA, 120 bp, synthetic construct; identical to SEQ ID NO: 31305
  source 1..120: mol_type = other DNA

SEQ ID NO: 69543 - DNA, 120 bp, synthetic construct; identical to SEQ ID NO: 31306
  source 1..120: mol_type = other DNA

SEQ ID NO: 69544 - DNA, 120 bp, synthetic construct; identical to SEQ ID NO: 31307
  source 1..120: mol_type = other DNA

SEQ ID NO: 69545 - DNA, 120 bp, synthetic construct
  source 1..120: mol_type = other DNA
tttttagcaaggaaataatacatgcatgtttccccgtctcaaacacatacactcatataaacatatgcacctatatacctacatatctatgtacgaatatatacatggacatgggtattt

SEQ ID NO: 69546 - DNA, 120 bp, synthetic construct; identical to SEQ ID NO: 31308
  source 1..120: mol_type = other DNA

SEQ ID NO: 69547 - DNA, 120 bp, synthetic construct
  source 1..120: mol_type = other DNA
cttatccccatttattttaccttttggtaattaacttttttgccttctggtaagtgaaagtaacatataggaaatataattatttaattatggttgcacactcagaagaaggaatatagt

SEQ ID NO: 69548 - DNA, 120 bp, synthetic construct
  source 1..120: mol_type = other DNA
ccaaaaacactgagtattctgcatacccagctcctagctatatcatctcagccttcctcttctggacattgaaagggatttctctgtctaaactaaaatgtctgtgatgttttaggagaa

SEQ ID NO: 69549 - DNA, 120 bp, synthetic construct
  source 1..120: mol_type = other DNA
caaggaaaagagctgtggtgggaaggaagagtatttcttcaagaccagaatccaggtaagcaacagggtcctgtgtcctaataggaggaggtgctttctcaatgaataatatcagttgaa

SEQ ID NO: 69550 - DNA, 120 bp, synthetic construct; identical to SEQ ID NO: 31309
  source 1..120: mol_type = other DNA

SEQ ID NO: 69551 - DNA, 120 bp, synthetic construct; identical to SEQ ID NO: 1744
  source 1..120: mol_type = other DNA

SEQ ID NO: 69552 - DNA, 120 bp, synthetic construct; identical to SEQ ID NO: 31310
  source 1..120: mol_type = other DNA

SEQ ID NO: 69553 - DNA, 120 bp, synthetic construct; identical to SEQ ID NO: 31311
  source 1..120: mol_type = other DNA

SEQ ID NO: 69554 - DNA, 120 bp, synthetic construct; identical to SEQ ID NO: 31312
  source 1..120: mol_type = other DNA

SEQ ID NO: 69555 - DNA, 120 bp, synthetic construct
  source 1..120: mol_type = other DNA
agagcattccggaggacatctcctgcctttcagcgcagccacagaatttcgtgggcacaggagagcacctagaatattcccctttcattgcacagcagctttgggaaatagtggcttcct

SEQ ID NO: 69556 - DNA, 120 bp, synthetic construct; identical to SEQ ID NO: 31313
  source 1..120: mol_type = other DNA

SEQ ID NO: 69557 - DNA, 120 bp, synthetic construct
  source 1..120: mol_type = other DNA
acctgggagtcggaggttgcagcgagccaagatcgcgacactggactccagcctgagtgacggagcgagactctatctaaaaaataaataaataaataaataaaaaggaaaaaaaagaaa

SEQ ID NO: 69558 - DNA, 120 bp, synthetic construct; identical to SEQ ID NO: 31314
  source 1..120: mol_type = other DNA

SEQ ID NO: 69559 - DNA, 120 bp, synthetic construct
  source 1..120: mol_type = other DNA
ttgttttcacttcttaagaatcagcctagaggtgactggaggaagagaaactaagttgtggtgacaaagaacaagactatgagtaaggatcactattacccttacagactggataaaacc

SEQ ID NO: 69560 - DNA, 120 bp, synthetic construct
  source 1..120: mol_type = other DNA
accttggggggccgaggcgggtagatcacgaggccaggagttcaagaacagcatgcccaagatggtgaaaacttgtctctactaaaaaaaaaagtatatatatatataaaaattagctga

SEQ ID NO: 69561 - DNA, 120 bp, synthetic construct
  source 1..120: mol_type = other DNA
aactcacaacaacctcattccactccagtatgatgtttgtccccacaaattgatgcacataattcttgctggcagtggtaatgtcctaataaaaaaatatcacgagatggcgtcagactt

SEQ ID NO: 69562 - DNA, 120 bp, synthetic construct
  source 1..120: mol_type = other DNA
gtgtcagacatccggaaagaagagggatgaatgtttcacctctgaagtacatcccaaatgtgggagttaacttcagctttgctggggtctacttggccagcgaaactctgcctggttcat

SEQ ID NO: 69563 - DNA, 120 bp, synthetic construct
  source 1..120: mol_type = other DNA
aaagttctgcgaataaacaccaatgagacaaaaaaagacgaataagaaaaatgacagaaaaggagaaccttcccagaagcctcctgccagtgaacagccaccgtagcaagagcttggagg

SEQ ID NO: 69564 - DNA, 120 bp, synthetic construct
  source 1..120: mol_type = other DNA
agtccgcagtccggcctgggcgacagagcgagactccgtctcaaaaaaaaaaaataaaaaaaaaaaaaaaaaaaaaaaaaaaaagaatgttttacttgcctcatgataaggactcaatat

SEQ ID NO: 69565 - DNA, 120 bp, synthetic construct
  source 1..120: mol_type = other DNA
gaaaaagcctttgacaaaattcaacaacccttcatgctaaaaactctcaataaattaggtattgatgggacgtatttcaaaataataagagctatctatcacaaacccacagccaatatc

SEQ ID NO: 69566 - DNA, 120 bp, synthetic construct
  source 1..120: mol_type = other DNA
actgcattaagaaaatgtggcacatatacaccatggaatactatgcagccataaaaaatgatgagttcatgtcctttgtagggacatggatgaaattggaaatcatcattctcagtaaac

SEQ ID NO: 69567 - DNA, 120 bp, synthetic construct
  source 1..120: mol_type = other DNA
cacccgagaggtcaatttgtcaagggtattcaatttatactaccttcttcccctgacattctcagccaccaacataaaagctgataccattaaagtaaaatgccatgatctgaaatgcac

SEQ ID NO: 69568 - DNA, 120 bp, synthetic construct
  source 1..120: mol_type = other DNA
ctaaaacgcagagcgcctctcctcctccaaaggaacgcagttcctcaccagcaacggaacaaagctggatggagaatgattttgacgagctgagagaagaaggcttcagacgatcaaatt

SEQ ID NO: 69569 - DNA, 120 bp, synthetic construct
  source 1..120: mol_type = other DNA
aacaaccggtaccagctgctgcaaaatcatgccaaaatgtaaagaccatcgagactaggaagaaactgcatcaactaatgagcaaaatcaccagctaacatcataatgacaggatcaaat

SEQ ID NO: 69570 - DNA, 120 bp, synthetic construct
  source 1..120: mol_type = other DNA
acctctacgcaaataaactagaaaatctagaagaaatggatacattcctcaacacatacactctcccaagactaaaccaggaagaagttgaatctctgaatagaccaataacaggctctg

SEQ ID NO: 69571 - DNA, 120 bp, synthetic construct
  source 1..120: mol_type = other DNA
taggattgacttggcaatgcgggctcttttttggttccatatgaactttaaagtagttttttccaattctgtgaagaaagtcattggtagcttgatggggatggcattgaatctgtaaat

SEQ ID NO: 69572 - DNA, 120 bp, synthetic construct
  source 1..120: mol_type = other DNA
ataaatctgtgtggtttttttcgttttgtttggtttcatgttttttttttttttttttgagacggagtttcgctcttgttgcccagtctggagtgcaatggcgtgatgtcggctcactgc

SEQ ID NO: 69573 - DNA, 120 bp, synthetic construct
  source 1..120: mol_type = other DNA
gctcacacctagattgttgcaaggatgttgtacaggttgagcatccctaatctgaagatccgaaaccctaggctccaaaatctgaacaattttgagcactaatgtggtgcctcggtggaa

SEQ ID NO: 69574 - DNA, 120 bp, synthetic construct
  source 1..120: mol_type = other DNA
aatagtgccgcaataaacatacgtgtgcatgtgtctttagagcagcatgatttatagtcctttgggtatatacccagtaatgggatggctgggtcaaatggtatttctagttctagatcc

SEQ ID NO: 69575 - DNA, 120 bp, synthetic construct
  source 1..120: mol_type = other DNA
ttacagattcaatgccatccccatcaagctaccaatgactttcttcacagaattggaaaaaactactttaaagttcatatggaaccaaaaaagagcccgcatcgccaagtcaatcctaag

SEQ ID NO: 69576 - DNA, 120 bp, synthetic construct
  source 1..120: mol_type = other DNA
gaaaagcaagaacaaacacattcaaaagctagcagaaggcaagaaataactaaaatcagagcagaactgaaggaaatagagacacaaaaaacccttcaaaaaatcaatgaatccaggagc

SEQ ID NO: 69577 - DNA, 120 bp, synthetic construct
  source 1..120: mol_type = other DNA
aaataataagagctatctatgacaaacccacagccaatatcatactgaatgggcaaaaactagaagcattccctttgaaaactggcacaagacagggatgccctctctcaccgctcctat

SEQ ID NO: 69578 - DNA, 120 bp, synthetic construct
  source 1..120: mol_type = other DNA
gtcacccagtccgtggtattttctatggcagccctaatagatgaatgcaattgattactgcaaaattcatggtggtagaaatttgctgatgtcctccataacattcacttttgggagagc

SEQ ID NO: 69579 - DNA, 120 bp, synthetic construct
  source 1..120: mol_type = other DNA
tttttttttgtgtgtgtgtgtgtgtgtgagtgtaactgaaataagtttgatatgtgtcccacccaaatctcatcttgaattgtaatccccagtataggaggtggggcccagtaagaggga

SEQ ID NO: 69580 - DNA, 120 bp, synthetic construct
  source 1..120: mol_type = other DNA
gatagttagctcctcttgttgaattgatccctttaccattatgtaatgtccttctttgtctcttttgatctttgttggtttaaagtctattttatcagagactaggattgcaacccctgc

SEQ ID NO: 69581 - DNA, 120 bp, synthetic construct; identical to SEQ ID NO: 54568
  source 1..120: mol_type = other DNA

SEQ ID NO: 69582 - DNA, 120 bp, synthetic construct
  source 1..120: mol_type = other DNA
atataaaaattagacagcagcattctcagaaacttctatgtggtgtctgcattcaagtcacagaattgaacatcccctcacatagagcagttgtgcagcactctatttgtagtatctcga

SEQ ID NO: 69583 - DNA, 120 bp, synthetic construct
  source 1..120: mol_type = other DNA
aagcattcgcagaatcacgtttgtgatgtgtgcactcaactgtcagaattgaacctttgtttggacagagcacttttgaaacactctttttgtaggatctgcaggtggatatttggctag

SEQ ID NO: 69584 - DNA, 120 bp, synthetic construct
  source 1..120: mol_type = other DNA
acattgacatggtttaatttccggaatgctcagttatttaagtgtggactaaatggctggtattatcacttacaaaagtgtcttgaccttgatggagcttatattgagaaataaagtgtg

SEQ ID NO: 69585 - DNA, 120 bp, synthetic construct
  source 1..120: mol_type = other DNA
ttggctctctgtttgtctgctgttggtgtataagaatgcttgtgatttttgtacattgattttgtatcctgagactttgctgaagttgcttatcagcttaaggagattttgggctgagac

SEQ ID NO: 69586 - DNA, 120 bp, synthetic construct
  source 1..120: mol_type = other DNA
gtgtttgtagtattctctgatggtagtttgtatttctgtgggatcggtggtgatatcccctttatcattttttattgtgtctatttgattcttctctctttttttctttattagtcttgc

SEQ ID NO: 69587 - DNA, 120 bp, synthetic construct
  source 1..120: mol_type = other DNA
tacatttctaggcacatacaacctaccaagattgaagcatgaagaaatccaaaacctgaacaatccaataacaaataacaagaccgaggcccatagtgaaaagttgcccagtttaaacaa

SEQ ID NO: 69588 - DNA, 120 bp, synthetic construct
  source 1..120: mol_type = other DNA
aatggttgaactagtttacagtcccaccaacagtgtaaaagtgttcctatttctccgcatcctctccagcacctgttgtttcctgactttttaatgattgccattctaactggtgtgaga

SEQ ID NO: 69589 - DNA, 120 bp, synthetic construct
  source 1..120: mol_type = other DNA
tgtgatgcctccagctttgttcttttggcttaggattgacttggcaatgcgggctcttttttggttccatatgaactttaaagtagttttttccaattctgtgaagaaagtcattggtag

SEQ ID NO: 69590 - DNA, 120 bp, synthetic construct
  source 1..120: mol_type = other DNA
aataatatcaatatgtgtccagtacagcccactctcctgacctcaagtctacagtaagaaatacatttacattggccgggcgctggggctcacgcctataatcccagcattttgggaggc

SEQ ID NO: 69591 - DNA, 120 bp, synthetic construct
  source 1..120: mol_type = other DNA
cctcccaggctcaagcgattctcctgcctcagcctcccgagtaactgggatgctgggattacaagtgcctgccatcctgcccaactaatttttgtatttttttttttttttttttttttt

SEQ ID NO: 69592 - DNA, 120 bp, synthetic construct
  source 1..120: mol_type = other DNA
tggtgtagcacatctcacagtccaaggcgtagattcctggataagcgtctctggacaactctttcttgaaggtctccacgaagccatcgaggctctccttgcggccgtcccgcacgtgct

SEQ ID NO: 69593 - DNA, 120 bp, synthetic construct
  source 1..120: mol_type = other DNA
ttctggggctccgcctggatgtccacaaatgctgaggcctgcttgtgcatctggggcacccagagcccgaagctctgggcaggctgatgagagggcagtgggaattctggagcctcgagg

SEQ ID NO: 69594 - DNA, 120 bp, synthetic construct
  source 1..120: mol_type = other DNA
tgatgagatgggtggtagggactcctcggagtagaggagtagagttttactattatgactaggaggcaaataaaaagaagctgaacgtgatccataataaaagaagcacacactcacaga

SEQ ID NO: 69595 - DNA, 120 bp, synthetic construct
  source 1..120: mol_type = other DNA
ttccgactcctgtgccctgtttctcctttattggaacccaagaacgagtaaacatagcattttcaaacatcccgcccccttccctggtaacaccaatattccaccatcctaattccctca

SEQ ID NO: 69596 - DNA, 120 bp, synthetic construct
  source 1..120: mol_type = other DNA
gaatcacttcaacctgggaggcagaggttgtagtgactcgaaatcacgccactgcactccagcctgggcgacgcgagcgaaactctgtctcaaaaaaccaaaaaaaattaaacataaaaa

SEQ ID NO: 69597 - DNA, 120 bp, synthetic construct
  source 1..120: mol_type = other DNA
agaaggggtctaagtgataaaggaaaataaaattccgggaacggtaaaatcaatcagaaatgccctacttcagtgctttccgaaatttgtctgacagagtggaaatccagtttttcacta

SEQ ID NO: 69598 - DNA, 120 bp, synthetic construct
  source 1..120: mol_type = other DNA
tatatctcttaatgttatccctccccctccccccgcccatgacaggccccggtgtgtgatgttcccctttctgcgtccaagtgttctcctagttcaattcccacctatgagtgggatcac

SEQ ID NO: 69599 - DNA, 120 bp, synthetic construct
  source 1..120: mol_type = other DNA
attgctttcagagaatatctttatttctgccttcatttcgttatgtacccagtactcattcaggagcagcttgtccggtttccatgcagttgagcggttttgagtgactttctcaatcct

SEQ ID NO: 69600 - DNA, 120 bp, synthetic construct
  source 1..120: mol_type = other DNA
ccgaggggccgcggcagggattccgggggaccgggagtggggggttggggttactcttggctttttgccctctcctgccgccggctgctccagtttctttcgctttgcggcgaggtgggc

SEQ ID NO: 69601 - DNA, 120 bp, synthetic construct
  source 1..120: mol_type = other DNA
cccttcccctggccagtgaagaggacggcgcctccgggccgctcggggtgcgggaaggggtagccgttctccttgagctggtcctgggtgagcaggaactcctggaggcggctgtacagg

SEQ ID NO: 69602 - DNA, 120 bp, synthetic construct
  source 1..120: mol_type = other DNA
gtgggaaccagcagggagctgtggctcgcaacatcttgctgccttcgggagcaccggccgggctctgctccgctcccaaatggcggcttgcctccggggccgcctccttggccaccttct

SEQ ID NO: 69603 - DNA, 120 bp, synthetic construct
  source 1..120: mol_type = other DNA
acttgattccattaaattcacccaacaggcctccagagaacatattactgctttgatattacaaagggaaaaacagctatggcgtctctgaaaagcacaacgtgctaggactggaatgac

SEQ ID NO: 69604 - DNA, 120 bp, synthetic construct
  source 1..120: mol_type = other DNA
ccttctgctagcttttgaatgtgtttgctcttgcttctctcatccttttaatggtgatgttagggtatgcatttttgatctttcctgctttcccttgtgggcatttagtgctataaattt

SEQ ID NO: 69605 - DNA, 120 bp, synthetic construct
  source 1..120: mol_type = other DNA
cgcttagagctggtggtggcggtggtcttgcatgccatccctgacctgttgcgagtcttccctggctgtctgccgaccttggagccacgggagcgttggctgctgctggccacccgggtt

SEQ ID NO: 69606 - DNA, 120 bp, synthetic construct
  source 1..120: mol_type = other DNA
ctgtccctgcagggcagtcctataatggctactggaattgggctacctaggattaaattaaggttcagggaggttggtcaacttgcttgggcccacacagcaccccttggagccaggact

SEQ ID NO: 69607 - DNA, 120 bp, synthetic construct
  source 1..120: mol_type = other DNA
gggttttctaaatattcaatcgtgtcatctacaaacagggacaatttgacttcctcttttcctaattgattactctttgtttctttctcctgcctgattgccctggccagaagttccaac

SEQ ID NO: 69608 - DNA, 120 bp, synthetic construct
  source 1..120: mol_type = other DNA
ttgcctagaggtgttgacagtattctctcatggtagtttgtacttctgtgggatcagtggtgatatcccctttatcattttttattgcatctgcttgattcttcttcctttcattcttta

SEQ ID NO: 69609 - DNA, 120 bp, synthetic construct
  source 1..120: mol_type = other DNA
cttttgatcacactttaaagaccaaaaggtagaagcgcaaagacgttatctgtccaatattacaaacctagtaagtggtggaatttggccttgaacccagatctgtaactccagagccga

SEQ ID NO: 69610 - DNA, 120 bp, synthetic construct
  source 1..120: mol_type = other DNA
ccaccttactgtaaaccacatcctaaaattgtctgcagtgcaaatggattatgtgcatccaacaggaaacagcataggttgagaagctgttacttaatagcttcattgtcaccacgagtg

SEQ ID NO: 69611 - DNA, 120 bp, synthetic construct
  source 1..120: mol_type = other DNA
cacgtatagaatccatttttactgacacaaatttagtaccaataaacgactcttcttctcaatttgttttatttaacaataagtcttgaacgtcattcccagttaacattttgaagagtt

SEQ ID NO: 69612 - DNA, 120 bp, synthetic construct
  source 1..120: mol_type = other DNA
ggttttgttctggtattcactggcaagctcctcacactgggatgggtctactctttgacccaggggtaagttttgattagtttaagtcaatcatggcatttttttggccaatgattagtt

SEQ ID NO: 69613 - DNA, 120 bp, synthetic construct; identical to SEQ ID NO: 69596
  source 1..120: mol_type = other DNA

SEQ ID NO: 69614 - DNA, 120 bp, synthetic construct
  source 1..120: mol_type = other DNA
aaatccccacagaaggggtctaagtgataaaggaaaataaaattccgggaacggtaaaatcaatcagaaatgccctacttcagtgctttccgaaatttgtctgacagagtggaaatccag

SEQ ID NO: 69615 - DNA, 120 bp, synthetic construct
  source 1..120: mol_type = other DNA
tgtgcgatcgttttaaggcttgccatgtgctgcttcattcagtccgcaccatgacattaggatcacactttcgttttccattttttttaaaattatactttaattactagggtacatgtg

SEQ ID NO: 69616 - DNA, 120 bp, synthetic construct
  source 1..120: mol_type = other DNA
cgacggttgtagatgtgtcgtattatttctgagggctctattctgttccattggtctacagtaaccaaaaaggcaaccaacagcatgctgtttggttactgtaggcttgtagtgtagttt

SEQ ID NO: 69617 - DNA, 120 bp, synthetic construct
  source 1..120: mol_type = other DNA
tggattatgtttattgatttgcatatgttggaccagccttgcatgtcagggatgaagcccacttgatcataatggataagctctttgatgtgctgctggattcggtttgccagcatttta

SEQ ID NO: 69618 - DNA, 120 bp, synthetic construct
  source 1..120: mol_type = other DNA
agacgttatctgtccaatattacaaacctagtaagtggtggaatttggccttgaacccagatctgtaactccagagccgaagtgcttcacccacctccctgtggtgcctctacagaaaaa

SEQ ID NO: 69619 - DNA, 120 bp, synthetic construct; identical to SEQ ID NO: 69592
  source 1..120: mol_type = other DNA

SEQ ID NO: 69620 - DNA, 120 bp, synthetic construct
  source 1..120: mol_type = other DNA
tggggcggctggcaagcggcaggccgatcccctctgcgcagggaagtagcacgactccgtcaccatcttgggccacgctgggggcaccgccggacccctgttctggggctccgcctggat

SEQ ID NO: 69621 - DNA, 120 bp, synthetic construct
  source 1..120: mol_type = other DNA
tcagtttcaatgggcagtccttaggaattcaccttacgggctgctttcattccttctaaattctttttgtttcctaatgataaaaagtctccttgccttgcttggaaagatgagagaaag

SEQ ID NO: 69622 - DNA, 120 bp, synthetic construct; identical to SEQ ID NO: 69594
  source 1..120: mol_type = other DNA

SEQ ID NO: 69623 - DNA, 120 bp, synthetic construct; identical to SEQ ID NO: 69596
  source 1..120: mol_type = other DNA

SEQ ID NO: 69624 - DNA, 120 bp, synthetic construct; identical to SEQ ID NO: 69597
  source 1..120: mol_type = other DNA

SEQ ID NO: 69625 - DNA, 120 bp, synthetic construct
  source 1..120: mol_type = other DNA
ttccccatttcttgtttttgtcaggtttgtcaaagatccgatggttgtagatgtgtcgtattatttctgagggctctattctgttccattggtctacagtaaccaaaaaggcagccaaca

SEQ ID NO: 69626 - DNA, 120 bp, synthetic construct
  source 1..120: mol_type = other DNA
catctgttgagataatcacgcggtttctgtctttggttccgattatatgctggattatgtttattgatttgcatatgttggaccagccttgcatgtcagggatgaagcccacttgatcat

SEQ ID NO: 69627 - DNA, 120 bp, synthetic construct
  source 1..120: mol_type = other DNA
gagattctggtatgttgtgtctttgttctcattgctttcagagaatatctttatttctgccttcatttcgttatgtacccagtactcattcaggagcagcttgtccggtttccatgcagt

SEQ ID NO: 69628 - DNA, 120 bp, synthetic construct; identical to SEQ ID NO: 69600
  source 1..120: mol_type = other DNA

SEQ ID NO: 69629 - DNA, 120 bp, synthetic construct
  source 1..120: mol_type = other DNA
gtcctgggtgagcaggaactcctggaggcggctgtacagggcggccctgctgaggccgggcatggagctgggggtcaggcccttcagtctcttgagggtgttcaggaccacgttcaggta

SEQ ID NO: 69630 - DNA, 120 bp, synthetic construct
  source 1..120: mol_type = other DNA
tatagacaagcaaatgctgagagattttgtcaccaccaggcctgccctaaaagagctcctgaaggaagcactaaacatggaaaggaacaaccggtaccagccgctgcaaaatcatgccaa

SEQ ID NO: 69631 - DNA, 120 bp, synthetic construct; identical to SEQ ID NO: 69518
  source 1..120: mol_type = other DNA

SEQ ID NO: 69632 - DNA, 120 bp, synthetic construct; identical to SEQ ID NO: 67781
  source 1..120: mol_type = other DNA

SEQ ID NO: 69633 - DNA, 120 bp, synthetic construct
  source 1..120: mol_type = other DNA
ggacatctacaccgaaaacccatctgtacatcaccatcatcaaagaccaaaagtagataaaaccacaaagatggggaaaaaacagaacagaaaaactggaaactctaaaacacagagcgc

SEQ ID NO: 69634 - DNA, 120 bp, synthetic construct
  source 1..120: mol_type = other DNA
taagtgtcctgtctgacagctttgaagagagcagtggttctcccagcacgcagctggagatctgagaacgggcagactgcctcctcaagtgggtccctgacccctgacccccgagcagcc

SEQ ID NO: 69635 - DNA, 120 bp, synthetic construct
  source 1..120: mol_type = other DNA
gaaggaaaaaatgttaagggcagccagagagaaaggtcgggttacccacaaagggaagcccatcagactaacagctgatctctcggcagaaaccctacaagccagaagagactgggggcc

SEQ ID NO: 69636 - DNA, 120 bp, synthetic construct
  source 1..120: mol_type = other DNA
gcgctgcacccactaatgtgtcatctagcattaggtatatctcccaatgctatccctcccccctcccccgaccccaccacagtccccagagtgtgatattccccttcctgtgtccatgtg

SEQ ID NO: 69637 - DNA, 120 bp, synthetic construct
  source 1..120: mol_type = other DNA
ctttctacatatggctagccagttttcccagcaccatttattaaatagggaatcctttccccattgcttgtttttctcaggtttgtcaaagatcagatagttgtaggtatgcggcgttat

SEQ ID NO: 69638 - DNA, 120 bp, synthetic construct
  source 1..120: mol_type = other DNA
catcagcccaccccaaagagtcttacttaattgaattccgatatgatctgggtatcagaattacttaaagtgctccaggggacgtttatgcagcagactgtatttaagaaacaaattctt

SEQ ID NO: 69639 - DNA, 120 bp, synthetic construct
  source 1..120: mol_type = other DNA
gaagtgaggagcgcctcttcccagccgcgatcacatctaggaagtgaggagcgtctctgcccggccgcccatcgtctgagatgtggggagcgcctctgccccgccgccccatctgggatg

SEQ ID NO: 69640 - DNA, 120 bp, synthetic construct
  source 1..120: mol_type = other DNA
tgctgaggagagctttacttccaactatgtggtcaattttggaataggtgtggtgtggtgctgaaaaaaatgtatattttgttgatttggggtggagagttctgtagatgtctattaggt

SEQ ID NO: 69641 - DNA, 120 bp, synthetic construct
  source 1..120: mol_type = other DNA
ccccaatctagcaaggcaggccaacgttcagattcaggaaatacagagaacgccacaaagatactcctcgagaagagcaactccaagacacataattgtcagattcaccaaagttgaaat

SEQ ID NO: 69642 - DNA, 120 bp, synthetic construct
  source 1..120: mol_type = other DNA
tggtgtaatctttttgctggtagagggtcttgcctcattgatgggtgttggtcactgatcagggtggtggtcacttaaggttgcggtggctgtggctatatatatatatataaaactata

SEQ ID NO: 69643 - DNA, 120 bp, synthetic construct
  source 1..120: mol_type = other DNA
cttgggatagcagatatttcttaaacaggacacaagaagtgaaaaggcaagccacagcctggaataataattttatcataatatatgtatatgtttctatctgagaaagtactcataccc

SEQ ID NO: 69644 - DNA, 120 bp, synthetic construct
  source 1..120: mol_type = other DNA
cgtccgggaggtgaggggcgcctctgcccagccgcccctactgggaagtgaggagcccctctgcccggccaccaccccgtctgggaggtgtgcccaacagctcattgagaacgggccagg

SEQ ID NO: 69645 - DNA, 120 bp, synthetic construct
  source 1..120: mol_type = other DNA
agcagtggaactgagatttgaacctagacctgcctgatttctaactcccgtactatgttcttgaaactatggtctttctgacttaaagtacatatggaggagagaagtaaggccaagaag

SEQ ID NO: 69646 - DNA, 120 bp, synthetic construct
  source 1..120: mol_type = other DNA
atattccatatatatatattccgtatacatattccgtatatatatattccgtatacatattccgtatatatatattccgtatacatattccgtatatatatattccgtatacatattccg

SEQ ID NO: 69647 - DNA, 120 bp, synthetic construct
  source 1..120: mol_type = other DNA
ccagaagactccatctactccatctactctgagggttcagagaaggattcttgaggaattgaaaacagtagtgatccatgactctgaaggatgtagttttgcttattatgtattcaggta

SEQ ID NO: 69648 - DNA, 120 bp, synthetic construct; identical to SEQ ID NO: 69518
  source 1..120: mol_type = other DNA

SEQ ID NO: 69649 - DNA, 120 bp, synthetic construct
  source 1..120: mol_type = other DNA
catgattttgcagcggctggtaccagttgttcctttccatgtttagcgcttccttcaggagctcttttagggcaggcctggtggtgacaaaatctctcagcatttgcttgtctataaagt

SEQ ID NO: 69650 - DNA, 120 bp, synthetic construct
  source 1..120: mol_type = other DNA
ggcttttgttgccattgcttttggtgttttggacatgaagtccttgcccacgcctatgccctgaatggtaatgcctaggttttcttctagggtttttatggttttaggtctaacgtttaa

SEQ ID NO: 69651 - DNA, 120 bp, synthetic construct
  source 1..120: mol_type = other DNA
gtatcaggagtgaccagggccagggctcagattgtgattgaggtcagggctcaatgtgtatcaggagtgaccagggtcagggctcaggaggtaagggagctcagggtgctctctgaagtt

SEQ ID NO: 69652 - DNA, 120 bp, synthetic construct
  source 1..120: mol_type = other DNA
actgactccaagctctatgctgggctggaagattgtctgaactcggctggtcctgacctaggtaacagagtgcctgatgcccgtctgtgtcccagggggtgggtaggacccacagaagtg

SEQ ID NO: 69653 - DNA, 120 bp, synthetic construct
  source 1..120: mol_type = other DNA
gtaggacccacagaagtgtccgtctgtgtcccagggggcgggtaggacccacagaagtgtccctctgtgtcccaggaggcgggtaggacccacagaagtgtccgtctgtgtcccaggggg

SEQ ID NO: 69654 - DNA, 120 bp, synthetic construct
  source 1..120: mol_type = other DNA
tcatctccctgacccccagcaccctcatctccctgacccccagcaccctcatcccctgacccccagcaccctcactccctgacccccagcaccctcatcccctgacccccagcaccctca

SEQ ID NO: 69655 - DNA, 120 bp, synthetic construct
  source 1..120: mol_type = other DNA
tatttgggctactgcaaaatgcatggtcatcctccagcagttctggaaaagggacggtgcaatccttcacttcaaactttagatctgaggctcttttttgcacttttgtgcaggttattc

SEQ ID NO: 69656 - DNA, 120 bp, synthetic construct
  source 1..120: mol_type = other DNA
agcttggaagagtgtttctttgagaagctagaggatttgaaatgccaacctatgctgggaaatctagaaaaccacaagctcctagggcaggacagatgctaagacagtgtctaattataa

SEQ ID NO: 69657 - DNA, 120 bp, synthetic construct
  source 1..120: mol_type = other DNA
aacacaatcatcacagggtcctgaggcaatatacatcctcctcagcttacgaagatgatgggattaaaagattaaagacaggcataggaaatcacaagggtattgattggggaagtgata

SEQ ID NO: 69658 - DNA, 120 bp, synthetic construct
  source 1..120: mol_type = other DNA
acaccagggtgccattaaaaatactgcagagtaggttacttaacaacagaaattaattattctctcacagttccggaagccagaagagactaaagtgtcccaggttgggttttgccggag

SEQ ID NO: 69659 - DNA, 120 bp, synthetic construct
  source 1..120: mol_type = other DNA
caaggttgcgccattgcactccagcctgggcagtaagagtgaaactccgtctcaaaaaaaaaattccagccaacagatgcatatgtaatgttggaatcagaaacgagtttacaagaaata

SEQ ID NO: 69660 - DNA, 120 bp, synthetic construct
  source 1..120: mol_type = other DNA
cagtgaaatctaagtgcagatcccatatttccaataaaaaggtaacatccaaactcagatgtcctatgagtataaaatacacaaagatcttctggacttagtatgaaaagggattttttt

SEQ ID NO: 69661 - DNA, 120 bp, synthetic construct
  source 1..120: mol_type = other DNA
ctgggctcggaggactcgccactgctcaaaggcagtgaggattttcgcactagaagctggaggacagggatccttgttaggtaggagcagaaagcttagaaaagtggtctcctgcagtta

SEQ ID NO: 69662 - DNA, 120 bp, synthetic construct
  source 1..120: mol_type = other DNA
aaggcagagccaagagacatggaatcttcccacatcttaaaacctgtttagggaacaccagcgtctgcccagctggatttcagaaccaccattccttcatccctcccctgctgcctcttt

SEQ ID NO: 69663 - DNA, 120 bp, synthetic construct
  source 1..120: mol_type = other DNA
tcatgtggccaataaagtgcatgactagtcaacaaataaattttctcttggctaaaacttgcaacaaaactgtaagctgtttaccaaggggcccactacaggttatattcaatatataca

SEQ ID NO: 69664 - DNA, 120 bp, synthetic construct
  source 1..120: mol_type = other DNA
aatctccttaagctgataagccacttcggcaaagtctcaggatacaaactcaatgtacaaaaatcacaagcattcttatacaccaacaacagacaaacagagagccaaatcatgagtgaa

SEQ ID NO: 69665 - DNA, 120 bp, synthetic construct
  source 1..120: mol_type = other DNA
gttgcgaaaattttctcccatgttgtaggttgcctgttcactctgatggtagtttcttttgctgtgcagaagctctttagtttaattagatcccatttgtcaattttggcttttgttgcc

SEQ ID NO: 69666 - DNA, 120 bp, synthetic construct
  source 1..120: mol_type = other DNA
cttgactctttatccaacttgccagtctgtgtcttttaattggagaatttattccatttacatttaaagttaatattatgtgtgaatttgatcctgtcattatgatgttagctggtgatt

SEQ ID NO: 69667 - DNA, 120 bp, synthetic construct
  source 1..120: mol_type = other DNA
aagcacttctctgtattggttattctagttatacattcttctaaatttttttcaaagttttcaacttctttgcctttggtttgaatgtcctcccgtagctcagagtaatttgatcgtctg

SEQ ID NO: 69668 - DNA, 120 bp, synthetic construct
  source 1..120: mol_type = other DNA
agtccaggaccagatggattcacagccgaattctaccagaggtacaaggaggaactggtaccattccttctgaaactattccaatcaatagaaaaacagggaatcctccctaactcattt

SEQ ID NO: 69669 - DNA, 120 bp, synthetic construct
  source 1..120: mol_type = other DNA
gggatggcattgaatctgtaaattaccttgggcagtatggccattttcacgatattgattcttcctacccatgagcatggaatgttcttccatttgtttgtgtcctcttttatttccttg

SEQ ID NO: 69670 - DNA, 120 bp, synthetic construct
  source 1..120: mol_type = other DNA
ccatcacattcctacaattatgacttcaacatatccattttcagttcccacccctacctgggtcctagtaatactaattgcctacaagatatttattaaatttaaaactactcctcttcc

SEQ ID NO: 69671 - DNA, 120 bp, synthetic construct
  source 1..120: mol_type = other DNA
gcttctgggtagcctgagaaggcacgagcctatattcaaaagcacaggcttgcagtttgtagacagaacatggactaatttggaaacatgaagaatccatgaataaactttaaaaggggt

SEQ ID NO: 69672 - DNA, 120 bp, synthetic construct
  source 1..120: mol_type = other DNA
ataacgccgcatatctacaactatctgatctttgacaaacctgagaaaaacaagcaatggggaaaggattccctatttaataaatgtgctgggaaaactggctagccatatgtagaaagc

SEQ ID NO: 69673 - DNA, 120 bp, synthetic construct; identical to SEQ ID NO: 69566
  source 1..120: mol_type = other DNA

SEQ ID NO: 69674 - DNA, 120 bp, synthetic construct
  source 1..120: mol_type = other DNA
tttccaccattgagctcaaagcactccaagtatccacttgcagattctacaaaaagagtgtttcaaaactgctcaatcaaaacaaagtttcaactctgtgagatgaatgcacacatcaca

SEQ ID NO: 69675 - DNA, 120 bp, synthetic construct
  source 1..120: mol_type = other DNA
tagatcacagaggagtttctcaaaatgcttctgtctggttttgatgtgaagatatttacttttccaccatagaatgtaaagcgctccaaatatccacttgcagacactacaaaaagagta

SEQ ID NO: 69676 - DNA, 120 bp, synthetic construct
  source 1..120: mol_type = other DNA
agaaggaatgctcagtcatgaataagggtgaccccgttgtgatctgagcattataggatcatagtaactacaaccagtcttccatcattccatggaaattgcatgtatgccacgttgcct

SEQ ID NO: 69677 - DNA, 120 bp, synthetic construct
  source 1..120: mol_type = other DNA
tcctgatatcctggtttcagacaccacacacttagcaactattacacacttagcattattattattattattattattattattattattattattttaatcaccatctccaccttctta

SEQ ID NO: 69678 - DNA, 120 bp, synthetic construct
  source 1..120: mol_type = other DNA
atgttgtagtagaggccaactgatattccattgttattcatttatacacaggtacatatatggtgtgtgtacgcaaatatataaatattcatatatgtgtacatgtgtacatacatacat

SEQ ID NO: 69679 - DNA, 120 bp, synthetic construct
  source 1..120: mol_type = other DNA
tccaagtctttgctattgtgaataatgccacaataaacatacgtatgcatgtgtctttatagcggcatgatttatagtcctttgggcatatagccagtaatgggatggctgggtcaaagg

SEQ ID NO: 69680 - DNA, 120 bp, synthetic construct
  source 1..120: mol_type = other DNA
ttctcaggtttgtcaaagatcagatagttgtagatatgtggcgttatttctgagggctctgttctgttccattgatctatatctctgttttggtacctgtaccatgctgttttggttact

SEQ ID NO: 69681 - DNA, 120 bp, synthetic construct
  source 1..120: mol_type = other DNA
ctcccatttcagcctcctgagtagctgggactccaggtgtgtaccatgactcctggctaattttggtttaagtagagatacagtctggctatgttgcccaggctggtcttgaactcctgg

SEQ ID NO: 69682 - DNA, 120 bp, synthetic construct
  source 1..120: mol_type = other DNA
cttgggaagctgaggtgggaggattgcttgagatcaggagtttgagtccagcctgggcaacacacgtgtataggtctatgagtctggaagaatgtatatagccatggaatcactaccatg

SEQ ID NO: 69683 - DNA, 120 bp, synthetic construct
  source 1..120: mol_type = other DNA
aacgatttgaggcactgcgacaatgcagaatggggagggattttggaaaatgtgactcactcaccgttccgaccaaagggtaaatgaacccagcacctatgctggcccggacatcactga

SEQ ID NO: 69684 - DNA, 120 bp, synthetic construct
  source 1..120: mol_type = other DNA
tgccttgcccccacaaagtgctgggattacaggtgtgagcaccgtgcctggttgacacgacttttaaggagtatttccttgatagagataaagggaatgaaatctttagtcaaattttca

SEQ ID NO: 69685 - DNA, 120 bp, synthetic construct
  source 1..120: mol_type = other DNA
tgatccttttggtaaaaggtggctgagcctcctataatggagttgattcatcatgactgtcactggactaggtgatgacacatgctgtcagatcgtagccactttcccagctgtttgcct

SEQ ID NO: 69686 - DNA, 120 bp, synthetic construct
  source 1..120: mol_type = other DNA
agcacctgttgatcctgactttttaatgattgccattctaactggtgtgagatgatatctcatagtggttttgatttgcatttctctgatggccagtgatgatgagcattttttcatgtg

SEQ ID NO: 69687 - DNA, 120 bp, synthetic construct
  source 1..120: mol_type = other DNA
acaagggatgtgaaggacctcttcaaggagaactacaaaccactgctcaaggaaataaaagaggacacaaacaaatggaagaacattccatgctcatgggtaggaagaatcaatatcgtg

SEQ ID NO: 69688 - DNA, 120 bp, synthetic construct
  source 1..120: mol_type = other DNA
tggtctttggcaccctctacaggacagttccattcccacacctgagctttggacaactgaatcctatgccccttcccacccagggaacctggtgccagaaattcccaggacttacccacc

SEQ ID NO: 69689 - DNA, 120 bp, synthetic construct
  source 1..120: mol_type = other DNA
gttgggaggaccagcggtagagcagagatggcagggatgcactgggctgggctgtcagcagaccatgggggtgggacgaggagagagctgaagaccaccggcagtggaccacagggggag

SEQ ID NO: 69690 - DNA, 120 bp, synthetic construct
  source 1..120: mol_type = other DNA
ggggccaagttctgtgtcctccagccctagtgacctctctttggctcctcagcatctacaaatctgaaggacaaaacatggttcaagcatctgggcacaggcggtaagtaccccaccctc

SEQ ID NO: 69691 - DNA, 120 bp, synthetic construct
  source 1..120: mol_type = other DNA
cctctccttgctctgttttttcccataggagctggtaccttcgcttatacaaatgtacttacttattacatttcattgctgtcagctccacgcaagcagggatatttgcctgttgtacac

SEQ ID NO: 69692 - DNA, 120 bp, synthetic construct
  source 1..120: mol_type = other DNA
aataagccaccgggcatgttggctcatgcctgaaatccctgcaccttgggaggctgaggctggaggattgcttgagtccaggagtttgggaccagcttgggtaacatggcaaaaccccat

SEQ ID NO: 69693 - DNA, 120 bp, synthetic construct
  source 1..120: mol_type = other DNA
tcctccacatgccccacagtgcccactctttcagctggggcaatgctcatcacactgcatagtaattgctcaattgattgcttttcttcccacaggctggattgtaccagtgtcttttac

SEQ ID NO: 69694 - DNA, 120 bp, synthetic construct
  source 1..120: mol_type = other DNA
ttaggaagaaaaaccgttaattaattaagctttttttttttttcttttttgagacagggtgtcgctctgtcacccacgctggagtgcagtggtgtgatctcagctcactgcaacctctgc

SEQ ID NO: 69695 - DNA, 120 bp, synthetic construct
  source 1..120: mol_type = other DNA
ctgagatcacaccattgcactccagcctgggtgacaggagcaaaactctgtctcaaaaaaaaaaaaaaagaaaagaaaaaagagagagagattgaagagaaacttgatgatcaggctctg

SEQ ID NO: 69696 - DNA, 120 bp, synthetic construct
  source 1..120: mol_type = other DNA
cacatgagacacggggcaagggttgtagatcacatgctacgggggccaagagagcggcaactcagggcggtggggactttggctggctgcagagtgccaatctgtgcaaggctgtagagc

SEQ ID NO: 69697 - DNA, 120 bp, synthetic construct
  source 1..120: mol_type = other DNA
aggctggagtgcagtggtgtgatctcagatcactgcaagctccacctcctgggttcaagcaattctcctgtctcagcctcctgagtagccgggattacaggcaagcaccaccacgcctgg

SEQ ID NO: 69698 - DNA, 120 bp, synthetic construct
  source 1..120: mol_type = other DNA
tcctcgtggtcatcatcagggtgtaccatggcatgaacacaggatatgccatcaatccgtcccgggacctgcccccccgcatcttcaccttcattgctggttggggcaaactggtcttca

SEQ ID NO: 69699 - DNA, 120 bp, synthetic construct
  source 1..120: mol_type = other DNA
tttaataggattgtctgtttttttcttgtaaatttgtttaagttccctgtaaattctggatattagacctttgtcggatggataaatagcaaatttttctcccattctgtaggttgtctg

SEQ ID NO: 69700 - DNA, 120 bp, synthetic construct
  source 1..120: mol_type = other DNA
ggattcggtttgccagtattttattgaggatttttgcatcaatgttcatcaaggatattggtctaaaattctcttttttggttgtgtctctgcctggctttggtatcagaatgatgctgg

SEQ ID NO: 69701 - DNA, 120 bp, synthetic construct
  source 1..120: mol_type = other DNA
gaaaaaaatgtatattctgttgatttggggtggagagttctgtagatgtctattaggtccgcttggtgcagagctgagttcaattcctgggtatccttgttgactttctgtctcatggat

SEQ ID NO: 69702 - DNA, 120 bp, synthetic construct; identical to SEQ ID NO: 67760
  source 1..120: mol_type = other DNA

SEQ ID NO: 69703 - DNA, 120 bp, synthetic construct
  source 1..120: mol_type = other DNA
cactagaattgcaacccctccttttcctgctttccgtttgcttggtaaattttcctccatctctttattttgagcctatgtgtgtctttgcatatgagatggttcacctgaatacagcac

SEQ ID NO: 69704 - DNA, 120 bp, synthetic construct
  source 1..120: mol_type = other DNA
catgcacacgtatgtttattgcggcattattcacaatagcaaagacttggaaccaactcaaatgtccaacaatgatagactggattcagaaaatgtggcacatatacatcatggaatact

SEQ ID NO: 69705 - DNA, 120 bp, synthetic construct
  source 1..120: mol_type = other DNA
attccagcaagatagtctttgagctctgagattctttcctctgcttggtctattcagttatttatgcttgtggttgcattgtgaagttctggtgttgtgtttttcaggtccatcaggtca

SEQ ID NO: 69706 - DNA, 120 bp, synthetic construct
  source 1..120: mol_type = other DNA
tgccccttggcagagagggtgcactgcactggagggaatctcccttgtccagaatgtccagacccttcagagccagcaggcaggaaagactaagtctgctgaaccgcagagactgtggct

SEQ ID NO: 69707 - DNA, 120 bp, synthetic construct
  source 1..120: mol_type = other DNA
tacttccatgtaaagaatttgatatttttcatagttactactggctgttactgtgctattcctaattgtcttgaatgttgcgtatgtagcatgaaatcccaatttttattgaagtaggat

SEQ ID NO: 69708 - DNA, 120 bp, synthetic construct
  source 1..120: mol_type = other DNA
tggaacagatagtcgtgatgtgaaatcctgcaggtgttgtgttctgataatgcatatcctttacaagtttgggtaaattatttgctttgcatataaattaactccaaagctgaatcaaca

SEQ ID NO: 69709 - DNA, 120 bp, synthetic construct
  source 1..120: mol_type = other DNA
aagtgacctattagatgtttgagaatgtgctatactacatcaggtgcacaagttcctgtgaataagaagcaaaaaagctagcactttccccacttctgtttttaaagaataagcttatca

SEQ ID NO: 69710 - DNA, 120 bp, synthetic construct
  source 1..120: mol_type = other DNA
gcacacacacacacacacacactttgtatgcctgtggattgtgtgagagagagaatgagcctgtaaatacagaattatatcagaattcttgtagcaaataagctatcaggaaaattgagc

SEQ ID NO: 69711 - DNA, 120 bp, synthetic construct
  source 1..120: mol_type = other DNA
acggcacaaatcaacctgagttactgtaaactactttatgaaatacttttataaagtattagtacttgcttacagcttataccctgcaaataaagcccacctaaacaatgaagagattgt

SEQ ID NO: 69712 - DNA, 120 bp, synthetic construct
  source 1..120: mol_type = other DNA
tagagtggtaaatatttccacccaaaaccaaccacagatccaagacagagtttcattgtcatagatgagttggacacaatgcaagaacactaagaatgccccattttgagaaaaaaaaaa

SEQ ID NO: 69713 - DNA, 120 bp, synthetic construct
  source 1..120: mol_type = other DNA
aattctgtttttattgcactggtttttttttgtttttttattattattattatactttaataataatagggtacatgtgcacaatgtgcaggttagttacatatgtatacatgtgccatg

SEQ ID NO: 69714 - DNA, 120 bp, synthetic construct
  source 1..120: mol_type = other DNA
ttccccagtgctgtgattccaagttcagtaaaatttagaaaatcatggccaagaaatttagtagaccgaatgtaccttcactttctggaatgtacttgtaaccctacattcacagttaga

SEQ ID NO: 69715 - DNA, 120 bp, synthetic construct; identical to SEQ ID NO: 69636
  source 1..120: mol_type = other DNA

SEQ ID NO: 69716 - DNA, 120 bp, synthetic construct
  source 1..120: mol_type = other DNA
ttttggcttttgttgccattgcttttggtgttttggacatgaagtccttgcccacgcctatgtcctgaatggtaatgcctaggttttcttctagggtttttatggttttaggtctaacgt

SEQ ID NO: 69717 - DNA, 120 bp, synthetic construct
  source 1..120: mol_type = other DNA
gcagtgaaattattatctatgattctgtaatggtggatacatgacatcatgcatttagcaaaacccatggaactgtataatacaaagagtgaaccctaatgtaaactctggtctttagtc

SEQ ID NO: 69718 - DNA, 120 bp, synthetic construct
  source 1..120: mol_type = other DNA
gctgccatgaccagggtcccactgacaagggtctcactgatgaggacatgccctgctgactaggtgccatgtgaccaggcctccactgaatagcaccccttgaccgggtcaccagtgacc

SEQ ID NO: 69719 - DNA, 120 bp, synthetic construct
  source 1..120: mol_type = other DNA
agggatttcttttctttcaaggtacaatgatggtacaggcattgtgtaagctttctcaatccaaagggaagaaatttcccataaaaataacacaaatgggaccacaggcctaatggaagt

SEQ ID NO: 69720 - DNA, 120 bp, synthetic construct
  source 1..120: mol_type = other DNA
cttgatattaggtacaatataacagtggggatgtgtaccccctgggatattgggagtaatattaatctcttcccctgtggatgttaggaacaatatcacagaaggggtgtatacccccag

SEQ ID NO: 69721 - DNA, 120 bp, synthetic construct
  source 1..120: mol_type = other DNA
acagccacccggtgatattgctcctagtattcacggaagaagcgtaggatattacttccaaaatcgcagggagtgtacacctcttctgtgatattgttcctggtatcccgagggggagag

SEQ ID NO: 69722 - DNA, 120 bp, synthetic construct
  source 1..120: mol_type = other DNA
atcccttaaactttgattttatacaacacatgtttttgtgagctccaggttgggtcaaagtggctggggccaagcggctagggcaaagctacaaattaacaacatctcagcaaagcaatt

SEQ ID NO: 69723 - DNA, 120 bp, synthetic construct
  source 1..120: mol_type = other DNA
tgtttttaatgcagcgtgggaggggaggatatgacacgcgatatcgcaggtagtagaaacacccctttgatagtgttcttaatattcagggaggaagaagatgatgttactcccaataca

SEQ ID NO: 69724 - DNA, 120 bp, synthetic construct
  source 1..120: mol_type = other DNA
ttgcttctctagttctttcaattgtgatgttagggtgtcaattttagatctttcctgctttctcttgtgggcatttagtgctataaatttccctctacacactgctttgaatgtgtccca

SEQ ID NO: 69725 - DNA, 120 bp, synthetic construct
  source 1..120: mol_type = other DNA
ttttgcagtggctgttactggttattcctttccatgtttagtgcttccttcaggagctgttttacagcaggtctggtggtgacaaaaatctctcagcatttgcttgtctgtaatgtactt

SEQ ID NO: 69726 - DNA, 120 bp, synthetic construct
  source 1..120: mol_type = other DNA
gatccatgggctgcagcttggatgttgcattagccactataaaaacactaatctccttgtacatctctatcgagctcttagggtgcattgacaatgcgcagtaacattttgaaagaattc

SEQ ID NO: 69727 - DNA, 120 bp, synthetic construct
  source 1..120: mol_type = other DNA
attgtgccactgcactccagactgggtgacaaagcaaaaccctgtctgtaaaaatacaaatatacaggtagaattatacatatatacagatagaattatatcatatatatatctatatct

SEQ ID NO: 69728 - DNA, 120 bp, synthetic construct; identical to SEQ ID NO: 32679
  source 1..120: mol_type = other DNA

SEQ ID NO: 69729 - DNA, 120 bp, synthetic construct; identical to SEQ ID NO: 32680
  source 1..120: mol_type = other DNA

SEQ ID NO: 69730 - DNA, 120 bp, synthetic construct
  source 1..120: mol_type = other DNA
tagattactggtaacatagggaggaaggcaaatattgaggggtgaaggctaagtgaagcagagtttctttttggggtgatgaaaatgttctaaaattgattgtggtgatacatgcataac

SEQ ID NO: 69731 - DNA, 120 bp, synthetic construct; identical to SEQ ID NO: 32667
  source 1..120: mol_type = other DNA

SEQ ID NO: 69732 - DNA, 120 bp, synthetic construct; identical to SEQ ID NO: 32668
  source 1..120: mol_type = other DNA

SEQ ID NO: 69733 - DNA, 120 bp, synthetic construct; identical to SEQ ID NO: 32669
  source 1..120: mol_type = other DNA

SEQ ID NO: 69734 - DNA, 120 bp, synthetic construct; identical to SEQ ID NO: 32670
  source 1..120: mol_type = other DNA

SEQ ID NO: 69735 - DNA, 120 bp, synthetic construct; identical to SEQ ID NO: 32671
  source 1..120: mol_type = other DNA

SEQ ID NO: 69736 - DNA, 120 bp, synthetic construct; identical to SEQ ID NO: 32672
  source 1..120: mol_type = other DNA

SEQ ID NO: 69737 - DNA, 120 bp, synthetic construct; identical to SEQ ID NO: 32673
  source 1..120: mol_type = other DNA

SEQ ID NO: 69738 - DNA, 120 bp, synthetic construct; identical to SEQ ID NO: 32674
  source 1..120: mol_type = other DNA

SEQ ID NO: 69739 - DNA, 120 bp, synthetic construct; identical to SEQ ID NO: 32675
  source 1..120: mol_type = other DNA

SEQ ID NO: 69740 - DNA, 120 bp, synthetic construct; identical to SEQ ID NO: 32681
  source 1..120: mol_type = other DNA

SEQ ID NO: 69741 - DNA, 120 bp, synthetic construct; identical to SEQ ID NO: 32676
  source 1..120: mol_type = other DNA

SEQ ID NO: 69742 - DNA, 120 bp, synthetic construct; identical to SEQ ID NO: 32677
  source 1..120: mol_type = other DNA

SEQ ID NO: 69743 - DNA, 120 bp, synthetic construct; identical to SEQ ID NO: 32678
  source 1..120: mol_type = other DNA

SEQ ID NO: 69744 - DNA, 120 bp, synthetic construct; identical to SEQ ID NO: 32679
  source 1..120: mol_type = other DNA

SEQ ID NO: 69745 - DNA, 120 bp, synthetic construct; identical to SEQ ID NO: 32680
  source 1..120: mol_type = other DNA

SEQ ID NO: 69746 - DNA, 120 bp, synthetic construct; identical to SEQ ID NO: 69730
  source 1..120: mol_type = other DNA

SEQ ID NO: 69747 - DNA, 120 bp, synthetic construct; identical to SEQ ID NO: 32667
  source 1..120: mol_type = other DNA

SEQ ID NO: 69748 - DNA, 120 bp, synthetic construct; identical to SEQ ID NO: 32668
  source 1..120: mol_type = other DNA

SEQ ID NO: 69749 - DNA, 120 bp, synthetic construct; identical to SEQ ID NO: 32669
  source 1..120: mol_type = other DNA

SEQ ID NO: 69750 - DNA, 120 bp, synthetic construct; identical to SEQ ID NO: 32670
  source 1..120: mol_type = other DNA

SEQ ID NO: 69751 - DNA, 120 bp, synthetic construct; identical to SEQ ID NO: 32671
  source 1..120: mol_type = other DNA

SEQ ID NO: 69752 - DNA, 120 bp, synthetic construct; identical to SEQ ID NO: 32672
  source 1..120: mol_type = other DNA

SEQ ID NO: 69753 - DNA, 120 bp, synthetic construct; identical to SEQ ID NO: 32673
  source 1..120: mol_type = other DNA

SEQ ID NO: 69754 - DNA, 120 bp, synthetic construct; identical to SEQ ID NO: 32674
  source 1..120: mol_type = other DNA

SEQ ID NO: 69755 - DNA, 120 bp, synthetic construct; identical to SEQ ID NO: 32675
  source 1..120: mol_type = other DNA

SEQ ID NO: 69756 - DNA, 120 bp, synthetic construct; identical to SEQ ID NO: 32681
  source 1..120: mol_type = other DNA

SEQ ID NO: 69757 - DNA, 120 bp, synthetic construct; identical to SEQ ID NO: 32676
  source 1..120: mol_type = other DNA

SEQ ID NO: 69758 - DNA, 120 bp, synthetic construct; identical to SEQ ID NO: 32682
  source 1..120: mol_type = other DNA

SEQ ID NO: 69759 - DNA, 120 bp, synthetic construct
  source 1..120: mol_type = other DNA
tttgtcaaaggctttttctgcatctattgagataatcatgtagtttttgtctttggctctgtttatatgctggattacatttattgatttgcgtatattgaaccagccttgcatcccagg

SEQ ID NO: 69760 - DNA, 120 bp, synthetic construct
  source 1..120: mol_type = other DNA
tatgtggtgtctttgttctcgttggtttcaaagaacatctttatttctgccttcatttcgttatgtacccagtagtcattcaggagcaggttgttcagtttccatgtagttgagtggctt

SEQ ID NO: 69761 - DNA, 120 bp, synthetic construct
  source 1..120: mol_type = other DNA
tatgaatgttcaaatacatggtttgatagaagaactaagaactagtaattgatagaccagtagggtgactacagtttacagtagtttattgtatatttcaaatagctagaagacaataat

SEQ ID NO: 69762 - DNA, 120 bp, synthetic construct; identical to SEQ ID NO: 69761
  source 1..120: mol_type = other DNA

SEQ ID NO: 69763 - DNA, 120 bp, synthetic construct
  source 1..120: mol_type = other DNA
gcctggccgcccatcgtctgagatgtggggagcgcctctgccccgccgccccatctgggatgtgaggagcgcctctgcctggccgagaccccgtctgggaggtgaggagcgtctctgcct

SEQ ID NO: 69764 - DNA, 120 bp, synthetic construct
  source 1..120: mol_type = other DNA
aaaaccagagacctttgttcacttgtttatctgctgaccttccctccactattgtcccatgaccctgccaaatccccctctgtgagaaacacccaagaattatcaataaaaaaataaatt

SEQ ID NO: 69765 - DNA, 120 bp, synthetic construct
  source 1..120: mol_type = other DNA
ggatattatccaggagaacttccccaatctagcaaggcaggccaacgttcagattcaggaaatacagagaacgccacaaagatactcctcgagaagagcaactccaagacacataatggt

SEQ ID NO: 69766 - DNA, 120 bp, synthetic construct; identical to SEQ ID NO: 67090
  source 1..120: mol_type = other DNA

SEQ ID NO: 69767 - DNA, 120 bp, synthetic construct
  source 1..120: mol_type = other DNA
caggatacaaaatcaatgtacaaaaatcacaagcattcttatacaccaacaacagacaaacagagagccaaatcatgggtgaactcccattcacaattgcttcaaagagaataaaatacc

SEQ ID NO: 69768 - DNA, 120 bp, synthetic construct; identical to SEQ ID NO: 69267
  source 1..120: mol_type = other DNA

SEQ ID NO: 69769 - DNA, 120 bp, synthetic construct; identical to SEQ ID NO: 58865
  source 1..120: mol_type = other DNA

SEQ ID NO: 69770 - DNA, 120 bp, synthetic construct
  source 1..120: mol_type = other DNA
gcctgccctacaagagctcctgaaggaagcgctaaacatggaaaggaacaaccggtaccagccgctgcaaaatcatgccaaaatgtaaagaccatcgagactaggaagaaactgcatcaa

SEQ ID NO: 69771 - DNA, 120 bp, synthetic construct
  source 1..120: mol_type = other DNA
gaaactgaacaacctgctcctgaatgactactgggtacataacgaaatgaaggcagaaataaagatgttctttgaaaccaacgagaacaaagacaccacataccagaatctctgggatgc

SEQ ID NO: 69772 - DNA, 120 bp, synthetic construct
  source 1..120: mol_type = other DNA
aatccagcagcacatcaaaaagcttatccaccatgatcaagtgggcttcatccctgggatgcaaggctggttcaatatacgcaaatcaataaatgtaatccagcatataagcagagccaa

SEQ ID NO: 69773 - DNA, 120 bp, synthetic construct
  source 1..120: mol_type = other DNA
aagaacaaagctggaggcatcacactacctgacttcaaactatactacaaggctacagtaaccaaaacagcatggtactggtaccaaaacagagatatagatcaatggaacagaacagag

SEQ ID NO: 69774 - DNA, 120 bp, synthetic construct
  source 1..120: mol_type = other DNA
aggatattggtctaaaattctcttttttggttgtgtctctgcccggctttggtatcagaatgatgctggcctcataaaatgaattagggaggattccctctttttctattgattggaata

SEQ ID NO: 69775 - DNA, 120 bp, synthetic construct
  source 1..120: mol_type = other DNA
tttacttccaactatgtggtcaattttggaatagttgtggtgtggtgctgaaaaaaatgtatattctgttgatttggggtggagagttctgtagatgtctattaggtctgcttggtgcag

SEQ ID NO: 69776 - DNA, 120 bp, synthetic construct
  source 1..120: mol_type = other DNA
acaaaagacaaaattgacaaatgggatctaattaaactaaagagcttctgcacagcaaaagaaactaccatcagagtgaacaggcaacctacaacatgggagaaaattttcgcaacctac

SEQ ID NO: 69777 - DNA, 120 bp, synthetic construct
  source 1..120: mol_type = other DNA
atgatatgtgtgtatatatcatatcctacacacatatatgtgtgtatatatcatatcctacacacatgatatgtgtgtatatatcatatcctacacacacatgatatgtgtgtatatatc

SEQ ID NO: 69778 - DNA, 120 bp, synthetic construct
  source 1..120: mol_type = other DNA
gtgtgtatacatcatatcatacacatatgatatgtatgtgtgtatacatcatatcatacacatatatgatatgtatgtgtgtatacatcatatcatacacatatatgatatgtatgtgta

SEQ ID NO: 69779 - DNA, 120 bp, synthetic construct
  source 1..120: mol_type = other DNA
tgtatatttgctccccacctcggtggtgaatacattcttgggtggtgaataggttctctccttgccttcactctagaaaagtcccctgttttgtgatgtaggatgtggtcaatgactgac

SEQ ID NO: 69780 - DNA, 120 bp, synthetic construct
  source 1..120: mol_type = other DNA
gaatgaagaatacggtggcatgttcacaagcctttttcttctggaggaaaaacaaaactttgaccaatgacacagataaaccaaatgtctgccctgctccctgacaatccttcactttct

SEQ ID NO: 69781 - DNA, 120 bp, synthetic construct
  source 1..120: mol_type = other DNA
aagccagaagagagtgggggccaatattcaacattcttaaaaaaaagaattttcaacccataatttcatatccagccaaactaagcttcataagtgaaggagaaataaaatactttatag

SEQ ID NO: 69782 - DNA, 120 bp, synthetic construct
  source 1..120: mol_type = other DNA
caaagaaggccattacataatggtaaagggatcaattcaacaagaggagctaactatcctaaatatttatgcacccaatacaggagcacccagattcataaagcaagtcctgagtgacct

SEQ ID NO: 69783 - DNA, 120 bp, synthetic construct
  source 1..120: mol_type = other DNA
tctgaaattgtggcaataatcaatagtttaccaaccaaaaagagtccaggaccacatggattcacagccgaattctaccagaggtacaaggaggaactggtaccattccttctgaaacta

SEQ ID NO: 69784 - DNA, 120 bp, synthetic construct; identical to SEQ ID NO: 69575
  source 1..120: mol_type = other DNA

SEQ ID NO: 69785 - DNA, 120 bp, synthetic construct
  source 1..120: mol_type = other DNA
tcatttgggtatatacccagtaatgggatggctgggtcaaatggtatttctagttctagatccctgaggaatcgccacactgacttccacaatggttgaactagtttacagtcccaccaa

SEQ ID NO: 69786 - DNA, 120 bp, synthetic construct
  source 1..120: mol_type = other DNA
aagggcagtgcggctcgtcttcatggagcgattgctacagtgctgggatttcatcacgcctgctagcttcattagttactattcccatgaaaaagtaacacagtaatgcaacattttatt

SEQ ID NO: 69787 - DNA, 120 bp, synthetic construct
  source 1..120: mol_type = other DNA
gagagtgagtaagaagttctggaacagcctcagttccaaaaaaatgagtcgctttgttgcggcattaaattttgcccctaactcatgtgtcccggcgtggcccgggagcagcgggccctt

SEQ ID NO: 69788 - DNA, 120 bp, synthetic construct
  source 1..120: mol_type = other DNA
atatgtacgcatcttcctgtggccagcagcagtgatggcaacgctgtaggcacctccttcccttaggaagaagccaaacatttcacgaagtccttctgtgcttttagacgaaactggaaa

SEQ ID NO: 69789 - DNA, 120 bp, synthetic construct
  source 1..120: mol_type = other DNA
tcttttccagcggtcactcctctgccctgcattggccttgaccacatgacccagaggtgcagggagaagcctcccttggatgcttggagtgacttcagctgctgagagtgtctaaggaga

SEQ ID NO: 69790 - DNA, 120 bp, synthetic construct
  source 1..120: mol_type = other DNA
gaaaggtccactaacaaaactgagtggggaggaggggtgacagtcacagctttctacacggaatcctgcatgccacaggaagtgtccccacctgcttccatgctgggaacacagtattag

SEQ ID NO: 69791 - DNA, 120 bp, synthetic construct
  source 1..120: mol_type = other DNA
tgccatcactatcccgaaattctgctccaacactacgcatatagagcttctgactctctagaagcaacgtctgcatacgccaagacaacttgaatgacccccacctagcacggctctcta

SEQ ID NO: 69792 - DNA, 120 bp, synthetic construct
  source 1..120: mol_type = other DNA
tccttttctgtgagggtctgctggggtcctgtgtgtcgtgcattgttgatagattcctgtcgtgcttgctgtcctccccattctaagggacctctgattgcctgtgagcagtttacaggg

SEQ ID NO: 69793 - DNA, 120 bp, synthetic construct
  source 1..120: mol_type = other DNA
agaaatgggcagagagcatgcctggttctagctggcaaggcccacatctcagagctgtggacagtcatgaagggtccgtgagcatggagagggggcaaaaatgacccatgaacctcaggc

SEQ ID NO: 69794 - DNA, 120 bp, synthetic construct
  source 1..120: mol_type = other DNA
gaatgatagactggactaagaaaatgtggcacatatacaccatggaatacaatgtatatttttatgcacccataaaaaatgatgagttcatgtcctttgtagggacatggatgaagctgg

SEQ ID NO: 69795 - DNA, 120 bp, synthetic construct
  source 1..120: mol_type = other DNA
gttctggaggccaggagtccaaaatcacggtgtcagtagagacttccttctgaaggctgtgaaggataattcttttttttttttttttctttctgagacagagccttactcttattgccc

SEQ ID NO: 69796 - DNA, 120 bp, synthetic construct
  source 1..120: mol_type = other DNA
attcacagattccagaacacagacatatctttttgggggtcaccattcaacccaccacaactagcaaggaaaatgaccaccagaccaaaagactagagtgaatattatgaaagggaacag

SEQ ID NO: 69797 - DNA, 120 bp, synthetic construct
  source 1..120: mol_type = other DNA
aattactttccttcctaggtgctctccaagccctgagttttctggaaccttgcccagagtgatgttaagctcacaaccccatgtatttgcagaatatcttggcttccagattttgaaaat

SEQ ID NO: 69798 - DNA, 120 bp, synthetic construct
  source 1..120: mol_type = other DNA
gattataggcacccaccaccacacccggataatttttatttttatttttgtactttgagtagagatgtagttttaccatgttgccaaggctggtctcgaactcctgagctcagatgatcc

SEQ ID NO: 69799 - DNA, 120 bp, synthetic construct
  source 1..120: mol_type = other DNA
tctgtctcaaaaatacatacatacataaaataaaaatcattagagatatattctctttccaccagctttgtgcctggaggttatggatgtggggctctggctgccctcttgccaccgact

SEQ ID NO: 69800 - DNA, 120 bp, synthetic construct
  source 1..120: mol_type = other DNA
gcagtgtttgtgtccctgattacttgagattagggagtggtgatgactcttaacgagcatgctgccttcaagcatctgtttaacaaagcacatcttgcaccgcccttaatccatttaacc

SEQ ID NO: 69801 - DNA, 120 bp, synthetic construct
  source 1..120: mol_type = other DNA
cgccccctcattagtgcccactctgcaccatacgcgcctctgccccgctcacccagccgcccctccattagtgcccactctgtgccacatgtgccactgcccatgtcccttgcttcagtt

SEQ ID NO: 69802 - DNA, 120 bp, synthetic construct
  source 1..120: mol_type = other DNA
tgcgccacacgcgcctctgcccggctcacccagcctcccccccattagtgcccactctgcgccacacgcgcctctgccccgctcacccagccgccccctcattagtgcccactctgcacc

SEQ ID NO: 69803 - DNA, 120 bp, synthetic construct
  source 1..120: mol_type = other DNA
ccctccattagtgcccactctgtgccacatgtgccactgcccatgtcccttgcttcagttccaatgggcctactggcctcggatcccttgtccactccaggtctgcacttgggagatggg

SEQ ID NO: 69804 - DNA, 120 bp, synthetic construct
  source 1..120: mol_type = other DNA
agatatgcagcattatttctgagggctctgttctgttccattgatctaatctctgttttggtaccagtaccatgctgttttggttactgtagccttgtagtatagtttgaagtcaggtag

SEQ ID NO: 69805 - DNA, 120 bp, synthetic construct
  source 1..120: mol_type = other DNA
gattcggtttgccagtattttattgaggatttttgcatcaatgttcatcaaggatattggtctaaaattctcttttttggttgtgtctctgcccggctttggtatcagaatgatgctgac

SEQ ID NO: 69806 - DNA, 120 bp, synthetic construct
  source 1..120: mol_type = other DNA
tagttggaagtaaagctctcctcagcaaatgtaaaagaacagaaattataacaaactatctctcagaccacagtgcaatcaaactagaactcaggattaagaatctcactcaaagccgct

SEQ ID NO: 69807 - DNA, 120 bp, synthetic construct
  source 1..120: mol_type = other DNA
tcgcaggttgtcgcaggacacgtgttcgtgtccaggtgcgctgggaagggtcctggcggtgctcctctcagcgcaggtcccgaggagctacaggcatgacgctgccttcagaactccccc

SEQ ID NO: 69808 - DNA, 120 bp, synthetic construct
  source 1..120: mol_type = other DNA
gattctcctgcctcagcctcccatgtagctgggataacagtagccaccatgcccgtctaattttttttgcatttttagtagagacaggatttcaccatattggtcaggctggtctcaaac

SEQ ID NO: 69809 - DNA, 120 bp, synthetic construct
  source 1..120: mol_type = other DNA
tgagagctgctccagtccccacctgcttgttctccagcctccgctaatcctctgagctcagatattcttccaataaattcccaatggcttcggttagccagggctgccactcatctgtct

SEQ ID NO: 69810 - DNA, 120 bp, synthetic construct
  source 1..120: mol_type = other DNA
ctccgtatcctccacgccaccgtccctcctgtatcctccatgccaccatcccccccagtatcctccatgccaccatcccccccatatgcttcacgccaccatgcccctctgtatcctcca

SEQ ID NO: 69811 - DNA, 120 bp, synthetic construct
  source 1..120: mol_type = other DNA
cccaggggctccttcaaaacatcctcgtggatcttgcttcaaaggccgaaagcctggccactgggcctcagaatgcctgcagcccgggattcctcctaagccgtgccctgtctgtgcggg

SEQ ID NO: 69812 - DNA, 120 bp, synthetic construct
  source 1..120: mol_type = other DNA
gaggttgcattgtcccccaggaatcctcctaagccgtgccctgtctgtgcgcgcccccactggaggttgcattgtccgactcacatcgtcgcggctcctaaagcccctggagcccaaacc

SEQ ID NO: 69813 - DNA, 120 bp, synthetic construct
  source 1..120: mol_type = other DNA
tggcaactcgcctaacctctctgggcctcacgggctcgttggaggatgtggtgagagaatgaccgagatgagcttagcacagtgctggccacactgtcgctgttcaatgccaggtggctg

SEQ ID NO: 69814 - DNA, 120 bp, synthetic construct
  source 1..120: mol_type = other DNA
atatgcacaagggaaaatgcaggatttttttgtgtgcaaagtttacgtggggctacacaccctatttcctctttcctcacaatgatgccacgaaattgattttattccctgcggctacta

SEQ ID NO: 69815 - DNA, 120 bp, synthetic construct
  source 1..120: mol_type = other DNA
ctcactgcaagctccacctcctgggttcacgccattctcctgcctcagcctcccgggtaactgggactacaggcacccgtcaccacacccgactaatttttgtatttttagtagagacgg

SEQ ID NO: 69816 - DNA, 120 bp, synthetic construct
  source 1..120: mol_type = other DNA
tcacggctgccttgaaggttgtgcaattgctcacggctgccttgaaggttgtgcaattgctcacggctgccttgaaggttgcgaaagtggtcacggctgccttgaaggttgcgaaattgc

SEQ ID NO: 69817 - DNA, 120 bp, synthetic construct
  source 1..120: mol_type = other DNA
cttgaaggttgtgcaattgctcacggctgccttgaaggttgtgcaattgctcacggctgccttgaaggttgcgaaagtggtcacggctgccttgaaggttgcgaaattgctcacggctgc

SEQ ID NO: 69818 - DNA, 120 bp, synthetic construct
  source 1..120: mol_type = other DNA
ttctggttcatatggagaattgtagcacttcctggttcatagggacattgtaacacttcctggttcatagggacattgtaacatttccaggttcatatggataattgtagcacttcttag

SEQ ID NO: 69819 - DNA, 120 bp, synthetic construct
  source 1..120: mol_type = other DNA
gctctttcttttctctctctctccttccttccttcccccttcccctcccctccccctttccctttcctttaccttgtttcttgcttcccttccccctccccttcccttccctcctctctc

SEQ ID NO: 69820 - DNA, 120 bp, synthetic construct
  source 1..120: mol_type = other DNA
tgcttcagaagaagtttgatatggttgatgggagatagtggtaagagattcttgcagatgaatattgctatttctactaagctgttaaaaacttgagacatggccgggcgcggtggctca

SEQ ID NO: 69821 - DNA, 120 bp, synthetic construct; identical to SEQ ID NO: 10510
  source 1..120: mol_type = other DNA

SEQ ID NO: 69822 - DNA, 120 bp, synthetic construct; identical to SEQ ID NO: 10339
  source 1..120: mol_type = other DNA

SEQ ID NO: 69823 - DNA, 120 bp, synthetic construct
  source 1..120: mol_type = other DNA
aagctgcagtgagccaagatcgtgccattgcactccagcctgggcagcatgagtgaaactccttctcaaaaaaaaaaaaaaaaaaagatatccagcaagatgaaaaactgttgatgatac

SEQ ID NO: 69824 - DNA, 120 bp, synthetic construct
  source 1..120: mol_type = other DNA
ttttgtgaaaagcccacatgcacaaagcaacccccaaatgccaaaggagccaagagaccaaagaaggaagcagacaaatccagtttgttggtattgagtgatttattgagggaactttta

SEQ ID NO: 69825 - DNA, 120 bp, synthetic construct; identical to SEQ ID NO: 10340
  source 1..120: mol_type = other DNA

SEQ ID NO: 69826 - DNA, 120 bp, synthetic construct; identical to SEQ ID NO: 10341
  source 1..120: mol_type = other DNA

SEQ ID NO: 69827 - DNA, 120 bp, synthetic construct; identical to SEQ ID NO: 10342
  source 1..120: mol_type = other DNA

SEQ ID NO: 69828 - DNA, 120 bp, synthetic construct; identical to SEQ ID NO: 10343
  source 1..120: mol_type = other DNA

SEQ ID NO: 69829 - DNA, 120 bp, synthetic construct
  source 1..120: mol_type = other DNA
tgcgactgttctttatcttatattgggccctgtgtttggctctggaatagtttattttgccatgttcagccccaaatggccctttttgcccgaagaccatagtgctggagaaatcttcct

SEQ ID NO: 69830 - DNA, 120 bp, synthetic construct
  source 1..120: mol_type = other DNA
taaccccactgggagattagcattgtgtgtatgattcattaattttcctctgattgactgggaaggcaggctgcagggggtccctgttggggcttgcagctggttctagtttttgtatct

SEQ ID NO: 69831 - DNA, 120 bp, synthetic construct; identical to SEQ ID NO: 10344
  source 1..120: mol_type = other DNA

SEQ ID NO: 69832 - DNA, 120 bp, synthetic construct; identical to SEQ ID NO: 10345
  source 1..120: mol_type = other DNA

SEQ ID NO: 69833 - DNA, 120 bp, synthetic construct
  source 1..120: mol_type = other DNA
tgattcatgaggaacattcctgatggggtgggaagggaacctgtcactaagctatttaggagaagcagtctccagcaggtcacaccagccagccacttttatggcagaaggaaaatccta

SEQ ID NO: 69834 - DNA, 120 bp, synthetic construct; identical to SEQ ID NO: 10346
  source 1..120: mol_type = other DNA

SEQ ID NO: 69835 - DNA, 120 bp, synthetic construct; identical to SEQ ID NO: 10347
  source 1..120: mol_type = other DNA

SEQ ID NO: 69836 - DNA, 120 bp, synthetic construct
  source 1..120: mol_type = other DNA
gccttccctgtaaccctttgccacctctaaccaatcttctgtgttacatctcttcggtttgcaatatgtagtgttcgtatatgactggacagtatctactggagttaatatctatcagag

SEQ ID NO: 69837 - DNA, 120 bp, synthetic construct
  source 1..120: mol_type = other DNA
ttgttatttttattctaacatttcacaggtatagaatctgaaactcagaggtcaactgatgtgtcaaagatacctccacaaatcagtaccttgattaaaactaaaattggagtcatcttc

SEQ ID NO: 69838 - DNA, 120 bp, synthetic construct; identical to SEQ ID NO: 9807
  source 1..120: mol_type = other DNA

SEQ ID NO: 69839 - DNA, 120 bp, synthetic construct; identical to SEQ ID NO: 9808
  source 1..120: mol_type = other DNA

SEQ ID NO: 69840 - DNA, 120 bp, synthetic construct; identical to SEQ ID NO: 9809
  source 1..120: mol_type = other DNA

SEQ ID NO: 69841 - DNA, 120 bp, synthetic construct; identical to SEQ ID NO: 9810
  source 1..120: mol_type = other DNA

SEQ ID NO: 69842 - DNA, 120 bp, synthetic construct; identical to SEQ ID NO: 9811
  source 1..120: mol_type = other DNA

SEQ ID NO: 69843 - DNA, 120 bp, synthetic construct
  source 1..120: mol_type = other DNA
aatctgatcatttcactattgtttgtaaaaccctgggccacacaagggcaagaaataagcctaacatgaaataagaaagatctactgggcattgatctctctcgcttgctcagccctgtc

SEQ ID NO: 69844 - DNA, 120 bp, synthetic construct
  source 1..120: mol_type = other DNA
agcatagctactcctgctcttttctggttacgacttgcatgggatatccttttcaaccacttcacttcgtctgcatatgtccttgcaggttaaagtaacctgttgtagttggcatttttt

SEQ ID NO: 69845 - DNA, 120 bp, synthetic construct; identical to SEQ ID NO: 9812
  source 1..120: mol_type = other DNA

SEQ ID NO: 69846 - DNA, 120 bp, synthetic construct; identical to SEQ ID NO: 9813
  source 1..120: mol_type = other DNA

SEQ ID NO: 69847 - DNA, 120 bp, synthetic construct; identical to SEQ ID NO: 9814
  source 1..120: mol_type = other DNA

SEQ ID NO: 69848 - DNA, 120 bp, synthetic construct; identical to SEQ ID NO: 9815
  source 1..120: mol_type = other DNA

SEQ ID NO: 69849 - DNA, 120 bp, synthetic construct
  source 1..120: mol_type = other DNA
tgtctcagatattttgggttcagttaatatcaggtccctttttgggtaagggttaaagcagaggggatttccttatgctgactcaggtagacgggaatcctttctttttcaggaaacact

SEQ ID NO: 69850 - DNA, 120 bp, synthetic construct
  source 1..120: mol_type = other DNA
ctgctagacccaggaagcccagctggcacctcctctcatcaacacatcgtttcagtaaagtcaagaaaactttattccattattgttaccagtggcaggtatccaagttaccctgagtta

SEQ ID NO: 69851 - DNA, 120 bp, synthetic construct
  source 1..120: mol_type = other DNA
aatagtgccgcaataaacagacgtgtgcatgtgtctttatagcagcatgatttatagtcctttgggtatatacccagtaatgggatggctgggtcaaatggtatttctagttctagatcc

SEQ ID NO: 69852 - DNA, 120 bp, synthetic construct
  source 1..120: mol_type = other DNA
tagatatgcggcattatttctgagggctctgttctgttccattgatctatatctctgttttggtaccagtaccatgctgttttggttactgtaaccttgtagtatagtttgaagtcaggt

SEQ ID NO: 69853 - DNA, 120 bp, synthetic construct
  source 1..120: mol_type = other DNA
cagggatgaagcccacttgatcatgttggataagctttttgatgtgctgctggattcggtttgccagtattttattgaggatttttgcatcaatgttcatcaaggatattggtctaaaat

SEQ ID NO: 69854 - DNA, 120 bp, synthetic construct
  source 1..120: mol_type = other DNA
caccaagcagacctaatagacatctacagaactctccaccccaaatcaacagaatatacatttttttcagcaccacaccacacctattccaaaattgaccacatagttggaagtaaagct

SEQ ID NO: 69855 - DNA, 120 bp, synthetic construct
  source 1..120: mol_type = other DNA
gttgtagttgtttgtatcaccttggagtcgtgtattttgatttattcaatctggatatctctggaaactggctcctcattgcttctcatgtgccctaattttatctgagtatttctctct

SEQ ID NO: 69856 - DNA, 120 bp, synthetic construct
  source 1..120: mol_type = other DNA
ccaccttctaggtcaattacacacacaggtgtgctgatgcttagggtggcagagagggtgtcccacaagtagacactgattatcctaactgtaactttcaaatggaaaattaattaaatc

SEQ ID NO: 69857 - DNA, 120 bp, synthetic construct
  source 1..120: mol_type = other DNA
cttcccaagtagctaggactataggcacgtaccactgtgcccaactatttttattttattttattttttgtagagacagagtctctacaaaatgttgctcaggctggccttgaacccctg

SEQ ID NO: 69858 - DNA, 120 bp, synthetic construct
  source 1..120: mol_type = other DNA
aggttgcgaaaattttctcccatgttgtaggttgcctgttcactctgatggtagtttcttttgctgtgcagaagctctttagtttaattagatcccatttgtcaattttggcttttgttg

SEQ ID NO: 69859 - DNA, 120 bp, synthetic construct
  source 1..120: mol_type = other DNA
ttctgtttggttcactggtgtattcttaaagcatgttacatactaggtatactcaatgaatatttgttgaataaatatcacattgggcttattccagaaattcaagcttgtttcaatagt

SEQ ID NO: 69860 - DNA, 120 bp, synthetic construct
  source 1..120: mol_type = other DNA
atctccaaaagaaaggttgttacggaggttagggaggactgccagaggggaggtggggtttggagctacatttccttgcaaatgcccactttgaggaattgtagacccaaacaccacctt

SEQ ID NO: 69861 - DNA, 120 bp, synthetic construct
  source 1..120: mol_type = other DNA
tggcctcgttgtagtacatgttgatgcgctccagctgcaggtccctgtccccgtggcaggtgccagcagagtcgatggcatgttcatcagagatcacctcccagaactgcgagagacacg

SEQ ID NO: 69862 - DNA, 120 bp, synthetic construct
  source 1..120: mol_type = other DNA
tggatggtcctctctgaagggttctaggatagcccccacttatttgaaaatgccctagctaaggacttaagaaatttacagttgcaaacaggcaccattattcagtatctaggtgactta

SEQ ID NO: 69863 - DNA, 120 bp, synthetic construct
  source 1..120: mol_type = other DNA
ggataataggagaacatttattaaagtatcaggccttattgctagacactccagacataacccttaaagtctgccaaaccataaacccagttacttatctgccagggtccacaagtgctc

SEQ ID NO: 69864 - DNA, 120 bp, synthetic construct
  source 1..120: mol_type = other DNA
gttggtaaactattgattattgccacaatttcagagtctgttattggtctattcagagattcaacttcttcctggtttagtcttgggagagtgtatgtgtcgaggaatgtatccatttct

SEQ ID NO: 69865 - DNA, 120 bp, synthetic construct
  source 1..120: mol_type = other DNA
tctaagtctctttgtaggtcactgaggacttgctttatgaatctgggtgctcctgtattgggtgcataaatatttaggatagttagctcctcttgttgaattgatccctttaccattatg

SEQ ID NO: 69866 - DNA, 120 bp, synthetic construct; identical to SEQ ID NO: 41682
  source 1..120: mol_type = other DNA

SEQ ID NO: 69867 - DNA, 120 bp, synthetic construct
  source 1..120: mol_type = other DNA
gcaatcagcgagattccgtgggcgtaggaccctctgagccaggtgtgggatatagtctcgtggtgcgccgtttcttaagccggtctgaaaagcgcaatattcaggtgggagtgacccaat

SEQ ID NO: 69868 - DNA, 120 bp, synthetic construct
  source 1..120: mol_type = other DNA
attaggtccgcttggtgcagagatgagttcaattcctgggtatccttgttgactttctgtctcgttgatctgtctaatgttgacagtggggtgttaaagtctcccattattaatgtgtgg

SEQ ID NO: 69869 - DNA, 120 bp, synthetic construct
  source 1..120: mol_type = other DNA
taacattttttccttcatttcaactttggtgaatctgacaattatgtgtcttggagttgctcttctcgaggagtatctttgtggcgttccctgtatttcctgaatctgaacatgggcctg

SEQ ID NO: 69870 - DNA, 120 bp, synthetic construct
  source 1..120: mol_type = other DNA
ggggtcagggacccacttgaggaggcagtctgcccgttctcagatctccagctgcgtgctgggagaaccactgctctcttcaaagctgtcagacagggacacttaagtctgcagaggtta

SEQ ID NO: 69871 - DNA, 120 bp, synthetic construct
  source 1..120: mol_type = other DNA
aaggtcatcacggggagggggcgtgtccctgtgggcgggtgacagcaaggtcatcacggggagggggcgtgtccctgtgggcgggtgacagcaaggtcatcacggggagggcttatcttc

SEQ ID NO: 69872 - DNA, 120 bp, synthetic construct
  source 1..120: mol_type = other DNA
gggggtgacagcaaggtcatcacggggaggggtcgtgtccctgtggggggtgacagcaaggtcatcacggggagggggcgtgtccctgtgggcgggtgacagcaaggtcatccctgggag

SEQ ID NO: 69873 - DNA, 120 bp, synthetic construct
  source 1..120: mol_type = other DNA
gggaggggtcgtgtccctgtggggggtgacagcaaggtcatcacggggaggggtcgtgtccctgtggggggtgacagcaaggtcatcacggggagggggcgtgtccctgtgggcgggtga

SEQ ID NO: 69874 - DNA, 120 bp, synthetic construct
  source 1..120: mol_type = other DNA
gatgacagttcagcatttccaagagtcttggcaggaaggccgcccccaaaccagtccttaggaaggagaaaaccgttgggctgagggtagaggctgcagcagccctggacaccagaaggg

SEQ ID NO: 69875 - DNA, 120 bp, synthetic construct
  source 1..120: mol_type = other DNA
ttccagtccctccttaatcctgttaaaaattaaactgaggtttaattaaagcgttacagagtttgagcaaacagcgattcatgagtaggggagcacccagccacggtttttggtttgtgg

SEQ ID NO: 69876 - DNA, 120 bp, synthetic construct
  source 1..120: mol_type = other DNA
ccccagcaggatggggtgggaggattcaggagatgagagggagggtggacattgagtacttccccgagcaggatggggtgggaggatcaggagatgagagggagggtggacattgagtac

SEQ ID NO: 69877 - DNA, 120 bp, synthetic construct
  source 1..120: mol_type = other DNA
atggtctgacttgacccttgagtcagccatgtccgtgctcgtcagtactgctactcgtttgtcaccttgaaaatacttgttcacttattttaacttcagtttttcgctgattgaaaaata

SEQ ID NO: 69878 - DNA, 120 bp, synthetic construct
  source 1..120: mol_type = other DNA
cagaagcaggatgggacattgctttgcccgggtgaggcatagacccagtgcacctccctctcccagccaagggaagcagtgagggactgtgatacctgcccagggtactacgcttttccc

SEQ ID NO: 69879 - DNA, 120 bp, synthetic construct
  source 1..120: mol_type = other DNA
gtagtttttttcatgctccggtggtgcctggaacttcagtgagacaggagaactgtccgctccctggaaagggggctgaagccagggagccaattggtcttgctcagcgaatcctactcc

SEQ ID NO: 69880 - DNA, 120 bp, synthetic construct
  source 1..120: mol_type = other DNA
cctaagcagttcaacaacctaaatgttggaaaaaactggctgacagactttccattctttcccaattcagaaggtccagcaagtagtggttggtctcaggaagatggaaaatcacaaaca

SEQ ID NO: 69881 - DNA, 120 bp, synthetic construct
  source 1..120: mol_type = other DNA
tagtctcccaaagtgctaggattgcaggcatgagccactgcacctggccggtattttctgttttgtacaagatgttccagaaagaaaggcaaatatggaaagttgtctaattcatttcat

SEQ ID NO: 69882 - DNA, 120 bp, synthetic construct
  source 1..120: mol_type = other DNA
aaaaaaagaaaaaaagaaagcaatatagtgatatataatggccattccaggaatgccagccaatcacaggaaaatctaagtgtaattcagcatactgacaaactaaagggggaaaagcaa

SEQ ID NO: 69883 - DNA, 120 bp, synthetic construct
  source 1..120: mol_type = other DNA
ggcattatagctataaatatggtgtaaactgtaatggttattctgccctttcttctcttgctacctcctgccatcctaagagaagttgccttaagcagaattgtctcatcccgatcccca

SEQ ID NO: 69884 - DNA, 120 bp, synthetic construct
  source 1..120: mol_type = other DNA
tcaggattggtaatgggtcaagtttagggacacgttacaattacaatgtaatttttggctgtagttgatcagcaagtttacatccatatattcatccaagttgctcttcctcaaaaaaat

SEQ ID NO: 69885 - DNA, 120 bp, synthetic construct
  source 1..120: mol_type = other DNA
tgttgagaatctttacatccatgatcataaaataaattggcctgtaattttcttataccgtccttgtctgacattggtgttagggtaatgcatgaaaaaatgtgttggaaagtgcaccct

SEQ ID NO: 69886 - DNA, 120 bp, synthetic construct
  source 1..120: mol_type = other DNA
cttccaatctttttatcctactttaattctccaatgatataataaacatccaagacaaaaaaaatgaaaaaagcacaaatgattccttcactgaaatcaggagacaaaggcaatccatca

SEQ ID NO: 69887 - DNA, 120 bp, synthetic construct
  source 1..120: mol_type = other DNA
tcaccctgagtcaggagagaatttaaagggagtgatggggacgaagctgaatggctgctccgtggcttgtgagtgattgtaaaataataaagatgatggagaaaatataaaagcaagtgt

SEQ ID NO: 69888 - DNA, 120 bp, synthetic construct
  source 1..120: mol_type = other DNA
ttttgaggaggagagattgggttaaacaagagggttaaaaactcagaatagaatgacaaccaaacgagagcatagtcagtattaatacagaaaatatttacaagacctacttgaaagaag

SEQ ID NO: 69889 - DNA, 120 bp, synthetic construct
  source 1..120: mol_type = other DNA
tcaggaggttaaataatcttgggtggagaaatagataaattccttgtttcgagggatttatatatttcttctaggttttctagtttgtctgcagagaggtgttcataatagtcccttagg

SEQ ID NO: 69890 - DNA, 120 bp, synthetic construct
  source 1..120: mol_type = other DNA
attcaaagtatcttttccaatcaatgaaataaaactggaaatctgaaatagagggagaactacaaaagttacacatatgtggggattaaacaccacactgtgaagcaccggtgggtcaaa

SEQ ID NO: 69891 - DNA, 120 bp, synthetic construct
  source 1..120: mol_type = other DNA
ccacagcaaactagagcttagggaccacaccagacaacctgctcagaatctctagacaggcttactattgaagaatgtttcaggataaaacaagtctgcaaagactggaataagtaccta

SEQ ID NO: 69892 - DNA, 120 bp, synthetic construct
  source 1..120: mol_type = other DNA
agtcattaacctacaaaaagcccgaagtataagaaaacacagttaaaggtgtgttttttaattgtctttgctggattcggttagttcaatagccttgtcttcaagctctgaacttgtttc

SEQ ID NO: 69893 - DNA, 120 bp, synthetic construct
  source 1..120: mol_type = other DNA
gaaaacaattcacagagtgaatagataacatacgagtgggagaaaagatttgccaacaatgcatttgacaaggggttcatatccagaatatataaagaactcaagtaactgagtaccaaa

SEQ ID NO: 69894 - DNA, 120 bp, synthetic construct
  source 1..120: mol_type = other DNA
tcaggagagaaaaaagagaagctgtgtctggtcttagagcaattaggtaaaagaaggaaacaaaggcctccaaattggaaagaaggaactgaaattttccctgtttacagatgacatggt

SEQ ID NO: 69895 - DNA, 120 bp, synthetic construct; identical to SEQ ID NO: 9828
  source 1..120: mol_type = other DNA

SEQ ID NO: 69896 - DNA, 120 bp, synthetic construct
  source 1..120: mol_type = other DNA
actaagaaacttcaacacccctctttcagccatggaaagactatccagacaggaggtaaacaatgaaataacagcttcaagttgcactctagggcaatggacctaaaaagcatatgcaaa

SEQ ID NO: 69897 - DNA, 120 bp, synthetic construct; identical to SEQ ID NO: 9829
  source 1..120: mol_type = other DNA

SEQ ID NO: 69898 - DNA, 120 bp, synthetic construct
  source 1..120: mol_type = other DNA
tccagtcatcgccccttctttattgagggctacatttttctgcatggtccaattctgatggcgtctagtggatttatctctccgaaataattactgccatgtggtgtattgaggatgtag

SEQ ID NO: 69899 - DNA, 120 bp, synthetic construct; identical to SEQ ID NO: 9830
  source 1..120: mol_type = other DNA

SEQ ID NO: 69900 - DNA, 120 bp, synthetic construct
  source 1..120: mol_type = other DNA
accagcgatgttgattcaattcagctgtctatgacaaaaactctacaataaggagtttgctttatctttctttcaatgagtcactgtttgtgttagcagaggagggaggttctgcaaatt

SEQ ID NO: 69901 - DNA, 120 bp, synthetic construct; identical to SEQ ID NO: 9831
  source 1..120: mol_type = other DNA

SEQ ID NO: 69902 - DNA, 120 bp, synthetic construct; identical to SEQ ID NO: 9832
  source 1..120: mol_type = other DNA

SEQ ID NO: 69903 - DNA, 120 bp, synthetic construct; identical to SEQ ID NO: 9833
  source 1..120: mol_type = other DNA

SEQ ID NO: 69904 - DNA, 120 bp, synthetic construct
  source 1..120: mol_type = other DNA
ccccatcagaaacggaaaaaagtagtttacttcttcctctcaccctgcagtgtccacccacaagggcctgcactctcagagccttacgaaaagtgaagtagcaaagaagtcaggacaaac

SEQ ID NO: 69905 - DNA, 120 bp, synthetic construct
  source 1..120: mol_type = other DNA
ctcaggagttcgggaccagcctggccagcatagtgaaaccccatctctactaaaactacaaaattagctggcgtggtagcacgtgccctgtaatccaagctacttgggaggctgagacag

SEQ ID NO: 69906 - DNA, 120 bp, synthetic construct
  source 1..120: mol_type = other DNA
ctccattgattaagcaagtctgggacacacatgtagctaagctgtgagttctgtaccagcgatcccaacacccacgccctcagaaagacactggtgtggggcctgggtgcttgtcaggcc

SEQ ID NO: 69907 - DNA, 120 bp, synthetic construct
  source 1..120: mol_type = other DNA
tgtgattatatttgacaggtcttaattgacgcgctgttcagccctttgagttcggttgagttttgggttggagaattttcttccacaagggattgtcttggatttttctgtttctccctc

SEQ ID NO: 69908 - DNA, 120 bp, synthetic construct
  source 1..120: mol_type = other DNA
aggacctgggatcacagaacagattctaccagtgctaacttactgctccacagaaaacatcaattctgctcatgcgcaggtacaattcatcaagaaaggaattacaacttcagaaatgtg

SEQ ID NO: 69909 - DNA, 120 bp, synthetic construct
  source 1..120: mol_type = other DNA
atcaatgcactttggcttacaggaagccatgcccataggaaaaaggggagagtactacgtcaagggaacaccccgtgggatgaaagagtctgaacaacagtcttcagccctagacctttc

SEQ ID NO: 69910 - DNA, 120 bp, synthetic construct; identical to SEQ ID NO: 69881
  source 1..120: mol_type = other DNA

SEQ ID NO: 69911 - DNA, 120 bp, synthetic construct; identical to SEQ ID NO: 69880
  source 1..120: mol_type = other DNA

SEQ ID NO: 69912 - DNA, 120 bp, synthetic construct
  source 1..120: mol_type = other DNA
tccacctttctttctgtttccttctgtctttttctctcccctccctccctccctccctcccttccttccttctttccttccttttttttgaggcaaggtttcattctgttgagcaggctg

SEQ ID NO: 69913 - DNA, 120 bp, synthetic construct
  source 1..120: mol_type = other DNA
ggggccaagactgtttctgccttctctgccctcaaagacaatgttgtgtttgaagagtctgcactgtctcttctgtaactattccctttttaatttttaaactcaatccagacagagtct

SEQ ID NO: 69914 - DNA, 120 bp, synthetic construct
  source 1..120: mol_type = other DNA
ggtgtggttagaaacatcaacaaaagctcctgagtttgcacaggacagacccaaagccctggtgcctggagctactgcttggttctctgagaggtcccagcaccctgcaaactgagtcca

SEQ ID NO: 69915 - DNA, 120 bp, synthetic construct
  source 1..120: mol_type = other DNA
tatagcactaaacacctacgtcgaaaagtctgaaagagcacagacaatctaagttcacatctcagggaactagagaaggaggaacaagccaaacccaatcccagcaaacaaaggaaataa

SEQ ID NO: 69916 - DNA, 120 bp, synthetic construct
  source 1..120: mol_type = other DNA
gactactctcaccactcctcttcaacatagtactggaagtcctagccagagcaatcatacaaaggaaggaaatagaggaaatccaaatcggtaaagaggaagtcaaactgtcactgcttg

SEQ ID NO: 69917 - DNA, 120 bp, synthetic construct
  source 1..120: mol_type = other DNA
acacatgatgttgggataattggtgagccacatgtaggggaataaaattggattctcatctctcaccttatataaaaatcgactcaagatggattaagaacttaaacctaatacctgagc

SEQ ID NO: 69918 - DNA, 120 bp, synthetic construct
  source 1..120: mol_type = other DNA
tgatatgtaggagctaagctatgaggacacaaaggcataagaatgatgcaacggactttggggacttgggaggaagagtgggagggaggcgagcaataaaagactacgaatatggtgcag

SEQ ID NO: 69919 - DNA, 120 bp, synthetic construct
  source 1..120: mol_type = other DNA
ccagccacagaaagacaaacatcatatgttctcacttatttgtgggatctcaaaatcaacccacttgaactcatgaacatagagagaaggatgattaccaaaggctgggaaggatagtgg

SEQ ID NO: 69920 - DNA, 120 bp, synthetic construct
  source 1..120: mol_type = other DNA
ttctctgacaatctaacttaatgcagggtacagccagaatcatgatgtttacaaacatagacatttacgatctcgagacatttaattattagctggttgaggaaaacagtagtagaactg

SEQ ID NO: 69921 - DNA, 120 bp, synthetic construct
  source 1..120: mol_type = other DNA
ctggctaatttctgtatttttagtagagagggggtttcaccatcttgactaggctggtcttaaactcctgacctcgtgatccaccggctcggcctcccaaagtgctgggattacagaagt

SEQ ID NO: 69922 - DNA, 120 bp, synthetic construct
  source 1..120: mol_type = other DNA
cttcaggtaaaattctattaactctacaaaaattttctaaatggcagatgttacatttccagaaagctttgtggtaaccaaaaaagaattgatttattagcaatttttatatcacactga

SEQ ID NO: 69923 - DNA, 120 bp, synthetic construct
  source 1..120: mol_type = other DNA
ggggtagggcagccactctatctgtggtttgagttggccgctctagcctgctggcaccagggaccaggaggagtcccccataacacagcacagctgctgtgactgaccgtggccgggctg

SEQ ID NO: 69924 - DNA, 120 bp, synthetic construct
  source 1..120: mol_type = other DNA
agtaaacagaacagcatggtactgtacaaaaacagacacatagaccaatgaaacagaatacagaactctgaaataagcccatacacatacaaccatctgatctttgacaaacctgacaaa

SEQ ID NO: 69925 - DNA, 120 bp, synthetic construct
  source 1..120: mol_type = other DNA
cctaatgtagatgacaggttgatgggtgctgcaaaccaccatggcacgtgtatacctatggaacaaacctgcatgctctgcccatgtatcccagaacttaaagtacaacaaagaaaactt

SEQ ID NO: 69926 - DNA, 120 bp, synthetic construct
  source 1..120: mol_type = other DNA
aatgcttcaaaaaaatattcatgtagaggcttatatatgtggaccaggaatctccctgtattacaaagcttatgagaacataacaaatgttgatacacacatttaattctaaaataaaaa

SEQ ID NO: 69927 - DNA, 120 bp, synthetic construct
  source 1..120: mol_type = other DNA
tgaagaggaggtaacattttctaacatattctatgcggacagtattaccccgacaccaagtcagacaaaggcaccataagaaaactacaaacaaacatcccttacaaatgctgatgcaaa

SEQ ID NO: 69928 - DNA, 120 bp, synthetic construct
  source 1..120: mol_type = other DNA
cctcatcaagattccattgttatcaatagtcatctacagattcaataaaatcactataaagattccaatatttgcaaaaatacaaaaacctattctaaaattcagatgaaatctcaaaaa

SEQ ID NO: 69929 - DNA, 120 bp, synthetic construct
  source 1..120: mol_type = other DNA
ttccctttcctagtcaaagaaaggggtgacagacagcacctagaaaatcgggtcactcccacccgaatactgtgcttttctgacgggcttaaaaaaacggcgcaccatgagattatatcc

SEQ ID NO: 69930 - DNA, 120 bp, synthetic construct
  source 1..120: mol_type = other DNA
cgtgcagagacacacatagactcaaaataaaaggatggaggaagatctatcaagcaaatggaaaacaaaaaaagtaggggttgcaatcctagtctctgataaaacagactttaaaccaat

SEQ ID NO: 69931 - DNA, 120 bp, synthetic construct
  source 1..120: mol_type = other DNA
ttgaaaggatcaacaaaatagatagaccactagcaagaataataaagaaaaaaagagagaagaatcaaatagatgcaataaaaaaataataaaggggatatcaccaccgatcccacagaa

SEQ ID NO: 69932 - DNA, 120 bp, synthetic construct
  source 1..120: mol_type = other DNA
caaaatcacaaaagggattttgtggaattggatgaattctaaaattcccgttgaaaggcaaagaaccaaaagtagctaagacactcctgaaggggtgtgtggtggggacctgcccaatat

SEQ ID NO: 69933 - DNA, 120 bp, synthetic construct
  source 1..120: mol_type = other DNA
aaaccccgaccccacaggcctccccccggcgtgggctgtgaccccaaggaaaccccgaccccacaggcctccttccccggcgtgggctgtgacaccaaggaaaccccgaccccacaggcc

SEQ ID NO: 69934 - DNA, 120 bp, synthetic construct
  source 1..120: mol_type = other DNA
gcaccagcccagaaccaactgcataacagacaacctttaaaaggaagaaattgcagcagcccagaaccaagtgcataacagaatgggccccagtgtgtaattggcaggatttgctggaag

SEQ ID NO: 69935 - DNA, 120 bp, synthetic construct
  source 1..120: mol_type = other DNA
aacaaaacaaagcgaaaaaacaaaaaaagtttcattgtttcacctccacacagctctgtctgcattttgagcaatggccaccagagggcaggaagaaccaatctataaagcacacaaggg

SEQ ID NO: 69936 - DNA, 120 bp, synthetic construct
  source 1..120: mol_type = other DNA
atcaataagaagataattatttagaaaatgaggctccgaaaaatatgttggctttacattttttgcctgtgcaagtaaatataaaaatgtcttttctcacatttcttccatttataaacc

SEQ ID NO: 69937 - DNA, 120 bp, synthetic construct
  source 1..120: mol_type = other DNA
accctacaagccagaagagagtgggggccaatattcaacattcttaaggaaaagaattttcaacccagaatttcatatccagccaaactaagcttcataagtgaaggagaaataaaatac

SEQ ID NO: 69938 - DNA, 120 bp, synthetic construct
  source 1..120: mol_type = other DNA
caggttgttcagtttccatgtagttgagcagttttgagtgagattcttaatcctgagttctagtttgattgcactgtggtctgagagatagtttgttataatttctgttcttttacattt

SEQ ID NO: 69939 - DNA, 120 bp, synthetic construct
  source 1..120: mol_type = other DNA
aacaaaagccaaaattgacaaatgggatctaattaaactaaagagcttctgcacagcaaaagaaactaccatcagagtgaacaggcaacctacaacatgggagaaaattttcacaaccta

SEQ ID NO: 69940 - DNA, 120 bp, synthetic construct
  source 1..120: mol_type = other DNA
cacattgtgcaggttagttacatatgtatacatgtgccatgctggtgcgctgcacccactaatgtgtcatctagcattaggtatatctcccaatgctatccctcccccctcccccgaccc

SEQ ID NO: 69941 - DNA, 120 bp, synthetic construct
  source 1..120: mol_type = other DNA
tccagtttttgcccattcagtatgatattggctgtgggtttgtcatagatagctctgattattttgagatacgtcccatcaatacctaatttattgagagtttttagcatgaagggttgt

SEQ ID NO: 69942 - DNA, 120 bp, synthetic construct
  source 1..120: mol_type = other DNA
gtcaattttggatctttcctgctttctcttgtaggcatttagtgctataaatttccctctacacactgctttgaatgcgtcccagagattctggtatgtggtgtctttgttctcgttggt

SEQ ID NO: 69943 - DNA, 120 bp, synthetic construct
  source 1..120: mol_type = other DNA
tctagataaacagtcatgtcgtctgcaaacagggacaatttgacttcctcttttcctaattgaataccctttatttccttctcctgcctgattgccctggccagaacttccaacactatg

SEQ ID NO: 69944 - DNA, 120 bp, synthetic construct
  source 1..120: mol_type = other DNA
gggagagtgtatgtgtcgaggaatgtatccatttcttctagattttctagtttatttgcgtagaggtgtttgtagtattctctgatggtagtttgtatttctgtgggatcagtggtgata

SEQ ID NO: 69945 - DNA, 120 bp, synthetic construct
  source 1..120: mol_type = other DNA
taaagggatcaattcaacaagaggagctaactatcctaaatatttatgcacccaatacaggagcacccagattcataaagcaagtcctcagtgacctacaaagagacttagactcccaca

SEQ ID NO: 69946 - DNA, 120 bp, synthetic construct
  source 1..120: mol_type = other DNA
gagggtaacccgacctttctctctggctgcctttaacattttttccttcatttcaactttggtgaatctgacaattatgtgtcttggagttgctcttctcgaggagtatctttgtggcgt

SEQ ID NO: 69947 - DNA, 120 bp, synthetic construct
  source 1..120: mol_type = other DNA
gctgcgtgctgggagaaccactgctctcttcaaagctgtcagacagggacacttaagtctgcagaggttactgctgtctttttgtttgtctgtgccctgcccccagaggtggagcctaca

SEQ ID NO: 69948 - DNA, 120 bp, synthetic construct
  source 1..120: mol_type = other DNA
tggaatcggatggaacggaatggaatggaatggagtagaaaggaatagaattgaatagaatggcatcgaatggaatggaatggaatggacccaaatgtaatagcctcgaatggaatggac

SEQ ID NO: 69949 - DNA, 120 bp, synthetic construct
  source 1..120: mol_type = other DNA
tatgatgtaatggaagggcatggaatggaatggaatggaaaggaatggagtggaatggacccaaaagtattagacacgaatggaatggactcacatagaatggactcgaatggaatggtt

SEQ ID NO: 69950 - DNA, 120 bp, synthetic construct
  source 1..120: mol_type = other DNA
tggaagggagtgtaatggaaagatatcaaacgggatttaatggaatggaatggattcaaatggaatggacgggattggagtttactcaaatggaatggactggagtggaatggactcgaa

SEQ ID NO: 69951 - DNA, 120 bp, synthetic construct
  source 1..120: mol_type = other DNA
tggaatggaatcggatggaatggaatggaatggaaacgaatggaagagaattcaatggaatggcatcgaatggaatggaaaggaatgaactggaatggactcgaaaggaatggactagaa

SEQ ID NO: 69952 - DNA, 120 bp, synthetic construct
  source 1..120: mol_type = other DNA
tggaatcgaaaggaatgcaatagtatgaaatggaatcgaatggaatggaattgaacggaatggaacggaatggaaaggactggaatagaaccgacacaaatgtaatggattgcaatgtaa

SEQ ID NO: 69953 - DNA, 120 bp, synthetic construct
  source 1..120: mol_type = other DNA
tcgaatgtaatggactggagtggaatggaaatgaatggaatggaaacgaatggaatggaatgaaaatgaagagaatggaatggaatcggatgggatggaatcgaatgaaatggtgtcgaa

SEQ ID NO: 69954 - DNA, 120 bp, synthetic construct
  source 1..120: mol_type = other DNA
tggaatggaggggagtgtaatggaaagatagcgaaaggaatttcatggaatgcaatggactccaatggaatggactggattggaatttaatggaatggaattgactggagtggaatggat

SEQ ID NO: 69955 - DNA, 120 bp, synthetic construct
  source 1..120: mol_type = other DNA
gaatgaagtgtaatggaaagttgtcgaatggaatgcaaaggaatttaatggagtcgaagggaatggactggaatggaatggaattgaatggaacggagtggagtggaatggactcgaatg

SEQ ID NO: 69956 - DNA, 120 bp, synthetic construct
  source 1..120: mol_type = other DNA
taaaggaatggaatggaatggaatagcatggaattgtctggaatggaaaggactcgaatggaatggacaggtgtggaatggactagaatggaatggaaacaaacggagttgtatggaatg

SEQ ID NO: 69957 - DNA, 120 bp, synthetic construct
  source 1..120: mol_type = other DNA
ggaccggaatggaatagactggaacagaacgggctcaaatgtaacggaatgcaatgcaattgatttgaatttagtggaatcaaacgcaatgaaatcaaatggaatggaatggtttgcaat

SEQ ID NO: 69958 - DNA, 120 bp, synthetic construct
  source 1..120: mol_type = other DNA
caatggaaaggaatagaatggaatgcaatggaatggaacagagtggaatcaagtggaatggaatcgaatggaatggaatcgaatggaatggactggagaggaatgcaattgaatggaatg

SEQ ID NO: 69959 - DNA, 120 bp, synthetic construct
  source 1..120: mol_type = other DNA
atggaatggactggaatagaatggactcgaaagtaaagtattgcaatgtaattgatatgaacggaatggaatcgaatggaatgaaatccaatggaatggaaaggaatgcaatggaacgca

SEQ ID NO: 69960 - DNA, 120 bp, synthetic construct
  source 1..120: mol_type = other DNA
cggatggaaaagaatggaatggaaaggagtcgaatagaataggataaaatggaatgacatcgaacggaatggaatggaacagaatggaattaaatggactcgaatggaattggctcgaat

SEQ ID NO: 69961 - DNA, 120 bp, synthetic construct
  source 1..120: mol_type = other DNA
ggcatcaaaaggaatggaatggaatgaagtggaatggactcgaatggaatggagtagaacggtagagaatcaaatgtaatggcatcgaaaggaatagaatggaatggaatcgacccaaat

SEQ ID NO: 69962 - DNA, 120 bp, synthetic construct
  source 1..120: mol_type = other DNA
ggagtcgaatggaatagaatcgaatggaatggaatggaatggactcgaatggaatggacccgaatgaaacaaaatcgaatggaatggcatggaatggaatggaatgtaacggaatggaat

SEQ ID NO: 69963 - DNA, 120 bp, synthetic construct
  source 1..120: mol_type = other DNA
gaatggaatgtaccccaatggaatggaaacgaatggaatggaaaggaatagaatggaatggaattggatggaatgcaagggaatggaatggagttgaatggaatagaatcgactggaaag

SEQ ID NO: 69964 - DNA, 120 bp, synthetic construct
  source 1..120: mol_type = other DNA
gaatgttatggacttgaatggaattgactcgaatggaaaggactgcagtggaatggactggaatggaagggaaacgactggaatggaatgcaatggaatggattggaatggaatagaata

SEQ ID NO: 69965 - DNA, 120 bp, synthetic construct
  source 1..120: mol_type = other DNA
gactcgaatggaaatgactggaacaaaatggaatggaaagggctggaattgaatggaatggaatggaatggaaaggaagggaatacaatggaatggagtagaatggaatggaaccaaatg

SEQ ID NO: 69966 - DNA, 120 bp, synthetic construct
  source 1..120: mol_type = other DNA
aatggagttgaatggaattgaaagaaaaggatgctatggagtgtaatggagagatatcgaatggaatggaatggaagggactcgaagggaacggagttgaaaggaatggaatcgaatgga

SEQ ID NO: 69967 - DNA, 120 bp, synthetic construct
  source 1..120: mol_type = other DNA
attggaatgtacgcgaatgtaatggattcgaatggattatactggaaaataatggagtcaaacagattggaatctaacggaacagaatggaatggaatggaatggaatggaatagaatgg

SEQ ID NO: 69968 - DNA, 120 bp, synthetic construct
  source 1..120: mol_type = other DNA
ggaatgcaatggaatggaacgaagtgcaatcgagtggaatggaatcaaatgaaatggaatcgaattaaatggactggaatggaatgttgtggaatggaatgaactggagtggaatggact

SEQ ID NO: 69969 - DNA, 120 bp, synthetic construct
  source 1..120: mol_type = other DNA
gaaaggaattcattcgaatcgaatggaatcgaatggaatgcaatagaagggaatcgaatggaatggagtgcagttgaatggaatggaacggaatggaatggactggaatagaaaggactc

SEQ ID NO: 69970 - DNA, 120 bp, synthetic construct
  source 1..120: mol_type = other DNA
actggtagaaaatggaatcgaatggattggaatcgagcaggaccaaatggaatggaatggaatgtcctcgaatggaatggactgcaatggaatgtactggaaaaaaatggaatcgaatgg

SEQ ID NO: 69971 - DNA, 120 bp, synthetic construct
  source 1..120: mol_type = other DNA
aatgcaatggaaagcaataaagtggaatgcaatgtaatggaacgtagtggaatcgagtggaatggaatcgaatggaatggaatcgattggaaaggagtggaatggaatggactcgaatgg

SEQ ID NO: 69972 - DNA, 120 bp, synthetic construct
  source 1..120: mol_type = other DNA
tggaaaggaatggactcgaatggaatggactcgaatggaatcgaatcaaatggaatgtcatcaaaaggaatggaatgtaatggacccaaatgtaacggactcgaatggaatggactcaaa

SEQ ID NO: 69973 - DNA, 120 bp, synthetic construct
  source 1..120: mol_type = other DNA
tggaatgcaatggaatggaatggaatggaatggaatggacccaaatgtaatggattcgaatggaatcaactcaaatagaatggattcaaaaggaatgatctcgaatggaatttattcgaa

SEQ ID NO: 69974 - DNA, 120 bp, synthetic construct
  source 1..120: mol_type = other DNA
tggactacaatggaatggactggagtggaatggactggaatggaagggagaagaatggaatggaatggaatggaaaggaatagaatggaatgaattcggatttcatggaatggaatggaa

SEQ ID NO: 69975 - DNA, 120 bp, synthetic construct
  source 1..120: mol_type = other DNA
cggagtgtaatggaaagttatcaattggaatggaatgcaatggaatcgaatgcaatggactggaatggaatggactagaatggaatgggctgaagtggaatggacttgaatggaaaggaa

SEQ ID NO: 69976 - DNA, 120 bp, synthetic construct
  source 1..120: mol_type = other DNA
aattgaaagagaaaagggaccaagaaaactcagagagaacagggagcagcgaggacaggagcagctgatttattggatgagaatgaaagcaaaggtcagggatttgtccttcaaagttct

SEQ ID NO: 69977 - DNA, 120 bp, synthetic construct
  source 1..120: mol_type = other DNA
tagggtagaggctagagagggacatcatgtacaaggtacttagtgggcgttttgtctctactgcatgtgcacgtgtgaatttcttgttacaaagtgtgtttcaagttgatatgatgtaaa

SEQ ID NO: 69978 - DNA, 120 bp, synthetic construct
  source 1..120: mol_type = other DNA
gttctgtatcagtcttgaacccctcggagctctgctggagaaagtttctgccaacacgagggtctcgagagaggcagcaattactcttaagaccctcatcttggagggctgtcagatcca

SEQ ID NO: 69979 - DNA, 120 bp, synthetic construct
  source 1..120: mol_type = other DNA
ctaaaacaagtcaatcaaatacagaggacaccagaaagttttcattgaggttatttctgatatttcttggtaaccgtccctgcagggataacattctcatcactgtagaactttagcttc

SEQ ID NO: 69980 - DNA, 120 bp, synthetic construct
  source 1..120: mol_type = other DNA
tagaatggagtgtaatggaaagatatcgaatggaatggaaaggagtggaatcgactcgaatggaatagactggaacgaaatagtctcgaatggaatagactggaacgaagtggaatctaa

SEQ ID NO: 69981 - DNA, 120 bp, synthetic construct
  source 1..120: mol_type = other DNA
aatagaatggaatgcaatggaatggaacagagtggaatcgtgtggaatggaatcaaatggaatagcatcgaatggaatggactggaatggaatggacacgattggaatggactggaacaa

SEQ ID NO: 69982 - DNA, 120 bp, synthetic construct
  source 1..120: mol_type = other DNA
tgattcgaatggaaaggaatcgaatggaatgtaagcaattggaatggaatggaatgaaatggaatggagaagaatggaatgcaatggaatggaatggagtggaatcgagtggaatggaat

SEQ ID NO: 69983 - DNA, 120 bp, synthetic construct
  source 1..120: mol_type = other DNA
gaatcaaatggcatggcatcgaatggaatggaatggaatggaatggaatggaatgcaatggactcatatttaatggacacgaatggaatggactcaaatagattggactcgaaaggaatg

SEQ ID NO: 69984 - DNA, 120 bp, synthetic construct
  source 1..120: mol_type = other DNA
gcacctgttgtttcctgactttttaatgattgccattctaactggtgtgagatgatatctcatagtggttttgatttgcatttctctgatggtcagtgatgatgagcattttttcatgtg

SEQ ID NO: 69985 - DNA, 120 bp, synthetic construct
  source 1..120: mol_type = other DNA
acacaaacaaatggaagaacattccatgctcatgggtaggaagaatcaatatcgtgaaaatggccatactgcccaaggtaatttacagattcaatgccatccccatcaagctaccaatga

SEQ ID NO: 69986 - DNA, 120 bp, synthetic construct
  source 1..120: mol_type = other DNA
ctgagttctagtttgattgcactgtggtctgagagatagtttgttataatttctgttcttttacatttgctgaggagagctttacttccaagtatgtggtcaattttggaatagatgtgg

SEQ ID NO: 69987 - DNA, 120 bp, synthetic construct
  source 1..120: mol_type = other DNA
tgagcctatgtgtgtctctgcacgtgagatgggtttcctgaatacagcacactgatgggtcttgactctttatccaacttgccagtctgtgtcttttaattgaagaatttattccattta

SEQ ID NO: 69988 - DNA, 120 bp, synthetic construct
  source 1..120: mol_type = other DNA
aacgagaacaaagacaccacataccagaatctctgggacgcattcaaagcagtgtgtagaaggaaatttatagcactaaatgcctacaagagaaagcaggaaagatccaaaattgacacc

SEQ ID NO: 69989 - DNA, 120 bp, synthetic construct
  source 1..120: mol_type = other DNA
cacctctacgcaaataaactagaaaatctagaagaaatggatacattcctcgacacatacactctcccaagactaaaccaggaagaagttgaatctctgaatagaccaataacaggctct

SEQ ID NO: 69990 - DNA, 120 bp, synthetic construct
  source 1..120: mol_type = other DNA
tttccttgagcagtggtttgtagttctccttgaagaggtccttcacatcccttgtaagttggattcctaggtattttattctctttgaagcaattgtgaatgggagttcacccatgattt

SEQ ID NO: 69991 - DNA, 120 bp, synthetic construct
  source 1..120: mol_type = other DNA
ttctgttactactttctgttgtgtgcattcaactcacagagttgaaccttcctatattcagagcagttttgaaacactctttttgtggaatttgcaagtggagatttcaagggatttgag

SEQ ID NO: 69992 - DNA, 120 bp, synthetic construct
  source 1..120: mol_type = other DNA
tacaaatcaagcagaatctcaatgtactctgtttattcactgctccaatcctaacttcaaatcactgtgtaaccaaatacactttcccatcttcctgatagagcagggggaagtggggga

SEQ ID NO: 69993 - DNA, 120 bp, synthetic construct
  source 1..120: mol_type = other DNA
gtaataatcccattagtatacagtaaatcaaacccaaagcactacaacctccattttaaaatacgagcaagtgatagtccggaacccagccagaaagtcattcctggctcttctgtgagg

SEQ ID NO: 69994 - DNA, 120 bp, synthetic construct; identical to SEQ ID NO: 10592
  source 1..120: mol_type = other DNA

SEQ ID NO: 69995 - DNA, 120 bp, synthetic construct
  source 1..120: mol_type = other DNA
ttgtagacatctttcacctccttggttaggtctattccgaagtattttattttattttagtttatttttgcagctatcagaaaaggggttgagttcttggtttgattctaagcttggtcg

SEQ ID NO: 69996 - DNA, 120 bp, synthetic construct
  source 1..120: mol_type = other DNA
tgtcatttgttttcagggtgtgagagaatatttaagtgatactctttttatcctccacataagaaaataggactagagaaacctatggcttcctcacttgttggtggcctagcagccctg

SEQ ID NO: 69997 - DNA, 120 bp, synthetic construct
  source 1..120: mol_type = other DNA
aggataggttccctttactgaatgttttttgtggaaacttagtttttcaatgcatcataggcctaaatcagtgtgcactactttggacattatccttggaagaaggaacagcttttcttc

SEQ ID NO: 69998 - DNA, 120 bp, synthetic construct
  source 1..120: mol_type = other DNA
attaatagggcaaattggcttcaagaagatattttgaaaaatgttttatcatgaatcagtagtgcactgttgtcagtgggataggtggaactcgctgagatcacttatgcaaggtttttt

SEQ ID NO: 69999 - DNA, 120 bp, synthetic construct
  source 1..120: mol_type = other DNA
ggtgatccacctgccttggtcttccaaagtgctgggattacaagtgtgagcaaccatgcccggcacaggcacattacatttattgtgcactttatttctattattattacattgtaatat

SEQ ID NO: 70000 - DNA, 120 bp, synthetic construct
  source 1..120: mol_type = other DNA
taactgagacgacaaatacgttactacctaagcttcctttagtaacgtcttccactacctttaggttaaaacattttaaaagataaaattaaaactataaaatgttgtacttttagagtg

SEQ ID NO: 70001 - DNA, 120 bp, synthetic construct
  source 1..120: mol_type = other DNA
aagaaagtgtataatcactagggatgagtttaattttcttaagaaagacagatattgggatcctctaataatacattaaatgcccactaaagtcagaggtatgtatttgataatgtacct

SEQ ID NO: 70002 - DNA, 120 bp, synthetic construct
  source 1..120: mol_type = other DNA
gagaattgcttgaacctgggaggcggagattgcagtgagcctagattgcgccactgcactccagcctgggtgacaagagtgagatttcatctcaaaaataataataatataaataaataa

SEQ ID NO: 70003 - DNA, 120 bp, synthetic construct
  source 1..120: mol_type = other DNA
tcccaggtctttactgaacatgtacgcaggcctacacttgggagtagcctcatagatttctaggaatcattctgttggaattttcaaagcccttatggacatctcattctcctgttttac

SEQ ID NO: 70004 - DNA, 120 bp, synthetic construct
  source 1..120: mol_type = other DNA
tcgctcacacacacacccaagcccaatcactaagttgccatagctaatttgtagctttcctgccttcctggcaaaatttgactctgcattgggataatacatgtcgagtacctattgaac

SEQ ID NO: 70005 - DNA, 120 bp, synthetic construct
  source 1..120: mol_type = other DNA
gtctcttaattggttgggttgcttccttcagtctttattatacagaccactacacgcacatctgacagagacttttcacctttttatggttgaatgactgaaattcccagaataaaatta

SEQ ID NO: 70006 - DNA, 120 bp, synthetic construct
  source 1..120: mol_type = other DNA
actaattagtgtataaaaatacattttttggtgtggctgccgacaaagagatccaagagggtagatggagtcgagcttgctgaagcaaggaaagagaaaagcagtattctaggcagagag

SEQ ID NO: 70007 - DNA, 120 bp, synthetic construct
  source 1..120: mol_type = other DNA
gagccctccatggaaaaccacagtcgaaaaatggatttagtatctgcattgttcagggtcatggcaagaaatggcattgaatgcttcaaatgatgagactttaatggcagtagtccttac

SEQ ID NO: 70008 - DNA, 120 bp, synthetic construct
  source 1..120: mol_type = other DNA
gggctcttcaagtgtttgacttatgacctaagtagctaggcaggctgacaagaagagacaaatcaagctatcttgcagactaataaacttttatctaaacttctttggttcgggtgaggg

SEQ ID NO: 70009 - DNA, 120 bp, synthetic construct
  source 1..120: mol_type = other DNA
ttagcctcccaaagtgctgggattagaggtgtgagccaccgcacccggccggctaaacttgatttaacagtaccttttgggagataatttttttgtataatggaatagttactctaatta

SEQ ID NO: 70010 - DNA, 120 bp, synthetic construct
  source 1..120: mol_type = other DNA
tgcctgacttcaagggttaccagccttacaatgagtacattaaaattgtcatttcctggcacaggaaccttaaaactgtaagcaaaatctaaagtctgcctcagtttggcttcccagtct

SEQ ID NO: 70011 - DNA, 120 bp, synthetic construct
  source 1..120: mol_type = other DNA
ctgattcacacccaaggtgcatgtcacacccatggggggcaccccaaagtggtaagaagtcccaggatggaagataaggctagaaaggggaggtagagacacctgtggaagaaaaaaaat

SEQ ID NO: 70012 - DNA, 120 bp, synthetic construct
  source 1..120: mol_type = other DNA
aggcagtctcactctatgtggccccatgtgtgttcttggatttctttctacacaaggtcacctgtaggtgtacagtagacacatcacctgtagaagagccaatggggatgggtgaggacc

SEQ ID NO: 70013 - DNA, 120 bp, synthetic construct
  source 1..120: mol_type = other DNA
ctgtagtcccagctacttgggaggctgaggcaggagaattgcttgaactgaggaagcagaggtttcagtgaacaataggaaaacagtattacaaggaaaactactagtcctaagatttct

SEQ ID NO: 70014 - DNA, 120 bp, synthetic construct
  source 1..120: mol_type = other DNA
tcctgtacccacccatggacactttgcaagtctgtccctaatgcctgcatttgctttcttaaggttaattctcttagttcaaggagataacctttaatttgacttatgattgggggaggc

SEQ ID NO: 70015 - DNA, 120 bp, synthetic construct
  source 1..120: mol_type = other DNA
tttcttttggtttttggtgtccctgacttttggtgccatctgcagtgcattaaagctacttttcctggaggccatacagcctctaagagctgtagaatctcttctttgtacttgatttct

SEQ ID NO: 70016 - DNA, 120 bp, synthetic construct
  source 1..120: mol_type = other DNA
cctgaagaaccaggcttctctcctatatcctccatctcgccttcagcctgcatcccttcttactaccctctctccattataatttgctctctgtacattttaaatcaatcaaattagcaa

SEQ ID NO: 70017 - DNA, 120 bp, synthetic construct
  source 1..120: mol_type = other DNA
ttttttttgagatggagttttgccacgttgcctagactggtctcaaacttgtgagctcaagtgatgctgggataacaagcatgagccattacacctcgcctaggtttcctattttattta

SEQ ID NO: 70018 - DNA, 120 bp, synthetic construct
  source 1..120: mol_type = other DNA
gggagaagaataactaaattatgaaggatcatcaatctggaaccactgcagctctttaaaaaagaaaaagaaggtaaaactactattattgccctggcaggatatccactatagctgtaa

SEQ ID NO: 70019 - DNA, 120 bp, synthetic construct
  source 1..120: mol_type = other DNA
atataccaagaaatgatcaaatgacagccagagtgtcagtcactcagctggttccaaatgcctaataaaaattaactccctctgtccttaccacagccctatgaggtggccacacttatt

SEQ ID NO: 70020 - DNA, 120 bp, synthetic construct
  source 1..120: mol_type = other DNA
taaacaaaaaagaaaatggagaaggggagtttttaatcaaatggattttcacttgggttttatcatgaacctggaactgctttgaaagctgaagccagctgggcttctgggtcgggtggg

SEQ ID NO: 70021 - DNA, 120 bp, synthetic construct
  source 1..120: mol_type = other DNA
acgagcccagctcaatgccaggaagtttatgaattcctggggccttctagtctcatggttacatctgctgccaaaaaccagatcctatgaagttagttcagtttagtgatcttctcacca

SEQ ID NO: 70022 - DNA, 120 bp, synthetic construct
  source 1..120: mol_type = other DNA
ttttttaagtttgtttttaattttttttttttaattcagaaagagaccttgttgccaccctctgcatactcagaaaggaaccccagtccgtgcagaaaggggccacggacagtggctgtc

SEQ ID NO: 70023 - DNA, 120 bp, synthetic construct
  source 1..120: mol_type = other DNA
acctaaaccttcccactcctgcggcacccactaccattcagcctcagggccatcctaaccttaactccaggctcctctctcacatgggactattccagctctgactttagctcccatgaa

SEQ ID NO: 70024 - DNA, 120 bp, synthetic construct
  source 1..120: mol_type = other DNA
aaacaccctgcatatccacacatacacacaggcatattcacacatatatacgtgcacctgcatacaaacacacacatagacacaaacacccataaatatccacacacacacaaacatgca

SEQ ID NO: 70025 - DNA, 120 bp, synthetic construct
  source 1..120: mol_type = other DNA
cagcactgatgcaaagctcctgatgtgactaggagtttaagaaccccctaagtgcccctagctgcctggtatagacctgccagcctctgcccatcctgcttcatctgctctgaccttttg

SEQ ID NO: 70026 - DNA, 120 bp, synthetic construct
  source 1..120: mol_type = other DNA
gaagagtgtgtgtatcattcctctttgtaatcccagctctgtcatcacaagatggaattcaagcatgtacctggtagttgatcaagctctatattcatagagcccaaacccaaacctaaa

SEQ ID NO: 70027 - DNA, 120 bp, synthetic construct
  source 1..120: mol_type = other DNA
ctggcctcaagctatcctcccaaagtgctggcattagaggcatgagccactgcacctgacttaggatggatatatttttttcaatggaaaataacaagggctaacaagaatgtagaaaaa

SEQ ID NO: 70028 - DNA, 120 bp, synthetic construct
  source 1..120: mol_type = other DNA
tatgaattacccagcctcaggtattcttttatagcaacacaaaacaaaccaagacagcttctatctctctcctactgacctatgagcagggcatgctttgtttctgtctttgcattcagc

SEQ ID NO: 70029 - DNA, 120 bp, synthetic construct
  source 1..120: mol_type = other DNA
taaaaaccatacacacacagaagtgaggacatctaaaaatgggatctgcgttactgatgtgtaagccagaaaaaaagaggagttctcaaatacactctgagctggacttcacagctacgc

SEQ ID NO: 70030 - DNA, 120 bp, synthetic construct
  source 1..120: mol_type = other DNA
caatccctttttatgtataagaaataggctcagagaggccagatggcatggcccagtttgcacagtaaggtgattgcctgtcacggccaaatagccaccacgtccggataatccatggcc

SEQ ID NO: 70031 - DNA, 120 bp, synthetic construct
  source 1..120: mol_type = other DNA
ctttctctgcaagcaaagctacactgatataatacagatgaaactgggaaagtccaggctaaatttcaggatacgtatacagaaatgcgttgagatacagcacctcactcagcaaccatg

SEQ ID NO: 70032 - DNA, 120 bp, synthetic construct
  source 1..120: mol_type = other DNA
atagggaagtcctgctctgtgtctgaaaatgtcaaagacagcttattcctgggaagccatcaaatacgccctgctctgctgtatatattattcaagtactcagtaaaccctttgtttctg

SEQ ID NO: 70033 - DNA, 120 bp, synthetic construct
  source 1..120: mol_type = other DNA
ctggggtctctctcgaaatttccttttgtttgtcctgctgacctttctatgcatgcttttactctgaagtcacaccttttcttaacctgtagaaaattctcggtcatgtcattctaccac

SEQ ID NO: 70034 - DNA, 120 bp, synthetic construct
  source 1..120: mol_type = other DNA
aatatgataatacagataagttgaatttactaatagagaatataacagtaacaaggtctgtgttactgtggctttaagtattagaattgtggccggcgcggtggctcccgcctgtaatcc

SEQ ID NO: 70035 - DNA, 120 bp, synthetic construct
  source 1..120: mol_type = other DNA
caaaaaaaaaacagaaaaaaaattacattgtcagacaataatgcagtaagcaaaagacacatatctatagagttaaatggggaaaggatatgagtaggcaagtccccaaagaagaaataa

SEQ ID NO: 70036 - DNA, 120 bp, synthetic construct
  source 1..120: mol_type = other DNA
ctcctgttaacccagtaccttgggaggctgaggtgggtggattgcttgagcccaggagtccaagttctcatcttaaaaaaaaataaaaaataaaaaaaattggattgtaaaacttcatgt

SEQ ID NO: 70037 - DNA, 120 bp, synthetic construct
  source 1..120: mol_type = other DNA
agattgctccatgtttaatgtgaatattcttttaaaattaatagttttttggttaatagaagagaaattacagttgtctctaggtgactctatggtgtttaggttagtattgaaaacgta

SEQ ID NO: 70038 - DNA, 120 bp, synthetic construct
  source 1..120: mol_type = other DNA
gtattataatgactagtagagaaatgaatgatagataaaaagacacaagccagatgtggtgaatcatgcctacagacttgagggtaggcagatcagcttgcccaacatggcaaaaccctg

SEQ ID NO: 70039 - DNA, 120 bp, synthetic construct
  source 1..120: mol_type = other DNA
gcctcccaaagtgctgggattacaggcgtgagccactgcgcccagccaattttctcatttttgatacactaattctaaagtaaactttcccctttattacttgaagatttatttcaggtg

SEQ ID NO: 70040 - DNA, 120 bp, synthetic construct
  source 1..120: mol_type = other DNA
ttctgaggtcccatagctttagcaggcctcttacatatgccttcattgtctgttctttccatgacatttagacatttatttctttctccctcccattgtgtccaagtccctcacactgtt

SEQ ID NO: 70041 - DNA, 120 bp, synthetic construct
  source 1..120: mol_type = other DNA
gtcagaaagatggattgcatcagatctataagagcttggggctttgccatataggagggagtatggtgtttccagttcaagagatcaatggttgaaaagggatgatagatgaaagtccat

SEQ ID NO: 70042 - DNA, 120 bp, synthetic construct
  source 1..120: mol_type = other DNA
accagatcatctcctattatgggagttttcagatgccacttggcttaagaaagggttttattcccaccataactctgagatgtggggcagctcctattagctgtatgcggttcgccacta

SEQ ID NO: 70043 - DNA, 120 bp, synthetic construct
  source 1..120: mol_type = other DNA
agagaaagactggtaggaaacaggctctcgttttatcagatctgcagaggaatgatcactcttccagcttactgcagtagaccaaaagtataacaacagaaaacctacaaagctgacaat

SEQ ID NO: 70044 - DNA, 120 bp, synthetic construct
  source 1..120: mol_type = other DNA
ttggactaggatgggagatgaactgagaactatggattctgtaggttgttgttgtctcttcccaccccaagcaacaagtgatgaacacacacacacacacacacacacacacacacacac

SEQ ID NO: 70045 - DNA, 120 bp, synthetic construct
  source 1..120: mol_type = other DNA
gaaacttctgatgtactctattaagtcccgactccaaaacacccagacattgcctggtgcagcaggtacggagacaaatgagatacaccaagaggcccagaataaccactctcttgaggg

SEQ ID NO: 70046 - DNA, 120 bp, synthetic construct
  source 1..120: mol_type = other DNA
tctttgatctctgttaacacattgtactatgtggtaataatataaactgccttactggatagtgatgtatctttggtttcatattgttactggactaatattccaacactatagatagtg

SEQ ID NO: 70047 - DNA, 120 bp, synthetic construct
  source 1..120: mol_type = other DNA
tttaaccccactttgaagactctagccaatgtcctttgtatgaaacagtctctccactatgcctaatggaaacataaactattcccagctctgtgtgagctcctggaattgttcagtgtt

SEQ ID NO: 70048 - DNA, 120 bp, synthetic construct
  source 1..120: mol_type = other DNA
tgtcttcctgatcacagttttttgaatcaaatttactctgggcaatcagattctctttgctgggaatttggaaatggggttggtctcttgaaaagaaaagtaaaatcaggaaaatagaat

SEQ ID NO: 70049 - DNA, 120 bp, synthetic construct
  source 1..120: mol_type = other DNA
tggtctcgaactcctgatctcaggtgattcacccgcctcagcctcccaaagtgctgggattataggcatgagccagccaccgcacccggccagcataatgaacttcggtacctattagcc

SEQ ID NO: 70050 - DNA, 120 bp, synthetic construct
  source 1..120: mol_type = other DNA
gctaagagaagccaagtaaataaacatatagcagccataatctcaacaccctaaataagcagttaacattttagcggacaaccagttgtttgggattttatttattgggattgacttaat

SEQ ID NO: 70051 - DNA, 120 bp, synthetic construct
  source 1..120: mol_type = other DNA
tgcctatagatagatacatgagaattttctttacagaaagcagttggttattataaatgatgaccgttcaggagggcaaggaatctttagaaaatattttattaaaattatctctggtgg

SEQ ID NO: 70052 - DNA, 120 bp, synthetic construct
  source 1..120: mol_type = other DNA
aactggtaaaatcttggtaatgttatagcatcatgtaagttcctaagccagttttatatttatgtgcccctcccgtgctctgcttctccaacttcacagacatatagaggtggtcaccac

SEQ ID NO: 70053 - DNA, 120 bp, synthetic construct
  source 1..120: mol_type = other DNA
ttatgttgctgacactggcagttcattggctttttgcaattaatttattaataaaaattaatcacattcttctttcctgcctgtatggaggacctgtcttcttcccaaggcctgccccaa

SEQ ID NO: 70054 - DNA, 120 bp, synthetic construct
  source 1..120: mol_type = other DNA
ccattgcaccataaatcatctgtacatgaaagaccgaagactgagaaacctcaaatacagagcaggtaaatagtaaggaacgtgtttggatgaaataccagaacacctgaccatcagtgg

SEQ ID NO: 70055 - DNA, 120 bp, synthetic construct
  source 1..120: mol_type = other DNA
ttgctctggagcagtgggtgtctggagcctattcctttctttcaacttctccaacagcattatcttataactgtccttgaaatgagcttgctaggcagaggaaaacttgttttttgtttg

SEQ ID NO: 70056 - DNA, 120 bp, synthetic construct
  source 1..120: mol_type = other DNA
ttagaacacttagtcccatccagcccagccctcaccttactttgtaatgtaggcctgatttctttcagtgaaaccttgaccttaaccttgagaaaaattacaccctcagtagttcctgtc

SEQ ID NO: 70057 - DNA, 120 bp, synthetic construct
  source 1..120: mol_type = other DNA
aggttgcagtgagctgagatagcaccactgcactccagcctgggccatagagcaagcctccatctcaaaaaaaaagttaattgacaatagatgtatgtagatagatcatggatttatttc

SEQ ID NO: 70058 - DNA, 120 bp, synthetic construct
  source 1..120: mol_type = other DNA
tcgagtagctgggattacagcaattatatgccaccacacccaactaatttttttgtatttttagtagagatggggtttcactatgttgaccaggctggtttcaaactcctgacctcaggt

SEQ ID NO: 70059 - DNA, 120 bp, synthetic construct
  source 1..120: mol_type = other DNA
cacagagcacaccctctttttaccttcaaagaaagaagccagacattgatacaggttactgtgtatgcagcagactatcctgaaggtttagggagacagagtattgatatctcagatctg

SEQ ID NO: 70060 - DNA, 120 bp, synthetic construct
  source 1..120: mol_type = other DNA
gttattgtggtcagtgtctgttctgatcagggcatgcttgtgatgtaagagtaacttaatgttttgattatgatccctggccttttccagaagtggcatccaagggcatccagattaaaa

SEQ ID NO: 70061 - DNA, 120 bp, synthetic construct
  source 1..120: mol_type = other DNA
caggcacagattcagggttaagccatcctatctctccaaatggtaagctcctgatggtgcttcatcatcatgaagaagatgatctgtctgagtattgaggactgccgactcactaaaatt

SEQ ID NO: 70062 - DNA, 120 bp, synthetic construct
  source 1..120: mol_type = other DNA
taaatttaccacatgtattttacactacaaagtaaacatttagaattttgaataggccaggcacagtggctcatgccagtaatgtcagcactttgggaggccaaagcaggcgggtcactt

SEQ ID NO: 70063 - DNA, 120 bp, synthetic construct
  source 1..120: mol_type = other DNA
agtttctttgagcaaatttctgttccaaactgggtttggaagtcatgacagaaactgggctggttcaaggaatggatttgatctggtaattaactggcttggatacagttagaggcctct

SEQ ID NO: 70064 - DNA, 120 bp, synthetic construct; identical to SEQ ID NO: 69995
  source 1..120: mol_type = other DNA

SEQ ID NO: 70065 - DNA, 120 bp, synthetic construct
  source 1..120: mol_type = other DNA
ttctaagtgaaataactcagcatggaaaaccaaatatcatgttctctttcctacgtgggagctaagctatgaggatgcaaagccataagaatgatacaatggactttggggacttggggg

SEQ ID NO: 70066 - DNA, 120 bp, synthetic construct
  source 1..120: mol_type = other DNA
ttgcactccagcctgggcaacagagtgagactccatttcaaaaaaaaaaaaaaaaagagtgtggtaccttcccccttcccctctctctttcaccgtgtggaaccacctgcttcccctttg

SEQ ID NO: 70067 - DNA, 120 bp, synthetic construct
  source 1..120: mol_type = other DNA
tttgctgtacactcaaaactactctaaaataataatatatctttaaaaatctataactagcacgtagcccttttcaagcctccaactggttggagccagttcgattaaagctcagaagaa

SEQ ID NO: 70068 - DNA, 120 bp, synthetic construct
  source 1..120: mol_type = other DNA
tcccaaagtgtaatttttgtatttttagtagagacagggtttcacgatgttggaggaggctggcctcaaactcctgacctcaagtgatctgactaccttggacttccacagtgccgggtt

SEQ ID NO: 70069 - DNA, 120 bp, synthetic construct
  source 1..120: mol_type = other DNA
tcctcatgtgatgtagaaagtattaaaagtgatgagtgtaggccgggcacggtggttcacacctgtaatctcagcactttcagaggccgaggtgggtgcatcacctgtggtcaggagttc

SEQ ID NO: 70070 - DNA, 120 bp, synthetic construct
  source 1..120: mol_type = other DNA
gcttgaaccggggaggcagaggttgaaatgagctgagatcgtgccactgcattccagcctggtgacacagtgagactccatctcaaaaaataaatgaataaaataaataaaaaaataaat

SEQ ID NO: 70071 - DNA, 120 bp, synthetic construct; identical to SEQ ID NO: 47
  source 1..120: mol_type = other DNA

SEQ ID NO: 70072 - DNA, 120 bp, synthetic construct; identical to SEQ ID NO: 68089
  source 1..120: mol_type = other DNA

SEQ ID NO: 70073 - DNA, 120 bp, synthetic construct; identical to SEQ ID NO: 68088
  source 1..120: mol_type = other DNA

SEQ ID NO: 70074 - DNA, 120 bp, synthetic construct
  source 1..120: mol_type = other DNA
tatgagcatggctcactgcagcctcaatcttctgggctcaagtgattctcccacaccagccacccaaatagctgggactacagatgcatgtcaccatgctcggctaattaaaaaaaaaaa

SEQ ID NO: 70075 - DNA, 120 bp, synthetic construct
  source 1..120: mol_type = other DNA
tttaccatgttggccaggcttgtctcaaactcctgacctcagataatccacctgcctctgcctcccacagtgctgggattacaggtgtgagccacttcgtctggccttgaatgaatgtat

SEQ ID NO: 70076 - DNA, 120 bp, synthetic construct
  source 1..120: mol_type = other DNA
ttccaaagtgctgggattacagctgtgagtcactggtgcttggcctctacttttttttttttaaattagccgagcatggtgacatgcatctgtagtcccagctatttgggtgtctggtgt

SEQ ID NO: 70077 - DNA, 120 bp, synthetic construct
  source 1..120: mol_type = other DNA
cttgaacccaggaggcagaagttgcagtgagctgacattataccactccactccagcctgggaaataggctagattgaacagagagacagagagagctacatttgattagaattcttaat

SEQ ID NO: 70078 - DNA, 120 bp, synthetic construct; identical to SEQ ID NO: 68083
  source 1..120: mol_type = other DNA

SEQ ID NO: 70079 - DNA, 120 bp, synthetic construct
  source 1..120: mol_type = other DNA
agctgggtcatgtgaagtgaggaggcccaagggggatggtggtggtgaggaagccgagaggacttggccattcaccagctcctcagggaaagcactgctcaccacgcaaggtccatggag

SEQ ID NO: 70080 - DNA, 120 bp, synthetic construct
  source 1..120: mol_type = other DNA
attcacttccacctcctggatacagtctaggttcaccattttcaggatgcttctgatattgcggaagggcattcccaaaattttcagcttcttacagcacaggtgtagtaaatctctcct

SEQ ID NO: 70081 - DNA, 120 bp, synthetic construct
  source 1..120: mol_type = other DNA
aatcccagcactttgggagtccaaggtgggtggatcacctgaagtcaggagttggagaatagcctggccaacatggtgaaaccctgtctctacttaaaatataaaaattagccaggtgtg

SEQ ID NO: 70082 - DNA, 120 bp, synthetic construct
  source 1..120: mol_type = other DNA
ctcatggccggatggtcaacacttcggatgatgtgtgatgaagagctttgccaccgaggtcaattccactttaggcccggcccagtaactcacacctgtaatcccagcactttgggaggc

SEQ ID NO: 70083 - DNA, 120 bp, synthetic construct; identical to SEQ ID NO: 48
  source 1..120: mol_type = other DNA

SEQ ID NO: 70084 - DNA, 120 bp, synthetic construct; identical to SEQ ID NO: 49
  source 1..120: mol_type = other DNA

SEQ ID NO: 70085 - DNA, 120 bp, synthetic construct
  source 1..120: mol_type = other DNA
ccgctcctggctcataatagtaaatttaaaaaaataccatataatataatccttgcaacattaaattacaccatctgatctgatctaccagcagatggcacccgagacctatggattgga

SEQ ID NO: 70086 - DNA, 120 bp, synthetic construct
  source 1..120: mol_type = other DNA
tgtaatcccagcactttgggagactgaggcgcatggatcacttcaggtcaggagttcgagaccagtctgggcaacacggtgaaactctgtatctattaaaaacacaaaaattcccaccta

SEQ ID NO: 70087 - DNA, 120 bp, synthetic construct
  source 1..120: mol_type = other DNA
gtccttcaccctattattaattctttcactttcataaatccatatctaatttaatcacttaataagaagaaagttgaaaactcaatcaccgttaactgggtggaagttcaggatccagtt

SEQ ID NO: 70088 - DNA, 120 bp, synthetic construct
  source 1..120: mol_type = other DNA
accagacggattcacagctaaagtctaccacatgtacaaagaagaactgctaccaatcctactgaaaccattccaaaaaattcaaggaggagggactcctctctaactcattctatgaag

SEQ ID NO: 70089 - DNA, 120 bp, synthetic construct
  source 1..120: mol_type = other DNA
gtacacatttatacgtctggccatttctccaagcaaaaaacaaaaaaacaaaaagcaccaagtgcactacccaatgttctgcccactgggagttatttctcttcaccactgtccttcaga

SEQ ID NO: 70090 - DNA, 120 bp, synthetic construct
  source 1..120: mol_type = other DNA
ccctggttcactagccattgtgcctcttttttgcttgtaggaagagccagatacaatttatccttcaccttatgattatctccacatgtcccacaacactggacctctagaaatttcact

SEQ ID NO: 70091 - DNA, 120 bp, synthetic construct
  source 1..120: mol_type = other DNA
tttcccagatttctgtcagtataaattggaaaaatcatgtagctcttttgtagtgtaacatacctccccatgggtcacactttgtaccttacctttaagggcctgctgggacttgagtct

SEQ ID NO: 70092 - DNA, 120 bp, synthetic construct
  source 1..120: mol_type = other DNA
agctttaagatttaaagtgtgccctgctgtgttttggacttgcatggggcctattatccctttcttttgaccaatttttcctttttggaatggaaacatttacccagtgcctgtaccacc

SEQ ID NO: 70093 - DNA, 120 bp, synthetic construct
  source 1..120: mol_type = other DNA
tagctaaacacagtaactgatatttgagcatattggggccatgcaaagtgaaggttccctatatttgcagtgttcaaaggtgtgtgaattcatctatttagtgttctcagcatttgaaga

SEQ ID NO: 70094 - DNA, 120 bp, synthetic construct
  source 1..120: mol_type = other DNA
atctcaagtctagtaggagaaacaaaagtgaaaataattaaaatatggtttggtagaaggggagagtggttacaagatgctgtgagactactggaaaaacaccaaacctagctttgagga

SEQ ID NO: 70095 - DNA, 120 bp, synthetic construct
  source 1..120: mol_type = other DNA
tgcatacagtatatgaagagagatgaccgctgttcataatagcaaagactagaacaacctaaatgtccaaatgttccatggtagttaattatatggataagtaccctaatttcagaaatt

SEQ ID NO: 70096 - DNA, 120 bp, synthetic construct
  source 1..120: mol_type = other DNA
cagccagtttacagaaagggatttgatctagctatttggtgttgtatcaccattgtgtgggcttgaagaacagatgcttctctcattatgatccaagaacaacactgcataatggtctgc

SEQ ID NO: 70097 - DNA, 120 bp, synthetic construct
  source 1..120: mol_type = other DNA
aaatcgaattctgcaagaaacaaagcagacagttgaaaatcaacttattgccataggacaaaggcatgtatacatacagtaatgaagacaagaaaggtttaaaaacaaacagtgaaaaga

SEQ ID NO: 70098 - DNA, 120 bp, synthetic construct
  source 1..120: mol_type = other DNA
ttaatgccttttccatcttaagtaagcatgtatcatgcactgtggccataactttggcactctgatgtgcaacagcaaaacttggatagaagattcattcttaccataggtctacgcaac

SEQ ID NO: 70099 - DNA, 120 bp, synthetic construct
  source 1..120: mol_type = other DNA
caagtctccttgggcaacttttggctatgatggcttctcagattttccttgtttttgatgaccttgataggtttgaagagtactggccaggtgtattcttcaatgccttactattgaaat

SEQ ID NO: 70100 - DNA, 120 bp, synthetic construct
  source 1..120: mol_type = other DNA
aatataaaattcctgccactaaatttatctttactttagtacttgcaccatctaatctactaattctaagtatttctccacattccactgcccaattttgcaccgggcagtggacttcag

SEQ ID NO: 70101 - DNA, 120 bp, synthetic construct
  source 1..120: mol_type = other DNA
gagtctggggagtaatggtgtgaacatctacctgtcttacacgaacacatttctgcccaagaacacatttctgtccataagtttcccctaaaaatcaccctctgccaataaactagatat

SEQ ID NO: 70102 - DNA, 120 bp, synthetic construct
  source 1..120: mol_type = other DNA
ctttaggaggccaaggcaggagaatcccatgtgcccagcagtttcagaccagctggggcaacacagcgaaaccctgtctcaaatgttctttaataaaattttagaattattaaaaaagga

SEQ ID NO: 70103 - DNA, 120 bp, synthetic construct
  source 1..120: mol_type = other DNA
aggactctgatcattcaggggcagtcctagtttagcctcaatcctttcaccattgcttgtgtgattggttcaaggccacaaaatcacatcactaaagcctcttttcttcatcttttagca

SEQ ID NO: 70104 - DNA, 120 bp, synthetic construct
  source 1..120: mol_type = other DNA
cactggtaattttaaagttcccaggtgatcccagtgtgcactcaaagttgagaatcactgaaaaaatggaacctagaccttggaaatgtacacaactgagtgtgcaagctacttaacctc

SEQ ID NO: 70105 - DNA, 120 bp, synthetic construct
  source 1..120: mol_type = other DNA
ctcctggaagcaaactgttatctatttgtttccctcagagagataaactcagaggaaacaggagtgatccctgaggtgggaataatatagtgggctgcaattttaaaactctgcttagac

SEQ ID NO: 70106 - DNA, 120 bp, synthetic construct
  source 1..120: mol_type = other DNA
gtgatgggagaacatgccccagaacagcctgtcaagtggtaattgccagccatcctcagtcacatatgtataaacagaaaagaaaaacaaaacgagggctcaaataaaaagcgttaacat

SEQ ID NO: 70107 - DNA, 120 bp, synthetic construct
  source 1..120: mol_type = other DNA
tgaaaaatcaaatgtgctaaatattcatggcacctgtaggtggtaggtggtcagagtcctctgcaaaattcttcccagctatgcttatgtcttctattgggaaaaacctactgggcatct

SEQ ID NO: 70108 - DNA, 120 bp, synthetic construct
  source 1..120: mol_type = other DNA
tgcaaccccagcagcctcgccagttgggtccacgcctagcctgccggccttcgtcgctatccaatcccacctgcgcccgcgagcctgcgcactggagctttgccctgcgccgcggccctc

SEQ ID NO: 70109 - DNA, 120 bp, synthetic construct
  source 1..120: mol_type = other DNA
ggatctacccacatgacccagacacttcccaccaggccccacctccaacattggggatcaaatttcaacactagattttatttatttatttatttattttgagatggagtctcgctctgt

SEQ ID NO: 70110 - DNA, 120 bp, synthetic construct
  source 1..120: mol_type = other DNA
tggtgacctttggcaggttacttcccaacttgtgtctcagttttcctttttttaaaaaaggagacacagttgcaagtgtttaatgagacaaaaaacagaagcattcatcaccacgcctgg

SEQ ID NO: 70111 - DNA, 120 bp, synthetic construct
  source 1..120: mol_type = other DNA
cagtatgtatatatgtacacatgtacatatgtacaggatatcagtatatgtgtatatacacatatatacatatgtatgtgtctatataggtacatacagacatatgtatgtgtctatata

SEQ ID NO: 70112 - DNA, 120 bp, synthetic construct
  source 1..120: mol_type = other DNA
catgctgccttcaagcatctgtttaacaaagcacatcttgcaccgcccttaatccatttaaacctgagtggacacagcacatgtttcagagagcacagggttggggataaggtcacagat

SEQ ID NO: 70113 - DNA, 120 bp, synthetic construct
  source 1..120: mol_type = other DNA
agcggccgggcagagacgctccccacctcccagacagggctgcggcccagcagaggcgctcctcacatcccagacagggcggcggggcagaggtgctccccacatctcagacgatgggcg

SEQ ID NO: 70114 - DNA, 120 bp, synthetic construct
  source 1..120: mol_type = other DNA
acggaacaaagctggatggagaatgactttgacgagctgagagaagaaggtttcagacgatcaaattactctgagctacgggaggacattcaaaccaaaggcaaagaagttgaaaacttt

SEQ ID NO: 70115 - DNA, 120 bp, synthetic construct
  source 1..120: mol_type = other DNA
cctgaaggaagcgctaaacatggaaaggaacaaccggtaccagccgctgcaaaatcatgctaaaatgtaaagaccatcgagactaggaagaaactgcatcaactaacgagcaaaatcacc

SEQ ID NO: 70116 - DNA, 120 bp, synthetic construct
  source 1..120: mol_type = other DNA
gacatgattgtttatctagaaaaccccatcatctcagcccaaaatctccttaagctgataagcaacttcagcaaagtctcaggatacaaaatcaatgtacaaaaatcacaagcattctta

SEQ ID NO: 70117 - DNA, 120 bp, synthetic construct
  source 1..120: mol_type = other DNA
gtatgtttattgcggcattattcacaatagcaaagacttggaaccaacccaaatgtccaacaatgatagactggattaagaaaatgtggcacatatacaccgtggaatactatgcagcca

SEQ ID NO: 70118 - DNA, 120 bp, synthetic construct
  source 1..120: mol_type = other DNA
tgcatttccatctgaggtaccgggttcatctcaatagggagtgccagacagtgggcgcaggtcagtgtgtgtgcgcaccgtgcgcaagccgaagcagggcgaggcattgcctcacctggg

SEQ ID NO: 70119 - DNA, 120 bp, synthetic construct
  source 1..120: mol_type = other DNA
aaaacgcagagcgcctctcctcctccaaaggaacgcagttcctcactagcaacagaacaaagctggatggagaatgattttgacgagctgagagaagaaggcttcagacgatcaaattac

SEQ ID NO: 70120 - DNA, 120 bp, synthetic construct
  source 1..120: mol_type = other DNA
atggaaaggaacaactggtaccagccgctgcaaaatcatgccaaaatgtaaagaccatcgagactaggaagaaactgcatcaactaatgagcaaaatcaccagctaacatcataatgaca

SEQ ID NO: 70121 - DNA, 120 bp, synthetic construct; identical to SEQ ID NO: 69942
  source 1..120: mol_type = other DNA

SEQ ID NO: 70122 - DNA, 120 bp, synthetic construct; identical to SEQ ID NO: 67781
  source 1..120: mol_type = other DNA

SEQ ID NO: 70123 - DNA, 120 bp, synthetic construct
  source 1..120: mol_type = other DNA
agagcccgcattgccaagtcaatcctaaaccaaaagaacaaagctggaggcatcacactacctgacttcaaactatactacaaggctacagtaaccaaaacagcatggtactggtaccaa

SEQ ID NO: 70124 - DNA, 120 bp, synthetic construct
  source 1..120: mol_type = other DNA
attgttggacatttgggttggttccaagtctttgctattgtgaatagtgccgcaataaacatacgtgtgcatgtgtctttatagcagcatgatttatagtcctttgggtatatacccagt

SEQ ID NO: 70125 - DNA, 120 bp, synthetic construct
  source 1..120: mol_type = other DNA
ttagacataaggagataaataacgaaataattgcttctatgtgatgaaactctgggagtacacaaggggactgctactttactaaacaaattttcaagtatatataactttgataaggta

SEQ ID NO: 70126 - DNA, 120 bp, synthetic construct; identical to SEQ ID NO: 2143
  source 1..120: mol_type = other DNA

SEQ ID NO: 70127 - DNA, 120 bp, synthetic construct
  source 1..120: mol_type = other DNA
agaattccatgctgcagtgagctgtgtgatcttgccactgtactccagcctgagtgaaagagtgagatcgtgtctagaaacaaaagaagaaaaaaaaaaaggtgtgaaagcctatatatt

SEQ ID NO: 70128 - DNA, 120 bp, synthetic construct; identical to SEQ ID NO: 2144
  source 1..120: mol_type = other DNA

SEQ ID NO: 70129 - DNA, 120 bp, synthetic construct; identical to SEQ ID NO: 2145
  source 1..120: mol_type = other DNA

SEQ ID NO: 70130 - DNA, 120 bp, synthetic construct
  source 1..120: mol_type = other DNA
ctttgaagtgtctgttgagaaattcagctgttatcatcctaggtggtcttgctctctcctgtcctcctacttcaaatgcagaacttcaatcgtgtacaaaagaagaccgagtcatataac

SEQ ID NO: 70131 - DNA, 120 bp, synthetic construct
  source 1..120: mol_type = other DNA
gttcaaataccattatgagaagtggcaggtaaaggaggtaggaaaaagaaaacacatcatgtaactgactgtcatatggaaatatttgacgttgaaagtcataatttaaaatgtataaac

SEQ ID NO: 70132 - DNA, 120 bp, synthetic construct
  source 1..120: mol_type = other DNA
agtccatgtcaccaccatcaatgacaacaacaaaaagatgaggaaatatttggggttcaaaataactaaagaaatgcagctatattatctttttactttttttgaacccaaaatatctct

SEQ ID NO: 70133 - DNA, 120 bp, synthetic construct; identical to SEQ ID NO: 52
  source 1..120: mol_type = other DNA

SEQ ID NO: 70134 - DNA, 120 bp, synthetic construct
  source 1..120: mol_type = other DNA
agacatggacagacacattaagctgattcccctacacacataacaatccactgtctaaccctcacacagggacctcaggctcctcagcataagaataggagactgtgagagatatatttc

SEQ ID NO: 70135 - DNA, 120 bp, synthetic construct
  source 1..120: mol_type = other DNA
cactctgagttagtgccctcgggacacacagagaacagtgatcatgaaaagagtgggctcaataattttccataaacttgcttaagattccatgcagttgccatacagcctttgaggtat

SEQ ID NO: 70136 - DNA, 120 bp, synthetic construct
  source 1..120: mol_type = other DNA
ccagaagactcagtggatccttatcaccttcatagaaaggtactcaccatccatgtcaagagcccagccaacacgctgttgctccaatatgtaaaaggcacttctgtagggctggcatga

SEQ ID NO: 70137 - DNA, 120 bp, synthetic construct; identical to SEQ ID NO: 53
  source 1..120: mol_type = other DNA

SEQ ID NO: 70138 - DNA, 120 bp, synthetic construct; identical to SEQ ID NO: 8362
  source 1..120: mol_type = other DNA

SEQ ID NO: 70139 - DNA, 120 bp, synthetic construct
  source 1..120: mol_type = other DNA
tccaaaggatcacagctcctcgccagcaatggaacaaagcaggatggagaatgactttgatgagctgacagaagtaggcttcagaaagtcggtaataacaaacttctctgagctaaagga

SEQ ID NO: 70140 - DNA, 120 bp, synthetic construct
  source 1..120: mol_type = other DNA
ccccaccctacaacaggccccagtgtgtgatgttccccttcctgtgtccatgtgttctcattgttcaattcccacctgtgagtaagaacatgcggtatttcgttttttgtccttgcgata

SEQ ID NO: 70141 - DNA, 120 bp, synthetic construct
  source 1..120: mol_type = other DNA
tgatatttgttggtttaaagtctgttttatcagagactaggattgcaacccctgcatttttttgctttccatttgcttggtagaacttcctccatccctttattttgagcctatgtgtgt

SEQ ID NO: 70142 - DNA, 120 bp, synthetic construct
  source 1..120: mol_type = other DNA
agcagaactaaaggagatagacacacaaaaaacccttcaaaaaatcaatgaatccagggctggttttttgaaaagatcaacaagaaaaccctgtttggctagttcacctggctcatctga

SEQ ID NO: 70143 - DNA, 120 bp, synthetic construct
  source 1..120: mol_type = other DNA
ggaggcagaggttgcaccaagccaagatggtgcaactgcactctagcctgggtgacagagcaagactccatcgcaaaaaaaaaaaaaaaaaaaaaaaaaaaaaaaatccacgatgctaca

SEQ ID NO: 70144 - DNA, 120 bp, synthetic construct
  source 1..120: mol_type = other DNA
ctctttaagggaacctccattttgctttctgggaccactctcttaatgccgcctgtcaaaaccagctaggactccctggggtccaatccctctgtgtttaatcttctgtcatctctgtcc

SEQ ID NO: 70145 - DNA, 120 bp, synthetic construct; identical to SEQ ID NO: 54
  source 1..120: mol_type = other DNA

SEQ ID NO: 70146 - DNA, 120 bp, synthetic construct
  source 1..120: mol_type = other DNA
tcattctttcactcaatgttgccttctcgaccctgtcattcttttcttctttcatcttttcaattcaccccatctgcatctggcctcatttctgtacatggctttgtgtctagtggccgc

SEQ ID NO: 70147 - DNA, 120 bp, synthetic construct
  source 1..120: mol_type = other DNA
aagtgtgacacataacaccttaaggccatgaaggaaatatgcccaaatgttaataaagtttgtgttaatttagaaacagcagaatgaagaactaataaatagtgttcactgtgtgccaat

SEQ ID NO: 70148 - DNA, 120 bp, synthetic construct
  source 1..120: mol_type = other DNA
attttgggacctctgtcttccaactttaacaaaatgttaaaatacccatttctgttttcctagaagtatggggaggatgacattattttagatggagagagcacttagtttctcagagag

SEQ ID NO: 70149 - DNA, 120 bp, synthetic construct
  source 1..120: mol_type = other DNA
ctggtttcgaactcctgacctcaggtgttccgcccaccttggcctcccaaagtgctgggattaagatgtgagccagcacccccggtcagagacttttttttttttttttgagatggagtc

SEQ ID NO: 70150 - DNA, 120 bp, synthetic construct
  source 1..120: mol_type = other DNA
ggcattaagacagtggtcccagaaagcaaaatggaggttccctttaagggggaacaggcaatcctcttctctctgcaacagagcatggctgccatgggagccagagaggaagagagcagc

SEQ ID NO: 70151 - DNA, 120 bp, synthetic construct
  source 1..120: mol_type = other DNA
atggggagtgctccagtctgaagcacttcctaccaccaaatgcccccacatcaagtgccttctccaacaccaaacggagaggggctgcatctcattttaaaaagcattcgtaagtgttcc

SEQ ID NO: 70152 - DNA, 120 bp, synthetic construct
  source 1..120: mol_type = other DNA
cctttcagttcctcactctggccatggacatttccatgtgaaaatacacatagtgcaacttgcagccactagatacaaagccatgtacagaaatgaggccaggtgcagatggggcgaatt

SEQ ID NO: 70153 - DNA, 120 bp, synthetic construct
  source 1..120: mol_type = other DNA
caacgaagtggagtcagaattcacagcccctgaggtctgactctgaatgcagggccactttcccaagacttgcagcctctcctctaaaacactgcactggggcatgaagtagtgatttct

SEQ ID NO: 70154 - DNA, 120 bp, synthetic construct
  source 1..120: mol_type = other DNA
ttctccatgtttcccaggctggtctcaaactcctgacctcgtgctctacccgcctcagcctcccaaagggctgggattacaggagtgagccaccatgcacagcccctactccctgctctt

SEQ ID NO: 70155 - DNA, 120 bp, synthetic construct; identical to SEQ ID NO: 55
  source 1..120: mol_type = other DNA

SEQ ID NO: 70156 - DNA, 120 bp, synthetic construct; identical to SEQ ID NO: 56
  source 1..120: mol_type = other DNA

SEQ ID NO: 70157 - DNA, 120 bp, synthetic construct
  source 1..120: mol_type = other DNA
atgtggtcaaatattgaaaagaccttttgcttcccatatcactggaggcttgtgcagcctctctctggactttggcagctgtcgcccccatcctgccacatatctgattcccaggaacag

SEQ ID NO: 70158 - DNA, 120 bp, synthetic construct
  source 1..120: mol_type = other DNA
ctcataagcctggggttttgggtcatcagggcctatggccaccttacctgggctgagcttctggaaaagttgctgtgccagtctacacccctcagccagctgttcttggaggtcctgccc

SEQ ID NO: 70159 - DNA, 120 bp, synthetic construct
  source 1..120: mol_type = other DNA
cccagcttagctcttacgtctccccaccgagctgctgtacttcagagatttacacagctgctcccccacctgcccccatggggtcccctcacctgagctcctcagcttgcttgagctgct

SEQ ID NO: 70160 - DNA, 120 bp, synthetic construct
  source 1..120: mol_type = other DNA
caccaggaagcaggacttcactctcaccaaggtactctctgctttttatttttatttttgttttatttatctttttgtttgtttgttttttgatgagtcttgccctgtcacccatgctgg

SEQ ID NO: 70161 - DNA, 120 bp, synthetic construct
  source 1..120: mol_type = other DNA
gctggaccaagggccagctgataccaccatgctgacgtttgtggcagaagaggtggagccagggactggggagaagaaacccaaacatatgatgggttaaaaactggtgaaatcaaatag

SEQ ID NO: 70162 - DNA, 120 bp, synthetic construct
  source 1..120: mol_type = other DNA
tctagagtgtaatgaaaagcaaagatggtgccccagtgagaaaaaagaaatcaacgtaacaatgggaatcagcaagaagaatactgagacaggaaagacaacattttttacaaatgagtt

SEQ ID NO: 70163 - DNA, 120 bp, synthetic construct
  source 1..120: mol_type = other DNA
tatcaacggctttaagtaaatgtattttctggcatctgggagacctgacattctgtgtcataatgaaaatctgtcatgtttctttattttaaaaatgataaaactgcaggttcacagagt

SEQ ID NO: 70164 - DNA, 120 bp, synthetic construct
  source 1..120: mol_type = other DNA
ctgcacttacccttgtcctgctgaaccatctccatgcactgtccaattccatcagtgattcgggctccttccaaggctccctgaaaagggcacagagatcaggacattaggcacattccg

SEQ ID NO: 70165 - DNA, 120 bp, synthetic construct
  source 1..120: mol_type = other DNA
tttgagacagggtcttattctgtcacccagggtggagtgcactggtgattatagatcacggcaatcttgaacttctgggctcaagcgatcctcctgcctcagctttccaagtagttggaa

SEQ ID NO: 70166 - DNA, 120 bp, synthetic construct
  source 1..120: mol_type = other DNA
ttgtctttatttttttcttaagtcatactgctgggtgtgaagtggtatctcattttggtttaaatttacattttcctaatgacgaaaaacattgaacatctttgcatgtgcttcttggcc

SEQ ID NO: 70167 - DNA, 120 bp, synthetic construct
  source 1..120: mol_type = other DNA
gataaaggagagttcagtgtcaatatattcttaacaactaattacggctcatgtccaccgccatgcgatcatatttaaatctgtcaactatcctgttacttaggtattatcctgttcctg

SEQ ID NO: 70168 - DNA, 120 bp, synthetic construct
  source 1..120: mol_type = other DNA
tgaggctgcttccacttgcagcagaaggtgaaaaggaaccagggtgtgcagagatcatatggcgagagaggaagcaaaagagagcaaggaaaggtgagaggcactttttaataaccagct

SEQ ID NO: 70169 - DNA, 120 bp, synthetic construct
  source 1..120: mol_type = other DNA
cacacacacacacacacacacgtgagccaccggatccagcctgttgaatttatttctaagcacaacatgtatttagatgttacttgaaatgaaattgtatttttatttcattttccaaat

SEQ ID NO: 70170 - DNA, 120 bp, synthetic construct
  source 1..120: mol_type = other DNA
atacacgagtcaaagagaaaggacagaaaatactaacgatggctcagcacatgtggtctatcttgctgaatgctctatgtgagtttgagaagagttatttgttagctgttcttagatgta

SEQ ID NO: 70171 - DNA, 120 bp, synthetic construct
  source 1..120: mol_type = other DNA
ggtagacagaatcctaagatgacccccagtgatctttgctcttatataatcacttcctcctgagtgtagacaaagctactgaggagatgtcactcctgtgattgtgttacaatttatggc

SEQ ID NO: 70172 - DNA, 120 bp, synthetic construct
  source 1..120: mol_type = other DNA
gagtctatcttttactgataaactcaatagttctgaggacggaagcctgatggagtcagtatagggggaatttataacctggcatccagttcagagacttggagcttcttgactgagggg

SEQ ID NO: 70173 - DNA, 120 bp, synthetic construct
  source 1..120: mol_type = other DNA
gctcccgccatgacctccagcctgcagaggatgggcgccacaggacttttaaacgcatgccgctgttcccctcacctgtgcatttcttaacgccttggtgaggagaatgtctctggatct

SEQ ID NO: 70174 - DNA, 120 bp, synthetic construct
  source 1..120: mol_type = other DNA
ttgcttctgcaagacgcttcttcaccttttcaataaacctgcctgaatttaagctgacagggtttatttctccttcatcataaatgaaattcttcaccacaacaatctccaatgaatttt

SEQ ID NO: 70175 - DNA, 120 bp, synthetic construct
  source 1..120: mol_type = other DNA
tgtcctgtatcccatgctcatgtccctgaagtcaccagcctatctccagttagaaaaaattacatgtatatagagaggcctctttggaaggagcaaaagctttctcaccttcgtacacta

SEQ ID NO: 70176 - DNA, 120 bp, synthetic construct
  source 1..120: mol_type = other DNA
ttgtgcaagattttatcacgtgttggcggaaaatttgagtgtctgaattttgtttcacacatgtgttcagctttgcatgtgtatttctgtgtgtatatagaacatagaaaagagtctaga

SEQ ID NO: 70177 - DNA, 120 bp, synthetic construct
  source 1..120: mol_type = other DNA
gccatttacattgtatgtaaattatgtttcattaaactttaaaaattagaaaaagattttcttctggtagatttccttaaaaaagtgttacctttaagttttacacttaagtgacccatg

SEQ ID NO: 70178 - DNA, 120 bp, synthetic construct
  source 1..120: mol_type = other DNA
gcaggaggtttgatcccaggagttcaagggcaacagaaggagaccttgtatcttttatatctatatctatatccatctatatcttatgggtaaaggaaatattctatatttttatcatag

SEQ ID NO: 70179 - DNA, 120 bp, synthetic construct
  source 1..120: mol_type = other DNA
cttccttgggtttaaggattccccaatgccagatgttaagtctgctaggaaatctgtagaccacagggaagaaaatgcaaaaagaaaataaagtcctcaaatgcagctaaaaattgctag

SEQ ID NO: 70180 - DNA, 120 bp, synthetic construct
  source 1..120: mol_type = other DNA
cgagcgccaccacttgtaaggtgatttttaaagatatattcacaagttatttgatgcttctctcccaaagagatggagctacattccccttttcttagtgtgggctggacataaggactc

SEQ ID NO: 70181 - DNA, 120 bp, synthetic construct
  source 1..120: mol_type = other DNA
tgctattctaagcttgctgaaactggctctgtattgaaaactagaatggaaaggaatgtttagtgtcagggtaaattcatgaatcagtggacccaacagaaatgcagtgtgtgtgtgcgt

SEQ ID NO: 70182 - DNA, 120 bp, synthetic construct
  source 1..120: mol_type = other DNA
agagaaacctaatatcttctcatatttttgtcttgcttctgtctcatgagttcccaaaatagatatattatctgaatgaagagttcatgggcaaatgtcacacttttcttggtttggcta

SEQ ID NO: 70183 - DNA, 120 bp, synthetic construct
  source 1..120: mol_type = other DNA
ccaacagctgagctatttacttgttgagttatttcatatctattattccatttagaccttgaaccctgtgagggcagggactaactttattcctagtgcctgtcacatgatttgaactaa

SEQ ID NO: 70184 - DNA, 120 bp, synthetic construct
  source 1..120: mol_type = other DNA
atgactatcaagtggtatctggaaaattttatagaaacctagtatttttatagatgtttttgaaaagaaatactggttattgggtttacttcactcaagaaatccttttgcttaataggg

SEQ ID NO: 70185 - DNA, 120 bp, synthetic construct
  source 1..120: mol_type = other DNA
tctcactctctctctctctctctctcttctgtccttccgtccctcttcccttcctttttcttccttcctccctcccttcctcccttccttccttccttccatccttcctttctttgagac

SEQ ID NO: 70186 - DNA, 120 bp, synthetic construct
  source 1..120: mol_type = other DNA
ccaggaatgaagtctatttgatcatggtggattagctttttgatgtgctgctggattcagtttgaaattattttgctgaggatttttgcattgatgttcatcaaggatattggcctgatg

SEQ ID NO: 70187 - DNA, 120 bp, synthetic construct
  source 1..120: mol_type = other DNA
aacctctgcctgttacccagttccaaagtagcttccacattttctgatgtctttacagcagcactccactacccagtaccaatttactgtattaatctgttcccatgttgctaatgaaga

SEQ ID NO: 70188 - DNA, 120 bp, synthetic construct
  source 1..120: mol_type = other DNA
ttcaggacataggcgtgggcaaggacttcatgtccaaaacaccaaaagcaatggcaacaaaagccaaaattgacaaatgggatctaattaaactcaagagcttctgcacagcaaaagaaa

SEQ ID NO: 70189 - DNA, 120 bp, synthetic construct
  source 1..120: mol_type = other DNA
tagtgggtgcagcacaccagcatggcacatgtatacatatgtaactaacctgcacaatgtgcacatgtaccctaaaacttagagtataataaaaaaaaaaaatttaaaaaaaaaaaaaaa

SEQ ID NO: 70190 - DNA, 120 bp, synthetic construct
  source 1..120: mol_type = other DNA
ttttaagctggtagagggaactctgtggtgactaccaataaaattcatctcatcacagtgcaaacaatttcactactgataagctgggtttttttttcattctgttgaaaacaacctagt

SEQ ID NO: 70191 - DNA, 120 bp, synthetic construct
  source 1..120: mol_type = other DNA
ggttgcgaaaattttctcccatgttgtaggttgcctgttcactctgatggtagtttcttttgctgtgcagaagctctttagtttaattagatcccatttgtcaattttgtcttttgttgc

SEQ ID NO: 70192 - DNA, 120 bp, synthetic construct
  source 1..120: mol_type = other DNA
tatctatgacaaacccacagccaatatcatactgaatgggcaaaaactggaagcattccctttgaaaaccggcacaagacagggatgccctctctcaccgctcctattcaacatagtgtt

SEQ ID NO: 70193 - DNA, 120 bp, synthetic construct; identical to SEQ ID NO: 69942
  source 1..120: mol_type = other DNA

SEQ ID NO: 70194 - DNA, 120 bp, synthetic construct
  source 1..120: mol_type = other DNA
gtctttacattttggcatgattttgcagcggctggtaccggttgttcctttccatgtttagcgcttccttcaggagctcttttagggcaggcctggtggtgacaaaatctctcaacattt

SEQ ID NO: 70195 - DNA, 120 bp, synthetic construct
  source 1..120: mol_type = other DNA
tttgatcgtctgaagccttcttctctcagctcgtcaaaatcattctccatccagctttgttctgttgctggtgaggaactgcgttcctttggaggaggagaggcgctctgcgttttagag

SEQ ID NO: 70196 - DNA, 120 bp, synthetic construct
  source 1..120: mol_type = other DNA
gttctgatttagcccattagacagatagaaatggaagcacagaaaattaatgggtttatctttaaacgcgagcagattaggtttttcacccagggcctgtggcttcaccataggtgtgat

SEQ ID NO: 70197 - DNA, 120 bp, synthetic construct
  source 1..120: mol_type = other DNA
ccaactactacattattataacttgtatatgttattcagagttcagtcacactggatatacatagcaggaaatgaaaggccagtatcttcagggactctctctcaagtggataagcttca

SEQ ID NO: 70198 - DNA, 120 bp, synthetic construct
  source 1..120: mol_type = other DNA
tttggctctctgtttgtctgttgttggtgtataagaatgcttgtgatttttgtacattgattttgtatcctgagactttgctgaacttgcttatcagcttaaggagattttgggctgaga

SEQ ID NO: 70199 - DNA, 120 bp, synthetic construct
  source 1..120: mol_type = other DNA
ggtcctggactctttttggttggtaaactattgattattgccacaatttcagagcctgttattggtcttttcagagattcaacttcttcctggtttagtcctgggagagtgtatgtgtcg

SEQ ID NO: 70200 - DNA, 120 bp, synthetic construct
  source 1..120: mol_type = other DNA
tgtctcgttgatctgtctaatgttgacagtggggtgttaaagtctcccattattaatgtgtgggagtctaagtctctttgcaggtcactgaggacttgctttatgaatctgggtgctcct

SEQ ID NO: 70201 - DNA, 120 bp, synthetic construct
  source 1..120: mol_type = other DNA
aatgttggcctgccttgctagattggggaagttctcctggataatatcctgcagagtgttttccaacttggttccattctccacatcactttcaggtacaccaatcagacgtagatttgg

SEQ ID NO: 70202 - DNA, 120 bp, synthetic construct
  source 1..120: mol_type = other DNA
cctgccttcaggcacctctctataatataggaggagaaagagaagaaacactaatacacataggtaggtgccattaaaagggtgcatacattaaagccaggtggtaggtgtaagaagatt

SEQ ID NO: 70203 - DNA, 120 bp, synthetic construct
  source 1..120: mol_type = other DNA
agtcatgttttcatagttttcagtatgcaggtctttcacatctgcattagtcaggcttctcgttagggacacatcttcagccagatctctctctaagtatttcatgttatctaatgctat

SEQ ID NO: 70204 - DNA, 120 bp, synthetic construct
  source 1..120: mol_type = other DNA
atttccagttctagatccctgaggaatcgccacactgacttccacaatggttgaagtagtttacagtcccaccaacagtgtaaaagtgttcctatttctccacatcctctccagcacctg

SEQ ID NO: 70205 - DNA, 120 bp, synthetic construct
  source 1..120: mol_type = other DNA
gcgggctcttttttggttccatatgaactttaaagtagttttttccaattctgtgaagaaaggcattggtagcttgatggggatggcattgaatctgtaaattaccttgggcagtatggc

SEQ ID NO: 70206 - DNA, 120 bp, synthetic construct
  source 1..120: mol_type = other DNA
gccttacttccaagtatgttgtcaattttggaataggtgtggtgtggtgctgaaaaaaatgtatattctgttgatttggggtggagagttctgtagatgtctattaggtccgcttggtgc

SEQ ID NO: 70207 - DNA, 120 bp, synthetic construct
  source 1..120: mol_type = other DNA
aactggcctgatctatgctttggaatctgtttggcctgcagttcttgaggaaggtaagttctcaccagggtcacccagaagggtacctgattttgtctcttctggcctgctgctctagat

SEQ ID NO: 70208 - DNA, 120 bp, synthetic construct
  source 1..120: mol_type = other DNA
cagacacttgggttgcttccatcttttgactattgtgaataatgctgttgtggacatgggtgtagaaacatctctttgaggctctgcttttaattctttgaggtatatacccagaggtgt

SEQ ID NO: 70209 - DNA, 120 bp, synthetic construct
  source 1..120: mol_type = other DNA
caaatttggagggctcactctacccaatttcatgagttaggataaagctacagtaatcaagacagctgaatactggcaaaataatagacacatgggtcaatggaacggaatacagagccc

SEQ ID NO: 70210 - DNA, 120 bp, synthetic construct
  source 1..120: mol_type = other DNA
aacaggatcccaaggcagaggaatttttcttagtgcagaacaaaatgaaaagtctcccatgtctacttctttctacacagacagggcaaccatccgatttctcagtcttttccccacctt

SEQ ID NO: 70211 - DNA, 120 bp, synthetic construct
  source 1..120: mol_type = other DNA
gcttctgggacttctcatttttctgccgagctgccttgggaagggaaaagggaggcgacagcccagagccaggcctgagaacccccaggggcaggaactgtgctgcagaaggcagatggt

SEQ ID NO: 70212 - DNA, 120 bp, synthetic construct
  source 1..120: mol_type = other DNA
gggacggtcactctgggatcggctccagtgatagggacggtcactctgggattggctccagtgataggagtggtcactctgggacctccaggctctgcacctggcaggggcttgagtcag

SEQ ID NO: 70213 - DNA, 120 bp, synthetic construct
  source 1..120: mol_type = other DNA
gtcactctgggatcggcgccagtgatagggacggtcactctgggatcggcgccagtgatagggacggtcactctgggatcggcgccagtgatagggacggtcactctgggatcggcgcca

SEQ ID NO: 70214 - DNA, 120 bp, synthetic construct
  source 1..120: mol_type = other DNA
ggcccttcccttgagggtgggggctgctgaatgctacccagtaggctgcctttggaacacccatttcatttatttttcgatgcatggcatttattcatctatttataaaataatacaaag

SEQ ID NO: 70215 - DNA, 120 bp, synthetic construct
  source 1..120: mol_type = other DNA
gggacaggtcccagagagtctcagcaggacagcgagcaagcggacaggtcccagagcgtctcagcaggacagcgagcaaggggacaggtcccagagagtgtcagcaggacagcgagcaag

SEQ ID NO: 70216 - DNA, 120 bp, synthetic construct
  source 1..120: mol_type = other DNA
tcagcaggacagcaagcaagcggacaggtcccagagtctcagcaagacagcgagcaaggggacaggtcccagagagtctcagcaggacagcgagcaagcggacaggtcccagagagtctc

SEQ ID NO: 70217 - DNA, 120 bp, synthetic construct; identical to SEQ ID NO: 70214
  source 1..120: mol_type = other DNA

SEQ ID NO: 70218 - DNA, 120 bp, synthetic construct
  source 1..120: mol_type = other DNA
ctggaagcacccctcagcgaggaagaataccgggctctgctggaggagctttaggacgcggggttgggacggggtcgggtggttcggggcagggcggtggcctctctttcgcggggaacg

SEQ ID NO: 70219 - DNA, 120 bp, synthetic construct
  source 1..120: mol_type = other DNA
agccacacgcaggacgacggaggcgtgattttggtttccgcgtggctttgccctctgcaaggcggcctgttgctcacgtctctccggcccccgaaaggctggccatgccgactgtttgct

SEQ ID NO: 70220 - DNA, 120 bp, synthetic construct
  source 1..120: mol_type = other DNA
gtgaaattgcggccggggctcaccgcgatggccctcccgacaccttcggacagcaccctccccgcggaagcccggggacgaggacggcgacggagactcgtttggaccccgagccaaagc

SEQ ID NO: 70221 - DNA, 120 bp, synthetic construct
  source 1..120: mol_type = other DNA
ggacgcctccgcgcggcaggggcagatgcaaggcatcccggcgccctcccaggcgctccaggagccggcgccctggtctgcactcccctgcggcctgctgctggatgagctcctggcgag

SEQ ID NO: 70222 - DNA, 120 bp, synthetic construct
  source 1..120: mol_type = other DNA
gagacctagaggggcggaaggatgggcggagggacgttaggagggagggagggaggcagggaggcagggaggcagggaggaacggagggaaagacagagcgacgcagggactgggggcgg

SEQ ID NO: 70223 - DNA, 120 bp, synthetic construct
  source 1..120: mol_type = other DNA
tcccacggaggttcagttccacactcccctccaccctcccaggctggtttctccctgctgccgacgcgtgggagcccagagagcggcttcccgttcccgcgggatccctggagaggtccg

SEQ ID NO: 70224 - DNA, 120 bp, synthetic construct
  source 1..120: mol_type = other DNA
agagagacgggcctcccggagtccaggattcagatctggtttcagaatcgaagggccaggcacccgggacagggtggcagggcgcccgcgcaggcaggcggcctgtgcagcgcggccccc

SEQ ID NO: 70225 - DNA, 120 bp, synthetic construct
  source 1..120: mol_type = other DNA
gcccaggtgccagcacggagcgcctggcggcggaacgcagaccccaggcccggcgcacaccggggacgctgagcgttccaggcgggagggaaggcgggcagagatggagagaggaacggg

SEQ ID NO: 70226 - DNA, 120 bp, synthetic construct; identical to SEQ ID NO: 70223
  source 1..120: mol_type = other DNA

SEQ ID NO: 70227 - DNA, 120 bp, synthetic construct; identical to SEQ ID NO: 70224
  source 1..120: mol_type = other DNA

SEQ ID NO: 70228 - DNA, 120 bp, synthetic construct; identical to SEQ ID NO: 70222
  source 1..120: mol_type = other DNA

SEQ ID NO: 70229 - DNA, 120 bp, synthetic construct
  source 1..120: mol_type = other DNA
agcggcttcccgttcccgcgggatccctggagaggtccggagagccggcccccgaaacgcgcccccctcccccctcccccctctcccccttcctcttcgtctctccggccccaccaccac

SEQ ID NO: 70230 - DNA, 120 bp, synthetic construct
  source 1..120: mol_type = other DNA
acaagtacaaataagaagagggaaaatcacccgcagttcacccctgagccgcgcgcattccttagatctccgtgtttcttcctaaaggaacgtggcctgatacacaggtgagctttatta

SEQ ID NO: 70231 - DNA, 120 bp, synthetic construct
  source 1..120: mol_type = other DNA
cttagatctccgtgtttcttcctaaaggaacgtggcctgatacacaggtgagctttattagaacgcgggctgatacacaggtgagctttattagaacgcgggctgatacacaggtgagct

SEQ ID NO: 70232 - DNA, 120 bp, synthetic construct
  source 1..120: mol_type = other DNA
gtttctccagcgtcttagctcctctcacattgctcatcattgtttatttatagtcagtatttgcttaaacttgccacacatccaccaacaactctaggcgtggttcttgcttacaccata

SEQ ID NO: 70233 - DNA, 120 bp, synthetic construct
  source 1..120: mol_type = other DNA
gttgtgcacacactggggagggggcggacccattgattggtggctcctcggtaggggatggtcattaaagccccagatcaaagggctctggaaacacacgctcattaggaaggccagcga

SEQ ID NO: 70234 - DNA, 120 bp, synthetic construct
  source 1..120: mol_type = other DNA
aagaagcccgcctaacatcgagcttcgccctgagggtccccgcccccgatacccagcccctcctcccccggtgcctgctggcacatggcaagcctgccacctccctgccaggtgggattc

SEQ ID NO: 70235 - DNA, 120 bp, synthetic construct
  source 1..120: mol_type = other DNA
ttgtctgatgtctgaggtggaggccgtcttcagggtgggggctgttggaaacagcttggagaagttatgtctgtcccccacagagaaatcgagtcaagagccgggtgtgtggcagctccg

SEQ ID NO: 70236 - DNA, 120 bp, synthetic construct
  source 1..120: mol_type = other DNA
aggaagtcaagcctgctcgccataaaactttgaacttgggggtggagggacaccctgtccggcaccccctccccgctccgccacaagcgtctcccgccctcccccagtgtgagttattga

SEQ ID NO: 70237 - DNA, 120 bp, synthetic construct
  source 1..120: mol_type = other DNA
ccgagaccccgtctgggaggtgaggagcgtctctgcccggccgccccgtctgagaagtgaggagaccctctgcctggcaaccaccccgtctgagaagtgaggagcccctccgcccggcag

SEQ ID NO: 70238 - DNA, 120 bp, synthetic construct
  source 1..120: mol_type = other DNA
tatgctgatgccacagttgttcttatctcaattgtcttaaaattcatttaatttttttttcctttggtttcattattcaaattttaacttcagttctcaacattttatctgatggaagag

SEQ ID NO: 70239 - DNA, 120 bp, synthetic construct
  source 1..120: mol_type = other DNA
tttgagactccttcccccttctctcgggtctctcacctctccctgcccttcttcctcccctcgcagccctcccagacacccagcaaggagcaaaatggccagggcagcaccctctgtttc

SEQ ID NO: 70240 - DNA, 120 bp, synthetic construct
  source 1..120: mol_type = other DNA
attaagaagaaaggacagagtcgactgtccccttggctaatttgtgcttcatttagtgtaattttgctcagtggtcaaaacatagaggtgatgacaccgagggtccagacatgtcccatc

SEQ ID NO: 70241 - DNA, 120 bp, synthetic construct
  source 1..120: mol_type = other DNA
aagtcctccccacggggtctatgtcctccccacggggtctgagcatgtcctccccatgggttctgagcaagtcctccccatggggtctgagcaagtcctccccacggggtctgagcaaat

SEQ ID NO: 70242 - DNA, 120 bp, synthetic construct
  source 1..120: mol_type = other DNA
ggtgcttcccgtgggactgtagggagaacaatcaagacttctgcctccttggtcgagcagggctgcctccccatctcatctactggcaaggaggctgggcaccttcagggagcttcagtt

SEQ ID NO: 70243 - DNA, 120 bp, synthetic construct
  source 1..120: mol_type = other DNA
aaggaatttgaggaggaaacagcagtggcctgagaatttagaaaatgcatccaactgcttggactcttgggaagaagctggcaggaggattaggagaagtggaggatgattgcatggtcc

SEQ ID NO: 70244 - DNA, 120 bp, synthetic construct
  source 1..120: mol_type = other DNA
ttaggtaaatggaatcgtgtcctggcagtcctgtccctaccccagtgcccagtggaggcataactggggataatgcgattacagctgctcccaccagggtgatctgcagcagaagcagaa

SEQ ID NO: 70245 - DNA, 120 bp, synthetic construct
  source 1..120: mol_type = other DNA
tgcggcacaacctggtccttgttctctggctgggctagggtcacctggagctggtgcccgtgatatccgcctgacgcggaagtgggcaccgttttctggatgctcccttactttctcagc

SEQ ID NO: 70246 - DNA, 120 bp, synthetic construct
  source 1..120: mol_type = other DNA
tggacagagatccgcccttctccaagagtcccagccgtgggaggcttcaccttccagaaggttcctcctgtttctctgtgcctactacgaggctcatcctcacacctgaggactgtctcc

SEQ ID NO: 70247 - DNA, 120 bp, synthetic construct
  source 1..120: mol_type = other DNA
tttttaaaataaatttttctacttttttttttttttgagacagggtgtcactctcttgcccaggctggagtgcagtggtatgatcatggcttgctgcagcctcaacctcctgggctcacg

SEQ ID NO: 70248 - DNA, 120 bp, synthetic construct
  source 1..120: mol_type = other DNA
caggggagcaggctctgggcttgtctgacccgtgagcacccagtggcctggtggcctcagccctcgttgccagcctctttctaaggtcaagcctgtgctctccagccagagaaggcatgc

SEQ ID NO: 70249 - DNA, 120 bp, synthetic construct
  source 1..120: mol_type = other DNA
caggacacgtgaaattcagccttaattaagttgttgggtgatggagtcccagatgtgggaggctcagccagaccctcttgggctgcccacccggagagcgactggggctgagagcctcgc

SEQ ID NO: 70250 - DNA, 120 bp, synthetic construct
  source 1..120: mol_type = other DNA
agctgaggtccttcccaggggccattctgggacccctgaccccatgcacctgtgtcacagggctatgagcgcccccagccccaggacctccacgtttctctctagagggaagaggaggag

SEQ ID NO: 70251 - DNA, 120 bp, synthetic construct
  source 1..120: mol_type = other DNA
actttagggccgtttcctgggctgactccctggcctgcaagcccccaggttgcttactaagcccaaacccccacccatgccactgaccgcccctgctctctgttatccaaagccctcagc

SEQ ID NO: 70252 - DNA, 120 bp, synthetic construct
  source 1..120: mol_type = other DNA
ttcggttcccttttcccttttgggtctgaggttaaacagagggcagccggggcccgcgacctctgccctctgacatctttgaactcaaaagtctttgatgttttaacatgcctccccaaa

SEQ ID NO: 70253 - DNA, 120 bp, synthetic construct
  source 1..120: mol_type = other DNA
tggagaagtcaggggccgaacctgcgcccagaccctcatcccctactccacccaccctgtaccccctctttctctccacactctccttttctcttctgttctccccgtgctctcaaccct

SEQ ID NO: 70254 - DNA, 120 bp, synthetic construct
  source 1..120: mol_type = other DNA
gtttggggagcatggcccacaccagcagcccccgccacgtgaccctcgattcagcccttctgcatgctgtgcattcagtgatctgggcatctttggacagtgccatggtggatgattagg

SEQ ID NO: 70255 - DNA, 120 bp, synthetic construct
  source 1..120: mol_type = other DNA
tgctgatttctgaatcggcagctgaggctgttccaagcatcaggggctcccagcagggctgaagagaggggcttggaggtggattcggcccctacttggatctggagtgcaggctagtgg

SEQ ID NO: 70256 - DNA, 120 bp, synthetic construct
  source 1..120: mol_type = other DNA
tattttccccttaataaaactcttgggaagaattgcccatttctgtctttcagggacatcacctttcatagaatggccctgatcccgagtcatcctgtaaaaatggaatttacagccagg

SEQ ID NO: 70257 - DNA, 120 bp, synthetic construct
  source 1..120: mol_type = other DNA
cacgagtctaaacaaggacagggatcacggtggggtttgcattcacacgccctctttgctccactgaacttccttggagcagacctcaggtgcagagctctggtggagctggcggggcca

SEQ ID NO: 70258 - DNA, 120 bp, synthetic construct
  source 1..120: mol_type = other DNA
cagcccttgggtgcaagctgtgcccctgctgagtcccgccttgctgggactcagctgtgagggcctgtggctctgaggctggtggggaccatccggctgcgctaggtcagcagctccact

SEQ ID NO: 70259 - DNA, 120 bp, synthetic construct
  source 1..120: mol_type = other DNA
tgtgtccggatgaagcctgcggtcggcagtcgagtggtcagtgggaggctgctgttgggcctctggtggtctcgaggacaaatggagtcttggctgaggacacagaggctgtggacttgc

SEQ ID NO: 70260 - DNA, 120 bp, synthetic construct
  source 1..120: mol_type = other DNA
tgtgttggtgtggggaggtgtgtatgtgtgtgtctggggagatgggtgtgtgtacaggtgtggggaggtgggttggtgtgtgcgggtgtctgtatgtggtgtgtgtgtgtttgtgggtgt

SEQ ID NO: 70261 - DNA, 120 bp, synthetic construct
  source 1..120: mol_type = other DNA
atggcctgagggtgggcacaaccctgacccctctccctgtgtctcatccacttgctcttgccacctggatgggcacaaaaaacccgatggccgtggagatccaggagaacccctagaaga

SEQ ID NO: 70262 - DNA, 120 bp, synthetic construct
  source 1..120: mol_type = other DNA
cttatttgacacacggagaaactgaggctgagagtgggatctgggtttgcctgacggccgggccttgctttctttgtgtttatttcttcctgatgcccctgcctgggggtctatgggtag

SEQ ID NO: 70263 - DNA, 120 bp, synthetic construct
  source 1..120: mol_type = other DNA
cttttgctaaagagtcagggagtgtggccacagagacagctaggcagtcaggcgccgtggagggcccaggctgctgaggtgacacaagtggaactcgggggcagctgccgcttgatgccg

SEQ ID NO: 70264 - DNA, 120 bp, synthetic construct
  source 1..120: mol_type = other DNA
agggcgagtaagatggagcaggagggagctccaccaatcaacccagccagctctggagccacctggaacactcaaagggaacgtccttctgtccccaagagccccactttagggctgttt

SEQ ID NO: 70265 - DNA, 120 bp, synthetic construct
  source 1..120: mol_type = other DNA
tgggctccagggctgcctcttggctggatacccagcttcacatttggctcaacacagcaaggaggggtcaggggtctcaggcagtcaggcctccagtctcagtcctcacaccactgcccc

SEQ ID NO: 70266 - DNA, 120 bp, synthetic construct
  source 1..120: mol_type = other DNA
ctgtgaaatggctcatcgtctactcggatttcttcaagtgggacccctttgcctttgaccgaggcccacaggccctgggcaagtggacagctggggggaaatgtgggtgggtttgggaag

SEQ ID NO: 70267 - DNA, 120 bp, synthetic construct
  source 1..120: mol_type = other DNA
agccaccacaacatcactggtccttgcccccagtctacccagcccatccctgcccctctgcctgcccggcccaccccactgttctaggaaaccctcacgcagcacctaagagaggctttg

SEQ ID NO: 70268 - DNA, 120 bp, synthetic construct
  source 1..120: mol_type = other DNA
tgtgccaaactcagcctcggctgcctagaaatgaatttcctgggaccccaaactctggctctgggcgcagggtctctataccgtgcctcaatgtgctaccctcagacattacctctgcag

SEQ ID NO: 70269 - DNA, 120 bp, synthetic construct
  source 1..120: mol_type = other DNA
tggggtcttgggcagccctatgtgtccaaagcatttcctcgcgtctgaggtcagtgatcagggtttccaccacgccagggcccagggaaaaactgaggcccatcgggcttgaggatgcac

SEQ ID NO: 70270 - DNA, 120 bp, synthetic construct
  source 1..120: mol_type = other DNA
ccttctccaggaagccaggtcatcggagccagcaacatcttccttgtccaaggccaggtgctgacatgtgaccctcactgtgggatctagagccccccctctcgttttgtgggtgagtgg

SEQ ID NO: 70271 - DNA, 120 bp, synthetic construct
  source 1..120: mol_type = other DNA
tgtgtctacatcgcctggcaccccccaatacacttcctacagccctcagtcccctggctcctcagagaacatggccatggcctgtaccagagttctacacacactcaggccccatcaaag

SEQ ID NO: 70272 - DNA, 120 bp, synthetic construct
  source 1..120: mol_type = other DNA
gatggcctctgtagccagtgcctccaccagaccagatgcctacagtgcccagcagccctggtccctgtctgcccctacttcaatctgctgtcctgtgaggcttgcctctggcctcaggtt

SEQ ID NO: 70273 - DNA, 120 bp, synthetic construct
  source 1..120: mol_type = other DNA
tctcaaagacgagccaccctgcctgaccccactcacctcccaccctgaacaatgtcccctgaccttgcagcccctcttgcctctgtcctcctccctaggccgctctcccttctcctctcc

SEQ ID NO: 70274 - DNA, 120 bp, synthetic construct
  source 1..120: mol_type = other DNA
tggatgctgggactctgggcagagagaagctctggcagggggtggcagctggagggtagagagtgggagggaggctcagctgccagcgttccaaacaagctgggaaagagttgagcagaa

SEQ ID NO: 70275 - DNA, 120 bp, synthetic construct
  source 1..120: mol_type = other DNA
gggaccaggaggggaccttttcgtggaaaacggatcaaaagccggcttattgaatttgcttttctctaacctttgcttcctggcttgtgcaactgccctcctgcggccttcgcctttgcc

SEQ ID NO: 70276 - DNA, 120 bp, synthetic construct
  source 1..120: mol_type = other DNA
ggtttcagagcaccctgtaaagatggcatgttggtccccatgaacagatggggaaatagaggcctgcctttgctcatcaccccctgatgcatgtacattcctagaacagtgtgtgacgca

SEQ ID NO: 70277 - DNA, 120 bp, synthetic construct
  source 1..120: mol_type = other DNA
tgggacctcagaagccaagaggaggggtttgaccttgaccctgagtgcagtggggagtcccaaggaggccttggaagactctggggtgcacattttagaaagatcgctatgctgctacat

SEQ ID NO: 70278 - DNA, 120 bp, synthetic construct
  source 1..120: mol_type = other DNA
tagcagtagccacagggagggaaaatgtgagctattaatgttacttttttctacaggcagtgtgagcatttgaagctaataaactctcatctgcggggtcacacacctcaatatatgtac

SEQ ID NO: 70279 - DNA, 120 bp, synthetic construct
  source 1..120: mol_type = other DNA
ctctggagtcataataataacagatatttatttacacctttcctggttaccaaatgccttgaatacagctgcctgtgttgactctcattgaggaaagcaatggagacccaaggctaaggg

SEQ ID NO: 70280 - DNA, 120 bp, synthetic construct
  source 1..120: mol_type = other DNA
gactcaaagcaactggaatattcaactgctttataagctagtgaaagtgggctgcgtagatgcgattacaggttaaggttgtaagaacaatcaggacctcagaagagattccttttccca

SEQ ID NO: 70281 - DNA, 120 bp, synthetic construct
  source 1..120: mol_type = other DNA
gtcgattttagatctttccccctttctgctgtgggcatttagtgctataaatttccctctaagaactgctttagctgtgtcccagagattctggtatgttgtgtctttgttctcattggt

SEQ ID NO: 70282 - DNA, 120 bp, synthetic construct
  source 1..120: mol_type = other DNA
ctgagtgaggaccagtgagtgacccaagccagctaagccacacaaagatccctgatccacaaaaactgtgagataataaatgtgtcttgtttgtttttttttgagacaaagtctcactct

SEQ ID NO: 70283 - DNA, 120 bp, synthetic construct
  source 1..120: mol_type = other DNA
tttttctcttccacaagacacagaatttattgtctcaaccaggtcagggtttctttgggcattccccctgtcctcggaatagcatagcccaaatcatggcacaagtaggatttattttta

SEQ ID NO: 70284 - DNA, 120 bp, synthetic construct
  source 1..120: mol_type = other DNA
agtcttacaagccagagaaggaggaagagagggtgaaggggaggagccacatgcctttaaacaaccagatcttgtgagaactcatcactgtcacaagaatagcaagggagaaatccaccc

SEQ ID NO: 70285 - DNA, 120 bp, synthetic construct; identical to SEQ ID NO: 70282
  source 1..120: mol_type = other DNA

SEQ ID NO: 70286 - DNA, 120 bp, synthetic construct; identical to SEQ ID NO: 70283
  source 1..120: mol_type = other DNA

SEQ ID NO: 70287 - DNA, 120 bp, synthetic construct
  source 1..120: mol_type = other DNA
gaccagctataagtgttactgaaaaggaagatgttttgtgtgttttgaaagaattgagaaacagtgttaaaccaaaccttgaagactgatacacaaagtggttgcatataatttcaacag

SEQ ID NO: 70288 - DNA, 120 bp, synthetic construct
  source 1..120: mol_type = other DNA
accctgtctcaaaaaaaatctaaattttagcggagcttaacatttgaatgtgatcagagaaagagacatggcccagcgagcaagttggtcagttgaaaacaaggcagttctggaatggca

SEQ ID NO: 70289 - DNA, 120 bp, synthetic construct
  source 1..120: mol_type = other DNA
gaagggatggagatttagagaaaaaggtggactaggcaggcttggagagccataatgacttggccaacatgtacggaattgaggagatgttgaaaagatggttctatatttgggctccct

SEQ ID NO: 70290 - DNA, 120 bp, synthetic construct
  source 1..120: mol_type = other DNA
gccactgcactccagcctgggcgacagagcgaggctccctctcaaaaaaaaaaaaaaatcatctctccaatgtgtcagcaatgtgcctgtgagaacgttcacctcataaatgatttcttc

SEQ ID NO: 70291 - DNA, 120 bp, synthetic construct
  source 1..120: mol_type = other DNA
atgtctgtatttattcagtgcctgactgagaatctagcacataggaagtacacataatcattctttccctgcctctcaggttccattctccccatctctaaattcagtttccagagtagg

SEQ ID NO: 70292 - DNA, 120 bp, synthetic construct
  source 1..120: mol_type = other DNA
ctttgtggagagttactgctttaggtaatttaatcatcttgattgttcttgtgatgagttaggagatgattatcacaacctaatcaatccagaagtcatgaagtctccacccactcatta

SEQ ID NO: 70293 - DNA, 120 bp, synthetic construct
  source 1..120: mol_type = other DNA
ctccattgtttcatcgatccccagttatggagcctttttagacacttttttctaattgccgtctcataaaattgtaatagtaatcccagctacttgggaggctgaggcatgagaattgct

SEQ ID NO: 70294 - DNA, 120 bp, synthetic construct
  source 1..120: mol_type = other DNA
tcaacctccaatggcattttcatatctgttttgatttattccacctccttcagaagggcgaatttcttcggggtattgtatattttcatagtgcttgtgtgatcacaggctgacctggtg

SEQ ID NO: 70295 - DNA, 120 bp, synthetic construct
  source 1..120: mol_type = other DNA
ttgttaaacattttgaggagttgcactgtgctgtgatgtactgagatctggaaaaacacaaagaaaaactataattctcagacctcagaaagtcttaaatcagttaggggaaacattgcc

SEQ ID NO: 70296 - DNA, 120 bp, synthetic construct
  source 1..120: mol_type = other DNA
agatttagagaaaaaggtggactaggcaggcttggagagccataatgacttggccaacatgtacggaattgaggagatgttgaaaagatggttctatatttgggctccctggaataatag

SEQ ID NO: 70297 - DNA, 120 bp, synthetic construct; identical to SEQ ID NO: 70288
  source 1..120: mol_type = other DNA

SEQ ID NO: 70298 - DNA, 120 bp, synthetic construct
  source 1..120: mol_type = other DNA
cccccgaccccaccacagtccccagagtgtgatattccacttcctgtgtccatgtgatctcattgttcaattcccacctatgagtgagaatatgcggtgtttggttttttgttcttgcga

SEQ ID NO: 70299 - DNA, 120 bp, synthetic construct
  source 1..120: mol_type = other DNA
agggatccactttcagctttctacatatggctagccagttttcccaccaccatttattaaatagggaatcctttccccattgcttgtttttctcaggtttgtcaaagatcagatggttgt

SEQ ID NO: 70300 - DNA, 120 bp, synthetic construct
  source 1..120: mol_type = other DNA
cagagatcatgccattgcactccagcctgggcgagaagagtgaaactccatctccaaacaaacaaacaaacaaacaaattagtaaacacctgaaagtttctcaaagtgtgttcccagact

SEQ ID NO: 70301 - DNA, 120 bp, synthetic construct
  source 1..120: mol_type = other DNA
ggatgaagctggaaatatgttctttttaagtggatgtttgtaagatttttctctttctccttagagttcaaaatttttactagcagatgcctcagtgtttcttatttctcttcactctag

SEQ ID NO: 70302 - DNA, 120 bp, synthetic construct
  source 1..120: mol_type = other DNA
ttgttttgtattgaaaaagacaaccaaggctgaggtaaatcttggcagccttttcagaatttaatctgggtgaagccgtgggttggacatggggtaggggtattaggatattggttcaaa

SEQ ID NO: 70303 - DNA, 120 bp, synthetic construct
  source 1..120: mol_type = other DNA
ttgcattttcatataatccagcaatccagcgtatcctagaacctggaaaatgtatcctagaaactgggaaactgtgttcacttaaaaatctgtacaggaggggggccaagatggccaaat

SEQ ID NO: 70304 - DNA, 120 bp, synthetic construct
  source 1..120: mol_type = other DNA
ttacagataaaattcctatctccctgggatggagcacgtgggggaaggggaggctgtgggcgcaaccgcagcagatttaatctttcctgcctgctgcctctgaagatagcagctgatcct

SEQ ID NO: 70305 - DNA, 120 bp, synthetic construct; identical to SEQ ID NO: 70303
  source 1..120: mol_type = other DNA

SEQ ID NO: 70306 - DNA, 120 bp, synthetic construct; identical to SEQ ID NO: 70304
  source 1..120: mol_type = other DNA

SEQ ID NO: 70307 - DNA, 120 bp, synthetic construct
  source 1..120: mol_type = other DNA
cctttgcccactttttgatggggttgtttgtttttttcttgtaaatttgtttgagttcattgtagattctggatattagccctttgtcagatgagtaggttgcaaaaattttttcccatt

SEQ ID NO: 70308 - DNA, 120 bp, synthetic construct
  source 1..120: mol_type = other DNA
ggctctctgtttgtctgttgttggtgtataagaatgcttgtgatttttgtacactgattttgtatcctgagactttgctgaagttgcttatcagcttaaggagattttgggctgagacaa

SEQ ID NO: 70309 - DNA, 120 bp, synthetic construct
  source 1..120: mol_type = other DNA
gaagaaagggtatcagcaatggaagatgaaatgaatgaaatgaagcgagaagggaagtttagagaaaaaagaataaaaagaaatgagcaaaacctccaagaaatatgggactatgtgaaa

SEQ ID NO: 70310 - DNA, 120 bp, synthetic construct
  source 1..120: mol_type = other DNA
cactgaggacttgctttatgaatctgggtgctcctgtattgggtgcataaatatttaggatagttagctcctcttgttgaattgatccctttaccattatgtaatggccttctttgtctc

SEQ ID NO: 70311 - DNA, 120 bp, synthetic construct
  source 1..120: mol_type = other DNA
aaaggatcaacaaaattgatagaccgctagcaagactaataaagaaaaagagagagaagaatcaaatagacacaataaaaaatgataaaggggatatcaccaccgatcccacagaaatac

SEQ ID NO: 70312 - DNA, 120 bp, synthetic construct
  source 1..120: mol_type = other DNA
catcgtctcagcccaaaatctccttaagctgataagcaacttcagcaaagtctcaggatacaaaatcaatgtacaaaaatcacaagcattcttatacatcaacaacagacaaacagagag

SEQ ID NO: 70313 - DNA, 120 bp, synthetic construct
  source 1..120: mol_type = other DNA
caaaattgacaaatgggatctaattaaactaaagagcttctgcacagcaaaagaaactaccatcagagtgaacaggcaacctacaacatgggagaaaatttttgcaacctactcatctga

SEQ ID NO: 70314 - DNA, 120 bp, synthetic construct
  source 1..120: mol_type = other DNA
caccagcatggcacatgtatacatatgtaactaacctgcacaatgtgcacatgtaccctaaaacttagagtataataaaaaaaaaaaaaaaaaaaaaaaaaaaaaaaaaaaaaaacagaa

SEQ ID NO: 70315 - DNA, 120 bp, synthetic construct
  source 1..120: mol_type = other DNA
ccccaccacagtccccagagtgtgatattccccttcctgtgtccatgtgatctcattgttcaattcccacctatgagtgagaatatgcggtgtttgttttttgttcttgcgatagtttac

SEQ ID NO: 70316 - DNA, 120 bp, synthetic construct
  source 1..120: mol_type = other DNA
ggtgtttcagacatgaagtccttgcccacgcctatgtcctgaatggtaatgcctaggttttcttctagggtttttatggttttaggtttaacgtttaaatctttaatccatcttgaattg

SEQ ID NO: 70317 - DNA, 120 bp, synthetic construct; identical to SEQ ID NO: 41151
  source 1..120: mol_type = other DNA

SEQ ID NO: 70318 - DNA, 120 bp, synthetic construct; identical to SEQ ID NO: 67013
  source 1..120: mol_type = other DNA

SEQ ID NO: 70319 - DNA, 120 bp, synthetic construct; identical to SEQ ID NO: 51382
  source 1..120: mol_type = other DNA

SEQ ID NO: 70320 - DNA, 120 bp, synthetic construct
  source 1..120: mol_type = other DNA
ggcaccccccagcaggggcacactgacacctcacacggcagggtattccaacagacctgcagctgagggtcctgtctgttagaaggaaaactaacaaccagaaaggacatctacaccgaa

SEQ ID NO: 70321 - DNA, 120 bp, synthetic construct
  source 1..120: mol_type = other DNA
ggtgacagagcaacactctgtctcaaaaaaaaaaaaaagaagaagaagaagaagaagaagaagaagaaggcgttcagggctcagagctagaggctgagcagaggaagaagaaggcgttca

SEQ ID NO: 70322 - DNA, 120 bp, synthetic construct
  source 1..120: mol_type = other DNA
cgatgtgtgtttaatgatccccaaaggctcttcctgtcttagtttctggaaagctggctttcccggggagatgctagctggacacagatgaggaaagactaaagttcagccttgcagcac

SEQ ID NO: 70323 - DNA, 120 bp, synthetic construct
  source 1..120: mol_type = other DNA
agagcatgccactgcacaccagcctgggtgacagagactctgtctcccctccccctgccaaaaaaaatcaatgatacagttagttctaagagaaggtataatgatataatattttttctt

SEQ ID NO: 70324 - DNA, 120 bp, synthetic construct
  source 1..120: mol_type = other DNA
atgaaattctgggttgaaaattcttttctttaagaatgttgaatattggcccccactctcttctggcttgtagggtttctgccgagagatccgctgttagtctcatgggctttcctttga

SEQ ID NO: 70325 - DNA, 120 bp, synthetic construct
  source 1..120: mol_type = other DNA
gggacccacttgaggaggcagtctgcccgttctcagatctccagttgcgtgctgggagaaccactgctctcttcaaagctgtcagacagggacacttaagtctgcagaggttactgctgt

SEQ ID NO: 70326 - DNA, 120 bp, synthetic construct
  source 1..120: mol_type = other DNA
gatggtttccaatttcatccatgtccctacaaaggacatgaactcataattttttatggctgcatagtattccatggtgtatatgtgccacattttcttaatccagtctatcattgttgg

SEQ ID NO: 70327 - DNA, 120 bp, synthetic construct
  source 1..120: mol_type = other DNA
acagtaaccaaaacagcatggtactggtaccaaaacagagatatagatcaatggaacagaacagagccctcagaaataatgccgcatatctacaactatctgatctttgacaaacctgag

SEQ ID NO: 70328 - DNA, 120 bp, synthetic construct
  source 1..120: mol_type = other DNA
taatcatgtggtttttgtctttggctctgtttatatgctggattacatttattgatttgcgtatattaaacgagccttgcatcccagggatgaagcccacttgatcatggtggataagct

SEQ ID NO: 70329 - DNA, 120 bp, synthetic construct
  source 1..120: mol_type = other DNA
tcttgtaggcgtttagtgctataaatttccctctacacactgctttgaatgcgtcccagagattctggtatgtggtgtctttgttctcgttggtttcaaagaacatctttatttctgcct

SEQ ID NO: 70330 - DNA, 120 bp, synthetic construct
  source 1..120: mol_type = other DNA
aaataaaatactttacagacaagcaaatgctgagagattttgtcaccaccaggcctgccctaaaagagctcctgaaggaagcgctaaacatggaaaggaacaaccggtaccagccgctgc

SEQ ID NO: 70331 - DNA, 120 bp, synthetic construct
  source 1..120: mol_type = other DNA
ggagccaagatcgcgccattgcactccggcctgggcaacaagagccaaactctgactcaatcaacaaaacctcaatttattaaagagtattttctctgtgattttgtatttttaattgtt

SEQ ID NO: 70332 - DNA, 120 bp, synthetic construct
  source 1..120: mol_type = other DNA
gtggagctcatggtgacttggtaatgctgtgaattatgtgcgtgtggcaggaaggtgccacaatgccaaggacctacgtcttggaaattccatgaggtccgcatgaggttgaactaaaca

SEQ ID NO: 70333 - DNA, 120 bp, synthetic construct
  source 1..120: mol_type = other DNA
ggaaagactggattttgaaaacccaccagagccaactgaaagaagggtcatccctgatgagatcccagactccccctggtctctctggactcactttaggcgtgccttgcctgttggcat

SEQ ID NO: 70334 - DNA, 120 bp, synthetic construct
  source 1..120: mol_type = other DNA
tctggaggtcccaccatgataacaccacattgcctcacagaggcccctgcttttctgtccttggtagacctcagggtaggtggtgccagggatgataaagaacttaaccaacttggggaa

SEQ ID NO: 70335 - DNA, 120 bp, synthetic construct
  source 1..120: mol_type = other DNA
gtcatctcagcattgaccactcctgagacccgaggctcctcctgggagcaggagaccgcgagttcttgatgttcgttggaaaataggatttatgaatgcaggagggccgtgctggactcc

SEQ ID NO: 70336 - DNA, 120 bp, synthetic construct
  source 1..120: mol_type = other DNA
tttggaactggcttatgcgttggaatgacttaaatcaactgctcgtttctgtgaccccgcactcacaggttccttcattaacattttaaataagtggctaaaaaaactcctctggagatt

SEQ ID NO: 70337 - DNA, 120 bp, synthetic construct
  source 1..120: mol_type = other DNA
ggaaaacgtggcaaaaccccagctctaaaaaatccaaaaaaaaaaaaaattagctgggcatgatggtggttgcctgttattccagctacttgggtggctgagacaggagaatcgcttgaa

SEQ ID NO: 70338 - DNA, 120 bp, synthetic construct
  source 1..120: mol_type = other DNA
cgatatcaaagggtgtatattgaagaaatgatgaataataacctttcttcaggtgttttaggaagtcatataatgaataaaagaggtttaagaaaagaatgaatttggcttctagtactg

SEQ ID NO: 70339 - DNA, 120 bp, synthetic construct
  source 1..120: mol_type = other DNA
cctcaggataggaagccatgagaaaaaaccttcctcaagtcctaagcaacatgatttccactcaagtggtaagtggatacatttgtagcatgtctgtctgaggatgaatctgagggaaaa

SEQ ID NO: 70340 - DNA, 120 bp, synthetic construct; identical to SEQ ID NO: 70337
  source 1..120: mol_type = other DNA

SEQ ID NO: 70341 - DNA, 120 bp, synthetic construct; identical to SEQ ID NO: 70336
  source 1..120: mol_type = other DNA

SEQ ID NO: 70342 - DNA, 120 bp, synthetic construct
  source 1..120: mol_type = other DNA
ggcttcttgtcacttacatactcagcacgattgggcatcaggcattcagagatcttagagtggcctctctaaaaacctggtgtcctaggagaacatttattatttttgtctatttttgtt

SEQ ID NO: 70343 - DNA, 120 bp, synthetic construct
  source 1..120: mol_type = other DNA
agaacagcaatggcaggacagcaaacaactggcgatttccccaggtcccacgctgttccggagtgggcgtgttgggtccctgttcccaatgtgttccatccttacccaggtgcacagggt

SEQ ID NO: 70344 - DNA, 120 bp, synthetic construct
  source 1..120: mol_type = other DNA
ctccaggagaatttgcctaaaatatgtttgcttcccattgcattctctttgcttgttctaaacatcacctcccccaattcctttaatttgcatcttactcttgttgcatcctttttttat

SEQ ID NO: 70345 - DNA, 120 bp, synthetic construct
  source 1..120: mol_type = other DNA
cagttcccacctatgagtgagaatatgcggtgtttggttttttgttcttgcgatagtttactgagaatgatggtttccaatttcatccatgtccctacaaaggacatgaactcatcattt

SEQ ID NO: 70346 - DNA, 120 bp, synthetic construct
  source 1..120: mol_type = other DNA
catcacactacctgacttcaaactatactacaaggctacagtaaccaaaacagcatggtactggtaccaaaacagagatatagatcaatggaacagaacagagccctcagaaataatgcc

SEQ ID NO: 70347 - DNA, 120 bp, synthetic construct
  source 1..120: mol_type = other DNA
gtcttttgttgccattgcttttggtgttttggacatgaagtccttgcccacgcctatgtcctgaatggtaatgcctaggttttcttctaggatttttatggttttaggtctaatgtttaa

SEQ ID NO: 70348 - DNA, 120 bp, synthetic construct
  source 1..120: mol_type = other DNA
acagattcaatgccatccccatcaagctaccaatgactttcttcacagaattggaaaaaactactttaaagttcatatggaaccaaaaaagagcccgcattgccaagtcaatcctaagcc

SEQ ID NO: 70349 - DNA, 120 bp, synthetic construct
  source 1..120: mol_type = other DNA
agggaggattccctctttttctattgattggaatagtttcagaaggaatggtaccatttcctccttgtacctctggtagaattcggctgtgaatccatctggtcctggactctttttggt

SEQ ID NO: 70350 - DNA, 120 bp, synthetic construct
  source 1..120: mol_type = other DNA
agcttttgctcccatcctagaattcaaaccacaacaaagaaccactccaaagttaccaaactaaagagttctcaaattttagttaataaggtttctgcctatcccaagtccaccgggtac

SEQ ID NO: 70351 - DNA, 120 bp, synthetic construct
  source 1..120: mol_type = other DNA
aaaatgaggaagccataatttctaacttttggaggtgttgtgaggattcagtcacatgatccacagaaagctcctgacatgggcctattaggtatgaggaatttcaggttgactactgat

SEQ ID NO: 70352 - DNA, 120 bp, synthetic construct
  source 1..120: mol_type = other DNA
tcacatctccataatagagtcgcctgctctgtgtctcccttggttttccttcataagggtctctctctgcttctcagggatgacagtgtaaaacctgcctcagctctcccttttaagaag

SEQ ID NO: 70353 - DNA, 120 bp, synthetic construct
  source 1..120: mol_type = other DNA
tgactatgtgtactatggcatagttacctggtcccttattcagacatgattcgagacatttagcagctattagttgtgggtatggagctccagctaagatgtaaagacaaggtcaaaggt

SEQ ID NO: 70354 - DNA, 120 bp, synthetic construct
  source 1..120: mol_type = other DNA
tgtttgcaagtataaacactgagatatgctaacaacagtcacatgggtataacagttatgagcagatgtactgtattcataaagaggtcaaaaagggaaatgtataaacacatatcacta

SEQ ID NO: 70355 - DNA, 120 bp, synthetic construct
  source 1..120: mol_type = other DNA
tgttgctgtatgctgtggctaatccactcatttgacttttccaccaaatgcaaataaagacaataagaagataataattttgcctacatgatgtaactatcctgcatacagcttcccaga

SEQ ID NO: 70356 - DNA, 120 bp, synthetic construct
  source 1..120: mol_type = other DNA
taaagaatgggattcaaaaattcagtattctgggtccaggtcaacttctaatttttcctcagatccgttaggcatgtgatgcatgctgtaggtagctcctctccactaaattacccgagc

SEQ ID NO: 70357 - DNA, 120 bp, synthetic construct
  source 1..120: mol_type = other DNA
ccataaagctctagtctatagataagtacccatgtttgtgtatttaaatagagcctgtcatatccattacatccatcagaaaagatgagagagaaaagcatagtcaggcagtgatcttta

SEQ ID NO: 70358 - DNA, 120 bp, synthetic construct
  source 1..120: mol_type = other DNA
aagccaaaattgacaaatgggatctaattaaactaaagagcttctgcacagcaaaagaaaatagcatcagagtgaacaggcaacctacagaatgggagaaagtttttgcaacctactcat

SEQ ID NO: 70359 - DNA, 120 bp, synthetic construct
  source 1..120: mol_type = other DNA
gcacctgttgtttcctgactttaaagccagttttttaagatgactcaaagaacatctttatttcctcttcacaaggagccatcgcatgcacactattttcaagctttgtgcgggtcccag

SEQ ID NO: 70360 - DNA, 120 bp, synthetic construct
  source 1..120: mol_type = other DNA
tacatttcactacagccacaacctctctggctcaagcaatcttcccaaggcagcctcctaagtaggtgggactataggtgtatgctaccacatccagctaattttttaaagttttttgta

SEQ ID NO: 70361 - DNA, 120 bp, synthetic construct
  source 1..120: mol_type = other DNA
tacactatatatatatatgcgattttagagaacaggaaatggaggctcagggaggcaaagtgcttactgagagtctcacagctagtaaatgggaagcctagatttaaactggggtcctga

SEQ ID NO: 70362 - DNA, 120 bp, synthetic construct
  source 1..120: mol_type = other DNA
tctcttctcccttccactccacctactccttctctttttgccaggcatgcagttgaaatagtctgagttaaatgtgtgtgtttatagactcagaagcagtgtcatataagactgttttgc

SEQ ID NO: 70363 - DNA, 120 bp, synthetic construct
  source 1..120: mol_type = other DNA
ttgattcagcacattggaaccactctttttgtagaatctgcaaagggacatttgggagccctttgagtcctatggggtaaaacagaatatcctcggataaaaactagaaaggagccatct

SEQ ID NO: 70364 - DNA, 120 bp, synthetic construct
  source 1..120: mol_type = other DNA
cagggaaaaaccgaataggcccagataaaaagtagaaagaagctatctgtgaaactgcttggtgatatgtggattcagcccacagagttaaacctttattttgattcaacaggttggaaa

SEQ ID NO: 70365 - DNA, 120 bp, synthetic construct
  source 1..120: mol_type = other DNA
gagacatttgggaacccattgaggcctatggggaaaaatggaaaatgcccagctaaaaactagaaagaagccctatgtgaagctgctttgtgatgtgtggatttatctcacaaagttaag

SEQ ID NO: 70366 - DNA, 120 bp, synthetic construct
  source 1..120: mol_type = other DNA
tatttatccactagcctcctagagtgtgagggttcctagtgggaggccttctatgcacatattactctccagcttcagggaattgtttcaggcccttcccttttaagcctagaagtaaca

SEQ ID NO: 70367 - DNA, 120 bp, synthetic construct
  source 1..120: mol_type = other DNA
ccggctgccatcccatctaggaagtgaggagcacctcttcccagccgccatcacatctaggaagtgaggagcgtctctgcccggccgcccatcgtctgagatgtggggagcgcctctgcc

SEQ ID NO: 70368 - DNA, 120 bp, synthetic construct
  source 1..120: mol_type = other DNA
acagctttcctggttttccaatttacagacagacagtagatcatgagacttctcagattccataatcctgtgagccagttcctaaagtaaataaataaataaatatgtaattatttccta

SEQ ID NO: 70369 - DNA, 120 bp, synthetic construct
  source 1..120: mol_type = other DNA
tccctctgccccttcaggactgttttactcatggttctccagaaagacagaagtggtaggagaaatacatatatttatatatatatagatataaatataaatatttatatagatataaat

SEQ ID NO: 70370 - DNA, 120 bp, synthetic construct; identical to SEQ ID NO: 51382
  source 1..120: mol_type = other DNA

SEQ ID NO: 70371 - DNA, 120 bp, synthetic construct
  source 1..120: mol_type = other DNA
gatgttctttgaaaccaacgagaacaaagacaccacataccagaatctctgggacgcattcaaagcagtgtgtagagggaaatttatagcactaaatgcctacaagagaaagcaggaaag

SEQ ID NO: 70372 - DNA, 120 bp, synthetic construct; identical to SEQ ID NO: 41151
  source 1..120: mol_type = other DNA

SEQ ID NO: 70373 - DNA, 120 bp, synthetic construct
  source 1..120: mol_type = other DNA
gctcttgcttttctagttcttttaattgtgatgttagggtgtcaattttggatctttcctgctttctcttgtaggcatttagtgctataaatttccctctacacactgctttgaatgcgt

SEQ ID NO: 70374 - DNA, 120 bp, synthetic construct
  source 1..120: mol_type = other DNA
gctgattttgtatttttagtagagacggggtttctccatgttggtcacgctagtctcagactcccaacctcaggagatccgcctgccttggcctcccaaagtgctgggattacaggcatg

SEQ ID NO: 70375 - DNA, 120 bp, synthetic construct
  source 1..120: mol_type = other DNA
aatttccaaaacatggggccttggcattgtggcaccttcctgctacacgtacctaattcacagcgttaccaagtcaccatgagccctaccctcacctctgtcagctgaggacccagccag

SEQ ID NO: 70376 - DNA, 120 bp, synthetic construct
  source 1..120: mol_type = other DNA
tctcctcacttctcagatggggcggccgggcagagacgctcctcacctcccagactgggtcgcggctgggcagagacgctcctcacatcccagacggggcggcggggcagaggcgctccc

SEQ ID NO: 70377 - DNA, 120 bp, synthetic construct
  source 1..120: mol_type = other DNA
tgatcccagaacatatttgtttttcactatgttttactcttcatgttataaattggtctataaatagaaacacagatataaaagggttgcatagtcatatggttcacttcctgctgaaat

SEQ ID NO: 70378 - DNA, 120 bp, synthetic construct
  source 1..120: mol_type = other DNA
atctgggaggcggaggttgcagtgagctgagattgtgctactgcactcagcctaggcaacagagtgagactctgtctcaaaaaaaaaaaaaaaaatatatatatatatatgtatatatat

SEQ ID NO: 70379 - DNA, 120 bp, synthetic construct
  source 1..120: mol_type = other DNA
agaatagaccaattacagcatgattcctcttgttaaaagaaaaaaggtagcatagtgattaagagcgtgtctcctggagccagaatgcttgcatttgaatcccagctccgccacatattt

SEQ ID NO: 70380 - DNA, 120 bp, synthetic construct
  source 1..120: mol_type = other DNA
ccccatggtcagtccgtaccaggagtagctccacatctgctttatggtacatttgcttcagatcctcatacattcctcttaaaagctccctgggatgttccattctggcttggctttcat

SEQ ID NO: 70381 - DNA, 120 bp, synthetic construct
  source 1..120: mol_type = other DNA
atggatatatgaggaatatatacgtgtatctgtgtgtgtgtatatatatattcctcaaatatatccatatatatatatatatatataccaacacccagatacacatacatattcatatat

SEQ ID NO: 70382 - DNA, 120 bp, synthetic construct
  source 1..120: mol_type = other DNA
ttgagatcaagttcctgttttaagagtcacccatttgttcactataagttcctgcagaaggtagagtaatacggtactaaccttccagcatctggttctggtggtttctgtgttcaggtt

SEQ ID NO: 70383 - DNA, 120 bp, synthetic construct
  source 1..120: mol_type = other DNA
aaaattcatacacaaagagagtccttaggctttttagcaggcactactgactagatgactcgcaacctcttctactcgtagttcctgcccgcaacataatgcaaatctgttcaaaaacct

SEQ ID NO: 70384 - DNA, 120 bp, synthetic construct
  source 1..120: mol_type = other DNA
atttccctagtggacttcctctcctgtacagtgtcatgtgtagagtgaggacagatatatgatctgagggacgcattagacagtctccttattgtttgaacatcatagggtacacttaca

SEQ ID NO: 70385 - DNA, 120 bp, synthetic construct
  source 1..120: mol_type = other DNA
gcagtaattcttccaagaaaaagttcttttaagtactccccaagatcaggagctcattccttgcagagttgactttcagaggtcacctgaatgcaactaactcgaagtgctgtcctcctc

SEQ ID NO: 70386 - DNA, 120 bp, synthetic construct
  source 1..120: mol_type = other DNA
agaacactagtagaatgttcttccaaatttcagatttcagatacgcatctgtaaaataatcttatggagacacattttagttgctactgaataattggttgttttcataggttcacagca

SEQ ID NO: 70387 - DNA, 120 bp, synthetic construct
  source 1..120: mol_type = other DNA
attgttctatcaagaagttaatttaccaggaaatgtagagtcacaaggacacttttgcttctaacttctaataaagcatagagatgattaactacaagacaaacaaaacactaaccacag

SEQ ID NO: 70388 - DNA, 120 bp, synthetic construct
  source 1..120: mol_type = other DNA
gaagtattacccatgtggtcctaacaataataatatttagatagtgggagtgctgcctgtgggtggagacttacctcagaattggatgagcctgtccctcagtccagtgatgggccctgc

SEQ ID NO: 70389 - DNA, 120 bp, synthetic construct
  source 1..120: mol_type = other DNA
gcaagggaagccatctgcttcaaatgaatgttagttttcaggtttctctgccatgttgtcttcatgcattcaaagcactgagtaagaattgggatgtcttgccagttgaagtagaaacag

SEQ ID NO: 70390 - DNA, 120 bp, synthetic construct
  source 1..120: mol_type = other DNA
atatagtaggatttttgttaaactcagagaggtgtaattacatctctatggtgtgatggcgaattttaggtatcagtgtgactggattaaccaatacctagggaactggtgcagcattgt

SEQ ID NO: 70391 - DNA, 120 bp, synthetic construct
  source 1..120: mol_type = other DNA
caaaaaactgttttgatttccaaaccaggatgttttggggagctttctcatttttttcagtttcactgttttgcatctctcatcattaccttgctaatttaaagttatgtctaaaagctg

SEQ ID NO: 70392 - DNA, 120 bp, synthetic construct
  source 1..120: mol_type = other DNA
agcatgaacaagaaatgtgttccaatggatggcaacatgtttccccagaaagcattgaacctatatgaagattttagcaaaagatcccctaaaacaagtgacactaagccatttactgca

SEQ ID NO: 70393 - DNA, 120 bp, synthetic construct
  source 1..120: mol_type = other DNA
aacaaattatgagaaaacatttaggaatagggaaaaagggctaggtgcgctggctcacgcctgtaatcccagcactttgggaggtccagggaggcggatcttctaaggtcaggagttcga

SEQ ID NO: 70394 - DNA, 120 bp, synthetic construct
  source 1..120: mol_type = other DNA
tcttttttgtagagatggtgttttactatgtctcccaggctggtctcgaactcctggcataaagggattctttacacctgttgtttacgttagcatacaacgtgaactgcaattctgaat

SEQ ID NO: 70395 - DNA, 120 bp, synthetic construct
  source 1..120: mol_type = other DNA
aggattacaggcatgagccactgtgcccggcctcacctcctccatgtttaaacatcagaatttgatggacttccatacatgtgcagtttagaagtttctgaaaataatgatcatgttctg

SEQ ID NO: 70396 - DNA, 120 bp, synthetic construct
  source 1..120: mol_type = other DNA
ctgttcatgtcctttgcccactttttgatggggttgtttgtttttttcttgtaaatttgtttgagttcattgtagattctggatattagccctttgtcagatgagtaggttgcaaaaatt

SEQ ID NO: 70397 - DNA, 120 bp, synthetic construct; identical to SEQ ID NO: 70375
  source 1..120: mol_type = other DNA

SEQ ID NO: 70398 - DNA, 120 bp, synthetic construct
  source 1..120: mol_type = other DNA
caagcgattctccggcctcagcctcccgagtagttgtgccaccatgctcggctgattttgtatttttagtagagacggggtttctccatgttggtcacgctagtctcagactcccaacct

SEQ ID NO: 70399 - DNA, 120 bp, synthetic construct
  source 1..120: mol_type = other DNA
atctgctctctagaatgggcctagcatggttaggtcatgttcacagatccctcaccttctgcttgttacgagatgtttctgatggcattagaattgtctggattatggatattttagtca

SEQ ID NO: 70400 - DNA, 120 bp, synthetic construct
  source 1..120: mol_type = other DNA
agctcagcaagagaagatggagtaaagcaaagatatctaggtttccagtgtcattaatttcctaaccttatttccaaggaaagctctgaccacacatgacaactattaaaacagagaacc

SEQ ID NO: 70401 - DNA, 120 bp, synthetic construct
  source 1..120: mol_type = other DNA
aaacctatataaagactcctggtttccgtcactgtgacgcttcttcacagttcttactgggtcaattgtttcctctattaatctctcttttaggatttttccatgtctgcttcgcctaca

SEQ ID NO: 70402 - DNA, 120 bp, synthetic construct
  source 1..120: mol_type = other DNA
tgagtaggttgcgaaaattttctcccattctgtaggttgcctgttcactctgatggtagtttcttttgctgtgcagaagctctttagtttaattagatcccatttgtcaattttggcttt

SEQ ID NO: 70403 - DNA, 120 bp, synthetic construct; identical to SEQ ID NO: 41151
  source 1..120: mol_type = other DNA

SEQ ID NO: 70404 - DNA, 120 bp, synthetic construct
  source 1..120: mol_type = other DNA
tacccctagttacaccagaaataaaggaccagtcccaaacaggtagaataagaggagaagctatgaaagacaaggcaagattgagctcaggtttctgaagcaaaagcgagtgtaggttgt

SEQ ID NO: 70405 - DNA, 120 bp, synthetic construct; identical to SEQ ID NO: 69942
  source 1..120: mol_type = other DNA

SEQ ID NO: 70406 - DNA, 120 bp, synthetic construct
  source 1..120: mol_type = other DNA
atttgcttgtctataaagtattttatttctccttcacttatgaagcttagtttggctggatatgaaattctgggttgaaaattcttttctttaagaatgatgaatattggcccccactct

SEQ ID NO: 70407 - DNA, 120 bp, synthetic construct
  source 1..120: mol_type = other DNA
atcattctccatccagctttgttctgttgctggtgaggaactgcgttcctttggaggaggagaggcgctctgcgttttagagtttccagtttttctgttctgttttttccccatctttgt

SEQ ID NO: 70408 - DNA, 120 bp, synthetic construct
  source 1..120: mol_type = other DNA
agtgtctgttcatgtccttcgcccactttttgatggggttgtttgtttttttcttgtaaatttgtttgagttcattgtagattctggatattagccctttgtcagatgagtaggttccga

SEQ ID NO: 70409 - DNA, 120 bp, synthetic construct
  source 1..120: mol_type = other DNA
ccatgagcatggaatgttcttccatttgtttgtgtcctcttttatttccttgagcagtggtttgtagttctccttgaagaggtccttcacattccttgtaagttggattcctaggtattt

SEQ ID NO: 70410 - DNA, 120 bp, synthetic construct; identical to SEQ ID NO: 69989
  source 1..120: mol_type = other DNA

SEQ ID NO: 70411 - DNA, 120 bp, synthetic construct
  source 1..120: mol_type = other DNA
gggtatccttgttgactttctgtcttgttgatctgtctaatgttgacagtggggtgttaaagtctcccattattaatgtgtgggagtctaagtctctttgtaggtcactgaggacttgct

SEQ ID NO: 70412 - DNA, 120 bp, synthetic construct
  source 1..120: mol_type = other DNA
atactgaatgggcaaaaactggaagcattccctttgaaaactggcacaagacagggatgccctctctcaccactcctattcaacatagtgttggcagttctggccagggcaattaggcag

SEQ ID NO: 70413 - DNA, 120 bp, synthetic construct
  source 1..120: mol_type = other DNA
ttctcccagcacgcagctggagatctgagaatgggcagactgcctcctcaagtgggtccctgactcctgacccccgagcagcctaactgggaggcaccccccagcaggggcacactgaca

SEQ ID NO: 70414 - DNA, 120 bp, synthetic construct
  source 1..120: mol_type = other DNA
aaaaaatgttaagggcagccagagagaaaggtcgggttaccctcaaaggaaagcccatcagactaacagcggatctctcggcagaaaccctacaagccagaagagagtgggggccaatat

SEQ ID NO: 70415 - DNA, 120 bp, synthetic construct; identical to SEQ ID NO: 69854
  source 1..120: mol_type = other DNA

SEQ ID NO: 70416 - DNA, 120 bp, synthetic construct; identical to SEQ ID NO: 67781
  source 1..120: mol_type = other DNA

SEQ ID NO: 70417 - DNA, 120 bp, synthetic construct; identical to SEQ ID NO: 52122
  source 1..120: mol_type = other DNA

SEQ ID NO: 70418 - DNA, 120 bp, synthetic construct
  source 1..120: mol_type = other DNA
ttgcggcactattcacaatagcaaagacttggaaccaacccaaatgcccaacaatgatagactggattaagaaaatgtggcacatatacaccatggaatactatgcagccataaaaaatg

SEQ ID NO: 70419 - DNA, 120 bp, synthetic construct
  source 1..120: mol_type = other DNA
cccacagttgaggccagatacaagtctttttcgataaaaatgctaaaagatatgaaagaaggagtaaaacagtatggacccaactccccttatatgaggacattattagattccattgct

SEQ ID NO: 70420 - DNA, 120 bp, synthetic construct
  source 1..120: mol_type = other DNA
gatgtaaaaaaggaaaacattgggctagtcaatgtcgttctaaatttgataaaaatgggcaaccattgtcgggaaacgagcaaaggggccagcctcaggccccacaacaaactggggcat

SEQ ID NO: 70421 - DNA, 120 bp, synthetic construct
  source 1..120: mol_type = other DNA
tcaaaaatattggtacattcattagtatctcttgaattcatacaattatttccacctccacccctctacctttgtccaggcctccatcatctgtcctttggacagtgcagcaggataagg

SEQ ID NO: 70422 - DNA, 120 bp, synthetic construct
  source 1..120: mol_type = other DNA
tacaacatattttttattatttttttttcttgagacgaagtcttgctctgtcacccaggctggagtgcagtggtactatctcagctcattgcaacctctgcctctcaggttcaagcaatt

SEQ ID NO: 70423 - DNA, 120 bp, synthetic construct
  source 1..120: mol_type = other DNA
agttacagcgttggttggggacagtgatctggactaccaagagaaaattagactattattctatgacagagatcagaaggagtgtgtctggaatacaaaagttacatatattatataata

SEQ ID NO: 70424 - DNA, 120 bp, synthetic construct
  source 1..120: mol_type = other DNA
cagagcctgttattgttctattcagagattcaacttcttcctggtttagtcttgggagagtgtatgtgtcgaggaatttatccatttcttctagattttctagtttatttgcgtagaggt

SEQ ID NO: 70425 - DNA, 120 bp, synthetic construct
  source 1..120: mol_type = other DNA
gtcactcaggacttgctttatgaatctgggtgctcctgtattgggtgcataaatatttaggatagttagctcctcttgttgaattgatccctttaccattatgtaatggccttctttgtc

SEQ ID NO: 70426 - DNA, 120 bp, synthetic construct
  source 1..120: mol_type = other DNA
tttatttctccttcacttatgaagcttagtttggctggatatgaaattctgggttgaaaattcttttctttaagaatgttgaatattggcccccactctcttctggcttgtagggttttt

SEQ ID NO: 70427 - DNA, 120 bp, synthetic construct
  source 1..120: mol_type = other DNA
taagtgtccctgtctgacagctttgaagagagcagtggttctcccagcacgcagctggagatctgagaacgggcagactgcctcctcaagtgggtccctgacccctgacccccgagcagc

SEQ ID NO: 70428 - DNA, 120 bp, synthetic construct
  source 1..120: mol_type = other DNA
gttgtgctacaatgttatgatggctttgatgtcactaggtgataggattttttagctcctttatactattacgcgaccactgtcatatatgtgctccatcattgaaacataattatgcag

SEQ ID NO: 70429 - DNA, 120 bp, synthetic construct
  source 1..120: mol_type = other DNA
ggcttcagatgatcaaattactctgagctacgggaggacattcaaaccaaaggcaaagaagttgaaaactttgaaaaaaatttagaagaatgtataactagaataaccaatacagagaag

SEQ ID NO: 70430 - DNA, 120 bp, synthetic construct
  source 1..120: mol_type = other DNA
cctccatccttttattttgagcctatgtgtgtctctgcacgtgagatgggtttcctgaatacagcacactgatgggtcttgactctttatccaacttgccagtctgtgtcttttaattgc

SEQ ID NO: 70431 - DNA, 120 bp, synthetic construct
  source 1..120: mol_type = other DNA
atcccgattccctacatatatcccgatatatatatatatatatatatcgggatatatatagggagtttattaagtgtatatatatatatgtgtgtgtgtgtgtatatatacataagtgta

SEQ ID NO: 70432 - DNA, 120 bp, synthetic construct
  source 1..120: mol_type = other DNA
aaactctcaataaattaggtattgatggtacatatttcaaaataataagagctatctatgacaaacccacagccaatatcatactgaatgggcaaaaactggaagcattccctttgaaaa

SEQ ID NO: 70433 - DNA, 120 bp, synthetic construct
  source 1..120: mol_type = other DNA
ttctagggtttttatggttttaggtttaacgtttaaatctttaatccatcttgaattgatttttgtataaggtgtaaggaagggatccagtttcagctttctacatatggctagccagtt

SEQ ID NO: 70434 - DNA, 120 bp, synthetic construct
  source 1..120: mol_type = other DNA
tcacatggacacaggaaggggaatatcacactctggggactgtggtggggtcgggggaggggggagggatagcattgggagatatacctaatgctagatgacacattagtgggtgcagcg

SEQ ID NO: 70435 - DNA, 120 bp, synthetic construct
  source 1..120: mol_type = other DNA
tgtgagactttgcccctctctgcctgcgtccctgtcaccactcctccatcagcacaaccacagcacctgtgggatctcctgggagggacaggaggcacaggcagtcatcacctgtgggat

SEQ ID NO: 70436 - DNA, 120 bp, synthetic construct
  source 1..120: mol_type = other DNA
tatgcattgtgtaatgattgtgtagtgattaccacaatcacagtaactaaagcatccatcaccacccagctgtactttagagccccaggacccattcatcttaccactgaaactttgaac

SEQ ID NO: 70437 - DNA, 120 bp, synthetic construct
  source 1..120: mol_type = other DNA
ttccatgagctggactttttaggttctacatgtaagtgagatcaggtggcatttgtctttctgtgcctgccttatttcacttggcacaatgttctccagattcatccgtgttgtcttaaa

SEQ ID NO: 70438 - DNA, 120 bp, synthetic construct
  source 1..120: mol_type = other DNA
tgggcggatcatgaggtcaagagatcgagaccatcctgaccaatatggtgaaaccccatctctactaaagatacaaaactattagctggacgtggtggcacgtgcctgtagtcccagcta

SEQ ID NO: 70439 - DNA, 120 bp, synthetic construct
  source 1..120: mol_type = other DNA
gcacttcttaccattttgctcatatttattccctgtgcatttttgtaacatgtatatgttatatatatagaaagagagagaggcagagatggaaagtaatttatggagtttgatgttatg

SEQ ID NO: 70440 - DNA, 120 bp, synthetic construct
  source 1..120: mol_type = other DNA
aatacggaattatgaacagggccttagaaggcgagggagaggccctgaaacttgagcttcattcacttaatggaaaatctaactctgattctaggggaagaatctagaagattccatgaa

SEQ ID NO: 70441 - DNA, 120 bp, synthetic construct
  source 1..120: mol_type = other DNA
tcgggacctgaagcctccgtgctcagcgatccccctgcagcccactgcgacccccacccttgctgcgccctccgcctcagcacggccctcccggagctatgtgccctccctgacttcctc

SEQ ID NO: 70442 - DNA, 120 bp, synthetic construct
  source 1..120: mol_type = other DNA
gcccccagggctgcccatctcccttagaggaaaagccacagttttgaccacagccacgaggccctacctggctggagctggcttgattttaaaaatcattccaaattacaaattttaaga

SEQ ID NO: 70443 - DNA, 120 bp, synthetic construct
  source 1..120: mol_type = other DNA
ttatccgtctgcctcggccttccaatgtgctgggattacaggcgtgagccactgtgcccggctattctctaaaatctaaaaagttggaatttaaacccatatttatttctttgcaatgag

SEQ ID NO: 70444 - DNA, 120 bp, synthetic construct
  source 1..120: mol_type = other DNA
cctccctaaggagtcctgcaatttctcaccactgctagtgactaggtaagtctgccaaactcagggataatagacttaaagtcagattctccaagtctttgttaataataaaggtggcat

SEQ ID NO: 70445 - DNA, 120 bp, synthetic construct
  source 1..120: mol_type = other DNA
acaaactttttctgctgttaacgtatttaacagcagaaaattatactggtttgccagtctaatttgtagggccccagccactgaacacaaagaaaaaagttttttccccttccctacacc

SEQ ID NO: 70446 - DNA, 120 bp, synthetic construct
  source 1..120: mol_type = other DNA
ctggcctacaattttagcctgtctgcctacatttagcataaacttgaagaagagggaatatgtggaggaaggggatacaaagtcatattcagctatagtctaataaggttagtagtggcc

SEQ ID NO: 70447 - DNA, 120 bp, synthetic construct
  source 1..120: mol_type = other DNA
aaaacccaccattctaaggatacgaaataagcatcctcaaaagcataatctttttctttttgagatggagtttcgctcttgttgcctaggctgaagtgcaatagcgatctcggctcacca

SEQ ID NO: 70448 - DNA, 120 bp, synthetic construct
  source 1..120: mol_type = other DNA
aagatcgtgccattgcactccatcctgggcaacaagagcgaaactccatctcaaaaaaaaaaaaatcaatccatatgaagtactcatcaagtttatccctattaccttggcgttttatta

SEQ ID NO: 70449 - DNA, 120 bp, synthetic construct
  source 1..120: mol_type = other DNA
cttttgttgccattgcttttggtgttttggacatgaagtccttgcccatgcctatgtcctgaatggtaatgcctaggttttcttttagggtttttatggttttaggtctaacgtttaaat

SEQ ID NO: 70450 - DNA, 120 bp, synthetic construct
  source 1..120: mol_type = other DNA
ttcaaaataataagagctatctatgacaaacccacagccaatatcatactgaatgggcaaaaactggaagcattccctttgaaaactggcacaagacagggatgccctctctcaccgctc

SEQ ID NO: 70451 - DNA, 120 bp, synthetic construct
  source 1..120: mol_type = other DNA
ggccttcctgcctctgtaagctccacctctgggggcagggcacagacaaacaaaaagacagcagtaacctctgcagacttaagtgtccctgtctgacagctttgaagagagcagtggttc

SEQ ID NO: 70452 - DNA, 120 bp, synthetic construct
  source 1..120: mol_type = other DNA
tatctttgtggcgttctctgtatttcctgaatctgaacgttggcctgccttgctagattggggaagttctcctggataatatcctgcagagtgttttccaacttggttccattctccaca

SEQ ID NO: 70453 - DNA, 120 bp, synthetic construct
  source 1..120: mol_type = other DNA
aatgttgacagtggggtgttaaagtctcccattattaatgtgtgggagtctaagtctctttgtaggtcactcaggacttgctttatgaatctgggtgctcctgtattgggtgcataaata

SEQ ID NO: 70454 - DNA, 120 bp, synthetic construct
  source 1..120: mol_type = other DNA
ttagaccaatatccttgatgaacattgatgcaaaaatcctcaataaaatactggcaaaccgaatccagcagcacatcaaaaagcttatccacaatgatcaagtgggcttcatccctggga

SEQ ID NO: 70455 - DNA, 120 bp, synthetic construct
  source 1..120: mol_type = other DNA
cagattcaatgccatccccaacaagctaccaatgactttcttcacagaattggaaaaaactactttaaagttcatatggaaccaaaaaagagcccgcatcgccaagtcaatcctaagcca

SEQ ID NO: 70456 - DNA, 120 bp, synthetic construct
  source 1..120: mol_type = other DNA
ataggaacacttttacactgttggtgggactgtaaactagttcaaccattgtggaagtcagtgtggcgattcctcagggatctagaactagaaataccatttgagccagccatcccatta

SEQ ID NO: 70457 - DNA, 120 bp, synthetic construct
  source 1..120: mol_type = other DNA
gactttgctgaagttgcttatcagcttaaggagagtttgggctgagacaatggggttttctagatatacaatcatgtcgtctgcaaacagggacaatttgacttcctcttttcctaattg

SEQ ID NO: 70458 - DNA, 120 bp, synthetic construct
  source 1..120: mol_type = other DNA
tgaaaactttgaaaaaaattttagaagaatgtataactagaataaccaatacagagaagtgcttaaaggagctgatggagctgaaaaccaaggctcgagaactacgtgaagaatgcagaa

SEQ ID NO: 70459 - DNA, 120 bp, synthetic construct
  source 1..120: mol_type = other DNA
gctcttgtcgaggagtatctttgtggcgttctctgtatttcctgaatctgaacgttggcctgccttgctagattggggaagttctcctggataatatcctgcagagtgttttccaacttg

SEQ ID NO: 70460 - DNA, 120 bp, synthetic construct
  source 1..120: mol_type = other DNA
cagtggttctcccagcacgcagctggagatctgagaacgggcagactgcctcctcaagtgggtccctgacccctgacccctgagcagcctaactgggaggcaccccccagcaggggcaca

SEQ ID NO: 70461 - DNA, 120 bp, synthetic construct
  source 1..120: mol_type = other DNA
aaaggtcgggttaccctcaaaggaaagcccatcagactaacagcggatctctcagcagaaaccctacaagccagaagagagtgggggccaatattcaacattcttaaagaaaagaatttt

SEQ ID NO: 70462 - DNA, 120 bp, synthetic construct; identical to SEQ ID NO: 70371
  source 1..120: mol_type = other DNA

SEQ ID NO: 70463 - DNA, 120 bp, synthetic construct; identical to SEQ ID NO: 67781
  source 1..120: mol_type = other DNA

SEQ ID NO: 70464 - DNA, 120 bp, synthetic construct
  source 1..120: mol_type = other DNA
gcccggctaattttttgtatttttagtagagacggggtttcaccgtgttagccaggagataattttatttttaaataaaatcatttaaagataattttatttttaaataaaatcatttaa

SEQ ID NO: 70465 - DNA, 120 bp, synthetic construct
  source 1..120: mol_type = other DNA
tctctatatagtgcatatatagatatctctatatatagcatatatgtacatagtgcatatataggtatctctatataaagcatatatagagagatatctctatataaagcatatatagag

SEQ ID NO: 70466 - DNA, 120 bp, synthetic construct
  source 1..120: mol_type = other DNA
ttgatcctgtcattatgatgttagctggtgattttgctcattagttgatgcagtttcttcctagtctcgatggtctttacattttggcatgattttgcagcggctggtaccagttgttcc

SEQ ID NO: 70467 - DNA, 120 bp, synthetic construct; identical to SEQ ID NO: 66409
  source 1..120: mol_type = other DNA

SEQ ID NO: 70468 - DNA, 120 bp, synthetic construct
  source 1..120: mol_type = other DNA
ataaaatactggcaaaccgaatccagcagcacatcaaaaaggttatccaccatgatcaagtgggcttcatccctgggatgcaaggctggttcaatatacgcaaatcaataaatgtaatcc

SEQ ID NO: 70469 - DNA, 120 bp, synthetic construct; identical to SEQ ID NO: 52122
  source 1..120: mol_type = other DNA

SEQ ID NO: 70470 - DNA, 120 bp, synthetic construct
  source 1..120: mol_type = other DNA
tgggcgaaggacatgaacagacacttctcaaaagaagacatttatgcagccaaaaaacacatgaaaaaatgctcatcatcactggccatcagagaaatgcaaatcaaaaccactatgaga

SEQ ID NO: 70471 - DNA, 120 bp, synthetic construct
  source 1..120: mol_type = other DNA
caccacagtcccccacagtccccagagtgtgatattccccttcctgtgtccatgtgatctcattgttcaattcccacctatgagtgagaatatgcggtgtttggttttttgttcttgcga

SEQ ID NO: 70472 - DNA, 120 bp, synthetic construct
  source 1..120: mol_type = other DNA
tcttttgttgccattgcttttggtgttttggacatgaagtccttgcccacgcctatgtcctgaatggtaatgcctaggttttcttctagggtttttatggttttaggtttaacgtttaaa

SEQ ID NO: 70473 - DNA, 120 bp, synthetic construct
  source 1..120: mol_type = other DNA
acactatgttgaataggagcggtgagagagggcatccctgtcttgtgccggttttcaaagggaatgcttccagtttttgcccattcagtatgatattggctgtgggtttgtcatagatag

SEQ ID NO: 70474 - DNA, 120 bp, synthetic construct
  source 1..120: mol_type = other DNA
ccagagattctggtatgtggtttctttgttctcgttggtttcaaagaacatctttatttctgccttcatttcgttatgtacccagtagtcattcaggagcaggttgttcagtttccatgt

SEQ ID NO: 70475 - DNA, 120 bp, synthetic construct
  source 1..120: mol_type = other DNA
gctcctgttattggtctattcagagattcaatttcttcctggattagtctttggagagtgtatgtgctgaggaatttatccatttcttctagactttctagtttatttgcgtagaggtgt

SEQ ID NO: 70476 - DNA, 120 bp, synthetic construct
  source 1..120: mol_type = other DNA
tggggtgttaaagtctcccattattaatgtgtgggagtctaagtctctttgtaggtcactcaggacttgctttatgaagctaggtgctcctgtattgggtgcatatatatttaggatagt

SEQ ID NO: 70477 - DNA, 120 bp, synthetic construct; identical to SEQ ID NO: 70476
  source 1..120: mol_type = other DNA

SEQ ID NO: 70478 - DNA, 120 bp, synthetic construct
  source 1..120: mol_type = other DNA
tcctggtacctccggtagaattcggctgtgaatccatctggtcctggactctttttggttggtaaactattgattattgccacaatttcagctcctgttattggtctattcagagattca

SEQ ID NO: 70479 - DNA, 120 bp, synthetic construct
  source 1..120: mol_type = other DNA
cattgatgaaaaaatcctcaataaaatactggcaaaccgaatccagcagcacatcaaaaagcttatccaccatgatcaagtgggcttcatccctgggatgcaaggctggttcaatatacg

SEQ ID NO: 70480 - DNA, 120 bp, synthetic construct
  source 1..120: mol_type = other DNA
aattggaaaaaactactttaaagttcatatggaaccaaaaaagagcccacatcgccaagtcaatactaagccaaaagaacaaagctggaggcatcacactacctgacttcaaactatact

SEQ ID NO: 70481 - DNA, 120 bp, synthetic construct
  source 1..120: mol_type = other DNA
atgtttattgcggcactattcacaatagcaaagacttggaaccaacccaaatgtccaacaatgatagactggattaagaaaatgtggcacatatacaccatggaatactatacagccata

SEQ ID NO: 70482 - DNA, 120 bp, synthetic construct
  source 1..120: mol_type = other DNA
aggttgcaaaaattttctcccatgttgtaggttgcctgttcactctgatggtagtttcttttgctgtgcagaagctctttagtttaattagatcccatttgtcaattttgtcttttgttg

SEQ ID NO: 70483 - DNA, 120 bp, synthetic construct; identical to SEQ ID NO: 70473
  source 1..120: mol_type = other DNA

SEQ ID NO: 70484 - DNA, 120 bp, synthetic construct
  source 1..120: mol_type = other DNA
actagtacataccctatatgcaatgcttcaaagagggtttttccctgtgagcttctgtggtagggaatttcattctcaccattttacgatccaggaaagtaaggtgtggttagagacact

SEQ ID NO: 70485 - DNA, 120 bp, synthetic construct
  source 1..120: mol_type = other DNA
agagggtgggggatagagggagggggatagagggtgggggatggagggggatagagggaggggataaagggtgggggatagagggaggggatagagggagggggatagagggtgggggat

SEQ ID NO: 70486 - DNA, 120 bp, synthetic construct
  source 1..120: mol_type = other DNA
gggagggggatagagggtgggggatagaggtagggggatagagtgtgggggatagagggtgggggatagagggggggacagagggtgggggatagagggaagggggatagagggtggggg

SEQ ID NO: 70487 - DNA, 120 bp, synthetic construct
  source 1..120: mol_type = other DNA
attaataaggaaatgataataaggaaataattatccttaataataagcccccttgagcccatctcccaatcctggaactaaaccatggcaatagccaccgttcacccatgcacaccaccc

SEQ ID NO: 70488 - DNA, 120 bp, synthetic construct
  source 1..120: mol_type = other DNA
cctgtctccattcacccatgcacaccaccccttcctgtctccattcacccatgcacactacccccttcctgtctccattcacccatgcacactaccccttcctgtctccattcacccatg

SEQ ID NO: 70489 - DNA, 120 bp, synthetic construct
  source 1..120: mol_type = other DNA
atttgaccccttacaggcaccaggaatttacttgtctaatcccctgcattttcacagcagccctatgaggtgtgttctgttatgttcctgaattgaacataagtaaagtgaggtagaagt

SEQ ID NO: 70490 - DNA, 120 bp, synthetic construct
  source 1..120: mol_type = other DNA
ttcccacttacacacacagtgcgcgtttgtcacggaccaggacctgggcatctctggggcttgtttccctacagagccaagtctgcagggcacccaacaaataacccccaagtcactgtt

SEQ ID NO: 70491 - DNA, 120 bp, synthetic construct
  source 1..120: mol_type = other DNA
tctgtcttggcaggaaccggaggacctgtctggctgatttttgtgtggctgttgtagctgtagctttgatggttgtgcttaggttttggggtacagcaaggtcactcggtgtactgtcac

SEQ ID NO: 70492 - DNA, 120 bp, synthetic construct
  source 1..120: mol_type = other DNA
ctacgagtcattttaaaaagaaaacacaatttacgtgtgaaagtcgagacgagaaagctcgcgggtgcccgttaggatttgtggggtgagacgggagaattcacaccagtcccagctgcc

SEQ ID NO: 70493 - DNA, 120 bp, synthetic construct
  source 1..120: mol_type = other DNA
ctcctgcttggagaagggtgtgcttttgtttcagagccgtgggagcagacaacatttctgaaggttgcaatttttgttttttagcaaaaattcctttctaaaatgtatgagcccgagtaa

SEQ ID NO: 70494 - DNA, 120 bp, synthetic construct
  source 1..120: mol_type = other DNA
ggttaaaagggcctccagctgaaacccatctcctggggaaatgtattaaaacagaaactctgctaggaagattgttttgctcagacgttcttctcctcctgggtttctgcttttacaatc

SEQ ID NO: 70495 - DNA, 120 bp, synthetic construct
  source 1..120: mol_type = other DNA
attgaggagcgacgtttgcctcatgcttaatagtcaacagtttggtacatgcaacctctaagtggcttccataaatgaataacaaacagaaagaaagagcgatagaaaaatgagcagata

SEQ ID NO: 70496 - DNA, 120 bp, synthetic construct
  source 1..120: mol_type = other DNA
acctcagctcctgtttataaagagggagtccaggataggggagatggcccctgggaggggaatgtctccacatacctaataatttgagatgattataacaataataagtatatttcatcc

SEQ ID NO: 70497 - DNA, 120 bp, synthetic construct
  source 1..120: mol_type = other DNA
gtttggtctggtgtccaagtcctgcctctggagtgaagtaccatctcttacctcaaaagtagataagtattgataaggtttggatttgtgtgccagcctaaatctcatgtgaaattggag

SEQ ID NO: 70498 - DNA, 120 bp, synthetic construct
  source 1..120: mol_type = other DNA
tcaccattatcatcaccatcatcaccatcatcctcatcaccatcatcactatcatcatcaccattatcaacatcatcatcattcctatttcacagctgaggaagtggaggagaggaggag

SEQ ID NO: 70499 - DNA, 120 bp, synthetic construct
  source 1..120: mol_type = other DNA
agacacggctttaagcaaagataaactcacagagcagagaaggtgttctctacgctctgctttgtccagattttagaatcatgaatgtgtgacctgagaccctattaattagacgcttta

SEQ ID NO: 70500 - DNA, 120 bp, synthetic construct
  source 1..120: mol_type = other DNA
gcaatggtgcaccccctaggacacccttttggatggcttctggggaggagtgtgcaatggtgcacccccctaggacacccttttggatggcttctggggaggagtgtgcaatggtgcacc

SEQ ID NO: 70501 - DNA, 120 bp, synthetic construct
  source 1..120: mol_type = other DNA
acatgtccatccctcagccaatcacagtggctggtggaataaatgccctgattggcttaggcttggggaagtcacacggtcttgcctgaggagttctggagccttttccaaaagacaagt

SEQ ID NO: 70502 - DNA, 120 bp, synthetic construct
  source 1..120: mol_type = other DNA
ggtgttattcaatggccatgaaattgacaaacggaagcatcactcacaagtcaacttcttgacatgtgaggggtggggggttaaaatatagggtttctctaatgaaggggttggacatta

SEQ ID NO: 70503 - DNA, 120 bp, synthetic construct
  source 1..120: mol_type = other DNA
gctggtgggctttaaaccatttccacgaactcgccaccccctcactcttatctcctcacttgttcacatcaagtactttcatttaaaatataaggacatggttgcagaaatgtaattccc

SEQ ID NO: 70504 - DNA, 120 bp, synthetic construct
  source 1..120: mol_type = other DNA
tctcaccatccgcccgagaccacagccactcccctctcaccatccaccagagaccacagccactctcttctccccatccgcccgagaccacagccactcccctctccccatccgcccgag

SEQ ID NO: 70505 - DNA, 120 bp, synthetic construct
  source 1..120: mol_type = other DNA
aatgaacacacaacagcactggaatgaaagtaacagagagagagcggtggagtgcatcagaggagtcacagaaatgctggtgagcacagaaactcaggatggccacatcgggaaggaaat

SEQ ID NO: 70506 - DNA, 120 bp, synthetic construct
  source 1..120: mol_type = other DNA
cagagaaggaagcaacacagtgcccacccccgtggcccacgtggctactgtgctctgccatcttggaactggaagcatggctggagtgtgtcatggtctggaacaataagggtggctcct

SEQ ID NO: 70507 - DNA, 120 bp, synthetic construct
  source 1..120: mol_type = other DNA
acctcccgagtgtgcccacggtgcccgctcctcccacctcccgagtgtgccccggtgcccgctcctcccacctcccgagtgtgccccggtgcccgctcctcccacctcccgagtgtgccc

SEQ ID NO: 70508 - DNA, 120 bp, synthetic construct
  source 1..120: mol_type = other DNA
cccatgttttcgttctgcactgctctagtagaagtttcatataatgctctgccttcttgggatgcttttgcctggacacccaggcatttccatacatcttccaaaatctatggagaggtt

SEQ ID NO: 70509 - DNA, 120 bp, synthetic construct
  source 1..120: mol_type = other DNA
ttacaggcgtgcgccgctgtgcctggccaaattcaaggaaaaatacgtttaacagcattttagctgaggaattcaggcaaaactgagttttgctttctgtactgtaggtttctttctttg

SEQ ID NO: 70510 - DNA, 120 bp, synthetic construct
  source 1..120: mol_type = other DNA
tctattttactgtactattttgtccattttcacattttatttttaattttttttgagacagggtattgcttatattgcccaggctggagtgcagtggcatgatcttggctcactgcaacc

SEQ ID NO: 70511 - DNA, 120 bp, synthetic construct
  source 1..120: mol_type = other DNA
gcaaattcaaaagaactgaaatcataacaaacagtctctcggaccatggtgcaatcaaattagaactcaggattaagaaactcactcaaagggaggacccaagatggccgaataggaaca

SEQ ID NO: 70512 - DNA, 120 bp, synthetic construct
  source 1..120: mol_type = other DNA
ccactttttgatggggttgtttttttcttgtaaatttgtttgagttcattgtagattctggatattagccctttgtcagatgagtaggttgcgaaaattttctcccatgttgtaggttgc

SEQ ID NO: 70513 - DNA, 120 bp, synthetic construct
  source 1..120: mol_type = other DNA
ccatttgtttgtgtcctcttttatttccttgagcagtggtttgtagttctccttgaagaggtccttcacatcccttgtaagttggattcctaggtattttattctctttgaagcaattgt

SEQ ID NO: 70514 - DNA, 120 bp, synthetic construct; identical to SEQ ID NO: 51075
  source 1..120: mol_type = other DNA

SEQ ID NO: 70515 - DNA, 120 bp, synthetic construct
  source 1..120: mol_type = other DNA
gaccatcgaggctaggaagaaactgcatcaactaacgcgcaaaaaaaccagctaacatcataatgacaggatcaaattcacacataacaatattaactttaaatgtaaatggactaaatg

SEQ ID NO: 70516 - DNA, 120 bp, synthetic construct
  source 1..120: mol_type = other DNA
attgggtacctaacgaaatgaaggcagaaataaagatgttctttgaaaccaatgagaacaaagacacaacataccagaatctctgggacacattcaaagcagtgtgtagagggaaattta

SEQ ID NO: 70517 - DNA, 120 bp, synthetic construct
  source 1..120: mol_type = other DNA
gtggaggatttagttgtttgggtaagaagtaagtaaaaacgaaggtgaaaaacatgatagaatgtgtgattgttttcttcattgagaaagaaaaccgtagcatcgtgtaggccaggacat

SEQ ID NO: 70518 - DNA, 120 bp, synthetic construct
  source 1..120: mol_type = other DNA
gtgatgatgagcatttcttcatgtgttttttggctgcataaatgtcttcttttgagaagtgtctgttcatgtccttcacccactttttgatggggttgtttgtttttttcttgtaaattt

SEQ ID NO: 70519 - DNA, 120 bp, synthetic construct; identical to SEQ ID NO: 67776
  source 1..120: mol_type = other DNA

SEQ ID NO: 70520 - DNA, 120 bp, synthetic construct
  source 1..120: mol_type = other DNA
tctttggctctgtttatatgctggattacatttattgatttgcgtatattgaaccagccttgcatcccagggatgaagcccacttgataatgatggataagctttttgatgtgctgctgg

SEQ ID NO: 70521 - DNA, 120 bp, synthetic construct
  source 1..120: mol_type = other DNA
cctgctcctgaatgactactgggtacataacgaaatgaaggcagaaataaagatgttctttgaaaccaacgagaacaaagacaccacataccagaatctctgggacgcattcaaagcagt

SEQ ID NO: 70522 - DNA, 120 bp, synthetic construct
  source 1..120: mol_type = other DNA
attttgcagcggctggtaccggttgttcctttccatgtttagcgcttccttcaggagctcttttagggcaggcctggtggtgacaaaatctctcagcatttgcttgtctataaagtattt

SEQ ID NO: 70523 - DNA, 120 bp, synthetic construct
  source 1..120: mol_type = other DNA
gcaccccccagcaggggcacactgacacctcacacggcagggtattccaacagacctgcagctgagggtcctgtctgttagaaggaaaactaacaaccagaaaggacatctacaccgaaa

SEQ ID NO: 70524 - DNA, 120 bp, synthetic construct
  source 1..120: mol_type = other DNA
gaccatagattgttttctgattaatttagtagtgtttgtggtacagctatgtatattgaaagaacaatgtcttggccaggtgcagtggctcacacctgtaaacccagcattttgggaggc

SEQ ID NO: 70525 - DNA, 120 bp, synthetic construct
  source 1..120: mol_type = other DNA
tgtgatggcttggaaaaacagtgtaaactggcagtgtaaacaagagcagggcatgtatgagtagttgagaacggtgaataggagtatgagtagacagaagatagtagggatgacaagttt

SEQ ID NO: 70526 - DNA, 120 bp, synthetic construct
  source 1..120: mol_type = other DNA
taggctggtctcgaactcctagcctcaagtgatctgcctgccttggcttcccaaagtgctgggattgcactcaaaacaaaacaaaacaaaaacacaaagaaaaaaaaacaaagagtatgg

SEQ ID NO: 70527 - DNA, 120 bp, synthetic construct
  source 1..120: mol_type = other DNA
taaggtgaaaagtcagagaggaagaaccagataaatccccagaaataattggggacacctcaagcgaggctagtgtctggccagtaagcactgatacataattatgtggataacacaaat

SEQ ID NO: 70528 - DNA, 120 bp, synthetic construct
  source 1..120: mol_type = other DNA
gttctttaaataacaagcagtgtgtccttgaacaggttatttcatataagtagcaagttgctcacttgtgaaatgagcacgttggactgggtgatcttgaagcctcctctcacaggcata

SEQ ID NO: 70529 - DNA, 120 bp, synthetic construct
  source 1..120: mol_type = other DNA
tcgaacatccaaccccaagttctccagttttggaacgtggactggctctccttgctcctcagctttcagacagcctattgtagcacctttgattgtgtaatataatacttaataaatcct

SEQ ID NO: 70530 - DNA, 120 bp, synthetic construct
  source 1..120: mol_type = other DNA
ctggatatatagatatagatatctatacagatagctggatatatagatatagatatctatacagatagctggatatatagatatagatatctatatagatagctagatatagatatagat

SEQ ID NO: 70531 - DNA, 120 bp, synthetic construct
  source 1..120: mol_type = other DNA
atctcttcactaatgtaaggttaaatatcaaatgttccaaagcagaaaagtggctactctgtctcttcctccccctttctctcttgctatgtgtgtgtgtgtatatatatatgcagttat

SEQ ID NO: 70532 - DNA, 120 bp, synthetic construct
  source 1..120: mol_type = other DNA
aggtaaacttgtgtcacaggtttgttgtacagattagtttttgtcactcaggtgttaagcctagtgctcatgagttatttttccaaatcctctccctccctccatcctctgacagcttct

SEQ ID NO: 70533 - DNA, 120 bp, synthetic construct
  source 1..120: mol_type = other DNA
accttgaatgtaaacaagctaaatgccccaattcgaaggtacatatttgcaagtttgataatgaagcaagacccagtggtatgctgtcttcaacagacctatctcacatgcagtgacacc

SEQ ID NO: 70534 - DNA, 120 bp, synthetic construct
  source 1..120: mol_type = other DNA
tagctcattagagactcggtgcccagggtttttactggggttggtcacgtaggcactttttgctttgtatatatcaaaattcttggttctcagaaggtaagtaggtattcggcataaacc

SEQ ID NO: 70535 - DNA, 120 bp, synthetic construct
  source 1..120: mol_type = other DNA
atacaggataatagagagtggaaggtaaatacgttgtttaagcaaaattaacagagctagctattgtcagaaagtgatttccaaagtaaaagaaagcttttcttaaactccagatgttga

SEQ ID NO: 70536 - DNA, 120 bp, synthetic construct
  source 1..120: mol_type = other DNA
tgaactttctcaccctttcataagggctggccttgtgtgatggttaatattaaatggcaacttaatgcgattgtaggatgcaaagtattgtctctgggtatatgtgggtgtttctgggtg

SEQ ID NO: 70537 - DNA, 120 bp, synthetic construct
  source 1..120: mol_type = other DNA
aataaataaaaaattataagtacttaaaaacataaagaaattgtcataaaaaatccttaaaagatggttaccagaagctgggaagggtagttggtgggtgagaggaaggaggggagatgg

SEQ ID NO: 70538 - DNA, 120 bp, synthetic construct
  source 1..120: mol_type = other DNA
cactggtatttgtttaatcctccttgcatagcccactgcttagaatatagtaaaagcattgtaagtacatgttcgttttaataaataatgttaaaatattgaaggtgaatgagtcttaca

SEQ ID NO: 70539 - DNA, 120 bp, synthetic construct
  source 1..120: mol_type = other DNA
ataaaaccacactgacttattttgaattcatatatatgccaaactatatcattataagaaaaatattaaacaaaaacataaaactgaccaatttatcatgtgcagagcaccatctcaaca

SEQ ID NO: 70540 - DNA, 120 bp, synthetic construct
  source 1..120: mol_type = other DNA
ctatgcacatgtgaagaagattagctcagaagaaagtaagtctgaaagcccaatggaagacaaagcaatatgaagaggctataataaattgttaaatggaatttgactttgactcttgac

SEQ ID NO: 70541 - DNA, 120 bp, synthetic construct
  source 1..120: mol_type = other DNA
tcagtgacctagagtaattaatcacatctctgtttgtgtgtttgtttatatgcgtgtgtgtgtgtgtgtgtgtgtgtgtgtgtgtaacttcaagcaaaatgtgttccatgtatcacaacc

SEQ ID NO: 70542 - DNA, 120 bp, synthetic construct
  source 1..120: mol_type = other DNA
aagggtttgtattagtttcttctcacactgctatgaagaaatacctgagactgggtaatttataaaggaaaaatgtttaattgattcacagcactgaatggctggggaggcctcaagaaa

SEQ ID NO: 70543 - DNA, 120 bp, synthetic construct
  source 1..120: mol_type = other DNA
atggtggtgcataagaaaatatgtgaggtagagctgagtcaactctttcatctctaccaggtttccagatacacagaaaaacctagccaagattagcaaagccaatctgccattgatcct

SEQ ID NO: 70544 - DNA, 120 bp, synthetic construct
  source 1..120: mol_type = other DNA
ctgtatttaccattattgagaactaggttaaacaaaatgcacagattctatgaattgcaacccattcagttttcatgctcatgatatggccttagatttcaaatgtcaaaacagaaaagc

SEQ ID NO: 70545 - DNA, 120 bp, synthetic construct
  source 1..120: mol_type = other DNA
ttcctttttgtgcatgcaaagaaggcaagctatatgtagtctatgcttgaaaggacactgacacaattataagggctccatccttgtgtcctcatctgctctaacctccagaggctttat

SEQ ID NO: 70546 - DNA, 120 bp, synthetic construct
  source 1..120: mol_type = other DNA
ctctctattacctgtgagttttcatatcacagatttttggaatcagataaaatggggagggaaaataagttatgctccctgagcctatgtcagtggtccctaagacttatcccaggactg

SEQ ID NO: 70547 - DNA, 120 bp, synthetic construct
  source 1..120: mol_type = other DNA
ctgtcacgagtagtgctgcaatgagcatacgtgtgcatgtatctttatgatagaacaatttattttcctttgggtgtatacccagtaatgggattgctgggctgaatggtagttctgttc

SEQ ID NO: 70548 - DNA, 120 bp, synthetic construct
  source 1..120: mol_type = other DNA
cattgctctgatctttatgcccaaagagattagctcatatctataggccacaaaattggtgttacccaggcttaaaatacctgatgatgatgaatgcctttgcagaaatgccttctcaga

SEQ ID NO: 70549 - DNA, 120 bp, synthetic construct
  source 1..120: mol_type = other DNA
gtagctgtgatcgtgccactgcactacagcttgggcgatagagagagaccctgtctcaaaacaaaacaaaaaaagatcttaacattaggaaaaactgagtgaaggatacacaggaactat

SEQ ID NO: 70550 - DNA, 120 bp, synthetic construct
  source 1..120: mol_type = other DNA
tccagctttgttcttttggcttaggattgacttggcgatgcggactcttttttggttccatatgaactttaaagtagttttttccaattctgtgaagaaagtcattggtagcttgatggg

SEQ ID NO: 70551 - DNA, 120 bp, synthetic construct
  source 1..120: mol_type = other DNA
tgtgctgctggattcggtttgccagtattttattgaggatttttgcatcaatgttcatcaaggatattggtctaaaattctcttttttggttgtgtctctgcccggctttggtatcagaa

SEQ ID NO: 70552 - DNA, 120 bp, synthetic construct
  source 1..120: mol_type = other DNA
aatggtaatgtctaggttttcttctagggtttttatggttttaggtctaacgtttaaatctttaatccatcttgaattgatttttgtataaggtgtaaggaagggatccagtttcagctt

SEQ ID NO: 70553 - DNA, 120 bp, synthetic construct; identical to SEQ ID NO: 50654
  source 1..120: mol_type = other DNA

SEQ ID NO: 70554 - DNA, 120 bp, synthetic construct
  source 1..120: mol_type = other DNA
atcctgcagagtgttttccaacttggttccattctccacgtcactttcaggtacaccaatcagacgtagatttggtcttttcacatagtcccatatttcttggaggctttgctcatttct

SEQ ID NO: 70555 - DNA, 120 bp, synthetic construct
  source 1..120: mol_type = other DNA
gttcgagcttcccggctgctttgtttacctaagcaagcctgggcaatggcgggcgcccctcccccagcctcgttgccgccttgcagtttgatctcagactgctgtgctagcaatcagcga

SEQ ID NO: 70556 - DNA, 120 bp, synthetic construct
  source 1..120: mol_type = other DNA
ggtagggccataacccgcccaggagagaaaacgaaaacgcgctttcgaaacgcgcgatctccaaggcgttttcctttcattaaaaaaaaaaaaaaaaaaaagaaagaaagaaagaaagaa

SEQ ID NO: 70557 - DNA, 120 bp, synthetic construct
  source 1..120: mol_type = other DNA
cccacatcaacagaatatacatttttttcagcaccacagcacacctattccaaaattgaccacatagttggaagtaaagctctcctcagcaaatgtaaaagaacagaaattataacaaac

SEQ ID NO: 70558 - DNA, 120 bp, synthetic construct
  source 1..120: mol_type = other DNA
aagatattatccaggagaacttccccaatctagcaaggcaggccaacattcagattcaggaaatacacagaacgccacaaagatactcctcgagaagagcaactccaagacacaaaattg

SEQ ID NO: 70559 - DNA, 120 bp, synthetic construct
  source 1..120: mol_type = other DNA
aagctggacggagaatgactttgacaagttgagagaagaaggcttcagacgatcaaagtactccgagctacaggaggaaattcaaaccaaaggcaaagaagtcaaaaactttgaaaaaaa

SEQ ID NO: 70560 - DNA, 120 bp, synthetic construct
  source 1..120: mol_type = other DNA
ttttaattggagcatttagtctatttacatttaaagttaatattgtcatgtgtgaatttgatcctgtcattatgatgttagctggttattttgctcgttagttgatgcagtttcttccta

SEQ ID NO: 70561 - DNA, 120 bp, synthetic construct
  source 1..120: mol_type = other DNA
aagcaagagcaaacacattcaaaagctagcagaaggcaagaaataactaaaatcagagcagaactggaggaaatagagacacaaaaaacccttcaaaaaatcaatggattcgtgacctgg

SEQ ID NO: 70562 - DNA, 120 bp, synthetic construct
  source 1..120: mol_type = other DNA
ttcagtttccatgtagttgagcggctttgagtgagattcttaatcctgagttctagtttgattgcactgcggtctgagagatagtttgttataatttctgttcttttacatttgctgagg

SEQ ID NO: 70563 - DNA, 120 bp, synthetic construct
  source 1..120: mol_type = other DNA
catgtttagcgcttccttcaggagctcttttagggcaggcctggtggtgagaaaatctctcagcatttgcttgtctataaagtattttatttctccttcacttatgaagcttagtttggc

SEQ ID NO: 70564 - DNA, 120 bp, synthetic construct
  source 1..120: mol_type = other DNA
gcgctctgcgttttagagtttccagtttttctgttctgttttttccccatctttgtggttttatctacttttggtctttgatgatggtgatgtacagatgggttttcggtgtagatgtcc

SEQ ID NO: 70565 - DNA, 120 bp, synthetic construct
  source 1..120: mol_type = other DNA
tcttctcttgactcactggaatcatcgagattctaactggagatctggtctgtgcttcttctcctgagagtcgcacccataaaaggcatgcaaacctccctttctacactagactgcact

SEQ ID NO: 70566 - DNA, 120 bp, synthetic construct; identical to SEQ ID NO: 69858
  source 1..120: mol_type = other DNA

SEQ ID NO: 70567 - DNA, 120 bp, synthetic construct
  source 1..120: mol_type = other DNA
ggttggtaaactattgattattgcccaatttcagctcctgttattggtctattcagagattcaacttcttcctggtttagtcttgggagagtgtatgtgtcgaggaatgtatccatttct

SEQ ID NO: 70568 - DNA, 120 bp, synthetic construct
  source 1..120: mol_type = other DNA
tgtaggtcactcaggacttgctttatgaatctgggtgctcctgtattgggtgcataaatatttaggatagttagctcctcttgttgaattgatccctttaccattatgtaatggccttct

SEQ ID NO: 70569 - DNA, 120 bp, synthetic construct
  source 1..120: mol_type = other DNA
ccacatcactttcaggtacaccaatcagacgtagatttggtcttttcacatagtcccatatttcttggaggctttgctcatttctttttattcttttttctctaaacttcccttctcgct

SEQ ID NO: 70570 - DNA, 120 bp, synthetic construct
  source 1..120: mol_type = other DNA
gtatttccagtcgaatattttcaggtggcagatgcaggaagaattttctgaccttccccagaagcaggtcacgagaccctcatgtgagagcacgtcacgagaccttcatgtgagaagcag

SEQ ID NO: 70571 - DNA, 120 bp, synthetic construct
  source 1..120: mol_type = other DNA
gttagggttagttgttctttaaaaacgttagtctttttaagtaaaatgtgagtctttaaaagatgctttcagtgacaccgtgggcttcaggggagagggtcagtctgagtctgtcaccac

SEQ ID NO: 70572 - DNA, 120 bp, synthetic construct
  source 1..120: mol_type = other DNA
aggtgaaggaaggtttaatacctttaaaaaatccattttacaagatgagatggatccagatgtggaccacggctcaccacaggatgactcccgccagcattccctgcagactctcaaagg

SEQ ID NO: 70573 - DNA, 120 bp, synthetic construct
  source 1..120: mol_type = other DNA
ttacatgggttggcttactctgcctgatataaatttatgactcagaggctgcttttgtcttcggttcccagatgaaaaacctgagtttcagagaggttaagtaacttctccaaggcagca

SEQ ID NO: 70574 - DNA, 120 bp, synthetic construct
  source 1..120: mol_type = other DNA
ctaattacatctgcaatgaccttacttccaaaaaagtcacattgtgaagttctaggggagagagcctcagcatatcttttgtagggacacagttcaacctgtaacagcacccacgaagaa

SEQ ID NO: 70575 - DNA, 120 bp, synthetic construct
  source 1..120: mol_type = other DNA
tcttgctggtagttaacactgtaaattaaaatgagaaccccaacccacaatgtgaaactctggaagtcagaatgtctcagttgcctacatactgggccactgaaataaaaaccatctccc

SEQ ID NO: 70576 - DNA, 120 bp, synthetic construct
  source 1..120: mol_type = other DNA
attgtgctcctgctaatgacagggttgtctcagtaataaggatggtgcactggagaaatttgctgccttggtatatttttccctggcagaaaactacttagagactgtagtcagtaagaa

SEQ ID NO: 70577 - DNA, 120 bp, synthetic construct
  source 1..120: mol_type = other DNA
tttctcagcggcctcagctgaacactgtctctgaaggagggacatttgccgctgggtgaaaactcagaacgattcagtggcaggttcaaaacaataatcataagcagaagcagcatccct

SEQ ID NO: 70578 - DNA, 120 bp, synthetic construct
  source 1..120: mol_type = other DNA
agcaacatgcagcaattttaagtgcgaagggagaaggtttttcatattgatggggtttttcctccttcagccaaacaactgattcacaaaaaaggcatgggaagtctctgcttctgatgg

SEQ ID NO: 70579 - DNA, 120 bp, synthetic construct
  source 1..120: mol_type = other DNA
ggttttgctatgatattttactagttttggtcaactggccatcttttggcaacacgggaattgacaggagagttgcttcaacttcttaaaaggcttggactgatgggtgttgtccatttc

SEQ ID NO: 70580 - DNA, 120 bp, synthetic construct
  source 1..120: mol_type = other DNA
acgaaagctcttctgggacgtcttgatcacagacacagcaaagtcacagtaatataacttcttataaagtgaagaaagccctccttcgtcctgccacccccagttactgtgatctgtttt

SEQ ID NO: 70581 - DNA, 120 bp, synthetic construct
  source 1..120: mol_type = other DNA
acctgcactcccaccagcctgtccggcagctgccacctttttttccctcaggttggaagaaacatggcaggagagagggtcccggctcagcagcggcagatctaggatggactggctggg

SEQ ID NO: 70582 - DNA, 120 bp, synthetic construct
  source 1..120: mol_type = other DNA
atcatgccactgcacgccagcctaggtgacaaagcgagactccgtcaaaaaaaaaaaaaaaaatcggcctttccacagttggtgtgtgggagaggacagaataagtgcatggggtctctt

SEQ ID NO: 70583 - DNA, 120 bp, synthetic construct
  source 1..120: mol_type = other DNA
ttgatcatctgagattatcttgaactcaagaggcaacatcctgagtttgtcctacagtctctcattgggatggcactaaaatataggaaccccctcgtccctctaaatttctgctgatta

SEQ ID NO: 70584 - DNA, 120 bp, synthetic construct
  source 1..120: mol_type = other DNA
agaactatgatctatgaagaactatgatccatgaggagccgtgatacatgaagagctatgatctctgaagagctatgatgcatgaagagctgtgacctctgaagagctgtgatctatgaa

SEQ ID NO: 70585 - DNA, 120 bp, synthetic construct
  source 1..120: mol_type = other DNA
ttgacttcagactctggcttccagaactatgggattctaaatatttgctactttaagccacccagtttgcagtagttcctcacagcagcctcagcacacaaatccagagtgctcagcctg

SEQ ID NO: 70586 - DNA, 120 bp, synthetic construct
  source 1..120: mol_type = other DNA
agaagaacagtttgcttttcaaaccttgtacacccccagctcaagcctgcccctggggataagggaggggaccagatggtattgattgtctggggccacactgggatgttttatgtgctg

SEQ ID NO: 70587 - DNA, 120 bp, synthetic construct
  source 1..120: mol_type = other DNA
aaatttcacatttttcatcaaagaggaaataacattccaacacttacacatctaaataattgggtaaggttccttccacacttcacatcacccctgtctggctgtgcagggccagtcgct

SEQ ID NO: 70588 - DNA, 120 bp, synthetic construct
  source 1..120: mol_type = other DNA
tcaaaaatccacacataacttttgactcccccaaaacttgactaatagcctactgctgactggaaggcttatcagtaatgtagacagttggtcaccatatatttattatgttgtatgtat

SEQ ID NO: 70589 - DNA, 120 bp, synthetic construct
  source 1..120: mol_type = other DNA
gatgccgtccactttttcttaaaacgttgcaattgctgagttgccaggcactatgctaaatgcttcacgtgcatgtttaaaaactttatgccttcaaggccctgacttgggaacattagt

SEQ ID NO: 70590 - DNA, 120 bp, synthetic construct
  source 1..120: mol_type = other DNA
ctaaagataatctatgaagcggaatttctgttgactttgatcctttttggtggtaactactaagatggaggctgagctggcttcaatgtctcacagctggtgcgcagagctaaatgacaa

SEQ ID NO: 70591 - DNA, 120 bp, synthetic construct
  source 1..120: mol_type = other DNA
ggttctttaaagtagcggccagcatggccttgctgtgggaccctcaaggcctagggggagcctccctctggctggctgaaaactcaacatgacattttcccaccaggtgttcctttaggt

SEQ ID NO: 70592 - DNA, 120 bp, synthetic construct
  source 1..120: mol_type = other DNA
tgcagacattgatattaaactacaccccgtgcctctaaatgtctgcatgctccctctacctgaggcacagtgaccccagcaatggccgaaggtccactttgacagggtggagaatgaatc

SEQ ID NO: 70593 - DNA, 120 bp, synthetic construct
  source 1..120: mol_type = other DNA
ttaactcataaaaaaatactgactataaatgagtccagactcgtgtcttgatgttcaaagcctcccacattctgtcccaacccgcctttgccaccaccagggtctccttcagtactgggg

SEQ ID NO: 70594 - DNA, 120 bp, synthetic construct
  source 1..120: mol_type = other DNA
gcaaccgccgtcctggtgtctcccatcagaggtaagtgtggtctcccgaccagagcagccaccgtcctggtgtctgccatcagaggtaagtgtggtctcccgaccagagcagccaccgtc

SEQ ID NO: 70595 - DNA, 120 bp, synthetic construct
  source 1..120: mol_type = other DNA
atgggacgtatttcaaaataataagagctatctatgacaaacccacacccaatatcatactgaatgggcaaaaactggaagcattccctttgaaaactggcacaagacagggatgccctc

SEQ ID NO: 70596 - DNA, 120 bp, synthetic construct
  source 1..120: mol_type = other DNA
aaacgttagacctaaaaccataaaaaccctagaagaaaacctaggcattaccattcaggacataggcgtgggcaaggacttcatgtccaaaacaccaaaagcaatggcaacaaaagacaa

SEQ ID NO: 70597 - DNA, 120 bp, synthetic construct
  source 1..120: mol_type = other DNA
gaagcactttccctgtgccacccagacagaagacgcaggtgctggtttcctatggggctctgcgtgaggatgggcgtctgggaccctggtctcctctaggactccatgtgtgaggctggg

SEQ ID NO: 70598 - DNA, 120 bp, synthetic construct
  source 1..120: mol_type = other DNA
tgcgtgaggatgggcgtctgggaccctggtctcctctaggactccatgtgtgaggctgggcattcgagaccctggtctctgggactccatgtgtgaggctgagcgttcgagaccctggtc

SEQ ID NO: 70599 - DNA, 120 bp, synthetic construct
  source 1..120: mol_type = other DNA
aatgaagacccaaagacccaggcaaaactgtctagatttatgctcaggttcagtgaaggatggacagccatgtagcaatgtaattggacaaaaagggtatgagttgatagtaataggctg

SEQ ID NO: 70600 - DNA, 120 bp, synthetic construct
  source 1..120: mol_type = other DNA
agtatcaaactcctgacctcaactgatccactcaccttggcctcccaaagtgctgggattacaggggtgagccaccatgcccagcccctctctcttttcttccttcccatttcactactc

SEQ ID NO: 70601 - DNA, 120 bp, synthetic construct
  source 1..120: mol_type = other DNA
tcttctagattttctagtttatttgtgtcgaggtgtttatagtattctctgatggtagtttttatttctgtgggatcggtggtgatatcccctttatcattttttattgcatctatttga

SEQ ID NO: 70602 - DNA, 120 bp, synthetic construct
  source 1..120: mol_type = other DNA
tgcaacaagaagagctaactatcctaaatatacatgcacccaatacaagagcatccagattcataaagcaagtccttagagacctacaaagagacttagactcccacacaataataatgg

SEQ ID NO: 70603 - DNA, 120 bp, synthetic construct; identical to SEQ ID NO: 70602
  source 1..120: mol_type = other DNA

SEQ ID NO: 70604 - DNA, 120 bp, synthetic construct
  source 1..120: mol_type = other DNA
tatatctcccactgctatccctcccccctcccccgaccccaccacagtccccagagtgtgatattccccttcctgtgtccttgtgatctcattgttcaattcccacctatgagtgagaat

SEQ ID NO: 70605 - DNA, 120 bp, synthetic construct
  source 1..120: mol_type = other DNA
ctcaagtttgtcaaagatcagatagttgtagatatgcggcattatttctgggggctctgttctgttccattgatctatatctctgttttggtaccagtaccatgctgttttggttactgt

SEQ ID NO: 70606 - DNA, 120 bp, synthetic construct
  source 1..120: mol_type = other DNA
ttgcgtatattgaaccagccttgcatcccagggatgaagcccacttgatcatgatggataagctttttgatgtgctgctggattcggtttgccagtattttattgaggatttttgcatca

SEQ ID NO: 70607 - DNA, 120 bp, synthetic construct
  source 1..120: mol_type = other DNA
tgagtggaaaatgagtgagtgaaagattagtgagtgaaggagtgagtgattggaacatgagtgagtggagaagtgagtgatgaaaggtgagttagtgggggagtgagtgagtggaaggtg

SEQ ID NO: 70608 - DNA, 120 bp, synthetic construct
  source 1..120: mol_type = other DNA
tatagtgctacactcttcttcccttccttcaagactctgatgacacaaatattagacctcttgtactgtcgcacaggtcttaaggatcaactcttttaaaaaactcatttactctctgtt

SEQ ID NO: 70609 - DNA, 120 bp, synthetic construct
  source 1..120: mol_type = other DNA
ctggtgcacttgtttcactctgacttaagagtggatatttatatttgtagatgactccacaaaccctatcactttgggctatcactacaggtatttccatctccacttacactcactcca

SEQ ID NO: 70610 - DNA, 120 bp, synthetic construct
  source 1..120: mol_type = other DNA
agtatatatatacattcaacgtgtgtccgtgtttttcttaaaaaaggaaaacgacaaaggaaaaacaaataatggatggctgttgtcaatggaaactgtaaggagactgtgtcctcactg

SEQ ID NO: 70611 - DNA, 120 bp, synthetic construct
  source 1..120: mol_type = other DNA
ggtttacattattagggtgcttattgtaggaatgcactctaaaaagtgggcgtagaatgaaagcagccgtccagtggtcctcccttttctgtagtttcacttttcttgcttcaagttaca

SEQ ID NO: 70612 - DNA, 120 bp, synthetic construct
  source 1..120: mol_type = other DNA
ggagaatcacttgaacctgggaggcagaggctgtagtgagccaagatcgcgccattgcattccaggctgggcaacaagagcgaaactctgtctctaaataaataaaataaaataaaataa

SEQ ID NO: 70613 - DNA, 120 bp, synthetic construct
  source 1..120: mol_type = other DNA
ttttctctccatgccctcttctctatcccttggtccacgtttttcccccttctgcttcgtattattgcttgtctgctcactgtccgtctccccgttccgtttctctattgcttcacgaaa

SEQ ID NO: 70614 - DNA, 120 bp, synthetic construct
  source 1..120: mol_type = other DNA
ataaaacgaaggttgaacagattacatagaatatctcagatcgtgtgagttgactataaaacataacagtggctggacgtggtgcttcacgcctgtaatcccaacactttgagaggctga

SEQ ID NO: 70615 - DNA, 120 bp, synthetic construct
  source 1..120: mol_type = other DNA
cttttcttccttctctctctctctatcttccctctgtcactgtctctctctctctctctctctctctgtcttctctctcccctctctcctgtctctctctctctcttctctctgtcactg

SEQ ID NO: 70616 - DNA, 120 bp, synthetic construct
  source 1..120: mol_type = other DNA
attatactgtgggtttatgttctccagggtattgtcgtgaaaacgtcacgatctcgtgctttctccaggccaaagccgcgtttttcctgcaagtttggggtgtgtagaggaaaaagccag

SEQ ID NO: 70617 - DNA, 120 bp, synthetic construct
  source 1..120: mol_type = other DNA
atctcccaatgctatccctcccccctcccccgaccccaccacagtccccagagtgtgatatttcccttcctgtgtccatgtgatctcattgttcaattcccacctatgagtgagaacatg

SEQ ID NO: 70618 - DNA, 120 bp, synthetic construct
  source 1..120: mol_type = other DNA
ttggcttttgttgccattgcttttggtgttttggacatgaagtccttgcccacgcctatgtcctgaatggtaatgcctaggttttcttctagggtttttatggttttaggtttaacgttt

SEQ ID NO: 70619 - DNA, 120 bp, synthetic construct
  source 1..120: mol_type = other DNA
agggcaatcaggcaggagaaggaaataaagggtattcaattaggaaaagaggaagtcaaattgtccctgtttgcagacgacatgattgtttatctagaaaaccccatcatctcagcccaa

SEQ ID NO: 70620 - DNA, 120 bp, synthetic construct
  source 1..120: mol_type = other DNA
atcacaggctggaggatatggagagaaatcacaggctgggagagatggagagaaatcacaggctgggggatatggagagtaatcacaggctggaggatatggagagaaatcacaggctgg

SEQ ID NO: 70621 - DNA, 120 bp, synthetic construct
  source 1..120: mol_type = other DNA
ttgagataatcatgtggtttttgtctttggctctgtttatatgctggattacatttattgatttgcgtatattgaaccagccttgcatcccagggatgaagcccacttgatcacggtgga

SEQ ID NO: 70622 - DNA, 120 bp, synthetic construct
  source 1..120: mol_type = other DNA
cttgtaggcgtttagtgctataaatttccctctacacactgctttgaatgcgtcccagagattctggtatgtggtgtctttgttctcgttggtttcaaagaacatctttatttctgcctt

SEQ ID NO: 70623 - DNA, 120 bp, synthetic construct; identical to SEQ ID NO: 55794
  source 1..120: mol_type = other DNA

SEQ ID NO: 70624 - DNA, 120 bp, synthetic construct
  source 1..120: mol_type = other DNA
tggaggaggagaggcgctctgcgttttagagtttccagtttttctgttctgttttttccccatctttgtggttttatctacttttgatctttgatgatggtgatgtacagataggttttc

SEQ ID NO: 70625 - DNA, 120 bp, synthetic construct
  source 1..120: mol_type = other DNA
agttgaaatgaaggaaaaaatgttaagggcagccagagagaaaggtcaagttaccctcaaaggaaagcccatcagactaacagcggatctctcggcagaaaccctacaagccagaagaga

SEQ ID NO: 70626 - DNA, 120 bp, synthetic construct
  source 1..120: mol_type = other DNA
caacagaatatacatttttttcagcaccacaccacacctattccaaaattgaccacatagttggaagtaaagctctcctcagcaaatgtaaaagaacagaaattataacaaactatctct

SEQ ID NO: 70627 - DNA, 120 bp, synthetic construct; identical to SEQ ID NO: 70470
  source 1..120: mol_type = other DNA

SEQ ID NO: 70628 - DNA, 120 bp, synthetic construct
  source 1..120: mol_type = other DNA
tttgagcagtggtttgtagttctccttgaagaggtccttcacatcccttgtaagttggattcctaggtattttattctctttgaagcaattgtgaatgggagttcactcatgatttggct

SEQ ID NO: 70629 - DNA, 120 bp, synthetic construct
  source 1..120: mol_type = other DNA
tctggtatgtggtgtttttgttctcgttggtttcaaagaacatctttatttctgccttcatttcgttatgtacccagtagtcattcaggagcaggttgttcagtttccatgtagttgagc

SEQ ID NO: 70630 - DNA, 120 bp, synthetic construct
  source 1..120: mol_type = other DNA
agccaaactaagcttcataagtgaaggagaaataaaatactttatagacaagcaaatgctgagagattttgtcaccaccaggcctgccctaaaagagctcctgaaggaagcgctaaacat

SEQ ID NO: 70631 - DNA, 120 bp, synthetic construct
  source 1..120: mol_type = other DNA
atggcttttggtgcctacctccaattactctattagtaattaggcattattttgaagactcagtatgcctttcatagcctatatttcggacgccctgtaaaacattaagtcagggccggg

SEQ ID NO: 70632 - DNA, 120 bp, synthetic construct; identical to SEQ ID NO: 70622
  source 1..120: mol_type = other DNA

SEQ ID NO: 70633 - DNA, 120 bp, synthetic construct
  source 1..120: mol_type = other DNA
tttatttctccttcacttatgaagcttagtttggctggatatgaaattctgggttgaaaattcttttctttaagaatgttgaatattggcccccactctcttctggcttgttgggtttct

SEQ ID NO: 70634 - DNA, 120 bp, synthetic construct
  source 1..120: mol_type = other DNA
gatgggttttcggtgtagatgtcctttctgtttgttagttttccttctaacagacaggaccctcagctgcaggtctgttggaataccctgccgtgtgaggtgtcagtgtgcccctgctgg

SEQ ID NO: 70635 - DNA, 120 bp, synthetic construct
  source 1..120: mol_type = other DNA
tattgcatctatttgattcttctctcttttcttctttattagtcttgctagcggtctatcaattttgttgatcctttcaaaaaaccagctcctggattcattgattttttgaagggtttt

SEQ ID NO: 70636 - DNA, 120 bp, synthetic construct
  source 1..120: mol_type = other DNA
catttgcttggtagatcttcctccatccttttattttgagcctatgtgtgtctctgcacgtgagatgggtttcctgaatacagcacactgatgggtcttgactctttatccaacttgcca

SEQ ID NO: 70637 - DNA, 120 bp, synthetic construct; identical to SEQ ID NO: 66409
  source 1..120: mol_type = other DNA

SEQ ID NO: 70638 - DNA, 120 bp, synthetic construct
  source 1..120: mol_type = other DNA
gagagcagtggttctcccagcacgcagctggagatctgagaacgggcagactgcctcaagtgggtccctgacccctgacccccgagcagcctaactgggaggcaccccccagcaggggca

SEQ ID NO: 70639 - DNA, 120 bp, synthetic construct
  source 1..120: mol_type = other DNA
ggcaggcctggtggtgacaaaatctctcagcatttgcttgtctataaagtattttatttctccttcacttatgaagcttagtttggctggatatgaaattctgggttgaaaattcttttc

SEQ ID NO: 70640 - DNA, 120 bp, synthetic construct
  source 1..120: mol_type = other DNA
ctaataaagaaaaaaagagagaagaatcaaatagacacaataaaaaatgataaaggggatttcaccaccgatcccacagaaatacaaactaccatcagagaatactacaaacacctctac

SEQ ID NO: 70641 - DNA, 120 bp, synthetic construct
  source 1..120: mol_type = other DNA
acaccaacaacagacagagagccaaatcatgagtgaactcccattcacaattgcttcaaagagaataaaatacctaggaatccaacttacaagggacatgaaggacctcttcaaggagaa

SEQ ID NO: 70642 - DNA, 120 bp, synthetic construct
  source 1..120: mol_type = other DNA
caaccccatcaaaaagtgggcgaaggacatgaacagacacttctcaaaagaagacatttatgcagccaaaaaacacatgaagaaatgctcatcatcactggccatcagagaaatgcaaat

SEQ ID NO: 70643 - DNA, 120 bp, synthetic construct
  source 1..120: mol_type = other DNA
ttttcttaatccagtctatcattgttggacatttgggttggttccaagtctttgctattgtgaatagtgcctcaataaacatacgtgtgcatgtgtctttatagcagcatgatttatagt

SEQ ID NO: 70644 - DNA, 120 bp, synthetic construct
  source 1..120: mol_type = other DNA
gtatctctgttttggtaccagtaccatgctgttttggttactgtagccttgtagtatagtttgaagtcaggtagtgtgatgcctccagctttgttcttttggcttaggattgacttggca

SEQ ID NO: 70645 - DNA, 120 bp, synthetic construct
  source 1..120: mol_type = other DNA
tctctatggaacttttatggtgtgctacattgtgtatatgcaaacctatacaatgtatgcgtatacgcatacccatacaatgtatgtgtatacatacacccatacaatgtatgtgtatat

SEQ ID NO: 70646 - DNA, 120 bp, synthetic construct
  source 1..120: mol_type = other DNA
gtgtatgtatacattgtatatgtatgtatacatacacgtatacgtgtatgtatacattgtatgtgtatgtatacatgcatgtatacgtgtatgtatacattgtatgtgtatgtatacatg

SEQ ID NO: 70647 - DNA, 120 bp, synthetic construct
  source 1..120: mol_type = other DNA
aaagagggaatcctccctaactcattttatgaggccagcatcattctgatatcaaagccgggcagagacacaaccaaaaaagagaattttagaccaatatccttgatgaacattgatgca

SEQ ID NO: 70648 - DNA, 120 bp, synthetic construct; identical to SEQ ID NO: 65471
  source 1..120: mol_type = other DNA

SEQ ID NO: 70649 - DNA, 120 bp, synthetic construct
  source 1..120: mol_type = other DNA
ttgtgaatagtgccgcaataaacatacgtgtgcatgtgtctttatagcagcatgatttatagtcctttgggtatatacccagtaatgggatggctgggtcaaatggtatttctagttcta

SEQ ID NO: 70650 - DNA, 120 bp, synthetic construct
  source 1..120: mol_type = other DNA
caccaatcggcactctgtatctagctcaaggtttgtaaacacaccaatcagcaacctgtgtttagctcaaggtttgtgagtgcaccaatcgacactctgtatctagctgctctggtgggg

SEQ ID NO: 70651 - DNA, 120 bp, synthetic construct
  source 1..120: mol_type = other DNA
caggaggcggaggttgcagtgacctgagattgcgccattgcactgcagcctgggcgagagagctagactctgtctcaaaacaacaacaacaacaattatatattatatataatttatata

SEQ ID NO: 70652 - DNA, 120 bp, synthetic construct
  source 1..120: mol_type = other DNA
agctctctcacctgccggagactggagtcctccattccctatgctggaagcacattccccttgcctcgttctgattttacctttatatggatatatatatccatataaatccatatatat

SEQ ID NO: 70653 - DNA, 120 bp, synthetic construct
  source 1..120: mol_type = other DNA
cacattccccttgcctcgttctgattttacctttatatggatatatatatccatataaatccatatatatatggatacatatatccatataaatccatatatatatggatacatatatcc

SEQ ID NO: 70654 - DNA, 120 bp, synthetic construct
  source 1..120: mol_type = other DNA
agacttagactcccacacattaataatgggagactttaacaccccactgtcaacagtagacagatcaacgagacagaaagtcaacaaggatacccaggaattgaactcagctctgcacca

SEQ ID NO: 70655 - DNA, 120 bp, synthetic construct
  source 1..120: mol_type = other DNA
aagccactcaactacatggaaactgaacaacctgctcctgaatgactactgggtacataacgaaatgaaggcagaaataaagatgttctttgaaaccaacgagaacaaagacaccacata

SEQ ID NO: 70656 - DNA, 120 bp, synthetic construct
  source 1..120: mol_type = other DNA
aatatcaatgtacaagcagtttttaaatttctgcttacgtcacatttgctgttacccactggccaaaacaagtcacagtcatatggccaagcccagaccagtgtgagagaggaagaccta

SEQ ID NO: 70657 - DNA, 120 bp, synthetic construct
  source 1..120: mol_type = other DNA
tgctctctcccacccccaatttagcacatgctaacattttcttcacttgttctatttgtgcttatttgctttttatttaaatcaatggctctcaacatgatggtgtggggagtgggggtg

SEQ ID NO: 70658 - DNA, 120 bp, synthetic construct
  source 1..120: mol_type = other DNA
acctcagccccctccacctcagcccctccacctcagccccctccacctcagcccctccacctcagccccctccacctcagcctcctccacctcagccccctctccaccacagccccctct

SEQ ID NO: 70659 - DNA, 120 bp, synthetic construct
  source 1..120: mol_type = other DNA
aaaaatgtttagaattgtttacctgcatgttttatctcgttcagaattagaattggtggcatgtagatatgcttctgggtctaccgagatgaggcaggcctactgggtctccaccttcag

SEQ ID NO: 70660 - DNA, 120 bp, synthetic construct; identical to SEQ ID NO: 70659
  source 1..120: mol_type = other DNA

SEQ ID NO: 70661 - DNA, 120 bp, synthetic construct
  source 1..120: mol_type = other DNA
gcatcccggcctcttcctaagccttttacaaacatcaactcttttgagcctcgttgagaaatagatactaatattatccccattttgtattagagaaacaggcacgggagactgaatagc

SEQ ID NO: 70662 - DNA, 120 bp, synthetic construct
  source 1..120: mol_type = other DNA
cgcccactcacccgctcattcattcattgcgtggtcgggagctcacacgcccactcacccgctcattcattcattgcgtggtcaggaggtcacacgcccactcacccgctcattcattca

SEQ ID NO: 70663 - DNA, 120 bp, synthetic construct
  source 1..120: mol_type = other DNA
tgcgaggtcgggagctcacgcgcccactcacccgctcattcattcattgcgaggtcgggagctcacgcgcccactcacccgctcattcattcattgcgaggtcgggagctcacgcgccca

SEQ ID NO: 70664 - DNA, 120 bp, synthetic construct
  source 1..120: mol_type = other DNA
gtgtgtgtgtgtgtgtgtgtatctgtgcatctctgtgtgtctgtgtgtgtaatggagagaagcagtatgtgtgtgtgtggaggtgtgtgtggggggctgtgtgtggggggtgtacatgag

SEQ ID NO: 70665 - DNA, 120 bp, synthetic construct
  source 1..120: mol_type = other DNA
agtagtgatgcatgctgcaacatgaatgcgccttgaacacatttagcaaaataagccagtcacagatgaccgcatatggtatggtcccatttatatgaaacgtccagaaaaggcaaatct

SEQ ID NO: 70666 - DNA, 120 bp, synthetic construct
  source 1..120: mol_type = other DNA
agaaattgggtgtgaaaggggggcgaatgctactggctctgggtgggtgtgaaaggggggcgaatgctactggctctgggtgggtgtgaaaggggggcgaatgctactggctctgggtgg

SEQ ID NO: 70667 - DNA, 120 bp, synthetic construct
  source 1..120: mol_type = other DNA
tgcaccatggccaagtgagcctcctggcatgagcccccaactttggcttggctgccatctctgaaaaaatcccctgctctttgatcctgctcccacctacctggggagtcatttttcggc

SEQ ID NO: 70668 - DNA, 120 bp, synthetic construct
  source 1..120: mol_type = other DNA
gagcctgctccgctcacgtggcccacgcactgtttaggacgcggcctttagagtctgctccgctcccgtggcccacgcactgtttaggacgcggcctttagagcctgctccgctcacgtg

SEQ ID NO: 70669 - DNA, 120 bp, synthetic construct
  source 1..120: mol_type = other DNA
caaaaatagagttaataaatgttttcatattcacctggagtgtgagtgtggaaccatcagactcgaaatccacactaaccattggtggggtctctcttcctttgcccagtatcacctaca

SEQ ID NO: 70670 - DNA, 120 bp, synthetic construct
  source 1..120: mol_type = other DNA
aaaaaaaaaaaagactctaccagctgcacctcatactgcacacctgcaaacacagagaaatcctggtcagcaactgccacacatatccactgtttctctaatatccactcacaaacaata

SEQ ID NO: 70671 - DNA, 120 bp, synthetic construct
  source 1..120: mol_type = other DNA
cctgcacatgtacctcctgaacctaaaatagaagttgagaaaagaaaaagaagatatcagtttcctatagggagctccaggtttgttccaaacagtagagagacaaacctatcaaggatg

SEQ ID NO: 70672 - DNA, 120 bp, synthetic construct
  source 1..120: mol_type = other DNA
tttattgttatatttcagaaaatcatataaaaagctgtgctaaaagtttccagagagagagtacatagttctcctgcagtggattaaaatgagattagcattggagtactagtctaaaac

SEQ ID NO: 70673 - DNA, 120 bp, synthetic construct
  source 1..120: mol_type = other DNA
gcacccaactgaggagaatgtaattcactcattgccagtcacagaccttggctcaccgatttactaagtatagattttatttctatccctcacctacctgttttgccaagggaactaaga

SEQ ID NO: 70674 - DNA, 120 bp, synthetic construct
  source 1..120: mol_type = other DNA
attcacaaaacacatataatcttgaatccaaatttcagttacagcagaaaaaataaaactctagatcaatctcaatcgtgtaaataaattcagatttccaatctaagagtctcaatttga

SEQ ID NO: 70675 - DNA, 120 bp, synthetic construct
  source 1..120: mol_type = other DNA
acaaaataaagtgataaaaaataatctggcaaaattcaggatgtaatgagtaaagacaaccatgaaagaaatgaagatcaataaaagcaggaaaaaaagtgggaagtggagagaataatg

SEQ ID NO: 70676 - DNA, 120 bp, synthetic construct
  source 1..120: mol_type = other DNA
ctaattatattcataacaaaaataagaagagaaagatagtagaaatatattctggtccattcaactttcacagtgggagagaatcaacaaattatgttatgggtgattaaatattatttt

SEQ ID NO: 70677 - DNA, 120 bp, synthetic construct
  source 1..120: mol_type = other DNA
cttttctttctccctcatccttaccatgtaatgaactcattttgcatgtcaagggctaaaagttgaatattttaaaagttctcattttcccactactatataaaccaacaaatatcttta

SEQ ID NO: 70678 - DNA, 120 bp, synthetic construct
  source 1..120: mol_type = other DNA
gtacaggcattgggtaaatgcagccgttccaaatggtaaaatttacccaaaacaaagggactaaaggctccaaacaagtccgaaatccagtgggacagtcaaatcttaaagctccaaaat

SEQ ID NO: 70679 - DNA, 120 bp, synthetic construct
  source 1..120: mol_type = other DNA
tctatcacagtgtcatgctacaaattttctgaacgtttatgctctgttttcctgttaaaactgagtgcttttaacacacccaagtcactcttgaatgatttgctgcttagaaatttcttc

SEQ ID NO: 70680 - DNA, 120 bp, synthetic construct
  source 1..120: mol_type = other DNA
tggagcagaatcatgtagctaagccctgcttgcgctaatacaagtccacaattttttttaagtttgttgttttaagctgctaagttttgaggtggtttgtggtacgtggaataagatgtc

SEQ ID NO: 70681 - DNA, 120 bp, synthetic construct
  source 1..120: mol_type = other DNA
tctaatgaacttctcttacagcaaggtatagatcaaaaaattatcacacgtctgctagcccttgaggctgctttagaatatgtcagggagcgacaagatgcagtggcattctgacagcat

SEQ ID NO: 70682 - DNA, 120 bp, synthetic construct
  source 1..120: mol_type = other DNA
tgtcaattaccttctagtggtgtttactcacggcctttgtcaattaatctttactgaataaatgtaagtctccctgactgatcgaggcggtggctgtgactaagtggcccagatgctcag

SEQ ID NO: 70683 - DNA, 120 bp, synthetic construct
  source 1..120: mol_type = other DNA
ggggctgtatggacaccaagatcctccttccctgcaagcctctgccacacccactcctgcaagcagcaggaaagccctgctcctctcagcagtgcccttgacactcctgtgttttctgcc

SEQ ID NO: 70684 - DNA, 120 bp, synthetic construct
  source 1..120: mol_type = other DNA
tttcagtcacagaagatatttacagcaaagttaattctccccttcataaactgttttaagccctgccctaatggcatttaatacatcttattacttgtcgatacctagtaagctaatccc

SEQ ID NO: 70685 - DNA, 120 bp, synthetic construct
  source 1..120: mol_type = other DNA
tttacacattaaagggggaaaaagctaaaaaagaaaagaaacaccaaatcaataaaagtctgttagttcataaaaatactcaaaaaaaagaaaacctgagtggtggtcacctatgcaagt

SEQ ID NO: 70686 - DNA, 120 bp, synthetic construct
  source 1..120: mol_type = other DNA
cagattgctcctgtacatcttgatttctctcaccaccaatagggatgctggtctcccagccttgtgtgtgggcttttgggattttgcctgctaaagcacaaagtggtgaccccgatatag

SEQ ID NO: 70687 - DNA, 120 bp, synthetic construct
  source 1..120: mol_type = other DNA
caaatttgtaaaatttatagccagatgtagggtaggggtggcctactttctgtaaagggccagatagtaaatattttaagctctcaatggaccctatggtctctgtcatagccatgggac

SEQ ID NO: 70688 - DNA, 120 bp, synthetic construct
  source 1..120: mol_type = other DNA
aacagatcagtggttggcaggagttagagatggtggcagaagagaggcaggagagagatctttctggtgatgaaacagttctgcataggaaattgtagtagtagttatatttacagacac

SEQ ID NO: 70689 - DNA, 120 bp, synthetic construct
  source 1..120: mol_type = other DNA
attcactagttgctgtgtgaatcagtatttctgggtgcagttagaaattattagagttgatgcccaagactcatctccatcagcacgggggaggcatctgctcgttttatggtcagtgac

SEQ ID NO: 70690 - DNA, 120 bp, synthetic construct
  source 1..120: mol_type = other DNA
gaataaaaatggcagtgaacattcttatataagtctttttgtggacatatgcactcgtttctcttgtgtacatgcttaggatggaatttctgaaggtaggcatagatatagctttagtag

SEQ ID NO: 70691 - DNA, 120 bp, synthetic construct
  source 1..120: mol_type = other DNA
ctagtttctccttggggccctgaagaaaggggacaggggcccctggtgccaagggcgaatagggagctggggcacccaggcctcacctggagggaccccggagcatgcagcatggctctt

SEQ ID NO: 70692 - DNA, 120 bp, synthetic construct
  source 1..120: mol_type = other DNA
acacaggacgtagagcttggaggccaagtgcctgccatgcctttacctggctgtggtcttggccaagtcctaagtggggtattggctacttgtactgtgaaggtacagaagagtaccttt

SEQ ID NO: 70693 - DNA, 120 bp, synthetic construct
  source 1..120: mol_type = other DNA
accaggagcaggtgaggaccagtgacagcccttcctaatttctgtgcccattcttgcagttgaaggagtcacttaaagaagtccagctagagagggatgaatatgctgaacatctaaaag

SEQ ID NO: 70694 - DNA, 120 bp, synthetic construct
  source 1..120: mol_type = other DNA
aaggtgaaggagacggtaacctccaccccatccaagaaggtctgggaggtgggcaccagcctctggggaggggaggtgccaggccagaggcagctccagcccgggggcaggtgaccccag

SEQ ID NO: 70695 - DNA, 120 bp, synthetic construct
  source 1..120: mol_type = other DNA
caaatattttagctgtgttgatgagttaggaaagatgagtttttggattaagcactgggtagagcaacctttgggacattgacgttgaccaacttggtggatatcaggagtaagaggagg

SEQ ID NO: 70696 - DNA, 120 bp, synthetic construct
  source 1..120: mol_type = other DNA
gaagatgggggtagcatagaggcaaagtgatggaaggagatgagttaaaggaattgagaacctaggagactgaaaggattatctaaatgaattttgaaatctcaacaagagctgtgctga

SEQ ID NO: 70697 - DNA, 120 bp, synthetic construct
  source 1..120: mol_type = other DNA
gagaattgttttgacccagaaggggagattgcagtgagctgagattgcgccattgcattccagcctgggtgatggagtaacatccaaaaaaaggtattttacataagaaattttatttta

SEQ ID NO: 70698 - DNA, 120 bp, synthetic construct
  source 1..120: mol_type = other DNA
aggtttgtagcctaggaggaataggctatgcaatctaggttaatgaagtccattctgtgatatttgcacagtggcttaattacctaagggctttgtcttcagaacatactcctgtcatta

SEQ ID NO: 70699 - DNA, 120 bp, synthetic construct
  source 1..120: mol_type = other DNA
ttttggtgggagtgtggcaaaaggtactataacagaatgctactagagagtaaactttgatacatttgtaagggcaattttgcataatatgaaaatttaaaaatatgcttccagtttcac

SEQ ID NO: 70700 - DNA, 120 bp, synthetic construct
  source 1..120: mol_type = other DNA
aagagttttaaatcctcctattgctgggaactactttctaaacatggctcctggattgagtctgtgccagccttgcacgagtacatgtgccagttttgttatatccttaagtatatgctc

SEQ ID NO: 70701 - DNA, 120 bp, synthetic construct
  source 1..120: mol_type = other DNA
gattctcccatcttggcctcccaaagcactggggttacaggcatgagacattgctcctgtccataagattttctctttattactgttttgttgttggtggtggtgttttgttttgttttt

SEQ ID NO: 70702 - DNA, 120 bp, synthetic construct
  source 1..120: mol_type = other DNA
ctcggcctcccaaagtgctgggattacaggcgtgagccaccgcgcccggcctaaaggtttaagcaagttgtgaaaagtttataaaaaattaattgtaaaagagattctgtgtgtaaacat

SEQ ID NO: 70703 - DNA, 120 bp, synthetic construct
  source 1..120: mol_type = other DNA
tgtgaatttccctaaagaggggtcttcctagataagctttgaaggaagacccagtacctacacagtaaggcacaagttactgtgaagaaatctacgtcaaactagatgaggcctatgtta

SEQ ID NO: 70704 - DNA, 120 bp, synthetic construct
  source 1..120: mol_type = other DNA
cagatgaattcttccagaggtacaaagaggtgctggtaccattccttctgaaactattccaaacaacagaaaaagagggactccaccctaactcattttatgaagccagcatcatcctga

SEQ ID NO: 70705 - DNA, 120 bp, synthetic construct
  source 1..120: mol_type = other DNA
ccatacgtacctgctggcccctagcatgtcccataagtggagaggggttggcctgtggaggcaggggtggccagaatatgtgccggaaccccatctacaggctgacacctaaacccaaat

SEQ ID NO: 70706 - DNA, 120 bp, synthetic construct
  source 1..120: mol_type = other DNA
ggttattatttttcttttctcatgatgcctttggttttggtaccaggaaaatattggcctcaatgaatgagtttgaaagtgtcagccgggcacagtgggtcacacccataatcccagcac

SEQ ID NO: 70707 - DNA, 120 bp, synthetic construct
  source 1..120: mol_type = other DNA
tggcaattgataactgatacacagttttattcagtgtaattaatgctggctgctgtaacaaacaaaatatctcagtggtttaacccaatcagagtttatttctcactcctgcaaagtctg

SEQ ID NO: 70708 - DNA, 120 bp, synthetic construct
  source 1..120: mol_type = other DNA
tgggccttacataatgaatgtcagccacataggcagaaatgatgctatctctgatcttaccctgccagggtccatgaatttggccaaggggatttattatgttttcgataaatcctatcc

SEQ ID NO: 70709 - DNA, 120 bp, synthetic construct
  source 1..120: mol_type = other DNA
gaggcatgagaattgcttgaatctgggaggtagagattgtgtgaaccaagatcgtgcaactgtactccagtctgggtgacagagtgagactctgtctcaaaaaaataaaataaaatattc

SEQ ID NO: 70710 - DNA, 120 bp, synthetic construct
  source 1..120: mol_type = other DNA
aacatggtgaaaccctgcctctactaataatgcaaaaatcagccaggcgtggtggcatgcatctgtaataccagacacttgggaggctgagacagaagaatcacttgaatccaggaggta

SEQ ID NO: 70711 - DNA, 120 bp, synthetic construct
  source 1..120: mol_type = other DNA
ataagttaggctcttaactcaaaagtgagggttaccagaatataatgacctcccactgtctcccagggttgcctgggccaactcggaacttgaaatgagttccaagtattaaaacaaaag

SEQ ID NO: 70712 - DNA, 120 bp, synthetic construct
  source 1..120: mol_type = other DNA
tttttttctttgagatggagtcttggtctgttgccaggctggagtgcagtggtgcgatctcagctcactgcaacctccgcctcccaggttcaaacgattcccctgcctcagccttccaag

SEQ ID NO: 70713 - DNA, 120 bp, synthetic construct
  source 1..120: mol_type = other DNA
tacctcttgctggctttgggttgcccatggactaagacctttttttttttttccagtttgaaattgttatttaaaaattaaaagaagtatattattttggcacatgaaaattacatgaag

SEQ ID NO: 70714 - DNA, 120 bp, synthetic construct
  source 1..120: mol_type = other DNA
ctgctcccccatctgctcctcctgctcctgcatctgctcctcctgctcccccatctgctcctcctgctcccccatctgcccctcctgctcccccatctgcccctcctgctcccgcacctg

SEQ ID NO: 70715 - DNA, 120 bp, synthetic construct
  source 1..120: mol_type = other DNA
gaacctcaaaaggaaatagagtcataagctaggtatataaatgtaatctataaaataacggttttcgtctatgattctttaaaaagaaattttaagccctaaccctgaggttctgatttc

SEQ ID NO: 70716 - DNA, 120 bp, synthetic construct
  source 1..120: mol_type = other DNA
aatctatttgcttggagatgtatagagaattagccttaaattttctactctgctacattatataccactccattcattcattcccttattcactcaatgatcaacatttgctttggctta

SEQ ID NO: 70717 - DNA, 120 bp, synthetic construct
  source 1..120: mol_type = other DNA
atcccagttgtgcgctactgaattccaactaagctcagtctggagttgcttgtgagcaaggaactcaagggagaggttggagtttgaaacataaatgagtcataattttataggtcatat

SEQ ID NO: 70718 - DNA, 120 bp, synthetic construct
  source 1..120: mol_type = other DNA
aggtcactaaacaaacaaatgcaagtcacaaaacatatttttcctaaaaacgtaaaaaaaaaaaaaacataatgcgtgcttcaattaaataactctctgtttctcgcttctgtaatatgc

SEQ ID NO: 70719 - DNA, 120 bp, synthetic construct
  source 1..120: mol_type = other DNA
ggatgctggaattgcaggcgtgagccagcgcacacacccaatttatttttatttcattttttatttttatatatatatacttttgagacggagtctcactttgtcacccaggctggagtg

SEQ ID NO: 70720 - DNA, 120 bp, synthetic construct
  source 1..120: mol_type = other DNA
catggttaaacccagtctttttttaaattcctttattattattattattattatttttttgagacggagtctctctgtcgcccaggctggagtgcagtggcgctatctcggctcactgca

SEQ ID NO: 70721 - DNA, 120 bp, synthetic construct
  source 1..120: mol_type = other DNA
tcaggaggctgaggcaggagaatcgcttgaatccaggaggcagaggttgcagtgccgagatcacaccattacactccagcctgggcaacagagcaagactccgtatcaaaaaaaaaaaac

SEQ ID NO: 70722 - DNA, 120 bp, synthetic construct
  source 1..120: mol_type = other DNA
cattcagaaagttaggaatctttgaattattagattcatagtgatattcaaaagaaagaaaacgacatcatttctgttccacgcatgttgcccacattcactgcgtaaaaggcaaaggga

SEQ ID NO: 70723 - DNA, 120 bp, synthetic construct
  source 1..120: mol_type = other DNA
ctaatcaacattttttagctaacatagtagtctaattatactatgtataattatactatgtataattatgggtactgaaatgacacctggcatatgctgtatgctgtgttatatatacat

SEQ ID NO: 70724 - DNA, 120 bp, synthetic construct
  source 1..120: mol_type = other DNA
tggcatttcagagaccttgagctgggaatcaaaagatgggaatttcagtctcggatgtgccactccttagaggtttaatatctactaaacccggcgggctccacttggtggtgtttgcta

SEQ ID NO: 70725 - DNA, 120 bp, synthetic construct
  source 1..120: mol_type = other DNA
ttctatgaataatgaacgaaacatttataatttaaaactaaaattgtcttctaagcagagatctacgtatcaataaaatgaagaaataaaatttccatactgttttcttcccaatacaag

SEQ ID NO: 70726 - DNA, 120 bp, synthetic construct
  source 1..120: mol_type = other DNA
ttacccagtctcaggtgttttgttatggcactatgaagggactaagacaaatataaaaattacccagggacttaaagggagaactgactaaactgaaatatatgccatatatattatgaa

SEQ ID NO: 70727 - DNA, 120 bp, synthetic construct
  source 1..120: mol_type = other DNA
atcacagacatgggccactgtgcccggtctagtgcgcttttttttttttttttttaaccaaacaaacgatgaagtctcaggagtaaaagttgatacacaagtaaattttattggtaatgt

SEQ ID NO: 70728 - DNA, 120 bp, synthetic construct
  source 1..120: mol_type = other DNA
atctgaaaggcatcaaaagaaaaaagctgtaacttttagtcttgatcttgatagtgacttgattaggctatctgtttaacatcaaagatgcaaattaatgctttctttgggtgagcatat

SEQ ID NO: 70729 - DNA, 120 bp, synthetic construct
  source 1..120: mol_type = other DNA
gatgatagggcagaagttggtgggcttggaggggagaggaagatcagaatgaggtccaaaatgtgtcttagtgaaatcccaggaggagatattaaaattatattagaaagtgaaagaaat

SEQ ID NO: 70730 - DNA, 120 bp, synthetic construct
  source 1..120: mol_type = other DNA
ctattctgccttctactgcatccctggttacgcctcctctggctcagtcgcacagctacctggtaggtgactggaggtgttgatcagtgcttggtgggattttgctgatgtggccccaag

SEQ ID NO: 70731 - DNA, 120 bp, synthetic construct
  source 1..120: mol_type = other DNA
gctcaaaacattgacagtacctctggatggcaactggagaatgggtttgacttggtttggttttctcccaggcttctactttccagagagattttaacaaattttttgtgagttctccac

SEQ ID NO: 70732 - DNA, 120 bp, synthetic construct
  source 1..120: mol_type = other DNA
tttctgacagttaaaagaatattggcagagaaacagccctggtgttccagcaggagccaagaggaacaggaaaacaaatggcagcatccatgagacagccacttctggtggttgccactc

SEQ ID NO: 70733 - DNA, 120 bp, synthetic construct
  source 1..120: mol_type = other DNA
gtttccccttggggccctgaagaaaggggacggcggcccctggtgccaagggcgaatagggagctggggcgcccaggcctcacctggagggaccccggagcatgcagcatggctcttttt

SEQ ID NO: 70734 - DNA, 120 bp, synthetic construct
  source 1..120: mol_type = other DNA
cggagagggtgagtccaaccacctgccccgtcccctggtagcctggcttcacagacagaggagtgagcctaaaggtcccttctgcaggatggagtgtcctgcccagaaggcagcatggcc

SEQ ID NO: 70735 - DNA, 120 bp, synthetic construct
  source 1..120: mol_type = other DNA
ccagccgcagtaaagcacgtatggagtggaagttagagcagtccatgcgggagcaggcactgctgaaagcgcagctgacacaggtgaggtgttcagagggagggatgtggaaggaagatg

SEQ ID NO: 70736 - DNA, 120 bp, synthetic construct
  source 1..120: mol_type = other DNA
gggggagctttttaaatttcacagaagaggaaagttgcctgctctggcaggtatgtgcaagatagagtgtgtttcatttgttctgttgccaagaattagtgctgtactattgtagttcct

SEQ ID NO: 70737 - DNA, 120 bp, synthetic construct
  source 1..120: mol_type = other DNA
tgaatgtcagtgtattatcaggaaacatgtctatacaatcacagagttatatttcctcacaaacttctttgtgaagagtgaaatgtgtttctgtacctctgggtttcacttacgggcata

SEQ ID NO: 70738 - DNA, 120 bp, synthetic construct
  source 1..120: mol_type = other DNA
taaaattttattctgtgtgtcttgaaaaatatagtattaaaggtattgatactgtgcaaatgctgagcatgcttggcatgagataatgtttcatttttacaaaattgtaatataactatg

SEQ ID NO: 70739 - DNA, 120 bp, synthetic construct
  source 1..120: mol_type = other DNA
aaaagaaaattcagaatctatggaacacagaacaccaaaggccagttatttacctctctgaggtaatctgtgtaaacaatttgatatatatcctttcaagttcatacttgctatgcatac

SEQ ID NO: 70740 - DNA, 120 bp, synthetic construct; identical to SEQ ID NO: 70716
  source 1..120: mol_type = other DNA

SEQ ID NO: 70741 - DNA, 120 bp, synthetic construct; identical to SEQ ID NO: 70717
  source 1..120: mol_type = other DNA

SEQ ID NO: 70742 - DNA, 120 bp, synthetic construct; identical to SEQ ID NO: 70718
  source 1..120: mol_type = other DNA

SEQ ID NO: 70743 - DNA, 120 bp, synthetic construct; identical to SEQ ID NO: 70719
  source 1..120: mol_type = other DNA

SEQ ID NO: 70744 - DNA, 120 bp, synthetic construct
  source 1..120: mol_type = other DNA
ctgcctgggcaacatggtgaaaatctgtctcttattattattattttttttttttttgaggcggagtttccttcttgttgcccaggctggagtgcagtggctgggtctccgctcgcggca

SEQ ID NO: 70745 - DNA, 120 bp, synthetic construct; identical to SEQ ID NO: 70721
  source 1..120: mol_type = other DNA

SEQ ID NO: 70746 - DNA, 120 bp, synthetic construct
  source 1..120: mol_type = other DNA
gtgaatccaattaataatggcattcagaaagttaggaatctttgaattattagattcatagtgatattcaaaagaaagaaaacgacatcatttctgttccacgcatgttgcccacattca

SEQ ID NO: 70747 - DNA, 120 bp, synthetic construct
  source 1..120: mol_type = other DNA
ctccagcctgggcgacagagctagactccatctcaaaaaaataaaatttaaaaaaagtatatgtaaagtatatgtatggccgggcacggtggctcacgcctgtaatcccagcactttggg

SEQ ID NO: 70748 - DNA, 120 bp, synthetic construct
  source 1..120: mol_type = other DNA
ttggagattcatttccgattgttgcgtttcctcttagagcattgcttggtcatcgtgttctgagtggtccattggcctccatgtcccttttggggtggatatttgctcagtgacttttga

SEQ ID NO: 70749 - DNA, 120 bp, synthetic construct
  source 1..120: mol_type = other DNA
tgcttgaaacattgtacctgaaaataatcttgccaaggtccatgaatcataggtagatccttcagctggtgatagttttaccaattttccattttccagcccatccatgcccacaggagg

SEQ ID NO: 70750 - DNA, 120 bp, synthetic construct
  source 1..120: mol_type = other DNA
aacttcgtaagggatagaagggaaattgggaatgctctgttataaggtactagcactacacatgaaataatgctatttgaaggtggacttagattgttttaaaatgtatgctataaaccc

SEQ ID NO: 70751 - DNA, 120 bp, synthetic construct
  source 1..120: mol_type = other DNA
agctactcaggaggctgaggtaggagaatggtgtgaacccaggaggcagagcttgcagtgggctgagatcccgccactgcactctagcctgggcgacagagcgagactctgtctcaaaaa

SEQ ID NO: 70752 - DNA, 120 bp, synthetic construct
  source 1..120: mol_type = other DNA
aaccttcttacaaatcgctaagacacttataaaaggagcaagaggaagggaaatcacgaatacctgaagtcggggaagattcagcgttgccacggccacgcactctttctcctggggcgg

SEQ ID NO: 70753 - DNA, 120 bp, synthetic construct
  source 1..120: mol_type = other DNA
gacctctgctcagttcattactgcaactaaacactacactcagttctgtacattctagaagcagggcaaaaaggggaggggctggaagagggacatgacgggttgttacaagaaaccact

SEQ ID NO: 70754 - DNA, 120 bp, synthetic construct
  source 1..120: mol_type = other DNA
agcacgtctgcgctgcttgccagggtcaccaccttctgcttcaggctgttcaggaagacgctgcccagacctaaaccaaggaattccaggtcaacctggtgactaatggcagcatgcaac

SEQ ID NO: 70755 - DNA, 120 bp, synthetic construct
  source 1..120: mol_type = other DNA
ctgaggttggctcactgcagccttgtcctcctaggctcaaatgatcctcccacctcagcctcctgtgttgcagggaccacatacatatcaccatgcccggctagttttttgatttttttg

SEQ ID NO: 70756 - DNA, 120 bp, synthetic construct
  source 1..120: mol_type = other DNA
tgtcctcttttatttccttgagcagtggtttgtagttctccttgaagaggtcctgcacatcccttgtaagttggattcctaggtattttattctctttgaagcaattgtgaatgggagtt

SEQ ID NO: 70757 - DNA, 120 bp, synthetic construct
  source 1..120: mol_type = other DNA
tcctggactctttttggttggtaaactattgattattgccacaatttcagagcctgttattggtctattcagagattcaacttcttcctggtttagtcttgggagagtgtatgtgtcaag

SEQ ID NO: 70758 - DNA, 120 bp, synthetic construct
  source 1..120: mol_type = other DNA
tctattaggtctgcttggtgcagggctgagttcaattcctgggtatccttgttgactttctgtctcgttgatctgtctaatgttgacagtggggtgttaaagtctcccattattaatgtg

SEQ ID NO: 70759 - DNA, 120 bp, synthetic construct; identical to SEQ ID NO: 70452
  source 1..120: mol_type = other DNA

SEQ ID NO: 70760 - DNA, 120 bp, synthetic construct
  source 1..120: mol_type = other DNA
ctcgggggtcaggggtcagggacccacttgaggaggcagtctgcccgttctcagatctccagctgcgtgctgggagaaccactgctctcttcaaagctgtcagacagggacacttaagtc

SEQ ID NO: 70761 - DNA, 120 bp, synthetic construct
  source 1..120: mol_type = other DNA
taataagcaggtaggtgcgaatgaaaatcatcatggaaggttatttttaaaactggttctatcattgcctcactttacatattacagagttgtacatactgctttgtaagataacttttc

SEQ ID NO: 70762 - DNA, 120 bp, synthetic construct
  source 1..120: mol_type = other DNA
gaccaacagccccacgaagcagccacttcagaaaagggagaggcattcaagaacttagaaaagcacctctggaaaatgctcactttaaaactttgcatgtaactgtacattttaattaca

SEQ ID NO: 70763 - DNA, 120 bp, synthetic construct
  source 1..120: mol_type = other DNA
ctggtggcctgattgtacagcctgcagaccatcagccaaatactccacttttctttataaattacccagtctcaggtattcctttatagcactgagatggactaacatagtcagttttga

SEQ ID NO: 70764 - DNA, 120 bp, synthetic construct
  source 1..120: mol_type = other DNA
ttgaaaacatactgtttcacatattctcgtatatatatattaaaaatctttttttatttattttttatttttatttttttttgagacggagtctcgctctgtcgcccaggctggagtgca

SEQ ID NO: 70765 - DNA, 120 bp, synthetic construct
  source 1..120: mol_type = other DNA
tgtgataattaggtatgatggccctaggcaactactacactctaattcagaagttcttctggattttattgtatcatgtgttggtaggaagtacctggctgtttcagttgcatgatatgt

SEQ ID NO: 70766 - DNA, 120 bp, synthetic construct
  source 1..120: mol_type = other DNA
gttagggtgaaaagtgattaacgtccattctttaatgagtttctaagtctttctgaacatgtttttattctatctattgcagtggtatagtaacattttcgtgttggttgctgtacaatg

SEQ ID NO: 70767 - DNA, 120 bp, synthetic construct
  source 1..120: mol_type = other DNA
tataagaaaacacattcacagaggaacacatagatacccaagatagaaaggattataaaaacccttaggaggagggctcatatatttattacccattcagcaacccccctccccatttct

SEQ ID NO: 70768 - DNA, 120 bp, synthetic construct
  source 1..120: mol_type = other DNA
caccataagcaatgttctcagtgatagagcaagaaaacaaaatgggttcctgtctcactgtcccaatcttggatctcagccacactgggtttagctgacggatgtcatggccatcaagac

SEQ ID NO: 70769 - DNA, 120 bp, synthetic construct
  source 1..120: mol_type = other DNA
gtcaaagaaagcaacctcctgccccagaatggaggagaataacgaagttctcagcctcttcacaacgcgctgacgtgaagtttgcatgaggtagacacgaatggcattggcggcagcacc

SEQ ID NO: 70770 - DNA, 120 bp, synthetic construct
  source 1..120: mol_type = other DNA
cttgctctgtcacccaggctggagtgcagtggcgtgatcaccgttcactgcagcctcgagctcctgagctgaagcaattttcccacctcaacctctgagtagctgagactataggtgtgt

SEQ ID NO: 70771 - DNA, 120 bp, synthetic construct
  source 1..120: mol_type = other DNA
ttggagaagttaggtttgagggcatcctctcttctgcaaactgcagcagtaatagatgagatatacaaagtaaataaaggctgggtgcggtggtcgtgcctgtaatcccagcactctggg

SEQ ID NO: 70772 - DNA, 120 bp, synthetic construct
  source 1..120: mol_type = other DNA
agtattctttttttttttttttttattatactctaagttttagggtacatgtgcacattgtgcaggttagttacatatgtatacatgtgccatgctggtgcgctgcacccactaatgtgt

SEQ ID NO: 70773 - DNA, 120 bp, synthetic construct; identical to SEQ ID NO: 65471
  source 1..120: mol_type = other DNA

SEQ ID NO: 70774 - DNA, 120 bp, synthetic construct
  source 1..120: mol_type = other DNA
cattcctcgacacatacactctcccaagactaaaccaggaagaagttgaatctctgaatagaccaataacaggctctgaaattgtggcaataatcaatagtttaccaaccaaaaagagtc

SEQ ID NO: 70775 - DNA, 120 bp, synthetic construct
  source 1..120: mol_type = other DNA
gacagagtttcaccatgttggccaggctggtctcgaactcctgacctcaagtaatctgcccgctttggcttcccagagtgctgggattacaggcatgagccactgcaaccagccattagt

SEQ ID NO: 70776 - DNA, 120 bp, synthetic construct
  source 1..120: mol_type = other DNA
atttcacacattctggtctttaacaaatggaaataaagagaactaaacaatatagtttgtgtcgatggaaagagcttgggatttgttctcagaaaatttcagttacaacagtttgttcat

SEQ ID NO: 70777 - DNA, 120 bp, synthetic construct; identical to SEQ ID NO: 70755
  source 1..120: mol_type = other DNA

SEQ ID NO: 70778 - DNA, 120 bp, synthetic construct; identical to SEQ ID NO: 70754
  source 1..120: mol_type = other DNA

SEQ ID NO: 70779 - DNA, 120 bp, synthetic construct; identical to SEQ ID NO: 70753
  source 1..120: mol_type = other DNA

SEQ ID NO: 70780 - DNA, 120 bp, synthetic construct
  source 1..120: mol_type = other DNA
ctcaaaagtcactgagcaaatatccaccccaaaagggacatggaggccaatggaccactcagaacacgatgaccaagcaatgctctaagaggaaacgcaacaatcggaaatgaatctcca

SEQ ID NO: 70781 - DNA, 120 bp, synthetic construct
  source 1..120: mol_type = other DNA
aagctgccaaacaggtttccaatgtgcttatacaattttatgctactgccagcttgacagttcttgtagctctacatctttaccaatactctgtataacacagcatttaactttaaatag

SEQ ID NO: 70782 - DNA, 120 bp, synthetic construct
  source 1..120: mol_type = other DNA
cagcctcccaaagtgcaggcattacacgcgtaaaccactgcgcccggccaaagtggtggattttttttctcagaaaatctattccattctttttccagaaaccaaatttgtacaagttaa

SEQ ID NO: 70783 - DNA, 120 bp, synthetic construct
  source 1..120: mol_type = other DNA
tcagcaatacgttagaaagatcgttcattgtgatgaagtggggtttatccctggggtacaaggatggttcaacatatgcaaatcaatcgatgtgacacatcatgtcaacagaaggataaa

SEQ ID NO: 70784 - DNA, 120 bp, synthetic construct; identical to SEQ ID NO: 70687
  source 1..120: mol_type = other DNA

SEQ ID NO: 70785 - DNA, 120 bp, synthetic construct
  source 1..120: mol_type = other DNA
ctcgaggtgtctaccttggtaaactggaggctgttttagtttgcattcccgctgacaatctgtcacgtttctgttgctctgtgtctttgttagcacttggtgttatcagtgatttttagt

SEQ ID NO: 70786 - DNA, 120 bp, synthetic construct
  source 1..120: mol_type = other DNA
aattgaattgcactgtgggacacaaagctgggtgtcgcagagaactggagaattgcttggtgcaaaagtccatacatttggtgtcagaagtgttgtaaacagaggaactgtttccttcga

SEQ ID NO: 70787 - DNA, 120 bp, synthetic construct
  source 1..120: mol_type = other DNA
cccgccatggcttcccaaagtgctgggattacaggcatgagccaccacgcccggccaatatattggtttctttatgaaaattatactggatctgttacaggtatgattgatgtattttat

SEQ ID NO: 70788 - DNA, 120 bp, synthetic construct
  source 1..120: mol_type = other DNA
ctcccaggttcaagtgattctcctgcctcatcctcccgagtagctgggattacaggtgtccgccaccgtgcctggctaattttttgtatttttagtagagacgaagtttcactatgttag

SEQ ID NO: 70789 - DNA, 120 bp, synthetic construct
  source 1..120: mol_type = other DNA
ggtgacagggtgagaccctgtctcttaaaaaaaaattcgtatttggggttagtagtagtacctacctcataggttattatgggatcagtacagtaggccagacaaagtgcgtatgctatt

SEQ ID NO: 70790 - DNA, 120 bp, synthetic construct
  source 1..120: mol_type = other DNA
ttctgcctgcttgttctagtcactgttaggagaggagttgaactaacacacaaggttggcttaccacattagtttgacatgaatctcagagatgttacccgtagctgattacttagtaac

SEQ ID NO: 70791 - DNA, 120 bp, synthetic construct
  source 1..120: mol_type = other DNA
gatactgttcttgtatgtttgcttttaggtgatttttttttttgtttttttttgtttttgagacggagtctcactccttcacccaggccggactgcagtggcactatctcagctcactgc

SEQ ID NO: 70792 - DNA, 120 bp, synthetic construct
  source 1..120: mol_type = other DNA
tttctctccttgtctttgatgttttaaaatttcattacaatgcatttggatggtcaggagtggtggcttacacctgtaataccagcactttgggaggccaaggtgggcagatctcttggg

SEQ ID NO: 70793 - DNA, 120 bp, synthetic construct
  source 1..120: mol_type = other DNA
ctaagatagtacccaatagttatttttccttctcccactctccttcctcaagcaggctccagtatctgttgtcccgttagtgcccactggttcttattatttagcttccatttataagtg

SEQ ID NO: 70794 - DNA, 120 bp, synthetic construct
  source 1..120: mol_type = other DNA
gtatcaaagtacctacagttatgggtgggtaactagactaaaaatgtacctttcttgctcagattaaagcccggcttattgactcagggcagctttaatcggtttatttggaagctctgc

SEQ ID NO: 70795 - DNA, 120 bp, synthetic construct
  source 1..120: mol_type = other DNA
aaataggtctgggaggaccctttctgacattcttgttggcataggttttagcttaaggtgttgtaaatgctgtttatcaagatgatgaagttcccatttgttgctattttctgagaattt

SEQ ID NO: 70796 - DNA, 120 bp, synthetic construct
  source 1..120: mol_type = other DNA
tggaaaaatagcctgttcagttgcttcatcatacctgttaaatgcagtaatatggcatggtacgagatggggtttcactgtgttagccaggatggtctcgatctcctgacttcatgatct

SEQ ID NO: 70797 - DNA, 120 bp, synthetic construct; identical to SEQ ID NO: 70685
  source 1..120: mol_type = other DNA

SEQ ID NO: 70798 - DNA, 120 bp, synthetic construct
  source 1..120: mol_type = other DNA
tgcctgaggcgtgtggaatcaccagaaagtgtgttcacgtagatagaggaattataagtcaacctgtgtaaacatgttaggtggagctctttcatatgaatgatgctgaatttcaccttc

SEQ ID NO: 70799 - DNA, 120 bp, synthetic construct
  source 1..120: mol_type = other DNA
attacgggcgtgagccaccgcgcctggcctctgatcatattatgacttatactgatttactcacaaacctgcttattgaacagtattgattactgactttctgatgggcattttgaacaa

SEQ ID NO: 70800 - DNA, 120 bp, synthetic construct
  source 1..120: mol_type = other DNA
ttagaccaaaaattttaaaagagataaagtatagggaggaaattccacatatcacagtgaattcagttgattcagttacacagtaacagaaccactgaactggaccagggtggacaagcc

SEQ ID NO: 70801 - DNA, 120 bp, synthetic construct
  source 1..120: mol_type = other DNA
agggtcatatggtacaactatgtgtaacttactgagaaactaccaaagttttccacagtgccatatcatttttacattcccatcaccagtgggcaggattccagggttccagtttctctg

SEQ ID NO: 70802 - DNA, 120 bp, synthetic construct
  source 1..120: mol_type = other DNA
tcccttagatagagaagttttttattttgatgaagttcaatttatctgtttctcttttgtcgtctatgcttttgatatcatatccaaaaagccatttccaaacacaaggttgatgaagat

SEQ ID NO: 70803 - DNA, 120 bp, synthetic construct
  source 1..120: mol_type = other DNA
gaggaggtttcgtgacatttcttagctgttcctaaaacacgtgaagcttcacatggttgggcttggtaagaccatccaagaggctggggctgccaatataatttgtaattttgattattt

SEQ ID NO: 70804 - DNA, 120 bp, synthetic construct
  source 1..120: mol_type = other DNA
atttcatcaggaattaattctataatatgaactcaattttgcaaaacttcaaagtacgtacaacttttaacttactagggtatacataccagtaataaattcacaacggtagacatgttt

SEQ ID NO: 70805 - DNA, 120 bp, synthetic construct
  source 1..120: mol_type = other DNA
ggcacgtagacattgtttaagcaggaataattctcgagataattttgtatgtttccttttttctttttaaggtaggtattgggtggaggagcattatatttgcaacttctcgcaaaacac

SEQ ID NO: 70806 - DNA, 120 bp, synthetic construct
  source 1..120: mol_type = other DNA
atcacgagatttgtgttttatcggtatttcacgttttttacttcttctaagtcagccagtaattcctccttctcacttaatcgttgactacaaagaccaagccattttgactctgccacc

SEQ ID NO: 70807 - DNA, 120 bp, synthetic construct
  source 1..120: mol_type = other DNA
ccataatgtttttaaaagaaggggtttgtgtttcccttcgttgtgatcacccatttttcacttcagcattttgaacttgagatttcctgtagcggttttactgagccctgcagttaccgg

SEQ ID NO: 70808 - DNA, 120 bp, synthetic construct
  source 1..120: mol_type = other DNA
gcctggaaaacaagagcgaaactccgctcaaaaaaaaaaaaaaaaaaaaaaaaaagaccgtgtttcaccatgtcgtccaggctggtctggaactcctagaacctgtagatgttacctcat

SEQ ID NO: 70809 - DNA, 120 bp, synthetic construct
  source 1..120: mol_type = other DNA
accaacatgaagaaatcccgtctctactaaaaaaaagaaaaaaactacaaaattagccggatatggtggctcatgcctgtaatcccagctactagggaggcccaggcaggagaatcacct

SEQ ID NO: 70810 - DNA, 120 bp, synthetic construct
  source 1..120: mol_type = other DNA
aggagctaacattgtgtgtaaaaggaaagaacatctgattacaaccacttttgtttcataatacaaatataaatcaatatgttattggaaatgcaggctgggaggggagggaaaatatgc

SEQ ID NO: 70811 - DNA, 120 bp, synthetic construct
  source 1..120: mol_type = other DNA
gttgcctggtttttgtttgttttttgatcataaacaaaacttaatggagcctcaaatctactaactcggtcctcctctggcaatatgcctttttctgatttctagatatcacttgatatt

SEQ ID NO: 70812 - DNA, 120 bp, synthetic construct
  source 1..120: mol_type = other DNA
caaaaaaaaaaaaaaaaagaaagaaagaaagaaaaaaaaaaagaaaagaaaaaaaaggtggggcatggtggctcatgcctgtaatcccagcactttgggaggccaaggcgggtggatcac

SEQ ID NO: 70813 - DNA, 120 bp, synthetic construct
  source 1..120: mol_type = other DNA
tcactagtgtcacttttcagtcttagcctcctggagtacaactttattagaagcccgcaaagcactagtgttaaaatgagaaatagtaaacatctgattctgttgtgttttaactccatg

SEQ ID NO: 70814 - DNA, 120 bp, synthetic construct
  source 1..120: mol_type = other DNA
ccattgtatgtcagggatcatctgtccattagaaatagtacttctgagtaaaacgaggacaaactcctttggtcttcatgtcctcagaatcactttcataatcatctcttggtttacaag

SEQ ID NO: 70815 - DNA, 120 bp, synthetic construct
  source 1..120: mol_type = other DNA
ggacggatttaattcctggctgtttgaatgatgtatcccctcatcagtgaaaccaacagagtagctcaacttaattttctctttctatggcatgccatttatacccattcaattatgcct

SEQ ID NO: 70816 - DNA, 120 bp, synthetic construct
  source 1..120: mol_type = other DNA
ctacatcctctctgcaataaccaaattagattactcaccattctccacactgccttgtgattttctttctttttttttttttttgatgaagttttattcttgttgcccaggctggagtgc

SEQ ID NO: 70817 - DNA, 120 bp, synthetic construct
  source 1..120: mol_type = other DNA
ctgtgaaccttgtttaaccacacagaacatatgaatagctacaacaagggatctaacagttaccagaatgttttcagaaaggtgacttcagaagtgccaagcttcaggaagacctggact

SEQ ID NO: 70818 - DNA, 120 bp, synthetic construct
  source 1..120: mol_type = other DNA
agtgttcacttagtgggacctgcgggtgttccccccataggaggctgctactttcccacaagaaatccattactgactaccgataaaagaacacatcgttggtttcttacaatatacaaa

SEQ ID NO: 70819 - DNA, 120 bp, synthetic construct; identical to SEQ ID NO: 70808
  source 1..120: mol_type = other DNA

SEQ ID NO: 70820 - DNA, 120 bp, synthetic construct; identical to SEQ ID NO: 70807
  source 1..120: mol_type = other DNA

SEQ ID NO: 70821 - DNA, 120 bp, synthetic construct; identical to SEQ ID NO: 70806
  source 1..120: mol_type = other DNA

SEQ ID NO: 70822 - DNA, 120 bp, synthetic construct
  source 1..120: mol_type = other DNA
tccagggggaaatacagcatttggaagggtaggaagcagaaggaatctcaggcaagggaaaggcgtgggcagagccccggaggacagaacaggttgtggtggacttggtgtccacataga

SEQ ID NO: 70823 - DNA, 120 bp, synthetic construct
  source 1..120: mol_type = other DNA
agcagatcagtgttaaaaagtctggagtcaaggggaaaaagtaaaattggaccatttccaaaatctcacaaaaagcaacaaactgacgttctaagtgcccaacatgagcaaattagaacc

SEQ ID NO: 70824 - DNA, 120 bp, synthetic construct
  source 1..120: mol_type = other DNA
agagagcttatctacacgactcagatcttgttgtcacccccattattgacaatccaaaggtgcagaaagcactctgacaagtgagttgtagactttactgagatctgaaatctgcataag

SEQ ID NO: 70825 - DNA, 120 bp, synthetic construct
  source 1..120: mol_type = other DNA
gaagaagaattgtcttgggccacacataaaatacactaacaatagctgatgaactaaaaaaccaataaaaaaaaattgcaaaaaaattcttacaatgttttaagagagtttatgaatttg

SEQ ID NO: 70826 - DNA, 120 bp, synthetic construct
  source 1..120: mol_type = other DNA
caggtttgttatataggtgaactcatgttatgggggtttgttgtatgaattatttggtcacccaggcactaagcttggtaaggaccaattgttattttttctgatcctctccctcctccc

SEQ ID NO: 70827 - DNA, 120 bp, synthetic construct
  source 1..120: mol_type = other DNA
cctgcagcaaacttttgcctgggcatccaggcgtttcgatacatcttctgaaatctaggtagaagttcccaaacctcagttcttgacttctgtgcacccgcaggctcaacaccacatgga

SEQ ID NO: 70828 - DNA, 120 bp, synthetic construct
  source 1..120: mol_type = other DNA
aatctctgcctgttacccagttccaaagttgtttccacatttttaggtatattttcagcaatgccccactctactggtaccaatttattgtattagtgctttttcacactgctgataaag

SEQ ID NO: 70829 - DNA, 120 bp, synthetic construct
  source 1..120: mol_type = other DNA
ccaggatttttatagttttatgttttacatttaaaatctttaattcatctcaagttgatttttgtatacggtgcaaagaagggatccagtttcaatcttctgcacatggctagccagtta

SEQ ID NO: 70830 - DNA, 120 bp, synthetic construct
  source 1..120: mol_type = other DNA
ctttgcctttgggtcaggtggcatttctttgcacgatgactggttttattgagtaggcactgcttcagccctacaggaagaacaaaacctctctggaacacagcagcattcctgactccc

SEQ ID NO: 70831 - DNA, 120 bp, synthetic construct
  source 1..120: mol_type = other DNA
atagtgttcagatctagaaaggacttgagaagtcccagagaggtgctgcatggtctgaaccatttgattctcacgacagaatggataaaaacaatttgaaccaggaaaccatgcagatgt

SEQ ID NO: 70832 - DNA, 120 bp, synthetic construct
  source 1..120: mol_type = other DNA
gtgagtgcctggatgttctaattctgttaagtcagtgagtgcatattctgtacaatactctcttagcccagtggcaggtttaaggagtgggagagagatttctatgtttcggaaatcaga

SEQ ID NO: 70833 - DNA, 120 bp, synthetic construct
  source 1..120: mol_type = other DNA
accgcactccagcctgggcaacagagtgagattgtctcaataaataaataagtaaataaataaataaataaatgaataaataaatgtggtctatccatgcaacggaatactataaaatta

SEQ ID NO: 70834 - DNA, 120 bp, synthetic construct
  source 1..120: mol_type = other DNA
tactgattttggacttctgatatccaaaactgtgagaaaataaatttctgttgttttaagtcaccacatttttggtaatttgctctaacagccacaggaaagtaacatacatgcctacct

SEQ ID NO: 70835 - DNA, 120 bp, synthetic construct; identical to SEQ ID NO: 70818
  source 1..120: mol_type = other DNA

SEQ ID NO: 70836 - DNA, 120 bp, synthetic construct
  source 1..120: mol_type = other DNA
ttcccaccaatttaatggaaagttttattgtctttacaatgtacactttcataaattttgcataaatttattattcacatcttaacataggtaactccttagtgtttgatcactgagcaa

SEQ ID NO: 70837 - DNA, 120 bp, synthetic construct
  source 1..120: mol_type = other DNA
attactatagtattattattattgtagcaataacttgtttttagaataaatatcctatttctcatttaacttgatcggatccgtgcatggacaattatgttgggaacatagaatgtaact

SEQ ID NO: 70838 - DNA, 120 bp, synthetic construct
  source 1..120: mol_type = other DNA
atttaccaaagacatttaccacattggcattatttgtgcatccatcaagaagtgctgaaaagcattcccctcacacactgcatgtgtcctgtgagtggatcttccattttacttgccagt

SEQ ID NO: 70839 - DNA, 120 bp, synthetic construct; identical to SEQ ID NO: 70814
  source 1..120: mol_type = other DNA

SEQ ID NO: 70840 - DNA, 120 bp, synthetic construct; identical to SEQ ID NO: 70815
  source 1..120: mol_type = other DNA

SEQ ID NO: 70841 - DNA, 120 bp, synthetic construct
  source 1..120: mol_type = other DNA
ataattttctgtagtcctggagcctctggacttcccaattacacggccaataaaccccctcattgtctgagccagtctgagctgggcagcctgactgaagtctggaacatcctaactggc

SEQ ID NO: 70842 - DNA, 120 bp, synthetic construct
  source 1..120: mol_type = other DNA
acacctgaccttaatccccctgagggcagggatagtttgtgtttatcccaaagtcctgaaacaactagtacagaacctgagacacaggaaggccccagaattgcctgccgaatagaacag

SEQ ID NO: 70843 - DNA, 120 bp, synthetic construct
  source 1..120: mol_type = other DNA
agggatgaagaagaaaataactaattttggaaaacagtattttgactggatactgtaaggcaagcttgtccaacctgcagcccaggatggctttgcatgtggcccaaaaccaattagtaa

SEQ ID NO: 70844 - DNA, 120 bp, synthetic construct
  source 1..120: mol_type = other DNA
cggaagatgcggggcaaaaagttccaggcagaggaaaaaatttccaagtttgacagagggcaaaaatttccagccacatgaaaaataatcaaacctttgacttatgttcagagctctcag

SEQ ID NO: 70845 - DNA, 120 bp, synthetic construct
  source 1..120: mol_type = other DNA
atcccaaaggggaagtctgctccacgtcatcagtgttcttgtttttaaagaccatatgtcaacatgccagattatagcaaaaggatgtcgaggaagcaatatgaaagcaagcctcagagt

SEQ ID NO: 70846 - DNA, 120 bp, synthetic construct
  source 1..120: mol_type = other DNA
caaggctgagagggaagggggcttgcccaaatcaccagacctggaatgttttgagctatgggcgtggatctcccaggaaacgtgttttatggcaccaccgcctctggtcacccaccccga

SEQ ID NO: 70847 - DNA, 120 bp, synthetic construct
  source 1..120: mol_type = other DNA
aaaaaaaagagagagagacagatgaaggttttcaactttcactaaaggcagaggagcttgttacagattcgcctccccataggaacagttagaaaaactggacaaaaatgtgccccacca

SEQ ID NO: 70848 - DNA, 120 bp, synthetic construct
  source 1..120: mol_type = other DNA
actcctgacctcaggtcatccattcacctcagcctcccaaattgctgggattacaggcatgagccaccgtgcctggccagtattttgccaaaatttaaaataaataaattttcttttttt

SEQ ID NO: 70849 - DNA, 120 bp, synthetic construct
  source 1..120: mol_type = other DNA
ctctgcatcttctcctcctgttcctgcatcttctcctcctgttcccacatcttctcctcctgcctccacatcttctcctcctgctcccatatcttctcttcctgcttgagcagcttctcc

SEQ ID NO: 70850 - DNA, 120 bp, synthetic construct
  source 1..120: mol_type = other DNA
gggctgcagctgctcgcctgtggcagcaggagctgggccctttccagcttccttttaaggtcctttacgttgagctggatctcagacttttcagattctacaagtcgaagtttttcttgt

SEQ ID NO: 70851 - DNA, 120 bp, synthetic construct
  source 1..120: mol_type = other DNA
tacatttcttttctttttcttcttttttctcctgtatgtatcccatgtaggctagagagcttcaatccctgcctcttgagggaaatcagcccattttcgggaagtgcactacacaaagct

SEQ ID NO: 70852 - DNA, 120 bp, synthetic construct
  source 1..120: mol_type = other DNA
tgatgttaaatttttggggtgggattaatggtattgtgattatataggagaacgtcctggttcctagaagatatctgcgaaagtacttaacactgaaatgctgatactggcaacttactt

SEQ ID NO: 70853 - DNA, 120 bp, synthetic construct
  source 1..120: mol_type = other DNA
aaagtgctgggattgcaggtgagaaccactgctcctggcagttttcctaatcccttctctttatcttttgtagttgcactggcttatgtggttattaactgttagtgttaattaacaggg

SEQ ID NO: 70854 - DNA, 120 bp, synthetic construct
  source 1..120: mol_type = other DNA
tcctggactcaagcgatcatacccgatcagcctcttgagtagcagagactataggctcacgctaccacacccagctaattttttatatttttagtggagatggggtttcaacatgttgcc

SEQ ID NO: 70855 - DNA, 120 bp, synthetic construct
  source 1..120: mol_type = other DNA
agcgatcctcctgcatcagacaaccaaagttttaggattacaggcataagccactgcacctggccaagatatttgtttgcaaaggatggttaatagttacaacaagaaaaataggaaggc

SEQ ID NO: 70856 - DNA, 120 bp, synthetic construct
  source 1..120: mol_type = other DNA
cacaaaaccaaatcaaagttcctggtcagaaaggtttgattgccattgccagtaatatttttcttcattaaatgatctctaatgtccctttaaatacacagactttcctgtggctatctt

SEQ ID NO: 70857 - DNA, 120 bp, synthetic construct
  source 1..120: mol_type = other DNA
aaaatttcatagttttaagaaagttaacgaatttgtatgggactgcattcaaagctgtcttgggccacatgtggcctgcaggccacaggttggatgaacttggcctaaaagcaaagaggg

SEQ ID NO: 70858 - DNA, 120 bp, synthetic construct
  source 1..120: mol_type = other DNA
tttttcccagtcaatgccctcactttatcagtgggcaccctgtgaggctgggagttatatttgccttgtaattcagccaatcacaggataaagtcttgcatttgattttcagcaatttca

SEQ ID NO: 70859 - DNA, 120 bp, synthetic construct
  source 1..120: mol_type = other DNA
gtgacatggaaaaattgaaggatgacaaatgtgggggattttattgccagacggaagtggctctcagcggggtggatggggagctggagaggagttgcagtaggaagatgatcttcctct

SEQ ID NO: 70860 - DNA, 120 bp, synthetic construct
  source 1..120: mol_type = other DNA
ttcttttggcacttgaaaaatattgtgccacttcctacttgcccccatggctttagataagaaattcactgtcattccaattcatgtgcccctaaggataacaagtcatgtttctgtgcc

SEQ ID NO: 70861 - DNA, 120 bp, synthetic construct
  source 1..120: mol_type = other DNA
gcagagctattttagtttgctttttaaaaaaatatcattccactggggctcctactggtttctgatggagcttccccaggatcagttgtctgtatctctaagtgaatgaatggagactcc

SEQ ID NO: 70862 - DNA, 120 bp, synthetic construct
  source 1..120: mol_type = other DNA
aaggtaaagagattgagaccatcctggctaacatggtgaatacccgtctctactaaaactacaacaaaattagccaggtgtggtggcaggcgcctgtagtctcagctacttgggaggctg

SEQ ID NO: 70863 - DNA, 120 bp, synthetic construct
  source 1..120: mol_type = other DNA
aagagtcacttgaacctggaggaggttgcagtgagtcaagattgtgccactgcactctagcctggctgacaaagagagaccctatctcaaaaaaaaaaaaaaaaaaaaaaggcatcgata

SEQ ID NO: 70864 - DNA, 120 bp, synthetic construct
  source 1..120: mol_type = other DNA
ggtggatcacttgaggtcaggacttcgacaccagcctgaccaacatggagaaaccctgtctgtactaaaaatacaaaatttgttgggcgtggtggcgcatgcctgtaatcccagctactg

SEQ ID NO: 70865 - DNA, 120 bp, synthetic construct
  source 1..120: mol_type = other DNA
caagagtgtaaaaaacaagtctgatacaaaatgataccatttttgaaactccggtgggctcgtcatatcctaaggtgaaagttataaagttgaagatcaaaagctgactggcctgaaact

SEQ ID NO: 70866 - DNA, 120 bp, synthetic construct
  source 1..120: mol_type = other DNA
cgcctcgacccatcaggcgcgcagggcccgctctcgaaactcgcgcgggctctcgcagtcagccgcgcggcctttagccgcgaaaacagcgtggcgcacggtggcgccgccgcagccgtg

SEQ ID NO: 70867 - DNA, 120 bp, synthetic construct
  source 1..120: mol_type = other DNA
ggataaagcctacttgatcacggtggattagctttttgatgtgctgctggattcagtttgcaaatatatatatagttttagagacagagtcttactctgtcacccaggctggagtgcagt

SEQ ID NO: 70868 - DNA, 120 bp, synthetic construct
  source 1..120: mol_type = other DNA
aatccaacgcctggatttgttggtcttttgtatggtttttcgtgtctcagtctctttcagttcagctctgattttggttgtttcttgtcttctgctaactttggggttagtttgctcttg

SEQ ID NO: 70869 - DNA, 120 bp, synthetic construct
  source 1..120: mol_type = other DNA
atgtttcttttttttcttttcttttcttttcttttttttttttttgagacgtagtctcgctctgttgcctaggctggagtgcagtggcgcaatctcggcttactgcaagctctgcctccc

SEQ ID NO: 70870 - DNA, 120 bp, synthetic construct
  source 1..120: mol_type = other DNA
tagtccccaaagtattcagtaaatatcaaatgaaggtgtgaaagttaaagatttcaattttttactagttaatttgcagtgctctattattttgcttaataagcaattttatgctagaaa

SEQ ID NO: 70871 - DNA, 120 bp, synthetic construct
  source 1..120: mol_type = other DNA
aggcggagggtgcagtaagccgagatcgcgccactgcactccagcctcggtgatgaagcgagacaccatgtaaaaaacaaacaaacaaacaaataaaatatatttaggaaaattattaat

SEQ ID NO: 70872 - DNA, 120 bp, synthetic construct
  source 1..120: mol_type = other DNA
acaagccaaaggttatggaacaaaataaaacatgaagaaagagaaatagaaacacaatattactatatacaatatagtaatgtattttaaaatatgaaaaacgctagcaaaacagcaata

SEQ ID NO: 70873 - DNA, 120 bp, synthetic construct
  source 1..120: mol_type = other DNA
ttgacattgggttgacattttcttaagacttgccataaacagaggatatcaagtttctcaaggtcagttctagaggaaaaaaaaattctttataaaaatttagcctcatgtgtaacagtt

SEQ ID NO: 70874 - DNA, 120 bp, synthetic construct
  source 1..120: mol_type = other DNA
actttttttttttttttttgagacggagtctcgctctgtagcccaggctggagtgcagtgtcaggatctcggctcactgcaaactccaccttctgggttcacaccatcctcctgcctcag

SEQ ID NO: 70875 - DNA, 120 bp, synthetic construct
  source 1..120: mol_type = other DNA
ataaaaattcagatattgctcaacgaggaagcatattttcaaagcaacagacctgaaaactagtattttatttgatattttaagtgcttatttcattttctggttaaagatgtttgtgga

SEQ ID NO: 70876 - DNA, 120 bp, synthetic construct
  source 1..120: mol_type = other DNA
ctcaggttcatgccattctcctgcctcagcctcccgggtagctgggactacaggcgcccgccaccacgccctgctgatttttcgtatttttagtagacacggggtttcaccgtgttagcc

SEQ ID NO: 70877 - DNA, 120 bp, synthetic construct
  source 1..120: mol_type = other DNA
aaacaggaggtttagaaaaagctccaggacacactgctgatacatctaactcaggatcagggcattaaagaaagcatcacactctccctcaatctctctattctgtctcttgattgaatc

SEQ ID NO: 70878 - DNA, 120 bp, synthetic construct
  source 1..120: mol_type = other DNA
ttgaaggctgtcactcctctgggtattataaattttagcctcggtcaaatcagatcaccaggaggctacaaagttgaactatattgccttagtttccaacagagtttctttccttgaatt

SEQ ID NO: 70879 - DNA, 120 bp, synthetic construct
  source 1..120: mol_type = other DNA
cagagcactttagggaaatatggtgtgagacagaaaagaggcatttttgagtgatgaaaatactaatcatggctaacacttacatagcatttatcgtatgtcaagcatttacgtgtatta

SEQ ID NO: 70880 - DNA, 120 bp, synthetic construct
  source 1..120: mol_type = other DNA
ttgtgcactgtacaacctgttgacactgtcacagttgccacttgatcattgcagataaaggaggaagtagcaattctggaatgggtggcttatctcttggctttataactggatatcttc

SEQ ID NO: 70881 - DNA, 120 bp, synthetic construct
  source 1..120: mol_type = other DNA
tgcagtgagcggagatcgtgctactgcacttcagcctgggcaacagagcgagattctgtctcaaaaaaaaaaaaaaaagaggaaaagaaaattggcatcttgaaacaaaagaaagtgtct

SEQ ID NO: 70882 - DNA, 120 bp, synthetic construct
  source 1..120: mol_type = other DNA
gtattgcttcttctggtgttcacagcaacctcttgaggtaggcactattattatccaccaccacccgccccgttttttgagacagagtctcactctgttgcccaggctggagtgcagtgg

SEQ ID NO: 70883 - DNA, 120 bp, synthetic construct
  source 1..120: mol_type = other DNA
aattacaggtgcccagcatcatgcccagctaatttctgtatttttaggagagacagggtttcaccatgtgggccaggctagtctccaactcctgacttccggcgatccacctgcctcggc

SEQ ID NO: 70884 - DNA, 120 bp, synthetic construct
  source 1..120: mol_type = other DNA
tatagtcttcactgtctaggctggtttgtacctgttcttcttgggaaggctttccagttatttgaaagaacttgagtgttgtgatctaagctgtatctgttttagagggcacccaaaacc

SEQ ID NO: 70885 - DNA, 120 bp, synthetic construct
  source 1..120: mol_type = other DNA
ctatcctcctgtggctgagctagtattcaagatgcaggataaagtcctccccactcttccctctcctcttctcaggtggaaggaaggggtctcttttggtgccataagatgtgcagcctg

SEQ ID NO: 70886 - DNA, 120 bp, synthetic construct
  source 1..120: mol_type = other DNA
agctaacatcatacttaaaggtgaaagactgaaagctttcccccaagaggaactaacaggatatctgctgtcactatttttattcaatattatactggaggttctacctagggtaattag

SEQ ID NO: 70887 - DNA, 120 bp, synthetic construct
  source 1..120: mol_type = other DNA
atacttaaaggtgaaagactgaaagctttcccccaagaggaactaacaggatatctgctgtcactatttttattcaatattatactggaggttctacctagggtaattaggcaaaaaaaa

SEQ ID NO: 70888 - DNA, 120 bp, synthetic construct
  source 1..120: mol_type = other DNA
atttcaggaatctagaaggcaacttattctcataaaattagcctggaaagttaccaaaacctttctcccccttgctagtccaaaagctgaccattttggggccaagaaaatggctgccaa

SEQ ID NO: 70889 - DNA, 120 bp, synthetic construct
  source 1..120: mol_type = other DNA
gattaggttcaaaatggcaaagggtatgtttggggtgctacagaccagatagagaagggccaggaagaggtggtaacaggtaagaatggccatggagtaaggaatggaggttgcaaaagt

SEQ ID NO: 70890 - DNA, 120 bp, synthetic construct
  source 1..120: mol_type = other DNA
ttacttttccctatgcttttttcaagcagaaggagttttgccttgtacccaccacagcttgtaatatactcagtctcacctgaagtctcataggcttacctaaggctcttgacatagttc

SEQ ID NO: 70891 - DNA, 120 bp, synthetic construct
  source 1..120: mol_type = other DNA
atgagacgagaaaaatattgctcagagaagttaaataactcattcaaggctggtcacagaaccaagatatgaatccaagcctgtctgactctagagctgtgtgcttcaactactacccca

SEQ ID NO: 70892 - DNA, 120 bp, synthetic construct
  source 1..120: mol_type = other DNA
cactgcataccacacagctgtctggcagatggcagtggtgctgggatggggctgtggagtggcaggcttggtgtgctggcagagcaagtggatggagaagttggaaatgctgtagggtgg

SEQ ID NO: 70893 - DNA, 120 bp, synthetic construct
  source 1..120: mol_type = other DNA
tccagattttccaggcccaatccctcagaactggtctcctgttacttaccataagagcagctgttgaaggttacctaggagggaaagagtaaggaagaaaactaccccaatttcactttc

SEQ ID NO: 70894 - DNA, 120 bp, synthetic construct
  source 1..120: mol_type = other DNA
ctcaaccctgcccctgagcacagttccctacctggatctaaagatgaggtgaggggatggtgagctgaacccctttcactggcctacagtaagtcttggcctgcttttcttaaccctcat

SEQ ID NO: 70895 - DNA, 120 bp, synthetic construct
  source 1..120: mol_type = other DNA
aagtgaaggagaaataaaatactttatagacaagcaaatgctgagagattttgtcaccaccaggcctgccctaaaagagctcctgaaggaagcgctaaacatggaaaggaacaaccagta

SEQ ID NO: 70896 - DNA, 120 bp, synthetic construct
  source 1..120: mol_type = other DNA
gtgtcaattttggatctttcctgctttctcttgtaggcatttagtgctataaatttccctctacacactgctttgaatgcgtcccagagattctggtatgtggtgtctttgttctcgttg

SEQ ID NO: 70897 - DNA, 120 bp, synthetic construct
  source 1..120: mol_type = other DNA
catgcctgtaatctcagtgctttgggaaactgaggcaggaagattgcttgaggccaggaattcaagaacactctgggccacatagtgagacctttttaaatttttttctctacaaaaagt

SEQ ID NO: 70898 - DNA, 120 bp, synthetic construct
  source 1..120: mol_type = other DNA
agccagaggttaggagaaagagaggcaaataggatttatgggatatttgcctttcctaagaactgtcctctgctcatgatgtcaacctaggttcaaggtacagaggccaaataacaggga

SEQ ID NO: 70899 - DNA, 120 bp, synthetic construct
  source 1..120: mol_type = other DNA
aggaaaccctctgcctggcaaccgccccgtctgagaagtgaggagcccctctgcctggcaaccgccccgtctgagaagtgaggagcgtctccgcccggcagccgccccgtccgggaggga

SEQ ID NO: 70900 - DNA, 120 bp, synthetic construct
  source 1..120: mol_type = other DNA
cttacttttctagttcttttaattatgatgttagggtgtcaattttggatctttcctgctttctcttgtggacatttagtgctacaaatttccctctacacactgctttcaatgcgtccc

SEQ ID NO: 70901 - DNA, 120 bp, synthetic construct
  source 1..120: mol_type = other DNA
tcagcatttgcttatctgtaaagtattttatttctccttcacttatgaagcttagtttggctggatatgaaattctgggttgaaaattcttttctttaagaatgttgaatattggccccc

SEQ ID NO: 70902 - DNA, 120 bp, synthetic construct
  source 1..120: mol_type = other DNA
acttttggtctttgatgatggtgatgtacagatgggttttcggtgtagatgtcctttctggttgttagttttccttctaacagacaggaccctcagctgcaggtctgttggaataccctg

SEQ ID NO: 70903 - DNA, 120 bp, synthetic construct
  source 1..120: mol_type = other DNA
catcattttttatggctgcatagtattccatggtgtatatgtgccacatttgcttaatccagtctatcattgttggacatttgggttggttccaagtctttgctattgtgaatagtgccg

SEQ ID NO: 70904 - DNA, 120 bp, synthetic construct
  source 1..120: mol_type = other DNA
ttccttccctctctccctccttctttccttccctctctccctccttccctccttacctccctccttccttcctttcctcctttcttttcttccttttctcttcttctctttctctctccc

SEQ ID NO: 70905 - DNA, 120 bp, synthetic construct
  source 1..120: mol_type = other DNA
tattaattgattcttttaaatttattcttctctctttctttttctttctttctctctccctctttctctctccctctttctctctctccctctttctctctctccctctttctctctctc

SEQ ID NO: 70906 - DNA, 120 bp, synthetic construct
  source 1..120: mol_type = other DNA
gctggtctagaactcctgggctcaagcgatccactggccttggcctcccaaagtgctatgattacaggtcttatgttcttaaaatttttctttgacatggtataggatagtctagtaact

SEQ ID NO: 70907 - DNA, 120 bp, synthetic construct
  source 1..120: mol_type = other DNA
tgtgtaatatatttgaaaagtttttaaaatgttttttgccacagcccgcagctgtgtataatgctattcgcttaacagtggaaaacatggcaatgacctgaatctccctggctcccggga

SEQ ID NO: 70908 - DNA, 120 bp, synthetic construct
  source 1..120: mol_type = other DNA
taggcactgctactgctccaccaggagctggcagaggacaggaaggtgggactgtcaatgtctttctttccctcatgctcctccactagggaaggcaggttaaggatactgctgggatgt

SEQ ID NO: 70909 - DNA, 120 bp, synthetic construct
  source 1..120: mol_type = other DNA
gtcccagccctgcaagtccagtccttgggggtctaggaaggaagaagcccctggctgtttggcctcaggctggtgcctggccctctctggctctgagttcctgggaaagtcagcacccaa

SEQ ID NO: 70910 - DNA, 120 bp, synthetic construct
  source 1..120: mol_type = other DNA
tcagtgggtccagcctgctgagaggattatcacagacttcaggggtctgtgcagccttgggggactaggggaggtcatctcttccagcctcctgtcctcaaccccagaaccccggtatga

SEQ ID NO: 70911 - DNA, 120 bp, synthetic construct
  source 1..120: mol_type = other DNA
tggctgggtaggcttccagctcaggagtctgattggaaggatgggaccgtcctgtcacagaggcaggtctgagtagtccaggcccagttttaccctccagcagggcccctttcattcatt

SEQ ID NO: 70912 - DNA, 120 bp, synthetic construct
  source 1..120: mol_type = other DNA
ttttgtatctttagtagagacagggttttgaaatggagtttcgctgttgtggcccaggctagagtgcaatgttgtgatctcaactcattgcaacctctgcctcccagttcaagcaatttt

SEQ ID NO: 70913 - DNA, 120 bp, synthetic construct
  source 1..120: mol_type = other DNA
acccggctaattttttgtagttttagtagagatggggtttcactgtgttagccagcgtggtcttgatctcctgacctcgtgatccgcccacctcaggctttcaaagtgttgagattacag

SEQ ID NO: 70914 - DNA, 120 bp, synthetic construct; identical to SEQ ID NO: 70913
  source 1..120: mol_type = other DNA

SEQ ID NO: 70915 - DNA, 120 bp, synthetic construct
  source 1..120: mol_type = other DNA
gaagaagcccctggctgtttggcctcaggctggtgcctggccctctctggctctgagttcctgggaaagtcagcacccaaggcatgccctcaagtttagcaccttgacaagaagggcggg

SEQ ID NO: 70916 - DNA, 120 bp, synthetic construct
  source 1..120: mol_type = other DNA
agaggatgaaactcagcactgccactgtggccttcacatcgcctgactctcagggacccatgcatgggacagggggtgtcactgtgggcccagccacctccctgttgccctattaacttc

SEQ ID NO: 70917 - DNA, 120 bp, synthetic construct
  source 1..120: mol_type = other DNA
tggtgaataaatgaatgaatgattggaacgaaccccctaaatggtgatttcctgaggcccttctccagctggcccaggtggaaccagttccacgtttcacaggaaagccaggtgtgagga

SEQ ID NO: 70918 - DNA, 120 bp, synthetic construct
  source 1..120: mol_type = other DNA
gtctctgcatccaatgataggtagaaaatgaacgtggggatgatagcactggaaaggagtcaaggaggaggtgccttcccaaggatgtggagggtttttccagaatggaacttgactggg

SEQ ID NO: 70919 - DNA, 120 bp, synthetic construct
  source 1..120: mol_type = other DNA
tactccagtcagaaagaaaaggacattaataagcaatcaaatcatctgaaggtacaaaactaactggtagtagtaagcgcacagaaaaacacagaatggtacgacactgtaattgtggtg

SEQ ID NO: 70920 - DNA, 120 bp, synthetic construct
  source 1..120: mol_type = other DNA
gaatcttctgcctctcccgagtagctgggactacaggcacacgccaccatgcgtgactaattttttatttttagtagagatggggtttcaccatattgaccaggctggtcttgaactcct

SEQ ID NO: 70921 - DNA, 120 bp, synthetic construct
  source 1..120: mol_type = other DNA
caaagtgtagggcttacaggcgtgagagcctgctggggtttttgattgacattgcattgaaactggaaatcagttaggaggcaactgacattttaataatgagccatgaacatggtatat

SEQ ID NO: 70922 - DNA, 120 bp, synthetic construct
  source 1..120: mol_type = other DNA
ttacccctagaataatatctatgaaggtagggatttttatctgttccttctgtgcctacagagtgttgaggagtatggtgtctggcacgttgtaggtgcacagtgacagctgaattaata

SEQ ID NO: 70923 - DNA, 120 bp, synthetic construct
  source 1..120: mol_type = other DNA
cgggaggctgaggcaggagaatggcttgaacccaggaggcagaggttgcagtgagccaagatggtgccactgcactccggcctgggtgacagagtgaggctccacatcacaacaaacaaa

SEQ ID NO: 70924 - DNA, 120 bp, synthetic construct
  source 1..120: mol_type = other DNA
atctgaaattcttttttttattttttattttgagatggagtctcactctatcacccaagctggagtacagtggtgcaatcttggctcactggaacctctgctgcccaggttcaagcaatt

SEQ ID NO: 70925 - DNA, 120 bp, synthetic construct
  source 1..120: mol_type = other DNA
caatcacgttttaaattttgtaattttgataagttttagatccatcttgaaaagataaattttctgtttgtctttaaaatattacctacaatatgcctgtttttatacagttaatggtgc

SEQ ID NO: 70926 - DNA, 120 bp, synthetic construct
  source 1..120: mol_type = other DNA
aatattcactgcttcatcatagacattctttttttttttttttaattttcgagacagggccttgttctgtcacccaggctggagtgcagtagcgtgatcacagctcactgcagcctcaac

SEQ ID NO: 70927 - DNA, 120 bp, synthetic construct
  source 1..120: mol_type = other DNA
agaacaccacttactgagtattgcattttcttctataaattcttcagcatacactgagaatacaccatatggactatttttacgcttttaattttgggttttttttattttggctaagga

SEQ ID NO: 70928 - DNA, 120 bp, synthetic construct
  source 1..120: mol_type = other DNA
cagttctggaacgtctagaagatactaaggacaacagttcggtaaggaaagaaaccaagctattttctcttttcctcatgaacattatatttagaaattaaatgttaaatgataatatta

SEQ ID NO: 70929 - DNA, 120 bp, synthetic construct
  source 1..120: mol_type = other DNA
tctagctttgagtgaaccccagctggctgttgaccttgtgtaagtcacttttcttggggtctcaagttctccactgtgggatgggcagcagcagctcagaaatggtaaatccttcatgaa

SEQ ID NO: 70930 - DNA, 120 bp, synthetic construct
  source 1..120: mol_type = other DNA
ggagcaccataccagagccatttcttgtgtcaatgtcatggtgacagaactatgtccttcatctctccttgagatattcctccaccacaggtcaggcagcttttttttttttttttttcc

SEQ ID NO: 70931 - DNA, 120 bp, synthetic construct
  source 1..120: mol_type = other DNA
atgtcaccatagtgatcttgtcctgtgtcccacgccaagtcaacctcccatggcggggctgctccatgacctcatagaggtacctggcactgttgagactcttgatgaagagctggtcag

SEQ ID NO: 70932 - DNA, 120 bp, synthetic construct
  source 1..120: mol_type = other DNA
gagatcagaagggaccagctggaggtgaggagctggaggtggtgagcggggtgtggaccaggtagagggccttcctcccagcctccatgccgggaacacatgtgacttgggctgtacctg

SEQ ID NO: 70933 - DNA, 120 bp, synthetic construct
  source 1..120: mol_type = other DNA
aaatgagcagtggtatctggggaaataagtggagcaagatcaaggctgttctggctgcttagggccacagtgggcccctctgagacccctctgcattcccttgtgagtcctcatgacctc

SEQ ID NO: 70934 - DNA, 120 bp, synthetic construct
  source 1..120: mol_type = other DNA
agatcacaccactgcactccagcctgggcaacagagcgagagactctgtctcaaaataaaataaaatatcccctttcttcctcacaactcctctgggaaccagaacttatggtccccatt

SEQ ID NO: 70935 - DNA, 120 bp, synthetic construct
  source 1..120: mol_type = other DNA
aaccccagcttctggggcgcgtcctccccagtcagcagaagccactgaaggttccgcaagagggctgacttgggctgtctctgacatggggcaccggggggctttggtggtctaggatgt

SEQ ID NO: 70936 - DNA, 120 bp, synthetic construct
  source 1..120: mol_type = other DNA
ggcctggatcacaaaggctgatggccccttttgcctctggcagagtccgtccagccactcagcagccagagcctcagagccagcaggcaccgacccccagctcctgctctaccatgtggt

SEQ ID NO: 70937 - DNA, 120 bp, synthetic construct
  source 1..120: mol_type = other DNA
gatccctgtcagcccttgaaaatggcagagcccaccccagcccccttttcaagctcccttgcttcggcaaggacctcctgagcctggcgctctccctcctgagaggtgcagatggtactc

SEQ ID NO: 70938 - DNA, 120 bp, synthetic construct
  source 1..120: mol_type = other DNA
tcgagaccagcctgggccacatagtgagaccttgtctccacacaaaaattttaaaaatagctgggcttggtggtggcatgtgcctgtagtcctagctcctcgagaggctgacgttggagg

SEQ ID NO: 70939 - DNA, 120 bp, synthetic construct
  source 1..120: mol_type = other DNA
tagggaaacaggcctgccacagctggaatgatattatgtggacaactgaacatcagggctttgtcaacaggcagttgtaagtctctaaaaccatgtttgctttgttaaaggaaacattcc

SEQ ID NO: 70940 - DNA, 120 bp, synthetic construct
  source 1..120: mol_type = other DNA
agagaagaagtgaccttcatgggtcctttgactcccacgtttataaagatgctactggagttccacgaggggtaccagataaatttaaggcccgaaatcaaacagcttcaggatttgaat

SEQ ID NO: 70941 - DNA, 120 bp, synthetic construct
  source 1..120: mol_type = other DNA
taagaacccctgctccaccccgtttggtgtgctcttgcaatcatgactaatgcaagcagcatacttgcagaagcaaattgtcttgctgagaaaacttttttgcctgagtgctgcttcttc

SEQ ID NO: 70942 - DNA, 120 bp, synthetic construct
  source 1..120: mol_type = other DNA
cataatcattagattttccaaggtcaaaatgaaaggcaaaatgttaaaggcggctagaaagaaagggcaggttgcctacaaatggaaaaccccatcaagctaacagcagacctctcagca

SEQ ID NO: 70943 - DNA, 120 bp, synthetic construct
  source 1..120: mol_type = other DNA
ggctgatgtcatctgaactgttcggaattataaactcctctaaacatgtttcaaagccagaacttgtaggagttgttctgatacacggattaaaagagggatgacaaagtgtctgtcccc

SEQ ID NO: 70944 - DNA, 120 bp, synthetic construct
  source 1..120: mol_type = other DNA
tgctaagggaggctgaggttgaccgccggggctgctctgtggcaaagtgatcacagcagggtggctggcagagactgctctgggaaatgcccactcacggtctcctctccgccctgtttc

SEQ ID NO: 70945 - DNA, 120 bp, synthetic construct
  source 1..120: mol_type = other DNA
aaaaaatacatccagtgcactttagattagtgcactttacacattttatacatgtatttttaatgtcaatttttaaaaaatctggtatggtatatacccccacaaccccccccccccaaa

SEQ ID NO: 70946 - DNA, 120 bp, synthetic construct
  source 1..120: mol_type = other DNA
ggatatagaaagtcagagcatggttttgagttttggagacaacaagagaaaagagggagggatttggacaactatggagaggactgggctgtggagagaaatgtttagagatttggaaga

SEQ ID NO: 70947 - DNA, 120 bp, synthetic construct
  source 1..120: mol_type = other DNA
ttattgcaatttgaaaatatagccaatgattccacttttcttctccagtaagtttggacattctgatctacttggtgttttattacagaactgctagtgtgcctgagtcttacattgtga

SEQ ID NO: 70948 - DNA, 120 bp, synthetic construct
  source 1..120: mol_type = other DNA
tatgtatggcatatagtatatatacacactactatatatactaagtatggcatatagtatatatacacactactatatatactaagtatggcatatagtatatatacacactactgtata

SEQ ID NO: 70949 - DNA, 120 bp, synthetic construct
  source 1..120: mol_type = other DNA
ccacaactttaattcctgttaacttttttagtttgtgttcttttaataaacacacttacatagttacaattttgtaagaataaaaaccgattacctcatgccaagcatgccgagaatttg

SEQ ID NO: 70950 - DNA, 120 bp, synthetic construct
  source 1..120: mol_type = other DNA
acactctggccctgacagccaactggttgagaagcctgatctagctgtggcagggaagacagataccagtgcccaagggcactgacttccatccaccccaggtgtcttccgttctgtccc

SEQ ID NO: 70951 - DNA, 120 bp, synthetic construct
  source 1..120: mol_type = other DNA
gctggaagggaaaggggagggagatggagggagaagctggagcttcataggtagtgcctggggactgcggcggccctccctaccccacacacgctggcctgtctcatggaacccaggcaa

SEQ ID NO: 70952 - DNA, 120 bp, synthetic construct
  source 1..120: mol_type = other DNA
tcattactggacgccagttcctttgcctgactttcagtgatttctaccttaccctggggttttatgttgcttgtctcaacactgtcacttctcattcctccacaagttgaattgctcact

SEQ ID NO: 70953 - DNA, 120 bp, synthetic construct
  source 1..120: mol_type = other DNA
atggttcctcaaggaggccagggtaccatcaacatggccgagctccacctgggcaccaacctcaacatctgcagtagggatgaggcccactaccacgtcacagacagccctcactgggga

SEQ ID NO: 70954 - DNA, 120 bp, synthetic construct
  source 1..120: mol_type = other DNA
agaaatatggtggagctgtgacatggaaacagaaggtgtcctccactgccactgaggcacgtgccatggccccataggtcacctctgcagcctgtacgtcatcctgggtgaagccctgac

SEQ ID NO: 70955 - DNA, 120 bp, synthetic construct
  source 1..120: mol_type = other DNA
ggaaagatcacttgagcctaggagttcaagactggcctgagccacacaatgagaccccatctctattttagaaggaaaaaaaaaacaaattaacaaatttggggcagccatctctttcca

SEQ ID NO: 70956 - DNA, 120 bp, synthetic construct
  source 1..120: mol_type = other DNA
aggctgtgctttctggtgccaggaccaaggaaatgctgggatctgggcagtgctcagaggcagcaccgtatggcagaaccatgagggtgcaccagcacggacccctttctgcaacccacc

SEQ ID NO: 70957 - DNA, 120 bp, synthetic construct
  source 1..120: mol_type = other DNA
gatgttaccactgactccacagaaatacaaacaaccatggagattactgcaaacacctctaggcacacaaactagaaaacctagaagagatggatgaattccaggacagacatacatgct

SEQ ID NO: 70958 - DNA, 120 bp, synthetic construct
  source 1..120: mol_type = other DNA
gaagctaagggaatcaagtaagccccgcagaccatatgcgctggggtggcccagcagtctcagcaggcacagcacagcttggtgccagcaagagacagaccagggaactgcaggtggtgg

SEQ ID NO: 70959 - DNA, 120 bp, synthetic construct
  source 1..120: mol_type = other DNA
agaaactccagaattactcctattcttttttttctttttttgtttttttttttgagaccgagtttcgctcctgttgcccaggctggaatgcagtggcacgatctcagctcatcacaacct

SEQ ID NO: 70960 - DNA, 120 bp, synthetic construct
  source 1..120: mol_type = other DNA
ctcctaagtatttggtaatacaggcatgcaccaccacaccgagctaatttttgtatttttagtagagatggggtttcaccatgttggccaagctcgtctcaaactcctgaccttaagtga

SEQ ID NO: 70961 - DNA, 120 bp, synthetic construct
  source 1..120: mol_type = other DNA
tggtggcatgcgcctgtaatctcagctactcgggaggctgaggcaggagaattgcttgaacccaggaggtggaggttgcagtgagatcacgccattgcactccagcctgggcgacaagaa

SEQ ID NO: 70962 - DNA, 120 bp, synthetic construct; identical to SEQ ID NO: 70925
  source 1..120: mol_type = other DNA

SEQ ID NO: 70963 - DNA, 120 bp, synthetic construct
  source 1..120: mol_type = other DNA
gtgtgtgtgtgtaagtttttgttgtcagaggacttagaattttattttatatggtaattctgtcaatttactttattctccaccccacatttattgaacagcaaattatgaaagtaatgt

SEQ ID NO: 70964 - DNA, 120 bp, synthetic construct
  source 1..120: mol_type = other DNA
acagctgatacagaagcctgaaagaaaaagcgggcagagcacctggacaggactcttacctgctgcatccagggtacaatgcgcctttccagaacacagcagcgacccgggatagaggga

SEQ ID NO: 70965 - DNA, 120 bp, synthetic construct
  source 1..120: mol_type = other DNA
tctggatacttgcttgttatccttgagcattttcctgcctcattaatgtatgtgtagccaccacaataataatcatagctaataatggctacagctgagggctttcctgaaccaggcagt

SEQ ID NO: 70966 - DNA, 120 bp, synthetic construct
  source 1..120: mol_type = other DNA
tgcagtctggggcatgactgagataggcatacgtggtgaggaactggagggcaactgggtaaagagctgcagtgtgggcagaggtgtagtgtgggtcacatcgcggatagccactggcca

SEQ ID NO: 70967 - DNA, 120 bp, synthetic construct
  source 1..120: mol_type = other DNA
cacctatgtaacctgcagccccccgccaaccagttaaggctcccctcttagacttagaagtctatggccaatggcatccggctacctgccctccctgccttccccagggttcctcagagg

SEQ ID NO: 70968 - DNA, 120 bp, synthetic construct
  source 1..120: mol_type = other DNA
ggacatgcgcggcctgtggacagccagcccccgccatccctcccgcccttctggccaagcatggcggtgctgtgcaggcagctgtgtggcctgacagtctctaccagtcctgctgtccct

SEQ ID NO: 70969 - DNA, 120 bp, synthetic construct
  source 1..120: mol_type = other DNA
gcgggacagtggagttaactgtagaccaggccagggcacaggctgctgggggtggccccccttcccccgtgtacatactgtagctgtgtaacattctgtatcgtacctagcggaggttgc

SEQ ID NO: 70970 - DNA, 120 bp, synthetic construct
  source 1..120: mol_type = other DNA
ttggactggaattggcatttctttgtctacttttccttcccctagattctttgttttaaactacagtattcatattttaaaatgttttaaattattttaagacgttaatatagcagttac

SEQ ID NO: 70971 - DNA, 120 bp, synthetic construct
  source 1..120: mol_type = other DNA
gtcacaaacagtagattgcgctgcagtttgtaaacattttacgttgcataaactgctccttgattttcaaatgtagtataatactgtctactaaaactcctttttgtttcaactaagtac

SEQ ID NO: 70972 - DNA, 120 bp, synthetic construct
  source 1..120: mol_type = other DNA
tgtaggatattaaccccttaaatgttttgttttttttttttcaattccttgacccgctcttagatgatggtgatgtttagctccctgttctccgcagcccgaaaagaatggcatgcagcc

SEQ ID NO: 70973 - DNA, 120 bp, synthetic construct
  source 1..120: mol_type = other DNA
caatctcagctcactgcaaccttcatctcccgggctcaagtgattctcgtgtctcagcctcctgagtagctgggattacaggcatgcaccaccaggcccggctaattattattatttttt

SEQ ID NO: 70974 - DNA, 120 bp, synthetic construct
  source 1..120: mol_type = other DNA
agggggaaaagggccctggagggaggggctggtgaacctctagagacagagtttgagaagggcccaccccccttctgccagtttgtgatttagaaacgtgcattcattcaacaaacattt

SEQ ID NO: 70975 - DNA, 120 bp, synthetic construct
  source 1..120: mol_type = other DNA
gccctctgacttcctttcttcccccatcaactggcaaaagcttcttttctgcctatcttggaccctttttcccataactcctttgtgccaacttctctcgtggttcttatctccccacca

SEQ ID NO: 70976 - DNA, 120 bp, synthetic construct
  source 1..120: mol_type = other DNA
agagggattgatatcatggatagaaaaaaaaaaaaaagaaagatcaaaaaaggcaatactggaacttaaactcagtcctctgactccaagctctggggttttgccatgaatcagcagctt

SEQ ID NO: 70977 - DNA, 120 bp, synthetic construct
  source 1..120: mol_type = other DNA
tcgctgctccacgatgggggagggaaacacacggtttcgacccaggtcctcagagacgccagcccaagaagcctagggaggtcgagcttggggcagcaggaggggagggcagagtctgca

SEQ ID NO: 70978 - DNA, 120 bp, synthetic construct; identical to SEQ ID NO: 70929
  source 1..120: mol_type = other DNA

SEQ ID NO: 70979 - DNA, 120 bp, synthetic construct; identical to SEQ ID NO: 70930
  source 1..120: mol_type = other DNA

SEQ ID NO: 70980 - DNA, 120 bp, synthetic construct
  source 1..120: mol_type = other DNA
ccagatgcagccctgtgctgcggtggatttgtatggccagctggacagccaccaccttcagcatggccggggggctggcctgcagtccattgctgacccggaatgtcaagtcctgtgtag

SEQ ID NO: 70981 - DNA, 120 bp, synthetic construct
  source 1..120: mol_type = other DNA
atccgtggccatgatactgccagagaggaggtcctggtgggtcagcaccagctgggcctcagcaaagcccgaatcagcattgctgaaggccatgttgtctgtagtcagcagccgccacct

SEQ ID NO: 70982 - DNA, 120 bp, synthetic construct
  source 1..120: mol_type = other DNA
acatcagcatgacctggatgtgagacctggagtcaaagaagatcattttggagttttaaaatttgaccgcctcactggattttggacttacatgggccctataacccatttgctttggtc

SEQ ID NO: 70983 - DNA, 120 bp, synthetic construct
  source 1..120: mol_type = other DNA
acagagcgagagactctgtctcaaaataaaataaaatatcccctttcttcctcacaactcctctgggaaccagaacttatggtccccattttccaccaatggaagctgaggccctaaaag

SEQ ID NO: 70984 - DNA, 120 bp, synthetic construct; identical to SEQ ID NO: 70935
  source 1..120: mol_type = other DNA

SEQ ID NO: 70985 - DNA, 120 bp, synthetic construct; identical to SEQ ID NO: 70936
  source 1..120: mol_type = other DNA

SEQ ID NO: 70986 - DNA, 120 bp, synthetic construct; identical to SEQ ID NO: 70937
  source 1..120: mol_type = other DNA

SEQ ID NO: 70987 - DNA, 120 bp, synthetic construct; identical to SEQ ID NO: 70938
  source 1..120: mol_type = other DNA

SEQ ID NO: 70988 - DNA, 120 bp, synthetic construct
  source 1..120: mol_type = other DNA
agcacttgcatgacacttccctctattttcactcttggcggctgcccacactttgcatttctcttcctttcttctcgctgtcctccatcctccattccgtccaactcctagcccagtccc

SEQ ID NO: 70989 - DNA, 120 bp, synthetic construct
  source 1..120: mol_type = other DNA
cgaaacctttggtaaatcatgaccctgccttggggaaaagggcagtctgggagagcttcttcaaggcagcctggcttcaatgcagtctggggcatgactgagataggcatacgtggtgag

SEQ ID NO: 70990 - DNA, 120 bp, synthetic construct
  source 1..120: mol_type = other DNA
ctgctggctgtctcacttccctccctgccagccacaggactcagtgccactgctcaaggtctccatggctgagcctgggggctcttacaacaggctccatgcccaaggtggcagatgtgg

SEQ ID NO: 70991 - DNA, 120 bp, synthetic construct
  source 1..120: mol_type = other DNA
cattggtctgaactgtgggtggactgcctgggtgccatgagagaggccagtgtgtgtggggtggggagggctgccacagcccccaggcactacctatgaagctctagcttctccctccat

SEQ ID NO: 70992 - DNA, 120 bp, synthetic construct
  source 1..120: mol_type = other DNA
gtcacatgtcaggagtcacctgccttgtcctgccccaccgccccccttgttggcccatgccaggacctactcacctgcagcttctccatggccccctgcagggcccggtgggtctcccca

SEQ ID NO: 70993 - DNA, 120 bp, synthetic construct
  source 1..120: mol_type = other DNA
tgttcccaggaggtcaccatactgatactgaacttagtgcggacaccttgtcggcataatgaccgacacaaaatgcttaaaaggtaacctgactctttgttcagggctcagtcctttaga

SEQ ID NO: 70994 - DNA, 120 bp, synthetic construct
  source 1..120: mol_type = other DNA
gaggagaccaagaaagggtgataagatcaaaacaggagaaaagaatccgacagaagtctcatttgattatcatgtcccttcccagaggacagggacatgtcttttttgtcttttataccc

SEQ ID NO: 70995 - DNA, 120 bp, synthetic construct
  source 1..120: mol_type = other DNA
ttttctatttgtatacgtatatttatatgtatatctatatcgagagagagagagagagaaagagtcttgctgtgttgcccaggctgatctcaaactcctgggctcaagcaatcctcccac

SEQ ID NO: 70996 - DNA, 120 bp, synthetic construct
  source 1..120: mol_type = other DNA
attcacaaaagggaaacctgtctcctcttcatatacctgttcctttcaaggaagggtataaaaatggggatgagggaggataaccactaggaatttgaccctatattataaattggtcag

SEQ ID NO: 70997 - DNA, 120 bp, synthetic construct
  source 1..120: mol_type = other DNA
tctacctcgggagaattagctccacctctcttcccctgaagagaggtgtccctacgaggaggaggtattcactttgtaaatgctcctttaaccagctcggaggtccaaaacctaaaaaca

SEQ ID NO: 70998 - DNA, 120 bp, synthetic construct
  source 1..120: mol_type = other DNA
gccgagaaacccaaaaatagagagaagagacagaatcaatgcttcaattgtgagaaagtaggccacttcaagaggtattgtcccaaattaaaatcagaaagagaagtcatcccacttacg

SEQ ID NO: 70999 - DNA, 120 bp, synthetic construct
  source 1..120: mol_type = other DNA
ttaccagcttagttacctgcttagtaacctgccttgtaaacaactcttcctaccagccccaatctgtaactcacattccccctccctttcttattagagaaaatattcacaatatccagc

SEQ ID NO: 71000 - DNA, 120 bp, synthetic construct
  source 1..120: mol_type = other DNA
taaggtttttgttcaagcacaatatagctagaatagggtcatacattcaataaaacaaatatttaccaagcatttattgagtggaagataaaaagcacaaagcataattataaaacattc

SEQ ID NO: 71001 - DNA, 120 bp, synthetic construct
  source 1..120: mol_type = other DNA
ccatggttaaaagagtctttactttcaagagatacaaacagaaatatttacatgggctaatttactgggcaacaagagagaaactccgtctcaaaaaaaaaaaaggaaataaaagcatac

SEQ ID NO: 71002 - DNA, 120 bp, synthetic construct
  source 1..120: mol_type = other DNA
atcacttgagttcaggagttcaagaccagcctggccaacatggtgaaaccccgtttctactaaaaacagaaaaattagctgggcatggtggcgggcacctgtaatcccagctacttggga

SEQ ID NO: 71003 - DNA, 120 bp, synthetic construct
  source 1..120: mol_type = other DNA
gcccttctcctctcccagagtgggcggcccctcccctttctctgagtgggcggggacagcggttgcatgggcagctttccttatgatgccacaggtccctctggacatgctgctgcctgg

SEQ ID NO: 71004 - DNA, 120 bp, synthetic construct
  source 1..120: mol_type = other DNA
ttaagggagtaaggcagcctgaaacctcttgctcctaggtcccatagtctccactccccttccagctggaaatttgtgctgcaaccagaggaaccagaaatggggtgagaaaacttaggg

SEQ ID NO: 71005 - DNA, 120 bp, synthetic construct
  source 1..120: mol_type = other DNA
ctaccgatggaataaatagccgaatgactacagccaaagaatggtcaagtaaaggaactctcccagaaaacatcaggcaggaagaaaggcacagagattagaaatgaaaaggtaagagac

SEQ ID NO: 71006 - DNA, 120 bp, synthetic construct
  source 1..120: mol_type = other DNA
gttgttgttgttttgttttgttttcttttttttgagacaaggtctcactcccatcacctaggctggagtgcagtggcactatcatcgctcacttcagcattgacttccctggctcagatg

SEQ ID NO: 71007 - DNA, 120 bp, synthetic construct
  source 1..120: mol_type = other DNA
gaaagagaaaggatctttgtgcttaataaaaagtggtatgctgtggtgaaaggagcattctcttgtgttaagagaccaggcttccccaggtttgtccttcagcaatgcattttacatttc

SEQ ID NO: 71008 - DNA, 120 bp, synthetic construct
  source 1..120: mol_type = other DNA
gctccaactgggtggagcccaccacagctcaaggaggcctgcctgcttctgtaggctccacctctgggggcagggcacagacaaacaaaaagacagcagtaacctctgcagacttaagtg

SEQ ID NO: 71009 - DNA, 120 bp, synthetic construct
  source 1..120: mol_type = other DNA
caaagatactcctcgagaagagcaactccaagacacataattgtcagattcaccaaagttgaaatgaaggaaaaaatgttaagggcagccagagagaaaggtcaggttaccctcaaagga

SEQ ID NO: 71010 - DNA, 120 bp, synthetic construct; identical to SEQ ID NO: 43775
  source 1..120: mol_type = other DNA

SEQ ID NO: 71011 - DNA, 120 bp, synthetic construct
  source 1..120: mol_type = other DNA
gagcctgttattggtctattcagagattcaacttcttcctggtttagtcttgggagagtgtatgtgtcgaggaatgtatccatttcttctagattttctagtttatttgcgtagaggtgt

SEQ ID NO: 71012 - DNA, 120 bp, synthetic construct
  source 1..120: mol_type = other DNA
agggcggggtgcgcgagtgaggagggaggggtgcgcgagtgaggagggcgggggagtgcgcgagtgaggagggcgggggagtgcgcgagtgaggagggcgggggagtgcgcgagtgagga

SEQ ID NO: 71013 - DNA, 120 bp, synthetic construct
  source 1..120: mol_type = other DNA
ggtgcgcgagtgaggagggcgggggagtgcgcgagtgaggagggcgggggagtgcgcgagtgaggagggcgggggagtgcgcgagtgaggagggcgggggagtgcgcgagtgaggaggga

SEQ ID NO: 71014 - DNA, 120 bp, synthetic construct
  source 1..120: mol_type = other DNA
gtccggccggcaggtggcactgtggcgtcgccgtgggccgagcctggcgaagcgctgctcgcccgagatcgcgcagcttggtgagtggcagcgcctggctttatactcgcgtctcggaca

SEQ ID NO: 71015 - DNA, 120 bp, synthetic construct
  source 1..120: mol_type = other DNA
cctgagtcatgttctaatggatggaggcagaaccagtcgtcctggttgggagattttctctggcaacaacagctatgtggagaaggcaaatggctgcgtccattcaagattagggtcagt

SEQ ID NO: 71016 - DNA, 120 bp, synthetic construct
  source 1..120: mol_type = other DNA
tagggtcagtcatgggggtatagtactcacagtgccagggtgggcaggtcagtcatgggggtatagtactcacagtgccagggtgggcaggtcagtcatgggggtatagtactcacagtg

SEQ ID NO: 71017 - DNA, 120 bp, synthetic construct
  source 1..120: mol_type = other DNA
tcatcttctcagagctgctgtccaacctgtactcacgtgggaacgagcagacactcgtggaggcgtcggcagagcaggcagaccaaggagttcatcttctcagagctgctgtccaacctg

SEQ ID NO: 71018 - DNA, 120 bp, synthetic construct
  source 1..120: mol_type = other DNA
agagctgctgtccaacctgcactggcgtgggaacgagaagacactcgtggaggcgtcggcagagcaggcagaccaaggagttcatcttctcagagctgctgtccaacctgtactcacgtg

SEQ ID NO: 71019 - DNA, 120 bp, synthetic construct
  source 1..120: mol_type = other DNA
ctgcttctcagagctgctgtccaacctgcactcgcgtgggaacaagaagacactcgtggaggcgttggcagagcaggcagaccaaaggagttcatcttctcagagctgctgtccaacctg

SEQ ID NO: 71020 - DNA, 120 bp, synthetic construct
  source 1..120: mol_type = other DNA
tactcgcgtgggaacgagcagacactcgtggaggcgttggcagagcaggcagaccaaggaattcatcttctcagagctgctgtccaacctgcactcgcgtgggaatgagaagacactcgt

SEQ ID NO: 71021 - DNA, 120 bp, synthetic construct
  source 1..120: mol_type = other DNA
ggaggagtcggcagagcaggcagaccaaggagttcatcttctcggagctgctgtccaacctgtactcgcatcggaacctgcagacacttgtggaggagtcggcagagcaggcacagcggt

SEQ ID NO: 71022 - DNA, 120 bp, synthetic construct
  source 1..120: mol_type = other DNA
gagatgctgcttctcagagctgctgtccaacctgcactcgcgtgggaaccagaagacactcgtggaggcgtcggcagagcaggcagaccaaggagttcatcttctcagagctgctgtcca

SEQ ID NO: 71023 - DNA, 120 bp, synthetic construct
  source 1..120: mol_type = other DNA
aaaaagcaaaaaacaactatttgtctacacatacaattttatgcccagatggaaaaagatccaaatgattcacagtggtgatggctctgagggtgacgctgtctgcttaaggcccaggga

SEQ ID NO: 71024 - DNA, 120 bp, synthetic construct
  source 1..120: mol_type = other DNA
acacggggggaacagcgacacggggggaacagcgacacggggggaacagcgacacggggggaacagcgacacggggggaacagcgacacggggggaacagcgacacggggggaacagcga

SEQ ID NO: 71025 - DNA, 120 bp, synthetic construct
  source 1..120: mol_type = other DNA
ttcacggaactggaggacacctggctgagctgcctggaaggtctgcagctcacagcctgaggggacgcctggagctggctcagcacaaaacaggatgtgcctgatgctgagttcgcaaaa

SEQ ID NO: 71026 - DNA, 120 bp, synthetic construct
  source 1..120: mol_type = other DNA
cgtgagtccacacacgtctgcttctcactaagctttgagtcatgtgtggggcagggacctcccaaattccagtttctatgctgggtgaggccgagaagcaatggaagggaagggtggtgg

SEQ ID NO: 71027 - DNA, 120 bp, synthetic construct
  source 1..120: mol_type = other DNA
acttcatcagccatctcaacagaaaccaggaacagagatggggcaattctagcagaaatgccagctgagactaaaggaaagagagaaaataggatacaattaaggaagaccatcagactt

SEQ ID NO: 71028 - DNA, 120 bp, synthetic construct
  source 1..120: mol_type = other DNA
gacagccctctgtacaccaggaaaagtgcactcaccaagaacctgactatatcagcaccctgatctcaaatttctaacctccagaactgtgagaaataaatgtttgttgtttaaatcacc

SEQ ID NO: 71029 - DNA, 120 bp, synthetic construct
  source 1..120: mol_type = other DNA
ctgtttgtctgttattggtgtataggaatgcttgtgatgcttgcacattgaatttgtatcctgagattttgctgaagttgcttgtcagcttaaggagttttggggctgagacgatggagt

SEQ ID NO: 71030 - DNA, 120 bp, synthetic construct
  source 1..120: mol_type = other DNA
aatttgcggtgagccacgatcgcaccatggcactccagcctgtgcgacgagagcaaaactccatctccaaaaaaaaaaaaaaatatatatttatctcatctcatcataagtccctttcca

SEQ ID NO: 71031 - DNA, 120 bp, synthetic construct
  source 1..120: mol_type = other DNA
tcaggtgatccacctgcctcagcctcccaaagtgctggggtgacaggcgtgagccaatgtgtctggcgagactaggtgtaatgatccacactcactgttaaccctaaaaacaccattttt

SEQ ID NO: 71032 - DNA, 120 bp, synthetic construct
  source 1..120: mol_type = other DNA
cagcgccgctagagcgtggagaagatggctaccctcggaataatgttccaaatgcataaaatacacaggactgtaggagaaagcaattataatccaatacacgtatcaaattattgaagg

SEQ ID NO: 71033 - DNA, 120 bp, synthetic construct
  source 1..120: mol_type = other DNA
aaagcactaaggaaaacacaggatcatctcaacagatgcagaaaatgcagttaacaaaaattccccacctctacaggacaaaaatatggaatagccgaggcacagaagggagggcccagg

SEQ ID NO: 71034 - DNA, 120 bp, synthetic construct
  source 1..120: mol_type = other DNA
acccaccccggcctcccaaagtgctgggattacatgtgtgagccaccgtgcccggccaataactctatttagaataacattaaaaacaaataagaataaatgtcacaaaagacgcataaa

SEQ ID NO: 71035 - DNA, 120 bp, synthetic construct
  source 1..120: mol_type = other DNA
gttccttacattctggatacaagtcccatatcaggtagatgattagcagatcgtgtctcctgtttggtgggtctcttcactttcgtgatatcacttgaagcacaaaagtgcttaaacttg

SEQ ID NO: 71036 - DNA, 120 bp, synthetic construct
  source 1..120: mol_type = other DNA
ccactcgcctcagcctcccaaagtgctgcgattacagatgtgagccaccgcgcctggccctggagtgagcttttgtgtatggtgtgaggaagggtaataacttttttaatgaattaatca

SEQ ID NO: 71037 - DNA, 120 bp, synthetic construct
  source 1..120: mol_type = other DNA
ttttttacaataagcagtaattctccccagccccatgcatcatagccaatcctaaatgaatgccaatctggaaaagaccaaaataaaccacgtgaagatgggaagagctgctcttggtga

SEQ ID NO: 71038 - DNA, 120 bp, synthetic construct
  source 1..120: mol_type = other DNA
ttttttttaagtggctacagggcaacaagactatccctgtgccaaataccagattccaaagaaactctacccacgtcacaaacctgcacgtggatcccctgaatctaaaataaaagttga

SEQ ID NO: 71039 - DNA, 120 bp, synthetic construct
  source 1..120: mol_type = other DNA
cgacctcccaaagtgctgggattacaggcttcttttattttttatttattactactattttttaacagttgatcgctctgttccccaggctggagtgcagtgggatcatcctagttcact

SEQ ID NO: 71040 - DNA, 120 bp, synthetic construct
  source 1..120: mol_type = other DNA
agaagtacacacagaagctacaactgaaaaagataaaaagcatcagtcaagatggtgaaaagaatcattagctcgccaggaaagacacgcaaccattgcatgtggtattggcaggagagc

SEQ ID NO: 71041 - DNA, 120 bp, synthetic construct
  source 1..120: mol_type = other DNA
gtgacacattttgttttgttttttttttttaagatgcagtctcgctctgtcgccaggctggagtgcagtggcgctacctcggctcgctgcaacctccgcctcccggagtcaagcaattct

SEQ ID NO: 71042 - DNA, 120 bp, synthetic construct
  source 1..120: mol_type = other DNA
ccttggaaacagagcgagactccgtctcaaaaaaaaaaaaagaaaagaaaaagaaaaagaaaaaaaaagacaggagcagcaggcagaaggggagcagactcatctcaaacctgcctcaca

SEQ ID NO: 71043 - DNA, 120 bp, synthetic construct
  source 1..120: mol_type = other DNA
cggaaggcaggtggttggctctagtcatccacgacgggctggcacctctccagctgcggccagtctaaccccagggcctgctgggaaatgtagttcgaatgcaaacaaccaatggacgac

SEQ ID NO: 71044 - DNA, 120 bp, synthetic construct
  source 1..120: mol_type = other DNA
ttcaatttatttgtggcgtatagacaaaaattcagatgaagaaatcgtaaaaaatacatggtgtttcacgcctgtaatcccagctctttaggaggctaaggcgggcagattgcctgaggt

SEQ ID NO: 71045 - DNA, 120 bp, synthetic construct
  source 1..120: mol_type = other DNA
atatctcccaatgctatccctcccccctcccccgaccccaccgcagtccccagagtgtgatattccccttcctgtgtccatgtgatctcattgttcaattcccacctatgagtgagaata

SEQ ID NO: 71046 - DNA, 120 bp, synthetic construct
  source 1..120: mol_type = other DNA
tggaacagaacagagccctcagaaataatgccgcatatctacaactatctgatctttgacaaacctgagaaaaacaagcaatggggaaaggattccctatttaacaaatggtgctgggaa

SEQ ID NO: 71047 - DNA, 120 bp, synthetic construct
  source 1..120: mol_type = other DNA
taccagttcctccttgtacctctggtagaattcggctgtgaatccgtctggtcctggactctttttggttggtaaactattgattattgccacaacttcagagcctgttattggtctatt

SEQ ID NO: 71048 - DNA, 120 bp, synthetic construct
  source 1..120: mol_type = other DNA
gagacaaagaaggccattacataatggtaaagggatcaattcaacaagaggagctaactatcctaaatatttatgcacccaatacaggagcacccagattcataaagcaagtcctgagtg

SEQ ID NO: 71049 - DNA, 120 bp, synthetic construct
  source 1..120: mol_type = other DNA
ctctaaaacgcagagcgcctctcctcctccaaaggaacgcagttcctcaccagcaacagaacaaagctggatggagaatgattttgacgagctgagagaagaaggcttcagacgatcaaa

SEQ ID NO: 71050 - DNA, 120 bp, synthetic construct
  source 1..120: mol_type = other DNA
tgttcaggactaagtggcatagagaatgttaaatgtgcctagatatcttcataactcatatattttctgttttccacatatcttgaaaggcagtgccaaatgacgtgtaattatctaggt

SEQ ID NO: 71051 - DNA, 120 bp, synthetic construct
  source 1..120: mol_type = other DNA
tttgtgtgagtatactaactttctgtagaggtatacttgtaatcacaaataagaataaattatataaaacaattcacgtttctggacttcattatgaatatgtggttttacccaaaaaat

SEQ ID NO: 71052 - DNA, 120 bp, synthetic construct
  source 1..120: mol_type = other DNA
gacaagctaagtataaagtaattatcttatcttttctttttgttttgagacaaagtcttgctctgtcacccaggctagattgcagtggcatgatctcagctcactgcaacctccacctcc

SEQ ID NO: 71053 - DNA, 120 bp, synthetic construct
  source 1..120: mol_type = other DNA
cagcttctgataacatttctacatcgattcctcaggatttaactatatattcttgaaaacatctcaattttaaatgtttctttcaagatggtgaattaaacagagatagcccttcaacag

SEQ ID NO: 71054 - DNA, 120 bp, synthetic construct
  source 1..120: mol_type = other DNA
gtctccaactcctgacctcatgatccacctgcctcggcctcccaaagtcctgggaatacacgtgtgagccactgcacctggccagtagttatcttttctttagttatttacttgtttttt

SEQ ID NO: 71055 - DNA, 120 bp, synthetic construct
  source 1..120: mol_type = other DNA
atagggaagggggagggggaggagaatgggaattgggggagggggataaggatgggaagggggaggggaggaagggggaggggaggggctaggggagggaggggctgggggaggagtgga

SEQ ID NO: 71056 - DNA, 120 bp, synthetic construct
  source 1..120: mol_type = other DNA
cctggggtccagccaggaccccacccaaagaaccacaacttacatttcacttaaattaaataaattagcaaatattccttcttctaacgtagaaatcttgttgttgcttatatccctgga

SEQ ID NO: 71057 - DNA, 120 bp, synthetic construct
  source 1..120: mol_type = other DNA
tttcaaaatcctgggctcaggcgatccttccgtctcagctcccacggtgctgtgttaccggcgtgtgccccagtgcctggccgtcttggaggtcttgtttctctgggtttatgcctcaag

SEQ ID NO: 71058 - DNA, 120 bp, synthetic construct
  source 1..120: mol_type = other DNA
aatctttcttcccatccgcagacacatagccaaatgcctagcaggccttacctgaccccactaaaacagtctttctggccagggaaaattataaagaattatatgagatcacacatacaa

SEQ ID NO: 71059 - DNA, 120 bp, synthetic construct
  source 1..120: mol_type = other DNA
taaggagtatacagggaggcgcctaagccaacctggggaagtatcaaaggcttcctggaggaggaggatgaggaagaattagtaatgttgaatactggcaggtgaacaattcatactgtg

SEQ ID NO: 71060 - DNA, 120 bp, synthetic construct
  source 1..120: mol_type = other DNA
gccacatgacttgttttggtgaatgaaatgatgatagacatgatacaagtaggagctttagatgtgtttgtgcagctggatgtgaattcctgaatctctcccatcaccatgagaagagca

SEQ ID NO: 71061 - DNA, 120 bp, synthetic construct
  source 1..120: mol_type = other DNA
tcaattcgaagaaagccttcccatacttccttttatgaaattacaagcctgggatccctaccttgtctgctcagaaataaaacagactcagccccatctacacttgagttagagttgaga

SEQ ID NO: 71062 - DNA, 120 bp, synthetic construct
  source 1..120: mol_type = other DNA
ttactcaagccaacatgagaggtttccatgacaacctctcagcacattcagtcttcatataaatgagttattgcttttatgttctcatactctaagacaatggggaaattaacataatgt

SEQ ID NO: 71063 - DNA, 120 bp, synthetic construct
  source 1..120: mol_type = other DNA
tgtgaggcctttccagccatgcagaactgtgagtccattaaacctctttcctttataaatgacccagtctcaggcatgtctttattagcagcatgagaacagactaatacagaaggactt

SEQ ID NO: 71064 - DNA, 120 bp, synthetic construct
  source 1..120: mol_type = other DNA
gcatgtgcaagtatctttctcatataatgatttcttttcctcagggtagatacccagtagtgggattgccagatcaaatggtggtgctacttttctttaaggaatctccacactgtcttc

SEQ ID NO: 71065 - DNA, 120 bp, synthetic construct
  source 1..120: mol_type = other DNA
ttcatgtcctttgcagggacatagacgaatctggaaaccatcattctcagcaaactaacacaggaacagaaaaccaatcaccacatgttctcactcataagtggaagctgaacaatgaga

SEQ ID NO: 71066 - DNA, 120 bp, synthetic construct
  source 1..120: mol_type = other DNA
cagacaattcatagaaaagaacatgtgaatgtctaatattcctatgaagagatgttcaaaatgtactaggaatcaaggaaatgcaggttaaaacaatgaaattctactttatgcccaaca

SEQ ID NO: 71067 - DNA, 120 bp, synthetic construct
  source 1..120: mol_type = other DNA
ttgcttcccctatgttctctgtggagaggaggcaaaaactcaggagggtaaatgagaatagtatgccatgaataaataattaacccccacacctgagatctgctaaaggaaacaaagtct

SEQ ID NO: 71068 - DNA, 120 bp, synthetic construct
  source 1..120: mol_type = other DNA
cctgggcaacaagagcgaaactccgtctcaaaaaaaaaaaacaaaaaccaaccaaccaacaaacaaaaaacaaataaatagtaaaagttacttctcaacacgagccagtcattttttaaa

SEQ ID NO: 71069 - DNA, 120 bp, synthetic construct
  source 1..120: mol_type = other DNA
gctcataggtctgtggtttagctggagagattctgctttaggctgtgggttgagttcaagtctgattcttacatttatttctgaggtccagattggagaagcagtggtacctggtgaagg

SEQ ID NO: 71070 - DNA, 120 bp, synthetic construct
  source 1..120: mol_type = other DNA
tgaatacagtcgcaggaactgctagagctgacacatagtccctgcaactccagccagacgccagcaccagctgccactgggagatgtgagcttggcttctccatgaaagagaaagattcc

SEQ ID NO: 71071 - DNA, 120 bp, synthetic construct
  source 1..120: mol_type = other DNA
tgcagctatttctcaatagtcccctttataatcagagcaggctgggtagaatctggtacaggagattgtggcaaactagataattaacccagagaacattatttctgtctgggtatgcca

SEQ ID NO: 71072 - DNA, 120 bp, synthetic construct
  source 1..120: mol_type = other DNA
tctcaaaacaaactgatgaggaaacggtctgagagtagttaggcagcttttcaaggtcacacagatagtaaatgtcatcactgggacttgaactcaggtctttctgactctcatgtctgt

SEQ ID NO: 71073 - DNA, 120 bp, synthetic construct
  source 1..120: mol_type = other DNA
ctgggctcaagggatccaccttcctccccctctcaaagttctgggattaccggagtgacccactgtgccctgctggcaaatttcttaaactgtgcctcagtgacctcatttaataaaggg

SEQ ID NO: 71074 - DNA, 120 bp, synthetic construct
  source 1..120: mol_type = other DNA
cgggtctggagacagacgtccccacccgggggctctgcggacgccagcgggggcggggcgcggaggccgcgctcagctgggaggacaaacagtcgctaattggagaggaattgggattcg

SEQ ID NO: 71075 - DNA, 120 bp, synthetic construct
  source 1..120: mol_type = other DNA
tgtgctgtggggcagcccagccattttgctgtctaccctgcaaactcctcctcggggagacggctgggttttccccagggaagaggggtcaagctgggagaggtgaaggacacagatcac

SEQ ID NO: 71076 - DNA, 120 bp, synthetic construct
  source 1..120: mol_type = other DNA
ttcaagtgattctcctgcctcagcctcccgagtacctggtagctgggtttacaggcatgcaccaccgtgcccagctaatttttgtatttttagtagagacggggttttaccgtgttggcc

SEQ ID NO: 71077 - DNA, 120 bp, synthetic construct
  source 1..120: mol_type = other DNA
gctaatttttgcatttttagtagagacggggtttcaccctgttggccaggatggtcttgatctcttgatctcatgatccacccaccttggcctcccaaagtgctgggattacaggagtga

SEQ ID NO: 71078 - DNA, 120 bp, synthetic construct
  source 1..120: mol_type = other DNA
ctgccagcgccgagaggttcgccaggagcccaacgtccagcgcccggagcaggttgtgggagacgtctctgaggagtgagtggccgtgggtcagggccagagcccttagtaggccagagg

SEQ ID NO: 71079 - DNA, 120 bp, synthetic construct
  source 1..120: mol_type = other DNA
ggagttaccgtctgaacctctccagccacttccgctggtcggcgctggaggtgtccgtgggcttgtacacgtccctgtgccagtacttcagcgaggaggatgtggtgtggcggacagagg

SEQ ID NO: 71080 - DNA, 120 bp, synthetic construct
  source 1..120: mol_type = other DNA
ttcatttttctttttttggagacggagtctcactctgttgcccaggctggagtgcaatggcgtgatcttggctcacagcaacttccagctcctgggtttaagcgattccccttaagcgat

SEQ ID NO: 71081 - DNA, 120 bp, synthetic construct
  source 1..120: mol_type = other DNA
tatctggctctaaaatccgtactattccctctgctatgtttttgtggcgacttgaactcttccttcaaagtcttggctgctgctatgaactgaacgtgtaccttgtgaagttgtattttt

SEQ ID NO: 71082 - DNA, 120 bp, synthetic construct
  source 1..120: mol_type = other DNA
cctatgtcatctaccgttgaatccagactgtgcgattgcttgaccaatagaatatagaagaaacgttatgcgacatccaaggctacatcataaaatgtgacagagcttccactgggttct

SEQ ID NO: 71083 - DNA, 120 bp, synthetic construct
  source 1..120: mol_type = other DNA
gcaatggctagatctctggatgccatatttgaccatgaagtcaagtccaaatgagaaacgatcattcccaaattaaggccgtgacttaaggaggtatataaaagagaaggtggcaattgg

SEQ ID NO: 71084 - DNA, 120 bp, synthetic construct
  source 1..120: mol_type = other DNA
agtaatagtacatttgtcacagagttggtttgtgataggataaggtgatgcatgttcactagaaatgaagagagaagggttatgattcattgaaaagaaagaaaaacctaggctgggtgt

SEQ ID NO: 71085 - DNA, 120 bp, synthetic construct
  source 1..120: mol_type = other DNA
catcctgccaacgaaaagattagtacaatttccagttctagccaagacaaaatagtggctatagaacttagattgccactgtaaaccaatctgaaactggacacaatatatgaaaaattg

SEQ ID NO: 71086 - DNA, 120 bp, synthetic construct
  source 1..120: mol_type = other DNA
tcaatctgctttgccttatgacactacattgtaatcatctggaattatctactagcctgaaaccctcaagtggggactttggcttgttcacaactgcatcttttgtagctggagctatga

SEQ ID NO: 71087 - DNA, 120 bp, synthetic construct
  source 1..120: mol_type = other DNA
ttattctctcacattaaaaggaatttgggggtaggtgagtctagggttggtttattcagtagttcagttgtatcatcaaagacctgggctcttgccatctttgtgctctgacttacagag

SEQ ID NO: 71088 - DNA, 120 bp, synthetic construct
  source 1..120: mol_type = other DNA
tgaatgcaaaaaaaaaaaaaaaaggtttaaaaaagctgtgcaagctgggcacagtggctcacacctgtaatctcagcaatttgggaggccaaggtgggagaatgtcttgaggccaggagt

SEQ ID NO: 71089 - DNA, 120 bp, synthetic construct
  source 1..120: mol_type = other DNA
attggctgagccctagaggtaatgggaagggttgatggggcaagatcagagacttctgtgatgtttccatttgatgagacaaaactcagcattagcagaattaaagttacctaatctcta

SEQ ID NO: 71090 - DNA, 120 bp, synthetic construct
  source 1..120: mol_type = other DNA
attactgtgagagttgagtaaaataatacacgtaatgggcttagcagggagcctaacacacactcgctcacacccattcattcaataaatgttattgagtaaccacatttgccaggccct

SEQ ID NO: 71091 - DNA, 120 bp, synthetic construct
  source 1..120: mol_type = other DNA
caacctctacctcctgggttcaagcaattctcctgcctcagcctcccgagtagctgggattacaggcacctgccaccatacccagcttttttttttttttttttttttttgtattttttt

SEQ ID NO: 71092 - DNA, 120 bp, synthetic construct
  source 1..120: mol_type = other DNA
cttgagttccccacatgtcatagagtgatgtggacaagcccttgaaatctggctttcctgattacctggttgaccttgtagatgcctctctgagcctcagatatgttctctgtgaaatgg

SEQ ID NO: 71093 - DNA, 120 bp, synthetic construct
  source 1..120: mol_type = other DNA
cccgagtagctgggactacaattgcatgctaccatgcccagctaacttgtgtactttttgtagagatgaggtttcgtcatattacccaggctggcctcgaactctcaggatcaagtgatc

SEQ ID NO: 71094 - DNA, 120 bp, synthetic construct
  source 1..120: mol_type = other DNA
ctcgacctgccaaagtgctggaattacaggcgtgagccacggcgcccagccatttttattttattttttttgagatggaatgtcactctgtcacctaggctggagtacagtggcgcaatc

SEQ ID NO: 71095 - DNA, 120 bp, synthetic construct
  source 1..120: mol_type = other DNA
tataataaaaacagttgtggctttaagccataatgtttggggattaacttgaatggcatccttcaggagataccccatgtgtcataggttttggggatggaggttatcttagcctaccaa

SEQ ID NO: 71096 - DNA, 120 bp, synthetic construct
  source 1..120: mol_type = other DNA
ttatgcctttgcatcctcatagcttagctcccacttgtgagtgagaacatacgacgtttggttttccattcctgagttacttcacctagaataataatctccagttccatccaggttgct

SEQ ID NO: 71097 - DNA, 120 bp, synthetic construct
  source 1..120: mol_type = other DNA
tcaccattcctactgcaagcatctgcaatactgcctggggctttgtctcactgccataacctaggctcttgtggggcaggctggaagtgcagagaaaccaacacaggcacatctccccca

SEQ ID NO: 71098 - DNA, 120 bp, synthetic construct
  source 1..120: mol_type = other DNA
gcccgactaatatttttttagtagagatggggtttcaccatgtttgccaggctggtttcgaactcctgacctcaagtggtctgctcacttcagagtcccaaagtgctgggatcacaggca

SEQ ID NO: 71099 - DNA, 120 bp, synthetic construct
  source 1..120: mol_type = other DNA
taagaaccatgagttgggaaaagagggaagaactgggtaggcccaaggccacccagtgaactgtctagcagcattttgcattttgtaaaagcacattaacaatggttttgagaagctgaa

SEQ ID NO: 71100 - DNA, 120 bp, synthetic construct
  source 1..120: mol_type = other DNA
aagtgctgggattacaagcacgagccatcgcacccagccaaagattaccttgttttaataaacaaaaacaacacctgtttactgtccattcttctctcattggattgcaagctaaacagg

SEQ ID NO: 71101 - DNA, 120 bp, synthetic construct
  source 1..120: mol_type = other DNA
tttttgtttttgtttttttttttttttttgagagggagtctcacactgttgcctgggctgaagtgcaatagtgtgatcttggctcgctacaacctctgccttctgggttcacgcgattct

SEQ ID NO: 71102 - DNA, 120 bp, synthetic construct
  source 1..120: mol_type = other DNA
agcagccatggacagtaagtaaacaagtgaacatggctgtattccaataaaacattatttacaaaaacaggtagtgggccagatttggtccacaggataacaccaaactcacttcccctt

SEQ ID NO: 71103 - DNA, 120 bp, synthetic construct
  source 1..120: mol_type = other DNA
aatattttttattagtagtagtaatgagggtctcactatgtttcctaggctggtcttgaacttctaggatcaagtgatccatccacttcagtctcccaaagtgctgggattacaggcacg

SEQ ID NO: 71104 - DNA, 120 bp, synthetic construct
  source 1..120: mol_type = other DNA
gggattacaggcgtgagccaccgcgcccggccgactcttcttacttttaaggacacatataattgaaactattttggaaaacaagagagcagggatagctaaacttatttaagacaaaat

SEQ ID NO: 71105 - DNA, 120 bp, synthetic construct
  source 1..120: mol_type = other DNA
gggatggaaaagtaaagctggtttttgcctaatcatcctcattacttcacacaccacagctctttcctctggctacttcttcacattaagcatttggctaatggcttctgtttcatgtag

SEQ ID NO: 71106 - DNA, 120 bp, synthetic construct
  source 1..120: mol_type = other DNA
cttcactgattgctgttgaaaaagacggttctactctttgaccactggctttgtaaagaggttttcaaggctcagagatggcttgtattgttatattaggagaggtttgatggtagccga

SEQ ID NO: 71107 - DNA, 120 bp, synthetic construct
  source 1..120: mol_type = other DNA
gacactggtcagggaagctctctttgcaaaagtggtatctgagcagagaactaaagaaaataagggagagaagcaccagactttctgtggatctaggacattgttatttcttcttagaga

SEQ ID NO: 71108 - DNA, 120 bp, synthetic construct
  source 1..120: mol_type = other DNA
ctcccgaagtgctgggattacaggtgggagccaccgtgcctggcccattgtccacatttctgtaagttgataagttgtatctatacatttttatcagatttaggtctgattttttctttt

SEQ ID NO: 71109 - DNA, 120 bp, synthetic construct
  source 1..120: mol_type = other DNA
ttagattctacagcaaaagggaatcaaagttgcagatggaatcaatgttgaccttaaaaccaggaggttgtgcaggtagaaccgatgtaatcaaaagggtccttaagtgtggaagaggga

SEQ ID NO: 71110 - DNA, 120 bp, synthetic construct
  source 1..120: mol_type = other DNA
ttttgggccttaatttaaacaaacaaactgccaaagggaatctttaaggcaatagggaaaatttgagtataactagtatgatgatacttaagctatagttgtctaatatgaagattacta

SEQ ID NO: 71111 - DNA, 120 bp, synthetic construct
  source 1..120: mol_type = other DNA
gagcactgaacacacagagctggccttcaaggaacagatagatttcttttaagattttcccgccttccttctggggggagagtgtcttcacccttcagtgtaattgcaaactccttgaag

SEQ ID NO: 71112 - DNA, 120 bp, synthetic construct
  source 1..120: mol_type = other DNA
gcaaaaatgaagatgtaccaatgcatgaagtttggaaacctcttttttttttttttttggacagtctctgtcactcaggctggagtgcagtggcacgatcttggctcactgcaacctctg

SEQ ID NO: 71113 - DNA, 120 bp, synthetic construct
  source 1..120: mol_type = other DNA
gatcgttattctagtaatttgcttttattgtattttatgaacgtattggcccacgatggattggcaaacaaaagaagacaaagcaaagctggccctgcagccctgacagtctgagaagct

SEQ ID NO: 71114 - DNA, 120 bp, synthetic construct
  source 1..120: mol_type = other DNA
gccttggtgagcacaggagctcatggattaagatgtgtaacatgctcagcatggggcttggcacattacagtcagtgctgaataaaggctaggcattaatatgatgttgataaattgttt

SEQ ID NO: 71115 - DNA, 120 bp, synthetic construct
  source 1..120: mol_type = other DNA
ggagggagagcaggtgcaaaccctcctacatcaaaccttgtgagccctatgaaagattgcacatgttgtccaaagattgaagggttttaaacaggatgttaatattagcatattagcagg

SEQ ID NO: 71116 - DNA, 120 bp, synthetic construct
  source 1..120: mol_type = other DNA
gtcccggatacgattggtttcccacctggatcccacttaggagtctaaggcagctgccagggaattgtgctcagctgatggtgctgaggaatgcctgggaggttacattttgcaccctcc

SEQ ID NO: 71117 - DNA, 120 bp, synthetic construct
  source 1..120: mol_type = other DNA
aattataatgcattagcatgctaaaagacactcccactagtgccatgacagtttacaaatgccatggcaacgtccagaaattaccctatatgctctaagaggaagaggaaccctcagttc

SEQ ID NO: 71118 - DNA, 120 bp, synthetic construct
  source 1..120: mol_type = other DNA
tatgcgagcctcaaatttcttatcaatcgaatggtggtaacagtgcttgtctttacttttttccttctattttttagtcttgcactgtcacccaggctggagtgcactggcatgattcca

SEQ ID NO: 71119 - DNA, 120 bp, synthetic construct
  source 1..120: mol_type = other DNA
ttcttttggaatgttctttgttttttcttttttgttgtttgtttttgtttttttctgagacagagtttccctcttgtcacccaggccggagggcaatggtgcgatctcagctcactgcaa

SEQ ID NO: 71120 - DNA, 120 bp, synthetic construct
  source 1..120: mol_type = other DNA
ttgctaatttttaaaattttttgtagacatggagatctccctatgttgcccaggttggtctcgaacttttgggcacaagagatcctccttccttggcctcccgaagtactggagctacag

SEQ ID NO: 71121 - DNA, 120 bp, synthetic construct
  source 1..120: mol_type = other DNA
gagatacttaaaataagccaggttataagggtggggccctaatctgataggacctgtgtccttacaagaagaggaagaaacatgataggaaagaccatgtgagaacacagtgagaaggtg

SEQ ID NO: 71122 - DNA, 120 bp, synthetic construct
  source 1..120: mol_type = other DNA
ttacaggcatgagccactgcacctggcccagagcattcatttaaatcagacatgccatctcatttaaaaccctccaatcctattccactttaaataagttccaaatccccctactatgat

SEQ ID NO: 71123 - DNA, 120 bp, synthetic construct
  source 1..120: mol_type = other DNA
gctaattttttgtatttttagtagagatgggtttcaccatattagccaggatggtatccatctcctgacctcgtgatccacctgcctcggcctcccagctaactttttttgtagagacag

SEQ ID NO: 71124 - DNA, 120 bp, synthetic construct
  source 1..120: mol_type = other DNA
cttgagtttttttctcagctgtccaactgttatgggcctacaattgtatagctcagagtgacagagaagaactttggggttgggaaagaattggagcaacttcaagcaggaacgcggtgt

SEQ ID NO: 71125 - DNA, 120 bp, synthetic construct
  source 1..120: mol_type = other DNA
gtacttttctcatgtaaagtaaggtagtccagtgtgttcacacaattgagagcatttattacattagcctcctatcttttgcggggataatcacagcaccatggtgtggtaagtggcagt

SEQ ID NO: 71126 - DNA, 120 bp, synthetic construct
  source 1..120: mol_type = other DNA
atttctcctggaattttgaaattggacaccaatatttgtcattcagggttggatatgtagactgggaagtgatgtcaagcgtccttgagtgaccactttctgctctgttgacttagaacc

SEQ ID NO: 71127 - DNA, 120 bp, synthetic construct
  source 1..120: mol_type = other DNA
atggagctctaagtgttctatctggtctgcccgagttagtagagggataagaataaagaaaaaaaatgttactattcctctacggcccatcacacacatgggtgaatcaaatgggcaaag

SEQ ID NO: 71128 - DNA, 120 bp, synthetic construct
  source 1..120: mol_type = other DNA
gccaaaagatggaaagtcattgagagggagagggagagggacattgaagtgggggagagaaagagagagacataatataatgttgagctttaaatcagctctatctagacttagaaaagc

SEQ ID NO: 71129 - DNA, 120 bp, synthetic construct
  source 1..120: mol_type = other DNA
gaccctctttccctgagctgggaaaagacctcaaattactatttttttgtcatgcataccaatgcaactcttcttaatctaagcttttctcatctctaccgtactccagaggaaacctcc

SEQ ID NO: 71130 - DNA, 120 bp, synthetic construct; identical to SEQ ID NO: 71058
  source 1..120: mol_type = other DNA

SEQ ID NO: 71131 - DNA, 120 bp, synthetic construct; identical to SEQ ID NO: 71059
  source 1..120: mol_type = other DNA

SEQ ID NO: 71132 - DNA, 120 bp, synthetic construct
  source 1..120: mol_type = other DNA
agttagttcctcaaaaagatcaacaaaatcggcaaacctttaggtggatggactaagaaaaaagaaagaaacaagagtcaaattactaacatcagaaatgaaagtggggacataactact

SEQ ID NO: 71133 - DNA, 120 bp, synthetic construct; identical to SEQ ID NO: 71060
  source 1..120: mol_type = other DNA

SEQ ID NO: 71134 - DNA, 120 bp, synthetic construct; identical to SEQ ID NO: 71061
  source 1..120: mol_type = other DNA

SEQ ID NO: 71135 - DNA, 120 bp, synthetic construct
  source 1..120: mol_type = other DNA
tgtggaagaaatattagcactaacatgttcattgcagcactgttcacaacagccaaaatggggaaaaaacctaaatgacagattaatgggtaaagaaaatgtggtatatacacgcaatgg

SEQ ID NO: 71136 - DNA, 120 bp, synthetic construct
  source 1..120: mol_type = other DNA
ctctccctctcagggcatatttcaataacgttctctttttgatgaagtcacacaagacgcagaagcagtcctaaaactcaatttatggaagtcagttgagaccagactttggattgaacc

SEQ ID NO: 71137 - DNA, 120 bp, synthetic construct
  source 1..120: mol_type = other DNA
aaatacaaaaaaaaaaaaaaaaaatcagcggggcgtggtggtgggcgcctgtagtcccaggtactcgggggaggctgaggcaggagaatggcgtgaccccgggaggcggagcttgcagtg

SEQ ID NO: 71138 - DNA, 120 bp, synthetic construct
  source 1..120: mol_type = other DNA
acaagaatccccacattttcgttttgtgctgggccctgaaaactatgcagccagtcctgcccaggatgcttattttatttcattttcccagctttagaggggtaaaattgacaaataaaa

SEQ ID NO: 71139 - DNA, 120 bp, synthetic construct; identical to SEQ ID NO: 71071
  source 1..120: mol_type = other DNA

SEQ ID NO: 71140 - DNA, 120 bp, synthetic construct; identical to SEQ ID NO: 71088
  source 1..120: mol_type = other DNA

SEQ ID NO: 71141 - DNA, 120 bp, synthetic construct; identical to SEQ ID NO: 71087
  source 1..120: mol_type = other DNA

SEQ ID NO: 71142 - DNA, 120 bp, synthetic construct
  source 1..120: mol_type = other DNA
ggctgaggcatgagaatcacttgaacctgggaggcagaggttgcagtgagccgagatcacaccattgcactccagcctgggcgacagagcgagactcttgtctcaaaaaaaaaaaaaaat

SEQ ID NO: 71143 - DNA, 120 bp, synthetic construct
  source 1..120: mol_type = other DNA
agtgcctcaccacttggtgagacccttgaatattcaaaccagcgtgtaagcagagagttaggaactataaacagtaaattataacaagcatgaagtggaagcctgctgctgatcattcgc

SEQ ID NO: 71144 - DNA, 120 bp, synthetic construct
  source 1..120: mol_type = other DNA
attttggtgagcgcaacaggaaattctttgcaatgtccttgtgaatctgaggttacaaagactggctcaatctgtcacaggaagcatgctggaatgcctttgtccttctttctagttttt

SEQ ID NO: 71145 - DNA, 120 bp, synthetic construct
  source 1..120: mol_type = other DNA
gtagctgggactacaggtgtgcaccaccgcacctggctaatttatttaatttttgtggagacagggtcttgctttcttgcctcagcttgtctcgaactcctgacctcaagcaatcctccc

SEQ ID NO: 71146 - DNA, 120 bp, synthetic construct
  source 1..120: mol_type = other DNA
taacactgaatatttgaggaagaataaaagatgaaacactgattttaattagggtgacatagactctgctttaaacaacaacaacaaaaccaaaaccctctaatttcccaatctctcatg

SEQ ID NO: 71147 - DNA, 120 bp, synthetic construct; identical to SEQ ID NO: 71082
  source 1..120: mol_type = other DNA

SEQ ID NO: 71148 - DNA, 120 bp, synthetic construct; identical to SEQ ID NO: 71081
  source 1..120: mol_type = other DNA

SEQ ID NO: 71149 - DNA, 120 bp, synthetic construct
  source 1..120: mol_type = other DNA
gaactttcattatcttttgccctggagcaccagtaactgtctacaaagagcagagcaagggaagaagggcagtgagaaattaatctttgagtttcctccttggtgattcatccatttaga

SEQ ID NO: 71150 - DNA, 120 bp, synthetic construct
  source 1..120: mol_type = other DNA
ttttgaacgagtcaccagaaacagcatctccccaaaagccccctgaaggtctttgtcactacggaaagtggctttttttttttttttttttttttgagatggaatctcgctctgtcgcct

SEQ ID NO: 71151 - DNA, 120 bp, synthetic construct
  source 1..120: mol_type = other DNA
cattgcaatccaggtcttcgaagaggatcccgtagcgtaagtagtcatcgttatcctggcaggccaccgcctccagcacgaagccctgcatccagagcagcatggctgggtccagaggct

SEQ ID NO: 71152 - DNA, 120 bp, synthetic construct
  source 1..120: mol_type = other DNA
ctttaaagtagatctgaagcattcaaagtattttttggtatgcatttattttaaatcaatctctgatttttattatctatagggctattaagggatccagttgccgtttatttttcctct

SEQ ID NO: 71153 - DNA, 120 bp, synthetic construct
  source 1..120: mol_type = other DNA
tgaaaagatagaggcaaaaaaagtagggatggatgagaatactattcatccttcatgtaagtttaagactgtaaagggaagttccagtcagcctttgttctagtagatcggagcttgaaa

SEQ ID NO: 71154 - DNA, 120 bp, synthetic construct
  source 1..120: mol_type = other DNA
ttcatgtttataaacaagtgtccagataatgacggttcaagatttcatttctgctttttatttttgagacggagtttcactctggttgcccaggctggagtgcagtggcacaatctcggc

SEQ ID NO: 71155 - DNA, 120 bp, synthetic construct
  source 1..120: mol_type = other DNA
atatgtttctcattccatgtttcacttttcagggaatggctgcaccattcatatagcttctgaaactgaaaacctggaatgtatccatgacatttccctctccttcatcttacacatcta

SEQ ID NO: 71156 - DNA, 120 bp, synthetic construct
  source 1..120: mol_type = other DNA
tcagtattttttttttttttgacggagtctcgctctgtcactcaggctggagtacagtggtgcactctcggctcactgcaacctccgcctcccaggttcaagcaattctcctgcctcagc

SEQ ID NO: 71157 - DNA, 120 bp, synthetic construct
  source 1..120: mol_type = other DNA
cagttattttcttctctggaccattattaaccattagagctagcatttgtccccaggtcccgggcactgtgcaagtcttcacctacattatcctactacctcataagatagtttggatgt

SEQ ID NO: 71158 - DNA, 120 bp, synthetic construct
  source 1..120: mol_type = other DNA
tgggcaacatagtgagaccccagatctactaaaaatttaaaaattagctgggcatggtggtgcatgcccatatgtctggaggctgaggcaggaggatcgcttgagcccaggatttggagg

SEQ ID NO: 71159 - DNA, 120 bp, synthetic construct
  source 1..120: mol_type = other DNA
cttggtgacagacacctgtaggcacatccgtgatgcccagtgcccaacacagggaactggacaaacgtttcatgcacgactcttttttcccttcttggctaccttgaggaccttgattat

SEQ ID NO: 71160 - DNA, 120 bp, synthetic construct
  source 1..120: mol_type = other DNA
ctcggcctcccaaagtgctgggattacaggagtgagccagcgctcctggccaattttttaaggcaacgttttcagcccatggccagggtaaggcacagctagtaccaagatctggcttca

SEQ ID NO: 71161 - DNA, 120 bp, synthetic construct
  source 1..120: mol_type = other DNA
gaacccgggaggcagaggttgcaatgagctgagatcacaccactgcactccaacctgggtgacagagcaaaactccgtctgaaaaaaaaaaaaagaaatattaagtaacttgtctgaggc

SEQ ID NO: 71162 - DNA, 120 bp, synthetic construct
  source 1..120: mol_type = other DNA
ctgcaatggcgtgatcctggctcaccgcaacctccacctcctgggttcaagcaattctcctacctcagcctcccgagtagctgggattacaggtgcgtgccaccatgcctggctaatctt

SEQ ID NO: 71163 - DNA, 120 bp, synthetic construct
  source 1..120: mol_type = other DNA
ttatctaagattttttttttttttttttttaagagacagggtctttctctgtcgcccaggctggactgcagaggcacaatcatagctcacggcagccttgaactcctgggctcaagcgat

SEQ ID NO: 71164 - DNA, 120 bp, synthetic construct
  source 1..120: mol_type = other DNA
gagggacctgaggtttttaatcgtaggggtttttttaatctttagaagtggttggttatgtaaaatattattatttgtttttttttttgagactggagtttgctctgtcacccaggctgg

SEQ ID NO: 71165 - DNA, 120 bp, synthetic construct
  source 1..120: mol_type = other DNA
ggtaaagaaaagtcattgggacacactgttgtctccacatgccactgtgtctgtctgcaaatgtaggcaggctggggtcctgccccagggaagacagagtcataacagagtaataaagaa

SEQ ID NO: 71166 - DNA, 120 bp, synthetic construct
  source 1..120: mol_type = other DNA
cttagactctctcaacattcaatttctcatgtgttggctttttcagatcaccccttctgcaagaaagcctctttgcaaccgggtaagtttgcttgttttccttgcttttggacatagtct

SEQ ID NO: 71167 - DNA, 120 bp, synthetic construct
  source 1..120: mol_type = other DNA
ttaatatttaccagtgaccaaaagatgtgaagtagcaaaacggctcctgaccccattgccagctagactgtgtggaaactcggttcataccagccattctaggggtggggtgagttgttg

SEQ ID NO: 71168 - DNA, 120 bp, synthetic construct
  source 1..120: mol_type = other DNA
ttgcagttgtcacctattttcaggacataacaccctgacttaggagccattccgatcatttctaattcaatagatgcgcccagcattcagattgccttttcaggatctttaaagtcgatg

SEQ ID NO: 71169 - DNA, 120 bp, synthetic construct
  source 1..120: mol_type = other DNA
gctgccatatgactgatctttttttgttaaatgtgagatactttttaaaaaatatttaacaatgcattgaggcctagtagcatgttatcttgctgcagaagagatgggagtctacttctg

SEQ ID NO: 71170 - DNA, 120 bp, synthetic construct
  source 1..120: mol_type = other DNA
tttttttttttcctgagatggggctttgctcttgttgcccaggctgcagttcaatggcacaatctcaactcactgccttttgggttcaagcaattctcctgcctcagcctcccaagtagc

SEQ ID NO: 71171 - DNA, 120 bp, synthetic construct
  source 1..120: mol_type = other DNA
tcggcctcccaaagtactgggattacaggagtgagccaccctgccagcctcatgtcattctttgtgtgtgtgtgtgtgtgtgtgtgtgtgtgtgtgtgacagagtctcattctgtcgctc

SEQ ID NO: 71172 - DNA, 120 bp, synthetic construct
  source 1..120: mol_type = other DNA
tgattgaattcccaccaagatttccatattatcacagtatgcttttaatcttcgaagatattaaatatttgttctcatcatagctaaaatgcaacgcaaatcccatctgagatgtgggtc

SEQ ID NO: 71173 - DNA, 120 bp, synthetic construct
  source 1..120: mol_type = other DNA
caccatgcccagctaatttgtgtatttttagtagagtcggggttttaccatgttggccaggctagtctcaaaacccgacctcaaatgatccacccgcctcagcctcccaaagtgctggga

SEQ ID NO: 71174 - DNA, 120 bp, synthetic construct
  source 1..120: mol_type = other DNA
tgggaaccagctgaaaaatgagactgctagaagggctggatggttgatgcttaaagagcaccctcttctgagggtagagggagatagatggagatgtaggccatttagaggggcagcaaa

SEQ ID NO: 71175 - DNA, 120 bp, synthetic construct
  source 1..120: mol_type = other DNA
cagtgagccgagattgcaccactgcactccagcctgggcgactgagtggagcggaactctgtctcaaaaaaaaaaaaaaaaatttttttttttagatcatcagctattgttagtgttagt

SEQ ID NO: 71176 - DNA, 120 bp, synthetic construct
  source 1..120: mol_type = other DNA
ggcaatacaggtgtgagccactgcacctggccagtagttatcttttctttagttatttacttgttttttaaattgatgtataatattggatgcatttattatatatcacatggtaaaaga

SEQ ID NO: 71177 - DNA, 120 bp, synthetic construct
  source 1..120: mol_type = other DNA
tcccactcttcccagccagtctctttcttatcataggttagcttgcttattctggaatttcgcgtatacagatgcatgccatgccataggtactcttttgtgtctgctttattctgctca

SEQ ID NO: 71178 - DNA, 120 bp, synthetic construct
  source 1..120: mol_type = other DNA
gtgtgagtagacgctggacccgcggggtttcttcctttttactgggctgtgtcacgcggcatgaaattacacagctcaggcctgtaatcccagcactttagggggctgaggtgggcagat

SEQ ID NO: 71179 - DNA, 120 bp, synthetic construct
  source 1..120: mol_type = other DNA
caaccatgtagccatccgtccatcaacctgtatctcaggaacaaatgtacatacattcattttaagcatgcatggtacatttacaaaaattaacctgacttattttgttccagcaaatct

SEQ ID NO: 71180 - DNA, 120 bp, synthetic construct
  source 1..120: mol_type = other DNA
tccatagttttgttaatcctgttttttgtttgtttgtagttgttgctgtttttgagacagagtctcgctctgtcgtctaggctggagtgcagtggtgtaatctcggctcactgcagactc

SEQ ID NO: 71181 - DNA, 120 bp, synthetic construct; identical to SEQ ID NO: 715
  source 1..120: mol_type = other DNA

SEQ ID NO: 71182 - DNA, 120 bp, synthetic construct
  source 1..120: mol_type = other DNA
gaaaccccatctctactacaaatacaaaaacttagctgggcatggtggcgggcgcctgtagtcccagctactcgagaggctgaggcaggagaatggcatgaacccaggaggcggagcttg

SEQ ID NO: 71183 - DNA, 120 bp, synthetic construct
  source 1..120: mol_type = other DNA
atatgggaccggccacctcgtagctgtttcactcgcatccagagggccacctgctgcgttctcctcatctgcctcttcctgggcgccaacgccgtgtggtacggggctgttggtgactct

SEQ ID NO: 71184 - DNA, 120 bp, synthetic construct
  source 1..120: mol_type = other DNA
gacatgattaagttacacggaaagaactgtaacttgtgacatgcaaacatggctgcacacgcctcagtccacaccacaaccagtgacccgcgctgcacacctgtccacgcctcagtcacg

SEQ ID NO: 71185 - DNA, 120 bp, synthetic construct
  source 1..120: mol_type = other DNA
ggaggtattgaagaaacagccacggggagggtgctggcacctccgtctgagagacgagctatgcagtcaggatcgcgggtggatgcatggtctcccacagtggtagcgatgctcatgtca

SEQ ID NO: 71186 - DNA, 120 bp, synthetic construct
  source 1..120: mol_type = other DNA
ccaggccggcccgcagagctcaccccggggaaatgaagaaggtgtagggccggtggtcggcaccctggagggactctgggcggatcctcctgctagccgagcagttgcgctcattgggcc

SEQ ID NO: 71187 - DNA, 120 bp, synthetic construct
  source 1..120: mol_type = other DNA
acgcgggagcgcgtgaggatgcgcatgagggcagaggtcaggttgtaggcctgggacgccaccatccgcaatggtgactcggctcccagctctgagcgctgcggtgcccgcacgtctgag

SEQ ID NO: 71188 - DNA, 120 bp, synthetic construct
  source 1..120: mol_type = other DNA
ggtaggagagcgggaggggaatgagaagtgaaaaattacctattggatacaatgttcactattcgggtgatgtttaccctaaaatcccagaataggcatgtaagaaatcttcgcttgtac

SEQ ID NO: 71189 - DNA, 120 bp, synthetic construct
  source 1..120: mol_type = other DNA
tccaatacctgtaggccccatcccaccccagctatactcacactcatttcttgtttgtttgtcttcaagctccattcagagagaatggagatgtcttcttggtctaaattaaagttgaag

SEQ ID NO: 71190 - DNA, 120 bp, synthetic construct
  source 1..120: mol_type = other DNA
ctctctctcttttttttttttttttttggagacaaagtctcactctgtcacccaggctgaagtgcagtggcacgatcagagctggctgcaacctctgcttcccgggctcaagcaatcctc

SEQ ID NO: 71191 - DNA, 120 bp, synthetic construct
  source 1..120: mol_type = other DNA
cttctccaaaaaaaaaaaaaaaaaaaaaggatattgttctcagaaggaggtcatagactccgccagatgccaaaagggtacatggtaccaaaaagaggtcagggtccagcgtggggttaa

SEQ ID NO: 71192 - DNA, 120 bp, synthetic construct
  source 1..120: mol_type = other DNA
ctcacaaaaatctttaaaactgtgtattcatttcctattgctgctgtaacaaattgccacaaacttagtggcttggaacaatccaaattattatcttacagtgttggaggtcagaagtcc

SEQ ID NO: 71193 - DNA, 120 bp, synthetic construct
  source 1..120: mol_type = other DNA
gtgcaatggtgtgatcttcggctcactgcaaccgctgcctcccgggttcaagcaattctcctgcctcagcctcccaagtagctgggattacaggcacccaccaccacgccccgctaattt

SEQ ID NO: 71194 - DNA, 120 bp, synthetic construct
  source 1..120: mol_type = other DNA
gcagatcacttgaggccaagagttcaagaccatcctgaccatatggcaaaaccttgtctttactaaaaatacaaaaactagactagccaggtgtggcggcatgcacctgtaatcccagct

SEQ ID NO: 71195 - DNA, 120 bp, synthetic construct
  source 1..120: mol_type = other DNA
gtatgtggggaaaacaggtagaggtataagcaaaactgggcatgagttgtccattgttgaagccaggtagtgagtcctgagaattcattgtgctattcttctactttcatatacctttgg

SEQ ID NO: 71196 - DNA, 120 bp, synthetic construct; identical to SEQ ID NO: 71107
  source 1..120: mol_type = other DNA

SEQ ID NO: 71197 - DNA, 120 bp, synthetic construct
  source 1..120: mol_type = other DNA
caggagagtgacatgatcatcttcactgattgctgttgaaaaagacggttctactctttgaccactggctttgtaaagaggttttcaaggctcagagatggcttgtattgttatattagg

SEQ ID NO: 71198 - DNA, 120 bp, synthetic construct
  source 1..120: mol_type = other DNA
tcagccctgttctgtgcccttactggagaagtgttgagatcgtttggaacaaaagaggcattctggcttttgaaattttcagtgttttcgcattggtttttcctcatcttcatggttttg

SEQ ID NO: 71199 - DNA, 120 bp, synthetic construct
  source 1..120: mol_type = other DNA
ctttccacagaagtggacatttctcctgcctcactggagttccaggtgctgccggagtatgtaaaaattcctgcagctcagtgcctgcccaaacagccgccgacgggagcagctgtcatt

SEQ ID NO: 71200 - DNA, 120 bp, synthetic construct
  source 1..120: mol_type = other DNA
ctgcttatcaaaataagttggattgtcaatttgttgagctcagcaaatgcatttcctgagcccttgtgagtaaagctctgtgctggttacactgcgtaactagtgatacagaggatgagt

SEQ ID NO: 71201 - DNA, 120 bp, synthetic construct
  source 1..120: mol_type = other DNA
agggcaaaacttagaggctgcagggaggttagcagagtgagatttaatcattgtcagataagtgtacagtcaagaaaacaccatgaaacattctctctgtgaggtgcatagttacctaca

SEQ ID NO: 71202 - DNA, 120 bp, synthetic construct
  source 1..120: mol_type = other DNA
tgattcttacatgaatcaattattattagtattagtatcatttgaaacaaagtcttaccctgtcacccaggctggagtacagcagcacgatcttggatcactgcaacctccaccacctgg

SEQ ID NO: 71203 - DNA, 120 bp, synthetic construct
  source 1..120: mol_type = other DNA
ctcccaccctccaccctctgaaagggtgtgttgttcccttctatgtgtccatgtgttctcatcatttagctcccacgtataaatgagaacatgtgacagctttcattttaatagttatgt

SEQ ID NO: 71204 - DNA, 120 bp, synthetic construct
  source 1..120: mol_type = other DNA
cgagccatcgcacccagccaaagattaccttgttttaataaacaaaaacaacacctgtttactgtccattcttctctcattggattgcaagctaaacaggctccttgatgctctcatgtg

SEQ ID NO: 71205 - DNA, 120 bp, synthetic construct
  source 1..120: mol_type = other DNA
acagcccctctccccataccttgccctgtgcctcatctttttcatctggctgttcatctgtatcctttgtaatatcccttataataaatgggtaaacattaagtatggtgatttcctgag

SEQ ID NO: 71206 - DNA, 120 bp, synthetic construct
  source 1..120: mol_type = other DNA
tccttactcaccacccaatccatgagttcattaacttctccaggctcagggatgattgatgatggaaacacatcacttttaaaggaaagctataccctacccacagtataaaatctgcct

SEQ ID NO: 71207 - DNA, 120 bp, synthetic construct
  source 1..120: mol_type = other DNA
gagctgtgtaggctccaggcctagggtgggtcttgcccagccatgcaagggtgagggcagtgcagtcggctgccttggggacgcggcacaggagacatgaggtacaagggtccccctgct

SEQ ID NO: 71208 - DNA, 120 bp, synthetic construct
  source 1..120: mol_type = other DNA
caccaagttcgttggggcccaaaggccacagggtgctgaggtggtaggggactggagtgtcagtgctgccccaagcgtgcgaaaacagtgcccaggctcagccccaactttgtgggcact

SEQ ID NO: 71209 - DNA, 120 bp, synthetic construct
  source 1..120: mol_type = other DNA
tgaaattaatgcttccctcgtgaggccatacttcttttctgtgtctcgggtgcttggcactaagttggcaatgaaggaaatgacaagaacatttctgccacaaatttacgtacagatact

SEQ ID NO: 71210 - DNA, 120 bp, synthetic construct
  source 1..120: mol_type = other DNA
ttagatgagaatcccactgccatcatgggaaggctaagaaggggcttggtaaaatacacctctctatctcccaatttagtagagggacagctggtcccaggggatgaatttattacacag

SEQ ID NO: 71211 - DNA, 120 bp, synthetic construct
  source 1..120: mol_type = other DNA
acgaaatagggaagcatagctggcagaaatattcacactcacctgggcggtgccgaagcctcccactgtcagtaagctttgagtttcctagatcttatctatgtcatggatgtgagcatg

SEQ ID NO: 71212 - DNA, 120 bp, synthetic construct
  source 1..120: mol_type = other DNA
agtcccaggccatccgaagttatcctagggcctctcatgtgtgcagtaagagtggcaagacaaaatgggggaaaataattcagtcaactgagaagaaaatcctttttttccagaaaaaca

SEQ ID NO: 71213 - DNA, 120 bp, synthetic construct
  source 1..120: mol_type = other DNA
atcttgttcaagcaagagaaagccaaatttcacccttgcattagtcaactattaatgtcaacctcattttttggtaatgaaaccttacagaaaaatccatccaatctgagtttgaccatg

SEQ ID NO: 71214 - DNA, 120 bp, synthetic construct
  source 1..120: mol_type = other DNA
gcattaccgcttggagtttgatgggccatccctcttgtctcttctcagctgcagtcataaatcactggttggttcacaagaatatgctttactcaattgtcaaaagctgcaaataactca

SEQ ID NO: 71215 - DNA, 120 bp, synthetic construct
  source 1..120: mol_type = other DNA
ttcgggaagaggctctgcttggggccacccagggccacatccccaggttccaccccacatcagggtgactactaagcctgacactcctgatggccagtcctggaacctgcaattcactcc

SEQ ID NO: 71216 - DNA, 120 bp, synthetic construct
  source 1..120: mol_type = other DNA
tgtcaaagaattagtggatgtgatgtaaaactaccacaatacctcctcaatgtaatcatgtcctgaggcaacacgttcaaaatccacatttaggatccaccgcactaattcatcgacggc

SEQ ID NO: 71217 - DNA, 120 bp, synthetic construct
  source 1..120: mol_type = other DNA
tgaggaggtatccaacttacactaataatggagcaatgaccatctcagtctaaggcaaggtttgtatgttcagagggctgcatagaaactgctatagcagcttcccaaaacattagagaa

SEQ ID NO: 71218 - DNA, 120 bp, synthetic construct
  source 1..120: mol_type = other DNA
caaggacctggattccccaccccaggctgtgaggaggcacagctgaagctgcatgctccatggagccagcgggagccagggacaaacaggagccccaccccttctaagttggtgaggtga

SEQ ID NO: 71219 - DNA, 120 bp, synthetic construct
  source 1..120: mol_type = other DNA
tcacacaatagctccctttttaccagggatccttagataggtctctgagagagatccaactgccgttttcctcaaaacaacaccccatgtcagcatgaagcagttaagagtggtcatcat

SEQ ID NO: 71220 - DNA, 120 bp, synthetic construct
  source 1..120: mol_type = other DNA
acttttgtccttcccttctttttttggaagtttattcacaaggcaaacaaaaatcttccattacactaaaatcttgttcaagcaagagaaagccaaatttcacccttgcattagtcaact

SEQ ID NO: 71221 - DNA, 120 bp, synthetic construct
  source 1..120: mol_type = other DNA
aggaatctctctcaaaatctgtgcctgtctattaggccttagaaactgcatgttttcctagttctgtttcttgaagggctcaaccctgaggccagtaatccaattaagagattagcacat

SEQ ID NO: 71222 - DNA, 120 bp, synthetic construct
  source 1..120: mol_type = other DNA
tctggaaagaggggaaaaaggcatccctttgttcctttttctttctaactaacacccagggtacataagggagggaaaagaaggcattcctttctttcttttgaccttatatccctgagt

SEQ ID NO: 71223 - DNA, 120 bp, synthetic construct
  source 1..120: mol_type = other DNA
gactgctgcaaatatggtagcctagggcactttaggacagcagggggaagccactttgaccctgtcaagtttgcagtgaggaccattggaaagcgaactgtccccagagatgtgggtcac

SEQ ID NO: 71224 - DNA, 120 bp, synthetic construct
  source 1..120: mol_type = other DNA
atgttggccaaggtccagattatcctgcaaagcaaagaaggcctgcatatatgggacctcagaacatttgtccctgtgtttacagaaaaggaccagctgtaggatggtattgaaattaat

SEQ ID NO: 71225 - DNA, 120 bp, synthetic construct
  source 1..120: mol_type = other DNA
tgtctgccctcgttgcctggcctctccccatcccagtgcccacaaagttggggctgagcctgggcactgttttcgcacgcttggggcagcactgacactccagtcccctaccacctcagc

SEQ ID NO: 71226 - DNA, 120 bp, synthetic construct; identical to SEQ ID NO: 71207
  source 1..120: mol_type = other DNA

SEQ ID NO: 71227 - DNA, 120 bp, synthetic construct; identical to SEQ ID NO: 71206
  source 1..120: mol_type = other DNA

SEQ ID NO: 71228 - DNA, 120 bp, synthetic construct
  source 1..120: mol_type = other DNA
cagtccctctgggtcattctaaggacttcggattctatcctgaatgcatgaggaaacccttgaaggccttaagcagagagtgacatggtctgattttcttttaagctgtagctttgtttt

SEQ ID NO: 71229 - DNA, 120 bp, synthetic construct
  source 1..120: mol_type = other DNA
ttcctgggttcaagtgattcgcctgccttgctgggatgacagacgtgcaccacaatgtccggctaattttgtatttttagtagagacatggcttcaccatactggccaggctggtcttga

SEQ ID NO: 71230 - DNA, 120 bp, synthetic construct
  source 1..120: mol_type = other DNA
agttgtgatgtttgttcctgcgttatggttttgttggcagggcagcctttaaggacctgtatattttcttctagactctatatattccctgtgagtattagttgtatggtcaaactggca

SEQ ID NO: 71231 - DNA, 120 bp, synthetic construct
  source 1..120: mol_type = other DNA
aaatgtatacactaatggaactactgccataatcaagatataggaatttccataagcccaaaatttcttgtaaccctttgcagttaatcagtatttcaaccctcaggttcaaggagccac

SEQ ID NO: 71232 - DNA, 120 bp, synthetic construct
  source 1..120: mol_type = other DNA
ttcctcacaacatgcagtcagcattatgttctggccacttactatgagtgtgagatgcttttttttttttttttttgagacaggttctcgttctgtcatctaggctggagtgctcactgc

SEQ ID NO: 71233 - DNA, 120 bp, synthetic construct; identical to SEQ ID NO: 7918
  source 1..120: mol_type = other DNA

SEQ ID NO: 71234 - DNA, 120 bp, synthetic construct
  source 1..120: mol_type = other DNA
aattatttattgaccaattcatactaggcattttgttcaaaactgtacacatacttggatatcatattttcatcataatccttaaggcaatgttattatccataagaaacaggtaagaaa

SEQ ID NO: 71235 - DNA, 120 bp, synthetic construct
  source 1..120: mol_type = other DNA
tctaccctgtctcagtattcttgctgcatcccattgttatgttgatttcttttctcttactggggcagcatcttggcttttcattacacttaagaccagtttcacatccctacgtccaaa

SEQ ID NO: 71236 - DNA, 120 bp, synthetic construct; identical to SEQ ID NO: 7915
  source 1..120: mol_type = other DNA

SEQ ID NO: 71237 - DNA, 120 bp, synthetic construct
  source 1..120: mol_type = other DNA
tcagaattcacagcccctgaggtctgactctgaatcctgggccactttcccaagccttgcggcctctcctgtaaaacactgcactggtgcatgaagtagtgattttctatacagtcagga

SEQ ID NO: 71238 - DNA, 120 bp, synthetic construct
  source 1..120: mol_type = other DNA
agaaggctgtgtgtgtgtgtgtgtgtgtgtatgtttgtttgtgtgtgtgtgtgtgtgtgtgtgtgtgtatatatatatatattcttctttctcttggccacagacatttccccaaacatg

SEQ ID NO: 71239 - DNA, 120 bp, synthetic construct
  source 1..120: mol_type = other DNA
gatctgattcccacgcacaggctctgtatcctgtcacagttcgcatttagaacctatatctttctcttcgaacaggacaaacaaccttgtcccacagtattccatacattagggacttca

SEQ ID NO: 71240 - DNA, 120 bp, synthetic construct
  source 1..120: mol_type = other DNA
gctgccacatggtgtgtctaagctgggttgtagttaacatactgtggccatggctatacaggcatttgagccattgtagacttcagagatggtgtgccttctagtttttttaaaatttta

SEQ ID NO: 71241 - DNA, 120 bp, synthetic construct; identical to SEQ ID NO: 7912
  source 1..120: mol_type = other DNA

SEQ ID NO: 71242 - DNA, 120 bp, synthetic construct
  source 1..120: mol_type = other DNA
caagtaccacaataaagaagacaacattgttaaaggggcaatttgcacttggatgaatggatgagacagttctattcgtcacttcctattttcccttgatccgtggtgtccagatgtcac

SEQ ID NO: 71243 - DNA, 120 bp, synthetic construct; identical to SEQ ID NO: 7910
  source 1..120: mol_type = other DNA

SEQ ID NO: 71244 - DNA, 120 bp, synthetic construct
  source 1..120: mol_type = other DNA
atcactttgcttttctgtaaataaattaagagaagaccagccaggtgaacctgatcacattcacacatgcacaaccttgtgtccaaatctacataggggcataaatacacgcagtgcgag

SEQ ID NO: 71245 - DNA, 120 bp, synthetic construct
  source 1..120: mol_type = other DNA
ctcctaccacccttattggagcactttgtactcttttgaagacaagcaagtcagcttggctcttgtagacagtgagtactccattgtgaacatgataaatctccaattggtgtcccaggt

SEQ ID NO: 71246 - DNA, 120 bp, synthetic construct
  source 1..120: mol_type = other DNA
gttttcttccctgggcctaggaatgcaatctccctgttctggtagatcattatcccaacatcatctgtcctgattttgtgcaaacagttatgcaaatttttcacaccagttgaaggcaaa

SEQ ID NO: 71247 - DNA, 120 bp, synthetic construct
  source 1..120: mol_type = other DNA
tctgggacttcctgctccttcacctctggcagctcctggctgagcctggggtaaagaagacagaagataaacaccagagagaaccaacacccagctggttctatagggaggcccttagga

SEQ ID NO: 71248 - DNA, 120 bp, synthetic construct
  source 1..120: mol_type = other DNA
tatataatgaaataattatacaactcaccataatgcagaatcagtgggagccctaagattgttttcttgcaactagatggtctcacctgggggtgacagttactgggagacagtgacaga

SEQ ID NO: 71249 - DNA, 120 bp, synthetic construct
  source 1..120: mol_type = other DNA
cctgagcctggttagttgaggctgcagtgagccatgattgcaccactgcactccagcctgagcaacaaagtgagaccctgtgtcacacacacacaaagaaagaaactagcaacaaaaatg

SEQ ID NO: 71250 - DNA, 120 bp, synthetic construct
  source 1..120: mol_type = other DNA
taacccttgacccgttcttacacccctgtgtgtggagaaaaataaccattcctctcctgtgctctgatgcctctctagaactttccctctgggcacaggaaagagatgaatagtaacaga

SEQ ID NO: 71251 - DNA, 120 bp, synthetic construct
  source 1..120: mol_type = other DNA
gctgtgggtggaggagagaatggggcctcccatgcttcctcagggtcaagttgaaatccatgatgctccaacccagtgaggtgagcaaaggcctggagcttaggaccgaatctgctctca

SEQ ID NO: 71252 - DNA, 120 bp, synthetic construct; identical to SEQ ID NO: 7906
  source 1..120: mol_type = other DNA

SEQ ID NO: 71253 - DNA, 120 bp, synthetic construct
  source 1..120: mol_type = other DNA
tcatccccagagagggctctaaaaccagctctgaaaagaaaaccacagccaatgggatccgctgccatccatgatcttaccgtaactttctcttccacccagaggacatcaaatcaggaa

SEQ ID NO: 71254 - DNA, 120 bp, synthetic construct
  source 1..120: mol_type = other DNA
gagagaggttagaatgacgtacctcatgatgtatgcagttttcaagtcctgccctctgcatgtacttttggagtgatgtccctttagaatgtcataaatgttccccagttaacatcagct

SEQ ID NO: 71255 - DNA, 120 bp, synthetic construct
  source 1..120: mol_type = other DNA
gctgcaagagattgtatatgaatacttcttcatgcctctcttcacactggcataaaatattaaaaagaaacctttctcataatgtacttggggaaaacaataagcgggacgggagactgt

SEQ ID NO: 71256 - DNA, 120 bp, synthetic construct
  source 1..120: mol_type = other DNA
ttcatcctgccatcctttgcgtccttccagcagtatttggtatctgtaggggagagagagaaaaaaaatcaaatgagcatttttgtcaggtccacctgatggctgagtctggagggattg

SEQ ID NO: 71257 - DNA, 120 bp, synthetic construct
  source 1..120: mol_type = other DNA
agagcaaggccctgtctcaaaaaaaaaaaaaaaaaaaaaaaaggaacatgacttaatacattcattttggagggtaagtctctcaaaataggcctttcactgggggaaaatggtaaaaat

SEQ ID NO: 71258 - DNA, 120 bp, synthetic construct
  source 1..120: mol_type = other DNA
ttaaaaaaaaaaaaaaaaaaaaaaaaaaaaaaaaattctgggtttctggcatctcaaaaaaaaaaaaaaaaaaaaaaaaaaggaaaggtcagggcacatggctgctacagtcctctatta

SEQ ID NO: 71259 - DNA, 120 bp, synthetic construct
  source 1..120: mol_type = other DNA
gagcttctgcacagcaaaagaaactaggatcagtgtgaacaggcaacctagagaatgggagaaaatttttgccatctacttatctgacaaaaggctaatatccagaatctacaaagaaca

SEQ ID NO: 71260 - DNA, 120 bp, synthetic construct
  source 1..120: mol_type = other DNA
aacaattgctggctttgcaattctctttcctccaaaatcgccaaggcctcaatttactcattgctgaaaaaggacgactctgtatatttttaaatgaagagtgttgtttttacctaaatc

SEQ ID NO: 71261 - DNA, 120 bp, synthetic construct
  source 1..120: mol_type = other DNA
aaaacactgctcttaactccaccgcctatccccaaatctataagaaccagtgataatcacaccaccctttgttgactcctttttcggactcagcccgcctgcacccaggtgaaataaaca

SEQ ID NO: 71262 - DNA, 120 bp, synthetic construct
  source 1..120: mol_type = other DNA
tcctatttgtccctttactgtttagtgcgtctcgcttgactagaagctccatgaaagcaagagaccctacctgcctccttcgccactagacccccagggcctggtatgtggtgatcgctc

SEQ ID NO: 71263 - DNA, 120 bp, synthetic construct
  source 1..120: mol_type = other DNA
tttttttttttttttgagacagagtctcgctctgttgcccaggctgcagtgcaatggtatgatcttggctcactgcaagcaacctctgattttagtattattagtagagacagggtttca

SEQ ID NO: 71264 - DNA, 120 bp, synthetic construct
  source 1..120: mol_type = other DNA
ctccaggggctgttgagttttgcctctaccattccaagtagtctctgctccagaccaagtcccaccatctggcagtcatgtcagtccaaccacagtcatatcagggcacttccagtcatt

SEQ ID NO: 71265 - DNA, 120 bp, synthetic construct
  source 1..120: mol_type = other DNA
tactcggaaggctgaggcaggagaatggcatgaacctgggagacggagcttgcagtgagccgagatcgcgccactgcacttcagcctgggcgacagagtgagactccatctcaaagaaca

SEQ ID NO: 71266 - DNA, 120 bp, synthetic construct
  source 1..120: mol_type = other DNA
ggatacacacctcttcttctttttttagagacagggtctagttctgtcacccaggctggagcccagtggcacaatcatagcttactgtaacctcaaactcctgggctcaagtgatcctcc

SEQ ID NO: 71267 - DNA, 120 bp, synthetic construct
  source 1..120: mol_type = other DNA
ttatgttcagaacacaaaaataagtcgtacgtcttcattaaaaacaggtgaagaatttgaacaaacatttgcaaactaaaatacaaatgaaatacactcaacatcattaaacaagaaaat

SEQ ID NO: 71268 - DNA, 120 bp, synthetic construct
  source 1..120: mol_type = other DNA
actatacccttacatcatttatcttctactcacaagaggcaagcacacagtaagagaaagccttttgttttgaagggaaatcttcttcagaatattaagtctaatttatcaatatactta

SEQ ID NO: 71269 - DNA, 120 bp, synthetic construct
  source 1..120: mol_type = other DNA
ggcaagcagcattcatatatcatatgacttctacaactaaaatgaagctattagcactagtatttagtaatctagtaactctccttccagccctcttcaccccatgtatgtttatcacat

SEQ ID NO: 71270 - DNA, 120 bp, synthetic construct
  source 1..120: mol_type = other DNA
ttaataacatcttatcaagtgttccatttgtgataaagaacttaattaacgagccacatcaagatgaaaatcaagaaaaatatttagctgaaacactactttgtcctttatcaaacaaaa

SEQ ID NO: 71271 - DNA, 120 bp, synthetic construct
  source 1..120: mol_type = other DNA
ctcagtcctcagaaaaaacaaacaaataaacaaaaaaacacaggctttaatttcctctacccctacccccaatccaccatacactgccgaaattctgtctataccaactttgactgcttt

SEQ ID NO: 71272 - DNA, 120 bp, synthetic construct
  source 1..120: mol_type = other DNA
tgtctcaaaaaaataaataaataaataaaaattttcccccataaacaaattttcagaattacctttaaagttctaaactttgcacggaagaaatagagttttaacgtgttctaacatgaa

SEQ ID NO: 71273 - DNA, 120 bp, synthetic construct
  source 1..120: mol_type = other DNA
agtgtgagttttttatgaccaattcacatttatcaagtatcctctgtctacccatcatttaaaaataaaaaatcccaacatgaaagatctttcattttaggggaaaaaaatatatatttt

SEQ ID NO: 71274 - DNA, 120 bp, synthetic construct
  source 1..120: mol_type = other DNA
caaaactgcatgtaaagtcaagggaatcttaaaattttctttcccagataaaatagtcaaagaaatgtcttaccctgttctatgagagttcccatacaaaataaaactaataacatcaga

SEQ ID NO: 71275 - DNA, 120 bp, synthetic construct
  source 1..120: mol_type = other DNA
cgggaccccatctctactaaaattacaaaaagtagctgggcatggtggcgcacacttgtaatcccagctactcgggaggctgaggcaggagaatcgcttgaacctgggaggcagaggttg

SEQ ID NO: 71276 - DNA, 120 bp, synthetic construct
  source 1..120: mol_type = other DNA
tccctaattacatccatttctttctttgtttctttctttttttttttttttcttttgagacagagtctggctctgtagcccaggctggagtgcggtggtgtgatctcagctcactgcaac

SEQ ID NO: 71277 - DNA, 120 bp, synthetic construct
  source 1..120: mol_type = other DNA
ggagaaaccttaaaggcacactggtaagtgaaagaagccaactgaaaaggctacatactatatgactccaactacatggcattctggaaaaggcaaaacgatggagacagtaaaaagatc

SEQ ID NO: 71278 - DNA, 120 bp, synthetic construct
  source 1..120: mol_type = other DNA
caaggggaagcatctctacaaactagaatgtgtggcttatgagaggtagatcagctttaaacgtgggctgtgaaaaaagacattctaggtgtgggggcaaagaaaaaacaacgcagaagc

SEQ ID NO: 71279 - DNA, 120 bp, synthetic construct
  source 1..120: mol_type = other DNA
tttcaaaatattgcaatgggcttgtaatttctgcttaaatgtcaggaggtctgagccattttaaaataaatctagcacaatttaagattttttcttaaccaaaattttaagaaacagctt

SEQ ID NO: 71280 - DNA, 120 bp, synthetic construct
  source 1..120: mol_type = other DNA
ccatatactttcctaccagtacaaactacaaataacttgggtaagtcctgtctgtacttactctacccacctactagtaatttcctctgaaaatatatatttagctaacaagtcatgttc

SEQ ID NO: 71281 - DNA, 120 bp, synthetic construct
  source 1..120: mol_type = other DNA
attgcttgaacccaggaggcagaggttgcagtgagctgagattgcaccgctgcactccagcctgggaaatacagccagactccatctcaaaaaaaaaaaaaaaaattaataaataaataa

SEQ ID NO: 71282 - DNA, 120 bp, synthetic construct
  source 1..120: mol_type = other DNA
aggctgaggcaggagaatcactggagcccgtgaggcggaggttgcagtgagccaagatcaccccattgcactccagcctgggtgacagagcaagaccctctctcaaaaataaaattacat

SEQ ID NO: 71283 - DNA, 120 bp, synthetic construct
  source 1..120: mol_type = other DNA
cccagcactttgggaggccgaggagggcagatcacggggtcaggagttggagacctgcctggccaacatggtggaacctcgtctctactaaagatacaaaaaattagccgggcgtggtgg

SEQ ID NO: 71284 - DNA, 120 bp, synthetic construct
  source 1..120: mol_type = other DNA
taaacctctttttctttataaattacccagtttccagtatttcttcatagcagtatgaaaagtaactaatacactacccgagacatcttaggagatttgtaatagctgtaatgccaggtc

SEQ ID NO: 71285 - DNA, 120 bp, synthetic construct
  source 1..120: mol_type = other DNA
aaatgttagacctaaagccgtaaaaaccctagaagaaaacctaggcaataccattcaggacatagggatgggcaaggacttcatgtctaaaacaccaaaagcaatggcaacagaagccaa

SEQ ID NO: 71286 - DNA, 120 bp, synthetic construct
  source 1..120: mol_type = other DNA
aaccccacagtatcagcccttaccccaaaatctttcttcagttgaatctctcccactgtaggttcccatgccgcccctaatcccactcgaagcagccctgagaaacatcgcccattatct

SEQ ID NO: 71287 - DNA, 120 bp, synthetic construct
  source 1..120: mol_type = other DNA
tgtttctgccccaccctaactcttcaatgtactttgtaatctcccccacccttaagaaggtactttgtaatctccccaacccttaagaaggttctttgtaattctccccacccttgagaa

SEQ ID NO: 71288 - DNA, 120 bp, synthetic construct
  source 1..120: mol_type = other DNA
actggactaaaagatgtccaaagaatagttgttcaactatgtaaattccttttttttttttttttgagacagagtctcgctctgttgcccaggctgcagtgcaatggtatgatcttggct

SEQ ID NO: 71289 - DNA, 120 bp, synthetic construct
  source 1..120: mol_type = other DNA
tttattatgaagttctcgaagatcaccattcattcagaagcccccatctctggtcgaactttaccccatttaggatgaagaggagagatctttgtttgcagcaaatctaaaatttacgtg

SEQ ID NO: 71290 - DNA, 120 bp, synthetic construct
  source 1..120: mol_type = other DNA
gacttcacatgttacgaagcagttttttcatgtctacagaagttaaatgaaatgtcattaagttaatgtgcttttattataaattttgatttatgtttggcattattaaaaactaatcac

SEQ ID NO: 71291 - DNA, 120 bp, synthetic construct; identical to SEQ ID NO: 71272
  source 1..120: mol_type = other DNA

SEQ ID NO: 71292 - DNA, 120 bp, synthetic construct; identical to SEQ ID NO: 71273
  source 1..120: mol_type = other DNA

SEQ ID NO: 71293 - DNA, 120 bp, synthetic construct; identical to SEQ ID NO: 71274
  source 1..120: mol_type = other DNA

SEQ ID NO: 71294 - DNA, 120 bp, synthetic construct
  source 1..120: mol_type = other DNA
ctctcgctctgtcgcccaggctggagtgcaatggggcgatctcagctcactgcaacctctacctccggggttcaagcaattctccctgcctcagtctcccaagtagctgagattacaggt

SEQ ID NO: 71295 - DNA, 120 bp, synthetic construct
  source 1..120: mol_type = other DNA
taggattacaggtgtgcaccaccacccctggctaatttttctatttttagtagaggcgagctttcaccatgttggccaggctggtctcaaactcctgaccacaggtgatcagcctgactt

SEQ ID NO: 71296 - DNA, 120 bp, synthetic construct; identical to SEQ ID NO: 71277
  source 1..120: mol_type = other DNA

SEQ ID NO: 71297 - DNA, 120 bp, synthetic construct
  source 1..120: mol_type = other DNA
gcaaagaggcctagatgaaaccagatgggccatttgtttctaattatagaagctgagtgttaaatatgtacaaatttattatactatgctccctatttttatgtgcttcagaacgtccat

SEQ ID NO: 71298 - DNA, 120 bp, synthetic construct
  source 1..120: mol_type = other DNA
tggcatttggttgtctgtaaagtattttatttctccttcacttatgaagcttagtttggctggatatgaaattctgggttgaaaattcttttctttaagaatgttgaatattggccccca

SEQ ID NO: 71299 - DNA, 120 bp, synthetic construct
  source 1..120: mol_type = other DNA
gctccaaactctgcaaccacccttggaatcgcgtaagaaattgtgaaagggtaggggggagaaaaaacaccaaaaaatccaaattaaaaaatataagaggcttcttttaaaaagtatctg

SEQ ID NO: 71300 - DNA, 120 bp, synthetic construct
  source 1..120: mol_type = other DNA
ggagcatctatgttctacctacttgacattctagaaacttagaaaggggagaggggcaggaaaataaaagaactacatttctgacaacaatgaaatagtttattttcttcaaatatttta

SEQ ID NO: 71301 - DNA, 120 bp, synthetic construct; identical to SEQ ID NO: 71281
  source 1..120: mol_type = other DNA

SEQ ID NO: 71302 - DNA, 120 bp, synthetic construct
  source 1..120: mol_type = other DNA
tatgtaataaaattcattttcttaggtatgattacaatattcttgttatacagaagaaaaaccttattcttgggagatgcatactaaaacattatggggtgaactgtcatcatgtgtatg

SEQ ID NO: 71303 - DNA, 120 bp, synthetic construct; identical to SEQ ID NO: 71282
  source 1..120: mol_type = other DNA

SEQ ID NO: 71304 - DNA, 120 bp, synthetic construct; identical to SEQ ID NO: 71283
  source 1..120: mol_type = other DNA

SEQ ID NO: 71305 - DNA, 120 bp, synthetic construct
  source 1..120: mol_type = other DNA
ggtatcagaaatgcaataaagttatatcagaaagttgtagttcgtaatctatttaaaattcaggtactgtttagaataatacctgatgcttattagtaaacaagtagggtacagccaagg

SEQ ID NO: 71306 - DNA, 120 bp, synthetic construct
  source 1..120: mol_type = other DNA
atccaggagggcaatagatctgattttaacccttgtttcacatgcacaattgtcttcagagaaaagctgaagaaagtaccccctcacctccatgccccaatgctccttttctctgacttc

SEQ ID NO: 71307 - DNA, 120 bp, synthetic construct
  source 1..120: mol_type = other DNA
aaagtcttactttaaaaaaaacaaaaacaaaaacaaaaaatggccgggcacggtggctcatgcctgtaatcccagcactttgggaggcgaaggcaggcagatcataaggtcaggagattg

SEQ ID NO: 71308 - DNA, 120 bp, synthetic construct
  source 1..120: mol_type = other DNA
cagtgtgagactctgactcaaaaaaaacaaaaaacaaaaaaaccctttaactgcctttctccctctatcaatctaatagcctggactcttcacagacaaacctgttgaaaaatttatctt

SEQ ID NO: 71309 - DNA, 120 bp, synthetic construct
  source 1..120: mol_type = other DNA
tacttccaccttactgtagcttttcaaatacttttcccactgaactaaatcccccccataaacatgcaacactttctaatgtattccattgaaaaatacaaaaacatataaaaaggaaaa

SEQ ID NO: 71310 - DNA, 120 bp, synthetic construct
  source 1..120: mol_type = other DNA
gaagtaactgcggtttttgccaaaaccgcaattacttttgcacctacctaataggtataaaatatgtaacttcacttaattttatcctttatgtatctccctatattatgtacctatgga

SEQ ID NO: 71311 - DNA, 120 bp, synthetic construct
  source 1..120: mol_type = other DNA
catttgtttaaccattctttttttaactttttattttttttgagaaggagtcttgctctgctgcccaggctggagtgcagtggtgtgatgtcgctcactacaacctctgcctctcaggtt

SEQ ID NO: 71312 - DNA, 120 bp, synthetic construct
  source 1..120: mol_type = other DNA
aaaagcctaaatcggctgagtgcgatgacttacacctgtaatcccagcactttgggaggccaaagcaggcggatcacctgagtcaggagtccaagaacaggccggccaacatggtggaat

SEQ ID NO: 71313 - DNA, 120 bp, synthetic construct
  source 1..120: mol_type = other DNA
ggttactaaattctcttatatacttatactgatcacaatactgaaaaataatagaaaatccattgtcattcatttaccacctaatttgttaagatgccagaaaaccaaattttacacatt

SEQ ID NO: 71314 - DNA, 120 bp, synthetic construct
  source 1..120: mol_type = other DNA
acatagctgtatacatagtatatatcacatagctgtatacatagtatatatcacatagctgtatacatagtatatatcacatagctgtatacatagtatatatcacatagctgtagatat

SEQ ID NO: 71315 - DNA, 120 bp, synthetic construct
  source 1..120: mol_type = other DNA
atatggagacagtagggtatatatgctctgtctctatatatatggtagtatgatatatatatggtagtatgatatatatatacactatatatggtagtatgtgtatatatacatataaat

SEQ ID NO: 71316 - DNA, 120 bp, synthetic construct
  source 1..120: mol_type = other DNA
ttgacgacaaacagagagccaaatcatgagtgaactcccattcacaattgcttcaaagagaataaaatacctaggaatccaacttacaagggatgtgaaggacctcttcaaggagaacta

SEQ ID NO: 71317 - DNA, 120 bp, synthetic construct
  source 1..120: mol_type = other DNA
gcatttcttcatgtgttttttggctgcataaatgtcttcttttgagaagtgtctgttcatgtccttcgcccactttttgatggggttgtttgtttttttcttgtaaatttgtttgagttc

SEQ ID NO: 71318 - DNA, 120 bp, synthetic construct
  source 1..120: mol_type = other DNA
gagctacagtattcaagatagtgtgatataggcagaaggacagacacacagatcaatggaatagcacagaaaacccagaaatatccccctgcaagtatgggcagctaatttttgatgaag

SEQ ID NO: 71319 - DNA, 120 bp, synthetic construct
  source 1..120: mol_type = other DNA
aactcaacttaggtttttggctactagagcaagttttttgtttatttttttgagatggagtcttgctctgtcaaccaggcagaagtacagtggtgtgatcttggctcactgcaacctctg

SEQ ID NO: 71320 - DNA, 120 bp, synthetic construct
  source 1..120: mol_type = other DNA
cagactcccaaagtgctgggattataggtgtgagccaccatgcctgacctgatttgcattttctagagcaggggttggcaaatgttttttgtaaagggccaaatagtaaatattttaggt

SEQ ID NO: 71321 - DNA, 120 bp, synthetic construct
  source 1..120: mol_type = other DNA
agcctcccaaagtgctgggattacaggcatgagccactccgcctgacccagatattattattgtttttgttactcttattatcgcaaagactctctcccaatttatggcttatcttttca

SEQ ID NO: 71322 - DNA, 120 bp, synthetic construct
  source 1..120: mol_type = other DNA
aaactgttgggtattatgcttacttcctggatgacaggatcattcatagcccaagcctcagcatcatgcagtatacccaggtgacgaacccacacacgcctccctgaacctaaaataaaa

SEQ ID NO: 71323 - DNA, 120 bp, synthetic construct
  source 1..120: mol_type = other DNA
tgggaggctgaggtgggaggatggcttgaacccaggaggtggaggttgcagggagccattatcaggccactgcactccagcctgggtgagagaacaaggccctgtctggaaaaaataaaa

SEQ ID NO: 71324 - DNA, 120 bp, synthetic construct
  source 1..120: mol_type = other DNA
tggttacatttcttcctatttgattccttttcatggcttttttttttcttgagatagaatttcgctctttttgcccaggctggattgcagtggtgtgatcttggctcactgcaacctctg

SEQ ID NO: 71325 - DNA, 120 bp, synthetic construct
  source 1..120: mol_type = other DNA
gtttgtgaatgcaccagtcgacactctgtatctagctatctggtggggccttggagaacctttgtgctgacactctgtgtctagctaatctggtggggaggtggagaacctttgtgtcta

SEQ ID NO: 71326 - DNA, 120 bp, synthetic construct
  source 1..120: mol_type = other DNA
ttcctttttgagttggaatttccctcttgttgcccaggctggagtgcaatggcgccatctcagctcactgcagcctcagcctcctgggttcaagtgactctcctgcctcagcctccagag

SEQ ID NO: 71327 - DNA, 120 bp, synthetic construct
  source 1..120: mol_type = other DNA
gaactacagatatgtgccaccatgtccggctaatttttttttttttttgaggtggagtctcgctctgttgcacaggctgtagtacagtggtgtgatcttggctcactgcaacttctgcct

SEQ ID NO: 71328 - DNA, 120 bp, synthetic construct
  source 1..120: mol_type = other DNA
tcggcctcccaaagtgctgggattacaggcgtgagccactgcgcccggctgcctttttaaatttaaaaaacttttttttttttttgagacagtctctctctgtcccccaggctggagtgc

SEQ ID NO: 71329 - DNA, 120 bp, synthetic construct
  source 1..120: mol_type = other DNA
accacacctggctaatttttctattttttggtagagatcggggtcttgctttgttgcccaggctggtcttgaattcctgggctcaagtgatcctcccacattggtctcccaaagtgctag

SEQ ID NO: 71330 - DNA, 120 bp, synthetic construct
  source 1..120: mol_type = other DNA
tcacccgagatcagaagtttgagaccagcttggccaatatggtgaaacctcatctctgtattaaaaaaaaaaaaaaattagccagttgtggtaatgagcgcctgtaatcccagctactcg

SEQ ID NO: 71331 - DNA, 120 bp, synthetic construct
  source 1..120: mol_type = other DNA
atttgagaccaccctgggcaacataacaagaccccaactctacaaaaaaaaaattttaatgagcagggggcatttgttgagctggcctattgtcccagctacttggaggctgacagttca

SEQ ID NO: 71332 - DNA, 120 bp, synthetic construct
  source 1..120: mol_type = other DNA
gaaatacagggcctggaaattacactgatcccattggccagaacttagtctcaccttcttaccaccctatatgcgagactaaaatgcctctagctggatagttacatgttcatttaaact

SEQ ID NO: 71333 - DNA, 120 bp, synthetic construct
  source 1..120: mol_type = other DNA
attttatttattttataatttatttattttatagacagagtcttgccctgtcacccaggttggagttcagtggtgcaatctcagctcactgcaatctcagcctcccgagtagctgggact

SEQ ID NO: 71334 - DNA, 120 bp, synthetic construct
  source 1..120: mol_type = other DNA
ctgtcatcacaccactgcattccaacctgggtgacagacagactgtctcaagacacaaaagcacgagaagagaagcagtttgaataaagtactgtctctaatgaaaagtactttaggctg

SEQ ID NO: 71335 - DNA, 120 bp, synthetic construct
  source 1..120: mol_type = other DNA
agaattgcttgagatcaggaatttgagaccaccctgggcaacataacaagaccccaactctacaaaaaaaaaattttaatgagcagggggcatttgttgagctggcctattgtcccagct

SEQ ID NO: 71336 - DNA, 120 bp, synthetic construct
  source 1..120: mol_type = other DNA
aggttgcagtgagccaagatctcgccattgcatttgagcctgggtaacagagtgagactctgtctcaaaacaaacaaacaaacaaacaaaaacattagccatagccccagttatctggag

SEQ ID NO: 71337 - DNA, 120 bp, synthetic construct
  source 1..120: mol_type = other DNA
taaacatggaaaggaacaaccggtaccagccgctgcaaaatcatgccaaaatgtaaagaccatcgagactaggaggaaactgcatcaactaatgagcaaaatcaccagctaacatcataa

SEQ ID NO: 71338 - DNA, 120 bp, synthetic construct; identical to SEQ ID NO: 70896
  source 1..120: mol_type = other DNA

SEQ ID NO: 71339 - DNA, 120 bp, synthetic construct
  source 1..120: mol_type = other DNA
aacttctgacctcaagtgatttttctgcctcagcctctgaaagtactgggattataggcatgagccactgcacctggcctatgtttatttatttttgagacagagtattgctctgttgcc

SEQ ID NO: 71340 - DNA, 120 bp, synthetic construct
  source 1..120: mol_type = other DNA
tggagaaccgagttctccaatcagaaaagatgagaatggaggccaggtgcagtggtgactaacgcctgtactcacactttgggaggccgaggcaggaggatcacctgaggttaggagttc

SEQ ID NO: 71341 - DNA, 120 bp, synthetic construct
  source 1..120: mol_type = other DNA
ccctaggaagctatatttatttccttttttttttttttttttttttttgagacggagtctcactctgtcacccagcctggagtgcaatggcatgatctcggctcactgcaacctctgcct

SEQ ID NO: 71342 - DNA, 120 bp, synthetic construct
  source 1..120: mol_type = other DNA
ggcatacaactgttcatagtattccctgataattcttttacttatctaatgttggtagtgatgtctcctcttttgctcctgttttgcagtttgagtctcctctgcttttttcttggtcag

SEQ ID NO: 71343 - DNA, 120 bp, synthetic construct
  source 1..120: mol_type = other DNA
tggaacccttgtcaaaaattaatcttccatgtagaaggtttatttctgggctctctaatctattccacttgtgtccggaattggtgggttcttggtctcactgacttcaagaatgaagcc

SEQ ID NO: 71344 - DNA, 120 bp, synthetic construct
  source 1..120: mol_type = other DNA
gcttcacccagtggatcccgcaccggggctgcaggtggagctacctgccagtcccgcgctgtctacctgcactcctcagcccttgggtggtcgatgggactgggcgccgaggagcggggg

SEQ ID NO: 71345 - DNA, 120 bp, synthetic construct
  source 1..120: mol_type = other DNA
ttgattttgaactcctgggctcaagcaatccactcacctcagtctcccaaattgttgagattacaggcggccttatatgtttgtctttatgccagtaccacactcttttcattgtggtag

SEQ ID NO: 71346 - DNA, 120 bp, synthetic construct
  source 1..120: mol_type = other DNA
tcaagtgattctcctgcctcagcctcccaagtagctgagattacaggcacccgcctccacgcccagctaattttttgtttttgtttttgttttttgagatgtagttttgctcttattgcc

SEQ ID NO: 71347 - DNA, 120 bp, synthetic construct
  source 1..120: mol_type = other DNA
caatgtgtactcaatgtttagatctcatttataagtgagaacacgcagtccttggttttctgttcctgggttaatttgcttaggataatgaccgccagctacatccatgtcagagcgaag

SEQ ID NO: 71348 - DNA, 120 bp, synthetic construct
  source 1..120: mol_type = other DNA
ttaaaatagaatcaaaggctctatttctccaaccctccttggtccacaagatgagagttcttgggaataaccactcccaagcttttaggttattctcaccattgccctcaacttccttgt

SEQ ID NO: 71349 - DNA, 120 bp, synthetic construct; identical to SEQ ID NO: 71321
  source 1..120: mol_type = other DNA

SEQ ID NO: 71350 - DNA, 120 bp, synthetic construct
  source 1..120: mol_type = other DNA
ggcagagggtctcctcacttctcagacgctcctcacctcccagacggggtcgcggccgggcagaggcactccccacatctcagacgatgggcagcctggcagagacactcctcacctacc

SEQ ID NO: 71351 - DNA, 120 bp, synthetic construct
  source 1..120: mol_type = other DNA
tataccactgcactccagcctggggaatagagcaagaccctgtctctaaaaaaaggtaacaaaataacatgaatggattccattttaagagaatgaagcatcattgtgtaagactatgaa

SEQ ID NO: 71352 - DNA, 120 bp, synthetic construct
  source 1..120: mol_type = other DNA
gcatgttgaccacttccatactgcgtgctttagctgccttatctcacttaatctcagaataaccctattgtcattcccaacttgtagatgggaaaacagacccaaagagaagtgatttac

SEQ ID NO: 71353 - DNA, 120 bp, synthetic construct
  source 1..120: mol_type = other DNA
tccctttaaataacatgaactgctttcctaaattttagctaatcccctgggttggaaggtgggagggcataggggccaaaaggacaaggctcaagtcaagatgcctgggttcacattcca

SEQ ID NO: 71354 - DNA, 120 bp, synthetic construct
  source 1..120: mol_type = other DNA
ccaacatggtgaaaccccatctctactaaaaatacaaaaataagccaggtgtggtggcacacacctgtaatcccagctactcgggaggctgagacgggagaatcctttgaactcaggagg

SEQ ID NO: 71355 - DNA, 120 bp, synthetic construct
  source 1..120: mol_type = other DNA
ctcctgcctcagcctcctgagtagctgggattacaggcatccaccaccatgcctggctatcagttatctaattttattttacttaaaattattgaggtgaaataacataaagtaaccatt

SEQ ID NO: 71356 - DNA, 120 bp, synthetic construct; identical to SEQ ID NO: 71343
  source 1..120: mol_type = other DNA

SEQ ID NO: 71357 - DNA, 120 bp, synthetic construct; identical to SEQ ID NO: 71344
  source 1..120: mol_type = other DNA

SEQ ID NO: 71358 - DNA, 120 bp, synthetic construct
  source 1..120: mol_type = other DNA
acatggtaaaatcctgtctctactaaaaatgcaaaaaaaaaaaattagctgggcgtggtggcacgtgcctgtagttcccgccactcaggaggctgaggcagaagaatcacttgaacccag

SEQ ID NO: 71359 - DNA, 120 bp, synthetic construct
  source 1..120: mol_type = other DNA
gcctcccaaagtgctgggattacaggtatgagccattgcacccggccgcatggtaatttaaatagagttgttttcttaatttctctttggggttattcatcgttagtgtaaagaaatgca

SEQ ID NO: 71360 - DNA, 120 bp, synthetic construct
  source 1..120: mol_type = other DNA
ttcctcttcttacatttattgagcacttaagatgtaaaaacaatatggaaatagagatcgataaagcagtccctactcccgaagagcttctagttagtagggaagatagtaaaccaaatc

SEQ ID NO: 71361 - DNA, 120 bp, synthetic construct
  source 1..120: mol_type = other DNA
attttttatagagacaggttttcaccatgttgcccaggctggtctcaaactcctgagtttaagcgatcctcccaccttggcctcccaaagtgctgagattacaggcatgagccactgcat

SEQ ID NO: 71362 - DNA, 120 bp, synthetic construct
  source 1..120: mol_type = other DNA
agaccagacccaacatttgactcagtcttaatatccaggtgagcctgcgcaaatcattcattattcctaaggttttcatcactccattcataaaatggggataactgtggcacctatatg

SEQ ID NO: 71363 - DNA, 120 bp, synthetic construct
  source 1..120: mol_type = other DNA
gcactccagcctgggcgactgagtggagcggaactctgtctccaaaaaaaaaaaaaaaaagagtttttttttagatcatcagctattgttagtgttagtgtatgttatgtgtggctcaag

SEQ ID NO: 71364 - DNA, 120 bp, synthetic construct; identical to SEQ ID NO: 71352
  source 1..120: mol_type = other DNA

SEQ ID NO: 71365 - DNA, 120 bp, synthetic construct; identical to SEQ ID NO: 71353
  source 1..120: mol_type = other DNA

SEQ ID NO: 71366 - DNA, 120 bp, synthetic construct
  source 1..120: mol_type = other DNA
tgtagtgagaccctgtctcaattttttaactttttttttttttttttttgagacagagtctcgctctattgcccgggttggagtgcagtggcatgatctcagctcactgcaacctccacc

SEQ ID NO: 71367 - DNA, 120 bp, synthetic construct
  source 1..120: mol_type = other DNA
cctcagcttcccaaagtgctgggatgacaggtgagagccactgtgcccagccaattgtacatttttaaataactcaaagagtgtaattgaattgtttgtaacacaaaggataaatgcttg

SEQ ID NO: 71368 - DNA, 120 bp, synthetic construct
  source 1..120: mol_type = other DNA
ctacccatagttttcattaaaagtatccttggaggttgggcatagtgactcacatctatcatcctagcactttgagaggattagctggaaggttctcttgagtccaggagtttgagacca

SEQ ID NO: 71369 - DNA, 120 bp, synthetic construct
  source 1..120: mol_type = other DNA
tcggccccagtgtcctggcccctagggagcagcatcctaaaatgggagctagcatatttgagaataacaacatctacgcattcagaagctctttggttttctttccagctaatataattt

SEQ ID NO: 71370 - DNA, 120 bp, synthetic construct
  source 1..120: mol_type = other DNA
cacaggacgcaaaggatagctcagaacctacagggggcgatcagaacaccagggtgcgttgaggacaaggggctcacaggacacaacgatgtgcttagtaaaccaggggttgctcacaac

SEQ ID NO: 71371 - DNA, 120 bp, synthetic construct
  source 1..120: mol_type = other DNA
catctgttgagtttgtattgatattccatagctagagttttaaagtaaaagctctagtatctttgtattagtgtgaatgtgtgcttgtatctattatgtacatatatatatatatttttg

SEQ ID NO: 71372 - DNA, 120 bp, synthetic construct
  source 1..120: mol_type = other DNA
cttgtattgcaactttttatcctaaaataaaaatgactttatttaagaaagagtgatgtttagaataaaactatatgttcaagtatgccataagcgttttttgtaagtcaaactaaggtt

SEQ ID NO: 71373 - DNA, 120 bp, synthetic construct
  source 1..120: mol_type = other DNA
gtctaaaaaggatacacaacactttgggaggctttggagggtggatctcctgagggcaggagttagagacgagcctggccaaaacggcacaatcccattttaataaaaaatacaaaaatt

SEQ ID NO: 71374 - DNA, 120 bp, synthetic construct
  source 1..120: mol_type = other DNA
ttctctctcccattgctcagcaccctccagtgtgtcatgtggagactcacctgggaatgcaagtggccaacagtagtgaagaggatgagcttgtgtggtcaaaatgggatgtggatgtga

SEQ ID NO: 71375 - DNA, 120 bp, synthetic construct
  source 1..120: mol_type = other DNA
cctctattaagaatgatgaagcttttaaacttcaatgcactgaaaatcatgccccttgaattaaatgtggattggcactgacatgaattggccactcttggatatgtatcctatattatg

SEQ ID NO: 71376 - DNA, 120 bp, synthetic construct
  source 1..120: mol_type = other DNA
gtttcagatttgagccaccacacctttgctcatttttgaagtggggcaagacccccacttcgtaggactattacttgattgagattaaatatgtgtaaaatgcataacatggtgcctggc

SEQ ID NO: 71377 - DNA, 120 bp, synthetic construct
  source 1..120: mol_type = other DNA
acggtctcactgacatctttacttcttttatcatgtttgttttgtaaatcacaaagaatggtgcattcttcatctattctatacttgttaagtatttttggcatcttttaaaaaactggt

SEQ ID NO: 71378 - DNA, 120 bp, synthetic construct
  source 1..120: mol_type = other DNA
tttacagttatataatatagcaattacaaagataaaaactgcacttcatcttgattttctcattttgtagtcttaatttcttcgtatagatttatgttttgaatgtatatcacatggcta

SEQ ID NO: 71379 - DNA, 120 bp, synthetic construct
  source 1..120: mol_type = other DNA
atacatcctcaacaactcatgaaacatttccaggttagctttttcctatcttcaatactatacaacgagtggcacctgctccaggtactctaataaatggaccctagttctctctgcagg

SEQ ID NO: 71380 - DNA, 120 bp, synthetic construct
  source 1..120: mol_type = other DNA
tatataaatatatatatttataatattttatatatatatattttttgcccccgccgccgcatatttttgcccccgacgccgaggctttttgcggctttttgcccccgccgccgccccttt

SEQ ID NO: 71381 - DNA, 120 bp, synthetic construct
  source 1..120: mol_type = other DNA
tcatttcatttcatctcatcatttcatctcatcatctcctcttatcattcatctgatcatttcatatcatcatttcatatcatcactttatctcaccatttcatctcatctcatcatttc

SEQ ID NO: 71382 - DNA, 120 bp, synthetic construct
  source 1..120: mol_type = other DNA
agggcctggataagggcagggccaggggtatggcaggaccagggctagggccagggccaggccgtagtgagggcagggcaaaagtcgaggcagggtctgggcaggtccagggagtggcca

SEQ ID NO: 71383 - DNA, 120 bp, synthetic construct
  source 1..120: mol_type = other DNA
tacctgatagtgccctaacctgtcctcctccatgggcattgcagccccagaaagtgcccataacccaccctccctgccatgggaagtgcagccctgtacagtgctaccaaccagtacccc

SEQ ID NO: 71384 - DNA, 120 bp, synthetic construct
  source 1..120: mol_type = other DNA
gtacagaagaaacataccacaacataatagaaactacaggaaagacacccaaagctagaatcatatggagagaggtccaggctgcagtgggctgtgatcccaccactgcactccagcctg

SEQ ID NO: 71385 - DNA, 120 bp, synthetic construct
  source 1..120: mol_type = other DNA
cactccagcctggacgacagagtgagactccatctcaaaaaaaatagaaaaaaaaaagaaaatttaaatttaaaatttaaaaaagtcacagagactacaaatactcaggtttaagcaaat

SEQ ID NO: 71386 - DNA, 120 bp, synthetic construct
  source 1..120: mol_type = other DNA
caagtgattctcctgccttagcctcctgagtagctgagactataggcacatgccaccatgcctggctaatttttttttaatagagacggggtttcactgtgttagccaggatggtcttga

SEQ ID NO: 71387 - DNA, 120 bp, synthetic construct
  source 1..120: mol_type = other DNA
agggtctccaggctgcagtttggcatggaggcattgcctcagggtggaggggatgtcccgaggggcaggaggccagggtgggtggcctgcttggccaccccaagtgaagacctctcctct

SEQ ID NO: 71388 - DNA, 120 bp, synthetic construct
  source 1..120: mol_type = other DNA
gttacagccacattctgatcctgcctccctgtgtggatggtttaggctgtcctgggtaggagtgtgggcaggcacacatggcggtctctcagctccacggcaggtggagtagagctgttc

SEQ ID NO: 71389 - DNA, 120 bp, synthetic construct
  source 1..120: mol_type = other DNA
ggcaccactgcactccagcctgggcaacagagtgaaactgtgtctccaaaaaaaaaagaaagaaagagagagagagggagagagggagggagggagggagggaggaaggaaggaaggaag

SEQ ID NO: 71390 - DNA, 120 bp, synthetic construct
  source 1..120: mol_type = other DNA
gtgactatagaaacaaaagtcctccacaagctacaagcaaaccggttgggtgtgatgactcacacctgtaatcccagcactttgggaggccgaggcaggcggatcacttgtggccaggag

SEQ ID NO: 71391 - DNA, 120 bp, synthetic construct
  source 1..120: mol_type = other DNA
agatcgaggctgcagtgagccatgattgagctactgcactccagccagggtgacagagggagacactgtcttaaaaaaaaaaaaaaaaaaaactacagctaatatcgtatttcatgctat

SEQ ID NO: 71392 - DNA, 120 bp, synthetic construct
  source 1..120: mol_type = other DNA
aaaacgtggaaccaacccaagtgcccaccaatcaatgagtggataaagtaactgtggtgtgtatacacacacatatatatatatatgatggatatatatatatatatatatatatatata

SEQ ID NO: 71393 - DNA, 120 bp, synthetic construct
  source 1..120: mol_type = other DNA
ctacaggtgcccaccaacatgcccggctaatttttttgtatttttggtagaaatggggtttcaccattagccaggatggtctcgatctcctgaccttgtgatccgcccgcctcagcctcc

SEQ ID NO: 71394 - DNA, 120 bp, synthetic construct
  source 1..120: mol_type = other DNA
gaggtaggaggtgggacttgactccagagtcagctcttggacactggaccaaattgagaactagctaaaacaaagatggagtggaagcagttctccataagacatgcctaccagtgcagc

SEQ ID NO: 71395 - DNA, 120 bp, synthetic construct
  source 1..120: mol_type = other DNA
aaaataaaataaaataaaataaataaataaataaataaataaataaataatttaaaaaagccataacaggtcggtcgtggtagctcatgcctgtaatcccagcactttgggaggctgagg

SEQ ID NO: 71396 - DNA, 120 bp, synthetic construct
  source 1..120: mol_type = other DNA
cccgccccccccagcccccctcccccaccaaaacagtggccaggaagagtgccgtggtttacttttttcttttttaaatatttatatatatttatattacgtatattatatatagaatat

SEQ ID NO: 71397 - DNA, 120 bp, synthetic construct
  source 1..120: mol_type = other DNA
tacatacatcctccgaaatctgggcagaggttattaaacctcaattcttgacttgtgtgcacctgcaggctcaacaccaaatggaagatgctaaggcttggggctttcaccccttgaagc

SEQ ID NO: 71398 - DNA, 120 bp, synthetic construct
  source 1..120: mol_type = other DNA
aggacatagatgtgtactactgtgcgagacacacaatgtgaaaacccacatcctgagacagtcagcaatcctgagggaggtggcagcagtgctgggcttgagagatgacagggattttat

SEQ ID NO: 71399 - DNA, 120 bp, synthetic construct
  source 1..120: mol_type = other DNA
cctcttgtatcttgccactaacatggtgggagtttttctgcttcctttgtggtttcaatcattggcagattcttcggtataaagcagagcaagtataaagctctgctttcttgtattgtg

SEQ ID NO: 71400 - DNA, 120 bp, synthetic construct
  source 1..120: mol_type = other DNA
tcaatgagccctaacgcatctgaagtacatgtaacttaaataaatatgtaataaataagctggcttcaaaattattggtaaaataaaattagaaatattttaacaattatcagaatacct

SEQ ID NO: 71401 - DNA, 120 bp, synthetic construct
  source 1..120: mol_type = other DNA
tcgtctgttattggtgtataagaatgcttgtgatttttgcacattgattttgttcctttcctccgtattttaaattaaggtatattttcaggagtttaaatttccaagttataaaataaa

SEQ ID NO: 71402 - DNA, 120 bp, synthetic construct
  source 1..120: mol_type = other DNA
gggcagagacgacccagagaaagcccaagtggctgctggaacaaagtcagacatcgtgccacctgtccacactccttggctctgccatcatgctgaagatcgctttaaaggactggcttc

SEQ ID NO: 71403 - DNA, 120 bp, synthetic construct
  source 1..120: mol_type = other DNA
gcttttaaggtagttcaagaaacatttccgcatttttttttttttttttttaagagatgggccctgccctcactacgttgcccaggctggtctaaaactccttcaagtgattctcctgcc

SEQ ID NO: 71404 - DNA, 120 bp, synthetic construct
  source 1..120: mol_type = other DNA
agtctctttccagctatccaaacatataacagagtggaatttttcctcactccttctgccccaggcaagatgttgatcagccccaacacaaacctgttttctgctttaaacatatcctat

SEQ ID NO: 71405 - DNA, 120 bp, synthetic construct
  source 1..120: mol_type = other DNA
gagaattgcttgaacccagaaggtggaggttgcgctgagccgagatagcaccattgcactccagcctgggcaacaagagtgaaactccatctcaaaaaaaaaaaaaaaggtattaatttt

SEQ ID NO: 71406 - DNA, 120 bp, synthetic construct
  source 1..120: mol_type = other DNA
tttggcatcacctcctcatagaagacttctatgactcccgagattctcaggagcatggcaggtgaagtgctcctcccatgaatggatggagattagggagtgtgtgttattcatgcttaa

SEQ ID NO: 71407 - DNA, 120 bp, synthetic construct
  source 1..120: mol_type = other DNA
gctgatgaagcaatcaggaaatggctcgagttgagctaaggagaatttggatccttcctttggttctcagtaggcagggtagggggccaggcatggtggctcatacctgtaatccttgca

SEQ ID NO: 71408 - DNA, 120 bp, synthetic construct
  source 1..120: mol_type = other DNA
aaaattagccaggcatggtggcgtacacctgtaattttcagctacccaggaggctgagatgagagaatcacttgtgcctgggaggtcacggctgcagtgaactgtgatggcatcattgca

SEQ ID NO: 71409 - DNA, 120 bp, synthetic construct
  source 1..120: mol_type = other DNA
tgaggcaggaggatcacttgaggtcaggagttttgagcccagtcggagcaacatggcaagatctcgtctctatgataaaaaattacctggacatggtggcacatgtctgtagtcccagct

SEQ ID NO: 71410 - DNA, 120 bp, synthetic construct
  source 1..120: mol_type = other DNA
gactgtataagattataataaaacatgtctgaagtcaatacctgaattccgagtggtttttaagatctctggcattcactagctcttttctctccctgtctccccctctcggcccccccc

SEQ ID NO: 71411 - DNA, 120 bp, synthetic construct; identical to SEQ ID NO: 9943
  source 1..120: mol_type = other DNA

SEQ ID NO: 71412 - DNA, 120 bp, synthetic construct; identical to SEQ ID NO: 9944
  source 1..120: mol_type = other DNA

SEQ ID NO: 71413 - DNA, 120 bp, synthetic construct; identical to SEQ ID NO: 31478
  source 1..120: mol_type = other DNA

SEQ ID NO: 71414 - DNA, 120 bp, synthetic construct; identical to SEQ ID NO: 35442
  source 1..120: mol_type = other DNA

SEQ ID NO: 71415 - DNA, 120 bp, synthetic construct; identical to SEQ ID NO: 35443
  source 1..120: mol_type = other DNA

SEQ ID NO: 71416 - DNA, 120 bp, synthetic construct; identical to SEQ ID NO: 35444
  source 1..120: mol_type = other DNA

SEQ ID NO: 71417 - DNA, 120 bp, synthetic construct; identical to SEQ ID NO: 35445
  source 1..120: mol_type = other DNA

SEQ ID NO: 71418 - DNA, 120 bp, synthetic construct
  source 1..120: mol_type = other DNA
gagtgagactctgtctcaaaaaaaaaaaaaagaaaaaagaaaaatgccctggcactgctcagctcagaaccttgaaagggatccttgtttcgctctgggtcagggtcccatcctcaaagc

SEQ ID NO: 71419 - DNA, 120 bp, synthetic construct; identical to SEQ ID NO: 25137
  source 1..120: mol_type = other DNA

SEQ ID NO: 71420 - DNA, 120 bp, synthetic construct; identical to SEQ ID NO: 7245
  source 1..120: mol_type = other DNA

SEQ ID NO: 71421 - DNA, 120 bp, synthetic construct; identical to SEQ ID NO: 7246
  source 1..120: mol_type = other DNA

SEQ ID NO: 71422 - DNA, 120 bp, synthetic construct; identical to SEQ ID NO: 8891
  source 1..120: mol_type = other DNA

SEQ ID NO: 71423 - DNA, 120 bp, synthetic construct; identical to SEQ ID NO: 8892
  source 1..120: mol_type = other DNA

SEQ ID NO: 71424 - DNA, 120 bp, synthetic construct; identical to SEQ ID NO: 8893
  source 1..120: mol_type = other DNA

SEQ ID NO: 71425 - DNA, 120 bp, synthetic construct; identical to SEQ ID NO: 8894
  source 1..120: mol_type = other DNA

SEQ ID NO: 71426 - DNA, 120 bp, synthetic construct; identical to SEQ ID NO: 8895
  source 1..120: mol_type = other DNA

SEQ ID NO: 71427 - DNA, 120 bp, synthetic construct
  source 1..120: mol_type = other DNA
ggagcagacatgcaaacccctaatagatcgtggaaaaataatagcaacaaagatttatttattgagcatttactgagctctggactctaaaacccattctttgtgcacattacctaaatt

SEQ ID NO: 71428 - DNA, 120 bp, synthetic construct; identical to SEQ ID NO: 8893
  source 1..120: mol_type = other DNA

SEQ ID NO: 71429 - DNA, 120 bp, synthetic construct; identical to SEQ ID NO: 8896
  source 1..120: mol_type = other DNA

SEQ ID NO: 71430 - DNA, 120 bp, synthetic construct; identical to SEQ ID NO: 21741
  source 1..120: mol_type = other DNA

SEQ ID NO: 71431 - DNA, 120 bp, synthetic construct
  source 1..120: mol_type = other DNA
tggctctccccgccctgagatcagggaccacctcctccccttcctcacccgggctcagactctccaggagcctcggggctcatcctccttctgccttgacctcagcacaggctgttctcc

SEQ ID NO: 71432 - DNA, 120 bp, synthetic construct; identical to SEQ ID NO: 32143
  source 1..120: mol_type = other DNA

SEQ ID NO: 71433 - DNA, 120 bp, synthetic construct
  source 1..120: mol_type = other DNA
tttataacttgagtacaacatacaacctggtttagagaaaggtcatttttacttacatctctcatataataatgatgagtaaataaattataccctttattctctcatcaggttgcacag

SEQ ID NO: 71434 - DNA, 120 bp, synthetic construct
  source 1..120: mol_type = other DNA
aatacagcccttgtgcctgggaggttgtcagagcagaaatcatgagatccctctctttatcaacaaacttgcaagaaagattaaggaggaaggaataacatctggtccaacatgaaaaca

SEQ ID NO: 71435 - DNA, 120 bp, synthetic construct; identical to SEQ ID NO: 32142
  source 1..120: mol_type = other DNA

SEQ ID NO: 71436 - DNA, 120 bp, synthetic construct; identical to SEQ ID NO: 32141
  source 1..120: mol_type = other DNA

SEQ ID NO: 71437 - DNA, 120 bp, synthetic construct; identical to SEQ ID NO: 23062
  source 1..120: mol_type = other DNA

SEQ ID NO: 71438 - DNA, 120 bp, synthetic construct
  source 1..120: mol_type = other DNA
caacatggggaaaccctatgtctacattaaaaaagaaagagagaaagaaagaaagttaggggggagggagggagggggggagagagagagagagaaagagaaaagaaagaaagaaattat

SEQ ID NO: 71439 - DNA, 120 bp, synthetic construct; identical to SEQ ID NO: 28353
  source 1..120: mol_type = other DNA

SEQ ID NO: 71440 - DNA, 120 bp, synthetic construct
  source 1..120: mol_type = other DNA
atcacttgacgtcaagagttcgagaccagcctggccaattggtgaactgtcatctctactaaaaccataaaaattagctgggaatggtggcacaaatctgtaatctcagctacttgggag

SEQ ID NO: 71441 - DNA, 120 bp, synthetic construct
  source 1..120: mol_type = other DNA
ctagtccatggcaggagggcagggggagactcactaaggcatctttggccctcttaaaggcctgcagctcctgtggagacagggacttgaactgggctatgtggcagccccttgcatccg

SEQ ID NO: 71442 - DNA, 120 bp, synthetic construct
  source 1..120: mol_type = other DNA
gcaacacaattcaggtctcgcgtgaggaggcggaagaggttgaaggtgacagaggcctcgaggcagccaggggactcctgtagggaggaggggatgggtcaggggctgtctgggttctgg

SEQ ID NO: 71443 - DNA, 120 bp, synthetic construct
  source 1..120: mol_type = other DNA
agcgtcaccatgctttcccactcccagcttccttcactgggctagcctccaccctccctgcagtgggctatctcatgctcctactgtagggactgactcatgttttcctgtagaagaggg

SEQ ID NO: 71444 - DNA, 120 bp, synthetic construct
  source 1..120: mol_type = other DNA
gagaatcgcttgaacccaggaggtggaggttgcagttagtcaagattttgcactgcactccagcctgggtgaccgaacaagaccctgtctcaaaatatatatatatatatatgccaggag

SEQ ID NO: 71445 - DNA, 120 bp, synthetic construct
  source 1..120: mol_type = other DNA
tctttgataactggcaataaatttaaaccgggagacagaatagcaaatgcacaggaacttcacaaatacaaacacacgtaagggaatccaaagaaccacagtcggttaaggacccttggg

SEQ ID NO: 71446 - DNA, 120 bp, synthetic construct
  source 1..120: mol_type = other DNA
gcagcctcagtcccgtccttgtcagcctcgcctggtcctccctgcgggctaaccctgtattgcctgttgcactcaccgctctccggggtttgtgacgcctcttctgggccccggggacct

SEQ ID NO: 71447 - DNA, 120 bp, synthetic construct
  source 1..120: mol_type = other DNA
gccggggggccttctgcgatcaccgtgcacaggacccacagccccgcggccactgcggcccagacactcggccgcatctctgcttctgcagcaggcgagagacgtcagggaagccaaaga

SEQ ID NO: 71448 - DNA, 120 bp, synthetic construct; identical to SEQ ID NO: 7304
  source 1..120: mol_type = other DNA

SEQ ID NO: 71449 - DNA, 120 bp, synthetic construct; identical to SEQ ID NO: 24679
  source 1..120: mol_type = other DNA

SEQ ID NO: 71450 - DNA, 120 bp, synthetic construct; identical to SEQ ID NO: 24680
  source 1..120: mol_type = other DNA

SEQ ID NO: 71451 - DNA, 120 bp, synthetic construct; identical to SEQ ID NO: 24681
  source 1..120: mol_type = other DNA

SEQ ID NO: 71452 - DNA, 120 bp, synthetic construct; identical to SEQ ID NO: 24682
  source 1..120: mol_type = other DNA

SEQ ID NO: 71453 - DNA, 120 bp, synthetic construct; identical to SEQ ID NO: 24683
  source 1..120: mol_type = other DNA

SEQ ID NO: 71454 - DNA, 120 bp, synthetic construct; identical to SEQ ID NO: 24684
  source 1..120: mol_type = other DNA

SEQ ID NO: 71455 - DNA, 120 bp, synthetic construct; identical to SEQ ID NO: 3971
  source 1..120: mol_type = other DNA

SEQ ID NO: 71456 - DNA, 120 bp, synthetic construct
  source 1..120: mol_type = other DNA
gagcagggcgcggtgctgcacaccagccactcacgaggatcccttgaacccgggaggctgaggctgcagggagctgtgattgtgccaccgcactccagcctgggcgacagagcaagacct

SEQ ID NO: 71457 - DNA, 120 bp, synthetic construct
  source 1..120: mol_type = other DNA
cagaaagaatctagttagggagatgataatatacacaaaacaaaaaatatcccagcacctgctgtgttggttctactgggggaaataagaagttcacccttgctcctagggagtctacag

SEQ ID NO: 71458 - DNA, 120 bp, synthetic construct; identical to SEQ ID NO: 15816
  source 1..120: mol_type = other DNA

SEQ ID NO: 71459 - DNA, 120 bp, synthetic construct
  source 1..120: mol_type = other DNA
aaaggtggggaaaagattgagaaatcggatggttgccgtgtctgtgtagaaagtagaagacatgggagacttttcattttgttctgcactaagaaaaattcctctgccttgggatcctgt

SEQ ID NO: 71460 - DNA, 120 bp, synthetic construct; identical to SEQ ID NO: 20406
  source 1..120: mol_type = other DNA

SEQ ID NO: 71461 - DNA, 120 bp, synthetic construct
  source 1..120: mol_type = other DNA
gacctgaccgtcccccagcccgacacccgtaaagggtctgtgctgaggaggattagtaaaagaggaaggaatgcctcttgcagttgagacaagaggaaggcatctgtctcctgcccgtcc

SEQ ID NO: 71462 - DNA, 120 bp, synthetic construct
  source 1..120: mol_type = other DNA
cccgtgtctacttctttctacacagacacagcaaccatccgatttctcaatcttttccccacctttcccctctttctattccacaaaaccgccattgtcatcatggcccgttctcaatga

SEQ ID NO: 71463 - DNA, 120 bp, synthetic construct
  source 1..120: mol_type = other DNA
cgcctgcaatcacaggcactcggcaggctgaggcaggaaatcaggcagggaggttgcagtgagccgagatggcagcagtatagtccagcttcggctcggcatcagagggagaccgtggaa

SEQ ID NO: 71464 - DNA, 120 bp, synthetic construct
  source 1..120: mol_type = other DNA
tcggttgatgtctttcgcccactttttgatggggttgtttgtttttttcttgtaaatttgttggagttcattgtagatagattctggatattagccctttgtcagatgagtaggttgcga

SEQ ID NO: 71465 - DNA, 120 bp, synthetic construct; identical to SEQ ID NO: 32145
  source 1..120: mol_type = other DNA

SEQ ID NO: 71466 - DNA, 120 bp, synthetic construct
  source 1..120: mol_type = other DNA
ctgtagatttttttggtctcctttcaggatggagagaaaggagctacctcatagacccccaggctctgatttcaaacagacacttggatctagtcccttgtctcacttcaagtattaata

SEQ ID NO: 71467 - DNA, 120 bp, synthetic construct
  source 1..120: mol_type = other DNA
tgtgtctttataacagcatgatttatagtcctttgggtatatacccactaatgggatggctgggtcaaatggtatttctagttctagatccctgaggaatcaccacactgacttccacaa

SEQ ID NO: 71468 - DNA, 120 bp, synthetic construct
  source 1..120: mol_type = other DNA
gcttaggattgaacaacctgctgctgaatgactactgggtacataatgaaatgaaggcagaaataaagatgttctttgaaaccaacgagaacaaagacacaacataccagaatctctggg

SEQ ID NO: 71469 - DNA, 120 bp, synthetic construct
  source 1..120: mol_type = other DNA
aaaggcctttgacaaaattcaacaacccttcatgctaaaaactctcaataaattaggtattgatgggacatatctcaaaataataagagctatctatgacaaacccacagctaatagcat

SEQ ID NO: 71470 - DNA, 120 bp, synthetic construct; identical to SEQ ID NO: 24847
  source 1..120: mol_type = other DNA

SEQ ID NO: 71471 - DNA, 120 bp, synthetic construct
  source 1..120: mol_type = other DNA
aaatttgcctctgcctctgcctctgcctctgcctcctctgcctcctctgcctcctctgcctctgcctctgcctctccccatggtctccctctccccacggtctccctctccccacggtct

SEQ ID NO: 71472 - DNA, 120 bp, synthetic construct
  source 1..120: mol_type = other DNA
catgtgctgtgtccactcagggttaaatggattaagggcagtgcaagatgtgctttgttaaacagatgcttgaaggcagcatgctggttaagagtcatcaccactccctaatctcaagta

SEQ ID NO: 71473 - DNA, 120 bp, synthetic construct
  source 1..120: mol_type = other DNA
ttgaacctgtgaggtggaggttgcagtgaggggagattgtgcggctgcactccagccttagagacaagagcaagactccatctcaaaaaaaaaaaaaaaagaaagaaagaaaaataccaa

SEQ ID NO: 71474 - DNA, 120 bp, synthetic construct
  source 1..120: mol_type = other DNA
gtaaagtctaaaatgaatagcttttatataaggatttagaatattttaaggccaggcacggtgactcatgcctgtaatcccagcactttgggaggccaaggcgggtgaatcacttgagct

SEQ ID NO: 71475 - DNA, 120 bp, synthetic construct
  source 1..120: mol_type = other DNA
gatcgtgccactgcattccagcctgggcgacagaacgagactccatctcaaacaaacaaaaaaaaaaaaagaagaaatggagctttctcaggaacaatttcttcttgatccaaagatttc

SEQ ID NO: 71476 - DNA, 120 bp, synthetic construct; identical to SEQ ID NO: 11849
  source 1..120: mol_type = other DNA

SEQ ID NO: 71477 - DNA, 120 bp, synthetic construct
  source 1..120: mol_type = other DNA
caaaaatgttctcccattttgtaggttgcctgttcactctgatggtagtttctttagctgtgcagaagctctttagtttaattagatcccatttgtcaattttgtcttttgttgccattg

SEQ ID NO: 71478 - DNA, 120 bp, synthetic construct; identical to SEQ ID NO: 11850
  source 1..120: mol_type = other DNA

SEQ ID NO: 71479 - DNA, 120 bp, synthetic construct; identical to SEQ ID NO: 34088
  source 1..120: mol_type = other DNA

SEQ ID NO: 71480 - DNA, 120 bp, synthetic construct
  source 1..120: mol_type = other DNA
aggacatatttgcctccctatgatttaattctgagttcttgagatatgtttccctagggtggcgggagtctccttgttttctgtacctttcagagtcaccaactataaatacccattcca

SEQ ID NO: 71481 - DNA, 120 bp, synthetic construct
  source 1..120: mol_type = other DNA
atattttacccaaaatatacaaagaactcttaaaacccaacaataagaaaaggagcagttttaggccaggtgtggtggctcacaccggtaatcccaatactttgggaggccaaagtggga

SEQ ID NO: 71482 - DNA, 120 bp, synthetic construct
  source 1..120: mol_type = other DNA
ttgtttggccgagtcgggggattacctgagcccaggagttcaagaccagcctgggcaacatagtagggtctagtttctactaaaaataataataataataaaaaaacattagctgggtgt

SEQ ID NO: 71483 - DNA, 120 bp, synthetic construct; identical to SEQ ID NO: 15396
  source 1..120: mol_type = other DNA

SEQ ID NO: 71484 - DNA, 120 bp, synthetic construct
  source 1..120: mol_type = other DNA
gactgtaaactagtcaaccattgtggaagtcagtgtggcgattcctcagggatctagaactagaaataccatttgacccagccatcccattactgggtatatacccaaaggactataaat

SEQ ID NO: 71485 - DNA, 120 bp, synthetic construct
  source 1..120: mol_type = other DNA
attctactataaagacacatgcacatatatgtttattgcagcactattcacaataggaaagacttggaaccaacccaaatgcccatcagtgatagactggaagaagaaaatgtggcacat

SEQ ID NO: 71486 - DNA, 120 bp, synthetic construct; identical to SEQ ID NO: 11619
  source 1..120: mol_type = other DNA

SEQ ID NO: 71487 - DNA, 120 bp, synthetic construct
  source 1..120: mol_type = other DNA
gttgtacttttcgggggggaaaaggtatcgggaaatgaggtcagctgttgtatcaaggatagaggggggcagagatagtgggagagacagagtgaacgtgaaaggggggggccgaagaga

SEQ ID NO: 71488 - DNA, 120 bp, synthetic construct
  source 1..120: mol_type = other DNA
gtggggggcagggagccgcagagcgccaaggccatgctgaatgcccgttctagagaattcaggggccccatcccgggtttctggggtgcccgggcggcctgtgctcgtgagctggggtct

SEQ ID NO: 71489 - DNA, 120 bp, synthetic construct; identical to SEQ ID NO: 24943
  source 1..120: mol_type = other DNA

SEQ ID NO: 71490 - DNA, 120 bp, synthetic construct
  source 1..120: mol_type = other DNA
aaattgcaccagtgcactttagcctgggtgacagagcgagactctgtctctagatagacagatagatagataggtagataggtacatagatagatagatagatagatagatagatagata

SEQ ID NO: 71491 - DNA, 120 bp, synthetic construct; identical to SEQ ID NO: 24944
  source 1..120: mol_type = other DNA

SEQ ID NO: 71492 - DNA, 120 bp, synthetic construct
  source 1..120: mol_type = other DNA
ccagccccgagttcttctcaataaaatcggacaaaaaattcagagaaaaataggagcgcttgagagagcaagcgagaggggactgaggttcgggaaaggaccgaggggatgtgccgtcgt

SEQ ID NO: 71493 - DNA, 120 bp, synthetic construct
  source 1..120: mol_type = other DNA
agataaaaccacaaagacggggaaaaaacagagcaaaaaaactggaaactcttaaaaagcagagtgcctctccttctccaaaggaacacagttcctcaccagcaacagagcaaagctgga

SEQ ID NO: 71494 - DNA, 120 bp, synthetic construct
  source 1..120: mol_type = other DNA
ttgtcaccaccaggcctgccctaaaagagctcctgaaggaagcgctaaacatggaaaggaacaaccggtaccagccactgcaaaatcatgccaaaacgtaaagaccatcaagactaggaa

SEQ ID NO: 71495 - DNA, 120 bp, synthetic construct
  source 1..120: mol_type = other DNA
agtgtgtagagggaaatttatagcactaaatgcccacaagagaaagcaggaaagatccaaaattgacaccctaacatcacaattaaaagacctagaaaagcaagagaaaacacattcaaa

SEQ ID NO: 71496 - DNA, 120 bp, synthetic construct
  source 1..120: mol_type = other DNA
taagagctatctatgacaaacccacagccaatatcatactgaatgggcaaaaactggaagcattccctttgaaaactggcacaagacagggatgacctctctcaccactcctactcaaca

SEQ ID NO: 71497 - DNA, 120 bp, synthetic construct
  source 1..120: mol_type = other DNA
taaaaaccctaggcattaccattcaggacataggcatgggcaaggacttcatgtctaaaacaccaaaagcaatggcaacaaaagccaaaattgacaaatgggatctaattaaactaaaga

SEQ ID NO: 71498 - DNA, 120 bp, synthetic construct
  source 1..120: mol_type = other DNA
tgggagatatacctaatgctagatgacgagttagtgggtgcagggcaccagcatggcacatgtatacatatgtaactaacctgcacattgtgcacatgtaccctaaaacttaaagtataa

SEQ ID NO: 71499 - DNA, 120 bp, synthetic construct; identical to SEQ ID NO: 28960
  source 1..120: mol_type = other DNA

SEQ ID NO: 71500 - DNA, 120 bp, synthetic construct
  source 1..120: mol_type = other DNA
tttacagtcccaccaacagtgtaacagtgttcctatttctccacatcctctccaggacctgttgcttcctgactttttaatgattgccattttaactggtatgagatggtatctcattgt

SEQ ID NO: 71501 - DNA, 120 bp, synthetic construct
  source 1..120: mol_type = other DNA
agaggttgtggtgagccaagattgggccatcgcactccggcctgggcaacaaaagcaaaactctgtctccaaaaaaaaaaaaaaaaaaacttctgagagaaattattcaagtggtttcac

SEQ ID NO: 71502 - DNA, 120 bp, synthetic construct
  source 1..120: mol_type = other DNA
gcagacaactcaacaagaaaaaccacaatccctttaagaagtgagcaaaggacgtgaacaaacatttctctaaagaagacatacaaatggccaagaatctcctaaacatactccacatca

SEQ ID NO: 71503 - DNA, 120 bp, synthetic construct; identical to SEQ ID NO: 28475
  source 1..120: mol_type = other DNA

SEQ ID NO: 71504 - DNA, 120 bp, synthetic construct; identical to SEQ ID NO: 28476
  source 1..120: mol_type = other DNA

SEQ ID NO: 71505 - DNA, 120 bp, synthetic construct; identical to SEQ ID NO: 28477
  source 1..120: mol_type = other DNA

SEQ ID NO: 71506 - DNA, 120 bp, synthetic construct; identical to SEQ ID NO: 28478
  source 1..120: mol_type = other DNA

SEQ ID NO: 71507 - DNA, 120 bp, synthetic construct
  source 1..120: mol_type = other DNA
agaaaggacttggtactttgtaggatgagtcgcttaggagaaaaatgaaaaccaccactactatttctccatagggaacgagcagggctcttgctaccacgttgaatggaaaaataaaag

SEQ ID NO: 71508 - DNA, 120 bp, synthetic construct; identical to SEQ ID NO: 25459
  source 1..120: mol_type = other DNA

SEQ ID NO: 71509 - DNA, 120 bp, synthetic construct
  source 1..120: mol_type = other DNA
cttgtacattttctgatgctataacagaagtggattggataatttaaaaagaacagagatttatttcttatggttctggaggctgggaagtccaaggtccaggggtccacatctggcaag

SEQ ID NO: 71510 - DNA, 120 bp, synthetic construct
  source 1..120: mol_type = other DNA
aaatttgtttgagttcattgtagattctggatattagccctttgtcagatgagtaggttgcaaaaattttctcccattttgtaggttgcctgttcaactctgatggtagtttcttttgct

SEQ ID NO: 71511 - DNA, 120 bp, synthetic construct
  source 1..120: mol_type = other DNA
gttgcttatttgcactccagcctgggggacagagtgaaactctgtcacaacaacaacaaaatcaatgcagtataattaccaagtattagattctagagtgatctgtgactctgctacccc

SEQ ID NO: 71512 - DNA, 120 bp, synthetic construct; identical to SEQ ID NO: 9156
  source 1..120: mol_type = other DNA

SEQ ID NO: 71513 - DNA, 120 bp, synthetic construct; identical to SEQ ID NO: 9157
  source 1..120: mol_type = other DNA

SEQ ID NO: 71514 - DNA, 120 bp, synthetic construct; identical to SEQ ID NO: 9158
  source 1..120: mol_type = other DNA

SEQ ID NO: 71515 - DNA, 120 bp, synthetic construct
  source 1..120: mol_type = other DNA
atcacaccactgcactctagcttgggcgacagagagagactctgtctcaaaaaaaaaaaaaaaaaatggagctggtggtggggtgctgagattctgtcaatctttcttccctccagattc

SEQ ID NO: 71516 - DNA, 120 bp, synthetic construct
  source 1..120: mol_type = other DNA
gaacgagcctccttttgtaaagagacgtgcactcactgggtcagcagtgaggcagggaggacagcctcacagctacgagcacgggttttttaaggctggtcaccaacccagctctgctgc

SEQ ID NO: 71517 - DNA, 120 bp, synthetic construct
  source 1..120: mol_type = other DNA
cagagcaagactctgtctcaaaaaaaaaaaaaaaaaaataggattgcccactcccccacccaccatgccccagtgtccttgtggatttgtgcttcttgtccctgcaactttagggttgtc

SEQ ID NO: 71518 - DNA, 120 bp, synthetic construct
  source 1..120: mol_type = other DNA
tctaatttttgtatttttagtagagacgggatttcgccatgttggccaggctggtaatttttgtatctttagtagagacggggttttgccacgttagccaggctggtctcttaactcctg

SEQ ID NO: 71519 - DNA, 120 bp, synthetic construct
  source 1..120: mol_type = other DNA
aagttacggtgagccgagattgcaccattgcactccagcctgtgcaacagagccagactccgtctcaaaacaacaataacaacaacaacaacaacaacaaaaaaaaaaaaacagaaaaaa

SEQ ID NO: 71520 - DNA, 120 bp, synthetic construct
  source 1..120: mol_type = other DNA
tacctgagcctgacgcccgagcagtggaggtcccgcagaagctacagctgccaggtcatgcatgaagggagcactgcagagaagacggtggcccctgcagaatgttcataggttcccagc

SEQ ID NO: 71521 - DNA, 120 bp, synthetic construct
  source 1..120: mol_type = other DNA
ccatgcccaccccagcagcctctgatgcccctggacttcacctggcagccatggagttctctgcactcccgtttactccccgctagtcaccttctgagtctaaggtgcccttcctcaaat

SEQ ID NO: 71522 - DNA, 120 bp, synthetic construct
  source 1..120: mol_type = other DNA
agtgtcccccagtagtgtctctgtgcctgtcccttctctgaggcaggtgctgccccagcgtgtgtccccctctctgaaactgttggtgctgatggcaacgctgggcccagtaggtcccag

SEQ ID NO: 71523 - DNA, 120 bp, synthetic construct
  source 1..120: mol_type = other DNA
tgaaatggcttctgcgaacttagctactgcatctagacattctttttttttttgagacagagtctcgctctgttgcccaggctggagtgcagcctggcaacagagcaagactgtcccaaa

SEQ ID NO: 71524 - DNA, 120 bp, synthetic construct
  source 1..120: mol_type = other DNA
ttaatttaaaaataattaacattcaaaacctattaagacctattaaaaatagtacaggctaggtagggtggctcacgtctgtaatctcagcactttaggaggccgaggcgggtggatggc

SEQ ID NO: 71525 - DNA, 120 bp, synthetic construct
  source 1..120: mol_type = other DNA
tgcccatcttggcgtcctaaagtgctgggattacaggcatgagacacagcacccggcccatagtatttctataagatttctaaagattctaatataaaaacttacattaatagcccccca

SEQ ID NO: 71526 - DNA, 120 bp, synthetic construct
  source 1..120: mol_type = other DNA
agagggaggttctgcccctgaaatgattatcgcctgtgggtataacatgcaccagtgaacaggctgttgtgtcccaaatgctcataaatggaccccgatgcttggtgctttgtctgggga

SEQ ID NO: 71527 - DNA, 120 bp, synthetic construct
  source 1..120: mol_type = other DNA
cagaggtccttgtggcctgacttgcagtgtgggctccctagagagtggtgccctggtccctctcgctggcagcagctgtcccattgcaccccagtccatgtggccccatcctcatcctct

SEQ ID NO: 71528 - DNA, 120 bp, synthetic construct
  source 1..120: mol_type = other DNA
cattcttatagatttcactcaaaggccagtagcttcctcctgagcggtgagtgcatcatgtcatggcttctgacaggcccccggtcctctcccagcccagcatccccgaccctctcccaa

SEQ ID NO: 71529 - DNA, 120 bp, synthetic construct
  source 1..120: mol_type = other DNA
tgagtagctgggattacaggcgcccaccaccatgccagctaatttttgtattattagtagagatggggtttcagcatgttggtcaggctggtctcaaactcctgacctcatgatccacct

SEQ ID NO: 71530 - DNA, 120 bp, synthetic construct
  source 1..120: mol_type = other DNA
cttgatgatactgagcttccaaatgccagtcttcaaattttgcactgcaactcagagggtgtaaaattaattccaatggctgcaaccagcattttgttaaagtgaggcagcccagagctg

SEQ ID NO: 71531 - DNA, 120 bp, synthetic construct
  source 1..120: mol_type = other DNA
ccttgagtgtgacactcatcactgcctgggactcagaaactgtggttcccccaaggacagccccaggtctcgggagaggaagcgactgttttaaatagtgcccccagccgctccctttca

SEQ ID NO: 71532 - DNA, 120 bp, synthetic construct
  source 1..120: mol_type = other DNA
cctcccacctcagcctcccaaagggctgggatttaagttaccagtttccctctatgtgctgatttatctgtatcctacaaatttttatgtggtggtctcatcattgttcagtttaaaatg

SEQ ID NO: 71533 - DNA, 120 bp, synthetic construct
  source 1..120: mol_type = other DNA
ttggaactcacttgctggctgaaaagcagaagccaaaaacaactaatttcgatcttaaatagccataaattttaagataaggaaatgaattcctaatgagcaaactccaaaggctgacaa

SEQ ID NO: 71534 - DNA, 120 bp, synthetic construct
  source 1..120: mol_type = other DNA
ggaagatgaaagagttctggagatggatggtggtgaaggttgcccaacagtgtggatgtacttagtgccacagaactgtacgtttaaaaatggttaaagtggaaatattgatgctatgtg

SEQ ID NO: 71535 - DNA, 120 bp, synthetic construct
  source 1..120: mol_type = other DNA
ggattacaggcgtgagccaccgcttccagccaatatcacacttcttcttttttttttttttttttttttgagacagagttctgctcttgttgcccaggctggagtgcaatgtcacaatct

SEQ ID NO: 71536 - DNA, 120 bp, synthetic construct
  source 1..120: mol_type = other DNA
gagagagactcagtcaaaaaaaaaaaaaaaaaaaaaaaaagctgggggtggtggctcacgcctgtaatcccaacactttgggaggctgaggcagggagataatgaggtcaggagttcaag

SEQ ID NO: 71537 - DNA, 120 bp, synthetic construct
  source 1..120: mol_type = other DNA
agagtcactggaaagaggggccagtcccatgtcatatccagcagagacaccaggtacagcagaaggaccttggacatgaccatgaggagggccttgttggccatgacctgggagagatgg

SEQ ID NO: 71538 - DNA, 120 bp, synthetic construct
  source 1..120: mol_type = other DNA
aaatctgttttctttctctgggtcttcttcccctctggcctccaggccttaggcatgaaaccctccctttctccttggggtctgggggaagtgggctagtctcaggtcaactggcttgaa

SEQ ID NO: 71539 - DNA, 120 bp, synthetic construct
  source 1..120: mol_type = other DNA
cctcggtttccccgtgtgcacccagggcaggctgtgctccctccttcctggtttctggagtctgagtttggaatctaggggtctccctcacagcacacaaaactatactggcaggatgtg

SEQ ID NO: 71540 - DNA, 120 bp, synthetic construct
  source 1..120: mol_type = other DNA
gagaggatcaaagccacccacgggtgtcccctggggaaataggccaggataggaggagttcgctcactggacaccagtccctccagtctctccctcctccccttcttccttgcagctcaa

SEQ ID NO: 71541 - DNA, 120 bp, synthetic construct
  source 1..120: mol_type = other DNA
taggacatggagagtttctcagatgcttggcacagacagtcactggccatctttgcaggaagcatcatttttgggaaactcttcgccattggatcctgggcctcaggtggaaaaccaggt

SEQ ID NO: 71542 - DNA, 120 bp, synthetic construct
  source 1..120: mol_type = other DNA
ccttctctgggtataagaagggaatgcagagaggttggtcaatgaatacacacttacagttagatgcaaggaatgtgttctaatgttggatagcagagtagggtgactatggttagcaat

SEQ ID NO: 71543 - DNA, 120 bp, synthetic construct
  source 1..120: mol_type = other DNA
agaagttggtgggtatggatgtgtttttgaactggcagaattttactctgttcattggggtatcaggtattgagtccctattgaccaggtactgtgctaggtgtggccattacagaaatc

SEQ ID NO: 71544 - DNA, 120 bp, synthetic construct
  source 1..120: mol_type = other DNA
agctccgcctcccaggttcaagggattctcctgcctcagcctcccgagtagctggtattacaggtacctgccattgtgcctggctaatttttgtatttttagtagagactgggtttcacc

SEQ ID NO: 71545 - DNA, 120 bp, synthetic construct
  source 1..120: mol_type = other DNA
ttaaactctacttaaactctactgctggacagtgaatgagtctttgtattccaggttcattcactgcccagcagtgtagtcttacacaactgaactctctaagccttggtttgctcatct

SEQ ID NO: 71546 - DNA, 120 bp, synthetic construct
  source 1..120: mol_type = other DNA
tctctggatctgtctctgggtctctgtccttctctgtgtgtgtgtctctgtccctctctgctggatctctgtccccttctctctgagtctccctctgggtctctttccctctctctctct

SEQ ID NO: 71547 - DNA, 120 bp, synthetic construct
  source 1..120: mol_type = other DNA
aaagaatattcaaataatcagtagaagatatgggaagagggggcataaagaaaaaagcttaataaatagaaaatcggggaggagccaagatggccgaataggaacagctccggtctacag

SEQ ID NO: 71548 - DNA, 120 bp, synthetic construct
  source 1..120: mol_type = other DNA
ctctcctcctccaaaggaacacagttcctcaccagcaatggaacaaagctggatggagaaagattttgacgagctgagagaagaaggcttcagacgatcaaattactctgagctacggga

SEQ ID NO: 71549 - DNA, 120 bp, synthetic construct
  source 1..120: mol_type = other DNA
cctgaatacagcacactgatgggtcttgactctttatccaactcgccagtctgtgtcttttaattggagcatttagtccatttacatttaaagttaatagtgttatgtgtgaatttaatc

SEQ ID NO: 71550 - DNA, 120 bp, synthetic construct
  source 1..120: mol_type = other DNA
tgagaacaaagacacaacatagcagaatctctgggacgcattcaaagcagtgtgtagagggaaatttatagcactaaatgcccacaagagaaagcaggaaagatccaaaattgacaccct

SEQ ID NO: 71551 - DNA, 120 bp, synthetic construct
  source 1..120: mol_type = other DNA
atgtaatccagcatataaacagagccaaagacaaaaaccacatgattatcccaatagatgcagaaaaagcctttgacaaaattcaacaacccttcatgctaaaaactctcaataaattag

SEQ ID NO: 71552 - DNA, 120 bp, synthetic construct
  source 1..120: mol_type = other DNA
tatttaataaatggggctgggaaaactggctagccatatgtagaaagctgaaactggatcccttccttacaccttatagaaaaatcaattcaagatggattaaagatttaaatgttagac

SEQ ID NO: 71553 - DNA, 120 bp, synthetic construct
  source 1..120: mol_type = other DNA
caaacaccgtatattctcactcataggtgggaattgaacaatgagatcacctggacacatgaaggggaataccacactctggggactgtggtggggtggggggaggggggagggatagca

SEQ ID NO: 71554 - DNA, 120 bp, synthetic construct; identical to SEQ ID NO: 24565
  source 1..120: mol_type = other DNA

SEQ ID NO: 71555 - DNA, 120 bp, synthetic construct
  source 1..120: mol_type = other DNA
cttcagaaataaggtcttgggtccaaaaaagttgagaacaaagcaagatgactagagtaccagcaaccgacacccagagttgttggaaaacaaaaatcaacaatgtaaaacaagatgaac

SEQ ID NO: 71556 - DNA, 120 bp, synthetic construct
  source 1..120: mol_type = other DNA
ggtcactcttaactcatcttcctgtccccttgaagttgaatcctaatatattagccagagtgcctctgttcaaatctagctttagatcatatcactcggttgtaatctcttcaatggccc

SEQ ID NO: 71557 - DNA, 120 bp, synthetic construct
  source 1..120: mol_type = other DNA
agtgtttggttttttgttcttgtgatagtttactgagaatgatggtttccagtttcatccatgtccctacaaaggacatgaactcatcattttttatggctgcatagtattccatggtgt

SEQ ID NO: 71558 - DNA, 120 bp, synthetic construct
  source 1..120: mol_type = other DNA
gttgtaggtatgcggcattatttctgagggctctgttctgttccattgatctatatctctgttttggtaccagtaccatgctgttttggttactgtagccttgtagtatagtttgaagtc

SEQ ID NO: 71559 - DNA, 120 bp, synthetic construct
  source 1..120: mol_type = other DNA
tcaatacttaatttattgagagtttttagcatgaagggttgttgaattttgtcaaaggctttttctgcatctattgagataatcatgtggtttttgtctttggctctctttatatgctgg

SEQ ID NO: 71560 - DNA, 120 bp, synthetic construct
  source 1..120: mol_type = other DNA
ttactcttgcttttctagttcttttaattgtgatgttagggtgtcaattttggatctttcctgctttctcttgtgggcatttagtgctataaatttccctctacacactgctttgaatgt

SEQ ID NO: 71561 - DNA, 120 bp, synthetic construct
  source 1..120: mol_type = other DNA
gcagcggctggtaccggttgttcctttccatgtttagcacttccttcaggagctcttttagggcaggcctggtggtgacaaaatctctcagcatttgcttgtctgtaaagtattttattt

SEQ ID NO: 71562 - DNA, 120 bp, synthetic construct
  source 1..120: mol_type = other DNA
ccttcttctctcagctcgtcaaaatcattctccatccagctttgttccgttgctgctgaggaactgcgctcctttggaggaggagaggcgctctgcattttagagtttccagtttttctg

SEQ ID NO: 71563 - DNA, 120 bp, synthetic construct
  source 1..120: mol_type = other DNA
cgagccgaagcagggcgaggcattgcctcacctgggaagcgcaaggggtcagggagttctctttccgagtcaaagaaaggggtgacggacgcacctggaaaatcgggtcactcccacccg

SEQ ID NO: 71564 - DNA, 120 bp, synthetic construct
  source 1..120: mol_type = other DNA
gtgaggggagaggggaggttaggagggggtgagctctccttctccctgcaataaatcggcttagcggacgagagccgaacagcccagaaaggattaaagaaaagtctgtataatacgcgg

SEQ ID NO: 71565 - DNA, 120 bp, synthetic construct
  source 1..120: mol_type = other DNA
agatggtatctcattgtggttttgatttgcatttctctgatggccagtgatgatgagcattttttcatgtgttttttggctgcataaatgtcttcttttgaggaatgtctgttcatatcc

SEQ ID NO: 71566 - DNA, 120 bp, synthetic construct; identical to SEQ ID NO: 7244
  source 1..120: mol_type = other DNA

SEQ ID NO: 71567 - DNA, 120 bp, synthetic construct
  source 1..120: mol_type = other DNA
tagggctgccatagcaaaataccacaaactgggtggtttaaacaacagaaatggtttttcccacagttctggatgctggaagtccaagatcaaggtgctggcagcgttggtttcttgtgt

SEQ ID NO: 71568 - DNA, 120 bp, synthetic construct
  source 1..120: mol_type = other DNA
aggagttcaagaccagcctggccaacatgaagaaaccccatctctactacaaatacaaaaattagctgggtgtgatggcacacgcctgtaatcctagttactcgggaggctgaggcagga

SEQ ID NO: 71569 - DNA, 120 bp, synthetic construct; identical to SEQ ID NO: 7981
  source 1..120: mol_type = other DNA

SEQ ID NO: 71570 - DNA, 120 bp, synthetic construct; identical to SEQ ID NO: 7982
  source 1..120: mol_type = other DNA

SEQ ID NO: 71571 - DNA, 120 bp, synthetic construct; identical to SEQ ID NO: 7983
  source 1..120: mol_type = other DNA

SEQ ID NO: 71572 - DNA, 120 bp, synthetic construct
  source 1..120: mol_type = other DNA
caaccaattcttcccacctcaacttctgaagcagctgagactacaggtgtgtaccaccatgcccagctaatgtttttgatttttagtaagatgaggtcttgttatattgcccaggctggt

SEQ ID NO: 71573 - DNA, 120 bp, synthetic construct; identical to SEQ ID NO: 7966
  source 1..120: mol_type = other DNA

SEQ ID NO: 71574 - DNA, 120 bp, synthetic construct; identical to SEQ ID NO: 7967
  source 1..120: mol_type = other DNA

SEQ ID NO: 71575 - DNA, 120 bp, synthetic construct; identical to SEQ ID NO: 7968
  source 1..120: mol_type = other DNA

SEQ ID NO: 71576 - DNA, 120 bp, synthetic construct; identical to SEQ ID NO: 7969
  source 1..120: mol_type = other DNA

SEQ ID NO: 71577 - DNA, 120 bp, synthetic construct; identical to SEQ ID NO: 7970
  source 1..120: mol_type = other DNA

SEQ ID NO: 71578 - DNA, 120 bp, synthetic construct; identical to SEQ ID NO: 7971
  source 1..120: mol_type = other DNA

SEQ ID NO: 71579 - DNA, 120 bp, synthetic construct; identical to SEQ ID NO: 7972
  source 1..120: mol_type = other DNA

SEQ ID NO: 71580 - DNA, 120 bp, synthetic construct; identical to SEQ ID NO: 7973
  source 1..120: mol_type = other DNA

SEQ ID NO: 71581 - DNA, 120 bp, synthetic construct
  source 1..120: mol_type = other DNA
tgctttggccacgtaaggcgcgcctgcttccccttcaccttccaccatgattgaaagtttcctgtggttgccccagaagccgagcagatgccagcattatgctccctgaacagcctgtgg

SEQ ID NO: 71582 - DNA, 120 bp, synthetic construct
  source 1..120: mol_type = other DNA
actttacggatgcagaatctgaggcaaggagttagggagtaaatgaagctggctaaacacacttgcactggccaggcacggtggctcatgcctgtaatcccagcactttgggaggccaag

SEQ ID NO: 71583 - DNA, 120 bp, synthetic construct; identical to SEQ ID NO: 7975
  source 1..120: mol_type = other DNA

SEQ ID NO: 71584 - DNA, 120 bp, synthetic construct; identical to SEQ ID NO: 7976
  source 1..120: mol_type = other DNA

SEQ ID NO: 71585 - DNA, 120 bp, synthetic construct
  source 1..120: mol_type = other DNA
gcatgggcttggccgggcatggtggctcacgcctgtaatcccagcactttgggaggccgaggcgggtggatcatgaggtcaggagatcgagaccatcctggctaacacagtgaaaccccg

SEQ ID NO: 71586 - DNA, 120 bp, synthetic construct; identical to SEQ ID NO: 7978
  source 1..120: mol_type = other DNA

SEQ ID NO: 71587 - DNA, 120 bp, synthetic construct; identical to SEQ ID NO: 7979
  source 1..120: mol_type = other DNA

SEQ ID NO: 71588 - DNA, 120 bp, synthetic construct; identical to SEQ ID NO: 23091
  source 1..120: mol_type = other DNA

SEQ ID NO: 71589 - DNA, 120 bp, synthetic construct
  source 1..120: mol_type = other DNA
acaccttacacaaaaatcaattcaagatggattaaagacttaaacgttagacctaaaaccataaaaaccctagaagaaaacctaggcattaccattcagaacataggcatgggcaaggac

SEQ ID NO: 71590 - DNA, 120 bp, synthetic construct
  source 1..120: mol_type = other DNA
ttgtgcacatgtacccgaaaacttaaagtattaaaaaaaaaatgcaatggcaacaaaagccaaaattgacaaatgggatctaattaagatcctttcttacaaactgtgcttacgctggtg

SEQ ID NO: 71591 - DNA, 120 bp, synthetic construct; identical to SEQ ID NO: 12499
  source 1..120: mol_type = other DNA

SEQ ID NO: 71592 - DNA, 120 bp, synthetic construct; identical to SEQ ID NO: 12500
  source 1..120: mol_type = other DNA

SEQ ID NO: 71593 - DNA, 120 bp, synthetic construct; identical to SEQ ID NO: 12501
  source 1..120: mol_type = other DNA

SEQ ID NO: 71594 - DNA, 120 bp, synthetic construct; identical to SEQ ID NO: 12502
  source 1..120: mol_type = other DNA

SEQ ID NO: 71595 - DNA, 120 bp, synthetic construct
  source 1..120: mol_type = other DNA
tgggattacaggcatgagccactgcacccagcctttttttttttttttttgaaatggagtttcgctcttgttgcctaggctggagtgctatggcacgatctcagctcacctcaaactcag

SEQ ID NO: 71596 - DNA, 120 bp, synthetic construct; identical to SEQ ID NO: 35617
  source 1..120: mol_type = other DNA

SEQ ID NO: 71597 - DNA, 120 bp, synthetic construct; identical to SEQ ID NO: 35618
  source 1..120: mol_type = other DNA

SEQ ID NO: 71598 - DNA, 120 bp, synthetic construct
  source 1..120: mol_type = other DNA
gaggtgggaggattgcttgaggccaacgatgtgagaccagcctgggcaacatagcaagaccttgtctctacaaaaataaaaattcaaaaaagtggcatttaacacatactttttttcttt

SEQ ID NO: 71599 - DNA, 120 bp, synthetic construct
  source 1..120: mol_type = other DNA
cgatctgaagaggcagaaggagcaggctctgcgggaggtggagcacctgaagagatgccagcaggtagtcggggcagggccaggttctgaaaacccgcggtgacgccagtgttccacaag

SEQ ID NO: 71600 - DNA, 120 bp, synthetic construct
  source 1..120: mol_type = other DNA
ctgtcctcctcttttgacaagaacaccggagatacacaaaggtacacaaaagcgggcctttgttcaagctggcaaaagagatcttcttcagaaacccctgcttgcgggggagagagctga

SEQ ID NO: 71601 - DNA, 120 bp, synthetic construct
  source 1..120: mol_type = other DNA
ctgcttgccggggcagtgactaagccgttgacaacctcaaggcagctttgtgctccttcgtctctttggggatctctttttgccccatctgtgtgtcaccctgtggcagagggttaaggt

SEQ ID NO: 71602 - DNA, 120 bp, synthetic construct
  source 1..120: mol_type = other DNA
tactctcttttgcaaaggggtcttggttcttgtgagtgggaccattgggtcaaagggcagggaggtttctgtggttctcattcggtcctgcttctgccctccagacagatggatcagctg

SEQ ID NO: 71603 - DNA, 120 bp, synthetic construct
  source 1..120: mol_type = other DNA
tgcgcatgcagggccagagcgtggaggccgcgctccgcatggagcgccaggccgcctcggaggagaagtgagtcagcgggggcggggccgcaccgcagggtctgtggttctacacttgat

SEQ ID NO: 71604 - DNA, 120 bp, synthetic construct
  source 1..120: mol_type = other DNA
attataaacattaaaaatactagcttttaggaaaacgatattaactgcctggtgaccagcccaccaaagcctgctttagagttgacggcctcaggagtcctcacacagccttggaagacc

SEQ ID NO: 71605 - DNA, 120 bp, synthetic construct
  source 1..120: mol_type = other DNA
agatttataaggacaaagcctgaagccaggtcacatggggaagagttagctacaaaactggccacttaatctctggaggggggcgttggtggggtgtgtctgtgtgtgtctcagggggct

SEQ ID NO: 71606 - DNA, 120 bp, synthetic construct
  source 1..120: mol_type = other DNA
tctctcaaagttctgggattacaggcgtgagccaccgcacccggcctctttggcatcattttgtagtggcctttcgtaagcttctgagccacttgtgctgctccttagacctctcggtga

SEQ ID NO: 71607 - DNA, 120 bp, synthetic construct
  source 1..120: mol_type = other DNA
tggtcttacatgagtggcctgtgagaccaggcctgccattgacagtcctgccaagtctccgtccccctccatcctccccttccctctgactcttctcttttcccagcctacctctcctct

SEQ ID NO: 71608 - DNA, 120 bp, synthetic construct
  source 1..120: mol_type = other DNA
cccgtttgggtttttgtcattcgctaggccatgcagttctctgttaagagtgagcttaaacatctttcctgaggctttaaggaccttttttagttctgcttctgaatgggctgctcatat

SEQ ID NO: 71609 - DNA, 120 bp, synthetic construct
  source 1..120: mol_type = other DNA
cacatgagcacttttctttttctaacaccgaagcgtgctcttgtcttcaccaagagtgttgttgcccagtgtgactggtgatggctgtttcatcatattccagaagtttgtgatgccatt

SEQ ID NO: 71610 - DNA, 120 bp, synthetic construct
  source 1..120: mol_type = other DNA
gtttacaggtctctgtcttagcctctgctggttgcttatagagccatcaccctagtctctgcctctgtcatcacacagtctcttcctcttcgtctgtgtcttcccttttgtctcataaag

SEQ ID NO: 71611 - DNA, 120 bp, synthetic construct
  source 1..120: mol_type = other DNA
agctggcattttgaacatctcctcacacgcaacatgccttgtagcatgttggtgtgaacaggccaggtgacaaacttatggataaagcgtgaccccaatagagaagtaaaagctctgagt

SEQ ID NO: 71612 - DNA, 120 bp, synthetic construct
  source 1..120: mol_type = other DNA
gtgtcttcgggcaggggtttgagtgcagtgtgcctgccgagaggttctgcagttccgagcaccatcattttctcctcctcagaccccttggttctccttccacgtcctggcagctgcttc

SEQ ID NO: 71613 - DNA, 120 bp, synthetic construct; identical to SEQ ID NO: 29146
  source 1..120: mol_type = other DNA

SEQ ID NO: 71614 - DNA, 120 bp, synthetic construct; identical to SEQ ID NO: 17997
  source 1..120: mol_type = other DNA

SEQ ID NO: 71615 - DNA, 120 bp, synthetic construct
  source 1..120: mol_type = other DNA
caaacctaaacatacacctatattagaacccagaaatggtattcctgggggtgtgtgtgtgtgtgtgtatatatataatatatagtatattatatatgtatatatactatatgcatatat

SEQ ID NO: 71616 - DNA, 120 bp, synthetic construct; identical to SEQ ID NO: 19629
  source 1..120: mol_type = other DNA

SEQ ID NO: 71617 - DNA, 120 bp, synthetic construct; identical to SEQ ID NO: 7703
  source 1..120: mol_type = other DNA

SEQ ID NO: 71618 - DNA, 120 bp, synthetic construct; identical to SEQ ID NO: 7704
  source 1..120: mol_type = other DNA

SEQ ID NO: 71619 - DNA, 120 bp, synthetic construct; identical to SEQ ID NO: 7705
  source 1..120: mol_type = other DNA

SEQ ID NO: 71620 - DNA, 120 bp, synthetic construct
  source 1..120: mol_type = other DNA
ctgcagtcagctgagatcgtgccactgtactccagcctgggcagacagagtgagactctgtctcaaaaaaaaaaaaaaaaaaaagcagaaaacagtcttttcttcctagcatatgaaatg

SEQ ID NO: 71621 - DNA, 120 bp, synthetic construct; identical to SEQ ID NO: 15555
  source 1..120: mol_type = other DNA

SEQ ID NO: 71622 - DNA, 120 bp, synthetic construct; identical to SEQ ID NO: 15556
  source 1..120: mol_type = other DNA

SEQ ID NO: 71623 - DNA, 120 bp, synthetic construct
  source 1..120: mol_type = other DNA
gttatccaaaaatagggtttgaagagtgatgaaaatttagcatcatcaaggactatagaaaatttggaaggcatatctcctaatgctatccctcccccctccctacacccacaacagtcc

SEQ ID NO: 71624 - DNA, 120 bp, synthetic construct
  source 1..120: mol_type = other DNA
atgatgagcactttttcatgtgtctgttggctgcgtaaatgtcttcttttgagaagtgtctgttcatatccttcacccactttttgatggggttgtttttttcttgtaaatttgtttgag

SEQ ID NO: 71625 - DNA, 120 bp, synthetic construct
  source 1..120: mol_type = other DNA
atttggctctctgtttgtctgttattggtgtataagaaagcttgtgatttttatacattgattttgtatcctgagactttgctgaagttgcctatcagcttaaggagattttgggctgag

SEQ ID NO: 71626 - DNA, 120 bp, synthetic construct
  source 1..120: mol_type = other DNA
aactggaaggtttctggtcttagtaaactagagaaagacattgccttatatagagtaagaggcactggaggaggaggaggaaaaggaaggcaaaccaggatgtgtaggtttgagtggcag

SEQ ID NO: 71627 - DNA, 120 bp, synthetic construct; identical to SEQ ID NO: 13549
  source 1..120: mol_type = other DNA

SEQ ID NO: 71628 - DNA, 120 bp, synthetic construct; identical to SEQ ID NO: 13550
  source 1..120: mol_type = other DNA

SEQ ID NO: 71629 - DNA, 120 bp, synthetic construct; identical to SEQ ID NO: 23418
  source 1..120: mol_type = other DNA

SEQ ID NO: 71630 - DNA, 120 bp, synthetic construct; identical to SEQ ID NO: 23419
  source 1..120: mol_type = other DNA

SEQ ID NO: 71631 - DNA, 120 bp, synthetic construct; identical to SEQ ID NO: 23420
  source 1..120: mol_type = other DNA

SEQ ID NO: 71632 - DNA, 120 bp, synthetic construct
  source 1..120: mol_type = other DNA
aagaatgtgtgccacacccaggcttaaatatgctggctctttcctcttcctctgtacatttatttatttttttagacaaggtctcactctgttgcccaggctggagtgcagtggcacaat

SEQ ID NO: 71633 - DNA, 120 bp, synthetic construct; identical to SEQ ID NO: 21030
  source 1..120: mol_type = other DNA

SEQ ID NO: 71634 - DNA, 120 bp, synthetic construct; identical to SEQ ID NO: 9279
  source 1..120: mol_type = other DNA

SEQ ID NO: 71635 - DNA, 120 bp, synthetic construct; identical to SEQ ID NO: 9280
  source 1..120: mol_type = other DNA

SEQ ID NO: 71636 - DNA, 120 bp, synthetic construct; identical to SEQ ID NO: 21332
  source 1..120: mol_type = other DNA

SEQ ID NO: 71637 - DNA, 120 bp, synthetic construct; identical to SEQ ID NO: 21333
  source 1..120: mol_type = other DNA

SEQ ID NO: 71638 - DNA, 120 bp, synthetic construct; identical to SEQ ID NO: 21025
  source 1..120: mol_type = other DNA

SEQ ID NO: 71639 - DNA, 120 bp, synthetic construct; identical to SEQ ID NO: 21026
  source 1..120: mol_type = other DNA

SEQ ID NO: 71640 - DNA, 120 bp, synthetic construct; identical to SEQ ID NO: 33630
  source 1..120: mol_type = other DNA

SEQ ID NO: 71641 - DNA, 120 bp, synthetic construct
  source 1..120: mol_type = other DNA
ctttgttctcaattattgttttctttctttcttttttttttttttttttttttttttgagacggagtctcgctctgtcgcccaggctggagtgcagtggctcaatctcggctcactgcaa

SEQ ID NO: 71642 - DNA, 120 bp, synthetic construct; identical to SEQ ID NO: 33631
  source 1..120: mol_type = other DNA

SEQ ID NO: 71643 - DNA, 120 bp, synthetic construct
  source 1..120: mol_type = other DNA
tagtatagtttgaagtcaggtagcatgatgcctccagctttgttcttttggcttaggattgacttggcgatgcgggctcttttttggttccatatgaactttaaagtagttttttccaat

SEQ ID NO: 71644 - DNA, 120 bp, synthetic construct
  source 1..120: mol_type = other DNA
catatgtaactaatctgcacaatgtgcacatgtaccctaaaacttaaagtataaaaaaaaatgttcaaggatgcaaatttgaagggaattctcaccaaaatttatagacttgtagaagca

SEQ ID NO: 71645 - DNA, 120 bp, synthetic construct
  source 1..120: mol_type = other DNA
cacttcacacatactagagtctttacctaataaactagatcttcaaatacattaggtcgaatcattaaaaattactaatcttgtataaggtataaggaagggatccagtttcagctttct

SEQ ID NO: 71646 - DNA, 120 bp, synthetic construct
  source 1..120: mol_type = other DNA
tcatgtcatctgcaaagagggacaatttgactccctcttttcctaattgaataccctttatttccttctcctgcctaattgccctggccagaacttccaacactatgttgaataggagtg

SEQ ID NO: 71647 - DNA, 120 bp, synthetic construct
  source 1..120: mol_type = other DNA
cctgcacaatgtgcacatgtaccctaaaacttaaagtataataataaaagaaaaaaaattactaatctttaactcatttgacacataagaatgacaatttcatatattttatttcccacc

SEQ ID NO: 71648 - DNA, 120 bp, synthetic construct
  source 1..120: mol_type = other DNA
ggattttttttagttttagtttcctgtggtattaaaacatgtttatataaagtaaagggggctgggcacagtgtctcacccctgtaatcccagcacttttaggaggcggagacagaagga

SEQ ID NO: 71649 - DNA, 120 bp, synthetic construct; identical to SEQ ID NO: 33633
  source 1..120: mol_type = other DNA

SEQ ID NO: 71650 - DNA, 120 bp, synthetic construct
  source 1..120: mol_type = other DNA
gagttaattactctgaacaattccacaataaatagtcatagaaattgatttgggatatatacatctctctctctctttctctctctctctcacacacacacacacacacacacacacaca

SEQ ID NO: 71651 - DNA, 120 bp, synthetic construct; identical to SEQ ID NO: 33635
  source 1..120: mol_type = other DNA

SEQ ID NO: 71652 - DNA, 120 bp, synthetic construct; identical to SEQ ID NO: 33636
  source 1..120: mol_type = other DNA

SEQ ID NO: 71653 - DNA, 120 bp, synthetic construct; identical to SEQ ID NO: 33637
  source 1..120: mol_type = other DNA

SEQ ID NO: 71654 - DNA, 120 bp, synthetic construct
  source 1..120: mol_type = other DNA
tctctattaaaaatacaaaaattagccggacgtggtgacgggcgcctgtaaccccggccactcgggaggcttaggcaggagaatcacttgaacacaggggcggaggttgcaatgagctga

SEQ ID NO: 71655 - DNA, 120 bp, synthetic construct; identical to SEQ ID NO: 33624
  source 1..120: mol_type = other DNA

SEQ ID NO: 71656 - DNA, 120 bp, synthetic construct
  source 1..120: mol_type = other DNA
agtgcaccccactgcatgtagataaatttaattttttttttttttttttttgtagagacagggtctcactgtgttgcccaagctgtcccctaactcctgggcttaagcaatcctcctacc

SEQ ID NO: 71657 - DNA, 120 bp, synthetic construct
  source 1..120: mol_type = other DNA
tctacacacttgcctcttattatagtattctctgttttctttcctttgtgaacactgtcaacatccttcacaagtttctcttcctgcagtcaccttttggatagaggtgccaccatgctt

SEQ ID NO: 71658 - DNA, 120 bp, synthetic construct
  source 1..120: mol_type = other DNA
aaagagatgatttgtcttagtggttcagtgtggcacaggctttgaaatcagaaaaccagtgttattagatttttgactttaggaaagtaacttgacttcttgcagccttaacttcatccc

SEQ ID NO: 71659 - DNA, 120 bp, synthetic construct
  source 1..120: mol_type = other DNA
tgggtgtttctcgcagagggggatttggcagggtcataggacaatagtggagggaaggtcagcagataaacaagtgagcaaaggtctctggttttcctaggcagaggaccctgcggcctt

SEQ ID NO: 71660 - DNA, 120 bp, synthetic construct
  source 1..120: mol_type = other DNA
ctcacttcctagatgggatggcggccgggcagagacgctcctcactttccagactgtgcagccaggcagagaggctcctcatatcccagacgatggggggccaggcagagacgctcctca

SEQ ID NO: 71661 - DNA, 120 bp, synthetic construct; identical to SEQ ID NO: 33641
  source 1..120: mol_type = other DNA

SEQ ID NO: 71662 - DNA, 120 bp, synthetic construct; identical to SEQ ID NO: 33642
  source 1..120: mol_type = other DNA

SEQ ID NO: 71663 - DNA, 120 bp, synthetic construct; identical to SEQ ID NO: 33643
  source 1..120: mol_type = other DNA

SEQ ID NO: 71664 - DNA, 120 bp, synthetic construct
  source 1..120: mol_type = other DNA
acaggcgtgagctaccgcgcccagtctggatgtagaatttttgattggtacttttttcgttttgtcactttcaatatgccactccactcttttattgcttgcatggtttttgatgagatg

SEQ ID NO: 71665 - DNA, 120 bp, synthetic construct; identical to SEQ ID NO: 33644
  source 1..120: mol_type = other DNA

SEQ ID NO: 71666 - DNA, 120 bp, synthetic construct; identical to SEQ ID NO: 33645
  source 1..120: mol_type = other DNA

SEQ ID NO: 71667 - DNA, 120 bp, synthetic construct; identical to SEQ ID NO: 33646
  source 1..120: mol_type = other DNA

SEQ ID NO: 71668 - DNA, 120 bp, synthetic construct; identical to SEQ ID NO: 33647
  source 1..120: mol_type = other DNA

SEQ ID NO: 71669 - DNA, 120 bp, synthetic construct; identical to SEQ ID NO: 33648
  source 1..120: mol_type = other DNA

SEQ ID NO: 71670 - DNA, 120 bp, synthetic construct
  source 1..120: mol_type = other DNA
aatccagtctatcattgttggacatttgggttggttccaagtctttgctattgtgaataatgccgcaataaacatacatgtgcatgtgtctttatagcagcatgatttatagtcatttgg

SEQ ID NO: 71671 - DNA, 120 bp, synthetic construct; identical to SEQ ID NO: 33649
  source 1..120: mol_type = other DNA

SEQ ID NO: 71672 - DNA, 120 bp, synthetic construct
  source 1..120: mol_type = other DNA
gcagagattgcagtgggctgagatcacgacactgcattccagcctgggcaacagagtgagaccccgtctccaaaaaaaaaaaaaaaaaaagataaaaaaaattgtttaactgagttgtgc

SEQ ID NO: 71673 - DNA, 120 bp, synthetic construct
  source 1..120: mol_type = other DNA
cttaaggccttgtcccagaagtggcacagatcagggaagcccattgctttagccaagtgcatgtacctatgaaaatcttaagttttagagataaagtaggtattaccatcatagaagggg

SEQ ID NO: 71674 - DNA, 120 bp, synthetic construct
  source 1..120: mol_type = other DNA
aaagaaaaaatcagcagagttaacagacaacccgcagagtgggagaaaatcttcacaatctatatatgcaacaaaggactgatatccagaatctgcaaagaactcaaacaaatcagcgag

SEQ ID NO: 71675 - DNA, 120 bp, synthetic construct; identical to SEQ ID NO: 6561
  source 1..120: mol_type = other DNA

SEQ ID NO: 71676 - DNA, 120 bp, synthetic construct; identical to SEQ ID NO: 33652
  source 1..120: mol_type = other DNA

SEQ ID NO: 71677 - DNA, 120 bp, synthetic construct; identical to SEQ ID NO: 33653
  source 1..120: mol_type = other DNA

SEQ ID NO: 71678 - DNA, 120 bp, synthetic construct; identical to SEQ ID NO: 33654
  source 1..120: mol_type = other DNA

SEQ ID NO: 71679 - DNA, 120 bp, synthetic construct
  source 1..120: mol_type = other DNA
aaaaggaatttgttaactggctgtgctctgtaggctttttaagtagaattgctctatgtcactgtgcattaaattttgtgtttggatgtatcctaagcaagctatgaggtctctgaggaa

SEQ ID NO: 71680 - DNA, 120 bp, synthetic construct
  source 1..120: mol_type = other DNA
cgcgccactgcactccagcctgggtgatagagcgagactctgtctcaaaaaaacaaacaaacaacaaaaaaaaaaacataaaaaagcaggaatccaataatctggaagggtgtgccatag

SEQ ID NO: 71681 - DNA, 120 bp, synthetic construct; identical to SEQ ID NO: 33656
  source 1..120: mol_type = other DNA

SEQ ID NO: 71682 - DNA, 120 bp, synthetic construct; identical to SEQ ID NO: 33657
  source 1..120: mol_type = other DNA

SEQ ID NO: 71683 - DNA, 120 bp, synthetic construct; identical to SEQ ID NO: 33658
  source 1..120: mol_type = other DNA

SEQ ID NO: 71684 - DNA, 120 bp, synthetic construct; identical to SEQ ID NO: 33659
  source 1..120: mol_type = other DNA

SEQ ID NO: 71685 - DNA, 120 bp, synthetic construct; identical to SEQ ID NO: 33660
  source 1..120: mol_type = other DNA

SEQ ID NO: 71686 - DNA, 120 bp, synthetic construct
  source 1..120: mol_type = other DNA
tagaacaacgtgaattttagcatggaccaaaaaattaacgctttattttaccagtgaacaactacttgaagaaaatatggggccgggcgcggtggctcaagcctgtgatcccagcacttt

SEQ ID NO: 71687 - DNA, 120 bp, synthetic construct; identical to SEQ ID NO: 33661
  source 1..120: mol_type = other DNA

SEQ ID NO: 71688 - DNA, 120 bp, synthetic construct; identical to SEQ ID NO: 33662
  source 1..120: mol_type = other DNA

SEQ ID NO: 71689 - DNA, 120 bp, synthetic construct
  source 1..120: mol_type = other DNA
aacacacacacacacacacacacacacacacacacgcatgcacacacacccacagtttcttcatgtatcagaaaactatagtagattttggagatccagaagcaattccaacataaaggt

SEQ ID NO: 71690 - DNA, 120 bp, synthetic construct; identical to SEQ ID NO: 33626
  source 1..120: mol_type = other DNA

SEQ ID NO: 71691 - DNA, 120 bp, synthetic construct
  source 1..120: mol_type = other DNA
tgagataatcatcattctcagtaaactatcgcaagaacaaaaaaccaaacgccgcatattctcactcataggtgggaattgaacaatgagatcacatggacacaggaaggggaacatcac

SEQ ID NO: 71692 - DNA, 120 bp, synthetic construct; identical to SEQ ID NO: 33627
  source 1..120: mol_type = other DNA

SEQ ID NO: 71693 - DNA, 120 bp, synthetic construct
  source 1..120: mol_type = other DNA
ttattacacaagctggaaatgcattatttttatcacattggcttacagtcccatcgctgttaatttaaggaacagattaaatataataaggcaggccgggcgcgttggctcacgcctgta

SEQ ID NO: 71694 - DNA, 120 bp, synthetic construct; identical to SEQ ID NO: 33628
  source 1..120: mol_type = other DNA

SEQ ID NO: 71695 - DNA, 120 bp, synthetic construct; identical to SEQ ID NO: 33629
  source 1..120: mol_type = other DNA

SEQ ID NO: 71696 - DNA, 120 bp, synthetic construct
  source 1..120: mol_type = other DNA
ttctcctgcctgattgccctggccagaacttccaacgctatgttgaatagtagttttaaaaataaattaatcctttataaaactgttaagaccgtcacagacatttacaatatgtttaaa

SEQ ID NO: 71697 - DNA, 120 bp, synthetic construct; identical to SEQ ID NO: 35074
  source 1..120: mol_type = other DNA

SEQ ID NO: 71698 - DNA, 120 bp, synthetic construct; identical to SEQ ID NO: 35075
  source 1..120: mol_type = other DNA

SEQ ID NO: 71699 - DNA, 120 bp, synthetic construct; identical to SEQ ID NO: 35076
  source 1..120: mol_type = other DNA

SEQ ID NO: 71700 - DNA, 120 bp, synthetic construct
  source 1..120: mol_type = other DNA
gttttgatttgcatttctctgatggccagtgatgatgagcattttttcatgtgttttttggctgcataaatgtcttcttttgagaagtgtctgttcatgtccttcccccactttttgatg

SEQ ID NO: 71701 - DNA, 120 bp, synthetic construct
  source 1..120: mol_type = other DNA
tgtctgttattggtgtataagaatgcttgtgatttttgtacattgattttgtatcctgagactttgctgaagttgcttatcagcttgaggagattttgggctgagacaatggggttttgt

SEQ ID NO: 71702 - DNA, 120 bp, synthetic construct
  source 1..120: mol_type = other DNA
acctctcatagaattcggctgtgaatccttctggtcctggactctttttggttggtaagctattgattattgccacaatttcagctcctgttattggtctattcagagattcaacttctt

SEQ ID NO: 71703 - DNA, 120 bp, synthetic construct
  source 1..120: mol_type = other DNA
ggtgctgaaaaaaatgtatattctgttgatttggggtggagagttctgtagatttctgttatgtctgcttggtgcagagctgacttcaattcctgggtatccttgttgactttctgtctc

SEQ ID NO: 71704 - DNA, 120 bp, synthetic construct
  source 1..120: mol_type = other DNA
tgctagattggggaagttctcctgaaatgttggcctgccttgctagattggggaagttctcctggataatatcctgcagagtgttttccaacttggttccattctccccgtcactttcag

SEQ ID NO: 71705 - DNA, 120 bp, synthetic construct
  source 1..120: mol_type = other DNA
gttccccttcctgtgtccatgtgttctcatcgttcaattcccatctatgagtgagaacatgcggtgtttggttttttgtccttgccgtagttaactgagaatgatgatttccaatttcat

SEQ ID NO: 71706 - DNA, 120 bp, synthetic construct
  source 1..120: mol_type = other DNA
attatttctgagggctctgttctgttccattgatctatatctctgttttcttaccagtaccatgctcttttggttactgtagccttgtagtatagtttgaagtcaggtagcgtgatgcct

SEQ ID NO: 71707 - DNA, 120 bp, synthetic construct
  source 1..120: mol_type = other DNA
tattatttttttatattccatgcttgtgcatcttcacaacgattttttttaatgtaaaaacttttttcccagcactttgggaggccgaggcgggtggatcatgaggtcaggagatcgaga

SEQ ID NO: 71708 - DNA, 120 bp, synthetic construct
  source 1..120: mol_type = other DNA
acttcttgtttcctgactttttaatgatcaccattctaactggtgtgagatggtatctcattgtggttttgatttgtatttctctgatggccagtgatgatgagcatgttttcatgtgtt

SEQ ID NO: 71709 - DNA, 120 bp, synthetic construct
  source 1..120: mol_type = other DNA
ggcaattttcacaatattgattcttcctacccatgagcatggaatattcttccatttgtttgtatcctcttttatttccttgagcagtggtttgtagttctccttgaagaggtccttcac

SEQ ID NO: 71710 - DNA, 120 bp, synthetic construct
  source 1..120: mol_type = other DNA
cgtcctggactctttttggttggtaagctattgattattgccacaatttcagctcctgttattggtctattcagagattcatcttcttcctggtttagtcttgggagagtgtatgtgtcg

SEQ ID NO: 71711 - DNA, 120 bp, synthetic construct
  source 1..120: mol_type = other DNA
agttcaattcctgggtatccttgttgactttctgtctcgttgatctgtctaatgttgacagtggggtgttaacgtctccctttattaatgtgtgggagtctaagtctctttgtaggtcac

SEQ ID NO: 71712 - DNA, 120 bp, synthetic construct
  source 1..120: mol_type = other DNA
tgtaaatttattaaagcatagtgcttgtttatctcattttgttttatttttctttatttttttttttgagatggagtctcactgtgttgcccaggctggagtgcagtggtgtgatctcag

SEQ ID NO: 71713 - DNA, 120 bp, synthetic construct; identical to SEQ ID NO: 35077
  source 1..120: mol_type = other DNA

SEQ ID NO: 71714 - DNA, 120 bp, synthetic construct
  source 1..120: mol_type = other DNA
caatgagaacacatggacacaggaaggggaacatcacacaccagggcctgttttggggtggggggaggggggcgagatagcattaggagatatacctaatgctaaatgacgagttaatgg

SEQ ID NO: 71715 - DNA, 120 bp, synthetic construct
  source 1..120: mol_type = other DNA
acaatggggttttctagatatacaatcatgacatctgcaaacagggacaatttgacttcctcttttcctaattgaataccctttatttccttctcctgcctaattgccctggccagaact

SEQ ID NO: 71716 - DNA, 120 bp, synthetic construct
  source 1..120: mol_type = other DNA
attgtgatgttagggtgtcaattttggatctttcctgctttctcttgtgggcatttagtgctataaatttccctctacacactgctttgaatgtgtcccagagattctggtatgttgtgt

SEQ ID NO: 71717 - DNA, 120 bp, synthetic construct
  source 1..120: mol_type = other DNA
tgtctatttgattcttcttttttttctttattagtcttgctagcggtctatcaattttgttgatcctttcaaaaaaccagctcctggattcattaattttttgaagggttttttgtgtct

SEQ ID NO: 71718 - DNA, 120 bp, synthetic construct
  source 1..120: mol_type = other DNA
catgctcttttggttactgtagccttgtagtatagtttgaagtcaggtagcgtgatgcctccagctttgttcttttggcttaggattgacttggccatgtgggctcttttttgtttccat

SEQ ID NO: 71719 - DNA, 120 bp, synthetic construct
  source 1..120: mol_type = other DNA
attactgggtatatacccaaaggactataaatcatgctgctataaagacacacacacacgtatgtttattgcggcactattcacaatagcaaagacttggaaccaacccaaatgtccaac

SEQ ID NO: 71720 - DNA, 120 bp, synthetic construct; identical to SEQ ID NO: 35080
  source 1..120: mol_type = other DNA

SEQ ID NO: 71721 - DNA, 120 bp, synthetic construct
  source 1..120: mol_type = other DNA
gtgagctacagccatgactaaaaggtagtggaaatttttctaactgaaagttgttatgcctgtcaaaaagatagactcagtaaaaacccattactgtgcagcagaggaaaaaatcatggg

SEQ ID NO: 71722 - DNA, 120 bp, synthetic construct
  source 1..120: mol_type = other DNA
tttttttatggctgcatagtattccatggtgtatatgtactacattttctttatccaatcttccattgatgggcatttaggttgattccatgtctttgctattgtgaatagtggtgcaat

SEQ ID NO: 71723 - DNA, 120 bp, synthetic construct
  source 1..120: mol_type = other DNA
aattaatttttgtataaggtgtaaggaagggatccagtttcagctttctactcatggctagcccgttttcccagcaccatttattaaataggggatcctttccccatttcttgtttttgt

SEQ ID NO: 71724 - DNA, 120 bp, synthetic construct
  source 1..120: mol_type = other DNA
gtgccagttttcaaagggaatgcttccagtttttgcccattcagtatgatattggctgtgggtttgtcatagatagctcttattattttgagatatgttccatcaatacctaatttctgg

SEQ ID NO: 71725 - DNA, 120 bp, synthetic construct
  source 1..120: mol_type = other DNA
ttgaagggttttttgtgtctctatttccttcagttctgctctgattttagttatttcttgccttctgctagcttttgaatgtgtttgctcttgcttctctagttcttttaattgtgatgt

SEQ ID NO: 71726 - DNA, 120 bp, synthetic construct
  source 1..120: mol_type = other DNA
ctcacagagacactttaattcagaacattaaatacttaggtctccatcataggtgggaattgaacaatgagaacatatggacacaggaaggggaaaatcacacacaggggcctgttgtag

SEQ ID NO: 71727 - DNA, 120 bp, synthetic construct; identical to SEQ ID NO: 35082
  source 1..120: mol_type = other DNA

SEQ ID NO: 71728 - DNA, 120 bp, synthetic construct
  source 1..120: mol_type = other DNA
tggagaaagaattccctatttaataaatggtgctgggaaaactggatagccatatgcagaaaactgaaactggatcccttccttacaccttatacaaaaattaattcaagatggattaaa

SEQ ID NO: 71729 - DNA, 120 bp, synthetic construct
  source 1..120: mol_type = other DNA
atgtttattgcggcactattcacaatagcaaagacttggaaccaacccaaatgtccaacaatgatagactggattaagaaaatgtggcacatatacaccatggaatactatgcagccata

SEQ ID NO: 71730 - DNA, 120 bp, synthetic construct; identical to SEQ ID NO: 35083
  source 1..120: mol_type = other DNA

SEQ ID NO: 71731 - DNA, 120 bp, synthetic construct
  source 1..120: mol_type = other DNA
atattctcactcataggtgggaattgaacaatgagatcacatggacacaggaaggggaatatcacactctggggactgtggtggggtggggggaggggggactgatagcattgggagata

SEQ ID NO: 71732 - DNA, 120 bp, synthetic construct
  source 1..120: mol_type = other DNA
cacatctctcccaaaaaaaaaatttttttttaaattagctaggcatggttacacatgcctatagtcccaactacttgggaagctgaggagggaggattgcttgagtccaggagttcaagg

SEQ ID NO: 71733 - DNA, 120 bp, synthetic construct
  source 1..120: mol_type = other DNA
cctcagccttacaaagtactgggattacaggcgtgagccatggcacctagctgccaccccgaactttttaaattttacaaatccatgaaatccaaaatctgaaagctactcatttcataa

SEQ ID NO: 71734 - DNA, 120 bp, synthetic construct
  source 1..120: mol_type = other DNA
tgtcaattttggcttttgttgccattgcttttggtgtttttgtcatgaagtccttgcccatgcctatgtcctgaatggtattgcctaggttttcttctagggtttttatggttttaggtc

SEQ ID NO: 71735 - DNA, 120 bp, synthetic construct
  source 1..120: mol_type = other DNA
ctcaaaataataagagctatctatgacaaacccacagccaatatcatactgaatgggcaaaaactggaagcattccctttgaaaactggcacaagacagggatgacctctctcaccactc

SEQ ID NO: 71736 - DNA, 120 bp, synthetic construct
  source 1..120: mol_type = other DNA
tatacacacacaaggtatacatatactcacacattcacaatattaaaatgtttgggctaggtgtggtggctcatacctgtaattccagtaatttgggaggccaaggcatgaggagctaga

SEQ ID NO: 71737 - DNA, 120 bp, synthetic construct; identical to SEQ ID NO: 35085
  source 1..120: mol_type = other DNA

SEQ ID NO: 71738 - DNA, 120 bp, synthetic construct; identical to SEQ ID NO: 35086
  source 1..120: mol_type = other DNA

SEQ ID NO: 71739 - DNA, 120 bp, synthetic construct
  source 1..120: mol_type = other DNA
acacgtgaaaaaatgctcatcatcactggccatcagagaaatgcaaatcaaaaccacaatgagataccacttcacaccagttagaatggcgatcattaaaaagtcaggaaacaacaggtg

SEQ ID NO: 71740 - DNA, 120 bp, synthetic construct
  source 1..120: mol_type = other DNA
tgtcttttggctgtataaatgtcttcttctgcgaagtgtctgctcatatcctttgcccatttgttgatggggttgtttgtttttttcttgtaaatttgtttgagttcattgtagattctg

SEQ ID NO: 71741 - DNA, 120 bp, synthetic construct
  source 1..120: mol_type = other DNA
tcagcttaaggagattttgggctgagacgatggggttttctagatatacaatcatgtcatctgcaaacagggaatttgacttcctcttttcctatttgaataccctttatttccttctcc

SEQ ID NO: 71742 - DNA, 120 bp, synthetic construct; identical to SEQ ID NO: 35087
  source 1..120: mol_type = other DNA

SEQ ID NO: 71743 - DNA, 120 bp, synthetic construct
  source 1..120: mol_type = other DNA
catgttgtgcacatgtaccctaaaacttaaagtataataataataaaataaaaaaataaaaaataaaaaaaaaagattagccaggtcctgttggcaacttattctgaatacttaataggc

SEQ ID NO: 71744 - DNA, 120 bp, synthetic construct; identical to SEQ ID NO: 35088
  source 1..120: mol_type = other DNA

SEQ ID NO: 71745 - DNA, 120 bp, synthetic construct; identical to SEQ ID NO: 35089
  source 1..120: mol_type = other DNA

SEQ ID NO: 71746 - DNA, 120 bp, synthetic construct
  source 1..120: mol_type = other DNA
tgtccttttccctcagattgaggaactccctttaacatttattatagggtagggctggtgttgatgaaatcctttaccttttatttgtctgcgaaggtcttcatttctccgtcatgcttc

SEQ ID NO: 71747 - DNA, 120 bp, synthetic construct; identical to SEQ ID NO: 35090
  source 1..120: mol_type = other DNA

SEQ ID NO: 71748 - DNA, 120 bp, synthetic construct; identical to SEQ ID NO: 35068
  source 1..120: mol_type = other DNA

SEQ ID NO: 71749 - DNA, 120 bp, synthetic construct
  source 1..120: mol_type = other DNA
tgaatattgggtactcgtggacataaagatggcaagaatagacactggggactactagagggaagagggagattctctctctaagcaatctcatgtagtcccatgactttgattatcatt

SEQ ID NO: 71750 - DNA, 120 bp, synthetic construct; identical to SEQ ID NO: 35092
  source 1..120: mol_type = other DNA

SEQ ID NO: 71751 - DNA, 120 bp, synthetic construct
  source 1..120: mol_type = other DNA
ttccttgttgaaaatgtttgcatctgtttttctcaaggaaacagattggcctgaatttgtgtgtgtgtgtgtgtgtgtgtgtgtgtgtgtgtttgtgtgtgtttgtgtgtgtgtgtgtgt

SEQ ID NO: 71752 - DNA, 120 bp, synthetic construct
  source 1..120: mol_type = other DNA
atccaagataacacagagaaggaatgcagagtcctatcagataaacataacaaagagattgaagtaattaaaaagaatagggacgggcgcggtggctcaggcctgtaatcccagcacttt

SEQ ID NO: 71753 - DNA, 120 bp, synthetic construct; identical to SEQ ID NO: 35093
  source 1..120: mol_type = other DNA

SEQ ID NO: 71754 - DNA, 120 bp, synthetic construct
  source 1..120: mol_type = other DNA
gggaattgaacaatgagatcacttggacacgggtcagggaacatgacacaccagggcctgttggaggatggggggcttggggagggatagcattaggagaaatacctaatgcaaatgatg

SEQ ID NO: 71755 - DNA, 120 bp, synthetic construct; identical to SEQ ID NO: 35095
  source 1..120: mol_type = other DNA

SEQ ID NO: 71756 - DNA, 120 bp, synthetic construct
  source 1..120: mol_type = other DNA
ctcattgtggttttgatttgcatttctctgatggccagtgatgatgggcagtttttcatgtgttttagctagcagaaggcaagaaataactaaaatcagagcagaactgaaggaaataga

SEQ ID NO: 71757 - DNA, 120 bp, synthetic construct; identical to SEQ ID NO: 35096
  source 1..120: mol_type = other DNA

SEQ ID NO: 71758 - DNA, 120 bp, synthetic construct; identical to SEQ ID NO: 35069
  source 1..120: mol_type = other DNA

SEQ ID NO: 71759 - DNA, 120 bp, synthetic construct
  source 1..120: mol_type = other DNA
cttttgagaagtgtctgttcatgtccttcgcccactttttgataggattgtttgtttttttcttgtaaatttgtttgagttcattgtagattctggatattagccctttgtcagatgagt

SEQ ID NO: 71760 - DNA, 120 bp, synthetic construct
  source 1..120: mol_type = other DNA
ttattggtgtataagaatgcttgtgatttttgtacattgattttgtatcctgagagtttgctgaagttgcttatcagcttaaggagattttgggctgagacagtggggttttctagatat

SEQ ID NO: 71761 - DNA, 120 bp, synthetic construct
  source 1..120: mol_type = other DNA
ggtctattcagagattcaacttcttcctggtttagttttgggagagtgtatgtgtcaaggaatttatccatttcttcatagattttctagtttatttgcgtagaggtgtttgtagtattc

SEQ ID NO: 71762 - DNA, 120 bp, synthetic construct
  source 1..120: mol_type = other DNA
ggccttctttgtctctttcgatctctgttggtttaaagtctgttttatcagagactaggattgcaacccctgcctttttttgttttccatttgcttggtagatcttcctccatcctttta

SEQ ID NO: 71763 - DNA, 120 bp, synthetic construct
  source 1..120: mol_type = other DNA
gcctccagctccatcatgttcctgcaaaggacatggtctcgttcttttttatggttgcatagtatttcacggtgttcatattaaatttttaagattaactgtatgctcttgaccagggag

SEQ ID NO: 71764 - DNA, 120 bp, synthetic construct
  source 1..120: mol_type = other DNA
atgatttatagtcctttgggtatatacccagtaatgggatggctgggtcaaatggaatttctagttctagatccctgaggaatcgccacactgacttccacaatggttgaactagtttac

SEQ ID NO: 71765 - DNA, 120 bp, synthetic construct
  source 1..120: mol_type = other DNA
tttatccacctgcctcggcctcccaaagtgctaggattaaaggtgtgggcctttaaaggcgcctggcctgtttgaagattttaacataactttcagtaatcaatatgcaaggagaaaaaa

SEQ ID NO: 71766 - DNA, 120 bp, synthetic construct
  source 1..120: mol_type = other DNA
catctgacacaaggcaagtcccttccacctatgagcctgtaaaatcaaaggcaaagttaattacttcgtagatacaatgggggtacaggcgttagataaatatacccattccaaatggga

SEQ ID NO: 71767 - DNA, 120 bp, synthetic construct; identical to SEQ ID NO: 35070
  source 1..120: mol_type = other DNA

SEQ ID NO: 71768 - DNA, 120 bp, synthetic construct; identical to SEQ ID NO: 35071
  source 1..120: mol_type = other DNA

SEQ ID NO: 71769 - DNA, 120 bp, synthetic construct; identical to SEQ ID NO: 35072
  source 1..120: mol_type = other DNA

SEQ ID NO: 71770 - DNA, 120 bp, synthetic construct
  source 1..120: mol_type = other DNA
gttcattcatgatttcactctctgtttgtctattactggtgtatagggatgcttgtgatttttgcacattgattttttttttattatactttaagttttagggtacatgtgcacattgtg

SEQ ID NO: 71771 - DNA, 120 bp, synthetic construct
  source 1..120: mol_type = other DNA
ggagtggtgagagaggtcatcctttccttgtgctatttttcaaagggaatgcttccagtttttgcccattcagtatgatattggcggtgggtttgtcataaatagctcttattattttga

SEQ ID NO: 71772 - DNA, 120 bp, synthetic construct
  source 1..120: mol_type = other DNA
tagaatggaaccaagttggaaaacactctgcagggtattatccaggagaacttccccaatctagcaaggcaggccaacattcaaattcaggaaatacagagaacaccacaaagatactcc

SEQ ID NO: 71773 - DNA, 120 bp, synthetic construct
  source 1..120: mol_type = other DNA
ggatcaattcaacaagaagagctaactatcctaaatatatatgcacccaatacaggagcacccagattcataaagcaagtccttagagatctacaaagagacttagactcccacacaata

SEQ ID NO: 71774 - DNA, 120 bp, synthetic construct
  source 1..120: mol_type = other DNA
aaaatctacaagaaatggataaattcctgttcacatacactctcccaagactaaaccaggaagaacttgaatctctgaatagaccaataacaggctctgaaattgaggcaataattaata

SEQ ID NO: 71775 - DNA, 120 bp, synthetic construct; identical to SEQ ID NO: 21028
  source 1..120: mol_type = other DNA

SEQ ID NO: 71776 - DNA, 120 bp, synthetic construct; identical to SEQ ID NO: 21029
  source 1..120: mol_type = other DNA

SEQ ID NO: 71777 - DNA, 120 bp, synthetic construct
  source 1..120: mol_type = other DNA
gcactgaagtgtgaggagcaggaatattaaagggattcaggcctcaggtttcatctggtaactttccttccatttccctgcttctgggtggatgcaaaatggccagaaatttttctcctc

SEQ ID NO: 71778 - DNA, 120 bp, synthetic construct; identical to SEQ ID NO: 21027
  source 1..120: mol_type = other DNA

SEQ ID NO: 71779 - DNA, 120 bp, synthetic construct; identical to SEQ ID NO: 21334
  source 1..120: mol_type = other DNA

SEQ ID NO: 71780 - DNA, 120 bp, synthetic construct; identical to SEQ ID NO: 21335
  source 1..120: mol_type = other DNA

SEQ ID NO: 71781 - DNA, 120 bp, synthetic construct; identical to SEQ ID NO: 24752
  source 1..120: mol_type = other DNA

SEQ ID NO: 71782 - DNA, 120 bp, synthetic construct
  source 1..120: mol_type = other DNA
gtttgtttttttcttgtaaatttgtttgagttcattgtagattctggatattagccctttgtcagatgagtaggttgcgaaaattttctcccattctgtaggttgcctgttcactctgat

SEQ ID NO: 71783 - DNA, 120 bp, synthetic construct
  source 1..120: mol_type = other DNA
ctttatttccttctcctgcctgattgccctggccagaacttccaacactatgttgaataggagcggtgagagagggcatccctgtcttgtgccagttttcaaagggaatgcttccagttt

SEQ ID NO: 71784 - DNA, 120 bp, synthetic construct
  source 1..120: mol_type = other DNA
tctctgatggtagtttgtatttctgtgttatcggtggtgatatcccctttatcattttttattgtgtctatttgattcttttctctttttttctttattagtcttgctagcggtctatca

SEQ ID NO: 71785 - DNA, 120 bp, synthetic construct
  source 1..120: mol_type = other DNA
ttggcttggtagatcttcctccatccttttattttgagcctatgtgtgtctctgcacgtgagatgggtttcctgaatacagcacactgatgggtcttgactctttatccaacttgccagt

SEQ ID NO: 71786 - DNA, 120 bp, synthetic construct
  source 1..120: mol_type = other DNA
tctctaaacttcccttctcgcttcatttcattcatttcatcttccattgctgataccctttcttccagttgatcgcatcagctcctgaggcttctgcattcttcacgtagttctcgagcc

SEQ ID NO: 71787 - DNA, 120 bp, synthetic construct
  source 1..120: mol_type = other DNA
cagtttgatctcagactgctgtgctagcaatcagcgcgattccgtgggcgtaggaccctctgagccaggtgtgggatatagtctcgtggtgcgccgtttcttaagccggtctgaaaagcg

SEQ ID NO: 71788 - DNA, 120 bp, synthetic construct
  source 1..120: mol_type = other DNA
aaggtgcaaggaagggatccagtttcagccttatgcatatggctagccagtttcccaacacaatttattaaatagggaatcctttccctattgctcgtttttgtcaggtttgtcaaagat

SEQ ID NO: 71789 - DNA, 120 bp, synthetic construct
  source 1..120: mol_type = other DNA
agtttgattgcactgtggtctgagagacagtttgttagaatttctgtttttttacatttgctgaggagtactttacttccgactatgtggtcaatttggaagaggtgtggtgtggtgctg

SEQ ID NO: 71790 - DNA, 120 bp, synthetic construct; identical to SEQ ID NO: 71788
  source 1..120: mol_type = other DNA

SEQ ID NO: 71791 - DNA, 120 bp, synthetic construct; identical to SEQ ID NO: 9281
  source 1..120: mol_type = other DNA

SEQ ID NO: 71792 - DNA, 120 bp, synthetic construct; identical to SEQ ID NO: 13045
  source 1..120: mol_type = other DNA

SEQ ID NO: 71793 - DNA, 120 bp, synthetic construct; identical to SEQ ID NO: 13046
  source 1..120: mol_type = other DNA

SEQ ID NO: 71794 - DNA, 120 bp, synthetic construct; identical to SEQ ID NO: 10035
  source 1..120: mol_type = other DNA

SEQ ID NO: 71795 - DNA, 120 bp, synthetic construct
  source 1..120: mol_type = other DNA
tcactgcagcctttaactcctgggctcaagtgatcctcccacttcaccttcccaagtagctgggactacagaagtgtgccagtacacccagctaattaaaaaaaaaaaaaaaatatatat

SEQ ID NO: 71796 - DNA, 120 bp, synthetic construct; identical to SEQ ID NO: 15921
  source 1..120: mol_type = other DNA

SEQ ID NO: 71797 - DNA, 120 bp, synthetic construct
  source 1..120: mol_type = other DNA
gcccctcttctttattttctttcaaaccacaggtcagagacagaacctccttccagctactcaatcctggaacgtacacagtacaaataagagcccgggaaagagtgtatgaattcttga

SEQ ID NO: 71798 - DNA, 120 bp, synthetic construct
  source 1..120: mol_type = other DNA
gaattcttgagcgcctggagcaccccccagcgcttcggtgagtgggctgtgcggggtgcgcggggtgagcggggtgagcggggtgcgcggggtgagcggggtgcgcggggtgagcggggt

SEQ ID NO: 71799 - DNA, 120 bp, synthetic construct
  source 1..120: mol_type = other DNA
gaatcgcttgaattgtgttccctcaaaattcgtgtgttgaagctttgatcccccaggacctcagaatgtgactgtgtttggagttggggtgtttaaagaggcgattaaggtaaaatgagg

SEQ ID NO: 71800 - DNA, 120 bp, synthetic construct
  source 1..120: mol_type = other DNA
gagatgaggacacagacacacacagagggacgaccctgtgggacacagggagaagacggcgtctccaagcccaggagaggggcctcaggaggaaccagcactgcccacacctggatctca

SEQ ID NO: 71801 - DNA, 120 bp, synthetic construct
  source 1..120: mol_type = other DNA
tcataagaagagacgaggacacagacacacacagagggacgaccctgtgagggcacagggagaagacggcgtctccaagcccaggagaggggcctcaggaggaaccagccctgcccacac

SEQ ID NO: 71802 - DNA, 120 bp, synthetic construct; identical to SEQ ID NO: 71801
  source 1..120: mol_type = other DNA

SEQ ID NO: 71803 - DNA, 120 bp, synthetic construct
  source 1..120: mol_type = other DNA
gagatgaggacacagacacacacggagggacgaccctgtgggacacagggagaagacggcgtctccaagcccaggagaggggcctcaggaggaaccagccctgcccacacctggatctca

SEQ ID NO: 71804 - DNA, 120 bp, synthetic construct
  source 1..120: mol_type = other DNA
agcctgagatggactaagacatctcataagaagaggacatgaggacacagacacacacagagggacgaccctgtgggacacagaagacggggtctccaagcccaggagaggggcctcagg

SEQ ID NO: 71805 - DNA, 120 bp, synthetic construct
  source 1..120: mol_type = other DNA
gatggactaagacatctcataagaagaggagatgaggacacagacacacacagagggatgaccctgtgagggcacagggagaagacggcgtctccaagcccaggagaggggcctcaggag

SEQ ID NO: 71806 - DNA, 120 bp, synthetic construct
  source 1..120: mol_type = other DNA
ggagtaagacatctcataagaagaggagatgaggacacagacacacacagagggacgaccctgtgggacacagggagaagacggggtctccaagcccaggagaggggcctcaggaggaac

SEQ ID NO: 71807 - DNA, 120 bp, synthetic construct; identical to SEQ ID NO: 71804
  source 1..120: mol_type = other DNA

SEQ ID NO: 71808 - DNA, 120 bp, synthetic construct
  source 1..120: mol_type = other DNA
gaggcctcaggaggaaccagccctgcccatgcccatctcttgatcttggacctgcagcttccaggactgtgggagaatcaattccttttttctttttcttttttcttttttttcctcttt

SEQ ID NO: 71809 - DNA, 120 bp, synthetic construct
  source 1..120: mol_type = other DNA
gtaccagagaagtatgtttgcgatctcattcacccttttgtaagtggatcggacgctgaagccatcatagcatgttagatgccttgggtttataaaggtgatagcattaggagtaatttg

SEQ ID NO: 71810 - DNA, 120 bp, synthetic construct
  source 1..120: mol_type = other DNA
atacccccatctatagatgaagggagaaatataatgtccatccacacagtggaatattacacagccatgaaaaggaacaagcagctttattcacaatagccaagaggtggagacagccct

SEQ ID NO: 71811 - DNA, 120 bp, synthetic construct
  source 1..120: mol_type = other DNA
tcatcttctcactgtgtcttcacgtggtgtagagagagagagagatgaagttctggggtctcttgttagaagggcactaacaccatcatgggtcccatcatgggtcataggatccctcac

SEQ ID NO: 71812 - DNA, 120 bp, synthetic construct
  source 1..120: mol_type = other DNA
tgggttccatcatgggtcatgggaccccccccatcacgggttccatcatgggtcatgggaacccccatcatgggtttcatcatgggtcataggatcccctatcatggattccatcatgag

SEQ ID NO: 71813 - DNA, 120 bp, synthetic construct
  source 1..120: mol_type = other DNA
gaagagaagaaaacaggagggggaggaagagaagaaaatggagggaaaggagggggaggaggtggagatggggagagaaggagcaggaggaggagaagaaagaagaggaagaaaggagga

SEQ ID NO: 71814 - DNA, 120 bp, synthetic construct
  source 1..120: mol_type = other DNA
actgcaaagtgtaataagacacattcctttatgcactggaaaatgagaagtcatttcaatcgcaaatttcgctatgagcttcagatacaaaaggtaaactttcaccccgcccccagcccc

SEQ ID NO: 71815 - DNA, 120 bp, synthetic construct
  source 1..120: mol_type = other DNA
tttctctatctctctccttgtctatatctccccctctcccagtctctctgtatctctgtatctctctccctttctccttccctctcttcatctttctttttgaaacggagtttttctctt

SEQ ID NO: 71816 - DNA, 120 bp, synthetic construct
  source 1..120: mol_type = other DNA
ccaaagtgctgggatgacaggcgtgtgccaccatgcccagataattttgtatttttagtagagatggagtttctccatgttggtcaggctgttctcgaactcctgacctcagttgatctg

SEQ ID NO: 71817 - DNA, 120 bp, synthetic construct; identical to SEQ ID NO: 31615
  source 1..120: mol_type = other DNA

SEQ ID NO: 71818 - DNA, 120 bp, synthetic construct; identical to SEQ ID NO: 31616
  source 1..120: mol_type = other DNA

SEQ ID NO: 71819 - DNA, 120 bp, synthetic construct; identical to SEQ ID NO: 31617
  source 1..120: mol_type = other DNA

SEQ ID NO: 71820 - DNA, 120 bp, synthetic construct
  source 1..120: mol_type = other DNA
tgccatgctggtgtgctgcacccattaactcatcatttagcatttggtatatctcctaaagctatccctccccctccccccacctcacaacagtccccagagtgtgatgttccccttcct

SEQ ID NO: 71821 - DNA, 120 bp, synthetic construct
  source 1..120: mol_type = other DNA
tggtagtttcttttgctgtgcagaagctctttagtttaattagatcccatttgtcactggcaaaccgaatccagcagcacgtcaagaagcttatccaccttgatcaagtgggcttcatcc

SEQ ID NO: 71822 - DNA, 120 bp, synthetic construct
  source 1..120: mol_type = other DNA
gccacacatctacaacaatctgatctttgacaaacctgagaaaaacaagcaatggggaaaggattccctatttaataaatggtgctgggaaaactggctagccatatgtagaaagctgaa

SEQ ID NO: 71823 - DNA, 120 bp, synthetic construct; identical to SEQ ID NO: 35698
  source 1..120: mol_type = other DNA

SEQ ID NO: 71824 - DNA, 120 bp, synthetic construct
  source 1..120: mol_type = other DNA
tggtgaaaccccgtctctactaaaaatacaaaaaaaaaaaaattagctgggcatggcgggagatgcctgtaatcccagctactcgggaggctgaggcaggataatcacttgaacccagga

SEQ ID NO: 71825 - DNA, 120 bp, synthetic construct; identical to SEQ ID NO: 35699
  source 1..120: mol_type = other DNA

SEQ ID NO: 71826 - DNA, 120 bp, synthetic construct; identical to SEQ ID NO: 35700
  source 1..120: mol_type = other DNA

SEQ ID NO: 71827 - DNA, 120 bp, synthetic construct; identical to SEQ ID NO: 35701
  source 1..120: mol_type = other DNA

SEQ ID NO: 71828 - DNA, 120 bp, synthetic construct; identical to SEQ ID NO: 35702
  source 1..120: mol_type = other DNA

SEQ ID NO: 71829 - DNA, 120 bp, synthetic construct; identical to SEQ ID NO: 35703
  source 1..120: mol_type = other DNA

SEQ ID NO: 71830 - DNA, 120 bp, synthetic construct; identical to SEQ ID NO: 35704
  source 1..120: mol_type = other DNA

SEQ ID NO: 71831 - DNA, 120 bp, synthetic construct
  source 1..120: mol_type = other DNA
gtttatgtgtgtgtgtctgtgtgtgtttaagtctgtgtgtgtttgtgtgtgtgtgtctctgtgtgtgtgtctgtatctgtgtgtgtttgtgtctgtgtgtgtttgtgtgtgtgtctgtgt

SEQ ID NO: 71832 - DNA, 120 bp, synthetic construct; identical to SEQ ID NO: 35705
  source 1..120: mol_type = other DNA

SEQ ID NO: 71833 - DNA, 120 bp, synthetic construct; identical to SEQ ID NO: 35706
  source 1..120: mol_type = other DNA

SEQ ID NO: 71834 - DNA, 120 bp, synthetic construct; identical to SEQ ID NO: 35707
  source 1..120: mol_type = other DNA

SEQ ID NO: 71835 - DNA, 120 bp, synthetic construct; identical to SEQ ID NO: 35708
  source 1..120: mol_type = other DNA

SEQ ID NO: 71836 - DNA, 120 bp, synthetic construct; identical to SEQ ID NO: 35709
  source 1..120: mol_type = other DNA

SEQ ID NO: 71837 - DNA, 120 bp, synthetic construct; identical to SEQ ID NO: 35710
  source 1..120: mol_type = other DNA

SEQ ID NO: 71838 - DNA, 120 bp, synthetic construct; identical to SEQ ID NO: 35711
  source 1..120: mol_type = other DNA

SEQ ID NO: 71839 - DNA, 120 bp, synthetic construct; identical to SEQ ID NO: 27704
  source 1..120: mol_type = other DNA

SEQ ID NO: 71840 - DNA, 120 bp, synthetic construct
  source 1..120: mol_type = other DNA
aagaatcaaaatcataataaggtaccaatccatacccactaagatggctatagttttaaaaagaaaaatattggctgggcgtggtggctcacgcctgtaatccaagcactctgggaggcc

SEQ ID NO: 71841 - DNA, 120 bp, synthetic construct; identical to SEQ ID NO: 29944
  source 1..120: mol_type = other DNA

SEQ ID NO: 71842 - DNA, 120 bp, synthetic construct; identical to SEQ ID NO: 29945
  source 1..120: mol_type = other DNA

SEQ ID NO: 71843 - DNA, 120 bp, synthetic construct
  source 1..120: mol_type = other DNA
caaagcagcctggaagctcaaactgggtggagcccgccacagctcaaggaggcctgcctgcctctgtaggctccacctctgggggcagggcacagacaaacaaaaagacagcagtaacct

SEQ ID NO: 71844 - DNA, 120 bp, synthetic construct
  source 1..120: mol_type = other DNA
ccgacgttcagattcaggaaatacagagaacgccacaaagatactcctcgagaagagcaactccaagacacataattgtcagattcaccaaagttgaaatgaaggaaaaaatgttaaggg

SEQ ID NO: 71845 - DNA, 120 bp, synthetic construct
  source 1..120: mol_type = other DNA
taacaccccactgtcaacattagacagatgaacgagacagaaagtcaacaaggatacccaggaattgaactcagctctgcaccaagcggacctaatagacatctacagaactctccaccc

SEQ ID NO: 71846 - DNA, 120 bp, synthetic construct
  source 1..120: mol_type = other DNA
cagatggattcacagccgaattctaccagaggtacaaggaggaactggtaccattccttctgaaactatcccaatcaatagaaaaagagggaatcctccctaactcattttatgaggcca

SEQ ID NO: 71847 - DNA, 120 bp, synthetic construct
  source 1..120: mol_type = other DNA
acagattcaatgccacccccatcaagctaccaatgactttcttcacagaattggaaaaaactactttaaagttcatatggaaccaaaaaagagcccgcatcgccaggtcaatcctaagcc

SEQ ID NO: 71848 - DNA, 120 bp, synthetic construct
  source 1..120: mol_type = other DNA
actataaatcatgctgctataaagacacatgcacacgtatgtttattgcggcattattcacaatagcaaagacttggaaccaacccaaatgtccaagaatgatagactagattaagaaaa

SEQ ID NO: 71849 - DNA, 120 bp, synthetic construct; identical to SEQ ID NO: 29946
  source 1..120: mol_type = other DNA

SEQ ID NO: 71850 - DNA, 120 bp, synthetic construct; identical to SEQ ID NO: 29947
  source 1..120: mol_type = other DNA

SEQ ID NO: 71851 - DNA, 120 bp, synthetic construct; identical to SEQ ID NO: 29948
  source 1..120: mol_type = other DNA

SEQ ID NO: 71852 - DNA, 120 bp, synthetic construct
  source 1..120: mol_type = other DNA
actctatcgagtctttaattaaaagtggtttttaaagagtcaaaagactttgatcaatttttatagaatgcaccagggcacggtggttcacgcctgtaatcccagcactctgggaggctg

SEQ ID NO: 71853 - DNA, 120 bp, synthetic construct
  source 1..120: mol_type = other DNA
agaggatgtggagaaataggaacacttttacactgttggtgggactgtaaactagttcaacccttgtggaagtcactgtggtgattcctcagggatctagaactagaaataccatttgac

SEQ ID NO: 71854 - DNA, 120 bp, synthetic construct
  source 1..120: mol_type = other DNA
aaaacttccagaggaacaatcaggcaggagcatttgcggatcaccaacatccacttttctacagccaccgctgttctgcagccaccgctgctgatacccaggcatacagggtctggagtg

SEQ ID NO: 71855 - DNA, 120 bp, synthetic construct
  source 1..120: mol_type = other DNA
cccagtctagcaaggcaggccaacattcaaattcaggaaatacagagaacgccacaaagatactcctcgagaagagcaactccaagacacataactgtcacattcaccaaagttgaaatg

SEQ ID NO: 71856 - DNA, 120 bp, synthetic construct
  source 1..120: mol_type = other DNA
aagcactcctcagcaaatgtaaaaaacagaaattataacaaactatctctcagaccacagtgcaatcaaactagaactcaggattaagaaactcactcaaaaccactcaactacatggaa

SEQ ID NO: 71857 - DNA, 120 bp, synthetic construct
  source 1..120: mol_type = other DNA
ccaatatccttgatgaacattgatgcaaaaatcctcaataaaatactggcaaaccaaatccagcagcacatcaaaaagcttttccaccatgatcaagtgggcttcatccctgggatgaaa

SEQ ID NO: 71858 - DNA, 120 bp, synthetic construct
  source 1..120: mol_type = other DNA
ctaccaatgactttcttcacagaattggaaaaaactactttaaagttcatatggaaccaaaaaagagcctgcatcaccaagtcaatcctaagccaaaagaacaaagctggaggcatcatg

SEQ ID NO: 71859 - DNA, 120 bp, synthetic construct
  source 1..120: mol_type = other DNA
taccatttgacccagccatcccattgctgggtatatacccaaaggattgtaaatcatgctgctgtaaaggcacacacacatatatattgtggcactattcacaatagcaaagacttggaa

SEQ ID NO: 71860 - DNA, 120 bp, synthetic construct; identical to SEQ ID NO: 29949
  source 1..120: mol_type = other DNA

SEQ ID NO: 71861 - DNA, 120 bp, synthetic construct; identical to SEQ ID NO: 29950
  source 1..120: mol_type = other DNA

SEQ ID NO: 71862 - DNA, 120 bp, synthetic construct
  source 1..120: mol_type = other DNA
ccactaacgagtcatctagcattaggtatatctcccaatgctatccctcccccctcccccgaccccaccacagtccccagagtgtgatattccccttcctgtgtccatgtgatctcattg

SEQ ID NO: 71863 - DNA, 120 bp, synthetic construct
  source 1..120: mol_type = other DNA
cagttttcccagcaccatttattaaatagggaatcctttccccattgcttgtttttctcaggtttgtcaaagatcagatagttgtagatatgcgtcattatttctgagggctctgttctg

SEQ ID NO: 71864 - DNA, 120 bp, synthetic construct
  source 1..120: mol_type = other DNA
ccctgtcttgtgccggttttcaaagggaatgcttccagtttttgcccattcagtatgatattggctgtgggtttgtcatagatagctcttattattttgaaatacgtcccatcaatacct

SEQ ID NO: 71865 - DNA, 120 bp, synthetic construct; identical to SEQ ID NO: 66407
  source 1..120: mol_type = other DNA

SEQ ID NO: 71866 - DNA, 120 bp, synthetic construct
  source 1..120: mol_type = other DNA
tggcatgattttgcagcggctggtaccggttgttcctttccatgtttagcgcttccttcaggagctcttttagggcaggcctggtggtgacaaaatctctcagcatttgcttgtctgtaa

SEQ ID NO: 71867 - DNA, 120 bp, synthetic construct
  source 1..120: mol_type = other DNA
aggaactgcgttcctttggaggaggagaggcgctctgcgttttagagtttccagtttttctgttccgttttttccccatctttgtggttttatctacttttggtctttgatgatggtgat

SEQ ID NO: 71868 - DNA, 120 bp, synthetic construct
  source 1..120: mol_type = other DNA
gcgtcactcacgctgggagctgtagaccggagctgttcctattcggccatcttcgtatgactcttgtagataacctacacttaaatttttaatccatcttgagttgattttgtatatggt

SEQ ID NO: 71869 - DNA, 120 bp, synthetic construct; identical to SEQ ID NO: 29939
  source 1..120: mol_type = other DNA

SEQ ID NO: 71870 - DNA, 120 bp, synthetic construct; identical to SEQ ID NO: 68277
  source 1..120: mol_type = other DNA

SEQ ID NO: 71871 - DNA, 120 bp, synthetic construct
  source 1..120: mol_type = other DNA
tcctaattgaataccctttatttccttctcctgcctgattgccctggccagaacttccaacactatgttgaataggagtggtgagagagggcatccctgtcttgtgccggttttcaaagg

SEQ ID NO: 71872 - DNA, 120 bp, synthetic construct; identical to SEQ ID NO: 68561
  source 1..120: mol_type = other DNA

SEQ ID NO: 71873 - DNA, 120 bp, synthetic construct
  source 1..120: mol_type = other DNA
gcctatgtgtgtctctgcacgtgagatggatttcctgaatacagcacactgatgggtcttgactctttatccaacttgccagtctgtgtcttttaattgcagaatttagtccatttatat

SEQ ID NO: 71874 - DNA, 120 bp, synthetic construct
  source 1..120: mol_type = other DNA
atttgatcgtctgaagccttcttctctcagctcgtcaaaatcattctccatccagctttgttctgttgctggtgaggaactgcgttcctttggaggaggagaggcgctctgcgttttaga

SEQ ID NO: 71875 - DNA, 120 bp, synthetic construct
  source 1..120: mol_type = other DNA
cgctgggagctgtagaccggagctgttcctattcggccatcttggctcctccccctcttgttgctttaactaaatatttacaaactgcttataaggaaagaaaactatccatttagaaga

SEQ ID NO: 71876 - DNA, 120 bp, synthetic construct
  source 1..120: mol_type = other DNA
atttttgcatcaatgttcatcaaggatattggtctaaaattctcttttttggttgtgtctctgccaggcattggtatcaggatgatgctggcctcataaaatgagttagggaggatttcc

SEQ ID NO: 71877 - DNA, 120 bp, synthetic construct
  source 1..120: mol_type = other DNA
tgtttttgttctcattggtttcaaagaacatctttatttctgccttcatttcattatgtacccagtagtcattcaggagcaggttgttcagtttccatgtagttgagcggctttgagtga

SEQ ID NO: 71878 - DNA, 120 bp, synthetic construct
  source 1..120: mol_type = other DNA
caattaggcaggagaaggaaataaagggtattcaattaggaaaagaggaagtctaattgtccctgtttgcagatgacatgattgcatatccagaaaaccccattgtctcagcccaaaatc

SEQ ID NO: 71879 - DNA, 120 bp, synthetic construct
  source 1..120: mol_type = other DNA
aaggatatgaacacacaattctcaaaagaagacatttatgcagccaacagacacatgaaaaaatgctcatcatcactggccatcagagaaatgcaaatcaaaaccacaatgagataccat

SEQ ID NO: 71880 - DNA, 120 bp, synthetic construct; identical to SEQ ID NO: 29934
  source 1..120: mol_type = other DNA

SEQ ID NO: 71881 - DNA, 120 bp, synthetic construct; identical to SEQ ID NO: 29935
  source 1..120: mol_type = other DNA

SEQ ID NO: 71882 - DNA, 120 bp, synthetic construct; identical to SEQ ID NO: 29936
  source 1..120: mol_type = other DNA

SEQ ID NO: 71883 - DNA, 120 bp, synthetic construct; identical to SEQ ID NO: 29938
  source 1..120: mol_type = other DNA

SEQ ID NO: 71884 - DNA, 120 bp, synthetic construct; identical to SEQ ID NO: 29940
  source 1..120: mol_type = other DNA

SEQ ID NO: 71885 - DNA, 120 bp, synthetic construct; identical to SEQ ID NO: 29941
  source 1..120: mol_type = other DNA

SEQ ID NO: 71886 - DNA, 120 bp, synthetic construct; identical to SEQ ID NO: 29942
  source 1..120: mol_type = other DNA

SEQ ID NO: 71887 - DNA, 120 bp, synthetic construct; identical to SEQ ID NO: 29943
  source 1..120: mol_type = other DNA

SEQ ID NO: 71888 - DNA, 120 bp, synthetic construct
  source 1..120: mol_type = other DNA
gtttcaaatatttgtaactcaacacaaaaacctctaaaagtatgttgggtgcaatggctcacatctgtaatcccagcactttagaaggctgaggcaggaggatcacttgagcccaatgag

SEQ ID NO: 71889 - DNA, 120 bp, synthetic construct
  source 1..120: mol_type = other DNA
aagtctagtagtctgtttacgtgccaagggataaggctgaacaataaattaaccctttaaaaatgtctatgaacaagtacaattttctttttgagttctgcagagcaatgaccactaaga

SEQ ID NO: 71890 - DNA, 120 bp, synthetic construct
  source 1..120: mol_type = other DNA
gggtgtctctgcacctatatactaagtcaaaatttcaggggaccatagatatttagaaacacaaaattgctaattgactatttcagttgatgttatatttatcaactgtacttcctgggt

SEQ ID NO: 71891 - DNA, 120 bp, synthetic construct
  source 1..120: mol_type = other DNA
caattatttaacttctctagtctcaacacagaaagtgatggtggaggaagtccatcatcaactatcaccattgtcaccattcaaagagctctgggtataagcctcagactcggtgactgt

SEQ ID NO: 71892 - DNA, 120 bp, synthetic construct
  source 1..120: mol_type = other DNA
cacatatacacatacccacaatgcaaatagtctctaggaggtgtaaaatatcatggtatgggtcattttcaactgggtgtgcgtcatacatgtgcctaaagcaacaacagcatgccaggc

SEQ ID NO: 71893 - DNA, 120 bp, synthetic construct
  source 1..120: mol_type = other DNA
gacaaacgtcatcatgtctacaagttactttcaagtggtttttacacaaattccttctccaactgtttaaagcgatggtaataagggagtgagttctgttcaatgagatctttcacagtt

SEQ ID NO: 71894 - DNA, 120 bp, synthetic construct
  source 1..120: mol_type = other DNA
catacatagtgaatttcatctacatgaattcctgaaaattaaacaaaggaaattgatccagaataacgtactttgcctcataaatgttggttcttaggaacctattagactatttctgct

SEQ ID NO: 71895 - DNA, 120 bp, synthetic construct
  source 1..120: mol_type = other DNA
atttttattatgatttttcatataaacaactatggtcaaagaaatactatttaatggcggggcgcagtggctcaggcctgtaatcccagcactttgggaggccaaggcaggtgaatcacg

SEQ ID NO: 71896 - DNA, 120 bp, synthetic construct
  source 1..120: mol_type = other DNA
aaacactcagaacctgaccaggcagcctcagagaagctgtgattctgaaggagaatcaaataagatagcagagatggtactccttggaaacaagtgaaggaaaagtaggaactaaggggt

SEQ ID NO: 71897 - DNA, 120 bp, synthetic construct
  source 1..120: mol_type = other DNA
gagacagagagaaaatggctgaaatgaagacacaaaggagatggagcattcccactggtgtctttaaagaaaaaaataacagaagtgcactagtacttaaactatatcttaaggaaactt

SEQ ID NO: 71898 - DNA, 120 bp, synthetic construct
  source 1..120: mol_type = other DNA
atgcaatgctgtatatgacaggcacacttcaaatgcagtggttcaaaggactaaaaataaaagggtggacaaagatttatcaggcaaacaggaaaaataagaaagcaggggccaggcaca

SEQ ID NO: 71899 - DNA, 120 bp, synthetic construct
  source 1..120: mol_type = other DNA
ggagattttggtgagggcttagaagacaaggccagggaaagtttggaatgccttagagattgagttaagtagctctgaccagaatgctaataaaaataggaacagtattctgatgtggtc

SEQ ID NO: 71900 - DNA, 120 bp, synthetic construct
  source 1..120: mol_type = other DNA
aaaagaaaggaagcagagcaaaaaaatttggaaaactcagcctggccaagagtgaaaaggtgtgttcaaaggaggaaaccgagggttagccaggaaccatttgctaaatagattagcaca

SEQ ID NO: 71901 - DNA, 120 bp, synthetic construct
  source 1..120: mol_type = other DNA
cagtcaaaagtgattattcttgagctttaagatttcatgtctgccctgctggaattctggacttgcctagcgcctgttctttctttttgcctaattttccgttttggaatgggaatgcct

SEQ ID NO: 71902 - DNA, 120 bp, synthetic construct
  source 1..120: mol_type = other DNA
aatttcataggctgtggaaatgttccagatcaaagaaggctaaggagacatgacacctaaaaataatgctgactctagactgaatcctactttattggaaggcaaatgctataaaggaca

SEQ ID NO: 71903 - DNA, 120 bp, synthetic construct
  source 1..120: mol_type = other DNA
caggacacacccaacaccctagatctcacctcctcccaccaatggagatgtatgttcaccagctgtgtttgatctgagcatttctgtaactgttgtactacatttaatagttacgtaatt

SEQ ID NO: 71904 - DNA, 120 bp, synthetic construct
  source 1..120: mol_type = other DNA
tgttatttctgtaaacaaatgagaattcctgagtacaacttttctcatcatcccctctcccagtgtgtccctttttctttaaaaacctgagcctctgctaagttctctggagcactctcc

SEQ ID NO: 71905 - DNA, 120 bp, synthetic construct
  source 1..120: mol_type = other DNA
caggacctcctgaggctgtgtcaccttaactccttaacttcggcaaaataaacttctaaactgattgagacctgtctcagatattttgggttcacaataggaagccagtcttaatcatct

SEQ ID NO: 71906 - DNA, 120 bp, synthetic construct
  source 1..120: mol_type = other DNA
ctgcctcaccctgaaaagttaggcacctcaggcttttttcttccttctcccattgcttccatttcccttttagctctccatattcacacaggttggttttttacagtccacaaattcatt

SEQ ID NO: 71907 - DNA, 120 bp, synthetic construct
  source 1..120: mol_type = other DNA
ccatcctttactgtttgaccaactaaggagccaaacagcaaggaaatgctatagctatatgttttattctgctaggctttagatgtaagtatttacacataagacaacctgaactatgtg

SEQ ID NO: 71908 - DNA, 120 bp, synthetic construct
  source 1..120: mol_type = other DNA
ggattcacgagaaacttgtaacagtggtcatctccagagatggatcctgggaaaccagaaatggaagtgtgaagggcattttgcactgcgttttctatcttttgaaggtcaaattctatg

SEQ ID NO: 71909 - DNA, 120 bp, synthetic construct
  source 1..120: mol_type = other DNA
ctctactccaacagcaaactttaggcttggcctctgaaaagtagactttgagccaaaatttttccatagctgcatgacagtctgaacacaggttgtaactgctgactcacaagagaatta

SEQ ID NO: 71910 - DNA, 120 bp, synthetic construct
  source 1..120: mol_type = other DNA
aacatagtcagtttataattttttaaatttatttttattctttgaaaacatatctttggccaggtgcagtggttcacgcctgtaatcccagcactttgggaggctgaggcaggaggatca

SEQ ID NO: 71911 - DNA, 120 bp, synthetic construct
  source 1..120: mol_type = other DNA
tacactgatttcaacaatttccaaatcataacatttccttagctacacagagtactataaaacatagcaggcgaggtgtggaggttcacgcctgtaatcccagcactttgggaggccagg

SEQ ID NO: 71912 - DNA, 120 bp, synthetic construct
  source 1..120: mol_type = other DNA
gatacttgtttctaaccaataaagcgtaagtgacagtatacaaaactttggagactagttcacaaaatgcccctctaatttgcatctggttcactctgtttctcccttcctgtgccacct

SEQ ID NO: 71913 - DNA, 120 bp, synthetic construct
  source 1..120: mol_type = other DNA
acaacacagcgagaccctcatctccacacaaaaatttaaaaaatgaaaagtagctggacatggtggctcatgcctgctgtagtcccagctactcaggaggctgaagtgggaggattactt

SEQ ID NO: 71914 - DNA, 120 bp, synthetic construct
  source 1..120: mol_type = other DNA
atttgtgttctaaactgtccagttttccactgacttctgaagactaaaataactcaccactggcttgatcacactctgaagtctgtacctagcacagtaaagctttttaagctgtcagac

SEQ ID NO: 71915 - DNA, 120 bp, synthetic construct
  source 1..120: mol_type = other DNA
ccttagggataagacattgattgaaggggcttcaagaatcacttcattgtggctactcaacagaagggtagaaagtgggtgttggtagagggtcagcagatttacattcaggatgcagta

SEQ ID NO: 71916 - DNA, 120 bp, synthetic construct
  source 1..120: mol_type = other DNA
acacacatacacacatacacacacacacacacatacacacacatacacatatataatacagtaaatatactttatatactatatatttagatactatatatagtatatataccatacata

SEQ ID NO: 71917 - DNA, 120 bp, synthetic construct
  source 1..120: mol_type = other DNA
atatatgaatagttatatatatataaatcacagtacatttattgatgggcagggtccgtagtttactcactttcattttcccaaagccataaacacctgaactgtttcctgctgtttctg

SEQ ID NO: 71918 - DNA, 120 bp, synthetic construct; identical to SEQ ID NO: 18810
  source 1..120: mol_type = other DNA

SEQ ID NO: 71919 - DNA, 120 bp, synthetic construct
  source 1..120: mol_type = other DNA
gcgcgcacctaggggtacgagacccggcgcttacttgtaggtgaggccgtcggcgctggcgaagagctgctgcgcggtgagcccatcctcgggcacgtagccggtgccgccgctgatcag

SEQ ID NO: 71920 - DNA, 120 bp, synthetic construct
  source 1..120: mol_type = other DNA
ttcggctcaccgccctatctccggctgagaaaatggtgttggtaccagggcttttaatctcagagagcggtttgttatttgggagggtcctgcggtgggaagatgggggaggatcataag

SEQ ID NO: 71921 - DNA, 120 bp, synthetic construct
  source 1..120: mol_type = other DNA
ggactaccatatgatcgagcaatcccactactggatatctatccaaagaaaatgaaatcagtatatcaaagagatatctgcactcccatgtatattgcagcactattcataatactcaag

SEQ ID NO: 71922 - DNA, 120 bp, synthetic construct
  source 1..120: mol_type = other DNA
ccaaatgtccaacaatgatagactggattaagaaaatgtggcacatatacaccatggaatactatgcagccataaaaaatgatgagttcatatccttggtagggacatggatgaagctgg

SEQ ID NO: 71923 - DNA, 120 bp, synthetic construct; identical to SEQ ID NO: 9149
  source 1..120: mol_type = other DNA

SEQ ID NO: 71924 - DNA, 120 bp, synthetic construct; identical to SEQ ID NO: 9150
  source 1..120: mol_type = other DNA

SEQ ID NO: 71925 - DNA, 120 bp, synthetic construct; identical to SEQ ID NO: 9151
  source 1..120: mol_type = other DNA

SEQ ID NO: 71926 - DNA, 120 bp, synthetic construct; identical to SEQ ID NO: 9152
  source 1..120: mol_type = other DNA

SEQ ID NO: 71927 - DNA, 120 bp, synthetic construct
  source 1..120: mol_type = other DNA
tgcagcccaggaatgcaccctggaggaagtggttgagcggctcctgtctgtcaaggggcgacccagaccgagccccctggtcaaggcccataaaagcgtccaggccaacctagaccagag

SEQ ID NO: 71928 - DNA, 120 bp, synthetic construct; identical to SEQ ID NO: 14677
  source 1..120: mol_type = other DNA

SEQ ID NO: 71929 - DNA, 120 bp, synthetic construct; identical to SEQ ID NO: 14678
  source 1..120: mol_type = other DNA

SEQ ID NO: 71930 - DNA, 120 bp, synthetic construct; identical to SEQ ID NO: 29090
  source 1..120: mol_type = other DNA

SEQ ID NO: 71931 - DNA, 120 bp, synthetic construct; identical to SEQ ID NO: 29091
  source 1..120: mol_type = other DNA

SEQ ID NO: 71932 - DNA, 120 bp, synthetic construct; identical to SEQ ID NO: 15149
  source 1..120: mol_type = other DNA

SEQ ID NO: 71933 - DNA, 120 bp, synthetic construct; identical to SEQ ID NO: 15150
  source 1..120: mol_type = other DNA

SEQ ID NO: 71934 - DNA, 120 bp, synthetic construct; identical to SEQ ID NO: 20969
  source 1..120: mol_type = other DNA

SEQ ID NO: 71935 - DNA, 120 bp, synthetic construct
  source 1..120: mol_type = other DNA
tactaaaaattaaaaaattagccaggtatagtagtgcacacctatattcccagcttcttgggaggctgaggcgggaggatcacttgaatccaggaggtcgaggctgcagtgagctatgat

SEQ ID NO: 71936 - DNA, 120 bp, synthetic construct; identical to SEQ ID NO: 20970
  source 1..120: mol_type = other DNA

SEQ ID NO: 71937 - DNA, 120 bp, synthetic construct; identical to SEQ ID NO: 25810
  source 1..120: mol_type = other DNA

SEQ ID NO: 71938 - DNA, 120 bp, synthetic construct
  source 1..120: mol_type = other DNA
cacattggttttgtatcctgagactttgctgaagttgcttatcagcttaaggtgattttgggctgagacgatgcggttttctagatatacaatcatgtcatctgcaaacagggacaattt

SEQ ID NO: 71939 - DNA, 120 bp, synthetic construct
  source 1..120: mol_type = other DNA
ccaaaatggacaaatgggatctaattaaactaaagagcttctgcacagcaaaagaaactaccatcagactgaacaggcaacctacagaatgggagaaaatttttacaatctactcatctg

SEQ ID NO: 71940 - DNA, 120 bp, synthetic construct; identical to SEQ ID NO: 25811
  source 1..120: mol_type = other DNA

SEQ ID NO: 71941 - DNA, 120 bp, synthetic construct
  source 1..120: mol_type = other DNA
gcatggtactggtaccaaaacagagatatagatcaatggaacagaacagagccctcagaaataacgccgcatatctacaactattgatctttgacaaacctgagaaaaacaagcaatggg

SEQ ID NO: 71942 - DNA, 120 bp, synthetic construct
  source 1..120: mol_type = other DNA
tggccatactgcccaaggtaatttacagattcaatgccatccccatcaagataccaatgagtttcttcatagaattggaaaaaactactttaaagttcatatggaaccaaaaaagagctc

SEQ ID NO: 71943 - DNA, 120 bp, synthetic construct
  source 1..120: mol_type = other DNA
agagaaatgcaaatcaaaaccacaatgagatatcatctcacaccagttagaatggcaatcattaaaaagtcaggaaacaacaggtgctggagaggatgtggagaaataggaacacttata

SEQ ID NO: 71944 - DNA, 120 bp, synthetic construct; identical to SEQ ID NO: 25804
  source 1..120: mol_type = other DNA

SEQ ID NO: 71945 - DNA, 120 bp, synthetic construct
  source 1..120: mol_type = other DNA
tttttctgttgtttgcaatagttccagaaggaatggtacctgctcctctttgcttgtttgtgtcaggtttgtcaaagatcagatggttctagatgtgtggcgttatttctgaggcctcta

SEQ ID NO: 71946 - DNA, 120 bp, synthetic construct
  source 1..120: mol_type = other DNA
cttcaaagaccaaaagtagataaaaccacaaagatggggaaaaagcagagcagaaaaactggaaactctaaaaagcagagcgcctctcctcctccaaaggaatgcagttcctcaccagca

SEQ ID NO: 71947 - DNA, 120 bp, synthetic construct
  source 1..120: mol_type = other DNA
aaaatcatgccaaaatgtaaagaccatcgagactaggaaagaactgcatcaactaaggagcaaaataaccagctaatatcataatgacaggatcaaattcacacataacaatattaactt

SEQ ID NO: 71948 - DNA, 120 bp, synthetic construct
  source 1..120: mol_type = other DNA
ataccagaatctctgggatgcattcaaagcagtgtgtagagggaaatttatagcactaaatgcccacaagagaaagcaggaaagatctaaaatcgacaccctaacatcacaattaaaaga

SEQ ID NO: 71949 - DNA, 120 bp, synthetic construct
  source 1..120: mol_type = other DNA
accatgatcaagtgggtttcatccctaggatgcaaggctggttcaatatacgcaaatcaataaatgtaatccagcatataaacagaaccaaagacaaaaaccacatgattatctcaatag

SEQ ID NO: 71950 - DNA, 120 bp, synthetic construct
  source 1..120: mol_type = other DNA
gatatagatcaatggaacagaacagagccctcagaaataacgccgcaaatctacaactatctgatctttgacaaacctgagaaaaacaagcaatggggaaaggattccctatttaataaa

SEQ ID NO: 71951 - DNA, 120 bp, synthetic construct
  source 1..120: mol_type = other DNA
aatcatcattctcagtaaattatcacaagagcaaaaaaccaaacaccgcatattctcactcataggtgggaattgaacaatgagatcacatggacacaggaaggggaatatcacactctg

SEQ ID NO: 71952 - DNA, 120 bp, synthetic construct
  source 1..120: mol_type = other DNA
caattttttcatctttaaaatgggcattatactttcctcaaaggagttttatggagattaaaaaaaacatataacagcctgggcgcggtggctcacgcctgtaatcccagcacttgggga

SEQ ID NO: 71953 - DNA, 120 bp, synthetic construct; identical to SEQ ID NO: 25806
  source 1..120: mol_type = other DNA

SEQ ID NO: 71954 - DNA, 120 bp, synthetic construct; identical to SEQ ID NO: 25807
  source 1..120: mol_type = other DNA

SEQ ID NO: 71955 - DNA, 120 bp, synthetic construct
  source 1..120: mol_type = other DNA
tttcttgtaaatttgtttgagttcattgtagattctggatattagccctgggatgcaaggctggtccaatatacgcaaatcaataaatgtaatccagcatataaacagagccaaagacaa

SEQ ID NO: 71956 - DNA, 120 bp, synthetic construct
  source 1..120: mol_type = other DNA
tggatcccttccttacaccttatacaaaaatcaattcaagatggattaaagacttaaacgttagacctaaaaccataaaaaccctagaagaaaacctaggcaataccattcaggacatag

SEQ ID NO: 71957 - DNA, 120 bp, synthetic construct; identical to SEQ ID NO: 25808
  source 1..120: mol_type = other DNA

SEQ ID NO: 71958 - DNA, 120 bp, synthetic construct
  source 1..120: mol_type = other DNA
caaatggtatttctagttctagatctctgaggaatcgccacactgacttccacaatggttgaactagtttacagtcccaccaacagtataaagtgttcctatttctccacatcctctccc

SEQ ID NO: 71959 - DNA, 120 bp, synthetic construct
  source 1..120: mol_type = other DNA
aataaagggtattcaattaggaaaagaggaagtcaaattgtccctgtttgcagaggacatgattgtatatctagaaaaccccattgtctcagcccaaaatctccttaagctgataagcaa

SEQ ID NO: 71960 - DNA, 120 bp, synthetic construct
  source 1..120: mol_type = other DNA
aaaaaccctagaagaaaacctaggcaataccattcaggacataggcatgggcaaggacttcatgtctgaaacaccaaaagcaatggcaacagaagccaaaattgacaaatgggatctcat

SEQ ID NO: 71961 - DNA, 120 bp, synthetic construct; identical to SEQ ID NO: 25809
  source 1..120: mol_type = other DNA

SEQ ID NO: 71962 - DNA, 120 bp, synthetic construct
  source 1..120: mol_type = other DNA
tggatgaaattggaaatcatcattctcagtaaactatcacaagaacaaaaaactaaacaccgcatattctcactcataggtgggaactgaacaatgagatcacatggacacaggaagggg

SEQ ID NO: 71963 - DNA, 120 bp, synthetic construct; identical to SEQ ID NO: 11410
  source 1..120: mol_type = other DNA

SEQ ID NO: 71964 - DNA, 120 bp, synthetic construct; identical to SEQ ID NO: 11411
  source 1..120: mol_type = other DNA

SEQ ID NO: 71965 - DNA, 120 bp, synthetic construct; identical to SEQ ID NO: 11412
  source 1..120: mol_type = other DNA

SEQ ID NO: 71966 - DNA, 120 bp, synthetic construct; identical to SEQ ID NO: 11413
  source 1..120: mol_type = other DNA

SEQ ID NO: 71967 - DNA, 120 bp, synthetic construct; identical to SEQ ID NO: 11414
  source 1..120: mol_type = other DNA

SEQ ID NO: 71968 - DNA, 120 bp, synthetic construct; identical to SEQ ID NO: 11415
  source 1..120: mol_type = other DNA

SEQ ID NO: 71969 - DNA, 120 bp, synthetic construct
  source 1..120: mol_type = other DNA
gactgtcttgcgggttctgtggtacctgggttctgtctgggcgccttagacgactgtcttgcgggttctgtggtacctgggttctgtctgggcgccttagacggctgtctcgcgggttct

SEQ ID NO: 71970 - DNA, 120 bp, synthetic construct
  source 1..120: mol_type = other DNA
tcttgtgggttctgtggtacctgggttctgtctgggcgccttagacggctgtcttgcgggttctgtggtacctgggttctgtccgggcaccttagatggctgtcttcagggttctgtggt

SEQ ID NO: 71971 - DNA, 120 bp, synthetic construct
  source 1..120: mol_type = other DNA
tctgtggtacctgggttctgtctgggtgccttagacagctgtcttgcgggttctttggtgcctgggttctgtctgggcaccttagacgactgtcttcagggttctgtggtacctcggttc

SEQ ID NO: 71972 - DNA, 120 bp, synthetic construct
  source 1..120: mol_type = other DNA
tagacgactgtcttgggggttctgtggtacctgggttctgtctgggcaccttagacagctgtcttcagggttctgtggcaactgggttctgtctgggcgccttaggcggctgtcttcagg

SEQ ID NO: 71973 - DNA, 120 bp, synthetic construct; identical to SEQ ID NO: 11416
  source 1..120: mol_type = other DNA

SEQ ID NO: 71974 - DNA, 120 bp, synthetic construct; identical to SEQ ID NO: 11417
  source 1..120: mol_type = other DNA

SEQ ID NO: 71975 - DNA, 120 bp, synthetic construct; identical to SEQ ID NO: 11418
  source 1..120: mol_type = other DNA

SEQ ID NO: 71976 - DNA, 120 bp, synthetic construct; identical to SEQ ID NO: 11419
  source 1..120: mol_type = other DNA

SEQ ID NO: 71977 - DNA, 120 bp, synthetic construct; identical to SEQ ID NO: 11420
  source 1..120: mol_type = other DNA

SEQ ID NO: 71978 - DNA, 120 bp, synthetic construct; identical to SEQ ID NO: 11421
  source 1..120: mol_type = other DNA

SEQ ID NO: 71979 - DNA, 120 bp, synthetic construct; identical to SEQ ID NO: 11422
  source 1..120: mol_type = other DNA

SEQ ID NO: 71980 - DNA, 120 bp, synthetic construct; identical to SEQ ID NO: 11423
  source 1..120: mol_type = other DNA

SEQ ID NO: 71981 - DNA, 120 bp, synthetic construct; identical to SEQ ID NO: 11427
  source 1..120: mol_type = other DNA

SEQ ID NO: 71982 - DNA, 120 bp, synthetic construct; identical to SEQ ID NO: 11428
  source 1..120: mol_type = other DNA

SEQ ID NO: 71983 - DNA, 120 bp, synthetic construct; identical to SEQ ID NO: 11401
  source 1..120: mol_type = other DNA

SEQ ID NO: 71984 - DNA, 120 bp, synthetic construct; identical to SEQ ID NO: 11402
  source 1..120: mol_type = other DNA

SEQ ID NO: 71985 - DNA, 120 bp, synthetic construct
  source 1..120: mol_type = other DNA
ttttattttattttttgtagagatggggtctcagtattttttttttttgagacagagtctcgctctgttgcccaggctggagtgcagtcgtgggatcttggctcactgcaacctctgcct

SEQ ID NO: 71986 - DNA, 120 bp, synthetic construct; identical to SEQ ID NO: 11424
  source 1..120: mol_type = other DNA

SEQ ID NO: 71987 - DNA, 120 bp, synthetic construct; identical to SEQ ID NO: 11425
  source 1..120: mol_type = other DNA

SEQ ID NO: 71988 - DNA, 120 bp, synthetic construct; identical to SEQ ID NO: 11426
  source 1..120: mol_type = other DNA

SEQ ID NO: 71989 - DNA, 120 bp, synthetic construct; identical to SEQ ID NO: 11396
  source 1..120: mol_type = other DNA

SEQ ID NO: 71990 - DNA, 120 bp, synthetic construct; identical to SEQ ID NO: 11397
  source 1..120: mol_type = other DNA

SEQ ID NO: 71991 - DNA, 120 bp, synthetic construct; identical to SEQ ID NO: 11398
  source 1..120: mol_type = other DNA

SEQ ID NO: 71992 - DNA, 120 bp, synthetic construct; identical to SEQ ID NO: 11399
  source 1..120: mol_type = other DNA

SEQ ID NO: 71993 - DNA, 120 bp, synthetic construct; identical to SEQ ID NO: 11400
  source 1..120: mol_type = other DNA

SEQ ID NO: 71994 - DNA, 120 bp, synthetic construct; identical to SEQ ID NO: 11403
  source 1..120: mol_type = other DNA

SEQ ID NO: 71995 - DNA, 120 bp, synthetic construct; identical to SEQ ID NO: 11404
  source 1..120: mol_type = other DNA

SEQ ID NO: 71996 - DNA, 120 bp, synthetic construct; identical to SEQ ID NO: 11405
  source 1..120: mol_type = other DNA

SEQ ID NO: 71997 - DNA, 120 bp, synthetic construct; identical to SEQ ID NO: 11406
  source 1..120: mol_type = other DNA

SEQ ID NO: 71998 - DNA, 120 bp, synthetic construct; identical to SEQ ID NO: 11407
  source 1..120: mol_type = other DNA

SEQ ID NO: 71999 - DNA, 120 bp, synthetic construct; identical to SEQ ID NO: 11408
  source 1..120: mol_type = other DNA

SEQ ID NO: 72000 - DNA, 120 bp, synthetic construct; identical to SEQ ID NO: 11409
  source 1..120: mol_type = other DNA

SEQ ID NO: 72001 - DNA, 120 bp, synthetic construct; identical to SEQ ID NO: 7452
  source 1..120: mol_type = other DNA

SEQ ID NO: 72002 - DNA, 120 bp, synthetic construct
  source 1..120: mol_type = other DNA
tgagaagtgaggagcccctccgcccggcagccgccccgtctgagaagtgaggagaccctctgcctggcaaccgccccgtctgagaagtgaggagcccctccgcccggcagccgccccgtc

SEQ ID NO: 72003 - DNA, 120 bp, synthetic construct
  source 1..120: mol_type = other DNA
gtggaatagaaagggggggaaggtggggaaaagattgagaaatcggatggttgccgtgtctgtgtagaaagaggtagacatgggagacttttcattttgttctgtactaagaaaaattct

SEQ ID NO: 72004 - DNA, 120 bp, synthetic construct
  source 1..120: mol_type = other DNA
aggctgaggtgggaggatcgcttgagcccaggaggttgaggctgaagtgagccatatttgtgccactgcactccagcccgagtgacagagcaagatcctgtctcaaaaaataaaataaag

SEQ ID NO: 72005 - DNA, 120 bp, synthetic construct; identical to SEQ ID NO: 22095
  source 1..120: mol_type = other DNA

SEQ ID NO: 72006 - DNA, 120 bp, synthetic construct
  source 1..120: mol_type = other DNA
gctaattttttttttgtgttatcctcaggtgatctggcctctttagcctcccaaagtgctgagattacaggcatgaaccactgcacccagcctttttctttctttctttccttctttctt

SEQ ID NO: 72007 - DNA, 120 bp, synthetic construct; identical to SEQ ID NO: 22096
  source 1..120: mol_type = other DNA

SEQ ID NO: 72008 - DNA, 120 bp, synthetic construct; identical to SEQ ID NO: 22097
  source 1..120: mol_type = other DNA

SEQ ID NO: 72009 - DNA, 120 bp, synthetic construct; identical to SEQ ID NO: 33157
  source 1..120: mol_type = other DNA

SEQ ID NO: 72010 - DNA, 120 bp, synthetic construct; identical to SEQ ID NO: 33158
  source 1..120: mol_type = other DNA

SEQ ID NO: 72011 - DNA, 120 bp, synthetic construct; identical to SEQ ID NO: 11229
  source 1..120: mol_type = other DNA

SEQ ID NO: 72012 - DNA, 120 bp, synthetic construct; identical to SEQ ID NO: 11230
  source 1..120: mol_type = other DNA

SEQ ID NO: 72013 - DNA, 120 bp, synthetic construct
  source 1..120: mol_type = other DNA
gtctgaaagagacagaagaagaaatctttattttatttatttgttttttttgacacagtatctctctgtcacccaggctggagtgcagtggcacgatctcagcccactgcaacttcacct

SEQ ID NO: 72014 - DNA, 120 bp, synthetic construct
  source 1..120: mol_type = other DNA
gcggctggccgggcggggggctgacccccctacctccctcgcggacgaggtggctgccaggcggagacgctcctcacttcccagacggggtggctgctgggcggaggggctcctcacttc

SEQ ID NO: 72015 - DNA, 120 bp, synthetic construct
  source 1..120: mol_type = other DNA
tggggagagggagagggggagggggagggggagagggagagggagagctggatgacattttaaaataagacatttatgaaatgggttttttctttttggtttcatttattacttagattt

SEQ ID NO: 72016 - DNA, 120 bp, synthetic construct; identical to SEQ ID NO: 11231
  source 1..120: mol_type = other DNA

SEQ ID NO: 72017 - DNA, 120 bp, synthetic construct; identical to SEQ ID NO: 11232
  source 1..120: mol_type = other DNA

SEQ ID NO: 72018 - DNA, 120 bp, synthetic construct; identical to SEQ ID NO: 17318
  source 1..120: mol_type = other DNA

SEQ ID NO: 72019 - DNA, 120 bp, synthetic construct; identical to SEQ ID NO: 17319
  source 1..120: mol_type = other DNA

SEQ ID NO: 72020 - DNA, 120 bp, synthetic construct
  source 1..120: mol_type = other DNA
actaaatgtgctctttcagctgggaagttagaaagatggtattgagcttccttccttcccttcctttcttccttccttctctttctctcttttccttccttccttccttccattctttct

SEQ ID NO: 72021 - DNA, 120 bp, synthetic construct
  source 1..120: mol_type = other DNA
ccagcctgggcaacagagtgagactccgtctcaaaaaaaacaaacaaaacaaaacaaacaaacaaacaaacaaaaagggctgaaaaagaggtgttaaactgtgagtgaaagccagctggg

SEQ ID NO: 72022 - DNA, 120 bp, synthetic construct
  source 1..120: mol_type = other DNA
caggaaatatagttaatgtggtggcaattgtattggtctattctcacattgctgtaaagaaatgcctgatgtaatcccagtactttgggaggttgaggcaggcagattgcctgtgttcat

SEQ ID NO: 72023 - DNA, 120 bp, synthetic construct; identical to SEQ ID NO: 21388
  source 1..120: mol_type = other DNA

SEQ ID NO: 72024 - DNA, 120 bp, synthetic construct; identical to SEQ ID NO: 21389
  source 1..120: mol_type = other DNA

SEQ ID NO: 72025 - DNA, 120 bp, synthetic construct; identical to SEQ ID NO: 21390
  source 1..120: mol_type = other DNA

SEQ ID NO: 72026 - DNA, 120 bp, synthetic construct
  source 1..120: mol_type = other DNA
gggtgtgatttattctgcagttgactccacaggctgcaggtggcattggtctggggtagatagtgagcacccatcccaggaggtaatcaaaggcctgtagatgcgagactttatggtgct

SEQ ID NO: 72027 - DNA, 120 bp, synthetic construct
  source 1..120: mol_type = other DNA
tggtaaaaacctgtctctactaaaaaatacaaaaattagtcaggcgtggtggtggacgcctgtaatcccagctactggggaggctggggtgggagaatcacttgaacccaggaggtggag

SEQ ID NO: 72028 - DNA, 120 bp, synthetic construct
  source 1..120: mol_type = other DNA
acttatgaaaatttagagggttgtttaccctctacccaatctgcagtttacaattgacaccagtggttctcaaaccagggtgattttgtttccaggggatacttgtctggggacagtttt

SEQ ID NO: 72029 - DNA, 120 bp, synthetic construct
  source 1..120: mol_type = other DNA
cctgtaatcccagccctttgggaggccgaggcaggtggatcacgagatcaggagattgagaccatccttgctaacatggtgaaaccccatctctactaaaaatacaaaaaatttagctgg

SEQ ID NO: 72030 - DNA, 120 bp, synthetic construct
  source 1..120: mol_type = other DNA
tgagccgagatctcaccactgcactccagcctgggcgtcagagtgagaccctgtctcaaaaaacaaacaaacaaagcaaaattaaggcaaaaattcatgaagatcaaaatattgaaattt

SEQ ID NO: 72031 - DNA, 120 bp, synthetic construct
  source 1..120: mol_type = other DNA
aatccaggaggtggagcttgcagtgagctgagattgtgccactgcactccagcctgcacaacaaagcgagactccgtttcaggaaaaaaaaaaaaaaaaaaaaaaaaaaaaaaaaaaaaa

SEQ ID NO: 72032 - DNA, 120 bp, synthetic construct; identical to SEQ ID NO: 19494
  source 1..120: mol_type = other DNA

SEQ ID NO: 72033 - DNA, 120 bp, synthetic construct
  source 1..120: mol_type = other DNA
aggagttcgaggctgcagtgagctatgattgcacccctacacttcagcctgggtgacagagtagaaccctgtctcaaaagattaaaaatatagccgagcacagtggctcacacccttaat

SEQ ID NO: 72034 - DNA, 120 bp, synthetic construct; identical to SEQ ID NO: 19495
  source 1..120: mol_type = other DNA

SEQ ID NO: 72035 - DNA, 120 bp, synthetic construct; identical to SEQ ID NO: 5905
  source 1..120: mol_type = other DNA

SEQ ID NO: 72036 - DNA, 120 bp, synthetic construct
  source 1..120: mol_type = other DNA
acacccaaagcacgccagacgaaggttactatgacagaaaagagcaaggtgagagaatgaggaagcctcaaaacttccagaaccatgacaggagactgctccgagaagccaacttttgag

SEQ ID NO: 72037 - DNA, 120 bp, synthetic construct
  source 1..120: mol_type = other DNA
tggcacaatcatggctcactgcagcctcaacctcctgggctcaagcaatcctcacaactcagcctcccaagtagcttgaaccacaggcacacaccaccacgccctgccaattttagcatt

SEQ ID NO: 72038 - DNA, 120 bp, synthetic construct
  source 1..120: mol_type = other DNA
ctaagggactgaagggctggtagggctggaggcggcagcgcgcggcacggggaggtcaaggcaccgacgaaagcgcacagcgagcgcgaaggccccgcggccccatctgcgacgtcccct

SEQ ID NO: 72039 - DNA, 120 bp, synthetic construct
  source 1..120: mol_type = other DNA
tgccttgacctcccaaagtgctgggattacaggcatgagccaccacacccagcttcacttatgtagatctaaaaacagagaaataatctaatgtagtttatgaatagccactatttagca

SEQ ID NO: 72040 - DNA, 120 bp, synthetic construct
  source 1..120: mol_type = other DNA
ccacctttttagtgatataatataggacctatgagagaaaagatacaagcacatcagaaagaaatggtaaaaattcctggccaggcacagtggctcacaccttaatcctagcactctggg

SEQ ID NO: 72041 - DNA, 120 bp, synthetic construct
  source 1..120: mol_type = other DNA
agcgagccgtgactgtaccttggcactccagcctgagcaacagagcaagatcctgtctcaaaaaaaaaaaaaagaaaagaagaggttttgcgcttcaagtagtgcaaaagaagagttttt

SEQ ID NO: 72042 - DNA, 120 bp, synthetic construct
  source 1..120: mol_type = other DNA
aagcttcagtgagctgtgatcacaccactacactctagcctgggtgtcagagtgagaccctgtctcaaaaaacaaaaaagtctcttggaaaaaaaaaacttattaatctagaattgtatt

SEQ ID NO: 72043 - DNA, 120 bp, synthetic construct; identical to SEQ ID NO: 12138
  source 1..120: mol_type = other DNA

SEQ ID NO: 72044 - DNA, 120 bp, synthetic construct; identical to SEQ ID NO: 12139
  source 1..120: mol_type = other DNA

SEQ ID NO: 72045 - DNA, 120 bp, synthetic construct; identical to SEQ ID NO: 12140
  source 1..120: mol_type = other DNA

SEQ ID NO: 72046 - DNA, 120 bp, synthetic construct; identical to SEQ ID NO: 12141
  source 1..120: mol_type = other DNA

SEQ ID NO: 72047 - DNA, 120 bp, synthetic construct
  source 1..120: mol_type = other DNA
tatactttaagttttagggtacatgtgcacaacgtgcaggttagttacatatgtacacatatgccatgttggtgtgctgtacccatcaactggtcatttaacattaggtatatctcctaa

SEQ ID NO: 72048 - DNA, 120 bp, synthetic construct
  source 1..120: mol_type = other DNA
ataatcctttgggtatagacccagtaatgggattgctgggtcaaatggtatttctagttcaagatccctgaggaatcgctacaggtaccaaaagagagagatagaccaatggaacagaac

SEQ ID NO: 72049 - DNA, 120 bp, synthetic construct
  source 1..120: mol_type = other DNA
gcaggtggataacttgaggtcaagagttcgagaccagcctggccaacatggcgaaacctcctctctactaaaaatataaaaattagccaggcatggtgacacatgtctgcaattccagct

SEQ ID NO: 72050 - DNA, 120 bp, synthetic construct
  source 1..120: mol_type = other DNA
cagagcagaactgaaggaaatagagacacaaaaaacccttcaaaaaattaatgaatccaccaccaaaaatcctcaataaaatactggcaaaccaaatccagcagcacatcagaaagctta

SEQ ID NO: 72051 - DNA, 120 bp, synthetic construct
  source 1..120: mol_type = other DNA
tgggtaggaagaatcaatattgtgaaaatggccatactgcccaaggtaatttatacattcaatgccatccccatcaagctaccaatgactttcttcacagaattggaaaaaactacttta

SEQ ID NO: 72052 - DNA, 120 bp, synthetic construct
  source 1..120: mol_type = other DNA
aaaccacagtgagataccatctcacaccagttagaatggctatcattaaaaagtcaggaatcaacacgtgctggagaggatgtggagaaataggaacacttttacactgttggtgggact

SEQ ID NO: 72053 - DNA, 120 bp, synthetic construct; identical to SEQ ID NO: 12130
  source 1..120: mol_type = other DNA

SEQ ID NO: 72054 - DNA, 120 bp, synthetic construct; identical to SEQ ID NO: 12131
  source 1..120: mol_type = other DNA

SEQ ID NO: 72055 - DNA, 120 bp, synthetic construct; identical to SEQ ID NO: 12132
  source 1..120: mol_type = other DNA

SEQ ID NO: 72056 - DNA, 120 bp, synthetic construct; identical to SEQ ID NO: 12133
  source 1..120: mol_type = other DNA

SEQ ID NO: 72057 - DNA, 120 bp, synthetic construct
  source 1..120: mol_type = other DNA
accaaacactgcctgttctcactcataggtgggaattgaacaatgagaacacatggacacaggaaggggaacatcacaccccggggcctgttgtggggtgggggaggggggagggatagc

SEQ ID NO: 72058 - DNA, 120 bp, synthetic construct
  source 1..120: mol_type = other DNA
aaagtgttgggattacaggcatgagccactgtgcccagccagttagtttaaattttaaagcaaacatccataaatgtccaactattatctatgtaactgatattctcaaaatgcttttgc

SEQ ID NO: 72059 - DNA, 120 bp, synthetic construct; identical to SEQ ID NO: 12134
  source 1..120: mol_type = other DNA

SEQ ID NO: 72060 - DNA, 120 bp, synthetic construct
  source 1..120: mol_type = other DNA
tttttgtatttttagtagagatggggtttcactcaacggggctggtcttgaactcctagcctcaagtgatcctcccgcctcagtctcccaaagtgctgggattacaggcatgagccactg

SEQ ID NO: 72061 - DNA, 120 bp, synthetic construct
  source 1..120: mol_type = other DNA
agatcgtgccactgcacttcagcctgggcgacagagcaagactccgtctcaaaaagtaataataataaaaataaataaataaatatatatatataacaatttaaattcttgatctaaaat

SEQ ID NO: 72062 - DNA, 120 bp, synthetic construct
  source 1..120: mol_type = other DNA
tggggtggtgccactgcactccagcccaagcaacaggttaggaatttgagaccagcctagccaacatggtgatacctcatctctactaaaaatacaaaaattagctgggtgtggtagcgg

SEQ ID NO: 72063 - DNA, 120 bp, synthetic construct
  source 1..120: mol_type = other DNA
aacaccacatgttctcactcataagtgggaggtgaacaatgagaacacatggacactgaaggtgggggggcatcacacactggggcctgtcagggggtggggggctgggggagggatagc

SEQ ID NO: 72064 - DNA, 120 bp, synthetic construct
  source 1..120: mol_type = other DNA
ggaggggatggaggggtcggattgttgctgtgtctgtgtagagggaagtggacttaggagactccattttgttctgtactaagaaaaatcttctgccttgggatgctgttaatctatgac

SEQ ID NO: 72065 - DNA, 120 bp, synthetic construct; identical to SEQ ID NO: 35332
  source 1..120: mol_type = other DNA

SEQ ID NO: 72066 - DNA, 120 bp, synthetic construct; identical to SEQ ID NO: 35333
  source 1..120: mol_type = other DNA

SEQ ID NO: 72067 - DNA, 120 bp, synthetic construct; identical to SEQ ID NO: 9332
  source 1..120: mol_type = other DNA

SEQ ID NO: 72068 - DNA, 120 bp, synthetic construct
  source 1..120: mol_type = other DNA
ggctagtgatggtgagcattttttcatgtgttttttggctgcataaatgtcttcttttgagaagtgtctgttcatgtccttcgctcactttttgatggggttgtttttttcttgtaaatt

SEQ ID NO: 72069 - DNA, 120 bp, synthetic construct
  source 1..120: mol_type = other DNA
catgatttggctctctgtttgtctgttattggtgtataagaatgcttgtgatttttgtacattgattttgtatcctgagactttgctgaagttgcttatcagcctaaggagattttgggc

SEQ ID NO: 72070 - DNA, 120 bp, synthetic construct; identical to SEQ ID NO: 31658
  source 1..120: mol_type = other DNA

SEQ ID NO: 72071 - DNA, 120 bp, synthetic construct; identical to SEQ ID NO: 31659
  source 1..120: mol_type = other DNA

SEQ ID NO: 72072 - DNA, 120 bp, synthetic construct
  source 1..120: mol_type = other DNA
gtccatatgttctcattgttcaattcccacctatgagtgagaatatgcggtgtttggtttttttgttcttgcgatagtttactgtgaatgatgatttccaatttcgtccatgtccctaca

SEQ ID NO: 72073 - DNA, 120 bp, synthetic construct
  source 1..120: mol_type = other DNA
catcttgaattaatttttatataaggtgtaaggaagggatccagtttcagctttctccatatggctagccagttttcccagcaccatttattaaatagggaatcctttccccattgcttg

SEQ ID NO: 72074 - DNA, 120 bp, synthetic construct
  source 1..120: mol_type = other DNA
tgtgggtttgtcatagatagctcttattattttgagatacgtcccatcaatgcctaatttattgagagtttttagcatgaagggttgttgaattttgtcaaaggccttttctgcatctat

SEQ ID NO: 72075 - DNA, 120 bp, synthetic construct
  source 1..120: mol_type = other DNA
ttattagtcttgctagcagtctatcaattttgttgatcctttcaaaaaaccagctcttggattcactaatttttggaagggttttttgtgtctctatttccttcagttctgctctgattt

SEQ ID NO: 72076 - DNA, 120 bp, synthetic construct
  source 1..120: mol_type = other DNA
tgtgtctctgcacgtaagatgggtttcctgaatacagcacactgatgggtcttgactctttatccaatttgccagtctgtgtcttttaattggagcatttagtccatttacatttaaagt

SEQ ID NO: 72077 - DNA, 120 bp, synthetic construct
  source 1..120: mol_type = other DNA
tgatctttgacaaacctgaaaaaaataagcaatggggaagggattcactatttaataaatggtgctgggaaaactggctagccatatgtagaaagctgaaactggatcccttctttacac

SEQ ID NO: 72078 - DNA, 120 bp, synthetic construct
  source 1..120: mol_type = other DNA
cagaaaaccaaacaccgcatattctcactcataggtgggaactgaacaatgagaacacatggacacaggaaggggaacatcacactctggggactgttgtggggtggggggagggggagg

SEQ ID NO: 72079 - DNA, 120 bp, synthetic construct; identical to SEQ ID NO: 31436
  source 1..120: mol_type = other DNA

SEQ ID NO: 72080 - DNA, 120 bp, synthetic construct
  source 1..120: mol_type = other DNA
cgccctgtctgggatgtgaggagcgcctctgctgggccgcaaccctgtctgggaggtgaggagcgtctctgcccggccgctccgtctgaaaagtgaggaaaccctctgcctggcaaccgc

SEQ ID NO: 72081 - DNA, 120 bp, synthetic construct; identical to SEQ ID NO: 31437
  source 1..120: mol_type = other DNA

SEQ ID NO: 72082 - DNA, 120 bp, synthetic construct
  source 1..120: mol_type = other DNA
attgttggacatttgggttggttccaagtctttgccattgtgaataatgccgcaataaacatacgtgtgcatgtgtctttatagcagcatgatttatagtcctttgggtatatacccagt

SEQ ID NO: 72083 - DNA, 120 bp, synthetic construct
  source 1..120: mol_type = other DNA
gatggcattgaatctgtaaattaccttgggcagtatggccattttcacgatattgattcttcctacacatgagcatggaatgttcttccatttgtttgtatcctcttttatttccttgag

SEQ ID NO: 72084 - DNA, 120 bp, synthetic construct
  source 1..120: mol_type = other DNA
ctgcccggctttggtatcagaatgatgctggcctcataaaatgagttaggaaggattccctctttttctattgattggaatagtttcagaaggaatggtaccagttcctccttgtacctc

SEQ ID NO: 72085 - DNA, 120 bp, synthetic construct
  source 1..120: mol_type = other DNA
cacttggtgcagagctgagttcaattcctgggtatccttgttgacgttctgtctcgttgatctgtctaatgttgacagtggggtgttaaagtctcccattattaatgtgtgggagtctaa

SEQ ID NO: 72086 - DNA, 120 bp, synthetic construct
  source 1..120: mol_type = other DNA
cttctggctcgtagggtttctgccgagagacccgctgttagtctgatgggcttccctttgagggtaacccgacctttctctctggctgcccttaacattttttccttcatttcaactttg

SEQ ID NO: 72087 - DNA, 120 bp, synthetic construct
  source 1..120: mol_type = other DNA
acagactgtaccctcagctgcaggtctgttggaataccctgccgtgtgaggtgtcagtgttcccctgctggggggtgcctcccagttaggctgctcgggggtcaggggtcagggacccac

SEQ ID NO: 72088 - DNA, 120 bp, synthetic construct; identical to SEQ ID NO: 25781
  source 1..120: mol_type = other DNA

SEQ ID NO: 72089 - DNA, 120 bp, synthetic construct
  source 1..120: mol_type = other DNA
gggcacagacgaaaaaaaagacagcagtaacctctgcagacttaaatgtccatgtctgacagctttgaagagagcagtggttctcccagcatgcagctggagatctgagaatgggcagac

SEQ ID NO: 72090 - DNA, 120 bp, synthetic construct
  source 1..120: mol_type = other DNA
agttggaaaacactctgcagaatattatccaggagaacttccccaatctagcaaggcaggccaacattcagattcaggaaatacagagaacgccacaaagatactcctcgagaagagcaa

SEQ ID NO: 72091 - DNA, 120 bp, synthetic construct
  source 1..120: mol_type = other DNA
ttaacaccccactgtcaacattagacagatcaatgagacagaaagttaacaaggatacccaggaattgaactcagctctgcaccaagaggacctaacagacatctacagaactctcgacc

SEQ ID NO: 72092 - DNA, 120 bp, synthetic construct
  source 1..120: mol_type = other DNA
cttgacacatacaccctcccaagactaaaccaggaagaagttgactctctgaatagaacaataacagaatctgaaatggtggcaataatcaatagcttaccaaccaaaaagagtccagga

SEQ ID NO: 72093 - DNA, 120 bp, synthetic construct
  source 1..120: mol_type = other DNA
caatatcatgaaaatggccatactgcccaaggtaatttatagattcaatgccatccccataaagctaccaatgactttcttcacagaattggaaaaaactactttaaagttcaaatggaa

SEQ ID NO: 72094 - DNA, 120 bp, synthetic construct
  source 1..120: mol_type = other DNA
aggatgtgaagaaatagaaacacttttacactgttggtgggactgtaaactagttcagcccttgtggaagtcagtgtggcgattgctcagggatctagaactagaaatacgatttgaccc

SEQ ID NO: 72095 - DNA, 120 bp, synthetic construct
  source 1..120: mol_type = other DNA
cattttttcttaagaaaaaaaaagagccctgcataatggctttctcagggtgacaaaattagacagtgatagagccaatactcttaccaaggcggcctaactcctagactagtgctccta

SEQ ID NO: 72096 - DNA, 120 bp, synthetic construct; identical to SEQ ID NO: 6388
  source 1..120: mol_type = other DNA

SEQ ID NO: 72097 - DNA, 120 bp, synthetic construct
  source 1..120: mol_type = other DNA
atgaataaacaaaatgtggtatacacttacaattaaatattattcagccataaaaaagaatgaagtgggccaggcacggtggctcacgcttgtaatcctagcactttgggaggccgaggc

SEQ ID NO: 72098 - DNA, 120 bp, synthetic construct; identical to SEQ ID NO: 24291
  source 1..120: mol_type = other DNA

SEQ ID NO: 72099 - DNA, 120 bp, synthetic construct
  source 1..120: mol_type = other DNA
ctcagcctcccaaagtgctgggattacaggcatgagccaccatgcccagccatgcttataatcttaaaatggaatttttcctatttaaaaattttcatttttgttactctgaacttcaac

SEQ ID NO: 72100 - DNA, 120 bp, synthetic construct; identical to SEQ ID NO: 28441
  source 1..120: mol_type = other DNA

SEQ ID NO: 72101 - DNA, 120 bp, synthetic construct
  source 1..120: mol_type = other DNA
tcctgcctcggcctgccgagtgcctgtgattccaggcacgtgccgccactcctgactggtttatatatttttggtgaaaacgaggtttccccgtgttgactgggctggtctccagctcct

SEQ ID NO: 72102 - DNA, 120 bp, synthetic construct
  source 1..120: mol_type = other DNA
tccgcccagccaccccgtctgggaggtgaggagcacctctgcccggccgccgccccgtctgggaagtgaggagcgcctctgccaggccgtcccgtctgggaagtgtacccaacagctccg

SEQ ID NO: 72103 - DNA, 120 bp, synthetic construct
  source 1..120: mol_type = other DNA
acacaggcatgggcaaggacttcatgtctaaaacactaaaagcaatggcaacaaaagccaaaattgacaaatgggatctaattaaaataaagagcttctgcacagcaaaagacactacca

SEQ ID NO: 72104 - DNA, 120 bp, synthetic construct; identical to SEQ ID NO: 10755
  source 1..120: mol_type = other DNA

SEQ ID NO: 72105 - DNA, 120 bp, synthetic construct
  source 1..120: mol_type = other DNA
gaacccgggaggcagaggttgccatgagctgagattgcaccactgcactgtagcctaggcaacagagtgagacgctgtctcaaaaaaaaaatatatatgtatatgtgtatatatatatgt

SEQ ID NO: 72106 - DNA, 120 bp, synthetic construct
  source 1..120: mol_type = other DNA
tttttctgcattccccactaacacttcaccacaggagaggggagcaaattctgtagttgtttggctacccttttagagtattttactagcagaatgaagaaactcaccctttctgggaac

SEQ ID NO: 72107 - DNA, 120 bp, synthetic construct
  source 1..120: mol_type = other DNA
tgttgttgttttctttttaattttattttttttttaattgatcattcttgggtgtttctcacagagggggatttggcagggtcataggacactagtggagggaaggtcagcagacaaaca

SEQ ID NO: 72108 - DNA, 120 bp, synthetic construct
  source 1..120: mol_type = other DNA
tgggatgggggccgggacgaggcgctcctcacttcccaggtgggatggcggccgggcagagacgctcctcactttccagactgggcagccaggcagaggggctcctcacatcccagacga

SEQ ID NO: 72109 - DNA, 120 bp, synthetic construct; identical to SEQ ID NO: 26610
  source 1..120: mol_type = other DNA

SEQ ID NO: 72110 - DNA, 120 bp, synthetic construct; identical to SEQ ID NO: 26611
  source 1..120: mol_type = other DNA

SEQ ID NO: 72111 - DNA, 120 bp, synthetic construct
  source 1..120: mol_type = other DNA
gaatagccaacaggaaattaaattccctaagttaaatactatgtactgccagcggtgtagaactactcttccatctcacccagtatgaaacctcctcactagagatgtagtgtccctttg

SEQ ID NO: 72112 - DNA, 120 bp, synthetic construct
  source 1..120: mol_type = other DNA
aattttaagaattacttttccctatggtaaaaacaaggctatttcctaggattttatagtttcctactactgattgaggcattttgtagctaattccaccccccccccccaccgtccccc

SEQ ID NO: 72113 - DNA, 120 bp, synthetic construct
  source 1..120: mol_type = other DNA
atgcataaaaaacaaggtaacacattgtcgttgttgttgttgttattattattatcatttgagacggagtctcactctgtcgcccaggctggagtgcagtgacatgatcttggctcactg

SEQ ID NO: 72114 - DNA, 120 bp, synthetic construct
  source 1..120: mol_type = other DNA
cccaccttggcctcccaaagtgctgggattacaggtgtgagccactgcacctggccaaaagttctgaaggttttactaaccataagtgacattaaaaaccataaaattcaaataagacta

SEQ ID NO: 72115 - DNA, 120 bp, synthetic construct
  source 1..120: mol_type = other DNA
aagagttaatagaactagaaatagtaaacatatgggtatttataaaagacattctcaactgggcacggtggttcacgcctgtaatcccaacactttgggaggctgaggagggcagatcac

SEQ ID NO: 72116 - DNA, 120 bp, synthetic construct
  source 1..120: mol_type = other DNA
tggataattataaaagacattctcagctgggcgcggtggctcacgcctgtaatcccagcactttgggaggctgaggagggcagatcacgaggtcaggagatcatgatggaaccccatctc

SEQ ID NO: 72117 - DNA, 120 bp, synthetic construct
  source 1..120: mol_type = other DNA
ggtggatcccgaggtcaggagatggagaccatcccagccaacatggtgaaaccccatctctactaaaatagaaaagaaaaaaaaaattagccaggcatggtggcgggtgcttgtagtccc

SEQ ID NO: 72118 - DNA, 120 bp, synthetic construct
  source 1..120: mol_type = other DNA
aataaattaattacaatttttttttatatacagtttgggtgccatggctcacatttgtaatcccagcactttgggaggctgaggcaggagaatcacttgagctcaggagttcctctccct

SEQ ID NO: 72119 - DNA, 120 bp, synthetic construct
  source 1..120: mol_type = other DNA
ccagccgccccatccgggaggtgaggggcgcttctgcccggccgcccctactgggaagtgaggagcccctctgcccggccacgaccccgtctgggaggtgtgcccagcggctcattgggg

SEQ ID NO: 72120 - DNA, 120 bp, synthetic construct
  source 1..120: mol_type = other DNA
tttttttttaattgatcattcttgggtgtttctcgtagagggggatttggcagggtcataggacaatagtggagggaaggtcagcagataaacaagtgaacaaaggtctctggttttcta

SEQ ID NO: 72121 - DNA, 120 bp, synthetic construct; identical to SEQ ID NO: 7549
  source 1..120: mol_type = other DNA

SEQ ID NO: 72122 - DNA, 120 bp, synthetic construct
  source 1..120: mol_type = other DNA
gctctttagcccaggccggattgcagtggcacaatcttggctcactgcaagctccgcctcccaggttcacgccattctcctgcctcagcctcccgagtagctgggactacaggcgcccgc

SEQ ID NO: 72123 - DNA, 120 bp, synthetic construct; identical to SEQ ID NO: 31924
  source 1..120: mol_type = other DNA

SEQ ID NO: 72124 - DNA, 120 bp, synthetic construct; identical to SEQ ID NO: 31925
  source 1..120: mol_type = other DNA

SEQ ID NO: 72125 - DNA, 120 bp, synthetic construct; identical to SEQ ID NO: 22151
  source 1..120: mol_type = other DNA

SEQ ID NO: 72126 - DNA, 120 bp, synthetic construct; identical to SEQ ID NO: 22144
  source 1..120: mol_type = other DNA

SEQ ID NO: 72127 - DNA, 120 bp, synthetic construct; identical to SEQ ID NO: 22145
  source 1..120: mol_type = other DNA

SEQ ID NO: 72128 - DNA, 120 bp, synthetic construct; identical to SEQ ID NO: 22139
  source 1..120: mol_type = other DNA

SEQ ID NO: 72129 - DNA, 120 bp, synthetic construct; identical to SEQ ID NO: 22140
  source 1..120: mol_type = other DNA

SEQ ID NO: 72130 - DNA, 120 bp, synthetic construct; identical to SEQ ID NO: 22141
  source 1..120: mol_type = other DNA

SEQ ID NO: 72131 - DNA, 120 bp, synthetic construct; identical to SEQ ID NO: 22142
  source 1..120: mol_type = other DNA

SEQ ID NO: 72132 - DNA, 120 bp, synthetic construct; identical to SEQ ID NO: 22142
  source 1..120: mol_type = other DNA

SEQ ID NO: 72133 - DNA, 120 bp, synthetic construct; identical to SEQ ID NO: 22143
  source 1..120: mol_type = other DNA

SEQ ID NO: 72134 - DNA, 120 bp, synthetic construct; identical to SEQ ID NO: 22146
  source 1..120: mol_type = other DNA

SEQ ID NO: 72135 - DNA, 120 bp, synthetic construct
  source 1..120: mol_type = other DNA
tttcatgtgttttttggctgcataaatgtcttcttttgagaagtgtctgttcatgtccttcacccactttttgatggggtctttttttcttgtaaatttgtttgagttcattgtagattc

SEQ ID NO: 72136 - DNA, 120 bp, synthetic construct
  source 1..120: mol_type = other DNA
caactgtgaatgggagttcactcatgatttggctctctgtttgtctgttgttggtgtataagaatgcttgtgatttttgtacattgattttgtatcctgagactttgctgaagttgctta

SEQ ID NO: 72137 - DNA, 120 bp, synthetic construct
  source 1..120: mol_type = other DNA
ttttctagtttatttgcgtagaggtgtttgtagtattctctgatggtagtttgtatttctgtgggatcggtggtgatatcccctttatcattttttattacatctatttgattcttctct

SEQ ID NO: 72138 - DNA, 120 bp, synthetic construct
  source 1..120: mol_type = other DNA
cttcctccatccttttattttcagcctgtgtgtgtctctgcatgtgagatgggtttcctgaatacagcacactgatgggtcttgactctttatccaatttgccagtctgtgtcttttaat

SEQ ID NO: 72139 - DNA, 120 bp, synthetic construct
  source 1..120: mol_type = other DNA
gcactcttcacgtagttctcgagccttggttttcagctccatcagctcctttaagcacttctctggattggttattctagttatacattcttctaaatttttttcaaagttttcaacttc

SEQ ID NO: 72140 - DNA, 120 bp, synthetic construct
  source 1..120: mol_type = other DNA
agcaaccagcgagactccatgggcgtaggaccctcggagccaggtgccggatataatctcgtggtgcaccgttttttaagcccgtcggaaaagcgcagtattcgggtgggagtgacccaa

SEQ ID NO: 72141 - DNA, 120 bp, synthetic construct; identical to SEQ ID NO: 22147
  source 1..120: mol_type = other DNA

SEQ ID NO: 72142 - DNA, 120 bp, synthetic construct
  source 1..120: mol_type = other DNA
ctgagtagctgggaccacaggcacacaccatcatgcctggctaattttataaaaattgtttgtaggtttgtagttctccttgaagaggtccttcacatcccttgtaagttggattcctag

SEQ ID NO: 72143 - DNA, 120 bp, synthetic construct
  source 1..120: mol_type = other DNA
cctgttattggtctattcagagattcaacttcttcctggtttagtcttgggagagtgtatgtgtcgaggaatttatccatttcaaccactgctcaaggaaataaaagaggatgcaaacaa

SEQ ID NO: 72144 - DNA, 120 bp, synthetic construct
  source 1..120: mol_type = other DNA
cggtgaaggacatgaacagacacttctcaaaagaagacatttatgcagccaaaaaacacatgaaaaaatgctcagcatcactggccatcagagaaatgcaaatcaaaaccacaatgagat

SEQ ID NO: 72145 - DNA, 120 bp, synthetic construct; identical to SEQ ID NO: 22148
  source 1..120: mol_type = other DNA

SEQ ID NO: 72146 - DNA, 120 bp, synthetic construct
  source 1..120: mol_type = other DNA
agtcaaattgtccctgtttgcagatgacatgattgtatatctagaaaaccccatcgtctcagcccaaaatctccttaagctgataggcaacttcagcagtctcaggatacaaaatcaatg

SEQ ID NO: 72147 - DNA, 120 bp, synthetic construct
  source 1..120: mol_type = other DNA
ctcaaacaaatttacaagaaaaaaaaaacaacgccatcaacaagtgggcaaaggatatgaacagacacttctcaaaagaagacatttatgcagccaaacgacacatgaaaacatgctcat

SEQ ID NO: 72148 - DNA, 120 bp, synthetic construct; identical to SEQ ID NO: 22149
  source 1..120: mol_type = other DNA

SEQ ID NO: 72149 - DNA, 120 bp, synthetic construct; identical to SEQ ID NO: 22150
  source 1..120: mol_type = other DNA

SEQ ID NO: 72150 - DNA, 120 bp, synthetic construct
  source 1..120: mol_type = other DNA
ggatggctgggtcaaatggtatttctagttctagatccctgaggcatcgccacactgacttccacaatggttgaactagtttacagtcccaccaacagtgtaaaagtgttcctatttctc

SEQ ID NO: 72151 - DNA, 120 bp, synthetic construct
  source 1..120: mol_type = other DNA
ttccttgagcagtggtttatagttctccttgaagaggtccttcacatcccttgtaagttaacaaggatacccaggaattgaactcagctctgcaccaagcggacctaatagacatctaca

SEQ ID NO: 72152 - DNA, 120 bp, synthetic construct
  source 1..120: mol_type = other DNA
gtgttggcggtattcgtttaggcgcgcattccgtgggacggggtttctcatcacgggttccgttggtatctagggtgggaccgttcttctctgtgggggacttcctgtctatccagcctt

SEQ ID NO: 72153 - DNA, 120 bp, synthetic construct
  source 1..120: mol_type = other DNA
gtcgtgtgcgtggctgtgcgcgcggggacgtgtgtgcggcgtgcccgcagtgtcgtgtgcgtggctgtgcgcgcggggacgtgtgtgcggcgtgtgcgcattggcgtgtacttggctgtg

SEQ ID NO: 72154 - DNA, 120 bp, synthetic construct; identical to SEQ ID NO: 24325
  source 1..120: mol_type = other DNA

SEQ ID NO: 72155 - DNA, 120 bp, synthetic construct; identical to SEQ ID NO: 24326
  source 1..120: mol_type = other DNA

SEQ ID NO: 72156 - DNA, 120 bp, synthetic construct; identical to SEQ ID NO: 24327
  source 1..120: mol_type = other DNA

SEQ ID NO: 72157 - DNA, 120 bp, synthetic construct
  source 1..120: mol_type = other DNA
agaatatatgaagagctcaaacaagtctataggaaaaaatctaataatgtgaaaaatgggccaaaagggccgagtgtagtcactcacacctataatcccagcactttgggaggcctaggc

SEQ ID NO: 72158 - DNA, 120 bp, synthetic construct; identical to SEQ ID NO: 25066
  source 1..120: mol_type = other DNA

SEQ ID NO: 72159 - DNA, 120 bp, synthetic construct; identical to SEQ ID NO: 25067
  source 1..120: mol_type = other DNA

SEQ ID NO: 72160 - DNA, 120 bp, synthetic construct; identical to SEQ ID NO: 25068
  source 1..120: mol_type = other DNA

SEQ ID NO: 72161 - DNA, 120 bp, synthetic construct; identical to SEQ ID NO: 25069
  source 1..120: mol_type = other DNA

SEQ ID NO: 72162 - DNA, 120 bp, synthetic construct; identical to SEQ ID NO: 25070
  source 1..120: mol_type = other DNA

SEQ ID NO: 72163 - DNA, 120 bp, synthetic construct
  source 1..120: mol_type = other DNA
catgatggcaaattactcttttcaaaggctgacagcaggtagcattgaaaagacttcatttattaactgaatgccttcccatttgtttgtccttccttccttccttccttccctccctcc

SEQ ID NO: 72164 - DNA, 120 bp, synthetic construct; identical to SEQ ID NO: 15408
  source 1..120: mol_type = other DNA

SEQ ID NO: 72165 - DNA, 120 bp, synthetic construct; identical to SEQ ID NO: 15409
  source 1..120: mol_type = other DNA

SEQ ID NO: 72166 - DNA, 120 bp, synthetic construct
  source 1..120: mol_type = other DNA
ctcccattctgtaggttgcctgttcactctgatggtagtttcttttgctgtgcagaagctcctgagtttaattagatcccatttgtcaattttggcttttgttgccattgcttttggggt

SEQ ID NO: 72167 - DNA, 120 bp, synthetic construct
  source 1..120: mol_type = other DNA
ttgattttgtaacctgagactttgctgaagttgcttatcagcttgagattttgggctgagatgaaggggttttctagatatacaatcatgtcatctacaaacagggacaatttgacttcc

SEQ ID NO: 72168 - DNA, 120 bp, synthetic construct
  source 1..120: mol_type = other DNA
aaaccagctcctggactcattgattttttgaagggtttcttgtgtctctatttccttcagttctgctctgctcttagttatttcttgccttctgctagcttttgaatgtgtttgctcttg

SEQ ID NO: 72169 - DNA, 120 bp, synthetic construct
  source 1..120: mol_type = other DNA
gcctgcacgtgagatgggtttcctgaatacagcacactgatgggtcttgactctttatccaatttgccagtctgtgtcttttaattggagcatttagcccatttacatttaaagttaata

SEQ ID NO: 72170 - DNA, 120 bp, synthetic construct
  source 1..120: mol_type = other DNA
gcttcatttcattcatttcatcttctatcactgataccctttcttccagttgatcacgtcggctaataaggcttctgcattcgtcacgtagctctcgtgccttggttttcagctccatca

SEQ ID NO: 72171 - DNA, 120 bp, synthetic construct; identical to SEQ ID NO: 24840
  source 1..120: mol_type = other DNA

SEQ ID NO: 72172 - DNA, 120 bp, synthetic construct
  source 1..120: mol_type = other DNA
caagtctttgctattgtgaatagtgccgcaataaacatacgtgtgcatgtgtctttatagcagcatgatttatactcatttgggtatatacccagtaatgggatggctgggtcaaatggt

SEQ ID NO: 72173 - DNA, 120 bp, synthetic construct
  source 1..120: mol_type = other DNA
ctcaggtttgtcaaagatcagatagttgtagatatgcggcattatttctgagggctctgttctgttccattgatctatatgtctgttttggtaccagtaccatgctgttttggttactgt

SEQ ID NO: 72174 - DNA, 120 bp, synthetic construct; identical to SEQ ID NO: 70551
  source 1..120: mol_type = other DNA

SEQ ID NO: 72175 - DNA, 120 bp, synthetic construct
  source 1..120: mol_type = other DNA
tgaggagagctttacttccaactatgtggtcaattttggaataggtgtggtgtggtgctgaaaaaaatgtatattctgttgatttggggtggagagttctgtagatgtctattaggtccg

SEQ ID NO: 72176 - DNA, 120 bp, synthetic construct
  source 1..120: mol_type = other DNA
ggtaacccgacctttctctctggctgcccttaacattttttccttcatttcaactttggtgaatctgacaattatgtgtcttggagttgctcttctcgaggagtatctttgtggagttct

SEQ ID NO: 72177 - DNA, 120 bp, synthetic construct
  source 1..120: mol_type = other DNA
tgagctgtggtgggctccacccagttcgagcttccgggctgctttgtttacctaagcaagcctgggcaatggcgggcgcccctcccccagcctcgttgccgccttgcagtttgatctcag

SEQ ID NO: 72178 - DNA, 120 bp, synthetic construct; identical to SEQ ID NO: 24839
  source 1..120: mol_type = other DNA

SEQ ID NO: 72179 - DNA, 120 bp, synthetic construct
  source 1..120: mol_type = other DNA
cagaagctctttagtttaattagataccatttgtcaattttggcttttgttgctattgcttttggtgttttagacatgaagccttgcccatgcctatgtcctgaatggtaatgcctaggt

SEQ ID NO: 72180 - DNA, 120 bp, synthetic construct
  source 1..120: mol_type = other DNA
agagggcatccctgtcttgtgccagttttcacagggaatgcttccaggttttgcccattcagtatgatattggctgtgggtttgtgatagatagctcttattattttgaaatatgtccca

SEQ ID NO: 72181 - DNA, 120 bp, synthetic construct
  source 1..120: mol_type = other DNA
cttttctagttcttttaattgtgatgttagggtgtcaattttagatctttcctgctttctcttgtgggcatttaatgctataaatttccctctacacactgctttgaatatgtcccagag

SEQ ID NO: 72182 - DNA, 120 bp, synthetic construct
  source 1..120: mol_type = other DNA
tgatgttagctggttattttgctcattagttgatgcagtttcttcctagtctcgatggtcttcacattttggcatgattttgcagtggctggtaccggttgttcctttacatgtttagtg

SEQ ID NO: 72183 - DNA, 120 bp, synthetic construct
  source 1..120: mol_type = other DNA
cagtttttctgctcggttttttccccatctttgtggttttatctacttttggtctttgatgatggtgatgtaaagatgggtttttggtgtggatgtcctttctgtttgttagttttcctt

SEQ ID NO: 72184 - DNA, 120 bp, synthetic construct
  source 1..120: mol_type = other DNA
gaagttttttccaattctgtgaagaaagtcattggtaccttgatggggatggcattgaatctgtaaattaccttgggcagtatggccattttcacaatattgattcttcctacccatgag

SEQ ID NO: 72185 - DNA, 120 bp, synthetic construct
  source 1..120: mol_type = other DNA
agtccaggaccagatggattcacagccgaattctaccagaggtacaaggaggaactggtaccattccttctgaaactatcccaatcaatagaaaaagagggaatcctccctaactcattt

SEQ ID NO: 72186 - DNA, 120 bp, synthetic construct; identical to SEQ ID NO: 24841
  source 1..120: mol_type = other DNA

SEQ ID NO: 72187 - DNA, 120 bp, synthetic construct
  source 1..120: mol_type = other DNA
atgtcaaaatgtttaagtcagtttttgcatagaaatagtcttcagcaactcctttccttcgctctggttatattgggcctttcaggctgcaggaagacaggggctgtgtcttcttaatag

SEQ ID NO: 72188 - DNA, 120 bp, synthetic construct; identical to SEQ ID NO: 16271
  source 1..120: mol_type = other DNA

SEQ ID NO: 72189 - DNA, 120 bp, synthetic construct; identical to SEQ ID NO: 16272
  source 1..120: mol_type = other DNA

SEQ ID NO: 72190 - DNA, 120 bp, synthetic construct
  source 1..120: mol_type = other DNA
catctagacaatgagatgccagagccctcattcatcatgattgcttccttgctcctccctagttcttgttttcttacacattgtcacatttcttccctgctgtataaacccctagttttt

SEQ ID NO: 72191 - DNA, 120 bp, synthetic construct; identical to SEQ ID NO: 16273
  source 1..120: mol_type = other DNA

SEQ ID NO: 72192 - DNA, 120 bp, synthetic construct; identical to SEQ ID NO: 16274
  source 1..120: mol_type = other DNA

SEQ ID NO: 72193 - DNA, 120 bp, synthetic construct; identical to SEQ ID NO: 16275
  source 1..120: mol_type = other DNA

SEQ ID NO: 72194 - DNA, 120 bp, synthetic construct; identical to SEQ ID NO: 16276
  source 1..120: mol_type = other DNA

SEQ ID NO: 72195 - DNA, 120 bp, synthetic construct; identical to SEQ ID NO: 16277
  source 1..120: mol_type = other DNA

SEQ ID NO: 72196 - DNA, 120 bp, synthetic construct; identical to SEQ ID NO: 16278
  source 1..120: mol_type = other DNA

SEQ ID NO: 72197 - DNA, 120 bp, synthetic construct
  source 1..120: mol_type = other DNA
aggctgaggcaggagaattgcttaaacccaggaggcggaggttgcagagagccgagatcgcgccattgcactccagcctgggcgacagagcatgactccgactcaaaaaaaaaaaaaact

SEQ ID NO: 72198 - DNA, 120 bp, synthetic construct; identical to SEQ ID NO: 16279
  source 1..120: mol_type = other DNA

SEQ ID NO: 72199 - DNA, 120 bp, synthetic construct
  source 1..120: mol_type = other DNA
agtgagccaagatcgtgccattgcactctagcctgggggacaaaagcgagactctgtctcaaacaaagaaagaaaagtcagattgtttcaatgtgcaaaaactgagtgttagtttttaat

SEQ ID NO: 72200 - DNA, 120 bp, synthetic construct; identical to SEQ ID NO: 16280
  source 1..120: mol_type = other DNA

SEQ ID NO: 72201 - DNA, 120 bp, synthetic construct
  source 1..120: mol_type = other DNA
aaactcctggatataagggatcctctcaccttggcctcccaaagtgtagggattataggcatgagccaccgtgcccagcaatgcatataagctttttaaaaatatatactattcatcctt

SEQ ID NO: 72202 - DNA, 120 bp, synthetic construct; identical to SEQ ID NO: 16281
  source 1..120: mol_type = other DNA

SEQ ID NO: 72203 - DNA, 120 bp, synthetic construct; identical to SEQ ID NO: 16282
  source 1..120: mol_type = other DNA

SEQ ID NO: 72204 - DNA, 120 bp, synthetic construct; identical to SEQ ID NO: 16283
  source 1..120: mol_type = other DNA

SEQ ID NO: 72205 - DNA, 120 bp, synthetic construct; identical to SEQ ID NO: 16284
  source 1..120: mol_type = other DNA

SEQ ID NO: 72206 - DNA, 120 bp, synthetic construct
  source 1..120: mol_type = other DNA
gggttgattccaagtctttgctattgtgaatagtgtcgcaataaacatatgtgtgcatgtgtctttatagcagcatgatttataatcctttgggtatatacccagtaatgggatggctgg

SEQ ID NO: 72207 - DNA, 120 bp, synthetic construct
  source 1..120: mol_type = other DNA
agttttcccagcaccatttattaaatagggaatcctttccccattgcttgtttttctcaggtttgtcaaagatcagatagttgtagatatgcggcattatttctgagggctctgttctgt

SEQ ID NO: 72208 - DNA, 120 bp, synthetic construct; identical to SEQ ID NO: 25859
  source 1..120: mol_type = other DNA

SEQ ID NO: 72209 - DNA, 120 bp, synthetic construct; identical to SEQ ID NO: 25860
  source 1..120: mol_type = other DNA

SEQ ID NO: 72210 - DNA, 120 bp, synthetic construct
  source 1..120: mol_type = other DNA
tctggattttcataaaataatgtcatattgacagaaaaacttagataaatagtaaatgttaacaattgccccttcctgtgtccatgtgttctcattgttcaattcccacctatgagtgag

SEQ ID NO: 72211 - DNA, 120 bp, synthetic construct; identical to SEQ ID NO: 25862
  source 1..120: mol_type = other DNA

SEQ ID NO: 72212 - DNA, 120 bp, synthetic construct; identical to SEQ ID NO: 25863
  source 1..120: mol_type = other DNA

SEQ ID NO: 72213 - DNA, 120 bp, synthetic construct
  source 1..120: mol_type = other DNA
agagagccaaatcatgagtgaactcccattcacaattgcttcaaagagaattaaatacctaggaatccaacttacaagggacgtgaaggaccccttcaagaactacaaaccaccgctcaa

SEQ ID NO: 72214 - DNA, 120 bp, synthetic construct
  source 1..120: mol_type = other DNA
acagacacttctcaaaagaagacatttatgcagccaaaaaacacatgaaaaaatgctcaccatcactggccatcagagaaatgcaaatcaaaaccacaatgagataccacctcacaccag

SEQ ID NO: 72215 - DNA, 120 bp, synthetic construct; identical to SEQ ID NO: 5418
  source 1..120: mol_type = other DNA

SEQ ID NO: 72216 - DNA, 120 bp, synthetic construct; identical to SEQ ID NO: 15649
  source 1..120: mol_type = other DNA

SEQ ID NO: 72217 - DNA, 120 bp, synthetic construct; identical to SEQ ID NO: 26827
  source 1..120: mol_type = other DNA

SEQ ID NO: 72218 - DNA, 120 bp, synthetic construct; identical to SEQ ID NO: 26828
  source 1..120: mol_type = other DNA

SEQ ID NO: 72219 - DNA, 120 bp, synthetic construct; identical to SEQ ID NO: 26829
  source 1..120: mol_type = other DNA

SEQ ID NO: 72220 - DNA, 120 bp, synthetic construct
  source 1..120: mol_type = other DNA
gattgccattctaactggtgtgagatggtatctcattttggttttgatttgcaagaaattagatattcttattcagatttacacagcggaccaaatgaatttttctcttgtgtgaaattt

SEQ ID NO: 72221 - DNA, 120 bp, synthetic construct
  source 1..120: mol_type = other DNA
tcggagtgggggatttggcagggtcataggacaatagtggagggaaggtcagcagataaacatgtgaacaagggtctctggttttcctaggcagaggaccctgctgccttccgcagtgtt

SEQ ID NO: 72222 - DNA, 120 bp, synthetic construct
  source 1..120: mol_type = other DNA
ccagacgatgggcggccaggcagagatgctcctcacttcccagacgtggtggcggccgggcagaggctgcaatctcggcactttgggaggccaaggcaggcggctgggaggtggaggttg

SEQ ID NO: 72223 - DNA, 120 bp, synthetic construct
  source 1..120: mol_type = other DNA
ctcagcttcccagtgtgctgggattacaggcatcagccaccacgcccggccacatcattctttttctaaagaaatgtttgtctttttctcattttttcaaaagtaatgtatgctcattgt

SEQ ID NO: 72224 - DNA, 120 bp, synthetic construct; identical to SEQ ID NO: 26831
  source 1..120: mol_type = other DNA

SEQ ID NO: 72225 - DNA, 120 bp, synthetic construct; identical to SEQ ID NO: 26832
  source 1..120: mol_type = other DNA

SEQ ID NO: 72226 - DNA, 120 bp, synthetic construct
  source 1..120: mol_type = other DNA
ggggaaatggctttccaactgctctcaaaaatctgctaggtttaaaatgcatttctaagtgttcaggaagaaaaggggctgggttgctttaacaagaggctctgtaagaagcaatttgtc

SEQ ID NO: 72227 - DNA, 120 bp, synthetic construct
  source 1..120: mol_type = other DNA
tcaatgtagtctgagtttacaaactctgtggcttacaaaatgcttagcagatacgggcactgacatcaaggagagcacaatctactgggaagaactaaggataccaaagtacctacagtg

SEQ ID NO: 72228 - DNA, 120 bp, synthetic construct
  source 1..120: mol_type = other DNA
ggagatggcaccgctaaggcaatttctcttctttccccttaaatctggtttctgggctctaattgcacatggcttcagcagcctggccatcttgccaactgtaatgaggaggtgggcatc

SEQ ID NO: 72229 - DNA, 120 bp, synthetic construct; identical to SEQ ID NO: 24111
  source 1..120: mol_type = other DNA

SEQ ID NO: 72230 - DNA, 120 bp, synthetic construct
  source 1..120: mol_type = other DNA
gagcccaggagttcaaggctgcagtgagctctgctagcaccactgcaatccagcctgggtgagagagtgagaccctgtctctaaaaataaaaaaaaaaaaaacaaataaaataaaaaaac

SEQ ID NO: 72231 - DNA, 120 bp, synthetic construct
  source 1..120: mol_type = other DNA
cctcatatattgggaccttcccaacccatcaatgacctcatctcaattgttctttttttttttttttttttttcaagacagagtcttgctctgtcactcaggctggagtgcagtggtgcg

SEQ ID NO: 72232 - DNA, 120 bp, synthetic construct
  source 1..120: mol_type = other DNA
caaactcctgacctcaggtgacctgcccaccttggcctcccgaagtgctgagattacaggcatgagctaccacacctggccaaaaaaaatttattaaaaaaaaaaaaaaaaactgcaaaa

SEQ ID NO: 72233 - DNA, 120 bp, synthetic construct; identical to SEQ ID NO: 12525
  source 1..120: mol_type = other DNA

SEQ ID NO: 72234 - DNA, 120 bp, synthetic construct; identical to SEQ ID NO: 12526
  source 1..120: mol_type = other DNA

SEQ ID NO: 72235 - DNA, 120 bp, synthetic construct; identical to SEQ ID NO: 12527
  source 1..120: mol_type = other DNA

SEQ ID NO: 72236 - DNA, 120 bp, synthetic construct; identical to SEQ ID NO: 12528
  source 1..120: mol_type = other DNA

SEQ ID NO: 72237 - DNA, 120 bp, synthetic construct; identical to SEQ ID NO: 12529
  source 1..120: mol_type = other DNA

SEQ ID NO: 72238 - DNA, 120 bp, synthetic construct; identical to SEQ ID NO: 12530
  source 1..120: mol_type = other DNA

SEQ ID NO: 72239 - DNA, 120 bp, synthetic construct
  source 1..120: mol_type = other DNA
acactctgcctaaaatataaataaataaataaataaataaataaataaataaataaataaataaaaaagggaatcaggagtaaggcaagggcaaagctaaatctttcaggctgaaaggaa

SEQ ID NO: 72240 - DNA, 120 bp, synthetic construct; identical to SEQ ID NO: 12531
  source 1..120: mol_type = other DNA

SEQ ID NO: 72241 - DNA, 120 bp, synthetic construct; identical to SEQ ID NO: 12532
  source 1..120: mol_type = other DNA

SEQ ID NO: 72242 - DNA, 120 bp, synthetic construct; identical to SEQ ID NO: 12533
  source 1..120: mol_type = other DNA

SEQ ID NO: 72243 - DNA, 120 bp, synthetic construct
  source 1..120: mol_type = other DNA
cctgcctccaatcaggaatgcacgccccatcccaggcagagagacaagggagttccacaatttcttccttgatgaatgattcctatctaccacaattttcattcaatgcatcaaatcaac

SEQ ID NO: 72244 - DNA, 120 bp, synthetic construct
  source 1..120: mol_type = other DNA
gggacattgaggcgggggcggctaggaggggtcggggatgaggacggtgacaccgaggtacaaattctactcagcatccacctttcctgtcttccttgtacccaagacacctcagcaaaa

SEQ ID NO: 72245 - DNA, 120 bp, synthetic construct
  source 1..120: mol_type = other DNA
aggctctcagtgacaatgacccggtagctggccagctgcctcccagcatagagcccatttgtctcaagggtgataatggggccaagatgaggaaggtgggcctctattagagtaatggga

SEQ ID NO: 72246 - DNA, 120 bp, synthetic construct
  source 1..120: mol_type = other DNA
caccccatccttactccaagatggaagacatagtgaacacattatttattgaacgtgccagggacaacgtgctgggcactcttgatattttatctcacgtaattctgtgagatagatgtt

SEQ ID NO: 72247 - DNA, 120 bp, synthetic construct; identical to SEQ ID NO: 12537
  source 1..120: mol_type = other DNA

SEQ ID NO: 72248 - DNA, 120 bp, synthetic construct; identical to SEQ ID NO: 12538
  source 1..120: mol_type = other DNA

SEQ ID NO: 72249 - DNA, 120 bp, synthetic construct; identical to SEQ ID NO: 29987
  source 1..120: mol_type = other DNA

SEQ ID NO: 72250 - DNA, 120 bp, synthetic construct
  source 1..120: mol_type = other DNA
gttccaggtctttgctattgtgaataatgctgcaataaacatacatgtgcatgtatctttatagcagcatgatttatagtcctttggaaatatacccagtaatgggatggctgggtcaat

SEQ ID NO: 72251 - DNA, 120 bp, synthetic construct
  source 1..120: mol_type = other DNA
tttctcaggtttgtcaaagatcagatagttgtagatatgcggcattatttctgagggctttgttctgttccattgatctatatctctgttttggtaccagtaccatgctgttttggttac

SEQ ID NO: 72252 - DNA, 120 bp, synthetic construct
  source 1..120: mol_type = other DNA
tctttggttctgtttatatgctggattacatttattgatttgcgtatattgaaccaggcttgtatcccagggatgaagcccacttgatcatgttggataagctttttcatgtgctgctgg

SEQ ID NO: 72253 - DNA, 120 bp, synthetic construct
  source 1..120: mol_type = other DNA
gaggagagctttacttccaagtatgtggtcaattttggaataggtgtggtgtggtgctgaaaaaaatgtatattctgttgatttggggtgtagagttctgtagatgtctattaagtccac

SEQ ID NO: 72254 - DNA, 120 bp, synthetic construct
  source 1..120: mol_type = other DNA
cggagtaatttgatcgtctgaagccttcttctctcagctcgtcaaagtcattctccatccagctttgttctgttgctggtgaggaactgcgttcctctggaggaggagaggcactctgct

SEQ ID NO: 72255 - DNA, 120 bp, synthetic construct
  source 1..120: mol_type = other DNA
cgcttcccaagtgaggcaatgcctcgccctgcttcggctcgcgcacggtgcacgcacccactgacctgcgcccactgtctggcactccctagtgagatgaaccctgtacctcagatggaa

SEQ ID NO: 72256 - DNA, 120 bp, synthetic construct
  source 1..120: mol_type = other DNA
tttttttttttttgagatggagtttcactctttttgcccaggctggagtgaagtggcgcgatcttggcttactgcaaactccacctcccagattcaagcaattctcctgcctcagcctcc

SEQ ID NO: 72257 - DNA, 120 bp, synthetic construct; identical to SEQ ID NO: 29988
  source 1..120: mol_type = other DNA

SEQ ID NO: 72258 - DNA, 120 bp, synthetic construct
  source 1..120: mol_type = other DNA
tttgggtaacttcaagacaaaaaaggcaaaaagtcggggagaaggtgtgggaggatgattttccccttctaaacgtaaggtataaaagggctcagaaagcggaaaaagaaccctaaaaag

SEQ ID NO: 72259 - DNA, 120 bp, synthetic construct
  source 1..120: mol_type = other DNA
taacaaacttgcacgttgtgcacatgtaccttagaacttaaagtataataataaaaaaaagtatattactaagtgaaaaaagcaaggtttggaacaccttgtataatatactacgattta

SEQ ID NO: 72260 - DNA, 120 bp, synthetic construct; identical to SEQ ID NO: 11688
  source 1..120: mol_type = other DNA

SEQ ID NO: 72261 - DNA, 120 bp, synthetic construct; identical to SEQ ID NO: 11689
  source 1..120: mol_type = other DNA

SEQ ID NO: 72262 - DNA, 120 bp, synthetic construct
  source 1..120: mol_type = other DNA
tggtctcaaactcctggccacaaacagtccttccactgcagccttccaaagtgttgagattgcaggcgtgtgccaccgtgccttgttcatttcatatatatatgatatatatatgaaata

SEQ ID NO: 72263 - DNA, 120 bp, synthetic construct
  source 1..120: mol_type = other DNA
gtagatatgtgtgtatatattatatataaatatgtgtatatatagtatatatttatatatactgcactccagcctaggcaacagagtttcttctccagcctaggcagagtttctctgcat

SEQ ID NO: 72264 - DNA, 120 bp, synthetic construct
  source 1..120: mol_type = other DNA
gataatgtatataagcaggtgagcatggcaccctgcaccctgcacctaccaagaatattatgatgactgtggttattgttattcccacctttacaccctccttctgatatctgtttactc

SEQ ID NO: 72265 - DNA, 120 bp, synthetic construct
  source 1..120: mol_type = other DNA
gcactccagcctgggtgacagaggaaaactgtctcagggaaaaaaaaaaggtaccttccattcctgccactcaggtccaaggataccaagtttctttctgaaataaaaaattaggaagcc

SEQ ID NO: 72266 - DNA, 120 bp, synthetic construct
  source 1..120: mol_type = other DNA
gtgaaaacctgtctctacgaaagatgcaaaaattagccaggtgtggccagccaggcatggtgactcacgcctgtaatcctaacactttgggaggctgaggcgggcggatcacgaggtcag

SEQ ID NO: 72267 - DNA, 120 bp, synthetic construct; identical to SEQ ID NO: 26005
  source 1..120: mol_type = other DNA

SEQ ID NO: 72268 - DNA, 120 bp, synthetic construct; identical to SEQ ID NO: 27413
  source 1..120: mol_type = other DNA

SEQ ID NO: 72269 - DNA, 120 bp, synthetic construct; identical to SEQ ID NO: 27414
  source 1..120: mol_type = other DNA

SEQ ID NO: 72270 - DNA, 120 bp, synthetic construct; identical to SEQ ID NO: 22024
  source 1..120: mol_type = other DNA

SEQ ID NO: 72271 - DNA, 120 bp, synthetic construct; identical to SEQ ID NO: 22025
  source 1..120: mol_type = other DNA

SEQ ID NO: 72272 - DNA, 120 bp, synthetic construct; identical to SEQ ID NO: 13919
  source 1..120: mol_type = other DNA

SEQ ID NO: 72273 - DNA, 120 bp, synthetic construct; identical to SEQ ID NO: 13920
  source 1..120: mol_type = other DNA

SEQ ID NO: 72274 - DNA, 120 bp, synthetic construct; identical to SEQ ID NO: 13921
  source 1..120: mol_type = other DNA

SEQ ID NO: 72275 - DNA, 120 bp, synthetic construct
  source 1..120: mol_type = other DNA
gttcttaacacttcacagacaacattctaccatacaatttacattaaaatgctaaccaaagtcatttcctacaatgggttgtttcaccaccatcaacaccaccaccaccaccaccaccac

SEQ ID NO: 72276 - DNA, 120 bp, synthetic construct; identical to SEQ ID NO: 26263
  source 1..120: mol_type = other DNA

SEQ ID NO: 72277 - DNA, 120 bp, synthetic construct; identical to SEQ ID NO: 16474
  source 1..120: mol_type = other DNA

SEQ ID NO: 72278 - DNA, 120 bp, synthetic construct
  source 1..120: mol_type = other DNA
accaaaaaaaaaacccgcatcgccaagtcaatcctaagccaaaagaacaaagctggaggcatcacgctacttgacttcaaactatactacaaggctacagtaaccaaaacagcatggtac

SEQ ID NO: 72279 - DNA, 120 bp, synthetic construct
  source 1..120: mol_type = other DNA
actacaaatcatgctgctataaagacacatgcacacgtatgtttactgtggcactattcacaatagcaaagacttggaaccaacccaaatgtccaacagtgatagactggattaagaaaa

SEQ ID NO: 72280 - DNA, 120 bp, synthetic construct; identical to SEQ ID NO: 15633
  source 1..120: mol_type = other DNA

SEQ ID NO: 72281 - DNA, 120 bp, synthetic construct; identical to SEQ ID NO: 15634
  source 1..120: mol_type = other DNA

SEQ ID NO: 72282 - DNA, 120 bp, synthetic construct; identical to SEQ ID NO: 14511
  source 1..120: mol_type = other DNA

SEQ ID NO: 72283 - DNA, 120 bp, synthetic construct; identical to SEQ ID NO: 20048
  source 1..120: mol_type = other DNA

SEQ ID NO: 72284 - DNA, 120 bp, synthetic construct; identical to SEQ ID NO: 20049
  source 1..120: mol_type = other DNA

SEQ ID NO: 72285 - DNA, 120 bp, synthetic construct; identical to SEQ ID NO: 22457
  source 1..120: mol_type = other DNA

SEQ ID NO: 72286 - DNA, 120 bp, synthetic construct
  source 1..120: mol_type = other DNA
catgtttcagagagcacagggttgggggtaaggtcacagatcaacaggatcccaaggcagaagaattattcttagtacagaacaaaatgaaaagtctcccatgtatacttctttctgcac

SEQ ID NO: 72287 - DNA, 120 bp, synthetic construct
  source 1..120: mol_type = other DNA
ggcacctcgggaggccaaggctggcggatcactcgcggttaggagctggagaccggcccggccaacacatcgaaatcccgtctccaccaaaaaaatacgaaaaccagtcaggcgtggcgg

SEQ ID NO: 72288 - DNA, 120 bp, synthetic construct
  source 1..120: mol_type = other DNA
gacatatgtagaaagctgaaactgcatcccttccttacaccttatacaaaaattaattcaagatggattaaagacttaaatgttagacctaaaaccataaaaaccctagaagaaaaccta

SEQ ID NO: 72289 - DNA, 120 bp, synthetic construct
  source 1..120: mol_type = other DNA
cagctcctaaccgtgagtgatccgccagcctcggcctcccgaggtgccgggattgcagacggagtctcgttcactcagtgctcaatggtgcccaggctggggtgcagtggcatgatctca

SEQ ID NO: 72290 - DNA, 120 bp, synthetic construct
  source 1..120: mol_type = other DNA
ggaagtgaggagcccctctgcccggccaccaccccatctgggaggtgtacccaacagctcattgagaatgggccatgatgacaatggcggttttgtggaatagtaaagggggaaaggtgg

SEQ ID NO: 72291 - DNA, 120 bp, synthetic construct
  source 1..120: mol_type = other DNA
cttttccgacgggcttaaaaaacggcgcacaagagattatatcccgcatctggctcgcacctggcttggagggtcctacgcccacggagtctcgctgattgccagcacagcagtctgaga

SEQ ID NO: 72292 - DNA, 120 bp, synthetic construct
  source 1..120: mol_type = other DNA
tgaagaatgcagaagcctcaggagccgatgcgatcaactggaagaaagggtatcagcaatgaaagatgaaatgaagcgagaagggaagtttagagaaaaaagaataaaaagaaatgagca

SEQ ID NO: 72293 - DNA, 120 bp, synthetic construct
  source 1..120: mol_type = other DNA
gtgtgctatattcagaaaacccatctcacgtgcagagacacacataggctcaaaataaaaggatggaggaagatctaccaagcaaatggaaaacaaaaaaaggcaggggttgcaatccta

SEQ ID NO: 72294 - DNA, 120 bp, synthetic construct
  source 1..120: mol_type = other DNA
ggacacaaaaaacccttcaaaaaattaatgaatccagaagctggttttctgaaaagatcaacaaaactgatagaccgctagcaagactaataaagaagaaaagagagaagaatcaaatag

SEQ ID NO: 72295 - DNA, 120 bp, synthetic construct
  source 1..120: mol_type = other DNA
agtcaaattgtccctgtttgcagacgacatgactgtatatctagaaaatcccattgtctcagcccaaaatctccttaagctgataagcaacttcagcaaagtctcaggatacaaaatcaa

SEQ ID NO: 72296 - DNA, 120 bp, synthetic construct
  source 1..120: mol_type = other DNA
taggcattaccattcaggacataggcatgggcaagcacttcctgtctaaaacaccaaaagcaatggcaacaaaagccaaaattgacaaatgggatctaattaaaccaaagagcttctgca

SEQ ID NO: 72297 - DNA, 120 bp, synthetic construct
  source 1..120: mol_type = other DNA
aagtataataagaaaaaaaaaatacaaaaaaagtgctttgtaaactacaaagcagtgcagtggcgctatcttggctcactgcaacctccacttcctgggtttaagcgatgctcctgcctt

SEQ ID NO: 72298 - DNA, 120 bp, synthetic construct; identical to SEQ ID NO: 16449
  source 1..120: mol_type = other DNA

SEQ ID NO: 72299 - DNA, 120 bp, synthetic construct
  source 1..120: mol_type = other DNA
gttatttcttaccttctgctagcttttgaatgtgtttgctcttgcttttctagttcttttaattgtgatgttagggtgtcaattttggatctttcctgctttctcttgtgggcatttagt

SEQ ID NO: 72300 - DNA, 120 bp, synthetic construct
  source 1..120: mol_type = other DNA
cctgtctaaaacaccaaaagcaatggcaacaaaagccaaaattgacaaatgggatctaattaaaccaaagagcttctgcacagcaaaagaaactaccatcagagtgaacaggcaacctac

SEQ ID NO: 72301 - DNA, 120 bp, synthetic construct; identical to SEQ ID NO: 16450
  source 1..120: mol_type = other DNA

SEQ ID NO: 72302 - DNA, 120 bp, synthetic construct
  source 1..120: mol_type = other DNA
cctcccaagtagctgggactacaggcatgcgccaccacacccggttaatttttgtatttttatattaagttttagggtacatgtgcacaacgtgcaggtttgttacatatgtatacatgt

SEQ ID NO: 72303 - DNA, 120 bp, synthetic construct
  source 1..120: mol_type = other DNA
tagtaatgggagactttaacaccccactgtcaacattagacagatcagcgagacagaaagtcaaaaggatacccaggaattgaactcagctctgcaccaagcggacctaatagacagcta

SEQ ID NO: 72304 - DNA, 120 bp, synthetic construct
  source 1..120: mol_type = other DNA
cagccaaattctacctgaggtacaaggaggagctggtaccactccttatgaaactactccaatcaacacaaaaagagggaatcctccctaactcattttatgaggccagcatcatcctga

SEQ ID NO: 72305 - DNA, 120 bp, synthetic construct
  source 1..120: mol_type = other DNA
aagctaccaatgactttcttcacagaattggaaaaaactactttaaagtgcatatggaaccaaaaaagagcccgcatcgccaagtcaatcctaagccaaaagaagaaaggtggaggcatc

SEQ ID NO: 72306 - DNA, 120 bp, synthetic construct
  source 1..120: mol_type = other DNA
aactagaaataccatttgacccagccatcccattactggctatatacccaaaggattataaataatgctgctatagacacatgcacacgtatgtttactgcggcactattcagaatagca

SEQ ID NO: 72307 - DNA, 120 bp, synthetic construct
  source 1..120: mol_type = other DNA
gataaaattcacacataacaatactaaccttaaatgtaaatgggctcaatgctccaattaaaaggcacggactggcaaattggataaagattcaagacccatcagtttgctgtattcagg

SEQ ID NO: 72308 - DNA, 120 bp, synthetic construct
  source 1..120: mol_type = other DNA
gagtagaccaataacaggctctgaaattgaggcaataattaacagcttaccaaccaaaaaaagtccaggaccagatggattcacagccaaattctaccagaggtacaaggaggagctggt

SEQ ID NO: 72309 - DNA, 120 bp, synthetic construct; identical to SEQ ID NO: 26561
  source 1..120: mol_type = other DNA

SEQ ID NO: 72310 - DNA, 120 bp, synthetic construct; identical to SEQ ID NO: 26562
  source 1..120: mol_type = other DNA

SEQ ID NO: 72311 - DNA, 120 bp, synthetic construct
  source 1..120: mol_type = other DNA
cctgcagctgagggacccaactattagaaggaaaactaacaaacagaaaggaatagcatccacatcaacaaaaaggacatctacaccaaaaccccatctgtaggtcaccaacatcaaaga

SEQ ID NO: 72312 - DNA, 120 bp, synthetic construct
  source 1..120: mol_type = other DNA
gaagttgaatctataatgagaaatcttcccacgaaacaaccctagatgctgtactagtggattatcctaaacatttaaagaagcaataatacagatcttatgttctaccagagaatagaa

SEQ ID NO: 72313 - DNA, 120 bp, synthetic construct
  source 1..120: mol_type = other DNA
atccagccaaactaagcttcataagcgaaggagaaataaaatactttacagacaagcaaatgctgagagattttgtcaccaccaggcctgccctaaaagagctcctgaaggaagcactaa

SEQ ID NO: 72314 - DNA, 120 bp, synthetic construct
  source 1..120: mol_type = other DNA
atagtctttaacaaattgtgccagatcaactggccatccatatgagaaaaagaaaacaaaaacctctgacctttatctcacaccttacacaaacattaacttgggatgaatcattgacct

SEQ ID NO: 72315 - DNA, 120 bp, synthetic construct; identical to SEQ ID NO: 15415
  source 1..120: mol_type = other DNA

SEQ ID NO: 72316 - DNA, 120 bp, synthetic construct; identical to SEQ ID NO: 18282
  source 1..120: mol_type = other DNA

SEQ ID NO: 72317 - DNA, 120 bp, synthetic construct; identical to SEQ ID NO: 18283
  source 1..120: mol_type = other DNA

SEQ ID NO: 72318 - DNA, 120 bp, synthetic construct
  source 1..120: mol_type = other DNA
gcagaggttgcagtgagccaagattgtgcccctgcactccagcctgggcaacagaatggaactctgtctcaaaaaaatatatatattatagatttataatatatattagattatacatta

SEQ ID NO: 72319 - DNA, 120 bp, synthetic construct
  source 1..120: mol_type = other DNA
tttggctgaaaaggctcatctgtatttttcctaaatatttgccttaatctagatcactcttgctaataacaggtactgtaagaattacatcgccgggcgcggtggctcacgcctgtaatc

SEQ ID NO: 72320 - DNA, 120 bp, synthetic construct; identical to SEQ ID NO: 21800
  source 1..120: mol_type = other DNA

SEQ ID NO: 72321 - DNA, 120 bp, synthetic construct
  source 1..120: mol_type = other DNA
gttttgtttgttttgttttgttttgagagagagtcttgctgtcacccaggctggagtgcagtggcgggctcttggcttactgcaacctctgcctctcaggttcaagtgattctgctgtct

SEQ ID NO: 72322 - DNA, 120 bp, synthetic construct
  source 1..120: mol_type = other DNA
cattcaagaatccttagccaagctgtctaaaagcaaggccttctgcctttttagtaaaagaatctactttagtactagtaccaaaacagagatatagatcaatggaacagaacagagccc

SEQ ID NO: 72323 - DNA, 120 bp, synthetic construct
  source 1..120: mol_type = other DNA
caatgatagactggattaagaaaatgtggcacatatacaccatggaatactatgcagccataaaaaatgatgagttcatgtcctttgtagggacatggatgaaattggaaatcattctca

SEQ ID NO: 72324 - DNA, 120 bp, synthetic construct
  source 1..120: mol_type = other DNA
aagacctttatgcactgaacttggcaattttgtcatgtcctttgtagggacgtggatggaactggaagccattatcctcagcaaactaacataggaacagaaaaaccaaacactgcatgt

SEQ ID NO: 72325 - DNA, 120 bp, synthetic construct; identical to SEQ ID NO: 10095
  source 1..120: mol_type = other DNA

SEQ ID NO: 72326 - DNA, 120 bp, synthetic construct
  source 1..120: mol_type = other DNA
tccagcacctgttgtttcctgacttgttaatgatcgccattctaactattgtgagatggtatctcattgtggttttgatttgcatttctctgatggccagtgatgatgagcattttttca

SEQ ID NO: 72327 - DNA, 120 bp, synthetic construct
  source 1..120: mol_type = other DNA
atgggagttcactcatgatttggctctctgtttgtctgttattggtgtataagaatgcttgtgatttttgtacattgattttgtgtcctgagactttgctgaagttgcttatcagcttga

SEQ ID NO: 72328 - DNA, 120 bp, synthetic construct
  source 1..120: mol_type = other DNA
cctgttattggtctattcagagattcaacttctttctggtttagtcttgggatgatgtatgtgttgaggaatttatccatttcttctagattgtctagtttatttgcatagagttgttta

SEQ ID NO: 72329 - DNA, 120 bp, synthetic construct
  source 1..120: mol_type = other DNA
ctgtctaatgttgacaggggggtgttaaagtctcccattattattgtgtgggagtctaagtctctttgtaggtcactaaggacttgctttatgaatctgggtgcttctgtattgggtgca

SEQ ID NO: 72330 - DNA, 120 bp, synthetic construct
  source 1..120: mol_type = other DNA
gagtatctttgtggtgttctctgtatttcctgaatttgaatgttggcctgccttgatagattggggaagttctcctgggtaatatcctgcagagtgttttccaacttggttctattctcc

SEQ ID NO: 72331 - DNA, 120 bp, synthetic construct; identical to SEQ ID NO: 10096
  source 1..120: mol_type = other DNA

SEQ ID NO: 72332 - DNA, 120 bp, synthetic construct; identical to SEQ ID NO: 24195
  source 1..120: mol_type = other DNA

SEQ ID NO: 72333 - DNA, 120 bp, synthetic construct
  source 1..120: mol_type = other DNA
cctctccagcacctgttgtttcctgactttttaatgatcaccattctaactggtgtgagatggtatctcattgtggttttgatttgcatttctctgatggccactgatgatgagcatttc

SEQ ID NO: 72334 - DNA, 120 bp, synthetic construct
  source 1..120: mol_type = other DNA
agtatggccattttcacgatattgattcttcctacccatgagcatggaatgttcttccatttgtttgtatcctcttttatttcattgagcagtggtttgtagttctccttgaggaggtcc

SEQ ID NO: 72335 - DNA, 120 bp, synthetic construct
  source 1..120: mol_type = other DNA
tttttctgttgattggaatagtttcagaaggaatagtcccagctcctccttgtacctctggtagaattcggctgtgaatccatctggtcctggatgttgtttggttggtaagctattaat

SEQ ID NO: 72336 - DNA, 120 bp, synthetic construct
  source 1..120: mol_type = other DNA
acatttgctgaggagagctttacttccaactatgtggtcagttttggaacaggtgtggtgtggtgctgaaaagaatgtatattctgttgatttggggtggagagttctgtagatgtctat

SEQ ID NO: 72337 - DNA, 120 bp, synthetic construct
  source 1..120: mol_type = other DNA
tggcccccactcccatctggcttgtagggtttctgctgagagatccactgttagtctgatgggcttccctttgtgggtaacccgacctttctctctggctgcccttaacattttttcctt

SEQ ID NO: 72338 - DNA, 120 bp, synthetic construct
  source 1..120: mol_type = other DNA
gctgagaatgatggtttccagtttcatccatgtccctacaaaggacacgaagtcatcattttttatggctgcatagtattccatggtgtatatgtgccacattttcttaatccagtctat

SEQ ID NO: 72339 - DNA, 120 bp, synthetic construct
  source 1..120: mol_type = other DNA
ctagccagttttcccagcaccatttattaaatagggaatcctttccccattgcttgtttttgtcaggtttgtcaaagatcagatagttgtagatatgcggcgttatttctgagggctctg

SEQ ID NO: 72340 - DNA, 120 bp, synthetic construct; identical to SEQ ID NO: 24196
  source 1..120: mol_type = other DNA

SEQ ID NO: 72341 - DNA, 120 bp, synthetic construct; identical to SEQ ID NO: 24197
  source 1..120: mol_type = other DNA

SEQ ID NO: 72342 - DNA, 120 bp, synthetic construct
  source 1..120: mol_type = other DNA
aatgaataatattaaacaaaccatagagttaacatccagatcaagaaataaatcactgctagcatccccagaaccccctccctgtttacctttccccatcacagctccatcctgtcccca

SEQ ID NO: 72343 - DNA, 120 bp, synthetic construct; identical to SEQ ID NO: 17365
  source 1..120: mol_type = other DNA

SEQ ID NO: 72344 - DNA, 120 bp, synthetic construct
  source 1..120: mol_type = other DNA
cacatcccttgtaagttggattcctatatattttgttctctttgaagcaattgtgaatggaagtgcactcatgatttggctctctgtttgtctgttactggtgtgtaagaatgcttgtga

SEQ ID NO: 72345 - DNA, 120 bp, synthetic construct
  source 1..120: mol_type = other DNA
tggttggtaagctattagttattgcctcaatttcagagtctgttattggtctattcagagattcagcttcttcctggtttagtcttgggagagtgtatgtgtcgaggaatttatccattt

SEQ ID NO: 72346 - DNA, 120 bp, synthetic construct
  source 1..120: mol_type = other DNA
ttcttcttgttgaattgatccctttaccattatgtaatggccttctttgtctcttttgatctttgttggtttaaagactgttttacccgagactaggattgcaacccctgcctttttttg

SEQ ID NO: 72347 - DNA, 120 bp, synthetic construct; identical to SEQ ID NO: 16430
  source 1..120: mol_type = other DNA

SEQ ID NO: 72348 - DNA, 120 bp, synthetic construct; identical to SEQ ID NO: 21863
  source 1..120: mol_type = other DNA

SEQ ID NO: 72349 - DNA, 120 bp, synthetic construct
  source 1..120: mol_type = other DNA
gacttcgtgatctgcctgcctcaacctcccaaagtgctgggattacaggcatgagccaccacacccggccatcaggttgattcttaactatacataaataaaaatgattatttttactaa

SEQ ID NO: 72350 - DNA, 120 bp, synthetic construct
  source 1..120: mol_type = other DNA
gttgcagtgagccgagatcacaccactgcactctagcctgggcgacagagtgaaagtgtgtctcaaaaaaaaaaaaaaaaagaatattatataaacgtagttgataaatcagcatagaat

SEQ ID NO: 72351 - DNA, 120 bp, synthetic construct
  source 1..120: mol_type = other DNA
acctttcccccctttcgattccacaaaaccgccattgtcatcatggcccgttctcaatgagctgttgggtacacctcccagacggggtggtggccgggcagaggggctcctcacttccca

SEQ ID NO: 72352 - DNA, 120 bp, synthetic construct; identical to SEQ ID NO: 10204
  source 1..120: mol_type = other DNA

SEQ ID NO: 72353 - DNA, 120 bp, synthetic construct; identical to SEQ ID NO: 10205
  source 1..120: mol_type = other DNA

SEQ ID NO: 72354 - DNA, 120 bp, synthetic construct; identical to SEQ ID NO: 10206
  source 1..120: mol_type = other DNA

SEQ ID NO: 72355 - DNA, 120 bp, synthetic construct; identical to SEQ ID NO: 23305
  source 1..120: mol_type = other DNA

SEQ ID NO: 72356 - DNA, 120 bp, synthetic construct; identical to SEQ ID NO: 23306
  source 1..120: mol_type = other DNA

SEQ ID NO: 72357 - DNA, 120 bp, synthetic construct; identical to SEQ ID NO: 23307
  source 1..120: mol_type = other DNA

SEQ ID NO: 72358 - DNA, 120 bp, synthetic construct; identical to SEQ ID NO: 23308
  source 1..120: mol_type = other DNA

SEQ ID NO: 72359 - DNA, 120 bp, synthetic construct; identical to SEQ ID NO: 18221
  source 1..120: mol_type = other DNA

SEQ ID NO: 72360 - DNA, 120 bp, synthetic construct; identical to SEQ ID NO: 18222
  source 1..120: mol_type = other DNA

SEQ ID NO: 72361 - DNA, 120 bp, synthetic construct; identical to SEQ ID NO: 7673
  source 1..120: mol_type = other DNA

SEQ ID NO: 72362 - DNA, 120 bp, synthetic construct
  source 1..120: mol_type = other DNA
accgccccgtctgagaagtgaggagcccctctgtccggcagccaccccgtctgggaagtgaggagcgtctccgcccggcagccaccccgtccgggagggaggtggcggggggtcagcccc

SEQ ID NO: 72363 - DNA, 120 bp, synthetic construct; identical to SEQ ID NO: 7674
  source 1..120: mol_type = other DNA

SEQ ID NO: 72364 - DNA, 120 bp, synthetic construct
  source 1..120: mol_type = other DNA
ccatgtccctacaaaggacatgaactcatcattttttatggctgcatagtattccatggtgcatatgtgacacattttcttaatccagtctatcgttgttggacatttggcttggttcca

SEQ ID NO: 72365 - DNA, 120 bp, synthetic construct
  source 1..120: mol_type = other DNA
tatggctagccagttttcccagcaccatttattaaatagggaatcgtttccccatttctcgtttttgtcaggtttgtcaaagatcagatggttgtagatatgcagcattatttctgaggg

SEQ ID NO: 72366 - DNA, 120 bp, synthetic construct
  source 1..120: mol_type = other DNA
gttgaataggagtggtgagagagggcatccttgccttgtgccagttttcaaagggaatgttcacagtttttgcccattcagtgtgatattggctgtgggtttgtcatagatagctcttat

SEQ ID NO: 72367 - DNA, 120 bp, synthetic construct
  source 1..120: mol_type = other DNA
ttttaattgtgatgttagggggtgtcaattttagatctttcctgctttctcttgtgggcatttagtgctataaatttccctctacacactgctttgaatgtgtcccagagattctggtat

SEQ ID NO: 72368 - DNA, 120 bp, synthetic construct; identical to SEQ ID NO: 24634
  source 1..120: mol_type = other DNA

SEQ ID NO: 72369 - DNA, 120 bp, synthetic construct; identical to SEQ ID NO: 24635
  source 1..120: mol_type = other DNA

SEQ ID NO: 72370 - DNA, 120 bp, synthetic construct; identical to SEQ ID NO: 24636
  source 1..120: mol_type = other DNA

SEQ ID NO: 72371 - DNA, 120 bp, synthetic construct
  source 1..120: mol_type = other DNA
cttttccaatgggcttaaaaaatggcacaccagattatatcctgcacttggctcagagggtcctacgcccacggagtctcgctgattgctagcacagccgccttgtacactgctaggcgg

SEQ ID NO: 72372 - DNA, 120 bp, synthetic construct
  source 1..120: mol_type = other DNA
ctggagggagaatgactttgatgaattgagagaagaaggctccagacgatcaaactactccgagctacaggaggaaattcaaatcaatggcaaagaagttaaaaactgtgaaaaaaaatt

SEQ ID NO: 72373 - DNA, 120 bp, synthetic construct
  source 1..120: mol_type = other DNA
tgggctaaatgctccaattaaaagacacagactggcaaattggatgaagactcaagacccatcagtgtgctgtattcaggaaacccatctcacgggcagagacacacataggctcaaaat

SEQ ID NO: 72374 - DNA, 120 bp, synthetic construct
  source 1..120: mol_type = other DNA
aatgaatccaggagctggttttttgaaaagatcaacaaaatcaatagaccgctagcaagactaataaagaagaaaagagagaagaatcagatagatgcaataaaacatgataaaggggct

SEQ ID NO: 72375 - DNA, 120 bp, synthetic construct
  source 1..120: mol_type = other DNA
gcgtcaccaagtcaatcctaagccaaaagaacaaagctagaggcatcatgctacctgacttcaaactatactacaaggctacagtaaccaaaacagcatggtactggtaccaaaacagag

SEQ ID NO: 72376 - DNA, 120 bp, synthetic construct
  source 1..120: mol_type = other DNA
gcgattcctcagggatctagaactagaaatactatttgacccagccatcccattactggatatatacccaaaggattagaaaccatgttgctataaagacacatgcacacgtatgtttat

SEQ ID NO: 72377 - DNA, 120 bp, synthetic construct; identical to SEQ ID NO: 21733
  source 1..120: mol_type = other DNA

SEQ ID NO: 72378 - DNA, 120 bp, synthetic construct
  source 1..120: mol_type = other DNA
tgaacatcggtgcaaaaatcctcaataaaatactggcaaaccgaatccagctgcacatcaaaaagcttacccaccatgatcaagtgggcttcatccctgggatgcaaggctgattcaaca

SEQ ID NO: 72379 - DNA, 120 bp, synthetic construct
  source 1..120: mol_type = other DNA
caagctaccaatgactttcttcacagaactggaaaaaactactttatagttcatatggaaccaaaaaagagcccacattgccaagtcaatcctaagccaaaagaacaaagctggaggcat

SEQ ID NO: 72380 - DNA, 120 bp, synthetic construct
  source 1..120: mol_type = other DNA
gcaattcctcagggatctagaactagaaataccatttgacccagccatcccattactgggtatatacccaaaggattagaaaccatgctgctataaagacacatgcacacgtatgtttat

SEQ ID NO: 72381 - DNA, 120 bp, synthetic construct
  source 1..120: mol_type = other DNA
caaaacgctgggattgcaggcgtgagccatcacacctggccaactcatcaattcttagctagaggcatcacgctaccggacttcaaactatactacaaggctacagtaaccaaaacagca

SEQ ID NO: 72382 - DNA, 120 bp, synthetic construct
  source 1..120: mol_type = other DNA
taaatcatgctgctataaagacacatgcacacatatgtttattgcggcactattcacaatagcaaagacttggaaccaccccaaatgtccaacaatgatagacttgattaagaaaatgtg

SEQ ID NO: 72383 - DNA, 120 bp, synthetic construct
  source 1..120: mol_type = other DNA
tcatcatttttatggctgcatagtattccatggtgtatatgtgccacatttttttaattcagtctataattgttggacatttgggttggttccaagtctttgctattgtcagtagtgccg

SEQ ID NO: 72384 - DNA, 120 bp, synthetic construct
  source 1..120: mol_type = other DNA
gtttcagctttctacatatggctagccagttttcccagcaccatttattaaatagggaatcttttccccatttcttctttttgtcaggtatgtcaaagatcagatggttgtagatatgcg

SEQ ID NO: 72385 - DNA, 120 bp, synthetic construct
  source 1..120: mol_type = other DNA
agatgcagaaaaggcctttgacaaaattcaacaacccttcatgctaaaaactctcaataaattaggtattgatgggacgtatctcaaaataataagagctatctatgacaaacccacagc

SEQ ID NO: 72386 - DNA, 120 bp, synthetic construct
  source 1..120: mol_type = other DNA
tatttctagttctagatccctgaggaattgtcacaccgacttccacaaaggttgaactagtttacagtcccaccaacagtgtaaaagtgttcctatttctccatatcatctccagcacct

SEQ ID NO: 72387 - DNA, 120 bp, synthetic construct
  source 1..120: mol_type = other DNA
tttccaattctgtgaagaaagtcattggtagattgatggcgatggcattgaatctgtaaagtaccttgggcagtatggccattttcacgatattgattcttcctatccatgagcatggaa

SEQ ID NO: 72388 - DNA, 120 bp, synthetic construct
  source 1..120: mol_type = other DNA
ggtttcggtttgccagtatttgattgaggatttttgcattgatgttcatcagggatattggtctaaaattctctttttttgttgtgtctctgccaggctttggtatcaggatgatgctga

SEQ ID NO: 72389 - DNA, 120 bp, synthetic construct
  source 1..120: mol_type = other DNA
acatttgctgaggagtgctttacttccaagtatgtggtcaattttggaataggtgtggtctggaatgcacacacatcttaatttaaaaaacagctgagatccctgaatgaggggctatta

SEQ ID NO: 72390 - DNA, 120 bp, synthetic construct
  source 1..120: mol_type = other DNA
tgcctgttcactctgatgttagtgtcttttgctgtgcagaagctctgtagtttaattagatgccatttgtcagttttggcttttgttgccattgcttttggtgttttagacatgaagtcc

SEQ ID NO: 72391 - DNA, 120 bp, synthetic construct; identical to SEQ ID NO: 13896
  source 1..120: mol_type = other DNA

SEQ ID NO: 72392 - DNA, 120 bp, synthetic construct
  source 1..120: mol_type = other DNA
cacacacccagggctaggagacctcaggtttatacgtctctttcttttctctttcttggggactggttctaccgaaacatatatacatatatgatatatacacacacgtgtatatatctc

SEQ ID NO: 72393 - DNA, 120 bp, synthetic construct; identical to SEQ ID NO: 10053
  source 1..120: mol_type = other DNA

SEQ ID NO: 72394 - DNA, 120 bp, synthetic construct; identical to SEQ ID NO: 10054
  source 1..120: mol_type = other DNA

SEQ ID NO: 72395 - DNA, 120 bp, synthetic construct
  source 1..120: mol_type = other DNA
gccaggagttcaaggctgcagtgatctgtgattgcaccactgcagtctaccctgggctacagagtgagatcctatctcattaaaaaaaaaaaaaaaaagaagaagaagaagaagaagaag

SEQ ID NO: 72396 - DNA, 120 bp, synthetic construct; identical to SEQ ID NO: 10048
  source 1..120: mol_type = other DNA

SEQ ID NO: 72397 - DNA, 120 bp, synthetic construct; identical to SEQ ID NO: 10049
  source 1..120: mol_type = other DNA

SEQ ID NO: 72398 - DNA, 120 bp, synthetic construct; identical to SEQ ID NO: 10050
  source 1..120: mol_type = other DNA

SEQ ID NO: 72399 - DNA, 120 bp, synthetic construct; identical to SEQ ID NO: 10051
  source 1..120: mol_type = other DNA

SEQ ID NO: 72400 - DNA, 120 bp, synthetic construct; identical to SEQ ID NO: 10052
  source 1..120: mol_type = other DNA

SEQ ID NO: 72401 - DNA, 120 bp, synthetic construct; identical to SEQ ID NO: 33994
  source 1..120: mol_type = other DNA

SEQ ID NO: 72402 - DNA, 120 bp, synthetic construct
  source 1..120: mol_type = other DNA
tggtatttctagttctagatccctgaggaatcgccacactgacttccacaatggttgaactagtttccagtcccaccaacagtgtaaaagtgtccctatttctccacatcctctccagca

SEQ ID NO: 72403 - DNA, 120 bp, synthetic construct
  source 1..120: mol_type = other DNA
ccaggccagactgcggactgcagtggtgcaatctcggctcactgcaagctccgcttcctgggttcacgaagcggcgttatttctgagggctctgttctgttccattgatctatatctctg

SEQ ID NO: 72404 - DNA, 120 bp, synthetic construct
  source 1..120: mol_type = other DNA
tgctggattacatttattgatttgcgtatattgaaccagccttgcatcccagggatgaagcccacttgatcatggtgtataagctttttgatgtgctgctggatttggtttgccagtatt

SEQ ID NO: 72405 - DNA, 120 bp, synthetic construct
  source 1..120: mol_type = other DNA
gctttgagtgagattcttaatcctgagttctagtttgattgcactgtggtctgatagatagtttgttataatttctgttcttttacatttgctgaggagagctttacttccaactatgtg

SEQ ID NO: 72406 - DNA, 120 bp, synthetic construct
  source 1..120: mol_type = other DNA
ctgtaaagtattttatatgaagcttagtttggctggatatgaaattctgggttgaaaattcttttctttaagaatgttgaatattggcccccactctcttctggcttgtagggtttctgc

SEQ ID NO: 72407 - DNA, 120 bp, synthetic construct
  source 1..120: mol_type = other DNA
gacaggaccctcagctgcaggtctgttggaatgccctgccgtgtgaggtgtcagtgtgcccctgctggggggtgcctcccagttaggctgctcgggggtcaggggtcagggacccacttg

SEQ ID NO: 72408 - DNA, 120 bp, synthetic construct; identical to SEQ ID NO: 33995
  source 1..120: mol_type = other DNA

SEQ ID NO: 72409 - DNA, 120 bp, synthetic construct
  source 1..120: mol_type = other DNA
gagacagacagacagacacacagacaaggtctaggtctcctctcattcccccactgctgtgggaaacagcagcctagcaaggttgtcctctgggtcggatttcatatttcttcttccctc

SEQ ID NO: 72410 - DNA, 120 bp, synthetic construct
  source 1..120: mol_type = other DNA
cgtccattttacagatgggaaaagtgaagtcgagcaatggagtgactggctttgatcgtcccacattaggggagtgtcagcactgggatttggatccagtctgtgtgtctgtctgtgtct

SEQ ID NO: 72411 - DNA, 120 bp, synthetic construct; identical to SEQ ID NO: 27138
  source 1..120: mol_type = other DNA

SEQ ID NO: 72412 - DNA, 120 bp, synthetic construct
  source 1..120: mol_type = other DNA
tcccctctatgtgaccatgtgttctttgcatttggctctcacttaagtgagaacatacggtatttggttttctgttgctgtgttagtttgtaaggataatggcctccagctttatccatg

SEQ ID NO: 72413 - DNA, 120 bp, synthetic construct; identical to SEQ ID NO: 22063
  source 1..120: mol_type = other DNA

SEQ ID NO: 72414 - DNA, 120 bp, synthetic construct; identical to SEQ ID NO: 14616
  source 1..120: mol_type = other DNA

SEQ ID NO: 72415 - DNA, 120 bp, synthetic construct; identical to SEQ ID NO: 14617
  source 1..120: mol_type = other DNA

SEQ ID NO: 72416 - DNA, 120 bp, synthetic construct; identical to SEQ ID NO: 14618
  source 1..120: mol_type = other DNA

SEQ ID NO: 72417 - DNA, 120 bp, synthetic construct; identical to SEQ ID NO: 14619
  source 1..120: mol_type = other DNA

SEQ ID NO: 72418 - DNA, 120 bp, synthetic construct; identical to SEQ ID NO: 24056
  source 1..120: mol_type = other DNA

SEQ ID NO: 72419 - DNA, 120 bp, synthetic construct; identical to SEQ ID NO: 24057
  source 1..120: mol_type = other DNA

SEQ ID NO: 72420 - DNA, 120 bp, synthetic construct; identical to SEQ ID NO: 24058
  source 1..120: mol_type = other DNA

SEQ ID NO: 72421 - DNA, 120 bp, synthetic construct; identical to SEQ ID NO: 12769
  source 1..120: mol_type = other DNA

SEQ ID NO: 72422 - DNA, 120 bp, synthetic construct
  source 1..120: mol_type = other DNA
gagcgtctctgcctggccccccatcgtctgggatacggggagcctctctgcctggctgcccagtctggaaggtgaggagcgtctctgcccggccgccatcccatctaggaagcgaggagc

SEQ ID NO: 72423 - DNA, 120 bp, synthetic construct
  source 1..120: mol_type = other DNA
gcctctgcccggccgcccctactgggaagtgaggagcccctctgcccggccaggaccccgtctgggaggtgtgcccagcggctcattggggatgggccatgatgacaatggcggttttgt

SEQ ID NO: 72424 - DNA, 120 bp, synthetic construct; identical to SEQ ID NO: 12770
  source 1..120: mol_type = other DNA

SEQ ID NO: 72425 - DNA, 120 bp, synthetic construct; identical to SEQ ID NO: 12771
  source 1..120: mol_type = other DNA

SEQ ID NO: 72426 - DNA, 120 bp, synthetic construct; identical to SEQ ID NO: 12759
  source 1..120: mol_type = other DNA

SEQ ID NO: 72427 - DNA, 120 bp, synthetic construct; identical to SEQ ID NO: 12760
  source 1..120: mol_type = other DNA

SEQ ID NO: 72428 - DNA, 120 bp, synthetic construct
  source 1..120: mol_type = other DNA
gctgggattacaggcatgagccaccgtgcccacaaagccttctatgtcttacctttactcctatgatattcaattgttttaggcaccattttaagtcaataagatataacccaccctcaa

SEQ ID NO: 72429 - DNA, 120 bp, synthetic construct
  source 1..120: mol_type = other DNA
caccaccacgcctggctaattttttttgtttgttttgttttgttttttgtatttttagtacagactggatttcaccatgttggccagagctggtctcgaactcctgacctcaggcaatct

SEQ ID NO: 72430 - DNA, 120 bp, synthetic construct
  source 1..120: mol_type = other DNA
caagaccagcctgagcaacatggaaaaattccatctctacaaaaaaaaaagaaaaagaaaaaagctgggtgtggtggtgtggtgtcatgagcatgtaatcccatctacttaggaggctga

SEQ ID NO: 72431 - DNA, 120 bp, synthetic construct; identical to SEQ ID NO: 12762
  source 1..120: mol_type = other DNA

SEQ ID NO: 72432 - DNA, 120 bp, synthetic construct; identical to SEQ ID NO: 12763
  source 1..120: mol_type = other DNA

SEQ ID NO: 72433 - DNA, 120 bp, synthetic construct; identical to SEQ ID NO: 12764
  source 1..120: mol_type = other DNA

SEQ ID NO: 72434 - DNA, 120 bp, synthetic construct; identical to SEQ ID NO: 12765
  source 1..120: mol_type = other DNA

SEQ ID NO: 72435 - DNA, 120 bp, synthetic construct; identical to SEQ ID NO: 12766
  source 1..120: mol_type = other DNA

SEQ ID NO: 72436 - DNA, 120 bp, synthetic construct
  source 1..120: mol_type = other DNA
ctcactcaggaagcgcaaggggtcagggagttccctttcctagtcaaagaaagaggtgaaagatagcacctggaaaatcgggtcactcccacccgagtactgcgcttttccgacgggctt

SEQ ID NO: 72437 - DNA, 120 bp, synthetic construct
  source 1..120: mol_type = other DNA
agacgaatgtataactagaataaccaatacagagaagtgcttaaaggagcgatggagctgaaagccaaggctcgagaactacctgaagaatgcagaagcctcaggagccaatgcgatcaa

SEQ ID NO: 72438 - DNA, 120 bp, synthetic construct
  source 1..120: mol_type = other DNA
aaataactagctaacatcataatgacaggatcaaattcacacataacaatattaactttaaatgtaaatggactaaatgctccaattaaaagacacagactggcaaattggataaagagt

SEQ ID NO: 72439 - DNA, 120 bp, synthetic construct
  source 1..120: mol_type = other DNA
aactaaaatcagagcagaactgaaggaaatagacacaaaaaacccttcaaaaaaatcaatgaatccaggagctggttttttgaaaggatcaacaaaattgatagactgctagcaagacta

SEQ ID NO: 72440 - DNA, 120 bp, synthetic construct
  source 1..120: mol_type = other DNA
ccagggcaattaggcaggagaagaaaataaagggtattcaattaggaaaagaggaagtcaaattgtccctgtttgcagatgacatgattgtatatctagaaaaccccattgtctcagccc

SEQ ID NO: 72441 - DNA, 120 bp, synthetic construct
  source 1..120: mol_type = other DNA
aggacataggcatgggcaaggacttcatgtctaaaacaccaaaagcaatggcaacaaaagccaaaactgacaaatgggatctaattcaactaaagagcttctgcacaacaaaagaaacta

SEQ ID NO: 72442 - DNA, 120 bp, synthetic construct; identical to SEQ ID NO: 12767
  source 1..120: mol_type = other DNA

SEQ ID NO: 72443 - DNA, 120 bp, synthetic construct
  source 1..120: mol_type = other DNA
tcttacctaatccttgcctatctactgcttttaacatgtgctttttccccatagctgaactaagcttatggatacctaatgtagatgacaggttgatgtgtgcagcaaaccagcatggca

SEQ ID NO: 72444 - DNA, 120 bp, synthetic construct
  source 1..120: mol_type = other DNA
ctcggtctcccaaagtgttaggattacaggcgtgagccaccacacctggccgaaaatgtactcttattcctttttttcctttttataaaagtaagacaaatacatgatctaggatccccc

SEQ ID NO: 72445 - DNA, 120 bp, synthetic construct; identical to SEQ ID NO: 28994
  source 1..120: mol_type = other DNA

SEQ ID NO: 72446 - DNA, 120 bp, synthetic construct
  source 1..120: mol_type = other DNA
tgatgagcattttttcatgtgttttttggctgtataaatgtcttcttttgagaagtgtctgttcatgtccttcacccactttttgatggggttgtctgtttttttcttgtaaatttgttt

SEQ ID NO: 72447 - DNA, 120 bp, synthetic construct
  source 1..120: mol_type = other DNA
ttacagattcaatgccatccccatcaagctaccaatgcctttcttcacagaattggaaaaaactactttaaagttcatatggaaccaaaaaagagcccgcgtcaccaaggcaatcctaag

SEQ ID NO: 72448 - DNA, 120 bp, synthetic construct
  source 1..120: mol_type = other DNA
ggtcctacgcccacggagtctcgctgattgctagcacagcagtctgagatcaaactgcaaggtggcagcgaggctgggggaggggtgcccgccattacccaggcttgattaggtaaacaa

SEQ ID NO: 72449 - DNA, 120 bp, synthetic construct
  source 1..120: mol_type = other DNA
gaagacatcagacgatcaaactacaagctacaggaggaaattcaaaccaaaggcaaagaagttaaaaactttgaaaaaaatttagacgaatgtataactagaataaccaatacagagaag

SEQ ID NO: 72450 - DNA, 120 bp, synthetic construct
  source 1..120: mol_type = other DNA
atggaaaggaacaactggtaccagacactgcaaaatcatgccaaaatgtaaagaccatcgagactagcaataaactgcatcaactaacgagcaaaataaccagctaacatcataatgaca

SEQ ID NO: 72451 - DNA, 120 bp, synthetic construct
  source 1..120: mol_type = other DNA
gagggaaatttatagcactaaatgcccacaagagaaagcaggaaagatccaaaattgacaccctaacatcacaattaaaagaactagaaaatcaagagcaaacacattcaaaagctaaca

SEQ ID NO: 72452 - DNA, 120 bp, synthetic construct
  source 1..120: mol_type = other DNA
gacaaaaatgacacgattatctcaatagatgcagaaaaggcctttgacaaaattcaacaacccttcatactaaaaactctcaataaattaggtattgatgggacgtatctcaaaataata

SEQ ID NO: 72453 - DNA, 120 bp, synthetic construct
  source 1..120: mol_type = other DNA
tccttacaccttatacaaagatcaattcaagatggattaaagacttaaacgttagacctaaaaccataaaaaccctagaagaaaacctaggcattaccattcaggacataggcatgggca

SEQ ID NO: 72454 - DNA, 120 bp, synthetic construct; identical to SEQ ID NO: 28995
  source 1..120: mol_type = other DNA

SEQ ID NO: 72455 - DNA, 120 bp, synthetic construct
  source 1..120: mol_type = other DNA
gaattcatcatttttttatggctgcatagaattccatggtgtatatgtgccacattttcttaatccagtctatcgttgttggacatttgggttggttccaagtctttgctattgtgaata

SEQ ID NO: 72456 - DNA, 120 bp, synthetic construct
  source 1..120: mol_type = other DNA
caaagtgctgggattacaggcatgagccaccgcgcctggccatccactgagtttctaatttaaattatatcatttcccattgccagaagttctatttattttctcctgtctgctgatttc

SEQ ID NO: 72457 - DNA, 120 bp, synthetic construct
  source 1..120: mol_type = other DNA
ttcaaggggctaaggcacgagaattgcttgaacctgggaggcggagctgtagtgagccgagatccagcttgggcaacagaactaaactccatctcaaaaaaaaaaaaaaataaaatatat

SEQ ID NO: 72458 - DNA, 120 bp, synthetic construct; identical to SEQ ID NO: 20386
  source 1..120: mol_type = other DNA

SEQ ID NO: 72459 - DNA, 120 bp, synthetic construct; identical to SEQ ID NO: 8828
  source 1..120: mol_type = other DNA

SEQ ID NO: 72460 - DNA, 120 bp, synthetic construct
  source 1..120: mol_type = other DNA
acaatgtagcacaggttactacattatttaggagtaaaaaatcagaaatcataaacgaacgaataaacacattatattcatggccgggtgtggtggctcccgcccgtaatcccagcacgc

SEQ ID NO: 72461 - DNA, 120 bp, synthetic construct; identical to SEQ ID NO: 28415
  source 1..120: mol_type = other DNA

SEQ ID NO: 72462 - DNA, 120 bp, synthetic construct; identical to SEQ ID NO: 28416
  source 1..120: mol_type = other DNA

SEQ ID NO: 72463 - DNA, 120 bp, synthetic construct
  source 1..120: mol_type = other DNA
tgaggcaaagtgccccctatattccatttcaggagaggggtaacatcccaaggtctcaacacacacacacacatcacacaacacacacacacaccacacacacacctcacacatcacaca

SEQ ID NO: 72464 - DNA, 120 bp, synthetic construct; identical to SEQ ID NO: 27025
  source 1..120: mol_type = other DNA

SEQ ID NO: 72465 - DNA, 120 bp, synthetic construct
  source 1..120: mol_type = other DNA
tgagtaggttgcgaaaattttctcccatgttgtaggttgcctgttcactctcatggtagtttcttttgctgtgcagaagctctttagtttaattagatcccatttgtcaattttggcttt

SEQ ID NO: 72466 - DNA, 120 bp, synthetic construct; identical to SEQ ID NO: 27026
  source 1..120: mol_type = other DNA

SEQ ID NO: 72467 - DNA, 120 bp, synthetic construct
  source 1..120: mol_type = other DNA
caatctccctacctgcaacccctggcaaccactaatttaccttccttctctatggatttgcctattctagacatttcatataaatggaatcatacaatacgtgccctttgtgtctggctt

SEQ ID NO: 72468 - DNA, 120 bp, synthetic construct
  source 1..120: mol_type = other DNA
ctgatcctgccactgcactctagcctgggtgacagagtgagaccctgattcaaaaaggaaaacagaaaaagcatcccttttttgatggggttgtttgtttttttcttgtaaatttggttg

SEQ ID NO: 72469 - DNA, 120 bp, synthetic construct; identical to SEQ ID NO: 33798
  source 1..120: mol_type = other DNA

SEQ ID NO: 72470 - DNA, 120 bp, synthetic construct
  source 1..120: mol_type = other DNA
tccagtaccaacagatggtcagagggaggcgagagcatcagccctgagagagatgcccactccgacccaggactcacctatgacaggtgtatacctctccaccatcaggcacccacccta

SEQ ID NO: 72471 - DNA, 120 bp, synthetic construct; identical to SEQ ID NO: 14691
  source 1..120: mol_type = other DNA

SEQ ID NO: 72472 - DNA, 120 bp, synthetic construct; identical to SEQ ID NO: 14692
  source 1..120: mol_type = other DNA

SEQ ID NO: 72473 - DNA, 120 bp, synthetic construct
  source 1..120: mol_type = other DNA
tggaggaccttttgagcccaggaggtcacagttatagtgagctatgatggaaccactgcactccagtctaggggacagagcaagaccccatctctaaaaaatattaaaattttaaattta

SEQ ID NO: 72474 - DNA, 120 bp, synthetic construct
  source 1..120: mol_type = other DNA
atcactacgaagaaggtgggatacaaacaggatgaaaacaggagctgagtgaggacaacattccaaataagggaaacatgaagaaatagcaaaagaaggaaagtggggttgggcacgatg

SEQ ID NO: 72475 - DNA, 120 bp, synthetic construct
  source 1..120: mol_type = other DNA
gggtaagagctaatttgaatattcatttgagggatccatacctttgccccacctcgctatacacacatacaaaaaggaaacttctttaaaaaataaaataaaatgagaagctagaggttt

SEQ ID NO: 72476 - DNA, 120 bp, synthetic construct; identical to SEQ ID NO: 7681
  source 1..120: mol_type = other DNA

SEQ ID NO: 72477 - DNA, 120 bp, synthetic construct
  source 1..120: mol_type = other DNA
ataggctcaaaataaagggatggaggaacatctaccaagcaaacggaaaacaaaaaaaggcagggattgcaatcctagtctcggataaaacagactttaaaccaacaaagatcaaaagaa

SEQ ID NO: 72478 - DNA, 120 bp, synthetic construct
  source 1..120: mol_type = other DNA
atgaatgctggagctggtgttttgaaaagatcaacaaaattgatagactgctagcaagaataataagaaaagagagaagaatcaaatacatgcaataaaaaatgataaaggggatatcaa

SEQ ID NO: 72479 - DNA, 120 bp, synthetic construct
  source 1..120: mol_type = other DNA
acttgcctcaggtcacaccataactaggggcaggatttgaataaaaacctgtctgacccgagagcctatggctcctaatgctgcatcatagctttccatatataaactttaaaacgttaa

SEQ ID NO: 72480 - DNA, 120 bp, synthetic construct
  source 1..120: mol_type = other DNA
tgatgattgattttatgttaacttggctaggccatggtacccagatatttggtcaaatattctagatgttgatgggcacggtggctcactcttataatcacagcactttgggaggcctag

SEQ ID NO: 72481 - DNA, 120 bp, synthetic construct; identical to SEQ ID NO: 25229
  source 1..120: mol_type = other DNA

SEQ ID NO: 72482 - DNA, 120 bp, synthetic construct; identical to SEQ ID NO: 25230
  source 1..120: mol_type = other DNA

SEQ ID NO: 72483 - DNA, 120 bp, synthetic construct; identical to SEQ ID NO: 25231
  source 1..120: mol_type = other DNA

SEQ ID NO: 72484 - DNA, 120 bp, synthetic construct; identical to SEQ ID NO: 25232
  source 1..120: mol_type = other DNA

SEQ ID NO: 72485 - DNA, 120 bp, synthetic construct; identical to SEQ ID NO: 25233
  source 1..120: mol_type = other DNA

SEQ ID NO: 72486 - DNA, 120 bp, synthetic construct
  source 1..120: mol_type = other DNA
agcagggtgtgactcggatttccatttcactgaagtgcagatggtaattatcgggggacctgccccgataatcacgtaggttcttttctatttttctaagcgtcgactggcttgagaaat

SEQ ID NO: 72487 - DNA, 120 bp, synthetic construct
  source 1..120: mol_type = other DNA
attacagggtcctgagacgatacatatccttcttggctgacaggattaagagattaaagtaaagacaggcataggaaatcacaagggtattgattggggaagtgataagtgtccatgaaa

SEQ ID NO: 72488 - DNA, 120 bp, synthetic construct; identical to SEQ ID NO: 25234
  source 1..120: mol_type = other DNA

SEQ ID NO: 72489 - DNA, 120 bp, synthetic construct; identical to SEQ ID NO: 25235
  source 1..120: mol_type = other DNA

SEQ ID NO: 72490 - DNA, 120 bp, synthetic construct; identical to SEQ ID NO: 25236
  source 1..120: mol_type = other DNA

SEQ ID NO: 72491 - DNA, 120 bp, synthetic construct; identical to SEQ ID NO: 25237
  source 1..120: mol_type = other DNA

SEQ ID NO: 72492 - DNA, 120 bp, synthetic construct; identical to SEQ ID NO: 25238
  source 1..120: mol_type = other DNA

SEQ ID NO: 72493 - DNA, 120 bp, synthetic construct; identical to SEQ ID NO: 27104
  source 1..120: mol_type = other DNA

SEQ ID NO: 72494 - DNA, 120 bp, synthetic construct
  source 1..120: mol_type = other DNA
agatggtatctcattgcggttttgatttgcatttctctgatggccagcgatgatgagcattttttcatgtgttttttggctgcataaatgtcttcttttgagaagtgtctgttcatgtcc

SEQ ID NO: 72495 - DNA, 120 bp, synthetic construct
  source 1..120: mol_type = other DNA
tctgttgctgttgtataagaatgcttgtgatttttgtacattgattttgtatcctgagactttgctgaagttgctgatcagcttaaggagattttgggctgagacaatggggttttctag

SEQ ID NO: 72496 - DNA, 120 bp, synthetic construct
  source 1..120: mol_type = other DNA
ttctagattttctagtttatttgcatagaggtgtttgtagtattctctgatggtagtttgtatttctgtgggatcggtcgtgatatcccctttagcattttttattgcgtctattagatt

SEQ ID NO: 72497 - DNA, 120 bp, synthetic construct
  source 1..120: mol_type = other DNA
tagttagctcttcttgttgaattgatccctttaccattatgtaatggctgtctttgtctcttttgatctttgttggtttaaagtctgttttatcagagactaggattgcaacccctgcct

SEQ ID NO: 72498 - DNA, 120 bp, synthetic construct
  source 1..120: mol_type = other DNA
cccatatttcttggaggctttgctcatttctttttattcttttttctctaaacttcccttctcacttcatttcattcatttcatcttccatcgctgatatcctttcttccagttgatggc

SEQ ID NO: 72499 - DNA, 120 bp, synthetic construct
  source 1..120: mol_type = other DNA
ccccagaggtggagcctacagaggcaggcaagcctccttgagctgtggtgggctccgcccagttggagcttcgaggctgctttgtttacctcagcaagcctgggcaatggcgggcgcccc

SEQ ID NO: 72500 - DNA, 120 bp, synthetic construct; identical to SEQ ID NO: 27105
  source 1..120: mol_type = other DNA

SEQ ID NO: 72501 - DNA, 120 bp, synthetic construct; identical to SEQ ID NO: 27106
  source 1..120: mol_type = other DNA

SEQ ID NO: 72502 - DNA, 120 bp, synthetic construct; identical to SEQ ID NO: 11366
  source 1..120: mol_type = other DNA

SEQ ID NO: 72503 - DNA, 120 bp, synthetic construct; identical to SEQ ID NO: 11367
  source 1..120: mol_type = other DNA

SEQ ID NO: 72504 - DNA, 120 bp, synthetic construct; identical to SEQ ID NO: 11368
  source 1..120: mol_type = other DNA

SEQ ID NO: 72505 - DNA, 120 bp, synthetic construct
  source 1..120: mol_type = other DNA
gggtcagcgaatatacaggggcagtccttgtgggcaggtccaggtccagtgcagattctgccaccactgctgccgctgcggtttggttttcataaatgctgtgttgatccctggttccat

SEQ ID NO: 72506 - DNA, 120 bp, synthetic construct
  source 1..120: mol_type = other DNA
gtgcacacctggttcttccagctgatggcacttcccatcacattgcccagcttctgggatctctcagcccttccatacttgccatgaggatagggggctgttgctcttagacaaaccaag

SEQ ID NO: 72507 - DNA, 120 bp, synthetic construct; identical to SEQ ID NO: 11360
  source 1..120: mol_type = other DNA

SEQ ID NO: 72508 - DNA, 120 bp, synthetic construct; identical to SEQ ID NO: 11361
  source 1..120: mol_type = other DNA

SEQ ID NO: 72509 - DNA, 120 bp, synthetic construct; identical to SEQ ID NO: 11362
  source 1..120: mol_type = other DNA

SEQ ID NO: 72510 - DNA, 120 bp, synthetic construct
  source 1..120: mol_type = other DNA
tgcggtgggaggatcacttgagctcaggaatttgagaccagcctgggtaacatagtgaaacccagtctctacaaaaaattaaaaaattagctgtagtgtggtatagtcccagctacttgg

SEQ ID NO: 72511 - DNA, 120 bp, synthetic construct
  source 1..120: mol_type = other DNA
gtcaaatggtatttctagttctagatccctgaggaatcgccactctgatttccacagtggttgaactactttacagtcccaccaacagtgtaaaactgttcctatttctccacatcctct

SEQ ID NO: 72512 - DNA, 120 bp, synthetic construct
  source 1..120: mol_type = other DNA
ggttactctagccttgtagtatagtttgaagtcaagtagtgtgatgcctccagctttgttcttttggtttagggttgtcttggcaatgcgggcccttttttggttccatatgaactctaa

SEQ ID NO: 72513 - DNA, 120 bp, synthetic construct
  source 1..120: mol_type = other DNA
attttatttctccttcacttatgaagcttagtttggctggatatgaaattctgggttgaaaattatttaagaatgttgaatactggcccccactctcttctggcttgtagagtttctgcc

SEQ ID NO: 72514 - DNA, 120 bp, synthetic construct; identical to SEQ ID NO: 11363
  source 1..120: mol_type = other DNA

SEQ ID NO: 72515 - DNA, 120 bp, synthetic construct; identical to SEQ ID NO: 11364
  source 1..120: mol_type = other DNA

SEQ ID NO: 72516 - DNA, 120 bp, synthetic construct; identical to SEQ ID NO: 11365
  source 1..120: mol_type = other DNA

SEQ ID NO: 72517 - DNA, 120 bp, synthetic construct
  source 1..120: mol_type = other DNA
ccagagcaactgccaccatggtccttgtgatcaaacatcccatggacaccccatgggattagagatgtaggtctccacacacatttccagaagatcaaagcccagcttcagctttctgtg

SEQ ID NO: 72518 - DNA, 120 bp, synthetic construct
  source 1..120: mol_type = other DNA
tattcctgtgtcttactgagggggcctattcctgtggatgccgggggtgtgttttttctgcgtgatgctgggtgggggggctctcttcctgtgtaatgctggaggaggctctccctgtgt

SEQ ID NO: 72519 - DNA, 120 bp, synthetic construct
  source 1..120: mol_type = other DNA
gtctcttcctgtgtgatgctgggtgggcctctccctgtgtgatgctgggtgggcctctccctgtgtgatgctggggggggcctctcactgtgtgatgctgggggggcctcttcctgtgtg

SEQ ID NO: 72520 - DNA, 120 bp, synthetic construct
  source 1..120: mol_type = other DNA
tctccctgtgtgatgctggggtggtctctccctgtgtgatgctggggtggtctctccctgtgtgatgttgggggggcggtctccctgtgtgatgctgggggggcctcttcctgtgtgatg

SEQ ID NO: 72521 - DNA, 120 bp, synthetic construct
  source 1..120: mol_type = other DNA
accaggtgcacgtgaagccaccatgaggttaattccaagccagcacttgaccaggtttatttttagaagctggagctcatcttaaaggcaccaagctcttttgctctaagaagtggaggt

SEQ ID NO: 72522 - DNA, 120 bp, synthetic construct
  source 1..120: mol_type = other DNA
tcttcctgtggggacgtgctctcccccttccttctatttcattggttagaattttcctatagagaagacctgccccttttctcctatttctttgcttatgtatcgcactgtatgcttcca

SEQ ID NO: 72523 - DNA, 120 bp, synthetic construct
  source 1..120: mol_type = other DNA
agcctcacggtgtccacacacaacactgttttccaaacaactcaggtggggtctcttcttacccaccctccctagggctgctcatttgtaatacagccaggtgcctttgtacagctgata

SEQ ID NO: 72524 - DNA, 120 bp, synthetic construct
  source 1..120: mol_type = other DNA
gatggggcggcggcagggcggagatgctcctcacttcccagacggggcggggcggctgccgggcggaggggctcctcactttccagatggggcggctgccaggcggaggggctcctcact

SEQ ID NO: 72525 - DNA, 120 bp, synthetic construct
  source 1..120: mol_type = other DNA
ggctgcataaatgtcttcttttgagaagtgtctgttcatgtcctttgcccactttttgatggggttgtttgtttttttcttttttgttggagttcattgtagattctggatattagccct

SEQ ID NO: 72526 - DNA, 120 bp, synthetic construct; identical to SEQ ID NO: 12504
  source 1..120: mol_type = other DNA

SEQ ID NO: 72527 - DNA, 120 bp, synthetic construct; identical to SEQ ID NO: 12505
  source 1..120: mol_type = other DNA

SEQ ID NO: 72528 - DNA, 120 bp, synthetic construct; identical to SEQ ID NO: 12506
  source 1..120: mol_type = other DNA

SEQ ID NO: 72529 - DNA, 120 bp, synthetic construct; identical to SEQ ID NO: 12507
  source 1..120: mol_type = other DNA

SEQ ID NO: 72530 - DNA, 120 bp, synthetic construct
  source 1..120: mol_type = other DNA
atctacaaagaactcaaatttacaagaaaaaaacctcatcaacaaatgggcaaagaatatgaacagacacttctcaaaagaaaacatttatgcagccaaaagacacatgaagaaatgctc

SEQ ID NO: 72531 - DNA, 120 bp, synthetic construct
  source 1..120: mol_type = other DNA
aacaggaacacttttacactgttggtgggactgtaaactagttcaaccgttgtggaagacagtgtggcgattcctcagggatctagaactagaaataccttttgacccagccattccatt

SEQ ID NO: 72532 - DNA, 120 bp, synthetic construct; identical to SEQ ID NO: 12508
  source 1..120: mol_type = other DNA

SEQ ID NO: 72533 - DNA, 120 bp, synthetic construct; identical to SEQ ID NO: 12509
  source 1..120: mol_type = other DNA

SEQ ID NO: 72534 - DNA, 120 bp, synthetic construct; identical to SEQ ID NO: 5695
  source 1..120: mol_type = other DNA

SEQ ID NO: 72535 - DNA, 120 bp, synthetic construct; identical to SEQ ID NO: 27499
  source 1..120: mol_type = other DNA

SEQ ID NO: 72536 - DNA, 120 bp, synthetic construct; identical to SEQ ID NO: 27500
  source 1..120: mol_type = other DNA

SEQ ID NO: 72537 - DNA, 120 bp, synthetic construct
  source 1..120: mol_type = other DNA
ctattcagctctgtacggctgttgttcagatccaccatccttaatcccatgatatgacattgcatgttggtcctttgggcattggagtcaggaaaagcacttctttttctttttgaaagt

SEQ ID NO: 72538 - DNA, 120 bp, synthetic construct
  source 1..120: mol_type = other DNA
tcatggcccgttcccaatgagctgccggctacacctcccagacggggcggtggccgggcagaggggctcctcacttccctgtaggggcggccgggcagaggcgcccctcacctcccagac

SEQ ID NO: 72539 - DNA, 120 bp, synthetic construct
  source 1..120: mol_type = other DNA
ggggctcctcatgtcccagacgatgggcggccaggcagagacgcttctcacttcccagacggggtggcggccgggcagaggctgcaatctcggcactttgggaggccaaggcaggcggct

SEQ ID NO: 72540 - DNA, 120 bp, synthetic construct; identical to SEQ ID NO: 27502
  source 1..120: mol_type = other DNA

SEQ ID NO: 72541 - DNA, 120 bp, synthetic construct; identical to SEQ ID NO: 27503
  source 1..120: mol_type = other DNA

SEQ ID NO: 72542 - DNA, 120 bp, synthetic construct
  source 1..120: mol_type = other DNA
tatcatactgaatgggcaaaaactggaagcattcccttttaagactggcacaagacagggatgtcctctctcaccactcctattcaacatagtgttggaagctctggccagggcaatcag

SEQ ID NO: 72543 - DNA, 120 bp, synthetic construct
  source 1..120: mol_type = other DNA
ccgcctgccttggcctcccaaagtgctgagattgcagcctctgcccggccgccaccccatctgggaagtgaggagcgtctctgcctggccacccatcgtctgggatgtgaggagcccctc

SEQ ID NO: 72544 - DNA, 120 bp, synthetic construct
  source 1..120: mol_type = other DNA
aaaattttaaaagactggtcaagaggaaaagaatcaactgaaaagaattataattagaaagtttaggccgggcatggtggctcacacctgtaatcccagcactttgggaggccaaggtgg

SEQ ID NO: 72545 - DNA, 120 bp, synthetic construct
  source 1..120: mol_type = other DNA
ctatttcatcatcagaaaaaaactttcataaatgaaatgctgcttaggttagatgaggaaaatgcatctttttttttttttgagacggagtctcgctgtcgcccaggctggagtgcagtg

SEQ ID NO: 72546 - DNA, 120 bp, synthetic construct
  source 1..120: mol_type = other DNA
ggaaggagaaagaagagaaaagagaagggaggagaagggaggggaagggaggggaggggaggagaggacaagaaaagaaaagaaaagaaaagaaaagaaaagaaaagaaaagaaaagaaa

SEQ ID NO: 72547 - DNA, 120 bp, synthetic construct; identical to SEQ ID NO: 5550
  source 1..120: mol_type = other DNA

SEQ ID NO: 72548 - DNA, 120 bp, synthetic construct; identical to SEQ ID NO: 31610
  source 1..120: mol_type = other DNA

SEQ ID NO: 72549 - DNA, 120 bp, synthetic construct
  source 1..120: mol_type = other DNA
ctaaagagcttctgcacagcaaaagaaactaccatcagagtgaacaggcaacctaccgaatgggagaaaatttttacaatctactcatctgacaaagggctaatatccagaatctagaaa

SEQ ID NO: 72550 - DNA, 120 bp, synthetic construct
  source 1..120: mol_type = other DNA
gaaatgaaggcagaaataaagatgttctttgaaaccagtgagaacaaagacacaatataccagaatctctgggacacattcaaagcagtgtgtagagggaaatttatagcactaaatgcc

SEQ ID NO: 72551 - DNA, 120 bp, synthetic construct
  source 1..120: mol_type = other DNA
ccagcaacacatcaaaaagcttatccaccatgatcaagtgggcttcatccctgggatgcaaggctggttcaacatacgaaaatgaataaacgtaatccagcatataaacagaaccaaaga

SEQ ID NO: 72552 - DNA, 120 bp, synthetic construct
  source 1..120: mol_type = other DNA
actttctccacagaattggaaaaaactactttcaagttcatatggaaccaaaaaagagcctgcattgccaagtcaatcctaagccaaaagaacaaagctggaggcatcacgctacctgac

SEQ ID NO: 72553 - DNA, 120 bp, synthetic construct
  source 1..120: mol_type = other DNA
aaataggaatacttttacactgttggtgggactgtaaactagttcaaccattgtggaagtgggtgtggcgattcctcagggatctagaactagaaataccatttgacccagccattccat

SEQ ID NO: 72554 - DNA, 120 bp, synthetic construct; identical to SEQ ID NO: 31611
  source 1..120: mol_type = other DNA

SEQ ID NO: 72555 - DNA, 120 bp, synthetic construct
  source 1..120: mol_type = other DNA
gttgtgaaaatggctatactgcccaaggtaatttatagattcaatgccatccccatcaagctaccaatgactttcttcacagaattggaaaaaactactttaaagttcatatggaaccaa

SEQ ID NO: 72556 - DNA, 120 bp, synthetic construct
  source 1..120: mol_type = other DNA
cacaagtatgtttactgtggtactattgacaatagcaaagacttggaaccaacgcaaatgtcactgtggcactatttacaatagcaaagacttggaaccaacccaaatgtccatcaatga

SEQ ID NO: 72557 - DNA, 120 bp, synthetic construct
  source 1..120: mol_type = other DNA
aggcgtatgccaccacacccggctaattttctcattttttgtagagacagggtctcactatgttgctgagaatagtgatttacactacctgggtggacaaactgaatagttgataactat

SEQ ID NO: 72558 - DNA, 120 bp, synthetic construct
  source 1..120: mol_type = other DNA
agtcacgtggctcagaacacaggaagtgctacctaagggcttgttacataaaatgagaagtgcagttttagcctgggcaacacagtgagaccccgtctctacaaaaaataaaaataaaaa

SEQ ID NO: 72559 - DNA, 120 bp, synthetic construct
  source 1..120: mol_type = other DNA
ctcttctatatagagaatatttatggaaagataggtaagaaacttataatacaggttgcccactgtgaatgaggtggaagggaggcagacagacagacacacacacacacacacacacac

SEQ ID NO: 72560 - DNA, 120 bp, synthetic construct
  source 1..120: mol_type = other DNA
cacatctattggtactagaccttttagaagtatggtttcatttattccttacaacaatcctagcaggcaggtattattatgtccactgaatagggaaactaggcctcctttgggggcagc

SEQ ID NO: 72561 - DNA, 120 bp, synthetic construct
  source 1..120: mol_type = other DNA
aatgggggatcttgtggacatttcacagtgttatggtaaacacaggcaaagacaagaaggcaagcacagataagttgatcgtggctcagttctttgaaggagattaataggcttttgtgg

SEQ ID NO: 72562 - DNA, 120 bp, synthetic construct
  source 1..120: mol_type = other DNA
ccaataacattacttcccacttcccgagcgcttactgagtgctgggcgcctagcttttgaattcccacggtaaccctatgggaactctgccatctccattttacagatgagaaaactgag

SEQ ID NO: 72563 - DNA, 120 bp, synthetic construct; identical to SEQ ID NO: 17043
  source 1..120: mol_type = other DNA

SEQ ID NO: 72564 - DNA, 120 bp, synthetic construct; identical to SEQ ID NO: 17044
  source 1..120: mol_type = other DNA

SEQ ID NO: 72565 - DNA, 120 bp, synthetic construct
  source 1..120: mol_type = other DNA
tggctttgccccccaccctggaggccgcccttcgatcaggccccagcttcgcttctggtgttcctgcggcgcccgagggccttcctcagccccgaatctgcccaagccgagagaaaggga

SEQ ID NO: 72566 - DNA, 120 bp, synthetic construct
  source 1..120: mol_type = other DNA
aggaggagtctggggcagttaattatataatgctcctgcctgtcaaagccgtgcccagccccggtctcaggcggccttttctgtgccgttgttgttttcatggagcaggttggagagctt

SEQ ID NO: 72567 - DNA, 120 bp, synthetic construct
  source 1..120: mol_type = other DNA
ctcgttcttgcatcacattgccggaagaagcccagattgtcaacatcctctcaaggggtatgcggttcttagctctcccataagcaaagccaggcagggatgcagatggggagcttcatg

SEQ ID NO: 72568 - DNA, 120 bp, synthetic construct
  source 1..120: mol_type = other DNA
tctggacaggagactggtgatcatgtaaatgatgttaaatagcaacattagatacttactgtctgccaagcatgtggcaagtgttaaatgaattacagcccttaattcttacacctctag

SEQ ID NO: 72569 - DNA, 120 bp, synthetic construct
  source 1..120: mol_type = other DNA
aggcagtggtgtgcttcgtttccattttaaacacacgtttatgctgttagtgcccttttagggagaaaaatccctcatctcaacaaaataaactaccatggggcgtatgctttgtgcttg

SEQ ID NO: 72570 - DNA, 120 bp, synthetic construct
  source 1..120: mol_type = other DNA
atcccaacactttgggaggccgagatgggaggttcacttgagcccaggagtttgagaccagcctgggcaacattgtgagacccccgtctctacaaaaaatacaaaaattagccaggtgtg

SEQ ID NO: 72571 - DNA, 120 bp, synthetic construct; identical to SEQ ID NO: 17045
  source 1..120: mol_type = other DNA

SEQ ID NO: 72572 - DNA, 120 bp, synthetic construct
  source 1..120: mol_type = other DNA
gtgagactctgtctcaaaaaacaaacaaacaacaaaccaaaaaaccaaataaaatagtcctttctttcttattgctgggcggtgtcccacggtgtggatgggccgtttgtttaaccatct

SEQ ID NO: 72573 - DNA, 120 bp, synthetic construct
  source 1..120: mol_type = other DNA
cgggaggtgcaggttgcagtgagttgagattgggccactgcactctagcctgggcgacataatgagacgctgtctcaaaaaaataaataaataaataataaaacttggaaataaggcaaa

SEQ ID NO: 72574 - DNA, 120 bp, synthetic construct; identical to SEQ ID NO: 17047
  source 1..120: mol_type = other DNA

SEQ ID NO: 72575 - DNA, 120 bp, synthetic construct; identical to SEQ ID NO: 17048
  source 1..120: mol_type = other DNA

SEQ ID NO: 72576 - DNA, 120 bp, synthetic construct; identical to SEQ ID NO: 18511
  source 1..120: mol_type = other DNA

SEQ ID NO: 72577 - DNA, 120 bp, synthetic construct; identical to SEQ ID NO: 18512
  source 1..120: mol_type = other DNA

SEQ ID NO: 72578 - DNA, 120 bp, synthetic construct; identical to SEQ ID NO: 24627
  source 1..120: mol_type = other DNA

SEQ ID NO: 72579 - DNA, 120 bp, synthetic construct
  source 1..120: mol_type = other DNA
tagctgggattacaggctcctgctactgtggctggctaatttttgtagtttttgtttgtttgtttgtttgtttttcattgagacggggtttcaccatcttggccaagcttgtcttgaact

SEQ ID NO: 72580 - DNA, 120 bp, synthetic construct
  source 1..120: mol_type = other DNA
ttctagttctagatccctgaggaatcgccacactgacttcaacaatggttgaactagtttacagtcccaccaacagtgtaaaagtgttcctatttctccacatcctctccagcacctgtt

SEQ ID NO: 72581 - DNA, 120 bp, synthetic construct
  source 1..120: mol_type = other DNA
cttggcgatgcgggctcttttttggttccatatgaactttaaagtagttttttccaattctgtgaagaaagtcattggtagcttgatgtggatggcactgaatctataaattaccttggg

SEQ ID NO: 72582 - DNA, 120 bp, synthetic construct
  source 1..120: mol_type = other DNA
catggttgaagctggaaaccatcattctgagcaaactatcgcaaggacagaaaaccaaacaccgcatgttcttattcataggtgggaattgaacaatgagaacacttggacataggttgg

SEQ ID NO: 72583 - DNA, 120 bp, synthetic construct; identical to SEQ ID NO: 24628
  source 1..120: mol_type = other DNA

SEQ ID NO: 72584 - DNA, 120 bp, synthetic construct
  source 1..120: mol_type = other DNA
tcatcctggcccgttctcaatgagctgttgggcacacctcccagacggggtggtggccgggcagaggggctcttcacttcccagtaagggccgccgggcagaggcgcccctcacctcccg

SEQ ID NO: 72585 - DNA, 120 bp, synthetic construct
  source 1..120: mol_type = other DNA
tcccagatggggtggctgccgggcggaggggctcctcatttctcagacggggcggccgggcagagacgctcctcacctcccagacggggtcgcggccgggcagaggcgctcctcacatcc

SEQ ID NO: 72586 - DNA, 120 bp, synthetic construct; identical to SEQ ID NO: 24629
  source 1..120: mol_type = other DNA

SEQ ID NO: 72587 - DNA, 120 bp, synthetic construct; identical to SEQ ID NO: 24630
  source 1..120: mol_type = other DNA

SEQ ID NO: 72588 - DNA, 120 bp, synthetic construct; identical to SEQ ID NO: 24631
  source 1..120: mol_type = other DNA

SEQ ID NO: 72589 - DNA, 120 bp, synthetic construct; identical to SEQ ID NO: 24632
  source 1..120: mol_type = other DNA

SEQ ID NO: 72590 - DNA, 120 bp, synthetic construct; identical to SEQ ID NO: 24633
  source 1..120: mol_type = other DNA

SEQ ID NO: 72591 - DNA, 120 bp, synthetic construct
  source 1..120: mol_type = other DNA
tgttaattctgactggttcaccctttgaccttgggaaaaaatagaacaaaagcaattagaacaaaagtagatactttgggaggccgaggcaggcagatcacttgaggtcaggagttcaag

SEQ ID NO: 72592 - DNA, 120 bp, synthetic construct
  source 1..120: mol_type = other DNA
ggatcactgggtcaagtggtatttctaattctagatcgttgaggaatcaccacactgtcttttacaatggttgaactagtttacactcccaccaactgtgtaaaagtgttcctgtttctc

SEQ ID NO: 72593 - DNA, 120 bp, synthetic construct; identical to SEQ ID NO: 32033
  source 1..120: mol_type = other DNA

SEQ ID NO: 72594 - DNA, 120 bp, synthetic construct; identical to SEQ ID NO: 32034
  source 1..120: mol_type = other DNA

SEQ ID NO: 72595 - DNA, 120 bp, synthetic construct; identical to SEQ ID NO: 19550
  source 1..120: mol_type = other DNA

SEQ ID NO: 72596 - DNA, 120 bp, synthetic construct; identical to SEQ ID NO: 18068
  source 1..120: mol_type = other DNA

SEQ ID NO: 72597 - DNA, 120 bp, synthetic construct
  source 1..120: mol_type = other DNA
cccttccctccccagctgccaaggctgttaggtttagccgtttaaatttggctgcggtcagacccccgccctagagcgcgatcccgtgccgagaccagagtccagcagcccagaggattc

SEQ ID NO: 72598 - DNA, 120 bp, synthetic construct
  source 1..120: mol_type = other DNA
tttcatttgttttaagttttttttttttttttttttgagacagaatctcactctgtcacccaggctagaatgcagtggcacagtcttggctcactgaagcctccgcctcccaggttcaag

SEQ ID NO: 72599 - DNA, 120 bp, synthetic construct; identical to SEQ ID NO: 18005
  source 1..120: mol_type = other DNA

SEQ ID NO: 72600 - DNA, 120 bp, synthetic construct; identical to SEQ ID NO: 18006
  source 1..120: mol_type = other DNA

SEQ ID NO: 72601 - DNA, 120 bp, synthetic construct
  source 1..120: mol_type = other DNA
aatttttgtgtttttagtagagacggggtttcgccttgtttgccagactggtcttgcattcctgagctcaggtgatccacctgcctcagcctctcaaagtattgggattacaggcgtgag

SEQ ID NO: 72602 - DNA, 120 bp, synthetic construct; identical to SEQ ID NO: 24140
  source 1..120: mol_type = other DNA

SEQ ID NO: 72603 - DNA, 120 bp, synthetic construct
  source 1..120: mol_type = other DNA
tgttggacatttgggttggttccaagtctttgctattgtgaatagtgccacaataaacatacgtgtgcatgtgacagagatatagatcaatggaacagaacagagccctcagaaataacg

SEQ ID NO: 72604 - DNA, 120 bp, synthetic construct
  source 1..120: mol_type = other DNA
atatacccaaaggactataaatcatgctgctataaagacacatgcacacaaatgcttctttctactgacagagtcttttaagaaaaatagtttctccaagctcgtaagatcatagttgaa

SEQ ID NO: 72605 - DNA, 120 bp, synthetic construct
  source 1..120: mol_type = other DNA
ctgggactacaggcgcccgccaccacggctaatttttagtagagatggggtttcactgtgttagccaataattgtgttgtttttacgtaaaagaatgtcttagtactcaggatatacatt

SEQ ID NO: 72606 - DNA, 120 bp, synthetic construct; identical to SEQ ID NO: 28400
  source 1..120: mol_type = other DNA

SEQ ID NO: 72607 - DNA, 120 bp, synthetic construct
  source 1..120: mol_type = other DNA
ctccagcctgggtgacagagcgagactccatctcaaaaaaaaaaaaaagacactcccagatgtggaaagttgagaatgagaatttgggaggatgataacaccaaactaacgtgtatgtga

SEQ ID NO: 72608 - DNA, 120 bp, synthetic construct
  source 1..120: mol_type = other DNA
tcctaacccccagtacttcagaatgtgactgtatttagagacaggagaggtaattaaggtaaaatgaggtcatatgggtgggctctaatccaacatgactggtgtccttataagaagaag

SEQ ID NO: 72609 - DNA, 120 bp, synthetic construct
  source 1..120: mol_type = other DNA
tcacagccaatatcatattgaatgggcaaaaactggaagcattccctttgaaaacgggcacaagacagggatgccctctctcaccactcctattcaacatagtgttggaagttctggcca

SEQ ID NO: 72610 - DNA, 120 bp, synthetic construct
  source 1..120: mol_type = other DNA
agaaaaacaagcaatggggaaaggattccctatttaataaatggtgctgggaaaacttgctagccatatgtagaaagctgaaactggatcccttccttacaccttatacaaaaattaatt

SEQ ID NO: 72611 - DNA, 120 bp, synthetic construct
  source 1..120: mol_type = other DNA
gacacatgcacacgtatgtttattgtggcattattcacaatagcaaagacttggaaccaacccaaatgtccaacaatgataatgtggataaagaaaatgtggcacatatacaccatggaa

SEQ ID NO: 72612 - DNA, 120 bp, synthetic construct
  source 1..120: mol_type = other DNA
tctgagaacaggcagactgcctcctcaagtgggtccctgaccccgaccccccagcagcctaactgggaggtaccccccagcaggggcagactgacacctcacacggctgggtactccaac

SEQ ID NO: 72613 - DNA, 120 bp, synthetic construct
  source 1..120: mol_type = other DNA
aatctagcaaggcaggccaacatacagattcaggaaatacagagaacgccacaaagatactcctcgagaagagcaactccaagacacataattgtcagattcaccaaagttgaaatgaag

SEQ ID NO: 72614 - DNA, 120 bp, synthetic construct
  source 1..120: mol_type = other DNA
cagcaccacaccacacctattccaaaattgaccacatacttggaagtaaagttctcctcatcaaatgtaaaagaacagaaattataacaaactatctctcagaccacagtgcaatcaaac

SEQ ID NO: 72615 - DNA, 120 bp, synthetic construct
  source 1..120: mol_type = other DNA
aaaccgaatccagcagtacatctaaaagcttatccaccatgatcaagtgggcttcatccctgggatgcaaggctggttcaatatacacaaatcaataaatgtaatccagcatataaacag

SEQ ID NO: 72616 - DNA, 120 bp, synthetic construct
  source 1..120: mol_type = other DNA
agcccacatcgcaaagtcaatcctaagccaaaagaacaaagctggaggcatcacactacctgacttcaaactatactacaaggctacagtaaccaaaacagcatggtactggtaccaaaa

SEQ ID NO: 72617 - DNA, 120 bp, synthetic construct
  source 1..120: mol_type = other DNA
gaaaatgtggcacatatacaccatggaatactatgcagccataaaaaatgatgagttcacgtcccttgtagggacatggatgaaattggaaatcatcattctcagtaaactatcgcaaga

SEQ ID NO: 72618 - DNA, 120 bp, synthetic construct
  source 1..120: mol_type = other DNA
gtgatctcggctcgctacaacctccgcctgccttggccacccaaagtgccgagattgcagtctctgcccggccgccaccccgtctaggaagtgaggagcgtctctgcctggctgcccatc

SEQ ID NO: 72619 - DNA, 120 bp, synthetic construct
  source 1..120: mol_type = other DNA
gcccggccagccgccccacccgggaggtgaggggcgcctctgcccggcctcccctactgggaagtgaggagcccctctgcccggccaccaccccgtctgggaggtgtacccaacagctca

SEQ ID NO: 72620 - DNA, 120 bp, synthetic construct
  source 1..120: mol_type = other DNA
ttaggagggcctgcaaccgtatgatatgattgagaatgtagatgggggtttgctactaagaatataagtttttaagagctacacacttgaatttcagggagtctgcggaaagagctacag

SEQ ID NO: 72621 - DNA, 120 bp, synthetic construct
  source 1..120: mol_type = other DNA
taaggcaagtcctgagtttatcgtcgggagaatcttcccttgtagtctcgaattgccttggccatcagcggggccactttcttggcagcctgttttcgggttttgtccgcgggcgccgcg

SEQ ID NO: 72622 - DNA, 120 bp, synthetic construct
  source 1..120: mol_type = other DNA
tctctgactggctttcctggacaggaggcgatttctgagccgaagccccgcgggacgatttgtgccccttgctgtggctccccaccgcttccccctggggttggccctggcagccttgac

SEQ ID NO: 72623 - DNA, 120 bp, synthetic construct
  source 1..120: mol_type = other DNA
acttggtctggaacgccggtccttgcagacagctgagcaggcccgcttctgttcctcgggatgtgcggccgcagcctggagtgtgacctgtgcggtgcgccgtccaaggcggagtgaagc

SEQ ID NO: 72624 - DNA, 120 bp, synthetic construct
  source 1..120: mol_type = other DNA
gcttcaggatcttgctcccaccggttgtttaaaatctcctcggaaaggcttgctctggcctgcagctgatactggtgccacggtttgggcagccgagttccactctcacctttcagtcca

SEQ ID NO: 72625 - DNA, 120 bp, synthetic construct
  source 1..120: mol_type = other DNA
gattctctcttgaattgctgtcaagaaatagagaccggcgttgtctctggccctcgctggggaagcttttctgaggttttgtttttttaatttgagacggagtttggcttttgttgtcca

SEQ ID NO: 72626 - DNA, 120 bp, synthetic construct
  source 1..120: mol_type = other DNA
agaacctaaagaagctgattgaggtgtcgccattctttcacaggggttctggctgaaaagattgggattgattctttgccgtgcttagtaaaagtattttgacttaaggaacgtagcagt

SEQ ID NO: 72627 - DNA, 120 bp, synthetic construct; identical to SEQ ID NO: 72621
  source 1..120: mol_type = other DNA

SEQ ID NO: 72628 - DNA, 120 bp, synthetic construct; identical to SEQ ID NO: 72622
  source 1..120: mol_type = other DNA

SEQ ID NO: 72629 - DNA, 120 bp, synthetic construct
  source 1..120: mol_type = other DNA
attctcccgtctcagccccctgagtagctgggattacaggcgctcgccagcaagcccaaccgagtttcgtctttttagaagagacgggatttcctcatgttggtcaggctggtctgcaac

SEQ ID NO: 72630 - DNA, 120 bp, synthetic construct
  source 1..120: mol_type = other DNA
gaagctgattgaggtgtcgccattctttcacaggggttctggctgaaaagattgggattgattctttgccgtgcttagtaaaagtattttgacttaaggaacgtagcagttgttagcatt

SEQ ID NO: 72631 - DNA, 120 bp, synthetic construct; identical to SEQ ID NO: 72621
  source 1..120: mol_type = other DNA

SEQ ID NO: 72632 - DNA, 120 bp, synthetic construct; identical to SEQ ID NO: 72622
  source 1..120: mol_type = other DNA

SEQ ID NO: 72633 - DNA, 120 bp, synthetic construct; identical to SEQ ID NO: 72623
  source 1..120: mol_type = other DNA

SEQ ID NO: 72634 - DNA, 120 bp, synthetic construct; identical to SEQ ID NO: 72624
  source 1..120: mol_type = other DNA

SEQ ID NO: 72635 - DNA, 120 bp, synthetic construct; identical to SEQ ID NO: 72625
  source 1..120: mol_type = other DNA

SEQ ID NO: 72636 - DNA, 120 bp, synthetic construct; identical to SEQ ID NO: 72630
  source 1..120: mol_type = other DNA

SEQ ID NO: 72637 - DNA, 120 bp, synthetic construct; identical to SEQ ID NO: 72621
  source 1..120: mol_type = other DNA

SEQ ID NO: 72638 - DNA, 120 bp, synthetic construct; identical to SEQ ID NO: 72622
  source 1..120: mol_type = other DNA

SEQ ID NO: 72639 - DNA, 120 bp, synthetic construct; identical to SEQ ID NO: 72623
  source 1..120: mol_type = other DNA

SEQ ID NO: 72640 - DNA, 120 bp, synthetic construct
  source 1..120: mol_type = other DNA
gatcttgctcccaccggttgtttaaaatctcctcggaaaggcttgctctggtctgcagctgatattggtgccacggtttgggcagcggagttccactcttacctttcagtccgaatgagg

SEQ ID NO: 72641 - DNA, 120 bp, synthetic construct
  source 1..120: mol_type = other DNA
acttattttttttttaattttattattattatactttaagttttagggtacatgtgcacaacgtgcaggtttgttacatatgtatacatgtgccatgttggtgtgctgcacccattaact

SEQ ID NO: 72642 - DNA, 120 bp, synthetic construct
  source 1..120: mol_type = other DNA
aatgttagacctaaaaccataaaaaccctagaagaaaacctaggcaataccattcaggacataggcatgggcaaggacttcatgtctaaaacaccaaaagcaatggcaacaaaagccaaa

SEQ ID NO: 72643 - DNA, 120 bp, synthetic construct
  source 1..120: mol_type = other DNA
catgtggtttttgtctttggttctgtttatatgttggattacattcattgatttgcatatgttgaaccagccttgcatcccagggatgaagcccacttgatcatggtggataagcttttt

SEQ ID NO: 72644 - DNA, 120 bp, synthetic construct
  source 1..120: mol_type = other DNA
aaatttccctctacacactgctttgaatgtgtcccagagattctggtatgttgtgtgttttttctcgttggtttcaaagaacatctttatttctgccttcattttgttatttacccagta

SEQ ID NO: 72645 - DNA, 120 bp, synthetic construct
  source 1..120: mol_type = other DNA
ttcacatagtcctatatttcttggaggctttgttcgtttctttttattcttttttctctacacttctcttctcgcttcatttcattcatttcgtgttccatcactgataccctttcttcc

SEQ ID NO: 72646 - DNA, 120 bp, synthetic construct; identical to SEQ ID NO: 18991
  source 1..120: mol_type = other DNA

SEQ ID NO: 72647 - DNA, 120 bp, synthetic construct
  source 1..120: mol_type = other DNA
tacgcagccataaaaaaggatgagttcacgtccttaacagggatatgaatgaagctggaaacgatcattttcagcaaactatcacaagggcagaaaaccaaacaccatatgttctcactc

SEQ ID NO: 72648 - DNA, 120 bp, synthetic construct; identical to SEQ ID NO: 15093
  source 1..120: mol_type = other DNA

SEQ ID NO: 72649 - DNA, 120 bp, synthetic construct; identical to SEQ ID NO: 16368
  source 1..120: mol_type = other DNA

SEQ ID NO: 72650 - DNA, 120 bp, synthetic construct
  source 1..120: mol_type = other DNA
ttgatttcccccaattatttctatgttggcaactaatttatagtttgtttgtttttcagacagggtattgccctgtcacctaggctggagtgcagtggcgtaatcatagctcactgcagc

SEQ ID NO: 72651 - DNA, 120 bp, synthetic construct
  source 1..120: mol_type = other DNA
ttaattcctacagaacaggacattttggtactgaaatgaggtctgtacagggcagatcaccaggccatatgtgagggccaccttcaggaatgaaaaatcaaaaacaaaacaagctaagca

SEQ ID NO: 72652 - DNA, 120 bp, synthetic construct
  source 1..120: mol_type = other DNA
caagaaagctggcctaaatgtaatatgtcaagctggagaaattctgctgactccgggataaataactgagttcctgaccatatgaaacttaccgtcttgcaggggaagtggacagataaa

SEQ ID NO: 72653 - DNA, 120 bp, synthetic construct; identical to SEQ ID NO: 7180
  source 1..120: mol_type = other DNA

SEQ ID NO: 72654 - DNA, 120 bp, synthetic construct; identical to SEQ ID NO: 2742
  source 1..120: mol_type = other DNA

SEQ ID NO: 72655 - DNA, 120 bp, synthetic construct
  source 1..120: mol_type = other DNA
ccaatatggtgaaaccccatctctactaaaaatacaaaaattagccggacgtggtagcacatgcctgtagtcccagctactctggaggctgagacaggagaattgcttgaactcgggcag

SEQ ID NO: 72656 - DNA, 120 bp, synthetic construct; identical to SEQ ID NO: 31003
  source 1..120: mol_type = other DNA

SEQ ID NO: 72657 - DNA, 120 bp, synthetic construct; identical to SEQ ID NO: 31004
  source 1..120: mol_type = other DNA

SEQ ID NO: 72658 - DNA, 120 bp, synthetic construct
  source 1..120: mol_type = other DNA
gagccactgcgcccagcctagttcatcttttttacttgcttttgtattcatctaagatcctcttctttttttttttttttttttttttgagatggagtctcgctctgtcgcccaggcggg

SEQ ID NO: 72659 - DNA, 120 bp, synthetic construct; identical to SEQ ID NO: 3256
  source 1..120: mol_type = other DNA

SEQ ID NO: 72660 - DNA, 120 bp, synthetic construct
  source 1..120: mol_type = other DNA
ggatataaaattttataaaattaaaaacaatttaaaaatattctttattattccctggtttggaacccccccccccaccccctcaccccctgcgttcttcccccgcgttcttctggctaa

SEQ ID NO: 72661 - DNA, 120 bp, synthetic construct; identical to SEQ ID NO: 24821
  source 1..120: mol_type = other DNA

SEQ ID NO: 72662 - DNA, 120 bp, synthetic construct
  source 1..120: mol_type = other DNA
ttgagaagtgtctgttcatatcctttgcccactttctgatggggttgtttgtttttttcttgtaaatttgtttgagttcattgtagattctggatattagccctttgtcagatgagtagg

SEQ ID NO: 72663 - DNA, 120 bp, synthetic construct
  source 1..120: mol_type = other DNA
ggctctctgtctgttgttggtgtgtaagaatgcttgtgatttttgtacattgattttgtatcctgagactttgctgaagttgcttatcagcttaaggagattttgggctgagacgatggg

SEQ ID NO: 72664 - DNA, 120 bp, synthetic construct
  source 1..120: mol_type = other DNA
attcagagattcaacttcttcctggtttagtcttgggagagtgtatgtgtccaggaatttatccatttcttctagattttctagtttatttgcgtagaggtgtttgtagtattccctgat

SEQ ID NO: 72665 - DNA, 120 bp, synthetic construct
  source 1..120: mol_type = other DNA
ccattattaatgtgtgggagtctaagtctctttgtaggtcactcaggacttgctttatgaatcttggtgctcctgtattgggtgcatatatatttaggatagttagctcttcttgttgaa

SEQ ID NO: 72666 - DNA, 120 bp, synthetic construct
  source 1..120: mol_type = other DNA
atttcctgaatctgaacgttggcctgccttgctagattggggaagttctcctggataatatcctgcagagtgttttccaagttggttccattctccccatcactttcaggtacaccaatc

SEQ ID NO: 72667 - DNA, 120 bp, synthetic construct
  source 1..120: mol_type = other DNA
gtttgagcttccaggctgctttgtttacctaatcaagcctgggcaatggcgggctcccctcccccagcctcgctgctgccttgcagtttgatctcagactgctgtgctagcaatcagcga

SEQ ID NO: 72668 - DNA, 120 bp, synthetic construct; identical to SEQ ID NO: 24822
  source 1..120: mol_type = other DNA

SEQ ID NO: 72669 - DNA, 120 bp, synthetic construct; identical to SEQ ID NO: 24823
  source 1..120: mol_type = other DNA

SEQ ID NO: 72670 - DNA, 120 bp, synthetic construct
  source 1..120: mol_type = other DNA
gtaaccgatgcaatcaactggaagaaattgtatcagcaatggaagacgaaatgaatgaaatgaagcgtgaagaaaagtttagagaaaaaagaatgaaaaggaacaaacaaagcctccaag

SEQ ID NO: 72671 - DNA, 120 bp, synthetic construct
  source 1..120: mol_type = other DNA
agatcaaaagagacaaagaaggccattacataatggtaaagggatcaattcaacaagaagaactaactatcctaaatatatatgcacccaatacaggagcacgcagattcgtaaagcaag

SEQ ID NO: 72672 - DNA, 120 bp, synthetic construct
  source 1..120: mol_type = other DNA
taaactagaaaatctagaagaaatggataaattccttgacacatacaccctcccaagactaaacaaggaagaaactgaatctctgaatagaccaataacaggctctgaaattgaggcaat

SEQ ID NO: 72673 - DNA, 120 bp, synthetic construct
  source 1..120: mol_type = other DNA
aaacagagagccaaatcatgagggaactcccattcacaattgcttcaaaggaataaaatacctaggaatccaacttacaagggatgtgaaggacctcttcaaggagaactacaaatcaca

SEQ ID NO: 72674 - DNA, 120 bp, synthetic construct
  source 1..120: mol_type = other DNA
acacttctcaaaagaagacatttatgcagccaaaaaacacatgaaaaaatgctcatcatcactggccatcagagaaatgcaaatcaaaaccacaatgagatactatctcacaccagttag

SEQ ID NO: 72675 - DNA, 120 bp, synthetic construct; identical to SEQ ID NO: 31598
  source 1..120: mol_type = other DNA

SEQ ID NO: 72676 - DNA, 120 bp, synthetic construct; identical to SEQ ID NO: 31599
  source 1..120: mol_type = other DNA

SEQ ID NO: 72677 - DNA, 120 bp, synthetic construct; identical to SEQ ID NO: 31600
  source 1..120: mol_type = other DNA

SEQ ID NO: 72678 - DNA, 120 bp, synthetic construct
  source 1..120: mol_type = other DNA
tgcgaaaattttctcccatgttgtaggttgcctgttcactctgatggtagtttcttttgctgtgcagaagctctttagtttaattagatcccatttgtcaattttgtcttttgttgccat

SEQ ID NO: 72679 - DNA, 120 bp, synthetic construct
  source 1..120: mol_type = other DNA
aattacgaatgggagttcacccatgatttggctctctgtttgtctgttgttggtgtataagaatgcttgtgatttttgtacattgattttgtatcctgagactttgctgaagttgcttat

SEQ ID NO: 72680 - DNA, 120 bp, synthetic construct
  source 1..120: mol_type = other DNA
atttcagagcctgttattggtctattcagagattcaacttcttcctggtttagtcttgggagagtgtatgtgtcgaggaatgtatccatttcttctagattttctagtttatttgcgtag

SEQ ID NO: 72681 - DNA, 120 bp, synthetic construct
  source 1..120: mol_type = other DNA
taaagcaagtcctcagtgacctacaaagagacttagactcccacacattaataatgggagactttaacaccccactgtcaacattagacagatcaacgagacagaaagtcaacaaggata

SEQ ID NO: 72682 - DNA, 120 bp, synthetic construct
  source 1..120: mol_type = other DNA
gaagcgagaagggaagtttagagaaaaaagaataaaaagaaatgagcaaagcctccaagaaatatgggactatgtgaaaagaccaaatctacgtctgattggtgtacctgaaagtgatgt

SEQ ID NO: 72683 - DNA, 120 bp, synthetic construct
  source 1..120: mol_type = other DNA
gtgggatatagtctcgtggtgcgccgtttcttaagccggtctgaaaagcgcaatattcgggtgggagtgacccgattttccaggtgcgaccgtcacccctttctttgactcagaaaggga

SEQ ID NO: 72684 - DNA, 120 bp, synthetic construct; identical to SEQ ID NO: 31601
  source 1..120: mol_type = other DNA

SEQ ID NO: 72685 - DNA, 120 bp, synthetic construct
  source 1..120: mol_type = other DNA
gtttttttcttgtaaatttgtttgagttcattgtagattctggatattagccctttgtcagatgagtagattgcaaaaattttctctcattctgtaggttgcctgttcactctgacggta

SEQ ID NO: 72686 - DNA, 120 bp, synthetic construct
  source 1..120: mol_type = other DNA
tgggggctggcctctagtccggccccgggagcggctgacctttcccccaaaagctttgtgccgatttctccattttcccgcggagatggggacgggagcccggccccccaacccattttc

SEQ ID NO: 72687 - DNA, 120 bp, synthetic construct; identical to SEQ ID NO: 3230
  source 1..120: mol_type = other DNA

SEQ ID NO: 72688 - DNA, 120 bp, synthetic construct; identical to SEQ ID NO: 11727
  source 1..120: mol_type = other DNA

SEQ ID NO: 72689 - DNA, 120 bp, synthetic construct; identical to SEQ ID NO: 11728
  source 1..120: mol_type = other DNA

SEQ ID NO: 72690 - DNA, 120 bp, synthetic construct; identical to SEQ ID NO: 11729
  source 1..120: mol_type = other DNA

SEQ ID NO: 72691 - DNA, 120 bp, synthetic construct; identical to SEQ ID NO: 11730
  source 1..120: mol_type = other DNA

SEQ ID NO: 72692 - DNA, 120 bp, synthetic construct
  source 1..120: mol_type = other DNA
ggaccaaggagatggagagagaaagtgaacaaatcggggagtcagtcaacatcgatgagaaagggggagacatcggggaggggggagagactccggattaggaggcaggttggtgcccac

SEQ ID NO: 72693 - DNA, 120 bp, synthetic construct
  source 1..120: mol_type = other DNA
caacacagcctcactgttggggggatggagaaacgccgccgggatcatttcctcctctctggtgttttccgcgggaggggagcagtgaaatggggggcggctgagacatcaaatatggaa

SEQ ID NO: 72694 - DNA, 120 bp, synthetic construct; identical to SEQ ID NO: 19908
  source 1..120: mol_type = other DNA

SEQ ID NO: 72695 - DNA, 120 bp, synthetic construct; identical to SEQ ID NO: 19909
  source 1..120: mol_type = other DNA

SEQ ID NO: 72696 - DNA, 120 bp, synthetic construct
  source 1..120: mol_type = other DNA
caacatggtaaaaccccatctctactaaaaatataaaaaattggctgggtgtggtggctcatgcctgtaatcccagcactttgggaggtcaaagtgggcagatcacaaggtcaagagatt

SEQ ID NO: 72697 - DNA, 120 bp, synthetic construct
  source 1..120: mol_type = other DNA
agtgagaacatgcggtgtttggttttctgttcctgtgttagtttggattagcacaatggttttatttatttatttttttattattatactttaagttttagggtacatgagcacaacgtg

SEQ ID NO: 72698 - DNA, 120 bp, synthetic construct
  source 1..120: mol_type = other DNA
gttgcaaaaattttctcccattttgtaggttgcctgttcactctgatgggagtttcttttgctgtgcagaagctctttagtttaattagatcccatttgtcaattttggcttttgttgcc

SEQ ID NO: 72699 - DNA, 120 bp, synthetic construct
  source 1..120: mol_type = other DNA
agagtttgctgaagttgcttatcagcttaaggagattttgggctaagagaatggggttttctagatatacaatcatgtcatctgcaaacagggacaatttgacttcctcttttcctaatt

SEQ ID NO: 72700 - DNA, 120 bp, synthetic construct; identical to SEQ ID NO: 29971
  source 1..120: mol_type = other DNA

SEQ ID NO: 72701 - DNA, 120 bp, synthetic construct
  source 1..120: mol_type = other DNA
agtataatgccttaaaccaactggttattcttattgggcatcttctaaagtggatgtcctcttcccaacctaattcttgggaaccctcctgttgtcacttggcccaagaagttcttgtac

SEQ ID NO: 72702 - DNA, 120 bp, synthetic construct
  source 1..120: mol_type = other DNA
cacttgtttatctgctgaccttccctccactattgtcccatgaccctgccaaatccccctctgtgagaaacacccaagaattatcaataaaaaaataaatttaaaaaaaaaaaaaaaaaa

SEQ ID NO: 72703 - DNA, 120 bp, synthetic construct; identical to SEQ ID NO: 22970
  source 1..120: mol_type = other DNA

SEQ ID NO: 72704 - DNA, 120 bp, synthetic construct
  source 1..120: mol_type = other DNA
gcaggaaggagaagtgctgagcaaaagggggaaaagtcccttataaatccatcagatctcatgagaattcactcactgtcatgagaacagcatggaggtaacccccacatgattcaatca

SEQ ID NO: 72705 - DNA, 120 bp, synthetic construct; identical to SEQ ID NO: 22971
  source 1..120: mol_type = other DNA

SEQ ID NO: 72706 - DNA, 120 bp, synthetic construct; identical to SEQ ID NO: 22972
  source 1..120: mol_type = other DNA

SEQ ID NO: 72707 - DNA, 120 bp, synthetic construct; identical to SEQ ID NO: 22973
  source 1..120: mol_type = other DNA

SEQ ID NO: 72708 - DNA, 120 bp, synthetic construct; identical to SEQ ID NO: 22974
  source 1..120: mol_type = other DNA

SEQ ID NO: 72709 - DNA, 120 bp, synthetic construct; identical to SEQ ID NO: 22975
  source 1..120: mol_type = other DNA

SEQ ID NO: 72710 - DNA, 120 bp, synthetic construct
  source 1..120: mol_type = other DNA
gtgcttgtgacaagtatggaaatgtcatgcctttaggttcagtcctataaggtaggtgtatcagtaagggcattgattctgcgaccttaacagagatcagaataacagtggcttaaggaa

SEQ ID NO: 72711 - DNA, 120 bp, synthetic construct
  source 1..120: mol_type = other DNA
aaagggcgtcaccgctgtggtgttagacaggatcatcctgggcattaaggttccactgctgcagctcaaacttcccaggcacacctcttaaaggaaaaatgcaaccccaaatcaaaaagt

SEQ ID NO: 72712 - DNA, 120 bp, synthetic construct
  source 1..120: mol_type = other DNA
ttccattcactactctctggctatgcagaaagtgacattttccctatcgtttaatcttgatatcactgtccctgtatactcagagtgggcctgggaattggaaaaattgtctccaagtag

SEQ ID NO: 72713 - DNA, 120 bp, synthetic construct
  source 1..120: mol_type = other DNA
atcatcttgtgtaggacaaataacctcagaaacctagctcctctccagcttagacccagagctatttcttcattgaattggtttaattgtaaaacataccctgaacccagcaccagctga

SEQ ID NO: 72714 - DNA, 120 bp, synthetic construct
  source 1..120: mol_type = other DNA
gaatgtttatcgaatagatgccaccagaacttaataccttttgaccagtggggcttgactctttataacctgcttactccaatgaacagatgccaatgagctgtctccgaagctctaact

SEQ ID NO: 72715 - DNA, 120 bp, synthetic construct
  source 1..120: mol_type = other DNA
tcataatagtgagttcactgagaaggcttgttacttagatccagatggactttcttatgtccaaagaagcaaccaaaaacatctgctttgaaaacctcccaagcccaaaccatcctcagc

SEQ ID NO: 72716 - DNA, 120 bp, synthetic construct
  source 1..120: mol_type = other DNA
ttaaaacttcacatgtaatttattgcattgcttttgctaaatgtcctccacacccccaatgcctgctaggctgggtcgccatggtatttttgtgtaacgagtctcaaaatgagtttggca

SEQ ID NO: 72717 - DNA, 120 bp, synthetic construct
  source 1..120: mol_type = other DNA
gtttctgcttctgcctgggtgtgagatgtgaatgctgcccctactgaagggtagtgcaattttttttttttcttaaaagcttagacccagagctgctaatctactggaaatcactcagga

SEQ ID NO: 72718 - DNA, 120 bp, synthetic construct
  source 1..120: mol_type = other DNA
atcctagataaactagagggctccttaacttacttccctaggttgactctgggtttttttatcacgctcgacaggactccttatgcatttcttcgaaagagcatccagtcttaacatcat

SEQ ID NO: 72719 - DNA, 120 bp, synthetic construct
  source 1..120: mol_type = other DNA
ttgttttatgtttgctgttctcgctgtaggtgaggcattcccaccatattcccttgttaaaatcctactggcccttcaaatgccagctcatatccacactgtgtctgaccctgatccaga

SEQ ID NO: 72720 - DNA, 120 bp, synthetic construct
  source 1..120: mol_type = other DNA
ataaagttttcttaactgtgatgttgattgttcaacgtttgtctttcccaccaaaatgtaagctattgcgggcagggatctttgcatgggttgttcttcattgcatcccaggccactaga

SEQ ID NO: 72721 - DNA, 120 bp, synthetic construct
  source 1..120: mol_type = other DNA
cttaataatggaggaatgttttcgttgttctgtgttggtgagatgctttcctatgcgtttgttgtataagtaagtgagaatggcagaaggaaaggaggggagaggctgatcatcctatcc

SEQ ID NO: 72722 - DNA, 120 bp, synthetic construct
  source 1..120: mol_type = other DNA
catgcaatgatgcaggtgacttcccagcaaatttcatagcgttgctcaccagcttggcaggcaagaggagaaggggcagtccccaaaagacaatcccatgaaccttctagggaatgacgt

SEQ ID NO: 72723 - DNA, 120 bp, synthetic construct
  source 1..120: mol_type = other DNA
ctacatagtagaatattatgtggagtccttaaaatgtttacaaataatttataacaacatggggccgggcacagtggcttacacctgtaattccagcactttgggaggccaaggtgggtg

SEQ ID NO: 72724 - DNA, 120 bp, synthetic construct
  source 1..120: mol_type = other DNA
ctttatctgaaaattccctggattcttctcctcaaggtcatgctgtacatatgcaggatcctcctgcctacatctccaaatggataatggattgaagcaaaatgtttgtcccaccaaaca

SEQ ID NO: 72725 - DNA, 120 bp, synthetic construct
  source 1..120: mol_type = other DNA
tgtgacatcaaagccaaagctccagccacttctcatcctttcttaggaaaatctcaagtcttaacttgaaagttgaatgtcctgcttttgttcctaactctgctcacaggatagtggaag

SEQ ID NO: 72726 - DNA, 120 bp, synthetic construct
  source 1..120: mol_type = other DNA
gtctcttctgtcctccttctttgaccaacatttccctgtctgatttgcttggtcacaggtagcctgtgtcagtttcctcccaggactctctttgcctgggaataagtgctatacatgaga

SEQ ID NO: 72727 - DNA, 120 bp, synthetic construct
  source 1..120: mol_type = other DNA
tttttttcagattcttcttgggaattagagaaaaacttatggctctcctccaccatcctgcccccacctaccccaatgcacacatgtgcaacatttgttctacaattcaagagctctcta

SEQ ID NO: 72728 - DNA, 120 bp, synthetic construct
  source 1..120: mol_type = other DNA
ggaagtctggatggatgtgggttggcatggtcctctatgggcattaaatgaataaatggatatagcagagggagtatccagcatgactcaaagaaggatgagaggaaacatattcaaata

SEQ ID NO: 72729 - DNA, 120 bp, synthetic construct
  source 1..120: mol_type = other DNA
acaaattctatcaaatgattggcctttcagctctctactgtgaccagaaagttgcccagtacataaaaaggggttcacaggtatttctcacgtggataactggtgactcatctatccatg

SEQ ID NO: 72730 - DNA, 120 bp, synthetic construct
  source 1..120: mol_type = other DNA
ctcaatgagttcatgctttgatcgatctctcagctctgaacacaaagccatgacaggtaggtataaaaatagaaagctaaaaagagatgtctggctcaacagaagcagaagagacactgc

SEQ ID NO: 72731 - DNA, 120 bp, synthetic construct
  source 1..120: mol_type = other DNA
aaccagcattgctttgcaggccccgtttacacagcacctcacaggttaaggcccactgtaatttttgccagccagtggtgacagcctggagtcagcctgagatggactgagctctcgtgg

SEQ ID NO: 72732 - DNA, 120 bp, synthetic construct
  source 1..120: mol_type = other DNA
tgagatggctgaaatgacagaagtaggcttcagaaggtggctaataatgaacgtcactgagctaaaggagcattttgtaacattaaaaagtggggaaacgacatgaacagacacttctca

SEQ ID NO: 72733 - DNA, 120 bp, synthetic construct
  source 1..120: mol_type = other DNA
ttcatagatgaaaacaattcacatttgctaaaatgtatcctattaatactaacggttgtacttcagccataagaaaagaggacagaagggaatgtgtgaaagtcagtattaaatggtagt

SEQ ID NO: 72734 - DNA, 120 bp, synthetic construct
  source 1..120: mol_type = other DNA
tcttatcaattcccttaaggggaactgagttgtagggagccatttaacacacttctctcagcaactggtagatctgccctccccaacatagtaagcatatagaatatttgagtgatgaaa

SEQ ID NO: 72735 - DNA, 120 bp, synthetic construct
  source 1..120: mol_type = other DNA
tgcagttagaggctgagaagtacagaagaaagtgaacagagcagaagtgatatttgaagagatagggactgagaattttccaaaaactgattttaaaaatgaagccatgggtgaaagaag

SEQ ID NO: 72736 - DNA, 120 bp, synthetic construct
  source 1..120: mol_type = other DNA
tttgtgagatgcagcaaaagcagtgtttagaggaaaagttgtagcattaaatgcatatgttagaaatgaggaaagatctaaaattaacaatcagctttcagcatggaaaactgaagaaga

SEQ ID NO: 72737 - DNA, 120 bp, synthetic construct
  source 1..120: mol_type = other DNA
acagctaacatcatccttgatggtgagaaactgaatgttttctccttaagatcaggaattagaccaagatgtccctctcacaactcctattcaacattatactggaagttctagcttgtg

SEQ ID NO: 72738 - DNA, 120 bp, synthetic construct
  source 1..120: mol_type = other DNA
gagatatttcatgtccttggattggaagactcaatgttatttaaaagacaattcactgtaacttgatctatagattcaacataatctccccaaattccagcaagctactttgtgcatatc

SEQ ID NO: 72739 - DNA, 120 bp, synthetic construct
  source 1..120: mol_type = other DNA
tgaaaccaggagtttgaagctattgtaggctatgatgtgcctgtgaacggccactgcactccagactgggcaacatagtgagagctcatctttaaaataaataaacaaatgaataaataa

SEQ ID NO: 72740 - DNA, 120 bp, synthetic construct
  source 1..120: mol_type = other DNA
taatagtctggaaaatgcaaaactgtagagactcgaaagtgatcagtgagttccagggttaaggtggagggtagagggtgaataggtgaactgcaggtaatttttagggcagtaagatta

SEQ ID NO: 72741 - DNA, 120 bp, synthetic construct
  source 1..120: mol_type = other DNA
acaggaccaaacaaaacattgatcagggtctgtcaaaggagcacagatgccagctaaaagagttcccaatggccaaagctggaacactttgcggtaataaagtagtattggattataacc

SEQ ID NO: 72742 - DNA, 120 bp, synthetic construct
  source 1..120: mol_type = other DNA
tgctcactactacacaaaaaaagcaaagattagtctcttgagtataaaattgagcagaagaagccagacacagcctgcaagctccaactccattcataaagagtttgcaaactggcagcg

SEQ ID NO: 72743 - DNA, 120 bp, synthetic construct
  source 1..120: mol_type = other DNA
atcgcttgaacccgggaggcacagattgcagtgagccaagatcgtgccattgcacttcagcctgggtgacagagcaagactccatctcaaaataaataaatgaacaaataaataaacaaa

SEQ ID NO: 72744 - DNA, 120 bp, synthetic construct
  source 1..120: mol_type = other DNA
tggttctaactcgaagactaatgacctttgcatttcaccagccccaccttgttaatctcatatctttcaagacatgtacactttgggaggccgaggcgggtggatcatgaggtcaggaga

SEQ ID NO: 72745 - DNA, 120 bp, synthetic construct
  source 1..120: mol_type = other DNA
ggttgaggctgtagcaagctatgattatgccactgcactccagccatggtgacagagcaagacctcatttcaaaaaaaaaaaaaaaaatccaagtctagatgtgaccaggtatgtggaat

SEQ ID NO: 72746 - DNA, 120 bp, synthetic construct
  source 1..120: mol_type = other DNA
tgacgttatgacacagggttttgaaattacagctatttgagaacaaaagaaaggcagtattgcatgactcagttcccaagcttaactttccctttggcatagtgagtttagggtcctgcg

SEQ ID NO: 72747 - DNA, 120 bp, synthetic construct
  source 1..120: mol_type = other DNA
ccaaagcctcacactcgatgctccgagtttagggacttctatcaagtaaattgggaaatgggtcgttctcctttgaagactgttaggaaagagggacaaaaacggaaaaaaaaaaaaatc

SEQ ID NO: 72748 - DNA, 120 bp, synthetic construct
  source 1..120: mol_type = other DNA
aaaaagtgccaagaaactctgtaccctaacatagccctgttagaattacttagcactaatagttgcctttgctgagtgatgcaagcagatgtctctggccctcaaagatgaggagacact

SEQ ID NO: 72749 - DNA, 120 bp, synthetic construct
  source 1..120: mol_type = other DNA
tgaattctttctcctactctccacttgtggtagtcagtcttttgcatttaagggtcaaaaataagaaggcctattgtgtttccaaggctggggtccatagtgcatacgataggtttcaga

SEQ ID NO: 72750 - DNA, 120 bp, synthetic construct
  source 1..120: mol_type = other DNA
ttaactcgtcattttttttgttttgctttttgttttgttctgttttttttgagacggagtctcgctctgtcgccaaggctggagggcagtggcacaatcttggctcactttaagctccac

SEQ ID NO: 72751 - DNA, 120 bp, synthetic construct
  source 1..120: mol_type = other DNA
aaaaacttggagatgccagcacctgtgaagccccaaagggggtgttacatcatgtcacagcactggctccagaagctctgaggtctagatgtccagaagggttgcagctcttttctcctt

SEQ ID NO: 72752 - DNA, 120 bp, synthetic construct
  source 1..120: mol_type = other DNA
ccactgcactccagcctgggcaacagagtgagaccctgtctcaaaacaaaacaaaatcaaacaaacaaaaaaagatgttatctttagtttttacagggagccaaacatcccatgattctc

SEQ ID NO: 72753 - DNA, 120 bp, synthetic construct
  source 1..120: mol_type = other DNA
tcatttcgtatatttttggacaggttttctagattggcagattttattttaaatttccgcaacagcagcaagtcctagcatacctcaacatcatcccaggaacaccccacccttggggag

SEQ ID NO: 72754 - DNA, 120 bp, synthetic construct
  source 1..120: mol_type = other DNA
actgcactccagccagggcaatagtccgagactccatcttaaaaaaaaaaaaaaaaaaaaaaaaaaggcacccctaacaagagccaacagtctctgttgagaccttcctacccttcaaga

SEQ ID NO: 72755 - DNA, 120 bp, synthetic construct
  source 1..120: mol_type = other DNA
ccatcaggacacatgatgacagcccatccctgctggcattgctcactttgataatttagggaaggtgacagtcaccgtatctttcatagtaaacgtgcattttccttctcaaaattagta

SEQ ID NO: 72756 - DNA, 120 bp, synthetic construct
  source 1..120: mol_type = other DNA
ctggtcatgtttggttacttggataagttctttagtggtgatttctgatgttttggtgaacctgtcacccaagcagtgtacactgtacccaatgtgtagcctttttttccctcaaccccc

SEQ ID NO: 72757 - DNA, 120 bp, synthetic construct
  source 1..120: mol_type = other DNA
gcttttgggttcttggtcatgaacactttgcctaagccaatgtctagaagagttttgccaatgttatcttctagaattgttatggtttcaggtcttagttttaagtctttgatccatctt

SEQ ID NO: 72758 - DNA, 120 bp, synthetic construct
  source 1..120: mol_type = other DNA
gacttcctctttattgatttagatgccctttatttctttttcttgtcttactgctctgtctaggacttccagtactatgttgaatagaagtggtgaaagtaggcatccttgtcttgttcc

SEQ ID NO: 72759 - DNA, 120 bp, synthetic construct
  source 1..120: mol_type = other DNA
acatttcatttagttctgctatgatctttgttatttcttttcttctgctgggtttgagtttagtttgttcttgtttctctagttccttgagggtgtgaccttagattgtctatttgtgct

SEQ ID NO: 72760 - DNA, 120 bp, synthetic construct; identical to SEQ ID NO: 19259
  source 1..120: mol_type = other DNA

SEQ ID NO: 72761 - DNA, 120 bp, synthetic construct; identical to SEQ ID NO: 19260
  source 1..120: mol_type = other DNA

SEQ ID NO: 72762 - DNA, 120 bp, synthetic construct; identical to SEQ ID NO: 19261
  source 1..120: mol_type = other DNA

SEQ ID NO: 72763 - DNA, 120 bp, synthetic construct; identical to SEQ ID NO: 19247
  source 1..120: mol_type = other DNA

SEQ ID NO: 72764 - DNA, 120 bp, synthetic construct; identical to SEQ ID NO: 19248
  source 1..120: mol_type = other DNA

SEQ ID NO: 72765 - DNA, 120 bp, synthetic construct; identical to SEQ ID NO: 19249
  source 1..120: mol_type = other DNA

SEQ ID NO: 72766 - DNA, 120 bp, synthetic construct; identical to SEQ ID NO: 19250
  source 1..120: mol_type = other DNA

SEQ ID NO: 72767 - DNA, 120 bp, synthetic construct; identical to SEQ ID NO: 19251
  source 1..120: mol_type = other DNA

SEQ ID NO: 72768 - DNA, 120 bp, synthetic construct
  source 1..120: mol_type = other DNA
gaagagactcccgagtgatgagacccccaagcattccctgcggacagagcctttgtcaggagggttccctgcagacagagccttcgtcaggagggttccctgcagacagagccttcgtca

SEQ ID NO: 72769 - DNA, 120 bp, synthetic construct
  source 1..120: mol_type = other DNA
aggagggttccctgcggacagagccttcatcaggagggttccctgcggacagagcctttgtcaggagcgttcccttcatacagagcctttgttaggaggagagcctccttcaggatgtgc

SEQ ID NO: 72770 - DNA, 120 bp, synthetic construct
  source 1..120: mol_type = other DNA
ggcaagaaacctcaagtcgtactgggattatcattttccatttcagagagagggtcttcttggtgggttcttgtgccttctgctgatggtaaagctgagactctggtgactgttgacaca

SEQ ID NO: 72771 - DNA, 120 bp, synthetic construct
  source 1..120: mol_type = other DNA
tgagctcttactggcaagctaactaatgccattttgttagactgtctttccctcactccttccttttcatttgactttttccccctaaaatctctaatgaatcacacgcttgggtcgagt

SEQ ID NO: 72772 - DNA, 120 bp, synthetic construct; identical to SEQ ID NO: 19255
  source 1..120: mol_type = other DNA

SEQ ID NO: 72773 - DNA, 120 bp, synthetic construct; identical to SEQ ID NO: 19256
  source 1..120: mol_type = other DNA

SEQ ID NO: 72774 - DNA, 120 bp, synthetic construct; identical to SEQ ID NO: 19257
  source 1..120: mol_type = other DNA

SEQ ID NO: 72775 - DNA, 120 bp, synthetic construct; identical to SEQ ID NO: 19258
  source 1..120: mol_type = other DNA

SEQ ID NO: 72776 - DNA, 120 bp, synthetic construct; identical to SEQ ID NO: 19262
  source 1..120: mol_type = other DNA

SEQ ID NO: 72777 - DNA, 120 bp, synthetic construct; identical to SEQ ID NO: 19263
  source 1..120: mol_type = other DNA

SEQ ID NO: 72778 - DNA, 120 bp, synthetic construct
  source 1..120: mol_type = other DNA
tgcttttgattgggttcttcattgttaacaattcatatagttgggtctgtgtctgcttttgattgggttgttcactccattcatatctaatgttatgatcgatatagttgggtctgtgtc

SEQ ID NO: 72779 - DNA, 120 bp, synthetic construct
  source 1..120: mol_type = other DNA
tgggttgttccctccgttcataacgattgaaatagttgggtctgtgtctgcctttgattgggttgttcatgccattaataacgatatagttgggtctgtatctgcttttgattgggttct

SEQ ID NO: 72780 - DNA, 120 bp, synthetic construct
  source 1..120: mol_type = other DNA
ttcacatggcttaaatcacatgattttaaaaaaagaatatagaaagaaaggtctcaggccaggcatggtggcttatacttgtaatcccagcactttgggaggccaaggtgggagtatagc

SEQ ID NO: 72781 - DNA, 120 bp, synthetic construct
  source 1..120: mol_type = other DNA
gggaagatcacttgagatcaagagcttgagaccaggcctggccaacatagtgaaaccccatgtctactaaaaatataaaagttagccaggcgtggtggtgtgcacctttaatgccagcta

SEQ ID NO: 72782 - DNA, 120 bp, synthetic construct
  source 1..120: mol_type = other DNA
atgtctctttttaaataagaaaagcaaacactttacttgaaataattagaaatttacaagaagctttgggagaccgaggcaggcggatcacctgaggtcaggagttcgagaccagcctgg

SEQ ID NO: 72783 - DNA, 120 bp, synthetic construct
  source 1..120: mol_type = other DNA
aagccactgctatagactaaaagtttgtgtcccttgaaaattcatacagcatggtactggtatcaaaacagagatatggatcaatggaacagaacagaggcctcagaaataatgccacat

SEQ ID NO: 72784 - DNA, 120 bp, synthetic construct
  source 1..120: mol_type = other DNA
ctcagggatctggaactagaaataccatttgacccagtcatcccattactgggtatatacccaaaggactataaatcatgctgctataaagacacatgcacacgtatgtttattgtggca

SEQ ID NO: 72785 - DNA, 120 bp, synthetic construct
  source 1..120: mol_type = other DNA
ataatgaaatgaagacagaaataaggatgttctttgaaaccaatgagaacaaagacacaacataccagaatctctgggacacattcaaagcagtgtgtagagggaaatttatagcactaa

SEQ ID NO: 72786 - DNA, 120 bp, synthetic construct
  source 1..120: mol_type = other DNA
acccacagccaatatcacactgaatgggcaaaaactggaagcattccctttcaaaactggcacaacacagggatgccttctctcaccactcctattcaacatagtgttggaagttctggc

SEQ ID NO: 72787 - DNA, 120 bp, synthetic construct
  source 1..120: mol_type = other DNA
tggctagccatatgtagaaagctgaaactggatcccttccttacaccttacacaaaaattaattcaagatggattaaagacttgcatgttagacctacaaccataaaaaccctagaagaa

SEQ ID NO: 72788 - DNA, 120 bp, synthetic construct
  source 1..120: mol_type = other DNA
gcagccataaaaaatgatgagttcatgtcctttgtagggacatggatgaagctggagaccatcattctcagcaaactatcacaaggacaaaaaaccaaacaccgcatgttctcactcata

SEQ ID NO: 72789 - DNA, 120 bp, synthetic construct
  source 1..120: mol_type = other DNA
tatgcagacaaaaaacacatgaaaaaatgctcaccatcactggccaacagagaaatgcaaatcaaaaccacaatgagataccatctcacaccagttagaatggcaatcattaaaaagtca

SEQ ID NO: 72790 - DNA, 120 bp, synthetic construct; identical to SEQ ID NO: 9327
  source 1..120: mol_type = other DNA

SEQ ID NO: 72791 - DNA, 120 bp, synthetic construct; identical to SEQ ID NO: 9328
  source 1..120: mol_type = other DNA

SEQ ID NO: 72792 - DNA, 120 bp, synthetic construct
  source 1..120: mol_type = other DNA
ccaacccaaatgtccatcaatgatagactagattaagaaaatgtggcacatacaatgagataccatctcacaccagttggaatggcgattattaaaaagtcaagaaacaacaggtgctgg

SEQ ID NO: 72793 - DNA, 120 bp, synthetic construct
  source 1..120: mol_type = other DNA
aataccatttgacccagccatcccattactgggtatatacccaaaggattataaaacatgctcctataaagacacatgcacatgtatgtttattgtggcactattcacaatagcaaagac

SEQ ID NO: 72794 - DNA, 120 bp, synthetic construct; identical to SEQ ID NO: 9329
  source 1..120: mol_type = other DNA

SEQ ID NO: 72795 - DNA, 120 bp, synthetic construct
  source 1..120: mol_type = other DNA
actgtctgggaagtgaagaacgcctctgcccgccctcccccaccccacccaaccccagtctgggaagtgaggagcgcctctgcttggctgcccaccatctgggaagtgaggagtgcctct

SEQ ID NO: 72796 - DNA, 120 bp, synthetic construct
  source 1..120: mol_type = other DNA
aagcgaggagtgcctctgcttggccgccccaccgtctgggaagcaaggagctcctctgccccgccgctgtgcaactctccaagtatgaagtgacagccttgtgtgtgatctttctgccct

SEQ ID NO: 72797 - DNA, 120 bp, synthetic construct
  source 1..120: mol_type = other DNA
tcagcatcttcattaattattcatatgatccttaattattatccttaacaataagagcagtaaatagcagaaaagtccttgaggtgcctaaggcccagggccgggtgcctccgggcagtt

SEQ ID NO: 72798 - DNA, 120 bp, synthetic construct
  source 1..120: mol_type = other DNA
tttgtgggtactgagcgtctgctggtgagagctctgcgggggcggctgcgaagggagactggcacatttgctgacgtgggccctcgtgtctgcaaacaggagcaggcagcatatgggagg

SEQ ID NO: 72799 - DNA, 120 bp, synthetic construct
  source 1..120: mol_type = other DNA
caaagcaggtttgggctggaatcggggaacaagcgggtcacggtacatcgaggaagcagggctggagcttacctgagaaagcgagtccaaggtgagggtggggagggggctgacgggcaa

SEQ ID NO: 72800 - DNA, 120 bp, synthetic construct
  source 1..120: mol_type = other DNA
ccggccccggctactcggccctgcccccgcccggcccggccccaaggccgacacctcccctggctgctccgtgtctgtgggaaacagagaatgggcctcagagaggggaggagaacagag

SEQ ID NO: 72801 - DNA, 120 bp, synthetic construct
  source 1..120: mol_type = other DNA
ccaatgtgattttgccccaggcaaagactgagtttgggacttttgtaggctgctctatgataccatttgacagacagggaaactgagacagagaagcatcacattcaatgtcacacagca

SEQ ID NO: 72802 - DNA, 120 bp, synthetic construct; identical to SEQ ID NO: 30291
  source 1..120: mol_type = other DNA

SEQ ID NO: 72803 - DNA, 120 bp, synthetic construct; identical to SEQ ID NO: 30292
  source 1..120: mol_type = other DNA

SEQ ID NO: 72804 - DNA, 120 bp, synthetic construct
  source 1..120: mol_type = other DNA
ccaggttgtgcagccagccgatgcgtgagtccatgtgtggctgctccatgttgccgatggcgtaccagatgcaggctagccagtgcgcgatgagcgcaaaggtgcacatgagcaagaaca

SEQ ID NO: 72805 - DNA, 120 bp, synthetic construct
  source 1..120: mol_type = other DNA
gggtggctgaccacctcctcgttggcattgacgtaggtggtgcggaagttgatgaggatgtccacaatgaacatgatgtccacgatgaggtccaccacagccagcggctggcaggcgtag

SEQ ID NO: 72806 - DNA, 120 bp, synthetic construct
  source 1..120: mol_type = other DNA
tcctcatcctcccaccctcttacaaagggacaaagaagacatagcccagctgggaggagatggcacccaacttatacagagggacgtgcacacagggactgctcagcagtgacacacaca

SEQ ID NO: 72807 - DNA, 120 bp, synthetic construct
  source 1..120: mol_type = other DNA
ctgtccccccagcctgttgtcctatagaatactgaagctggcttgcttaagccaaaccctgactcctcagctgtgggtgggaagacctacctgtacctgtcccccagctggaaagagtgt

SEQ ID NO: 72808 - DNA, 120 bp, synthetic construct
  source 1..120: mol_type = other DNA
gactggcaaccagagcagcccctggcatgaagccagggtggttgtggctgggccccagggctggggtcaccctggcagtaagcgtgggcagcagcctgcctggctcgagctgcccatggc

SEQ ID NO: 72809 - DNA, 120 bp, synthetic construct
  source 1..120: mol_type = other DNA
ggctgaggggtcttctctggcccaggattcagggacctgacccttccatatctttgtacccaccacctccctatgagaagaaaacttgcttctcccatgctttagggacatagttgggcc

SEQ ID NO: 72810 - DNA, 120 bp, synthetic construct
  source 1..120: mol_type = other DNA
atagatcgagagtggagaccaggccctgcacagtcaggagtccatggggtcagctcaagagaccaggggagtcacaagaaacaagagaggtcagacccctgtcccactctaaggaagcag

SEQ ID NO: 72811 - DNA, 120 bp, synthetic construct
  source 1..120: mol_type = other DNA
tgggaaatggacccccagccgctgggtaagggaaggaggggaacgggcaaccccccatccccacttccattcacaatattttgacctcgagtctcaaaaatcattctagaatccagtcat

SEQ ID NO: 72812 - DNA, 120 bp, synthetic construct
  source 1..120: mol_type = other DNA
aaccattacatcctcccttcctgcagagcgttgaccttggacagctcacagccccaaagaaatgagaccacgaacccctgagcctgccctaaagcaagtacacttacctggggccagcca

SEQ ID NO: 72813 - DNA, 120 bp, synthetic construct
  source 1..120: mol_type = other DNA
agccgttgtgtcagcacacaagataaggacagacgttgagagcaagaatttcaaaaactttacagcaatttggcatcaccacaaaatccacgcatgtgctcttgtatttcacagatgtac

SEQ ID NO: 72814 - DNA, 120 bp, synthetic construct
  source 1..120: mol_type = other DNA
gtagctgggactacagctgcatgctaccacacccagctaacttttgtatattttgatagagacagggttttcactgtgttggccaggctggtctcaaactcctggcctcaagtgatctgc

SEQ ID NO: 72815 - DNA, 120 bp, synthetic construct
  source 1..120: mol_type = other DNA
gaacctaagtcctccaccagggagcttgcctcagagaagtctagagtctggagccaagatggactcaaacttcagaatgggctggagactgtccccaacacagggccccagaaattccaa

SEQ ID NO: 72816 - DNA, 120 bp, synthetic construct
  source 1..120: mol_type = other DNA
ttagaatgactttgggccggtcacttaccggcccagagccccggggcgctcatctgcaacacagggtgatcctgcccaccccctagggccgtaggggtgaaatggcctaagatatgtgaa

SEQ ID NO: 72817 - DNA, 120 bp, synthetic construct
  source 1..120: mol_type = other DNA
ctgcaaatcactaagcacatccgtgcctgcgaagtgttgagccaccgtgaccaacaagacacgcctggcacctgcccccagtgaaccacccatccaacaggaccccagtttgatgcatgg

SEQ ID NO: 72818 - DNA, 120 bp, synthetic construct; identical to SEQ ID NO: 30293
  source 1..120: mol_type = other DNA

SEQ ID NO: 72819 - DNA, 120 bp, synthetic construct; identical to SEQ ID NO: 30294
  source 1..120: mol_type = other DNA

SEQ ID NO: 72820 - DNA, 120 bp, synthetic construct; identical to SEQ ID NO: 30295
  source 1..120: mol_type = other DNA

SEQ ID NO: 72821 - DNA, 120 bp, synthetic construct
  source 1..120: mol_type = other DNA
gcatgccactgaatacgcacctacagactagatgtcgaacagcaacccagctggacttaaagcacattcccaagtaagaaaagcgaacaccaaaatacaacatatagcacaatatcattt

SEQ ID NO: 72822 - DNA, 120 bp, synthetic construct
  source 1..120: mol_type = other DNA
agacacagcaagtctgtaaccaagctggaaactcctgccaagtcacctgactcccagggaaggctcctgcaacgcagcacactgcccaccccattcattcattcattcagcaaacagtgc

SEQ ID NO: 72823 - DNA, 120 bp, synthetic construct
  source 1..120: mol_type = other DNA
aaggagtagatagcacccttcagttgcgtcatgcctgcctcacccctggagcaggactgggataggaagactgcagccccggcagaccaggacagacagccgcagctcaggaatgacccc

SEQ ID NO: 72824 - DNA, 120 bp, synthetic construct
  source 1..120: mol_type = other DNA
ccaacagccgcagcatcagctgttgcagtggggggccctctgaccctgttaccatggcaactggcctgcagctggagtggagaagctaatagactcctctccagagacaccaccgtcccc

SEQ ID NO: 72825 - DNA, 120 bp, synthetic construct
  source 1..120: mol_type = other DNA
ccaagccaggtcccggggatcacaggagggactgagtgtttcaaggcagaagaagcggaggctgaggaaatctgtctgcatcaccccaggcctagaatgccaggatacatggggtcctag

SEQ ID NO: 72826 - DNA, 120 bp, synthetic construct
  source 1..120: mol_type = other DNA
tcagtttcttcatcccccaaaatgaagacaacagtagtgtctacctccctgggttgtgaagagtgcctgagataagagaagtaaagcatttggcccagtgtctagcccctagaaaccatc

SEQ ID NO: 72827 - DNA, 120 bp, synthetic construct
  source 1..120: mol_type = other DNA
cgcacaactgccaatctgacctttaacctccatccacgcacgtacctgccatcccagctcggtctaactctagtccaacttgctctacgtgcccacacctgcccagggaaaaaaaggacc

SEQ ID NO: 72828 - DNA, 120 bp, synthetic construct
  source 1..120: mol_type = other DNA
gattctgcttttaatttccctgctctccagactggggggcgctccctgagccactccttatcctgaggctccctaggaaatcactccccgattatctgaggatcctaccaggtcagtacc

SEQ ID NO: 72829 - DNA, 120 bp, synthetic construct
  source 1..120: mol_type = other DNA
ttgccttttggaactggttcatcttttggccagttcccaaggccccccagacctcccaggcagccatcaattccaggagtcagggtttcctgtcacctgaaaagaccccctaactcggcc

SEQ ID NO: 72830 - DNA, 120 bp, synthetic construct
  source 1..120: mol_type = other DNA
acacatgggctcagggttatatacacacggcacacacaagaagagattatgagctgaccctgcatccacggcttttcagtccctccggcacaacacagtcaagatctggcaagaccagtg

SEQ ID NO: 72831 - DNA, 120 bp, synthetic construct
  source 1..120: mol_type = other DNA
tgggaaaattgcttgaacccaggagacagaggttgcagtgagctgaaattgctccactgcgctccagcctgggtgacaaagcaagtctctgtctaaaaataaaataaagtaaaataaaat

SEQ ID NO: 72832 - DNA, 120 bp, synthetic construct; identical to SEQ ID NO: 14382
  source 1..120: mol_type = other DNA

SEQ ID NO: 72833 - DNA, 120 bp, synthetic construct; identical to SEQ ID NO: 14383
  source 1..120: mol_type = other DNA

SEQ ID NO: 72834 - DNA, 120 bp, synthetic construct; identical to SEQ ID NO: 14384
  source 1..120: mol_type = other DNA

SEQ ID NO: 72835 - DNA, 120 bp, synthetic construct
  source 1..120: mol_type = other DNA
ggaagtcaaattgtccctgtttgcagacgacatcattgtatatctagaaaaccccatcgtctcagcccaaaatctccttaagctgataagcaacttcagcaaagtctcaggatacaaaat

SEQ ID NO: 72836 - DNA, 120 bp, synthetic construct
  source 1..120: mol_type = other DNA
ttgaaaatagatcaaagacctgaaggtaaaactaaagctagaaatttctaaaagaaaacataggatagaatcctttccccattgcttgtttttctcaagtttgtcaaagatcagatagtt

SEQ ID NO: 72837 - DNA, 120 bp, synthetic construct
  source 1..120: mol_type = other DNA
tatacaccatggaatactatgcagccataaaaaatgatgagttcatgtcctttctagggacatggatgaaattggaaatcatcattctcagtaaactatcgcaaggacaaaaaaccaaac

SEQ ID NO: 72838 - DNA, 120 bp, synthetic construct; identical to SEQ ID NO: 14386
  source 1..120: mol_type = other DNA

SEQ ID NO: 72839 - DNA, 120 bp, synthetic construct
  source 1..120: mol_type = other DNA
ccttctgaaactattccaatcaatagaaaaagagggaatcctccctaactaattttatgaggccagcatcattctgataccaaagccgggcagagacataacaaaaaaagagaattttag

SEQ ID NO: 72840 - DNA, 120 bp, synthetic construct; identical to SEQ ID NO: 14387
  source 1..120: mol_type = other DNA

SEQ ID NO: 72841 - DNA, 120 bp, synthetic construct
  source 1..120: mol_type = other DNA
catgtataacataaatgtatgacataaataattttaaaagatgctatgactttgcattctgtaaaaaatggtcatggtggataagccttttgatgtgctgctggattcggtttgccagta

SEQ ID NO: 72842 - DNA, 120 bp, synthetic construct
  source 1..120: mol_type = other DNA
gtgtccatgtagttgagtggttttgagtgagattcttaatcctgagttctagtttcattgcactgtggtctgagagatagtttgttataatttctgttcttttacatttgctgaggagag

SEQ ID NO: 72843 - DNA, 120 bp, synthetic construct
  source 1..120: mol_type = other DNA
taaaaaccacatgattatctcaatagatgcagaaaaggcctttgacaaaattcaacaactcttcatgctaaaaactctcaataaattaggtattgatgggccgtatttcaaaataataag

SEQ ID NO: 72844 - DNA, 120 bp, synthetic construct
  source 1..120: mol_type = other DNA
caaaacagagatatagatcaatggaacagaacagagccctcagaaataacgccacttatctacaactatctgatctttgacaaacctgagaaaaacaagcaatggggaaaggattcccta

SEQ ID NO: 72845 - DNA, 120 bp, synthetic construct
  source 1..120: mol_type = other DNA
taaaaaatgatgagttcacgtcctttgtagggacatggatgaaattggaaatcatcattctcagtaaactaccacaagaacaaaaaaccaaacaccgcatattctcactcataggtggga

SEQ ID NO: 72846 - DNA, 120 bp, synthetic construct; identical to SEQ ID NO: 21743
  source 1..120: mol_type = other DNA

SEQ ID NO: 72847 - DNA, 120 bp, synthetic construct; identical to SEQ ID NO: 21744
  source 1..120: mol_type = other DNA

SEQ ID NO: 72848 - DNA, 120 bp, synthetic construct; identical to SEQ ID NO: 21745
  source 1..120: mol_type = other DNA

SEQ ID NO: 72849 - DNA, 120 bp, synthetic construct; identical to SEQ ID NO: 5060
  source 1..120: mol_type = other DNA

SEQ ID NO: 72850 - DNA, 120 bp, synthetic construct; identical to SEQ ID NO: 24137
  source 1..120: mol_type = other DNA

SEQ ID NO: 72851 - DNA, 120 bp, synthetic construct; identical to SEQ ID NO: 24138
  source 1..120: mol_type = other DNA

SEQ ID NO: 72852 - DNA, 120 bp, synthetic construct
  source 1..120: mol_type = other DNA
ggtaagctattaattattgcctgaatttcagcgcctgttattggtctattcagagattcaacttcttcctggtttagttttgggagagtgtatgtgtcgaggaatttatccatttcttcc

SEQ ID NO: 72853 - DNA, 120 bp, synthetic construct
  source 1..120: mol_type = other DNA
gcagagctgagttcaattcctggatatccttgttaactttctgtctcgttgattctgttatcttgtcattcccaagtcattatgggccttgaaaccggcatagggcttcattctttgcat

SEQ ID NO: 72854 - DNA, 120 bp, synthetic construct
  source 1..120: mol_type = other DNA
aatgctatccctcccacctccccccacccaacaacagtccccagagtgtgatattccccttcctgtgtccatgtgatctcattgttcaattcccacctatgagtgagaatatgcggtgtt

SEQ ID NO: 72855 - DNA, 120 bp, synthetic construct
  source 1..120: mol_type = other DNA
aggtctaacgtttaaagtctttaatccatgttgaattgatttttgtataagatgtaaggaagggatccagtttcagctttctacatatggctagccagttttcccagcaccatttattaa

SEQ ID NO: 72856 - DNA, 120 bp, synthetic construct
  source 1..120: mol_type = other DNA
ttttcaaagggaatgcttccagtttttgcccattcagtatgatattggctgtgggtttgtcatagatagctcttattattttgaaatatgtcccatcaataccgaatttattgagagttt

SEQ ID NO: 72857 - DNA, 120 bp, synthetic construct
  source 1..120: mol_type = other DNA
tggtttcaaagaacttctttatttctgccttcatttcgttatgtacccattagtcattcaggagcaggttgttcagtttccatgtagttgagcggttttgagtgagattcttaatcctga

SEQ ID NO: 72858 - DNA, 120 bp, synthetic construct
  source 1..120: mol_type = other DNA
ttagtgcttccttcaggagctcttgtaaggcaggcctggtggtgacaaaatctctgagcatttgcttgtctgtaaagtattttatttctcccttcacttatgaagcttagtttggctgga

SEQ ID NO: 72859 - DNA, 120 bp, synthetic construct
  source 1..120: mol_type = other DNA
agctcgtcaaagtcattctccatccagctttgttccgttgctggtgaggaactccgttcctttggaggaggagaggcactctggtttttagagtttccagtttttctgttctgttttttc

SEQ ID NO: 72860 - DNA, 120 bp, synthetic construct
  source 1..120: mol_type = other DNA
agatctccagctgcgtgctgggagaaccactgctctcttcaaacctcagatggctatgggaggacattcaaatcaaaggaaaagaagttgagaactttgaaaaaaatttagaagaatgta

SEQ ID NO: 72861 - DNA, 120 bp, synthetic construct
  source 1..120: mol_type = other DNA
caaaattcaacaaccttcatgctaaaaactctcaataaattaggtattgatgtgacgtatctcaaaataataagagctatctatgacaaacccacagccaatatcatactgaatgggcaa

SEQ ID NO: 72862 - DNA, 120 bp, synthetic construct
  source 1..120: mol_type = other DNA
tacagtaaccaaaatagcatgatactggtaccaaaacagagatagatatagatcaatggaacagaacagagccctcagaaataacgccacatatctacaactatctgatctttgacaaac

SEQ ID NO: 72863 - DNA, 120 bp, synthetic construct
  source 1..120: mol_type = other DNA
cattatccacaatagcaaagacttggaaccaacccaaatatccaccaatgatagactggattaagaaaatgtggcacatatacaccatggaatactatgcagccataaaaaatgatgagt

SEQ ID NO: 72864 - DNA, 120 bp, synthetic construct; identical to SEQ ID NO: 27192
  source 1..120: mol_type = other DNA

SEQ ID NO: 72865 - DNA, 120 bp, synthetic construct
  source 1..120: mol_type = other DNA
ctaccaaacacatggacaacacagaagatgaggaaaatgagcagggcagctagtcataggagcaaattttaaaaattaagtgactgaggtagtcagggggcctcactgagaagtggcttg

SEQ ID NO: 72866 - DNA, 120 bp, synthetic construct
  source 1..120: mol_type = other DNA
agagtgaggaaatatcgggaacttatgttcggacttgttaagtttgagatggctgggagatatctaagtggagagggcaaggaataaaatgcttcctaaactccagcatccattcagtcc

SEQ ID NO: 72867 - DNA, 120 bp, synthetic construct; identical to SEQ ID NO: 27193
  source 1..120: mol_type = other DNA

SEQ ID NO: 72868 - DNA, 120 bp, synthetic construct; identical to SEQ ID NO: 3142
  source 1..120: mol_type = other DNA

SEQ ID NO: 72869 - DNA, 120 bp, synthetic construct; identical to SEQ ID NO: 25341
  source 1..120: mol_type = other DNA

SEQ ID NO: 72870 - DNA, 120 bp, synthetic construct
  source 1..120: mol_type = other DNA
ctgcctcagtctcccaaagtgccgggattacaagtgtgagccactgcacccagcacacagacatatattctcatctctatttttttttaaattatactttaagttctagggtacatgtgc

SEQ ID NO: 72871 - DNA, 120 bp, synthetic construct
  source 1..120: mol_type = other DNA
taatcctttgggcatatacccagtaataggatggctgggtcaaatggtatttctagttttagatccttgaggaatcgccacactgtcttccacaatgattgaactagtttacagtccccc

SEQ ID NO: 72872 - DNA, 120 bp, synthetic construct
  source 1..120: mol_type = other DNA
cttttatgctgttggtgggactgtaaactagttcaacaattgtggaagtcagtgtggcgattcctcagggatctagaactagaaataccatttgacccagccatcccattactgggtata

SEQ ID NO: 72873 - DNA, 120 bp, synthetic construct; identical to SEQ ID NO: 25342
  source 1..120: mol_type = other DNA

SEQ ID NO: 72874 - DNA, 120 bp, synthetic construct; identical to SEQ ID NO: 25343
  source 1..120: mol_type = other DNA

SEQ ID NO: 72875 - DNA, 120 bp, synthetic construct
  source 1..120: mol_type = other DNA
tagcccagaagagccctgtattagtcagggttctctagagggacagaaataataggagagagagagatacacacacacacacacacacacacacacacgtatatgtatgtgtatatatac

SEQ ID NO: 72876 - DNA, 120 bp, synthetic construct; identical to SEQ ID NO: 25344
  source 1..120: mol_type = other DNA

SEQ ID NO: 72877 - DNA, 120 bp, synthetic construct; identical to SEQ ID NO: 25345
  source 1..120: mol_type = other DNA

SEQ ID NO: 72878 - DNA, 120 bp, synthetic construct; identical to SEQ ID NO: 25346
  source 1..120: mol_type = other DNA

SEQ ID NO: 72879 - DNA, 120 bp, synthetic construct; identical to SEQ ID NO: 25347
  source 1..120: mol_type = other DNA

SEQ ID NO: 72880 - DNA, 120 bp, synthetic construct; identical to SEQ ID NO: 25348
  source 1..120: mol_type = other DNA

SEQ ID NO: 72881 - DNA, 120 bp, synthetic construct; identical to SEQ ID NO: 25349
  source 1..120: mol_type = other DNA

SEQ ID NO: 72882 - DNA, 120 bp, synthetic construct
  source 1..120: mol_type = other DNA
cctgccttatcttcccaagtacctgggactacaccaggttcacgccattctcctacctcaacctcccaagtacctgggactacaggcgcccgccatcatgcccggctaatttttctattt

SEQ ID NO: 72883 - DNA, 120 bp, synthetic construct; identical to SEQ ID NO: 25334
  source 1..120: mol_type = other DNA

SEQ ID NO: 72884 - DNA, 120 bp, synthetic construct; identical to SEQ ID NO: 25335
  source 1..120: mol_type = other DNA

SEQ ID NO: 72885 - DNA, 120 bp, synthetic construct
  source 1..120: mol_type = other DNA
atcaatgaacactcctgaaatttgccacttgtcatttcatgatattgaaaagcaaatgtaaaactcgcttttagagaaaataggccaggcgcagtggctcacgcctgtaatcccagcact

SEQ ID NO: 72886 - DNA, 120 bp, synthetic construct; identical to SEQ ID NO: 25351
  source 1..120: mol_type = other DNA

SEQ ID NO: 72887 - DNA, 120 bp, synthetic construct
  source 1..120: mol_type = other DNA
ggtgtgagatggtatctcattgtggttttgatttgcatttttctgatggcaagtgatggtgagcattttttcatgtgttttttggctgcataaatgtcttcttttgagaagtgtctgttc

SEQ ID NO: 72888 - DNA, 120 bp, synthetic construct
  source 1..120: mol_type = other DNA
ttgttggtgtataagaatgcttgtgatttttgtacactgattttgtatcctgagactttgttgaagttgcttatcagcttaaggagattttgggctgagacagtggggttttctagatat

SEQ ID NO: 72889 - DNA, 120 bp, synthetic construct; identical to SEQ ID NO: 25352
  source 1..120: mol_type = other DNA

SEQ ID NO: 72890 - DNA, 120 bp, synthetic construct
  source 1..120: mol_type = other DNA
tactctgactttggactcgctctcaaattcttttgtgtggcaaagtcaagaacctgaaccagcccaccaacaacatattattggacaaggtaagatcttgggaacctttctgaaactcat

SEQ ID NO: 72891 - DNA, 120 bp, synthetic construct
  source 1..120: mol_type = other DNA
attcctctcaagttgcttttgccagaatccatcaatatcttatcaccctcaatatctgatccaatttctcatcctccaccatctcccagtgaatttgatcacccaggtttatcttcagca

SEQ ID NO: 72892 - DNA, 120 bp, synthetic construct
  source 1..120: mol_type = other DNA
gggtatccctgtcttgtgccagttttcaaatggaaggcttccagtttttgcccattcagtatgatattggctgtgggtttgtcatagatagctcttattattttgagatacgtcccatca

SEQ ID NO: 72893 - DNA, 120 bp, synthetic construct
  source 1..120: mol_type = other DNA
cctggactctttggttggtaagctattgattattgccacaatttcagagcctcttattgatctattcagagattcagcctcttcctcgtttagtcttgggaggagggtgtatgtgtcgag

SEQ ID NO: 72894 - DNA, 120 bp, synthetic construct
  source 1..120: mol_type = other DNA
atctgtctaatgttgacagtggggtgttaaagtctcccatttttattgtgtgggagtctaagtctctttgtaggtcactcaggacttgctttatgaatctgggtgctcctgtattgggtg

SEQ ID NO: 72895 - DNA, 120 bp, synthetic construct
  source 1..120: mol_type = other DNA
gcctgccttgctagatttgggaagttctcctggataatatcctgcagagtgttttccaacttggttccattctccccgtcactttcaggtacaccaatcagacgtagatttggtcttttc

SEQ ID NO: 72896 - DNA, 120 bp, synthetic construct
  source 1..120: mol_type = other DNA
tctgtgccctgcccccagaggtggagcctacagaggcaggcaggcctccttgagctgtggtgggctccacccagttcgagcttcccggctgctttgtttacctaagcaagcctaggcaat

SEQ ID NO: 72897 - DNA, 120 bp, synthetic construct
  source 1..120: mol_type = other DNA
taataatgctataggctaagcaatggaggaaaatatcgtatttttagaaaattatactaaagatatgtttgagggggaggagccaagatggccgaataggaacagctccggtctacagct

SEQ ID NO: 72898 - DNA, 120 bp, synthetic construct
  source 1..120: mol_type = other DNA
gggaaaaaacagaacagaaaaactggaaactctaaaacgcagagcgcctctcctcctccaaaggaacgcagttcctcaccagcaacagaacaaagctggatggagaatgattttgatgag

SEQ ID NO: 72899 - DNA, 120 bp, synthetic construct
  source 1..120: mol_type = other DNA
attttgtcaccaccaggcctgccctaaaagagctcctgaaggaagcgctaaacatggaaaggaacaaccggtaccagccgctgcaaaaccatgccaaaatgtaaagaccatcgagactag

SEQ ID NO: 72900 - DNA, 120 bp, synthetic construct
  source 1..120: mol_type = other DNA
aaaccaacgagaacaaagacaccacataccagaatctctgggacgcattcaaagcagtgtgtagagggaaatttatagcactaaatgcctacaagagaaagcaggaaagatccaaaattg

SEQ ID NO: 72901 - DNA, 120 bp, synthetic construct
  source 1..120: mol_type = other DNA
ttcatgctaaaaactctcaataaactaggtattgatgggacgtatttcaaaataataagagctatctatgacaaacccacagccaatatcatactgaatgggcaaaaactggaagcattc

SEQ ID NO: 72902 - DNA, 120 bp, synthetic construct
  source 1..120: mol_type = other DNA
agatggattaaagatttaaacgttaaacctaaaaccataaaaaccctagaagaaaacctaggcattaccattcaggacataggcgtgggcaaggacttcatgtccaaaacaccaaaagca

SEQ ID NO: 72903 - DNA, 120 bp, synthetic construct
  source 1..120: mol_type = other DNA
gatgacacattagtgggtgcagcgcaccagcatggcacatgtatacatatgtaactaacctgcacaatgtgcacatgtaccctaaaacttagagtataataaaaaaaaaaaaaaaaaaaa

SEQ ID NO: 72904 - DNA, 120 bp, synthetic construct; identical to SEQ ID NO: 25337
  source 1..120: mol_type = other DNA

SEQ ID NO: 72905 - DNA, 120 bp, synthetic construct; identical to SEQ ID NO: 25338
  source 1..120: mol_type = other DNA

SEQ ID NO: 72906 - DNA, 120 bp, synthetic construct
  source 1..120: mol_type = other DNA
agatacaacaaaaaaatagaattttagaccaatatccttgatgaacattgatgcaaaaatcctcaataaaatactggcaaaccgaatccagcagcacatcaaaaagcttatccaccatga

SEQ ID NO: 72907 - DNA, 120 bp, synthetic construct
  source 1..120: mol_type = other DNA
gaacaaagctggaggcatcacgctacttgacttcaaactatactacaaggctacagtaaccaaaacagcatggtactggtaccaaaacagagatatagaccaatggaacagaacagagcc

SEQ ID NO: 72908 - DNA, 120 bp, synthetic construct
  source 1..120: mol_type = other DNA
ccaacccaaatgtccaacaatgatagattggattaagcaaatgtggcacatatacaccatggaatactatgcagccataaaaaatgatgagttcatgtcctttgtagggacatggatgaa

SEQ ID NO: 72909 - DNA, 120 bp, synthetic construct; identical to SEQ ID NO: 25340
  source 1..120: mol_type = other DNA

SEQ ID NO: 72910 - DNA, 120 bp, synthetic construct
  source 1..120: mol_type = other DNA
tggtgttatgtttgactaacctcgggtcctgcatgaataaaggtagattaaaaaaaaaaaaactcttctgacactatgttgaataggagtggtgggagagggcatccctgtcttgtgcca

SEQ ID NO: 72911 - DNA, 120 bp, synthetic construct
  source 1..120: mol_type = other DNA
ttattgccacaatatcagatcctgttattggtctattcagagattcaacttcttcctggggagttattcttatactttctatcctgtgtacaatataacaaccccacagctaaattttac

SEQ ID NO: 72912 - DNA, 120 bp, synthetic construct
  source 1..120: mol_type = other DNA
aaaacaattctatgaggtaggtactattagcatccatgttatagaagaggcaactgagacacagagaggctaagttacttgacaaaagtcatacagctagagccaggattcgaacccagg

SEQ ID NO: 72913 - DNA, 120 bp, synthetic construct
  source 1..120: mol_type = other DNA
ctccagcgggaacaccctctctcatcaactgccctccctgctggccaggcccagcccttagccaggtgctttttcagggaccaagtagagctggggcctgaccacaggcacttcttggag

SEQ ID NO: 72914 - DNA, 120 bp, synthetic construct
  source 1..120: mol_type = other DNA
tgggtgccaggtcgtagagtgggctgttggcatcaatgacatggtagatgatcagcggggccaccaggaagatgctgttgccacccacgccgttctccatggggatgtccacctggtgga

SEQ ID NO: 72915 - DNA, 120 bp, synthetic construct
  source 1..120: mol_type = other DNA
cttctgagataactccccaccagactcttccttacctccacctgggtcccacttcacttcttaataccagcctcaggccgggcgcggtggctcacgcctgtaatcccagtacgttgggag

SEQ ID NO: 72916 - DNA, 120 bp, synthetic construct
  source 1..120: mol_type = other DNA
tctctgtctccttgggatcctgcgttctctggagtcaccaccccacccggctcaaccgcggctccccggacctgcgcgcgacccggcggggctgactccgagtcgcggcctcccggtccc

SEQ ID NO: 72917 - DNA, 120 bp, synthetic construct; identical to SEQ ID NO: 17809
  source 1..120: mol_type = other DNA

SEQ ID NO: 72918 - DNA, 120 bp, synthetic construct; identical to SEQ ID NO: 17810
  source 1..120: mol_type = other DNA

SEQ ID NO: 72919 - DNA, 120 bp, synthetic construct
  source 1..120: mol_type = other DNA
agggatggagacaggatttgaattcatgccttgttgccccagaactcttatagtttcaagctctcttatggcccttgggctccccattgcctttgggatcaagtctaggctcattaatat

SEQ ID NO: 72920 - DNA, 120 bp, synthetic construct; identical to SEQ ID NO: 17822
  source 1..120: mol_type = other DNA

SEQ ID NO: 72921 - DNA, 120 bp, synthetic construct; identical to SEQ ID NO: 17823
  source 1..120: mol_type = other DNA

SEQ ID NO: 72922 - DNA, 120 bp, synthetic construct
  source 1..120: mol_type = other DNA
tctgttcatccatccatccaatcatctactttcacacttatccatccatctatccaaccatccatccatccatccattcatccatccatccatccatccatccatcctattatccattca

SEQ ID NO: 72923 - DNA, 120 bp, synthetic construct; identical to SEQ ID NO: 17824
  source 1..120: mol_type = other DNA

SEQ ID NO: 72924 - DNA, 120 bp, synthetic construct; identical to SEQ ID NO: 17812
  source 1..120: mol_type = other DNA

SEQ ID NO: 72925 - DNA, 120 bp, synthetic construct; identical to SEQ ID NO: 17813
  source 1..120: mol_type = other DNA

SEQ ID NO: 72926 - DNA, 120 bp, synthetic construct; identical to SEQ ID NO: 17814
  source 1..120: mol_type = other DNA

SEQ ID NO: 72927 - DNA, 120 bp, synthetic construct; identical to SEQ ID NO: 17815
  source 1..120: mol_type = other DNA

SEQ ID NO: 72928 - DNA, 120 bp, synthetic construct; identical to SEQ ID NO: 17816
  source 1..120: mol_type = other DNA

SEQ ID NO: 72929 - DNA, 120 bp, synthetic construct
  source 1..120: mol_type = other DNA
ttgaacccaggaggcggagatggcagtgagctgaaatcgcaccattgcattccagcctaggtgacgagaggaagattctgtctaaaaaagaaaaaaagaaagaaaagaaaaaaagaaaat

SEQ ID NO: 72930 - DNA, 120 bp, synthetic construct; identical to SEQ ID NO: 17817
  source 1..120: mol_type = other DNA

SEQ ID NO: 72931 - DNA, 120 bp, synthetic construct; identical to SEQ ID NO: 17818
  source 1..120: mol_type = other DNA

SEQ ID NO: 72932 - DNA, 120 bp, synthetic construct; identical to SEQ ID NO: 17819
  source 1..120: mol_type = other DNA

SEQ ID NO: 72933 - DNA, 120 bp, synthetic construct; identical to SEQ ID NO: 17820
  source 1..120: mol_type = other DNA

SEQ ID NO: 72934 - DNA, 120 bp, synthetic construct; identical to SEQ ID NO: 17821
  source 1..120: mol_type = other DNA

SEQ ID NO: 72935 - DNA, 120 bp, synthetic construct; identical to SEQ ID NO: 17822
  source 1..120: mol_type = other DNA

SEQ ID NO: 72936 - DNA, 120 bp, synthetic construct; identical to SEQ ID NO: 17823
  source 1..120: mol_type = other DNA

SEQ ID NO: 72937 - DNA, 120 bp, synthetic construct
  source 1..120: mol_type = other DNA
catctacccttctgttcatccatccatccaatcatctactttcacacttatccatccatctatccaaccatccatccatccatccattcatccatccatccatccatccatccatcctat

SEQ ID NO: 72938 - DNA, 120 bp, synthetic construct; identical to SEQ ID NO: 17824
  source 1..120: mol_type = other DNA

SEQ ID NO: 72939 - DNA, 120 bp, synthetic construct; identical to SEQ ID NO: 17812
  source 1..120: mol_type = other DNA

SEQ ID NO: 72940 - DNA, 120 bp, synthetic construct; identical to SEQ ID NO: 17825
  source 1..120: mol_type = other DNA

SEQ ID NO: 72941 - DNA, 120 bp, synthetic construct; identical to SEQ ID NO: 17814
  source 1..120: mol_type = other DNA

SEQ ID NO: 72942 - DNA, 120 bp, synthetic construct; identical to SEQ ID NO: 17815
  source 1..120: mol_type = other DNA

SEQ ID NO: 72943 - DNA, 120 bp, synthetic construct; identical to SEQ ID NO: 17816
  source 1..120: mol_type = other DNA

SEQ ID NO: 72944 - DNA, 120 bp, synthetic construct; identical to SEQ ID NO: 17826
  source 1..120: mol_type = other DNA

SEQ ID NO: 72945 - DNA, 120 bp, synthetic construct; identical to SEQ ID NO: 17817
  source 1..120: mol_type = other DNA

SEQ ID NO: 72946 - DNA, 120 bp, synthetic construct; identical to SEQ ID NO: 17818
  source 1..120: mol_type = other DNA

SEQ ID NO: 72947 - DNA, 120 bp, synthetic construct
  source 1..120: mol_type = other DNA
tgggcaagcagggtgctctgggaccgcacttcatcgagctcacgagccagctaggctctgtttgtgatagaaaaatcaagaccatgttaatgatcgtaataaaagctttctactgtcgtt

SEQ ID NO: 72948 - DNA, 120 bp, synthetic construct; identical to SEQ ID NO: 23083
  source 1..120: mol_type = other DNA

SEQ ID NO: 72949 - DNA, 120 bp, synthetic construct; identical to SEQ ID NO: 23084
  source 1..120: mol_type = other DNA

SEQ ID NO: 72950 - DNA, 120 bp, synthetic construct; identical to SEQ ID NO: 23076
  source 1..120: mol_type = other DNA

SEQ ID NO: 72951 - DNA, 120 bp, synthetic construct
  source 1..120: mol_type = other DNA
atcatttgagttcctgggtcaagctctatccaagctagtcctgccatggtcttagaatacactgccttcacactctagacatttgtgtgtgtgtgtgtgtgtgtgtgtgtgtgtgtgtgt

SEQ ID NO: 72952 - DNA, 120 bp, synthetic construct; identical to SEQ ID NO: 23078
  source 1..120: mol_type = other DNA

SEQ ID NO: 72953 - DNA, 120 bp, synthetic construct; identical to SEQ ID NO: 23079
  source 1..120: mol_type = other DNA

SEQ ID NO: 72954 - DNA, 120 bp, synthetic construct; identical to SEQ ID NO: 23080
  source 1..120: mol_type = other DNA

SEQ ID NO: 72955 - DNA, 120 bp, synthetic construct; identical to SEQ ID NO: 23081
  source 1..120: mol_type = other DNA

SEQ ID NO: 72956 - DNA, 120 bp, synthetic construct; identical to SEQ ID NO: 23082
  source 1..120: mol_type = other DNA

SEQ ID NO: 72957 - DNA, 120 bp, synthetic construct
  source 1..120: mol_type = other DNA
atgaagggctgttgaattttgtcaaaggccttttctgcatctattgagataatcacgtggtttttgtcattggttctgtttatatgctggattacgttcattgattgcatatgttgaatc

SEQ ID NO: 72958 - DNA, 120 bp, synthetic construct; identical to SEQ ID NO: 23085
  source 1..120: mol_type = other DNA

SEQ ID NO: 72959 - DNA, 120 bp, synthetic construct; identical to SEQ ID NO: 23086
  source 1..120: mol_type = other DNA

SEQ ID NO: 72960 - DNA, 120 bp, synthetic construct
  source 1..120: mol_type = other DNA
atcactagactaccaatataggtgcatctgggatggaaaaaaataaaattcacaaataataaaaactcaggccaggcatgctggctcacacctgtaatcccagctcttcaggaggctgag

SEQ ID NO: 72961 - DNA, 120 bp, synthetic construct; identical to SEQ ID NO: 14562
  source 1..120: mol_type = other DNA

SEQ ID NO: 72962 - DNA, 120 bp, synthetic construct; identical to SEQ ID NO: 14563
  source 1..120: mol_type = other DNA

SEQ ID NO: 72963 - DNA, 120 bp, synthetic construct; identical to SEQ ID NO: 14564
  source 1..120: mol_type = other DNA

SEQ ID NO: 72964 - DNA, 120 bp, synthetic construct
  source 1..120: mol_type = other DNA
ctattcagggattcgattttttcctggcttagtcttgggacagtgtctgtgtgcaggaatttatctgtttcttctagatcttctagtgtatttgcgtagcggtgtttatagtattctctg

SEQ ID NO: 72965 - DNA, 120 bp, synthetic construct
  source 1..120: mol_type = other DNA
gttttttgtccttgcgatagtttgctgagaatgatggtttccagcttcatccatgtccctacaaaggacatgaactcatcctcttttatggctgcatagtattccatggtatatatgtgc

SEQ ID NO: 72966 - DNA, 120 bp, synthetic construct
  source 1..120: mol_type = other DNA
accagtaccatgctgttttggttattgtagccttgtagtatagtttgaagtcaagtagtgtgatgcctccagctttgttcttttggcttaggattgacttggcaatgcgggctctttttt

SEQ ID NO: 72967 - DNA, 120 bp, synthetic construct
  source 1..120: mol_type = other DNA
ttggcctcccaaagtgctgggactacaggtgtgagccactgcgcctggccctgttgcctattcttgagaagctatttcttttagtgagggcattttttatgatatctagttataaatata

SEQ ID NO: 72968 - DNA, 120 bp, synthetic construct
  source 1..120: mol_type = other DNA
ccaagaggcagaggttgcagtgagccgagatcgcgccattgcactccagcctgggcaacagtgcaaaacctctgtcttgaaaaaaaaaaaagaaaagaaaaagaaagaaacatgtatgtg

SEQ ID NO: 72969 - DNA, 120 bp, synthetic construct
  source 1..120: mol_type = other DNA
cagcctggccaacatggcgaaaccctgtctctactaaaaatacaaaaattagccaggagtggtggcacacacctgtaattccagctactcaggaggatgaggcaggagaatcacttgaac

SEQ ID NO: 72970 - DNA, 120 bp, synthetic construct; identical to SEQ ID NO: 10868
  source 1..120: mol_type = other DNA

SEQ ID NO: 72971 - DNA, 120 bp, synthetic construct
  source 1..120: mol_type = other DNA
caagtttagctggttttcccagcaaccctcttcatgctaggcatctctgaaaggatttcacaatgtagtgaatcttcttttttgtttttttgagacagtcttgctctgtcacccaggctg

SEQ ID NO: 72972 - DNA, 120 bp, synthetic construct; identical to SEQ ID NO: 10869
  source 1..120: mol_type = other DNA

SEQ ID NO: 72973 - DNA, 120 bp, synthetic construct; identical to SEQ ID NO: 10870
  source 1..120: mol_type = other DNA

SEQ ID NO: 72974 - DNA, 120 bp, synthetic construct; identical to SEQ ID NO: 10871
  source 1..120: mol_type = other DNA

SEQ ID NO: 72975 - DNA, 120 bp, synthetic construct
  source 1..120: mol_type = other DNA
tggcactaatcacaatagcacggacttggaaccaacccaaacgtccatcaatgatagactggattaagaaaatgtgcacatatacaccatggaacactatgcagccataaaaaaaggatg

SEQ ID NO: 72976 - DNA, 120 bp, synthetic construct
  source 1..120: mol_type = other DNA
gcacctcctcagccttgcaaatgggagctggtgatatgggctcaggaactgccatttctgacccagcccagacaaatgtggcccaattctctgttcccttggagctgagcccatttgtag

SEQ ID NO: 72977 - DNA, 120 bp, synthetic construct; identical to SEQ ID NO: 10873
  source 1..120: mol_type = other DNA

SEQ ID NO: 72978 - DNA, 120 bp, synthetic construct; identical to SEQ ID NO: 10874
  source 1..120: mol_type = other DNA

SEQ ID NO: 72979 - DNA, 120 bp, synthetic construct
  source 1..120: mol_type = other DNA
acaacccttcatgctaaaaactctcaataaattaggtactgatgggacgtatctcaaaataataagagctatctatgacaaacccacagccaatatcatactgaatgggcaaaaactgga

SEQ ID NO: 72980 - DNA, 120 bp, synthetic construct
  source 1..120: mol_type = other DNA
aggacataggcatgggcaaggacttcatgtctaaaacaccaaaagcaatagcaacaaaagtcaaaattgacagatgggatctaattaaactcaagagcttctgcacagcaaaagaaatta

SEQ ID NO: 72981 - DNA, 120 bp, synthetic construct
  source 1..120: mol_type = other DNA
tcaagaacaaaaaaccaaacaccgcatattctcactcacaggtgggaattgaacaatgagaacacatggacacaggaaggggaacatcacactctggggactgttgtggggtagggggag

SEQ ID NO: 72982 - DNA, 120 bp, synthetic construct; identical to SEQ ID NO: 24903
  source 1..120: mol_type = other DNA

SEQ ID NO: 72983 - DNA, 120 bp, synthetic construct
  source 1..120: mol_type = other DNA
aataccatttgacccagccataccattaccattttgggtatactgggtatatacccaatggaatataaatcatgctgctataaagacacatgcacacgtacatttattgcggcactactc

SEQ ID NO: 72984 - DNA, 120 bp, synthetic construct; identical to SEQ ID NO: 24905
  source 1..120: mol_type = other DNA

SEQ ID NO: 72985 - DNA, 120 bp, synthetic construct
  source 1..120: mol_type = other DNA
cccactttttgatggggttgtttgtttttttcttgtaaatttgtttgagttcattgtagattctggatattagccctttgtcagatgagtaggttgcgaaaattttctcccattttgcct

SEQ ID NO: 72986 - DNA, 120 bp, synthetic construct
  source 1..120: mol_type = other DNA
gggaagaagtggcactaaagtgacaatgaaaaaaaattcttggaaatatatatatatgtatatttcagagcctttcctcattacacccatccttgcttacctctcttacatttccgcccc

SEQ ID NO: 72987 - DNA, 120 bp, synthetic construct
  source 1..120: mol_type = other DNA
tctagaggatatatatatatatctagatatatatatatatctccaagaggatatatatatatacacaagaggatatatatatatacacacaagaggatatatatatgtacacacaagagg

SEQ ID NO: 72988 - DNA, 120 bp, synthetic construct
  source 1..120: mol_type = other DNA
tctctccaagaggagacatatatatatctccaagaggatatatatatatatatatctccaagaggatatatatatatatatatctccaagaggatatatatatatatatatctctccaag

SEQ ID NO: 72989 - DNA, 120 bp, synthetic construct
  source 1..120: mol_type = other DNA
tgaggcaggagaattgcttgagccaaggagacagaggttgcagtaagccaagattgtgccactgcactccagccttggagcaagactctgtctaaaaatttaaaaaataataataatata

SEQ ID NO: 72990 - DNA, 120 bp, synthetic construct
  source 1..120: mol_type = other DNA
gttgtttccagactttttaatgattgccattctaactggcgtgagatggtatctcattgtggttttgatttgcatttctctgatggccagtgatgatgagcattttttcatgtgtttttt

SEQ ID NO: 72991 - DNA, 120 bp, synthetic construct
  source 1..120: mol_type = other DNA
cagtatggccattttcacgatattgattcttcctacccaggagcatggaatgttcttccatttgtttgtatcctcttttatttccttgagcagtggtttgtagttctccttgaagaggtc

SEQ ID NO: 72992 - DNA, 120 bp, synthetic construct; identical to SEQ ID NO: 24906
  source 1..120: mol_type = other DNA

SEQ ID NO: 72993 - DNA, 120 bp, synthetic construct; identical to SEQ ID NO: 24907
  source 1..120: mol_type = other DNA

SEQ ID NO: 72994 - DNA, 120 bp, synthetic construct; identical to SEQ ID NO: 24912
  source 1..120: mol_type = other DNA

SEQ ID NO: 72995 - DNA, 120 bp, synthetic construct; identical to SEQ ID NO: 24913
  source 1..120: mol_type = other DNA

SEQ ID NO: 72996 - DNA, 120 bp, synthetic construct
  source 1..120: mol_type = other DNA
acaaacaaacaacaaaatggaggcagtatggacagtaacatagcaagaccccttcctcttaaaaaaaaaaaaaaaaaaaggccgggctcacgactgtaatcccagcactttgggaggccg

SEQ ID NO: 72997 - DNA, 120 bp, synthetic construct
  source 1..120: mol_type = other DNA
caggagttcaaagccagcctgggcaacagagcgagtccccatctctgcattaattttctttttctttttctttctttttttttttttatcgagacaagagtctcactctgttgcccaggc

SEQ ID NO: 72998 - DNA, 120 bp, synthetic construct
  source 1..120: mol_type = other DNA
gaggatgtggagaaataggaacacttttacactgttggtgggactgtaaactagttcaaccattgtggaagtcagtgtggagattcctcagggatctagaactagaaacaccatttgacc

SEQ ID NO: 72999 - DNA, 120 bp, synthetic construct; identical to SEQ ID NO: 8833
  source 1..120: mol_type = other DNA

SEQ ID NO: 73000 - DNA, 120 bp, synthetic construct; identical to SEQ ID NO: 8834
  source 1..120: mol_type = other DNA

SEQ ID NO: 73001 - DNA, 120 bp, synthetic construct; identical to SEQ ID NO: 8835
  source 1..120: mol_type = other DNA

SEQ ID NO: 73002 - DNA, 120 bp, synthetic construct
  source 1..120: mol_type = other DNA
acaagaagccaaaggcaaagaagaagaagacgatgatgaaaaggaggaggaggaggaagaggaagaggaagaagaaggaggaggaggagggggaaagaaggaagaaggaagaagaaggaa

SEQ ID NO: 73003 - DNA, 120 bp, synthetic construct; identical to SEQ ID NO: 8836
  source 1..120: mol_type = other DNA

SEQ ID NO: 73004 - DNA, 120 bp, synthetic construct; identical to SEQ ID NO: 19822
  source 1..120: mol_type = other DNA

SEQ ID NO: 73005 - DNA, 120 bp, synthetic construct; identical to SEQ ID NO: 19823
  source 1..120: mol_type = other DNA

SEQ ID NO: 73006 - DNA, 120 bp, synthetic construct
  source 1..120: mol_type = other DNA
tctacaacttcctcgagcgtcccaccggctggaaatgcttcgtttaccacttcgccgtgtgagtatcgccaccggcgacggccggcacgaaggtgcttcctgagagctggtgtgggggag

SEQ ID NO: 73007 - DNA, 120 bp, synthetic construct
  source 1..120: mol_type = other DNA
ggtggggtaggggtcgcagggctactgccttccttgctaagaggtggccttccacatcaggaaggggaagtcttacccacctccctcctcaaagatgtggttggggggtgatcttggaga

SEQ ID NO: 73008 - DNA, 120 bp, synthetic construct
  source 1..120: mol_type = other DNA
tgcgccagtccagccttgtgttgctgtaagaagtcttggcaatggtggcggagacagggccctgtccttaggtggattgtgaaatgagaaatattgtggtttctggcctgaagacgacaa

SEQ ID NO: 73009 - DNA, 120 bp, synthetic construct
  source 1..120: mol_type = other DNA
agccatcaggtctctttctctccatcttctttaagatctgtccacccactcctcagccctagattcccaggaaaactgggaattccttttggggcttttcccagtgctaccttctgtggg

SEQ ID NO: 73010 - DNA, 120 bp, synthetic construct
  source 1..120: mol_type = other DNA
gtttttaaaggcgttgggtgccgagaattcccctcctgctgctaggctggtttcaagtctgctccttctgcacttgacgtccttgccagtgtgatccagagctgctcacacgagcaagcg

SEQ ID NO: 73011 - DNA, 120 bp, synthetic construct
  source 1..120: mol_type = other DNA
ccccttcctggtgggtagctgtctctctccagcagctcctccaaccaccatgagaaaccccagacctcacagatgcaaaattatcgtggttgacaaagggaggcggctggtgtctctggt

SEQ ID NO: 73012 - DNA, 120 bp, synthetic construct
  source 1..120: mol_type = other DNA
gctctgctccccatttcgctcctccactcacagatgaggacatttgggtcgccttacagatgagacaactaggcctggccactttgctcatgccacacccagaaagccctcaggacaccc

SEQ ID NO: 73013 - DNA, 120 bp, synthetic construct
  source 1..120: mol_type = other DNA
cttggcattctattccgtgacgtctccagctgttctcttgtgaagagtcacgtctgtgctcttggctaggatggctcaaatattataaaacatacagctttgctaattaaaacagcatga

SEQ ID NO: 73014 - DNA, 120 bp, synthetic construct
  source 1..120: mol_type = other DNA
ctgggggaagatgtgatgtttcacgaagggttaatctgtttactacagaaagagtttctgaaaacagaagaaaacccacagccagcaggagatgtgaataccactcacaggacagtgacc

SEQ ID NO: 73015 - DNA, 120 bp, synthetic construct
  source 1..120: mol_type = other DNA
gaaatgaaacaaatgagcctaaaaatgtgtgctgaattagtggcttaaccacccagaaggactgatttcaggtgacatatttctagcgggttactgctgaagacaaatagagctgcatgc

SEQ ID NO: 73016 - DNA, 120 bp, synthetic construct
  source 1..120: mol_type = other DNA
caaagtgctgggattcaggcttgagccaccgtgcctggccaatcagcagcattcttatacaccaatgatgttcaaactcagagccaaatcaagaatgcaattccatttataatagacaca

SEQ ID NO: 73017 - DNA, 120 bp, synthetic construct
  source 1..120: mol_type = other DNA
aaattcacaagtgggacctaattaaagagctgctgcacagcaagagagactgccaagggaataaacagataacctacagaatgggagaaaatattagcaaactttgaactgacaaaggcc

SEQ ID NO: 73018 - DNA, 120 bp, synthetic construct
  source 1..120: mol_type = other DNA
atcatgtcctttgcagcaacatggatgcagctggaggtcgttatcctaagtgaattaatgcagaaactgaaaaccaaatactgcgtggtctcatggattataagtgagggctaaacatca

SEQ ID NO: 73019 - DNA, 120 bp, synthetic construct
  source 1..120: mol_type = other DNA
ttgatttgcatttctctaaagatctgtggaggtcaatagggagaccgctcatgatgttgaatcctggcaagcaaacggagagaatctgacatgtgtcccagtcgtgattaacctgtgaac

SEQ ID NO: 73020 - DNA, 120 bp, synthetic construct
  source 1..120: mol_type = other DNA
gaggacaaccccatgtagttcctcactgcagggcttggagggagcaggtgaaggcttacctgtcttaggtaatgaggagctgtgcgggtctgagacagctctggttcctttaagggtatg

SEQ ID NO: 73021 - DNA, 120 bp, synthetic construct
  source 1..120: mol_type = other DNA
tggtctttcaaagggctctgtggctggtggagggcagcaatgccccaagggaggagcaggtgcccaagcccccaggtggccctgcgggtacaggtacttgtttactctgtggcatcagtc

SEQ ID NO: 73022 - DNA, 120 bp, synthetic construct
  source 1..120: mol_type = other DNA
atggcttctcaggccgcctcgcagcagatttgtagtctggttgctgtcgttcctgaaatagcctctgaagctctgtccgggaagggaaccttgagtgtggaggagataagcctgctgact

SEQ ID NO: 73023 - DNA, 120 bp, synthetic construct
  source 1..120: mol_type = other DNA
gtatctcatggagagccccaaggagccagggaggagccttctggtggtttgggttctggattggtgggtgctgggtgggtcttcatggctgttcttggggctgccaggcctgcaaggtag

SEQ ID NO: 73024 - DNA, 120 bp, synthetic construct
  source 1..120: mol_type = other DNA
aactggacgctccgtccctggctcagcctctcccggctgtgaccttgggggaccattgactttactgtgtgcctggagagcctaatccctacctgccagtgggtgacacagaaggcagga

SEQ ID NO: 73025 - DNA, 120 bp, synthetic construct
  source 1..120: mol_type = other DNA
gtgtggaatggcccggacagcagataacaagccttcgtcgtggtcacccctgggtgtgggctgtgggttttaatcttttcatttttgctcatctgaattttctaattaaaaatatattgc

SEQ ID NO: 73026 - DNA, 120 bp, synthetic construct
  source 1..120: mol_type = other DNA
ggccttaggtgatcctccaaggtccagccagccaggatctgagtcaggaggaaccacggcccccaccagggctgagactcctctgagctcgtcacttgtcttggttgggtagaggcctga

SEQ ID NO: 73027 - DNA, 120 bp, synthetic construct
  source 1..120: mol_type = other DNA
ctgtggttcttagaggggcaaggggctggcccctgttgctggctgtggcagccacagccttctgacccttgctggcctgtcgtggagtggggttcaagatgctatcactgacatctgccc

SEQ ID NO: 73028 - DNA, 120 bp, synthetic construct
  source 1..120: mol_type = other DNA
ggcttcaacggtgtcggcctctacccttttggtcctcacggaggaggctgctccctcttccctggagcagccagggatggtgtggggccctggtcccctggcttgatataggcttctgca

SEQ ID NO: 73029 - DNA, 120 bp, synthetic construct
  source 1..120: mol_type = other DNA
aaagtgctgggattacaggcatgcactttttttttctaagtagctttacggaggcgtgcttggcatacggtaaactgccccagtttaaagcagacagttccatgagtcctgacatttgga

SEQ ID NO: 73030 - DNA, 120 bp, synthetic construct
  source 1..120: mol_type = other DNA
tacggctcccggccgagatgttacatgtttctatattctggaccaagtcctctatcagatacctgctctgtgaagccttcccttatcccttgctagtccttcagttcttttaaacaattt

SEQ ID NO: 73031 - DNA, 120 bp, synthetic construct
  source 1..120: mol_type = other DNA
gggggggggtgcttagaattttatttttatttctcattgcccagactggtctcaaaaccctggtctcgatcaatcctcccacctcagcctcccattctcttaatagtgcccttttagaga

SEQ ID NO: 73032 - DNA, 120 bp, synthetic construct
  source 1..120: mol_type = other DNA
gctctgggtcctaagcatggcagtatcacagcctcacaggcacatgtgtatgtgtgtgtgtgcacgtgtgtatgggtgcgtgtgcacctgtgtatatgggtgtgtgcacgtatgcacgga

SEQ ID NO: 73033 - DNA, 120 bp, synthetic construct
  source 1..120: mol_type = other DNA
tatgtctgtataggtgtgtgtgtttgtgtctgggtgtgtgtgcacctatgggtgtgtgtgtgtatgcatgtgtgcatgtccctcacagggcagagctggaaagaactggagaggctgagg

SEQ ID NO: 73034 - DNA, 120 bp, synthetic construct
  source 1..120: mol_type = other DNA
attaattctgatgtcatttattgctgttcctatatttgtataataaatggaagaaaatagtggttgggggcttgctggggactcagggagggttggggacctccagggcttccattcgac

SEQ ID NO: 73035 - DNA, 120 bp, synthetic construct
  source 1..120: mol_type = other DNA
tctccacacatcacccagtgtggagtggttttttgtctttctttcgaaacaggctttcctcactgagggctcaccatggggctgtgctggggacactggatgtgtccagggtccgtcaag

SEQ ID NO: 73036 - DNA, 120 bp, synthetic construct
  source 1..120: mol_type = other DNA
gacctttgtgcatttgtgcattgtttgtgttgtgataaaatacacgtaacgtaaaattgacctttttaacccatgtttcatggtcttcggtttactcgcagtgctaggcgtccgacacgt

SEQ ID NO: 73037 - DNA, 120 bp, synthetic construct
  source 1..120: mol_type = other DNA
tgtaagtccaattaaacctctttcttttgtacatttgctcagtcttgggtatgtctttatcagcagtgtgaaaacggactaatactgacaataaattaaaaactatttaaaatgcaaagg

SEQ ID NO: 73038 - DNA, 120 bp, synthetic construct
  source 1..120: mol_type = other DNA
tggctaactttttgtatttttagtagagacaaaggtttcattatgttggccaggctggtattgaactcctgagcacaagtgatccacccacctcggcctcccaaagtgctgggatcacag

SEQ ID NO: 73039 - DNA, 120 bp, synthetic construct
  source 1..120: mol_type = other DNA
tcatgaaaaaagaatctatgcatccacagggacacacccatgtatataaacaaataagtggaagaaaggaatccagttctcacgttagaatcaacagggctggaaggccatcaaggaaac

SEQ ID NO: 73040 - DNA, 120 bp, synthetic construct
  source 1..120: mol_type = other DNA
tcaaaaatctgcagtccaaagtctcatctgagaccaggcaagtcccttccacctatgagcctgtaaaatcaaaagcaagttagttaattcctagacacaattagggtacaggccttggat

SEQ ID NO: 73041 - DNA, 120 bp, synthetic construct
  source 1..120: mol_type = other DNA
ttatctctgtttccctttcaaaactgaatgcttttaacaacacccaagtcacctcttgaaagctttgcagcttagaaatttcttccaccaaataccctaaatcatctccctcaagttcaa

SEQ ID NO: 73042 - DNA, 120 bp, synthetic construct
  source 1..120: mol_type = other DNA
gtagagaactgtagtgtgcaatagagacctgtagtgtgcatgtcagtgttgtttcccgattttgacaacagtaccacatggttacagaagagaacacccttattcctaagaaatccatga

SEQ ID NO: 73043 - DNA, 120 bp, synthetic construct
  source 1..120: mol_type = other DNA
ctcctatcagatcagtggcggcattagattctcacaggggtgtgtaccctgttgcaaactatgcatgtgagggatctaggttgcctcctctttataagaatctaatgcctgatgatctgt

SEQ ID NO: 73044 - DNA, 120 bp, synthetic construct
  source 1..120: mol_type = other DNA
caacccccaccccacactgcaccacaaagctgggtattatcataaaaacactgccattatgatgaagcaaaaatagaatatccttcctcctcttagtgaggggagtatgtttatgtttgt

SEQ ID NO: 73045 - DNA, 120 bp, synthetic construct
  source 1..120: mol_type = other DNA
taaattaaccattttccgcttcataattagtaaacaccttgaggaagctacattgagacattgcagctgccttttttctcctgagattttgccccgctgattttagtgcccatcagctgg

SEQ ID NO: 73046 - DNA, 120 bp, synthetic construct
  source 1..120: mol_type = other DNA
atattcatacatgagtgggctcatactgtctccaactccagttctgccccagtggggccaattctctctctttgttgtaacacctttcttcaatagtgagaaacctggctctctcacctt

SEQ ID NO: 73047 - DNA, 120 bp, synthetic construct
  source 1..120: mol_type = other DNA
cacttgggcataatgtcctgaaagttcactcatgctgtagcatgtgtcagaatttccttttccttttcaaggctgaataatattccactgtatggatagaccacattttgcttatccatt

SEQ ID NO: 73048 - DNA, 120 bp, synthetic construct
  source 1..120: mol_type = other DNA
ccaccaggccccacctccaacgctggggatcacatttcaacatgagagttggaggggacaaatatctgaactctatcaatgttatatccaagaaatcatagccaaatccaatgtcatgaa

SEQ ID NO: 73049 - DNA, 120 bp, synthetic construct
  source 1..120: mol_type = other DNA
atgcaactgattttgcatgtttaccttagattctgtaactttgctgacttcatttattagctctaataagtttttgtggaatctttaggggtttctacatatgagattatgttatctgtg

SEQ ID NO: 73050 - DNA, 120 bp, synthetic construct
  source 1..120: mol_type = other DNA
ctattttgttggtctctgctgtggtatttattatcttctttcttctgctagctttgggtttagttcttttgctagttccttaagtggtaaagttaggttatttactggagatctttcttg

SEQ ID NO: 73051 - DNA, 120 bp, synthetic construct
  source 1..120: mol_type = other DNA
tagtcttgtcagaattcatcatcagctgactaaagagcccttggaccctgaacaaccagcagtgccaggtagtatcctgtgggccttgaatgagattctgaaatatactggcttcaggta

SEQ ID NO: 73052 - DNA, 120 bp, synthetic construct
  source 1..120: mol_type = other DNA
taagcgattctcctgcctcagtctcctgagtagctaggattataggcatgtgccatcatgcctggctaatttttgtttgtttgtttgtttgtttgttttagtagagacagggtttctcca

SEQ ID NO: 73053 - DNA, 120 bp, synthetic construct
  source 1..120: mol_type = other DNA
cagaggagacagaataagaacgaatgaagcatgatctagaaaatagcctcaaaagggcaaatctaagatttattgaccttaaagaggaggtagagaaagagataggggtagaaagcttat

SEQ ID NO: 73054 - DNA, 120 bp, synthetic construct
  source 1..120: mol_type = other DNA
taggttttaagccctacatgcattaggtatttgtcctaatgctctccctccccttggcccccatctccccacagatcccggtgtgtgatgttcccctccctgtgtccgtgtattctcatt

SEQ ID NO: 73055 - DNA, 120 bp, synthetic construct
  source 1..120: mol_type = other DNA
tccttgcccatgcctatgtcctgaatggtattgcctgggtattcttctagggtttccgtggttttaggttttacatttaagtctttaatcatcttgagttaatttttatataagttgtaa

SEQ ID NO: 73056 - DNA, 120 bp, synthetic construct
  source 1..120: mol_type = other DNA
aatgggagtggtgagagagggcatccttgtcttgtgctggttttcaaagtgaatgcttccagcttttgcccgttcagtatgatattgcctgtgggtttgtcataaatagctcttgttatt

SEQ ID NO: 73057 - DNA, 120 bp, synthetic construct
  source 1..120: mol_type = other DNA
aattgtgatgtttgggtgtcgatttcagatctctctagctttctgatatgggcatttagtgctataaatttgcctctaaacactgctttagctgtgtcccagaaattctggtacgttgtc

SEQ ID NO: 73058 - DNA, 120 bp, synthetic construct
  source 1..120: mol_type = other DNA
actgcagtctggcctgggcaaaagagtgagactccatctcagaaaaaataaaaaataaaaaataaaattaaaaaaaatggctaggatcacaacccctgcttttttttttttttttttttt

SEQ ID NO: 73059 - DNA, 120 bp, synthetic construct
  source 1..120: mol_type = other DNA
catatagtcccatatttcttggaggttttgttcgttctttttcatcattttttctctaatcttgtctgcatgccttatttcgttaagttgatcttcaatctctgatatcctttcttccac

SEQ ID NO: 73060 - DNA, 120 bp, synthetic construct
  source 1..120: mol_type = other DNA
tcttcagagccagcaggcaggagagttcaagtctgctgaagctgtgcccacagccaccccttctccaggtgctctgtcccagggaaatgggagttttatctataatcccctgactggggc

SEQ ID NO: 73061 - DNA, 120 bp, synthetic construct
  source 1..120: mol_type = other DNA
atgaacttggtacctcagtcagaaatgcagaaatcacccagtgttgatctcactgacagctacagactggagctcttcctattctgccatcttgccagatgtaaagtgtagaatttttga

SEQ ID NO: 73062 - DNA, 120 bp, synthetic construct
  source 1..120: mol_type = other DNA
catcttctctgaccagtacagaataaaactagaagttaataatgagacattttggaaactatacagacatacacatagtaattaaacaatatgctcctgaatgaccagagggtcaaggaa

SEQ ID NO: 73063 - DNA, 120 bp, synthetic construct
  source 1..120: mol_type = other DNA
acacagggaggggaacatcacacaccggggtctgttggggggtgggggcaaggggagggagggaattaggagaaatacctaatgtagatgacgggttgatgggtgcagcaaaccaccatg

SEQ ID NO: 73064 - DNA, 120 bp, synthetic construct
  source 1..120: mol_type = other DNA
gatcactcttcatgaccaagtgggagttatcccaggaatgcaaggatagttcaacatatgcaaatcactttatgtgatacatcgtatcaacagaatgaaggacaaaaccacatgagcatt

SEQ ID NO: 73065 - DNA, 120 bp, synthetic construct
  source 1..120: mol_type = other DNA
aaaacagacacgtagaccaatggaacagaatagaaaacccagcaaacaaatccatatgtctacgacaaactcatttttgacaaaggtgccaagaacatgcattgggaaatggacagtctc

SEQ ID NO: 73066 - DNA, 120 bp, synthetic construct
  source 1..120: mol_type = other DNA
tgagatatgaccccaccctggtcaatatagcttttatccaaaagataggcaataatggatgctagtgaggatgtggagaaaagggaatccttgtacactgttggtgggaatgtaagttac

SEQ ID NO: 73067 - DNA, 120 bp, synthetic construct
  source 1..120: mol_type = other DNA
agatcgcgccactgcactccagcctgggtaacagagtgagactgtctctaaataaataagacgaaaagagtataatgaggttgtttgtaagacaaggggtaaatgtttgaggtagtagat

SEQ ID NO: 73068 - DNA, 120 bp, synthetic construct
  source 1..120: mol_type = other DNA
tctgtaacatcttcttgcagcctcgaacctttaagtgtgcagcgtcctcttttgtctcttgtgacctttctaggtttattataaaaccatttttggctgatgttagtgtagccactctgc

SEQ ID NO: 73069 - DNA, 120 bp, synthetic construct
  source 1..120: mol_type = other DNA
ttcttgaaacaatgttgcaaagaataacttcgtaggtatggatgttcctattgttggaggtgttatcttcagggtagattcctagaaatgggagtgttgggctgaaagagaagcccgtag

SEQ ID NO: 73070 - DNA, 120 bp, synthetic construct
  source 1..120: mol_type = other DNA
gaggatgcactttctgtttctgacatgggtcagggttggggcgaaggagtccagctggggacatgttattttggaggtgtttgtgaggcagccaggtgaggtgggttgaaggcagtaaga

SEQ ID NO: 73071 - DNA, 120 bp, synthetic construct
  source 1..120: mol_type = other DNA
aatgggagggatgggaaagactgttgaactaagctttttaggaagaaagccatcaattcccctgctctcatacaggcttgaggagggctaaggaaagtcacagttgaatgcatgctccct

SEQ ID NO: 73072 - DNA, 120 bp, synthetic construct
  source 1..120: mol_type = other DNA
ggtgtcagcgtttcactcccagcacgtcacgccacgtccctttcctctgctttgttcctcctcagctgtgaactgtctgggactgggccaggagacagtcctgggatagggaaagaaaag

SEQ ID NO: 73073 - DNA, 120 bp, synthetic construct
  source 1..120: mol_type = other DNA
cagaaccaggccctttctcaaaggaacaaacaaggctaacatgttgggctttctctgcttctgggcaatgtccgtgaaattgaagccgcactggtgttgttccacccttccttccagctg

SEQ ID NO: 73074 - DNA, 120 bp, synthetic construct
  source 1..120: mol_type = other DNA
gagctgggctcctgttgggcgggactgaggataccgagacagaaataaaactgctaaatgcatctgttgttgaataattcaatgccccatgccaggcctgttgcaaaattagccacttcc

SEQ ID NO: 73075 - DNA, 120 bp, synthetic construct
  source 1..120: mol_type = other DNA
gatttgcaatgggacacacggccacctgggatgacaacccctcccagtcttccctcaagacaagtgtggccatgaccgcatggggccagcagggtgtgagttgaagtgtcccgcagtggc

SEQ ID NO: 73076 - DNA, 120 bp, synthetic construct
  source 1..120: mol_type = other DNA
gatatggccacgcagagactatctctaagtgtcagttctggactcagctggaaaggtttcatgacctcaagggacccatgggacttgagggtggggcagctgtttgccctgtggatcaaa

SEQ ID NO: 73077 - DNA, 120 bp, synthetic construct
  source 1..120: mol_type = other DNA
atcctggggctgccccatctctggaatattgaggtgtggctggggctgatctgaggatgaatgtggctcaggttgccgggtgcccttgacgcattcccatgtcccagtggggaaaccaag

SEQ ID NO: 73078 - DNA, 120 bp, synthetic construct
  source 1..120: mol_type = other DNA
catgagtgagaacgtgccgtgtttggttttctgtttccggtagttcacttaggatcatggtctccagatccatccgtgttgctgcaaaggacatgatttcattcacttcttggaggcttt

SEQ ID NO: 73079 - DNA, 120 bp, synthetic construct
  source 1..120: mol_type = other DNA
ttctcgccaaccgctcgatgctgtgtgacttgaggcaggtcccttaacctctctgagcttcctcctctcctgtgaacaaaggatgggtccacttctcaggcttctcatgaagtttagagg

SEQ ID NO: 73080 - DNA, 120 bp, synthetic construct
  source 1..120: mol_type = other DNA
tggacccatcagtccccaccctgcagggccgttgaagagggaatgcacacctgtcacctcttggtgcgggggcatccaggttcctggcgatggggatggggtgagatgcacctgatggac

SEQ ID NO: 73081 - DNA, 120 bp, synthetic construct
  source 1..120: mol_type = other DNA
ttcattcaccgagcttgagggtttaccctaacattcattcacaccatcagtcattcagcaaacacttcacaaacgtgcatcccacgcctggcactgggccttcggagggagggaatgcag

SEQ ID NO: 73082 - DNA, 120 bp, synthetic construct
  source 1..120: mol_type = other DNA
ggtctgtgaagcgggtgtgggatcacatccacgctccttctgtggtttgtgccctgttgtggctgccaggggaggggcttccaaggccctgccaaccagctgggcagtgtggacaatggc

SEQ ID NO: 73083 - DNA, 120 bp, synthetic construct
  source 1..120: mol_type = other DNA
atagaaaacacccctttgcagctgaggctgagggtcccgagaggcgtgattgcattatccagggggcccaagtccagtgacacgtgtcctcctaaaagacaggacagattcaacaaagga

SEQ ID NO: 73084 - DNA, 120 bp, synthetic construct
  source 1..120: mol_type = other DNA
tttttttaagcccctagaagtggtttggggtttaagcgtcaatatttaatctcttgaagttacacattcaaggccctatcctgccttcggctttaggttcgcttcacaaacccattgtct

SEQ ID NO: 73085 - DNA, 120 bp, synthetic construct
  source 1..120: mol_type = other DNA
ctggatttgcttggcgggtcacctggatcaaccaggcccatttaggagcaccactcaggggccctagtgtgtgcggcagggcaggtcatggagtctccagccttcagctcgcgttagccc

SEQ ID NO: 73086 - DNA, 120 bp, synthetic construct
  source 1..120: mol_type = other DNA
cttgggtgcacactctgtgggggctggtccaggaccacccatgtgcagtcttccctggccacatcctgtattctcccgcaacgcccagtcaagaatcttcctgctgcagtaactccacat

SEQ ID NO: 73087 - DNA, 120 bp, synthetic construct
  source 1..120: mol_type = other DNA
tgtgaagggcagaggagctgcaggtaattctgttcgctcgcctctgccttggaggaagtttacagttttttttttttttttttttgaaagtttaaagctttcaacctgggcctggaggct

SEQ ID NO: 73088 - DNA, 120 bp, synthetic construct
  source 1..120: mol_type = other DNA
aaggcctcagggtgaagtcgacgctcgctgctgattccctgctggacgtcaggtgacacttccctccacagcctgggaagaagcacctgtgggccacttctttgtgttgataaggaaact

SEQ ID NO: 73089 - DNA, 120 bp, synthetic construct
  source 1..120: mol_type = other DNA
gctgtgtctgttgaacaaattactctgcatccaccgcgtgctagcgctgtgcggattatagtcccagagacagatgagagcaggggtggtcagtgtaggagcacccagagggagcctggc

SEQ ID NO: 73090 - DNA, 120 bp, synthetic construct
  source 1..120: mol_type = other DNA
ttcggctctgcaggtagagctgaccggtgtggcagggacagggtgtcggtgaggcaggtggctgaggaaatggtagctgcaggttttggccccagtcccagcagcgggactatggctgtg

SEQ ID NO: 73091 - DNA, 120 bp, synthetic construct
  source 1..120: mol_type = other DNA
gctggcttctgtgctgtgaccaccaacacccctgccctgggccctgaactcctggacagggggcgttgactgctctctggaagtgatttgtaaaatcagctttgtagagacgtaattaca

SEQ ID NO: 73092 - DNA, 120 bp, synthetic construct
  source 1..120: mol_type = other DNA
ctgatacagggggcacctccccagcccccacacttgccaagtgacttgggatgtatgtgccacaggcgagggggaccaaggactgaggggaacctggagctggtggtctgaaagggcttc

SEQ ID NO: 73093 - DNA, 120 bp, synthetic construct
  source 1..120: mol_type = other DNA
cagtaggaagggtctgctttggggtttttctattctgtcccactggtctcctggacttttcctttaccagggccctactgacttggtggtcccggtactaaaatcaatttcatgatgtca

SEQ ID NO: 73094 - DNA, 120 bp, synthetic construct
  source 1..120: mol_type = other DNA
ttcctggaataaacccccttggtcctggcgtgtgagtttcatgtcctatcacattgtactctcatgctttgttcagacttttgcactgccctgtgaagtggggtgtgtgtgtcatcttgt

SEQ ID NO: 73095 - DNA, 120 bp, synthetic construct
  source 1..120: mol_type = other DNA
ttttaaatggagccccggtgctaacgtgagcccacccaggtgctcctgcccagccagggctgtctgtcagcaccacagcgtccaagttcaggtcctcacttcctaggtggttatctccca

SEQ ID NO: 73096 - DNA, 120 bp, synthetic construct
  source 1..120: mol_type = other DNA
tgtgacgtttaggctacattccccaaggtggtgccacgttcaggcccatcacctgtaacactacccaccccacctcacccagcctgggctcactcactccaggccaagccttggacattc

SEQ ID NO: 73097 - DNA, 120 bp, synthetic construct
  source 1..120: mol_type = other DNA
aggagtgaggacggctgttgggttcttgattccagcagagggaggctgtgcagggttgcaggaaggacggttgggggcgcttcggggaggtacgagaagcaaaggtgtttgcagcccttg

SEQ ID NO: 73098 - DNA, 120 bp, synthetic construct
  source 1..120: mol_type = other DNA
tggcttttgtctccaggatcacagcttttgtcaaactccacacaaagagagaggcactcaaaagcacaacacaaacacggctagtccgcgcctttggtggtgaacataccagggaattgt

SEQ ID NO: 73099 - DNA, 120 bp, synthetic construct
  source 1..120: mol_type = other DNA
ggcagggttgtttccgcctgcatttgttcagccagcaaatctttattaagcacctactgtgtgccaggatctatgtgcaagcagcccatgggctcatgaaaggcagagctggactgagat

SEQ ID NO: 73100 - DNA, 120 bp, synthetic construct
  source 1..120: mol_type = other DNA
tccatcaaaatgctcccttctgaggccgctttgctgggcgtaggatcagccttgctttgagggctgtttaggagaggaaccccggcgctgctgctccccggaggcagccagtgcttgtga

SEQ ID NO: 73101 - DNA, 120 bp, synthetic construct
  source 1..120: mol_type = other DNA
gtcgccctctcacagctctggacgatggagggccgagacccaggtgtgggcagggctggttcttctgaggcccctcccggcttctgagggtggctagcaactgtcttctagatgtagtac

SEQ ID NO: 73102 - DNA, 120 bp, synthetic construct
  source 1..120: mol_type = other DNA
cgctaatttttgtattttttgtagagatagggttttgccatgttacctaggctggtcttaaactcctgagttcaaacaatcctcccacctcggccaacccaaagtgctgagattataggc

SEQ ID NO: 73103 - DNA, 120 bp, synthetic construct
  source 1..120: mol_type = other DNA
ttttttaaaccttctccaaaaacacgtaacccgattctgtccaagcgatttgtgagaatggggttgacacccctgggctggaacctgggaaccaccagtcagcgtctttcctccagggag

SEQ ID NO: 73104 - DNA, 120 bp, synthetic construct
  source 1..120: mol_type = other DNA
cttctccattcgggtttagtgggattagagtgtgcggccatggggacaggtgtttcctttatgttctgcctgagggctggaaagagcctcatcagtgagtgccacgttcggtgggggtct

SEQ ID NO: 73105 - DNA, 120 bp, synthetic construct
  source 1..120: mol_type = other DNA
ttagatttttaggtgaagccaatccctgttgggctgagaaaagtcctgggcggctgtgagctggtggtgagttttccagacttggtcatggtcaaggtagttgaagtcgggggttgaaaa

SEQ ID NO: 73106 - DNA, 120 bp, synthetic construct
  source 1..120: mol_type = other DNA
aagttctcttgcttcatctcaggctcaggtgttttgagtttttttttttttttaaatgaggacatctgttagaccacttaggagttctagaacctttggaaaaccccctctcatcccggg

SEQ ID NO: 73107 - DNA, 120 bp, synthetic construct
  source 1..120: mol_type = other DNA
cggttggcgttttctggggcttgttgtcagtgcaatcatacagtgtgtggtttttattgtctggttccatatttgagagtcatccaggctgtggcatgtaataattcattcctttttcat

SEQ ID NO: 73108 - DNA, 120 bp, synthetic construct
  source 1..120: mol_type = other DNA
tcatgtaagacataggcggagattcatgtgttttttcttatggatgactgactggtccagtgtcatttgttgaaaagagtatcctttacccagtgaatcatcttgactccttttaagagg

SEQ ID NO: 73109 - DNA, 120 bp, synthetic construct
  source 1..120: mol_type = other DNA
aatgatgttttctgaacatagagacagttttacctctttttttcaaatgtggacgcctatttgtttctttttctggcctgattgcactgggcggctcatccactgcagtgtccaatacaa

SEQ ID NO: 73110 - DNA, 120 bp, synthetic construct
  source 1..120: mol_type = other DNA
caggtgattgcttcttgagtgggctttggtattttgtgtatttgaaagaatatgttcatttcatctgggtgttaattgtattggcataaagtttttcagaatatcctgttactatccttt

SEQ ID NO: 73111 - DNA, 120 bp, synthetic construct
  source 1..120: mol_type = other DNA
cgttcttgggtgcattagcatttaggattgttatgtcctcttgagaagtcaacacatttgtcattatgaaactgcctctttatccctggccactttctttgctctgaaatctgctttgtc

SEQ ID NO: 73112 - DNA, 120 bp, synthetic construct
  source 1..120: mol_type = other DNA
taacttctacttagtgcctataccacaaacaataagctgactccatttccatcttttataagttcagacccccacaaccttgggtggactactgactacttcgcgggtaagaaatggtga

SEQ ID NO: 73113 - DNA, 120 bp, synthetic construct
  source 1..120: mol_type = other DNA
gaaaagtttcttaaggcggtttcataggtgcgtgtggggctgttggatacagtgacccacttcaaggtgacatcttcttcttgcatctcagatagcaccaggtttgtgtgtttatgcgtg

SEQ ID NO: 73114 - DNA, 120 bp, synthetic construct
  source 1..120: mol_type = other DNA
gggggctgcaaaagcagagggagtggagtgtcaccgggtgtcccggcgtgggcaggtcctgttgtggagcctcgtgacctgctcatagcacagctgggacacttccagtgactgctctgc

SEQ ID NO: 73115 - DNA, 120 bp, synthetic construct
  source 1..120: mol_type = other DNA
aaatgccaacacgtgagctgagtgaccggaagagggggcgcctccctgagcaggtgaatgaagggtgctggggtggcgagttgagggccaacagagatggtgtcccggctgatgtagggt

SEQ ID NO: 73116 - DNA, 120 bp, synthetic construct
  source 1..120: mol_type = other DNA
aagctgccatgaatattgcgtgcagttttttgagtaatcatatgtcttcatttctctggggtaaatccctgggagtgggattgcgggatcatgtgttagatgcatattttcctttcgaag

SEQ ID NO: 73117 - DNA, 120 bp, synthetic construct
  source 1..120: mol_type = other DNA
tgtcatctgttctgccaggaaagcactgtcttgattactgtgacttttacgctaagccttgaaatcaggtcctgttaatcctccaattttgttcattttcaagagtgagctgttctgcca

SEQ ID NO: 73118 - DNA, 120 bp, synthetic construct
  source 1..120: mol_type = other DNA
cagtccatatactatttatttcttgtttttacttgaatgcacctgacagtgtctgccagtggggagagggctgctatccttatcttactcctaaggtgaagtgaggtaatctttcaccat

SEQ ID NO: 73119 - DNA, 120 bp, synthetic construct
  source 1..120: mol_type = other DNA
gccatgtgttggctgttgtgtctggttttggcatcagatgccgctggcatcagagaatgagttgggaaatatttcctgctcttcaatttttaggaagagtttgtgtagaattgcaattat

SEQ ID NO: 73120 - DNA, 120 bp, synthetic construct
  source 1..120: mol_type = other DNA
agtcaaaagaagggtgctcagcccctggtctctttggtttgccaaacttctagtgctggtgaaattcttaaatatgacatttttagaagcttcggctcctggcagataaaaataatgtcc

SEQ ID NO: 73121 - DNA, 120 bp, synthetic construct
  source 1..120: mol_type = other DNA
tccaggtttcccgtttgataagaacaccagttgtatgggaataggggcccaccctaaccacctcatcttacctaatagcatctgcagcaaccctatttccaaacaaggtcacactctgag

SEQ ID NO: 73122 - DNA, 120 bp, synthetic construct
  source 1..120: mol_type = other DNA
atcgcctgaattcctctttgaaagacagagaaggccgtgccgtagctctgggcttttatcttttaacaaatacattgctcagcagcattaagtaaggcaaagcaataatgggtggttgaa

SEQ ID NO: 73123 - DNA, 120 bp, synthetic construct
  source 1..120: mol_type = other DNA
gattaaaagattggggaagaaaaatcccttacctatttgggaattaaacaacactctcctaaatagccagaaagaagagattgatgtgggaagtgcgggccctgtagggcgttatgagac

SEQ ID NO: 73124 - DNA, 120 bp, synthetic construct
  source 1..120: mol_type = other DNA
cactacacccacacatggggccagctgccttgagcacctcctgctcagacccaggtgaggtacctgagtgacaaatgtcaagagtttgcagttactcccagagctacggacaaggggcaa

SEQ ID NO: 73125 - DNA, 120 bp, synthetic construct; identical to SEQ ID NO: 11623
  source 1..120: mol_type = other DNA

SEQ ID NO: 73126 - DNA, 120 bp, synthetic construct; identical to SEQ ID NO: 11624
  source 1..120: mol_type = other DNA

SEQ ID NO: 73127 - DNA, 120 bp, synthetic construct
  source 1..120: mol_type = other DNA
gatgccaccagtgtcctcacaccagcctgctcctgccctgtgcccatcctcctcctgcttagcgatcctttctcttgctaatgtgtgggacaaggggctctcagggggcctggccaaggt

SEQ ID NO: 73128 - DNA, 120 bp, synthetic construct
  source 1..120: mol_type = other DNA
acagcaccctcagcctaacccctgtgtccacccctcttcagagtctccaggccccatcttggcctgatgaggcctcattgtctcctaaaaagtgtgggtacagatctcaggcttttcaag

SEQ ID NO: 73129 - DNA, 120 bp, synthetic construct
  source 1..120: mol_type = other DNA
accttgagctaccttgagcttccattttccttccgcaccatgcactgatttcccctgggttgaggttgagggtcccagggtctgtctgcctaatgacaagatttcagtaccaatagcgaa

SEQ ID NO: 73130 - DNA, 120 bp, synthetic construct
  source 1..120: mol_type = other DNA
cctgggcaacagagcaagactctatctcaaaataaaataaaatggaaatatgttttaccatcttaaccctttttaagatcacagttccttgcgaccatcgccaccatccagctccagagc

SEQ ID NO: 73131 - DNA, 120 bp, synthetic construct
  source 1..120: mol_type = other DNA
aactttggttttttaaataattttaaagcacacaaataagacacctgagagccaacttataacacgccccaggatggacatggattcacactcatggtagaacagagctgagggtgcagt

SEQ ID NO: 73132 - DNA, 120 bp, synthetic construct
  source 1..120: mol_type = other DNA
ctcctctgtaaaatgtgaacagaggccaccacccccattatgtgggtctgtgtttgctctgtgcacgtctcggtgcccagatctgaggcccttttgtccatgaagccatctgcagccagg

SEQ ID NO: 73133 - DNA, 120 bp, synthetic construct
  source 1..120: mol_type = other DNA
agctccctggggtcttgctgtggccttggccctgggtgttgtcccacacagcccaggagagcgtttgaggctgatggtggtggagatagttttatctctgagcaaacattccatcttgct

SEQ ID NO: 73134 - DNA, 120 bp, synthetic construct
  source 1..120: mol_type = other DNA
aaataaataaataaataaagtgcatcaaaacaagaaaaaccctgctaagggccagtctgctgggtggtggatgggtcagcagagctgggctgggagccgctatgcctccccatcaaggcc

SEQ ID NO: 73135 - DNA, 120 bp, synthetic construct
  source 1..120: mol_type = other DNA
aaaaacatttttgcaaaaggaaagcaactaagctcccagcgtgtctccccttatccattgggcttgtcccaaacacatgccggatggtgtaagtatcattccatcctaattaataacatt

SEQ ID NO: 73136 - DNA, 120 bp, synthetic construct
  source 1..120: mol_type = other DNA
tggtgtggggccccctctggccaaggctggggttcctggtgtggggcctcctctggcctgggtgggcctggcctgagagctgcagcctcacctgggctccactgcctatggacatgagct

SEQ ID NO: 73137 - DNA, 120 bp, synthetic construct
  source 1..120: mol_type = other DNA
tctctccgtttagatgctgcctgcctccctatccgaggtgtctccatgtccccggtcatcagggcgtgacccgtctgaccagcaagccccttccccagacgagagcagggtgtatgctct

SEQ ID NO: 73138 - DNA, 120 bp, synthetic construct
  source 1..120: mol_type = other DNA
accatctccttcgcaggggcatccgcttcctgcagatcctgaggatgctacacgtcgaccgccagggaggcacctggaggctcctgggctccgtggtcttcatccaccgccaggtgggtg

SEQ ID NO: 73139 - DNA, 120 bp, synthetic construct
  source 1..120: mol_type = other DNA
caccctgtacatcggcttcctgggcctcatcttctcctcgtactttgtgtacctggctgagaaggacgcggtgaacgagtcaggccgcgtggagttcggcagctacgcagatgcgctgtg

SEQ ID NO: 73140 - DNA, 120 bp, synthetic construct
  source 1..120: mol_type = other DNA
gctgaggcatttttagggggcaggcctagcttgccagtgtccctctgggagctggtggctgccttcaaatcctccagtgaaagtcggcgtttatatatgcatggagctcaagggctgctt

SEQ ID NO: 73141 - DNA, 120 bp, synthetic construct
  source 1..120: mol_type = other DNA
agccaggagagttcccgggaggctggtggcaaggtgggcagtgaggagctggcggtgcagcaaaagccagtgggtactggccccggcacggctgataagcagtgcccagccttcgctgct

SEQ ID NO: 73142 - DNA, 120 bp, synthetic construct
  source 1..120: mol_type = other DNA
acttgctgttggctttagggtccacccaggtgatccaggaggagctcatcttgattgaatcttcaaagagcctatttccaaatatcgcattctgtgggtccaggtgaatatgaattaggg

SEQ ID NO: 73143 - DNA, 120 bp, synthetic construct
  source 1..120: mol_type = other DNA
ggagttccgtgcaaaggggaacgagttcagctgccctactgagtgggcctggggacagaggcagagtacgcacctgctgtgtgcctcagtttctccatctgcacatgggagacagcagtc

SEQ ID NO: 73144 - DNA, 120 bp, synthetic construct
  source 1..120: mol_type = other DNA
tctctaagtctgcaaggggcaccaaagcactttacaaattccaggagtgagtgacaggctggccacgtgccaagccctcacccagcaggcagcccgtgagaagtgtgttgtgatcatgca

SEQ ID NO: 73145 - DNA, 120 bp, synthetic construct
  source 1..120: mol_type = other DNA
agctgtctgcctggccactttctaatggggagccctcagcacagtgactgcccagcctcagtttcctccttcgtagatgatcttgacctgagagtgccagctggggtgtgacacctctgg

SEQ ID NO: 73146 - DNA, 120 bp, synthetic construct
  source 1..120: mol_type = other DNA
aatatattaaaataatttaatgttgttattagaacaatgtttaatatgccagcccgtgccatttgtcttgatgcctgggtttgctggcgccccttacgcttggcacgcaaggcaggagct

SEQ ID NO: 73147 - DNA, 120 bp, synthetic construct
  source 1..120: mol_type = other DNA
gagggatgaataggaggttgctggatgaacaagtaggaatcagcatgttcatactgaaggggtgagtgtccccccaaaaaatctggattagacagactctggagccctcttgctccaggt

SEQ ID NO: 73148 - DNA, 120 bp, synthetic construct
  source 1..120: mol_type = other DNA
ggcgttcatcactgttcgttaacgtgctcatcggtacagcctggtttcccgcaatgtggccgcttctgctacctgagcctccgagcctcctgctgtggcagttctgggcagtcgcgtgag

SEQ ID NO: 73149 - DNA, 120 bp, synthetic construct
  source 1..120: mol_type = other DNA
gaagaaggcttgagctgcatcttgtactctcagaaaagaggaaaataaaacatctggtgccctggagtggcgtcaggaagcagcgcgtcatcccagcccctgctctttgttgacgaccag

SEQ ID NO: 73150 - DNA, 120 bp, synthetic construct
  source 1..120: mol_type = other DNA
tgttccatgtcctttccagaaaccacagattgtaaggtgatgtgtctagttcacaatgcctgtatgtgggtgtgtgtgtgtgtgttatgtgcgtatgtgcataatatgtgtttgtgttgt

SEQ ID NO: 73151 - DNA, 120 bp, synthetic construct
  source 1..120: mol_type = other DNA
acatacagatggaccagcccacctggcccccagaatggtccctgggaatgggttagagcggctgcagccctgccccatgggactgggccccttgctggataagacctggggtataagttc

SEQ ID NO: 73152 - DNA, 120 bp, synthetic construct
  source 1..120: mol_type = other DNA
taccaagctctgggatgctgggctctggctctgtcactccaggctctccaggacccaccagagaatgggactgctctgttaacgtaagcaaggacttggcacaggagtcacttgagaatt

SEQ ID NO: 73153 - DNA, 120 bp, synthetic construct
  source 1..120: mol_type = other DNA
gtctacctggggctgtcacccaggagcccatcagtgtgggggaacattctccactcggccctctctcaggctcatgtggccagtgatgacaaggccaccaggacatgtcctcatacaagg

SEQ ID NO: 73154 - DNA, 120 bp, synthetic construct
  source 1..120: mol_type = other DNA
tcaccatgcatttggcttggtacagcctgtgtcagggagtcagcatcgttcgggacactgggccatacacccgatgctaggttcctgccatcccaatgtcccccgacttgggggtatgta

SEQ ID NO: 73155 - DNA, 120 bp, synthetic construct
  source 1..120: mol_type = other DNA
gtcactgccttttttgggagcccgagcaagccagtgagtttctcccttgggctgtggtctctgacaacgaggtatgaacagacagagggtggagcttctagaaacttctgtaaaccttcc

SEQ ID NO: 73156 - DNA, 120 bp, synthetic construct
  source 1..120: mol_type = other DNA
ttctccctgggagctccaacttctcttgcatgtgacttcagtgcccacttctggggactgtgatcccaaactgccaaattctctagcagctctcttaaaaccaaatgtgaaggattctgg

SEQ ID NO: 73157 - DNA, 120 bp, synthetic construct
  source 1..120: mol_type = other DNA
tccctttaccctttggtcatttctgcatccatctctccctctcggacctcttcccagtgcctgggactaacccgaatgtctcagcttaccagcagttgtaaggatgctgtcacatcttat

SEQ ID NO: 73158 - DNA, 120 bp, synthetic construct
  source 1..120: mol_type = other DNA
tgcggtgttggccccatttatagatggagaaacggaaggccagggccatgtggggaactcctgaggacacctgtgtgtcctgacacctcactgagcctgtcgagaggcacaggcaggtat

SEQ ID NO: 73159 - DNA, 120 bp, synthetic construct
  source 1..120: mol_type = other DNA
cctttgtctttcaccactgacccttcccaagctggtaccatgcctaacccatggtgggtacacgataaaaatgcagggctgtgccaccagggttttgtcttgacaaagggactggaggca

SEQ ID NO: 73160 - DNA, 120 bp, synthetic construct
  source 1..120: mol_type = other DNA
agatcctactgcctcctgccgtttcctgggcctttgttgcccagtattttggttttgtcttttaaacaatcctctttttgttgatgctgcatacattgagatatttactcacagacttgc

SEQ ID NO: 73161 - DNA, 120 bp, synthetic construct
  source 1..120: mol_type = other DNA
ctgactcttgctcatgatggctcatttcattgtgggtttgcaatttagatcatgagtttgtgtggtggatgtttttgtttgtggggttcctatgtatcctgtataaggtacatgcctctg

SEQ ID NO: 73162 - DNA, 120 bp, synthetic construct
  source 1..120: mol_type = other DNA
caggaattgggaaaaagttgattccaaccctcatggatgactgaggggttgaagatttcagtggaggaagtaactactgatgttgtgaaaactgcaagagaactagaattagaagtggag

SEQ ID NO: 73163 - DNA, 120 bp, synthetic construct
  source 1..120: mol_type = other DNA
ttgataacctaaagaaaccagttgccactcacctataggcatggggctaatttaattgctatataaaaacgctcttgtaaatcaagatagaagttaaaggatattaaaacagttcacaga

SEQ ID NO: 73164 - DNA, 120 bp, synthetic construct
  source 1..120: mol_type = other DNA
tcctcaagcatttcaattgtgttgccacttggtagcaactgattttttcctttagtgattttatggtcttctctatcatctcttcgtttttcttttcctttatgcctgaacttttgtggt

SEQ ID NO: 73165 - DNA, 120 bp, synthetic construct
  source 1..120: mol_type = other DNA
aggacccatatgcagcaaacagtcttgtgtctctgtctgctgccaaattggcctcaggctctatcaataccagatctgaataggggctattctttcttttagtgtccttaatgttgtatt

SEQ ID NO: 73166 - DNA, 120 bp, synthetic construct
  source 1..120: mol_type = other DNA
gaggtattaaagaccagggcttcaactgcaaaccttgtgggacacaattcagcccgtgacacaggaataggcttgttaatttcagtgatgtagccaggttgtttttctcgttttgtctga

SEQ ID NO: 73167 - DNA, 120 bp, synthetic construct
  source 1..120: mol_type = other DNA
gtaagtgacctgatgtccttctcagtgtatcacatcctgaggcacacagtgtatctgccccttattaacgatgttattttgatcaccaaattgaggccgttatccacttttctaccttac

SEQ ID NO: 73168 - DNA, 120 bp, synthetic construct
  source 1..120: mol_type = other DNA
acatataccccagtttatttaaccattccctcatccaaggacatgtgggtcattcccagtttgggctattacaaatcagagtaggctgaacaatggcccccaaagtagccaggtcctaac

SEQ ID NO: 73169 - DNA, 120 bp, synthetic construct
  source 1..120: mol_type = other DNA
ttcagataggtgtgtagtgagatctcattgtggtttacatttacatttcctcattaggatgatactgaacatcttttcatgtgcctgtttgccatttttgtattctatgcagtgaaattc

SEQ ID NO: 73170 - DNA, 120 bp, synthetic construct
  source 1..120: mol_type = other DNA
atatcacccccaaacccactattccatccccctcagccctaggcaataactaatctttctctctatgggtttgcctattctggacattttatataagtggaatcatacaatgtatggtcc

SEQ ID NO: 73171 - DNA, 120 bp, synthetic construct
  source 1..120: mol_type = other DNA
aagaaaggaagaaaagaaagagatatgaaaacacatgggagtggaaagctgagtcaaatgatcactatcttttttttgagatgaagtcttgctctgtcgccaggctggagtgcagtggcg

SEQ ID NO: 73172 - DNA, 120 bp, synthetic construct
  source 1..120: mol_type = other DNA
ttggtgttatatctaagaaacctctgccaaatccaaggtcataaagatttacccttatgtttaccctaagaattttatagctttatctgttacgtatttatgtctttgatccactttgag

SEQ ID NO: 73173 - DNA, 120 bp, synthetic construct
  source 1..120: mol_type = other DNA
ttcgttgtaattgtttcacaatggattccttggggttttctgtatacaacattgatacggtttggatgtttggtccctccaaatctcattaaaatgattcccaatgttggaggtggggtc

SEQ ID NO: 73174 - DNA, 120 bp, synthetic construct
  source 1..120: mol_type = other DNA
accactgcacccggccaactgtgatttttaatagatgccctttatcaggttgaggatgttcctttctattcctagtatattgagtagggctttttctcccatcatggaagggtgttgaat

SEQ ID NO: 73175 - DNA, 120 bp, synthetic construct
  source 1..120: mol_type = other DNA
aagcacaatagcgtggatttacctaatgccacagaactatatacctaaaatgggtaaaataaattttataagttctcttttcatgtttttgtctggttttggtgtcagggtgatactgga

SEQ ID NO: 73176 - DNA, 120 bp, synthetic construct
  source 1..120: mol_type = other DNA
gctttaggtttagtttgctcttctttttctagtttcttgaggtggagagttggcttactgatttgaagccttattttttgatataggcattcatagctataaaattccatctttacactg

SEQ ID NO: 73177 - DNA, 120 bp, synthetic construct
  source 1..120: mol_type = other DNA
atctttttccatccttttactttcagttggcatttatcatctaaagtgtgcctcatatagatggaatacagatggatcctgtttttcaaatctggtctgataattcctgcctttgattag

SEQ ID NO: 73178 - DNA, 120 bp, synthetic construct
  source 1..120: mol_type = other DNA
gcagagtgccacatagcctcacctcccaccatttcatccaagaatagtagttgggtaatagttcaataactcactctgaataattgatagaacaacaagacagaaaatcaacaagagtta

SEQ ID NO: 73179 - DNA, 120 bp, synthetic construct
  source 1..120: mol_type = other DNA
gttttctactcttaattacatatatgttacaacttaattacacatacattgttacacatcctgttaggacaggggttcccaaccccagggccatggactggtaccagtctgtggcctatt

SEQ ID NO: 73180 - DNA, 120 bp, synthetic construct
  source 1..120: mol_type = other DNA
tgtgcagccactggtgtctttgctcagttttgtttgttttaattcttatgtttgttttgtaagcctggcttcattggtgtcacccctggatcagcataacctagtggtcaagccatgatt

SEQ ID NO: 73181 - DNA, 120 bp, synthetic construct
  source 1..120: mol_type = other DNA
caaaaggagctactgagagaaatcttcctctcacccatatctcttccatcctaattccccctacccattataggtaaccagtttcagtgttttctagtttatagtttgtgtgtgtttgct

SEQ ID NO: 73182 - DNA, 120 bp, synthetic construct
  source 1..120: mol_type = other DNA
tattccattggtctatatgtccatccttgtgtcctagagaccacattgtgtcagtaccacattgttttgattactgcagctttgtaaaagttttgaaaatggcaggcctgagtcttccaa

SEQ ID NO: 73183 - DNA, 120 bp, synthetic construct
  source 1..120: mol_type = other DNA
aatgtggtgtattacattgattgatactcttgtactgaaccacccttgtattcttgagataaattccatgtggtcatgatatataatcctttttaatatgctgctgaatttggcttacta

SEQ ID NO: 73184 - DNA, 120 bp, synthetic construct
  source 1..120: mol_type = other DNA
acgtaaggtataatattaggttatggatccttcttctttttcagtgtgggcattcacagctataatttttcctctgagcacttctttcactacatcccataagtctgagtatgttgtgtc

SEQ ID NO: 73185 - DNA, 120 bp, synthetic construct
  source 1..120: mol_type = other DNA
ttctgtttttcattatgactgcaccaatctacagtcccaccaacactgtacaagagttccctaaccctagccaacacttaatagctattctcatgagtgtgaggtgatatcgcatagtaa

SEQ ID NO: 73186 - DNA, 120 bp, synthetic construct
  source 1..120: mol_type = other DNA
tcttcgtgttcttgtggaaaattggttgatcatatatctttgaatttctttctgggctctctattctgttccactggtctacatgtttgttttttatgccaggaccatactgtttgatca

SEQ ID NO: 73187 - DNA, 120 bp, synthetic construct
  source 1..120: mol_type = other DNA
tttagtctgccaatattttattaaggatttttgcatcggtattcttgggttatgttggcctgtagtttccttttcttgtgatgcctttggctcacctgggtatcaaggtgatgctggcct

SEQ ID NO: 73188 - DNA, 120 bp, synthetic construct
  source 1..120: mol_type = other DNA
cacctggccgaattcattcatttttatggctgcatagtattccatggtgtacatgtaccacattttctttatccaatccaccactgatgggcatctaagtggattccatgtctttgctgt

SEQ ID NO: 73189 - DNA, 120 bp, synthetic construct
  source 1..120: mol_type = other DNA
gctatgcagaagctctttagtttaccactgtgatctctttgctattggtctgttcaggctttctattcctgatttaatcttagcaggttggtttttttctaggaatttgtccatttcctc

SEQ ID NO: 73190 - DNA, 120 bp, synthetic construct
  source 1..120: mol_type = other DNA
actttcaatctacttgtgtctttagaccaaaagtgagtttgttatatacagcataggttgatggttttcttttaaatccattctgccaacctctgctttttggagaatttaatcgactta

SEQ ID NO: 73191 - DNA, 120 bp, synthetic construct
  source 1..120: mol_type = other DNA
ctgtgcactgcctattcaacccttcttccccaacaacccttggcaaccactgaactttttactgcctccatagcattgccttttctaaaatgcaatatgattggaatcatacagtatgta

SEQ ID NO: 73192 - DNA, 120 bp, synthetic construct
  source 1..120: mol_type = other DNA
cccaccagcaatggatgagtgttcctgttgccccacatattggcaagtatttggtattgtcagtgttttgaattttggccattctaataagcgtgtagatatatcacatttcttgtttta

SEQ ID NO: 73193 - DNA, 120 bp, synthetic construct
  source 1..120: mol_type = other DNA
cattttgcattcccactaacagtgcacaaggattccaatttctccatgtcccttccagcagtggttattttctgtttatgtgggatttttttgagacaagatctggctctgtcacttagg

SEQ ID NO: 73194 - DNA, 120 bp, synthetic construct
  source 1..120: mol_type = other DNA
cttttattgcctgtgcctttggtgtcgcatacaagaagcactgccaatgatgtaaagtttttcccctatgtttccttataagacttcatagttttaggactttgacccattttgagtaag

SEQ ID NO: 73195 - DNA, 120 bp, synthetic construct
  source 1..120: mol_type = other DNA
ctttctgcaaataacatcattaggatttttattgggattaccttggatttgtagattgttttgtgtggtactgacaccttaacaatattggccttccaatccatgaacataggaggtgtt

SEQ ID NO: 73196 - DNA, 120 bp, synthetic construct
  source 1..120: mol_type = other DNA
atttttaaaattttatgtagagatagggtatcactatgtttcctaggctggtctcaaactcctgtgttcaagctatccttcaccttggccacccccaagtactgggattacaggtacaag

SEQ ID NO: 73197 - DNA, 120 bp, synthetic construct
  source 1..120: mol_type = other DNA
gcatgtggatatcctggtttcacagtgccatttattcaagagagtaccctttccccattgtgtactcttggtgtctttgtcaaagattagttgaccataaatgtgtgggtttatttctat

SEQ ID NO: 73198 - DNA, 120 bp, synthetic construct
  source 1..120: mol_type = other DNA
ggctaggacttccagtactgtgttgaatagaagtggtgagaatatctttttcttgttcctcatcttagaggagaggcattcagcttttcagcattgagtatgatgttagctgtgggctat

SEQ ID NO: 73199 - DNA, 120 bp, synthetic construct
  source 1..120: mol_type = other DNA
tataatcctattgtttcctggcctggaaagtttttgctcagaaatccactgatagccttatggaggttcctgcagatgtaagaactttatttatcttgccgctttcaaaattatcttgtc

SEQ ID NO: 73200 - DNA, 120 bp, synthetic construct
  source 1..120: mol_type = other DNA
cccatctctactaaaaatacaaaaacattagccaggcatagcagcgtgtgcctgtagtcccagctacttgggaggctgaagcaggagaatggcgtgaactcgggaggcagagcttgcagt

SEQ ID NO: 73201 - DNA, 120 bp, synthetic construct
  source 1..120: mol_type = other DNA
acaccacagtattttccataatgactcactaatttatagtcccacaaatagtgtattatttcccttttctctgcatccttgccagcatttgttatgttttgtctttttgaaaacagccat

SEQ ID NO: 73202 - DNA, 120 bp, synthetic construct
  source 1..120: mol_type = other DNA
ttcaaatctatgttgttgaagagtcgactgtattttgatgtcaggcagtgtagtgcctccagcttcattctgcctgctcagtattgtttgtcctatttgtggtcttttgtggttccatgc

SEQ ID NO: 73203 - DNA, 120 bp, synthetic construct
  source 1..120: mol_type = other DNA
tatcagatgagtagattgcaaaaaatttctcccattctgtaggttgcctattcactctgacggtagtttcttttgctgtgcagaagctctttagtttaattagatcccatttgtcaattt

SEQ ID NO: 73204 - DNA, 120 bp, synthetic construct
  source 1..120: mol_type = other DNA
gttttgcacattgattttgtatcctgagactttgttgaagttgcttatcagcttaaggagattttgggctgagatgatggggttttctaaatatacaatcatgtcatctgcaaacaggga

SEQ ID NO: 73205 - DNA, 120 bp, synthetic construct
  source 1..120: mol_type = other DNA
tctggtcctggactttttttggttggtagactattaattattgcctaaatttcagagcctgttattggtcttttcagggattcaacttcttcctggtttagtcttggaagggtgtatgtc

SEQ ID NO: 73206 - DNA, 120 bp, synthetic construct
  source 1..120: mol_type = other DNA
tgttctgtagatgtctattaggtccacttggtgcagagctgagttcaattcctggatatccttgttaacttccggtcttgttgatttgtctaatgttaacagtggggtgttaaagtctcc

SEQ ID NO: 73207 - DNA, 120 bp, synthetic construct
  source 1..120: mol_type = other DNA
atctttgtggcattctctgtatttcctgaatttgaatgttggcctgccttgctaggttggggaagttctcctggataatatcctgccttgctaggttggggaagttctcctggataatat

SEQ ID NO: 73208 - DNA, 120 bp, synthetic construct
  source 1..120: mol_type = other DNA
tcagggacccacttgaggaggcagtctatccattcttagatctcaaactccgtgctgggagaaccactactcttttcaaagctgtgagacagggacatttaagtctgcagaggtttctgc

SEQ ID NO: 73209 - DNA, 120 bp, synthetic construct
  source 1..120: mol_type = other DNA
tattctaactagctgtgtatttttacccactaaccaacctctcttcaccctccagacatacctttcacagcctttggtatctatccttctactctctacctccatgagatcaacttttat

SEQ ID NO: 73210 - DNA, 120 bp, synthetic construct
  source 1..120: mol_type = other DNA
agctccattaagtgaagagggtgctcttttcccagtgtatgttcttggcatctttgtcaaaaatcagttggctgtaaatacatggatttacttccaggttctactctgttccattggtct

SEQ ID NO: 73211 - DNA, 120 bp, synthetic construct
  source 1..120: mol_type = other DNA
ttagcattgcttttgcagtatcccttaagtttcagaatgttgtgcttctattttcacttgtttcagtaaattttttatttctgccttaatttcttctttgacccattggtcattcaggaa

SEQ ID NO: 73212 - DNA, 120 bp, synthetic construct
  source 1..120: mol_type = other DNA
tttctccttcatttctgacgaatataactttgctaagtacagtattcctggctggcaggtttttggttttgttttttctttcagcactctgcgtatataatcccatcctcctggcctgta

SEQ ID NO: 73213 - DNA, 120 bp, synthetic construct
  source 1..120: mol_type = other DNA
gtagtttcttccaattttttgatctgtctttcctaagagagtcttgttcctgaagatatatctatggtgttctttgggcagggcactttggttttgattctgggtgcctgcagtagtgtg

SEQ ID NO: 73214 - DNA, 120 bp, synthetic construct
  source 1..120: mol_type = other DNA
tgactatgggcagggtcacctttcctcatggcagccttgcttcggaggtagcagagtattgccaatggctcatgctttggcctggagggagcagtcaggagtggcaaccagctttgtgta

SEQ ID NO: 73215 - DNA, 120 bp, synthetic construct
  source 1..120: mol_type = other DNA
ggttttgccatgttgcccaggacagtctcaaactcctgggctcaagcaatccacccgcctcatcctttcaaagtgctgaaattacaagcatgagccatcatgtccacacctactaatttt

SEQ ID NO: 73216 - DNA, 120 bp, synthetic construct
  source 1..120: mol_type = other DNA
ctgatacaatctcattccttgttattgctctgttcagattttttttcttcctggttcaatcttgggaggttatatatgtccaggaatttatctctttcctctaggttttctaattgttga

SEQ ID NO: 73217 - DNA, 120 bp, synthetic construct
  source 1..120: mol_type = other DNA
gtatatcctggagaatgtgctgtgtgctaacgaagcagcagttcaaatctaatatttccttgttgatatttttccatccaaatgaattgtccaatgctgagtatgaaatgttgccatccc

SEQ ID NO: 73218 - DNA, 120 bp, synthetic construct
  source 1..120: mol_type = other DNA
gtggggctgatttagtagtaatgaattccctcagtttttgcttgtctgagggaggcaaaatttcttccctcattctgcttcatttctgaaggatagctttgctgggtatagtatttgtgg

SEQ ID NO: 73219 - DNA, 120 bp, synthetic construct
  source 1..120: mol_type = other DNA
ttttgtgtccccaagttgatatctgcatatctggaataacagagacttccaattttatggagtagccttagtaaggacttttcctgtacacgcgtctgtagtatcatttgggtagggtgc

SEQ ID NO: 73220 - DNA, 120 bp, synthetic construct
  source 1..120: mol_type = other DNA
ctcaaatgttccgacagcttcctgtcaccctgtcttgtgtcagtctcacagcacacacagcttaattcaggaattaagctgtgctggtcacttattgagaaagagcttcatggtgggcag

SEQ ID NO: 73221 - DNA, 120 bp, synthetic construct
  source 1..120: mol_type = other DNA
catctgcaccggtttccaaggcttctccctcactaattgctttgattattgtgtgaagttaagaactggcacatttccgcgatgttgtgatgaaggtgaaaagatcgctcttaattagat

SEQ ID NO: 73222 - DNA, 120 bp, synthetic construct
  source 1..120: mol_type = other DNA
cccaactttgtcatgcacattcctgaagactctcttggtaacaaatgatggaaccccaactcaaacaagcttaagcacaaaagggacattttttggctcacacagctggacccagctgtt

SEQ ID NO: 73223 - DNA, 120 bp, synthetic construct
  source 1..120: mol_type = other DNA
aatctccggagccctggaaagcttgtggaagagggcttgggttacacctgggagattaggccggattttaatcaatcaggaggggaagggcagggggtgagtggttgggtgaagttacta

SEQ ID NO: 73224 - DNA, 120 bp, synthetic construct
  source 1..120: mol_type = other DNA
tttaggcccagatcctggccttgacaaagcaaaggcagccaaagaattaaagcatcaaaaaccaggactgtcttaggaaagtgtgacttcattgtcaccaggatgctgtgctctttgtcc

SEQ ID NO: 73225 - DNA, 120 bp, synthetic construct
  source 1..120: mol_type = other DNA
caactgcattatataacctagggtacttgaatctcagccccaaatctctaaaatgggggcagtaacatgcttctgccaggtcccagacctgtgggtctccaaatctgcacattcttcaag

SEQ ID NO: 73226 - DNA, 120 bp, synthetic construct
  source 1..120: mol_type = other DNA
tactgatgtttggtacagcaagttctcccaccttgttcttcttcaagaatattgccaattcttggctttttgcacttccaagtcgcagttagaatcagcttgccaaagttctcacacaga

SEQ ID NO: 73227 - DNA, 120 bp, synthetic construct
  source 1..120: mol_type = other DNA
agtatagcccacactcaaggtggggaagggaggggttcaactctacctcctgcaggagagtatcaaaaaaaatctgcaaatatgttaaaactaccacagcaattaaaatacatttcaagg

SEQ ID NO: 73228 - DNA, 120 bp, synthetic construct
  source 1..120: mol_type = other DNA
tagagtgtccagtcaaaacagtgtttttgaaagcaacatatgccagctcctcctcctcctttcctttcactgctatgtcatttgtttgtaacacgctcatcatagtctgcttttcatcgt

SEQ ID NO: 73229 - DNA, 120 bp, synthetic construct
  source 1..120: mol_type = other DNA
attctgagtgcaagtccttgacctgataggtgatatgcaaatattctttccaagtctgtgctttgtcttttcattccattagcagtgtctgttgcacagcaaaagcttttaattttgata

SEQ ID NO: 73230 - DNA, 120 bp, synthetic construct
  source 1..120: mol_type = other DNA
attaaatccatgcctatatacctagagaaaaatgaaatgagcttatgttacagagtgacaggaacagagtcacagtgacatcccatgtgcataaaagcaactcccacctggcatctgctg

SEQ ID NO: 73231 - DNA, 120 bp, synthetic construct
  source 1..120: mol_type = other DNA
cactttctcctcagtaaggaagagcccaacactgctggaagtgagcatgccccatttcatgagaaccaacagcttcgccgaggacctggacctggaaggggagactctgctgacacccat

SEQ ID NO: 73232 - DNA, 120 bp, synthetic construct
  source 1..120: mol_type = other DNA
tgataaatgtctttgtgtcaagatctgtgagtgacactcgcggcccttctgagggtcacttgtggaaactctccttctctctaccaacatttttctaaagggtgttttgttctttggact

SEQ ID NO: 73233 - DNA, 120 bp, synthetic construct
  source 1..120: mol_type = other DNA
tgggctgtttcttgttccactccaggatgacagggcctgagagacctgaacatccatccccaagctctctgcccactttgggtctggcacattaccattctgcaagatcctgcagccttt

SEQ ID NO: 73234 - DNA, 120 bp, synthetic construct
  source 1..120: mol_type = other DNA
ctcacagggggcagagtgggtgggaggcagttaccaaaaaacatttccatttttcttcagcattctactgatgttaaatgtattaccatgctgggccagttccagaattcaaattaaaaa

SEQ ID NO: 73235 - DNA, 120 bp, synthetic construct
  source 1..120: mol_type = other DNA
acttaggctgtacggctgtgtcctcctttggctctcaaagccctcagtaccagttccctaagcctttcgaatggtgccaggagggagaagggcatgtatagccctcttggtctcttcctc

SEQ ID NO: 73236 - DNA, 120 bp, synthetic construct
  source 1..120: mol_type = other DNA
gcgttaattagaatttccatgtcttcaactttctcctggaccctgcagaatctcacgccaagacattcgagttgctcttttccagcaaggccgctgtggcctggctttcatccacatcac

SEQ ID NO: 73237 - DNA, 120 bp, synthetic construct
  source 1..120: mol_type = other DNA
gtgaactcccagccatgatgctgctcaggtcctcagccaagcagatggtgttggaggatgtgacagagagaacattcacgccacagaggtggctggagggcaaaggacttcacaactgca

SEQ ID NO: 73238 - DNA, 120 bp, synthetic construct
  source 1..120: mol_type = other DNA
cattctggctgctccacatcctaacacttggcattttccgtcgtttccttttcagccatgatggtgaatgtctagcagcatcaaatggtgattttaatttgcagtaacctgttgactaat

SEQ ID NO: 73239 - DNA, 120 bp, synthetic construct
  source 1..120: mol_type = other DNA
tttggggctcctgaaacatggcatcatgtgtcccttgtttatttaggttgactttcatatcttttaccttgccctgtagttttcagtgtggtggtcatgaacagcttgtcagattcattc

SEQ ID NO: 73240 - DNA, 120 bp, synthetic construct
  source 1..120: mol_type = other DNA
aatatggtagcagagttcagactcagtggctttcagatggttagtataggctgaaattccaagagcattaaccagacacctactatgtgtatttcttgtgttggggttaggagatactgc

SEQ ID NO: 73241 - DNA, 120 bp, synthetic construct
  source 1..120: mol_type = other DNA
gaaagaaaaataaaaggtagagagacagaggtagacaggagtccaggtctgacctcaaaatccgatgtccccaccatccccagccccttagcctctgatcttctccataagtaatctttt

SEQ ID NO: 73242 - DNA, 120 bp, synthetic construct
  source 1..120: mol_type = other DNA
tgtcctgatttgttaagttaaattgaattccttccagtccaaaatactcaaatgcttttttctgcttttctttttgaactgccccacgaaccccaccagctgggtgtgtgggctccaggt

SEQ ID NO: 73243 - DNA, 120 bp, synthetic construct; identical to SEQ ID NO: 11625
  source 1..120: mol_type = other DNA

SEQ ID NO: 73244 - DNA, 120 bp, synthetic construct; identical to SEQ ID NO: 11626
  source 1..120: mol_type = other DNA

SEQ ID NO: 73245 - DNA, 120 bp, synthetic construct
  source 1..120: mol_type = other DNA
tgtcctgagtggacagacctgaaggtgggttcactagcctctttctcccatccttcaccctattagaggtagtgctctagcggggaaagattagggcccctctaggtcaatattgtgtca

SEQ ID NO: 73246 - DNA, 120 bp, synthetic construct
  source 1..120: mol_type = other DNA
tggtaaaaccaattcagagtacaaaaggggtgaaaaataacactctccccacccaaccctaattcccaagtttccttccctaaaggttaccactcaacactttcctattgcatctttcca

SEQ ID NO: 73247 - DNA, 120 bp, synthetic construct
  source 1..120: mol_type = other DNA
cttagtaagtgttcagccccagtgtgcaccacttaaaaggaagacactggtatgttctggagatggatctgtattaagacatctagcaaatctccttttcattaacagctgcagagtttc

SEQ ID NO: 73248 - DNA, 120 bp, synthetic construct
  source 1..120: mol_type = other DNA
tccccccatttccagcaggattaaaatgttcatttatgttgtgatagatactgccaaataagggctgtaccatttacatcactttgactgcacaaatgcactttcttcccccacccttac

SEQ ID NO: 73249 - DNA, 120 bp, synthetic construct
  source 1..120: mol_type = other DNA
gcacaggagttgccagctggacccaaggaccatttcgtatacatgtatgatcatactttcagggcatcttggaaaaactgaatttgctaactcaatagagaacaaaagagcaaataggcc

SEQ ID NO: 73250 - DNA, 120 bp, synthetic construct
  source 1..120: mol_type = other DNA
cttagaactagcacgcctaattttttttttatttttattttttttgaggcagagtctcactttgtcacctaggcgggaatgcagtggcacagtctcggcttactgcaacctctacctcct

SEQ ID NO: 73251 - DNA, 120 bp, synthetic construct
  source 1..120: mol_type = other DNA
agctacccccaattccctcccaccctaccctgtccttagcccctgacaactactaacctattcttcatttctttatcattccaagaaaattatataaatggaaccacatagcaaatcacc

SEQ ID NO: 73252 - DNA, 120 bp, synthetic construct
  source 1..120: mol_type = other DNA
ggaaggaacttacccttttctagagtaacttcccttttcaggaagtttctagcttgcttgctcactcgctctccccacccccacccaacctcccccaacctatctctccctctctcagga

SEQ ID NO: 73253 - DNA, 120 bp, synthetic construct
  source 1..120: mol_type = other DNA
atcacattcaaggagcatgagggtataggctggctgtttctattcagtgttttatcttcagtgcttaatccatatggagcctgtcacggaccctcagtgaatgtttgacgagtgagtgag

SEQ ID NO: 73254 - DNA, 120 bp, synthetic construct
  source 1..120: mol_type = other DNA
caaatgcaggttcctggggctctgggtggtttgtccaatggctaagctttccccaggaatgggtaactggaaaaatgtaggaattacatatgattccatcaatgacagttttcctattaa

SEQ ID NO: 73255 - DNA, 120 bp, synthetic construct
  source 1..120: mol_type = other DNA
agcaccacctctttcatttgaaaacgtgttcttttggcaaaaagactatgctccagaactttctggctgagttctccttctattcctcctattccactgttaggtgttggaaaagcaata

SEQ ID NO: 73256 - DNA, 120 bp, synthetic construct
  source 1..120: mol_type = other DNA
tacatgggcaggtaccatctctgcctggtacatgggcaggggatagatgtgtttccatgggtctccttcacatagaattgtcacctgaacgagaagcccttatccagaagcccagtgcaa

SEQ ID NO: 73257 - DNA, 120 bp, synthetic construct
  source 1..120: mol_type = other DNA
tcacttgggcttatcagcagagccagggtaccccaacccctgactaggatattgtggatacctatgcccagagcccctccactgccaagtttccacaattgttttgaaataattcccaac

SEQ ID NO: 73258 - DNA, 120 bp, synthetic construct
  source 1..120: mol_type = other DNA
tggtgcacctaccacagcccactctgatgaccccctgtcaaggaggtgtgactgagaaaggaaggggcagagatcccttctccattcctctcaggcccctgtaaaaattgggacctgtcc

SEQ ID NO: 73259 - DNA, 120 bp, synthetic construct
  source 1..120: mol_type = other DNA
cccgtagaggtttcaataactgccatcctttgctgatcctctgtgtaggcactgggccccagcccctgcctgtgccatcactatttcacaggagaacaccacactgaggctctgcctctg

SEQ ID NO: 73260 - DNA, 120 bp, synthetic construct
  source 1..120: mol_type = other DNA
gcaaacagctcagcttgctgactttgatgcagtggtttaggccaagctttgaagtcagcccttggaggacgttcctatcagcctttgcacagatatctcccactccaaccctaagactca

SEQ ID NO: 73261 - DNA, 120 bp, synthetic construct
  source 1..120: mol_type = other DNA
tctctccagagactgggctaaactctgctgtgtcaagtgcctggtgacctcaagcaagtcattccatgtggctgagctgctccttgctgcatctgcacatatgtgtagtgtcttcctccc

SEQ ID NO: 73262 - DNA, 120 bp, synthetic construct
  source 1..120: mol_type = other DNA
tcagctgtgtttaaaaattagcaagtggaggagttagaggatctgcagttaaccccttgagtctcggaaggctgtttgagccactaatcaggaaggagagctgacaagaaaaaggcgatg

SEQ ID NO: 73263 - DNA, 120 bp, synthetic construct
  source 1..120: mol_type = other DNA
ttctctgtactgcaggcatctcctaactggcattctcacatcccctgccccattccaatcaattatctactcagtggacagacatcctttcaaagtttagagacctgtgggtcttgctta

SEQ ID NO: 73264 - DNA, 120 bp, synthetic construct
  source 1..120: mol_type = other DNA
ctgtgatccactcatgaatatctggtctggctctgcgttccagtcagacccttttctgagaggaccacaagtcatagcccagggctacctgtacagctaccaggcttaacaactcagatg

SEQ ID NO: 73265 - DNA, 120 bp, synthetic construct
  source 1..120: mol_type = other DNA
ggcagctgacacgtagttccaactaaacctctgggtggcagcccataggttgtgggactggaagtgcttgccaaacaaattatactgctgaccagggaagagggtactctgattggccag

SEQ ID NO: 73266 - DNA, 120 bp, synthetic construct
  source 1..120: mol_type = other DNA
gtaagcagggcagatcttgtaaaaacctgatggaatttgaattttatttcctagaaatagaagccactagagggtatctggcaggagagtcatggaggcacattcattcgttggttcttg

SEQ ID NO: 73267 - DNA, 120 bp, synthetic construct
  source 1..120: mol_type = other DNA
gaggtttgtgctttctggatcctgtttaagaaccccacggccaccctggccctggagattattcattttttctcctattaaacaaatggcaactaccttttgctttcaaatatttagtcc

SEQ ID NO: 73268 - DNA, 120 bp, synthetic construct
  source 1..120: mol_type = other DNA
gccccccagaccctttcaggaaaggtcaaaaacattttcataataatactcgacattatttgccttttctttcattctcacaaagataaagagttttccagaggcagcacaccatgaccc

SEQ ID NO: 73269 - DNA, 120 bp, synthetic construct
  source 1..120: mol_type = other DNA
cttaaatttttctcctactgagtatctggaaaacaggtgcagaaatggatcatttgagacaccatagaaatctggttaatcctgcctgcctgctttccttcaagtactgactgagtaagg

SEQ ID NO: 73270 - DNA, 120 bp, synthetic construct
  source 1..120: mol_type = other DNA
attcccacctccgatcctaattcgggccctgactcagaaccactaagtggatttccgactccggtcccaattcgggctttgactcaaaaccacaacatggattcccaacttccatcccaa

SEQ ID NO: 73271 - DNA, 120 bp, synthetic construct
  source 1..120: mol_type = other DNA
gaccacgctgagaggcaccccggcagaatcgcgctgaggggcgccctggcaggatcttgctgaggagctccctggaggtccgtgctgaggcgacgcggcgaccgttctgcctggagactg

SEQ ID NO: 73272 - DNA, 120 bp, synthetic construct
  source 1..120: mol_type = other DNA
tcacaaaagccccctctagaagttcacaccctgaggcttccctggcaaggctgggggccgtttggcccttccatgtggactgcaaaaacagtgttggaatgcaggactctgggtatgttc

SEQ ID NO: 73273 - DNA, 120 bp, synthetic construct
  source 1..120: mol_type = other DNA
gagccattgagataggaaacgagagagattatgtgagaagacagggtcaggaatgttgagttgagggtggcctcaggcccctgtcctgctcctttttgctgcttggggtgcagctcaatt

SEQ ID NO: 73274 - DNA, 120 bp, synthetic construct
  source 1..120: mol_type = other DNA
cgcctcctctagtcctttgggggaagagtggagaggaaaacaggccgagactgagaggggtttgttgtctcgtcgggcgacaagagacacgtgggaattggctagagaagcatgtgaggc

SEQ ID NO: 73275 - DNA, 120 bp, synthetic construct
  source 1..120: mol_type = other DNA
gtccccttcagtgaggctttttgcatgcattggtccacacacccaccactgcagctgtcctgggtaagggctctgtgatcctgcaacgcccaccttcttccttcactggtcataggtttc

SEQ ID NO: 73276 - DNA, 120 bp, synthetic construct
  source 1..120: mol_type = other DNA
ggatatagtggggtcagaccctatccctccacccagctgcagtgacaactctgtggctctggggcactgtcaccctgtggcatggcctgtttgtggtgtccattgccgtcttagctaccc

SEQ ID NO: 73277 - DNA, 120 bp, synthetic construct
  source 1..120: mol_type = other DNA
ttatagtttgttttacgcattaaaaggccctggatcggtatttgtagtgagaacagatatttgcagagagcctactccattcccagctctgtacttgtagagggtgaggctgctgaaatg

SEQ ID NO: 73278 - DNA, 120 bp, synthetic construct
  source 1..120: mol_type = other DNA
cagcctacctgttggcttttactgatggttggtggctcccaggagaaagagtactgtgcccaggtagcatgcccaccccaggcatacatagcatgtctttgctcttgcagagtttgaact

SEQ ID NO: 73279 - DNA, 120 bp, synthetic construct
  source 1..120: mol_type = other DNA
gctttgtttatctcccaattagtcctgtagcacttagtatgtcaggcatggttctgagggcttcatccacactaccacccactgtagagatgggaaaactgaggcatagcaaggtcaagg

SEQ ID NO: 73280 - DNA, 120 bp, synthetic construct
  source 1..120: mol_type = other DNA
ccagaagactcaccccagggcctctaattttgacccttgatctgggtctaagcacctctgagcaagaggtgagggtttcaggcagcctcagctcttaggaggcagaagatacagtttata

SEQ ID NO: 73281 - DNA, 120 bp, synthetic construct
  source 1..120: mol_type = other DNA
acccatttaaagtgtacgattcaacggtttttagtacgttcagagttgcgcaaccatcacactatctagttccagaacattttcagtgcccctaaaagcaaccctgcattctttagccgt

SEQ ID NO: 73282 - DNA, 120 bp, synthetic construct
  source 1..120: mol_type = other DNA
tgaggtcaaaaagatttacccctatattttcttccaagaattttatagttttggctcttacacttaggtctttcatccgctttcagttagtttaacatatggtgtgaggtaggggtctaa

SEQ ID NO: 73283 - DNA, 120 bp, synthetic construct
  source 1..120: mol_type = other DNA
cgcactaattgttgcccaagtctttgcacatcctgcatcctgcctggagtgttctctctcctcccttttctgtgagccgtcatgaaacacctcctgtgggcttactgagccaccatctta

SEQ ID NO: 73284 - DNA, 120 bp, synthetic construct
  source 1..120: mol_type = other DNA
aatcatagtgaggtatttagggatagagtggagatctcgcccacatattcccgaagccaccaggccagacaccgccccagctgaatgcatgctggcggcccaaatgttagacactcttct

SEQ ID NO: 73285 - DNA, 120 bp, synthetic construct
  source 1..120: mol_type = other DNA
gtttcttctcccccagattccagaacaagtcacagccattgtagattttgattaatcgccatccccattatttcttcactttctccagctgaatttttcccactgtgggaagggggtctg

SEQ ID NO: 73286 - DNA, 120 bp, synthetic construct
  source 1..120: mol_type = other DNA
cagctggacagcccctctgccatcagtgagaactgtcttctctctgcttcccctgtgcacttctgaatccccagggctgggcacagggctgtgacgccataggtgctctagatagatgga

SEQ ID NO: 73287 - DNA, 120 bp, synthetic construct
  source 1..120: mol_type = other DNA
gagacacagctagaaagtggccagctggggtttggtgctgagcctctgtctgactctctgctctctggagagctcaagggaacctgtaaagacctgcgggctgtgtcatggagggccctt

SEQ ID NO: 73288 - DNA, 120 bp, synthetic construct
  source 1..120: mol_type = other DNA
cctattcctagcctcccttgagcgttttggttgccggatcctcattaatggctgtttgtatcacttaacaatttttcacttttggaggggtcgtgaataaccccaaagcaacatgtaccc

SEQ ID NO: 73289 - DNA, 120 bp, synthetic construct
  source 1..120: mol_type = other DNA
gctctgtgcatatcccctatgtgagtacaggaacctcagtggtgcctgtggagctgttcagtgggccctgtattcgccagcacagccatggtcctgctgagtgacaaacagccccccaga

SEQ ID NO: 73290 - DNA, 120 bp, synthetic construct
  source 1..120: mol_type = other DNA
atggagtaaagaccacacctggcatggcttccttggtttctgaaggctgcgaaagctgcgtctgtcgcagaagtgaaccttgttttgttttgttgatgggtgtagtctcagggcatgttc

SEQ ID NO: 73291 - DNA, 120 bp, synthetic construct
  source 1..120: mol_type = other DNA
ccgtgtgctctcgggtgcagagctgacctcccaagtctcaggcttcttgtctctcattgggggtaacaatggctatgtacataagattaggagaacacacagaaggtggtgctggctaaa

SEQ ID NO: 73292 - DNA, 120 bp, synthetic construct
  source 1..120: mol_type = other DNA
tagctgtggcccttggaggtgtccgaatagtccatcattttcagtgacagaaagacggaaatggacacagatcaaacctgcatcacagatgtatagctaggtcagcgaaccactcaaaag

SEQ ID NO: 73293 - DNA, 120 bp, synthetic construct
  source 1..120: mol_type = other DNA
ccagaacctaggagtccatgctacctgtggggttcatagtgtgtccctctcagccaatgggaagtcgtgcccttggatcatttggggcaaatggtcctcgttttcttcattatatggtgt

SEQ ID NO: 73294 - DNA, 120 bp, synthetic construct
  source 1..120: mol_type = other DNA
agagttggtgggggcagcagagcctgggtgtttcaggaggacccactcactctgggccacttctgatgctgcagatcacgccaggcaggcctccggccgtttgtctcttccgacagcagc

SEQ ID NO: 73295 - DNA, 120 bp, synthetic construct
  source 1..120: mol_type = other DNA
gcttcccttctcacgtggttgggagtcatgacctgtttagtaaataggctatggcagcctcttggaacttagtgaggtggctaagctgcccctagatagctgtgccctgtgaccaagacc

SEQ ID NO: 73296 - DNA, 120 bp, synthetic construct
  source 1..120: mol_type = other DNA
tccttactgtagcagtgggcctggaggcagtggcatttagagaggaccctgaagtccaaagaggggatgccagcctcaaactcagcagctcgaagtagcaacagcctcgaatccctcaca

SEQ ID NO: 73297 - DNA, 120 bp, synthetic construct
  source 1..120: mol_type = other DNA
actgtgattgtcctgggctcacagaggaggacgtggggacctgcccaaggagacacaggcaacagaaccagggctcagagttgggggaaggggccagttcacccacagagggtggagtca

SEQ ID NO: 73298 - DNA, 120 bp, synthetic construct
  source 1..120: mol_type = other DNA
tggaggtgacctgccatttgtccggttgggggtccccaatcgtcttcgagctactgatatagaacctctgcgtttagctgtggtttaggaagtgcattcacgtgaagtcgccaagttcaa

SEQ ID NO: 73299 - DNA, 120 bp, synthetic construct
  source 1..120: mol_type = other DNA
gatgggtttgggggaactgcagcatcctcagatcacagacggtgtgtcgagtgagggtggtgctcttcctgggccagcagtaggtttccaaaagggcacagacacagctcaggagatgga

SEQ ID NO: 73300 - DNA, 120 bp, synthetic construct
  source 1..120: mol_type = other DNA
gggcagctcaagccctctctgaggttctgtttcttcatctgtaaaacagggacaatcacggtagctacgtgtggggcgcaggacggcacccaaggatcattcctgtgtgagtcaggtgtc

SEQ ID NO: 73301 - DNA, 120 bp, synthetic construct
  source 1..120: mol_type = other DNA
aggactcttgttcacagtgctatgcctgacccggcgccagccctcaggggaccacagccggctgaacgccaactggttagctgctttttctataggacctaccgagcgtttgactctaga

SEQ ID NO: 73302 - DNA, 120 bp, synthetic construct
  source 1..120: mol_type = other DNA
tgggggtaataaagtccccacattgtagcactgccaggtggattaaatgaaagaagatagtgaagtccttaaagtgagatgtgttggcatttactccacaaatactgaatgcctgctcca

SEQ ID NO: 73303 - DNA, 120 bp, synthetic construct
  source 1..120: mol_type = other DNA
gcgaggaggaagtagtagattcaggactgttttgagagggaccattttagcttcttacggctgctgtaatgaattcccacaaacttagtggctttaagtgacacgtttattatctaacag

SEQ ID NO: 73304 - DNA, 120 bp, synthetic construct
  source 1..120: mol_type = other DNA
gaattcctcaaggcctgagtcagacctggtgcagcttcataaagccaagggtggcaggcggaatccaaggggcctcaccgcccatgcaccccactgttgcatggagagaacaatgcccaa

SEQ ID NO: 73305 - DNA, 120 bp, synthetic construct; identical to SEQ ID NO: 11627
  source 1..120: mol_type = other DNA

SEQ ID NO: 73306 - DNA, 120 bp, synthetic construct; identical to SEQ ID NO: 11628
  source 1..120: mol_type = other DNA

SEQ ID NO: 73307 - DNA, 120 bp, synthetic construct; identical to SEQ ID NO: 11629
  source 1..120: mol_type = other DNA

SEQ ID NO: 73308 - DNA, 120 bp, synthetic construct
  source 1..120: mol_type = other DNA
acactaacaagaggcacatgtgccagggaagccctgccttgtcatcacctgtgccgtggctgtcagcgcgcatctggcttacattgaactcccccataaaacgtgtgaaacctgacagca

SEQ ID NO: 73309 - DNA, 120 bp, synthetic construct
  source 1..120: mol_type = other DNA
cttcctgcctgcccttcagtttaccctgtgctcccaaatctgaaggaagcctttcctaaccagcagtccaggggattagaggactgggaccagttgaaactccattctaagtcttgggga

SEQ ID NO: 73310 - DNA, 120 bp, synthetic construct
  source 1..120: mol_type = other DNA
agaggaggaggcaggcagggaaattctggggggagtgtattccacagggtaagcagaggctggatcccgagagcatctggacttgttcccagggcacccagcacagaagtgaaggggtgc

SEQ ID NO: 73311 - DNA, 120 bp, synthetic construct
  source 1..120: mol_type = other DNA
tcagggcaggaaatggagaagatgaacgaggaaaggagaaactgctccaaatggtggggagggaggagagacgagggcagaagtgagcccctggctcggtgggggtgggctgtggagtgt

SEQ ID NO: 73312 - DNA, 120 bp, synthetic construct
  source 1..120: mol_type = other DNA
tggtacaggtggagtccaggggtctgcagaggatggctcgagccctgctaccaccatgctgctttgaaaaaggactgacttctctgctgcctccgcctccctgtgaagtgggactgacat

SEQ ID NO: 73313 - DNA, 120 bp, synthetic construct
  source 1..120: mol_type = other DNA
gctgcctaggccctgaacagacagaggcaagccctgcatggcgcccagggtgccagtgactctggttgctctcaaaccatgagaaacgttagaacttctttacccctctgtgagatgggc

SEQ ID NO: 73314 - DNA, 120 bp, synthetic construct
  source 1..120: mol_type = other DNA
aattgagtgacgcatgcgtgagttccaaggattagggcatagactcctttgggggcgccctggggtggggggtgttcctgtgtctccctgcagcccctgcttggacacatgaccagctca

SEQ ID NO: 73315 - DNA, 120 bp, synthetic construct
  source 1..120: mol_type = other DNA
atgtatatgagtcagcgttgactgtttaacctgttgcaagacactctgctgggtgctgcgacatggttaggttttctccacattagaaggtagaaggaagaaaaataagttctgaaagaa

SEQ ID NO: 73316 - DNA, 120 bp, synthetic construct
  source 1..120: mol_type = other DNA
cagcttttttgcctgaacccactcgtgaatttttcatatttttggagagctccttgtgaggacagccggcctgagcaggctttgatgaacattagagcaggtggccacaattgggcagat

SEQ ID NO: 73317 - DNA, 120 bp, synthetic construct
  source 1..120: mol_type = other DNA
aatgacatcggatgcctgtttagtcagcggactgcctcagaaaggaatctcacaggcagcgggttcttctggtagggtgggatatttcagcgggaggtaaacaggtgttgtcacagaacg

SEQ ID NO: 73318 - DNA, 120 bp, synthetic construct
  source 1..120: mol_type = other DNA
ctggggataaaaaagaggacaaaagagatgagaccttcatcctagagcttaggatgtgaactgcgtccttctttaaatggaaatttctaaattacggtgtaccgaatgcatccacccttg

SEQ ID NO: 73319 - DNA, 120 bp, synthetic construct
  source 1..120: mol_type = other DNA
ctggtataaagaaatgccattgatttgggggggttgatctcacacctgacaaccatgtcatactttctatcagctctattgattgatcttttgatcctgctgattgtctaagtggatcgg

SEQ ID NO: 73320 - DNA, 120 bp, synthetic construct
  source 1..120: mol_type = other DNA
cagcagccctattatcagcatctcacattagtatgcatttgtcacaaggaaacaacagtgctacatgactgttaactgagtccatgcttgatgcagatttcctcagtttccctactgtct

SEQ ID NO: 73321 - DNA, 120 bp, synthetic construct
  source 1..120: mol_type = other DNA
ttaaaagtattaacagagccttaaactgtgctgttggacggggatgaagaaacgccttagaaagaaattaccggatggtgacaaagccccaatttattagtcttctccaatggggactgt

SEQ ID NO: 73322 - DNA, 120 bp, synthetic construct
  source 1..120: mol_type = other DNA
cttgaaaacagaccagaaccggctgcttccaccaccagcagaatacttcaagaagaccactcgggcctagggctctgcaagcaatatctgattttcagaaaaccatggctcacccacact

SEQ ID NO: 73323 - DNA, 120 bp, synthetic construct
  source 1..120: mol_type = other DNA
tgctgcctttgacgtgagctattcaaaatggcgggaggggcgaggcctctggagcaaggaaagagagtggtggctgtgtccagcaagtccctgttgccactgatagcataaaaagtaact

SEQ ID NO: 73324 - DNA, 120 bp, synthetic construct
  source 1..120: mol_type = other DNA
gcaacagagtgagactctgtctccaaaaaaaaaaaaataaaaagtacaggggctctacacggcgccctgagaattgtgtgtaaatgagtgaaaatggggtgagagggagggagtgggaac

SEQ ID NO: 73325 - DNA, 120 bp, synthetic construct
  source 1..120: mol_type = other DNA
aatttcttgggagctgatcatccccaaagcttggaactacaaggcagtgactggttttgccgggctccgctcgtccctctgagcggagggtcaccctggtcaccatgaaaactttatcct

SEQ ID NO: 73326 - DNA, 120 bp, synthetic construct
  source 1..120: mol_type = other DNA
agttgtgttgtgtagtgttgacttgagttgcatcgtgttgtgttgacttgagctgaactgtgctgagtgttactgagttgaggtgactgggttgattttagcttcacaggtgatctgaac

SEQ ID NO: 73327 - DNA, 120 bp, synthetic construct
  source 1..120: mol_type = other DNA
tctctcagccacaagctctgtttctgttgcatttgggccaggttgcgaggagcctggcaggccacccggccagtgtggatgtcattacatgagcagtaggaagccatacagtatctgagg

SEQ ID NO: 73328 - DNA, 120 bp, synthetic construct
  source 1..120: mol_type = other DNA
ataatgcattgacccaattaaaaaatgggcaaaggacttgagcagacatttctccaaagagcagatacaaatggcaaatgatcacaggaacacatgcacatgaacacacgctcagcctca

SEQ ID NO: 73329 - DNA, 120 bp, synthetic construct
  source 1..120: mol_type = other DNA
tttacaaaataagaatccctcatcatccaaagataccttaaagaacgtgacaagttgcagactggcgattgcactagttttctggcactggtttaacaggtgacccccaacacacatcag

SEQ ID NO: 73330 - DNA, 120 bp, synthetic construct
  source 1..120: mol_type = other DNA
aatagaaactaaaataacgaatcaataaatatacaaattatcagacagaaaaatggccaaagacaaagacttgttctgcccttcatggtcgaggaacacatgtggccagtgagtacgtga

SEQ ID NO: 73331 - DNA, 120 bp, synthetic construct
  source 1..120: mol_type = other DNA
ctcccaaagtgctggaattacaggtgtgagccaccacacctggccgtctagcgtttattttgaataacgagtccttgggagctttctacattgtttttaaaaactaattatatgacattt

SEQ ID NO: 73332 - DNA, 120 bp, synthetic construct
  source 1..120: mol_type = other DNA
tattggaggaataagcatgtagctcaacagaacagaacgaggaatccagaaatagacacacgcaaacatgcctgactaattttaagacaaagatgcaaaattcagcggaggaagactcct

SEQ ID NO: 73333 - DNA, 120 bp, synthetic construct
  source 1..120: mol_type = other DNA
aaatttatagaagctttattcctaactagctgaaagctgagaacaatctatgtatcattcaacaggggaacaggcaaacagtggtgcatccctaccctgaaacactacccagcagtagaa

SEQ ID NO: 73334 - DNA, 120 bp, synthetic construct
  source 1..120: mol_type = other DNA
ttgcaaagagcgacaccccagcatgtgggaaggaagggagcgagctcttatttccttattttctttccatctccactcccaggcaaagctgataaattcttccttattccagagttagag

SEQ ID NO: 73335 - DNA, 120 bp, synthetic construct
  source 1..120: mol_type = other DNA
aaattattaacaataacttgttcattaatgaatgaacaggtgagatacaggtcagtgggtgcatgaatgagtgaggagatgaatgaagcgggtcttttctcagcagctgacccacggcca

SEQ ID NO: 73336 - DNA, 120 bp, synthetic construct
  source 1..120: mol_type = other DNA
cttgtgtgtctgcccactaaggtctcgagatctttataggcacgggatgggagcatggcaggccagggtgttctcgggaaatgcaacatttgggcagaaacaccgaaatgtctgtcctca

SEQ ID NO: 73337 - DNA, 120 bp, synthetic construct
  source 1..120: mol_type = other DNA
ttaggcctgtgactctccctgggttaactttgtgaccggtgtgtggtaaggatcatggttgacatactttcacaggtgcatccacattgttccagcaccctttattgaaaagcgtatcct

SEQ ID NO: 73338 - DNA, 120 bp, synthetic construct
  source 1..120: mol_type = other DNA
gctgaagtgagaggatcacttgagcccaggagtttgaaaccagcctgggcaaaataacaagaccccatcttagaagaaaaaaaaaaaaataagaaagaaagaaagaaagaaagattgtga

SEQ ID NO: 73339 - DNA, 120 bp, synthetic construct
  source 1..120: mol_type = other DNA
aagtggattaaaccacattcgagcatgtgtttgggcacagtgctacatgcagcttgctggtggtggttaggatatttgcacgtatgttcacgagagagattaacctgtgatttttttttt

SEQ ID NO: 73340 - DNA, 120 bp, synthetic construct
  source 1..120: mol_type = other DNA
gtcttgcatatggtctcttttggtacatgttctgtgtgcactagggaagcttatgtagtctccagttgtagggagcagtgttctgtatatgtcaagttgctaatcaggctgttcaaattt

SEQ ID NO: 73341 - DNA, 120 bp, synthetic construct
  source 1..120: mol_type = other DNA
tggagatagactctagcctgcaatgggaggaaccacaatggattgtgcccatctttaattaatcacagtctgccctctggccataacttttcgcattctcccctatgcaaaattcactca

SEQ ID NO: 73342 - DNA, 120 bp, synthetic construct
  source 1..120: mol_type = other DNA
taccgtgtacattccccagtactctttcatcagtgaagtcacaaggtgaccccaaattcaagtaataggaaaacagactccatctcttaatggaaggagctgcaagtatttaaggctgtt

SEQ ID NO: 73343 - DNA, 120 bp, synthetic construct
  source 1..120: mol_type = other DNA
tgtgatgctgtttctaaaaggatctttatttctagaagaaactttaggaggcaaaaacagcgcagcccccttaacagagtggctctggtggcaactttcccttgttaatttgtcctgtag

SEQ ID NO: 73344 - DNA, 120 bp, synthetic construct
  source 1..120: mol_type = other DNA
tcccgtggggtgggtcgtgcaaggcagcattagtgagagatgtgagggtgacatcagaatgactcagagatggtgcggagcctgccctgagtcaccaagctgggaaggcaggtcccccag

SEQ ID NO: 73345 - DNA, 120 bp, synthetic construct
  source 1..120: mol_type = other DNA
gaagatcatcttgacttcaggagcctgagatgagccaagataatgcacagcccatccagacggactgacagtggcattcaagtctggtccccctgcagccatgtctttcacaccaggcca

SEQ ID NO: 73346 - DNA, 120 bp, synthetic construct
  source 1..120: mol_type = other DNA
cagagcatgcagaccctgatggctcctgggcaggcctagctccaggggtggtgtgggcagcttccagctcaggtcaagagatcatccagccatccctttctccatcagccaggaaggaca

SEQ ID NO: 73347 - DNA, 120 bp, synthetic construct
  source 1..120: mol_type = other DNA
gtgaggggagcagtagcccgtggcagtgaggagctgtgtgtggctccaggggctcccctagcccacctctcaggatgcttcccttcctcgacgcctgcctgtctgcttgcttgcacccca

SEQ ID NO: 73348 - DNA, 120 bp, synthetic construct
  source 1..120: mol_type = other DNA
cccatcttgcagaaaggagcttagaatctccattatacagaaaggagaaacagagctcagcaactcatcttacagaaaggaggatcaaggcttagcatcccatcttatagaagagagaga

SEQ ID NO: 73349 - DNA, 120 bp, synthetic construct
  source 1..120: mol_type = other DNA
agcattttatcttacagaagagagaagaaggacttagcattcccatattacaggagaaactgagacctgaggatgttattactagcctgtacataagtacggtttttacgggccagaggg

SEQ ID NO: 73350 - DNA, 120 bp, synthetic construct
  source 1..120: mol_type = other DNA
gcaaggccacaaatgtggcttggggtttcctgatatcatgagatgctttgttttctctgttgtggtttcaagatgtcacctgagtcccacttataggcttagagctggcaacaagcctgg

SEQ ID NO: 73351 - DNA, 120 bp, synthetic construct
  source 1..120: mol_type = other DNA
ccggatctgagatgatgggggaattggggtaggggaggcgcgtaggggaggcaaacacccgcctccgtccctgctcaggtagcaacaccagcttcacactccccacaacttcaggacact

SEQ ID NO: 73352 - DNA, 120 bp, synthetic construct
  source 1..120: mol_type = other DNA
taaattccagggcgttgaggttaggctctaggtgtggaaacatgaacccagggcaactttgcagaagggggtgatcctggggtggggtttgggtggggtgagctgccagcccagaattca

SEQ ID NO: 73353 - DNA, 120 bp, synthetic construct
  source 1..120: mol_type = other DNA
ggagccaggccaggctggtttctcatcctctgacaagtggcgtctttactggcaggtggcaccaagtgccccctccccccagctctttcccgctgcctctcgtagtctgctttgtgctct

SEQ ID NO: 73354 - DNA, 120 bp, synthetic construct
  source 1..120: mol_type = other DNA
gggaacacggtgtttccctggctttctctttgcgcaagggctgggtgactcctggctggcacacccagtacagcagggccgggtaccctgtgttgttggcatggccaggagtttctagac

SEQ ID NO: 73355 - DNA, 120 bp, synthetic construct
  source 1..120: mol_type = other DNA
gggcctggagggcttggtggcacagcctggctcgagttttctccgttatcagtgcagccatcgggaccgtaaataccccaagcgcaatcctgctgacttcgggaagtaggggcaggaaat

SEQ ID NO: 73356 - DNA, 120 bp, synthetic construct
  source 1..120: mol_type = other DNA
gctcaaatgcccacataaatcctcttttacagatggggaaaccgaggctcagagaggctgagtggtcgcctgaggtcacacagctagttaggtgaagagctggtcccaaggaggacacag

SEQ ID NO: 73357 - DNA, 120 bp, synthetic construct
  source 1..120: mol_type = other DNA
ggcctttatcatctcttacttggattatttttccagccatatatgcggtctccggcctctcctcacacccaccaatccttcacattgtatattatttcttaaacactgctgaaatctcac

SEQ ID NO: 73358 - DNA, 120 bp, synthetic construct
  source 1..120: mol_type = other DNA
acggcaaaaatgtggtcaatttttgtaaatgtgccttctgtacttgaaaacaaggtatattctgacattgttgggtgcagtgttatgttcatatccactggaacaagcttgttagttggt

SEQ ID NO: 73359 - DNA, 120 bp, synthetic construct
  source 1..120: mol_type = other DNA
ctagatttgttttgttttattcttacttatggatatccaattgccccagaacatttgttgaaaataccccatttcctcctttgaattatcatggcttcttggtcaaaaatcaattgacca

SEQ ID NO: 73360 - DNA, 120 bp, synthetic construct
  source 1..120: mol_type = other DNA
gccttttatcatgttgagaatatttccttctatttttagtgtgttgagagctctcattatgaatggatattggattttgtcaaatgctctttctgtgtctagtgagatggtcctgtggtt

SEQ ID NO: 73361 - DNA, 120 bp, synthetic construct
  source 1..120: mol_type = other DNA
gtcatttgttatttcttttttatctcagatcttacatctgggattacctttttatgtgactgagggattcatttaaattttcttcagtgaaaaactctcagattttgtccgcaaatgacc

SEQ ID NO: 73362 - DNA, 120 bp, synthetic construct
  source 1..120: mol_type = other DNA
tatatatcttaaaatttatctgtgggaatttttgaagtctggtgtgaagttggggtcctcagggaggaatcatgtttaccccttccattgccacatatgtgggtgtactgccagcctgga

SEQ ID NO: 73363 - DNA, 120 bp, synthetic construct
  source 1..120: mol_type = other DNA
aaattttaattttaatttattaaaatgaaaattccattcctggatctcagtcaccacttttttaagtgctgtgccacacagattcagctatgggacagcgctgctttggacgggcatggc

SEQ ID NO: 73364 - DNA, 120 bp, synthetic construct
  source 1..120: mol_type = other DNA
tattttttctttcctgaggagccgtcttagtggatggcggagtccggaggggctgcccttcagtcaaaccacacaagccctgttttgtctggggttccaaagataaacctataatgaaag

SEQ ID NO: 73365 - DNA, 120 bp, synthetic construct
  source 1..120: mol_type = other DNA
aagattgagatgcgccaggtagttggtgtgctcatttcgaggtgtttctttttccccccagtaaagtgatgtcacgtggaggtgagtgtgatgggaaagggaacctcagaaacaaggtcc

SEQ ID NO: 73366 - DNA, 120 bp, synthetic construct
  source 1..120: mol_type = other DNA
tggcagagctcagagggtgtgagcatgaggatggcatcaggggtctctctgcaagttcaagttccgcctcaaccctactacgtggccctggccaggcctcctgaatccaggtcttgcttt

SEQ ID NO: 73367 - DNA, 120 bp, synthetic construct
  source 1..120: mol_type = other DNA
tactttgccgcgcgaacagcctttcgttgcccgggttccgagtgctccagaggcagatggaaatttttgtggattaaacacggggccgaggcgcgctgggctgtttgggttggcaacctg

SEQ ID NO: 73368 - DNA, 120 bp, synthetic construct
  source 1..120: mol_type = other DNA
gcttgtccagcagggtgaacaccccgtcagggcaggagctgctgaggagatgctgatgcctgggtgactcatgctacctggccacccatcctcgctgggctacaaatgggttcagcctca

SEQ ID NO: 73369 - DNA, 120 bp, synthetic construct
  source 1..120: mol_type = other DNA
tgtgggatgagggagagcatcagcactttggactagggtggaggccttggggccagcccccagtctgccagccccaccgatgagaacaagcagactgaggggagaaaggttggagaagga

SEQ ID NO: 73370 - DNA, 120 bp, synthetic construct
  source 1..120: mol_type = other DNA
atcccacttcgtttctctctttccctaaaggtgaagttctggagcaaaaagagcctgagctgtgagccgaggggctcctcctcctccaaactgacacccagtcacagagcaattgctaaa

SEQ ID NO: 73371 - DNA, 120 bp, synthetic construct
  source 1..120: mol_type = other DNA
caaactgaggagcatggaggaccctgggcattgatggcagggtggcaggaagcacccatcgctttcctctcccggatcttcccagcacccttccaccttcagcctttataccccgagacc

SEQ ID NO: 73372 - DNA, 120 bp, synthetic construct
  source 1..120: mol_type = other DNA
gaggctgaagacaacctttccttgggctctcagcgatgccagctccagctgctgtgtcatcaaggtcgggctgggctggcctcttcctagcagaccttccaaaaccccgcagactcccgt

SEQ ID NO: 73373 - DNA, 120 bp, synthetic construct
  source 1..120: mol_type = other DNA
actggggtcacctcaaaaacagctgtagaggggtttgcggcagcagcagcagacgtttttaaactaattcattggtgatggcaaaattatgccgagttccctgaaaaaaaaaaaaaatac

SEQ ID NO: 73374 - DNA, 120 bp, synthetic construct
  source 1..120: mol_type = other DNA
gtgtgttttgttgtatgtggtgtgtcttctacgtgtgagtgtggtgtgtgttgtgtctgcatgtatcgtgtgtgtggtgtttgtgtgtgtgagtgtggtgtgtatatgttgtatccaaga

SEQ ID NO: 73375 - DNA, 120 bp, synthetic construct
  source 1..120: mol_type = other DNA
aaccctgcaaagagggggctgacagccgttcctgcttcctactgggcagaggctatagaggaggtttccagcgcctcagtgcaggcagctgagcccagacccctgggctgtccttggaac

SEQ ID NO: 73376 - DNA, 120 bp, synthetic construct
  source 1..120: mol_type = other DNA
agactagagatggtggaagggtagagtgcagtcaggtttggagtgggtccactctttgcacagaccagccccctagaggctccccagttccaacaggatactgggctccatggctgtcac

SEQ ID NO: 73377 - DNA, 120 bp, synthetic construct
  source 1..120: mol_type = other DNA
gcccagcttcagccacacccgccttctgacaatgcgaagcccacctggtctgtgagctgtcgcctctgtcctcacagtgacagagctggctttgagggcagcaggacaggggtttagccc

SEQ ID NO: 73378 - DNA, 120 bp, synthetic construct
  source 1..120: mol_type = other DNA
tggctttgctggaggacctgccatggctttgccagaagaccctgggactgtctggagcatcctcccaaggactcgcccctagtcaggaaaaaatagggccccggagtcagcaagggcttc

SEQ ID NO: 73379 - DNA, 120 bp, synthetic construct
  source 1..120: mol_type = other DNA
aacgtcattttgcagaagggaaactgaggcacaaaatactccactgccaccaagtcacccaactcagtggtagagctgagatctgaatgcaggccgcctggtcaagcccatctgtgaact

SEQ ID NO: 73380 - DNA, 120 bp, synthetic construct
  source 1..120: mol_type = other DNA
ttttgcaagtgaaaactcaaatctatgagaaaagcactcgccccgcagtaggaaagcaggcaaagaactagaaagacaatttacaaaaggatctgaaggtcctcactgcactcatcctgt

SEQ ID NO: 73381 - DNA, 120 bp, synthetic construct
  source 1..120: mol_type = other DNA
tctcccgtaagtggttcttacctccataacagaaaaagagtaaacaatcaatgtggagtgaggaagaagagaggggagggagagaggaagggagggaggtacgcagggaggcagcaaggg

SEQ ID NO: 73382 - DNA, 120 bp, synthetic construct
  source 1..120: mol_type = other DNA
aaatggctgctttagcccgtttggaagtctgctaattattctcttgaggaaagaaatgcaggttcattattataatgagctttgggcaaaatatttcatcgagcctgacaagccgcagcg

SEQ ID NO: 73383 - DNA, 120 bp, synthetic construct
  source 1..120: mol_type = other DNA
agataatggaggtgttacggggatgggctagaactcggtcctggcatcacagagctaccccggtcaaaaatataccatgtaattacagaccaggaaaattactgtgcaggagcaaagcag

SEQ ID NO: 73384 - DNA, 120 bp, synthetic construct
  source 1..120: mol_type = other DNA
ttcttcaccaaaagagaaattcatttctaaatgtcactttcaggttaaggaaaataaaatgtgggacgctggactcatcgtgggtttttgcggtcttctctcagctttgtgtggtagcca

SEQ ID NO: 73385 - DNA, 120 bp, synthetic construct
  source 1..120: mol_type = other DNA
acttggtgggctctttggaaactttagtccttgagctctggaaaggtctctgtatgatttctcatcatggaggccaccatctctgttctctctttctgaaattccttttaagtcagactg

SEQ ID NO: 73386 - DNA, 120 bp, synthetic construct
  source 1..120: mol_type = other DNA
attgtccctgttacaacccagatttcccttatcgcaactggtcctagcctgtgacctcctggggtggggaatcatctctgcaaacacagctcctccacccttatcagtgctttgtgaagg

SEQ ID NO: 73387 - DNA, 120 bp, synthetic construct
  source 1..120: mol_type = other DNA
acaaactttctgtttcaaggaacagaaacacccctgaaacttgtctaagaaggaaatgtgtcaactcacatacatgaaaagcctgagtccctcctcaaagtcctcccctccctccttctc

SEQ ID NO: 73388 - DNA, 120 bp, synthetic construct
  source 1..120: mol_type = other DNA
cagcaccatctctcctgtgagaaccctgtgcctagaacggagcctggtacagaggaagaacccgacagactgtgagccctgtcttcctcttggcaccatgagtcacctgtcaaactgagg

SEQ ID NO: 73389 - DNA, 120 bp, synthetic construct
  source 1..120: mol_type = other DNA
aggatgaatagagagatggagggaaggagggctgaataaagaaatggatggatggatggatgatggatggatgggtgtgtgggtatgtggatggagagatggatgaatggttaaagaggt

SEQ ID NO: 73390 - DNA, 120 bp, synthetic construct
  source 1..120: mol_type = other DNA
cctaccaaggcctaggtcttgactctggactcttccatgctcatcagagggtactgttggagcttcctggtcaggctgacccagctgcctctggagcctggcctgggatctggagagaaa

SEQ ID NO: 73391 - DNA, 120 bp, synthetic construct
  source 1..120: mol_type = other DNA
tgctggcctccccagagctccaggctctgaggccacaccctcacccaaggcaagttgctcagggggtctccaggctgtatctaacagctgcctgtgccgaaaaattaagcaccgctgagt

SEQ ID NO: 73392 - DNA, 120 bp, synthetic construct
  source 1..120: mol_type = other DNA
tatgatgaggggctggaggcagcagaaagggggctataggaccctttgactcaagggctaaccatgatgtttcattaagggagaaatgcacttgctgctcctggaacattctggctcact

SEQ ID NO: 73393 - DNA, 120 bp, synthetic construct
  source 1..120: mol_type = other DNA
atggcaaaggtgatacattagactcaaagagacatgatatccccttgggctgcaacttaaattccaaggagagatcctgaatccagagtcacatgtatgttagaaacctctggcactctc

SEQ ID NO: 73394 - DNA, 120 bp, synthetic construct
  source 1..120: mol_type = other DNA
tctgatgacccaggcctttccccctgcccaggctagccttgtgctcagctgccagcacagcccccaccacacactccccaacaggtgtctccacaactgccaggagacagctcagcttag

SEQ ID NO: 73395 - DNA, 120 bp, synthetic construct
  source 1..120: mol_type = other DNA
ggatggatgtcgtctgcttttttaggtaattatagaaatcacccccaaaaactagactggaaaccttttagaggagggtaggtaactggcatttgtgtctccccaatgggtttatgtttc

SEQ ID NO: 73396 - DNA, 120 bp, synthetic construct
  source 1..120: mol_type = other DNA
tggtttgtcagtttctgagagacaggcactaggatggccaataatattgtggatttcttgatgtgttggttttgttcatttgtttttcctgccccatcctctgggcccttaaagcctggg

SEQ ID NO: 73397 - DNA, 120 bp, synthetic construct
  source 1..120: mol_type = other DNA
ccattgtgtgtcctgaatcattgctctggctgagggagtctggggacccatgagggccagatggatgggctcagatggagtgggaggccattgggaagtggctggtaaaaagcctcatga

SEQ ID NO: 73398 - DNA, 120 bp, synthetic construct
  source 1..120: mol_type = other DNA
tggggaaatggggacagatattaggccattatggcagaatgcaagtgtttagttagaactgtgctaagtgcgtaaagagagctaaaggctacataataagttgtgagcctacctagggta

SEQ ID NO: 73399 - DNA, 120 bp, synthetic construct
  source 1..120: mol_type = other DNA
aaaatttttccaagtcactgcaggaaaaaagtatagaatttgctttctatcccttttcttagaaggttctggagaatgcactccagcaaaacgtgggaggaaaccagggaaaaggaaggc

SEQ ID NO: 73400 - DNA, 120 bp, synthetic construct
  source 1..120: mol_type = other DNA
ttggagacacaatccccagacttggggacgagctggatatggtggtgaaggaggggagtcttcaggaaagacccccaggttctggcttggccatatgttggaggctgaaacgattcatcc

SEQ ID NO: 73401 - DNA, 120 bp, synthetic construct
  source 1..120: mol_type = other DNA
ccgccagggtgcagacccagaccaatgggaggccaagggaggcccgcagcccagaccttccgagccctcagcctgctcagctcagtgtccttccagggaaatgggcgtttcctgtgggaa

SEQ ID NO: 73402 - DNA, 120 bp, synthetic construct
  source 1..120: mol_type = other DNA
agcagaacctctccgagggagtgctattgtttttcatgtcagctgcattttaaggctacatttcacgtcagctgtgacttggaaggaaagagggcccggcctttgaaaaatgaagaaatt

SEQ ID NO: 73403 - DNA, 120 bp, synthetic construct
  source 1..120: mol_type = other DNA
ctctgcttgctttcctgtccacaatccagtgcttctgtcctatggtccccagcggctgctcctgcattcaccatcacatctgcattccagcagcaggagggaggtaaaagacatgaagga

SEQ ID NO: 73404 - DNA, 120 bp, synthetic construct
  source 1..120: mol_type = other DNA
cagcaggtgccagagctgaaagcactggttaaacgtgatgggtaaacacatgtctatttcagcttctttgaatcccactaaggtgacagtaaaggcatgaaaaacatggaaacatgtaaa

SEQ ID NO: 73405 - DNA, 120 bp, synthetic construct
  source 1..120: mol_type = other DNA
aagttctagcattacagctgctcagcatgcctacagtgcaaacagtcctgctaagactccaggaagaaatcccagaagaaaaaaaaaatgaaggtgatagactgccagtattctcaatag

SEQ ID NO: 73406 - DNA, 120 bp, synthetic construct
  source 1..120: mol_type = other DNA
tgagagaagaggactcactggtgggtgcctcctccccacctttagcaagggttgacagagggatctgggctcttccctgggcaggcatcccagagctatgacctgaatgatatcttagat

SEQ ID NO: 73407 - DNA, 120 bp, synthetic construct
  source 1..120: mol_type = other DNA
agttgggccatgagaagaagtatgtggcccggcctgccctacaccatcagggggtgcttggaccagtggcggctggaaataacccatgaacaggggagagaaggggtgaatgccttgtag

SEQ ID NO: 73408 - DNA, 120 bp, synthetic construct
  source 1..120: mol_type = other DNA
tcaggcacagtgggggttgcccggcatcttggcagatgggcagcgttagagaagccttggacctggccctgcaaatggaggtaccagagggctgaactagatgagggacttgaaggctca

SEQ ID NO: 73409 - DNA, 120 bp, synthetic construct
  source 1..120: mol_type = other DNA
caccagaccaggggataagaggttggcagcatcgtccatggttatcccacagctaggaggctgtgggtgtgggagaacatgctgggtaggggtgcctgtgtgcctctggagtcgaggcaa

SEQ ID NO: 73410 - DNA, 120 bp, synthetic construct
  source 1..120: mol_type = other DNA
tggcacatggtgtggcacatggcatggctggggctggggctgggttgtgtagcatgtggagtggcaaggtgcgtgacatggtgtatggcatggtagtgtgcccctcgagccatgtgtcca

SEQ ID NO: 73411 - DNA, 120 bp, synthetic construct
  source 1..120: mol_type = other DNA
gcaccccagccctttggcccccaagtctctgccacctccctggggttctgctcccatattcctcacacccagcacagaacccagcatgtctcctgtagacacctgcatataaaccctgac

SEQ ID NO: 73412 - DNA, 120 bp, synthetic construct
  source 1..120: mol_type = other DNA
ttagcagaaggtaaagatgagaccaagaggcagatgggtggaagagttgaaagcagccaagtgtcaccaaggcatttctgagggagagggacacgactagtggctcaaatctttagaaat

SEQ ID NO: 73413 - DNA, 120 bp, synthetic construct
  source 1..120: mol_type = other DNA
agcctctcgagtgtccagagagaggacaccgtcttgagccagcagggacagccaagagcgcccggggagaggcctgggtggagacagaacacagcaggctgtgggcgtggccaatgttga

SEQ ID NO: 73414 - DNA, 120 bp, synthetic construct
  source 1..120: mol_type = other DNA
ctctgtcttagagaaaaatggtggcaacgtgggacagactgaggaagccagcccagaaacgtcccgtcccaaattcaggaatatttagggtatacctgctgcacgccaagggcagtttca

SEQ ID NO: 73415 - DNA, 120 bp, synthetic construct
  source 1..120: mol_type = other DNA
ctcaggaggcagcggcagagaatcaaatgcaggtggggcctgtgcccaccgccagcacaaacacggctcctgggcccccagcctgcccgacgttcctgcccgcctggcccccaaacagag

SEQ ID NO: 73416 - DNA, 120 bp, synthetic construct
  source 1..120: mol_type = other DNA
ccctggctcccagtatcaaagcatgtacaagagcggtctctagggcagttctgcgtagacgccaaagtacaggaagacgtgcaggaactttgtgccgtcgacccttgaacaatgcagggt

SEQ ID NO: 73417 - DNA, 120 bp, synthetic construct
  source 1..120: mol_type = other DNA
gcctcacttactaattcaacaaacatttgtgcagcgccaactctaccctccatgtatttactgggcaccttctaggctccaggctccaggctctgggagactgtctagggttaagacggt

SEQ ID NO: 73418 - DNA, 120 bp, synthetic construct
  source 1..120: mol_type = other DNA
ggtgacgatcttgagatattcccccacagtcgtcagccagggacatggcgcccctgaggcccttggggggccaagcatccgtcagtgggcagaggctggtaaaagtggatgtcagcagca

SEQ ID NO: 73419 - DNA, 120 bp, synthetic construct
  source 1..120: mol_type = other DNA
tggtgtcttcatgcctcagtccacttgatcccctcagcatcctcctggggaaggtgctacagctgccctgttttataggcagggaaactgaggttcagagaagcaaagtgacttgcccaa

SEQ ID NO: 73420 - DNA, 120 bp, synthetic construct
  source 1..120: mol_type = other DNA
ttttcaagattttcttttgaaaacaaattcataaccacatcaaacaggaatccccgttgccttgggtttgatcgccggccgcccggggctctctaactagctgttattctaattgctttt

SEQ ID NO: 73421 - DNA, 120 bp, synthetic construct
  source 1..120: mol_type = other DNA
gtctctttctgtcccaagaatcccctgtgaaggcctccacacccattagcacatgtgggacttggacagatgttcgagtgccataatgtgaaaatttatgaaaccacaaatgttcatctg

SEQ ID NO: 73422 - DNA, 120 bp, synthetic construct
  source 1..120: mol_type = other DNA
cgcccccctctcatctcagcctctcacagcaccctgttggccgcctcttccttagcctgctcagcctccgtggtaggtgctgtgggtgacgaccacagcacccagcctttgaagctggcc

SEQ ID NO: 73423 - DNA, 120 bp, synthetic construct
  source 1..120: mol_type = other DNA
ttccaaggagctctcagatcacctggctgtccactcgtttggggcttctctgctgcctccgcagcactgcgaggcctctgatcacctactctctgtgctgggtgcatttcgggttctgtc

SEQ ID NO: 73424 - DNA, 120 bp, synthetic construct
  source 1..120: mol_type = other DNA
acctgggtgcttcccaccactgactctctcgtctgcctttgtccccgcaggtgacgcagctggaccagaggctggcactcatcaccgacatgcttcaccagctgctctccttgcacggtg

SEQ ID NO: 73425 - DNA, 120 bp, synthetic construct
  source 1..120: mol_type = other DNA
ctgctgagccgcagagaagtgacggttcctacacaggacaggggttccttctgggcattacatcgcatagaaatcaataatttgtggtgatttggatctgtgttttaatgagtttcacag

SEQ ID NO: 73426 - DNA, 120 bp, synthetic construct; identical to SEQ ID NO: 22696
  source 1..120: mol_type = other DNA

SEQ ID NO: 73427 - DNA, 120 bp, synthetic construct; identical to SEQ ID NO: 22697
  source 1..120: mol_type = other DNA

SEQ ID NO: 73428 - DNA, 120 bp, synthetic construct; identical to SEQ ID NO: 22698
  source 1..120: mol_type = other DNA

SEQ ID NO: 73429 - DNA, 120 bp, synthetic construct; identical to SEQ ID NO: 22699
  source 1..120: mol_type = other DNA

SEQ ID NO: 73430 - DNA, 120 bp, synthetic construct; identical to SEQ ID NO: 22700
  source 1..120: mol_type = other DNA

SEQ ID NO: 73431 - DNA, 120 bp, synthetic construct
  source 1..120: mol_type = other DNA
ccaagaaacctctcctggggagactaagccagggcctcagccctctacacaatttcgttaccaaaggaggcgtggttttttgtttgtttgtttgtttgttttgagacagagtctcgctct

SEQ ID NO: 73432 - DNA, 120 bp, synthetic construct; identical to SEQ ID NO: 22702
  source 1..120: mol_type = other DNA

SEQ ID NO: 73433 - DNA, 120 bp, synthetic construct
  source 1..120: mol_type = other DNA
accatgatcaccaccatcaccatcaccaccatcacatcaccatcgccaccatcatcaccaccatcaccatcaccatcatcaccaccaccatcaccatcatcaccaccaccaccatcacca

SEQ ID NO: 73434 - DNA, 120 bp, synthetic construct; identical to SEQ ID NO: 22703
  source 1..120: mol_type = other DNA

SEQ ID NO: 73435 - DNA, 120 bp, synthetic construct; identical to SEQ ID NO: 22704
  source 1..120: mol_type = other DNA

SEQ ID NO: 73436 - DNA, 120 bp, synthetic construct
  source 1..120: mol_type = other DNA
ccagcacacgtgccggacgagggcggccgcagaggcccagcaaggccaccacacatgaggtcagggctggatctccctccccaagtggctttaggcttccaggaataaggcagcactgat

SEQ ID NO: 73437 - DNA, 120 bp, synthetic construct; identical to SEQ ID NO: 22705
  source 1..120: mol_type = other DNA

SEQ ID NO: 73438 - DNA, 120 bp, synthetic construct; identical to SEQ ID NO: 22706
  source 1..120: mol_type = other DNA

SEQ ID NO: 73439 - DNA, 120 bp, synthetic construct; identical to SEQ ID NO: 22707
  source 1..120: mol_type = other DNA

SEQ ID NO: 73440 - DNA, 120 bp, synthetic construct; identical to SEQ ID NO: 22708
  source 1..120: mol_type = other DNA

SEQ ID NO: 73441 - DNA, 120 bp, synthetic construct; identical to SEQ ID NO: 31782
  source 1..120: mol_type = other DNA

SEQ ID NO: 73442 - DNA, 120 bp, synthetic construct
  source 1..120: mol_type = other DNA
tgcatgtgtctttatagcagcatgatttataatcctttgggtatatacccagtaatgggatggctgggtcaaatggtatttctagttctagatcactgaggaatcgccacactgacttcc

SEQ ID NO: 73443 - DNA, 120 bp, synthetic construct; identical to SEQ ID NO: 28082
  source 1..120: mol_type = other DNA

SEQ ID NO: 73444 - DNA, 120 bp, synthetic construct
  source 1..120: mol_type = other DNA
ggttgaactagtttacagtcccaccaacagtgtaaaagtgttcctatttctccgcatcctctccagcacctgttgtttcctgactttttaatgattgccattctaactggtgtgagatga

SEQ ID NO: 73445 - DNA, 120 bp, synthetic construct
  source 1..120: mol_type = other DNA
agcttgatggggatggcattgaatctgtaaattaccttgggcagtgtggccattttcacgatattgattcttcctacccatgagcatggaatgttcttccatttgtttgtgtcctctttt

SEQ ID NO: 73446 - DNA, 120 bp, synthetic construct
  source 1..120: mol_type = other DNA
gatgtgctgctggattcggtttgccagtattttattgaggatttttgcatccatgttcatcaaggatattggtctaaaattctcttttttggttgtgtctctgcccggctttggtatcag

SEQ ID NO: 73447 - DNA, 120 bp, synthetic construct
  source 1..120: mol_type = other DNA
gtatattctgttgatttggggtggagagttctggagatgtctattaggtctgcttggtgcagagctgagttcaattcctgggtatctttgttgactttctgtctcgttgatctgtctaat

SEQ ID NO: 73448 - DNA, 120 bp, synthetic construct
  source 1..120: mol_type = other DNA
ttgtggcgttctctgtatttcctgaatctgaacgttggcctgccttgctagattggggaagttctcctggataatatcctgcagagtgttttccaacttgattccattctccacatcact

SEQ ID NO: 73449 - DNA, 120 bp, synthetic construct
  source 1..120: mol_type = other DNA
gtctgcagaggttactgctgtctttttgtttgtctgtgccctgcccccagaggtggagcctacagaggcaggcaggcctccttgagctgtggtgggctccacccagttcgagctgcccgg

SEQ ID NO: 73450 - DNA, 120 bp, synthetic construct
  source 1..120: mol_type = other DNA
tagaaatattctagatagaatattaagcaaatgatttataataaatttgagggccaggcacagtggctcatgcctgtaatcccagcactttgggaagccaaggcgagtggatcacttcag

SEQ ID NO: 73451 - DNA, 120 bp, synthetic construct; identical to SEQ ID NO: 28076
  source 1..120: mol_type = other DNA

SEQ ID NO: 73452 - DNA, 120 bp, synthetic construct
  source 1..120: mol_type = other DNA
tattattgccacaatttcagagcctgttattggtctattcagagattcaatttcttcctggtttagtcttgggagggtgtatgtgtcgaggaatttatccatttcttctagattttctag

SEQ ID NO: 73453 - DNA, 120 bp, synthetic construct
  source 1..120: mol_type = other DNA
ggggtgttaaagtctcccattattattgtgtgggagtctaagtctctttgtaggtcactcagcacttgctttatgaatctgggtgctcctgtattgggtgcatatatatttaggatagtt

SEQ ID NO: 73454 - DNA, 120 bp, synthetic construct
  source 1..120: mol_type = other DNA
gataatatcctgcagagtgttttccaacttggttccattctccgcatcactttcaggtacaccaatcagacgtagatttggtcttttcacatagtcccatatttcttggaggctttgttc

SEQ ID NO: 73455 - DNA, 120 bp, synthetic construct; identical to SEQ ID NO: 28078
  source 1..120: mol_type = other DNA

SEQ ID NO: 73456 - DNA, 120 bp, synthetic construct
  source 1..120: mol_type = other DNA
accataaaaaccctagaagaaaacctcggcaataccgttcaggacatagccatgggcaaggatctcatgtctaaaacaccaaaagcaatggcaacaaaagccaaaattgacaaatgtgat

SEQ ID NO: 73457 - DNA, 120 bp, synthetic construct; identical to SEQ ID NO: 28079
  source 1..120: mol_type = other DNA

SEQ ID NO: 73458 - DNA, 120 bp, synthetic construct
  source 1..120: mol_type = other DNA
actacaggcgcccgctaccacgcccggctaattttttgtatttttagtagagacggggtttcaccgtgttagccaggatggtctcgatctcctgacctcgtgatccgcccgcctcggcct

SEQ ID NO: 73459 - DNA, 120 bp, synthetic construct
  source 1..120: mol_type = other DNA
agtagttctgcttttagttctttaaggaatatccacactgctttccatagtgttgtactagtttatattctcaccagcagtgtagaagtgttccctcatcactgcatccacgccaacacc

SEQ ID NO: 73460 - DNA, 120 bp, synthetic construct; identical to SEQ ID NO: 28080
  source 1..120: mol_type = other DNA

SEQ ID NO: 73461 - DNA, 120 bp, synthetic construct; identical to SEQ ID NO: 28081
  source 1..120: mol_type = other DNA

SEQ ID NO: 73462 - DNA, 120 bp, synthetic construct
  source 1..120: mol_type = other DNA
ctccacatcctctccagcacctgtggtttcctgaactttttaatgattgccattgtaactggtgtgagatggtatctcattgtggttttgatttgtatttctctgatagccagggatgat

SEQ ID NO: 73463 - DNA, 120 bp, synthetic construct
  source 1..120: mol_type = other DNA
tcactcatgatttggctctctgtttgtctgttattggtgtataagaatgcttgcgatttttgcacattgattttgtatcctgagactttgctgaagttgcttatcagcttaaggagattt

SEQ ID NO: 73464 - DNA, 120 bp, synthetic construct
  source 1..120: mol_type = other DNA
ctctgccaggctttggtatcatgatgatgctggcctgataagatgagttagggaggattccctctttttctattgattggaatagtttcagaaggaatggtaccagctcctccttgtacc

SEQ ID NO: 73465 - DNA, 120 bp, synthetic construct; identical to SEQ ID NO: 33137
  source 1..120: mol_type = other DNA

SEQ ID NO: 73466 - DNA, 120 bp, synthetic construct; identical to SEQ ID NO: 33138
  source 1..120: mol_type = other DNA

SEQ ID NO: 73467 - DNA, 120 bp, synthetic construct
  source 1..120: mol_type = other DNA
ttgttttattgttggccgggttctttgtctgctgaagtccaacctatctctctctctctctctctctctctcattctctctctcttctcttttttctcccttccttcctttccttcttcc

SEQ ID NO: 73468 - DNA, 120 bp, synthetic construct
  source 1..120: mol_type = other DNA
ccctcacatctgtaaatgtcacactgcccagccctgcactcctctcccacttggccagtttcaggctgtaccactccaccgaggtgaccccagctagtttggggcttcagatcccactgc

SEQ ID NO: 73469 - DNA, 120 bp, synthetic construct; identical to SEQ ID NO: 33139
  source 1..120: mol_type = other DNA

SEQ ID NO: 73470 - DNA, 120 bp, synthetic construct; identical to SEQ ID NO: 33140
  source 1..120: mol_type = other DNA

SEQ ID NO: 73471 - DNA, 120 bp, synthetic construct
  source 1..120: mol_type = other DNA
aattgcatgaacctgggagctagaggttgcagtgagccgagatcgcaccaccgccctctagactgggcgacagagcaagactctgtcttaaaaaaaaaaaaaaaaaaatatatatatata

SEQ ID NO: 73472 - DNA, 120 bp, synthetic construct
  source 1..120: mol_type = other DNA
ggggttgttttcttcttgtaaatttgtttgagttcattgtagattctggatattagccttctgtcagatgagtaggctgcgaaaattttctcccattttgtaggttgcctgttcactctg

SEQ ID NO: 73473 - DNA, 120 bp, synthetic construct
  source 1..120: mol_type = other DNA
tgtataagaatgcttgtgatttttgtacattgattttgtatcccgagactttgctgaagttgcttatcagcttaaggagattttgggctgagacaatggggttttctagatatacaatca

SEQ ID NO: 73474 - DNA, 120 bp, synthetic construct
  source 1..120: mol_type = other DNA
ttatcactttttattgcatctatttgattcttctctctttttttctttattagtcttgttagtggtctatcaattttgttgatcctttcaaaaaaccagctcctggattcattaattttt

SEQ ID NO: 73475 - DNA, 120 bp, synthetic construct
  source 1..120: mol_type = other DNA
acatgtctttggagctattattaaatgaaaactgtctcctctctttcatcaaaattaatgaattttggtgagttcttattttgtgtctgtacccagaaataattttaatgataggcagag

SEQ ID NO: 73476 - DNA, 120 bp, synthetic construct
  source 1..120: mol_type = other DNA
ggaagaagggaaaatggtcactaatataatttcacttaatacaaacttacgacaatacaaatgggtttttttaattattattatactttaagttttagggtacatgtgcacaatgtgcag

SEQ ID NO: 73477 - DNA, 120 bp, synthetic construct
  source 1..120: mol_type = other DNA
ctttgcccactttttgatggggttgtttgtttttttcttgtaaattgtttgagttcattgtagattctggatattagccttttgtcagataagtaggttgtgaaaattttctcccatttt

SEQ ID NO: 73478 - DNA, 120 bp, synthetic construct
  source 1..120: mol_type = other DNA
ttgaagcaattgtgaatgggagttcactcatgattggttctctgtttgtctgttattggtgtataagaatgcttgtgatttttgtacgttgattttgtatcctgagactttgctgaagtt

SEQ ID NO: 73479 - DNA, 120 bp, synthetic construct
  source 1..120: mol_type = other DNA
gtttttggttatgtggataagtgttttagtggtgatttctgagactttagtacacccatcacctgagcagtgcacactgtacacaatatatagtcttttaaccctcacccttcctcccga

SEQ ID NO: 73480 - DNA, 120 bp, synthetic construct; identical to SEQ ID NO: 31465
  source 1..120: mol_type = other DNA

SEQ ID NO: 73481 - DNA, 120 bp, synthetic construct
  source 1..120: mol_type = other DNA
gaaatggtatctcattgtggtttggatttgcatttctctgatggccagtgatggtgagcattttttcatgtgttttttggctgcataaatgtcttcttttgagaagtgtctgttcatgtc

SEQ ID NO: 73482 - DNA, 120 bp, synthetic construct; identical to SEQ ID NO: 6204
  source 1..120: mol_type = other DNA

SEQ ID NO: 73483 - DNA, 120 bp, synthetic construct; identical to SEQ ID NO: 31467
  source 1..120: mol_type = other DNA

SEQ ID NO: 73484 - DNA, 120 bp, synthetic construct
  source 1..120: mol_type = other DNA
cctctctaagacagtgcaggccacgtgatccatcctcctagaggcagtgagcaggtgagggacccctaccacagccaggaggaaaaagctaggcgtccactttccgcagccatgctcaaa

SEQ ID NO: 73485 - DNA, 120 bp, synthetic construct
  source 1..120: mol_type = other DNA
catcctggagcacgtggagatgctgtgcatgggcttcttcacgctcgagtacctgctgcgcctagcctccacgcccgacctgaggcgcttcgcgcgcagcgccctcaacctggtggacct

SEQ ID NO: 73486 - DNA, 120 bp, synthetic construct
  source 1..120: mol_type = other DNA
aacttgctctgacttcactaaagttctttcaggaccctgtattattgccccattttacagatagtgaaattgaagtacagagagtttgaatgtggactcacagctagaggtggcaaagcc

SEQ ID NO: 73487 - DNA, 120 bp, synthetic construct
  source 1..120: mol_type = other DNA
atccctatagtagataaaccatgtgtacagatgaggctcatggttgatgatttgtccccagcaaatgacatttactttggggtgactaaagcaggaaagcagaagagtaaatccacatgc

SEQ ID NO: 73488 - DNA, 120 bp, synthetic construct
  source 1..120: mol_type = other DNA
gtttttgagcacctccaatgtgcccagtagtattcttaacactagggatacagggtaggagaagaaaaaacaatcaagttttttctcttctggagcttacattctaatggagaaagacag

SEQ ID NO: 73489 - DNA, 120 bp, synthetic construct
  source 1..120: mol_type = other DNA
tttcaccattctggggctgtatcctttgtgaaatatgcatcccacattacagagagtttctcttatccattcttttatgtatttttaatactttcagacaacaccaaatctgacttgctt

SEQ ID NO: 73490 - DNA, 120 bp, synthetic construct
  source 1..120: mol_type = other DNA
aagaaaatttatctctagttgaggcaccattttgtcccagagaccttgctcccatctttctttccctaaggtatgttttcattaccttgccaataggtggcacttacaagatcactgaaa

SEQ ID NO: 73491 - DNA, 120 bp, synthetic construct
  source 1..120: mol_type = other DNA
ctgtgcacacctaccgcttattgtaccacttacaaacatgtcagaactgtaatatacagatgagggttgttattatcctgaaggtagtcacccatgacctcattctaacagtgattccac

SEQ ID NO: 73492 - DNA, 120 bp, synthetic construct
  source 1..120: mol_type = other DNA
gcttccagtttgcagagttgctgagctagccagttttcttcagtatattaagatggattgcggaaattttggtcacatttccaaacccaactcctgctaatgtgacaactcattctgtga

SEQ ID NO: 73493 - DNA, 120 bp, synthetic construct
  source 1..120: mol_type = other DNA
actaaactttcatccagaggtgtgagtcatggtgttagtgacaaatgaaagctattgttcagctcacacaactggagagagatcagcctggggttctttgacttttggtgtggtcaatga

SEQ ID NO: 73494 - DNA, 120 bp, synthetic construct
  source 1..120: mol_type = other DNA
aaaaatatttacactgctaagctaacggccacctcagcacggatcaacaagatgaccatatgctttactgccgtctgctggaaaattatggcaacaactacccaaatacacaaagcaaag

SEQ ID NO: 73495 - DNA, 120 bp, synthetic construct
  source 1..120: mol_type = other DNA
atgctctttacagcaaccatttcaagtaggtattacctcctcctcccatatcttacattcaaacatgcatgagtcgtagtcaggatttcagccaaagtctttcagctccatccatagctt

SEQ ID NO: 73496 - DNA, 120 bp, synthetic construct; identical to SEQ ID NO: 18926
  source 1..120: mol_type = other DNA

SEQ ID NO: 73497 - DNA, 120 bp, synthetic construct
  source 1..120: mol_type = other DNA
ataccagttcctccttgtacctctggtagaattcggctgtgaatccatgtggtcctggactctttttggttggtaagctattgattattgccacaatttcagagcctgttattggtctat

SEQ ID NO: 73498 - DNA, 120 bp, synthetic construct
  source 1..120: mol_type = other DNA
actggtaccaaaacagagatatagatcaatggaacagaacagagccctcagaaataacactgcctatctacaactatctgatctttgacaaacctgagaaaaacaagcaatggggagagg

SEQ ID NO: 73499 - DNA, 120 bp, synthetic construct
  source 1..120: mol_type = other DNA
tcccatttctgggtatatacccaaaggactataaatcatgctgctataaagagacatgcacacgtatgtttattgcggcactattcacaatagcaaagacttggaaccaacccaaatgtc

SEQ ID NO: 73500 - DNA, 120 bp, synthetic construct
  source 1..120: mol_type = other DNA
cctcccaaagtgctgggattacaggcgtgagccacagcgcccagccaaactcatccttttttatggctgcatagtattccatggtatatatgtgccacatttttttattcagtatcattg

SEQ ID NO: 73501 - DNA, 120 bp, synthetic construct; identical to SEQ ID NO: 27094
  source 1..120: mol_type = other DNA

SEQ ID NO: 73502 - DNA, 120 bp, synthetic construct; identical to SEQ ID NO: 21902
  source 1..120: mol_type = other DNA

SEQ ID NO: 73503 - DNA, 120 bp, synthetic construct
  source 1..120: mol_type = other DNA
agtgttggaagttctggctagggcaattaggcaggagaaggaaataaagggtattcagttacaaaaagaggaagtcaaattgtccctgtttgcagacgacatgattgtatatctagaaaa

SEQ ID NO: 73504 - DNA, 120 bp, synthetic construct
  source 1..120: mol_type = other DNA
caaatgggatctaattaaactaaagagcttcttgcacagcaaaagaaactaccatcagagtgaacaggcaacctacaaaatgggagaaaatttttgcaacctactcatctgacaaagggc

SEQ ID NO: 73505 - DNA, 120 bp, synthetic construct
  source 1..120: mol_type = other DNA
acacaggaaggggaacatcacactctggggactgttgtggggtgggggtaggggggagggatagcattgggagatatacctaatgctagatgatgagttagtgggtgcagcgcactagca

SEQ ID NO: 73506 - DNA, 120 bp, synthetic construct; identical to SEQ ID NO: 27718
  source 1..120: mol_type = other DNA

SEQ ID NO: 73507 - DNA, 120 bp, synthetic construct; identical to SEQ ID NO: 9350
  source 1..120: mol_type = other DNA

SEQ ID NO: 73508 - DNA, 120 bp, synthetic construct; identical to SEQ ID NO: 9351
  source 1..120: mol_type = other DNA

SEQ ID NO: 73509 - DNA, 120 bp, synthetic construct; identical to SEQ ID NO: 15907
  source 1..120: mol_type = other DNA

SEQ ID NO: 73510 - DNA, 120 bp, synthetic construct; identical to SEQ ID NO: 15908
  source 1..120: mol_type = other DNA

SEQ ID NO: 73511 - DNA, 120 bp, synthetic construct; identical to SEQ ID NO: 15909
  source 1..120: mol_type = other DNA

SEQ ID NO: 73512 - DNA, 120 bp, synthetic construct; identical to SEQ ID NO: 15910
  source 1..120: mol_type = other DNA

SEQ ID NO: 73513 - DNA, 120 bp, synthetic construct; identical to SEQ ID NO: 15911
  source 1..120: mol_type = other DNA

SEQ ID NO: 73514 - DNA, 120 bp, synthetic construct; identical to SEQ ID NO: 15912
  source 1..120: mol_type = other DNA

SEQ ID NO: 73515 - DNA, 120 bp, synthetic construct
  source 1..120: mol_type = other DNA
gaatctttcaatctgctttctaattggcttagttttcccactgtcttcgcaaaaggacaggaatttccaggttagtttgcagcttgtctttcatcaagcgaaatgctcatgctgttgggt

SEQ ID NO: 73516 - DNA, 120 bp, synthetic construct
  source 1..120: mol_type = other DNA
gagatcgagaccatcctggctaacatgatgaaactctgtctctactaaaaatacaaaaaatgagccaggcgcggtggcgagcacctgtagtcccagctactaggcagtctgaggcaggag

SEQ ID NO: 73517 - DNA, 120 bp, synthetic construct
  source 1..120: mol_type = other DNA
atgaggaaatgtgtaaaatgcttcatcttagttttgtctccagtggctctgatgaaagaatgtcccaggagattcctcctaattaaatgctgactgaggaatctgaggagggggggaagg

SEQ ID NO: 73518 - DNA, 120 bp, synthetic construct
  source 1..120: mol_type = other DNA
tgaaaacaaagtcgagtttgttgtttccagctaaagcagcccctgctttagtgtggagatacttgaggagttaaaaggaaacaggaaatactactgctttatggttggaaaccactcaga

SEQ ID NO: 73519 - DNA, 120 bp, synthetic construct
  source 1..120: mol_type = other DNA
tgagactgtcttttttttttttttttttttgagtcagcgtcttgctctgttgcccaagctgagtgcagtgatgcaagcacagctcactacagccttgacctcccaggtgcaagcaatttt

SEQ ID NO: 73520 - DNA, 120 bp, synthetic construct
  source 1..120: mol_type = other DNA
gtgtagaatcagccatggctggatctgagcctctggcagcggtggctacttgagcaagcatgttcctgaacctgtctgggccccacttgagcctcatttatgacatagagataagatagc

SEQ ID NO: 73521 - DNA, 120 bp, synthetic construct
  source 1..120: mol_type = other DNA
ctttgttcactttataaaaattacttaaaataattatgtgctacttgaatgaaaaattcaaatattttctctctcccttccctccctccctccctcccaccctccccccttccctccctc

SEQ ID NO: 73522 - DNA, 120 bp, synthetic construct
  source 1..120: mol_type = other DNA
gtgaagaatgcagaagcctcaggagccgacgcaatcaactggaagaaagggtatcagccatggaagatgaaatgaatgaaatgaagtgagaagggaagtttagagaaaaaagaataaaaa

SEQ ID NO: 73523 - DNA, 120 bp, synthetic construct
  source 1..120: mol_type = other DNA
aacgagcaaaataaccagctaacaacataatgacaggatgaaattcacacataacaatattaactttaaatgtaaatggactaaatgctccaattaaaagacacagactggcaaattgga

SEQ ID NO: 73524 - DNA, 120 bp, synthetic construct
  source 1..120: mol_type = other DNA
taaaagaactggaaaagcaagagcaaacacattcaaaagctagcagaaggcaagaaatgactaaaatgagagcagaactgaaggaaatagagacaaataaaaaccctcaaaaaattaatg

SEQ ID NO: 73525 - DNA, 120 bp, synthetic construct
  source 1..120: mol_type = other DNA
aaaccgaatccagcaacacatcaaaaagcttatccaccataatcaagtgggcttcatccctgggatgcaaggctggttcaatatatgcaaatcaataaatgtaatccagcatataaacag

SEQ ID NO: 73526 - DNA, 120 bp, synthetic construct
  source 1..120: mol_type = other DNA
ctgacttcaaactatactacaaggctgcagtaaccaaaacagcatggtactgataccaaaacagagatatgatcaatggaacagaacagagccctcagaaataatgccacatatctacaa

SEQ ID NO: 73527 - DNA, 120 bp, synthetic construct
  source 1..120: mol_type = other DNA
atagactggattaagaaaatgtggcacatatacaccatggaatgctatgcaaccataaaaaatgatgagttcatgtcctttgtagggacatggatgaaattggaaatcatcattctcagc

SEQ ID NO: 73528 - DNA, 120 bp, synthetic construct; identical to SEQ ID NO: 25408
  source 1..120: mol_type = other DNA

SEQ ID NO: 73529 - DNA, 120 bp, synthetic construct
  source 1..120: mol_type = other DNA
attttctcccatttcataggttgcctgttcactctaatggtagtttcttttgctgtgcagaagctctttagtttaattagatcccatttgtcaattttggcttttgttgccattgctttt

SEQ ID NO: 73530 - DNA, 120 bp, synthetic construct
  source 1..120: mol_type = other DNA
ccttcacgtcccttttaagttggattcctaagtattttattctctttgaagccattgtgaatgggagttcactcatgatttggctctctgtttgtctgttattggtgtataagaatgctt

SEQ ID NO: 73531 - DNA, 120 bp, synthetic construct
  source 1..120: mol_type = other DNA
tttcttctagattttctagtttatttgcttagaggtgtaataagaactcttaaataaggccaggcatggtggctcattcctgtaatcccagtactttgggaggctgaggcaggtggattg

SEQ ID NO: 73532 - DNA, 120 bp, synthetic construct
  source 1..120: mol_type = other DNA
taaaacattatcatcgcctggtctgtctcactccaacaagcaataatgagccattatagactgttctaggagggatagcattgggagatatacctaatgctagatgacgagttagtgggt

SEQ ID NO: 73533 - DNA, 120 bp, synthetic construct; identical to SEQ ID NO: 25410
  source 1..120: mol_type = other DNA

SEQ ID NO: 73534 - DNA, 120 bp, synthetic construct; identical to SEQ ID NO: 25411
  source 1..120: mol_type = other DNA

SEQ ID NO: 73535 - DNA, 120 bp, synthetic construct; identical to SEQ ID NO: 19867
  source 1..120: mol_type = other DNA

SEQ ID NO: 73536 - DNA, 120 bp, synthetic construct; identical to SEQ ID NO: 19868
  source 1..120: mol_type = other DNA

SEQ ID NO: 73537 - DNA, 120 bp, synthetic construct; identical to SEQ ID NO: 27516
  source 1..120: mol_type = other DNA

SEQ ID NO: 73538 - DNA, 120 bp, synthetic construct; identical to SEQ ID NO: 12016
  source 1..120: mol_type = other DNA

SEQ ID NO: 73539 - DNA, 120 bp, synthetic construct
  source 1..120: mol_type = other DNA
acataaagtgagtaccttatcccctgcatgaagagttttctacgtaaagagaagaaaaataagggggaaaaaaaaaaaaggccaggcacagtggctcacacctgtaatcccaacactttg

SEQ ID NO: 73540 - DNA, 120 bp, synthetic construct; identical to SEQ ID NO: 12017
  source 1..120: mol_type = other DNA

SEQ ID NO: 73541 - DNA, 120 bp, synthetic construct; identical to SEQ ID NO: 12018
  source 1..120: mol_type = other DNA

SEQ ID NO: 73542 - DNA, 120 bp, synthetic construct
  source 1..120: mol_type = other DNA
ctgggtttttttgtattttttgtagagatggggtttgccatgttgctggttggctgtttatcatagaagaggaagtaaaggtggagacagctttgtgtactagaactgtcaaaaggcctg

SEQ ID NO: 73543 - DNA, 120 bp, synthetic construct
  source 1..120: mol_type = other DNA
ccaccccctaatcacactccccactcccctaatcacactccccatcccctaatcacactccccatcccccaatcacactccccatcccccaatcacactccccgcccccaatcatactcc

SEQ ID NO: 73544 - DNA, 120 bp, synthetic construct; identical to SEQ ID NO: 7525
  source 1..120: mol_type = other DNA

SEQ ID NO: 73545 - DNA, 120 bp, synthetic construct; identical to SEQ ID NO: 19446
  source 1..120: mol_type = other DNA

SEQ ID NO: 73546 - DNA, 120 bp, synthetic construct; identical to SEQ ID NO: 19447
  source 1..120: mol_type = other DNA

SEQ ID NO: 73547 - DNA, 120 bp, synthetic construct; identical to SEQ ID NO: 19448
  source 1..120: mol_type = other DNA

SEQ ID NO: 73548 - DNA, 120 bp, synthetic construct; identical to SEQ ID NO: 19449
  source 1..120: mol_type = other DNA

SEQ ID NO: 73549 - DNA, 120 bp, synthetic construct; identical to SEQ ID NO: 19450
  source 1..120: mol_type = other DNA

SEQ ID NO: 73550 - DNA, 120 bp, synthetic construct; identical to SEQ ID NO: 19451
  source 1..120: mol_type = other DNA

SEQ ID NO: 73551 - DNA, 120 bp, synthetic construct; identical to SEQ ID NO: 19452
  source 1..120: mol_type = other DNA

SEQ ID NO: 73552 - DNA, 120 bp, synthetic construct; identical to SEQ ID NO: 19453
  source 1..120: mol_type = other DNA

SEQ ID NO: 73553 - DNA, 120 bp, synthetic construct; identical to SEQ ID NO: 19454
  source 1..120: mol_type = other DNA

SEQ ID NO: 73554 - DNA, 120 bp, synthetic construct; identical to SEQ ID NO: 19455
  source 1..120: mol_type = other DNA

SEQ ID NO: 73555 - DNA, 120 bp, synthetic construct; identical to SEQ ID NO: 19456
  source 1..120: mol_type = other DNA

SEQ ID NO: 73556 - DNA, 120 bp, synthetic construct
  source 1..120: mol_type = other DNA
atcatccccatgctgtacgtggtgccgcggccgggcaaggcagccttcaaccaggagcacgtgtcctgccagcaggcctttgagcactttgcccagaagggtccgacctggaaggaacca

SEQ ID NO: 73557 - DNA, 120 bp, synthetic construct; identical to SEQ ID NO: 32058
  source 1..120: mol_type = other DNA

SEQ ID NO: 73558 - DNA, 120 bp, synthetic construct
  source 1..120: mol_type = other DNA
cggccgggcagagacgttcctcacctcccagacggggtcgcggtcgggtcgaggcgctcctcacatcccagacgatgggtggccgggcagagacgctcctcacttcctagatgggatggc

SEQ ID NO: 73559 - DNA, 120 bp, synthetic construct; identical to SEQ ID NO: 32059
  source 1..120: mol_type = other DNA

SEQ ID NO: 73560 - DNA, 120 bp, synthetic construct
  source 1..120: mol_type = other DNA
cgcccatcgtctgagatgtggggagcgcctctgccccgccgccccatctgggatgtgaggagcgcctctgcccggccgagaccccgtctgggaggtgaggagcgtttctgcccagccgcc

SEQ ID NO: 73561 - DNA, 120 bp, synthetic construct; identical to SEQ ID NO: 32060
  source 1..120: mol_type = other DNA

SEQ ID NO: 73562 - DNA, 120 bp, synthetic construct; identical to SEQ ID NO: 32061
  source 1..120: mol_type = other DNA

SEQ ID NO: 73563 - DNA, 120 bp, synthetic construct; identical to SEQ ID NO: 32062
  source 1..120: mol_type = other DNA

SEQ ID NO: 73564 - DNA, 120 bp, synthetic construct
  source 1..120: mol_type = other DNA
acgctcctcatttcctagacgggatggcggccgggaagaggcgctcctcacttcccagactgggcagaggggctcctcacatcccagacgatgagtggccaggcagagacgttcctcact

SEQ ID NO: 73565 - DNA, 120 bp, synthetic construct; identical to SEQ ID NO: 32063
  source 1..120: mol_type = other DNA

SEQ ID NO: 73566 - DNA, 120 bp, synthetic construct; identical to SEQ ID NO: 32064
  source 1..120: mol_type = other DNA

SEQ ID NO: 73567 - DNA, 120 bp, synthetic construct; identical to SEQ ID NO: 32065
  source 1..120: mol_type = other DNA

SEQ ID NO: 73568 - DNA, 120 bp, synthetic construct
  source 1..120: mol_type = other DNA
agccgcaatcaatccactgcactccagcctgagcaacagagcaagactccatctcaaaaaaaaaagggggggggggggatttatgttattctaaagatattcaaaagacattttaagaag

SEQ ID NO: 73569 - DNA, 120 bp, synthetic construct; identical to SEQ ID NO: 9173
  source 1..120: mol_type = other DNA

SEQ ID NO: 73570 - DNA, 120 bp, synthetic construct; identical to SEQ ID NO: 9174
  source 1..120: mol_type = other DNA

SEQ ID NO: 73571 - DNA, 120 bp, synthetic construct; identical to SEQ ID NO: 9175
  source 1..120: mol_type = other DNA

SEQ ID NO: 73572 - DNA, 120 bp, synthetic construct
  source 1..120: mol_type = other DNA
cacttgaggtctggagttcgagaccagcgaggcgggcggatcacctgaggttgagggttcgagaccagcctgaccaacatggagaaaccctgtttctactaaaaatacaaaaaattagct

SEQ ID NO: 73573 - DNA, 120 bp, synthetic construct
  source 1..120: mol_type = other DNA
gtcaaatttagctaaacacccattcaataactacaacaaatgaagtttgttttagctttaaggtagacatttgtggcctaggtgcggtggctcacgtctgtaatcccagcactttgggag

SEQ ID NO: 73574 - DNA, 120 bp, synthetic construct; identical to SEQ ID NO: 9176
  source 1..120: mol_type = other DNA

SEQ ID NO: 73575 - DNA, 120 bp, synthetic construct; identical to SEQ ID NO: 33788
  source 1..120: mol_type = other DNA

SEQ ID NO: 73576 - DNA, 120 bp, synthetic construct
  source 1..120: mol_type = other DNA
aaacccagctctatggcagaattatttgggaagctttataaatcagctgtcatggggagttttaaaaaattaacatcagatttctgggtacctcaaccctccccatctgcactttgcctc

SEQ ID NO: 73577 - DNA, 120 bp, synthetic construct
  source 1..120: mol_type = other DNA
cccagacggggtggctgccggacggaggggctcctcacttctcagacagggcggttgccaggcagagggtttcctcacttctcagacggggcggctgggcagagacgctcctcacctccc

SEQ ID NO: 73578 - DNA, 120 bp, synthetic construct
  source 1..120: mol_type = other DNA
ctttttttttttttttttttttttttttttgacaggatctggctctcttgcccaggctggagtgcaatggcataattttggctcaccacaacccctgcctcccaggttcaagcgattctc

SEQ ID NO: 73579 - DNA, 120 bp, synthetic construct
  source 1..120: mol_type = other DNA
gttcatgtcctttgtagggacatggatgaaattggaaaccatcattctcagtaaactatcgcaagaacaaaaaaccaaacaccgcacattctcactcataggtgggaattgaacagtgag

SEQ ID NO: 73580 - DNA, 120 bp, synthetic construct; identical to SEQ ID NO: 33784
  source 1..120: mol_type = other DNA

SEQ ID NO: 73581 - DNA, 120 bp, synthetic construct; identical to SEQ ID NO: 33785
  source 1..120: mol_type = other DNA

SEQ ID NO: 73582 - DNA, 120 bp, synthetic construct
  source 1..120: mol_type = other DNA
gagccactgcacctgacctactgtgagctcttgattggaagaattggcaaattttgccttcatattttggttttattgctctgactgattaccaggccccatgaatattaattcattccg

SEQ ID NO: 73583 - DNA, 120 bp, synthetic construct
  source 1..120: mol_type = other DNA
tccacttaggtccttttgccctctttactttaaaaataaattttttttttttttttgagacagagtctggctcagtcacccaggctagagtgcagtggctggatttccgctcactgcaag

SEQ ID NO: 73584 - DNA, 120 bp, synthetic construct; identical to SEQ ID NO: 33786
  source 1..120: mol_type = other DNA

SEQ ID NO: 73585 - DNA, 120 bp, synthetic construct; identical to SEQ ID NO: 33787
  source 1..120: mol_type = other DNA

SEQ ID NO: 73586 - DNA, 120 bp, synthetic construct
  source 1..120: mol_type = other DNA
tgtatggaatattggtttaccaaaatgtgacacagagccattaagtgagcacatggctgttggaaaaatgacaccgatagacttgctctacacagggttgctgtgagccttcaatttgta

SEQ ID NO: 73587 - DNA, 120 bp, synthetic construct
  source 1..120: mol_type = other DNA
ggtgtttggttttttgtccttaagatagtttgctgagaatgatggtttccagcatcatccatgttcctacaaaggacatgaactcattttttatggctgcatagtattccatggtgtgta

SEQ ID NO: 73588 - DNA, 120 bp, synthetic construct
  source 1..120: mol_type = other DNA
tcaattttggcttttgttgccattgcttttggtgttttagacatgaagtccttgcccaggcctgtgtcctgaatggtattgcctaggttttcttctagggtttttatggttttaggtcta

SEQ ID NO: 73589 - DNA, 120 bp, synthetic construct
  source 1..120: mol_type = other DNA
acaagaatttaccatataacattctttttatataaattcttcccctccccgccccccccccccttttcattcttctccaaagtgaacttcctttatgtctgtggactagactgcctaagg

SEQ ID NO: 73590 - DNA, 120 bp, synthetic construct
  source 1..120: mol_type = other DNA
aagtttcaaggttcaatttcccttactgaaaatttgtcaccttttgtggggaggctcaatttcccccactggaaatttctcaccttttctactactggaggttcgtgtgaagttcagtcc

SEQ ID NO: 73591 - DNA, 120 bp, synthetic construct
  source 1..120: mol_type = other DNA
tgtcagatcagacctggattctaattctagctctgtcacttagtggctactaggacttggagaggtcagaacctctctgagcctcgtatgttaatcttgaacatttaaatatcaacacct

SEQ ID NO: 73592 - DNA, 120 bp, synthetic construct
  source 1..120: mol_type = other DNA
acacacaaacacacacaccccagctgttggacagatgaattacagcctccggcttggggccagggctggtgagggattaaagctctggggctggccctttaaatggctgttagcccctcc

SEQ ID NO: 73593 - DNA, 120 bp, synthetic construct; identical to SEQ ID NO: 30114
  source 1..120: mol_type = other DNA

SEQ ID NO: 73594 - DNA, 120 bp, synthetic construct
  source 1..120: mol_type = other DNA
gggggcgcctctgcccggccgccccttctgggaagtgaggagcccctctgcccagccgccaccccgtctgggaggtgtaacccaacagctcattgagatcgggccatgatgacaatggca

SEQ ID NO: 73595 - DNA, 120 bp, synthetic construct; identical to SEQ ID NO: 19112
  source 1..120: mol_type = other DNA

SEQ ID NO: 73596 - DNA, 120 bp, synthetic construct
  source 1..120: mol_type = other DNA
gccacattttcttaatccagtctatcattgttggacatttgggttggttgaatcttattttcttaatgcacatttatgcaagattagctctacaacagatgaaaagaatggccacctgaa

SEQ ID NO: 73597 - DNA, 120 bp, synthetic construct
  source 1..120: mol_type = other DNA
ttctctgatggccagtgatggtgaacattttttcatgtgttttttggcagcataaatgtcttcttttgagaagtgtctgttcatgtcctttgcccactttttgatgggcttgtttgtttt

SEQ ID NO: 73598 - DNA, 120 bp, synthetic construct
  source 1..120: mol_type = other DNA
tgttgttggtgtataagaatgcttgtgatttttatacattgattttgtatcctgagactttgctgaagttgcttatcagcttaaggagattttgggctgagacgatggggttttctagct

SEQ ID NO: 73599 - DNA, 120 bp, synthetic construct
  source 1..120: mol_type = other DNA
aacaaagcctccaagaaatatgggactatgtgaaaagaccaaatctacatctgattggtgtacctgaaagtgacagggagaatggaaccaagttggaaaccactctgcaggatattatcc

SEQ ID NO: 73600 - DNA, 120 bp, synthetic construct
  source 1..120: mol_type = other DNA
tgcacattagttacatatgtatacatgtgccacgctggtgtgctgaacccattaactcatcatctagtattaggtatatctcctaaagctatccctaccccctaccccaactccacaaca

SEQ ID NO: 73601 - DNA, 120 bp, synthetic construct
  source 1..120: mol_type = other DNA
tagacatgaagtccttgcccatgcctatgtcctgaatggtaatgcctacgttttcttctagggtttttatggttttaggtctaatgtttaagtctttaaaccatcttgaattaatttttg

SEQ ID NO: 73602 - DNA, 120 bp, synthetic construct
  source 1..120: mol_type = other DNA
tactgtccaaggtaatttatagattcaatgccatccccatcaagctaccaatgactttattcacagaattggaaaaaactactttaaagttcatatggaaccaaaaaagagcctgcattg

SEQ ID NO: 73603 - DNA, 120 bp, synthetic construct
  source 1..120: mol_type = other DNA
aaacgcaaatcaaaaccacaatgagataccatctcacaccagttagaatggcaatcattaaaaagtcaggaaacaacaggtgctggagaggatgtggagaaataggaacacttttacact

SEQ ID NO: 73604 - DNA, 120 bp, synthetic construct
  source 1..120: mol_type = other DNA
taactcagtcaatagggatgtgtgtgaatgtgtgtgtctctgtgtgtatgcctgcatagaaatgtgcgtgtgtctacatatacacatatatatacatatacatacatatatacatatatg

SEQ ID NO: 73605 - DNA, 120 bp, synthetic construct
  source 1..120: mol_type = other DNA
acatatgtatgtatacatatatatgtatacatatacgtgtatatatacacatacgtatgtgtatgtatacatatacgtgtatatatacacatacgtatgtgtatgtatacatatgtgtat

SEQ ID NO: 73606 - DNA, 120 bp, synthetic construct
  source 1..120: mol_type = other DNA
ccccagatgtttcaaaataacatggtctatgttaaaatcatattatactttacagaatgatccatgttttgatctttgttggtttaaagtctgttttatcagagactaggattgcaaccc

SEQ ID NO: 73607 - DNA, 120 bp, synthetic construct
  source 1..120: mol_type = other DNA
catttctttttattcttttttctctaaacttcccttctcgcttcatttcatttatttcatcttccatcgctgataccctttcttccagttgatcacatcggctcctgaggctcctgcatt

SEQ ID NO: 73608 - DNA, 120 bp, synthetic construct
  source 1..120: mol_type = other DNA
tcaccaccgatcccacagaaatacaaactaccatcagagaatactacaaacaactctatgcaaataaactagaaaatctagaagaaatggatacattcctcgacacatacactctcccaa

SEQ ID NO: 73609 - DNA, 120 bp, synthetic construct
  source 1..120: mol_type = other DNA
tatctagaaaaccccattgtctcagcccaaaatctccttaagctgataagcaacttcagcaaagtctcaggatacaaaatcaatgtacaaaaatcacaagcgttcttatacaccaacaac

SEQ ID NO: 73610 - DNA, 120 bp, synthetic construct
  source 1..120: mol_type = other DNA
aacaaaagccaaaattgacaaatgggatctaattaaactaaacagcttctgcacagcaaaagaaactaccatcagagtgaacaggcaacctacaaaatgggagaaaattttcgcaaccta

SEQ ID NO: 73611 - DNA, 120 bp, synthetic construct; identical to SEQ ID NO: 28004
  source 1..120: mol_type = other DNA

SEQ ID NO: 73612 - DNA, 120 bp, synthetic construct; identical to SEQ ID NO: 28005
  source 1..120: mol_type = other DNA

SEQ ID NO: 73613 - DNA, 120 bp, synthetic construct; identical to SEQ ID NO: 28006
  source 1..120: mol_type = other DNA

SEQ ID NO: 73614 - DNA, 120 bp, synthetic construct; identical to SEQ ID NO: 28007
  source 1..120: mol_type = other DNA

SEQ ID NO: 73615 - DNA, 120 bp, synthetic construct; identical to SEQ ID NO: 31800
  source 1..120: mol_type = other DNA

SEQ ID NO: 73616 - DNA, 120 bp, synthetic construct; identical to SEQ ID NO: 31801
  source 1..120: mol_type = other DNA

SEQ ID NO: 73617 - DNA, 120 bp, synthetic construct; identical to SEQ ID NO: 31802
  source 1..120: mol_type = other DNA

SEQ ID NO: 73618 - DNA, 120 bp, synthetic construct; identical to SEQ ID NO: 31803
  source 1..120: mol_type = other DNA

SEQ ID NO: 73619 - DNA, 120 bp, synthetic construct; identical to SEQ ID NO: 25248
  source 1..120: mol_type = other DNA

SEQ ID NO: 73620 - DNA, 120 bp, synthetic construct; identical to SEQ ID NO: 25249
  source 1..120: mol_type = other DNA

SEQ ID NO: 73621 - DNA, 120 bp, synthetic construct; identical to SEQ ID NO: 25250
  source 1..120: mol_type = other DNA

SEQ ID NO: 73622 - DNA, 120 bp, synthetic construct; identical to SEQ ID NO: 25251
  source 1..120: mol_type = other DNA

SEQ ID NO: 73623 - DNA, 120 bp, synthetic construct
  source 1..120: mol_type = other DNA
tccagctacttgagaggctgaaggaggattgcttgaacccagaagttcaaggccagcctaggcaacatagtgggacccctatctctaaaataaataaataataaaacttcaattcccaat

SEQ ID NO: 73624 - DNA, 120 bp, synthetic construct; identical to SEQ ID NO: 17037
  source 1..120: mol_type = other DNA

SEQ ID NO: 73625 - DNA, 120 bp, synthetic construct
  source 1..120: mol_type = other DNA
ggattgacatctttatggtactgtgttctctttgccaaagttttgtggaagattaagtgagatgatatatggacagagcttaatctagtgcctagaacttggtaaataaacactcagtta

SEQ ID NO: 73626 - DNA, 120 bp, synthetic construct
  source 1..120: mol_type = other DNA
caacctcatagataataagaaaaaaagttattgaaattgcatttttactgatcagatcggcaaaactctaaaagtttgataaatctgggggaaattgtcattttcctaccttctggtggt

SEQ ID NO: 73627 - DNA, 120 bp, synthetic construct
  source 1..120: mol_type = other DNA
agccccttaagtaaatgggactacaggtgtgtgctgtgatgcccagctaatttttgtattttttgtcgagacagggtttcgccatgttgcctaggctggtcttgaactcctgagttcaag

SEQ ID NO: 73628 - DNA, 120 bp, synthetic construct; identical to SEQ ID NO: 17393
  source 1..120: mol_type = other DNA

SEQ ID NO: 73629 - DNA, 120 bp, synthetic construct; identical to SEQ ID NO: 17394
  source 1..120: mol_type = other DNA

SEQ ID NO: 73630 - DNA, 120 bp, synthetic construct; identical to SEQ ID NO: 17395
  source 1..120: mol_type = other DNA

SEQ ID NO: 73631 - DNA, 120 bp, synthetic construct; identical to SEQ ID NO: 26906
  source 1..120: mol_type = other DNA

SEQ ID NO: 73632 - DNA, 120 bp, synthetic construct; identical to SEQ ID NO: 26907
  source 1..120: mol_type = other DNA

SEQ ID NO: 73633 - DNA, 120 bp, synthetic construct; identical to SEQ ID NO: 26908
  source 1..120: mol_type = other DNA

SEQ ID NO: 73634 - DNA, 120 bp, synthetic construct
  source 1..120: mol_type = other DNA
attaataaaaccaataataatcttcaaaaattttcttagaagccaggcatgatagctcaagcctcccagcactctaggaagccaaggtaggaggaccacttgaggccaggagtttgagtt

SEQ ID NO: 73635 - DNA, 120 bp, synthetic construct; identical to SEQ ID NO: 23914
  source 1..120: mol_type = other DNA

SEQ ID NO: 73636 - DNA, 120 bp, synthetic construct; identical to SEQ ID NO: 23915
  source 1..120: mol_type = other DNA

SEQ ID NO: 73637 - DNA, 120 bp, synthetic construct
  source 1..120: mol_type = other DNA
gtgtacccagatcccacgcccacactccctaccgcggtgctgagggcccggggcgggcttcctggagaaggaagaagacccgcagagacacgaagaagaaggaggaagatgagacagaca

SEQ ID NO: 73638 - DNA, 120 bp, synthetic construct
  source 1..120: mol_type = other DNA
aatcgccacactgacttccacagtggttgaactagtttacagtctcaccaacagtgtaaaagtgttcctatttctccacatgctctccagcacctgttgtttcttgactttttaatgatt

SEQ ID NO: 73639 - DNA, 120 bp, synthetic construct
  source 1..120: mol_type = other DNA
cagtaccatgctgttttggttactgtagccttgtagtatagtttgaagtcaggtaccgtgatgcctccagctttgttcttttgggttaggattggcttggcaatgcaggctcttttttgg

SEQ ID NO: 73640 - DNA, 120 bp, synthetic construct; identical to SEQ ID NO: 25774
  source 1..120: mol_type = other DNA

SEQ ID NO: 73641 - DNA, 120 bp, synthetic construct; identical to SEQ ID NO: 25775
  source 1..120: mol_type = other DNA

SEQ ID NO: 73642 - DNA, 120 bp, synthetic construct
  source 1..120: mol_type = other DNA
ttttattttttttgagacagttcttactctgttgcccaggctggagtgcagtggtgcaatcatagctcactgcagcgttgaactcctgggcccaagccatcctcctgcttagcctcctga

SEQ ID NO: 73643 - DNA, 120 bp, synthetic construct
  source 1..120: mol_type = other DNA
gttaataaccacgttttcttttgtaatagggcacaattgaaaccggttactttctcaggactttgactgaaatggccttgtgaaatgttctagcaaagccaatctaggagagtctatatg

SEQ ID NO: 73644 - DNA, 120 bp, synthetic construct
  source 1..120: mol_type = other DNA
taaggctgattcacattgacttcctagaactgaatcaaaaggaaaaccccacctctccatacctaagtaacaaaaggatcagaggctactccctttgcaatccccttgccttttctgcat

SEQ ID NO: 73645 - DNA, 120 bp, synthetic construct
  source 1..120: mol_type = other DNA
aaccacacaagggaaataacaaaatgttaatactagctaatttctatagagttggcattttaagtcagaggggtattgatgaatagatgtagtttattaaatttttttctctatttccta

SEQ ID NO: 73646 - DNA, 120 bp, synthetic construct
  source 1..120: mol_type = other DNA
ttgcttaatacaagtggtcacagtaaaaagatcactacatagaattaatacagctattagcaattatcatttaaaacgctgatgcttggccgggcgcggtggctcacgcctgtaatccca

SEQ ID NO: 73647 - DNA, 120 bp, synthetic construct; identical to SEQ ID NO: 35216
  source 1..120: mol_type = other DNA

SEQ ID NO: 73648 - DNA, 120 bp, synthetic construct
  source 1..120: mol_type = other DNA
gctgcaacttccacctcccagtttcaagtgattcttttgcctcagcctcccgagtagctggaactacagacgcctgcaaccacacctggctaatttttaaaaatatttttagtagagaca

SEQ ID NO: 73649 - DNA, 120 bp, synthetic construct; identical to SEQ ID NO: 6725
  source 1..120: mol_type = other DNA

SEQ ID NO: 73650 - DNA, 120 bp, synthetic construct
  source 1..120: mol_type = other DNA
cagccagggtgacagggtgagaacctgtctcaaaaaaaaaaaaaaatattcaaaagctcttaggaaattcagagggagaacaggaggagtttgtgtcattggtaagttcctggccatctt

SEQ ID NO: 73651 - DNA, 120 bp, synthetic construct; identical to SEQ ID NO: 10152
  source 1..120: mol_type = other DNA

SEQ ID NO: 73652 - DNA, 120 bp, synthetic construct
  source 1..120: mol_type = other DNA
cttcactatattttctccctgcctgttaattgacttgctaatctcctgccaatatatgtccattttaaaaaacaaacaaccccatcaaaaagtgggcaaaggacatgaacagacacttct

SEQ ID NO: 73653 - DNA, 120 bp, synthetic construct
  source 1..120: mol_type = other DNA
attaaaaaaaaaaaaaaaaaaaaaaaggattgtggcctggcgcagtggttcacacttgtaatctcaacagtttgggagaccgaggtgagaagatcactggaggccaggagtttgagacca

SEQ ID NO: 73654 - DNA, 120 bp, synthetic construct; identical to SEQ ID NO: 10153
  source 1..120: mol_type = other DNA

SEQ ID NO: 73655 - DNA, 120 bp, synthetic construct
  source 1..120: mol_type = other DNA
tctaactggcgtgagatggtatctgattgtggttttgatttgcatttctctgatggccagtgatgatgagcattttttcatgtgttttttggctgcataaatgtcttcttttgagaagtg

SEQ ID NO: 73656 - DNA, 120 bp, synthetic construct; identical to SEQ ID NO: 18961
  source 1..120: mol_type = other DNA

SEQ ID NO: 73657 - DNA, 120 bp, synthetic construct; identical to SEQ ID NO: 18962
  source 1..120: mol_type = other DNA

SEQ ID NO: 73658 - DNA, 120 bp, synthetic construct; identical to SEQ ID NO: 18963
  source 1..120: mol_type = other DNA

SEQ ID NO: 73659 - DNA, 120 bp, synthetic construct
  source 1..120: mol_type = other DNA
atggcaatcattaaaaagtcaggaaacaacagatgctggagaggatgtggagaaataggaacacttttacactgttggtgggactgtaaactagttcaaccattgtggaagtcagtgtgg

SEQ ID NO: 73660 - DNA, 120 bp, synthetic construct; identical to SEQ ID NO: 18964
  source 1..120: mol_type = other DNA

SEQ ID NO: 73661 - DNA, 120 bp, synthetic construct; identical to SEQ ID NO: 18965
  source 1..120: mol_type = other DNA

SEQ ID NO: 73662 - DNA, 120 bp, synthetic construct
  source 1..120: mol_type = other DNA
catctcattgtggttttgattgaatttctctgatggccagtgatgatgagcattttttctgaagggatcaattcaacaagaagagctatcctaaatatatatgcacccaatacaggagca

SEQ ID NO: 73663 - DNA, 120 bp, synthetic construct
  source 1..120: mol_type = other DNA
gatcatctgaatccttctctcaactcgtcaaagtcattctctgtccagctttgttccgttgctggtgaggagctgcgttcctttggaggaggagaggtgctctgctttttagagtttcca

SEQ ID NO: 73664 - DNA, 120 bp, synthetic construct
  source 1..120: mol_type = other DNA
ctcccacagaataataatgggagactttaacaacccactgtcaacattagacagatcaacgagacagaaagttaacaaggatacccaggaattgaactcagctctgcaccaagcggacct

SEQ ID NO: 73665 - DNA, 120 bp, synthetic construct
  source 1..120: mol_type = other DNA
atcaatagaaaaagaaggaatcctccctaactcattttatgaggccagcatcaccctgataccaaagccaggcagagacacaaccaaaaaagagaattttagaccaatatccttgatgaa

SEQ ID NO: 73666 - DNA, 120 bp, synthetic construct
  source 1..120: mol_type = other DNA
atcaatattgtgaaaatggccgtactgcccaaggtaatttatagattcaatgccattcccatcaacctaccaatgactgtcttcacagaattggaaaaaactactttaaagttcatatgg

SEQ ID NO: 73667 - DNA, 120 bp, synthetic construct
  source 1..120: mol_type = other DNA
gttggtgggactgtaaactagttcaaccattgtggaggtcagtgtggcgattcctcagagatctagaactagaaataccatttgacccagcaatcccattactgggtatatacccaaagg

SEQ ID NO: 73668 - DNA, 120 bp, synthetic construct
  source 1..120: mol_type = other DNA
aagtcaaattgtccctgtttgcagatgacatgattgtatatctagaaaaccccatcgtctcagcccaaaatctccttaagctgataagcaatttcagcaaagtctcagtatacaaaatga

SEQ ID NO: 73669 - DNA, 120 bp, synthetic construct
  source 1..120: mol_type = other DNA
tgacaaaggcctaatatctagaatctacaaagaacttaaacaaatgtacaagaaaatatcaaacaactccatcaaaagtgggtgaaggatatgaacagacacttctcaaaagaagacatt

SEQ ID NO: 73670 - DNA, 120 bp, synthetic construct
  source 1..120: mol_type = other DNA
tataatctcatcactctggcaggcccaagcaggaggactgcttgaagcctgtggtttgagaccagcctgggcaacatagcaagaccccatttctacaaaaaaaattttttttttaatttt

SEQ ID NO: 73671 - DNA, 120 bp, synthetic construct
  source 1..120: mol_type = other DNA
ttttttcatgtgtcttttggctgcataagtgtcttcttttgagaagtgtctgttcatatctttcacccacttgttgatggggttgtttgtttttttcttgtaaatttgtttgagttcttt

SEQ ID NO: 73672 - DNA, 120 bp, synthetic construct
  source 1..120: mol_type = other DNA
tctcaaaaaagaaaaaaaaaaaaaagaattggctcttgtgccctcctcagtcttttgtgcctccttcttccctgggacagggaaagggccctagattcgaagaactatggaggaaaaatg

SEQ ID NO: 73673 - DNA, 120 bp, synthetic construct; identical to SEQ ID NO: 11821
  source 1..120: mol_type = other DNA

SEQ ID NO: 73674 - DNA, 120 bp, synthetic construct; identical to SEQ ID NO: 11822
  source 1..120: mol_type = other DNA

SEQ ID NO: 73675 - DNA, 120 bp, synthetic construct
  source 1..120: mol_type = other DNA
ttttggctgcataaatgtcgtcttttgagaagtgtctgttcatatcctttgcccactttttgatggggttgtttgtttttttcttgtaaatttatttgagttcattgtagattctggata

SEQ ID NO: 73676 - DNA, 120 bp, synthetic construct; identical to SEQ ID NO: 11823
  source 1..120: mol_type = other DNA

SEQ ID NO: 73677 - DNA, 120 bp, synthetic construct
  source 1..120: mol_type = other DNA
ctgcataaatgtcttcttttgagaagtgtctgttcatgtccttcgcccacttttattattattgtcattttgagatggagtcttgctctgtcgcccaggctggagtgcagaggtgagatc

SEQ ID NO: 73678 - DNA, 120 bp, synthetic construct; identical to SEQ ID NO: 11824
  source 1..120: mol_type = other DNA

SEQ ID NO: 73679 - DNA, 120 bp, synthetic construct; identical to SEQ ID NO: 11825
  source 1..120: mol_type = other DNA

SEQ ID NO: 73680 - DNA, 120 bp, synthetic construct; identical to SEQ ID NO: 11826
  source 1..120: mol_type = other DNA

SEQ ID NO: 73681 - DNA, 120 bp, synthetic construct; identical to SEQ ID NO: 11827
  source 1..120: mol_type = other DNA

SEQ ID NO: 73682 - DNA, 120 bp, synthetic construct; identical to SEQ ID NO: 11828
  source 1..120: mol_type = other DNA

SEQ ID NO: 73683 - DNA, 120 bp, synthetic construct
  source 1..120: mol_type = other DNA
ctgggtcaaatggtatttctagttctatatccctgaggaatcgccacactgacttccacaatggttgaactagtttacagtcccaccaacagtctaaaagtgttcctatttctccatatc

SEQ ID NO: 73684 - DNA, 120 bp, synthetic construct
  source 1..120: mol_type = other DNA
aaagtcattggtagcttgatggggatggcattgaatctgtaaattaccttgggcagtatggccattttcacaatattgattcttcctacccatgagcatggaatattcttccatttgttt

SEQ ID NO: 73685 - DNA, 120 bp, synthetic construct
  source 1..120: mol_type = other DNA
catctggtcctggaatctttttggttggtaagctattgattattgcctcaattccagctcctgttattggtctattcagagattcaacttcttcctggtttagtcttcggagagtgtatg

SEQ ID NO: 73686 - DNA, 120 bp, synthetic construct
  source 1..120: mol_type = other DNA
ttgtggtcaattttggaataggtgtggtgtggtggtgaaaaaaatgtatattctgttgatttggggtggagagttctgtagatgtctattaggtccgcttggtgcagagctgagttcaat

SEQ ID NO: 73687 - DNA, 120 bp, synthetic construct
  source 1..120: mol_type = other DNA
gagtgttttccaacttggttccattctccccatgactttcaggtacaccaatcagacgtacatttggtcttttcacatagtcccatatttcttggaggctttgctcgtttctttttattc

SEQ ID NO: 73688 - DNA, 120 bp, synthetic construct
  source 1..120: mol_type = other DNA
ggtggagcctgcagaggcaggcaggcctccttgagctgtggtgggctccacccagttcgagcttcccggctgctttgtttacctaagcaagcctgggcaatggcgggcgcccctccccca

SEQ ID NO: 73689 - DNA, 120 bp, synthetic construct; identical to SEQ ID NO: 11829
  source 1..120: mol_type = other DNA

SEQ ID NO: 73690 - DNA, 120 bp, synthetic construct; identical to SEQ ID NO: 11830
  source 1..120: mol_type = other DNA

SEQ ID NO: 73691 - DNA, 120 bp, synthetic construct; identical to SEQ ID NO: 27850
  source 1..120: mol_type = other DNA

SEQ ID NO: 73692 - DNA, 120 bp, synthetic construct; identical to SEQ ID NO: 27851
  source 1..120: mol_type = other DNA

SEQ ID NO: 73693 - DNA, 120 bp, synthetic construct; identical to SEQ ID NO: 27852
  source 1..120: mol_type = other DNA

SEQ ID NO: 73694 - DNA, 120 bp, synthetic construct; identical to SEQ ID NO: 23672
  source 1..120: mol_type = other DNA

SEQ ID NO: 73695 - DNA, 120 bp, synthetic construct; identical to SEQ ID NO: 23673
  source 1..120: mol_type = other DNA

SEQ ID NO: 73696 - DNA, 120 bp, synthetic construct; identical to SEQ ID NO: 4972
  source 1..120: mol_type = other DNA

SEQ ID NO: 73697 - DNA, 120 bp, synthetic construct; identical to SEQ ID NO: 6406
  source 1..120: mol_type = other DNA

SEQ ID NO: 73698 - DNA, 120 bp, synthetic construct
  source 1..120: mol_type = other DNA
ctgataaaggcatgtgtgaaacacctacagctaacttcatgtttaataatttaagactgaatgctctcaattcagatgactctgtctcatccattcgttcaggaaatgtcactgagcacg

SEQ ID NO: 73699 - DNA, 120 bp, synthetic construct
  source 1..120: mol_type = other DNA
cccagctgcagatacgaagcggagccgctgccgcgaccgaccgcagccgccgccgcccgaccgccgggaggatggagttcagcgggcagcggagctgtctcagtctttgccgccgcgccg

SEQ ID NO: 73700 - DNA, 120 bp, synthetic construct
  source 1..120: mol_type = other DNA
ttgagaacgggccaggatgacaatggcggctttgcggaatagaaaggcgggaaaggtggggaaaagattgagaaatcggatggttgccgtgtctgtgtagaaagaaatagacatgggaga

SEQ ID NO: 73701 - DNA, 120 bp, synthetic construct; identical to SEQ ID NO: 32929
  source 1..120: mol_type = other DNA

SEQ ID NO: 73702 - DNA, 120 bp, synthetic construct; identical to SEQ ID NO: 32930
  source 1..120: mol_type = other DNA

SEQ ID NO: 73703 - DNA, 120 bp, synthetic construct
  source 1..120: mol_type = other DNA
tgtgctgctataacagaataccttgaaactgggtaatttttttttttcttgagacagattcttgctctgttgcccagactgaagtgcagtggcactgtctcggcacactgcactctccac

SEQ ID NO: 73704 - DNA, 120 bp, synthetic construct; identical to SEQ ID NO: 32931
  source 1..120: mol_type = other DNA

SEQ ID NO: 73705 - DNA, 120 bp, synthetic construct
  source 1..120: mol_type = other DNA
ttgacctttacactcaattgtccactacagtctcataaaaaccttctgaggtaggcgttattgttattaaatacaggcccagagagattaggcgacgaatccaaaggtcgcacagacact

SEQ ID NO: 73706 - DNA, 120 bp, synthetic construct
  source 1..120: mol_type = other DNA
cctctccagcttcagccagcgcgctcagcgggcgcagctgcacgaagggcacaaagtccggcgccacggcgggctcccgctccccgggagtcacccacagccgattggcagccacgtcca

SEQ ID NO: 73707 - DNA, 120 bp, synthetic construct; identical to SEQ ID NO: 32052
  source 1..120: mol_type = other DNA

SEQ ID NO: 73708 - DNA, 120 bp, synthetic construct
  source 1..120: mol_type = other DNA
taagagctatctatgacaaacccacagccaatatcatactgaatgggcaacaactggaagcattccctttgaaaactggcacaagacagggatgccctctctcaccactcctattcaaca

SEQ ID NO: 73709 - DNA, 120 bp, synthetic construct
  source 1..120: mol_type = other DNA
aaggacttcatgtccaaaacaccaaaagcaatggcaacaaaagccacaattgacaaatgggatctaattcaactaaagagcttctgcacagcaaaagaaactaccatcagagtgaacagg

SEQ ID NO: 73710 - DNA, 120 bp, synthetic construct; identical to SEQ ID NO: 32053
  source 1..120: mol_type = other DNA

SEQ ID NO: 73711 - DNA, 120 bp, synthetic construct; identical to SEQ ID NO: 13027
  source 1..120: mol_type = other DNA

SEQ ID NO: 73712 - DNA, 120 bp, synthetic construct
  source 1..120: mol_type = other DNA
taggtaaacaaagcagcgggcagctccaactgggtggagcccaccacagctcaaggaggcctgcctgcctctgtaggctccacctctgggggcagggcacagacacacaaaaagacagca

SEQ ID NO: 73713 - DNA, 120 bp, synthetic construct
  source 1..120: mol_type = other DNA
attatccaggagaacttccccaatctagcaaggcaggccaacgttcagattcagaaaatacagagaacgccacaaagatactcctcgagaagagcaactccaagacacataattgtcaga

SEQ ID NO: 73714 - DNA, 120 bp, synthetic construct
  source 1..120: mol_type = other DNA
attgaactcagctctgcaccaagcagacctaatagacatctacagaactctccaacccaaatcaacagaatatacatttttttcagcaccacaccacacctattccaaaattgaccacat

SEQ ID NO: 73715 - DNA, 120 bp, synthetic construct
  source 1..120: mol_type = other DNA
aggggatatcaccactgatcccacagaaatacaaactaccatcagagaatactacaaacacctctacgcaaataaactagaaaatctagacgaaatggataaattcctccacacatacac

SEQ ID NO: 73716 - DNA, 120 bp, synthetic construct
  source 1..120: mol_type = other DNA
tctccttaagctgataagcaacttcagcaaagtctcaggatacaaaatcaatgtacaaaaatcacaagcattcttatacaccaacaacagacaaacagagagccaaatcatgagtcaact

SEQ ID NO: 73717 - DNA, 120 bp, synthetic construct
  source 1..120: mol_type = other DNA
acaacctactcatctgacaaagggctaatatccagaatctacaatgaactcaaacaaatttacaagaaaaaaacaaacaaccccatcaaaaagttggcgaaggacatgaacagacacttc

SEQ ID NO: 73718 - DNA, 120 bp, synthetic construct
  source 1..120: mol_type = other DNA
aaaaaagaaaaaaaaaaaaaacaaaatggtggccagcctggccaacatggtgaaatcccaaccttactaaaaatacaaaaattagccgggcatggtgacatgtgcctgtaatcccagcta

SEQ ID NO: 73719 - DNA, 120 bp, synthetic construct
  source 1..120: mol_type = other DNA
aacctcacttctgtgaaacacttggatatatctataatttatctgacaagtccctccctggacatcacaagctataagcactacagtgttccttaatgtgagaaaactcaatgattttta

SEQ ID NO: 73720 - DNA, 120 bp, synthetic construct; identical to SEQ ID NO: 27515
  source 1..120: mol_type = other DNA

SEQ ID NO: 73721 - DNA, 120 bp, synthetic construct
  source 1..120: mol_type = other DNA
aaatcccacaaaatcaaatctgtttctcttcacaaatgacaacacttcatgtcattaaacagtagctaacagtcgcactgcttatggttaagagtgacaaggagcaggtgccaagccagc

SEQ ID NO: 73722 - DNA, 120 bp, synthetic construct
  source 1..120: mol_type = other DNA
gctagttagctttcctcccatggagacaaagcccctgcccacccccaacctcacgaagagactgagtcactaaagagaccagaagagcacttttttgtccggcaaaacctaaacaatgat

SEQ ID NO: 73723 - DNA, 120 bp, synthetic construct; identical to SEQ ID NO: 31439
  source 1..120: mol_type = other DNA

SEQ ID NO: 73724 - DNA, 120 bp, synthetic construct; identical to SEQ ID NO: 73444
  source 1..120: mol_type = other DNA

SEQ ID NO: 73725 - DNA, 120 bp, synthetic construct
  source 1..120: mol_type = other DNA
aaactaccatcagagtgaacaggcaacctacaacatgggagaaaattttcgcagttttttttttttaaacaggtaatacagggatgaatggcacaagaactcatagaaaaagtgagatat

SEQ ID NO: 73726 - DNA, 120 bp, synthetic construct
  source 1..120: mol_type = other DNA
agctggttattttgctcgttagttgatgcagtttcttttttttttccttttttttttttaaacttttatttattttttattgatcattcttgggtgtttctcacagagggggatttggca

SEQ ID NO: 73727 - DNA, 120 bp, synthetic construct
  source 1..120: mol_type = other DNA
tggctgcggggcggtgacgctcctcacttctcagacggggcggcttccgggcggaggggctcctcacttctcagacggggcggtcgggcagagacgctcctctcctcccagacggggttg

SEQ ID NO: 73728 - DNA, 120 bp, synthetic construct; identical to SEQ ID NO: 22379
  source 1..120: mol_type = other DNA

SEQ ID NO: 73729 - DNA, 120 bp, synthetic construct; identical to SEQ ID NO: 22380
  source 1..120: mol_type = other DNA

SEQ ID NO: 73730 - DNA, 120 bp, synthetic construct; identical to SEQ ID NO: 22381
  source 1..120: mol_type = other DNA

SEQ ID NO: 73731 - DNA, 120 bp, synthetic construct; identical to SEQ ID NO: 22382
  source 1..120: mol_type = other DNA

SEQ ID NO: 73732 - DNA, 120 bp, synthetic construct
  source 1..120: mol_type = other DNA
ccctcccccctccccctaccccaccacagtccccagagtgtgatattccccctcctgtgtccatgtgatctcattgttcaattcccacctatgagtgagaatatgcggtgtttggttttt

SEQ ID NO: 73733 - DNA, 120 bp, synthetic construct
  source 1..120: mol_type = other DNA
aaaagaaactaccatcagagtaaacaggcaacctacaaaatgggagaaaattttcgcaacctactcatctgacaaagggctaatatccagaatctacaatgaactcaaacaaatttacaa

SEQ ID NO: 73734 - DNA, 120 bp, synthetic construct; identical to SEQ ID NO: 7253
  source 1..120: mol_type = other DNA

SEQ ID NO: 73735 - DNA, 120 bp, synthetic construct
  source 1..120: mol_type = other DNA
tactaaaaatgcaaaaattagccaagcgtggtggcttgcctgtaatctgttactggggaggctgaggcatgagaccacttgaacctgggaagtggaggttgcagtgagccgagatcacac

SEQ ID NO: 73736 - DNA, 120 bp, synthetic construct
  source 1..120: mol_type = other DNA
ccgggggcgctgaggtggaaggctcaaggccaggagttcgaagccagcttgggcaacgcagcgagaccttgtcatatatatatctatattatagatattatctatattatatatatagat

SEQ ID NO: 73737 - DNA, 120 bp, synthetic construct
  source 1..120: mol_type = other DNA
ctatagaaaaagagggaatcctccctaactcattttatgagaccagcatcatcctgataccaaagcctggcagagacacaacaaaaaaagagaattttagaccaatatccctgaagaaca

SEQ ID NO: 73738 - DNA, 120 bp, synthetic construct
  source 1..120: mol_type = other DNA
actttcttcacagaattggaaaagactactttaaagttcatatggaaccagaaaacagcccgcattgccaagacaatcctaaggcaaaagaacaaaactggaggcatcacgctacctgac

SEQ ID NO: 73739 - DNA, 120 bp, synthetic construct
  source 1..120: mol_type = other DNA
aagacagtgtggcgatttctcaaggatctagaactagaaataccatttgacccagccatgtcgttactgggtatatacccaaaggattataaatcatgctgctataaagacacatgcaca

SEQ ID NO: 73740 - DNA, 120 bp, synthetic construct; identical to SEQ ID NO: 11795
  source 1..120: mol_type = other DNA

SEQ ID NO: 73741 - DNA, 120 bp, synthetic construct
  source 1..120: mol_type = other DNA
gaaattaaatgaaaaaaaaaaaaagaaatattgtaaatactgtctggctgtggtggctcatgcctgtaatcccagcactttgggaggctgagataggtggatcaccggaggtcaggagtt

SEQ ID NO: 73742 - DNA, 120 bp, synthetic construct; identical to SEQ ID NO: 22229
  source 1..120: mol_type = other DNA

SEQ ID NO: 73743 - DNA, 120 bp, synthetic construct; identical to SEQ ID NO: 22230
  source 1..120: mol_type = other DNA

SEQ ID NO: 73744 - DNA, 120 bp, synthetic construct; identical to SEQ ID NO: 22231
  source 1..120: mol_type = other DNA

SEQ ID NO: 73745 - DNA, 120 bp, synthetic construct; identical to SEQ ID NO: 22232
  source 1..120: mol_type = other DNA

SEQ ID NO: 73746 - DNA, 120 bp, synthetic construct; identical to SEQ ID NO: 22233
  source 1..120: mol_type = other DNA

SEQ ID NO: 73747 - DNA, 120 bp, synthetic construct
  source 1..120: mol_type = other DNA
cacacacacagctccacacacacacacacacacacacagctccacacacagctccacacacacacacacagctcctcacagtcccgcacaatctggacagcggatcgttctccgcttcct

SEQ ID NO: 73748 - DNA, 120 bp, synthetic construct; identical to SEQ ID NO: 22234
  source 1..120: mol_type = other DNA

SEQ ID NO: 73749 - DNA, 120 bp, synthetic construct; identical to SEQ ID NO: 22235
  source 1..120: mol_type = other DNA

SEQ ID NO: 73750 - DNA, 120 bp, synthetic construct; identical to SEQ ID NO: 22236
  source 1..120: mol_type = other DNA

SEQ ID NO: 73751 - DNA, 120 bp, synthetic construct; identical to SEQ ID NO: 22237
  source 1..120: mol_type = other DNA

SEQ ID NO: 73752 - DNA, 120 bp, synthetic construct
  source 1..120: mol_type = other DNA
actggatgaagaaaatgtggcacatatacaccatggaatactacacagccataaaaaatgatgagttcatgtcctttgtagggacatggatgaagttggaaatcatcattctcagtaaac

SEQ ID NO: 73753 - DNA, 120 bp, synthetic construct
  source 1..120: mol_type = other DNA
ttatgactgcatttgactaaaaacagttaaactttcctataaaaactgaaagatttccttccttctttccttccttccttccttgctccctccctccctcctttccttccctcccctccc

SEQ ID NO: 73754 - DNA, 120 bp, synthetic construct; identical to SEQ ID NO: 11017
  source 1..120: mol_type = other DNA

SEQ ID NO: 73755 - DNA, 120 bp, synthetic construct
  source 1..120: mol_type = other DNA
aactagtttacagtcccaccaacagtgtaaaagtgttcctatttctccacatcctctccagcacctgttgttccctgactttttaatgatggccattctaactggtgtgagatggtatct

SEQ ID NO: 73756 - DNA, 120 bp, synthetic construct
  source 1..120: mol_type = other DNA
tctctggtttgtcatctttaaaacaggaataacaataagctgattaaaatgctcaagtaaaaaaacttgacagccgagcgtggtggttcatgcctgtaatcccaacactttgggaggccg

SEQ ID NO: 73757 - DNA, 120 bp, synthetic construct
  source 1..120: mol_type = other DNA
ggctcacatctgtaatctcagtaaattgaaaggccgaggtgggaggattgcttgaacttaggagtttgagaccagcctgggcaacgtggtgaggcctcaactctacaaaaagtaaaaaaa

SEQ ID NO: 73758 - DNA, 120 bp, synthetic construct; identical to SEQ ID NO: 9153
  source 1..120: mol_type = other DNA

SEQ ID NO: 73759 - DNA, 120 bp, synthetic construct; identical to SEQ ID NO: 9154
  source 1..120: mol_type = other DNA

SEQ ID NO: 73760 - DNA, 120 bp, synthetic construct; identical to SEQ ID NO: 9155
  source 1..120: mol_type = other DNA

SEQ ID NO: 73761 - DNA, 120 bp, synthetic construct
  source 1..120: mol_type = other DNA
gccagtaaaagaaaagggggtagcagtggacaatgtattttttcttttttttttctaataaaaaaacagagatggggtcttgctatgctgcccaggctgatctcgaagtcctgggctcaa

SEQ ID NO: 73762 - DNA, 120 bp, synthetic construct; identical to SEQ ID NO: 2669
  source 1..120: mol_type = other DNA

SEQ ID NO: 73763 - DNA, 120 bp, synthetic construct
  source 1..120: mol_type = other DNA
atgaataagacctactatttgacaatacaacagggtgactatagtcaacaatattttattggctgggcatggtggcttacacctgtaatcccagcagtctgggaggctaaggcaggtgga

SEQ ID NO: 73764 - DNA, 120 bp, synthetic construct; identical to SEQ ID NO: 28571
  source 1..120: mol_type = other DNA

SEQ ID NO: 73765 - DNA, 120 bp, synthetic construct; identical to SEQ ID NO: 28572
  source 1..120: mol_type = other DNA

SEQ ID NO: 73766 - DNA, 120 bp, synthetic construct; identical to SEQ ID NO: 28573
  source 1..120: mol_type = other DNA

SEQ ID NO: 73767 - DNA, 120 bp, synthetic construct; identical to SEQ ID NO: 28574
  source 1..120: mol_type = other DNA

SEQ ID NO: 73768 - DNA, 120 bp, synthetic construct
  source 1..120: mol_type = other DNA
tcattaaatattcaaccagtcatttttccttctgctaagcaaactctttaagttccagaaacaaaggctcaggcaagagccctggggaactgaggtagaaaaaacaaaggctcaggcaag

SEQ ID NO: 73769 - DNA, 120 bp, synthetic construct; identical to SEQ ID NO: 28575
  source 1..120: mol_type = other DNA

SEQ ID NO: 73770 - DNA, 120 bp, synthetic construct; identical to SEQ ID NO: 28576
  source 1..120: mol_type = other DNA

SEQ ID NO: 73771 - DNA, 120 bp, synthetic construct; identical to SEQ ID NO: 14674
  source 1..120: mol_type = other DNA

SEQ ID NO: 73772 - DNA, 120 bp, synthetic construct; identical to SEQ ID NO: 14675
  source 1..120: mol_type = other DNA

SEQ ID NO: 73773 - DNA, 120 bp, synthetic construct; identical to SEQ ID NO: 14676
  source 1..120: mol_type = other DNA

SEQ ID NO: 73774 - DNA, 120 bp, synthetic construct; identical to SEQ ID NO: 9699
  source 1..120: mol_type = other DNA

SEQ ID NO: 73775 - DNA, 120 bp, synthetic construct
  source 1..120: mol_type = other DNA
cgtgccgttgcactccagcctgggcaacagagcaagagtctgtcttaggaaaaaaagaaagaaaaaaaaagtcatcgaaatgacagaaaccgtaattacttttgcaccaaactgtatttc

SEQ ID NO: 73776 - DNA, 120 bp, synthetic construct; identical to SEQ ID NO: 9700
  source 1..120: mol_type = other DNA

SEQ ID NO: 73777 - DNA, 120 bp, synthetic construct
  source 1..120: mol_type = other DNA
agacatttaacaaataataataaataactaggaagttctaactgagataaaggaaagatgatgctctggagagtgtaacgggggttctaatgtagaccggggggtcaggaaggcgtggtg

SEQ ID NO: 73778 - DNA, 120 bp, synthetic construct; identical to SEQ ID NO: 9687
  source 1..120: mol_type = other DNA

SEQ ID NO: 73779 - DNA, 120 bp, synthetic construct
  source 1..120: mol_type = other DNA
atcctggctaacacggtgaaacccgtctctactaaaaatacaaaaaatacaaaaaaaaaaaaaaaattagcagggcatagtggcgggcgcctatactcccagttgctcgggaggctgagg

SEQ ID NO: 73780 - DNA, 120 bp, synthetic construct
  source 1..120: mol_type = other DNA
tgaggaatcgccacactgacttccacaatggttgaactagtttacagtcccaccaacagtgtaaaagtgttcctatttctccacatcttctccagcatctgttgtttcctgactttttaa

SEQ ID NO: 73781 - DNA, 120 bp, synthetic construct; identical to SEQ ID NO: 9688
  source 1..120: mol_type = other DNA

SEQ ID NO: 73782 - DNA, 120 bp, synthetic construct
  source 1..120: mol_type = other DNA
aattatcctcctcccttagcctcccaagtagctgtgactacagctaccgtgtctggctaattgtgaaattttttggtaaagacagggtcttgctatgttgcccaggctgatcttgaacct

SEQ ID NO: 73783 - DNA, 120 bp, synthetic construct
  source 1..120: mol_type = other DNA
ctgatatattcactccttcctttaatgatttcaaatgaagtgctttttttaaaaggcaggctcaccaatgaggtgcgggaagtccccgcagagagagagcccacgtagtaagtaaggaac

SEQ ID NO: 73784 - DNA, 120 bp, synthetic construct; identical to SEQ ID NO: 9691
  source 1..120: mol_type = other DNA

SEQ ID NO: 73785 - DNA, 120 bp, synthetic construct; identical to SEQ ID NO: 9692
  source 1..120: mol_type = other DNA

SEQ ID NO: 73786 - DNA, 120 bp, synthetic construct; identical to SEQ ID NO: 9693
  source 1..120: mol_type = other DNA

SEQ ID NO: 73787 - DNA, 120 bp, synthetic construct; identical to SEQ ID NO: 9694
  source 1..120: mol_type = other DNA

SEQ ID NO: 73788 - DNA, 120 bp, synthetic construct; identical to SEQ ID NO: 9695
  source 1..120: mol_type = other DNA

SEQ ID NO: 73789 - DNA, 120 bp, synthetic construct; identical to SEQ ID NO: 9696
  source 1..120: mol_type = other DNA

SEQ ID NO: 73790 - DNA, 120 bp, synthetic construct; identical to SEQ ID NO: 9697
  source 1..120: mol_type = other DNA

SEQ ID NO: 73791 - DNA, 120 bp, synthetic construct; identical to SEQ ID NO: 3001
  source 1..120: mol_type = other DNA

SEQ ID NO: 73792 - DNA, 120 bp, synthetic construct
  source 1..120: mol_type = other DNA
gccattgcactccagcctgggcaacagggcgagactccatctcagaaaaaaaaagttccagcaagtcagctgtgaatattttttctatggcaataataataaacacaagatgcaggtata

SEQ ID NO: 73793 - DNA, 120 bp, synthetic construct; identical to SEQ ID NO: 32700
  source 1..120: mol_type = other DNA

SEQ ID NO: 73794 - DNA, 120 bp, synthetic construct; identical to SEQ ID NO: 32701
  source 1..120: mol_type = other DNA

SEQ ID NO: 73795 - DNA, 120 bp, synthetic construct; identical to SEQ ID NO: 32702
  source 1..120: mol_type = other DNA

SEQ ID NO: 73796 - DNA, 120 bp, synthetic construct; identical to SEQ ID NO: 32703
  source 1..120: mol_type = other DNA

SEQ ID NO: 73797 - DNA, 120 bp, synthetic construct; identical to SEQ ID NO: 32704
  source 1..120: mol_type = other DNA

SEQ ID NO: 73798 - DNA, 120 bp, synthetic construct; identical to SEQ ID NO: 32705
  source 1..120: mol_type = other DNA

SEQ ID NO: 73799 - DNA, 120 bp, synthetic construct; identical to SEQ ID NO: 32706
  source 1..120: mol_type = other DNA

SEQ ID NO: 73800 - DNA, 120 bp, synthetic construct; identical to SEQ ID NO: 32707
  source 1..120: mol_type = other DNA

SEQ ID NO: 73801 - DNA, 120 bp, synthetic construct
  source 1..120: mol_type = other DNA
actctaagtgcttttaaaggggttattagattggcactcttaaaatagccaatcactggaaaatgctcccctcaaacaaaggtcaaaattaatttaacaatactgttgtgcctcacagac

SEQ ID NO: 73802 - DNA, 120 bp, synthetic construct; identical to SEQ ID NO: 32710
  source 1..120: mol_type = other DNA

SEQ ID NO: 73803 - DNA, 120 bp, synthetic construct; identical to SEQ ID NO: 32711
  source 1..120: mol_type = other DNA

SEQ ID NO: 73804 - DNA, 120 bp, synthetic construct
  source 1..120: mol_type = other DNA
cctcaggtcattacaatggatgtttcctataactgaaaaatatggttaaaaagtacaaactacatttggtgtgcaaactgtttagttcttaattccaaactaaattgtacattatatagt

SEQ ID NO: 73805 - DNA, 120 bp, synthetic construct
  source 1..120: mol_type = other DNA
attgatccaatgccaactccaagactggaacgtcgcaatgatagttccaaggcggaaatttgacgtaattcttttcgacacagttttacaggtgtgacaccatgaagtcgtcccacattt

SEQ ID NO: 73806 - DNA, 120 bp, synthetic construct
  source 1..120: mol_type = other DNA
atgccaacttcaatatattgatgcatgcttagtacactttcagtcctgcaaagacaaagttttttgttgttttttttttgagacggagtctcgctctgtcgcccaggttggagtgcagtg

SEQ ID NO: 73807 - DNA, 120 bp, synthetic construct
  source 1..120: mol_type = other DNA
ggtgggaggattgctcaagcacaggagtttgaggctacagtgagccatgaatgtaccactaccggtagctccagcctgggcaacacagcaagaccccaactctaaaaaaaaaatcctgct

SEQ ID NO: 73808 - DNA, 120 bp, synthetic construct; identical to SEQ ID NO: 32691
  source 1..120: mol_type = other DNA

SEQ ID NO: 73809 - DNA, 120 bp, synthetic construct; identical to SEQ ID NO: 32692
  source 1..120: mol_type = other DNA

SEQ ID NO: 73810 - DNA, 120 bp, synthetic construct
  source 1..120: mol_type = other DNA
agtgtcgactggattgaaggatgcaaagtattgatcctgggtgtgtctgtgagggtgttgccaaaggaggttaacatttgagtcagtgggctggggaaggcagatccaacctcaatctgg

SEQ ID NO: 73811 - DNA, 120 bp, synthetic construct; identical to SEQ ID NO: 32694
  source 1..120: mol_type = other DNA

SEQ ID NO: 73812 - DNA, 120 bp, synthetic construct
  source 1..120: mol_type = other DNA
gggtgcaagagcaaaactctgtctcaaaaaaaaagaattaatttgttggaattctgaattgatgacattttcttttttttttttttttttttttttttttgaggagtctcgctctgtcat

SEQ ID NO: 73813 - DNA, 120 bp, synthetic construct
  source 1..120: mol_type = other DNA
gaaaccccatctctactaaaaatacaaaaatgagctgggcatggcagcacacgcctgtgatcctagctactcaggaggctgaggcaggagaattgcttgaacccggggggcggaggttgc

SEQ ID NO: 73814 - DNA, 120 bp, synthetic construct
  source 1..120: mol_type = other DNA
cactccttcccctaacatcccaaaggaaaataatatgaatatttctttctttttttttttgacagggtctcactcactttgtcatccaggctggagtgcagtggtgggatctcagctcac

SEQ ID NO: 73815 - DNA, 120 bp, synthetic construct; identical to SEQ ID NO: 32695
  source 1..120: mol_type = other DNA

SEQ ID NO: 73816 - DNA, 120 bp, synthetic construct; identical to SEQ ID NO: 32696
  source 1..120: mol_type = other DNA

SEQ ID NO: 73817 - DNA, 120 bp, synthetic construct; identical to SEQ ID NO: 32697
  source 1..120: mol_type = other DNA

SEQ ID NO: 73818 - DNA, 120 bp, synthetic construct
  source 1..120: mol_type = other DNA
catgctttcatttctcatggagaaatacatacagagatagatctatctatctatctatctatccatccatccatccatccattaatccacccacccaccctcccacccatccctaggagt

SEQ ID NO: 73819 - DNA, 120 bp, synthetic construct; identical to SEQ ID NO: 32698
  source 1..120: mol_type = other DNA

SEQ ID NO: 73820 - DNA, 120 bp, synthetic construct; identical to SEQ ID NO: 32699
  source 1..120: mol_type = other DNA

SEQ ID NO: 73821 - DNA, 120 bp, synthetic construct
  source 1..120: mol_type = other DNA
tcttgctattgtgaatagtgccacaataaacatatgtgtgcatgtgtctttatagcagcatgatttataatcctttgggtatatacccagtaatgggatggctgggtcaaatggtatttc

SEQ ID NO: 73822 - DNA, 120 bp, synthetic construct
  source 1..120: mol_type = other DNA
tcaaagatcagagagttgtagatgtgtggtattatttctgagggctctgttctgttccactggtctatatctctgttttggtaccagtaccatgctgttttggttactgtagccttgtag

SEQ ID NO: 73823 - DNA, 120 bp, synthetic construct
  source 1..120: mol_type = other DNA
tgtgctgctggattcggtttgccagtattttattgatgatttttgcatcaatgttcatcagggatattggtctaaaattctctttttttgttgtgtctctgccaggctttgttatcagga

SEQ ID NO: 73824 - DNA, 120 bp, synthetic construct; identical to SEQ ID NO: 26607
  source 1..120: mol_type = other DNA

SEQ ID NO: 73825 - DNA, 120 bp, synthetic construct
  source 1..120: mol_type = other DNA
ttcattgctataaatacttgagactgggtaatttataaagaaaagaggtttaattggcttgcaggtctgcaggctttgcaggaagcatgatgctggcatctgctcagcttctgggaaggt

SEQ ID NO: 73826 - DNA, 120 bp, synthetic construct
  source 1..120: mol_type = other DNA
aataatgccacacatttacaactatctgatctttgacaaacctgacaaaaacaagaaatggggaaaggattccctatttaacaaatggtgctgggaaaactggctagccatatgtagaaa

SEQ ID NO: 73827 - DNA, 120 bp, synthetic construct; identical to SEQ ID NO: 22447
  source 1..120: mol_type = other DNA

SEQ ID NO: 73828 - DNA, 120 bp, synthetic construct
  source 1..120: mol_type = other DNA
ttttatttttggaatattaattactagtatataaaaatactggctgggcatggtggctcacacgtgtaatcccagcactttgagaggcccaggtggacggatcacctgaagtcaggagtt

SEQ ID NO: 73829 - DNA, 120 bp, synthetic construct
  source 1..120: mol_type = other DNA
tcagcctcccaaagtgctgggattacaggcatgagccactgtgcctggcccttttttcacctctatggacatagtataaacacaagcttatgtcttgctatttccactttacctaatata

SEQ ID NO: 73830 - DNA, 120 bp, synthetic construct; identical to SEQ ID NO: 34091
  source 1..120: mol_type = other DNA

SEQ ID NO: 73831 - DNA, 120 bp, synthetic construct
  source 1..120: mol_type = other DNA
ttcaaggttcatccatgttgcatcatatatcagtacttcattcctttttttttttttttttttttttgagagagagagagtctcactctgttgcccaggctggagtgcagtggcatgatc

SEQ ID NO: 73832 - DNA, 120 bp, synthetic construct; identical to SEQ ID NO: 6645
  source 1..120: mol_type = other DNA

SEQ ID NO: 73833 - DNA, 120 bp, synthetic construct
  source 1..120: mol_type = other DNA
ttctgcagtgtttgtgtccctgggtacttgagattagggagtgatgatgactcttaacgagcatgctgccttcaagcatctgtttaacaaagcacatcttgcaccgcccttaatccattt

SEQ ID NO: 73834 - DNA, 120 bp, synthetic construct
  source 1..120: mol_type = other DNA
tctcttcccagacggggcggctgccgggcagaggcgctcctcactactcagaccgggcagccgggcagaggcactcctcagttcccagacggggcggccgggcagagatgctcctcacat

SEQ ID NO: 73835 - DNA, 120 bp, synthetic construct
  source 1..120: mol_type = other DNA
ggccagtgatgatgagcattttctcatgtgtcttgtggctgcataaatgtcttcttttgagaaatgtctgttcatatcctttgaccacttgttgatggggttgtttgtttttttcttgta

SEQ ID NO: 73836 - DNA, 120 bp, synthetic construct
  source 1..120: mol_type = other DNA
agaggtccttcacatcccttgtaagttggattcctaggtattttattctctttgaagccattgtgaatgggagttcactcatgatttggctctctgtttgtctgttattggtgtataaga

SEQ ID NO: 73837 - DNA, 120 bp, synthetic construct
  source 1..120: mol_type = other DNA
gtctgtgaggtgaggagcgtctctgcccagccaccccgtctgagaagtgaggagcccctccacccggcagccgccccatctgagaagtgaggagcccctccgcccagcagccgccccgtc

SEQ ID NO: 73838 - DNA, 120 bp, synthetic construct; identical to SEQ ID NO: 34093
  source 1..120: mol_type = other DNA

SEQ ID NO: 73839 - DNA, 120 bp, synthetic construct; identical to SEQ ID NO: 34094
  source 1..120: mol_type = other DNA

SEQ ID NO: 73840 - DNA, 120 bp, synthetic construct
  source 1..120: mol_type = other DNA
agagcgagcctgttgctttaaggaaaacagctgacagtgtttgttacctaagacaaaatgtgagctttcaagcaaaatttggatttggaaaacttgtatctgccactgtgaacttgacag

SEQ ID NO: 73841 - DNA, 120 bp, synthetic construct
  source 1..120: mol_type = other DNA
ctccccccttcccccaccccacaacagtccccagagtgtgatattccccttcctgtgtccatgtgatctcattgttcaattcccacctatgagtgagaatatgcggtgtttggttttttt

SEQ ID NO: 73842 - DNA, 120 bp, synthetic construct; identical to SEQ ID NO: 27738
  source 1..120: mol_type = other DNA

SEQ ID NO: 73843 - DNA, 120 bp, synthetic construct; identical to SEQ ID NO: 27739
  source 1..120: mol_type = other DNA

SEQ ID NO: 73844 - DNA, 120 bp, synthetic construct
  source 1..120: mol_type = other DNA
actctttccttagatataatagtgatactgagagcatcaaaaaaaaaaaaaaaaaaaaagatcgagcgtgagcgacgcagaagacgggtgatttctgcatttccatctgaggtaccaggt

SEQ ID NO: 73845 - DNA, 120 bp, synthetic construct
  source 1..120: mol_type = other DNA
gacagctttgaagagagcagtggttctcatagcacgcagctggagatctgagaacgggcagactgcctcctcaagtgggtccctgacccctgacccccgagcagcctaactgggaggcac

SEQ ID NO: 73846 - DNA, 120 bp, synthetic construct
  source 1..120: mol_type = other DNA
ggtcgggttaccctcaaagggaagcccatcagactaacagcggatctctcggcagaaaccctacaagccagaagagagtgggggccaatattcaacattcttaaagaaaataattttcaa

SEQ ID NO: 73847 - DNA, 120 bp, synthetic construct
  source 1..120: mol_type = other DNA
aattataacaaactatctctcagaccacagtgcaatcaaactagaactcagaattaataatctcactcaaagccgctcaactacatggaaactgaacaacctgctcctgaatgactactg

SEQ ID NO: 73848 - DNA, 120 bp, synthetic construct
  source 1..120: mol_type = other DNA
ctgggatgcaaggctggttcaatatacgcaaatcaataaatgtaatccagcatataaacagagtcaaagacaaaaaccacatgattatctcaatagatgcagaaaaagcctttgacaaaa

SEQ ID NO: 73849 - DNA, 120 bp, synthetic construct
  source 1..120: mol_type = other DNA
gtcaaagatcagatagttgtaggtatgcggcgttatttctgagggctctgttctgttccattgatctatatctctgttttggtaccagtaccatgctgttttggttactgtagccttgta

SEQ ID NO: 73850 - DNA, 120 bp, synthetic construct
  source 1..120: mol_type = other DNA
cataggtgggaattgaacaatgagatcacatggacacaggaaggggaatatcacactccggggactgtggtggggtggggggaggggggagggatagcattgggagatatacctaatgct

SEQ ID NO: 73851 - DNA, 120 bp, synthetic construct; identical to SEQ ID NO: 27741
  source 1..120: mol_type = other DNA

SEQ ID NO: 73852 - DNA, 120 bp, synthetic construct
  source 1..120: mol_type = other DNA
tacgtgcattaaaatttgataatcagggtcgcttccaagatggctgaatagaaatagctctggtctacagctcccagcgagactgacacagaacacaggtgatttctgcatttccagctg

SEQ ID NO: 73853 - DNA, 120 bp, synthetic construct
  source 1..120: mol_type = other DNA
ggcacagacaaacaaaaagacaaacaaaaagacaaacaaaaagggcacagacaaacaaaaacaaaccactgcagtaacctctgcagacttaaatgtccctgtctgacagctttgaagaga

SEQ ID NO: 73854 - DNA, 120 bp, synthetic construct
  source 1..120: mol_type = other DNA
aagaaatatgggactatgtgaaaagaccaaacctacgtctgattggtgtacctaaaagtgatggggagaatggaaccaagttggaaaacactctgcaggatattatccaggagaacttcc

SEQ ID NO: 73855 - DNA, 120 bp, synthetic construct
  source 1..120: mol_type = other DNA
aaagggatctattcaacaagaagagctaactatcctaaatatatatgcaaccaatacaggagcacccagatgcataaagcaagtcctgagtgacctataaagagacttagactgccacac

SEQ ID NO: 73856 - DNA, 120 bp, synthetic construct
  source 1..120: mol_type = other DNA
tcaccactgatcccacagaaatacaaactaccatcagagaatactacaaacaactctatgcaaataaactagaaaatctagaagaaatggataaattcctcgacacatacactctcccaa

SEQ ID NO: 73857 - DNA, 120 bp, synthetic construct
  source 1..120: mol_type = other DNA
agggcactcaggcaggagaaggaaataaagggtactcaattaggaaaagaggaagtcaaattgtccctgtttgcagatgacatgattgtatatctagaaaaccccattgtctcagcccaa

SEQ ID NO: 73858 - DNA, 120 bp, synthetic construct
  source 1..120: mol_type = other DNA
tcagagtgaacaggcaacctacaacatgggagaaaattttcgcaacctactcatctgacagagggctaatatccagaatctacaatgaactcaaacaaatttacaagaaaaaaacaaaca

SEQ ID NO: 73859 - DNA, 120 bp, synthetic construct
  source 1..120: mol_type = other DNA
ggcccaaccctgccaaatgctattacgtgacaaagttttattaatttattgtcatttaagtctgtggtattattattttattatttttgagacagagtctcactctgtcacccaggcagg

SEQ ID NO: 73860 - DNA, 120 bp, synthetic construct; identical to SEQ ID NO: 27742
  source 1..120: mol_type = other DNA

SEQ ID NO: 73861 - DNA, 120 bp, synthetic construct
  source 1..120: mol_type = other DNA
ctcatcatcactggccatcagagaaatgcaaatcaaaaccactatgagatatcatctcacaccagttagaatggcaatcattaaaaagtcaggaaacaacaggtgctggagaggatgcgg

SEQ ID NO: 73862 - DNA, 120 bp, synthetic construct; identical to SEQ ID NO: 27743
  source 1..120: mol_type = other DNA

SEQ ID NO: 73863 - DNA, 120 bp, synthetic construct
  source 1..120: mol_type = other DNA
ctttgaaaaaagtttagaagaatgtataactagaataaccaatacagaggagtgcttaaaggagctgatggagctgaaaaccaaggctcgagaactacgtgaagaatgcagaagcctcag

SEQ ID NO: 73864 - DNA, 120 bp, synthetic construct
  source 1..120: mol_type = other DNA
aacaaaaaaaggcaggggttgcaatcctagtctctgataaaacagactttaaaccaacaaagatcaaaagagacaaagaaggccattacataatggtaaagggagcaattcaacaagaag

SEQ ID NO: 73865 - DNA, 120 bp, synthetic construct
  source 1..120: mol_type = other DNA
tgcaataaaaaatgataaaggggatatcaccaccgatcccacagaaatacagactaccatcagagaatactacaaacacctctacacaaataaactagaaaatctagaagaaatggataa

SEQ ID NO: 73866 - DNA, 120 bp, synthetic construct
  source 1..120: mol_type = other DNA
aagcattcttatacaccaacaacaaacagagagccaaatcatgagtggactcccattcacaattgcttcaaagagaataaaatacctaggaatccaacttacaagggatgtgaaggacct

SEQ ID NO: 73867 - DNA, 120 bp, synthetic construct
  source 1..120: mol_type = other DNA
aatttctgcaacctactcatctgacagagggctaatatccagaatctacaatgaactcaaacaaatttacaagaaaaaaacaaacaaccccatcaaaaagtgggcaaaggatatgaacag

SEQ ID NO: 73868 - DNA, 120 bp, synthetic construct; identical to SEQ ID NO: 15644
  source 1..120: mol_type = other DNA

SEQ ID NO: 73869 - DNA, 120 bp, synthetic construct; identical to SEQ ID NO: 24277
  source 1..120: mol_type = other DNA

SEQ ID NO: 73870 - DNA, 120 bp, synthetic construct
  source 1..120: mol_type = other DNA
gtctgagaagtgaggagcccctccgcccggcagccaccccatctgggaagtgaggagcatctccgcccggcagccaccccgtccgggagggaggtgggggtcagcccccgccaggccagc

SEQ ID NO: 73871 - DNA, 120 bp, synthetic construct
  source 1..120: mol_type = other DNA
cctcccagagtggcctcagcttgctcagcccttcattctgtgagagaaggggcagataatgggtaggtaagtgtggggaaaagcaagagagatcagattgttactgtgtctgtgtagaaa

SEQ ID NO: 73872 - DNA, 120 bp, synthetic construct; identical to SEQ ID NO: 24278
  source 1..120: mol_type = other DNA

SEQ ID NO: 73873 - DNA, 120 bp, synthetic construct; identical to SEQ ID NO: 8997
  source 1..120: mol_type = other DNA

SEQ ID NO: 73874 - DNA, 120 bp, synthetic construct; identical to SEQ ID NO: 8998
  source 1..120: mol_type = other DNA

SEQ ID NO: 73875 - DNA, 120 bp, synthetic construct; identical to SEQ ID NO: 8999
  source 1..120: mol_type = other DNA

SEQ ID NO: 73876 - DNA, 120 bp, synthetic construct; identical to SEQ ID NO: 9000
  source 1..120: mol_type = other DNA

SEQ ID NO: 73877 - DNA, 120 bp, synthetic construct; identical to SEQ ID NO: 9001
  source 1..120: mol_type = other DNA

SEQ ID NO: 73878 - DNA, 120 bp, synthetic construct
  source 1..120: mol_type = other DNA
acagaggcaggcaggcaggcttccttcagctgtggtgggctccacccagttcgagcttgatgggacgtattcaaaataataagagctatctatgacaaaaccacagccaatatcatactg

SEQ ID NO: 73879 - DNA, 120 bp, synthetic construct
  source 1..120: mol_type = other DNA
cagaaataatgccgcatatctacaactatctgatctttgacaaacctgagaaaaacaagcaatggggaaaggattccctatttaataaatggtgctgggaaaactggttagccatatgta

SEQ ID NO: 73880 - DNA, 120 bp, synthetic construct
  source 1..120: mol_type = other DNA
aaccaacccagatgtccaacaatgatagactggattaagaaaatgtggcacatatacaccatggaacactatgcagccataaaaaatgatgagttcatgtcctttgcagggacatggatg

SEQ ID NO: 73881 - DNA, 120 bp, synthetic construct
  source 1..120: mol_type = other DNA
ataaaaaccctagaagaaaacctaggcaataccattcaggactcaggcatgggcaaggacttcatgtttaaaacaccaaaagcaatggcaacaaaagccaaaattgacaaatgggatcta

SEQ ID NO: 73882 - DNA, 120 bp, synthetic construct
  source 1..120: mol_type = other DNA
caaggcaggagcatcactggaggccaggagttcaagaccagcctaagcaacacagtgagactcccatctctttatagaaataaataaaaataaagataaacttagtgctgaagaggtaaa

SEQ ID NO: 73883 - DNA, 120 bp, synthetic construct; identical to SEQ ID NO: 20003
  source 1..120: mol_type = other DNA

SEQ ID NO: 73884 - DNA, 120 bp, synthetic construct
  source 1..120: mol_type = other DNA
tgggtgagtccttccccaaaccttagggtgtcatctccccacataagaggattttcctgaaatgggagggaagtcctgtcggggagtctctcatacactaggaagaggggaccctcggat

SEQ ID NO: 73885 - DNA, 120 bp, synthetic construct
  source 1..120: mol_type = other DNA
ccagtgggtggtcggcacccagcaaccccctggtgatcgtggtcacaggtcagagggctcctgtctgggattctccttgtcccacctcctgaatcccagagcttctggtaggcatgtcct

SEQ ID NO: 73886 - DNA, 120 bp, synthetic construct; identical to SEQ ID NO: 20004
  source 1..120: mol_type = other DNA

SEQ ID NO: 73887 - DNA, 120 bp, synthetic construct; identical to SEQ ID NO: 20005
  source 1..120: mol_type = other DNA

SEQ ID NO: 73888 - DNA, 120 bp, synthetic construct
  source 1..120: mol_type = other DNA
actaatttttgtatttttagtagagacagcgtttctctatgtgggtcagactggtctcaaactcccaaccttatgagattcacccacctcaggttctcaaagttctaggatgacacaagt

SEQ ID NO: 73889 - DNA, 120 bp, synthetic construct
  source 1..120: mol_type = other DNA
cactccagcctgagtgacagagcaagactccatctcaaaagaaaaaataaaaaaccattggatgtaaatgcatggaatatatctgtgttattcattctgctccgttgttctatgtgcctt

SEQ ID NO: 73890 - DNA, 120 bp, synthetic construct; identical to SEQ ID NO: 20007
  source 1..120: mol_type = other DNA

SEQ ID NO: 73891 - DNA, 120 bp, synthetic construct; identical to SEQ ID NO: 20008
  source 1..120: mol_type = other DNA

SEQ ID NO: 73892 - DNA, 120 bp, synthetic construct
  source 1..120: mol_type = other DNA
gaaagtgctctggtcatcgcaaaaaaaaacttgcccactcacccaaatcccccacctcacccctacttccaatcacctgtggagattcagatagaccatggggaggaaacattaatactc

SEQ ID NO: 73893 - DNA, 120 bp, synthetic construct
  source 1..120: mol_type = other DNA
gggtaacttctaaagaagagattggtttgcctcaccgttctgcaggctgtactggaagcatggcaccagcatctatttcttatgatggcctcaggccgctcccactctggcagaagggaa

SEQ ID NO: 73894 - DNA, 120 bp, synthetic construct; identical to SEQ ID NO: 19997
  source 1..120: mol_type = other DNA

SEQ ID NO: 73895 - DNA, 120 bp, synthetic construct
  source 1..120: mol_type = other DNA
ctctcaaccccttggcagagtcaagttgtgtggggaccagggttggactagggtgttcaaagctgggttgtgtggtggggaagtggtaggaacagcagatcctctgaggacaaaggtgtt

SEQ ID NO: 73896 - DNA, 120 bp, synthetic construct; identical to SEQ ID NO: 19998
  source 1..120: mol_type = other DNA

SEQ ID NO: 73897 - DNA, 120 bp, synthetic construct
  source 1..120: mol_type = other DNA
gccatgtttattctgacacctctgccttccatgtaatggagagtaatcgtcccaggatatcatggccccacaacaccaacccctgtatgctgtgtgaacttgtagtctccagactggatt

SEQ ID NO: 73898 - DNA, 120 bp, synthetic construct; identical to SEQ ID NO: 19999
  source 1..120: mol_type = other DNA

SEQ ID NO: 73899 - DNA, 120 bp, synthetic construct
  source 1..120: mol_type = other DNA
gtgcagtggtgcgatctcggctcaccacaacctccacctcccaggttcaagcgattctcctgcctcagcctcccgagtagctggaattacaggcacacgccaccacgcccaactaaattt

SEQ ID NO: 73900 - DNA, 120 bp, synthetic construct
  source 1..120: mol_type = other DNA
gctgaggttgcagtgaaccgagattgcacctctgcactccagcctgggtgacagagcgagactccatctcaaaagaaaaaataaaaaaaattggatgtaaatgcatggattatatctgtg

SEQ ID NO: 73901 - DNA, 120 bp, synthetic construct
  source 1..120: mol_type = other DNA
ctgagggttccaggcaagaatctgcttctcacttttctcagcttctagaggctcccatgttccttggctcctggtacccttcctccttcctcaaagcccacaaagactggtcacatctca

SEQ ID NO: 73902 - DNA, 120 bp, synthetic construct
  source 1..120: mol_type = other DNA
tttcaggtgacaaagaaggtctcactattcagatatttgtgacattaatgaaaaacacggaatgaacccctgaaagattggcggaaggattttgcacacacagctgtcagccatgaaggc

SEQ ID NO: 73903 - DNA, 120 bp, synthetic construct; identical to SEQ ID NO: 20000
  source 1..120: mol_type = other DNA

SEQ ID NO: 73904 - DNA, 120 bp, synthetic construct
  source 1..120: mol_type = other DNA
gaagacagcacaggctgttctgagacgttcctcctgatctcaggacgttgctgtcttagtccatttttgttgctataaaagaacacttgagcctgggttacttctttttttttttttttt

SEQ ID NO: 73905 - DNA, 120 bp, synthetic construct; identical to SEQ ID NO: 20001
  source 1..120: mol_type = other DNA

SEQ ID NO: 73906 - DNA, 120 bp, synthetic construct; identical to SEQ ID NO: 20002
  source 1..120: mol_type = other DNA

SEQ ID NO: 73907 - DNA, 120 bp, synthetic construct; identical to SEQ ID NO: 20009
  source 1..120: mol_type = other DNA

SEQ ID NO: 73908 - DNA, 120 bp, synthetic construct
  source 1..120: mol_type = other DNA
acctacagatgcttcggctctttccgtcactctccctacgagtggtcagacccgagtgacccactgcttgtttctgtcacaggtgagaaaagcccatatctctctcatgtcctatgatcc

SEQ ID NO: 73909 - DNA, 120 bp, synthetic construct
  source 1..120: mol_type = other DNA
ggataggaacctggagtggagagaggaacctggaggagagataggaacctggaggggaggtaggagcctagggtggagatatgggactggagtggagatatgggactggagtggagatat

SEQ ID NO: 73910 - DNA, 120 bp, synthetic construct
  source 1..120: mol_type = other DNA
tatgggcctggagtggacatatgggtctggagtggagatacgggcctggaggtggagatatgggcctggagtggagatatgggcctggaggtggtgatatgggcctggagtgtagacatg

SEQ ID NO: 73911 - DNA, 120 bp, synthetic construct
  source 1..120: mol_type = other DNA
aggtaggctctgatggtgagtttcccttcggcccaggaaggggctggctatcaagactcacagcccagtgggggcagcaaggaaggccttgtttgcctgcaaatggatcttccatcatga

SEQ ID NO: 73912 - DNA, 120 bp, synthetic construct
  source 1..120: mol_type = other DNA
aacatgtgactcttcagtgtcactctaatcttgggtttaacaacttcagtctgtacaaggatgatggggtgcctgtccctgagctgtacaacagaatattctggaaaagccttttcatgg

SEQ ID NO: 73913 - DNA, 120 bp, synthetic construct
  source 1..120: mol_type = other DNA
gaaggagtgagactctgtctccaaaattaattaattaattaaagaaaccaaacaaagagaaggttggctacaccgagatcagcaagggtgggatgatgatgccaccaccaggctccatcc

SEQ ID NO: 73914 - DNA, 120 bp, synthetic construct; identical to SEQ ID NO: 20004
  source 1..120: mol_type = other DNA

SEQ ID NO: 73915 - DNA, 120 bp, synthetic construct
  source 1..120: mol_type = other DNA
atgatgattgattgattcattaatagatgatacatagagatgatgatgatgaagatagatggatagataatacatagagatagagaggaagacaaagagagaaataatagagagagagag

SEQ ID NO: 73916 - DNA, 120 bp, synthetic construct
  source 1..120: mol_type = other DNA
caggatggcacacacagcacctccaaaccctcctgcatggcctgcatggaggcctccgattagggctccagaaacccaggcagatgtagaaagcggtcaggagagacccagagaagggga

SEQ ID NO: 73917 - DNA, 120 bp, synthetic construct
  source 1..120: mol_type = other DNA
aatgattttcctgcctcagcctccctagtagctgggattacaggtgcacgccaccatgccgggatactttttggttttttttagtgtacatggggtttccccaggttggctaggctgctc

SEQ ID NO: 73918 - DNA, 120 bp, synthetic construct
  source 1..120: mol_type = other DNA
aaatgtactggagcatttccccaatattttcttctacgtgtttcacaggttcaggccttagactcacatctttaatccactttcatttgatttttgtgtatggtgacaggtagaggtgca

SEQ ID NO: 73919 - DNA, 120 bp, synthetic construct
  source 1..120: mol_type = other DNA
caggaccctcttatatccgcttttggaaccctggggaggtggaaaccttggattcaggcgttgactcagcatctcacagctctgacattgtacgcctgtcttctaccatctccgaactcc

SEQ ID NO: 73920 - DNA, 120 bp, synthetic construct
  source 1..120: mol_type = other DNA
cacaaatggtgaacaagatgcatttggcctctgctcttgggacactgatattgcagatggttaaatgggaggacagaaaatgaatgcacaagtggaccaataaatgaatgatccattggg

SEQ ID NO: 73921 - DNA, 120 bp, synthetic construct
  source 1..120: mol_type = other DNA
gctgggtttgagtttcctagttgtttaatccttgctaaattaatttctttctgagatttattcctcctacacataaatcaatacctggcaaaggagtgacagatatatgaggggtggtgg

SEQ ID NO: 73922 - DNA, 120 bp, synthetic construct
  source 1..120: mol_type = other DNA
gcctctgaggtagaacagcagcctaacatgtgtctcccgagatcacaaagagtagcacatttcacacgggcttcaacactattttctggctgtttgacataagagaattctacttcgctt

SEQ ID NO: 73923 - DNA, 120 bp, synthetic construct
  source 1..120: mol_type = other DNA
taaaggggtgttgtatgtggttacctgtcaatcaagaaatgtgagacaattcataaagaggaactgctatgattagcttcttattggtgtctcctcttcttccaggtaaccccagacacc

SEQ ID NO: 73924 - DNA, 120 bp, synthetic construct
  source 1..120: mol_type = other DNA
atttccctctctccaggattctgatgaacaagaccatcaggaggtgtcatacgcataattggatcactgtgttttcacacagagaaaaatcactcgcccttctgagaggcccaagacacc

SEQ ID NO: 73925 - DNA, 120 bp, synthetic construct
  source 1..120: mol_type = other DNA
agctggcagagtcattccacgatgaaacatttgtagagtcataggccttgttagtctcatctccatggggacacatatcaacacatcatctttcatactataaatatacggtcactcctc

SEQ ID NO: 73926 - DNA, 120 bp, synthetic construct
  source 1..120: mol_type = other DNA
gttatgggcctgcagtagagatatgggcctgaagtggagatatgggcctggagtggagatatgggcctagaggtggagttatgggcccggaggtggagttaagggcatgaagtggagatc

SEQ ID NO: 73927 - DNA, 120 bp, synthetic construct
  source 1..120: mol_type = other DNA
gaaaaggtgaggaaaccacagccatggccctgacattccaaatcctctgatgggggctcagttcatcaattggctgatattccattcacataggacttgccctccatgccgtgtctactt

SEQ ID NO: 73928 - DNA, 120 bp, synthetic construct
  source 1..120: mol_type = other DNA
tacattgtaatccctggagcctgtgactatttatgttacagggcaggggactgaaggggaaggtggagctcaggttgttgatgagttgaccttgagatggggagacagcctggactgtcc

SEQ ID NO: 73929 - DNA, 120 bp, synthetic construct
  source 1..120: mol_type = other DNA
ggggaggggaaccctcactcattccaggtgccatggatgggatgataaagagagatgccttctaaactcacaacttctctttctaggaaaccacagaaaaccttccctcctggcccaccc

SEQ ID NO: 73930 - DNA, 120 bp, synthetic construct
  source 1..120: mol_type = other DNA
ctcatattccaaataatcccacatatgataggatcgctgagagacacagagaaaaatcagggacaccaaaaagcaaagacataaacacacacaaaatgagccagaagaaggagattaaga

SEQ ID NO: 73931 - DNA, 120 bp, synthetic construct
  source 1..120: mol_type = other DNA
tgagagagagagagagagcattaggtcatagagcaggggagtgagttctcagctcaggtatgaggggagctatgacaaggaagaacctccctgaggaaactgcctcttctccttccaggt

SEQ ID NO: 73932 - DNA, 120 bp, synthetic construct
  source 1..120: mol_type = other DNA
gtaatctcggcgctttgagaggccaaggaaggtggatcatttaagatcaggaactcgagatcaccctggccaacatgtgggaaattcatctttactaaacagacaagaaaaattagccga

SEQ ID NO: 73933 - DNA, 120 bp, synthetic construct
  source 1..120: mol_type = other DNA
actttattttatttatttatttatgttgagatggagtttcactcatagtctcccaggctggagtgcaagggtgtgatctcagctcactgcaacctccgcctcccgcgttcaactgattct

SEQ ID NO: 73934 - DNA, 120 bp, synthetic construct
  source 1..120: mol_type = other DNA
gcagttttattcctctgcatgtagatatccagttttccccacaccatttattgaagactgtcctttcctgattgtaagttctcggcacctttgtcaaagtccattaaatgggctgggtat

SEQ ID NO: 73935 - DNA, 120 bp, synthetic construct
  source 1..120: mol_type = other DNA
gatctagggccaccaaagggctcagcgaagtctcttaacctttaatgtcctgcaggtgagacctcctacaagctagaagaatgattgccaatctgacatccttctcaggaaacatgcagt

SEQ ID NO: 73936 - DNA, 120 bp, synthetic construct; identical to SEQ ID NO: 73920
  source 1..120: mol_type = other DNA

SEQ ID NO: 73937 - DNA, 120 bp, synthetic construct
  source 1..120: mol_type = other DNA
tgctgatttagaccctaagtggatgaagcagatggatataagctatgtttgggaggtagaatcatttgcagggagggcttgctgggtttgagtttcctagttgtttaatccttgctaaat

SEQ ID NO: 73938 - DNA, 120 bp, synthetic construct
  source 1..120: mol_type = other DNA
ggctatggggaggtaaacattgatactccttggagtgagtccagatcttggaatcagagatcagtgccagcactagctcctgctcccctttcctactaattcacaggaggacaggtggta

SEQ ID NO: 73939 - DNA, 120 bp, synthetic construct
  source 1..120: mol_type = other DNA
agggaacttgctaaccccgtctccttgggacagcattgatctgttcatgatggatccacctccatgacccaaacacctcccaagaggcccaacctcccacactgggggttaaatttcaat

SEQ ID NO: 73940 - DNA, 120 bp, synthetic construct
  source 1..120: mol_type = other DNA
cagccaacagcgaggtaggtgctcctcggcccagcctcgtggctagtgttattcccaaacagtcctggaaaacgtgagcaccctccctcactcagcatttccctccctcactcagcattt

SEQ ID NO: 73941 - DNA, 120 bp, synthetic construct
  source 1..120: mol_type = other DNA
gtgttatcagtaccatgtccatataatcccatctgttctccaccgggttctcacctctggactctgagcttctggaagcagtgtggagcctcatttgtctctgggactccaatttccatc

SEQ ID NO: 73942 - DNA, 120 bp, synthetic construct; identical to SEQ ID NO: 20010
  source 1..120: mol_type = other DNA

SEQ ID NO: 73943 - DNA, 120 bp, synthetic construct; identical to SEQ ID NO: 20011
  source 1..120: mol_type = other DNA

SEQ ID NO: 73944 - DNA, 120 bp, synthetic construct; identical to SEQ ID NO: 20012
  source 1..120: mol_type = other DNA

SEQ ID NO: 73945 - DNA, 120 bp, synthetic construct
  source 1..120: mol_type = other DNA
catttctctgatgatgagtgatgccgagtactttttcatatacgtgatcgccatttctatgttttgtttgtggagaaatgtctcctcatgtcttttgctcgttttttaattaaattgttt

SEQ ID NO: 73946 - DNA, 120 bp, synthetic construct; identical to SEQ ID NO: 20013
  source 1..120: mol_type = other DNA

SEQ ID NO: 73947 - DNA, 120 bp, synthetic construct; identical to SEQ ID NO: 20014
  source 1..120: mol_type = other DNA

SEQ ID NO: 73948 - DNA, 120 bp, synthetic construct; identical to SEQ ID NO: 20015
  source 1..120: mol_type = other DNA

SEQ ID NO: 73949 - DNA, 120 bp, synthetic construct; identical to SEQ ID NO: 20016
  source 1..120: mol_type = other DNA

SEQ ID NO: 73950 - DNA, 120 bp, synthetic construct
  source 1..120: mol_type = other DNA
ctgttcactctgatggtagtttcttttgctgtgcagaagctctttagtttaattagatcccgtttgtcaattttggcttttgttgccgttgcttttggtgttttagacatgaagtccttg

SEQ ID NO: 73951 - DNA, 120 bp, synthetic construct
  source 1..120: mol_type = other DNA
gctgcttatcagcttaaggagattttgggctgagacaatggggttttctatatatacaatcatgtcatctgcaaacagggacaatttgacttcctcttttcctaattgaataccctttat

SEQ ID NO: 73952 - DNA, 120 bp, synthetic construct; identical to SEQ ID NO: 19994
  source 1..120: mol_type = other DNA

SEQ ID NO: 73953 - DNA, 120 bp, synthetic construct
  source 1..120: mol_type = other DNA
atataggcctggagtggagatatgggcctagaggtggagatatgggcctggagtggagatatgggcctggaggtgatgtacagatggatcatccatcatgatctttctttccagggttct

SEQ ID NO: 73954 - DNA, 120 bp, synthetic construct; identical to SEQ ID NO: 19995
  source 1..120: mol_type = other DNA

SEQ ID NO: 73955 - DNA, 120 bp, synthetic construct; identical to SEQ ID NO: 19996
  source 1..120: mol_type = other DNA

SEQ ID NO: 73956 - DNA, 120 bp, synthetic construct
  source 1..120: mol_type = other DNA
ggatgaagcagatggatataagctatgtttgggaggtagaatcatttgcagggagggcttgctgggtttgagtttcctagttgtttaatccttgctaaattaatttctttctgagattta

SEQ ID NO: 73957 - DNA, 120 bp, synthetic construct
  source 1..120: mol_type = other DNA
ttcatccaccctctgaatccaggctgagctgacaaacccagttacaaggagggaaggattcacatgaagacaagctatttttctctcctctcttttttttttttttgcctaggattctgc

SEQ ID NO: 73958 - DNA, 120 bp, synthetic construct
  source 1..120: mol_type = other DNA
attccaaacaactgggacccgaagccatgagttgcacactggcctttccaacaacatcaccatcagccctgtgaccccagaacacgcagggacctacagatgtgttggaatttacaagca

SEQ ID NO: 73959 - DNA, 120 bp, synthetic construct
  source 1..120: mol_type = other DNA
tgtacaaccattttacaacattgacaatgcatgtattttaatttggcagtctcacattcaaggagctcagaagaaacagagaagagattgggtctttccaccaagagagcggggaaagca

SEQ ID NO: 73960 - DNA, 120 bp, synthetic construct
  source 1..120: mol_type = other DNA
ccgtggtctgttggtgccatgggagcttcatgtaatgcggttgttaatcaaacctcagtagaggaagagaaataaaggaagagagggactgtgaaaaagtgctcagcaaaggggtttaac

SEQ ID NO: 73961 - DNA, 120 bp, synthetic construct
  source 1..120: mol_type = other DNA
aaaaaaaaaaagagggagagagattactttgttcatacactcaggcgtgtgttctaaaatcagcctctttttctcctaggaaaatacaaaaagccttctctctccacccaggtggacccc

SEQ ID NO: 73962 - DNA, 120 bp, synthetic construct
  source 1..120: mol_type = other DNA
ttagtctttaggtggatgacagagtagggggtgtgcagggaccaagcctccaaagaaaatggtgctaatgctcgggaggctgaggcaggagaatcgcttgaacccaggaggtggaggttg

SEQ ID NO: 73963 - DNA, 120 bp, synthetic construct
  source 1..120: mol_type = other DNA
ccgcacccagccttattgtccatcttctaatgtcctatgacatattcaacagttcctgtgttccagtggtgtgtgcagggaggagaaaagttataatgaataaacgtgtgaactgattta

SEQ ID NO: 73964 - DNA, 120 bp, synthetic construct
  source 1..120: mol_type = other DNA
ttctttgagttacaaacaatttaattaagattttttttttttttttgagatggagtcttgctctgtcacccagactggagtgcattggcgcgctttccgctcactgcaacctctgtctcc

SEQ ID NO: 73965 - DNA, 120 bp, synthetic construct
  source 1..120: mol_type = other DNA
cccaaagtgctgggattacacgcatgagccactgtgcctggccgaagacaaaggttttagtcagaaacgtgtcatgatccacattctattttagagatagcaatcggccgatgtgaatag

SEQ ID NO: 73966 - DNA, 120 bp, synthetic construct
  source 1..120: mol_type = other DNA
gagaagaaagaaaagcttcccaagttgaatgtctagaagtagcagacatgtctagaattgagcccaagagtacggctggctacagtcttttctctttcaaggactatatcatggatgaga

SEQ ID NO: 73967 - DNA, 120 bp, synthetic construct
  source 1..120: mol_type = other DNA
agtaactgttcgggtgtagggatcttggaagagcttcagataaagcatgttgtgtgttcagtatgtattggcacaaaacaggcaaccagtcaatgagagggtttatcatttgcttcttga

SEQ ID NO: 73968 - DNA, 120 bp, synthetic construct
  source 1..120: mol_type = other DNA
ttctctgaatttagtgggggaggctggatcacgctgcagcctcaggcacgcccttgccttgttttggtcttggtattgccacctctgaagtgaagatctggaagactttctttttcaccc

SEQ ID NO: 73969 - DNA, 120 bp, synthetic construct
  source 1..120: mol_type = other DNA
tcagctcccacttataagtgaaaacatgcggtgtctggttttctgttcctgcattagtttgctgaggataatgtcttctagcttcattcatgtctctgcaaatgatatgatctcattcct

SEQ ID NO: 73970 - DNA, 120 bp, synthetic construct
  source 1..120: mol_type = other DNA
gaaggtactttgtaatattcctcgcccccttaccccccaccgccctgcccccgctcgcccgccttaagaaggtactttgtaatattctcccccacaactttagaaggtactttgtaatat

SEQ ID NO: 73971 - DNA, 120 bp, synthetic construct
  source 1..120: mol_type = other DNA
ttcttttttttttcttttttttttttttagagacggggtctcactatgttggccaggttgatctcagactctttccttcaagccatcctcccaccttggcctccccaagtgttgggatta

SEQ ID NO: 73972 - DNA, 120 bp, synthetic construct
  source 1..120: mol_type = other DNA
ggcttgaacctcccaggttcaagtaattctcccacctctgtctcccaagtagctggtgctacaggtatatagcaccatgcctggctaatttttgtatttttactagagacggggtttcat

SEQ ID NO: 73973 - DNA, 120 bp, synthetic construct
  source 1..120: mol_type = other DNA
tttgtatttttagtagagacggggtttcgccatgttggccaggcaggtctcgaactcctgacctcaggtaacccacctgccttggccccccaaagtgctgggattacaggtgggagccgc

SEQ ID NO: 73974 - DNA, 120 bp, synthetic construct
  source 1..120: mol_type = other DNA
acaccaggagctccataaatatttgttctcagccacactctgaccacgcctctttctcttatgtgtctctccatctccgagtggctctgctcatcacatccctggattttataaccatat

SEQ ID NO: 73975 - DNA, 120 bp, synthetic construct
  source 1..120: mol_type = other DNA
caggacttaggacagatgttcacggtctgatttccaaatcctcctgggcctgtgtgggggtggggagagattggcagatagatccaccgactcttaagacttaagaccagatattctgac

SEQ ID NO: 73976 - DNA, 120 bp, synthetic construct
  source 1..120: mol_type = other DNA
ccctcttggggtctcccagagacccaggccgcggaactggcaggcgtttcagagcgtcagaggctgcggatgagcagacttggaggactccaggccagagactaggctgggcgaagagtc

SEQ ID NO: 73977 - DNA, 120 bp, synthetic construct
  source 1..120: mol_type = other DNA
cttgagcctaggagttcaaggctgcagtgagccatgatcaagccactgcacttcaggcaatggtgagaccctgtctcaaaaaaaaaaaaaaaagagaacataaatgcaaaaaagtacagt

SEQ ID NO: 73978 - DNA, 120 bp, synthetic construct
  source 1..120: mol_type = other DNA
tgggtttggactcttgaaatatgatgcagggtaaagattctagggccagactacctgggttcaaattatgtctcagccacttgctagttgattgatcttgagtaagttagttaacctctc

SEQ ID NO: 73979 - DNA, 120 bp, synthetic construct
  source 1..120: mol_type = other DNA
gcaggcggatcatctaagatcaggagttcgagaccagtctggctaacatgtcgaaaccccgtctctactaaaaatacaaaaatttgccgggcgtggtagcacacacttgtaattccagct

SEQ ID NO: 73980 - DNA, 120 bp, synthetic construct
  source 1..120: mol_type = other DNA
tattcttgcgccctagagggtgtggtgtttctgtggggctggctgatcccaggtcagtggctgcattccgccccggccatgtgacccctagtctctttcgtccagttgggccgattctgc

SEQ ID NO: 73981 - DNA, 120 bp, synthetic construct
  source 1..120: mol_type = other DNA
tcctggtggagacattccctgccccagagagccgcgggggactgggtccgggcctgatctctgtgctacacatttcggggacccaggagtctgactttagcaggagctttaactgcagtg

SEQ ID NO: 73982 - DNA, 120 bp, synthetic construct
  source 1..120: mol_type = other DNA
ctcggtgggaatgattcttattggtttccaacagccctacccaatcagcctcattggttcccagtcctctctcttcccgcttattggtctgcacacattgtgaccccgcccatcgcttaa

SEQ ID NO: 73983 - DNA, 120 bp, synthetic construct
  source 1..120: mol_type = other DNA
tcaggtgatccacccgcctcgacctcccaaagtgctaggattacaggcatgagcctccacgcccggcctgagggctcaagtctttttttttctttctttcttttttttgagacggagtct

SEQ ID NO: 73984 - DNA, 120 bp, synthetic construct
  source 1..120: mol_type = other DNA
ggggatcctctgactattccctctcactaagttccctaccccagggccccattgtgcacactgaccacagtgatctggttctggaggaggaagggactctggagaccaaggtgagtgttg

SEQ ID NO: 73985 - DNA, 120 bp, synthetic construct
  source 1..120: mol_type = other DNA
catgtctacctaattccttcctttagtcctccagtctcagctcagacatttcttgttctaggaagcccatgcttccgtcatgacagctcgatcattttgcctgtgttccacccatcacag

SEQ ID NO: 73986 - DNA, 120 bp, synthetic construct
  source 1..120: mol_type = other DNA
taatggattgttctgatttctgaggagccaggacaagttggcgaccttactcctccaaaactgaacacaaggggagggaaagatcattacatttgtcaggagcatttgtatacagtcagc

SEQ ID NO: 73987 - DNA, 120 bp, synthetic construct; identical to SEQ ID NO: 12448
  source 1..120: mol_type = other DNA

SEQ ID NO: 73988 - DNA, 120 bp, synthetic construct; identical to SEQ ID NO: 12449
  source 1..120: mol_type = other DNA

SEQ ID NO: 73989 - DNA, 120 bp, synthetic construct; identical to SEQ ID NO: 3402
  source 1..120: mol_type = other DNA

SEQ ID NO: 73990 - DNA, 120 bp, synthetic construct; identical to SEQ ID NO: 12451
  source 1..120: mol_type = other DNA

SEQ ID NO: 73991 - DNA, 120 bp, synthetic construct; identical to SEQ ID NO: 12452
  source 1..120: mol_type = other DNA

SEQ ID NO: 73992 - DNA, 120 bp, synthetic construct
  source 1..120: mol_type = other DNA
tccacctccagggttcaagtgattctcctgcctcagcctccctagcagctgggattacaggcacctgccaccacgctcagctaattttttgtattttagtagagatggggtttcaccatg

SEQ ID NO: 73993 - DNA, 120 bp, synthetic construct; identical to SEQ ID NO: 12453
  source 1..120: mol_type = other DNA

SEQ ID NO: 73994 - DNA, 120 bp, synthetic construct
  source 1..120: mol_type = other DNA
ccacacacatacaccacacacaccacacatgcacacacacaccacacacatatatacgcacacacccatacacatatacacgcatacacccatacacacacatcatacacacacacatac

SEQ ID NO: 73995 - DNA, 120 bp, synthetic construct
  source 1..120: mol_type = other DNA
aaaaaataaataaatacataaatcagtaataataataataataatgaggctgtggcgtttgcaaggtgccctccacctggttcccgctgctagtgtccctgcgggtatcagacacccctt

SEQ ID NO: 73996 - DNA, 120 bp, synthetic construct
  source 1..120: mol_type = other DNA
ctcgtgccgctcttcttcgcggcgctgatgctgctgggcctggtggggaactcgctggtcatctacgtcatctgccgccacaagccgatgcggaccgtgaccaacttctacatcggtgag

SEQ ID NO: 73997 - DNA, 120 bp, synthetic construct
  source 1..120: mol_type = other DNA
acgtgaccttcctcctgtgctgcgtccccttcacggccctgctgtacccgctgcccggctgggtgctgggcgacttcatgtgcaagttcgtcaactacatccagcaggtgcgctccggag

SEQ ID NO: 73998 - DNA, 120 bp, synthetic construct
  source 1..120: mol_type = other DNA
gtaggtgagtacagctcaggggcctcacgggagaaggcggacacgtcctagtgccctgggcgcccggagccacctgccgcctcggtccagcatctggaaaatgggcgcaatagctctgcc

SEQ ID NO: 73999 - DNA, 120 bp, synthetic construct
  source 1..120: mol_type = other DNA
ggagcggggactgctggaacagcggctattcttctgttattagtatttttcttactgtccaagatcaactgtggaaatattttggtctcttgtgacgttcggtgcagtttcgttgtgaag

SEQ ID NO: 74000 - DNA, 120 bp, synthetic construct; identical to SEQ ID NO: 22416
  source 1..120: mol_type = other DNA

SEQ ID NO: 74001 - DNA, 120 bp, synthetic construct; identical to SEQ ID NO: 22417
  source 1..120: mol_type = other DNA

SEQ ID NO: 74002 - DNA, 120 bp, synthetic construct; identical to SEQ ID NO: 14668
  source 1..120: mol_type = other DNA

SEQ ID NO: 74003 - DNA, 120 bp, synthetic construct
  source 1..120: mol_type = other DNA
tgagtacaactttgttaaaagaaatagcaaagtggcctgggcacagtggctcacgagtgtaatcccagcactaatcccagcactttgggaggctgaggagggtggatcacgaggtcagga

SEQ ID NO: 74004 - DNA, 120 bp, synthetic construct
  source 1..120: mol_type = other DNA
agaaggtggaggttgcagtgaggtgagatcgcgcctctacactccagcctgggcagcaagagcaaaactctgtctcaaaaaaaaagaaaataaatgacagaccagatttatttgtgtata

SEQ ID NO: 74005 - DNA, 120 bp, synthetic construct
  source 1..120: mol_type = other DNA
tttgttctctcttccttcattccctttcctctgctttccacatgtgtgtgcctacatgcaaacacacgtgtgcttgtgcacacacatgttatcatagccatttatccactcctttgttcc

SEQ ID NO: 74006 - DNA, 120 bp, synthetic construct
  source 1..120: mol_type = other DNA
gctttgttgctcccggccggcctgcacgatgcacacgccggacttcgcaggcccagacgacgcgcgcgcagtgagtggtggggctgccgcggcgggactactcgtctgagcgaggggcga

SEQ ID NO: 74007 - DNA, 120 bp, synthetic construct
  source 1..120: mol_type = other DNA
ctttggtgcatggcagatagagaggaaacgtgtatcttcgtacatttaaagtttcctttccttttttttttttttgatagggagtctcgctctatcgcccaggccggagtgcagtgggcg

SEQ ID NO: 74008 - DNA, 120 bp, synthetic construct
  source 1..120: mol_type = other DNA
ctgcaaagagatcctctccgggttcgcggcaggttggcttcttgtcaccacctgctagccttgggacagtaacagatgacttccactcccgaatctgtggagggaactggtggaatcgcc

SEQ ID NO: 74009 - DNA, 120 bp, synthetic construct
  source 1..120: mol_type = other DNA
accaaaagacttccattctttatcgactctggtaagaggaggtgggagggaggagcgtttttgtgaaatgactagagtagctgaactcagtgtgttgaagaacttgtgagaagattccct

SEQ ID NO: 74010 - DNA, 120 bp, synthetic construct
  source 1..120: mol_type = other DNA
tttaatttgctacatctgtgaaagtacttggaaaaattgcatctcagcttggagaagctgagaactgtaggttgctaacagaagtggaaattgtgattgtcctgggctggaagcttgctc

SEQ ID NO: 74011 - DNA, 120 bp, synthetic construct
  source 1..120: mol_type = other DNA
caaagaattatgaaaatgacctgcccaggaaaaccacccctctgatttctgtctctgtccctgctccccctgtcctttgccagatgatccctgtgactggacaaagtagcatgttaccag

SEQ ID NO: 74012 - DNA, 120 bp, synthetic construct
  source 1..120: mol_type = other DNA
actatgctgacctaatgatctctctgttgtctaaccagctctgtccaatataattttttgcaatggtggaaatgtttgttgtctgtccattagggtagccactggctgctcacacttgaa

SEQ ID NO: 74013 - DNA, 120 bp, synthetic construct
  source 1..120: mol_type = other DNA
ttatttggtttaccttggtagaagtactgacagaatgacctgcagtgattgaaacaagttgcttccatgtttcctaaagtacttccaattcaataacaggccttgtacaggggctcacgc

SEQ ID NO: 74014 - DNA, 120 bp, synthetic construct
  source 1..120: mol_type = other DNA
cctcccgggttcacgccattctcctctcctgcctcagcctcccgagtagctgggattacaggtgccagctaccatgcctggctaatttttttggtatttttagtagatacggggtttcac

SEQ ID NO: 74015 - DNA, 120 bp, synthetic construct
  source 1..120: mol_type = other DNA
gtctggaactcctgtgctcaactgatcgtctccagcctcccaaagtgctgcgattataggtttgagccgctgtacttgtacttcgcctgatttatttttaaatatattttgaaagattag

SEQ ID NO: 74016 - DNA, 120 bp, synthetic construct
  source 1..120: mol_type = other DNA
actggacatgttattccactacaaaaaccacaagttatctggccttttagatctttttggaatcggacctggttgagtaaggacctcttaaaagggaaaaataaattttgccgtcagctt

SEQ ID NO: 74017 - DNA, 120 bp, synthetic construct
  source 1..120: mol_type = other DNA
tgtgttttgttctttgtagtctgataaaatctccacctggtcattcattgtgtgtgacttgatacctgttaacttgccccttagtatcagctgttacttgacacaaatgtgtgtgttatt

SEQ ID NO: 74018 - DNA, 120 bp, synthetic construct
  source 1..120: mol_type = other DNA
aaaaaaggcgggggcggtggggggggggggtgatttcagtacaaagcctacagacattataaaaatattaagatttttgttcgtttgttttttgtttttgagacagagtctcactgtcac

SEQ ID NO: 74019 - DNA, 120 bp, synthetic construct; identical to SEQ ID NO: 13793
  source 1..120: mol_type = other DNA

SEQ ID NO: 74020 - DNA, 120 bp, synthetic construct; identical to SEQ ID NO: 14981
  source 1..120: mol_type = other DNA

SEQ ID NO: 74021 - DNA, 120 bp, synthetic construct; identical to SEQ ID NO: 14982
  source 1..120: mol_type = other DNA

SEQ ID NO: 74022 - DNA, 120 bp, synthetic construct; identical to SEQ ID NO: 14983
  source 1..120: mol_type = other DNA

SEQ ID NO: 74023 - DNA, 120 bp, synthetic construct
  source 1..120: mol_type = other DNA
atcaacaggtgattggaaaagccaagctttcttgaaaccaatttcagaatggttagtggaaattcctgttggcttccttggtccacttacccaatggcagatcttcaactgaaaaggaca

SEQ ID NO: 74024 - DNA, 120 bp, synthetic construct
  source 1..120: mol_type = other DNA
tcagtgatttcatccacagcagcagagacacatatagaaaaaacaaatactgttgatgtctgattccttcttatcgggaaaggggccctgaggatataacttggagggactatatggtca

SEQ ID NO: 74025 - DNA, 120 bp, synthetic construct
  source 1..120: mol_type = other DNA
agaatcttcagtactctggagagtacgggagttcatcccttcttatcagttcctgggggctgtcttgaggcaacccccacttttaggatgatatacacgttgcaagaattcccgctattt

SEQ ID NO: 74026 - DNA, 120 bp, synthetic construct; identical to SEQ ID NO: 24650
  source 1..120: mol_type = other DNA

SEQ ID NO: 74027 - DNA, 120 bp, synthetic construct; identical to SEQ ID NO: 7532
  source 1..120: mol_type = other DNA

SEQ ID NO: 74028 - DNA, 120 bp, synthetic construct; identical to SEQ ID NO: 7533
  source 1..120: mol_type = other DNA

SEQ ID NO: 74029 - DNA, 120 bp, synthetic construct; identical to SEQ ID NO: 7534
  source 1..120: mol_type = other DNA

SEQ ID NO: 74030 - DNA, 120 bp, synthetic construct; identical to SEQ ID NO: 21937
  source 1..120: mol_type = other DNA

SEQ ID NO: 74031 - DNA, 120 bp, synthetic construct; identical to SEQ ID NO: 21938
  source 1..120: mol_type = other DNA

SEQ ID NO: 74032 - DNA, 120 bp, synthetic construct
  source 1..120: mol_type = other DNA
tccaaaaaaaaaaaaaaaaaaaaattttttaaattagctgggcatggtggtgcgtgcctgtggtcccagctattcaggagacctaggtgagagactgcttgagccaaggagcatgaggat

SEQ ID NO: 74033 - DNA, 120 bp, synthetic construct; identical to SEQ ID NO: 32616
  source 1..120: mol_type = other DNA

SEQ ID NO: 74034 - DNA, 120 bp, synthetic construct
  source 1..120: mol_type = other DNA
attctatacaaagaactgtttatattcaaccaatgagtaatcccatgtgaaagcttcaatgttcatgaaactgaagagaccacagacagcagcgcctattttcccacgccgcaactcacc

SEQ ID NO: 74035 - DNA, 120 bp, synthetic construct
  source 1..120: mol_type = other DNA
aaattaaaggtaaatttcctactgtttggggaaaaactcaaaccatttttctcctctgctcttacaccaacacaacaatcaacacagaaacgtggccgctttccctgcaacgagccagag

SEQ ID NO: 74036 - DNA, 120 bp, synthetic construct; identical to SEQ ID NO: 17049
  source 1..120: mol_type = other DNA

SEQ ID NO: 74037 - DNA, 120 bp, synthetic construct; identical to SEQ ID NO: 17050
  source 1..120: mol_type = other DNA

SEQ ID NO: 74038 - DNA, 120 bp, synthetic construct; identical to SEQ ID NO: 17051
  source 1..120: mol_type = other DNA

SEQ ID NO: 74039 - DNA, 120 bp, synthetic construct; identical to SEQ ID NO: 17052
  source 1..120: mol_type = other DNA

SEQ ID NO: 74040 - DNA, 120 bp, synthetic construct
  source 1..120: mol_type = other DNA
gttctttttctgttttaagctctctcttggaagatgaattatgtctggttttaaagaaaatatagtattggctggggagtcaagatggccgaacaggaacagctccggtctacagctccc

SEQ ID NO: 74041 - DNA, 120 bp, synthetic construct
  source 1..120: mol_type = other DNA
catggaaaggaaaaaccggtaccagccactgcaaaaacatgccaaaatgtaaagaccatcaaggctaggaagaaactgcatcaactaatgagcaaaataaccagctaacatcataatgac

SEQ ID NO: 74042 - DNA, 120 bp, synthetic construct
  source 1..120: mol_type = other DNA
ttggcctcccaaagtgctgggattacaggcgtgagccaccgcgcccggcccagaatatacatttttttcagcaccacaccacacctattccaaaatagaccacatagttggaagtaaagc

SEQ ID NO: 74043 - DNA, 120 bp, synthetic construct
  source 1..120: mol_type = other DNA
aaaacaagcaatggggaaaggattccctatttaataaaaggtgctggggaaactggctagccatatgtagaaagctgaaactggatcccttccttacactttatacaaaaattaattcaa

SEQ ID NO: 74044 - DNA, 120 bp, synthetic construct
  source 1..120: mol_type = other DNA
aatgatagactggattaagaaaatatggcacatatacaccatggaatactatgcagccataaaaaataaagagttcacgtcctttgtagggacatggatgaaactggaaaccatcattct

SEQ ID NO: 74045 - DNA, 120 bp, synthetic construct
  source 1..120: mol_type = other DNA
acaatgaactcaaatttacaagaaaaaaacaaacaaccccatcaaaaagtgggcaaatgatatgaacaggcatttctgaaaagaagacatttatgcagccaaaaaacacatgaaaaaatg

SEQ ID NO: 74046 - DNA, 120 bp, synthetic construct
  source 1..120: mol_type = other DNA
ctcataggtgggaattgaacaatgagaacacttggacacaggaaggggaacatcacacaccggggcctgttgtggggtggggggagaggggagggatagcattaggagatacacctaatg

SEQ ID NO: 74047 - DNA, 120 bp, synthetic construct; identical to SEQ ID NO: 13781
  source 1..120: mol_type = other DNA

SEQ ID NO: 74048 - DNA, 120 bp, synthetic construct; identical to SEQ ID NO: 13782
  source 1..120: mol_type = other DNA

SEQ ID NO: 74049 - DNA, 120 bp, synthetic construct
  source 1..120: mol_type = other DNA
ggatctaattaaactgaagagcttctgcacagcaaaagaaactaccatcagagtgaaaaggcaacctacaaaatgggagaaaatttttgtaatcttctcatctgacaaagggctaatatc

SEQ ID NO: 74050 - DNA, 120 bp, synthetic construct
  source 1..120: mol_type = other DNA
ttgcaatctacttatctaacaaagggctaatattcagaatctacaatgaactcaaactaatttccaagaaaaaacaaacaaacaaccccatcaaaaagtgggtgaaggatatcaacagac

SEQ ID NO: 74051 - DNA, 120 bp, synthetic construct; identical to SEQ ID NO: 35201
  source 1..120: mol_type = other DNA

SEQ ID NO: 74052 - DNA, 120 bp, synthetic construct
  source 1..120: mol_type = other DNA
cgaaatgaatgaaatgaagcaagaagagaagtttagagaaaaaagagtacaaagaaatgaacaaagccttcaagaaatatgggattatgtgaaaagaccaaatctacgtctgattggtgt

SEQ ID NO: 74053 - DNA, 120 bp, synthetic construct
  source 1..120: mol_type = other DNA
aatgcatctcacatacagagacacacataggctcaaaataaagggatggaggaagatctaccaagcaaatggaaaacaaaaaaaggcaggggttgcaatcctagtctctgataaaacaga

SEQ ID NO: 74054 - DNA, 120 bp, synthetic construct
  source 1..120: mol_type = other DNA
agccctcagaaataatgccgcatatctacaactatctgatctttgacaaactggaggaaaacaagcaatggggaaaggattccctatttaataaatggtgctgggaaaactggctagcca

SEQ ID NO: 74055 - DNA, 120 bp, synthetic construct
  source 1..120: mol_type = other DNA
accatcattctcagcaaactaccgcaaagacaaaaaaccaaacaccgcatgttctcactcataggtgggaattgaacaatgagaacacatggacacaggaaggggaacatcacacaccag

SEQ ID NO: 74056 - DNA, 120 bp, synthetic construct; identical to SEQ ID NO: 35195
  source 1..120: mol_type = other DNA

SEQ ID NO: 74057 - DNA, 120 bp, synthetic construct; identical to SEQ ID NO: 35196
  source 1..120: mol_type = other DNA

SEQ ID NO: 74058 - DNA, 120 bp, synthetic construct
  source 1..120: mol_type = other DNA
gaaaaaaaaggcatttgtcaaaatccaacatccattcctgtttttttaaaaaagtaaactcgccagatgtggtggctcatgcctgtaatcccagcactttgggaggttgaggcaggagga

SEQ ID NO: 74059 - DNA, 120 bp, synthetic construct; identical to SEQ ID NO: 35197
  source 1..120: mol_type = other DNA

SEQ ID NO: 74060 - DNA, 120 bp, synthetic construct; identical to SEQ ID NO: 74054
  source 1..120: mol_type = other DNA

SEQ ID NO: 74061 - DNA, 120 bp, synthetic construct
  source 1..120: mol_type = other DNA
gttggtgggactgtaaactagttcaaccattgtggaagtcagtgtggggattcttcagggatctagaactagaaataccatttgacccagccatcccattactgagtatatacccaaagg

SEQ ID NO: 74062 - DNA, 120 bp, synthetic construct; identical to SEQ ID NO: 35199
  source 1..120: mol_type = other DNA

SEQ ID NO: 74063 - DNA, 120 bp, synthetic construct
  source 1..120: mol_type = other DNA
tagccttgtagtatagtttgaagtcaggtagtgtgatgcctccagctttgttcttttggcttaggattgacttggcgatgcgggctcttttttggttccatataaactttaaagtagttt

SEQ ID NO: 74064 - DNA, 120 bp, synthetic construct
  source 1..120: mol_type = other DNA
tgcacaatgtgcacatgtaccctaaaacttaaaatataatttaaaaaaaaaaagagtcaatgctaggggagccattagaaagggatacttggccacatgtggtggctcacgcctgtaatc

SEQ ID NO: 74065 - DNA, 120 bp, synthetic construct
  source 1..120: mol_type = other DNA
tgaagtccttgcccatgcctatgttctgaatggtattgcctaggtttccttctagggtttttatggttttaggtctaacgtttaagtctttaatccatcttgaattgatttttgtataag

SEQ ID NO: 74066 - DNA, 120 bp, synthetic construct
  source 1..120: mol_type = other DNA
ttggccatcagagaaatgcaaatcaaaaccacagtaagataccatctcacaccagttagaatggcgatcattaaaaagtcaggaaacaacaggtgctggagaggatgtggagaaatagga

SEQ ID NO: 74067 - DNA, 120 bp, synthetic construct
  source 1..120: mol_type = other DNA
tatctcctaatgttatccctcccccctacccttaccccacgacaggccctggtgtgtgatgttccccttcctgtgtccaagtgttctcattgttcaattcccacctatgagtgagaacat

SEQ ID NO: 74068 - DNA, 120 bp, synthetic construct
  source 1..120: mol_type = other DNA
cgacattcttaaagaaaagaattttcaacccagaatttcatatccggccaaactaagcttcataagtgaaggagaaataaaatactttacagacaagcaaatgctgagagattttgtcac

SEQ ID NO: 74069 - DNA, 120 bp, synthetic construct
  source 1..120: mol_type = other DNA
ctcactcaaagccgctcaactacatggaaactgaacaacctgctactgaatgactactgggtacataatgaaatgaaggcagaaataaagatgttctttgaaaccaacgagaacaaagac

SEQ ID NO: 74070 - DNA, 120 bp, synthetic construct
  source 1..120: mol_type = other DNA
ccaatatccttgatgaacattgatgcaaaaatcctcaataaaatactggcaaaccaaacccagcagcacatcaaaaagcttatccaccatgatcaaaggggcttcatccctgggatgcaa

SEQ ID NO: 74071 - DNA, 120 bp, synthetic construct
  source 1..120: mol_type = other DNA
acaaagctggaggcatcatgctacctgacttcaaactatactacaaggctacagtcaccaaaacagcatggtgctggtaccaaaacagagatatagatcaatgaacagaacagagccctc

SEQ ID NO: 74072 - DNA, 120 bp, synthetic construct
  source 1..120: mol_type = other DNA
cattgtggaagtcagtgtggcgattcctcagggatctagaactagaaataccattcgacccagccatcccattactgggtatatacccaaaggactataaatcatgctgctataaagaca

SEQ ID NO: 74073 - DNA, 120 bp, synthetic construct; identical to SEQ ID NO: 35200
  source 1..120: mol_type = other DNA

SEQ ID NO: 74074 - DNA, 120 bp, synthetic construct
  source 1..120: mol_type = other DNA
atgtgttttttggctgcataaatgtcttcttttgagaagtgtctagaaaaccccattgtctcagcccaagatctccttaagctgataagcaacttcagcaaagtctcaggatacaaaatc

SEQ ID NO: 74075 - DNA, 120 bp, synthetic construct
  source 1..120: mol_type = other DNA
caaaaatcaattcaagatggattaaaaacttaaatgttagacctaaaaccataaaaaccctagaagaaaacctaggcattaccattcaggacataggcatgggcaaggacttcatgtcta

SEQ ID NO: 74076 - DNA, 120 bp, synthetic construct
  source 1..120: mol_type = other DNA
aaagtctaatttccttcaaatttcagtgcaatagtaatagaacactattagaaatgtaaaaggctgggcatagtggtgtgcccctgtagtcccagctactcaggaggccaaggtgggagg

SEQ ID NO: 74077 - DNA, 120 bp, synthetic construct
  source 1..120: mol_type = other DNA
atgaggtttcgccatgttggtcaggctggtctcgaactcctgaccttgtgatccgcccgccttggcttcccaaagtgctgcgattacaggcgtgtgccaccgtgcccagcaatttttgtg

SEQ ID NO: 74078 - DNA, 120 bp, synthetic construct
  source 1..120: mol_type = other DNA
agatcgtgccaccgcactccagcctgggcaacagagtgagactccgtctcaaaaaaaaccaaaaaaaaaaaaacaaaaaaaaaccatgtagatgctacctatatgtacggtaagagcact

SEQ ID NO: 74079 - DNA, 120 bp, synthetic construct; identical to SEQ ID NO: 6791
  source 1..120: mol_type = other DNA

SEQ ID NO: 74080 - DNA, 120 bp, synthetic construct
  source 1..120: mol_type = other DNA
ccttatctccctccttccttccctccctccctcctctcatcgtcctcagtgtctattgttgccatcttttttttttttttaattgatcattcttgggtgtttctcgcagagggggatttg

SEQ ID NO: 74081 - DNA, 120 bp, synthetic construct
  source 1..120: mol_type = other DNA
ccaacacagcgaaaccccgtctccaccaaaaaaataacgaaaaccagtcaggcgtggcagcgcgcgcctgcactgggcaggctgaggcaggagaatcaggcagggaggttgcagtgagca

SEQ ID NO: 74082 - DNA, 120 bp, synthetic construct
  source 1..120: mol_type = other DNA
aatcctaaaggcttctagagagcacagttacatacttagagttaggattcaaaatagcattggatttctcaataacaacaaactaggccaggtgtggtgactcacgcctgtaatcccagc

SEQ ID NO: 74083 - DNA, 120 bp, synthetic construct; identical to SEQ ID NO: 25940
  source 1..120: mol_type = other DNA

SEQ ID NO: 74084 - DNA, 120 bp, synthetic construct; identical to SEQ ID NO: 25941
  source 1..120: mol_type = other DNA

SEQ ID NO: 74085 - DNA, 120 bp, synthetic construct
  source 1..120: mol_type = other DNA
tccaccgtccccacatttctctctctcttcacgctgccctgctttttctacttccataacaccatttcccaacatgccagttgcttccctgacttgtgctgtctttccctttccccccac

SEQ ID NO: 74086 - DNA, 120 bp, synthetic construct
  source 1..120: mol_type = other DNA
atctcttgttagtataggtcaaaatatatggggttaatatatcctggcaggtagagagcaaaatttaaatcagattctaagtttctgaagtttgtgtaaaatatgatcctgctctgtctt

SEQ ID NO: 74087 - DNA, 120 bp, synthetic construct
  source 1..120: mol_type = other DNA
tgagaggccagggcaggaggatcacttgaagccaggagtttgagaccagcctggtcaacacagtgagactctgtccctattttctttctgttaaagttaaaaataagagaatatattatt

SEQ ID NO: 74088 - DNA, 120 bp, synthetic construct; identical to SEQ ID NO: 25928
  source 1..120: mol_type = other DNA

SEQ ID NO: 74089 - DNA, 120 bp, synthetic construct; identical to SEQ ID NO: 25929
  source 1..120: mol_type = other DNA

SEQ ID NO: 74090 - DNA, 120 bp, synthetic construct; identical to SEQ ID NO: 25930
  source 1..120: mol_type = other DNA

SEQ ID NO: 74091 - DNA, 120 bp, synthetic construct
  source 1..120: mol_type = other DNA
tttaaaaaaattgactgagcatggtcacacgtgcctgtatagtcagtcccagatactggggaggctgaggcaggaggatcgcttgagcctaggaagcagaggttgcactgagctgagatc

SEQ ID NO: 74092 - DNA, 120 bp, synthetic construct; identical to SEQ ID NO: 25931
  source 1..120: mol_type = other DNA

SEQ ID NO: 74093 - DNA, 120 bp, synthetic construct; identical to SEQ ID NO: 25932
  source 1..120: mol_type = other DNA

SEQ ID NO: 74094 - DNA, 120 bp, synthetic construct; identical to SEQ ID NO: 25933
  source 1..120: mol_type = other DNA

SEQ ID NO: 74095 - DNA, 120 bp, synthetic construct; identical to SEQ ID NO: 25934
  source 1..120: mol_type = other DNA

SEQ ID NO: 74096 - DNA, 120 bp, synthetic construct; identical to SEQ ID NO: 25935
  source 1..120: mol_type = other DNA

SEQ ID NO: 74097 - DNA, 120 bp, synthetic construct; identical to SEQ ID NO: 25936
  source 1..120: mol_type = other DNA

SEQ ID NO: 74098 - DNA, 120 bp, synthetic construct
  source 1..120: mol_type = other DNA
ctgcctcctcctgggttcaggcgattctcttgccccagcctcctgagtagttgggattacaggcacccaccaccatgcctgactactttttgtatttttagtagagacaggtttcaccat

SEQ ID NO: 74099 - DNA, 120 bp, synthetic construct
  source 1..120: mol_type = other DNA
ttcctgagatcagaggagcttgttgtccattaagttgttctaatatgatgataggttaaagctgtgtgccaagtccatttaattttataataggattgtttgttatagcaaatactttag

SEQ ID NO: 74100 - DNA, 120 bp, synthetic construct
  source 1..120: mol_type = other DNA
ttgcatactgatagcttagctcccacttataagtgtgaatatgtagtatttggttttccattcctgagttacttaacttagaataatggcctccggtttcatccaagttgctgcaaaaga

SEQ ID NO: 74101 - DNA, 120 bp, synthetic construct
  source 1..120: mol_type = other DNA
tggggtctttgtcataaattttttgtttcggccaatgcccagaagtttttcctaagttttcttctagaattttgatggtttcaggtcttagatttaagtctttaatccatcttgggttaa

SEQ ID NO: 74102 - DNA, 120 bp, synthetic construct
  source 1..120: mol_type = other DNA
tttatggttttaggtctaacatttaagtctttaactcatcttgagttaattttttatatggtgtaaggaagggatccagtttcagctttctgcatatggctagcctgttttcccagcacc

SEQ ID NO: 74103 - DNA, 120 bp, synthetic construct
  source 1..120: mol_type = other DNA
catctggtcctggactttttttggttaataggctattaatgattgcctcaatttcagaacctgttactggtctattcagagattcagcttcttcctggtttagtcttgggagggtgtatg

SEQ ID NO: 74104 - DNA, 120 bp, synthetic construct
  source 1..120: mol_type = other DNA
tttttaggtctctaaggacttgctttatgaatctgggtgcttctgtattgggtacatattaggaatgttagctattcttgttgaattgatccctttaccattatgtaatggccttctttg

SEQ ID NO: 74105 - DNA, 120 bp, synthetic construct
  source 1..120: mol_type = other DNA
tgccctctctcaccactcctattcaacatagtgttggaagttctggccaagacaatcaggcaggagaaggaaataaagaatattcagttaggaaaagaggaagtcaaattgtccctgttt

SEQ ID NO: 74106 - DNA, 120 bp, synthetic construct
  source 1..120: mol_type = other DNA
cctaaaaccataaaaaccctagaagaaaacctaggcaataccattcaggacataggcatgggcaaggacttcatgtctaaaacaccaacagcaatggcagcaaaagccaaaattgacaaa

SEQ ID NO: 74107 - DNA, 120 bp, synthetic construct
  source 1..120: mol_type = other DNA
attctcctaccttggcctcccaaagtgcggggattataggtgtgaaccaccacacccagccatactgaacttttagattcccattttttggtagaaaggataacatttttttcaattcgt

SEQ ID NO: 74108 - DNA, 120 bp, synthetic construct
  source 1..120: mol_type = other DNA
cgagaccgcccaccctggccagtaactagatctttctggtacctgttcttcctttgttagttgctctattcctctgtttaaaaacctttaaaatctggctgaattaaatccagattcttt

SEQ ID NO: 74109 - DNA, 120 bp, synthetic construct; identical to SEQ ID NO: 21784
  source 1..120: mol_type = other DNA

SEQ ID NO: 74110 - DNA, 120 bp, synthetic construct; identical to SEQ ID NO: 21785
  source 1..120: mol_type = other DNA

SEQ ID NO: 74111 - DNA, 120 bp, synthetic construct; identical to SEQ ID NO: 24926
  source 1..120: mol_type = other DNA

SEQ ID NO: 74112 - DNA, 120 bp, synthetic construct; identical to SEQ ID NO: 24927
  source 1..120: mol_type = other DNA

SEQ ID NO: 74113 - DNA, 120 bp, synthetic construct
  source 1..120: mol_type = other DNA
acaaagatgtggatttatctgtccatctatccacccacccttcatccaccattcatctatctgccacccactcactccttcttacccacctgttcacacctatgtccaccagttcaccca

SEQ ID NO: 74114 - DNA, 120 bp, synthetic construct
  source 1..120: mol_type = other DNA
ctatccacccacccattcatccacccacccacccacctacccacccacccatccatctgcccttctgtctgtcacccatccatctgcccttccatccactcatccattaactcatctact

SEQ ID NO: 74115 - DNA, 120 bp, synthetic construct; identical to SEQ ID NO: 14322
  source 1..120: mol_type = other DNA

SEQ ID NO: 74116 - DNA, 120 bp, synthetic construct; identical to SEQ ID NO: 14323
  source 1..120: mol_type = other DNA

SEQ ID NO: 74117 - DNA, 120 bp, synthetic construct; identical to SEQ ID NO: 20381
  source 1..120: mol_type = other DNA

SEQ ID NO: 74118 - DNA, 120 bp, synthetic construct
  source 1..120: mol_type = other DNA
tatcagcttaaggagattttgggctgagatgatggggttttctagatatacaatcatggcgtctgcagacagagacaatttgacttcctcttttcctaattgaataccctttatttcctt

SEQ ID NO: 74119 - DNA, 120 bp, synthetic construct
  source 1..120: mol_type = other DNA
ccagttcctccttgtacctgtggtagaatttggctgtgaatccatcgggtcctggactctttttggtaggtaagctattgattattgccacaatttcagatcctgttattggtctattca

SEQ ID NO: 74120 - DNA, 120 bp, synthetic construct
  source 1..120: mol_type = other DNA
ttgatttggggtggagagttctgtagatgtctattaggtccgcttggtgtagagctgagtacaattcctgggtatccttgttaactttctgtctcattgatctgtctaatgttgacagtg

SEQ ID NO: 74121 - DNA, 120 bp, synthetic construct
  source 1..120: mol_type = other DNA
catttatgcagccaaaagacacatgaaaaaatgctcatcatcactggccatcagagaaatgcaaatcaaaaccacaatgagataccatctcacaccagttggaatggcaatcattaaaaa

SEQ ID NO: 74122 - DNA, 120 bp, synthetic construct; identical to SEQ ID NO: 20382
  source 1..120: mol_type = other DNA

SEQ ID NO: 74123 - DNA, 120 bp, synthetic construct
  source 1..120: mol_type = other DNA
acgccactgcactccagcctggtgacacagcaagactgtgtctcaaaaaattaaaaataaaatctagcccattctaagcaaacagtaagtgcccaataaatgctggtgatcatagtgaaa

SEQ ID NO: 74124 - DNA, 120 bp, synthetic construct; identical to SEQ ID NO: 20383
  source 1..120: mol_type = other DNA

SEQ ID NO: 74125 - DNA, 120 bp, synthetic construct
  source 1..120: mol_type = other DNA
ggctcaagtgatcctcctgcctcggcctcctgaatagctgggactatagacacaagccactgcacctgacttcatcaacttcataaaaatcaaacaaagaatttaagatttaaatcattt

SEQ ID NO: 74126 - DNA, 120 bp, synthetic construct; identical to SEQ ID NO: 27041
  source 1..120: mol_type = other DNA

SEQ ID NO: 74127 - DNA, 120 bp, synthetic construct; identical to SEQ ID NO: 27042
  source 1..120: mol_type = other DNA

SEQ ID NO: 74128 - DNA, 120 bp, synthetic construct; identical to SEQ ID NO: 27043
  source 1..120: mol_type = other DNA

SEQ ID NO: 74129 - DNA, 120 bp, synthetic construct; identical to SEQ ID NO: 22167
  source 1..120: mol_type = other DNA

SEQ ID NO: 74130 - DNA, 120 bp, synthetic construct
  source 1..120: mol_type = other DNA
gaatggtaccagctcctccatatacctctggtagaattcagctgtgaattcatctggtgctggactttatttggttggtaagctattaattgttgcctcaatttcagagcctgttaattg

SEQ ID NO: 74131 - DNA, 120 bp, synthetic construct
  source 1..120: mol_type = other DNA
caaatgggatctaattaaactaaagagcttctgcacagcaaaagaaactaccatcagagtgaacaggcaacctacagaatgggagaaaatttgtgcaatctactcatctgataaagggct

SEQ ID NO: 74132 - DNA, 120 bp, synthetic construct
  source 1..120: mol_type = other DNA
tgggtgcagcacaccagcatggcacatgtatacatatgtaacaaacctgcacgttgtgcacatgtaccctaaaatttaaagtataataaaaaaaatattgacatgtgtggattttccttt

SEQ ID NO: 74133 - DNA, 120 bp, synthetic construct
  source 1..120: mol_type = other DNA
gaaagatcgtttgagccccggagctcgacaccaggctgggcaacatagcaagaccctgtctctattttaaaaagtaaataaagtttatttcgcaactactcaacttagctgttgtagcat

SEQ ID NO: 74134 - DNA, 120 bp, synthetic construct; identical to SEQ ID NO: 28142
  source 1..120: mol_type = other DNA

SEQ ID NO: 74135 - DNA, 120 bp, synthetic construct
  source 1..120: mol_type = other DNA
aactaggatactacattagaaatttcagcaagtactataatcaaagaattatagtagccagcatagtgtgataaaaattcatctcctggatattagccctttgtcagatgagtaggttgc

SEQ ID NO: 74136 - DNA, 120 bp, synthetic construct
  source 1..120: mol_type = other DNA
aaatggttgaactagtttacagtcccaccaacagtgtaaaagtgttcctttttctccacatcctctccagcacctgttgtttcctgactttttaatgattgccattctaactggtgtgag

SEQ ID NO: 74137 - DNA, 120 bp, synthetic construct
  source 1..120: mol_type = other DNA
ttcaaagagaataaaatacctaggaatccaacttacaagggatgtcaaggacctcttcaaggagaactacaaaccactgctcaaggaaataaaagaggatacaaacaaatggaagaacat

SEQ ID NO: 74138 - DNA, 120 bp, synthetic construct
  source 1..120: mol_type = other DNA
atcctgagactttgctgaagttgcttatcaacatatccagaatctacaatgaactcaaacaaatttgcaaggaaaaaacaaacaaccccatcaaaaagtgggcaaaggacatgaacagac

SEQ ID NO: 74139 - DNA, 120 bp, synthetic construct
  source 1..120: mol_type = other DNA
ctactcaattttctcattgttagtaatgaacttgcttattttcacccccaaaatttgtcagtaaaaaccttctatgagggaaaggaattcaagagctttctgtagagccacaatgaatga

SEQ ID NO: 74140 - DNA, 120 bp, synthetic construct; identical to SEQ ID NO: 34306
  source 1..120: mol_type = other DNA

SEQ ID NO: 74141 - DNA, 120 bp, synthetic construct
  source 1..120: mol_type = other DNA
ttgattttgtatcctgagactttgctgaagttgcttatcagcttaaagagattttggctgagacaatggggttttctagatatacaatcatgtcatctgcaaacagggacaatttgactt

SEQ ID NO: 74142 - DNA, 120 bp, synthetic construct
  source 1..120: mol_type = other DNA
tcagagcttgttattggtctattcagagagtcaacttcttcctgttttagtcttgggaaggtgttcgtgtcgaggaatttatccatttcttctagattttgtagtttatttgcatagagg

SEQ ID NO: 74143 - DNA, 120 bp, synthetic construct
  source 1..120: mol_type = other DNA
ctatcacaagaacaaaaaaccaaacactgcgcatattctcactcataggtgggaattgaacaatgagaacacatggacacaggaaggggaacatcacactctggggactgttgtggggtg

SEQ ID NO: 74144 - DNA, 120 bp, synthetic construct; identical to SEQ ID NO: 34307
  source 1..120: mol_type = other DNA

SEQ ID NO: 74145 - DNA, 120 bp, synthetic construct; identical to SEQ ID NO: 25382
  source 1..120: mol_type = other DNA

SEQ ID NO: 74146 - DNA, 120 bp, synthetic construct; identical to SEQ ID NO: 24925
  source 1..120: mol_type = other DNA

SEQ ID NO: 74147 - DNA, 120 bp, synthetic construct; identical to SEQ ID NO: 28959
  source 1..120: mol_type = other DNA

SEQ ID NO: 74148 - DNA, 120 bp, synthetic construct; identical to SEQ ID NO: 19932
  source 1..120: mol_type = other DNA

SEQ ID NO: 74149 - DNA, 120 bp, synthetic construct; identical to SEQ ID NO: 19925
  source 1..120: mol_type = other DNA

SEQ ID NO: 74150 - DNA, 120 bp, synthetic construct; identical to SEQ ID NO: 19926
  source 1..120: mol_type = other DNA

SEQ ID NO: 74151 - DNA, 120 bp, synthetic construct; identical to SEQ ID NO: 19927
  source 1..120: mol_type = other DNA

SEQ ID NO: 74152 - DNA, 120 bp, synthetic construct
  source 1..120: mol_type = other DNA
tttttagtagagatagggtttcaccatgttgatcaggctggtctcgaactcctgaccctaggtgatcctcctgcttcggcctcccaaagtgccgggattacaggcatgagccgctgctcc

SEQ ID NO: 74153 - DNA, 120 bp, synthetic construct; identical to SEQ ID NO: 19928
  source 1..120: mol_type = other DNA

SEQ ID NO: 74154 - DNA, 120 bp, synthetic construct; identical to SEQ ID NO: 19929
  source 1..120: mol_type = other DNA

SEQ ID NO: 74155 - DNA, 120 bp, synthetic construct; identical to SEQ ID NO: 19930
  source 1..120: mol_type = other DNA

SEQ ID NO: 74156 - DNA, 120 bp, synthetic construct; identical to SEQ ID NO: 19931
  source 1..120: mol_type = other DNA

SEQ ID NO: 74157 - DNA, 120 bp, synthetic construct
  source 1..120: mol_type = other DNA
tcagacccaggagtccaggcccccagctcctcctccctcagacccaggagtccaggtcccagtccctcctccctcagacctaggagtccaggtctcagtccctcctccctcaggcccagg

SEQ ID NO: 74158 - DNA, 120 bp, synthetic construct; identical to SEQ ID NO: 26017
  source 1..120: mol_type = other DNA

SEQ ID NO: 74159 - DNA, 120 bp, synthetic construct; identical to SEQ ID NO: 26018
  source 1..120: mol_type = other DNA

SEQ ID NO: 74160 - DNA, 120 bp, synthetic construct; identical to SEQ ID NO: 12677
  source 1..120: mol_type = other DNA

SEQ ID NO: 74161 - DNA, 120 bp, synthetic construct; identical to SEQ ID NO: 12678
  source 1..120: mol_type = other DNA

SEQ ID NO: 74162 - DNA, 120 bp, synthetic construct
  source 1..120: mol_type = other DNA
cattctgtgattttttttttttttttagctcgtcagctatcgttagtgttagtgtattctatgtgtggcccaagactattcgtcttctaacgtggcccacagaagccaaagatgggacac

SEQ ID NO: 74163 - DNA, 120 bp, synthetic construct
  source 1..120: mol_type = other DNA
attcagaaatagatgacatggaagctacagattgggttttctgggtaccacaccattctttaactagataagccctcaatttttatccgattcggtttttgcggaataacaggggtcctg

SEQ ID NO: 74164 - DNA, 120 bp, synthetic construct; identical to SEQ ID NO: 12684
  source 1..120: mol_type = other DNA

SEQ ID NO: 74165 - DNA, 120 bp, synthetic construct; identical to SEQ ID NO: 12685
  source 1..120: mol_type = other DNA

SEQ ID NO: 74166 - DNA, 120 bp, synthetic construct; identical to SEQ ID NO: 12680
  source 1..120: mol_type = other DNA

SEQ ID NO: 74167 - DNA, 120 bp, synthetic construct; identical to SEQ ID NO: 12681
  source 1..120: mol_type = other DNA

SEQ ID NO: 74168 - DNA, 120 bp, synthetic construct; identical to SEQ ID NO: 12391
  source 1..120: mol_type = other DNA

SEQ ID NO: 74169 - DNA, 120 bp, synthetic construct; identical to SEQ ID NO: 30349
  source 1..120: mol_type = other DNA

SEQ ID NO: 74170 - DNA, 120 bp, synthetic construct; identical to SEQ ID NO: 30350
  source 1..120: mol_type = other DNA

SEQ ID NO: 74171 - DNA, 120 bp, synthetic construct; identical to SEQ ID NO: 30351
  source 1..120: mol_type = other DNA

SEQ ID NO: 74172 - DNA, 120 bp, synthetic construct; identical to SEQ ID NO: 30352
  source 1..120: mol_type = other DNA

SEQ ID NO: 74173 - DNA, 120 bp, synthetic construct; identical to SEQ ID NO: 30353
  source 1..120: mol_type = other DNA

SEQ ID NO: 74174 - DNA, 120 bp, synthetic construct; identical to SEQ ID NO: 30354
  source 1..120: mol_type = other DNA

SEQ ID NO: 74175 - DNA, 120 bp, synthetic construct; identical to SEQ ID NO: 30355
  source 1..120: mol_type = other DNA

SEQ ID NO: 74176 - DNA, 120 bp, synthetic construct; identical to SEQ ID NO: 30356
  source 1..120: mol_type = other DNA

SEQ ID NO: 74177 - DNA, 120 bp, synthetic construct; identical to SEQ ID NO: 30357
  source 1..120: mol_type = other DNA

SEQ ID NO: 74178 - DNA, 120 bp, synthetic construct; identical to SEQ ID NO: 30358
  source 1..120: mol_type = other DNA

SEQ ID NO: 74179 - DNA, 120 bp, synthetic construct; identical to SEQ ID NO: 30359
  source 1..120: mol_type = other DNA

SEQ ID NO: 74180 - DNA, 120 bp, synthetic construct; identical to SEQ ID NO: 30360
  source 1..120: mol_type = other DNA

SEQ ID NO: 74181 - DNA, 120 bp, synthetic construct; identical to SEQ ID NO: 30361
  source 1..120: mol_type = other DNA

SEQ ID NO: 74182 - DNA, 120 bp, synthetic construct
  source 1..120: mol_type = other DNA
ttacccaacctaaacaagagaagaaaatgaactgatttaaaaaaaaaaaaaaaaaaaagtggccaggtgcggtcgctcaggcctgtaatcctagcattttgggaggccgagatgggtgga

SEQ ID NO: 74183 - DNA, 120 bp, synthetic construct; identical to SEQ ID NO: 1699
  source 1..120: mol_type = other DNA

SEQ ID NO: 74184 - DNA, 120 bp, synthetic construct
  source 1..120: mol_type = other DNA
ctgggtttaagcgattctctgtctcggcctcccccgtagatgggactgcaggtgcctgctaccatgcccggctgatttttgtatttttagtagagacggggtttcacaatcttggccatg

SEQ ID NO: 74185 - DNA, 120 bp, synthetic construct
  source 1..120: mol_type = other DNA
tgaagtccacaaatgcaagtcaaaatcactgctgacactattatataatagttcactaaaacatgacagatttaaatattttctgcaaagtacctgctaataaataatacagtaaataat

SEQ ID NO: 74186 - DNA, 120 bp, synthetic construct
  source 1..120: mol_type = other DNA
gggcaatatgtgtggcgcgcacacacacacacacatactgacaaactgtaactatgtcattgtgattcgtagcatgcagagcagcaatttgaaatatatgtgctctctgcagcaaccaac

SEQ ID NO: 74187 - DNA, 120 bp, synthetic construct; identical to SEQ ID NO: 30367
  source 1..120: mol_type = other DNA

SEQ ID NO: 74188 - DNA, 120 bp, synthetic construct; identical to SEQ ID NO: 30368
  source 1..120: mol_type = other DNA

SEQ ID NO: 74189 - DNA, 120 bp, synthetic construct
  source 1..120: mol_type = other DNA
tctcttaaggtttatccttcctcttaaactataaagagctggccgggcacagtggctcacgcttgtaatgccagcactttgggaggctgaggcgggtggatcacgaggtcaagagattga

SEQ ID NO: 74190 - DNA, 120 bp, synthetic construct
  source 1..120: mol_type = other DNA
taaggtctaaaaactcttaaaacttcaaagctgaattatacaatgatatattacaggcccagtgtagtggctcatgcctgtaatcccagcactttgggaagccgaggcaggtggatcatg

SEQ ID NO: 74191 - DNA, 120 bp, synthetic construct
  source 1..120: mol_type = other DNA
actccagcctgggcgacagagtgagactgtctcaaacacacaaacaaaaaaaaggggggtggggggggggggacaatatgaaataaaagaataatatgaaaaaagaataaaacaaagaac

SEQ ID NO: 74192 - DNA, 120 bp, synthetic construct
  source 1..120: mol_type = other DNA
ttaaaaattaaggtgaccagccgggcgtagtggctcacacctgtaatcccagcactctgagaggccgaggcaggcagatcacctgaggtagggagttcgagaccagcctgaccaacatgg

SEQ ID NO: 74193 - DNA, 120 bp, synthetic construct; identical to SEQ ID NO: 30370
  source 1..120: mol_type = other DNA

SEQ ID NO: 74194 - DNA, 120 bp, synthetic construct
  source 1..120: mol_type = other DNA
acgtatcaatgagtaatttcaatttttaagtcttactgtttaagaaatacatttcggccaggtacggtggctcatgcctgtaatcccagcactctgggatgccaaggcaggcggatcact

SEQ ID NO: 74195 - DNA, 120 bp, synthetic construct; identical to SEQ ID NO: 30371
  source 1..120: mol_type = other DNA

SEQ ID NO: 74196 - DNA, 120 bp, synthetic construct
  source 1..120: mol_type = other DNA
catcttttcattctttcagttgaaccactttttccaaaacactgtgcagatataaaaaatacgtagttaaggccagggtgcagtggctcatgcctgtattcccagcacttcgggagtcca

SEQ ID NO: 74197 - DNA, 120 bp, synthetic construct
  source 1..120: mol_type = other DNA
ggaggcagaagttgcagtgagctgagatcacaccactacactacttcactccaggatgggcaacagagcgagactccatctccaaaaaaaaaaacaaaacaaaacaaaaaacaaaacaaa

SEQ ID NO: 74198 - DNA, 120 bp, synthetic construct; identical to SEQ ID NO: 30372
  source 1..120: mol_type = other DNA

SEQ ID NO: 74199 - DNA, 120 bp, synthetic construct; identical to SEQ ID NO: 30373
  source 1..120: mol_type = other DNA

SEQ ID NO: 74200 - DNA, 120 bp, synthetic construct; identical to SEQ ID NO: 30374
  source 1..120: mol_type = other DNA

SEQ ID NO: 74201 - DNA, 120 bp, synthetic construct; identical to SEQ ID NO: 30375
  source 1..120: mol_type = other DNA

SEQ ID NO: 74202 - DNA, 120 bp, synthetic construct; identical to SEQ ID NO: 30376
  source 1..120: mol_type = other DNA

SEQ ID NO: 74203 - DNA, 120 bp, synthetic construct
  source 1..120: mol_type = other DNA
cttcactttttagaactacattctctaatatttataaacgatatcacattatgcctgaggccaggtgcagtggctcatgcctgtaatcccagcactttgggaggctgaggcgggtgaatc

SEQ ID NO: 74204 - DNA, 120 bp, synthetic construct; identical to SEQ ID NO: 30377
  source 1..120: mol_type = other DNA

SEQ ID NO: 74205 - DNA, 120 bp, synthetic construct
  source 1..120: mol_type = other DNA
tatacatctatttacaagtaagtctgtttaaatacacatatccacacctgctaaataaataagtatgctctggccaggcgtggtggatcacgcctgtaatcccaacactttggaatgccg

SEQ ID NO: 74206 - DNA, 120 bp, synthetic construct
  source 1..120: mol_type = other DNA
ccgagactgcagtgagcagagatcgtgcagcctggtgacagagtgagactccgtctcaaaaaaaaaaaaaaaaaaaatactgtcacttacgtcactcagtttgtggtattttgttatggt

SEQ ID NO: 74207 - DNA, 120 bp, synthetic construct; identical to SEQ ID NO: 30326
  source 1..120: mol_type = other DNA

SEQ ID NO: 74208 - DNA, 120 bp, synthetic construct; identical to SEQ ID NO: 30327
  source 1..120: mol_type = other DNA

SEQ ID NO: 74209 - DNA, 120 bp, synthetic construct; identical to SEQ ID NO: 30328
  source 1..120: mol_type = other DNA

SEQ ID NO: 74210 - DNA, 120 bp, synthetic construct
  source 1..120: mol_type = other DNA
ttcacggcattctcctgcctcagcctcccgagtagctgggactacaggtgcctgccaccatgcctggctaattttttgtatttttagtagagatgaggtttcaccatgttagccaggatg

SEQ ID NO: 74211 - DNA, 120 bp, synthetic construct; identical to SEQ ID NO: 30329
  source 1..120: mol_type = other DNA

SEQ ID NO: 74212 - DNA, 120 bp, synthetic construct; identical to SEQ ID NO: 30330
  source 1..120: mol_type = other DNA

SEQ ID NO: 74213 - DNA, 120 bp, synthetic construct; identical to SEQ ID NO: 30331
  source 1..120: mol_type = other DNA

SEQ ID NO: 74214 - DNA, 120 bp, synthetic construct; identical to SEQ ID NO: 30332
  source 1..120: mol_type = other DNA

SEQ ID NO: 74215 - DNA, 120 bp, synthetic construct
  source 1..120: mol_type = other DNA
ccaaagtgctgggattacaggcatgagccactgcgcccggccgagtttgttttgtttttaaattggtataaaagatttttgaaaaattaagttagtgattaaaaatcgagactacagtaa

SEQ ID NO: 74216 - DNA, 120 bp, synthetic construct; identical to SEQ ID NO: 30333
  source 1..120: mol_type = other DNA

SEQ ID NO: 74217 - DNA, 120 bp, synthetic construct; identical to SEQ ID NO: 30334
  source 1..120: mol_type = other DNA

SEQ ID NO: 74218 - DNA, 120 bp, synthetic construct; identical to SEQ ID NO: 30335
  source 1..120: mol_type = other DNA

SEQ ID NO: 74219 - DNA, 120 bp, synthetic construct
  source 1..120: mol_type = other DNA
ttaagaaaaaaatctgttggccgagcgcggtggctcatgcctgtaatcccaacactttgggaggctgaagcaggcagatcacctgcctgaccaatagagagaaaccctgtctctactaaa

SEQ ID NO: 74220 - DNA, 120 bp, synthetic construct
  source 1..120: mol_type = other DNA
ttaaagaccagcctggccaacatggagaagccccgtctctactaaaaatacaaaaatttgccaagcacggtggtacgcacctgtagtcccagctacttggaaggctgaggtaggagaata

SEQ ID NO: 74221 - DNA, 120 bp, synthetic construct; identical to SEQ ID NO: 2224
  source 1..120: mol_type = other DNA

SEQ ID NO: 74222 - DNA, 120 bp, synthetic construct
  source 1..120: mol_type = other DNA
actcgtacctttatcacagcaacactcacaatagcaaagatagggaatcaatctccatatccatcaacagacgactggataaagaaaaactgggacacatacacacacacacacacacac

SEQ ID NO: 74223 - DNA, 120 bp, synthetic construct
  source 1..120: mol_type = other DNA
gaaaccctgtctctactaaaaatacaaaaattagccaggcgtggtggtgcacatctgtaatccagctactcagaaggcggaggcaggaaaatctgaatccgggaggcagaggttgcagtg

SEQ ID NO: 74224 - DNA, 120 bp, synthetic construct
  source 1..120: mol_type = other DNA
ctcatgtgatctgcccaccttggcctcccaaagtgctgggattacaggcaggagccactacacgctgcctagttcactttgcattctattttttcctttgtaccttttagaagaagcttt

SEQ ID NO: 74225 - DNA, 120 bp, synthetic construct
  source 1..120: mol_type = other DNA
gtccagggtgcaatgagccatgatcacaccactgtactcccgcctgagagacagagtgagaacctgtctcaaaaaaaaaaaaggcatcaaaaatggctaaaagaaaatcttaaacaaacc

SEQ ID NO: 74226 - DNA, 120 bp, synthetic construct
  source 1..120: mol_type = other DNA
tcacgcctgtaatcctatcactttgggaggccaagacaggcagatcacttgaggtcaggagttcgaaaccagcctggccaacatgataaaaccggtctctactaaaaatacaaaaactta

SEQ ID NO: 74227 - DNA, 120 bp, synthetic construct; identical to SEQ ID NO: 1704
  source 1..120: mol_type = other DNA

SEQ ID NO: 74228 - DNA, 120 bp, synthetic construct
  source 1..120: mol_type = other DNA
tgtaattaaattctggtaatcagattttcagaagaaatatgttaaaatgctggttaagtgggccaggtgcagtggctcacgcctgtaatcccagcattttgggaggccgaggcaggtgca

SEQ ID NO: 74229 - DNA, 120 bp, synthetic construct
  source 1..120: mol_type = other DNA
tgggcgacggaggaagaccctgtctcaaaaaaaaaaaaaaaaattagccaggtgtggaagcacacccctgtaatcccagctactcaggaggctgaggcagcagaatcgcttgaacctggg

SEQ ID NO: 74230 - DNA, 120 bp, synthetic construct; identical to SEQ ID NO: 1705
  source 1..120: mol_type = other DNA

SEQ ID NO: 74231 - DNA, 120 bp, synthetic construct
  source 1..120: mol_type = other DNA
agctgagatcctgccactgcactccagcctgggcgacagagcaagactccctctcaaaaaaaaatttttttaatgttgcaaccaatttttcttcctcatatttatagatgtttatcatgt

SEQ ID NO: 74232 - DNA, 120 bp, synthetic construct; identical to SEQ ID NO: 2643
  source 1..120: mol_type = other DNA

SEQ ID NO: 74233 - DNA, 120 bp, synthetic construct
  source 1..120: mol_type = other DNA
gctgaggcaggagtatcgtttgaacctgggaggcgaaggttgccatgagccgagattgtgccatcacactccagcctgggcaacaagcacgaaactctgtctcaaaaaaagaaagaaaca

SEQ ID NO: 74234 - DNA, 120 bp, synthetic construct
  source 1..120: mol_type = other DNA
acagctccggcccggcgccgccgctggctcccggcctggctccctcgcactcaacttacttctttctggctctctggaaaggggaagcgccatctttgcgaggccggccccgaggtcttt

SEQ ID NO: 74235 - DNA, 120 bp, synthetic construct; identical to SEQ ID NO: 30336
  source 1..120: mol_type = other DNA

SEQ ID NO: 74236 - DNA, 120 bp, synthetic construct; identical to SEQ ID NO: 30337
  source 1..120: mol_type = other DNA

SEQ ID NO: 74237 - DNA, 120 bp, synthetic construct; identical to SEQ ID NO: 30338
  source 1..120: mol_type = other DNA

SEQ ID NO: 74238 - DNA, 120 bp, synthetic construct
  source 1..120: mol_type = other DNA
cacactgaaagaagaagaattgtcttgggccacacacaagatacactaacactaacgatagccgatgagctacacacacacgcacacacacacacacacacaaaaaaaacacctcataat

SEQ ID NO: 74239 - DNA, 120 bp, synthetic construct
  source 1..120: mol_type = other DNA
aagcaattctcctgtctcggcatcctgagtagctgggattacatggcacccactatcatgcctggctaatttttgtatttttattacagacagggtttcaccatgttggccaggctgatc

SEQ ID NO: 74240 - DNA, 120 bp, synthetic construct; identical to SEQ ID NO: 30340
  source 1..120: mol_type = other DNA

SEQ ID NO: 74241 - DNA, 120 bp, synthetic construct; identical to SEQ ID NO: 30341
  source 1..120: mol_type = other DNA

SEQ ID NO: 74242 - DNA, 120 bp, synthetic construct; identical to SEQ ID NO: 30342
  source 1..120: mol_type = other DNA

SEQ ID NO: 74243 - DNA, 120 bp, synthetic construct; identical to SEQ ID NO: 30343
  source 1..120: mol_type = other DNA

SEQ ID NO: 74244 - DNA, 120 bp, synthetic construct; identical to SEQ ID NO: 30344
  source 1..120: mol_type = other DNA

SEQ ID NO: 74245 - DNA, 120 bp, synthetic construct; identical to SEQ ID NO: 30345
  source 1..120: mol_type = other DNA

SEQ ID NO: 74246 - DNA, 120 bp, synthetic construct; identical to SEQ ID NO: 30346
  source 1..120: mol_type = other DNA

SEQ ID NO: 74247 - DNA, 120 bp, synthetic construct
  source 1..120: mol_type = other DNA
aagaaggaccaaatcagcattgctttctaatttccatcacaccctatcatctgccaattttcatcactggcaggacactgtgctgagtgatttgtctataaaagagaatctctgggaaga

SEQ ID NO: 74248 - DNA, 120 bp, synthetic construct; identical to SEQ ID NO: 12913
  source 1..120: mol_type = other DNA

SEQ ID NO: 74249 - DNA, 120 bp, synthetic construct; identical to SEQ ID NO: 12914
  source 1..120: mol_type = other DNA

SEQ ID NO: 74250 - DNA, 120 bp, synthetic construct; identical to SEQ ID NO: 12915
  source 1..120: mol_type = other DNA

SEQ ID NO: 74251 - DNA, 120 bp, synthetic construct
  source 1..120: mol_type = other DNA
gattcaatgcctgtgaaactctcggtgggcacagcgccgggcacacccgagggcctggcctggcgcgttcaccgctgctgatttcgtctggcacagaccgggttcccaaaatatccgcag

SEQ ID NO: 74252 - DNA, 120 bp, synthetic construct; identical to SEQ ID NO: 13315
  source 1..120: mol_type = other DNA

SEQ ID NO: 74253 - DNA, 120 bp, synthetic construct; identical to SEQ ID NO: 13316
  source 1..120: mol_type = other DNA

SEQ ID NO: 74254 - DNA, 120 bp, synthetic construct
  source 1..120: mol_type = other DNA
gacggccgtagccacatcatccaggttcttcctgtggggactcacctgtgtaatcctcgaggaaaacgacgtgcctttggatgagataattaggtccaggctcccataggaagccccaga

SEQ ID NO: 74255 - DNA, 120 bp, synthetic construct
  source 1..120: mol_type = other DNA
gttcctcggggaatgtggccgtgtggaactgctgtcacctgggaggtgtatgttgagcttttcaaggaacggcagcactgtcgtctgcagtggctgcaccgtgggacgttcccacccaca

SEQ ID NO: 74256 - DNA, 120 bp, synthetic construct
  source 1..120: mol_type = other DNA
accctgccagtgactggggccaaccccatgttggcttatgggacccttatgacaccaccttggagccccaagggtcctctctgagcagaggccatggggcccagcaaaggacgccaagga

SEQ ID NO: 74257 - DNA, 120 bp, synthetic construct; identical to SEQ ID NO: 11470
  source 1..120: mol_type = other DNA

SEQ ID NO: 74258 - DNA, 120 bp, synthetic construct; identical to SEQ ID NO: 11471
  source 1..120: mol_type = other DNA

SEQ ID NO: 74259 - DNA, 120 bp, synthetic construct; identical to SEQ ID NO: 11472
  source 1..120: mol_type = other DNA

SEQ ID NO: 74260 - DNA, 120 bp, synthetic construct; identical to SEQ ID NO: 11473
  source 1..120: mol_type = other DNA

SEQ ID NO: 74261 - DNA, 120 bp, synthetic construct; identical to SEQ ID NO: 11474
  source 1..120: mol_type = other DNA

SEQ ID NO: 74262 - DNA, 120 bp, synthetic construct; identical to SEQ ID NO: 24946
  source 1..120: mol_type = other DNA

SEQ ID NO: 74263 - DNA, 120 bp, synthetic construct; identical to SEQ ID NO: 24947
  source 1..120: mol_type = other DNA

SEQ ID NO: 74264 - DNA, 120 bp, synthetic construct
  source 1..120: mol_type = other DNA
ttggatctttttgtgacctggtgtaaaaacaattaaaaatatttgtatgatactggccgggcacggtagctcatgcctgtaatcccagcattttggtgggtggatcacttgagatcagga

SEQ ID NO: 74265 - DNA, 120 bp, synthetic construct
  source 1..120: mol_type = other DNA
gggggaaggaagggaagggaaggataggataacataagctgggttctagtgttgtcattatttagagatggggtctcacttcctcaccatgcccagctaaagtttaaaaactgttttaaa

SEQ ID NO: 74266 - DNA, 120 bp, synthetic construct; identical to SEQ ID NO: 16269
  source 1..120: mol_type = other DNA

SEQ ID NO: 74267 - DNA, 120 bp, synthetic construct; identical to SEQ ID NO: 16270
  source 1..120: mol_type = other DNA

SEQ ID NO: 74268 - DNA, 120 bp, synthetic construct
  source 1..120: mol_type = other DNA
ccaaagtgctaggattacaggtgtgagccaccacacttggccaatagttggatttttaaacccctaaggatagatacctcccaacttctctcagtccatttcagtaatgttttttgctgt

SEQ ID NO: 74269 - DNA, 120 bp, synthetic construct; identical to SEQ ID NO: 13725
  source 1..120: mol_type = other DNA

SEQ ID NO: 74270 - DNA, 120 bp, synthetic construct
  source 1..120: mol_type = other DNA
tgagaagtgaggagcccctccgcccagcagccgccccgtctgtgaagtgaggagcccctccgcccggcagccgccccgtctgggaagtcaggagcatctccgcccggcagacgccccatc

SEQ ID NO: 74271 - DNA, 120 bp, synthetic construct; identical to SEQ ID NO: 13726
  source 1..120: mol_type = other DNA

SEQ ID NO: 74272 - DNA, 120 bp, synthetic construct
  source 1..120: mol_type = other DNA
tgagtagattgcaaaaattttctcccattttgtaggttgcctgttcactctgatggtcgtttcttttgctgtgcagaagctctttagtttaattagatcccatttgtcaattttggcttt

SEQ ID NO: 74273 - DNA, 120 bp, synthetic construct
  source 1..120: mol_type = other DNA
gtaagttggattcctaggtattttattctctttgaagcaattgtgaatgggagttcactcatgatttggctctctgtttgtctgttattggtgtataagaatgcttgtgatttttgcaca

SEQ ID NO: 74274 - DNA, 120 bp, synthetic construct; identical to SEQ ID NO: 28231
  source 1..120: mol_type = other DNA

SEQ ID NO: 74275 - DNA, 120 bp, synthetic construct
  source 1..120: mol_type = other DNA
gtccctgtttgcagatgacatgattgtatatctagaaaaccccattgtctaagcccaaaatctccttaagctgataagcaacttcagcaaagtctcaggatacaaaatcaatgtacaaaa

SEQ ID NO: 74276 - DNA, 120 bp, synthetic construct
  source 1..120: mol_type = other DNA
cagacacttctcaaaagaagacatttatgcagccaaaaaacacatgaaaaaatgctcaccatcactggccatcagacaaatgcaaatcaaaaccacaatgagataccatctcacaccagt

SEQ ID NO: 74277 - DNA, 120 bp, synthetic construct
  source 1..120: mol_type = other DNA
ggatgacttgaacccaggagttagagaacagcctgggcaatatagcaagaccctgtctctactaaaaatacaaacattggccaggtgtggtggcatctggctgtagtgccagtgattcag

SEQ ID NO: 74278 - DNA, 120 bp, synthetic construct; identical to SEQ ID NO: 29745
  source 1..120: mol_type = other DNA

SEQ ID NO: 74279 - DNA, 120 bp, synthetic construct; identical to SEQ ID NO: 33790
  source 1..120: mol_type = other DNA

SEQ ID NO: 74280 - DNA, 120 bp, synthetic construct
  source 1..120: mol_type = other DNA
aatttgctagagtgagtttcagtttccctgagtttcccctatttgttataaaggatattacaggcaaagcgcggtggctcattaatcccagcactttgggaggccaaggcgggcggatca

SEQ ID NO: 74281 - DNA, 120 bp, synthetic construct; identical to SEQ ID NO: 33791
  source 1..120: mol_type = other DNA

SEQ ID NO: 74282 - DNA, 120 bp, synthetic construct; identical to SEQ ID NO: 16432
  source 1..120: mol_type = other DNA

SEQ ID NO: 74283 - DNA, 120 bp, synthetic construct; identical to SEQ ID NO: 16433
  source 1..120: mol_type = other DNA

SEQ ID NO: 74284 - DNA, 120 bp, synthetic construct; identical to SEQ ID NO: 23712
  source 1..120: mol_type = other DNA

SEQ ID NO: 74285 - DNA, 120 bp, synthetic construct; identical to SEQ ID NO: 23713
  source 1..120: mol_type = other DNA

SEQ ID NO: 74286 - DNA, 120 bp, synthetic construct
  source 1..120: mol_type = other DNA
tattgtcatcaggcaaggaagcatggggaagggactgaagcagggggctgaggctggagaggccggagactgtggggcagatggggcggctgcctccctgcctcctgggtggccggccgg

SEQ ID NO: 74287 - DNA, 120 bp, synthetic construct
  source 1..120: mol_type = other DNA
tcctcagtgctaatgagtcacttctccctgctgagggacagccatcaactcctggagctcctggggaccctgccccagcaacgtgcaggtgggctgcctgtcccatgcacccaaccccca

SEQ ID NO: 74288 - DNA, 120 bp, synthetic construct
  source 1..120: mol_type = other DNA
ccatgtctgttgatgcagtgggtgaccctgtggtccatgcagcttactgaggaggggcacctccaagacatctggccgtgggcttactgtcagtgctaaggcccctgagccccagcccct

SEQ ID NO: 74289 - DNA, 120 bp, synthetic construct
  source 1..120: mol_type = other DNA
catccagcaccctgcgcaggccattgatgtcggcctccacactcaggcgcagggcctgctctgtctcaaacctgccgtgggaatcagagacttcagcccaggctgcttggacctgcagat

SEQ ID NO: 74290 - DNA, 120 bp, synthetic construct
  source 1..120: mol_type = other DNA
ggctaaaggagccctcattaaagagtggttccaaatcaaaagtcaggacccctcctaatccctaaccctgggcgccagccagcagccccgccccctggggtttgctgagcccgtcttaag

SEQ ID NO: 74291 - DNA, 120 bp, synthetic construct
  source 1..120: mol_type = other DNA
aaagctgtagcagctggagtagctgctacccccgagggtgctgcccaggccgccagcagatcccagcctgcaggagccggcacccaggccgccagacagccggcaggaggtgcgggacga

SEQ ID NO: 74292 - DNA, 120 bp, synthetic construct; identical to SEQ ID NO: 18000
  source 1..120: mol_type = other DNA

SEQ ID NO: 74293 - DNA, 120 bp, synthetic construct
  source 1..120: mol_type = other DNA
gagagtttgagagccagtggaaagtaagtggaagttgttctgaaataagcccctggcaattttctgcaatgaaaaggagcagaggtcattttcttataatgctcagcctcagagatagaa

SEQ ID NO: 74294 - DNA, 120 bp, synthetic construct
  source 1..120: mol_type = other DNA
aagatggactcagctgttgaaggagttcgtgtcagttacccacctgcactcctcaccctccagcagcttgcggtaggtggcgatctccacgtccagggccagcttgacattcatcagctc

SEQ ID NO: 74295 - DNA, 120 bp, synthetic construct
  source 1..120: mol_type = other DNA
tctagaccaagcttgtccaacctacagcccacaggccacatgcagcccaggatggctttaaatgcagcccaacacaaattcttaaactttctgaatacattatgagggttttttcttttt

SEQ ID NO: 74296 - DNA, 120 bp, synthetic construct
  source 1..120: mol_type = other DNA
cagtgtctacgggttcttacctgggagcgatgactttcacttgtgtatcatgcatgtcatgaagtggacctaaaggcttctcctcaagaaacttgaggaaaagttgatattatgtggttg

SEQ ID NO: 74297 - DNA, 120 bp, synthetic construct
  source 1..120: mol_type = other DNA
tttgaacccccggcttcatctgctcaccttcttcagagtcacaaattcattctctgctgctgtgcgcttgttgatttcatcctcatatctacaggaagaaaggcatgggacacatttgag

SEQ ID NO: 74298 - DNA, 120 bp, synthetic construct
  source 1..120: mol_type = other DNA
aaccccttctcctttgtaccccaccaatctcactagaggaattgtcccacggaccattcaggtgttctcactctctaagttattggacatattaatgagtttcaacatgtcttttccttc

SEQ ID NO: 74299 - DNA, 120 bp, synthetic construct
  source 1..120: mol_type = other DNA
cttgatctgttcacgctcctcagcccgcacccgctggatggtgggatcgatttgcaggttgaggggagtcaggagactctggttgacggtgacctcttggatgcctccaggggggcacac

SEQ ID NO: 74300 - DNA, 120 bp, synthetic construct; identical to SEQ ID NO: 12952
  source 1..120: mol_type = other DNA

SEQ ID NO: 74301 - DNA, 120 bp, synthetic construct; identical to SEQ ID NO: 12953
  source 1..120: mol_type = other DNA

SEQ ID NO: 74302 - DNA, 120 bp, synthetic construct; identical to SEQ ID NO: 12954
  source 1..120: mol_type = other DNA

SEQ ID NO: 74303 - DNA, 120 bp, synthetic construct; identical to SEQ ID NO: 12955
  source 1..120: mol_type = other DNA

SEQ ID NO: 74304 - DNA, 120 bp, synthetic construct; identical to SEQ ID NO: 12956
  source 1..120: mol_type = other DNA

SEQ ID NO: 74305 - DNA, 120 bp, synthetic construct; identical to SEQ ID NO: 12948
  source 1..120: mol_type = other DNA

SEQ ID NO: 74306 - DNA, 120 bp, synthetic construct; identical to SEQ ID NO: 12949
  source 1..120: mol_type = other DNA

SEQ ID NO: 74307 - DNA, 120 bp, synthetic construct; identical to SEQ ID NO: 12950
  source 1..120: mol_type = other DNA

SEQ ID NO: 74308 - DNA, 120 bp, synthetic construct; identical to SEQ ID NO: 12951
  source 1..120: mol_type = other DNA

SEQ ID NO: 74309 - DNA, 120 bp, synthetic construct; identical to SEQ ID NO: 17827
  source 1..120: mol_type = other DNA

SEQ ID NO: 74310 - DNA, 120 bp, synthetic construct
  source 1..120: mol_type = other DNA
tggtggctcacacctgtaatcctatcctggatcccttgagtcaaggagtttgagaccaatgtgaacaacatagtgagaccctgtctctacaaaaaataaaatattagccaggggtggttg

SEQ ID NO: 74311 - DNA, 120 bp, synthetic construct
  source 1..120: mol_type = other DNA
cccagcactttgggaggcagagacggacgtatcgcttgagctcaggagttccagaccagcctgggcgacatactgagactctgtcttgtataattaaattaaaatttaaaaaaagaagag

SEQ ID NO: 74312 - DNA, 120 bp, synthetic construct; identical to SEQ ID NO: 17828
  source 1..120: mol_type = other DNA

SEQ ID NO: 74313 - DNA, 120 bp, synthetic construct; identical to SEQ ID NO: 17829
  source 1..120: mol_type = other DNA

SEQ ID NO: 74314 - DNA, 120 bp, synthetic construct; identical to SEQ ID NO: 17830
  source 1..120: mol_type = other DNA

SEQ ID NO: 74315 - DNA, 120 bp, synthetic construct
  source 1..120: mol_type = other DNA
cctttgcagggacatggataaatctggaaacgattatcctcagcaaactaacgcaggaagagaaaaccaaacacagcgtgttctcacttataagtgggagatgaacaaacggcttatttt

SEQ ID NO: 74316 - DNA, 120 bp, synthetic construct; identical to SEQ ID NO: 13253
  source 1..120: mol_type = other DNA

SEQ ID NO: 74317 - DNA, 120 bp, synthetic construct
  source 1..120: mol_type = other DNA
gcaccccgataggccccagtgtgtgatgttccctccctgtgtccaagtgatctcattggtcaggtcctgcctatgagtgagaacatacagtgtttggttttctgtccttgtgactagttt

SEQ ID NO: 74318 - DNA, 120 bp, synthetic construct; identical to SEQ ID NO: 13254
  source 1..120: mol_type = other DNA

SEQ ID NO: 74319 - DNA, 120 bp, synthetic construct; identical to SEQ ID NO: 13255
  source 1..120: mol_type = other DNA

SEQ ID NO: 74320 - DNA, 120 bp, synthetic construct; identical to SEQ ID NO: 13256
  source 1..120: mol_type = other DNA

SEQ ID NO: 74321 - DNA, 120 bp, synthetic construct; identical to SEQ ID NO: 13257
  source 1..120: mol_type = other DNA

SEQ ID NO: 74322 - DNA, 120 bp, synthetic construct; identical to SEQ ID NO: 13258
  source 1..120: mol_type = other DNA

SEQ ID NO: 74323 - DNA, 120 bp, synthetic construct; identical to SEQ ID NO: 13259
  source 1..120: mol_type = other DNA

SEQ ID NO: 74324 - DNA, 120 bp, synthetic construct; identical to SEQ ID NO: 13260
  source 1..120: mol_type = other DNA

SEQ ID NO: 74325 - DNA, 120 bp, synthetic construct
  source 1..120: mol_type = other DNA
attacttgaggccaggagttcctggccagcctgggcaacacagagagatctcatccctaaaaaaaaattaataaaaaattagctaagtgatatggtttggctctgtgtccccacacaaat

SEQ ID NO: 74326 - DNA, 120 bp, synthetic construct; identical to SEQ ID NO: 24736
  source 1..120: mol_type = other DNA

SEQ ID NO: 74327 - DNA, 120 bp, synthetic construct; identical to SEQ ID NO: 33025
  source 1..120: mol_type = other DNA

SEQ ID NO: 74328 - DNA, 120 bp, synthetic construct; identical to SEQ ID NO: 21636
  source 1..120: mol_type = other DNA

SEQ ID NO: 74329 - DNA, 120 bp, synthetic construct; identical to SEQ ID NO: 21637
  source 1..120: mol_type = other DNA

SEQ ID NO: 74330 - DNA, 120 bp, synthetic construct
  source 1..120: mol_type = other DNA
acgcagagcgtctctcctcctccaaaggaacgcagttcttcaccagcaacggaacaaagctggatggagaatgactttgacgagctgagagaagaaggcttcagacgatcaaattactct

SEQ ID NO: 74331 - DNA, 120 bp, synthetic construct
  source 1..120: mol_type = other DNA
aaatgtaaagaccatcaagactaggaagaaactgcatcaactaacgtgcaaaatcaccagctaacatcataatgacaggatcaaattcacacataacaatattaactttaaatgtaaatg

SEQ ID NO: 74332 - DNA, 120 bp, synthetic construct
  source 1..120: mol_type = other DNA
atattcaaaagctagcagaaggcaagaaataactaaaatcagagcagaactgaaggaaatagagacacaaaaaacccttcaaaaaaatcaatgaatccaggagctggttttttgaaagga

SEQ ID NO: 74333 - DNA, 120 bp, synthetic construct
  source 1..120: mol_type = other DNA
ctattcaacttagtgttggaagttctggccagggcagttaggcaagagaaggaaataaagggtacccaattaggaaaagaggaagtcaaattgtccctgtttgcagatgacatgattcta

SEQ ID NO: 74334 - DNA, 120 bp, synthetic construct
  source 1..120: mol_type = other DNA
cataaaaaccctagaagaaaacctaggcatggccattcaggacataggcatgggcaaggacttcatgtgcaaaacaccaaaagcaatggcaaccaaagccaaaattgacaaatgggatct

SEQ ID NO: 74335 - DNA, 120 bp, synthetic construct; identical to SEQ ID NO: 21638
  source 1..120: mol_type = other DNA

SEQ ID NO: 74336 - DNA, 120 bp, synthetic construct
  source 1..120: mol_type = other DNA
tggaatgcaaagggaaaaccccagggaaaaggcgacacagatcaagacagagccgtggagcaagagagaccaagtcggaggtggaggggaggagatggagagccaagtggaaaagccaga

SEQ ID NO: 74337 - DNA, 120 bp, synthetic construct; identical to SEQ ID NO: 14335
  source 1..120: mol_type = other DNA

SEQ ID NO: 74338 - DNA, 120 bp, synthetic construct; identical to SEQ ID NO: 14336
  source 1..120: mol_type = other DNA

SEQ ID NO: 74339 - DNA, 120 bp, synthetic construct; identical to SEQ ID NO: 28309
  source 1..120: mol_type = other DNA

SEQ ID NO: 74340 - DNA, 120 bp, synthetic construct
  source 1..120: mol_type = other DNA
tgaataaacaatttttcttgtttttttctttctgagacacagtctcactttgtcaccgaggctgaagtgcagtggtgcaatcatggctcaccgcagctttgtcctccaaggctaaagtga

SEQ ID NO: 74341 - DNA, 120 bp, synthetic construct; identical to SEQ ID NO: 5837
  source 1..120: mol_type = other DNA

SEQ ID NO: 74342 - DNA, 120 bp, synthetic construct; identical to SEQ ID NO: 18770
  source 1..120: mol_type = other DNA

SEQ ID NO: 74343 - DNA, 120 bp, synthetic construct; identical to SEQ ID NO: 18771
  source 1..120: mol_type = other DNA

SEQ ID NO: 74344 - DNA, 120 bp, synthetic construct; identical to SEQ ID NO: 18772
  source 1..120: mol_type = other DNA

SEQ ID NO: 74345 - DNA, 120 bp, synthetic construct; identical to SEQ ID NO: 18766
  source 1..120: mol_type = other DNA

SEQ ID NO: 74346 - DNA, 120 bp, synthetic construct
  source 1..120: mol_type = other DNA
ttttttggctgcataaatgtcttcttttgagaagtgtctgttcatgtcctttgcccactttttgatggggttgtttgtttttttcttgtaaatttgtttgaattcattgtagattctgga

SEQ ID NO: 74347 - DNA, 120 bp, synthetic construct; identical to SEQ ID NO: 18767
  source 1..120: mol_type = other DNA

SEQ ID NO: 74348 - DNA, 120 bp, synthetic construct; identical to SEQ ID NO: 18768
  source 1..120: mol_type = other DNA

SEQ ID NO: 74349 - DNA, 120 bp, synthetic construct
  source 1..120: mol_type = other DNA
ggctcaagtgattctcccacttcagcttccaagagtgctgggattacaggcatgagctaccatgcccaaccataaagcacagaattttaagaatagaaaaaatgttaagagttattggca

SEQ ID NO: 74350 - DNA, 120 bp, synthetic construct
  source 1..120: mol_type = other DNA
tgggttggttccaagtctttgctattgtgaatagtgccgcaataaacatacgtgtgcatgtgtctttatagcagcatgatttataatcctttgggtatatacccagtaatgggatgactg

SEQ ID NO: 74351 - DNA, 120 bp, synthetic construct
  source 1..120: mol_type = other DNA
catctacagaactctccaccccaaacaacagaatatacatttttttcagcaccacatcacacctattccaaaattgaccacatagttggaagtaaagcactcctcagcaaatgtaaaaga

SEQ ID NO: 74352 - DNA, 120 bp, synthetic construct
  source 1..120: mol_type = other DNA
aaagagtccaggacaagatggattcacagctgaattctaccagaggtacaaggaggagctggtagcattcttcctgaaactattccaatcaatagaaaaagagggaatcctccctaactc

SEQ ID NO: 74353 - DNA, 120 bp, synthetic construct
  source 1..120: mol_type = other DNA
ttcaaagagaataaaataaataggaatccaacttacaagggatgtgaaggacctcttcaaggagaactacaaaccactgctcaatgaaataaaagaggatacaaacaaatggaagaacat

SEQ ID NO: 74354 - DNA, 120 bp, synthetic construct
  source 1..120: mol_type = other DNA
tatgaacagacacttctcaaaagaagacatttatgcagccaaaaaacacatgaaaaactgcttatcgtcactggtcatcagagaaatgcaaatcaaaaccacaatgagataccatctcac

SEQ ID NO: 74355 - DNA, 120 bp, synthetic construct; identical to SEQ ID NO: 18769
  source 1..120: mol_type = other DNA

SEQ ID NO: 74356 - DNA, 120 bp, synthetic construct; identical to SEQ ID NO: 12965
  source 1..120: mol_type = other DNA

SEQ ID NO: 74357 - DNA, 120 bp, synthetic construct; identical to SEQ ID NO: 15380
  source 1..120: mol_type = other DNA

SEQ ID NO: 74358 - DNA, 120 bp, synthetic construct
  source 1..120: mol_type = other DNA
gcgttaccgctagaccaaggagtccttctggtggccctgtctgggcgtaacagaacgctcgcagtcttgtcttctggtcactcctcactgtgtcccctcagctcctatctctgtatggcc

SEQ ID NO: 74359 - DNA, 120 bp, synthetic construct; identical to SEQ ID NO: 31591
  source 1..120: mol_type = other DNA

SEQ ID NO: 74360 - DNA, 120 bp, synthetic construct; identical to SEQ ID NO: 19982
  source 1..120: mol_type = other DNA

SEQ ID NO: 74361 - DNA, 120 bp, synthetic construct; identical to SEQ ID NO: 19983
  source 1..120: mol_type = other DNA

SEQ ID NO: 74362 - DNA, 120 bp, synthetic construct; identical to SEQ ID NO: 19984
  source 1..120: mol_type = other DNA

SEQ ID NO: 74363 - DNA, 120 bp, synthetic construct; identical to SEQ ID NO: 19985
  source 1..120: mol_type = other DNA

SEQ ID NO: 74364 - DNA, 120 bp, synthetic construct; identical to SEQ ID NO: 19986
  source 1..120: mol_type = other DNA

SEQ ID NO: 74365 - DNA, 120 bp, synthetic construct; identical to SEQ ID NO: 19988
  source 1..120: mol_type = other DNA

SEQ ID NO: 74366 - DNA, 120 bp, synthetic construct
  source 1..120: mol_type = other DNA
ttcccacgcctcctgcaccttctacgtgcatgtgattctcatcactgcagagttttttcccagttgacagtgaggaccctgagacttgctcacaacttgggccttgctcagggtcatgtg

SEQ ID NO: 74367 - DNA, 120 bp, synthetic construct; identical to SEQ ID NO: 19989
  source 1..120: mol_type = other DNA

SEQ ID NO: 74368 - DNA, 120 bp, synthetic construct
  source 1..120: mol_type = other DNA
cgggtgggtggcccctgccccttcatggccttgtgccgttaagcacgaaactttaatttatgttttgcatattagagaggaggaggagttagaggatcagactagtacctcccccattaa

SEQ ID NO: 74369 - DNA, 120 bp, synthetic construct
  source 1..120: mol_type = other DNA
gaggacaaaatacttcctcagtattaataggagcatccctcctttggggttttctaatcagcactgatgtcagcgccgtgtgtacctgaactcaagtctgccctaaacgattctaccagg

SEQ ID NO: 74370 - DNA, 120 bp, synthetic construct; identical to SEQ ID NO: 18774
  source 1..120: mol_type = other DNA

SEQ ID NO: 74371 - DNA, 120 bp, synthetic construct; identical to SEQ ID NO: 18775
  source 1..120: mol_type = other DNA

SEQ ID NO: 74372 - DNA, 120 bp, synthetic construct; identical to SEQ ID NO: 18776
  source 1..120: mol_type = other DNA

SEQ ID NO: 74373 - DNA, 120 bp, synthetic construct
  source 1..120: mol_type = other DNA
ggccgccccgtctgagaagtgaggagaccctctgcccggcaaccgccccgtctgagaagtgaggagcctctccgaccggcagccacccagtctgggaagtgaggagcgtctccgcccggc

SEQ ID NO: 74374 - DNA, 120 bp, synthetic construct; identical to SEQ ID NO: 18777
  source 1..120: mol_type = other DNA

SEQ ID NO: 74375 - DNA, 120 bp, synthetic construct; identical to SEQ ID NO: 28307
  source 1..120: mol_type = other DNA

SEQ ID NO: 74376 - DNA, 120 bp, synthetic construct; identical to SEQ ID NO: 28308
  source 1..120: mol_type = other DNA

SEQ ID NO: 74377 - DNA, 120 bp, synthetic construct
  source 1..120: mol_type = other DNA
gatgttccccttcctgtgtccatgtgatctcattgttcaattcccacctatgattgagaacatgcggtgtttggttttttattcttgtgatagtttgctgagaatgatgatttccaattt

SEQ ID NO: 74378 - DNA, 120 bp, synthetic construct
  source 1..120: mol_type = other DNA
tgactgccattctaactggtgtgagatggtatctcattgtggttttgatttgcatttctctgatggccagtgatgatgagcattttttcatgtgttttttggctgcataaatgtcttctt

SEQ ID NO: 74379 - DNA, 120 bp, synthetic construct
  source 1..120: mol_type = other DNA
cttggcgatgcgggctcttttttggttccatatgaactttaaagtagttttttccaattctgtgaagaaaggcattggtagcttgatggggatggcattgaatctgtaaattaccttggg

SEQ ID NO: 74380 - DNA, 120 bp, synthetic construct
  source 1..120: mol_type = other DNA
aatggtaccagttcctccttgtacctctggtagaattcggctgtgaatccatctggtcctggactctttttggttggtaagctattgattattgtcacaatttcagatcctgttatttgt

SEQ ID NO: 74381 - DNA, 120 bp, synthetic construct
  source 1..120: mol_type = other DNA
gaatctgggtgctcctgtgttgggtgcgtatatatttaggttagttagctcttcttgttgaattgatccctttaccattatgtaatggccttctttgtctcttttgatctttgttggttt

SEQ ID NO: 74382 - DNA, 120 bp, synthetic construct
  source 1..120: mol_type = other DNA
tttctcgagaagtatctttgtggccttctctgtatttcctgaatctgaacgttggcctgccttgctagattggggaagttctcctggataatatcctgcagagtgttttccaacttggtt

SEQ ID NO: 74383 - DNA, 120 bp, synthetic construct
  source 1..120: mol_type = other DNA
gagctgtggtgggctacacccagttcgagcttcccggctgctttgtttacctaatcaagcctgggcaatggcagacgcccctcccccagcctcgctgccgccttgcagtttgatctcaga

SEQ ID NO: 74384 - DNA, 120 bp, synthetic construct; identical to SEQ ID NO: 28301
  source 1..120: mol_type = other DNA

SEQ ID NO: 74385 - DNA, 120 bp, synthetic construct
  source 1..120: mol_type = other DNA
ttacagtcccaccaacagtgtaaaagtgttcctatttctccacatcctctccagcccctgttgtttcctgactttttaatgattgccattctaactggtgtgagatggtatctcattgtg

SEQ ID NO: 74386 - DNA, 120 bp, synthetic construct
  source 1..120: mol_type = other DNA
agttctccttgaagaggtccttcacatcccttgtaagttggattcctaggtattttagaatgtctgttgttttaagccacctagtttgtggtcatttattatggcagtcctagaaaacta

SEQ ID NO: 74387 - DNA, 120 bp, synthetic construct; identical to SEQ ID NO: 28302
  source 1..120: mol_type = other DNA

SEQ ID NO: 74388 - DNA, 120 bp, synthetic construct
  source 1..120: mol_type = other DNA
ttctcccagtacgcagctggagatctgagaatgggcagactgcctcctcaagtgggtccctgactcctgacccccgagcagcctaactgggaggcaccccccagcaggggcacactgaca

SEQ ID NO: 74389 - DNA, 120 bp, synthetic construct
  source 1..120: mol_type = other DNA
gagaaataaaatactttatagacaagcaaatgttgagagattttgtcaccaccaggcctgccctaaaagagctcctgaaggaagcgctaaacatggaaaggaacaaccggtaccagccgc

SEQ ID NO: 74390 - DNA, 120 bp, synthetic construct
  source 1..120: mol_type = other DNA
tgaacaacctgctcctgaatgactactgggtacataacgaaatgaaggcagaaataaagatgttctttgaaaccaacgagaacaaagacaccacataccagaatctctgggacgcattca

SEQ ID NO: 74391 - DNA, 120 bp, synthetic construct; identical to SEQ ID NO: 61796
  source 1..120: mol_type = other DNA

SEQ ID NO: 74392 - DNA, 120 bp, synthetic construct
  source 1..120: mol_type = other DNA
atcaattcaagatggattaaagatttaaacgttaaacctaaaaccataaaaaccctagaagaaaacctaggcattaccattcaggacataggcgtgggcaaggacttcatgtccaaaaca

SEQ ID NO: 74393 - DNA, 120 bp, synthetic construct
  source 1..120: mol_type = other DNA
atggaatactatgcagccataaaaaatgatgagttcatatcctttgtagggacatggatgaaattggaaaccatcattctcagtaaactatcgcaagaacaaaaaaccaaacaccgcata

SEQ ID NO: 74394 - DNA, 120 bp, synthetic construct; identical to SEQ ID NO: 28303
  source 1..120: mol_type = other DNA

SEQ ID NO: 74395 - DNA, 120 bp, synthetic construct; identical to SEQ ID NO: 28304
  source 1..120: mol_type = other DNA

SEQ ID NO: 74396 - DNA, 120 bp, synthetic construct
  source 1..120: mol_type = other DNA
tatcattgttggacatttgggttggttccaagtctttgctattgtggataatgccgcaataaacatacgtgtgcatgtgtcttcatagcagcatgatttacagtcctttgggtatatacc

SEQ ID NO: 74397 - DNA, 120 bp, synthetic construct
  source 1..120: mol_type = other DNA
ctcaggtttgtcaaagatcaggtagttgtacatatgcggcgttatttctgagggctctgttctgttccattgatctatatctctgttttggtaccagtaccatgctgttttggttactgt

SEQ ID NO: 74398 - DNA, 120 bp, synthetic construct
  source 1..120: mol_type = other DNA
ttgatcatggtggataagctttttgatgtgctgctggattcgttttgccagtattttactgaggatttttgcatcaatgttcatcaaggatattggtctaaaattctcttttttggttgt

SEQ ID NO: 74399 - DNA, 120 bp, synthetic construct
  source 1..120: mol_type = other DNA
tgctttgaatgcgtcccagagattctggtatgttgtgtctttgttctcatgggtttcaaagaacatctttatttctgccttcatttcgttatgtacccagtagtcattcaggagcaggtt

SEQ ID NO: 74400 - DNA, 120 bp, synthetic construct
  source 1..120: mol_type = other DNA
ctggtactggttgttcctttccatgtttagtgcttccttcaggagctcttttagggcaggactggtggtgacaaaatctctcagcatttgcttgtctgtaaagtattttatttctccttc

SEQ ID NO: 74401 - DNA, 120 bp, synthetic construct
  source 1..120: mol_type = other DNA
gtggatgtcctttctgtttgttagttttccttctaacagacaggaacctcagctgcaggtctgttgcaataccctgccgtgtgaggtgtcagtgtgcccctgctggggggtgcctcccag

SEQ ID NO: 74402 - DNA, 120 bp, synthetic construct; identical to SEQ ID NO: 28305
  source 1..120: mol_type = other DNA

SEQ ID NO: 74403 - DNA, 120 bp, synthetic construct; identical to SEQ ID NO: 28306
  source 1..120: mol_type = other DNA

SEQ ID NO: 74404 - DNA, 120 bp, synthetic construct
  source 1..120: mol_type = other DNA
ccctatttaataaatggtgctgggaaaactggctagccatatgtagaaagctgaaactggatcccttccttacaccttatacaaaaattaattcaagatggattaaagacttaaatgttg

SEQ ID NO: 74405 - DNA, 120 bp, synthetic construct
  source 1..120: mol_type = other DNA
gagcatttagcccatttacgtttaaggttaatattatgtgtgaatatgatcctgtcattatgatgttagctggttattttgctcgttagttgtttcagtttcttcctagcatcgatggtc

SEQ ID NO: 74406 - DNA, 120 bp, synthetic construct
  source 1..120: mol_type = other DNA
agatgccctgttctgtttctcctttggcaaatgtggcttagtataaagtgtgagcaaatgtcattgaaagagaagacagagcagaatataaataggcgctgcctataaggacgtttctgc

SEQ ID NO: 74407 - DNA, 120 bp, synthetic construct
  source 1..120: mol_type = other DNA
atgtgaaccttacatatttgtagagaaaataaccaattggagtagagacatatgatgtgttgtactacaaaggctttccaacatggacctggattcctccagagtgccagcagcagattc

SEQ ID NO: 74408 - DNA, 120 bp, synthetic construct; identical to SEQ ID NO: 18911
  source 1..120: mol_type = other DNA

SEQ ID NO: 74409 - DNA, 120 bp, synthetic construct; identical to SEQ ID NO: 18912
  source 1..120: mol_type = other DNA

SEQ ID NO: 74410 - DNA, 120 bp, synthetic construct
  source 1..120: mol_type = other DNA
aagactgctcacctaataaatcattaatatcattctctttcctgctttgtacgtttcagaaaactgagaatgaggcacaacgcatacactcacccacaagtagctctacctacatccccc

SEQ ID NO: 74411 - DNA, 120 bp, synthetic construct
  source 1..120: mol_type = other DNA
tgcagtattttattctttcgtttaagaagctataacttaaaccatcttcagaaacaagatctgtcacccgtagagcttagagtccaaatagacacctatgaggcgagcacaaggggcggt

SEQ ID NO: 74412 - DNA, 120 bp, synthetic construct
  source 1..120: mol_type = other DNA
cgacgtagaagacgaagtcgtctggccgcaggttgagcagcccctctgccccaggggccaccgtgtcacccttggtttcctggatcatctgtctctccactgtgacggacatgtggccaa

SEQ ID NO: 74413 - DNA, 120 bp, synthetic construct
  source 1..120: mol_type = other DNA
cctgcttcctttgctgaaggcaatgcaggggagttggggacaatgaggggtaagaaaagaataaaggatgtgatggggtggacagcagggcagggaagggagaagaaaagagggggagta

SEQ ID NO: 74414 - DNA, 120 bp, synthetic construct
  source 1..120: mol_type = other DNA
cgagaccagggtgagggtggtcactctggaagccaggccccttcatgacccctggtctccacttggtgcccgccagatccatctgccccgtgatgcccacctgatgccactccatgctga

SEQ ID NO: 74415 - DNA, 120 bp, synthetic construct; identical to SEQ ID NO: 22675
  source 1..120: mol_type = other DNA

SEQ ID NO: 74416 - DNA, 120 bp, synthetic construct; identical to SEQ ID NO: 22676
  source 1..120: mol_type = other DNA

SEQ ID NO: 74417 - DNA, 120 bp, synthetic construct; identical to SEQ ID NO: 22677
  source 1..120: mol_type = other DNA

SEQ ID NO: 74418 - DNA, 120 bp, synthetic construct; identical to SEQ ID NO: 22678
  source 1..120: mol_type = other DNA

SEQ ID NO: 74419 - DNA, 120 bp, synthetic construct; identical to SEQ ID NO: 22679
  source 1..120: mol_type = other DNA

SEQ ID NO: 74420 - DNA, 120 bp, synthetic construct
  source 1..120: mol_type = other DNA
aagcgtgagtcctgagcaagaaaaaaatcccaatcctcaacacatcacaataaatctgcagaacaccaatggcaaaaagaccataaaaagtcctggagaagaagatgacccacagaggat

SEQ ID NO: 74421 - DNA, 120 bp, synthetic construct
  source 1..120: mol_type = other DNA
tgcctggtgggttccactccctgctgtcacgagctgcgtccccacttggcacttaatttcccaggacaagttagctctgctggagctcagcacctgaagctgtgctggcagcaacaagtg

SEQ ID NO: 74422 - DNA, 120 bp, synthetic construct
  source 1..120: mol_type = other DNA
ccttggtagatacatccacgtggtcaggaaagtgggtgagaaggaaggaagacggtgcaggtgtggagggaggaatgagcagacaggtggacagatggatggaaacaaggaataaagggt

SEQ ID NO: 74423 - DNA, 120 bp, synthetic construct
  source 1..120: mol_type = other DNA
gaaaagacccacctttgagcagttgcagcttgctatttgcttgagctaaaagagtttttgcttcattttgtagcatttcggctttccttctggcatcagctgactcttcagtttttttgg

SEQ ID NO: 74424 - DNA, 120 bp, synthetic construct
  source 1..120: mol_type = other DNA
ttgcttataaggaaatcagaggaaaaagattaaacaaaagatacaggaaggaaaggtgagattgtagcatatgcaagaagtgagtgaggagaagagaaatggggtgtggggttggaatgc

SEQ ID NO: 74425 - DNA, 120 bp, synthetic construct
  source 1..120: mol_type = other DNA
agagataagatttggtttcctactacctgttctctgttccaacctgcttgtaaaatattctcaaatggcctgataattactatatgccatgaagaatttaactgactaccgcacagaaat

SEQ ID NO: 74426 - DNA, 120 bp, synthetic construct
  source 1..120: mol_type = other DNA
acctccccaaggagcatgatgtgttgagaaagcattttaaggacacctgcaaactttggctaaagaacattcacaaataagcagctgtgcgaagagggatttccacataaatttccaact

SEQ ID NO: 74427 - DNA, 120 bp, synthetic construct
  source 1..120: mol_type = other DNA
tccacctcccaagtggctgggactacaggcacacactgctgcacctggctttcaaaacaataatttctacagtcactgacataatattcactaaaatattaacagcaaactgagaaaatg

SEQ ID NO: 74428 - DNA, 120 bp, synthetic construct
  source 1..120: mol_type = other DNA
atacttcatactactgaacagagtatatgctgtttcctcaatgaataggagtgctttttttttttttgagatggagtctctgttgcccagactggagtacagtggtgtgatctcagctca

SEQ ID NO: 74429 - DNA, 120 bp, synthetic construct
  source 1..120: mol_type = other DNA
tactccatgatagatacacaaaataagccccttagatgccatgtctttagataccttgctcttttagcttcttctaacaacatctcagctctggcaatgtcagcagcactatgctgaaga

SEQ ID NO: 74430 - DNA, 120 bp, synthetic construct
  source 1..120: mol_type = other DNA
atggcttccataaaatattacctaagatatccttagcaaatactgttgactccttattagccatgccttttttcttgctaacagaatactgattttttttcaggtacctgcctctaagtc

SEQ ID NO: 74431 - DNA, 120 bp, synthetic construct
  source 1..120: mol_type = other DNA
cttgattagatttctcagctcctcattgctcttgtccattttttctttggtagcatttgtcttcaacagaatgtcttcagcactttgttttgcctcatctgccctcagttttgcttcaga

SEQ ID NO: 74432 - DNA, 120 bp, synthetic construct
  source 1..120: mol_type = other DNA
gtcctcagcaagggtgcttgaaaacagtgtttgggagacagaatggagagaggagcagagagtttaggagtaaactaacctgcttatttccaaggaaacaatggaagtttacaactcatc

SEQ ID NO: 74433 - DNA, 120 bp, synthetic construct
  source 1..120: mol_type = other DNA
aatctgacagcacacatagaagatctgttttgtttcaacagatggggcagacatggaaaaaaaaaaacacagtatggctctagctaaacatccacaaagatacagaactagaagtacctg

SEQ ID NO: 74434 - DNA, 120 bp, synthetic construct
  source 1..120: mol_type = other DNA
ttcacataggtatccttccttgaaaacacaggaaggaagaggaagaaacaggctcagttaggcttttttggggccttctgcctgattttcattaaactcacaacccaatttcatttggct

SEQ ID NO: 74435 - DNA, 120 bp, synthetic construct
  source 1..120: mol_type = other DNA
tggaggcattcaccctctcctctgcctcaagagacatctggaaatacttggtaatgctatccaaggcacctagggtaggaaatgaaattgcccacagttaacctcatcatactaggcttc

SEQ ID NO: 74436 - DNA, 120 bp, synthetic construct
  source 1..120: mol_type = other DNA
tgtggattttggtttctgcagtgggtcctggaaccaatcccccatggataccaagggatgacggtattatatataacagcatgacatgtttttagctttagtccaaaagcaatcatgcat

SEQ ID NO: 74437 - DNA, 120 bp, synthetic construct
  source 1..120: mol_type = other DNA
tttttctttgttcaatgacttttgagagaaacacagaagtaccactcagctgagttgtggcagacaagccatttaagggattccaaatttctgctgtaagatgagcacaggtcagagtgt

SEQ ID NO: 74438 - DNA, 120 bp, synthetic construct
  source 1..120: mol_type = other DNA
ctgtctagttaaatgaatagtgacggtagaaacagagctgttttgggaatgtaatctctcttctggcaggctctcaaaggacaccagatttttttcttcctcccagagatgcctaagacc

SEQ ID NO: 74439 - DNA, 120 bp, synthetic construct
  source 1..120: mol_type = other DNA
aggagagaaaatacaggctcaggaattgagtcatccaagttcacaagcctagcatcagagccaagactcaattatggatctttgtcttctaaatccagcattcctcccattttactgact

SEQ ID NO: 74440 - DNA, 120 bp, synthetic construct
  source 1..120: mol_type = other DNA
tcgacaacaattgaccaatggctcaggtagagactgtagcagcttcctctagcacatgcgtgacttcagtggttgctaaccccttcttagcagtaataatactttaaacagaaatgtttt

SEQ ID NO: 74441 - DNA, 120 bp, synthetic construct
  source 1..120: mol_type = other DNA
acatcttatcgctgggcttccacccattctgaggaaagacaggaataaataaagaatatactatcttatttccctaactggattgtggactccaagggcaggggcacatcttaaaccatt

SEQ ID NO: 74442 - DNA, 120 bp, synthetic construct
  source 1..120: mol_type = other DNA
gagatctgctataacatcaccatcctttcaacccagaggtgtgtgtttgtggcccattcatttggccctcaccacatcctgccttgtattgctagtttatctttttattgtctttgttct

SEQ ID NO: 74443 - DNA, 120 bp, synthetic construct
  source 1..120: mol_type = other DNA
atgccaaagtcatttgaccatgggatctttttttagtggaagtcaatgccagtgacacccaagagaaataatgagaaaggcttgggaaaaccactacattaatcgatttctgagattagg

SEQ ID NO: 74444 - DNA, 120 bp, synthetic construct
  source 1..120: mol_type = other DNA
agtaaaccatcaaatctcacagatgaccggattgcagtgtcattattgaaaaagttgggcctgactctccgggagggcaccaaataactagtctcaaatgtaccaggttttgatttcaag

SEQ ID NO: 74445 - DNA, 120 bp, synthetic construct
  source 1..120: mol_type = other DNA
ggtccagaggaaaacactagcaagtcaatgccacaatgggaaatagtctatgtacccatttatcacatagacctaacttgcctgcttcctttacatccttccctctcctcctccagacct

SEQ ID NO: 74446 - DNA, 120 bp, synthetic construct
  source 1..120: mol_type = other DNA
gggagatgaatataattttacctgcagaaatgagctgcctgtctagcacaggggtcatcaagttttaatgtaaaagttgaaatagtaaatccagctttcaggccattctgtctctgttat

SEQ ID NO: 74447 - DNA, 120 bp, synthetic construct
  source 1..120: mol_type = other DNA
catatttgtcaagcaattacataactggagaaaagagctgatgttctttttgcatagttccatctaattttgaatgacacctcttcttgtccctgctgatctctgggcccatcccttcag

SEQ ID NO: 74448 - DNA, 120 bp, synthetic construct
  source 1..120: mol_type = other DNA
aatgaaacacctggatctagaacctggaagtatctcttagggtattttcacttatgctcacttggagcttccaatgcttccagagggcttgaaaaatactttttcttgctggtgtgagct

SEQ ID NO: 74449 - DNA, 120 bp, synthetic construct
  source 1..120: mol_type = other DNA
tttccctggcagatttagaggcgaaagtttaaagaaaagataaaagggtaaggagtaaagttctaaggaccacatgaacaattctctgattgactctgactctgggtagcaggcctttcc

SEQ ID NO: 74450 - DNA, 120 bp, synthetic construct
  source 1..120: mol_type = other DNA
tgcagtaagccgagattatgccactgcattccggcctaggtgacagagcgagactccgtctcaaaaaaaaaaaaaattcaagagtccaacagagacctataatttcagatgtgcaacaaa

SEQ ID NO: 74451 - DNA, 120 bp, synthetic construct
  source 1..120: mol_type = other DNA
acaggttcttatagacacgttaatttgtactgtgttttataatttacagaaggctcttgtagaaccccagttccctccactctctgatcaagtcaatgcgagaacgcccacaactcacct

SEQ ID NO: 74452 - DNA, 120 bp, synthetic construct
  source 1..120: mol_type = other DNA
cacagcggtcacagttctgcccgatcacattaggaagacacaagcactgaccagtggctttgtcgcactggcagtcagagccgttacagtgctcttgcacggtgcccaggtaattacaga

SEQ ID NO: 74453 - DNA, 120 bp, synthetic construct
  source 1..120: mol_type = other DNA
ggacagctacatggtttttctttcctgttatctctcccaggcactgagtcacatcttgagacctcactcctgccagaaaatgtggatgtaaagaaaaaaataaaaatgaccaggtgcaac

SEQ ID NO: 74454 - DNA, 120 bp, synthetic construct
  source 1..120: mol_type = other DNA
catcttcactgcactgtttaaagagcccagggtgatcacatctgaaggggaaagaataggctttgagttgtgagaggaaggcagtattactttcagtggcaaaaaccatagtaacttttt

SEQ ID NO: 74455 - DNA, 120 bp, synthetic construct
  source 1..120: mol_type = other DNA
tccagcctgggtgacagagtgagaccccgtctcaaaaacaaaacaaaacaaagaattacagaaactgaaaagttaccactcctctgtgagcaacctgaaaaatgggatctttaatgatga

SEQ ID NO: 74456 - DNA, 120 bp, synthetic construct
  source 1..120: mol_type = other DNA
gagaacaggccatgaccccacagttctaagaaacctgttccaaggaaagtcttgaaaactgttctgtttgggcacactcttctccactcctcatgttttctttgagacagaatcttgctc

SEQ ID NO: 74457 - DNA, 120 bp, synthetic construct
  source 1..120: mol_type = other DNA
tgtttgtctctcaggtggttccaaactcaggcagggatgggtcatgttacttattaattcccatatccaacatgtcaatcccactctttaaagataacaaatacagggaggtcaaaggat

SEQ ID NO: 74458 - DNA, 120 bp, synthetic construct
  source 1..120: mol_type = other DNA
tttacaaataaaatccaaagctggtcacagatatcaactatgccattctgacatgatgttcgttcaaatgcattctacagtgtgagtgctgattctgaatcagcattgtggcagctccct

SEQ ID NO: 74459 - DNA, 120 bp, synthetic construct
  source 1..120: mol_type = other DNA
tttaaaatgactaatcccatttggattagtttctcctttcgcctaaattaggcaggagcatttcacaactcttatcctccgccagaatctgctgagacagacagaatttctatacagccc

SEQ ID NO: 74460 - DNA, 120 bp, synthetic construct
  source 1..120: mol_type = other DNA
tggattattcagagttctggtttaaaacagtatcatccctatgatgagcggaagggaagaaaggggaggcagagttggcagatcaaaacagtttttctaggcaggaggtcattaatgttt

SEQ ID NO: 74461 - DNA, 120 bp, synthetic construct
  source 1..120: mol_type = other DNA
tatgttttacacagcttgatggcttttaaatgctatttatttttattttagagatggggtcttgctttgtcgcccaggctggtcttgaactcctggcctcaaatgatcctcctgcctcag

SEQ ID NO: 74462 - DNA, 120 bp, synthetic construct
  source 1..120: mol_type = other DNA
cctctcaactgttttctgcctcttcccaatgtccctttcagtccactttaaagcagctcagataatgacaatcccctgcttgaaatgcttcaatagcttcctgtgaatattatagtccaa

SEQ ID NO: 74463 - DNA, 120 bp, synthetic construct
  source 1..120: mol_type = other DNA
taactatatataatacccattagaagtactatttttctactgattctcccctccctcctccaccagtccactaagtggtttctttacctgtggctcgtagcgaattaggatgtcgtactc

SEQ ID NO: 74464 - DNA, 120 bp, synthetic construct
  source 1..120: mol_type = other DNA
aaactatgttatcctttccatgaatccttgtgacttgtgaccaacagaacctgaggaactttctaggacttctgagtccaagctttcagagagctggcagcttgtttcctctttttggaa

SEQ ID NO: 74465 - DNA, 120 bp, synthetic construct
  source 1..120: mol_type = other DNA
acgcgagtcaacccgccagaagcagctctacagctgccattactcagtacacaggaccaaatacatagcatgttcttgttttcttcagaaaatacatatgtggaaaaaagtagtgcctat

SEQ ID NO: 74466 - DNA, 120 bp, synthetic construct
  source 1..120: mol_type = other DNA
aggtttgttctttctttttttctcatcccaaagttttaaacaaggtacctaaggcaagttgcaactcacaggaacactttgcactcacaggcttattaaaaatgtcccaaggccgggtgc

SEQ ID NO: 74467 - DNA, 120 bp, synthetic construct
  source 1..120: mol_type = other DNA
ctccccagatgtttactgagacaacaaatatccaaaacatgaaccaccaaagaagaaaacaactagaccttcacatgcaaccattagagaacgagcaaatgaaggtgaggacaaaggcgc

SEQ ID NO: 74468 - DNA, 120 bp, synthetic construct
  source 1..120: mol_type = other DNA
tttgctttccaatgagccacactcctcatactcttcagcaaatatttactgatcaaatattggccctagcagccttgcttcccagtgcaggtattctcacattttagtccattgtgaact

SEQ ID NO: 74469 - DNA, 120 bp, synthetic construct
  source 1..120: mol_type = other DNA
atctgggtgggtccaatctaatcacataaattcttaaaagtgggagaggcaggcagggaagtaagtaggtcagagagctgtgacataagaaggatttgacccagtggtacctttgaagat

SEQ ID NO: 74470 - DNA, 120 bp, synthetic construct
  source 1..120: mol_type = other DNA
ggcagaaaaatattaaagcataaaaaacatcattcataataaccaaccacagtgttccgtcagcaccattcattttctcagggtggcattcctccccacccccaactaggacactttctt

SEQ ID NO: 74471 - DNA, 120 bp, synthetic construct
  source 1..120: mol_type = other DNA
cagtgagccaagatcaatgccactgcactccagtctaggtgacaaagcgaaactctgtctcaaaaaaaaaaaaaaaaaggggggggtgggcttcaagccagatatgaaaactctacattt

SEQ ID NO: 74472 - DNA, 120 bp, synthetic construct
  source 1..120: mol_type = other DNA
cctcttgagggacaacaactttgaaaaggctcaccataaaacactctagagtcaccagactacaaggcatctttaaatgttctttttttcccctccaccaatgattctcaaagatagggc

SEQ ID NO: 74473 - DNA, 120 bp, synthetic construct
  source 1..120: mol_type = other DNA
gccaggaacagagaccaacattctctttgactcgaaggtggttaaactcccacagatttaacatcttgccaaatgtgtgttctgatagcttctggtggagctttatgcttcatttattca

SEQ ID NO: 74474 - DNA, 120 bp, synthetic construct
  source 1..120: mol_type = other DNA
gataccaattttcctcattataattactctggctgtaagagaattatggcaaggatttggcaggcctttaaatctgccctcagttcagtctgtcatcaatcccatacagaaagccctcca

SEQ ID NO: 74475 - DNA, 120 bp, synthetic construct
  source 1..120: mol_type = other DNA
atgcaatgagtcttctggagaataaatctttgtccaattttctgattatttcattagaatagattcccagaggtggggttactgggtcaaagggtatgcccatttctacaagctactgat

SEQ ID NO: 74476 - DNA, 120 bp, synthetic construct
  source 1..120: mol_type = other DNA
cctcattttgagagccagctgggtcacacgtacatcctgagaagaatgcaaagcaccaggttaaaatcaggaggaaactcaatgtatctttgtataaatacatatattcccttcctccct

SEQ ID NO: 74477 - DNA, 120 bp, synthetic construct
  source 1..120: mol_type = other DNA
tcaaggaccgtgaggcctgaaggatggattcccttctccgtattcccatattcccaccaccacaccaggccaggccatagtaaggaaggtaggtctgtttaacagccagctagctgaccc

SEQ ID NO: 74478 - DNA, 120 bp, synthetic construct
  source 1..120: mol_type = other DNA
cctcccttccttctccatgttaagtatccatcaagggccatctggtttttacctacaaagcaagccttgaccactccagctctcactggctgctgaacttctataatagtccttctcagt

SEQ ID NO: 74479 - DNA, 120 bp, synthetic construct
  source 1..120: mol_type = other DNA
gtacctctaattaggaaatggatactagagcctgaatggatttaaaatgtcccttcaacacagacttacttttacaggcgttgctgtttcggccttcagcaggtctccaaggtaaatcat

SEQ ID NO: 74480 - DNA, 120 bp, synthetic construct
  source 1..120: mol_type = other DNA
tgaatcaacagcacatgctgtgagacccgtgatagtaacaggacattagctacacagctgatttgttatgccgtaaagggaacataatctacctagcattctgaaagatggaccaataag

SEQ ID NO: 74481 - DNA, 120 bp, synthetic construct
  source 1..120: mol_type = other DNA
tgtgtggatcacttgaggtcaggagtttgagatcagcctagccaacatgatgaaaccccacctctactaaaaacacaaaaattagccagacatggtggtgtgggcctataatcccaggta

SEQ ID NO: 74482 - DNA, 120 bp, synthetic construct
  source 1..120: mol_type = other DNA
aaggcatgacacatgaaaatagcttaagttcctcctcttgtatgatctagatgactccaatagtgaagcctaacataacatgactgcaaagaggaaaggttactgccctctcatcagttt

SEQ ID NO: 74483 - DNA, 120 bp, synthetic construct
  source 1..120: mol_type = other DNA
ttctcaaatacaagttacctctaaatcaattttatctttccctcttcttcctaggtctgcagacttctgcttattgtaaatgctgggctaccaattcattctatagtaactagacaaacg

SEQ ID NO: 74484 - DNA, 120 bp, synthetic construct
  source 1..120: mol_type = other DNA
ccagagcccttgtggacgtttttcataactgcattttgagacatgcaggaaaggcctcatggctcactcagaaattggcacagagctggacacatctattaaatatttgttttacaagag

SEQ ID NO: 74485 - DNA, 120 bp, synthetic construct
  source 1..120: mol_type = other DNA
cggaaatgcaaccctcattttattgagtatattgagaatggcagagacttctgatttctcttcagtattctttcttcccttgttcctttgacagtaagagccctcgccaagagtgttagt

SEQ ID NO: 74486 - DNA, 120 bp, synthetic construct
  source 1..120: mol_type = other DNA
atgtaactgggcatcatcctgtattttatctggtaagcttaattatggcaattgagctacacttcttctctagaaaactctttggtgggttttgtaagagagaaagaaactttcacctta

SEQ ID NO: 74487 - DNA, 120 bp, synthetic construct
  source 1..120: mol_type = other DNA
cggaggttgcaatgagcagagatcgcaccattgcactccagcctgggcaacaagagcggaactctgtctcaaaaaacaaaacaaaacaaacaaacaaactaacaaaaaacacttttgttt

SEQ ID NO: 74488 - DNA, 120 bp, synthetic construct
  source 1..120: mol_type = other DNA
tacctccttagtatcagccagtggactatatgttgtatatgttatacacagtccaatgaggtgcagatatgggtgtcaataatttgcaatatgctatgtcaaacaccatagtagggttgc

SEQ ID NO: 74489 - DNA, 120 bp, synthetic construct
  source 1..120: mol_type = other DNA
cctcctgggttcaaacaattcttctgtctcagcctcccgagtagctgggattacaaacacgcaccaccacgcctggctaatttttctattttttagtagagatggggtttcaccatgttg

SEQ ID NO: 74490 - DNA, 120 bp, synthetic construct
  source 1..120: mol_type = other DNA
atcaaccaggggctagacaaggaaaacagagtggtgccagtacccctcattacattctttactttaactctctataatttgggctgatttgtgtgtctgcaagtttcatatgctgaagac

SEQ ID NO: 74491 - DNA, 120 bp, synthetic construct
  source 1..120: mol_type = other DNA
cgcttgacagaaatttgggtgagggttaatggtgaaaactagaaacatgcttaggcttcctttagccctccttaataatcctgctgagctttttctctgataaaagatgtcaaggataag

SEQ ID NO: 74492 - DNA, 120 bp, synthetic construct
  source 1..120: mol_type = other DNA
cctcagcacccccaagtgttgggattacaggcatgagccactatgcctggccaagagttatgagttttgaaacatctagtaatatagaaaaacatactgtgtacatgctaaatgagcttt

SEQ ID NO: 74493 - DNA, 120 bp, synthetic construct
  source 1..120: mol_type = other DNA
ggcaaattttggcaagaaatgatcattcatttcttattaaaaatacaaaaaagaggctgagcacagtggctcatgcctcttttgtatccctgcactttgggaggcagaggcaggtggatc

SEQ ID NO: 74494 - DNA, 120 bp, synthetic construct
  source 1..120: mol_type = other DNA
gtcacatactgtaagttatttgcaagtatatctttctcctctggaagactggaagctcctggagggcagtcactgtgctatctttacaatttcccataaggcttaaagtagggtagtttc

SEQ ID NO: 74495 - DNA, 120 bp, synthetic construct
  source 1..120: mol_type = other DNA
tgctgggattacaggtgtgagccaccacgcctggccccaacttgtagccattctgcatgtctcagttcaatcatcacccccgttttaccttctgcgcctacacaagtaagttcatctttc

SEQ ID NO: 74496 - DNA, 120 bp, synthetic construct
  source 1..120: mol_type = other DNA
acttcctttccagttaccaaagtcagtattaaaacagaaacacaagggaccagggatttactctccagatgttttattgcggtttggaaaagggtcaacactgccttactctatggggaa

SEQ ID NO: 74497 - DNA, 120 bp, synthetic construct
  source 1..120: mol_type = other DNA
aaaaaaagaatctgtcaaataaactggctcagaacaaatactaacatcttctctttcaggggaaagcctgaacaaacaaatgagcctttgcacccttgccctgagggtcagtcagtctca

SEQ ID NO: 74498 - DNA, 120 bp, synthetic construct
  source 1..120: mol_type = other DNA
ggtcattcttctatagtgtatttgatttctgtcagacctaggaagagatcatcacgatgggtaaaaatagtcgtacattccaagctcgtttctgtgcctggacactgataatttagcccc

SEQ ID NO: 74499 - DNA, 120 bp, synthetic construct
  source 1..120: mol_type = other DNA
ggttgcagtaagctgagattgcgccattgcattccagcctaggtgaaagagggagactctgcctcaaaaataaacaaacaaacaaacaaacagtcaatgacaaagaaatctattaagggc

SEQ ID NO: 74500 - DNA, 120 bp, synthetic construct
  source 1..120: mol_type = other DNA
tcttaaggcggtttggagcaaatgtagtgaccacattttcaatgagatggctgtcaggattcagggtctcatgataaggatcttgggaattgcatatgaagcattttttgtcctcctaca

SEQ ID NO: 74501 - DNA, 120 bp, synthetic construct
  source 1..120: mol_type = other DNA
acaacagagcttaatagttctctttccacaaggagctttgctctgtacctacattttctgaaatgcagactattcttaagtctgaaaatgaggctaagactgaaatacatagagacccac

SEQ ID NO: 74502 - DNA, 120 bp, synthetic construct
  source 1..120: mol_type = other DNA
aggaggaagcagtctagacatctctgtataaacctggaagcaaatgaacggaatccactttaccacattcctttggtctaattgatcaggtctccagaatgggctttctgctttgtaaaa

SEQ ID NO: 74503 - DNA, 120 bp, synthetic construct
  source 1..120: mol_type = other DNA
ggggaaacccaagggttttaaaaagaggataaatcacctttaatgcacacttccaaaactaaagttttaaaaaacacacacacaatcaggccttttggaggctctgggtcagggcagcca

SEQ ID NO: 74504 - DNA, 120 bp, synthetic construct
  source 1..120: mol_type = other DNA
ggtttcaaggcttctccattccagggaagcgccaggtcctgctgtttctggtgccatccggagacaaacagagatggttaattaaagccacatggcccccatctgttcccagaatgaagc

SEQ ID NO: 74505 - DNA, 120 bp, synthetic construct
  source 1..120: mol_type = other DNA
gtggatcatttgaggtcaggagtttgagaccagcctgaccaacatggtgaaaccctgtcccttctaaagatataaaaaaaattagccaggcatggtggcacatgcctgtaatctcagcta

SEQ ID NO: 74506 - DNA, 120 bp, synthetic construct
  source 1..120: mol_type = other DNA
tgagcccgggaggcggaggttgcagtgagcgaagatcatgctactggactccagcctgggtgacagagtgagactctgtttccatttaaaaaaaaaaaaaaaaaatatatatatatatat

SEQ ID NO: 74507 - DNA, 120 bp, synthetic construct; identical to SEQ ID NO: 14036
  source 1..120: mol_type = other DNA

SEQ ID NO: 74508 - DNA, 120 bp, synthetic construct; identical to SEQ ID NO: 14037
  source 1..120: mol_type = other DNA

SEQ ID NO: 74509 - DNA, 120 bp, synthetic construct
  source 1..120: mol_type = other DNA
gggcgcggcgtcctggaggctgggcttcctgcctgggtggcgcttcaccagaaagcctcatgtatcttgtctttttttttttttttttttttttttgagagggagtcttgctctgttgcc

SEQ ID NO: 74510 - DNA, 120 bp, synthetic construct
  source 1..120: mol_type = other DNA
tgtaccttctcacttatttgtggaaattaaaaattaaaataactgaactcatggagatagagagtagaatgatggttaccagaggctggaaagggtaatgggtggggtgggggaaaaggg

SEQ ID NO: 74511 - DNA, 120 bp, synthetic construct; identical to SEQ ID NO: 29162
  source 1..120: mol_type = other DNA

SEQ ID NO: 74512 - DNA, 120 bp, synthetic construct
  source 1..120: mol_type = other DNA
ccacctccctcccagacggggtggctgccgggcggagacgctcctcacttctcagacggggcggttgccgggcggagggtctcctcacttctcagacggggcggccgggcagagacgctc

SEQ ID NO: 74513 - DNA, 120 bp, synthetic construct
  source 1..120: mol_type = other DNA
ccacctcccaggttccggtgattctcctgcctcagccacccgagcagctgggactacaggcgcgcactaccacctccagctaatttttgtatttttagtagagacggggtttcaccatat

SEQ ID NO: 74514 - DNA, 120 bp, synthetic construct; identical to SEQ ID NO: 33738
  source 1..120: mol_type = other DNA

SEQ ID NO: 74515 - DNA, 120 bp, synthetic construct
  source 1..120: mol_type = other DNA
gagacagagtctcactctgtcacccaggctggagtgcagtggtgcaaccatggctcactgtagcctcgacctcctgggctcaggcgatcctcctacctcagcctcccaagtaggtgacac

SEQ ID NO: 74516 - DNA, 120 bp, synthetic construct; identical to SEQ ID NO: 33739
  source 1..120: mol_type = other DNA

SEQ ID NO: 74517 - DNA, 120 bp, synthetic construct
  source 1..120: mol_type = other DNA
cttaaaaattatttctctcatcaaagatataaaacaaaatgagtctttatttattaaaaatttgttttaggccaggcacggtggctcatgcctgtaatcccagcactttgggaggccgag

SEQ ID NO: 74518 - DNA, 120 bp, synthetic construct; identical to SEQ ID NO: 33741
  source 1..120: mol_type = other DNA

SEQ ID NO: 74519 - DNA, 120 bp, synthetic construct; identical to SEQ ID NO: 33742
  source 1..120: mol_type = other DNA

SEQ ID NO: 74520 - DNA, 120 bp, synthetic construct
  source 1..120: mol_type = other DNA
tccatggtgtatatgtaccacattttcttaatccagtctatcattgttggacatttgggttggttccaagtctttgctattgtgaatagtgctgcaataaacatacgtgtgcatgtgtcg

SEQ ID NO: 74521 - DNA, 120 bp, synthetic construct
  source 1..120: mol_type = other DNA
ctagatctctgttttggtaccagtaccatgctgttttggttgctgtagccttgtagtatagtttgaagtcaggtagcgtgatgcctccagctttgttcttttggcttaggattgacttgg

SEQ ID NO: 74522 - DNA, 120 bp, synthetic construct
  source 1..120: mol_type = other DNA
ataatcatgcggtttttgtctttggttctgtttacatgctggattacatttattgatttgcgtatattgaaccagccttgcatcccagggatgaagcccacttgatcatggtggataagc

SEQ ID NO: 74523 - DNA, 120 bp, synthetic construct
  source 1..120: mol_type = other DNA
tttggcatgattttgcagtggctggtgccagttgttcctttccatgtttagtgcttccttcaggagctcttttagggcaggcctggtggtgacaaaatctctcagcatttgcttgtctgt

SEQ ID NO: 74524 - DNA, 120 bp, synthetic construct
  source 1..120: mol_type = other DNA
ctcgagccttggctttcagctccggttattctagttatacattcgtctaaatttttttcaaagtttttaacttctttgcctttggtttgaatttcttcctgtagctcggggtagtttgat

SEQ ID NO: 74525 - DNA, 120 bp, synthetic construct; identical to SEQ ID NO: 33743
  source 1..120: mol_type = other DNA

SEQ ID NO: 74526 - DNA, 120 bp, synthetic construct; identical to SEQ ID NO: 33744
  source 1..120: mol_type = other DNA

SEQ ID NO: 74527 - DNA, 120 bp, synthetic construct; identical to SEQ ID NO: 33745
  source 1..120: mol_type = other DNA

SEQ ID NO: 74528 - DNA, 120 bp, synthetic construct; identical to SEQ ID NO: 25328
  source 1..120: mol_type = other DNA

SEQ ID NO: 74529 - DNA, 120 bp, synthetic construct; identical to SEQ ID NO: 25329
  source 1..120: mol_type = other DNA

SEQ ID NO: 74530 - DNA, 120 bp, synthetic construct
  source 1..120: mol_type = other DNA
attgatttccttatagctttacctcacccttcttaggaccttgaacagacttatggtgcaattaccttgtgctttatactgcccccacacccagtgttagacctcaaaatctccaaggat

SEQ ID NO: 74531 - DNA, 120 bp, synthetic construct; identical to SEQ ID NO: 31672
  source 1..120: mol_type = other DNA

SEQ ID NO: 74532 - DNA, 120 bp, synthetic construct
  source 1..120: mol_type = other DNA
tcatcttgggctgtggttcatgatcagacagcattgggtcaggaccacccctcgctcagcatggcccatgggaggagtttctggatggagcaactaggtatgtgtgagtgtttacatggg

SEQ ID NO: 74533 - DNA, 120 bp, synthetic construct
  source 1..120: mol_type = other DNA
cccacaagggggttgcctgctttgactgaactaacctgtgggtttagtccaacgaacagatgtgcctgatttcagggctgaatttttgcttgaccacaagcctcgggcagaacagattcg

SEQ ID NO: 74534 - DNA, 120 bp, synthetic construct
  source 1..120: mol_type = other DNA
gattgcttgagcacaggagttcaagaccagcttgggcaacgtggcaaaaccccatctctattaaaaaaaaatataaaaattagccaggtgtggtggtgcacacctgtagttacagctact

SEQ ID NO: 74535 - DNA, 120 bp, synthetic construct
  source 1..120: mol_type = other DNA
accatcaaaaataaagggggagcttaatgtcttcaccgtcaaaggagtagaagcactgctagtcctagggaagccagaatagccagtcctgaaaacagcatgttgcaatttttatttctt

SEQ ID NO: 74536 - DNA, 120 bp, synthetic construct; identical to SEQ ID NO: 27134
  source 1..120: mol_type = other DNA

SEQ ID NO: 74537 - DNA, 120 bp, synthetic construct; identical to SEQ ID NO: 25783
  source 1..120: mol_type = other DNA

SEQ ID NO: 74538 - DNA, 120 bp, synthetic construct
  source 1..120: mol_type = other DNA
tttcccccctttctattccacaaaaccgccattgtcatcctggcccgttctcaatgagctgttgggtacacctcccagacggggtggtggccgggcagaggggctcctcacctcccagta

SEQ ID NO: 74539 - DNA, 120 bp, synthetic construct
  source 1..120: mol_type = other DNA
cagcccggccagcacagcgaaaccccgtctccaccaaaaaagtacgaaaaccagtcaggcgtggtggcgcgcgcctgcaatcgcaggcactcggcaggctgaggcaggagaatcaggcag

SEQ ID NO: 74540 - DNA, 120 bp, synthetic construct; identical to SEQ ID NO: 12927
  source 1..120: mol_type = other DNA

SEQ ID NO: 74541 - DNA, 120 bp, synthetic construct; identical to SEQ ID NO: 12928
  source 1..120: mol_type = other DNA

SEQ ID NO: 74542 - DNA, 120 bp, synthetic construct
  source 1..120: mol_type = other DNA
ccagcaactcaatatgagtaccagttctccatgtgctgctgagcttactgcattaaggtacaagttatagtatagaagatcttcaacattaaattactttttctggccgggtgtggtggc

SEQ ID NO: 74543 - DNA, 120 bp, synthetic construct; identical to SEQ ID NO: 9939
  source 1..120: mol_type = other DNA

SEQ ID NO: 74544 - DNA, 120 bp, synthetic construct
  source 1..120: mol_type = other DNA
agtataacaccagagactatattacagcaatttctttttctcttaaaaaaaaaaaaaaaaaaaaaaggctggggcctggtggctcacacctctaatcccagcactttgggaggcggaggc

SEQ ID NO: 74545 - DNA, 120 bp, synthetic construct; identical to SEQ ID NO: 24266
  source 1..120: mol_type = other DNA

SEQ ID NO: 74546 - DNA, 120 bp, synthetic construct; identical to SEQ ID NO: 24267
  source 1..120: mol_type = other DNA

SEQ ID NO: 74547 - DNA, 120 bp, synthetic construct; identical to SEQ ID NO: 24268
  source 1..120: mol_type = other DNA

SEQ ID NO: 74548 - DNA, 120 bp, synthetic construct
  source 1..120: mol_type = other DNA
tctacaaaaaattataaaattagccagacatggtagtgcatgcctgttggtcctagctacttaggaggctgaggtgggaggatttcttgagtgtgcgaggttgaggctgtagttaactat

SEQ ID NO: 74549 - DNA, 120 bp, synthetic construct; identical to SEQ ID NO: 34043
  source 1..120: mol_type = other DNA

SEQ ID NO: 74550 - DNA, 120 bp, synthetic construct
  source 1..120: mol_type = other DNA
gggggccaggtctccttattattattttttgaaacggagtctcactctgttgcccaggctggagtgcagtagcatgatcacagctcactgcagccatatatatgtatatatatatatata

SEQ ID NO: 74551 - DNA, 120 bp, synthetic construct
  source 1..120: mol_type = other DNA
agctagtagtgctttggcttcttttaaagccagtaattcttgagaaataaatgcaagaagattaaatagattaaatattccatggggcggggggtgggggggaagataaatgcattattt

SEQ ID NO: 74552 - DNA, 120 bp, synthetic construct
  source 1..120: mol_type = other DNA
cctccatactgattataaaccaacaggcattttctttctaaatgccaaaaattgtgtctacagaccacagcctgttttccaggcactgagaagatataaggaggctcggccaataatcag

SEQ ID NO: 74553 - DNA, 120 bp, synthetic construct
  source 1..120: mol_type = other DNA
gggagactctgtctcatagacagatagatagatagatagatagatacatacatacatacatacatacatagatggaaagctgctgaaagccaggaggaacagtaaggcttttgggggtgg

SEQ ID NO: 74554 - DNA, 120 bp, synthetic construct; identical to SEQ ID NO: 20433
  source 1..120: mol_type = other DNA

SEQ ID NO: 74555 - DNA, 120 bp, synthetic construct; identical to SEQ ID NO: 22497
  source 1..120: mol_type = other DNA

SEQ ID NO: 74556 - DNA, 120 bp, synthetic construct; identical to SEQ ID NO: 9411
  source 1..120: mol_type = other DNA

SEQ ID NO: 74557 - DNA, 120 bp, synthetic construct; identical to SEQ ID NO: 9412
  source 1..120: mol_type = other DNA

SEQ ID NO: 74558 - DNA, 120 bp, synthetic construct; identical to SEQ ID NO: 23089
  source 1..120: mol_type = other DNA

SEQ ID NO: 74559 - DNA, 120 bp, synthetic construct
  source 1..120: mol_type = other DNA
actccagcctgggcaacagagcgagactctgtctcaaaaaaaaaaaaaaaaaagagagatcctcctgcctcagcctccaaaagggctgagattataggcctgagctactacgccctttct

SEQ ID NO: 74560 - DNA, 120 bp, synthetic construct; identical to SEQ ID NO: 7426
  source 1..120: mol_type = other DNA

SEQ ID NO: 74561 - DNA, 120 bp, synthetic construct; identical to SEQ ID NO: 7427
  source 1..120: mol_type = other DNA

SEQ ID NO: 74562 - DNA, 120 bp, synthetic construct; identical to SEQ ID NO: 20434
  source 1..120: mol_type = other DNA

SEQ ID NO: 74563 - DNA, 120 bp, synthetic construct; identical to SEQ ID NO: 20435
  source 1..120: mol_type = other DNA

SEQ ID NO: 74564 - DNA, 120 bp, synthetic construct
  source 1..120: mol_type = other DNA
ttctttataatagaatgatttatgttccattgggtatataccgagtagtgggattgctgggtcaaatggcatttctgattctaggtctttgaggaatcgccacactgccttccacagtgg

SEQ ID NO: 74565 - DNA, 120 bp, synthetic construct
  source 1..120: mol_type = other DNA
tcaaagatcagatggctgtagttgcacggacttatttctgagttctctattctgttccattggtctatgtgtctgtttttgtaacagtaccatgctattttggttactgtagccctgtag

SEQ ID NO: 74566 - DNA, 120 bp, synthetic construct
  source 1..120: mol_type = other DNA
tttagcaaatgatcaggatgaatctagcacctaatagagaaatggatgagcaaatcttttatgtcagtggtccccaacctttttggcaccaggcactggttttgtggaagaccatttgtc

SEQ ID NO: 74567 - DNA, 120 bp, synthetic construct
  source 1..120: mol_type = other DNA
tttgcaatctatccatctgacaaaggtctaatattcagagtcaacaagaaactaaaacaaatttacaagaaaaaacaaccccattaaaaaagtgggcaagggacatgaacagacacttct

SEQ ID NO: 74568 - DNA, 120 bp, synthetic construct; identical to SEQ ID NO: 20437
  source 1..120: mol_type = other DNA

SEQ ID NO: 74569 - DNA, 120 bp, synthetic construct
  source 1..120: mol_type = other DNA
ctcaaggcagaagaatttttcttagtacataacaaaatggagtctcctatgtctacttctttctacacagacacagtaacaatctgatctctcttgcttttccccacatggaagcaatag

SEQ ID NO: 74570 - DNA, 120 bp, synthetic construct; identical to SEQ ID NO: 20438
  source 1..120: mol_type = other DNA

SEQ ID NO: 74571 - DNA, 120 bp, synthetic construct; identical to SEQ ID NO: 20439
  source 1..120: mol_type = other DNA

SEQ ID NO: 74572 - DNA, 120 bp, synthetic construct; identical to SEQ ID NO: 33131
  source 1..120: mol_type = other DNA

SEQ ID NO: 74573 - DNA, 120 bp, synthetic construct; identical to SEQ ID NO: 33132
  source 1..120: mol_type = other DNA

SEQ ID NO: 74574 - DNA, 120 bp, synthetic construct; identical to SEQ ID NO: 33166
  source 1..120: mol_type = other DNA

SEQ ID NO: 74575 - DNA, 120 bp, synthetic construct; identical to SEQ ID NO: 33167
  source 1..120: mol_type = other DNA

SEQ ID NO: 74576 - DNA, 120 bp, synthetic construct
  source 1..120: mol_type = other DNA
atgccactgcgctccagcctaggcaacagagtgagactccgtctcaaaaataaaagatcaaggatctgaatggacatttttccaaagaaggtataatgtgccaataagcacgtgaaaaga

SEQ ID NO: 74577 - DNA, 120 bp, synthetic construct
  source 1..120: mol_type = other DNA
cccagacggggtcgtggccgggcagaggggctcctcacttcccagtaggggcggccgggcagaagtgccccccacctcccggatggggcggctggccgggcagaggggtcctcacttccc

SEQ ID NO: 74578 - DNA, 120 bp, synthetic construct
  source 1..120: mol_type = other DNA
gctgagatggcagcagtaccgtccagctttggctcggcatcagagggagaccgtggaaggagaccgtggagagagggagaggagggagagggagagggagcggtcatgatttataagact

SEQ ID NO: 74579 - DNA, 120 bp, synthetic construct
  source 1..120: mol_type = other DNA
aatgtccctgtctgacagctttgaagagagcagtggttctcccagcatgcagctggagatctgagaacgggcagactgcctcctcaggtgggtccctgacccccgagcagcctaactggg

SEQ ID NO: 74580 - DNA, 120 bp, synthetic construct
  source 1..120: mol_type = other DNA
aattatactgcaaggctacagtaaccaaaacagcatggtactggtaccaaaacagagatatagatcaatggaacagaacagagccctcagaaataatgccacatatctacaactatctga

SEQ ID NO: 74581 - DNA, 120 bp, synthetic construct
  source 1..120: mol_type = other DNA
tcatgctgctataaagacacatgcacacgtatgtttattgcggcactattcacaatagcaaagacttggaaccaacccaaatgtccagcaacgatagactggattaagaaaatgtggcac

SEQ ID NO: 74582 - DNA, 120 bp, synthetic construct
  source 1..120: mol_type = other DNA
tgttcctgttagacacacatcccatccatccatttattcactaaacaatgagttctccctctccctccccctccccctccctccccctccccctccctctcccgtctccctcaacccacg

SEQ ID NO: 74583 - DNA, 120 bp, synthetic construct
  source 1..120: mol_type = other DNA
atgacaatggcggttttgtggaacagaaaagggggaaatgtggggaaaagatagagaaatcagattgttgctgtgtctgtgtagaaagaagtagacataggaggctccattttgttctgt

SEQ ID NO: 74584 - DNA, 120 bp, synthetic construct
  source 1..120: mol_type = other DNA
ttctgtcacctgtttattcaacaatgtgcactgagggccttctaagtgctgggaacttagaagtgctcaaggtgcatcaatgagcaaaacaaagatccctgctagtggagaggaaacttt

SEQ ID NO: 74585 - DNA, 120 bp, synthetic construct; identical to SEQ ID NO: 21595
  source 1..120: mol_type = other DNA

SEQ ID NO: 74586 - DNA, 120 bp, synthetic construct
  source 1..120: mol_type = other DNA
caaagtgttgggattacaggcgtgagccaccgcgcccggccatcttaactatttttaagtgcacagttcagtattattaagtatattcacattgttgtgcaaccaatctccagaactttt

SEQ ID NO: 74587 - DNA, 120 bp, synthetic construct
  source 1..120: mol_type = other DNA
actgcatcaagtaatgggcaaaataaccagctaacatcataatgacaggatcaaattcacacctaacaatattaaccttaaatgtaaatggactaaatgccccaattaaaagacacagac

SEQ ID NO: 74588 - DNA, 120 bp, synthetic construct
  source 1..120: mol_type = other DNA
tatctcaatagatgcagaaaaggcctttgacaagattcaacagctcttcatgctaaaaactctcaatagatattgatgggacgtatcccaaaataataagagctatttatgacaaaccca

SEQ ID NO: 74589 - DNA, 120 bp, synthetic construct
  source 1..120: mol_type = other DNA
ttaaagttcatatggaaccaaaaaagagcctgcattgccaagtcagtcctaagcaaaaagaacaaagctggaggcatcacgctacctgacttcaaactatactacaaggctacagtaacc

SEQ ID NO: 74590 - DNA, 120 bp, synthetic construct
  source 1..120: mol_type = other DNA
aaaggaatataaatcatgctgctataaagacacatgcacatgtatgtttattgcagcactacttacaatagcaaagacttggaaccaacccaaacgtccaacaatgatagactggattaa

SEQ ID NO: 74591 - DNA, 120 bp, synthetic construct; identical to SEQ ID NO: 25324
  source 1..120: mol_type = other DNA

SEQ ID NO: 74592 - DNA, 120 bp, synthetic construct
  source 1..120: mol_type = other DNA
cactgtcttccacaatggttgaactagtttacagtcccaccaacagtgtaaaagtgttcctatttctccacatcctctccagcacctgttgtttcctgactttttaacgatcgccattct

SEQ ID NO: 74593 - DNA, 120 bp, synthetic construct; identical to SEQ ID NO: 25325
  source 1..120: mol_type = other DNA

SEQ ID NO: 74594 - DNA, 120 bp, synthetic construct
  source 1..120: mol_type = other DNA
aactgggtggagcccacaccacagctcaaggagggctgcctgcctctgtaggctccacctctgggggcagggcacagacaaacaaaaagacagcagtaacctctgcagacttaaatgtcc

SEQ ID NO: 74595 - DNA, 120 bp, synthetic construct
  source 1..120: mol_type = other DNA
ggaagtttagagaaaaaagaataaaaagaaatgaacaaagcctccaagaaatatggcactatgtgaaaagaccaaatctacgtctgattggtgtacctgaaagtgacggggagaatggaa

SEQ ID NO: 74596 - DNA, 120 bp, synthetic construct
  source 1..120: mol_type = other DNA
aaaacaaaaaaaaggcaggggttgcaatcctagtctctgacaaaacagactttaaaccaacaaagatcaaaagagacaaagaaggccattatataatggtaaagggatcaattcaacaag

SEQ ID NO: 74597 - DNA, 120 bp, synthetic construct
  source 1..120: mol_type = other DNA
aaataaactagaaaatctagaagaaatggataaattcctggacacatacaccctccccagactaaaccagaaagaagttgaatctctgaatagaccaataacagtctctgaaattgtggc

SEQ ID NO: 74598 - DNA, 120 bp, synthetic construct; identical to SEQ ID NO: 25326
  source 1..120: mol_type = other DNA

SEQ ID NO: 74599 - DNA, 120 bp, synthetic construct; identical to SEQ ID NO: 25327
  source 1..120: mol_type = other DNA

SEQ ID NO: 74600 - DNA, 120 bp, synthetic construct
  source 1..120: mol_type = other DNA
ttactgtagctttgtggtaagttttgaaatcaggatgtattaagtcttctgactattctttaagattattttgggtcaggcgtggtggctcacacctggaatcccagcactttgggagct

SEQ ID NO: 74601 - DNA, 120 bp, synthetic construct
  source 1..120: mol_type = other DNA
tgcaggtaaggcttgctccaggcgccagaataggttgagagggagcccccggggggcccttgggaatttatttttttgggtacaaataatcactccatccctgggagacttgtggggtaa

SEQ ID NO: 74602 - DNA, 120 bp, synthetic construct
  source 1..120: mol_type = other DNA
tcacaaaggcgacgacaagtcccgggtccccggagccgcctccgcgacatacacgagtcgccctccgttatcctgggccctcctggcgaagtccccggtttccgctgtgctctgtggcga

SEQ ID NO: 74603 - DNA, 120 bp, synthetic construct
  source 1..120: mol_type = other DNA
aatgtgtatctcactcaccaatcaacctcttccttaagagaaaatgttaaggaagtcttaggcaaggccttgtttgttcatcactttagtttctctctcccgggatggctgagaatgtga

SEQ ID NO: 74604 - DNA, 120 bp, synthetic construct
  source 1..120: mol_type = other DNA
agcaattctcctgcctcagcctcctgagtagctggaattataggcgcctgccacaacacccggctaatttttgtatttgtagtagagatggggtttcaccacgttggccaggctggtctc

SEQ ID NO: 74605 - DNA, 120 bp, synthetic construct
  source 1..120: mol_type = other DNA
tccctagcgtgagaaaatctggggatccatgctctagtttacttcctttttttttttttttttgagatggagtctcgcttagattgcctaatctcagctcattgcaacttctgcctccgg

SEQ ID NO: 74606 - DNA, 120 bp, synthetic construct
  source 1..120: mol_type = other DNA
agctaagtttaaattttttgtttgtttgttcgtttgtttttattttttgagacagagtctcccgcccaggctggagcgcagatcactgcatccttgacctcccaggcttaagccatcctc

SEQ ID NO: 74607 - DNA, 120 bp, synthetic construct
  source 1..120: mol_type = other DNA
tgtgaccacagcagattccaaagctcgactcattttcttctctcttccttcccttttttcttttctttttttttttttttttgacagagtctcgctctgttgcccaggctggagtgcagt

SEQ ID NO: 74608 - DNA, 120 bp, synthetic construct
  source 1..120: mol_type = other DNA
gccgtgagcctcagtcatgccactgcactccaacctgggcaacagagtgaaagccggtgtccgaaagagaaagaaaaaaagacatagatacatcttttaaagttaggttgtatgttaatt

SEQ ID NO: 74609 - DNA, 120 bp, synthetic construct
  source 1..120: mol_type = other DNA
gagatggggtttcaccatgttagccaggatggtctcgatctcctgatttggtgatccgcccaccttggcctcccaaagtttcaaccatcgatcagaacttattgatgtacttatgtagct

SEQ ID NO: 74610 - DNA, 120 bp, synthetic construct
  source 1..120: mol_type = other DNA
tttataaaagttgctttgattctagttcacagaaccagaatctttcatataaaggtattagagggcccagtgtggtggctcatgcctgtaatcccagcatattgggaggctgaggaggga

SEQ ID NO: 74611 - DNA, 120 bp, synthetic construct
  source 1..120: mol_type = other DNA
gttctctggcctctacatttataatttctcataattctttatctaagtatttcttccctacctactgaagaaaactcaagttttcttccaccttaatgattatgctgtgtctgtgagttt

SEQ ID NO: 74612 - DNA, 120 bp, synthetic construct
  source 1..120: mol_type = other DNA
tctgatgagtcccaggagacgtgctgtgagtcccctttgggcatgatatgcatttatttttgtaatagagacagggtctcgccatgttggccaggctggtcttgaatttctggtctcaag

SEQ ID NO: 74613 - DNA, 120 bp, synthetic construct
  source 1..120: mol_type = other DNA
cagctacttgggaggctgaggcagaaaggcagaaagattgctttataaagcccaggagtttgagggccacctgggtggcatagctagacctcatctctaaaaaataagtaataaataaat

SEQ ID NO: 74614 - DNA, 120 bp, synthetic construct
  source 1..120: mol_type = other DNA
tgggcgacagagcaagactctgtctcaaaaaaaaaaaaaaaagtgggattgacattctcttcaaagttctggggttttcctttgcaaagacaggattggcaaggccagtgggtctttttt

SEQ ID NO: 74615 - DNA, 120 bp, synthetic construct
  source 1..120: mol_type = other DNA
caagaatcccgaagggaaatggactttgaagctgggcgtcttcttggctgtcttaatacaagtggcacatccaaatccaaaaccccgaaattcaaagtcttgagcacccgaaattctgaa

SEQ ID NO: 74616 - DNA, 120 bp, synthetic construct
  source 1..120: mol_type = other DNA
aagcctttgtcttctggcagtcagctcctctcttgctgacctgctcattgctttcttgcaaggtattttcctacctactttctggaataaatctgtctttctgtacttacaactaccttt

SEQ ID NO: 74617 - DNA, 120 bp, synthetic construct
  source 1..120: mol_type = other DNA
gctatagaatgggctggtgttgggagacttcacacggtgatggtggtctcggcccatccatccctgcagcccccaagacgtgctcccaggacgagtttcgctgccacgatgggaagtgca

SEQ ID NO: 74618 - DNA, 120 bp, synthetic construct
  source 1..120: mol_type = other DNA
cagcctcccaagtagcgcggattacaggcatgtgccaccacctccggctatttttttttctatttagtagagatggggtttcaccatgttagtcaggctggtcatgaactcttgacctca

SEQ ID NO: 74619 - DNA, 120 bp, synthetic construct
  source 1..120: mol_type = other DNA
cccgagtagctgagattaaaggcgtataccaccacgcccggctaattttttgtatttttattagagacagggtttctccatgttggccaggctggtcttgaactcctggtctcaggtgat

SEQ ID NO: 74620 - DNA, 120 bp, synthetic construct
  source 1..120: mol_type = other DNA
cctgtaatcccagcactttgggaagctgaggcaggcagatcacgagggcaggagattgagaccatcctggctaatacggtgaaaccccatctctactaaaactacaaaaaattagccggg

SEQ ID NO: 74621 - DNA, 120 bp, synthetic construct
  source 1..120: mol_type = other DNA
ttatttttatttttcttctcaagtatttaaatatgtaaaagccatttttaggcctggcaggatggttcacagctgtaatcccagcactttgggaggtcgaggcgggaggatcacgaggtc

SEQ ID NO: 74622 - DNA, 120 bp, synthetic construct
  source 1..120: mol_type = other DNA
actcctggcacccaccattctactttctgtccctatgaatgtgatggctctagggacctcctctgagtggaatcagacagcattttccttttttgactggcttatttcactgagccaagt

SEQ ID NO: 74623 - DNA, 120 bp, synthetic construct
  source 1..120: mol_type = other DNA
aaaaaaaaagaaaagaaaagaaaaaaaagaaaagaaatttcagctgacacagcttcacactcttggttgggttcccgtggtgaatgatgaggtcaggtgatgactggggatgacacctgg

SEQ ID NO: 74624 - DNA, 120 bp, synthetic construct
  source 1..120: mol_type = other DNA
agtgctcggattacaggcgtgagccactgcgcccagccgctaattttcatatttttagtaaaaacagggtttcaccatgttggccaggctagtcttgaactcctgaacccaagtgatcct

SEQ ID NO: 74625 - DNA, 120 bp, synthetic construct
  source 1..120: mol_type = other DNA
gcttgacagagcccacggcgtctcttcctatgacaccgtcatcagcagagacatccaggcccccgacgggctggctgtggactggatccacagcaacatctactggaccgactctgtcct

SEQ ID NO: 74626 - DNA, 120 bp, synthetic construct
  source 1..120: mol_type = other DNA
ttggtgtctggaagggaaaagcagggaagagagcatcatcagatgcctgcgggtgaaggtgggcccgctatggccagcgtccctttttatttttatttatttatttatttgagatggaat

SEQ ID NO: 74627 - DNA, 120 bp, synthetic construct
  source 1..120: mol_type = other DNA
ctcaaactcttgggctcagttgattctcccacttcagcctcccaagtagctggaactacaggtgaacaccactgtgcccagctaatttattttatttttagtagagatgaggtctcacta

SEQ ID NO: 74628 - DNA, 120 bp, synthetic construct
  source 1..120: mol_type = other DNA
gtagctgagattacagacacgtgccaccacggcagactaattttattttatttttgggaagagacaaagtcttgttatgttggcctggctggtctcaaactcagggtgcaagcgatcctc

SEQ ID NO: 74629 - DNA, 120 bp, synthetic construct
  source 1..120: mol_type = other DNA
atttctgttttctttctttcttcttcttctttttttttttctaagagacaggatctcactctgtccccaggcaggagtgcagtgctgtgatcatagctcactgcagccttaacctcctgg

SEQ ID NO: 74630 - DNA, 120 bp, synthetic construct
  source 1..120: mol_type = other DNA
gtgaaaggcagtgatcctctgtcacatgtgatcttggctctcaggggacatttggcaatttctagagattttttggttgtcacaagtcaatggggaagactgttggcatttagtgggtag

SEQ ID NO: 74631 - DNA, 120 bp, synthetic construct
  source 1..120: mol_type = other DNA
ttccacaacagcgtgaatctgcttaaggccaccgaactgtgcactcacaaatagtcgagatggtacattttatgttatgtgtatttcaccacaattaaaaactagttgtgggccaggtgt

SEQ ID NO: 74632 - DNA, 120 bp, synthetic construct
  source 1..120: mol_type = other DNA
aaccttgaaacctccttgtggaaactctggaatgttctggaaatttctggaatcttctggtatagctgatgatctcgttcctgccctgactccgcttcttctgccccaggagtgaactgg

SEQ ID NO: 74633 - DNA, 120 bp, synthetic construct
  source 1..120: mol_type = other DNA
cttgagcccaggaggtcaaggctacagagagctataatcacaccacttcactccagcctgggggacaaagtgaaaccctgtctgaaaaaaacaaaaaaagaaaaaggaaaaagaaacaat

SEQ ID NO: 74634 - DNA, 120 bp, synthetic construct
  source 1..120: mol_type = other DNA
ttttagttatttcttttttttttttttttttttttgagacagagtcttactccgtcgcccaggctggagtgcagcggtgcgatgtctgcgcactgcaagctccgccccctgggttcatgc

SEQ ID NO: 74635 - DNA, 120 bp, synthetic construct
  source 1..120: mol_type = other DNA
cttggcctcccaaggtcatttgagactttcgtcattaggcgcacacctatgagaagggcctgcaggcacgtggcactcagaagacgtttatttattctttcagaggctgaggctgcagtg

SEQ ID NO: 74636 - DNA, 120 bp, synthetic construct
  source 1..120: mol_type = other DNA
agctgggattacaggcatgcgccaccacgctcggctaattttgtatttttagtacagaaggggcttctctgttggtcaggctggtcgtgaactctcaacctcaggtgagccacccgcctg

SEQ ID NO: 74637 - DNA, 120 bp, synthetic construct
  source 1..120: mol_type = other DNA
aaaacttttttatttttatttttttgggacacggtctcactgtgtaccccagactggagtgatagagtgctgtcatggctcactgcagcctcaacctccctgggctcaggtgatcttcct

SEQ ID NO: 74638 - DNA, 120 bp, synthetic construct
  source 1..120: mol_type = other DNA
aaaaatacaaaaattagccaggcgtggtggcaggtgcctgtaatcccagctactcgggaggctgaagcacgagaatcgcttgaatccaggaggcggaggttgcagtgagctgagattgcg

SEQ ID NO: 74639 - DNA, 120 bp, synthetic construct
  source 1..120: mol_type = other DNA
tgccattcaacctcaggactgagcatgctgggcattgtggggtccgaaggtggctcccctgtccccttcaaaataccctctttttcttttcttcttttttttttttttttttttttgaga

SEQ ID NO: 74640 - DNA, 120 bp, synthetic construct
  source 1..120: mol_type = other DNA
tctgtttctatcccccacaaaaagaaccttcttaaaccggaattgagtcctacaacctcgataactcacaaataagcccgtgtggcctctcacagacttgggaagttctccaagtgtcca

SEQ ID NO: 74641 - DNA, 120 bp, synthetic construct
  source 1..120: mol_type = other DNA
tgggaggtcgaggttgcagtgaactgagatcatgtcactgcactccagcctggtgacagagcaagaccccgtctcaaaaaaaaaaaaagaaagaaaaaaattcttatgcatagatttgcc

SEQ ID NO: 74642 - DNA, 120 bp, synthetic construct
  source 1..120: mol_type = other DNA
gaaaaatcgcttgaacctaggaggcagaggttgcagtgagccgagatcgcgccactgcattccagcccgggaggcaagagcaaaactccatctcaaaaaaaaaaaaaaaaggagttcaga

SEQ ID NO: 74643 - DNA, 120 bp, synthetic construct
  source 1..120: mol_type = other DNA
tgatctttacacaaggggtttagggtaggtagccttctctgaaccaggagaacagcctgtgcgaaggccctgaggctggaccgtgcctgttgggtttgaggccgttgtagctggagcaaa

SEQ ID NO: 74644 - DNA, 120 bp, synthetic construct
  source 1..120: mol_type = other DNA
gtcggaaatgatctggctgaatccgtggtggcaccgagaccaaactcattcaccaaatgatgccacttcccagaggcagagcctgagtcactggtcacccttaatatttattaagtgcct

SEQ ID NO: 74645 - DNA, 120 bp, synthetic construct
  source 1..120: mol_type = other DNA
aggcatttgaggctgtcgtgagctatgattatgccactgctttccagcctgggcaacatagtaagaccccatctcttaaaaaatgaatttggccagacacaggtgcctcacgcctgtaat

SEQ ID NO: 74646 - DNA, 120 bp, synthetic construct
  source 1..120: mol_type = other DNA
cgctttttgggagaatgatgtccccgttgtatgtatgagtggcttctgggagatgggtgtcactttttaaaccactgtatagaaggtttttgtagcctgaatgtcttactgtgatcaatt

SEQ ID NO: 74647 - DNA, 120 bp, synthetic construct; identical to SEQ ID NO: 7274
  source 1..120: mol_type = other DNA

SEQ ID NO: 74648 - DNA, 120 bp, synthetic construct; identical to SEQ ID NO: 11839
  source 1..120: mol_type = other DNA

SEQ ID NO: 74649 - DNA, 120 bp, synthetic construct; identical to SEQ ID NO: 11840
  source 1..120: mol_type = other DNA

SEQ ID NO: 74650 - DNA, 120 bp, synthetic construct; identical to SEQ ID NO: 11841
  source 1..120: mol_type = other DNA

SEQ ID NO: 74651 - DNA, 120 bp, synthetic construct
  source 1..120: mol_type = other DNA
gtgaggagaccctctgcctggcaactgccccgtctgagaagtgagaagcccctccgcccggcagccacaccgtctgagaagtgaggagcccctccgcccggcagccaccccgtctgggaa

SEQ ID NO: 74652 - DNA, 120 bp, synthetic construct; identical to SEQ ID NO: 11842
  source 1..120: mol_type = other DNA

SEQ ID NO: 74653 - DNA, 120 bp, synthetic construct
  source 1..120: mol_type = other DNA
tccagtctgggcgacagagcaagactctgtctcaaaaaaacaaaaacaaaaacaaaaacaaaacactagcaaccttgagaatggaagcatgctgtttcttggtgagactgatccctagtg

SEQ ID NO: 74654 - DNA, 120 bp, synthetic construct
  source 1..120: mol_type = other DNA
aaaacagcaggttatccagaagctctagctaagatcactgatgaaggtggctgcactaaacaacagattttcactgtagatggaatagccctctattggaagaagatgccatgtaggatt

SEQ ID NO: 74655 - DNA, 120 bp, synthetic construct; identical to SEQ ID NO: 18830
  source 1..120: mol_type = other DNA

SEQ ID NO: 74656 - DNA, 120 bp, synthetic construct; identical to SEQ ID NO: 18831
  source 1..120: mol_type = other DNA

SEQ ID NO: 74657 - DNA, 120 bp, synthetic construct; identical to SEQ ID NO: 18832
  source 1..120: mol_type = other DNA

SEQ ID NO: 74658 - DNA, 120 bp, synthetic construct; identical to SEQ ID NO: 18819
  source 1..120: mol_type = other DNA

SEQ ID NO: 74659 - DNA, 120 bp, synthetic construct; identical to SEQ ID NO: 18820
  source 1..120: mol_type = other DNA

SEQ ID NO: 74660 - DNA, 120 bp, synthetic construct; identical to SEQ ID NO: 18821
  source 1..120: mol_type = other DNA

SEQ ID NO: 74661 - DNA, 120 bp, synthetic construct; identical to SEQ ID NO: 18822
  source 1..120: mol_type = other DNA

SEQ ID NO: 74662 - DNA, 120 bp, synthetic construct
  source 1..120: mol_type = other DNA
tctaagtctttgctattgtgaatagtgccacaataaacatacgtgtgcgtgtgtctttatagcagcatgatttataatcctttgggtatatacccagtaatgggattgctgggtcaaatg

SEQ ID NO: 74663 - DNA, 120 bp, synthetic construct
  source 1..120: mol_type = other DNA
ttgttaaaatttctgttcttttacatttgctgaggagtgctttatttccaactatgtggtcaattttggaataggtgtggtgtggtgctgaaaagaatgtatattctgttgatttggggt

SEQ ID NO: 74664 - DNA, 120 bp, synthetic construct
  source 1..120: mol_type = other DNA
ctcttctggcttgtagagtttctgccgagagatcagctgttagtctgatgggcttccctttgtgggtaacccaacctttctctctgactgcccttaaaattttttccttcatttcaactt

SEQ ID NO: 74665 - DNA, 120 bp, synthetic construct; identical to SEQ ID NO: 18823
  source 1..120: mol_type = other DNA

SEQ ID NO: 74666 - DNA, 120 bp, synthetic construct; identical to SEQ ID NO: 18824
  source 1..120: mol_type = other DNA

SEQ ID NO: 74667 - DNA, 120 bp, synthetic construct
  source 1..120: mol_type = other DNA
atctgatgaaggcttattattcagaatatataaaggactgcaaatcaaaaccccaatgagataccatcccacaccagtcagaatggcgatcattaaaaagtcaggaaacaacaggtgctg

SEQ ID NO: 74668 - DNA, 120 bp, synthetic construct; identical to SEQ ID NO: 18825
  source 1..120: mol_type = other DNA

SEQ ID NO: 74669 - DNA, 120 bp, synthetic construct
  source 1..120: mol_type = other DNA
tcacactgcaatgtgccaccgaaactctaaagcccttgtctcaagcctacctctgagtttcataaaacaagtcagatatatctgccctcataagacatcttcgcatttgcctgttttata

SEQ ID NO: 74670 - DNA, 120 bp, synthetic construct; identical to SEQ ID NO: 18826
  source 1..120: mol_type = other DNA

SEQ ID NO: 74671 - DNA, 120 bp, synthetic construct; identical to SEQ ID NO: 18827
  source 1..120: mol_type = other DNA

SEQ ID NO: 74672 - DNA, 120 bp, synthetic construct; identical to SEQ ID NO: 18828
  source 1..120: mol_type = other DNA

SEQ ID NO: 74673 - DNA, 120 bp, synthetic construct
  source 1..120: mol_type = other DNA
tgagccaggatcatgccactgtactccaacctgggtgacagagcaagactcatctcaaaaaaaaaaaaaaaaaaagaatgataacagggccagaaacggtggctcccacttattcaccca

SEQ ID NO: 74674 - DNA, 120 bp, synthetic construct
  source 1..120: mol_type = other DNA
gaacccaggaggtcaaggctgcagtgaactatgatcataccactgtactccagtccagcttgggcaacagagtgagacgctgtctcaaaaaaaaagaataacagtaaaaacagttatcaa

SEQ ID NO: 74675 - DNA, 120 bp, synthetic construct
  source 1..120: mol_type = other DNA
gtttacatgcttactatgtaaaaagttatcttaaatcaagaaagctatgaaccagcaagtaacataaacaaatagattggccgggcgcggtggctcacgcctgtaatcccagcactttgg

SEQ ID NO: 74676 - DNA, 120 bp, synthetic construct
  source 1..120: mol_type = other DNA
caggggaacaggggcctaggtatgtttacaaaagtccagaatgggtcagtatttgggggaaatagagatttgaaggttttaattcctcatataacacagcaattcagttctgtttcccca

SEQ ID NO: 74677 - DNA, 120 bp, synthetic construct
  source 1..120: mol_type = other DNA
ctggggcacagcttagtgggcacctgggagggaggtttatgatccagctctcactatgttctaaaagctggatatttgtgagaagatgaataaacatatctgaaacataaataataaatc

SEQ ID NO: 74678 - DNA, 120 bp, synthetic construct
  source 1..120: mol_type = other DNA
tttttcttttcttttctttgtttcctttttttttttttttttttgagacagaatcacgctctgtcctccaggctggatggagtgcagtggtgtgatctcagctcactgcaaccttcacct

SEQ ID NO: 74679 - DNA, 120 bp, synthetic construct
  source 1..120: mol_type = other DNA
ccgtgcctgtgcagcgcggccttggggaccggctcctggaagagccgcagcacggcctgcaccagctcgctgttgggcggcagccgctgctccatgccgaacaccagcaggtgtgtgctg

SEQ ID NO: 74680 - DNA, 120 bp, synthetic construct
  source 1..120: mol_type = other DNA
gctcctcctcactgctccttggaccgtggccctcacacagcctcccacagagtcccaaaaggccaggggcccttcgacacctccagagtgggcacaaccggcctgcccccgaccatggga

SEQ ID NO: 74681 - DNA, 120 bp, synthetic construct
  source 1..120: mol_type = other DNA
ccaacttacaagggatgtgaaggacctcttcaaggagaactacaaatcacttctcaatgaaataaaagaggatagaaacaaatggaagaacatttcatgctcatgggtaggaagaatcaa

SEQ ID NO: 74682 - DNA, 120 bp, synthetic construct
  source 1..120: mol_type = other DNA
atttatgcagccaaaaaaacacgtgaaaaaatgctcatcatcactggccatcagagaaatgcaaatatctatgttatatactcaaatatatgtgagtctaagataatataagatatatat

SEQ ID NO: 74683 - DNA, 120 bp, synthetic construct; identical to SEQ ID NO: 24824
  source 1..120: mol_type = other DNA

SEQ ID NO: 74684 - DNA, 120 bp, synthetic construct
  source 1..120: mol_type = other DNA
taatgggatggctgggtcaaatggtatttctagttctagatccctgaggagtcgccacactgacttccacagtggttgaactagtttacagtcccaccaacagtgtaaaagtgttcctat

SEQ ID NO: 74685 - DNA, 120 bp, synthetic construct
  source 1..120: mol_type = other DNA
ctttgaaaactggcacaagagagggatgccctctctcagcactcctattcaacatagtgttggaagttctagccagggcaattaggcaggagaaggaaataaaggatattcaattaggaa

SEQ ID NO: 74686 - DNA, 120 bp, synthetic construct
  source 1..120: mol_type = other DNA
agacaaaattgacaaatgggatctaattaaactaaagagcttctgcacaacaaaagaaactaccatcagagtgaacaggcaacctacaaaatgggagaaaattttcgcaacctactcatc

SEQ ID NO: 74687 - DNA, 120 bp, synthetic construct
  source 1..120: mol_type = other DNA
ataataaagaacgaaagaaagaaaaaaaaagatttgactgccccacttgatttcagacttgcatggggcctgtagccccctttgttttggcccattttccccatttggaatgggtgtatt

SEQ ID NO: 74688 - DNA, 120 bp, synthetic construct; identical to SEQ ID NO: 24825
  source 1..120: mol_type = other DNA

SEQ ID NO: 74689 - DNA, 120 bp, synthetic construct
  source 1..120: mol_type = other DNA
ataactagaataaccagtgcagagaagtccttaaaggacctgatggagctgaaaatcaaggcacgagaactatgtgatgaatgcacaagcctcattagccgatttgatcaactggaagaa

SEQ ID NO: 74690 - DNA, 120 bp, synthetic construct
  source 1..120: mol_type = other DNA
ggaagatctaccaagcaaatggaaaacaaaagaaggcaggagttgcaatcctagtctctgataaaacaaactttaaaccaacaaagatcaaaagagacaaggccattacataatggtaaa

SEQ ID NO: 74691 - DNA, 120 bp, synthetic construct
  source 1..120: mol_type = other DNA
catatgcaaatcaataaacataatccagcatataaacagaaccaatgacaaaaaccatatgattatctcaatagatgcagaaaaggcatttgacaaaattcaacaaccttcatgctaaaa

SEQ ID NO: 74692 - DNA, 120 bp, synthetic construct
  source 1..120: mol_type = other DNA
tgacttcaaactatactacaaggctacagtaaacaaaacagcatggtactggtactgaaatagagacatagactaatggaacagaagagagccctcagaaataacgccgcatgtctacga

SEQ ID NO: 74693 - DNA, 120 bp, synthetic construct
  source 1..120: mol_type = other DNA
ttgacccagcaatgccattactgggtacatactgaaaggattataaatcatgctgctataaagatacatgcacatgtatgtttattgcggcactattcacaatagcaaagacttggaacc

SEQ ID NO: 74694 - DNA, 120 bp, synthetic construct; identical to SEQ ID NO: 24826
  source 1..120: mol_type = other DNA

SEQ ID NO: 74695 - DNA, 120 bp, synthetic construct
  source 1..120: mol_type = other DNA
tttcatgtgtcttttggctgcataaatgtcttcttttgagaagtgtctgttcatatccttcacccactttttgatggggttgtttgtttttttcttgtaaatttgttggagttcattgta

SEQ ID NO: 74696 - DNA, 120 bp, synthetic construct; identical to SEQ ID NO: 9194
  source 1..120: mol_type = other DNA

SEQ ID NO: 74697 - DNA, 120 bp, synthetic construct
  source 1..120: mol_type = other DNA
tattagccctttgtcagatgagtaggttgcaaaaattttctcccattttgtaggttgcctgttcactcttttgctgtggtagtttcttttgctgtgcagaagctctttagtttaattaga

SEQ ID NO: 74698 - DNA, 120 bp, synthetic construct
  source 1..120: mol_type = other DNA
gcttaaggagatttttgggctgagacaatggggtgttctagatatacaaccatgtcgtctgcaaacagggacaatttgacttcctcttttcctaattgaataccctttatttccttctcc

SEQ ID NO: 74699 - DNA, 120 bp, synthetic construct
  source 1..120: mol_type = other DNA
ctttatcattttttattgcatctatttgattcttctctctttttttctttattagtcttgctagcggtctatcaattttgttgatcctttcaaagaaccagctcctggattcattaattt

SEQ ID NO: 74700 - DNA, 120 bp, synthetic construct
  source 1..120: mol_type = other DNA
cacagcacactgatggctcttgactctttatccaatttgctagtctgtgtcttttaattggagcatttagtccatttacatttaaagttaatattgttatgtgtgaatttgatcctgtca

SEQ ID NO: 74701 - DNA, 120 bp, synthetic construct
  source 1..120: mol_type = other DNA
aaacttcccttctcgcttcatttcattcattcatcttccatcactgatacactttcttccagttgatcgcatcggctcctgaggcttctgcattcttcaagtagttcttgagccttggct

SEQ ID NO: 74702 - DNA, 120 bp, synthetic construct
  source 1..120: mol_type = other DNA
ctcacatccaggtgtgggatataatctcctggtgcaccgtttcctaagcctgtcggaaaagcgcagtattcgagtgggagtggcccgattttccaggtgccatctgtcacccctttcctt

SEQ ID NO: 74703 - DNA, 120 bp, synthetic construct
  source 1..120: mol_type = other DNA
ggttattcagagaagtagcagacaggaatagttctgaaaagctgttcttttgggggtagatttgcatctgtagaggaaatctgcattggtgaggtaaagaacagacacagaggctttctc

SEQ ID NO: 74704 - DNA, 120 bp, synthetic construct
  source 1..120: mol_type = other DNA
tgaagtagtccatagattttttttttgttccagattaaatgcttttttaaaaaatttattattattatactttaagttatagggtacatgtgcacattgtgcaggttagttacatatgta

SEQ ID NO: 74705 - DNA, 120 bp, synthetic construct
  source 1..120: mol_type = other DNA
gtttaattagatcccatttgtcaattttggcttttgttgccattgctcttggtgttttagacatgaagtccttgcccatgcctatgtcctgaatggtaatgcctaggttttcttctaggg

SEQ ID NO: 74706 - DNA, 120 bp, synthetic construct
  source 1..120: mol_type = other DNA
gggctgagacaatggggttttctagatatacaatcctgtcgtctgcaaacagggacaatttgactacctcttttcctaattgaataccctttatttccttctcctgcctaattgccctgg

SEQ ID NO: 74707 - DNA, 120 bp, synthetic construct
  source 1..120: mol_type = other DNA
cattttttattgcgtctattagattcttctctctttttttctttattagtcttgttagcagtctatcaattttgttgatcctttcaaaaaaccagctcctggattcattaattttttgaa

SEQ ID NO: 74708 - DNA, 120 bp, synthetic construct
  source 1..120: mol_type = other DNA
tttgttttccatttgcttggtagatcttcctccatccttttattttgagcctatgtgtgtctctgcacgtgagatgggtttcctgaatacagcacactgatgggtcttgactccgtatcc

SEQ ID NO: 74709 - DNA, 120 bp, synthetic construct
  source 1..120: mol_type = other DNA
tcgtttctttttattcttttttctctaaacttcccttctcacttcatttcattcacttcatcttccatcgctgataccctttcttccagttgatcgcatcggctcctgaggcttctgcct

SEQ ID NO: 74710 - DNA, 120 bp, synthetic construct
  source 1..120: mol_type = other DNA
cgagcttcctggctgctttgtttacctaatcaagcctggacaatggtgggcgcccctcccccagccttgctgccgccttgcagtttgatctcagactgctgtgctagcaatcagtgagac

SEQ ID NO: 74711 - DNA, 120 bp, synthetic construct
  source 1..120: mol_type = other DNA
cggggtgaaattttgatacgtggtacaacattgataaactttattttattttattttatttattattattattatactttaagttttagggtacatgtgcacaatgtgcaggttagttac

SEQ ID NO: 74712 - DNA, 120 bp, synthetic construct
  source 1..120: mol_type = other DNA
ctgatggtagtttctttggctgtgcagaagctctttagtttaatgagatctcatttgtcaattttggcttttgttgccattgcttttggtgttttagacatgaagtccttgcccatgcct

SEQ ID NO: 74713 - DNA, 120 bp, synthetic construct
  source 1..120: mol_type = other DNA
gatattggctgtggatttgtcatagatagctcattattttgagatatgtcccatgaatacctaatttattgagagtttttagcatgaagggttgttgaattttgtcaaaggccttttctg

SEQ ID NO: 74714 - DNA, 120 bp, synthetic construct
  source 1..120: mol_type = other DNA
aaaaaaccagctcctggattcattgattttttgaagggttttttgtgtctctatttccttcagttctgctctgattttacatatttcttgccttctgctagcttttgaatgtgtttgctc

SEQ ID NO: 74715 - DNA, 120 bp, synthetic construct
  source 1..120: mol_type = other DNA
atatcgttatgtgtgaatttggtcctgtcattatgatgttagctggttattttgttcattagttgatgcagtttcttcctagcctcgaaggtctttacaatttggcatgattttgcagtg

SEQ ID NO: 74716 - DNA, 120 bp, synthetic construct
  source 1..120: mol_type = other DNA
tttcctcctgtagctcggagtagtttgatcgtctgaagctttcttctctcacctcgtcaaagtcattctccatccagctttgttctgttgctggtgaggaactgcgttcctttggaggag

SEQ ID NO: 74717 - DNA, 120 bp, synthetic construct; identical to SEQ ID NO: 7687
  source 1..120: mol_type = other DNA

SEQ ID NO: 74718 - DNA, 120 bp, synthetic construct
  source 1..120: mol_type = other DNA
gcagtgtttggttttttgttcttgcgatagtttactgagaatgatgatttccaatttcatccatgtccctacaaaggacatgaactcatcattttttatggctgcatagtattccatggt

SEQ ID NO: 74719 - DNA, 120 bp, synthetic construct
  source 1..120: mol_type = other DNA
ggttttcttctagggtttttatggttttaggtctaacgtttaaatctttaatccatcttgaattgatttttgtgtaaggtgtaaggaagggatccagtttcagcttcctacatatggcta

SEQ ID NO: 74720 - DNA, 120 bp, synthetic construct
  source 1..120: mol_type = other DNA
atatagaatcatgtcatctgcaaacagggacaatttgacttcctcttttcctaattggataccctttatttccttctcttgcctaattgccctggccagaacttccaacactatgttgaa

SEQ ID NO: 74721 - DNA, 120 bp, synthetic construct
  source 1..120: mol_type = other DNA
tcaattttgttgatcctttcaaaaaaccagctcctggattcattaattttttgaagggttttttgtgtctctatttccttcagttctgctctgattttacatatttcttgccttctgctg

SEQ ID NO: 74722 - DNA, 120 bp, synthetic construct
  source 1..120: mol_type = other DNA
cttttcattggagcatttagtccatttacatttaaagttaatattgttatgtgtgcatttgatcctgtcattatgatgttagctggtgattttgctcgttagttgatgcagtttcttcct

SEQ ID NO: 74723 - DNA, 120 bp, synthetic construct
  source 1..120: mol_type = other DNA
cagctttgttccgttgctggtgaggaactgcgttcctttggaggaggagagacgctctgcgttttagagtttccagtttttctgttctgttttttccccatctttgtggttttatctact

SEQ ID NO: 74724 - DNA, 120 bp, synthetic construct; identical to SEQ ID NO: 7688
  source 1..120: mol_type = other DNA

SEQ ID NO: 74725 - DNA, 120 bp, synthetic construct; identical to SEQ ID NO: 7689
  source 1..120: mol_type = other DNA

SEQ ID NO: 74726 - DNA, 120 bp, synthetic construct; identical to SEQ ID NO: 7690
  source 1..120: mol_type = other DNA

SEQ ID NO: 74727 - DNA, 120 bp, synthetic construct; identical to SEQ ID NO: 25174
  source 1..120: mol_type = other DNA

SEQ ID NO: 74728 - DNA, 120 bp, synthetic construct
  source 1..120: mol_type = other DNA
tgacccccccacctccctcccggatggggcggctggccgggcggggggctgaccccccaacctccctcccggacagttcttttaacacttgaaaaataatgctccacttcctctggtctc

SEQ ID NO: 74729 - DNA, 120 bp, synthetic construct; identical to SEQ ID NO: 7640
  source 1..120: mol_type = other DNA

SEQ ID NO: 74730 - DNA, 120 bp, synthetic construct; identical to SEQ ID NO: 7641
  source 1..120: mol_type = other DNA

SEQ ID NO: 74731 - DNA, 120 bp, synthetic construct
  source 1..120: mol_type = other DNA
cttttcctcctagaatgccactcagagccgtccctcttgctcgtgaacctggagccccctatgtctcccccagtacccctgcattctacacctagatcctcaggcttctctttatctcca

SEQ ID NO: 74732 - DNA, 120 bp, synthetic construct
  source 1..120: mol_type = other DNA
gctgtggctgccacacaagccagccattcttggcaagacaaaggccggctggggcagggtggctctggtgcctccctggtgggtgtctggactctgcaggacgtcagtaagtggatcctg

SEQ ID NO: 74733 - DNA, 120 bp, synthetic construct
  source 1..120: mol_type = other DNA
tagtctgtctgtcctttcacctatccttccagccatccatacatccatctatccatctgtccattcacctgtccatccatccatccattcatccatccatgcatccatctgtccattcat

SEQ ID NO: 74734 - DNA, 120 bp, synthetic construct
  source 1..120: mol_type = other DNA
gccatatccctattacagagtcaagtaacgtcccaagacccacagaagggcactggcccaagaccacacagtgggcgaggggtctgggcatagcaggcaggcagggttgggaatggtggg

SEQ ID NO: 74735 - DNA, 120 bp, synthetic construct
  source 1..120: mol_type = other DNA
tgcctggtctggatggtatgtcatccttgtgttacaagtgaggaaactgaggctcagggagtaacaccaccggttcaaggtcttaaagccgagaagtggcccctctgggttcggaaggca

SEQ ID NO: 74736 - DNA, 120 bp, synthetic construct
  source 1..120: mol_type = other DNA
ctgggactaagtcacgaggtgcgtgaatatcaggcgggactttaactcagccagtggagagctatggagggttttgctctttgtgtgggtgtgtgagtggctatgatcctagttgtccag

SEQ ID NO: 74737 - DNA, 120 bp, synthetic construct
  source 1..120: mol_type = other DNA
agaatttaaaatgccatctcaggcgtgaacataactccgaggggggcagtttagccacggtggtggcggtggtggtcgtggtggtcgcagagaccctgcttaggagggcacgggaagaca

SEQ ID NO: 74738 - DNA, 120 bp, synthetic construct
  source 1..120: mol_type = other DNA
caatgagcgcacgggggcgggaccggggcggggaggtttaagagcgcgggacactggtgctgcgctgctggactgcgccgccggagcgacgggcttcgggtcggtgcaaggcaggcgcac

SEQ ID NO: 74739 - DNA, 120 bp, synthetic construct
  source 1..120: mol_type = other DNA
aacattggagcgcattcatagggcattatgtcctcaaacttccacaagcaaattctgttcggacccaccctcagctcagaccccttcctggggagaaaggctcttcctttagagaagtga

SEQ ID NO: 74740 - DNA, 120 bp, synthetic construct
  source 1..120: mol_type = other DNA
agcactcaagccttactgctatgtgatcttgggcatccttcagccccactctgggctaccaccagctctgagcacctctcatcttggaatttggggcctttctccaacagaggggatgtg

SEQ ID NO: 74741 - DNA, 120 bp, synthetic construct
  source 1..120: mol_type = other DNA
taatggcacccacctccgagggctgtcagggagaggaagggagagaatctgtctttgcactttgttctctgcccaggggagctctgttatgcccattttactgaagacgagactgaggct

SEQ ID NO: 74742 - DNA, 120 bp, synthetic construct
  source 1..120: mol_type = other DNA
aggtttcctgccacaaccctgctgaccgttggcaactttgcagaacttcagggctgctttggctcagagtgggtagcttgtcctgcaggtcacccaggacaggggtgctggcccaaaggg

SEQ ID NO: 74743 - DNA, 120 bp, synthetic construct
  source 1..120: mol_type = other DNA
atggccctggggtggggatgaagggctgcctgctgaaggccgattttctccttccagacgttcatcttcactgacggggaagatgaggccctggccaggcacacgggtgagccctggact

SEQ ID NO: 74744 - DNA, 120 bp, synthetic construct
  source 1..120: mol_type = other DNA
gttaggccagcccggtcccaggctcctcgccactgtggggcctggcttagttcatcttcccagccatggggtgtccccagcctcctgtgtggcactgcccacttacttcctatattccac

SEQ ID NO: 74745 - DNA, 120 bp, synthetic construct
  source 1..120: mol_type = other DNA
ctcttctcttcactgtgatgcgcctactgtgcgtattttgtccacgctggcaatgcagccagccccagctggtccccagtttgggaccttattcctggggtgtgcagggcaggtgtcctt

SEQ ID NO: 74746 - DNA, 120 bp, synthetic construct
  source 1..120: mol_type = other DNA
gatttttggatctttctacagctacggggctccgggctactttgcagggatgcgatgcgtaggtgcctttctcttcctgctgaccacaagctctgtgctgggggtacctgtgccctgaag

SEQ ID NO: 74747 - DNA, 120 bp, synthetic construct
  source 1..120: mol_type = other DNA
cacaggtgaaggggaggcttggccttgggtgcaccgcatggagcaggtagataggaaacgcttagagacaactattttggaacgaaacctggcgtcactatagctgcctgctggtgacta

SEQ ID NO: 74748 - DNA, 120 bp, synthetic construct
  source 1..120: mol_type = other DNA
ccaccaaggcgtggatccggacgaaggttccggaacagccggtcccgagcacccacgtgcagcttccgatcacagccctggcgtggcttctctgtccccggctaaggcccgcggtcgctg

SEQ ID NO: 74749 - DNA, 120 bp, synthetic construct
  source 1..120: mol_type = other DNA
gaggattccggaggcccgtgctgggtggccctggggaaatcactcatcccctctgggcctcagtttcctcactgggaaaatggggctattgttcattctaactcttgcgtgaggatcaaa

SEQ ID NO: 74750 - DNA, 120 bp, synthetic construct
  source 1..120: mol_type = other DNA
ggaggatcgcttgggcccggaagttaaagaccagcctgggcaacatagcgagaccccaccttacaaaaaaacgaaagaacaaacaaaacataaaccgcccagaccaaagtgaaggtctta

SEQ ID NO: 74751 - DNA, 120 bp, synthetic construct
  source 1..120: mol_type = other DNA
tctttgaggatctttctgtttgtctttgttgctctccccatctgtttccctgtctgtttctggtctctttcctgcctctccgccaccctttcctcttccactgatttctgccagtctcag

SEQ ID NO: 74752 - DNA, 120 bp, synthetic construct; identical to SEQ ID NO: 19746
  source 1..120: mol_type = other DNA

SEQ ID NO: 74753 - DNA, 120 bp, synthetic construct; identical to SEQ ID NO: 19747
  source 1..120: mol_type = other DNA

SEQ ID NO: 74754 - DNA, 120 bp, synthetic construct; identical to SEQ ID NO: 19748
  source 1..120: mol_type = other DNA

SEQ ID NO: 74755 - DNA, 120 bp, synthetic construct
  source 1..120: mol_type = other DNA
ggattcgctgtgtggcccggagccagtatcttggcctctctgggtctcagtttgctcatctcagtgaatgggacacagacacagtcgcgctgcgggctaacgctttatttgccagccaag

SEQ ID NO: 74756 - DNA, 120 bp, synthetic construct; identical to SEQ ID NO: 19749
  source 1..120: mol_type = other DNA

SEQ ID NO: 74757 - DNA, 120 bp, synthetic construct; identical to SEQ ID NO: 17831
  source 1..120: mol_type = other DNA

SEQ ID NO: 74758 - DNA, 120 bp, synthetic construct; identical to SEQ ID NO: 17832
  source 1..120: mol_type = other DNA

SEQ ID NO: 74759 - DNA, 120 bp, synthetic construct; identical to SEQ ID NO: 17833
  source 1..120: mol_type = other DNA

SEQ ID NO: 74760 - DNA, 120 bp, synthetic construct; identical to SEQ ID NO: 17834
  source 1..120: mol_type = other DNA

SEQ ID NO: 74761 - DNA, 120 bp, synthetic construct; identical to SEQ ID NO: 17772
  source 1..120: mol_type = other DNA

SEQ ID NO: 74762 - DNA, 120 bp, synthetic construct; identical to SEQ ID NO: 17773
  source 1..120: mol_type = other DNA

SEQ ID NO: 74763 - DNA, 120 bp, synthetic construct; identical to SEQ ID NO: 17774
  source 1..120: mol_type = other DNA

SEQ ID NO: 74764 - DNA, 120 bp, synthetic construct; identical to SEQ ID NO: 17775
  source 1..120: mol_type = other DNA

SEQ ID NO: 74765 - DNA, 120 bp, synthetic construct; identical to SEQ ID NO: 17776
  source 1..120: mol_type = other DNA

SEQ ID NO: 74766 - DNA, 120 bp, synthetic construct; identical to SEQ ID NO: 17777
  source 1..120: mol_type = other DNA

SEQ ID NO: 74767 - DNA, 120 bp, synthetic construct
  source 1..120: mol_type = other DNA
agctactctgtgcttcagtttcctcatctacaaaatggagctaataatcatatgaatctcctagagctgtaagaatggaatgaggcagtatctgtagcacgcttaggacagtgccttaca

SEQ ID NO: 74768 - DNA, 120 bp, synthetic construct; identical to SEQ ID NO: 17661
  source 1..120: mol_type = other DNA

SEQ ID NO: 74769 - DNA, 120 bp, synthetic construct; identical to SEQ ID NO: 17660
  source 1..120: mol_type = other DNA

SEQ ID NO: 74770 - DNA, 120 bp, synthetic construct
  source 1..120: mol_type = other DNA
gccaacccagctcccattgtaagtctcttgctttctttttggatcctcttgattttggctcttcttctgggctaatggaggatgcagggccaggcattgggcctctcccatcgggagtgg

SEQ ID NO: 74771 - DNA, 120 bp, synthetic construct; identical to SEQ ID NO: 17778
  source 1..120: mol_type = other DNA

SEQ ID NO: 74772 - DNA, 120 bp, synthetic construct; identical to SEQ ID NO: 17779
  source 1..120: mol_type = other DNA

SEQ ID NO: 74773 - DNA, 120 bp, synthetic construct
  source 1..120: mol_type = other DNA
acacctgccttggtctcccagactcctcagctgcccctttctcttcatccgtcaatttccatcctggtaaggagggcatattgttctagaaagagcccaggctcaagaaccaaactgaat

SEQ ID NO: 74774 - DNA, 120 bp, synthetic construct
  source 1..120: mol_type = other DNA
catgtcctttacaggaacatggatggagctggaagccgttgcaggagcagaaaaccaaacaccgcaagttctcacttataagtaggagctgaacgatgagaacacatggacacaagcggg

SEQ ID NO: 74775 - DNA, 120 bp, synthetic construct; identical to SEQ ID NO: 17658
  source 1..120: mol_type = other DNA

SEQ ID NO: 74776 - DNA, 120 bp, synthetic construct; identical to SEQ ID NO: 17780
  source 1..120: mol_type = other DNA

SEQ ID NO: 74777 - DNA, 120 bp, synthetic construct; identical to SEQ ID NO: 17781
  source 1..120: mol_type = other DNA

SEQ ID NO: 74778 - DNA, 120 bp, synthetic construct; identical to SEQ ID NO: 17782
  source 1..120: mol_type = other DNA

SEQ ID NO: 74779 - DNA, 120 bp, synthetic construct; identical to SEQ ID NO: 17657
  source 1..120: mol_type = other DNA

SEQ ID NO: 74780 - DNA, 120 bp, synthetic construct
  source 1..120: mol_type = other DNA
tagccttcccctacccactttttatgcaaatggcattattccatatcggtgctcagagttttcctctttttcttttttcttttccgtcttctttttcttttcttttgaaagctacacaga

SEQ ID NO: 74781 - DNA, 120 bp, synthetic construct
  source 1..120: mol_type = other DNA
ccagtgtcagaattgctagtgtacagagctgggaggcgagcccaggcccatgggaccacaaatccaacacaaaaatccatcctcctgcaccctacggagcaaaagtaggtccagttgttt

SEQ ID NO: 74782 - DNA, 120 bp, synthetic construct
  source 1..120: mol_type = other DNA
tcagacaagaaagacgatcagtgcagcccccacaggtgtccagagctcccctctaccctacgggggctcccctgggttgggacacttgagcctcactcggtgacccatctggcagtcgga

SEQ ID NO: 74783 - DNA, 120 bp, synthetic construct
  source 1..120: mol_type = other DNA
ctcagaggtgacggaggcagggactgtccctgcagtgtggggtcagagggctgcaggtgccttgctgaaactctgtgaggtttatgagtccccttcattcacggaaaatccaaggttcag

SEQ ID NO: 74784 - DNA, 120 bp, synthetic construct; identical to SEQ ID NO: 17783
  source 1..120: mol_type = other DNA

SEQ ID NO: 74785 - DNA, 120 bp, synthetic construct
  source 1..120: mol_type = other DNA
attgcaaagaatttcccttcttttctctcctttctgctccccttgtactgtctactccttaacttggtcaaattctacttgatccagaacataatgggatggtgagtgcagacgacacac

SEQ ID NO: 74786 - DNA, 120 bp, synthetic construct
  source 1..120: mol_type = other DNA
gactcaagcaatcctcctgcctcagtctcccaaagtgctgaattacaggtgtcagctgctgcacccagcctcagcctgttgttaatggatgtaaacacctgtgggaccaccacccagaac

SEQ ID NO: 74787 - DNA, 120 bp, synthetic construct; identical to SEQ ID NO: 17784
  source 1..120: mol_type = other DNA

SEQ ID NO: 74788 - DNA, 120 bp, synthetic construct
  source 1..120: mol_type = other DNA
atctgtgtgcacttcctccttgaagccatgtagcccagctgtatatccatcttaccctttggaatatgagatgcttaaggctgggactatgtccaattctctctgtaccccagtgcccag

SEQ ID NO: 74789 - DNA, 120 bp, synthetic construct
  source 1..120: mol_type = other DNA
tctaggtgtcttacaattaactttatgtcagttttatgaagcaggcacaaataataatccccattctacctggaaagaaacaaaagcacggagaggtgaagcaacttgcccacagtcaca

SEQ ID NO: 74790 - DNA, 120 bp, synthetic construct; identical to SEQ ID NO: 17651
  source 1..120: mol_type = other DNA

SEQ ID NO: 74791 - DNA, 120 bp, synthetic construct; identical to SEQ ID NO: 886
  source 1..120: mol_type = other DNA

SEQ ID NO: 74792 - DNA, 120 bp, synthetic construct; identical to SEQ ID NO: 17652
  source 1..120: mol_type = other DNA

SEQ ID NO: 74793 - DNA, 120 bp, synthetic construct; identical to SEQ ID NO: 17653
  source 1..120: mol_type = other DNA

SEQ ID NO: 74794 - DNA, 120 bp, synthetic construct; identical to SEQ ID NO: 17654
  source 1..120: mol_type = other DNA

SEQ ID NO: 74795 - DNA, 120 bp, synthetic construct
  source 1..120: mol_type = other DNA
tcattggtgacagccaggaggaaacaggcctcctttctccattcttcctctctggagtctagaaagcagagctgagctctgcagaccagaacataggcagcctcattctggactcagtat

SEQ ID NO: 74796 - DNA, 120 bp, synthetic construct; identical to SEQ ID NO: 17655
  source 1..120: mol_type = other DNA

SEQ ID NO: 74797 - DNA, 120 bp, synthetic construct; identical to SEQ ID NO: 17656
  source 1..120: mol_type = other DNA

SEQ ID NO: 74798 - DNA, 120 bp, synthetic construct
  source 1..120: mol_type = other DNA
tgatccttctgtcttggcctcccaaagggccgggatttcagacatgaaccactatgcctgtcctgaaaaatgagattttaaattgaatatcatccaacaaacaaggttattcattgcagc

SEQ ID NO: 74799 - DNA, 120 bp, synthetic construct; identical to SEQ ID NO: 17657
  source 1..120: mol_type = other DNA

SEQ ID NO: 74800 - DNA, 120 bp, synthetic construct; identical to SEQ ID NO: 17782
  source 1..120: mol_type = other DNA

SEQ ID NO: 74801 - DNA, 120 bp, synthetic construct; identical to SEQ ID NO: 17781
  source 1..120: mol_type = other DNA

SEQ ID NO: 74802 - DNA, 120 bp, synthetic construct
  source 1..120: mol_type = other DNA
tccactgggactgaggcagagaggcttccgagagagagccatgagtccagaggctcttctgtgggccccgcagacttcagcaggcagccacccgtggtccctcactaaaccaggagagag

SEQ ID NO: 74803 - DNA, 120 bp, synthetic construct; identical to SEQ ID NO: 17658
  source 1..120: mol_type = other DNA

SEQ ID NO: 74804 - DNA, 120 bp, synthetic construct
  source 1..120: mol_type = other DNA
ttttatgcatatttaaataatacccctgcagtcctaaaaaggaatgagatcatgtcctttacaggaacatggatggagctggaagccgttgcaggagcagaaaaccaaacaccgcaagtt

SEQ ID NO: 74805 - DNA, 120 bp, synthetic construct; identical to SEQ ID NO: 17659
  source 1..120: mol_type = other DNA

SEQ ID NO: 74806 - DNA, 120 bp, synthetic construct; identical to SEQ ID NO: 17779
  source 1..120: mol_type = other DNA

SEQ ID NO: 74807 - DNA, 120 bp, synthetic construct; identical to SEQ ID NO: 17778
  source 1..120: mol_type = other DNA

SEQ ID NO: 74808 - DNA, 120 bp, synthetic construct
  source 1..120: mol_type = other DNA
aaacgtctctcagcctagcctccctttgcaggtgagagaagtgaacgtggggcatggtcttccgtggctgcccatggagtggcaactcaggttgttccatcacggccagccaaccacatt

SEQ ID NO: 74809 - DNA, 120 bp, synthetic construct; identical to SEQ ID NO: 17660
  source 1..120: mol_type = other DNA

SEQ ID NO: 74810 - DNA, 120 bp, synthetic construct; identical to SEQ ID NO: 17661
  source 1..120: mol_type = other DNA

SEQ ID NO: 74811 - DNA, 120 bp, synthetic construct; identical to SEQ ID NO: 17662
  source 1..120: mol_type = other DNA

SEQ ID NO: 74812 - DNA, 120 bp, synthetic construct
  source 1..120: mol_type = other DNA
ctcctcccctctccctggctgtgcccgccttctgggattgtaggattccagcagctggcgccccaggtgctgctgcggctgaggaagacaatcccagtcagctgccttctcaattccagg

SEQ ID NO: 74813 - DNA, 120 bp, synthetic construct
  source 1..120: mol_type = other DNA
ggttaaagtgattcttgtgtctcagcctcccaagtaactgggactacagatacccaccgccaccaccaccatgcccagctcgtttttcgtttttttgtttgtttgtttgtttttgagata

SEQ ID NO: 74814 - DNA, 120 bp, synthetic construct
  source 1..120: mol_type = other DNA
tccttccagcagcagcgtctcaggtggcaggagaaggtgcagtgccaacttcaggctccagacgtgccctgccctgcgtggcagccgtgcatctcagcaacacggccaggagtccgctcc

SEQ ID NO: 74815 - DNA, 120 bp, synthetic construct; identical to SEQ ID NO: 17663
  source 1..120: mol_type = other DNA

SEQ ID NO: 74816 - DNA, 120 bp, synthetic construct; identical to SEQ ID NO: 17664
  source 1..120: mol_type = other DNA

SEQ ID NO: 74817 - DNA, 120 bp, synthetic construct; identical to SEQ ID NO: 17665
  source 1..120: mol_type = other DNA

SEQ ID NO: 74818 - DNA, 120 bp, synthetic construct
  source 1..120: mol_type = other DNA
aaatgatttggtgaagttttagatcttgcctgggaggccaattttggagttctaaggagtgatgtgttctgtctcctggaagacttactgtgaatcatcccgtcggtcaggcatttaaat

SEQ ID NO: 74819 - DNA, 120 bp, synthetic construct; identical to SEQ ID NO: 14615
  source 1..120: mol_type = other DNA

SEQ ID NO: 74820 - DNA, 120 bp, synthetic construct; identical to SEQ ID NO: 11794
  source 1..120: mol_type = other DNA

SEQ ID NO: 74821 - DNA, 120 bp, synthetic construct
  source 1..120: mol_type = other DNA
aaggacagaaaaccaaacaccgcatgttctcactcataggtgggaactgaataatgagaacacttggacacagggtggggaacatcacacaccggggcctgtcatggggtcaggggaggg

SEQ ID NO: 74822 - DNA, 120 bp, synthetic construct; identical to SEQ ID NO: 13058
  source 1..120: mol_type = other DNA

SEQ ID NO: 74823 - DNA, 120 bp, synthetic construct; identical to SEQ ID NO: 13059
  source 1..120: mol_type = other DNA

SEQ ID NO: 74824 - DNA, 120 bp, synthetic construct; identical to SEQ ID NO: 9164
  source 1..120: mol_type = other DNA

SEQ ID NO: 74825 - DNA, 120 bp, synthetic construct; identical to SEQ ID NO: 9165
  source 1..120: mol_type = other DNA

SEQ ID NO: 74826 - DNA, 120 bp, synthetic construct; identical to SEQ ID NO: 9166
  source 1..120: mol_type = other DNA

SEQ ID NO: 74827 - DNA, 120 bp, synthetic construct
  source 1..120: mol_type = other DNA
agaccgaactattggtgtgtctctgtccatccatccattcatccttgcatccatccatgcatccatccatccatccatccattcatccatccctccctcccttcatctatccattcatcc

SEQ ID NO: 74828 - DNA, 120 bp, synthetic construct; identical to SEQ ID NO: 9167
  source 1..120: mol_type = other DNA

SEQ ID NO: 74829 - DNA, 120 bp, synthetic construct
  source 1..120: mol_type = other DNA
gtggttttgatttgcatttctctgatggccagtgatgatgagcattttttcatgtgtcttttggctgcataaatgtcttcttttgagaagtgtctgttcatatcctttgcctactttttg

SEQ ID NO: 74830 - DNA, 120 bp, synthetic construct
  source 1..120: mol_type = other DNA
tcacctcactcgggaagcgcgaggggtcagggagttccctttcctagtcaaagaaaggggtgacagatggcacctggaaaatcgggtcactcccacccgaatactgctcttttccaatgg

SEQ ID NO: 74831 - DNA, 120 bp, synthetic construct
  source 1..120: mol_type = other DNA
cgatacagagaagtgcttaaaagagctgatggagctgaaaaccaaggctcgagaactacatgaagaatgcagaagcctcaggagctgatgcgatcaactggaagaaagggtatcagcgat

SEQ ID NO: 74832 - DNA, 120 bp, synthetic construct
  source 1..120: mol_type = other DNA
taaatgctccaattaaaagacacagactggcaaattggataaagagtcaagacccatcagtgtgctgtattcaggaaacccatgtcacgtgcagagacacacataggttcaaaataaatg

SEQ ID NO: 74833 - DNA, 120 bp, synthetic construct
  source 1..120: mol_type = other DNA
aaattaatgaatccaggagctggttttttgaaaggatcaacaaaattgataaactgctagcaagactaataaagaaaaaaagagagaagaatccaatagatgcaataaaaaatgataaag

SEQ ID NO: 74834 - DNA, 120 bp, synthetic construct
  source 1..120: mol_type = other DNA
ccctgtttgcagacgacgtgattgtatatctagaaaaccccattgtctcaggccaaaatctccttaagctgataagcaacttcagcaaagtctcaggatacaaaatcaacgtacaaaaat

SEQ ID NO: 74835 - DNA, 120 bp, synthetic construct
  source 1..120: mol_type = other DNA
aaattttcacaacctactcatctgacaaagggctaatatccacaatctacaatgaactcaaacaaatttacaagaaaaaaacaaacaaccccatcaaaaagtgggcgaaggacatgaaca

SEQ ID NO: 74836 - DNA, 120 bp, synthetic construct
  source 1..120: mol_type = other DNA
gaagggaagtgtatggcacaaggacttttaaaatatactttttcctctctaagatgatacctccctggagagctgtgccttggttctcaaactttagtatgcatcagaatcacctgagga

SEQ ID NO: 74837 - DNA, 120 bp, synthetic construct; identical to SEQ ID NO: 35164
  source 1..120: mol_type = other DNA

SEQ ID NO: 74838 - DNA, 120 bp, synthetic construct; identical to SEQ ID NO: 35165
  source 1..120: mol_type = other DNA

SEQ ID NO: 74839 - DNA, 120 bp, synthetic construct
  source 1..120: mol_type = other DNA
cctaactttttaatgactgccattctaactggtatgagatggtatctcattgtggttttgatttgcatttctctgatggccagtgatggtgagcattttttcatgtgttttttggctgca

SEQ ID NO: 74840 - DNA, 120 bp, synthetic construct
  source 1..120: mol_type = other DNA
agaatgcttgtgatttttgtacattgattgacgatggggttttctagatatacaatcatgtcatctgcaaacagggacaatttgacttcctcttttcctaattgaataccctttatttcc

SEQ ID NO: 74841 - DNA, 120 bp, synthetic construct
  source 1..120: mol_type = other DNA
gagtgtatgtgtcaaggaatttatccattacttctagattttctggtttatttgcgtagagatgtttgtagtattctctgatggtagtttgtatttctgtgggatcagtggtgatacccc

SEQ ID NO: 74842 - DNA, 120 bp, synthetic construct
  source 1..120: mol_type = other DNA
tggccttgtctcttttgatctttgttgctttaaagtctgttttatcagagactaggattgcaacccctgcctttttttgttttccatttgcttggtagatcttcctccatccttttattt

SEQ ID NO: 74843 - DNA, 120 bp, synthetic construct
  source 1..120: mol_type = other DNA
tttgttcatttctttttattcttttttctctaaacttcccttctcacttcatttcatttatttcatcttccatcgctgataccctttcttccagttgatcgcatcggctcctgaggcttc

SEQ ID NO: 74844 - DNA, 120 bp, synthetic construct
  source 1..120: mol_type = other DNA
tggcgggcacccctcccccagcctcgctgccgccttgcagtttgatctctgactgctgtgctagcaatcaacgagactccgtgggcgtaggaacctctgagccaggtgcgggatataatc

SEQ ID NO: 74845 - DNA, 120 bp, synthetic construct
  source 1..120: mol_type = other DNA
acttctcaaaagaagacatttatgcagccaaaaaacacatgaaaaaaaaatgctcatcatcactaaccatcagagaaatgcaaatcaaaaccacaatgagataccatctcacaccagtta

SEQ ID NO: 74846 - DNA, 120 bp, synthetic construct; identical to SEQ ID NO: 29898
  source 1..120: mol_type = other DNA

SEQ ID NO: 74847 - DNA, 120 bp, synthetic construct; identical to SEQ ID NO: 29899
  source 1..120: mol_type = other DNA

SEQ ID NO: 74848 - DNA, 120 bp, synthetic construct; identical to SEQ ID NO: 29900
  source 1..120: mol_type = other DNA

SEQ ID NO: 74849 - DNA, 120 bp, synthetic construct; identical to SEQ ID NO: 29901
  source 1..120: mol_type = other DNA

SEQ ID NO: 74850 - DNA, 120 bp, synthetic construct; identical to SEQ ID NO: 29902
  source 1..120: mol_type = other DNA

SEQ ID NO: 74851 - DNA, 120 bp, synthetic construct
  source 1..120: mol_type = other DNA
ccagacggggtggcggccgggcagaggggctcctcacttcctagacgggatggcggctgcgaagaggcgttcctcacttcccagactgggcggccgggcagaggggctcctcacatccca

SEQ ID NO: 74852 - DNA, 120 bp, synthetic construct
  source 1..120: mol_type = other DNA
ttccatttgtttgtgtcctctttaatttcactgagcagtggtttgtagttctccttgaagaggtccttcacatcccttgtaagttggattcctaggtattttattctctttgaagcaatt

SEQ ID NO: 74853 - DNA, 120 bp, synthetic construct; identical to SEQ ID NO: 29903
  source 1..120: mol_type = other DNA

SEQ ID NO: 74854 - DNA, 120 bp, synthetic construct
  source 1..120: mol_type = other DNA
aatcctttacattgtctatgatgcaaagacctttgttcacgtgtttgtctgctgaccctctccccacaattgtcttgtgaccctgacacatccccctcttggagaaacacccacaaatga

SEQ ID NO: 74855 - DNA, 120 bp, synthetic construct
  source 1..120: mol_type = other DNA
cgtttacggcccttaagtcagttaacatatgccatttgcctgatttcttctgaattacaaacacaggagaattccaaggcgagaatgaaggctcaatatgacccttttctaactgttcat

SEQ ID NO: 74856 - DNA, 120 bp, synthetic construct
  source 1..120: mol_type = other DNA
ataaatctactgctgcactgctgcttgtggcgggagacaattgttgtattgtggtaactggcttattccctgaaacacttgggacagggggggttgttgtccctgaaaaccctgaggaac

SEQ ID NO: 74857 - DNA, 120 bp, synthetic construct
  source 1..120: mol_type = other DNA
ggggagttgggtccatactgttttactctctctttcatatcttttagcatttttatcgaaaaagacttgtatctggcctcaactgtgagaggctctccctcttgggctccttctccaggt

SEQ ID NO: 74858 - DNA, 120 bp, synthetic construct
  source 1..120: mol_type = other DNA
ttaccgtaaggctgactgtagacgtactcgggatctctcgtcgacttgtcctcaatgaccacgctcgagtgtaccttcaccctagagaaaagcctccacgttgggcaccagagcagttta

SEQ ID NO: 74859 - DNA, 120 bp, synthetic construct
  source 1..120: mol_type = other DNA
aacctccacatttgctgatatggccactaagctggaaaaaaagagaaagagatatggctaataaactattcaaaaaagatttaggagcctggggccaggcatggtggttcccacctctaa

SEQ ID NO: 74860 - DNA, 120 bp, synthetic construct; identical to SEQ ID NO: 29904
  source 1..120: mol_type = other DNA

SEQ ID NO: 74861 - DNA, 120 bp, synthetic construct
  source 1..120: mol_type = other DNA
tggctgcataaatgtcttcttttgagaagtgtctcttcatatcctttgcccactttttgatggggttgtttgtttttttcttgtaaatttgtttgagttcattgtagattctggatatta

SEQ ID NO: 74862 - DNA, 120 bp, synthetic construct
  source 1..120: mol_type = other DNA
ttccttctttttttttttttttgatatttctacttgatgtaaaggtcaaaccagatggttagaataacccagtcctcggatgggcacggtggctcactcctgtaatcccagcactttggg

SEQ ID NO: 74863 - DNA, 120 bp, synthetic construct
  source 1..120: mol_type = other DNA
tctcaaaactgaagaatttagagtccgatgtttgagggcaggaagcatctagcacaggagaaaattgtaggctggaagactaggccagtctcaccttttcacgtttttctgcctgtttat

SEQ ID NO: 74864 - DNA, 120 bp, synthetic construct
  source 1..120: mol_type = other DNA
agaccaataacagactctgaaattgaggcaataattaatagcttaccaacaaaaaaaagtccaggaccagatggagtcacagctgaattctaccagaggtacaaggaggagctggtacca

SEQ ID NO: 74865 - DNA, 120 bp, synthetic construct
  source 1..120: mol_type = other DNA
tttcttcacagaattggaaaaaacgactttaaagttcatatagaaccaaaaaagagcccgcattgccaagtcaatcctaacccaaaagaacaaaactggaggcatcacgctacctgactt

SEQ ID NO: 74866 - DNA, 120 bp, synthetic construct
  source 1..120: mol_type = other DNA
ctggattaagaaaatgtggcacatatacaccgtggaatagtatgcagccataaaaaatgatgagttcatgtcctttgtagggacatggatgaagctggaaaccatcattctcagcaaact

SEQ ID NO: 74867 - DNA, 120 bp, synthetic construct; identical to SEQ ID NO: 29890
  source 1..120: mol_type = other DNA

SEQ ID NO: 74868 - DNA, 120 bp, synthetic construct; identical to SEQ ID NO: 29906
  source 1..120: mol_type = other DNA

SEQ ID NO: 74869 - DNA, 120 bp, synthetic construct
  source 1..120: mol_type = other DNA
ataaggacacatgcacatgtatgtttattgtggcactattcacaaaagcaaagacttggaaccaacccaaatgtccaacaatgatagactggattaagaaaatgtggcacatatacacca

SEQ ID NO: 74870 - DNA, 120 bp, synthetic construct
  source 1..120: mol_type = other DNA
attctccttgaagaggtccttcacatcccttgtaagttggattcctaggtattttattctttttgaagcaattgtgaatgggagttcactcatgatttggctttctgtttgtctgttatt

SEQ ID NO: 74871 - DNA, 120 bp, synthetic construct
  source 1..120: mol_type = other DNA
ctgtgaatctgtcttgtcctggacttttctttggttggtaggctcttaattattacctcaatttccgagcctgttattggtctatttagggattcaacttcttcctggtttagtcttggg

SEQ ID NO: 74872 - DNA, 120 bp, synthetic construct; identical to SEQ ID NO: 29891
  source 1..120: mol_type = other DNA

SEQ ID NO: 74873 - DNA, 120 bp, synthetic construct; identical to SEQ ID NO: 29892
  source 1..120: mol_type = other DNA

SEQ ID NO: 74874 - DNA, 120 bp, synthetic construct
  source 1..120: mol_type = other DNA
cttcacccactttttgatggggttgtttgtttttttcttgtaaatttgtttgagttcattgtagcttctggatattagccctttgtcagatgagtaggttgtgaaaattttctcccattt

SEQ ID NO: 74875 - DNA, 120 bp, synthetic construct; identical to SEQ ID NO: 29893
  source 1..120: mol_type = other DNA

SEQ ID NO: 74876 - DNA, 120 bp, synthetic construct
  source 1..120: mol_type = other DNA
tatcaaattttgtgtgaagcagcaaacagtgctgaaaggggagtttataacaccaaatacattaggaaaattgccaagtcaatcctaagccaaaagaacaaagctggaggcatcacacta

SEQ ID NO: 74877 - DNA, 120 bp, synthetic construct
  source 1..120: mol_type = other DNA
gatctagaactggaaataccatttgacccagccatcccattactgggtatatacccaaaggactataaatcatgctgctataaagacacgtgcacacgtatgtttattgcggcattattc

SEQ ID NO: 74878 - DNA, 120 bp, synthetic construct; identical to SEQ ID NO: 29895
  source 1..120: mol_type = other DNA

SEQ ID NO: 74879 - DNA, 120 bp, synthetic construct
  source 1..120: mol_type = other DNA
gtcaaggaatttatctatttcttctagattttctagtttatttgcgtagaggtgtttgtagtattctctgatggtagtttgtatttctgtgggatcggtggtgatatcccctttatcatt

SEQ ID NO: 74880 - DNA, 120 bp, synthetic construct
  source 1..120: mol_type = other DNA
atctgacaaagggctaatatccagaatctacaatgaacaaacaaatttacaagaaaaaaacaaacaaccccatcaaaaagtggtcgaaggacatgaacagacacttctcaaaagaagaca

SEQ ID NO: 74881 - DNA, 120 bp, synthetic construct; identical to SEQ ID NO: 29896
  source 1..120: mol_type = other DNA

SEQ ID NO: 74882 - DNA, 120 bp, synthetic construct
  source 1..120: mol_type = other DNA
gaacaatgggagcacatggacacaggaaggggaacatcacactctggggtctgttgtggggtggggggaggggggagggatagcattaggagatatacctaatgctgtatgatgagttaa

SEQ ID NO: 74883 - DNA, 120 bp, synthetic construct
  source 1..120: mol_type = other DNA
gaggatcaagtcacgttttacatggatggcagcaggcaaagagagagattgtgcaaggaaactgtcatttttaaaaccatcagatcttgtgggactcattcactatcatgagaacatgag

SEQ ID NO: 74884 - DNA, 120 bp, synthetic construct
  source 1..120: mol_type = other DNA
gctgcacaaatgtcttcttttgagaagtgtctgttcatgtcattcgcccactttttgatggggttgtttgtttttttcttgtaaatttgtttgagttcattgtagattctggatattagc

SEQ ID NO: 74885 - DNA, 120 bp, synthetic construct
  source 1..120: mol_type = other DNA
agatatacaatcatgtcatctgcaaacagggacaatttgacttcctattttcctaactgaataccctttatttccttctcctgcctaattgccctggccagaacttccaacactatgttg

SEQ ID NO: 74886 - DNA, 120 bp, synthetic construct
  source 1..120: mol_type = other DNA
ctagcggtctatcaattttgttgatcctttcagaaaaccagctcttggattcattaatttttttgaagagttttttgtgtctctatttccttcagttctgctctgattttagttatttct

SEQ ID NO: 74887 - DNA, 120 bp, synthetic construct
  source 1..120: mol_type = other DNA
catgtgagatgggtttcctgaatacagcacactgatgggtcttgacttgttatccaatttgccagtctgtgtcttttaattggagcatttagtccatttacatttaaagttaatattgtt

SEQ ID NO: 74888 - DNA, 120 bp, synthetic construct
  source 1..120: mol_type = other DNA
tttaagcacttctctgtattggttattctagttatacattcttctaaatttttttcaagttttcaacttctttgcctttggtttgaatgtcctcccatagctcagagtaatttggtcgtc

SEQ ID NO: 74889 - DNA, 120 bp, synthetic construct
  source 1..120: mol_type = other DNA
ctggcactccctagtgagaagaacccggtacctcagatggaaatgcagaaatcacccgtcttctgtgttgctcaggctgggagctgtagaccggagctgttcctgttcggccatcttggc

SEQ ID NO: 74890 - DNA, 120 bp, synthetic construct
  source 1..120: mol_type = other DNA
ctgacaaagggctaatatccagaatctacgaagaacccaaacaaatttacaagaaaacaaataaccccatcaaaaagtgtgcaaaggatatgaacagacacctctcagaagaagacattt

SEQ ID NO: 74891 - DNA, 120 bp, synthetic construct
  source 1..120: mol_type = other DNA
tgggtgcagcacaccaacatggcacatgtatacatatgtaacaaacctgcacattgtgcacatgtaccctaaaacttaaagtataataataataaaattttttaaaaaaagaaaatagag

SEQ ID NO: 74892 - DNA, 120 bp, synthetic construct
  source 1..120: mol_type = other DNA
agggggtttgagagctggtattacgggagtaggaggggacaaggggaggtggaatggaggctggagactggtgttggaggactagcagaggggctgaatttagggagctcagaagggaat

SEQ ID NO: 74893 - DNA, 120 bp, synthetic construct; identical to SEQ ID NO: 13660
  source 1..120: mol_type = other DNA

SEQ ID NO: 74894 - DNA, 120 bp, synthetic construct; identical to SEQ ID NO: 13661
  source 1..120: mol_type = other DNA

SEQ ID NO: 74895 - DNA, 120 bp, synthetic construct
  source 1..120: mol_type = other DNA
ggaggctggagaccccttgcaggtccccgggccaggagttttgaattctttgtagcctcagagcacttatccaaccaaatgaaattttgagtagaactccaaaattatatatatataata

SEQ ID NO: 74896 - DNA, 120 bp, synthetic construct; identical to SEQ ID NO: 11261
  source 1..120: mol_type = other DNA

SEQ ID NO: 74897 - DNA, 120 bp, synthetic construct; identical to SEQ ID NO: 11262
  source 1..120: mol_type = other DNA

SEQ ID NO: 74898 - DNA, 120 bp, synthetic construct; identical to SEQ ID NO: 11263
  source 1..120: mol_type = other DNA

SEQ ID NO: 74899 - DNA, 120 bp, synthetic construct; identical to SEQ ID NO: 11264
  source 1..120: mol_type = other DNA

SEQ ID NO: 74900 - DNA, 120 bp, synthetic construct; identical to SEQ ID NO: 11265
  source 1..120: mol_type = other DNA

SEQ ID NO: 74901 - DNA, 120 bp, synthetic construct; identical to SEQ ID NO: 11266
  source 1..120: mol_type = other DNA

SEQ ID NO: 74902 - DNA, 120 bp, synthetic construct
  source 1..120: mol_type = other DNA
tatatagagttctaattgtaattcgacttttctgaatctaatcggaaaataagtgccccgttccccccgcccacacaggtcactgccttgccaccttctttagacgatgcatctttcctc

SEQ ID NO: 74903 - DNA, 120 bp, synthetic construct; identical to SEQ ID NO: 32990
  source 1..120: mol_type = other DNA

SEQ ID NO: 74904 - DNA, 120 bp, synthetic construct; identical to SEQ ID NO: 32991
  source 1..120: mol_type = other DNA

SEQ ID NO: 74905 - DNA, 120 bp, synthetic construct
  source 1..120: mol_type = other DNA
aataataaagtcatgtcctcttaataaagaaaactaattacttatctaagcgcttccctttccagattactaacggggggggggggggactacagaagtctccggaaattatttcggcca

SEQ ID NO: 74906 - DNA, 120 bp, synthetic construct; identical to SEQ ID NO: 4475
  source 1..120: mol_type = other DNA

SEQ ID NO: 74907 - DNA, 120 bp, synthetic construct; identical to SEQ ID NO: 19862
  source 1..120: mol_type = other DNA

SEQ ID NO: 74908 - DNA, 120 bp, synthetic construct
  source 1..120: mol_type = other DNA
ttgccatgagaaagaatcaacatgtacgcaggtaaagcaggcaatacagttccagggagtcaaaaacgggagaaatcgtcccacgacctggggcttgggtctagatgaagagcacagcat

SEQ ID NO: 74909 - DNA, 120 bp, synthetic construct
  source 1..120: mol_type = other DNA
ccaacctcccaaccgcccccacctgccaccccacacccttcccacctgacgtcaagcctgaagctcagccgctaagccggaagctggcgccagaagatgccggttccgccagctgctcgc

SEQ ID NO: 74910 - DNA, 120 bp, synthetic construct; identical to SEQ ID NO: 19992
  source 1..120: mol_type = other DNA

SEQ ID NO: 74911 - DNA, 120 bp, synthetic construct
  source 1..120: mol_type = other DNA
gagaatggcatgaacctgggaggcggagcttgccgtgagctgatgtcatgccactgcactcaatcctgggcaagacagcgagactccatctcaaaaaaaaaggaaaagaaaagagtggag

SEQ ID NO: 74912 - DNA, 120 bp, synthetic construct; identical to SEQ ID NO: 19990
  source 1..120: mol_type = other DNA

SEQ ID NO: 74913 - DNA, 120 bp, synthetic construct; identical to SEQ ID NO: 19991
  source 1..120: mol_type = other DNA

SEQ ID NO: 74914 - DNA, 120 bp, synthetic construct
  source 1..120: mol_type = other DNA
gattgccctagccagaacttccaacactatgttgaataggagtggtgagagaggaaattcttgtcttgtgccggttttcttttcttttttttttttttttattatactctaagttttagg

SEQ ID NO: 74915 - DNA, 120 bp, synthetic construct; identical to SEQ ID NO: 72678
  source 1..120: mol_type = other DNA

SEQ ID NO: 74916 - DNA, 120 bp, synthetic construct
  source 1..120: mol_type = other DNA
taagataatcatgtggtttttgtcattggttctgtttatgtgatggattacatttagtgatttgcctatgttgaaccagccttgcatcccagggatgaagctgacttggtcatggtgggt

SEQ ID NO: 74917 - DNA, 120 bp, synthetic construct; identical to SEQ ID NO: 19980
  source 1..120: mol_type = other DNA

SEQ ID NO: 74918 - DNA, 120 bp, synthetic construct; identical to SEQ ID NO: 19981
  source 1..120: mol_type = other DNA

SEQ ID NO: 74919 - DNA, 120 bp, synthetic construct; identical to SEQ ID NO: 19974
  source 1..120: mol_type = other DNA

SEQ ID NO: 74920 - DNA, 120 bp, synthetic construct; identical to SEQ ID NO: 19975
  source 1..120: mol_type = other DNA

SEQ ID NO: 74921 - DNA, 120 bp, synthetic construct; identical to SEQ ID NO: 19976
  source 1..120: mol_type = other DNA

SEQ ID NO: 74922 - DNA, 120 bp, synthetic construct; identical to SEQ ID NO: 19977
  source 1..120: mol_type = other DNA

SEQ ID NO: 74923 - DNA, 120 bp, synthetic construct; identical to SEQ ID NO: 19978
  source 1..120: mol_type = other DNA

SEQ ID NO: 74924 - DNA, 120 bp, synthetic construct; identical to SEQ ID NO: 19979
  source 1..120: mol_type = other DNA

SEQ ID NO: 74925 - DNA, 120 bp, synthetic construct
  source 1..120: mol_type = other DNA
acgttgcactcctggacacgatgcatttatttgcattttgtctcccaccgtgaggtgagctcaggaggcgggggcggctttgctccctgctgtgtctgcagctcccatggggagccccat

SEQ ID NO: 74926 - DNA, 120 bp, synthetic construct; identical to SEQ ID NO: 25400
  source 1..120: mol_type = other DNA

SEQ ID NO: 74927 - DNA, 120 bp, synthetic construct; identical to SEQ ID NO: 25401
  source 1..120: mol_type = other DNA

SEQ ID NO: 74928 - DNA, 120 bp, synthetic construct; identical to SEQ ID NO: 23745
  source 1..120: mol_type = other DNA

SEQ ID NO: 74929 - DNA, 120 bp, synthetic construct
  source 1..120: mol_type = other DNA
gttgttgttgttctgtagtcaactgtgtactaggaatcagtgtaccccccaggtcctgttcttggctctcaactgtgggactttcattctgttccttcatctgaaaaatgaaaaacatta

SEQ ID NO: 74930 - DNA, 120 bp, synthetic construct
  source 1..120: mol_type = other DNA
ttgctgtgaaccgagatcacgccattgcacagcctggacaacaagagcaaaactccgtctcaaaaaaaaataaaaataaaaaggaggggggcatgttgaggaaataggaacttgaagtac

SEQ ID NO: 74931 - DNA, 120 bp, synthetic construct
  source 1..120: mol_type = other DNA
tttttgtattttttagtagagacggggtttcactatgttggcaaggctggtcttgaactcctgacctggtgatccgcccgcctcagcctcccaaagtggtgggattacaggtgtgagcca

SEQ ID NO: 74932 - DNA, 120 bp, synthetic construct; identical to SEQ ID NO: 1099
  source 1..120: mol_type = other DNA

SEQ ID NO: 74933 - DNA, 120 bp, synthetic construct
  source 1..120: mol_type = other DNA
ctcattgtacttttgatttgcatttctctgatgatcagtggtattgagtaccttttcataggcctgtttgccatttgtacgttttcttttgagaaatatcttttcatatattttgcccat

SEQ ID NO: 74934 - DNA, 120 bp, synthetic construct
  source 1..120: mol_type = other DNA
gttctttttgcttaagatagctttggctattcagctgttttgtgaatccacataaattttagaattgttcgttcttctcttctcttctcttctcttctcttctcttctcttctctttttt

SEQ ID NO: 74935 - DNA, 120 bp, synthetic construct
  source 1..120: mol_type = other DNA
ctaggttcaggcgattctcctgcctcagcctcctgagcagctgggattacacgtgcccaccaccacgccagctaatgttttgtgtttttagtagagacagggtttcatcatgttggccag

SEQ ID NO: 74936 - DNA, 120 bp, synthetic construct; identical to SEQ ID NO: 21109
  source 1..120: mol_type = other DNA

SEQ ID NO: 74937 - DNA, 120 bp, synthetic construct; identical to SEQ ID NO: 21110
  source 1..120: mol_type = other DNA

SEQ ID NO: 74938 - DNA, 120 bp, synthetic construct; identical to SEQ ID NO: 35818
  source 1..120: mol_type = other DNA

SEQ ID NO: 74939 - DNA, 120 bp, synthetic construct
  source 1..120: mol_type = other DNA
tgctgcttcatgttaagagctcagcagcacagtacacagttacatggcagtcaggatttactgaggcattctggaagttctaaaataacattccacaaagtagtgacacagtctttgtca

SEQ ID NO: 74940 - DNA, 120 bp, synthetic construct; identical to SEQ ID NO: 21111
  source 1..120: mol_type = other DNA

SEQ ID NO: 74941 - DNA, 120 bp, synthetic construct; identical to SEQ ID NO: 21112
  source 1..120: mol_type = other DNA

SEQ ID NO: 74942 - DNA, 120 bp, synthetic construct; identical to SEQ ID NO: 21113
  source 1..120: mol_type = other DNA

SEQ ID NO: 74943 - DNA, 120 bp, synthetic construct; identical to SEQ ID NO: 21114
  source 1..120: mol_type = other DNA

SEQ ID NO: 74944 - DNA, 120 bp, synthetic construct
  source 1..120: mol_type = other DNA
atcacgccactgcccatatgggccatagagatgccacctctgacctcacagctatcaaatacctggcatgcatgtggcacttcagtctttcatcatgaaactgaacatgaaggaggagtc

SEQ ID NO: 74945 - DNA, 120 bp, synthetic construct; identical to SEQ ID NO: 21115
  source 1..120: mol_type = other DNA

SEQ ID NO: 74946 - DNA, 120 bp, synthetic construct; identical to SEQ ID NO: 21184
  source 1..120: mol_type = other DNA

SEQ ID NO: 74947 - DNA, 120 bp, synthetic construct; identical to SEQ ID NO: 21116
  source 1..120: mol_type = other DNA

SEQ ID NO: 74948 - DNA, 120 bp, synthetic construct
  source 1..120: mol_type = other DNA
cttctcctgcctgaggctcccaagtagctgggattacaggcaggcgccaccatgcccagctaattttgcatttttattagagacggggtttctccatgttggtcaggctggtctcaaact

SEQ ID NO: 74949 - DNA, 120 bp, synthetic construct; identical to SEQ ID NO: 2186
  source 1..120: mol_type = other DNA

SEQ ID NO: 74950 - DNA, 120 bp, synthetic construct
  source 1..120: mol_type = other DNA
gctcatgcctgtaatctcagcactttggaaggccgaggtgggcagataatgagatcaggagttcgataccagcctgaccaacatggtgaaacctgtctctactaaaaatacaaaaattag

SEQ ID NO: 74951 - DNA, 120 bp, synthetic construct
  source 1..120: mol_type = other DNA
aggctgaggtgggaagatcatttgagcctaggagttggaggctacagtgagctataatcatgccactgcactccagcctgaaaaaacagggcaagaccgtttctgaaaaaaaaaataata

SEQ ID NO: 74952 - DNA, 120 bp, synthetic construct
  source 1..120: mol_type = other DNA
cataggttatatgcaagtaagtataccattttatatcagggacttgagcattcaaagattttggtaagctctgagggtgaggtgggagtggggtggagggggtgtcctggaaccaatcct

SEQ ID NO: 74953 - DNA, 120 bp, synthetic construct; identical to SEQ ID NO: 21117
  source 1..120: mol_type = other DNA

SEQ ID NO: 74954 - DNA, 120 bp, synthetic construct; identical to SEQ ID NO: 21118
  source 1..120: mol_type = other DNA

SEQ ID NO: 74955 - DNA, 120 bp, synthetic construct; identical to SEQ ID NO: 21119
  source 1..120: mol_type = other DNA

SEQ ID NO: 74956 - DNA, 120 bp, synthetic construct; identical to SEQ ID NO: 21120
  source 1..120: mol_type = other DNA

SEQ ID NO: 74957 - DNA, 120 bp, synthetic construct; identical to SEQ ID NO: 21121
  source 1..120: mol_type = other DNA

SEQ ID NO: 74958 - DNA, 120 bp, synthetic construct
  source 1..120: mol_type = other DNA
cggaaggcggaggttgcagtgagctgagatcgcaccactgcactcgaacctgggagacagagcgtgactccatctcaaaaaataaaaataaaaaaatattctttactgtagttaatgtga

SEQ ID NO: 74959 - DNA, 120 bp, synthetic construct; identical to SEQ ID NO: 66803
  source 1..120: mol_type = other DNA

SEQ ID NO: 74960 - DNA, 120 bp, synthetic construct; identical to SEQ ID NO: 21123
  source 1..120: mol_type = other DNA

SEQ ID NO: 74961 - DNA, 120 bp, synthetic construct; identical to SEQ ID NO: 21124
  source 1..120: mol_type = other DNA

SEQ ID NO: 74962 - DNA, 120 bp, synthetic construct
  source 1..120: mol_type = other DNA
agcctggcaacagagcgagattccgtctcaaaaaaaaaaaaaaaaaaaaaattagccaggtgtagtggcatgcacctgtagtcccagctactcaggaggctgaggtgggaggatcacttg

SEQ ID NO: 74963 - DNA, 120 bp, synthetic construct; identical to SEQ ID NO: 21125
  source 1..120: mol_type = other DNA

SEQ ID NO: 74964 - DNA, 120 bp, synthetic construct
  source 1..120: mol_type = other DNA
gtctctggttttcctaggcagaggaccctgcgccttctgcagtgtttgtgtccctgggtacttgagattagggagtggtgatgactcttaacgagcatgctgccttcaagcatctgttta

SEQ ID NO: 74965 - DNA, 120 bp, synthetic construct
  source 1..120: mol_type = other DNA
ctgaatcccagcaatagttaagacctgaagtagggtgatagcaatccaatgaagtggatggggcagatgagagaggagagatagtaagcaaaaataaacaagattccataaatggtttgg

SEQ ID NO: 74966 - DNA, 120 bp, synthetic construct
  source 1..120: mol_type = other DNA
gctcttcttgttgaattgatccctttaccattatgtaatggccttctttgtctcttatgatctttgttggtttaaagtctgttttatcagagacaggattgcaacccctgcctttttgtg

SEQ ID NO: 74967 - DNA, 120 bp, synthetic construct
  source 1..120: mol_type = other DNA
ttgtagagtttctgccgagagatctgctgttagtctgatgggcttccctttgttattttacaatgttttacatcactgtatatttttgtattatcaggacaatggcctcataaattttct

SEQ ID NO: 74968 - DNA, 120 bp, synthetic construct
  source 1..120: mol_type = other DNA
aacctagtgagatcccatctctacaaaaaatttaaaagttagccaggtgtggtggtgtgcacctgtagtcccagctactcaggaggctcaggtggaaggatcacttgagcccaggaggtc

SEQ ID NO: 74969 - DNA, 120 bp, synthetic construct
  source 1..120: mol_type = other DNA
cgagacctcacctctaaaaaaaaagcaagggtgagggaggaaggaaggaaggagggaaggaaggagggatagaaaggagggagggagggaggaggggagggaaggaggaaggagggagga

SEQ ID NO: 74970 - DNA, 120 bp, synthetic construct; identical to SEQ ID NO: 13093
  source 1..120: mol_type = other DNA

SEQ ID NO: 74971 - DNA, 120 bp, synthetic construct; identical to SEQ ID NO: 13094
  source 1..120: mol_type = other DNA

SEQ ID NO: 74972 - DNA, 120 bp, synthetic construct
  source 1..120: mol_type = other DNA
aagcgatcttcctgcctcagcctcccaaagagctaggattacaggtatgagctgccatgcccagccaaaataatttgatactagcacatatagagatatgctagatgtagagatagaaag

SEQ ID NO: 74973 - DNA, 120 bp, synthetic construct; identical to SEQ ID NO: 15527
  source 1..120: mol_type = other DNA

SEQ ID NO: 74974 - DNA, 120 bp, synthetic construct; identical to SEQ ID NO: 15528
  source 1..120: mol_type = other DNA

SEQ ID NO: 74975 - DNA, 120 bp, synthetic construct
  source 1..120: mol_type = other DNA
tgtccatgtgttctcattgttcagttcccacctatgagtgagaatatgcggtgtttggttctttgttcttgtgatagtttactgagaatgatgatttccaatttcatccatgtccctaca

SEQ ID NO: 74976 - DNA, 120 bp, synthetic construct; identical to SEQ ID NO: 32159
  source 1..120: mol_type = other DNA

SEQ ID NO: 74977 - DNA, 120 bp, synthetic construct; identical to SEQ ID NO: 6338
  source 1..120: mol_type = other DNA

SEQ ID NO: 74978 - DNA, 120 bp, synthetic construct
  source 1..120: mol_type = other DNA
tggtaccagccgctgcaaaagcatgccaaaatgtaaagaacatcgagactaggaagaaactgcatcaactaacgagcaaaatcaccagctaacatcataatgacaggatcaaattcacac

SEQ ID NO: 74979 - DNA, 120 bp, synthetic construct
  source 1..120: mol_type = other DNA
tttatagcactaaatgcccacaagagaaagcaggaaggatccaaaattgacaccctaacatcacaattaaaagaactagaaaagcaagagcaaacacattcaaaagctagcagaaggcaa

SEQ ID NO: 74980 - DNA, 120 bp, synthetic construct
  source 1..120: mol_type = other DNA
taatccagcatataaacagaaccaaagacaaaaaccacgattatctcaatagatgcagaaaaggcctttgacaaaattcaacagcccttcatgctaaaaactctcaataaattaggtatt

SEQ ID NO: 74981 - DNA, 120 bp, synthetic construct
  source 1..120: mol_type = other DNA
ttgcctatttaataaatggtgctgggaaaactggctagccatatgtagaaagctgaaactagatcccttccttacaccttatacaaaaatcaattcaagatggattaaagacttaaacgt

SEQ ID NO: 74982 - DNA, 120 bp, synthetic construct
  source 1..120: mol_type = other DNA
tcatgtcctttgtagggacatggatgaagctggaaaccatcattctcagcaaactatcgcaaggacaaaaaaccaaacaccacgtattctcactcatatgtgggaattgaacaatgagat

SEQ ID NO: 74983 - DNA, 120 bp, synthetic construct; identical to SEQ ID NO: 6339
  source 1..120: mol_type = other DNA

SEQ ID NO: 74984 - DNA, 120 bp, synthetic construct
  source 1..120: mol_type = other DNA
attgatctgtctaatgttgacagtggggtgttaaagtctcccattattattgtgtgggagtctaagtctctttgtaggtctctaaggacttgctttatgaatctgggtgctcctgtgctg

SEQ ID NO: 74985 - DNA, 120 bp, synthetic construct; identical to SEQ ID NO: 32163
  source 1..120: mol_type = other DNA

SEQ ID NO: 74986 - DNA, 120 bp, synthetic construct
  source 1..120: mol_type = other DNA
tgactgccattctaactggtgtgagatggtatctcattctggttttgatttgcatttgtctgatggccagtgatggtaaccattttttcatgtgttttttggctgcataaatgtcttctt

SEQ ID NO: 74987 - DNA, 120 bp, synthetic construct
  source 1..120: mol_type = other DNA
tttcattgagcagtggtttgtagttctccttgaagaggtccttcacgtcccttgaaagttggattcctaggtattttattctctttgaagcaattgtgaaacccttcaaaaattaatgaa

SEQ ID NO: 74988 - DNA, 120 bp, synthetic construct; identical to SEQ ID NO: 32164
  source 1..120: mol_type = other DNA

SEQ ID NO: 74989 - DNA, 120 bp, synthetic construct; identical to SEQ ID NO: 32165
  source 1..120: mol_type = other DNA

SEQ ID NO: 74990 - DNA, 120 bp, synthetic construct
  source 1..120: mol_type = other DNA
gaagaaggcttcagacgatcaaactactccgagctacaggaggaaattcaaaccaaaggcaaagaagttaaaaactatcacaaaaatttagacgaatgtataactagaataaccaataca

SEQ ID NO: 74991 - DNA, 120 bp, synthetic construct
  source 1..120: mol_type = other DNA
acataacaatattaactttaaatgtaaatggactaaatgctccaattaaaagacacagactggcaagttggataaagactcaagacccatcagagtgctatattcaggaaacccatctca

SEQ ID NO: 74992 - DNA, 120 bp, synthetic construct
  source 1..120: mol_type = other DNA
cactaaatgcccacaagagtaagcaggaaagatccaaaattgacacccttacatcacaattaaaagaactagaaaagcaagagcaaacacattcaaaagctagcagaaggcaagaaataa

SEQ ID NO: 74993 - DNA, 120 bp, synthetic construct
  source 1..120: mol_type = other DNA
tagagctatctatgacagacccacagccaatatcatactgaatgggcaaaaactggaagcattccctttgaaaagtggcacaagacagggatgccctctctcaccactcctattcaacat

SEQ ID NO: 74994 - DNA, 120 bp, synthetic construct
  source 1..120: mol_type = other DNA
cagaacagagccctcagaaatagcgccgcatatctgcaactatctgatctttgacaaacctgagaaaaacaagcaatgaggaaaagattccctatttaataaatggtcctgggaaaactg

SEQ ID NO: 74995 - DNA, 120 bp, synthetic construct; identical to SEQ ID NO: 32150
  source 1..120: mol_type = other DNA

SEQ ID NO: 74996 - DNA, 120 bp, synthetic construct; identical to SEQ ID NO: 70124
  source 1..120: mol_type = other DNA

SEQ ID NO: 74997 - DNA, 120 bp, synthetic construct
  source 1..120: mol_type = other DNA
ctgtagccttgtagtatagtttgaagtcaggtagtgtgatgcctccagctttgctcttttggcttaggattgacttggtgatgcgggctcttttttggttccatatgaactttaaagtag

SEQ ID NO: 74998 - DNA, 120 bp, synthetic construct
  source 1..120: mol_type = other DNA
aagcccacttgatcatggtggataagctttttgatgtgctgttggattcggtttgccagtattttattgaggatttttgcatcaatgttcatcaaggatattggtctaaaattctctttt

SEQ ID NO: 74999 - DNA, 120 bp, synthetic construct
  source 1..120: mol_type = other DNA
ctacatactgctttgaatgcgtcccagagattctggtatgtggtgtctttgttctcgttggtttcaaagaacatctttatttctgccttcatttcgttatgaacccagtagtcattcagg

SEQ ID NO: 75000 - DNA, 120 bp, synthetic construct
  source 1..120: mol_type = other DNA
tattttatttctccttcacttatgaagcttagtttggctggatatgaaattctgggttgaaaattcttttctttaagaatgttgaatattggcccccactgtcttctggcttgtagggtt

SEQ ID NO: 75001 - DNA, 120 bp, synthetic construct
  source 1..120: mol_type = other DNA
gatgggttttcggtgtagatgtcctttctggttgttagttttccttctaacagacaggaccctcagctgcaggtctgttggaatactctgccatgtgaggtgtcagtgtgcccctggtgg

SEQ ID NO: 75002 - DNA, 120 bp, synthetic construct
  source 1..120: mol_type = other DNA
gggagagtattagaaagaatagctaacacatgctgggcttaatacttagatgatggattgataggtgcagcaaaccactatggcacatgtttacctgtgtagcaaacctacacatcctgc

SEQ ID NO: 75003 - DNA, 120 bp, synthetic construct; identical to SEQ ID NO: 32166
  source 1..120: mol_type = other DNA

SEQ ID NO: 75004 - DNA, 120 bp, synthetic construct; identical to SEQ ID NO: 32167
  source 1..120: mol_type = other DNA

SEQ ID NO: 75005 - DNA, 120 bp, synthetic construct; identical to SEQ ID NO: 32168
  source 1..120: mol_type = other DNA

SEQ ID NO: 75006 - DNA, 120 bp, synthetic construct
  source 1..120: mol_type = other DNA
ccattgtcatcatggcccgttctcaatgagctgttgggtacacctcccagaccgggtcgtggccgggcagaggggctcctcacttcccagtaggggcggccgggcagaagcgcccctcac

SEQ ID NO: 75007 - DNA, 120 bp, synthetic construct; identical to SEQ ID NO: 32169
  source 1..120: mol_type = other DNA

SEQ ID NO: 75008 - DNA, 120 bp, synthetic construct; identical to SEQ ID NO: 32151
  source 1..120: mol_type = other DNA

SEQ ID NO: 75009 - DNA, 120 bp, synthetic construct; identical to SEQ ID NO: 32152
  source 1..120: mol_type = other DNA

SEQ ID NO: 75010 - DNA, 120 bp, synthetic construct; identical to SEQ ID NO: 32153
  source 1..120: mol_type = other DNA

SEQ ID NO: 75011 - DNA, 120 bp, synthetic construct; identical to SEQ ID NO: 32154
  source 1..120: mol_type = other DNA

SEQ ID NO: 75012 - DNA, 120 bp, synthetic construct; identical to SEQ ID NO: 32155
  source 1..120: mol_type = other DNA

SEQ ID NO: 75013 - DNA, 120 bp, synthetic construct; identical to SEQ ID NO: 32156
  source 1..120: mol_type = other DNA

SEQ ID NO: 75014 - DNA, 120 bp, synthetic construct; identical to SEQ ID NO: 32157
  source 1..120: mol_type = other DNA

SEQ ID NO: 75015 - DNA, 120 bp, synthetic construct
  source 1..120: mol_type = other DNA
agacaatggaggaaggaagaaatgaaggcagaaataaggatgttctttgaaacctacgagaacaaagacacaacgtaccagaatctctgggacacagtcaaaacagtgtgtagagggaaa

SEQ ID NO: 75016 - DNA, 120 bp, synthetic construct
  source 1..120: mol_type = other DNA
agcacataaacagaaccaaagacaaaaaccacatgattatctcaatatatgcagaaaaggcctttgacaaaattcaacaacccttcatgctaaaaactctcaataaattaggtattgatg

SEQ ID NO: 75017 - DNA, 120 bp, synthetic construct
  source 1..120: mol_type = other DNA
aaatgttagacctaaaaccataaaaaccctagaagaaaacctaggcgttaccattcaggacataggcatgggcaaggacttcatgtctaaaacaccaaaagcaatggcaacaaaagccaa

SEQ ID NO: 75018 - DNA, 120 bp, synthetic construct
  source 1..120: mol_type = other DNA
catggacacaggaaggggaacatcacactctggggactgttgtggggtggcgggaggggggagggatagcattaggatatatacctaatgcaaaatgatgagttaatggttgcagcacac

SEQ ID NO: 75019 - DNA, 120 bp, synthetic construct
  source 1..120: mol_type = other DNA
cccaccattgcccaggcttgattaggtaaacaaagcagcctggaagctggaactgggtggagcccaccacagctcaaggaggcctgcctgcctctgtaggctccacctctgggggcaggg

SEQ ID NO: 75020 - DNA, 120 bp, synthetic construct
  source 1..120: mol_type = other DNA
aaatgactttgacgagctgagagaagaaggcttcagacgatcaaattattctgagctacgggaggacattcaaaccaaaggcaaagaagttgaaaactttgaaaaaaatttagaagaatg

SEQ ID NO: 75021 - DNA, 120 bp, synthetic construct
  source 1..120: mol_type = other DNA
agaccattgagactaggaagaaactgcatcaactaacgagcaaaatcaccagctaacatcataatgacaggatcaaattcacacataacaatattaactttaaatgtaaatggactaaat

SEQ ID NO: 75022 - DNA, 120 bp, synthetic construct
  source 1..120: mol_type = other DNA
tagcactaaatgcccacaagagaaagcaggaaagatccaaaattggcaccctaacatcacaattaaaagaactagaaaagcaagagcaaacacattcaaaagctagcagaaggcaagaaa

SEQ ID NO: 75023 - DNA, 120 bp, synthetic construct
  source 1..120: mol_type = other DNA
atgcagaaaaagcctttgacaaaattcaacaacccttcatgctaaaaactctcaataaattaggtattgctgggatgtatttcaaaataataagagctatctatgacaaacccacagcca

SEQ ID NO: 75024 - DNA, 120 bp, synthetic construct
  source 1..120: mol_type = other DNA
ctatctgatctttgacaaacctgagaaaaacaagcaatggggaaaggatcccctatttaataaatggtgctgggaaaactggctagccatatgtagaaagctgaaactggatcccttcct

SEQ ID NO: 75025 - DNA, 120 bp, synthetic construct
  source 1..120: mol_type = other DNA
aatactatgcagccataaaaaatgatgagttcatgtcctttgtagggacatggatgaaattggaaatcatcattctcagtaaactatcgcaagaacaaaaatccaaacactgcatattct

SEQ ID NO: 75026 - DNA, 120 bp, synthetic construct
  source 1..120: mol_type = other DNA
ctattttttttcttcattgccccaggttgtattataaatctcaaaaccgtaatctgtctctatctctctctgtctctctctctgtctctgtctctctctctgtctctgtctctctctctc

SEQ ID NO: 75027 - DNA, 120 bp, synthetic construct
  source 1..120: mol_type = other DNA
agtttatagattcaatgccatccccatcaagctaccaatggctttcttcacagaattggaaaaaactactttaaagttcatatggaaccaaaaaagagcctgcattgccaagtcaatcct

SEQ ID NO: 75028 - DNA, 120 bp, synthetic construct
  source 1..120: mol_type = other DNA
accagcgtggaagacagtgtggcgattcctcagggatctagagctagaaataccatttgacccagccatcccattactgggtatatacccaaaggaatataaatcatgctgctataaaga

SEQ ID NO: 75029 - DNA, 120 bp, synthetic construct; identical to SEQ ID NO: 15687
  source 1..120: mol_type = other DNA

SEQ ID NO: 75030 - DNA, 120 bp, synthetic construct; identical to SEQ ID NO: 15688
  source 1..120: mol_type = other DNA

SEQ ID NO: 75031 - DNA, 120 bp, synthetic construct; identical to SEQ ID NO: 15346
  source 1..120: mol_type = other DNA

SEQ ID NO: 75032 - DNA, 120 bp, synthetic construct; identical to SEQ ID NO: 15347
  source 1..120: mol_type = other DNA

SEQ ID NO: 75033 - DNA, 120 bp, synthetic construct
  source 1..120: mol_type = other DNA
tatccccctgcctcagcctcccaaatagctgagactacagacatgtgccactgcatcttgctgttatggatattcttaaatatcagagcacacagatttactaacattatttttacaggc

SEQ ID NO: 75034 - DNA, 120 bp, synthetic construct
  source 1..120: mol_type = other DNA
ggcagagggtctcctcacttctcagacggggcagccgggcagagacgctcctcacctcccagacggggtctcggccgggcagaggcgctcctcacatcccagatggggcggcggggcaga

SEQ ID NO: 75035 - DNA, 120 bp, synthetic construct; identical to SEQ ID NO: 19016
  source 1..120: mol_type = other DNA

SEQ ID NO: 75036 - DNA, 120 bp, synthetic construct; identical to SEQ ID NO: 24942
  source 1..120: mol_type = other DNA

SEQ ID NO: 75037 - DNA, 120 bp, synthetic construct
  source 1..120: mol_type = other DNA
aacatcccagatgctcttcaacaggtgattggttaaacaaatggtggcacatcctgtatctatgtaaatgtatacgtatattccataaatagtatctatatatccctatagatatatatg

SEQ ID NO: 75038 - DNA, 120 bp, synthetic construct
  source 1..120: mol_type = other DNA
ctcggcagaaactctacaagccaggagagagtgggggccgatattcaacattctgaaaggaaagaattgtcaacccagaatttcatatccagccaaactaagcttcataagtgaaggaga

SEQ ID NO: 75039 - DNA, 120 bp, synthetic construct
  source 1..120: mol_type = other DNA
taaaagaacagaaattataacaaactgtctctcagaccacagtgcaatcaaactagaactcaggattaagaaactcactcaaaaccgttcaactacatggaaactgaacaatctgctcct

SEQ ID NO: 75040 - DNA, 120 bp, synthetic construct
  source 1..120: mol_type = other DNA
tgggcttcatccctggcatgcaaggctggttcaatatacgcaaatcaataaatgtaatccagcatagaaacagaaccaaagacaaaaaccacatgattatctcaacagatgcagaaaagt

SEQ ID NO: 75041 - DNA, 120 bp, synthetic construct
  source 1..120: mol_type = other DNA
tctcagaaacaatgccgcatatctacaactatctgatctttgacaaacctgagaaaaacaagaaatggggaaaggattccctatttaataaatggtgctgggaaaactggctagccatat

SEQ ID NO: 75042 - DNA, 120 bp, synthetic construct
  source 1..120: mol_type = other DNA
ctatcgcaagaacaaaaaaccaaacaccgcatattctcactcataggtgggaattgaacaatgagaacacatggacacaagaaggggaacatcacactctggggactgttgtggggtggg

SEQ ID NO: 75043 - DNA, 120 bp, synthetic construct
  source 1..120: mol_type = other DNA
aactatgctacaaggctacagtaaccaaaacagcatggtactggtaccaaaacagagaaatagaccaatggaacagaacagagccctcagaaataatgctgcatatctacaactatctga

SEQ ID NO: 75044 - DNA, 120 bp, synthetic construct
  source 1..120: mol_type = other DNA
caaaaagtgggtgaaggatatgagcagacacttctcaaaagaagacacctatgcagccaaaaaacacatgaaaaaatgctcatcatcactggccatcagagaaatgcaaatcaaaaccac

SEQ ID NO: 75045 - DNA, 120 bp, synthetic construct
  source 1..120: mol_type = other DNA
taaaatgcctaggaatccaacttacaagggatgtgaaggacctcttcaagaagaactacaaaccactgctcaatgaaataaaagaggatacaaacaaatggaagaatattccatgctcat

SEQ ID NO: 75046 - DNA, 120 bp, synthetic construct
  source 1..120: mol_type = other DNA
tcaaaaccacaatgagatactatctcacaccagctagaatggtgatcattaaaaagtcaggaaacaacaggtgctggagaggatgtggagaaataggaacacttttacactgttggtggg

SEQ ID NO: 75047 - DNA, 120 bp, synthetic construct
  source 1..120: mol_type = other DNA
cctgatcgtgtcactccggaacatggacgttatcaaggacagctgccggcactcttggtaataatttctctttaaatgtaagtgatctttcctttgaacattttgagttgagatggatgt

SEQ ID NO: 75048 - DNA, 120 bp, synthetic construct
  source 1..120: mol_type = other DNA
gtgtgttccaccatcttcacaattgaatgagtaaccatcattaagcagttagcttaggccgtaatatgattcttggactgagatttcaaaaataccacaggccttctgaaaggttacccc

SEQ ID NO: 75049 - DNA, 120 bp, synthetic construct
  source 1..120: mol_type = other DNA
tgaaacttctatattatgctgggtagcaacttagttttccctacccttcttcatgctgggagatgaaagagattcagttacggcttaagctccacaggcatacaaagtgaagcagaaaac

SEQ ID NO: 75050 - DNA, 120 bp, synthetic construct
  source 1..120: mol_type = other DNA
cagtgaggctgcctgagtgtccatcctagatctctcacctcttggctctgtgaccttgagcaggtcttaaatctctctaagcctttgtttttttaattgataaaatgaggataataatag

SEQ ID NO: 75051 - DNA, 120 bp, synthetic construct
  source 1..120: mol_type = other DNA
ggaactggattataatcaagacaacttctacatgaaaaaatagattaatagtgctccaagttagttcactgtatttattcctttttatacattatctgccttcggtgttattcaagtttt

SEQ ID NO: 75052 - DNA, 120 bp, synthetic construct
  source 1..120: mol_type = other DNA
acgactgtatttttactgggcagagtgaaatcatcatctacaatggctaccccagtgaagagtatgaagtcaccactgaagatgggtatatactccttgtcaacagaattccttatgggc

SEQ ID NO: 75053 - DNA, 120 bp, synthetic construct
  source 1..120: mol_type = other DNA
ccaccacacatattaaggagcagctgaggtcatgtttgacattctctccctcttttatctccagtttcagaatgaaaaatgagagtgagatatgagtagttttactagttaaaatatgaa

SEQ ID NO: 75054 - DNA, 120 bp, synthetic construct
  source 1..120: mol_type = other DNA
aaaccacacccaggaaatttgtatatacaaatacatagagcacagtagttatcaggacagactttgacataaaaagaactgggtttgagtccctgctctggccttcttatctgggtggcc

SEQ ID NO: 75055 - DNA, 120 bp, synthetic construct
  source 1..120: mol_type = other DNA
cagccaatgtttactgagtggctactgtatgcgctgttctaggccccgaacattcaaacagggaacagacaaactctctgacctcacaaagcttatgttcattttagtgataattttaca

SEQ ID NO: 75056 - DNA, 120 bp, synthetic construct
  source 1..120: mol_type = other DNA
ccataaatagtagaatcatgatttacaaaacccctgtttccaaagatgggtattaaatggtcctaacaattgtgaagcctcatgtgggagtcagaagtagaggcacacaagccagatggg

SEQ ID NO: 75057 - DNA, 120 bp, synthetic construct
  source 1..120: mol_type = other DNA
aaagggaagggcttatacctatatttaaacaaactgaaaaggcatggttatatttgtttgtgagttggaacacacaagcttactataataaatcaattgagcttatctattcagtgtgtg

SEQ ID NO: 75058 - DNA, 120 bp, synthetic construct
  source 1..120: mol_type = other DNA
attatttcagttcttctttttctggccaagacagttttaatgttccaacaagtgtttcagtacacacacacacacacacacacacacacacacacacacacacacacatgccagtggagg

SEQ ID NO: 75059 - DNA, 120 bp, synthetic construct
  source 1..120: mol_type = other DNA
ctctcagggtttgtagccttttccaccatgcctgaactggcacaaagaatcaaaatgaattttgccttgggtcctacgatctcattcaaatatcccacgggcatttttaccaggtttttt

SEQ ID NO: 75060 - DNA, 120 bp, synthetic construct
  source 1..120: mol_type = other DNA
aacttgggatgatggataaaatggatttgggccaaaattgaagtcaaggagaccagttagaatatcaaaataattcatatataagaaaatgagacgttggtttggggtagagtggtagga

SEQ ID NO: 75061 - DNA, 120 bp, synthetic construct
  source 1..120: mol_type = other DNA
aagcactgactgggcagaatacagggaagcttcactatggagaagtgaatttgggattgagggcctttattgcaatctccttgtaaataatatttgatactcttcctcatctggagacac

SEQ ID NO: 75062 - DNA, 120 bp, synthetic construct
  source 1..120: mol_type = other DNA
aacggtattttggtacccattaaccaatgcctctttatccttccccctcccctactacctttcccagcctctggtaaccatcattcttctcactatctctataaggtcagttttttttta

SEQ ID NO: 75063 - DNA, 120 bp, synthetic construct
  source 1..120: mol_type = other DNA
tagcttgacgtaatctaatttgttcatgtttgctttggttgcctgtgcatttgagggcttacctcaaattggcccagaccaatgtcccggagtgcttctgtaatgtttgttttttagtag

SEQ ID NO: 75064 - DNA, 120 bp, synthetic construct
  source 1..120: mol_type = other DNA
ggaaccatgaaggtagatgtctgctatacatagaagattaagtactcaacaaaccttgaatatgaagactggggaagtgaataggcagcttcactcttctattccctggtgaaatttagg

SEQ ID NO: 75065 - DNA, 120 bp, synthetic construct
  source 1..120: mol_type = other DNA
atagaacctttcctagttggctttgctccatgatgaccattactgttccttctacttcaaaataagcaaattatcctacagattcagagctggtacaggtgtgctgtcaagcagcccatt

SEQ ID NO: 75066 - DNA, 120 bp, synthetic construct
  source 1..120: mol_type = other DNA
aaaaacatttgtttcagctttaccactctgatgaattcagagcttatgactggggaaatgacgctgataatatgaaacattacaatcaggtgagctatttacagtaaccccagcatgctg

SEQ ID NO: 75067 - DNA, 120 bp, synthetic construct
  source 1..120: mol_type = other DNA
accacaccacaatctaaatataggacgtttatatcaccactaaaagtttttttcctgctcctgagactatttatagacacaaatgcgtgtatttgcaaatgcttagaaaaggtctagaaa

SEQ ID NO: 75068 - DNA, 120 bp, synthetic construct
  source 1..120: mol_type = other DNA
agtcacccatggcttttaattgccaaattcaatggcctatcttcaccttttgaaatgtgttatgttcgttaccacagtctccttgaaactcagtcccctgacttggacttccataacaca

SEQ ID NO: 75069 - DNA, 120 bp, synthetic construct
  source 1..120: mol_type = other DNA
ctcaaatcaagagtcttcattactttaagctattgccagattggaaccactttgattttgtctggggcctcgatgcccctcaacggatgtacagtgaaatcatagctttaatgaaggcat

SEQ ID NO: 75070 - DNA, 120 bp, synthetic construct
  source 1..120: mol_type = other DNA
gattgccgcatttttgtaaccaccactttggctgctacatagagaatggattagaagatgccaacaaaagattctgagcaagactgtaaatctgatcaagtgttctgatgcaggctgata

SEQ ID NO: 75071 - DNA, 120 bp, synthetic construct
  source 1..120: mol_type = other DNA
ttctttcaatcggtataatcaatcagtttcagagaggcgaagtcttgctcaagtgacagcctttttgagactcattaaccaaagaacaaggcacgtgtttcaccatcagggctttgttca

SEQ ID NO: 75072 - DNA, 120 bp, synthetic construct
  source 1..120: mol_type = other DNA
gtcccacccaaagctaaattttctgtgctaataccttttgtaatctgtacactgcctcaagggaaaatgttactcaagtcagagttcccattgacttgactacacaatccttgattcata

SEQ ID NO: 75073 - DNA, 120 bp, synthetic construct
  source 1..120: mol_type = other DNA
ttaaaaataccttccacatcctgccactctacccctacctcaaagagaagattcccaaggaaactctaggtaatgaaaacctggtcctacagtctatgaaagtatgacttcaacagtgtg

SEQ ID NO: 75074 - DNA, 120 bp, synthetic construct
  source 1..120: mol_type = other DNA
ctgtcaaagagtatttttatttctttgtctttttctctgacctgtgggcttggtaatcaagtctttctcaggatcactaacgtacttctatgcaattctgtgctttacagtctccagtgt

SEQ ID NO: 75075 - DNA, 120 bp, synthetic construct
  source 1..120: mol_type = other DNA
agagactgagtaaacttgttaacaatggaatattaaacagtcattaaagctgatgcaaaatagatttaatgggccaacgcggtggctcatgcctgtaatcccagcactttgggaggctga

SEQ ID NO: 75076 - DNA, 120 bp, synthetic construct; identical to SEQ ID NO: 16006
  source 1..120: mol_type = other DNA

SEQ ID NO: 75077 - DNA, 120 bp, synthetic construct
  source 1..120: mol_type = other DNA
aaacaagaatctaaagatcccctagggcaatctctggactttggggggtccacatactctggaactgtgtaatgtgaatatgtatgttttgttctattttcctaggagatgatccacagc

SEQ ID NO: 75078 - DNA, 120 bp, synthetic construct
  source 1..120: mol_type = other DNA
ctaattgttcccctggtgtgagatatgtgatacatgataatcttttattatcaagtctaattccaaaatacatgatcagttacagtagttttcatgtggatttaaggagtgatggttacc

SEQ ID NO: 75079 - DNA, 120 bp, synthetic construct
  source 1..120: mol_type = other DNA
atgaacaaaattgattgcaagactcataaacattggatattaattcttgaggaataagagtgaggctacttttctaggtgatatttatccccatatatggaagagtgtgggttttaaaaa

SEQ ID NO: 75080 - DNA, 120 bp, synthetic construct
  source 1..120: mol_type = other DNA
tccttcatgatccagtccagggccatgtggctgcgcatcttttcatctagagaatactgagaatagtaggagatgacttcctgggggccaagaaacaaagtccagggtgtcaataaaaag

SEQ ID NO: 75081 - DNA, 120 bp, synthetic construct
  source 1..120: mol_type = other DNA
tagttactgcctgtcaattcttgtgtgaaaaatttgtcgatacataataacatcatatgtagagttgatcatgtggagtgaatgcactgcttatttttattttcaagaacatatggtatg

SEQ ID NO: 75082 - DNA, 120 bp, synthetic construct
  source 1..120: mol_type = other DNA
tctgcctttatgatcctttcggtttgcattcggtacaggtatctaaatcagtcctgtgcccacgttctttttagtgtgtatatttgtcagtccctgactcaatggggctgttctatatat

SEQ ID NO: 75083 - DNA, 120 bp, synthetic construct
  source 1..120: mol_type = other DNA
tgcttaagaagatcgctatatacatgtttgcttgtaaatgcctagaagagttctagtaagatacaaaaggatctggtaactttagctgtctctggaatgccagaggaatgcctgggggac

SEQ ID NO: 75084 - DNA, 120 bp, synthetic construct
  source 1..120: mol_type = other DNA
aataactctatatgatcaaggaactttcatgtcttaaaaaatagttatgaaaacttaacatagacagatgtcctactgtccattcaaaaaagcttttagctgggcacggtggtgtgtgcc

SEQ ID NO: 75085 - DNA, 120 bp, synthetic construct
  source 1..120: mol_type = other DNA
gctttccatcaaagtggccccagtggctgagaagggcaaatttgtgttgcccttcctaccatactaacaaaccaactcaccgaatactttgaagccataaaaatgaatgggaagattgtt

SEQ ID NO: 75086 - DNA, 120 bp, synthetic construct
  source 1..120: mol_type = other DNA
ccagtaacacaactgccacttcctcagtgttgcttttgttcttaacattccctagggaagatgacctcctttccaacttcttacattatatccccatctagtttttgtcctctgtagaga

SEQ ID NO: 75087 - DNA, 120 bp, synthetic construct
  source 1..120: mol_type = other DNA
attatttatcttgattatgaagtttttaagcatccctttcaattttgtacccaagagaaatgtgtcacttgcctagcccttgtctgtccccttcttgtggctctgtctcaggggcaagcc

SEQ ID NO: 75088 - DNA, 120 bp, synthetic construct
  source 1..120: mol_type = other DNA
gcttgtttttatatggtagagtcatccatagctagatacaaacacacatctattacccaccaggggtactgaattgctgtgttggctgcagaaacagcccaggtctgtgggcaattccca

SEQ ID NO: 75089 - DNA, 120 bp, synthetic construct
  source 1..120: mol_type = other DNA
tcttttatcctacaataggggctctgaaccattttgtgtaggttcaaatagagctaggttagacagagttgtcaacggaatccatccagtagcctctggcatttcaagcaaagattcctt

SEQ ID NO: 75090 - DNA, 120 bp, synthetic construct
  source 1..120: mol_type = other DNA
attttttaataatgtgcatggggacatttccatctgagaagtggctgtgccattggggtcaggaaaggagtttgaaaggtaccaaagaaggtatttgaaagttgtggcttcagaagggct

SEQ ID NO: 75091 - DNA, 120 bp, synthetic construct
  source 1..120: mol_type = other DNA
aaagattgtttcctgattgcgtgtttgtttacgcctatgatgtgtggccgagatggggctaccatgctggattccaggagggttagattaaaatgaccaaaaacacttaagaccaaaaga

SEQ ID NO: 75092 - DNA, 120 bp, synthetic construct
  source 1..120: mol_type = other DNA
ccgggaaggtgggcaatggtgactttgtgagatggaacaaacaagtgccagcacagatagcagcaaatttatagcttttgaatgcaataacattaacacactgctgctgaaatatttatg

SEQ ID NO: 75093 - DNA, 120 bp, synthetic construct
  source 1..120: mol_type = other DNA
gaattcgcacttccagtaaacacttcagatgattttcatgatctttcaagttcggggaaaatggagctcgttttccactagattaaagcagtattccactgtatgcgttctcaggcccta

SEQ ID NO: 75094 - DNA, 120 bp, synthetic construct
  source 1..120: mol_type = other DNA
ggtcacgcagattttccttcagctctagagttcgtgcaaatgtcttggttgatcttcaattacttattgtcttattttatagtcattgaatgtctactatatgtcagaagctttgcatac

SEQ ID NO: 75095 - DNA, 120 bp, synthetic construct
  source 1..120: mol_type = other DNA
ctctgaacaactaacaactcccatttttcaagttctggtttggcatcgttcctggggttgcagatagagggacaagccccataagtactggactgtccctggagcccataccttttggag

SEQ ID NO: 75096 - DNA, 120 bp, synthetic construct
  source 1..120: mol_type = other DNA
cgatcctcccacctcagcctcctgagtagctgggtctacaggcacttggcaccatacctggctaatttttgtattttttgtagagacagggtctcactatattgcccaggctggtctcaa

SEQ ID NO: 75097 - DNA, 120 bp, synthetic construct
  source 1..120: mol_type = other DNA
agaacatgacactgaggagaattaaaacaaacacaaattaaaaaataacaaaaaccaaccaaacaaacaacatttgccaggagactaacaaagcagaacaattaagggcaggcagaagaa

SEQ ID NO: 75098 - DNA, 120 bp, synthetic construct
  source 1..120: mol_type = other DNA
ggataattggtcattgcagtcagacactttgagatgaccatttttgcctgagcgtagggtatgtttattattctttggaaaatcagttccccattaaaaagcaaacaacgtttttgcaag

SEQ ID NO: 75099 - DNA, 120 bp, synthetic construct
  source 1..120: mol_type = other DNA
gatgtgtccaaaccagtcgtcaaagacatcggttggggagcgagtgaagtatgatgttatttcaaagtaacttcctgctagagttagacttcccaggttatacagttcattcttgctatt

SEQ ID NO: 75100 - DNA, 120 bp, synthetic construct
  source 1..120: mol_type = other DNA
agaccttgagccaaaaccactcagctaagctacttccagatccctgatcctcggaaactgtgcgagacaataaatgtttgtaagttttcaggctatttcttatgcagcaataggtaacta

SEQ ID NO: 75101 - DNA, 120 bp, synthetic construct
  source 1..120: mol_type = other DNA
ccctgtattttatcatagattaagatgaccaacaagtcaccaggaccctatagggtacactataaagattgctgccaagcctaggccgggagtttggaccaatagttcaaaaactttagt

SEQ ID NO: 75102 - DNA, 120 bp, synthetic construct
  source 1..120: mol_type = other DNA
ccatcttctggccaagctgaagcaatttagacatgaaacagtaactttcctggtagccctcatttgattaatgattgttttccatgctttgtattagaaaataggcaggatacatgtgtt

SEQ ID NO: 75103 - DNA, 120 bp, synthetic construct
  source 1..120: mol_type = other DNA
atctaattgtggatatattaacattttttctccttccagatggtgatgtgaaaaagggcaaccgttggaactcagtcacccaagttaatatcgtgtctatccataggtcagggtggctgc

SEQ ID NO: 75104 - DNA, 120 bp, synthetic construct
  source 1..120: mol_type = other DNA
ccttcccgtctttgagtctcattagttataaaacaggatgctttcctgtggagatttccaccaggaaatacctcctttagaagttaagttacattgcatagcatgtcgtccatctgagtc

SEQ ID NO: 75105 - DNA, 120 bp, synthetic construct
  source 1..120: mol_type = other DNA
cctttaaatcaaaatataaaataagataaaatactcaagttcccttttggatttggaagcaaaaacagctgctgcaacaatgagtggctttccttctgagttcatcaagaggggagccag

SEQ ID NO: 75106 - DNA, 120 bp, synthetic construct
  source 1..120: mol_type = other DNA
ggctactgctggcataatggtttctccatgtttcagcacatggtcttggcattaataatccatcgtgaaatgatttgtaatgcacaggggtgacatttgattatgtgaaaggcattgcag

SEQ ID NO: 75107 - DNA, 120 bp, synthetic construct
  source 1..120: mol_type = other DNA
gatatgaacaaaataatatcagctgattttactgttactgacttttccttcctagcccactatcttgcagatttaggtgaatgatcttagctgactattggttacatacaagaatggaca

SEQ ID NO: 75108 - DNA, 120 bp, synthetic construct
  source 1..120: mol_type = other DNA
tgttaaccaagtttgccagtttttgtcccatttcagggagctaatgccccctgaagtttccctaaagctacgtatatgttcaatctaattttaaaaacagatagtgtacatatgcagtat

SEQ ID NO: 75109 - DNA, 120 bp, synthetic construct
  source 1..120: mol_type = other DNA
ttacatcaagctctgttctgaggcttctatacccacattcaaatcatcctcctcagtcaattcactttcatttaccagtggtaaaaacacactgctgactactgttcggagtggggaagg

SEQ ID NO: 75110 - DNA, 120 bp, synthetic construct
  source 1..120: mol_type = other DNA
tttttagagaaatctttcttcttttatttcccccactaaaactgttcctaagagcattccttgatcatcttctcacaccacacatcctcacttggcagtggtacctgtagctgtggcttc

SEQ ID NO: 75111 - DNA, 120 bp, synthetic construct
  source 1..120: mol_type = other DNA
ttctttgacttcccagaggcagcataggtttgtaggtctgtttattaaattatacccttccctcactcagtgaaggatttgaaaccatgtaaaacagatacacctggtaacaggatacaa

SEQ ID NO: 75112 - DNA, 120 bp, synthetic construct
  source 1..120: mol_type = other DNA
gctttgaacatttgtcttaatagactttatccagagctgtgattatctgtggtcctctttctcatttctcatagattcttaagcctgcaaagatttaagaagagaaagtcagaaagaagg

SEQ ID NO: 75113 - DNA, 120 bp, synthetic construct
  source 1..120: mol_type = other DNA
tgcccataatccaggatccttgattggacttgaagttatctaaccaacccacctgctttttccttaagccattttcaggtggcatctctcacatgcatatgaaaagtacactaaacagtc

SEQ ID NO: 75114 - DNA, 120 bp, synthetic construct
  source 1..120: mol_type = other DNA
agaattagaacttttattttctaaactattatttctgtcccctactctcctcctttccctcccacccctgaggaaacaaatatctatgagctagctgacttgagtctctgcttgcagttg

SEQ ID NO: 75115 - DNA, 120 bp, synthetic construct
  source 1..120: mol_type = other DNA
ctatgtctagggacccatctgcacaaatgctcagctccaccttatttcctacagtctcaaaagaatttgtgctgcttttcctggaattgttctcttagtcactcccatggcctattttta

SEQ ID NO: 75116 - DNA, 120 bp, synthetic construct
  source 1..120: mol_type = other DNA
ttccggggtaatatcactgaatctcatagccgatcaaatcactcacatcttcaagtccttctatgggtccctaattaactatggaatgaataactccttggcaaggcatagaagacccta

SEQ ID NO: 75117 - DNA, 120 bp, synthetic construct
  source 1..120: mol_type = other DNA
catttgtgaggctgttggtagtgtaggcatgagagccttccccaagaattgcttcatttacctttttccgtgggccatttttccgacatttgttcttgacaaagtcaaatgaaagaaaag

SEQ ID NO: 75118 - DNA, 120 bp, synthetic construct
  source 1..120: mol_type = other DNA
ctatcagcttagaactgctgacagtaaagaaagcagcgtacctctgaaatgactttgcagatcgagcttcttaattcattctactacccctaattgctttctctaacacggtgataggcc

SEQ ID NO: 75119 - DNA, 120 bp, synthetic construct
  source 1..120: mol_type = other DNA
tgaatgaacatgtagaaagtaagtgaagtcactgtgatccacagcgtggtcaggacttaattctggaataggaggtttcacggatagaccaccatggtgttcaaacaacatgggtgtatt

SEQ ID NO: 75120 - DNA, 120 bp, synthetic construct
  source 1..120: mol_type = other DNA
gggatatgatttgacaagagacagggtgagaggacttagcttcttttaataactggatgtgaaccccattgccctgatgtcccagctttacccaagcaggagagaagggtaggaacagag

SEQ ID NO: 75121 - DNA, 120 bp, synthetic construct
  source 1..120: mol_type = other DNA
tgctacatgtctcaaaatttgaaaatgtggatttttttggtcccaatttttcactttcccatggatgctaaaggcaatagacctgctcctagcaaaaactaccatgaggagctaatttta

SEQ ID NO: 75122 - DNA, 120 bp, synthetic construct
  source 1..120: mol_type = other DNA
cgctgatttacattcatgaaaatgagttgaaaaatgtggtacctttgggtcttgtgctgggcttagctgaaccccaggacactgacaaacagagttgctgtctagttgtttctaactata

SEQ ID NO: 75123 - DNA, 120 bp, synthetic construct
  source 1..120: mol_type = other DNA
ctatttatccaatcagaaagtacatatctttctcacattctattgggtaatgacattgcactgtatttaaaagagactttaggccaggcgcagtggctcacgtctgtaatcccagcactc

SEQ ID NO: 75124 - DNA, 120 bp, synthetic construct
  source 1..120: mol_type = other DNA
tacagaaaagtacaaggtacagctctgccctcctggaacttacaacttaggtgtggacaaaaacaccacattgaagctgtaacacttagtacagagccacatgagggaaatgtaaactaa

SEQ ID NO: 75125 - DNA, 120 bp, synthetic construct
  source 1..120: mol_type = other DNA
atctgttaaatcttacttttctatgagaaataaatgtactaggacagataaagccataaagtgatcaagaagctacctattttttccagtttgaaaacctgtcttctagggttgagactt

SEQ ID NO: 75126 - DNA, 120 bp, synthetic construct
  source 1..120: mol_type = other DNA
gtctgagttggcaaatggtttcttgctaagaaaaagctgcagtgttccctaacttaggtattcggatgtgtacctctaaccaatgtcaatataaacttttccgcaacgcaacataaggcc

SEQ ID NO: 75127 - DNA, 120 bp, synthetic construct
  source 1..120: mol_type = other DNA
agccaagaatggaaagcaatatggagacaagctatactttgcagagattctgcctggtagtgtggagacttccagtgctacttgttttaaaatagagacatttatgcaggggagaacagt

SEQ ID NO: 75128 - DNA, 120 bp, synthetic construct
  source 1..120: mol_type = other DNA
ctggcagaaagagcttggagcaggttagagtggaggaggagccagcagtgactaggaggagaggggactgctcagaacctgccattcaaggctggtggcagctttttacaggctgccaat

SEQ ID NO: 75129 - DNA, 120 bp, synthetic construct
  source 1..120: mol_type = other DNA
gcccttttatccctcactagtgaatcagttctattgtaggagagagacattctttcctccccttttcgcttaaaaaacataacaaacctgaatagactccaggctagagtagtggagaga

SEQ ID NO: 75130 - DNA, 120 bp, synthetic construct
  source 1..120: mol_type = other DNA
cttaggcaggtcttggattgtagaagagacttctaagtagttagcaagatgtatcactgacagaataacccagtgcctaatgcctgtaggtgaaatgaaatcgttcttctggctgaagtc

SEQ ID NO: 75131 - DNA, 120 bp, synthetic construct; identical to SEQ ID NO: 18515
  source 1..120: mol_type = other DNA

SEQ ID NO: 75132 - DNA, 120 bp, synthetic construct; identical to SEQ ID NO: 18516
  source 1..120: mol_type = other DNA

SEQ ID NO: 75133 - DNA, 120 bp, synthetic construct
  source 1..120: mol_type = other DNA
attgaacagcactcaagtcacctcttgaatgctttgctgcttagaaatttctcacaccagacaccctaaatcatctctctgaagttgaaagttccacaaatctctagggcaggggcaaaa

SEQ ID NO: 75134 - DNA, 120 bp, synthetic construct
  source 1..120: mol_type = other DNA
taaaagtcaggaaacaacaggtgctggagaggatgtggagaaataggaacacttttatactgttggtgggactgtcaaccgttgtggaagtcagtgtggcgattcctcagggatctagaa

SEQ ID NO: 75135 - DNA, 120 bp, synthetic construct
  source 1..120: mol_type = other DNA
tttggattggttccaagtctttgctattgtgaatagtgccgcaataaacattgaaataaaagaggttacaaacaaatggaaaaacattccatgctcatgggtaggaagaatcaatatcat

SEQ ID NO: 75136 - DNA, 120 bp, synthetic construct; identical to SEQ ID NO: 30558
  source 1..120: mol_type = other DNA

SEQ ID NO: 75137 - DNA, 120 bp, synthetic construct
  source 1..120: mol_type = other DNA
acaaatgggatctaattaaactcaagagcttctgcacagcaaaagaaaccaccatcagagtgaacaggcaacttacaaaatgggagaaaatttttgcaacttactcatctgacaaagggc

SEQ ID NO: 75138 - DNA, 120 bp, synthetic construct; identical to SEQ ID NO: 30559
  source 1..120: mol_type = other DNA

SEQ ID NO: 75139 - DNA, 120 bp, synthetic construct
  source 1..120: mol_type = other DNA
atcttcgcggtgagtgttacagctcataaaagcagcgtggacccaaagagttagcagtagcaagatttattgcaaagagcgaaagaacaaagcttccacagtgtggaaggtgacccgagc

SEQ ID NO: 75140 - DNA, 120 bp, synthetic construct; identical to SEQ ID NO: 28064
  source 1..120: mol_type = other DNA

SEQ ID NO: 75141 - DNA, 120 bp, synthetic construct
  source 1..120: mol_type = other DNA
tcgcggaaacttcccaaaaggtaatgagaagggaactctttaaattccaaaactgcatggaaaacaaatagttgggaatacatgtttgagctaacaggcacacacaccccaaacccaatg

SEQ ID NO: 75142 - DNA, 120 bp, synthetic construct; identical to SEQ ID NO: 15767
  source 1..120: mol_type = other DNA

SEQ ID NO: 75143 - DNA, 120 bp, synthetic construct; identical to SEQ ID NO: 15768
  source 1..120: mol_type = other DNA

SEQ ID NO: 75144 - DNA, 120 bp, synthetic construct; identical to SEQ ID NO: 15769
  source 1..120: mol_type = other DNA

SEQ ID NO: 75145 - DNA, 120 bp, synthetic construct
  source 1..120: mol_type = other DNA
aagagcagcaaagcagcctgcagggccactgccaaagccaagcgcggatgacagtcagagccaacgagagagtcagagccaacgacagagtcagccaatgacagagtcagagacaacgac

SEQ ID NO: 75146 - DNA, 120 bp, synthetic construct; identical to SEQ ID NO: 15770
  source 1..120: mol_type = other DNA

SEQ ID NO: 75147 - DNA, 120 bp, synthetic construct; identical to SEQ ID NO: 15771
  source 1..120: mol_type = other DNA

SEQ ID NO: 75148 - DNA, 120 bp, synthetic construct; identical to SEQ ID NO: 15772
  source 1..120: mol_type = other DNA

SEQ ID NO: 75149 - DNA, 120 bp, synthetic construct; identical to SEQ ID NO: 15773
  source 1..120: mol_type = other DNA

SEQ ID NO: 75150 - DNA, 120 bp, synthetic construct; identical to SEQ ID NO: 15774
  source 1..120: mol_type = other DNA

SEQ ID NO: 75151 - DNA, 120 bp, synthetic construct; identical to SEQ ID NO: 15775
  source 1..120: mol_type = other DNA

SEQ ID NO: 75152 - DNA, 120 bp, synthetic construct; identical to SEQ ID NO: 15776
  source 1..120: mol_type = other DNA

SEQ ID NO: 75153 - DNA, 120 bp, synthetic construct; identical to SEQ ID NO: 15777
  source 1..120: mol_type = other DNA

SEQ ID NO: 75154 - DNA, 120 bp, synthetic construct; identical to SEQ ID NO: 15778
  source 1..120: mol_type = other DNA

SEQ ID NO: 75155 - DNA, 120 bp, synthetic construct; identical to SEQ ID NO: 15779
  source 1..120: mol_type = other DNA

SEQ ID NO: 75156 - DNA, 120 bp, synthetic construct; identical to SEQ ID NO: 15780
  source 1..120: mol_type = other DNA

SEQ ID NO: 75157 - DNA, 120 bp, synthetic construct; identical to SEQ ID NO: 15781
  source 1..120: mol_type = other DNA

SEQ ID NO: 75158 - DNA, 120 bp, synthetic construct; identical to SEQ ID NO: 15753
  source 1..120: mol_type = other DNA

SEQ ID NO: 75159 - DNA, 120 bp, synthetic construct
  source 1..120: mol_type = other DNA
tggtgtctcgggatgggtgtgcagtggtgtctcgggatgggtgtgagtggtgtctcgggacgggtgtgcagtggtgtctcgggacgggtgtgagtggtgtctcgggacgggtgtgagtgg

SEQ ID NO: 75160 - DNA, 120 bp, synthetic construct
  source 1..120: mol_type = other DNA
gtgcagtggtgtctcgggacgggtgtgcagtggtgtctcgggatgggtgtgcagtggtgtctcgggaggggtgtgcagtggtgtctcgggacgggtgtgagtggtgtcacgggacgggtg

SEQ ID NO: 75161 - DNA, 120 bp, synthetic construct
  source 1..120: mol_type = other DNA
atctttaagtataatgactctgcctggccctagatcccaaagattttcttctattttttcctgaaagtttttttttttttgagatgggctctcgctctgttgcccaggctggagtgtggt

SEQ ID NO: 75162 - DNA, 120 bp, synthetic construct; identical to SEQ ID NO: 15754
  source 1..120: mol_type = other DNA

SEQ ID NO: 75163 - DNA, 120 bp, synthetic construct; identical to SEQ ID NO: 15755
  source 1..120: mol_type = other DNA

SEQ ID NO: 75164 - DNA, 120 bp, synthetic construct; identical to SEQ ID NO: 15756
  source 1..120: mol_type = other DNA

SEQ ID NO: 75165 - DNA, 120 bp, synthetic construct; identical to SEQ ID NO: 15757
  source 1..120: mol_type = other DNA

SEQ ID NO: 75166 - DNA, 120 bp, synthetic construct
  source 1..120: mol_type = other DNA
acaggaacaccaagcaacaggcaccctgttcctcacgtcacgtgagccagacgggacaccacccacatgcaggctgcacggtccacacacacgcctcggaggggttgtgaggctcagcca

SEQ ID NO: 75167 - DNA, 120 bp, synthetic construct; identical to SEQ ID NO: 15760
  source 1..120: mol_type = other DNA

SEQ ID NO: 75168 - DNA, 120 bp, synthetic construct
  source 1..120: mol_type = other DNA
tgctgcgtggtggtgacctctgcactgcccacaggacgcctgtctctgctgtgtggtggtgacctctgcactgcccacaggacgcctgtctctgctgtgtggtggtgacctttgcactgc

SEQ ID NO: 75169 - DNA, 120 bp, synthetic construct
  source 1..120: mol_type = other DNA
ccgcccacaggacgcctgtctctgctgcgtggtggtgacctctgcatcgcccacaggacgcctatctctgctgtgtggtggtgacctttgcactgcccgtggggacgcctgtctctgctg

SEQ ID NO: 75170 - DNA, 120 bp, synthetic construct; identical to SEQ ID NO: 15761
  source 1..120: mol_type = other DNA

SEQ ID NO: 75171 - DNA, 120 bp, synthetic construct; identical to SEQ ID NO: 15762
  source 1..120: mol_type = other DNA

SEQ ID NO: 75172 - DNA, 120 bp, synthetic construct; identical to SEQ ID NO: 15763
  source 1..120: mol_type = other DNA

SEQ ID NO: 75173 - DNA, 120 bp, synthetic construct; identical to SEQ ID NO: 15764
  source 1..120: mol_type = other DNA

SEQ ID NO: 75174 - DNA, 120 bp, synthetic construct; identical to SEQ ID NO: 15765
  source 1..120: mol_type = other DNA

SEQ ID NO: 75175 - DNA, 120 bp, synthetic construct; identical to SEQ ID NO: 15766
  source 1..120: mol_type = other DNA

SEQ ID NO: 75176 - DNA, 120 bp, synthetic construct
  source 1..120: mol_type = other DNA
tacctgtagtccaaactgcctgagcagcgtctccagcgtggggtcccccagggacacggatgggaagaactcctccacccactggcgccgccaccactggctgcagcaggacccgatgtt

SEQ ID NO: 75177 - DNA, 120 bp, synthetic construct; identical to SEQ ID NO: 25071
  source 1..120: mol_type = other DNA

SEQ ID NO: 75178 - DNA, 120 bp, synthetic construct; identical to SEQ ID NO: 25072
  source 1..120: mol_type = other DNA

SEQ ID NO: 75179 - DNA, 120 bp, synthetic construct
  source 1..120: mol_type = other DNA
ccatggaggattgcttccaggacccccctggataacaaaatccatagatgcttatgtaaaagtttcttatataaaatggaatagtatttgcatataacctatgtatatcctcctgtatac

SEQ ID NO: 75180 - DNA, 120 bp, synthetic construct; identical to SEQ ID NO: 25073
  source 1..120: mol_type = other DNA

SEQ ID NO: 75181 - DNA, 120 bp, synthetic construct
  source 1..120: mol_type = other DNA
aactagtctgacttctctccaccctttagagccccctaactagtctgacttctctccaccctttagagccctctaactagtctgacttctctgtacccttcagagcctcctaactagtct

SEQ ID NO: 75182 - DNA, 120 bp, synthetic construct
  source 1..120: mol_type = other DNA
cttctctgtatccttcagagccccctaactagtctgacttctctccacccttcagagtcccctaactagtctgacttctctccacccttcagagccccctaactagtctgacttctctcc

SEQ ID NO: 75183 - DNA, 120 bp, synthetic construct
  source 1..120: mol_type = other DNA
tgccttctctgtacccttcagagccccctaactagtctgacttctctgtacctttcagagcctcctaactagtctgacttctctgtacccttcagagccccctaactagtctgacttctc

SEQ ID NO: 75184 - DNA, 120 bp, synthetic construct; identical to SEQ ID NO: 25074
  source 1..120: mol_type = other DNA

SEQ ID NO: 75185 - DNA, 120 bp, synthetic construct; identical to SEQ ID NO: 25075
  source 1..120: mol_type = other DNA

SEQ ID NO: 75186 - DNA, 120 bp, synthetic construct
  source 1..120: mol_type = other DNA
ggacaaattccttgacccgaggaggatagggatgtggccttcggtctttcctcgcagctccggggcaagctaggagtgggatggaagtcgaggtccctaattttttaaggggagggtgcg

SEQ ID NO: 75187 - DNA, 120 bp, synthetic construct
  source 1..120: mol_type = other DNA
gcagtgagtctagatcgcagagtgagactccgtcccccccacaaaaaaacaaaaacaaaacaaacaaacaaaaaaacccattcagtcccgtttgactccggaaattcggtgagaatgaaa

SEQ ID NO: 75188 - DNA, 120 bp, synthetic construct
  source 1..120: mol_type = other DNA
gattgcagagactgtggtactggggaccatggggtctctttgggagaaagtttttgctttgtggaccaggtgactatctttcacataaatagaaatagcaaacagttgcataggtcttat

SEQ ID NO: 75189 - DNA, 120 bp, synthetic construct
  source 1..120: mol_type = other DNA
ggctcaataggggtatgttgagtgtaactgcatttttaaaacttcatggtgtcaggaggaaagagcaggtctccaaagataaacatgctgcttattctgccactttggggagtcatttat

SEQ ID NO: 75190 - DNA, 120 bp, synthetic construct
  source 1..120: mol_type = other DNA
atgatccagactgtgtgcttgtctgtgtctggagttgtatcccttcttcttccttttttttccttttgagacagagtctcgctctgttgccaggctggagtgcagtggcacgatcttggc

SEQ ID NO: 75191 - DNA, 120 bp, synthetic construct
  source 1..120: mol_type = other DNA
ccattttcttttcttttcttttctttttttgagacaaggtcttgctctgtcacccagactggaatgcagtggcttgatcatggctcactgaagccttgatctcccaggataaagtgatcc

SEQ ID NO: 75192 - DNA, 120 bp, synthetic construct
  source 1..120: mol_type = other DNA
tgcctataatcccagcaccttggggccaaggtggaaggattgcttgagcccaggagtttgagaccagcttgggcaacaaagtgagacctcatctaatttatttttattttattttatata

SEQ ID NO: 75193 - DNA, 120 bp, synthetic construct
  source 1..120: mol_type = other DNA
tctcgaactcctgacttcatgatctgcccgccttggcctccattgcactccagcctgggcagcaagagccaaactccgtctaaaaaaaaaaaagaaagaaagaaagaaagaaaggtcttt

SEQ ID NO: 75194 - DNA, 120 bp, synthetic construct
  source 1..120: mol_type = other DNA
aattctgtgaagatggacttggtgtctctgcttcacatgaagggacctgaggttcagagaggctaagtaactttcctaggtcacagagctggtaagtagagactttagtgttcaaaacca

SEQ ID NO: 75195 - DNA, 120 bp, synthetic construct
  source 1..120: mol_type = other DNA
cggtaagccaagatcgcgccactgcactccagcctgggcaataacagcaaaactccgtctcaaaaacaaacaaacaaacaaacaaacctttcatccaataaatatctatcaaatacatgc

SEQ ID NO: 75196 - DNA, 120 bp, synthetic construct
  source 1..120: mol_type = other DNA
ttgcttgaagttgagaggtggaggttgcagtaagctgtgattgcaccactgcactccggctctagacaacagagcgagactccatctcaaaaaaaaaaaaaaaatgtgatcatgaaatgc

SEQ ID NO: 75197 - DNA, 120 bp, synthetic construct
  source 1..120: mol_type = other DNA
cactttttcctagaaatctcccctggtcacttctggatatcccttacaattcatcatgctctattgtaactgtatgtttacacttctgtttccccagtacacgggaagctctttgagaac

SEQ ID NO: 75198 - DNA, 120 bp, synthetic construct
  source 1..120: mol_type = other DNA
gtcttctgagaggccttcctgaccatgctgatggtcttacatatacccccaagtctgctgtggcactcagtatttacccatttgttagcacttagctcctagtgctttctttttttttga

SEQ ID NO: 75199 - DNA, 120 bp, synthetic construct
  source 1..120: mol_type = other DNA
ccccactctattacctccccacacttctaattaattcttgtgttcagtcccagaacctggagagttacactcaggctgcctggtcctgcttattgcccatatcctagaggcacttgcatg

SEQ ID NO: 75200 - DNA, 120 bp, synthetic construct
  source 1..120: mol_type = other DNA
cctgggtgaagttccaagccctggggctcgggggcagactctcgctcacccctcccagaaagatgttttcctaggggatgtccagcctaacacggcagggaaggaagtggtggtcacctg

SEQ ID NO: 75201 - DNA, 120 bp, synthetic construct
  source 1..120: mol_type = other DNA
cagcttctgctatagcctgggagttcccagccttttagtccctgtcaggatagtttcattcttgttcagctttggggcccacacaatttcagtacaaaaggggtatgcccatctcaccct

SEQ ID NO: 75202 - DNA, 120 bp, synthetic construct
  source 1..120: mol_type = other DNA
ggaagctgagcactaattagctctggctttctaatcgggcttaattgcctcctcatgatgggcaattaggaagctgcatcaattagcacagggaggtgacaactcagctggggttggtca

SEQ ID NO: 75203 - DNA, 120 bp, synthetic construct
  source 1..120: mol_type = other DNA
gctgcagtgagccgagatggtgccactgcactccagcctgggtgacaaaaaaaaaaaaaaaaaaaagaaaaatgcccatgtgtcaccccagatcaattactaatcaaaatatccaagact

SEQ ID NO: 75204 - DNA, 120 bp, synthetic construct
  source 1..120: mol_type = other DNA
ttagaatgaggtgctgaggagtaaggtgtgtgggaagagtagaggaaggagtagagcacatcgaggttgctggttggtgagggggctatgatgaggatactctactcaaacatgtattga

SEQ ID NO: 75205 - DNA, 120 bp, synthetic construct
  source 1..120: mol_type = other DNA
tgattgcaccaatgcactccagcctgctggatgacaaagcaagatcctgtctcaaaaggagagagggaaggaaggaagggagggagggaatcactgtgggaaggagaaacaatgggagca

SEQ ID NO: 75206 - DNA, 120 bp, synthetic construct
  source 1..120: mol_type = other DNA
gttaggagctgtgagcacccaagggctcattcttgtcctaaaactgggtcttcaagatggtttggtttaggtggtgtgaatgaacccttccatctccaccctcgagagagctgaattttc

SEQ ID NO: 75207 - DNA, 120 bp, synthetic construct
  source 1..120: mol_type = other DNA
ccctcgcacttcctctgtctgggactcctctaacagctgtggggagggtgccaggatccccattttgcatacagtagctgaggctcagccaggaaaatgggtgggaaccttaaggatggt

SEQ ID NO: 75208 - DNA, 120 bp, synthetic construct
  source 1..120: mol_type = other DNA
gtagttgccccctcctcaatttatgagtctcccctctgttcagttccctattccagagccccctggactggattctaaatgtggtcctcaccccctccctcatggttgatttcctcccca

SEQ ID NO: 75209 - DNA, 120 bp, synthetic construct
  source 1..120: mol_type = other DNA
atagcagacaggggaatctggggagttggactaatgtggatctagaagggaggtggttgggctgcacgatgccttaagactcctcccagctctgaagttctacttctaggcaatgaatga

SEQ ID NO: 75210 - DNA, 120 bp, synthetic construct
  source 1..120: mol_type = other DNA
gagacacagcgagactccgtctcaaaaaaaaaaaaaaattcccttatcctaggagactcctcagtccccggcaaacccagggcaattgcccaccctagtttcaggctccacaaacatttg

SEQ ID NO: 75211 - DNA, 120 bp, synthetic construct
  source 1..120: mol_type = other DNA
gctgtaatatgcagataatggtgcttgcctgtgcacctcaaagaaatttgagaaggctaaggtagtaaccttgattgtgaaaagcttgtcaccggggggactggggcaggtgggagggct

SEQ ID NO: 75212 - DNA, 120 bp, synthetic construct
  source 1..120: mol_type = other DNA
ctcccaaaatgctgagattacaggtgtgagccactgctcccagccggaatttgggttcttgacacataaaatgcagataataatacctacctcataagattgaggtgaagattaaatggg

SEQ ID NO: 75213 - DNA, 120 bp, synthetic construct
  source 1..120: mol_type = other DNA
gagaggctagggatgttacaaaccatctcagagtacaaagaaccttctctgacaacagagaattatctggcccaaaattcagtagtgccaaggttgagaaacctgaccttaaatgaataa

SEQ ID NO: 75214 - DNA, 120 bp, synthetic construct
  source 1..120: mol_type = other DNA
atctgcaatctgcctgtctcggactccccaagtattgggattatgggtgtgagccaccatgctcagcctctgctttatatttttatttccatagctcctaccgtgttctaacaaactata

SEQ ID NO: 75215 - DNA, 120 bp, synthetic construct
  source 1..120: mol_type = other DNA
ggcaacagagcgagactccaactcaaaaaaaattagaaacaccgagtgcctgctgtgtgccaggtgttagggagacagatgaccaagacttggtcctttctgtccctcacagcactttca

SEQ ID NO: 75216 - DNA, 120 bp, synthetic construct
  source 1..120: mol_type = other DNA
ctgcttctgggttggtgatttttgccctggcaaagggagagcagacttatgacatctggagtccagagttaggattgaatattcaggataaagtttcactttgaagttcagatttaggat

SEQ ID NO: 75217 - DNA, 120 bp, synthetic construct
  source 1..120: mol_type = other DNA
ggcttcagaacccagaactgagggcctgtccagccctgctttccttgtgtttgagggaagccctgatatcttggagctgtacaaggtagcaacataatttgatttccctggttgctcatc

SEQ ID NO: 75218 - DNA, 120 bp, synthetic construct
  source 1..120: mol_type = other DNA
catgcacagctctggtatctgttttaaattatccattaaaataagtacagttctgggggaaaaaaataagttgactgggtgcggtaagcagtagaaagggactgaagggggaaggaaccc

SEQ ID NO: 75219 - DNA, 120 bp, synthetic construct
  source 1..120: mol_type = other DNA
acaccccaacggtccttccccctcctcaccactcccgcccccacccccaatggatctgggactgcccctttaagagtagtggcccctcctcccttcagaggaggacctattagagccttt

SEQ ID NO: 75220 - DNA, 120 bp, synthetic construct
  source 1..120: mol_type = other DNA
gcttgagcaaaacagaactagccctgccagctcgaagaactctgggcacccaggacacatcggagtggcagaaagggtcctgttagaactttgttagcgggcttggcactgtgctagctt

SEQ ID NO: 75221 - DNA, 120 bp, synthetic construct
  source 1..120: mol_type = other DNA
aagagcactaagggtgcttggagatccgtaaagggctgttggctttgacttcttctctctcttttatcatctactccaaacttctgctcttcctagaaccctttgctaggtgtggttttg

SEQ ID NO: 75222 - DNA, 120 bp, synthetic construct
  source 1..120: mol_type = other DNA
tgacctcaagtgatctgcctgcctcagcctcccaaagtgttgggattagagacgggagccactgcgcctggcttctttttttcttgagatagggtttcactctgttacccaggctggagt

SEQ ID NO: 75223 - DNA, 120 bp, synthetic construct
  source 1..120: mol_type = other DNA
gtacttgttatatttagccacctccctctgttctcccccactgatcctggctggaaaggctgggcttccggaaaagagaggtggatttgcacacctggatcccaagctgatagaaagtgg

SEQ ID NO: 75224 - DNA, 120 bp, synthetic construct
  source 1..120: mol_type = other DNA
tcccaaagtgctgggattacaggtgtgagccaccgtacccggccactaatttttatatattttgtagagatggggtttcaccgtgttgcccaagctggtctcgaactcctaggctcaagt

SEQ ID NO: 75225 - DNA, 120 bp, synthetic construct
  source 1..120: mol_type = other DNA
gaggatcacttgaggccaggagtttgagaccagtctgggcaacatagcaagacccccttctgtacaaaaaaattagccggtcaacacctgtagtccagctgcttgggaagctgaggcggg

SEQ ID NO: 75226 - DNA, 120 bp, synthetic construct
  source 1..120: mol_type = other DNA
tagcccaaatccacgttctgattcaaagggaaagaagaagggtgcagctaaacctggggggtgagaagtacttaaaaagcccaagagaaacaaaagagagaataattcctcactaggacc

SEQ ID NO: 75227 - DNA, 120 bp, synthetic construct
  source 1..120: mol_type = other DNA
ctggctttccttagctgtaaaagaaagggattggagcggaaagtctccagagaccttttaggttccaaagtagtacagtgacccacaaagtgagaaaacagtcttctaaaataccaagtt

SEQ ID NO: 75228 - DNA, 120 bp, synthetic construct
  source 1..120: mol_type = other DNA
tctcccagtgtcctcagggttaataactatgtgccaccagatagagagttaaggggctgctgaattggcttcttgtgaagggaatcccctaaatgtccctcgttttggtcactggcctcc

SEQ ID NO: 75229 - DNA, 120 bp, synthetic construct
  source 1..120: mol_type = other DNA
tttttgagatggagtctcgctctgttgcccaggctagaatgcagtggcgcgatcttggctcactgcaaactccgcctcctgggttcaagtgattctcctgcctcagcctcccaagtagct

SEQ ID NO: 75230 - DNA, 120 bp, synthetic construct
  source 1..120: mol_type = other DNA
gacagagagaaggaggatatattgcagtaggaggagttgctggaacaaaaggaggggtggtaggagtggcttggggtggcagcagaagacgccctgtcacatggcgggaagtcagcctgg

SEQ ID NO: 75231 - DNA, 120 bp, synthetic construct
  source 1..120: mol_type = other DNA
aaggagtccctgcagggctgggccagctcctccacctcccctttgtcttcccctcccacttgttatttttagctacagtgtctgtccctcttgcttctcccccagattgggagaggaaac

SEQ ID NO: 75232 - DNA, 120 bp, synthetic construct
  source 1..120: mol_type = other DNA
aggagagacactgggctctactgtacccctagtcatctcttggggtgtgcgtgtggctccctggccacagagctcccaaggtctgagtcatgagcccatgggtgatagtggcttcttccc

SEQ ID NO: 75233 - DNA, 120 bp, synthetic construct
  source 1..120: mol_type = other DNA
atctacttgctgcgggaccctagatatagctttctgtgcctatttcctcaattgcataggaatagcacctatcgcatagggtagctgtgaagatgacgtgagttaacataatatttagag

SEQ ID NO: 75234 - DNA, 120 bp, synthetic construct
  source 1..120: mol_type = other DNA
gggttttgactttatttttagcttttctgactgagacagaggagggaatacattctccggttctggaaggggctcttttttgcaggagacagacacttacattaaacaacttgttctgag

SEQ ID NO: 75235 - DNA, 120 bp, synthetic construct
  source 1..120: mol_type = other DNA
aggaaagggtcaatattgtgcctggtcatccttgtctgaggtccctctgagctctaaccagactttccttccccacagtcccacatgtgtaaaagggactaggagaggtgaccagtacct

SEQ ID NO: 75236 - DNA, 120 bp, synthetic construct
  source 1..120: mol_type = other DNA
aatgggatctaccacagtgaatttaaaataatccaggaggccgggcatggtggttcacgcctgtaatcccagcactttaggaggccgaggtgggccgatcacgaggtcaggagatcgaga

SEQ ID NO: 75237 - DNA, 120 bp, synthetic construct
  source 1..120: mol_type = other DNA
tgaggcaggaaaatcatttgaacccaggatcagaggttgtggtgaactgagattgcaccattgcactccagcctgggcaacaagagcaaaactctatctcaaaaaaaataaaaaatagcc

SEQ ID NO: 75238 - DNA, 120 bp, synthetic construct
  source 1..120: mol_type = other DNA
agtgctgggattacaggcgtgagccaccacgcctggcaagacgtgttctctctatgttgttgaggctggtcttgaactcctggctgcaagagatcttcctgcctcagcctcccaatgtgc

SEQ ID NO: 75239 - DNA, 120 bp, synthetic construct
  source 1..120: mol_type = other DNA
tcagcctcctgagtagctgggactacaggcgtgtgccaccatcatgcctggctacttttttgtattagatatatattttctctcttagcacagtacctaccaagagtgagtgagtagatg

SEQ ID NO: 75240 - DNA, 120 bp, synthetic construct
  source 1..120: mol_type = other DNA
agtgatgcccaactcaggcctgtgcctccacccctcccagtcaccacagtcctaaccctttgtcctcccctccagctggacaatgccaggcagtctgctgagaggaacagcaacctggtg

SEQ ID NO: 75241 - DNA, 120 bp, synthetic construct
  source 1..120: mol_type = other DNA
gaaaaggagcgggagatggccgagatgcgggcaaggatgcagcagcagctggacgagtaccaggagcttctggacatcaagctggccctggacatggagatccacgcctaccgcaagctc

SEQ ID NO: 75242 - DNA, 120 bp, synthetic construct
  source 1..120: mol_type = other DNA
agatgatcccttgctgacttaccggttcccaccaaagttcaccctgaaggctgggcaggtggtgacggtgagtggcagggcgcttgggactctggggaggccttgggtggcgatgggagc

SEQ ID NO: 75243 - DNA, 120 bp, synthetic construct
  source 1..120: mol_type = other DNA
aaaatcttttcattaaagaatgttttggaactttactcgctggcctggcctttcttctctctcctccctataccttgaacagggaacccaggtgtctgggtgccctactctggtaaggaa

SEQ ID NO: 75244 - DNA, 120 bp, synthetic construct
  source 1..120: mol_type = other DNA
ggcagcttcggggacaatctggtcacccgctcctacctcctgggcaactccagcccccgaacccaggtgagttgtctctgctttgtctccaaatcctgcaggcgggtccctggtcatcga

SEQ ID NO: 75245 - DNA, 120 bp, synthetic construct
  source 1..120: mol_type = other DNA
tttctgtattttatttagacaagagatgggaatgaggtgggaggtggaagaagggagaagaaaggtgagtttgagctgccttccctagctttagaccctgggtgggctctgtgcagtcac

SEQ ID NO: 75246 - DNA, 120 bp, synthetic construct; identical to SEQ ID NO: 26992
  source 1..120: mol_type = other DNA

SEQ ID NO: 75247 - DNA, 120 bp, synthetic construct; identical to SEQ ID NO: 19394
  source 1..120: mol_type = other DNA

SEQ ID NO: 75248 - DNA, 120 bp, synthetic construct; identical to SEQ ID NO: 19395
  source 1..120: mol_type = other DNA

SEQ ID NO: 75249 - DNA, 120 bp, synthetic construct
  source 1..120: mol_type = other DNA
gcaaggatgcagcagcagctggacgagtaccaggagcttctggacatcaagctggccctggacatggagatccacgcctaccgcaagctcttggagggcgaggaggagaggtgggctggg

SEQ ID NO: 75250 - DNA, 120 bp, synthetic construct; identical to SEQ ID NO: 19396
  source 1..120: mol_type = other DNA

SEQ ID NO: 75251 - DNA, 120 bp, synthetic construct; identical to SEQ ID NO: 19397
  source 1..120: mol_type = other DNA

SEQ ID NO: 75252 - DNA, 120 bp, synthetic construct; identical to SEQ ID NO: 12754
  source 1..120: mol_type = other DNA

SEQ ID NO: 75253 - DNA, 120 bp, synthetic construct
  source 1..120: mol_type = other DNA
tgtcttttgttgccattgcttttggtgttttggacatgaagtcctttcccatgcctatgtcctgaatggtaatgcctaggttttcttctagggtttttatggttttaggtctaacgttta

SEQ ID NO: 75254 - DNA, 120 bp, synthetic construct
  source 1..120: mol_type = other DNA
tgcagaaaaggcctttgacaaaattcaacaacccttcatgctaaaaactctcaataaattaggtattgatgggacatatttcaaaatgataagagctatctatgacaaacccacagccaa

SEQ ID NO: 75255 - DNA, 120 bp, synthetic construct
  source 1..120: mol_type = other DNA
cctttccatgtttagcgcttccttcaggagcttttagggcaggcctggtggtgacaaaatctctcagcatttgcttgtctgtaaagtattttatttctccttcacttatgaagcttagtt

SEQ ID NO: 75256 - DNA, 120 bp, synthetic construct
  source 1..120: mol_type = other DNA
atctttgtggttttatctacttttggtctttgatgatggtgatgtacagatgggttttcggtgtggatgtcctttctgtttgttttccttctaacagacaggatcctcagctgcaggtct

SEQ ID NO: 75257 - DNA, 120 bp, synthetic construct; identical to SEQ ID NO: 12755
  source 1..120: mol_type = other DNA

SEQ ID NO: 75258 - DNA, 120 bp, synthetic construct; identical to SEQ ID NO: 12756
  source 1..120: mol_type = other DNA

SEQ ID NO: 75259 - DNA, 120 bp, synthetic construct
  source 1..120: mol_type = other DNA
caaatcaatgacctcaaatttcaccttaaaaaattaggggagaaaaaaaaagcaaataaagcccaaagtaggggaggagccaagatggccaaataggaacagctccagtctacagctccc

SEQ ID NO: 75260 - DNA, 120 bp, synthetic construct
  source 1..120: mol_type = other DNA
gagctatgggaggacattcaaaccaaaggcaaagaagttgaaaactttgaaagaaatttagaagaatgtataactagaataaccaatacagagaagtgcttaaaggagctgatggagctg

SEQ ID NO: 75261 - DNA, 120 bp, synthetic construct
  source 1..120: mol_type = other DNA
aaatgtaaagaccattgagactaggaagaaactacatcaactaacgagcaaaataaccagctaacatcataatgacaggatcaaattcacacataacactattaactttaaatgtaaatg

SEQ ID NO: 75262 - DNA, 120 bp, synthetic construct
  source 1..120: mol_type = other DNA
aaaggtgttctttgaaaccaacgagaacaaagacacaacatgccagaatctctgggacgcattcaaagcagtgtgtagagggaaatttatagcactaaatgcccacaagagaaagcagga

SEQ ID NO: 75263 - DNA, 120 bp, synthetic construct; identical to SEQ ID NO: 75254
  source 1..120: mol_type = other DNA

SEQ ID NO: 75264 - DNA, 120 bp, synthetic construct
  source 1..120: mol_type = other DNA
cacactacctgacttcaaactatactacaaggctaccaaaacagcatggtactggtaccaaaacagagatatagatcaatggaacagaacagagccctcagaaataacgccacatatcta

SEQ ID NO: 75265 - DNA, 120 bp, synthetic construct
  source 1..120: mol_type = other DNA
catgctggtataaagacacatgcacgtgtatgtttattgcggcattattcacaatagcaaagacttggaaccaacccaaatgtccaacaatgatagactggattaagaaagtgtggcaca

SEQ ID NO: 75266 - DNA, 120 bp, synthetic construct
  source 1..120: mol_type = other DNA
tattatatcccagttgcatctcttgtggcattcattagagtggggaattcttttttaaagcagtttttggtgacagcaggacgggctcgaatttaacttgtgcatcccttaatggtgcct

SEQ ID NO: 75267 - DNA, 120 bp, synthetic construct
  source 1..120: mol_type = other DNA
tacaaagcaattcttatgctagctgcagcagctagcataagaattgctttgtaatacaatttttaacaaagatttaccatagtgattacaggtgtgagccaccgcacctggcctgggctc

SEQ ID NO: 75268 - DNA, 120 bp, synthetic construct; identical to SEQ ID NO: 13795
  source 1..120: mol_type = other DNA

SEQ ID NO: 75269 - DNA, 120 bp, synthetic construct
  source 1..120: mol_type = other DNA
tcttttggctgcacaaatatcttcttttgagaagtgtctgttcatatccttcgccctgtcctatagctttattttgggggaaagtttccaaatggggctctgtgagcaaagctctcagat

SEQ ID NO: 75270 - DNA, 120 bp, synthetic construct
  source 1..120: mol_type = other DNA
atatctctgttttggtagcagtaccatgctgttttggttactatagccttgtagtatagtttgaggtcaggtagcgtgatacctccagcttttttcttttggcttaggattgacttggca

SEQ ID NO: 75271 - DNA, 120 bp, synthetic construct
  source 1..120: mol_type = other DNA
gttctgtttatatgctgtattacgtttattgatttgcatatgttgaaccagccttgcatcccagggatgaagcccagttgatcatggtggataagcttcttgatgtgctgctggattcgg

SEQ ID NO: 75272 - DNA, 120 bp, synthetic construct
  source 1..120: mol_type = other DNA
tggttccaagtctttgctgttgtgaatagtgccgcaataaacacatgtgcatgtgtctttatagcagcatgatttataatcctttgggtatatacccagtaatgggattgctgggtcaaa

SEQ ID NO: 75273 - DNA, 120 bp, synthetic construct
  source 1..120: mol_type = other DNA
gcaccatttattaaatagggaatcctttccccattgcttgtttttctcaggtttgtcaaagatcagatagttgtagatatgcagcattatttctcagggctctgttctgttccattggtc

SEQ ID NO: 75274 - DNA, 120 bp, synthetic construct
  source 1..120: mol_type = other DNA
ggaatagtttcagaaggaatggtaccagttcctccttgtacctctggtagtatttggctgtgaatccatctggtcctggactctttttggttggtaagctattaattattgccacaactt

SEQ ID NO: 75275 - DNA, 120 bp, synthetic construct
  source 1..120: mol_type = other DNA
ctaagtctctttgttggtcactcaggacttgctttatgagtctgggtgctcctgtattgggtgcatatatatttaggatagttagctcttcttgttgaattgatccctttaccattatgt

SEQ ID NO: 75276 - DNA, 120 bp, synthetic construct
  source 1..120: mol_type = other DNA
ggagtatctctgtggcgtcctctgtatttcctgaatctgaatgttggcctgccttgctagattggggaagttctcctggataatatcctgcagagtgttttccaacttggttccattctc

SEQ ID NO: 75277 - DNA, 120 bp, synthetic construct; identical to SEQ ID NO: 13796
  source 1..120: mol_type = other DNA

SEQ ID NO: 75278 - DNA, 120 bp, synthetic construct; identical to SEQ ID NO: 13797
  source 1..120: mol_type = other DNA

SEQ ID NO: 75279 - DNA, 120 bp, synthetic construct
  source 1..120: mol_type = other DNA
aaatgtctatgaatcttcacaatttatgttcttctgccgtggcttcagctggtcccttcgtttgggttccctgacttcctgcaacaattttttggacaattactattgctcaattcctcc

SEQ ID NO: 75280 - DNA, 120 bp, synthetic construct
  source 1..120: mol_type = other DNA
cagcacctgtagtttcctgactttttatgattgccattctaactggtgtgagatggtatctcattgtggttttgatttgcatttctctgatggccagtgatgatgagcattttttcatgt

SEQ ID NO: 75281 - DNA, 120 bp, synthetic construct
  source 1..120: mol_type = other DNA
gagaatcacctgaacctgggaggtggaggttgtggtgagccaagactgcaccattgcactccagcctaagcaacaagagcgaaactctgtctcaaaaaaaaaatatatatatatatatat

SEQ ID NO: 75282 - DNA, 120 bp, synthetic construct
  source 1..120: mol_type = other DNA
tattgttattattattattttttttttttagagatgggggtcttgttatgttgcccaggctggactcaaaatcctatcctcaagcagtcctcccacctcagcctcccaaagtgctgagat

SEQ ID NO: 75283 - DNA, 120 bp, synthetic construct; identical to SEQ ID NO: 29991
  source 1..120: mol_type = other DNA

SEQ ID NO: 75284 - DNA, 120 bp, synthetic construct
  source 1..120: mol_type = other DNA
ctgctcctggacccttgctgtcagcttatataataaataacagttcagtgaataactctacatggtgtgtgtgtgtgtgtgtgtgtgtgtgtgtgtgtgtgtgtgtgtgtgtgtatatat

SEQ ID NO: 75285 - DNA, 120 bp, synthetic construct; identical to SEQ ID NO: 29742
  source 1..120: mol_type = other DNA

SEQ ID NO: 75286 - DNA, 120 bp, synthetic construct; identical to SEQ ID NO: 33010
  source 1..120: mol_type = other DNA

SEQ ID NO: 75287 - DNA, 120 bp, synthetic construct; identical to SEQ ID NO: 33011
  source 1..120: mol_type = other DNA

SEQ ID NO: 75288 - DNA, 120 bp, synthetic construct; identical to SEQ ID NO: 33012
  source 1..120: mol_type = other DNA

SEQ ID NO: 75289 - DNA, 120 bp, synthetic construct; identical to SEQ ID NO: 33013
  source 1..120: mol_type = other DNA

SEQ ID NO: 75290 - DNA, 120 bp, synthetic construct; identical to SEQ ID NO: 26918
  source 1..120: mol_type = other DNA

SEQ ID NO: 75291 - DNA, 120 bp, synthetic construct
  source 1..120: mol_type = other DNA
aatgcccaacaatgattgactggattaagaaaatgtggcacatatacaccatggaatactatgcagccataaaaaatgatgagttcatgtcctttgtagggacatggatgaaattggaaa

SEQ ID NO: 75292 - DNA, 120 bp, synthetic construct
  source 1..120: mol_type = other DNA
tgtcaccaccaggcctgccctaaaagagctcctggaggaagcactaaatatggaaaggaacaaccgttaccagctactgcaaaaacatgccaaattgtaaagaccatcgaggctaagaag

SEQ ID NO: 75293 - DNA, 120 bp, synthetic construct
  source 1..120: mol_type = other DNA
ctagcagaaggcaagaaataactaagatcagagcagaactgaagaaaatagagacacaaaaaacccttcaaaaaatcaatgaatccaggagctggttttttgaaaagatcaacaaaattg

SEQ ID NO: 75294 - DNA, 120 bp, synthetic construct
  source 1..120: mol_type = other DNA
ttaggaaaagaggaagtcaaattgtccctgtttgcagatgacatgactgaatatctagaaaaccccatcatctcagcccaaaatctccttaagctgataagcaacttcagcaaagtctca

SEQ ID NO: 75295 - DNA, 120 bp, synthetic construct
  source 1..120: mol_type = other DNA
aaagagcttctgcacagcgaaagaaactaccatcagagtgaacaggcaacctacagaatgggagaacatttttgcaatccactcatctgacaaagggctaatatccagaatctacaatga

SEQ ID NO: 75296 - DNA, 120 bp, synthetic construct; identical to SEQ ID NO: 5327
  source 1..120: mol_type = other DNA

SEQ ID NO: 75297 - DNA, 120 bp, synthetic construct
  source 1..120: mol_type = other DNA
agcgcaaggagtcagggagttagttccctttcctaatcaaagaaaggggtgacagacagcaccgggaaaatcaggtcactcccacccgaatactgcgcttttccgacgggcttaaaaaat

SEQ ID NO: 75298 - DNA, 120 bp, synthetic construct
  source 1..120: mol_type = other DNA
gctcctcaccagcaacagaacaaagctggacagagaatgactttgacgagctgagagaagaaggcttcagacgatcaaattactctgagctacgggaggacattcaaaccaaaggcaaag

SEQ ID NO: 75299 - DNA, 120 bp, synthetic construct
  source 1..120: mol_type = other DNA
actttacatgtaaatggactaaatgctccaactaaaagacacagactggcaaattggataaagagtcaagacccatcagtgtgctgtattcaggaaacccatctcatgtgcagagacaca

SEQ ID NO: 75300 - DNA, 120 bp, synthetic construct
  source 1..120: mol_type = other DNA
tattgaaaggatcaacaaaattgatagactgctaacaagactaataaagaaaaaaagagagaagaatcaaatagatgcaataaaaaatgataaaggggatatcaccaccgatcccacaga

SEQ ID NO: 75301 - DNA, 120 bp, synthetic construct
  source 1..120: mol_type = other DNA
tgaaaacgggcacaagacaggggggcacaagacagggatgccctctctcaccactcctattcaacatagtgttggaagttctggccagggcaattaggcaggagaaggaaataaagggta

SEQ ID NO: 75302 - DNA, 120 bp, synthetic construct
  source 1..120: mol_type = other DNA
aaagacaaaattgagaaatgggatctaattaaactaaagagcttctgcacagcaaaagaaactaccatcagagtgaacaggcaacctacaaaatgggagaaaatttttgcaacctactca

SEQ ID NO: 75303 - DNA, 120 bp, synthetic construct
  source 1..120: mol_type = other DNA
tggacacaggaaggggaacatcacactctggggactgttgtggggtggggggaggggggagggatagcattgggcgatatacctaatgctaaatgacgagttagtgggtgcagcacacca

SEQ ID NO: 75304 - DNA, 120 bp, synthetic construct
  source 1..120: mol_type = other DNA
aaaagggcacatatacaatcttccatacgcagaagacagaaaacaagtgtgacaaaacattaactagtgaatccagttgaatagcatacagatgttcactgtatgattttatcaactttt

SEQ ID NO: 75305 - DNA, 120 bp, synthetic construct
  source 1..120: mol_type = other DNA
ctgagatgcgccaccgcactccagcctgggcaacagagtgagactccatctcaacataaataaataaataaataaataaataaataaataaataaataaataagataaaaataaaaataa

SEQ ID NO: 75306 - DNA, 120 bp, synthetic construct
  source 1..120: mol_type = other DNA
gacagaatgtaataattagctctcgctctgtcaccccaactggagtgcagtggcatgatcatagctactgcagcctcaaacttctgggctcaagtgattttcccacctcagcctcccaag

SEQ ID NO: 75307 - DNA, 120 bp, synthetic construct
  source 1..120: mol_type = other DNA
ctacgcttttttctagagttctacaatttacagttagtatgtaagggtggctctcaaacatgtagtctccggaccaggagcacctgggaacttcttataaatgtaaattctcaggcccca

SEQ ID NO: 75308 - DNA, 120 bp, synthetic construct; identical to SEQ ID NO: 14876
  source 1..120: mol_type = other DNA

SEQ ID NO: 75309 - DNA, 120 bp, synthetic construct; identical to SEQ ID NO: 14877
  source 1..120: mol_type = other DNA

SEQ ID NO: 75310 - DNA, 120 bp, synthetic construct
  source 1..120: mol_type = other DNA
acactagggttggtctggggatgatggtctgtcaactgtggaaaggaagagcagtgatactcatgagaactacaagctcctacagtcacatcctgctttacagtttatactaaatactct

SEQ ID NO: 75311 - DNA, 120 bp, synthetic construct; identical to SEQ ID NO: 14878
  source 1..120: mol_type = other DNA

SEQ ID NO: 75312 - DNA, 120 bp, synthetic construct; identical to SEQ ID NO: 549
  source 1..120: mol_type = other DNA

SEQ ID NO: 75313 - DNA, 120 bp, synthetic construct; identical to SEQ ID NO: 14879
  source 1..120: mol_type = other DNA

SEQ ID NO: 75314 - DNA, 120 bp, synthetic construct
  source 1..120: mol_type = other DNA
tcatgagctagccacataaatgtaatctataggctgggcgcggtggctcacgcctgtaatcccagcactttgggaggccgaggtgggcggatcacgaggtcaggagatcgagaccatcct

SEQ ID NO: 75315 - DNA, 120 bp, synthetic construct
  source 1..120: mol_type = other DNA
gtatcttctcctcctgcctccacatcttatcctcctgctcctgcctcttctcctcctcccatatcttctcctgctcatgcatcttctcttcctccctccacatctcctcctgctcccgta

SEQ ID NO: 75316 - DNA, 120 bp, synthetic construct
  source 1..120: mol_type = other DNA
ggtcattctgtatgatctccagggtttgcacacacctccgcctgctccccccaagagctcggccttctgccccagcttccccagcctctcctccagctcctgcagcctcacctggtgttc

SEQ ID NO: 75317 - DNA, 120 bp, synthetic construct
  source 1..120: mol_type = other DNA
tactatgaatgtcaaaagacaacacaagactaaatgagaaagaccaagaagaaaactaatagaaacatacatgtaaggaagaaacttttttttttgagacggagtttcgctctgtcaccc

SEQ ID NO: 75318 - DNA, 120 bp, synthetic construct; identical to SEQ ID NO: 14880
  source 1..120: mol_type = other DNA

SEQ ID NO: 75319 - DNA, 120 bp, synthetic construct; identical to SEQ ID NO: 14881
  source 1..120: mol_type = other DNA

SEQ ID NO: 75320 - DNA, 120 bp, synthetic construct; identical to SEQ ID NO: 14882
  source 1..120: mol_type = other DNA

SEQ ID NO: 75321 - DNA, 120 bp, synthetic construct
  source 1..120: mol_type = other DNA
ggcactctgcaggaggggcagcaggcagcaggtgcaccaggagcatgtttcacaaggtgcccaatatcgcatctgctcagataggcagcgagttggaaagtggatgcaataggcagggtg

SEQ ID NO: 75322 - DNA, 120 bp, synthetic construct; identical to SEQ ID NO: 14767
  source 1..120: mol_type = other DNA

SEQ ID NO: 75323 - DNA, 120 bp, synthetic construct
  source 1..120: mol_type = other DNA
gcttgcccaaatcaccagccctggaatgttttgagctttgggggtggatctcccaggaaacgtgtttttatggcaccaccgcctctggtcacccaccccgaggtgtggcgggcctggaca

SEQ ID NO: 75324 - DNA, 120 bp, synthetic construct; identical to SEQ ID NO: 22947
  source 1..120: mol_type = other DNA

SEQ ID NO: 75325 - DNA, 120 bp, synthetic construct; identical to SEQ ID NO: 22948
  source 1..120: mol_type = other DNA

SEQ ID NO: 75326 - DNA, 120 bp, synthetic construct; identical to SEQ ID NO: 22949
  source 1..120: mol_type = other DNA

SEQ ID NO: 75327 - DNA, 120 bp, synthetic construct; identical to SEQ ID NO: 47167
  source 1..120: mol_type = other DNA

SEQ ID NO: 75328 - DNA, 120 bp, synthetic construct; identical to SEQ ID NO: 47168
  source 1..120: mol_type = other DNA

SEQ ID NO: 75329 - DNA, 120 bp, synthetic construct; identical to SEQ ID NO: 22950
  source 1..120: mol_type = other DNA

SEQ ID NO: 75330 - DNA, 120 bp, synthetic construct; identical to SEQ ID NO: 22951
  source 1..120: mol_type = other DNA

SEQ ID NO: 75331 - DNA, 120 bp, synthetic construct; identical to SEQ ID NO: 47171
  source 1..120: mol_type = other DNA

SEQ ID NO: 75332 - DNA, 120 bp, synthetic construct; identical to SEQ ID NO: 22952
  source 1..120: mol_type = other DNA

SEQ ID NO: 75333 - DNA, 120 bp, synthetic construct; identical to SEQ ID NO: 22953
  source 1..120: mol_type = other DNA

SEQ ID NO: 75334 - DNA, 120 bp, synthetic construct; identical to SEQ ID NO: 22954
  source 1..120: mol_type = other DNA

SEQ ID NO: 75335 - DNA, 120 bp, synthetic construct; identical to SEQ ID NO: 22955
  source 1..120: mol_type = other DNA

SEQ ID NO: 75336 - DNA, 120 bp, synthetic construct; identical to SEQ ID NO: 22956
  source 1..120: mol_type = other DNA

SEQ ID NO: 75337 - DNA, 120 bp, synthetic construct; identical to SEQ ID NO: 22970
  source 1..120: mol_type = other DNA

SEQ ID NO: 75338 - DNA, 120 bp, synthetic construct; identical to SEQ ID NO: 72704
  source 1..120: mol_type = other DNA

SEQ ID NO: 75339 - DNA, 120 bp, synthetic construct; identical to SEQ ID NO: 22971
  source 1..120: mol_type = other DNA

SEQ ID NO: 75340 - DNA, 120 bp, synthetic construct; identical to SEQ ID NO: 22972
  source 1..120: mol_type = other DNA

SEQ ID NO: 75341 - DNA, 120 bp, synthetic construct; identical to SEQ ID NO: 22973
  source 1..120: mol_type = other DNA

SEQ ID NO: 75342 - DNA, 120 bp, synthetic construct; identical to SEQ ID NO: 22974
  source 1..120: mol_type = other DNA

SEQ ID NO: 75343 - DNA, 120 bp, synthetic construct; identical to SEQ ID NO: 22975
  source 1..120: mol_type = other DNA

SEQ ID NO: 75344 - DNA, 120 bp, synthetic construct; identical to SEQ ID NO: 22976
  source 1..120: mol_type = other DNA

SEQ ID NO: 75345 - DNA, 120 bp, synthetic construct; identical to SEQ ID NO: 22977
  source 1..120: mol_type = other DNA

SEQ ID NO: 75346 - DNA, 120 bp, synthetic construct; identical to SEQ ID NO: 22978
  source 1..120: mol_type = other DNA

SEQ ID NO: 75347 - DNA, 120 bp, synthetic construct; identical to SEQ ID NO: 22979
  source 1..120: mol_type = other DNA

SEQ ID NO: 75348 - DNA, 120 bp, synthetic construct; identical to SEQ ID NO: 22980
  source 1..120: mol_type = other DNA

SEQ ID NO: 75349 - DNA, 120 bp, synthetic construct; identical to SEQ ID NO: 22981
  source 1..120: mol_type = other DNA

SEQ ID NO: 75350 - DNA, 120 bp, synthetic construct; identical to SEQ ID NO: 22982
  source 1..120: mol_type = other DNA

SEQ ID NO: 75351 - DNA, 120 bp, synthetic construct; identical to SEQ ID NO: 22983
  source 1..120: mol_type = other DNA

SEQ ID NO: 75352 - DNA, 120 bp, synthetic construct; identical to SEQ ID NO: 22984
  source 1..120: mol_type = other DNA

SEQ ID NO: 75353 - DNA, 120 bp, synthetic construct
  source 1..120: mol_type = other DNA
tcaagtgattctcctgcctcagcctcctaagtagttgggtttacaggtgcatgccactatgcctggttaatttttgtatttttagtagagacggggtttcaccatgttgcccaggctcaa

SEQ ID NO: 75354 - DNA, 120 bp, synthetic construct; identical to SEQ ID NO: 22985
  source 1..120: mol_type = other DNA

SEQ ID NO: 75355 - DNA, 120 bp, synthetic construct; identical to SEQ ID NO: 22986
  source 1..120: mol_type = other DNA

SEQ ID NO: 75356 - DNA, 120 bp, synthetic construct; identical to SEQ ID NO: 22987
  source 1..120: mol_type = other DNA

SEQ ID NO: 75357 - DNA, 120 bp, synthetic construct
  source 1..120: mol_type = other DNA
tctacatagtagaatattatgtggagtccttaaaatgtttacaaataatttataacaacatggggccgggcacagtggcttacacctgtaattccagcactttgggaggccaaggtgggt

SEQ ID NO: 75358 - DNA, 120 bp, synthetic construct; identical to SEQ ID NO: 22988
  source 1..120: mol_type = other DNA

SEQ ID NO: 75359 - DNA, 120 bp, synthetic construct; identical to SEQ ID NO: 22989
  source 1..120: mol_type = other DNA

SEQ ID NO: 75360 - DNA, 120 bp, synthetic construct; identical to SEQ ID NO: 22990
  source 1..120: mol_type = other DNA

SEQ ID NO: 75361 - DNA, 120 bp, synthetic construct; identical to SEQ ID NO: 2196
  source 1..120: mol_type = other DNA

SEQ ID NO: 75362 - DNA, 120 bp, synthetic construct
  source 1..120: mol_type = other DNA
taagtgtgtgacgtcggggtagaagggagtgacccaaattccaaaagctctttgggatgctgcgatgtcgcggccggccccgcgctcgggttttccctcctagacaaaagtctgccggct

SEQ ID NO: 75363 - DNA, 120 bp, synthetic construct
  source 1..120: mol_type = other DNA
ccccaccttgttggcttttgcagttcaaccttcagataccagctccctcgtttctaatattgcattaggtgtacatatggcagcagagcaaatagcttactgatacttttagcttttttc

SEQ ID NO: 75364 - DNA, 120 bp, synthetic construct
  source 1..120: mol_type = other DNA
ttcctcctgtaggatcgttggacctatttctcgttcttgactttgggaatcaatattctacgtacatcaattcactgggtatgcagttttgcctctgaaaattttgagggaacagccaga

SEQ ID NO: 75365 - DNA, 120 bp, synthetic construct
  source 1..120: mol_type = other DNA
aagctatgattattgtgctataaagcattggatttcagaagaagtaggggcactaaacaccatctgcttgacacctttcttcacttacagatgggactgaagctctagagggaagtcact

SEQ ID NO: 75366 - DNA, 120 bp, synthetic construct
  source 1..120: mol_type = other DNA
cagctgcctctcatgtacttgtctgttgggggcttgtgttgatcaggagtgaattcacagtctaccatgaattggaaggtgagtatcgttttaaatatttatggcttggggttttttctt

SEQ ID NO: 75367 - DNA, 120 bp, synthetic construct
  source 1..120: mol_type = other DNA
aataagttatggaacatagtatcaagtacaacttaaataaactgcttggcgagtaaacacacctgacccctgtgaaacattagattcagctggtgggagcagaagttcaagggcagccag

SEQ ID NO: 75368 - DNA, 120 bp, synthetic construct; identical to SEQ ID NO: 1226
  source 1..120: mol_type = other DNA

SEQ ID NO: 75369 - DNA, 120 bp, synthetic construct
  source 1..120: mol_type = other DNA
ttttgtttttaaaaattgatgtagatctaggccaggcatggtggctcacccctgtaatcctagcactttgggaggctgaggtgggcagatcacatgaacccaggagttcagcaccagcct

SEQ ID NO: 75370 - DNA, 120 bp, synthetic construct
  source 1..120: mol_type = other DNA
taataatagggccccataggtttattcagagagactgagaaagctggaagagattagcttttcccagtgtgagtcattgcctcaggtagcctggaaaatcctagcaaacaaaaagaagtt

SEQ ID NO: 75371 - DNA, 120 bp, synthetic construct
  source 1..120: mol_type = other DNA
ccttgctcatataaccagggggttgagtaggtccccttgaaagttatttccagccccccggttctgtgagcatattgtacacactaactaggttcagatcaacttcggttagactattag

SEQ ID NO: 75372 - DNA, 120 bp, synthetic construct
  source 1..120: mol_type = other DNA
aaaagaaacctcccatatcggtgatggaacatttagttagcatggcttctttcttcttgaaggttcttgagcacgtgcccctgctgctgtatatcttggcagcaaaaacattaattctct

SEQ ID NO: 75373 - DNA, 120 bp, synthetic construct
  source 1..120: mol_type = other DNA
ctgtaatcccagtgctttgggaggcaaaggtgggaggatcacttgagccaatgagttcaagaccagcctgggcaacatagtgaaaccctgtctctacaaaaattaaaaaaaaaaaacaaa

SEQ ID NO: 75374 - DNA, 120 bp, synthetic construct
  source 1..120: mol_type = other DNA
acaactgtgttattcagccctgatgactctgtgaggcatgttcagattgaaagaatggctctctctacatggtgaagaacagagtcagaaattgatcccaggtcaaatgcattcgatcag

SEQ ID NO: 75375 - DNA, 120 bp, synthetic construct
  source 1..120: mol_type = other DNA
tgtgccactgcactccaggctgggtgacagagtgagactgtttcaaaaaataaataaataaataaaaggggggtggggtgtttcagatggaagggaaactgatgctaaaaatacattggt

SEQ ID NO: 75376 - DNA, 120 bp, synthetic construct; identical to SEQ ID NO: 1227
  source 1..120: mol_type = other DNA

SEQ ID NO: 75377 - DNA, 120 bp, synthetic construct
  source 1..120: mol_type = other DNA
agacactcatgtgctaaacacaagcgcttttctaggctttgggatttaaagctacactttggaatttgtggaagatctggccatcttggaaaattaggtagaaggtgacataaggactgg

SEQ ID NO: 75378 - DNA, 120 bp, synthetic construct
  source 1..120: mol_type = other DNA
cacattcgcaacacatttgtttggttttcaagcttacaacatattagaaacagaaaggaagaaaggctgtcagcagcagaaatacctttgagcaagagggacggtctttgagaagcagac

SEQ ID NO: 75379 - DNA, 120 bp, synthetic construct
  source 1..120: mol_type = other DNA
ccgggaggtggaggttgcagtgagcagacatcgcaccactgcactccagcctgggtaaaagagtgagactctgtgtcaaaaaaaaaaaaaaaaccaacctaaaaaataaaaataaaaata

SEQ ID NO: 75380 - DNA, 120 bp, synthetic construct
  source 1..120: mol_type = other DNA
gttacttcaggacctcctaatcacgctgactcaggtagaccagaagctcctgttttcaggaaaaactaatctgtttggggacctacctgcttccttattaaagttttgggttgattatat

SEQ ID NO: 75381 - DNA, 120 bp, synthetic construct; identical to SEQ ID NO: 14776
  source 1..120: mol_type = other DNA

SEQ ID NO: 75382 - DNA, 120 bp, synthetic construct; identical to SEQ ID NO: 14777
  source 1..120: mol_type = other DNA

SEQ ID NO: 75383 - DNA, 120 bp, synthetic construct
  source 1..120: mol_type = other DNA
gctgctcatttcatagagaggggtgtgtcttgccccagaccatctggcatgtctaaggcagctgtggggtcagaatctgcagctcccagccctcagcccagcaatagtaggaaaggctgg

SEQ ID NO: 75384 - DNA, 120 bp, synthetic construct; identical to SEQ ID NO: 14778
  source 1..120: mol_type = other DNA

SEQ ID NO: 75385 - DNA, 120 bp, synthetic construct; identical to SEQ ID NO: 14779
  source 1..120: mol_type = other DNA

SEQ ID NO: 75386 - DNA, 120 bp, synthetic construct
  source 1..120: mol_type = other DNA
aatccctgcctgctctctcaaaatttccatctttaaactggttgtacctataaccctccctcatcaagtcaatagataaacaaaccctgaaaaataaacaactcttcctggcccagcagc

SEQ ID NO: 75387 - DNA, 120 bp, synthetic construct
  source 1..120: mol_type = other DNA
cccaccaaggtcccatctccctcctgggacccaaattctcattaggtcatttcagccctgtgagagtgccaaacattcagctaggctctccagcctcttaactaccacttcatactcagt

SEQ ID NO: 75388 - DNA, 120 bp, synthetic construct
  source 1..120: mol_type = other DNA
actaccctgtttatgggcccagaatctggaagccagccactacctaccctgacgcctatcctgcaggtggagctgaagagccaagaggctgagtctgcagcagcagcgagaccattacct

SEQ ID NO: 75389 - DNA, 120 bp, synthetic construct; identical to SEQ ID NO: 14780
  source 1..120: mol_type = other DNA

SEQ ID NO: 75390 - DNA, 120 bp, synthetic construct; identical to SEQ ID NO: 14781
  source 1..120: mol_type = other DNA

SEQ ID NO: 75391 - DNA, 120 bp, synthetic construct
  source 1..120: mol_type = other DNA
gggacagggaaagagattgaatttagggctggctaacaggggcccagagcgatcagataatattgttattgttattactgttattactaccactgttggagcctttattgggtgcttcac

SEQ ID NO: 75392 - DNA, 120 bp, synthetic construct; identical to SEQ ID NO: 14782
  source 1..120: mol_type = other DNA

SEQ ID NO: 75393 - DNA, 120 bp, synthetic construct; identical to SEQ ID NO: 14783
  source 1..120: mol_type = other DNA

SEQ ID NO: 75394 - DNA, 120 bp, synthetic construct
  source 1..120: mol_type = other DNA
tcacacgtctgttagtgttaaaaagtacaccagtacctctcaaacctttacatcaatgtctcctcatggcagaaggcagcctttctgctaaatctgggaatttaacagaaagaggacaac

SEQ ID NO: 75395 - DNA, 120 bp, synthetic construct; identical to SEQ ID NO: 14784
  source 1..120: mol_type = other DNA

SEQ ID NO: 75396 - DNA, 120 bp, synthetic construct
  source 1..120: mol_type = other DNA
cctacattagcgtttagttttttttaaaaaaacaaacaaacaagaaacatgtctaatatctttaaaaatacaaagctttgagccaggcgtgatggctcatgcctgtaatcccagcacttt

SEQ ID NO: 75397 - DNA, 120 bp, synthetic construct
  source 1..120: mol_type = other DNA
cctacagaaggaaacacatttttctacctgctgtatggcagaggttcctgagcacctggagggattattgcagcacggattgctgggccctactgcagagtttctgattcattcatgtct

SEQ ID NO: 75398 - DNA, 120 bp, synthetic construct; identical to SEQ ID NO: 75306
  source 1..120: mol_type = other DNA

SEQ ID NO: 75399 - DNA, 120 bp, synthetic construct; identical to SEQ ID NO: 75305
  source 1..120: mol_type = other DNA

SEQ ID NO: 75400 - DNA, 120 bp, synthetic construct; identical to SEQ ID NO: 14864
  source 1..120: mol_type = other DNA

SEQ ID NO: 75401 - DNA, 120 bp, synthetic construct; identical to SEQ ID NO: 33136
  source 1..120: mol_type = other DNA

SEQ ID NO: 75402 - DNA, 120 bp, synthetic construct; identical to SEQ ID NO: 22767
  source 1..120: mol_type = other DNA

SEQ ID NO: 75403 - DNA, 120 bp, synthetic construct; identical to SEQ ID NO: 22768
  source 1..120: mol_type = other DNA

SEQ ID NO: 75404 - DNA, 120 bp, synthetic construct; identical to SEQ ID NO: 22769
  source 1..120: mol_type = other DNA

SEQ ID NO: 75405 - DNA, 120 bp, synthetic construct; identical to SEQ ID NO: 22770
  source 1..120: mol_type = other DNA

SEQ ID NO: 75406 - DNA, 120 bp, synthetic construct; identical to SEQ ID NO: 22771
  source 1..120: mol_type = other DNA

SEQ ID NO: 75407 - DNA, 120 bp, synthetic construct; identical to SEQ ID NO: 22772
  source 1..120: mol_type = other DNA

SEQ ID NO: 75408 - DNA, 120 bp, synthetic construct; identical to SEQ ID NO: 22773
  source 1..120: mol_type = other DNA

SEQ ID NO: 75409 - DNA, 120 bp, synthetic construct; identical to SEQ ID NO: 22774
  source 1..120: mol_type = other DNA

SEQ ID NO: 75410 - DNA, 120 bp, synthetic construct; identical to SEQ ID NO: 22775
  source 1..120: mol_type = other DNA

SEQ ID NO: 75411 - DNA, 120 bp, synthetic construct
  source 1..120: mol_type = other DNA
aagcaattctcctgcttcagcctcctgagtatctgggactacaggcacatgccacctcgcctggctaattttgattatttgtagaaatggggtctcactatgttgcccaggctggtctca

SEQ ID NO: 75412 - DNA, 120 bp, synthetic construct; identical to SEQ ID NO: 22776
  source 1..120: mol_type = other DNA

SEQ ID NO: 75413 - DNA, 120 bp, synthetic construct; identical to SEQ ID NO: 22777
  source 1..120: mol_type = other DNA

SEQ ID NO: 75414 - DNA, 120 bp, synthetic construct; identical to SEQ ID NO: 22778
  source 1..120: mol_type = other DNA

SEQ ID NO: 75415 - DNA, 120 bp, synthetic construct
  source 1..120: mol_type = other DNA
gctaattttgtatttttagtagagacaaggtttctgcatgttggccaggtgtgtctcaaattcccaaccccaggtgatccacccgccttggcctctcaaagtgctgggattacaggcgtg

SEQ ID NO: 75416 - DNA, 120 bp, synthetic construct; identical to SEQ ID NO: 22779
  source 1..120: mol_type = other DNA

SEQ ID NO: 75417 - DNA, 120 bp, synthetic construct; identical to SEQ ID NO: 22780
  source 1..120: mol_type = other DNA

SEQ ID NO: 75418 - DNA, 120 bp, synthetic construct; identical to SEQ ID NO: 22781
  source 1..120: mol_type = other DNA

SEQ ID NO: 75419 - DNA, 120 bp, synthetic construct; identical to SEQ ID NO: 22782
  source 1..120: mol_type = other DNA

SEQ ID NO: 75420 - DNA, 120 bp, synthetic construct; identical to SEQ ID NO: 22783
  source 1..120: mol_type = other DNA

SEQ ID NO: 75421 - DNA, 120 bp, synthetic construct; identical to SEQ ID NO: 22784
  source 1..120: mol_type = other DNA

SEQ ID NO: 75422 - DNA, 120 bp, synthetic construct; identical to SEQ ID NO: 22785
  source 1..120: mol_type = other DNA

SEQ ID NO: 75423 - DNA, 120 bp, synthetic construct
  source 1..120: mol_type = other DNA
ggtagaaaactcacggattaagatttcatgcccgactccaaaggcaagagactttattattttattttttttgagccagagtatcgctctgtcacctaggctggagtgcaatctctgctc

SEQ ID NO: 75424 - DNA, 120 bp, synthetic construct
  source 1..120: mol_type = other DNA
actgccctccagcctgggtgacagagcaagactccgtctcaaaaaaaaaaaaaaaaaaaattggatacattgtaatacctcaaatacttgtaagtgaagcaccccagttcccatagagct

SEQ ID NO: 75425 - DNA, 120 bp, synthetic construct
  source 1..120: mol_type = other DNA
tttttttttaataaaaataatctcagcctgggcaacatggtgagaccccatctctgtaaaacatttttaaaaaattagccgggtatggtggcgcacacttgtagtcccagctactcagga

SEQ ID NO: 75426 - DNA, 120 bp, synthetic construct
  source 1..120: mol_type = other DNA
gagccgagatggcaccactgtactccagcctgggtgacagagcgagactccgtctaaaaaaaaaaaaaaaaaaaaattaaaaataatttgtcaattggctgggtgcggtcctgtaatcct

SEQ ID NO: 75427 - DNA, 120 bp, synthetic construct; identical to SEQ ID NO: 22809
  source 1..120: mol_type = other DNA

SEQ ID NO: 75428 - DNA, 120 bp, synthetic construct; identical to SEQ ID NO: 22810
  source 1..120: mol_type = other DNA

SEQ ID NO: 75429 - DNA, 120 bp, synthetic construct; identical to SEQ ID NO: 22811
  source 1..120: mol_type = other DNA

SEQ ID NO: 75430 - DNA, 120 bp, synthetic construct; identical to SEQ ID NO: 22812
  source 1..120: mol_type = other DNA

SEQ ID NO: 75431 - DNA, 120 bp, synthetic construct; identical to SEQ ID NO: 22813
  source 1..120: mol_type = other DNA

SEQ ID NO: 75432 - DNA, 120 bp, synthetic construct; identical to SEQ ID NO: 22814
  source 1..120: mol_type = other DNA

SEQ ID NO: 75433 - DNA, 120 bp, synthetic construct; identical to SEQ ID NO: 22815
  source 1..120: mol_type = other DNA

SEQ ID NO: 75434 - DNA, 120 bp, synthetic construct; identical to SEQ ID NO: 22816
  source 1..120: mol_type = other DNA

SEQ ID NO: 75435 - DNA, 120 bp, synthetic construct
  source 1..120: mol_type = other DNA
tttataactcaaagcagcaatctttgaagcatctttttttttttttttttttttgagatggagtctcactgtcgcccaggctggagtgcagtggcgctatggatcgtgactcactgcaac

SEQ ID NO: 75436 - DNA, 120 bp, synthetic construct; identical to SEQ ID NO: 22817
  source 1..120: mol_type = other DNA

SEQ ID NO: 75437 - DNA, 120 bp, synthetic construct; identical to SEQ ID NO: 22818
  source 1..120: mol_type = other DNA

SEQ ID NO: 75438 - DNA, 120 bp, synthetic construct; identical to SEQ ID NO: 22819
  source 1..120: mol_type = other DNA

SEQ ID NO: 75439 - DNA, 120 bp, synthetic construct; identical to SEQ ID NO: 22820
  source 1..120: mol_type = other DNA

SEQ ID NO: 75440 - DNA, 120 bp, synthetic construct; identical to SEQ ID NO: 22821
  source 1..120: mol_type = other DNA

SEQ ID NO: 75441 - DNA, 120 bp, synthetic construct; identical to SEQ ID NO: 22822
  source 1..120: mol_type = other DNA

SEQ ID NO: 75442 - DNA, 120 bp, synthetic construct; identical to SEQ ID NO: 22823
  source 1..120: mol_type = other DNA

SEQ ID NO: 75443 - DNA, 120 bp, synthetic construct; identical to SEQ ID NO: 22824
  source 1..120: mol_type = other DNA

SEQ ID NO: 75444 - DNA, 120 bp, synthetic construct; identical to SEQ ID NO: 22825
  source 1..120: mol_type = other DNA

SEQ ID NO: 75445 - DNA, 120 bp, synthetic construct; identical to SEQ ID NO: 22826
  source 1..120: mol_type = other DNA

SEQ ID NO: 75446 - DNA, 120 bp, synthetic construct
  source 1..120: mol_type = other DNA
ttctgtatttttagtggagatggggtttcaccatgttggccaaactggtctcgaacttctgacctcacacttgaggtccgcccacctcagccccccaaagtgtggagattacaagcgtga

SEQ ID NO: 75447 - DNA, 120 bp, synthetic construct; identical to SEQ ID NO: 22827
  source 1..120: mol_type = other DNA

SEQ ID NO: 75448 - DNA, 120 bp, synthetic construct; identical to SEQ ID NO: 22828
  source 1..120: mol_type = other DNA

SEQ ID NO: 75449 - DNA, 120 bp, synthetic construct; identical to SEQ ID NO: 22829
  source 1..120: mol_type = other DNA

SEQ ID NO: 75450 - DNA, 120 bp, synthetic construct; identical to SEQ ID NO: 10481
  source 1..120: mol_type = other DNA

SEQ ID NO: 75451 - DNA, 120 bp, synthetic construct; identical to SEQ ID NO: 10482
  source 1..120: mol_type = other DNA

SEQ ID NO: 75452 - DNA, 120 bp, synthetic construct
  source 1..120: mol_type = other DNA
atgcctggctaattttgtatttttaatagagatggggtttttccatgttggccagactggtctcagactcccaggcttaggtgagcctctcgcctcgctctcccaaagtgctgggattac

SEQ ID NO: 75453 - DNA, 120 bp, synthetic construct
  source 1..120: mol_type = other DNA
aacacggtgaaaccccgtctctactaaaaaaaaaaaaaaaaaaaaaatacaaaaaattagccgggcgtggtggcgggcgcctgtagtcccagctactcgggaggctgaggcaggagaatg

SEQ ID NO: 75454 - DNA, 120 bp, synthetic construct; identical to SEQ ID NO: 10483
  source 1..120: mol_type = other DNA

SEQ ID NO: 75455 - DNA, 120 bp, synthetic construct; identical to SEQ ID NO: 10484
  source 1..120: mol_type = other DNA

SEQ ID NO: 75456 - DNA, 120 bp, synthetic construct; identical to SEQ ID NO: 10485
  source 1..120: mol_type = other DNA

SEQ ID NO: 75457 - DNA, 120 bp, synthetic construct
  source 1..120: mol_type = other DNA
actgaggcaggagaatcacttgaacctgggaggcggaggttgcagtgagctgagatggcgccactgcactccagcctgggcaacaagagtgaaaccctaaaaaaaaaaaaaaaaagtgag

SEQ ID NO: 75458 - DNA, 120 bp, synthetic construct; identical to SEQ ID NO: 10486
  source 1..120: mol_type = other DNA

SEQ ID NO: 75459 - DNA, 120 bp, synthetic construct; identical to SEQ ID NO: 10487
  source 1..120: mol_type = other DNA

SEQ ID NO: 75460 - DNA, 120 bp, synthetic construct; identical to SEQ ID NO: 10488
  source 1..120: mol_type = other DNA

SEQ ID NO: 75461 - DNA, 120 bp, synthetic construct
  source 1..120: mol_type = other DNA
ccctccaagtagctgggacaacaggcatgtgacaccatacctggctaatttttgtggtttttgtagagaccgagtttcaccacgttggtctcaaattcctgagcttagacaatctacctg

SEQ ID NO: 75462 - DNA, 120 bp, synthetic construct; identical to SEQ ID NO: 10489
  source 1..120: mol_type = other DNA

SEQ ID NO: 75463 - DNA, 120 bp, synthetic construct
  source 1..120: mol_type = other DNA
aagactccatctcaaaaaacaaacaaacaaacaaacaaacaaacaaaaaatgtgcaagtgaaataagtgacaaaaagcaaacacaagatattctgttcatacgaaacactgcgaggcgac

SEQ ID NO: 75464 - DNA, 120 bp, synthetic construct; identical to SEQ ID NO: 10490
  source 1..120: mol_type = other DNA

SEQ ID NO: 75465 - DNA, 120 bp, synthetic construct; identical to SEQ ID NO: 10491
  source 1..120: mol_type = other DNA

SEQ ID NO: 75466 - DNA, 120 bp, synthetic construct; identical to SEQ ID NO: 10492
  source 1..120: mol_type = other DNA

SEQ ID NO: 75467 - DNA, 120 bp, synthetic construct; identical to SEQ ID NO: 10493
  source 1..120: mol_type = other DNA

SEQ ID NO: 75468 - DNA, 120 bp, synthetic construct; identical to SEQ ID NO: 10494
  source 1..120: mol_type = other DNA

SEQ ID NO: 75469 - DNA, 120 bp, synthetic construct; identical to SEQ ID NO: 10495
  source 1..120: mol_type = other DNA

SEQ ID NO: 75470 - DNA, 120 bp, synthetic construct; identical to SEQ ID NO: 10496
  source 1..120: mol_type = other DNA

SEQ ID NO: 75471 - DNA, 120 bp, synthetic construct; identical to SEQ ID NO: 10497
  source 1..120: mol_type = other DNA

SEQ ID NO: 75472 - DNA, 120 bp, synthetic construct; identical to SEQ ID NO: 10498
  source 1..120: mol_type = other DNA

SEQ ID NO: 75473 - DNA, 120 bp, synthetic construct; identical to SEQ ID NO: 10499
  source 1..120: mol_type = other DNA

SEQ ID NO: 75474 - DNA, 120 bp, synthetic construct; identical to SEQ ID NO: 10500
  source 1..120: mol_type = other DNA

SEQ ID NO: 75475 - DNA, 120 bp, synthetic construct; identical to SEQ ID NO: 10501
  source 1..120: mol_type = other DNA

SEQ ID NO: 75476 - DNA, 120 bp, synthetic construct; identical to SEQ ID NO: 10502
  source 1..120: mol_type = other DNA

SEQ ID NO: 75477 - DNA, 120 bp, synthetic construct; identical to SEQ ID NO: 10503
  source 1..120: mol_type = other DNA

SEQ ID NO: 75478 - DNA, 120 bp, synthetic construct; identical to SEQ ID NO: 10504
  source 1..120: mol_type = other DNA

SEQ ID NO: 75479 - DNA, 120 bp, synthetic construct; identical to SEQ ID NO: 22830
  source 1..120: mol_type = other DNA

SEQ ID NO: 75480 - DNA, 120 bp, synthetic construct; identical to SEQ ID NO: 48309
  source 1..120: mol_type = other DNA

SEQ ID NO: 75481 - DNA, 120 bp, synthetic construct; identical to SEQ ID NO: 22831
  source 1..120: mol_type = other DNA

SEQ ID NO: 75482 - DNA, 120 bp, synthetic construct; identical to SEQ ID NO: 48311
  source 1..120: mol_type = other DNA

SEQ ID NO: 75483 - DNA, 120 bp, synthetic construct; identical to SEQ ID NO: 22832
  source 1..120: mol_type = other DNA

SEQ ID NO: 75484 - DNA, 120 bp, synthetic construct; identical to SEQ ID NO: 22833
  source 1..120: mol_type = other DNA

SEQ ID NO: 75485 - DNA, 120 bp, synthetic construct; identical to SEQ ID NO: 48314
  source 1..120: mol_type = other DNA

SEQ ID NO: 75486 - DNA, 120 bp, synthetic construct; identical to SEQ ID NO: 22834
  source 1..120: mol_type = other DNA

SEQ ID NO: 75487 - DNA, 120 bp, synthetic construct; identical to SEQ ID NO: 22835
  source 1..120: mol_type = other DNA

SEQ ID NO: 75488 - DNA, 120 bp, synthetic construct; identical to SEQ ID NO: 22836
  source 1..120: mol_type = other DNA

SEQ ID NO: 75489 - DNA, 120 bp, synthetic construct; identical to SEQ ID NO: 22837
  source 1..120: mol_type = other DNA

SEQ ID NO: 75490 - DNA, 120 bp, synthetic construct; identical to SEQ ID NO: 22838
  source 1..120: mol_type = other DNA

SEQ ID NO: 75491 - DNA, 120 bp, synthetic construct; identical to SEQ ID NO: 22839
  source 1..120: mol_type = other DNA

SEQ ID NO: 75492 - DNA, 120 bp, synthetic construct; identical to SEQ ID NO: 22840
  source 1..120: mol_type = other DNA

SEQ ID NO: 75493 - DNA, 120 bp, synthetic construct; identical to SEQ ID NO: 22841
  source 1..120: mol_type = other DNA

SEQ ID NO: 75494 - DNA, 120 bp, synthetic construct; identical to SEQ ID NO: 22842
  source 1..120: mol_type = other DNA

SEQ ID NO: 75495 - DNA, 120 bp, synthetic construct; identical to SEQ ID NO: 22843
  source 1..120: mol_type = other DNA

SEQ ID NO: 75496 - DNA, 120 bp, synthetic construct; identical to SEQ ID NO: 22844
  source 1..120: mol_type = other DNA

SEQ ID NO: 75497 - DNA, 120 bp, synthetic construct; identical to SEQ ID NO: 22845
  source 1..120: mol_type = other DNA

SEQ ID NO: 75498 - DNA, 120 bp, synthetic construct; identical to SEQ ID NO: 22846
  source 1..120: mol_type = other DNA

SEQ ID NO: 75499 - DNA, 120 bp, synthetic construct; identical to SEQ ID NO: 22847
  source 1..120: mol_type = other DNA

SEQ ID NO: 75500 - DNA, 120 bp, synthetic construct; identical to SEQ ID NO: 22848
  source 1..120: mol_type = other DNA

SEQ ID NO: 75501 - DNA, 120 bp, synthetic construct; identical to SEQ ID NO: 22849
  source 1..120: mol_type = other DNA

SEQ ID NO: 75502 - DNA, 120 bp, synthetic construct; identical to SEQ ID NO: 22850
  source 1..120: mol_type = other DNA

SEQ ID NO: 75503 - DNA, 120 bp, synthetic construct; identical to SEQ ID NO: 22851
  source 1..120: mol_type = other DNA

SEQ ID NO: 75504 - DNA, 120 bp, synthetic construct; identical to SEQ ID NO: 22852
  source 1..120: mol_type = other DNA

SEQ ID NO: 75505 - DNA, 120 bp, synthetic construct; identical to SEQ ID NO: 48334
  source 1..120: mol_type = other DNA

SEQ ID NO: 75506 - DNA, 120 bp, synthetic construct; identical to SEQ ID NO: 22853
  source 1..120: mol_type = other DNA

SEQ ID NO: 75507 - DNA, 120 bp, synthetic construct; identical to SEQ ID NO: 22854
  source 1..120: mol_type = other DNA

SEQ ID NO: 75508 - DNA, 120 bp, synthetic construct; identical to SEQ ID NO: 22855
  source 1..120: mol_type = other DNA

SEQ ID NO: 75509 - DNA, 120 bp, synthetic construct; identical to SEQ ID NO: 48338
  source 1..120: mol_type = other DNA

SEQ ID NO: 75510 - DNA, 120 bp, synthetic construct; identical to SEQ ID NO: 22856
  source 1..120: mol_type = other DNA

SEQ ID NO: 75511 - DNA, 120 bp, synthetic construct; identical to SEQ ID NO: 22857
  source 1..120: mol_type = other DNA

SEQ ID NO: 75512 - DNA, 120 bp, synthetic construct; identical to SEQ ID NO: 22858
  source 1..120: mol_type = other DNA

SEQ ID NO: 75513 - DNA, 120 bp, synthetic construct; identical to SEQ ID NO: 28910
  source 1..120: mol_type = other DNA

SEQ ID NO: 75514 - DNA, 120 bp, synthetic construct; identical to SEQ ID NO: 28911
  source 1..120: mol_type = other DNA

SEQ ID NO: 75515 - DNA, 120 bp, synthetic construct
  source 1..120: mol_type = other DNA
tttcgtagaaaatgccatctagctgtgtaattgaaatggaacatctctactttcctagtatatgctatgtgtcactcactttggtagaaaatgccgtctagctgtgtaactgaaatggaa

SEQ ID NO: 75516 - DNA, 120 bp, synthetic construct; identical to SEQ ID NO: 67039
  source 1..120: mol_type = other DNA

SEQ ID NO: 75517 - DNA, 120 bp, synthetic construct; identical to SEQ ID NO: 67040
  source 1..120: mol_type = other DNA

SEQ ID NO: 75518 - DNA, 120 bp, synthetic construct; identical to SEQ ID NO: 67041
  source 1..120: mol_type = other DNA

SEQ ID NO: 75519 - DNA, 120 bp, synthetic construct; identical to SEQ ID NO: 67042
  source 1..120: mol_type = other DNA

SEQ ID NO: 75520 - DNA, 120 bp, synthetic construct; identical to SEQ ID NO: 67043
  source 1..120: mol_type = other DNA

SEQ ID NO: 75521 - DNA, 120 bp, synthetic construct; identical to SEQ ID NO: 1231
  source 1..120: mol_type = other DNA

SEQ ID NO: 75522 - DNA, 120 bp, synthetic construct; identical to SEQ ID NO: 67045
  source 1..120: mol_type = other DNA

SEQ ID NO: 75523 - DNA, 120 bp, synthetic construct; identical to SEQ ID NO: 1232
  source 1..120: mol_type = other DNA

SEQ ID NO: 75524 - DNA, 120 bp, synthetic construct; identical to SEQ ID NO: 1233
  source 1..120: mol_type = other DNA

SEQ ID NO: 75525 - DNA, 120 bp, synthetic construct; identical to SEQ ID NO: 67048
  source 1..120: mol_type = other DNA

SEQ ID NO: 75526 - DNA, 120 bp, synthetic construct; identical to SEQ ID NO: 67049
  source 1..120: mol_type = other DNA

SEQ ID NO: 75527 - DNA, 120 bp, synthetic construct; identical to SEQ ID NO: 67050
  source 1..120: mol_type = other DNA

SEQ ID NO: 75528 - DNA, 120 bp, synthetic construct; identical to SEQ ID NO: 67051
  source 1..120: mol_type = other DNA

SEQ ID NO: 75529 - DNA, 120 bp, synthetic construct; identical to SEQ ID NO: 67052
  source 1..120: mol_type = other DNA

SEQ ID NO: 75530 - DNA, 120 bp, synthetic construct; identical to SEQ ID NO: 67053
  source 1..120: mol_type = other DNA

SEQ ID NO: 75531 - DNA, 120 bp, synthetic construct; identical to SEQ ID NO: 67054
  source 1..120: mol_type = other DNA

SEQ ID NO: 75532 - DNA, 120 bp, synthetic construct
  source 1..120: mol_type = other DNA
ggtatacactatgtgtgtacatccactgtgatatttgaagtaatatctctctatgagattgcaaataacatcaaagcgtgtacacccctgtgacacattaggagtaacacccttctaggg

SEQ ID NO: 75533 - DNA, 120 bp, synthetic construct
  source 1..120: mol_type = other DNA
tgatattattcatagtgtgccagagggatattagcactaatgtcacgatgcgtgtacaccttgtgatattatttgtcatatcctaatgtcacagggggtgtgttccgtgtgatagtcttc

SEQ ID NO: 75534 - DNA, 120 bp, synthetic construct
  source 1..120: mol_type = other DNA
ctaatgggaggttgcatttattgtcacacggggtatgttccttttgatattatccataatgtcctagagggatgtcaccccttatgtcacagagtttgtacaccttgtgaaattactcgt

SEQ ID NO: 75535 - DNA, 120 bp, synthetic construct
  source 1..120: mol_type = other DNA
cagcggtgttggtataacatgggacatgtatacatatgcaacaaacttgcacgttgtgctcatgtaccctagaacttaaagtataacaaaaaaaaataaatatatatatatatttaaaat

SEQ ID NO: 75536 - DNA, 120 bp, synthetic construct
  source 1..120: mol_type = other DNA
gtggctatggaactggctacagctgtggctatggctctggctacagctgtggctatggctctggctctggctgtggctatggaactggcttcggctgtgggtatggctgtggttatggaa

SEQ ID NO: 75537 - DNA, 120 bp, synthetic construct; identical to SEQ ID NO: 13768
  source 1..120: mol_type = other DNA

SEQ ID NO: 75538 - DNA, 120 bp, synthetic construct
  source 1..120: mol_type = other DNA
ttcaaccgggttgctgcccctccttgagattatagggtccatacattctctctctttttttttttattatactttaagttctagggtatgtgcgcacaacgtgcaggtttgttacatatg

SEQ ID NO: 75539 - DNA, 120 bp, synthetic construct; identical to SEQ ID NO: 497
  source 1..120: mol_type = other DNA

SEQ ID NO: 75540 - DNA, 120 bp, synthetic construct; identical to SEQ ID NO: 13766
  source 1..120: mol_type = other DNA

SEQ ID NO: 75541 - DNA, 120 bp, synthetic construct
  source 1..120: mol_type = other DNA
actattaagcaagaactaggctggtctcctatgtacagcccctcaacacacacacacacacacacacacacacacacgcacgcacgcacacacacacacgtctttataggaagagaaata

SEQ ID NO: 75542 - DNA, 120 bp, synthetic construct
  source 1..120: mol_type = other DNA
catagccttcattcttcgaaaaaccatctataactttaaactcatggtaatgtgtttcaaggaatacgtgaaatatgaaattttcccacagattaagtggtaaagatgagagctcagtgg

SEQ ID NO: 75543 - DNA, 120 bp, synthetic construct
  source 1..120: mol_type = other DNA
taaagcatatttatttttagctttattcagcgtttttgtatttttcattatcttctgctgatcactttcagcacagatcttcagcagtttacccttaagtttcttcaggtgtatatatgt

SEQ ID NO: 75544 - DNA, 120 bp, synthetic construct
  source 1..120: mol_type = other DNA
aaagcaatggcgacaaaagccaaaattgacaaatgggacctcattaaactgaagagcttctgcacggcaaaagaaactaccatcagagtgaacaggcaacctccaaaatgggagaaaatt

SEQ ID NO: 75545 - DNA, 120 bp, synthetic construct
  source 1..120: mol_type = other DNA
taaatggattgagtgaatagatggatggatgtatggatggatggatgtatggatggatggacggatagatggatgaatgatacatgggtagacagatgatgggtgggtagacgaatgaat

SEQ ID NO: 75546 - DNA, 120 bp, synthetic construct
  source 1..120: mol_type = other DNA
tgatgggtgggtggtaggatgaatagatgatgggtgggtggatgaatggataatgggtgggtgggtggatggatgaatggataatgggtgggtgggtgggtggttggatgaatggatgat

SEQ ID NO: 75547 - DNA, 120 bp, synthetic construct
  source 1..120: mol_type = other DNA
tgtgtttttgataaataatctgcttcccacactacacacaggcttagacctggatacctgttcacactagtacccagcccacagtaggtgctcattaaatacatgatgaatgaacaactg

SEQ ID NO: 75548 - DNA, 120 bp, synthetic construct
  source 1..120: mol_type = other DNA
tctccacctggagcttgcctgattcgcttcggccccactgggggcactgaagccggtactcaggacactggatgtcctcaccttgtcatcatccgagggctcctggatggtacagttctc

SEQ ID NO: 75549 - DNA, 120 bp, synthetic construct; identical to SEQ ID NO: 16004
  source 1..120: mol_type = other DNA

SEQ ID NO: 75550 - DNA, 120 bp, synthetic construct; identical to SEQ ID NO: 16005
  source 1..120: mol_type = other DNA

SEQ ID NO: 75551 - DNA, 120 bp, synthetic construct; identical to SEQ ID NO: 14776
  source 1..120: mol_type = other DNA

SEQ ID NO: 75552 - DNA, 120 bp, synthetic construct; identical to SEQ ID NO: 14777
  source 1..120: mol_type = other DNA

SEQ ID NO: 75553 - DNA, 120 bp, synthetic construct; identical to SEQ ID NO: 75383
  source 1..120: mol_type = other DNA

SEQ ID NO: 75554 - DNA, 120 bp, synthetic construct; identical to SEQ ID NO: 14778
  source 1..120: mol_type = other DNA

SEQ ID NO: 75555 - DNA, 120 bp, synthetic construct; identical to SEQ ID NO: 14881
  source 1..120: mol_type = other DNA

SEQ ID NO: 75556 - DNA, 120 bp, synthetic construct; identical to SEQ ID NO: 75386
  source 1..120: mol_type = other DNA

SEQ ID NO: 75557 - DNA, 120 bp, synthetic construct; identical to SEQ ID NO: 75387
  source 1..120: mol_type = other DNA

SEQ ID NO: 75558 - DNA, 120 bp, synthetic construct; identical to SEQ ID NO: 75388
  source 1..120: mol_type = other DNA

SEQ ID NO: 75559 - DNA, 120 bp, synthetic construct
  source 1..120: mol_type = other DNA
tcgtatcttctccttctgctcccgtatcttctcctcctgctcccttatcttctcctcctgcctccgcatcttctcctgttcttgcatcttctcttcctgctcccccatcttctcttcctg

SEQ ID NO: 75560 - DNA, 120 bp, synthetic construct
  source 1..120: mol_type = other DNA
tgggtaaggagctgcagagtgtgtcagcaaagctccaagcccaggtggaagagaacgagttgtggaaccgcctgaaccagcaacaggaggagaagatgtggaggcaggaggagaagatac

SEQ ID NO: 75561 - DNA, 120 bp, synthetic construct
  source 1..120: mol_type = other DNA
cctgggacttttaattcctggggtcccttccagcgccacggttctgtggttgtggggcgagggtagggggtcaatcaccaaagtggtcttttatgttcttcattcattcctttctctact

SEQ ID NO: 75562 - DNA, 120 bp, synthetic construct; identical to SEQ ID NO: 14862
  source 1..120: mol_type = other DNA

SEQ ID NO: 75563 - DNA, 120 bp, synthetic construct; identical to SEQ ID NO: 14782
  source 1..120: mol_type = other DNA

SEQ ID NO: 75564 - DNA, 120 bp, synthetic construct; identical to SEQ ID NO: 14783
  source 1..120: mol_type = other DNA

SEQ ID NO: 75565 - DNA, 120 bp, synthetic construct; identical to SEQ ID NO: 75394
  source 1..120: mol_type = other DNA

SEQ ID NO: 75566 - DNA, 120 bp, synthetic construct; identical to SEQ ID NO: 14784
  source 1..120: mol_type = other DNA

SEQ ID NO: 75567 - DNA, 120 bp, synthetic construct
  source 1..120: mol_type = other DNA
ttagcatttagtttttttaaaaaaaacaaacaaacaagaaacatgtctaatatctttaaaaatacaaagctttgagccaggcatgatggctcatgcctgtaatcccagcactttgggagg

SEQ ID NO: 75568 - DNA, 120 bp, synthetic construct
  source 1..120: mol_type = other DNA
tccctccaggtgctcaggaacctctgccatacagcaggtagaaaaatgtgtttccttttgtaggtccacagccagggatactatacgttctgtctcaatatgaaacaatgacatgcaatt

SEQ ID NO: 75569 - DNA, 120 bp, synthetic construct; identical to SEQ ID NO: 14863
  source 1..120: mol_type = other DNA

SEQ ID NO: 75570 - DNA, 120 bp, synthetic construct
  source 1..120: mol_type = other DNA
gtcccatcttccctttatttttatttttatcttatttatttatttatttatttatttatttatttatttatttatgttgagatggagtctcactctgttgcccaggctggagtgcggtgg

SEQ ID NO: 75571 - DNA, 120 bp, synthetic construct; identical to SEQ ID NO: 14864
  source 1..120: mol_type = other DNA

SEQ ID NO: 75572 - DNA, 120 bp, synthetic construct
  source 1..120: mol_type = other DNA
agtcatggcattacatttttaaagatttatggggataaagcatctgctgaccattaggctgtagataaatttattaatgagtataccaagattatcgctgatgaagacctgatgccagaa

SEQ ID NO: 75573 - DNA, 120 bp, synthetic construct
  source 1..120: mol_type = other DNA
gttttgcatttcatattttcagattcagaatgctcaacctacaatgggttctgatatatttcttcacttaatttttgtagatatttagattctagtgtttcacttattttaataaaatac

SEQ ID NO: 75574 - DNA, 120 bp, synthetic construct
  source 1..120: mol_type = other DNA
tcatcatattatacttattccaaacatagtggtttcttactcaacattatacttttaagatttattcccattgatgcatttgggtccagcataatcaagtgctgtttaatattctatgaa

SEQ ID NO: 75575 - DNA, 120 bp, synthetic construct
  source 1..120: mol_type = other DNA
ttgccacctactatagaagctgaagataacggtaatcattatctcagtctctgttgcagctagggtatgcccgatgacctaagctctatcaattaggttaacccactccccagaatttta

SEQ ID NO: 75576 - DNA, 120 bp, synthetic construct
  source 1..120: mol_type = other DNA
taggtaaaaggatatagaaggagtgagccaatgacaaagtctttttttttttttgagacgtggtctcactctgtcgcccaggatggagtgcagtggcgtgatctgggctcactgcaagct

SEQ ID NO: 75577 - DNA, 120 bp, synthetic construct; identical to SEQ ID NO: 498
  source 1..120: mol_type = other DNA

SEQ ID NO: 75578 - DNA, 120 bp, synthetic construct
  source 1..120: mol_type = other DNA
catccatgtccctgcaaaggacatgaacccatccttttttatggctgcatagtattccactggtgtattagggtccatacattctgtatttcatcactgtcagtattgaactgcatcact

SEQ ID NO: 75579 - DNA, 120 bp, synthetic construct
  source 1..120: mol_type = other DNA
tattttatacatttaccctaatgcctaatgtttaagacatctactgtagtgtacagtaatatcccaggccttcacattcactcactaatcactcactgatccacccagaacaattttcag

SEQ ID NO: 75580 - DNA, 120 bp, synthetic construct
  source 1..120: mol_type = other DNA
gagatgggtttcaagaagatgcttctgaggtgtggacgtcttctacttccctgagacctttatataattgccaaagcatatcattcattccctgacttagccaacaaatatttaaacaat

SEQ ID NO: 75581 - DNA, 120 bp, synthetic construct
  source 1..120: mol_type = other DNA
gacaggccccagtatgtgatgttccccttcctgtgtccaagtgttctcattgttcaattctcacctatgagggagaacatgaggcgtttgctttttttgtccctgtgatagcttgctgag

SEQ ID NO: 75582 - DNA, 120 bp, synthetic construct
  source 1..120: mol_type = other DNA
taacatcactgtgtgtacacgccatgtgacattaggggtaacatcccacaaaattataacgaataatttcacaagctgtgcactctctgtgacattaaaagtaacacttccctagaatat

SEQ ID NO: 75583 - DNA, 120 bp, synthetic construct
  source 1..120: mol_type = other DNA
ggatattacaaatagtatcacagggtgtacaggcattgtgacattagtagtaacatcccactgggatatgacgagtcatatcacagggtgtacaccccggtgacaataataacaacattc

SEQ ID NO: 75584 - DNA, 120 bp, synthetic construct
  source 1..120: mol_type = other DNA
caaagtgctgggattacagatgtgaaccaccacgcccagccatttttattttatttatttatttatttgagacagagtcttactctgccacccaggctggagtgcagtggcacgatctca

SEQ ID NO: 75585 - DNA, 120 bp, synthetic construct; identical to SEQ ID NO: 19460
  source 1..120: mol_type = other DNA

SEQ ID NO: 75586 - DNA, 120 bp, synthetic construct; identical to SEQ ID NO: 19461
  source 1..120: mol_type = other DNA

SEQ ID NO: 75587 - DNA, 120 bp, synthetic construct
  source 1..120: mol_type = other DNA
accatcctggctagcacggtgaaaccctgtctctactaaaaatacaaaaaatgcttctgcctctgcctctgccctctgcctctcccctttccacggtctcccctttccctctttccatgg

SEQ ID NO: 75588 - DNA, 120 bp, synthetic construct
  source 1..120: mol_type = other DNA
tgatgacaatggcagttttgtggaatagaaaagggggaaaggattgagaaatcggatggttgccgtgtctgtgtagaaagaagtagacatgagagacttttcattttgttctgtactaag

SEQ ID NO: 75589 - DNA, 120 bp, synthetic construct
  source 1..120: mol_type = other DNA
agaagcttcatatttaacctagttttagctactcaagtagcttggtgttaaggatcttgtcagttcactctcattctctctctctctctctctctctctctctctctctctctctctctc

SEQ ID NO: 75590 - DNA, 120 bp, synthetic construct; identical to SEQ ID NO: 35214
  source 1..120: mol_type = other DNA

SEQ ID NO: 75591 - DNA, 120 bp, synthetic construct; identical to SEQ ID NO: 18988
  source 1..120: mol_type = other DNA

SEQ ID NO: 75592 - DNA, 120 bp, synthetic construct; identical to SEQ ID NO: 31407
  source 1..120: mol_type = other DNA

SEQ ID NO: 75593 - DNA, 120 bp, synthetic construct
  source 1..120: mol_type = other DNA
ccaacttacaagggatgtgaaggacctcttcaaggagaactacaaaccactgctcaacaaaataaaagaggacacaaatggaagaacattccatgctcatggataggaagaatcagtatc

SEQ ID NO: 75594 - DNA, 120 bp, synthetic construct
  source 1..120: mol_type = other DNA
aacaggtgctggagaggatgtagagagataggaacacttttacactgttggtgggactgtaaactagttcaaccattgtggaagtcagtgtggcgattcctcagggatctagaactagaa

SEQ ID NO: 75595 - DNA, 120 bp, synthetic construct; identical to SEQ ID NO: 31408
  source 1..120: mol_type = other DNA

SEQ ID NO: 75596 - DNA, 120 bp, synthetic construct; identical to SEQ ID NO: 31409
  source 1..120: mol_type = other DNA

SEQ ID NO: 75597 - DNA, 120 bp, synthetic construct
  source 1..120: mol_type = other DNA
tccttcaatgatagactggattaagaaaatgtggcacatataccctagaacttaaagtataattaaaaaaaagaaagaaaaggtggcacatatacaccatggaatactgtgcagccgtaa

SEQ ID NO: 75598 - DNA, 120 bp, synthetic construct; identical to SEQ ID NO: 31410
  source 1..120: mol_type = other DNA

SEQ ID NO: 75599 - DNA, 120 bp, synthetic construct
  source 1..120: mol_type = other DNA
attgccattctaactggtgtgagatggtatctcattgtggttttgatttgcatttctctgatggccagtaatgatgagcatttattcatgtgtctgttggctgcataaatgtcttctttt

SEQ ID NO: 75600 - DNA, 120 bp, synthetic construct
  source 1..120: mol_type = other DNA
tgctgaagttgcttatcagcttaaggagattttgggctgagacgatggggttttctaaatataaaatcatgtcacctgcaaacagggataatttgacttccttttttcctaattgaatac

SEQ ID NO: 75601 - DNA, 120 bp, synthetic construct
  source 1..120: mol_type = other DNA
tgcatagaggtgtttatagtattctctgatggttgtttgtatttctgtgggatcagtggcgatatcccctttatcattttttattgcatttgtttgattcttctctcttttcttctttat

SEQ ID NO: 75602 - DNA, 120 bp, synthetic construct
  source 1..120: mol_type = other DNA
tttaattggagcatttagcccatttacatttaaggttaatattgttacgtgtaaatttgatcctgtcattataatgttagctggttattttgctcattagttgatgtagtttcttcctag

SEQ ID NO: 75603 - DNA, 120 bp, synthetic construct; identical to SEQ ID NO: 28490
  source 1..120: mol_type = other DNA

SEQ ID NO: 75604 - DNA, 120 bp, synthetic construct; identical to SEQ ID NO: 28491
  source 1..120: mol_type = other DNA

SEQ ID NO: 75605 - DNA, 120 bp, synthetic construct; identical to SEQ ID NO: 28492
  source 1..120: mol_type = other DNA

SEQ ID NO: 75606 - DNA, 120 bp, synthetic construct; identical to SEQ ID NO: 28493
  source 1..120: mol_type = other DNA

SEQ ID NO: 75607 - DNA, 120 bp, synthetic construct; identical to SEQ ID NO: 28494
  source 1..120: mol_type = other DNA

SEQ ID NO: 75608 - DNA, 120 bp, synthetic construct; identical to SEQ ID NO: 28495
  source 1..120: mol_type = other DNA

SEQ ID NO: 75609 - DNA, 120 bp, synthetic construct; identical to SEQ ID NO: 28496
  source 1..120: mol_type = other DNA

SEQ ID NO: 75610 - DNA, 120 bp, synthetic construct; identical to SEQ ID NO: 28505
  source 1..120: mol_type = other DNA

SEQ ID NO: 75611 - DNA, 120 bp, synthetic construct; identical to SEQ ID NO: 28497
  source 1..120: mol_type = other DNA

SEQ ID NO: 75612 - DNA, 120 bp, synthetic construct; identical to SEQ ID NO: 28498
  source 1..120: mol_type = other DNA

SEQ ID NO: 75613 - DNA, 120 bp, synthetic construct; identical to SEQ ID NO: 28499
  source 1..120: mol_type = other DNA

SEQ ID NO: 75614 - DNA, 120 bp, synthetic construct; identical to SEQ ID NO: 28500
  source 1..120: mol_type = other DNA

SEQ ID NO: 75615 - DNA, 120 bp, synthetic construct; identical to SEQ ID NO: 28501
  source 1..120: mol_type = other DNA

SEQ ID NO: 75616 - DNA, 120 bp, synthetic construct; identical to SEQ ID NO: 28502
  source 1..120: mol_type = other DNA

SEQ ID NO: 75617 - DNA, 120 bp, synthetic construct; identical to SEQ ID NO: 28503
  source 1..120: mol_type = other DNA

SEQ ID NO: 75618 - DNA, 120 bp, synthetic construct; identical to SEQ ID NO: 28494
  source 1..120: mol_type = other DNA

SEQ ID NO: 75619 - DNA, 120 bp, synthetic construct; identical to SEQ ID NO: 28504
  source 1..120: mol_type = other DNA

SEQ ID NO: 75620 - DNA, 120 bp, synthetic construct; identical to SEQ ID NO: 28496
  source 1..120: mol_type = other DNA

SEQ ID NO: 75621 - DNA, 120 bp, synthetic construct; identical to SEQ ID NO: 28505
  source 1..120: mol_type = other DNA

SEQ ID NO: 75622 - DNA, 120 bp, synthetic construct; identical to SEQ ID NO: 28506
  source 1..120: mol_type = other DNA

SEQ ID NO: 75623 - DNA, 120 bp, synthetic construct; identical to SEQ ID NO: 28507
  source 1..120: mol_type = other DNA

SEQ ID NO: 75624 - DNA, 120 bp, synthetic construct; identical to SEQ ID NO: 28499
  source 1..120: mol_type = other DNA

SEQ ID NO: 75625 - DNA, 120 bp, synthetic construct; identical to SEQ ID NO: 28500
  source 1..120: mol_type = other DNA

SEQ ID NO: 75626 - DNA, 120 bp, synthetic construct; identical to SEQ ID NO: 28501
  source 1..120: mol_type = other DNA

SEQ ID NO: 75627 - DNA, 120 bp, synthetic construct; identical to SEQ ID NO: 28502
  source 1..120: mol_type = other DNA

SEQ ID NO: 75628 - DNA, 120 bp, synthetic construct; identical to SEQ ID NO: 28493
  source 1..120: mol_type = other DNA

SEQ ID NO: 75629 - DNA, 120 bp, synthetic construct; identical to SEQ ID NO: 28508
  source 1..120: mol_type = other DNA

SEQ ID NO: 75630 - DNA, 120 bp, synthetic construct; identical to SEQ ID NO: 28504
  source 1..120: mol_type = other DNA

SEQ ID NO: 75631 - DNA, 120 bp, synthetic construct; identical to SEQ ID NO: 28496
  source 1..120: mol_type = other DNA

SEQ ID NO: 75632 - DNA, 120 bp, synthetic construct; identical to SEQ ID NO: 28505
  source 1..120: mol_type = other DNA

SEQ ID NO: 75633 - DNA, 120 bp, synthetic construct; identical to SEQ ID NO: 28497
  source 1..120: mol_type = other DNA

SEQ ID NO: 75634 - DNA, 120 bp, synthetic construct
  source 1..120: mol_type = other DNA
cattctaaagacaaagcccacccaagttgcaccagaaatcactccgctggctcccccagagagtacacggaggcttcccccaacatggcagaactccggcaacactcgagcatccgttta

SEQ ID NO: 75635 - DNA, 120 bp, synthetic construct
  source 1..120: mol_type = other DNA
aggaggataacctttccaggtcaactctcacactccatgtactcaaaacctagtgaaaaggctctacctttcccatggaaaagcattgtgcaaatagtattactgtctgtcattcccata

SEQ ID NO: 75636 - DNA, 120 bp, synthetic construct; identical to SEQ ID NO: 28500
  source 1..120: mol_type = other DNA

SEQ ID NO: 75637 - DNA, 120 bp, synthetic construct; identical to SEQ ID NO: 28501
  source 1..120: mol_type = other DNA

SEQ ID NO: 75638 - DNA, 120 bp, synthetic construct; identical to SEQ ID NO: 28502
  source 1..120: mol_type = other DNA

SEQ ID NO: 75639 - DNA, 120 bp, synthetic construct; identical to SEQ ID NO: 28503
  source 1..120: mol_type = other DNA

SEQ ID NO: 75640 - DNA, 120 bp, synthetic construct; identical to SEQ ID NO: 28494
  source 1..120: mol_type = other DNA

SEQ ID NO: 75641 - DNA, 120 bp, synthetic construct
  source 1..120: mol_type = other DNA
agaaaaatgcattagggggcaaagcaggcgagtagtttgggctgcggggatcttgaagcattcgctcttccttatgcctcccaagaacgttgctccaacctcccagtatcctcacattca

SEQ ID NO: 75642 - DNA, 120 bp, synthetic construct
  source 1..120: mol_type = other DNA
ctacaccagaaaaacccctggaccagagagattcctagccaaagtataccagtcatataaagaagagctgatatcaagcctcctgaaacaattccaaaagataaaagaggacagactaac

SEQ ID NO: 75643 - DNA, 120 bp, synthetic construct; identical to SEQ ID NO: 34253
  source 1..120: mol_type = other DNA

SEQ ID NO: 75644 - DNA, 120 bp, synthetic construct; identical to SEQ ID NO: 26261
  source 1..120: mol_type = other DNA

SEQ ID NO: 75645 - DNA, 120 bp, synthetic construct
  source 1..120: mol_type = other DNA
tctttctttctttctttctttctttctttctttcttttctttctttctttctcattcttgggtgtttcttgcagagggggatttggcagggtcataggacaacagtggagggaaggtcag

SEQ ID NO: 75646 - DNA, 120 bp, synthetic construct
  source 1..120: mol_type = other DNA
gaggctggcagatcactcccgattaggagctggagaccagcccggccaacacagtgaaaccccgtctccaccaaaaaatacgaaaaccagtcaggcgtggcggcgcacgcctgcaatcgc

SEQ ID NO: 75647 - DNA, 120 bp, synthetic construct; identical to SEQ ID NO: 20369
  source 1..120: mol_type = other DNA

SEQ ID NO: 75648 - DNA, 120 bp, synthetic construct; identical to SEQ ID NO: 4287
  source 1..120: mol_type = other DNA

SEQ ID NO: 75649 - DNA, 120 bp, synthetic construct
  source 1..120: mol_type = other DNA
aaaaaattttttttaaattattttattaaaaatagaggcccggcccgatggctcacactggtaatcccagcactttaggaggctgaggtgggcaaatcacttgaggccaggagtttgaga

SEQ ID NO: 75650 - DNA, 120 bp, synthetic construct
  source 1..120: mol_type = other DNA
ttagacagatcaacgagacagaaagtcaacaaggatacccaggaattgaactcagctctgcaccaagtggacctaatagacatctgcagaactctccacccgaaatcaacagaatataca

SEQ ID NO: 75651 - DNA, 120 bp, synthetic construct
  source 1..120: mol_type = other DNA
aacacctctacgcaaataaactagaaaatctagaagaaatggataaattccttgatacgtacatgctcccaagactaaaccaggaagaagttgaatctctgaatagaccaataacaggat

SEQ ID NO: 75652 - DNA, 120 bp, synthetic construct
  source 1..120: mol_type = other DNA
aaaccccattgcctcagcccaaaatctccttcagctgataagcaacttcagcaaagtctcaggatacaaaatcaatgtacaaaaatcacaagcattcttatacaccaacaacagacaaac

SEQ ID NO: 75653 - DNA, 120 bp, synthetic construct
  source 1..120: mol_type = other DNA
cttctcaaaagaagacatttatgcagccaaaaaaacacatgaaaaaatgctcatcattactggccatcagagaaatgcaaatcaaaactacaatgagataccatctcacaccagttggaa

SEQ ID NO: 75654 - DNA, 120 bp, synthetic construct; identical to SEQ ID NO: 24959
  source 1..120: mol_type = other DNA

SEQ ID NO: 75655 - DNA, 120 bp, synthetic construct
  source 1..120: mol_type = other DNA
tgatatctcattcttacaaaactgtccctcccaacttccttggcaccccagcctcccgattttgtttttaatttttcaataggttattgggggcacaggtggtgtttggttacatgagta

SEQ ID NO: 75656 - DNA, 120 bp, synthetic construct
  source 1..120: mol_type = other DNA
tttcatccaggtcactgtgaatgccattatttcattcatttttatggctgaatagtattccatcatatatatatattccatcatatatatatattccatcatatatatatattccatcat

SEQ ID NO: 75657 - DNA, 120 bp, synthetic construct; identical to SEQ ID NO: 24960
  source 1..120: mol_type = other DNA

SEQ ID NO: 75658 - DNA, 120 bp, synthetic construct; identical to SEQ ID NO: 24952
  source 1..120: mol_type = other DNA

SEQ ID NO: 75659 - DNA, 120 bp, synthetic construct
  source 1..120: mol_type = other DNA
cagggatcacatctggagtcttatgtgtccatctctccgtcattggggatgttaattttgagcaactgatcaaggcattgtccagtttctccacagtataggtattctttcctttgcaat

SEQ ID NO: 75660 - DNA, 120 bp, synthetic construct
  source 1..120: mol_type = other DNA
gatttggtcagtgggagctgcatcaagttggctcctgtgtccttgagacatgtccccatcatctttgttgttagcaattgattaattgctggaataaaaagatgttctagtttggtcttg

SEQ ID NO: 75661 - DNA, 120 bp, synthetic construct; identical to SEQ ID NO: 24953
  source 1..120: mol_type = other DNA

SEQ ID NO: 75662 - DNA, 120 bp, synthetic construct; identical to SEQ ID NO: 24954
  source 1..120: mol_type = other DNA

SEQ ID NO: 75663 - DNA, 120 bp, synthetic construct
  source 1..120: mol_type = other DNA
catagtattccatggtgtatatgtgtcacattttcttaatccagtctattgttgttggacatttgggttggttcgaagtctttgctattgtgaatagtgccgctataaacatacgtgtgc

SEQ ID NO: 75664 - DNA, 120 bp, synthetic construct
  source 1..120: mol_type = other DNA
ggaagggatccaatttcagctttctatatatggctggccagtttccccagcaccatttattaaatagggaatcctttccccattatttgtttttgtcaggtttgtcaaagatcagatagt

SEQ ID NO: 75665 - DNA, 120 bp, synthetic construct
  source 1..120: mol_type = other DNA
tgatcatggtggataagcttcttgacgtgctgctggattcggtttgccagtattttattgaggatttttgcatcaatgttcatcaaggatattggtctaaaattctcttttttggttgtg

SEQ ID NO: 75666 - DNA, 120 bp, synthetic construct
  source 1..120: mol_type = other DNA
tgaattgatccctttacaattatgtaatggccttctttgtctcttttgatcgttgttggtttaaagtctgttttatcagagactaggattgcaacccctgcctttttttgttttccattt

SEQ ID NO: 75667 - DNA, 120 bp, synthetic construct; identical to SEQ ID NO: 24955
  source 1..120: mol_type = other DNA

SEQ ID NO: 75668 - DNA, 120 bp, synthetic construct; identical to SEQ ID NO: 24956
  source 1..120: mol_type = other DNA

SEQ ID NO: 75669 - DNA, 120 bp, synthetic construct; identical to SEQ ID NO: 24957
  source 1..120: mol_type = other DNA

SEQ ID NO: 75670 - DNA, 120 bp, synthetic construct; identical to SEQ ID NO: 24958
  source 1..120: mol_type = other DNA

SEQ ID NO: 75671 - DNA, 120 bp, synthetic construct
  source 1..120: mol_type = other DNA
actgcactactgcattctagcctgagtgacaaagcaagaccctgtcttaaaatacgatacgatacgatacgatacgatacgatacgatacgatacgatacgatacgatacgatacgatac

SEQ ID NO: 75672 - DNA, 120 bp, synthetic construct
  source 1..120: mol_type = other DNA
caactatgtggtcaattttggaataagtgcgacgtggtgctgagaagaatgattattctgttgatttggggtggagagttctgtagatgtctattaggtccacttggtgcagagctgagt

SEQ ID NO: 75673 - DNA, 120 bp, synthetic construct
  source 1..120: mol_type = other DNA
tttctttaagaatgttgaatattggcccccactctcttctggcttgtagagtttctgccaagagatccgctcttagtctgatgagcttccctttgtgggtaacccgatctttctctctgg

SEQ ID NO: 75674 - DNA, 120 bp, synthetic construct; identical to SEQ ID NO: 25874
  source 1..120: mol_type = other DNA

SEQ ID NO: 75675 - DNA, 120 bp, synthetic construct
  source 1..120: mol_type = other DNA
cagggtttcgccgtgttggctgggctggtctccagctcctaccgcgagtgatctgccagcccgggcctcccgaggtgccgggattgcagacagagtctcactcactgagtgctcaatgtt

SEQ ID NO: 75676 - DNA, 120 bp, synthetic construct
  source 1..120: mol_type = other DNA
agaagtagacataggagactccattttgttctgtactaggaaaaattcttctgccttgggatgctgttaatctataaccttacccccaaccccgtgctctctgaaacatgtgctgtgtcc

SEQ ID NO: 75677 - DNA, 120 bp, synthetic construct
  source 1..120: mol_type = other DNA
tgtgagcccaggaggctgcagtgagctgtgttcacactactgcactccagcctgggtgacagagtgagaccctgtctcaaaaaaaatacatatatattatacatatatggtatatatata

SEQ ID NO: 75678 - DNA, 120 bp, synthetic construct; identical to SEQ ID NO: 25872
  source 1..120: mol_type = other DNA

SEQ ID NO: 75679 - DNA, 120 bp, synthetic construct
  source 1..120: mol_type = other DNA
tgcctgattctcctgcctcagtctgccgagcgccgccacgcctgactggttttggtggagacagggtttcgctgtgttggccgggccggtctccagcccctaaccgcgagtgatccgcca

SEQ ID NO: 75680 - DNA, 120 bp, synthetic construct
  source 1..120: mol_type = other DNA
ggcggggaaaagattgagaaatcggatggttgccgtgtctgtgtagaaagaagtagacatgggagacttttcattttgttctgcactaagaaaaattcctctgtcttgggatcctgttga

SEQ ID NO: 75681 - DNA, 120 bp, synthetic construct; identical to SEQ ID NO: 25866
  source 1..120: mol_type = other DNA

SEQ ID NO: 75682 - DNA, 120 bp, synthetic construct; identical to SEQ ID NO: 25867
  source 1..120: mol_type = other DNA

SEQ ID NO: 75683 - DNA, 120 bp, synthetic construct
  source 1..120: mol_type = other DNA
caccaaaccactacaccgtattttatttctgtataaaatattattgaaaatgttggctgggcatggtgacgcatgcctgtaatcccagcaatttgagaggctgaggtgggaggatcactt

SEQ ID NO: 75684 - DNA, 120 bp, synthetic construct; identical to SEQ ID NO: 25868
  source 1..120: mol_type = other DNA

SEQ ID NO: 75685 - DNA, 120 bp, synthetic construct; identical to SEQ ID NO: 25869
  source 1..120: mol_type = other DNA

SEQ ID NO: 75686 - DNA, 120 bp, synthetic construct
  source 1..120: mol_type = other DNA
actggcattgccaacatgtttcaggtattcaggtaaataagtaatcgatcattcactaagcacctataacatatttagtaatgtcataatatatacacacacataagaatatatacacac

SEQ ID NO: 75687 - DNA, 120 bp, synthetic construct
  source 1..120: mol_type = other DNA
agctgacatcataatgacaggatcaaattcacacataacgacattaactttgaatgtaaatgggctacacagactggcaaattggataaagagtcaagacccatcagtgtgctgtattca

SEQ ID NO: 75688 - DNA, 120 bp, synthetic construct
  source 1..120: mol_type = other DNA
ctaagatcagagcagaactgaaggaaatagagacacaaaaaacccttcaaaaaattaatgaatccaggagttggttttttgaaaagatcaacaaaattattagaccactagcaagaataa

SEQ ID NO: 75689 - DNA, 120 bp, synthetic construct
  source 1..120: mol_type = other DNA
aggcattccctttgaaaactggcacaagacagggatgccctctctcaccactcttattcaacatagtgttggaagttctggccagggcaatccgtcaggagaaagaaagaaagggtattc

SEQ ID NO: 75690 - DNA, 120 bp, synthetic construct
  source 1..120: mol_type = other DNA
acaggcaacctacagaatgggagaaaatttttgcaaccaacccaaatgtccaacaacgacagactgggttaagaaaacgtggcacatacacaccatggaatactatgcagccataaaaaa

SEQ ID NO: 75691 - DNA, 120 bp, synthetic construct; identical to SEQ ID NO: 25870
  source 1..120: mol_type = other DNA

SEQ ID NO: 75692 - DNA, 120 bp, synthetic construct
  source 1..120: mol_type = other DNA
tttctaccccacccgtggtactcaacagattcagaactgttccctagagtgaataatagaaatctgcaaggaaagttttggttgtcacaaatgactgagtgctacaatgatttagtgggc

SEQ ID NO: 75693 - DNA, 120 bp, synthetic construct
  source 1..120: mol_type = other DNA
gcagaggttgcggtgagccaagatagcgccattgcactccggcctgggtaacaaaagcgaaactccatgtcaaaaaaaaaaaaagagtttaagttgcatttctgtagaagtgcttttttt

SEQ ID NO: 75694 - DNA, 120 bp, synthetic construct; identical to SEQ ID NO: 13701
  source 1..120: mol_type = other DNA

SEQ ID NO: 75695 - DNA, 120 bp, synthetic construct; identical to SEQ ID NO: 13702
  source 1..120: mol_type = other DNA

SEQ ID NO: 75696 - DNA, 120 bp, synthetic construct
  source 1..120: mol_type = other DNA
aaaaatgacataatattagtgaggtagtgaatgcttgtaatcccagttatttgtgaaatggaagtctagagctcaggagttccagtccagcctgggcaacacagtcagactccatctcta

SEQ ID NO: 75697 - DNA, 120 bp, synthetic construct
  source 1..120: mol_type = other DNA
tgacaaaattcaacaacccttcatgctaaaaactctcaataaattaggtattgatgggacgtatctcaaaataataagagctatctatgacaaacccacagccaatattataatgaatgg

SEQ ID NO: 75698 - DNA, 120 bp, synthetic construct
  source 1..120: mol_type = other DNA
cagagccctcagaaataacaccgcatacctacaactgtctgatctttgacagacctgagaaaaacaagaaatggggaaaggattccctatttaataaatggtgctgggaaaactagctag

SEQ ID NO: 75699 - DNA, 120 bp, synthetic construct
  source 1..120: mol_type = other DNA
tggactaagaaaatgtggcacatatacgccatggaatactatgcagccataaaaaatgatgagttcatgtcctttgtagggacatggatgaaactggaaatcatcattctcagtaaacta

SEQ ID NO: 75700 - DNA, 120 bp, synthetic construct
  source 1..120: mol_type = other DNA
ataaaaaatatattacaaaactcacacctgtaatctcaacattttgggaggccaaggcaggtagatcacttgaggccaggagttcaagaccagcctgatcaacatggtgaaaccctgtct

SEQ ID NO: 75701 - DNA, 120 bp, synthetic construct
  source 1..120: mol_type = other DNA
tagtttcatgtaccaagtactggcataaagtttcttaaagaatcaaagacattttaaaaaataatatgaactgccaggcgtggtggctcacacctgtaatcccagcactttgggaggctg

SEQ ID NO: 75702 - DNA, 120 bp, synthetic construct; identical to SEQ ID NO: 35186
  source 1..120: mol_type = other DNA

SEQ ID NO: 75703 - DNA, 120 bp, synthetic construct
  source 1..120: mol_type = other DNA
tattatcagcatgatatacattaggtcctcagtacttattcatcttataactgaaggatggtaccgtttaaaatctcccctttatccacaccccccagcccctggtaaccaccattctac

SEQ ID NO: 75704 - DNA, 120 bp, synthetic construct
  source 1..120: mol_type = other DNA
tactatctgctcaatttttttgtaaacctaaaacttctgaaaaataacatatgaaataaaaagtcagctgggcatggtggctcacgcctgtaatcccagcactttgggaggccgaggcag

SEQ ID NO: 75705 - DNA, 120 bp, synthetic construct
  source 1..120: mol_type = other DNA
gctaacctaaatatttttaaacggccagctactctaaaataaaaacatatctagcggcatagtataagaatatataaaaaccggccaggcgcagtggctcacgcctgtaatcccagcact

SEQ ID NO: 75706 - DNA, 120 bp, synthetic construct; identical to SEQ ID NO: 25062
  source 1..120: mol_type = other DNA

SEQ ID NO: 75707 - DNA, 120 bp, synthetic construct; identical to SEQ ID NO: 25063
  source 1..120: mol_type = other DNA

SEQ ID NO: 75708 - DNA, 120 bp, synthetic construct; identical to SEQ ID NO: 25060
  source 1..120: mol_type = other DNA

SEQ ID NO: 75709 - DNA, 120 bp, synthetic construct; identical to SEQ ID NO: 25061
  source 1..120: mol_type = other DNA

SEQ ID NO: 75710 - DNA, 120 bp, synthetic construct; identical to SEQ ID NO: 25064
  source 1..120: mol_type = other DNA

SEQ ID NO: 75711 - DNA, 120 bp, synthetic construct; identical to SEQ ID NO: 27750
  source 1..120: mol_type = other DNA

SEQ ID NO: 75712 - DNA, 120 bp, synthetic construct; identical to SEQ ID NO: 27751
  source 1..120: mol_type = other DNA

SEQ ID NO: 75713 - DNA, 120 bp, synthetic construct; identical to SEQ ID NO: 27752
  source 1..120: mol_type = other DNA

SEQ ID NO: 75714 - DNA, 120 bp, synthetic construct; identical to SEQ ID NO: 27753
  source 1..120: mol_type = other DNA

SEQ ID NO: 75715 - DNA, 120 bp, synthetic construct
  source 1..120: mol_type = other DNA
cctacttatctgacaaagggctaatatccagaatctacaatgaactcaaaaaatttacaagaaaaaaacaaacagccccatcaaaaagtggatgaaggatatgaacagacacttctcaaa

SEQ ID NO: 75716 - DNA, 120 bp, synthetic construct; identical to SEQ ID NO: 14318
  source 1..120: mol_type = other DNA

SEQ ID NO: 75717 - DNA, 120 bp, synthetic construct
  source 1..120: mol_type = other DNA
actgacccccccacctccctcccggacggggcagctggccgggcaggggggctgacccccccacctccctcctggatggggtggctggccgggcagaggggctcctcacttcccagtagg

SEQ ID NO: 75718 - DNA, 120 bp, synthetic construct
  source 1..120: mol_type = other DNA
tcgctccccacatctcagacgatgggcggccgggcagagacgctcctcacttcctagatgggatggcggccaggaagaggcgctcctcacttcctagatgggatggcggcggggcagaga

SEQ ID NO: 75719 - DNA, 120 bp, synthetic construct
  source 1..120: mol_type = other DNA
tgcacattgattttgtatcctgagaatttgctgaagttgcctttcaccttatggagattttgggctgagacgatggggttttctagataaacaatcatgtcatctacaaacagggaccat

SEQ ID NO: 75720 - DNA, 120 bp, synthetic construct; identical to SEQ ID NO: 14319
  source 1..120: mol_type = other DNA

SEQ ID NO: 75721 - DNA, 120 bp, synthetic construct
  source 1..120: mol_type = other DNA
aatgggcaaaaactggaagcattccctttgagaactggaataagacagggatgccctctctcaccactcctattcaacatagtgttggaagttctggccagggcaatcaggcaggagaaa

SEQ ID NO: 75722 - DNA, 120 bp, synthetic construct
  source 1..120: mol_type = other DNA
aggattttatgaactttgttttaggtggtgggagcctaaaaaagccggtgttaaggtttctggagaattgtatgaagacgagggttaagattcttggggccaaggagtctgtgatttcct

SEQ ID NO: 75723 - DNA, 120 bp, synthetic construct; identical to SEQ ID NO: 7950
  source 1..120: mol_type = other DNA

SEQ ID NO: 75724 - DNA, 120 bp, synthetic construct; identical to SEQ ID NO: 12974
  source 1..120: mol_type = other DNA

SEQ ID NO: 75725 - DNA, 120 bp, synthetic construct
  source 1..120: mol_type = other DNA
agcacctgttgtttcctgaccttttaatgatcgccattctaactggtgtgagatggtatctcattgtggttttgatttgcatttctctgatggccagtgatgatgagcattttttcatgt

SEQ ID NO: 75726 - DNA, 120 bp, synthetic construct; identical to SEQ ID NO: 12975
  source 1..120: mol_type = other DNA

SEQ ID NO: 75727 - DNA, 120 bp, synthetic construct; identical to SEQ ID NO: 10914
  source 1..120: mol_type = other DNA

SEQ ID NO: 75728 - DNA, 120 bp, synthetic construct; identical to SEQ ID NO: 25744
  source 1..120: mol_type = other DNA

SEQ ID NO: 75729 - DNA, 120 bp, synthetic construct
  source 1..120: mol_type = other DNA
gcaatcaggcaggataaataaataaagggcattcaattaggaaaagaggaagtctaattgtccctgtttgcagatgacatcattgtatatctagaaaaccccatcgtctcagcccaaaat

SEQ ID NO: 75730 - DNA, 120 bp, synthetic construct
  source 1..120: mol_type = other DNA
ccaccttgttacagaagagtatttattcccattacactaagaagaggtgatctcattgttcaattcccacctatgagtgagaatatgcggtgtttgaaggggaatatcacactctgggga

SEQ ID NO: 75731 - DNA, 120 bp, synthetic construct; identical to SEQ ID NO: 10860
  source 1..120: mol_type = other DNA

SEQ ID NO: 75732 - DNA, 120 bp, synthetic construct; identical to SEQ ID NO: 10861
  source 1..120: mol_type = other DNA

SEQ ID NO: 75733 - DNA, 120 bp, synthetic construct
  source 1..120: mol_type = other DNA
gacttctgtcttatatctttttgaaatgagatggagtatgactttattttgtatttttatttttttgtttttttattattatactttaagttttagggtacatgtgcacaatgtgcaggt

SEQ ID NO: 75734 - DNA, 120 bp, synthetic construct
  source 1..120: mol_type = other DNA
gttttgctgtgcagaagctcttgagtttaatgagatcccattagtcaattttggcttttgttgccattgcttttggtgttttagacatgaagtccttgcccatgcctatgtcctgaatgg

SEQ ID NO: 75735 - DNA, 120 bp, synthetic construct
  source 1..120: mol_type = other DNA
cttaaggagattttgggctgagacagtggggttttctagatatacaatcatgtcatctgcaaacagggacaatttgacttcctcttttcctcattgaataccctttatttgcttctcctg

SEQ ID NO: 75736 - DNA, 120 bp, synthetic construct
  source 1..120: mol_type = other DNA
accagctcctggattcattaattttttaaagggttttttgagtctctatttccttcagttctgctctgattttagttatttcttgccttctgctagcttttgaatgtgtttgctcttgct

SEQ ID NO: 75737 - DNA, 120 bp, synthetic construct
  source 1..120: mol_type = other DNA
gtttaaaatctgttttatcagagactaggactgcaacccctgcctttttttgttttccatttgcttggtagatcttcctccatccttttattttgagcctatgtgtgtctctgcacgtga

SEQ ID NO: 75738 - DNA, 120 bp, synthetic construct
  source 1..120: mol_type = other DNA
cttctcgcttcatttcattcatttcatcttccatcactgataccctttcttccatttgattgcattggctcctgaggcttctgcattcttcacgtagttctcaatccttggctttcagct

SEQ ID NO: 75739 - DNA, 120 bp, synthetic construct
  source 1..120: mol_type = other DNA
aaaaagggaagcatgttggcaaaggataggcccctttcagattttgtagggaagtgacaataatgactcaaatattattttctctgtgtgtgtgtctgcaaggctgctttgaaggcactg

SEQ ID NO: 75740 - DNA, 120 bp, synthetic construct; identical to SEQ ID NO: 10862
  source 1..120: mol_type = other DNA

SEQ ID NO: 75741 - DNA, 120 bp, synthetic construct
  source 1..120: mol_type = other DNA
tccatgagcttggaatgttcttccatttgtttgtatcctcttttatttccttgagcagtggtttgtagttctccttgaagaggtccttcacatcccttgtaagttggattcctaggtatt

SEQ ID NO: 75742 - DNA, 120 bp, synthetic construct
  source 1..120: mol_type = other DNA
cctgtttttggtctattaagagattcaacttctttctggtttagtcttgggagggtgtatgtgtcaaggaatttatctatttcttctagattttctagtttatttgcgtagaggtgttta

SEQ ID NO: 75743 - DNA, 120 bp, synthetic construct
  source 1..120: mol_type = other DNA
tgactttctgtctcgttgatctgtctaatgttgacagtggggtgttaaagtctcccattattaatgtgtgggagtctaagtctctttgtaggtcactcaggacttgctatatgaatctgg

SEQ ID NO: 75744 - DNA, 120 bp, synthetic construct
  source 1..120: mol_type = other DNA
acgtagatttggtcttttcacatagtcccatatttcttggaggctttgttcatttctttttattcttttttctctaaacttctcttctcgcttcatttcattcatttcatcttccatcac

SEQ ID NO: 75745 - DNA, 120 bp, synthetic construct; identical to SEQ ID NO: 10863
  source 1..120: mol_type = other DNA

SEQ ID NO: 75746 - DNA, 120 bp, synthetic construct
  source 1..120: mol_type = other DNA
caaaactgctcaactacatggaaactgaacaacctgctcctgaataactactgggtacttaacgaaatgaaggcagaaataaagatgttctttgaaaccaatgagaacaaagacacaaca

SEQ ID NO: 75747 - DNA, 120 bp, synthetic construct
  source 1..120: mol_type = other DNA
taaaaagaaccaaagacaaaaaccacatgattatctcaatagatgcagaaaaggcgtttgacaaaattcaacaacccttcatgctaaaaactctcaataaattaggtattgatgggacgt

SEQ ID NO: 75748 - DNA, 120 bp, synthetic construct
  source 1..120: mol_type = other DNA
aacaatggagaaaggattccctatttaataaatggtgctgggaaaactggctagccatatgtagaaagctgaaactggatcccttccttacaccttatacaaaaattaattcaagatgga

SEQ ID NO: 75749 - DNA, 120 bp, synthetic construct; identical to SEQ ID NO: 10864
  source 1..120: mol_type = other DNA

SEQ ID NO: 75750 - DNA, 120 bp, synthetic construct; identical to SEQ ID NO: 10865
  source 1..120: mol_type = other DNA

SEQ ID NO: 75751 - DNA, 120 bp, synthetic construct; identical to SEQ ID NO: 10866
  source 1..120: mol_type = other DNA

SEQ ID NO: 75752 - DNA, 120 bp, synthetic construct; identical to SEQ ID NO: 3503
  source 1..120: mol_type = other DNA

SEQ ID NO: 75753 - DNA, 120 bp, synthetic construct
  source 1..120: mol_type = other DNA
aaattcatattctaacttaatgttcattatttgccataatgtgccttagtacattaagaccatattatataagagctatgacaaacccacagccaatatcatactgaatgggcaaaaact

SEQ ID NO: 75754 - DNA, 120 bp, synthetic construct
  source 1..120: mol_type = other DNA
ttatacaaaaatcaattcaagatggattaaagacttaaacgttagacctaaaaccagaaaaaccctagaagaaaacctaggcattaccattcaggacataggcatgggcaaggacttcat

SEQ ID NO: 75755 - DNA, 120 bp, synthetic construct
  source 1..120: mol_type = other DNA
gggaacatcacactctggggactgttgtggggtaaggggagcgaggagggatagcattaggagatatatctaatgctaaatgacgagttaatgggtgcagcacaccagcatggcacttgt

SEQ ID NO: 75756 - DNA, 120 bp, synthetic construct
  source 1..120: mol_type = other DNA
atttcatatatatttttactgaactttcaccccttaaattgtggtatcactggtaaagtggggaaaaaaaaaaggaacaacatctcatatcagaaacacaaaaaggccctcttgttccct

SEQ ID NO: 75757 - DNA, 120 bp, synthetic construct
  source 1..120: mol_type = other DNA
ttatttatttatttattttttgagacagagtttcactcgtcacccaggctagaatacaatcgtgcaatcttggctcactgtaacctccaccttcctggttcaagtgattctcctgcctca

SEQ ID NO: 75758 - DNA, 120 bp, synthetic construct
  source 1..120: mol_type = other DNA
atctgaagcacaccttagagtcatttcatttaagagtcactctgtgaagaattaatattggagttccctaaatattggccaatcaacctgcttttctttgttaacagtgattgtgaatat

SEQ ID NO: 75759 - DNA, 120 bp, synthetic construct
  source 1..120: mol_type = other DNA
tcaccctaaattaaagatacctctcaatttcttctctctcctgggccattacaccaaacctagagcagaactatacccaccttcagggcagaagaaacaacgtaatagcttattgatctc

SEQ ID NO: 75760 - DNA, 120 bp, synthetic construct
  source 1..120: mol_type = other DNA
acagtcttcagccttctcttaacccgaaaggagttatctctaacccgatccatcgactggaataaagtaacagtgaccacagcggcggacgaggatggatgaaattacaattgaactagg

SEQ ID NO: 75761 - DNA, 120 bp, synthetic construct
  source 1..120: mol_type = other DNA
ggaaaagcaagagcaacgcagacctccaccgcggagactcttttgtgctccagcgacaggccataaccacagcagatggagagagagaggaggagacggaggaggagggaggagaagctg

SEQ ID NO: 75762 - DNA, 120 bp, synthetic construct
  source 1..120: mol_type = other DNA
agggtagatatattgaaaggaggattcgcccatcacgctgcagtttccctaaagctcttttctcactcccagcaaatgggagtcctcctttacttagatccccagaacacttttctaagt

SEQ ID NO: 75763 - DNA, 120 bp, synthetic construct
  source 1..120: mol_type = other DNA
aaaagcaaccagcactccaaaaatgttttccattcttgttggaaagaagcaacttcagtgtttttcactaaacaaattgcagttgtctttcctaattttgggattctaaactctactttc

SEQ ID NO: 75764 - DNA, 120 bp, synthetic construct
  source 1..120: mol_type = other DNA
aggtactcaacgttactccctttctctcacctaatctacctagctggccatctgggctgatacatcaaattgttcatctgtgagaaagcactttgaaatccagaaaactatagctatgca

SEQ ID NO: 75765 - DNA, 120 bp, synthetic construct
  source 1..120: mol_type = other DNA
aggctagcaaatgagatccatcaatctaggtaacttctaaaccagttcactagcacatttattgtggttaaatattctgggctgtgacagcatacccaccattgtaccaagtagtcaaat

SEQ ID NO: 75766 - DNA, 120 bp, synthetic construct
  source 1..120: mol_type = other DNA
cacttcaaacctgtgctgttcaagggtcaactctatagtatactgtaacagataaaggctgacatggtttggattcatgacccgcccaaacctcatgtccagttgtaatccccagtgttg

SEQ ID NO: 75767 - DNA, 120 bp, synthetic construct
  source 1..120: mol_type = other DNA
caaaaattaattcaagatggattaaagacttaaatgttagacctaaaaccataaaaaccctagacgaaaacctaggcaatagcattcaggacataggcatgggcaaggacttcatgtcta

SEQ ID NO: 75768 - DNA, 120 bp, synthetic construct
  source 1..120: mol_type = other DNA
ataatttttttttcttttttttttttttttttgagatggagtgttgttctgtcgcccagggtggagtgcaatggcttggcatcagctcactgcaacctccgcctcccaggttcaagcgat

SEQ ID NO: 75769 - DNA, 120 bp, synthetic construct
  source 1..120: mol_type = other DNA
gcttgctaatgttgtgtaaaaattttatgtctatgtttataaaggctatttgccattgttactattattaaaattatttgcaatgtctctgtcagatcttggtattagggttatactggc

SEQ ID NO: 75770 - DNA, 120 bp, synthetic construct; identical to SEQ ID NO: 21621
  source 1..120: mol_type = other DNA

SEQ ID NO: 75771 - DNA, 120 bp, synthetic construct
  source 1..120: mol_type = other DNA
gccctttgtcagatgagtaggttgcaaaatttttctcccattttgtaggttgcctgttcactctgatggtagtttcttttgctgtgcagaagctctttagtttaattagatcccatttgt

SEQ ID NO: 75772 - DNA, 120 bp, synthetic construct; identical to SEQ ID NO: 21622
  source 1..120: mol_type = other DNA

SEQ ID NO: 75773 - DNA, 120 bp, synthetic construct
  source 1..120: mol_type = other DNA
tgagatggtatctcattgtggttctgatttgcatttctctgatggccagtgatgatgagcgttttttcatgtgttttttggctgcataaatgtcttcttttgagaagtgtctgttcatat

SEQ ID NO: 75774 - DNA, 120 bp, synthetic construct
  source 1..120: mol_type = other DNA
tctataaattaccttgggcagtatggccattttcacgatattgattcttcttacccatgagcatggaatgttcttccatttgtttgtatcctcttttatttcattgagcagtggtttgta

SEQ ID NO: 75775 - DNA, 120 bp, synthetic construct; identical to SEQ ID NO: 21623
  source 1..120: mol_type = other DNA

SEQ ID NO: 75776 - DNA, 120 bp, synthetic construct; identical to SEQ ID NO: 21624
  source 1..120: mol_type = other DNA

SEQ ID NO: 75777 - DNA, 120 bp, synthetic construct
  source 1..120: mol_type = other DNA
ttagcaagaaatgtgtttattcttctagtttttatatctgtcacaagtgaggtatactgaatactttttttcttaagaaggggccgggcgcggtggctcacgcctgtaatcccagcactt

SEQ ID NO: 75778 - DNA, 120 bp, synthetic construct; identical to SEQ ID NO: 21626
  source 1..120: mol_type = other DNA

SEQ ID NO: 75779 - DNA, 120 bp, synthetic construct; identical to SEQ ID NO: 21627
  source 1..120: mol_type = other DNA

SEQ ID NO: 75780 - DNA, 120 bp, synthetic construct; identical to SEQ ID NO: 21628
  source 1..120: mol_type = other DNA

SEQ ID NO: 75781 - DNA, 120 bp, synthetic construct; identical to SEQ ID NO: 21629
  source 1..120: mol_type = other DNA

SEQ ID NO: 75782 - DNA, 120 bp, synthetic construct
  source 1..120: mol_type = other DNA
aagatccacctaccacctcaggtcctcagaccaaccagcccaagaaacatctcaccaatttcaaatctggaaagcagcctctttttactctcttctccaacctccctcactatccctcaa

SEQ ID NO: 75783 - DNA, 120 bp, synthetic construct; identical to SEQ ID NO: 21630
  source 1..120: mol_type = other DNA

SEQ ID NO: 75784 - DNA, 120 bp, synthetic construct; identical to SEQ ID NO: 21631
  source 1..120: mol_type = other DNA

SEQ ID NO: 75785 - DNA, 120 bp, synthetic construct; identical to SEQ ID NO: 21632
  source 1..120: mol_type = other DNA

SEQ ID NO: 75786 - DNA, 120 bp, synthetic construct; identical to SEQ ID NO: 21633
  source 1..120: mol_type = other DNA

SEQ ID NO: 75787 - DNA, 120 bp, synthetic construct
  source 1..120: mol_type = other DNA
ctgcccaaggtaatttacagattcaatgccatccccatcaagctaccaatgactttcttcacagaattggaaaaaactactttaatgttcatatggaaccaaaaaagagcctgcatcgcc

SEQ ID NO: 75788 - DNA, 120 bp, synthetic construct
  source 1..120: mol_type = other DNA
attgcggcattattcacaatagcaaagacttggaaccaacccaaatgtccaacaatgatagactggattaagaaaatgtggcacatatacaccatggaatactatgcagccttaaaaaat

SEQ ID NO: 75789 - DNA, 120 bp, synthetic construct; identical to SEQ ID NO: 21634
  source 1..120: mol_type = other DNA

SEQ ID NO: 75790 - DNA, 120 bp, synthetic construct; identical to SEQ ID NO: 21635
  source 1..120: mol_type = other DNA

SEQ ID NO: 75791 - DNA, 120 bp, synthetic construct
  source 1..120: mol_type = other DNA
atctggcagtgttagaaaataagaaagcgctcaaaaaaggttgaagatatgtcaaagggtagaggaggcaaactgaaagagctcccagtggccaaaggtggaacaatttgagtgagaaaa

SEQ ID NO: 75792 - DNA, 120 bp, synthetic construct; identical to SEQ ID NO: 21615
  source 1..120: mol_type = other DNA

SEQ ID NO: 75793 - DNA, 120 bp, synthetic construct
  source 1..120: mol_type = other DNA
gaccactgaagcacagcatcacagggagacaggcctccggataactgcgggcgagcctgactgatgtcaggccctccacaagaggtggaggagcagagtcttctctaaactcccccaggg

SEQ ID NO: 75794 - DNA, 120 bp, synthetic construct
  source 1..120: mol_type = other DNA
caactgtgaatgggagttcactcacgatttggctctctgtctgttattggtgtataagaatgcttgtgatttttgtacattgattttgtatcctgagactttgctgaagttgcttatcag

SEQ ID NO: 75795 - DNA, 120 bp, synthetic construct; identical to SEQ ID NO: 21616
  source 1..120: mol_type = other DNA

SEQ ID NO: 75796 - DNA, 120 bp, synthetic construct
  source 1..120: mol_type = other DNA
tgaaattggaaatcatcattctcagcaaactatcgcaaggacaaaatcaaacaccgcatgttctcactcatagatgggaattgaacaatgagaacacatggacacaggaaggggaacatc

SEQ ID NO: 75797 - DNA, 120 bp, synthetic construct
  source 1..120: mol_type = other DNA
tattacaatgaaaaataaatcttggaaaggatattcaagaagataaaaatgaattcagtcttaagattcaatgccatccccatcaagctaccaacgcctttcttcacagaattggaaaaa

SEQ ID NO: 75798 - DNA, 120 bp, synthetic construct
  source 1..120: mol_type = other DNA
actgggtatatacccaaaggactataaatcatgctgctataaagacacaggcacacgtatgtttattgcagcattattcatgatagcaaagacttggaaccaacccaaatgtccaacaat

SEQ ID NO: 75799 - DNA, 120 bp, synthetic construct; identical to SEQ ID NO: 21618
  source 1..120: mol_type = other DNA

SEQ ID NO: 75800 - DNA, 120 bp, synthetic construct
  source 1..120: mol_type = other DNA
caataaaaaatgataaaggggatatcaccaccgatcccacagaactacaaactaccatcagagaatactacaaacacctctacgcaaataaactagaaaatctagaagaaatggataaat

SEQ ID NO: 75801 - DNA, 120 bp, synthetic construct
  source 1..120: mol_type = other DNA
aaaatctccttaagctgacaagaaacttcagcaaagtctcaggatacaaaatcaatgtacaaaaagcacaagcattcttatacaccaataacagacaaacagagagccaaatcatgagtg

SEQ ID NO: 75802 - DNA, 120 bp, synthetic construct
  source 1..120: mol_type = other DNA
ggattacaggcgtgagccaccgcgcccggcctctctttcttaaataaaagcttgttatggagtagagccatgttttatgtttcttgcattttccccccaatttattatactgaaagtttt

SEQ ID NO: 75803 - DNA, 120 bp, synthetic construct; identical to SEQ ID NO: 21620
  source 1..120: mol_type = other DNA

SEQ ID NO: 75804 - DNA, 120 bp, synthetic construct; identical to SEQ ID NO: 21779
  source 1..120: mol_type = other DNA

SEQ ID NO: 75805 - DNA, 120 bp, synthetic construct
  source 1..120: mol_type = other DNA
gagcagtggttctcccagcacgcagctggagatctgagaacgggcagacagactgcctcctcaagtgggtccctgactcctgacccccgagcagcctaactgggaggcaccccccagcag

SEQ ID NO: 75806 - DNA, 120 bp, synthetic construct
  source 1..120: mol_type = other DNA
ggtcgggttaccctcaaaggaaagcccatcagactaacagcggatctcttggcagaaaccctacaagccagaagagagtgggggccaatattcaacattcttaaagaaaagaattttcaa

SEQ ID NO: 75807 - DNA, 120 bp, synthetic construct
  source 1..120: mol_type = other DNA
ttgaactcagctctgcaccaagcagacctaatagacatctacagaactctccaccccaaatcaacagaatatacatttttttcagcaccacaccacacctgttccaaaattgaccacata

SEQ ID NO: 75808 - DNA, 120 bp, synthetic construct
  source 1..120: mol_type = other DNA
cagagacacaaccaaaaaagagaattttagaccaatatccttgatgaacattgatgcaaaaatcctcaataaaatactggcaaaccgaatccagcagcaaatcaaaaagcttatccacca

SEQ ID NO: 75809 - DNA, 120 bp, synthetic construct
  source 1..120: mol_type = other DNA
gagacaaacaaatggaagaacattccatgctcatgggtaggaagaatcaatatcgtgaaaatggccatactgcccaaggtaatttacagattcaatgccatccccatcaagctaccaatg

SEQ ID NO: 75810 - DNA, 120 bp, synthetic construct
  source 1..120: mol_type = other DNA
cagggatctagaactagaaataccatttgacccagccatcccattactgggtatatacccaaatgagtataaatcatgctgctataaagacacatgcacacgtatgtttattgtggcact

SEQ ID NO: 75811 - DNA, 120 bp, synthetic construct; identical to SEQ ID NO: 21780
  source 1..120: mol_type = other DNA

SEQ ID NO: 75812 - DNA, 120 bp, synthetic construct
  source 1..120: mol_type = other DNA
gcagccctgagaaacactgcgcattatctctccatgccacccccccaaaaatttttttctttgccccaacacttcaatactattttatgttatttttcttattaatataagaaggcagga

SEQ ID NO: 75813 - DNA, 120 bp, synthetic construct
  source 1..120: mol_type = other DNA
acttcagcctgggcaacaagagcgaatttccatctcaaaaaaaaaaagtaagagtagaactacaggcacagctccagtgatgtgttggtgcatcccaagatgtacaaggaatcaattgca

SEQ ID NO: 75814 - DNA, 120 bp, synthetic construct; identical to SEQ ID NO: 21778
  source 1..120: mol_type = other DNA

SEQ ID NO: 75815 - DNA, 120 bp, synthetic construct; identical to SEQ ID NO: 21781
  source 1..120: mol_type = other DNA

SEQ ID NO: 75816 - DNA, 120 bp, synthetic construct
  source 1..120: mol_type = other DNA
cacaattgcttcaaagagaataaaatacctaggaatccaacttacaagggatgtgaaggacctcttcaagaagaactacaaaccactgctcaatgaaataaaagaggatacaaacaaatg

SEQ ID NO: 75817 - DNA, 120 bp, synthetic construct
  source 1..120: mol_type = other DNA
gaacagacacttctcaaaagaagacatttatgcagccaaaaaacacatgaaaaaatgctcaccatcactggccatcagagaaatgcaaatcaaaaccacaatgagataccatttcacacc

SEQ ID NO: 75818 - DNA, 120 bp, synthetic construct
  source 1..120: mol_type = other DNA
tttgttaccattgcttttggtgttttagacatgaagtccttgcccatgtctatgtcctgaatggtattgcctaggttttcttctagggtttttatggttttaggtctgacatttaagtct

SEQ ID NO: 75819 - DNA, 120 bp, synthetic construct
  source 1..120: mol_type = other DNA
aggtctctaaggacttgctttatgaatctgggtgctcctgtattgggtgcatatatatttaggatagttagctcttcttgttgactggatccctttaccattacgtaatggccttctttg

SEQ ID NO: 75820 - DNA, 120 bp, synthetic construct; identical to SEQ ID NO: 21782
  source 1..120: mol_type = other DNA

SEQ ID NO: 75821 - DNA, 120 bp, synthetic construct
  source 1..120: mol_type = other DNA
cctactgggaagtgaggagcccctctgccgggccagccaccccgtccgggagggaggtggggggctcagccccctcccggccagccgacccatccgggagggaggtggggggatcagcac

SEQ ID NO: 75822 - DNA, 120 bp, synthetic construct; identical to SEQ ID NO: 11875
  source 1..120: mol_type = other DNA

SEQ ID NO: 75823 - DNA, 120 bp, synthetic construct
  source 1..120: mol_type = other DNA
ggcggctggccgggcagaggggctcctcacttcccagtaggggcggccaggcagaggcgcccctcacctcccggattgtcttgttttttgagatgtcatctcactctgctacagggacgc

SEQ ID NO: 75824 - DNA, 120 bp, synthetic construct; identical to SEQ ID NO: 12023
  source 1..120: mol_type = other DNA

SEQ ID NO: 75825 - DNA, 120 bp, synthetic construct; identical to SEQ ID NO: 12024
  source 1..120: mol_type = other DNA

SEQ ID NO: 75826 - DNA, 120 bp, synthetic construct; identical to SEQ ID NO: 3304
  source 1..120: mol_type = other DNA

SEQ ID NO: 75827 - DNA, 120 bp, synthetic construct; identical to SEQ ID NO: 12026
  source 1..120: mol_type = other DNA

SEQ ID NO: 75828 - DNA, 120 bp, synthetic construct; identical to SEQ ID NO: 12027
  source 1..120: mol_type = other DNA

SEQ ID NO: 75829 - DNA, 120 bp, synthetic construct; identical to SEQ ID NO: 7623
  source 1..120: mol_type = other DNA

SEQ ID NO: 75830 - DNA, 120 bp, synthetic construct; identical to SEQ ID NO: 7624
  source 1..120: mol_type = other DNA

SEQ ID NO: 75831 - DNA, 120 bp, synthetic construct; identical to SEQ ID NO: 25208
  source 1..120: mol_type = other DNA

SEQ ID NO: 75832 - DNA, 120 bp, synthetic construct
  source 1..120: mol_type = other DNA
caacctgtaatcccagtagtttgggaggctgagacaggagcatcacttgagcccagatcaagacctgcctgggcaacatagtaaaaccccgtctctacaaaaaaaataaaaataaaaaaa

SEQ ID NO: 75833 - DNA, 120 bp, synthetic construct; identical to SEQ ID NO: 25209
  source 1..120: mol_type = other DNA

SEQ ID NO: 75834 - DNA, 120 bp, synthetic construct; identical to SEQ ID NO: 25210
  source 1..120: mol_type = other DNA

SEQ ID NO: 75835 - DNA, 120 bp, synthetic construct; identical to SEQ ID NO: 10818
  source 1..120: mol_type = other DNA

SEQ ID NO: 75836 - DNA, 120 bp, synthetic construct
  source 1..120: mol_type = other DNA
caacagagctagactctgtttcaaaaaaaaaaaaagaaagaatcacagtcagaaagagggagtggggggaaagattagcgctttctcttggagcaggtgaaaagacggctggagaagttc

SEQ ID NO: 75837 - DNA, 120 bp, synthetic construct
  source 1..120: mol_type = other DNA
cccttatagcttgtgacccctgaatttttattcattcaatccacaattattgagaatgtgctatgtgccaggccttgtgctgtgttttggggacatttaaagcaatcagaggctgggcat

SEQ ID NO: 75838 - DNA, 120 bp, synthetic construct; identical to SEQ ID NO: 11386
  source 1..120: mol_type = other DNA

SEQ ID NO: 75839 - DNA, 120 bp, synthetic construct; identical to SEQ ID NO: 11387
  source 1..120: mol_type = other DNA

SEQ ID NO: 75840 - DNA, 120 bp, synthetic construct; identical to SEQ ID NO: 11388
  source 1..120: mol_type = other DNA

SEQ ID NO: 75841 - DNA, 120 bp, synthetic construct; identical to SEQ ID NO: 11389
  source 1..120: mol_type = other DNA

SEQ ID NO: 75842 - DNA, 120 bp, synthetic construct; identical to SEQ ID NO: 11390
  source 1..120: mol_type = other DNA

SEQ ID NO: 75843 - DNA, 120 bp, synthetic construct; identical to SEQ ID NO: 11391
  source 1..120: mol_type = other DNA

SEQ ID NO: 75844 - DNA, 120 bp, synthetic construct; identical to SEQ ID NO: 11392
  source 1..120: mol_type = other DNA

SEQ ID NO: 75845 - DNA, 120 bp, synthetic construct; identical to SEQ ID NO: 11393
  source 1..120: mol_type = other DNA

SEQ ID NO: 75846 - DNA, 120 bp, synthetic construct
  source 1..120: mol_type = other DNA
gcttacatctacctccacacccacactcacacccacccacacttacacccacccacacttacacccacccttacatctacctccacactcgcacttacacccacacttaaatctacctcc

SEQ ID NO: 75847 - DNA, 120 bp, synthetic construct
  source 1..120: mol_type = other DNA
tatttctgagggctctgttctgttccattggtctatagctctgttttggtaccagtaccatgctgttttggttactatatccttgtattatagtttgaagtcaggtagcatgatgcctcc

SEQ ID NO: 75848 - DNA, 120 bp, synthetic construct
  source 1..120: mol_type = other DNA
ccgaatccagcagcacatcaagaagcttatccaccatgatcaagtgggcttcatccctgggatgcaaggctggttcaatatatgcaaatcaataaatgtaatccagcatataaaaagaac

SEQ ID NO: 75849 - DNA, 120 bp, synthetic construct
  source 1..120: mol_type = other DNA
ggaggttgcagtgagctgagatcacaccactgcactccagcttgggcgaaagagcaagactccatctcaaaaaaaatagaaaaaaaagtctagttgacttttatctacttcttctcatat

SEQ ID NO: 75850 - DNA, 120 bp, synthetic construct; identical to SEQ ID NO: 16535
  source 1..120: mol_type = other DNA

SEQ ID NO: 75851 - DNA, 120 bp, synthetic construct
  source 1..120: mol_type = other DNA
ttccatgtgtgattatttactcttgtggcactgagaggtttgtacatatctttaagccagatagtttggctcattccccaggctggagtgcaatggtgctatcgtggctccctgcaacct

SEQ ID NO: 75852 - DNA, 120 bp, synthetic construct
  source 1..120: mol_type = other DNA
tgaggcaggagaatcgcttgaacctgggaagtggaggttgccgtgagccgagatcgcgtcattgcactccagcctggcaacaagagggaaactccgtctcaaaagaaaagaaaaaaaaat

SEQ ID NO: 75853 - DNA, 120 bp, synthetic construct; identical to SEQ ID NO: 18411
  source 1..120: mol_type = other DNA

SEQ ID NO: 75854 - DNA, 120 bp, synthetic construct; identical to SEQ ID NO: 18412
  source 1..120: mol_type = other DNA

SEQ ID NO: 75855 - DNA, 120 bp, synthetic construct
  source 1..120: mol_type = other DNA
ccaccttggcctcccaaagtgctgagattacaggcgtgagctaccacccccagcctacagttcatcttgtgccctaatctatttcactctctacatgagcaaagtgggagatcactgtca

SEQ ID NO: 75856 - DNA, 120 bp, synthetic construct
  source 1..120: mol_type = other DNA
tgcagttgtgtcttttgtattattgttttctataaaatgttctgaaggagcagatacttccagaaaaggattttcttgaggactcaggtctcttaaggatgaaaaagccccttgtgaagg

SEQ ID NO: 75857 - DNA, 120 bp, synthetic construct; identical to SEQ ID NO: 18414
  source 1..120: mol_type = other DNA

SEQ ID NO: 75858 - DNA, 120 bp, synthetic construct; identical to SEQ ID NO: 18415
  source 1..120: mol_type = other DNA

SEQ ID NO: 75859 - DNA, 120 bp, synthetic construct; identical to SEQ ID NO: 18416
  source 1..120: mol_type = other DNA

SEQ ID NO: 75860 - DNA, 120 bp, synthetic construct
  source 1..120: mol_type = other DNA
ttatatagcaactttacctctgccacaaaggtgtttcttttgtttattttgaggccaggtctcactctgttacacaggctgagtgcagtggtgcaatcttggctcactgcagcctctgtc

SEQ ID NO: 75861 - DNA, 120 bp, synthetic construct; identical to SEQ ID NO: 976
  source 1..120: mol_type = other DNA

SEQ ID NO: 75862 - DNA, 120 bp, synthetic construct
  source 1..120: mol_type = other DNA
agaaaacatttttatttcttacttttttttttagacagagtcccactctgtcgcccaggttagagtgcagtggtgcaatctcggctcattgcaacctccacctctcaagttcaagcactt

SEQ ID NO: 75863 - DNA, 120 bp, synthetic construct
  source 1..120: mol_type = other DNA
cctttttgaggcatcagaaatgctttatattgggaatgtggtggtggttatgtaactatacatttgtcagactcatcaaactgtacacttaaaaagcgtgaatgttactatatgaaaatt

SEQ ID NO: 75864 - DNA, 120 bp, synthetic construct; identical to SEQ ID NO: 977
  source 1..120: mol_type = other DNA

SEQ ID NO: 75865 - DNA, 120 bp, synthetic construct; identical to SEQ ID NO: 978
  source 1..120: mol_type = other DNA

SEQ ID NO: 75866 - DNA, 120 bp, synthetic construct
  source 1..120: mol_type = other DNA
cagtgcttgcctgtaattccagctgtttcagaggctgaggcaggagaattgcttgaacccgggaggcggaggttgcagtgagccaagatcaagccactctactccagcctgggcgacaga

SEQ ID NO: 75867 - DNA, 120 bp, synthetic construct; identical to SEQ ID NO: 979
  source 1..120: mol_type = other DNA

SEQ ID NO: 75868 - DNA, 120 bp, synthetic construct
  source 1..120: mol_type = other DNA
tcaatttttaacaaacatttatgaaagatgcaaggaaacaaagtatggcccaaacacgtggttgggggagaaataagcagaaattgtccctgagaaggaccagatgttagacttactaga

SEQ ID NO: 75869 - DNA, 120 bp, synthetic construct
  source 1..120: mol_type = other DNA
ttctcttcaaaaacaatgcaggtgctgggcatggttgctcacacctgtactcccagtaccttgggaggcttgaggctcaagaattgcttgaagccaggagttggataccagcactggcaa

SEQ ID NO: 75870 - DNA, 120 bp, synthetic construct
  source 1..120: mol_type = other DNA
ccaaatccccctctgcgagaaacacccaagaatgatcaataaaaaaaattaaaaaaaacaaaaacaacaacaaaaaaaactgggcatggtggtgcatgcctgtagtctcagctacccagg

SEQ ID NO: 75871 - DNA, 120 bp, synthetic construct
  source 1..120: mol_type = other DNA
gatgcgcaccaccacactcggctaactaaaaaaaatttttagagatagggtctcactatgttgcccaggctggtctcaaactcctggcctcaagcaatcctccttccttggcctcccaaa

SEQ ID NO: 75872 - DNA, 120 bp, synthetic construct
  source 1..120: mol_type = other DNA
aaatgcttgacaaaatctgtcaaaccaaattcaacggagtattctgtaaacatgaagccgataataatagcacgattctccaaattgatctatggtttcactacaattgttgtttttttg

SEQ ID NO: 75873 - DNA, 120 bp, synthetic construct
  source 1..120: mol_type = other DNA
tgttaaggtctaatatccagagtatccagaatatatagagaattcctataattcgataaaaagacaaatcaattttttaaatgggcagaggatttgaataaatatttcttcaaaaaagat

SEQ ID NO: 75874 - DNA, 120 bp, synthetic construct
  source 1..120: mol_type = other DNA
attcactctcccttgaccaagatcagagtgagtcagtggcgaggctgggagccacacagcttgtcctgccttgtgatccccctcctcttcctattccatatggtttttcagtgccattaa

SEQ ID NO: 75875 - DNA, 120 bp, synthetic construct
  source 1..120: mol_type = other DNA
caagcgatttgcctgtcttggcctcctaaagtgctgggattaaaggcatgagccagcgcgcccagcctcgagtgtttttagattcacagtagatgatcatttccatttctggttcaagtc

SEQ ID NO: 75876 - DNA, 120 bp, synthetic construct
  source 1..120: mol_type = other DNA
atgctttttcaggggcaaaatctagagaatctgaaacagtgagcctttttcttttcttttcttttcttttcttttttttgagatgaagtctcactctgttgcccaggctggagtgcagtg

SEQ ID NO: 75877 - DNA, 120 bp, synthetic construct
  source 1..120: mol_type = other DNA
agaacttcggacatgttatctcacttgtataagtacttaggtgcctacaacataaacagcacctggtaaattaagtattgaaaaaatgctatggggcagaggaagaaatgctaagcttct

SEQ ID NO: 75878 - DNA, 120 bp, synthetic construct
  source 1..120: mol_type = other DNA
actttactgtgcttgggccagcagaatccagttaagtccactaataagctcttggcctgtctttgagatggatttcagattcaaaatagacagaccctatcaccctgctaacttggccag

SEQ ID NO: 75879 - DNA, 120 bp, synthetic construct
  source 1..120: mol_type = other DNA
acaaatggacatgacactctgaatgtttttgagtgaattcattaatttttatcaactgtgattccagtgttttcctggtgttgcctacataattgtagtgaagctggctagatgatgacg

SEQ ID NO: 75880 - DNA, 120 bp, synthetic construct
  source 1..120: mol_type = other DNA
ttgggaggctgaggtgggcggatcacctgaggtcacaggagttcgagaccagcctggaggggaggttggagggtagtggcacaatctcggctcactgcaacttccccctcccgggttcaa

SEQ ID NO: 75881 - DNA, 120 bp, synthetic construct; identical to SEQ ID NO: 980
  source 1..120: mol_type = other DNA

SEQ ID NO: 75882 - DNA, 120 bp, synthetic construct; identical to SEQ ID NO: 981
  source 1..120: mol_type = other DNA

SEQ ID NO: 75883 - DNA, 120 bp, synthetic construct; identical to SEQ ID NO: 982
  source 1..120: mol_type = other DNA

SEQ ID NO: 75884 - DNA, 120 bp, synthetic construct
  source 1..120: mol_type = other DNA
aacagacagaaatacagggatccctttctggtaacagggctggggcgatcgttattttgtaattagtgaagagttaggggcatttctgatgtgcttcttagtgtaaacatttctagctct

SEQ ID NO: 75885 - DNA, 120 bp, synthetic construct; identical to SEQ ID NO: 983
  source 1..120: mol_type = other DNA

SEQ ID NO: 75886 - DNA, 120 bp, synthetic construct
  source 1..120: mol_type = other DNA
tgtgatggagggcacctgtaattccagctacgcgggaggctgaggcaggagaatcccttgaacccgggaggtggaggttgcagtgagccaagatcgcaccattgcactccagcctgggca

SEQ ID NO: 75887 - DNA, 120 bp, synthetic construct; identical to SEQ ID NO: 984
  source 1..120: mol_type = other DNA

SEQ ID NO: 75888 - DNA, 120 bp, synthetic construct; identical to SEQ ID NO: 985
  source 1..120: mol_type = other DNA

SEQ ID NO: 75889 - DNA, 120 bp, synthetic construct
  source 1..120: mol_type = other DNA
tgcagtggtgcaatctcggctcactgcaagctctgcctcccaggttcacgccattctcctgcctcagcctcccaagtagctgggactccaggcacccaccaccatgcctggctaattttt

SEQ ID NO: 75890 - DNA, 120 bp, synthetic construct
  source 1..120: mol_type = other DNA
aaggggcctaacattaaaagagaatgaggagaagggagagttgacaagcaaaggtgaaagcagaaagtcagttgtccatatggcttggggagataaagaaggcccaggaaggcctccagg

SEQ ID NO: 75891 - DNA, 120 bp, synthetic construct
  source 1..120: mol_type = other DNA
agtgggttctggagtgatggtaagtcccaggtccaaaagttgaactgtaacgctgggtgacactggatgctgagcttgatcctgacctggtgttggatttgttaccccttgatatactcg

SEQ ID NO: 75892 - DNA, 120 bp, synthetic construct
  source 1..120: mol_type = other DNA
aggctctgaagttatggtaacctccacatctgcaggtttaactgtaatgttgggcaagtgataataagcttgatcctcacctggaggttgaactgacacctcatgattcggtagagttag

SEQ ID NO: 75893 - DNA, 120 bp, synthetic construct
  source 1..120: mol_type = other DNA
tggggtagggtggggtagggtgggatgggggcgcggcagagcttcccaaggaagtcaccggacctcgcctcaggatattcagaagtgctagttcagttctggcagccttcctcctttaag

SEQ ID NO: 75894 - DNA, 120 bp, synthetic construct
  source 1..120: mol_type = other DNA
agcctgaccaacatggtgaaactccgtctctactaaaaatacaaaattagccaggtgtggtggtgcatacctgcaatcccagctactcaggaggccaaagcaggagaatcgcttgaacct

SEQ ID NO: 75895 - DNA, 120 bp, synthetic construct
  source 1..120: mol_type = other DNA
tagctgagtgtggtgacgcgtgtctataatcccagctactcaggaggctgaggtaggagaatcacttgaacctgggaggtggaggttgcaatgagctgggatcataccactgcactccag

SEQ ID NO: 75896 - DNA, 120 bp, synthetic construct
  source 1..120: mol_type = other DNA
gcctcctgggttcaagtggttttcatgcctcagtttcccaagtagctgggattacaggtgcccaccaccacacccagccaatttttgtatttttagtagagacagggtttcaccatattg

SEQ ID NO: 75897 - DNA, 120 bp, synthetic construct
  source 1..120: mol_type = other DNA
gaagtgatccttctgtcttggcctcccgaaatgctgagatttcaagcgtgagtcatcatgtctggtctcacagctcagtttttaacatatgtatgaaatatcaactgtgtttggttcaaa

SEQ ID NO: 75898 - DNA, 120 bp, synthetic construct
  source 1..120: mol_type = other DNA
aacagcatgaccacttccaaggctcacagcaaagcagctgattattgtataagaatcatatttggccaatatgtcagtgccagaaatgagagctggaactgaattctcgattcgagaaac

SEQ ID NO: 75899 - DNA, 120 bp, synthetic construct; identical to SEQ ID NO: 986
  source 1..120: mol_type = other DNA

SEQ ID NO: 75900 - DNA, 120 bp, synthetic construct
  source 1..120: mol_type = other DNA
cgggcgcagttgctcatgcctgtaatcctagcactttcagaggccaaggcagatggatcacgaggtcaggagtttgagaccggcctgaccaacacagtgaaaccccatctctactaaaaa

SEQ ID NO: 75901 - DNA, 120 bp, synthetic construct
  source 1..120: mol_type = other DNA
tgagccgagatcacgccactgcactccagcctggtgacagagcaagactctctctcaaaattagttaattaataaatcaatttattaaataaatttattaattaataaatcaatgtatta

SEQ ID NO: 75902 - DNA, 120 bp, synthetic construct
  source 1..120: mol_type = other DNA
caatgttgaaaggagagcgtggttagtgagagaaaatccacaaagtttatcctgatgatcctttctgaccatccattgaaaccaaagtagtaattcaccagttcttggcatcaggagctg

SEQ ID NO: 75903 - DNA, 120 bp, synthetic construct
  source 1..120: mol_type = other DNA
tccacccacctcagcctcccaaagtgctgggattacaggcgtgagccaccacgcctggcaatgaagactaatttttaaacgttgagtgctaccacggagaccagcctgtatcatgagtca

SEQ ID NO: 75904 - DNA, 120 bp, synthetic construct; identical to SEQ ID NO: 987
  source 1..120: mol_type = other DNA

SEQ ID NO: 75905 - DNA, 120 bp, synthetic construct
  source 1..120: mol_type = other DNA
aaatattttaagaagtaccaccaccatgcccagctaattttttttgtatttttaatagagacggggtctcaccatgttagccaggctggtctcaaactcctcacctcaggtgatccaccc

SEQ ID NO: 75906 - DNA, 120 bp, synthetic construct
  source 1..120: mol_type = other DNA
ggtactttaattagaatgacctggcagttactgaggcaaaattttccgctcctttgtattctgtaatacaagaaggatctacatggatgttctgttctctgaactgtctggatgaaccgg

SEQ ID NO: 75907 - DNA, 120 bp, synthetic construct
  source 1..120: mol_type = other DNA
cctcccaggttcaagccactcgcctgcctcacttcaagtagctgggattacaggagcccaccaccacacccggctaatttttatatttttagtagagacggggtctcaccatgttggcca

SEQ ID NO: 75908 - DNA, 120 bp, synthetic construct
  source 1..120: mol_type = other DNA
agttggaaatatatatctggagtttagaaaagaggtctaggtaggaaaatggatctagaagtcattgatattttggccgggcgcggtggctcatgcctgtaatcccagcactttgggagg

SEQ ID NO: 75909 - DNA, 120 bp, synthetic construct
  source 1..120: mol_type = other DNA
aaaaacaagaaaccatttgaaaatataatgatatggccaagtatggtggctcacgcctataatcccagcgttttgggaggttgaggtgggcaggtggcttgagcccaggaattcaagacc

SEQ ID NO: 75910 - DNA, 120 bp, synthetic construct; identical to SEQ ID NO: 988
  source 1..120: mol_type = other DNA

SEQ ID NO: 75911 - DNA, 120 bp, synthetic construct
  source 1..120: mol_type = other DNA
agtgaagtcatctataaagcttaaggtttggaaaataaaatctgtttgcagcaacatggatagaactggaggacattatgttaagtgaaataggccaagggcagaaagacaagtatcaca

SEQ ID NO: 75912 - DNA, 120 bp, synthetic construct
  source 1..120: mol_type = other DNA
ataaagaattcttactacccaacagtaagaaattggccaggcatggtggctcatgcctgtaatcccagcactttgggaggccaaggtaggcagattgcttgagctcaggagttcaagacc

SEQ ID NO: 75913 - DNA, 120 bp, synthetic construct
  source 1..120: mol_type = other DNA
aaaccagaagaagctaccaccatatacttattaaggtggccaaaaaaaaaaaaaaaacttgaggccgggcgcagtggctcacgtctgtaatcccagcactttgggaggccgaggcgggca

SEQ ID NO: 75914 - DNA, 120 bp, synthetic construct
  source 1..120: mol_type = other DNA
tatgggaggccgaggccggcggattacctgaggtcaggagttcaagaccagcctggccaacatggtgaaaccctgtctctactgaaaataccaaaaattcgccaggcgtagtggcgggcg

SEQ ID NO: 75915 - DNA, 120 bp, synthetic construct
  source 1..120: mol_type = other DNA
ccatctctactaaaaaatacaaaaaattagctgggtgtggcagcgagcacctgtagtgactacaccactttgttgacggccgtccggacctgcagctgtccgggccaggtggctgccccc

SEQ ID NO: 75916 - DNA, 120 bp, synthetic construct
  source 1..120: mol_type = other DNA
cttatttaccccatcacatcattgcttaaccgctgctctgctcctattttcgcttcaccctcttttttttttttttttttgagacagagttttgctcttgttgcacaggctggagtgcaa

SEQ ID NO: 75917 - DNA, 120 bp, synthetic construct; identical to SEQ ID NO: 17873
  source 1..120: mol_type = other DNA

SEQ ID NO: 75918 - DNA, 120 bp, synthetic construct; identical to SEQ ID NO: 17874
  source 1..120: mol_type = other DNA

SEQ ID NO: 75919 - DNA, 120 bp, synthetic construct; identical to SEQ ID NO: 17875
  source 1..120: mol_type = other DNA

SEQ ID NO: 75920 - DNA, 120 bp, synthetic construct
  source 1..120: mol_type = other DNA
accccatctctactgaaaatacagaaattagccaggcatggtggtgggtgcctataatcccatctacttgggaagctgaggcaggagaattgctttatttatttttcgagatggaatttt

SEQ ID NO: 75921 - DNA, 120 bp, synthetic construct; identical to SEQ ID NO: 17876
  source 1..120: mol_type = other DNA

SEQ ID NO: 75922 - DNA, 120 bp, synthetic construct; identical to SEQ ID NO: 17877
  source 1..120: mol_type = other DNA

SEQ ID NO: 75923 - DNA, 120 bp, synthetic construct; identical to SEQ ID NO: 17878
  source 1..120: mol_type = other DNA

SEQ ID NO: 75924 - DNA, 120 bp, synthetic construct; identical to SEQ ID NO: 17879
  source 1..120: mol_type = other DNA

SEQ ID NO: 75925 - DNA, 120 bp, synthetic construct; identical to SEQ ID NO: 17880
  source 1..120: mol_type = other DNA

SEQ ID NO: 75926 - DNA, 120 bp, synthetic construct; identical to SEQ ID NO: 17881
  source 1..120: mol_type = other DNA

SEQ ID NO: 75927 - DNA, 120 bp, synthetic construct
  source 1..120: mol_type = other DNA
gcctctgcccagtgactcactggtgcccccgccccgcccctccatccacactgggtggcacccccgccaggtctcctgccttccatgggctcctgctgccaaggcggtgtccaagcctgc

SEQ ID NO: 75928 - DNA, 120 bp, synthetic construct
  source 1..120: mol_type = other DNA
tctgctctgcaccctcgtggtcggcagtacatgaagggcacagacaccctggcagagatgagcacacagccttgggcacggttcagggcaaactgaaatgtatgcccgaattttgtaaac

SEQ ID NO: 75929 - DNA, 120 bp, synthetic construct
  source 1..120: mol_type = other DNA
gtgattattcctctataggtttgaaagatgtatcaggccaacttactggatacagttttaatttaaaactctatacatcatacccccaactcacagacttcatgtatccattgaatactc

SEQ ID NO: 75930 - DNA, 120 bp, synthetic construct
  source 1..120: mol_type = other DNA
taagtttgatcacttgtttaaggtgatcttccagatctctccactgtggttattttgctgggtgtggtggctcacacttgtaatcccagcactttggaaggccgagatgggcaaatcact

SEQ ID NO: 75931 - DNA, 120 bp, synthetic construct
  source 1..120: mol_type = other DNA
ctttattctaggcataccatactcactgccatgcttacccttcagttgggcacctgtgtcctccttcccattggccttctggttcctacccaagtgtccagtccacgggtctcagtaaca

SEQ ID NO: 75932 - DNA, 120 bp, synthetic construct
  source 1..120: mol_type = other DNA
cttggctacttctataaagacagtgttgcttatttttcaaaactttttctttttttcttttttttttttttttttaccaattatattcttcccttctccccaagaggtgggcagaaaagc

SEQ ID NO: 75933 - DNA, 120 bp, synthetic construct
  source 1..120: mol_type = other DNA
gcactgggcaattggcccctggggatcaacggaataatcctaagcagagttactctatgtcacactatggaatgttccaagtaggtggccatgtcttttcctcctttcgttgttgccatt

SEQ ID NO: 75934 - DNA, 120 bp, synthetic construct
  source 1..120: mol_type = other DNA
cctgcaaaagccctacctcaggtcagagacagatcgaaagacttagcctacaccattttaattttagaaatggcaatggctagagtgaaaaacatgaaggctgctaaaccaatcacacat

SEQ ID NO: 75935 - DNA, 120 bp, synthetic construct
  source 1..120: mol_type = other DNA
ataggagaacctgggactcccaggccatagcttgtcttggccatgtaactttggccatgacagtgatctcccactttgctcatgtagacagtgaaatagattagggcacaagatgaactg

SEQ ID NO: 75936 - DNA, 120 bp, synthetic construct
  source 1..120: mol_type = other DNA
attccaggattgttaaaggatcctcgcttccaggaggtctctgtgaaataaaaccaagttaatcccactagactattttaagaagttaagttgatataatagcaaaatttctcccaccca

SEQ ID NO: 75937 - DNA, 120 bp, synthetic construct
  source 1..120: mol_type = other DNA
aggccaaggcaggcagatcacaaggtcaggagatggagaccatcctggctaacacagtggaaccccgtctctactaaaaatgcaaaaaattagctgggtgtggtggcgggcgtgtgtcgt

SEQ ID NO: 75938 - DNA, 120 bp, synthetic construct
  source 1..120: mol_type = other DNA
ccattgtaaatgggatctttcttccattttctagttagttattggtggtacatctgaaaagcatttgaggtttgtgtgctgctctcttgattttgtttctagccaccgtactgaattctc

SEQ ID NO: 75939 - DNA, 120 bp, synthetic construct
  source 1..120: mol_type = other DNA
tactcaagaggctgaggtgggcagatcactggagcccaggaggttgcggctgctgtgagctgtgattgtgacactgctctccagcctgagtgacagagggtgatcctgtctctaagtaag

SEQ ID NO: 75940 - DNA, 120 bp, synthetic construct
  source 1..120: mol_type = other DNA
aggctgaggtgggagtatcgcttgaacctgggaggtggaggttgcagtaagctgaggttgagctgttataccccaacctgggtgacagttgaaagagtgagaccctgtctttaaaaaaaa

SEQ ID NO: 75941 - DNA, 120 bp, synthetic construct
  source 1..120: mol_type = other DNA
aggggaggggaggggaggggaagggagggaaggggagagggaaagaaagaagagacagagagaaagaaagagaaaagaagaaaagagaaagaagaaagaaagaaaagaaaagaaaaaaga

SEQ ID NO: 75942 - DNA, 120 bp, synthetic construct; identical to SEQ ID NO: 24160
  source 1..120: mol_type = other DNA

SEQ ID NO: 75943 - DNA, 120 bp, synthetic construct; identical to SEQ ID NO: 7630
  source 1..120: mol_type = other DNA

SEQ ID NO: 75944 - DNA, 120 bp, synthetic construct
  source 1..120: mol_type = other DNA
gccctttttttcttttttaaaaaattctgttccctaagatctccaacttcccttgtgctatttactaataattattttcccctcctgcccaccccccccccatcttcattgtcccccttt

SEQ ID NO: 75945 - DNA, 120 bp, synthetic construct
  source 1..120: mol_type = other DNA
tgttccccttcctgtgtccatgtgttctcattgttcagttcccacctatgagtgagaatacgcggtgtttggttttctgttcttgcgatagtttactgagaatgatgatttccaatttca

SEQ ID NO: 75946 - DNA, 120 bp, synthetic construct
  source 1..120: mol_type = other DNA
tgttccattgatctatatctctgttttggtaccagtatcatgctgttttggttattgtagccttccttgtagtatagtttgaagtcaggtagcgtgatgcctccagctttgttcttttgg

SEQ ID NO: 75947 - DNA, 120 bp, synthetic construct
  source 1..120: mol_type = other DNA
attgagccatccttgcatcccagggatgaagcccacttgatcatggtggataagctttttgatgtgctgctggattcggtttgccagtattttattgaggatttttgcatcaatgttcat

SEQ ID NO: 75948 - DNA, 120 bp, synthetic construct
  source 1..120: mol_type = other DNA
gctttctcttgtgggcatttagtgctataagtttccctctacacactgctttgaatgtgtcccagcgattctggtatgttgtgtctttgttctcgttggtttcaaagaacatctttattt

SEQ ID NO: 75949 - DNA, 120 bp, synthetic construct
  source 1..120: mol_type = other DNA
gtcattatgatgttagctggttattttgctcattagttgatgcagtttcttcctagtctcgatggcctttacaatttggcatgattttgcagtggctggtaccggttgttcctttccatg

SEQ ID NO: 75950 - DNA, 120 bp, synthetic construct; identical to SEQ ID NO: 19914
  source 1..120: mol_type = other DNA

SEQ ID NO: 75951 - DNA, 120 bp, synthetic construct
  source 1..120: mol_type = other DNA
actctttctttcggaaattaagtgagtaactccgtgactccgtgctgatgccctaattgcctgtatgtgtgtttcggaggctgggtcccttctctccctctgtgcctccctccctggctc

SEQ ID NO: 75952 - DNA, 120 bp, synthetic construct
  source 1..120: mol_type = other DNA
tccttcttgccttcctttctttccttctttctttcctggcttccttccttccagccttccttccttccttcctccctcctcgggcccgccggcgccgctctccccccaccccaccccccc

SEQ ID NO: 75953 - DNA, 120 bp, synthetic construct
  source 1..120: mol_type = other DNA
agccctcagaaataatgccacatatctatcactacctgatctttgacaaacctgacaaaaacaagaaatgagaaaaggattccctatttaataaatggtgctgggaaaactggctagcca

SEQ ID NO: 75954 - DNA, 120 bp, synthetic construct; identical to SEQ ID NO: 11856
  source 1..120: mol_type = other DNA

SEQ ID NO: 75955 - DNA, 120 bp, synthetic construct
  source 1..120: mol_type = other DNA
gtgagcattttttcacgtgttttttggctgcataaatgtcttcttttgagaagtgtctgttcatgtccttcgcccacattttgatggggttgtttgtttttttcttgtaaatttgttgga

SEQ ID NO: 75956 - DNA, 120 bp, synthetic construct; identical to SEQ ID NO: 11857
  source 1..120: mol_type = other DNA

SEQ ID NO: 75957 - DNA, 120 bp, synthetic construct; identical to SEQ ID NO: 11858
  source 1..120: mol_type = other DNA

SEQ ID NO: 75958 - DNA, 120 bp, synthetic construct
  source 1..120: mol_type = other DNA
tcaaatggtatttctagttctagatccctgaggaatcaccacactgacttccacaatgattgaactagtttacagtcccaccaacagtgtaaaattgttcctatttctccacaccctctc

SEQ ID NO: 75959 - DNA, 120 bp, synthetic construct
  source 1..120: mol_type = other DNA
ttcaaggagaactacaaaccactgctcaattaaataaaagaggatacaaacaaatggaagagcattccatgctcatgggtaggaagaatcaatatcatgaaaatggccatactgcccaag

SEQ ID NO: 75960 - DNA, 120 bp, synthetic construct; identical to SEQ ID NO: 11859
  source 1..120: mol_type = other DNA

SEQ ID NO: 75961 - DNA, 120 bp, synthetic construct; identical to SEQ ID NO: 11860
  source 1..120: mol_type = other DNA

SEQ ID NO: 75962 - DNA, 120 bp, synthetic construct
  source 1..120: mol_type = other DNA
gtggaagaagttgattccaacccttatgaatgactttgagggtttcaagactttagtggaggaagtcactgcagatgtgatagaaatagcaacagaatgcaaataagaattgcagcccgg

SEQ ID NO: 75963 - DNA, 120 bp, synthetic construct
  source 1..120: mol_type = other DNA
aaaatgttaatattttgttcatcatgttttttggtgtttatatggatttttagaaaaatactgcattagtccctctccctctccctctccctctccctctccctctccctcaccccacgg

SEQ ID NO: 75964 - DNA, 120 bp, synthetic construct
  source 1..120: mol_type = other DNA
tgaggagaccctctgcctggcaatcaccccgtctgagaagtgaggagcccctccgcccagcagctgcccggtctgagaagtgaggagcctctccgcccggcagccaccccatctgggaag

SEQ ID NO: 75965 - DNA, 120 bp, synthetic construct
  source 1..120: mol_type = other DNA
aacacccaagaattatcaataaaaaaataaattaaaaaaaaataataaaataaaataaataaatactaagggaactcagaggctggcgggatcctccgtatgctgaacgctggccccctg

SEQ ID NO: 75966 - DNA, 120 bp, synthetic construct; identical to SEQ ID NO: 11863
  source 1..120: mol_type = other DNA

SEQ ID NO: 75967 - DNA, 120 bp, synthetic construct; identical to SEQ ID NO: 11851
  source 1..120: mol_type = other DNA

SEQ ID NO: 75968 - DNA, 120 bp, synthetic construct
  source 1..120: mol_type = other DNA
gattaagaaaatgtggcacatatacaccatggaatactatgcagccataaaaaatgatgagttcatgtcctttgtagggacatggatgaaattggaaatcatcattctcagtaaattatc

SEQ ID NO: 75969 - DNA, 120 bp, synthetic construct; identical to SEQ ID NO: 11852
  source 1..120: mol_type = other DNA

SEQ ID NO: 75970 - DNA, 120 bp, synthetic construct
  source 1..120: mol_type = other DNA
caggttagttacatatgtatacatgtgccatgctggtgcgctgcacccactaactcctcatctagcattaggtatatctcccaatgctatccctcccccctcccccaaccccacaatggt

SEQ ID NO: 75971 - DNA, 120 bp, synthetic construct
  source 1..120: mol_type = other DNA
cagacagcacctggaaaatcttgtcactcccaccccaaaaccccatctgtaccatcatcaaagaccaaaggtagataaaaccacaaaagcaatggcaacaaaagacaaaattgacaaatg

SEQ ID NO: 75972 - DNA, 120 bp, synthetic construct
  source 1..120: mol_type = other DNA
acctgtaatcccagcactttgggaggcccgaggagggcagatcatgatcctggctaacatggtgaaaccctgtctctactaaaaaaaatacaaaaaattagctggtcgtggttgcgcatg

SEQ ID NO: 75973 - DNA, 120 bp, synthetic construct
  source 1..120: mol_type = other DNA
acaaataaactagaaaatctagaaaaaatggataaattcctggacacatacaccctcccaagactaaagcaggaagaagtcaaatccctgaatagaacaataacaagttctgaaattgag

SEQ ID NO: 75974 - DNA, 120 bp, synthetic construct; identical to SEQ ID NO: 11853
  source 1..120: mol_type = other DNA

SEQ ID NO: 75975 - DNA, 120 bp, synthetic construct
  source 1..120: mol_type = other DNA
gggtatatacccagtaatgggatggctggctcaaatggtatttctagttctagatccttgaggaatcgccacaactgacttccacaatggttgaactagtttacagtcccaccaacagtg

SEQ ID NO: 75976 - DNA, 120 bp, synthetic construct
  source 1..120: mol_type = other DNA
ttttcatgatattgattcttcctacccatgagcatggaatgttcttccatttgtttgtatcctcttttatttccttgagcagtggattgtagttctccttgaagaggtccttcacttccc

SEQ ID NO: 75977 - DNA, 120 bp, synthetic construct
  source 1..120: mol_type = other DNA
gccactattttattgaggatttttgtatcaatgttcctcagggatattggtctaaaattctcttttttggttgtgtctctgcccggctttggtatcagaatgatgctggcctcataaaat

SEQ ID NO: 75978 - DNA, 120 bp, synthetic construct
  source 1..120: mol_type = other DNA
attcgtaattctgagttctagtttgattgcactgtggtctgagagatagtttgttatagtttctgttcttttacatttgctgaggagagctttacttccaagtatgtggtcaattttgga

SEQ ID NO: 75979 - DNA, 120 bp, synthetic construct
  source 1..120: mol_type = other DNA
cctttctctctggctgcccttaacattttttccttcatttcaactttggtgaatctgacaattatgtgtcttggagttgctcttctcgaggagtatctttgtagcgttctctgtatttcc

SEQ ID NO: 75980 - DNA, 120 bp, synthetic construct
  source 1..120: mol_type = other DNA
tgagctgtggtgggctccacccagttggagcttcctggctgctttgtttacctaagcacgcctgggcaatggtgggcgcccctcccccagcctcgctgccgccttgcagtttgatctcag

SEQ ID NO: 75981 - DNA, 120 bp, synthetic construct
  source 1..120: mol_type = other DNA
gattcctgatgcttcccctttaccttattcctagaaaaatatggaatttggtggcttcagcaactttaataaagaaacaaccagcttgagaagaacccaaagccctggggtcattgcttt

SEQ ID NO: 75982 - DNA, 120 bp, synthetic construct
  source 1..120: mol_type = other DNA
gaatgatggtttccagtttcatccatgtccctacaaaggacatgaactcattttttgtggctgcatagtattccatggtgtatatgtgccacattttcttaatccagtctatcattgttg

SEQ ID NO: 75983 - DNA, 120 bp, synthetic construct
  source 1..120: mol_type = other DNA
caccccaatctgggtgacagagtgagaccctgtctcaaaaacaaacaaaaatccacaggaccagatgggcacagctagattctaccaactatataatgaaaaactaatagcaatcctaaa

SEQ ID NO: 75984 - DNA, 120 bp, synthetic construct; identical to SEQ ID NO: 11855
  source 1..120: mol_type = other DNA

SEQ ID NO: 75985 - DNA, 120 bp, synthetic construct
  source 1..120: mol_type = other DNA
ctgatctctcagcagaaactctacaagccagaagaaagttggggccaatattcaacattcttaaagaaaagaatttccaacccagaatttcatatccagccaaactaagcttcataactg

SEQ ID NO: 75986 - DNA, 120 bp, synthetic construct
  source 1..120: mol_type = other DNA
ttcagcaccacaccacacctattccaaaattgaccaaatacttggaagtaaagcactcctcagcaaatgtaaaagaaaagaaattataacaaactgtctcttagaccacagtgcaatcaa

SEQ ID NO: 75987 - DNA, 120 bp, synthetic construct
  source 1..120: mol_type = other DNA
tgtaaacaacacacgtttcctggttatgacgacaaagctgtcctcacctctcgggccgcgtatcggcttccttagggttggcctctgacctgaggtctgtgtcaggtacaggcagagggc

SEQ ID NO: 75988 - DNA, 120 bp, synthetic construct; identical to SEQ ID NO: 13700
  source 1..120: mol_type = other DNA

SEQ ID NO: 75989 - DNA, 120 bp, synthetic construct
  source 1..120: mol_type = other DNA
attcaagactagcctggccaacatggtgaaaccccgtctctactaaaaagacgaaaattagccaggcgtggtggtggtggatgcctgtaatcccagctactcgtgagactgagtcaggag

SEQ ID NO: 75990 - DNA, 120 bp, synthetic construct; identical to SEQ ID NO: 31648
  source 1..120: mol_type = other DNA

SEQ ID NO: 75991 - DNA, 120 bp, synthetic construct; identical to SEQ ID NO: 31649
  source 1..120: mol_type = other DNA

SEQ ID NO: 75992 - DNA, 120 bp, synthetic construct
  source 1..120: mol_type = other DNA
gtagtatagtttgaagtcaggtagcgtgatgcctccagctttgttcttttggttttggatcgacttggcactgtgggctcttttttggttccatatgaactttaaagtagttttttccaa

SEQ ID NO: 75993 - DNA, 120 bp, synthetic construct
  source 1..120: mol_type = other DNA
tttgtcattggttctgtttatgtgctggattacgtttattgatttgcgtatattgaaccagccttgcatcccagagatgaagcccatttgatcatggtggataagctttttgatgtgctg

SEQ ID NO: 75994 - DNA, 120 bp, synthetic construct
  source 1..120: mol_type = other DNA
aaactaaatactgcatgttcttacttataagtaggagctaaacactgaatacacatggaccaaaatagggaacaacagacacagcggcctatttgagggtagaaagtgggaggagggaga

SEQ ID NO: 75995 - DNA, 120 bp, synthetic construct
  source 1..120: mol_type = other DNA
tttgatttgcatttctctgatggccagtgatgatgagcattttttcatgtgttttttgctgcataaatggccatactgcccaaggtaatttacagattcaatgccatccccatcaagcta

SEQ ID NO: 75996 - DNA, 120 bp, synthetic construct; identical to SEQ ID NO: 31650
  source 1..120: mol_type = other DNA

SEQ ID NO: 75997 - DNA, 120 bp, synthetic construct; identical to SEQ ID NO: 31651
  source 1..120: mol_type = other DNA

SEQ ID NO: 75998 - DNA, 120 bp, synthetic construct
  source 1..120: mol_type = other DNA
ttctaggttgcctgttcactctgatagtagtttcttttgctgtgcagaagctctttagtttaattagatcccatttgtcaattttggcttttgttgccattgcttttggtgttttagaca

SEQ ID NO: 75999 - DNA, 120 bp, synthetic construct
  source 1..120: mol_type = other DNA
aagttgcttatcagcttaaggagattttgggctgagacaatggggttttctagttatacaatcatgtcgtctgcaaacagggacaatttgacttcctcttttcctaattgaatacccttt

SEQ ID NO: 76000 - DNA, 120 bp, synthetic construct
  source 1..120: mol_type = other DNA
aaaccagctcctggattcattaattttttgaagggttttttgtgtctgtatttccttcagttctgctctgattttagttatttcttgccttctgctagcttttgaatgtgtttgctcttg

SEQ ID NO: 76001 - DNA, 120 bp, synthetic construct
  source 1..120: mol_type = other DNA
aagatcttcctgcatccttttattttgagcctatgtgtgtctctgcacgtgagatgggtttcctgaatacagcacactgatgggtcttgactctttatccaatttgccagtctgtgtctt

SEQ ID NO: 76002 - DNA, 120 bp, synthetic construct
  source 1..120: mol_type = other DNA
gagtaatttgatcgtctgaagccttctctcagcttgtcaaagttgttctccgtccagctttgttccattgctggtgaggcactgcgttcctttggaggaggagaggcgctctgcgtttta

SEQ ID NO: 76003 - DNA, 120 bp, synthetic construct; identical to SEQ ID NO: 7715
  source 1..120: mol_type = other DNA

SEQ ID NO: 76004 - DNA, 120 bp, synthetic construct
  source 1..120: mol_type = other DNA
tccttcgcccactttttgatggggttgtttgtttttttctagtaaattcgttggagttcattgtagattctggatattagtcctttgtcagatgagtaggttgcgaaaattttctcccat

SEQ ID NO: 76005 - DNA, 120 bp, synthetic construct
  source 1..120: mol_type = other DNA
tctgtttctctgttgttggtgtatgagaatgcttgtgatttttgtacattgattttgtatcctgagactttgctgaaagttgcttatcagctgaaggagattttgggctgagacaatggg

SEQ ID NO: 76006 - DNA, 120 bp, synthetic construct; identical to SEQ ID NO: 7716
  source 1..120: mol_type = other DNA

SEQ ID NO: 76007 - DNA, 120 bp, synthetic construct; identical to SEQ ID NO: 7717
  source 1..120: mol_type = other DNA

SEQ ID NO: 76008 - DNA, 120 bp, synthetic construct
  source 1..120: mol_type = other DNA
aaatgtcttctttgaaaccaacgagaacaaagacacaacataccaaaatctctgggacgcattcaaagcagtgtgtagagggaaatttatagcactaaatgcccacaagagaaagcagga

SEQ ID NO: 76009 - DNA, 120 bp, synthetic construct
  source 1..120: mol_type = other DNA
tgcagaaaaggcctttgacaaaattcaacaacccttcatgctaaaaactctcaataaattaggtattgatgggacgtatctcaaaataataagagctatctgtgacaaacccacagccaa

SEQ ID NO: 76010 - DNA, 120 bp, synthetic construct; identical to SEQ ID NO: 7710
  source 1..120: mol_type = other DNA

SEQ ID NO: 76011 - DNA, 120 bp, synthetic construct; identical to SEQ ID NO: 7711
  source 1..120: mol_type = other DNA

SEQ ID NO: 76012 - DNA, 120 bp, synthetic construct; identical to SEQ ID NO: 7712
  source 1..120: mol_type = other DNA

SEQ ID NO: 76013 - DNA, 120 bp, synthetic construct
  source 1..120: mol_type = other DNA
tttaggtatatacccagtaatgggttggctgggtcaaatggtattcctagttctagatccttgaggaatcaccacactgacttccataatggttgaactagtttacagtcccagcaacag

SEQ ID NO: 76014 - DNA, 120 bp, synthetic construct
  source 1..120: mol_type = other DNA
gcagtgagctgagatcatgccactgcactccagcctgggagacagagcaagactgtctcaaaaaaaagaagaaagaaagaaagaaagaaagaaagaaagaaagaaagaaagaaagagaga

SEQ ID NO: 76015 - DNA, 120 bp, synthetic construct
  source 1..120: mol_type = other DNA
cagtgtcagaatcacagttgacaaggttggaatagccctgctgaaaaagaggcaagacctgagagaatacaagcagtattggtatttagggacaggacataatagactattttgaaacag

SEQ ID NO: 76016 - DNA, 120 bp, synthetic construct
  source 1..120: mol_type = other DNA
ctactgctgtaccccatcaaccagacagagtcctcttcacctttaaaaagacatttcagtcaggtgcagtggctcacgcctgtaatcccagtactttgggaggccgaggtgggcggatca

SEQ ID NO: 76017 - DNA, 120 bp, synthetic construct; identical to SEQ ID NO: 7713
  source 1..120: mol_type = other DNA

SEQ ID NO: 76018 - DNA, 120 bp, synthetic construct
  source 1..120: mol_type = other DNA
tacctggtgtgagatggtatctcattgtggttttgatttgcatttctctgatggccaatgatgatgagcattttttcatgtgttttttggctgcataaatgtcttcttttgagaagtgtc

SEQ ID NO: 76019 - DNA, 120 bp, synthetic construct
  source 1..120: mol_type = other DNA
ttgatggggatggcattgaatctgtaaattaccttgggcagtatggccattttcacgatattgattcttcctacccatgagcatggaatgttcttccatttgtttgtatcttcttttatt

SEQ ID NO: 76020 - DNA, 120 bp, synthetic construct
  source 1..120: mol_type = other DNA
tctttggctctgtttatatgctggattacatttattgatttgtgtatattgaaccagccttgcatcacagggatgaagcccacttgatcatggtgggtaagctttttgatgtgctgctgg

SEQ ID NO: 76021 - DNA, 120 bp, synthetic construct
  source 1..120: mol_type = other DNA
ttgttagtcctgagttctagtttgattgcactgtggtctgagagacagtttgttataatctctgttcttttacatttgctgaggagtgctttacttccaagtatgtggtcaattttggaa

SEQ ID NO: 76022 - DNA, 120 bp, synthetic construct
  source 1..120: mol_type = other DNA
tagttgatgcagtttcttcctagtctcgatggtctttacattttggcatgattttgcagcgactggtactggttgttcctttccatgtttagcgcttccttcaggagctcttttagggca

SEQ ID NO: 76023 - DNA, 120 bp, synthetic construct
  source 1..120: mol_type = other DNA
tccgttgctggtgaggaactgcgttcctttggaggaggagaggcactctgtgttttagagtttccagtttttctgttctgttttttccccatctttgtggttttatctacttttggtctt

SEQ ID NO: 76024 - DNA, 120 bp, synthetic construct
  source 1..120: mol_type = other DNA
gcctcgccctgctttggctcgcgcacggtgcgcgcacccactgacctgcacccactgtctggcactccctagtgagatgaacccggtacctcagatggaaatgcagaaatcacccgtctt

SEQ ID NO: 76025 - DNA, 120 bp, synthetic construct
  source 1..120: mol_type = other DNA
tgtcaaagatcagatggttgtagatatgtggcatgatttctgagggctctgttctgttccattgatctatatctctgttttggtaccagtaccatgctgttttggttactgtagccttgt

SEQ ID NO: 76026 - DNA, 120 bp, synthetic construct
  source 1..120: mol_type = other DNA
cacgtggtttttgtctttggttctgtttatatgctggattacatttattgatttatgtatgttgaaccagccttgcatcccagggatgaagcccagctgatcatgatggataagcttttt

SEQ ID NO: 76027 - DNA, 120 bp, synthetic construct
  source 1..120: mol_type = other DNA
tattcaggagcaggttgttcagtttccatgtagttgagcggttttgagtgagtttgttagtcctgagttctagtttgattgcactgtggtctgagagacagtttgttataatttccgttc

SEQ ID NO: 76028 - DNA, 120 bp, synthetic construct
  source 1..120: mol_type = other DNA
ctgagagatccgctgttagtctgatgggcttccctttgagggtaacccgacctttctctctggctgcctttaacattttttccttcatttcaactttggtgaacttgacaattatgtgtc

SEQ ID NO: 76029 - DNA, 120 bp, synthetic construct
  source 1..120: mol_type = other DNA
ccattaactcgtcatttagcattaggtatacctcctaatgctatccctatccctcccccctcctgccaccccacaacagtccccagagtgtgatgttccccttcctgtgtccatgtgctc

SEQ ID NO: 76030 - DNA, 120 bp, synthetic construct
  source 1..120: mol_type = other DNA
cccattttgtgggttgcctgttcactctgatggtagtttcttttgctgtgcagaagctctttagtttaattatatcccatttgtcaattttgtcttttgttgccattgcttttggtgttt

SEQ ID NO: 76031 - DNA, 120 bp, synthetic construct
  source 1..120: mol_type = other DNA
ggctgagacaatggggtttcctagatatacaatcatgtcatctgcaaacagggacaatttgacttcctcttttcctaattggataccctttatttctttctcatgcctgattgccctggc

SEQ ID NO: 76032 - DNA, 120 bp, synthetic construct
  source 1..120: mol_type = other DNA
ggcaagaattaactaaaatcagagcagaactaaaggaaatagagacacaaaaaacccttcaaaaaattaatgaatccaggagctggttttttgcaaggatcaacaaaattgatagaccgc

SEQ ID NO: 76033 - DNA, 120 bp, synthetic construct
  source 1..120: mol_type = other DNA
ttttattttgagcctatatatttctctgcacgtgagatgggtgtcctgaatacagcacactgatgggtcttgactctttatccaatttgccagtctgtgtcttttaattggagcatttag

SEQ ID NO: 76034 - DNA, 120 bp, synthetic construct
  source 1..120: mol_type = other DNA
tagcaattatccccagaatatattgaacaaagttctgagaacataatagatattttggcggggggggggcggggggtggggggttttgttgtttctttcatgaattgttttgctcaacat

SEQ ID NO: 76035 - DNA, 120 bp, synthetic construct; identical to SEQ ID NO: 14498
  source 1..120: mol_type = other DNA

SEQ ID NO: 76036 - DNA, 120 bp, synthetic construct
  source 1..120: mol_type = other DNA
ccaaagtcccaacatttccaccttaggaatcattttcctgaaatctcacattcctctcgctccccatgtaataaaggtactgaaagccccctgtaatgcatacttgaaggggtctatcat

SEQ ID NO: 76037 - DNA, 120 bp, synthetic construct
  source 1..120: mol_type = other DNA
gaacagagttctattaactgcacatgttccatccacctcctcagcaaaacaaggtccccctgaaccagtaccaggtcagggaggtgataaagaagctcgatgagaagacaggcatggtga

SEQ ID NO: 76038 - DNA, 120 bp, synthetic construct; identical to SEQ ID NO: 23553
  source 1..120: mol_type = other DNA

SEQ ID NO: 76039 - DNA, 120 bp, synthetic construct; identical to SEQ ID NO: 23554
  source 1..120: mol_type = other DNA

SEQ ID NO: 76040 - DNA, 120 bp, synthetic construct; identical to SEQ ID NO: 23555
  source 1..120: mol_type = other DNA

SEQ ID NO: 76041 - DNA, 120 bp, synthetic construct
  source 1..120: mol_type = other DNA
gtagccaggattacagatgtgtgccaccacgcccggctgattttttttttttttttggtattttttttagtagagatggggtttcaccaggttggccaggctggtctcgaactcctgacc

SEQ ID NO: 76042 - DNA, 120 bp, synthetic construct
  source 1..120: mol_type = other DNA
gaggtttcagtgagccgagaccatgccaatgcattccagcctgggtgacagagcgagactctacctcaaaaaaacccaaaaaacaaaaaaacaaagaaaaacaattagcctgaattgaat

SEQ ID NO: 76043 - DNA, 120 bp, synthetic construct; identical to SEQ ID NO: 23556
  source 1..120: mol_type = other DNA

SEQ ID NO: 76044 - DNA, 120 bp, synthetic construct
  source 1..120: mol_type = other DNA
gaggtggaggctgcagttctcaccattgcactctagcctgggcaacaagagcaaaactctgtctcaaaaaaaaaaaagatgcccatggaaatgctgtttatcataatgaaaattggaagt

SEQ ID NO: 76045 - DNA, 120 bp, synthetic construct; identical to SEQ ID NO: 23557
  source 1..120: mol_type = other DNA

SEQ ID NO: 76046 - DNA, 120 bp, synthetic construct; identical to SEQ ID NO: 17563
  source 1..120: mol_type = other DNA

SEQ ID NO: 76047 - DNA, 120 bp, synthetic construct
  source 1..120: mol_type = other DNA
cgtttactgatgtgtgcaaattgttatgttttgtttgtttgtttttttggtagagacagggtctcactgtgttttctaggctggtctttaaactcctggcctcaaagcctcccaccttgg

SEQ ID NO: 76048 - DNA, 120 bp, synthetic construct; identical to SEQ ID NO: 7790
  source 1..120: mol_type = other DNA

SEQ ID NO: 76049 - DNA, 120 bp, synthetic construct
  source 1..120: mol_type = other DNA
tgatgagcattttttcatgtgttttttggctgcataaaggtcttcttttgagaagtgtctgttcatgtccttcgcccactttttgatggggttgtttgtttttttcttgtaaatttgttt

SEQ ID NO: 76050 - DNA, 120 bp, synthetic construct; identical to SEQ ID NO: 7791
  source 1..120: mol_type = other DNA

SEQ ID NO: 76051 - DNA, 120 bp, synthetic construct; identical to SEQ ID NO: 14369
  source 1..120: mol_type = other DNA

SEQ ID NO: 76052 - DNA, 120 bp, synthetic construct
  source 1..120: mol_type = other DNA
acagtgtaaaagtgttcttatttctccacatcctctccagcacctgttgtttcctgactttttaatgatcaccattctaactggtgtgagatgatatctcatagtggttttgatttgcat

SEQ ID NO: 76053 - DNA, 120 bp, synthetic construct
  source 1..120: mol_type = other DNA
gatttggctctctgtttgtctgttgttggtgtataggaatgcttgtgatttttgtacattaattttgtatcctgagactttgctgaagttgcttatcagcttaaggagattttgggctga

SEQ ID NO: 76054 - DNA, 120 bp, synthetic construct
  source 1..120: mol_type = other DNA
caacttcttcctggtttagtcttgagagagtgtatgtgtcgaggaatttatccatttattctagattttctagttaattgcgtagaggtgtttgtagtattctctgatggtagtttgtat

SEQ ID NO: 76055 - DNA, 120 bp, synthetic construct
  source 1..120: mol_type = other DNA
tgtctcgttgatctgtctaatgttgacagtggggtgttaaagtctcccattattaatgtgtgggagtctaagtctctttgtaggtcactcaggacttgctttatgaatctgggtgttcct

SEQ ID NO: 76056 - DNA, 120 bp, synthetic construct
  source 1..120: mol_type = other DNA
gaggagtatctttgtggcgttctctgtatttcctgaatctgaacgttggcctgccttgctggattggggaagttctcctggataatatcctgcagagtgttttccaacttggttccattc

SEQ ID NO: 76057 - DNA, 120 bp, synthetic construct
  source 1..120: mol_type = other DNA
tcgagcttcccggctgctttgtttacctaagcaagcctgggcaatggcaggcgcccctcccccagcctcgctgccgccttgcagtttgatctcagactgctgtgctagcaatcagcgaga

SEQ ID NO: 76058 - DNA, 120 bp, synthetic construct; identical to SEQ ID NO: 14370
  source 1..120: mol_type = other DNA

SEQ ID NO: 76059 - DNA, 120 bp, synthetic construct
  source 1..120: mol_type = other DNA
atactcctcaagaagagcaactccaagacacataattgtcagattcaccaaagttgaaatgaaggaaaaaatgttaagggcagccagagagaaaggtcgggttacccacaaagggaaagt

SEQ ID NO: 76060 - DNA, 120 bp, synthetic construct
  source 1..120: mol_type = other DNA
caacagaatatacattcttctcagcaccacactgcacttattccacaattgaccacatagttggaagtaaagcactcctcagcaaatgtaaaagaacagaaattataacaaactgtctct

SEQ ID NO: 76061 - DNA, 120 bp, synthetic construct
  source 1..120: mol_type = other DNA
gtgtgctcctgtagtcccagctactagggaggctgaggcagacaaattgagcaagactccatctcaaaaaaaaatttttttttcatctaaatttctgagtagctggaattacaccaccac

SEQ ID NO: 76062 - DNA, 120 bp, synthetic construct; identical to SEQ ID NO: 31636
  source 1..120: mol_type = other DNA

SEQ ID NO: 76063 - DNA, 120 bp, synthetic construct; identical to SEQ ID NO: 31637
  source 1..120: mol_type = other DNA

SEQ ID NO: 76064 - DNA, 120 bp, synthetic construct; identical to SEQ ID NO: 29724
  source 1..120: mol_type = other DNA

SEQ ID NO: 76065 - DNA, 120 bp, synthetic construct
  source 1..120: mol_type = other DNA
tccaaaggatatgaaatcagtatgttgaaaatattccttttttttttttttgagacagaatctcactctgtcactcaggctggagtgcaatggcgcaatctctgctcactgcaacctccg

SEQ ID NO: 76066 - DNA, 120 bp, synthetic construct
  source 1..120: mol_type = other DNA
cctcagcctcccaaagtgctgggattacagacatgagccactgcacccagccgtcactcatcttctaatggaaagaatttgcatttataaaagaaggattgacatttgtaatttttctaa

SEQ ID NO: 76067 - DNA, 120 bp, synthetic construct; identical to SEQ ID NO: 24188
  source 1..120: mol_type = other DNA

SEQ ID NO: 76068 - DNA, 120 bp, synthetic construct; identical to SEQ ID NO: 24189
  source 1..120: mol_type = other DNA

SEQ ID NO: 76069 - DNA, 120 bp, synthetic construct
  source 1..120: mol_type = other DNA
atcacctcacaatagaaaacccaaactattcagataatatatctaccatggtttgaccacttacttagcaaggatagatccttattttctttcttttttggggggggtgggggggtgggg

SEQ ID NO: 76070 - DNA, 120 bp, synthetic construct
  source 1..120: mol_type = other DNA
tgttgcatattctcgctttgggaatatgttaacattatttttttactttaagattcctcaaggatctagaattagaaataccatttgatccagccatcccattactgggtatatacccaa

SEQ ID NO: 76071 - DNA, 120 bp, synthetic construct; identical to SEQ ID NO: 13108
  source 1..120: mol_type = other DNA

SEQ ID NO: 76072 - DNA, 120 bp, synthetic construct; identical to SEQ ID NO: 13109
  source 1..120: mol_type = other DNA

SEQ ID NO: 76073 - DNA, 120 bp, synthetic construct
  source 1..120: mol_type = other DNA
ttggtgtataagaatgcctgtgatttttgtacattgattttgtatcatgagagtttgctgaagtggcgcatatacaccatggaatactatgcagccataaaaaatgatgagttcatgtcc

SEQ ID NO: 76074 - DNA, 120 bp, synthetic construct
  source 1..120: mol_type = other DNA
gtggtatttcattttctgttcctgtgttagtttgcttaggatagtggcctccagctccattcatgtcactgcaaaggacatgatctcattctttttttatggctctgtactcttccgtta

SEQ ID NO: 76075 - DNA, 120 bp, synthetic construct
  source 1..120: mol_type = other DNA
cagccgctgcaaaatcatgccaaattgtaaagaccatcgagactaggaagaaactgcatcaactaacgagcaaaataaccagctaacatcataatgacaggatcaaattcacacataaca

SEQ ID NO: 76076 - DNA, 120 bp, synthetic construct
  source 1..120: mol_type = other DNA
gattcaaagcagtgtgtagagggaaatttatagcactaagtgcccacaagagaaagcaggaaagatccaaaattgacaccctaacatcacaattgaaagaactagaaaagcaagagcaaa

SEQ ID NO: 76077 - DNA, 120 bp, synthetic construct
  source 1..120: mol_type = other DNA
atgctaaaaactctcaataaattaggtattgatgggacgtatttcaaaataataagagctatctatgacaaacccacagccaatatcatacggaatgggcaaaaactggaagcattccct

SEQ ID NO: 76078 - DNA, 120 bp, synthetic construct
  source 1..120: mol_type = other DNA
ttccctgtttaataaatggtgctgggaaaactggctagccatatgtagaaagctgaaactggatcccttccttacaccttatacaaaaatcaattcgagatggattaaagacttaaacat

SEQ ID NO: 76079 - DNA, 120 bp, synthetic construct
  source 1..120: mol_type = other DNA
ctcactcataggtgggaactgaacaatgagatcacatggacacaggaaggggaatatcacactctggggactgttgtggggtggtgggagtggggagggatagcatcgggagatatacct

SEQ ID NO: 76080 - DNA, 120 bp, synthetic construct
  source 1..120: mol_type = other DNA
gagtgtaaattagttcaaccattgtggaagacagtgtggcaatctagaaccagaaataccatttgacccagcaatcccattagcgggtatatacccaaaggattacacatcattctacta

SEQ ID NO: 76081 - DNA, 120 bp, synthetic construct; identical to SEQ ID NO: 7734
  source 1..120: mol_type = other DNA

SEQ ID NO: 76082 - DNA, 120 bp, synthetic construct
  source 1..120: mol_type = other DNA
cagtaatgggatggctgcgtcaaatggtatttctagttctagatccctgaggaatcgccacactgacttccacaatggttgaactagtgtacagtcccatcaacagtgtaaaagtgttcc

SEQ ID NO: 76083 - DNA, 120 bp, synthetic construct
  source 1..120: mol_type = other DNA
catatagctttcagcaaacctctcaccgtgtacactaatgatagagtttgccagccactcacagggtatcaaaatgcccagacattaaagggatagctagaacatgcacaattttggaaa

SEQ ID NO: 76084 - DNA, 120 bp, synthetic construct
  source 1..120: mol_type = other DNA
agactgcttccaatgagcctgtgcccttggctacataaagaggaaacataaatattttctgtgtgtgtgtgtctgtgtgtgtctctttgtatgtgtgtctgtgtgtctgcatatctatgt

SEQ ID NO: 76085 - DNA, 120 bp, synthetic construct
  source 1..120: mol_type = other DNA
aagactgacactgcccgatcacctcggaagccccctagaccatcacggacgccgagctgccagtaactctcacagtggaaggtaaacccgtccccttcttaatcaatacggaggctaccc

SEQ ID NO: 76086 - DNA, 120 bp, synthetic construct
  source 1..120: mol_type = other DNA
tcaacaccaatatcccatcccacagcatgctttgaaaagactaaagcctgttatcactctcctgctacagcatggccttttaaagcctataaactctccttacaattcccccatttcact

SEQ ID NO: 76087 - DNA, 120 bp, synthetic construct; identical to SEQ ID NO: 12853
  source 1..120: mol_type = other DNA

SEQ ID NO: 76088 - DNA, 120 bp, synthetic construct; identical to SEQ ID NO: 12854
  source 1..120: mol_type = other DNA

SEQ ID NO: 76089 - DNA, 120 bp, synthetic construct
  source 1..120: mol_type = other DNA
taagcagccataaaaaatgatgagttcatgtcctttgtagggacatggatggtactcagcaaagtatgccaaggacaaaaaaccaaacaccatatgttctcactcataagtgggaattga

SEQ ID NO: 76090 - DNA, 120 bp, synthetic construct; identical to SEQ ID NO: 12856
  source 1..120: mol_type = other DNA

SEQ ID NO: 76091 - DNA, 120 bp, synthetic construct; identical to SEQ ID NO: 12857
  source 1..120: mol_type = other DNA

SEQ ID NO: 76092 - DNA, 120 bp, synthetic construct; identical to SEQ ID NO: 12858
  source 1..120: mol_type = other DNA

SEQ ID NO: 76093 - DNA, 120 bp, synthetic construct
  source 1..120: mol_type = other DNA
tccccacatttcccccttttctactcgacaaaaccgccaacgtcatcatggcctgttctcaatgagctgctgggtacacctcccagacggggtggcagccgggcagaggggctcctcact

SEQ ID NO: 76094 - DNA, 120 bp, synthetic construct
  source 1..120: mol_type = other DNA
ggagaatcaggcagggaggttgcagtgagccgagatggcagcagtacagcccagcttcggctcggcatcagagggagacggtggaaagagagggagagggagaccatggggagagggaga

SEQ ID NO: 76095 - DNA, 120 bp, synthetic construct; identical to SEQ ID NO: 12859
  source 1..120: mol_type = other DNA

SEQ ID NO: 76096 - DNA, 120 bp, synthetic construct; identical to SEQ ID NO: 24052
  source 1..120: mol_type = other DNA

SEQ ID NO: 76097 - DNA, 120 bp, synthetic construct; identical to SEQ ID NO: 24053
  source 1..120: mol_type = other DNA

SEQ ID NO: 76098 - DNA, 120 bp, synthetic construct
  source 1..120: mol_type = other DNA
ctggcacgcaaatgtctcaccaataagtccattgtgtttgctacttcttgctcagtggatccaatcagcatactgtcatcaacgtaatggaccattgtgatattttgcggaagcaaaaat

SEQ ID NO: 76099 - DNA, 120 bp, synthetic construct; identical to SEQ ID NO: 9190
  source 1..120: mol_type = other DNA

SEQ ID NO: 76100 - DNA, 120 bp, synthetic construct
  source 1..120: mol_type = other DNA
tagatgatactgttattttggttattaaaaaaagaatccagtctatcattgttggacaaatgatgagttcatgccctttatagggacatggatgaagctggaaaccatcattctcagcaa

SEQ ID NO: 76101 - DNA, 120 bp, synthetic construct
  source 1..120: mol_type = other DNA
agtcagcttacccacaaagggaagcccatcagactaacagctgatctcttggcagaaattctacaagccagaagagagtgggggccaatattcaacattcttaaagaaaagaattttcaa

SEQ ID NO: 76102 - DNA, 120 bp, synthetic construct
  source 1..120: mol_type = other DNA
agactttaacaccccactgtcaacattagacagatcaatgagacagaaagttaacagggctatccaggaattgaactcagctctgcaccaagcagacctaatagacatctacagaactct

SEQ ID NO: 76103 - DNA, 120 bp, synthetic construct; identical to SEQ ID NO: 20634
  source 1..120: mol_type = other DNA

SEQ ID NO: 76104 - DNA, 120 bp, synthetic construct; identical to SEQ ID NO: 20635
  source 1..120: mol_type = other DNA

SEQ ID NO: 76105 - DNA, 120 bp, synthetic construct
  source 1..120: mol_type = other DNA
agacttgattaagaaaatgtggcacatctacaccatggaatactatgcagccataaaaaatgatgagttcatgtcctttgtagggacatggatgaaattggaaatcatcattctcagtaa

SEQ ID NO: 76106 - DNA, 120 bp, synthetic construct
  source 1..120: mol_type = other DNA
tcccaaagtgctgggattacaggcgtgagccaccgcgcccggcccccatatttttgtagtctactttgagttctaaaatttgatagagtaaaatataaataaattaaagaccaatctgaa

SEQ ID NO: 76107 - DNA, 120 bp, synthetic construct
  source 1..120: mol_type = other DNA
ccacaacagtccccagagtgtgatattccccttcctgtgtccatatgatcttattgttcacttcccgcctatgagtgacaatatgcggtgtttggttttttgttcttgcagtagtttact

SEQ ID NO: 76108 - DNA, 120 bp, synthetic construct
  source 1..120: mol_type = other DNA
gctagccagttttcccagcaccatttattaaatagggaatcctttccccattgcttgtttttctcaggtttgtcaaagatcagatagttgtagatacgcggcattatttctgagggctct

SEQ ID NO: 76109 - DNA, 120 bp, synthetic construct
  source 1..120: mol_type = other DNA
gaattttgtcaaaggctttttctgcatctattgagataatcatgtggtttttgtctttggctctgtttatatgctggattacatttattgatttgcgtctattgaaccagccttgcatcc

SEQ ID NO: 76110 - DNA, 120 bp, synthetic construct
  source 1..120: mol_type = other DNA
tttcgttggtttcaaagaacatccttatttgtgccttcatttcgttatgtacccagtagtcattcaggagcaggttgttcagtttccatgtagttgagtggttttgagtgagattcttaa

SEQ ID NO: 76111 - DNA, 120 bp, synthetic construct
  source 1..120: mol_type = other DNA
ttatgaatgttgaatattggcccccactctcttctggcttgcagggtttctgccgagagatccgctgttagtctgatgggcttccctttgagggtaacccgacctttctctctggctgcc

SEQ ID NO: 76112 - DNA, 120 bp, synthetic construct
  source 1..120: mol_type = other DNA
ggctgttctggggtcagggacccacttgaggaggcagtctgcccattctcagatctccagctgcatgctgggagaaccacagctctcttcaaagctgtcagacagggacatttaagtctg

SEQ ID NO: 76113 - DNA, 120 bp, synthetic construct; identical to SEQ ID NO: 20629
  source 1..120: mol_type = other DNA

SEQ ID NO: 76114 - DNA, 120 bp, synthetic construct
  source 1..120: mol_type = other DNA
ttgtggtgtggatgtcctttctgtttgttagttttccttctaacagagaggaccctcagctgcaggtctgttggaataccctgccgtgtgaggtgtcagtgtgcccgtgcttgggggtgc

SEQ ID NO: 76115 - DNA, 120 bp, synthetic construct
  source 1..120: mol_type = other DNA
gatacccaggaattgaactcagctctgcagcaagcagacctaatagacatctactgaactctccacaccaaatcaacacaatatacatttttttcagcaccgcaccacacctattccaaa

SEQ ID NO: 76116 - DNA, 120 bp, synthetic construct
  source 1..120: mol_type = other DNA
aatctctgaatagaccaataacaggagctgaaattgtggcaataatcaatagcttaccaaccaaaaagagtccaggaccagatggattcacagccgaattctaccagaggtataaggagg

SEQ ID NO: 76117 - DNA, 120 bp, synthetic construct
  source 1..120: mol_type = other DNA
aagagaataaaatacctaggaatccaacttacaagggatgagaaggacctcttcaaggagaactacaaaccactgctcaaggaaataaaagaggatacaaacaaatggaagaacattcca

SEQ ID NO: 76118 - DNA, 120 bp, synthetic construct
  source 1..120: mol_type = other DNA
accccatcaaaaagtgggcgaaggacatgaacagacacttctcaaaagaagacatttatgcagccaaaaaacacatgaaaaaatgctcatcatcactggccatcagaaaatgcaaatgaa

SEQ ID NO: 76119 - DNA, 120 bp, synthetic construct; identical to SEQ ID NO: 20630
  source 1..120: mol_type = other DNA

SEQ ID NO: 76120 - DNA, 120 bp, synthetic construct
  source 1..120: mol_type = other DNA
cgagctacaggaggaaattcaaaccaaaggcaaagaagttaaaaactttgaaaaaaatttagacgaatgtataactagaataaccaatacagagaagtgcttaaaggagctgactgagct

SEQ ID NO: 76121 - DNA, 120 bp, synthetic construct
  source 1..120: mol_type = other DNA
agagattttgtcaccaccaggcctgccctaaaagagctcctgaaggaagcgctaaacgtggaaaggaacaaccagtaccagatgctgcaaagtcatgccaaattgtaaagaccatcgaga

SEQ ID NO: 76122 - DNA, 120 bp, synthetic construct
  source 1..120: mol_type = other DNA
atgttctttgaaaccacgagaacaaagacacaacataccagaatctctgggacgcattcaaagtagtgtgtaaagggaaatttatagcactaaatgcccacaagaaaaagcaggaaagat

SEQ ID NO: 76123 - DNA, 120 bp, synthetic construct
  source 1..120: mol_type = other DNA
aaaaccacatgattatctcaatagatgcagaaaaggcctttgacaaaatttaacaaccttcatgctaaaaactctcaataaattaggtattgatgggccatatctcaaaatcataagagc

SEQ ID NO: 76124 - DNA, 120 bp, synthetic construct
  source 1..120: mol_type = other DNA
aaacaagcaatggggaaaggattccctgtctaataaatggtgctgggaaaactggctagccatatgtagaaagctgaaactggatcccttccttacaccttatacaaaaatcaattcaag

SEQ ID NO: 76125 - DNA, 120 bp, synthetic construct
  source 1..120: mol_type = other DNA
aaattggaaatcatcattctcagcaaactatcggaagaacaaaaaaccaaacactgcatattctcactcataggtgggaattgaacaatgagaacacatggacacaggaaggggaacatc

SEQ ID NO: 76126 - DNA, 120 bp, synthetic construct
  source 1..120: mol_type = other DNA
aacaaacctgcacattgtgcacatgtaccctaaaacttaaagtataataataaaaagctaatgtgagaataattatgtgatatatgaaaaaataaggcagtttagagagaccaataaatg

SEQ ID NO: 76127 - DNA, 120 bp, synthetic construct
  source 1..120: mol_type = other DNA
ccttcactcttaccaagtcccacttttctagaggagggacaagtaccccaacctcatatctctgcaccccaatcccttatttccacgccccaacctcttatatctctgtgccccaatccc

SEQ ID NO: 76128 - DNA, 120 bp, synthetic construct
  source 1..120: mol_type = other DNA
gtcctgcccagcaatttactcttaaaaaggtggctggtgctaaaggcatagtcaaggttaatgctcctttttctttatcccaaatcagaagcgtttaggctctttctcatcaaatataaa

SEQ ID NO: 76129 - DNA, 120 bp, synthetic construct
  source 1..120: mol_type = other DNA
ctcctcttgtatccccccaccttaacccacaagtataagatacctctactccctccttggcgaccgatcatgcaccccttaccatctcattaaaacctaatcacccttaccccactcaac

SEQ ID NO: 76130 - DNA, 120 bp, synthetic construct
  source 1..120: mol_type = other DNA
tcccggctccttcagctgtactcactctttgttaagtcccacaattactgttgttcctgacccagacttcaatccggcctcccacattattcctgataccacacctgacccccatgactg

SEQ ID NO: 76131 - DNA, 120 bp, synthetic construct
  source 1..120: mol_type = other DNA
ctcagaatgctacagggtacagcccatttaagctcctttatagacgctccttttattaggccccagtctcattccagacaccagaccaacttagactgtgccccaaaaaacttgtcatcc

SEQ ID NO: 76132 - DNA, 120 bp, synthetic construct; identical to SEQ ID NO: 24562
  source 1..120: mol_type = other DNA

SEQ ID NO: 76133 - DNA, 120 bp, synthetic construct
  source 1..120: mol_type = other DNA
tctgcagacttaagtgtccctgtctgacagctttgaagagagcagtggttctcccagcacgcagctggagatctgagaacgggcagactgcctcctcaagtgggtccctgactcctgacc

SEQ ID NO: 76134 - DNA, 120 bp, synthetic construct; identical to SEQ ID NO: 67760
  source 1..120: mol_type = other DNA

SEQ ID NO: 76135 - DNA, 120 bp, synthetic construct
  source 1..120: mol_type = other DNA
ttgtaggtcactcaggacttgctttatgaatctgggtgctcctgtattgggtgcataaatatttaggatagttagctcctcttgttgaattgatccctttaccattatgtaatggccttc

SEQ ID NO: 76136 - DNA, 120 bp, synthetic construct; identical to SEQ ID NO: 59696
  source 1..120: mol_type = other DNA

SEQ ID NO: 76137 - DNA, 120 bp, synthetic construct
  source 1..120: mol_type = other DNA
gtctcagcccaaaatctccttaagctgataagcaacttcagcaaagtctcaggatacaaaatcagtgtacaaaaatcacaagcattcttatacaccaacaacagacaaacagagagccaa

SEQ ID NO: 76138 - DNA, 120 bp, synthetic construct
  source 1..120: mol_type = other DNA
gcaacaaaagacaaaattgacaaatgggatctaattaaactaaagagcttctgcacagcaaaagaaactaccatcagagtgaacaggcaacctacaacatgggagaaaattttcgcaacc

SEQ ID NO: 76139 - DNA, 120 bp, synthetic construct
  source 1..120: mol_type = other DNA
tataataaaaaaaaaaaaaaaaaaaaaaaaaagaacttctgcacagcaaaagaaactatcatcagaatgaacaaataacctacagaatgagagaaaatttttgcagtctatccatctcac

SEQ ID NO: 76140 - DNA, 120 bp, synthetic construct; identical to SEQ ID NO: 24556
  source 1..120: mol_type = other DNA

SEQ ID NO: 76141 - DNA, 120 bp, synthetic construct; identical to SEQ ID NO: 24557
  source 1..120: mol_type = other DNA

SEQ ID NO: 76142 - DNA, 120 bp, synthetic construct; identical to SEQ ID NO: 24558
  source 1..120: mol_type = other DNA

SEQ ID NO: 76143 - DNA, 120 bp, synthetic construct; identical to SEQ ID NO: 24559
  source 1..120: mol_type = other DNA

SEQ ID NO: 76144 - DNA, 120 bp, synthetic construct; identical to SEQ ID NO: 24560
  source 1..120: mol_type = other DNA

SEQ ID NO: 76145 - DNA, 120 bp, synthetic construct
  source 1..120: mol_type = other DNA
ggaataagagaaagagaaaaacaggtataaaaggtctaagaattgggacgactcaggatatctgattagagagtgcctaaggagattcagcatagtcctgccagcaaagattatttattt

SEQ ID NO: 76146 - DNA, 120 bp, synthetic construct
  source 1..120: mol_type = other DNA
gttgttttgtaagggattgaggtttgggagattaatcggacaggatcagcagggcgagcatgtgtgtttttaagagaattatgccgagatatgtaacagatgagaatgaaatttgggctt

SEQ ID NO: 76147 - DNA, 120 bp, synthetic construct
  source 1..120: mol_type = other DNA
gtggctgccaggtgagttgaacagtccgatttctagtggggtcccgcagagatgggacgtggcttaggagaaatcctgggctgcaggcattccttggcctggtggtcagatttctggcac

SEQ ID NO: 76148 - DNA, 120 bp, synthetic construct; identical to SEQ ID NO: 24561
  source 1..120: mol_type = other DNA

SEQ ID NO: 76149 - DNA, 120 bp, synthetic construct
  source 1..120: mol_type = other DNA
tgagatagtatctcatagtggttttgatttgcatttctctgatagccagtgatgatgagcattttttcatgtgttttttggctgcataaatgtcttcttttgagaagtgtctgttcatgt

SEQ ID NO: 76150 - DNA, 120 bp, synthetic construct
  source 1..120: mol_type = other DNA
gctctctgtttgtctgttgttggtgtataagaatgcttgtgatttttgtacgttgattttgtatcctgagactttgctgaagttgcttatcagcttaaggagattttgggctgagacgat

SEQ ID NO: 76151 - DNA, 120 bp, synthetic construct
  source 1..120: mol_type = other DNA
ctcataaaatgagttagggaggattccctctttttctattgattggaatagtttcagaaggaatggtaccagttcctccttgtacctctggtagaattcggctgtgaatgcatctggccc

SEQ ID NO: 76152 - DNA, 120 bp, synthetic construct
  source 1..120: mol_type = other DNA
gtgttaaagtctcccattattaatgtgtgggagtctaagtctctttgtaggtcactcaggacttgctttatgaatctgggtgctactgtattgggtgcatatatatttagaatagttagc

SEQ ID NO: 76153 - DNA, 120 bp, synthetic construct
  source 1..120: mol_type = other DNA
cctttctctttggctgcccttaacattttttcatttcaactttggtgaatctgacaattatgtgtcttggagttgctcttctcgaggagtatctttgtggcgttctctgtatttcctgaa

SEQ ID NO: 76154 - DNA, 120 bp, synthetic construct
  source 1..120: mol_type = other DNA
ttgtttgtctgtgccctgcccccagaggtggagcctacagaggcaggcaggcctccttgagctgtggtgggctccacccagttggagcttcccggctgctttgtttacctaagcaagcct

SEQ ID NO: 76155 - DNA, 120 bp, synthetic construct
  source 1..120: mol_type = other DNA
gggggagggatagcattaggagatatacctaatgtaaatgacaagttaatgggtgcagcacaccaacatggcacatgcatacatatgtaacaaacctgcacttgtgcacatgtaccctag

SEQ ID NO: 76156 - DNA, 120 bp, synthetic construct
  source 1..120: mol_type = other DNA
atagtaataattattattggtatattcttgtgaatatatctatattcacataaaaacgcttggcataagtcaatcctaagccaaaagaacaaagctggaggcatcacgctacctgacttc

SEQ ID NO: 76157 - DNA, 120 bp, synthetic construct
  source 1..120: mol_type = other DNA
acacgtatgtttattgcagcactattcacaatagcaaagacttggaaacaacccaaatgtccaacaatgatagactggattaagaaaatgtggcacatatacaccatggaatactatgca

SEQ ID NO: 76158 - DNA, 120 bp, synthetic construct; identical to SEQ ID NO: 5251
  source 1..120: mol_type = other DNA

SEQ ID NO: 76159 - DNA, 120 bp, synthetic construct
  source 1..120: mol_type = other DNA
ttgtcatcaccctaataggaaatgtaagtgacttttacaagtttagtccaagtactgttttcttttttttggagacagagtcttgctctgtcacccaggctggagtgcagtggtgcgatc

SEQ ID NO: 76160 - DNA, 120 bp, synthetic construct; identical to SEQ ID NO: 18023
  source 1..120: mol_type = other DNA

SEQ ID NO: 76161 - DNA, 120 bp, synthetic construct; identical to SEQ ID NO: 18024
  source 1..120: mol_type = other DNA

SEQ ID NO: 76162 - DNA, 120 bp, synthetic construct; identical to SEQ ID NO: 18025
  source 1..120: mol_type = other DNA

SEQ ID NO: 76163 - DNA, 120 bp, synthetic construct
  source 1..120: mol_type = other DNA
tatatatatatttttatatcccccccccccgtgttttttttttttttttttttttttttgagacagagtcaacctctgtcacccaggctggagtgcagtggggcacgatctcagctcact

SEQ ID NO: 76164 - DNA, 120 bp, synthetic construct; identical to SEQ ID NO: 11615
  source 1..120: mol_type = other DNA

SEQ ID NO: 76165 - DNA, 120 bp, synthetic construct; identical to SEQ ID NO: 11616
  source 1..120: mol_type = other DNA

SEQ ID NO: 76166 - DNA, 120 bp, synthetic construct; identical to SEQ ID NO: 11617
  source 1..120: mol_type = other DNA

SEQ ID NO: 76167 - DNA, 120 bp, synthetic construct; identical to SEQ ID NO: 11618
  source 1..120: mol_type = other DNA

SEQ ID NO: 76168 - DNA, 120 bp, synthetic construct; identical to SEQ ID NO: 23384
  source 1..120: mol_type = other DNA

SEQ ID NO: 76169 - DNA, 120 bp, synthetic construct; identical to SEQ ID NO: 23385
  source 1..120: mol_type = other DNA

SEQ ID NO: 76170 - DNA, 120 bp, synthetic construct; identical to SEQ ID NO: 23386
  source 1..120: mol_type = other DNA

SEQ ID NO: 76171 - DNA, 120 bp, synthetic construct
  source 1..120: mol_type = other DNA
agtaacttgcaactccaaactgtatctcaaaaactctccaggtaagtttaaaatcttttttttttttttgagacggtgtcttgcactctcgcctaggctggagtgcagtggcaccatctc

SEQ ID NO: 76172 - DNA, 120 bp, synthetic construct; identical to SEQ ID NO: 23387
  source 1..120: mol_type = other DNA

SEQ ID NO: 76173 - DNA, 120 bp, synthetic construct
  source 1..120: mol_type = other DNA
cctggccaacatagtgaaaccctgtctctactaaaaatacaacaattagctgggcgtgatggcctgagactgtaatcccagctactcgggaggcagaggcaggagaattgcttgaatcca

SEQ ID NO: 76174 - DNA, 120 bp, synthetic construct; identical to SEQ ID NO: 23388
  source 1..120: mol_type = other DNA

SEQ ID NO: 76175 - DNA, 120 bp, synthetic construct; identical to SEQ ID NO: 4551
  source 1..120: mol_type = other DNA

SEQ ID NO: 76176 - DNA, 120 bp, synthetic construct
  source 1..120: mol_type = other DNA
caaggccgcggccaggctgggggaggggcgcccgccattgcccaggcttgcttaggtaaacacagcagcctggaagctcgaactgggtggagcccaccacagctcaaggaggcctgcctg

SEQ ID NO: 76177 - DNA, 120 bp, synthetic construct
  source 1..120: mol_type = other DNA
gatgcgatcaactggaagaaagggtatcagtgatggaagatgaaatgaacgaaatgaagcgagaagggaagtttagagaaaaagaataaaaagaaacgaacaaagcctccaagaaatatg

SEQ ID NO: 76178 - DNA, 120 bp, synthetic construct
  source 1..120: mol_type = other DNA
ggatcaattcaaaaagaagagctaactatcctaaatatatatgcaccaaaaacaggagcacccagtttcataaagcaagtcctcagtgacctacaaagagacttagactcccacacaata

SEQ ID NO: 76179 - DNA, 120 bp, synthetic construct
  source 1..120: mol_type = other DNA
aaccaggaagaagttgaatctctgaatagaccaataacaggctctgaaatggtggcaataatcactagcttaccaaccaaaaagagtccaggaccagatggattcacagccgaattctac

SEQ ID NO: 76180 - DNA, 120 bp, synthetic construct
  source 1..120: mol_type = other DNA
taacagacaaacagagagccaaatcatgagtgaactcccattcacaattgcttccaagataataaaatacctaggaatccaacttacaaaggatgtgaaggacctcttcaaggagaacta

SEQ ID NO: 76181 - DNA, 120 bp, synthetic construct
  source 1..120: mol_type = other DNA
gaacagacacttctcaaaagaagccatttatgcagccaaaagacacatgaaaaaatgctcatcatcactggccatcagagaaatgcaaatcaaaaccacaatgagataccatctcacacc

SEQ ID NO: 76182 - DNA, 120 bp, synthetic construct
  source 1..120: mol_type = other DNA
gtgctgctggattcggtttgctagtatttttttgaggatttttgcatcaatgttcatcaaggatattggtctaaaattctcttttttggttgtgtctctgcctggctttggtatcaggat

SEQ ID NO: 76183 - DNA, 120 bp, synthetic construct
  source 1..120: mol_type = other DNA
tgttatcatttctgttcttttacatttgccaaggagagctttacttccaagtatgtggtcaattttggactaggtgtggtgtggtgctgaaaaaaatgtatattctgttgatttggggtg

SEQ ID NO: 76184 - DNA, 120 bp, synthetic construct
  source 1..120: mol_type = other DNA
aatgccacatatctacaactatctgatctttgacaaacctgagaaaaacaagcaatggggaaaggattccctatttaataaatggtgctgggaaaactggctagccatatgtagaaagct

SEQ ID NO: 76185 - DNA, 120 bp, synthetic construct; identical to SEQ ID NO: 20456
  source 1..120: mol_type = other DNA

SEQ ID NO: 76186 - DNA, 120 bp, synthetic construct
  source 1..120: mol_type = other DNA
tgatctcattgttcaattcccacctatgagtgagaatatgtggtgtttggttttttgttcttgcgatagtttactgagaatgatggtttccaatttcatccatgtccctacaaaggacat

SEQ ID NO: 76187 - DNA, 120 bp, synthetic construct; identical to SEQ ID NO: 20457
  source 1..120: mol_type = other DNA

SEQ ID NO: 76188 - DNA, 120 bp, synthetic construct
  source 1..120: mol_type = other DNA
atgaaattcaaatttaagcatctataaagtttaactggaacacagctgccctcctcatctgtgactggttttgctctccaatggcaccgctgagtagttgcagaaaccatatgtcacaga

SEQ ID NO: 76189 - DNA, 120 bp, synthetic construct
  source 1..120: mol_type = other DNA
gccaactggtgctataatttaatgacactttctttgtgccatgttctgtgccaataacgcccattacgtgcatcctctcacatagagctctccatatcctaagacttagatactcattat

SEQ ID NO: 76190 - DNA, 120 bp, synthetic construct; identical to SEQ ID NO: 19771
  source 1..120: mol_type = other DNA

SEQ ID NO: 76191 - DNA, 120 bp, synthetic construct; identical to SEQ ID NO: 13119
  source 1..120: mol_type = other DNA

SEQ ID NO: 76192 - DNA, 120 bp, synthetic construct
  source 1..120: mol_type = other DNA
gatattttgtggacattttttttttttccaagacagaatctggctgtcttgcccaggcttgagtacagtggcacgatctcggctcactgcaacctctatctcccaggttcaagcaattct

SEQ ID NO: 76193 - DNA, 120 bp, synthetic construct
  source 1..120: mol_type = other DNA
gtgttagccaggatggtctcgatctcctgacctctagtgatctgtcctcctcagcttcccaaagtgctgggattaccatataaacattttgatcaatgatagactacatatgtcaaataa

SEQ ID NO: 76194 - DNA, 120 bp, synthetic construct; identical to SEQ ID NO: 7292
  source 1..120: mol_type = other DNA

SEQ ID NO: 76195 - DNA, 120 bp, synthetic construct; identical to SEQ ID NO: 11784
  source 1..120: mol_type = other DNA

SEQ ID NO: 76196 - DNA, 120 bp, synthetic construct
  source 1..120: mol_type = other DNA
ttttagacatgaagtccttgcccatgcctatgtcctgaatggtaatgacttggttttcttctagggtttttatggttttaggtctaacatttaagtctttaatccatcttgaattgattt

SEQ ID NO: 76197 - DNA, 120 bp, synthetic construct
  source 1..120: mol_type = other DNA
gattttgtatcctgagactttgctgaagttgcttatcaacttaaggagattttgggctgagacagtggggttttctagatatacaatcatgttgactgcaaacagggacaatttgacttc

SEQ ID NO: 76198 - DNA, 120 bp, synthetic construct
  source 1..120: mol_type = other DNA
tctctatttccttcagttctgctctgattttagttatttcttgccttctgctagcttttgaatgtgtttgctcttgcttttctagttcttttaattgtgatgttagggtgtcagttttgg

SEQ ID NO: 76199 - DNA, 120 bp, synthetic construct
  source 1..120: mol_type = other DNA
ttttaattgaagcatttagtccatttacatttaaagttaatattgttatgtgtgaatttgatcctgtcattatgatgttagctggttattttgctcgttagttgatgcagtttcttccta

SEQ ID NO: 76200 - DNA, 120 bp, synthetic construct
  source 1..120: mol_type = other DNA
cttcacgtagttcttgagccttagctttcagctccatcagctcctttaggcacttctctgtattgattattctagttatacattcgtgtaaatttttttcaaagtttttaacttctttgc

SEQ ID NO: 76201 - DNA, 120 bp, synthetic construct
  source 1..120: mol_type = other DNA
gttttttaagcccgtcagaaaggcgcagtattcgggtgggagtgacccgattttccaggtgctgtctgtcacccctttctttgactaggaaagggaactccttgaccccttgtgcttccc

SEQ ID NO: 76202 - DNA, 120 bp, synthetic construct; identical to SEQ ID NO: 11785
  source 1..120: mol_type = other DNA

SEQ ID NO: 76203 - DNA, 120 bp, synthetic construct
  source 1..120: mol_type = other DNA
gcacactgcgatttaggtactttttacatcatgtgacagagctgcaaaaaaaagaagctctgcaaggatatatgtatccaggatatatgatatatatatatccttgattaaattactcca

SEQ ID NO: 76204 - DNA, 120 bp, synthetic construct
  source 1..120: mol_type = other DNA
ggccatccctctcttgtgccggttttcaaagggaatgcttccagtttttgccgattcagtaggtttgcacatgattatctcagtagatgcagaaaaggcctttgacaaaattcaacagtg

SEQ ID NO: 76205 - DNA, 120 bp, synthetic construct; identical to SEQ ID NO: 11777
  source 1..120: mol_type = other DNA

SEQ ID NO: 76206 - DNA, 120 bp, synthetic construct; identical to SEQ ID NO: 11778
  source 1..120: mol_type = other DNA

SEQ ID NO: 76207 - DNA, 120 bp, synthetic construct
  source 1..120: mol_type = other DNA
aaatcaaaaccacaatgagatagcatctcacaccagttagaatggcaatcattaaaatgtcaggaaacaacaggtgctggagaggatgtggagaaataggaacacttttatactgttggt

SEQ ID NO: 76208 - DNA, 120 bp, synthetic construct
  source 1..120: mol_type = other DNA
gaacatgttcatgttacatgcattcatacatatgtgtgtatatctttgtctctatctaaagagagaaatagagaaagacagagagagggcggggtgtggtggctcgcacctgtaatccca

SEQ ID NO: 76209 - DNA, 120 bp, synthetic construct; identical to SEQ ID NO: 11779
  source 1..120: mol_type = other DNA

SEQ ID NO: 76210 - DNA, 120 bp, synthetic construct
  source 1..120: mol_type = other DNA
tcttcttgcctgacctgacaccgtgtaagacatgactttgctcctcgttcacctacctccatgattgtcagacctccccagccatgtggaactgtgagtcaattaagcctctttccttta

SEQ ID NO: 76211 - DNA, 120 bp, synthetic construct; identical to SEQ ID NO: 11780
  source 1..120: mol_type = other DNA

SEQ ID NO: 76212 - DNA, 120 bp, synthetic construct; identical to SEQ ID NO: 11781
  source 1..120: mol_type = other DNA

SEQ ID NO: 76213 - DNA, 120 bp, synthetic construct
  source 1..120: mol_type = other DNA
tgtcagatgagtaggttgcgaaaattttctcccattctgtaggttgtctgttcactctgatggtagtttcttttgctgtgcagaagctcttgagtttaattagatcccatttgtcaattt

SEQ ID NO: 76214 - DNA, 120 bp, synthetic construct; identical to SEQ ID NO: 11782
  source 1..120: mol_type = other DNA

SEQ ID NO: 76215 - DNA, 120 bp, synthetic construct; identical to SEQ ID NO: 11783
  source 1..120: mol_type = other DNA

SEQ ID NO: 76216 - DNA, 120 bp, synthetic construct; identical to SEQ ID NO: 2193
  source 1..120: mol_type = other DNA

SEQ ID NO: 76217 - DNA, 120 bp, synthetic construct; identical to SEQ ID NO: 27474
  source 1..120: mol_type = other DNA

SEQ ID NO: 76218 - DNA, 120 bp, synthetic construct; identical to SEQ ID NO: 27475
  source 1..120: mol_type = other DNA

SEQ ID NO: 76219 - DNA, 120 bp, synthetic construct
  source 1..120: mol_type = other DNA
ttagaagctgcaatgagctatgattgcatcactgcactccagcttgggtgacagagcagacccccgtatttaaaaacaaaccaacaaacaaaactatttcattgggcttcttggatttgt

SEQ ID NO: 76220 - DNA, 120 bp, synthetic construct
  source 1..120: mol_type = other DNA
atttcttaaaggccttaccagtagcatcatgtcgtactcatcctcttcttgctattctaatcttctccctccctacatatatacacacacacgtacacacacacacgtacacacacacac

SEQ ID NO: 76221 - DNA, 120 bp, synthetic construct
  source 1..120: mol_type = other DNA
ggcaggcaagggatttaccgtctggcaaaatacaaacaccttagtcttttggctttcagttaacaaatatgacgtcgcatttggccctattacagctacagttaagtgcacacacatttc

SEQ ID NO: 76222 - DNA, 120 bp, synthetic construct
  source 1..120: mol_type = other DNA
ggaagggaagaggaagggaggaagggaaggaagaaagaaaaggaagaaggaaggaaggaagggagggagggaattgaacttggtgtgtcagaaactcattattggtttgtatttcaggta

SEQ ID NO: 76223 - DNA, 120 bp, synthetic construct
  source 1..120: mol_type = other DNA
cccatcaaaaagtgggcgaagtacatgaacagacacttctcaaaagaagacatttatgcagccaaaaaacacatgaaaaaatgctcaccatcactggctatcagaaaaatgcaaatcaaa

SEQ ID NO: 76224 - DNA, 120 bp, synthetic construct; identical to SEQ ID NO: 20981
  source 1..120: mol_type = other DNA

SEQ ID NO: 76225 - DNA, 120 bp, synthetic construct; identical to SEQ ID NO: 20982
  source 1..120: mol_type = other DNA

SEQ ID NO: 76226 - DNA, 120 bp, synthetic construct; identical to SEQ ID NO: 31543
  source 1..120: mol_type = other DNA

SEQ ID NO: 76227 - DNA, 120 bp, synthetic construct
  source 1..120: mol_type = other DNA
attatggccattcttgcaggagtgagttggtattatattgtggttttgatttgcatttccctgatgactagtgatgctgagcatttttccatatacttgttggctgtttgtgtatcttct

SEQ ID NO: 76228 - DNA, 120 bp, synthetic construct
  source 1..120: mol_type = other DNA
gtttgagttcattgtagattctggatattagccctttgtcagatgagtaggttgtgaaaattttctcccattttgtaggttgcctgttcactctgatggtagtttctcttgctgtgcaga

SEQ ID NO: 76229 - DNA, 120 bp, synthetic construct
  source 1..120: mol_type = other DNA
ctagatatacaatcatgtcgtctgcaaacagggacaatttgacttcctcttttcgtatttgaataccctttatttccttctcctgcctaatttccctggccagaacttcccacactatgt

SEQ ID NO: 76230 - DNA, 120 bp, synthetic construct
  source 1..120: mol_type = other DNA
ttcacaaaaccagctcctggattcattaattgtttgaagggttttttgtgtctctatttccttcagttctgctctgattttagttatttcttgccttctgctagcttttgaatgtgtttg

SEQ ID NO: 76231 - DNA, 120 bp, synthetic construct
  source 1..120: mol_type = other DNA
gtgtctctgcacgtgagatgggtttcctgaatacagcacactgatttgtcttgactctttatccaatttgccagtctgtgtcttttaattggagcatttagtccatttacatttaaagtt

SEQ ID NO: 76232 - DNA, 120 bp, synthetic construct
  source 1..120: mol_type = other DNA
cgtcggctcctgaagcttctgcattctttgcgtagttctggagccttggctttcggctccatcagctcctttaagcacttctctgtattggttattctagttatacattcgtctaaattt

SEQ ID NO: 76233 - DNA, 120 bp, synthetic construct; identical to SEQ ID NO: 21662
  source 1..120: mol_type = other DNA

SEQ ID NO: 76234 - DNA, 120 bp, synthetic construct; identical to SEQ ID NO: 21661
  source 1..120: mol_type = other DNA

SEQ ID NO: 76235 - DNA, 120 bp, synthetic construct; identical to SEQ ID NO: 9866
  source 1..120: mol_type = other DNA

SEQ ID NO: 76236 - DNA, 120 bp, synthetic construct; identical to SEQ ID NO: 9867
  source 1..120: mol_type = other DNA

SEQ ID NO: 76237 - DNA, 120 bp, synthetic construct; identical to SEQ ID NO: 9868
  source 1..120: mol_type = other DNA

SEQ ID NO: 76238 - DNA, 120 bp, synthetic construct; identical to SEQ ID NO: 9864
  source 1..120: mol_type = other DNA

SEQ ID NO: 76239 - DNA, 120 bp, synthetic construct; identical to SEQ ID NO: 9865
  source 1..120: mol_type = other DNA

SEQ ID NO: 76240 - DNA, 120 bp, synthetic construct; identical to SEQ ID NO: 9869
  source 1..120: mol_type = other DNA

SEQ ID NO: 76241 - DNA, 120 bp, synthetic construct
  source 1..120: mol_type = other DNA
aacacaccacatcacacacacaccacatcacacacacaccaaacaccccacacaacacacacacaacacaacacacacacaaacacaccacatcatacacacaccacacaccccacacac

SEQ ID NO: 76242 - DNA, 120 bp, synthetic construct; identical to SEQ ID NO: 9870
  source 1..120: mol_type = other DNA

SEQ ID NO: 76243 - DNA, 120 bp, synthetic construct; identical to SEQ ID NO: 27458
  source 1..120: mol_type = other DNA

SEQ ID NO: 76244 - DNA, 120 bp, synthetic construct; identical to SEQ ID NO: 27459
  source 1..120: mol_type = other DNA

SEQ ID NO: 76245 - DNA, 120 bp, synthetic construct; identical to SEQ ID NO: 27460
  source 1..120: mol_type = other DNA

SEQ ID NO: 76246 - DNA, 120 bp, synthetic construct; identical to SEQ ID NO: 27461
  source 1..120: mol_type = other DNA

SEQ ID NO: 76247 - DNA, 120 bp, synthetic construct; identical to SEQ ID NO: 9481
  source 1..120: mol_type = other DNA

SEQ ID NO: 76248 - DNA, 120 bp, synthetic construct; identical to SEQ ID NO: 3064
  source 1..120: mol_type = other DNA

SEQ ID NO: 76249 - DNA, 120 bp, synthetic construct
  source 1..120: mol_type = other DNA
tcaagtcaatcctaagccaaaagaacaaagctggaggcatcacgctacctgacttccaactatactacaaggctacagtaaccaaaacagcatggtactggtaccaaaacagagatatag

SEQ ID NO: 76250 - DNA, 120 bp, synthetic construct
  source 1..120: mol_type = other DNA
atagtaaagatttggaaccaacccaaatgtccaacaatgatagactggattaagaaaatgtggcacatatacaccatggaatactatgcagccataaaaaaggatgagttcatgtccttt

SEQ ID NO: 76251 - DNA, 120 bp, synthetic construct; identical to SEQ ID NO: 20626
  source 1..120: mol_type = other DNA

SEQ ID NO: 76252 - DNA, 120 bp, synthetic construct; identical to SEQ ID NO: 7963
  source 1..120: mol_type = other DNA

SEQ ID NO: 76253 - DNA, 120 bp, synthetic construct
  source 1..120: mol_type = other DNA
agacacaactaaaaaagagaattttagaccaatatccttgttgaacattgatgcaaaaatcctcagtaaaattctggcaaaccgaatccagcagcacatcaaaaagcttatccaccatga

SEQ ID NO: 76254 - DNA, 120 bp, synthetic construct
  source 1..120: mol_type = other DNA
cctgcattgccaagtcaattctaagccaaaagaacaaagctggaggcatcacactacctgacttcaaactatactacaaggctacagtaaccaaaacagcatggtactggtaccaaaaca

SEQ ID NO: 76255 - DNA, 120 bp, synthetic construct
  source 1..120: mol_type = other DNA
tgctataaagacacatgcacacgtatgtttattgcggcattattcacaatagcagacttggaaccaacccaaatatccaacaatgatagagtggattaagaaaatgtggcacatatacac

SEQ ID NO: 76256 - DNA, 120 bp, synthetic construct
  source 1..120: mol_type = other DNA
gcagcgagccgagatcaagccactgcactctagcctgggcaacagagcaagactctgtctcaaaaaaaagaaatgtgacagaacccaatacagaggtatataaaaagtaggtgatatatt

SEQ ID NO: 76257 - DNA, 120 bp, synthetic construct
  source 1..120: mol_type = other DNA
actgcaagatctggataaggaggcagtgatagagccttttcttggattcttgcctaagccaaaggcaagtgtcatggtgtattttacacattcatctgtatgttacctagccatagcttt

SEQ ID NO: 76258 - DNA, 120 bp, synthetic construct
  source 1..120: mol_type = other DNA
acttcccagatggggcggctgccgggcggaggggctcctcacttctcagacggggcggttgccaggcagagggtctcctcacttctcagacggggcggccgggcagagatgctcctcacc

SEQ ID NO: 76259 - DNA, 120 bp, synthetic construct
  source 1..120: mol_type = other DNA
tccatatcgctgcttttgttcagggcctctgtgtctgttgccttgaccattataatagtttcctaataaagttttctataataacaatggtagtaatagtatcttgaagacttcctgtaa

SEQ ID NO: 76260 - DNA, 120 bp, synthetic construct
  source 1..120: mol_type = other DNA
tgaaatcttgcccatgcttcaagatgtagccaagagtatatcatggtgactatagttaataacaatatatcgtatacaggccgggcgtggtggctcacatctgtaatcccagcactttgg

SEQ ID NO: 76261 - DNA, 120 bp, synthetic construct; identical to SEQ ID NO: 7458
  source 1..120: mol_type = other DNA

SEQ ID NO: 76262 - DNA, 120 bp, synthetic construct; identical to SEQ ID NO: 7459
  source 1..120: mol_type = other DNA

SEQ ID NO: 76263 - DNA, 120 bp, synthetic construct; identical to SEQ ID NO: 7394
  source 1..120: mol_type = other DNA

SEQ ID NO: 76264 - DNA, 120 bp, synthetic construct; identical to SEQ ID NO: 11992
  source 1..120: mol_type = other DNA

SEQ ID NO: 76265 - DNA, 120 bp, synthetic construct; identical to SEQ ID NO: 11993
  source 1..120: mol_type = other DNA

SEQ ID NO: 76266 - DNA, 120 bp, synthetic construct; identical to SEQ ID NO: 11994
  source 1..120: mol_type = other DNA

SEQ ID NO: 76267 - DNA, 120 bp, synthetic construct; identical to SEQ ID NO: 11996
  source 1..120: mol_type = other DNA

SEQ ID NO: 76268 - DNA, 120 bp, synthetic construct; identical to SEQ ID NO: 11997
  source 1..120: mol_type = other DNA

SEQ ID NO: 76269 - DNA, 120 bp, synthetic construct
  source 1..120: mol_type = other DNA
agtttaagggtgcagctagctatgattacaccactgcacttcagcctgagcaactgagcgagaccctgtctcgaaaaaaatttaaattaattttaaaaattttggccggccacagtggct

SEQ ID NO: 76270 - DNA, 120 bp, synthetic construct
  source 1..120: mol_type = other DNA
ccacatttgttggatctacttatgaatctttggaaaaactaattgtagtaaaatgggaaaaggctgggacttgtcatctgggtgaacctgaacacggtaaaacctccctgtagaaaacct

SEQ ID NO: 76271 - DNA, 120 bp, synthetic construct; identical to SEQ ID NO: 22365
  source 1..120: mol_type = other DNA

SEQ ID NO: 76272 - DNA, 120 bp, synthetic construct; identical to SEQ ID NO: 22366
  source 1..120: mol_type = other DNA

SEQ ID NO: 76273 - DNA, 120 bp, synthetic construct; identical to SEQ ID NO: 22367
  source 1..120: mol_type = other DNA

SEQ ID NO: 76274 - DNA, 120 bp, synthetic construct; identical to SEQ ID NO: 22368
  source 1..120: mol_type = other DNA

SEQ ID NO: 76275 - DNA, 120 bp, synthetic construct
  source 1..120: mol_type = other DNA
aaagtgctgagattacaggcgtgagccaccgtgcccggctcttttaaataatcttaaaggtcttccaaccttgcccgagccgggcagggtggctcacacctgtaatctcagcactttggg

SEQ ID NO: 76276 - DNA, 120 bp, synthetic construct
  source 1..120: mol_type = other DNA
accaaagccgggcagagacacaaccaaaaaagagaattttagaccaatatccttgatgaacattgatgcaaaaatcctcaataaaatactggcaaagcgaatccagcagcacatgaaaaa

SEQ ID NO: 76277 - DNA, 120 bp, synthetic construct
  source 1..120: mol_type = other DNA
tggaacagaacagagccctcagaaataatgccgcatatctacaactatctgatctttgacaaacctgagaaaaacgagcaatggggaaaggattccctttttaataaatggtgctgggaa

SEQ ID NO: 76278 - DNA, 120 bp, synthetic construct
  source 1..120: mol_type = other DNA
ctgtaaatcatgctgctataaagacacatgcacacgtatgtttattgcggcactattcacgatagcaaagacttggaaccaacccagatgtccaacaatgatagactgcattaagaaaat

SEQ ID NO: 76279 - DNA, 120 bp, synthetic construct; identical to SEQ ID NO: 22370
  source 1..120: mol_type = other DNA

SEQ ID NO: 76280 - DNA, 120 bp, synthetic construct
  source 1..120: mol_type = other DNA
agtttaattagatcccatttgtcaattttggcttttgttgccattgctggattaagaaaatgtggcacatatacaccatggaatactatgcagccataaaaaatgatgagttcatgtcct

SEQ ID NO: 76281 - DNA, 120 bp, synthetic construct; identical to SEQ ID NO: 22371
  source 1..120: mol_type = other DNA

SEQ ID NO: 76282 - DNA, 120 bp, synthetic construct
  source 1..120: mol_type = other DNA
acaccaataagagacaaacagagagccaaatcatgagtgaactcccagtcacagttgcttcaaagagaataaaatacctaggaatccaacttacaagggatgtgaaggacctcttcaagg

SEQ ID NO: 76283 - DNA, 120 bp, synthetic construct
  source 1..120: mol_type = other DNA
aagaaactagcatcacagtgaacaggcaacctacaaaatgggagaaaatttttgcaatctactcatctgacaaagggctaatatccagaatctacaatgaactcaaacaaatttacaaga

SEQ ID NO: 76284 - DNA, 120 bp, synthetic construct
  source 1..120: mol_type = other DNA
cctgcacattgtgcacatgtaccctaaaacttaaagtataataaacaaaatacactcattcagtattggagattgtaatatgacactattcttttggaaaacaatttgacaacatgtttt

SEQ ID NO: 76285 - DNA, 120 bp, synthetic construct; identical to SEQ ID NO: 22372
  source 1..120: mol_type = other DNA

SEQ ID NO: 76286 - DNA, 120 bp, synthetic construct; identical to SEQ ID NO: 22373
  source 1..120: mol_type = other DNA

SEQ ID NO: 76287 - DNA, 120 bp, synthetic construct
  source 1..120: mol_type = other DNA
gctaattttttatattttagtagagatgggtttcacgatgttggccaggctggtctcgacctcaggtgatccacctgcctcaggctcccaaggaagcttgtttttaaaaatattgtaaaa

SEQ ID NO: 76288 - DNA, 120 bp, synthetic construct; identical to SEQ ID NO: 22374
  source 1..120: mol_type = other DNA

SEQ ID NO: 76289 - DNA, 120 bp, synthetic construct; identical to SEQ ID NO: 22375
  source 1..120: mol_type = other DNA

SEQ ID NO: 76290 - DNA, 120 bp, synthetic construct; identical to SEQ ID NO: 22376
  source 1..120: mol_type = other DNA

SEQ ID NO: 76291 - DNA, 120 bp, synthetic construct; identical to SEQ ID NO: 22377
  source 1..120: mol_type = other DNA

SEQ ID NO: 76292 - DNA, 120 bp, synthetic construct
  source 1..120: mol_type = other DNA
taccatggtgtttgggttactataggtttgtagtatattttgaagtgagattgtatgatgcctccagctttgttctttttgctcagaattgctctggctattcagggtcttttgtggtcc

SEQ ID NO: 76293 - DNA, 120 bp, synthetic construct; identical to SEQ ID NO: 22378
  source 1..120: mol_type = other DNA

SEQ ID NO: 76294 - DNA, 120 bp, synthetic construct
  source 1..120: mol_type = other DNA
atagaccaatggaacagaacagtgccctcagaaataatgccgcatatctacaactatctgatctttgacaaacctgacaaaaacaagcaatggggaaaggattccctatttaataaatgg

SEQ ID NO: 76295 - DNA, 120 bp, synthetic construct
  source 1..120: mol_type = other DNA
tttgcgtcctcatagcttagctcccacatatcagtgagaacatacgatctttggttctccattcctgagttacttcacttagaatcatagtctccaatctcatccatgtcattgtaaatg

SEQ ID NO: 76296 - DNA, 120 bp, synthetic construct; identical to SEQ ID NO: 22360
  source 1..120: mol_type = other DNA

SEQ ID NO: 76297 - DNA, 120 bp, synthetic construct
  source 1..120: mol_type = other DNA
tgtgagattcaccaaagttgaaatgaaggaaaaaatgttaaaggcagccagagagaaaggtcgggttacccacaaagggaagcccatcagactaacagctgatctctcggcagaaactct

SEQ ID NO: 76298 - DNA, 120 bp, synthetic construct
  source 1..120: mol_type = other DNA
gatcaattcaacaagaagagctaactatcctaaatatatatgcacccaatacaggagcacccagattcataaagcaagtcctgagtgacctacaaagagacttagactcctacacaataa

SEQ ID NO: 76299 - DNA, 120 bp, synthetic construct
  source 1..120: mol_type = other DNA
caaatagatgcaataaaaaatgataaaggggatatcaccaccgatcccacagaaacacaaactaccatcagagaatactacaaacacctctacgcaaataaactagaaaatctagaagaa

SEQ ID NO: 76300 - DNA, 120 bp, synthetic construct
  source 1..120: mol_type = other DNA
ataacagacaaacagagagccaaatcatgagtgaactcccattcacaattgcttcaaagagtataaaatacctaggaatccaacttacaagggatgtgaaggacctcttcaaggataact

SEQ ID NO: 76301 - DNA, 120 bp, synthetic construct
  source 1..120: mol_type = other DNA
tgaaaaaatgctcaccatcactggccatcagaaaaatgcaaatcaaaaccacagtgagataccatctcacatcagttagaatggcaatcattaaaagtcaggaaacaacaggtgctggag

SEQ ID NO: 76302 - DNA, 120 bp, synthetic construct; identical to SEQ ID NO: 22361
  source 1..120: mol_type = other DNA

SEQ ID NO: 76303 - DNA, 120 bp, synthetic construct
  source 1..120: mol_type = other DNA
ctggatataagccctttgtcagttgagtagattgcaaaaattttctcccattctgtaggttgcctgttcactctgatggtagtttcttttgctgtgcagaagctctttagtttaattaga

SEQ ID NO: 76304 - DNA, 120 bp, synthetic construct
  source 1..120: mol_type = other DNA
agtttttgcccattcagtatgatattggctgtgggtttgtcatagatagctcttattattttgagatatgtcccatcaatacctaatttattgagagcttttagcatggagggtttttga

SEQ ID NO: 76305 - DNA, 120 bp, synthetic construct
  source 1..120: mol_type = other DNA
ttttttgtgtctctgtttccttcagttctgctccgatcttagttatttcttgccttctgctagcttttgaatgtgtttgctcttgcttctctagttcttttaattgtgatgttagggtgt

SEQ ID NO: 76306 - DNA, 120 bp, synthetic construct; identical to SEQ ID NO: 4812
  source 1..120: mol_type = other DNA

SEQ ID NO: 76307 - DNA, 120 bp, synthetic construct; identical to SEQ ID NO: 22363
  source 1..120: mol_type = other DNA

SEQ ID NO: 76308 - DNA, 120 bp, synthetic construct; identical to SEQ ID NO: 22364
  source 1..120: mol_type = other DNA

SEQ ID NO: 76309 - DNA, 120 bp, synthetic construct
  source 1..120: mol_type = other DNA
gaccccaaggtccactgggatgtacatacttatggtattatgctctgcaatacttgtgggggctgtggaatgcacacttccaaagtgaaataggacattggaggttttatatataaatat

SEQ ID NO: 76310 - DNA, 120 bp, synthetic construct
  source 1..120: mol_type = other DNA
acaacacttactttcaaaaaatacatgcacaccttctgtagtttcctgcctcttaggtcacagcaactctattcttccgcagttcaagccaaaattttcggtgatctccttgactaccct

SEQ ID NO: 76311 - DNA, 120 bp, synthetic construct; identical to SEQ ID NO: 28758
  source 1..120: mol_type = other DNA

SEQ ID NO: 76312 - DNA, 120 bp, synthetic construct; identical to SEQ ID NO: 28759
  source 1..120: mol_type = other DNA

SEQ ID NO: 76313 - DNA, 120 bp, synthetic construct; identical to SEQ ID NO: 28760
  source 1..120: mol_type = other DNA

SEQ ID NO: 76314 - DNA, 120 bp, synthetic construct; identical to SEQ ID NO: 28761
  source 1..120: mol_type = other DNA

SEQ ID NO: 76315 - DNA, 120 bp, synthetic construct; identical to SEQ ID NO: 28762
  source 1..120: mol_type = other DNA

SEQ ID NO: 76316 - DNA, 120 bp, synthetic construct
  source 1..120: mol_type = other DNA
atgcagtggcctatggaagacactcttgtggaattcatgattaatgaagcactgttccaggcagcgaggacgcagtggcctatggaagacgctcttgcggaactcatgattgatccagca

SEQ ID NO: 76317 - DNA, 120 bp, synthetic construct
  source 1..120: mol_type = other DNA
tgggctactgaagacgctcttgcggaactcaagattgatcaagcactgttccaggcagcgaggacgcagtggcctatggaagacgctcttgcagaattcatgattgatgaagcactgttc

SEQ ID NO: 76318 - DNA, 120 bp, synthetic construct
  source 1..120: mol_type = other DNA
gacgctcttgcggaactcatgattgatgaagcactgttccaggcagcgaggatgcagtggcctatggaagacgttcttgtggaactcatgattgatgaagcactgttccaggcaagcgag

SEQ ID NO: 76319 - DNA, 120 bp, synthetic construct; identical to SEQ ID NO: 28764
  source 1..120: mol_type = other DNA

SEQ ID NO: 76320 - DNA, 120 bp, synthetic construct; identical to SEQ ID NO: 28765
  source 1..120: mol_type = other DNA

SEQ ID NO: 76321 - DNA, 120 bp, synthetic construct; identical to SEQ ID NO: 28766
  source 1..120: mol_type = other DNA

SEQ ID NO: 76322 - DNA, 120 bp, synthetic construct; identical to SEQ ID NO: 28773
  source 1..120: mol_type = other DNA

SEQ ID NO: 76323 - DNA, 120 bp, synthetic construct; identical to SEQ ID NO: 28774
  source 1..120: mol_type = other DNA

SEQ ID NO: 76324 - DNA, 120 bp, synthetic construct; identical to SEQ ID NO: 28777
  source 1..120: mol_type = other DNA

SEQ ID NO: 76325 - DNA, 120 bp, synthetic construct; identical to SEQ ID NO: 28778
  source 1..120: mol_type = other DNA

SEQ ID NO: 76326 - DNA, 120 bp, synthetic construct; identical to SEQ ID NO: 28779
  source 1..120: mol_type = other DNA

SEQ ID NO: 76327 - DNA, 120 bp, synthetic construct; identical to SEQ ID NO: 28780
  source 1..120: mol_type = other DNA

SEQ ID NO: 76328 - DNA, 120 bp, synthetic construct; identical to SEQ ID NO: 28781
  source 1..120: mol_type = other DNA

SEQ ID NO: 76329 - DNA, 120 bp, synthetic construct; identical to SEQ ID NO: 28782
  source 1..120: mol_type = other DNA

SEQ ID NO: 76330 - DNA, 120 bp, synthetic construct; identical to SEQ ID NO: 28783
  source 1..120: mol_type = other DNA

SEQ ID NO: 76331 - DNA, 120 bp, synthetic construct; identical to SEQ ID NO: 28784
  source 1..120: mol_type = other DNA

SEQ ID NO: 76332 - DNA, 120 bp, synthetic construct
  source 1..120: mol_type = other DNA
gcccatcgtctgggatgtggggagcgcctctgccccgccgccccgtctgggatgtgaagagcgcctctgcctggccgcgaccccatctgggaactgaggagtgcctctgccccaccgcca

SEQ ID NO: 76333 - DNA, 120 bp, synthetic construct; identical to SEQ ID NO: 28785
  source 1..120: mol_type = other DNA

SEQ ID NO: 76334 - DNA, 120 bp, synthetic construct; identical to SEQ ID NO: 28767
  source 1..120: mol_type = other DNA

SEQ ID NO: 76335 - DNA, 120 bp, synthetic construct; identical to SEQ ID NO: 28768
  source 1..120: mol_type = other DNA

SEQ ID NO: 76336 - DNA, 120 bp, synthetic construct; identical to SEQ ID NO: 28769
  source 1..120: mol_type = other DNA

SEQ ID NO: 76337 - DNA, 120 bp, synthetic construct; identical to SEQ ID NO: 28770
  source 1..120: mol_type = other DNA

SEQ ID NO: 76338 - DNA, 120 bp, synthetic construct; identical to SEQ ID NO: 28771
  source 1..120: mol_type = other DNA

SEQ ID NO: 76339 - DNA, 120 bp, synthetic construct; identical to SEQ ID NO: 28772
  source 1..120: mol_type = other DNA

SEQ ID NO: 76340 - DNA, 120 bp, synthetic construct; identical to SEQ ID NO: 28775
  source 1..120: mol_type = other DNA

SEQ ID NO: 76341 - DNA, 120 bp, synthetic construct; identical to SEQ ID NO: 28776
  source 1..120: mol_type = other DNA

SEQ ID NO: 76342 - DNA, 120 bp, synthetic construct; identical to SEQ ID NO: 28748
  source 1..120: mol_type = other DNA

SEQ ID NO: 76343 - DNA, 120 bp, synthetic construct; identical to SEQ ID NO: 28749
  source 1..120: mol_type = other DNA

SEQ ID NO: 76344 - DNA, 120 bp, synthetic construct; identical to SEQ ID NO: 28750
  source 1..120: mol_type = other DNA

SEQ ID NO: 76345 - DNA, 120 bp, synthetic construct; identical to SEQ ID NO: 28751
  source 1..120: mol_type = other DNA

SEQ ID NO: 76346 - DNA, 120 bp, synthetic construct
  source 1..120: mol_type = other DNA
acaaagaaagtggtttcttgagatggaatctgctcctggtgaaaatgctgtgaacattgttgaaaaatgacagcaaagtacatcaacttagttgataaagcagtttgaggggttgagagg

SEQ ID NO: 76347 - DNA, 120 bp, synthetic construct
  source 1..120: mol_type = other DNA
ttgcagtgagctgagattgcgccatgcactccagcctgggtgacagaatgagactccgtctccaaaaaaagtagaaggatttagaccgttccgagaatgttctctgacaataatgaaatt

SEQ ID NO: 76348 - DNA, 120 bp, synthetic construct
  source 1..120: mol_type = other DNA
actgaagaggaggaatgctttccaactcactctgtgagaccaacattactatgatatacaaatcagaagacattacaagccgcacccccccaaaactatggaacaaccctaaggaatatt

SEQ ID NO: 76349 - DNA, 120 bp, synthetic construct; identical to SEQ ID NO: 28754
  source 1..120: mol_type = other DNA

SEQ ID NO: 76350 - DNA, 120 bp, synthetic construct; identical to SEQ ID NO: 28755
  source 1..120: mol_type = other DNA

SEQ ID NO: 76351 - DNA, 120 bp, synthetic construct
  source 1..120: mol_type = other DNA
cgcctgccccctggttggagggacactgctccgcctgccccctggttggagggacactgctccgcctgccccctggttggagggactcctggccccccagcccaggagctgctgggaacg

SEQ ID NO: 76352 - DNA, 120 bp, synthetic construct
  source 1..120: mol_type = other DNA
tgggcaacaagagcgaaactcagaaaaaaaagaaaagaaagtgcaggggacccgccgtcggggtgggggcggcgctgcccagcctctgtcccacttccatgcacttgacctcgaccctcc

SEQ ID NO: 76353 - DNA, 120 bp, synthetic construct
  source 1..120: mol_type = other DNA
caggagagtggagggggctcaggagagagaaggggctcaggagagagaaggggcgcaggagagaggaggggcgcggaggggagggggcgcaggagagagcagggggcgcagtaaagtgaa

SEQ ID NO: 76354 - DNA, 120 bp, synthetic construct
  source 1..120: mol_type = other DNA
gttttctagtggagattttagggctttttttttttttttttttttttttttagatggaaccaggctcaagcagtccttccatctcagtctcccgagtagctgggactgtaggcatgcacc

SEQ ID NO: 76355 - DNA, 120 bp, synthetic construct; identical to SEQ ID NO: 25148
  source 1..120: mol_type = other DNA

SEQ ID NO: 76356 - DNA, 120 bp, synthetic construct; identical to SEQ ID NO: 25149
  source 1..120: mol_type = other DNA

SEQ ID NO: 76357 - DNA, 120 bp, synthetic construct; identical to SEQ ID NO: 25150
  source 1..120: mol_type = other DNA

SEQ ID NO: 76358 - DNA, 120 bp, synthetic construct; identical to SEQ ID NO: 25151
  source 1..120: mol_type = other DNA

SEQ ID NO: 76359 - DNA, 120 bp, synthetic construct
  source 1..120: mol_type = other DNA
ccccagcccccacactccagactcacccgcaggctcaccccagcccccacactccagactcacccgcaggcccaccccagcccccacactccagactcacctgcaggcccacccggcccc

SEQ ID NO: 76360 - DNA, 120 bp, synthetic construct; identical to SEQ ID NO: 25154
  source 1..120: mol_type = other DNA

SEQ ID NO: 76361 - DNA, 120 bp, synthetic construct; identical to SEQ ID NO: 25155
  source 1..120: mol_type = other DNA

SEQ ID NO: 76362 - DNA, 120 bp, synthetic construct; identical to SEQ ID NO: 25156
  source 1..120: mol_type = other DNA

SEQ ID NO: 76363 - DNA, 120 bp, synthetic construct; identical to SEQ ID NO: 25157
  source 1..120: mol_type = other DNA

SEQ ID NO: 76364 - DNA, 120 bp, synthetic construct; identical to SEQ ID NO: 25158
  source 1..120: mol_type = other DNA

SEQ ID NO: 76365 - DNA, 120 bp, synthetic construct; identical to SEQ ID NO: 25159
  source 1..120: mol_type = other DNA

SEQ ID NO: 76366 - DNA, 120 bp, synthetic construct
  source 1..120: mol_type = other DNA
cagagttaagtcagcactggccccatggcgtgttgaaaccacagagttaagtcagctctggcccccacagtgtgttgaaatcacagagttaagtcagcactggccccatggcgtgttgaa

SEQ ID NO: 76367 - DNA, 120 bp, synthetic construct
  source 1..120: mol_type = other DNA
ttcaactcttctgtgattaatgagccttggcggggggtggggggtgggcagtgggggcttaaaactagtttagaccattctgtctttttttctttagcaaaatataccattcttttaaaa

SEQ ID NO: 76368 - DNA, 120 bp, synthetic construct
  source 1..120: mol_type = other DNA
ctcactaacaccgaggcagaattatttacccgggcaattaaagcaacagcacacacgatcatttcctactaactagcaacacgctgctggtgaatgaaatatctattgtttctcattacc

SEQ ID NO: 76369 - DNA, 120 bp, synthetic construct
  source 1..120: mol_type = other DNA
atggcacttctgcttggctatttcaaaccaaccatggaagaatagataccccaatgcgatgtttcatccctattcataaagaaactgtactttgagcaatgtaggtatcccaggcagcat

SEQ ID NO: 76370 - DNA, 120 bp, synthetic construct
  source 1..120: mol_type = other DNA
cattcttgctggctttccaattcattctcctctcttcgagtccacctcttaaaacttcttagtgctcttgcaagaaactcatgtcttttgtcagggagaatggcatggcctttgtatgac

SEQ ID NO: 76371 - DNA, 120 bp, synthetic construct
  source 1..120: mol_type = other DNA
gtgtccacttcacttgtatgggatgtcggtgctttgaaaaaattctatcatcaaagagtaggtttcttagttctgcaaatctggcacctggagatggcattttgaatcggacgacctttt

SEQ ID NO: 76372 - DNA, 120 bp, synthetic construct
  source 1..120: mol_type = other DNA
cctcattcctgtataggctgcattactttatgaacaaatgcaatttgtggcaaatgtgtcccctaaaagattgctcttggatagtgagtagggaacaagtggccttttggagcagtttgc

SEQ ID NO: 76373 - DNA, 120 bp, synthetic construct
  source 1..120: mol_type = other DNA
tttatcagaaacctctgtaccctttcctttaaaggagtcaatatgcatttgtattctgtgctgacaactataaattgatggctagcagttatcaaatgaatgttgatgaaaagcagctac

SEQ ID NO: 76374 - DNA, 120 bp, synthetic construct
  source 1..120: mol_type = other DNA
gttactaaactgtcatcacatctgatcatattaagatgtcactcagaggttgccattggtacggctgaaaattctccaagagaccaaaggtgtggtgtgtatgggaccaacaagatattg

SEQ ID NO: 76375 - DNA, 120 bp, synthetic construct
  source 1..120: mol_type = other DNA
acaaaacaccatctccaccagaactctaagattccaggccaaaataatacttggcttgagttagctggatgagcatctcaattctccaatttgtctttagaggcacttctgcttcccttt

SEQ ID NO: 76376 - DNA, 120 bp, synthetic construct
  source 1..120: mol_type = other DNA
ctgaaaattagtggatgcagctagggctctgaaacacataaataatcataagatgccagataaactgtattggttttaaattagagacgtgccgaccatgtctccctctgaacagcagcc

SEQ ID NO: 76377 - DNA, 120 bp, synthetic construct
  source 1..120: mol_type = other DNA
tttacaagcggagtttatgaactcgtttttccaggatagtcacattatactttttacagtcatgtgctttcagcccagtaccctttgctatgccaagatccagctgaaactgaaccaggt

SEQ ID NO: 76378 - DNA, 120 bp, synthetic construct
  source 1..120: mol_type = other DNA
ccagtgaggatgacagtgacacccagagggagtagaatacgcagaactaccaggtggcaaagtacttgtcatagactcctttgctaatgctatgcaaaaaattctttagagattataaca

SEQ ID NO: 76379 - DNA, 120 bp, synthetic construct
  source 1..120: mol_type = other DNA
gtggcccatagccttgccacatcctcccatctggctatagtcttccttacgtaatccttattatcacaggacctttgaaactatgaatcagataatgtcacttttcagacattattgtca

SEQ ID NO: 76380 - DNA, 120 bp, synthetic construct
  source 1..120: mol_type = other DNA
tctgttttcttcacaacttggccacagtaccttgaactgctcctgtcacacagcaaacttactgacttaataaataaccactgaaagaatgattctgggtgactaggctttatgttcagg

SEQ ID NO: 76381 - DNA, 120 bp, synthetic construct
  source 1..120: mol_type = other DNA
aagttgactatatccattctggtaggatgcaccatcttttttccttttaaacagagatggggtcttgctatgttgaccaggctagtctggaactcctggccttaagcaatcctcccatta

SEQ ID NO: 76382 - DNA, 120 bp, synthetic construct
  source 1..120: mol_type = other DNA
tgtcgtgcacgtgtatatgtatatatgtcgtgcacatctgtatatgtatacgtgtcatgtgcacatctatatgtgtatatgtacatgtatgcatgcacaaatatgtgtgccatacatgta

SEQ ID NO: 76383 - DNA, 120 bp, synthetic construct
  source 1..120: mol_type = other DNA
agccatcgcacccggtgtcatctgctacttctaatttcagatgctatttactgagcatactctgtgccagttgatgggttaggcaaatcactttatgctcataggatgaaagtgagtttt

SEQ ID NO: 76384 - DNA, 120 bp, synthetic construct
  source 1..120: mol_type = other DNA
tcccttcccccctcaaagtcatcttatttctcaaagttttccattattttaatggctacctcatatatcacataggtgatgggccattatttggaaacccattcccctactgtgggacat

SEQ ID NO: 76385 - DNA, 120 bp, synthetic construct
  source 1..120: mol_type = other DNA
ttggaattgtgacaatgtctcatctgatgctgggcattccctgagggacagtccatttttataaagcaccatttcccgagtgcttaccaaaacgcctatctgaaattctgtctttgttca

SEQ ID NO: 76386 - DNA, 120 bp, synthetic construct
  source 1..120: mol_type = other DNA
gcccagcatttaagtttggggggcaggatcagaaaaacacatgtgcccatagtcccaccactcaaaagaaccaactagtgtaaatactgtggtacattttttatgcattagaaaatttgc

SEQ ID NO: 76387 - DNA, 120 bp, synthetic construct
  source 1..120: mol_type = other DNA
tttatgatgaagtacttggctttgtgctcttcttattattggctgccttcaaacccactttagggagagaggctgagcagatcctccctgggaaaaaattcagtcatgttaccgttttct

SEQ ID NO: 76388 - DNA, 120 bp, synthetic construct
  source 1..120: mol_type = other DNA
aacagttggggcgaagctctctgactaccatgaaataacgttgtgggagaaatttaatagaaatgatgtttaagactaacagcagatctctcggcagaaaccctaaaagccagaagacct

SEQ ID NO: 76389 - DNA, 120 bp, synthetic construct
  source 1..120: mol_type = other DNA
ttgtaaaattgaccacataattggaagtaaaacactactcagcaaatgcaaaagaacggacaacataacagtctctcagaccacagtgcaatcatattagaactcaggattaagaaactc

SEQ ID NO: 76390 - DNA, 120 bp, synthetic construct
  source 1..120: mol_type = other DNA
aaaaagaaaatttgaggccaatatccctgatgaacattgctgcgaaaatcctcaataaaatactggcaaaccgaatccagcagcacatcaaaaaggttgccaaccacgatcaagtcagct

SEQ ID NO: 76391 - DNA, 120 bp, synthetic construct
  source 1..120: mol_type = other DNA
aaaaaagagcccacatagccaagacaatccaaagcaaaaagagcaaagctggaggcatcatgctgcctgacttcaaaggatactacaaggctacaataactaaaaagcatggtactggtg

SEQ ID NO: 76392 - DNA, 120 bp, synthetic construct
  source 1..120: mol_type = other DNA
atgctggagaggatgtggagatataggaacacttttacactgttggtgagagtgtaaattagttcaaccattgtggaagacagtgtggcaattcctcaaggatctagaactagaaatacc

SEQ ID NO: 76393 - DNA, 120 bp, synthetic construct
  source 1..120: mol_type = other DNA
aatttagaaaaatgatgacaaaatatgccagtgcttgtaaaacatgcccagctgccttattgagtattatagcacggctgtgagctgactcaggtccagtcatggagcctccagaaagta

SEQ ID NO: 76394 - DNA, 120 bp, synthetic construct
  source 1..120: mol_type = other DNA
cttggaatctgagaataataccttttcagaaaaatctttgagacagggtctttctctgtcacacaggcaagactgctatggcacaattatagcttactgttaccttgaactcctgcgctc

SEQ ID NO: 76395 - DNA, 120 bp, synthetic construct
  source 1..120: mol_type = other DNA
tgaggggccaagatgggctttcatcgttaacacacatccatcagagcacaattcttcttggagcaaaagatacagcacagtagaaaaagcccaatcagccacattctaatccccttctca

SEQ ID NO: 76396 - DNA, 120 bp, synthetic construct
  source 1..120: mol_type = other DNA
cggctctgagcttgcttgcggcagcctgtgtattaatttaacttcgtttttataggccttttgcatgcaatgttaaacacacagccccgccatctaatcaaaagggactcttatcaattt

SEQ ID NO: 76397 - DNA, 120 bp, synthetic construct
  source 1..120: mol_type = other DNA
aagaaatgtcatgtttttctgtatagtcttattagttttgccccaggaaaaatggagtaaaaatagctctcaggtgggatagcagggacagccacgatactgtctccacctggatgtgaa

SEQ ID NO: 76398 - DNA, 120 bp, synthetic construct
  source 1..120: mol_type = other DNA
agggactggtttcacggaagacagtttttctgtggaccggagttaggtggcagatggtttcgggatgatttaagcacgttacatttacggtgaactgtatttctattattattacattgt

SEQ ID NO: 76399 - DNA, 120 bp, synthetic construct
  source 1..120: mol_type = other DNA
gagaaggctcttaccaacatacttaacctaatattagaaggacatttcaggcttaagcccttcctgcctgacactcatggcacatggacagtgtgtgaagtttggttagaagttaaatca

SEQ ID NO: 76400 - DNA, 120 bp, synthetic construct
  source 1..120: mol_type = other DNA
ccagctctgtcccactgggaggtgatgggataccgttaaaacttcccatgggatgtaatattgacatttgaaaaatggtagacaagcagattcaagaataagtatatatagctgggcaca

SEQ ID NO: 76401 - DNA, 120 bp, synthetic construct
  source 1..120: mol_type = other DNA
gaaagagcaacatgttgtgtgtctcagcctggaaatgcaaactggccaagcccacacctttgtcctagcagaaagcaggtagtggtagcccctgactttagatcatccaggaaagggtta

SEQ ID NO: 76402 - DNA, 120 bp, synthetic construct
  source 1..120: mol_type = other DNA
attttaaaaatatgattgaaagccgcagaagcagccattctcactatgggtcttgattttcatccaggtgcttctcatatgggcaactctatgcacacgctctacggtaatagaaggaga

SEQ ID NO: 76403 - DNA, 120 bp, synthetic construct
  source 1..120: mol_type = other DNA
tcaaaacataaagtacatctcacacactatgcacagtattaagacacagaaggggctcaggaaatattgtgaagaaattagggaatactcttgttgaggccaggctacaaggctagactg

SEQ ID NO: 76404 - DNA, 120 bp, synthetic construct
  source 1..120: mol_type = other DNA
aattccactcggtaaatctctgctgtaattggctaataagcacacactttgcaaataaccactggaaatggttggttggaggatttctcccccaacttctttctcacttcccatggttct

SEQ ID NO: 76405 - DNA, 120 bp, synthetic construct
  source 1..120: mol_type = other DNA
cttttaggagtctatgaccacacagtaaagaaagtggaatctgggctattatgtgaccttgtgccaaaacataacactcacttagtgctgttgttgccagactgttttcactgtcacatc

SEQ ID NO: 76406 - DNA, 120 bp, synthetic construct
  source 1..120: mol_type = other DNA
ctaatggtttctttcctagcatgtctcacagctgggaatcacagatttattctttgtccctctcaatacctggaaagctctgtgagggccaaagccttctctgttttgtttattgctgaa

SEQ ID NO: 76407 - DNA, 120 bp, synthetic construct
  source 1..120: mol_type = other DNA
acacttcaactaccccttcaggacctctctagccaacatcatcttccccctctcctaccagaataaaaaacccttttgcctccatttgccaacaagcatctctggaaaaaaaaaaaaaaa

SEQ ID NO: 76408 - DNA, 120 bp, synthetic construct
  source 1..120: mol_type = other DNA
agcatgagaacttcatgaagcatacacaagtatcaatagctgaattgatcagacagaagaaaggatatcagatactgaagattaacttactgaaataaagtgagaagacaagattagaga

SEQ ID NO: 76409 - DNA, 120 bp, synthetic construct
  source 1..120: mol_type = other DNA
caattaaaagacacaggctggcaaattggataaagagtcaagacccataggtgtgtggtattcaggagacccatctcatgtgcaaagacacacatacgctcaaaataaaggcatggagga

SEQ ID NO: 76410 - DNA, 120 bp, synthetic construct
  source 1..120: mol_type = other DNA
gaccactagccagattaatttaaaaaagagagaagattcaaataattgcaataaaaaatgaaaaaggggatatcgccactgatcccacagaaatacaaactattgtcagggaatactata

SEQ ID NO: 76411 - DNA, 120 bp, synthetic construct
  source 1..120: mol_type = other DNA
tctcagcccaaaatctccttaagcagataagcaacttcagcaaagtctcagcatacaaaatcaatgtgcaaaaatcacaagcagttctgtacatcaataatagacaaacagagagccaaa

SEQ ID NO: 76412 - DNA, 120 bp, synthetic construct
  source 1..120: mol_type = other DNA
ctacagaatgggagaaaatttttgcaatctatccatctgacaaagggctaatacctggaatctacagataacttaaatttacaagaaaaagtaaccccatcaaaaagtgggcaaaggata

SEQ ID NO: 76413 - DNA, 120 bp, synthetic construct
  source 1..120: mol_type = other DNA
gtgcagcaaaccaccatggcacgtgtatacctgtggaacaaacctgcacattctgcgcatgtgccccagaacttaaagtataataaaagaaaattaaaaaaaaatcaaagtgcacaccca

SEQ ID NO: 76414 - DNA, 120 bp, synthetic construct
  source 1..120: mol_type = other DNA
agctcagaggcaagaatgagcctggcctggttcaagattcagcaagtgagtcaaaggagaatagtttaagaagaaaaggcatcttgaaattactggcatgtcaatggagaacagaaatga

SEQ ID NO: 76415 - DNA, 120 bp, synthetic construct
  source 1..120: mol_type = other DNA
tgtccttaataaacctcagagaaggttcaccctcatgtcgggattaattttgctattgattcattttctttggatcataaaacaagtgtaccacatgttagatacactggaattactttt

SEQ ID NO: 76416 - DNA, 120 bp, synthetic construct
  source 1..120: mol_type = other DNA
ttttaaaaatctactcagaatgcacttaacccctgctgtgatttaagtttgtgtacccccaaaattcatatgctgaagcctaacccccagtgcaatagtattgagagacagggcctttgg

SEQ ID NO: 76417 - DNA, 120 bp, synthetic construct
  source 1..120: mol_type = other DNA
tctgagttgaattatgactgctatgttgttgccattttagaagacattgttctcacctctttagccagatttgtccacaaatattccctttcaggagaaggactccaccaatccagggat

SEQ ID NO: 76418 - DNA, 120 bp, synthetic construct
  source 1..120: mol_type = other DNA
actaataccacctgaccttcagagcaaccctgatgatattagattccccccgtttcacaggtggaaactgactctcagaaaggttaagtgcttatttcaaagtttcttggctaataagga

SEQ ID NO: 76419 - DNA, 120 bp, synthetic construct
  source 1..120: mol_type = other DNA
ctttaaaatgagttattctggtgtaagggagaactaagaatcctgcaaatagcatcctttggaaacccactggtctatgccgtcccggcctgcagaaacctaacaatattagaaagaaac

SEQ ID NO: 76420 - DNA, 120 bp, synthetic construct
  source 1..120: mol_type = other DNA
gagttactatctgcacatttgagggaaagttatttaagtcctcaagcctcagttccctaattgtgaaaggggtgtaaaagtaaaatctacaagcagcagggatagatgggaactccgtac

SEQ ID NO: 76421 - DNA, 120 bp, synthetic construct
  source 1..120: mol_type = other DNA
ttgggctatcacacctcctgttctgaggctcgttttagttattttggatttctttgtattgcaatcacctaaagaatcctaggggttcttttccttccttattttctcctccagccccta

SEQ ID NO: 76422 - DNA, 120 bp, synthetic construct
  source 1..120: mol_type = other DNA
ctttagtgaacttggctgcaaactacagcagatgaactctacgcaccaaccttttgtttcagaacataaataccagctcaaccattgatcattttgcctgacctttctgagttcgtcaac

SEQ ID NO: 76423 - DNA, 120 bp, synthetic construct
  source 1..120: mol_type = other DNA
tgagtggggatattaacagcttccctacaaacttgcctggaagaggagcaatgtttgtcaagtccttttcatggtacctggtgtgagaaatgatcaacactgaaagctattattgttagc

SEQ ID NO: 76424 - DNA, 120 bp, synthetic construct
  source 1..120: mol_type = other DNA
gacagtacacattttaagccttaaaaatctccccattggtgctcacgtgagtctaggcatgggatcaaatgtcatagaactacacgcacacaaacacacacacaaaccataaacagaagg

SEQ ID NO: 76425 - DNA, 120 bp, synthetic construct
  source 1..120: mol_type = other DNA
tgtgcaggatagaatctggcaccatgtatgcgtctcagtaagtgtgagctagaatcatgttcaagaagaacactcatgacatgagaaaatgttgctgttagtgaaaactggagacgagaa

SEQ ID NO: 76426 - DNA, 120 bp, synthetic construct
  source 1..120: mol_type = other DNA
tgaaatttagggatcaggctcagcagagctgtggtagtcagttaggcacccagcaaacttgaacttctgtgatctaaatagacatcccctctcccttcaagagcctgctccaaccctgtt

SEQ ID NO: 76427 - DNA, 120 bp, synthetic construct
  source 1..120: mol_type = other DNA
gctaagaatatgcagggcacgtagtaggtgctccgtaaatcattgctgggtgaaaaaaggatggaagaatgaggtcttcacttgatagaacacaggctcttggttgcatataaaaatttg

SEQ ID NO: 76428 - DNA, 120 bp, synthetic construct
  source 1..120: mol_type = other DNA
gtattcccaatacagaaattgtgcttgacacatagtaattactcaacaaagagctcttgagtgaataagtgctgccgatcttcggcattgaccagtgagtgttcaacaggcgaagcatcg

SEQ ID NO: 76429 - DNA, 120 bp, synthetic construct
  source 1..120: mol_type = other DNA
acaaatttgtggatgaatgagtaactgtgagtctcttcatccaaataatccgggggacttctcatgcccttctctgggggaaagatgcctctatagaggagacaattagaaggaggccag

SEQ ID NO: 76430 - DNA, 120 bp, synthetic construct
  source 1..120: mol_type = other DNA
tctatccaaaatagacctctgggctctgtgcctaaagcaatagaaaatgtagacaaaggacatgatacttgggacagaactattttgggatgtttttgtggctagatgctctggacctgg

SEQ ID NO: 76431 - DNA, 120 bp, synthetic construct
  source 1..120: mol_type = other DNA
gaacttataaccctggtatatctagggaggccgggaaatggataactaaacgcatcattgcatccaagagttttggccaagtcattgcaactttctcacgttagtcttcatagtcttcaa

SEQ ID NO: 76432 - DNA, 120 bp, synthetic construct
  source 1..120: mol_type = other DNA
ataggaagtggaagctttgagaagtgagatcatattgtaggatcacattgtaagcagagctgggacttgaaaacagatcttccatctcagtccagagggggcaaaaatagagaaacctta

SEQ ID NO: 76433 - DNA, 120 bp, synthetic construct
  source 1..120: mol_type = other DNA
acgaatttcctcatctgccatgggaggtaatatattcaaagcacctaggcacacatggatattgcataaatggaagtcattattattattattcaagatccattaatttcattggtcagt

SEQ ID NO: 76434 - DNA, 120 bp, synthetic construct
  source 1..120: mol_type = other DNA
cacagccggccagaattcatgtcttgagggacagagccaaagctggagggagcaggatttgatcacactactcagaatggcacacaatttaaaacttataaattgtttatgtctagaatt

SEQ ID NO: 76435 - DNA, 120 bp, synthetic construct
  source 1..120: mol_type = other DNA
tataaagtcaggatagctaagagaccccaacatctcagaagcctagaacaacaaagttcaattttgctgaagttacaggtcaccatggatcagcgtggaagttctgtccatgaagattca

SEQ ID NO: 76436 - DNA, 120 bp, synthetic construct
  source 1..120: mol_type = other DNA
ccacaaacaccggaattgtgcgtaactgtacccataccatgcaagaaaaatgtagtcgtctcagcctgagggttatgatcatgggcttgtaggaaacctctgttcatatcctgagtcttt

SEQ ID NO: 76437 - DNA, 120 bp, synthetic construct
  source 1..120: mol_type = other DNA
gcacctctctttctctgcctgataaatgggagtaatgatcaggatctcttaggagtgtgagaattaagagataaaagctcctcagctgtggcttgctcatagtaggtgttttgatatttg

SEQ ID NO: 76438 - DNA, 120 bp, synthetic construct
  source 1..120: mol_type = other DNA
aaatcccaaacctagaagcaagctatggagacgaacctggtccattcatctctcaagaaatgaatgcattggtttcattccagaaagatcacagctctgaagggcttatgggtttttttg

SEQ ID NO: 76439 - DNA, 120 bp, synthetic construct
  source 1..120: mol_type = other DNA
atttgtgagtacaaagacatggccagagttttttttttttttaatgagacagagtttcactcttttcacccaggatagagtgcactggtgcaatcttggctcactgcaatctccgcctcc

SEQ ID NO: 76440 - DNA, 120 bp, synthetic construct
  source 1..120: mol_type = other DNA
cattttctttcaaatatggtataaaaggtacaatatggagcttggtggcaccaccagggaggtgatgaggaagaaggtgctgcctgtaacagtagcagaagaagtgagaatctccctgac

SEQ ID NO: 76441 - DNA, 120 bp, synthetic construct
  source 1..120: mol_type = other DNA
ttcatttgtccattcattcattctttcctcccaaccatatttttttaaacatctcaacacaacttctcctcaccacccacaattcggtaacgagaggagcacccgatatttttccctgct

SEQ ID NO: 76442 - DNA, 120 bp, synthetic construct
  source 1..120: mol_type = other DNA
ttaatttccccttgcaattcccatgtaatatagcatattcacaggttctagggattgggacatggatatctttgagggactagtattctgtctgccatagctggaggtctgcagaatcag

SEQ ID NO: 76443 - DNA, 120 bp, synthetic construct
  source 1..120: mol_type = other DNA
ccttgtaagactcagtgcaaggggtcaaggctgtgagtcatcattctatggtgaggggcttcattttgattgaacatattctagacagtccaacatggtatagaggaaaggataaggact

SEQ ID NO: 76444 - DNA, 120 bp, synthetic construct
  source 1..120: mol_type = other DNA
catagtgaagtatctcttctgtgcaaaaatggaaaggaagttcattggaaaccatgtattgattgaaaaatgatttgaaacaggccaggcagggtgcgggggctcatgcctgtaatccca

SEQ ID NO: 76445 - DNA, 120 bp, synthetic construct
  source 1..120: mol_type = other DNA
cgggcaatccttgacgtactctggcttctggctgtgtcactccaatctctgttctcatttctcatggtgttttctcttctgtgtgcctgtgtatctaaatctctcttttttaattttgat

SEQ ID NO: 76446 - DNA, 120 bp, synthetic construct
  source 1..120: mol_type = other DNA
tgtaataacgcctgtgtgtataaatacgacaattgcccaagccaataatttggaagtgaggagaagcatctcacaaggtgtctggtctttaggaggcattatatctgtgcctcctaaagt

SEQ ID NO: 76447 - DNA, 120 bp, synthetic construct
  source 1..120: mol_type = other DNA
ctgaaagcgcaagagctgtttctagcctccttgagtgccgggtttggggtttcgtgggtagaaggcactagcagtttcagaaaccaagccttgctctcggtgtgatttgcgtagtcagga

SEQ ID NO: 76448 - DNA, 120 bp, synthetic construct
  source 1..120: mol_type = other DNA
gcaagtggctcagatctgactgtactaaagtgtgaacccccagagggcaaggaccgtggccagttcctctcctaatggcatatgttgcctcgcgcaggggttctcttacactttgacctc

SEQ ID NO: 76449 - DNA, 120 bp, synthetic construct
  source 1..120: mol_type = other DNA
ccaccacctaaactcattcttccaccatgagggatcacttgcatatgtgtcttttgagtttcctagggctgcttgaagcaaggaccaagaactggaaggcttaaaatagatatttcttct

SEQ ID NO: 76450 - DNA, 120 bp, synthetic construct
  source 1..120: mol_type = other DNA
tttgtatatgaaatcccatctcaagcaccttgagaaagctcactctttgaagactttttttttttttttttttttgagagggagtcttgctctgtcgccaggctggagtgcagtggcgcc

SEQ ID NO: 76451 - DNA, 120 bp, synthetic construct
  source 1..120: mol_type = other DNA
tgtagcatcagtgatgtgggcactagggtatccctcctctaaaaggaaaatattaatggtgtcaccaaagagtgggagcctgaatctttaaggtgatctgaatctttaagtgacagaagt

SEQ ID NO: 76452 - DNA, 120 bp, synthetic construct
  source 1..120: mol_type = other DNA
aactcaatgatgaacaaagaaaaccatctttctagaaaagcacgccatgttacattagacatatgaaacttcctcccagttcacaataagtacattccagaaagtttacactttgggcta

SEQ ID NO: 76453 - DNA, 120 bp, synthetic construct
  source 1..120: mol_type = other DNA
ttttaataaagttaatctcctgatatttgtgctagaaattgctggtattaagtggcgatttagcagaacaccactgacccttcagcaagctttgcgcccaggagcttaaagcaaacaagc

SEQ ID NO: 76454 - DNA, 120 bp, synthetic construct
  source 1..120: mol_type = other DNA
agaaaaccttccatacctatttcatgctcatttaaattctttaagagttcctgacccatttaaattccttgagggatgcctggcttcataggcatttgtctgctgctctccccagcagct

SEQ ID NO: 76455 - DNA, 120 bp, synthetic construct
  source 1..120: mol_type = other DNA
tgactcagtacagtttgggttctacagcacgacagtgtgtgtttaaaccctggccctacctcccactggctacttcagtttacagaggaaatgataacagttcctacctaataagtttat

SEQ ID NO: 76456 - DNA, 120 bp, synthetic construct
  source 1..120: mol_type = other DNA
aacgtatcgacgagttcttggagtatggcacagacctgactctctggcaaaaaaccaaaaaacaaacagacaaaaaaaccctttggaaacccattaaaaaccgaagccagaagtgagcgt

SEQ ID NO: 76457 - DNA, 120 bp, synthetic construct
  source 1..120: mol_type = other DNA
caaggcacattttaattttaataaagctagctaaccctcctcatcgtagctccgatttattgagaacccattatgtgccaaacaacatgtgccataccagtgagctccagcaccctttat

SEQ ID NO: 76458 - DNA, 120 bp, synthetic construct
  source 1..120: mol_type = other DNA
aattaggtaaacatgaggaaaggaaggacattccaggtggaagagaataagcagtgtgttgtttgtttgttttttgagatagggtctcgctgtgtcacccaggctggagtatagtggtgc

SEQ ID NO: 76459 - DNA, 120 bp, synthetic construct
  source 1..120: mol_type = other DNA
ttatcatgacagctttgcaaagcagcctgaatggggcacttgttgaccattttagggatgtggaaactgtggctgagagaagtcaaatcattcttccaaggtgtcacaactcatgagaaa

SEQ ID NO: 76460 - DNA, 120 bp, synthetic construct
  source 1..120: mol_type = other DNA
ttccgtgcaacagcttccaatgatgcctcattttttcctttggaatctagaataccgtccaactcccagggcgaatttggtgtttctcaaattgttgaccttgaatcaactgcattagag

SEQ ID NO: 76461 - DNA, 120 bp, synthetic construct
  source 1..120: mol_type = other DNA
acctttgtaactagttgctcatattaagtttcctcctctgaacctatctgggggtgagttctgttttccagactctactctgacctatgcagggagaaacacagtaaaagttgtcataca

SEQ ID NO: 76462 - DNA, 120 bp, synthetic construct
  source 1..120: mol_type = other DNA
aactcagttgtggtacttggttgtggcagtcctaggaaactcacacaggtagagagaaagaactcagaagtatgtattaccaatatagtcagaggcatttgaaccaggcaactccatctt

SEQ ID NO: 76463 - DNA, 120 bp, synthetic construct
  source 1..120: mol_type = other DNA
ataagactccaaacaataggggtgcccaaaacagagtctacagaggatggattaagggacctcactcacatgggcaaagccagttctacaaacattcttgaaacaaatggaattattttc

SEQ ID NO: 76464 - DNA, 120 bp, synthetic construct
  source 1..120: mol_type = other DNA
aagggacttgaattcagggacaaagcaacatctcagcttctttggggataatgtcagggtcattctttgaatatcaagagctcctgagtcatgcaatccttcccatgaacttttcttgat

SEQ ID NO: 76465 - DNA, 120 bp, synthetic construct
  source 1..120: mol_type = other DNA
tctataaataagacaaatgaaatcactgggttagatatttgaagctattgaggtcctcaagagcttcagcccacactccttgctgcgttttcaaccagtctttggagctgtttacacacc

SEQ ID NO: 76466 - DNA, 120 bp, synthetic construct
  source 1..120: mol_type = other DNA
cagtcctccatgtgggctgatggctgtggaatgggaaaagaaagtcgaaagctgattccagcatcgtctcacttgctctttcttagccttatctgtaaaatgggattatagtaaattctt

SEQ ID NO: 76467 - DNA, 120 bp, synthetic construct
  source 1..120: mol_type = other DNA
agtctggatgatgttaacctcatgttataaggccctgctccatcatttaacgcaaggccatcctaatattatggggtagcaaaggggatccaatgagacaacatgaaaaagtactttgga

SEQ ID NO: 76468 - DNA, 120 bp, synthetic construct
  source 1..120: mol_type = other DNA
tgctgaggtcatgaccagctatgtaattagcaaggtccagtgcggaatgaaaatgcagggctacttgtttgaaattattaacaatgtcaaggcaatgacagcagagtattataccaaggg

SEQ ID NO: 76469 - DNA, 120 bp, synthetic construct
  source 1..120: mol_type = other DNA
aggttataggcaggggagcaaatggaaactgtaccatcgcccagcaagttctggcagacaggcctccagggctataaggcaggttgggaagcattgtgtggtaggccgatcctctcagcc

SEQ ID NO: 76470 - DNA, 120 bp, synthetic construct
  source 1..120: mol_type = other DNA
ttcgttcctggctccacatgggtgcccgtgtgttccaatcacatggccacagtctctctcttcctttcttattttctctctcctttgttgatgttgaatatgattatttaaaaggcttta

SEQ ID NO: 76471 - DNA, 120 bp, synthetic construct
  source 1..120: mol_type = other DNA
tatagcagataagagcaatgatttgtgttcagtttttttattgtttttaagagattattcagaagtccattgtattaatgtcaataaaaatttactacaaagtaaagggtctactgcatg

SEQ ID NO: 76472 - DNA, 120 bp, synthetic construct
  source 1..120: mol_type = other DNA
aatccccataatgaccctgtgaaatggaaactacactattatctgtatgttactagtggggaaagtggctcagagaagttaggttactttcacaaggtctcacagccttttgagcacaac

SEQ ID NO: 76473 - DNA, 120 bp, synthetic construct
  source 1..120: mol_type = other DNA
cctgcaggcgctctagaagaccttttatccatactcaggaaaaagaattgattgattttgaagttaaatgttggcatttgctgttattcaaaacctggaccttggcgacagtcatccacc

SEQ ID NO: 76474 - DNA, 120 bp, synthetic construct
  source 1..120: mol_type = other DNA
atagactgtcaggagtactgtgttgagaagggttctgaggcacacccgtaagaaagagtgctataattggttatcagaccatgatattacttatctgctgccacaagccaatgtttatta

SEQ ID NO: 76475 - DNA, 120 bp, synthetic construct
  source 1..120: mol_type = other DNA
tggtgggagttcttaaacatcaagccagacaaccagaccctaaaaaacacactcgcttcctaatcatacatattttgtttcagagaaaaagtgccatttgtaagctagggaccaaaaggg

SEQ ID NO: 76476 - DNA, 120 bp, synthetic construct
  source 1..120: mol_type = other DNA
taatagataaattggatacaatttgggggtctgtggataagacatcgctttgaacctgagctgtaatagacgggttcttgttgccagcaacagaaatcgacgctggaagatttaagcaga

SEQ ID NO: 76477 - DNA, 120 bp, synthetic construct
  source 1..120: mol_type = other DNA
tgagatgtaataagacttgcagatgaattggatgtatgggataaaggaggggaaggaaagtaaatctatctccagtttccaggaaaaactatgggggaaagccatcagcttagctctggt

SEQ ID NO: 76478 - DNA, 120 bp, synthetic construct
  source 1..120: mol_type = other DNA
tgtgcctgttggaaaccagaattgaggaaataccccacacacatccaatcacatgcccccgacatgatgggcgataaaatgagaaaatagtagagttcactgctaccctttactataaaa

SEQ ID NO: 76479 - DNA, 120 bp, synthetic construct
  source 1..120: mol_type = other DNA
ttgcttatcaggaaaatgggggtgaaaaggtatttgcccccatggaattgtagggaccagccaatgaaatgaggtgttgaaatgctagcaaaagcctgggatcataaagtatgctttatt

SEQ ID NO: 76480 - DNA, 120 bp, synthetic construct
  source 1..120: mol_type = other DNA
ctccccaccttcatctctccagaaggtctgcttttctcataccccacttcttttctgctacacgctgagcaaccttagtgagaacttacgttttcatattcaagttggtttttatatgta

SEQ ID NO: 76481 - DNA, 120 bp, synthetic construct
  source 1..120: mol_type = other DNA
atcagctggaaaagcctctttgtaaatacgctcaagaaccaggccaacttgaaacgcctgctccccaggcctaggttgaccacctttagtaatttattgctttcacatctggagttcaga

SEQ ID NO: 76482 - DNA, 120 bp, synthetic construct
  source 1..120: mol_type = other DNA
ttcatttttccttttttctcttttctttcccctctaaaccagcttgagtttgcaccttctggctccagagagtgtcacgcaggtattggccctttcctacttcttttttgaaaaggaaag

SEQ ID NO: 76483 - DNA, 120 bp, synthetic construct
  source 1..120: mol_type = other DNA
aaataaatatgcagagtaaaagttgacattcctccatcatgaagccaactgtccctgtctgcacagagttttgtatgcactcctccactgcatacacaacacaaaggcacacatgtgcaa

SEQ ID NO: 76484 - DNA, 120 bp, synthetic construct
  source 1..120: mol_type = other DNA
acttaacaacatgattaattttttctgcacagcagaagggggaagaaaaaaagtcctgaagaacggcacacaggagcacaagggcttttctgaggttgcctgataagaaaacaagggtca

SEQ ID NO: 76485 - DNA, 120 bp, synthetic construct
  source 1..120: mol_type = other DNA
tcactctcccaaagtccctcagttcaggccacttttcctttcataagtaccccagggctcttcctaaggccaggttaaatggctgaaacgctcccagggtataacatttacatggaagtc

SEQ ID NO: 76486 - DNA, 120 bp, synthetic construct
  source 1..120: mol_type = other DNA
ccaatgagagcatcgttgagctgttaataggtgccacacatgtattaaatattttacatactaatacacgctgttagtaagtgtacccattttacagacggggaaaatgaggctgggctt

SEQ ID NO: 76487 - DNA, 120 bp, synthetic construct
  source 1..120: mol_type = other DNA
tgctaaatgggataaatgttaccttctttgaattgctaaagcatcttttttttcagcatgcaattaacccaaagatcactggaaggtgccaccagtcactccccttgagtgtcagacagc

SEQ ID NO: 76488 - DNA, 120 bp, synthetic construct
  source 1..120: mol_type = other DNA
tccttccttgctttcttccttccttctttccatctttacttccgcccttcctttctaccacaaattcttacttattccaggcaccaggactgtaacagtgaactaagccaacactatcct

SEQ ID NO: 76489 - DNA, 120 bp, synthetic construct
  source 1..120: mol_type = other DNA
tgggtgtcatctaagtcggcagatgatttactgctgacagcccttggcgcaacatcactagttctgggaaggagtaaattaaacattatattttcattggatacatccatttcatggctc

SEQ ID NO: 76490 - DNA, 120 bp, synthetic construct
  source 1..120: mol_type = other DNA
atttactcacagaaatagaaaatttgggctgtaacagatctgacgtaggtggaaaggggctggggggacaataatgcactttaaaacagacaggtgggattcttggcatttctctgatta

SEQ ID NO: 76491 - DNA, 120 bp, synthetic construct
  source 1..120: mol_type = other DNA
cccattctgctaaaacatccaccagagaagatacggggcttcctgaaatggaagaaagaaatttctcaattttctgagggctgtgaatttggctgcaggacacgctgctgcttcatgagg

SEQ ID NO: 76492 - DNA, 120 bp, synthetic construct
  source 1..120: mol_type = other DNA
ccatcacaccacaaggtaggggaatggaatccatcacacctcaaggtaggggaaccgcaaatacaagatgcccagttaaatttgaatttcagataaacagcaagtaatgtctagtatgtc

SEQ ID NO: 76493 - DNA, 120 bp, synthetic construct
  source 1..120: mol_type = other DNA
aaaagaaataataaggaaaaagggtatttgcttttatggctaaaggcatcactgagtgtttctaagaagagtatcggcactcagggggtcaccaactggccattttgaaggtccctagga

SEQ ID NO: 76494 - DNA, 120 bp, synthetic construct
  source 1..120: mol_type = other DNA
aaaaaaaaaaaaaaaaaaaaaaaaggcaaatggggcactagtgatgataagagttcaacagaaaagtcagtctagtcccgggggttcaactggaaggggggatgacatggagaggctgca

SEQ ID NO: 76495 - DNA, 120 bp, synthetic construct
  source 1..120: mol_type = other DNA
tatgcatcttcacactgagaatataagctccactaagggagggatattgttttctttgctgtggaccttccgtgcttacaacagagcatgctctcagtaaaggttagcttatgttatgtg

SEQ ID NO: 76496 - DNA, 120 bp, synthetic construct
  source 1..120: mol_type = other DNA
agtttctattacaaatggccacaaacttggtggcttaaaacaacacaaatctattctcttacagttctggaggccagaagtccttaagcaaggtgtcagcaggatcatgctccttctgaa

SEQ ID NO: 76497 - DNA, 120 bp, synthetic construct
  source 1..120: mol_type = other DNA
tgaggcagatgtgcaaagttaaagtgagaaggcaggaaggcaggaagacccagttcttcactagcttttgtcttattcatcaaaggaatgagcttaaaccagaaagagcagaacaaacat

SEQ ID NO: 76498 - DNA, 120 bp, synthetic construct
  source 1..120: mol_type = other DNA
cacatacggtttctgttgcaactgtttaactctgcagttccagcaggaaagcagccacaggagtatgtaaatgcaggagcatggctgtgttccaataaaactttatttacaaaagtggat

SEQ ID NO: 76499 - DNA, 120 bp, synthetic construct
  source 1..120: mol_type = other DNA
tagtgtttttctggctatcattaagcgttctctctctctatccaaatgatacacatttttgttcatcgtcataatgttgcttgacaagcctcgtactgtcgcagggactgtgccacaagt

SEQ ID NO: 76500 - DNA, 120 bp, synthetic construct
  source 1..120: mol_type = other DNA
ttgtcactgtgtgatttgggagtctttcatttggccaatataactccattagattttggaagtgaacccaggtagcagggagggttctggaagtaacattctccaaccagcttgtaatta

SEQ ID NO: 76501 - DNA, 120 bp, synthetic construct
  source 1..120: mol_type = other DNA
aagaaagtgccacgcaaatgagatttcacaacaccggtatctggtaattttggttgcatttcttctgggtccgtggtggaattcacagagaaaaatgcaagagggaaattgttgcattgt

SEQ ID NO: 76502 - DNA, 120 bp, synthetic construct
  source 1..120: mol_type = other DNA
gacgctagtgggcattttgtttttgagaacaaaatgtgtatgtggtagatatgttaaggaaactaaagctccaaaccccctcagttgtatagacttctttggagatgccaggaaaggctc

SEQ ID NO: 76503 - DNA, 120 bp, synthetic construct
  source 1..120: mol_type = other DNA
tcagcaagtggatccacaatgaaatcaagtcccttaacaaatagagctaatgcaggcctaatcccacatggaagatgaaaaatgtgtcttaatcttttgcctggcctggaaaactagacc

SEQ ID NO: 76504 - DNA, 120 bp, synthetic construct
  source 1..120: mol_type = other DNA
ccaactctgccactatttattgaatgcgtaccatttactaggcacaaaactgacgtgctatctattcactcacctgtgcatattatgtcatttaatcctaactgctactgcccctaggta

SEQ ID NO: 76505 - DNA, 120 bp, synthetic construct
  source 1..120: mol_type = other DNA
tcctggctctggactgcgttgtctctttggctcgctggaccagaagaactttgctgctgtatcacttggggctcagccatgagtcccttccagatgaggcctgtttgcctttgtggatct

SEQ ID NO: 76506 - DNA, 120 bp, synthetic construct
  source 1..120: mol_type = other DNA
gcagcacatgctcaagagaagtaacttcatttgttcaccaaagacacattcaagaacgttcatagcagctttattcctaaagctgagaacagaagacaacccaagtgtctgtcaacaggt

SEQ ID NO: 76507 - DNA, 120 bp, synthetic construct
  source 1..120: mol_type = other DNA
ccagcctggcgacagagcgagactccatctcaaaaaaaaaaaaaaaagaaagaaaaagaacatacatagaatgaaatagaaatcaatcatattttgggggctgttggagaaggggtgatt

SEQ ID NO: 76508 - DNA, 120 bp, synthetic construct
  source 1..120: mol_type = other DNA
tacccagctctccaaggtcatgagcagtgtaagctgaaacatgaggttaaagtctgtaagcttcaggtgtctcatctaaaagtgagaatcgtagtaatgaataacacttgctccactact

SEQ ID NO: 76509 - DNA, 120 bp, synthetic construct
  source 1..120: mol_type = other DNA
atatttgttaagacgagtgagtgggtcataggtccctggattcattcatgtttctaagtttgtggataccgtggcctccttcacaatctctctactcagactaccatcttcttcagatca

SEQ ID NO: 76510 - DNA, 120 bp, synthetic construct
  source 1..120: mol_type = other DNA
agtccaatggggaaaaacacacaaaacatacacgcaagtcagcaattctagtctagtggtgtagtcttcagcagggccgactttgcaatcacagtttgcaacagtgaaatgcatatatgg

SEQ ID NO: 76511 - DNA, 120 bp, synthetic construct
  source 1..120: mol_type = other DNA
cttctgggtcaaggctttttaattttttatttttattttttattttttaatttattttttattttttgagacggagtctcactgtcgcccaggctggagcgcagtggcaccatctcggct

SEQ ID NO: 76512 - DNA, 120 bp, synthetic construct
  source 1..120: mol_type = other DNA
cttctccgctaaaagcatcctgccaagttctaactgccattatttagcaagttcttcaatttaaaaagttaccatctactcaccgtcctggcaaagctgtcagttgctgagaaatggaac

SEQ ID NO: 76513 - DNA, 120 bp, synthetic construct
  source 1..120: mol_type = other DNA
gcattgctagatgtcccctgggaagcaaatcgccccctcattccccatcttccattgggaactactattcaaccattaggcaaataactaaattgctaagtgggtatgatacacattaaa

SEQ ID NO: 76514 - DNA, 120 bp, synthetic construct
  source 1..120: mol_type = other DNA
gttggctattgaagacttttgagtagagcagcgtcatgactttatttacattttaacaatataactctggctttggtgcacagagtggattgcaaggttgaaggaggagtggaagcagag

SEQ ID NO: 76515 - DNA, 120 bp, synthetic construct
  source 1..120: mol_type = other DNA
ttttatcagatttgtaaggattccaagaggtggccctaaatttcctgggcaggtaatcattatcaacatcatcccaatcatcaccgtcaccatctccattaccatcaccatcaccatcac

SEQ ID NO: 76516 - DNA, 120 bp, synthetic construct
  source 1..120: mol_type = other DNA
atgcaacgagcatatttggaactgggcaattgtgtcatattattgaaacccacatctgtgcagataacccttgaagtgttccacggagtccacaaaaaattatacacaccaccacaccaa

SEQ ID NO: 76517 - DNA, 120 bp, synthetic construct
  source 1..120: mol_type = other DNA
ctagttaagcatatatctaattgtccacaatgggacaattttgaacctggaagagggcgctcttaataactatgcttggacaacagcatacatcaggactgtcccatacaatccaggaca

SEQ ID NO: 76518 - DNA, 120 bp, synthetic construct
  source 1..120: mol_type = other DNA
gaacttgtattctaaaaactggaaaagacatcattaaaatatttttttggctaggtgtggtgcctcatgcctgtgagaaatttgggaggctgaggtgggtggattacttgaggtcaggag

SEQ ID NO: 76519 - DNA, 120 bp, synthetic construct
  source 1..120: mol_type = other DNA
atgccctccaaggcattagtcttcaacctcaaggatagaagaaggattttgaaggtgatgatggatggttttcattttattatttgaggtgaaagtaagtgttgtggtggatctacacga

SEQ ID NO: 76520 - DNA, 120 bp, synthetic construct
  source 1..120: mol_type = other DNA
tccctattatcgagaaaagttcttgcgcttcgcatgcaccgagcggggaacaaaagcggcaggggaggtgtcagagaaagatctgagccgggtttataaatgatatgctggcagtcagct

SEQ ID NO: 76521 - DNA, 120 bp, synthetic construct
  source 1..120: mol_type = other DNA
tgtgataaaaggggttgaacctgaaggggaaaagaggaaaaaggtaactgagaattactctttgaagaattcaaagtgtccgtatcatcatatcaggccaaactccaacgacggggaaac

SEQ ID NO: 76522 - DNA, 120 bp, synthetic construct
  source 1..120: mol_type = other DNA
ctagaccaaataccccttctctcttgtacatcctatcaggaaaatgcaatgaggtcattgccaatttcaaaaacaactaccttacaacccattcgggtttcactctggaactaaccacca

SEQ ID NO: 76523 - DNA, 120 bp, synthetic construct
  source 1..120: mol_type = other DNA
tctgaccccagcaataggatttgagtctccagctgtggacaaacgaaattctatagcagataaatgacaccattgcagatcctggctgattgtccaccaaatcattttcttttctttctg

SEQ ID NO: 76524 - DNA, 120 bp, synthetic construct
  source 1..120: mol_type = other DNA
gggttcatgctccaggcttgcgggagagaggttttattgttgttgtgtcattttgttttgtttttagtggcagggtgctacaaactaggaagtagcataactgtgactttaaatgctgca

SEQ ID NO: 76525 - DNA, 120 bp, synthetic construct
  source 1..120: mol_type = other DNA
gtcagggtggatgcctgacgttgccttttatgagctgtgggaatttgggcagtttctgaactcctctaagcctgagaattgttgaaggaatcccataaaataataacagttaatatccat

SEQ ID NO: 76526 - DNA, 120 bp, synthetic construct
  source 1..120: mol_type = other DNA
gccaccgtgcctggcctcaaaccaagaaattattcaaagttattttgaagttatgaggctaatggtccctcacacacttgatggcatgaagtgtgctacataatatgatctccgtatcag

SEQ ID NO: 76527 - DNA, 120 bp, synthetic construct
  source 1..120: mol_type = other DNA
cagtaaacagatggattcagtggaaggtcagggatgcaacaggagaggaacacacgagatggtgaggagcaaataggaagaaacctagttcctggaatgtgtctgcaattcaccattatg

SEQ ID NO: 76528 - DNA, 120 bp, synthetic construct
  source 1..120: mol_type = other DNA
ccaaagtctatcttgcaggatcctagtgaaaactccagaatacattggcagtacttgcacctatctccccagtgtttcacaactttccctgctggaaaacgtatctcacattcttaaaat

SEQ ID NO: 76529 - DNA, 120 bp, synthetic construct
  source 1..120: mol_type = other DNA
attcaagcacgtacacactcaatgcacttatgcatactcacactcacaaatgcatgcattcacatacactcatacatgtgcacacacacacacacacatgcactcacacacccttgcaat

SEQ ID NO: 76530 - DNA, 120 bp, synthetic construct
  source 1..120: mol_type = other DNA
ttaagaccagccaggccaacatggtgaaaccccatctctactagaaatacaaaattagctggatgcagtggcatgcgcctacagtcccagctatttgggaggctgaggcaggagaattgc

SEQ ID NO: 76531 - DNA, 120 bp, synthetic construct
  source 1..120: mol_type = other DNA
tcaagtacagaacaaccagcattgctcttggacaccgtgtgaaggtacttgaatggccaacttgtgtccagcaccactttgccaccaagcagtaccttgcagggatatggaaagaactca

SEQ ID NO: 76532 - DNA, 120 bp, synthetic construct
  source 1..120: mol_type = other DNA
cagattccaaatctttctctctccatacatcattccatatgcatgccccacagtagctggggaatggagaatcagaaggctgttttacgccatcactttctttcctaaaccaggtcatct

SEQ ID NO: 76533 - DNA, 120 bp, synthetic construct
  source 1..120: mol_type = other DNA
ccatgagagagctatcatgtctcattcttgtctccattagccaccctgtttccaagcttgtgatgggctccattgaaaatgatgttcacatatttggattgctctccccatctttttgaa

SEQ ID NO: 76534 - DNA, 120 bp, synthetic construct
  source 1..120: mol_type = other DNA
aaaggcccaaatcacactattcaccttcaaaatctttgggttcccaaggaacaggaatcagtagtacagataaactttgccttgatatgcagggagaacttttctggtggagttgacacc

SEQ ID NO: 76535 - DNA, 120 bp, synthetic construct
  source 1..120: mol_type = other DNA
aggtgggctctgaaataaaactctctgggtttataatcccaggttgacttggaggccacttacctatctgtgatatcatgcctcagtttccttaatcttcaaaatggtgctattcacagt

SEQ ID NO: 76536 - DNA, 120 bp, synthetic construct
  source 1..120: mol_type = other DNA
tcatttcagcttcagaaactgccctcacttctttctttatcacctgatatgggtccctaaaagggggggaacatgcagggaagaagaggggcaaatctgtttatctgaatatctattaat

SEQ ID NO: 76537 - DNA, 120 bp, synthetic construct
  source 1..120: mol_type = other DNA
gaaaagcaactcaaaggcaacttcctttttccacccaggagctgctactttaatttaatccttgtctgtgtcaagacagataaggataggaaatttggtgagaggagctcatgtagtgtc

SEQ ID NO: 76538 - DNA, 120 bp, synthetic construct
  source 1..120: mol_type = other DNA
tgtgcttccagtgaattattttagaaccctgaagatctcaatctaaatgtcattttctttggtaagtttgctctatgtttttccccacgataggtaggccctgctatcgtgcactctcac

SEQ ID NO: 76539 - DNA, 120 bp, synthetic construct
  source 1..120: mol_type = other DNA
ccctggttaaccagctgtcattctcatggtggcaagctttgcccaagcctgggaatagtatcaggacatctgaaaccccaaggaaaaagaatatgtaaaatatattcagctctacaagat

SEQ ID NO: 76540 - DNA, 120 bp, synthetic construct
  source 1..120: mol_type = other DNA
tgcaaagatgagccatatacacacggaaatcttccgtactttgaatcaagtttttcctccatttgagacagttctcctctttctgtcaattctatgggtgcttgactttgctgaacaccc

SEQ ID NO: 76541 - DNA, 120 bp, synthetic construct
  source 1..120: mol_type = other DNA
gggagctgatgctttcatttcactgaatatccttacataaaagctcctgaatgagccacatccctggctcttgaggctccagattctatctgcttgaaatcatccataagagaaggtaat

SEQ ID NO: 76542 - DNA, 120 bp, synthetic construct
  source 1..120: mol_type = other DNA
agttagttgcccagagttttgtagccagtaagtagaaaagctgtattcattaatagatccattaaatgatttgggagccttccctatgtgctgggagctgggttacaggaaggaacaaca

SEQ ID NO: 76543 - DNA, 120 bp, synthetic construct
  source 1..120: mol_type = other DNA
tgggtcaacctgagtaggcaaaggatgtttctctcctctaaaagtctccttccccaggaggctaattggctaaagtatacttggagagtttctaggtggtaaaaggagtagtcttaataa

SEQ ID NO: 76544 - DNA, 120 bp, synthetic construct
  source 1..120: mol_type = other DNA
ggctggttttcttgcttcactcagcattgactgaagtcacttaagggtactcagatggtggatgaatggtttggagggccccaaacattcattcacatttttttttttttggtgttttgg

SEQ ID NO: 76545 - DNA, 120 bp, synthetic construct
  source 1..120: mol_type = other DNA
gcagaacacatcctgatcttgggcagagaggagtttaaactctgcctgttggtaggttattcactctcccaagcttcgctttttctcatctgttaaatgtggataaataacattcacctt

SEQ ID NO: 76546 - DNA, 120 bp, synthetic construct
  source 1..120: mol_type = other DNA
tttctagaacattctttcctcccctcttaatgccctttgttatctcctactcatcaagatctctgctagagagtccttctctctacagcatctccaggcatttcctgtaaaatatatgcg

SEQ ID NO: 76547 - DNA, 120 bp, synthetic construct
  source 1..120: mol_type = other DNA
ccagcagcaagaaggccctcaccagatgcagtcccttgaccttggacttctcagccttcataactgtaagaagtaaattccttttaaaataaattaccccatttcaggtattctgctatg

SEQ ID NO: 76548 - DNA, 120 bp, synthetic construct
  source 1..120: mol_type = other DNA
gtgcgtaatcaaggacagaattctaggggaaacagagtgacggctctcatagagaaatgagcaagctgagtgacatgggaaattggaagaggtaatttattttctctctttcttcatctt

SEQ ID NO: 76549 - DNA, 120 bp, synthetic construct
  source 1..120: mol_type = other DNA
tgatgatgatgaaggtgatgatgacagctggtatttaatgcacatcccaggcacttccctgggcatttgactctgacaaccaagtcaaaaaggaattattaacatcacatcacaaatggg

SEQ ID NO: 76550 - DNA, 120 bp, synthetic construct
  source 1..120: mol_type = other DNA
ttattacactatgacccagggattccacccctagatataagcccccatagaaacactcacatgttttttgttttgttttgttttgctttgtttagttgagaatacattattttattttat

SEQ ID NO: 76551 - DNA, 120 bp, synthetic construct
  source 1..120: mol_type = other DNA
ttgatggggttgtttgttttttcctcgtaaatttgtttgagttcattgtagattctggatattagccctttgtcagatgagtagattgcaaaaattttctcccattctgtaggttgcctg

SEQ ID NO: 76552 - DNA, 120 bp, synthetic construct
  source 1..120: mol_type = other DNA
catgtacaagaacatttgcagcagtacggcaactgaaacagcccccaaatggaaaagtccatcaagcgtacaatgctataatcacaaaatggaatactatacagcaatgccagtggactt

SEQ ID NO: 76553 - DNA, 120 bp, synthetic construct
  source 1..120: mol_type = other DNA
tacttggtaaagagaaacagctctcatcttgcctgtcaaccctaatagattggttgtgtctacctagagaactgtgttgaaaagaactctgagtgtcgtgatctgttagtaatgcctgcc

SEQ ID NO: 76554 - DNA, 120 bp, synthetic construct
  source 1..120: mol_type = other DNA
acgcacactcccttctcaggcaaacaacaggtttggcatggaacccctcagtgtgcacagtactgcctaaacatacaactctttggaccaactagacactttattttctcactatttaat

SEQ ID NO: 76555 - DNA, 120 bp, synthetic construct
  source 1..120: mol_type = other DNA
catcagccagcagctgcagctagagatcaatgataagtagaaattgtgtacgttcaacagcatgtgcctgctttccctacaaatcatgtgacttcctattaacagtatctctcttcttac

SEQ ID NO: 76556 - DNA, 120 bp, synthetic construct
  source 1..120: mol_type = other DNA
taggtcaaagtgagacatttcttacaggggagctttcaacttaggtgacactttcctgattctgaatcttgttccaaaatgccacaagcaaagtcgccagcctagaatatcaacatgtca

SEQ ID NO: 76557 - DNA, 120 bp, synthetic construct
  source 1..120: mol_type = other DNA
atgtaaaccactggagaaatttgaaccattggagatattgacatttacttcagtcttgaaccagaaagaaatgctcagactggaaggggtacttaaactccaactgaaaccctggactgg

SEQ ID NO: 76558 - DNA, 120 bp, synthetic construct
  source 1..120: mol_type = other DNA
agaacaggaagggagtcaggaaagtattctatttaagcattgttttaaaaaaaagtgatggccgggggtggtgactcacgcttgtaatcttaccactttgggaggccaagtcaagtggat

SEQ ID NO: 76559 - DNA, 120 bp, synthetic construct
  source 1..120: mol_type = other DNA
gtatgaatcaatttaacttataaaggcaacagagttgctcattggattacactgagaatggtgattaacagactgccacttctaatatgaattttgtctctgcccgagtgagggtttaaa

SEQ ID NO: 76560 - DNA, 120 bp, synthetic construct
  source 1..120: mol_type = other DNA
ggaatatataataaaacaattatacaactcaccataatgtagactcagtgggagccttgagcttgtcttcctgcaattagtgggttccatctgggggtgatgggagacagtgacagatca

SEQ ID NO: 76561 - DNA, 120 bp, synthetic construct
  source 1..120: mol_type = other DNA
ccatgaagggggcctgggtgctgctaagcatttgcatttggttgtttatcccatctctgctcttttaaccttctccataagcatgtctaagggattaaaaagtcattctaatgcacaaag

SEQ ID NO: 76562 - DNA, 120 bp, synthetic construct
  source 1..120: mol_type = other DNA
aacttccactgagttttctttagagtttattttggactcagggctagttcacagcgtccactctcctggtttcacttacttctcccttctcaaagcttaagtggtatgcaagatgtatga

SEQ ID NO: 76563 - DNA, 120 bp, synthetic construct
  source 1..120: mol_type = other DNA
ctataaggaggcccttatgatgtgtttccagggcacgaaatatgaaactatttcagaaacaataattcactgcaaaaaattgatcccatcggagacagcagcatttgtctggttgtaggg

SEQ ID NO: 76564 - DNA, 120 bp, synthetic construct
  source 1..120: mol_type = other DNA
ttagatttttctcatctttttccagaaaaatcttcacatggcatgtgtgagcatctgtgtgtgtgtgtgcctgaacatgtgcattggtgatggcatgtgcaagtgtattcccaagtctgg

SEQ ID NO: 76565 - DNA, 120 bp, synthetic construct
  source 1..120: mol_type = other DNA
gaagcaccttgttccatcatcatagcacattgctcagaacccagcctctggagtcagaaaactcaggttcaaatcctagccctgaaacccagtgctctaagaccttgggcaaattgttca

SEQ ID NO: 76566 - DNA, 120 bp, synthetic construct
  source 1..120: mol_type = other DNA
agacagagtaaggaaagagagagagggaagaatgaggagaaggaggacagagaagagaggagaagacagaggagatgcagagaaagaaaagagaaagaaggaaagagagaggaaagagaa

SEQ ID NO: 76567 - DNA, 120 bp, synthetic construct
  source 1..120: mol_type = other DNA
gccccaggggtaaaacattccctttgctcccgtctccctggcaggaaatctatgcagagaggatgttgattatactcttcagcacttatttcctttacattattttgattccgttatttc

SEQ ID NO: 76568 - DNA, 120 bp, synthetic construct
  source 1..120: mol_type = other DNA
aagaacattgtatgtattgcctcattttacgctccccaaacactctgaagaaggttttgcaaagcaccctatttcacagaagaggagacgaacgcttcaccacgtgcatgttcttctaaa

SEQ ID NO: 76569 - DNA, 120 bp, synthetic construct
  source 1..120: mol_type = other DNA
attaaatgcttagtaaatttattcattactccaatgaatatatattgtgccaggaattgttctagatcaagaatctaccccaggcggagagaacgcaagagccaagggcctggaggtgtg

SEQ ID NO: 76570 - DNA, 120 bp, synthetic construct
  source 1..120: mol_type = other DNA
ccggtggcatttggagactgaataattgcctcagttccggctctccaaggggaagcttttcctcaatgtcttggcatcttggagatactggtcattttcctacttaggtataagagattg

SEQ ID NO: 76571 - DNA, 120 bp, synthetic construct
  source 1..120: mol_type = other DNA
ccagacactctaatttattagttctggggtgcaaccccagtagcaggtttttaaagctcctagggtgatgtgaatttgcagccgaacttaggaaacactggcataaagtatttaacacac

SEQ ID NO: 76572 - DNA, 120 bp, synthetic construct
  source 1..120: mol_type = other DNA
tctggccatgccccagccagggtgctgctgattctacctacctaaccaaggtgaccaataggcctgattctggagagaaagatgtatcatttttctattgctgctgtgataaattaccat

SEQ ID NO: 76573 - DNA, 120 bp, synthetic construct
  source 1..120: mol_type = other DNA
attctcttactcattttttgcacttctcctactcaaccccaagactaggttcagattctctccccagttgagctaggccaggcattctctgccccattgcaggcttggttcaaggaatac

SEQ ID NO: 76574 - DNA, 120 bp, synthetic construct
  source 1..120: mol_type = other DNA
cttgggttgttttccatttttcaactaattttaaaaaatcaggggcttgtcactgatacgccccagccagggaggggtgtttttgagggatagaagagggtagaaagaaccaatgataca

SEQ ID NO: 76575 - DNA, 120 bp, synthetic construct
  source 1..120: mol_type = other DNA
tggaataaggagaattccaaccccacaaggtcttaggaagatttagtaaactacgccctgttgtgctcatagcacagtgcctggcctggttaagtactacaaacatgagttggagtttat

SEQ ID NO: 76576 - DNA, 120 bp, synthetic construct
  source 1..120: mol_type = other DNA
tttttcactccccaaactacctgtggtggttaactctgtttcaaatagattccgatttagtttttctgagcacttactggataccagacactgccttgccattctctcatggaactctct

SEQ ID NO: 76577 - DNA, 120 bp, synthetic construct
  source 1..120: mol_type = other DNA
attgctgaatttttctgagcctctgttgacctacccatcaaatggggagtgtggcagtcctctcttcataagacctttaggaagcaagtgaggattaaataagatcatgagcatttgctt

SEQ ID NO: 76578 - DNA, 120 bp, synthetic construct
  source 1..120: mol_type = other DNA
ttctggcatgtcgttcaatgcaccagactttctagtgtatccatgtttcccgctaaaatgtatgcccatcaaaagcaaagactctgttccattcagctcccgattttctgtagctaaaag

SEQ ID NO: 76579 - DNA, 120 bp, synthetic construct
  source 1..120: mol_type = other DNA
tttgtaggagcccttaacatgcattttaccgtctggattttcttttttttttttttttttcagatggagtctcattctgtctccaggctggaatgcagtggcacaatctcggctcactgc

SEQ ID NO: 76580 - DNA, 120 bp, synthetic construct
  source 1..120: mol_type = other DNA
cagtgttccttcttcagcgtgggtgacactttggactcaatgatctcgaatactcccatatgcagcagtatggcagtaaatccatgtcatctaggaatccatcagcactctgagggattt

SEQ ID NO: 76581 - DNA, 120 bp, synthetic construct
  source 1..120: mol_type = other DNA
agattacttccaattgcccacagtgacccatccatggcctttggctgttccctgctgctttccctacacgcctgcaactgcttcccaggatctccttccaagtcaattacttgccttcat

SEQ ID NO: 76582 - DNA, 120 bp, synthetic construct
  source 1..120: mol_type = other DNA
gagggtgtcgtctggcagtgctatccttcatatggaacattaagctgaggtcctgcacagtcctgaacattaaccatcccctggtacccatgaagaagagctacgggttttattaacctc

SEQ ID NO: 76583 - DNA, 120 bp, synthetic construct
  source 1..120: mol_type = other DNA
agagaggaaattccttctcagagggagatcgaccctcatgacagttttacacatgaagaggcgggcgccataagagaatgagtgattaactacatgtatttggctttttacctttcaaaa

SEQ ID NO: 76584 - DNA, 120 bp, synthetic construct
  source 1..120: mol_type = other DNA
agtaggtattttttactgcttttttttttttttaaattaggattgcacatagaccagagttttcaaattgcgtgtgtccccacctaccataaggggtgggtgggtgggggagtcacctag

SEQ ID NO: 76585 - DNA, 120 bp, synthetic construct
  source 1..120: mol_type = other DNA
ttcctgctaaaatgaaaatgttcgatatctgcactaatcccatagccactagccaaacgtggtgactgaagccttgaagtttggctagtacgacccctaaactacagttattgtcaataa

SEQ ID NO: 76586 - DNA, 120 bp, synthetic construct
  source 1..120: mol_type = other DNA
agaaaaaagagtagagtgaatgcaggaaggctgcatggaggaggcagcatttgagctgctcatataaggttaaagagttgttcatcttccagagaaaggaaagagcctggacaaaagctt

SEQ ID NO: 76587 - DNA, 120 bp, synthetic construct
  source 1..120: mol_type = other DNA
tgacttttgccctgagtgatggaggcaacctataaattgaggtgaatcacctcaattacaagtcattacaagatttagctgtgtgatgccagacatctggccaactccaactactatctt

SEQ ID NO: 76588 - DNA, 120 bp, synthetic construct
  source 1..120: mol_type = other DNA
ttggttttctcagctataaaatggggatcgcagttcctgtagataggctccagcagttgttgttaagatcaatggaagtaacatgtatgaaagggcctactccagagcttaaagctgtcc

SEQ ID NO: 76589 - DNA, 120 bp, synthetic construct
  source 1..120: mol_type = other DNA
gcgcccggccgagctgtgcagttttgatccagttactttacctctctgagctatatctttctctctttaaccagggataaaaatgagacctacttcatagagttattataagcattagat

SEQ ID NO: 76590 - DNA, 120 bp, synthetic construct
  source 1..120: mol_type = other DNA
aatactaggggtcacatttcaacatgagatttagaagggacaaatatccaaactatatcagtgggatacagaggtaaacagacacggactagtgctcaaggagcttgaaagctggaagga

SEQ ID NO: 76591 - DNA, 120 bp, synthetic construct
  source 1..120: mol_type = other DNA
aaggaaggaaggagggaaggaaaattgttgggtggttcaggactctagccattgaaaaatctctctactatccaggaatagagctatgtgttggggcagaagtccccttaaattaggaat

SEQ ID NO: 76592 - DNA, 120 bp, synthetic construct
  source 1..120: mol_type = other DNA
ttcattcatttagccatgagttattgggaagcgtctctgtgacaagctccatgtcaacatgttgggaacacagtgatatgttcccagcatgtgaaacaggctttactcttacaaactctt

SEQ ID NO: 76593 - DNA, 120 bp, synthetic construct
  source 1..120: mol_type = other DNA
ccagcagacttgggcgttcatagaacctaattctttaatggactctgggtgcatttcttgcttccatcttgaggtcattaaaaagcctgtggtgaactacaccgacataaaccttttata

SEQ ID NO: 76594 - DNA, 120 bp, synthetic construct
  source 1..120: mol_type = other DNA
acaggctccagcgcggctgggcttgagagaccatcttctcgtgtctcctttaatttagctgatagatatgaaaacgagttgagttttaaaaataaataggcatttctcattatctgggga

SEQ ID NO: 76595 - DNA, 120 bp, synthetic construct
  source 1..120: mol_type = other DNA
aattagttttcataaatgtcagcagtgtttgcacaggaaatacaccagtctaaatgtggaccaaactccgaattaacttcccccctcaggaaaatggacatttctgccagggtgaaggtg

SEQ ID NO: 76596 - DNA, 120 bp, synthetic construct
  source 1..120: mol_type = other DNA
ctgcatcttcttcaagtaaacatactgcaaaagtgactgtggccagcacctacaaaactgcaggaatccaataacacgcctgtggatttgggagacagactaatactttgtgttcattct

SEQ ID NO: 76597 - DNA, 120 bp, synthetic construct
  source 1..120: mol_type = other DNA
ggcggaggttgcagtgagctgagatcgcaccacttcactccagcctggtgacagagcgagactctgtctcaaaaagaaaaaaaaaaaaattgagagagagagatttattacaatatatta

SEQ ID NO: 76598 - DNA, 120 bp, synthetic construct
  source 1..120: mol_type = other DNA
ccaccacgcccagccttgagtagtgaattcttaatgagagcatgataaagtagaatcactgtttattctacaccgaggacagagcattctggaaaaatgaagcctgagctgatgtgttat

SEQ ID NO: 76599 - DNA, 120 bp, synthetic construct
  source 1..120: mol_type = other DNA
gaggtaaggtctctgctgtcatggagagacagatactactcagttaagcaaataagataacttcagataagaagaaaataagacaggtggagtgacaaagtgcctggaaggggaaaccaa

SEQ ID NO: 76600 - DNA, 120 bp, synthetic construct
  source 1..120: mol_type = other DNA
aggttttcacccattaagattattactttctctgctaagaggtgcagacaagacatcaacacgcactgctaggtatttatagtttacacaaaccacatggtcatcaaggcagggcttatg

SEQ ID NO: 76601 - DNA, 120 bp, synthetic construct
  source 1..120: mol_type = other DNA
catatgccaccacccagaaaggacactgcttccccttgaaggtatactctgatgctctttgcttagagaaggtgattttttttgttgttttactagcacacaaacatactctacacaatt

SEQ ID NO: 76602 - DNA, 120 bp, synthetic construct
  source 1..120: mol_type = other DNA
tatctaattcagtccttccaatcctgtgggctgcaggtattacttttccagttttacagagaaggaacattgcacacagactttgtgcagcattctcacctcatatgtggtagaatcaag

SEQ ID NO: 76603 - DNA, 120 bp, synthetic construct
  source 1..120: mol_type = other DNA
gagccagcctagctatttgccattgttccatcctcgtggtcacagagattgattcacagaaggacatgtagcttagcttaatctaggcaaagtgaattcataaactcaaatggaaggttt

SEQ ID NO: 76604 - DNA, 120 bp, synthetic construct
  source 1..120: mol_type = other DNA
tttactcattcatttgcctatttatttatttggagtagtgatgttggctcagtgacttgggactgtgtttggagagctggcgtgcattggcagctgggcactgctctctggtcaggctac

SEQ ID NO: 76605 - DNA, 120 bp, synthetic construct
  source 1..120: mol_type = other DNA
tcctgttgctcccttggagtcccaaactggcattttcctttcaatttggggcgaggagatagagagagacagagagacagagagagagaaagagactcttccttcttcctaaaggtcatg

SEQ ID NO: 76606 - DNA, 120 bp, synthetic construct
  source 1..120: mol_type = other DNA
cgtgcctccctcgcctgatgccacaagattaagcaatttgcttttaattaggactgcagtcatttccaaaggaagcagcagagagagggaggcaggctggctctttacagttgacgtgga

SEQ ID NO: 76607 - DNA, 120 bp, synthetic construct
  source 1..120: mol_type = other DNA
acaactagccaccgcaggtgtcaacacctcggacgcttttgacaaacaccaactggaaattttctccaaaagacacactccctgatttaggctgtcactccgcagaactgtttctgctct

SEQ ID NO: 76608 - DNA, 120 bp, synthetic construct
  source 1..120: mol_type = other DNA
atgtcccgagttctgatacttaggctgctgaggacagaagttaaagagttaagggccatgaaacctgcaatctggatttgaattccacttagaccatacactaaccaaataacattaagc

SEQ ID NO: 76609 - DNA, 120 bp, synthetic construct
  source 1..120: mol_type = other DNA
aagtttcctgaggcctccctagccatgcggatctgtgggtcaatgagacctctttatcaattactcagtctcgagtatttccttatagcaatgtgagaatgtactaatacaccctatata

SEQ ID NO: 76610 - DNA, 120 bp, synthetic construct
  source 1..120: mol_type = other DNA
gattcaaatctggggctcagcaaagctacataatcccacatatcatggtccctttgcaatagttcctgaattatgaaagctgtgcaccttaaatctttcattgccaaagggtgactgtca

SEQ ID NO: 76611 - DNA, 120 bp, synthetic construct
  source 1..120: mol_type = other DNA
atctattagcatcctcagggcaaggtagtgtggtagtgactgttctccccgttgcataggtgaagactagagtcaaataggctttgacataaatgtcactccctgagttgtgcagtgaaa

SEQ ID NO: 76612 - DNA, 120 bp, synthetic construct
  source 1..120: mol_type = other DNA
gaagtgagttgacacatcccatcaacgaagactctgttttgtcctagactggcatgacttgctctaagaagtctgtcatgcaagggctccacttacacatatacgcagtacacctatacc

SEQ ID NO: 76613 - DNA, 120 bp, synthetic construct
  source 1..120: mol_type = other DNA
gaccatatccttcgttatttgtccatgtagattccatacttcgtagctaaaaagcatgaacttgaactcgaacaaaggctttttctccagggactcagagaggagtctgctaaagcatgt

SEQ ID NO: 76614 - DNA, 120 bp, synthetic construct
  source 1..120: mol_type = other DNA
aaggtgcctgttttctaaatggctgatactcctttgaaagtgagagatctgactatttgttcagaaatcccgcactttagagtcacaagcagggctttcagaagtagtttgaacgtgcat

SEQ ID NO: 76615 - DNA, 120 bp, synthetic construct
  source 1..120: mol_type = other DNA
ccagggcaccgggaagccggggctactactgagcatatttctggggctggaatgccatcccttggagagcctgtctcttagagacgccaggtctgagcaggctttagaaaacagcagagg

SEQ ID NO: 76616 - DNA, 120 bp, synthetic construct
  source 1..120: mol_type = other DNA
acaccacttttcatccctgggaccgtccagggaggtaggtagaattaattattgtcctcatcatgtgagagactgagacatcctaagattaacaattacatcgaaagagccataatcaag

SEQ ID NO: 76617 - DNA, 120 bp, synthetic construct
  source 1..120: mol_type = other DNA
ggatggaaacgaccgaaacagatcacaggggcaaccaaagagaccaatatattaatcacagaaaataaaatttgacataacccagtgcatcagggacttgggttgctgctgttgttgatt

SEQ ID NO: 76618 - DNA, 120 bp, synthetic construct
  source 1..120: mol_type = other DNA
tataaattaaagcagatctgataacaactccatgctactctcatatttactcacttggctcttggtctgttttctggagtgggagagacaggaacaagtggcccaaaggaaaaagctgtg

SEQ ID NO: 76619 - DNA, 120 bp, synthetic construct
  source 1..120: mol_type = other DNA
gtgtaaatagagccttcacatgtgtaattggttaagaatgtcgaggtaaaattatcctgaatttagggtgggccttaaatccgatgacgaggatctttgtaagggaaaggagggggagat

SEQ ID NO: 76620 - DNA, 120 bp, synthetic construct
  source 1..120: mol_type = other DNA
aaagattgggattacagatgtgaactaccttgcctggctgaatctttttcatataagaaattccatctcccagtagccagtgtggctgaagagaggccttggaaacacaagaaggtgtga

SEQ ID NO: 76621 - DNA, 120 bp, synthetic construct
  source 1..120: mol_type = other DNA
aatttcaaaaactaaagagggacctcttttcttatacccagccattctccatctaggaacaaatcctaacaaaataatatcaggagcaaatgcagagattggtgtgggccccgtggaggg

SEQ ID NO: 76622 - DNA, 120 bp, synthetic construct
  source 1..120: mol_type = other DNA
actgagaatgaaataagacaggatgggcaaagtgtatttactcaaggtcagaggatcattgtgagaagattcgggccagttttagcatcagcatgtttagtgcaccacgagaaatgctga

SEQ ID NO: 76623 - DNA, 120 bp, synthetic construct
  source 1..120: mol_type = other DNA
aaccctttttacaaatgaggagaccaagtcttcagagatgtaacatatggaagacacagagcaaatagatggctcagctgggattcaaaacccttagaaggctgtaagtccagagttcag

SEQ ID NO: 76624 - DNA, 120 bp, synthetic construct
  source 1..120: mol_type = other DNA
taaaaagataaaggtttgaaaatgctttacaaaagctaaagccccattatgggctaaagggattgaaggcacgtctcacttcctctgaatgctacatttaagaaatcaggccgggcgcag

SEQ ID NO: 76625 - DNA, 120 bp, synthetic construct
  source 1..120: mol_type = other DNA
cattaaagcaatgcacctggtcattcaagagctctgatggagatgtacaaggtgatggatgttgttttcatgcctgctaacagaatattcaacctgcagcccatggaccaaggaataatt

SEQ ID NO: 76626 - DNA, 120 bp, synthetic construct
  source 1..120: mol_type = other DNA
ttagcaatgaagcatttttgttttgttttatttgtttttgtttttgtttttgaggaggagtcttgcactgtcacctgggctggagtacggtggtgcgacctaggctcactgcaacctctg

SEQ ID NO: 76627 - DNA, 120 bp, synthetic construct
  source 1..120: mol_type = other DNA
gggccactggtactggtctgtggcccgaaggttggggaaccctggtataaacataacttttatatgcagtgagaaaccaaaaaaatcatgtgactcacttaattactgtatttgctttat

SEQ ID NO: 76628 - DNA, 120 bp, synthetic construct
  source 1..120: mol_type = other DNA
ggctctgctttttaacggatgttaacttgcatcaacagactaccacaaaatgcacctgcattggagaaatgtccatctatcaatgtagactcttgcaaagaattccaagtgttagacaaa

SEQ ID NO: 76629 - DNA, 120 bp, synthetic construct
  source 1..120: mol_type = other DNA
ccataaagaaaatgctacccaccaccttcagtttgcagggcccgtccagttaaaactaacatgtagttgtttagtctatgctaggcattgtgctaactggaaaagggttagctaattcat

SEQ ID NO: 76630 - DNA, 120 bp, synthetic construct
  source 1..120: mol_type = other DNA
cttttgtgctacagtgacagaatcgagagactgcaatagagacagtgtggcctgcaaagcctaaaatatttactcttttgtcctttacagaaaagaaattgctgacccctgacagagtag

SEQ ID NO: 76631 - DNA, 120 bp, synthetic construct
  source 1..120: mol_type = other DNA
aacgatatagaagtcccttctctaggtaatgtcatccaatagcttctccttgaaatcaaagcactggaaacacttttcagacctccgcctaactggtactcaatcatagtgagtaagtgg

SEQ ID NO: 76632 - DNA, 120 bp, synthetic construct
  source 1..120: mol_type = other DNA
cccattttagggatgaatacattaagattctaagagattaagcgattgctaaagataagacagcaagtcattgaccatggagaggctgaacttcatatcagtgtggacccagagcccaag

SEQ ID NO: 76633 - DNA, 120 bp, synthetic construct
  source 1..120: mol_type = other DNA
accattgcactacagcctgggcaacaagagcgaaactccgtcttaaaaaaaaaaaaaaagaaagaattccctccaccctttgtccatttcccatgtcacctattcctcttaaaggtcaac

SEQ ID NO: 76634 - DNA, 120 bp, synthetic construct
  source 1..120: mol_type = other DNA
taaaaacaaattaatgtggacattcctttggtgaatgagacaaattctacagggaaaacagggagttaaacgctgcccatgtctctaccatctgcaatgtgcttgcctactatcctagca

SEQ ID NO: 76635 - DNA, 120 bp, synthetic construct
  source 1..120: mol_type = other DNA
cacacacccttggagcctatgtatttgctttggtgtgtgtataagggcttataagaaatttgggtaaatgtaaccttgtagggactcattgaagattaatagagatggtggtcattgctg

SEQ ID NO: 76636 - DNA, 120 bp, synthetic construct
  source 1..120: mol_type = other DNA
atcatcccaccatccaaagatttcaactaagattttggtatgtataagtgtgtgtgtgtgtgtgtgtgtgtgtgtgtgtgtgtgtctttgctgtgtgactactcagctaactagcaaaga

SEQ ID NO: 76637 - DNA, 120 bp, synthetic construct
  source 1..120: mol_type = other DNA
tccattactcagtaaggtaggcaccattcttctttccaacatttaggatagaagacaaggagcagttgatcagaggcagagctggggtcaactacagatttgtctcacataaaagttcat

SEQ ID NO: 76638 - DNA, 120 bp, synthetic construct
  source 1..120: mol_type = other DNA
aagcgtatttgctgggtcagtgggtatgtgcatttaaaatattcatccctttcaccaggttaacctccaaaaaggctcattctgctttttgtccgttttaatacggctttttatcttttt

SEQ ID NO: 76639 - DNA, 120 bp, synthetic construct
  source 1..120: mol_type = other DNA
tctttttcagctctccaaacttgtagtaatctgagtctccctggctgccttctactgatgtacttataggcacatggcagaaaggatgtgaaatttggtaccaaaaacacatgtatttgt

SEQ ID NO: 76640 - DNA, 120 bp, synthetic construct
  source 1..120: mol_type = other DNA
ctctggcttacctcagttttggaaaagtgataccgataataatggccacaatggctaaccgttgctgattccttatgccataccaggcaccgtgcaaacatactctgcactgatttcatt

SEQ ID NO: 76641 - DNA, 120 bp, synthetic construct
  source 1..120: mol_type = other DNA
cagatgggtccgggtcacatagagccatgaaagctatggtaggagttgggctttcacccccacacaccatggtaggtactggatggttttaagtcacataatgacatgacctgatttaca

SEQ ID NO: 76642 - DNA, 120 bp, synthetic construct
  source 1..120: mol_type = other DNA
tgatgcaactcgaacagatgacagtaagaaagcagaagttctccactcttattttgcttctaccttctcccttgaggaacaaggtcttaaggctggaaagaatcaatcatgcattgtgca

SEQ ID NO: 76643 - DNA, 120 bp, synthetic construct
  source 1..120: mol_type = other DNA
gacaggttacagcagatggcgaatatgacaagaaagtaagtcatgggacctgtttcccaccatggcttgtgtaagattaagtacttttaaaaagggccactagactagaagttcaaggag

SEQ ID NO: 76644 - DNA, 120 bp, synthetic construct
  source 1..120: mol_type = other DNA
gtagggtctatctccaataggtattgtgaggaataaatggggtggtacaggaaaagagcttcatatgtcacctcccttgggaaaagtgcctaatatatgtcagcaggcttaatgatcatt

SEQ ID NO: 76645 - DNA, 120 bp, synthetic construct
  source 1..120: mol_type = other DNA
ggaatcttagaagaccacctaatgtggtaccttttatgccatggggaataattatctcatgcaacagacaccgggtatttaagatccattattactcatgttcatcttttcccctgcccg

SEQ ID NO: 76646 - DNA, 120 bp, synthetic construct
  source 1..120: mol_type = other DNA
cccagtgatgccagtgtatgctcaagtttgtgaaccactgctctaagtgttattcccttcttgttatagctccacatactaggcacttaataaatgtttaaatatggaggggaggaaggg

SEQ ID NO: 76647 - DNA, 120 bp, synthetic construct
  source 1..120: mol_type = other DNA
ttcaaatcctttggggtagaggaagggggtggctgaggataagataatccagggggcagaaaagaaaccagagaagccagagaagctccatggagcattataaatcacccgggctattct

SEQ ID NO: 76648 - DNA, 120 bp, synthetic construct
  source 1..120: mol_type = other DNA
tctcctgcctcagcctcctgagtagctgggattacaggtgcccgccaccttgtctggctaatttttgtatttttagtagagacagggtttcacagtgttggtcaggctggtctcgaactc

SEQ ID NO: 76649 - DNA, 120 bp, synthetic construct
  source 1..120: mol_type = other DNA
tattcttcccatttatcagctgagaaaactgagacttaaagagtttaagaattggcttcatgtactacaggaaagacagccaggattccattgtccaacacgatgctggggccatagaag

SEQ ID NO: 76650 - DNA, 120 bp, synthetic construct
  source 1..120: mol_type = other DNA
caaggcactgtctcagaaatgcaaacaaacaaaaaaacccaaacaagtaaaaaagccctgaggtttgctgatgtcatagtgtttgcctaggacagctgataagtggtcatgtcaggaatg

SEQ ID NO: 76651 - DNA, 120 bp, synthetic construct
  source 1..120: mol_type = other DNA
gaggcagagaagaaatggggagtgactgttcatgggtatggagtttccttctagggtgtagaaatgttctaaaattagagtagggcgatggttgtacaactctatacatatacaaaagcc

SEQ ID NO: 76652 - DNA, 120 bp, synthetic construct
  source 1..120: mol_type = other DNA
aaggacacaatcatagcctctcatgggtgcaaacagcaagcggatgttgccctttgcaaacagttgggaaaaccataaaaaatgcacagcctttgccaaacaatgtcagataaaatggca

SEQ ID NO: 76653 - DNA, 120 bp, synthetic construct
  source 1..120: mol_type = other DNA
ttataaaaatgcctatctcccctgcaaagggcagaaatcatgcttgatgaatccacatatttctatccctcatatgtattaaatggtgagagatggctgagcaagtgcctggctggctgg

SEQ ID NO: 76654 - DNA, 120 bp, synthetic construct
  source 1..120: mol_type = other DNA
gctcagcagtgtcccttctctttgcctttgtggcatctcataataaacacaaactcgagtttagaagaattggaaggaagattaacaattatccgttgctaacactctgccaggtatggt

SEQ ID NO: 76655 - DNA, 120 bp, synthetic construct
  source 1..120: mol_type = other DNA
tagaaaaggtgcagggatatttttcaaatgtaatcaaggtccctaatcagttcgacttaatcaaaagggagatgatcctaggtgggcctgacctaaccaggtgatggcttggaagagaat

SEQ ID NO: 76656 - DNA, 120 bp, synthetic construct
  source 1..120: mol_type = other DNA
aatagaagtccccagaacactccagggcaagaggggaacaaggatgctagcaaagcaatggttgaaaggacccagagtgggaactgatacaattacgttaatttgaacttggcaatggct

SEQ ID NO: 76657 - DNA, 120 bp, synthetic construct
  source 1..120: mol_type = other DNA
acggctgggattacaggtgtgagccactgcgcctggccgtgacttttaaggtaataaacaaatactcagagctgggtatgattaactcttttataaataagaagactaaagcttagagag

SEQ ID NO: 76658 - DNA, 120 bp, synthetic construct
  source 1..120: mol_type = other DNA
cagcgtatatttatagtatcctagtgtgcctgtgcaccactctagcacattggtatagcattctagtgcacccgtgcaccaccccagcatatctgtataccattctggtgcacctgtgca

SEQ ID NO: 76659 - DNA, 120 bp, synthetic construct
  source 1..120: mol_type = other DNA
tgattaggaaataagctgctggtgaaaaaggataccggcagctctacaattgaaggatttcatagacacccattctactctctcccttaggtcaagctccagggtgtaagattaatagaa

SEQ ID NO: 76660 - DNA, 120 bp, synthetic construct
  source 1..120: mol_type = other DNA
aaaggctatgtcccagcaaaagacagacatggaaggtgagtgtagaatagataatgatgtgttcatcaaaccccattcccttcctctgggaaaacagttggatgacatttcccaacatct

SEQ ID NO: 76661 - DNA, 120 bp, synthetic construct
  source 1..120: mol_type = other DNA
tgcattcatccaccaatttacctatccacccattcagccatccacccacccatccatccatctatacatccatgcaggtactcacttattcattaatatgttttgagctccttctgcatc

SEQ ID NO: 76662 - DNA, 120 bp, synthetic construct
  source 1..120: mol_type = other DNA
ataagaaggagcacaatctgatgaggaagtctccagtccattacagaatgaggagttcaccaacttcatcaccacctgctccttcccacacatcatcaaactttcagtgatcatttccat

SEQ ID NO: 76663 - DNA, 120 bp, synthetic construct
  source 1..120: mol_type = other DNA
aggggaagcaatgttaaattaacgtgaagtgctaagaggaagaggtgcacggaattagaagagaatagaatgggcaagattgaccaggtcatgaagcttctttgaggaagtgacaattga

SEQ ID NO: 76664 - DNA, 120 bp, synthetic construct
  source 1..120: mol_type = other DNA
gttcacttttcatagtctttggtccctgctatggtgggagggaagggctcagcccttcactttaacaaggggaacaggagacagcctcccttggaaaaggcccagggcatattccagatg

SEQ ID NO: 76665 - DNA, 120 bp, synthetic construct
  source 1..120: mol_type = other DNA
ctccttgaggaccagagctgagttttatcattctgataaccgtctctgagcccagcacataacaacagtcctacaactgtacatgaagtacacattgaatttagttgtagtaagtccatg

SEQ ID NO: 76666 - DNA, 120 bp, synthetic construct
  source 1..120: mol_type = other DNA
acagatgtaagccatgtgtttttcacatctaaaacataaacataacaatattttacccaaagactgatttcatatcaccctgatttcagtacctaggttctaggaaataagttctgtgag

SEQ ID NO: 76667 - DNA, 120 bp, synthetic construct
  source 1..120: mol_type = other DNA
gaaaaagccccgttgtccgtttggatccactccaaagatatgaataattctcatatacccttcggggaaaaaatcctattttattacccaatatgcaaaaggttaatgtgaagggaaggc

SEQ ID NO: 76668 - DNA, 120 bp, synthetic construct
  source 1..120: mol_type = other DNA
agttctggagcccacataatcactctatgtaaatggaagtctataatgtaacattccaccaacacccaggtttactctgaggatggcattaacaaaacaaggaacgggtcgaacatgcta

SEQ ID NO: 76669 - DNA, 120 bp, synthetic construct
  source 1..120: mol_type = other DNA
ctgaatatgtgttttgcatcagttcccgtgataagagttggggatataaagctgagtaagaggagttgattccctgggggaaattctcagaaagagagcagacaagcaatcttactgcat

SEQ ID NO: 76670 - DNA, 120 bp, synthetic construct
  source 1..120: mol_type = other DNA
tgggcgagcagcctgtggagatgctgtagaggggattcctctgcctgaaagcactagctgagctttaagagtctctggttttaattagataaataaattatgatacactcatacaatgca

SEQ ID NO: 76671 - DNA, 120 bp, synthetic construct
  source 1..120: mol_type = other DNA
accagaacttagatgtggatagaacccttggtctgccaaacaaaccagcaaacaaaagtcttctcctgtggcatctgattgcattcttcatgcaggttcttctttgttgaacacaagaaa

SEQ ID NO: 76672 - DNA, 120 bp, synthetic construct
  source 1..120: mol_type = other DNA
gcctggggctgggattagggtgaggtgagcgacgcattcattccgggtgcaaaatttaagggagcaccaaccaaaattcaacactataattaatacaaaaagtcaaaacaaatgcaaaac

SEQ ID NO: 76673 - DNA, 120 bp, synthetic construct
  source 1..120: mol_type = other DNA
gttttgttttttgtttgtttttttgtttttgtttttttgagacggagtctcactctgttgtccaggctggaggacagtggcatgatctcgactcactacaacctttgcctcctgggttga

SEQ ID NO: 76674 - DNA, 120 bp, synthetic construct
  source 1..120: mol_type = other DNA
agcaacacagatttattatattacagttccacgggtcagaagtccagtatgactctcacctaatgaaagccagggaattagcaagctatgtttcttcctggaggcactgggaaaaaattg

SEQ ID NO: 76675 - DNA, 120 bp, synthetic construct
  source 1..120: mol_type = other DNA
ggtagtttacagtttttacagaggctctatttggtaggcgtgattgattaaatcattggttattggtgatagaatagcaaaagatgtggccaaactcggtggctcatgcctgtaatccca

SEQ ID NO: 76676 - DNA, 120 bp, synthetic construct
  source 1..120: mol_type = other DNA
taattaaaataaatggcttgatagatgttttctaaaatgactccagcagatttccccagctgacccatgagataaccatagtcttggccaccatttttcttgcagccttgtgcgagaccc

SEQ ID NO: 76677 - DNA, 120 bp, synthetic construct
  source 1..120: mol_type = other DNA
ccttgcaagttacaatttaaggttctacacagtagcagtgggcctgagaatattggttgatgtaattcttggtcttggttgaggcagaaacttaagtgagtgtaacaatttatatgatca

SEQ ID NO: 76678 - DNA, 120 bp, synthetic construct
  source 1..120: mol_type = other DNA
ctcatgtatttcaccagtcttctagcataacctctcctctgagctctcccagttctagagaccagaagacaccactctgagagtaacaagatatgcacagagactataaaactaaaggga

SEQ ID NO: 76679 - DNA, 120 bp, synthetic construct
  source 1..120: mol_type = other DNA
aatttacttattcatttttttatccatccattcttaaaacctctcctcaggtgtggagtatacagagacacttcagcaccatccctgactcttaggagagtctagtgggcaaggcagatg

SEQ ID NO: 76680 - DNA, 120 bp, synthetic construct
  source 1..120: mol_type = other DNA
ccataaatgcagtcatatctattattgtaagaaagaggcagagggagtttaagggcagacacatagagaggttatataaagacagtagagagagatgcagcagcaagccaaggaatgcca

SEQ ID NO: 76681 - DNA, 120 bp, synthetic construct
  source 1..120: mol_type = other DNA
actggatgagacatatagctagaccttctcagagagtgtatggaagaatcttgactgctgactcaaaatactgcaagcccagtttctctgttagggaaaattcaccgccatattttttgg

SEQ ID NO: 76682 - DNA, 120 bp, synthetic construct
  source 1..120: mol_type = other DNA
gaatgttataattggattggtgagatatttattaggaactctgtatttttcccccgccagcggcttgaagggcatctcttaacttgcttctctttttggacttctgagaagtggctgtga

SEQ ID NO: 76683 - DNA, 120 bp, synthetic construct
  source 1..120: mol_type = other DNA
tgagggtttgcctgtggagagtggtaggggattaattataaaaaaaaacccaagggaactctgtagggtgatggaaatattctttactctctttaacgtggtggttacatgggataatcc

SEQ ID NO: 76684 - DNA, 120 bp, synthetic construct
  source 1..120: mol_type = other DNA
agaggaactgctttgtttagttttcttggacaagaaaaatcacatgagtgttcctgcttccctttttactttggtcaccaggaagctcagaactaattgtgtggcccaatcagagcaact

SEQ ID NO: 76685 - DNA, 120 bp, synthetic construct
  source 1..120: mol_type = other DNA
atggatagaggatggaagatggatgggtgaatggatggataaataaatgaatggatgaatgtatgtttgatggatggatggatgacggatagatggatggatgagtggatgatggatgga

SEQ ID NO: 76686 - DNA, 120 bp, synthetic construct
  source 1..120: mol_type = other DNA
ttaaaatttataaaaaggccacagaaaaggggacccgttgttcctaggggaagagtcctctgatcaccagtatgtccggaagctcttgcttcctgtccaaagcatagcactaagacaaac

SEQ ID NO: 76687 - DNA, 120 bp, synthetic construct
  source 1..120: mol_type = other DNA
agagaatgtggggaagacctgaaaccagggctggtagataaaaaggaagacggtgaagtgtagaaccaagaagaggggccagagaggaaggccaagacccagaggcagtattttactttt

SEQ ID NO: 76688 - DNA, 120 bp, synthetic construct
  source 1..120: mol_type = other DNA
ctggctaatttttttgtacttttttagtggagaccaggtttcattgtgtcagcgaggatggtcttgatctcctgacattgtgatccgcctgccttggcctcccaaagtgctgggattaca

SEQ ID NO: 76689 - DNA, 120 bp, synthetic construct
  source 1..120: mol_type = other DNA
tcttgttggacttggccaatggggagtgttcgcaggaggtaggcagcagagtgaaactgagtattcatttccctgactccttccctctctgtggggtctccactgaactgctttctccat

SEQ ID NO: 76690 - DNA, 120 bp, synthetic construct
  source 1..120: mol_type = other DNA
agttacttgacttttttgctgccttggtgaaaccatctccgaggcgtggtagcaaacccttggcattctaagcagaagcagaataaaaataggacttctctttgaaaaggagaagtggag

SEQ ID NO: 76691 - DNA, 120 bp, synthetic construct
  source 1..120: mol_type = other DNA
gcctcagtttcttcctccataaaatgggtacaacaactgtgtttatcccctgtatggattgtgagttaaaggcaaatatagtgcttagaagcacattggcccacagcaaaagggctcaat

SEQ ID NO: 76692 - DNA, 120 bp, synthetic construct
  source 1..120: mol_type = other DNA
cgcgcacaatggcggggtggtgatttttctctgccttacttctgtgtctcctgcagatgatgtatgaattgccttatttaccttttctctccaaaccttctcccttattatttttattaa

SEQ ID NO: 76693 - DNA, 120 bp, synthetic construct
  source 1..120: mol_type = other DNA
cctgtgatggcgaactcactacctgtagagacagcctgcttcataatcccatagctctttgaatgacaatgtttttctttatcttgaaagacagatctttcatcctctacccttggatct

SEQ ID NO: 76694 - DNA, 120 bp, synthetic construct
  source 1..120: mol_type = other DNA
acagccccttgctccaggcatcaacagccagatactcaactcagcagtagcttagaggcagcctgtcgcagtagacggaacaggttttacagccacagaaacatgatttttaattctagt

SEQ ID NO: 76695 - DNA, 120 bp, synthetic construct
  source 1..120: mol_type = other DNA
catcaaaggaaagaatggaatcaataaaaagaacaccttccccccacccttcccctcaccacaaaagaggaacatttaatatctgttctcagtgtctattttatccctccttcccctaca

SEQ ID NO: 76696 - DNA, 120 bp, synthetic construct
  source 1..120: mol_type = other DNA
gtctacctcatccaggtgtaaggatcaaatgagatgacacaggtaacattatggcctgacacagacttcactgtgttcaataaatggcacctgttatttttcgccattgtcattgtcatc

SEQ ID NO: 76697 - DNA, 120 bp, synthetic construct
  source 1..120: mol_type = other DNA
caaaaattaagcctttttttttttttttttttttgcagtgcctcaagctaaggtaaatgaggaccagagagatgaagctcctggctcaagtggctcctatcccatgattccagctctcca

SEQ ID NO: 76698 - DNA, 120 bp, synthetic construct
  source 1..120: mol_type = other DNA
cctggagctctagaggttccatggaatctactaaagaacaaggaaagacagagctaacgtctcagggccaagttcttttcttaatcttaaagcagctagaccttcaactacattgttgtt

SEQ ID NO: 76699 - DNA, 120 bp, synthetic construct
  source 1..120: mol_type = other DNA
cttagtcagcctttaactacaaagttggagctctgaaaacatacccacaatagtggaccaagggcagggtctttttgccaagacctacagctctgcttcttttgtctggaaactcaacag

SEQ ID NO: 76700 - DNA, 120 bp, synthetic construct
  source 1..120: mol_type = other DNA
tgaacccaggaggcggaggttgccatgagccaagatcatgccactgcagtccagtctgggtgacaagagtgaaactctgtctcaaaaaataaataaataagtaaataagctttataaatc

SEQ ID NO: 76701 - DNA, 120 bp, synthetic construct
  source 1..120: mol_type = other DNA
tctcgtatacccaagtatcctgcctgtggttttcactgctgtaattgtactggtttgcacttcctgtcctaactcatgggccggtgtgacgctgagcgtcctctgaaccctgtgttcaca

SEQ ID NO: 76702 - DNA, 120 bp, synthetic construct
  source 1..120: mol_type = other DNA
ctgtctagttggtgcccctaccacaaaatggtggccaacttgaaagcaaatgctgttctggcagtgctagagagacagagagaaaaaaagcactggctttggggcaaatcagatctggtt

SEQ ID NO: 76703 - DNA, 120 bp, synthetic construct
  source 1..120: mol_type = other DNA
acgcagccacatctttccagtgcaagaacctcccacttgcttttgtctccgagactcagttttcccatctataaaatggggtaataccactgatttcaataggacagctcatttcaaaca

SEQ ID NO: 76704 - DNA, 120 bp, synthetic construct
  source 1..120: mol_type = other DNA
gagtacagagaagcccatgattaaataaaagaggcttcctggattgagatcaatccaacgatggcttgcttgctggggctttgggcaaaagtcatctaatatcacgaatgttttaaggat

SEQ ID NO: 76705 - DNA, 120 bp, synthetic construct
  source 1..120: mol_type = other DNA
gtggtcacaaaggtgctcagtagtgaccttaacaaatgttagaagctccattttacagaaggggaagctgagatgcagagattaaataactcgtgcaatgccatatacatccttcaagtg

SEQ ID NO: 76706 - DNA, 120 bp, synthetic construct
  source 1..120: mol_type = other DNA
aattttgaggtttctaggaacagcagcagaacaagagtgttttacccttcataggttcctccatcattgcacttggttgcattatacattttttagtttgagtgtgtgtttcttattttg

SEQ ID NO: 76707 - DNA, 120 bp, synthetic construct
  source 1..120: mol_type = other DNA
gaagggcaagcaaaataaagcacatctacattattctaggagagagaggaaaaagagtaagccatgttaaacccttaagatccccttcaagtggaaaaattaatcctttaatgtacgctg

SEQ ID NO: 76708 - DNA, 120 bp, synthetic construct
  source 1..120: mol_type = other DNA
cacttccctagacaatatgcatagacatgtctccctgactctggaagtctagcacctggttttaactatcaggagataggtcttacaggttagcggtatgctggtaaatgttttacaaca

SEQ ID NO: 76709 - DNA, 120 bp, synthetic construct
  source 1..120: mol_type = other DNA
tcaccttacaatcataaaaccacttcttagtgaagcttgtgagggtgtggggtggtgatgtgtaggaagttcacttcagtttgaagaagtgaatattgtcaggaaatctggaagagctac

SEQ ID NO: 76710 - DNA, 120 bp, synthetic construct
  source 1..120: mol_type = other DNA
ttcagcatgaaggatcttggcagaacgacagctaggctcagccctggtgaatgtcacaaccatatctcaaataacccattctcttaataaaacacagtttgacttaaggctttgagagat

SEQ ID NO: 76711 - DNA, 120 bp, synthetic construct
  source 1..120: mol_type = other DNA
cgtgtcagcaggtgtttgacattcaataaatgtctgaattcatagttggaagtatggatacaaagcatgcaataaatattattttaggctgggcgcggtggctcacgcctgtaatcccag

SEQ ID NO: 76712 - DNA, 120 bp, synthetic construct
  source 1..120: mol_type = other DNA
ctttcaaaatcagtcatagatatctctttgcttaattgttatcctggagatagtaaaacggcaggtctatgggtggaaggaatggaaatgattacttgtgagccacttctctgtagccag

SEQ ID NO: 76713 - DNA, 120 bp, synthetic construct
  source 1..120: mol_type = other DNA
tgacagatcatcaggcattagattctcataaggagggcacaacctagatcccttgcatacgcagttcacagtagagtttgtactcctataagaatcttaatgccaccactgatatagcag

SEQ ID NO: 76714 - DNA, 120 bp, synthetic construct
  source 1..120: mol_type = other DNA
attcaatctgataggtggtcaactgctcagtagccaaatggactgttctcgactccggagagaggccacaaattatctggcttctataaactcagacaagatttaactggtaagaaacaa

SEQ ID NO: 76715 - DNA, 120 bp, synthetic construct
  source 1..120: mol_type = other DNA
tattaatactacagcttgctgctctaaaccccaataagaagggtagtgtggtcattcacaaccactggaatcttactctgaattttactttcgtcctctggttgagtgagagggaggaag

SEQ ID NO: 76716 - DNA, 120 bp, synthetic construct
  source 1..120: mol_type = other DNA
attaccatgtggttttattcttgggaatacaggacttaggccagctgggcatctgaatttaaaagacttgagtctcactccaaaaatagtgtcagaaagctgtcctggaatgcaatgccc

SEQ ID NO: 76717 - DNA, 120 bp, synthetic construct
  source 1..120: mol_type = other DNA
cagaaatcacacttgccacttctgcttgttttatgggtcatggcaaattacagtaccgtgctgagtggtcaagaggtgtgtgaaaatatctttggatccaggaaggaaaggaaatattag

SEQ ID NO: 76718 - DNA, 120 bp, synthetic construct
  source 1..120: mol_type = other DNA
gtcaacaacagcaacaacaaaaggcacatgcagtcagccttccatatttgtgggctccccacccatggatccaaccaaatgggaattgaaaatattgagaaaaattagggctgggcatgg

SEQ ID NO: 76719 - DNA, 120 bp, synthetic construct
  source 1..120: mol_type = other DNA
ctcaatcatgtatatgtttcacaagaattccaaaagggaggcactattgcaatgcccattttacagctgaaggcattaaggttgagtgacccattcaaagccacacagctctaagttcgt

SEQ ID NO: 76720 - DNA, 120 bp, synthetic construct
  source 1..120: mol_type = other DNA
tagccctgaaacgtttctgtgtgtgtaaaattaaagcacagtacaagatgcatatacaaaccattagagaaaggaaggcttcttttgacaaacactgttagaaaactggtgatttataca

SEQ ID NO: 76721 - DNA, 120 bp, synthetic construct
  source 1..120: mol_type = other DNA
tgtggtagtataaactaattcagtctttctggaaagcaatcttattatatgcattaagttttaaaattaggccaggtgtggtggctcatgcctgtaatcccagcacttcgggaggccgag

SEQ ID NO: 76722 - DNA, 120 bp, synthetic construct
  source 1..120: mol_type = other DNA
aaaggaatgaggtgggattatcagacaggttacgtgatgaagactctgagaaaaagctggccaactagatggaacacagcacctccttgtaatccccagggaggccatctccagacacat

SEQ ID NO: 76723 - DNA, 120 bp, synthetic construct
  source 1..120: mol_type = other DNA
ttaagggaaatcatcttggttggaattattctgtctcatcacctccaaaagtcctctcacaactgtcagactatgcacctgttcgtgcagaaaatatttgtacccgtaacccaaaccctt

SEQ ID NO: 76724 - DNA, 120 bp, synthetic construct
  source 1..120: mol_type = other DNA
tcctcaaggcatgagataggctttggaataaaaagctaagctggttggtcccagttctcctgactccaagcgtttcagtctttggtgacaatttcctccaactgctaatgacaattcagc

SEQ ID NO: 76725 - DNA, 120 bp, synthetic construct
  source 1..120: mol_type = other DNA
acaaagtgggaacattcgtggtaacatcatgaagagtgataacatagtaataaaagcagatttttctcaggcatttaaaaggataagagacaaaggtaggcgcgatccatgctagctggg

SEQ ID NO: 76726 - DNA, 120 bp, synthetic construct
  source 1..120: mol_type = other DNA
agggattacaggcgtgaaccaccgcacctggcccaggccctcttttcttgtaccaaggtagagagacagacaccaagagacacccccatctttgaatgctagactaaaaacgggaaaatg

SEQ ID NO: 76727 - DNA, 120 bp, synthetic construct
  source 1..120: mol_type = other DNA
acattcattcatgtttggtaaaactgaaatcacagaaagaggtgctaacctaataacgagggactgatccttagacaggactttcatgtttggccattgctaagttaagcctcatggggc

SEQ ID NO: 76728 - DNA, 120 bp, synthetic construct
  source 1..120: mol_type = other DNA
tagagaggaggaataagtccaagaaattcattatacaacctggtcactatagttaataacaatgtatacttcaaacttgcttagagagtagattttaagtgttttcactaccaagaaaaa

SEQ ID NO: 76729 - DNA, 120 bp, synthetic construct
  source 1..120: mol_type = other DNA
taagagcccctgcctcgtgtgcatatgtgtgacccaaagagaaaaggcacataaagagtttaacccaacaactgaccaattattaatataattattggaaattacagtgggaggatggac

SEQ ID NO: 76730 - DNA, 120 bp, synthetic construct
  source 1..120: mol_type = other DNA
aagtccaatactggatatttgtctacaattgatcttttttctcctctgtctcctctgtagcaaactcactgctttcgtctgcaaactatctccttgtgtgtgtgtgtgcgtgtgtgtgtg

SEQ ID NO: 76731 - DNA, 120 bp, synthetic construct
  source 1..120: mol_type = other DNA
cagagagggtaagtcttctcttcttgcctctgctccttaagcctctacacacacttacacaaaaaataaaagaaggatattcactagctagttattctgtgcacctctgggatgatgaca

SEQ ID NO: 76732 - DNA, 120 bp, synthetic construct
  source 1..120: mol_type = other DNA
gtataaactgaggcaggagaagcttctttctgtcactaatgttttacttccatctctgtattccagccactctagcttttcctcaagctcatactgctctctccaaatcctgaaaactct

SEQ ID NO: 76733 - DNA, 120 bp, synthetic construct
  source 1..120: mol_type = other DNA
tactatgcacaggttctttctggaagctacacactgggaaccacaaaatgttgacaaggacctcaccctagtctccttccttgaggaactactgtacctaagactacacctctgccattc

SEQ ID NO: 76734 - DNA, 120 bp, synthetic construct
  source 1..120: mol_type = other DNA
cctggcattagaggactgggcctggccttacctaattctgcctcctgcttcgacacagctgtgatttttttttaatatatagacattctaaggaagatactccttcaaaatgtttggagg

SEQ ID NO: 76735 - DNA, 120 bp, synthetic construct
  source 1..120: mol_type = other DNA
tttttctccttgtggttatgttcacagtacttaccttcaaggctggtgcaaagctaaggcttggtaaatgttgacacatgagagaccagagctatgattctaatgccattgcaatcccaa

SEQ ID NO: 76736 - DNA, 120 bp, synthetic construct
  source 1..120: mol_type = other DNA
cttcttgaaagggcgtctagcatggcagaaaaacatcacggttctacagttctcttccagggagtagatagtcatttcttaacactctcatcactacttaaaaataaccaccagggctgt

SEQ ID NO: 76737 - DNA, 120 bp, synthetic construct
  source 1..120: mol_type = other DNA
aatccctgactccaaccccagttctaaaggcccagaattctcaagatgagcccagaaaaatgaccttcggggaagctcccacaaataagatttttgtacccttaagtttgaaaattgtat

SEQ ID NO: 76738 - DNA, 120 bp, synthetic construct
  source 1..120: mol_type = other DNA
gaagtgtttgcacaccaacatgatgctgaaaggaaatgctcattggagcatttcagatttctgattttcagattagggatactcagtcaataaatataatgcaaatattccaaactctga

SEQ ID NO: 76739 - DNA, 120 bp, synthetic construct
  source 1..120: mol_type = other DNA
gacttacatttcagctacgtgggtaaattagataatctcttgggtaagttagataatctctctatgccatgggtaagttaggtaatctatctatgcctcaatttacacatctgaacaatg

SEQ ID NO: 76740 - DNA, 120 bp, synthetic construct
  source 1..120: mol_type = other DNA
agcttcctcctctgctcaatagagatactaatagcagccaaccctcagagtgttgcaaagattaagtgggatgacctgtgtcatacctaaacatgattaacctccagtaatgctagttat

SEQ ID NO: 76741 - DNA, 120 bp, synthetic construct
  source 1..120: mol_type = other DNA
tgcagatactccatgcctttctaagccttactacccagctagggttaaattcaagagtccagtggctttctttgggaagacaaaacaaaacaattttccctgtggatctaggatctttag

SEQ ID NO: 76742 - DNA, 120 bp, synthetic construct
  source 1..120: mol_type = other DNA
tgcttgaaagttctcctaccataacactgctgctttggttttatttgtgttgtgttgtgtttctctcctatatctatgtcaccttttttgagacagggtctggctctgtcatctaggctg

SEQ ID NO: 76743 - DNA, 120 bp, synthetic construct
  source 1..120: mol_type = other DNA
atatctatctgggaagattaacacacaacaggaatgagcctagaagtcactggaaattggctactcatccagagaggccactgcctattcttctgaaagcccattcacgttttcataatc

SEQ ID NO: 76744 - DNA, 120 bp, synthetic construct
  source 1..120: mol_type = other DNA
atgtccctacaaaggaaacattttacactggaaccttcaggaaagggagcaggaatctccactgcccctacaatgtcttgaggagaagaagaaaaaatggtcttcaaagccaaataaaaa

SEQ ID NO: 76745 - DNA, 120 bp, synthetic construct
  source 1..120: mol_type = other DNA
ttgggaaaaatacattttgtaggcttaaaggcccattgtctaaccagaccacaaaacatttctttacatcatctacaccctggctgccaactaacaccacagaaggtctttcagccttgt

SEQ ID NO: 76746 - DNA, 120 bp, synthetic construct
  source 1..120: mol_type = other DNA
ttctttctgttaagtacatctttattgttgtggtcaaactccatttcactttaaccttattgaacatttagaatccaaattgagatatacatcaaattttaaagacttggcaccaaaaaa

SEQ ID NO: 76747 - DNA, 120 bp, synthetic construct
  source 1..120: mol_type = other DNA
cctgccttgctggaagacttcttttttgcatttgttacctagaagtttctttcttctagttgcgggggagaaggaaagaagaattatggggaagaaaagtgaggaatcagtttatagccg

SEQ ID NO: 76748 - DNA, 120 bp, synthetic construct
  source 1..120: mol_type = other DNA
ctgtttttgtggaaaaaagaagctttattgaaacacaaccaggggcattcatttacatattgtcgatggcagggttgagcagctgcagcagagatcatgtggcccttgaaacctaaatga

SEQ ID NO: 76749 - DNA, 120 bp, synthetic construct
  source 1..120: mol_type = other DNA
agagatacaaagacaatccccatgcatcaatataggacacagtttcatctttgtggcacttttagaccaatgtgggacagattaatcttagggtcttacaaaaggctgtaagagctgagg

SEQ ID NO: 76750 - DNA, 120 bp, synthetic construct
  source 1..120: mol_type = other DNA
agccaagatcgtgccattgcactgtagcctgggtgacaagagcaagactccacctcagaaaaaaaaaaatgcaaatattagctagaggggtcactcattcaatctgagttttgattacta

SEQ ID NO: 76751 - DNA, 120 bp, synthetic construct
  source 1..120: mol_type = other DNA
tattaagagcccaggtgttggaatcagacagacctgggttcaaattcctgttctatctggaaaatgggaaggcctgtagggagccttcctaattcatttattgccttgagacatgtctac

SEQ ID NO: 76752 - DNA, 120 bp, synthetic construct
  source 1..120: mol_type = other DNA
tcattcattcgtagcaacaatctagaaagacaggtctcactattcccacttcacctaggaagccaaacagcctcagagagtttaaaccagagtttctcagtcccagcataattgacatcg

SEQ ID NO: 76753 - DNA, 120 bp, synthetic construct
  source 1..120: mol_type = other DNA
tgttggacatatctgcaaggtaaaggaattattgctttggatggaaataagatttacctttctttctaacactacctaagcatccttctgggctctgcctaatctaacccctccctccag

SEQ ID NO: 76754 - DNA, 120 bp, synthetic construct
  source 1..120: mol_type = other DNA
gtctggcactgatgactgtgtagtttgctccaccctgaggaatccccacatttccagttaaaaaaaaaaaaaaagtgatcctttgctacatccaagactgtctgagctgacatttcctta

SEQ ID NO: 76755 - DNA, 120 bp, synthetic construct
  source 1..120: mol_type = other DNA
gtcttttttacatttgtagcattttggagcaatttgctggagtcaaagaaaacagtgaaatttccacaaccaacttcaaagcccccaaatcctgtatcggtggaggggagtctggtagca

SEQ ID NO: 76756 - DNA, 120 bp, synthetic construct
  source 1..120: mol_type = other DNA
atgctcacaatggtgtatggagactgccaatcattctatgttctagccaaaagaaaatatcattattatgtggttgtgaggaaggttgaacattgtttcataatgttattggccattcat

SEQ ID NO: 76757 - DNA, 120 bp, synthetic construct
  source 1..120: mol_type = other DNA
caaagatgtcatcttggtcatttcacaaacttttaccaggctcttatctcccgttcgtttgcctgtttgtgtacctaattgcttattcaggtataccgtgccgcattctggaaaggatct

SEQ ID NO: 76758 - DNA, 120 bp, synthetic construct
  source 1..120: mol_type = other DNA
taaaatatgggaaattcaccagcagcttcttgcctttctgggtttcagtagataactgtgtccctggggttcttctactaggagttctcaatcctaattgtacatcagaatcactgggaa

SEQ ID NO: 76759 - DNA, 120 bp, synthetic construct
  source 1..120: mol_type = other DNA
atatccaaagaatccctggccaagaccctaggaaattaacacattcttatactacctctgctttccttggaaggctcattccatcacaaatgtctgggtcaatttaatcagtgatcctgg

SEQ ID NO: 76760 - DNA, 120 bp, synthetic construct
  source 1..120: mol_type = other DNA
aaggccaagcatggcagagtgtttaccctgtgccaggtgctttacatacattatcatatttaatccaggtgctttacatacattaccatatttagtcctctacacatgcctttgaggggc

SEQ ID NO: 76761 - DNA, 120 bp, synthetic construct
  source 1..120: mol_type = other DNA
tttggtgacctttgcagaaactgagctctgggtaacctctgactcagtctgttcaatacccttgacattggttacatatgctggcattctggtttcaaatttatgtctttggtacctttg

SEQ ID NO: 76762 - DNA, 120 bp, synthetic construct
  source 1..120: mol_type = other DNA
accagcagcaaaatgggaaaataccatgtgtttggagctttagggccctctgagtacagaaatttatttgcagcaagcagaaaatagacagcaagcataaaaatacagcagagtccccct

SEQ ID NO: 76763 - DNA, 120 bp, synthetic construct
  source 1..120: mol_type = other DNA
ttattattagtgtggaaggaaatgatgctgaagaggatgggaatatctgaatggcactgtgacatgttgagtaaagatagaaagaaacatcttgcaggaaccacacaccagcccagcctc

SEQ ID NO: 76764 - DNA, 120 bp, synthetic construct
  source 1..120: mol_type = other DNA
acagatgcagcctcaaacctccgaacctgcttggtaaagctcatgtagcctgtgcacttttcattttcattctactaggtaatggtgagaaactgttccaggctttaaaaggagaaaaaa

SEQ ID NO: 76765 - DNA, 120 bp, synthetic construct
  source 1..120: mol_type = other DNA
actgcatgtgaaaaaaacacattattagatgatgcttgccgagggaaaacacaatcctaccgacaaaaatctgccttcacctctctttttggactgtcaggctcaccgtactgatgatta

SEQ ID NO: 76766 - DNA, 120 bp, synthetic construct
  source 1..120: mol_type = other DNA
tggccttattttctcagtgccaacagatatattgatgtaattagcttaagacatactcgtcgaatttgggatagatgggtctctgctccaaatctacagcagagagcattctccttccct

SEQ ID NO: 76767 - DNA, 120 bp, synthetic construct
  source 1..120: mol_type = other DNA
catggaaaaatttacatcaggtagccaaatcgggtgaaaggcatacaaggagtgtgcagttgttgtctatgttaatcttcatgttagaagccctattttaagaaggcacagtcttggcgc

SEQ ID NO: 76768 - DNA, 120 bp, synthetic construct
  source 1..120: mol_type = other DNA
aagtgggaaaaaatgaggctatgtttttccaacactctcaactcactggatccttaacgtacctcctttgcaaagagcagcaatttgaaagtgtgatttttgcccccctcagtttcacta

SEQ ID NO: 76769 - DNA, 120 bp, synthetic construct
  source 1..120: mol_type = other DNA
gaatgtttcaagaacagtatgctacaggcagcctaactatctatcaaaagggcagaattacaccaaaagaagagtgattttgttccatttgcttttgggtggtggcctcaaccctgtcaa

SEQ ID NO: 76770 - DNA, 120 bp, synthetic construct
  source 1..120: mol_type = other DNA
catggatattcagttatttttctttaatcccccacacttttatttggattaccttacaattggtgcgaacaaatatgagctatgctcatgcacctgctgaattctctaggctgctgtaac

SEQ ID NO: 76771 - DNA, 120 bp, synthetic construct
  source 1..120: mol_type = other DNA
tgggccgcagtgaagtaatctaagccacatgtctacgagcacatagctcttacacttggatctgtttacctaacaattgaagagttctttaaatagtacaggagcatgcactgatattcc

SEQ ID NO: 76772 - DNA, 120 bp, synthetic construct
  source 1..120: mol_type = other DNA
gccagatgaaaaaatatattggagtgaatgcctgaagatggaaagacacaaacatcaccttttaacagataaaatcttagaaagattaccgagggtttttccgccttctatgaaaaacaa

SEQ ID NO: 76773 - DNA, 120 bp, synthetic construct
  source 1..120: mol_type = other DNA
cggcgcaccggggagttttgatatcccccggagctcgctcgcgctagggcagtccttttgactttttaaaccaaatttgaacacaatccgagctcctgcaggggtgcgggagcttgggtg

SEQ ID NO: 76774 - DNA, 120 bp, synthetic construct
  source 1..120: mol_type = other DNA
ctctctgggcctagtttggggttgcctattgtcctgggatcctcggcctgctttccttctgcagaattcctccaacaaaagtcagaaacgcacttctacaggcctcaagaagtggatgag

SEQ ID NO: 76775 - DNA, 120 bp, synthetic construct
  source 1..120: mol_type = other DNA
ttccttcgggcagacttacggaaaacacacagagggccttcgaatttaaacaataaaatactgtcacgatgtcataaaactattgcagtgaccatttaaatattggtacaacatgtctgg

SEQ ID NO: 76776 - DNA, 120 bp, synthetic construct
  source 1..120: mol_type = other DNA
ggaccacctcctttataactactacatggcctgcctggacctgggacatcttcttttagatttaggatgggctaagagtgaaacaaacttccaagtttctcttattttcctcagaacaac

SEQ ID NO: 76777 - DNA, 120 bp, synthetic construct
  source 1..120: mol_type = other DNA
ggggtggttctacttcagaacagaagtatctagaattggtgttgctaagtaaaaatgactggggtaaaggcacaagggagaaaagatcagagcgtgagcatcctgcattcagtaataaac

SEQ ID NO: 76778 - DNA, 120 bp, synthetic construct
  source 1..120: mol_type = other DNA
tgatgattttttttaatgtacagctctcacacaaatttcattttgtgaacacactggtaagtacacgatgctggggcttccaaaatgtggcgtatcccactgatggctccaacttgcgag

SEQ ID NO: 76779 - DNA, 120 bp, synthetic construct
  source 1..120: mol_type = other DNA
tgtctaaactagcacataaaggaaggtcaaaatgtcgaggttacacactgtcttcgtgttttgtaaaaaataggcaggaaggccagatgataaactggccagaacttagcagcaccaaac

SEQ ID NO: 76780 - DNA, 120 bp, synthetic construct
  source 1..120: mol_type = other DNA
atggatggctttgctcctgatcagaagtgtagggccatgctcaggaagcctagttccactgttttgttttgtttttcctaccaagggcaattatggctcaactcatttgaaaactgaaaa

SEQ ID NO: 76781 - DNA, 120 bp, synthetic construct
  source 1..120: mol_type = other DNA
ttgcaagcacatgctgtataagctactttttttaaacagtccccttgcaaactctaccccccttaacatcacaatagtaaacaatttagtgcatcaatcgtttaaaaaatctacagctaa

SEQ ID NO: 76782 - DNA, 120 bp, synthetic construct
  source 1..120: mol_type = other DNA
ggcagactaaactctcagatttggcatcacaaggccaaaactcacaagtcacacccagaaggttgatgcaggcttgattgtggaaggttcatgaggatttttttctctattttagcataa

SEQ ID NO: 76783 - DNA, 120 bp, synthetic construct
  source 1..120: mol_type = other DNA
acatgaaaaactcgggagaggacgggttgtcgctgctcgagccgttttctcggaagccgctgctcaccaacttctcgtatttctccttgtacgcgtccctctcgcgcaccagcctggaga

SEQ ID NO: 76784 - DNA, 120 bp, synthetic construct
  source 1..120: mol_type = other DNA
cgctcggggctggaggcgcggcgggcgtctgtccgggcggcgcgggccttggcacgggggagttaacacttcatgcttctcgcctcctcttctgcttggctctctttattattttttttc

SEQ ID NO: 76785 - DNA, 120 bp, synthetic construct
  source 1..120: mol_type = other DNA
cgggctgggcgccgcccggccatgcgcctgcccagaaggctgggcatccgtggagagggaaagcccattttatccctctctttacaacgaggtaaaataagttgtttagaggccattctt

SEQ ID NO: 76786 - DNA, 120 bp, synthetic construct
  source 1..120: mol_type = other DNA
gctagaaatactgtgcattacttttttctttcacttctcttgaaggttaaaacaagatgtatttccccaggagttacagatatgttctggtgcatagagagacagcagctcgggatccgg

SEQ ID NO: 76787 - DNA, 120 bp, synthetic construct
  source 1..120: mol_type = other DNA
ggaaaccggccccgcccgcgctcccggggccgccccggcccgccagcttctcgtatttctccttgtacaggtcccgctctttggccaggcgccccacctccagcttcagctgctccacct

SEQ ID NO: 76788 - DNA, 120 bp, synthetic construct; identical to SEQ ID NO: 18641
  source 1..120: mol_type = other DNA

SEQ ID NO: 76789 - DNA, 120 bp, synthetic construct
  source 1..120: mol_type = other DNA
ctgggcaaaagagtgagactccgtctcaaaaaaaaaaaaaaaaaaagatgtacataaatgtccctccaggaccccaaaattttcccagggcatcaaactccaggccaacggtcagctaaa

SEQ ID NO: 76790 - DNA, 120 bp, synthetic construct
  source 1..120: mol_type = other DNA
ctgattgccatgtctggccatagctgtattctatttggcttaaaggattttaaaaccacacaccacacacacaccacaccaaacacacaccacacacacacaccacattacaaaaactca

SEQ ID NO: 76791 - DNA, 120 bp, synthetic construct
  source 1..120: mol_type = other DNA
acaccctatacacactacacatacatgcactacccacacatcacaacacaaaccacacactccacacacaacaaacatgcacaacacacactacaaaaaccacacactgcacacacacca

SEQ ID NO: 76792 - DNA, 120 bp, synthetic construct
  source 1..120: mol_type = other DNA
aatcccagctctgtccccatcctcctgcctgagctcaggcgagtgacttcagctttgcaacccttagcaagggttcataacagtatcttaccacaaagatggctgtgagaactaagagaa

SEQ ID NO: 76793 - DNA, 120 bp, synthetic construct
  source 1..120: mol_type = other DNA
gctgatatctcccctttacaccaaaactccatttccctgagggttcctcatcttcctgcctgtggtaaaattgagcttgccacttagtgccaatcctgatcaggtcccctcagagctaag

SEQ ID NO: 76794 - DNA, 120 bp, synthetic construct
  source 1..120: mol_type = other DNA
tcctttctcttcttcctccccttgactcttggctgggttgttctcctctaccacgccccgccgcagacctgagtcaccgtcccttggattcctcaggccgagtgaagagacatctcggtc

SEQ ID NO: 76795 - DNA, 120 bp, synthetic construct
  source 1..120: mol_type = other DNA
ctggtttctctttcaacccaagaaagccccaggggcccggatgtgatgccactgacttgcgcattcggggttagagagaagcgagctgctctgtgaccagccgcttgggattggtggagg

SEQ ID NO: 76796 - DNA, 120 bp, synthetic construct
  source 1..120: mol_type = other DNA
ctgaatcgggtttccgcttccgctttcaacccaagaaagtcccaggtgcccggatgtgatgccactgacttgcgcattgggggttagagagaagcgagctgctctgaccagccgcttggg

SEQ ID NO: 76797 - DNA, 120 bp, synthetic construct
  source 1..120: mol_type = other DNA
cggacttctgagtctggggcgcccaccaccccactgcctctgaagttgcaggggactctggagtcagagcttgggttgattagtgtaagactagtgagggcaggctctgccaggcatgga

SEQ ID NO: 76798 - DNA, 120 bp, synthetic construct
  source 1..120: mol_type = other DNA
ctatttctatcccccaccgcctcccctttcccattactatttgcactcccaaacccatccgcgcccctatcccccaccagcactcctatcctcaaccccgcacctctctcacaccgccat

SEQ ID NO: 76799 - DNA, 120 bp, synthetic construct
  source 1..120: mol_type = other DNA
ttgcgcattgggggttagagagaagcgagctgctgtctgaccagcagcttgggattggtggaaggaagcaggccaggccctgtgaggagtcaaggtgagacgctgaggaggactcaggag

SEQ ID NO: 76800 - DNA, 120 bp, synthetic construct
  source 1..120: mol_type = other DNA
agtcagagcttggggtgtttagtgtaagactagtgaggccaggctctgccgggcatcaatctcaggaccctaagagagggctaagcgtaccccacccctattcccatcccccaccacgtc

SEQ ID NO: 76801 - DNA, 120 bp, synthetic construct
  source 1..120: mol_type = other DNA
aatcaggttctgcttccgctttcaacccacccccaaaacgcgccccctccaccgacctcactcctcccacccccatccacgctgaatcgggttctgcttccgctttcaacccaagaaagc

SEQ ID NO: 76802 - DNA, 120 bp, synthetic construct
  source 1..120: mol_type = other DNA
gcagcaggggaaggagtcctattgagaggtgacagcatgctggcagccctcacagccctcgctggctcttggtgcctcctctgcctgggctcccactttggtggcacttgaggagccctt

SEQ ID NO: 76803 - DNA, 120 bp, synthetic construct; identical to SEQ ID NO: 33663
  source 1..120: mol_type = other DNA

SEQ ID NO: 76804 - DNA, 120 bp, synthetic construct; identical to SEQ ID NO: 33664
  source 1..120: mol_type = other DNA

SEQ ID NO: 76805 - DNA, 120 bp, synthetic construct
  source 1..120: mol_type = other DNA
ccgggaggcagaggttgcagtgagccaagattgcgccactgcactcccgcctgggtgacagagagagactccatctcaaaataagtaaataaataaataaatataaacttttttttattt

SEQ ID NO: 76806 - DNA, 120 bp, synthetic construct; identical to SEQ ID NO: 33665
  source 1..120: mol_type = other DNA

SEQ ID NO: 76807 - DNA, 120 bp, synthetic construct; identical to SEQ ID NO: 35413
  source 1..120: mol_type = other DNA

SEQ ID NO: 76808 - DNA, 120 bp, synthetic construct; identical to SEQ ID NO: 35414
  source 1..120: mol_type = other DNA

SEQ ID NO: 76809 - DNA, 120 bp, synthetic construct; identical to SEQ ID NO: 35408
  source 1..120: mol_type = other DNA

SEQ ID NO: 76810 - DNA, 120 bp, synthetic construct; identical to SEQ ID NO: 35409
  source 1..120: mol_type = other DNA

SEQ ID NO: 76811 - DNA, 120 bp, synthetic construct; identical to SEQ ID NO: 35410
  source 1..120: mol_type = other DNA

SEQ ID NO: 76812 - DNA, 120 bp, synthetic construct; identical to SEQ ID NO: 35411
  source 1..120: mol_type = other DNA

SEQ ID NO: 76813 - DNA, 120 bp, synthetic construct; identical to SEQ ID NO: 35412
  source 1..120: mol_type = other DNA

SEQ ID NO: 76814 - DNA, 120 bp, synthetic construct
  source 1..120: mol_type = other DNA
gccaaaccacctctgtttgcagatgacatgattctatatctagaaaaccccatagtcttggccaaaaagctccttcagctgataaacgacttgagcgaagttgtaggatacacaatcaat

SEQ ID NO: 76815 - DNA, 120 bp, synthetic construct
  source 1..120: mol_type = other DNA
tagtttcttttgctgtgcagaagctctaagtttaattagatcccatgtgtcaatttttactcttgctgtgattgcttttggtgcctctgtcgtgagatctttgcctgctcctatgtccag

SEQ ID NO: 76816 - DNA, 120 bp, synthetic construct
  source 1..120: mol_type = other DNA
ttttttaaaacttttatgtttgggggtacatgtgaaggtttgttacatagataaacacgtgtcacgggggttcgttgcacacatgactacatcacccaggtattgaactcactatccaag

SEQ ID NO: 76817 - DNA, 120 bp, synthetic construct
  source 1..120: mol_type = other DNA
cttccaagtggagatgccacgtaggtgggtgaatgtatgtacttggacctcaaaagtgaagttcagactggggttgtagattttttggagtgattagcacgtagcactttctgaaggctt

SEQ ID NO: 76818 - DNA, 120 bp, synthetic construct
  source 1..120: mol_type = other DNA
gtccggaagacccaggttcaaattttgcattttctgtttcctggctctgtggtctagttcatgcaatgtgtctgtgcctcagcttcctgacacgccaaatggggatgctgacatccactt

SEQ ID NO: 76819 - DNA, 120 bp, synthetic construct
  source 1..120: mol_type = other DNA
tccggatctgaacaaagcccaagcactcagaaccggaaccccattagacccaaggtctagataggagcccccatcaccatcagacccaggcgccccgatctgagccctactgaaaccgga

SEQ ID NO: 76820 - DNA, 120 bp, synthetic construct
  source 1..120: mol_type = other DNA
tgaagacatggatgagggtagcgacgaagtcggggaggaagagatggttgaaggcaacgactatgaagaattcggtgcgtttggtggctatggcaccctcaccagctttgacatccatat

SEQ ID NO: 76821 - DNA, 120 bp, synthetic construct
  source 1..120: mol_type = other DNA
gctactgagggccctagtagcgcctgtgctttctctcaggctccgtgtgccagggaggtggacgccaaccggcccagcacagccttcctgggccagaatgatgtcttcgatttcactcag

SEQ ID NO: 76822 - DNA, 120 bp, synthetic construct
  source 1..120: mol_type = other DNA
tgtgggccacgtctctgctgtcacccatgccttgacctccccgcatgttcctccttctccaggcaaataagttggtgaaatacctgatgattaaggactacaagaagatccccatcaagc

SEQ ID NO: 76823 - DNA, 120 bp, synthetic construct
  source 1..120: mol_type = other DNA
ggaggaagaggcactttcctccgaagctttggggataaagcccggcagcagcttggggagaactgatggcagcaaggcctcaccccaggctatcattcctttcatccagcagtcaccagg

SEQ ID NO: 76824 - DNA, 120 bp, synthetic construct
  source 1..120: mol_type = other DNA
acaaagtcatctgtgatgagcttcctcagatcgccgaggaatgggtgcctcaccctgagggcaaggaaaggaatccatgagcagagacggtggcaggggccctccctagcatgactatga

SEQ ID NO: 76825 - DNA, 120 bp, synthetic construct; identical to SEQ ID NO: 33902
  source 1..120: mol_type = other DNA

SEQ ID NO: 76826 - DNA, 120 bp, synthetic construct
  source 1..120: mol_type = other DNA
atggacggacacttattttgttacgtacacccctccctggttcgcgtgtgtccacggatgttgtcactttggtttcttgtgcttttataggcaccgttgacgaactgcagcgatcttact

SEQ ID NO: 76827 - DNA, 120 bp, synthetic construct; identical to SEQ ID NO: 33901
  source 1..120: mol_type = other DNA

SEQ ID NO: 76828 - DNA, 120 bp, synthetic construct
  source 1..120: mol_type = other DNA
aaacacttgctgacatggactgtgggcctttgcagtgcggggtctgcagaaggccccaggccgggggcaggggggaaacctgcctaggtctcctgtttgccatgtgagtgaggtggtggc

SEQ ID NO: 76829 - DNA, 120 bp, synthetic construct
  source 1..120: mol_type = other DNA
agacctctggaagagaattcaggataaagccttgaaaaacttgctgtaggcgaaggactcttatagctatgacacagaaagcaatagccatgcaaaaacaccttaagtgaatttcatcaa

SEQ ID NO: 76830 - DNA, 120 bp, synthetic construct
  source 1..120: mol_type = other DNA
gatcgaaacttccttgcattccacgaataaatcccacgtggtcatgggcctttcatgtgttgttgaactcggtgtgctagacttttgttgaatatgtatgcacaaacattcttttgggaa

SEQ ID NO: 76831 - DNA, 120 bp, synthetic construct
  source 1..120: mol_type = other DNA
aaaaggagagaaatcatgaagcaacccgtgtctggagtggctaaggagacatcactatgggcaatgaaggcattaaagagatcattattcaaaaccatgagcaactttatgcccacaaac

SEQ ID NO: 76832 - DNA, 120 bp, synthetic construct; identical to SEQ ID NO: 76831
  source 1..120: mol_type = other DNA

SEQ ID NO: 76833 - DNA, 120 bp, synthetic construct; identical to SEQ ID NO: 33900
  source 1..120: mol_type = other DNA

SEQ ID NO: 76834 - DNA, 120 bp, synthetic construct
  source 1..120: mol_type = other DNA
gaccttggcccagcctcttctcttgaccagttgcatatcgttccgtgttgcatgtgaagaaccattcacatggtttgcacattgattatcatttgtcgtcttaatactgaattataagag

SEQ ID NO: 76835 - DNA, 120 bp, synthetic construct
  source 1..120: mol_type = other DNA
caccctggtgggaaatgggggcggactggactgcgcgtcctgcagaagggtcagaccggccaccctggagacggccaccacctcactcacatggcaaacaggagacctaggcaggtttcc

SEQ ID NO: 76836 - DNA, 120 bp, synthetic construct; identical to SEQ ID NO: 33901
  source 1..120: mol_type = other DNA

SEQ ID NO: 76837 - DNA, 120 bp, synthetic construct; identical to SEQ ID NO: 76826
  source 1..120: mol_type = other DNA

SEQ ID NO: 76838 - DNA, 120 bp, synthetic construct; identical to SEQ ID NO: 33902
  source 1..120: mol_type = other DNA

SEQ ID NO: 76839 - DNA, 120 bp, synthetic construct
  source 1..120: mol_type = other DNA
cagatgactttgtgaagcagaagtaagtatcacctgagctaactgcggctctcactcgagcatcctttgtgtgctggtctggctgagaaagcagttccctatcccaaatcttcaactgga

SEQ ID NO: 76840 - DNA, 120 bp, synthetic construct; identical to SEQ ID NO: 33903
  source 1..120: mol_type = other DNA

SEQ ID NO: 76841 - DNA, 120 bp, synthetic construct; identical to SEQ ID NO: 33904
  source 1..120: mol_type = other DNA

SEQ ID NO: 76842 - DNA, 120 bp, synthetic construct
  source 1..120: mol_type = other DNA
agaggaccaagaaggtgagatccccctgccccctgccacctccacacccccttgctcctgtcctttccttctcctccctttcctgctcctctcctccctctcctctcccccttcttcctc

SEQ ID NO: 76843 - DNA, 120 bp, synthetic construct
  source 1..120: mol_type = other DNA
aagaagatttgggaaggtcttggggtgttcagggctgactgctgggaagaggctggccagcacagggaagctaacacaagtatgtcgtcgagtggcctgccttccccaacccctctctct

SEQ ID NO: 76844 - DNA, 120 bp, synthetic construct; identical to SEQ ID NO: 33905
  source 1..120: mol_type = other DNA

SEQ ID NO: 76845 - DNA, 120 bp, synthetic construct; identical to SEQ ID NO: 76818
  source 1..120: mol_type = other DNA

SEQ ID NO: 76846 - DNA, 120 bp, synthetic construct
  source 1..120: mol_type = other DNA
cttcagagcttgcccttctggatgcagcgtatcagaaacggggagtggtgatcgatgactcccagtttctggagtgagtggttgtgtggataatggcgccatttactgagactgtgaaga

SEQ ID NO: 76847 - DNA, 120 bp, synthetic construct
  source 1..120: mol_type = other DNA
gaacaggcatggagctggaggctataagctcagcaaactaacgcaggaacagaaaagcaaatcccacatgttctcacttagaattgggagctaaatgataagaacttatgaacacaaaga

SEQ ID NO: 76848 - DNA, 120 bp, synthetic construct
  source 1..120: mol_type = other DNA
aagactccatattctatcaatggtgctgtgataactggctagccgtatgcagaggattgaagctggaccccttccttacactatctacaaaaatccacatgagatggattaaaggcttta

SEQ ID NO: 76849 - DNA, 120 bp, synthetic construct
  source 1..120: mol_type = other DNA
taatccaccacgatcaagtaggctccatccccgggatgcaagtttggttcaacatacggaaatcaataaatgtgattcatcatatacacagatctaaagacaaaaaacgtatggtgatct

SEQ ID NO: 76850 - DNA, 120 bp, synthetic construct; identical to SEQ ID NO: 24390
  source 1..120: mol_type = other DNA

SEQ ID NO: 76851 - DNA, 120 bp, synthetic construct
  source 1..120: mol_type = other DNA
cactgcagggtattccaacagacctgcagctgagggtcctgtctgttagaaggaaaactaacaaacagaaaggacacccacaccaaaaacccatctgtacatcaccatcatcaaagagca

SEQ ID NO: 76852 - DNA, 120 bp, synthetic construct
  source 1..120: mol_type = other DNA
ctaggaagaaactgcatcaactaatgagcaaaataaccagctaacatcataatgacaggatcaaattcacacataacaatattaactttaaatgtaaatggactaaattctccaattaaa

SEQ ID NO: 76853 - DNA, 120 bp, synthetic construct
  source 1..120: mol_type = other DNA
agacacaacataccagaatctctgggacgcattcaaagcagtgtgtagagggaaatttatagcactaaatgcccacaagagaaagcaggaaagatccaaaattgacactctaacatcaca

SEQ ID NO: 76854 - DNA, 120 bp, synthetic construct
  source 1..120: mol_type = other DNA
ccagtttttgcccattcagtatgatattggctgtgggtttgtcatagatagctcttattattttgaaatacgtcccatcaatacctaatttattgagaggttttagcatgaaggttgttg

SEQ ID NO: 76855 - DNA, 120 bp, synthetic construct
  source 1..120: mol_type = other DNA
ataccttatacaaaaatcaattcaagatggattaaagatttaaacgttagacttaaaaccataaaaaccctagaagaaaacctaggcattaccattcaggacataggcatgggcaaggac

SEQ ID NO: 76856 - DNA, 120 bp, synthetic construct
  source 1..120: mol_type = other DNA
atatcacactctagggactgtggtggggtggggggaggggggagggatagcattgggagatatacctaatgctagatgacgagttagtgggtgcagcacaccagcatggcgcatgtatac

SEQ ID NO: 76857 - DNA, 120 bp, synthetic construct
  source 1..120: mol_type = other DNA
cgcctggcctcccaacgcattggaattacaggcatgagccaccgtgcctggccgaccctgtctctttttaaaagtataataataataaatagtagcatgcacttaactaataatagaggt

SEQ ID NO: 76858 - DNA, 120 bp, synthetic construct; identical to SEQ ID NO: 5121
  source 1..120: mol_type = other DNA

SEQ ID NO: 76859 - DNA, 120 bp, synthetic construct; identical to SEQ ID NO: 24393
  source 1..120: mol_type = other DNA

SEQ ID NO: 76860 - DNA, 120 bp, synthetic construct
  source 1..120: mol_type = other DNA
atgattatctcaatagatgcagaaaaagcctttgacaaaattcaataacccttcatgctaaaaactctcaataaattaggtattgatgggacatatctcaaaataataagagctatctat

SEQ ID NO: 76861 - DNA, 120 bp, synthetic construct
  source 1..120: mol_type = other DNA
caattgggaaaggattccctatttaataaatggcgctgggaaaactggctagccatatgtagaaagctgaaactggatcccttccttacaccttatacaaaaatcaattcaagatggatt

SEQ ID NO: 76862 - DNA, 120 bp, synthetic construct
  source 1..120: mol_type = other DNA
gtcctttgtagggacatggatgaaattggaaatcatcattctcagtaaactatcgcaacaacaaaaaaccaaacacctcatatgctcactcataggtgggaattgaacaatgagatcaca

SEQ ID NO: 76863 - DNA, 120 bp, synthetic construct
  source 1..120: mol_type = other DNA
aatcccaacactttgggagacaaggcaggagaattgattgaggccaggagtctgagaccagcctgggcaagctaagacccccatctctacaaataaaataaagtaactttaaaaataaaa

SEQ ID NO: 76864 - DNA, 120 bp, synthetic construct; identical to SEQ ID NO: 24394
  source 1..120: mol_type = other DNA

SEQ ID NO: 76865 - DNA, 120 bp, synthetic construct; identical to SEQ ID NO: 24395
  source 1..120: mol_type = other DNA

SEQ ID NO: 76866 - DNA, 120 bp, synthetic construct; identical to SEQ ID NO: 29647
  source 1..120: mol_type = other DNA

SEQ ID NO: 76867 - DNA, 120 bp, synthetic construct; identical to SEQ ID NO: 29648
  source 1..120: mol_type = other DNA

SEQ ID NO: 76868 - DNA, 120 bp, synthetic construct
  source 1..120: mol_type = other DNA
gttctggccagggcaatcaggcaggagaaagaaataaagggtattcaattaggaaaagaggaagtcaaattgtccctgtttgcagatgacatgattgtatatccagaaaactcaatcatc

SEQ ID NO: 76869 - DNA, 120 bp, synthetic construct
  source 1..120: mol_type = other DNA
aaatgttagacccaaaaccataaaaaccctagaagaaaacctaggcattaccattcaggacataggcatgggcaaggacttcatgtctaaaacaccaaaagcaatggcaacaaaagccaa

SEQ ID NO: 76870 - DNA, 120 bp, synthetic construct
  source 1..120: mol_type = other DNA
gtcaggtagcgtgatgcctctggctttgttcttttggcttagcattgacttggtgatgagggctcttttttggttccatgtgaactttaaagtagttttttccaattctgtgaagaaagt

SEQ ID NO: 76871 - DNA, 120 bp, synthetic construct; identical to SEQ ID NO: 29649
  source 1..120: mol_type = other DNA

SEQ ID NO: 76872 - DNA, 120 bp, synthetic construct; identical to SEQ ID NO: 6006
  source 1..120: mol_type = other DNA

SEQ ID NO: 76873 - DNA, 120 bp, synthetic construct; identical to SEQ ID NO: 29651
  source 1..120: mol_type = other DNA

SEQ ID NO: 76874 - DNA, 120 bp, synthetic construct; identical to SEQ ID NO: 29652
  source 1..120: mol_type = other DNA

SEQ ID NO: 76875 - DNA, 120 bp, synthetic construct; identical to SEQ ID NO: 29653
  source 1..120: mol_type = other DNA

SEQ ID NO: 76876 - DNA, 120 bp, synthetic construct
  source 1..120: mol_type = other DNA
tattgtgaataatgctgcaataaacatacgtgtgcatgtgtctttatagcagcatgatttctagtcctttgggtatatacccagtaatgggatggctgagtcaaatggtatttctagttc

SEQ ID NO: 76877 - DNA, 120 bp, synthetic construct
  source 1..120: mol_type = other DNA
ctgttccattgatctatatctctgttttggtactagtaccatgctgttttggttactgtagccttgtagtatagtttgaagtcaggtagtgtgatgcctccagctttgttcttttggctt

SEQ ID NO: 76878 - DNA, 120 bp, synthetic construct
  source 1..120: mol_type = other DNA
attcagtatgatgctggctgtgggtttgtcatagacagctcttattattttgagatacgtcccatcgatacctaatttattgagagtttttagcatgaaggttgttgaattttgtcaaag

SEQ ID NO: 76879 - DNA, 120 bp, synthetic construct
  source 1..120: mol_type = other DNA
gagattctggtatgttgtgtctttgttctcgttggtttcaaagaacatctttatttctgccttcatttcgttatgtacccagtagtcactcaggagcaggttgttcagtttccatgtagt

SEQ ID NO: 76880 - DNA, 120 bp, synthetic construct
  source 1..120: mol_type = other DNA
agctggtgattttgcttgttagttgatgcagtttcttcctagtcttgatggtctttacattttggcttgattttgcagcggctagtactggttgttcctttccatgtttagcgcttcctt

SEQ ID NO: 76881 - DNA, 120 bp, synthetic construct
  source 1..120: mol_type = other DNA
ctttgtggttttatctacttttggtctttgatgatggtgatgtacagatgggtttttggtgtggatgtcctttctgtttgttagttttccttctaacagacagtatcctcagctgcaggt

SEQ ID NO: 76882 - DNA, 120 bp, synthetic construct; identical to SEQ ID NO: 29654
  source 1..120: mol_type = other DNA

SEQ ID NO: 76883 - DNA, 120 bp, synthetic construct; identical to SEQ ID NO: 6008
  source 1..120: mol_type = other DNA

SEQ ID NO: 76884 - DNA, 120 bp, synthetic construct; identical to SEQ ID NO: 29639
  source 1..120: mol_type = other DNA

SEQ ID NO: 76885 - DNA, 120 bp, synthetic construct; identical to SEQ ID NO: 29640
  source 1..120: mol_type = other DNA

SEQ ID NO: 76886 - DNA, 120 bp, synthetic construct
  source 1..120: mol_type = other DNA
attctctctctctctctctgtatgtgtgtgtgtgtgtgtgtgtgtgtgtatacacacatatatgtgagtgtatacacacacatatgtgagtgtatatatgtgtgtgtatacacacacata

SEQ ID NO: 76887 - DNA, 120 bp, synthetic construct
  source 1..120: mol_type = other DNA
caaagagtaccgaagggaaagggaggacaaagagcaactttatggtagataaacctgacaaacactacactagctcatcatcactggccatcagagaaatgcaaatcaaaaccacaatga

SEQ ID NO: 76888 - DNA, 120 bp, synthetic construct; identical to SEQ ID NO: 29641
  source 1..120: mol_type = other DNA

SEQ ID NO: 76889 - DNA, 120 bp, synthetic construct; identical to SEQ ID NO: 6002
  source 1..120: mol_type = other DNA

SEQ ID NO: 76890 - DNA, 120 bp, synthetic construct; identical to SEQ ID NO: 29643
  source 1..120: mol_type = other DNA

SEQ ID NO: 76891 - DNA, 120 bp, synthetic construct; identical to SEQ ID NO: 29644
  source 1..120: mol_type = other DNA

SEQ ID NO: 76892 - DNA, 120 bp, synthetic construct
  source 1..120: mol_type = other DNA
taaatttctttgagttcattgtagattctggatattagccctctgtcagatgagtaggttgtgaaaattttctcccattttgtaggttgcctgttcactctgatggtagtttcttttgct

SEQ ID NO: 76893 - DNA, 120 bp, synthetic construct
  source 1..120: mol_type = other DNA
atacactctcccaagactaaaccaggaagaagttgaatctctgaatagaccaataacaggctctgaaattgtggcaataatcaatagcttaccagccaaaaagagtccaggaccagatgg

SEQ ID NO: 76894 - DNA, 120 bp, synthetic construct
  source 1..120: mol_type = other DNA
gcagaaatcacaagcattcttatacaccaataacagacaaacagagagcaaatcatgagtgaactcccattcacaattgcttcaaagagaataaaatacctaggaatccaacttacaagg

SEQ ID NO: 76895 - DNA, 120 bp, synthetic construct; identical to SEQ ID NO: 29645
  source 1..120: mol_type = other DNA

SEQ ID NO: 76896 - DNA, 120 bp, synthetic construct; identical to SEQ ID NO: 29646
  source 1..120: mol_type = other DNA

SEQ ID NO: 76897 - DNA, 120 bp, synthetic construct
  source 1..120: mol_type = other DNA
ggaatgagatcatgtcctttgcagggacatagatgaagctggaagccatcatcctcagtaaactaacacagaaacggaaaaccaaacgctgcatgttcttataagtgggagttgaacaat

SEQ ID NO: 76898 - DNA, 120 bp, synthetic construct
  source 1..120: mol_type = other DNA
aaatgcattatattgcctgacttgcatattatattatctaggtaaagcaatgtaattaaagcttaactgaggtcatgggtggtggctcacacctgtagtcccagcactttgggaggcaaa

SEQ ID NO: 76899 - DNA, 120 bp, synthetic construct
  source 1..120: mol_type = other DNA
agcagggcacagacaaacaaaaaggcagcagtaacctctgcagacttaagtgtccctgtctgacagctttgaagagagcagtggttctcccagcacgcagctggagatctgagaacgggc

SEQ ID NO: 76900 - DNA, 120 bp, synthetic construct
  source 1..120: mol_type = other DNA
ctcctcgagaagagcaactccaagacacataattgtcagattcaccaaagttgaaatgaaggaaaaaatgttaagggcagccagagagaaaggtcgggttaccctcaaagggaagcctat

SEQ ID NO: 76901 - DNA, 120 bp, synthetic construct
  source 1..120: mol_type = other DNA
aatagacatctacagaactctccaccccaaatcaacagaatatacatttttttcagcaccacaccacacctattccaaaatcgaccacatagttggaagtaaagctctcctcagcaaatg

SEQ ID NO: 76902 - DNA, 120 bp, synthetic construct; identical to SEQ ID NO: 46059
  source 1..120: mol_type = other DNA

SEQ ID NO: 76903 - DNA, 120 bp, synthetic construct
  source 1..120: mol_type = other DNA
cccgcattgccaagtcaatcctaagccaaaagaacaaagctggaggcatcacactaccttacttcaaactatactacaaggctacagtaaccaaaacagcatggtactggtaccaaaaca

SEQ ID NO: 76904 - DNA, 120 bp, synthetic construct
  source 1..120: mol_type = other DNA
gtggcgattcctcagggatctagaactagaaataccatttgacccagccatcccattactgggtatatacccaaaggactataaatcatgctgctataaagacacatgcactcgtatgtt

SEQ ID NO: 76905 - DNA, 120 bp, synthetic construct; identical to SEQ ID NO: 7952
  source 1..120: mol_type = other DNA

SEQ ID NO: 76906 - DNA, 120 bp, synthetic construct
  source 1..120: mol_type = other DNA
ggtgcatgtgcacaatgtgcaggtttgatatataggtataaatgtgccatgttggtttgttgcacccatcaactcgtatttacattaggtatttctcctaatgctatccctctcccctcc

SEQ ID NO: 76907 - DNA, 120 bp, synthetic construct
  source 1..120: mol_type = other DNA
agtcgttcctgtttttttccaaatccatgatgatatctcctattgccaactaaaatcttcagtttagcatgcaaatcttacaagtgtggacccagcctactcttccagcctcacatccag

SEQ ID NO: 76908 - DNA, 120 bp, synthetic construct; identical to SEQ ID NO: 7951
  source 1..120: mol_type = other DNA

SEQ ID NO: 76909 - DNA, 120 bp, synthetic construct
  source 1..120: mol_type = other DNA
ccatccaggttgttgcaaataccattatttcattattttttatggctgagcagtgttctattatatatatatatacctacctttctcccttcccttccctcccctcccctcccctcccct

SEQ ID NO: 76910 - DNA, 120 bp, synthetic construct; identical to SEQ ID NO: 7953
  source 1..120: mol_type = other DNA

SEQ ID NO: 76911 - DNA, 120 bp, synthetic construct; identical to SEQ ID NO: 7954
  source 1..120: mol_type = other DNA

SEQ ID NO: 76912 - DNA, 120 bp, synthetic construct
  source 1..120: mol_type = other DNA
aaagacttaaacgttagacctaaaaccataaaaaccctagaagaaaacctaggcattaccattcaggacctaggcatgggcaaggacttcatgtctaaaacaccaaaagcaatgagcaac

SEQ ID NO: 76913 - DNA, 120 bp, synthetic construct
  source 1..120: mol_type = other DNA
gaacatctttatttctgccttcatttcgttatgtacccatgcccacaagagaaagcaggaaagagccaaaattgacatcctaacatcacaattgaaagaactagaaaagcaagagcaaac

SEQ ID NO: 76914 - DNA, 120 bp, synthetic construct
  source 1..120: mol_type = other DNA
taggtattgatgggacatatctcaaaataataagagctatctatgacaaacccacaaccaatatcatactgaatgggcaaaaactggaagcattccctttgaaaactggcacaagacagg

SEQ ID NO: 76915 - DNA, 120 bp, synthetic construct
  source 1..120: mol_type = other DNA
gcgccgcctatctacaactatctgatctttgacaaacctgagaaaaacaagcaatggggaaaggattccctatgtaataaatggtgctgggaaaactggctagccatatgtagaaagctg

SEQ ID NO: 76916 - DNA, 120 bp, synthetic construct
  source 1..120: mol_type = other DNA
ggaactgaacaatgagaacacatggacacaggaaggggaacatcacactctggggactgctgtggggtggggggagtgggaagggatagcattaggagatatacctaatgctaaatgacg

SEQ ID NO: 76917 - DNA, 120 bp, synthetic construct; identical to SEQ ID NO: 7955
  source 1..120: mol_type = other DNA

SEQ ID NO: 76918 - DNA, 120 bp, synthetic construct
  source 1..120: mol_type = other DNA
ctttgggtatatacccagtaatgggatggctgggtcaaatggtatttctagttctagatccctgaggaatcaccacactgacttccacaagggttgaactagtttacagtcccaccaatg

SEQ ID NO: 76919 - DNA, 120 bp, synthetic construct
  source 1..120: mol_type = other DNA
gtaatgcctccagctttgttcttttggcttaggattgacttggcaatgtgggcttttttttggttccatatgaactttaaagtagttttttccaattctgtgaagaaagtcattggtagc

SEQ ID NO: 76920 - DNA, 120 bp, synthetic construct
  source 1..120: mol_type = other DNA
tgcccagctttggtgtcaggatgatgctggcctcataaaatgagttagggaggattccctctttttctattgattggaatagtttcagaaggaatggtaccagttcctccttgtacctct

SEQ ID NO: 76921 - DNA, 120 bp, synthetic construct
  source 1..120: mol_type = other DNA
gtttgttataatttctgttcttttacatttgctgaggagagctttacttccaactatgtggtcaattttggaataggtgtggtgtggtgctggaaaaaatgtatattctgttgatttggg

SEQ ID NO: 76922 - DNA, 120 bp, synthetic construct
  source 1..120: mol_type = other DNA
atgaagtttagtttggctggatatgaagttctgggttgataattcttttctttaagaatgttgaatatcggcccccactctcttctggcttgtagagtttctgccaagagatccactgtt

SEQ ID NO: 76923 - DNA, 120 bp, synthetic construct
  source 1..120: mol_type = other DNA
gcaagtctgttggagtttgctagaggtccactccctaccctgtttgcccgggtaccagcagcggtagctgcacagcagcggattttcgtgaaccgtgaatgctgctgtctgatcgttcct

SEQ ID NO: 76924 - DNA, 120 bp, synthetic construct; identical to SEQ ID NO: 7956
  source 1..120: mol_type = other DNA

SEQ ID NO: 76925 - DNA, 120 bp, synthetic construct; identical to SEQ ID NO: 33846
  source 1..120: mol_type = other DNA

SEQ ID NO: 76926 - DNA, 120 bp, synthetic construct
  source 1..120: mol_type = other DNA
ttttatttattgatgtgagttctggttacataagtgtgttaattctgtgaaaattcatcaaactggactgggcaccgtggatcacgcctgtaatccttacactttgggaggccgaggcag

SEQ ID NO: 76927 - DNA, 120 bp, synthetic construct
  source 1..120: mol_type = other DNA
ggtggggagtggttaggccttttctaatattccttacctctgacaaaattattcattttctcactatttctggtacacagcacttaagtcactgtcttataatctgtatacatgtctgac

SEQ ID NO: 76928 - DNA, 120 bp, synthetic construct
  source 1..120: mol_type = other DNA
actctttattcaatatttgtttagttacaccacctctacatttttgaaaatgtgtataaaaaataaaaactggccgggtgcggtggctcacacttgtaatcccagcactttgggaggccg

SEQ ID NO: 76929 - DNA, 120 bp, synthetic construct
  source 1..120: mol_type = other DNA
agttattatgtgaaataagccaggcacagaaagacaaatatggcatgttctcatatgtgggagctaaaaaaattgaactcagggaggtacagagtagaatggcagataccagaggctggg

SEQ ID NO: 76930 - DNA, 120 bp, synthetic construct
  source 1..120: mol_type = other DNA
ggcatgatccaccatgcccagctgaaaaactcttccagacattggcttaggcaaagaattcatggctaagaccccaaaagcaaatgcaacaagaacaaaaataaataaatgggacctaat

SEQ ID NO: 76931 - DNA, 120 bp, synthetic construct; identical to SEQ ID NO: 27480
  source 1..120: mol_type = other DNA

SEQ ID NO: 76932 - DNA, 120 bp, synthetic construct; identical to SEQ ID NO: 27481
  source 1..120: mol_type = other DNA

SEQ ID NO: 76933 - DNA, 120 bp, synthetic construct; identical to SEQ ID NO: 20769
  source 1..120: mol_type = other DNA

SEQ ID NO: 76934 - DNA, 120 bp, synthetic construct; identical to SEQ ID NO: 20770
  source 1..120: mol_type = other DNA

SEQ ID NO: 76935 - DNA, 120 bp, synthetic construct; identical to SEQ ID NO: 20771
  source 1..120: mol_type = other DNA

SEQ ID NO: 76936 - DNA, 120 bp, synthetic construct
  source 1..120: mol_type = other DNA
gccccggtgtgtgatgttccccttcctgtgtccatgtgttctcattgttcaattcccatctatgagtgagaacatgcagtgtttgtttggttttttgtccttgtgatagtttgctgagaa

SEQ ID NO: 76937 - DNA, 120 bp, synthetic construct
  source 1..120: mol_type = other DNA
tacttatggctagccagttttcccagaaccatttattcaatagggaatcctttccccccctttttttttttaactagtagatggaagtttgaccctgaaacgaagagcaaacatgggctt

SEQ ID NO: 76938 - DNA, 120 bp, synthetic construct
  source 1..120: mol_type = other DNA
gggtcctatgcccacggaatctcgctgattactagcacagcagtctgagatcaaactgcaaggcggcaacaaggctgggggaggggcgcccgccattgcccaggcttgcttaggtaaaca

SEQ ID NO: 76939 - DNA, 120 bp, synthetic construct
  source 1..120: mol_type = other DNA
atggaaccaagttggaaaacactacaggatattatccaggagaacttccccaatctagcaaggcaggccaacattcagattcaggaaatacagagaatgccacaaagatactcctcgaga

SEQ ID NO: 76940 - DNA, 120 bp, synthetic construct
  source 1..120: mol_type = other DNA
gcacccaatacaggagcacccagattcataaagcaagtcctgagtgacctacaaagagacttagactcccacacattaataatgggagactttaacaccccactgtcaacattagagaga

SEQ ID NO: 76941 - DNA, 120 bp, synthetic construct
  source 1..120: mol_type = other DNA
gaagttgaatctctgaatagaccaataacaggagctgaaattgtggcaataatcaatagtttaccaaccaaaaagagtccaggaccagatggattcacagctgaattctaccagaggtac

SEQ ID NO: 76942 - DNA, 120 bp, synthetic construct
  source 1..120: mol_type = other DNA
catgaaaatggccatactgcccaaggtaatttatagattcaatgccatccccatcaagctaccaatgactttcttcacagaattggaaaaaactactttaaagttcataggaaccgaaaa

SEQ ID NO: 76943 - DNA, 120 bp, synthetic construct
  source 1..120: mol_type = other DNA
acaaaggtctaatatccagaatctacaatgaactcaaacaaatttacaagaaaaaaaaacaaccccatcaaaaagtgggtgaaggatatgaacagacacttctcaaaagaagacatttat

SEQ ID NO: 76944 - DNA, 120 bp, synthetic construct; identical to SEQ ID NO: 21194
  source 1..120: mol_type = other DNA

SEQ ID NO: 76945 - DNA, 120 bp, synthetic construct; identical to SEQ ID NO: 21195
  source 1..120: mol_type = other DNA

SEQ ID NO: 76946 - DNA, 120 bp, synthetic construct; identical to SEQ ID NO: 21196
  source 1..120: mol_type = other DNA

SEQ ID NO: 76947 - DNA, 120 bp, synthetic construct; identical to SEQ ID NO: 21197
  source 1..120: mol_type = other DNA

SEQ ID NO: 76948 - DNA, 120 bp, synthetic construct
  source 1..120: mol_type = other DNA
agaaatatcgctgaattctttttctcagtaaggaacatccctgggaaagagaatacgcacctggggggtaggtctatagaaggcccccctgggcgtggctgtcttctatggtcgaggctg

SEQ ID NO: 76949 - DNA, 120 bp, synthetic construct; identical to SEQ ID NO: 21198
  source 1..120: mol_type = other DNA

SEQ ID NO: 76950 - DNA, 120 bp, synthetic construct; identical to SEQ ID NO: 21199
  source 1..120: mol_type = other DNA

SEQ ID NO: 76951 - DNA, 120 bp, synthetic construct; identical to SEQ ID NO: 21200
  source 1..120: mol_type = other DNA

SEQ ID NO: 76952 - DNA, 120 bp, synthetic construct; identical to SEQ ID NO: 21201
  source 1..120: mol_type = other DNA

SEQ ID NO: 76953 - DNA, 120 bp, synthetic construct; identical to SEQ ID NO: 21202
  source 1..120: mol_type = other DNA

SEQ ID NO: 76954 - DNA, 120 bp, synthetic construct; identical to SEQ ID NO: 21203
  source 1..120: mol_type = other DNA

SEQ ID NO: 76955 - DNA, 120 bp, synthetic construct
  source 1..120: mol_type = other DNA
tatttttaaatgtgagaaggatgagatttgggaggggccagtggtataatgatatggtttggctctttgtccccacccaaatctcatctcctattgtaatccacatgtatcaagggaggg

SEQ ID NO: 76956 - DNA, 120 bp, synthetic construct; identical to SEQ ID NO: 21204
  source 1..120: mol_type = other DNA

SEQ ID NO: 76957 - DNA, 120 bp, synthetic construct; identical to SEQ ID NO: 21205
  source 1..120: mol_type = other DNA

SEQ ID NO: 76958 - DNA, 120 bp, synthetic construct; identical to SEQ ID NO: 21206
  source 1..120: mol_type = other DNA

SEQ ID NO: 76959 - DNA, 120 bp, synthetic construct
  source 1..120: mol_type = other DNA
ctgagatcaaatgatcctcccacctcagcctcctaagtagctaggactacaggtacatactaccacacctggccaatttttattttattttttgtagagacagggtcttgctgtgttgcc

SEQ ID NO: 76960 - DNA, 120 bp, synthetic construct; identical to SEQ ID NO: 21207
  source 1..120: mol_type = other DNA

SEQ ID NO: 76961 - DNA, 120 bp, synthetic construct; identical to SEQ ID NO: 21208
  source 1..120: mol_type = other DNA

SEQ ID NO: 76962 - DNA, 120 bp, synthetic construct
  source 1..120: mol_type = other DNA
ctccctcatagttttcttgtaatctttatttatttatttatttatttattattatactttaagttttagggtacatgtgcacaatgtgcaggttagttacatatgtatacatgtgacatg

SEQ ID NO: 76963 - DNA, 120 bp, synthetic construct
  source 1..120: mol_type = other DNA
agatgagtaggttgcaaaaattttctcccattctgtaggttgcctgttcactctgatggtagtttcttttgctgtgcagaagctctttagtttaattagatcccatttgccaattttgtc

SEQ ID NO: 76964 - DNA, 120 bp, synthetic construct
  source 1..120: mol_type = other DNA
gaagttgcttatcagcttaaggagattttgggctgagacgatggggttttctagatatacaatcatgtcatctgcaaacagggacaatttgacttcctcctttcctaattgaataccctt

SEQ ID NO: 76965 - DNA, 120 bp, synthetic construct
  source 1..120: mol_type = other DNA
ttgttgatcctttcaaaaaaccagctcctggattcattgattttttgaagggttttttgtgtctctatttccttcagttctgctctgattttggttatttcttgccttctgttagctttt

SEQ ID NO: 76966 - DNA, 120 bp, synthetic construct
  source 1..120: mol_type = other DNA
tgctcgtgagatgcgtttcctgaatacagcacactgatgggtcttggctctttatccaatttgccggtctgtgtcttttaattggagcatttagtccatttacatttaaagttaatattg

SEQ ID NO: 76967 - DNA, 120 bp, synthetic construct
  source 1..120: mol_type = other DNA
tttttttcaaagttttcaacttctttgcctttggtgtgaatgtcctcccatagctcggaataatttgatcgtctgaagccttcttctctcagctcgtcaaagtcattctccatccagctt

SEQ ID NO: 76968 - DNA, 120 bp, synthetic construct; identical to SEQ ID NO: 10118
  source 1..120: mol_type = other DNA

SEQ ID NO: 76969 - DNA, 120 bp, synthetic construct; identical to SEQ ID NO: 10119
  source 1..120: mol_type = other DNA

SEQ ID NO: 76970 - DNA, 120 bp, synthetic construct; identical to SEQ ID NO: 10110
  source 1..120: mol_type = other DNA

SEQ ID NO: 76971 - DNA, 120 bp, synthetic construct
  source 1..120: mol_type = other DNA
gaacatgcgcccagccatcccattactgggtatatacccaaaggactataaatcatgctgctataaagacacatgcacacgtatgtttattgcggcactattcacaatagcaaagacttg

SEQ ID NO: 76972 - DNA, 120 bp, synthetic construct
  source 1..120: mol_type = other DNA
attgacttggcgatgccggctcttttttggttccatatgaactttaaagtagttttttccaattctgtgaagaaagtcattggtagcttgatggggatggcattgaatctgtaaattacc

SEQ ID NO: 76973 - DNA, 120 bp, synthetic construct
  source 1..120: mol_type = other DNA
ctgctggattcggtttgccagtattttattgaggatttttgcatcaatgttcatcaaggatattggtctaaaattctcttttttggttgtgtctctgcccggctttggtatcaggatgat

SEQ ID NO: 76974 - DNA, 120 bp, synthetic construct
  source 1..120: mol_type = other DNA
ggagcagtttgttcagtttccatgtagttgagcggctttgagtgagattcttaatcctgagttctagtttgattgcagtgtggtctgagagatagtttgttataatttctgttcttttac

SEQ ID NO: 76975 - DNA, 120 bp, synthetic construct
  source 1..120: mol_type = other DNA
attttttccttcatttcaactttggtgaatctgataattatgtgtcttggagttgctcttctcgaggagtatctttgtggtgttctctgtatttcctgaatctgaacgttggcctgcctt

SEQ ID NO: 76976 - DNA, 120 bp, synthetic construct
  source 1..120: mol_type = other DNA
cccggctgctttgtttacctaagcaagcctgggcaatggcgggcgcccctcccccagcctcgttgctgcctttcagtttgatctcagactgctgtgctagcaatcagcgagattccgtgg

SEQ ID NO: 76977 - DNA, 120 bp, synthetic construct; identical to SEQ ID NO: 10111
  source 1..120: mol_type = other DNA

SEQ ID NO: 76978 - DNA, 120 bp, synthetic construct
  source 1..120: mol_type = other DNA
ctatgcagccataaaaaatgatgagttcatatcctttgtagggacatggatgaaattggaaaccatcattctcagtaaactatcgcaagaacaaaaaaccaaacaccacatattctcact

SEQ ID NO: 76979 - DNA, 120 bp, synthetic construct
  source 1..120: mol_type = other DNA
gtgtgtatataaatacacacacacatatatatgtctatgtgtgtatataaatacacacatatatgtgtgtatgtgtgtgtatatatacgtatatacacgtatatacgtatatatatcata

SEQ ID NO: 76980 - DNA, 120 bp, synthetic construct
  source 1..120: mol_type = other DNA
accagtctccctccattttgccctccccacttcttcctcactgtttggtaaccactattctactctacttctctattaacattttttttttaagattccacatatgagagagatcatgcg

SEQ ID NO: 76981 - DNA, 120 bp, synthetic construct; identical to SEQ ID NO: 10113
  source 1..120: mol_type = other DNA

SEQ ID NO: 76982 - DNA, 120 bp, synthetic construct
  source 1..120: mol_type = other DNA
gtccttcgcccactttttgttggggttgtttgtttttttcttgtaaatttgtttgagttcattgtagattctggatattagccctttgtcagatgagtaggttgcgaaaattttctccca

SEQ ID NO: 76983 - DNA, 120 bp, synthetic construct
  source 1..120: mol_type = other DNA
actcgtgatttggctctctgtttgtctgttgttggtgtataagaatgcttgtgatttttgtacattgattttgtatcctgagactttgctgaagttgcttatcagcttaaggagattttg

SEQ ID NO: 76984 - DNA, 120 bp, synthetic construct; identical to SEQ ID NO: 10114
  source 1..120: mol_type = other DNA

SEQ ID NO: 76985 - DNA, 120 bp, synthetic construct
  source 1..120: mol_type = other DNA
agatctttaccaaaaaaatttctgaccccagttgtagaccagcgcaacgtgaagtgccggtctcttgatcgttaggtataagtgttatatatgaccagataaagaggtttcatagaatgc

SEQ ID NO: 76986 - DNA, 120 bp, synthetic construct; identical to SEQ ID NO: 10115
  source 1..120: mol_type = other DNA

SEQ ID NO: 76987 - DNA, 120 bp, synthetic construct; identical to SEQ ID NO: 3048
  source 1..120: mol_type = other DNA

SEQ ID NO: 76988 - DNA, 120 bp, synthetic construct; identical to SEQ ID NO: 10117
  source 1..120: mol_type = other DNA

SEQ ID NO: 76989 - DNA, 120 bp, synthetic construct; identical to SEQ ID NO: 19083
  source 1..120: mol_type = other DNA

SEQ ID NO: 76990 - DNA, 120 bp, synthetic construct
  source 1..120: mol_type = other DNA
ttatcatgaataatgccgcagtaaacatacgtgtgcatgtgtcttcatagcagcatgatttatagtcctttgggtatatacccagtaatgggatggctgggtcaaatggtatttccagtt

SEQ ID NO: 76991 - DNA, 120 bp, synthetic construct; identical to SEQ ID NO: 32612
  source 1..120: mol_type = other DNA

SEQ ID NO: 76992 - DNA, 120 bp, synthetic construct; identical to SEQ ID NO: 32613
  source 1..120: mol_type = other DNA

SEQ ID NO: 76993 - DNA, 120 bp, synthetic construct
  source 1..120: mol_type = other DNA
gttcctgtttctccacatcctctccagcacctgttgtttcctgactttttaatgatcgccattctaactggtgtgagatggtatctcattgtggttttgatttgcatttccatgggagga

SEQ ID NO: 76994 - DNA, 120 bp, synthetic construct; identical to SEQ ID NO: 32614
  source 1..120: mol_type = other DNA

SEQ ID NO: 76995 - DNA, 120 bp, synthetic construct
  source 1..120: mol_type = other DNA
tttcttaatccagtctatcattgttggacatttgggttggttccaagcctctgctattgtgaataatgccgcaataaacatacgtgtgcatgtgtctttatagcagcatgatttatagtc

SEQ ID NO: 76996 - DNA, 120 bp, synthetic construct
  source 1..120: mol_type = other DNA
tgttctgttccattgatctatatctctgttttggtaccagtaccatgctgttttggttactgtagccttgtagtatagtttgaagtcaggtagcgtgattcctccagctttgttcttttg

SEQ ID NO: 76997 - DNA, 120 bp, synthetic construct
  source 1..120: mol_type = other DNA
acatcccatcaatacctaatttattgagagtttttagcatgaagggttgttgaatcttgtcaaaggctttttctgcatctattgagataatcatgtggtttttgtctttggctctgttta

SEQ ID NO: 76998 - DNA, 120 bp, synthetic construct
  source 1..120: mol_type = other DNA
tgtgtctttgttctcgttggtttcaaacaacatctttatttctgccttcatttcgttatgtacccagtagtcattcaggagcaggctgttcagtttccatgtagttgagcggctttgagt

SEQ ID NO: 76999 - DNA, 120 bp, synthetic construct
  source 1..120: mol_type = other DNA
agctcttttagggcaggcctgatggtgacaaaatcggtcagcatttgcttgtctgtaaagtattttatttctccttcacttatgaagcttagtttggctggatatgaaattctgggttga

SEQ ID NO: 77000 - DNA, 120 bp, synthetic construct
  source 1..120: mol_type = other DNA
cctctggaggaggagagacgctctgcgttttagagtttccagtttttctgttctgttttttccccatctttgtggttttatctacttttggtctttgatgatggtgatgtacagatgggt

SEQ ID NO: 77001 - DNA, 120 bp, synthetic construct
  source 1..120: mol_type = other DNA
tagaccagagctgttcctattcggccatcttggctcctccccgcttattttttaattatgttagtttctgacattgccagattctacttacacagagaaggcttctgtgacaagcttttt

SEQ ID NO: 77002 - DNA, 120 bp, synthetic construct
  source 1..120: mol_type = other DNA
tgcaatgaatgtaatatataaagttcttatttgtttggaatttacattctagtggggaggacgtagaaaatgcaagccaaggccgggcacagtggctcacatctgtaatcccagcacttc

SEQ ID NO: 77003 - DNA, 120 bp, synthetic construct; identical to SEQ ID NO: 12286
  source 1..120: mol_type = other DNA

SEQ ID NO: 77004 - DNA, 120 bp, synthetic construct; identical to SEQ ID NO: 12287
  source 1..120: mol_type = other DNA

SEQ ID NO: 77005 - DNA, 120 bp, synthetic construct; identical to SEQ ID NO: 12288
  source 1..120: mol_type = other DNA

SEQ ID NO: 77006 - DNA, 120 bp, synthetic construct; identical to SEQ ID NO: 12289
  source 1..120: mol_type = other DNA

SEQ ID NO: 77007 - DNA, 120 bp, synthetic construct; identical to SEQ ID NO: 12290
  source 1..120: mol_type = other DNA

SEQ ID NO: 77008 - DNA, 120 bp, synthetic construct
  source 1..120: mol_type = other DNA
tttccaaagtcatgaattttagattttttatttcttttttcttcctctctttctctcttccttcctccttcccttcctccgttcctcccccccccccctttcttttgagacaagggttct

SEQ ID NO: 77009 - DNA, 120 bp, synthetic construct; identical to SEQ ID NO: 12291
  source 1..120: mol_type = other DNA

SEQ ID NO: 77010 - DNA, 120 bp, synthetic construct; identical to SEQ ID NO: 12292
  source 1..120: mol_type = other DNA

SEQ ID NO: 77011 - DNA, 120 bp, synthetic construct
  source 1..120: mol_type = other DNA
acctgcctcggcctcccaaagtgctgggattataggcataagccaccgtgcccggcctaaagacaacatttttttttttattatactttaagttttaaggtacatgtgcacattgtgcag

SEQ ID NO: 77012 - DNA, 120 bp, synthetic construct; identical to SEQ ID NO: 25792
  source 1..120: mol_type = other DNA

SEQ ID NO: 77013 - DNA, 120 bp, synthetic construct; identical to SEQ ID NO: 25793
  source 1..120: mol_type = other DNA

SEQ ID NO: 77014 - DNA, 120 bp, synthetic construct
  source 1..120: mol_type = other DNA
taagctgataagcaacttcagcaaagtctcaggatacaaaatcaatgtacaaaaatcacaagcattcttatacaccaataacagacaaacagagagccaaattatgagtgaactcccagt

SEQ ID NO: 77015 - DNA, 120 bp, synthetic construct
  source 1..120: mol_type = other DNA
aggcggaggtagcagtgatccaagattgcactgcttgcactctagcctgggcgacagggctagactctgtctcgaaaaaaaaaaaaaagtgtgtgtgtatatatatatatatacacatat

SEQ ID NO: 77016 - DNA, 120 bp, synthetic construct; identical to SEQ ID NO: 25794
  source 1..120: mol_type = other DNA

SEQ ID NO: 77017 - DNA, 120 bp, synthetic construct; identical to SEQ ID NO: 25795
  source 1..120: mol_type = other DNA

SEQ ID NO: 77018 - DNA, 120 bp, synthetic construct; identical to SEQ ID NO: 25796
  source 1..120: mol_type = other DNA

SEQ ID NO: 77019 - DNA, 120 bp, synthetic construct
  source 1..120: mol_type = other DNA
tcattgaatttttacactccaccaggaaataccctgtttctggggtgggggtggggtctacagattcactgcaacttaaggtaggagattcactactgtcaatcctttttactaaggaaa

SEQ ID NO: 77020 - DNA, 120 bp, synthetic construct
  source 1..120: mol_type = other DNA
catttctctgatggccagtgatgatgagcattttttcatgtgtctgctggctgcgtaaatgtcttcttttgagaagtgtctgttcatatccttcgcccaatttttgatggggttgttttt

SEQ ID NO: 77021 - DNA, 120 bp, synthetic construct; identical to SEQ ID NO: 35487
  source 1..120: mol_type = other DNA

SEQ ID NO: 77022 - DNA, 120 bp, synthetic construct; identical to SEQ ID NO: 35488
  source 1..120: mol_type = other DNA

SEQ ID NO: 77023 - DNA, 120 bp, synthetic construct; identical to SEQ ID NO: 35489
  source 1..120: mol_type = other DNA

SEQ ID NO: 77024 - DNA, 120 bp, synthetic construct; identical to SEQ ID NO: 35490
  source 1..120: mol_type = other DNA

SEQ ID NO: 77025 - DNA, 120 bp, synthetic construct
  source 1..120: mol_type = other DNA
tgtcgaggagcaacttcagcaaagtctcaggatacaaaatcaatgtacaaaaatcacaagcattcttatacaccaacaacagacaaacagagagccaaatcatgagtgaactcccattca

SEQ ID NO: 77026 - DNA, 120 bp, synthetic construct
  source 1..120: mol_type = other DNA
aaagggctaatatccagaatctacaatgaactcaaacaaatttacaagaagaaaacaaacaaccccatcaaaaagtgggcgaaggacatgaacagacacttctcaaaagaagacatttat

SEQ ID NO: 77027 - DNA, 120 bp, synthetic construct; identical to SEQ ID NO: 35491
  source 1..120: mol_type = other DNA

SEQ ID NO: 77028 - DNA, 120 bp, synthetic construct
  source 1..120: mol_type = other DNA
gtaaatttgtttgagttcattgtagattctggatattagcactttgtcagatgagtagtatctgaatgatgctggcctcataaaatgagttagggaggattccctctttttctattgatt

SEQ ID NO: 77029 - DNA, 120 bp, synthetic construct
  source 1..120: mol_type = other DNA
tgtggtgtggtgctgaaaagaatgtatattctgttgatttggggtggagagttctgtagatgtctattaggtccgcttggtgcagagctgagttcaattcctgggtatccttgttgactt

SEQ ID NO: 77030 - DNA, 120 bp, synthetic construct
  source 1..120: mol_type = other DNA
cctttccatgtttagtgcttccttcaggagctcttgtaaggcaggcctggtggtgacaaaatctctcagcatttgcttgtctgtaaagtattttatttctccttcacttatgaagcttag

SEQ ID NO: 77031 - DNA, 120 bp, synthetic construct
  source 1..120: mol_type = other DNA
ggatgtactttctgtttgttagttttccttctaacagagaggaccctcagctacaggtctgttggagtaccctgccatgtgaggtgtcagtgtgcccctgctgggggtgcctcccagtta

SEQ ID NO: 77032 - DNA, 120 bp, synthetic construct
  source 1..120: mol_type = other DNA
taattttcttttttggtttttaaatttctggtgtgtagaagcgcaactaatttttttttattatactttaagttttagggtacatgtgcacaatgtgcaggttagttacatatgtataca

SEQ ID NO: 77033 - DNA, 120 bp, synthetic construct
  source 1..120: mol_type = other DNA
ttgctgtgcagaagctctttagtttaatgagatcccatttgtcaattttggcttttgttgccattgctttttgtgttttagacatgaagtccttgcccatgcctatgtcctgaatgtaat

SEQ ID NO: 77034 - DNA, 120 bp, synthetic construct; identical to SEQ ID NO: 7984
  source 1..120: mol_type = other DNA

SEQ ID NO: 77035 - DNA, 120 bp, synthetic construct
  source 1..120: mol_type = other DNA
caagagatcttcctgccttggcctcccaaagtgctgggattacaaatgaaagccactgtgccctgcctagaaaatatttaaataaaaaaaacagaaaggaaggaatagaggacaacaaca

SEQ ID NO: 77036 - DNA, 120 bp, synthetic construct
  source 1..120: mol_type = other DNA
tctcatgtctacttctttctacacagacacggcaaccatccgatttctcaatcttttccccacctttcccgcctttctattccacaaagccgccattgtcatcctggcccgttctcagtg

SEQ ID NO: 77037 - DNA, 120 bp, synthetic construct
  source 1..120: mol_type = other DNA
ggagggggagggggagggggaggggggaggcctttcataatgaaaaaaaggatccattcattagaaagacataatcacaacattaaaacataagcaaatgtgtaggcatcaaataacaga

SEQ ID NO: 77038 - DNA, 120 bp, synthetic construct; identical to SEQ ID NO: 33177
  source 1..120: mol_type = other DNA

SEQ ID NO: 77039 - DNA, 120 bp, synthetic construct; identical to SEQ ID NO: 33178
  source 1..120: mol_type = other DNA

SEQ ID NO: 77040 - DNA, 120 bp, synthetic construct; identical to SEQ ID NO: 33179
  source 1..120: mol_type = other DNA

SEQ ID NO: 77041 - DNA, 120 bp, synthetic construct
  source 1..120: mol_type = other DNA
ctgctataaatgtgtatgcaagtgtctttttcatataatgacttattttgcggggggggggggaggtggttacccagtgtgggattgctggatcaaatgatagttctacttttagttctt

SEQ ID NO: 77042 - DNA, 120 bp, synthetic construct; identical to SEQ ID NO: 7396
  source 1..120: mol_type = other DNA

SEQ ID NO: 77043 - DNA, 120 bp, synthetic construct; identical to SEQ ID NO: 7397
  source 1..120: mol_type = other DNA

SEQ ID NO: 77044 - DNA, 120 bp, synthetic construct; identical to SEQ ID NO: 7398
  source 1..120: mol_type = other DNA

SEQ ID NO: 77045 - DNA, 120 bp, synthetic construct; identical to SEQ ID NO: 5575
  source 1..120: mol_type = other DNA

SEQ ID NO: 77046 - DNA, 120 bp, synthetic construct; identical to SEQ ID NO: 26939
  source 1..120: mol_type = other DNA

SEQ ID NO: 77047 - DNA, 120 bp, synthetic construct
  source 1..120: mol_type = other DNA
ctttttaatgattgccattctaactggagtgagatggtatctcattgtggttttgatttgcatttctctgatggccagtgatggtgagcattttttcatgtgttttttggctgcataaat

SEQ ID NO: 77048 - DNA, 120 bp, synthetic construct
  source 1..120: mol_type = other DNA
ataagaatgcttgtgatttttgtacgttgattttgtatcctgagacttgctgaagttgcttatcagcttaaggagattttggattgagacgatggggttttctagatatacaatcatgtc

SEQ ID NO: 77049 - DNA, 120 bp, synthetic construct
  source 1..120: mol_type = other DNA
tcctgttattggtctattcagagattcaactttttcctggtttagtcttgggagggtgtatgtgtccaggaatttatccatttcttctagattttctagtttatttgcgtagaggtgttt

SEQ ID NO: 77050 - DNA, 120 bp, synthetic construct
  source 1..120: mol_type = other DNA
tgacagtggggtgttaaagtctcccattattattgtgtgggagtcttaagtctctttataggtcactcatgacttgctttgtgaaactgggtgctcctgtattgggtgcatgtatattta

SEQ ID NO: 77051 - DNA, 120 bp, synthetic construct; identical to SEQ ID NO: 25246
  source 1..120: mol_type = other DNA

SEQ ID NO: 77052 - DNA, 120 bp, synthetic construct; identical to SEQ ID NO: 25247
  source 1..120: mol_type = other DNA

SEQ ID NO: 77053 - DNA, 120 bp, synthetic construct; identical to SEQ ID NO: 5372
  source 1..120: mol_type = other DNA

SEQ ID NO: 77054 - DNA, 120 bp, synthetic construct; identical to SEQ ID NO: 25687
  source 1..120: mol_type = other DNA

SEQ ID NO: 77055 - DNA, 120 bp, synthetic construct
  source 1..120: mol_type = other DNA
tttggatatataccctgtaatgggatggctgggtcaaatggtatttctagttctagatccctgaggaatcgccacactgacttccacaatggttgaactagtttacagtcccaccaacag

SEQ ID NO: 77056 - DNA, 120 bp, synthetic construct
  source 1..120: mol_type = other DNA
taggattgacttggcgatgtgggctcttttttggttccatatgaactttaaagtagttttttccaattctgtgaggaaagtcattggtagcttgatggggatggcattgaatctataaat

SEQ ID NO: 77057 - DNA, 120 bp, synthetic construct
  source 1..120: mol_type = other DNA
gtagaattcagctgtaaatccatctggtcctggactctttttggttggtaagctattgattattgccacaatttcagatcctgttattggtctattcagagattcaacttcttcctggtt

SEQ ID NO: 77058 - DNA, 120 bp, synthetic construct
  source 1..120: mol_type = other DNA
tcttcttgtggaatttatccctttaccattatgtaatggccttctttgtctcttttgatctttgttggtttaaagtctgttttatcagagactaggattgcaacccctgcctttttttgt

SEQ ID NO: 77059 - DNA, 120 bp, synthetic construct
  source 1..120: mol_type = other DNA
ctgtatttcctgaatctgaatgttggcctgccttgctagattggcaaagttctcctggataatatcctgcagagtgttttccaacttggttccattctccccgtcactttcaggtacacc

SEQ ID NO: 77060 - DNA, 120 bp, synthetic construct; identical to SEQ ID NO: 33773
  source 1..120: mol_type = other DNA

SEQ ID NO: 77061 - DNA, 120 bp, synthetic construct; identical to SEQ ID NO: 61333
  source 1..120: mol_type = other DNA

SEQ ID NO: 77062 - DNA, 120 bp, synthetic construct
  source 1..120: mol_type = other DNA
gaggtccttcacatcccttgtaagttggattcataggtattttattctctttgaagcaattgtgaatgggagttcactcgtgatttggctctctgtttgtctgttattggtatataagaa

SEQ ID NO: 77063 - DNA, 120 bp, synthetic construct
  source 1..120: mol_type = other DNA
gagattcaacttcttcctggtttagtcttgggagggtgtatgtgtcaaggaatttatccatttcttctagattttctaatttatttgcatagaggtgtttgtagtattctctgatggtag

SEQ ID NO: 77064 - DNA, 120 bp, synthetic construct
  source 1..120: mol_type = other DNA
tcctccatccttttattttgagcctatgtgtgtctctgcacgtgagatgggtttactgaatacagcacactgatgggtcttgactctttatccaatttgccagtctgtgtctttgaattg

SEQ ID NO: 77065 - DNA, 120 bp, synthetic construct
  source 1..120: mol_type = other DNA
tctcttcacatagtcccatatttcttggaggctttgttcgtttctttttatgcttttttctctaaacttcccttctcgcttcatttcattcatttcatcttccatcactgataccctttc

SEQ ID NO: 77066 - DNA, 120 bp, synthetic construct; identical to SEQ ID NO: 33774
  source 1..120: mol_type = other DNA

SEQ ID NO: 77067 - DNA, 120 bp, synthetic construct
  source 1..120: mol_type = other DNA
ccagcagaagttatttcttccttttacaggtaaaggaaatatagctcagataagtttaaatgactagattgggatctcatagctcatgagtgaaagctattggaagggccgggcgcggtg

SEQ ID NO: 77068 - DNA, 120 bp, synthetic construct; identical to SEQ ID NO: 33776
  source 1..120: mol_type = other DNA

SEQ ID NO: 77069 - DNA, 120 bp, synthetic construct; identical to SEQ ID NO: 33777
  source 1..120: mol_type = other DNA

SEQ ID NO: 77070 - DNA, 120 bp, synthetic construct; identical to SEQ ID NO: 33778
  source 1..120: mol_type = other DNA

SEQ ID NO: 77071 - DNA, 120 bp, synthetic construct
  source 1..120: mol_type = other DNA
aaaagaaaatgttactaaggaaatcacagggaagcgaaaatatatttactattcattaagtggaagtggatcatcaaaaaggcttcatcattgttgtcttcatgttgagtaggttgagga

SEQ ID NO: 77072 - DNA, 120 bp, synthetic construct; identical to SEQ ID NO: 21947
  source 1..120: mol_type = other DNA

SEQ ID NO: 77073 - DNA, 120 bp, synthetic construct; identical to SEQ ID NO: 21948
  source 1..120: mol_type = other DNA

SEQ ID NO: 77074 - DNA, 120 bp, synthetic construct
  source 1..120: mol_type = other DNA
agcctttgacaaaattcaacaacccttcatgctaaaaactctcaataaattaggtattgatgggacgtatttcaaaataataagagctatctatgacatacccacagccaatatcatacc

SEQ ID NO: 77075 - DNA, 120 bp, synthetic construct
  source 1..120: mol_type = other DNA
ataatgccacatatctacaactatctgatctttgacaaacctgagaaaaacaagcaatggggaaaggattccctatttaataaatggtgctgggaaaactggctagccatatgtagaaag

SEQ ID NO: 77076 - DNA, 120 bp, synthetic construct
  source 1..120: mol_type = other DNA
gtcctttgtagggacatggatgaaattggaaaccatcattctcagtaaactatcgcaagaacaaaaaaccaaacaccgcatattctcactcataggtgggaattgaacaatgagatcact

SEQ ID NO: 77077 - DNA, 120 bp, synthetic construct
  source 1..120: mol_type = other DNA
tgagctgtgactgcactgctgcactccagcctgggtgacagagtaacaccctgtctcaaaaataaaataaaataaatgtctttcaacctggggaagccgattgaaaaggtaaataaattt

SEQ ID NO: 77078 - DNA, 120 bp, synthetic construct; identical to SEQ ID NO: 15403
  source 1..120: mol_type = other DNA

SEQ ID NO: 77079 - DNA, 120 bp, synthetic construct
  source 1..120: mol_type = other DNA
ctcacactctggcttccctgtctcctcacacttccagcttcagggactccacacactgggcaccgccacaagcaggagatgccctctcagagatgcccatcttgacatcttgacctccct

SEQ ID NO: 77080 - DNA, 120 bp, synthetic construct
  source 1..120: mol_type = other DNA
tgtcctccccacccaggtgctgcactctcaacctgtggctcaggcaccctcccaccccatctctcccccataggaaccctcccaccccatctctcccccatagggaccctcccaccccat

SEQ ID NO: 77081 - DNA, 120 bp, synthetic construct; identical to SEQ ID NO: 17798
  source 1..120: mol_type = other DNA

SEQ ID NO: 77082 - DNA, 120 bp, synthetic construct; identical to SEQ ID NO: 17799
  source 1..120: mol_type = other DNA

SEQ ID NO: 77083 - DNA, 120 bp, synthetic construct; identical to SEQ ID NO: 17800
  source 1..120: mol_type = other DNA

SEQ ID NO: 77084 - DNA, 120 bp, synthetic construct
  source 1..120: mol_type = other DNA
gtttgtctgtaatctccactttacatatgtccagagaggtgaagccacttgcctgagggcacacagctaggaaggggcagagttgcagttgagcccaggccttggctccagagtgagtgc

SEQ ID NO: 77085 - DNA, 120 bp, synthetic construct; identical to SEQ ID NO: 17803
  source 1..120: mol_type = other DNA

SEQ ID NO: 77086 - DNA, 120 bp, synthetic construct
  source 1..120: mol_type = other DNA
aggtgcagtggctcacacctgtaatccccacactttgggaggccgtggcaggaggatcacttgagcctcggagctcgggaccaggcctgggcaacatggcgaaaccctgtctgtacaaaa

SEQ ID NO: 77087 - DNA, 120 bp, synthetic construct; identical to SEQ ID NO: 17804
  source 1..120: mol_type = other DNA

SEQ ID NO: 77088 - DNA, 120 bp, synthetic construct; identical to SEQ ID NO: 17805
  source 1..120: mol_type = other DNA

SEQ ID NO: 77089 - DNA, 120 bp, synthetic construct; identical to SEQ ID NO: 17806
  source 1..120: mol_type = other DNA

SEQ ID NO: 77090 - DNA, 120 bp, synthetic construct; identical to SEQ ID NO: 17807
  source 1..120: mol_type = other DNA

SEQ ID NO: 77091 - DNA, 120 bp, synthetic construct; identical to SEQ ID NO: 17808
  source 1..120: mol_type = other DNA

SEQ ID NO: 77092 - DNA, 120 bp, synthetic construct
  source 1..120: mol_type = other DNA
ggcacaatctcagttcactgcaacctccgcctcccaggttcaagcaattctcttgcctcagcctctcaagtagctaggattacaggcatttgccaccatgcccggctaatttttgtattt

SEQ ID NO: 77093 - DNA, 120 bp, synthetic construct
  source 1..120: mol_type = other DNA
ttttatcaaaattaaaaatttctgctcatcagaagttttttaagaaaataaacaggcaaggccaggcgcagtggctcatgcctgtaatcctagcactttgggaggccgaggcaggcgggt

SEQ ID NO: 77094 - DNA, 120 bp, synthetic construct; identical to SEQ ID NO: 17429
  source 1..120: mol_type = other DNA

SEQ ID NO: 77095 - DNA, 120 bp, synthetic construct; identical to SEQ ID NO: 15410
  source 1..120: mol_type = other DNA

SEQ ID NO: 77096 - DNA, 120 bp, synthetic construct; identical to SEQ ID NO: 15411
  source 1..120: mol_type = other DNA

SEQ ID NO: 77097 - DNA, 120 bp, synthetic construct; identical to SEQ ID NO: 15412
  source 1..120: mol_type = other DNA

SEQ ID NO: 77098 - DNA, 120 bp, synthetic construct
  source 1..120: mol_type = other DNA
tggctgcatagtattccatggtatatatgtgccacattttcttaatccagtctgtcattgttggacatttgggttggttccaagtctttgctattgtgaatagtgctgcaataaacatat

SEQ ID NO: 77099 - DNA, 120 bp, synthetic construct
  source 1..120: mol_type = other DNA
tcaggtagcatgattcctccagctttgttcttttggcttaggattgacttggcaatgcggtctcttttttggttccatatgaactttaaagtagttttttccaattctggaacacttttt

SEQ ID NO: 77100 - DNA, 120 bp, synthetic construct; identical to SEQ ID NO: 15413
  source 1..120: mol_type = other DNA

SEQ ID NO: 77101 - DNA, 120 bp, synthetic construct; identical to SEQ ID NO: 24940
  source 1..120: mol_type = other DNA

SEQ ID NO: 77102 - DNA, 120 bp, synthetic construct; identical to SEQ ID NO: 24941
  source 1..120: mol_type = other DNA

SEQ ID NO: 77103 - DNA, 120 bp, synthetic construct
  source 1..120: mol_type = other DNA
gagtcaagatcgtgccactgcactccagcctgggcgacagagtgagactctgtctcaaaaaaaaaaaaaaaaaagcctggtaccttccacctcactcttgcttcctttcttgccatgtaa

SEQ ID NO: 77104 - DNA, 120 bp, synthetic construct
  source 1..120: mol_type = other DNA
ggtttgttttgtttggtcccctttattatttctcagatgcaacaggcatttctaattcaatattatttctttttttttttttttttttgagacggagtctcgctctgtcgcccaggctgg

SEQ ID NO: 77105 - DNA, 120 bp, synthetic construct
  source 1..120: mol_type = other DNA
gagaaaaaaatgctgatcaccaagctgaggataaaatgggtccataaaatttgtaactctcctgacctgaatataaaaatgatatgatgccaggtgcggtggctcacgcctgtaatccca

SEQ ID NO: 77106 - DNA, 120 bp, synthetic construct
  source 1..120: mol_type = other DNA
tgggaggcggaggatgcagtgagctgagatcacgccactgcactccaccctgggggacaaagcgagactccgtctaaaaaaaaaaaaaattatatatatatatgagatatatatatatga

SEQ ID NO: 77107 - DNA, 120 bp, synthetic construct
  source 1..120: mol_type = other DNA
aaaaagacaaaaagactaacaacctaagatgaggcagaaataacagaacatacaaaaataaaataaatatgcaaaggggctgggcatggtggctcatgcctgtaaccccggcactttggg

SEQ ID NO: 77108 - DNA, 120 bp, synthetic construct
  source 1..120: mol_type = other DNA
taagggggagagagagagagagggaaggagggggagagagaaagagggagggagagagaaagaaccaactgagatttttacataattcatgttctgtgagtaaaataaaattctccctat

SEQ ID NO: 77109 - DNA, 120 bp, synthetic construct
  source 1..120: mol_type = other DNA
actgggaggtcgaggttgcagtgagctgtgatcatgccactgctctccagcctaagtgacagagtaagaccttgtctcataaactaaaaaaaaaaaaaaaataaaatgcaccctggagtt

SEQ ID NO: 77110 - DNA, 120 bp, synthetic construct
  source 1..120: mol_type = other DNA
gctgtttcttgggttatctgatgtttaagatgcctgaagaatcaaagagtctaaatgcccgtggcctctattttcttatctgtaaaagggcacaatgttaaagactctaccctcccccaa

SEQ ID NO: 77111 - DNA, 120 bp, synthetic construct
  source 1..120: mol_type = other DNA
caccgctgcactccagcctgggcgacagagtgagactgtctaaaaaaaaaaaaaaaaaagattaaaaaacaataataaataaactgaaataatggaggggaatcggtttgccagtcctgt

SEQ ID NO: 77112 - DNA, 120 bp, synthetic construct; identical to SEQ ID NO: 33550
  source 1..120: mol_type = other DNA

SEQ ID NO: 77113 - DNA, 120 bp, synthetic construct; identical to SEQ ID NO: 33551
  source 1..120: mol_type = other DNA

SEQ ID NO: 77114 - DNA, 120 bp, synthetic construct
  source 1..120: mol_type = other DNA
ctaatgagcaaaataaccagctaacatcataatgacagaatcaaattcacacataacaattttaaccttaaatataaatgggctaaatgccccaattaaaagacacagactggcaaattg

SEQ ID NO: 77115 - DNA, 120 bp, synthetic construct
  source 1..120: mol_type = other DNA
atctctacgcaaataaactagaaaatctagaagaaatggataaattcctcgacacatacaccctcccaagactaaaccaggaagaagttgaatctctgaatagaccaataacaggctctg

SEQ ID NO: 77116 - DNA, 120 bp, synthetic construct
  source 1..120: mol_type = other DNA
atctgatctgtgacaaacctgacaaaaacaagcaatggggaaaggagtccctatttaataaatggtgctgggaaaactggctagccatatggagaaagctgaaactggatcccttcctta

SEQ ID NO: 77117 - DNA, 120 bp, synthetic construct; identical to SEQ ID NO: 33552
  source 1..120: mol_type = other DNA

SEQ ID NO: 77118 - DNA, 120 bp, synthetic construct; identical to SEQ ID NO: 33553
  source 1..120: mol_type = other DNA

SEQ ID NO: 77119 - DNA, 120 bp, synthetic construct
  source 1..120: mol_type = other DNA
agatgtaaatggggcaggcacgatggaaaacaatttacagattcctcaaaaaattaaaaatatgccaggcatggtggttcatgcctgtaatctcagcactttgggaggttgagataggtg

SEQ ID NO: 77120 - DNA, 120 bp, synthetic construct
  source 1..120: mol_type = other DNA
gaaagacaaaccctgtacaaggttgttcaaccagcggcccatatggtccatgatggctttgaatgcagcccaataccaatgcgtaaactttcttaaaacattatgaggttttcttgcaat

SEQ ID NO: 77121 - DNA, 120 bp, synthetic construct; identical to SEQ ID NO: 33554
  source 1..120: mol_type = other DNA

SEQ ID NO: 77122 - DNA, 120 bp, synthetic construct
  source 1..120: mol_type = other DNA
atggggttttgtagatatacaatcatgtcatctgcaaacagggataatttgacttccttttttcctaattgaatgccctaagccaaaagaacaaagctggaggcatcacgctacctgact

SEQ ID NO: 77123 - DNA, 120 bp, synthetic construct
  source 1..120: mol_type = other DNA
accatttgacccagccatcccattactgggtatatacctaaaggattataaaccatgctgctataaagacacatgcacatgtatgtttattgcggcactattcacaatagcaaagacttg

SEQ ID NO: 77124 - DNA, 120 bp, synthetic construct
  source 1..120: mol_type = other DNA
gctgagcgccggtcccctaggcccactgttgtttctccatactttgtctctgtgtcttctttctttcttttttttttttttattttttattgatcattcttgggtgtttctcgcagaggg

SEQ ID NO: 77125 - DNA, 120 bp, synthetic construct
  source 1..120: mol_type = other DNA
gaggggctcctcacatcccagacgatgggcggccaggcagagacgctcctcacttcccagaaggggtggcggccgggcagaggctgcaatctgggcattttgggaggccaaggcaggctg

SEQ ID NO: 77126 - DNA, 120 bp, synthetic construct
  source 1..120: mol_type = other DNA
gcaatgagctgagattgcaccactgcactctggcctgggtgacagagtgagactctgtctgaaaaaaaaaaaaaaaaagaaaagaaaagaaaaacagtctgtcagttcctcaaatgatta

SEQ ID NO: 77127 - DNA, 120 bp, synthetic construct
  source 1..120: mol_type = other DNA
tcacttctcagacggggcggctgccgggcggaggggctcctcacttctcagacggggcagttgccaggcggagggtctcctcacttctcagatggggcggccgggcagagatgctcctca

SEQ ID NO: 77128 - DNA, 120 bp, synthetic construct
  source 1..120: mol_type = other DNA
ttatttggttataaaaataaagtattgacacatgctacaacatgaatgaaccttgaaaacattatgctaagtgaaagaagccaatcacaggagaccacatactatatgattccattcata

SEQ ID NO: 77129 - DNA, 120 bp, synthetic construct; identical to SEQ ID NO: 21423
  source 1..120: mol_type = other DNA

SEQ ID NO: 77130 - DNA, 120 bp, synthetic construct
  source 1..120: mol_type = other DNA
tgaggagcccctctgcccggccaccaccccgtctgggaggtgtacccaacagctcattgagaacgggccatgatgacaatggcagttttgtggaatagaaaagggggaaaggtggggaaa

SEQ ID NO: 77131 - DNA, 120 bp, synthetic construct; identical to SEQ ID NO: 21805
  source 1..120: mol_type = other DNA

SEQ ID NO: 77132 - DNA, 120 bp, synthetic construct; identical to SEQ ID NO: 21806
  source 1..120: mol_type = other DNA

SEQ ID NO: 77133 - DNA, 120 bp, synthetic construct; identical to SEQ ID NO: 9456
  source 1..120: mol_type = other DNA

SEQ ID NO: 77134 - DNA, 120 bp, synthetic construct; identical to SEQ ID NO: 9457
  source 1..120: mol_type = other DNA

SEQ ID NO: 77135 - DNA, 120 bp, synthetic construct; identical to SEQ ID NO: 9458
  source 1..120: mol_type = other DNA

SEQ ID NO: 77136 - DNA, 120 bp, synthetic construct; identical to SEQ ID NO: 18400
  source 1..120: mol_type = other DNA

SEQ ID NO: 77137 - DNA, 120 bp, synthetic construct
  source 1..120: mol_type = other DNA
tttacagtcccactagcaacttatgagtgtattagtctattctcactctgctgtaaaaaactgcccgagactgggtaatttataaaagaaataggtggctaggtgcagtgactcacgcct

SEQ ID NO: 77138 - DNA, 120 bp, synthetic construct; identical to SEQ ID NO: 5843
  source 1..120: mol_type = other DNA

SEQ ID NO: 77139 - DNA, 120 bp, synthetic construct
  source 1..120: mol_type = other DNA
atatttggctttataatggtctccctttttattttttttttattttttgagacacagtcttgctccatcactcaggctggagtgcagtggctcactgcaacctctgcttcccaggttcaa

SEQ ID NO: 77140 - DNA, 120 bp, synthetic construct; identical to SEQ ID NO: 28137
  source 1..120: mol_type = other DNA

SEQ ID NO: 77141 - DNA, 120 bp, synthetic construct
  source 1..120: mol_type = other DNA
acaatggattcaggataataaacagtgacaggtactttgttttcctctcatttctgtttttttaaaaataatttttaatttttgtgtgtacatagtaggtacatatttatggggcacatg

SEQ ID NO: 77142 - DNA, 120 bp, synthetic construct
  source 1..120: mol_type = other DNA
aagaggaagtcaaattgtccgtttgcagatgacatcattgtatatttagaaaaccccattgtctcagcccaaaatctccttaagctgataagcaacttcagcaaagtctcaggatacaaa

SEQ ID NO: 77143 - DNA, 120 bp, synthetic construct
  source 1..120: mol_type = other DNA
ccctagaagaaaacctaggcaataccattcaggacataggcatgggcaaggacttcaggactaaaacaccaaaagcaatggcaacaaaagccaaaattgacaaatgggatctaattaaac

SEQ ID NO: 77144 - DNA, 120 bp, synthetic construct; identical to SEQ ID NO: 23047
  source 1..120: mol_type = other DNA

SEQ ID NO: 77145 - DNA, 120 bp, synthetic construct; identical to SEQ ID NO: 14444
  source 1..120: mol_type = other DNA

SEQ ID NO: 77146 - DNA, 120 bp, synthetic construct; identical to SEQ ID NO: 14445
  source 1..120: mol_type = other DNA

SEQ ID NO: 77147 - DNA, 120 bp, synthetic construct; identical to SEQ ID NO: 14446
  source 1..120: mol_type = other DNA

SEQ ID NO: 77148 - DNA, 120 bp, synthetic construct; identical to SEQ ID NO: 14447
  source 1..120: mol_type = other DNA

SEQ ID NO: 77149 - DNA, 120 bp, synthetic construct; identical to SEQ ID NO: 24287
  source 1..120: mol_type = other DNA

SEQ ID NO: 77150 - DNA, 120 bp, synthetic construct
  source 1..120: mol_type = other DNA
cccggcagccaccccgtctgggaagtgaggagcccctccgcccagcagccaccccgtctgggaagtgaggagcatctccacccggcagccgccccgtccgggagggaggtgggggggtca

SEQ ID NO: 77151 - DNA, 120 bp, synthetic construct; identical to SEQ ID NO: 21019
  source 1..120: mol_type = other DNA

SEQ ID NO: 77152 - DNA, 120 bp, synthetic construct; identical to SEQ ID NO: 21020
  source 1..120: mol_type = other DNA

SEQ ID NO: 77153 - DNA, 120 bp, synthetic construct; identical to SEQ ID NO: 21021
  source 1..120: mol_type = other DNA

SEQ ID NO: 77154 - DNA, 120 bp, synthetic construct; identical to SEQ ID NO: 21022
  source 1..120: mol_type = other DNA

SEQ ID NO: 77155 - DNA, 120 bp, synthetic construct
  source 1..120: mol_type = other DNA
gtaatttctatttcccatttcttgactctgaatttggaatacaacaagactgctttcagaaataaggaatgaggccaggtgcgttgtctgtcatctgtaatcccagcactttgggaggct

SEQ ID NO: 77156 - DNA, 120 bp, synthetic construct
  source 1..120: mol_type = other DNA
catgggcaaggacttcatgtctaaaacaccaaaagcaatggcaacaaaagccaaaattgacaaatgggatctaattaaactaaagagcttctgcacagcaaaagaaactactatcagagt

SEQ ID NO: 77157 - DNA, 120 bp, synthetic construct
  source 1..120: mol_type = other DNA
ttggaaatcatcattctcagtaaactatcgcaagaacaaaaaaccaaacaccgcatattctcactcataggtgggaatagaacaatgagatcacatggacacaggaaggggactatcaca

SEQ ID NO: 77158 - DNA, 120 bp, synthetic construct
  source 1..120: mol_type = other DNA
cttcctttgctttccttggtcatttttctcctagaaagagctcttatctgttttcttttaaggagtctttcatgacaccatctccttggcatttcctctgagttggcggtcctgaatttc

SEQ ID NO: 77159 - DNA, 120 bp, synthetic construct; identical to SEQ ID NO: 4624
  source 1..120: mol_type = other DNA

SEQ ID NO: 77160 - DNA, 120 bp, synthetic construct; identical to SEQ ID NO: 12110
  source 1..120: mol_type = other DNA

SEQ ID NO: 77161 - DNA, 120 bp, synthetic construct; identical to SEQ ID NO: 12111
  source 1..120: mol_type = other DNA

SEQ ID NO: 77162 - DNA, 120 bp, synthetic construct
  source 1..120: mol_type = other DNA
ccaaccttagaaattccaatttaaatgggagaaaatttttgcaatctactcatctgacaaagggctaatatccagaatctacaatgaactcaaacaaatttacaagaaaaaaacaaacaa

SEQ ID NO: 77163 - DNA, 120 bp, synthetic construct; identical to SEQ ID NO: 12112
  source 1..120: mol_type = other DNA

SEQ ID NO: 77164 - DNA, 120 bp, synthetic construct
  source 1..120: mol_type = other DNA
gaatagtagttacataggtggagatcaagagcttttcttatatgtaggctgaatgatttttcaaataagaaaggacttactgccgggcacggtggctcacgcctgtaatcccagcacttt

SEQ ID NO: 77165 - DNA, 120 bp, synthetic construct; identical to SEQ ID NO: 28349
  source 1..120: mol_type = other DNA

SEQ ID NO: 77166 - DNA, 120 bp, synthetic construct
  source 1..120: mol_type = other DNA
gcttgagcccgggaggcagagtttgcagtgagccaagactgtatcactgcactctagcctgtgcaacagagagcctgtctcaaaaaaaaaacaaacaaaaaaaaaacaaaaaaaacaaca

SEQ ID NO: 77167 - DNA, 120 bp, synthetic construct
  source 1..120: mol_type = other DNA
aaagtgctgggattacaggtgtgagctgtgcccagcctctgttcacatctgcacatttttggggttacttgctgagctgcaagatgtttttatttgcttatattttattcacaagaaggt

SEQ ID NO: 77168 - DNA, 120 bp, synthetic construct
  source 1..120: mol_type = other DNA
gtagctgaaaatatgtcaggtagcaggggagcctttctaaacttcaggtcagaaagcctcgcagtgggcagaggattgttgctaaagattatgagacgtttcaaggaattggtaataaaa

SEQ ID NO: 77169 - DNA, 120 bp, synthetic construct
  source 1..120: mol_type = other DNA
taaaaatcagtgactaggccgggcacagtagctcacgcctgttttcccaggcagtgcagtgagccaagatcataccactgcattccagcctgggcaacagagtgagactctgtctaaaaa

SEQ ID NO: 77170 - DNA, 120 bp, synthetic construct
  source 1..120: mol_type = other DNA
cagcctcccaaagtgctggcattacaggcgtgagacaccgcacctggcctaattaaacatttttcaaaaggtatttggaggtggcttccttaagacctggtaaattaaactaaaaaaaaa

SEQ ID NO: 77171 - DNA, 120 bp, synthetic construct; identical to SEQ ID NO: 25886
  source 1..120: mol_type = other DNA

SEQ ID NO: 77172 - DNA, 120 bp, synthetic construct
  source 1..120: mol_type = other DNA
agagtgagattccatctcaaaaaaaaaaacaaaaaacaaaaaaaaaaaaaacggggggcggggggggtccgggtgtggtagtggcaggaggatcccttgagtccaggagttcaagacagg

SEQ ID NO: 77173 - DNA, 120 bp, synthetic construct; identical to SEQ ID NO: 25579
  source 1..120: mol_type = other DNA

SEQ ID NO: 77174 - DNA, 120 bp, synthetic construct
  source 1..120: mol_type = other DNA
tgcagaagctctttagtttaattagatcccatttgtcaattttgtcttttgttgccgttgcttttggtgttttggacatgaagtccttgcccatgcctatgtcctgaatggtaatgccta

SEQ ID NO: 77175 - DNA, 120 bp, synthetic construct
  source 1..120: mol_type = other DNA
ggcaattaggcaggagaaggaaataaacggtattcaattaggaacagaggaagtcaaattgtccctgtttgcagatgacatgactgtatatctagaaaaccccattgtcttagcccagaa

SEQ ID NO: 77176 - DNA, 120 bp, synthetic construct
  source 1..120: mol_type = other DNA
tgaagggttttttgtgtctctatttccttcagttctgctctgatttttgttatttcttgccttctgctagcttttgaatgtgtttgctcttgcttttctagttcttttaattgtgatgtt

SEQ ID NO: 77177 - DNA, 120 bp, synthetic construct
  source 1..120: mol_type = other DNA
ttttgttttccattggcttggtagatcttcctccatccttttattttgagcctatgtgtgtctctgcacgtgagatgggtttcctgaatacagcacactgatggatcttgactctttatc

SEQ ID NO: 77178 - DNA, 120 bp, synthetic construct
  source 1..120: mol_type = other DNA
ttgatcgcatcggctcctgaggcttctgcattcctcacatagttctcgagccttggttttcagctccatcagctcctttaagcacttctctgtattggttattctagttatacattcttc

SEQ ID NO: 77179 - DNA, 120 bp, synthetic construct
  source 1..120: mol_type = other DNA
tctgtcacccgtttctttgactcggaaagggaactccctgaccccttgtgcttcccaggtgaggcaatgcctcgccctgcttcggctcgcgcacggtgcgcgcacccactggcctgcgcc

SEQ ID NO: 77180 - DNA, 120 bp, synthetic construct; identical to SEQ ID NO: 25580
  source 1..120: mol_type = other DNA

SEQ ID NO: 77181 - DNA, 120 bp, synthetic construct
  source 1..120: mol_type = other DNA
acggcagggtactccaacagaccttcagctgagggtcctgtctgttagaaggaaaactaacaaacagaaaggacatccacaccaaaaacccatctgtacatcaccatcatcaaagaccaa

SEQ ID NO: 77182 - DNA, 120 bp, synthetic construct
  source 1..120: mol_type = other DNA
ctcggcagaaaccctacaagccagaagagagtgggggccaatattcaacattcttaaagaaaagaattttcaacccagaacttcatatccagccaaactaagcttcataagtgaaggaga

SEQ ID NO: 77183 - DNA, 120 bp, synthetic construct
  source 1..120: mol_type = other DNA
ttgaccatatacttggaagtaaagctgtcctcagcaaatgtaaaagaacagaaattataacaaactatctctcagaccacagtgcaatcaaactagaactcaggattaagaatctcactc

SEQ ID NO: 77184 - DNA, 120 bp, synthetic construct; identical to SEQ ID NO: 50654
  source 1..120: mol_type = other DNA

SEQ ID NO: 77185 - DNA, 120 bp, synthetic construct
  source 1..120: mol_type = other DNA
ggcatcacactacctaacttcaaactatactacaaggctacagtaaccaaaacagcatgttactggtaccaaaacagagatgtagatcaatggaacagaacagagccctcagaaataacg

SEQ ID NO: 77186 - DNA, 120 bp, synthetic construct
  source 1..120: mol_type = other DNA
catttgacacagccatcccattactgggtatatgcccaaaggactataaatcatgctgctataaagacacatgcacacgtatgtttattgcggcactattcacaatagcaaagacttgga

SEQ ID NO: 77187 - DNA, 120 bp, synthetic construct
  source 1..120: mol_type = other DNA
ccgtgcaccagccgaagcagggtgaggcattgcctcactcgggaagtgcaagggtcagggagttccctttcctagtcaaagaaaggggtgacagacagcacctggaaaatcgggtcactc

SEQ ID NO: 77188 - DNA, 120 bp, synthetic construct
  source 1..120: mol_type = other DNA
tcctcaccagcaacagaacaaagctggacagagaatgactttgacgagttgagagaagaaggctacagacgatcaaactactccgagctacaggaggaaattcaaaccaaaggcaaagaa

SEQ ID NO: 77189 - DNA, 120 bp, synthetic construct
  source 1..120: mol_type = other DNA
ctaacatcataatgacaggatcaaatacacacatcacaatattaactttaaatgtaaatggactaaatggtccaattaaaagacacagactggcaaattggataaacagtcaagacccat

SEQ ID NO: 77190 - DNA, 120 bp, synthetic construct
  source 1..120: mol_type = other DNA
gaactagaaaagcaagagcaaacacattcaaaagctagcagaaggcaagaaataactaaaatcagagcagaactgaaggaaatagagacacaaaaaacccttcaaaaaattaatgaacct

SEQ ID NO: 77191 - DNA, 120 bp, synthetic construct
  source 1..120: mol_type = other DNA
atcagagaaatgcaaatcaaaaccacaatgagataccatctcacaccagttagaatggcaatcattaaaaagtcaggaaacaacaggtgctggagaggatgtgcagaaataggaacactt

SEQ ID NO: 77192 - DNA, 120 bp, synthetic construct
  source 1..120: mol_type = other DNA
ataggcaagcagagggccaaatcatgaatgaacttccattcacaattgctacaaagagaataaaatgcctaggaatacagttaacaagagatgtgaaggatcttttcaaggagaattaca

SEQ ID NO: 77193 - DNA, 120 bp, synthetic construct
  source 1..120: mol_type = other DNA
ggtgtgagacagtatctcattgtggttttgatttgcatttctctgatggccagagatgatgagcattttttcatgtgtcttttggctgcataaatgtcttcttttgagaagtgtctgttc

SEQ ID NO: 77194 - DNA, 120 bp, synthetic construct; identical to SEQ ID NO: 25583
  source 1..120: mol_type = other DNA

SEQ ID NO: 77195 - DNA, 120 bp, synthetic construct
  source 1..120: mol_type = other DNA
ttgatttacatttctctgatggccagtgatgatgagcattttttcatgtgtttgttggctgcataaatgtcttcttttgagaagtgtctgttcatatccttcacccactttttgatgggg

SEQ ID NO: 77196 - DNA, 120 bp, synthetic construct
  source 1..120: mol_type = other DNA
agttcactcatgatttggctctctatttgtctgttattcgtgtataagaatgcttgtgatttttgtacattgattttgtatcctgagactttgctgaagttgcttatcagcttaaggaga

SEQ ID NO: 77197 - DNA, 120 bp, synthetic construct; identical to SEQ ID NO: 25584
  source 1..120: mol_type = other DNA

SEQ ID NO: 77198 - DNA, 120 bp, synthetic construct; identical to SEQ ID NO: 25585
  source 1..120: mol_type = other DNA

SEQ ID NO: 77199 - DNA, 120 bp, synthetic construct
  source 1..120: mol_type = other DNA
tcagatgagtaggttgcgaaaattttctcccatgttgtaggttgcctgttcactctgatggtagtttcttttgctgtgcagaagttctttagtttaattagatcccatttgtcaattttg

SEQ ID NO: 77200 - DNA, 120 bp, synthetic construct
  source 1..120: mol_type = other DNA
tgagactttgctgaagttgcttatcagcttaaggagattttgggctgagaccatggggttttctagataaacaatcatgtcgtctgcaaacagggacaatttgacttcctcttttcctaa

SEQ ID NO: 77201 - DNA, 120 bp, synthetic construct
  source 1..120: mol_type = other DNA
ctttttggttggtaaactattgattattgccacaatttcagctcctgttattggtctattcagagattcaacttcttcctggtttagtcttgggagagtgtatgtgtcgaggaatttatc

SEQ ID NO: 77202 - DNA, 120 bp, synthetic construct; identical to SEQ ID NO: 25586
  source 1..120: mol_type = other DNA

SEQ ID NO: 77203 - DNA, 120 bp, synthetic construct
  source 1..120: mol_type = other DNA
tttgtataagctgtaaggaagggatccagtttcagctttctacatatggcaaatttacaagaaaaaaacaaacaaccccatcaaaaagtgggtgaaggacatgaacagacacttctcaaa

SEQ ID NO: 77204 - DNA, 120 bp, synthetic construct; identical to SEQ ID NO: 25587
  source 1..120: mol_type = other DNA

SEQ ID NO: 77205 - DNA, 120 bp, synthetic construct; identical to SEQ ID NO: 27717
  source 1..120: mol_type = other DNA

SEQ ID NO: 77206 - DNA, 120 bp, synthetic construct; identical to SEQ ID NO: 19026
  source 1..120: mol_type = other DNA

SEQ ID NO: 77207 - DNA, 120 bp, synthetic construct; identical to SEQ ID NO: 10552
  source 1..120: mol_type = other DNA

SEQ ID NO: 77208 - DNA, 120 bp, synthetic construct; identical to SEQ ID NO: 10553
  source 1..120: mol_type = other DNA

SEQ ID NO: 77209 - DNA, 120 bp, synthetic construct; identical to SEQ ID NO: 24014
  source 1..120: mol_type = other DNA

SEQ ID NO: 77210 - DNA, 120 bp, synthetic construct; identical to SEQ ID NO: 24015
  source 1..120: mol_type = other DNA

SEQ ID NO: 77211 - DNA, 120 bp, synthetic construct; identical to SEQ ID NO: 15817
  source 1..120: mol_type = other DNA

SEQ ID NO: 77212 - DNA, 120 bp, synthetic construct; identical to SEQ ID NO: 15818
  source 1..120: mol_type = other DNA

SEQ ID NO: 77213 - DNA, 120 bp, synthetic construct
  source 1..120: mol_type = other DNA
gcatccgtgtgaccgtgtgagcgtccgtgtgagcgtgtgaccgtgtgagagagtgaccatccatgtgagcatgtgtgaccgtccgtgtgagcatccgtgtgagcgtgtgaccgtccgtgt

SEQ ID NO: 77214 - DNA, 120 bp, synthetic construct; identical to SEQ ID NO: 15819
  source 1..120: mol_type = other DNA

SEQ ID NO: 77215 - DNA, 120 bp, synthetic construct; identical to SEQ ID NO: 15820
  source 1..120: mol_type = other DNA

SEQ ID NO: 77216 - DNA, 120 bp, synthetic construct; identical to SEQ ID NO: 15821
  source 1..120: mol_type = other DNA

SEQ ID NO: 77217 - DNA, 120 bp, synthetic construct; identical to SEQ ID NO: 32999
  source 1..120: mol_type = other DNA

SEQ ID NO: 77218 - DNA, 120 bp, synthetic construct
  source 1..120: mol_type = other DNA
ttgccaggcagagggtctcctcacttctcagaaggggcggccgggcagagacgctcttcacctcccagacggggtcgcggccgggcagaggcgctcctcacatcccagacggggcggcgg

SEQ ID NO: 77219 - DNA, 120 bp, synthetic construct; identical to SEQ ID NO: 33000
  source 1..120: mol_type = other DNA

SEQ ID NO: 77220 - DNA, 120 bp, synthetic construct
  source 1..120: mol_type = other DNA
tgcaaattttctgtaaacctaaaactgctctaaaaaatagtcgattaaaatttttttaaaaaaacgaagcatagctctccctctccctctccctctccccacggtctccctctccctctc

SEQ ID NO: 77221 - DNA, 120 bp, synthetic construct
  source 1..120: mol_type = other DNA
tgcctggcaaccgccccgtctgagaagtgaggagcccctccacccagcagccgtcccgtctgagaagtgaggagcccctccgcccggcagccaccccgtctggtaagtgaggagcgtctc

SEQ ID NO: 77222 - DNA, 120 bp, synthetic construct
  source 1..120: mol_type = other DNA
tgccaaatccccctctgcgagaaacacccaagaatgatcaataaaaaataaataaatacgaaaaaaaaagcataaaaaaagatagttcttatgaaatgaaaatcacttacatgagtcaaa

SEQ ID NO: 77223 - DNA, 120 bp, synthetic construct
  source 1..120: mol_type = other DNA
cctcgtgatctgcccatcttggcctcccaaagtgctgggattacaggcatgagccactacacctggcccaatatgtacaattattacatgtcaactaaaaattaaaaagcaagggagagg

SEQ ID NO: 77224 - DNA, 120 bp, synthetic construct
  source 1..120: mol_type = other DNA
ccggcagctgccccgtctgagaagtgaggagcctctctgcccagcagccaccccatctgggaagtgaggagcgtctctgcccagcagccaccccgtccgggagggaggtggggggggggt

SEQ ID NO: 77225 - DNA, 120 bp, synthetic construct; identical to SEQ ID NO: 33002
  source 1..120: mol_type = other DNA

SEQ ID NO: 77226 - DNA, 120 bp, synthetic construct; identical to SEQ ID NO: 9277
  source 1..120: mol_type = other DNA

SEQ ID NO: 77227 - DNA, 120 bp, synthetic construct; identical to SEQ ID NO: 9278
  source 1..120: mol_type = other DNA

SEQ ID NO: 77228 - DNA, 120 bp, synthetic construct; identical to SEQ ID NO: 24306
  source 1..120: mol_type = other DNA

SEQ ID NO: 77229 - DNA, 120 bp, synthetic construct; identical to SEQ ID NO: 13233
  source 1..120: mol_type = other DNA

SEQ ID NO: 77230 - DNA, 120 bp, synthetic construct; identical to SEQ ID NO: 13234
  source 1..120: mol_type = other DNA

SEQ ID NO: 77231 - DNA, 120 bp, synthetic construct; identical to SEQ ID NO: 22449
  source 1..120: mol_type = other DNA

SEQ ID NO: 77232 - DNA, 120 bp, synthetic construct; identical to SEQ ID NO: 18955
  source 1..120: mol_type = other DNA

SEQ ID NO: 77233 - DNA, 120 bp, synthetic construct
  source 1..120: mol_type = other DNA
ggttgcagtgagccgagatcgcaccactgcactctagcctgggcgacagagctagacttcttctcaaaaaaaaaaaaaaaaaggaatctctttggttttatatatattttttttatatat

SEQ ID NO: 77234 - DNA, 120 bp, synthetic construct; identical to SEQ ID NO: 4193
  source 1..120: mol_type = other DNA

SEQ ID NO: 77235 - DNA, 120 bp, synthetic construct; identical to SEQ ID NO: 18065
  source 1..120: mol_type = other DNA

SEQ ID NO: 77236 - DNA, 120 bp, synthetic construct
  source 1..120: mol_type = other DNA
tgtgattgcaccactgcactctagcctgggtgacagaacgagaccctgtctcaaaaaaaaaaaaaaagaaagaaagaaaggaaaaaaaaaactcatgcctgtaatcccagcactttgggg

SEQ ID NO: 77237 - DNA, 120 bp, synthetic construct; identical to SEQ ID NO: 18066
  source 1..120: mol_type = other DNA

SEQ ID NO: 77238 - DNA, 120 bp, synthetic construct; identical to SEQ ID NO: 18067
  source 1..120: mol_type = other DNA

SEQ ID NO: 77239 - DNA, 120 bp, synthetic construct; identical to SEQ ID NO: 25908
  source 1..120: mol_type = other DNA

SEQ ID NO: 77240 - DNA, 120 bp, synthetic construct; identical to SEQ ID NO: 25909
  source 1..120: mol_type = other DNA

SEQ ID NO: 77241 - DNA, 120 bp, synthetic construct; identical to SEQ ID NO: 25910
  source 1..120: mol_type = other DNA

SEQ ID NO: 77242 - DNA, 120 bp, synthetic construct
  source 1..120: mol_type = other DNA
attttggtttgcatttctctgatggccagtgatgatgagcattttttcatgtgttttttggctgcataaatgtcttcttttgagaagtgtctgttcatgtccttcacccactttttgatg

SEQ ID NO: 77243 - DNA, 120 bp, synthetic construct; identical to SEQ ID NO: 25911
  source 1..120: mol_type = other DNA

SEQ ID NO: 77244 - DNA, 120 bp, synthetic construct; identical to SEQ ID NO: 25912
  source 1..120: mol_type = other DNA

SEQ ID NO: 77245 - DNA, 120 bp, synthetic construct; identical to SEQ ID NO: 25913
  source 1..120: mol_type = other DNA

SEQ ID NO: 77246 - DNA, 120 bp, synthetic construct
  source 1..120: mol_type = other DNA
aatggcaatcattaaaaagtcaggaaacaacaggtgctggagaggatgtggagaaataggaacactttgacactgttggtgggactgtaaactagttcaaccattgtgcaagtcagtgtg

SEQ ID NO: 77247 - DNA, 120 bp, synthetic construct
  source 1..120: mol_type = other DNA
caacatgctgaaaccccatctgtaccaaaaatacaaaaattaactgggcatgttggcacacgtctatgatcccagctactctggaggctgaggtgggaggattgcttgaacctagatggc

SEQ ID NO: 77248 - DNA, 120 bp, synthetic construct
  source 1..120: mol_type = other DNA
taaattttgcacataatgatttaagagggctaaactagataaatatcttgagattaagaaatattatttggccgggcgtggtggctcacgcctgtaatcccagcactttgggaggccgag

SEQ ID NO: 77249 - DNA, 120 bp, synthetic construct
  source 1..120: mol_type = other DNA
ctggctcggagggtcctacgcccacggagtcttgctgattgctagcacggcagtctgagatcaaactgcaaggcagcagcgaggccgggggaggggcacccgccattgcccaggcttgat

SEQ ID NO: 77250 - DNA, 120 bp, synthetic construct
  source 1..120: mol_type = other DNA
caatggaagatgaaatgaatgaaatgaaacgagaagggaagtttagagaaaaaagaataaaaagaaatgagcaaagcctccaagaaatatgggactatgtgaaaagaccaaatctacgtc

SEQ ID NO: 77251 - DNA, 120 bp, synthetic construct
  source 1..120: mol_type = other DNA
gactcccacacattaataatgggagactttaacaccccactgtcaacattagacagatcaacgagacagaaagtcaacaaggatacccaggaattgaactcagctctgcaccaggtggac

SEQ ID NO: 77252 - DNA, 120 bp, synthetic construct
  source 1..120: mol_type = other DNA
taaattcctggacacatgcactctcccaagactaaaccaggaagaagttgaatctctgaatagaccaataacaggagctgaaattgtggcaataatcaatagcttaccaaccaaaaagag

SEQ ID NO: 77253 - DNA, 120 bp, synthetic construct
  source 1..120: mol_type = other DNA
gaagtcaaattgtccctgtttgcagatgacatgattgtatatctagaaaaccccattatctcagcccaaaatctccttaagctgataagcaacttcagcaaagtctcagatataaaatca

SEQ ID NO: 77254 - DNA, 120 bp, synthetic construct
  source 1..120: mol_type = other DNA
aaaattttcgcaacctactcatctgacaaagggctaatatctagaatctacaatgaactcaaacaaatttacaagaaaaaaacaaacaaccccatcaaaaagtgggcgaaggacatgaac

SEQ ID NO: 77255 - DNA, 120 bp, synthetic construct; identical to SEQ ID NO: 25915
  source 1..120: mol_type = other DNA

SEQ ID NO: 77256 - DNA, 120 bp, synthetic construct
  source 1..120: mol_type = other DNA
gtcaaagaaaggggtgacagacggcacctggaaaatcgtgtcactcccacccgaatactgtgcttttccaacgggcttaaaacacagcgcacctggagaatatatcctgcacctgcctcg

SEQ ID NO: 77257 - DNA, 120 bp, synthetic construct
  source 1..120: mol_type = other DNA
gcaaagaaattgaaaactttgaaaaaaatttagaagaatgtataactagaataaccaaaacagagaagagcttaacggagctgatggagctgaaaaccaaggctcgagaactaagtgaag

SEQ ID NO: 77258 - DNA, 120 bp, synthetic construct
  source 1..120: mol_type = other DNA
aaacccatctcacgtgcagagacacacataggctcaaaataaaaggatggaagaagatctaccaagcaaatggaaaacaaaaaggcaggggttgcaatcctagtctctgataaaacaggc

SEQ ID NO: 77259 - DNA, 120 bp, synthetic construct
  source 1..120: mol_type = other DNA
aaggggatatcaccaccgatcccacagaaatacgaactaccgtcagagaatactacaaacacctctacgcaaataaactagaaaatctagaagaaatggatacattcctcgacacataca

SEQ ID NO: 77260 - DNA, 120 bp, synthetic construct
  source 1..120: mol_type = other DNA
gaaggacctcttcaaggagaactacaaaccactgctcaagaaaataaaagaggatacaaacaaatggaagaacattccatgctcatgggtaggaagaatcaatatcgtgaaaatggccat

SEQ ID NO: 77261 - DNA, 120 bp, synthetic construct
  source 1..120: mol_type = other DNA
cacatgaaaaaatgctcaccatcactggccatcagagaaatgcaaatcaaaaccactatgagataccatctcacaccagttagaatgacaatcattaaaagtcaggaaacaacaggtgct

SEQ ID NO: 77262 - DNA, 120 bp, synthetic construct; identical to SEQ ID NO: 25916
  source 1..120: mol_type = other DNA

SEQ ID NO: 77263 - DNA, 120 bp, synthetic construct
  source 1..120: mol_type = other DNA
ggcagggggaggggcgcccgccattgcccagccttgattaggtaaacaaagcagcctggaagctcgaactgggtggagcccaccacagctcaaggaggcctgcctgcctctgtaggctcc

SEQ ID NO: 77264 - DNA, 120 bp, synthetic construct
  source 1..120: mol_type = other DNA
agagaacgccacaaagatactcctcgagaagagcaactccaagacacataattgtcagattcaccaaagttgaaatgaaggaaaaaatgctaagggcagccagagagaaaggtcgggtta

SEQ ID NO: 77265 - DNA, 120 bp, synthetic construct
  source 1..120: mol_type = other DNA
atacaggagcacccagattcataaagcaagtctgagtgacctacaaagagacttagactcccacacattaataatgggagactttaacaccccactgtcaacattagacagatcaacgag

SEQ ID NO: 77266 - DNA, 120 bp, synthetic construct
  source 1..120: mol_type = other DNA
aagaaaaaaagagagaagaatcaaatagatgcaataaaaaatgataaaggggatatcaccaccaatcccacagaaatacaaagtaccatcagagaatactacaaacacctctacgcaaat

SEQ ID NO: 77267 - DNA, 120 bp, synthetic construct
  source 1..120: mol_type = other DNA
ccctctttgcagatgacatgattatatatctagaaaaccccatcgtctcagcccaaaatctccttaagctgataagcaacttcagcaaagtctcaggatacaaaatcaatgtacaaaaat

SEQ ID NO: 77268 - DNA, 120 bp, synthetic construct
  source 1..120: mol_type = other DNA
aaaaccctagaagaaaacctaggcattaccattcaggacataggcatgggcaaggacttcatgtctaaaacaccaaaagcaatggcaatggcaacaaaagacaaaattgacaaatgggat

SEQ ID NO: 77269 - DNA, 120 bp, synthetic construct; identical to SEQ ID NO: 25917
  source 1..120: mol_type = other DNA

SEQ ID NO: 77270 - DNA, 120 bp, synthetic construct; identical to SEQ ID NO: 25918
  source 1..120: mol_type = other DNA

SEQ ID NO: 77271 - DNA, 120 bp, synthetic construct; identical to SEQ ID NO: 25900
  source 1..120: mol_type = other DNA

SEQ ID NO: 77272 - DNA, 120 bp, synthetic construct
  source 1..120: mol_type = other DNA
acctgttgtttcctgactttttaatgattgccattctaactggtgtgagatgatatctcattgtggttttgatttgcatttctctgatggccaatgatggtgagcattttttcatgtgtt

SEQ ID NO: 77273 - DNA, 120 bp, synthetic construct
  source 1..120: mol_type = other DNA
ttgtatcctcttttatttcattgagcagtggtttgtagttctccttgacgtgatcttgcctgattgctatggctatcacttccagtactatgttgaataggagcggtgagagtaagcatc

SEQ ID NO: 77274 - DNA, 120 bp, synthetic construct
  source 1..120: mol_type = other DNA
cctgtttgttcgctcctgccacagtcagaatagtgcctggaatatgcagtaagggctgaacacacactaaataaatgaacaagtgaataaatggatattgtctcatttttagaatagagt

SEQ ID NO: 77275 - DNA, 120 bp, synthetic construct
  source 1..120: mol_type = other DNA
aagaattgtccagaaagatataaaaaaagaatcacacattgatcttctttaaatgaaaatataacaattttatggactaggatgattacagttgttcagttctcactgttatttgaagaa

SEQ ID NO: 77276 - DNA, 120 bp, synthetic construct
  source 1..120: mol_type = other DNA
tgtttagtttttcttttgtgactggggaggggggtttatcgtactgattcaaggtgtgaaggtaacatcattttgattttctacatcttcttcactccatttaagcatgttacatagcgt

SEQ ID NO: 77277 - DNA, 120 bp, synthetic construct
  source 1..120: mol_type = other DNA
tgtattcccaaagggctgagattacaggcgtgagccaccacgcctggccacatgagatgttttgatggaggcattcagtgtgaaataatcacatttttattcaaagaaacaaacacataa

SEQ ID NO: 77278 - DNA, 120 bp, synthetic construct
  source 1..120: mol_type = other DNA
aaaaaacggcgcaccacaagattatatccctcacctggctcggagggtcctaccccacggaatctcgctgattgctagcacagcagcctgagatcaaactgcaaggcggcagcgaggctg

SEQ ID NO: 77279 - DNA, 120 bp, synthetic construct
  source 1..120: mol_type = other DNA
cgagaagggaagtttagagaaaaaagaataaaaagaaatgagcaaagcctccaagaaatatgggactatgtgaaaagaccaaatctacgtctgattgatgtacctgaaagtgatgcggag

SEQ ID NO: 77280 - DNA, 120 bp, synthetic construct
  source 1..120: mol_type = other DNA
agactcccacacattaataatgggagactttaacaccccactgtcaacattagacagatcaacgagacagaaagtcaacaaggatacccaggaattgaactcagctctgtaccaagcgga

SEQ ID NO: 77281 - DNA, 120 bp, synthetic construct
  source 1..120: mol_type = other DNA
cacagccgaattctaccagaggtacaaggaggaactggtaccattcgttctgaaactattccaatcaatagaaagagagggaaccctccctaactcattttatgaggccagcattattct

SEQ ID NO: 77282 - DNA, 120 bp, synthetic construct
  source 1..120: mol_type = other DNA
tgtgaaggacctcttcaaggagaactacaaaccactgctcaaggaaataaaagaggatacaaacaaatggaagaacattccatgctcatgggtaggaagaaccaatatcgtgaaaatggc

SEQ ID NO: 77283 - DNA, 120 bp, synthetic construct
  source 1..120: mol_type = other DNA
aaaaagtgggcgaaggacatgaacagacacttctcaaaagaagacatttatgcagccaaaaaacacatgaaaaaatgctcaccatcactggccatcagagaaatgcaaatcaaagccact

SEQ ID NO: 77284 - DNA, 120 bp, synthetic construct; identical to SEQ ID NO: 25921
  source 1..120: mol_type = other DNA

SEQ ID NO: 77285 - DNA, 120 bp, synthetic construct
  source 1..120: mol_type = other DNA
gcgccccccagcaggggcacgctgacacctcacactgcagggtactccaacagacctgcagctgagggtcctgtctgttagaaggaaaactaacaaacagaaaggacatccacaccaaaa

SEQ ID NO: 77286 - DNA, 120 bp, synthetic construct
  source 1..120: mol_type = other DNA
atattcaacattcttaaagaaaagaattttcaacccagaatttcatatccagccaaactaagcttcataagtgaaggagtaataaaatactttacagacaagcaaatgctgagagattct

SEQ ID NO: 77287 - DNA, 120 bp, synthetic construct
  source 1..120: mol_type = other DNA
ctctgggacgcattcaaagcagtgtgtagagggaaatttatagcactaaatgcccacaagagaaagcaggaaagatccaaaattgacaccctaacatcacaattaaaagaactagagaag

SEQ ID NO: 77288 - DNA, 120 bp, synthetic construct
  source 1..120: mol_type = other DNA
gacaaacccacagccaatatcatactgaatgggaaaaaactggaagcattccgtttgaaaaccggcacaagacagggatgccctctctcaccacccctattcaacatagtgttggaagtt

SEQ ID NO: 77289 - DNA, 120 bp, synthetic construct
  source 1..120: mol_type = other DNA
ggtactggtaccaaaacagagatacagatcaatggaacaggacagagccctcagaaataacgctgcatatctacaactatctgatctttgacaaacctcagaaaaacaagcaatggggaa

SEQ ID NO: 77290 - DNA, 120 bp, synthetic construct
  source 1..120: mol_type = other DNA
aacaatgaggtcacatggacacaggaagaggaacatcacactctggggactgttgtggggtggggggaggggggagggatagcactgggagatatacctaatgctagatgacgagttagt

SEQ ID NO: 77291 - DNA, 120 bp, synthetic construct
  source 1..120: mol_type = other DNA
gcaataaacagatgtgtgtgtgtgtctttatagcagcatgttttgtaatcctttgggtatatacgcagtaatgggatggctgggtcaaatggtatttctacttctagatccttgaggaat

SEQ ID NO: 77292 - DNA, 120 bp, synthetic construct
  source 1..120: mol_type = other DNA
ctaattaaactaacgagcttctgcacagcaaaagaaactatcatcagagtgaacacgcaacctacagaatgggagaaaatttttgcaatctacgcatctgacaaagggctaatatccaga

SEQ ID NO: 77293 - DNA, 120 bp, synthetic construct
  source 1..120: mol_type = other DNA
catgtacattaggtatatctcctaatgctttccctcccccctcccccaaccccatgacaggcagtggtgtgtgatgttccccttcctatgtccaagtgttctcattgttcaattgccacc

SEQ ID NO: 77294 - DNA, 120 bp, synthetic construct
  source 1..120: mol_type = other DNA
cgtcctggaggcatcatgctacctgacttcaaactatgctacaaggctgcagtaaccaaaacagcatggtactggtactaaaacagagatatagaccaatggaacagaacagagccctca

SEQ ID NO: 77295 - DNA, 120 bp, synthetic construct; identical to SEQ ID NO: 25902
  source 1..120: mol_type = other DNA

SEQ ID NO: 77296 - DNA, 120 bp, synthetic construct; identical to SEQ ID NO: 25903
  source 1..120: mol_type = other DNA

SEQ ID NO: 77297 - DNA, 120 bp, synthetic construct
  source 1..120: mol_type = other DNA
tttctgttcctgggttagttcacttgagataacagcctccagctccaaccatgttgctgcaaagaacatgagcttgttacttttaatggctgcatagtattccatggtgtatatgtacac

SEQ ID NO: 77298 - DNA, 120 bp, synthetic construct
  source 1..120: mol_type = other DNA
atgatggtttccaggttcatccatgtccctacaaaggacatgaattcatcattttttaaggctgcatagtattccatggtgtatatgtgccacattttcttaatccagtctatcattgtt

SEQ ID NO: 77299 - DNA, 120 bp, synthetic construct; identical to SEQ ID NO: 25904
  source 1..120: mol_type = other DNA

SEQ ID NO: 77300 - DNA, 120 bp, synthetic construct; identical to SEQ ID NO: 25905
  source 1..120: mol_type = other DNA

SEQ ID NO: 77301 - DNA, 120 bp, synthetic construct; identical to SEQ ID NO: 25906
  source 1..120: mol_type = other DNA

SEQ ID NO: 77302 - DNA, 120 bp, synthetic construct; identical to SEQ ID NO: 25907
  source 1..120: mol_type = other DNA

SEQ ID NO: 77303 - DNA, 120 bp, synthetic construct
  source 1..120: mol_type = other DNA
ctcctttattcttcggggaaactcttgtctcaatatgtttctttcccccttggcttgagtgaatgctctctgacaatttagaaacagtttaagccaggcgtggtggctcacgcctgtaat

SEQ ID NO: 77304 - DNA, 120 bp, synthetic construct; identical to SEQ ID NO: 18391
  source 1..120: mol_type = other DNA

SEQ ID NO: 77305 - DNA, 120 bp, synthetic construct; identical to SEQ ID NO: 18392
  source 1..120: mol_type = other DNA

SEQ ID NO: 77306 - DNA, 120 bp, synthetic construct
  source 1..120: mol_type = other DNA
tgaaaaaaaaatacatagaaatgtctctaacctaatggagctctgtgcactctgggtcaaattccaagaacacaaccgtagttcgtgtgaaacactagagggcagagttgcacagtaaag

SEQ ID NO: 77307 - DNA, 120 bp, synthetic construct
  source 1..120: mol_type = other DNA
cggcctcccaaactgctgggattataagtgtgagccaccgtgcccagcctctttttaaatttttttttttttttttttttttagagagtcttgctttgtcactcaggctggagtacagtg

SEQ ID NO: 77308 - DNA, 120 bp, synthetic construct; identical to SEQ ID NO: 26993
  source 1..120: mol_type = other DNA

SEQ ID NO: 77309 - DNA, 120 bp, synthetic construct
  source 1..120: mol_type = other DNA
ttgatggggttgtttgtttttttcttgtaaatttgtttgagttcattgtagattctggatattagccctttgtcagatgagtaggttgggaaaattttctcccattctgtaggttacctg

SEQ ID NO: 77310 - DNA, 120 bp, synthetic construct
  source 1..120: mol_type = other DNA
ttgagcagtggtttgtagttctccttgaagaggtccttcacatcccttgtagttggattcctaggtattttattctctttgaagcaattgtgaatgggagttcactcatgatttggctct

SEQ ID NO: 77311 - DNA, 120 bp, synthetic construct
  source 1..120: mol_type = other DNA
agatcctgttattggtctattcagagattcaacttcttcctggttgagtcttgggagggtgtatgtgtcgaggaatttatccatttcttctagattttctagtttatttgcgtagaggtg

SEQ ID NO: 77312 - DNA, 120 bp, synthetic construct
  source 1..120: mol_type = other DNA
tgcatatatatatttaggatagttagctcttcttgttgaattgatccctttaccattaagtaatggccttctttgtctcttttgatctttgttggtttaaagtccgttttatcagagact

SEQ ID NO: 77313 - DNA, 120 bp, synthetic construct
  source 1..120: mol_type = other DNA
ctttcaggtacaccaatcagatgtagatttggtcttttcacacagtcccatatttcttggaggctttgcttctttctttttattcttttttctctaaacttcccttctcgcttcatttca

SEQ ID NO: 77314 - DNA, 120 bp, synthetic construct; identical to SEQ ID NO: 26994
  source 1..120: mol_type = other DNA

SEQ ID NO: 77315 - DNA, 120 bp, synthetic construct; identical to SEQ ID NO: 77309
  source 1..120: mol_type = other DNA

SEQ ID NO: 77316 - DNA, 120 bp, synthetic construct
  source 1..120: mol_type = other DNA
acaatcatgtcgtctgcaaacagggacaatttgacttcctcttttcctaattgaataccctttatttccttctcctgcctaattgccctggccagaactttcaacactatgttgaataga

SEQ ID NO: 77317 - DNA, 120 bp, synthetic construct
  source 1..120: mol_type = other DNA
ttttaatgtgtttgctcttgcatttctagttcttttaattgtgatgttagggtgtcaattttggatctttcctgctttctcttgtgggcatttagtgctataaatttccctctacacact

SEQ ID NO: 77318 - DNA, 120 bp, synthetic construct
  source 1..120: mol_type = other DNA
aggagctcttttagggcaggcctggtggtgacaaaatctctcagcatttgcttgtctgtaaagtattctatttctccttcacttatgaaggttagtttggctggatatgaaattctgggt

SEQ ID NO: 77319 - DNA, 120 bp, synthetic construct; identical to SEQ ID NO: 21994
  source 1..120: mol_type = other DNA

SEQ ID NO: 77320 - DNA, 120 bp, synthetic construct
  source 1..120: mol_type = other DNA
ccagcaacatgtattgtactttttgtagaggtgagatttcaccacgtagcccaggctgatctcaaactcctaggcttaaatgatcctccggcctcagcctcccaaagtgtagggattaca

SEQ ID NO: 77321 - DNA, 120 bp, synthetic construct
  source 1..120: mol_type = other DNA
tgcccacaagagaaagcaggaaagatctaaaattgacaccctaacatcacaattaaaagaactagaaaagcaagagcaaacacattcaaaagacagcagaaggcaagaaataactaaaat

SEQ ID NO: 77322 - DNA, 120 bp, synthetic construct
  source 1..120: mol_type = other DNA
ttgcagacgacatgactgtatatctagaaaaccccattgtctcagcccaaaatcttcttaagctgataagcaacctcatcaaagtctcaggatacaaaatcaatgtacaaaaatcacaag

SEQ ID NO: 77323 - DNA, 120 bp, synthetic construct
  source 1..120: mol_type = other DNA
gtctaaaacaccaaaagcaatggcaacaaaagccagaattgacaaatgggatctaattaaactaaagagcttctgcacagcaaaagaaactaccatcagagtgaacaggcaacctacaaa

SEQ ID NO: 77324 - DNA, 120 bp, synthetic construct; identical to SEQ ID NO: 21995
  source 1..120: mol_type = other DNA

SEQ ID NO: 77325 - DNA, 120 bp, synthetic construct; identical to SEQ ID NO: 21996
  source 1..120: mol_type = other DNA

SEQ ID NO: 77326 - DNA, 120 bp, synthetic construct
  source 1..120: mol_type = other DNA
aaagggctgttgtgagaacttgtgcctgactcacagtggggactcaacaaatgttggtttattactcttatatttaacgcctaaagtctgaatgcgaaaaggttagggcaattccagaag

SEQ ID NO: 77327 - DNA, 120 bp, synthetic construct
  source 1..120: mol_type = other DNA
ttgctagcattctttatttgtgctaggtcatctgcatattgtttaaacatttttcgaggctggaaagactgctcccactcaggcaattctgacgtggcggcccttctaatttatattctc

SEQ ID NO: 77328 - DNA, 120 bp, synthetic construct
  source 1..120: mol_type = other DNA
ccctaggtgttcccgcccctccccctcccgtgtcgctcgctttctgtcagcctctctccctctccctctcccctctccttcctctcgcttcctctctcgcacctgagcgtacgcacctgc

SEQ ID NO: 77329 - DNA, 120 bp, synthetic construct
  source 1..120: mol_type = other DNA
gtgcaaatgcttttctactttaggtatatttatgggggtatgagcgtctttcaaccttatgggttgcgattttggcgattttaaacgaaaatgaattatcaaacgccgtcatggagtgca

SEQ ID NO: 77330 - DNA, 120 bp, synthetic construct
  source 1..120: mol_type = other DNA
aggtagtcggcattttcattttacagatgaggaaactgatggttagtatgattaagtaacttgtccaggataatacaggtagtaaatggcagaggcaagattcagactcatgtctgtcag

SEQ ID NO: 77331 - DNA, 120 bp, synthetic construct
  source 1..120: mol_type = other DNA
ctgtccgcctcaacctcccaaaatgctgggattacgagcgtgagctaccgttcctggccggttctctgtcctttaaaaatatattttaatattctgagcaaagagattaagaatgttaca

SEQ ID NO: 77332 - DNA, 120 bp, synthetic construct
  source 1..120: mol_type = other DNA
aaaaggatagaaagttgtcagaatcagacagctagttcctctctttctagacccacacagtcttctttgtttccagagatgtctgctgcatgtttcttaccacgcattacctttcactgt

SEQ ID NO: 77333 - DNA, 120 bp, synthetic construct
  source 1..120: mol_type = other DNA
acatgggtttttgaactacatgggtccacttacacatggatttttttcttcaataaatatattgaaaaaaattttggagatttgcagcaatttgaaaaaacttgcagatgaactgtgtag

SEQ ID NO: 77334 - DNA, 120 bp, synthetic construct
  source 1..120: mol_type = other DNA
aaactgtgatgttcacagatctgtactttaaataatctcctgagtactcataatacctagtataatgtaatacaaaggctgggtgcggtggctcacgcctgtaatcccagcactttcgga

SEQ ID NO: 77335 - DNA, 120 bp, synthetic construct
  source 1..120: mol_type = other DNA
tacataagggacttgagcatctgtggattttggcacctgtggacttcctgaaaccaatcccccagggttactgagtctatctctttcctggttaagacaagtttttgtttgtcttaaatt

SEQ ID NO: 77336 - DNA, 120 bp, synthetic construct; identical to SEQ ID NO: 26288
  source 1..120: mol_type = other DNA

SEQ ID NO: 77337 - DNA, 120 bp, synthetic construct; identical to SEQ ID NO: 26289
  source 1..120: mol_type = other DNA

SEQ ID NO: 77338 - DNA, 120 bp, synthetic construct; identical to SEQ ID NO: 26290
  source 1..120: mol_type = other DNA

SEQ ID NO: 77339 - DNA, 120 bp, synthetic construct; identical to SEQ ID NO: 10249
  source 1..120: mol_type = other DNA

SEQ ID NO: 77340 - DNA, 120 bp, synthetic construct; identical to SEQ ID NO: 10250
  source 1..120: mol_type = other DNA

SEQ ID NO: 77341 - DNA, 120 bp, synthetic construct
  source 1..120: mol_type = other DNA
gcccggcagccgccccgtctgagaagtgaggagcccctacgcccggcagccaccccgtctgggaagtgaggagcgtctccgcccggcagccaccccgtccgggagggaggtgggggtcag

SEQ ID NO: 77342 - DNA, 120 bp, synthetic construct; identical to SEQ ID NO: 10251
  source 1..120: mol_type = other DNA

SEQ ID NO: 77343 - DNA, 120 bp, synthetic construct
  source 1..120: mol_type = other DNA
gagaccctgtcaaaaagaagaaagaaagaaagagagagagaggaaggaaggaagggagggagggagggagggaaggaaagaagaaagaaagaaagaaagaaagaaagaaagaaagaaaga

SEQ ID NO: 77344 - DNA, 120 bp, synthetic construct
  source 1..120: mol_type = other DNA
gttcaagcgattctcctgcctcagcctcccaagtagctgagattataggcacacgccagtagctgggattacaggtgcacaccaccatggccggctaatttttgtacttttagtagaaac

SEQ ID NO: 77345 - DNA, 120 bp, synthetic construct
  source 1..120: mol_type = other DNA
agcatatttatagtcctttgggtatatacccagtaatgggatggctgggtcaaatggtatttctagttctagatccctgaggaatcgccacactgacttccacaatggttgaactagttt

SEQ ID NO: 77346 - DNA, 120 bp, synthetic construct
  source 1..120: mol_type = other DNA
cttggcgatgtgggctcttttttggttccatatgaactttaaagtagttttttccaattctgtgaagaaagtcattggtagcttgatggggatggcattgactctataaattaccttggg

SEQ ID NO: 77347 - DNA, 120 bp, synthetic construct; identical to SEQ ID NO: 9375
  source 1..120: mol_type = other DNA

SEQ ID NO: 77348 - DNA, 120 bp, synthetic construct; identical to SEQ ID NO: 9376
  source 1..120: mol_type = other DNA

SEQ ID NO: 77349 - DNA, 120 bp, synthetic construct
  source 1..120: mol_type = other DNA
accccactaaacataagaagcttttgtctgtggatcttaactgtgtatattttgtctctaggaagcaaactcagattctctcttacaaccgtctgtgtgccacttgcacacacacaggca

SEQ ID NO: 77350 - DNA, 120 bp, synthetic construct
  source 1..120: mol_type = other DNA
attacaggtgtgaaccactgtgcccccccgccccacaccaccaccactttttttttgaaacaggatcttgttctgtcacccaagctggagtgtagtggcccaaacatggctcactgcagc

SEQ ID NO: 77351 - DNA, 120 bp, synthetic construct; identical to SEQ ID NO: 11988
  source 1..120: mol_type = other DNA

SEQ ID NO: 77352 - DNA, 120 bp, synthetic construct; identical to SEQ ID NO: 11989
  source 1..120: mol_type = other DNA

SEQ ID NO: 77353 - DNA, 120 bp, synthetic construct; identical to SEQ ID NO: 11990
  source 1..120: mol_type = other DNA

SEQ ID NO: 77354 - DNA, 120 bp, synthetic construct
  source 1..120: mol_type = other DNA
ctgcctcagcctcctaaagtgctgggatttaggcatgagctaccttgcctggcctagactctgaacagttttagtgagataccataagtttatccaagtttcttctgtgttgtagcatat

SEQ ID NO: 77355 - DNA, 120 bp, synthetic construct; identical to SEQ ID NO: 19832
  source 1..120: mol_type = other DNA

SEQ ID NO: 77356 - DNA, 120 bp, synthetic construct
  source 1..120: mol_type = other DNA
gcctgatgcacaactcttcttgcagagaggagttctgccttttccttctctatagagtgtgagacagtcttaagtgcttcaatttctgggaggtcccattgtcatattatgttgtaattg

SEQ ID NO: 77357 - DNA, 120 bp, synthetic construct
  source 1..120: mol_type = other DNA
ctgggattacaggtgcctgccaccacgcctggctaatttttttttttttttttttttttttagtatttattgatcattattgggtgtttctcggagagggggatttggcagggtcatagg

SEQ ID NO: 77358 - DNA, 120 bp, synthetic construct
  source 1..120: mol_type = other DNA
caacctccacctcccaggttcaagtgattctcctgtctcagccttcgagtagctgggattacaggcacataccaccatgcctggctaatttttgtctttttttttttttttttttaattg

SEQ ID NO: 77359 - DNA, 120 bp, synthetic construct
  source 1..120: mol_type = other DNA
cagctgggaagaggcgctcctcacttcctagatgggatggcggccgggcagagacactcctcactttccagactgggcagccaggcagaggggctcctcacatcccagacgatgggtggc

SEQ ID NO: 77360 - DNA, 120 bp, synthetic construct
  source 1..120: mol_type = other DNA
cacttgaatctgggaggtgaaggtttcagtgagccaagatcacgtcactgcactccagcctgggtgacagagtgagactgtttaaaaaaagaaaagaaaagaaagtgtagctattacatg

SEQ ID NO: 77361 - DNA, 120 bp, synthetic construct; identical to SEQ ID NO: 28474
  source 1..120: mol_type = other DNA

SEQ ID NO: 77362 - DNA, 120 bp, synthetic construct; identical to SEQ ID NO: 24951
  source 1..120: mol_type = other DNA

SEQ ID NO: 77363 - DNA, 120 bp, synthetic construct
  source 1..120: mol_type = other DNA
gaatagctatacatgtgattgcaatgcaaatcacccatactatttatttatttatttttcaagacagagtctagctctggcacccaggctggagtgcaatggtgcaatctcagctcactg

SEQ ID NO: 77364 - DNA, 120 bp, synthetic construct; identical to SEQ ID NO: 7059
  source 1..120: mol_type = other DNA

SEQ ID NO: 77365 - DNA, 120 bp, synthetic construct
  source 1..120: mol_type = other DNA
tgggtagatagatagctggaaagatggatggatggatggatggatagatagaagaatgtgtaggcagaaggatgggtggatgggtagatgaatatgtggatgggtagatgaatataagga

SEQ ID NO: 77366 - DNA, 120 bp, synthetic construct
  source 1..120: mol_type = other DNA
atgggtagatgagtagaaggatgggttgatagaaggatgggtgggtggaaggatgggtggatgggtggttggatagaaggatggatggatggatggaaggatgggtaggtagaagtataa

SEQ ID NO: 77367 - DNA, 120 bp, synthetic construct; identical to SEQ ID NO: 7552
  source 1..120: mol_type = other DNA

SEQ ID NO: 77368 - DNA, 120 bp, synthetic construct; identical to SEQ ID NO: 7553
  source 1..120: mol_type = other DNA

SEQ ID NO: 77369 - DNA, 120 bp, synthetic construct; identical to SEQ ID NO: 7554
  source 1..120: mol_type = other DNA

SEQ ID NO: 77370 - DNA, 120 bp, synthetic construct
  source 1..120: mol_type = other DNA
gcactccagcctgggcgacagagcgagactctctctctctcaaaaaaaaaaaaaaaaaaaaaagatttacccttgggtagatagccagtagtgggattgctagatcaaatggtagttcta

SEQ ID NO: 77371 - DNA, 120 bp, synthetic construct
  source 1..120: mol_type = other DNA
gcaggttagttacatatgtatacatgtgccatgctggtgtgctgcaccaattaactcatcatttagcattaggtatatctcctaatgctatccctcccccctccccccaccccacaacag

SEQ ID NO: 77372 - DNA, 120 bp, synthetic construct
  source 1..120: mol_type = other DNA
ctaacatcacaattaaaagaactagaaaagcaagagcaacacattcaaaagctagcagaaggcaagaaataactaaaatcagagcagaactgacggaaatagagacacaaaaaacccttc

SEQ ID NO: 77373 - DNA, 120 bp, synthetic construct
  source 1..120: mol_type = other DNA
gaagcattccctttgaaaactgccacaagacagggatgccctctctgaccactcctattcaacatagttttggaagttctggccagggcaatgaggcaggagaaggaaataaagggtatt

SEQ ID NO: 77374 - DNA, 120 bp, synthetic construct
  source 1..120: mol_type = other DNA
caagatggattaaagacttaaacgttagacctaaaaccataaaaaccctagaagaaaacctaggcattaccattcaggacataggcttgggcaaggacttcatgtctaaagcaccaaaag

SEQ ID NO: 77375 - DNA, 120 bp, synthetic construct
  source 1..120: mol_type = other DNA
tttcttttattttttatttttttttatttttttgagacagagtttcgctcttgttgcccaggatggagtgcaatggtgctatctcagctcactgcaacctccgcctcctgggttcaagcg

SEQ ID NO: 77376 - DNA, 120 bp, synthetic construct; identical to SEQ ID NO: 19630
  source 1..120: mol_type = other DNA

SEQ ID NO: 77377 - DNA, 120 bp, synthetic construct; identical to SEQ ID NO: 26630
  source 1..120: mol_type = other DNA

SEQ ID NO: 77378 - DNA, 120 bp, synthetic construct
  source 1..120: mol_type = other DNA
cccgccattgcccaggcttgcttaggtaaacaaagcagaggggaagctcgaactgggtggagcccaccacagctcaaggaggcctgcctgcctctgtaggctccacctctgggggcaggg

SEQ ID NO: 77379 - DNA, 120 bp, synthetic construct
  source 1..120: mol_type = other DNA
aaggtcgggttaccctcaaagggaagcccatcagactaacagcggatctctgggcagaaaccctacaagccagaagagagtgggggccaatattcaacattcttaaagaaaagaattttc

SEQ ID NO: 77380 - DNA, 120 bp, synthetic construct
  source 1..120: mol_type = other DNA
agctctgcaccaagcggacctaatagacatctacagaactctccaccccaaatcaacagaatatacatttttttcagcaccacaccacacccacacctattccaaaattgaccacatagt

SEQ ID NO: 77381 - DNA, 120 bp, synthetic construct
  source 1..120: mol_type = other DNA
aagccaggcagagacacaaccaaaaaagagaattttagaccaatatccctgatgaacactgacgcaaaaatcctgaataaaatactggcaaaccgaatccagcagcacatcaaaaagctt

SEQ ID NO: 77382 - DNA, 120 bp, synthetic construct
  source 1..120: mol_type = other DNA
tttaaaactttttttagattgcaaactctaataataagttcaggctggatgcagttgcttactcctataatgccagcacttggagaggccaagacagggggattgcttgaggtctggagt

SEQ ID NO: 77383 - DNA, 120 bp, synthetic construct; identical to SEQ ID NO: 26632
  source 1..120: mol_type = other DNA

SEQ ID NO: 77384 - DNA, 120 bp, synthetic construct; identical to SEQ ID NO: 26633
  source 1..120: mol_type = other DNA

SEQ ID NO: 77385 - DNA, 120 bp, synthetic construct
  source 1..120: mol_type = other DNA
tctcctccccaccgcccaccccaccatccctggtccaggtaaaactaaagcattattggaggaaaggacattctacagaaatgtaaataaacttatttctaaggagagaattattgatgt

SEQ ID NO: 77386 - DNA, 120 bp, synthetic construct; identical to SEQ ID NO: 31673
  source 1..120: mol_type = other DNA

SEQ ID NO: 77387 - DNA, 120 bp, synthetic construct
  source 1..120: mol_type = other DNA
gaaagaaaaagaaagaaagaaagaagaaaggaagaaaggaaaggaaggaaggaaggaagggagagagaggaaggaaggaaagaaagaaagaaaagaaaagagggaaagaagaggaggagg

SEQ ID NO: 77388 - DNA, 120 bp, synthetic construct
  source 1..120: mol_type = other DNA
ggagggttaacttcatctttgttccctggggaaggaaaggaggaaaaatatcagcttactagtatagtctttcccttaactgctaaaccaaatctctgcattaacccaatgctctgacct

SEQ ID NO: 77389 - DNA, 120 bp, synthetic construct
  source 1..120: mol_type = other DNA
aaaagtctgacactttaatacaggaagtaaccttcactgttagctgaagtgcatggttagctgttagcagtaaatctagatggcagggcttgtttgtgtgtctgaggtcatgatgctgat

SEQ ID NO: 77390 - DNA, 120 bp, synthetic construct
  source 1..120: mol_type = other DNA
cacaaataagttcacctttcctcgattgctttattgcttacatgccaggtgcttattttttgactagagaggcccctggctttagtgagtttagaaagtccccaggaaccagcaatggac

SEQ ID NO: 77391 - DNA, 120 bp, synthetic construct
  source 1..120: mol_type = other DNA
ggtaaaaataggaagagctctaccttttctttcttaacttcctacacagaaaagatttttggatagaggtgagttgagaatgaaggaccggtgagggtattagtcagcttgggctgccat

SEQ ID NO: 77392 - DNA, 120 bp, synthetic construct
  source 1..120: mol_type = other DNA
ctgagtggactttcctgaaagagaaactgagtctggccttctcttgtttacaatttgccttcacctctgctctgaatgctcttggaggtctctagcccttctgtggtttgttgtcttttc

SEQ ID NO: 77393 - DNA, 120 bp, synthetic construct
  source 1..120: mol_type = other DNA
tcgcacattcctcctttttcacacaaactttcctgatcattcctttcttcatgagatatcccctcccttttgagcctcagtagtatgtttttcccttgcaaaacctacccattctttcct

SEQ ID NO: 77394 - DNA, 120 bp, synthetic construct
  source 1..120: mol_type = other DNA
ttttccgttagcccaaagtcactgcctttaggagacaatcgcactctaaatgtcagctggcatggttttcagatgctttagagacattcagacaagagcttcttttctctggtttagttg

SEQ ID NO: 77395 - DNA, 120 bp, synthetic construct
  source 1..120: mol_type = other DNA
tgagcggcaggcaaagggtgaatgtgaacaggaagtctccagtctttctgccctgcttaacacagagcagcatctctatttttaatctgctttttatttgggttccacatttgattattt

SEQ ID NO: 77396 - DNA, 120 bp, synthetic construct
  source 1..120: mol_type = other DNA
ttttgcagataatgaaatgggcatagtaaaattaagtcatttgctcaaaggcacatagcgagtaagatgaggagctgggattcaaacttaagctgcatccctggcagtgtcttcagtagc

SEQ ID NO: 77397 - DNA, 120 bp, synthetic construct
  source 1..120: mol_type = other DNA
ctctagcctgggtgacagagcgagaccctgtctcaaaaaaataaacggtagaaaccaaattttattatcatccccccagtgtctaatacagtgcttggcacaagtagatactatcaaata

SEQ ID NO: 77398 - DNA, 120 bp, synthetic construct
  source 1..120: mol_type = other DNA
aaatctttgctcttctcatgacctccggcaacttcctgaaactcctccactttagaaaactaatgtaagctggtgggtagaacaagactttgaacttccaagagaaggattctggtttct

SEQ ID NO: 77399 - DNA, 120 bp, synthetic construct
  source 1..120: mol_type = other DNA
tgcaagcctggctgcttccagcactggaaggagagttggacacagtttctgcagtaacaggaatttaattgtcaaagaaaggcccacgtggttttttttttttttttttttgagacagag

SEQ ID NO: 77400 - DNA, 120 bp, synthetic construct
  source 1..120: mol_type = other DNA
gcttgaacctaggaggcggaggttgcagtgagtcgagattgcgcctttgcactccagtccgggcaacagagtgacactccatctcaaaaaaataaataaataaaatacataaatttaaaa

SEQ ID NO: 77401 - DNA, 120 bp, synthetic construct
  source 1..120: mol_type = other DNA
taaggcaggagaattgcttgaatctgggaggtggacgttgcgacgagccaagatcatgccactctactccagcctggaggacagagtgagactctgtcttaaaaaaaaaaaaaaaaaaag

SEQ ID NO: 77402 - DNA, 120 bp, synthetic construct
  source 1..120: mol_type = other DNA
aacatttcttagacttcccaataatgtattttgctttgtgcctaggaggtggttacttctaggtgcagaaaacacttgttatgaacaaagcctactggctctgacccataaggaaataga

SEQ ID NO: 77403 - DNA, 120 bp, synthetic construct
  source 1..120: mol_type = other DNA
ggagccaccacacccggctaatttttgtatttttagtagagattgggttttaccatgttggccaagttggtctcgaactcctgacctcaggtgatccacctgcctcagcctcccaaagtg

SEQ ID NO: 77404 - DNA, 120 bp, synthetic construct
  source 1..120: mol_type = other DNA
ctgctaaatatcctctacaggacggtccctgcaccaaagaattactgagccccagtgtcaacagttgagaaactctgctctaaagtagccaacttttttttcctttgaggcagtcttgct

SEQ ID NO: 77405 - DNA, 120 bp, synthetic construct
  source 1..120: mol_type = other DNA
gtctagggattacaggcacgagccaccacacccagccaaatacttaaaaaaaaaaaaagtagtcatttttacaactctcatgtgaattccctttgaggtggaaaatggaggctagagcca

SEQ ID NO: 77406 - DNA, 120 bp, synthetic construct
  source 1..120: mol_type = other DNA
ggctgagaggcaatcgctgatatccctgctttgaacttgaccctcttacaagatttacatactctttaatgatggaatgataaaagtggtggtgtccagcagaactttctgtgataatga

SEQ ID NO: 77407 - DNA, 120 bp, synthetic construct
  source 1..120: mol_type = other DNA
tggaattaggtgtggcttgggtgttgggatttttttaaaacaccccccaagtaattttagttgtgcagcaaggactagtgatggctcaagctttgcatgtatctgaatcacctgagaatt

SEQ ID NO: 77408 - DNA, 120 bp, synthetic construct
  source 1..120: mol_type = other DNA
cattcagatcctaactaattcgaggctttagggtcagtagtgttgcgttcggcacgattctatcttaggagctgggaaagggagtggataaccaggtgactctttttctttcttttaaaa

SEQ ID NO: 77409 - DNA, 120 bp, synthetic construct
  source 1..120: mol_type = other DNA
tgagctgtggagaaacagcttgataaccagggctttcctggggcaccctttctggtgcacttcggaagaccccggactgatgatagggctctcttgatttcacctaaagcaagactgtaa

SEQ ID NO: 77410 - DNA, 120 bp, synthetic construct
  source 1..120: mol_type = other DNA
ccttgtgttccctgcttcatgaccaacaagcgcttaagtacgaaactcagaggagggcagacagaaatgatgatagctggagagagaattaagccctttggggagaggttatattcaaca

SEQ ID NO: 77411 - DNA, 120 bp, synthetic construct
  source 1..120: mol_type = other DNA
agagccttgtgggccgggagagtgcagtgcaataaaatcgcattaactgattggtgccagttagctcgaaattattattttcttccataagtgtctgatgtaccaagcaagttgcttcct

SEQ ID NO: 77412 - DNA, 120 bp, synthetic construct
  source 1..120: mol_type = other DNA
gcactgtagccatattcttccctgacctttgctctttgggtgatgctctgccattcgtgcccgtgctttctatttacataaaggattaaagatatgaatgatagagaaaagctagcagat

SEQ ID NO: 77413 - DNA, 120 bp, synthetic construct
  source 1..120: mol_type = other DNA
tgagaggcaaactgtattataggtcgcctcctacctcacaagtcacaataggattcaagagcaaatgcatctgagcctctttaagaggcctacaattgcaaggaaattagacagatcttc

SEQ ID NO: 77414 - DNA, 120 bp, synthetic construct
  source 1..120: mol_type = other DNA
tttgagcagaattcaaaccaatgatttttgtcttccctgtgccgggtatttgaaaaaaccatagaggggaaggaaaggcagtctgtgtgtgtataccatgacagagggagaagctgaaat

SEQ ID NO: 77415 - DNA, 120 bp, synthetic construct
  source 1..120: mol_type = other DNA
ggtctttgaaagaagagctgaatccacttttgacatgaattgatatggctgttatttcctctgatgtagattggaccatgtggaggtagggagaatagaatgtcatgttctttcactgaa

SEQ ID NO: 77416 - DNA, 120 bp, synthetic construct
  source 1..120: mol_type = other DNA
tttctgagaagaatcatgtggtaataatataaaaacatgtatacgaaagataaacaccaaatttagcatagtgattcccgctgaggggagagcaaaggaaatgagataagtctgcatagg

SEQ ID NO: 77417 - DNA, 120 bp, synthetic construct
  source 1..120: mol_type = other DNA
gctacacagcaggcatcccgaagcttcctttcagcatgaaattcacttcatttctctccttcgttgaagtccctgtcctcctttttcttggttttcttattttcatgaagtattgtactc

SEQ ID NO: 77418 - DNA, 120 bp, synthetic construct
  source 1..120: mol_type = other DNA
aactgcatgctgttctctgttccaagtttcaaactccaccaaaatctgcctgccctttttcagtcagctgaaccctcaggaagctgtttttttgtattttgttcagtgtacagctgtcat

SEQ ID NO: 77419 - DNA, 120 bp, synthetic construct
  source 1..120: mol_type = other DNA
ggtgtgagccacgatggccagcctgccatttctaattagctttgtgcttggacaagttattccactgctctgtgtcatagtttccttatatgtcaagtggtgggatactgaatttaatta

SEQ ID NO: 77420 - DNA, 120 bp, synthetic construct
  source 1..120: mol_type = other DNA
tatttctttgataatttcttctcttgtgttttctgtgtttgctcttttttttttttcctttgagacggagtcttgctgttgttacccgggctggagtgcaatggcgtgatctcggctcac

SEQ ID NO: 77421 - DNA, 120 bp, synthetic construct
  source 1..120: mol_type = other DNA
tggccagccttttaaaaatatgacatcccattagtacatttgattgtctgacttttaagaatactttgaggctgggcgtggtggctcacgcctgtaatcctaacactttgggaggctgag

SEQ ID NO: 77422 - DNA, 120 bp, synthetic construct
  source 1..120: mol_type = other DNA
agaggaatcttctaaattcctgcttggggtatgaaactggcagccttgtgtgaaatacacagaggaatggggctgggggtattgtgttgagattactgactctcacgtaatcacatttgg

SEQ ID NO: 77423 - DNA, 120 bp, synthetic construct
  source 1..120: mol_type = other DNA
ggattgcctgagtccaggaggttgaggctgcagtgagccatgatctgcagtcaacctaggtaacagagttaagaccctgtttcaaaaataaaagatcactagaatcaacaatcactcttt

SEQ ID NO: 77424 - DNA, 120 bp, synthetic construct
  source 1..120: mol_type = other DNA
cttcctgcttagagctttttacatagtgtgtagactacatagactgtgtgctgcagacatctggtgtgagcagagtaccttccttatacttcagtttcgtagaattagaggttatcgtgt

SEQ ID NO: 77425 - DNA, 120 bp, synthetic construct
  source 1..120: mol_type = other DNA
cagttttgtgggagataatttttccgtggacctggggttgggggtgggacggggggtgatggcttcaggatgattcaagtacattacatttattgtgtactttatttctattattacact

SEQ ID NO: 77426 - DNA, 120 bp, synthetic construct
  source 1..120: mol_type = other DNA
gggaaatggaaatgtcatatctgctcagccagttggttctgctcattctgagggaccaaacccatgactatcttgatctttgtagtagagtgtgtttagaaaacttgtagataagcaagg

SEQ ID NO: 77427 - DNA, 120 bp, synthetic construct
  source 1..120: mol_type = other DNA
aaggaaagaaaaccagagcaccaaaactagagtgccaagaagccacaagatgggaaaccctccatcccacagattgactcctggagattctgtcgggctggattttgtctcttttagcct

SEQ ID NO: 77428 - DNA, 120 bp, synthetic construct
  source 1..120: mol_type = other DNA
cgccgtgtctgactggctgcagagttgtcactattagaaatgttttattttacattcattgaataagcctaaatgggagtttgttccacctgcaccattggagtagagaaatccacgttc

SEQ ID NO: 77429 - DNA, 120 bp, synthetic construct
  source 1..120: mol_type = other DNA
cactgtcagcaagtgcactgactttggagcctgcacagtctctgccttgaccaccagtagggaagtcaggaattccccaagtcaaacattttttattttagtattatttttttttgagac

SEQ ID NO: 77430 - DNA, 120 bp, synthetic construct
  source 1..120: mol_type = other DNA
aatactgactttgggagtcaaaaggggatgcagtgtagaaagatagtcacaatatattgtgatcatatcaaagcaatatgtgtggaatcccatttttagtgaagagttgactacaaaaaa

SEQ ID NO: 77431 - DNA, 120 bp, synthetic construct
  source 1..120: mol_type = other DNA
acttaccctttgaacacagcaagtgcactgtcaggaatttacctgcagggatattagcaaaggatgtatattgaagtggagtttcaatagcagcctaagtgcctatcaaaaggttaaggg

SEQ ID NO: 77432 - DNA, 120 bp, synthetic construct
  source 1..120: mol_type = other DNA
ccttctatgtgtaaatgacagtatttgagtagaagaaggaattactattagtaccttaaaatgctggacatggtggttcatgaccataatcccagcactttgggaggccaaagcaggagg

SEQ ID NO: 77433 - DNA, 120 bp, synthetic construct
  source 1..120: mol_type = other DNA
tgctttcatcttgttgtgattatgtgtgctggtgtccaaattcaggatatctggaagctccttgtagagcttttgaactttgagcttctatgctttaataatataggaagtcactgaaac

SEQ ID NO: 77434 - DNA, 120 bp, synthetic construct
  source 1..120: mol_type = other DNA
cactgcactccagcctgggcgacagagcaagatagcatctcaacaacaacaacaaaaaggtgctaatgctggaggtggtatagcaaaattttaaattttgctggtagctatataaagtct

SEQ ID NO: 77435 - DNA, 120 bp, synthetic construct
  source 1..120: mol_type = other DNA
ggcggaggttgcagtgagccgagatcgtgccattgccctccaacctgggcaacagagtgagactctgtctcaaaaaagaaaaaaaaaaaggaaatattcaacagtttaatattttgcttc

SEQ ID NO: 77436 - DNA, 120 bp, synthetic construct
  source 1..120: mol_type = other DNA
gaattctttgaccatagtgattggacttcagagtgaagaagtccagttgcttgtcagtaccttagtagtattaccagaatacccagtttttgctagggtatcatatgatgcaggagggca

SEQ ID NO: 77437 - DNA, 120 bp, synthetic construct
  source 1..120: mol_type = other DNA
gctgcccgtcttgtcccccagcctgcatgcaaccccctcccccagacagggaaacagattgctgggtagataactcttcttttttttaaaaaaaacaaaaaaaaactgatctaaatagaa

SEQ ID NO: 77438 - DNA, 120 bp, synthetic construct
  source 1..120: mol_type = other DNA
tgtgattgcaccagtggtctctgaattggtgtggctacatttgtagatgtgtgcggagcagaggagcgcctgctcagagctgcctgtccttacaggtcgcgtgatttctaccacacctgc

SEQ ID NO: 77439 - DNA, 120 bp, synthetic construct
  source 1..120: mol_type = other DNA
aaaaattttttttttaatttttaatttttttttgtgagacaaagtctcactctgtcacccaggctggagtacagtggcatgatattggctcactgcaacctccacctcccaggttcaagc

SEQ ID NO: 77440 - DNA, 120 bp, synthetic construct
  source 1..120: mol_type = other DNA
gctgggttgaaggggacacatattgtcatctttgatagatacctctgtaactgctccccagtgtggttgtgtaagatgaatcgatccatagtcagaccttttcctttttgccaatttgat

SEQ ID NO: 77441 - DNA, 120 bp, synthetic construct
  source 1..120: mol_type = other DNA
gtttgctccagtctgggagatagagtgagaccctgcccccagcaccccttccccacaaaaatattttaatattttaattttgaagtggtcaaatctatttgtcttttctgtcattcaggg

SEQ ID NO: 77442 - DNA, 120 bp, synthetic construct
  source 1..120: mol_type = other DNA
tttgtctaagttagtttccattttatttttcttgccttgtattgttgggtaagatccccacatagtgctgactaaaggtagtagagggcattcgtctcttgctcctgattataatgggaa

SEQ ID NO: 77443 - DNA, 120 bp, synthetic construct
  source 1..120: mol_type = other DNA
tatgtttcagcatgaggttgctcctagtattctctcaaaatttttaaaatctctcctgcagttgtgtccccttcttcattatcccacagtgggagaatcctgaatattggcctaggatta

SEQ ID NO: 77444 - DNA, 120 bp, synthetic construct
  source 1..120: mol_type = other DNA
tggtatgggtacaatttttgctatttatatacatcacaggtacaaatacactttttaaaaagtttgagaccaggtgtggtggctcacacctgtaaccccagcactttgggaggccgaggc

SEQ ID NO: 77445 - DNA, 120 bp, synthetic construct
  source 1..120: mol_type = other DNA
ctctgattccttatactaaattcttagaagtgcctttcatggagcaaaggatgtgttatgttttcaaggaccaccggggtgattaactggcaccttttcttctctttgcagcagcccact

SEQ ID NO: 77446 - DNA, 120 bp, synthetic construct
  source 1..120: mol_type = other DNA
tggtgacttagacctaggaaaccaattatgagtggaaagtgaccctctagttcaactgtgccagaggaaacagccctccagtgcccacctgcctcactcctccctatcatgtaccgtgaa

SEQ ID NO: 77447 - DNA, 120 bp, synthetic construct
  source 1..120: mol_type = other DNA
accctcttggaggggagagaagatggtgtccttagagggcacccaaatccatgtaaataagccaaatgcacatccaggaatgtaattcctgccccctgtgctatttttgccctgttaaca

SEQ ID NO: 77448 - DNA, 120 bp, synthetic construct
  source 1..120: mol_type = other DNA
gaacctcatggataatcaggggaaacacccctgagataataataccagtaaacaatagttccacactgctctcccttcttggtattattgagcattcttccatacctttcatgactggga

SEQ ID NO: 77449 - DNA, 120 bp, synthetic construct
  source 1..120: mol_type = other DNA
tcattagaagcacgtagtttttgggaacggggaaggaacaaagctccaaatgcaaattaggattgttgccaaaggggtaaatggatgctagagaggcaaatggccattgctctcaaacag

SEQ ID NO: 77450 - DNA, 120 bp, synthetic construct
  source 1..120: mol_type = other DNA
tgatgtggcgtgactatatacaaaactctaccaccaattagccccaagaccaaggctttacctgctgcttaaaaagtgctgaccactcttgcctcatctgcccaaacaataacccctaag

SEQ ID NO: 77451 - DNA, 120 bp, synthetic construct
  source 1..120: mol_type = other DNA
agcgcttacaaaataacaataagaaaaatgcatggccgggtgtggtggctcacgcctgtaatcccaacactttgggaggccaagacaggcagatcacctaaggttgggagttcatgacca

SEQ ID NO: 77452 - DNA, 120 bp, synthetic construct
  source 1..120: mol_type = other DNA
tactaaagaaagtccataccttatttgaattcccctagtttttacctaatggcctttttctgtcccaagatcccacccaggacactacattacactgagctgtcatgtctcatgtctcct

SEQ ID NO: 77453 - DNA, 120 bp, synthetic construct
  source 1..120: mol_type = other DNA
ggatcacttgaggtcaggagttcgagaccagcctggccaacatgatgaaaccccatagcaactaaaaacacaaaaattagcctggtgtggtggcatacacctgtaatctcagctactcga

SEQ ID NO: 77454 - DNA, 120 bp, synthetic construct
  source 1..120: mol_type = other DNA
ctgcccctcccatagtgccaaaccgctctcactgagggcccatctcctgaactcctctggcattcagagcccagacgtgcatttgtgctaaatgcctaacctcatctctaagcttcttca

SEQ ID NO: 77455 - DNA, 120 bp, synthetic construct
  source 1..120: mol_type = other DNA
ctttaatttactggaaaaaattaatagcagagaccgtgctacataattttgcccagagcaggctgtgggtatacaagagccccaccctgcaaaggacagcaaaggaaaacaatcctaaat

SEQ ID NO: 77456 - DNA, 120 bp, synthetic construct
  source 1..120: mol_type = other DNA
ctgatattacaggtgtgagcctctgcgcccagcttcattccacattttaacaaaactaaaaaatggctgcactacccaggacatctgatggcagacacatctaagatttgacagtattta

SEQ ID NO: 77457 - DNA, 120 bp, synthetic construct
  source 1..120: mol_type = other DNA
agctttcttccttctcaagtttaaaaactgggtagctcagccagccccctagagcattggaggcatgctgggagcacgtagactcatcaaggcagctctaagggttgaactatttaacaa

SEQ ID NO: 77458 - DNA, 120 bp, synthetic construct
  source 1..120: mol_type = other DNA
gtctgctttcagaggccaagcataaaacacacatgatactatcagaaacagaattctgcttacttcagtcccagttcagggctctggctcctattgtctactcagtcttgttttttaaac

SEQ ID NO: 77459 - DNA, 120 bp, synthetic construct
  source 1..120: mol_type = other DNA
ccatctgccccagctcccattaaacaaaaaaagatattacggatttgacatacaattgataggagccacagtgctctccaccactctaaagatggtgacaaatccaagaactgatttgac

SEQ ID NO: 77460 - DNA, 120 bp, synthetic construct
  source 1..120: mol_type = other DNA
caaacacgaactgagactacagagtatacactagaaatcagcaaatgccaggaacggagtaggaaaaagacaaagaaatgaggcctaaacacacaaaacccttcactggcatctgctgac

SEQ ID NO: 77461 - DNA, 120 bp, synthetic construct
  source 1..120: mol_type = other DNA
aaaaaaaagggagaaagagaaaaataaagagtctcttaaatggttctgagggctctaccaacgaactgaaaggaggatgagacgatggagacagacagtttttattgctggcctgccccg

SEQ ID NO: 77462 - DNA, 120 bp, synthetic construct
  source 1..120: mol_type = other DNA
acaccacccactgcccatcccttggttcagctcagcttgagcctggaaggtcaacccatttaatttattttattttattttatttgaggttttctaacccaggtggttacttgcatttcc

SEQ ID NO: 77463 - DNA, 120 bp, synthetic construct
  source 1..120: mol_type = other DNA
tatttatttatttatttttttatttttttgagacagagtttcgctcttgttgcccaagctggagtgcaacagcgtgatcttggctgacagcaacctccgcctcctgggttcaagtgattc

SEQ ID NO: 77464 - DNA, 120 bp, synthetic construct
  source 1..120: mol_type = other DNA
acttaaatgaaagctttaggtcactaattctgctagggcctggcttgagacaggaatgggtacaatgtgtttcatcaagacccaagattccagccaaactctgaaaccactgttaactat

SEQ ID NO: 77465 - DNA, 120 bp, synthetic construct
  source 1..120: mol_type = other DNA
aatagcacagtcaagatgggatggggaaaaagtgagatgcgtttctttagttgagtcagtcagcttatgcagaaggaatgagagttcctagcctagcaatggatacttcagacactgttt

SEQ ID NO: 77466 - DNA, 120 bp, synthetic construct
  source 1..120: mol_type = other DNA
aaatacagaaataccccaaatttgcatgtgcatgtagtccaggaaagaaaaagcaaaaggctgaagctaaaaatgctagactcacctgcaatcctcccctcccatctttccactccatac

SEQ ID NO: 77467 - DNA, 120 bp, synthetic construct
  source 1..120: mol_type = other DNA
ctatggaactaatttaaaaagatcaatagaattgcagggacactgttgtcatggaggggaaagttggaggaggaaaaggactacgaaagtcacctgatttgcctacaaggacgtcaaatg

SEQ ID NO: 77468 - DNA, 120 bp, synthetic construct
  source 1..120: mol_type = other DNA
cacaaaaggcctcagacccaaaagacttggattctaaatagaaccgtttaaggccccaaatgactcctgaagttgttagcactgatgcttcagacgaagtccaaggttattaaatctcat

SEQ ID NO: 77469 - DNA, 120 bp, synthetic construct
  source 1..120: mol_type = other DNA
cacaggaccattttgctgattaccagggtaaggcagagctatcagccctcaagcagcttaattaaagccaggagtaagacatttgtgtaaggggtcaaaacaatcattttttaaatcttg

SEQ ID NO: 77470 - DNA, 120 bp, synthetic construct
  source 1..120: mol_type = other DNA
ggcagggggggtacggagagtctatttttggattatactatctgatctgatagtcactagccacatgtggctaataaacacttgaaatgtgagtactctgaattgagatgtgctgttaag

SEQ ID NO: 77471 - DNA, 120 bp, synthetic construct
  source 1..120: mol_type = other DNA
caaatctcatcttgaatttaactcccacaattcccatgtgtcgggggaggaacctagtgagcagtaattgaatcatgggggttggtctttcccatgttgttcttgtgatagggaataaat

SEQ ID NO: 77472 - DNA, 120 bp, synthetic construct
  source 1..120: mol_type = other DNA
gagctcaggttgcggcttcagagggtgccagccccaagccttggcagcttcctcatggtattgagcctgggagtgaacagaagtcaagaattggggtttgggaacctctgcctagatttc

SEQ ID NO: 77473 - DNA, 120 bp, synthetic construct
  source 1..120: mol_type = other DNA
tgtaattcccatgtgttgtggcaggaactcggtgggaggtaattgaatcacggggacaggtctttcccatgctgttctcgtgatagtgaataagtcttgcaagatctgatggttttaaaa

SEQ ID NO: 77474 - DNA, 120 bp, synthetic construct
  source 1..120: mol_type = other DNA
cctactatgtgcaggcactgagggaagaaatataaccaaaaggagacattctccctgccttcacggtacttattgtagtgtagtgccagcagacagtcatttaataatcacacaaatata

SEQ ID NO: 77475 - DNA, 120 bp, synthetic construct
  source 1..120: mol_type = other DNA
tggctatcaggtcttgctccccaacataagtatggtgagcttagtgccagtgaaccattgtgtaacactccctagtacccaagcaaggacacttaaataatactttctataaaagtagca

SEQ ID NO: 77476 - DNA, 120 bp, synthetic construct
  source 1..120: mol_type = other DNA
tcaattattactgatttttttcctcaagaaaaaggtaattcttattttttatttttttgagacagggtctcactctgtcatccaggctggagcggtgccatcacagctcactgcagcctg

SEQ ID NO: 77477 - DNA, 120 bp, synthetic construct
  source 1..120: mol_type = other DNA
ttataacacaggataggaggattctgaaattagaatggtatctagtaaattctcaaattggggttttgttgactggctctagaatctggttcccctggaccactcctctctcctagtcct

SEQ ID NO: 77478 - DNA, 120 bp, synthetic construct
  source 1..120: mol_type = other DNA
tgtcaacaggtcaaagaagcctaagagataatctttggcatgtgtttactttgactaaaggggtgagtctgtctctagtcataaagatttccgtggtacttagtgttgtacccaggaagg

SEQ ID NO: 77479 - DNA, 120 bp, synthetic construct
  source 1..120: mol_type = other DNA
aagtgctcatttacaataaagtattaactttgaaccataggaaaggaattctcatggaggtctagggtattaatgacctctggaatctttactgttatcccaaacgaactcttggccact

SEQ ID NO: 77480 - DNA, 120 bp, synthetic construct
  source 1..120: mol_type = other DNA
tgtccaggggaagaaagagttaagtcactggtgcttctttaatgtgaaaccatcaccatgagtcccaagcccactaaaaggcactagtttaagaccttctcaccaaatcatacaacagaa

SEQ ID NO: 77481 - DNA, 120 bp, synthetic construct
  source 1..120: mol_type = other DNA
acatgtggttcccatgacaaccatggttctccatagcatatctctctttttggggcagatgcctggagcacttctaaagttgtcctaatcttgttaagtctggattcactgtaaaatgaa

SEQ ID NO: 77482 - DNA, 120 bp, synthetic construct
  source 1..120: mol_type = other DNA
caatttaactagcagaagagtggaatcttacaccaatccctgctgccatgtccatccctgagctactagtggagtcaattttaaatctctcagagacaatggcaaggatgtatttttctc

SEQ ID NO: 77483 - DNA, 120 bp, synthetic construct
  source 1..120: mol_type = other DNA
tgctcaacagaaactcccgcaccaaatcacttccagctttgacatctctgccaaagtttttattcagcctctcagttatatttctacccaactttccacactggtagacagaataaaaat

SEQ ID NO: 77484 - DNA, 120 bp, synthetic construct
  source 1..120: mol_type = other DNA
ataatccaaacagggcctcatactatagccatttcagagaaggatgccttggtcaggaaattttaattaaaaaccaagctgaattctttgaccaactatttcaccgttactggcatcttg

SEQ ID NO: 77485 - DNA, 120 bp, synthetic construct
  source 1..120: mol_type = other DNA
ttagcctaacttcctaactctcttctcagtatcttacatttctcatgtagtaaggcctatatattgtagtgacattataaaacatacatgaatgtttttatattaggatccacagaaccc

SEQ ID NO: 77486 - DNA, 120 bp, synthetic construct
  source 1..120: mol_type = other DNA
agctctcaataaataagttttcttaatgcctatctgcttagacaacctgcacaatctttgcttgctctaatgaagagcaggtataactgagatggcttgcctttaccctgtggttatcaa

SEQ ID NO: 77487 - DNA, 120 bp, synthetic construct
  source 1..120: mol_type = other DNA
aatccacagaaccatctactgagaacattaatatcaaaaccctaagaaattattgataacactctatggtctcatccatcacctttcagcaaagctgtctctgcaatgccacttttcttc

SEQ ID NO: 77488 - DNA, 120 bp, synthetic construct
  source 1..120: mol_type = other DNA
tagcagggtagaggggtcccgagcgccgcccctccttccgggatccgacctgggccagaggggtcccgagcactgtctcctccctgcagacccagctcgggcatctaggcacccccaacc

SEQ ID NO: 77489 - DNA, 120 bp, synthetic construct
  source 1..120: mol_type = other DNA
cctgggtgacagagcaagactctcaaaaataaataaataaataaaagagaatgggatgcccataatgggttcaggcgtacttaaaggatgactcagcatggagaagggcttgaaaggatg

SEQ ID NO: 77490 - DNA, 120 bp, synthetic construct
  source 1..120: mol_type = other DNA
agctttaaaaaaaaaatatcaagactctgggcaagtcaatttgagcattaaagaatttgctggttgggcaaagtggctcacacctgtaattccagtactttgggaagccgaggcggacag

SEQ ID NO: 77491 - DNA, 120 bp, synthetic construct
  source 1..120: mol_type = other DNA
aaagagcccgcatcgcaaagtcaatcctaagccaaaagaacaaagctggaggcatcacactacctgacttcaaactatactacaaggctacagtaaccaaaacagcatggtactggtacc

SEQ ID NO: 77492 - DNA, 120 bp, synthetic construct
  source 1..120: mol_type = other DNA
aatgctgtccctccccctacccccgacaccaccacaggccccagtgtgtgatgttccccttactgtgtccatgcgttctcattgttcaattcccacctatgagtgagaacatgcggtgtt

SEQ ID NO: 77493 - DNA, 120 bp, synthetic construct; identical to SEQ ID NO: 21658
  source 1..120: mol_type = other DNA

SEQ ID NO: 77494 - DNA, 120 bp, synthetic construct
  source 1..120: mol_type = other DNA
agaccagcctgggcaacataatgagaccctgtatctacaaaaaattaaaaaattagccaggcatactggtgtaaacctgtagtctcagaggctgaggctgaaatgagaagataacttgag

SEQ ID NO: 77495 - DNA, 120 bp, synthetic construct
  source 1..120: mol_type = other DNA
ccaaaagtagataaaaccacaaagatggggaaaaaacagaacagaaaaactggaaactctaaaatgcagagcgcctctcctcctccaaaggaacgcagttcctcaccagcaacagaacaa

SEQ ID NO: 77496 - DNA, 120 bp, synthetic construct
  source 1..120: mol_type = other DNA
ttgatcctgtcattatgatgttagctggttattttgctggttagttgatgcagtttcttcctagtctcgatggtctttacattttggcatgattttgcagcggctggtaccgattattcc

SEQ ID NO: 77497 - DNA, 120 bp, synthetic construct
  source 1..120: mol_type = other DNA
aacaacctgctcctgaatgactactgggtacataacgaaatgaaggcagaaataaagatgttctttgaaaccaacgagaacaaagacaccacataccagaatctctgggacgcattgaaa

SEQ ID NO: 77498 - DNA, 120 bp, synthetic construct; identical to SEQ ID NO: 45648
  source 1..120: mol_type = other DNA

SEQ ID NO: 77499 - DNA, 120 bp, synthetic construct
  source 1..120: mol_type = other DNA
tccctatttaataaatggtgctgggaaaactggctagccatatgtagaaagctgaaactggatcccttccttacaccttatacaaaaattaattcaagatggattaaagatttaaacgtt

SEQ ID NO: 77500 - DNA, 120 bp, synthetic construct
  source 1..120: mol_type = other DNA
acaggaagcggaatatcacactctggggactgtggtggggtcgggggaggggggagggatagcattgggagttatacctaatgctagatgacacgttagtgggtgcagcgcaccagcatg

SEQ ID NO: 77501 - DNA, 120 bp, synthetic construct
  source 1..120: mol_type = other DNA
atccttgaggaatcgctacactgtcttccacaatggttgaactagtttacaccaacagtgtaaaagtgttcctatttctccacatcctctctagcacctgttgtttcctgactttttaat

SEQ ID NO: 77502 - DNA, 120 bp, synthetic construct; identical to SEQ ID NO: 21656
  source 1..120: mol_type = other DNA

SEQ ID NO: 77503 - DNA, 120 bp, synthetic construct
  source 1..120: mol_type = other DNA
tcattgtagatcctggatattagccctttgtcagatgagtaggttgcgaaaattttctcccattttgtaggttgcctgttcactctgatggtagtttcttttgctgtgcagaagctcttt

SEQ ID NO: 77504 - DNA, 120 bp, synthetic construct
  source 1..120: mol_type = other DNA
ttggcttcctcttttcctaattgaataccctttatttccttctcctgcctgattgccctggccagaacttccaacactatgttgaataggagtggtgagagagggcatccctgtcttgtg

SEQ ID NO: 77505 - DNA, 120 bp, synthetic construct
  source 1..120: mol_type = other DNA
tcccctttatcattttttattgcgtctatttgattcttctctctttctttctttattcgtcttgctagcggtctatcaattttgttgatcctttcaaaaaaccagctcctggattcatta

SEQ ID NO: 77506 - DNA, 120 bp, synthetic construct
  source 1..120: mol_type = other DNA
ttcgttgcatatatatttaggatagttagctcttcttgttgaattgatccctttaccattatgtaatggccttctttgtctcttttgatctttgttggtttaaagtctgttttatcagag

SEQ ID NO: 77507 - DNA, 120 bp, synthetic construct
  source 1..120: mol_type = other DNA
atttcattcatttcatcttccatcactgataccctttcttccagttgatcgcatcagctcctgaggcttctgcattcttcccgtagttctcgagccttggttttcagctccatcagctcc

SEQ ID NO: 77508 - DNA, 120 bp, synthetic construct
  source 1..120: mol_type = other DNA
gcctttttttaagctggtcggaaaagcgcagtaatcgggtgggagtgacccgattttccaggtgtgtccgtcacccctttctttgactgggaaagggaactccctgaccccttgcgcttc

SEQ ID NO: 77509 - DNA, 120 bp, synthetic construct
  source 1..120: mol_type = other DNA
tagtttgaagtcaggtagcatgatgcctccagctttgttcttttggcttaggattgacttggcaatgtgggctctattttggttccatatgaactttaaagtagatttttccaattctgt

SEQ ID NO: 77510 - DNA, 120 bp, synthetic construct
  source 1..120: mol_type = other DNA
ccccactcccccaaccccacaacagtccccagactgtgatgttccccttcctgtgtccatgtgttctcattgtacaattcccacctaggaatgagaatatgcggtgtttggttttttgtt

SEQ ID NO: 77511 - DNA, 120 bp, synthetic construct
  source 1..120: mol_type = other DNA
gcctatgtcttgaatggtaatgcctaggttttcttttagggtttttatggttttaggtctaacgtttaagtctttaatccatcttgaattgatttttgtataaggtgtaaggaagggatc

SEQ ID NO: 77512 - DNA, 120 bp, synthetic construct
  source 1..120: mol_type = other DNA
ttgcccattcagtatgatattggctgtgggtttgtcatagatagctctttttattttgaaatacatcccatcaatatctaatttgttgagagtttttagcatgaagggttgttgaatttt

SEQ ID NO: 77513 - DNA, 120 bp, synthetic construct
  source 1..120: mol_type = other DNA
tggtttcaaagaacatctttatttctgccttcatttcgttatgtacccagtagtcattcaggagcaggttgttcagtttccttgtaggtgagtggttttgagtgagattcttaatcctga

SEQ ID NO: 77514 - DNA, 120 bp, synthetic construct
  source 1..120: mol_type = other DNA
gaaaattcttttctttaagaatgttgaatattggcctgaactctcttctggcttgtagagtttctgccgagagatctgctgttagtcttatgggcttccctttgagggtagcctgacctt

SEQ ID NO: 77515 - DNA, 120 bp, synthetic construct
  source 1..120: mol_type = other DNA
gaggaggcagtctgcccattctcagatctccagctgcgtactgggaggaccactgctctcttcaaagctgtcagacagggacatttaagtctgcagaggttactgctgtctttttgtttg

SEQ ID NO: 77516 - DNA, 120 bp, synthetic construct; identical to SEQ ID NO: 21657
  source 1..120: mol_type = other DNA

SEQ ID NO: 77517 - DNA, 120 bp, synthetic construct
  source 1..120: mol_type = other DNA
tggctgtgggtttgtcatagataactcttattattttgagatacatcccatccatacctaatgtattgagagtttttagcatgaaggggtgttgaattttgtcgaaggccttttctgcat

SEQ ID NO: 77518 - DNA, 120 bp, synthetic construct
  source 1..120: mol_type = other DNA
aaaaccctagaagaaaacctaggcaataccattcaggacatagacatgggcaaggacttcctgtctaaaacaccaaaagcaatggcaacaaaagccaaaattgacaaatgggatctaatc

SEQ ID NO: 77519 - DNA, 120 bp, synthetic construct
  source 1..120: mol_type = other DNA
accacatgttctcactcataggtgggaattgaacaatgagaacacatggacacggtaaggggaacatcaaacactggggactgttgtggggtggggggaggggggagggatagcattagg

SEQ ID NO: 77520 - DNA, 120 bp, synthetic construct; identical to SEQ ID NO: 77518
  source 1..120: mol_type = other DNA

SEQ ID NO: 77521 - DNA, 120 bp, synthetic construct
  source 1..120: mol_type = other DNA
tgttgaataggagtggtgagagagggcatccctgtcttgtgccagttttcaaagggaatgcttccagtttttgcccattcagtatgatattggctgtgggtttgtcatagataactctta

SEQ ID NO: 77522 - DNA, 120 bp, synthetic construct; identical to SEQ ID NO: 24805
  source 1..120: mol_type = other DNA

SEQ ID NO: 77523 - DNA, 120 bp, synthetic construct
  source 1..120: mol_type = other DNA
acgctatgtgtgtgtgtgtgtgtgtgtgtgtgtgtgtgtgtgtgtgcgcacgtacactgaatgaacttaaacaacttgatggatctcaacatttagacaccttaaatagataccataggt

SEQ ID NO: 77524 - DNA, 120 bp, synthetic construct; identical to SEQ ID NO: 13867
  source 1..120: mol_type = other DNA

SEQ ID NO: 77525 - DNA, 120 bp, synthetic construct; identical to SEQ ID NO: 13868
  source 1..120: mol_type = other DNA

SEQ ID NO: 77526 - DNA, 120 bp, synthetic construct; identical to SEQ ID NO: 13869
  source 1..120: mol_type = other DNA

SEQ ID NO: 77527 - DNA, 120 bp, synthetic construct; identical to SEQ ID NO: 35294
  source 1..120: mol_type = other DNA

SEQ ID NO: 77528 - DNA, 120 bp, synthetic construct; identical to SEQ ID NO: 35295
  source 1..120: mol_type = other DNA

SEQ ID NO: 77529 - DNA, 120 bp, synthetic construct; identical to SEQ ID NO: 35296
  source 1..120: mol_type = other DNA

SEQ ID NO: 77530 - DNA, 120 bp, synthetic construct; identical to SEQ ID NO: 35297
  source 1..120: mol_type = other DNA

SEQ ID NO: 77531 - DNA, 120 bp, synthetic construct; identical to SEQ ID NO: 35298
  source 1..120: mol_type = other DNA

SEQ ID NO: 77532 - DNA, 120 bp, synthetic construct
  source 1..120: mol_type = other DNA
gattttatttctccttcatttatgaagcttagtttggctggatatgaaattcttggttgtaaattattttctttaagaatgctgaatattgccccccccccccccccgccacttctggct

SEQ ID NO: 77533 - DNA, 120 bp, synthetic construct; identical to SEQ ID NO: 35299
  source 1..120: mol_type = other DNA

SEQ ID NO: 77534 - DNA, 120 bp, synthetic construct; identical to SEQ ID NO: 27517
  source 1..120: mol_type = other DNA

SEQ ID NO: 77535 - DNA, 120 bp, synthetic construct
  source 1..120: mol_type = other DNA
tctgcagagcgaggacacaggcttggatctgagtgacacgggaaactactggaggattttaggcaaaagagtgacttggttttaaaagaatatattctgactctaggttgaaaaaagact

SEQ ID NO: 77536 - DNA, 120 bp, synthetic construct
  source 1..120: mol_type = other DNA
ctgggtcaaatggaatttctaattctagatccctgaggaatcgccacactgacttccacaacggtttggacacaggaaggggaacatcacacaccggggactgttgtggggtggggggag

SEQ ID NO: 77537 - DNA, 120 bp, synthetic construct; identical to SEQ ID NO: 20337
  source 1..120: mol_type = other DNA

SEQ ID NO: 77538 - DNA, 120 bp, synthetic construct; identical to SEQ ID NO: 20338
  source 1..120: mol_type = other DNA

SEQ ID NO: 77539 - DNA, 120 bp, synthetic construct
  source 1..120: mol_type = other DNA
cacacaataataatgggagactttaacacccactgtcaacatcagacagatcaacaaaacagaaagttaacaaggatatccaggaattgaactcagctctgcaccaagtggacctaatag

SEQ ID NO: 77540 - DNA, 120 bp, synthetic construct
  source 1..120: mol_type = other DNA
agaaggctacagtaaccaaaacagcatagtactggtaccaaaacagagatatagaccaatggaacagaacagagccctcagaaataataccacacatctacaaccatctgatctttgaca

SEQ ID NO: 77541 - DNA, 120 bp, synthetic construct
  source 1..120: mol_type = other DNA
ctagaaataccatttgacccagccatcccattactgggtatatacccaaaggattataaatcatgctgttataaagataaatgcacacatatttttactgtggcactattcacaatagca

SEQ ID NO: 77542 - DNA, 120 bp, synthetic construct
  source 1..120: mol_type = other DNA
ttgggtactgtgctcactacctgggtgatgggatcaatcataccccaaccctcagcatcatacaatatacccacgtaacaaacctacacatgtaccccttgaatctaaaataaaaattgg

SEQ ID NO: 77543 - DNA, 120 bp, synthetic construct
  source 1..120: mol_type = other DNA
ctcacacctggaatcccagcactttgggaggcctagctgggaggactgcttgagcccaacagttggacagcagcctgggcaaaacggcaagaccccatcactacaaaaaataaaaatcag

SEQ ID NO: 77544 - DNA, 120 bp, synthetic construct; identical to SEQ ID NO: 19973
  source 1..120: mol_type = other DNA

SEQ ID NO: 77545 - DNA, 120 bp, synthetic construct; identical to SEQ ID NO: 19169
  source 1..120: mol_type = other DNA

SEQ ID NO: 77546 - DNA, 120 bp, synthetic construct
  source 1..120: mol_type = other DNA
acatgacgtccaccagatattttgacagaaaaaaattatttatttatttagagatggggtcttgctcagttgcccatgctggagtgcagtggcttgataatagctgactgcagcctcaac

SEQ ID NO: 77547 - DNA, 120 bp, synthetic construct
  source 1..120: mol_type = other DNA
gggctgatccccccacctccctcccggacggggtggctgctgggcggagggactcctgacttctcagacggggcggccgggcagagacgctcctcacttcccagatgtgatggcggccgg

SEQ ID NO: 77548 - DNA, 120 bp, synthetic construct; identical to SEQ ID NO: 19170
  source 1..120: mol_type = other DNA

SEQ ID NO: 77549 - DNA, 120 bp, synthetic construct; identical to SEQ ID NO: 19171
  source 1..120: mol_type = other DNA

SEQ ID NO: 77550 - DNA, 120 bp, synthetic construct; identical to SEQ ID NO: 19172
  source 1..120: mol_type = other DNA

SEQ ID NO: 77551 - DNA, 120 bp, synthetic construct; identical to SEQ ID NO: 19173
  source 1..120: mol_type = other DNA

SEQ ID NO: 77552 - DNA, 120 bp, synthetic construct
  source 1..120: mol_type = other DNA
taatgccgcgtatctacaactatctgatctttcacaaacctgacaaaaacaagaaatggggaaaggattccctatttaataaatggtgctgggaaaactggctagccatatgtagaaagc

SEQ ID NO: 77553 - DNA, 120 bp, synthetic construct
  source 1..120: mol_type = other DNA
aaaatgtggcacatatacaccatggaatactatgcagccataaaaaatgatgagttcatgtcctttgtggggacatggatgaagctggaaaccatcattctcagcaaactatcacaagca

SEQ ID NO: 77554 - DNA, 120 bp, synthetic construct; identical to SEQ ID NO: 19175
  source 1..120: mol_type = other DNA

SEQ ID NO: 77555 - DNA, 120 bp, synthetic construct; identical to SEQ ID NO: 19176
  source 1..120: mol_type = other DNA

SEQ ID NO: 77556 - DNA, 120 bp, synthetic construct; identical to SEQ ID NO: 17028
  source 1..120: mol_type = other DNA

SEQ ID NO: 77557 - DNA, 120 bp, synthetic construct; identical to SEQ ID NO: 17029
  source 1..120: mol_type = other DNA

SEQ ID NO: 77558 - DNA, 120 bp, synthetic construct
  source 1..120: mol_type = other DNA
tatatataaacatatatatatatatatatatatatatatatatataaaaccgactgggcgcggtggctcacgcctgtaatcccagcactttgggaggcggaggtgggaggatggcttgag

SEQ ID NO: 77559 - DNA, 120 bp, synthetic construct
  source 1..120: mol_type = other DNA
accatgaactaagcaggacacctggaggggaagaactgtggggacctggaggcctccaacgactccttcctgcttcctggacaggactatggctgtgcagggatcccagagaagacttct

SEQ ID NO: 77560 - DNA, 120 bp, synthetic construct
  source 1..120: mol_type = other DNA
tgcatcttcaagaacttcaacctctttctcgccctcatcatctgcaatgccatcatcgaccccctcatctacgccttccacagccaggagctccgcaggacgctcaaggaggtgctgaca

SEQ ID NO: 77561 - DNA, 120 bp, synthetic construct; identical to SEQ ID NO: 26949
  source 1..120: mol_type = other DNA

SEQ ID NO: 77562 - DNA, 120 bp, synthetic construct; identical to SEQ ID NO: 26950
  source 1..120: mol_type = other DNA

SEQ ID NO: 77563 - DNA, 120 bp, synthetic construct; identical to SEQ ID NO: 26951
  source 1..120: mol_type = other DNA

SEQ ID NO: 77564 - DNA, 120 bp, synthetic construct; identical to SEQ ID NO: 26952
  source 1..120: mol_type = other DNA

SEQ ID NO: 77565 - DNA, 120 bp, synthetic construct; identical to SEQ ID NO: 26953
  source 1..120: mol_type = other DNA

SEQ ID NO: 77566 - DNA, 120 bp, synthetic construct; identical to SEQ ID NO: 26954
  source 1..120: mol_type = other DNA

SEQ ID NO: 77567 - DNA, 120 bp, synthetic construct; identical to SEQ ID NO: 26955
  source 1..120: mol_type = other DNA

SEQ ID NO: 77568 - DNA, 120 bp, synthetic construct
  source 1..120: mol_type = other DNA
actggtctcgaaatcatgggctcaagatcctcactcctcaacctcccaaagtgttgggattacaggtgtgagctgctgtacctagctttatttcagcttttaaagttattttcagctgaa

SEQ ID NO: 77569 - DNA, 120 bp, synthetic construct; identical to SEQ ID NO: 26956
  source 1..120: mol_type = other DNA

SEQ ID NO: 77570 - DNA, 120 bp, synthetic construct; identical to SEQ ID NO: 26957
  source 1..120: mol_type = other DNA

SEQ ID NO: 77571 - DNA, 120 bp, synthetic construct
  source 1..120: mol_type = other DNA
ccagtgatgatgagcactttttcatgtgttttttggctgcataaatgtcttcttttgagaagtgtctgttcatatcctttgcccactttttgatggggttgtttgtttttttcttgtaaa

SEQ ID NO: 77572 - DNA, 120 bp, synthetic construct
  source 1..120: mol_type = other DNA
gattttttgcacattgattttgtatcctgagactttgctgaagttgcttatcagcttgaggagattttgggctgagacaatggggttttctagatatacaatcatgtcatctgcaaacag

SEQ ID NO: 77573 - DNA, 120 bp, synthetic construct
  source 1..120: mol_type = other DNA
tatttgcatagaggtgtttatagtactctctgatggtagtttgtacttctgtgggatcggtggtgatatcccctttaacattttttattgtgtctatttgattcttctctcttttcttct

SEQ ID NO: 77574 - DNA, 120 bp, synthetic construct
  source 1..120: mol_type = other DNA
gaattgatccctttaccattatgtaatggccttctttgtctcttttgatctttgttgtttaaactctgttttatcagagactaggattgcaacctctgcctttttttgttttccatttgc

SEQ ID NO: 77575 - DNA, 120 bp, synthetic construct
  source 1..120: mol_type = other DNA
tcggctactaaggcttctgccttcgtcacgtagctctcgtgccttggttttcagctccatcaggtcttttaaggacttctctgcgttggttattctagttatccattcatctaatttttt

SEQ ID NO: 77576 - DNA, 120 bp, synthetic construct; identical to SEQ ID NO: 24918
  source 1..120: mol_type = other DNA

SEQ ID NO: 77577 - DNA, 120 bp, synthetic construct; identical to SEQ ID NO: 24919
  source 1..120: mol_type = other DNA

SEQ ID NO: 77578 - DNA, 120 bp, synthetic construct; identical to SEQ ID NO: 24920
  source 1..120: mol_type = other DNA

SEQ ID NO: 77579 - DNA, 120 bp, synthetic construct; identical to SEQ ID NO: 24921
  source 1..120: mol_type = other DNA

SEQ ID NO: 77580 - DNA, 120 bp, synthetic construct; identical to SEQ ID NO: 26801
  source 1..120: mol_type = other DNA

SEQ ID NO: 77581 - DNA, 120 bp, synthetic construct
  source 1..120: mol_type = other DNA
tggccagtgatgacgagcattttttcatgtgttttttggctgcataaatgtcttcttctgagaagtgtctgttcatgtccttcacccactttttgatggggttgtttgtttttttcttgt

SEQ ID NO: 77582 - DNA, 120 bp, synthetic construct
  source 1..120: mol_type = other DNA
aattgtgaatgagagttcactcatgatttggctctctgtttgtctgttgttggtatttaagaatgcttgtgatttttgtacattgattttgtatcctgagactttgctgaagttgcttat

SEQ ID NO: 77583 - DNA, 120 bp, synthetic construct
  source 1..120: mol_type = other DNA
agagtttgtgtgtcgaggaatttatccatttcttctagattttctagtttatttgcgtagaggtgtttgtagtattctctgatggtagtttgtatttctgtgggatcggtggtgatatcc

SEQ ID NO: 77584 - DNA, 120 bp, synthetic construct
  source 1..120: mol_type = other DNA
ttccatttgcttggtagatcttcctccatccttttattttgagcctatgtgtgtctctgcacgtgagatgggtttcctgaatacagcacactgatgggtcttgactctttatccagtttg

SEQ ID NO: 77585 - DNA, 120 bp, synthetic construct
  source 1..120: mol_type = other DNA
taaacttcccttctcgcttcatttcattcatttcatcttccattgctgataccctttcttacagttgatcgcttcagctcctgaggcttctgcattcttcacgtagttctcgagccttgg

SEQ ID NO: 77586 - DNA, 120 bp, synthetic construct
  source 1..120: mol_type = other DNA
cttaagcaagcctgggcaatggcgagcgcccctcccccagcctcgctgccgccttgcagtttgatctcagactgctgtgctagcaatcagcgagactccgtgggcgtaggaccctccgag

SEQ ID NO: 77587 - DNA, 120 bp, synthetic construct
  source 1..120: mol_type = other DNA
gagaactacaaaccactgctcaatgaaataaaagaggatataaagaaatggaagaacattccatgctcatgggtaggaagaatcaatatcgtgaaaatggccatactgcccaaggtaatt

SEQ ID NO: 77588 - DNA, 120 bp, synthetic construct
  source 1..120: mol_type = other DNA
aaaaagtcaggaaacaacaggtgctggagaggatgtggagaaataggaacacttttacactgttagtgggactgtaaactagttcaaccattgtggaagtcagtgtggcgattcctcagg

SEQ ID NO: 77589 - DNA, 120 bp, synthetic construct; identical to SEQ ID NO: 35379
  source 1..120: mol_type = other DNA

SEQ ID NO: 77590 - DNA, 120 bp, synthetic construct
  source 1..120: mol_type = other DNA
ggtgagatcgtgccactgcactccagcctggtgacagagcaagacttcgtctaaaaaaaaaaataaaaaatttaaaaattaaaaaaaaaactatttctctgagagtctttgccttcatga

SEQ ID NO: 77591 - DNA, 120 bp, synthetic construct; identical to SEQ ID NO: 35380
  source 1..120: mol_type = other DNA

SEQ ID NO: 77592 - DNA, 120 bp, synthetic construct; identical to SEQ ID NO: 14017
  source 1..120: mol_type = other DNA

SEQ ID NO: 77593 - DNA, 120 bp, synthetic construct; identical to SEQ ID NO: 14018
  source 1..120: mol_type = other DNA

SEQ ID NO: 77594 - DNA, 120 bp, synthetic construct; identical to SEQ ID NO: 14019
  source 1..120: mol_type = other DNA

SEQ ID NO: 77595 - DNA, 120 bp, synthetic construct; identical to SEQ ID NO: 14020
  source 1..120: mol_type = other DNA

SEQ ID NO: 77596 - DNA, 120 bp, synthetic construct; identical to SEQ ID NO: 14015
  source 1..120: mol_type = other DNA

SEQ ID NO: 77597 - DNA, 120 bp, synthetic construct
  source 1..120: mol_type = other DNA
cgagattgcacctgggtggtgcaacgctggagtgccagctactcggaggcagaggtcgcagtgagccgagattgcacctgggtggtgcacagctggagtgccagctactcggaggcagag

SEQ ID NO: 77598 - DNA, 120 bp, synthetic construct; identical to SEQ ID NO: 77597
  source 1..120: mol_type = other DNA

SEQ ID NO: 77599 - DNA, 120 bp, synthetic construct; identical to SEQ ID NO: 14016
  source 1..120: mol_type = other DNA

SEQ ID NO: 77600 - DNA, 120 bp, synthetic construct
  source 1..120: mol_type = other DNA
ataaatagataaatggaggatgatgaatgggtagatggatggatgagtggatgcttggacggatgagtggatggatggatggatgaatgagttggtagatagatggatgagtggatatat

SEQ ID NO: 77601 - DNA, 120 bp, synthetic construct; identical to SEQ ID NO: 14002
  source 1..120: mol_type = other DNA

SEQ ID NO: 77602 - DNA, 120 bp, synthetic construct; identical to SEQ ID NO: 14003
  source 1..120: mol_type = other DNA

SEQ ID NO: 77603 - DNA, 120 bp, synthetic construct; identical to SEQ ID NO: 14004
  source 1..120: mol_type = other DNA

SEQ ID NO: 77604 - DNA, 120 bp, synthetic construct; identical to SEQ ID NO: 14005
  source 1..120: mol_type = other DNA

SEQ ID NO: 77605 - DNA, 120 bp, synthetic construct; identical to SEQ ID NO: 14006
  source 1..120: mol_type = other DNA

SEQ ID NO: 77606 - DNA, 120 bp, synthetic construct; identical to SEQ ID NO: 14007
  source 1..120: mol_type = other DNA

SEQ ID NO: 77607 - DNA, 120 bp, synthetic construct; identical to SEQ ID NO: 14008
  source 1..120: mol_type = other DNA

SEQ ID NO: 77608 - DNA, 120 bp, synthetic construct; identical to SEQ ID NO: 14009
  source 1..120: mol_type = other DNA

SEQ ID NO: 77609 - DNA, 120 bp, synthetic construct
  source 1..120: mol_type = other DNA
ttgggtattttctgtagaaatggagtctcaccatgttacccaggctgatctagaattcttgggttcgagtgatccacccaccttggcctccaaagtgctgggattacagatgtgagccat

SEQ ID NO: 77610 - DNA, 120 bp, synthetic construct; identical to SEQ ID NO: 14010
  source 1..120: mol_type = other DNA

SEQ ID NO: 77611 - DNA, 120 bp, synthetic construct
  source 1..120: mol_type = other DNA
gcgagtgggagtgtaagtgaatgtgtgtgagactgtgagtgtgagagtgtgtgtgtgtgagagtgagtgtgtgtgtgcgtgttcacattttgggaatttgtaatagagtatatatattca

SEQ ID NO: 77612 - DNA, 120 bp, synthetic construct
  source 1..120: mol_type = other DNA
aaccgccgattacaggggaggagctgggcttcggggcgacgagggaagctgccgatggggtggggcggctctgggggcggcctgggcctttctgtctctgaagcccgagctctctcccta

SEQ ID NO: 77613 - DNA, 120 bp, synthetic construct; identical to SEQ ID NO: 14011
  source 1..120: mol_type = other DNA

SEQ ID NO: 77614 - DNA, 120 bp, synthetic construct; identical to SEQ ID NO: 14012
  source 1..120: mol_type = other DNA

SEQ ID NO: 77615 - DNA, 120 bp, synthetic construct; identical to SEQ ID NO: 14013
  source 1..120: mol_type = other DNA

SEQ ID NO: 77616 - DNA, 120 bp, synthetic construct; identical to SEQ ID NO: 14014
  source 1..120: mol_type = other DNA

SEQ ID NO: 77617 - DNA, 120 bp, synthetic construct
  source 1..120: mol_type = other DNA
acactatcccggcacagggcagcatctcccaacactgcccactgagaaagcaccttcagtcctgatctgctgtcctttaaagaacaaaggcttcacaaagtcccttagagcctgtggagc

SEQ ID NO: 77618 - DNA, 120 bp, synthetic construct
  source 1..120: mol_type = other DNA
ggctctgtgccatcgtgctttggtggccccagaaccaccagcttccaagccattgggaaactctgtgcatgtaccgttttttgtagccttggagaagccttagtgtctgaacagtccatt

SEQ ID NO: 77619 - DNA, 120 bp, synthetic construct; identical to SEQ ID NO: 24922
  source 1..120: mol_type = other DNA

SEQ ID NO: 77620 - DNA, 120 bp, synthetic construct
  source 1..120: mol_type = other DNA
ccagtctatcattgttggacatttgggttggttccaagtctttgctattgtgaatagtgccacaataaacatacgtgtgcatgtgtctttatagcagcatgatttataatcctttgggta

SEQ ID NO: 77621 - DNA, 120 bp, synthetic construct
  source 1..120: mol_type = other DNA
cattgcttgtttttctcaggtttgtcaaagatcagatagttgtagatatgcggcattatttctgagggctctgttctgttccattgatctatatctctgttttggtaccagtaccatgct

SEQ ID NO: 77622 - DNA, 120 bp, synthetic construct; identical to SEQ ID NO: 45732
  source 1..120: mol_type = other DNA

SEQ ID NO: 77623 - DNA, 120 bp, synthetic construct; identical to SEQ ID NO: 70896
  source 1..120: mol_type = other DNA

SEQ ID NO: 77624 - DNA, 120 bp, synthetic construct
  source 1..120: mol_type = other DNA
gaatgaagaagatactttgcctgggtcactaggattatttacttagccctatctctgcagctaacactgtggtaaggaaagaggaaactgaaatagaaataaaatcctggccctagctca

SEQ ID NO: 77625 - DNA, 120 bp, synthetic construct; identical to SEQ ID NO: 24923
  source 1..120: mol_type = other DNA

SEQ ID NO: 77626 - DNA, 120 bp, synthetic construct; identical to SEQ ID NO: 24924
  source 1..120: mol_type = other DNA

SEQ ID NO: 77627 - DNA, 120 bp, synthetic construct
  source 1..120: mol_type = other DNA
ttacaaatactatcttataaggcattattttaacctgataacaacttaacactgtttacataaacaaacaagcaaaaagaaaaccagtaaaaactctacaccttaactttgtacccccaa

SEQ ID NO: 77628 - DNA, 120 bp, synthetic construct
  source 1..120: mol_type = other DNA
tgatggccattctaactggtgtgagatggtatctcattgtggttttgatttgcatttgtctgaggcccagtgatggtgagcattttttcatgtgtttttttggctgcataaatgtcttct

SEQ ID NO: 77629 - DNA, 120 bp, synthetic construct
  source 1..120: mol_type = other DNA
acccatgagcatggaatgttcttccatttctttgtatcctcttttatttcattgggcagtggtttgtagctctccttgaagaggtccttcgcgtcccttgtaagttggattcctaggtat

SEQ ID NO: 77630 - DNA, 120 bp, synthetic construct
  source 1..120: mol_type = other DNA
ttatttgcgtagaggtgttggtagtgttctctgatggtagtttgtatttctgtgggatcagtggtgatatcccctttatcactttttattgcctctatttgattcttctctcttttcttc

SEQ ID NO: 77631 - DNA, 120 bp, synthetic construct
  source 1..120: mol_type = other DNA
atccttttattttgagcctatgtgtgtctctgcacgtgagatgggtgttctgaatacagcacactgatgcatcttgactctttatccaatttgccagtctgtgtcttttaattggagcat

SEQ ID NO: 77632 - DNA, 120 bp, synthetic construct
  source 1..120: mol_type = other DNA
ccttttgcttcatttcattcatttcatcttctgtcactgataccctttcttccaatcgatcgccatcagctcctgaggcttctgcattcttcacgtagtttttgagccttggctctcagc

SEQ ID NO: 77633 - DNA, 120 bp, synthetic construct; identical to SEQ ID NO: 28146
  source 1..120: mol_type = other DNA

SEQ ID NO: 77634 - DNA, 120 bp, synthetic construct; identical to SEQ ID NO: 28147
  source 1..120: mol_type = other DNA

SEQ ID NO: 77635 - DNA, 120 bp, synthetic construct
  source 1..120: mol_type = other DNA
ttgcttgaactcaggaggtggaggttgcagtgagccaagatcatgccattgcactccagctgggtgagaagagcaagactccatctcaaaaaaaaaaaaaaaaaaagaaaagaaaactca

SEQ ID NO: 77636 - DNA, 120 bp, synthetic construct
  source 1..120: mol_type = other DNA
tcctgactttttaatgatggccattcaaactggtgtgagatggtatctcattgtggttttgatttgcatttctctgatggccagtgatggtgagcattttttcatgtgttttttggctgc

SEQ ID NO: 77637 - DNA, 120 bp, synthetic construct
  source 1..120: mol_type = other DNA
ttttgtatcctgagattttgctgaaattgcttatcagcttaaggagattttgggctgagacattggggttttctagatagacaatcacgacatctgcaaacagggacaatttgacttcct

SEQ ID NO: 77638 - DNA, 120 bp, synthetic construct
  source 1..120: mol_type = other DNA
ttcagctgtgaatccatctggttctggactctttttggttggtaagctattgattattgccacaatttcagagcctgttattggtctattcagagattcaacttcttcctggtttagtct

SEQ ID NO: 77639 - DNA, 120 bp, synthetic construct
  source 1..120: mol_type = other DNA
tgtgggagtctaagtctctttgtaggtcactcaggacttgctttatgaatctgggtgctcctgtattgggtgcatatttatttatgatagttagctcttcttgttgaattgatcccttta

SEQ ID NO: 77640 - DNA, 120 bp, synthetic construct
  source 1..120: mol_type = other DNA
cttggagttgctcttctcgaggagtatctttgtgacgttctctgtatttcctgaatctgaatgttggcctgccttgctagattggggaagttctcctggataatatcctgcagagtgttt

SEQ ID NO: 77641 - DNA, 120 bp, synthetic construct
  source 1..120: mol_type = other DNA
ctgacttctgtcttctgcagattccatctccagcaggaagccctgcaggcttctgcagctgacttttttttttttttttttttttttttttttttttgagacggagtctcgctctgtcgc

SEQ ID NO: 77642 - DNA, 120 bp, synthetic construct; identical to SEQ ID NO: 6215
  source 1..120: mol_type = other DNA

SEQ ID NO: 77643 - DNA, 120 bp, synthetic construct
  source 1..120: mol_type = other DNA
tctcagcattttgcagagctgaggtgagaggatctcttgagctcggaagttagagaccagcctgagcaacaaagtgagacaccatctctaccaaaattattttaaaaattagtcaggtat

SEQ ID NO: 77644 - DNA, 120 bp, synthetic construct
  source 1..120: mol_type = other DNA
cagctcaggtgagcccagatgaggcgccgggtagcttctaagtcactaatggaaatagaaggctaattcaggggttaggggccgtcgtcctccttactcccaggagaagagaaaaaccca

SEQ ID NO: 77645 - DNA, 120 bp, synthetic construct; identical to SEQ ID NO: 31052
  source 1..120: mol_type = other DNA

SEQ ID NO: 77646 - DNA, 120 bp, synthetic construct
  source 1..120: mol_type = other DNA
atgtaaatgggctaaatgccccaattaaaaggcacagactagtaaattggataaagagtcaagacccaatggtgtattcaggagacccatctcacgtgcaaagacatgcacaggctcaaa

SEQ ID NO: 77647 - DNA, 120 bp, synthetic construct
  source 1..120: mol_type = other DNA
agacacaacataccagaacctttgggacacagctaaagcagtgtgtagagggaaatttatagtactaaatgcccacaagagaaagcaggaaaaatctaaaattgacgccctaacatcaca

SEQ ID NO: 77648 - DNA, 120 bp, synthetic construct; identical to SEQ ID NO: 26910
  source 1..120: mol_type = other DNA

SEQ ID NO: 77649 - DNA, 120 bp, synthetic construct
  source 1..120: mol_type = other DNA
aaagacaaaattgacaaatgggatctaatgaaactaaagagcttctgcacagcaaaagaaactaccatcagagtgaacaggcaacccacaaaatgggagaaaattttcgcaacctactca

SEQ ID NO: 77650 - DNA, 120 bp, synthetic construct
  source 1..120: mol_type = other DNA
tattctcactcataggtgggaactgaacaatgagaacacgtggacacaggaaggggaacatcacactctggggactgttgtggggtggggggaggggggagggatagcattgggagatat

SEQ ID NO: 77651 - DNA, 120 bp, synthetic construct
  source 1..120: mol_type = other DNA
taaggtctcccattattattgtgtgggagtctaagtctctttgtaggtcactgaggacttgctttatgaatctgggtgctcctgtattgggtgcatatatatttaggatagttagctctt

SEQ ID NO: 77652 - DNA, 120 bp, synthetic construct
  source 1..120: mol_type = other DNA
tttggtgaatctgacaattatgtgtcttggagttgctcttctcgaggagtatctttgtggcactctctgtatttcctgaatctgaatgttggcctgccttgctagattggggaagttctc

SEQ ID NO: 77653 - DNA, 120 bp, synthetic construct
  source 1..120: mol_type = other DNA
acagagccctcagaaataatgccacatatctacaactatctgatctttgacaaacctgagaaaaacaagcaatggggaaaggattccctatttaataaatggtgctgggaaaatgggcta

SEQ ID NO: 77654 - DNA, 120 bp, synthetic construct; identical to SEQ ID NO: 15664
  source 1..120: mol_type = other DNA

SEQ ID NO: 77655 - DNA, 120 bp, synthetic construct; identical to SEQ ID NO: 15665
  source 1..120: mol_type = other DNA

SEQ ID NO: 77656 - DNA, 120 bp, synthetic construct
  source 1..120: mol_type = other DNA
cttggcctcccaaagtgctgggattacaggtgtgagccaccgtgcctggcctttataagtgtttttaaagaaacaactttggcttcattaattctttgtattctatgccagaaaaaataa

SEQ ID NO: 77657 - DNA, 120 bp, synthetic construct; identical to SEQ ID NO: 15666
  source 1..120: mol_type = other DNA

SEQ ID NO: 77658 - DNA, 120 bp, synthetic construct
  source 1..120: mol_type = other DNA
tgacttctagtgccaattgttggcctgtttggttttatattcttttattttggttcctctctgttattgcaaaggctgacctctgcaggatacattctctaggcactcctatcagctggc

SEQ ID NO: 77659 - DNA, 120 bp, synthetic construct
  source 1..120: mol_type = other DNA
tgtttattgaggcactattcaccatagcaaagacttggaaccaacccaaatgtccatcaatgatagaccggattaagaaaatgtggcacatatacaccatggaatactatgcagccataa

SEQ ID NO: 77660 - DNA, 120 bp, synthetic construct
  source 1..120: mol_type = other DNA
tgccatgctgttttggttactgtagccttgtagtatagtttgaagtcaggtcgcatgatgcctccagcttttttctttttgcttaggattgtcttggcaatgtggactcttttttggttc

SEQ ID NO: 77661 - DNA, 120 bp, synthetic construct; identical to SEQ ID NO: 25738
  source 1..120: mol_type = other DNA

SEQ ID NO: 77662 - DNA, 120 bp, synthetic construct; identical to SEQ ID NO: 25739
  source 1..120: mol_type = other DNA

SEQ ID NO: 77663 - DNA, 120 bp, synthetic construct; identical to SEQ ID NO: 25740
  source 1..120: mol_type = other DNA

SEQ ID NO: 77664 - DNA, 120 bp, synthetic construct
  source 1..120: mol_type = other DNA
aatgagctgttgggcacacctcccagacagggtggtggccgggcagaggggctcctcacttcccagtaggggcggccgggcagaggtgcccctcacctcccagacggggcggctggccgg

SEQ ID NO: 77665 - DNA, 120 bp, synthetic construct
  source 1..120: mol_type = other DNA
caaggcaggcggctgggaggtggaggttgtagcgagccgagatcatgccactgcactccagccggggcaccattgagcactgagtgaacgagactccgtctgcaatcccggcaccttggg

SEQ ID NO: 77666 - DNA, 120 bp, synthetic construct
  source 1..120: mol_type = other DNA
gctgaagattgcagcctctgcccggccgccaccccgtctaggaagtgaggagtgtctctgcctggctgcccatcgtctgggaggtgaggagcgtctctacctggccgccaccctgtctgg

SEQ ID NO: 77667 - DNA, 120 bp, synthetic construct; identical to SEQ ID NO: 25741
  source 1..120: mol_type = other DNA

SEQ ID NO: 77668 - DNA, 120 bp, synthetic construct; identical to SEQ ID NO: 25742
  source 1..120: mol_type = other DNA

SEQ ID NO: 77669 - DNA, 120 bp, synthetic construct
  source 1..120: mol_type = other DNA
agaggtgctcctcacttcccagacgatgggtggccgggcagaggcgctcctcaattcccagacggggcagctgggcagaggcgctctcacttcctcccagatggggcggccgggcagaga

SEQ ID NO: 77670 - DNA, 120 bp, synthetic construct
  source 1..120: mol_type = other DNA
tctagtctgtcactgatgggcatttgggttggttccaagtctttgctattgtgaatagtgccccaataaacatacatgtgcatgtgtctttatagcagcatgatttataatcctttgggt

SEQ ID NO: 77671 - DNA, 120 bp, synthetic construct
  source 1..120: mol_type = other DNA
agtaccatgctgttttggttactgtagccttgtagtatagtttgaactcaggtaacgtgatgcctccagctttgttcttttggcttaggattgtattggcaatgtgggctcttttttggt

SEQ ID NO: 77672 - DNA, 120 bp, synthetic construct
  source 1..120: mol_type = other DNA
atgaagcccacttgatcatggtggataagctttttgatgtgcttctggattcggtttgccagtattttactgaggatttttgcataaatgttcatcagggatattggtctaaaattctct

SEQ ID NO: 77673 - DNA, 120 bp, synthetic construct; identical to SEQ ID NO: 24412
  source 1..120: mol_type = other DNA

SEQ ID NO: 77674 - DNA, 120 bp, synthetic construct
  source 1..120: mol_type = other DNA
attggagggtgaagggtaggaggagacagaggatcagggaaaataactaatgggtactagtcttaaaacctgggtcatgaaatagtctgtataacaaacccccatgacacaagtttacct

SEQ ID NO: 77675 - DNA, 120 bp, synthetic construct
  source 1..120: mol_type = other DNA
atagtcctttgggtatatacccagtaatgggatggctgtgtcaaatggtatttctagttctagatccctgaggaatcgccacactgacttccacaatggttgaactagtttacagtccca

SEQ ID NO: 77676 - DNA, 120 bp, synthetic construct
  source 1..120: mol_type = other DNA
cctttggcttaggattgacttggtgatgcgggctcttttttggttctatatgaactttaaagtagttttttccaattctgtgaagaaagtcattggtagcttgatggggatggcattgaa

SEQ ID NO: 77677 - DNA, 120 bp, synthetic construct
  source 1..120: mol_type = other DNA
cttgatcatggtggataaactttttgatgtgctgctggattcattttgccagtattttattgaggatttttgcatcaatgttcattaaggatattggtctaaaattctcttttttggttg

SEQ ID NO: 77678 - DNA, 120 bp, synthetic construct
  source 1..120: mol_type = other DNA
gtggtctgagagatagtttgttataatttctgttcttttgcatttgctgaggagaactttacttccaagtatgtggtcaattttggaataggtgtggtgtggtgctgaaaaaaatgtata

SEQ ID NO: 77679 - DNA, 120 bp, synthetic construct
  source 1..120: mol_type = other DNA
cctggataatatcctgcagagtgttttccaacttggttccattctccccatcactttcaggtacaccaatcagacctagatttggtcttttcacatagtcccatatttcttggagggttt

SEQ ID NO: 77680 - DNA, 120 bp, synthetic construct
  source 1..120: mol_type = other DNA
gttcgagtttccgggctgttttgattacctcagcaagcctgggcaatggcgggcgcccctcccctagcctcgctgccgccttgcagtttgatctcagactgctgtgctagcaatcagtga

SEQ ID NO: 77681 - DNA, 120 bp, synthetic construct
  source 1..120: mol_type = other DNA
gtttctatctcctggattcatgcataacctctttgattttacagcacttactgagaggtgacagtgtgctggcagccctcacaaccctcgcttactctctgtacccattctggccacgct

SEQ ID NO: 77682 - DNA, 120 bp, synthetic construct
  source 1..120: mol_type = other DNA
gtgtctagctgatctgctggggacttagagaacctttatgtctagctaagggattgtgaatacaccaatcggcactctgtatctagctcaaggtttgtaaatgcaccaatcagcactctg

SEQ ID NO: 77683 - DNA, 120 bp, synthetic construct
  source 1..120: mol_type = other DNA
tacattgtcataagtcatggctagattctatccacctcctcaattttaaattcatctcatttaacaaagcagttacatatgtatacatgtgccatgctggtgcgctgcacccactaactc

SEQ ID NO: 77684 - DNA, 120 bp, synthetic construct; identical to SEQ ID NO: 14325
  source 1..120: mol_type = other DNA

SEQ ID NO: 77685 - DNA, 120 bp, synthetic construct
  source 1..120: mol_type = other DNA
aattgcttcaaagagaataaaatacctagcaatccaacttacaagggatgtgaaggacctcttcaaggagaactacaaaccactgctcaatgaaataaaagaggatacaaacaaatggaa

SEQ ID NO: 77686 - DNA, 120 bp, synthetic construct
  source 1..120: mol_type = other DNA
catctgacaaagggctaatatccagaatctacaatgaactcaaacaaatttacaagaaaaaaaaaaacaaccccatcagaaagtgggcgaaggacatgaacagacacttctcaaaagaag

SEQ ID NO: 77687 - DNA, 120 bp, synthetic construct
  source 1..120: mol_type = other DNA
agggtgagaaaaagatacacaaatgacacacatgaatacttacacacaaacttgttatagtaaattttaagaatggaaggggaacatcacacaccggggactgttgtggggtggggggag

SEQ ID NO: 77688 - DNA, 120 bp, synthetic construct; identical to SEQ ID NO: 14327
  source 1..120: mol_type = other DNA

SEQ ID NO: 77689 - DNA, 120 bp, synthetic construct
  source 1..120: mol_type = other DNA
atcgggggacctcccttgggagatcaatcccctgtcctcctgctctttgctccgtgagaaagatccacctacgacctcaggtcctcagaccgaccagcccaagaaacaaacatctcacca

SEQ ID NO: 77690 - DNA, 120 bp, synthetic construct
  source 1..120: mol_type = other DNA
tcgacagtagttccaaatagccagaaaatggcactttgaatttttccatcctgcaaaatcgaaataattcttgtcgtaaaataggcaaacggtctgaggtgcctgacgtccaggcattct

SEQ ID NO: 77691 - DNA, 120 bp, synthetic construct
  source 1..120: mol_type = other DNA
gcacacaagaacttccaaaggcctgaaccgcagcagccaggcgttcctccagaacctcctcccacaggagcttgctacatgtgccggaaatctggccactgggccaaggaatgcccgcag

SEQ ID NO: 77692 - DNA, 120 bp, synthetic construct
  source 1..120: mol_type = other DNA
taaaaccagacaagtcttacaagttagttcaggatctgcaccttatcaaccaaattgttgtgcctataaaccccgtggtgccaaacccatatactctcctatcctcaatacctgcctcta

SEQ ID NO: 77693 - DNA, 120 bp, synthetic construct
  source 1..120: mol_type = other DNA
taaaaaggactggacaatacttttaccacattcccttctcagaattcaggcctgtcctcggaatgctacagggtacagcccatttaaggtccataacaccccccaaaaaattttcgccgc

SEQ ID NO: 77694 - DNA, 120 bp, synthetic construct
  source 1..120: mol_type = other DNA
cggcctcccaaagtgctgggattacaggagtgagccaccgtgcccagcctccatcaactatttcttatgattattgataaagtttaattttctctcattgttcttgtattttaatgactt

SEQ ID NO: 77695 - DNA, 120 bp, synthetic construct
  source 1..120: mol_type = other DNA
cttttgagaagtgtctgttcatgtccttcgcccactttttgatggggttgtttgtttttttcttgtaaatttgtttgagttcattgtagattctggatattagccctttgtcagataagt

SEQ ID NO: 77696 - DNA, 120 bp, synthetic construct
  source 1..120: mol_type = other DNA
tgaaagccaaggctcgagaactatgtgaagaatgcagaagccccaggagccgatgcgatcaactggaagaaagggtatcagtgatggaagatgaaatgaatgaaatgaagcgagaaggga

SEQ ID NO: 77697 - DNA, 120 bp, synthetic construct
  source 1..120: mol_type = other DNA
tggatagagtcaagacccatcagtgtgctgtattcaggaaatccagctcatgcgcagagacacacataggctcaaaataaaaggatggaggaagatctaccaagcaaatggaaaacaaaa

SEQ ID NO: 77698 - DNA, 120 bp, synthetic construct
  source 1..120: mol_type = other DNA
aaaaaattaatgaatccaggagcgggttttttgaaaggatcaacaaaattcatagactgcttgcaagactaataaagaaaaaaagagagaagaatcaaatagatgcaataaaaaatgata

SEQ ID NO: 77699 - DNA, 120 bp, synthetic construct
  source 1..120: mol_type = other DNA
gttctggtcagggcaattaagcaggagaaggaaataaagggtattcaattaggaaaagaggaagtcaaattgtccctgtttgcagacgacatgattgtatatctagaaaaccccatcgcc

SEQ ID NO: 77700 - DNA, 120 bp, synthetic construct
  source 1..120: mol_type = other DNA
tagaagaaaacctaggcattaccattcaggacacaggcatgggcaaagacttcatgtctaaaacaccaaaagcaatggcaacaaaagccaaaattgacaaatgggatctaattaaactaa

SEQ ID NO: 77701 - DNA, 120 bp, synthetic construct
  source 1..120: mol_type = other DNA
gaaggggaacatcacactctggggactgttgtggcatgagggcagtggggagggatagcagtaggagatatacctaatgctaagtgacaagttaatgggtgcagcacaccagcatggcac

SEQ ID NO: 77702 - DNA, 120 bp, synthetic construct; identical to SEQ ID NO: 14329
  source 1..120: mol_type = other DNA

SEQ ID NO: 77703 - DNA, 120 bp, synthetic construct
  source 1..120: mol_type = other DNA
atttgagaactgtagcatctagaaatggaagttccttcaaacgtgcaaccgttacaaattctgccaactgtcattctcagcaaactatcgcaaggacaaaaaaaccaaacaccgcatgtt

SEQ ID NO: 77704 - DNA, 120 bp, synthetic construct; identical to SEQ ID NO: 14331
  source 1..120: mol_type = other DNA

SEQ ID NO: 77705 - DNA, 120 bp, synthetic construct; identical to SEQ ID NO: 29526
  source 1..120: mol_type = other DNA

SEQ ID NO: 77706 - DNA, 120 bp, synthetic construct; identical to SEQ ID NO: 29527
  source 1..120: mol_type = other DNA

SEQ ID NO: 77707 - DNA, 120 bp, synthetic construct
  source 1..120: mol_type = other DNA
ggcgaggcaatgccacaggcccagggttagagggggtgggcacttgcagctgccgatgtggctggatctggaacttctcagacggctcctgtcagcgccaagtttcaccaaatccaggcc

SEQ ID NO: 77708 - DNA, 120 bp, synthetic construct
  source 1..120: mol_type = other DNA
tgacctgggccgctctctcgccagccgactgcaagtacaagtttgagaactggggtgcgtgtgatgggggcacaggcaccaaagtccgccaaggcaccctgaagaaggcgcgctacaatg

SEQ ID NO: 77709 - DNA, 120 bp, synthetic construct
  source 1..120: mol_type = other DNA
cagaatcttctccttccctgatgcccgggtgtttgtggagccggcggtctgcaatgggtcagcctaactgctgatatggtattaatatttctttcttgttttacagccaagaaagggaag

SEQ ID NO: 77710 - DNA, 120 bp, synthetic construct
  source 1..120: mol_type = other DNA
taatgcatgaggagcttaaaacctagatgacgggttgatgggtgcggcaaaccaccatggcacatgtatacttatgtaacaaacccgcatattcggtttctcttcaaataatctgatcaa

SEQ ID NO: 77711 - DNA, 120 bp, synthetic construct
  source 1..120: mol_type = other DNA
tgattaaccaaataatatgtaactatttctttgcttagaaatgtgaaatactgatataaaactccaagtcagggggggaggagccaagatggccgaataggaacagctctggtctacagc

SEQ ID NO: 77712 - DNA, 120 bp, synthetic construct
  source 1..120: mol_type = other DNA
gcaacctaactgggaggcacccccagcaggggcacactgacacctcacacggcagggtattccaacagacctgcagctgagggtcctgtctgttagaaggaaaactaacaaccagaaagg

SEQ ID NO: 77713 - DNA, 120 bp, synthetic construct
  source 1..120: mol_type = other DNA
aagcccatcagactaacagcggatctctcggcagaaaccctacaagccagaagagagtgggggccaatattcaacattcttaaagaaaagaattttcaaaccagaatttcatatccagcc

SEQ ID NO: 77714 - DNA, 120 bp, synthetic construct
  source 1..120: mol_type = other DNA
gaccacatagttggaagtaaagctctcctcagcaaatgtaaaagaacagaaattattacaaactatctctcagaccacagtgcaatcaaactagaactcaggattaagaatctcactcaa

SEQ ID NO: 77715 - DNA, 120 bp, synthetic construct
  source 1..120: mol_type = other DNA
ctctgaatagaccaataacaggctctgaaattgtggcaataatcaatagtttaccaaccaaaaagagtccaggaccagatggattcacagccgaattctaccagaggtacaaggaggaac

SEQ ID NO: 77716 - DNA, 120 bp, synthetic construct
  source 1..120: mol_type = other DNA
agggatgtgaaggacctcttcaaggagaactacaaaccactgctcaaggaaataaaagaggacacaaacaaatggaagaacattccatgctcatgggtaggaagaatcaatatcgtgaaa

SEQ ID NO: 77717 - DNA, 120 bp, synthetic construct
  source 1..120: mol_type = other DNA
ggcgattcctcagggatctagaactagaaataccatttgacccagccatcccattactgggtatatacccaaaggactataaatcatgctgctataaagacacatacacacgtatgttta

SEQ ID NO: 77718 - DNA, 120 bp, synthetic construct; identical to SEQ ID NO: 28112
  source 1..120: mol_type = other DNA

SEQ ID NO: 77719 - DNA, 120 bp, synthetic construct
  source 1..120: mol_type = other DNA
aaacaagaaatggggaaaggattccctattaaataaatggtgctgggaaaactggctagccatatgtagaaagctgaaactggatcccttccttacaccttatacaaaaatcaattcaag

SEQ ID NO: 77720 - DNA, 120 bp, synthetic construct
  source 1..120: mol_type = other DNA
agtaaactattgcaagaacaaaaaaccaaacaccgcatgttctcactcataggtgggaactgaacaatgagaacacatggacacaggaaggggaacatcacactctggggactgttgtgg

SEQ ID NO: 77721 - DNA, 120 bp, synthetic construct; identical to SEQ ID NO: 28113
  source 1..120: mol_type = other DNA

SEQ ID NO: 77722 - DNA, 120 bp, synthetic construct; identical to SEQ ID NO: 28114
  source 1..120: mol_type = other DNA

SEQ ID NO: 77723 - DNA, 120 bp, synthetic construct
  source 1..120: mol_type = other DNA
taactaagatcagagctgaactgaaggagagagagacacaaaaaacccctcaaaaaatcaatgaatccaagagtagttttttggaaaagatcaacaaaattgatagactgctagcgagac

SEQ ID NO: 77724 - DNA, 120 bp, synthetic construct
  source 1..120: mol_type = other DNA
gtattgatgggacatatctcaaaataataagggttgtctatgacaaacccacagccaatattacactgaatgggcaaaagctggaagcattccctttgaaaactggcacaagacagggat

SEQ ID NO: 77725 - DNA, 120 bp, synthetic construct
  source 1..120: mol_type = other DNA
ggaaaggattccctatttaataaatggtgctgggaaaactggctagccatatgtagaaagctgaaactggatcccttccttacaccttatacaaaaattaattgaagatggattaaagac

SEQ ID NO: 77726 - DNA, 120 bp, synthetic construct
  source 1..120: mol_type = other DNA
tgagaacacatggacacaggaaggggaacatcacacaccggggcctatttttgggtggggggaggggggaggcatagcactgggagatatacctaatattaaatgacgagttactgggtg

SEQ ID NO: 77727 - DNA, 120 bp, synthetic construct; identical to SEQ ID NO: 12174
  source 1..120: mol_type = other DNA

SEQ ID NO: 77728 - DNA, 120 bp, synthetic construct
  source 1..120: mol_type = other DNA
tattgcagcatttttcacaatagcaaagatttggaaccaacccaaatgtccaacaatgatagactggattaagaaaatgtgacacatatacaccatggaatactatgcagccataaaaaa

SEQ ID NO: 77729 - DNA, 120 bp, synthetic construct
  source 1..120: mol_type = other DNA
ctggagatgtgttgagatcatttggaggagaagaggcattttggcatttggaattttcagctttttgcacaggtttttcctcatcttcccggatttatctacctttgatctttgaggctg

SEQ ID NO: 77730 - DNA, 120 bp, synthetic construct
  source 1..120: mol_type = other DNA
aataaataaccagctaacatcataatgacaggatcaaattcacacataacaatattagctttaaatgtaaatggactaaatgctccaattaaaagacacagactggcaaattggataaag

SEQ ID NO: 77731 - DNA, 120 bp, synthetic construct
  source 1..120: mol_type = other DNA
caatgaaaagaactagaaaaggaagagcaaacacattcaaaagctagcagaaggcaagaaataactaaaatcagagcagaactgaaggaaatagagacacaaaaaacccttcaaaaaatt

SEQ ID NO: 77732 - DNA, 120 bp, synthetic construct
  source 1..120: mol_type = other DNA
gcattccctttgaaaactggcacaagacagggatgccctctctcaccactcctattcaacatagtgttggaagttctggccagggcaattaggcaggagaaggaaataaagggtattcgg

SEQ ID NO: 77733 - DNA, 120 bp, synthetic construct
  source 1..120: mol_type = other DNA
ccaaaagcaatggcaacaaaagctaaaattgacaagtggtatctaattaaactaaagagcttcagcacagcaaaagaaactaccatcagagtgaacaggcagcctacaaaatgggagaaa

SEQ ID NO: 77734 - DNA, 120 bp, synthetic construct; identical to SEQ ID NO: 12176
  source 1..120: mol_type = other DNA

SEQ ID NO: 77735 - DNA, 120 bp, synthetic construct
  source 1..120: mol_type = other DNA
tgtatatctagaaaaccccatcgtctcagcccaaaatctccttaagctgataagcaacttcagcaaagtctcaggatacaaaatcaatgtgcaaaaatcacaagcagtcttatacacaaa

SEQ ID NO: 77736 - DNA, 120 bp, synthetic construct
  source 1..120: mol_type = other DNA
gggccaaggacatgaacagacacttctcaaaagaagacatttatgcagccaaaagacacatgaaaaaatgctcaccatcactggccatcagagaaatgcaaatcaaaaccacaatgagat

SEQ ID NO: 77737 - DNA, 120 bp, synthetic construct
  source 1..120: mol_type = other DNA
cacgttgtgcacatgtaccctaaaacttaaagtataataataaaaaaaatttacaagagaaaagcaaataaccccatcaaaaagtgggtaaaggatatgaacagacacttctctaaagaa

SEQ ID NO: 77738 - DNA, 120 bp, synthetic construct; identical to SEQ ID NO: 17036
  source 1..120: mol_type = other DNA

SEQ ID NO: 77739 - DNA, 120 bp, synthetic construct; identical to SEQ ID NO: 24857
  source 1..120: mol_type = other DNA

SEQ ID NO: 77740 - DNA, 120 bp, synthetic construct
  source 1..120: mol_type = other DNA
aatgagttcatgtcctttgcagggacatggatgaagctgaaaaccatcattctcagcaagccaacacagaaacagaaaaacaaacagcgcatgttctcattcataagtgggagttgaaca

SEQ ID NO: 77741 - DNA, 120 bp, synthetic construct
  source 1..120: mol_type = other DNA
aggatagcaccactgaccccatagaaatacaaactacaatcagagaacactgtaaacacctctatgtaagtaagctagaaaatctagaagccctcagaaataacgccgcatatctacaac

SEQ ID NO: 77742 - DNA, 120 bp, synthetic construct
  source 1..120: mol_type = other DNA
tttacactgttggtgggactgtaaactagttcaaccattgtggaagtcagtgtggtgattcctcagggatctagaactagaaatactatttgacccagccatcccattactgggtatata

SEQ ID NO: 77743 - DNA, 120 bp, synthetic construct
  source 1..120: mol_type = other DNA
aggagtttgaatccagcctgggcaatatagtgagaccccatctctaaaaaaaaggaaaaataatagaggagaggagaggagaggaaaggaaaggaaaggagaggagagaaaaggaaagga

SEQ ID NO: 77744 - DNA, 120 bp, synthetic construct; identical to SEQ ID NO: 24860
  source 1..120: mol_type = other DNA

SEQ ID NO: 77745 - DNA, 120 bp, synthetic construct; identical to SEQ ID NO: 24861
  source 1..120: mol_type = other DNA

SEQ ID NO: 77746 - DNA, 120 bp, synthetic construct; identical to SEQ ID NO: 24862
  source 1..120: mol_type = other DNA

SEQ ID NO: 77747 - DNA, 120 bp, synthetic construct; identical to SEQ ID NO: 24863
  source 1..120: mol_type = other DNA

SEQ ID NO: 77748 - DNA, 120 bp, synthetic construct; identical to SEQ ID NO: 24864
  source 1..120: mol_type = other DNA

SEQ ID NO: 77749 - DNA, 120 bp, synthetic construct; identical to SEQ ID NO: 24865
  source 1..120: mol_type = other DNA

SEQ ID NO: 77750 - DNA, 120 bp, synthetic construct
  source 1..120: mol_type = other DNA
gcgaccaagtaaccctacacacactgacctttcagggctcagggaagtgacttttttttattatatggcacagtttggcacagttatgtctttagtctttggggtacttttatactgtcc

SEQ ID NO: 77751 - DNA, 120 bp, synthetic construct; identical to SEQ ID NO: 17995
  source 1..120: mol_type = other DNA

SEQ ID NO: 77752 - DNA, 120 bp, synthetic construct; identical to SEQ ID NO: 17996
  source 1..120: mol_type = other DNA

SEQ ID NO: 77753 - DNA, 120 bp, synthetic construct; identical to SEQ ID NO: 24798
  source 1..120: mol_type = other DNA

SEQ ID NO: 77754 - DNA, 120 bp, synthetic construct
  source 1..120: mol_type = other DNA
taagagaccttgcttctggcctgtcttggcttttaacatgccttcctcgctgagcttaatcatttctagcttttgatttacagtgagatgtgcgactcttcacttgaacacttaaaggtt

SEQ ID NO: 77755 - DNA, 120 bp, synthetic construct; identical to SEQ ID NO: 24803
  source 1..120: mol_type = other DNA

SEQ ID NO: 77756 - DNA, 120 bp, synthetic construct; identical to SEQ ID NO: 24804
  source 1..120: mol_type = other DNA

SEQ ID NO: 77757 - DNA, 120 bp, synthetic construct
  source 1..120: mol_type = other DNA
tgtaacctctgcctctcaggttcaaatgattctcccacctcagcctcccgagtagctgggattacaggcacctgccaccacatcagtctaattttatatatatatataatatagatatac

SEQ ID NO: 77758 - DNA, 120 bp, synthetic construct
  source 1..120: mol_type = other DNA
gagactttctgtaacccactttatactgtagtttgctttttatttttctttttttagacagtctcgctcttttgccaggctggagtgcagtggcacgatctcggctcactgcaacctctg

SEQ ID NO: 77759 - DNA, 120 bp, synthetic construct
  source 1..120: mol_type = other DNA
aggggcggccgggcagaggcgcccctcacctcccggacggggcgagcagcctgctttctatgtgcagttttcctatgaacattccaccacactaaagtctaatatcagtaaatgtgcgct

SEQ ID NO: 77760 - DNA, 120 bp, synthetic construct; identical to SEQ ID NO: 13240
  source 1..120: mol_type = other DNA

SEQ ID NO: 77761 - DNA, 120 bp, synthetic construct; identical to SEQ ID NO: 3549
  source 1..120: mol_type = other DNA

SEQ ID NO: 77762 - DNA, 120 bp, synthetic construct
  source 1..120: mol_type = other DNA
tctacacaacactgccctagatatccaagtcaatgcaataagacaagaaaagaaaaaaggtggtataaaaattagaaaggggccgggtgcagtggctcatgcctgtaatccaagcacttt

SEQ ID NO: 77763 - DNA, 120 bp, synthetic construct; identical to SEQ ID NO: 13242
  source 1..120: mol_type = other DNA

SEQ ID NO: 77764 - DNA, 120 bp, synthetic construct; identical to SEQ ID NO: 13243
  source 1..120: mol_type = other DNA

SEQ ID NO: 77765 - DNA, 120 bp, synthetic construct; identical to SEQ ID NO: 13244
  source 1..120: mol_type = other DNA

SEQ ID NO: 77766 - DNA, 120 bp, synthetic construct
  source 1..120: mol_type = other DNA
tgtgtgtgtgtgtgtgtgtgtgtgtgtgtgtgtgtgtgtgtgtgcggattcgttgttaggatagagaaaaacagtttttaaaagacacaggaggagagaaagaagaaaaagctttctcca

SEQ ID NO: 77767 - DNA, 120 bp, synthetic construct; identical to SEQ ID NO: 33757
  source 1..120: mol_type = other DNA

SEQ ID NO: 77768 - DNA, 120 bp, synthetic construct
  source 1..120: mol_type = other DNA
ggtcaatacaaatttctcatatatagacacacatatacatatctataagaatttttgtattttataaaggagaggccgggcgcggtggctcacgcctgtaatcccagcactttgggaggc

SEQ ID NO: 77769 - DNA, 120 bp, synthetic construct
  source 1..120: mol_type = other DNA
tcttgaactcctaagctcaagcaatccttccaccttggcctcccaaagtgctgggattacaggcatcagtcactgcactcagcctgtccactttttcttttaatcttttttttttttttt

SEQ ID NO: 77770 - DNA, 120 bp, synthetic construct
  source 1..120: mol_type = other DNA
tcattcacttaaaaagtatgtgggaagcactgtgccttttccagacactgggatgtaagaatgacacagctcaccctcctcacatacacacaacccgacaaggagagacagcaaacaggt

SEQ ID NO: 77771 - DNA, 120 bp, synthetic construct
  source 1..120: mol_type = other DNA
actgtactgggagctgagaggaccagggaagggaggccccaggggtggcccctggcagcctaaagccccacaaaaagaagagagggacttcaaaccgtccgtgatgggcgcggtggagaa

SEQ ID NO: 77772 - DNA, 120 bp, synthetic construct
  source 1..120: mol_type = other DNA
tgggtaggctggccagcaggtacagcacgaagtcgcccacccactgcaagagctgctgcagcgcctgcagtgtgttcatgtccagcacaaattcctccgtcttgaggttgatcatgacct

SEQ ID NO: 77773 - DNA, 120 bp, synthetic construct; identical to SEQ ID NO: 19332
  source 1..120: mol_type = other DNA

SEQ ID NO: 77774 - DNA, 120 bp, synthetic construct; identical to SEQ ID NO: 19333
  source 1..120: mol_type = other DNA

SEQ ID NO: 77775 - DNA, 120 bp, synthetic construct
  source 1..120: mol_type = other DNA
ccttcccccgggggcgcctccctctggcaccctcccagccccagccccagccccagacccacgtgccccagcagctcgccttcccctggttgtcaatgcccaccagcccctgccccacgt

SEQ ID NO: 77776 - DNA, 120 bp, synthetic construct; identical to SEQ ID NO: 19334
  source 1..120: mol_type = other DNA

SEQ ID NO: 77777 - DNA, 120 bp, synthetic construct; identical to SEQ ID NO: 19335
  source 1..120: mol_type = other DNA

SEQ ID NO: 77778 - DNA, 120 bp, synthetic construct; identical to SEQ ID NO: 19336
  source 1..120: mol_type = other DNA

SEQ ID NO: 77779 - DNA, 120 bp, synthetic construct
  source 1..120: mol_type = other DNA
cgtgatccgcccgcctcggcctcccaaagttcctgggattacaggcatgatccactgcgcccagcctaaaaaaatttttaataaaaaaaaatatatatgtgtcaactgagaaatactatt

SEQ ID NO: 77780 - DNA, 120 bp, synthetic construct
  source 1..120: mol_type = other DNA
ttttgctgccatcttggttttggtgggttttggctggcttctttaccacaacctgttttatcagcaaggtgtttgtgacctgtacttgtgctgacctcctatctcatcctgtgactaaga

SEQ ID NO: 77781 - DNA, 120 bp, synthetic construct
  source 1..120: mol_type = other DNA
tgagaagtgaggagcccctccgcccggcagccgccccgtctgagaagtgaggagtctctccgcccggcagccacccggtctgggaagtgaggagcgtctccgcccggcagccaccctgtc

SEQ ID NO: 77782 - DNA, 120 bp, synthetic construct; identical to SEQ ID NO: 33040
  source 1..120: mol_type = other DNA

SEQ ID NO: 77783 - DNA, 120 bp, synthetic construct; identical to SEQ ID NO: 33041
  source 1..120: mol_type = other DNA

SEQ ID NO: 77784 - DNA, 120 bp, synthetic construct; identical to SEQ ID NO: 33042
  source 1..120: mol_type = other DNA

SEQ ID NO: 77785 - DNA, 120 bp, synthetic construct; identical to SEQ ID NO: 33043
  source 1..120: mol_type = other DNA

SEQ ID NO: 77786 - DNA, 120 bp, synthetic construct; identical to SEQ ID NO: 33044
  source 1..120: mol_type = other DNA

SEQ ID NO: 77787 - DNA, 120 bp, synthetic construct; identical to SEQ ID NO: 33045
  source 1..120: mol_type = other DNA

SEQ ID NO: 77788 - DNA, 120 bp, synthetic construct
  source 1..120: mol_type = other DNA
catctttattgattggcagatttaatcttgttaagattatagtcatcccaaattaatcaacatatttaacacaattcctatcaaagtccagctggtctcccccgccccccccccccccca

SEQ ID NO: 77789 - DNA, 120 bp, synthetic construct; identical to SEQ ID NO: 15671
  source 1..120: mol_type = other DNA

SEQ ID NO: 77790 - DNA, 120 bp, synthetic construct
  source 1..120: mol_type = other DNA
gatttatttcaaaaggaagatttctttttttttttttgaagtggagtctcgctctgttacccagactggagtgcagtggcatgatctcagctcattgaaacctccacttcccgagttcaa

SEQ ID NO: 77791 - DNA, 120 bp, synthetic construct; identical to SEQ ID NO: 5559
  source 1..120: mol_type = other DNA

SEQ ID NO: 77792 - DNA, 120 bp, synthetic construct; identical to SEQ ID NO: 26890
  source 1..120: mol_type = other DNA

SEQ ID NO: 77793 - DNA, 120 bp, synthetic construct; identical to SEQ ID NO: 8876
  source 1..120: mol_type = other DNA

SEQ ID NO: 77794 - DNA, 120 bp, synthetic construct
  source 1..120: mol_type = other DNA
cgagaattgcttgaacccaggaggcggaggttgcaatgagccgagattgtgccactgtactccagtctgggcaacaaagtgagactcttaaaaaaaaaaaaaaaaaaaaaaatatatata

SEQ ID NO: 77795 - DNA, 120 bp, synthetic construct; identical to SEQ ID NO: 15400
  source 1..120: mol_type = other DNA

SEQ ID NO: 77796 - DNA, 120 bp, synthetic construct
  source 1..120: mol_type = other DNA
aattgtactaacttgagccatgcccatctggctgaaggtgaatacataattaagctataagaccagggcaatgctgagccccaaatccctagatggcaaaatgctctttagaaaaattcc

SEQ ID NO: 77797 - DNA, 120 bp, synthetic construct; identical to SEQ ID NO: 15401
  source 1..120: mol_type = other DNA

SEQ ID NO: 77798 - DNA, 120 bp, synthetic construct; identical to SEQ ID NO: 6976
  source 1..120: mol_type = other DNA

SEQ ID NO: 77799 - DNA, 120 bp, synthetic construct; identical to SEQ ID NO: 6977
  source 1..120: mol_type = other DNA

SEQ ID NO: 77800 - DNA, 120 bp, synthetic construct; identical to SEQ ID NO: 6978
  source 1..120: mol_type = other DNA

SEQ ID NO: 77801 - DNA, 120 bp, synthetic construct; identical to SEQ ID NO: 6979
  source 1..120: mol_type = other DNA

SEQ ID NO: 77802 - DNA, 120 bp, synthetic construct; identical to SEQ ID NO: 6973
  source 1..120: mol_type = other DNA

SEQ ID NO: 77803 - DNA, 120 bp, synthetic construct; identical to SEQ ID NO: 6974
  source 1..120: mol_type = other DNA

SEQ ID NO: 77804 - DNA, 120 bp, synthetic construct; identical to SEQ ID NO: 6975
  source 1..120: mol_type = other DNA

SEQ ID NO: 77805 - DNA, 120 bp, synthetic construct; identical to SEQ ID NO: 6980
  source 1..120: mol_type = other DNA

SEQ ID NO: 77806 - DNA, 120 bp, synthetic construct; identical to SEQ ID NO: 6981
  source 1..120: mol_type = other DNA

SEQ ID NO: 77807 - DNA, 120 bp, synthetic construct; identical to SEQ ID NO: 6982
  source 1..120: mol_type = other DNA

SEQ ID NO: 77808 - DNA, 120 bp, synthetic construct; identical to SEQ ID NO: 6983
  source 1..120: mol_type = other DNA

SEQ ID NO: 77809 - DNA, 120 bp, synthetic construct; identical to SEQ ID NO: 19795
  source 1..120: mol_type = other DNA

SEQ ID NO: 77810 - DNA, 120 bp, synthetic construct
  source 1..120: mol_type = other DNA
caggcctttctatgatcacactgtccttccttggccagattgaaaactgggtgacagagggtcctagtgaagacgaggccgtgtgcgtgaactgccagaataacagctatggggagaaat

SEQ ID NO: 77811 - DNA, 120 bp, synthetic construct
  source 1..120: mol_type = other DNA
aagacttggaaccaacctaaatgtccatcaatgatagaatggattaagaaaatgtggcacatatacaccatggaatactatgcagccataaaaaatgatgagttcatgtcctttgtaggg

SEQ ID NO: 77812 - DNA, 120 bp, synthetic construct; identical to SEQ ID NO: 23836
  source 1..120: mol_type = other DNA

SEQ ID NO: 77813 - DNA, 120 bp, synthetic construct
  source 1..120: mol_type = other DNA
ttacaggcatgatccactgcgctgggcccctgctaccatttttttttattctgagacggagtcttgctctgttgcccaggctggagtgcagtggtgcgattttggctcactgcaaccttc

SEQ ID NO: 77814 - DNA, 120 bp, synthetic construct; identical to SEQ ID NO: 23837
  source 1..120: mol_type = other DNA

SEQ ID NO: 77815 - DNA, 120 bp, synthetic construct; identical to SEQ ID NO: 28101
  source 1..120: mol_type = other DNA

SEQ ID NO: 77816 - DNA, 120 bp, synthetic construct
  source 1..120: mol_type = other DNA
gaatcaccacactgacttccacaatggttgaactagtttacagtcccaccagcagtgtcaaagtgttcctatttctccacatcctctccagcacctgttgtttcctgactttttaatgat

SEQ ID NO: 77817 - DNA, 120 bp, synthetic construct
  source 1..120: mol_type = other DNA
aagtagttttttccaattctgtgaagaaagtcattggtagcttgatggggatggcattgaatctataaattaccttgggcagtatggccattttcacgatattgattcttcctacccatg

SEQ ID NO: 77818 - DNA, 120 bp, synthetic construct
  source 1..120: mol_type = other DNA
gggggagggatagcattaggagatatacctaatgtaaatgacgaattaatggatgcggcacaccaacatggtacatgtatacatatgtagcaaacctgaacgttgtgcacatgtacccta

SEQ ID NO: 77819 - DNA, 120 bp, synthetic construct
  source 1..120: mol_type = other DNA
gagaagagcaactccaagacacataattgtcagattcaccaaagttgaaatgaaggcaaaaatgttaagggcagccagagagaaaggttgggttacccacgaagagaagaccatcagact

SEQ ID NO: 77820 - DNA, 120 bp, synthetic construct
  source 1..120: mol_type = other DNA
aggaattgaattcagctctgcactaagcagacctaatagacatctaaagaactctccaccccaaatcaacagaatatacatttttttcagcaccacaccacacctattccaaaattgacc

SEQ ID NO: 77821 - DNA, 120 bp, synthetic construct
  source 1..120: mol_type = other DNA
tcaatagatgcagaaaaggcctttgacaaaatttaacaactcttcatgctaaacactctcaataaaataggtactgatgggacgtacctcaaaataataagagctatctatgacaaaccc

SEQ ID NO: 77822 - DNA, 120 bp, synthetic construct
  source 1..120: mol_type = other DNA
cctgaatggtaatgcctaggttttcttctagggtttttatggttttaggtctaacatgtaagtctttaaaccatcttgaattaatttttgtataaggtgtaaggaagggatccagtttca

SEQ ID NO: 77823 - DNA, 120 bp, synthetic construct
  source 1..120: mol_type = other DNA
tattaattaccttgggcaatatggccattttcacaatattgattcttcctacccatgagcatggaatgttcttccatttgtttgtatcctcttttatttccttgagcagtggtttgtagt

SEQ ID NO: 77824 - DNA, 120 bp, synthetic construct; identical to SEQ ID NO: 28103
  source 1..120: mol_type = other DNA

SEQ ID NO: 77825 - DNA, 120 bp, synthetic construct
  source 1..120: mol_type = other DNA
gaagctctttagtttaatgagataccatttgtcaattttgtcttttcttgccattgcttttggtgttttggacatgaagtcgttgcccatgcctatgtcctgaatggtaatgcctaggtt

SEQ ID NO: 77826 - DNA, 120 bp, synthetic construct
  source 1..120: mol_type = other DNA
ataagaatgcttgtgacttttgtacattgattttgtatcctgagactttgctgaagttgcttatcaccttaaggagattttgggctgagacaatggggttttccagatatacaatcatgt

SEQ ID NO: 77827 - DNA, 120 bp, synthetic construct
  source 1..120: mol_type = other DNA
aagagaaagcaggaaagatccaaaattgacaccctaacatcacaattaaaagaactacaaaagcaagagcaaacacattcaaaagctagcagaaggcaagaaataactaaaatcagagca

SEQ ID NO: 77828 - DNA, 120 bp, synthetic construct; identical to SEQ ID NO: 28104
  source 1..120: mol_type = other DNA

SEQ ID NO: 77829 - DNA, 120 bp, synthetic construct; identical to SEQ ID NO: 28096
  source 1..120: mol_type = other DNA

SEQ ID NO: 77830 - DNA, 120 bp, synthetic construct
  source 1..120: mol_type = other DNA
tgtttaacaaagcacatcctgcaccgcccttaatccatttaactctgagttgacacagcacacatttcagagagcacggggttgggggtaaggtcacagaatctcaaggcagaagaattt

SEQ ID NO: 77831 - DNA, 120 bp, synthetic construct
  source 1..120: mol_type = other DNA
atatggatggatggtgaggcctcccatggtcggtccatggacacagggatccacacgccctctcttgctctcaccagcagaatacggtgttgccaattaaaagttgaatcaatgcaagta

SEQ ID NO: 77832 - DNA, 120 bp, synthetic construct
  source 1..120: mol_type = other DNA
tggggccaggtacccatacactatcattaacatatacttctataggattatccatccatgtgactgcccgaattaagggcgggaaaggcacataggcccagttggtatagttagctgcag

SEQ ID NO: 77833 - DNA, 120 bp, synthetic construct
  source 1..120: mol_type = other DNA
caaatgaaggtacatgcgtgacacagacctctgggattaactcctgcctcttgagtgggcaggtgtaagacttgacactgggtgcaatgttgtacaatatcttttgcctgtttccatgtg

SEQ ID NO: 77834 - DNA, 120 bp, synthetic construct
  source 1..120: mol_type = other DNA
atgatgcctgttggagaatgtgcagtggcaaaaatcaaaagttggagtggggctaagggatctattctatttatttgcgctgactgaattttttcttccactaatttaatttcttttgtt

SEQ ID NO: 77835 - DNA, 120 bp, synthetic construct
  source 1..120: mol_type = other DNA
taccctattccttctcttttttgatttattttagcctcaaatggaattttaatgccatcttcatttttccctagtccctttcctggtatatatcccctcttggtcatgattttttgactc

SEQ ID NO: 77836 - DNA, 120 bp, synthetic construct
  source 1..120: mol_type = other DNA
tagcccaatgttttccttttttacatcttggacataagtcaggtggctctctacctgttgtagttgcttgaatagttatattctgtttgtttaagactgggcaattcttttttaagtgac

SEQ ID NO: 77837 - DNA, 120 bp, synthetic construct
  source 1..120: mol_type = other DNA
ctgtgggaggctctccctcttgggctccttctccaggtggcatcggttctaacgttactgggaattgccatgcctcagtatctccttcctttcttgatttatcaataatttcatgtaatt

SEQ ID NO: 77838 - DNA, 120 bp, synthetic construct
  source 1..120: mol_type = other DNA
gctcgagcgtaccttcaccctagagaaaagcctccacgttgggcaccagatgtaggggtgggttgcccctacacacctgtgggtgtttctcgtaaggtgggacgagagatttggaaaaga

SEQ ID NO: 77839 - DNA, 120 bp, synthetic construct; identical to SEQ ID NO: 28097
  source 1..120: mol_type = other DNA

SEQ ID NO: 77840 - DNA, 120 bp, synthetic construct; identical to SEQ ID NO: 28095
  source 1..120: mol_type = other DNA

SEQ ID NO: 77841 - DNA, 120 bp, synthetic construct
  source 1..120: mol_type = other DNA
gaaacatttgttgtatataatgattggtgatggcctggatacggttttggatgaattgaaaaactaaacggaagatacaaggtccgaataaaagaagaagaaaaatgggtattaaaggac

SEQ ID NO: 77842 - DNA, 120 bp, synthetic construct
  source 1..120: mol_type = other DNA
cagaggaagaagagaccttgtgtgaggcaaaactggagatgtaaagtaaaaagatgaggagtgctgaaaggggtgtcttgtacccagattcctagggatccagctagggaggcagctgtc

SEQ ID NO: 77843 - DNA, 120 bp, synthetic construct
  source 1..120: mol_type = other DNA
aagaattctgaccatgctaaccatgcctaggaaggaaaggagtttttgttttgtagaaggtgatggggtttggagatcagtcagacatgattggcagggagagcacgtgtgtttttatga

SEQ ID NO: 77844 - DNA, 120 bp, synthetic construct
  source 1..120: mol_type = other DNA
aagcctggctgtcaatacccacaacagttatggaggcaagggaaacaggcccttgaaaagaatgtaatgtggagtgggtagcctccgtattgattaagaaggggacgggcttaccttcca

SEQ ID NO: 77845 - DNA, 120 bp, synthetic construct
  source 1..120: mol_type = other DNA
cctggtgaggaggggagaggtcagatgggtctgtagaaaggaagattagaaagactcagcgacgcttggggttgggactgaggggacaggcaggagggaaagaaggaagatttgggatga

SEQ ID NO: 77846 - DNA, 120 bp, synthetic construct
  source 1..120: mol_type = other DNA
tatgtcttttggctgcataaatgtcttcttttgagaagtgtctgttcgtatccttcgcccactttttgatggggttgtttatttttgtcttgtaaatttgtttgagttcattgtagattc

SEQ ID NO: 77847 - DNA, 120 bp, synthetic construct
  source 1..120: mol_type = other DNA
gatggcattgaatctgtaaattaccttgggcagtatggccattttcacgatatagattcttcctacccatgagcatggaatggtcttctatttgtttgtgtcctcttttacttcattgag

SEQ ID NO: 77848 - DNA, 120 bp, synthetic construct
  source 1..120: mol_type = other DNA
agtttcagaaggaatggtaccagctcctcctagtacctctggtagaattcggctgtgaatccatctggtcctggacctctttttggttggtaagctattgattattgccacaatttcaga

SEQ ID NO: 77849 - DNA, 120 bp, synthetic construct
  source 1..120: mol_type = other DNA
tgggtttccccttgtgggtaaccatacctttctctctggctgcccttaacattttttccttcatttcaactttggtgaatctgacaattatgtgtcttggagttgctcttctcaaggagt

SEQ ID NO: 77850 - DNA, 120 bp, synthetic construct; identical to SEQ ID NO: 28098
  source 1..120: mol_type = other DNA

SEQ ID NO: 77851 - DNA, 120 bp, synthetic construct
  source 1..120: mol_type = other DNA
ctgttcatgtcctttgcccactttttgatggggttgtttgtttttttcttgtaaatttatttgagttcattgtagattctggatattagccctttgtcagatgagtaggttgtgaaaatt

SEQ ID NO: 77852 - DNA, 120 bp, synthetic construct
  source 1..120: mol_type = other DNA
catgatttggctctatgtttgtctgttcttggtgtataagaatgcttgtgatttttgcacattgatcttgtatcctgagactttgctgaagttgcttatcagcttaaggagattttgggc

SEQ ID NO: 77853 - DNA, 120 bp, synthetic construct
  source 1..120: mol_type = other DNA
gtgtatgtgtctaggaatttatccatttcttctagattttctggtttatttgcgtagaggtgttcgtagtattctctgatggtagtttgtatttctgtgtgatcggtggtggtatcccgt

SEQ ID NO: 77854 - DNA, 120 bp, synthetic construct
  source 1..120: mol_type = other DNA
tgagttcaattcctgggtatccttgttgactttctgtctcatgatctgtctaatgttgacagtgcggtgttaacatctcccattattaatgtgtgggagtctaagtctctttgtaggtca

SEQ ID NO: 77855 - DNA, 120 bp, synthetic construct
  source 1..120: mol_type = other DNA
gattggggaagttctcctggataatatcctgcagagtgttttccaacttggctccattctccccgtcactttcaggtacaccaatcagacgtagatttggtcttttcacatagtcccata

SEQ ID NO: 77856 - DNA, 120 bp, synthetic construct
  source 1..120: mol_type = other DNA
aatggcgggcgcccctcccccaaccttgctgcccccttgcagtttgatctcagagggctgtgctagcaatcagcaagactccgtgggcgtattaccctccgagccatgtgcgggatataa

SEQ ID NO: 77857 - DNA, 120 bp, synthetic construct; identical to SEQ ID NO: 28099
  source 1..120: mol_type = other DNA

SEQ ID NO: 77858 - DNA, 120 bp, synthetic construct
  source 1..120: mol_type = other DNA
gtcctttggggtatatacccagtagtgggatggctgggtcaaatggtatttctagttctagatccctgaggaatcgccacactgacttccacaagggttgaactagtttacagtcccacc

SEQ ID NO: 77859 - DNA, 120 bp, synthetic construct
  source 1..120: mol_type = other DNA
tgatattgattcttcctacccatgagcatggaatgttcttccatttgtttgtatcctcttttatttccttgagcagtggtttgtagttctccttgaagaggtccttcacatcccttgtaa

SEQ ID NO: 77860 - DNA, 120 bp, synthetic construct; identical to SEQ ID NO: 28100
  source 1..120: mol_type = other DNA

SEQ ID NO: 77861 - DNA, 120 bp, synthetic construct
  source 1..120: mol_type = other DNA
acaaaaaaccaaacaccacatgttctcactcatagatgggaattgaacaataagaacacatggacacaggaaggggaccatcagctgattttctaagcagcagctcttattaacaccatg

SEQ ID NO: 77862 - DNA, 120 bp, synthetic construct; identical to SEQ ID NO: 27012
  source 1..120: mol_type = other DNA

SEQ ID NO: 77863 - DNA, 120 bp, synthetic construct
  source 1..120: mol_type = other DNA
gttgtttaaaagtgtgtggcacctccccattttctctcttcctcctgctctggccatgtaagatgccttgctccccttttgcctttcaccataattggaacctcttttctttatatatat

SEQ ID NO: 77864 - DNA, 120 bp, synthetic construct
  source 1..120: mol_type = other DNA
atgaagtgagaagagaagtttagagaaaaaataataaaaagaaatgaacaaggcttccaagaaatatgtgactatgtgaaaagaccaaatcaacatctgattggtgtacctgaaagtgac

SEQ ID NO: 77865 - DNA, 120 bp, synthetic construct
  source 1..120: mol_type = other DNA
gagacaaaggaggccattacataatggtaaaggcatcaattcaacaagaagaactaactatcctaaatatatatgcacccaatataggagcacccagattcataaagcaagtccttagtg

SEQ ID NO: 77866 - DNA, 120 bp, synthetic construct
  source 1..120: mol_type = other DNA
tggtactggtaccaaaacagagatatagacctatggaacagaacacagcactcagaaataatgtcgcatatctacaactacctgatgtttgacaaacctgacaaaaacaagcaatgggga

SEQ ID NO: 77867 - DNA, 120 bp, synthetic construct
  source 1..120: mol_type = other DNA
agaaaatgtggcgcatatataccatggaatactatgcagccataaaaaatgatgagttcatgtcctttgtagggacatggatgaaactggaaaccatcattctcagcaaactatcgcaag

SEQ ID NO: 77868 - DNA, 120 bp, synthetic construct; identical to SEQ ID NO: 27015
  source 1..120: mol_type = other DNA

SEQ ID NO: 77869 - DNA, 120 bp, synthetic construct
  source 1..120: mol_type = other DNA
cctgactttttcatgatcaccattctaactggtgtgagatggtaattcactgtgcttttgatttgcatttatctgatgaccagcgatgatgagcattatttcatgtgtctgttggttgca

SEQ ID NO: 77870 - DNA, 120 bp, synthetic construct
  source 1..120: mol_type = other DNA
gggctaatatccagaatctacaatgaactcaaacaaatttacaagaaaaaaacaaacaaccccatcaaaaagtgggcgaaggatatgagcagacacttctcaaaagaagacatttatgcg

SEQ ID NO: 77871 - DNA, 120 bp, synthetic construct
  source 1..120: mol_type = other DNA
tcctgctttctcttgtgggcatttagtgctataaatttccctctacacactgttttgtatgtgtcccagagagtctggtattttgtgtctttgttctcattggtttcaaagaacatcttt

SEQ ID NO: 77872 - DNA, 120 bp, synthetic construct
  source 1..120: mol_type = other DNA
gaattttcaacccagcatttcatatccagccaaactaagcttcataagtgaaggagaaataaaatcctttacagacaagcaaatgctgagagatgttgtcaccaccaggcctgccctaaa

SEQ ID NO: 77873 - DNA, 120 bp, synthetic construct
  source 1..120: mol_type = other DNA
agggggaagagaagggaagggaagggaagggaagggaagggaagggaaggaaagggaaggaaaggaattctttttctttataatataattgcccagtttcaggtattttgtaataagcaa

SEQ ID NO: 77874 - DNA, 120 bp, synthetic construct
  source 1..120: mol_type = other DNA
ttttgtagagatggggttgcacctgaggtgggcagatcgcgaggtcaggaatttgagaccagcttggccaacatggtgaaaccccgtctatactaaaaatacaaaaaaaattagccaggt

SEQ ID NO: 77875 - DNA, 120 bp, synthetic construct
  source 1..120: mol_type = other DNA
ggaaaaaaaaagaaagaaaagaaaaagaagaaaaagaagaaaaaaattgtcaagcccccgaactgaaggttacgagcggcccgtcagcagcccacatgtaaccgaactgtcgtgtttcat

SEQ ID NO: 77876 - DNA, 120 bp, synthetic construct; identical to SEQ ID NO: 19846
  source 1..120: mol_type = other DNA

SEQ ID NO: 77877 - DNA, 120 bp, synthetic construct
  source 1..120: mol_type = other DNA
gagagagcgaggtggtgtagaggacggatgggctaatgggggccagcgccggagagtgggggatgcagggacagggggtgcggaagcggccgggacgcggggtccccgccccgagaccta

SEQ ID NO: 77878 - DNA, 120 bp, synthetic construct
  source 1..120: mol_type = other DNA
ggctggccgtttaaggcagtccgaggggaagggtctggaggccttgcctttcctcaaggccggcgcaccccagataggggttttggagcagaaaattaatttaaatcactttttaattaa

SEQ ID NO: 77879 - DNA, 120 bp, synthetic construct; identical to SEQ ID NO: 32203
  source 1..120: mol_type = other DNA

SEQ ID NO: 77880 - DNA, 120 bp, synthetic construct
  source 1..120: mol_type = other DNA
gtcttctactttctacacagacacagcaaccatccgatttctcaatcttttccccacctttcccgcctttctattccacaaagcccccattgtcatcctggcccgttctcaatgagctgt

SEQ ID NO: 77881 - DNA, 120 bp, synthetic construct; identical to SEQ ID NO: 32204
  source 1..120: mol_type = other DNA

SEQ ID NO: 77882 - DNA, 120 bp, synthetic construct; identical to SEQ ID NO: 20447
  source 1..120: mol_type = other DNA

SEQ ID NO: 77883 - DNA, 120 bp, synthetic construct; identical to SEQ ID NO: 20448
  source 1..120: mol_type = other DNA

SEQ ID NO: 77884 - DNA, 120 bp, synthetic construct
  source 1..120: mol_type = other DNA
ctgaggctgtgtaccagctcccggcgtgactggcttctcggcagaccactcggttggacatcttggtgcctgtgccgcctatggtgcacgaggatgaatgaggaggcggcggcggcggcg

SEQ ID NO: 77885 - DNA, 120 bp, synthetic construct
  source 1..120: mol_type = other DNA
taacaaaatgtattcatctttcttggaactgaaaaataaatctatgtacaaaacaggaagagatcaggctcttgtcacccactcctaaccctctgcagatttcctccgggatgctccgag

SEQ ID NO: 77886 - DNA, 120 bp, synthetic construct
  source 1..120: mol_type = other DNA
gtgccgtgagttgcagcttgatggcgctcgagttgatcttggtggccaccagcagctccttcatgcccttcatcttctcactctggaaagtgagcactggaccctccggcggtggtgatg

SEQ ID NO: 77887 - DNA, 120 bp, synthetic construct
  source 1..120: mol_type = other DNA
gagggagtctggccatgaaactgaaggcacagggtagaaacctctaaaataccttcagtcccgtccaacgtgggcccaggacctcagttatagcaaaagggaacatagctgtctgctcag

SEQ ID NO: 77888 - DNA, 120 bp, synthetic construct
  source 1..120: mol_type = other DNA
gtctacaggactgctggctgaggcctggggcagactgcaggggtggggcctgccctccgagctcagggcccttctctttctcagacactcttctacacatcaccaaagactttcaagccc

SEQ ID NO: 77889 - DNA, 120 bp, synthetic construct
  source 1..120: mol_type = other DNA
caatggaagggttgatggcacacaccatgaacgccacctccatcttgcggtcacagcgcatgtatgatcctttcaggtacagccagctcttagggggggatgagatcattatgtctcatg

SEQ ID NO: 77890 - DNA, 120 bp, synthetic construct
  source 1..120: mol_type = other DNA
cgggcttggtgcaaagctctttgcaagccctgactcttaagccttttgaggtcaagccccttctctgtctcaaacatttttgaccaggtgcggtggctcacgcctgtaatcccagcactt

SEQ ID NO: 77891 - DNA, 120 bp, synthetic construct
  source 1..120: mol_type = other DNA
catatcatttcccctctctgggcttcagtttcccaactgcaaagaggaaaataacacctgccgaacctcacaaggcttacagttcttaaaagggttctgtaaaccatggagggttttgaa

SEQ ID NO: 77892 - DNA, 120 bp, synthetic construct
  source 1..120: mol_type = other DNA
tgtaaagtctgtccagaaagcgcacccaggtcaagcccccaaaccccaaggagagtcctggcctcggtccccctcgcccacctccgcgcttacatcccacactaggcaccgcggcgcacg

SEQ ID NO: 77893 - DNA, 120 bp, synthetic construct; identical to SEQ ID NO: 18021
  source 1..120: mol_type = other DNA

SEQ ID NO: 77894 - DNA, 120 bp, synthetic construct; identical to SEQ ID NO: 28932
  source 1..120: mol_type = other DNA

SEQ ID NO: 77895 - DNA, 120 bp, synthetic construct; identical to SEQ ID NO: 28933
  source 1..120: mol_type = other DNA

SEQ ID NO: 77896 - DNA, 120 bp, synthetic construct
  source 1..120: mol_type = other DNA
gagctgagatcatgccattgtactccagcctgggctacagagtgagacagaatctgtctcaaaaaaaaaaaaaaaaaaaaaaatcaagacaagtgatagcacatatattagtcagggttt

SEQ ID NO: 77897 - DNA, 120 bp, synthetic construct
  source 1..120: mol_type = other DNA
tacggagacattccattgcccagggatgggcaggagagcaatgccttcctcttgtctcaactgccaagaggcgttccttcctcttatactaatcctcctcagcacagatcctttacgggt

SEQ ID NO: 77898 - DNA, 120 bp, synthetic construct; identical to SEQ ID NO: 21309
  source 1..120: mol_type = other DNA

SEQ ID NO: 77899 - DNA, 120 bp, synthetic construct
  source 1..120: mol_type = other DNA
aactctatgacagtatataagactttgggctaaggaagcaagtttgcaacaagtttttaaaaaataataaaacaggaggcagggcacggtggctcacacctgtaatcccagcactttggg

SEQ ID NO: 77900 - DNA, 120 bp, synthetic construct
  source 1..120: mol_type = other DNA
ctttgctattgtgaataatgtcgcaataaacatacgtgtgcatgtgtctttatagcagcatgatttatagtcctttgggtatatacccagtaatgggatggctgggtcaaatggtatttc

SEQ ID NO: 77901 - DNA, 120 bp, synthetic construct
  source 1..120: mol_type = other DNA
gtatagtttgaagtcaggtagcgtgatgcctccagctttgttcttttggctcaggattgacttggcgatgcgggctcttttttggttccatatgaactttaaagtagttttttccaattc

SEQ ID NO: 77902 - DNA, 120 bp, synthetic construct
  source 1..120: mol_type = other DNA
gtctctgcccagctttggtatcagaatgatgctggcctcataaaatgagttagggaggattctctctttttctattgattggaatagtttcagaaggaatggtaccagttcctccttgca

SEQ ID NO: 77903 - DNA, 120 bp, synthetic construct
  source 1..120: mol_type = other DNA
tctcttacatttgctgaggagagctttacttccaagtatgtggtcaattttggaataggtgtggtgtggtgctgaaaaaaatgtatattctgttgatttggggtggagagttctgtagat

SEQ ID NO: 77904 - DNA, 120 bp, synthetic construct
  source 1..120: mol_type = other DNA
aagaatatggaatattggcccccactctcttctggcttgtagggtttctgccaagagatccgctgttagtctgatgggcttccctttgagggtaacccgacctttctctctggctgccct

SEQ ID NO: 77905 - DNA, 120 bp, synthetic construct
  source 1..120: mol_type = other DNA
aagtctgttggagtaccctgccgtgtgaggtgtcagtgtgcccctgctggggggtgcctcccagttaggctgctcgggggtcaggggtcagggacccacttgaggaggcagtctgcccat

SEQ ID NO: 77906 - DNA, 120 bp, synthetic construct; identical to SEQ ID NO: 29962
  source 1..120: mol_type = other DNA

SEQ ID NO: 77907 - DNA, 120 bp, synthetic construct
  source 1..120: mol_type = other DNA
agaaatgacctaatatatatatagttttttttttttttaagatggagtcttactctgtttcccaggctggagtgcagtgatgccatgtcaactcactgcaacctccgcctcccacattca

SEQ ID NO: 77908 - DNA, 120 bp, synthetic construct
  source 1..120: mol_type = other DNA
gtacatgtgcacatatatacatatatgtgtgtatgtgtacacatatacatatgtgtgtatgtgtatatgtgtacacatatacgtgtgtatgtgtatatgtgtacacatatacgtgtgtgt

SEQ ID NO: 77909 - DNA, 120 bp, synthetic construct; identical to SEQ ID NO: 18723
  source 1..120: mol_type = other DNA

SEQ ID NO: 77910 - DNA, 120 bp, synthetic construct; identical to SEQ ID NO: 18724
  source 1..120: mol_type = other DNA

SEQ ID NO: 77911 - DNA, 120 bp, synthetic construct
  source 1..120: mol_type = other DNA
cttcctgtgtccatgtgttctccttgttcaattcccacctatgggtgagactatgcagtgtttgtttttttgttcttgcaatagtttactgagaatgataatttccaatttcatccatgt

SEQ ID NO: 77912 - DNA, 120 bp, synthetic construct
  source 1..120: mol_type = other DNA
cttgaattaatttttgtataagatgtaaggaagggatccagtttcagctttctgcatgtggctagccagttttcccagcaccatttattaaatggggaatcctttccccatttcttgttt

SEQ ID NO: 77913 - DNA, 120 bp, synthetic construct
  source 1..120: mol_type = other DNA
ttctgtttatatgctggattacatttattgatttgcatatgttgaaccagccttgcatcccagggatgaagcccacttgatcatggtggataagctttttgatgtgctgctggattgggc

SEQ ID NO: 77914 - DNA, 120 bp, synthetic construct; identical to SEQ ID NO: 11796
  source 1..120: mol_type = other DNA

SEQ ID NO: 77915 - DNA, 120 bp, synthetic construct
  source 1..120: mol_type = other DNA
tgactttttaatgatcgccattctaactggtgtgagatggtatctcattgtggttttgatttgcatttctctgatggccagtgatgatgagcatttttacatgtgtcttttggctgcata

SEQ ID NO: 77916 - DNA, 120 bp, synthetic construct
  source 1..120: mol_type = other DNA
ctacaaaggacatgaactcatcatttttaatggcagcgtagtattccatggtgtatatgtgccacattttcttaatccactctatcattgttggacatttgggttggttccaggtctttg

SEQ ID NO: 77917 - DNA, 120 bp, synthetic construct
  source 1..120: mol_type = other DNA
tgaattaatttttgtataagatgtaaggaagggatccagtttcagctttctacatgtggctagccagttttcccagcaccatttattaaatagggactcctttctccatttcttgttttt

SEQ ID NO: 77918 - DNA, 120 bp, synthetic construct
  source 1..120: mol_type = other DNA
aggccttttctgcatgtattgagataatcatgtggtttttgtctttggttctgtgtatatgctggattacatttattgatttgcgtatattgaaccagccttgcatcccagggatgaagc

SEQ ID NO: 77919 - DNA, 120 bp, synthetic construct; identical to SEQ ID NO: 11797
  source 1..120: mol_type = other DNA

SEQ ID NO: 77920 - DNA, 120 bp, synthetic construct
  source 1..120: mol_type = other DNA
aatgtcttcttttgagaagtgtctgttcgtatcctttgcccacttgttgaaggggttgtttttttcttgtaaatttgttggagttcattgtagattctggatattagccctttgtcagat

SEQ ID NO: 77921 - DNA, 120 bp, synthetic construct
  source 1..120: mol_type = other DNA
tcatgtcatctgcaaacagggacaatttgacttcctcttttcctaatgaataccctttatttccttctcctgcctaattgccctgacgagaacttccaacactatgttgaataggagtgg

SEQ ID NO: 77922 - DNA, 120 bp, synthetic construct; identical to SEQ ID NO: 11798
  source 1..120: mol_type = other DNA

SEQ ID NO: 77923 - DNA, 120 bp, synthetic construct; identical to SEQ ID NO: 11799
  source 1..120: mol_type = other DNA

SEQ ID NO: 77924 - DNA, 120 bp, synthetic construct; identical to SEQ ID NO: 11800
  source 1..120: mol_type = other DNA

SEQ ID NO: 77925 - DNA, 120 bp, synthetic construct; identical to SEQ ID NO: 11801
  source 1..120: mol_type = other DNA

SEQ ID NO: 77926 - DNA, 120 bp, synthetic construct; identical to SEQ ID NO: 17331
  source 1..120: mol_type = other DNA

SEQ ID NO: 77927 - DNA, 120 bp, synthetic construct
  source 1..120: mol_type = other DNA
ctctgacccgccgccctgtctgggatgtgaggagcgcctctgctggccgcaaccctgtctgggaggtgaggagcgtctctgcccggccgccccgtctgagaagtgaggaaaccctctgcc

SEQ ID NO: 77928 - DNA, 120 bp, synthetic construct
  source 1..120: mol_type = other DNA
gagacctttgttcacttgtttatctgctgaccttccctccactattgtcctatgaccctgccaaatccccctctgcgagaaacacccaagaatgatcaataaaaaaaaaaataaaataaa

SEQ ID NO: 77929 - DNA, 120 bp, synthetic construct; identical to SEQ ID NO: 17332
  source 1..120: mol_type = other DNA

SEQ ID NO: 77930 - DNA, 120 bp, synthetic construct
  source 1..120: mol_type = other DNA
tcgcggctcgctacaacctccacctcccagctgcctgccttggccccgcaaagtgccgagattgcagcctctgcccagccgccaccccgtctgggaagtgaggagcgtctctgcctggcc

SEQ ID NO: 77931 - DNA, 120 bp, synthetic construct
  source 1..120: mol_type = other DNA
cgtctgggtggtgtacccaacagctcattgagaatgggccatgatgacaatggcggttttgtggaatagaaaagggggaaaggtggggaaaagattgagaaatcggatggttgccgtggc

SEQ ID NO: 77932 - DNA, 120 bp, synthetic construct; identical to SEQ ID NO: 13899
  source 1..120: mol_type = other DNA

SEQ ID NO: 77933 - DNA, 120 bp, synthetic construct; identical to SEQ ID NO: 13900
  source 1..120: mol_type = other DNA

SEQ ID NO: 77934 - DNA, 120 bp, synthetic construct; identical to SEQ ID NO: 13901
  source 1..120: mol_type = other DNA

SEQ ID NO: 77935 - DNA, 120 bp, synthetic construct
  source 1..120: mol_type = other DNA
agcatgactcttaaatctttattttccctatgtctggcaccgtccctgacacgtagcactcaaaaaatgctggaagaatggacggatggatggagggaagggacagaaaatggatgatgg

SEQ ID NO: 77936 - DNA, 120 bp, synthetic construct
  source 1..120: mol_type = other DNA
actgcactccagactgggcaacagaatgagatcctgtctctaaaataaaattgtttataaagatctcccccaaaatggagagatacggcaactcactgctattctggtctcttctgattg

SEQ ID NO: 77937 - DNA, 120 bp, synthetic construct
  source 1..120: mol_type = other DNA
tggtgctgggaaaactggctagccatatgtagaaagttgaaactggatcccttccttagaccttatacaaaaattaattcaaggtggattaaagacttaaaggttagacctaaaaccata

SEQ ID NO: 77938 - DNA, 120 bp, synthetic construct
  source 1..120: mol_type = other DNA
gcaaagacttggaaccaacccaaatgtccatcaatgatagactggattaagaaaatgtagcacatatacaccatggaatactatgcagccataaaaaatgatgagttcatgtcctttgta

SEQ ID NO: 77939 - DNA, 120 bp, synthetic construct
  source 1..120: mol_type = other DNA
cacgaggtcaggagatcgagattatcctggctaacacagtgaaaccccatctctactaaaaaaatacaaaaacattagccaggcgtggtggtgggcgcctgtagtcctagctactcggga

SEQ ID NO: 77940 - DNA, 120 bp, synthetic construct
  source 1..120: mol_type = other DNA
ctggctgaaaatgtttaaatcaatttactattagacagacagctcacagccagagaaacattcaaaaatacatggccaggtgtggtggctcatgtgtataatcccagctctttgggaggc

SEQ ID NO: 77941 - DNA, 120 bp, synthetic construct; identical to SEQ ID NO: 29353
  source 1..120: mol_type = other DNA

SEQ ID NO: 77942 - DNA, 120 bp, synthetic construct
  source 1..120: mol_type = other DNA
gcccctctgcctggctgcccagtctggaaagtgaggagcgtctccgcccggccgccatccgacctaggaagtgaggagcacctctgcccggccgccatcacatctaggaagtgaggagcg

SEQ ID NO: 77943 - DNA, 120 bp, synthetic construct; identical to SEQ ID NO: 29354
  source 1..120: mol_type = other DNA

SEQ ID NO: 77944 - DNA, 120 bp, synthetic construct; identical to SEQ ID NO: 18375
  source 1..120: mol_type = other DNA

SEQ ID NO: 77945 - DNA, 120 bp, synthetic construct
  source 1..120: mol_type = other DNA
agcagaaatacctaatgtagatgacgggttgatgggtgcagcaaacctccatggcacatgtatacatatgtaataaacctgcacgttctgcacatgtaccccagaacttaaagtataatt

SEQ ID NO: 77946 - DNA, 120 bp, synthetic construct; identical to SEQ ID NO: 30019
  source 1..120: mol_type = other DNA

SEQ ID NO: 77947 - DNA, 120 bp, synthetic construct; identical to SEQ ID NO: 6065
  source 1..120: mol_type = other DNA

SEQ ID NO: 77948 - DNA, 120 bp, synthetic construct
  source 1..120: mol_type = other DNA
agcattagcagaaatacctaatgtagatgacgggtagataggtgcagcaaacctccatggcacgtgtatacatatgtatcaaacctgtatgttctgcacatgtaccccagaacttaaagt

SEQ ID NO: 77949 - DNA, 120 bp, synthetic construct
  source 1..120: mol_type = other DNA
agggatcagggatattggtctaaaattctctttttttgttgtgtctctgccaggctttggtatcaggatgatgctggcctcataaaatgagttagggaggattccctctttttctattga

SEQ ID NO: 77950 - DNA, 120 bp, synthetic construct
  source 1..120: mol_type = other DNA
ttatttctgccttcatttcattatgtacccagtagtcactcaggagcagcttgtgcagtttccgtgtagttgggtggtttgggtgagtttcttaatcctgagttctagtttgattgcact

SEQ ID NO: 77951 - DNA, 120 bp, synthetic construct
  source 1..120: mol_type = other DNA
tttctccttcacttatgaagcttagtttggctggatatgaaattctgagttgaaagttcttttctttaagaatgttgaatatcggcccccactctcttctgacttgtagagtttctgccg

SEQ ID NO: 77952 - DNA, 120 bp, synthetic construct; identical to SEQ ID NO: 16314
  source 1..120: mol_type = other DNA

SEQ ID NO: 77953 - DNA, 120 bp, synthetic construct
  source 1..120: mol_type = other DNA
cgcgccccagggcccgaggtcccgctccccaatttcccctagagatccgggtcgcccccaagcgaggtctcttgctccacgcccgcttccttgtgccagggacccccacctccctgcata

SEQ ID NO: 77954 - DNA, 120 bp, synthetic construct; identical to SEQ ID NO: 7227
  source 1..120: mol_type = other DNA

SEQ ID NO: 77955 - DNA, 120 bp, synthetic construct; identical to SEQ ID NO: 7228
  source 1..120: mol_type = other DNA

SEQ ID NO: 77956 - DNA, 120 bp, synthetic construct; identical to SEQ ID NO: 7229
  source 1..120: mol_type = other DNA

SEQ ID NO: 77957 - DNA, 120 bp, synthetic construct; identical to SEQ ID NO: 25968
  source 1..120: mol_type = other DNA

SEQ ID NO: 77958 - DNA, 120 bp, synthetic construct; identical to SEQ ID NO: 25969
  source 1..120: mol_type = other DNA

SEQ ID NO: 77959 - DNA, 120 bp, synthetic construct; identical to SEQ ID NO: 22031
  source 1..120: mol_type = other DNA

SEQ ID NO: 77960 - DNA, 120 bp, synthetic construct; identical to SEQ ID NO: 22032
  source 1..120: mol_type = other DNA

SEQ ID NO: 77961 - DNA, 120 bp, synthetic construct; identical to SEQ ID NO: 31249
  source 1..120: mol_type = other DNA

SEQ ID NO: 77962 - DNA, 120 bp, synthetic construct
  source 1..120: mol_type = other DNA
tgtacatatagctagccagttttcccagcaccatttgttaaatagggaatcctttccccatttcttgtttttgtcaggtttgtcaaagatcagatagttgtagatgtgtggtattatttc

SEQ ID NO: 77963 - DNA, 120 bp, synthetic construct; identical to SEQ ID NO: 7069
  source 1..120: mol_type = other DNA

SEQ ID NO: 77964 - DNA, 120 bp, synthetic construct
  source 1..120: mol_type = other DNA
cccacctcccggacggggcggctgctaggcggagacgcttacttcccagacgggggcggctgcctggcggaggggctcctcacttctcagacggggcggctgccgggcagagacgctcct

SEQ ID NO: 77965 - DNA, 120 bp, synthetic construct; identical to SEQ ID NO: 23790
  source 1..120: mol_type = other DNA

SEQ ID NO: 77966 - DNA, 120 bp, synthetic construct; identical to SEQ ID NO: 23791
  source 1..120: mol_type = other DNA

SEQ ID NO: 77967 - DNA, 120 bp, synthetic construct; identical to SEQ ID NO: 24838
  source 1..120: mol_type = other DNA

SEQ ID NO: 77968 - DNA, 120 bp, synthetic construct
  source 1..120: mol_type = other DNA
cttcgctcactttttgatggggttgtttttttcttgtaaatttgtttgagttcattgtagattctggatattagccctttgtcagatgagtaggttgcgaaaattttctcccattttgta

SEQ ID NO: 77969 - DNA, 120 bp, synthetic construct
  source 1..120: mol_type = other DNA
atgctcatgggtaggaagaatcaatatcatgaaaatggccatactgcccaaggtagtttatagattcaatgccatccccatcaagctaccaatgactttcttcacagaattggaaaaaac

SEQ ID NO: 77970 - DNA, 120 bp, synthetic construct; identical to SEQ ID NO: 32792
  source 1..120: mol_type = other DNA

SEQ ID NO: 77971 - DNA, 120 bp, synthetic construct; identical to SEQ ID NO: 32793
  source 1..120: mol_type = other DNA

SEQ ID NO: 77972 - DNA, 120 bp, synthetic construct; identical to SEQ ID NO: 32794
  source 1..120: mol_type = other DNA

SEQ ID NO: 77973 - DNA, 120 bp, synthetic construct; identical to SEQ ID NO: 32795
  source 1..120: mol_type = other DNA

SEQ ID NO: 77974 - DNA, 120 bp, synthetic construct
  source 1..120: mol_type = other DNA
ctgtctctataaaaatataaaagttagctgggcatggtggcaggcgcctgtagtcccagctactcaggaggctgaggcaggagaatcgcttgaacctgggaggcggaggttgcagtgagc

SEQ ID NO: 77975 - DNA, 120 bp, synthetic construct
  source 1..120: mol_type = other DNA
ctccaacactgggggtcacatttcaacatgagatttggaggagacagatatccaaatgctatctgccttaaaaacaaattggatagtttggttttctattctgtggaagaatttgtgtaa

SEQ ID NO: 77976 - DNA, 120 bp, synthetic construct; identical to SEQ ID NO: 32796
  source 1..120: mol_type = other DNA

SEQ ID NO: 77977 - DNA, 120 bp, synthetic construct
  source 1..120: mol_type = other DNA
tcaaagaatcctcctgccttggcctcccaaagcattgggattgcaggtgtgagccactgtgcccagcattagtctgacttttttatagttagctttgtatttgcttgtcttttttaaaca

SEQ ID NO: 77978 - DNA, 120 bp, synthetic construct; identical to SEQ ID NO: 32797
  source 1..120: mol_type = other DNA

SEQ ID NO: 77979 - DNA, 120 bp, synthetic construct
  source 1..120: mol_type = other DNA
cataggaatttccttctattttttcttttttttttagacggagtctctttctttgtcgcccaggctggagtgtagtggcacaatctctgcccactgcaatctccagctcactgcaatctc

SEQ ID NO: 77980 - DNA, 120 bp, synthetic construct; identical to SEQ ID NO: 32798
  source 1..120: mol_type = other DNA

SEQ ID NO: 77981 - DNA, 120 bp, synthetic construct
  source 1..120: mol_type = other DNA
tcctgggctcaagtgatacacccgccttggcctcccaaagtgcggggattacaggcatgagcctccattcctggcctctttgcccatttttaaattgggtcatttgcgttttgttttatt

SEQ ID NO: 77982 - DNA, 120 bp, synthetic construct; identical to SEQ ID NO: 32799
  source 1..120: mol_type = other DNA

SEQ ID NO: 77983 - DNA, 120 bp, synthetic construct; identical to SEQ ID NO: 32800
  source 1..120: mol_type = other DNA

SEQ ID NO: 77984 - DNA, 120 bp, synthetic construct; identical to SEQ ID NO: 32801
  source 1..120: mol_type = other DNA

SEQ ID NO: 77985 - DNA, 120 bp, synthetic construct; identical to SEQ ID NO: 32802
  source 1..120: mol_type = other DNA

SEQ ID NO: 77986 - DNA, 120 bp, synthetic construct
  source 1..120: mol_type = other DNA
ttaattcttaaaaaggacccccttttattccttatttacttgagacaaggtcttgccctgttgcccaggctggagtgcagtggtacgataatggctcactttagcctcaaactcctgggc

SEQ ID NO: 77987 - DNA, 120 bp, synthetic construct; identical to SEQ ID NO: 32803
  source 1..120: mol_type = other DNA

SEQ ID NO: 77988 - DNA, 120 bp, synthetic construct; identical to SEQ ID NO: 32804
  source 1..120: mol_type = other DNA

SEQ ID NO: 77989 - DNA, 120 bp, synthetic construct
  source 1..120: mol_type = other DNA
ggatcttcagttgaactgaaagattgcagtatagtgggagtattttctttgtatttaaaagcatttttttttttttgagacggagtctcactctgttgccaggctggagtgcagtggtgt

SEQ ID NO: 77990 - DNA, 120 bp, synthetic construct; identical to SEQ ID NO: 32805
  source 1..120: mol_type = other DNA

SEQ ID NO: 77991 - DNA, 120 bp, synthetic construct; identical to SEQ ID NO: 32806
  source 1..120: mol_type = other DNA

SEQ ID NO: 77992 - DNA, 120 bp, synthetic construct
  source 1..120: mol_type = other DNA
gaattcctgacctcaagtaatccacccgcctcagcctcccaaagtgctgggattacggggatgaaccaccatgcttggccttgtggcagtatgttcaaattagggagcactagttttcaa

SEQ ID NO: 77993 - DNA, 120 bp, synthetic construct
  source 1..120: mol_type = other DNA
ttgggttctatttattcaaagtggagttggcgccaggcgcagtggctcacacctgtaatcctagcattttgggaggccgaggcagacggattgcctgagctcaggagtttgagaccagcc

SEQ ID NO: 77994 - DNA, 120 bp, synthetic construct; identical to SEQ ID NO: 32807
  source 1..120: mol_type = other DNA

SEQ ID NO: 77995 - DNA, 120 bp, synthetic construct
  source 1..120: mol_type = other DNA
taaatcacggaggtttgggagttccttcacaccccaataaacttgtttgtggaggcctgggaagtttctttagacccacagtaaaacttgtttaatcctaaatgggccttaagaattcct

SEQ ID NO: 77996 - DNA, 120 bp, synthetic construct; identical to SEQ ID NO: 32808
  source 1..120: mol_type = other DNA

SEQ ID NO: 77997 - DNA, 120 bp, synthetic construct; identical to SEQ ID NO: 32809
  source 1..120: mol_type = other DNA

SEQ ID NO: 77998 - DNA, 120 bp, synthetic construct; identical to SEQ ID NO: 32810
  source 1..120: mol_type = other DNA

SEQ ID NO: 77999 - DNA, 120 bp, synthetic construct; identical to SEQ ID NO: 32811
  source 1..120: mol_type = other DNA

SEQ ID NO: 78000 - DNA, 120 bp, synthetic construct
  source 1..120: mol_type = other DNA
gtgatccacccacctcggcctcccaaagtgctgggattacaggcatgagccaccgttaccagccgtgactggcttatttcacttactacaacgtccttaatgttcatccatgttgtgaca

SEQ ID NO: 78001 - DNA, 120 bp, synthetic construct
  source 1..120: mol_type = other DNA
gtggtgatacctcatggttttgatttgcatttccctaatgataagtgatgtgtatcttttcttttttctttctcttttttgtttttttgggggacagatttttggtctgtctcttaggca

SEQ ID NO: 78002 - DNA, 120 bp, synthetic construct
  source 1..120: mol_type = other DNA
ggcgggcagatcacgaggtcaggagatcgagactaccctggctaacatggtgaaaccccgtctttactaaaaatacaaaaaattagccgggcatggtggcgggcgcctgtagtcccagat

SEQ ID NO: 78003 - DNA, 120 bp, synthetic construct
  source 1..120: mol_type = other DNA
agttttttgattattattattttttgaaacagagtttcactgttgttgcaggctggggtgcagtggcgcaatctcggctcaccacaacccccgcctcccgggttcaagcgattcttctgc

SEQ ID NO: 78004 - DNA, 120 bp, synthetic construct; identical to SEQ ID NO: 32812
  source 1..120: mol_type = other DNA

SEQ ID NO: 78005 - DNA, 120 bp, synthetic construct; identical to SEQ ID NO: 32813
  source 1..120: mol_type = other DNA

SEQ ID NO: 78006 - DNA, 120 bp, synthetic construct; identical to SEQ ID NO: 32814
  source 1..120: mol_type = other DNA

SEQ ID NO: 78007 - DNA, 120 bp, synthetic construct; identical to SEQ ID NO: 32815
  source 1..120: mol_type = other DNA

SEQ ID NO: 78008 - DNA, 120 bp, synthetic construct
  source 1..120: mol_type = other DNA
ccatgttggccaggctggtcctgaaatgcctgcctcggcctcacaaagtgctgggattacaggcatgagccactgcacctggcaaaaaattaaaaaattattatgcagtcttaggatatg

SEQ ID NO: 78009 - DNA, 120 bp, synthetic construct; identical to SEQ ID NO: 32816
  source 1..120: mol_type = other DNA

SEQ ID NO: 78010 - DNA, 120 bp, synthetic construct; identical to SEQ ID NO: 32817
  source 1..120: mol_type = other DNA

SEQ ID NO: 78011 - DNA, 120 bp, synthetic construct; identical to SEQ ID NO: 32818
  source 1..120: mol_type = other DNA

SEQ ID NO: 78012 - DNA, 120 bp, synthetic construct
  source 1..120: mol_type = other DNA
tgaggatgggagttcgagaccaccctgaccaacatggtgaaacccagtctgtactaaaaatacaaaattaactgggcgtggtggtgcacacctgtaatcccagctactcggaaggctgag

SEQ ID NO: 78013 - DNA, 120 bp, synthetic construct
  source 1..120: mol_type = other DNA
gagatgcagtctttctctgtcactcaggctggagtgcagtggcatgatctcggctcactgcaacctccacctcctggtttcaggcgattctcagcctcccgagtagctgggactataggt

SEQ ID NO: 78014 - DNA, 120 bp, synthetic construct
  source 1..120: mol_type = other DNA
gctgggattataggtgcccgccaccatgcctggctctttttttttgttttgttttgtatttttagtagttacagggtttcaccgtgttagccaggatggtctcgatctcctgacctcgtg

SEQ ID NO: 78015 - DNA, 120 bp, synthetic construct; identical to SEQ ID NO: 32821
  source 1..120: mol_type = other DNA

SEQ ID NO: 78016 - DNA, 120 bp, synthetic construct; identical to SEQ ID NO: 32822
  source 1..120: mol_type = other DNA

SEQ ID NO: 78017 - DNA, 120 bp, synthetic construct; identical to SEQ ID NO: 32823
  source 1..120: mol_type = other DNA

SEQ ID NO: 78018 - DNA, 120 bp, synthetic construct; identical to SEQ ID NO: 32824
  source 1..120: mol_type = other DNA

SEQ ID NO: 78019 - DNA, 120 bp, synthetic construct
  source 1..120: mol_type = other DNA
tgggtggtgccagctgatccattaagtgcagggtctgcaaaatatctcaagcagtgatattaggagcagtttggggagggtcagaatcctgtagcctctagctacctgattcgtaaacca

SEQ ID NO: 78020 - DNA, 120 bp, synthetic construct; identical to SEQ ID NO: 32825
  source 1..120: mol_type = other DNA

SEQ ID NO: 78021 - DNA, 120 bp, synthetic construct; identical to SEQ ID NO: 32826
  source 1..120: mol_type = other DNA

SEQ ID NO: 78022 - DNA, 120 bp, synthetic construct
  source 1..120: mol_type = other DNA
ggaaataatttgtgagtagattttaatttccgttttttaaagacttaattttttaaagagtcatttaaggttcacagcaaaattgagaggaaggtacagagatttcccctgtatcccttc

SEQ ID NO: 78023 - DNA, 120 bp, synthetic construct; identical to SEQ ID NO: 32827
  source 1..120: mol_type = other DNA

SEQ ID NO: 78024 - DNA, 120 bp, synthetic construct; identical to SEQ ID NO: 32828
  source 1..120: mol_type = other DNA

SEQ ID NO: 78025 - DNA, 120 bp, synthetic construct; identical to SEQ ID NO: 32829
  source 1..120: mol_type = other DNA

SEQ ID NO: 78026 - DNA, 120 bp, synthetic construct; identical to SEQ ID NO: 32830
  source 1..120: mol_type = other DNA

SEQ ID NO: 78027 - DNA, 120 bp, synthetic construct
  source 1..120: mol_type = other DNA
gaggttgggagtttgagaccagcctgaccaacatcgagaaaccctgtctttactaaaaatgcaaaattagctgggtgtgccagagacatcctcccatttgggtactttttattatttaac

SEQ ID NO: 78028 - DNA, 120 bp, synthetic construct
  source 1..120: mol_type = other DNA
gcgatctcagcttgctgcaactccccgctgtccgggttcaagtgattctcctgcctcagactcccaagtagctgagattacaggcacacaccaccacacctggctaatttttgtattttt

SEQ ID NO: 78029 - DNA, 120 bp, synthetic construct
  source 1..120: mol_type = other DNA
atacggagcctccatatacagagggttggctgtgtagagatttaaactagttgcatggacaatgggcaaatgatccaaactagatcagtgatatttctccagaggaattttctgctagag

SEQ ID NO: 78030 - DNA, 120 bp, synthetic construct
  source 1..120: mol_type = other DNA
aaaactggaagtatcgcatgcagccacagcagaggatgtgtgtcaggagccgggttttggagtgtcctatttatgtgatgtgctgaggaatttttaagatgtatcatgaaaattcagata

SEQ ID NO: 78031 - DNA, 120 bp, synthetic construct
  source 1..120: mol_type = other DNA
cttccaaagtgctgggattacaggcatgagccaccacgccaggcctaattttatttttttagttgtagtttgtatttaatgtttcaaagtattattctgttttgggggcagtacaatgaa

SEQ ID NO: 78032 - DNA, 120 bp, synthetic construct
  source 1..120: mol_type = other DNA
taggaagaaactgggtctgtcagggtttgtgaaccctgtagctctctctcctcctgggcctcagggcaacccctgctttaagcctacatttaaatcctcttcttgaaaccaggaagactt

SEQ ID NO: 78033 - DNA, 120 bp, synthetic construct; identical to SEQ ID NO: 21875
  source 1..120: mol_type = other DNA

SEQ ID NO: 78034 - DNA, 120 bp, synthetic construct
  source 1..120: mol_type = other DNA
cctggaattcatttttgtatatgatgtcagatacatatatctgtgtattgttgctcttgttctttttttttctttattatactttaagttctagggtacatgtgtacaatgtgcagattt

SEQ ID NO: 78035 - DNA, 120 bp, synthetic construct
  source 1..120: mol_type = other DNA
cctccctcccggacggggcggctgccgggcggagacgctcctcacttcccagatggggtggctgccgggcggaggggctcctcacttctcagacggggcggctgctgggtgaaggggctc

SEQ ID NO: 78036 - DNA, 120 bp, synthetic construct
  source 1..120: mol_type = other DNA
aatggaaaacaaaaaaaggcaggggttgcaatcctggtctctgataaaacaaacatcagaagagacaaagaaggccattacataatggtaaagggatcaattcaacaagaagagctaact

SEQ ID NO: 78037 - DNA, 120 bp, synthetic construct
  source 1..120: mol_type = other DNA
ttgatagaccgctagcaagactaataaagaagaaaagattaaagaatcaaatagacgcaataaaaaatgataaaggggatatcaccaccgatcccacagaaatacaaactaccatcagag

SEQ ID NO: 78038 - DNA, 120 bp, synthetic construct
  source 1..120: mol_type = other DNA
atgccctctctcaccactcctattcaacatagtgttggaagttctggccagggcaatcaggcaggagaaggaaataaagggtattcaattaggaaaagaggaagtcaaattatccctgtt

SEQ ID NO: 78039 - DNA, 120 bp, synthetic construct
  source 1..120: mol_type = other DNA
actggatcccttccttacaccttatacagaaattaattcaagatggattaaagacttaaatgttagacctaaaaccataaaaaccctagaagaaaacctaggcaataccattcaggacat

SEQ ID NO: 78040 - DNA, 120 bp, synthetic construct; identical to SEQ ID NO: 21876
  source 1..120: mol_type = other DNA

SEQ ID NO: 78041 - DNA, 120 bp, synthetic construct
  source 1..120: mol_type = other DNA
agattcaataatctgtgtaaaacacttagcacaattccttgtagagtaagctgatgtgataatattaatgaaaacagggttgggcgcagtggctcacgcccgtaatcccagcactttgag

SEQ ID NO: 78042 - DNA, 120 bp, synthetic construct
  source 1..120: mol_type = other DNA
ggattataaatcattctactatgaagacacatgcacatgtatgtttattacagcactattcacaatagtaaagacttggaaccaacccaaatgcccatcaatgacagactggataaagaa

SEQ ID NO: 78043 - DNA, 120 bp, synthetic construct; identical to SEQ ID NO: 25782
  source 1..120: mol_type = other DNA

SEQ ID NO: 78044 - DNA, 120 bp, synthetic construct; identical to SEQ ID NO: 15152
  source 1..120: mol_type = other DNA

SEQ ID NO: 78045 - DNA, 120 bp, synthetic construct; identical to SEQ ID NO: 15153
  source 1..120: mol_type = other DNA

SEQ ID NO: 78046 - DNA, 120 bp, synthetic construct
  source 1..120: mol_type = other DNA
cttatcctttccaacattctttgcctggtgtattcttaatgatccaaatgaaactttacatttcagcagcaagaaatctttccttaatcttccagcagaggaagcactgccactttcaag

SEQ ID NO: 78047 - DNA, 120 bp, synthetic construct; identical to SEQ ID NO: 30122
  source 1..120: mol_type = other DNA

SEQ ID NO: 78048 - DNA, 120 bp, synthetic construct; identical to SEQ ID NO: 27389
  source 1..120: mol_type = other DNA

SEQ ID NO: 78049 - DNA, 120 bp, synthetic construct
  source 1..120: mol_type = other DNA
ataaggcttataagatctcatggttttataaggggtttccccctttcacttgattctcattttctctcttgtctgttgccatgtaagacatgcctttcgccttctgccatgattgtgagg

SEQ ID NO: 78050 - DNA, 120 bp, synthetic construct
  source 1..120: mol_type = other DNA
acacgcacgcgcacacacacacacacacacacacacacacacacacacacaacaaatagccaaggtaatcatgaggaaaaacaataaagctggaggcaacacactttattatttcaaact

SEQ ID NO: 78051 - DNA, 120 bp, synthetic construct
  source 1..120: mol_type = other DNA
ggcactattcacaatagcaaagacttggaaccaacacaaatgtccaacaaagatagactggattaagaaaatgtggcacatatacaccatggaatactatgcagccataaaaaatgatga

SEQ ID NO: 78052 - DNA, 120 bp, synthetic construct; identical to SEQ ID NO: 3524
  source 1..120: mol_type = other DNA

SEQ ID NO: 78053 - DNA, 120 bp, synthetic construct
  source 1..120: mol_type = other DNA
acacacacacacacacacacacacccttatctcctgtagcaaaattcagctacttacaggataagactacttatgggttaagtttgctacaggagataaaggtgtgtgtgtgtgtgtgtg

SEQ ID NO: 78054 - DNA, 120 bp, synthetic construct
  source 1..120: mol_type = other DNA
gagtagaagagctattgagaatgacttgaaatagaaccattttcaggtcaagaaggtggtgggtaggattccaacttacaagggacgtgaaggacctcttcaaggagaactacaaaccac

SEQ ID NO: 78055 - DNA, 120 bp, synthetic construct
  source 1..120: mol_type = other DNA
tacaagaaaaaaacaaccccatcaaaaagtgggcgaaggacatgaacaggcacttctcaaaagaagacatttatgcagccaaaaaacacatgaaaaaatgctcaccatcactggccatca

SEQ ID NO: 78056 - DNA, 120 bp, synthetic construct; identical to SEQ ID NO: 21579
  source 1..120: mol_type = other DNA

SEQ ID NO: 78057 - DNA, 120 bp, synthetic construct
  source 1..120: mol_type = other DNA
gattgccttgtgcagtgaaaaacctacgttaccgtacagggccatcctgctcacttcctttctgagagtctgtgctaagctctctgcacttgtacagttcattctgggctctaaggaact

SEQ ID NO: 78058 - DNA, 120 bp, synthetic construct
  source 1..120: mol_type = other DNA
taatgcgagttctctatgcactcggctctctcctcccaccccgggcctcttccctgggggaaaagtgccaacctcagcactctgcagacaattctgggtcaccaggaaggacgctggggt

SEQ ID NO: 78059 - DNA, 120 bp, synthetic construct
  source 1..120: mol_type = other DNA
gtctccacatcaggaagcgtatctcaccgtgtccagcattggtgtcctggccagatgctctgtttataatgatagaaaaaaaatttttcatctctgaaatttgccaccttctttcagcag

SEQ ID NO: 78060 - DNA, 120 bp, synthetic construct
  source 1..120: mol_type = other DNA
ggtggtgattgtctggggcactcctcccagagccctgactactgacaggtcacttcaagaatcaaagaacctcgactatgatgtcatttttctgtaagccctggactactataaattatg

SEQ ID NO: 78061 - DNA, 120 bp, synthetic construct; identical to SEQ ID NO: 11329
  source 1..120: mol_type = other DNA

SEQ ID NO: 78062 - DNA, 120 bp, synthetic construct; identical to SEQ ID NO: 11330
  source 1..120: mol_type = other DNA

SEQ ID NO: 78063 - DNA, 120 bp, synthetic construct
  source 1..120: mol_type = other DNA
ctccacacagcatcaaaccttgcagagttctaacagaagtgaatagaagattagtctcccacacaacaataatgggagactttaacaccccaccgttaacattagacagatcaacaagac

SEQ ID NO: 78064 - DNA, 120 bp, synthetic construct
  source 1..120: mol_type = other DNA
agaaagcaagaaataactaagatcagagcagaactgaaggaaatagagacacaaaaaacccttcaaaaaatcaatgaatccaggagctgattttttgaaaagatcaacaaaattgataga

SEQ ID NO: 78065 - DNA, 120 bp, synthetic construct
  source 1..120: mol_type = other DNA
aaattgtccctgtttgcagatgacgtgattgtatatctagaaaaccccatcgtctcatcccaaaatctccttaagctgataagcaacttcagcaaagtctcaggatacaaaatcaatgtg

SEQ ID NO: 78066 - DNA, 120 bp, synthetic construct
  source 1..120: mol_type = other DNA
aaacctaggcaataccattcaggacataggcatgggcaaggacttcataaccaaaacaccaaaagcaatggcaacaaaagccaaaattgacaaatgggatctaattaaactaaagagctt

SEQ ID NO: 78067 - DNA, 120 bp, synthetic construct
  source 1..120: mol_type = other DNA
tgtacacaatgtgcaggtttgttacgtaggtatacatgtgctatgttggtgtgctgcacccatctattcgtcatttatattaggtatttctcctaatgctatccctcccccaacccccca

SEQ ID NO: 78068 - DNA, 120 bp, synthetic construct
  source 1..120: mol_type = other DNA
ttttaatgattgccattctaactggtgtgagacggtatctcattgtggtttggatttgcatttctctgatggccagtgatggtgagcattttttcatgtgttttttggctgcataaatgt

SEQ ID NO: 78069 - DNA, 120 bp, synthetic construct
  source 1..120: mol_type = other DNA
gtttgtatcctcttttatttcattgagcagtggtttgtagttctccttgaagaggtccttcacatcccttgtaagttggattcctaggtattttattctctttgaagtgattgtgaatgg

SEQ ID NO: 78070 - DNA, 120 bp, synthetic construct
  source 1..120: mol_type = other DNA
tctggtcctggactctttttgttgataagctattgattattgccacaatttcagctcctgttattggtctattcagagattcaacttcttcctggtttagtcttgggagagtgtatgtgt

SEQ ID NO: 78071 - DNA, 120 bp, synthetic construct
  source 1..120: mol_type = other DNA
tccaagtatgtggtcaattttggaataggtgtggtgtggtgctgaaaaaaatgtatattctgttgatttggggtggagagttctgtagatgtctattaggtcctcttggtgcagagctga

SEQ ID NO: 78072 - DNA, 120 bp, synthetic construct
  source 1..120: mol_type = other DNA
ctccctgtcactttcaggtacaccaatcagacatagatttggtattttcacatagtcccatatttcttggaggctgtgcgcgtttctttttattcttttttctctaaacttctcgcttca

SEQ ID NO: 78073 - DNA, 120 bp, synthetic construct
  source 1..120: mol_type = other DNA
ctgggcaatggcgggtgcccctccccaagcctcgctgccaccttgcagtttgatctcagactgctgtgctagcaatcagcgagactccgtgggcataggaccctccaagccaggtgcggg

SEQ ID NO: 78074 - DNA, 120 bp, synthetic construct; identical to SEQ ID NO: 15932
  source 1..120: mol_type = other DNA

SEQ ID NO: 78075 - DNA, 120 bp, synthetic construct; identical to SEQ ID NO: 15933
  source 1..120: mol_type = other DNA

SEQ ID NO: 78076 - DNA, 120 bp, synthetic construct; identical to SEQ ID NO: 15934
  source 1..120: mol_type = other DNA

SEQ ID NO: 78077 - DNA, 120 bp, synthetic construct; identical to SEQ ID NO: 25790
  source 1..120: mol_type = other DNA

SEQ ID NO: 78078 - DNA, 120 bp, synthetic construct; identical to SEQ ID NO: 25791
  source 1..120: mol_type = other DNA

SEQ ID NO: 78079 - DNA, 120 bp, synthetic construct; identical to SEQ ID NO: 8974
  source 1..120: mol_type = other DNA

SEQ ID NO: 78080 - DNA, 120 bp, synthetic construct
  source 1..120: mol_type = other DNA
tcaaactcctgggctcaagtgatcctcctgcctcggcctcccaaagtcttgggattacaggtttgagccaccatgctcaactggaatcttttaatgtaagatcttttatatatatatata

SEQ ID NO: 78081 - DNA, 120 bp, synthetic construct; identical to SEQ ID NO: 14316
  source 1..120: mol_type = other DNA

SEQ ID NO: 78082 - DNA, 120 bp, synthetic construct
  source 1..120: mol_type = other DNA
gctggccgggctggggctgaccccccacctccctcccggtcggggtggctgccgggcggagacgctcctcacttcccagacggggcagctgccgggcggaggggctcctcacttctcaga

SEQ ID NO: 78083 - DNA, 120 bp, synthetic construct
  source 1..120: mol_type = other DNA
ttctataatttacacagtgatgtggatgttgtcatattgaaagtgatgctctcactcataggtgggagttgaacaatgaggacacttggacacaggaagaggaacatcacacaccgggac

SEQ ID NO: 78084 - DNA, 120 bp, synthetic construct; identical to SEQ ID NO: 14317
  source 1..120: mol_type = other DNA

SEQ ID NO: 78085 - DNA, 120 bp, synthetic construct; identical to SEQ ID NO: 18906
  source 1..120: mol_type = other DNA

SEQ ID NO: 78086 - DNA, 120 bp, synthetic construct
  source 1..120: mol_type = other DNA
cagcctttttttttttttttttttttttaaagagtttcactctgttgcccaggctggagagcagtggtgtgattatagctcattgcaacctcgaattcttgggctcaggtgatccgccta

SEQ ID NO: 78087 - DNA, 120 bp, synthetic construct
  source 1..120: mol_type = other DNA
acagccccgcctcaaggtaacaccctcctcccccatcacaccccagccccgctggatttcacggcccctcccagatcacactccctccatagccccaccccagatcacagcccacccaga

SEQ ID NO: 78088 - DNA, 120 bp, synthetic construct
  source 1..120: mol_type = other DNA
acttttactgtcacaagaatgagcttaggagaatcattgtttcagtcagttgtggggagagagtttgggtgagtttaatttggtggctggtaacaacagcagtaactgacccatactgag

SEQ ID NO: 78089 - DNA, 120 bp, synthetic construct; identical to SEQ ID NO: 23430
  source 1..120: mol_type = other DNA

SEQ ID NO: 78090 - DNA, 120 bp, synthetic construct
  source 1..120: mol_type = other DNA
agaatcgcttgaacccgggaggcggagcttgcagtgagccaaaatcgcgccactgcattccagcctgggcgacagagcgagactccatctcaaaaaaaacaaacaaacaacaacaacaac

SEQ ID NO: 78091 - DNA, 120 bp, synthetic construct; identical to SEQ ID NO: 23431
  source 1..120: mol_type = other DNA

SEQ ID NO: 78092 - DNA, 120 bp, synthetic construct; identical to SEQ ID NO: 23432
  source 1..120: mol_type = other DNA

SEQ ID NO: 78093 - DNA, 120 bp, synthetic construct; identical to SEQ ID NO: 23433
  source 1..120: mol_type = other DNA

SEQ ID NO: 78094 - DNA, 120 bp, synthetic construct; identical to SEQ ID NO: 23434
  source 1..120: mol_type = other DNA

SEQ ID NO: 78095 - DNA, 120 bp, synthetic construct; identical to SEQ ID NO: 23435
  source 1..120: mol_type = other DNA

SEQ ID NO: 78096 - DNA, 120 bp, synthetic construct; identical to SEQ ID NO: 28743
  source 1..120: mol_type = other DNA

SEQ ID NO: 78097 - DNA, 120 bp, synthetic construct; identical to SEQ ID NO: 28744
  source 1..120: mol_type = other DNA

SEQ ID NO: 78098 - DNA, 120 bp, synthetic construct; identical to SEQ ID NO: 28745
  source 1..120: mol_type = other DNA

SEQ ID NO: 78099 - DNA, 120 bp, synthetic construct
  source 1..120: mol_type = other DNA
ctcttctcagggtccttaaccacttacatcacaaaccccaccaaaaacctcgtttggggtgcaaaccccagagggtgcttgtgcaggtcagcagacacacacccacaggccaccccaggc

SEQ ID NO: 78100 - DNA, 120 bp, synthetic construct
  source 1..120: mol_type = other DNA
agaggagaaggaagggaggatgggaaggaaagtgaaagggagaagagggagaaggggaggagaggggaggaggcgggaggaggggagacggggagggggaggggggaggaggggagaggg

SEQ ID NO: 78101 - DNA, 120 bp, synthetic construct
  source 1..120: mol_type = other DNA
gttgcagttagctgagatcgctccactgcactccagcctggggacagagtgagactccatttcaaaaagaagaaaaaaagcatagcccataattcttaggtcttgtaaacttgtcatttt

SEQ ID NO: 78102 - DNA, 120 bp, synthetic construct; identical to SEQ ID NO: 7249
  source 1..120: mol_type = other DNA

SEQ ID NO: 78103 - DNA, 120 bp, synthetic construct; identical to SEQ ID NO: 10837
  source 1..120: mol_type = other DNA

SEQ ID NO: 78104 - DNA, 120 bp, synthetic construct; identical to SEQ ID NO: 10838
  source 1..120: mol_type = other DNA

SEQ ID NO: 78105 - DNA, 120 bp, synthetic construct
  source 1..120: mol_type = other DNA
attacagtaggtaaggtctagacctaacagaagagtatgctttgcattatattgtcctttatttttttgagacggagtcttgctctgtcaccaggctagagtgcagtggtgtgatcttgg

SEQ ID NO: 78106 - DNA, 120 bp, synthetic construct
  source 1..120: mol_type = other DNA
gctggagaggatgtggagaaataggaacacttttacattgttggtgggactgtaaactagttcaaccattgtggaagtcagtgtggcgattcctcagggatctagaactagaaataccat

SEQ ID NO: 78107 - DNA, 120 bp, synthetic construct
  source 1..120: mol_type = other DNA
atatatatttttttttttttttttttttttttttttttgagacagtcttgctttgttgcccaggctagggtgcagtggcgtgatctcagctcactgccggatcactaacctctgcctccc

SEQ ID NO: 78108 - DNA, 120 bp, synthetic construct
  source 1..120: mol_type = other DNA
gtaatcccaacactttaggaggctgaggtgggcaagtcacttgaccccaggagttcaagaccagcttgaccaacatggtgaaaccctatctctactaaaaatacaaaaaaaaaaaaaaaa

SEQ ID NO: 78109 - DNA, 120 bp, synthetic construct; identical to SEQ ID NO: 13557
  source 1..120: mol_type = other DNA

SEQ ID NO: 78110 - DNA, 120 bp, synthetic construct
  source 1..120: mol_type = other DNA
tgtcttcttttgagaagtgtctgttcatatccttcacccactttttgatggggttgtttttttcttgtaaatttgtttgagttcattgtagattctggatattagccctttgtcagagag

SEQ ID NO: 78111 - DNA, 120 bp, synthetic construct
  source 1..120: mol_type = other DNA
taatgacaggatcaaattcacacataacaatactaaccttaaatgtaaatgggctaaatgctccaattaaaaggcacagactgacaaattggatagagtcaagacccatcagtgtgctgt

SEQ ID NO: 78112 - DNA, 120 bp, synthetic construct; identical to SEQ ID NO: 13558
  source 1..120: mol_type = other DNA

SEQ ID NO: 78113 - DNA, 120 bp, synthetic construct
  source 1..120: mol_type = other DNA
gccacactgacttccacaatggttgaactagtttacagtcccaccaacagtggaaaagtttcttataaaccacatgcataaaatacatatctacagtgactgttgatatatctggattga

SEQ ID NO: 78114 - DNA, 120 bp, synthetic construct; identical to SEQ ID NO: 33452
  source 1..120: mol_type = other DNA

SEQ ID NO: 78115 - DNA, 120 bp, synthetic construct
  source 1..120: mol_type = other DNA
gcgtgtgttttaagagacagggtctcactctgtcacccaggctggagagcagttgcactccatgggtcactgtagcctcgacctcccaggctcaagcaatcctccagtcttggcctcctt

SEQ ID NO: 78116 - DNA, 120 bp, synthetic construct; identical to SEQ ID NO: 6510
  source 1..120: mol_type = other DNA

SEQ ID NO: 78117 - DNA, 120 bp, synthetic construct; identical to SEQ ID NO: 33454
  source 1..120: mol_type = other DNA

SEQ ID NO: 78118 - DNA, 120 bp, synthetic construct; identical to SEQ ID NO: 14488
  source 1..120: mol_type = other DNA

SEQ ID NO: 78119 - DNA, 120 bp, synthetic construct
  source 1..120: mol_type = other DNA
gtgggcacacagccgtgtgtttacagtttatgggagctctgtaagcatgagtgtactacacacattccttttttttttttttttttttgagatggagtcttgctatgtcacccaggctgg

SEQ ID NO: 78120 - DNA, 120 bp, synthetic construct; identical to SEQ ID NO: 19287
  source 1..120: mol_type = other DNA

SEQ ID NO: 78121 - DNA, 120 bp, synthetic construct; identical to SEQ ID NO: 19288
  source 1..120: mol_type = other DNA

SEQ ID NO: 78122 - DNA, 120 bp, synthetic construct; identical to SEQ ID NO: 19289
  source 1..120: mol_type = other DNA

SEQ ID NO: 78123 - DNA, 120 bp, synthetic construct; identical to SEQ ID NO: 19290
  source 1..120: mol_type = other DNA

SEQ ID NO: 78124 - DNA, 120 bp, synthetic construct; identical to SEQ ID NO: 19291
  source 1..120: mol_type = other DNA

SEQ ID NO: 78125 - DNA, 120 bp, synthetic construct; identical to SEQ ID NO: 19292
  source 1..120: mol_type = other DNA

SEQ ID NO: 78126 - DNA, 120 bp, synthetic construct
  source 1..120: mol_type = other DNA
aaaatgagttagcgaataagtatttttacatgtcaattttttttgtttttttgagacacagtcttgctctgtcccccaggctagagtgcaatggcctgatctcggctcactgcaacctcc

SEQ ID NO: 78127 - DNA, 120 bp, synthetic construct
  source 1..120: mol_type = other DNA
aagtgctgggattacaagcatgagccaccgcgcccaacaatttttgtatttttagtacagacagggtttcactacgttggccaggctaggctcaaactcctgacctcatgatccgcctac

SEQ ID NO: 78128 - DNA, 120 bp, synthetic construct; identical to SEQ ID NO: 19293
  source 1..120: mol_type = other DNA

SEQ ID NO: 78129 - DNA, 120 bp, synthetic construct; identical to SEQ ID NO: 7762
  source 1..120: mol_type = other DNA

SEQ ID NO: 78130 - DNA, 120 bp, synthetic construct; identical to SEQ ID NO: 7763
  source 1..120: mol_type = other DNA

SEQ ID NO: 78131 - DNA, 120 bp, synthetic construct; identical to SEQ ID NO: 7764
  source 1..120: mol_type = other DNA

SEQ ID NO: 78132 - DNA, 120 bp, synthetic construct; identical to SEQ ID NO: 7765
  source 1..120: mol_type = other DNA

SEQ ID NO: 78133 - DNA, 120 bp, synthetic construct
  source 1..120: mol_type = other DNA
cccaatgagccgctgggcacacctcccagacggggtcgtggccgggcagaggggctcctcacttcccagtaggggcggccgggcagaagcgcccctcacctcccggatggggcggctggc

SEQ ID NO: 78134 - DNA, 120 bp, synthetic construct; identical to SEQ ID NO: 7766
  source 1..120: mol_type = other DNA

SEQ ID NO: 78135 - DNA, 120 bp, synthetic construct
  source 1..120: mol_type = other DNA
aacaaacaaagatcaaccagtcactaggaactgaaagctttagcatatcctggcagcctaaaagactgaacagtggtaaggaggcaaaatttgggaaacaacaaaaggaggcctgtctca

SEQ ID NO: 78136 - DNA, 120 bp, synthetic construct
  source 1..120: mol_type = other DNA
atggggtgggtagtgagtgtgtggggtgtggatggggtgggtagtgagtgtgtcgggtgtgggtggggtgggtagtgagtgtgtggggtgtggggctggtagtgtgtggagtgtggggtg

SEQ ID NO: 78137 - DNA, 120 bp, synthetic construct
  source 1..120: mol_type = other DNA
tagtgagtgtgtggggtgtgtgtggggtgggtagtgagtgtgtggagtgtggggtgggtagtgagtgtgtggggtgtgggtgtgtgtaggttgtggggtgtgggtggggtgggtagtgtg

SEQ ID NO: 78138 - DNA, 120 bp, synthetic construct; identical to SEQ ID NO: 17385
  source 1..120: mol_type = other DNA

SEQ ID NO: 78139 - DNA, 120 bp, synthetic construct; identical to SEQ ID NO: 17386
  source 1..120: mol_type = other DNA

SEQ ID NO: 78140 - DNA, 120 bp, synthetic construct; identical to SEQ ID NO: 17387
  source 1..120: mol_type = other DNA

SEQ ID NO: 78141 - DNA, 120 bp, synthetic construct
  source 1..120: mol_type = other DNA
tcttgtgggcatttagtgctataaatttccctgtacaccctgctttaaatgtgtcccagagattctggtatgttgtgtctttgttctcattggtttcaaagaacatctttatttctgcct

SEQ ID NO: 78142 - DNA, 120 bp, synthetic construct
  source 1..120: mol_type = other DNA
aggatctgaaattgaggcaatccttaatagcttaccaaccaaaaaaagtccaggaccagatggattcacagccgaactctaccagaggtacaaggaggagctggtaccattccttctgaa

SEQ ID NO: 78143 - DNA, 120 bp, synthetic construct
  source 1..120: mol_type = other DNA
aatatcatgaaaatggccatactgcccaaggtaatttatagattcagtgccatccccatcaagctaccaatgactttcttcacagaattgaaaaaaactaaagttcatatggaaccaaaa

SEQ ID NO: 78144 - DNA, 120 bp, synthetic construct
  source 1..120: mol_type = other DNA
ccatttgacccagccattctattactgggtatatacccaaaggattataaatcatgctgctataaagacacatgcacacgtatgtttattgcagcactattcacaatagcaaagacttgg

SEQ ID NO: 78145 - DNA, 120 bp, synthetic construct
  source 1..120: mol_type = other DNA
gttcggggagccccaggtaagagttggaagtggagggtgaggaggctgcatgttgaggcaaggtgggggtggagtggccttggtgcttggcctgggatactacctgggggacaggccagt

SEQ ID NO: 78146 - DNA, 120 bp, synthetic construct
  source 1..120: mol_type = other DNA
ggggcggtggggcagaggcagtgcctgctggtgacaccctctccccacagagtacatgtaccaggtgatgaagtttaacaagttctcactgccccctgaggtaggtggggggaggggcaa

SEQ ID NO: 78147 - DNA, 120 bp, synthetic construct; identical to SEQ ID NO: 13561
  source 1..120: mol_type = other DNA

SEQ ID NO: 78148 - DNA, 120 bp, synthetic construct; identical to SEQ ID NO: 13562
  source 1..120: mol_type = other DNA

SEQ ID NO: 78149 - DNA, 120 bp, synthetic construct
  source 1..120: mol_type = other DNA
agacccatcagtatgctgtatcaggaaacccatctcacatgcagagacacacataggctcaaaataaagggatggaggaagatctaccaagcaaatggaaaacaaaaaaaggcaggggtt

SEQ ID NO: 78150 - DNA, 120 bp, synthetic construct
  source 1..120: mol_type = other DNA
caaaattgatagaccattagcaagactaataaagaagaaaagagagaagaatcaaatagacacaataaaaaatggcaaaggggatatcaccactgatcccacagaaatacaaactaccat

SEQ ID NO: 78151 - DNA, 120 bp, synthetic construct
  source 1..120: mol_type = other DNA
aaaatcagtgttcaaaaatcacaagcattcttatacaccaataacagacaaacagagagccaaatcatgagtgaactcccattcacaattgcttcaaagagaataaaatacctaggaatc

SEQ ID NO: 78152 - DNA, 120 bp, synthetic construct
  source 1..120: mol_type = other DNA
gagacaatttttgcaacctactcatctgacaaagggctaatatccagaatctacaatgaactcaaacaaatttacaagaaaaaaacaaccccatcaaaaagtgggcgaaggatccgaaca

SEQ ID NO: 78153 - DNA, 120 bp, synthetic construct; identical to SEQ ID NO: 14311
  source 1..120: mol_type = other DNA

SEQ ID NO: 78154 - DNA, 120 bp, synthetic construct
  source 1..120: mol_type = other DNA
tttagaaattttttttagaaatagagtctcactatattgcctaggctagtctcaagctcctgggctcaaatgatactcctgcctcagccttccaaagttctggaattacaggcatgagcc

SEQ ID NO: 78155 - DNA, 120 bp, synthetic construct
  source 1..120: mol_type = other DNA
cccagtagcaatactgctgaatcataagttaaatctatgttaattttataagaaactgccaaattcttttccagagtggctatactagcaatgaatcagagttcctgttgctgtatatcc

SEQ ID NO: 78156 - DNA, 120 bp, synthetic construct
  source 1..120: mol_type = other DNA
gtgtccatgagttcaattgttttgatttttagatcccacaaataagtgagaacatgcgatgatctctttctgtgcttggattgtttcagttaacataatgatctccagttccatccatgt

SEQ ID NO: 78157 - DNA, 120 bp, synthetic construct
  source 1..120: mol_type = other DNA
tggatattagccctttgtcagatgagtaggttgtgaaaattttctcccattttgtaggttgcctgttcactctgatggtagtttctcttgctgtgcagaagctctttaattagatcccat

SEQ ID NO: 78158 - DNA, 120 bp, synthetic construct
  source 1..120: mol_type = other DNA
gcttgtgatttttgtacattgattttgtatactgagactttgctgaagttgcttatcagcttaaggagattttgggctgagacaatggggttttctagatatacaatcatgtcatctgca

SEQ ID NO: 78159 - DNA, 120 bp, synthetic construct
  source 1..120: mol_type = other DNA
gtttgtagtattctctgatggtagtttgtatttctgtgggatcagtggtgatatccagtttatcattttttaatgcgtatatttgattcttctctctttttttctttattagtcttgcta

SEQ ID NO: 78160 - DNA, 120 bp, synthetic construct
  source 1..120: mol_type = other DNA
ttattttgagcctatgtgtgtctctgcacgtgagatgggtttcctgaatacagcacactgatgggtcttgactctttatccaatttgccagtctgtgtctttcaattggagcatttagtc

SEQ ID NO: 78161 - DNA, 120 bp, synthetic construct
  source 1..120: mol_type = other DNA
gcacttctctgtattgggtattctagttatacattcttctaaatttttttcaaagttttcaacttctttgcctttggtttgaatgtcctcctgtagctcagagtaatttgatcgtctgaa

SEQ ID NO: 78162 - DNA, 120 bp, synthetic construct
  source 1..120: mol_type = other DNA
ataagagctatctatgacaaacccacagccaatatcatactgaatgggcaaaaactggaagcattccctttgaaaactggcacaagacagggatgccctctctcaccactcctattcatt

SEQ ID NO: 78163 - DNA, 120 bp, synthetic construct
  source 1..120: mol_type = other DNA
accttatacagaaattaattcaagatggattaaagacttaaacgttagacctaaaaccataaaaaccctagaagaaaacctaggcattaccattcaggacataggcatgggcaaggactt

SEQ ID NO: 78164 - DNA, 120 bp, synthetic construct
  source 1..120: mol_type = other DNA
tctcagcaaactattgcaaggacaaaaaaccaaacaccgcatgttctcactcataggtgggaattgaagaatgagaacacatggacacaggaaggggagcatcacactctggggactgtt

SEQ ID NO: 78165 - DNA, 120 bp, synthetic construct; identical to SEQ ID NO: 14314
  source 1..120: mol_type = other DNA

SEQ ID NO: 78166 - DNA, 120 bp, synthetic construct
  source 1..120: mol_type = other DNA
gtaaaagtgttcctatttctccacatcctctccagcacctgtttcctaactttttaatgattgccattctaactggtgtgagatggtatctcattgtggttttgatttgcatttctctga

SEQ ID NO: 78167 - DNA, 120 bp, synthetic construct
  source 1..120: mol_type = other DNA
tactacaaggctacagtaaccaaaacagcatggtactggtaccaaaacagagatatagatcaatggaacagaacagagccctcagaaataacaccgcatagatctgatctttgacaaacc

SEQ ID NO: 78168 - DNA, 120 bp, synthetic construct; identical to SEQ ID NO: 24411
  source 1..120: mol_type = other DNA

SEQ ID NO: 78169 - DNA, 120 bp, synthetic construct; identical to SEQ ID NO: 30045
  source 1..120: mol_type = other DNA

SEQ ID NO: 78170 - DNA, 120 bp, synthetic construct
  source 1..120: mol_type = other DNA
gaagggagcatggtactgctgacactgtagtttaagacttcaggcctccagaactatgagaaaataaatttctgttgttttaaagccatcgatttgttataatttgttatggaaacccaa

SEQ ID NO: 78171 - DNA, 120 bp, synthetic construct; identical to SEQ ID NO: 30046
  source 1..120: mol_type = other DNA

SEQ ID NO: 78172 - DNA, 120 bp, synthetic construct; identical to SEQ ID NO: 32051
  source 1..120: mol_type = other DNA

SEQ ID NO: 78173 - DNA, 120 bp, synthetic construct; identical to SEQ ID NO: 23993
  source 1..120: mol_type = other DNA

SEQ ID NO: 78174 - DNA, 120 bp, synthetic construct; identical to SEQ ID NO: 23994
  source 1..120: mol_type = other DNA

SEQ ID NO: 78175 - DNA, 120 bp, synthetic construct; identical to SEQ ID NO: 23995
  source 1..120: mol_type = other DNA

SEQ ID NO: 78176 - DNA, 120 bp, synthetic construct
  source 1..120: mol_type = other DNA
cgggaattaaggtatcgaggggagctattttaagggaaaagagcgagttttagagggcgagagagaattcggagtaactctggaggcggtttgaaggagacgaggatttggaggcctggg

SEQ ID NO: 78177 - DNA, 120 bp, synthetic construct
  source 1..120: mol_type = other DNA
gagttaagagcttgaagtgcagggacgagggttgagggcgtgagttggtggggagggtttgggagtatgaagtgcaggggaggattgagggcatgagttggtggggatggtttgggagcg

SEQ ID NO: 78178 - DNA, 120 bp, synthetic construct
  source 1..120: mol_type = other DNA
ggggtgtgtatttaacacctcaggtaagcaagtgccattcgttgcctttgaaggttcccagtgaagtaatgtgatgccctagaaagaaggcatccagaaattggtttcactattatttat

SEQ ID NO: 78179 - DNA, 120 bp, synthetic construct
  source 1..120: mol_type = other DNA
gaccgtgtgtttctttaccgctctcccccgagaccttttaagggttgtttggagtgtaagtggaggaatatacgtagtgttgtcttaatggtaccgttaactaagtaaggaagccactta

SEQ ID NO: 78180 - DNA, 120 bp, synthetic construct
  source 1..120: mol_type = other DNA
ttacttaagtggagatttttattttttttttattttttttttagacggagtctcactttgtcacccaggctggagtgcagtggcgcgatctcagctgactgcaacctcctcctcacaggt

SEQ ID NO: 78181 - DNA, 120 bp, synthetic construct
  source 1..120: mol_type = other DNA
ccgtgcccagcctattatcttatttctgaataaagaattgtctgtgtggggaatagataactctttctcatgcagcccctgctagaaaatttgttttctctagcagttggtctgtgctta

SEQ ID NO: 78182 - DNA, 120 bp, synthetic construct
  source 1..120: mol_type = other DNA
cagtttagatgcaaaatccacaagtattcaagtgattgttaaagagggaggcctgaagttgattcagatccaagacaatggcaccgggatcagggtaagtaaaacctcaaagtagcagga

SEQ ID NO: 78183 - DNA, 120 bp, synthetic construct
  source 1..120: mol_type = other DNA
ctgcagactgcttggtcgcagtagagatgtaagaagcagtgagattctgggttaattatggaggcaaagttctcagaatttgctgatatagggtatgagagaaagaggaatcaggaatga

SEQ ID NO: 78184 - DNA, 120 bp, synthetic construct
  source 1..120: mol_type = other DNA
aagacatcatgttaagttaaataagttggtcactaaaggacaaatattgtatgattccccttatgaggttcctagagtagtcacattcatagagacagtagagtggtggttgcccagggc

SEQ ID NO: 78185 - DNA, 120 bp, synthetic construct
  source 1..120: mol_type = other DNA
tgatttgcatttctctgatggccagtgatgatgagcatttcttcatgtgttttttggctgcataaatgtcttctttcgagaagtgtctgttcatatccttcactcactttttgatggggt

SEQ ID NO: 78186 - DNA, 120 bp, synthetic construct
  source 1..120: mol_type = other DNA
acatggtgaaacctcatctctactaaaaatataagaaattaaggccaggtgtggtagttcatgcctgtaatcccagtgctttgggaggtcaaggcagccagatcatttgagatcaggagt

SEQ ID NO: 78187 - DNA, 120 bp, synthetic construct
  source 1..120: mol_type = other DNA
ggagacaaggaagcatggtaaatgatactgagattgggagactacatggaaaaagacttgttcccttcaacagatagacagcagggaaaaaagaatagagaaaggagtaaagaacctgta

SEQ ID NO: 78188 - DNA, 120 bp, synthetic construct
  source 1..120: mol_type = other DNA
tcctctatggaggttccaagggaccagagaaactactttacagtagttattttaagggaatgaaagtgaagatggggttgggcagtcaaagaggctgttacttttcatttttggcctttc

SEQ ID NO: 78189 - DNA, 120 bp, synthetic construct
  source 1..120: mol_type = other DNA
caagtagctcggattacaggcacatgccaccacagctagcaaatttttgtatttttagtagagattggtgtttcaccatgttggccaggctgttcttgaactcctgacctcaggtgatcc

SEQ ID NO: 78190 - DNA, 120 bp, synthetic construct
  source 1..120: mol_type = other DNA
aaaacagctgatggaaagtgtgcatacaggtatagtgctgacttcttttactcatatatattcattctgaaatgtattttttgcctaggtctcagagtaatcctgtctcaacaccagtgt

SEQ ID NO: 78191 - DNA, 120 bp, synthetic construct
  source 1..120: mol_type = other DNA
ctccggaggtgggaagattgcttgagcccagcagtttgaggctgcagtgagctgtgattacaccactgtactccaaccttaaaataaataaataaataagggaaaatatcttcaacaaag

SEQ ID NO: 78192 - DNA, 120 bp, synthetic construct
  source 1..120: mol_type = other DNA
gagccaccgcgccgagccccaagacctttctttattaccagggcttccacagacctgacacatggtagttcctcaataaataattgcagaattactgaaaaattttactgttaacttagg

SEQ ID NO: 78193 - DNA, 120 bp, synthetic construct
  source 1..120: mol_type = other DNA
gaatttgcactagttaatggaggtcccaagatatcctctaagcaagataaatgactattggcttttgtggcatggcagcctgccacgtccttgtcttttttaagggctaggagattcttt

SEQ ID NO: 78194 - DNA, 120 bp, synthetic construct
  source 1..120: mol_type = other DNA
ttgaaaaatactttttttttttttgagacaaagtctcactctgttgcccaggctgaagtgcagtggtgtgatctcagctcactgcaatcactacctcttgagttcaagcagttgtcctgc

SEQ ID NO: 78195 - DNA, 120 bp, synthetic construct
  source 1..120: mol_type = other DNA
gaaccagggtgcctctgggacttaacatcattactgtactccagttgttttcattcttttcctgactttgctctagagtcagtttcctaacagagtacattcgatgatcatgtgcccata

SEQ ID NO: 78196 - DNA, 120 bp, synthetic construct
  source 1..120: mol_type = other DNA
gccttggcctcctaaagtgctgggattacaggcgtgagccaccatgcctggccatttttcagtatttcttttttttttttttttttttttttttttgagacagagtttcactcttgttgc

SEQ ID NO: 78197 - DNA, 120 bp, synthetic construct
  source 1..120: mol_type = other DNA
tgttacttaataaatgcattttgctagacacaatccttcggttcacgagctctgtagagaaaagagaaataaccgccaaccaagaaaagattgggagatactagaataagacccaggggc

SEQ ID NO: 78198 - DNA, 120 bp, synthetic construct
  source 1..120: mol_type = other DNA
atcagcaaggagagacagtagctgatgttaggacactacccaatgcctcaaccgtggacaatattcgctccatctttggaaatgctgttagtcggtatgtcgataacctatataaaaaaa

SEQ ID NO: 78199 - DNA, 120 bp, synthetic construct
  source 1..120: mol_type = other DNA
agtagctgggactacaggcgcctgtcaccacacccagctaattttttgtattttttagtagagacggggtttcatcgtgttagccaggatgatctcgatctccagacctcgtgatccacc

SEQ ID NO: 78200 - DNA, 120 bp, synthetic construct
  source 1..120: mol_type = other DNA
ctattaaccttccctccccagtaaacactcctgggaacaacacacattgtagaaccacgttgtggtgctgttcagtatagcaagtaattcagcagagataagttcttggaatctcatctt

SEQ ID NO: 78201 - DNA, 120 bp, synthetic construct
  source 1..120: mol_type = other DNA
ttgcacagcaggatacggaaaaggggtaccttaggtataggcattgtcattaaagaaattgctaagatacttgagattttcctgtttaaggaatgagctttatgatacaaagagcagttc

SEQ ID NO: 78202 - DNA, 120 bp, synthetic construct
  source 1..120: mol_type = other DNA
gtggtcaggacacgtgttacagagtacagtgacattaatgatggggccatggatatggtcagcactcagaggatgttagtctcttcattgataaagtcacaaccacttttcctgttggaa

SEQ ID NO: 78203 - DNA, 120 bp, synthetic construct
  source 1..120: mol_type = other DNA
ttgtgtgtggtgtggttcttggacttcgccatgtctacaccttaagccgcggctcccgaagcacctagaaccggaagagttggctcactatttagcacacacacacgtctataatagtgc

SEQ ID NO: 78204 - DNA, 120 bp, synthetic construct
  source 1..120: mol_type = other DNA
atagcttgtaggcggagtggaaacagatgtgctctagaggctctaaatattacttctgctggggtcagttgggaagccacaacagctactgttcatcttccataaaagacaatcagccgg

SEQ ID NO: 78205 - DNA, 120 bp, synthetic construct
  source 1..120: mol_type = other DNA
tctcactttggcctcccaaagtgttaggattacaggcctcagccactgcacccagcctaaagttagttttagattaagtgttttcatgttttcccttgcaaagtaataaactggtcaagt

SEQ ID NO: 78206 - DNA, 120 bp, synthetic construct
  source 1..120: mol_type = other DNA
gcctccccaaatgctgggattacaggcgtgagccaccacgcccggccacttggcatgaatttaattcccgccataaacctgtgagataggtaattctgttatatccactttacaaatgaa

SEQ ID NO: 78207 - DNA, 120 bp, synthetic construct
  source 1..120: mol_type = other DNA
tcagtaatgaaggaatgtgtcatccccaaatccagggacagttacaagcagtcagtgaacagaaagtgtctggtacaggttctaagtgcttattattctaagtcacttcacttacctgag

SEQ ID NO: 78208 - DNA, 120 bp, synthetic construct
  source 1..120: mol_type = other DNA
taggaatttgctgggccaaaggggagggggaatgaaaagagtgtttctggcagaggaaatggcaaggataaaggcctggaggcgcaagagaatatgtgtttgaggatctgaaagttgagt

SEQ ID NO: 78209 - DNA, 120 bp, synthetic construct
  source 1..120: mol_type = other DNA
gattcattttgttagattacattttttttccagtggaactctgcttaagtcctgaccagtatgttttcagaaggatcagagggcctgcccttgtccattggtgcatgacaccagcttggt

SEQ ID NO: 78210 - DNA, 120 bp, synthetic construct
  source 1..120: mol_type = other DNA
aaggtaagagaaattctgttgcctaagaccttctgaggcctaaagcaccccaacattataacagaagacgataacaggactatgggagttatgagctgggaaccttggacaaaaatatat

SEQ ID NO: 78211 - DNA, 120 bp, synthetic construct
  source 1..120: mol_type = other DNA
caattgtagtcatttttctttttggtgctcaaattatcccgtcttagtcccatggaagcaagcccttggagctagggccctctaccttttgatggatttccatttgtcttgataatttcc

SEQ ID NO: 78212 - DNA, 120 bp, synthetic construct
  source 1..120: mol_type = other DNA
ttttttttttttttaatacagactttgctaccaggacttgctggcccctctggggagatggttaaatccacaacaagtctgacctcgtcttctacttctggaagtagtgataaggtctat

SEQ ID NO: 78213 - DNA, 120 bp, synthetic construct
  source 1..120: mol_type = other DNA
gaaaaaacacacgttctgaatctaatttataaaactccctggccgggtgctgtggctcacacctataatcccagcactttgggaggctgaggcaggtggatcacctgaaatcaagagttc

SEQ ID NO: 78214 - DNA, 120 bp, synthetic construct
  source 1..120: mol_type = other DNA
tcacgccactgcactccagcctggctgacagagtgagatcctctgtctcaaaaaaagaaaaaaaaaaagatttttttccagggaataataaaggaagctaatatttatggagcatctacg

SEQ ID NO: 78215 - DNA, 120 bp, synthetic construct
  source 1..120: mol_type = other DNA
agtgagctgagatcacaccacagcactccagcctggaagacatagtgagactctctctcaaaaaaaaaaaaaaaaaaaaaggaagtaagcattgtgagggcaggtaccttctctgttttg

SEQ ID NO: 78216 - DNA, 120 bp, synthetic construct
  source 1..120: mol_type = other DNA
agccatttcaccaattttcagtttgtttctgtcttagctaacagcagtgtaatggtcagcaaaattcttatcttgtgtactgaatggcatgtcctgttgctgaaagtgcacaggcttggg

SEQ ID NO: 78217 - DNA, 120 bp, synthetic construct
  source 1..120: mol_type = other DNA
gaactcctaggctctcacctctgtcttccaaagtgctgggattacaggtgtgagccaccacacctggcctattacacatttcttaattaaagtagtcaaatttgaaaactgttacaaagt

SEQ ID NO: 78218 - DNA, 120 bp, synthetic construct
  source 1..120: mol_type = other DNA
gtatagcaggctgttgaaagttacaatgtcaataactttctgaatagtatcaaactgttttcagtgcagtgtattaacaaaactaacctgcctcaagtttggtcagctttggagtcttac

SEQ ID NO: 78219 - DNA, 120 bp, synthetic construct
  source 1..120: mol_type = other DNA
gttctcttgagtccagggatttacccatccatggtggacacactttcagttaaaaagtaaggttaattttgacaggttgcagtatccaggcaagcattctatggaataaggctcatctca

SEQ ID NO: 78220 - DNA, 120 bp, synthetic construct
  source 1..120: mol_type = other DNA
agtagctctggatgcgtcagagcagtccatgaacattctgtgtggaaaatctctgactgttttagtggattacactgctctccctttcctccagtgcctcgttattcagtattatttgat

SEQ ID NO: 78221 - DNA, 120 bp, synthetic construct
  source 1..120: mol_type = other DNA
cccagcctcatatgagttgattggtggcctggcatactggatgagaagctctaggtcatatatttaagagagttattgctgggtcataaaatgacagattgttttccagaggggtcatat

SEQ ID NO: 78222 - DNA, 120 bp, synthetic construct
  source 1..120: mol_type = other DNA
ccacctggaattgattttcacagatactacattttttactagttatagattggccccttcgtagagcaagtccgatagctgccatttttatggcagcatgtgctcacttagtgtctctgt

SEQ ID NO: 78223 - DNA, 120 bp, synthetic construct
  source 1..120: mol_type = other DNA
ttgcagtgagccgatatcatgccattgcactccagcctgggcaccagagtgagactacgtctcaaaaacaaaacaaaaaaaaaaaactgaaaggaagagcttaatgagaaaggcatatta

SEQ ID NO: 78224 - DNA, 120 bp, synthetic construct
  source 1..120: mol_type = other DNA
acattcgagattcctgggaagaagtcaaaatatcaacattaacaggagtttggaagaaattgcatccagccctcatggataactttgaggggttcaagacttcagtggaggaagtagctg

SEQ ID NO: 78225 - DNA, 120 bp, synthetic construct
  source 1..120: mol_type = other DNA
gttcccaaagtgctggtattattggcatgagccactgcgcccggccagcaaaaaagtgtttttaaattaagctacctacgttgattttagacataatgctatttgcacacttaatagatt

SEQ ID NO: 78226 - DNA, 120 bp, synthetic construct
  source 1..120: mol_type = other DNA
agtaaccctgtgtgtcacgtgtggattttgttgggcttgctagctgagacttgacagttttcatcacttctgggatattctcaggtattttgtcttcaaagtcttcagatattgtcctct

SEQ ID NO: 78227 - DNA, 120 bp, synthetic construct
  source 1..120: mol_type = other DNA
ttagttatattttattcctcatttgtgttcgttttcaccaggaggctcaattcaggcttctttgcttacttggtgtctctagttctggtgcctggtgctttggtcaatgaagtggggttg

SEQ ID NO: 78228 - DNA, 120 bp, synthetic construct
  source 1..120: mol_type = other DNA
ctatacattgcatggagttggtacatgagatagaaacctattcgccatcccttgaaactgccccagtccagaagcttcctgttagcacatgtacctccttgtatgtattcagaactcatt

SEQ ID NO: 78229 - DNA, 120 bp, synthetic construct
  source 1..120: mol_type = other DNA
tctttggaggggtaagagattttgttagactgttaaccagattccacagccaggcagaactatttctgtctcatccatgtttcagggattacttctcccattttgtcccaactggttgta

SEQ ID NO: 78230 - DNA, 120 bp, synthetic construct
  source 1..120: mol_type = other DNA
tacttggaaagggataaaaataaacattgtctaaagccgtggtccaaacacaacccctgccaacaattttagtccatttcttccaagacttttttttttctatgccttttgtgaaaactg

SEQ ID NO: 78231 - DNA, 120 bp, synthetic construct
  source 1..120: mol_type = other DNA
aaagaaacttttacttcttgctgtgcaaactgaacaccttttctttctttctttctttttttaagacggagttttgctcttgtcacccaggctggagtgcagtggctggatctcggctta

SEQ ID NO: 78232 - DNA, 120 bp, synthetic construct
  source 1..120: mol_type = other DNA
ttttttgcatctactgagataatcatatgatttttcttttatagtttgttaatatagtgaattacattgattttcttatgttaaaccaatctttgcattcctgggatgaactctgcttgg

SEQ ID NO: 78233 - DNA, 120 bp, synthetic construct
  source 1..120: mol_type = other DNA
gcctgtttcacatttcttaaggtagaagctgaggtcacggatttgagacctttcttcttttctaatacaggtgttaagtgctacaaatatcccttaagcactgcttcaacagcatcccac

SEQ ID NO: 78234 - DNA, 120 bp, synthetic construct
  source 1..120: mol_type = other DNA
gcccagcttagcctcccaaagtgctgggattacaggcatgagccactgcacccagcccatatattttaaagctctgttattgggtacataaacatttaggattgttatatccttttgata

SEQ ID NO: 78235 - DNA, 120 bp, synthetic construct
  source 1..120: mol_type = other DNA
agaatcacttaaacccaagaggtagaagttgcagtgagccgagattgcaccactgcactctagcctaggcgacagcgagactgcgtctcaaaaaaaaaaaaaaagaacgttccaaggtca

SEQ ID NO: 78236 - DNA, 120 bp, synthetic construct
  source 1..120: mol_type = other DNA
gatctggaatgataaagatgataagggtgggatagctgaaggcctgctctcatccccactaatattcattcccagcaatattcagcagtcccatttacagttttaacgcctaaagtatca

SEQ ID NO: 78237 - DNA, 120 bp, synthetic construct
  source 1..120: mol_type = other DNA
gcagagatttagtcctgttggccaaagcctctagggaatttctcactccagtggagaaggcaacacacttaccaaactgtgtggaaactatctcatttgattagaaattttacctcaaga

SEQ ID NO: 78238 - DNA, 120 bp, synthetic construct
  source 1..120: mol_type = other DNA
cagcttgctaacctgcctgatctatacaaagtctttgagaggtgttaaatatggttatttatgcactgtgggatgtgttcttctttctctgtattccgatacaaagtgttgtatcaaagt

SEQ ID NO: 78239 - DNA, 120 bp, synthetic construct; identical to SEQ ID NO: 3770
  source 1..120: mol_type = other DNA

SEQ ID NO: 78240 - DNA, 120 bp, synthetic construct; identical to SEQ ID NO: 27834
  source 1..120: mol_type = other DNA

SEQ ID NO: 78241 - DNA, 120 bp, synthetic construct; identical to SEQ ID NO: 27835
  source 1..120: mol_type = other DNA

SEQ ID NO: 78242 - DNA, 120 bp, synthetic construct
  source 1..120: mol_type = other DNA
taaatcagggattaaaaacacaaatactttattgggctaggcatatctccaaagtgaatgaaacaagccatatatatatatatatatatatatatctgtctctccatatgagacagataa

SEQ ID NO: 78243 - DNA, 120 bp, synthetic construct; identical to SEQ ID NO: 10131
  source 1..120: mol_type = other DNA

SEQ ID NO: 78244 - DNA, 120 bp, synthetic construct; identical to SEQ ID NO: 10132
  source 1..120: mol_type = other DNA

SEQ ID NO: 78245 - DNA, 120 bp, synthetic construct; identical to SEQ ID NO: 10133
  source 1..120: mol_type = other DNA

SEQ ID NO: 78246 - DNA, 120 bp, synthetic construct; identical to SEQ ID NO: 10134
  source 1..120: mol_type = other DNA

SEQ ID NO: 78247 - DNA, 120 bp, synthetic construct; identical to SEQ ID NO: 10135
  source 1..120: mol_type = other DNA

SEQ ID NO: 78248 - DNA, 120 bp, synthetic construct; identical to SEQ ID NO: 10136
  source 1..120: mol_type = other DNA

SEQ ID NO: 78249 - DNA, 120 bp, synthetic construct
  source 1..120: mol_type = other DNA
actccagcctgggcaacaagagcgaaactccatctcaaaaaaaaaaaagggggggggggggactaccttttaaggaaaagtaggtaaatatctgacaataataaaacgaagagtactgat

SEQ ID NO: 78250 - DNA, 120 bp, synthetic construct; identical to SEQ ID NO: 32133
  source 1..120: mol_type = other DNA

SEQ ID NO: 78251 - DNA, 120 bp, synthetic construct
  source 1..120: mol_type = other DNA
gtgaagaaaggcattggtagcttgatggggatggcattgaatctgtaaattaccttgggcagtatggccattttcacgatattgattcttcctacccatgagcatggaacgttcttcgat

SEQ ID NO: 78252 - DNA, 120 bp, synthetic construct
  source 1..120: mol_type = other DNA
agggacatggaggaaattggaaaccatcattctcagtaaactatcgcaagaacaaaaaaccaaacgccacatattctcactcataggtgggaattgaacaatgagatcacatggacacag

SEQ ID NO: 78253 - DNA, 120 bp, synthetic construct; identical to SEQ ID NO: 22152
  source 1..120: mol_type = other DNA

SEQ ID NO: 78254 - DNA, 120 bp, synthetic construct; identical to SEQ ID NO: 22153
  source 1..120: mol_type = other DNA

SEQ ID NO: 78255 - DNA, 120 bp, synthetic construct; identical to SEQ ID NO: 22154
  source 1..120: mol_type = other DNA

SEQ ID NO: 78256 - DNA, 120 bp, synthetic construct; identical to SEQ ID NO: 22155
  source 1..120: mol_type = other DNA

SEQ ID NO: 78257 - DNA, 120 bp, synthetic construct; identical to SEQ ID NO: 22156
  source 1..120: mol_type = other DNA

SEQ ID NO: 78258 - DNA, 120 bp, synthetic construct; identical to SEQ ID NO: 22157
  source 1..120: mol_type = other DNA

SEQ ID NO: 78259 - DNA, 120 bp, synthetic construct; identical to SEQ ID NO: 22158
  source 1..120: mol_type = other DNA

SEQ ID NO: 78260 - DNA, 120 bp, synthetic construct; identical to SEQ ID NO: 22159
  source 1..120: mol_type = other DNA

SEQ ID NO: 78261 - DNA, 120 bp, synthetic construct; identical to SEQ ID NO: 13297
  source 1..120: mol_type = other DNA

SEQ ID NO: 78262 - DNA, 120 bp, synthetic construct; identical to SEQ ID NO: 13298
  source 1..120: mol_type = other DNA

SEQ ID NO: 78263 - DNA, 120 bp, synthetic construct; identical to SEQ ID NO: 13299
  source 1..120: mol_type = other DNA

SEQ ID NO: 78264 - DNA, 120 bp, synthetic construct; identical to SEQ ID NO: 13300
  source 1..120: mol_type = other DNA

SEQ ID NO: 78265 - DNA, 120 bp, synthetic construct; identical to SEQ ID NO: 29352
  source 1..120: mol_type = other DNA

SEQ ID NO: 78266 - DNA, 120 bp, synthetic construct; identical to SEQ ID NO: 17026
  source 1..120: mol_type = other DNA

SEQ ID NO: 78267 - DNA, 120 bp, synthetic construct; identical to SEQ ID NO: 17027
  source 1..120: mol_type = other DNA

SEQ ID NO: 78268 - DNA, 120 bp, synthetic construct; identical to SEQ ID NO: 24813
  source 1..120: mol_type = other DNA

SEQ ID NO: 78269 - DNA, 120 bp, synthetic construct
  source 1..120: mol_type = other DNA
ttcgcccactttttgatggggttgtttgtttttttcttgtaaatttgtttaagttcattgtagattctggatattagccctttgtcagatgagtaggttgcgaaaattttctcccatttt

SEQ ID NO: 78270 - DNA, 120 bp, synthetic construct
  source 1..120: mol_type = other DNA
atgcttgtgatttttgtacattgattttgtatcctgagactttgctgaagttgcttatcagcttaaggagattttgggctgagacaatggggttttctagatatacaatcatgtcttctg

SEQ ID NO: 78271 - DNA, 120 bp, synthetic construct
  source 1..120: mol_type = other DNA
tatttctgtaggatcggtggtgatatcccctttatcattttttattgtgtctatttgattcttctctctttttttctttattagtcttactagcggtctatcaattttgttgatcctttc

SEQ ID NO: 78272 - DNA, 120 bp, synthetic construct
  source 1..120: mol_type = other DNA
agcctatgtgtgtctctgcatgtgagatgggtttcctgaatacagcacactgatgggtcttgactgtttatccaatttgccagtctgtgtcttttaattggagcatttagtccatttaca

SEQ ID NO: 78273 - DNA, 120 bp, synthetic construct
  source 1..120: mol_type = other DNA
ttcagctccatcagctcctttaagcacttctctgtattggttattctagttatacattcttctaaatttttttgaaagttttcaacttctttgcctttggtttgaatgtcctcctgtagc

SEQ ID NO: 78274 - DNA, 120 bp, synthetic construct
  source 1..120: mol_type = other DNA
gaccccttgcgcttcccaggtgaggcaatgcctcgccctgcttcggctcacgcacggtgcgtgcacccactggcctgcgcccactgtctgggactccctagtgagatgaacccggtacct

SEQ ID NO: 78275 - DNA, 120 bp, synthetic construct; identical to SEQ ID NO: 6923
  source 1..120: mol_type = other DNA

SEQ ID NO: 78276 - DNA, 120 bp, synthetic construct; identical to SEQ ID NO: 6924
  source 1..120: mol_type = other DNA

SEQ ID NO: 78277 - DNA, 120 bp, synthetic construct
  source 1..120: mol_type = other DNA
gctgggtgaggggcgcccgccattgcccaggcttgcttaggtaaacaaagcagccgggaacctcgaactgggtggagcccaccacagctcaaggaggcctgcctgcctctgtaggctcca

SEQ ID NO: 78278 - DNA, 120 bp, synthetic construct
  source 1..120: mol_type = other DNA
cgagaactacgtgaagaatgcagaagcctcaggagccgatgcgatcaactggaagaaagggtatcagcaatggaagatgaaatgaatgaaatgaagcgagaagggaaggttagagaaaaa

SEQ ID NO: 78279 - DNA, 120 bp, synthetic construct
  source 1..120: mol_type = other DNA
cataaagcaagtcctgagtgacctacaaagagacttagactcccacacattaataatgggagactttaacaccccactgtcaacattagacagatcaaccagacagaaagtcaacaagga

SEQ ID NO: 78280 - DNA, 120 bp, synthetic construct
  source 1..120: mol_type = other DNA
tccttctgaaactattccaatcaatagaaaaagagggactcctccctaactcattttatgaggccagcatcattctgataccaaagctgggcagagacacaaccaaaaaagagaatttta

SEQ ID NO: 78281 - DNA, 120 bp, synthetic construct
  source 1..120: mol_type = other DNA
acagaattggaaaaaactactttaaagttcatatggaaccaaaaaagagcccgcatcaccaagtcaaccctaagccaaaagaacaaagctggaggcatcacactacatgacttcaaacta

SEQ ID NO: 78282 - DNA, 120 bp, synthetic construct
  source 1..120: mol_type = other DNA
tgctataaagacacatgcacacgtatgtttattgcggcattattcacaatagcaaagacttggaaccaacccaaatgtccaacaatgatagactggattaagaaaatggggcacatatac

SEQ ID NO: 78283 - DNA, 120 bp, synthetic construct
  source 1..120: mol_type = other DNA
atggcaaggacagaaaaccaaacactgcatgttgtcactcataggtgggaactgaacaatgaaagcacttggacacagggtgcagaacatcacacactgggcctgtcatggggtgggggg

SEQ ID NO: 78284 - DNA, 120 bp, synthetic construct
  source 1..120: mol_type = other DNA
ccctccccctaccccacaacagtccccagagtgtgatgctccccttcctgtgtccatgtgatctcattgttcaattcccacctatgagtgagaatatgcggtgtttggttttttgttctt

SEQ ID NO: 78285 - DNA, 120 bp, synthetic construct
  source 1..120: mol_type = other DNA
aagaaaaaaacaaacaaccccatcaaaaagtgggcaaaggatatgaacagacacttctcaaaagaagacatttatgcagccaaaaaacacatgaaaaaatgctcatcatcactggccatc

SEQ ID NO: 78286 - DNA, 120 bp, synthetic construct
  source 1..120: mol_type = other DNA
ctgatttcgccatgagagacgtctgactgtcccttgctccgcggtccccttctgacagccgtcttcatggctccggggatgttgtttgccttggacgtgggctttgccacccaactaagt

SEQ ID NO: 78287 - DNA, 120 bp, synthetic construct
  source 1..120: mol_type = other DNA
tttgcgcatgcgtgagtttgcctccttgttggcagcagatcccgtgggacgcttgccctggctgtggacgcagggcaggtgtcagacgcatgcagggcggcgtttctgtcacgcagtggg

SEQ ID NO: 78288 - DNA, 120 bp, synthetic construct
  source 1..120: mol_type = other DNA
catccagttgttctacctccaggattactgatttagcctcttccccctcctgctcagggctacccccagaccccgacctccagttccaccccttcggaccctgcctctagaactgttctt

SEQ ID NO: 78289 - DNA, 120 bp, synthetic construct
  source 1..120: mol_type = other DNA
cactgcactccagcctgcgtgacagagtgagactctgtctccaaaacaaaacaaatgaaacaaaaaccacaaaacaaaacaaacaaaaccatggcttaattcagtctccttatcactgcc

SEQ ID NO: 78290 - DNA, 120 bp, synthetic construct; identical to SEQ ID NO: 22466
  source 1..120: mol_type = other DNA

SEQ ID NO: 78291 - DNA, 120 bp, synthetic construct
  source 1..120: mol_type = other DNA
caggatcaagcgattctcctgcctctacctccggagtagctggtactataggcgcaggccaccatatctggctaatttttggtatttttagtagagatggggtttcaccatgttggccaa

SEQ ID NO: 78292 - DNA, 120 bp, synthetic construct
  source 1..120: mol_type = other DNA
cttcaagcatctgtttaacaaagcacatcttgcaccgcccttaatccatttaactctgagttgacacagcacatgtttcagagagcacagggttgggggtaaggttatagattaacagaa

SEQ ID NO: 78293 - DNA, 120 bp, synthetic construct; identical to SEQ ID NO: 15917
  source 1..120: mol_type = other DNA

SEQ ID NO: 78294 - DNA, 120 bp, synthetic construct; identical to SEQ ID NO: 15918
  source 1..120: mol_type = other DNA

SEQ ID NO: 78295 - DNA, 120 bp, synthetic construct; identical to SEQ ID NO: 15919
  source 1..120: mol_type = other DNA

SEQ ID NO: 78296 - DNA, 120 bp, synthetic construct; identical to SEQ ID NO: 15920
  source 1..120: mol_type = other DNA

SEQ ID NO: 78297 - DNA, 120 bp, synthetic construct; identical to SEQ ID NO: 11646
  source 1..120: mol_type = other DNA

SEQ ID NO: 78298 - DNA, 120 bp, synthetic construct; identical to SEQ ID NO: 11647
  source 1..120: mol_type = other DNA

SEQ ID NO: 78299 - DNA, 120 bp, synthetic construct
  source 1..120: mol_type = other DNA
gccacactgacttccacaatggttgaactagtttacagtcccaccaacagtgtaaaagtgttcctgtttctccacatcctctccagcacctgttgtttcctgactctttaatgattgcca

SEQ ID NO: 78300 - DNA, 120 bp, synthetic construct
  source 1..120: mol_type = other DNA
tgaagtcaggtagtgtgatgcctccagctttgttcttttggcttaggattgacttggcaatgtgggctcttttttggttccatatgaactttaaagtatttttttccaattctgtgaaaa

SEQ ID NO: 78301 - DNA, 120 bp, synthetic construct
  source 1..120: mol_type = other DNA
tttggtatcagaatgatgctggcctcataaaatgagttagggaggattccttctttttctattgattggaatagtttcagaaggaatggtaccagttcctccttgtacctctggtagaat

SEQ ID NO: 78302 - DNA, 120 bp, synthetic construct; identical to SEQ ID NO: 11650
  source 1..120: mol_type = other DNA

SEQ ID NO: 78303 - DNA, 120 bp, synthetic construct; identical to SEQ ID NO: 11651
  source 1..120: mol_type = other DNA

SEQ ID NO: 78304 - DNA, 120 bp, synthetic construct; identical to SEQ ID NO: 28143
  source 1..120: mol_type = other DNA

SEQ ID NO: 78305 - DNA, 120 bp, synthetic construct; identical to SEQ ID NO: 28144
  source 1..120: mol_type = other DNA

SEQ ID NO: 78306 - DNA, 120 bp, synthetic construct; identical to SEQ ID NO: 28145
  source 1..120: mol_type = other DNA

SEQ ID NO: 78307 - DNA, 120 bp, synthetic construct; identical to SEQ ID NO: 23697
  source 1..120: mol_type = other DNA

SEQ ID NO: 78308 - DNA, 120 bp, synthetic construct; identical to SEQ ID NO: 23698
  source 1..120: mol_type = other DNA

SEQ ID NO: 78309 - DNA, 120 bp, synthetic construct; identical to SEQ ID NO: 14377
  source 1..120: mol_type = other DNA

SEQ ID NO: 78310 - DNA, 120 bp, synthetic construct
  source 1..120: mol_type = other DNA
cctctatgcaaataaactagaaaatctagaagaaatggataaattcctcgacacacacaccctcccaagactaaaccaggaagaagttgaatctctgaatagaccaataacaggctctga

SEQ ID NO: 78311 - DNA, 120 bp, synthetic construct
  source 1..120: mol_type = other DNA
ggtacaaaaatcacaagcattcttatacaccaacaacagacaaacagagagccaaatcatgagtgaactcccattcacaattgcttcaaagagaataaaatacctaggaatccaacttag

SEQ ID NO: 78312 - DNA, 120 bp, synthetic construct
  source 1..120: mol_type = other DNA
gaagtccttgcccatgcctatgtcctgaatggtattgcctaggttttcttctagggtttttatggttttagatctaacatataagtctttaatccattttgaattactttttgtataagg

SEQ ID NO: 78313 - DNA, 120 bp, synthetic construct
  source 1..120: mol_type = other DNA
attttgtcaaaagccttttctgcatctattgagataatcatgtttttttgtcgttggttctgttaatatgctggattatgattattgatttgtgtatgttgaaccagccttgcatcccag

SEQ ID NO: 78314 - DNA, 120 bp, synthetic construct
  source 1..120: mol_type = other DNA
tttgttctcgttggtttcaaagaacatctttatttctgccttcatttcattgtgtacccagtagttcaggagcaggttgttcagtttccatgtagttgagtggttttgagtgagtttctt

SEQ ID NO: 78315 - DNA, 120 bp, synthetic construct
  source 1..120: mol_type = other DNA
gtttgccagtgtgtgtcttttaattggagcatttagcccatttacatttaaggttaatattgttatgtgtgaatttgatcctgtcattatgatgttagctggttattttgctcgttagtt

SEQ ID NO: 78316 - DNA, 120 bp, synthetic construct; identical to SEQ ID NO: 14378
  source 1..120: mol_type = other DNA

SEQ ID NO: 78317 - DNA, 120 bp, synthetic construct
  source 1..120: mol_type = other DNA
gtaatgggattgctgggtcaaatggtatttctagttctagatccctgaggagttgccacaccgacttccacagtggttgaactagtttacagtcccaccaacagtgtaaaagtgttccta

SEQ ID NO: 78318 - DNA, 120 bp, synthetic construct
  source 1..120: mol_type = other DNA
attttctagatatacaatcatgtcatctgcaaacagggacaatttggcttcctcttttcctaattgaataccctttatttctttctcctgcctgattgccctggccagaacttccaacac

SEQ ID NO: 78319 - DNA, 120 bp, synthetic construct
  source 1..120: mol_type = other DNA
catcccaggaatgaagcccacttgatcatggtggataagtgttttgatatgctgtgctgctggatttggtttgccagtatttttttgagaatttttgtatcaatgttcatcagggatatt

SEQ ID NO: 78320 - DNA, 120 bp, synthetic construct; identical to SEQ ID NO: 8885
  source 1..120: mol_type = other DNA

SEQ ID NO: 78321 - DNA, 120 bp, synthetic construct; identical to SEQ ID NO: 8886
  source 1..120: mol_type = other DNA

SEQ ID NO: 78322 - DNA, 120 bp, synthetic construct; identical to SEQ ID NO: 8887
  source 1..120: mol_type = other DNA

SEQ ID NO: 78323 - DNA, 120 bp, synthetic construct
  source 1..120: mol_type = other DNA
acaaaaataaagacagtacagttttgagatttccagcagtttgaacgctcgtgacataatccccccgaccccagagacgtaagcataaacccttttttctttttccaaatactctgcaga

SEQ ID NO: 78324 - DNA, 120 bp, synthetic construct
  source 1..120: mol_type = other DNA
tctgcggaggaagggtcagggcagctggctacgtcgcggtaaatctcaggatgttccctcctctctttctggaacaaaatttctcgaatgcggcctggggatcaccttcttcagaatgaa

SEQ ID NO: 78325 - DNA, 120 bp, synthetic construct
  source 1..120: mol_type = other DNA
taataaaataataaaataaaggagcagtgagtgatgagaaccaaatctctccccctctcctcactgcgccttcctagagattcaggctcagatccaaacaggtctgggaagagctggtcc

SEQ ID NO: 78326 - DNA, 120 bp, synthetic construct
  source 1..120: mol_type = other DNA
ctggttgtgtttaaaatttggccaactctaggtcaacatttggaatcagaaataggcaaggtgtctcactttaataaattttctgagtgaccctgggctccacgaagctccagaaagcac

SEQ ID NO: 78327 - DNA, 120 bp, synthetic construct
  source 1..120: mol_type = other DNA
aggggcattcgttaccttgttgggcgcccaggattccagggcaggcacctactgttgagagtccccccatagctggttcaagccaggccacctgcctcggccatcgcaccccggatccaa

SEQ ID NO: 78328 - DNA, 120 bp, synthetic construct
  source 1..120: mol_type = other DNA
cggagtcagtgcgtgcggtgcaagcccgggggctcggtattgttatggtggttatttgccaataatcaaagtcgccgccggaaactcagccgagggtgaccatggtcccggcgcctcctc

SEQ ID NO: 78329 - DNA, 120 bp, synthetic construct; identical to SEQ ID NO: 20621
  source 1..120: mol_type = other DNA

SEQ ID NO: 78330 - DNA, 120 bp, synthetic construct; identical to SEQ ID NO: 25501
  source 1..120: mol_type = other DNA

SEQ ID NO: 78331 - DNA, 120 bp, synthetic construct
  source 1..120: mol_type = other DNA
agatgacgagttagtgggtgcagtgcaccagcatggcacatgtatacataagtaacaaacctgcatattgtgcacatgtaccctaaaacttaaagtgtaataataattaaaaaaaaaaaa

SEQ ID NO: 78332 - DNA, 120 bp, synthetic construct; identical to SEQ ID NO: 25502
  source 1..120: mol_type = other DNA

SEQ ID NO: 78333 - DNA, 120 bp, synthetic construct; identical to SEQ ID NO: 25503
  source 1..120: mol_type = other DNA

SEQ ID NO: 78334 - DNA, 120 bp, synthetic construct; identical to SEQ ID NO: 32148
  source 1..120: mol_type = other DNA

SEQ ID NO: 78335 - DNA, 120 bp, synthetic construct
  source 1..120: mol_type = other DNA
ggggtcctctgtctaggaaaaccagagacccttgttcacatgtttatctgctgaccttccctccactattgtcctatgaccctgccaaatccccctctccgagaaacacccaagaatgct

SEQ ID NO: 78336 - DNA, 120 bp, synthetic construct
  source 1..120: mol_type = other DNA
aagctggcaaccatcattctgagcaaactaccacaaggacagaaagccaaacactgcatgttctcactcatagatgggaactgaacaatgaaaacacttggacacagggagaggaacatc

SEQ ID NO: 78337 - DNA, 120 bp, synthetic construct; identical to SEQ ID NO: 24214
  source 1..120: mol_type = other DNA

SEQ ID NO: 78338 - DNA, 120 bp, synthetic construct; identical to SEQ ID NO: 24215
  source 1..120: mol_type = other DNA

SEQ ID NO: 78339 - DNA, 120 bp, synthetic construct
  source 1..120: mol_type = other DNA
gactgggtaatttataaaggaaagaggttcaattgactcacagttttaaatggccggggaagcctcaggaaacttacaattatggtggaaggcaaagggaaatgaggaccttcttcacat

SEQ ID NO: 78340 - DNA, 120 bp, synthetic construct
  source 1..120: mol_type = other DNA
atttctctgatggccagtgatggtgagcattttttcatgtgttttttgcctgtataaatgtcttcttttgagacgtgtctgttcatgtccttcgcccactttttgatggggttgtttgtt

SEQ ID NO: 78341 - DNA, 120 bp, synthetic construct
  source 1..120: mol_type = other DNA
gaagaaaggcattggtagcctgatgggggtggcattgaatctgtaaattaccttgggcagtatggccattttcacgatattgattcttcctacccatgagcatggaatgttcttccattt

SEQ ID NO: 78342 - DNA, 120 bp, synthetic construct
  source 1..120: mol_type = other DNA
ttccctctttttctattgattggaatagtttcagaagtaatggtaccagttcctccttgtacctgtggtagaattcggctgtgaatccatctggtcctggactctttttggttggtaagc

SEQ ID NO: 78343 - DNA, 120 bp, synthetic construct
  source 1..120: mol_type = other DNA
tccttgttgactttctgtctcgttgatctgtctaatgtttacagtggggtgttaaagtctcccattattaatgtgtgggagtctaagtctctttgtaggtcactcaggacttgctttatg

SEQ ID NO: 78344 - DNA, 120 bp, synthetic construct
  source 1..120: mol_type = other DNA
cattctccccatcactttcaggtacaccaatcagacgtagatttggtcttttcacatagtcccatatttcttggaggctttgctcgtttctttttattcttttttctctaaattttcctt

SEQ ID NO: 78345 - DNA, 120 bp, synthetic construct
  source 1..120: mol_type = other DNA
gactccatggggtaggaccctccgagccaggtgcaggatataatctcgtggtgcgccgttttttaagcccatcggaaaagcgcagtattcgggtgggaatgacccgattctccaggtgcc

SEQ ID NO: 78346 - DNA, 120 bp, synthetic construct
  source 1..120: mol_type = other DNA
ctctggcctggcaaaagctgccgtcctctgtagctacaagcattctcaaatccactctatctatttcaggttatcatcagacccattttatatgttggaaaactgagatactacttgttc

SEQ ID NO: 78347 - DNA, 120 bp, synthetic construct; identical to SEQ ID NO: 12113
  source 1..120: mol_type = other DNA

SEQ ID NO: 78348 - DNA, 120 bp, synthetic construct; identical to SEQ ID NO: 12114
  source 1..120: mol_type = other DNA

SEQ ID NO: 78349 - DNA, 120 bp, synthetic construct
  source 1..120: mol_type = other DNA
tccaatttatttagaaaaatagactctggattcacattcaccccagggctatgtgggatgacagcaaggagacacctgagatgaaatgaggaaggtttgaattactggtatccaaggggc

SEQ ID NO: 78350 - DNA, 120 bp, synthetic construct
  source 1..120: mol_type = other DNA
agtcatccagcccagagggtagggtcttggggttcagtaaggttggtaaggcagggtcccgtccccgccagcggtaagatagtggcagtgggcctgcctggctctgatggagccaggaaa

SEQ ID NO: 78351 - DNA, 120 bp, synthetic construct
  source 1..120: mol_type = other DNA
gggttggaggtccagaagacattgtagcttgaaggggagaagataaataggaaatattattcaagagaaggcagtgggcattataaagagaaatacaaagtgttcaggagtcaggttggg

SEQ ID NO: 78352 - DNA, 120 bp, synthetic construct
  source 1..120: mol_type = other DNA
ttttgctcttgttgcccaggctggagtgcaatggcacgatctcggctcagcgcaacctccacctccctggttcaagcaattctcctgcctcagcctcccaagtagcttggatcacaggca

SEQ ID NO: 78353 - DNA, 120 bp, synthetic construct
  source 1..120: mol_type = other DNA
ataactctcctgatccattccttcccacccttgctctcgcttcaagctggggcgcccagattaggagtccgcctgcctgcccgccctggggcccggttaccggtgaggaggggcttcggg

SEQ ID NO: 78354 - DNA, 120 bp, synthetic construct
  source 1..120: mol_type = other DNA
tagtggcatgtgcctataatcccagctacctgggaggctgaggcaggaggattgcttgtgcccaggagtttgagtccagtctgagtaacataacaagaccctgtctcttaaaaaaaaaaa

SEQ ID NO: 78355 - DNA, 120 bp, synthetic construct
  source 1..120: mol_type = other DNA
tagattttcttaaaatgtcactgaatacttaattccacatcatgctttacaatgtaattaaaaataagttaatcagattaaataaaatactttcttttcagcacagatgaagctgccact

SEQ ID NO: 78356 - DNA, 120 bp, synthetic construct
  source 1..120: mol_type = other DNA
gtaatatttagggtttttttgtttatacttttttaatgagacaggatctcgctatattgcccaggctgatcttgaactgggctaaagcagtccggcctcagcctcccaagtagttgttat

SEQ ID NO: 78357 - DNA, 120 bp, synthetic construct
  source 1..120: mol_type = other DNA
cagagtagaatgatggttaccagaggctgggggagggggttggggagatgttggtaaaaggatacacaattttagttaggcaggataaataagttcagaagatctattgtacatcattgt

SEQ ID NO: 78358 - DNA, 120 bp, synthetic construct; identical to SEQ ID NO: 3923
  source 1..120: mol_type = other DNA

SEQ ID NO: 78359 - DNA, 120 bp, synthetic construct
  source 1..120: mol_type = other DNA
tgcctatagttttagcttcttagggaggctgaggttgagcccaggagtttgaggccagcctgggcaacataggtagacacccctcttataattaagcaaataaaaattttaaaaaagtgt

SEQ ID NO: 78360 - DNA, 120 bp, synthetic construct; identical to SEQ ID NO: 35056
  source 1..120: mol_type = other DNA

SEQ ID NO: 78361 - DNA, 120 bp, synthetic construct
  source 1..120: mol_type = other DNA
aatacatcttactttcttctttctctcccctttccttcccttccttcccttccttccttccctccctccctcccttccttccctcccttccttcctttccttccttcccttccttcactt

SEQ ID NO: 78362 - DNA, 120 bp, synthetic construct
  source 1..120: mol_type = other DNA
agagagacccgggttacgcatctttggcaggagaggcatggatgcgacgctcatgcctttcatggatggctctgctcagcccacgctgccaggtggggcaggattttcactgacccagaa

SEQ ID NO: 78363 - DNA, 120 bp, synthetic construct
  source 1..120: mol_type = other DNA
tgcccccaataacagagccccaaaatacatgaaccaaaaattgaaagaaagaaaagcagaacattttttcatgtgttttttggtgcataaatgtcttcttttgagaagtgtctgttcatg

SEQ ID NO: 78364 - DNA, 120 bp, synthetic construct
  source 1..120: mol_type = other DNA
ttggctgtttgtctgttattggtgtataagaatgtttgtgatttttgtacattgattttgtatcctgagactttgctgaagttgcttatcagcttaaggagattttgggctgagacaatg

SEQ ID NO: 78365 - DNA, 120 bp, synthetic construct
  source 1..120: mol_type = other DNA
acactctggggactgttgtggggtggggggaggtgggagggatagctttaggagatatacttaatgctaaatgaccagttaatggttgcagtacaccaacatggcacatgtatacatatg

SEQ ID NO: 78366 - DNA, 120 bp, synthetic construct
  source 1..120: mol_type = other DNA
ctggaagacgggcagctccccactctcattccagttttgcttctgaggggctcaggaggggccgcagcctgtgcccagtcatcaacatcaacaatcttattagtgggcagaaagccaaga

SEQ ID NO: 78367 - DNA, 120 bp, synthetic construct; identical to SEQ ID NO: 16342
  source 1..120: mol_type = other DNA

SEQ ID NO: 78368 - DNA, 120 bp, synthetic construct; identical to SEQ ID NO: 33488
  source 1..120: mol_type = other DNA

SEQ ID NO: 78369 - DNA, 120 bp, synthetic construct
  source 1..120: mol_type = other DNA
taatcgtcaatgttactttgtaaactctttgttcattgattattcactgctaattttttttttagggagatatacctaatgctaaatgacgagttaatgggtgcagcacaccaacatggc

SEQ ID NO: 78370 - DNA, 120 bp, synthetic construct; identical to SEQ ID NO: 23996
  source 1..120: mol_type = other DNA

SEQ ID NO: 78371 - DNA, 120 bp, synthetic construct; identical to SEQ ID NO: 23997
  source 1..120: mol_type = other DNA

SEQ ID NO: 78372 - DNA, 120 bp, synthetic construct
  source 1..120: mol_type = other DNA
tttattttttatttttccaagggttacgggggcacaggtagtatttggttacataagtaagttctttggtggtgatttgtgagactttggtgcacccatcacctgagcagtatacactgc

SEQ ID NO: 78373 - DNA, 120 bp, synthetic construct
  source 1..120: mol_type = other DNA
tcaatccacaaggcatactgcactaaatgctgggttttgtgtgtgtgtgtttctgtatatatgtgtgtgtgtgtgtgtgtgtgtgtgtgtatatgtatatgtgtgtgtgtgtgtatatat

SEQ ID NO: 78374 - DNA, 120 bp, synthetic construct; identical to SEQ ID NO: 32087
  source 1..120: mol_type = other DNA

SEQ ID NO: 78375 - DNA, 120 bp, synthetic construct; identical to SEQ ID NO: 32088
  source 1..120: mol_type = other DNA

SEQ ID NO: 78376 - DNA, 120 bp, synthetic construct; identical to SEQ ID NO: 15704
  source 1..120: mol_type = other DNA

SEQ ID NO: 78377 - DNA, 120 bp, synthetic construct; identical to SEQ ID NO: 15705
  source 1..120: mol_type = other DNA

SEQ ID NO: 78378 - DNA, 120 bp, synthetic construct
  source 1..120: mol_type = other DNA
agtgagctgagatcgtaccattgcactccagcctgggcaacaaagcaagactgtctcaaaacatttttaaaaataaataaagtggaaagggttccagcattgttggggcttacattagta

SEQ ID NO: 78379 - DNA, 120 bp, synthetic construct; identical to SEQ ID NO: 35648
  source 1..120: mol_type = other DNA

SEQ ID NO: 78380 - DNA, 120 bp, synthetic construct; identical to SEQ ID NO: 10176
  source 1..120: mol_type = other DNA

SEQ ID NO: 78381 - DNA, 120 bp, synthetic construct; identical to SEQ ID NO: 23879
  source 1..120: mol_type = other DNA

SEQ ID NO: 78382 - DNA, 120 bp, synthetic construct; identical to SEQ ID NO: 23880
  source 1..120: mol_type = other DNA

SEQ ID NO: 78383 - DNA, 120 bp, synthetic construct; identical to SEQ ID NO: 23881
  source 1..120: mol_type = other DNA

SEQ ID NO: 78384 - DNA, 120 bp, synthetic construct
  source 1..120: mol_type = other DNA
atgacctcatcacctcccagagaccccacctcctagtactagcaccttggggattagatttcaaaatattaattttggggggatgcaaacatttagatcatagcaatgattgaggtagtg

SEQ ID NO: 78385 - DNA, 120 bp, synthetic construct
  source 1..120: mol_type = other DNA
ggtggtggtggtggtggagatggtggtggtggaggtagtggtggtggagatggtggtggtggaggtagtggtggtggaggtgatggtggaggtagtggtggtggaggtggtggtggtgga

SEQ ID NO: 78386 - DNA, 120 bp, synthetic construct
  source 1..120: mol_type = other DNA
tggtggaggtagtggtggtggtgatggtggtggtggaggtggtggtggaggtggtggtggcggaggtggtggtggtggaggtggtggtggtggaggtggtggtggtggtagtggtggtgg

SEQ ID NO: 78387 - DNA, 120 bp, synthetic construct; identical to SEQ ID NO: 23885
  source 1..120: mol_type = other DNA

SEQ ID NO: 78388 - DNA, 120 bp, synthetic construct; identical to SEQ ID NO: 23886
  source 1..120: mol_type = other DNA

SEQ ID NO: 78389 - DNA, 120 bp, synthetic construct; identical to SEQ ID NO: 23887
  source 1..120: mol_type = other DNA

SEQ ID NO: 78390 - DNA, 120 bp, synthetic construct; identical to SEQ ID NO: 11803
  source 1..120: mol_type = other DNA

SEQ ID NO: 78391 - DNA, 120 bp, synthetic construct; identical to SEQ ID NO: 17641
  source 1..120: mol_type = other DNA

SEQ ID NO: 78392 - DNA, 120 bp, synthetic construct; identical to SEQ ID NO: 10104
  source 1..120: mol_type = other DNA

SEQ ID NO: 78393 - DNA, 120 bp, synthetic construct
  source 1..120: mol_type = other DNA
tgagacgcacagccccagccgaggtcaaaaggcaacactcaggcttcttggttcagctctcagattggaaacaagcgtcctttttgtgatcacttagcaacattttatttatttatttat

SEQ ID NO: 78394 - DNA, 120 bp, synthetic construct
  source 1..120: mol_type = other DNA
taggcactgttgtaaatgctttgtatctgtgggccattcaggaaaattcaatttgtaacaattgttactctctaatttctattagctgttaataactgataatcaaacatcgttacatct

SEQ ID NO: 78395 - DNA, 120 bp, synthetic construct
  source 1..120: mol_type = other DNA
acattgaactcatggccaacaccctatatctcaggttggagtgaagcttatccaacatgtatgttagcacttcagcactacactttgggagatattctaaacagtgaaattgccagctaa

SEQ ID NO: 78396 - DNA, 120 bp, synthetic construct
  source 1..120: mol_type = other DNA
acccgtggaatccgcctcctgggaacccgtggaatccgcctcctgggaacccgtggaatccgcctcctgggaacccgtggaatcgggttggatgcgcatgtgcgtgtctctttttccggg

SEQ ID NO: 78397 - DNA, 120 bp, synthetic construct; identical to SEQ ID NO: 3099
  source 1..120: mol_type = other DNA

SEQ ID NO: 78398 - DNA, 120 bp, synthetic construct; identical to SEQ ID NO: 17275
  source 1..120: mol_type = other DNA

SEQ ID NO: 78399 - DNA, 120 bp, synthetic construct; identical to SEQ ID NO: 17276
  source 1..120: mol_type = other DNA

SEQ ID NO: 78400 - DNA, 120 bp, synthetic construct; identical to SEQ ID NO: 27370
  source 1..120: mol_type = other DNA

SEQ ID NO: 78401 - DNA, 120 bp, synthetic construct; identical to SEQ ID NO: 27371
  source 1..120: mol_type = other DNA

SEQ ID NO: 78402 - DNA, 120 bp, synthetic construct; identical to SEQ ID NO: 4351
  source 1..120: mol_type = other DNA

SEQ ID NO: 78403 - DNA, 120 bp, synthetic construct
  source 1..120: mol_type = other DNA
tacctagttctttgaaataagtgaattaaatacttaagctgctgcctcatcaagagaaaagagagaaacaagccaagtggtaaacaggaggtgaatagatgtgaggacagcgaggggtgg

SEQ ID NO: 78404 - DNA, 120 bp, synthetic construct; identical to SEQ ID NO: 31937
  source 1..120: mol_type = other DNA

SEQ ID NO: 78405 - DNA, 120 bp, synthetic construct
  source 1..120: mol_type = other DNA
cacagtgcgaaagtcaccaggttaagagtcaggtgtaggcacctcaggacaccttcagcggcccttgccccagcagaagcagcctgaagtcctgctgctttgggcgtgcccagatttcag

SEQ ID NO: 78406 - DNA, 120 bp, synthetic construct
  source 1..120: mol_type = other DNA
cccaatgtctgtggaggggcagggaaggaagcgcgggctctctgtggaggggctgggagaggagcgcccgctctctgtagaggggcggggaggggagcgcccgctgtctgtggaggggcg

SEQ ID NO: 78407 - DNA, 120 bp, synthetic construct
  source 1..120: mol_type = other DNA
atttacctgatgaggttggcatctgaagtggaattcttagtgcccatgctcttgttagagatgggtttttccattcagaagttcaacatttcatgggattaaccatgctcaacttccctt

SEQ ID NO: 78408 - DNA, 120 bp, synthetic construct
  source 1..120: mol_type = other DNA
tgttgatgagtcttgttctcatcaacttgttggaattccctgcaccctttgctgtgtccaccacagtggctgtccttccagctcaattcatactattttgattaacagaaattctgaact

SEQ ID NO: 78409 - DNA, 120 bp, synthetic construct
  source 1..120: mol_type = other DNA
tcattcgtgtgttcactggagtaacacttttaatttccttcaagagcttttcctttgtattcacaacatggctgactagcacaagaggtctggcctttagcctgtgtcagcttttgacat

SEQ ID NO: 78410 - DNA, 120 bp, synthetic construct; identical to SEQ ID NO: 31938
  source 1..120: mol_type = other DNA

SEQ ID NO: 78411 - DNA, 120 bp, synthetic construct
  source 1..120: mol_type = other DNA
tttctgccttggcctcccaaagggctgggattacaagcaagagccacagcacctggccatgattgctttttcagtaaaacatttttatgatggtaaaatatcataaacttgactgtctca

SEQ ID NO: 78412 - DNA, 120 bp, synthetic construct
  source 1..120: mol_type = other DNA
ggtgcagtaagagtgttaattaagcatattggcctccttgagtttactgtgaaaatctagagcttgcattctcaatggggtgatattgccccccagttaagtaaaactagttcttggggg

SEQ ID NO: 78413 - DNA, 120 bp, synthetic construct
  source 1..120: mol_type = other DNA
tccacctgcattgttctgtctttccatctctctttcttttttaatttccttccttccttccttccttcctctttcgtttccttttttattgcctgccttacttactccttcctctccctc

SEQ ID NO: 78414 - DNA, 120 bp, synthetic construct
  source 1..120: mol_type = other DNA
caagatggattaaagacttaaatgctagacgtaaaaccataaaaaccctagaagaaaacctaggccataacattcagaacataggcatgggcaaggacttcatgtctaaaacaccaaaag

SEQ ID NO: 78415 - DNA, 120 bp, synthetic construct
  source 1..120: mol_type = other DNA
gctgactcggtgtgatctggggacagggaacagggcctggagctggacctggttgggaagcctggagagcccctgcagggggtggggcttgaagggatggggtccggaaggaaaagtcga

SEQ ID NO: 78416 - DNA, 120 bp, synthetic construct
  source 1..120: mol_type = other DNA
tccgtaatcagcattttgggaggctaaggcgggaggattgtttgagcccaggagtttgagaccagactgggcaacatggggaatccccgtctctactaaaaaatacaaaaattagccagg

SEQ ID NO: 78417 - DNA, 120 bp, synthetic construct
  source 1..120: mol_type = other DNA
tccgcccggccgccatcccatctaggaagtgaggagagcctcttcccggctgccatcacatctaggaagtgaggagcgtctctgcccggccgcccatcgtctgagatgtggggagcgcct

SEQ ID NO: 78418 - DNA, 120 bp, synthetic construct; identical to SEQ ID NO: 9003
  source 1..120: mol_type = other DNA

SEQ ID NO: 78419 - DNA, 120 bp, synthetic construct
  source 1..120: mol_type = other DNA
ttgtggaagtcagtgtggcgattcctcagggatctagaactagaaataccatttgacccagccatcccattactggatgtatacccaaaggattataagtcatgctgctataaagacaca

SEQ ID NO: 78420 - DNA, 120 bp, synthetic construct; identical to SEQ ID NO: 27773
  source 1..120: mol_type = other DNA

SEQ ID NO: 78421 - DNA, 120 bp, synthetic construct; identical to SEQ ID NO: 12032
  source 1..120: mol_type = other DNA

SEQ ID NO: 78422 - DNA, 120 bp, synthetic construct; identical to SEQ ID NO: 12033
  source 1..120: mol_type = other DNA

SEQ ID NO: 78423 - DNA, 120 bp, synthetic construct
  source 1..120: mol_type = other DNA
aactctgtatactccctgagcaatttttctgtaagcccaaagttcctctaaaagataaggtctacttaaaaaggaccaattattgggccaggtgcagtggctcatgcctgtaatcctagc

SEQ ID NO: 78424 - DNA, 120 bp, synthetic construct
  source 1..120: mol_type = other DNA
taaaaataaaatgacaatttattagttgtttatctgaacttcagatttaactgggcctgtatttatctggcagcctcaaccccgtgcagaccattgatctcaggagaggcaggcagagcg

SEQ ID NO: 78425 - DNA, 120 bp, synthetic construct
  source 1..120: mol_type = other DNA
ctctgaagcatgacacccctgcctcttgctctgaagaacacttagggtgctgttgggtgcgggaacaagccaggcttgggggtggggggcacgggcagttaaagagatagatggagaagt

SEQ ID NO: 78426 - DNA, 120 bp, synthetic construct
  source 1..120: mol_type = other DNA
ctgctccttccgcctcgcggaccccggaagcgcgcgtggccgccatggcgcggaatgtggtgtgagtaggggtcgtcacccccccgtcgcggggcgccccttagtgtcacaagcagacgg

SEQ ID NO: 78427 - DNA, 120 bp, synthetic construct
  source 1..120: mol_type = other DNA
ttggggaacacccagcaccaaggaagaaaaggtctgagtgaggccaacactgccctgagcctcacgtgaattccacgctggcccttcgcctgtccctggagaatgaggaggaagtgaggg

SEQ ID NO: 78428 - DNA, 120 bp, synthetic construct
  source 1..120: mol_type = other DNA
tgaaccctcttttctactgtttactgggagtccccaaactttgtctccactcctgcagtcccacagctggtcaccagagggaatgtgtgagcccctcgggtggccatggctagcctgaac

SEQ ID NO: 78429 - DNA, 120 bp, synthetic construct
  source 1..120: mol_type = other DNA
tttagtggagtgctggggtgtggtgcactcaactcacatttagtgtactgaatcagagtcttggcagcaccgtcttccaggagcctaagcctggttagcctgcgttctccataccgagga

SEQ ID NO: 78430 - DNA, 120 bp, synthetic construct
  source 1..120: mol_type = other DNA
ggcctaagtgtgtgacatggacccaatctcttctgtacaggtaccccctgtaccggctgggtggcccacaacttcgggtgttccgaaccaacttcttcattcagctggtgcggcccggtg

SEQ ID NO: 78431 - DNA, 120 bp, synthetic construct
  source 1..120: mol_type = other DNA
gctgtggagcaggccaggggttggttgggcagtgctcccactctgtggggtctgtgccactgccaccccatgctggtgtgcccagagtagggagtcttgcagccagcagcactggtgttg

SEQ ID NO: 78432 - DNA, 120 bp, synthetic construct
  source 1..120: mol_type = other DNA
taaagttctgatttttttaaagttctgatttttttttcactcccttccggcaggctctaacaagagaagagatcacagaaacgtgaggatcaagaagccggactacaaggtcgcctacgt

SEQ ID NO: 78433 - DNA, 120 bp, synthetic construct
  source 1..120: mol_type = other DNA
agtttgtgaaaaaggccaagttagcatggcagcttttctgaaaaacagtcacatttgttgttctaaacaggggcccccggaataatttggcctgatatttgctgtgcatgaaatcagcca

SEQ ID NO: 78434 - DNA, 120 bp, synthetic construct
  source 1..120: mol_type = other DNA
gtccaggcaggcggcagcccccagggcgccctgggattcctgaaggcagggctgccttgtttacttgtcattgggacatttttctccattcctgttctttaccccgatcagctgtctctc

SEQ ID NO: 78435 - DNA, 120 bp, synthetic construct
  source 1..120: mol_type = other DNA
atgttcactttaattgccaggctctgggctgggaggagggggagctttaatgtgagtagagcctgaggcattttggatggacaggttcagcatggtaccagacgtgatttgtgtcatgtt

SEQ ID NO: 78436 - DNA, 120 bp, synthetic construct
  source 1..120: mol_type = other DNA
gacttgagacgtggccccatgctggggaggcgggttggccagagagggccacacacaggctcggagctgcatgccaggtggggaatgagacacgcaggtgaaaagacccagaagatagtt

SEQ ID NO: 78437 - DNA, 120 bp, synthetic construct
  source 1..120: mol_type = other DNA
ggatacagaattgatttttggttttaatgatgtcttattcagaaccttccaaggagcccggaaggtttccagcccctcttcccagaacccctgcatctggtgaggcccagggcctccaga

SEQ ID NO: 78438 - DNA, 120 bp, synthetic construct
  source 1..120: mol_type = other DNA
cgccctgtctcaccccggcctgtgctgtcccgtcgcagcccccatgtctcccacaggcctccctgccagggaggagaaaggggctggggagctactgcacccccatctccacagcacacc

SEQ ID NO: 78439 - DNA, 120 bp, synthetic construct
  source 1..120: mol_type = other DNA
accacccccacacctgggcaagacccctgtccaacccaaacaggctgttcctgcagaaggaactcgcccggaaagatgcatctcccaaggctgacaggaccactcccgcctgtgtctgga

SEQ ID NO: 78440 - DNA, 120 bp, synthetic construct
  source 1..120: mol_type = other DNA
atgcctcctgagggcatctggggcatctggttctcctctttgggagctggcagtgttcctggggcggcttgatagtgtcccatctatggcatcacttccgtacctggtggcagatgagca

SEQ ID NO: 78441 - DNA, 120 bp, synthetic construct
  source 1..120: mol_type = other DNA
gactggtctgctttggattggcctgttctggatgtttcatgagtgaaccactcagggtctgtgtggcttttcgtgtctggcttatttcacttggtgtggcatcttcagggcgcacccatg

SEQ ID NO: 78442 - DNA, 120 bp, synthetic construct
  source 1..120: mol_type = other DNA
cctaagacgctctccatagtggacgctgcactttgccatggcatgccgggtggacaggactgctggggcccccgtgttccagcctctcctgcgcctccagatgcctcctgagggcatctg

SEQ ID NO: 78443 - DNA, 120 bp, synthetic construct
  source 1..120: mol_type = other DNA
aagcaaaagctgagatcatttcctttaagaacagaaacaagacaaggatgcccactcacactactcctattcaacatagtactggggaagtcctagccagagcaatcaggcaagaaaaaa

SEQ ID NO: 78444 - DNA, 120 bp, synthetic construct
  source 1..120: mol_type = other DNA
tactttttaaattttttgtagagatgtggtttcaccatgttgcccaggctggtctcgaactcctgggctcaactgatctgcccaccttggcctaccagagtgctggaattacagggatga

SEQ ID NO: 78445 - DNA, 120 bp, synthetic construct
  source 1..120: mol_type = other DNA
caagaggttaatgacttcccaaactccttctagaaccactattctgatgaccgttctccctgctttgagagaatgcctttcagagacactattgtactagtacaaccttgattatctggt

SEQ ID NO: 78446 - DNA, 120 bp, synthetic construct; identical to SEQ ID NO: 13129
  source 1..120: mol_type = other DNA

SEQ ID NO: 78447 - DNA, 120 bp, synthetic construct; identical to SEQ ID NO: 13130
  source 1..120: mol_type = other DNA

SEQ ID NO: 78448 - DNA, 120 bp, synthetic construct; identical to SEQ ID NO: 78444
  source 1..120: mol_type = other DNA

SEQ ID NO: 78449 - DNA, 120 bp, synthetic construct; identical to SEQ ID NO: 13131
  source 1..120: mol_type = other DNA

SEQ ID NO: 78450 - DNA, 120 bp, synthetic construct
  source 1..120: mol_type = other DNA
ttctcctgccttagcctcccaagtagctcagactacagccgcctgccaccaagcccggcgctctcttgctggcgcatgacaaccgtgcgttccaccctacgactaatttttttttttttt

SEQ ID NO: 78451 - DNA, 120 bp, synthetic construct; identical to SEQ ID NO: 17986
  source 1..120: mol_type = other DNA

SEQ ID NO: 78452 - DNA, 120 bp, synthetic construct; identical to SEQ ID NO: 17987
  source 1..120: mol_type = other DNA

SEQ ID NO: 78453 - DNA, 120 bp, synthetic construct; identical to SEQ ID NO: 17988
  source 1..120: mol_type = other DNA

SEQ ID NO: 78454 - DNA, 120 bp, synthetic construct
  source 1..120: mol_type = other DNA
tacaggtgagagccaccacgcccagccctttatttatttatttatttatttattttgagacggagtttcactcttaactcactgcaacctctgcctcccgggttcaagagattctcctgc

SEQ ID NO: 78455 - DNA, 120 bp, synthetic construct
  source 1..120: mol_type = other DNA
taaagatacaaaatttagccaagcatggtggcacatacctgtaatctcagctactcggaaggctgaggcaggagaatcggttgaacccaggaggtggaggttgcagtgagcccagattgc

SEQ ID NO: 78456 - DNA, 120 bp, synthetic construct
  source 1..120: mol_type = other DNA
tcagcctcccaaagtgctaggattacaggtgtgagccaccacgccctgcaacattaaatattttattaatttcatctttttcaagaaatccctcctggagtcttcttacctgttttaatc

SEQ ID NO: 78457 - DNA, 120 bp, synthetic construct
  source 1..120: mol_type = other DNA
tgagtgaatgaataataaaagcactgctctgttgtctttgtaattactttttattttattttttttttgagacggagtctcactctttcgcccaggctggattgcagtggcgcgatcttg

SEQ ID NO: 78458 - DNA, 120 bp, synthetic construct
  source 1..120: mol_type = other DNA
aaaaaaaaaagaagcccagtgttattctgactcttttttttgagatggagtctcgctctgtttcccaggctggagtgcagtggcgcgatcactacctctgcctcctaagttcaagtattc

SEQ ID NO: 78459 - DNA, 120 bp, synthetic construct; identical to SEQ ID NO: 894
  source 1..120: mol_type = other DNA

SEQ ID NO: 78460 - DNA, 120 bp, synthetic construct; identical to SEQ ID NO: 895
  source 1..120: mol_type = other DNA

SEQ ID NO: 78461 - DNA, 120 bp, synthetic construct
  source 1..120: mol_type = other DNA
ttgtttgtttgttttgagatagactcttgctctgttgcccaggctggagtgcagtgacgtgatcttggctcactgcaacctctgcctcccagattcaagcaattctcctgccttaacctc

SEQ ID NO: 78462 - DNA, 120 bp, synthetic construct
  source 1..120: mol_type = other DNA
gtgaaaccctgtctctactaaaaatacaaaaaaaaaattagccaggtgtggtggtgcatgtgtgtaatctctgctacttgggaggggctgaggcaggagaatcgcttgaacccaggagtc

SEQ ID NO: 78463 - DNA, 120 bp, synthetic construct
  source 1..120: mol_type = other DNA
tgacctcgtgatccacccgccttggcctcccaaagtgctgggattacaggcgtgagctattgcgcctagccactttcctttctattaaaaaaaaaaaaaaatatatatatatatatatat

SEQ ID NO: 78464 - DNA, 120 bp, synthetic construct
  source 1..120: mol_type = other DNA
tgtccctttaattttctctagtagacagtctcaaagaaaactgaaaaaggaaacatctaaataattcctaaactggatatataatcctagaacgatggttgggcggggcggggggggggg

SEQ ID NO: 78465 - DNA, 120 bp, synthetic construct; identical to SEQ ID NO: 27758
  source 1..120: mol_type = other DNA

SEQ ID NO: 78466 - DNA, 120 bp, synthetic construct; identical to SEQ ID NO: 27759
  source 1..120: mol_type = other DNA

SEQ ID NO: 78467 - DNA, 120 bp, synthetic construct; identical to SEQ ID NO: 27760
  source 1..120: mol_type = other DNA

SEQ ID NO: 78468 - DNA, 120 bp, synthetic construct; identical to SEQ ID NO: 27761
  source 1..120: mol_type = other DNA

SEQ ID NO: 78469 - DNA, 120 bp, synthetic construct; identical to SEQ ID NO: 27772
  source 1..120: mol_type = other DNA

SEQ ID NO: 78470 - DNA, 120 bp, synthetic construct
  source 1..120: mol_type = other DNA
tctgcccggccgccaccccatctgggaggagtacccaacagctcattgagaacgggccatgatgacgatgggggttttgtcgaatagaaaagggggaaatgtggggaaaagaaagagaga

SEQ ID NO: 78471 - DNA, 120 bp, synthetic construct
  source 1..120: mol_type = other DNA
tctccagctcctaaccgcgagtgatccgccagcctcggcctccagaggtgccgggattgcagacggtgtctggttcactcagtgctcaatggtgcccaggctggagtgcagtggcatgat

SEQ ID NO: 78472 - DNA, 120 bp, synthetic construct; identical to SEQ ID NO: 24116
  source 1..120: mol_type = other DNA

SEQ ID NO: 78473 - DNA, 120 bp, synthetic construct; identical to SEQ ID NO: 31618
  source 1..120: mol_type = other DNA

SEQ ID NO: 78474 - DNA, 120 bp, synthetic construct; identical to SEQ ID NO: 31619
  source 1..120: mol_type = other DNA

SEQ ID NO: 78475 - DNA, 120 bp, synthetic construct
  source 1..120: mol_type = other DNA
cacctgttgtttcctgactttttaatgatcaccattctaactggtgtgagatggttatcccattgtggttttgatttgcatttctctgatggccagtgatggtgaacattttttcatgtg

SEQ ID NO: 78476 - DNA, 120 bp, synthetic construct
  source 1..120: mol_type = other DNA
tgacttggcgatgtgggctcttttttggttccatatgaactttaaaatagttttttccaattctgtgaagaaagtcattggtagcttgatggggatggcattgaatctataaattacctt

SEQ ID NO: 78477 - DNA, 120 bp, synthetic construct; identical to SEQ ID NO: 31620
  source 1..120: mol_type = other DNA

SEQ ID NO: 78478 - DNA, 120 bp, synthetic construct
  source 1..120: mol_type = other DNA
gcagactgacacctcacacggccaggtactcctctgagacaaaactttcagaggaacgatcagacagcagcattcacggttcaagaaaatccactgttctgcagccaccgctgctggtac

SEQ ID NO: 78479 - DNA, 120 bp, synthetic construct
  source 1..120: mol_type = other DNA
tcaggagaacttccccaatctagcaaggcaggccaacattcagattcaggaaatacagaaaacgccacaaagatactcctcgagaagagcaactccaagacacataattgtcagattcac

SEQ ID NO: 78480 - DNA, 120 bp, synthetic construct
  source 1..120: mol_type = other DNA
caacctgctcctgaatgactactgggtacataacgaaatgaaggcagaaataaagatgttctttgaaaccaacaagaacaaagacacaacataccggaatctctgggacacagtcaaatc

SEQ ID NO: 78481 - DNA, 120 bp, synthetic construct
  source 1..120: mol_type = other DNA
aacattgatgcaaaaatcctcaataaaatactgggaaactgaatccagtagcacatcaaaaagcttatctgccatgatcaagtaggcttcattcctgggatgcaaggctggttcaatata

SEQ ID NO: 78482 - DNA, 120 bp, synthetic construct
  source 1..120: mol_type = other DNA
ctttcaagctcatatggaaccaaaaaagagcccacatcgccaagtcaatcctgagccaaaagaacaaagctggaggcatcacgctacctgacttcaaactatactacaaggctacagtaa

SEQ ID NO: 78483 - DNA, 120 bp, synthetic construct
  source 1..120: mol_type = other DNA
caacaggtgctggagaggatgtggagaaataggaacacttttacacggttggtgggacactagtttaaccattgtggaagtcagtgtggcgattcctcagggatctagaactagaagtac

SEQ ID NO: 78484 - DNA, 120 bp, synthetic construct; identical to SEQ ID NO: 31621
  source 1..120: mol_type = other DNA

SEQ ID NO: 78485 - DNA, 120 bp, synthetic construct
  source 1..120: mol_type = other DNA
caccaaagttgaaatgaaggaaaaaatgttaagggcagccagagagaaaggtcaggttacccacaaagggaaggccatcagactaacagcggatctctcggcagaaactctacaagccag

SEQ ID NO: 78486 - DNA, 120 bp, synthetic construct
  source 1..120: mol_type = other DNA
gactttaacaccccactgtcaacattagacagatcaataagacagaaagttaacaaggatatccaggaattgaactcagctccacaccaagtggatctaacagacatctacagaactccc

SEQ ID NO: 78487 - DNA, 120 bp, synthetic construct
  source 1..120: mol_type = other DNA
ccattccttctgaaactatttcaatcaatagaaaaagagggaaccctccctaactcattttatgaggccagtatcatcctgataccaaagcctggcagagacacaaccaaaaaagagaat

SEQ ID NO: 78488 - DNA, 120 bp, synthetic construct; identical to SEQ ID NO: 78475
  source 1..120: mol_type = other DNA

SEQ ID NO: 78489 - DNA, 120 bp, synthetic construct
  source 1..120: mol_type = other DNA
ggatggatctaaaatccatcccttaggtggcttcaggtcaatcatcgctattctgctagtattttatgacttctccatatatggtagaaagaataatgccccctccccctacaaagacat

SEQ ID NO: 78490 - DNA, 120 bp, synthetic construct
  source 1..120: mol_type = other DNA
gcttaaaaaacggcgcaccagattatatcccgcacctggctcagagggtcctacgcccacggagtctcgctgattgctagcacagcagtctgagatcaaactgcaaggcggcagtgaggc

SEQ ID NO: 78491 - DNA, 120 bp, synthetic construct
  source 1..120: mol_type = other DNA
aagatgaaatgaatgaaatgaagcaggaaggaaagtttagagaaaagagaataaaaagaaacgagcaaagcctccaagaaatatgggactatgtgaaaagaccgaatctacgtctgattg

SEQ ID NO: 78492 - DNA, 120 bp, synthetic construct
  source 1..120: mol_type = other DNA
acaaagaaggccattacataatggtaaagggatcaattcaacaagaagagctcactatcctaaatatatatgcacccaatacaggagcacccagattcataaagcaagtcctgagtgacc

SEQ ID NO: 78493 - DNA, 120 bp, synthetic construct
  source 1..120: mol_type = other DNA
caacaaaattgatagaccactagcaagactaataaagaaaaaaagagagaagaatcaaatagatgcaataaaaaacgataaaggggatatcaccaccaatcccacagaaatacaaactac

SEQ ID NO: 78494 - DNA, 120 bp, synthetic construct
  source 1..120: mol_type = other DNA
ccaacaacagacaaacagagagccaaatcatgagtgaactcccattcacaattgcttcaaagagaataaaatacctaggaatccaacttacaagggatgtaaaggacctcttcaaggaga

SEQ ID NO: 78495 - DNA, 120 bp, synthetic construct
  source 1..120: mol_type = other DNA
gaagtatctgttcatatccttcatccactttttgatggggttgtttttttcttgtaaatttgcttgagttcattgtagattctggatattagccctttgtcagaggagtagattgcaaaa

SEQ ID NO: 78496 - DNA, 120 bp, synthetic construct; identical to SEQ ID NO: 13663
  source 1..120: mol_type = other DNA

SEQ ID NO: 78497 - DNA, 120 bp, synthetic construct; identical to SEQ ID NO: 12780
  source 1..120: mol_type = other DNA

SEQ ID NO: 78498 - DNA, 120 bp, synthetic construct
  source 1..120: mol_type = other DNA
aatgatcaataaatactaaaaaaaaaaaaaaaaattagccaggcaggaggggtagtgtgtgggtgtgtacctgtagtcctagctacttaggaggctgaggtggaaagatcacttgagccc

SEQ ID NO: 78499 - DNA, 120 bp, synthetic construct
  source 1..120: mol_type = other DNA
acgtatttggcaactgttacttgggcatttaccatgtaacaggaatgctactgcagaagtgcttagttttctgtctctgactgtccaggagcttagtgctcttctataatcattggctaa

SEQ ID NO: 78500 - DNA, 120 bp, synthetic construct; identical to SEQ ID NO: 23064
  source 1..120: mol_type = other DNA

SEQ ID NO: 78501 - DNA, 120 bp, synthetic construct
  source 1..120: mol_type = other DNA
ccaaacaccgcatgttctcactcataggtgggaattgaacattgagaacacatggacactggaaggggaacatcacactctggggactgttgtggggtggggggaggggggagggatagc

SEQ ID NO: 78502 - DNA, 120 bp, synthetic construct; identical to SEQ ID NO: 21036
  source 1..120: mol_type = other DNA

SEQ ID NO: 78503 - DNA, 120 bp, synthetic construct; identical to SEQ ID NO: 21037
  source 1..120: mol_type = other DNA

SEQ ID NO: 78504 - DNA, 120 bp, synthetic construct
  source 1..120: mol_type = other DNA
caaatgaaacaagttttcacagttcggtatttacaggaaaataaatataaactttaagattcctgcacagaagatggtaggaagggcagagggctggctgtctccctcctgccaaaactg

SEQ ID NO: 78505 - DNA, 120 bp, synthetic construct
  source 1..120: mol_type = other DNA
gagaccccgtctgggaggtgaggagcgtctctgcccggccgccccgtctgagaagtgaggagaccctctgcctggcaaccaccccgtctgagaagtgaggagcccctccgcccggcagcc

SEQ ID NO: 78506 - DNA, 120 bp, synthetic construct
  source 1..120: mol_type = other DNA
ctaaaagtctgaacccctgtgaaagcttcagttccattattttttgtgcaaattagtaacacttcatagaaaaagaactaaagtaaactttaacaagggctctgcacaaatgaagatgac

SEQ ID NO: 78507 - DNA, 120 bp, synthetic construct; identical to SEQ ID NO: 23828
  source 1..120: mol_type = other DNA

SEQ ID NO: 78508 - DNA, 120 bp, synthetic construct; identical to SEQ ID NO: 23829
  source 1..120: mol_type = other DNA

SEQ ID NO: 78509 - DNA, 120 bp, synthetic construct
  source 1..120: mol_type = other DNA
acaagattttcaagtagacctttttttttttttttttttttttttgagaccgagtctcactctgtccccaaggctggaatgaaatggtacgatctcggctcaccggctcaccgcaacgtc

SEQ ID NO: 78510 - DNA, 120 bp, synthetic construct
  source 1..120: mol_type = other DNA
caaaatgaaaagtctcccatgtctacttctttctacacagacacggcaaccatccgatttctcaatcttttccccacctttccagcctttctattccacaaagccgccattgtcatcctg

SEQ ID NO: 78511 - DNA, 120 bp, synthetic construct
  source 1..120: mol_type = other DNA
caaagactgagacagctccgctgcccgctgaactccatcctccccccatattgctttcttttattggtggtttacaatctcctttatgaagatagtcctctgtagattaactgtcacgct

SEQ ID NO: 78512 - DNA, 120 bp, synthetic construct; identical to SEQ ID NO: 23830
  source 1..120: mol_type = other DNA

SEQ ID NO: 78513 - DNA, 120 bp, synthetic construct
  source 1..120: mol_type = other DNA
tttggaatgtaaatttgagatgtctgtgagccatcccaatggagatagaaagtgactaacattcaaaaaagatggagtagctgagcacagtggctcacgtctgtaatcccagcacttttg

SEQ ID NO: 78514 - DNA, 120 bp, synthetic construct; identical to SEQ ID NO: 23831
  source 1..120: mol_type = other DNA

SEQ ID NO: 78515 - DNA, 120 bp, synthetic construct
  source 1..120: mol_type = other DNA
ataggttgaacttaggtctcggcagcaatttaaacctatttatattttaaataataaaagtattcttttggattccctatttaataaatggtgctgggaaaactggctagccatatgtag

SEQ ID NO: 78516 - DNA, 120 bp, synthetic construct
  source 1..120: mol_type = other DNA
aggactataaatcatgctgctataaagacacatgcacacgtatgtttattgaggcactattcacaatagcaaagacttggaaccaacccaaatgtccaacaatgatagactggattaaga

SEQ ID NO: 78517 - DNA, 120 bp, synthetic construct; identical to SEQ ID NO: 11928
  source 1..120: mol_type = other DNA

SEQ ID NO: 78518 - DNA, 120 bp, synthetic construct; identical to SEQ ID NO: 11929
  source 1..120: mol_type = other DNA

SEQ ID NO: 78519 - DNA, 120 bp, synthetic construct
  source 1..120: mol_type = other DNA
gcaggggcacactgacacctcacacggcagggtattccaacagacctgcagctgagggtcctgtctgttagaaggaaaactaacaaccagaaaggacatctacaccaaaaacccatctgt

SEQ ID NO: 78520 - DNA, 120 bp, synthetic construct
  source 1..120: mol_type = other DNA
gaagctcatcagactaacagtggatctctcggcagaaaccctacaagccagaagagagtgggggccaatattcaacattctgaaagaaaagaattttcaacccagaatttcatatccagc

SEQ ID NO: 78521 - DNA, 120 bp, synthetic construct
  source 1..120: mol_type = other DNA
ggaattgaactcagctctgcaccaagcggacctaatagacatctacagaactctacaccccaaatcaacagaatatacatttttttcagcaccacaccacacctattccaaaattgacca

SEQ ID NO: 78522 - DNA, 120 bp, synthetic construct
  source 1..120: mol_type = other DNA
gcatcattctgataccaaagccgggcagagacacaaccaaaaaagagaattttagaccaatatccttgatgaacattgatgcaaaaatcctcaataaaatactggcaaaccgaatccagc

SEQ ID NO: 78523 - DNA, 120 bp, synthetic construct
  source 1..120: mol_type = other DNA
atcacactacctgacttcaaactatactacaaggctacagtcaccaaaacagcatggtactggtaccaaaacagagatatagatcaatggaacagaacagagccctcagaaataatgccg

SEQ ID NO: 78524 - DNA, 120 bp, synthetic construct
  source 1..120: mol_type = other DNA
aatagaaacacttttacactgttggtgggactgtaaactagttcaaccattgtggaagtcagtgtggcgattcctcagggatctagaactagaaataccatttgacccagccatcccatt

SEQ ID NO: 78525 - DNA, 120 bp, synthetic construct; identical to SEQ ID NO: 11930
  source 1..120: mol_type = other DNA

SEQ ID NO: 78526 - DNA, 120 bp, synthetic construct; identical to SEQ ID NO: 11931
  source 1..120: mol_type = other DNA

SEQ ID NO: 78527 - DNA, 120 bp, synthetic construct; identical to SEQ ID NO: 11925
  source 1..120: mol_type = other DNA

SEQ ID NO: 78528 - DNA, 120 bp, synthetic construct
  source 1..120: mol_type = other DNA
atctcagaagatgggcggccgggcggagacactcctcacctcccagatgggatggtggccgggaagaggcgctccccacttcctagatgggatggcagccgggcagagacgctcctcact

SEQ ID NO: 78529 - DNA, 120 bp, synthetic construct
  source 1..120: mol_type = other DNA
atttctgatactaagtatattagaagagattttaaaaccacaatatttatcatgttttaagaaataaatgaggggggaggagccaagatggccaaataggaacagctccggtctacagct

SEQ ID NO: 78530 - DNA, 120 bp, synthetic construct
  source 1..120: mol_type = other DNA
agacgatcaaattactctgagctatgggaggacattcaaaccaaaggcaaagaggttgaaaactttgaaaaaaatttagaagaatgtataactagaataaccaatacagagaagtgctta

SEQ ID NO: 78531 - DNA, 120 bp, synthetic construct
  source 1..120: mol_type = other DNA
acagacaagcaaatgctgagagattttgtcaccaccaggcctgccttacaagagctcctgaaggaagcactaaacatggaaaggaacaactggtaccagccgctgcaaaatcatgccaaa

SEQ ID NO: 78532 - DNA, 120 bp, synthetic construct
  source 1..120: mol_type = other DNA
tcagaatctctgggatgcattcaaagcaggatgtagagggaaatttaaagcactaaatgcccacaagagaaagcaggaaagatccaaaattgacaccctaacatcacaattaaaagaact

SEQ ID NO: 78533 - DNA, 120 bp, synthetic construct
  source 1..120: mol_type = other DNA
agagccaaagacaaaaaccacatgattatctcaatagatgcagaaaaagcctttgacaaaattcaacaacccttcatgctaaaaactctcaataaattaggtattgataggacgtatttc

SEQ ID NO: 78534 - DNA, 120 bp, synthetic construct
  source 1..120: mol_type = other DNA
aacgttagacctaaaaccataaaaaccctagaagaaaacctaggcaataccattcaggacataggcatgggcaaggacttcatgtctaaaacaccaaaagcaatggcaacaaaagacaaa

SEQ ID NO: 78535 - DNA, 120 bp, synthetic construct
  source 1..120: mol_type = other DNA
gaattgaacaatgagatcacatggacacaggaaggggaatatcacactctgggaactgttatggggtggagggagggggggagggatagcatcgggagatatacctaatgctagatgacg

SEQ ID NO: 78536 - DNA, 120 bp, synthetic construct; identical to SEQ ID NO: 11927
  source 1..120: mol_type = other DNA

SEQ ID NO: 78537 - DNA, 120 bp, synthetic construct; identical to SEQ ID NO: 26865
  source 1..120: mol_type = other DNA

SEQ ID NO: 78538 - DNA, 120 bp, synthetic construct; identical to SEQ ID NO: 5553
  source 1..120: mol_type = other DNA

SEQ ID NO: 78539 - DNA, 120 bp, synthetic construct; identical to SEQ ID NO: 26867
  source 1..120: mol_type = other DNA

SEQ ID NO: 78540 - DNA, 120 bp, synthetic construct
  source 1..120: mol_type = other DNA
gtactaacttacgttcctaccagtagtgtacaagagttaccttttctccacatcctcaccaacatttgttattgcatgtcttttgaatatgtcattttgactggggtgagatgatatctc

SEQ ID NO: 78541 - DNA, 120 bp, synthetic construct
  source 1..120: mol_type = other DNA
ttggcttcccaaagttctgggattataggcatgagttaccatgcccagcctcccttcttttctttgttattttggcagtgaagacccaagagtgactcaggttttgtttaaacatttatt

SEQ ID NO: 78542 - DNA, 120 bp, synthetic construct; identical to SEQ ID NO: 7751
  source 1..120: mol_type = other DNA

SEQ ID NO: 78543 - DNA, 120 bp, synthetic construct
  source 1..120: mol_type = other DNA
caaactggaactcaggattaagaaactcactcaaaaccgctcaactacatagaaactgaacaacctgctcctgaatgactactgggtacataacgaaatgaaggcagaaataaagatgtt

SEQ ID NO: 78544 - DNA, 120 bp, synthetic construct; identical to SEQ ID NO: 7752
  source 1..120: mol_type = other DNA

SEQ ID NO: 78545 - DNA, 120 bp, synthetic construct
  source 1..120: mol_type = other DNA
ggatagctttaggagatatacctaatgctaaatgatgagttaatgggtgcagcacaccagcatggtacatgtatacatatgtaactaacctgcacattgtgcacatgtaccctaaaactt

SEQ ID NO: 78546 - DNA, 120 bp, synthetic construct
  source 1..120: mol_type = other DNA
ctgggggtgtgtgtgtgtgtgtgtgtgtgtatatatatatatataaaggtatgtaacattttggttttcacatatactttcacccttttcctccacctcccacctcagttggtatcctga

SEQ ID NO: 78547 - DNA, 120 bp, synthetic construct
  source 1..120: mol_type = other DNA
aagtagctgggattacaggcacccgcctgtacacccagctaatttttgtatttctaatagagacagggtttcaccatgttgtccatgctggtcttgaactcctgtttttttaagtcttgt

SEQ ID NO: 78548 - DNA, 120 bp, synthetic construct
  source 1..120: mol_type = other DNA
ttgaatgagtgcaggggtcgagtctggagcatttgggggtgtagcttgtaaacagggtcggaggagagaggctgtgcaggaagagggctgcaggggagacgcggagagttcgggcctttt

SEQ ID NO: 78549 - DNA, 120 bp, synthetic construct
  source 1..120: mol_type = other DNA
ttagggctttttatccgggcagctggcgacattttgaaaagcttgcttttgctgtttgccagatacatatatatgtattttgagacagagtcttgctcttttgtccaggctagagtgcag

SEQ ID NO: 78550 - DNA, 120 bp, synthetic construct
  source 1..120: mol_type = other DNA
tgtttaagcgaccctttcccgcagtttaaatatatatagttgtgcattagtagaatatgcttgtggggaacagagccagcatccgcaataacaaactcctggttagaaaagcatgacgta

SEQ ID NO: 78551 - DNA, 120 bp, synthetic construct
  source 1..120: mol_type = other DNA
gtgaaccaccgcacctggccgtgagccaccgtgtctgtccgagcatcttttaatgtttgtcatttagatttcttcttgtgctgaagtgtttgtcttttgctgtttcttttttttttccta

SEQ ID NO: 78552 - DNA, 120 bp, synthetic construct
  source 1..120: mol_type = other DNA
gactcacttaaagctttaaaagcacttgcaaaatcctaaaatcataatttaaggtgtttttggagggcaggagcaatggtggcaggcagtgttttgctttgttgcccaggctgaagtaca

SEQ ID NO: 78553 - DNA, 120 bp, synthetic construct
  source 1..120: mol_type = other DNA
caacccgccttggcctttcaaagtgctgggattacaggcgtgagccaccgtgcccagcctttttctttttctttttctttttttttttttttttgagacggagtcttgctctgttaccca

SEQ ID NO: 78554 - DNA, 120 bp, synthetic construct
  source 1..120: mol_type = other DNA
taatgatcttttaaagcatgagacctcatacatcatttaaaacaatttatactgtattttacacatgacaaagttctaaggtaacagcccttttctaagactaaagttacagtcctccct

SEQ ID NO: 78555 - DNA, 120 bp, synthetic construct
  source 1..120: mol_type = other DNA
gcacgttacgccctcagttgttgacttgagtttttccgtagtttgtagggggagggtaatagagtattaggtagcttttggaatacataggagtgtaactggaaaaagattccaagcaag

SEQ ID NO: 78556 - DNA, 120 bp, synthetic construct
  source 1..120: mol_type = other DNA
ccaagagaaagttaatgtcatcaggatacatagcctatagatagcgacattctctagggaaagatggagatgcgcactacctggccttcaaactactcactaatgaacacatctgagttg

SEQ ID NO: 78557 - DNA, 120 bp, synthetic construct
  source 1..120: mol_type = other DNA
tctccagtctagtacgttgtcgtactcggtgttgtaaaatccaaacaagggtcagtttcccaggtaactgggaaattcccagaatcacactctttcgtcatagtgctcatcctacaaaaa

SEQ ID NO: 78558 - DNA, 120 bp, synthetic construct
  source 1..120: mol_type = other DNA
ggcaagagaatcgcttgaatctaggaggcggaggttgcagtgagtcaagatcatgccaccgcactccaacctgggtgacagagcgagactgtctcaaaaaaaaaaaaaaaaaaaaaaaaa

SEQ ID NO: 78559 - DNA, 120 bp, synthetic construct
  source 1..120: mol_type = other DNA
ctactaaaaatacaaaaattagccaggcatggtgacacatgcctgtaatctcagctactcaggagggtgaggcagaattgcttgaacccgggagtcagtttcttttttctttttttgaga

SEQ ID NO: 78560 - DNA, 120 bp, synthetic construct
  source 1..120: mol_type = other DNA
tgtagacccaggtcattagaagacagactaagtagtcctgggtgaacccatagggcaccttcaaggaggtaaaattggtgattttagtttcaccagtagtttttccctgaatatttattc

SEQ ID NO: 78561 - DNA, 120 bp, synthetic construct
  source 1..120: mol_type = other DNA
catacttctgtagttccctggactgtaggataagttaggttacttagaatctcaacagctagcatcgtttttacttaggttttcaagcctactggcagggtaagcaagaggtagtaccat

SEQ ID NO: 78562 - DNA, 120 bp, synthetic construct
  source 1..120: mol_type = other DNA
gcattagtgtattttatgtgtggcctaagacaattcttccagtgtggcccagggaagctgaaagatcattatcctctgatctatcatattaatgagctgcatcctaaaagacattcatct

SEQ ID NO: 78563 - DNA, 120 bp, synthetic construct
  source 1..120: mol_type = other DNA
aaactaaaaacgtgtttaatacacctaccccaccgaatattgtagcttgggcgtagcctaacctatctcagacgtgctcagaacacttaaatgttagcctaaagttgggcaagatcatct

SEQ ID NO: 78564 - DNA, 120 bp, synthetic construct
  source 1..120: mol_type = other DNA
gatttcctcaattcttgtactcctgggatgaggaagtggtggcagattaagtctcagaactttgatcttgtcatctgttacaaggtggggaaattttatgagctgtaccacatggatgct

SEQ ID NO: 78565 - DNA, 120 bp, synthetic construct
  source 1..120: mol_type = other DNA
ttccattgggttgacaccaggagagaaaagtgaattggccctctctgctctaggtggttgtgtcttctacctcaaaaaatgccttattgatcaggagcttttatcaatggctaattttga

SEQ ID NO: 78566 - DNA, 120 bp, synthetic construct
  source 1..120: mol_type = other DNA
ggaaccgttaccagctggaaattcctgagaatttcaccactcgcaatttgccagaagaatacgagttgaaatctaccaagaagggctgtaaacgatactggaccaaaactattgaaaaga

SEQ ID NO: 78567 - DNA, 120 bp, synthetic construct
  source 1..120: mol_type = other DNA
agtgatcctccagtctcccaaaagtgctgggattacaggcatgagccaccgctcccggcccaaaagatttttaaatgtgttatacttcatgagacaggctttattttagatcgaatttta

SEQ ID NO: 78568 - DNA, 120 bp, synthetic construct
  source 1..120: mol_type = other DNA
tcctcagcacaggtgttcaaaaaccagtcttcagagattgttttcatatcagtgtgccaactttggcacattctgctaagtaagaggcttaagtgtagcatgtttctgctgttttgtgtt

SEQ ID NO: 78569 - DNA, 120 bp, synthetic construct
  source 1..120: mol_type = other DNA
atatttagctgaaacatcgatgcttaatgttaaggggaatatatgttaaaaaggggaaggaggtcagtcattcaggtcatgaggccctttgacttgaattcatttcctcagaaggtaggt

SEQ ID NO: 78570 - DNA, 120 bp, synthetic construct
  source 1..120: mol_type = other DNA
gggttcataagaaagacaaaagtttatgaaactgttactaccagtcataaaagaccttttcctccctcattcacaggctggcttattagctgtaatggcccagatgggttgttacgtccc

SEQ ID NO: 78571 - DNA, 120 bp, synthetic construct
  source 1..120: mol_type = other DNA
gttgtaataaaacatttgttatactacggggatgagaacactaataggaggactcaggaagtttatgaccttgagcgatactgtattttctttaaaagaaacctcactccccatgggctg

SEQ ID NO: 78572 - DNA, 120 bp, synthetic construct
  source 1..120: mol_type = other DNA
tgtggggcttggttttttgggggtgggggggcgggggggctcagatatggaggcaaatgggagccaaggcacctcgggcagcgccaacgactcccagcacgaccccgggtaagtttccag

SEQ ID NO: 78573 - DNA, 120 bp, synthetic construct; identical to SEQ ID NO: 18309
  source 1..120: mol_type = other DNA

SEQ ID NO: 78574 - DNA, 120 bp, synthetic construct; identical to SEQ ID NO: 18310
  source 1..120: mol_type = other DNA

SEQ ID NO: 78575 - DNA, 120 bp, synthetic construct; identical to SEQ ID NO: 18311
  source 1..120: mol_type = other DNA

SEQ ID NO: 78576 - DNA, 120 bp, synthetic construct
  source 1..120: mol_type = other DNA
ggagaattgcttgaaccctggaggtggtggttgcagtgagccgagattgtgccacggcactccagcctgggcaacagagtaagattctgtcttaaaaaaaaaaaaaaaaaagggcagcta

SEQ ID NO: 78577 - DNA, 120 bp, synthetic construct
  source 1..120: mol_type = other DNA
tttttttgagacggagtctggctctgttgcccaggctggagtgcagtggcgcaatcttggctcgctgcaatactttttgaatttttgtaccttatgcacttattacctattcatttactt

SEQ ID NO: 78578 - DNA, 120 bp, synthetic construct; identical to SEQ ID NO: 18312
  source 1..120: mol_type = other DNA

SEQ ID NO: 78579 - DNA, 120 bp, synthetic construct; identical to SEQ ID NO: 18313
  source 1..120: mol_type = other DNA

SEQ ID NO: 78580 - DNA, 120 bp, synthetic construct; identical to SEQ ID NO: 18314
  source 1..120: mol_type = other DNA

SEQ ID NO: 78581 - DNA, 120 bp, synthetic construct; identical to SEQ ID NO: 18315
  source 1..120: mol_type = other DNA

SEQ ID NO: 78582 - DNA, 120 bp, synthetic construct
  source 1..120: mol_type = other DNA
atatcacacggctgtgaggctcttgatcaaaagacaggatggtaacttaagcaatgacaaaacatttttaatggatgacaagaggcgcactttatcttggaaaggcactctgaaacgctg

SEQ ID NO: 78583 - DNA, 120 bp, synthetic construct
  source 1..120: mol_type = other DNA
agcgagactccgtctcaaaaaaacaaacaaacaaaaaaaagaattccatggttctgaacaacctccagcgtacaagaaggggcctggataaatccttcattcctgagaattacaaacccg

SEQ ID NO: 78584 - DNA, 120 bp, synthetic construct
  source 1..120: mol_type = other DNA
tccagggagcggcagagctgaaattgcagctgggtctgggaagtagatggatgagaagcagccaagcccatgggtctgagacacagccaggcctgggaagtagctgaactcggggagtac

SEQ ID NO: 78585 - DNA, 120 bp, synthetic construct
  source 1..120: mol_type = other DNA
cggaggatttgaaggcgctcagtcagcagaatgtgagcatggacttggccacgttcatgaagctgcggacggatgcggtgctggtatggcgagcgggaggaggggcgtgtggaggagggg

SEQ ID NO: 78586 - DNA, 120 bp, synthetic construct
  source 1..120: mol_type = other DNA
gccaggccagggctgggggcagagctgggggcgtggaggtgggcgctctgagtcacccctctctctgtagaggccctctcggggacgccctgcctcctaggacctggacctgttctcacc

SEQ ID NO: 78587 - DNA, 120 bp, synthetic construct; identical to SEQ ID NO: 34044
  source 1..120: mol_type = other DNA

SEQ ID NO: 78588 - DNA, 120 bp, synthetic construct
  source 1..120: mol_type = other DNA
gcagcctttgcctcccaggttccagcgattccctgtctcagcctcccgaggagctgggactagaggcatgcaccaccacgcccggctaatttttgtattttagtagagatggggtttcac

SEQ ID NO: 78589 - DNA, 120 bp, synthetic construct; identical to SEQ ID NO: 34045
  source 1..120: mol_type = other DNA

SEQ ID NO: 78590 - DNA, 120 bp, synthetic construct
  source 1..120: mol_type = other DNA
tcccaagtagctgggattataggcatgctccaccacgcccagctaatttttttgtatttttagtagaggtggggtttcaccatgttggtcagctggtcttgaactccagacatcaggtga

SEQ ID NO: 78591 - DNA, 120 bp, synthetic construct
  source 1..120: mol_type = other DNA
gtgatccaccctccttggcctcccaaagtgctgggattacagatgtgagccactgccccggccattattttcataatttagctttcttcttttaaaatgtttctttaggataattcatca

SEQ ID NO: 78592 - DNA, 120 bp, synthetic construct
  source 1..120: mol_type = other DNA
tcagtgtaacctctgcctcccaggttccagtgattgtcttgcctcagcctcccaagtaggtaggattataggcacatgccaccacacctggctaacttttttttttttttttattcgtag

SEQ ID NO: 78593 - DNA, 120 bp, synthetic construct
  source 1..120: mol_type = other DNA
gattgcagttgctctgttggattggggaaaaagtgtcctaatgacccaggaacactttaataaaaaggttcagttgaaactacaggaatgccgagagctgactgaaaatgcagagaagtt

SEQ ID NO: 78594 - DNA, 120 bp, synthetic construct; identical to SEQ ID NO: 31259
  source 1..120: mol_type = other DNA

SEQ ID NO: 78595 - DNA, 120 bp, synthetic construct; identical to SEQ ID NO: 31260
  source 1..120: mol_type = other DNA

SEQ ID NO: 78596 - DNA, 120 bp, synthetic construct; identical to SEQ ID NO: 10145
  source 1..120: mol_type = other DNA

SEQ ID NO: 78597 - DNA, 120 bp, synthetic construct; identical to SEQ ID NO: 10146
  source 1..120: mol_type = other DNA

SEQ ID NO: 78598 - DNA, 120 bp, synthetic construct
  source 1..120: mol_type = other DNA
caaaggacgtgaaatcatcattttttatggctgcatggtattccatggtgtatatatgtgccacatcttgttaatccagtctatcattgttggacatttgggttggttccaagtctttgc

SEQ ID NO: 78599 - DNA, 120 bp, synthetic construct
  source 1..120: mol_type = other DNA
ctgttccattggtctatatctctgttttggtaccagtgccatgctgttttgttactgtagccttgcagtatagtttgaagtcagatagcatgatgccttcagctttgttcttttggctta

SEQ ID NO: 78600 - DNA, 120 bp, synthetic construct
  source 1..120: mol_type = other DNA
gaatagtttcagaagaaatggtaccagctcctccttgtacctctggtagaattcgactgtgaatccctctggtcctggactttttttggttggtaagctattaattattgcctcaatttc

SEQ ID NO: 78601 - DNA, 120 bp, synthetic construct
  source 1..120: mol_type = other DNA
ttcctgtgtccatgtgatctcattgttcaattcccacctatgagtgagaatatgcagtatttggttttttgttcttgcgatagtttactgagaatgatgatttccagtttcatccatgcc

SEQ ID NO: 78602 - DNA, 120 bp, synthetic construct
  source 1..120: mol_type = other DNA
ttaatccatcttgaattgatttttgtataaggtgtaaggaagggatccagtttcagctatctacatatggctagccagttttcccagcaccatttattaaatagggaatcctttccccat

SEQ ID NO: 78603 - DNA, 120 bp, synthetic construct
  source 1..120: mol_type = other DNA
cgcctattccaaaattgaccacatagttggaagtaaagctctcctcagcaaatgtaaaaggacagaaattataacaaactatctctcagaccacagtgcgatcaaactagagctcaggat

SEQ ID NO: 78604 - DNA, 120 bp, synthetic construct
  source 1..120: mol_type = other DNA
agcatcattctgataccaaagccggacagagacacaaccaaaaaagagaattttagaccaatatccttgatgaacattgatgcaaaaatcctcaataaaatactggcaaaacgaatccag

SEQ ID NO: 78605 - DNA, 120 bp, synthetic construct
  source 1..120: mol_type = other DNA
agttcatatggaaccaaaaaaaaagcccgcatcgccaaggcaatcctaagccaaaagaacaaagctttagtgattttcttaatcctgagttctagtttgatcgcactgtgttctgagaga

SEQ ID NO: 78606 - DNA, 120 bp, synthetic construct; identical to SEQ ID NO: 13033
  source 1..120: mol_type = other DNA

SEQ ID NO: 78607 - DNA, 120 bp, synthetic construct; identical to SEQ ID NO: 13034
  source 1..120: mol_type = other DNA

SEQ ID NO: 78608 - DNA, 120 bp, synthetic construct
  source 1..120: mol_type = other DNA
tctgtcctggagaatgttccgcttgtgcttgaagagaatatgtattctgctgctgttggatagaacgttttgtacatgtctgttaggtctgtttggtatgaagtgtagttcaagtccggt

SEQ ID NO: 78609 - DNA, 120 bp, synthetic construct; identical to SEQ ID NO: 24298
  source 1..120: mol_type = other DNA

SEQ ID NO: 78610 - DNA, 120 bp, synthetic construct; identical to SEQ ID NO: 24299
  source 1..120: mol_type = other DNA

SEQ ID NO: 78611 - DNA, 120 bp, synthetic construct
  source 1..120: mol_type = other DNA
agcaaaatgtcacctcctgggaggcttcccttgcctctctattcagctatttatagcagcctcctgtcattctttcacactgtttgctacaatttgtgctttaatagtcatttgttcctt

SEQ ID NO: 78612 - DNA, 120 bp, synthetic construct
  source 1..120: mol_type = other DNA
cacgaggtacaatggtcatcatcacagttcttccaggaaggaagcctgggtccagcaaagcaggaattaaaaatcctgaagtggccgggggcagtggctcatgcctgtaatcccagcact

SEQ ID NO: 78613 - DNA, 120 bp, synthetic construct
  source 1..120: mol_type = other DNA
tctgccaagctcacatcccctcaccagggacagcctgtgactagtaactgattaatgcctggtacaaagacctggcctgttggtctcaatttcagaaaactgtggtgggtcatcccagtt

SEQ ID NO: 78614 - DNA, 120 bp, synthetic construct
  source 1..120: mol_type = other DNA
aatttgggggcaggtgggtcccccagggcttctacctcccagagtccttcagctggaaatggaagaccctaccctccactgagagctcattcctcaatacatcacctgtgtctttcctct

SEQ ID NO: 78615 - DNA, 120 bp, synthetic construct
  source 1..120: mol_type = other DNA
ctggccaaatttcaaagccacagtgtccagtccaagtctgcactgggcagacaaaaaaagtaaggtgcagagaggggaggacaaggctggagtgggcccttccctgaggcggccttgagc

SEQ ID NO: 78616 - DNA, 120 bp, synthetic construct
  source 1..120: mol_type = other DNA
tctcctgcctcagcctcctgagtagctgggattacaggcaactgccactacacacagctaatttttttgtatttttagtagagactgggtttcaccatgttggccaggctggtctcaaac

SEQ ID NO: 78617 - DNA, 120 bp, synthetic construct
  source 1..120: mol_type = other DNA
accagcctggccaacatgatgaaactccatttctactaaaaatacaaaaattagacgggcttggtggtgcacgtctgtaatcccagctacttaggaggctgaggcaggagaatcacttga

SEQ ID NO: 78618 - DNA, 120 bp, synthetic construct
  source 1..120: mol_type = other DNA
cctggccaacatggtgaaatcctatctctaccaaaaatactaaaaattagccgggtgttgtggcaggcgcctgtaatcctagctactcaggaagctgagacaggagaatcacttgaaccc

SEQ ID NO: 78619 - DNA, 120 bp, synthetic construct
  source 1..120: mol_type = other DNA
ctagcctatgtcatcttgagactccatctctgccccagccccacctggcccccacacctttgccaatgactcggtcactgtgggtgaccacccgctcatggggaatcagcacatccttga

SEQ ID NO: 78620 - DNA, 120 bp, synthetic construct
  source 1..120: mol_type = other DNA
ccaatatactgcagagagggtcatgaggaccagccagtaggctggcccctactttcagatccccaactgtccctgcccctatcccttacacttacctcaaacttaatggcatgctcctca

SEQ ID NO: 78621 - DNA, 120 bp, synthetic construct
  source 1..120: mol_type = other DNA
tggagccattggactctgtgatgggctctcttgcctctgggctgaagagggcagtagtcttttcttcctggacctgctctccacaccacactgaccatgtaacaagcactcttccctcca

SEQ ID NO: 78622 - DNA, 120 bp, synthetic construct
  source 1..120: mol_type = other DNA
gttctggtggggcagagattaaccttggctggtccatgagtgaacagacaggaagggcacatgaaagctcaaaaagggacagagacctttttgactctcaaaaagcagtcagaaccactg

SEQ ID NO: 78623 - DNA, 120 bp, synthetic construct
  source 1..120: mol_type = other DNA
gcacgggctgcccactgtcacccagtgagaagttggacacatacagcaagtagtttagtgacctgaccagctccacctaggacaggtcagatgtgagcaaaatggggatggagacaagga

SEQ ID NO: 78624 - DNA, 120 bp, synthetic construct
  source 1..120: mol_type = other DNA
ctggagttaattggccagcacaaggttggggacatggtccttctccctagactccaaaggtctgcctgtactcctggctgcttcctataccccccttcagggtacaaaagggataaacca

SEQ ID NO: 78625 - DNA, 120 bp, synthetic construct
  source 1..120: mol_type = other DNA
gtgagcagggaccaagattagtcttcctggagcctggcactgcccagccgtgctgggtgtcttctgacccactgaccactaggcaagctggggagaggttctgactccccattgggaagg

SEQ ID NO: 78626 - DNA, 120 bp, synthetic construct
  source 1..120: mol_type = other DNA
caagtaggagggaatgcccatcattctacccagcattcaggagctatgctaacagagacacggttatgtaaccctatcctcacatagccagggaaactacctaaaaaaccagaggccatg

SEQ ID NO: 78627 - DNA, 120 bp, synthetic construct
  source 1..120: mol_type = other DNA
cacgtattcaatactgtaggagacaagatgcttgggcagcactgacaacgccacaaagcccggtgcgaatcccgaggcgtcagccttgagacgcctgatagacactgagcgtgggctgaa

SEQ ID NO: 78628 - DNA, 120 bp, synthetic construct
  source 1..120: mol_type = other DNA
ccccaagatagcggacccccgccccaggttcctgtgaaacccaaatcccttcccggccctcgggtctgagcacctgacgcctgcggacgcacgacagcaacgccccagccgcctcacctg

SEQ ID NO: 78629 - DNA, 120 bp, synthetic construct; identical to SEQ ID NO: 8856
  source 1..120: mol_type = other DNA

SEQ ID NO: 78630 - DNA, 120 bp, synthetic construct; identical to SEQ ID NO: 8857
  source 1..120: mol_type = other DNA

SEQ ID NO: 78631 - DNA, 120 bp, synthetic construct; identical to SEQ ID NO: 8858
  source 1..120: mol_type = other DNA

SEQ ID NO: 78632 - DNA, 120 bp, synthetic construct; identical to SEQ ID NO: 8859
  source 1..120: mol_type = other DNA

SEQ ID NO: 78633 - DNA, 120 bp, synthetic construct; identical to SEQ ID NO: 8860
  source 1..120: mol_type = other DNA

SEQ ID NO: 78634 - DNA, 120 bp, synthetic construct; identical to SEQ ID NO: 8861
  source 1..120: mol_type = other DNA

SEQ ID NO: 78635 - DNA, 120 bp, synthetic construct; identical to SEQ ID NO: 16499
  source 1..120: mol_type = other DNA

SEQ ID NO: 78636 - DNA, 120 bp, synthetic construct
  source 1..120: mol_type = other DNA
atctcccaagttcaagagattctcgtgtctcagcctccctagtagctgagattacaggtgtgtgccaccacgcctggctaatttttttttttctcgtagagatggggtttctccatgttg

SEQ ID NO: 78637 - DNA, 120 bp, synthetic construct; identical to SEQ ID NO: 14705
  source 1..120: mol_type = other DNA

SEQ ID NO: 78638 - DNA, 120 bp, synthetic construct; identical to SEQ ID NO: 14706
  source 1..120: mol_type = other DNA

SEQ ID NO: 78639 - DNA, 120 bp, synthetic construct; identical to SEQ ID NO: 14707
  source 1..120: mol_type = other DNA

SEQ ID NO: 78640 - DNA, 120 bp, synthetic construct; identical to SEQ ID NO: 20488
  source 1..120: mol_type = other DNA

SEQ ID NO: 78641 - DNA, 120 bp, synthetic construct
  source 1..120: mol_type = other DNA
gacggggcggcggggcagaggcgctccccacatctcagacgatctcctcacatcccagatgatgtgcggccgggcagagacgcccctcacttcctagatgtgatggcggctgggaagagg

SEQ ID NO: 78642 - DNA, 120 bp, synthetic construct; identical to SEQ ID NO: 20489
  source 1..120: mol_type = other DNA

SEQ ID NO: 78643 - DNA, 120 bp, synthetic construct; identical to SEQ ID NO: 20490
  source 1..120: mol_type = other DNA

SEQ ID NO: 78644 - DNA, 120 bp, synthetic construct
  source 1..120: mol_type = other DNA
tccccacatctcagacgatgggcggccaggcagagatgctcctcacttcctagacgggaagaggcgctcctcacttctcagactgggcagccgggcagaggggctcctcacatcccagac

SEQ ID NO: 78645 - DNA, 120 bp, synthetic construct; identical to SEQ ID NO: 20491
  source 1..120: mol_type = other DNA

SEQ ID NO: 78646 - DNA, 120 bp, synthetic construct
  source 1..120: mol_type = other DNA
ctggtctcaaactccttgcctcagtgattcgcctgcctcccaacatgctgggattacaggcatgagccaccatacccagctttgataaacttttaattctataatactacattttgaaat

SEQ ID NO: 78647 - DNA, 120 bp, synthetic construct; identical to SEQ ID NO: 31752
  source 1..120: mol_type = other DNA

SEQ ID NO: 78648 - DNA, 120 bp, synthetic construct; identical to SEQ ID NO: 31753
  source 1..120: mol_type = other DNA

SEQ ID NO: 78649 - DNA, 120 bp, synthetic construct; identical to SEQ ID NO: 27724
  source 1..120: mol_type = other DNA

SEQ ID NO: 78650 - DNA, 120 bp, synthetic construct; identical to SEQ ID NO: 11881
  source 1..120: mol_type = other DNA

SEQ ID NO: 78651 - DNA, 120 bp, synthetic construct; identical to SEQ ID NO: 11882
  source 1..120: mol_type = other DNA

SEQ ID NO: 78652 - DNA, 120 bp, synthetic construct
  source 1..120: mol_type = other DNA
cctttgtatctgatggtttctaaaacaagcaagaggttttttttttctcttctagagaagagatcatgaatactgccagagcccagagaaaaattcttgcaagaggaattttttgtggcg

SEQ ID NO: 78653 - DNA, 120 bp, synthetic construct
  source 1..120: mol_type = other DNA
ccagcctgggcgacagagtgagactccatctcaaaaaaaaaaaaaaaaaaaaagaaagtgtttttcaagaggaagaaaggacagggttataaatgtatcttttaaattgctcttgatatt

SEQ ID NO: 78654 - DNA, 120 bp, synthetic construct; identical to SEQ ID NO: 18785
  source 1..120: mol_type = other DNA

SEQ ID NO: 78655 - DNA, 120 bp, synthetic construct
  source 1..120: mol_type = other DNA
tcccaccaacagtgtaaaagtgttcctatttctccacatcctctccagcacctgttgtttcctgactttttaatgattgccattctaactgatgtgagatgatatctcatagtggttttg

SEQ ID NO: 78656 - DNA, 120 bp, synthetic construct; identical to SEQ ID NO: 18786
  source 1..120: mol_type = other DNA

SEQ ID NO: 78657 - DNA, 120 bp, synthetic construct
  source 1..120: mol_type = other DNA
attaagttaattaattaaaatttttttagagacagggtctccctctgtcacccagattggagtacagtggtatactcgtgatgtactgccaccttgaactctggggctcaagggatcctc

SEQ ID NO: 78658 - DNA, 120 bp, synthetic construct; identical to SEQ ID NO: 31671
  source 1..120: mol_type = other DNA

SEQ ID NO: 78659 - DNA, 120 bp, synthetic construct
  source 1..120: mol_type = other DNA
gagaaagagttaattactgactcagtaataagttgaaaacataaaaataataatggagccaggcagggtggctcatgcctgtaaaatcccagcactttggaggccaagatgggcagatca

SEQ ID NO: 78660 - DNA, 120 bp, synthetic construct
  source 1..120: mol_type = other DNA
ttgcagtgagctgacatcacgccactgcactccagcctgggccacagaacaagactccgtctcaaaaaaataaaaataaaaacaaaaaacctcttctcagtatgtatgtaggtacataca

SEQ ID NO: 78661 - DNA, 120 bp, synthetic construct
  source 1..120: mol_type = other DNA
ttgaactcgagaggtggagaatgcaatgagctgagatcacaccactgtactccagcctgggcaacagagcaagagtccgtctcaaaacaaacaaacaaacaaaaagagcaaaagccctct

SEQ ID NO: 78662 - DNA, 120 bp, synthetic construct
  source 1..120: mol_type = other DNA
cccgcctggccagccaccccgtccgggagatgaggggcgcctctgcccggccgcccctactgggaagggaggagcccctctgcccggccaccaccctgtctgggaggtgtactcaacagc

SEQ ID NO: 78663 - DNA, 120 bp, synthetic construct; identical to SEQ ID NO: 3194
  source 1..120: mol_type = other DNA

SEQ ID NO: 78664 - DNA, 120 bp, synthetic construct; identical to SEQ ID NO: 11485
  source 1..120: mol_type = other DNA

SEQ ID NO: 78665 - DNA, 120 bp, synthetic construct
  source 1..120: mol_type = other DNA
ggccgggcagaggggctcctcacttcccagacggggtggctgctgggcggaggggctcctcacatcccagacggggtcgcggccgggcagaggcgctccccacatctcagacgatgggcg

SEQ ID NO: 78666 - DNA, 120 bp, synthetic construct
  source 1..120: mol_type = other DNA
gtggtttctgttgctgtgtcttcgggttcactcatcttttcttctgcaatgtataatctgctgttcatcccactcagtagttttcatagttttcacttccgcaagttgagtttggatcgt

SEQ ID NO: 78667 - DNA, 120 bp, synthetic construct
  source 1..120: mol_type = other DNA
tttaatgattgccattctaactggtgtgagatggtatctcattgtggttttgatttgcatttctctgatggccagcagcacatcaaaaagcttatccaccatgatcaagtgggcttcatc

SEQ ID NO: 78668 - DNA, 120 bp, synthetic construct
  source 1..120: mol_type = other DNA
gtgaacaggctggtgtcgaactcctgacctcaagtgatccgtccaccttggcctcccaaagttctgggattacaggcgtgagccaccatgcctggctggatgccatgtattttgagtttc

SEQ ID NO: 78669 - DNA, 120 bp, synthetic construct
  source 1..120: mol_type = other DNA
aataaaacatattaaataaaacatttgtgttctgcattttaaaaatcttataatagctgggcgccgtggctcactcctgtaatcccagcactttgggaggccgaggagggcagatcacga

SEQ ID NO: 78670 - DNA, 120 bp, synthetic construct; identical to SEQ ID NO: 28420
  source 1..120: mol_type = other DNA

SEQ ID NO: 78671 - DNA, 120 bp, synthetic construct; identical to SEQ ID NO: 28421
  source 1..120: mol_type = other DNA

SEQ ID NO: 78672 - DNA, 120 bp, synthetic construct
  source 1..120: mol_type = other DNA
gaactttaaaaaaacccaaatgtccaacaacgaaagactggattaagaaaatgtagcacatatacaccatgggctactatgcagccataaaaaatgatgagttcatgtcctttgtaggga

SEQ ID NO: 78673 - DNA, 120 bp, synthetic construct
  source 1..120: mol_type = other DNA
gccagccagttttcccagcaccatttattaaatagggaatcctttccccattgcttgtttttctcaggtttgtcaaagatcagataggagtagatatgcggcattatttctgagggctct

SEQ ID NO: 78674 - DNA, 120 bp, synthetic construct
  source 1..120: mol_type = other DNA
aagggatgttgaattttgtcaaaggtcttttcttcatctattgagataatcatgtggtttttgtctttggttctcttgatatgctggattacatttaatgatttgcatatattgaaccag

SEQ ID NO: 78675 - DNA, 120 bp, synthetic construct
  source 1..120: mol_type = other DNA
gttttgagtgagtttcttaatcctgagttctaatttgattgcactgtggtctgagagacagtttgttataatttctgttcttttacatttgctgaggagagctttacttccaagtatgtg

SEQ ID NO: 78676 - DNA, 120 bp, synthetic construct
  source 1..120: mol_type = other DNA
gctgagagatccactgttagtctgatgggcttccctttgtaggtaacccgacctttctttctggctgcccttaacatttttccttcatttcaactttggtgaatatgacaattatgtgtc

SEQ ID NO: 78677 - DNA, 120 bp, synthetic construct
  source 1..120: mol_type = other DNA
aaaaataccaaaatttctttcataattctctctacccaaaggcatcggtcagtccctctccagaccagaagcagttagttctgacaccaacaagtggtgataagaggttgatagcctagc

SEQ ID NO: 78678 - DNA, 120 bp, synthetic construct
  source 1..120: mol_type = other DNA
ccttggctagttgcagaattcacacatatggggctatggcaacagcagattctggagtctcagggtcttttctttctagataagttacagggcaattgcttttcagagtacttttacatt

SEQ ID NO: 78679 - DNA, 120 bp, synthetic construct
  source 1..120: mol_type = other DNA
ggtcttatgtgtattgaccattctccccatccattccctcttcggaatgtttcagctgttctgagaaaacactttgcattcctgccccgcccctgtgatttctctttgggcggcaggcag

SEQ ID NO: 78680 - DNA, 120 bp, synthetic construct
  source 1..120: mol_type = other DNA
ctcccatttcacctcatacttaacccaaacccctctcaaaagtatggcccttggacctactgactccaaaaccttgggggacaggcccaggaatctgcattcttaatactcctcagatga

SEQ ID NO: 78681 - DNA, 120 bp, synthetic construct
  source 1..120: mol_type = other DNA
tctcatagaataaaaaacagaactgaacttagccttcccagggaaggaaccatgccccacacatccagggagtgatgacagaggggacagcttgaagagctctgaaggacaataaaaccc

SEQ ID NO: 78682 - DNA, 120 bp, synthetic construct
  source 1..120: mol_type = other DNA
aagtgctccccaccaaaagagcacagactcctggctagagcagagagtactaggttcccatgtggggccgactcaggtccaggaagagcctggaagcctcactccagtctagctgccatt

SEQ ID NO: 78683 - DNA, 120 bp, synthetic construct
  source 1..120: mol_type = other DNA
cctgcatctgtgaatgatatctctccccacacaagcctgaacctagaggcgtcctggccacttcccctctcctccttgagcaccccctgctcactctctgatccattccctcttgtctag

SEQ ID NO: 78684 - DNA, 120 bp, synthetic construct
  source 1..120: mol_type = other DNA
gaggccccacacattccatcctccccagtgcaagctgacaatgacattgacatctcctctagaaccagtgcctatcagggattaagctgggtttactcaaactcatttgctagaatgctg

SEQ ID NO: 78685 - DNA, 120 bp, synthetic construct
  source 1..120: mol_type = other DNA
tttttttttttttttttttttttttttgagacagggtctcactttgtgggccaggctggagtgcagaggcacaaatatggcttactggaggctcaacctctcggactcaagcgatcctct

SEQ ID NO: 78686 - DNA, 120 bp, synthetic construct
  source 1..120: mol_type = other DNA
taaagaacgaagacttcaaagacactttcttcactggtcagctcctccccccacatcttcagcagctcctccttgggggacttgctcttcaggtagaagaggtagtagtccttcagctcc

SEQ ID NO: 78687 - DNA, 120 bp, synthetic construct
  source 1..120: mol_type = other DNA
atcatccatgccaaccacagtgtcaggcagagggacccacgaaagtccgatcatattctaggagcacacctgggcttggcctgccgttttctcctcttttttctgtttttagagactgag

SEQ ID NO: 78688 - DNA, 120 bp, synthetic construct
  source 1..120: mol_type = other DNA
agagagtcctctgctttgggggctctgatcttgcaccttccaacagcacagcacagcctgaactaaaacagtgagtggctgggctcatgactgatatgcttctgaccccagagatgactc

SEQ ID NO: 78689 - DNA, 120 bp, synthetic construct
  source 1..120: mol_type = other DNA
agttctttattagtcatattctgtgttgtttctaatggcagaaccagcatccggttcagagagctggctagagtactataagccactcacaaaacaatgagctcctggagtctgaaaaca

SEQ ID NO: 78690 - DNA, 120 bp, synthetic construct
  source 1..120: mol_type = other DNA
ccaatcattatcacctaacgcccatcacgggtgcatattcccccagtaactgactatataatggctgatacaagcgatgacaatttaacagttggaaatgtctgttctctgactcctaat

SEQ ID NO: 78691 - DNA, 120 bp, synthetic construct
  source 1..120: mol_type = other DNA
agtgccttgtgaggtctgaggccatctcctgatcttgggttccctgccctctggaatcctgttagtaaatatccctcttttgtggggtgttgttttttttttttttttgagatggagtct

SEQ ID NO: 78692 - DNA, 120 bp, synthetic construct
  source 1..120: mol_type = other DNA
actgcgagtccctggaaggcagaaacttcatattatttaggtttggttcgtctctttctagcacttggtaagacagcaggagggaaaaaagcagcccaccagttcaatattcactgcatg

SEQ ID NO: 78693 - DNA, 120 bp, synthetic construct
  source 1..120: mol_type = other DNA
gagaggttccaggagaaataccatccgtcactgccttcccatggggcccgggagttagagaagcatcaatgaaggttggagacagaccaatcagcgttcatatcctggctttgctactta

SEQ ID NO: 78694 - DNA, 120 bp, synthetic construct
  source 1..120: mol_type = other DNA
attcagttggcatttctagagttcaagaagcataatccaaatttctaacttgctgaaaacaatctcactgctttgtgacttcctaaactgcactcgtgatccagcccccaagttccctca

SEQ ID NO: 78695 - DNA, 120 bp, synthetic construct
  source 1..120: mol_type = other DNA
tacctgatggaaggtggcacagaggacctcacgctgccgacctgcgaggcccatattcctagcgaggggcagtagtgcccagctgggaggaccctggcttttcgatggtccatctctgtc

SEQ ID NO: 78696 - DNA, 120 bp, synthetic construct
  source 1..120: mol_type = other DNA
aagcaaaactccatctcaaaaaaaaaaacaaaaacaaaaaacagaaacaagtaatcagagccaccagggcacagacaggccaacagagggcatagggtcatctggcagtctggttaagaa

SEQ ID NO: 78697 - DNA, 120 bp, synthetic construct
  source 1..120: mol_type = other DNA
tcttctccaggtgatcgccggggaggcaggtttaaaaggcaggagccggaagccgtctcggcgcccaggtggccgagaatccagtcaccaggtcactgagtcaccgatgggggcgaggac

SEQ ID NO: 78698 - DNA, 120 bp, synthetic construct
  source 1..120: mol_type = other DNA
ttacagcagccccaggacaccaatagactgcccatctgcttgaattagagtgttgacaagcttgggatttcatttcaaacggtggatttgcctatgttttcatctattatccatcttctc

SEQ ID NO: 78699 - DNA, 120 bp, synthetic construct; identical to SEQ ID NO: 35492
  source 1..120: mol_type = other DNA

SEQ ID NO: 78700 - DNA, 120 bp, synthetic construct; identical to SEQ ID NO: 35493
  source 1..120: mol_type = other DNA

SEQ ID NO: 78701 - DNA, 120 bp, synthetic construct; identical to SEQ ID NO: 35494
  source 1..120: mol_type = other DNA

SEQ ID NO: 78702 - DNA, 120 bp, synthetic construct; identical to SEQ ID NO: 35495
  source 1..120: mol_type = other DNA

SEQ ID NO: 78703 - DNA, 120 bp, synthetic construct; identical to SEQ ID NO: 51995
  source 1..120: mol_type = other DNA

SEQ ID NO: 78704 - DNA, 120 bp, synthetic construct; identical to SEQ ID NO: 35496
  source 1..120: mol_type = other DNA

SEQ ID NO: 78705 - DNA, 120 bp, synthetic construct
  source 1..120: mol_type = other DNA
tgaatgggagttcatgatttggctgtttgtctgttattggtgtataagaatgcttgtgatttttgcatattgattttgtatcctgagactttgctgaagttgcttatcagcttaaggaga

SEQ ID NO: 78706 - DNA, 120 bp, synthetic construct
  source 1..120: mol_type = other DNA
cttctagattttctagtttatttgcatagaggtgtttatagtattctctgatggtagtttgtatttctgtgggatcggtggtgatcttccctttatcattttttattgcatctatttgat

SEQ ID NO: 78707 - DNA, 120 bp, synthetic construct
  source 1..120: mol_type = other DNA
ctatgtgtgtctctgcacgtgagatgggtttcctgaatacagcacactgatgggtcttgactctttatccaatttgccagtctgtgtcttttaattggagcatttagcctgtttacattt

SEQ ID NO: 78708 - DNA, 120 bp, synthetic construct
  source 1..120: mol_type = other DNA
cttctcttctcgcttcatttcattcatttgatcttccatcactgataccctttattccagttgatcgaatcagctactgaggcttgtgcattcgtcacgtagttctcatgccacggtttt

SEQ ID NO: 78709 - DNA, 120 bp, synthetic construct
  source 1..120: mol_type = other DNA
gtgctgggattacaggtgtgagccactgcgcctggccaaactttcgatacctgatcacgcttttattgtttattttgtctcaccaactagtgccccaagaacaaaaattatgtctttttt

SEQ ID NO: 78710 - DNA, 120 bp, synthetic construct; identical to SEQ ID NO: 23739
  source 1..120: mol_type = other DNA

SEQ ID NO: 78711 - DNA, 120 bp, synthetic construct
  source 1..120: mol_type = other DNA
aaaaacatattattgtctaaaaaaaaaaagccaaaaaacccagccaggtgctatgactcatgcctgtaattccaacactttgggaggctgaggcaggaggattgcttgagcctaggagtt

SEQ ID NO: 78712 - DNA, 120 bp, synthetic construct; identical to SEQ ID NO: 4983
  source 1..120: mol_type = other DNA

SEQ ID NO: 78713 - DNA, 120 bp, synthetic construct; identical to SEQ ID NO: 18317
  source 1..120: mol_type = other DNA

SEQ ID NO: 78714 - DNA, 120 bp, synthetic construct
  source 1..120: mol_type = other DNA
atcatctagatagctaaacactagctcattaattctacaattttctcccatatattaatatatttcattaccgccgggtgtggtggctcacgcctgtaatcccagcactttgggaggcta

SEQ ID NO: 78715 - DNA, 120 bp, synthetic construct; identical to SEQ ID NO: 31368
  source 1..120: mol_type = other DNA

SEQ ID NO: 78716 - DNA, 120 bp, synthetic construct; identical to SEQ ID NO: 31369
  source 1..120: mol_type = other DNA

SEQ ID NO: 78717 - DNA, 120 bp, synthetic construct
  source 1..120: mol_type = other DNA
cctacttttgtcaattcatcaaactcattctccctctagttttattcccttgctggtaaggagttgtgatcctttggaggaaaagaggcgttctggcttatggaattctcagcctttttg

SEQ ID NO: 78718 - DNA, 120 bp, synthetic construct
  source 1..120: mol_type = other DNA
tacatgttagacctaaaaccataaaaaccctagaagaaaacctagacaatacctttcaggacataggcatgggcaaggacttgatgtctaaaacaccaaaagcaatgtcaacaaaagcca

SEQ ID NO: 78719 - DNA, 120 bp, synthetic construct; identical to SEQ ID NO: 34035
  source 1..120: mol_type = other DNA

SEQ ID NO: 78720 - DNA, 120 bp, synthetic construct
  source 1..120: mol_type = other DNA
tttctccacatcctctccagcacctgttgtttcctgactttttaatgattgccattctaactggtgtgagatagtatctcatagtggttttgatttgcatttctctgatggctagtgatg

SEQ ID NO: 78721 - DNA, 120 bp, synthetic construct
  source 1..120: mol_type = other DNA
tggaatgttcttccatttgtttgtatcctcttttatttccttgagcagtggtttctagttctccttgaagaggtccttcacatcccttgtaagttggattcctaggtattttattctctt

SEQ ID NO: 78722 - DNA, 120 bp, synthetic construct
  source 1..120: mol_type = other DNA
ttgattggaatagtttcagaaggaatggtaccagttcccccttgtacctctggtagaattcggctgtgaatccatctggtcctggactctttttggttggtaaactattgattattgcca

SEQ ID NO: 78723 - DNA, 120 bp, synthetic construct
  source 1..120: mol_type = other DNA
tgcttggtgcagagctgagttcaattcctgggtatccttgtggactttctgtctcattgatctgtctaatgttgacagtggggtgttaaagtctcccattattaatgtgtgggagtctaa

SEQ ID NO: 78724 - DNA, 120 bp, synthetic construct
  source 1..120: mol_type = other DNA
tatgtgtcttggagttgctcttcttgaggagtatctttgtggcgttctctgtatttcctgaatctgaacgttggcctgccttgctagattggggaagttctcctggataatatcctgcag

SEQ ID NO: 78725 - DNA, 120 bp, synthetic construct
  source 1..120: mol_type = other DNA
gtgccctgcccccagaggtggagcctacagaggcaggcaggcctccttgagctgtggttggctccacccagttcgagctttctggctgctttgtttacctgagcaagcctgggcaatggc

SEQ ID NO: 78726 - DNA, 120 bp, synthetic construct; identical to SEQ ID NO: 34036
  source 1..120: mol_type = other DNA

SEQ ID NO: 78727 - DNA, 120 bp, synthetic construct; identical to SEQ ID NO: 34037
  source 1..120: mol_type = other DNA

SEQ ID NO: 78728 - DNA, 120 bp, synthetic construct; identical to SEQ ID NO: 26019
  source 1..120: mol_type = other DNA

SEQ ID NO: 78729 - DNA, 120 bp, synthetic construct; identical to SEQ ID NO: 26020
  source 1..120: mol_type = other DNA

SEQ ID NO: 78730 - DNA, 120 bp, synthetic construct
  source 1..120: mol_type = other DNA
gagatttgctgatagaatctcagctttctcaggttaagggtactgtgagtgaaatacccttaggcagcagtccccaacctttttggcaccagggactagttttgtggaagacaattattc

SEQ ID NO: 78731 - DNA, 120 bp, synthetic construct
  source 1..120: mol_type = other DNA
caagtccttagagacctacaaagagacttagactcccaaacagtaataatgggagactttaacaccccactgtcaacattagacagatcaagacagaaagttaacaaggatatccaggaa

SEQ ID NO: 78732 - DNA, 120 bp, synthetic construct
  source 1..120: mol_type = other DNA
atagaccactagcaagactaataaagaagaaaagagaggctaggcgcggtggctcatgcctgtaatcccagcactttgggaggccgaggtgggcggatcacgaggtcaggagatcaagac

SEQ ID NO: 78733 - DNA, 120 bp, synthetic construct
  source 1..120: mol_type = other DNA
gatggggcgtatctcaaaataataagagatatttatgacaaacccacagccaatatcatactgaatgggcaaaaactggaagcattccctttgaaaactggcacaagacagggatgccct

SEQ ID NO: 78734 - DNA, 120 bp, synthetic construct
  source 1..120: mol_type = other DNA
acagaatgggagaaaatttttgcaatctacccatctaacaaagggctaatatccagaatctacaaagaacttaaacaaatttacaagaaaaaatcaaacaaccccatcaaaaagtgggca

SEQ ID NO: 78735 - DNA, 120 bp, synthetic construct; identical to SEQ ID NO: 7064
  source 1..120: mol_type = other DNA

SEQ ID NO: 78736 - DNA, 120 bp, synthetic construct; identical to SEQ ID NO: 7065
  source 1..120: mol_type = other DNA

SEQ ID NO: 78737 - DNA, 120 bp, synthetic construct
  source 1..120: mol_type = other DNA
cagtgagccgagatcgtgcagtgtgctgcactccagcctaggcaacagagtaagactccgtctcaaaagtaataatgataaaaaaatgaaataaagaaattttccctgttgtgaaaccag

SEQ ID NO: 78738 - DNA, 120 bp, synthetic construct; identical to SEQ ID NO: 30082
  source 1..120: mol_type = other DNA

SEQ ID NO: 78739 - DNA, 120 bp, synthetic construct; identical to SEQ ID NO: 9490
  source 1..120: mol_type = other DNA

SEQ ID NO: 78740 - DNA, 120 bp, synthetic construct; identical to SEQ ID NO: 28435
  source 1..120: mol_type = other DNA

SEQ ID NO: 78741 - DNA, 120 bp, synthetic construct
  source 1..120: mol_type = other DNA
actgggtaatttgtaaggaacagaaatgtatttctcacagttctggaggatgggaagtctaagatcaaggagctggcacttgttgactagggctttcttgctgtgttctcacatacagaa

SEQ ID NO: 78742 - DNA, 120 bp, synthetic construct; identical to SEQ ID NO: 28436
  source 1..120: mol_type = other DNA

SEQ ID NO: 78743 - DNA, 120 bp, synthetic construct; identical to SEQ ID NO: 28437
  source 1..120: mol_type = other DNA

SEQ ID NO: 78744 - DNA, 120 bp, synthetic construct; identical to SEQ ID NO: 25680
  source 1..120: mol_type = other DNA

SEQ ID NO: 78745 - DNA, 120 bp, synthetic construct
  source 1..120: mol_type = other DNA
gcctcccaaagtgctgggattacaatgagccaccacgcccagccccaagaacattcttactttagatatgggcctgctagcaagatttaaatgcagtttatctttgaataaatacatttt

SEQ ID NO: 78746 - DNA, 120 bp, synthetic construct; identical to SEQ ID NO: 13614
  source 1..120: mol_type = other DNA

SEQ ID NO: 78747 - DNA, 120 bp, synthetic construct
  source 1..120: mol_type = other DNA
caaagtgctgggattacaggcgtgagccactgtgcccggcctcttcacattaaccttttgatgaaggtattttgatacccatgttatagataactcaggttgccttgatcaaataatatt

SEQ ID NO: 78748 - DNA, 120 bp, synthetic construct; identical to SEQ ID NO: 13616
  source 1..120: mol_type = other DNA

SEQ ID NO: 78749 - DNA, 120 bp, synthetic construct; identical to SEQ ID NO: 13617
  source 1..120: mol_type = other DNA

SEQ ID NO: 78750 - DNA, 120 bp, synthetic construct; identical to SEQ ID NO: 13618
  source 1..120: mol_type = other DNA

SEQ ID NO: 78751 - DNA, 120 bp, synthetic construct
  source 1..120: mol_type = other DNA
caggttcaagcaattctcctgcctcagcctctggaatagctgggactacaggcgcacaccactatgcccagctaattattgtatttttagtagagacggggtttcaccatattggtcggg

SEQ ID NO: 78752 - DNA, 120 bp, synthetic construct
  source 1..120: mol_type = other DNA
tctcacaccagttagaatggcaatcattaaaaagtcaggaaacaacaggtgctggagaggatgtggagaaataggaacacttttacactgttggtgggaccgtaaactagttcaaccatt

SEQ ID NO: 78753 - DNA, 120 bp, synthetic construct; identical to SEQ ID NO: 13619
  source 1..120: mol_type = other DNA

SEQ ID NO: 78754 - DNA, 120 bp, synthetic construct; identical to SEQ ID NO: 13620
  source 1..120: mol_type = other DNA

SEQ ID NO: 78755 - DNA, 120 bp, synthetic construct; identical to SEQ ID NO: 13604
  source 1..120: mol_type = other DNA

SEQ ID NO: 78756 - DNA, 120 bp, synthetic construct; identical to SEQ ID NO: 13605
  source 1..120: mol_type = other DNA

SEQ ID NO: 78757 - DNA, 120 bp, synthetic construct
  source 1..120: mol_type = other DNA
actggtgtgagatggtatctcattgtggttttgatttgcatttctctgatagccagtgatgatgagcattttttcatgtcttttggctgcataaatgtcttcttttgagaggtgtctgtt

SEQ ID NO: 78758 - DNA, 120 bp, synthetic construct
  source 1..120: mol_type = other DNA
gtagttttttccaattctgtgaagcaagtcattggtagcttgatggggatggcattgaatctataaattaccttgggcagtatggccattttcatgatattgattcttcctacccatgag

SEQ ID NO: 78759 - DNA, 120 bp, synthetic construct
  source 1..120: mol_type = other DNA
tgtctctgccaggctttggtatcaggatgatgctggcctcataaaatgagttagggaggattccctctttttctattgattggaatagtttcagaaggaatgctagcagctcctccttgt

SEQ ID NO: 78760 - DNA, 120 bp, synthetic construct; identical to SEQ ID NO: 13606
  source 1..120: mol_type = other DNA

SEQ ID NO: 78761 - DNA, 120 bp, synthetic construct
  source 1..120: mol_type = other DNA
tgagacggtatctcattgtggttttgattttcatttctctgatggccagtgatggtgaacgttttttcatgtgttttttggctgcaaaaatgtcttcttttgagaagtgtctgttcatgt

SEQ ID NO: 78762 - DNA, 120 bp, synthetic construct
  source 1..120: mol_type = other DNA
attatgagtgaactcccattcacaattgcttcaaagagaataaaatacctaggaatccaacttacaagggatgtgaaggacctcttcaaggagaactacaaaccactgctcaatgaaata

SEQ ID NO: 78763 - DNA, 120 bp, synthetic construct; identical to SEQ ID NO: 13607
  source 1..120: mol_type = other DNA

SEQ ID NO: 78764 - DNA, 120 bp, synthetic construct; identical to SEQ ID NO: 13608
  source 1..120: mol_type = other DNA

SEQ ID NO: 78765 - DNA, 120 bp, synthetic construct; identical to SEQ ID NO: 13609
  source 1..120: mol_type = other DNA

SEQ ID NO: 78766 - DNA, 120 bp, synthetic construct
  source 1..120: mol_type = other DNA
aagcttctacacagcaaaagaaactaccatcagagtgaagaggcaacctacaaaatgggagaaaattttcgcaacctactcatctgacaaagggctaatatccagaatctacaatgaact

SEQ ID NO: 78767 - DNA, 120 bp, synthetic construct; identical to SEQ ID NO: 13610
  source 1..120: mol_type = other DNA

SEQ ID NO: 78768 - DNA, 120 bp, synthetic construct; identical to SEQ ID NO: 13611
  source 1..120: mol_type = other DNA

SEQ ID NO: 78769 - DNA, 120 bp, synthetic construct; identical to SEQ ID NO: 13612
  source 1..120: mol_type = other DNA

SEQ ID NO: 78770 - DNA, 120 bp, synthetic construct; identical to SEQ ID NO: 13613
  source 1..120: mol_type = other DNA

SEQ ID NO: 78771 - DNA, 120 bp, synthetic construct; identical to SEQ ID NO: 13612
  source 1..120: mol_type = other DNA

SEQ ID NO: 78772 - DNA, 120 bp, synthetic construct
  source 1..120: mol_type = other DNA
aaaggccgatactcaccatttcagaaatgtctctctgcagctcttggtagtagtcggtgctgggatcttccagagaggaattaaactggaggtttgaaatgtgaaaagacaggaaaaaga

SEQ ID NO: 78773 - DNA, 120 bp, synthetic construct
  source 1..120: mol_type = other DNA
ggccgaggtgacactgtgagctgggctgcgggcgcggtggagcccggggccggcctgctctctgttttaaatatacaccgtgggctgcgggcgcggtggagcccggggacggcctggtgt

SEQ ID NO: 78774 - DNA, 120 bp, synthetic construct
  source 1..120: mol_type = other DNA
acactgtgagctgggctgcgggcgcggtggagcccggggccggcctgctctctgttttaaatatacaccgtgggctgcgggcgcggtggagcccggggacggcctggtgtccggggccga

SEQ ID NO: 78775 - DNA, 120 bp, synthetic construct
  source 1..120: mol_type = other DNA
tctgttttaaatatacaccgtgggctgcgggcgcggtggagcccggggacggcctggtgtccggggccgaggtgacaccgtgggctgggggggcggtggagcccggggccggcctggtgt

SEQ ID NO: 78776 - DNA, 120 bp, synthetic construct
  source 1..120: mol_type = other DNA
ggggccagagtgacatcctgtccctgagtggtggaggagcctgaaccggggctgtggctggagagtacgctgctggtcatactcacagcattcttctcagtagagctgggcactgaactt

SEQ ID NO: 78777 - DNA, 120 bp, synthetic construct; identical to SEQ ID NO: 29770
  source 1..120: mol_type = other DNA

SEQ ID NO: 78778 - DNA, 120 bp, synthetic construct; identical to SEQ ID NO: 29771
  source 1..120: mol_type = other DNA

SEQ ID NO: 78779 - DNA, 120 bp, synthetic construct; identical to SEQ ID NO: 29772
  source 1..120: mol_type = other DNA

SEQ ID NO: 78780 - DNA, 120 bp, synthetic construct; identical to SEQ ID NO: 29773
  source 1..120: mol_type = other DNA

SEQ ID NO: 78781 - DNA, 120 bp, synthetic construct; identical to SEQ ID NO: 29774
  source 1..120: mol_type = other DNA

SEQ ID NO: 78782 - DNA, 120 bp, synthetic construct
  source 1..120: mol_type = other DNA
ccacgccaggcctcagtgaggaatctaccaccgtctacagcagcagcccaggctcaactgaaaccacagtgttccctcgcagcaccacaacctcagttcgtcgtgaagagcctacaacct

SEQ ID NO: 78783 - DNA, 120 bp, synthetic construct; identical to SEQ ID NO: 29775
  source 1..120: mol_type = other DNA

SEQ ID NO: 78784 - DNA, 120 bp, synthetic construct; identical to SEQ ID NO: 29776
  source 1..120: mol_type = other DNA

SEQ ID NO: 78785 - DNA, 120 bp, synthetic construct
  source 1..120: mol_type = other DNA
gctcaaaggacactaggcctgcacctcctactaccacatcagcctttgttgagccatctacaacctcccacggcagcccgagctcaattccaacaacccacatttctgcccgctccacaa

SEQ ID NO: 78786 - DNA, 120 bp, synthetic construct; identical to SEQ ID NO: 29777
  source 1..120: mol_type = other DNA

SEQ ID NO: 78787 - DNA, 120 bp, synthetic construct
  source 1..120: mol_type = other DNA
gtgaagaatccagcacatcccacagtcaaccaggctcaacgcacacaacagcgttccctgacagcaccaccacctcaggcctcagtcaggaacctacagcttcccacagcagccaaggct

SEQ ID NO: 78788 - DNA, 120 bp, synthetic construct
  source 1..120: mol_type = other DNA
gaaggacactacccctgcacctcctactaccacatcagcctttgttgagctatctacaacctcccacggcagcccgagctcaactccaacaacccacttttctgccagctccacaacctt

SEQ ID NO: 78789 - DNA, 120 bp, synthetic construct; identical to SEQ ID NO: 29778
  source 1..120: mol_type = other DNA

SEQ ID NO: 78790 - DNA, 120 bp, synthetic construct; identical to SEQ ID NO: 29779
  source 1..120: mol_type = other DNA

SEQ ID NO: 78791 - DNA, 120 bp, synthetic construct; identical to SEQ ID NO: 29780
  source 1..120: mol_type = other DNA

SEQ ID NO: 78792 - DNA, 120 bp, synthetic construct
  source 1..120: mol_type = other DNA
ttttccaaatcgttgcctagtctttttttttttttttttttttgagagagagagacagatagggtcttgctctatcacccaggctggagtgcagtggcacaactgggtcactgcaggctt

SEQ ID NO: 78793 - DNA, 120 bp, synthetic construct; identical to SEQ ID NO: 24637
  source 1..120: mol_type = other DNA

SEQ ID NO: 78794 - DNA, 120 bp, synthetic construct
  source 1..120: mol_type = other DNA
ttagtcctggagccagtttcctggattccatctttgataagaataatcacaaagaggacaggaaaaaagaagtccaaactcattgagactaggaataatcggggcagccacactggaaat

SEQ ID NO: 78795 - DNA, 120 bp, synthetic construct
  source 1..120: mol_type = other DNA
caccatcatcactgtcaatatcaccatgattgccaccatcagtagtattattgtcatcatcaccaccaccatcatcatcatcatcatcacataaacagaagctcactgagggcagagatg

SEQ ID NO: 78796 - DNA, 120 bp, synthetic construct; identical to SEQ ID NO: 19533
  source 1..120: mol_type = other DNA

SEQ ID NO: 78797 - DNA, 120 bp, synthetic construct
  source 1..120: mol_type = other DNA
aaacgttagacctaaaaccataaaaaccctagaagaaaacctaggcattaccatttaggacataggcatgagcaaggacttcatgtctaaaacaccaaaaacaatggcaacaaaagccaa

SEQ ID NO: 78798 - DNA, 120 bp, synthetic construct; identical to SEQ ID NO: 19534
  source 1..120: mol_type = other DNA

SEQ ID NO: 78799 - DNA, 120 bp, synthetic construct; identical to SEQ ID NO: 29781
  source 1..120: mol_type = other DNA

SEQ ID NO: 78800 - DNA, 120 bp, synthetic construct; identical to SEQ ID NO: 29782
  source 1..120: mol_type = other DNA

SEQ ID NO: 78801 - DNA, 120 bp, synthetic construct; identical to SEQ ID NO: 12860
  source 1..120: mol_type = other DNA

SEQ ID NO: 78802 - DNA, 120 bp, synthetic construct; identical to SEQ ID NO: 12861
  source 1..120: mol_type = other DNA

SEQ ID NO: 78803 - DNA, 120 bp, synthetic construct; identical to SEQ ID NO: 12862
  source 1..120: mol_type = other DNA

SEQ ID NO: 78804 - DNA, 120 bp, synthetic construct; identical to SEQ ID NO: 12863
  source 1..120: mol_type = other DNA

SEQ ID NO: 78805 - DNA, 120 bp, synthetic construct
  source 1..120: mol_type = other DNA
ctgaagcaacagggacaactggaccatcagctggagtgacagggacaactggactatcagctggggtgacagggacagctggactatcagctagggtgacagagagtacaggactatcag

SEQ ID NO: 78806 - DNA, 120 bp, synthetic construct; identical to SEQ ID NO: 12864
  source 1..120: mol_type = other DNA

SEQ ID NO: 78807 - DNA, 120 bp, synthetic construct; identical to SEQ ID NO: 12865
  source 1..120: mol_type = other DNA

SEQ ID NO: 78808 - DNA, 120 bp, synthetic construct; identical to SEQ ID NO: 12866
  source 1..120: mol_type = other DNA

SEQ ID NO: 78809 - DNA, 120 bp, synthetic construct
  source 1..120: mol_type = other DNA
accgcaataaacatacatgtgcatgtgtctttatagcagcatgttttataatcctttgggtatatacccagtaatgagatggctgggtcaaatggtatttctagttctagatccttgagg

SEQ ID NO: 78810 - DNA, 120 bp, synthetic construct; identical to SEQ ID NO: 11559
  source 1..120: mol_type = other DNA

SEQ ID NO: 78811 - DNA, 120 bp, synthetic construct; identical to SEQ ID NO: 11560
  source 1..120: mol_type = other DNA

SEQ ID NO: 78812 - DNA, 120 bp, synthetic construct
  source 1..120: mol_type = other DNA
tgctgacagcctcaacctgccagccctcagcctgcacatttgtgatcacctggtcacacacctgggcaggaggctgcccctcctccctggtttgaggaagcaggaaaaggtacccgcgag

SEQ ID NO: 78813 - DNA, 120 bp, synthetic construct
  source 1..120: mol_type = other DNA
gaattgcttgaacctgggaggtggagtttgcagtgagctgagatcgcacccttgcgctctggcctgggcaacaaaagtgaaactatgtttcaaaaaaaaaaaagctgcagtggagagtct

SEQ ID NO: 78814 - DNA, 120 bp, synthetic construct
  source 1..120: mol_type = other DNA
aagtgagatttgtgtgtgcagctgggccgcactggaccagggatgagagtgggtgcccgggactcgcctatactgcctgggggtgcagcccgcactcctcactatagtcagatcaactat

SEQ ID NO: 78815 - DNA, 120 bp, synthetic construct
  source 1..120: mol_type = other DNA
ggccagaaaagatcttgtagtaaactactcaagaggctgaggcaggaggatcgcttgagcccaggaattcaagacctgcctgggcaacagagcaagaccctgtctctagggaagatatcc

SEQ ID NO: 78816 - DNA, 120 bp, synthetic construct
  source 1..120: mol_type = other DNA
aaaatgaggtaacggcactcccctgccccaccctcctcccagaagtgcccagggtgtaaacgcaatagcttgtgtgaagtccactggaacccaggctcaccaagtcagtcttaaccaaca

SEQ ID NO: 78817 - DNA, 120 bp, synthetic construct
  source 1..120: mol_type = other DNA
gcccccatccagtcatcaccccgtcacgggcctcagagagcagcgcctcttccgacggcccccatccagtcatcaccccgtcacgggcctcagagagcagcgcctcttccgacggcctcc

SEQ ID NO: 78818 - DNA, 120 bp, synthetic construct
  source 1..120: mol_type = other DNA
acagacgtgagtgcaggtaagtggctcctgctggtgatcttcggggatttgggatgcggagtttccaggacgtctccgcacttgaggagtggagaggagggaaggatctggagcctactc

SEQ ID NO: 78819 - DNA, 120 bp, synthetic construct; identical to SEQ ID NO: 29756
  source 1..120: mol_type = other DNA

SEQ ID NO: 78820 - DNA, 120 bp, synthetic construct; identical to SEQ ID NO: 29757
  source 1..120: mol_type = other DNA

SEQ ID NO: 78821 - DNA, 120 bp, synthetic construct; identical to SEQ ID NO: 29758
  source 1..120: mol_type = other DNA

SEQ ID NO: 78822 - DNA, 120 bp, synthetic construct; identical to SEQ ID NO: 29759
  source 1..120: mol_type = other DNA

SEQ ID NO: 78823 - DNA, 120 bp, synthetic construct; identical to SEQ ID NO: 29760
  source 1..120: mol_type = other DNA

SEQ ID NO: 78824 - DNA, 120 bp, synthetic construct
  source 1..120: mol_type = other DNA
ggaagaatccatttttttgccctttgcagcttctggagcctcccacagcaagcctgcatctctctgtgtctttctcccatagcctcatctccctctaatgaactctggcctcctcaattg

SEQ ID NO: 78825 - DNA, 120 bp, synthetic construct
  source 1..120: mol_type = other DNA
acagagcgagactccgtctcaaaaaaaaaaaaaaaaaaaaaaaaaaaaaaaaaaaacttacctgggcatggtggctcatgcctgtggtcccagttatttggaaggctgaggtgggagaat

SEQ ID NO: 78826 - DNA, 120 bp, synthetic construct; identical to SEQ ID NO: 29763
  source 1..120: mol_type = other DNA

SEQ ID NO: 78827 - DNA, 120 bp, synthetic construct; identical to SEQ ID NO: 29764
  source 1..120: mol_type = other DNA

SEQ ID NO: 78828 - DNA, 120 bp, synthetic construct; identical to SEQ ID NO: 29765
  source 1..120: mol_type = other DNA

SEQ ID NO: 78829 - DNA, 120 bp, synthetic construct; identical to SEQ ID NO: 29766
  source 1..120: mol_type = other DNA

SEQ ID NO: 78830 - DNA, 120 bp, synthetic construct; identical to SEQ ID NO: 29767
  source 1..120: mol_type = other DNA

SEQ ID NO: 78831 - DNA, 120 bp, synthetic construct; identical to SEQ ID NO: 29768
  source 1..120: mol_type = other DNA

SEQ ID NO: 78832 - DNA, 120 bp, synthetic construct; identical to SEQ ID NO: 29769
  source 1..120: mol_type = other DNA

SEQ ID NO: 78833 - DNA, 120 bp, synthetic construct
  source 1..120: mol_type = other DNA
gagctggcctctgaatagcatgctcaccctgcgtctgtccccagcgcgccgagtgtgagaggctgctgaccgccgaggccttcgcggactgtcaggacctggtgccgctggagccgtatc

SEQ ID NO: 78834 - DNA, 120 bp, synthetic construct
  source 1..120: mol_type = other DNA
ggggacactcaccgtgccgggcaccgggagctggggggacactcaccacgggcaccgagagctggggggacactcaccgcgccgggcaccgggagctggggggacactcactgtgacggg

SEQ ID NO: 78835 - DNA, 120 bp, synthetic construct
  source 1..120: mol_type = other DNA
ggacactcactgagggcaccgggagctggggggacactcactgagggcaccgggagctggggggacactcactgagggcaccaagagctggggggacactcaccacgggcaccgagagct

SEQ ID NO: 78836 - DNA, 120 bp, synthetic construct
  source 1..120: mol_type = other DNA
gggacactcactgagggcaccgggagctggggggacactcactgagggcaccaagagctggggggacactcaccacgggcaccgagagctggggggacactcaccgtgacgggcaccggg

SEQ ID NO: 78837 - DNA, 120 bp, synthetic construct; identical to SEQ ID NO: 11561
  source 1..120: mol_type = other DNA

SEQ ID NO: 78838 - DNA, 120 bp, synthetic construct; identical to SEQ ID NO: 11562
  source 1..120: mol_type = other DNA

SEQ ID NO: 78839 - DNA, 120 bp, synthetic construct; identical to SEQ ID NO: 11563
  source 1..120: mol_type = other DNA

SEQ ID NO: 78840 - DNA, 120 bp, synthetic construct; identical to SEQ ID NO: 11564
  source 1..120: mol_type = other DNA

SEQ ID NO: 78841 - DNA, 120 bp, synthetic construct
  source 1..120: mol_type = other DNA
caccaccaccactacggtgaccccaaccccaacacccaccggcacaaagagtacaaccccgacatccatcaccaccaccactatggtgaccccaaccccaccacccactggcacacagac

SEQ ID NO: 78842 - DNA, 120 bp, synthetic construct
  source 1..120: mol_type = other DNA
tgacaccaaccccaacacccaccggcacacagaccccaaccccgacacccatctccaccaccactacggtgaccccaaccccaacacccaccggcacacagaccccaaccatgacaccca

SEQ ID NO: 78843 - DNA, 120 bp, synthetic construct
  source 1..120: mol_type = other DNA
ccaaccccgacacccatcaccaccaccaccacggtgaccccaaccccaacacccaccggcacacagaccccaacatcgacacccatcaccaccaacactacggtgaccccaaccccaaca

SEQ ID NO: 78844 - DNA, 120 bp, synthetic construct
  source 1..120: mol_type = other DNA
cgacacccatcaccaccaccactacggtgaccccaaccccaacacccaccggcacaaagagtacaaccccgacatccatcaccaccaccactatggtgaccccaaccccaccacccactg

SEQ ID NO: 78845 - DNA, 120 bp, synthetic construct; identical to SEQ ID NO: 11565
  source 1..120: mol_type = other DNA

SEQ ID NO: 78846 - DNA, 120 bp, synthetic construct; identical to SEQ ID NO: 11566
  source 1..120: mol_type = other DNA

SEQ ID NO: 78847 - DNA, 120 bp, synthetic construct; identical to SEQ ID NO: 11567
  source 1..120: mol_type = other DNA

SEQ ID NO: 78848 - DNA, 120 bp, synthetic construct; identical to SEQ ID NO: 25002
  source 1..120: mol_type = other DNA

SEQ ID NO: 78849 - DNA, 120 bp, synthetic construct; identical to SEQ ID NO: 25003
  source 1..120: mol_type = other DNA

SEQ ID NO: 78850 - DNA, 120 bp, synthetic construct; identical to SEQ ID NO: 25004
  source 1..120: mol_type = other DNA

SEQ ID NO: 78851 - DNA, 120 bp, synthetic construct; identical to SEQ ID NO: 25005
  source 1..120: mol_type = other DNA

SEQ ID NO: 78852 - DNA, 120 bp, synthetic construct; identical to SEQ ID NO: 25006
  source 1..120: mol_type = other DNA

SEQ ID NO: 78853 - DNA, 120 bp, synthetic construct; identical to SEQ ID NO: 25007
  source 1..120: mol_type = other DNA

SEQ ID NO: 78854 - DNA, 120 bp, synthetic construct; identical to SEQ ID NO: 25008
  source 1..120: mol_type = other DNA

SEQ ID NO: 78855 - DNA, 120 bp, synthetic construct; identical to SEQ ID NO: 25009
  source 1..120: mol_type = other DNA

SEQ ID NO: 78856 - DNA, 120 bp, synthetic construct; identical to SEQ ID NO: 25010
  source 1..120: mol_type = other DNA

SEQ ID NO: 78857 - DNA, 120 bp, synthetic construct; identical to SEQ ID NO: 25011
  source 1..120: mol_type = other DNA

SEQ ID NO: 78858 - DNA, 120 bp, synthetic construct; identical to SEQ ID NO: 25012
  source 1..120: mol_type = other DNA

SEQ ID NO: 78859 - DNA, 120 bp, synthetic construct; identical to SEQ ID NO: 25013
  source 1..120: mol_type = other DNA

SEQ ID NO: 78860 - DNA, 120 bp, synthetic construct; identical to SEQ ID NO: 25014
  source 1..120: mol_type = other DNA

SEQ ID NO: 78861 - DNA, 120 bp, synthetic construct
  source 1..120: mol_type = other DNA
accttccacggccataccttccacggtcataccttccacacccataccttccacggccataccttccacacccataccttccacacccataccttccacacccataccttccacacccat

SEQ ID NO: 78862 - DNA, 120 bp, synthetic construct
  source 1..120: mol_type = other DNA
cccataccttccacacccataccttccacacccttaccttccacacccataccttccacggccataccttccacggtcataccttccacacccataccttccacggccataccttccaca

SEQ ID NO: 78863 - DNA, 120 bp, synthetic construct
  source 1..120: mol_type = other DNA
ccacacccataccttccacagtcataccttccacacccataccttccacacccataccttccacatccataccttccacagtcataccttccacacccataccttccacatccatacctt

SEQ ID NO: 78864 - DNA, 120 bp, synthetic construct; identical to SEQ ID NO: 25015
  source 1..120: mol_type = other DNA

SEQ ID NO: 78865 - DNA, 120 bp, synthetic construct
  source 1..120: mol_type = other DNA
aggaagaggggtggcctgtcctgtggatgctgaggaagtgtcggtgacaagaagagggatggcgtgacctgtggatgctgaggaagggctggtgacaggaagaggggtggcctgacctgt

SEQ ID NO: 78866 - DNA, 120 bp, synthetic construct
  source 1..120: mol_type = other DNA
cgtgacctgtagatactgaggaagtgctggtgacaggaagaggggtggtgtgacctgaggatgatgaggaagggatggtgacaggaagaggggtggcctgacctgtggatgctgaggaag

SEQ ID NO: 78867 - DNA, 120 bp, synthetic construct
  source 1..120: mol_type = other DNA
catgacctgtggatgccgaggaaacgttggtgacaggaagacgggtggtgtcacctgtggaagctgaggaaaggccggtgacaggaagatgggtggcgtgacctgtggatgctgaggaag

SEQ ID NO: 78868 - DNA, 120 bp, synthetic construct
  source 1..120: mol_type = other DNA
agggctggtgacatgaagagggttggcgtgacctgtggatgctgaggaagtgtcggtgacaggaagcggggtggcgtgaccggtggatgctgaggaagggctggtgacatgaagaggggt

SEQ ID NO: 78869 - DNA, 120 bp, synthetic construct
  source 1..120: mol_type = other DNA
tgtcggtgacaggaagagaggtggtgtcacctgtgtatgctgaggaagtgtcggtgacaggaagagaggtggtgtcacctgtggatgctgaggaagtgtcggtgacaggaagagaggtgg

SEQ ID NO: 78870 - DNA, 120 bp, synthetic construct
  source 1..120: mol_type = other DNA
ggctggtgacaggaagaggggtggcgtgacctgtggatgctgaggaagcgtcggtgacatgaagaggggtggcgtgacctgtggatgctgaggaagggctagtgacaggaagaggagtgg

SEQ ID NO: 78871 - DNA, 120 bp, synthetic construct
  source 1..120: mol_type = other DNA
aggaaaggctggtgacaggaagaggggtgtcctgacctgtggatgctgaggaagtatcggtgacaggaagcggcgtggtgtcaccagtggatgctgaggaaaggctggtgacaggaagag

SEQ ID NO: 78872 - DNA, 120 bp, synthetic construct
  source 1..120: mol_type = other DNA
aacgtcggtgacaggaagacgggtggtgtcatctgtggtagctgaggaaaggccggtgacaggaagaggggtggcgtgaccggtggatgctgaggaagtgctggtgacaggaagaggggt

SEQ ID NO: 78873 - DNA, 120 bp, synthetic construct
  source 1..120: mol_type = other DNA
gaagcgtcggtgacaggaagaggggtggtgtcacctgtggatgctgaggaagggctagtgacaggaagaggcatggtgtcacctgtggatgctgaggaaaggctggtgacaggaagaggg

SEQ ID NO: 78874 - DNA, 120 bp, synthetic construct; identical to SEQ ID NO: 25016
  source 1..120: mol_type = other DNA

SEQ ID NO: 78875 - DNA, 120 bp, synthetic construct
  source 1..120: mol_type = other DNA
ggccaaggtaagcagatcacttgaggtcaggagttcgagactagcctgaccaacatggcaaaaccccatttctactaaaaatacaaaaatcagcagagcatggtggcatgtgcctgtgat

SEQ ID NO: 78876 - DNA, 120 bp, synthetic construct; identical to SEQ ID NO: 11589
  source 1..120: mol_type = other DNA

SEQ ID NO: 78877 - DNA, 120 bp, synthetic construct; identical to SEQ ID NO: 11568
  source 1..120: mol_type = other DNA

SEQ ID NO: 78878 - DNA, 120 bp, synthetic construct; identical to SEQ ID NO: 11569
  source 1..120: mol_type = other DNA

SEQ ID NO: 78879 - DNA, 120 bp, synthetic construct; identical to SEQ ID NO: 11570
  source 1..120: mol_type = other DNA

SEQ ID NO: 78880 - DNA, 120 bp, synthetic construct; identical to SEQ ID NO: 11571
  source 1..120: mol_type = other DNA

SEQ ID NO: 78881 - DNA, 120 bp, synthetic construct; identical to SEQ ID NO: 11572
  source 1..120: mol_type = other DNA

SEQ ID NO: 78882 - DNA, 120 bp, synthetic construct; identical to SEQ ID NO: 11573
  source 1..120: mol_type = other DNA

SEQ ID NO: 78883 - DNA, 120 bp, synthetic construct
  source 1..120: mol_type = other DNA
acgaaggggcccaaggacaggctcatggtgggcgcccaacccagcttatgtggagcttcaggaatgtggggcatctgcttcagggtcaaagaaagggtacaagtctctgttggtcaacat

SEQ ID NO: 78884 - DNA, 120 bp, synthetic construct; identical to SEQ ID NO: 459
  source 1..120: mol_type = other DNA

SEQ ID NO: 78885 - DNA, 120 bp, synthetic construct; identical to SEQ ID NO: 460
  source 1..120: mol_type = other DNA

SEQ ID NO: 78886 - DNA, 120 bp, synthetic construct
  source 1..120: mol_type = other DNA
cccattcacccactcacctactcactcactcactcatccactcattcactcactcactcactcactcactcactcactcactcactcagtcattcacttcgccttcagagcttgggcgcc

SEQ ID NO: 78887 - DNA, 120 bp, synthetic construct; identical to SEQ ID NO: 11578
  source 1..120: mol_type = other DNA

SEQ ID NO: 78888 - DNA, 120 bp, synthetic construct; identical to SEQ ID NO: 11579
  source 1..120: mol_type = other DNA

SEQ ID NO: 78889 - DNA, 120 bp, synthetic construct; identical to SEQ ID NO: 11580
  source 1..120: mol_type = other DNA

SEQ ID NO: 78890 - DNA, 120 bp, synthetic construct; identical to SEQ ID NO: 11581
  source 1..120: mol_type = other DNA

SEQ ID NO: 78891 - DNA, 120 bp, synthetic construct; identical to SEQ ID NO: 11582
  source 1..120: mol_type = other DNA

SEQ ID NO: 78892 - DNA, 120 bp, synthetic construct
  source 1..120: mol_type = other DNA
accagcacaacctcttcccctacaaccagcacaacctctgctactacaaccagcacaacctctgcccctacaagcagcacaacctccactccacagaccagcaaaacctcagctgctaca

SEQ ID NO: 78893 - DNA, 120 bp, synthetic construct
  source 1..120: mol_type = other DNA
gctactacaaccagcacaatctctgcccctacaaccagcacaactttgtctcctacaaccagcacaacctctactactataaccagcacaacttctgcccctataagcagcacaacttcc

SEQ ID NO: 78894 - DNA, 120 bp, synthetic construct; identical to SEQ ID NO: 11585
  source 1..120: mol_type = other DNA

SEQ ID NO: 78895 - DNA, 120 bp, synthetic construct
  source 1..120: mol_type = other DNA
cagcacaacctctgctcctacaaccagcacaacctctgctcccacaaccagcacaacttctgcccctacaaccagcacaacctccactccacagaccagcatatcctctgcccctacaag

SEQ ID NO: 78896 - DNA, 120 bp, synthetic construct; identical to SEQ ID NO: 11586
  source 1..120: mol_type = other DNA

SEQ ID NO: 78897 - DNA, 120 bp, synthetic construct; identical to SEQ ID NO: 11587
  source 1..120: mol_type = other DNA

SEQ ID NO: 78898 - DNA, 120 bp, synthetic construct; identical to SEQ ID NO: 11588
  source 1..120: mol_type = other DNA

SEQ ID NO: 78899 - DNA, 120 bp, synthetic construct; identical to SEQ ID NO: 11595
  source 1..120: mol_type = other DNA

SEQ ID NO: 78900 - DNA, 120 bp, synthetic construct; identical to SEQ ID NO: 11596
  source 1..120: mol_type = other DNA

SEQ ID NO: 78901 - DNA, 120 bp, synthetic construct; identical to SEQ ID NO: 11590
  source 1..120: mol_type = other DNA

SEQ ID NO: 78902 - DNA, 120 bp, synthetic construct; identical to SEQ ID NO: 11591
  source 1..120: mol_type = other DNA

SEQ ID NO: 78903 - DNA, 120 bp, synthetic construct; identical to SEQ ID NO: 11592
  source 1..120: mol_type = other DNA

SEQ ID NO: 78904 - DNA, 120 bp, synthetic construct; identical to SEQ ID NO: 11593
  source 1..120: mol_type = other DNA

SEQ ID NO: 78905 - DNA, 120 bp, synthetic construct
  source 1..120: mol_type = other DNA
actgcccacacctccacagtgcttaccaccacggccaccacaaccagggccaccggctctgtggccaccccctcttccaccccaggaacagctcacactaccaaagtgccgactaccaca

SEQ ID NO: 78906 - DNA, 120 bp, synthetic construct; identical to SEQ ID NO: 11593
  source 1..120: mol_type = other DNA

SEQ ID NO: 78907 - DNA, 120 bp, synthetic construct
  source 1..120: mol_type = other DNA
cggccactacgatcacggccaccggctccaccaccaacccctcctcaactccagggacaacacccatcaccccagtgctgaccagcacggccaccacacccgcagccaccagctccaaag

SEQ ID NO: 78908 - DNA, 120 bp, synthetic construct
  source 1..120: mol_type = other DNA
agaccaccacacccatggccaccatgtccacaatccacccctcctccactccggagaccacccacacctccacagtgctgaccacgaaggccaccacgacaagggccaccagttccatgt

SEQ ID NO: 78909 - DNA, 120 bp, synthetic construct; identical to SEQ ID NO: 11594
  source 1..120: mol_type = other DNA

SEQ ID NO: 78910 - DNA, 120 bp, synthetic construct; identical to SEQ ID NO: 11556
  source 1..120: mol_type = other DNA

SEQ ID NO: 78911 - DNA, 120 bp, synthetic construct; identical to SEQ ID NO: 11557
  source 1..120: mol_type = other DNA

SEQ ID NO: 78912 - DNA, 120 bp, synthetic construct; identical to SEQ ID NO: 11558
  source 1..120: mol_type = other DNA

SEQ ID NO: 78913 - DNA, 120 bp, synthetic construct
  source 1..120: mol_type = other DNA
ttacaggcatgagcctgtttgtgttaactctttatcagcgtagccaatcgatgactcactcttggccttgtcacccactggaagtagtctgcatttaaaatcttcagcttcagtatgtca

SEQ ID NO: 78914 - DNA, 120 bp, synthetic construct; identical to SEQ ID NO: 32920
  source 1..120: mol_type = other DNA

SEQ ID NO: 78915 - DNA, 120 bp, synthetic construct
  source 1..120: mol_type = other DNA
acctcacacagcagggtattccaacagacctgcagctgagggtcctgtctgttagaaggaaaactaacaaccagaaaggacatctacaccgaaaacccatctgtacatcaccatcatcaa

SEQ ID NO: 78916 - DNA, 120 bp, synthetic construct
  source 1..120: mol_type = other DNA
cataagtgaaggagaaataaaatactttatagacaagcaaatgctgagagattttgtcaccaccaggcctgccctaaaagagctcctgaaggaagcactaaacatggaaaggaacaaccg

SEQ ID NO: 78917 - DNA, 120 bp, synthetic construct
  source 1..120: mol_type = other DNA
gtatagaacgaaatgaaggcagaaataaagatgttctttgaaaccaacgagaacaaagacaccacataccagaatctctgggacgcattcaaagcagtgtgtagagggaaatttatagca

SEQ ID NO: 78918 - DNA, 120 bp, synthetic construct
  source 1..120: mol_type = other DNA
aaattaggtattgatgggacgtatttcaaaataataagagctatctatgacaaacccacagccaatatcatactgaatgggcaaaaactggaagcattccctttgaaaatgggcacaaga

SEQ ID NO: 78919 - DNA, 120 bp, synthetic construct
  source 1..120: mol_type = other DNA
atggaagagaacagagccctcagaaataatgccgcatatctacaactatctgatctttgacaaacctgagaaaaacaagcaatggggaaaggattccctatttaataaatggtgctggga

SEQ ID NO: 78920 - DNA, 120 bp, synthetic construct
  source 1..120: mol_type = other DNA
ccatggaatactatgcagccataaaaaatgatgagttcatgtcctttgtagggacatggatgaaattggaaaccatcattctcagtaaactatcgcaagaacaaaaaaccaaacaccgca

SEQ ID NO: 78921 - DNA, 120 bp, synthetic construct; identical to SEQ ID NO: 32918
  source 1..120: mol_type = other DNA

SEQ ID NO: 78922 - DNA, 120 bp, synthetic construct; identical to SEQ ID NO: 32919
  source 1..120: mol_type = other DNA

SEQ ID NO: 78923 - DNA, 120 bp, synthetic construct
  source 1..120: mol_type = other DNA
gaggtgggtggatcacttgaggtcaggagttcaagaccagctgggccaacatggtgaaaccccgtctctagtaaaaatacaaaaaaattagctgggcattgtggcatgtgcctgtaatcc

SEQ ID NO: 78924 - DNA, 120 bp, synthetic construct
  source 1..120: mol_type = other DNA
tgagacagggtctcatttagttacccaggctggaatgcagtggcacaatcacagctcactgcagccttgatgtcccagctcaagtgatccttccacctccgcctcctgagtagctggact

SEQ ID NO: 78925 - DNA, 120 bp, synthetic construct; identical to SEQ ID NO: 8359
  source 1..120: mol_type = other DNA

SEQ ID NO: 78926 - DNA, 120 bp, synthetic construct; identical to SEQ ID NO: 297
  source 1..120: mol_type = other DNA

SEQ ID NO: 78927 - DNA, 120 bp, synthetic construct
  source 1..120: mol_type = other DNA
ctgtggtcctagctacaggggaggctgaggcaggaggattgcttgagtccaggacttcaaggctgtagtgagctatgatcacaccactgcactccagcctgggcaacaaagcgagaccct

SEQ ID NO: 78928 - DNA, 120 bp, synthetic construct; identical to SEQ ID NO: 8148
  source 1..120: mol_type = other DNA

SEQ ID NO: 78929 - DNA, 120 bp, synthetic construct; identical to SEQ ID NO: 8149
  source 1..120: mol_type = other DNA

SEQ ID NO: 78930 - DNA, 120 bp, synthetic construct; identical to SEQ ID NO: 8150
  source 1..120: mol_type = other DNA

SEQ ID NO: 78931 - DNA, 120 bp, synthetic construct
  source 1..120: mol_type = other DNA
tatctcagtgtatatggggtgggtatcctgaattgctggatcctctttgtgtccacactgataactggacagcttaagatttgtttttctggccaagtgtggtggctcacatctgtaatc

SEQ ID NO: 78932 - DNA, 120 bp, synthetic construct; identical to SEQ ID NO: 8151
  source 1..120: mol_type = other DNA

SEQ ID NO: 78933 - DNA, 120 bp, synthetic construct
  source 1..120: mol_type = other DNA
ccaagattgtgccaccacactccagcctgggtgacagagcaagaccctgtctccaaaaaaaaaaaaaaagttccttaaaatcaacttggtctgttgtgtaaatagatgttagacacggag

SEQ ID NO: 78934 - DNA, 120 bp, synthetic construct
  source 1..120: mol_type = other DNA
gtactttcttactaaaataattttttttttttttttttgagacagggtctcactctgttgcccaggctggagtgcagcggtgccacctcggcttactgcaacctccacctcctaggttca

SEQ ID NO: 78935 - DNA, 120 bp, synthetic construct
  source 1..120: mol_type = other DNA
gcagatgtagaagctgcagcaagttatccagaaaatctagctaagattatggatgaaggtggctacactaaacaacagatttttcttttcttttctttttttttttttttgagatggagt

SEQ ID NO: 78936 - DNA, 120 bp, synthetic construct
  source 1..120: mol_type = other DNA
aagggatttttctgagcagtaggtcttaacaatgggcttaaaatagttagtaaaacatgctgtaaacagatttgctgtcgtccaggctttgttgtttcattgacagcgcacaggcaaagt

SEQ ID NO: 78937 - DNA, 120 bp, synthetic construct
  source 1..120: mol_type = other DNA
atgctttattgctaaaaactgctaatgatcatctgaaccttcagcaagtcataatctttttgctggtggagggtcttgccttgatgttgatgactgcaaactgatcagggtggtggttgc

SEQ ID NO: 78938 - DNA, 120 bp, synthetic construct; identical to SEQ ID NO: 298
  source 1..120: mol_type = other DNA

SEQ ID NO: 78939 - DNA, 120 bp, synthetic construct; identical to SEQ ID NO: 299
  source 1..120: mol_type = other DNA

SEQ ID NO: 78940 - DNA, 120 bp, synthetic construct; identical to SEQ ID NO: 300
  source 1..120: mol_type = other DNA

SEQ ID NO: 78941 - DNA, 120 bp, synthetic construct
  source 1..120: mol_type = other DNA
cgtgccactgcactctagcctgggtgacagagcaaaactccgtcttaaaaaaaaaaaaaaagaaagaagaaaataatgtccaaaggccagtgacttcatctagtttttgttgtatttcca

SEQ ID NO: 78942 - DNA, 120 bp, synthetic construct
  source 1..120: mol_type = other DNA
gctacagtgagctatgatcatgccactgcactccagcctgagcaacagtatgagacccctctaaaaacaaagaaaggagtaataacctagaaattaaataagaaaacagaggttcagcag

SEQ ID NO: 78943 - DNA, 120 bp, synthetic construct
  source 1..120: mol_type = other DNA
agcgtgctaagatgtatgtgaatcaatgaacacataaaaatttttttaatggaaaatttgtcagatgtttatgttgagctcacaaatatgaactgactctttaaaaatatactatacttc

SEQ ID NO: 78944 - DNA, 120 bp, synthetic construct; identical to SEQ ID NO: 8153
  source 1..120: mol_type = other DNA

SEQ ID NO: 78945 - DNA, 120 bp, synthetic construct; identical to SEQ ID NO: 8154
  source 1..120: mol_type = other DNA

SEQ ID NO: 78946 - DNA, 120 bp, synthetic construct
  source 1..120: mol_type = other DNA
agctcttcctattggctatgggccccatcggtcgatagaaaacgggcggtgattggtaaaggggtgggctctacttcccggcggggtcctgcggagttggcggaggctcctccagggact

SEQ ID NO: 78947 - DNA, 120 bp, synthetic construct
  source 1..120: mol_type = other DNA
cgactagctccctcgcgtgccgcagcggcgaccctttctacttggtctttccttttcctccgagcgccgggaggaggaagctcccgctagcgtctcccacttcccgcggctggaggaagg

SEQ ID NO: 78948 - DNA, 120 bp, synthetic construct; identical to SEQ ID NO: 8155
  source 1..120: mol_type = other DNA

SEQ ID NO: 78949 - DNA, 120 bp, synthetic construct; identical to SEQ ID NO: 8156
  source 1..120: mol_type = other DNA

SEQ ID NO: 78950 - DNA, 120 bp, synthetic construct
  source 1..120: mol_type = other DNA
tacaaaaacaggcctggattatgaacagtgacaagaggccaagacctcaataataactcacaaccacacctctctcaatcccagttcaactgaagctatcaatcagtcaactcccccatc

SEQ ID NO: 78951 - DNA, 120 bp, synthetic construct; identical to SEQ ID NO: 8157
  source 1..120: mol_type = other DNA

SEQ ID NO: 78952 - DNA, 120 bp, synthetic construct
  source 1..120: mol_type = other DNA
caggctgactaaggaggcacacccctcataaaaccactctggggtagggttggggctgaagcctcaggagttcctcagggcacatgcaagcaggtggtttatagggaggcaaaaatcaag

SEQ ID NO: 78953 - DNA, 120 bp, synthetic construct
  source 1..120: mol_type = other DNA
tttcatctcctgctcttgaagggtcctgaaagggttaaactgttccaagcaaaggcctgcactttttctatcaaaatgctccagatggaaattacaaaatttcgcttccagctctgtggt

SEQ ID NO: 78954 - DNA, 120 bp, synthetic construct
  source 1..120: mol_type = other DNA
aagcagttgatatgtagatttctggtagtaataaaattagcagttttaacctggtgtcagctccagaattgactttttggggaatctgggaaagttgccttggaagttgttaggtttaaa

SEQ ID NO: 78955 - DNA, 120 bp, synthetic construct
  source 1..120: mol_type = other DNA
atagtgtaccttttaaaaaaaaaataaccagcctgggcaatgtagggagacttcatctctacaaaaaattttaaaactagctgggtgtggtggcatgtgcctatagccccagctacttcg

SEQ ID NO: 78956 - DNA, 120 bp, synthetic construct; identical to SEQ ID NO: 301
  source 1..120: mol_type = other DNA

SEQ ID NO: 78957 - DNA, 120 bp, synthetic construct
  source 1..120: mol_type = other DNA
ggtaaacatccaacagacagcaaatgttagctagtagtctgtttaaagaatggtaagcagtcaagttaggcttccagtcctcttaaagcaaaataagaaatgtggtcgaaacaataggtt

SEQ ID NO: 78958 - DNA, 120 bp, synthetic construct; identical to SEQ ID NO: 302
  source 1..120: mol_type = other DNA

SEQ ID NO: 78959 - DNA, 120 bp, synthetic construct; identical to SEQ ID NO: 8159
  source 1..120: mol_type = other DNA

SEQ ID NO: 78960 - DNA, 120 bp, synthetic construct
  source 1..120: mol_type = other DNA
aaccatatcttctaaatgcattaatcagtggagaggtgacccagaaatcactgtgaaagttgggaccttatctttgctgtttgagcccagatcttgcatttagaatcatggcatggtggg

SEQ ID NO: 78961 - DNA, 120 bp, synthetic construct; identical to SEQ ID NO: 303
  source 1..120: mol_type = other DNA

SEQ ID NO: 78962 - DNA, 120 bp, synthetic construct; identical to SEQ ID NO: 8161
  source 1..120: mol_type = other DNA

SEQ ID NO: 78963 - DNA, 120 bp, synthetic construct
  source 1..120: mol_type = other DNA
ttgctgacagcaaagaactgagataacttacataaccacaaatcactgaaaaagagagatcaggagatacagcacaacggactctaaaaatggctaaaaacacaaagcctaattaatgtc

SEQ ID NO: 78964 - DNA, 120 bp, synthetic construct; identical to SEQ ID NO: 304
  source 1..120: mol_type = other DNA

SEQ ID NO: 78965 - DNA, 120 bp, synthetic construct
  source 1..120: mol_type = other DNA
ttgaaggccccaccatggggattaagtttcaacatgagttttggaggggacattcaaacaatagcaagaggggtgatcggattacacaagtacagtgatagggtcatagtagagagatat

SEQ ID NO: 78966 - DNA, 120 bp, synthetic construct
  source 1..120: mol_type = other DNA
ctacctccatctttttttttttgtagacaggatctccaaaatgttgcccaggctcatcttgaacccctgggctcaagagattctcctgcctcagcctccagagtagctgggactataggt

SEQ ID NO: 78967 - DNA, 120 bp, synthetic construct; identical to SEQ ID NO: 305
  source 1..120: mol_type = other DNA

SEQ ID NO: 78968 - DNA, 120 bp, synthetic construct; identical to SEQ ID NO: 8163
  source 1..120: mol_type = other DNA

SEQ ID NO: 78969 - DNA, 120 bp, synthetic construct; identical to SEQ ID NO: 8164
  source 1..120: mol_type = other DNA

SEQ ID NO: 78970 - DNA, 120 bp, synthetic construct
  source 1..120: mol_type = other DNA
gtggccctgggtaagtctctaacctctcctggcctcagcctcttcagatataggatgaacatataattcctacatctaggagttgctgtgttgactaaatgaagtaatgcttgtgtatca

SEQ ID NO: 78971 - DNA, 120 bp, synthetic construct
  source 1..120: mol_type = other DNA
tattattctatgaaagagacatgggacagatattgagacagccctcaccactgtgccatcaggccagggcagcagcagctgcaactcaactatgcgtaaataggtctttcccttatatga

SEQ ID NO: 78972 - DNA, 120 bp, synthetic construct; identical to SEQ ID NO: 8345
  source 1..120: mol_type = other DNA

SEQ ID NO: 78973 - DNA, 120 bp, synthetic construct
  source 1..120: mol_type = other DNA
cccagtaagtgatgtaccacttcatctccatcaagaccttaattcctgcccctagagaataaatgaggtaacaaaactggaagcactttgagtctctaaaagaagctatagaaatcctga

SEQ ID NO: 78974 - DNA, 120 bp, synthetic construct
  source 1..120: mol_type = other DNA
cgtgatctgcttgcctcggcctctcagagtgctgggattacaggggtgagccaccatacccagcccagaatggtattcttaatgtatggacttaaaaggagcatttgcaaggaagagtgg

SEQ ID NO: 78975 - DNA, 120 bp, synthetic construct
  source 1..120: mol_type = other DNA
atcagtgagttgatattttctatgttgccacagggagctctttctggcaaaggaaacggaaagaaaacgcaggatctcctcaccaaagcacagaatggggaaaaacaccaaagcctgggc

SEQ ID NO: 78976 - DNA, 120 bp, synthetic construct; identical to SEQ ID NO: 174
  source 1..120: mol_type = other DNA

SEQ ID NO: 78977 - DNA, 120 bp, synthetic construct
  source 1..120: mol_type = other DNA
cccaaaatgaatgaaagagataatcataatacacagggctactcccaaactgggtggctaaataggagcaaatagaaaagtagagaccaccattctggatcatatcctgtggccacctga

SEQ ID NO: 78978 - DNA, 120 bp, synthetic construct
  source 1..120: mol_type = other DNA
ggaaaatgggaactgtcaaataaatccaagatttccccaggtgaccagcagcatccatgaaatagctccaaaaagttttcctttaaaatacattgtctttttttgttccttgccactttc

SEQ ID NO: 78979 - DNA, 120 bp, synthetic construct
  source 1..120: mol_type = other DNA
cagagaatcccactgatggaggagagaaaaataaccctctttttttctttaaagacaggcattgatatgagcgaaaggaaaagaactggggaagtctttgtatattgagagctcagttta

SEQ ID NO: 78980 - DNA, 120 bp, synthetic construct
  source 1..120: mol_type = other DNA
acaggcacatgtcatcatctagctagcattttattttaacttaaaaatatgtaaatgccagcctggccaacatggtgaaaccccacctctactaaaaaaaaaaaaaaatacaaaaattag

SEQ ID NO: 78981 - DNA, 120 bp, synthetic construct
  source 1..120: mol_type = other DNA
gtctagttagtacttctgagcacctactataggccagacactatatcaggagacactggagatacacacataagtaagaaaagggccctgccatccaaaagcttatagtttaatagagga

SEQ ID NO: 78982 - DNA, 120 bp, synthetic construct; identical to SEQ ID NO: 173
  source 1..120: mol_type = other DNA

SEQ ID NO: 78983 - DNA, 120 bp, synthetic construct
  source 1..120: mol_type = other DNA
ggcggatcacgagatcaggagttcgagaccagcctgactaacatggtgaaaccttgtctctactaaaaatacaaaaaaattagctgggcatggtgttgggcgcctgtaatcccagctact

SEQ ID NO: 78984 - DNA, 120 bp, synthetic construct
  source 1..120: mol_type = other DNA
ggaagtaaattgaaatgggtttgggttggcgctgtggctcacacctgtaatcccaccactttgggaggctgaggtgggtggattgcttgaacccaggagatcgagagcagcctgggcaac

SEQ ID NO: 78985 - DNA, 120 bp, synthetic construct
  source 1..120: mol_type = other DNA
atttaaaaggtgacccaaattacttttttattattattattttttaatgctgggaggtgtttgcgtgtgtgtgtgtgtgtgtgtgtgtgtgtgtgtgtgtgtgtgttttatctccttcaa

SEQ ID NO: 78986 - DNA, 120 bp, synthetic construct
  source 1..120: mol_type = other DNA
taagaaacatctattcgctcatggttccatgtttatatccatatttgttcctggccctcgagagctcacaaaggaacaggcaagtgaacaggcaaataccgcacagtatggaaactacta

SEQ ID NO: 78987 - DNA, 120 bp, synthetic construct; identical to SEQ ID NO: 306
  source 1..120: mol_type = other DNA

SEQ ID NO: 78988 - DNA, 120 bp, synthetic construct; identical to SEQ ID NO: 307
  source 1..120: mol_type = other DNA

SEQ ID NO: 78989 - DNA, 120 bp, synthetic construct; identical to SEQ ID NO: 8168
  source 1..120: mol_type = other DNA

SEQ ID NO: 78990 - DNA, 120 bp, synthetic construct
  source 1..120: mol_type = other DNA
atggtgttcaaggtatgaagtagtagaaggttcgtgatcatgaacccctgggcaagtcaagatcctcaattgccacctctataggtggaagtataggcctaacaatactaaggattaaaa

SEQ ID NO: 78991 - DNA, 120 bp, synthetic construct; identical to SEQ ID NO: 8169
  source 1..120: mol_type = other DNA

SEQ ID NO: 78992 - DNA, 120 bp, synthetic construct; identical to SEQ ID NO: 308
  source 1..120: mol_type = other DNA

SEQ ID NO: 78993 - DNA, 120 bp, synthetic construct; identical to SEQ ID NO: 309
  source 1..120: mol_type = other DNA

SEQ ID NO: 78994 - DNA, 120 bp, synthetic construct; identical to SEQ ID NO: 310
  source 1..120: mol_type = other DNA

SEQ ID NO: 78995 - DNA, 120 bp, synthetic construct; identical to SEQ ID NO: 311
  source 1..120: mol_type = other DNA

SEQ ID NO: 78996 - DNA, 120 bp, synthetic construct
  source 1..120: mol_type = other DNA
aagtcacaatgaatcctgtagtacagactactttatcaaaagcagctaaaaaaagatctcattaactcccccaactcatctccacccacatctaaagagccacacacagcaccaccaaag

SEQ ID NO: 78997 - DNA, 120 bp, synthetic construct; identical to SEQ ID NO: 8170
  source 1..120: mol_type = other DNA

SEQ ID NO: 78998 - DNA, 120 bp, synthetic construct; identical to SEQ ID NO: 312
  source 1..120: mol_type = other DNA

SEQ ID NO: 78999 - DNA, 120 bp, synthetic construct
  source 1..120: mol_type = other DNA
tggagtctggagatgactctgtataagctttgctgaagcagattttattacattagaagagaacctacctggctgcatccaacaccagaagcttttagatgctaagtaaggaggtcatag

SEQ ID NO: 79000 - DNA, 120 bp, synthetic construct
  source 1..120: mol_type = other DNA
aaaaaaaaaaaaaatagcagtgtgtagtggtgcacaattgtagtccctgctacttaacaggctgaggcaagaggatcacttcagcccaggagtctgaggttacagtgagctatgatcaca

SEQ ID NO: 79001 - DNA, 120 bp, synthetic construct
  source 1..120: mol_type = other DNA
tgggccatatgttctctgttgaaactactcaactctgctcttgtaacattaaaaatagccatggacgatatacaaacccatgggtatgactgttccaatatggcttattcataaaaatag

SEQ ID NO: 79002 - DNA, 120 bp, synthetic construct
  source 1..120: mol_type = other DNA
attctgtaggtgattcatatttgcatttatcttttttttttttaaaagagacagggtctcatcctgtcacccaggctggagtgtgatggcatgatcatagctcactgcagcctcgacctt

SEQ ID NO: 79003 - DNA, 120 bp, synthetic construct
  source 1..120: mol_type = other DNA
actcctctaacctaaattattcctgtcatgaggttagtgacttctgacaggcagaggtaagtagtttaaagcctgattacctagtcccaaagtggacgaaatggagccttgaaccaaata

SEQ ID NO: 79004 - DNA, 120 bp, synthetic construct
  source 1..120: mol_type = other DNA
aatttcagcacacagtaataaaatagggaactgggccattgtagccgttactactaggagttagtaatctcgtacaaacctctggggctctgtggtgggtagaatgtcctgtttattata

SEQ ID NO: 79005 - DNA, 120 bp, synthetic construct
  source 1..120: mol_type = other DNA
atgaagttactcctctgagctggaaaagatcttgtgtcaaaggaggaagcctcagagataatctgggccagaagattctgtgttcaaatcctggttctgcctcttggtcaagttatataa

SEQ ID NO: 79006 - DNA, 120 bp, synthetic construct; identical to SEQ ID NO: 8176
  source 1..120: mol_type = other DNA

SEQ ID NO: 79007 - DNA, 120 bp, synthetic construct
  source 1..120: mol_type = other DNA
catcaatttgcattccacttctccccagtgtgagagtctggttaatacaattaaactggatcagtacctactaagcaactagatctctggaaagtctgaatgctgaagatggatgccctc

SEQ ID NO: 79008 - DNA, 120 bp, synthetic construct; identical to SEQ ID NO: 8177
  source 1..120: mol_type = other DNA

SEQ ID NO: 79009 - DNA, 120 bp, synthetic construct
  source 1..120: mol_type = other DNA
tctttgagatggagtcttgctcttgttgcccaggctggagtgcaatggtgcgatctcggctcactgcaccctccgcctcctggtttcaagcgattctcttgcctcagcctctcgagtagc

SEQ ID NO: 79010 - DNA, 120 bp, synthetic construct; identical to SEQ ID NO: 8178
  source 1..120: mol_type = other DNA

SEQ ID NO: 79011 - DNA, 120 bp, synthetic construct
  source 1..120: mol_type = other DNA
gtttcatccatgtccctacaaaggacatgaactcatccttttttatggctgtatagtattcaaacatggaatatattttaagatagatataagactaaagcataggtaaggaaagggtgg

SEQ ID NO: 79012 - DNA, 120 bp, synthetic construct
  source 1..120: mol_type = other DNA
ggcctttagagcctagaggcagtgttcatagaaattggaattaaaaatcattctctctgatgactctaagtccagctattccatgggactttaccccaagcctcatcttctgcttgtaaa

SEQ ID NO: 79013 - DNA, 120 bp, synthetic construct; identical to SEQ ID NO: 8179
  source 1..120: mol_type = other DNA

SEQ ID NO: 79014 - DNA, 120 bp, synthetic construct; identical to SEQ ID NO: 313
  source 1..120: mol_type = other DNA

SEQ ID NO: 79015 - DNA, 120 bp, synthetic construct
  source 1..120: mol_type = other DNA
tactgcacaagaaagtactcaaaatagagaatcattatttctgggtatgttctgagaaggaagatttctacttggatatattttacccctgggcatgtccaggttataaggcccaggtag

SEQ ID NO: 79016 - DNA, 120 bp, synthetic construct; identical to SEQ ID NO: 8180
  source 1..120: mol_type = other DNA

SEQ ID NO: 79017 - DNA, 120 bp, synthetic construct
  source 1..120: mol_type = other DNA
aattctatgtctttcagaacaagataggggaaaagagaaatgagcttattaaaaactatgatatcacaaggtcaggagttcaagaccagcctaactaacatggtgaaaccccgtctctac

SEQ ID NO: 79018 - DNA, 120 bp, synthetic construct; identical to SEQ ID NO: 8330
  source 1..120: mol_type = other DNA

SEQ ID NO: 79019 - DNA, 120 bp, synthetic construct
  source 1..120: mol_type = other DNA
tttctcttaccctttagctcttggcgcttgacttcctatgtccatccccaatatccctactccgtgaaagtgaggtgaaaatgccatcatctttctgcctgtcctgcttttaatcatctt

SEQ ID NO: 79020 - DNA, 120 bp, synthetic construct
  source 1..120: mol_type = other DNA
ttttttttttttttgagacggagttttgctcctgttgcccaggctggagtgcaatggcgtgaccttggctcacggcaacctctccctcctgggttcaagagattctcctgcgtcagcctc

SEQ ID NO: 79021 - DNA, 120 bp, synthetic construct
  source 1..120: mol_type = other DNA
cactgcactccagcctgggtgacagagtgagactgtctcaaaaaaaaaaaaagagaataaaatagagtagaagacgctttttttcttttagccactaccaagtaggtgaagatatactta

SEQ ID NO: 79022 - DNA, 120 bp, synthetic construct
  source 1..120: mol_type = other DNA
tccaggtctctagtaaggcttcgatgccaggttttgtatattctcccttataatcaactttcccctcaattcttagaaagatcttatggagttcagaagacgataaagatggaaagttgt

SEQ ID NO: 79023 - DNA, 120 bp, synthetic construct; identical to SEQ ID NO: 314
  source 1..120: mol_type = other DNA

SEQ ID NO: 79024 - DNA, 120 bp, synthetic construct
  source 1..120: mol_type = other DNA
caggttaggagcaccgttaagtccaagaccatgtcttattcattgttatatcccagcacctagcgcagagctggcataaatgttgaactaaaataaatggaaatgagttgtgctttccct

SEQ ID NO: 79025 - DNA, 120 bp, synthetic construct; identical to SEQ ID NO: 315
  source 1..120: mol_type = other DNA

SEQ ID NO: 79026 - DNA, 120 bp, synthetic construct; identical to SEQ ID NO: 316
  source 1..120: mol_type = other DNA

SEQ ID NO: 79027 - DNA, 120 bp, synthetic construct; identical to SEQ ID NO: 317
  source 1..120: mol_type = other DNA

SEQ ID NO: 79028 - DNA, 120 bp, synthetic construct; identical to SEQ ID NO: 318
  source 1..120: mol_type = other DNA

SEQ ID NO: 79029 - DNA, 120 bp, synthetic construct
  source 1..120: mol_type = other DNA
atgcccacggggaatttttcataattaatgaaacctctttagaatgaaacctttactggaacaaaagttttaattgcccagggctgaccatggagtatgaagacaaagctcctgagtaag

SEQ ID NO: 79030 - DNA, 120 bp, synthetic construct
  source 1..120: mol_type = other DNA
cgttactggggtagggaacatgctggggtggggtcaggatggggtgtcaagagttcaggttcgggcatgttaagttctaggtacctgttagatggctatgaggaaatggtaagtcagttg

SEQ ID NO: 79031 - DNA, 120 bp, synthetic construct; identical to SEQ ID NO: 8183
  source 1..120: mol_type = other DNA

SEQ ID NO: 79032 - DNA, 120 bp, synthetic construct
  source 1..120: mol_type = other DNA
ctccattactttgaaacaatagcagatataatttatctttgaatatttcaatatttaagagataaggaggttttttttttttttttgagacggagtctcgctctgtcgcccaggctggag

SEQ ID NO: 79033 - DNA, 120 bp, synthetic construct; identical to SEQ ID NO: 8184
  source 1..120: mol_type = other DNA

SEQ ID NO: 79034 - DNA, 120 bp, synthetic construct
  source 1..120: mol_type = other DNA
ccagcctagcactaaaagattccactatgacagacaaccacatgaggccgtatctcagcattagaaacaaatggatgggggagagtggttaagagcactgattttaagaattaaacacat

SEQ ID NO: 79035 - DNA, 120 bp, synthetic construct; identical to SEQ ID NO: 8186
  source 1..120: mol_type = other DNA

SEQ ID NO: 79036 - DNA, 120 bp, synthetic construct; identical to SEQ ID NO: 8187
  source 1..120: mol_type = other DNA

SEQ ID NO: 79037 - DNA, 120 bp, synthetic construct; identical to SEQ ID NO: 8188
  source 1..120: mol_type = other DNA

SEQ ID NO: 79038 - DNA, 120 bp, synthetic construct; identical to SEQ ID NO: 319
  source 1..120: mol_type = other DNA

SEQ ID NO: 79039 - DNA, 120 bp, synthetic construct
  source 1..120: mol_type = other DNA
tttatgtatcttttattttatttattttatttttttgagatgaggtcttgctatgttgaccaggctggtctcagacttccggcttcaagcagtcctcccatctgggcctcccaaagtgct

SEQ ID NO: 79040 - DNA, 120 bp, synthetic construct; identical to SEQ ID NO: 320
  source 1..120: mol_type = other DNA

SEQ ID NO: 79041 - DNA, 120 bp, synthetic construct
  source 1..120: mol_type = other DNA
attcatcttcttcttcaggaattttctctgattaagtcatgaataccacatttctaaggagaaaatgggggaggaagggcaggccaggagacagatgtaatctttcaggagagtcacaca

SEQ ID NO: 79042 - DNA, 120 bp, synthetic construct; identical to SEQ ID NO: 8189
  source 1..120: mol_type = other DNA

SEQ ID NO: 79043 - DNA, 120 bp, synthetic construct
  source 1..120: mol_type = other DNA
ttaagggaaattctaactactctcactcttaggcgtacagctccaagacagaacagttgttctatccagggaaaaatgtgctgccttaggcgctgctgctgctgctcctacaaagacaaa

SEQ ID NO: 79044 - DNA, 120 bp, synthetic construct; identical to SEQ ID NO: 321
  source 1..120: mol_type = other DNA

SEQ ID NO: 79045 - DNA, 120 bp, synthetic construct
  source 1..120: mol_type = other DNA
atgtcaggcatctggttcttgccagggatttctgggtctcttaaagggaacagcccttgttgagactattcctgtaggcatctgtcccccttcaatatattagtgaaaagctgatagtaa

SEQ ID NO: 79046 - DNA, 120 bp, synthetic construct
  source 1..120: mol_type = other DNA
ttctctgagctggaaatcagtctggctttggcatactgcttcctgtgagtgccaggtctcttgtcagtaacaaatgcagtgctgcatttgaggcagatctgttcgcatctatagctgcct

SEQ ID NO: 79047 - DNA, 120 bp, synthetic construct; identical to SEQ ID NO: 8190
  source 1..120: mol_type = other DNA

SEQ ID NO: 79048 - DNA, 120 bp, synthetic construct; identical to SEQ ID NO: 8191
  source 1..120: mol_type = other DNA

SEQ ID NO: 79049 - DNA, 120 bp, synthetic construct; identical to SEQ ID NO: 8192
  source 1..120: mol_type = other DNA

SEQ ID NO: 79050 - DNA, 120 bp, synthetic construct
  source 1..120: mol_type = other DNA
aagaatgaggctgcggacccttgcggtgagtgttacagctcttaaggtggtgtgtctggagtctgtcccttctgatgttcagatgtgttcggagtttcttccttctggtgggttcgtggt

SEQ ID NO: 79051 - DNA, 120 bp, synthetic construct
  source 1..120: mol_type = other DNA
actccatatctagctcaaggtttgtaaacacaccaatcagcaccctgtgtttagctcaaggtttgtaagtgcaccaatcgacactctgtatctagctgctctggtgaggacatggagaac

SEQ ID NO: 79052 - DNA, 120 bp, synthetic construct; identical to SEQ ID NO: 322
  source 1..120: mol_type = other DNA

SEQ ID NO: 79053 - DNA, 120 bp, synthetic construct
  source 1..120: mol_type = other DNA
gagaagttcagattgggtgtggcagcattttagtgggtcctctgggttcttaggtggggagagagacacgaggaaaacagaaggccaggatgaaggttttggggtaatctacacacaaag

SEQ ID NO: 79054 - DNA, 120 bp, synthetic construct
  source 1..120: mol_type = other DNA
ggcaaaatggcaatttcatatggtacagcctggtagaagaggagatagaacatatgtacaaatgcatttaatacaggcaaggtggtgagaaactcaataagagaggctcaggcaacatcc

SEQ ID NO: 79055 - DNA, 120 bp, synthetic construct
  source 1..120: mol_type = other DNA
aataactacacttcccagcctcccttgcagttcagcataaccatgtgactaagttctggccagtcagatatgagttgaagagctgtgtgtgccacttccagagtgcacctttaaaaaata

SEQ ID NO: 79056 - DNA, 120 bp, synthetic construct
  source 1..120: mol_type = other DNA
tgaacagacccatctcagggacgtggaaactattcaacttgggatgcagcaggttggccagggctgaattcagtccacatggattcatctcacccttttccaggccactttcttaccctg

SEQ ID NO: 79057 - DNA, 120 bp, synthetic construct
  source 1..120: mol_type = other DNA
agatactgacagtgggttataaaatagcagaaggtctctgcaaggaacacagcaggacagaaatgtagaagtattgctctaaaaactcaacagaaaaaaaaaagctacctaaaaaatgag

SEQ ID NO: 79058 - DNA, 120 bp, synthetic construct
  source 1..120: mol_type = other DNA
aacaaaaaagcccctctctatttcttttaaagataccattaatttatcaatcacccaagtcaaaaagacactttacagacctctttcttttatggcttccaagctcacttgaaacctgaa

SEQ ID NO: 79059 - DNA, 120 bp, synthetic construct; identical to SEQ ID NO: 323
  source 1..120: mol_type = other DNA

SEQ ID NO: 79060 - DNA, 120 bp, synthetic construct
  source 1..120: mol_type = other DNA
cagccctgatagttaagatcacaagttctgggaaccagatttcctgggttcacaatcctggatttctcccacttacttgctgtgtgattttagatgaaaggttttaatcacctcagtatc

SEQ ID NO: 79061 - DNA, 120 bp, synthetic construct
  source 1..120: mol_type = other DNA
tgaacataacagtatgtggtttactgggttgtttgtctcatgaggccaaacagaagctcccaagcttctgcataaatggctttatatcttccttttagggtagggaatgataagagggca

SEQ ID NO: 79062 - DNA, 120 bp, synthetic construct
  source 1..120: mol_type = other DNA
tgggtttttcagagttgaaataggttcatcttttctgctagctcctccttttatacatctccactgtcgttgctccttgggttttaaattcagggagaatcaatgagcacagttctgcgt

SEQ ID NO: 79063 - DNA, 120 bp, synthetic construct
  source 1..120: mol_type = other DNA
gcactaagggaagtgcacctgtgtgctcttcctgtgtgtttttcctcctatgtgatatggtttggatgtctgtccccccccaaatctcatgttgaaatgtgattccaaatgttggaggtg

SEQ ID NO: 79064 - DNA, 120 bp, synthetic construct
  source 1..120: mol_type = other DNA
gttgttttttgttttttgcgatggagtctctcactctgttgcccaggctggggtgcaatgatgccatttcggctcactgcaacctctgcctcccaggttcaagcgattctcgtgcctcag

SEQ ID NO: 79065 - DNA, 120 bp, synthetic construct
  source 1..120: mol_type = other DNA
tagtgcagtcatcgaaatcaggacatacagattgatacaatactattatctaatcaatagacattcagattttaccagttgttctaaaaatggccttttttggcaaacgaaagtccaaga

SEQ ID NO: 79066 - DNA, 120 bp, synthetic construct
  source 1..120: mol_type = other DNA
agctatttatagaagtacatgggtgtgtgtgtgtatgtgtctatgtgtacatacatatatctactacctctgtctgctgaaagggactataaataatggtacttcagttacaaagagcat

SEQ ID NO: 79067 - DNA, 120 bp, synthetic construct; identical to SEQ ID NO: 324
  source 1..120: mol_type = other DNA

SEQ ID NO: 79068 - DNA, 120 bp, synthetic construct
  source 1..120: mol_type = other DNA
cactcattttatttctctttcctccagacacatataacctggtcagtgctgctgattccagctgttctgaatcttgtgtacagcttaagttcaaaaacagatgggcccaaagtatcctag

SEQ ID NO: 79069 - DNA, 120 bp, synthetic construct; identical to SEQ ID NO: 165
  source 1..120: mol_type = other DNA

SEQ ID NO: 79070 - DNA, 120 bp, synthetic construct
  source 1..120: mol_type = other DNA
gtggactgatgcccaggaatctgcctttcaaatcagcatgtcaggtaattttatgcacaccaaaaaatttaaaaaacaatgctcttaaagcaatgttttacaaactgtgggattcaaccc

SEQ ID NO: 79071 - DNA, 120 bp, synthetic construct
  source 1..120: mol_type = other DNA
atggttcactgtagcctcaaactcctgggctcaagcaatcctcccgcctcagcctcccaaagtgccaggctcacaattatgagccacctcacctggccaggaatacattttattgctatt

SEQ ID NO: 79072 - DNA, 120 bp, synthetic construct
  source 1..120: mol_type = other DNA
actgaatcatttttttttttttttaatactttaagttttagggtacatgtgcacattgtgcaggttagttacatatgtatacatgtgccatgctggtgcgctgcacccactaactcgtca

SEQ ID NO: 79073 - DNA, 120 bp, synthetic construct
  source 1..120: mol_type = other DNA
attgcagattctggatattagccctttgtcagatgagtaggttgcgaaaattttctcccattttgtaggttgcctgttcactctgatggtagtttcttttgctgtgcagaagctctttag

SEQ ID NO: 79074 - DNA, 120 bp, synthetic construct
  source 1..120: mol_type = other DNA
tttttgtacattgattttgtatcctgagactttgctgaagttgcttatcagcttaaggagattttgggctgagacgaaggggttttctagataaacaatcatgtcatctgcaaacaggga

SEQ ID NO: 79075 - DNA, 120 bp, synthetic construct
  source 1..120: mol_type = other DNA
tttattgtgtctatttgattcttctctctttttttctttattagtcttgctagcggtctatcaattttgttgatcctttcaaaaaaccagctcctggattcattgatttttttgaagggt

SEQ ID NO: 79076 - DNA, 120 bp, synthetic construct
  source 1..120: mol_type = other DNA
tctttgtaggtcactcaggacttgctttatgaatctgggtgctcctgtattgggtgcatatatatttaggatagttagctcctcatgttgaattgatccctttaccattatgtaacggcc

SEQ ID NO: 79077 - DNA, 120 bp, synthetic construct
  source 1..120: mol_type = other DNA
acgtctgattggtgtacctgaaagtgaggcggagaatggaaccaagttggaaaacactctgcaggatattatccaggagaacttccccaatctagcaaggcaggccaacgttcagattca

SEQ ID NO: 79078 - DNA, 120 bp, synthetic construct; identical to SEQ ID NO: 325
  source 1..120: mol_type = other DNA

SEQ ID NO: 79079 - DNA, 120 bp, synthetic construct
  source 1..120: mol_type = other DNA
tatcaaagcagtaaccacccccttaagagcaagcatctctctggcaccaggcatgagcggagaagtttgatctacagccagaaactcctcctggctagcaaattgtactgtagtatgcca

SEQ ID NO: 79080 - DNA, 120 bp, synthetic construct; identical to SEQ ID NO: 8319
  source 1..120: mol_type = other DNA

SEQ ID NO: 79081 - DNA, 120 bp, synthetic construct; identical to SEQ ID NO: 8318
  source 1..120: mol_type = other DNA

SEQ ID NO: 79082 - DNA, 120 bp, synthetic construct; identical to SEQ ID NO: 8317
  source 1..120: mol_type = other DNA

SEQ ID NO: 79083 - DNA, 120 bp, synthetic construct
  source 1..120: mol_type = other DNA
ttacagactcaaaggaccagaaatattgtgtgaaaagctgcattaatagtaggagaggctgagaactcctggaagaaacagccaacaggatctagtgctggttttttaagcatagactcc

SEQ ID NO: 79084 - DNA, 120 bp, synthetic construct; identical to SEQ ID NO: 143
  source 1..120: mol_type = other DNA

SEQ ID NO: 79085 - DNA, 120 bp, synthetic construct; identical to SEQ ID NO: 144
  source 1..120: mol_type = other DNA

SEQ ID NO: 79086 - DNA, 120 bp, synthetic construct
  source 1..120: mol_type = other DNA
caataattcttttggatcacaatgttttcattagaaatgagcatctagggctgggcgcggtggctcactcctataatcccagcattttgggaggccaaggtgggtggatcacttgaggtc

SEQ ID NO: 79087 - DNA, 120 bp, synthetic construct
  source 1..120: mol_type = other DNA
agccaatccagaaataaagatatttttcctgaagctcacctctctagttttctccttttctaaaaactcagtggagaaaaaaggagaaaataaggacaagaaggagagggagggaagagg

SEQ ID NO: 79088 - DNA, 120 bp, synthetic construct; identical to SEQ ID NO: 145
  source 1..120: mol_type = other DNA

SEQ ID NO: 79089 - DNA, 120 bp, synthetic construct
  source 1..120: mol_type = other DNA
cctttttaccaagccttagaaggttagagaaaaaccaggctagataatttaatagcctctccagatctcagagatgcttatactgaaggcagccagatagcaaagtcacgagtgttcctg

SEQ ID NO: 79090 - DNA, 120 bp, synthetic construct
  source 1..120: mol_type = other DNA
tctccctctgttgcccaggctggagtgcagtggcatgattacagctcactgcatcctcaaaccatcagggtctctctctgttgcccaggctggagtgcagtggcatgattacagctcact

SEQ ID NO: 79091 - DNA, 120 bp, synthetic construct
  source 1..120: mol_type = other DNA
ggacccatttctctggggacataggcttagaaaagataccttaatttgtggtatggctgtacacacctgtgctttatgtgaatttgggtctgtttgtcactagcaaaagtcatttttaaa

SEQ ID NO: 79092 - DNA, 120 bp, synthetic construct; identical to SEQ ID NO: 8316
  source 1..120: mol_type = other DNA

SEQ ID NO: 79093 - DNA, 120 bp, synthetic construct
  source 1..120: mol_type = other DNA
tccctatagaccagtagctttcaactttgcctgggcatgaaagttacttggggagttttaaaaaaatctttgtgaccttgaataaacaaaggtttcttagaatataaaaagcatgaacca

SEQ ID NO: 79094 - DNA, 120 bp, synthetic construct; identical to SEQ ID NO: 8314
  source 1..120: mol_type = other DNA

SEQ ID NO: 79095 - DNA, 120 bp, synthetic construct
  source 1..120: mol_type = other DNA
gcctctgcaacagacagtgttaaagcatctaggctagtttctctaggcaacccattgtggtttcctactttattcttggagggtgatgaagggtgaagttagcttcagataaataaatct

SEQ ID NO: 79096 - DNA, 120 bp, synthetic construct
  source 1..120: mol_type = other DNA
tgttggctttggcagcaaacctgacgccccttatcagcagagatacctttgaagtagctggcagccttccatcccctactcaaataagctcagcttcacattctattcttttctccaaag

SEQ ID NO: 79097 - DNA, 120 bp, synthetic construct
  source 1..120: mol_type = other DNA
gaaccctccttctctccacttcaagtcattactctctgaagggtaaccattatcctgacttctaacacaatataagtatttgcccatttaaaaatttgtttgtgtaaatggaatcagata

SEQ ID NO: 79098 - DNA, 120 bp, synthetic construct
  source 1..120: mol_type = other DNA
cctaagatgctataaatgccatccaatgaattttttttatttcagatttttttttttttttttttgagatggagactcactttgtcacccaggttggagtacagtggtgtgatcatagct

SEQ ID NO: 79099 - DNA, 120 bp, synthetic construct
  source 1..120: mol_type = other DNA
gctttaagaatagtgaattcaaaaccttttctctctctttctctctctctctccttctctccctcctctgtctctctccctcccccccttccttctcccctctgccttctcttccctctc

SEQ ID NO: 79100 - DNA, 120 bp, synthetic construct
  source 1..120: mol_type = other DNA
cgtggtgtattcctgtaatctcagctactcaggaggcttagggaggagaatcgcttgaacctgggaggcagaggttgcagtgagccaagattgtgccattgtactccagcatgggtgaca

SEQ ID NO: 79101 - DNA, 120 bp, synthetic construct
  source 1..120: mol_type = other DNA
tcctacctttctttgcttttaagcccagcccttggggttttttgttttgttttctttttttttttcctttttctctgttctctacaaatcatttgggtctacatccagcttctcccagca

SEQ ID NO: 79102 - DNA, 120 bp, synthetic construct
  source 1..120: mol_type = other DNA
ggctgaagtacagtggcgtgatcttggctcactgcaacctccgcctcccgggttcaagtgattctcgtgcctcagcctcccgagtagccgggattacaggcgtgggctaccacatccagc

SEQ ID NO: 79103 - DNA, 120 bp, synthetic construct
  source 1..120: mol_type = other DNA
ctcggtattcaagttggcagtataaaaggcctgcagagcaagcttaaaacatggttcaagatcttagatttcttacatctcaggtgaaagacagaccatagactcccaaagcaggttaca

SEQ ID NO: 79104 - DNA, 120 bp, synthetic construct
  source 1..120: mol_type = other DNA
ggatattgctcttttttttttttttttttttttttttgagacggagtctcgctctgtcgcccaggctggagtgcagtggcgggatctcggctcactgcaagctccgcctcccgggttcac

SEQ ID NO: 79105 - DNA, 120 bp, synthetic construct; identical to SEQ ID NO: 8222
  source 1..120: mol_type = other DNA

SEQ ID NO: 79106 - DNA, 120 bp, synthetic construct; identical to SEQ ID NO: 8223
  source 1..120: mol_type = other DNA

SEQ ID NO: 79107 - DNA, 120 bp, synthetic construct; identical to SEQ ID NO: 8224
  source 1..120: mol_type = other DNA

SEQ ID NO: 79108 - DNA, 120 bp, synthetic construct; identical to SEQ ID NO: 8225
  source 1..120: mol_type = other DNA

SEQ ID NO: 79109 - DNA, 120 bp, synthetic construct; identical to SEQ ID NO: 8307
  source 1..120: mol_type = other DNA

SEQ ID NO: 79110 - DNA, 120 bp, synthetic construct
  source 1..120: mol_type = other DNA
aaggagtcaaatgcatttgaggagggcatgaggcaggcccagggaactcagacaatctatcttaggagctgatttgaatgtgtgttgaaattcttctgtcaaccacagatccaactgtca

SEQ ID NO: 79111 - DNA, 120 bp, synthetic construct
  source 1..120: mol_type = other DNA
aaaggttcaaacacccaggggaaaggaaatcgcttcttgatcccttccaaacacaaggaccatgatcaaagaattgcttgctgtagttatcgcaaaaagaaaacaacaacaggccttcct

SEQ ID NO: 79112 - DNA, 120 bp, synthetic construct
  source 1..120: mol_type = other DNA
gtgctctccttcatcctgaagcctgttcttccatatggaatatcctttgactccagctccccctccatgctcacaaactccgtactttttcatctttaattactgaaatcattttcattc

SEQ ID NO: 79113 - DNA, 120 bp, synthetic construct; identical to SEQ ID NO: 8226
  source 1..120: mol_type = other DNA

SEQ ID NO: 79114 - DNA, 120 bp, synthetic construct
  source 1..120: mol_type = other DNA
accagcaatgtatgagggttctgattcctccataccctctccaaaactcttctttccttttctttcttcctttttaaaattatagctatcctagtgggtgtgaagtggtgtttcattgtg

SEQ ID NO: 79115 - DNA, 120 bp, synthetic construct
  source 1..120: mol_type = other DNA
tgcaaatctatagagacagaaagtagattagtggttgctaggagctgggggaaggagagatggggagtgactactaacaggtttgagttttcttttggcatgattaaatattcgggactt

SEQ ID NO: 79116 - DNA, 120 bp, synthetic construct
  source 1..120: mol_type = other DNA
ttgcagtgagacgagatcatgccactacactccagcctgggcaactgagtgagactccgtctccaaaaaaaaaaagaaaaaaaatatagatctaagtgaataatcactgttaaaaacaac

SEQ ID NO: 79117 - DNA, 120 bp, synthetic construct; identical to SEQ ID NO: 8305
  source 1..120: mol_type = other DNA

SEQ ID NO: 79118 - DNA, 120 bp, synthetic construct
  source 1..120: mol_type = other DNA
gcagatcacttgaggtcaggagttcgagatcatcccggccaaaatagtgaaactctgtctttactaaaatacaaaaaattatccaggcatggtggtgaacacctgtagtcccagctactt

SEQ ID NO: 79119 - DNA, 120 bp, synthetic construct
  source 1..120: mol_type = other DNA
ggggaggaaaaatcgaagagcttaggggagaaattagagctggagattggaaatctccatttccaaagtctaccttctttttctcacaattccatgatttttcagtaggagtggggtact

SEQ ID NO: 79120 - DNA, 120 bp, synthetic construct
  source 1..120: mol_type = other DNA
acctagataccatttctactctgtgcttttagtgtcctgcttgggaaatggggtgatcactcatcttcagaatgacctcaagaaatgctttggcatgagagatcagggcctgaagacatt

SEQ ID NO: 79121 - DNA, 120 bp, synthetic construct
  source 1..120: mol_type = other DNA
agtgagataatccacataaagtgctttaaacagaatctagcacctagcctgttcaataaatgttggctaatattaatattagaatccagccccctcaacactcacttgagtgttctttcc

SEQ ID NO: 79122 - DNA, 120 bp, synthetic construct
  source 1..120: mol_type = other DNA
tttggcaagctagattcaatatctagcttgctgtggaattaggttatggtgtggaaacctcttggctgggacaggaaaaaaaattgatcttaaactaaaaaaactaacttaagatattcc

SEQ ID NO: 79123 - DNA, 120 bp, synthetic construct
  source 1..120: mol_type = other DNA
aaaaagaaagaaagaaaagaaaaaagataaaagaataggaaatatcatagtggacagcacataagtagaggtgaagccagctggacttcctcggtggagtggggtcttggagaacttttc

SEQ ID NO: 79124 - DNA, 120 bp, synthetic construct
  source 1..120: mol_type = other DNA
aagtggttagtgaatgcccctgaaaccaccaccttatgtatggtggtgcttctgctgccagagcttaatacagggtcatgttcctttcctctgaaatctgtaacataaattcagttttaa

SEQ ID NO: 79125 - DNA, 120 bp, synthetic construct
  source 1..120: mol_type = other DNA
tttttttccaggcaaagattactatgcaaacatttaagagaaaaactttgtccaaagtaattttttcccccaacttctatttggtttcctgcaatgttgagatgactcattctcttccaa

SEQ ID NO: 79126 - DNA, 120 bp, synthetic construct
  source 1..120: mol_type = other DNA
cagtcttaaatttatcattccagggtctctcatccaatgacctcaactgctggaagaagccacaagagggaatgcctttcatctgtgatctcacataccagcctgtcctttccattgaga

SEQ ID NO: 79127 - DNA, 120 bp, synthetic construct; identical to SEQ ID NO: 147
  source 1..120: mol_type = other DNA

SEQ ID NO: 79128 - DNA, 120 bp, synthetic construct; identical to SEQ ID NO: 8301
  source 1..120: mol_type = other DNA

SEQ ID NO: 79129 - DNA, 120 bp, synthetic construct
  source 1..120: mol_type = other DNA
gagtcctaaatgtccccagtaagagggaccagtttgagcagagagagctttgcctggcttcctggagttttataaagccaaacctcagtgacgaggcaggctgcgggcttggagaagaga

SEQ ID NO: 79130 - DNA, 120 bp, synthetic construct
  source 1..120: mol_type = other DNA
aaccaacaaaccttgccacttcttcagtgggactcaaggcagcagaagaagactactgtctaaggatctgttagcttttacccagggtcctatgtctcttcatatgctgtgctttaaaaa

SEQ ID NO: 79131 - DNA, 120 bp, synthetic construct
  source 1..120: mol_type = other DNA
attagaaagttcagtgagccaggctcatgcctgtaatcccagcactttgggaggctgaggcaggcagatcacgaggtcaggagatcgagaccatcctggctaacacggtgaaactctgtc

SEQ ID NO: 79132 - DNA, 120 bp, synthetic construct; identical to SEQ ID NO: 326
  source 1..120: mol_type = other DNA

SEQ ID NO: 79133 - DNA, 120 bp, synthetic construct; identical to SEQ ID NO: 327
  source 1..120: mol_type = other DNA

SEQ ID NO: 79134 - DNA, 120 bp, synthetic construct
  source 1..120: mol_type = other DNA
tcacatatttagctctgctccctctgacagccacactaaaataataggaaaaaaaaggttctaaaatgattatcatttaggtataaattgagaaaaacaaaaagaatggaagctgaagcc

SEQ ID NO: 79135 - DNA, 120 bp, synthetic construct
  source 1..120: mol_type = other DNA
aaggcttttaaacgccattagttgttaagtattttttcttctgtatagaaaatatgaagagtattatcctggtaaaatttacgggaagtagtgttaggttcagaatgaggtgaaactgat

SEQ ID NO: 79136 - DNA, 120 bp, synthetic construct
  source 1..120: mol_type = other DNA
gagtctgggaaggaataaaatccatatcaagtataactggaattgccacaggagggaagtagtataaaaggtgaaggatgattttccatcaaagcaaccatctaggagtccaatcctttc

SEQ ID NO: 79137 - DNA, 120 bp, synthetic construct
  source 1..120: mol_type = other DNA
tagtcactgggaagagcagacgaggaagctctgggttcttttagtgcctaatgactgaaaatgaggccttgctctgtgccctggcaggaatactaggtattggaagaactgggcacgtgg

SEQ ID NO: 79138 - DNA, 120 bp, synthetic construct
  source 1..120: mol_type = other DNA
ctgatgactcaacccaggctcataaccactacactcgtctatctgccaggaaatactttcttcctttttttttttttttttttttttgagatagagtcttgctttgtcccccaggctgga

SEQ ID NO: 79139 - DNA, 120 bp, synthetic construct
  source 1..120: mol_type = other DNA
cctgccttggtttctccacaagcaaacctgccacacctcacaacatcatatgggatttgggtccgagtcttgctgttatatcaccacctgggtcatctaggcttgtcactgaattgttct

SEQ ID NO: 79140 - DNA, 120 bp, synthetic construct
  source 1..120: mol_type = other DNA
catgtttctttttttttttttttgagaaggagtctctctctgtcgcccaggctggagtacggtggtgcgatctcggctcactgcaagctccgcctcccaggttcacgccattctcctgcc

SEQ ID NO: 79141 - DNA, 120 bp, synthetic construct
  source 1..120: mol_type = other DNA
agagttttctttaccttagtagcctccagtgcttaatatatagctgagcacatagtgtgtttactgaaggaagaaaggaatagaaagaggaggaagatgatcatctaagctaagatcggt

SEQ ID NO: 79142 - DNA, 120 bp, synthetic construct
  source 1..120: mol_type = other DNA
ttccatacatgtacacggcacttacaacactccagctatgcatgaggacaatgccctgttcttcattcatccatctgctcctgggttgagagagccagaagagtatgggggaggaaaatt

SEQ ID NO: 79143 - DNA, 120 bp, synthetic construct
  source 1..120: mol_type = other DNA
atcttgaagatctggtccaattccaacaggtgagaggcataggaaacatttaaggaaaaggacattctgggagctgaagggcagaggtcagtggatttggagctatattagtatttttta

SEQ ID NO: 79144 - DNA, 120 bp, synthetic construct
  source 1..120: mol_type = other DNA
tccacccacactcatacactctgtgggccgtgttacttctgttcattagacttataggcatagagctcatcaacagggtctacatagagctagtcaggaaggtttacaggttcaagggca

SEQ ID NO: 79145 - DNA, 120 bp, synthetic construct
  source 1..120: mol_type = other DNA
ggccaaatctgttcattttactatggaagaaacaggtccagagaaggggagtggcttttccaaggttgcttgattctgcgccagtgctttttttatacagttgcctctttttgcattttg

SEQ ID NO: 79146 - DNA, 120 bp, synthetic construct
  source 1..120: mol_type = other DNA
gtagaaaacctggatgccaccagtgacaagcagcgcctcatggagatgtacaacaacgtcttctgcccccctatgaagtttgagtttcagccccacatgggggatatggtgaggcccttt

SEQ ID NO: 79147 - DNA, 120 bp, synthetic construct
  source 1..120: mol_type = other DNA
tgcatttccagccttccctggtaggttgaaatctagtggaaagagtctctgcctccctcctcaaagcccccataaagtttgtgtgtctcattggttttgattgggtaaagtgcttatgcc

SEQ ID NO: 79148 - DNA, 120 bp, synthetic construct
  source 1..120: mol_type = other DNA
tccctttatgtaatatagctgatcagtggctgagccaggcaggggccaggaccagtcctggagcttgtgaaggttccgcattctagcctagccttcatatgagtgaaataaaaagagatg

SEQ ID NO: 79149 - DNA, 120 bp, synthetic construct
  source 1..120: mol_type = other DNA
aggagcttggcattttccaaagagccatcattttaccaggccttccctagatctgtaagagaggagtctgaccttcccgcaaggattattgccaattagctttcccctgtgtgaaggaat

SEQ ID NO: 79150 - DNA, 120 bp, synthetic construct
  source 1..120: mol_type = other DNA
caaagtcaaaggcctctgtttgtttgaacatgctggaaaaagctaggcatgaggaggtggtttcagagacacaatattgttcacacagctgccaagtgccattttgattaaatgtgtaga

SEQ ID NO: 79151 - DNA, 120 bp, synthetic construct
  source 1..120: mol_type = other DNA
actccatggagtccgtcaagtccacggtctctgaaaccttcatgagcaagcccagcattgctaagaggagagccaaccagcaagagacagagcagttttatttcacagtaagggagtgct

SEQ ID NO: 79152 - DNA, 120 bp, synthetic construct
  source 1..120: mol_type = other DNA
tgaaaggaattaacttttcagtcaagaaacagtctgcatgcagtaaattgaatttttcctgcaactggaatgatttgtttaattcttctttgaacactgccctttctccagtaagaacac

SEQ ID NO: 79153 - DNA, 120 bp, synthetic construct; identical to SEQ ID NO: 8249
  source 1..120: mol_type = other DNA

SEQ ID NO: 79154 - DNA, 120 bp, synthetic construct
  source 1..120: mol_type = other DNA
attttcctgagactcttgcaagcaactgatctttataggtcatgcctcaaattcccaattgatgtcatctgggcaaatcagtccaatgacagccacaagtggtcagaaagctttcttagc

SEQ ID NO: 79155 - DNA, 120 bp, synthetic construct; identical to SEQ ID NO: 2269
  source 1..120: mol_type = other DNA

SEQ ID NO: 79156 - DNA, 120 bp, synthetic construct
  source 1..120: mol_type = other DNA
tcaacatggcaaaaaccctatctctactaaaaatacaaaaattaaccaggtgtggtggtgcacatctgtaatcccaactacttgggaggctgagacatgagaatcttttgaacccgggat

SEQ ID NO: 79157 - DNA, 120 bp, synthetic construct
  source 1..120: mol_type = other DNA
tgatttggcctgaaaggcaggagatcttggagcagggtttacaggtcataggtaggttccacgattcttttttttttttttttttgagactgtgtctcactctgtcgcccaggctggagt

SEQ ID NO: 79158 - DNA, 120 bp, synthetic construct
  source 1..120: mol_type = other DNA
gcttgcagtgagccgagatcacgccactacactccagccggggtgacagagcgagactccgtctcaaaaaaaaaaagaaaagaaagaaaaaagaaagagcgtgagcttcattctcatgct

SEQ ID NO: 79159 - DNA, 120 bp, synthetic construct
  source 1..120: mol_type = other DNA
cagattagaaatcaatcacagtcaatcttgcagtgagtctttagccaggagtaagctctggcctcaaagtaacccgcctgctggggaaggaattctggagatgcctggttcgtcccagga

SEQ ID NO: 79160 - DNA, 120 bp, synthetic construct
  source 1..120: mol_type = other DNA
cagacagatgatccaaagcccttggttttaggtaccatctcttcgatgtttcttggctgagtaaaccagcccaatctcttttttataaaatgagaccacaggttggcctgagaatggaga

SEQ ID NO: 79161 - DNA, 120 bp, synthetic construct
  source 1..120: mol_type = other DNA
ctcatggcaagcgtcaccctggagctttctgtctcagtccaagcacatccacctgcccttcctcactgcattctcccaggggcccctggctgcacacaggcatggcctgcatttgcatag

SEQ ID NO: 79162 - DNA, 120 bp, synthetic construct
  source 1..120: mol_type = other DNA
taacttttttgtagttttgtagagatggggtttcgccatgttggccaggctggtcttgaacgcctgacctcagatgatccacctgcctcagcctcccaaagtgctggaattacaggcgtg

SEQ ID NO: 79163 - DNA, 120 bp, synthetic construct
  source 1..120: mol_type = other DNA
cgatctcctgaccccgtgatctgcccgcctcggcctcccaaagcactgggattacaggcgtgagccaccgcaccggcctgtttttaatttttatttatttatttatttatttagagatag

SEQ ID NO: 79164 - DNA, 120 bp, synthetic construct; identical to SEQ ID NO: 1259
  source 1..120: mol_type = other DNA

SEQ ID NO: 79165 - DNA, 120 bp, synthetic construct
  source 1..120: mol_type = other DNA
atttttgtatttttagtggagacggggttttaccatctcggccaggctggtcttgaacccctgatctcgtgatccacccacctaggcctcctaaagtgctgggattacaggcatgagcca

SEQ ID NO: 79166 - DNA, 120 bp, synthetic construct; identical to SEQ ID NO: 1260
  source 1..120: mol_type = other DNA

SEQ ID NO: 79167 - DNA, 120 bp, synthetic construct
  source 1..120: mol_type = other DNA
ccagggtgggtcgcttggtcttaggagcgtccaagctgcagagcccagtagacagaacctggatccagcgcctcactttacaggaggggaaactgaggcacaagcatgtgctacctggct

SEQ ID NO: 79168 - DNA, 120 bp, synthetic construct
  source 1..120: mol_type = other DNA
tcaggcatgagggacagaagcttctggggcccctgcctctttcctgcccatcccctggtgaaggaaaatcgcctctgataggaaaagctggggccagactccctctccctgcattagtgt

SEQ ID NO: 79169 - DNA, 120 bp, synthetic construct
  source 1..120: mol_type = other DNA
ctctcactttggggatcattgctgaggtgagaagggggactgtggccaccaggtgataccctctccatgcacctaactgctgctcaggactctggggaccgtgttgccaggcctgcgcct

SEQ ID NO: 79170 - DNA, 120 bp, synthetic construct
  source 1..120: mol_type = other DNA
ttggtggaaacacagggtttaaagcttcggaaacagcggcctgttcagggaacttcgactggctccgacgggaacaggccggccgtgtttttagcaagctgtgttcctgcatcatctgga

SEQ ID NO: 79171 - DNA, 120 bp, synthetic construct
  source 1..120: mol_type = other DNA
agttttttgaaactctgaaagacagctggcagccaagcctcccctgggccccccagaacctgctgcttcccacggcaaactcaccagtgagctctgtctccggactcacagcccaggcac

SEQ ID NO: 79172 - DNA, 120 bp, synthetic construct
  source 1..120: mol_type = other DNA
tggcagtgtcaggaatgtcagagatgctgggtttcaaaaccactttgtgggatagttcgggttgctaagcctcatgaatattagtgctaccacaacaaagttcctttgtttttttggggg

SEQ ID NO: 79173 - DNA, 120 bp, synthetic construct
  source 1..120: mol_type = other DNA
atagggctgggtatggtgggaagcacaggttcttactggattttttttttctttttttttgaggcagagtcttgctctgttgcccacgctggagtgcagtggcgtgatcttggctcactg

SEQ ID NO: 79174 - DNA, 120 bp, synthetic construct
  source 1..120: mol_type = other DNA
ctcttgcctcagcctcctaagtagctgcaactataggtgtgcaccaccttgcccagccaaaatgagccactttatgctttatttatttatttacttttttgagacacagtcttcctctgt

SEQ ID NO: 79175 - DNA, 120 bp, synthetic construct
  source 1..120: mol_type = other DNA
ttgaatctagcctgggcaacacagtgaggccccatcgctacaaataatcaaaattagccaggcgaggtgcatgtgcctgtagtcccagatactcaggaggctgaggcaggagaattgctg

SEQ ID NO: 79176 - DNA, 120 bp, synthetic construct
  source 1..120: mol_type = other DNA
ctggctggaaggcagttatcagaggctgctttgggagcagcccctcatcccgctgcatgcagctcagacactctgaatgttgagtcagaagggctgagccctgatttcaagaaggagaag

SEQ ID NO: 79177 - DNA, 120 bp, synthetic construct; identical to SEQ ID NO: 1261
  source 1..120: mol_type = other DNA

SEQ ID NO: 79178 - DNA, 120 bp, synthetic construct
  source 1..120: mol_type = other DNA
cgggaggctgtggagaattgcttgaacccaggaggcgggggttgcggtgagccaagattgtgccactgcactgcagcctgggtgacagagcgagactccgtctcaaaaaacaaaaacaaa

SEQ ID NO: 79179 - DNA, 120 bp, synthetic construct
  source 1..120: mol_type = other DNA
atttctcagcaattacattatattgctgctcacttgcagtaggaaagctgtcacaaatgtggcagacacagggtagctttactgtttgtgcagctacgtaaatgcctgtgggaaaatctt

SEQ ID NO: 79180 - DNA, 120 bp, synthetic construct
  source 1..120: mol_type = other DNA
tggaaaaaacaaccagaaaggcaggtgaggcggggccaccagggagttacctgtatcttccaaacaggaacaggctggttcccatgagcaggaggtagttaagcccatcacagaaatgtg

SEQ ID NO: 79181 - DNA, 120 bp, synthetic construct
  source 1..120: mol_type = other DNA
ttctctgatgtccctgcacctccaaggtctgggagacgctcatccctcttctctgtggcctctgcctgggaaagcttgggggctttgtaagtcaaaggttggtcttgtgggaacctccca

SEQ ID NO: 79182 - DNA, 120 bp, synthetic construct
  source 1..120: mol_type = other DNA
agcacaggctgcggaccctacaacgtgggttgcgaagagtatattttggatattttcgcaaaaatccaggaggaagctgtcactcctggttcaggcagccccgccttccccagtgtggat

SEQ ID NO: 79183 - DNA, 120 bp, synthetic construct
  source 1..120: mol_type = other DNA
agcctctttgcttaacactggctctgaggatcccccgccgagaaaccgaggcaggcttgcggctctgggctcgtcagccttggcagtggcgtctggcctggagtctggggcagctggttt

SEQ ID NO: 79184 - DNA, 120 bp, synthetic construct
  source 1..120: mol_type = other DNA
gactctttaggacgagtcccgtccctggagtcagaaaacccggtccagcgccagcgtggacgtgcgcttcccgggacacgcccagggacgccggctaggaccggcgaggctggaggggtg

SEQ ID NO: 79185 - DNA, 120 bp, synthetic construct
  source 1..120: mol_type = other DNA
tgtgacatatacatgaatggggctgttgtaagtgaacgcacacagcacaccggcacatgtgtcacaacacttagatgggtttagatgaagaaacagggaaacctttgggaagtttcctgt

SEQ ID NO: 79186 - DNA, 120 bp, synthetic construct; identical to SEQ ID NO: 1262
  source 1..120: mol_type = other DNA

SEQ ID NO: 79187 - DNA, 120 bp, synthetic construct; identical to SEQ ID NO: 1263
  source 1..120: mol_type = other DNA

SEQ ID NO: 79188 - DNA, 120 bp, synthetic construct
  source 1..120: mol_type = other DNA
ggtctgcagtgacgacggagacgcaaaaaaacaagaatccgaagaggaaagagacaacgtgaggaaagttgcctttgttctaggaaaagtctttttcttcacagtatagtgactcattta

SEQ ID NO: 79189 - DNA, 120 bp, synthetic construct
  source 1..120: mol_type = other DNA
atggtggctacctctgcaaaaggatttctcctttcagtgagtgggtgtctctcatgtcactgttgagacacccaggagcctgggagggaaacctgtgggaaggaactgccagcctccttc

SEQ ID NO: 79190 - DNA, 120 bp, synthetic construct
  source 1..120: mol_type = other DNA
agactgatgcgtgtgtgcctgtgtgattgtgagcacatgtgaacgtgtggatgcaggtggtagtcgtgagtgtgcttgtgtgagcatgtgactgagggagcatgtgggtgtgtggatgag

SEQ ID NO: 79191 - DNA, 120 bp, synthetic construct
  source 1..120: mol_type = other DNA
ggactctgccctcacgccacagctgctgctttttctgcagcggctaaacacgcactggccccgcgatgaggatgagcaaggttcaaatgactgcagctcatccacctgcagatgccaact

SEQ ID NO: 79192 - DNA, 120 bp, synthetic construct
  source 1..120: mol_type = other DNA
agacgtgtgaagaaaaggctgtatgtgtgtggtgtgagtatgtgtgcacgtagtgtgcctgtgtgtgtgtggcaagtgtgtccctgtgtgtggtgcatgtgtacagtgactgtgcactgc

SEQ ID NO: 79193 - DNA, 120 bp, synthetic construct
  source 1..120: mol_type = other DNA
tcttactctgatgaggggtgcatgggtgtggagctagctcagaactcatccagtcggacacactgaatgcgtgcaacttactgtatgtcagtggtgcctcgataaagctgtttttgaaaa

SEQ ID NO: 79194 - DNA, 120 bp, synthetic construct
  source 1..120: mol_type = other DNA
tgcacatcaccatgactagccaacttttttgtatttttggtagagatggggtttcaccaagttgctcaaactggtcttgaactcctcagctcaaagtgctgggattacaggcgtgagcca

SEQ ID NO: 79195 - DNA, 120 bp, synthetic construct
  source 1..120: mol_type = other DNA
atgcccttcagtcacaaaaagtgaccaaggggaggctgtgagcaacactggcttcattaacagtgatggccctcactctgtcattcttattaaataaaaattaacagctggacgtggtgg

SEQ ID NO: 79196 - DNA, 120 bp, synthetic construct
  source 1..120: mol_type = other DNA
cctcgggagcttggtgaaaagggagttaacccccaggatcctacctgcagggactagaaaaatggagaaggtaggaggagaaacaggagactgctgcagcagacgtgcgataggaaattt

SEQ ID NO: 79197 - DNA, 120 bp, synthetic construct
  source 1..120: mol_type = other DNA
gcagtgagccaagattgtgccactgcactccatcctgggtgacaaaaaaataaaaaagtaatctgatgttaaccaatcagttttttttttttctatactgtttccttgttcccaccttac

SEQ ID NO: 79198 - DNA, 120 bp, synthetic construct; identical to SEQ ID NO: 21341
  source 1..120: mol_type = other DNA

SEQ ID NO: 79199 - DNA, 120 bp, synthetic construct
  source 1..120: mol_type = other DNA
gctattcacaaaagaccacacgttgtatgatcccatttacataaaatatccaaaataggcaaatctatagagacagaaagtgcattaatggttcccaggagtggagggctggggagagac

SEQ ID NO: 79200 - DNA, 120 bp, synthetic construct
  source 1..120: mol_type = other DNA
ccagctgaggaagaaataaggcaaataccttaggcgtggtggttcagttcactttattctaccaaaggagagaagctgtgatgggtagcccaaaatagatagcttacaccctaaacacaa

SEQ ID NO: 79201 - DNA, 120 bp, synthetic construct
  source 1..120: mol_type = other DNA
tcactaatccatagatagcccttctttctaatataaatttatagtgaactcctttgacgtcattcctaacgtaaaagcattaccagtaagttacacgtacctatgtgcaccgcccctgct

SEQ ID NO: 79202 - DNA, 120 bp, synthetic construct
  source 1..120: mol_type = other DNA
acttgagaaatgggaatctaacgcagagggggccgggcatcattaactcccaagatgagaggcaacccatacgagaagcaagtgacccagccccgacctcgaagacatttgctcttgatc

SEQ ID NO: 79203 - DNA, 120 bp, synthetic construct; identical to SEQ ID NO: 32022
  source 1..120: mol_type = other DNA

SEQ ID NO: 79204 - DNA, 120 bp, synthetic construct; identical to SEQ ID NO: 21342
  source 1..120: mol_type = other DNA

SEQ ID NO: 79205 - DNA, 120 bp, synthetic construct
  source 1..120: mol_type = other DNA
aaagaatcctaacatttttgagaatttgcatgctatttttcatatattattttagtatagaatatcctagaggataagattaaagcatcctttgaaacctgttgcaaaatactttatgta

SEQ ID NO: 79206 - DNA, 120 bp, synthetic construct
  source 1..120: mol_type = other DNA
gtattgtgtctagagctatttttttgactacagtttaatatttcagttgagaagttaagcacacttattttcacagataacttaaaatacatgaggataaagaccatatgtttaccttta

SEQ ID NO: 79207 - DNA, 120 bp, synthetic construct
  source 1..120: mol_type = other DNA
ctccttaggcctcttacttggccacccccatttcttaataaagtagctatcttgaaggcatttttttcttgtccagggtaaactttctaaatagaccagtatgttttatatactggattt

SEQ ID NO: 79208 - DNA, 120 bp, synthetic construct; identical to SEQ ID NO: 21343
  source 1..120: mol_type = other DNA

SEQ ID NO: 79209 - DNA, 120 bp, synthetic construct; identical to SEQ ID NO: 21344
  source 1..120: mol_type = other DNA

SEQ ID NO: 79210 - DNA, 120 bp, synthetic construct; identical to SEQ ID NO: 1847
  source 1..120: mol_type = other DNA

SEQ ID NO: 79211 - DNA, 120 bp, synthetic construct
  source 1..120: mol_type = other DNA
gaggatcacttgagctcaggagtttgaggctgcagtgagtcatgattgcaccactgcactccagcctggatgacagcatgagaccccatttcttaaaaaaaaaaaaaaaagctgtgttta

SEQ ID NO: 79212 - DNA, 120 bp, synthetic construct
  source 1..120: mol_type = other DNA
aagaaaagattccttcaaaatattattgctcattgacaacgcacctgatcacccaagagctgtgatggagatgtacaagattaatgttgttttcatgcctgctaacacaacatccattct

SEQ ID NO: 79213 - DNA, 120 bp, synthetic construct
  source 1..120: mol_type = other DNA
aaaacagccttattgctgatatgaagtggtctggatagatgatcaaacaagccacaatgttcccttaagccaaagcctaattcagagcaaccctaactctcttcagttctatgaaggctg

SEQ ID NO: 79214 - DNA, 120 bp, synthetic construct; identical to SEQ ID NO: 21345
  source 1..120: mol_type = other DNA

SEQ ID NO: 79215 - DNA, 120 bp, synthetic construct
  source 1..120: mol_type = other DNA
aatgacaaaaagtagagccgaggaatgaataagcaacacaaggaaaagtcaacaaaaaaatttcaagagtgagttttaaccatctctttgctttgggaaggagaaggtcaggtcacattc

SEQ ID NO: 79216 - DNA, 120 bp, synthetic construct
  source 1..120: mol_type = other DNA
acagaattcttattggcaattcagttgtttcccattttggagactgacactctccagttctaagttaaataattgtcatggtaaagtaatttccttgaaaagaacggacattgattcagc

SEQ ID NO: 79217 - DNA, 120 bp, synthetic construct
  source 1..120: mol_type = other DNA
gggcaaattaaaacatggatagaatcatgtttctcagtgtgaagaaatatttttatttgatgaatattatatattttcaggtgcagtgacttctatgttttgggttgatgctgaattagg

SEQ ID NO: 79218 - DNA, 120 bp, synthetic construct; identical to SEQ ID NO: 21346
  source 1..120: mol_type = other DNA

SEQ ID NO: 79219 - DNA, 120 bp, synthetic construct; identical to SEQ ID NO: 21347
  source 1..120: mol_type = other DNA

SEQ ID NO: 79220 - DNA, 120 bp, synthetic construct
  source 1..120: mol_type = other DNA
agacagagtctcactctgttgcccaggctggagtgcagtggcaccatcttggctcactgcaacctccacctcccaggttcaagcgattcccttgtctcagcctcctgagtatcggattac

SEQ ID NO: 79221 - DNA, 120 bp, synthetic construct
  source 1..120: mol_type = other DNA
agcatgataccccatgatatcaattaccacctcagtttcagtttggctggctggccacagggtaccatttctcagctttacttgtgatgggctggctctgtgaagcatgacattcttaaa

SEQ ID NO: 79222 - DNA, 120 bp, synthetic construct; identical to SEQ ID NO: 21348
  source 1..120: mol_type = other DNA

SEQ ID NO: 79223 - DNA, 120 bp, synthetic construct
  source 1..120: mol_type = other DNA
gaacttgacaagtattgtatcaaaaatcattccatgccaaaagatcaagtttaatatttttttcataattcatcttggcctgaggctacaagtcctattgttatatactctgcctctaga

SEQ ID NO: 79224 - DNA, 120 bp, synthetic construct
  source 1..120: mol_type = other DNA
tgcttttaggctagaatcagggctgaatcagccttcccaccacttatttgtttctagggtgtttgaaaggcctagtactgagttcacgtggtgcatgattgtgggctggggtgcagggaa

SEQ ID NO: 79225 - DNA, 120 bp, synthetic construct
  source 1..120: mol_type = other DNA
ctgaggcaggagaatcgcttgaacctgggaggcggaggttgcagtgagcctgcacttcagcctgggtgacagtgagattctgtctcaaaaaataataattattattattattatacatat

SEQ ID NO: 79226 - DNA, 120 bp, synthetic construct; identical to SEQ ID NO: 21349
  source 1..120: mol_type = other DNA

SEQ ID NO: 79227 - DNA, 120 bp, synthetic construct; identical to SEQ ID NO: 32308
  source 1..120: mol_type = other DNA

SEQ ID NO: 79228 - DNA, 120 bp, synthetic construct
  source 1..120: mol_type = other DNA
aatttggtagaagcaatttggtaaattacacacccttttggcttttaccctccgtttatatcagacttgtgactgactcagaatgatatttggggaggtgaaaaaaggtaaacatgtttg

SEQ ID NO: 79229 - DNA, 120 bp, synthetic construct; identical to SEQ ID NO: 21350
  source 1..120: mol_type = other DNA

SEQ ID NO: 79230 - DNA, 120 bp, synthetic construct; identical to SEQ ID NO: 21351
  source 1..120: mol_type = other DNA

SEQ ID NO: 79231 - DNA, 120 bp, synthetic construct
  source 1..120: mol_type = other DNA
ctccagcctgggtgacagagcgagactctgtctcaaaaaaaaaaaaaaacaaacaaaaaaaccggagatttggttaacaaaatagtcaaagtcactcttacagaagttttgttttatttt

SEQ ID NO: 79232 - DNA, 120 bp, synthetic construct
  source 1..120: mol_type = other DNA
acatgactcttgggaggtagattcaatgtgagactaatctccgaggtataggaaatacaggaaggaggagcaacaggtcgggtagtggtggaagcaggtttggaaaatgtgattggtttt

SEQ ID NO: 79233 - DNA, 120 bp, synthetic construct
  source 1..120: mol_type = other DNA
ttatttttatttttatttatttttatctttttgagacagaatctcactctgtcccccaagttggagtgcggtggtgcgatctcggctcactgaaacctctgcctcctgggttcaagcgat

SEQ ID NO: 79234 - DNA, 120 bp, synthetic construct
  source 1..120: mol_type = other DNA
acttcctaggttcaaatgattctcctgccgcagcctcccgagtagctgggactacaggtgcgtgccaccacacccagctaatttttgtatttttggtagagacagggtttcaccacgttg

SEQ ID NO: 79235 - DNA, 120 bp, synthetic construct; identical to SEQ ID NO: 1771
  source 1..120: mol_type = other DNA

SEQ ID NO: 79236 - DNA, 120 bp, synthetic construct
  source 1..120: mol_type = other DNA
atccctgaggaatcgccacactgacttccacaatggttgaactagtttacagttccgccaacagtgtaaaagtgttcctatttctccacatcctctccagcacctgttgtttcctgactt

SEQ ID NO: 79237 - DNA, 120 bp, synthetic construct
  source 1..120: mol_type = other DNA
atggaatgttcttccatttgtttgtatcctcttttatttccttgagcagtggtttgtagttctccttgaagaggtccttcacatcccttgtaagtcagattcctaggtattttattctct

SEQ ID NO: 79238 - DNA, 120 bp, synthetic construct
  source 1..120: mol_type = other DNA
ccttgtttagtctttggagggtgtatgtgtcaaggaatttatccatttcttctagattttctagtttatttgcgtagaggtgtttgtagtattctctgatggtagtttgtatttctgtgg

SEQ ID NO: 79239 - DNA, 120 bp, synthetic construct
  source 1..120: mol_type = other DNA
tggtgcagagctgagttcaattcctgggtatccttgttgactttctgtctcattgatctgtctaatgttgacagtggggtgttaaagtctcccattattattgtgtgggagtctaagtct

SEQ ID NO: 79240 - DNA, 120 bp, synthetic construct
  source 1..120: mol_type = other DNA
agtgttttccaacttggttccattctccccgtcactttcaggtacaccaatcagacatagatttggtcttttcacatagtcccatatttcttggaggctttgtttgtttctttttattct

SEQ ID NO: 79241 - DNA, 120 bp, synthetic construct
  source 1..120: mol_type = other DNA
ggcgcccctcccccagcctcgctgccgccttgtagtttgatctcagactgctgtgctagcaatcagcgagactccgtgggcgtgggaccctccgagccaggtgcgggatataatctcgtg

SEQ ID NO: 79242 - DNA, 120 bp, synthetic construct; identical to SEQ ID NO: 21352
  source 1..120: mol_type = other DNA

SEQ ID NO: 79243 - DNA, 120 bp, synthetic construct; identical to SEQ ID NO: 21353
  source 1..120: mol_type = other DNA

SEQ ID NO: 79244 - DNA, 120 bp, synthetic construct
  source 1..120: mol_type = other DNA
tctttttttttttttttccccttggagacagggtctgggtctattgcccaggctagagtgcagtggtgcgatgtcagctccctatagcctctgtgtcctgggcttaagccatcttcccac

SEQ ID NO: 79245 - DNA, 120 bp, synthetic construct
  source 1..120: mol_type = other DNA
ctagtggataaggatatgctatcaaaacctgaaactcatgaatcggaaatcatcttgcacattaacttgtaatcttataacaatttttgtctctgcacacataaaatgtaaattctgcac

SEQ ID NO: 79246 - DNA, 120 bp, synthetic construct; identical to SEQ ID NO: 21354
  source 1..120: mol_type = other DNA

SEQ ID NO: 79247 - DNA, 120 bp, synthetic construct; identical to SEQ ID NO: 21355
  source 1..120: mol_type = other DNA

SEQ ID NO: 79248 - DNA, 120 bp, synthetic construct
  source 1..120: mol_type = other DNA
ggctgtgatactattttcccctatgtttatattatctaaagcaggacagtgcatcagaatctcctacagaggttacaaaaatatagatatgccctatttagtagtaaagtgacatagtgt

SEQ ID NO: 79249 - DNA, 120 bp, synthetic construct; identical to SEQ ID NO: 1848
  source 1..120: mol_type = other DNA

SEQ ID NO: 79250 - DNA, 120 bp, synthetic construct
  source 1..120: mol_type = other DNA
gcattaaaaattcagggatagagccttaataacacatatatactaggtcctaggtattacccatttcagactttttttttccagtttttgttttgaatctaaaattaactcctttttcca

SEQ ID NO: 79251 - DNA, 120 bp, synthetic construct
  source 1..120: mol_type = other DNA
tgtactgaacagtgtatggaaataataacgcaatggtaagtatttgcgtgacagtaatttttcagctccatcgtaatcttatgcagtctgactaaaacgctgttatgcggtgcatgacta

SEQ ID NO: 79252 - DNA, 120 bp, synthetic construct
  source 1..120: mol_type = other DNA
tcttctgaatctagccacccagcaagtctaccaggctccaggctggtactggggggtagtctgcacagagtcgggagatgtgaaccatctgtgggtctctcagctgtggataccagcacc

SEQ ID NO: 79253 - DNA, 120 bp, synthetic construct
  source 1..120: mol_type = other DNA
aaaaggaactctaaatcttgaaacaaatcctggaaacatagcaaaacagaacctctttaaagcataaatatcacaggacctataaaacaaaaatacaattagaaaaacaacaaaaaccag

SEQ ID NO: 79254 - DNA, 120 bp, synthetic construct
  source 1..120: mol_type = other DNA
atcaacctctgggatacagcaaaggtggtgctaagaggaaagttcatggccctcaatgcctccatcaaaaagtcggaaagagcacaatctacggtcacatctcaaagaactagagaaaca

SEQ ID NO: 79255 - DNA, 120 bp, synthetic construct
  source 1..120: mol_type = other DNA
accatccctgcatccctggtatgaaaccccttgatcatggtggattatctttttgatatgttgttggaatcagttagctagaattttcttaaggattttagcatctatgttcaaggatat

SEQ ID NO: 79256 - DNA, 120 bp, synthetic construct
  source 1..120: mol_type = other DNA
agtagaactatcatttggtccagcaatcccactactaggtatccacccagaggaaaagaagtcattatacgaaaaagatacgtgcacacgcatgtttatagcagcacaattcgcaattgc

SEQ ID NO: 79257 - DNA, 120 bp, synthetic construct
  source 1..120: mol_type = other DNA
aaccaaagtaaatttgttctcttaaaaaaaaaatacaaaagaaaggcttggcttatctttaactgaataagcatgtgccaagaggagaagagttcttagtgatgagaatgataggataat

SEQ ID NO: 79258 - DNA, 120 bp, synthetic construct
  source 1..120: mol_type = other DNA
acaaatgtttagtgtctgctaaatgcatcaggaagcataatgttcagcagaagtgagatttgcaacattatttctctgtacttgggaacagagagcagaaggtaacatttcaaagcacac

SEQ ID NO: 79259 - DNA, 120 bp, synthetic construct; identical to SEQ ID NO: 21356
  source 1..120: mol_type = other DNA

SEQ ID NO: 79260 - DNA, 120 bp, synthetic construct; identical to SEQ ID NO: 32002
  source 1..120: mol_type = other DNA

SEQ ID NO: 79261 - DNA, 120 bp, synthetic construct
  source 1..120: mol_type = other DNA
agcaagaaagctcttttccagattttatcctgaaggcactagctactttaagctattttttattatattttgcccttgcagttggcgtttgatttctcactgaacattcattgtcataat

SEQ ID NO: 79262 - DNA, 120 bp, synthetic construct; identical to SEQ ID NO: 21357
  source 1..120: mol_type = other DNA

SEQ ID NO: 79263 - DNA, 120 bp, synthetic construct
  source 1..120: mol_type = other DNA
tgtggcggccggatcacctggccccggcgggctgagctggaagcccgggatgaatgttgcaagaagcaggaacgctagtggttaccctttgggatgttttcctctgcttgtttctacgcc

SEQ ID NO: 79264 - DNA, 120 bp, synthetic construct
  source 1..120: mol_type = other DNA
cctcctgatgccgctgctgttgctgcaaaattgtccgacaggcttgacggtcgctggagcagggggcagtagctccacgcggtcggggacaaactctgcgcagcccctgtacccgctccc

SEQ ID NO: 79265 - DNA, 120 bp, synthetic construct
  source 1..120: mol_type = other DNA
ggaaatttactatttatgagacttctaaaagaaaagaataggagggcatgtaaatatattctccatttatttttcatcacccctcaacaagctggaaaaccatttgagataaatttggaa

SEQ ID NO: 79266 - DNA, 120 bp, synthetic construct
  source 1..120: mol_type = other DNA
gaaggaagatgattgggagggtgccaagaaagcctggagaaagtcccttctgggttcagcggctgtagccgctctcccaggacgtttgttggcaataaatgaaggaaggtcggcccggag

SEQ ID NO: 79267 - DNA, 120 bp, synthetic construct
  source 1..120: mol_type = other DNA
atggagtgcagtggcacaatcttggctcacttcaacctcacctttcgggttcaagcaattcttttgcctcaacctcccgagtagctgggactacaggcgtgtgccaccacacccagctaa

SEQ ID NO: 79268 - DNA, 120 bp, synthetic construct
  source 1..120: mol_type = other DNA
gctctttaggaggctaaggtggatggatcaggaggtcaggagttcaagaccagcctggctaacgtggtgaaacctcgtctctactaaaaatacaaaaattagctgggcgtggtggtgcat

SEQ ID NO: 79269 - DNA, 120 bp, synthetic construct
  source 1..120: mol_type = other DNA
gcctcataggttacaggttgttcattgttagagatgagactttagaccagactggacaacatagtgagaccctgtctctaccaaaaagaaaaagaaaaattagccagatgtaatggcata

SEQ ID NO: 79270 - DNA, 120 bp, synthetic construct
  source 1..120: mol_type = other DNA
gtcattctaagaattaaatattgccaaaacacatgaaaagattctcaaccttgttagtaatcaaggaaatgcaaatgaagatcacaatgaagtcttcttttgtactcaattgattggtga

SEQ ID NO: 79271 - DNA, 120 bp, synthetic construct
  source 1..120: mol_type = other DNA
tggttagtgcgccctaaggactctccgcagcgtcgctcaggttcacagaacacgcccaggggcgtgtccagctgtcgtcggggagagcccacctccccggggggtgtggctaagggacga

SEQ ID NO: 79272 - DNA, 120 bp, synthetic construct
  source 1..120: mol_type = other DNA
aaaccttacagttaaatagaagggctagaacaaatatatgactgtattagaagtttggaaaaagttaagaaatgtaaataaaataatactgtttccgggaaataatattcctagttgtgt

SEQ ID NO: 79273 - DNA, 120 bp, synthetic construct
  source 1..120: mol_type = other DNA
aatacgttacaaatttatgctgggccttggtgaaaaagtgaacaagatagtctctgccttcatagagcttagaaatatcaagggaaggggggaatggaggggaattcagtgaataaggag

SEQ ID NO: 79274 - DNA, 120 bp, synthetic construct; identical to SEQ ID NO: 79205
  source 1..120: mol_type = other DNA

SEQ ID NO: 79275 - DNA, 120 bp, synthetic construct; identical to SEQ ID NO: 1876
  source 1..120: mol_type = other DNA

SEQ ID NO: 79276 - DNA, 120 bp, synthetic construct
  source 1..120: mol_type = other DNA
cgtgctcatttaaaaattaaacttatagggaggccaaggcgggcggatcacgaggtcaggagaccgagaccatcctcgctaacacaatgaaacctcatctctactaaaattacaaaaaat

SEQ ID NO: 79277 - DNA, 120 bp, synthetic construct
  source 1..120: mol_type = other DNA
ggtcatacttctaagtgttcaaccttataaaaaataaatgactatcaaaaaagaaaaaccttacattatgttctagtagttaagtttccaaggacagtgatcactagtctaccatagacc

SEQ ID NO: 79278 - DNA, 120 bp, synthetic construct
  source 1..120: mol_type = other DNA
ccaaaaactttttttggtttaaaagaggaaaagtactcgtttgtcattttctttggcagttgaatgaatgatcagagtatttcttggtgcttttaagctgttaatagaattggaagtttt

SEQ ID NO: 79279 - DNA, 120 bp, synthetic construct; identical to SEQ ID NO: 1847
  source 1..120: mol_type = other DNA

SEQ ID NO: 79280 - DNA, 120 bp, synthetic construct; identical to SEQ ID NO: 79211
  source 1..120: mol_type = other DNA

SEQ ID NO: 79281 - DNA, 120 bp, synthetic construct
  source 1..120: mol_type = other DNA
ctgcttagaaaagaaaagattccttcaaaatattattgctcattgacaacgcacctgatcacccaagagctgtgatggagatgtacaagattaatgttgttttcatgcctgctaacacaa

SEQ ID NO: 79282 - DNA, 120 bp, synthetic construct; identical to SEQ ID NO: 79213
  source 1..120: mol_type = other DNA

SEQ ID NO: 79283 - DNA, 120 bp, synthetic construct
  source 1..120: mol_type = other DNA
attaccatgaatactttttttttggtcaaattattagatcctctacttcatgacaccagtttttttaatactgaattttcttttgttcttcgtatgtattctaattgctttgatgtgtct

SEQ ID NO: 79284 - DNA, 120 bp, synthetic construct; identical to SEQ ID NO: 79215
  source 1..120: mol_type = other DNA

SEQ ID NO: 79285 - DNA, 120 bp, synthetic construct; identical to SEQ ID NO: 79216
  source 1..120: mol_type = other DNA

SEQ ID NO: 79286 - DNA, 120 bp, synthetic construct; identical to SEQ ID NO: 1877
  source 1..120: mol_type = other DNA

SEQ ID NO: 79287 - DNA, 120 bp, synthetic construct; identical to SEQ ID NO: 21346
  source 1..120: mol_type = other DNA

SEQ ID NO: 79288 - DNA, 120 bp, synthetic construct; identical to SEQ ID NO: 21347
  source 1..120: mol_type = other DNA

SEQ ID NO: 79289 - DNA, 120 bp, synthetic construct
  source 1..120: mol_type = other DNA
aaattagtgactgttttgtatccaacctcatatctgaacatgttaatttttttttttttttttttttttgagacagagtctcactctgttgcccaggctggagtgcagtggcaccatctt

SEQ ID NO: 79290 - DNA, 120 bp, synthetic construct
  source 1..120: mol_type = other DNA
tttaagaatgtcatgcttcacagagccagcccatgacaagtaaagctgagaaatggtaccctgtggccagccagccaaattgaaactgaagtggtaattgatatcatggggtatcactct

SEQ ID NO: 79291 - DNA, 120 bp, synthetic construct; identical to SEQ ID NO: 21348
  source 1..120: mol_type = other DNA

SEQ ID NO: 79292 - DNA, 120 bp, synthetic construct; identical to SEQ ID NO: 79223
  source 1..120: mol_type = other DNA

SEQ ID NO: 79293 - DNA, 120 bp, synthetic construct
  source 1..120: mol_type = other DNA
agtcaggctaactccaaaaaatattttgacactgacttagagcccaagtggtagttttcatctctctggaggcaagctttgttgtctgtttttttttttttccccctcataatcctgttt

SEQ ID NO: 79294 - DNA, 120 bp, synthetic construct
  source 1..120: mol_type = other DNA
tgtgtaataataattattattattattttttgagacagaatctcactctgtcacccaggctgaagtgcaggctcactgcaacctctgcctcccaggttcaagcgattctcctgcctcagc

SEQ ID NO: 79295 - DNA, 120 bp, synthetic construct
  source 1..120: mol_type = other DNA
ttgtagcgcaagagtagcaagtaacagaacttagtaaatactttgcaaatgggtaatgtgaaatctgaacttgcatagtaatgaatacaattcattcacattgaaaagttagcggattag

SEQ ID NO: 79296 - DNA, 120 bp, synthetic construct; identical to SEQ ID NO: 32308
  source 1..120: mol_type = other DNA

SEQ ID NO: 79297 - DNA, 120 bp, synthetic construct; identical to SEQ ID NO: 79228
  source 1..120: mol_type = other DNA

SEQ ID NO: 79298 - DNA, 120 bp, synthetic construct; identical to SEQ ID NO: 21350
  source 1..120: mol_type = other DNA

SEQ ID NO: 79299 - DNA, 120 bp, synthetic construct
  source 1..120: mol_type = other DNA
gcagaggtagccgaagaatgccctttagtgtaagtcctctacaaccatacaccaaatgtgctccctgcatttcaaattccattgtagaaagtctctgataatctcacttataccatgagc

SEQ ID NO: 79300 - DNA, 120 bp, synthetic construct; identical to SEQ ID NO: 79231
  source 1..120: mol_type = other DNA

SEQ ID NO: 79301 - DNA, 120 bp, synthetic construct
  source 1..120: mol_type = other DNA
agactaatctccgaggtataggaaatacaggaaggaggagcaacaggtcgggtagtggtggaagcaggtttggaaaatgtgattggttttgtaaacgtttttgagtttgaagtgccactg

SEQ ID NO: 79302 - DNA, 120 bp, synthetic construct
  source 1..120: mol_type = other DNA
tttttatttttatttttatttatctttttgagacagaatctcactctggtttgagacagaatctcactgtgtcccccaagttggagtgcggtggtgcgatctcggctcactgaaaccact

SEQ ID NO: 79303 - DNA, 120 bp, synthetic construct
  source 1..120: mol_type = other DNA
tgcagcaggagaatcatttgaacctaggaagtggaggttgcagtgagccgagattgcaccactgcactccagcctggcacagagtgagactccgcctcaaaagaaaaaaaaaaaaaaaga

SEQ ID NO: 79304 - DNA, 120 bp, synthetic construct; identical to SEQ ID NO: 1771
  source 1..120: mol_type = other DNA

SEQ ID NO: 79305 - DNA, 120 bp, synthetic construct
  source 1..120: mol_type = other DNA
tttctagttctagatccctgaggaatcaccacactgacttccacaatggttgaactagtttacagtcccgccaacagtgtaaaagtgttcctatttctccacatcctctccagcacgtgt

SEQ ID NO: 79306 - DNA, 120 bp, synthetic construct
  source 1..120: mol_type = other DNA
tccaattgtgtgaagaaagtcattggtagcttgatggggatggcattgaatctgtaaattaccttgggtagtatggccattttcacgatattgattcttcctacccatgagcatggaatg

SEQ ID NO: 79307 - DNA, 120 bp, synthetic construct
  source 1..120: mol_type = other DNA
actaccatcagagaatactacaaacacctctacgcaaataaactagaaaatctagaagaaatggataaattccttgacacatacaccctccaaagactaaaccaggaagaagttgaatct

SEQ ID NO: 79308 - DNA, 120 bp, synthetic construct
  source 1..120: mol_type = other DNA
ttttcatttgcttggtagattttcctccatccctttattttgagcctatgtgtgtctctgcacgtgagatgggtttcctgaatacagcacactgatgggtcttgactctttatccaattt

SEQ ID NO: 79309 - DNA, 120 bp, synthetic construct
  source 1..120: mol_type = other DNA
aggcttctgcattcttcacgtagttctcgagccttggttttcagctccatcagctcctttaagcacttctctgtattggttattctagttatacattcttcaaaattttttccaaagttt

SEQ ID NO: 79310 - DNA, 120 bp, synthetic construct
  source 1..120: mol_type = other DNA
aagcgcagtattctggtgggagtgacccaatcttccaggtgccgtctgtcacccctttctttgactaggaaagggaactccctgacccccgtgcttcccaagtgagacaatgcctcgccc

SEQ ID NO: 79311 - DNA, 120 bp, synthetic construct
  source 1..120: mol_type = other DNA
ctatatatatttcttttctttttatttatttatttttttgagatggggttctctgtcactcaggctggagtgcagtggcacaaacatggcttactgcagtctcaacctcctgggctcaag

SEQ ID NO: 79312 - DNA, 120 bp, synthetic construct
  source 1..120: mol_type = other DNA
caaaattagtaaaacaaaagctttatatgaaaaaacatagtataattctgaatgattttcatacaatcattatcaagcataagtgatactggatacctgaagctgacatgagggaaaaag

SEQ ID NO: 79313 - DNA, 120 bp, synthetic construct
  source 1..120: mol_type = other DNA
gaatcacttgaggccaggagttcaagatgagcctgagcaacgtagcgagagcctgtcactacaaaaaagtaaaaataaaaaaattagccaggcatgggtgcaagcctgtagtcccagcta

SEQ ID NO: 79314 - DNA, 120 bp, synthetic construct
  source 1..120: mol_type = other DNA
ggccgttgcatgacttttttgtgtgtgcttaactgctaaacaggagaatcttttcctgagcaaccagttgggaaggatttaatttgacattctccctactaggacccccccaaagagact

SEQ ID NO: 79315 - DNA, 120 bp, synthetic construct
  source 1..120: mol_type = other DNA
gaaagcatgatttcctcagattctaaaacaaatctggtttgatgaattcctattatgtgttaagaaatagaattagactatgtcaaaagcatttaagattccaaaaattatcaacacagt

SEQ ID NO: 79316 - DNA, 120 bp, synthetic construct
  source 1..120: mol_type = other DNA
ccatagaatctcgaatgaacccctattgtggcagttatgatgccttgtagtttggttgaaatgcttttgccttgcattagtctataaattccttaaatataaaatctttattgcttagta

SEQ ID NO: 79317 - DNA, 120 bp, synthetic construct; identical to SEQ ID NO: 1792
  source 1..120: mol_type = other DNA

SEQ ID NO: 79318 - DNA, 120 bp, synthetic construct; identical to SEQ ID NO: 1848
  source 1..120: mol_type = other DNA

SEQ ID NO: 79319 - DNA, 120 bp, synthetic construct; identical to SEQ ID NO: 79250
  source 1..120: mol_type = other DNA

SEQ ID NO: 79320 - DNA, 120 bp, synthetic construct
  source 1..120: mol_type = other DNA
tcagctccatcataatcttatgcagtctgactaaaacgctgttatgcagtgcatgactatacttatttttaaatcttaataaacatactctattttaaaactatttttatagcataaggt

SEQ ID NO: 79321 - DNA, 120 bp, synthetic construct
  source 1..120: mol_type = other DNA
tcctattactactaacagtggagattaagtatctcatgtttttgggcgttctagagcccaacacatcacctgttcctttccatactaccacaactgacactctctggaaagtgccacctc

SEQ ID NO: 79322 - DNA, 120 bp, synthetic construct
  source 1..120: mol_type = other DNA
ctttgctagagacctagatccaaatacaagaagcacaaagaacatctgggaaattcatcacaaaaagatcgtcatctaggcacattgtcgtcaggttatctgaagttaagatgaaagaaa

SEQ ID NO: 79323 - DNA, 120 bp, synthetic construct
  source 1..120: mol_type = other DNA
cccaatgatcattcaggagcaggttattccatgtatctgcatggttttgaaggttccttttggagttgatttccagttttattccactgtggtctgagaaagtgcttgatataattttaa

SEQ ID NO: 79324 - DNA, 120 bp, synthetic construct; identical to SEQ ID NO: 79255
  source 1..120: mol_type = other DNA

SEQ ID NO: 79325 - DNA, 120 bp, synthetic construct
  source 1..120: mol_type = other DNA
aaaatcaaaaaaatagtagatgttggcatggatgtggtgaacccagaacacttctacactgctggtgggaatgtaaactagtacaaccactatggaaaacagtgtggagattccttaaag

SEQ ID NO: 79326 - DNA, 120 bp, synthetic construct
  source 1..120: mol_type = other DNA
tggggtgtatgtttttataatgttatgcttagcccttgtgtattttcatctctgagtttgaaatttggggttatattggcaaagggaggtttgggttttaattaggtgacctgttagagg

SEQ ID NO: 79327 - DNA, 120 bp, synthetic construct
  source 1..120: mol_type = other DNA
tgtcacttgatacagaatctcctgtgggaaaagaatgtgagaaacaaggacaatcactgcatggaggtcataaggctgaaggtacagtttactgttgcagacttttggacaaagtccttt

SEQ ID NO: 79328 - DNA, 120 bp, synthetic construct
  source 1..120: mol_type = other DNA
tgactgaacattaatcagcctcagttcaaacttaaaagcagaaatagagcatcaatgttaatggattaattactgatattcacttaaaaaatacaaactcttaagctgagaaaattactt

SEQ ID NO: 79329 - DNA, 120 bp, synthetic construct; identical to SEQ ID NO: 32002
  source 1..120: mol_type = other DNA

SEQ ID NO: 79330 - DNA, 120 bp, synthetic construct; identical to SEQ ID NO: 1849
  source 1..120: mol_type = other DNA

SEQ ID NO: 79331 - DNA, 120 bp, synthetic construct; identical to SEQ ID NO: 1850
  source 1..120: mol_type = other DNA

SEQ ID NO: 79332 - DNA, 120 bp, synthetic construct
  source 1..120: mol_type = other DNA
ggcaagttcatggcggagcaggtgcttcagtcgcaggggatgtggcggccggatcacctggccccggcgggctgagctggaagcccgggatgaatgttgcaagaagcaggaacgctagtg

SEQ ID NO: 79333 - DNA, 120 bp, synthetic construct
  source 1..120: mol_type = other DNA
ggtctggggatgcaacaggcttgatggtcgctggagcaggtggcagtagctccacgcggtcggggacaaactctgcgcagcccctgtacccgctcccctgaccccttgcataatactctc

SEQ ID NO: 79334 - DNA, 120 bp, synthetic construct
  source 1..120: mol_type = other DNA
ttgcccttcttgacaaggtgagacataaatgtctactttagagacatgaattaagatgggaagatatttgggggaatcatttactcaaacgctaagtaataaaggtacacaaagggcaaa

SEQ ID NO: 79335 - DNA, 120 bp, synthetic construct
  source 1..120: mol_type = other DNA
tttagctccaaattacagatggctctagactaactccacaaagtttaaagagaagatttaaaacaacaacagacaaatacgcatcctgaagttactgaactgcctgccacaacactgttc

SEQ ID NO: 79336 - DNA, 120 bp, synthetic construct
  source 1..120: mol_type = other DNA
gttgcgttttttcttaagatagaaaagcaattcagataatctgaaatctccccaagaaggataagacgcacagcagaaactattctaggcaggaagtcaatcctttcaactgtctgtgct

SEQ ID NO: 79337 - DNA, 120 bp, synthetic construct
  source 1..120: mol_type = other DNA
aaaaaatgcgctctttgaaaagcagctgctaccttaattaattctttatattagacggctggttacagtaatgcacagtaaggtgctacatagatatattgctaaattatctgcatatac

SEQ ID NO: 79338 - DNA, 120 bp, synthetic construct
  source 1..120: mol_type = other DNA
tggtgcatgcctgtaatctcagctacttgggaggctgagctaggagaattacttgaccctgggaggctgaggttgcagtgggccaagattgtgccattgcactctagcctgggcaataaa

SEQ ID NO: 79339 - DNA, 120 bp, synthetic construct
  source 1..120: mol_type = other DNA
tcagctggggagtcaaggagtcagcctgctccgggctgacctgaagggccctgcctgacctaagcctggagaaagagcccgttccaaacctgccccacagatcctccccacagaccctcc

SEQ ID NO: 79340 - DNA, 120 bp, synthetic construct; identical to SEQ ID NO: 33580
  source 1..120: mol_type = other DNA

SEQ ID NO: 79341 - DNA, 120 bp, synthetic construct; identical to SEQ ID NO: 35532
  source 1..120: mol_type = other DNA

SEQ ID NO: 79342 - DNA, 120 bp, synthetic construct
  source 1..120: mol_type = other DNA
tgggacttcaggtcagcagagggaggaatcccaggatctgccggacccaaggtgtgcccccttcatgaggactggggatacccccggcccagaaagaagggatgccacagagtctggccg

SEQ ID NO: 79343 - DNA, 120 bp, synthetic construct; identical to SEQ ID NO: 27185
  source 1..120: mol_type = other DNA

SEQ ID NO: 79344 - DNA, 120 bp, synthetic construct
  source 1..120: mol_type = other DNA
aatgatcacaccaaccttgtctgcctagcactagaaaagcttgttgcttttgtttttacatgaggggccattctgggatttaaataaatctctcaagcttcaacagcctgtgctggttcc

SEQ ID NO: 79345 - DNA, 120 bp, synthetic construct; identical to SEQ ID NO: 35238
  source 1..120: mol_type = other DNA

SEQ ID NO: 79346 - DNA, 120 bp, synthetic construct
  source 1..120: mol_type = other DNA
accatcaggcggctgagttgacggttctctatgaggatgtggtcgttgtgagagaggcggtggagaagggagtggaccatgtccaggagcacgaagtgaatgcccgacgccgggtagcga

SEQ ID NO: 79347 - DNA, 120 bp, synthetic construct
  source 1..120: mol_type = other DNA
catgagccaccgtgccaggccgagctctaccttttctatgaggccttagtgtccaaggctacccctttaggtccacacaagtcctgcccttttaattttatgattattagcaacactata

SEQ ID NO: 79348 - DNA, 120 bp, synthetic construct
  source 1..120: mol_type = other DNA
agagtcttaccaaatggcggaaagtaatatctttcaatgaaggtatggtgggccaaaacaaagacgtaaaggagagatttgagttaagattacttattgaaaaatcttcccacgtttcag

SEQ ID NO: 79349 - DNA, 120 bp, synthetic construct; identical to SEQ ID NO: 53329
  source 1..120: mol_type = other DNA

SEQ ID NO: 79350 - DNA, 120 bp, synthetic construct
  source 1..120: mol_type = other DNA
cgatgatctcagatctcctatcaaatataggttggtagagggcgacaagttttctcaaaaccacagatgtcgttagagaattgggcttcgactcattgggacacattctgccttaagttt

SEQ ID NO: 79351 - DNA, 120 bp, synthetic construct
  source 1..120: mol_type = other DNA
gaataagagtctctctctttattgagggaataagagtctgtctcagacgacaccctaagatgggaagggcagggagcgaatcctagaaacctcccaccaaggctggcctgagaggactta

SEQ ID NO: 79352 - DNA, 120 bp, synthetic construct
  source 1..120: mol_type = other DNA
tcacctgaggtcagtagttcgagaccagcatgaccaatatggtaaaaccctgtctgtactaaaaatacaaaaaattagctgggtgtgggggtgtgcgcctatattcccagctactcaaga

SEQ ID NO: 79353 - DNA, 120 bp, synthetic construct; identical to SEQ ID NO: 35237
  source 1..120: mol_type = other DNA

SEQ ID NO: 79354 - DNA, 120 bp, synthetic construct
  source 1..120: mol_type = other DNA
gagaagcaggatagagttaagtaagaaaggaatagctgggcaccttcctactggttttcacaacagttccatggccctcacgttgctgctgcttgatcatttccacagggacactgtatt

SEQ ID NO: 79355 - DNA, 120 bp, synthetic construct; identical to SEQ ID NO: 79346
  source 1..120: mol_type = other DNA

SEQ ID NO: 79356 - DNA, 120 bp, synthetic construct; identical to SEQ ID NO: 79347
  source 1..120: mol_type = other DNA

SEQ ID NO: 79357 - DNA, 120 bp, synthetic construct; identical to SEQ ID NO: 53328
  source 1..120: mol_type = other DNA

SEQ ID NO: 79358 - DNA, 120 bp, synthetic construct; identical to SEQ ID NO: 53329
  source 1..120: mol_type = other DNA

SEQ ID NO: 79359 - DNA, 120 bp, synthetic construct; identical to SEQ ID NO: 79350
  source 1..120: mol_type = other DNA

SEQ ID NO: 79360 - DNA, 120 bp, synthetic construct; identical to SEQ ID NO: 79351
  source 1..120: mol_type = other DNA

SEQ ID NO: 79361 - DNA, 120 bp, synthetic construct; identical to SEQ ID NO: 79352
  source 1..120: mol_type = other DNA

SEQ ID NO: 79362 - DNA, 120 bp, synthetic construct; identical to SEQ ID NO: 35237
  source 1..120: mol_type = other DNA

SEQ ID NO: 79363 - DNA, 120 bp, synthetic construct; identical to SEQ ID NO: 79354
  source 1..120: mol_type = other DNA

SEQ ID NO: 79364 - DNA, 120 bp, synthetic construct; identical to SEQ ID NO: 79346
  source 1..120: mol_type = other DNA

SEQ ID NO: 79365 - DNA, 120 bp, synthetic construct; identical to SEQ ID NO: 79347
  source 1..120: mol_type = other DNA

SEQ ID NO: 79366 - DNA, 120 bp, synthetic construct; identical to SEQ ID NO: 79348
  source 1..120: mol_type = other DNA

SEQ ID NO: 79367 - DNA, 120 bp, synthetic construct; identical to SEQ ID NO: 53329
  source 1..120: mol_type = other DNA

SEQ ID NO: 79368 - DNA, 120 bp, synthetic construct; identical to SEQ ID NO: 79350
  source 1..120: mol_type = other DNA

SEQ ID NO: 79369 - DNA, 120 bp, synthetic construct
  source 1..120: mol_type = other DNA
aataagagtctttctctttattgaggaaataagagtctgtctcagaggacaccctaaggtgggaagggcagggagcgaatcctaggaacctcccaccaagtctggcctgagaggacttag

SEQ ID NO: 79370 - DNA, 120 bp, synthetic construct; identical to SEQ ID NO: 79352
  source 1..120: mol_type = other DNA

SEQ ID NO: 79371 - DNA, 120 bp, synthetic construct; identical to SEQ ID NO: 35237
  source 1..120: mol_type = other DNA

SEQ ID NO: 79372 - DNA, 120 bp, synthetic construct; identical to SEQ ID NO: 79354
  source 1..120: mol_type = other DNA

SEQ ID NO: 79373 - DNA, 120 bp, synthetic construct; identical to SEQ ID NO: 79346
  source 1..120: mol_type = other DNA

SEQ ID NO: 79374 - DNA, 120 bp, synthetic construct; identical to SEQ ID NO: 79347
  source 1..120: mol_type = other DNA

SEQ ID NO: 79375 - DNA, 120 bp, synthetic construct; identical to SEQ ID NO: 79348
  source 1..120: mol_type = other DNA

SEQ ID NO: 79376 - DNA, 120 bp, synthetic construct; identical to SEQ ID NO: 53329
  source 1..120: mol_type = other DNA

SEQ ID NO: 79377 - DNA, 120 bp, synthetic construct; identical to SEQ ID NO: 79350
  source 1..120: mol_type = other DNA

SEQ ID NO: 79378 - DNA, 120 bp, synthetic construct; identical to SEQ ID NO: 79351
  source 1..120: mol_type = other DNA

SEQ ID NO: 79379 - DNA, 120 bp, synthetic construct; identical to SEQ ID NO: 79352
  source 1..120: mol_type = other DNA

SEQ ID NO: 79380 - DNA, 120 bp, synthetic construct; identical to SEQ ID NO: 35237
  source 1..120: mol_type = other DNA

SEQ ID NO: 79381 - DNA, 120 bp, synthetic construct; identical to SEQ ID NO: 79354
  source 1..120: mol_type = other DNA

SEQ ID NO: 79382 - DNA, 120 bp, synthetic construct; identical to SEQ ID NO: 79346
  source 1..120: mol_type = other DNA

SEQ ID NO: 79383 - DNA, 120 bp, synthetic construct; identical to SEQ ID NO: 79347
  source 1..120: mol_type = other DNA

SEQ ID NO: 79384 - DNA, 120 bp, synthetic construct; identical to SEQ ID NO: 79348
  source 1..120: mol_type = other DNA

SEQ ID NO: 79385 - DNA, 120 bp, synthetic construct; identical to SEQ ID NO: 53329
  source 1..120: mol_type = other DNA

SEQ ID NO: 79386 - DNA, 120 bp, synthetic construct; identical to SEQ ID NO: 79350
  source 1..120: mol_type = other DNA

SEQ ID NO: 79387 - DNA, 120 bp, synthetic construct; identical to SEQ ID NO: 79351
  source 1..120: mol_type = other DNA

SEQ ID NO: 79388 - DNA, 120 bp, synthetic construct
  source 1..120: mol_type = other DNA
tcagtagttcgagaccagcatgaccaaaatggtaaaaccctgtctgtactaaaaatacaaaaaattagctggacatggtggtgcgcgcctgtagtcccagctactcggaagggtgaggca

SEQ ID NO: 79389 - DNA, 120 bp, synthetic construct; identical to SEQ ID NO: 35237
  source 1..120: mol_type = other DNA

SEQ ID NO: 79390 - DNA, 120 bp, synthetic construct; identical to SEQ ID NO: 79354
  source 1..120: mol_type = other DNA

SEQ ID NO: 79391 - DNA, 120 bp, synthetic construct
  source 1..120: mol_type = other DNA
gtcgttgtgatagaggcggcggagaagggagtggaccaggtacaggaacacgaagccaatgcccgccgccgggtaccgacgggtggccaccgccaagtcgaagttggccgcctcgttccc

SEQ ID NO: 79392 - DNA, 120 bp, synthetic construct; identical to SEQ ID NO: 79347
  source 1..120: mol_type = other DNA

SEQ ID NO: 79393 - DNA, 120 bp, synthetic construct; identical to SEQ ID NO: 79348
  source 1..120: mol_type = other DNA

SEQ ID NO: 79394 - DNA, 120 bp, synthetic construct; identical to SEQ ID NO: 53329
  source 1..120: mol_type = other DNA

SEQ ID NO: 79395 - DNA, 120 bp, synthetic construct; identical to SEQ ID NO: 79350
  source 1..120: mol_type = other DNA

SEQ ID NO: 79396 - DNA, 120 bp, synthetic construct; identical to SEQ ID NO: 79351
  source 1..120: mol_type = other DNA

SEQ ID NO: 79397 - DNA, 120 bp, synthetic construct; identical to SEQ ID NO: 79352
  source 1..120: mol_type = other DNA

SEQ ID NO: 79398 - DNA, 120 bp, synthetic construct; identical to SEQ ID NO: 27186
  source 1..120: mol_type = other DNA

SEQ ID NO: 79399 - DNA, 120 bp, synthetic construct; identical to SEQ ID NO: 35651
  source 1..120: mol_type = other DNA

SEQ ID NO: 79400 - DNA, 120 bp, synthetic construct; identical to SEQ ID NO: 35652
  source 1..120: mol_type = other DNA

SEQ ID NO: 79401 - DNA, 120 bp, synthetic construct; identical to SEQ ID NO: 35669
  source 1..120: mol_type = other DNA

SEQ ID NO: 79402 - DNA, 120 bp, synthetic construct; identical to SEQ ID NO: 35653
  source 1..120: mol_type = other DNA

SEQ ID NO: 79403 - DNA, 120 bp, synthetic construct; identical to SEQ ID NO: 35654
  source 1..120: mol_type = other DNA

SEQ ID NO: 79404 - DNA, 120 bp, synthetic construct; identical to SEQ ID NO: 35655
  source 1..120: mol_type = other DNA

SEQ ID NO: 79405 - DNA, 120 bp, synthetic construct; identical to SEQ ID NO: 35656
  source 1..120: mol_type = other DNA

SEQ ID NO: 79406 - DNA, 120 bp, synthetic construct
  source 1..120: mol_type = other DNA
tggtttcttgcagaacgaggtgaaggaggtggttctgctcagcagtcaacagtggccacatctccacctgcagcgacttgatggcttccgtgtccttttcgtgggtagccatgaccaaag

SEQ ID NO: 79407 - DNA, 120 bp, synthetic construct
  source 1..120: mol_type = other DNA
aaaaaaaaaaaaaatccctattacaaataaaagctgttgtgatccagactgcatatacctctgcgaatggaaccagaaccgtgaattccaatgcaaatcgatgcatcggcaccagacccg

SEQ ID NO: 79408 - DNA, 120 bp, synthetic construct; identical to SEQ ID NO: 35657
  source 1..120: mol_type = other DNA

SEQ ID NO: 79409 - DNA, 120 bp, synthetic construct; identical to SEQ ID NO: 35658
  source 1..120: mol_type = other DNA

SEQ ID NO: 79410 - DNA, 120 bp, synthetic construct
  source 1..120: mol_type = other DNA
gtgtggggattacaggcgtgagccaccgcgcccggcctcaacttcacattttcaaaaatatgtgtagcattgaaatcacatctgttgcattcaaaatatgctcacttagaggctaatata

SEQ ID NO: 79411 - DNA, 120 bp, synthetic construct; identical to SEQ ID NO: 17711
  source 1..120: mol_type = other DNA

SEQ ID NO: 79412 - DNA, 120 bp, synthetic construct; identical to SEQ ID NO: 17712
  source 1..120: mol_type = other DNA

SEQ ID NO: 79413 - DNA, 120 bp, synthetic construct; identical to SEQ ID NO: 17713
  source 1..120: mol_type = other DNA

SEQ ID NO: 79414 - DNA, 120 bp, synthetic construct; identical to SEQ ID NO: 17714
  source 1..120: mol_type = other DNA

SEQ ID NO: 79415 - DNA, 120 bp, synthetic construct
  source 1..120: mol_type = other DNA
ctcctttattgcaacctgttttttcagcaaggtctttatgacctgtattttgtgccgacctcacatctcatcctgtgatttagaatgccctgtctgggaatgcagcccagtaggtttcag

SEQ ID NO: 79416 - DNA, 120 bp, synthetic construct
  source 1..120: mol_type = other DNA
ctcatttattttgcagaggaaggaactgaagcttgaagccttttttttttttttttttttttttgtgacagcatctcacactgtcgcccaggctagagtgcagtggcacgatctcggctc

SEQ ID NO: 79417 - DNA, 120 bp, synthetic construct; identical to SEQ ID NO: 24505
  source 1..120: mol_type = other DNA

SEQ ID NO: 79418 - DNA, 120 bp, synthetic construct; identical to SEQ ID NO: 24506
  source 1..120: mol_type = other DNA

SEQ ID NO: 79419 - DNA, 120 bp, synthetic construct; identical to SEQ ID NO: 11995
  source 1..120: mol_type = other DNA

SEQ ID NO: 79420 - DNA, 120 bp, synthetic construct
  source 1..120: mol_type = other DNA
tggatggatggatggatggacaggtggatgcatggattgatgcatatatggatggatggatggatggttggatggatggataattggatggatggatagacaggtggatgcatggatgga

SEQ ID NO: 79421 - DNA, 120 bp, synthetic construct
  source 1..120: mol_type = other DNA
gaatggatggatggatggatgaatggatggatagatggatggatggagggatggttgaatggatggatggatggatgaatggatggatggatggacaggtggatgtatggattgatgcat

SEQ ID NO: 79422 - DNA, 120 bp, synthetic construct; identical to SEQ ID NO: 32297
  source 1..120: mol_type = other DNA

SEQ ID NO: 79423 - DNA, 120 bp, synthetic construct
  source 1..120: mol_type = other DNA
gttcttagaacgaagggatatgtttattgaaatcagtaattaagaatattttgggacagttatgatttacttagccagtgaagcagtttctattcccaaatccaggcaaagagaacaata

SEQ ID NO: 79424 - DNA, 120 bp, synthetic construct; identical to SEQ ID NO: 32298
  source 1..120: mol_type = other DNA

SEQ ID NO: 79425 - DNA, 120 bp, synthetic construct
  source 1..120: mol_type = other DNA
tgctcctggtctgccaggcaccggatcctcctttagcactcccagcactcactgaagaagacactatggaattctccgttttccagactagaaataagtaactcggagaaattaagaaac

SEQ ID NO: 79426 - DNA, 120 bp, synthetic construct
  source 1..120: mol_type = other DNA
cgaccttcattcatttattgtcaacaaacgtcctgggagagcggctacagccggccgctgaacccagaagggactttctctaggctttcttggcaccctcccaattatcttccttctctt

SEQ ID NO: 79427 - DNA, 120 bp, synthetic construct; identical to SEQ ID NO: 79265
  source 1..120: mol_type = other DNA

SEQ ID NO: 79428 - DNA, 120 bp, synthetic construct
  source 1..120: mol_type = other DNA
gagcgggtacaggggctgcgcagagtttgtccccgaccgcgtggagctactgccccctgctccagcgaccgtcaagcctgtcggacaattttgcagcaacagcagcagcatcaggaggag

SEQ ID NO: 79429 - DNA, 120 bp, synthetic construct; identical to SEQ ID NO: 32299
  source 1..120: mol_type = other DNA

SEQ ID NO: 79430 - DNA, 120 bp, synthetic construct; identical to SEQ ID NO: 1850
  source 1..120: mol_type = other DNA

SEQ ID NO: 79431 - DNA, 120 bp, synthetic construct; identical to SEQ ID NO: 32300
  source 1..120: mol_type = other DNA

SEQ ID NO: 79432 - DNA, 120 bp, synthetic construct; identical to SEQ ID NO: 32002
  source 1..120: mol_type = other DNA

SEQ ID NO: 79433 - DNA, 120 bp, synthetic construct; identical to SEQ ID NO: 32301
  source 1..120: mol_type = other DNA

SEQ ID NO: 79434 - DNA, 120 bp, synthetic construct; identical to SEQ ID NO: 32302
  source 1..120: mol_type = other DNA

SEQ ID NO: 79435 - DNA, 120 bp, synthetic construct; identical to SEQ ID NO: 32303
  source 1..120: mol_type = other DNA

SEQ ID NO: 79436 - DNA, 120 bp, synthetic construct
  source 1..120: mol_type = other DNA
gttccacgtttttgcaattgcgaattgtgctgctataaacatgcgtgtgcacgtatcttttttgtataatgacttcttttcctctgggtggatatctagtagtgggattgctggaccaaa

SEQ ID NO: 79437 - DNA, 120 bp, synthetic construct; identical to SEQ ID NO: 79255
  source 1..120: mol_type = other DNA

SEQ ID NO: 79438 - DNA, 120 bp, synthetic construct
  source 1..120: mol_type = other DNA
tgcatggaatattctgtatatatcttttaactccatttgttccaaggtatagtttaaatccactgtttctttgttgactttctgtcttgatgacctgtccagtgctgtcagtggagtatt

SEQ ID NO: 79439 - DNA, 120 bp, synthetic construct
  source 1..120: mol_type = other DNA
tctaattaaccgaatccaataaagacaaagaaaaaagaataagaaaatatgaagaaagccttcaagaaatctggaattatgttaaatgaccaaacctaagaataaccggcattcctgagg

SEQ ID NO: 79440 - DNA, 120 bp, synthetic construct
  source 1..120: mol_type = other DNA
ataagtagttttaaaagtctcacatttgcaagttcaatttgaatctttttttagtctgcttgtacttctcttatcaagcaagaaagcacttttccgcttttcctattactactaacagtg

SEQ ID NO: 79441 - DNA, 120 bp, synthetic construct
  source 1..120: mol_type = other DNA
gccaggcatggtggcatgtacctgtaatcccagctactcgagaggctgaagtgggaggattgctttagcttgggagttcaaagctgcagtaagccatgattgtgccactctactccagcc

SEQ ID NO: 79442 - DNA, 120 bp, synthetic construct; identical to SEQ ID NO: 32304
  source 1..120: mol_type = other DNA

SEQ ID NO: 79443 - DNA, 120 bp, synthetic construct
  source 1..120: mol_type = other DNA
ctgcactccagcctgggtgagactccagccagagcgagactccgtctcagaaaaaaccaaaaaaacaaaaacaaaaacaaaacccaaacattgaattgtacactaaaattacacatttac

SEQ ID NO: 79444 - DNA, 120 bp, synthetic construct; identical to SEQ ID NO: 32305
  source 1..120: mol_type = other DNA

SEQ ID NO: 79445 - DNA, 120 bp, synthetic construct
  source 1..120: mol_type = other DNA
gcagcctgggggttctataggcagtctgtttttaagtatgttgaattgtttaaggaaaggtctgatataagcatggcttatttaaataaaaattgacttggagtttcaccttcaggtagc

SEQ ID NO: 79446 - DNA, 120 bp, synthetic construct; identical to SEQ ID NO: 32007
  source 1..120: mol_type = other DNA

SEQ ID NO: 79447 - DNA, 120 bp, synthetic construct
  source 1..120: mol_type = other DNA
tccctttacatattgtatcctttagtgctttatttcactaataagaattatagtatgcaatcatttcccacctctatattcagtatatcaatttttgtttttcctttctacttctgtctt

SEQ ID NO: 79448 - DNA, 120 bp, synthetic construct
  source 1..120: mol_type = other DNA
cctctcgatgatccttttcttctttttacttcaaggttccagcccttcatttgactatcagtgctgttcactagttagccatgatccctttcatcctccgtgtctggattagaactgtat

SEQ ID NO: 79449 - DNA, 120 bp, synthetic construct
  source 1..120: mol_type = other DNA
gaaaaaaaaactagttgaaagtagaattagtttttaagggcatggctaagccaaaattagaaatatatttataaggctgggtgtggtggcctacacatgtaatcccagcactttgggagg

SEQ ID NO: 79450 - DNA, 120 bp, synthetic construct
  source 1..120: mol_type = other DNA
aggaacagctccggtctacagctcccagcgtgagagacgcagaagacaggcgatttctacatttccatctgaggtaccgggttcatctcactaggtagtgccggacagtgggcgcaggtc

SEQ ID NO: 79451 - DNA, 120 bp, synthetic construct
  source 1..120: mol_type = other DNA
gcttggagtaatttgatcgtctgaagccttcttctctcagctcgtcaaagtcattctccgtccagctttgttccgttgctggtgaggagctgcgtttctttggaggaggagaggcgctgc

SEQ ID NO: 79452 - DNA, 120 bp, synthetic construct
  source 1..120: mol_type = other DNA
cgtgagatgggtttcctgaatacagcacactgatgggtcttgactctttatccaatttgccagtctgtgtcttttaattggagcatttagtccatttacatttaaagttaatatcgttac

SEQ ID NO: 79453 - DNA, 120 bp, synthetic construct
  source 1..120: mol_type = other DNA
aggggatatcaccaccgatcccacagaaatacaaactaccatcagagaatactaaaaacacctctacgcaaataaactagaaaatctagaagaaatggataaattccttgacacataccc

SEQ ID NO: 79454 - DNA, 120 bp, synthetic construct
  source 1..120: mol_type = other DNA
tggtgtataagaatgcttgtgatttttgtacactgattttgtatcctgagactttgctgaagttgcttatcagcttaaggagattttgggctgagacgatggggttttctagatatacaa

SEQ ID NO: 79455 - DNA, 120 bp, synthetic construct
  source 1..120: mol_type = other DNA
agacacttctcaaaagaagacatttatgccaccaaaaaacacatgaaaaaatgctcaccatctctggccatcagagaaatgcaaatcaaaaccacaatgagatactatctcacaccagtt

SEQ ID NO: 79456 - DNA, 120 bp, synthetic construct
  source 1..120: mol_type = other DNA
catagttaacaggaatgatttgcacaattgcatccatgatttaagcttcctgccattcctttggcatacaagaccatacttaatgaggtatattcttggaagttttactaactggttgtt

SEQ ID NO: 79457 - DNA, 120 bp, synthetic construct
  source 1..120: mol_type = other DNA
gcaaatttataaagactggtgattgagttataattttaacataagcccagaaaatcacagaggacaggctgggcgcggtggctcacgcctgcaatcccagcactttgggaggccgaggcg

SEQ ID NO: 79458 - DNA, 120 bp, synthetic construct
  source 1..120: mol_type = other DNA
ttgagacagaatctcactctgtcccccaagttggagtgcggtggtgcgatctcggctcactgaaacctctgcctcctgggttcaagcgattctcctgcttcaccctccgggtagctggga

SEQ ID NO: 79459 - DNA, 120 bp, synthetic construct; identical to SEQ ID NO: 79232
  source 1..120: mol_type = other DNA

SEQ ID NO: 79460 - DNA, 120 bp, synthetic construct
  source 1..120: mol_type = other DNA
aaaaacaaaaaataaaacaaaacttctataagagtgactttgactattttgttaaccatatctccgggttttttgtttgtttgtttgttttttttttgagacagagtctcgctctgtcac

SEQ ID NO: 79461 - DNA, 120 bp, synthetic construct; identical to SEQ ID NO: 32306
  source 1..120: mol_type = other DNA

SEQ ID NO: 79462 - DNA, 120 bp, synthetic construct; identical to SEQ ID NO: 21350
  source 1..120: mol_type = other DNA

SEQ ID NO: 79463 - DNA, 120 bp, synthetic construct; identical to SEQ ID NO: 32307
  source 1..120: mol_type = other DNA

SEQ ID NO: 79464 - DNA, 120 bp, synthetic construct; identical to SEQ ID NO: 32308
  source 1..120: mol_type = other DNA

SEQ ID NO: 79465 - DNA, 120 bp, synthetic construct; identical to SEQ ID NO: 32309
  source 1..120: mol_type = other DNA

SEQ ID NO: 79466 - DNA, 120 bp, synthetic construct
  source 1..120: mol_type = other DNA
tcccagcactttgggaggccgaggcgggtggatcacctgaggtcaggagctcgagaccaggctggccaacatggtgaaaccccatctctactaaaataaaataaaataaaataaataaaa

SEQ ID NO: 79467 - DNA, 120 bp, synthetic construct; identical to SEQ ID NO: 32310
  source 1..120: mol_type = other DNA

SEQ ID NO: 79468 - DNA, 120 bp, synthetic construct; identical to SEQ ID NO: 32311
  source 1..120: mol_type = other DNA

SEQ ID NO: 79469 - DNA, 120 bp, synthetic construct
  source 1..120: mol_type = other DNA
cagggctgatatctaaagaaaataaatgttaagatgcacttatttttttaaatatttgtatagctttcctatgggcatagaagaggacatttatctcttctgctataattgtatatgatt

SEQ ID NO: 79470 - DNA, 120 bp, synthetic construct
  source 1..120: mol_type = other DNA
gcacaatctgttgaaacaattcagtcagaaaacagttagcttggaaaaggccagaacaataaatagactgacattatgcaataattttttaaaaactaaaatagtgttacatctgtaacc

SEQ ID NO: 79471 - DNA, 120 bp, synthetic construct; identical to SEQ ID NO: 1141
  source 1..120: mol_type = other DNA

SEQ ID NO: 79472 - DNA, 120 bp, synthetic construct
  source 1..120: mol_type = other DNA
ggatgtcttttacacttcatcttagccaaaagaccaagaagcgatgcaagatgccttttaatggagagggtcttcttactaatcctatgtgtatatcctgattttcttcaatatgtactt

SEQ ID NO: 79473 - DNA, 120 bp, synthetic construct
  source 1..120: mol_type = other DNA
ttttcttaagatttaaattattgcctaaagaatgagacatcttaaggtatcattcctaacatctctcaccaaatccaaatccaactcataaatgttctacataacatatgcctaagtttc

SEQ ID NO: 79474 - DNA, 120 bp, synthetic construct
  source 1..120: mol_type = other DNA
ccagtcaggccaacatggcaaaaccccgtctctactaaaaatccaaaaattagccaggtacgatggtgcacgcctgtagtcccagctactcgggaggctgaggcaggagaatcacttgaa

SEQ ID NO: 79475 - DNA, 120 bp, synthetic construct
  source 1..120: mol_type = other DNA
actcattcttttagacagccctgtcactaactgggcctgtgatgctttcaaaaatcaaatactttccttgctgtcagttttctttttcttgcgttgtggcatactaatcagggtatgtgg

SEQ ID NO: 79476 - DNA, 120 bp, synthetic construct; identical to SEQ ID NO: 32312
  source 1..120: mol_type = other DNA

SEQ ID NO: 79477 - DNA, 120 bp, synthetic construct; identical to SEQ ID NO: 32541
  source 1..120: mol_type = other DNA

SEQ ID NO: 79478 - DNA, 120 bp, synthetic construct
  source 1..120: mol_type = other DNA
atgttttaatagttttggtgctcattaccagtactgttgcttctccattcccgagttagtccatctcctgattgaatttcattgtcaggcagtcttttcaagttacaggtactgcatgca

SEQ ID NO: 79479 - DNA, 120 bp, synthetic construct; identical to SEQ ID NO: 32313
  source 1..120: mol_type = other DNA

SEQ ID NO: 79480 - DNA, 120 bp, synthetic construct
  source 1..120: mol_type = other DNA
taaaaaatgctaacaatcatctcagctttcagcaagtcataatctttttgctggtagagggtcttgtcacaatgttgatgggtgctgaccaatcagggtagtagttactgaaggttgggg

SEQ ID NO: 79481 - DNA, 120 bp, synthetic construct
  source 1..120: mol_type = other DNA
gggcatggtggctcatgtctgtaatcccagcactttgggaggctgaggcaggtggatcccttgaggccaggagttcaagaccagcctagccaacatggtgaaatccagtctctactgaaa

SEQ ID NO: 79482 - DNA, 120 bp, synthetic construct
  source 1..120: mol_type = other DNA
aatacaatgtaagtgctgtgtaagtagttattatactgcattgataaggtaatcatgacaagaaactctaaactctactatggaaagctacacagagtcaacctgtttctcacaatgggt

SEQ ID NO: 79483 - DNA, 120 bp, synthetic construct
  source 1..120: mol_type = other DNA
tccttcacttttgataaaataagaaaaaaggaaattaaaaccttgcatcctaatgtaaaatagaattatatggtgtttaatatcagtgtccctttagctattatattaaactactatagt

SEQ ID NO: 79484 - DNA, 120 bp, synthetic construct
  source 1..120: mol_type = other DNA
atgaaaagaaaaagataaggcagtctcttaagaggttgaagggcatacagaatccagtatataaaacatactagtcgatttagaaagtttaccctggacaagaaaaaaatgccttcatta

SEQ ID NO: 79485 - DNA, 120 bp, synthetic construct; identical to SEQ ID NO: 32314
  source 1..120: mol_type = other DNA

SEQ ID NO: 79486 - DNA, 120 bp, synthetic construct; identical to SEQ ID NO: 32021
  source 1..120: mol_type = other DNA

SEQ ID NO: 79487 - DNA, 120 bp, synthetic construct; identical to SEQ ID NO: 32315
  source 1..120: mol_type = other DNA

SEQ ID NO: 79488 - DNA, 120 bp, synthetic construct; identical to SEQ ID NO: 32022
  source 1..120: mol_type = other DNA

SEQ ID NO: 79489 - DNA, 120 bp, synthetic construct
  source 1..120: mol_type = other DNA
cttcctgacgctcatctacctcacctgaaaatggaaaaatacctgtcacctgtgaaatagggccggaacaacctacctattgccattaaaggatgtcccgtctgtaaaatgtccgacacg

SEQ ID NO: 79490 - DNA, 120 bp, synthetic construct
  source 1..120: mol_type = other DNA
cttttatgttaggaatgaggtcaaaggagttcactataaatttatattagaaagaagggctatctatggattagtgatgagagtgtcatgcaccagcaaatatgattaatgaacttaggt

SEQ ID NO: 79491 - DNA, 120 bp, synthetic construct; identical to SEQ ID NO: 32316
  source 1..120: mol_type = other DNA

SEQ ID NO: 79492 - DNA, 120 bp, synthetic construct
  source 1..120: mol_type = other DNA
ctcctgggaaccattaatgtactttctgtctctatagatttgcctattttggttattttatataaatggaatcatacaacatgtggtcttttgtgaatagcttttttcacttaccataat

SEQ ID NO: 79493 - DNA, 120 bp, synthetic construct
  source 1..120: mol_type = other DNA
ctattttgtctcatttactttacggtaaaacaacaacaacaacaatagtaatgtgtggagcccgtaagcatctgataggcactgtgtgaagcacattaaatgcattatcccatttaactc

SEQ ID NO: 79494 - DNA, 120 bp, synthetic construct; identical to SEQ ID NO: 79197
  source 1..120: mol_type = other DNA

SEQ ID NO: 79495 - DNA, 120 bp, synthetic construct
  source 1..120: mol_type = other DNA
gggaattagtagggaattgtgccaaaggacatatggcaaggttattgtcagaaagctgagctgctgaaatccagacagtttaagagcttatctgctctgctctgctccacctaggaggac

SEQ ID NO: 79496 - DNA, 120 bp, synthetic construct; identical to SEQ ID NO: 27548
  source 1..120: mol_type = other DNA

SEQ ID NO: 79497 - DNA, 120 bp, synthetic construct
  source 1..120: mol_type = other DNA
ctccctgaacattaggaacaatatcacaggtgggtgtacacccactgaggtattagggcatactattagtatgaattattccttgttttttattaacatgaatatgaatggccgatatta

SEQ ID NO: 79498 - DNA, 120 bp, synthetic construct; identical to SEQ ID NO: 31190
  source 1..120: mol_type = other DNA

SEQ ID NO: 79499 - DNA, 120 bp, synthetic construct
  source 1..120: mol_type = other DNA
aatcccgccaaccgcatctcacgcacgctaacacgtggggagcgttgcttgcaccacgagtccccatttggctcaaccgccgatgccaagtgtgtggttccagttgcgacggccccccgt

SEQ ID NO: 79500 - DNA, 120 bp, synthetic construct
  source 1..120: mol_type = other DNA
attacagcctcacaggcgtccgggagtcgcaagacgagctgaaaaaggaggcaggcactgaaggacaaagcgttgttgactttcctcatctgtgtttcccagtgcggtccaattcacggt

SEQ ID NO: 79501 - DNA, 120 bp, synthetic construct
  source 1..120: mol_type = other DNA
actttggaaaaaagggtggttggcccttgagccgtgtaagacgtcgatacgatatggcacttcttccccgtttgttcagatgaattcgtgtggtatgcgtaaaataccaggaaaataaat

SEQ ID NO: 79502 - DNA, 120 bp, synthetic construct
  source 1..120: mol_type = other DNA
acgatgttccctcgcaaagcccatgtgacggaggaactctgaaaggaaggactcaaggttccaaggggcacgatggtgaagccgatgtcaacaacgcagccaaacgtggctacacaggac

SEQ ID NO: 79503 - DNA, 120 bp, synthetic construct
  source 1..120: mol_type = other DNA
tctgattatctgagggcgagtgtcaccccgggcccctggtctttttctcctctaggtcaccctggttgatttcctttcagcttcccgtctgcgggaggaaatcggggaacccctctttct

SEQ ID NO: 79504 - DNA, 120 bp, synthetic construct
  source 1..120: mol_type = other DNA
caggccgccagaccccaggcacaagacaaacgtcctgcggtgacctcacagccctgcccgccagccgccacacacagcttgggcctaggctccaatctcagcttcgggccaggagccaag

SEQ ID NO: 79505 - DNA, 120 bp, synthetic construct
  source 1..120: mol_type = other DNA
gtgcagcccttcctctgtgccccgccctgagagcagagtttcggacgctgggaagcgtgctgtgtgaagcgctctcggggtctttcctcagcctcgaaaactgggctctggaatgccttt

SEQ ID NO: 79506 - DNA, 120 bp, synthetic construct
  source 1..120: mol_type = other DNA
cgggctgggggacagtcaggtctttcccatcccacgaggccatatttcagactgtcacatggggagaaaccttggacaataccctgctttcaagggcagaggtccctgtggctttccacg

SEQ ID NO: 79507 - DNA, 120 bp, synthetic construct
  source 1..120: mol_type = other DNA
ctggctgctccctctccgccgctgttgagggtcgttatcttgattatccagatcacctagaaagtatccgtatccagaatgaataagatcaactctctgctcctctgacagcagagggag

SEQ ID NO: 79508 - DNA, 120 bp, synthetic construct
  source 1..120: mol_type = other DNA
agacaaaatgtggtccaattaaaaggtgtctattttaccacattttttaaaacaaaacaaaacaaaacaacagaaaagatggaaaagaagacaggggtacaggcaccagtgttacatgtc

SEQ ID NO: 79509 - DNA, 120 bp, synthetic construct
  source 1..120: mol_type = other DNA
gtcttcgatcattctgtccgtcaagggagatagaatcaccgtgtcttctaccggagtgaaccgtgagagacctaagtccagtctccagaatcagttgtttgtttggggttgaaagctcaa

SEQ ID NO: 79510 - DNA, 120 bp, synthetic construct
  source 1..120: mol_type = other DNA
accttgagtccttcctttcagagttcctccgtcccatgggctttgcgagggaacatcgtacccgaactctcccggcacttaacggcccccatgccggtgtcccctctttggaatccttat

SEQ ID NO: 79511 - DNA, 120 bp, synthetic construct
  source 1..120: mol_type = other DNA
cacatgttttccgggaaacctccagagaagccgctgccgaatggaaaaggatccacggagtcttctgatcatctgagggtgagtgtcaccccgggcccctggtccttttctcctctaggt

SEQ ID NO: 79512 - DNA, 120 bp, synthetic construct
  source 1..120: mol_type = other DNA
gacatgcctcagcctgcagtcaggcaccagggccgcgagcctctcctcgtggtgaagccgacacacagcagccccgagggtggctgccgagaagttccccaggctgcctccaaaacccac

SEQ ID NO: 79513 - DNA, 120 bp, synthetic construct
  source 1..120: mol_type = other DNA
ggcgtggttctccggaaacgcgccaggaaaagcttccgtgccagagattcgttgcctcagaaactgcgtgacgcgcaggagtcagacttccgctgggacgtcaataggaaactggggaat

SEQ ID NO: 79514 - DNA, 120 bp, synthetic construct
  source 1..120: mol_type = other DNA
tttgactaatccacctcagcacagacccattgcgggtgtcaggctgggggacagtccggtcttttccatcccacgaggccatatttcagactgtcacatggggagaaaccttggacaata

SEQ ID NO: 79515 - DNA, 120 bp, synthetic construct
  source 1..120: mol_type = other DNA
ttacggtcctgctccttctgctgtcagaggagcagagagttgatcttattcattctggatacggatactttctagttgatctggataatcaagataacgaccctcaacagcggcggagag

SEQ ID NO: 79516 - DNA, 120 bp, synthetic construct; identical to SEQ ID NO: 79508
  source 1..120: mol_type = other DNA

SEQ ID NO: 79517 - DNA, 120 bp, synthetic construct; identical to SEQ ID NO: 79509
  source 1..120: mol_type = other DNA

SEQ ID NO: 79518 - DNA, 120 bp, synthetic construct; identical to SEQ ID NO: 79510
  source 1..120: mol_type = other DNA

SEQ ID NO: 79519 - DNA, 120 bp, synthetic construct; identical to SEQ ID NO: 79511
  source 1..120: mol_type = other DNA

SEQ ID NO: 79520 - DNA, 120 bp, synthetic construct
  source 1..120: mol_type = other DNA
agaaaagccagcctgagctcctcctcaagtcttggaccaaaggaaagacagacaggggctgcggccgacatccctcagcctgcattcaggcaccagggccccgagcctctcctcgtggtg

SEQ ID NO: 79521 - DNA, 120 bp, synthetic construct; identical to SEQ ID NO: 79513
  source 1..120: mol_type = other DNA

SEQ ID NO: 79522 - DNA, 120 bp, synthetic construct; identical to SEQ ID NO: 79514
  source 1..120: mol_type = other DNA

SEQ ID NO: 79523 - DNA, 120 bp, synthetic construct; identical to SEQ ID NO: 79515
  source 1..120: mol_type = other DNA

SEQ ID NO: 79524 - DNA, 120 bp, synthetic construct; identical to SEQ ID NO: 79508
  source 1..120: mol_type = other DNA

SEQ ID NO: 79525 - DNA, 120 bp, synthetic construct; identical to SEQ ID NO: 79509
  source 1..120: mol_type = other DNA

SEQ ID NO: 79526 - DNA, 120 bp, synthetic construct; identical to SEQ ID NO: 79510
  source 1..120: mol_type = other DNA

SEQ ID NO: 79527 - DNA, 120 bp, synthetic construct; identical to SEQ ID NO: 79511
  source 1..120: mol_type = other DNA

SEQ ID NO: 79528 - DNA, 120 bp, synthetic construct; identical to SEQ ID NO: 79520
  source 1..120: mol_type = other DNA

SEQ ID NO: 79529 - DNA, 120 bp, synthetic construct; identical to SEQ ID NO: 79513
  source 1..120: mol_type = other DNA

SEQ ID NO: 79530 - DNA, 120 bp, synthetic construct; identical to SEQ ID NO: 79514
  source 1..120: mol_type = other DNA

SEQ ID NO: 79531 - DNA, 120 bp, synthetic construct
  source 1..120: mol_type = other DNA
ttgatcttattcattctggatacggatactttctaggtgatctggataatcaagataacgaccctcaacagcggcggaaagggagcagccagttggtgtgtctcagaaaatcccgctgag

SEQ ID NO: 79532 - DNA, 120 bp, synthetic construct; identical to SEQ ID NO: 79508
  source 1..120: mol_type = other DNA

SEQ ID NO: 79533 - DNA, 120 bp, synthetic construct; identical to SEQ ID NO: 79509
  source 1..120: mol_type = other DNA

SEQ ID NO: 79534 - DNA, 120 bp, synthetic construct; identical to SEQ ID NO: 79510
  source 1..120: mol_type = other DNA

SEQ ID NO: 79535 - DNA, 120 bp, synthetic construct; identical to SEQ ID NO: 79511
  source 1..120: mol_type = other DNA

SEQ ID NO: 79536 - DNA, 120 bp, synthetic construct; identical to SEQ ID NO: 79520
  source 1..120: mol_type = other DNA

SEQ ID NO: 79537 - DNA, 120 bp, synthetic construct; identical to SEQ ID NO: 79513
  source 1..120: mol_type = other DNA

SEQ ID NO: 79538 - DNA, 120 bp, synthetic construct; identical to SEQ ID NO: 79514
  source 1..120: mol_type = other DNA

SEQ ID NO: 79539 - DNA, 120 bp, synthetic construct; identical to SEQ ID NO: 79515
  source 1..120: mol_type = other DNA

SEQ ID NO: 79540 - DNA, 120 bp, synthetic construct; identical to SEQ ID NO: 79508
  source 1..120: mol_type = other DNA

SEQ ID NO: 79541 - DNA, 120 bp, synthetic construct
  source 1..120: mol_type = other DNA
tctgtatgaatttgtgtttggaagttgcctaatgaaatggcaagagtagcgattcaagttatcacaggaagcatcccttatccgtgacttcaagcagacctgccaaagggtggcacacgc

SEQ ID NO: 79542 - DNA, 120 bp, synthetic construct; identical to SEQ ID NO: 79510
  source 1..120: mol_type = other DNA

SEQ ID NO: 79543 - DNA, 120 bp, synthetic construct; identical to SEQ ID NO: 79511
  source 1..120: mol_type = other DNA

SEQ ID NO: 79544 - DNA, 120 bp, synthetic construct; identical to SEQ ID NO: 79512
  source 1..120: mol_type = other DNA

SEQ ID NO: 79545 - DNA, 120 bp, synthetic construct; identical to SEQ ID NO: 79513
  source 1..120: mol_type = other DNA

SEQ ID NO: 79546 - DNA, 120 bp, synthetic construct; identical to SEQ ID NO: 79514
  source 1..120: mol_type = other DNA

SEQ ID NO: 79547 - DNA, 120 bp, synthetic construct; identical to SEQ ID NO: 79531
  source 1..120: mol_type = other DNA

SEQ ID NO: 79548 - DNA, 120 bp, synthetic construct; identical to SEQ ID NO: 79508
  source 1..120: mol_type = other DNA

SEQ ID NO: 79549 - DNA, 120 bp, synthetic construct; identical to SEQ ID NO: 79509
  source 1..120: mol_type = other DNA

SEQ ID NO: 79550 - DNA, 120 bp, synthetic construct; identical to SEQ ID NO: 79510
  source 1..120: mol_type = other DNA

SEQ ID NO: 79551 - DNA, 120 bp, synthetic construct; identical to SEQ ID NO: 79511
  source 1..120: mol_type = other DNA

SEQ ID NO: 79552 - DNA, 120 bp, synthetic construct; identical to SEQ ID NO: 79512
  source 1..120: mol_type = other DNA

SEQ ID NO: 79553 - DNA, 120 bp, synthetic construct; identical to SEQ ID NO: 79513
  source 1..120: mol_type = other DNA

SEQ ID NO: 79554 - DNA, 120 bp, synthetic construct
  source 1..120: mol_type = other DNA
gtgtcaggctaggggacattcaggactttcccatcccacgaggccatatttcagactgtcacatggggagaaaccttggacaataccctgctttcaagggcagaggtccctgtggctttc

SEQ ID NO: 79555 - DNA, 120 bp, synthetic construct; identical to SEQ ID NO: 79531
  source 1..120: mol_type = other DNA

SEQ ID NO: 79556 - DNA, 120 bp, synthetic construct
  source 1..120: mol_type = other DNA
gaaggggcagagagggacctccgctttccaggctgccttttatactgcctctggtcacctgacatggaacgtaccctaacctaatcagttacctgtaccttaattgcaattaacttaatc

SEQ ID NO: 79557 - DNA, 120 bp, synthetic construct
  source 1..120: mol_type = other DNA
gaggatgcgcacagcacattgtgttctacagatttgaccgactggtggtgaggtctcctcatgaccacacaggcagggagttagcaggtggcttcctgtgggtgtgtgaatatccaacgt

SEQ ID NO: 79558 - DNA, 120 bp, synthetic construct
  source 1..120: mol_type = other DNA
acggaaaggcacacggtgtgcaggtgcagagacaccatctccttaggaggcagcaccctaagagtggtgaaaccctcccactgctcaccttggtctctcttccttctctcccttatcctt

SEQ ID NO: 79559 - DNA, 120 bp, synthetic construct
  source 1..120: mol_type = other DNA
tcgatactgtactaagaatttcatggcgtgtgcaccttgtctttggatatgtttgattttcacgttggctccatgccgtggaacttctaacctgtgttgtttcctctctttcaggttgca

SEQ ID NO: 79560 - DNA, 120 bp, synthetic construct
  source 1..120: mol_type = other DNA
ctgtgttcgtgtcccaccgagcgtcctctatgaggaccttcaggtttcctcctcctcagaggacagcgattctgacctggagtgagactgcaggtggcaggggctccttggcctccagct

SEQ ID NO: 79561 - DNA, 120 bp, synthetic construct
  source 1..120: mol_type = other DNA
tctgagttcccgcagtttttattgattatgatgttcattatttcagcacaaaggaatgtagtaggggagcagggtgataataaggggaaggtcaacaaaaaaaaaaaaaaaaaaaaaaaa

SEQ ID NO: 79562 - DNA, 120 bp, synthetic construct
  source 1..120: mol_type = other DNA
ttcttgacttgttggcaatccaaatcgttacgtctccgaaacagagttgactgatgggaccgcaggtctgggcaggactttgacttcctatacatccacaggagcaagaaaacctcagcc

SEQ ID NO: 79563 - DNA, 120 bp, synthetic construct; identical to SEQ ID NO: 31191
  source 1..120: mol_type = other DNA

SEQ ID NO: 79564 - DNA, 120 bp, synthetic construct; identical to SEQ ID NO: 31192
  source 1..120: mol_type = other DNA

SEQ ID NO: 79565 - DNA, 120 bp, synthetic construct; identical to SEQ ID NO: 31193
  source 1..120: mol_type = other DNA

SEQ ID NO: 79566 - DNA, 120 bp, synthetic construct; identical to SEQ ID NO: 31194
  source 1..120: mol_type = other DNA

SEQ ID NO: 79567 - DNA, 120 bp, synthetic construct; identical to SEQ ID NO: 31195
  source 1..120: mol_type = other DNA

SEQ ID NO: 79568 - DNA, 120 bp, synthetic construct; identical to SEQ ID NO: 31196
  source 1..120: mol_type = other DNA

SEQ ID NO: 79569 - DNA, 120 bp, synthetic construct; identical to SEQ ID NO: 31197
  source 1..120: mol_type = other DNA

SEQ ID NO: 79570 - DNA, 120 bp, synthetic construct; identical to SEQ ID NO: 31198
  source 1..120: mol_type = other DNA

SEQ ID NO: 79571 - DNA, 120 bp, synthetic construct; identical to SEQ ID NO: 31199
  source 1..120: mol_type = other DNA

SEQ ID NO: 79572 - DNA, 120 bp, synthetic construct; identical to SEQ ID NO: 31200
  source 1..120: mol_type = other DNA

SEQ ID NO: 79573 - DNA, 120 bp, synthetic construct; identical to SEQ ID NO: 31201
  source 1..120: mol_type = other DNA

SEQ ID NO: 79574 - DNA, 120 bp, synthetic construct; identical to SEQ ID NO: 31202
  source 1..120: mol_type = other DNA

SEQ ID NO: 79575 - DNA, 120 bp, synthetic construct; identical to SEQ ID NO: 31203
  source 1..120: mol_type = other DNA

SEQ ID NO: 79576 - DNA, 120 bp, synthetic construct; identical to SEQ ID NO: 11309
  source 1..120: mol_type = other DNA

SEQ ID NO: 79577 - DNA, 120 bp, synthetic construct; identical to SEQ ID NO: 11537
  source 1..120: mol_type = other DNA

SEQ ID NO: 79578 - DNA, 120 bp, synthetic construct; identical to SEQ ID NO: 29882
  source 1..120: mol_type = other DNA

SEQ ID NO: 79579 - DNA, 120 bp, synthetic construct
  source 1..120: mol_type = other DNA
gcctgattctgtttgcctgatttggtccatttggttgtatattaaggcttgaacataaggtttgtgatataaagctgtctttaaataggctccatgacatttcaagttatctgctgggaa

SEQ ID NO: 79580 - DNA, 120 bp, synthetic construct
  source 1..120: mol_type = other DNA
cgtgatgcatttcagcaaagaagtagctcctgtcctcgtaaaatcagtgaagttctcacggacgacctcattgagtgagttgtgaagcttgttgccttaatcagaatgatcagccagcat

SEQ ID NO: 79581 - DNA, 120 bp, synthetic construct
  source 1..120: mol_type = other DNA
aaatggagggacgcggcacctgggcgcttcctggggccagacaacgccccctcattggaacctccatgaccgtgcctctgagaaaccagcgcgtctgcgacgatcactcctaattttcgg

SEQ ID NO: 79582 - DNA, 120 bp, synthetic construct
  source 1..120: mol_type = other DNA
ggctaatttgactgtctctcctcctggggtctaggacttcaaacatgtacagaagcgattgcagaattaagacaagacacttccacaatatattttttgtatcactggctcagaaaaaga

SEQ ID NO: 79583 - DNA, 120 bp, synthetic construct
  source 1..120: mol_type = other DNA
agtgtggaaatgagaatgaagctttttttaaagacaggctacaataattcccatgcagagaaccacatgccatgacactggattccaaacagcaagaacgtatggtgaagacgaggccaa

SEQ ID NO: 79584 - DNA, 120 bp, synthetic construct
  source 1..120: mol_type = other DNA
gtcactctctgggtcttacccttggcttttcttattgcggaaactgccagacggcggtggtcagtgcccagcctgaggggatggcttcgaatggaggtaagcctgtagggatgagggcat

SEQ ID NO: 79585 - DNA, 120 bp, synthetic construct
  source 1..120: mol_type = other DNA
gcaggtgtggattcttgctggttctcagtggaagggtctggaaaggctggtttccttttcagtagaggaaggagagtagcgcacgaataggaagatggttctcttattattattattcaa

SEQ ID NO: 79586 - DNA, 120 bp, synthetic construct
  source 1..120: mol_type = other DNA
gctctctagtggagcgactctccgtggaggaacagagcatccgatgcacactcagggacatttgcaagctgcagtttccctgtcatacgcccttagctgttgggactcccctctgattcc

SEQ ID NO: 79587 - DNA, 120 bp, synthetic construct
  source 1..120: mol_type = other DNA
tatgggaaggtacattttcagcaacattaatctggctgtggctcaggacagactgtcaggggcctcatgtcaactgcctgtcactgtcccgtgagtccagccaatccttaattttttttt

SEQ ID NO: 79588 - DNA, 120 bp, synthetic construct
  source 1..120: mol_type = other DNA
aggctacgtccccaggggctgccttgctccagagtccccaggaagccggttaaatgctcagtcttggggccctggaacctgcactttaaccctcacccccaggtcattctgtgtgcacgc

SEQ ID NO: 79589 - DNA, 120 bp, synthetic construct
  source 1..120: mol_type = other DNA
cgtggtggcttctcaacgtggagtatgaggagggtgtggagaaacccaggatactctgggcccctggctccctcaggaagctgctcctgccacctagagtgttctggggtctctgtcctg

SEQ ID NO: 79590 - DNA, 120 bp, synthetic construct
  source 1..120: mol_type = other DNA
ttcctggagtttgaggctgaggaggagatgcagattcagaaatcgcaatggatgaaggggccccagtgcctgcctcctccagccacaccgaggcttgaacctcgaggacccccggcccct

SEQ ID NO: 79591 - DNA, 120 bp, synthetic construct
  source 1..120: mol_type = other DNA
tgggctggcctggagtgctggggtctgctggattccagggggtggcactcccaggtccttggaattaagctctgttccttagctactcagcagtgtgtgtatttccatggatttgagtat

SEQ ID NO: 79592 - DNA, 120 bp, synthetic construct
  source 1..120: mol_type = other DNA
ctcccacccttgaaggagaaacagcattcgagggcagcccctagtcgtggcacagcccggttggactcaagttcttctaagtttgcagctggccaaggagcagagagagacgtccctgac

SEQ ID NO: 79593 - DNA, 120 bp, synthetic construct
  source 1..120: mol_type = other DNA
gtgttgggggcctcgtgtgtaagtgtgaataaatgtagttgtcttggaaaatgctcttggggctgctgcctctgtcctcggtgctgtgctgctccgtggagggtgtctgtgagggagggc

SEQ ID NO: 79594 - DNA, 120 bp, synthetic construct
  source 1..120: mol_type = other DNA
tcttagaatctcagatcccagcgtggacaggacccggcacccaccctggttccctcctggccaacaccttcttctccacggtctgagttctgattcctcccccagggcgcttattggctc

SEQ ID NO: 79595 - DNA, 120 bp, synthetic construct
  source 1..120: mol_type = other DNA
tctctctctccctgacacgaggacacagtgagaaggcggccatctgcaagccagagagagccctcaccagaaccttgcccactggtatgctaacctcggacttccagcctccagactgtg

SEQ ID NO: 79596 - DNA, 120 bp, synthetic construct
  source 1..120: mol_type = other DNA
gagtgaaattggtgggccatatggaaactctatgtttaaccatttcagaaggtgccagactgtttccagtgtacatgaaccattttatatacccactagctgtgtgagggtcccagtgtc

SEQ ID NO: 79597 - DNA, 120 bp, synthetic construct
  source 1..120: mol_type = other DNA
cttggctactgtgaataatgctgtaatagggattgtatggaatttgtaaattgttttaggtaatatggacattttaacaatattaagtcttcaaatccacatgcatggagatgtcttttc

SEQ ID NO: 79598 - DNA, 120 bp, synthetic construct
  source 1..120: mol_type = other DNA
tcatttttctcttgtgaatgctttctttgtggaatactggcaagaaagttgggaggtataaaaatgaattaggggaggagccaagatggcccaataggaacagctccggtctacagctcc

SEQ ID NO: 79599 - DNA, 120 bp, synthetic construct
  source 1..120: mol_type = other DNA
ccacaaagatggggaaaaaacagaacagaaaaactggaaactataaaaagagagcgcctctcctcctccaaaggaacgcagttcctcaccagcagcggaacaaagctggatggagaatga

SEQ ID NO: 79600 - DNA, 120 bp, synthetic construct
  source 1..120: mol_type = other DNA
aactaagcttcataagcgaaggagaaataaaatactttacagacaagcaaatactgagagattttgtcaccaccaggcctgccctaaaagagctcctgaaggaagcgctaaacatggaaa

SEQ ID NO: 79601 - DNA, 120 bp, synthetic construct
  source 1..120: mol_type = other DNA
aaaccagtgagaacaaagacacaacataccagaatctctgggacgcattcaaagcagtgtgtagagggaaatttatagcactaaatgcccacaagagaaagcaggaaagatccaaaattg

SEQ ID NO: 79602 - DNA, 120 bp, synthetic construct
  source 1..120: mol_type = other DNA
caaaaaccacatgattatctcaatagatgcagaaaaggcctttgacaaaattcaacaacccttcatgctgaaaactctcaataaattaggtattgatgggatgtatttcaaaataataag

SEQ ID NO: 79603 - DNA, 120 bp, synthetic construct
  source 1..120: mol_type = other DNA
acgttagacctacaaccataaaaaccctagaagaaaacctaggcattaccattcaggacataggcatgggaaggacttcatgtctaaaacaccaaaagcaatggccacaaaagccaaaat

SEQ ID NO: 79604 - DNA, 120 bp, synthetic construct
  source 1..120: mol_type = other DNA
gggactgttgtggggtcggggaggggggagggatagcattgggagatgtacctaatgctagatgacgagttagtgggtgcagtgcaccagcatggcacatgtatacatatgtaactaacc

SEQ ID NO: 79605 - DNA, 120 bp, synthetic construct; identical to SEQ ID NO: 12745
  source 1..120: mol_type = other DNA

SEQ ID NO: 79606 - DNA, 120 bp, synthetic construct; identical to SEQ ID NO: 12746
  source 1..120: mol_type = other DNA

SEQ ID NO: 79607 - DNA, 120 bp, synthetic construct; identical to SEQ ID NO: 29790
  source 1..120: mol_type = other DNA

SEQ ID NO: 79608 - DNA, 120 bp, synthetic construct; identical to SEQ ID NO: 29791
  source 1..120: mol_type = other DNA

SEQ ID NO: 79609 - DNA, 120 bp, synthetic construct
  source 1..120: mol_type = other DNA
tcccagcactttgggaagccggcaggtggatcacctgaggtcaggagttcgagaccagcctggccaacacagtgaatccccatctctactaaaaacacaaaaattagccgggcatcgtgg

SEQ ID NO: 79610 - DNA, 120 bp, synthetic construct
  source 1..120: mol_type = other DNA
gggttttgccttgttgtcctcgctggtcttgaactcctcgcctcaaatgatctctcctgctgcccaggctggagtgcagtggtgtgatcatagctcactgtagcctccaactcctcggct

SEQ ID NO: 79611 - DNA, 120 bp, synthetic construct
  source 1..120: mol_type = other DNA
gaactcctgtgctcaagcaatcctcccacctgagcctcccaaagtgccgggattaaaagcgtgaaccagcgcacctggccagatccctttttttgttttttgaaacggagtttcgctctt

SEQ ID NO: 79612 - DNA, 120 bp, synthetic construct; identical to SEQ ID NO: 29840
  source 1..120: mol_type = other DNA

SEQ ID NO: 79613 - DNA, 120 bp, synthetic construct
  source 1..120: mol_type = other DNA
atcacacctagctattttttttttttatttttggagatggtgggggggggggtctccctatgttgcccaggctggtattgaactcctggcctccagcagtcctccagcctcagcctccca

SEQ ID NO: 79614 - DNA, 120 bp, synthetic construct; identical to SEQ ID NO: 29792
  source 1..120: mol_type = other DNA

SEQ ID NO: 79615 - DNA, 120 bp, synthetic construct
  source 1..120: mol_type = other DNA
ggttgcagtgaaccaagatcaagccatttgcactccagcctgggcaacacagtgagactctgtctcaaaaaaaaaaaaaaaaaaaattataaagttccccttcatctgaaaattgaatgt

SEQ ID NO: 79616 - DNA, 120 bp, synthetic construct; identical to SEQ ID NO: 29793
  source 1..120: mol_type = other DNA

SEQ ID NO: 79617 - DNA, 120 bp, synthetic construct; identical to SEQ ID NO: 29794
  source 1..120: mol_type = other DNA

SEQ ID NO: 79618 - DNA, 120 bp, synthetic construct; identical to SEQ ID NO: 29795
  source 1..120: mol_type = other DNA

SEQ ID NO: 79619 - DNA, 120 bp, synthetic construct
  source 1..120: mol_type = other DNA
tgggtaacttttggttttttttgagacggagtctcgctctgtcgtgcaggctgcagtgcagtggcgcgatcttggctcactgcgagctctgcctcccaggttcacgccattctcctgttt

SEQ ID NO: 79620 - DNA, 120 bp, synthetic construct
  source 1..120: mol_type = other DNA
acagtgagctatgattatgccactgcactccagcctgggtgagagagtgagagacccaactcaaaacaaaaacaaaaacaaaagagtcacccatccctatacagtgcttggctgtaaatc

SEQ ID NO: 79621 - DNA, 120 bp, synthetic construct
  source 1..120: mol_type = other DNA
gcagtgagctatgatcgtgccgtgccactgcactccagcctgggcaacagagcaagaccctgttttaaaaaattaaacaaaaaaaacccctcagctcctcaagccacatttcaagtgctc

SEQ ID NO: 79622 - DNA, 120 bp, synthetic construct; identical to SEQ ID NO: 29796
  source 1..120: mol_type = other DNA

SEQ ID NO: 79623 - DNA, 120 bp, synthetic construct; identical to SEQ ID NO: 29797
  source 1..120: mol_type = other DNA

SEQ ID NO: 79624 - DNA, 120 bp, synthetic construct; identical to SEQ ID NO: 29798
  source 1..120: mol_type = other DNA

SEQ ID NO: 79625 - DNA, 120 bp, synthetic construct; identical to SEQ ID NO: 29799
  source 1..120: mol_type = other DNA

SEQ ID NO: 79626 - DNA, 120 bp, synthetic construct; identical to SEQ ID NO: 29800
  source 1..120: mol_type = other DNA

SEQ ID NO: 79627 - DNA, 120 bp, synthetic construct; identical to SEQ ID NO: 29801
  source 1..120: mol_type = other DNA

SEQ ID NO: 79628 - DNA, 120 bp, synthetic construct; identical to SEQ ID NO: 29802
  source 1..120: mol_type = other DNA

SEQ ID NO: 79629 - DNA, 120 bp, synthetic construct; identical to SEQ ID NO: 29803
  source 1..120: mol_type = other DNA

SEQ ID NO: 79630 - DNA, 120 bp, synthetic construct; identical to SEQ ID NO: 29832
  source 1..120: mol_type = other DNA

SEQ ID NO: 79631 - DNA, 120 bp, synthetic construct; identical to SEQ ID NO: 29804
  source 1..120: mol_type = other DNA

SEQ ID NO: 79632 - DNA, 120 bp, synthetic construct
  source 1..120: mol_type = other DNA
cagatttagcaaaacgacccaagacacccagttaaatgtgaatattttatttacttattaactattttttttagagatggggtcttgctatgttgcccaggctggtcttgaactcctggg

SEQ ID NO: 79633 - DNA, 120 bp, synthetic construct
  source 1..120: mol_type = other DNA
actaaaactacaaaaatttagccaggtgaggtggtcctagctacctggaacgttgagatgggaggattgcttgcacccaggaggtggaggctacagtgagctatgatcaccactgtactg

SEQ ID NO: 79634 - DNA, 120 bp, synthetic construct
  source 1..120: mol_type = other DNA
caacatggtgaaaccctgtctctactaaaaatacaaaaattagccgagcatggtggtacacagttgtaatcccagctaatcaggaggttgaggcaggagaatcactggaacccaggaggt

SEQ ID NO: 79635 - DNA, 120 bp, synthetic construct; identical to SEQ ID NO: 29805
  source 1..120: mol_type = other DNA

SEQ ID NO: 79636 - DNA, 120 bp, synthetic construct
  source 1..120: mol_type = other DNA
tcaccatgttggccaggctggtctcaaactcctggcctcaagcaatctgccagccttggcctcccacagtgctgggattacaggtgtgagccactgtgcctggccaagatacttgcagac

SEQ ID NO: 79637 - DNA, 120 bp, synthetic construct; identical to SEQ ID NO: 29806
  source 1..120: mol_type = other DNA

SEQ ID NO: 79638 - DNA, 120 bp, synthetic construct
  source 1..120: mol_type = other DNA
atagatgggtctttacacagccctagtctagtcacggtacctccagcttttttttttttttgagacggagtctcgctctgtcgcccaggctggagtgtaatggtgcaatcttagctcact

SEQ ID NO: 79639 - DNA, 120 bp, synthetic construct
  source 1..120: mol_type = other DNA
aggtcaggagtttgagaccagcctagccaacatagtgaagtcccgtctctactaaaaatacaaaaaattagccgggcgtggtggtgcacacctgtaatcccagctactaggaaggctgag

SEQ ID NO: 79640 - DNA, 120 bp, synthetic construct; identical to SEQ ID NO: 29807
  source 1..120: mol_type = other DNA

SEQ ID NO: 79641 - DNA, 120 bp, synthetic construct; identical to SEQ ID NO: 29833
  source 1..120: mol_type = other DNA

SEQ ID NO: 79642 - DNA, 120 bp, synthetic construct; identical to SEQ ID NO: 29808
  source 1..120: mol_type = other DNA

SEQ ID NO: 79643 - DNA, 120 bp, synthetic construct
  source 1..120: mol_type = other DNA
atctcctgacctcgtgatccacccgtctcggcctcccaaagtgctgggattacaggtgtgagccaccgtgcccggccttttttttaaaaaaaaactatataaaaattgtaaaaacaataa

SEQ ID NO: 79644 - DNA, 120 bp, synthetic construct; identical to SEQ ID NO: 29809
  source 1..120: mol_type = other DNA

SEQ ID NO: 79645 - DNA, 120 bp, synthetic construct; identical to SEQ ID NO: 29810
  source 1..120: mol_type = other DNA

SEQ ID NO: 79646 - DNA, 120 bp, synthetic construct; identical to SEQ ID NO: 29811
  source 1..120: mol_type = other DNA

SEQ ID NO: 79647 - DNA, 120 bp, synthetic construct; identical to SEQ ID NO: 29812
  source 1..120: mol_type = other DNA

SEQ ID NO: 79648 - DNA, 120 bp, synthetic construct; identical to SEQ ID NO: 29813
  source 1..120: mol_type = other DNA

SEQ ID NO: 79649 - DNA, 120 bp, synthetic construct; identical to SEQ ID NO: 1671
  source 1..120: mol_type = other DNA

SEQ ID NO: 79650 - DNA, 120 bp, synthetic construct; identical to SEQ ID NO: 29814
  source 1..120: mol_type = other DNA

SEQ ID NO: 79651 - DNA, 120 bp, synthetic construct; identical to SEQ ID NO: 29815
  source 1..120: mol_type = other DNA

SEQ ID NO: 79652 - DNA, 120 bp, synthetic construct; identical to SEQ ID NO: 1672
  source 1..120: mol_type = other DNA

SEQ ID NO: 79653 - DNA, 120 bp, synthetic construct; identical to SEQ ID NO: 1673
  source 1..120: mol_type = other DNA

SEQ ID NO: 79654 - DNA, 120 bp, synthetic construct
  source 1..120: mol_type = other DNA
tgggaggccgaggtgggtggatcacctgcggtcaggagttcgagaccagcctggccaacatggcgaaaccccatatctactaaaaatacaaaaattagccgggcgtggtggcaggcacct

SEQ ID NO: 79655 - DNA, 120 bp, synthetic construct
  source 1..120: mol_type = other DNA
gaggcggagcttgcagtgagaccagatggcaccacagcactccaggctggagacacagtgagactccgtctcaaaataataacaataaataaataaaatagttaagatggtaaaccttat

SEQ ID NO: 79656 - DNA, 120 bp, synthetic construct
  source 1..120: mol_type = other DNA
tgggaggccaaggcaggtggatcacgaggtcaggagttcaagaccagcccggccaagatgatgaaaccccgtctctactaaaaatacaaaaattaacccgaaatggtattgcttgcctgt

SEQ ID NO: 79657 - DNA, 120 bp, synthetic construct
  source 1..120: mol_type = other DNA
gttaatccccagaagcagaggagcagggctgttcttaccatccaccccccacccccccccttttttttttttgagacggagtttcgctctgtggcccaggctggagtgcaatggtgcaat

SEQ ID NO: 79658 - DNA, 120 bp, synthetic construct
  source 1..120: mol_type = other DNA
cgtcgcaaagcggttgtttacttagttatgcagaggcaggcactcctaagacttcagacaccaattttcttacggcagggcggggaggggaagtgcccaactaaggaaaagattctagca

SEQ ID NO: 79659 - DNA, 120 bp, synthetic construct
  source 1..120: mol_type = other DNA
tcccagtagacaagacaaagaaagaaagaaagtaaaaaaggaactcacatctgttgctccctgacacatcagcacctcctgggtatacaatttatccactctctcaatgcattaggaggt

SEQ ID NO: 79660 - DNA, 120 bp, synthetic construct
  source 1..120: mol_type = other DNA
aaggagaggcaaagggcaatggaatggaggtgaatgaacaccagagtggagtggatgtgggccaaagtgagggaatgactatgcatgcattcaattatgaatgaatttgagattatgatg

SEQ ID NO: 79661 - DNA, 120 bp, synthetic construct
  source 1..120: mol_type = other DNA
ggccacgtgcgagtaagccagagtcatttgatgcaggggcgggaaatagaggcaaagataggaaatgagtctgagtgagagtgagtggggtgaagaaggaatatgacatgaaagaatttg

SEQ ID NO: 79662 - DNA, 120 bp, synthetic construct
  source 1..120: mol_type = other DNA
ctatgctgagtagtttaactaactctaacaccaccaccattattgccttcacaaccatcacctccatctctgccatcaacaccatcactacaatcaatatcatcaccactgttaccatca

SEQ ID NO: 79663 - DNA, 120 bp, synthetic construct
  source 1..120: mol_type = other DNA
aaggttgtacagaaccagctaacatggtgattaagatcattcataaccaactgacaagagaatcaaggtcatcaagaatcagtcaacatagtggttgaggttcttcaggccccaaggaac

SEQ ID NO: 79664 - DNA, 120 bp, synthetic construct
  source 1..120: mol_type = other DNA
caatatggtgaaaccccatctctactaaaaatacaaaaaaaaatttagccgggtgtggtgacatgcacctgtagtcccagctactcaggaggctgaggcagaagaatcgcttgaacccag

SEQ ID NO: 79665 - DNA, 120 bp, synthetic construct
  source 1..120: mol_type = other DNA
tttcctttcttttttcttttctttttctttctttttttttttttttgaaatggagtctcgctctgttacccaggctggagtgcggtggctcactgtaacctctgcctcccgggtttaagc

SEQ ID NO: 79666 - DNA, 120 bp, synthetic construct
  source 1..120: mol_type = other DNA
gaggctgaggcatgagaatcactttaacccaagaggcggaggttgcagtgatccaagattatgccactacactccagcttgggcgacagagtgaaattgtgtctcaaaaatacataaata

SEQ ID NO: 79667 - DNA, 120 bp, synthetic construct
  source 1..120: mol_type = other DNA
ctctcaatcattactggcgggaagcaaatttgtactacagccaccttagaaaaccacttgacagtatcacaaagttgaagatatacctaccaaatgatccagcaactgcattcataggcg

SEQ ID NO: 79668 - DNA, 120 bp, synthetic construct
  source 1..120: mol_type = other DNA
cggggtgcagaagttgcagtgagctgagatcgtgccactgcactccagcctgggtggtagagtgagactccgtctcaaaaaataaataaataataaataataatatgttcaattgatgga

SEQ ID NO: 79669 - DNA, 120 bp, synthetic construct
  source 1..120: mol_type = other DNA
ggattacaggcatgagccactacgaccggccacagcagcaacattttaagagataactccctaagaactttccagaactgaagaaagacacaaattcacaaattcaagaagcccaataaa

SEQ ID NO: 79670 - DNA, 120 bp, synthetic construct
  source 1..120: mol_type = other DNA
tccagcctggggcgacagagcaagactctgtcccaaaaaaaaaaaaaaaaaaaaaaaaaaaaagacaatgaagtgctgctttcgaaattctgagggaaaaatgatttcccagcctaaaat

SEQ ID NO: 79671 - DNA, 120 bp, synthetic construct
  source 1..120: mol_type = other DNA
acatggcgaaaccccgtctctattaaaaaaaaattaatacaacaattatcctggagtggtggtgcacacctgtagtcccagctacccaggacgctgagacgggaggatcgcttgatcccg

SEQ ID NO: 79672 - DNA, 120 bp, synthetic construct
  source 1..120: mol_type = other DNA
acctcaggagatctacccgccttggcctcccaaagtgctgggattacaggcgtgtgccactgtgcccagccacttttttttagacagagtcttggtctgttgcccaggctagagttcagt

SEQ ID NO: 79673 - DNA, 120 bp, synthetic construct
  source 1..120: mol_type = other DNA
acttctagaacttcagggtcggcaaagcctgtagcagtcattttgtcaaactccatgatggggccacttggcttttggctgcacacctctgggggaagaggctgcattggcgcccagggc

SEQ ID NO: 79674 - DNA, 120 bp, synthetic construct
  source 1..120: mol_type = other DNA
attcttggaagcaaatccaagacatcacacccttccctctgtaaatctttactatgttcctctaggagaaaagggctcttctcaatacataaccacaagtcatcatcacaccgacaagtg

SEQ ID NO: 79675 - DNA, 120 bp, synthetic construct
  source 1..120: mol_type = other DNA
tatgtaataaaacagttaaaagtctcaaattaaaatctagaaaagaaggtgtatttgaagaagtctggcttctctgcgccaccaccgaccgccccttccctacctgcctgtatttcctcg

SEQ ID NO: 79676 - DNA, 120 bp, synthetic construct
  source 1..120: mol_type = other DNA
aatctgccaaaaacaatgttatgacgaaggtccttccaacacaaaaggtgtagagccctagcaaactcctacagaagaaaaaggagaaataattcgtttgtagtcccagctacttgggag

SEQ ID NO: 79677 - DNA, 120 bp, synthetic construct
  source 1..120: mol_type = other DNA
aataccatcaccttgggggttgggatttcaacacagaaatttatggggggcacgtacattcagatcatcatgaacagtaactcctatgtgtgacagaaggtgacagaggtgggtagtggt

SEQ ID NO: 79678 - DNA, 120 bp, synthetic construct
  source 1..120: mol_type = other DNA
tatactgaagggttctggaggcttccatctgaacactcacattaaattcagctcccttgagtcaaacataccctgagttcctactcttgagtcaggctctgcccggggacagccagtttg

SEQ ID NO: 79679 - DNA, 120 bp, synthetic construct
  source 1..120: mol_type = other DNA
tttggtccacggatgcccttggccatctgggaagcctgtggaccccatctcaggagaatttttgcaaacgcataaaatgagacccataggattacaaaggcagcaaattatactgaaata

SEQ ID NO: 79680 - DNA, 120 bp, synthetic construct
  source 1..120: mol_type = other DNA
catagggatcacaggtctctggtctctggccatcatttcctgggagagatggatggtggtctgcaagccctttggcaatgtgagatttgatgccaagctggccatcgtgggcattgcctt

SEQ ID NO: 79681 - DNA, 120 bp, synthetic construct
  source 1..120: mol_type = other DNA
caagtgatcctcctacctcagcctcctgaggagctgggcctacaggtgcaccacttcacccagctaattttttttattttttgtagagacaagatctcactatgtgatccaggctagtct

SEQ ID NO: 79682 - DNA, 120 bp, synthetic construct
  source 1..120: mol_type = other DNA
cctataagaaaatattaagatccagcgatgagaatcaggtgattcctttgggactgtaccagtggctgcaggttcagccccagccccgttgtcctcagctctgtgagacgggaaagcact

SEQ ID NO: 79683 - DNA, 120 bp, synthetic construct
  source 1..120: mol_type = other DNA
cttgttaactccttcattctccacgcccagtcatcaatcaaatcaggcctccatgctcaggcctgagcgcaggacaggacagtctgttaagggatcaggtgaagcaaaggagcttgttag

SEQ ID NO: 79684 - DNA, 120 bp, synthetic construct
  source 1..120: mol_type = other DNA
tgttcagactcgacccttctcaaccttcatctctccattttcaaaccgtaacctctggaatttgtcttcctataagaacaaaagccggccctccttggctacactgaccaagagttcaag

SEQ ID NO: 79685 - DNA, 120 bp, synthetic construct
  source 1..120: mol_type = other DNA
gtcaagagtaggcctgaaatatttagaaaatgcctttggtctgggtcctcaaagcattgtggttacttcagggatgacacaggacatgatttgagacattcatatggcccagatctcttt

SEQ ID NO: 79686 - DNA, 120 bp, synthetic construct
  source 1..120: mol_type = other DNA
gtacattcagcacagtgctccacccttccctgctctgctcaataacgctttctgtccttccagtttcgaaactgcatcttgcagcttttcgggaagaaggttgacgatggctctgaactc

SEQ ID NO: 79687 - DNA, 120 bp, synthetic construct
  source 1..120: mol_type = other DNA
ctgtagcatctccagcttggatattcggctcttgaaggtctccgtgatctcctgcaggagacgaaaatgcacgcaccagaagtcagcacagagttgtggtcgtttattgagttcttaggg

SEQ ID NO: 79688 - DNA, 120 bp, synthetic construct
  source 1..120: mol_type = other DNA
gttgagcacgaagtctagcctgcagtttagcctgcagttactctatagaaacatggtgactataaggattgaaaagccacaaaagaccacagattccagtacaattccattagttacgaa

SEQ ID NO: 79689 - DNA, 120 bp, synthetic construct
  source 1..120: mol_type = other DNA
gcagtgagctgccatcacgccactgcactccagcctgggcagcagagtgagaccctatctctaaaagaaaacaatcactacctgttgtgtatataattatataagtagtaaaagtataaa

SEQ ID NO: 79690 - DNA, 120 bp, synthetic construct
  source 1..120: mol_type = other DNA
ctctggagaatgctcttatgaacacaaaacgatgaccagtcaacccagacaccctcaagacagaccgaaggtgttaagaccaccctctccaacacaaagtgttctaaactttattgtttt

SEQ ID NO: 79691 - DNA, 120 bp, synthetic construct
  source 1..120: mol_type = other DNA
aaaaggagcctgaggaaaacaaaactgtgatccgaggagcaacaagaagactggcagctgccttttcaacagaaaccatggaagtcagaagggaatgatttgttcaaaatgcttattatt

SEQ ID NO: 79692 - DNA, 120 bp, synthetic construct
  source 1..120: mol_type = other DNA
ctggggctgagaggtcacagagcaacactgaagcctctaggaaccatagcctgttatctccaagcctcgtctgaaagcgaaacataccagaacagtcttgggacagaggagctagggtct

SEQ ID NO: 79693 - DNA, 120 bp, synthetic construct
  source 1..120: mol_type = other DNA
ttttaaaattttttgcagagatatggtctcactttgttacccaagctggtctcagactcctgggctgaagcaatcctcctgcctcgacctcccaaagcactgggattacagccataagcc

SEQ ID NO: 79694 - DNA, 120 bp, synthetic construct
  source 1..120: mol_type = other DNA
agtttaggcggtgagtgctgcgagaaaggaaaaagtaggggagtgacaaagactggtccggagtatataaagagctctgacaactcaacaataaaaagacaatccaagttgaaaacaagc

SEQ ID NO: 79695 - DNA, 120 bp, synthetic construct
  source 1..120: mol_type = other DNA
tttcagcccagtgaaacggatttcggccttctagcctccaggactgcgagagaataactttctattattttaagccatgaagttgggggcaatttgtcacggcagcatcaattaattcac

SEQ ID NO: 79696 - DNA, 120 bp, synthetic construct
  source 1..120: mol_type = other DNA
gccttgacattgaacttcctttctttataaaccacccagcctgcggtactctgttacagcaacagaaagtgggactaagacacataacacttccctgttatctagcaattccatatatga

SEQ ID NO: 79697 - DNA, 120 bp, synthetic construct
  source 1..120: mol_type = other DNA
caaaaaaacaaaaactttacttcaaaaaaccccgcttccaaaagaataaaagaagaggccatttgaacgtggtagcctgggaagtccctttgaggagaggacatcagagcagagcctaaa

SEQ ID NO: 79698 - DNA, 120 bp, synthetic construct
  source 1..120: mol_type = other DNA
agagtgagactccatctcataaaaaagacaaaaaaaagaagcaatgtgctcctcacagtcgggttttctcccaggaccattttactcatccaacaaagaacaaagatgtcccagcaaccc

SEQ ID NO: 79699 - DNA, 120 bp, synthetic construct
  source 1..120: mol_type = other DNA
gccaggtgttcaagaccagcctgggcaacatagcaagatcccatctctacaaataataataatttttaaaaagttagccaggcatggtggcacatgctttgtactcccagctactcggga

SEQ ID NO: 79700 - DNA, 120 bp, synthetic construct
  source 1..120: mol_type = other DNA
aacattagtgaaccttgaaaacagtgaaaggagctagacacaaaagcccacatatcgtatggtcccatttatatgaaaagtccagaagaggcaaacccacggagacagaaagcagattag

SEQ ID NO: 79701 - DNA, 120 bp, synthetic construct
  source 1..120: mol_type = other DNA
ctaattttttgatgtttttgtagataccgggtctcactatgttgcccaggctggtctcaaactcctgagctcaagcagtctgcccacctcaacctcccaaagtgctaggattacaggcgt

SEQ ID NO: 79702 - DNA, 120 bp, synthetic construct
  source 1..120: mol_type = other DNA
agtttacctgagcacagcattctcattggcccctgtggcttggaaacatacggggaagtttgtaactgccaccaagttctgctgttgcttaatagaaagctgaccgggtaagtgtgattt

SEQ ID NO: 79703 - DNA, 120 bp, synthetic construct
  source 1..120: mol_type = other DNA
aaatcgagctactgcacggtgcggagaaagcattcaccagaaggcagtcatttttgaaataagtatctgagacccggcctgtgccccagctcagctaggagcacatgtgaagagaccaga

SEQ ID NO: 79704 - DNA, 120 bp, synthetic construct
  source 1..120: mol_type = other DNA
tgctttggataccagcttgaggtagctcacagtgttgccatcccgactggccttctccactctcagctgctctgagaggtagaggatgcggtgcctgacactatcctgtaagttgtgggc

SEQ ID NO: 79705 - DNA, 120 bp, synthetic construct
  source 1..120: mol_type = other DNA
gggtttaagcaattctcatggctcagcctcccgagtagctgggattacaggtgtgcatcaccacacccagctaattcgtgtattattagtagagacagggtttcaccatgttgaccaggc

SEQ ID NO: 79706 - DNA, 120 bp, synthetic construct
  source 1..120: mol_type = other DNA
gactgtggaggctggggtgcctggcctgagtagtggttaaatgtgtgttcaccttatcgttacttcttaaaacatacatcaatgttttctgcacctttatatacatatgccagatttcac

SEQ ID NO: 79707 - DNA, 120 bp, synthetic construct
  source 1..120: mol_type = other DNA
ctgcactccaacctgggcaacaagagcaaaactccatcccaagaaagaaagagagagagagagagagagagagagagagaaagagaaaagaaagaaagaaaaaaaagtatccagaatgca

SEQ ID NO: 79708 - DNA, 120 bp, synthetic construct
  source 1..120: mol_type = other DNA
gccgacacaagatgttaaaagcagccagaggaaaaaaagctgattacctttaaaaccatgacttttagactgcaggctgccttctcaatagcatcaatgcaatccagaagatagttgact

SEQ ID NO: 79709 - DNA, 120 bp, synthetic construct
  source 1..120: mol_type = other DNA
ggtggatcacttgaggtcaggagtttgagaccatcatggtcaacactgcgaaacactgtccctactaaaaatacaaaaattagccgggcatggtggcacacacctgtaatcccagctact

SEQ ID NO: 79710 - DNA, 120 bp, synthetic construct
  source 1..120: mol_type = other DNA
attgcaaggtgatccgggaatagtaagcgaaaagcaacaattaaatactattttctcatccaccagaacgccaaaaattaaaaagcctaacaatgtccagggctggcgagaatgtggcag

SEQ ID NO: 79711 - DNA, 120 bp, synthetic construct
  source 1..120: mol_type = other DNA
gttacatttcaaatctttcttctagtatcatttttcttttccataaatgcacctttaaaaattatttaagccttgggaggccgaggcgggcggatcacgaggtcaggagatcgagaccat

SEQ ID NO: 79712 - DNA, 120 bp, synthetic construct
  source 1..120: mol_type = other DNA
ggaataagaccctccagggtcttgtgtgaagcctcggcatctgcattgctcatgcttctggggatcattctcctgaaaatggtggctcctttctccctgtggagcatctttctaagcagt

SEQ ID NO: 79713 - DNA, 120 bp, synthetic construct
  source 1..120: mol_type = other DNA
acgttgtttttattttcatcaattcttaataaacaaaaggttatagctgggataccttctgagttctcaagttttttgtttcgtgttttcttaaactgccgtcgcacgtccgaaaccgct

SEQ ID NO: 79714 - DNA, 120 bp, synthetic construct
  source 1..120: mol_type = other DNA
gatatcgtctttctgcaacctgcggtcccagcagacaaaccttgtgatcctcgttccagtcgacatggaggacgactcactctacttgagaggtgagtggcagttcaaccacttttcaaa

SEQ ID NO: 79715 - DNA, 120 bp, synthetic construct
  source 1..120: mol_type = other DNA
cagccatacatgtctcagccgaacacaggacctctcgtctatgtcctctatgctgtgctggtccacgctgggtggagttgtcacaacggacattacttctcttatgtcaaagctcaagaa

SEQ ID NO: 79716 - DNA, 120 bp, synthetic construct
  source 1..120: mol_type = other DNA
gagggactgtctgagtgtttgtgttcatgataggtgacattcagtgtgtatttctgaatatgacctaccgacgtgtaggtttgcgtgtgaggtaattgcaggggactcggtttcgtattt

SEQ ID NO: 79717 - DNA, 120 bp, synthetic construct
  source 1..120: mol_type = other DNA
aggaataagaccctccagggtcttgtgtgaagcctcggcatctgcattgctcatgcttctggggatcattctcctgaaaatggtggctcctttctccctgtggagcatctttctaagcag

SEQ ID NO: 79718 - DNA, 120 bp, synthetic construct; identical to SEQ ID NO: 79713
  source 1..120: mol_type = other DNA

SEQ ID NO: 79719 - DNA, 120 bp, synthetic construct; identical to SEQ ID NO: 79714
  source 1..120: mol_type = other DNA

SEQ ID NO: 79720 - DNA, 120 bp, synthetic construct; identical to SEQ ID NO: 79715
  source 1..120: mol_type = other DNA

SEQ ID NO: 79721 - DNA, 120 bp, synthetic construct; identical to SEQ ID NO: 79716
  source 1..120: mol_type = other DNA

SEQ ID NO: 79722 - DNA, 120 bp, synthetic construct; identical to SEQ ID NO: 79717
  source 1..120: mol_type = other DNA

SEQ ID NO: 79723 - DNA, 120 bp, synthetic construct; identical to SEQ ID NO: 79713
  source 1..120: mol_type = other DNA

SEQ ID NO: 79724 - DNA, 120 bp, synthetic construct; identical to SEQ ID NO: 79714
  source 1..120: mol_type = other DNA

SEQ ID NO: 79725 - DNA, 120 bp, synthetic construct; identical to SEQ ID NO: 79715
  source 1..120: mol_type = other DNA

SEQ ID NO: 79726 - DNA, 120 bp, synthetic construct; identical to SEQ ID NO: 79716
  source 1..120: mol_type = other DNA

SEQ ID NO: 79727 - DNA, 120 bp, synthetic construct; identical to SEQ ID NO: 79717
  source 1..120: mol_type = other DNA

SEQ ID NO: 79728 - DNA, 120 bp, synthetic construct; identical to SEQ ID NO: 79713
  source 1..120: mol_type = other DNA

SEQ ID NO: 79729 - DNA, 120 bp, synthetic construct; identical to SEQ ID NO: 79714
  source 1..120: mol_type = other DNA

SEQ ID NO: 79730 - DNA, 120 bp, synthetic construct; identical to SEQ ID NO: 79715
  source 1..120: mol_type = other DNA

SEQ ID NO: 79731 - DNA, 120 bp, synthetic construct; identical to SEQ ID NO: 79716
  source 1..120: mol_type = other DNA

SEQ ID NO: 79732 - DNA, 120 bp, synthetic construct
  source 1..120: mol_type = other DNA
tgtgaaaactacagtgtgatgagcatgactggcagacagcttatcgattgggctcccctcaaaatcggttatgagcattcaagcacaccgatgcccaggtcccggctgcaggaataagac

SEQ ID NO: 79733 - DNA, 120 bp, synthetic construct; identical to SEQ ID NO: 79713
  source 1..120: mol_type = other DNA

SEQ ID NO: 79734 - DNA, 120 bp, synthetic construct; identical to SEQ ID NO: 79714
  source 1..120: mol_type = other DNA

SEQ ID NO: 79735 - DNA, 120 bp, synthetic construct; identical to SEQ ID NO: 79715
  source 1..120: mol_type = other DNA

SEQ ID NO: 79736 - DNA, 120 bp, synthetic construct; identical to SEQ ID NO: 79716
  source 1..120: mol_type = other DNA

SEQ ID NO: 79737 - DNA, 120 bp, synthetic construct; identical to SEQ ID NO: 79732
  source 1..120: mol_type = other DNA

SEQ ID NO: 79738 - DNA, 120 bp, synthetic construct; identical to SEQ ID NO: 79713
  source 1..120: mol_type = other DNA

SEQ ID NO: 79739 - DNA, 120 bp, synthetic construct; identical to SEQ ID NO: 79714
  source 1..120: mol_type = other DNA

SEQ ID NO: 79740 - DNA, 120 bp, synthetic construct; identical to SEQ ID NO: 79715
  source 1..120: mol_type = other DNA

SEQ ID NO: 79741 - DNA, 120 bp, synthetic construct; identical to SEQ ID NO: 79716
  source 1..120: mol_type = other DNA

SEQ ID NO: 79742 - DNA, 120 bp, synthetic construct; identical to SEQ ID NO: 79732
  source 1..120: mol_type = other DNA

SEQ ID NO: 79743 - DNA, 120 bp, synthetic construct; identical to SEQ ID NO: 79713
  source 1..120: mol_type = other DNA

SEQ ID NO: 79744 - DNA, 120 bp, synthetic construct
  source 1..120: mol_type = other DNA
tgcggttccagcagacaaaccttgtgatcctcgttccagtcgacatggaggacgactcactctacttgagaggtgagtggcagttcaaccacttttcaaaactcacatcttctcggcccg

SEQ ID NO: 79745 - DNA, 120 bp, synthetic construct; identical to SEQ ID NO: 79715
  source 1..120: mol_type = other DNA

SEQ ID NO: 79746 - DNA, 120 bp, synthetic construct; identical to SEQ ID NO: 79716
  source 1..120: mol_type = other DNA

SEQ ID NO: 79747 - DNA, 120 bp, synthetic construct; identical to SEQ ID NO: 79717
  source 1..120: mol_type = other DNA

SEQ ID NO: 79748 - DNA, 120 bp, synthetic construct
  source 1..120: mol_type = other DNA
acagtctactttgtgcactgagtatctcttcaaacttcagtgcatgtttctaccatttgatgctttattatttggcaatctagcttccacaagagcatttcatgcaaagacttgtcttgt

SEQ ID NO: 79749 - DNA, 120 bp, synthetic construct
  source 1..120: mol_type = other DNA
ctacgtgaacgcttccctgcagtgcctgacatacaaaccgccacttgccaactacatgctgttccgggagcactctcaaacgtgtcatcgtcacaagggctgcatgctctgtactatgca

SEQ ID NO: 79750 - DNA, 120 bp, synthetic construct
  source 1..120: mol_type = other DNA
caaaacaaaacgaagcctgagttcaacgtcagaagagtcgaaggtacggtgcctcccgacgtacttgtgattcatcaatcaaaatacaagtgtcggatgaagaaccatcatcctgaacag

SEQ ID NO: 79751 - DNA, 120 bp, synthetic construct
  source 1..120: mol_type = other DNA
cacaggagtgtgtgtattcaactgaaataaattcagaaagccctgaaatcaatctcactgggtgtgtttaaaaatggcatttggggaatttctgggtcatttgtccagctgcgaaagctg

SEQ ID NO: 79752 - DNA, 120 bp, synthetic construct
  source 1..120: mol_type = other DNA
tgcgagaatccaggatatgcacggcttattttggccttttcccactgaaacaagggccagtattaaaaatggcacgctatcctctgtttcactccctgcttttaaacgtctccgatgttt

SEQ ID NO: 79753 - DNA, 120 bp, synthetic construct
  source 1..120: mol_type = other DNA
aggggacacaccctgtgactccttcctgaattgagtgctgatatttgattggctaatcgcgcacctgatgagtgggtggggtgttcgcggttggtgtgggtgagttatagaagggctgat

SEQ ID NO: 79754 - DNA, 120 bp, synthetic construct
  source 1..120: mol_type = other DNA
cattgtggtgtttgtctccagagggcgccggcctccaagacgttaactttacacaactctgccaaggtcctcatccttgtattgaagagattccccgatgtcacaggcaacaaaattgcc

SEQ ID NO: 79755 - DNA, 120 bp, synthetic construct; identical to SEQ ID NO: 79716
  source 1..120: mol_type = other DNA

SEQ ID NO: 79756 - DNA, 120 bp, synthetic construct; identical to SEQ ID NO: 79717
  source 1..120: mol_type = other DNA

SEQ ID NO: 79757 - DNA, 120 bp, synthetic construct; identical to SEQ ID NO: 79713
  source 1..120: mol_type = other DNA

SEQ ID NO: 79758 - DNA, 120 bp, synthetic construct; identical to SEQ ID NO: 79714
  source 1..120: mol_type = other DNA

SEQ ID NO: 79759 - DNA, 120 bp, synthetic construct
  source 1..120: mol_type = other DNA
catgtctcagcagaacacaggacctcttgtctatgtcctctatgctgtgctggtccacgctgggtggagttgtcacaacggacattacttctcttatgtcaaagctcaagaaggccaatg

SEQ ID NO: 79760 - DNA, 120 bp, synthetic construct; identical to SEQ ID NO: 7742
  source 1..120: mol_type = other DNA

SEQ ID NO: 79761 - DNA, 120 bp, synthetic construct
  source 1..120: mol_type = other DNA
gattgtgccactgcattccagcctgggtgacagagcgagactccatctcaaaaaacaaacaaaaaaactggctttaaaaaaaaaaaaaatctgtaagggtggggggagggtctccagaaa

SEQ ID NO: 79762 - DNA, 120 bp, synthetic construct
  source 1..120: mol_type = other DNA
gacgagctgagagaagaaggcttcaaacgatcaaactgctccgagctacaggaagaagttcaaacccatggcaaagaggttaaaaaccttgaaaaaaaattagacgaatggctaactaga

SEQ ID NO: 79763 - DNA, 120 bp, synthetic construct
  source 1..120: mol_type = other DNA
actgcccaaggtcatttatagattcaatgccatccccatcaaactaccaatgactttcttcacagaattggaaaaaactactttaaagttcatatggaaccaaaaaagagcccgcattgc

SEQ ID NO: 79764 - DNA, 120 bp, synthetic construct
  source 1..120: mol_type = other DNA
ttacactgttggtgggactgtaaactagttcaatcattgtggaagtcagtgtggcaatttctcagggatctagaattagaaataccatttgatccagccatcccattactgcgtatatac

SEQ ID NO: 79765 - DNA, 120 bp, synthetic construct
  source 1..120: mol_type = other DNA
agcatgctgccttcaagcatctgtttaacaaagcacatcttgcaccgcccttaatcaatttaaccctgtgtggacacagcacatgtttcagagagcacggggttgggagtaaagttatag

SEQ ID NO: 79766 - DNA, 120 bp, synthetic construct
  source 1..120: mol_type = other DNA
ccgagatcacgccactgcactccagcctgggcaacattgagcactgagtgagcgagactccgtctgcaatcccggcacctcgggaggctgaggcaggcagatcactcgcggtcaggagct

SEQ ID NO: 79767 - DNA, 120 bp, synthetic construct; identical to SEQ ID NO: 9183
  source 1..120: mol_type = other DNA

SEQ ID NO: 79768 - DNA, 120 bp, synthetic construct; identical to SEQ ID NO: 9184
  source 1..120: mol_type = other DNA

SEQ ID NO: 79769 - DNA, 120 bp, synthetic construct
  source 1..120: mol_type = other DNA
tttaaaaaataaactggtattagtcaatgtttcgtgttccgcattatttgaaccatttgcccttacagaaagagaaatacttgtttgtgttttaaataaaactgatgtaggataaaaaaa

SEQ ID NO: 79770 - DNA, 120 bp, synthetic construct; identical to SEQ ID NO: 26644
  source 1..120: mol_type = other DNA

SEQ ID NO: 79771 - DNA, 120 bp, synthetic construct; identical to SEQ ID NO: 26645
  source 1..120: mol_type = other DNA

SEQ ID NO: 79772 - DNA, 120 bp, synthetic construct; identical to SEQ ID NO: 26646
  source 1..120: mol_type = other DNA

SEQ ID NO: 79773 - DNA, 120 bp, synthetic construct
  source 1..120: mol_type = other DNA
tcggaaagctgaggcaggagaatcacttgaacctgggaggcggcggttacagtgagctgagatcacaccagtgcactccagcctgcgtgacaaagtgaaactctgtctcaaaaaaaaaaa

SEQ ID NO: 79774 - DNA, 120 bp, synthetic construct
  source 1..120: mol_type = other DNA
cctgccaccaggctgttcttagactcctgacctcaagtgatcctcccactttggcctcccaaagtgctgttttctatttttaccatgtaaattttattttagtttctacactttattgtt

SEQ ID NO: 79775 - DNA, 120 bp, synthetic construct; identical to SEQ ID NO: 26647
  source 1..120: mol_type = other DNA

SEQ ID NO: 79776 - DNA, 120 bp, synthetic construct; identical to SEQ ID NO: 26648
  source 1..120: mol_type = other DNA

SEQ ID NO: 79777 - DNA, 120 bp, synthetic construct; identical to SEQ ID NO: 26649
  source 1..120: mol_type = other DNA

SEQ ID NO: 79778 - DNA, 120 bp, synthetic construct; identical to SEQ ID NO: 26650
  source 1..120: mol_type = other DNA

SEQ ID NO: 79779 - DNA, 120 bp, synthetic construct; identical to SEQ ID NO: 26651
  source 1..120: mol_type = other DNA

SEQ ID NO: 79780 - DNA, 120 bp, synthetic construct; identical to SEQ ID NO: 26652
  source 1..120: mol_type = other DNA

SEQ ID NO: 79781 - DNA, 120 bp, synthetic construct; identical to SEQ ID NO: 26653
  source 1..120: mol_type = other DNA

SEQ ID NO: 79782 - DNA, 120 bp, synthetic construct; identical to SEQ ID NO: 26654
  source 1..120: mol_type = other DNA

SEQ ID NO: 79783 - DNA, 120 bp, synthetic construct; identical to SEQ ID NO: 26655
  source 1..120: mol_type = other DNA

SEQ ID NO: 79784 - DNA, 120 bp, synthetic construct; identical to SEQ ID NO: 26656
  source 1..120: mol_type = other DNA

SEQ ID NO: 79785 - DNA, 120 bp, synthetic construct; identical to SEQ ID NO: 26657
  source 1..120: mol_type = other DNA

SEQ ID NO: 79786 - DNA, 120 bp, synthetic construct
  source 1..120: mol_type = other DNA
taaaatagccttattatctttcctatttataaagccattcattctttctgtagaaaagaacttaagcggccgggcacggtggctaatgcctgtaatcccagcactttgggaggccgaggt

SEQ ID NO: 79787 - DNA, 120 bp, synthetic construct; identical to SEQ ID NO: 26658
  source 1..120: mol_type = other DNA

SEQ ID NO: 79788 - DNA, 120 bp, synthetic construct; identical to SEQ ID NO: 26659
  source 1..120: mol_type = other DNA

SEQ ID NO: 79789 - DNA, 120 bp, synthetic construct
  source 1..120: mol_type = other DNA
tgtgtgatttcttttgctcagtatagtgtttgtaagggtccatttgtagttcattactattattttttttagacggagtcttgctctgttgcccaggatggagtgcagtggcgcagtctc

SEQ ID NO: 79790 - DNA, 120 bp, synthetic construct
  source 1..120: mol_type = other DNA
attatattaaaatttttgtaaattacttatccaggtgctgtggttacatgcctgtagtcctagctactagggagactgaggcaaaaggatcccttgaacccaggagttcaaagctgcagg

SEQ ID NO: 79791 - DNA, 120 bp, synthetic construct; identical to SEQ ID NO: 26660
  source 1..120: mol_type = other DNA

SEQ ID NO: 79792 - DNA, 120 bp, synthetic construct
  source 1..120: mol_type = other DNA
ttcaagcaattctcctgcctcagcctctcgagtagttgagactacaggtgcccatcaccatgcgtggctaatttttgtatttttaatagagacggggttttaccatagtggccaggttgg

SEQ ID NO: 79793 - DNA, 120 bp, synthetic construct; identical to SEQ ID NO: 26661
  source 1..120: mol_type = other DNA

SEQ ID NO: 79794 - DNA, 120 bp, synthetic construct; identical to SEQ ID NO: 26662
  source 1..120: mol_type = other DNA

SEQ ID NO: 79795 - DNA, 120 bp, synthetic construct; identical to SEQ ID NO: 26663
  source 1..120: mol_type = other DNA

SEQ ID NO: 79796 - DNA, 120 bp, synthetic construct; identical to SEQ ID NO: 26664
  source 1..120: mol_type = other DNA

SEQ ID NO: 79797 - DNA, 120 bp, synthetic construct; identical to SEQ ID NO: 26665
  source 1..120: mol_type = other DNA

SEQ ID NO: 79798 - DNA, 120 bp, synthetic construct
  source 1..120: mol_type = other DNA
ctcagcctcccgagtagctggaactacaggcgcgtgccaccacgcccagctaatttttgtattttcagtagagacggggtttcaccatgttggctaggatggtcttgatttcttgacctc

SEQ ID NO: 79799 - DNA, 120 bp, synthetic construct; identical to SEQ ID NO: 26666
  source 1..120: mol_type = other DNA

SEQ ID NO: 79800 - DNA, 120 bp, synthetic construct
  source 1..120: mol_type = other DNA
aaatgatctgctggcctcggcctcccaaagtgctgggattacaggatgagccaccgtgcccgtttctctctctctctttctttcctttcttttctttcttttttgaggcagggtctcatt

SEQ ID NO: 79801 - DNA, 120 bp, synthetic construct; identical to SEQ ID NO: 26667
  source 1..120: mol_type = other DNA

SEQ ID NO: 79802 - DNA, 120 bp, synthetic construct; identical to SEQ ID NO: 26668
  source 1..120: mol_type = other DNA

SEQ ID NO: 79803 - DNA, 120 bp, synthetic construct; identical to SEQ ID NO: 26669
  source 1..120: mol_type = other DNA

SEQ ID NO: 79804 - DNA, 120 bp, synthetic construct; identical to SEQ ID NO: 26670
  source 1..120: mol_type = other DNA

SEQ ID NO: 79805 - DNA, 120 bp, synthetic construct; identical to SEQ ID NO: 26671
  source 1..120: mol_type = other DNA

SEQ ID NO: 79806 - DNA, 120 bp, synthetic construct
  source 1..120: mol_type = other DNA
acgccctgctaattttttgtattttagtagatacggggtttcaccatgttggccagtatggtctcaatctcttgaccttgtgatcagcccgcctcagcctctcaaagtgctgggattaca

SEQ ID NO: 79807 - DNA, 120 bp, synthetic construct
  source 1..120: mol_type = other DNA
tgcttcttttttttttttttgagaaggagtctctcactctgtcgcccaggcggtgctgtcttggctcactgcaacctccgcctcccgggttcaagagattctcctgcctccccctcccga

SEQ ID NO: 79808 - DNA, 120 bp, synthetic construct; identical to SEQ ID NO: 26672
  source 1..120: mol_type = other DNA

SEQ ID NO: 79809 - DNA, 120 bp, synthetic construct
  source 1..120: mol_type = other DNA
actgctgtgttccacacctttctacataaaaatatagccttttgtattaacaacatttctaaaaacattttattgtttgttttttgagatggagtttcgctgttgttgcccaggctggag

SEQ ID NO: 79810 - DNA, 120 bp, synthetic construct; identical to SEQ ID NO: 26673
  source 1..120: mol_type = other DNA

SEQ ID NO: 79811 - DNA, 120 bp, synthetic construct; identical to SEQ ID NO: 26674
  source 1..120: mol_type = other DNA

SEQ ID NO: 79812 - DNA, 120 bp, synthetic construct
  source 1..120: mol_type = other DNA
tatctgttatggtgatctgtgatcagtgatctttgatgttactattgtaattattttagggcaccacaaactgcgcccatataagacaacagacttaattgataagtgttacgtgtgttc

SEQ ID NO: 79813 - DNA, 120 bp, synthetic construct
  source 1..120: mol_type = other DNA
agctaacagagctgagctcatgaggttaatgaaagaagccatctccaaaacataaaagtgtaagaggggctgggcgcggtggctcacgcctgtcatcccagcactttgggaggccaaggt

SEQ ID NO: 79814 - DNA, 120 bp, synthetic construct; identical to SEQ ID NO: 26675
  source 1..120: mol_type = other DNA

SEQ ID NO: 79815 - DNA, 120 bp, synthetic construct; identical to SEQ ID NO: 26676
  source 1..120: mol_type = other DNA

SEQ ID NO: 79816 - DNA, 120 bp, synthetic construct; identical to SEQ ID NO: 26677
  source 1..120: mol_type = other DNA

SEQ ID NO: 79817 - DNA, 120 bp, synthetic construct; identical to SEQ ID NO: 26678
  source 1..120: mol_type = other DNA

SEQ ID NO: 79818 - DNA, 120 bp, synthetic construct
  source 1..120: mol_type = other DNA
cacctgtaatcccagcactttgggaggccgaggtgggcggatcttgaggtcaggagatcgagaccatcctggctaacacggtgaaaccccatctctactaaaaatacaaaaaattagcca

SEQ ID NO: 79819 - DNA, 120 bp, synthetic construct
  source 1..120: mol_type = other DNA
tccgcccgcctcggcctcccagagtgctgggattacaggcttgagccactgtgcccggccttggatcacttttttaaaatgttattttcttctattttacaaaaatgttacaatgaaaat

SEQ ID NO: 79820 - DNA, 120 bp, synthetic construct
  source 1..120: mol_type = other DNA
gtggaggatgcagtgagccaagatcatgccactgcaccccagcctgggtgacagaacaagactccatctcaagaaaaaaaaaaaagaaaaatatatatatgaacttcagaatctgaggtc

SEQ ID NO: 79821 - DNA, 120 bp, synthetic construct; identical to SEQ ID NO: 26679
  source 1..120: mol_type = other DNA

SEQ ID NO: 79822 - DNA, 120 bp, synthetic construct; identical to SEQ ID NO: 26680
  source 1..120: mol_type = other DNA

SEQ ID NO: 79823 - DNA, 120 bp, synthetic construct
  source 1..120: mol_type = other DNA
actaaaaatacaaaaattagctgggtgtggtagcacgtgcctgtaatcccagctactcaggaagccaaggcacgagaattgcttgaacctgggaggcggagattgtagtgagttgagatt

SEQ ID NO: 79824 - DNA, 120 bp, synthetic construct; identical to SEQ ID NO: 26681
  source 1..120: mol_type = other DNA

SEQ ID NO: 79825 - DNA, 120 bp, synthetic construct
  source 1..120: mol_type = other DNA
tacatatttaacaatatatccttttgatccagtacaatccagtcctagcacactactgaaaataagaggctcattcagcactttgggaggctgaggtgggaggatcacttgaggccagga

SEQ ID NO: 79826 - DNA, 120 bp, synthetic construct; identical to SEQ ID NO: 26682
  source 1..120: mol_type = other DNA

SEQ ID NO: 79827 - DNA, 120 bp, synthetic construct; identical to SEQ ID NO: 26683
  source 1..120: mol_type = other DNA

SEQ ID NO: 79828 - DNA, 120 bp, synthetic construct; identical to SEQ ID NO: 26684
  source 1..120: mol_type = other DNA

SEQ ID NO: 79829 - DNA, 120 bp, synthetic construct; identical to SEQ ID NO: 26685
  source 1..120: mol_type = other DNA

SEQ ID NO: 79830 - DNA, 120 bp, synthetic construct; identical to SEQ ID NO: 26686
  source 1..120: mol_type = other DNA

SEQ ID NO: 79831 - DNA, 120 bp, synthetic construct
  source 1..120: mol_type = other DNA
aagttaagtctgaatgtaaattcagtgtaagatgaaaatttatcaatacttatgaaattaggctgggcgctgtggctcacacctgtaatcccaacactttgggaggctgaggtgggcaga

SEQ ID NO: 79832 - DNA, 120 bp, synthetic construct; identical to SEQ ID NO: 26687
  source 1..120: mol_type = other DNA

SEQ ID NO: 79833 - DNA, 120 bp, synthetic construct
  source 1..120: mol_type = other DNA
ttaatacacacacacacacacacacacacacacacacacacacacactgatcagagtaacgggagtttctctcaggagtcatactccatgagcctggacccagtggttctttatgtggaa

SEQ ID NO: 79834 - DNA, 120 bp, synthetic construct
  source 1..120: mol_type = other DNA
gcgcgatctcagctcactgcaagctccacctcccgggttcatgccattctcctgcctcagcctcccgagtagctgggactgcaggtgcctgccaccacgcctggctaattttttgtattt

SEQ ID NO: 79835 - DNA, 120 bp, synthetic construct; identical to SEQ ID NO: 26688
  source 1..120: mol_type = other DNA

SEQ ID NO: 79836 - DNA, 120 bp, synthetic construct
  source 1..120: mol_type = other DNA
agctgggaccacaggtgtgtgccattgtgcctggctaatttttaaaaagtttttttttgtagagacagtgtcttcctatgttgcctaggctggtcttgaactcctgagcttaagtaatct

SEQ ID NO: 79837 - DNA, 120 bp, synthetic construct
  source 1..120: mol_type = other DNA
cacaatcaactcactgcagccttgaattcctgggcacaagtgatcctcccaattcagcttctcaagtagctaggactacaggtgtgcaccaccatgcctggctgaattttttttttaaga

SEQ ID NO: 79838 - DNA, 120 bp, synthetic construct
  source 1..120: mol_type = other DNA
tgtggtggcgggcgcctgtagtcccagctactcgggaggctgaggcaggagaatggcgtgaacccgggaggcagaaattgcagtgagccgagatcacgccactgcactccagcctgggtg

SEQ ID NO: 79839 - DNA, 120 bp, synthetic construct
  source 1..120: mol_type = other DNA
tgctgggattacaaatatgaggcactttgcctggcactaggagacactttctcagtgagacctaactcatttggggctcagtgaggtgatattttcttaattgagttgtgcttgaaaaaa

SEQ ID NO: 79840 - DNA, 120 bp, synthetic construct
  source 1..120: mol_type = other DNA
caggtgagatggaagggtgaactctacctcacctcctggtgaggttgatgtttcctggtgtttataactttctttgtaaatacttgcaaggaatttaccattttaatgctggaagagacg

SEQ ID NO: 79841 - DNA, 120 bp, synthetic construct
  source 1..120: mol_type = other DNA
tttaagtggatacttgcaacacctgagctcattgcaacagcaacaggaggaggctatgaacttattaccgtactgtggtatgcactacggttaaatttatgcagttacaatttaatactg

SEQ ID NO: 79842 - DNA, 120 bp, synthetic construct; identical to SEQ ID NO: 1050
  source 1..120: mol_type = other DNA

SEQ ID NO: 79843 - DNA, 120 bp, synthetic construct
  source 1..120: mol_type = other DNA
tcattctcatgaaataaagcaagactggtagcactaagtggaaagcgtctatctcaattttaaatgttgaatctgtacttttccctggcttaagtctagagcaaccaggtagtatatatg

SEQ ID NO: 79844 - DNA, 120 bp, synthetic construct; identical to SEQ ID NO: 20728
  source 1..120: mol_type = other DNA

SEQ ID NO: 79845 - DNA, 120 bp, synthetic construct; identical to SEQ ID NO: 20727
  source 1..120: mol_type = other DNA

SEQ ID NO: 79846 - DNA, 120 bp, synthetic construct
  source 1..120: mol_type = other DNA
gcttttcagtggattaggtttagaatgcatcagccaactcctgctcaataatccatttttccagcccggaatgtcttaaattgaggaaggacgaagtcccagaggtggggagcaggggga

SEQ ID NO: 79847 - DNA, 120 bp, synthetic construct; identical to SEQ ID NO: 20726
  source 1..120: mol_type = other DNA

SEQ ID NO: 79848 - DNA, 120 bp, synthetic construct; identical to SEQ ID NO: 66383
  source 1..120: mol_type = other DNA

SEQ ID NO: 79849 - DNA, 120 bp, synthetic construct; identical to SEQ ID NO: 20725
  source 1..120: mol_type = other DNA

SEQ ID NO: 79850 - DNA, 120 bp, synthetic construct; identical to SEQ ID NO: 20724
  source 1..120: mol_type = other DNA

SEQ ID NO: 79851 - DNA, 120 bp, synthetic construct
  source 1..120: mol_type = other DNA
taatactatgtcccaatgaagatgtactggcaatcataataggtagtattgggttaaaagcattagtttgctgtaggtacgttaggagtactccccatgtgattgatcagtgaatttaaa

SEQ ID NO: 79852 - DNA, 120 bp, synthetic construct
  source 1..120: mol_type = other DNA
tcatcttttgcacctgcaaaaaggctgcagtaaactgggccattccatactttgattcatgtattcaaatgctacttatgagctctctgtgtattgagccccaccaggatgctggggaca

SEQ ID NO: 79853 - DNA, 120 bp, synthetic construct; identical to SEQ ID NO: 20722
  source 1..120: mol_type = other DNA

SEQ ID NO: 79854 - DNA, 120 bp, synthetic construct
  source 1..120: mol_type = other DNA
taaaggcctcaaaagcctgccatggtcttaattcattccaaacacctgcttttgtcagttgcccttttctctgtaaaaattttcgtagttaacaccattttgtccatgtgaactatgtgc

SEQ ID NO: 79855 - DNA, 120 bp, synthetic construct
  source 1..120: mol_type = other DNA
aacggattgctgatttaaaaactggttccttgcttagcttcagcaaaacagcaaagtctaccacattaaatgtatattgtttatttgatttttattgactttgttgtcttattttaacta

SEQ ID NO: 79856 - DNA, 120 bp, synthetic construct; identical to SEQ ID NO: 1051
  source 1..120: mol_type = other DNA

SEQ ID NO: 79857 - DNA, 120 bp, synthetic construct
  source 1..120: mol_type = other DNA
gacaagaaaccccacagtttgaagagacagagcaagcatcagaaccagactcagatatgaaagaaatatcggaagtatccaaccaggaatttaaaataactaagattaacatgctagggg

SEQ ID NO: 79858 - DNA, 120 bp, synthetic construct
  source 1..120: mol_type = other DNA
tagcaagctgtgagtggtggctcatgcctgtaatcccagcactttgatctgagacggctggatcacctgaggccagaagtttgagaccagttttgccaacatggcgaaaccccatctctg

SEQ ID NO: 79859 - DNA, 120 bp, synthetic construct
  source 1..120: mol_type = other DNA
aattaatttcatgtttctatttacttttgataaaagtactactagaggctgggtgtggtggctcactcctgtaatcccagcactttgggaggctgaggtgggaggatcacgaggtcagga

SEQ ID NO: 79860 - DNA, 120 bp, synthetic construct
  source 1..120: mol_type = other DNA
ttataaacatggaaaacaattattaaacccaccatatgctcatactgatattaaatggtgtgccagattctagaaagagttaccttttggtaagagcactgcttgttaactatggttggt

SEQ ID NO: 79861 - DNA, 120 bp, synthetic construct; identical to SEQ ID NO: 1052
  source 1..120: mol_type = other DNA

SEQ ID NO: 79862 - DNA, 120 bp, synthetic construct; identical to SEQ ID NO: 20717
  source 1..120: mol_type = other DNA

SEQ ID NO: 79863 - DNA, 120 bp, synthetic construct
  source 1..120: mol_type = other DNA
tttcaagaaataattgcttatccttactagattcaacatattctaatgtttcacatattatttttatttcttaattttttttttaaagatggggttttactctgttgcccaggctgaaat

SEQ ID NO: 79864 - DNA, 120 bp, synthetic construct; identical to SEQ ID NO: 20715
  source 1..120: mol_type = other DNA

SEQ ID NO: 79865 - DNA, 120 bp, synthetic construct
  source 1..120: mol_type = other DNA
ttaagaatgtttgcattttaaaattaaagttttcaatacaacaatgatattatctcaaaatactcagcatgtctaacaggtctcttttaaaagctcagcatgtttaatgtagacgttgct

SEQ ID NO: 79866 - DNA, 120 bp, synthetic construct; identical to SEQ ID NO: 66365
  source 1..120: mol_type = other DNA

SEQ ID NO: 79867 - DNA, 120 bp, synthetic construct
  source 1..120: mol_type = other DNA
aggcaaatgcagttttaaaactgtgccataggccaggcactggtggttcatgcctataatcccaccactttgggaggccgaggcaggcggatcacaagatcaagatactgagactatcct

SEQ ID NO: 79868 - DNA, 120 bp, synthetic construct
  source 1..120: mol_type = other DNA
gtttctcgtgagaatgtcttgacgttatctcatctactttttctcctcttgtattagcttgttgcttttctacttcacccctcttccttccaaccccaaatagcttaggacaatggagtc

SEQ ID NO: 79869 - DNA, 120 bp, synthetic construct; identical to SEQ ID NO: 66362
  source 1..120: mol_type = other DNA

SEQ ID NO: 79870 - DNA, 120 bp, synthetic construct
  source 1..120: mol_type = other DNA
gatggtctcgatctcctgacctcgtgatccacctgccttggcctcccaaagtgtgggtattacaggcaagagccaccgcatccagccaaaatacttcttttacacctattacataaagat

SEQ ID NO: 79871 - DNA, 120 bp, synthetic construct
  source 1..120: mol_type = other DNA
aataatgatacctaccccgcctgatagaagattcttatgagggaacatgatacgtgaccagtaaatgttaatgctttccttatacgtgaaatgacataaaatcttggaatattaatagat

SEQ ID NO: 79872 - DNA, 120 bp, synthetic construct; identical to SEQ ID NO: 1053
  source 1..120: mol_type = other DNA

SEQ ID NO: 79873 - DNA, 120 bp, synthetic construct; identical to SEQ ID NO: 20713
  source 1..120: mol_type = other DNA

SEQ ID NO: 79874 - DNA, 120 bp, synthetic construct
  source 1..120: mol_type = other DNA
atttaaaaagtagacaaatttgatgactaacaacggagaacacgaaacaaatctggtgaataccagaattaagacatgtgtcagccaggcgcagtggctcatgcctgtaatcccagcact

SEQ ID NO: 79875 - DNA, 120 bp, synthetic construct; identical to SEQ ID NO: 1054
  source 1..120: mol_type = other DNA

SEQ ID NO: 79876 - DNA, 120 bp, synthetic construct; identical to SEQ ID NO: 1055
  source 1..120: mol_type = other DNA

SEQ ID NO: 79877 - DNA, 120 bp, synthetic construct
  source 1..120: mol_type = other DNA
cagcctgactgagtgagactttgtctccaaaaaaaaaaaaaaaaaacaaaaaaacaaaaaaaaccatgatattgagatgttctcattttatgtgttgtatgtcagtcttgctcatgtatt

SEQ ID NO: 79878 - DNA, 120 bp, synthetic construct
  source 1..120: mol_type = other DNA
gcttcagaagttgaagtgtctagcacatctgaaacaacaacaaaagcagtggtttctcctccaaagtttgtatttggttcagagtctgttaaaagaatttttagtagtgaaaaatcaaac

SEQ ID NO: 79879 - DNA, 120 bp, synthetic construct
  source 1..120: mol_type = other DNA
ttgaattcttcagccagctctggtgttttaaattgtgctgccaaccgctctagtttggcatcaccatcagagaaatcactggctaaccacatccatgctctatctgatccagagaggggc

SEQ ID NO: 79880 - DNA, 120 bp, synthetic construct
  source 1..120: mol_type = other DNA
gcccaaaatagtcatgaaataaataccttcttcattcctaaacaatttatcaaatgatgttaacaataatgatgatgatgatgatgataacatttattgagcatttattaatgtgccagc

SEQ ID NO: 79881 - DNA, 120 bp, synthetic construct
  source 1..120: mol_type = other DNA
agattatcaaatgacaaactagaaaaaaattgctaaatatgacatgaagaataagagaatagcatcgctgtgatcaacaagaactacctcacaagcattaaaaaaggaataaaggagaaa

SEQ ID NO: 79882 - DNA, 120 bp, synthetic construct
  source 1..120: mol_type = other DNA
ttaggaaagaaatgttaataggcctcaaggaacatgtttttgaagtgagccttgaaaatctgcaaaatgacaaggttgcattgtgcaaattgaagctattatgagaatgttcaagtcaaa

SEQ ID NO: 79883 - DNA, 120 bp, synthetic construct; identical to SEQ ID NO: 66938
  source 1..120: mol_type = other DNA

SEQ ID NO: 79884 - DNA, 120 bp, synthetic construct
  source 1..120: mol_type = other DNA
gaacctacacctctggggaattattttgatgataatgatgagaggcaggacgttatataggaaatcttacttaatttgaaatattatggttatataaagaaagaaaaggagtttggacct

SEQ ID NO: 79885 - DNA, 120 bp, synthetic construct
  source 1..120: mol_type = other DNA
aggtgagagagttaatgaattaggttttgtattaacgaatgaaaatgggagcagataaatttttaacaaattaagaatcatattttaaaatcagcaccaggtacctagaactcattggca

SEQ ID NO: 79886 - DNA, 120 bp, synthetic construct
  source 1..120: mol_type = other DNA
tctcaattttcaagctaaataaaatttcccccactcatccatctacagtgcctagtccagatgctacacatacacatccaagaaataagaaactagtggaatcacctagaaaactttatg

SEQ ID NO: 79887 - DNA, 120 bp, synthetic construct
  source 1..120: mol_type = other DNA
tcaggcgatctgcccaccttggcctcccaaagtgctgggattacaggtgtaaaccaccacacccagccctttactatatttttgaaagtactttatgtgtctctctcctcatcttccaca

SEQ ID NO: 79888 - DNA, 120 bp, synthetic construct
  source 1..120: mol_type = other DNA
tttacagactccaggggcacaggcaactaaaaataaaagacattaattaagggctttcatttgcaaaaaattccaaaagtaaaaactctaaaatgatatattttatcttatttacatttt

SEQ ID NO: 79889 - DNA, 120 bp, synthetic construct
  source 1..120: mol_type = other DNA
aagctgaaagttttttgttttaaaaagctaatgatttcataaaagcactatttgtatagatttttcacaggaaagcagaagacattgaaaatgatgccgtttttcctgaagaacaagaag

SEQ ID NO: 79890 - DNA, 120 bp, synthetic construct
  source 1..120: mol_type = other DNA
gggcagatcacaagatcaggagatcgagatcattcctggctaacacggtgaaaccccgtctctactaaaaatacaaaaaaaaactctactaaaactacaaaattagccagacatggtggc

SEQ ID NO: 79891 - DNA, 120 bp, synthetic construct
  source 1..120: mol_type = other DNA
tagtatataccagccacttacaattaaaggagaaatgtaattctcaccacagctcctatcagccgttatgcctgccccttcctgtgtgtaaacggctttgtacagagagacaaaaatctt

SEQ ID NO: 79892 - DNA, 120 bp, synthetic construct
  source 1..120: mol_type = other DNA
cactgcgctccagcctgggtgacggagcgagactctgtctcaaaaaaaagaaaagaaaagaaaagaaaaggttatgcgcttctggaagcatgaagaggtataatctttctgtcattttgg

SEQ ID NO: 79893 - DNA, 120 bp, synthetic construct
  source 1..120: mol_type = other DNA
gtgcgatctcggctcactgtaacctctgcctcccgggttcaagtaattctactgcctcagtctcccaagtagcgggattacaaatgcccaccaccacgcccggctaattttttgtatttt

SEQ ID NO: 79894 - DNA, 120 bp, synthetic construct
  source 1..120: mol_type = other DNA
tgggtggataatgaggtcaggagatcaagaccatcctggctaacacagtgaaactccgtctctactaaaaatacaaaaaaaaaaaaaaaaaaattagccggccctggtggcgggcgcctg

SEQ ID NO: 79895 - DNA, 120 bp, synthetic construct; identical to SEQ ID NO: 1056
  source 1..120: mol_type = other DNA

SEQ ID NO: 79896 - DNA, 120 bp, synthetic construct; identical to SEQ ID NO: 1104
  source 1..120: mol_type = other DNA

SEQ ID NO: 79897 - DNA, 120 bp, synthetic construct
  source 1..120: mol_type = other DNA
gcttgggtgacagagtgagaccctatctccaaaaaaagaaaaaaaaaaaaaaagcatacacagagcagctctgagaaattagtttctactaaaagcacattcgtgttacattcagagaaa

SEQ ID NO: 79898 - DNA, 120 bp, synthetic construct
  source 1..120: mol_type = other DNA
gtcagtatatataaagggcattctcattagtttggatgcttgcatattattccattgtatggatgtactgtagttttggagtttttaaaaccagggtcctaaaaccaggacattagcttg

SEQ ID NO: 79899 - DNA, 120 bp, synthetic construct
  source 1..120: mol_type = other DNA
acagagatacctacctcagtctttattagctaccacatatttctgtagaatgaatatataatagaaacatcttagatgcttgtattttatttgatcagtttattttaaagcttaatgaac

SEQ ID NO: 79900 - DNA, 120 bp, synthetic construct
  source 1..120: mol_type = other DNA
ccactgtgctccagcctgggcgacagagtgtgagactccatctcaaaaaaaaataaaataaataaaaataagaactatcagttacttgagaatttctataagaaccttttaatgtttgta

SEQ ID NO: 79901 - DNA, 120 bp, synthetic construct
  source 1..120: mol_type = other DNA
ttttggaagactgcttatttcttttcctttcaaaagttatgcaagctcattaaaaaaaaaagtccgggaatggtggctcacgcttgtaaatcccagcactttgggaggccgaggcaggtg

SEQ ID NO: 79902 - DNA, 120 bp, synthetic construct
  source 1..120: mol_type = other DNA
catttcacggagtcttgatgtgttttaaatgaaggtgtgctctggtatgtaatgacaatatgtgaacaaactgtggaattaaaatgaaatagtcaatttgatacagtggaaaataactaa

SEQ ID NO: 79903 - DNA, 120 bp, synthetic construct
  source 1..120: mol_type = other DNA
gcctgtaatcccagcacattggtaagctgaggcgggcggatcgtgaggtcaggagttcgagaccagcctggccaacatagtaaaaccctgtctctactaaaaatataaaaaaagtttagc

SEQ ID NO: 79904 - DNA, 120 bp, synthetic construct
  source 1..120: mol_type = other DNA
agtagctggaattacaggtgcccaccaccacgcctggctaattttttgtatttttagtagagatggggtttcaccatgttggctaggctggtcttgaactcctgacctcaggtgacccac

SEQ ID NO: 79905 - DNA, 120 bp, synthetic construct
  source 1..120: mol_type = other DNA
acgccattcttctgcctcagcctcctgagtagctgggactacaggcgcccaccaccacgctcggctaatttttttgtatttttagtagagacggagtgtcaccctgttagccaggatggt

SEQ ID NO: 79906 - DNA, 120 bp, synthetic construct
  source 1..120: mol_type = other DNA
actcaaattttttggtcacaagttccttttacatttttcttaaggacatcaaagatctttgtatgtgggttcctttttttctttctttctttcttttttgttttgttttttttttttttt

SEQ ID NO: 79907 - DNA, 120 bp, synthetic construct
  source 1..120: mol_type = other DNA
ctttccactagagatgtgcaggaaagtagagaattactggaaaggtgcgttgactttgaggagaatgctttagtataaattgtagtttttctttttgcagtaagttcattgctctaaatt

SEQ ID NO: 79908 - DNA, 120 bp, synthetic construct
  source 1..120: mol_type = other DNA
catttaagatcaggaggtgatgacagtgctttgagatgatgatgaaggtaacagaacagtgggaggagaggggatgtgggattgagtcagatttaaggagatacagagcagtttgagcat

SEQ ID NO: 79909 - DNA, 120 bp, synthetic construct
  source 1..120: mol_type = other DNA
agagaccagggtatcatccatctcatccagaagaggagaaattgataaaggagagaggggaatgaaatacagagtagtaatggacggcttggtcttgagagctggggaaagacgagttta

SEQ ID NO: 79910 - DNA, 120 bp, synthetic construct
  source 1..120: mol_type = other DNA
gttcctttacttctgagtagcatttcatggtccacaatttaaccattcactttttttatttttatttttttgagacagagtcttgctctgtcgcccatgctggagtgcagtggtgctatc

SEQ ID NO: 79911 - DNA, 120 bp, synthetic construct
  source 1..120: mol_type = other DNA
ttgagcatcatgtcagtgctcaaaaaatttcagattttggagcatttaggatttcagattttaaatgctcaacctgtataagcattggggaaaaatgaagtagcatataggatctttctg

SEQ ID NO: 79912 - DNA, 120 bp, synthetic construct
  source 1..120: mol_type = other DNA
aacatacaaaacataaagggagaaaacttaagacataaccatttctaatatttggagtttaaattacttttcaatagcaaaccttaagcccaggtgtttgtgtttcctttaacatttttc

SEQ ID NO: 79913 - DNA, 120 bp, synthetic construct
  source 1..120: mol_type = other DNA
ttggtaaatgtgacatttaatggtaaaacgagtatgtggtcaactctatgtacgtgtttttaagtattacccatttctttctatgaatacttctgagttatctgcataaatagtggtagt

SEQ ID NO: 79914 - DNA, 120 bp, synthetic construct
  source 1..120: mol_type = other DNA
aaggaccagcctagattccattgagattgaaaccgtaattagtgttttctgcatgctgctgctttataccaagggcaagaaattgtttggcttaaaacactttttctaaaaattgtcttc

SEQ ID NO: 79915 - DNA, 120 bp, synthetic construct
  source 1..120: mol_type = other DNA
atttagagacaggatctccctgtgtcacccaggctggagtgcagtgtcacagtcataactcacggcagtgtcaacctcctgggctcaagtgattctccttccttggcctcctgagtagct

SEQ ID NO: 79916 - DNA, 120 bp, synthetic construct; identical to SEQ ID NO: 1039
  source 1..120: mol_type = other DNA

SEQ ID NO: 79917 - DNA, 120 bp, synthetic construct
  source 1..120: mol_type = other DNA
tggctgaggcctgtaatcccagcaccttcggaggcggaggaagtcagattacaaggtcgagagaacgacaccatctggccaacatggtgaaaccccatctctactaaaaatacaaaaatt

SEQ ID NO: 79918 - DNA, 120 bp, synthetic construct
  source 1..120: mol_type = other DNA
tgctccattttccagaagttctgttgttaggagtctgatgagagtcttgttcttggtaacaaaggttttctggaagtgtcctttcaattgggaaactcatttctttcagttctgtagcgt

SEQ ID NO: 79919 - DNA, 120 bp, synthetic construct
  source 1..120: mol_type = other DNA
ccaccgcgcccggccccactttagacattctgtactggctattatgctcctccaaaactgtcctcagacactttgctttgcccctcattgtttcagtactgttattggagtttttgttta

SEQ ID NO: 79920 - DNA, 120 bp, synthetic construct
  source 1..120: mol_type = other DNA
aaaatattcttcgtctgtaatccaagcactttgggaggcagagagaccagcctgaccaacatggtgaaaatccgtctctattaaaaatacaaaaatgagccgggcgtggtggcagcgcct

SEQ ID NO: 79921 - DNA, 120 bp, synthetic construct
  source 1..120: mol_type = other DNA
tctattgatccccacctccaaatacctcatcaacaaccgactaattaccacccaacaatgactaatccaactaacctcaaaacaaatgatagccatacacaacactaaagggcgaacctg

SEQ ID NO: 79922 - DNA, 120 bp, synthetic construct
  source 1..120: mol_type = other DNA
ctataggaacacacagctagtaaatggcataattgaaattcaaatggaaatctgattctaaaatatacttgtagcaacatagctgattcctgttactgtatctgctcctgtaaattttgt

SEQ ID NO: 79923 - DNA, 120 bp, synthetic construct
  source 1..120: mol_type = other DNA
atgtgtgtatgcgtgtgcatgtgtgtgtgaaaaaatggattttaaaggtattggatgcccgttgagaatgtttatattcctctaccccttgaggtttatggttagcaaaaaaatagtaac

SEQ ID NO: 79924 - DNA, 120 bp, synthetic construct
  source 1..120: mol_type = other DNA
gcttaagaagttccattagtgcagatgatgacaactatgtatgcaaaagtaccagagaaattttatgtgtgtttttatgcatgtatctttgtgtatggttacagtatgatcgtggcaaat

SEQ ID NO: 79925 - DNA, 120 bp, synthetic construct; identical to SEQ ID NO: 2454
  source 1..120: mol_type = other DNA

SEQ ID NO: 79926 - DNA, 120 bp, synthetic construct
  source 1..120: mol_type = other DNA
acaggctctctcctgggtactttcacagcattttccacccctgctgaaaacttctgcctggacatccaggcatttccatacatcctctgaaatctatctagagattcccagcaagatcac

SEQ ID NO: 79927 - DNA, 120 bp, synthetic construct
  source 1..120: mol_type = other DNA
gcaacttctggctcccaggctaaagccgtcctcccacctcagcctcccgagtggctggaactacatgcacaagccaccgtgcctgactacatttttttgttttcatttttgtagagatga

SEQ ID NO: 79928 - DNA, 120 bp, synthetic construct; identical to SEQ ID NO: 1923
  source 1..120: mol_type = other DNA

SEQ ID NO: 79929 - DNA, 120 bp, synthetic construct
  source 1..120: mol_type = other DNA
tgcaagtgatgcacccacctcacctcccacagtgctgggattactggcgtgggccaccgtggcgggcccgtcgttggcattgtaaagagttttatttccttttctgattttatggcattg

SEQ ID NO: 79930 - DNA, 120 bp, synthetic construct; identical to SEQ ID NO: 1915
  source 1..120: mol_type = other DNA

SEQ ID NO: 79931 - DNA, 120 bp, synthetic construct; identical to SEQ ID NO: 1924
  source 1..120: mol_type = other DNA

SEQ ID NO: 79932 - DNA, 120 bp, synthetic construct; identical to SEQ ID NO: 1917
  source 1..120: mol_type = other DNA

SEQ ID NO: 79933 - DNA, 120 bp, synthetic construct; identical to SEQ ID NO: 33855
  source 1..120: mol_type = other DNA

SEQ ID NO: 79934 - DNA, 120 bp, synthetic construct
  source 1..120: mol_type = other DNA
tcaccaattgttagtagctttcgcttcataggtttcacatctcttccctccgtctcttaccgtgctgcccacacactcacacacacacacacacacacatacggatatatgtttactgtt

SEQ ID NO: 79935 - DNA, 120 bp, synthetic construct; identical to SEQ ID NO: 1920
  source 1..120: mol_type = other DNA

SEQ ID NO: 79936 - DNA, 120 bp, synthetic construct; identical to SEQ ID NO: 1921
  source 1..120: mol_type = other DNA

SEQ ID NO: 79937 - DNA, 120 bp, synthetic construct
  source 1..120: mol_type = other DNA
gcaaaggacatgaactcatcattttttagggctgcatagtattccatggtgtatatgtgccacattttcttaatccagtctatcgttgttggacatttgggttggttccaagtctttgct

SEQ ID NO: 79938 - DNA, 120 bp, synthetic construct
  source 1..120: mol_type = other DNA
tgaaatcgtgtattgtaactctctgagctggtatgtagagacatcgttctttttttttctttttttctttgtcctcttttgagacggagtcttgctctgtcgcccaggctggagtgcagt

SEQ ID NO: 79939 - DNA, 120 bp, synthetic construct
  source 1..120: mol_type = other DNA
tgcagccttgacctcctgggctcaagtgcgcctcccacctcagcctcctgaggagctgtgagtataggtacatgccaccatgcccagctaatttttcgatggttttttgtttgttttttg

SEQ ID NO: 79940 - DNA, 120 bp, synthetic construct; identical to SEQ ID NO: 33853
  source 1..120: mol_type = other DNA

SEQ ID NO: 79941 - DNA, 120 bp, synthetic construct
  source 1..120: mol_type = other DNA
cccttgagcgggaggtcgaggctgcagtgagctgtgatcacgccgctgcactccagcctgagcaacacagcgagaccgcgtgtccaaaagaaatttagaaaaaaatgtcctctgcctttt

SEQ ID NO: 79942 - DNA, 120 bp, synthetic construct
  source 1..120: mol_type = other DNA
aatgcctgaaattgagtggaaaagcgaggaggctatgtagtttgcagcttagcttaggcaaatccctcactatgataaaagttctcgactttatgaatgagagaatggaggtgccagggt

SEQ ID NO: 79943 - DNA, 120 bp, synthetic construct; identical to SEQ ID NO: 33857
  source 1..120: mol_type = other DNA

SEQ ID NO: 79944 - DNA, 120 bp, synthetic construct
  source 1..120: mol_type = other DNA
actgcaacctacacctcccaggttctagggattctcatgcctcagcctcccgtgtagctgggactacaggcgccggccactgcggtcttgaacttctggcctcacctgctctgcccacct

SEQ ID NO: 79945 - DNA, 120 bp, synthetic construct
  source 1..120: mol_type = other DNA
tttcggctcactggaaattctgtctccagggttcaagtgattctcctgcctgagcctctggcggagccgggcttacaggcatgctccgccgcgcccagctaattgttgtatttttagtag

SEQ ID NO: 79946 - DNA, 120 bp, synthetic construct
  source 1..120: mol_type = other DNA
aactacatgcacaagccaccgtgcctgactacatttttttgttttcatttttgtagagatgaggtctcactgtgttgcccaggcagggtttctctggcttttaatgaacaattgcttctt

SEQ ID NO: 79947 - DNA, 120 bp, synthetic construct; identical to SEQ ID NO: 1923
  source 1..120: mol_type = other DNA

SEQ ID NO: 79948 - DNA, 120 bp, synthetic construct; identical to SEQ ID NO: 79929
  source 1..120: mol_type = other DNA

SEQ ID NO: 79949 - DNA, 120 bp, synthetic construct; identical to SEQ ID NO: 1915
  source 1..120: mol_type = other DNA

SEQ ID NO: 79950 - DNA, 120 bp, synthetic construct; identical to SEQ ID NO: 1924
  source 1..120: mol_type = other DNA

SEQ ID NO: 79951 - DNA, 120 bp, synthetic construct; identical to SEQ ID NO: 1917
  source 1..120: mol_type = other DNA

SEQ ID NO: 79952 - DNA, 120 bp, synthetic construct; identical to SEQ ID NO: 33855
  source 1..120: mol_type = other DNA

SEQ ID NO: 79953 - DNA, 120 bp, synthetic construct; identical to SEQ ID NO: 79934
  source 1..120: mol_type = other DNA

SEQ ID NO: 79954 - DNA, 120 bp, synthetic construct; identical to SEQ ID NO: 1920
  source 1..120: mol_type = other DNA

SEQ ID NO: 79955 - DNA, 120 bp, synthetic construct; identical to SEQ ID NO: 1922
  source 1..120: mol_type = other DNA

SEQ ID NO: 79956 - DNA, 120 bp, synthetic construct; identical to SEQ ID NO: 79937
  source 1..120: mol_type = other DNA

SEQ ID NO: 79957 - DNA, 120 bp, synthetic construct
  source 1..120: mol_type = other DNA
gaaatcgtgtattgtaactctctgagctggtatgtagagacatcgttcttttttttttctttctttctttgtcctcttttgagacggagtcttgctctgtcgcccaggctggagtgcagt

SEQ ID NO: 79958 - DNA, 120 bp, synthetic construct; identical to SEQ ID NO: 79939
  source 1..120: mol_type = other DNA

SEQ ID NO: 79959 - DNA, 120 bp, synthetic construct; identical to SEQ ID NO: 33853
  source 1..120: mol_type = other DNA

SEQ ID NO: 79960 - DNA, 120 bp, synthetic construct; identical to SEQ ID NO: 79941
  source 1..120: mol_type = other DNA

SEQ ID NO: 79961 - DNA, 120 bp, synthetic construct
  source 1..120: mol_type = other DNA
tgtgtgttcgtgtgtgtgtgtgcacgtgtgtgtgtgttaggcattgtcacataggaggaagaggaggaaagaaaacaatggaaagaatgcctgaaattgactggaaaagcgaggaggcta

SEQ ID NO: 79962 - DNA, 120 bp, synthetic construct; identical to SEQ ID NO: 33854
  source 1..120: mol_type = other DNA

SEQ ID NO: 79963 - DNA, 120 bp, synthetic construct; identical to SEQ ID NO: 79944
  source 1..120: mol_type = other DNA

SEQ ID NO: 79964 - DNA, 120 bp, synthetic construct; identical to SEQ ID NO: 79945
  source 1..120: mol_type = other DNA

SEQ ID NO: 79965 - DNA, 120 bp, synthetic construct; identical to SEQ ID NO: 79946
  source 1..120: mol_type = other DNA

SEQ ID NO: 79966 - DNA, 120 bp, synthetic construct; identical to SEQ ID NO: 1923
  source 1..120: mol_type = other DNA

SEQ ID NO: 79967 - DNA, 120 bp, synthetic construct; identical to SEQ ID NO: 79929
  source 1..120: mol_type = other DNA

SEQ ID NO: 79968 - DNA, 120 bp, synthetic construct; identical to SEQ ID NO: 1915
  source 1..120: mol_type = other DNA

SEQ ID NO: 79969 - DNA, 120 bp, synthetic construct; identical to SEQ ID NO: 1924
  source 1..120: mol_type = other DNA

SEQ ID NO: 79970 - DNA, 120 bp, synthetic construct; identical to SEQ ID NO: 1917
  source 1..120: mol_type = other DNA

SEQ ID NO: 79971 - DNA, 120 bp, synthetic construct; identical to SEQ ID NO: 33855
  source 1..120: mol_type = other DNA

SEQ ID NO: 79972 - DNA, 120 bp, synthetic construct; identical to SEQ ID NO: 79934
  source 1..120: mol_type = other DNA

SEQ ID NO: 79973 - DNA, 120 bp, synthetic construct; identical to SEQ ID NO: 1920
  source 1..120: mol_type = other DNA

SEQ ID NO: 79974 - DNA, 120 bp, synthetic construct; identical to SEQ ID NO: 1914
  source 1..120: mol_type = other DNA

SEQ ID NO: 79975 - DNA, 120 bp, synthetic construct; identical to SEQ ID NO: 79937
  source 1..120: mol_type = other DNA

SEQ ID NO: 79976 - DNA, 120 bp, synthetic construct; identical to SEQ ID NO: 79938
  source 1..120: mol_type = other DNA

SEQ ID NO: 79977 - DNA, 120 bp, synthetic construct; identical to SEQ ID NO: 79939
  source 1..120: mol_type = other DNA

SEQ ID NO: 79978 - DNA, 120 bp, synthetic construct; identical to SEQ ID NO: 33853
  source 1..120: mol_type = other DNA

SEQ ID NO: 79979 - DNA, 120 bp, synthetic construct; identical to SEQ ID NO: 79941
  source 1..120: mol_type = other DNA

SEQ ID NO: 79980 - DNA, 120 bp, synthetic construct; identical to SEQ ID NO: 79942
  source 1..120: mol_type = other DNA

SEQ ID NO: 79981 - DNA, 120 bp, synthetic construct; identical to SEQ ID NO: 33857
  source 1..120: mol_type = other DNA

SEQ ID NO: 79982 - DNA, 120 bp, synthetic construct; identical to SEQ ID NO: 79944
  source 1..120: mol_type = other DNA

SEQ ID NO: 79983 - DNA, 120 bp, synthetic construct; identical to SEQ ID NO: 79945
  source 1..120: mol_type = other DNA

SEQ ID NO: 79984 - DNA, 120 bp, synthetic construct; identical to SEQ ID NO: 79946
  source 1..120: mol_type = other DNA

SEQ ID NO: 79985 - DNA, 120 bp, synthetic construct; identical to SEQ ID NO: 1923
  source 1..120: mol_type = other DNA

SEQ ID NO: 79986 - DNA, 120 bp, synthetic construct; identical to SEQ ID NO: 79929
  source 1..120: mol_type = other DNA

SEQ ID NO: 79987 - DNA, 120 bp, synthetic construct; identical to SEQ ID NO: 1915
  source 1..120: mol_type = other DNA

SEQ ID NO: 79988 - DNA, 120 bp, synthetic construct; identical to SEQ ID NO: 1924
  source 1..120: mol_type = other DNA

SEQ ID NO: 79989 - DNA, 120 bp, synthetic construct; identical to SEQ ID NO: 1917
  source 1..120: mol_type = other DNA

SEQ ID NO: 79990 - DNA, 120 bp, synthetic construct; identical to SEQ ID NO: 33852
  source 1..120: mol_type = other DNA

SEQ ID NO: 79991 - DNA, 120 bp, synthetic construct; identical to SEQ ID NO: 33859
  source 1..120: mol_type = other DNA

SEQ ID NO: 79992 - DNA, 120 bp, synthetic construct; identical to SEQ ID NO: 33856
  source 1..120: mol_type = other DNA

SEQ ID NO: 79993 - DNA, 120 bp, synthetic construct
  source 1..120: mol_type = other DNA
atttgtaacacccatcacttggtgtgaaaaatgctgaagcactcatgcgggttctaatatcagctcttacagccttggtgagattctgagtgagtcctttcacttctaaacctatctttg

SEQ ID NO: 79994 - DNA, 120 bp, synthetic construct; identical to SEQ ID NO: 79937
  source 1..120: mol_type = other DNA

SEQ ID NO: 79995 - DNA, 120 bp, synthetic construct; identical to SEQ ID NO: 79957
  source 1..120: mol_type = other DNA

SEQ ID NO: 79996 - DNA, 120 bp, synthetic construct; identical to SEQ ID NO: 79939
  source 1..120: mol_type = other DNA

SEQ ID NO: 79997 - DNA, 120 bp, synthetic construct; identical to SEQ ID NO: 33853
  source 1..120: mol_type = other DNA

SEQ ID NO: 79998 - DNA, 120 bp, synthetic construct; identical to SEQ ID NO: 79941
  source 1..120: mol_type = other DNA

SEQ ID NO: 79999 - DNA, 120 bp, synthetic construct; identical to SEQ ID NO: 79961
  source 1..120: mol_type = other DNA

SEQ ID NO: 80000 - DNA, 120 bp, synthetic construct; identical to SEQ ID NO: 33854
  source 1..120: mol_type = other DNA

SEQ ID NO: 80001 - DNA, 120 bp, synthetic construct
  source 1..120: mol_type = other DNA
tttctttgttgagacggagtctctctctgtgggccaggttggagtgcagtagtgcgatctcggctcactgcaacccacacctcccaggttctagggattctcatgcctcagcctcccgtg

SEQ ID NO: 80002 - DNA, 120 bp, synthetic construct
  source 1..120: mol_type = other DNA
actgtaactcttactatgtttttgagacggagtctcgctctgaagaccaggctggagtgcagtggtgccatctcggctcactggaaattctgtctccagggttcaagtgattctcctgcc

SEQ ID NO: 80003 - DNA, 120 bp, synthetic construct
  source 1..120: mol_type = other DNA
tccgtgtggagagctgaatacgtagtgtaagatcttgtgaaattgtgaattctccctcttcttggtttgtttgtttgcgacagagtctcagtgtgtcacccaggctggagtgcagtgatg

SEQ ID NO: 80004 - DNA, 120 bp, synthetic construct; identical to SEQ ID NO: 32903
  source 1..120: mol_type = other DNA

SEQ ID NO: 80005 - DNA, 120 bp, synthetic construct; identical to SEQ ID NO: 24714
  source 1..120: mol_type = other DNA

SEQ ID NO: 80006 - DNA, 120 bp, synthetic construct; identical to SEQ ID NO: 24715
  source 1..120: mol_type = other DNA

SEQ ID NO: 80007 - DNA, 120 bp, synthetic construct; identical to SEQ ID NO: 24716
  source 1..120: mol_type = other DNA

SEQ ID NO: 80008 - DNA, 120 bp, synthetic construct; identical to SEQ ID NO: 31051
  source 1..120: mol_type = other DNA

SEQ ID NO: 80009 - DNA, 120 bp, synthetic construct
  source 1..120: mol_type = other DNA
aaagatggccctgaagggccaggaggcactgaaaaagcaaccattgctggcggaggccgggcactgatgcgtctctctcctgcagaccggaagcctcccctcgctgctgccttaggtgag

SEQ ID NO: 80010 - DNA, 120 bp, synthetic construct; identical to SEQ ID NO: 28446
  source 1..120: mol_type = other DNA

SEQ ID NO: 80011 - DNA, 120 bp, synthetic construct; identical to SEQ ID NO: 30189
  source 1..120: mol_type = other DNA

SEQ ID NO: 80012 - DNA, 120 bp, synthetic construct
  source 1..120: mol_type = other DNA
aactatttttatactatataaatagtataagcagtataaaataggctgggcaggatggctcatgcctgtaatcctagcactttgggaggccgaggcaggtgaatcaactgaggtcaggag

SEQ ID NO: 80013 - DNA, 120 bp, synthetic construct; identical to SEQ ID NO: 28316
  source 1..120: mol_type = other DNA

SEQ ID NO: 80014 - DNA, 120 bp, synthetic construct; identical to SEQ ID NO: 28317
  source 1..120: mol_type = other DNA

SEQ ID NO: 80015 - DNA, 120 bp, synthetic construct
  source 1..120: mol_type = other DNA
gtgagccgagatcacaacactgcattccagcctgggtgacagagccagactctgtctccagaaaaaaaaaaaaaaaaaaagaaaaggaaaaaaaacgcatgcacacgtatacataggttt

SEQ ID NO: 80016 - DNA, 120 bp, synthetic construct; identical to SEQ ID NO: 28318
  source 1..120: mol_type = other DNA

SEQ ID NO: 80017 - DNA, 120 bp, synthetic construct; identical to SEQ ID NO: 30190
  source 1..120: mol_type = other DNA

SEQ ID NO: 80018 - DNA, 120 bp, synthetic construct; identical to SEQ ID NO: 30191
  source 1..120: mol_type = other DNA

SEQ ID NO: 80019 - DNA, 120 bp, synthetic construct; identical to SEQ ID NO: 30192
  source 1..120: mol_type = other DNA

SEQ ID NO: 80020 - DNA, 120 bp, synthetic construct; identical to SEQ ID NO: 28322
  source 1..120: mol_type = other DNA

SEQ ID NO: 80021 - DNA, 120 bp, synthetic construct; identical to SEQ ID NO: 30166
  source 1..120: mol_type = other DNA

SEQ ID NO: 80022 - DNA, 120 bp, synthetic construct; identical to SEQ ID NO: 30193
  source 1..120: mol_type = other DNA

SEQ ID NO: 80023 - DNA, 120 bp, synthetic construct; identical to SEQ ID NO: 30194
  source 1..120: mol_type = other DNA

SEQ ID NO: 80024 - DNA, 120 bp, synthetic construct
  source 1..120: mol_type = other DNA
cgcagagttgtggcagcactacctgagagtatgagaccagatgagaatccttatggttttccatcggaactggtggtatgtgcagctgttattggattttttgttgttctcctttttttg

SEQ ID NO: 80025 - DNA, 120 bp, synthetic construct
  source 1..120: mol_type = other DNA
aagagacataatatgacagaaggttgctatacttcactcagactggaataaagatgataccaattgactgtgataatgtttatataaatgaatatacactaagctgtaaaatgcaaccac

SEQ ID NO: 80026 - DNA, 120 bp, synthetic construct; identical to SEQ ID NO: 30195
  source 1..120: mol_type = other DNA

SEQ ID NO: 80027 - DNA, 120 bp, synthetic construct
  source 1..120: mol_type = other DNA
gaagctgaggcaggaggattgtttgagctcaaagactttgagaatatagtgtactatgactacacctgagaatagccactgcactccagcctgggcaacaggacaatagtctatattttt

SEQ ID NO: 80028 - DNA, 120 bp, synthetic construct; identical to SEQ ID NO: 30196
  source 1..120: mol_type = other DNA

SEQ ID NO: 80029 - DNA, 120 bp, synthetic construct; identical to SEQ ID NO: 30197
  source 1..120: mol_type = other DNA

SEQ ID NO: 80030 - DNA, 120 bp, synthetic construct; identical to SEQ ID NO: 12704
  source 1..120: mol_type = other DNA

SEQ ID NO: 80031 - DNA, 120 bp, synthetic construct; identical to SEQ ID NO: 15296
  source 1..120: mol_type = other DNA

SEQ ID NO: 80032 - DNA, 120 bp, synthetic construct; identical to SEQ ID NO: 8780
  source 1..120: mol_type = other DNA

SEQ ID NO: 80033 - DNA, 120 bp, synthetic construct; identical to SEQ ID NO: 8781
  source 1..120: mol_type = other DNA

SEQ ID NO: 80034 - DNA, 120 bp, synthetic construct; identical to SEQ ID NO: 8782
  source 1..120: mol_type = other DNA

SEQ ID NO: 80035 - DNA, 120 bp, synthetic construct; identical to SEQ ID NO: 8783
  source 1..120: mol_type = other DNA

SEQ ID NO: 80036 - DNA, 120 bp, synthetic construct; identical to SEQ ID NO: 8784
  source 1..120: mol_type = other DNA

SEQ ID NO: 80037 - DNA, 120 bp, synthetic construct; identical to SEQ ID NO: 8785
  source 1..120: mol_type = other DNA

SEQ ID NO: 80038 - DNA, 120 bp, synthetic construct; identical to SEQ ID NO: 8786
  source 1..120: mol_type = other DNA

SEQ ID NO: 80039 - DNA, 120 bp, synthetic construct; identical to SEQ ID NO: 8787
  source 1..120: mol_type = other DNA

SEQ ID NO: 80040 - DNA, 120 bp, synthetic construct; identical to SEQ ID NO: 8788
  source 1..120: mol_type = other DNA

SEQ ID NO: 80041 - DNA, 120 bp, synthetic construct; identical to SEQ ID NO: 8789
  source 1..120: mol_type = other DNA

SEQ ID NO: 80042 - DNA, 120 bp, synthetic construct; identical to SEQ ID NO: 27065
  source 1..120: mol_type = other DNA

SEQ ID NO: 80043 - DNA, 120 bp, synthetic construct; identical to SEQ ID NO: 27066
  source 1..120: mol_type = other DNA

SEQ ID NO: 80044 - DNA, 120 bp, synthetic construct; identical to SEQ ID NO: 14480
  source 1..120: mol_type = other DNA

SEQ ID NO: 80045 - DNA, 120 bp, synthetic construct; identical to SEQ ID NO: 35472
  source 1..120: mol_type = other DNA

SEQ ID NO: 80046 - DNA, 120 bp, synthetic construct
  source 1..120: mol_type = other DNA
cccaaacccactggctttccgaagggcaatgctctgggcttccgtgccatggagcccacagccttgccaggaaggcaccctctgcagagatcgttttggaagtgtctgcctcagcaagca

SEQ ID NO: 80047 - DNA, 120 bp, synthetic construct; identical to SEQ ID NO: 35473
  source 1..120: mol_type = other DNA

SEQ ID NO: 80048 - DNA, 120 bp, synthetic construct
  source 1..120: mol_type = other DNA
atcaaagctctttttttaccctcttttcagcaaaggacctatttgttttcaggcaggaggatgttaaacttgcagcctctgacacacggtggaacctgcagtgcttggagaaacggcacg

SEQ ID NO: 80049 - DNA, 120 bp, synthetic construct; identical to SEQ ID NO: 35474
  source 1..120: mol_type = other DNA

SEQ ID NO: 80050 - DNA, 120 bp, synthetic construct
  source 1..120: mol_type = other DNA
tctccacccccagcaagttgtgtaataaagggccaaggcagacaagtagctgcccatctgcatgtgcacattctggtcctcacagtcatttcaatgggaaagatgacactagtgcacaag

SEQ ID NO: 80051 - DNA, 120 bp, synthetic construct
  source 1..120: mol_type = other DNA
tgcttccacttgagcacctctccagacaccagctagggtgacagtggtacaaataccagactcccctggcctgctcacctcacagggtaatgtgctgtggagtcagggggacacagcaac

SEQ ID NO: 80052 - DNA, 120 bp, synthetic construct
  source 1..120: mol_type = other DNA
gtacccagagatggcaaaagggcagcatgccaggtgcaggaagtcctgtggtgtccatggcaagggtactacgggacgctgtgggaagggccaccacaggcccgtaagaattcatctgag

SEQ ID NO: 80053 - DNA, 120 bp, synthetic construct; identical to SEQ ID NO: 35462
  source 1..120: mol_type = other DNA

SEQ ID NO: 80054 - DNA, 120 bp, synthetic construct; identical to SEQ ID NO: 35475
  source 1..120: mol_type = other DNA

SEQ ID NO: 80055 - DNA, 120 bp, synthetic construct; identical to SEQ ID NO: 35461
  source 1..120: mol_type = other DNA

SEQ ID NO: 80056 - DNA, 120 bp, synthetic construct; identical to SEQ ID NO: 35476
  source 1..120: mol_type = other DNA

SEQ ID NO: 80057 - DNA, 120 bp, synthetic construct; identical to SEQ ID NO: 35477
  source 1..120: mol_type = other DNA

SEQ ID NO: 80058 - DNA, 120 bp, synthetic construct
  source 1..120: mol_type = other DNA
taggtcatggttgggttgggggggcccagcctccctcagggtcctggccttgatgcccggcagagcctgggccctgccctctcctaaccagccctgccctggtcacaccaagctctcact

SEQ ID NO: 80059 - DNA, 120 bp, synthetic construct; identical to SEQ ID NO: 35458
  source 1..120: mol_type = other DNA

SEQ ID NO: 80060 - DNA, 120 bp, synthetic construct; identical to SEQ ID NO: 35478
  source 1..120: mol_type = other DNA

SEQ ID NO: 80061 - DNA, 120 bp, synthetic construct; identical to SEQ ID NO: 35479
  source 1..120: mol_type = other DNA

SEQ ID NO: 80062 - DNA, 120 bp, synthetic construct; identical to SEQ ID NO: 35480
  source 1..120: mol_type = other DNA

SEQ ID NO: 80063 - DNA, 120 bp, synthetic construct
  source 1..120: mol_type = other DNA
aattattaattcctctgctatgttatcttgtcccaattcacaaaataacagggatttccccatgtgactcaaaagcaagaatcttactcctaaataacataaacagcaatatgtgtgact

SEQ ID NO: 80064 - DNA, 120 bp, synthetic construct; identical to SEQ ID NO: 35481
  source 1..120: mol_type = other DNA

SEQ ID NO: 80065 - DNA, 120 bp, synthetic construct
  source 1..120: mol_type = other DNA
acgtgctgatgccagacagaagtgctgattatgtattcgtcccttgtgcccaggaaagagaagatcaaagatgtggatgagcatttgtaggcgctcctacaacctgttgcatagtaggtg

SEQ ID NO: 80066 - DNA, 120 bp, synthetic construct
  source 1..120: mol_type = other DNA
gattctgcacgacggtgagtatgcaataataatagaaataaagtgcgcaataaatgtaatgtgcttgaatcatcttgaaacaatgccccacccccaccccgtgctcatggaaaaattgtc

SEQ ID NO: 80067 - DNA, 120 bp, synthetic construct; identical to SEQ ID NO: 35482
  source 1..120: mol_type = other DNA

SEQ ID NO: 80068 - DNA, 120 bp, synthetic construct
  source 1..120: mol_type = other DNA
aacacatgccatgtgactcagcgatttcatctaagggaaaaagaaaaatttatgttcacacaaaagcctatgtacgtgaatgtttatagcagctccagtcatatttgccaaaacctggaa

SEQ ID NO: 80069 - DNA, 120 bp, synthetic construct; identical to SEQ ID NO: 29937
  source 1..120: mol_type = other DNA

SEQ ID NO: 80070 - DNA, 120 bp, synthetic construct
  source 1..120: mol_type = other DNA
ttttacactgttggtggggctgtaaactagttcaaccattgtagaagacagtgtggcgattcctcggggatctagaactagaaataccatttgacccagccaacccattactgggtatat

SEQ ID NO: 80071 - DNA, 120 bp, synthetic construct; identical to SEQ ID NO: 25871
  source 1..120: mol_type = other DNA

SEQ ID NO: 80072 - DNA, 120 bp, synthetic construct; identical to SEQ ID NO: 11648
  source 1..120: mol_type = other DNA

SEQ ID NO: 80073 - DNA, 120 bp, synthetic construct; identical to SEQ ID NO: 11648
  source 1..120: mol_type = other DNA

SEQ ID NO: 80074 - DNA, 120 bp, synthetic construct; identical to SEQ ID NO: 11649
  source 1..120: mol_type = other DNA

SEQ ID NO: 80075 - DNA, 120 bp, synthetic construct; identical to SEQ ID NO: 15714
  source 1..120: mol_type = other DNA

SEQ ID NO: 80076 - DNA, 120 bp, synthetic construct; identical to SEQ ID NO: 15715
  source 1..120: mol_type = other DNA

SEQ ID NO: 80077 - DNA, 120 bp, synthetic construct
  source 1..120: mol_type = other DNA
gctcccgaagtgcccgtctgagggacggaactggctcagagggatcaggtcagcggttggagacccctcccctccgttagatcagcggctggagacccctccgcggcctgagcgtctgtc

SEQ ID NO: 80078 - DNA, 120 bp, synthetic construct
  source 1..120: mol_type = other DNA
ctggcttttgttgccattgcttttggtgttttagtcatgaagtccttgcccatgcctactatgtcttgaatggtattgcctaggttttcatctacggtttttactgttttaggtctaaca

SEQ ID NO: 80079 - DNA, 120 bp, synthetic construct
  source 1..120: mol_type = other DNA
ttaccaaccaaaaaaagtccaggaccagatggattctcagccgaattctaccagaggtacaaggaggagctggtaccattccttctgaaactattccaatcaatagaaaaagagggaatc

SEQ ID NO: 80080 - DNA, 120 bp, synthetic construct
  source 1..120: mol_type = other DNA
tgcttcaaagagaataaaatacctaggaatccaacttacaagggattgtgaaggacctcttcaaggagaactacaaaccactgctcaatgaaataaaagaggatacaaacaaatggaaga

SEQ ID NO: 80081 - DNA, 120 bp, synthetic construct
  source 1..120: mol_type = other DNA
catcatcactggccatcagataaatgcaaatcaaaaccacaatgagataccatctcacaccaattaaaatggcaatcatttaaaaatcaggaaacaacaggtgctggagaggatatggac

SEQ ID NO: 80082 - DNA, 120 bp, synthetic construct
  source 1..120: mol_type = other DNA
gtgagctggaggttgcagtgacttgtgatcgtgacactgcactctagcctgggcaacagagcaagattctgtcttaaaaaaataaaataaaaagcatagaatgtgcaagtcatatctgga

SEQ ID NO: 80083 - DNA, 120 bp, synthetic construct
  source 1..120: mol_type = other DNA
tcagggcaaagggaatgtgaaatgggtagcgaaagaacgtagtgataaataccagctacaacactgtgagctgctgcagaaaccacgactgtaatagtatttacctaatgggttaataat

SEQ ID NO: 80084 - DNA, 120 bp, synthetic construct
  source 1..120: mol_type = other DNA
tagccataaaaaaaagaatgagattcagtcatttgcaacaacacggatagaaccgaaggtccttatgttaagtgaaataagccaggcacagaaagacaaacttcacatgttctcacttat

SEQ ID NO: 80085 - DNA, 120 bp, synthetic construct; identical to SEQ ID NO: 35362
  source 1..120: mol_type = other DNA

SEQ ID NO: 80086 - DNA, 120 bp, synthetic construct
  source 1..120: mol_type = other DNA
acaaactgccatgctttactgagctggaacccaggcaactgggatacaactcaaccggtctcctgttatatcaaacacattctgagaaaatagaggcggccattactgctaaaagttcta

SEQ ID NO: 80087 - DNA, 120 bp, synthetic construct
  source 1..120: mol_type = other DNA
aaaccccatctctactaaacttacaaaaattagctgggtgtggtggctggtgcttgtaatcccgctactcgggaggctgcggcagaagaatcacttgaacccaggagacggagatttcag

SEQ ID NO: 80088 - DNA, 120 bp, synthetic construct
  source 1..120: mol_type = other DNA
atatatttaatatataagtatttatgcttatatattcaaatagatgcataaaccaacgtgtattaacccttattaggaacccttattagaagattgatacaaaactgataacaacatctg

SEQ ID NO: 80089 - DNA, 120 bp, synthetic construct
  source 1..120: mol_type = other DNA
tttctttccatgcattggaagacatttttttttttttttttgagtcggagcctcgctctgtcacccaggctgcagtggagtggcacagtctctgctcactgcaacctccacttcccaggt

SEQ ID NO: 80090 - DNA, 120 bp, synthetic construct
  source 1..120: mol_type = other DNA
aaccttcgaatatttctggactcccattcccacacagacacctgaggctgtggctgaaaggtcagatagaatcccaggaaagagctccttcagaattgcgatcaaccaaccgaggaaaag

SEQ ID NO: 80091 - DNA, 120 bp, synthetic construct; identical to SEQ ID NO: 35353
  source 1..120: mol_type = other DNA

SEQ ID NO: 80092 - DNA, 120 bp, synthetic construct
  source 1..120: mol_type = other DNA
taaaaatacagaaaattaccgggcgtggtggcatgcacctataatcccaccagctacttgggaggctgaggctggagaatcgcttgaaccgggcaggcagaatttgcagtgagctgagat

SEQ ID NO: 80093 - DNA, 120 bp, synthetic construct
  source 1..120: mol_type = other DNA
gcctcccaaagtcctgggattacaggggagagccaccatgcccggcccatttttctactttcacaacttattttaagtgcagcaaaatttacttgaattgtccatagtggtaaaaaatat

SEQ ID NO: 80094 - DNA, 120 bp, synthetic construct; identical to SEQ ID NO: 35354
  source 1..120: mol_type = other DNA

SEQ ID NO: 80095 - DNA, 120 bp, synthetic construct; identical to SEQ ID NO: 35355
  source 1..120: mol_type = other DNA

SEQ ID NO: 80096 - DNA, 120 bp, synthetic construct; identical to SEQ ID NO: 35356
  source 1..120: mol_type = other DNA

SEQ ID NO: 80097 - DNA, 120 bp, synthetic construct; identical to SEQ ID NO: 35357
  source 1..120: mol_type = other DNA

SEQ ID NO: 80098 - DNA, 120 bp, synthetic construct; identical to SEQ ID NO: 2103
  source 1..120: mol_type = other DNA

SEQ ID NO: 80099 - DNA, 120 bp, synthetic construct
  source 1..120: mol_type = other DNA
caaggacttcatgtctaaaacaccaaaagcaatggcaacaaaagtcaaaattgacaaatgggatctaattaaactaaagagtttctgcacggcaaaagaaaccaccatcagagtgaacag

SEQ ID NO: 80100 - DNA, 120 bp, synthetic construct
  source 1..120: mol_type = other DNA
tcaatgaatgaattaattttaaaaaaagcatagaatgggctgggtgcagtggctcatgcctgtaatcctagcaccttgggaggctgagatgggcagatcacttgaggccaggtttcgaga

SEQ ID NO: 80101 - DNA, 120 bp, synthetic construct; identical to SEQ ID NO: 2104
  source 1..120: mol_type = other DNA

SEQ ID NO: 80102 - DNA, 120 bp, synthetic construct; identical to SEQ ID NO: 2105
  source 1..120: mol_type = other DNA

SEQ ID NO: 80103 - DNA, 120 bp, synthetic construct; identical to SEQ ID NO: 35358
  source 1..120: mol_type = other DNA

SEQ ID NO: 80104 - DNA, 120 bp, synthetic construct; identical to SEQ ID NO: 2106
  source 1..120: mol_type = other DNA

SEQ ID NO: 80105 - DNA, 120 bp, synthetic construct; identical to SEQ ID NO: 2107
  source 1..120: mol_type = other DNA

SEQ ID NO: 80106 - DNA, 120 bp, synthetic construct; identical to SEQ ID NO: 35360
  source 1..120: mol_type = other DNA

SEQ ID NO: 80107 - DNA, 120 bp, synthetic construct
  source 1..120: mol_type = other DNA
aagtgggagttgaacaatgagaacacatgggcgcggggagaagaacatcacacagtggggcctgtcaggggttggggggctaggggagggatagcattagagaaatacctaaggtagatg

SEQ ID NO: 80108 - DNA, 120 bp, synthetic construct; identical to SEQ ID NO: 2108
  source 1..120: mol_type = other DNA

SEQ ID NO: 80109 - DNA, 120 bp, synthetic construct; identical to SEQ ID NO: 2109
  source 1..120: mol_type = other DNA

SEQ ID NO: 80110 - DNA, 120 bp, synthetic construct
  source 1..120: mol_type = other DNA
gaagaaaggaaggatggaagaaagaagggaagaaaggaagaaaggaaggatggaagaaagaagggaagaaaggaagaaagaaagagagaaagaaagaaaggatggaaggaggggaaacct

SEQ ID NO: 80111 - DNA, 120 bp, synthetic construct; identical to SEQ ID NO: 2110
  source 1..120: mol_type = other DNA

SEQ ID NO: 80112 - DNA, 120 bp, synthetic construct; identical to SEQ ID NO: 35364
  source 1..120: mol_type = other DNA

SEQ ID NO: 80113 - DNA, 120 bp, synthetic construct; identical to SEQ ID NO: 35348
  source 1..120: mol_type = other DNA

SEQ ID NO: 80114 - DNA, 120 bp, synthetic construct; identical to SEQ ID NO: 35349
  source 1..120: mol_type = other DNA

SEQ ID NO: 80115 - DNA, 120 bp, synthetic construct; identical to SEQ ID NO: 35350
  source 1..120: mol_type = other DNA

SEQ ID NO: 80116 - DNA, 120 bp, synthetic construct
  source 1..120: mol_type = other DNA
ccaagtcaatcctaagccaaaagaacaaagctggaggcatcacgctacctgacttcaaactatactacaagtctacagtaaccaaaacagcatggtactgttatcaaaacagagatacag

SEQ ID NO: 80117 - DNA, 120 bp, synthetic construct
  source 1..120: mol_type = other DNA
aaggattataaaacatggtgctataaagacacatgcacacgtatgtttattgtggcactattcacaatagcaaagacttggaaccaacccaaatgtccaacaatgatagactggattaag

SEQ ID NO: 80118 - DNA, 120 bp, synthetic construct
  source 1..120: mol_type = other DNA
gattagaaagtgtgtgtgtgcatgtatatataccccctaccaacacacacacacacacacacacacacacacacacacattaaaatctcccattagttctgccttttcgttgaaggctga

SEQ ID NO: 80119 - DNA, 120 bp, synthetic construct
  source 1..120: mol_type = other DNA
aggcagtctagccggcataacaaatgctggcaagggtgtggagaaaagggaaccttcatacactgttggtgagaatataaattactacaacaactaactatgaagaacagtttggaggtt

SEQ ID NO: 80120 - DNA, 120 bp, synthetic construct; identical to SEQ ID NO: 35361
  source 1..120: mol_type = other DNA

SEQ ID NO: 80121 - DNA, 120 bp, synthetic construct; identical to SEQ ID NO: 35351
  source 1..120: mol_type = other DNA

SEQ ID NO: 80122 - DNA, 120 bp, synthetic construct
  source 1..120: mol_type = other DNA
atttttacagtatttagagaagagaagaaaaagaaatgtagaaaaaaacaatgatggggtcgggggcggtggctcgtgcgtgtaatcccagcactttgggaggctgaggtgggtggatca

SEQ ID NO: 80123 - DNA, 120 bp, synthetic construct; identical to SEQ ID NO: 35352
  source 1..120: mol_type = other DNA

SEQ ID NO: 80124 - DNA, 120 bp, synthetic construct; identical to SEQ ID NO: 2111
  source 1..120: mol_type = other DNA

SEQ ID NO: 80125 - DNA, 120 bp, synthetic construct
  source 1..120: mol_type = other DNA
ggaacttcataaaaggcatagttaaatgaccaataaacacataaaatggtgctaaaaaaaaaaaaaagaaaacaataaatagctgggtgtggtggcactgcaatccagtctgggtgacag

SEQ ID NO: 80126 - DNA, 120 bp, synthetic construct; identical to SEQ ID NO: 35353
  source 1..120: mol_type = other DNA

SEQ ID NO: 80127 - DNA, 120 bp, synthetic construct
  source 1..120: mol_type = other DNA
gcagtgagctgagatcatgccactgcactccagcctgggtaacagagtgagactctgtctaaaaataaaaatcaatcaatcaataaataaagtcaacctctatctgttaaaggtaaccat

SEQ ID NO: 80128 - DNA, 120 bp, synthetic construct; identical to SEQ ID NO: 80093
  source 1..120: mol_type = other DNA

SEQ ID NO: 80129 - DNA, 120 bp, synthetic construct; identical to SEQ ID NO: 35354
  source 1..120: mol_type = other DNA

SEQ ID NO: 80130 - DNA, 120 bp, synthetic construct; identical to SEQ ID NO: 35355
  source 1..120: mol_type = other DNA

SEQ ID NO: 80131 - DNA, 120 bp, synthetic construct; identical to SEQ ID NO: 35356
  source 1..120: mol_type = other DNA

SEQ ID NO: 80132 - DNA, 120 bp, synthetic construct; identical to SEQ ID NO: 35357
  source 1..120: mol_type = other DNA

SEQ ID NO: 80133 - DNA, 120 bp, synthetic construct; identical to SEQ ID NO: 2103
  source 1..120: mol_type = other DNA

SEQ ID NO: 80134 - DNA, 120 bp, synthetic construct
  source 1..120: mol_type = other DNA
cgtctaaaacaccaaaagcaatggcaacaaaagtcaaaattgacaaatgggatctaattaaactaaagagtttctgcacggcaaaagaaactaccatcagagtgaacaggcaacctacag

SEQ ID NO: 80135 - DNA, 120 bp, synthetic construct
  source 1..120: mol_type = other DNA
aatgatgagttaatgggtgcagcacacaaaaatggcacatgtatacatatgtaacaaacctgcacgttgtgcacatgtaccctaaaccttaaagtataataaaaaaaagtacctggcaca

SEQ ID NO: 80136 - DNA, 120 bp, synthetic construct; identical to SEQ ID NO: 2112
  source 1..120: mol_type = other DNA

SEQ ID NO: 80137 - DNA, 120 bp, synthetic construct; identical to SEQ ID NO: 2105
  source 1..120: mol_type = other DNA

SEQ ID NO: 80138 - DNA, 120 bp, synthetic construct
  source 1..120: mol_type = other DNA
tcttacactacttacttcgtccaaggcatcggatttccttcactacttgacattttatatcagcattaatttcttgttggcttttgggagaggaggctattcctctgcattctaggtcat

SEQ ID NO: 80139 - DNA, 120 bp, synthetic construct; identical to SEQ ID NO: 2106
  source 1..120: mol_type = other DNA

SEQ ID NO: 80140 - DNA, 120 bp, synthetic construct; identical to SEQ ID NO: 2107
  source 1..120: mol_type = other DNA

SEQ ID NO: 80141 - DNA, 120 bp, synthetic construct; identical to SEQ ID NO: 35360
  source 1..120: mol_type = other DNA

SEQ ID NO: 80142 - DNA, 120 bp, synthetic construct; identical to SEQ ID NO: 80107
  source 1..120: mol_type = other DNA

SEQ ID NO: 80143 - DNA, 120 bp, synthetic construct; identical to SEQ ID NO: 2108
  source 1..120: mol_type = other DNA

SEQ ID NO: 80144 - DNA, 120 bp, synthetic construct; identical to SEQ ID NO: 2109
  source 1..120: mol_type = other DNA

SEQ ID NO: 80145 - DNA, 120 bp, synthetic construct; identical to SEQ ID NO: 80110
  source 1..120: mol_type = other DNA

SEQ ID NO: 80146 - DNA, 120 bp, synthetic construct; identical to SEQ ID NO: 2110
  source 1..120: mol_type = other DNA

SEQ ID NO: 80147 - DNA, 120 bp, synthetic construct; identical to SEQ ID NO: 35347
  source 1..120: mol_type = other DNA

SEQ ID NO: 80148 - DNA, 120 bp, synthetic construct; identical to SEQ ID NO: 35348
  source 1..120: mol_type = other DNA

SEQ ID NO: 80149 - DNA, 120 bp, synthetic construct; identical to SEQ ID NO: 35349
  source 1..120: mol_type = other DNA

SEQ ID NO: 80150 - DNA, 120 bp, synthetic construct; identical to SEQ ID NO: 35350
  source 1..120: mol_type = other DNA

SEQ ID NO: 80151 - DNA, 120 bp, synthetic construct; identical to SEQ ID NO: 80116
  source 1..120: mol_type = other DNA

SEQ ID NO: 80152 - DNA, 120 bp, synthetic construct; identical to SEQ ID NO: 80117
  source 1..120: mol_type = other DNA

SEQ ID NO: 80153 - DNA, 120 bp, synthetic construct; identical to SEQ ID NO: 80118
  source 1..120: mol_type = other DNA

SEQ ID NO: 80154 - DNA, 120 bp, synthetic construct; identical to SEQ ID NO: 80119
  source 1..120: mol_type = other DNA

SEQ ID NO: 80155 - DNA, 120 bp, synthetic construct; identical to SEQ ID NO: 35361
  source 1..120: mol_type = other DNA

SEQ ID NO: 80156 - DNA, 120 bp, synthetic construct; identical to SEQ ID NO: 35351
  source 1..120: mol_type = other DNA

SEQ ID NO: 80157 - DNA, 120 bp, synthetic construct; identical to SEQ ID NO: 80122
  source 1..120: mol_type = other DNA

SEQ ID NO: 80158 - DNA, 120 bp, synthetic construct; identical to SEQ ID NO: 35352
  source 1..120: mol_type = other DNA

SEQ ID NO: 80159 - DNA, 120 bp, synthetic construct; identical to SEQ ID NO: 2111
  source 1..120: mol_type = other DNA

SEQ ID NO: 80160 - DNA, 120 bp, synthetic construct; identical to SEQ ID NO: 80125
  source 1..120: mol_type = other DNA

SEQ ID NO: 80161 - DNA, 120 bp, synthetic construct; identical to SEQ ID NO: 35353
  source 1..120: mol_type = other DNA

SEQ ID NO: 80162 - DNA, 120 bp, synthetic construct; identical to SEQ ID NO: 80127
  source 1..120: mol_type = other DNA

SEQ ID NO: 80163 - DNA, 120 bp, synthetic construct; identical to SEQ ID NO: 80093
  source 1..120: mol_type = other DNA

SEQ ID NO: 80164 - DNA, 120 bp, synthetic construct; identical to SEQ ID NO: 35354
  source 1..120: mol_type = other DNA

SEQ ID NO: 80165 - DNA, 120 bp, synthetic construct; identical to SEQ ID NO: 35355
  source 1..120: mol_type = other DNA

SEQ ID NO: 80166 - DNA, 120 bp, synthetic construct; identical to SEQ ID NO: 35356
  source 1..120: mol_type = other DNA

SEQ ID NO: 80167 - DNA, 120 bp, synthetic construct; identical to SEQ ID NO: 35357
  source 1..120: mol_type = other DNA

SEQ ID NO: 80168 - DNA, 120 bp, synthetic construct; identical to SEQ ID NO: 2103
  source 1..120: mol_type = other DNA

SEQ ID NO: 80169 - DNA, 120 bp, synthetic construct; identical to SEQ ID NO: 80134
  source 1..120: mol_type = other DNA

SEQ ID NO: 80170 - DNA, 120 bp, synthetic construct; identical to SEQ ID NO: 80135
  source 1..120: mol_type = other DNA

SEQ ID NO: 80171 - DNA, 120 bp, synthetic construct; identical to SEQ ID NO: 2112
  source 1..120: mol_type = other DNA

SEQ ID NO: 80172 - DNA, 120 bp, synthetic construct; identical to SEQ ID NO: 2105
  source 1..120: mol_type = other DNA

SEQ ID NO: 80173 - DNA, 120 bp, synthetic construct
  source 1..120: mol_type = other DNA
acagacattcttatactacttactttgtccaacgcatcggagttccttcactaattgacgttttatatcagcattaatttcttgttggcttttgggagagaaggctgtttctctgcattc

SEQ ID NO: 80174 - DNA, 120 bp, synthetic construct; identical to SEQ ID NO: 2106
  source 1..120: mol_type = other DNA

SEQ ID NO: 80175 - DNA, 120 bp, synthetic construct; identical to SEQ ID NO: 2107
  source 1..120: mol_type = other DNA

SEQ ID NO: 80176 - DNA, 120 bp, synthetic construct; identical to SEQ ID NO: 35360
  source 1..120: mol_type = other DNA

SEQ ID NO: 80177 - DNA, 120 bp, synthetic construct
  source 1..120: mol_type = other DNA
ctcactcataagtgggagttgaacaatgagaacacatgggcgcggggagaagaacatcacacagtggggcctgtcaggggttggggggctaggggagggatagcgttagagaaataccta

SEQ ID NO: 80178 - DNA, 120 bp, synthetic construct; identical to SEQ ID NO: 2108
  source 1..120: mol_type = other DNA

SEQ ID NO: 80179 - DNA, 120 bp, synthetic construct; identical to SEQ ID NO: 2109
  source 1..120: mol_type = other DNA

SEQ ID NO: 80180 - DNA, 120 bp, synthetic construct
  source 1..120: mol_type = other DNA
ttgacctttgttcgcaccattgcactatagcctgggtgacagagtaagactgtctacaaaaaaaagaaagagagaaagaaagagagaaagaaagagagaaagaaagaaagagaaagaaaa

SEQ ID NO: 80181 - DNA, 120 bp, synthetic construct; identical to SEQ ID NO: 2110
  source 1..120: mol_type = other DNA

SEQ ID NO: 80182 - DNA, 120 bp, synthetic construct; identical to SEQ ID NO: 35347
  source 1..120: mol_type = other DNA

SEQ ID NO: 80183 - DNA, 120 bp, synthetic construct; identical to SEQ ID NO: 35348
  source 1..120: mol_type = other DNA

SEQ ID NO: 80184 - DNA, 120 bp, synthetic construct; identical to SEQ ID NO: 35349
  source 1..120: mol_type = other DNA

SEQ ID NO: 80185 - DNA, 120 bp, synthetic construct; identical to SEQ ID NO: 35350
  source 1..120: mol_type = other DNA

SEQ ID NO: 80186 - DNA, 120 bp, synthetic construct; identical to SEQ ID NO: 80116
  source 1..120: mol_type = other DNA

SEQ ID NO: 80187 - DNA, 120 bp, synthetic construct
  source 1..120: mol_type = other DNA
tggcgattcctcagggatctagaactagaaataccatttgacccagccatcccattactgagtatatacccaaaggattataaaacatggtgctataaagacacatgcacacgtatgttt

SEQ ID NO: 80188 - DNA, 120 bp, synthetic construct; identical to SEQ ID NO: 2113
  source 1..120: mol_type = other DNA

SEQ ID NO: 80189 - DNA, 120 bp, synthetic construct; identical to SEQ ID NO: 2114
  source 1..120: mol_type = other DNA

SEQ ID NO: 80190 - DNA, 120 bp, synthetic construct; identical to SEQ ID NO: 2115
  source 1..120: mol_type = other DNA

SEQ ID NO: 80191 - DNA, 120 bp, synthetic construct
  source 1..120: mol_type = other DNA
agctctggtgaaacaaattttgagtaaaagccatcagttggtgtttgaccactttctttcccctccacataaacctcatgaatgacagatctggaaatcaaactgagaagttgagctgtg

SEQ ID NO: 80192 - DNA, 120 bp, synthetic construct; identical to SEQ ID NO: 2116
  source 1..120: mol_type = other DNA

SEQ ID NO: 80193 - DNA, 120 bp, synthetic construct; identical to SEQ ID NO: 2117
  source 1..120: mol_type = other DNA

SEQ ID NO: 80194 - DNA, 120 bp, synthetic construct; identical to SEQ ID NO: 35360
  source 1..120: mol_type = other DNA

SEQ ID NO: 80195 - DNA, 120 bp, synthetic construct
  source 1..120: mol_type = other DNA
agttcacgtcctttgaagggacatgtgtcagcaagctaacacaggaacagaaaaccaaacaccacgtgtcctcactcataagtgggagttgaacaatgagaacacatgggcgcggggaga

SEQ ID NO: 80196 - DNA, 120 bp, synthetic construct; identical to SEQ ID NO: 80090
  source 1..120: mol_type = other DNA

SEQ ID NO: 80197 - DNA, 120 bp, synthetic construct; identical to SEQ ID NO: 35353
  source 1..120: mol_type = other DNA

SEQ ID NO: 80198 - DNA, 120 bp, synthetic construct; identical to SEQ ID NO: 80092
  source 1..120: mol_type = other DNA

SEQ ID NO: 80199 - DNA, 120 bp, synthetic construct; identical to SEQ ID NO: 80093
  source 1..120: mol_type = other DNA

SEQ ID NO: 80200 - DNA, 120 bp, synthetic construct; identical to SEQ ID NO: 35354
  source 1..120: mol_type = other DNA

SEQ ID NO: 80201 - DNA, 120 bp, synthetic construct; identical to SEQ ID NO: 35355
  source 1..120: mol_type = other DNA

SEQ ID NO: 80202 - DNA, 120 bp, synthetic construct; identical to SEQ ID NO: 35356
  source 1..120: mol_type = other DNA

SEQ ID NO: 80203 - DNA, 120 bp, synthetic construct; identical to SEQ ID NO: 35357
  source 1..120: mol_type = other DNA

SEQ ID NO: 80204 - DNA, 120 bp, synthetic construct; identical to SEQ ID NO: 2103
  source 1..120: mol_type = other DNA

SEQ ID NO: 80205 - DNA, 120 bp, synthetic construct; identical to SEQ ID NO: 80134
  source 1..120: mol_type = other DNA

SEQ ID NO: 80206 - DNA, 120 bp, synthetic construct; identical to SEQ ID NO: 80100
  source 1..120: mol_type = other DNA

SEQ ID NO: 80207 - DNA, 120 bp, synthetic construct; identical to SEQ ID NO: 2112
  source 1..120: mol_type = other DNA

SEQ ID NO: 80208 - DNA, 120 bp, synthetic construct; identical to SEQ ID NO: 2105
  source 1..120: mol_type = other DNA

SEQ ID NO: 80209 - DNA, 120 bp, synthetic construct
  source 1..120: mol_type = other DNA
aaacagacgttcttacactacttacttcgtccaaggcatcggatttccttcactacttgacattttatatcagcattaatttcttgttggcttttgggagaggaggctattcctctgcat

SEQ ID NO: 80210 - DNA, 120 bp, synthetic construct
  source 1..120: mol_type = other DNA
gaaaatagaggcggccattactgctaaaagttctatacgcactccaccaccaaaaagtcccttttactgtatgattttcctcatccttcctttctgtctcacaaaagtgactttcttttc

SEQ ID NO: 80211 - DNA, 120 bp, synthetic construct
  source 1..120: mol_type = other DNA
tctctactaaacttacaaaaattagctgggtgtggtggctggtgcttgtaatcccgctactcgggaggctgcggcagaagaatcacttgaacccaggagacggagatttcagtgagccga

SEQ ID NO: 80212 - DNA, 120 bp, synthetic construct; identical to SEQ ID NO: 80088
  source 1..120: mol_type = other DNA

SEQ ID NO: 80213 - DNA, 120 bp, synthetic construct
  source 1..120: mol_type = other DNA
tattctttccatgcattggaagacatttttttttttttgagtcggagcctcgctctgtcacccaggctgcagtggagtggcacagtctctgctcactgcaacctccacttcccaggttca

SEQ ID NO: 80214 - DNA, 120 bp, synthetic construct; identical to SEQ ID NO: 80090
  source 1..120: mol_type = other DNA

SEQ ID NO: 80215 - DNA, 120 bp, synthetic construct; identical to SEQ ID NO: 35353
  source 1..120: mol_type = other DNA

SEQ ID NO: 80216 - DNA, 120 bp, synthetic construct; identical to SEQ ID NO: 11503
  source 1..120: mol_type = other DNA

SEQ ID NO: 80217 - DNA, 120 bp, synthetic construct; identical to SEQ ID NO: 11504
  source 1..120: mol_type = other DNA

SEQ ID NO: 80218 - DNA, 120 bp, synthetic construct; identical to SEQ ID NO: 11505
  source 1..120: mol_type = other DNA

SEQ ID NO: 80219 - DNA, 120 bp, synthetic construct; identical to SEQ ID NO: 11506
  source 1..120: mol_type = other DNA

SEQ ID NO: 80220 - DNA, 120 bp, synthetic construct; identical to SEQ ID NO: 11507
  source 1..120: mol_type = other DNA

SEQ ID NO: 80221 - DNA, 120 bp, synthetic construct; identical to SEQ ID NO: 11508
  source 1..120: mol_type = other DNA

SEQ ID NO: 80222 - DNA, 120 bp, synthetic construct; identical to SEQ ID NO: 11509
  source 1..120: mol_type = other DNA

SEQ ID NO: 80223 - DNA, 120 bp, synthetic construct; identical to SEQ ID NO: 11510
  source 1..120: mol_type = other DNA

SEQ ID NO: 80224 - DNA, 120 bp, synthetic construct; identical to SEQ ID NO: 11511
  source 1..120: mol_type = other DNA

SEQ ID NO: 80225 - DNA, 120 bp, synthetic construct
  source 1..120: mol_type = other DNA
gcgccactgcactccagcctggcgacacagggagactccatctcaaaaaaataaataaataaaaaataaatgaaataaaataaaataaataaaaataaattcagatggcgcagctttaag

SEQ ID NO: 80226 - DNA, 120 bp, synthetic construct
  source 1..120: mol_type = other DNA
tctgtgttacaaggtcacagctattttaaaaaaatttattttatttttgagatggtatctcactctgtcccccagcctggagtgcagtggtgtgatctcggctcaccacaacctctgcct

SEQ ID NO: 80227 - DNA, 120 bp, synthetic construct
  source 1..120: mol_type = other DNA
gcctttgttctgaagtttgcttctgcctcagcaggctagagaaagttgtgagtccattatcgatgcccatgggtatggaagtagggaatagggaaaaaaggatggcactaatagttccaa

SEQ ID NO: 80228 - DNA, 120 bp, synthetic construct
  source 1..120: mol_type = other DNA
ggatatctttgtatatgtagctttaaatgaaattgtgtgtgtcattttaaatttagatccttctgcggatacatgggacctcttctcacctttaatatcattatggataaacaggtttta

SEQ ID NO: 80229 - DNA, 120 bp, synthetic construct
  source 1..120: mol_type = other DNA
ggcaaggaccctggggcggcaggggaggtaaacgttttactgagaccctctccgggcggagtggcgtcctcggtccctttccttcggagactgttgcacttgacagcaccggctagtcgc

SEQ ID NO: 80230 - DNA, 120 bp, synthetic construct
  source 1..120: mol_type = other DNA
ttgggaagctaacgctggaagatcgctcgaacccaggaggtcgaagctgcagtggggccatgaccctgccactgcactccagcctgggtgacagagtgagactgactttaaaaaaaaaaa

SEQ ID NO: 80231 - DNA, 120 bp, synthetic construct
  source 1..120: mol_type = other DNA
tccccggccaacaccccagcctggcccattcactcgacttgggcagagacaggccgcctcggaggtgacggctcaggcccaggcccaggcccgagggagggggctactcacacgccgctc

SEQ ID NO: 80232 - DNA, 120 bp, synthetic construct
  source 1..120: mol_type = other DNA
gaggtctttttcccttgtgagggcaggagagaaagtcctatgtgaatatacttgaaacttggacatgcatttacatttaaatacgagatggcaacaacatgaacggcaagacacaacaaa

SEQ ID NO: 80233 - DNA, 120 bp, synthetic construct
  source 1..120: mol_type = other DNA
ttcttaactgtgttggcatttttttagattttgactaaaggagaagttcaagtatcagataaagacacacacaactggagcagatgtttagggacattgcaattattgtggcagacaaat

SEQ ID NO: 80234 - DNA, 120 bp, synthetic construct
  source 1..120: mol_type = other DNA
taaagggtcattttaacacctctttttgaatttttcaatttacatataattcacatacaataaatttcacactcataaagtgtgtacactttaagtggtatattaacaaagtttgggaac

SEQ ID NO: 80235 - DNA, 120 bp, synthetic construct
  source 1..120: mol_type = other DNA
attcaagcaattctcctgcctcagcctcttgagtagctggtactacaggcgtgtgctaccacacccggctaatttttctttttttgtatttttagtagagacggggtttcaccatgttgg

SEQ ID NO: 80236 - DNA, 120 bp, synthetic construct
  source 1..120: mol_type = other DNA
ctacgcataatatatgacaaaaataaatgctgggaaaaaaataaaaggatttgtggtaaacaaggctgaccaacctttagtcttaagaaaatatctggctgggcgcggtggctcacgcct

SEQ ID NO: 80237 - DNA, 120 bp, synthetic construct
  source 1..120: mol_type = other DNA
tttgaagctgtggggtgaggtcataaggacataatggtttcgctgcttctttaaaatgttctgtgtttagtgtcaccaggttcacacactaatatcctctggaaacaccctcacagacat

SEQ ID NO: 80238 - DNA, 120 bp, synthetic construct
  source 1..120: mol_type = other DNA
gtgtgccgccctacccattgtcttatctattgcaccatagaactgtggtattagagatctggacagcattgtgcttgcctcaaagttaaagctgagtttattctgtgtcttgctcatcct

SEQ ID NO: 80239 - DNA, 120 bp, synthetic construct
  source 1..120: mol_type = other DNA
aaattgtatgtaatcaataaaaccactcttatgtttattaaactatggcttgtgtttctagacaacttcctaactccctttcttttctctgcctgtgtctgtggtagggttagggagttg

SEQ ID NO: 80240 - DNA, 120 bp, synthetic construct
  source 1..120: mol_type = other DNA
aatataaacatttaatgaaacatttccttaagattttctggggccaggcgcagtggctcacaccggtaatcccagcaatttgggaggccaaggcgggtgaatcacttgagctcaggagtt

SEQ ID NO: 80241 - DNA, 120 bp, synthetic construct
  source 1..120: mol_type = other DNA
tgctttggacctagtagatgtggagtaaatgtctgaaataataaacatgtgggccagacacagtggctcacgcctgtaatcccagcactttgggaggccaaagctggtggatcactttaa

SEQ ID NO: 80242 - DNA, 120 bp, synthetic construct
  source 1..120: mol_type = other DNA
cacaagcatattacaaccagcatgattagttttgaaataaagttttcagccagtcacggaggctcacacctgcaatcccagcactttgggaggcagaggtaggcagattacctgaggtca

SEQ ID NO: 80243 - DNA, 120 bp, synthetic construct
  source 1..120: mol_type = other DNA
ccggggatttggtgtaggtcctgccgcttgctgcacagaaagccaatcagtagtgccagggaagaaggctttaattgggtgctccagccaaggagatgggagatcagtttcaaattcgtc

SEQ ID NO: 80244 - DNA, 120 bp, synthetic construct
  source 1..120: mol_type = other DNA
gatggagagtggatggaaagctcccaataaagagaggctggccgggcatggtggctcatgcctataatcccagcattttcgaaggctgaggcaggcggatcacccaaggtcaggagttcg

SEQ ID NO: 80245 - DNA, 120 bp, synthetic construct
  source 1..120: mol_type = other DNA
gcccctgcacgtacccaacgtgccctgcgtggtcccgttacgtgtcccatcatgtttcgtgcgctcccattacggatcatacctcgcacctcaccgcgtggcctctgtagttccagagct

SEQ ID NO: 80246 - DNA, 120 bp, synthetic construct
  source 1..120: mol_type = other DNA
gcccggctaatttttaatatttttgtagatatgggggactctatgttgcccaggctggtctcagactcctggacccaagtgagcctcccacctcagcctccccagtagctgggattacaa

SEQ ID NO: 80247 - DNA, 120 bp, synthetic construct; identical to SEQ ID NO: 11083
  source 1..120: mol_type = other DNA

SEQ ID NO: 80248 - DNA, 120 bp, synthetic construct; identical to SEQ ID NO: 11084
  source 1..120: mol_type = other DNA

SEQ ID NO: 80249 - DNA, 120 bp, synthetic construct; identical to SEQ ID NO: 11085
  source 1..120: mol_type = other DNA

SEQ ID NO: 80250 - DNA, 120 bp, synthetic construct
  source 1..120: mol_type = other DNA
attcttatgcctcaacccctcccgagtagctgggattacaggagcacgccaccatgtccagctaatttttgtatttttagtagggcgggatttcgccatgttggccagactggtctcgaa

SEQ ID NO: 80251 - DNA, 120 bp, synthetic construct
  source 1..120: mol_type = other DNA
ttacaaaatactttattgagatataatgtacataccatacagttctctcatttaatacaattcaggccggatgctgtggctcacgcctgtaatcccaacactttgggaggccgaggtggg

SEQ ID NO: 80252 - DNA, 120 bp, synthetic construct
  source 1..120: mol_type = other DNA
aggctgccagcatagattcctgccaacagtgtgttaaagtgcatgtccttgcaccattgtcagcattgagttattttcaacttttatgtgtaaacatgacatctcactgagttgctttgc

SEQ ID NO: 80253 - DNA, 120 bp, synthetic construct
  source 1..120: mol_type = other DNA
ataaacctatgatttgtgaagcactgaaatacttagtggtttgctgtattacatcatagctttccccagcagtttccaagacagcttccaaaaactggcaggagaatttcgctggagctg

SEQ ID NO: 80254 - DNA, 120 bp, synthetic construct
  source 1..120: mol_type = other DNA
atggataactttcatcagggccacgagtcacaggcattggtgaaagagtccctagaattggatgctttagaataaggcaggctttggagacaagctggactcacactcatgttattgaaa

SEQ ID NO: 80255 - DNA, 120 bp, synthetic construct
  source 1..120: mol_type = other DNA
ttgatatgaactgctcagtgtatttcaaatccattatatgagtttaatatatataatcttatggcaagaccccctccttttccctggcctggggaataggctgctggttagtaccctcta

SEQ ID NO: 80256 - DNA, 120 bp, synthetic construct
  source 1..120: mol_type = other DNA
accccaaaacttagcagctaaaagagaattctttaaatcttaacagtttctgtggatcaagaatttgggagcagcttacccaggttctgcttcaaggtctctcaggaggttgaagttcat

SEQ ID NO: 80257 - DNA, 120 bp, synthetic construct
  source 1..120: mol_type = other DNA
ggcacatgggtaagacctataccacttctgccctgtttaccttttcattacccataggcatctaggtgaaatgtactctttggggatgaaattaattccaaggtcatctgtctttttcgc

SEQ ID NO: 80258 - DNA, 120 bp, synthetic construct
  source 1..120: mol_type = other DNA
tttctagctctcaaagtaactccactaaaatgcagatagtgaccttctacattcttggctaacatcccactcaagtgtggtccatggagatgaggcactaaaagaaaaagctggatggca

SEQ ID NO: 80259 - DNA, 120 bp, synthetic construct
  source 1..120: mol_type = other DNA
tcacggaggcgccacaagcccagaataaggtagtacagaccattttatgacaaggaaacagatagtgatgagagtaaaatactgacttttactttcacctaccaattgtcagtgtaatta

SEQ ID NO: 80260 - DNA, 120 bp, synthetic construct
  source 1..120: mol_type = other DNA
ttctcttctacttagagtcagagagtgttaaaacttacagaccaacttaatccaagccctccattgggcagattgggatgctgaggagaagatggagggggatttgtttttggtagccta

SEQ ID NO: 80261 - DNA, 120 bp, synthetic construct
  source 1..120: mol_type = other DNA
tgctattacaaataacaatataatttaggccaggtatggtggtttacaactgtaatcctagcactttgggaagccaaggcaggaagatcacttgagcccagaagtttgaggctgcagtca

SEQ ID NO: 80262 - DNA, 120 bp, synthetic construct
  source 1..120: mol_type = other DNA
cagagaggcagccagtgtttgaggaggaaggagcaagagcagggtaaggtgatgctcttttagctgtcttccccttctcttgtcttctaacacattcttttgcccccacccattcctttt

SEQ ID NO: 80263 - DNA, 120 bp, synthetic construct
  source 1..120: mol_type = other DNA
tattaagaaaataaaacaatagtgtatttggagtgaagtgcgacttgagacagggtaacaggggaagcttctcagaggagatgacatctgaacagacactcaaatgatgagatcaggccc

SEQ ID NO: 80264 - DNA, 120 bp, synthetic construct
  source 1..120: mol_type = other DNA
attttaaggtattgggggttagggcttcaacatagcttttgggggtggggatacaattcaacccataacatctcacagcaaccatgaaaagaacaagcatgaaaagaacagaaaggacct

SEQ ID NO: 80265 - DNA, 120 bp, synthetic construct
  source 1..120: mol_type = other DNA
tcaggttaatcttgacaagacttcacaatctgtcatgacctgtggagtgaaccacctgcagggaaagacagggccaaagcattgcagtgacagctaggtggagcatttctgtcattatcc

SEQ ID NO: 80266 - DNA, 120 bp, synthetic construct
  source 1..120: mol_type = other DNA
atggtaacttatctcaacacttaatgttgactggccatacagcctcctttagatgtttctttggaaattagattttgagaagtgtgttcacagacaatgggtggagaggccaggagggaa

SEQ ID NO: 80267 - DNA, 120 bp, synthetic construct
  source 1..120: mol_type = other DNA
tctctattacagttcctacttttctcctttgctttcctctctagaaacaccactgtgtctttgtcttccctgagtagatgttggttcgttgagagacagtggcagataatccaagtgtct

SEQ ID NO: 80268 - DNA, 120 bp, synthetic construct
  source 1..120: mol_type = other DNA
cagacctgtggctatcagcctcctgacctctctaacatgagaacaggaagcccatactacaagatcaggcatctagatagtgcctgaaaaatcctgacacgaaagtcttttattttattt

SEQ ID NO: 80269 - DNA, 120 bp, synthetic construct
  source 1..120: mol_type = other DNA
tacacaggacgaatatctaaccccaacttggtagtcacggtggttttcttataagaagttacatctcagctgacaccaaaggataaataggagttttctgggcaaagaagtgtgtggatg

SEQ ID NO: 80270 - DNA, 120 bp, synthetic construct
  source 1..120: mol_type = other DNA
gagggctccgtgtggacagtgtcctcagtcctgccagaagtcacaggttgggtgggtggacttgacagtgtatatgatttattcactcatttgttttgcattcaagttacaaataattgt

SEQ ID NO: 80271 - DNA, 120 bp, synthetic construct
  source 1..120: mol_type = other DNA
catgtagaaaagtagagactatcatgaacccctacaaacttttcacccagctccaggaattatcagcatgacctaactagtttcatctataaacccacacccctcacacttgctagatta

SEQ ID NO: 80272 - DNA, 120 bp, synthetic construct
  source 1..120: mol_type = other DNA
caacttgttggttaccctaaaatgaagtttgtatgggatagacagaaaaaatgcttgcttctttccctctatttgccagctttcatgataatgcatttcatcctccagaggtgaccaata

SEQ ID NO: 80273 - DNA, 120 bp, synthetic construct
  source 1..120: mol_type = other DNA
agtgtgtagtaatattcgtcttccagttaactccagtcctggtgagtagcagaggggtccatgggctgcgtattcacctggacctgcatcagcttcctgaagaggaagttcacttttgat

SEQ ID NO: 80274 - DNA, 120 bp, synthetic construct
  source 1..120: mol_type = other DNA
ctacctcacagggagacaatcttgtgaaagcatttagtgagattattatgtttagtcctagtactgggaacatttcccagcccagtttctctcatatttctccaaggctcttgaggtgtt

SEQ ID NO: 80275 - DNA, 120 bp, synthetic construct
  source 1..120: mol_type = other DNA
tcaaaacaaaacaaaacgaatcaaaacaaaagggtcagatggcgatgcaatgtgagcagtggggtactctgtttttgaggagctgatccatgcagcagttaagtggttctatagcctgct

SEQ ID NO: 80276 - DNA, 120 bp, synthetic construct
  source 1..120: mol_type = other DNA
ggaagttgcttcccaaacttattcgcagtactggtgccagaattttgataatacaagagcttagtagcagcaaactgagagagagtgtggagatttgtcttgagcctatgcttgcataag

SEQ ID NO: 80277 - DNA, 120 bp, synthetic construct
  source 1..120: mol_type = other DNA
tgtctcatacctgtaatcctcaccctttgggaggctgagatgggcagattgcttgagtccaagagttcgagactagcctgggtgacatggtgaaaccctgtctctactaaaaatacaaaa

SEQ ID NO: 80278 - DNA, 120 bp, synthetic construct
  source 1..120: mol_type = other DNA
agagtacaccaggaggctgaataggccatatctttgtttcttcacaactgagcacatcttactgtctccttactatactcctgacttcccactcctctatcttgttcctacagcctttaa

SEQ ID NO: 80279 - DNA, 120 bp, synthetic construct
  source 1..120: mol_type = other DNA
caatcttgaggggaaatctcctgataccagacttcatggagactcagagaagtgacttgaactactcttcaatacccaacccctgctatctccttcaaagacattcctgtctttcagtgt

SEQ ID NO: 80280 - DNA, 120 bp, synthetic construct
  source 1..120: mol_type = other DNA
tcactggcatttgcacccaacattgcaattactcttgggcctttctcttcctcctttgagagctaaatctttgatggcatttgcttccaaaataaaaatctggtgtagggtgttgtcttc

SEQ ID NO: 80281 - DNA, 120 bp, synthetic construct
  source 1..120: mol_type = other DNA
agcctcccaaatagctgggattacaggtgtgtgccaccatgccccactaacttttttttttttttactttaagttccaggatacatttgcagaacgtgtaggtttgttacataggtgtac

SEQ ID NO: 80282 - DNA, 120 bp, synthetic construct
  source 1..120: mol_type = other DNA
cgctatagcagagcaggctacagatttaagtctgtcttctaactccttttgggaagcttttttcttgctaactcataactgggttcttcctcaaacacaggcctttgttggtctccattt

SEQ ID NO: 80283 - DNA, 120 bp, synthetic construct
  source 1..120: mol_type = other DNA
tcctgtcagatcagcagcagcattagattctcataggaccatgaaccctattgtgaactgcacatgccagggatctaggttgcatctactgcctgatgatctgaggtggaacagtttcat

SEQ ID NO: 80284 - DNA, 120 bp, synthetic construct
  source 1..120: mol_type = other DNA
tcaaactttctgcttggaaacagatacaggaattatgtaatttaaatcaaagatgatgaggcaaaggccatgagaagttaacagtgactggcccaaggttgatctcacaggtggtggggc

SEQ ID NO: 80285 - DNA, 120 bp, synthetic construct
  source 1..120: mol_type = other DNA
aaggtggatctagggagtagtgcttaatatgaattattttcttcttcagggtataaatcttagtgggggtcagaagcagcggatcagcctggccagagctacctaccaaaatttagacat

SEQ ID NO: 80286 - DNA, 120 bp, synthetic construct
  source 1..120: mol_type = other DNA
aatataccaaaaccactgggtgtttgaaccagaaaaaaattatggcagttgcgtagtctcagagtataccatagcaacagcctctaatatcaccaccattgggttcaccagttagcccca

SEQ ID NO: 80287 - DNA, 120 bp, synthetic construct
  source 1..120: mol_type = other DNA
gagcaattgaaagctttgcatcagcctttatgtgctccaggtagtagcgtggagaaaacaaaaagcacctgtgaaggggtgggttgcccctccacacctgtgggtgtttctcgtaaggtg

SEQ ID NO: 80288 - DNA, 120 bp, synthetic construct
  source 1..120: mol_type = other DNA
tctacttctttctacacagacacagtgacaatctgatctctcttgcttttccccacatttcccccttttcttttcgacaaaaccgccatcgtcatcatggcccgttctcgatggtcgctg

SEQ ID NO: 80289 - DNA, 120 bp, synthetic construct
  source 1..120: mol_type = other DNA
actacaatatcctggtccattgtcagttttgattttttccggaactcccattacagcaaaacaagacaataaatgtttttttaacatgggaagtactttctcctgtttggcaagttgccc

SEQ ID NO: 80290 - DNA, 120 bp, synthetic construct
  source 1..120: mol_type = other DNA
ggtcatttccacataattttattattcgtaatcttgtctgaccaattaatgtagctatttgatccaagtacaatgtaaaagtcttaactgtactgtgaggaaggaatgaccactccacaa

SEQ ID NO: 80291 - DNA, 120 bp, synthetic construct
  source 1..120: mol_type = other DNA
attataattaaaggccagtcttttgggatcatggccagagagggcaacccgggttggagaggccccatgggttgaattacggcgtttacggcccttaagtcagttaacatacgccatttg

SEQ ID NO: 80292 - DNA, 120 bp, synthetic construct
  source 1..120: mol_type = other DNA
tgaatttgaactccttttagatttagacttgatcttcccaagattagtcctacagtcctctcaggcagtgggccatatacctctgtggggattttttgtgggggctcccctggaagcaga

SEQ ID NO: 80293 - DNA, 120 bp, synthetic construct
  source 1..120: mol_type = other DNA
cttgctcaatggcctcattttgcattaatgcttgttgactaatagtactccaattttgacttattcctaatagttgatctgcatctatgttaactggaggattggcagccctatttcttc

SEQ ID NO: 80294 - DNA, 120 bp, synthetic construct
  source 1..120: mol_type = other DNA
ctctttttaaaagaattttaataaagctgagataagaggcatatttacttttaattttacttttagtttgccccattattaccctagcttcttccgagctcacaagcttaccgtacggct

SEQ ID NO: 80295 - DNA, 120 bp, synthetic construct
  source 1..120: mol_type = other DNA
tttgtcattgtcatgtgtgaccactgaagtctgtttggttggcttagtggtcagctagtgattagacagatactcccttaattgctttgaaacaataagtgtctcagcctttgctgagag

SEQ ID NO: 80296 - DNA, 120 bp, synthetic construct
  source 1..120: mol_type = other DNA
aattatttgaatttcaagatgagcattttcttttctgttttgagagagtctcactctgttgcccaggctggagtacattggcacaatcatggctcaccttcaacctcctgtgttcaagtg

SEQ ID NO: 80297 - DNA, 120 bp, synthetic construct
  source 1..120: mol_type = other DNA
ggtccaatggcaggcatctgaagtccctgagaaactccttgaaaactcggaatgtgaatagcctgaaggaagacgaagaactagtgaaaggacaaaaactaattaagaaggaattcatag

SEQ ID NO: 80298 - DNA, 120 bp, synthetic construct
  source 1..120: mol_type = other DNA
ttgaggtggggactttgcaggtgaagttctccatctacctggagtacctacaagcaataggattgttttcgatattcttcatcatccttgcgtttgtgatgaattctgtggcttttattg

SEQ ID NO: 80299 - DNA, 120 bp, synthetic construct
  source 1..120: mol_type = other DNA
gaaggaacataaataaaagcactgtcacagcctgggacaggaaatacaagagatagtaggataaccctttgcttggcctctgcctccattcctgaaacttctatcttgaatgctttaaga

SEQ ID NO: 80300 - DNA, 120 bp, synthetic construct
  source 1..120: mol_type = other DNA
agggatttcttttctctgccaactgtgggtatagttatttgcattctgataggactttgggaaaggtaggttagactcaggagtcatccatgattcagagctttcctggaagaccattat

SEQ ID NO: 80301 - DNA, 120 bp, synthetic construct
  source 1..120: mol_type = other DNA
ccttccttcctctctatctataaaagcccagcctctttcctgagaatcttctctctgattcattgctagtcactcactcctcccctcagcagctttgccatttagtcatatgttgacata

SEQ ID NO: 80302 - DNA, 120 bp, synthetic construct
  source 1..120: mol_type = other DNA
ctctgcatacctccagaattctctgtaccttcacacaccaccgaggcacagttttggtcacttaattgaacagattcttccctttttacccaaacctaggcatgcctttttctggccatt

SEQ ID NO: 80303 - DNA, 120 bp, synthetic construct
  source 1..120: mol_type = other DNA
acctgtctcatggtggaagtcaaatgacatttgtgagcattttgtaacccagtaccaaataagtgctgggtgaactgaacatcctctgtttacttttctgagaacggatgtgagattctc

SEQ ID NO: 80304 - DNA, 120 bp, synthetic construct
  source 1..120: mol_type = other DNA
cttttttttctttttttttttttttttaaatttatttttttattgataattcttgggtgtttctcacagagggggatttggcagggtcatgggacaatagtggagggaaggtcagcagat

SEQ ID NO: 80305 - DNA, 120 bp, synthetic construct
  source 1..120: mol_type = other DNA
cgggcggggggctgacccccccccacctccctcccggacggggtggctgccgggcggagacgctcctcacttcccagatggggtggctgccgggcggagaggctccttacttctcagacg

SEQ ID NO: 80306 - DNA, 120 bp, synthetic construct
  source 1..120: mol_type = other DNA
tctcggctcactgcaacctctgcctcccaggttgaagcgattttcctgcctcagcctcagcctcctgagtagctgggactacaggtgtgcaccaccacgcccagctatttttgtttgttt

SEQ ID NO: 80307 - DNA, 120 bp, synthetic construct
  source 1..120: mol_type = other DNA
cgccactgcactctagccttggtgacagagcaagaccttgtctcataaaacaaaaacaaaaaaaaatgcagattcttgaatcccatcctaggccccctgaaatcagaatcttaaaggaaa

SEQ ID NO: 80308 - DNA, 120 bp, synthetic construct
  source 1..120: mol_type = other DNA
tgtctcactgcagcatccccagcatgactagaggatacatggcaggcatgattcttttctagcacctaagacagtggctggcactaccgtaattattcaatcaatatttgttataaatga

SEQ ID NO: 80309 - DNA, 120 bp, synthetic construct
  source 1..120: mol_type = other DNA
acctaattagtctgcagccattcaatgcactgctcttaattccttccccaaggaggcaaggattgtctttcttacacttttccttactcccttgtagagtccagcacagtgctgggtaca

SEQ ID NO: 80310 - DNA, 120 bp, synthetic construct
  source 1..120: mol_type = other DNA
ttgtgatcaaacaacaattggacagagtggagagcagctgggccctaagccttcatcatttggatggagggaaagggtcagggcacttcctctgccctggggaggtgtggggacacagta

SEQ ID NO: 80311 - DNA, 120 bp, synthetic construct
  source 1..120: mol_type = other DNA
tatcttagagatggagtagccagtcactgcctcttacctcctgtgactgtgaatgcccaggctaaataacttttccccaagaattatttgtggaactaatgtgtaagggaactatattcg

SEQ ID NO: 80312 - DNA, 120 bp, synthetic construct
  source 1..120: mol_type = other DNA
accttgaaatcacgattatgggtttgggaggccgaggcaggtgaatcactggagcccaggagttcaagatcagcctaggcaacatggcaagaacccatctctacaaaaaatttaaaaaat

SEQ ID NO: 80313 - DNA, 120 bp, synthetic construct
  source 1..120: mol_type = other DNA
ggtcaacatggtgaaaccctgtctctactaaaaatacaaaaagtagcctagcatggttgtgggcacctgtagtcccaagctactcaggaggctgaggcaggagaatcgcttaaacccagg

SEQ ID NO: 80314 - DNA, 120 bp, synthetic construct
  source 1..120: mol_type = other DNA
tccattaataagttgatctggcatttttcctgtaacatttttgtttttccttccacacactgaagttctgccctcagccaaagcccactgctcatggacaggtcttgctcctgccccagg

SEQ ID NO: 80315 - DNA, 120 bp, synthetic construct
  source 1..120: mol_type = other DNA
ggatgctatggtagggtacaatgggaggccttgacatttctggtttgtaaaaacaaaaatcatgccatctttctcctgtccaagctgagagatgcttaaatggtattaccaatgccttga

SEQ ID NO: 80316 - DNA, 120 bp, synthetic construct
  source 1..120: mol_type = other DNA
cagaaatatgactttttaattaagtacttggggtgggtcttcaattgggaaagtttgaaaaacgatgctcacagcagcaaggtacagctagttgaagaggcccaaacattccaggggaat

SEQ ID NO: 80317 - DNA, 120 bp, synthetic construct
  source 1..120: mol_type = other DNA
ccatgttgatgtgtgtagctgtggctcattgattttcactgctttgtagccttgtctgactataccacaacttagtcctggttattcttataaatgcctagacttgagatgctgctttct

SEQ ID NO: 80318 - DNA, 120 bp, synthetic construct
  source 1..120: mol_type = other DNA
atgtaagagtttctctagggtataacctaggaatggagggtatgaacatgtttacatgcacaaactagctgatgccaaactggtaatgccaactgaaaacattgctgtcaatctgatgaa

SEQ ID NO: 80319 - DNA, 120 bp, synthetic construct
  source 1..120: mol_type = other DNA
ttgaacttctgaaatgaagggcatatagctagtgtaagcatacctctggtttgccctgaatagttatgggttacatctgttttcccaaaacaataatagctccccctttcacacacgcac

SEQ ID NO: 80320 - DNA, 120 bp, synthetic construct
  source 1..120: mol_type = other DNA
tctgcctggaaccctctagaaagtagacacttgctcctttatctcctcacccctggggcttagcacatagtaggtgcctattaaatgttggtggaatgactgaaatcaagtattggagac

SEQ ID NO: 80321 - DNA, 120 bp, synthetic construct; identical to SEQ ID NO: 690
  source 1..120: mol_type = other DNA

SEQ ID NO: 80322 - DNA, 120 bp, synthetic construct; identical to SEQ ID NO: 691
  source 1..120: mol_type = other DNA

SEQ ID NO: 80323 - DNA, 120 bp, synthetic construct
  source 1..120: mol_type = other DNA
tgcttctgcctccttagtagttgggattacaggtgcccaccaccatgcctggctaacttttttaaaatatttttagtagagatggggttttgccatgttggccaggctgacctcaaactg

SEQ ID NO: 80324 - DNA, 120 bp, synthetic construct
  source 1..120: mol_type = other DNA
gagccaccgcgcccggcctgatatatatatttctggatgacgtgagatattttgatacaggcatgcaatgcataataatcacatcaaggtaaatgaggtctccatccccgcaatcattta

SEQ ID NO: 80325 - DNA, 120 bp, synthetic construct
  source 1..120: mol_type = other DNA
actgattttctttcttcctaagttttttgcttgtgttcgggcgtgtgatttgtgcagaactgactctactccgaggctgggtgggtgaatgaggcctggccaacgaatacgttctggtct

SEQ ID NO: 80326 - DNA, 120 bp, synthetic construct
  source 1..120: mol_type = other DNA
tgtggaatttccccttagttacaaaggttactcttttaaaaactctgtcctcggtcaggcgctgtggctcacgcctgtaatcccagcactttgggaggccgaggcgggtgagtcacttga

SEQ ID NO: 80327 - DNA, 120 bp, synthetic construct; identical to SEQ ID NO: 692
  source 1..120: mol_type = other DNA

SEQ ID NO: 80328 - DNA, 120 bp, synthetic construct
  source 1..120: mol_type = other DNA
ggtgtgaatcaggaacactgcgaagctctggacgggaaagtcagggaggccccttaggggagggtgggaggctgaggggagcctcttctcttccccttgttctccactgtggcaggcaaa

SEQ ID NO: 80329 - DNA, 120 bp, synthetic construct
  source 1..120: mol_type = other DNA
ccgggggtggtggcttacacctgtaatcccagcactttggcaggccaaggcaggcagatcacctgaggtcaggagttggagaccagcctggccaacatggcgaaaccctgtttctactaa

SEQ ID NO: 80330 - DNA, 120 bp, synthetic construct; identical to SEQ ID NO: 693
  source 1..120: mol_type = other DNA

SEQ ID NO: 80331 - DNA, 120 bp, synthetic construct; identical to SEQ ID NO: 694
  source 1..120: mol_type = other DNA

SEQ ID NO: 80332 - DNA, 120 bp, synthetic construct
  source 1..120: mol_type = other DNA
ttcctaaacactttggacccagcaatttccaggagttcatcctgatgagagaactgaaaggtgtgcacacgttagtaacaaggaggcctggtgaccgcctaagcgtccaatcgcggggac

SEQ ID NO: 80333 - DNA, 120 bp, synthetic construct
  source 1..120: mol_type = other DNA
ttgttatatcctagggagatactacacctaataccacagtgggtgtacaccctgtgatatgatttgtaatatcctagggagatataactcctaatatcacagagggagtacaccctgtaa

SEQ ID NO: 80334 - DNA, 120 bp, synthetic construct
  source 1..120: mol_type = other DNA
gttatattctggggatatactattacccctaatatactgtgggtgtaccccctgtgatattattcactatatcttggagatataatattacccctaatatcacagtgggtgtatactttg

SEQ ID NO: 80335 - DNA, 120 bp, synthetic construct
  source 1..120: mol_type = other DNA
gttattacccctaatatcacagtggtgtacactctgtgatattattcattatgtagtggggagatagtattacccataatatcacagtggatgtacaccctgtcatattatttgttatat

SEQ ID NO: 80336 - DNA, 120 bp, synthetic construct
  source 1..120: mol_type = other DNA
ccctgtgatattatttattatatcctggtgagatgttattactgctaatatcacagggtgtgtcaaattttctggagatattattacccttaatatcacagtgggtgtgcaccctgtgtg

SEQ ID NO: 80337 - DNA, 120 bp, synthetic construct; identical to SEQ ID NO: 695
  source 1..120: mol_type = other DNA

SEQ ID NO: 80338 - DNA, 120 bp, synthetic construct
  source 1..120: mol_type = other DNA
ctctgttttttttttttttttttttgagtcagggtcttgctctgtcacccaggctggagtgcagtagtgccatcatggctcactgcagccttgacctcctgagctcaagcaaccttccac

SEQ ID NO: 80339 - DNA, 120 bp, synthetic construct
  source 1..120: mol_type = other DNA
acacagcagaaatcaattggggtgagtccagaacaaaacttggggatcccacttcctgctttttttttttttttgagatggagtctcactctgtcgcccaggctggagtgcagcggcaag

SEQ ID NO: 80340 - DNA, 120 bp, synthetic construct
  source 1..120: mol_type = other DNA
tttaaaattttatttatttatttttttgagacagagtcttgctctgtcgcccaggctggagtgcagtggtgcgatctcggctaaccgcaagctccgcctcccaggttcacgccattctcc

SEQ ID NO: 80341 - DNA, 120 bp, synthetic construct
  source 1..120: mol_type = other DNA
ttgcgttgcacctgccagatgtcgcgcggagtcctccaggcctctagaaggcagagatggtctcgtttccttgccgagcatgcgccttagttctctcttctggggctgtgaccgtggggt

SEQ ID NO: 80342 - DNA, 120 bp, synthetic construct; identical to SEQ ID NO: 16047
  source 1..120: mol_type = other DNA

SEQ ID NO: 80343 - DNA, 120 bp, synthetic construct; identical to SEQ ID NO: 16048
  source 1..120: mol_type = other DNA

SEQ ID NO: 80344 - DNA, 120 bp, synthetic construct; identical to SEQ ID NO: 696
  source 1..120: mol_type = other DNA

SEQ ID NO: 80345 - DNA, 120 bp, synthetic construct
  source 1..120: mol_type = other DNA
tttgcaatttattttactttattttattattatttttgagacggagtcttgctctgtctcccaggctggagtgctgtggcatgatcttggctcactgcaacctccgcctcctgagttcaa

SEQ ID NO: 80346 - DNA, 120 bp, synthetic construct; identical to SEQ ID NO: 697
  source 1..120: mol_type = other DNA

SEQ ID NO: 80347 - DNA, 120 bp, synthetic construct; identical to SEQ ID NO: 698
  source 1..120: mol_type = other DNA

SEQ ID NO: 80348 - DNA, 120 bp, synthetic construct
  source 1..120: mol_type = other DNA
agacggaggttgcagtgagccaagatcgcaccacttcactccagcctgggcaacagagcgaggctccatctcaaaaaaaaaaaactaaaacaaaaacagaaaccagggttgataagtaaa

SEQ ID NO: 80349 - DNA, 120 bp, synthetic construct
  source 1..120: mol_type = other DNA
aagactttctgtcacctttgaaaaatagacatcttttcttctacctttctggaaactcttcccttgcagtttcactcattacgtggccgtggaacagtatagaaatcaagagtggggact

SEQ ID NO: 80350 - DNA, 120 bp, synthetic construct; identical to SEQ ID NO: 699
  source 1..120: mol_type = other DNA

SEQ ID NO: 80351 - DNA, 120 bp, synthetic construct; identical to SEQ ID NO: 700
  source 1..120: mol_type = other DNA

SEQ ID NO: 80352 - DNA, 120 bp, synthetic construct
  source 1..120: mol_type = other DNA
atataacttagctgaaaggcgttgtaaaattattttatactctaaacacgaattccctctggggcaggaaaccaggaggctagggggataggggtgagagggagacttttcccagaatac

SEQ ID NO: 80353 - DNA, 120 bp, synthetic construct
  source 1..120: mol_type = other DNA
ccacctcccatagtgctgggattacaggtgtacgctgtgcacccagccgctgttagcgtttatgtcagggatggccttttacagggatgccgaattggaaggacacactctctaagcctt

SEQ ID NO: 80354 - DNA, 120 bp, synthetic construct
  source 1..120: mol_type = other DNA
cagcttactgcaacctccgcctcctgggttcaagtgattctcctgcctcagcctcaggagtagctgggattacaagcatgtgccatgacgcccagctaatttttgtatttttagtagaga

SEQ ID NO: 80355 - DNA, 120 bp, synthetic construct
  source 1..120: mol_type = other DNA
tcatgtgccactgtgctccagcctcggcagcagagcaagaccctgtctgaaacaaacaaaaaaagagttaatacccataaagcacctgcttcaaggcctggggcttagtgggtcttcatt

SEQ ID NO: 80356 - DNA, 120 bp, synthetic construct
  source 1..120: mol_type = other DNA
gcgttttctagttcatttcaccggacttagccttctcatttgtcagttgccttacaaatttgaagggataaacatgttagtatactggcagcagcatttccagctttagctcggctcact

SEQ ID NO: 80357 - DNA, 120 bp, synthetic construct; identical to SEQ ID NO: 701
  source 1..120: mol_type = other DNA

SEQ ID NO: 80358 - DNA, 120 bp, synthetic construct; identical to SEQ ID NO: 702
  source 1..120: mol_type = other DNA

SEQ ID NO: 80359 - DNA, 120 bp, synthetic construct; identical to SEQ ID NO: 703
  source 1..120: mol_type = other DNA

SEQ ID NO: 80360 - DNA, 120 bp, synthetic construct; identical to SEQ ID NO: 704
  source 1..120: mol_type = other DNA

SEQ ID NO: 80361 - DNA, 120 bp, synthetic construct; identical to SEQ ID NO: 705
  source 1..120: mol_type = other DNA

SEQ ID NO: 80362 - DNA, 120 bp, synthetic construct
  source 1..120: mol_type = other DNA
aatctactcattcaatgaaatatatttattgattgccagtgacatgcatttcaggcaccattccaggactggggatatagcagtgaccaaaagaggcaaaaattcttgtccctgtggacc

SEQ ID NO: 80363 - DNA, 120 bp, synthetic construct
  source 1..120: mol_type = other DNA
ctataactctgggtgagaattggtgccactggaaggttcctagcagaggagtggcgtgatccttctggcagctgcattgaggagagtttgcagggtgtcagggtggaagtgggagaccag

SEQ ID NO: 80364 - DNA, 120 bp, synthetic construct; identical to SEQ ID NO: 706
  source 1..120: mol_type = other DNA

SEQ ID NO: 80365 - DNA, 120 bp, synthetic construct; identical to SEQ ID NO: 707
  source 1..120: mol_type = other DNA

SEQ ID NO: 80366 - DNA, 120 bp, synthetic construct
  source 1..120: mol_type = other DNA
aggtgtgagacactgcacccggccaagaaagattagttctaaatcttacaaactgaaggtactgacatgtcggatgcttaatgaaaagtcccttgcttcaaattaaaatgggcttgtgaa

SEQ ID NO: 80367 - DNA, 120 bp, synthetic construct
  source 1..120: mol_type = other DNA
ggagctcttcaataggtacttggatggatggtaaatcctgaagatttggccgcaggtggcagccaggacctcaaatatgtatgtgcaagtagaattagaagaacagtaggccaaaaacag

SEQ ID NO: 80368 - DNA, 120 bp, synthetic construct
  source 1..120: mol_type = other DNA
tgaaaggcagtctgcgcagctggaggaggtgggtgaggtcagggagctctggggccttgtagccttgctttgggattgggctttgctccctaatgcagtggaaacccgttaggagttgtc

SEQ ID NO: 80369 - DNA, 120 bp, synthetic construct
  source 1..120: mol_type = other DNA
acatttgcctttttagcacactgatacttcttactatttcttttcctttttattttttgttgagccagggtcttactccgttgcccaggctggagtacggtggcgccatctcggctcact

SEQ ID NO: 80370 - DNA, 120 bp, synthetic construct
  source 1..120: mol_type = other DNA
gtttttcataattcctagatttcacatacacaatcttccaccatttccttgtgttttccactgtttttttatttgaggcggagtggtggttccaacatttaatgtacccctaattgtcag

SEQ ID NO: 80371 - DNA, 120 bp, synthetic construct
  source 1..120: mol_type = other DNA
gggcccctgttctgtagaaagatgcccagtcttgcttctgaaggttgctttttaaaaccagaatgaaggttgctttttaaaaccagaatcatctggattgcattctgtctcttcattaag

SEQ ID NO: 80372 - DNA, 120 bp, synthetic construct
  source 1..120: mol_type = other DNA
tggaagagcaaataacacaaagggagagggccgagaaggttccctgttagactctgctgtcctctagggcaaagtggggtccctccctctgtgggaaacagggtaggagattgcgttctc

SEQ ID NO: 80373 - DNA, 120 bp, synthetic construct
  source 1..120: mol_type = other DNA
aagtcagccggtaggagtgggatttgggaaactttttgttttgcctttgttgtttgctactgatcacctgcgtgcgagggaggcttcttggagtcaggtgggtacatgttaacttgaaag

SEQ ID NO: 80374 - DNA, 120 bp, synthetic construct
  source 1..120: mol_type = other DNA
gcagaatataagactaaaagaagtaaagtttataaagcccgttgtgcagagagccagctaagtagctggtgcccacaaatgttacttcccttttccttgcccttcttaagaagccacttc

SEQ ID NO: 80375 - DNA, 120 bp, synthetic construct
  source 1..120: mol_type = other DNA
gcagggaggtggtgtgctccacgcccatgtatccgtttttggtgtttgcttttgcagtaagcatcatgcatgaggattggtgctggaagaacaagagcctggaggtggaagtgctggagg

SEQ ID NO: 80376 - DNA, 120 bp, synthetic construct
  source 1..120: mol_type = other DNA
gtgaattttctataatgttttgatgtcgagcggcggcagatgtcatcgtcaggtcttagtttctctgtagagaaactagaagaattggaactggtgtttcatgtgccaacttactcccct

SEQ ID NO: 80377 - DNA, 120 bp, synthetic construct; identical to SEQ ID NO: 708
  source 1..120: mol_type = other DNA

SEQ ID NO: 80378 - DNA, 120 bp, synthetic construct; identical to SEQ ID NO: 709
  source 1..120: mol_type = other DNA

SEQ ID NO: 80379 - DNA, 120 bp, synthetic construct
  source 1..120: mol_type = other DNA
gtattattggccagaaccgtgccacatggttacttctagctgcaagggaggctgggacagttggatgtgctacccgaggctgagcacgttgccaccctcaacataaccagggtttgttct

SEQ ID NO: 80380 - DNA, 120 bp, synthetic construct
  source 1..120: mol_type = other DNA
agctgccactcgatttcagatgtcggaattgctcagtgtaatagatgccattctctgaaaattacttttgatttcctgtctgtaggtgtgtacaaagtgacccctcgctcctgccaccgg

SEQ ID NO: 80381 - DNA, 120 bp, synthetic construct
  source 1..120: mol_type = other DNA
tggggagtctctaataggctctctggaaattagttttgatttcttatctctagatgtatatacaaatggccttccctctcttataggacattgccgtcaattcccagcagccttgatcct

SEQ ID NO: 80382 - DNA, 120 bp, synthetic construct
  source 1..120: mol_type = other DNA
ccatgttaaggtccatagtctttgtcccatgatgcaattgacatgttttacatagaggaatgacatttttcttcctgaaggtccccctattggccgagtggagaacagacagaagaggcc

SEQ ID NO: 80383 - DNA, 120 bp, synthetic construct
  source 1..120: mol_type = other DNA
atcactgcagcagcttcccagctgggctttgcttcttaccacgtggccctcagccctagtctgaccccctctgggatcattgcagcagcttcccagctggccttcccttctcaccacgtg

SEQ ID NO: 80384 - DNA, 120 bp, synthetic construct
  source 1..120: mol_type = other DNA
tagtttatttaaaacagaagactccgccactgtggtgtcatgataagatgtccagtttgtaactcgcaagtccatactcgtagaaaggtcaaattcccactgaccacaaggatacgcaac

SEQ ID NO: 80385 - DNA, 120 bp, synthetic construct
  source 1..120: mol_type = other DNA
ggagggtctttttttggggaatggatgactgaagtgatcacttgtggagtatttgtcttttgccacttattatttttttcccagcactctggcttcgttaagttgtgggtgttatgtggt

SEQ ID NO: 80386 - DNA, 120 bp, synthetic construct
  source 1..120: mol_type = other DNA
accatcggagacttcaaggcctatgccctggcaggcgtaagctttgaggtaactaacactgtattttcaaaaggcagttatactgaggtataattaacatataataaactgcacaaaaag

SEQ ID NO: 80387 - DNA, 120 bp, synthetic construct
  source 1..120: mol_type = other DNA
cgcaggtgactaataaacacagaaacacaaagcctctgtagttactgaggaaatgtgctaaggaagttacagtcgaaacactgttttgcagggattagatttgctgtaattaagacaatc

SEQ ID NO: 80388 - DNA, 120 bp, synthetic construct
  source 1..120: mol_type = other DNA
aaccttgaaaaaatgacctcttgacttgtggaactgttattttcatagttagtaggagtttaaccttgctctggtctcaccttctcatccccagataaaagctgaggatgaccagcccct

SEQ ID NO: 80389 - DNA, 120 bp, synthetic construct
  source 1..120: mol_type = other DNA
tgaagacaccactttgcagtgatgcagactgctccttacttgctgtgtcctatcaggcaagttactttgcctctctgagcctcagtttctttattcattaaattcaaatatgagccaggt

SEQ ID NO: 80390 - DNA, 120 bp, synthetic construct
  source 1..120: mol_type = other DNA
aggagttttgactgctgcccttctctcctaggagctcaacctggtggttcagtctcaaatttcctattttggaattggcttgagagagcctattgagttgctaaaagcttttatttattt

SEQ ID NO: 80391 - DNA, 120 bp, synthetic construct
  source 1..120: mol_type = other DNA
cctagaaagaataaaataaagctttagccttcttaaattacaattttccagagcatccctcaaaatgtatgagaaaagaaattgatggcagcttatccctccggcaggaaggtgtggttt

SEQ ID NO: 80392 - DNA, 120 bp, synthetic construct
  source 1..120: mol_type = other DNA
gagtcgcaaaatttcagatgtttcaacactaggggtgttcttaaaggaactctggactcttaaggttaacaggccacagattaggaaatgaggggagagaaatgctcctgtcttaatgat

SEQ ID NO: 80393 - DNA, 120 bp, synthetic construct
  source 1..120: mol_type = other DNA
gaacttttgacctaggaagtggattttcttttttttttcttttttttttttttgagatggagtctcaccctgtcacgcaggatggagtgcagtgccgtgatctcggctcactgcaacctc

SEQ ID NO: 80394 - DNA, 120 bp, synthetic construct
  source 1..120: mol_type = other DNA
tgacaaacttagcttccttaatgtaagaagcaaagtttgccatgaagcagctctcaggccatcggacagctggcatagaagttcctccaccagctttctcattactggcattccctcttt

SEQ ID NO: 80395 - DNA, 120 bp, synthetic construct
  source 1..120: mol_type = other DNA
ggattacaattcaacatgagatttgggcagggacaaatatccaaacagtatcagaggtggtggacggtgggctggagagcaggtggtctgggctttctcttgtctccagtagtgactcac

SEQ ID NO: 80396 - DNA, 120 bp, synthetic construct
  source 1..120: mol_type = other DNA
taccatgtgtaagttgtgtgaccttaggtgactttggctctctgggtctccatagggataataacaatacctgttttgtagtcaggattggcgataatgtagataaaatatctggcgcct

SEQ ID NO: 80397 - DNA, 120 bp, synthetic construct
  source 1..120: mol_type = other DNA
gttttgtaatccatgctcttcaatgaagaatttatcacaaatctgttcctcatcatcaaatctttcttttttttttttttttgagacggagtctcgccttgtcgcccaggctggagtgca

SEQ ID NO: 80398 - DNA, 120 bp, synthetic construct
  source 1..120: mol_type = other DNA
tgcttattatcaattctatttggacagagctaacttgtagttggtgtggggagtgcaaactttgcaaagaatttggttcttttctggtggtcttagcctgaggatgtcaagtgtgagcct

SEQ ID NO: 80399 - DNA, 120 bp, synthetic construct; identical to SEQ ID NO: 710
  source 1..120: mol_type = other DNA

SEQ ID NO: 80400 - DNA, 120 bp, synthetic construct; identical to SEQ ID NO: 711
  source 1..120: mol_type = other DNA

SEQ ID NO: 80401 - DNA, 120 bp, synthetic construct
  source 1..120: mol_type = other DNA
ctacatgtaggatattcagttagcccctggttgaggggcgtttgtgttgttactggttttctgctattacacataaccctttaatgaattgccttacgcatgcatgtttttgagtgttcg

SEQ ID NO: 80402 - DNA, 120 bp, synthetic construct; identical to SEQ ID NO: 712
  source 1..120: mol_type = other DNA

SEQ ID NO: 80403 - DNA, 120 bp, synthetic construct
  source 1..120: mol_type = other DNA
tcgtagctgctgcctgtcacttctgagaatgtaagaaactgtgccctggtgtgtgatgttccccttcctgtatacctatgtaactaacctgcacattgtgcacatatatcctaaaactta

SEQ ID NO: 80404 - DNA, 120 bp, synthetic construct
  source 1..120: mol_type = other DNA
cacctcagcctcccaaagtgctgggattacaggcgtgagccactgcacctggcctgaattaaacttttaagtaagtgtttacttcagtggaaaaatgggttgggttctaagagatgtcca

SEQ ID NO: 80405 - DNA, 120 bp, synthetic construct
  source 1..120: mol_type = other DNA
aaaaggtgatctatattgtcggtggcccagataaaagttgggggttctattgggagaaagggagaatggccacagggatgctagtagcagtgcctgctttgcttcctcactagaccgtac

SEQ ID NO: 80406 - DNA, 120 bp, synthetic construct
  source 1..120: mol_type = other DNA
aagaaggtgtgttgagaagtgaggctccgctgttcatctggcaaaagcctcctctttgtacccctctctctcacactttctctcttttctagctcattcctttgctgctgcagttgacaa

SEQ ID NO: 80407 - DNA, 120 bp, synthetic construct
  source 1..120: mol_type = other DNA
ggaagcttagggactcagctctggctcacccctgctgtgcagaaatgtgcgttcatttttctagagaagccagaaaaacaaagatttacgtgaaattttcccaattttaaatgttagcca

SEQ ID NO: 80408 - DNA, 120 bp, synthetic construct
  source 1..120: mol_type = other DNA
agaaacatcccttttaaatgttaatggggtttttattgacggtataaaggttaagagcttgcgaaagatacaattgtcagtacactccttccagttccggaggccgccagtaagtggcag

SEQ ID NO: 80409 - DNA, 120 bp, synthetic construct
  source 1..120: mol_type = other DNA
gcttcaactcggtcttcttttctggggttacaggagatgggaagggccgaaggtagcatgagaacgtgtgtgtgtgtgtgtttgtgtgtgtgtgtgtgtgtttgtgcatgtgtatgtgga

SEQ ID NO: 80410 - DNA, 120 bp, synthetic construct
  source 1..120: mol_type = other DNA
gaatcaggctggctctgtgcgaccagtgggaagtggtggaagtgagtgatgatgtgtgacttctcgggctaggtcgtaacaggcattgcactttggctctcgggaagccaactgccttgc

SEQ ID NO: 80411 - DNA, 120 bp, synthetic construct
  source 1..120: mol_type = other DNA
ctgcttcccttgatgccaactttcaggaatcagctttctgaaagaccactctgctagaaacagacaggcccatcctttcaaccaggtccaggactgtttgctcagtcactgctctcagag

SEQ ID NO: 80412 - DNA, 120 bp, synthetic construct
  source 1..120: mol_type = other DNA
ccatgacaatgaaatgcctagagaagggagcactcattttccagtgggcctactgtgtgctggggtggcgagactcttcctgccctggaacttggtgaggtcaggagggaagatattata

SEQ ID NO: 80413 - DNA, 120 bp, synthetic construct; identical to SEQ ID NO: 7476
  source 1..120: mol_type = other DNA

SEQ ID NO: 80414 - DNA, 120 bp, synthetic construct; identical to SEQ ID NO: 7477
  source 1..120: mol_type = other DNA

SEQ ID NO: 80415 - DNA, 120 bp, synthetic construct; identical to SEQ ID NO: 7478
  source 1..120: mol_type = other DNA

SEQ ID NO: 80416 - DNA, 120 bp, synthetic construct; identical to SEQ ID NO: 7479
  source 1..120: mol_type = other DNA

SEQ ID NO: 80417 - DNA, 120 bp, synthetic construct; identical to SEQ ID NO: 7480
  source 1..120: mol_type = other DNA

SEQ ID NO: 80418 - DNA, 120 bp, synthetic construct
  source 1..120: mol_type = other DNA
gaaaccctatctctactgttaaaaatatatatacaaaaattagctaggcatggtggcacatgcctgtaatcccagctacttgagaggctgagacatgagaattgcttgaacccaggaagc

SEQ ID NO: 80419 - DNA, 120 bp, synthetic construct; identical to SEQ ID NO: 7481
  source 1..120: mol_type = other DNA

SEQ ID NO: 80420 - DNA, 120 bp, synthetic construct; identical to SEQ ID NO: 7482
  source 1..120: mol_type = other DNA

SEQ ID NO: 80421 - DNA, 120 bp, synthetic construct; identical to SEQ ID NO: 7483
  source 1..120: mol_type = other DNA

SEQ ID NO: 80422 - DNA, 120 bp, synthetic construct; identical to SEQ ID NO: 7484
  source 1..120: mol_type = other DNA

SEQ ID NO: 80423 - DNA, 120 bp, synthetic construct; identical to SEQ ID NO: 7485
  source 1..120: mol_type = other DNA

SEQ ID NO: 80424 - DNA, 120 bp, synthetic construct; identical to SEQ ID NO: 7486
  source 1..120: mol_type = other DNA

SEQ ID NO: 80425 - DNA, 120 bp, synthetic construct; identical to SEQ ID NO: 7487
  source 1..120: mol_type = other DNA

SEQ ID NO: 80426 - DNA, 120 bp, synthetic construct; identical to SEQ ID NO: 7488
  source 1..120: mol_type = other DNA

SEQ ID NO: 80427 - DNA, 120 bp, synthetic construct
  source 1..120: mol_type = other DNA
ctaatttgaagatagaagcgataaacaaaataagaaaccaaaatacattctgttttgattaaagcagaggtcagccataactctgaacctaaaaaggaggtcacctgaagcagctgtgag

SEQ ID NO: 80428 - DNA, 120 bp, synthetic construct
  source 1..120: mol_type = other DNA
ggtgctgtgtgcacctctgtgtggcctatggggatcctgcaatggctcagggtctcacggcagagctgtttctctgcccacacaatggactcacaacctgacacacgaaaattcacagag

SEQ ID NO: 80429 - DNA, 120 bp, synthetic construct
  source 1..120: mol_type = other DNA
gaagctggttcaggtcagatgttgcaccaagggttggagaaggggccttcctgcatcagcacccggacaaggcagaggagcaggtgtccaaacccaggcctggtctgctgctgctgtggc

SEQ ID NO: 80430 - DNA, 120 bp, synthetic construct
  source 1..120: mol_type = other DNA
aacgtgttcctagccggttcagccccagcctgtagggaccagccccacatggtcggtgggtctctccccgtgtgccgcaacgagagagtgtagaaataaagacacaagacaaagagataa

SEQ ID NO: 80431 - DNA, 120 bp, synthetic construct
  source 1..120: mol_type = other DNA
tccccttagctcctatctctgtatggcctggtttttcctaggttatgattatagagtgaggattattataatactggaataaagagtaattgctaccaactaatgattattgatattcat

SEQ ID NO: 80432 - DNA, 120 bp, synthetic construct
  source 1..120: mol_type = other DNA
ccgcatcgtgtcccgccggggctcaccgcgctcctctaccccgcagctcattccagcagcgcttgtcctacaccacgctgagcgacctggccctggcgcttctcgacggcaccgtgttcg

SEQ ID NO: 80433 - DNA, 120 bp, synthetic construct
  source 1..120: mol_type = other DNA
gggagcaagtgctctagaacaagagcggtctcctacacagctgcagagggtagccccctgagaaattaactgttccaggtgtctcctgactttcagtgcatggccacatcatggtaccta

SEQ ID NO: 80434 - DNA, 120 bp, synthetic construct
  source 1..120: mol_type = other DNA
gccatttttccacagagttgtagttctttctagcaggatggggagtttcagtaactgcctgggcccaatgctgtttgtgcttcagaaggtttgggccaggtcctggttccaccagcagca

SEQ ID NO: 80435 - DNA, 120 bp, synthetic construct
  source 1..120: mol_type = other DNA
gctcctttcccatgcctttgcctgaggtggtctccaacacttgagtagatgtcctatggcctgtggccacgggggccctgaagccctcagactgcagcctccctcccgcctgccccctcc

SEQ ID NO: 80436 - DNA, 120 bp, synthetic construct
  source 1..120: mol_type = other DNA
tgtggtgaggatgcattggtggtgtcagagctggtgctgttggggacagcagcaggagcatgtgtttgagctgccctcacctcccccgccgcccccggccccacggcaggcggtggagca

SEQ ID NO: 80437 - DNA, 120 bp, synthetic construct
  source 1..120: mol_type = other DNA
cccctgctgaggagagaccaggtggaccccagctgcctgtcacccttcatctgggacttgctgtcaaaccctaggatagtctcataaaggggaggctgggccagcctgctgctgtctgct

SEQ ID NO: 80438 - DNA, 120 bp, synthetic construct
  source 1..120: mol_type = other DNA
atgagacttctctgaccctgtctgagccactccctctttgttgcccagagctgaccctgtgtgagggcaaagggctctcagctgcaggaacagtggtttattgaccaggcaggcctcccc

SEQ ID NO: 80439 - DNA, 120 bp, synthetic construct
  source 1..120: mol_type = other DNA
ctcccacctgctttccctcccctctcctctctcacctctcctctagctcccttcttggaggtgcagcccttcctcgggccctgacccacccagcagcctgccccacagggcagagaagct

SEQ ID NO: 80440 - DNA, 120 bp, synthetic construct
  source 1..120: mol_type = other DNA
tggctgccccctcccctgctggtgtgcacagcctctgccatgtgactgcggctcctcccagcacaggacagtggctcactccacctggcatctgggcttggcctcgtgaggcactttggc

SEQ ID NO: 80441 - DNA, 120 bp, synthetic construct
  source 1..120: mol_type = other DNA
gacacatctatgacaattagcagaggatcagggcacaaaaatgggtgtgctgcaatttcaggccatgaaaaagtagcagcatcgtaaacaaaggctgaatgtggacatcactgaatgatt

SEQ ID NO: 80442 - DNA, 120 bp, synthetic construct
  source 1..120: mol_type = other DNA
atctcaaaaaaagaaaaaagttaattttaaaaaccaacgtaactgcaaaaagccattgtgctctcacagtccgatgtccagaacgccagcgggcctgggcctgcccactgaagccaccct

SEQ ID NO: 80443 - DNA, 120 bp, synthetic construct
  source 1..120: mol_type = other DNA
agatgctggacacatagccccgggcactccatgctggctgttgacagcaccactctgcaagcccacacaagaggacccagatggaacgcgaaatgaaaaacacatcgggcagaggacacg

SEQ ID NO: 80444 - DNA, 120 bp, synthetic construct
  source 1..120: mol_type = other DNA
gtgaggatgggcctccaacctctgtccccaaggagcaatggcagtggggacgtctgcaacttcctgtgtggcctgtggacggccctgtgggtgcagcccaggcgccagcagccatcatgt

SEQ ID NO: 80445 - DNA, 120 bp, synthetic construct
  source 1..120: mol_type = other DNA
caactgttgctcaagtgaggcaggtgccctcttctccacgagtcccaggtaccctctgcccgagcgggacagctcaccttggccaggacatccatccgctgtagcatcctggtcatctgt

SEQ ID NO: 80446 - DNA, 120 bp, synthetic construct
  source 1..120: mol_type = other DNA
ttttctgaaggtgcttctgttctttctttgaatcccagtttaagctgtggtttcaagcagtctgccaggtcctgggcccccctcccacaggcagatgagtctcattcctctccccgctgt

SEQ ID NO: 80447 - DNA, 120 bp, synthetic construct
  source 1..120: mol_type = other DNA
aggaaatataaatattgttttctgtttaaaaatttaaaaccagtggcatgcgggggctcaaacttataatcccagcactttgggggctgcggcgggcaggtcacttgagcccaggggttt

SEQ ID NO: 80448 - DNA, 120 bp, synthetic construct
  source 1..120: mol_type = other DNA
ccccacccattggcctctggtgctgtttctggctttattacatcgttagtaagaacaggatccatgtctggtttgtttctactgcatagacaggtctattcccaccccgctgctgatgca

SEQ ID NO: 80449 - DNA, 120 bp, synthetic construct; identical to SEQ ID NO: 1277
  source 1..120: mol_type = other DNA

SEQ ID NO: 80450 - DNA, 120 bp, synthetic construct
  source 1..120: mol_type = other DNA
agctcaggcaatccacccgccttggcctcccaaattgctgggattagaggcgtgagcactccagcctgggtgacagagcaagatccagtctcatttgaagcaaacaaacaaaaacataaa

SEQ ID NO: 80451 - DNA, 120 bp, synthetic construct
  source 1..120: mol_type = other DNA
cccctggctaagcctcctcatgaggccaggacggcagtctccttaacaaaggcctaggtccaccaggaggccatgaaaaaggagcagggcgtctccccagacacttgcgagtatgtcaga

SEQ ID NO: 80452 - DNA, 120 bp, synthetic construct
  source 1..120: mol_type = other DNA
tcccatcatttcctagtaatgcccaaagtcctgggcccctggcttgggcacctcaagaccagtgaggccaggatgcaggctgtcccccgctaggctggccacactctgctcagccaagcc

SEQ ID NO: 80453 - DNA, 120 bp, synthetic construct
  source 1..120: mol_type = other DNA
cccctggcttgggcacctcaagaccagtcatgagatcagccctaagaccttcacgccaaggcttaggtacagccaggaaaagccatccccaagggggactcactgtctatgttaaggccg

SEQ ID NO: 80454 - DNA, 120 bp, synthetic construct
  source 1..120: mol_type = other DNA
ctatttccactggagaagaggaagaaagcaccctgggagcagctgattcagaactgcgggtgccacacaggaaatctggctttcgccacctgggacgttgccacgtcctggctcaaggca

SEQ ID NO: 80455 - DNA, 120 bp, synthetic construct
  source 1..120: mol_type = other DNA
acctcctctttctttctcgggagcactgctgggactcactttgccatgcactcagacgcctccatcctccctgggcctctcacggccagcaccacttgccatggccttaatttggggcgg

SEQ ID NO: 80456 - DNA, 120 bp, synthetic construct
  source 1..120: mol_type = other DNA
ccaaatacataggaagacatagggagatcccatctttacaaaaaaaaattaaaacttagccaggtatggtggtgcgtgcctgtggtcccagctacttagggggctcagatgggaggatca

SEQ ID NO: 80457 - DNA, 120 bp, synthetic construct
  source 1..120: mol_type = other DNA
ccgaagcaggggctggatggactcctggtcctccccggctacaaaatgcccatagaaggtcatcttcatgagcttgttgaatagcctctgtcctagaagtttcctggaaacatacagcag

SEQ ID NO: 80458 - DNA, 120 bp, synthetic construct
  source 1..120: mol_type = other DNA
ccatgcaccaagcaccttttatagactggaaacaaccaaaggaaaccgaccaggatctcacatcctggtggtaaaggaaccccaaaggggaaggagggactctgcctatgactcaggaca

SEQ ID NO: 80459 - DNA, 120 bp, synthetic construct; identical to SEQ ID NO: 1278
  source 1..120: mol_type = other DNA

SEQ ID NO: 80460 - DNA, 120 bp, synthetic construct; identical to SEQ ID NO: 1279
  source 1..120: mol_type = other DNA

SEQ ID NO: 80461 - DNA, 120 bp, synthetic construct
  source 1..120: mol_type = other DNA
tgcctacagaaacctgacctggtgccttcctagccccctccccatcccagccatgcttagggctgtgcctacagaaacctgacctggtgccttcctagtccccactccatcccggccaca

SEQ ID NO: 80462 - DNA, 120 bp, synthetic construct
  source 1..120: mol_type = other DNA
ctgctgggtcccggggtttgaattccggggttccaggctatgagccctacaccaggattctcttgtctcaacatgaagaatactccattttaaattccaagtgataactctgtattccca

SEQ ID NO: 80463 - DNA, 120 bp, synthetic construct; identical to SEQ ID NO: 1280
  source 1..120: mol_type = other DNA

SEQ ID NO: 80464 - DNA, 120 bp, synthetic construct; identical to SEQ ID NO: 1281
  source 1..120: mol_type = other DNA

SEQ ID NO: 80465 - DNA, 120 bp, synthetic construct
  source 1..120: mol_type = other DNA
attatcattagttcttacaggttttgggataggcagtggagttaagagcaatgttctgggggcaggggtggatctcacaaagtaccttctcaagggtggggagaattaccaagaaccttc

SEQ ID NO: 80466 - DNA, 120 bp, synthetic construct
  source 1..120: mol_type = other DNA
gtatttattcatcatttgtgggtgtttctcgaagagggggatgtgtcagggtcacaagacaattgtggggagagggtcagcagacaaacacgtgaacaaaggtctttgcatcatagacaa

SEQ ID NO: 80467 - DNA, 120 bp, synthetic construct
  source 1..120: mol_type = other DNA
tgacctgctggaagaggacttgtgcctcgtggtttagactctgatggccccactaattctggaccttttccttctaattttaacgtttcaggatatatcacctcctgtaattgattatag

SEQ ID NO: 80468 - DNA, 120 bp, synthetic construct
  source 1..120: mol_type = other DNA
gttatattctgtttgtttaagactgggcaattcttttttaagtgaccaatttgaccacaattataacattttcctccaaatgttctaacttgtcctcctaaaacaactcctgttattgct

SEQ ID NO: 80469 - DNA, 120 bp, synthetic construct; identical to SEQ ID NO: 12944
  source 1..120: mol_type = other DNA

SEQ ID NO: 80470 - DNA, 120 bp, synthetic construct; identical to SEQ ID NO: 12945
  source 1..120: mol_type = other DNA

SEQ ID NO: 80471 - DNA, 120 bp, synthetic construct; identical to SEQ ID NO: 12946
  source 1..120: mol_type = other DNA

SEQ ID NO: 80472 - DNA, 120 bp, synthetic construct; identical to SEQ ID NO: 12947
  source 1..120: mol_type = other DNA

SEQ ID NO: 80473 - DNA, 120 bp, synthetic construct; identical to SEQ ID NO: 26961
  source 1..120: mol_type = other DNA

SEQ ID NO: 80474 - DNA, 120 bp, synthetic construct; identical to SEQ ID NO: 26962
  source 1..120: mol_type = other DNA

SEQ ID NO: 80475 - DNA, 120 bp, synthetic construct; identical to SEQ ID NO: 26963
  source 1..120: mol_type = other DNA

SEQ ID NO: 80476 - DNA, 120 bp, synthetic construct; identical to SEQ ID NO: 16546
  source 1..120: mol_type = other DNA

SEQ ID NO: 80477 - DNA, 120 bp, synthetic construct; identical to SEQ ID NO: 27063
  source 1..120: mol_type = other DNA

SEQ ID NO: 80478 - DNA, 120 bp, synthetic construct; identical to SEQ ID NO: 27064
  source 1..120: mol_type = other DNA

SEQ ID NO: 80479 - DNA, 120 bp, synthetic construct; identical to SEQ ID NO: 7433
  source 1..120: mol_type = other DNA

SEQ ID NO: 80480 - DNA, 120 bp, synthetic construct
  source 1..120: mol_type = other DNA
caatttctctcttttgtactctctccctttatttctcaagccggctgacggttaggaaaaataggaaagaacctacgtgattattggggcaggtcccccgatagagtggcacatgatggg

SEQ ID NO: 80481 - DNA, 120 bp, synthetic construct
  source 1..120: mol_type = other DNA
agacactcagtgtccttggcagtgctgctactcctcaggtgcagcatacataaccagtaagagactaaatctgcaatatataaagagctcctacaaatcagtaacatgaagaacactcaa

SEQ ID NO: 80482 - DNA, 120 bp, synthetic construct
  source 1..120: mol_type = other DNA
ccaactactccctgatggccaatcactctccagatggctctcctcacctggacccacaggggtataccaaaggtgccacggatgcagtcggcatgccagcccaggtactcatgaacacgg

SEQ ID NO: 80483 - DNA, 120 bp, synthetic construct; identical to SEQ ID NO: 1290
  source 1..120: mol_type = other DNA

SEQ ID NO: 80484 - DNA, 120 bp, synthetic construct
  source 1..120: mol_type = other DNA
gggaggcccagccagggagtgaggctgatccaggcctctagtcccagaccttgctgtttctcagggctgtggggctccgcttggggaggaggagggagggtgtagaggtgcagcgttttt

SEQ ID NO: 80485 - DNA, 120 bp, synthetic construct
  source 1..120: mol_type = other DNA
acatctgagggttcgttcagagctctgtttctcggcgctgcatggtggcggaagggagggagcgaatgggatcccctaaaagggatcttagagtttcacccagtgggatgtgacacttgc

SEQ ID NO: 80486 - DNA, 120 bp, synthetic construct
  source 1..120: mol_type = other DNA
ccttcaatgaaacctctgctgatttccttcgctcatttttttcctgtgtcttcgtctgatgagtttctcttctttttgtttgttcgtttgtttgttttgagacagtctcgctcagtggcc

SEQ ID NO: 80487 - DNA, 120 bp, synthetic construct
  source 1..120: mol_type = other DNA
ggctgtccctgtttgagtaggagatgagagctactggtggctatgagtggaaagaagtgagcagaggtgagcagaaatcccaaggactggtgatgataggatgatggtgggaaccaggat

SEQ ID NO: 80488 - DNA, 120 bp, synthetic construct
  source 1..120: mol_type = other DNA
ttggttgaagagaagacatatctgcaaaggctctggtccacagttcctccagatatcatgcctgcattccttttgtctcctaccccattccattctagcttccatgtgacctctgaaaag

SEQ ID NO: 80489 - DNA, 120 bp, synthetic construct
  source 1..120: mol_type = other DNA
cacacctgtaatctcagcactttgggaggctaagaagggaggattgcttgagcccaggagttaaagatcaggctaggcaacatagcaagattctcttctttattttctacaaaaaaaaaa

SEQ ID NO: 80490 - DNA, 120 bp, synthetic construct
  source 1..120: mol_type = other DNA
ttaaagacctgtagtgggtggggctacacgtagggcggagacgatgggacttccggaaatcagccggcacacgtgacttttgtttgcagaagcgggaggtaccctaggcagccaatcggg

SEQ ID NO: 80491 - DNA, 120 bp, synthetic construct
  source 1..120: mol_type = other DNA
tgaccccttaggttcctgctgttaggaccatcttcaaagtgcgagcaggattgaatgaatttctggctctgctcctcagtgtgtaagtctgtgaaccgggaaggctctcttttaacaccc

SEQ ID NO: 80492 - DNA, 120 bp, synthetic construct
  source 1..120: mol_type = other DNA
tgggtcctccctcaagctacagaggaataatacagtcagccccctgtatcactgggttacgcatctgttgattcaaacaaccatggattgaaatattagaggaaaaaaattgataattgc

SEQ ID NO: 80493 - DNA, 120 bp, synthetic construct
  source 1..120: mol_type = other DNA
tatttagatccagagaccctttttattataagccattcccctctcgacagtttccagcttgctttccccattcctgtttcttcactaaacggaccttcctctcactagtcaccatggtac

SEQ ID NO: 80494 - DNA, 120 bp, synthetic construct
  source 1..120: mol_type = other DNA
gatctgtgactcagagatgtttacaaaggccaaggaaacaaagttgccacttaacgggcctgccctccccaccagacctccgtggctccccagtgcccgagaagccgcctctgggccccc

SEQ ID NO: 80495 - DNA, 120 bp, synthetic construct; identical to SEQ ID NO: 31997
  source 1..120: mol_type = other DNA

SEQ ID NO: 80496 - DNA, 120 bp, synthetic construct
  source 1..120: mol_type = other DNA
agctgctctgtgaatgtgagaaagtttttcccccagcccccatctactccccacccccagctatgaatttcttatttcaggagggaggacaaacatggagacacacatttttacaggagt

SEQ ID NO: 80497 - DNA, 120 bp, synthetic construct; identical to SEQ ID NO: 31998
  source 1..120: mol_type = other DNA

SEQ ID NO: 80498 - DNA, 120 bp, synthetic construct
  source 1..120: mol_type = other DNA
ccctgccctgccgcagccagtcccgggggcctaccccaacaccgcccccgggagacgcccttacgctctgctgcacccgcatcctcctcgctacctactgctctcggcccccgcctatgc

SEQ ID NO: 80499 - DNA, 120 bp, synthetic construct; identical to SEQ ID NO: 31999
  source 1..120: mol_type = other DNA

SEQ ID NO: 80500 - DNA, 120 bp, synthetic construct; identical to SEQ ID NO: 32000
  source 1..120: mol_type = other DNA

SEQ ID NO: 80501 - DNA, 120 bp, synthetic construct; identical to SEQ ID NO: 32001
  source 1..120: mol_type = other DNA

SEQ ID NO: 80502 - DNA, 120 bp, synthetic construct; identical to SEQ ID NO: 32002
  source 1..120: mol_type = other DNA

SEQ ID NO: 80503 - DNA, 120 bp, synthetic construct
  source 1..120: mol_type = other DNA
ccatgagctctatgatctggaggagactccagtgagctggaaggatgacactgagagaacaaatcgattggtcctccttggtaagtctgaaaggattcacagttttaaaacaaagtgaaa

SEQ ID NO: 80504 - DNA, 120 bp, synthetic construct; identical to SEQ ID NO: 32302
  source 1..120: mol_type = other DNA

SEQ ID NO: 80505 - DNA, 120 bp, synthetic construct
  source 1..120: mol_type = other DNA
agcccttgtgtattttcatctctgagtttgaaatttggggttatattggcaaagggaggtttgggttttaattaggtgacctgttagaggaaatgttaagcttctgtttctttagggtag

SEQ ID NO: 80506 - DNA, 120 bp, synthetic construct
  source 1..120: mol_type = other DNA
tatcttcttttaagaattgtctattcatgtccttagcccactttttgatgggactgcttttcttgctgatttgttggagttcattgtagattctggatatttgttctttttcagatgtat

SEQ ID NO: 80507 - DNA, 120 bp, synthetic construct
  source 1..120: mol_type = other DNA
tactatgaacacctttacatgcataaactagaaaacctaaaatagatggagaaattcctggaaagatacaaccctcctagcttaaatcaggaagaattaccctgaacagaccagtaacaa

SEQ ID NO: 80508 - DNA, 120 bp, synthetic construct
  source 1..120: mol_type = other DNA
gaccgagacatttcatgcaaacggacaccaaatgtgagcaggagtagccattcttatattagacaaaacaaactttaaagaaacagcagtttaaaaagacaaagagggacattatataat

SEQ ID NO: 80509 - DNA, 120 bp, synthetic construct
  source 1..120: mol_type = other DNA
atttcttgaaggctttcttcatattttcttattcttttttctttgtctttattggattcggttaattaggagaccttgtcttcaggctctgaatttccttcttctacttgttcaattcta

SEQ ID NO: 80510 - DNA, 120 bp, synthetic construct
  source 1..120: mol_type = other DNA
ggttgttagtgtcttggctgctgtgacaaaataagtagttttaaaagtctcacatttgcaagttcaatttgaatctttttttagtctgcttgtacttctcttatcaagcaagaaagcact

SEQ ID NO: 80511 - DNA, 120 bp, synthetic construct; identical to SEQ ID NO: 32003
  source 1..120: mol_type = other DNA

SEQ ID NO: 80512 - DNA, 120 bp, synthetic construct; identical to SEQ ID NO: 32004
  source 1..120: mol_type = other DNA

SEQ ID NO: 80513 - DNA, 120 bp, synthetic construct
  source 1..120: mol_type = other DNA
gcctagctaatttttgtattttttttttttttttagtagagatggggtttcaccatgttggccaagctggtctcaaactcctgacttcacctgcttcggcctcccaaagtgctgggatta

SEQ ID NO: 80514 - DNA, 120 bp, synthetic construct; identical to SEQ ID NO: 32005
  source 1..120: mol_type = other DNA

SEQ ID NO: 80515 - DNA, 120 bp, synthetic construct; identical to SEQ ID NO: 32006
  source 1..120: mol_type = other DNA

SEQ ID NO: 80516 - DNA, 120 bp, synthetic construct; identical to SEQ ID NO: 32007
  source 1..120: mol_type = other DNA

SEQ ID NO: 80517 - DNA, 120 bp, synthetic construct; identical to SEQ ID NO: 79447
  source 1..120: mol_type = other DNA

SEQ ID NO: 80518 - DNA, 120 bp, synthetic construct
  source 1..120: mol_type = other DNA
atccagacacggcggatgaaagcgatcatggctaactagtgaaacagcactgatagtcaaatgaagggctggaaccttgaagtaaaaagaagaaaaggatcatcgagagaaaagttagga

SEQ ID NO: 80519 - DNA, 120 bp, synthetic construct; identical to SEQ ID NO: 32008
  source 1..120: mol_type = other DNA

SEQ ID NO: 80520 - DNA, 120 bp, synthetic construct; identical to SEQ ID NO: 32009
  source 1..120: mol_type = other DNA

SEQ ID NO: 80521 - DNA, 120 bp, synthetic construct
  source 1..120: mol_type = other DNA
tgaggagctgcgttccttcggaggaggagaggcgctgcgttcctttggaggaggagaggcgctctgctttttagagtttccagtttttctgctctgttttttccccatctttgtggtttt

SEQ ID NO: 80522 - DNA, 120 bp, synthetic construct
  source 1..120: mol_type = other DNA
ttatgatgttagctggttattttgctcgttagttgatgcagtttcttcctagcttggatggtctttacattttggcatgattctgcagtggctggtaccggttgttcctttccacgttta

SEQ ID NO: 80523 - DNA, 120 bp, synthetic construct
  source 1..120: mol_type = other DNA
gctcctgaatgactactgggtacataacgaaatgaaggcagaaataaagatgttctttgaaaccaacgagaacaaagacacaacataccagaatctctgggacgcattcaaagcagtgtg

SEQ ID NO: 80524 - DNA, 120 bp, synthetic construct
  source 1..120: mol_type = other DNA
tcaatacatgtaatccagcatataaacagaaccaaagacaaaaaccacatgattatctcaatagatgcagaaaaggcctttgacaaaattcaacaacccttcatgctaaaaactctcaat

SEQ ID NO: 80525 - DNA, 120 bp, synthetic construct
  source 1..120: mol_type = other DNA
catggattaaagacttaaacgtttgacctaaaaccataaaaaccctagaagaaaacctaggcattaccattcaggacataggcatgggcaaggacttcatgtctaaaacaccaaaagcaa

SEQ ID NO: 80526 - DNA, 120 bp, synthetic construct
  source 1..120: mol_type = other DNA
ggggtggggggaggggggagggatagcattgggagatataactaatgctagatgacgagtcagtgggtgcagcgcaccagcatggcacatgtatacatatgtaactaacctgcacattgt

SEQ ID NO: 80527 - DNA, 120 bp, synthetic construct; identical to SEQ ID NO: 1145
  source 1..120: mol_type = other DNA

SEQ ID NO: 80528 - DNA, 120 bp, synthetic construct; identical to SEQ ID NO: 1144
  source 1..120: mol_type = other DNA

SEQ ID NO: 80529 - DNA, 120 bp, synthetic construct
  source 1..120: mol_type = other DNA
tttttcttttttttttttcttggtgattttaatgctttggaaaagatctcatggttttatctccaaaggaggaaattaatttgatgccatggaaattagttttctagtcgtatgccttga

SEQ ID NO: 80530 - DNA, 120 bp, synthetic construct; identical to SEQ ID NO: 1794
  source 1..120: mol_type = other DNA

SEQ ID NO: 80531 - DNA, 120 bp, synthetic construct
  source 1..120: mol_type = other DNA
actaaaatcttccgtgaattcttcagtgtatggtgcttgccagtgcatctgagaatctagggactttctgaaatagtacttccttgctatgaggactgaagttggattagaatccttttc

SEQ ID NO: 80532 - DNA, 120 bp, synthetic construct; identical to SEQ ID NO: 32010
  source 1..120: mol_type = other DNA

SEQ ID NO: 80533 - DNA, 120 bp, synthetic construct; identical to SEQ ID NO: 32011
  source 1..120: mol_type = other DNA

SEQ ID NO: 80534 - DNA, 120 bp, synthetic construct; identical to SEQ ID NO: 32476
  source 1..120: mol_type = other DNA

SEQ ID NO: 80535 - DNA, 120 bp, synthetic construct; identical to SEQ ID NO: 32012
  source 1..120: mol_type = other DNA

SEQ ID NO: 80536 - DNA, 120 bp, synthetic construct
  source 1..120: mol_type = other DNA
acatttgggcaatatcctgatatatcttctgaagtatagcttattttttttaagaaatggagtcttgctatgttgcccaggttggacttgaactcctgggcttaagggatcctccctcct

SEQ ID NO: 80537 - DNA, 120 bp, synthetic construct
  source 1..120: mol_type = other DNA
ttattttctttttttcccttagttgaattattgctatctatttataatgatctgataactaaacttttacttaaagtcatttttgtcgtagcataaagtgaatgctgaacacaggattct

SEQ ID NO: 80538 - DNA, 120 bp, synthetic construct; identical to SEQ ID NO: 32013
  source 1..120: mol_type = other DNA

SEQ ID NO: 80539 - DNA, 120 bp, synthetic construct
  source 1..120: mol_type = other DNA
ttaatatttttttcataattcatcttggcctgaggctacaagtcctattgttatatactctgcctctagagaatgaggctgctaacagaccttggaatggtgcctggcacaaaggctcaa

SEQ ID NO: 80540 - DNA, 120 bp, synthetic construct
  source 1..120: mol_type = other DNA
aagaacagttaagatctatgttttagcagattcaagtatacaatagaattaactacagtcatcatgctgtaattagctctccatgacttatgcatcttgtataacaaactttgtatgctt

SEQ ID NO: 80541 - DNA, 120 bp, synthetic construct; identical to SEQ ID NO: 32014
  source 1..120: mol_type = other DNA

SEQ ID NO: 80542 - DNA, 120 bp, synthetic construct; identical to SEQ ID NO: 79220
  source 1..120: mol_type = other DNA

SEQ ID NO: 80543 - DNA, 120 bp, synthetic construct; identical to SEQ ID NO: 21347
  source 1..120: mol_type = other DNA

SEQ ID NO: 80544 - DNA, 120 bp, synthetic construct
  source 1..120: mol_type = other DNA
tcattcatgttataactttaattccttgcattgtggttcttttcacactttagtttaatgatgaaatctttgttcatatagattaaaaaaccccagacagtggtggaactcgatgtcact

SEQ ID NO: 80545 - DNA, 120 bp, synthetic construct; identical to SEQ ID NO: 32015
  source 1..120: mol_type = other DNA

SEQ ID NO: 80546 - DNA, 120 bp, synthetic construct; identical to SEQ ID NO: 32016
  source 1..120: mol_type = other DNA

SEQ ID NO: 80547 - DNA, 120 bp, synthetic construct
  source 1..120: mol_type = other DNA
tgtgtgccctattcatttcttcattttgtgttctttcttgctttttgttccctgtatgtgtgtgtttctttttgtcaggctgtaatacatatgcatacatgtttcttcttgatgtgggag

SEQ ID NO: 80548 - DNA, 120 bp, synthetic construct; identical to SEQ ID NO: 1139
  source 1..120: mol_type = other DNA

SEQ ID NO: 80549 - DNA, 120 bp, synthetic construct
  source 1..120: mol_type = other DNA
gtcttgaactcctgaactcgtgaactgcccacctcggcctcccaaagtgctgagattacaggcatgagccaccgagcccggccagcaacagatttttaatggagatgaaatggcctcctt

SEQ ID NO: 80550 - DNA, 120 bp, synthetic construct; identical to SEQ ID NO: 32017
  source 1..120: mol_type = other DNA

SEQ ID NO: 80551 - DNA, 120 bp, synthetic construct
  source 1..120: mol_type = other DNA
ctcctggcctcaagggatccacctgcctcagcctcccaaagtgctgggattacaggcatgagccaccatgcccagcccctacttgtatatcacaaaagtgagatgattacttttcaactt

SEQ ID NO: 80552 - DNA, 120 bp, synthetic construct
  source 1..120: mol_type = other DNA
agttcagagtttcctgtcatgattcccttatcaatgcagtgtaataactacttacacagcacttacattgtattaggtattataagtaatctacagatgatttaaagtatatgggaggat

SEQ ID NO: 80553 - DNA, 120 bp, synthetic construct; identical to SEQ ID NO: 32018
  source 1..120: mol_type = other DNA

SEQ ID NO: 80554 - DNA, 120 bp, synthetic construct; identical to SEQ ID NO: 32019
  source 1..120: mol_type = other DNA

SEQ ID NO: 80555 - DNA, 120 bp, synthetic construct; identical to SEQ ID NO: 32020
  source 1..120: mol_type = other DNA

SEQ ID NO: 80556 - DNA, 120 bp, synthetic construct; identical to SEQ ID NO: 32021
  source 1..120: mol_type = other DNA

SEQ ID NO: 80557 - DNA, 120 bp, synthetic construct; identical to SEQ ID NO: 32315
  source 1..120: mol_type = other DNA

SEQ ID NO: 80558 - DNA, 120 bp, synthetic construct; identical to SEQ ID NO: 32022
  source 1..120: mol_type = other DNA

SEQ ID NO: 80559 - DNA, 120 bp, synthetic construct
  source 1..120: mol_type = other DNA
cacctgaaaatggagaaatacctgtcacctgtgaaacagggccggaaccacctacctgttgccattaaaggatgtcccgtctgtaaaatgcccgacacgtggggctttcgtcagtagatt

SEQ ID NO: 80560 - DNA, 120 bp, synthetic construct; identical to SEQ ID NO: 32023
  source 1..120: mol_type = other DNA

SEQ ID NO: 80561 - DNA, 120 bp, synthetic construct
  source 1..120: mol_type = other DNA
ggcatcaggatagtagtaaaacattctacttgtgcatcagatagatttttatgacctaacctggacaagtaacttaactcttggtgcctcatgtttgaaagagggataacactctacagg

SEQ ID NO: 80562 - DNA, 120 bp, synthetic construct
  source 1..120: mol_type = other DNA
ctcactgaggctacatactgttacaacaatgctatttggtcaacttgactgagctggcctcataagttacaggttgctcattgttagagatgagactttagaccagactggacaacatag

SEQ ID NO: 80563 - DNA, 120 bp, synthetic construct
  source 1..120: mol_type = other DNA
tacccaggctggtcttgaactcctgacctcctgatccatccacctcagcctcctaaagagctgggattacaggcgtgagccactgtgccgggcttttttttttttttttttaacttataa

SEQ ID NO: 80564 - DNA, 120 bp, synthetic construct
  source 1..120: mol_type = other DNA
caagctgatctcaagctcctgacctcaggtgatccacccgccctggctttccaaagtgctgggattacaggcatgagccactgtgtctggctgagattgctttcttgtaagtaatctgtt

SEQ ID NO: 80565 - DNA, 120 bp, synthetic construct
  source 1..120: mol_type = other DNA
gggaaaaaagtttaagcttctcagcttcagatcttcctctgaatattagcactgtggtaattggcacagtggtacctaaccctttgagggtccaggattgttttaatggtgagtgattta

SEQ ID NO: 80566 - DNA, 120 bp, synthetic construct
  source 1..120: mol_type = other DNA
agcactttgggaggccaaggagagaggatcacttgagcccaggagtttgagaccagcctgggcaacatggcaaaaccgtctctaccaaaaaatacaaaaattagccgggtgtggtggtgt

SEQ ID NO: 80567 - DNA, 120 bp, synthetic construct; identical to SEQ ID NO: 7929
  source 1..120: mol_type = other DNA

SEQ ID NO: 80568 - DNA, 120 bp, synthetic construct; identical to SEQ ID NO: 7930
  source 1..120: mol_type = other DNA

SEQ ID NO: 80569 - DNA, 120 bp, synthetic construct; identical to SEQ ID NO: 35446
  source 1..120: mol_type = other DNA

SEQ ID NO: 80570 - DNA, 120 bp, synthetic construct; identical to SEQ ID NO: 35447
  source 1..120: mol_type = other DNA

SEQ ID NO: 80571 - DNA, 120 bp, synthetic construct; identical to SEQ ID NO: 35448
  source 1..120: mol_type = other DNA

SEQ ID NO: 80572 - DNA, 120 bp, synthetic construct; identical to SEQ ID NO: 35449
  source 1..120: mol_type = other DNA

SEQ ID NO: 80573 - DNA, 120 bp, synthetic construct; identical to SEQ ID NO: 35450
  source 1..120: mol_type = other DNA

SEQ ID NO: 80574 - DNA, 120 bp, synthetic construct; identical to SEQ ID NO: 35451
  source 1..120: mol_type = other DNA

SEQ ID NO: 80575 - DNA, 120 bp, synthetic construct; identical to SEQ ID NO: 35452
  source 1..120: mol_type = other DNA

SEQ ID NO: 80576 - DNA, 120 bp, synthetic construct
  source 1..120: mol_type = other DNA
aacaccgctcagcaagcgacccgtgtcccaactccaaagagaaagaatctggtagctacaagacgctccctacgtatctatcacatcaatgccaggaaagaagcaatcaaaatgtgtcag

SEQ ID NO: 80577 - DNA, 120 bp, synthetic construct; identical to SEQ ID NO: 35453
  source 1..120: mol_type = other DNA

SEQ ID NO: 80578 - DNA, 120 bp, synthetic construct
  source 1..120: mol_type = other DNA
gacccagggtcctttcagtctggtgcctttccactgtatcactctgtctccctatacagagtgaatattaagaacaaagttgtctttaatggctagagaaaatgtatcaccagaaagact

SEQ ID NO: 80579 - DNA, 120 bp, synthetic construct; identical to SEQ ID NO: 35454
  source 1..120: mol_type = other DNA

SEQ ID NO: 80580 - DNA, 120 bp, synthetic construct
  source 1..120: mol_type = other DNA
gccctatcttatccatatggacaggtgctcctcatgcatccgtttataggctctccacaagggtcacattccattcccagagctatgaacatctgcttttctaggataggaatcttggtg

SEQ ID NO: 80581 - DNA, 120 bp, synthetic construct
  source 1..120: mol_type = other DNA
acaaagttttctgggctttaagtaccctatttgaggttcttaatgactaccccttatctggatgaaggatttggtctgtggctaattaaaggctgaggtgaactggcaccctatgcagat

SEQ ID NO: 80582 - DNA, 120 bp, synthetic construct; identical to SEQ ID NO: 35483
  source 1..120: mol_type = other DNA

SEQ ID NO: 80583 - DNA, 120 bp, synthetic construct; identical to SEQ ID NO: 35484
  source 1..120: mol_type = other DNA

SEQ ID NO: 80584 - DNA, 120 bp, synthetic construct
  source 1..120: mol_type = other DNA
gagaaataatagacacacgcaagatagcaaaatctgggtccaggggggtcaccgccttctgctcccacggtgccaacaacgcactggatataccggcatttattattaagtttggtgaga

SEQ ID NO: 80585 - DNA, 120 bp, synthetic construct; identical to SEQ ID NO: 35485
  source 1..120: mol_type = other DNA

SEQ ID NO: 80586 - DNA, 120 bp, synthetic construct
  source 1..120: mol_type = other DNA
gtctcttccaggtactcctaatgattggttgcatgtgctccagtgggcccagataaagtgtttcttattccccttggtcaagttgtccccagagtggtgctgtgcctgagcatggtggga

SEQ ID NO: 80587 - DNA, 120 bp, synthetic construct
  source 1..120: mol_type = other DNA
gagaaaagggattacagaaatgctttctactttaccatcattttcttgtttcctggagagttgcttgggcgtgttttgcagaatccatagaggttcagctggcgaatgaaactcgtcaag

SEQ ID NO: 80588 - DNA, 120 bp, synthetic construct; identical to SEQ ID NO: 35486
  source 1..120: mol_type = other DNA

SEQ ID NO: 80589 - DNA, 120 bp, synthetic construct
  source 1..120: mol_type = other DNA
tgaagaggacgtcagacttagagcagctgtctgtcctttcaggttactctcactcttctgaaagtgtctgtcagtttctgaagcatgtgtgttacctgcatcacacagctacttcctatc

SEQ ID NO: 80590 - DNA, 120 bp, synthetic construct
  source 1..120: mol_type = other DNA
ttgtgtggcttcatgaggacaaggccctctcctctgcctttctggagccctccccctgcctctcccagcgtttcctgaatcgggtttggttcgttatcaaagctacggaagaaggacttg

SEQ ID NO: 80591 - DNA, 120 bp, synthetic construct
  source 1..120: mol_type = other DNA
tgacctctgtcatagcactgaccacatggtatcctgcctgtgccttcctctagctgtccccgccctactccggaccgccccaaagactccatgggatggacctgagtcagccgaatccca

SEQ ID NO: 80592 - DNA, 120 bp, synthetic construct
  source 1..120: mol_type = other DNA
cagactgggaaaggagtgaataccaggcagctttggccctatcagggctttgtctcatgagggtgggtatattttcttaaaatcatagagcgtactagaggttgcgtttatgtgttgaaa

SEQ ID NO: 80593 - DNA, 120 bp, synthetic construct
  source 1..120: mol_type = other DNA
agtagaggagtgacataatctcattgtccctgtaccaagatcattccgatggcagtgtggtcacaagagtgcagaggacaagtgctgggggggggtgggggtgctatcaggagacttctt

SEQ ID NO: 80594 - DNA, 120 bp, synthetic construct
  source 1..120: mol_type = other DNA
taatgtcatttctagtggcaaaagtgggaagcaacttgtaactctccatcagtggaggaatggtcaggcaaattatgagacgaccaacaatgggatatcacccaggcagtgaaaaacaag

SEQ ID NO: 80595 - DNA, 120 bp, synthetic construct
  source 1..120: mol_type = other DNA
tccggagggacgcccccctcagccctgaaacccgtgcctctccagccgccccggatctgaacttgtgatcacggagtgtttacgtcgtgccaggcattttaatgcattgttctagttcat

SEQ ID NO: 80596 - DNA, 120 bp, synthetic construct
  source 1..120: mol_type = other DNA
tatgctgtagccaatgaaaagtctgaaatgttttttttttttttttttctgagacggagtcttactgtgtcgcccaggttggagttcagtggtgtaatcctggctcactgcaacctccac

SEQ ID NO: 80597 - DNA, 120 bp, synthetic construct
  source 1..120: mol_type = other DNA
ccagcacttagggatgccaaggtgggaggattgcttgatgctaggagttgaagactagcctgtgtaacatagcgagacccatctctacaaaaaaattaaaaagttacctttagaacttac

SEQ ID NO: 80598 - DNA, 120 bp, synthetic construct
  source 1..120: mol_type = other DNA
ctaaaacagtaaactgataccaatagagtgggatgcagctgaaaagatacccgaaaatatggaagcaactttggagctgggtaacaggcagaggtcagagcagtttagagggctcagaag

SEQ ID NO: 80599 - DNA, 120 bp, synthetic construct
  source 1..120: mol_type = other DNA
gagctgtgaaaagagggctaccattctccagacctcagaatggtagatccacagacagcttgcaccatgtgcctggaaaagctgtagacacttaacgccatctcatgaaagcaaccaggc

SEQ ID NO: 80600 - DNA, 120 bp, synthetic construct
  source 1..120: mol_type = other DNA
agagtgttgtgcttagtaaaatgaattttgaatcttttgtaaaagatcttcttctggttcgtcagtatagagttgaagtttataagaatagagctggaaataaggcatccaaggagaatg

SEQ ID NO: 80601 - DNA, 120 bp, synthetic construct
  source 1..120: mol_type = other DNA
atgtgagccaccatgcccaaccacaagcatttatttatttatttatttatttatttatttatttatttagagacagtcttgctctgtcgccaggctggagtgcagtggcgccatctgggc

SEQ ID NO: 80602 - DNA, 120 bp, synthetic construct
  source 1..120: mol_type = other DNA
aggagagactgctggagacatggggaaactgagacaggtaagcaaattgagtctagtgatagaggagattccaggcctaggaaaggctctttaattgacatgatactgtttcatttaagg

SEQ ID NO: 80603 - DNA, 120 bp, synthetic construct
  source 1..120: mol_type = other DNA
tatttagatttttttttttttgagactgagtctgactctgtcacccaggctagagtgcagtggcacgatccacgatcttggctcactgcagcctccaccttatgggttcaagcgattctt

SEQ ID NO: 80604 - DNA, 120 bp, synthetic construct
  source 1..120: mol_type = other DNA
ttcttattccttttctcatagtagtttaaactatttctttcaaaatagataattcaaagaggaggaattctgatcacagaaagaaaaaaagctgacttttccacaaaagacatttatcag

SEQ ID NO: 80605 - DNA, 120 bp, synthetic construct
  source 1..120: mol_type = other DNA
tttcatagcacgagcatgtcagaatttatccattttacttcccttctgcccgccactgctactctccccattttacctttttttttgtttttttgagatggagtctcagaatttcgctct

SEQ ID NO: 80606 - DNA, 120 bp, synthetic construct
  source 1..120: mol_type = other DNA
agtgcttggattacagcatgagccactgcgcccggcccccattttagttttgatggacatttgggtaattttcttttttggctattctaaataatgctgcaattactgttaattttcacc

SEQ ID NO: 80607 - DNA, 120 bp, synthetic construct
  source 1..120: mol_type = other DNA
aattttaaaatttttgcagagttggagtttcacagtgttgcccaggatgttcgctcactcctgacttcaagtgattcttctgccttagcctctagagtggtagctgggattacaggcatg

SEQ ID NO: 80608 - DNA, 120 bp, synthetic construct
  source 1..120: mol_type = other DNA
gatggcaccactgcactccagtctgggcaatagagtcagaccctgtctcaacaaataaaataaaactgtagtaattataaagtggttttggctgggggagaaatgtacagttgaacatac

SEQ ID NO: 80609 - DNA, 120 bp, synthetic construct
  source 1..120: mol_type = other DNA
agtgtaatatacgtaagtactgcttgatgaatttaaggtgatttctaaagccaggtttgttggggaagaggagtgggatttagtgatttagaaccagaaattggggctgggtgcgatgtc

SEQ ID NO: 80610 - DNA, 120 bp, synthetic construct
  source 1..120: mol_type = other DNA
caaaggttgcagtgagccaagattgtgccactgcactctaccctgggtgagaaacgagattttgtatcaaacaaacaaacaaacaaaaaaagacgcccaaaatcaacaacaacaaaaacg

SEQ ID NO: 80611 - DNA, 120 bp, synthetic construct
  source 1..120: mol_type = other DNA
caagcggggagggcctgtggcttccaaggccaaacgttgaaataccacagactaggaagaaaaagatccactccttatacaggatttgtttgtttcttcttttttcttcatttttgtaga

SEQ ID NO: 80612 - DNA, 120 bp, synthetic construct
  source 1..120: mol_type = other DNA
gcctcccgagtagctgggactacaggcatgtaccaccacacctggctaatttttatattcttaatagaaacagggtttcactattttggccaggctggtctcgaactcctgacctcagat

SEQ ID NO: 80613 - DNA, 120 bp, synthetic construct
  source 1..120: mol_type = other DNA
tccactcagtgcaacctctgcctcccaggttcaagcgattctcctgcctcagcctgctgagtacctgggcttacaggttagcacaccacacccggccaagttttgggtttttagtagaga

SEQ ID NO: 80614 - DNA, 120 bp, synthetic construct
  source 1..120: mol_type = other DNA
aagagcaacactccaagtgcatgtataaacataaggactcttgggacttaacctttttaaaaatctttaggcctagcacagtatttgctatttaatgtatcaaatgggtggttttgactt

SEQ ID NO: 80615 - DNA, 120 bp, synthetic construct
  source 1..120: mol_type = other DNA
aagagttaactgatccccaaaatgactcagctgtatgcaatttaatgcaatattaattcgcatgttgactctcagaattgcatacagctgagtcattttattgagtaggattgataagta

SEQ ID NO: 80616 - DNA, 120 bp, synthetic construct
  source 1..120: mol_type = other DNA
gatctgtctgcctcagcctcccaaagtgctgggattacaggtgtgagccactgcacccagtccttaatgctactttataggtgaaaattgtgaaataacttaaatttcattttaattaaa

SEQ ID NO: 80617 - DNA, 120 bp, synthetic construct
  source 1..120: mol_type = other DNA
attacaggcgagagccaccgtgcccggcctgtttgagtatcttttaaaaccagtaaggacaaactagaggtgtcagctctcttcatgggctttggagaaacaagacaaaaaggaaagaga

SEQ ID NO: 80618 - DNA, 120 bp, synthetic construct
  source 1..120: mol_type = other DNA
atagtataaaattcagtagaaaatcagtttttcagaggtacaaaattggctgactttgcacagactcctttcatttcacaggtagggatgcacagccacctcttccaccgacgagaggaa

SEQ ID NO: 80619 - DNA, 120 bp, synthetic construct
  source 1..120: mol_type = other DNA
aagtgctgggattaccggtgtgagccatcgcacctggccttcctactttattaagatacctaagggatttctgtgattgttaggattcaaatttctgtgagcataagaatcaagctgtgt

SEQ ID NO: 80620 - DNA, 120 bp, synthetic construct
  source 1..120: mol_type = other DNA
gagccgggtgtggtggcaggcacctgtagtcccagctactcaatttagaaagcagatttgtttcctttctatacctgtgtaatttgaggtttagtttactgtcacatcgtttataaacat

SEQ ID NO: 80621 - DNA, 120 bp, synthetic construct
  source 1..120: mol_type = other DNA
gatttggcaacattcttgaactgtaattctgtttcgttaaacatcactatttacatgtgcaacagcgtgtctgtaacaatgtcccagtaatgaaattctttcttctatttaaggcatgtc

SEQ ID NO: 80622 - DNA, 120 bp, synthetic construct
  source 1..120: mol_type = other DNA
cggcctctcaaagtgctgggattacaggtgtgagccactgcgcccagcagattcaagctttttaaatggaattttgagctgatttagttgagacttacgtgcttagttgataaattttaa

SEQ ID NO: 80623 - DNA, 120 bp, synthetic construct
  source 1..120: mol_type = other DNA
tgaaaaagggtttgattgccaaggaagattcacagggcctagaatggcagtggttatgcatctacagtttattacaggagaaggatacaatccagtagcaggattatggtaaggatatgc

SEQ ID NO: 80624 - DNA, 120 bp, synthetic construct; identical to SEQ ID NO: 20520
  source 1..120: mol_type = other DNA

SEQ ID NO: 80625 - DNA, 120 bp, synthetic construct
  source 1..120: mol_type = other DNA
ccgcagtgtttgtgtccctgggtacttgagattagggagtggtgatgactcttaatgagcgtgctgccttcaagcatctgtttaacaaagcacatcttgcaccacccttaatccgttcaa

SEQ ID NO: 80626 - DNA, 120 bp, synthetic construct
  source 1..120: mol_type = other DNA
gcggggggctaacccccccacctcccttccggacggggtggctgccgggcgcagacgctcctcacttcccagacggagtggctgccgggcggaggggctcctcacttctcagacggtgtg

SEQ ID NO: 80627 - DNA, 120 bp, synthetic construct; identical to SEQ ID NO: 20521
  source 1..120: mol_type = other DNA

SEQ ID NO: 80628 - DNA, 120 bp, synthetic construct
  source 1..120: mol_type = other DNA
tctgcctcccaaagtgctgggattacaggtgtgagccactgcgcccagccttggtatagtctttaacgaaagttcactgatcttgaaaattttgatcttgaaactctttttttttttttt

SEQ ID NO: 80629 - DNA, 120 bp, synthetic construct
  source 1..120: mol_type = other DNA
catgtgctaccacacctggctaattttgtatttttagtagagacagggtttcattatgttggccaggctgggaatttgtaactttcatcagatatcccaagggatatatgtctttcctgg

SEQ ID NO: 80630 - DNA, 120 bp, synthetic construct
  source 1..120: mol_type = other DNA
gagacagtagagggcagcagccgtttagaaagtagattcacattgagtgattacggctcttttaaatctttctccactaagagatagctaatttccgaaaaggtatacttggcctcccat

SEQ ID NO: 80631 - DNA, 120 bp, synthetic construct
  source 1..120: mol_type = other DNA
ccttttctgtgagcttctctgctcttctcatgcagagtagaagtgtttatctccattgcccttgaccctaaataacagtacattagtataataatcacattttttacctgtttgtgtgct

SEQ ID NO: 80632 - DNA, 120 bp, synthetic construct
  source 1..120: mol_type = other DNA
actgcactccagcctgggcgacagagcgagagtccgtctcaaaaaaaaaaaaaaagaaaaaaagaaggccactccacaagcaaaccgcagatgttttgcaaggtgacttatttattgtaa

SEQ ID NO: 80633 - DNA, 120 bp, synthetic construct
  source 1..120: mol_type = other DNA
cctgtgtcagcctcccaaagtgctgtgggtacaggcgtgagcctccatgccggccggctttttggcaatttaaatagttacagttacctattataattgatatttagctaacatctattt

SEQ ID NO: 80634 - DNA, 120 bp, synthetic construct
  source 1..120: mol_type = other DNA
tggcctcccaaagtgctgggattacggtgtgagccactgctcctgaccccatattttttcttttaattataaaggtaataatgtaaaaagaagtcaactcccagtttaactctagcagag

SEQ ID NO: 80635 - DNA, 120 bp, synthetic construct
  source 1..120: mol_type = other DNA
tgatatcttttcccctgggtagatacccagtagtgggattgctggatcaactggtagttctacttttaaggaatctccacactgttttccttagtggttatactggtttacattcccacc

SEQ ID NO: 80636 - DNA, 120 bp, synthetic construct
  source 1..120: mol_type = other DNA
tgggctcatgtgcttgaggagccagaggacatgttgagggtgacataggttctgaagttcgtacagatacttatgcagtatggattcttggaaaaccttctttagtcatgtgatagaaaa

SEQ ID NO: 80637 - DNA, 120 bp, synthetic construct
  source 1..120: mol_type = other DNA
tcatagtagcttttcaccgttttttcagtagctgctaaaatttctggagaagtttgggaactattgttttggagtgaaatgcagtgtgttagatatcacttgcagaattcttctaagggt

SEQ ID NO: 80638 - DNA, 120 bp, synthetic construct
  source 1..120: mol_type = other DNA
aatgtcatgtttctgcatctatattacttgttgggtttacagacgaggtagtgtattattagtgggaagctttgagtgctacatcatctccctttctataaaataaattgagtacgaaac

SEQ ID NO: 80639 - DNA, 120 bp, synthetic construct
  source 1..120: mol_type = other DNA
agaagccaccatgccgggccacttctgtttcttttccatgtagagttctttgcaggaggaggttagaataggtgtgcatctcctaaatagttgtcgaatataactaaaaagttaaccagg

SEQ ID NO: 80640 - DNA, 120 bp, synthetic construct
  source 1..120: mol_type = other DNA
aggctggtctcaaactcccagtctcaggtgatcagcccacctcggcctcccaaagtgctgggattacaggagtaatcccccacccttttaaaaaaatgagacagagttttattctgtcac

SEQ ID NO: 80641 - DNA, 120 bp, synthetic construct
  source 1..120: mol_type = other DNA
ggtgttcaactttcagatcaatgggagacagaaatattgttctgagacatctggaagccgaatgtgttttattcctgcctgtctgaggatgtggtcttgcctttgatagggcaaagttat

SEQ ID NO: 80642 - DNA, 120 bp, synthetic construct
  source 1..120: mol_type = other DNA
ttgttgttttatttttttgagatggagtctcgctctgtcactcaggctagggtgcagtggcatgatcttggctcactgcaacccctgcctcctgggttcaagcgattctcctgcctcagc

SEQ ID NO: 80643 - DNA, 120 bp, synthetic construct
  source 1..120: mol_type = other DNA
aaaatcaggatataaataattttttaagttttttttttaggcggggcacagtggctcacacctgtaattccagcattttgggaggctgaggtgggcagatcttgtgaggtcaggagttca

SEQ ID NO: 80644 - DNA, 120 bp, synthetic construct
  source 1..120: mol_type = other DNA
taaatacatacccaagactgggtaatttataaagaaaaagaggtttaatcgactcacaattgcacatggctggggaggccttacaatcatggcagaaggtaaaggaggagcaaaggcaca

SEQ ID NO: 80645 - DNA, 120 bp, synthetic construct
  source 1..120: mol_type = other DNA
attttattataaatgctgggaagagcctggatttgaggaaggtaagcagtgcagttaggtggatgtagactagaagaggtcatttgttctcatttcattgttgcccctatgacatgcccg

SEQ ID NO: 80646 - DNA, 120 bp, synthetic construct
  source 1..120: mol_type = other DNA
ctctttcgagaggctcttcttttaagcagataagggagttcacaaaaaagcctgttctcaaatgatttcagcacacacacacacacacttacgacacagttaagtactgtgccagtaaga

SEQ ID NO: 80647 - DNA, 120 bp, synthetic construct
  source 1..120: mol_type = other DNA
ttaattcatgtgatgaagggaacagtatttacatgagtggtttggttaatttttcccctcctaagcttagctttgtgtatcgtgcgtgcttccagtgtttttgtggctgctttacataag

SEQ ID NO: 80648 - DNA, 120 bp, synthetic construct
  source 1..120: mol_type = other DNA
tatacatgtgacatgttggtgtgttgcacccattaactcgtcatttacattaggtatatctcctgatgctatccctcccccctccctccacccctcaacaggtgtgtgatgttccccttc

SEQ ID NO: 80649 - DNA, 120 bp, synthetic construct
  source 1..120: mol_type = other DNA
tgcttaacgactttccatagaaacttacaaaattggccttgtttgatgagaagagcgtgcaggaacgttgtcatggtggaaaaggactttgatgatgctttccctggcatttttctgcaa

SEQ ID NO: 80650 - DNA, 120 bp, synthetic construct
  source 1..120: mol_type = other DNA
gagggttttgaggacaggtcttgaaaatttctatggctaccttttactgggtggagactagcatgtatagttgaccgcataggttaatccctccactcaaaaagccacaattttaaagtg

SEQ ID NO: 80651 - DNA, 120 bp, synthetic construct
  source 1..120: mol_type = other DNA
tttttttattttttagcagagacagggtttttgctatgtttcccaggctggctttgaactcctgggctcaagcaatcctcctgccttggcttcccaaagttgtaggattacaagtgtgag

SEQ ID NO: 80652 - DNA, 120 bp, synthetic construct
  source 1..120: mol_type = other DNA
caggtgatccacctgcctcagcctcccaaagtgctgggattacaggcatgagccaacactcctggctaatttaattcgatttttttagtagcagttttagtctattatgtttgttgtagt

SEQ ID NO: 80653 - DNA, 120 bp, synthetic construct
  source 1..120: mol_type = other DNA
gcctctcgagtagctgggattacaggtgcccaccatcacacctggctaatttttggtatttttagtagacggggtttcaccatgctggccaggctggtcttgaactcctgacctcaggtg

SEQ ID NO: 80654 - DNA, 120 bp, synthetic construct
  source 1..120: mol_type = other DNA
attcagctctgtattgttttgcttctgttgcattgtttcctcagattgaatttctaggagtagaattgctatgtcaaagagaataacaagtatctctgagccttgccgcatactgctttt

SEQ ID NO: 80655 - DNA, 120 bp, synthetic construct
  source 1..120: mol_type = other DNA
gttcgcgccattctcctgcctcagcctcccaactagctgggactacaggtgccccccaccactcctggctaatttttttttttttttttttttttttttttttgtatttttagtagagac

SEQ ID NO: 80656 - DNA, 120 bp, synthetic construct
  source 1..120: mol_type = other DNA
tcttagagctttttgagatttctaaggtagatccttggtttgggcaacatataactattacaagttttgcacattgaacgttatttggtaatttttagagaggacattttaaatgtttag

SEQ ID NO: 80657 - DNA, 120 bp, synthetic construct
  source 1..120: mol_type = other DNA
tgtagagagtccaaacatggagtagatccctaattaagagcctttgcattaaagtccaccttcctcatttcatagctaaggatattgaggctcagagagtttatgtgtctggagttaaag

SEQ ID NO: 80658 - DNA, 120 bp, synthetic construct
  source 1..120: mol_type = other DNA
aagcaacataaatagcactcaaattgagacagaaactgtaactgtagtataagaagcattaggctgggaattgggaaacacgagttctagttgcagcttggaaactttttctgaagctct

SEQ ID NO: 80659 - DNA, 120 bp, synthetic construct
  source 1..120: mol_type = other DNA
gacacatgcgcaaggtggttagggtacagcttggttttatacattttagggagacatgagacatcagtcaacatgtgtaagatgtacattgattctatccagaaaggcaggacaacttga

SEQ ID NO: 80660 - DNA, 120 bp, synthetic construct
  source 1..120: mol_type = other DNA
gaatactttttcttttcttcttgattatcaaggcttggaccctggcaaacagattaaactggattccagtgcacagtttggatattactttcgtgtaacctgtaaggaagaaaaagtcct

SEQ ID NO: 80661 - DNA, 120 bp, synthetic construct
  source 1..120: mol_type = other DNA
ctcaagtgatccacctgcctcagcttcccaaagtgctgagattacaggtgtgagccaccgtgcctgacccacatgtttattttttctaagaaaactttactatcatttatcaagttaaga

SEQ ID NO: 80662 - DNA, 120 bp, synthetic construct
  source 1..120: mol_type = other DNA
acatgatgccaaaagtgaaaaagtcactcactagattatgacctgcagaatctggtccttgcctgcctctgcttttatattttgcagcttgtcccttcacacagtggtctcacttttata

SEQ ID NO: 80663 - DNA, 120 bp, synthetic construct
  source 1..120: mol_type = other DNA
atctctactaaaaaatacaaaaattagccgggtgtggtggtacatgcctgtaatcgtagctattgtggaggccgaggcatgagaatcgcttgagcccgggaagcagaggttgcagtgagt

SEQ ID NO: 80664 - DNA, 120 bp, synthetic construct
  source 1..120: mol_type = other DNA
tgttttaaaaggggtaatagcttcagtcttttttttctttctctgagacggagttttagttttgttgcccaggctggaatgcaatggtgtgttcttggctcaccacaacctccatttcct

SEQ ID NO: 80665 - DNA, 120 bp, synthetic construct
  source 1..120: mol_type = other DNA
agaaaagcacaaaacttactatagttgtaacagggaaaggaaacactagggcctacaacgtactaatgtcttgggtcatctatgggctcatgaggctctaggttatggaagtaaatacca

SEQ ID NO: 80666 - DNA, 120 bp, synthetic construct
  source 1..120: mol_type = other DNA
acatttttgcttgttggtgtcagataactgtgacgtaataatcttttgctgaattatgtttcttaggctagatttcattttaaagaaccctgtaaataccatttatttgaactgtggatc

SEQ ID NO: 80667 - DNA, 120 bp, synthetic construct
  source 1..120: mol_type = other DNA
tgtttaattcttaaaggcttctattgctatataatagggtagtctgaattcttcaaaagtgtactgaggccaggtgcagtagctcacacctataatcccagcattttgggaggccgaggc

SEQ ID NO: 80668 - DNA, 120 bp, synthetic construct
  source 1..120: mol_type = other DNA
ttatgctgacatcctctgcatgtgatactgatgaggaaagaaagccaaactgtcttacggtcagttcgtacaatataccaggccttgatggtcacatttcaacttgctacctttttgctt

SEQ ID NO: 80669 - DNA, 120 bp, synthetic construct
  source 1..120: mol_type = other DNA
caggcatgcttgtgttgaagttcaagatgaaattgcatttattcctaatgacgtatactttgaaaaagataaacagatgttccacatcattactggtaaaaaacctggtttttgggcttt

SEQ ID NO: 80670 - DNA, 120 bp, synthetic construct
  source 1..120: mol_type = other DNA
gggcagtaactctgtccacatctttgggcaggctgtggttctgcctttatatgctatgtcagtgtaaacctacgcgattaatcatcagtgtacagtttaggactaacaatccatttatta

SEQ ID NO: 80671 - DNA, 120 bp, synthetic construct
  source 1..120: mol_type = other DNA
ttctatttcttggtatctttttctttctttttttaaaagttttttagagagacagggtctcactcttttgcccagactggtctcgaactcctgggctcaggtgatcttcctgccttggct

SEQ ID NO: 80672 - DNA, 120 bp, synthetic construct
  source 1..120: mol_type = other DNA
atcctcccacctccgccttccaaagtgctgggattacagacgtgagccatcatgcctggcccttgcccatttttctattgaagttttagtgctttttattgactttgtttatatattaag

SEQ ID NO: 80673 - DNA, 120 bp, synthetic construct
  source 1..120: mol_type = other DNA
aggtgtgagccaccacgcccggccagaattatctgtactcttgaacatcaccatggaggcattttctgctacctcccatggcagtatgttttcttgttgaattaggataacaaacaatat

SEQ ID NO: 80674 - DNA, 120 bp, synthetic construct
  source 1..120: mol_type = other DNA
atttcctgcaaataatcaatatttaattaaagctactccaaattagtgacactttacgtgtctgtctttctccctccccttctcccttctcccttcccccttctcccattctcccattct

SEQ ID NO: 80675 - DNA, 120 bp, synthetic construct
  source 1..120: mol_type = other DNA
cgcaaggatatgatatcatggaaccagcagcaaagaagtgctatctggaaagagaggtttgtcagtttgttttcatagtttaacttagcttctctattattacataaacaggacactaag

SEQ ID NO: 80676 - DNA, 120 bp, synthetic construct
  source 1..120: mol_type = other DNA
ctgccttggcctcccaaagtgccgggattacaggagtgggccactgtgcccggcccttttttttttttttttttttaaattagaggattactagttctcttcaattataaaaataaaaga

SEQ ID NO: 80677 - DNA, 120 bp, synthetic construct
  source 1..120: mol_type = other DNA
tgggacattcacatgtgtttcagcaaggtgaaaaaattattcaggagttcctgtccaaggtgaaacaaatgccctttactgaaatgtcagaagaaaacatcacaataaagttaaaacagc

SEQ ID NO: 80678 - DNA, 120 bp, synthetic construct
  source 1..120: mol_type = other DNA
tcatatataaaaacctccactttgggaggcgaagcaggcaatcacttgaactcaggagatcaagaccagcctggacaacatgacgaaaccccatctctacaaaaataaatgcaaaaatta

SEQ ID NO: 80679 - DNA, 120 bp, synthetic construct
  source 1..120: mol_type = other DNA
gtgcgaatgtaaaatggtgcagctgctttggaaaacagtctggcagttcctcagacaattccactccaacgtatatccaagtggaatcacaacatatgtccccacaaacttgtacataaa

SEQ ID NO: 80680 - DNA, 120 bp, synthetic construct
  source 1..120: mol_type = other DNA
attctgctcttaagtgcatactctggagatgcttttgcccattgtgctgcgagatgtatacaagaatgttcctaatacctccacactggaaacaactcatcagtgaaaatgaactacagc

SEQ ID NO: 80681 - DNA, 120 bp, synthetic construct
  source 1..120: mol_type = other DNA
atctgtgcttattacatgaatatgctaatgtaaaaccaggccttcagttagtgtttccttccttttagaatggtgtatgtaaagcaaaatataaactaatttctgacctgtcaaaggttt

SEQ ID NO: 80682 - DNA, 120 bp, synthetic construct
  source 1..120: mol_type = other DNA
aatgttacatgtatttttacactgaaactggaagtggaagcccagtgtgatagttttctgcccgatgttggcctgtcttcacacccacaccacttatcttgattgatagagctactactt

SEQ ID NO: 80683 - DNA, 120 bp, synthetic construct
  source 1..120: mol_type = other DNA
ttgctaaacatcaggctcagccaaagcaatcacgaaaatgactccacgttgaatctttaacatcacaatgtggattaacaatttggcaacatttggctgggcgcggtagctcacctataa

SEQ ID NO: 80684 - DNA, 120 bp, synthetic construct
  source 1..120: mol_type = other DNA
tgtgtttaaatgaaaagagagatgatgagccagaagtgtggcaaatgagttaaaataaattgtcagcagtgtttgaagcaggttgctgagggctggtgtcctgaaatccggtcacttgga

SEQ ID NO: 80685 - DNA, 120 bp, synthetic construct
  source 1..120: mol_type = other DNA
agcagcccaagtatgctaagtcttagaaatattcatcagtgatgtttttccctgaagctcgtttggtgactgctaaactagaaccagaattggagaaaaacgaccctgtgaattccaagc

SEQ ID NO: 80686 - DNA, 120 bp, synthetic construct
  source 1..120: mol_type = other DNA
tcaagcaattctgctgcctcagcctcccaagtagctggcattgcaggcacccgccaccacgcctagctagtttttttgtgttttttgttttttttttttttttttttttttgagacggag

SEQ ID NO: 80687 - DNA, 120 bp, synthetic construct
  source 1..120: mol_type = other DNA
ggtaagtgatagaggattgtgaaagtggctacctctgggacagtgaacagggcagcattgagaagggagctgccatttttcatcataagcctcatgatgatcctatttgattttttttaa

SEQ ID NO: 80688 - DNA, 120 bp, synthetic construct
  source 1..120: mol_type = other DNA
ttcaaccaatgcatccacattttaggcagcaagaacgatgagagtgcaaagatgcttatcccacctttaaagaaacaaaagtacacagcttccacttgcatcttccatgggagaactgag

SEQ ID NO: 80689 - DNA, 120 bp, synthetic construct
  source 1..120: mol_type = other DNA
gtaccttgtttatagactttcagaagaccgtaatacttactaagagaatccttttctcctctactcccaccagtttctcccttggcatgagaaccgacaaaccagaacataaatgagctg

SEQ ID NO: 80690 - DNA, 120 bp, synthetic construct
  source 1..120: mol_type = other DNA
agtgatacaggcagcccgagggctgagttctgtgacagcaccctcaccacttcaaatatgctgacatcggttcttcaggcctgggccactcactgagcaatttgatcttccatttatgcc

SEQ ID NO: 80691 - DNA, 120 bp, synthetic construct
  source 1..120: mol_type = other DNA
agttcctttttggcttaagctgctctcttattctcctacaccaactgggtatccaacaatgcaacccaatcctgacaataactatccggacggcataggttaagggcttggtcccacaag

SEQ ID NO: 80692 - DNA, 120 bp, synthetic construct
  source 1..120: mol_type = other DNA
ggaaattctcagggttttaggagctctgtgctaggaaatggagacaaacaccaaacaaattttatataccagaaatgctataagtgcagtttctgttgcctgtgaccaaagggtccctgg

SEQ ID NO: 80693 - DNA, 120 bp, synthetic construct
  source 1..120: mol_type = other DNA
ccatgcccggctaattttttttttttttggggggacagagtcttgctctgtagcctcggctagagtgcagtggtgcgatcttggctcactgcaacttctgcctcccgggttcaaataatt

SEQ ID NO: 80694 - DNA, 120 bp, synthetic construct
  source 1..120: mol_type = other DNA
ttgtgtagtctgccttactatccataacaagtgtcatgaataattttttctttaacaatacccccctccaggctgggcacggtggctcacacctgtaatcccagaactttgggagactga

SEQ ID NO: 80695 - DNA, 120 bp, synthetic construct
  source 1..120: mol_type = other DNA
tgctcagaggggtgccttgttctacttcatgctaaggcactgcaggagctctcaatggtcctgggaaaaagaggatctccttgtactaaggtatgaagagctaagttcctttgctcatca

SEQ ID NO: 80696 - DNA, 120 bp, synthetic construct
  source 1..120: mol_type = other DNA
tcagaagggaactaaaatctattgcacacttggtttgtggtctacactctgcatggatgatctaatttcatctgtacacaaccggtaatgctcacagacaagaacaaggaggctcagaaa

SEQ ID NO: 80697 - DNA, 120 bp, synthetic construct
  source 1..120: mol_type = other DNA
aagtgatcctcctaccttgacctcccaaagtgcagggagtacaggtgtgagccactgtgccctgcctacacagagatttagaaagctaaaaggactcacccaaactcacacacttgagaa

SEQ ID NO: 80698 - DNA, 120 bp, synthetic construct
  source 1..120: mol_type = other DNA
aaaatataaatacatggatgaattactgaatggatggataggtgagtgaatggatggatgagtggatggatgggtggatgagtggatggatggataaatggatggatgggtggatggatg

SEQ ID NO: 80699 - DNA, 120 bp, synthetic construct
  source 1..120: mol_type = other DNA
tcaagctgacatcactatcagagaagacaggtctggggaatgagagggcccaggagttcaggagcccaaactgtcattcagttttggaagccgaatccccagcacaattgtccaccttgc

SEQ ID NO: 80700 - DNA, 120 bp, synthetic construct
  source 1..120: mol_type = other DNA
ggatccttgagcaagagggctggaaagaaagacaggcccactttttgggacactattagggtctgtagcattggtggggagagaattcccccaacccccaaaagagctgaaaatgagaca

SEQ ID NO: 80701 - DNA, 120 bp, synthetic construct
  source 1..120: mol_type = other DNA
aagcagaatagcttttctgagttctgtgagtctttctagtgaatcattgaatccaaggtggtcttggggacctctaacaaaagatgtctggacctgaacttcctgttgtttcaaagatcc

SEQ ID NO: 80702 - DNA, 120 bp, synthetic construct
  source 1..120: mol_type = other DNA
tggtcgaaaaagtcaagcagtcttcactttttgctgtggtcccagcaaatctgcttccaatccaggcttctcccatataaaaagcctcctttgtgtacagtgagtgaactagaacaggga

SEQ ID NO: 80703 - DNA, 120 bp, synthetic construct
  source 1..120: mol_type = other DNA
agaacaagactctatctcaaaaaaaaaataaataaataaaataaaagggataccgggtcttgctctgtgtcctaggctggagtaccatggtgtgatcatggctcactgcagcctccacct

SEQ ID NO: 80704 - DNA, 120 bp, synthetic construct
  source 1..120: mol_type = other DNA
tgtgaatatgttattgtaacctctctcctggaggtgtctgcattccaagactgaacttttctgtgaaagttactgtcactgtgaaaggcagttcagcccccagggattgaaaaaggaaat

SEQ ID NO: 80705 - DNA, 120 bp, synthetic construct
  source 1..120: mol_type = other DNA
ggaggtgaaatggggtaggtctttgaaaaccaacagattgcaaattctctgtcccatagcaggaaaccacagtctctgatgtcagctggctgccaacacgtcagttgtatcagcattagc

SEQ ID NO: 80706 - DNA, 120 bp, synthetic construct
  source 1..120: mol_type = other DNA
aaactacccttcaatgggttttctgttcattacagttgaatgctttcataactgatacaggagggaccctgtgattggcagttccactagactgcatggagatgggtggagttatctaaa

SEQ ID NO: 80707 - DNA, 120 bp, synthetic construct
  source 1..120: mol_type = other DNA
aagcaaatcttccattttttgttcccctgctgccagagcatggcagagtaaatgtgtgagttgaagggagcaacctcatgaggttttgctttgtgtcttaattacagccatttgtggaat

SEQ ID NO: 80708 - DNA, 120 bp, synthetic construct
  source 1..120: mol_type = other DNA
gagaaaaaagaattgaacaaactgtctaagctgggtcaggtactctgcagatgtttgctgagtatcgttcttgatggaaatccccgtggaactcctacattttctcctctcttctccttc

SEQ ID NO: 80709 - DNA, 120 bp, synthetic construct
  source 1..120: mol_type = other DNA
acttttaccaacggaagccagtattattttgaacctctgttagagtggcttgaatctgtatcctaacttgtatccctaatgtgtgacccatgaaaattagccaggcagcaccagttccaa

SEQ ID NO: 80710 - DNA, 120 bp, synthetic construct
  source 1..120: mol_type = other DNA
gctttcctcctccactcctgcattctgagtcattttcggcagcacacgcatccttaaaacccctccactggcttgccagtgtcctcaggattaggcgaaaagtctttgctttgttttaca

SEQ ID NO: 80711 - DNA, 120 bp, synthetic construct
  source 1..120: mol_type = other DNA
gttcctttttaaaatctgcttgttagatacactcatagaaaggtaactggccacagaagggagaggaatggcagtccatccagggatcactggagtgtcatatgaaatgttataggaatc

SEQ ID NO: 80712 - DNA, 120 bp, synthetic construct
  source 1..120: mol_type = other DNA
tgatggtcaattacttctcatttctagggaaaattgaaggaaaagaaggagggggatgtggaggggagagaaggcctcagtagagtttgcactattattagggcaagtaagctgcttctg

SEQ ID NO: 80713 - DNA, 120 bp, synthetic construct
  source 1..120: mol_type = other DNA
ctctgacagacagaaagcaaacagctcagaggggtggcaggctgcattttattcatcgttaatttaaacacccttcaagtcctctcttggaatgctgctcagaaaaatagatgtattgtt

SEQ ID NO: 80714 - DNA, 120 bp, synthetic construct
  source 1..120: mol_type = other DNA
cttggggaaaagggttagtagctctttgtaaggctggtgtgtatgtgtgtgtgtatatatatatacatatatgcatgatgctgtgcaaatgcccagggctgtctggcattttccacaaaa

SEQ ID NO: 80715 - DNA, 120 bp, synthetic construct
  source 1..120: mol_type = other DNA
aaagcataggaaaacaagtaaaaacagctgaggctgcagcataagcaacttaggatagagtctaggaagcaccgccaacagagaagactgccaagaaacattttgagtttttcttctctg

SEQ ID NO: 80716 - DNA, 120 bp, synthetic construct
  source 1..120: mol_type = other DNA
ctaagacttcctatcagaagctgtgcatactggtgggtcacgccgtgcctgtataaactctggcacctgtccttgccctcatcatatatgagaaaaatgggcagagagagtgttcgttta

SEQ ID NO: 80717 - DNA, 120 bp, synthetic construct
  source 1..120: mol_type = other DNA
actgcaatttccaaatctgggggaaatgccacagtccgcaagttggtgctatgtttcatctcattgcataatactacaccattctctgtgtgtagtggctgttctatatatatacatcgg

SEQ ID NO: 80718 - DNA, 120 bp, synthetic construct
  source 1..120: mol_type = other DNA
cagctcagcttgcgcagcatccagttgagcacctgcttgatgaggatggagatgacgttgaagagcgagtaaatgcagcacacgccgagcaggatgaagaggaagttgcccaggcggtag

SEQ ID NO: 80719 - DNA, 120 bp, synthetic construct
  source 1..120: mol_type = other DNA
aaccactgctgcacaggtgcaaaccactgagctacccacaaagccaacaagggacacctgctctcccactcctccaaatttttttttaaaaactgtcatctttattttagttcataaata

SEQ ID NO: 80720 - DNA, 120 bp, synthetic construct
  source 1..120: mol_type = other DNA
cctcttctttcctcaagttatttggaattgtgagtgaatccgagccgaacaactgttgactacgagtttttctccaaaagcctggtttttaaatgtaacctgtagtacacctgggcagac

SEQ ID NO: 80721 - DNA, 120 bp, synthetic construct
  source 1..120: mol_type = other DNA
taatactttcagagtacattccttaagcctatgtgctaacaatcattttctagactgtctgaaggaaatgcccagttgcccgagtgtggtgttgatcttacgcttaatgactcaggtgag

SEQ ID NO: 80722 - DNA, 120 bp, synthetic construct
  source 1..120: mol_type = other DNA
tcagctaaagcctcaaagctgagaacagtatgtgtacatttctccccattctaaagagaagttccagacacatccatgctggacttaataaaacagcaaaacaggtctggggctagcaac

SEQ ID NO: 80723 - DNA, 120 bp, synthetic construct
  source 1..120: mol_type = other DNA
ccctgagccatgtgtcagcccagagctagagggggaggctaaataagctctgattagaagtgaatttgaagatttgattaaacaactgagaacgagtctcaatcttaaaactggtactta

SEQ ID NO: 80724 - DNA, 120 bp, synthetic construct
  source 1..120: mol_type = other DNA
gttaaggaatctaaaagggagttcttaaagacaatagatgagacaaagccatttccagtgtcggcccatttaataaactggttccacctggattttctcttcattgtggtgaaagccacc

SEQ ID NO: 80725 - DNA, 120 bp, synthetic construct
  source 1..120: mol_type = other DNA
atgaagctggtaagaccaacatccacctattcattccttcagcaaacatttactgtggacagcatcaggttggcagtatcatgcaaggctcagaaatatggtggaaaaccagacagatgc

SEQ ID NO: 80726 - DNA, 120 bp, synthetic construct
  source 1..120: mol_type = other DNA
ctgtccctgggttcgcaccaagcctgctattttgtttatgccacaattgatctgccatcccagtttgcaaagagcagacacttgggggctttattatgccactttgacaaaagctgtgaa

SEQ ID NO: 80727 - DNA, 120 bp, synthetic construct
  source 1..120: mol_type = other DNA
cagggatggaaaaagactcagaaatactgggcatggcccatggctcattagggttgccaggtaaaatacagaacacccagttaaatatgacttgggtaaacaagaaatcattttttaagt

SEQ ID NO: 80728 - DNA, 120 bp, synthetic construct
  source 1..120: mol_type = other DNA
caccgtgccaagtgctgcacgcgtatcaattcatttaatcctcacaacaactgcatgaggctccatgttttcactgattccaagtcacagcttttttcctctcatgttaacatctctaaa

SEQ ID NO: 80729 - DNA, 120 bp, synthetic construct
  source 1..120: mol_type = other DNA
aaacgtccagtgactctggctgatggagcaggggaatctgtggaagaaggcaagggacaatgctggtgaggcaggagaagagggaattggggtaaccaaaggttaaggcgtaaaaacagt

SEQ ID NO: 80730 - DNA, 120 bp, synthetic construct
  source 1..120: mol_type = other DNA
agagtagctgggactacaggcacccaccaccacacctggcaaccgttcttttgttgctttgtctttcattgctttattcttttgttgctttgtaagggtttttctattctttgtttaacg

SEQ ID NO: 80731 - DNA, 120 bp, synthetic construct; identical to SEQ ID NO: 20522
  source 1..120: mol_type = other DNA

SEQ ID NO: 80732 - DNA, 120 bp, synthetic construct; identical to SEQ ID NO: 20523
  source 1..120: mol_type = other DNA

SEQ ID NO: 80733 - DNA, 120 bp, synthetic construct; identical to SEQ ID NO: 20524
  source 1..120: mol_type = other DNA

SEQ ID NO: 80734 - DNA, 120 bp, synthetic construct
  source 1..120: mol_type = other DNA
tgctaaattcccaacagaactgacagtttgtccagtgatcaccagcagacactgtaccagaaacattgtctccatcttagtttcagttaactcaacatgtttttgagacctgctgtgtgc

SEQ ID NO: 80735 - DNA, 120 bp, synthetic construct
  source 1..120: mol_type = other DNA
ttccgtacatggagcacactgctcagttgtgaaaatgggtgattttctttcttttttttttttgagatggcatcttgctctgtcgcccaggctggagtgcactggcgcgatctcagctct

SEQ ID NO: 80736 - DNA, 120 bp, synthetic construct
  source 1..120: mol_type = other DNA
gcccttgggattcaacagtgatctaaaagacaaagtcccctaccctcaagaagcttacatttcagtatgggagatggaataataaactacaaacaattacgtggcctgtgagaaagtggc

SEQ ID NO: 80737 - DNA, 120 bp, synthetic construct
  source 1..120: mol_type = other DNA
cattgctcccattttgtagacagggaaactgaatccaggataaataatgtagcttgcatgacaccaatcttcctcaagtctgagccagaatttatatctcccatttctcaacctcatctc

SEQ ID NO: 80738 - DNA, 120 bp, synthetic construct
  source 1..120: mol_type = other DNA
aaacactaaatatgcttcttcagctccttatcaaggttaggcctccacaaagggtggagcagggaagagaaggcctcaccgggcagacctatcttggagaagatacaagcaatggtgctg

SEQ ID NO: 80739 - DNA, 120 bp, synthetic construct
  source 1..120: mol_type = other DNA
agaccctgtctctacataaatcagtaagatccatctgtgcaattccttcctcctagaattcagaatctgaggtgctggtttcctgaggacacttgtgacttgctgccttttattgaactc

SEQ ID NO: 80740 - DNA, 120 bp, synthetic construct
  source 1..120: mol_type = other DNA
ggatgcaaagcttggtttctgagccctgatcaggaggctgtgtttatatttatcctgctaactgcaggggactgtttattcccagagaaataacctcctgggcaggataggggcagccaa

SEQ ID NO: 80741 - DNA, 120 bp, synthetic construct
  source 1..120: mol_type = other DNA
gccaacaaatacttgggtcaattcacacattggcttgagaatgagttctttttctttttctttatttatttagagatggggtctcactgtgttgccaagcctggagtgcagtggctactc

SEQ ID NO: 80742 - DNA, 120 bp, synthetic construct
  source 1..120: mol_type = other DNA
ctataattctggagatctgtaaaaggatgtttaacatgtttaaagtctttgtttcccatccttctgccaaggattgagacatcgcccacccagcttcaatcctcatagctacttctgcca

SEQ ID NO: 80743 - DNA, 120 bp, synthetic construct
  source 1..120: mol_type = other DNA
cctgtgggggatgcagttgcacttataacaaaccatggcacatcctttctgaggaatactatgcatccaacaagagggatgcttagaaagttgattctgacatcacataccaatacacaa

SEQ ID NO: 80744 - DNA, 120 bp, synthetic construct
  source 1..120: mol_type = other DNA
ctctttttgcctcaatttcctcatctgtaaatgagatgtgagctgtgctcacctccacaggatgctgatgaggattaaatgagaagaagtgtgtaaaatgctcagcatagtgctaatagc

SEQ ID NO: 80745 - DNA, 120 bp, synthetic construct
  source 1..120: mol_type = other DNA
ctactctccctcttaagatcctatttaaatgatggtaaaaggacataaaggtgtaaactagcaataacacagggaatgggcagagggtttacagtggaagggcccgagaagtttcaacat

SEQ ID NO: 80746 - DNA, 120 bp, synthetic construct
  source 1..120: mol_type = other DNA
tcgaactcctaccacatataagtggttctcactcctggctacatattagagttgatatggtttggatttgtgtccctgcccaaatctcatgttgaattataatccccaatgttggaggag

SEQ ID NO: 80747 - DNA, 120 bp, synthetic construct
  source 1..120: mol_type = other DNA
gagggcgtagctgaatccagacttccctcccaccataatcaaccaggaaaccggaaaaagtctatgagataattattttcagacattggaaaaaaggtagttcaggattatggtccctga

SEQ ID NO: 80748 - DNA, 120 bp, synthetic construct
  source 1..120: mol_type = other DNA
aatgatgagaaaaatgggaaaaatttttttaaaaccaagtagaatatctcgagatgaaaaatatagggggctgggtgcggtggctcacgcctgtaatcccagcactttgggaggccaaga

SEQ ID NO: 80749 - DNA, 120 bp, synthetic construct
  source 1..120: mol_type = other DNA
gtgttgggattacaggtgtgagccaccacacctggccacagacgtcttatcagaaactatgcaagccagaaaacaatctttaaggtgctaaaagaaacaggaaaacaaaacaatgaaaaa

SEQ ID NO: 80750 - DNA, 120 bp, synthetic construct
  source 1..120: mol_type = other DNA
ctagaatgttagctccataagctagggactttgtctacttgttcactgctgtatccctggggattttcagttgctggcacatagtggagcgctcaagaaatatttgttgaataaatggat

SEQ ID NO: 80751 - DNA, 120 bp, synthetic construct
  source 1..120: mol_type = other DNA
tgagacatgcccacaaatctccagatgcattgttagaaaccctggggccctgtagagcctggcggctcatgcctgtaatcccaacactttgggaggctaaagtggacagattacttgagt

SEQ ID NO: 80752 - DNA, 120 bp, synthetic construct
  source 1..120: mol_type = other DNA
caggcagaagtacagtggtaagctcttgataaagtgaggggacagttgataatggcctgatttaatgtttgaggtgaacagccaaaacaagggacttcacaattatctggttgtttgaag

SEQ ID NO: 80753 - DNA, 120 bp, synthetic construct
  source 1..120: mol_type = other DNA
ttgctcatgaacaggatgatttccaaaaacggtacatgttctaaggacaataaggcagaatagtgtgagggacagtgactaggggttagtgggggacactactgtaatcagggggaccag

SEQ ID NO: 80754 - DNA, 120 bp, synthetic construct
  source 1..120: mol_type = other DNA
aaatatgtcactttagcacaaggattgttttgagctgcaggcaatttggaagcagcagatgcaaagaaagctccttatcctcccctatctgcctaaaggcaggacataaatttccctttg

SEQ ID NO: 80755 - DNA, 120 bp, synthetic construct
  source 1..120: mol_type = other DNA
cttctcagaagctttcctgtaaaggagggcagagaaatgggaaagtagcaggagggtgatgcagggtctattaagaaggaagaatatacatgtttgcataccgatggagtataaattaac

SEQ ID NO: 80756 - DNA, 120 bp, synthetic construct
  source 1..120: mol_type = other DNA
ccaatggctattgtaagacttttaagaggtgagaactttaagaggtgattggatcatgtgggttctgttctcatgaatggattaatgtcatcatcactggagtgggttggttattgcggg

SEQ ID NO: 80757 - DNA, 120 bp, synthetic construct
  source 1..120: mol_type = other DNA
actttttataaaacaggtgcctaggtagagttgggaatcttggaaacggccattcattcaaatttacattgattctgaaaatatttctgtagcccctcccatgtgccatgccctgtgcca

SEQ ID NO: 80758 - DNA, 120 bp, synthetic construct
  source 1..120: mol_type = other DNA
ggtggcttttcctggtttgtggaattgcatttcattactgattaaacttccgtcaaatgtgtgaagcaacctccagtttctaaggaatgtgtcctgggcaggtgaagagaaaaggcagaa

SEQ ID NO: 80759 - DNA, 120 bp, synthetic construct
  source 1..120: mol_type = other DNA
atagaaacaaatgattggcacaggtctgagggcagtaagagggacttcacagtaggtccctctctagtggcaccatttgagctggatcttgaagactgatttcacctggtagaaaacagg

SEQ ID NO: 80760 - DNA, 120 bp, synthetic construct
  source 1..120: mol_type = other DNA
gagcctgtcatctgtgaaatgggatataattttctttgctgtcctaggatttttgggagcttactgagtaaacacagataaaaacacagtgaactggcaaacatgacatgtggcagggag

SEQ ID NO: 80761 - DNA, 120 bp, synthetic construct
  source 1..120: mol_type = other DNA
gtctttaaagtaaccccatggggtaagaaccatcatggtcttcactttagagaggaggcaactgaggcaaggagaagtatatccactcaccagaaccacacagtttgaatacttaagaat

SEQ ID NO: 80762 - DNA, 120 bp, synthetic construct
  source 1..120: mol_type = other DNA
aactgctgtgcttcctgcagtttcaagcccctccaccccctgttcctcaccaactctccccgtgtagaaactctgcagagagtatgaccgtgtctcttaaaaaaactttggtgaggatca

SEQ ID NO: 80763 - DNA, 120 bp, synthetic construct
  source 1..120: mol_type = other DNA
ggcttttgttgacaaaatggtctacatgcctggggaaagttatgaaggatctttgtggtgcttccagctagaatactctaggagtgtacctttgctccattcggcacaattctgagctgt

SEQ ID NO: 80764 - DNA, 120 bp, synthetic construct
  source 1..120: mol_type = other DNA
ccacccagagtttcaaatttaaggagatattttcttcctaaatgtccttcaaagctgtcacagcatcatctttcaataaaaaatagttgatgagactgggcatggtggctggtggctccc

SEQ ID NO: 80765 - DNA, 120 bp, synthetic construct
  source 1..120: mol_type = other DNA
ccccagtggagagtttccatttaatcttttcaaagttaactgataaacatcctttaggatgtgaagtgatgggttaattctgtttggattgtttggaatatctctgagctggaatactgt

SEQ ID NO: 80766 - DNA, 120 bp, synthetic construct
  source 1..120: mol_type = other DNA
agcagaccagtccctgccctggttacacacacatacactctctctcacactcagacagacagacattattaaatattgcaatctcaaacaagaacgttcccaccaattatatgcatgaaa

SEQ ID NO: 80767 - DNA, 120 bp, synthetic construct
  source 1..120: mol_type = other DNA
tataaccacatgcttcagtgtagccctcctacattgcttgcctacatctgaaaacacgaatcaagaaagagaatatagctcctttccacttgactaaagaacagtcaatcctgccagtag

SEQ ID NO: 80768 - DNA, 120 bp, synthetic construct
  source 1..120: mol_type = other DNA
ccagccatctgctgtggcttatcctgggcagttacagtccatgcctctgtatctgaactggcataccaaaccactccagaaggtgtgtctatgaaatccctcacttctcaagcccagcaa

SEQ ID NO: 80769 - DNA, 120 bp, synthetic construct
  source 1..120: mol_type = other DNA
tgagatcatcctggagaggaaactgaggcctgggggttgtgggtggaaaacaggaaggaaccggtagcccttggcacgtattcttagaggagaaaacggaggctcacaaaggtcagatca

SEQ ID NO: 80770 - DNA, 120 bp, synthetic construct
  source 1..120: mol_type = other DNA
tcccgggcgcctaggaccgggacgcggcagcaaggcgtggagagagcccccgggggcgtcccatgaggcgttcgggatcggcgcctcctaggtgcgggctgtgcgggcagtcctgctccc

SEQ ID NO: 80771 - DNA, 120 bp, synthetic construct
  source 1..120: mol_type = other DNA
cctctagcccggggcggggaataacaccctgggtgcggtagagagtagaggaatagaggaggtgtaggggaagctcactggcagctcccctgaggccggcgcggggaacggtgtgctatg

SEQ ID NO: 80772 - DNA, 120 bp, synthetic construct
  source 1..120: mol_type = other DNA
ttgacagaagccctgagatgtgtcattctaggagttgccctggagactccagatgtaactgaagggcattgccaggcctctcagaggctatctttgcccagacttcccaagcaaacacag

SEQ ID NO: 80773 - DNA, 120 bp, synthetic construct
  source 1..120: mol_type = other DNA
acacacacacacacacacatgcacgcacataaacacaatataggagtgttaacccagaaaattaggtaaggtcaaatggaaccagttggcaactccactcctaggtatatacccaagaag

SEQ ID NO: 80774 - DNA, 120 bp, synthetic construct
  source 1..120: mol_type = other DNA
tgggagtcaaaggttgcagtgagccgagatcgcaccactgcaccactgtactccagcctgggtgacggagaaagactctgtctcaaaaaaaaaaaaaaaaaaaaaaaaaaaaaaaaaaag

SEQ ID NO: 80775 - DNA, 120 bp, synthetic construct
  source 1..120: mol_type = other DNA
aagacatctgatttgtcttctgtgaatttaagattaaggggtcttgttgagaaaagcatggggagagtctggtcacagcccaggacctgggagaaaggccccttgaaataaaattattct

SEQ ID NO: 80776 - DNA, 120 bp, synthetic construct
  source 1..120: mol_type = other DNA
atgtaaccctatcataatttgcggagcatctgtatatgatgtccttttttggtctcttataataaattttctttttcagacagggtctcactccattgcccagacagaagtgcagtggca

SEQ ID NO: 80777 - DNA, 120 bp, synthetic construct
  source 1..120: mol_type = other DNA
aatgagagtcggatatataatatatgtggactctggcttgatgaagccaattttatggcaaactttgttttcccacaaacatggccacactgaaaggcacaagctatgtctgcaggggaa

SEQ ID NO: 80778 - DNA, 120 bp, synthetic construct
  source 1..120: mol_type = other DNA
gttgagcacctactatgtgccaagcactgttcaaggtacctgagattgttcagtgaacatggagtttatattactttcatgtcaataaatacatatgaagtatcatttgttggcatagtg

SEQ ID NO: 80779 - DNA, 120 bp, synthetic construct
  source 1..120: mol_type = other DNA
taggctgtcagaaccaagagcaaaaacaaagcaagggaggaaggcttaggagaaagatgctagagggttgccatagctagtatttcatcatttgaatgagtcaggactctatgaatattg

SEQ ID NO: 80780 - DNA, 120 bp, synthetic construct
  source 1..120: mol_type = other DNA
ccaggcactgtgctattaaggatcctaactcatttaaaattgcctatatattaatgactgggtaggagggagggtgggagtaccattaggggctgttggaatagcagataaagaaactaa

SEQ ID NO: 80781 - DNA, 120 bp, synthetic construct
  source 1..120: mol_type = other DNA
aagttacacaagtcaatgaaaaatgaccatggtgacaatggctgtgaagaaagactatgttgtttcaggagatgcatatagggatatttgacttaggcagggctgagacaggtaggcatt

SEQ ID NO: 80782 - DNA, 120 bp, synthetic construct
  source 1..120: mol_type = other DNA
gactccctctctcttgcacttgccccatctggggatacccaactgctgtttgtcatgcgcatctgtgtgaagagaccgccaaacaggctttgtgtgagcaataaagctttttaatcacct

SEQ ID NO: 80783 - DNA, 120 bp, synthetic construct
  source 1..120: mol_type = other DNA
aatggttggtgatggcctggatgcggttttgtatgaattgagaaactaaatggaacacacaaggtccaaataaaagatgaagaaaaataggtattaaagggctaagaagtgggagtaccc

SEQ ID NO: 80784 - DNA, 120 bp, synthetic construct
  source 1..120: mol_type = other DNA
gcaactgcatagagggagaggtttggttttcgtggtatatgagaaagtgcatagtgtctatgactaacctttcactgctattcatggggcttggtataagcaagcaagaggagggcctag

SEQ ID NO: 80785 - DNA, 120 bp, synthetic construct
  source 1..120: mol_type = other DNA
tttgaggtaaaaccaggagatatcagttatgatggtttggaggaaaagtgtggtatttacgattagttgagaatggtgaataggagtgtgactagacagaagatagtagggatgacaagt

SEQ ID NO: 80786 - DNA, 120 bp, synthetic construct
  source 1..120: mol_type = other DNA
atttgccagtcctgggcaggggcaaatccccaagcttgatgtgtagggaagcaggtgggggtggcggggaggggagcctgaacaatccctgaggagtagtagaatagcagatggaacact

SEQ ID NO: 80787 - DNA, 120 bp, synthetic construct
  source 1..120: mol_type = other DNA
ctgagaggtagtggaggggggcagagtggcagcttcaatgatagatggaaggtactatagcatagcctgcctttgctggttagtggcgattaggcctggtaaaactgctgtcaataaacc

SEQ ID NO: 80788 - DNA, 120 bp, synthetic construct
  source 1..120: mol_type = other DNA
gttttcatgaagaattatgccgaggtaggtaatggatggagaagaaatttgagctttggagggggatacctaatatcccttggagaataaatattaaaggagcaggagggtgtcttgttg

SEQ ID NO: 80789 - DNA, 120 bp, synthetic construct
  source 1..120: mol_type = other DNA
gaaacaggcccttgaaaagaaggtaatgtggagtgggtagcccccgtatcagttaaaaaggggatggacttaccctccactgtgagttacctgaagctcggcgtctatgatggtccaggg

SEQ ID NO: 80790 - DNA, 120 bp, synthetic construct
  source 1..120: mol_type = other DNA
ttaacagatttgtatgctgcctttttaagcccttcaactaggcaagcagtcatataatctcacctagctatacctgggggaatctgcctgatagttccattggggatcttctcggggaac

SEQ ID NO: 80791 - DNA, 120 bp, synthetic construct
  source 1..120: mol_type = other DNA
gccaagtggtattgcagaagaaaataatatgcttaggttttaggtcagacgagagttgaagaggttttaaattcttgagaacacaggctaagggagaagaaggaggaatgtagggtggaa

SEQ ID NO: 80792 - DNA, 120 bp, synthetic construct
  source 1..120: mol_type = other DNA
ggtggaattaggagcaatgtttttcaggcagggtgtggatcttacaaagtacattcttaagggcggggagaatattacaaagtaccttcttaagggtgggggaatatcacaaagtacatt

SEQ ID NO: 80793 - DNA, 120 bp, synthetic construct
  source 1..120: mol_type = other DNA
ttgtctgttgtgtacagcaaatcaatacaccaagatactgggatgcagcagagataagagatttaatcatagagttgcccagaaaagagatgagagggaacctcaaatccatctccctga

SEQ ID NO: 80794 - DNA, 120 bp, synthetic construct
  source 1..120: mol_type = other DNA
ggggatagggggaggagggaactggaaggtatgaggtttctttctggggtaatgaaaatagtctggaattagatagtggcgatggttgcccaatattgtgaatatactaaaaacaatgga

SEQ ID NO: 80795 - DNA, 120 bp, synthetic construct
  source 1..120: mol_type = other DNA
agaaaaggcatcattaggaatgtagtttgtgacaaaaatagctcttcagagcttttcacacacacacacgggttcatttattcatcatgaaaaccagtgcggggcaagggggtacctttt

SEQ ID NO: 80796 - DNA, 120 bp, synthetic construct
  source 1..120: mol_type = other DNA
tcagcctaatggctaatgtcagtatgaccataaaccacaactgacatctctgaccagaaacattccaaccctaagataaacccctccccgaccaaggacatgccagcgccaagataacct

SEQ ID NO: 80797 - DNA, 120 bp, synthetic construct
  source 1..120: mol_type = other DNA
ttaattataacaatatttctgtccagaattcttgttaaccctgtgaggatggcttcaactactcttcctttgtcaacatagcgaaggaaatgccagaacaccattggctctcccaggcag

SEQ ID NO: 80798 - DNA, 120 bp, synthetic construct
  source 1..120: mol_type = other DNA
catgttttctctttcttaccagctgtattctcctgatccaaaatcattattcatcatcaaaataaaattccagagggccagcttgttctggcatggcaaggacagtcagatgacctgagg

SEQ ID NO: 80799 - DNA, 120 bp, synthetic construct
  source 1..120: mol_type = other DNA
gtgtattagtccattctcgggttgctataaagaaatagccaagactgggtaatttataaagaaaagaggtttaagtggctcacggttccacaggctgtacagaaaacatgacgctggcat

SEQ ID NO: 80800 - DNA, 120 bp, synthetic construct
  source 1..120: mol_type = other DNA
tgagcacaaattccttttttattgtcccatttgactgaacaagatctcgtacatgccaagactgaaacctttactgtcccagggcctccagcagaatgtccctcactagtttggaattgt

SEQ ID NO: 80801 - DNA, 120 bp, synthetic construct
  source 1..120: mol_type = other DNA
gacacttgtacttcacctaccacctatccagtatatggcattgaggaagtcactttctgtctctgggtttcagtttctcaagtgacaaatgagagggacctattaaatgatgacattgac

SEQ ID NO: 80802 - DNA, 120 bp, synthetic construct
  source 1..120: mol_type = other DNA
tgtggtttgaagaacatcctgttcatgtcatggacccctgctttttgaagggccactcaattgccttattgaaagatgggtgctgtatgatccctggggctccatgccccatccctaggt

SEQ ID NO: 80803 - DNA, 120 bp, synthetic construct
  source 1..120: mol_type = other DNA
agatagtgaaaatcagaaaagactccagtgccccctcaatgtagttctcctttgtgcctgatatcccctcatcagcagttctcacctttgagttttaatggattcaaatggatatgtttc

SEQ ID NO: 80804 - DNA, 120 bp, synthetic construct
  source 1..120: mol_type = other DNA
tttctaaacagctttattgaggtacaacttacatagcatacaatttacccatttaaagtatatgatttgtccaggggcggtgactcgcgcctgtaatttcagcactttgggaggctgagg

SEQ ID NO: 80805 - DNA, 120 bp, synthetic construct
  source 1..120: mol_type = other DNA
acacttattaaataactactactattaactggggacctgctgggcaatcatttagcaagtatctctttagccctttttatgttccaggcactgttctggaagctgggggacagcagaatg

SEQ ID NO: 80806 - DNA, 120 bp, synthetic construct
  source 1..120: mol_type = other DNA
gggtttcatgttttcttattatcgaattcagagagttctttattaagagtcctctcaacaatgttttgtagtttccagcatgcatctctataggatatctgtgctcccacataccctggt

SEQ ID NO: 80807 - DNA, 120 bp, synthetic construct
  source 1..120: mol_type = other DNA
ggtgaagtatgattggattagaagtatgatctaatgctaacaaactaggggagcttagcaaggcccatttgtttggttcccctctgtgaccctttgtcttcagagatgagaatgttcctt

SEQ ID NO: 80808 - DNA, 120 bp, synthetic construct
  source 1..120: mol_type = other DNA
taagactccatctcagaaaggaaaaaaaaaaaaaaaaaagaaccatccatgactcctctgtgccctcaggatgagttctaaactcttggcctcatgttcaagaaagcccaacacctggtc

SEQ ID NO: 80809 - DNA, 120 bp, synthetic construct
  source 1..120: mol_type = other DNA
tgtgtatgtgcccattctggacatctcaaagaagtgaaatcatatgatatgtggccttgtgtttctaggctttttcactgggccctttcattttaatgctgcacttgtggtagctcatct

SEQ ID NO: 80810 - DNA, 120 bp, synthetic construct
  source 1..120: mol_type = other DNA
aacatattttgttgtaagagatttgaacattactttctgctctcaagggacccccctctatcaagtccaattttctgtccctgcctttaccattagagagtctctttggtggagcaaggc

SEQ ID NO: 80811 - DNA, 120 bp, synthetic construct
  source 1..120: mol_type = other DNA
gcaccaaggccaccttgtatttcccctcttgccaccttaccctgaatgtgatctgagatccaacagtttctttcctggccattttatttgttcaaattgttaggctgttacaaaagatgc

SEQ ID NO: 80812 - DNA, 120 bp, synthetic construct
  source 1..120: mol_type = other DNA
ttcttagtgaattagagtctttaacccagaggaagtttacacttaattgtggatataggccaggcttggtggctcacgcctgtaatcccagccctttggaaggccaagacaggtggatca

SEQ ID NO: 80813 - DNA, 120 bp, synthetic construct
  source 1..120: mol_type = other DNA
tgggcttcctcacaccatggtggctgggttccaagggcatgcgtcctgagagaggcaggtataagcaatatatcctgttatggcctagagtcatgaactacacagcattgcttccagcac

SEQ ID NO: 80814 - DNA, 120 bp, synthetic construct
  source 1..120: mol_type = other DNA
ccagtctctatgaaaaagttttaaaaattagccaggtggtatgcgcctgaaggctaagatgagagaattgcttgatctcaggagtctgaggctgcagagagctatgatcataccattgta

SEQ ID NO: 80815 - DNA, 120 bp, synthetic construct
  source 1..120: mol_type = other DNA
agggagatgagcctgccaagctgcctcagtttcctcaatgcaatggtgacgtgactggtctgaagagacacttagtggggaaggaacactcaaggatcacttgtgcttggctgtttaatt

SEQ ID NO: 80816 - DNA, 120 bp, synthetic construct
  source 1..120: mol_type = other DNA
atcccagctacttgggaggctgaagcatgagagtcacttgaacccaaaaggaggagattcctcctggacaaaataaaactttctgtccatatatagaagatcgtaagtggcactggctca

SEQ ID NO: 80817 - DNA, 120 bp, synthetic construct
  source 1..120: mol_type = other DNA
caggctggacttggagaaccctgagatctgggctgtgaaacgtctcagggattactttccactttcggatgaaataaacaaatatagagaagtgtcatctcctccaccactataaaaatg

SEQ ID NO: 80818 - DNA, 120 bp, synthetic construct
  source 1..120: mol_type = other DNA
tccccagaatttctgactcagtaggtccaaagggaagggtcaaatttgcaatttacacaatatcccaggcgatgctaaccctgctgatctggggaccacactttgcaaaccacctgagtt

SEQ ID NO: 80819 - DNA, 120 bp, synthetic construct
  source 1..120: mol_type = other DNA
tccagctttgtgggaaatggaaagagaatgtagaggaaacacactgtgccttaagacatcggcctggaagtggcacacatcgcttctaccacttcactgtttcttaaaacatagtcacgg

SEQ ID NO: 80820 - DNA, 120 bp, synthetic construct
  source 1..120: mol_type = other DNA
aagcctttgtctcctccattctgtgcctgagatgccaaacattgctggagagaatcttatatttgggccaattcacttaatgtttattaccctaaacctcaaatgtgcaggcaacaccat

SEQ ID NO: 80821 - DNA, 120 bp, synthetic construct
  source 1..120: mol_type = other DNA
ccaactggtttgttccttggccagcatctgggagccaatttattcagccctgaggtttgttttgttaaggactttaaaatgtattaagaaatgcgcgaagagctttgtcatcacttttcc

SEQ ID NO: 80822 - DNA, 120 bp, synthetic construct
  source 1..120: mol_type = other DNA
gctaattttaaaacaatattttttagagatggggtcttgctatgttgtccaggctggtctcaaattcctggctcaagcagtcctccaccttggcctcccaaagtactgggattacagatg

SEQ ID NO: 80823 - DNA, 120 bp, synthetic construct
  source 1..120: mol_type = other DNA
ggttaatagacctggaccctaatccaggctttcaatatgtgttctgcaaagccacattaagggccaaccctgggaaatctataagatgcactgtcttactcaaagttaatgtgcttcaga

SEQ ID NO: 80824 - DNA, 120 bp, synthetic construct
  source 1..120: mol_type = other DNA
cctcctagggcagcactgctgagcagattgggctccatctattgaaatgctcatggcatttgagatgaggtgcttttcccaattaattctaacctgtcagttttgatttttttcctttga

SEQ ID NO: 80825 - DNA, 120 bp, synthetic construct
  source 1..120: mol_type = other DNA
cctcccaaagtgctgggattacagacatgagccactgcgccaggactcatttaaacatttaaaaattttatttttattgacatataataattgtacatatttatggggtacaatgtgatg

SEQ ID NO: 80826 - DNA, 120 bp, synthetic construct
  source 1..120: mol_type = other DNA
tttttagtttttgggagaacgtccaaactgttctccatagtggtcatactaatttacatttccaccaacagtgcatgagggttcccttttctccacttcctctccagcatgtattactgc

SEQ ID NO: 80827 - DNA, 120 bp, synthetic construct
  source 1..120: mol_type = other DNA
ttgaaaatgagttcactgtgggtgtgtggatttgtttctgggttctctattctgtttcattggtctatatgtttgtttttatgccagtaccatgctggttaacaaaactctgtagtatag

SEQ ID NO: 80828 - DNA, 120 bp, synthetic construct
  source 1..120: mol_type = other DNA
tgttccagatcttagaggaaaggctttcagtttttccccattcagtatgttattagctgtgagcctgtcccttgtctctaattgtaactttgtactcactgaccaacttttccctgcccc

SEQ ID NO: 80829 - DNA, 120 bp, synthetic construct
  source 1..120: mol_type = other DNA
acccaaatttctttcacctagttggattgactaggatcattttgccacatgtgctgtctccatgtggttctatatatgtcacccctcatcacctaacactgtgctgaataaatgaatggc

SEQ ID NO: 80830 - DNA, 120 bp, synthetic construct
  source 1..120: mol_type = other DNA
tttattttattttattttttttattttattttgagacagagtctcgctctattgcccaggctggagtgcagaggcgtgatcttggcttattgcaacctccgcctctgggggttcaagcaa

SEQ ID NO: 80831 - DNA, 120 bp, synthetic construct
  source 1..120: mol_type = other DNA
ttaatcactagaggtctgtggcctctgttcttgcgtatctcccaccgttcttcccttgctatctttcaggtagatggtgcctaagaaatatttacctgtcccgtggttgagagattcata

SEQ ID NO: 80832 - DNA, 120 bp, synthetic construct
  source 1..120: mol_type = other DNA
ccttacttactgtttggaactcagggtggagacgctttattttacatttttgcatttctccataatgccaaacatgggggtaattatggtgtgtacagacaacatgtggaatgaactgcc

SEQ ID NO: 80833 - DNA, 120 bp, synthetic construct
  source 1..120: mol_type = other DNA
ataattaatacagtcaccctaaaaacggtagatcagtcactccctgtattcacctaacacttacacagagtggaagagagatacggtcctgagcacacagctgctccccacccgcattta

SEQ ID NO: 80834 - DNA, 120 bp, synthetic construct
  source 1..120: mol_type = other DNA
ctaaagaaaaagacaaagttacaacttgtaaaatcccagagtcagtgtcacagtgctgtggctaactgaactgtcaagcagatgcaacttgccccaggcatggacaaaaaaggtttagtg

SEQ ID NO: 80835 - DNA, 120 bp, synthetic construct
  source 1..120: mol_type = other DNA
acatgtctgggtgtttaaagatgcttggtgcttctggtgtggatcactggctgaagtcatttctaagatcctgttagctctaaaatgaccatgtttctgaggcacgagtagttggtgaca

SEQ ID NO: 80836 - DNA, 120 bp, synthetic construct
  source 1..120: mol_type = other DNA
tttcctaatgttcagagaagatccagacccccaacccctggacaacatagacagctcttcaggacgcctgaaaagccagctattgacaaatctgcctaacactctcgcaaactccatttt

SEQ ID NO: 80837 - DNA, 120 bp, synthetic construct
  source 1..120: mol_type = other DNA
ttcacccagagctgcctccattccagcactgggatgtggttggtaatgtgagattctcactatccaatgccgcaatcagagccatatgcggctatttaaacctcaatttaaatgaattaa

SEQ ID NO: 80838 - DNA, 120 bp, synthetic construct
  source 1..120: mol_type = other DNA
gcggtgagccaagattgcaccactgcactccagcctgggtgatggagtgagactcagtctaaaaaaaaaaaaaaaaatccattctggctataattgcatagtgagacactatgtgtaaat

SEQ ID NO: 80839 - DNA, 120 bp, synthetic construct
  source 1..120: mol_type = other DNA
atcccctggtgaaatctgccccagtgcttggattaaaaaggacagtagtggtgcactgaagaagaccagtggttgaggcttaggttaattcactcattccttcctctatttcatatttat

SEQ ID NO: 80840 - DNA, 120 bp, synthetic construct
  source 1..120: mol_type = other DNA
actccagaagacaggaggcaggaagaggaagtctctactctccttatccacagcgttgtctgtgctgctggcctgtccctgttcccaaataagagcagatgcctgacaatgcctcaataa

SEQ ID NO: 80841 - DNA, 120 bp, synthetic construct
  source 1..120: mol_type = other DNA
agcaccttcttttggcctcatgttcctcagaaatgaaatgaaggaggtgggctcgatctcagactccatcagagcacagcagcctgggggtgtggaagcagagcctcacccaaggaccaa

SEQ ID NO: 80842 - DNA, 120 bp, synthetic construct
  source 1..120: mol_type = other DNA
ctgataggcatactgagaatgccatttatgaattgctagcctgggggaaatgtgcttcacctgatgattttcatttttctttcattcctaaaatggacctgcttaccccctattatacac

SEQ ID NO: 80843 - DNA, 120 bp, synthetic construct
  source 1..120: mol_type = other DNA
ctttttagggcctagatgggccaggtgagcattcataaaacacaccctatcatcctcctggcaacatttcagatataaattatcgttcctgttttaaagctaagaggccaaagttcggtt

SEQ ID NO: 80844 - DNA, 120 bp, synthetic construct
  source 1..120: mol_type = other DNA
ataaaggtcttgacacaagacaaaggggtatgcttgctctgatacaagtggcaagcactcactgcagtctgagaaaagttttcagaaggaagttatagtcatatgaatgtcagagctgga

SEQ ID NO: 80845 - DNA, 120 bp, synthetic construct
  source 1..120: mol_type = other DNA
caaaaatttggcaaaattcacctatttatgaagagccaggatattgtctactttggaggaagaggacatgctcttctctcatttgatgaagttatccgctgtcggaggtgacagtctagt

SEQ ID NO: 80846 - DNA, 120 bp, synthetic construct
  source 1..120: mol_type = other DNA
gtaattgtaaaatagttatgaatatttgtgagggtccaactcagtactttaagaaatcgattaaaatgtgaaattctttctctgtggagcatttgttctgaagacatctctgaaatctct

SEQ ID NO: 80847 - DNA, 120 bp, synthetic construct; identical to SEQ ID NO: 1732
  source 1..120: mol_type = other DNA

SEQ ID NO: 80848 - DNA, 120 bp, synthetic construct; identical to SEQ ID NO: 1736
  source 1..120: mol_type = other DNA

SEQ ID NO: 80849 - DNA, 120 bp, synthetic construct
  source 1..120: mol_type = other DNA
atgtggggcttagaatatagatgacgggttgatgggtgcagaaaaccaccatggcacatgcatatctatgtaacaaacctgcacgttctgcacatgtatcccagaacttaaagtaaaata

SEQ ID NO: 80850 - DNA, 120 bp, synthetic construct
  source 1..120: mol_type = other DNA
ccatgaaacttcttttaagtagagataccctacagaaaagtttaagacaaacagcagattctacccacattcactctttgccacctctcactcgcttgcttaccctaccaaagcaatcct

SEQ ID NO: 80851 - DNA, 120 bp, synthetic construct
  source 1..120: mol_type = other DNA
atcaataaacaaaagaaaaaacgctcaactacacagtaatcaagggtgtgccagactgatatctgcaagatggtggactaagaggctccagcctttccttccttccacggatataccaaa

SEQ ID NO: 80852 - DNA, 120 bp, synthetic construct
  source 1..120: mol_type = other DNA
ggggcagctcttcagagataggcatgcgcattaaagagaaaaagtatccttaacaggatgctgtatgataatcagctcattaaagctcatgcatatggactacctatcacgcatgtagtt

SEQ ID NO: 80853 - DNA, 120 bp, synthetic construct
  source 1..120: mol_type = other DNA
taagtcatcttctgtaagatcacaggtagcatttttgtcatttatcttgccacaataaaatatttgaactgtctggcacaagtggcaatatctccgctccctgctgctcagacacttccg

SEQ ID NO: 80854 - DNA, 120 bp, synthetic construct
  source 1..120: mol_type = other DNA
ctagttctccctgtcttagggtcagcaatcagcttggcattaaagaagcatcttggaaactacaggctcttccaggcccttttggatttgaagctggtcctgcccaggggtttgggggct

SEQ ID NO: 80855 - DNA, 120 bp, synthetic construct
  source 1..120: mol_type = other DNA
gtagagagagaaggtgaatgaagtgtaagaaatgtatgccatgaatggtgagtctgagcacctcctcaaagccagcacagccagagaatttatttcaagtgtcactaatgcagttgttaa

SEQ ID NO: 80856 - DNA, 120 bp, synthetic construct
  source 1..120: mol_type = other DNA
aatgttcttttctttttcttctcctctctgagtctctctccctgtttcttggtcccctccacttctccttcctcactttggacccccctcctttctattttaacttatttgagttgtctt

SEQ ID NO: 80857 - DNA, 120 bp, synthetic construct
  source 1..120: mol_type = other DNA
gtggatcttttataacagtgatggaaattttggagtatattggtaacttatttctatatatttttatcttctctataaaaggaaagaaaacaaaaacaagcctattccaccattcagata

SEQ ID NO: 80858 - DNA, 120 bp, synthetic construct
  source 1..120: mol_type = other DNA
ccctattgtagcccagtttggaatcagaagttctctgcagaatcaaatttagactcttcttttgcattactaaatgacccagtgaaagtttctctggaggagactcacagaagagcgaag

SEQ ID NO: 80859 - DNA, 120 bp, synthetic construct
  source 1..120: mol_type = other DNA
caccctgcctggccgaggttggcaattctgacgaaacaatcataacattttggaactgaaaactgtcttagagacctaaccaatattttaagaagaggaaatggaggatgagtgaaaaag

SEQ ID NO: 80860 - DNA, 120 bp, synthetic construct
  source 1..120: mol_type = other DNA
gcacatttcaaagggttactgatcattcattatgaactacagacttcagatctgtatccatcctttggagatagaagataagtagcaatgttattgggtttctgattgtgtttgtagtgc

SEQ ID NO: 80861 - DNA, 120 bp, synthetic construct
  source 1..120: mol_type = other DNA
ttgcccagatatgcactcaattttcagcacaatattttatagatggaatagaagtacacatcaccatctgtgcaagaggccttggaggtaaacaacctgaggcagtatgtggaccttcca

SEQ ID NO: 80862 - DNA, 120 bp, synthetic construct
  source 1..120: mol_type = other DNA
aaactcatgcttaactcccattgttattctccattatcacaaccagaggcggctttccagcctgtattcttcttcaatctcctatattggctttgcattgagtggaagctcagcaaacct

SEQ ID NO: 80863 - DNA, 120 bp, synthetic construct
  source 1..120: mol_type = other DNA
aaccttaagttcccaatattgggcaaatctttctctgtcctcttcgtgtattcaaatgccccaaaagtatttttctccctatgcatttgttattcttttatatcacctatcgcaagttgt

SEQ ID NO: 80864 - DNA, 120 bp, synthetic construct
  source 1..120: mol_type = other DNA
ctgatgcttaggtatcaaggttctttgtccaggatgtaggtgaggactaaaaggcagtttgaccaattcatgtgctggataggatattgaaggggttaatatttggaatggccccacagc

SEQ ID NO: 80865 - DNA, 120 bp, synthetic construct
  source 1..120: mol_type = other DNA
atcaatacgtgtaagatttgctttgttttttttgtttgtttgtttgtttgtttggttttttttgagacacagtcttgctctgtcgcctagggtagagtgcaatggcacgatctcagctca

SEQ ID NO: 80866 - DNA, 120 bp, synthetic construct
  source 1..120: mol_type = other DNA
ggatctggagggatccctgacccaggctttccatcccaagttctttgtcttgggatcaaaggttgaagaaaacctgttctttgataaattgctatcatattttaacagacctggaacatg

SEQ ID NO: 80867 - DNA, 120 bp, synthetic construct
  source 1..120: mol_type = other DNA
gctgctattagccatttctcttctactctatcaagatcttccaggtaaaaagggactctcagctggaaatatacacagttgctggggatgacagggggagaagaaaaacatttgatttag

SEQ ID NO: 80868 - DNA, 120 bp, synthetic construct
  source 1..120: mol_type = other DNA
agagaaatgaagtattttttttttcttaaaataaaattatctggtgttttccctaagggcaaatgccaggagcatatgctctatatgttttgcctcgggtggggttggggttaaatccag

SEQ ID NO: 80869 - DNA, 120 bp, synthetic construct
  source 1..120: mol_type = other DNA
ctcacagcagacacacagcaagcacaaatgtgcaggatccatgggaccctcctagcctgccacatgtcaggctttagtaatttttgatgatgagcttcaagggaaaaacatcagccaata

SEQ ID NO: 80870 - DNA, 120 bp, synthetic construct
  source 1..120: mol_type = other DNA
gcaggaaaaacaattttactcgagccatatcccacctggaggggaagacgtttccctattccagccccatctgaccttcctgtctcacttgagggatgggggtagctaagaatttcttga

SEQ ID NO: 80871 - DNA, 120 bp, synthetic construct
  source 1..120: mol_type = other DNA
caattaaaaacatatctcatttttttgaggcatttaagatcacttctctttcaatgtagcttatagatgaataactgtttaggttaaaatttcttcactgtgaccagtgtaattctaagt

SEQ ID NO: 80872 - DNA, 120 bp, synthetic construct
  source 1..120: mol_type = other DNA
atcttgggttcttgctcccataatccccatgagtcatgggagggacatggtgagaagtaaatgaatcatgaggtgtttcttttctgtgcttttctcatgaaaatgagtaagtctcacaag

SEQ ID NO: 80873 - DNA, 120 bp, synthetic construct; identical to SEQ ID NO: 31216
  source 1..120: mol_type = other DNA

SEQ ID NO: 80874 - DNA, 120 bp, synthetic construct; identical to SEQ ID NO: 31215
  source 1..120: mol_type = other DNA

SEQ ID NO: 80875 - DNA, 120 bp, synthetic construct
  source 1..120: mol_type = other DNA
agacttctggcagagagcaataagttcttcatttttcccgcaattgttcttgcatgtccctttaagtttgttgcatttctcatcaaaaaatgcattcttggctacacgagggaaggagcc

SEQ ID NO: 80876 - DNA, 120 bp, synthetic construct; identical to SEQ ID NO: 31214
  source 1..120: mol_type = other DNA

SEQ ID NO: 80877 - DNA, 120 bp, synthetic construct
  source 1..120: mol_type = other DNA
gaatcgcatgaaccccggtggcagaggttgcagtgagctgagattgtgaaactgcactccagcccggggaacagagtgagactctatctcaaaaaaaaaaaaaaatatgtatatatatat

SEQ ID NO: 80878 - DNA, 120 bp, synthetic construct
  source 1..120: mol_type = other DNA
actgccatttcttgatcacatatcatcaagccaagtactgtgatgagagcttcacataaaatgcatctagtcttccagtgccagcgcctttacggaaaactctgtcttacccctaattta

SEQ ID NO: 80879 - DNA, 120 bp, synthetic construct
  source 1..120: mol_type = other DNA
cagtgggtgtcactcagtctacagctcatcatatttctgattctggaaagttttgaagaaggaaagtggggatgaagggaggacagagtagggcagacacagaaaaaataaaaaaatctg

SEQ ID NO: 80880 - DNA, 120 bp, synthetic construct
  source 1..120: mol_type = other DNA
caagagcatctccccattacttttaaataaaaatgagcctctcatttgggtcttctcaaggaaatcccaatctctattccgaagagtcttccctaaaagatggccctgatcaggaagaca

SEQ ID NO: 80881 - DNA, 120 bp, synthetic construct
  source 1..120: mol_type = other DNA
acgcctgcccatctcttgcaagctctgctgctaagtctggtaataatatatgtcacaaatgcatgaggttagttgaaggaagctcaaattaaagagtgaggttgcctcagtgaaaactca

SEQ ID NO: 80882 - DNA, 120 bp, synthetic construct
  source 1..120: mol_type = other DNA
caaaccagaccagcacacttctggccttagaagcagacctggatattcaaagaagttcaagagaagttatgtggcttatccaaatcacacagtgagtgagtctcagaatcattctcattt

SEQ ID NO: 80883 - DNA, 120 bp, synthetic construct
  source 1..120: mol_type = other DNA
acgttaaaactaagtaaccaagttcaagtcactggtcatagggctggtaattttggcctttattttgtgaagctggattttatttcacaaggcaaaattagacagtcaaccatttatgca

SEQ ID NO: 80884 - DNA, 120 bp, synthetic construct; identical to SEQ ID NO: 1733
  source 1..120: mol_type = other DNA

SEQ ID NO: 80885 - DNA, 120 bp, synthetic construct; identical to SEQ ID NO: 1734
  source 1..120: mol_type = other DNA

SEQ ID NO: 80886 - DNA, 120 bp, synthetic construct
  source 1..120: mol_type = other DNA
tgcagcctgagcttcagagtgagaccctgtctgaaaaaaaaatcgaggcaaaataaaatagagtaacatctttacaatgttccagtggagccatttggccctgggttttactatgtggga

SEQ ID NO: 80887 - DNA, 120 bp, synthetic construct
  source 1..120: mol_type = other DNA
aagaaactgaatatttgcagtctgccgtgtgttttgctgtgtacttgtttcatgtgggatgattttctttacgtatttctacatcttaagcagaagccattcttcatttaataacacact

SEQ ID NO: 80888 - DNA, 120 bp, synthetic construct
  source 1..120: mol_type = other DNA
accacatttgtgggagacaaacgcagagaaccctgcctttctgcctggaatattctattctgtgtctctgcttagacttctctcatttttccttcaagtcttatctcaagtattaccatg

SEQ ID NO: 80889 - DNA, 120 bp, synthetic construct
  source 1..120: mol_type = other DNA
cttggataatcttttctttctttttttttttttttttcattttaaagaaatcactttagaatatgctggccaggcgcggtggctcatgcctgtaatcccagggctctgggaggccgagga

SEQ ID NO: 80890 - DNA, 120 bp, synthetic construct; identical to SEQ ID NO: 1735
  source 1..120: mol_type = other DNA

SEQ ID NO: 80891 - DNA, 120 bp, synthetic construct
  source 1..120: mol_type = other DNA
agcatacaatcaggttttataccgagacattccattgcccagggacaggcaggagacagatgccttcctcttgtctcaactgcaagaggcattccttcctcttttactaatcctcctcag

SEQ ID NO: 80892 - DNA, 120 bp, synthetic construct
  source 1..120: mol_type = other DNA
cagagtcattataaatttggggtgtaatacaaaaatctgacgtattccagtcacactgtaactggaaacgatgttctaagctcatgagtctgtctcccatccaaatgacagtttgtctaa

SEQ ID NO: 80893 - DNA, 120 bp, synthetic construct
  source 1..120: mol_type = other DNA
tctcttcggagctgttgggtacacctgcagacatgtgataagtgaatctactgatgggactgacagtaggtacttctaccaaccaattttggactgcaggcattaaacatcctggtgctc

SEQ ID NO: 80894 - DNA, 120 bp, synthetic construct
  source 1..120: mol_type = other DNA
tcctgtttggcaagttgcccatatgaaatgtgaataagtatcaactattacatgaacatatgataattttccaaatgaaggtacatgcgtgacatccatttgccataatgcattaggaca

SEQ ID NO: 80895 - DNA, 120 bp, synthetic construct
  source 1..120: mol_type = other DNA
gtattttgaataatgatacctgttggagaatgtgcagtggcaaaaatcaaaagttggagtggggctaagggatctattctatttatttgtgctgactgaattttttcttccactaattta

SEQ ID NO: 80896 - DNA, 120 bp, synthetic construct
  source 1..120: mol_type = other DNA
gccacccctaaaaaggataccctattccttctcttttttgatttattttagcctcaaatggaattttaatgccatcttcatttttccctagtccctttcctggtatatatcccctcttgg

SEQ ID NO: 80897 - DNA, 120 bp, synthetic construct
  source 1..120: mol_type = other DNA
ttgttgtcctgaaaaccctgaggaacaaatggctgaattgggaatgccccagtttgttgtggggcctgaggctggcccctttgctcgtttcccgacaatggttgcccatttttatcaaat

SEQ ID NO: 80898 - DNA, 120 bp, synthetic construct
  source 1..120: mol_type = other DNA
cctcaactgtgggaggctctccctcttgggctccttctccaggtggcatcggttctaacgttactgggaattgccatgcctcagtatctccttcctttcttgatttatcaataatttcat

SEQ ID NO: 80899 - DNA, 120 bp, synthetic construct
  source 1..120: mol_type = other DNA
acatctggtgcccaacatggaggcttttctctagggtgaaggtacgctcgagcgtggtcattgaggacaagtcgacgagagatcccgagtacgtctacagtcagccttacggtaagcttg

SEQ ID NO: 80900 - DNA, 120 bp, synthetic construct
  source 1..120: mol_type = other DNA
agcatctgtttaacaaagcacatcctgcaccgcccttaatccatttaactctgagttgacacagcacacatttcagagagcacggggttgggggtaaggtcacagaatctcaaggcagaa

SEQ ID NO: 80901 - DNA, 120 bp, synthetic construct
  source 1..120: mol_type = other DNA
ctctgtcctgattcagtattgaacaccctatacatgtatatatatatatatatgtgtgtgtgtgtgtatgtgtgtgcgtgtgtgtctcaactgattgtccagttgcctgataaatttaag

SEQ ID NO: 80902 - DNA, 120 bp, synthetic construct
  source 1..120: mol_type = other DNA
cagctctacagcccccaatctttacttcaaaggtaagacattcggcttcacagtgaccttccattctcttactaattagtgctctatgaattgctgtcctggctaagtaaagaaagcaat

SEQ ID NO: 80903 - DNA, 120 bp, synthetic construct
  source 1..120: mol_type = other DNA
ctgagaaacgttccatctttaggactgccttttgttgttctattatcttccagcctgctattttgtggacatgctaagcagacaagtccagaaagcccgaagttggaatataaatgtgac

SEQ ID NO: 80904 - DNA, 120 bp, synthetic construct
  source 1..120: mol_type = other DNA
aatcacaaggtcgggagtttgagaccagcttgaccaacctggtgaaaccccgtctctactaaaaatacaaaaagcagccaggcgtggtggcatgcatctgtaatcccagctccttgggag

SEQ ID NO: 80905 - DNA, 120 bp, synthetic construct
  source 1..120: mol_type = other DNA
agtggaaaacaagaccaagagtgaaggcatctgttctatgccgtttttgtcagccccattccaatagcagcagatggttggctccaggcttcaggctttatattctttccactttctcag

SEQ ID NO: 80906 - DNA, 120 bp, synthetic construct
  source 1..120: mol_type = other DNA
tagagatcacttaagtccctgcttccagaactatattggttaattatagtcagtgtaactagcctagaatacttataattagagctctatgccccactctaacactttcaaatggggatc

SEQ ID NO: 80907 - DNA, 120 bp, synthetic construct
  source 1..120: mol_type = other DNA
ggcttccacagattgttttgccacctagtgagacttgtttcgaaaaaaaaaaaaaaaaagtgaaatgggaaaaaaattaagtggcaaatgagaatgataatagtcctcacaggtgaaggt

SEQ ID NO: 80908 - DNA, 120 bp, synthetic construct
  source 1..120: mol_type = other DNA
aaaaaatttttttgtttaaaaataatgtgaatgtgctggataaagagtacaggaacttgtttgacccccccccccccaccatttgctggctattctcctccccctcatagagctctcttg

SEQ ID NO: 80909 - DNA, 120 bp, synthetic construct
  source 1..120: mol_type = other DNA
tcccgccccgggcgctcaccctcgcattgcggatgttcataacggcggcggggctcgcgggtcccagcggatcgtgaaggcgcagtcagctgccgccgcgctccgaagcgacgccgggac

SEQ ID NO: 80910 - DNA, 120 bp, synthetic construct; identical to SEQ ID NO: 11913
  source 1..120: mol_type = other DNA

SEQ ID NO: 80911 - DNA, 120 bp, synthetic construct; identical to SEQ ID NO: 21655
  source 1..120: mol_type = other DNA

SEQ ID NO: 80912 - DNA, 120 bp, synthetic construct
  source 1..120: mol_type = other DNA
tgattgccattctaactggataaaatactggcaaaacgaatccagcagcacatcaaaaagcttatccaccatgatcaagtgggcttcatccctgggatgcaaggctggttcaatatacgc

SEQ ID NO: 80913 - DNA, 120 bp, synthetic construct
  source 1..120: mol_type = other DNA
aaaactacttaagttcatatggaaccaaaaaagagcccacatcgccaaggcaatcctaagctatgtgttcttaaagaggggagtggtagctttgtaacttacagtgaggcttacaccttg

SEQ ID NO: 80914 - DNA, 120 bp, synthetic construct; identical to SEQ ID NO: 12377
  source 1..120: mol_type = other DNA

SEQ ID NO: 80915 - DNA, 120 bp, synthetic construct; identical to SEQ ID NO: 12378
  source 1..120: mol_type = other DNA

SEQ ID NO: 80916 - DNA, 120 bp, synthetic construct; identical to SEQ ID NO: 12379
  source 1..120: mol_type = other DNA

SEQ ID NO: 80917 - DNA, 120 bp, synthetic construct
  source 1..120: mol_type = other DNA
attcttgttctcttgggcacttactagctccatgacttgttttctttttctttctttttttttttggagacagggtctcactctgttatccaagctggagtgcagtggcatgatcacagc

SEQ ID NO: 80918 - DNA, 120 bp, synthetic construct; identical to SEQ ID NO: 12380
  source 1..120: mol_type = other DNA

SEQ ID NO: 80919 - DNA, 120 bp, synthetic construct; identical to SEQ ID NO: 16509
  source 1..120: mol_type = other DNA

SEQ ID NO: 80920 - DNA, 120 bp, synthetic construct; identical to SEQ ID NO: 14793
  source 1..120: mol_type = other DNA

SEQ ID NO: 80921 - DNA, 120 bp, synthetic construct; identical to SEQ ID NO: 14268
  source 1..120: mol_type = other DNA

SEQ ID NO: 80922 - DNA, 120 bp, synthetic construct
  source 1..120: mol_type = other DNA
taacccgtctcgcgggggcatctacgcctcgtcctcgccctcctcctcctcgaactccccttgttcgtcggccgtggcgtcctggtactgctggtactcggacaccaggtcgttcatgtt

SEQ ID NO: 80923 - DNA, 120 bp, synthetic construct
  source 1..120: mol_type = other DNA
gaccagctcggctccctctgtgtagtggcccttggcccagttattcccggctccactctggcctgccagagggaaagagaaatcttaagtcaccggtgattgtactaaataccttacctc

SEQ ID NO: 80924 - DNA, 120 bp, synthetic construct; identical to SEQ ID NO: 27448
  source 1..120: mol_type = other DNA

SEQ ID NO: 80925 - DNA, 120 bp, synthetic construct; identical to SEQ ID NO: 27449
  source 1..120: mol_type = other DNA

SEQ ID NO: 80926 - DNA, 120 bp, synthetic construct
  source 1..120: mol_type = other DNA
ttcccatttgacaattatttccattcaaaactgctcactttcattcttctggggaactgaaccgaaaatgttaaggactctctgttctcttatgaaagccattctgctcatatggtgcac

SEQ ID NO: 80927 - DNA, 120 bp, synthetic construct
  source 1..120: mol_type = other DNA
tttgttaacaccaagtttgacagagtaagagcagaggctgaagataataagacactgatctagaacaacatcagtgaggagaaagagggaaggagataattgcattaagatttacaggga

SEQ ID NO: 80928 - DNA, 120 bp, synthetic construct
  source 1..120: mol_type = other DNA
ggcatagaacagatgccttcactcttggtcttgttttccactctcctgctaatacctttcattaaaggtgctaacaagaagctaactggccaagcagtataacaaatgctgttttcagag

SEQ ID NO: 80929 - DNA, 120 bp, synthetic construct; identical to SEQ ID NO: 80904
  source 1..120: mol_type = other DNA

SEQ ID NO: 80930 - DNA, 120 bp, synthetic construct; identical to SEQ ID NO: 80903
  source 1..120: mol_type = other DNA

SEQ ID NO: 80931 - DNA, 120 bp, synthetic construct; identical to SEQ ID NO: 80902
  source 1..120: mol_type = other DNA

SEQ ID NO: 80932 - DNA, 120 bp, synthetic construct
  source 1..120: mol_type = other DNA
atcaggcaactggacaatcagttgagacacacacacgcacacacatacacacacacacacacacatatatatatatatacatgtatagggtgttcaatactgaatcagggcagagaacaa

SEQ ID NO: 80933 - DNA, 120 bp, synthetic construct
  source 1..120: mol_type = other DNA
cagatcagtctatagatgtggatgcctaatagctccctgtccacaaaactcatctcagatgtatttgaattacaataataagcatagtttgggcacaaattagaaccaccaccatcacca

SEQ ID NO: 80934 - DNA, 120 bp, synthetic construct; identical to SEQ ID NO: 80889
  source 1..120: mol_type = other DNA

SEQ ID NO: 80935 - DNA, 120 bp, synthetic construct
  source 1..120: mol_type = other DNA
gacatggtaatacttgagataagacttgaaggaaaaatgagagaagtctaagcagagacacagaatagaatattccaggcagaaaggcagggttctctgcgtttgtctcccacaaatgtg

SEQ ID NO: 80936 - DNA, 120 bp, synthetic construct
  source 1..120: mol_type = other DNA
gttgtgaaatgttttggcatatacctgttgacaacatttttatattagtttaatgtttcttggatctgtagtgataacttctttttcacttattctgcatacttgggcttacattgttcc

SEQ ID NO: 80937 - DNA, 120 bp, synthetic construct
  source 1..120: mol_type = other DNA
ttaattttcgtatgttttgtagagataggggtctcattatgttgcccaggctagtttcgaactaaactcctggctcaagtgatctgcccaccttggcctcccaaagtgctgggattacag

SEQ ID NO: 80938 - DNA, 120 bp, synthetic construct
  source 1..120: mol_type = other DNA
ttgaggagcttgtatttaaatctaacatacagtctattctaaagaatatttcatgtgaacagaagaagaatgtgtattttgctgtaattggtgcagtgttccacgctttgaggtcattgt

SEQ ID NO: 80939 - DNA, 120 bp, synthetic construct
  source 1..120: mol_type = other DNA
aggtgctcacctagtcacaaattgttccctttcatggcaggccaagtctcactaacgcaagactccataacaactgctttagtacccactgaggggttaagttaaatattaaaagcttaa

SEQ ID NO: 80940 - DNA, 120 bp, synthetic construct
  source 1..120: mol_type = other DNA
ctttgctgagtaaaatgggaactattagttgcaaactacattttccaggcttcctgacttctggctagttttggtcaatgtgtctcctaggagaatgggagattgaagaaggaaggacaa

SEQ ID NO: 80941 - DNA, 120 bp, synthetic construct
  source 1..120: mol_type = other DNA
ttattgcttattttttaaagatgactttttttcttttttttttttttgagaaggagtctcactctgtcgcccaggctggagtgcagtggctcgatcttggctcactgcaacctccacctc

SEQ ID NO: 80942 - DNA, 120 bp, synthetic construct
  source 1..120: mol_type = other DNA
tgtcacaaatgcatgaggttagttgaaggaagctcaaattaaagagtgaggttgcctcagtgaaaactcagcaccattgcagaaaagctattcataacgaatagcccccagatcttttct

SEQ ID NO: 80943 - DNA, 120 bp, synthetic construct
  source 1..120: mol_type = other DNA
aacctctagcctggtgttctttccactacaccagttagactccccaaaataaaaggctttctggatgccaagggttattatccatgatatcatccctttatcctgggaaatggagcatat

SEQ ID NO: 80944 - DNA, 120 bp, synthetic construct; identical to SEQ ID NO: 80879
  source 1..120: mol_type = other DNA

SEQ ID NO: 80945 - DNA, 120 bp, synthetic construct
  source 1..120: mol_type = other DNA
gccttaattttgaagaggatacaattggagccactggagattcccaggagcaggagaaaatgaagagagttttgatatgggaagggtgtctttaatgcctcttactgtggcaagacagtt

SEQ ID NO: 80946 - DNA, 120 bp, synthetic construct
  source 1..120: mol_type = other DNA
tgctagagtattatactagtatatacactatactgtatactagtgtatgtactagtatatacactatactatatactagtgtattatactagtatatacactatactatatacttgtgta

SEQ ID NO: 80947 - DNA, 120 bp, synthetic construct; identical to SEQ ID NO: 31160
  source 1..120: mol_type = other DNA

SEQ ID NO: 80948 - DNA, 120 bp, synthetic construct
  source 1..120: mol_type = other DNA
aacaaaattttattctttttttctttttctttttattatactttaagttctagggtacatgtgcacaatgtgcaggtttgttacatatgtacacatgtgccatgttggtgtgctgcaccc

SEQ ID NO: 80949 - DNA, 120 bp, synthetic construct; identical to SEQ ID NO: 31159
  source 1..120: mol_type = other DNA

SEQ ID NO: 80950 - DNA, 120 bp, synthetic construct; identical to SEQ ID NO: 31158
  source 1..120: mol_type = other DNA

SEQ ID NO: 80951 - DNA, 120 bp, synthetic construct
  source 1..120: mol_type = other DNA
tttttatgtgcctaagtttattttttaatacttctgttgtcagaagagggacccaaagaagccctgataatggttcctgggacaatgagtagccagatgtagttaccagctgagccggtt

SEQ ID NO: 80952 - DNA, 120 bp, synthetic construct
  source 1..120: mol_type = other DNA
aaagttcttgtgacagtcacagtgcagggacacacaggctcaggtaaagatgagatttacttataagattatagaatgcttccttttcccctgcctcttttttgttcatcccttgcagct

SEQ ID NO: 80953 - DNA, 120 bp, synthetic construct
  source 1..120: mol_type = other DNA
aaaaaaaggtaattcatatacagggactgaataaccaaacttcaaaagaaatcctatatcttcttaggagaaaaaaataataaaagctttatttgctgagtccttatgaagtatttcaga

SEQ ID NO: 80954 - DNA, 120 bp, synthetic construct
  source 1..120: mol_type = other DNA
aatagaatagaacatcagaaatcataaactatgccagtttgggtgctccatgaagcatttatcaacaggaattagaaaggaaataaatttattgggaaatgcctgtgaaagataaagggg

SEQ ID NO: 80955 - DNA, 120 bp, synthetic construct
  source 1..120: mol_type = other DNA
ctggcgagaagcagacgcaagtcggagggaatcaccccaggcaggagcagggcaggtgtatttatgggcagaggctgctcttgattactgaggcttatcaaaatgcagcgttccttggtg

SEQ ID NO: 80956 - DNA, 120 bp, synthetic construct
  source 1..120: mol_type = other DNA
aatttcacagaagtgtctttgggaaatgacacgggaagaaagaaaaaggaagagttaacctaaacaggtaccctctgaaaaaaaatcattaacccatctgaatcacagtggaggcacagc

SEQ ID NO: 80957 - DNA, 120 bp, synthetic construct
  source 1..120: mol_type = other DNA
acacccagctaatttttgtatttttagtagagacgaggtttcaccgtgttggccaggccagtctcgaactcctgacctcaagtgatctgcagacctcagcctcccaaaatgctgagatta

SEQ ID NO: 80958 - DNA, 120 bp, synthetic construct
  source 1..120: mol_type = other DNA
ttgagtagcagatatgtgccttctgacatatctgtggcaggtcgctttacaacctggagttagaggaggaaaaagaggacagcatgcttgctcagggaaaacgaagcttagcgttagggg

SEQ ID NO: 80959 - DNA, 120 bp, synthetic construct
  source 1..120: mol_type = other DNA
tccctgacaatgaggcccatgtttatgttgcttaccattgtgtaactgctaccaggaacatagcctgttctcaataaggacgtggtgagtaaatgattggatagactagaccagaataaa

SEQ ID NO: 80960 - DNA, 120 bp, synthetic construct
  source 1..120: mol_type = other DNA
agcactactgcgtttcagggttttgtacgattcagtaagctctcatcccattttctcaaacagcatgcataggtgttgggacatcttccaattctgtattcttggctgcgacatttcttc

SEQ ID NO: 80961 - DNA, 120 bp, synthetic construct
  source 1..120: mol_type = other DNA
agagtattttcaaatgggcacctttgaaataatttatttttatttgagataatctaggagagagttatcaagggatgaaacaagactaaccacatattgaggctgggcgatgcctacgcg

SEQ ID NO: 80962 - DNA, 120 bp, synthetic construct; identical to SEQ ID NO: 31147
  source 1..120: mol_type = other DNA

SEQ ID NO: 80963 - DNA, 120 bp, synthetic construct
  source 1..120: mol_type = other DNA
atctacataggaatctctgcttcactcacctgtgagactcttccaggctaattttctttgggtcatgtggtaatgcaagagaaagttgattctatagcaacttctgagcacagacttggc

SEQ ID NO: 80964 - DNA, 120 bp, synthetic construct
  source 1..120: mol_type = other DNA
gcacctgtaatcccagctactcaggaggctgaggcaggagagtcgcttgaacccgggaggcggaggttgcagtgagctgagatggcgccgctgcactccagcttgggcaacaatgccaga

SEQ ID NO: 80965 - DNA, 120 bp, synthetic construct
  source 1..120: mol_type = other DNA
acaatcttaaaaaagagcagccgggaaagcctagttctgctctttgacaggcaaaagctggtgaagtcgtaataaaggcaattaatgttacatctgtcctaacacaacaatgctctcagc

SEQ ID NO: 80966 - DNA, 120 bp, synthetic construct
  source 1..120: mol_type = other DNA
acttggctgcattagctcaggtatgcatgtaacccagacagtctgctctggacttaactaaagtgaagaaggctttggttgaagagttttgtattcacatagcatccaatgtaacatcag

SEQ ID NO: 80967 - DNA, 120 bp, synthetic construct
  source 1..120: mol_type = other DNA
ggaatgttaaaaggataagaaaatggagtcggggagggacactcttccctgggaagcaagtgccatcagccaattcagagtgccatttatgaacccagttcagagactcgtacccaaagc

SEQ ID NO: 80968 - DNA, 120 bp, synthetic construct
  source 1..120: mol_type = other DNA
atggacacctgaaacttagtaggtaggtattcagtaaattccttgaacgggaacgacctccaaagctaagggcatggggctgcaacctggcaggaggccatgtttccaccagtgtctcct

SEQ ID NO: 80969 - DNA, 120 bp, synthetic construct; identical to SEQ ID NO: 80853
  source 1..120: mol_type = other DNA

SEQ ID NO: 80970 - DNA, 120 bp, synthetic construct; identical to SEQ ID NO: 80852
  source 1..120: mol_type = other DNA

SEQ ID NO: 80971 - DNA, 120 bp, synthetic construct; identical to SEQ ID NO: 80851
  source 1..120: mol_type = other DNA

SEQ ID NO: 80972 - DNA, 120 bp, synthetic construct; identical to SEQ ID NO: 80850
  source 1..120: mol_type = other DNA

SEQ ID NO: 80973 - DNA, 120 bp, synthetic construct; identical to SEQ ID NO: 80849
  source 1..120: mol_type = other DNA

SEQ ID NO: 80974 - DNA, 120 bp, synthetic construct; identical to SEQ ID NO: 1736
  source 1..120: mol_type = other DNA

SEQ ID NO: 80975 - DNA, 120 bp, synthetic construct
  source 1..120: mol_type = other DNA
tgcaaatcaaaaccacaatgaaatatcacttcacatctactaggacagtcataaaaaaaataaaacttcagaagcagtggctcacacctgtaatcccagcactttgggaggccaaggcgg

SEQ ID NO: 80976 - DNA, 120 bp, synthetic construct
  source 1..120: mol_type = other DNA
tcaaacaatggttcatgtatcgtacagccactttgtccatgcacaggatacattcagaattgtcattattccttgggacccttgaacttagggtatcatcttggtgtggaagccaatttc

SEQ ID NO: 80977 - DNA, 120 bp, synthetic construct
  source 1..120: mol_type = other DNA
atcctgggctggagggaggtttgtgggctctggggtgctgggagttgtgaaaacagaatctgcaaggacacgatatttttgtgtgtgggtttatataatgtgtggtattaaaacacacag

SEQ ID NO: 80978 - DNA, 120 bp, synthetic construct
  source 1..120: mol_type = other DNA
gtctgtatgttgttagtggatgcaggtgggccactgtggggctcagtcttggacaattttgatctcccctgtgaagttttttaaaagctaaataagtgttataaaggtcttgacacaaga

SEQ ID NO: 80979 - DNA, 120 bp, synthetic construct; identical to SEQ ID NO: 80843
  source 1..120: mol_type = other DNA

SEQ ID NO: 80980 - DNA, 120 bp, synthetic construct; identical to SEQ ID NO: 80842
  source 1..120: mol_type = other DNA

SEQ ID NO: 80981 - DNA, 120 bp, synthetic construct
  source 1..120: mol_type = other DNA
gctctgatggagtctgagatcgagcccacctccttcatttcatttctgaggaacatgaggccaaaagaaggtgctgctgtctaacggcacctgcccagaagtcccatccttatggaacca

SEQ ID NO: 80982 - DNA, 120 bp, synthetic construct
  source 1..120: mol_type = other DNA
gctttggtaacctgggccccctggctctcccctgcggtgaccccagctgctcctgtccttagcccagtgcccagcttcagaacaagtggtcaaaaaaaaaaaaaaaaaaaaaaaaaaaaa

SEQ ID NO: 80983 - DNA, 120 bp, synthetic construct
  source 1..120: mol_type = other DNA
atgagtatttatgtaccaggccctgtccttgaggagctcaaggtctagtgggaggactataaatatgtaaataaatgatggcaacagagtgacaagaccctatgataggatgcaccgaag

SEQ ID NO: 80984 - DNA, 120 bp, synthetic construct; identical to SEQ ID NO: 80838
  source 1..120: mol_type = other DNA

SEQ ID NO: 80985 - DNA, 120 bp, synthetic construct
  source 1..120: mol_type = other DNA
tctccatactggtcttcatactggctgtactaatttacattcctgccaccagggtatgaggtcccttttctacacatccttgccagcatttgttattgcttatcttttggattaaagcca

SEQ ID NO: 80986 - DNA, 120 bp, synthetic construct; identical to SEQ ID NO: 32755
  source 1..120: mol_type = other DNA

SEQ ID NO: 80987 - DNA, 120 bp, synthetic construct; identical to SEQ ID NO: 32756
  source 1..120: mol_type = other DNA

SEQ ID NO: 80988 - DNA, 120 bp, synthetic construct
  source 1..120: mol_type = other DNA
tgaaactggaataagtgtttattttctattaataaaaatgaattgtgacaaaagtggactctggcttcccctcccccctcccccccacccctctgggataaaaattttccagcattgcca

SEQ ID NO: 80989 - DNA, 120 bp, synthetic construct
  source 1..120: mol_type = other DNA
gggggggggcaggggggggggtcaagatgagtttccctgtagattgtaccttggggtttttttctgtcgttttgttaaaattagcgccattttaatattaaaaatactgatttttaatat

SEQ ID NO: 80990 - DNA, 120 bp, synthetic construct; identical to SEQ ID NO: 28121
  source 1..120: mol_type = other DNA

SEQ ID NO: 80991 - DNA, 120 bp, synthetic construct
  source 1..120: mol_type = other DNA
acactgacttccacaatggttgtactggtttacaggccaccaacagtgtaaaagtgttcctgtttctccacagcctctccagcacctgttgtttcctgactttttaatgattgccattct

SEQ ID NO: 80992 - DNA, 120 bp, synthetic construct
  source 1..120: mol_type = other DNA
gggatggcattgaatctgtaaattaccttgggcagtatggccattttcacaatgttgattcttcctacgcatgagcatggaatgttcatccatttgtttgtatcctcttttatttccttg

SEQ ID NO: 80993 - DNA, 120 bp, synthetic construct
  source 1..120: mol_type = other DNA
ctattgattattgccacaatttcagctcctgttattggtctattaagagattcaacttcttcctagtttagtcttgggagagtgtatgtgtcgaggaacttatccatttcttctagattt

SEQ ID NO: 80994 - DNA, 120 bp, synthetic construct
  source 1..120: mol_type = other DNA
atttgtgggagtttaagtctctttgtaggtcactcaggacttgctttatgaatctgggtgctcctgtattgggtgcatatatatttaggatagttagctcttcttgttgaattgatccct

SEQ ID NO: 80995 - DNA, 120 bp, synthetic construct
  source 1..120: mol_type = other DNA
gttttccaacttggttccattctccccgtcactttcaggtacaccaatcagacgtagatttggtcttttcacatagtcccatatttcttggaggctttgcttgtttctttttattctttt

SEQ ID NO: 80996 - DNA, 120 bp, synthetic construct
  source 1..120: mol_type = other DNA
agactgctgtgctagcaatcagccagactccgtgggcgtaggaccctccgaaccacgtgcgggatataatctcgtggtgcgccattttttaagcccgtcggaaaagcgcaggattcgggt

SEQ ID NO: 80997 - DNA, 120 bp, synthetic construct
  source 1..120: mol_type = other DNA
tgatttttaattaaaaaaaaaatttttttttgagacagactctcgctctgttgcccaggctagagtacagtggcatgaacacagctcactgcagcctctgtctcccgggttcaagcaatt

SEQ ID NO: 80998 - DNA, 120 bp, synthetic construct
  source 1..120: mol_type = other DNA
ctttataaattacccagcctcaggtattcctttatagcaacacagatggactaagaaagtgctgtaggaacacataagaggagtactttacacagacgtttggggttggggaaatgttcc

SEQ ID NO: 80999 - DNA, 120 bp, synthetic construct
  source 1..120: mol_type = other DNA
ataatacagcagctttctaattccaatctcagtcctctctgttctattctccacacacaatcctctctgttctattctccacacagcttccagggtgatatttctagaggcaaatcagac

SEQ ID NO: 81000 - DNA, 120 bp, synthetic construct
  source 1..120: mol_type = other DNA
gtggggattacaattcgacatgagatttgggtggggacacagagccaaaccgtctcagttttttttttttcttttgttggactctttagtgtcctctatataagaacatgccatctatgc

SEQ ID NO: 81001 - DNA, 120 bp, synthetic construct
  source 1..120: mol_type = other DNA
tatgggtttattcctgactctgagttctgtaacattgacctaatgtatcgatcacgatggcagtaccacccttttcggattactgcggttttgtagtacgttttgaaattgggaagtgtg

SEQ ID NO: 81002 - DNA, 120 bp, synthetic construct
  source 1..120: mol_type = other DNA
tttgatgaggctgtgaagaaattgggactctcatgcactactgttgggaatgcgaaagattacagctgctgtggaaatcagtttggtggttcctcaataagttaaacagaattaccacac

SEQ ID NO: 81003 - DNA, 120 bp, synthetic construct
  source 1..120: mol_type = other DNA
tcggctccctagccaatgaggggctgggccctggtcgctaggatacacagtactggacgcggtaactgtcctcttgagagccatcttgcctagctgggccaagccgagatagcacactca

SEQ ID NO: 81004 - DNA, 120 bp, synthetic construct
  source 1..120: mol_type = other DNA
gggcgggggggggggggggggacaacagtccagaaatgcgcagacatggaattagggtcacgagtttcctttgggtcatgttcagatggagaggctgtgggatgcctttagcaacctaga

SEQ ID NO: 81005 - DNA, 120 bp, synthetic construct
  source 1..120: mol_type = other DNA
gcggcagtgactgcaccgggtggctgccgtgctcccgcgccaggcgctgcatgcgcgtgaagaccgccagggcgccggtgtagtcgcgcgccagcagctggcaggaggcggcctcgccaa

SEQ ID NO: 81006 - DNA, 120 bp, synthetic construct
  source 1..120: mol_type = other DNA
gagaaatttggccattacaaagacacaggaatatgttaagaagtgaggggcaggatgaaatcatctagggtaggtatttagagggagggcgccgtgcaaaataaaatcctcactatgaaa

SEQ ID NO: 81007 - DNA, 120 bp, synthetic construct
  source 1..120: mol_type = other DNA
tattgcgtctttttaatccttttgatggtgacaacaagaactcttcagaatatagcctctttctcaaactttcaaccctggggaaatgcatcctttgggccgaagttgcacacaatcctg

SEQ ID NO: 81008 - DNA, 120 bp, synthetic construct
  source 1..120: mol_type = other DNA
cacagactctttctgtcaagggcgggatagaaatgtgttagtctttacagaccacaggtggtctctgttgcacagtcttctttgtttctttgtatgtttgtctttgcaatcctttcaacg

SEQ ID NO: 81009 - DNA, 120 bp, synthetic construct
  source 1..120: mol_type = other DNA
tttcttgctgatttgttgcattcgttgtagattctatatactagtcctttgttggctgcataatttgcaaatattttctcccattctgtgggttatctgtttactctgatgattatttct

SEQ ID NO: 81010 - DNA, 120 bp, synthetic construct; identical to SEQ ID NO: 35666
  source 1..120: mol_type = other DNA

SEQ ID NO: 81011 - DNA, 120 bp, synthetic construct; identical to SEQ ID NO: 81008
  source 1..120: mol_type = other DNA

SEQ ID NO: 81012 - DNA, 120 bp, synthetic construct
  source 1..120: mol_type = other DNA
tttttgttttgcgtctttttgcaggggagaggtgtggagggttgtcactgtgagttgagtgcctccaaatgggtgggacttgtagggtgttcttttctgcttctatttctatttcgacag

SEQ ID NO: 81013 - DNA, 120 bp, synthetic construct; identical to SEQ ID NO: 35667
  source 1..120: mol_type = other DNA

SEQ ID NO: 81014 - DNA, 120 bp, synthetic construct; identical to SEQ ID NO: 35668
  source 1..120: mol_type = other DNA

SEQ ID NO: 81015 - DNA, 120 bp, synthetic construct; identical to SEQ ID NO: 35655
  source 1..120: mol_type = other DNA

SEQ ID NO: 81016 - DNA, 120 bp, synthetic construct
  source 1..120: mol_type = other DNA
aaaccattacgctaagtgaaagcagccagacacacacggcctcacatttggtcgtataattccatctataggaaatctccagaacaggctaacctctatggacagaaagcagatggacta

SEQ ID NO: 81017 - DNA, 120 bp, synthetic construct; identical to SEQ ID NO: 35653
  source 1..120: mol_type = other DNA

SEQ ID NO: 81018 - DNA, 120 bp, synthetic construct; identical to SEQ ID NO: 35669
  source 1..120: mol_type = other DNA

SEQ ID NO: 81019 - DNA, 120 bp, synthetic construct; identical to SEQ ID NO: 35670
  source 1..120: mol_type = other DNA

SEQ ID NO: 81020 - DNA, 120 bp, synthetic construct
  source 1..120: mol_type = other DNA
accccaccttccaacactgggtatcaaatttccacatgagatttggaggggtcaaacaaaccaaactataaccagcaccttgaacttcccctctcatagcacttatcacagtatagtgtt

SEQ ID NO: 81021 - DNA, 120 bp, synthetic construct; identical to SEQ ID NO: 13178
  source 1..120: mol_type = other DNA

SEQ ID NO: 81022 - DNA, 120 bp, synthetic construct; identical to SEQ ID NO: 13179
  source 1..120: mol_type = other DNA

SEQ ID NO: 81023 - DNA, 120 bp, synthetic construct; identical to SEQ ID NO: 13180
  source 1..120: mol_type = other DNA

SEQ ID NO: 81024 - DNA, 120 bp, synthetic construct; identical to SEQ ID NO: 23764
  source 1..120: mol_type = other DNA

SEQ ID NO: 81025 - DNA, 120 bp, synthetic construct; identical to SEQ ID NO: 23765
  source 1..120: mol_type = other DNA

SEQ ID NO: 81026 - DNA, 120 bp, synthetic construct
  source 1..120: mol_type = other DNA
gccacaaaaccatccactccttacactgttgcctttcaaatgcttttaataaagaactggtggggaagtacaaagtgtgacaattcatagcaggaaagaggacgggcattaaaagatagg

SEQ ID NO: 81027 - DNA, 120 bp, synthetic construct
  source 1..120: mol_type = other DNA
ctagagtctgcatttctccgtgtgaccctgatgctgctggcaggagctccaggcattgacactgggtcctgggacctcatcgggctgatgcgagtcaaggactaaatgctcaaggtcatg

SEQ ID NO: 81028 - DNA, 120 bp, synthetic construct
  source 1..120: mol_type = other DNA
actttccagagagagagacaatttgaagactgcaaggccaagtaatacctcttttccttcttagtgatgttgttggacttttaaaaaatcagggctattatccccagatagctccgtgaa

SEQ ID NO: 81029 - DNA, 120 bp, synthetic construct
  source 1..120: mol_type = other DNA
ctatctcggctcactgcaacctttgcctcccaagttcacaccattctcctgcctcagcctcccgggtagctgggattacaggcatgcaccatcatgcccagttaattttgtatttttagt

SEQ ID NO: 81030 - DNA, 120 bp, synthetic construct
  source 1..120: mol_type = other DNA
aggagattccaatgtacgttcaggttgggatacaaataaagtacatttcttcccatttaaactctcactggctacacgtgaatggtatgattgctccatagccatgtctgcacttggcat

SEQ ID NO: 81031 - DNA, 120 bp, synthetic construct
  source 1..120: mol_type = other DNA
ggcaggacttggagttcttaaaaataataataacaataaattctgtttgggaggctgaggtgggcagatcacttgaggtcaggacaagaccagcctggccaacatgatgaaaccctgact

SEQ ID NO: 81032 - DNA, 120 bp, synthetic construct
  source 1..120: mol_type = other DNA
gtaccttgaaattgccctacaggattaaatctgtaagctaattgtgtctttttttttttttttaatttgagacggagtcttgctctgtcgcccaggctggagtgcagtggcgcgatctca

SEQ ID NO: 81033 - DNA, 120 bp, synthetic construct
  source 1..120: mol_type = other DNA
ttcgctacatatacgtgcatcaaaacatcatgtatgccttaaatacatacaattaaaaacaacacaggctgggcgcagtggctcacgcctgtaatcccagcactttgggaggccaaggcg

SEQ ID NO: 81034 - DNA, 120 bp, synthetic construct
  source 1..120: mol_type = other DNA
aggcagatcacctgagatcaggaattcaagaccagccaggcaaacatggtgaaacaccatctccacaaaaatacaaaaattagctaggcctgatggtgggtgcctgtaatcccggctagt

SEQ ID NO: 81035 - DNA, 120 bp, synthetic construct
  source 1..120: mol_type = other DNA
ctgagtaggtgggattacaggctcccaccaccacgtccagctaatttttgtattttgagtagaaacagggttttaccgtgttgcccaggctggtcttgaactcctgacctcaagtgatcc

SEQ ID NO: 81036 - DNA, 120 bp, synthetic construct
  source 1..120: mol_type = other DNA
gagaccccatctcgaaagaaaagagagaaaagaaaggaagacaggaaggaaggaagacaggaaggaaggaaggaaggaaggaaggaaggaaggaaaattaaaatgagactgaacctagaa

SEQ ID NO: 81037 - DNA, 120 bp, synthetic construct
  source 1..120: mol_type = other DNA
ggttttgacttaactgactcacgttccttttgcctttacttgactgactttgaattaaatatgtttattattttattgttatctccatgaacttgctagttacagccatacaaatctgtg

SEQ ID NO: 81038 - DNA, 120 bp, synthetic construct
  source 1..120: mol_type = other DNA
aacaacccactgctaactgtaaagctgtcttacagaaggaaaaaggacacatatggacattcctgtaatcaataaatatcccgtactcaccagaacaggtgggctcggaaaagaggtgaa

SEQ ID NO: 81039 - DNA, 120 bp, synthetic construct
  source 1..120: mol_type = other DNA
tcttttgatgacatactgagaaagatgatcaagcgcctcctaagatttgacgtcctttcttgctctaactcaattggaagactctagtctcataaagctgtttcccccacaaacctcatc

SEQ ID NO: 81040 - DNA, 120 bp, synthetic construct
  source 1..120: mol_type = other DNA
gacctgatccttgtcaccggcctccggaagatgcagctggtgagtctcatggggagagcagacctcgcagctcgtctccgatgggccttggccatgtggatttctcgtttcttctgtaaa

SEQ ID NO: 81041 - DNA, 120 bp, synthetic construct
  source 1..120: mol_type = other DNA
caacgtggcttatgcctgtaatcccagtactttggaaggccgaggtgggcagattgctgaggtcagcagttcaagaccagcctggccagcatggtgaaaccccatctcaactaaaaatac

SEQ ID NO: 81042 - DNA, 120 bp, synthetic construct; identical to SEQ ID NO: 19486
  source 1..120: mol_type = other DNA

SEQ ID NO: 81043 - DNA, 120 bp, synthetic construct; identical to SEQ ID NO: 1009
  source 1..120: mol_type = other DNA

SEQ ID NO: 81044 - DNA, 120 bp, synthetic construct; identical to SEQ ID NO: 1010
  source 1..120: mol_type = other DNA

SEQ ID NO: 81045 - DNA, 120 bp, synthetic construct
  source 1..120: mol_type = other DNA
acaccgggatcccagacttccctgttcaccaagacctcacgcttctctgtatctctttctgctgtgcttcaggacacaacgtcattttcatagctccttgactctctggtttccaaagaa

SEQ ID NO: 81046 - DNA, 120 bp, synthetic construct
  source 1..120: mol_type = other DNA
gctttgaattttttttaaaaatccaacatcactaggaaagggaagaagtatgatttggccttgcagtcttcaaattgtctccttctctggaaagctcctgaaccagaaattgcttggtcc

SEQ ID NO: 81047 - DNA, 120 bp, synthetic construct
  source 1..120: mol_type = other DNA
tcgaactcttgacctcaggtgatctacctgccttggtctcccaaagtgctgggattataggcgtaagccacctctcccggccaaagtagtaatttctttgcaacaactgtgtgatatatt

SEQ ID NO: 81048 - DNA, 120 bp, synthetic construct; identical to SEQ ID NO: 1011
  source 1..120: mol_type = other DNA

SEQ ID NO: 81049 - DNA, 120 bp, synthetic construct
  source 1..120: mol_type = other DNA
aatggatcctacacaaaagaatataaacaagtgaccgtaaaaaattattatcatcattattattattattaattttcaggtggagtcttgttctgtcacccaggctggagtgcagtggca

SEQ ID NO: 81050 - DNA, 120 bp, synthetic construct
  source 1..120: mol_type = other DNA
acgcctgtaatcccagcactttaggaggctgaagcgcgcggattacttgaggtcaggagtttgagaccagcctggccgacatggtgaaacctcctctctattgaaaatacaaaaaaatta

SEQ ID NO: 81051 - DNA, 120 bp, synthetic construct; identical to SEQ ID NO: 1012
  source 1..120: mol_type = other DNA

SEQ ID NO: 81052 - DNA, 120 bp, synthetic construct
  source 1..120: mol_type = other DNA
cagctaattttttttgtatttttcagtagagacggggtttcacagtgttagccaggacggtctcagctcctgacctcatgatcctcctgctttggcctcccaaagtgctgggattacagg

SEQ ID NO: 81053 - DNA, 120 bp, synthetic construct
  source 1..120: mol_type = other DNA
aaaataataataacaataaattctgtttgggaggctgaggtgggcagatcacttgaggtcaggacaagaccagcctggccaacatgatgaaaccctgactctaccaagaatacaaaaatt

SEQ ID NO: 81054 - DNA, 120 bp, synthetic construct
  source 1..120: mol_type = other DNA
attgatgtgcaaaatgagtggaaaacttcagtaggcactattgaagagagaataaataaatggtcaatacaatcctgaacacatgcccaaattctgtttagcttcagataaacgctgatg

SEQ ID NO: 81055 - DNA, 120 bp, synthetic construct
  source 1..120: mol_type = other DNA
ggggtggtatttacagttaatatcggcattttagatatgtttccttttcctcccattctctcaaacatctttgaaagcattctacggaaataagaatggaattgtcggccgggtgcggtg

SEQ ID NO: 81056 - DNA, 120 bp, synthetic construct
  source 1..120: mol_type = other DNA
aatcaccactctgttgattttcatcttggtgagaaggaagacataataaacacactaaaaacaaatttccgatagggtatcagatataattaagttccatgatgaagaagaagggagaga

SEQ ID NO: 81057 - DNA, 120 bp, synthetic construct
  source 1..120: mol_type = other DNA
aaccaaatggagacaggagaagatcagctgtggggggcttctctcagctcagtggaatcttcccaccagcctctctttctggggaaatgtgtctcaaatggcagtgtacatcctcagcac

SEQ ID NO: 81058 - DNA, 120 bp, synthetic construct
  source 1..120: mol_type = other DNA
attgctgaggtcagcagttcaagaccagcctggccagcctggtgaaaccccatctctactaaaaatgcaaaaaatatccgggcatggtggtgggcacctgtaatcccagctactcgggaa

SEQ ID NO: 81059 - DNA, 120 bp, synthetic construct
  source 1..120: mol_type = other DNA
ttgtgcctgtatcaaaatatctcacgtaccacataaatatatacacatactacgtccctgcccgctgtttgactttgagtttccttacctctttatcattgatcgaaacatggaatggaa

SEQ ID NO: 81060 - DNA, 120 bp, synthetic construct
  source 1..120: mol_type = other DNA
attggttgaaccaaggaggcagaggttgcagtgagccaaaatggtgccactgtactccagccttggtgaaactttgtctcaaaacaaaaattccaatttaattttcaaatgaagtccttt

SEQ ID NO: 81061 - DNA, 120 bp, synthetic construct; identical to SEQ ID NO: 1013
  source 1..120: mol_type = other DNA

SEQ ID NO: 81062 - DNA, 120 bp, synthetic construct; identical to SEQ ID NO: 81045
  source 1..120: mol_type = other DNA

SEQ ID NO: 81063 - DNA, 120 bp, synthetic construct; identical to SEQ ID NO: 81046
  source 1..120: mol_type = other DNA

SEQ ID NO: 81064 - DNA, 120 bp, synthetic construct; identical to SEQ ID NO: 81047
  source 1..120: mol_type = other DNA

SEQ ID NO: 81065 - DNA, 120 bp, synthetic construct; identical to SEQ ID NO: 1011
  source 1..120: mol_type = other DNA

SEQ ID NO: 81066 - DNA, 120 bp, synthetic construct
  source 1..120: mol_type = other DNA
cggtcacttgtttatattcttttgtgtaggatccattcaagtttttcacccagtttcaagtgtgttttcattatttttctctgtttgtttgacattattctcttttttttaaatattaag

SEQ ID NO: 81067 - DNA, 120 bp, synthetic construct
  source 1..120: mol_type = other DNA
attcaatacaggagggtagtccatgtcagagctattgtccatcatgggtttcctctacttaaagctaaagcatcacagcagatattgccatgagccttgaacttatctgagcatctcttt

SEQ ID NO: 81068 - DNA, 120 bp, synthetic construct
  source 1..120: mol_type = other DNA
acttgagaccaagaagtatttctgagtttgttcctggttcttgttttccaaactggttgcagggaaaggccaacacaatgacaccaaaattcttcagctcctcctgtagtgcattcagtt

SEQ ID NO: 81069 - DNA, 120 bp, synthetic construct
  source 1..120: mol_type = other DNA
tgcctgctggaatgtcccctaagaacctcctcttaaatagagagtgccttcctgtttttctatagttcttcggttgctatcgaaactcatctctctcttatctttggccatcaagaatat

SEQ ID NO: 81070 - DNA, 120 bp, synthetic construct
  source 1..120: mol_type = other DNA
cacatcacaacttttaaaatttaccatatttttcaaatttaactttttgaagggaggagaattcttgcctgctaaatgatacaaaactgtcgtttgggctctaatacctaggtcctgagg

SEQ ID NO: 81071 - DNA, 120 bp, synthetic construct
  source 1..120: mol_type = other DNA
ctgaacagataatagtgtcaatgtgtggaaaatttttcttaaaacttgtttttgtatagaccaggtgcggtggctcatgcctgtaatcccagcactttgggaggccaagacttgtggatc

SEQ ID NO: 81072 - DNA, 120 bp, synthetic construct
  source 1..120: mol_type = other DNA
aactgaacatagacaaagcacgaacattgtccaaatcgcaacaatgaccaggtaccaccctattcttgccaatatgagtgactgctgcttctttaccagttacagctttagtcttcgttt

SEQ ID NO: 81073 - DNA, 120 bp, synthetic construct
  source 1..120: mol_type = other DNA
cattctcccccgacatcctaacactccgttcaagtcatgccgtcctctctcagatactcttaacagattttgcaggatttctcataagtaagttttgcacaaacttctcatctacatgtt

SEQ ID NO: 81074 - DNA, 120 bp, synthetic construct
  source 1..120: mol_type = other DNA
cggagcggccagccggccccgggcactgaggagcttagcaccaaggccagcagctgctgtgctcgacttctcgctgggccttagctgccaccccgcggggcagggcttgggacctgcagc

SEQ ID NO: 81075 - DNA, 120 bp, synthetic construct
  source 1..120: mol_type = other DNA
aaactctgaacacatccgaacatcagaaggaacaaattctggacacgctgccttaaagaactgggtttcattcttgaagtcagtgaggccaaaaacccaccaattttgaacacagtagga

SEQ ID NO: 81076 - DNA, 120 bp, synthetic construct
  source 1..120: mol_type = other DNA
ttctccttcattatccttggagagaaggaggcttgaccaaggggcaagccctttcaagtccatatttctgtacacatctgtgcatatacattagtcacaatatttgggaacattagccta

SEQ ID NO: 81077 - DNA, 120 bp, synthetic construct
  source 1..120: mol_type = other DNA
aggtaagctcaagtctgggaatcactgcattatatgataggcattgtacgccaccttttatagaggacagaaaggaactaacaaaagatatataattggcatatggccaccactgaggct

SEQ ID NO: 81078 - DNA, 120 bp, synthetic construct
  source 1..120: mol_type = other DNA
tgctcaccttcctattttgaggctttagggtctgctgagcaaagccaaccaggaaaaacaggacaagacaggaggcctggaactgctggaacatggctaggagttttagacgactctgag

SEQ ID NO: 81079 - DNA, 120 bp, synthetic construct
  source 1..120: mol_type = other DNA
tctgggacaatttacatttgctcaccttgtagtaatgagcccttgagaggtaaggagacatttcattatggacctcatcagtaggtcaaatggcctaaaaccccaacttcataggttttg

SEQ ID NO: 81080 - DNA, 120 bp, synthetic construct
  source 1..120: mol_type = other DNA
taaggtcaaataaacatcaaagtttatatgaattgcccctgcaatgctggtgcctattattgtctatccacccaagcaattgatcttttaaatctgaattctatcatctatcagactagc

SEQ ID NO: 81081 - DNA, 120 bp, synthetic construct
  source 1..120: mol_type = other DNA
aggcatcccaaagtgctgggattacaggcatgagccatccaacccagccctgctaaatattttaatatcagctttgattgcagaaccaatacaggcaatgtaaggttttaattttttatc

SEQ ID NO: 81082 - DNA, 120 bp, synthetic construct
  source 1..120: mol_type = other DNA
ttcttttttcattttccttcctgctccatttatctcttatatatattcttatctgctctattccttttctatccatcagttaaagaaggtcccaaccttgaagctcccagcttgttaggt

SEQ ID NO: 81083 - DNA, 120 bp, synthetic construct
  source 1..120: mol_type = other DNA
tgttccacagttctattgagttgttggtgatggtctgcagtgtgtgctggtgatgtgaggcatatttattctttcttggggagcagtaaggatctgagtcatagactgcagaatttccag

SEQ ID NO: 81084 - DNA, 120 bp, synthetic construct
  source 1..120: mol_type = other DNA
atggagatgccagatgccaagggagattttctaattcacggaaaatagtcaagtaaaaccaaagggtggacagagttctctaagttagacttgggtggtttcagaggctatggtttgaat

SEQ ID NO: 81085 - DNA, 120 bp, synthetic construct
  source 1..120: mol_type = other DNA
aatgtatataatttggaccaggggaggtgggatctcaatgttctcagcaccattgacctccaaggtcaaaaatctaaatccaaggaggtgtgttttgaagaatggaaagactgtagctgt

SEQ ID NO: 81086 - DNA, 120 bp, synthetic construct
  source 1..120: mol_type = other DNA
ttagattaaagggctctaagaagagatcagaaatctgagataaccaaaagcttctgttttccaagagagctcttgaatgcccagactccccgagactggtggaaaattaaacccagtgag

SEQ ID NO: 81087 - DNA, 120 bp, synthetic construct
  source 1..120: mol_type = other DNA
gtcttggtccatctcctgtgaagtcagcagtgattaactatgttatttatgtgagaaacccagaaattcccggggctccaggcctgcattcatcaattcatatagtctaaaattttagcc

SEQ ID NO: 81088 - DNA, 120 bp, synthetic construct
  source 1..120: mol_type = other DNA
agactcctataccagacggagcccaggctgggaatcaccattccttttaacttttgccaatctgataagtgtggaatgtgtcttttcgtatttatacttctttgattattggtgagagag

SEQ ID NO: 81089 - DNA, 120 bp, synthetic construct
  source 1..120: mol_type = other DNA
aaccttgcttttttttctccttgaatcttcttcattcctatggatgggtattccttgcgttgaatatgactagggaagaaagggtctccatatgactagggaagaaagggtctccatacc

SEQ ID NO: 81090 - DNA, 120 bp, synthetic construct
  source 1..120: mol_type = other DNA
tgaaacagcagtcaatatcagaagtaaactggactaaaggaagtcttcaaattgagagtctctctaagcttttgcatactggtacccaacatgactgtgagtgattgtcattgcagtagc

SEQ ID NO: 81091 - DNA, 120 bp, synthetic construct
  source 1..120: mol_type = other DNA
tttagggttctccatctcctttcttgagagctaccaaaagctgggatttcagagtattggcttacatgaccaccatgttagtaagagagtgacaggagaaatttattcaaggtggggata

SEQ ID NO: 81092 - DNA, 120 bp, synthetic construct
  source 1..120: mol_type = other DNA
acctcccttccaccctcctagtatctttcccagcctctggtaaccatccttctactctctatctccgtgagttcaattgttttgatttttagatcccacaaataagtgagaacatgcaat

SEQ ID NO: 81093 - DNA, 120 bp, synthetic construct
  source 1..120: mol_type = other DNA
ttgcaaggttttacaggtaacttacaatgacaagaaaaaggagttttatacctggaactgcatttgattagagtgagggctggcggatgaggctgtaatagaagcaaatactccctctcc

SEQ ID NO: 81094 - DNA, 120 bp, synthetic construct
  source 1..120: mol_type = other DNA
ggcatctggctcagaaagggttaacaaagaagatgattataaaagtctgagcagacaagttggaaaacttcctggtagtggacgaaggcagctgaagcttgtttttcagcatattactga

SEQ ID NO: 81095 - DNA, 120 bp, synthetic construct
  source 1..120: mol_type = other DNA
ctttccctgcaaccaatttggaaagcaagaaccaggagataacaaagagattcttcctgggctcaagtacgtgtcttcttgaaatccaataggaggcgcctgtgtacctttcctcagtct

SEQ ID NO: 81096 - DNA, 120 bp, synthetic construct
  source 1..120: mol_type = other DNA
aagatgaataaggcatagtctgtactcttgatgagtttataatggagagagagttagaaaccattagctatgtagctggggtggtggttcatgcctataatcccagcactttggaagact

SEQ ID NO: 81097 - DNA, 120 bp, synthetic construct
  source 1..120: mol_type = other DNA
aagttaaaatatctaggtataggagggggtggattacctgtgggtaaaaatagcctggatcatccaggagcagaaataacattgtttctcttttccatctctctggtttagcactcctgt

SEQ ID NO: 81098 - DNA, 120 bp, synthetic construct
  source 1..120: mol_type = other DNA
gggagcaagaacattgcttcaaaagaagagagggcatctccatgcttgtgggacccaaaacctatctctggccctacaaaagttttcctaattgtctgatctttagtgcattcaggttat

SEQ ID NO: 81099 - DNA, 120 bp, synthetic construct
  source 1..120: mol_type = other DNA
aaggacctctcctatctgcaacttaacagcagcaaaaccgaaagttcaggctcaagacttaatcataggaatagtatgtacaactctaaaagaagttagcttccagctgtcacggtggtt

SEQ ID NO: 81100 - DNA, 120 bp, synthetic construct
  source 1..120: mol_type = other DNA
tccgagtagcaaagtattttaacattattagatttaaaatcagcgagtgtctggatgggagtgggaggttggcatttcatgtaaagcagcaaatagtgtagccgaacgcagagtggagag

SEQ ID NO: 81101 - DNA, 120 bp, synthetic construct
  source 1..120: mol_type = other DNA
gggtgataaacgtcgtcacacggtcctttttgatgcttgcctttgtccaatacctcggcaacaagtgtatgacagtcgctaaaacagctcttcacagtattcatttcaataagaaactga

SEQ ID NO: 81102 - DNA, 120 bp, synthetic construct
  source 1..120: mol_type = other DNA
acaatgaacatatcaataggagggctattcaccgtgttgtttgataataaattaacaattgattaacagctgcaagttcctcccatccctgtatgcatatccctctgtaatgtgtgtgcg

SEQ ID NO: 81103 - DNA, 120 bp, synthetic construct
  source 1..120: mol_type = other DNA
cagatataaatgatggatataagcactaagcacagttctgagcacaaagtaagagcctagggtaagttaggagtttatgacttttggggatcttctcattgccccaagaagtgggtcttc

SEQ ID NO: 81104 - DNA, 120 bp, synthetic construct
  source 1..120: mol_type = other DNA
aaagccccaagaagacacctgtgtaacatgcctagagaacaaccagtccagattgaagcagggatacaaaggctccagagaggagaccactaaggaaaatattaaaattgataggttctt

SEQ ID NO: 81105 - DNA, 120 bp, synthetic construct
  source 1..120: mol_type = other DNA
catatctggttgtaagaggggaacagggcttacaagagggcaggaggaagcttttgggggtgatgtctatgttcattatctttattgtactggtcgtttcatgattacacatgttataca

SEQ ID NO: 81106 - DNA, 120 bp, synthetic construct
  source 1..120: mol_type = other DNA
aacgaccacatccacctgaatcatgagcaggttttaaggcgtgtgtttcttcagctcctctaaattttagaaagggggcgatatttaaactgacctcaaaaagacaaggctctcaagtta

SEQ ID NO: 81107 - DNA, 120 bp, synthetic construct
  source 1..120: mol_type = other DNA
ttgaatgtctctctataatcactactacacatgatcagtttgcattcagcattgagaccctctggaaataaatgaaaatcaccaggtgaacgagaaagaccccctcaggcgaccttctca

SEQ ID NO: 81108 - DNA, 120 bp, synthetic construct
  source 1..120: mol_type = other DNA
cctaaggccaggagtttgagaccatcctgggcaacatagcgaaacttctctctctcttctctcttaaaaaaaaaaaagccaaatagatgatccagcagatggatcagtatgtgcaatggt

SEQ ID NO: 81109 - DNA, 120 bp, synthetic construct
  source 1..120: mol_type = other DNA
attaagagtcttaacacattttcccttgatagctgtaacaatttatgaaagcaatgacatgcaatgcagaaaaacctagaagtcacaggaaatgagatattttgatatttcaattaaaaa

SEQ ID NO: 81110 - DNA, 120 bp, synthetic construct
  source 1..120: mol_type = other DNA
ttgctgacagctttcaaaacccattattctctttgatctatctgcctcacatttaggtcagcctataagaaagtgtatttaatctatggatcacttttggtagtgtggacattttaacat

SEQ ID NO: 81111 - DNA, 120 bp, synthetic construct
  source 1..120: mol_type = other DNA
tggtgggaatgtaaactagtacagccaatatggaaaacagtatgcaaattctttaaagaactaaaagtagatctatcatttgatccagtaatcccactactgggtatctacccagaggaa

SEQ ID NO: 81112 - DNA, 120 bp, synthetic construct
  source 1..120: mol_type = other DNA
tgcactccagggataaattccacttgatcatggcgcatgatccttttaatgtactgttggattcagtttgctactattttattgaggattttggcatctattttcatcaaggatattggc

SEQ ID NO: 81113 - DNA, 120 bp, synthetic construct
  source 1..120: mol_type = other DNA
tgattattaaggatataataaaggatgcaaacgaacagccagataaagagataaacagggtgtgatctgaaagggtccagagcacaagagctttccttcccatgaagttgggatgtgcta

SEQ ID NO: 81114 - DNA, 120 bp, synthetic construct
  source 1..120: mol_type = other DNA
ttgcctcaagatgaatcatgccttgagtctcacccacaccttatttagatgatactttggagttttgtgttggtgctggaaggagttaagatcttagagctattgggatggagtgaatgt

SEQ ID NO: 81115 - DNA, 120 bp, synthetic construct
  source 1..120: mol_type = other DNA
ttccaatcttatagactggttttggcaggtacagacattctcctgttgagttgcctagaacagaagatatattcctctcaagtacacatgaaacattcaccatgaggaccacattccagg

SEQ ID NO: 81116 - DNA, 120 bp, synthetic construct
  source 1..120: mol_type = other DNA
ttaagctgtcacagtttgaggaaatggtagtgggcagaaagaaaaaatttctgacacaaggagataagacaaagagaaggaagaggaagaacagttgcagttctaaggcacaaggtgtcc

SEQ ID NO: 81117 - DNA, 120 bp, synthetic construct
  source 1..120: mol_type = other DNA
atatgaccactgaccttctgaaaaggcaaaactacagagatagttaaatgattcttgattgccaggagtttgtggggaggggaggagggttgaaaaggtgaagcgcaatagattatcatt

SEQ ID NO: 81118 - DNA, 120 bp, synthetic construct
  source 1..120: mol_type = other DNA
ctccaccctcaaatcatactaacggcgccattttctgtacattatgtccaatgcaataccatgaacttttgcgcagaacgaacctgttacttcattttccctaactgccaatcacttttc

SEQ ID NO: 81119 - DNA, 120 bp, synthetic construct
  source 1..120: mol_type = other DNA
agtaattttagagtgaaatgaaagaaagtagctcatgaaagagagttgtcttgctgatatgccacccccttttcagatgaaacacacaggagctggtaaaaacgacctctgaatcagctg

SEQ ID NO: 81120 - DNA, 120 bp, synthetic construct
  source 1..120: mol_type = other DNA
gctcaagtggtcttcctgcttcagcctcccaaagtgctggaattacaggcatgagtcaccacacctggccagggaaattattttctttcttattgtttttaactttaatgttttgaatag

SEQ ID NO: 81121 - DNA, 120 bp, synthetic construct
  source 1..120: mol_type = other DNA
gggacactgaggttggggtggagtaaaggagtgtaggatagaagatgaaatcagagaaataaaggaagaggcccagatcctacaggatgttaggattttctttacaaagactcttcttga

SEQ ID NO: 81122 - DNA, 120 bp, synthetic construct
  source 1..120: mol_type = other DNA
tactattaaaccatagttggcccaagaagtacagcagctgggcaaagccatgcaaacacagtgagctcagagatgctcaaataaatctaaatccgtttttgaaacagaggatttggggct

SEQ ID NO: 81123 - DNA, 120 bp, synthetic construct
  source 1..120: mol_type = other DNA
attcccacaaaattcatatattgaaatctaatgcccagtgtggcggtatcatgagatggggcttttgggaagtgattaggtcatgattgctccactctcataaatgggatttgtgccctt

SEQ ID NO: 81124 - DNA, 120 bp, synthetic construct
  source 1..120: mol_type = other DNA
ctccttccctttgcacataacgaggcaagctacctgggtagaagtgctcacaggattgaggacagtttatttaggaagaggaacagccatttcataagacataaaagtaggattaattac

SEQ ID NO: 81125 - DNA, 120 bp, synthetic construct
  source 1..120: mol_type = other DNA
catgaaaaagaaactctcaagctttacatcttgacttaagccaagagacagaatgtatgctgatccttttatttgccctcacatccaaaatccttggaagtccatcgcaagcctagctta

SEQ ID NO: 81126 - DNA, 120 bp, synthetic construct
  source 1..120: mol_type = other DNA
tgggattacaggaatgagccactgctcctggccaagattactgtcttctatcaattcctcccttgttctctgatcccaaatcagtgaaatagcaactataactgcactgaggtaaaatat

SEQ ID NO: 81127 - DNA, 120 bp, synthetic construct
  source 1..120: mol_type = other DNA
aattttattttaatcaaagttgaattacagttttttttgttttttgtttttttttgagacagagtctcgccctgttgcccaggctggagtgcagtggtgtgatctggactcacagcagcc

SEQ ID NO: 81128 - DNA, 120 bp, synthetic construct
  source 1..120: mol_type = other DNA
cttttcctaattgatggaagagagttccaagaaaaagctcttttgcctcatgacactcccattcttaattactgttttgtgagtagctaacactgcgggtgacaaagcccacttgtgacc

SEQ ID NO: 81129 - DNA, 120 bp, synthetic construct
  source 1..120: mol_type = other DNA
ttgttcccaatatgggttatatattgatgttataaacactcaaagacatggctcctcacaatgcatgtaaataagagtggatttgaaagattgtagggcatgcacatcttcaactttacc

SEQ ID NO: 81130 - DNA, 120 bp, synthetic construct
  source 1..120: mol_type = other DNA
agggatccaatttcattttcttctaaatggaccatcaattttttctcttcctcactgaggagcaaacttctgttatataccaagtttccttatacccacaagattgtttctggattccct

SEQ ID NO: 81131 - DNA, 120 bp, synthetic construct
  source 1..120: mol_type = other DNA
tctactggtattttcaatacaattgctaactggcacctttataatatggagcctttcagatatgtctgtagcaggacaagctgcagacaaaacccctcagacaccgagttgtagaaggaa

SEQ ID NO: 81132 - DNA, 120 bp, synthetic construct
  source 1..120: mol_type = other DNA
aaattcatttgcatttaaatcctaaaataaagcacatcattatttcagcataaactcttaaaagtcatgcaatccagccgggcatggtggctcacgcctgtaaccccaacactttgggag

SEQ ID NO: 81133 - DNA, 120 bp, synthetic construct
  source 1..120: mol_type = other DNA
gggaccatgtgagaattctccaagatatttgtgggggccttacccacaaatatataaatagatagataatggcttttacctccttcatctgtccatagctataaatgcccacaggctttg

SEQ ID NO: 81134 - DNA, 120 bp, synthetic construct
  source 1..120: mol_type = other DNA
tcaataaagctgttgccctaaaaaaatttacagtgagacaataaaacagggaggtaagggaggaaagacaaatattcctatgtcttaaaaaaaaggtaaagcaagttagcctcctggcac

SEQ ID NO: 81135 - DNA, 120 bp, synthetic construct
  source 1..120: mol_type = other DNA
gaggtgccaataatttctgactttgtcccagagcaccttaaaggcaatcagttctagcaaaatctagaaaccacctaacataaacttgtcagtatggcccaatcgcccatccttatgaaa

SEQ ID NO: 81136 - DNA, 120 bp, synthetic construct
  source 1..120: mol_type = other DNA
agtagagaatccggtctcacagaggtatgttgaggggaaaagaagcagcaattttaaagcaatctcagcaagctcaggatagtcatttttagcttttatccaaaatgaaggaagtgatgc

SEQ ID NO: 81137 - DNA, 120 bp, synthetic construct
  source 1..120: mol_type = other DNA
tatttgttctatgagttgatcttccatatcattagccagttcctgaatacgtcgagctatggtgtcattggaaagtggtacctgagctaccttctttgctgcagattcacccaacatttc

SEQ ID NO: 81138 - DNA, 120 bp, synthetic construct
  source 1..120: mol_type = other DNA
caggttgtaatggggacctattgtgtttgactagtgtgtaactgccaccacatgtgactcaccttgagagtttaacaatacctaaattggtctatattctattcagtaagatgagtccat

SEQ ID NO: 81139 - DNA, 120 bp, synthetic construct
  source 1..120: mol_type = other DNA
ttgcatgcttctgtgatagggctgattttgggacatctgaatgaaccacaaaaattcagtccagtgtgatgagttgttagtttgcatccaggagaaaatcctctttcggatatcctcagt

SEQ ID NO: 81140 - DNA, 120 bp, synthetic construct
  source 1..120: mol_type = other DNA
acatatattgccaaaggagccagtagtgcttgaggtagaagtagggaatatggacacacaaaaggggataccattttctttcttttttgagacagagtctcactctgttgcccaggctag

SEQ ID NO: 81141 - DNA, 120 bp, synthetic construct
  source 1..120: mol_type = other DNA
ttattcagtcaggttagctattacatcaacatttgaggagtaagttccaacctaatatattcatatcagctcccttttagggctattaactacaaactcaatacaaatagcttcattact

SEQ ID NO: 81142 - DNA, 120 bp, synthetic construct
  source 1..120: mol_type = other DNA
tttacttgcaaaccattggggaaactgggtcttaattttgaggggaccaattctccttgcttgacactctgcaaataaatgccctcttttctcctgttgatgtggatgtttggctttcct

SEQ ID NO: 81143 - DNA, 120 bp, synthetic construct
  source 1..120: mol_type = other DNA
attctaaggtagaatttccaaatagtatttccaatgtatacacagtcattatgtgacaaaaattgtggtcagaggctacagcaatgggacccatgactacactgacaagtgctcagtatt

SEQ ID NO: 81144 - DNA, 120 bp, synthetic construct
  source 1..120: mol_type = other DNA
tgaggtcaggagttcgagagcagcctggccaacatggagaaaccctgtctctactattaataatgcagattcaccaggcctaagaaaatgtacaaattgttaaaggattacagagttatt

SEQ ID NO: 81145 - DNA, 120 bp, synthetic construct; identical to SEQ ID NO: 27551
  source 1..120: mol_type = other DNA

SEQ ID NO: 81146 - DNA, 120 bp, synthetic construct
  source 1..120: mol_type = other DNA
aatttaattagatatattgccagtatgaacaaaaccaacattttgtcgggaggaaagaagggtagaatagacactgggttggcagctaaaagtgtctgccagtggtatttcccctgtggg

SEQ ID NO: 81147 - DNA, 120 bp, synthetic construct
  source 1..120: mol_type = other DNA
tgtaccagggaggcagaggttgcagtgagccaagatcctgccactgcactcctgcctggggacagagtgagactccgtctcaaaaaataaaaataaaaataaaataaaataaaaaacact

SEQ ID NO: 81148 - DNA, 120 bp, synthetic construct
  source 1..120: mol_type = other DNA
aacttcttcaaatccaaccccctttgcaagagcgatacagcttgggttggttttggggagatcttctgaaggctcaaaggctttggaatcataaattaaatcagggagaattgtatatca

SEQ ID NO: 81149 - DNA, 120 bp, synthetic construct
  source 1..120: mol_type = other DNA
cattggattgcttccttgtttggtattcaatccacacacttaacaaatgctccatttcctccatttccttattccttgttccaacagatttcataacactggcagttgttccagctagat

SEQ ID NO: 81150 - DNA, 120 bp, synthetic construct
  source 1..120: mol_type = other DNA
aggaaatcatgcaattagtattttcattgtacagatgaagacattaatgtcccagagaaggtgtaatatgcccaaggttacacagctaattagtaacagagcctagatagcttcaaaaga

SEQ ID NO: 81151 - DNA, 120 bp, synthetic construct
  source 1..120: mol_type = other DNA
cgagcttagacagctcaggcaaaggttctctccagttggggtctaggcaaatgggtgattttacttgagctccttttttgttcttggtcaggaaagtttttgatataagaaaacactcaa

SEQ ID NO: 81152 - DNA, 120 bp, synthetic construct
  source 1..120: mol_type = other DNA
cttaaaaagaaatgtaagagttagtccattgtttccattttacggattagaaaaccaagaccaccgagaatgagcctcagttgtttagtcacggagcacagagccgtgactaaacaactg

SEQ ID NO: 81153 - DNA, 120 bp, synthetic construct
  source 1..120: mol_type = other DNA
aaatcctcccccagaaactgccaagccaacatgtgttacatgtctatcccattctttttagtggctgtagaagagactattttgatagatattgctaaaagatctgcaccccagagggat

SEQ ID NO: 81154 - DNA, 120 bp, synthetic construct
  source 1..120: mol_type = other DNA
tgtttcttttgtttgtttttttgtttgtttttttttttttttttcgctgtggaccttgcgccccgggttacttctcgccccttttccctatcccccatcttgatgagacaattcaccctc

SEQ ID NO: 81155 - DNA, 120 bp, synthetic construct
  source 1..120: mol_type = other DNA
tgtgcttgattgtacttcatatggtctgtaatggtgctaattgcagagggaaataacattttcttgtggtgttgccttagctagtgtggccccaccttctttccactttgttgatgttag

SEQ ID NO: 81156 - DNA, 120 bp, synthetic construct
  source 1..120: mol_type = other DNA
ttcatcaaagatgtataggcatatcctgggaaaacttcttttccaaagaagatatccagctaaggattgagaatatgatcagctgccgagagaagatgtgttcagaatagaggaccaagc

SEQ ID NO: 81157 - DNA, 120 bp, synthetic construct
  source 1..120: mol_type = other DNA
tggtactggcatagaaacagacatactgacctttgaaagagaatagaaagcccagaaataaacccatgtatttattgtcgattgatttttgacaaaggtgccaagaacacacaaaaggac

SEQ ID NO: 81158 - DNA, 120 bp, synthetic construct
  source 1..120: mol_type = other DNA
aattagctgagaccgcaggcatgcgccaccattccccgctgatctttatttattttgtagagatggtggtctccttatgttagccaggctgctctcaaacacttgggttcgaactcctgg

SEQ ID NO: 81159 - DNA, 120 bp, synthetic construct
  source 1..120: mol_type = other DNA
cagatgttacaggatggggtgggagttggggaaggaatagagttgttagtcaaagtagtacaaagtttcagatagacaagaggaatgttttgagatctattgcacagtagggtggctatc

SEQ ID NO: 81160 - DNA, 120 bp, synthetic construct
  source 1..120: mol_type = other DNA
ttcagccatgtacaagccttaagaccaacataggaaacatctgaatactttattaaatcacagattcaagaacatcccatcccccactgccccgccactgaggttataatgcaatagatc

SEQ ID NO: 81161 - DNA, 120 bp, synthetic construct
  source 1..120: mol_type = other DNA
ggacattcctctctgtcttgcttatggaggcatctttagacataactgggaatgtcgtatggagtatatttttcagctttgtcacatctctaagcagagacaaatcctcctcaaagctag

SEQ ID NO: 81162 - DNA, 120 bp, synthetic construct
  source 1..120: mol_type = other DNA
gagattcctgttttctgggaggtgccagaaattagcaaacaaactacaacgaacaataaaccggctctgtgattccttatacatttttgcttctgaaatatgccggacagcaaagagacg

SEQ ID NO: 81163 - DNA, 120 bp, synthetic construct
  source 1..120: mol_type = other DNA
aaataaaataaaataaaataaaataaaattagctgagtgcggcggcgcgcacttgtaatcccagctactcatgagactgaggcacgaaaatcgcttgaactcaggaagtggaagttgcag

SEQ ID NO: 81164 - DNA, 120 bp, synthetic construct
  source 1..120: mol_type = other DNA
gctacatggaactgtaagtccagtaaacctctttcttttgtaaattgcccagtcttgggtgtgtctttaacagcagtgtgaaaatagactaatacagttgtcaaaataatagaaaaataa

SEQ ID NO: 81165 - DNA, 120 bp, synthetic construct
  source 1..120: mol_type = other DNA
ttatggttttgtttgttcgttctttttgttttctgtgacacagcctcaggaggtcctgacaacatgtgccttttttttttttttttttttgagacagagtctcactctgtcgtccaggct

SEQ ID NO: 81166 - DNA, 120 bp, synthetic construct
  source 1..120: mol_type = other DNA
tttccctctctcttctgacataatgaagcatgcaggcctgagtgaaggagtaccttctggcagctatgggaactatggctatgctgatagtgcagataatgcctgtgaagaagaaagaaa

SEQ ID NO: 81167 - DNA, 120 bp, synthetic construct
  source 1..120: mol_type = other DNA
aatattgttaaatactctgtattgctgctactttgggatttacccatttatagccaccaaaaaaaaattttttttttttttttttttttttgagagggagtctcactctgtcgcccaggc

SEQ ID NO: 81168 - DNA, 120 bp, synthetic construct
  source 1..120: mol_type = other DNA
atcagttttccttcatgtgatctccccaacaggactgcccagatttcttatacagtgatagtgttccaagatgttgagaactgaagctgcaagctttcttgagacctgcacttagaagta

SEQ ID NO: 81169 - DNA, 120 bp, synthetic construct
  source 1..120: mol_type = other DNA
tattgtgtgatcttaacataagagagttctgcaggcctaactcggggaagttttctttcagagaggatatatttctacttctgccaggagctaggtgacaaatttgaccctgaaccactt

SEQ ID NO: 81170 - DNA, 120 bp, synthetic construct
  source 1..120: mol_type = other DNA
ggacaactaaatgcaacgcctgaccctagactagatcctatatgagaggaaaacatcaggtcaattggtcaacttgaaatgcagactgtagattaaatacagctattgtatcaatgttaa

SEQ ID NO: 81171 - DNA, 120 bp, synthetic construct
  source 1..120: mol_type = other DNA
tccttcctttgtaatttcactgtgttgctttctttggacgctgcttgtgcaggacccagcctagctgtttcacaaattgcggagtttgcattcatgatttcattgcaatttaccgaatct

SEQ ID NO: 81172 - DNA, 120 bp, synthetic construct
  source 1..120: mol_type = other DNA
cacaagagtcctctgaggaggaaagcctcctaattgccatcatgttcccatgctcagagcgagacccgctctcttatctgtaaacactgcgttcaaggagaaagacactcctttgaaata

SEQ ID NO: 81173 - DNA, 120 bp, synthetic construct
  source 1..120: mol_type = other DNA
gaaaacagagcgaaacactgtctgaaaaaaaagcgggggttggggggagggcgctgttcatggtatgtattcccatttaagtctatttatggtattttgggatcaaatacatttaaattg

SEQ ID NO: 81174 - DNA, 120 bp, synthetic construct
  source 1..120: mol_type = other DNA
ggcaggcgcctgtaatcccaactactcaggaggctgaggtacaagaatggcttaaagccagtaaggcttttttccccccaggtttttaaaataaccttaatttttttaaacaggtaatat

SEQ ID NO: 81175 - DNA, 120 bp, synthetic construct
  source 1..120: mol_type = other DNA
tacagccaaaagagatgcacatacaccaatggctatcgtcaaaatggaaatatggacacatctgcattcatctctccctttatacttccttctgcctctctactgctaacctgatgaaca

SEQ ID NO: 81176 - DNA, 120 bp, synthetic construct
  source 1..120: mol_type = other DNA
agttagagattttaacaatttcacttctgtggggtttttcttgtttttttgttgtttttttttttgagatggagtctcactctgtttcccaggctggagtgcagtggcgcgatctcagct

SEQ ID NO: 81177 - DNA, 120 bp, synthetic construct
  source 1..120: mol_type = other DNA
tcagtggatataggcacttgtgtcacttagctgatgttatcatttcacttccaaaagtccttttcaggagacagtctttaaatgaattttaacacaaagtgtacaaaatgggttagttta

SEQ ID NO: 81178 - DNA, 120 bp, synthetic construct
  source 1..120: mol_type = other DNA
tataccactcacaggggcggtttaacaattccactttcttttcttttcttttttttttttttagatggagtttcgctcttgttgcccaggatggagcgcaatggcgtgatcttggctcac

SEQ ID NO: 81179 - DNA, 120 bp, synthetic construct
  source 1..120: mol_type = other DNA
caatagttaaaatctgaaagaatcttccaaataaaaatattccagcctagaacccttcccatctcagtcaacccagtggccagtaatgctcagattttcagaagacaattttcccaagga

SEQ ID NO: 81180 - DNA, 120 bp, synthetic construct
  source 1..120: mol_type = other DNA
tctcagatcttctccatgtcctagtctaacccactgaacaaacgtgtatgtgtctgctccagaggtgatgcaacatctccatttcaaaaagtcatctccagaagatgtttattttctacg

SEQ ID NO: 81181 - DNA, 120 bp, synthetic construct
  source 1..120: mol_type = other DNA
ggcaagagactgtaaatcgattgattgttcaacattccttcccaaagtgggacactcggcaaccttggttgtctcctaaggtcagttcctggaattcttttaaatgcatagttctaacat

SEQ ID NO: 81182 - DNA, 120 bp, synthetic construct
  source 1..120: mol_type = other DNA
ggcctcccaaagtgttgggattacaggcatgagccacgggcgctccgcctatttgttccttttaaaaaatctaattttccctttcttgtctcagatttctcccataatttgaatgtattt

SEQ ID NO: 81183 - DNA, 120 bp, synthetic construct
  source 1..120: mol_type = other DNA
actgaaacagttgtgatacaggcctgagttggtgaaacctggcctgccacatagtggatgcagagtagttcacgtgtaggtctaccactatgatattttgaaataagaaatacagaccag

SEQ ID NO: 81184 - DNA, 120 bp, synthetic construct
  source 1..120: mol_type = other DNA
gaagtagaccttgagatagagttgttttgttttgttctgttttgttttgttatttttgagacaaggtctcactctgtcacccaggctggagtgcaatggcgcgatccctgcttactacaa

SEQ ID NO: 81185 - DNA, 120 bp, synthetic construct
  source 1..120: mol_type = other DNA
tcgtctgctgaatgcacttgtaatagctgaagcaacaactagtccttccttgcaggtagatttgggcagagcatctgtgtctattacatttggtcatagagaatgtgttaacatgattgc

SEQ ID NO: 81186 - DNA, 120 bp, synthetic construct
  source 1..120: mol_type = other DNA
gggaatgtaaaatagtgaagcagcaatggaaaacaatatgaaggttcttccaaaaattaaaaataagactaccggatggccaaataggaacagctccggtctacagctcccagcgtgagc

SEQ ID NO: 81187 - DNA, 120 bp, synthetic construct
  source 1..120: mol_type = other DNA
cccaggcaaacagggtctagagtggacctttagcaaactccaacagacctgcagctgagggtcctgtctgttagaaggaaaactaacaaacagaaaggacatccacaccaaaaacccatc

SEQ ID NO: 81188 - DNA, 120 bp, synthetic construct
  source 1..120: mol_type = other DNA
atattcaacattcttaaagaaaagaagtttcaacccagaatttcatatccagccaaattaagcttcataagtgaaggagaataaaatactttacagacaagcaaatgctgagagattttg

SEQ ID NO: 81189 - DNA, 120 bp, synthetic construct
  source 1..120: mol_type = other DNA
atatacattttttccagcaccacaccacacctattccaaaattgactgcatagttggaagtaaagctctcgtcagcaattgtaaaatatcagaaattataacaaactgtctctcagacca

SEQ ID NO: 81190 - DNA, 120 bp, synthetic construct
  source 1..120: mol_type = other DNA
aaattgtggcaataatcaatagcttaccaaccaaaaagagtccaggaccagatggattcacagctgaattttaccagaggtacaaggaggaactggtaccattccttctgaaacgattcc

SEQ ID NO: 81191 - DNA, 120 bp, synthetic construct
  source 1..120: mol_type = other DNA
actacaaaccactgctcaatgaaatgaaagaggatacaaagaaatggaagaacattccatgctcatgggtaggaagaatcaatatcatgaaaagggccatactgcccaaggtaattgata

SEQ ID NO: 81192 - DNA, 120 bp, synthetic construct
  source 1..120: mol_type = other DNA
acactgttggtgggactgtaaactagttcaaccattgtggaagtcagtgtggcaattcctcagggatctaaaactagaaataccatttgacccagccatcccattactgggtatataccc

SEQ ID NO: 81193 - DNA, 120 bp, synthetic construct
  source 1..120: mol_type = other DNA
tggttgccaggggctgggaggctgaagaagatggggaattgttgctcaatggatatatttcagttatgctacatgaataagttctagagatctgctgtacaacatagcacctacagttaa

SEQ ID NO: 81194 - DNA, 120 bp, synthetic construct
  source 1..120: mol_type = other DNA
tataaagagacttattataaggttttgctttacgcaattctggaggctgagaggttccatgatctaccatctgcaagctggagacccaaaaaagctagtgttgtatttggaaggcctaag

SEQ ID NO: 81195 - DNA, 120 bp, synthetic construct
  source 1..120: mol_type = other DNA
gggactgtgcttgttagcgtgtggcatgccaatggataataatgataatgaaaactatgatgatgacaaaaatgataatgatgatagcaggtaatttactgtgtgcataatagggaagaa

SEQ ID NO: 81196 - DNA, 120 bp, synthetic construct
  source 1..120: mol_type = other DNA
tgtaataatcctcatgtgtcatggcaggcacctggtgagaggtaattgaatcatgggggcacatttatcccctgctgttctcgtgatagtgaataagtctcatgagatctgatgttttta

SEQ ID NO: 81197 - DNA, 120 bp, synthetic construct
  source 1..120: mol_type = other DNA
ataatcccagcactttgggaggccgaggtgggtggatcacctggggtcagtcatttgagaccaccctggccaatatggtaaaaccctgtctcaactaaaaatacaaaaaaattagctggg

SEQ ID NO: 81198 - DNA, 120 bp, synthetic construct
  source 1..120: mol_type = other DNA
ctttaaaaagacaggtgggaagaggaagttctgcggaacaaatgtgggtcctccaatctttaccacggaaccacatccccactgtaggtattactgactattctgattattgaccaaaat

SEQ ID NO: 81199 - DNA, 120 bp, synthetic construct
  source 1..120: mol_type = other DNA
tagcacatacgcagacggtgttaagaaggtcgtaaaacaccagaattccaacagccatatttccatggcatacatgggctggcgcggaggctcagagtgggcaaggcaggggtcgggctg

SEQ ID NO: 81200 - DNA, 120 bp, synthetic construct
  source 1..120: mol_type = other DNA
cctctgttcaggatatatttcacagtacagagacttgcaatgaagtgtgaaggtggaggagggaggattcaaaattacataaacagatcattccaatagcgtatgacaagtgctctggca

SEQ ID NO: 81201 - DNA, 120 bp, synthetic construct
  source 1..120: mol_type = other DNA
ccttcttaggattcagcttggggtggtccattgacttctccagggagctcctagcgtttgcggccgcgtcacatctccaacctttgcctcgccctgcctgtcatcccggttttctttctt

SEQ ID NO: 81202 - DNA, 120 bp, synthetic construct
  source 1..120: mol_type = other DNA
agtccctccctctccctctaacccttggcaacttctgatcttttactatctccacagctttgccttttccagaataccatatagttggaatcatacagtatgtaactttttcagattggc

SEQ ID NO: 81203 - DNA, 120 bp, synthetic construct
  source 1..120: mol_type = other DNA
ttttttcttgatagctcaacatgatgcactgggttaaaggaattgctgcaaatagatcttcagtaatgtgagggcaagatgcagggggacagaaggatttctgcattcttgcaattaggc

SEQ ID NO: 81204 - DNA, 120 bp, synthetic construct
  source 1..120: mol_type = other DNA
gaagaatcacttgaaaccggaaggtgcaggttgcagtgagctgaagtccggccactgcactcccacctgagttacagaacagaactctatctccaaaaaacaaaaaaaaaaaaaaaaaga

SEQ ID NO: 81205 - DNA, 120 bp, synthetic construct
  source 1..120: mol_type = other DNA
tagctagatacagagtgtcgattggtgcattcacaaaccctgagctagacacagggtgctgattggtgtgtttacaaagcttgagctcgatacagagtgccgattggtggatttacaatc

SEQ ID NO: 81206 - DNA, 120 bp, synthetic construct
  source 1..120: mol_type = other DNA
tcctctctactaaaaatacaaaaattagccaggcgcggtggtgggtgcccgtaatcccggctactcaggaggctgagacaggagaattgcttgaacccgggaggtggagatttcagtgag

SEQ ID NO: 81207 - DNA, 120 bp, synthetic construct
  source 1..120: mol_type = other DNA
gaaaagaggtttaaattgattcacagttcaacacgcttaacaggaagcatgactgggaagcctcaggaaacttataatcatagcagcaggtgaaggggaagcaagcatatcttaccggac

SEQ ID NO: 81208 - DNA, 120 bp, synthetic construct
  source 1..120: mol_type = other DNA
ggttcaagaccagcctggtccacatggtgaaaccccatctctactaaatatacaaaaattagccgggcatggtggcagtcgcctgtaatcctagctactcgggaggctgagacaggagaa

SEQ ID NO: 81209 - DNA, 120 bp, synthetic construct
  source 1..120: mol_type = other DNA
aaaaaaattgatcgaatacagtatatttttaaaaactttttttggaacaacaagggtctatgtgtggggatgtagctcagtggtagagcgcatgctttgcatgtatgaggtcccgggttc

SEQ ID NO: 81210 - DNA, 120 bp, synthetic construct
  source 1..120: mol_type = other DNA
agtggagaaacctggcaaacactgtcataaccaggtgaccaaaattaataccactggtaatgggacaactgccattaaatatctcctggtaaaatgcactgaaaagggcacaatgtcagc

SEQ ID NO: 81211 - DNA, 120 bp, synthetic construct
  source 1..120: mol_type = other DNA
gagaaggtccatatttgggaagattgagtgaaggatgcaacttttctgtaaaaatgaaattattttaaaagtaaaaattaaaataaaaagaaaagaatgagatagaccttaggctagtca

SEQ ID NO: 81212 - DNA, 120 bp, synthetic construct
  source 1..120: mol_type = other DNA
ttaatataaaattaaaactccttggcatggcctctaaaattctgacacagtttcgtcctatccttctgcatcccatctctcaggctgcttgcccatggccttcccactgtactcatacca

SEQ ID NO: 81213 - DNA, 120 bp, synthetic construct
  source 1..120: mol_type = other DNA
tatgaaagtcatggatttttttcagtggcacatggacacccaagaacttaaggaggtcagagaaaatctcaaaagaatatgcaaaatttgtccgtaagtctgtgtgtgtgtgtgtctgtg

SEQ ID NO: 81214 - DNA, 120 bp, synthetic construct
  source 1..120: mol_type = other DNA
aacttctagaaattagactcccttcaagtccaacaaaacacacccacactcacacaatcacttagaaaatgtgcttagaacaatgtcagcgcgtcccagagggcaaataaaaccgtgaaa

SEQ ID NO: 81215 - DNA, 120 bp, synthetic construct
  source 1..120: mol_type = other DNA
cctgtactaacagttactgtattaagagttactgtatatttactgagtttgggaagcaacatcccccaaaatcataaggaccaggaatcatagcctttctgaatttgaatcagctgaatt

SEQ ID NO: 81216 - DNA, 120 bp, synthetic construct
  source 1..120: mol_type = other DNA
aaaggctaaataattcacatgagatctccagccaatttgatgcaaaagtgctcaactaacatcagaatccaagacagctgactgagggatatgaatatcaatactggagcgtggggattt

SEQ ID NO: 81217 - DNA, 120 bp, synthetic construct
  source 1..120: mol_type = other DNA
agatagaagaaaataaaaggcacaaggaaaagtatgtgtcagcttagctatcccagtccatagtttctgagaacaaccagaggtggggataagcaaggaccactcagaaagggagtatct

SEQ ID NO: 81218 - DNA, 120 bp, synthetic construct
  source 1..120: mol_type = other DNA
catgccacataaggacattgtagtcgacaatgagccacatagatgacagtggtcccataagactgattataatagagttgaaaaattctgatcacctaatgacattgtagctgtggtaac

SEQ ID NO: 81219 - DNA, 120 bp, synthetic construct
  source 1..120: mol_type = other DNA
tccagtgatcagcatgcctcagcctcccaaagtgctgggattacaggcataaaccaccatgccaagccaggtgtttgtgttttaagctaagtgttattacaaaagagtcaaaaagttttt

SEQ ID NO: 81220 - DNA, 120 bp, synthetic construct
  source 1..120: mol_type = other DNA
agcttgcagtgagctgagatcgtgccactgcactccagcctgggctacagagcaagattccatcacaaaaaaaaaaaaaagaagatttttatcttatgaatatctattattggagatatc

SEQ ID NO: 81221 - DNA, 120 bp, synthetic construct
  source 1..120: mol_type = other DNA
taagcggacagctgaaacctggagaaaaatcttttatttgctggtcctattccttagcattgaaaagctaaaaagactcctttttgttaccagaatgaaactgctctgagcctccattta

SEQ ID NO: 81222 - DNA, 120 bp, synthetic construct
  source 1..120: mol_type = other DNA
cttccagaaaagatagaaaatgttttgccaacgactgtttttacttagggaaactactgaactgccccccgattccttaccgcatctctgcattgtcccaagttggaagttgagactaaa

SEQ ID NO: 81223 - DNA, 120 bp, synthetic construct
  source 1..120: mol_type = other DNA
tatgtaaatgcggctgagaatggagaggaataaatttttttttctttttctttttttttttcgaggcgaagtctctctcttgtcccctaggctggagtgcaatggcgcgatctcggctca

SEQ ID NO: 81224 - DNA, 120 bp, synthetic construct
  source 1..120: mol_type = other DNA
catctctgcgtcctattcccaaactccagaaaccgctacacgccttttcttagaaaacaaggaggtagtgaaggaatttctgttataaaaataaactcgttccactccgttagcaactgg

SEQ ID NO: 81225 - DNA, 120 bp, synthetic construct
  source 1..120: mol_type = other DNA
tgtcttcttgtttcttccaacatgattcactttgaactttaaatctgataagtgtgggaagtgaaaacctctggccaggatagagtgacaggaaccagagttactattccacctgaatca

SEQ ID NO: 81226 - DNA, 120 bp, synthetic construct
  source 1..120: mol_type = other DNA
aaaagggaaaacaagaggactgaattctacctccaggctgcctccagactcaagaccacaacatttgttaactatcggcatgatgttccctaacaaatcctaaaagcaagaccttaacaa

SEQ ID NO: 81227 - DNA, 120 bp, synthetic construct
  source 1..120: mol_type = other DNA
ttaattgtcttcagagggtgatgtgcctcatcacaggggatgaatcataatgtaattagggcatggttcttaaccttaactgaaccaatactctctctttacaacaagttttttgcagca

SEQ ID NO: 81228 - DNA, 120 bp, synthetic construct
  source 1..120: mol_type = other DNA
tactaaaaatacaaaaaaattagccaggcatggtggcgcacacctgtagtcctggctactcggggggctgaggcagaagaatcgcttgaacgcgggaggcggaggttgcagtgagccgag

SEQ ID NO: 81229 - DNA, 120 bp, synthetic construct
  source 1..120: mol_type = other DNA
cctgaccaatatggcaaaaccccatctctactaaaaatacaaaaattagccaggtgtggtggtctgcgcctgtatcccagctactcaggaggctgagacaggagaattgcttcaacttgg

SEQ ID NO: 81230 - DNA, 120 bp, synthetic construct
  source 1..120: mol_type = other DNA
taatttttttttttttttttttttttttgagactgagtttcgttcttgttgcccagcctggagtgcaatggcggaatctcagctcactgcagcctcctcctcccaggttcaagcaattct

SEQ ID NO: 81231 - DNA, 120 bp, synthetic construct
  source 1..120: mol_type = other DNA
aaacatgacccatgacaaacatctgctttgcaaccctagaccagagtagttcttgtaaccagggccaagataaactctagcaagaaatcaggagatcgagaccatcctggctaacaaggt

SEQ ID NO: 81232 - DNA, 120 bp, synthetic construct
  source 1..120: mol_type = other DNA
aggtgtgagccaccgctccaggcctgcatcattagttttaaccaggattgaggtccttaccggaaaaggccatcacaaggacagaagggaaattgacttatgaatatgtacaataagtta

SEQ ID NO: 81233 - DNA, 120 bp, synthetic construct
  source 1..120: mol_type = other DNA
aggacaagatggcctgaggacctttgaagaactagctgtggacactttaagctctccccaataaaagtatagcatagagaccagcagcatcagcatcagttgagagctagttataaatgt

SEQ ID NO: 81234 - DNA, 120 bp, synthetic construct
  source 1..120: mol_type = other DNA
ttggactgaacttcccaaaagtcctgtctggacccaaggtaacaaaggccgtaattatttcactaatcttgctctttctctcctctttgaagatgataccaagttgaatccttatgcagg

SEQ ID NO: 81235 - DNA, 120 bp, synthetic construct
  source 1..120: mol_type = other DNA
aaggtcagagtcagagatttgaagatgttacactgctgtctttgaagatggaggaaggagccacaatccaagcaatccaggcaaacgctaaagctagaaaagacaaaggaactgattatt

SEQ ID NO: 81236 - DNA, 120 bp, synthetic construct
  source 1..120: mol_type = other DNA
ggcctcccaaagtgctgggattacaggtgtgagccaccacacccagccaattgattcttatatatttaattttcattgagttcttaccatagtcagttattaataagtagaaactattaa

SEQ ID NO: 81237 - DNA, 120 bp, synthetic construct
  source 1..120: mol_type = other DNA
aagcaaagcctccaaggaacagggttttgcttaggggagagtggttgttctaattttttttttagaaatgaggtctacctatattgcccaggctagtcttaaactcctgactccaagcaa

SEQ ID NO: 81238 - DNA, 120 bp, synthetic construct
  source 1..120: mol_type = other DNA
gcaagtctacattattgaaacagaagaacacaggggtatggagatgaaggtataggtggagaattagagggacatatatccagagtggtaactgggatagcaggaatatgagacagtaag

SEQ ID NO: 81239 - DNA, 120 bp, synthetic construct
  source 1..120: mol_type = other DNA
aacataaacctaaaaattcatttacttacagttgcccagaatgcaacctcagttgggttctcagtgctgtcaggaaatctgttatgattttcttttttgcccaggatggagtgccgtggc

SEQ ID NO: 81240 - DNA, 120 bp, synthetic construct
  source 1..120: mol_type = other DNA
acacactaacaacatccagcttgtgtcgttactgagagcaaagcacacttttatagctttagcacaattagtcctcttggcgcaattgaatcccaggcggaaagaattaagggattgttc

SEQ ID NO: 81241 - DNA, 120 bp, synthetic construct
  source 1..120: mol_type = other DNA
taccactacacactttttagaatggcaaaaattcaaaaccctggcaacaccaaacgctgatgaggatgtggagcaacaggaactctcattcattgctggtgggaatgcaaaatgatacaa

SEQ ID NO: 81242 - DNA, 120 bp, synthetic construct
  source 1..120: mol_type = other DNA
aaaaaaaaaaaaaaaaaggggaatgaaaccttcatggactcaggacagtgacatggaagcatggaaggtgtgccattacatccgcagcctctgcctgctgcctattgacgttagaggaaa

SEQ ID NO: 81243 - DNA, 120 bp, synthetic construct
  source 1..120: mol_type = other DNA
tacatgaccactgacatggaaacttcatgttgcggggtgctcccatgagggaaggatcttcttattactgaacaatttgagaagaaaatctggctcttcagtagatgataaaaacagctg

SEQ ID NO: 81244 - DNA, 120 bp, synthetic construct
  source 1..120: mol_type = other DNA
aggttgcagtgacccgagatggtgccactgcacttcagcctgggcgagagatcaagactgtctccaaaaaaaaaagcaaaaagatattataatgaattcccatctattcattactcagct

SEQ ID NO: 81245 - DNA, 120 bp, synthetic construct
  source 1..120: mol_type = other DNA
gatggacacttaggttgtaaatagtgctgcaataaacgtggaagtactattgtaaatagtgctgcaataaacatggaagtacagatatctttttgatatgctgatttcctttcttttgga

SEQ ID NO: 81246 - DNA, 120 bp, synthetic construct
  source 1..120: mol_type = other DNA
ctaataagaaagtaaacattgagtgaattatcatgaagaatataaacaaatttaatttcttatgataaaccatagttcctgcctcaggtttttccaccccaactctcatcaccatgacca

SEQ ID NO: 81247 - DNA, 120 bp, synthetic construct
  source 1..120: mol_type = other DNA
aaattttggagcatatttcattattctttttatatctgtaaaacaggaccatgttggcctggcatggtgactcacgcctgtaattccagcactttgggaggcctaggcaggcagataact

SEQ ID NO: 81248 - DNA, 120 bp, synthetic construct
  source 1..120: mol_type = other DNA
tctctattttctattcttacattctagcagtctgatgagccttttggaccaaccaagagaccttgccagacaagtgggatcctttcaggttcaaaaccacttcatgggatgtctctgaac

SEQ ID NO: 81249 - DNA, 120 bp, synthetic construct
  source 1..120: mol_type = other DNA
gccttaaggctggaggtgagacatgctagcggcaatattgctctttaatgcactgaggtgtttgtgtacctgcatatcaaagcacagcacattttcttaaacttatttatgacacagaga

SEQ ID NO: 81250 - DNA, 120 bp, synthetic construct
  source 1..120: mol_type = other DNA
atgcccctgaaagctgtgtaatcgattgtgaagaagaggctgggatagaatctcagaaaggaacggaaagttcacattgtaaatatgtagcagagctggtaatgactcggtcaatgcaaa

SEQ ID NO: 81251 - DNA, 120 bp, synthetic construct
  source 1..120: mol_type = other DNA
aggccattaagcaagttagagctatatgccttagagcctgggaaaaaaatccaagacccaggaaccgccttcccctcattcaatacaataaaacaaggctctaaagagacctagcctgat

SEQ ID NO: 81252 - DNA, 120 bp, synthetic construct
  source 1..120: mol_type = other DNA
ctgcatattgggcaagtcaagtctcagagagcagacctgtgtgtaaggccattattcaaaaaaaacagtttgaagggttagtagacactggagcagatgtctctatcattgctttaaatc

SEQ ID NO: 81253 - DNA, 120 bp, synthetic construct
  source 1..120: mol_type = other DNA
taatagtccaacaatttgtcagactttcctagatcaagctcttcaaccagttagagataagttttcagactgttatatcattcattatgttgatgatattttatgtgctgcagaaacgag

SEQ ID NO: 81254 - DNA, 120 bp, synthetic construct
  source 1..120: mol_type = other DNA
caatcgtacgttccagttactgagatagagaaaaccgccttatggctggaggttagaaatgctggcggcaatactgttccttaatgcaccaagatgtttgtgtaaagtcaaacataaatc

SEQ ID NO: 81255 - DNA, 120 bp, synthetic construct
  source 1..120: mol_type = other DNA
cagagttggctgcagtcattatagtgctataagattttgatcaacctattaatattgtatcagattctgcatatgtagtacaggctacaagggatgttgagacagctctaattaaatata

SEQ ID NO: 81256 - DNA, 120 bp, synthetic construct
  source 1..120: mol_type = other DNA
acccatcggagatgcaaagaaaagcgcctccacggagatggaaacacagcaatcgagcaccatcgactcacaagatgaacagaatggtgatgtcagaagaatagatgaagttgccatcca

SEQ ID NO: 81257 - DNA, 120 bp, synthetic construct
  source 1..120: mol_type = other DNA
acctcgaggtcaattctaccacaattgcacaggacaaactcaatcatgtcccagtgcacaagtgagtccagatgttgatagcgacataacagaaagtctagacaaacataagcacgaaaa

SEQ ID NO: 81258 - DNA, 120 bp, synthetic construct
  source 1..120: mol_type = other DNA
atttccaaattaaaagaacaaatttttgaagcatcaaaagcccatttaaatttggtaccaggaactgaggcaatcgcgggagttgctgatggtcttgcaaatcttaaccctgtcacttgg

SEQ ID NO: 81259 - DNA, 120 bp, synthetic construct
  source 1..120: mol_type = other DNA
ctggaggtgagacatgctagcagcaatactgctctttaatgcacccagagatgtttgtgtacgagatgtttttgtacatgcacatcaaagcacaacacgttttcttaaacttatttatga

SEQ ID NO: 81260 - DNA, 120 bp, synthetic construct
  source 1..120: mol_type = other DNA
aacatacaagactgtaatattttttcgtacctagaggactcagagaaaacgtgcagagcttggacacgtcctacttattcatccatccaaatcctgtacgtgctgttttgctaaccccaa

SEQ ID NO: 81261 - DNA, 120 bp, synthetic construct
  source 1..120: mol_type = other DNA
taactttacttctttgatttcctttctgtgttacctttggtgtccttaggcagaagaagttgagggaaaggggcaacttgaagaggcaagaaaatgcttcattcctggggctttgtgaat

SEQ ID NO: 81262 - DNA, 120 bp, synthetic construct
  source 1..120: mol_type = other DNA
gcatctggccctcaaacttgcaaatgagttttctttttctgtttttttttttttttttttttttttgagacggagtcttgctctgtcaccccggctagagtgcagtggcacgatttcggc

SEQ ID NO: 81263 - DNA, 120 bp, synthetic construct
  source 1..120: mol_type = other DNA
tagacgagtaacagattttagtctgaatagcaccgtttttgattctaggaccttcccattcctgttaacttgctccaaggtccacttgccggcgactcggtgagagtttcttgcctccac

SEQ ID NO: 81264 - DNA, 120 bp, synthetic construct
  source 1..120: mol_type = other DNA
aactgagttatgtcagctgcacctctaccttcactgacactagtaattatctcagctattgagtttcgaaagcactgcattatttgagagatgtctttcccttgatccctcactcagaag

SEQ ID NO: 81265 - DNA, 120 bp, synthetic construct
  source 1..120: mol_type = other DNA
ctcactccagtcaggccactccaaggtctgctcaccaacatactacagagcatcagcttcaactcatcgaggagaatcccaagttgagatatttacttcttttcaatattattttctttc

SEQ ID NO: 81266 - DNA, 120 bp, synthetic construct
  source 1..120: mol_type = other DNA
aaacagatagatagatagatagatagatagatagatagatagatagataaatctgctgggcacagtggttcacacctgtaatcccaggactttgggaggctgaggcaggtggattatgag

SEQ ID NO: 81267 - DNA, 120 bp, synthetic construct
  source 1..120: mol_type = other DNA
gccactgttattggtggcttccataagcaccacagtgtgcaaagtgtgagtggttacactgcaatcaatgttaattatagaagtggaatttatggctgattttggctttagcatctcagg

SEQ ID NO: 81268 - DNA, 120 bp, synthetic construct
  source 1..120: mol_type = other DNA
gaatgaggaagaatgcagactgacgggggatttagagttatggatttagtgagtgagggatttacttaaggagacttccaagtagcttgattagtcttctatctagctagtaagtacaga

SEQ ID NO: 81269 - DNA, 120 bp, synthetic construct
  source 1..120: mol_type = other DNA
agtagctgggattataagagtccaccaccatgcccagctaatttttgaatttttagtagagacaagatttcaccatgttggccaggctggtcttgaactcctgacttcaagtgatacatc

SEQ ID NO: 81270 - DNA, 120 bp, synthetic construct
  source 1..120: mol_type = other DNA
gctgaagaaagaagggcatgatatagaaagcaaaggtggaaattatttctagatagataatatttttgaacacatgggtatggacaaaatggccaagaaggactggatagcttggtctat

SEQ ID NO: 81271 - DNA, 120 bp, synthetic construct
  source 1..120: mol_type = other DNA
atttataactctcctttagggactgaggaattagggtttcaaatctcaaaaatgctgggataatttccttaccatcggagcttctttcttctgcctccagagcttcttcagtgttacctg

SEQ ID NO: 81272 - DNA, 120 bp, synthetic construct
  source 1..120: mol_type = other DNA
aaatattgatggccaccaccagaagctaagacaaggcaaggaaggattctacccagagtctcagagaaaatatgaccctgttcacaccttgatttcacacttcttgcctccaaaactatg

SEQ ID NO: 81273 - DNA, 120 bp, synthetic construct
  source 1..120: mol_type = other DNA
tctcacagctctttactgagagtgagccccaatcatgaagcagttgtgtaggcaacagaaactgtgacagaaactccatatttctagccaaattatcaaggaaaagttgagaaaagtctg

SEQ ID NO: 81274 - DNA, 120 bp, synthetic construct
  source 1..120: mol_type = other DNA
gtaatcccagcactttacaggggctcaggggaaggattgcttgtgatcaagaatttgagagcagcctgggcaacacagctagagatatctgctatcaaaggttaaaaaaaaaaaaaaaag

SEQ ID NO: 81275 - DNA, 120 bp, synthetic construct
  source 1..120: mol_type = other DNA
ggctggaacgagctgtgaccacaccattgcactccagcctgagtgacaaagtgagaccctatcttaaaaacaaacaaaaaataatcttggaaacaactacagaaaataacacaattttaa

SEQ ID NO: 81276 - DNA, 120 bp, synthetic construct
  source 1..120: mol_type = other DNA
gtcattacacacctgtcagaatggtccctcatcttcagcccattaattaatccctatgagatgaggcagacaatagtgtggtcctacaacactatggcaaacatattttctctgctcaaa

SEQ ID NO: 81277 - DNA, 120 bp, synthetic construct
  source 1..120: mol_type = other DNA
ggagttcttaaattacttacattcttgcccccaacccccattgtctccaaaacacttgcctgggttgactgtggcacacgcatgttgaataaagacaggaaacccttaccttttgtgctc

SEQ ID NO: 81278 - DNA, 120 bp, synthetic construct
  source 1..120: mol_type = other DNA
cagactcaaaagtagcctaaggtctacgttttgggtggtatgtctaaataatgctgcattgaagcgtgggattaggaagaaccaaggcccttggaattaaaatgaatagcagtaatccac

SEQ ID NO: 81279 - DNA, 120 bp, synthetic construct
  source 1..120: mol_type = other DNA
atgctattaaatttcaaatagtaaatttaacttgactgaaaaagttaacctagccaggcgctgtgactcatgcctgtaatcctagcactttgggaggccaacgcaggtggatcacctgag

SEQ ID NO: 81280 - DNA, 120 bp, synthetic construct
  source 1..120: mol_type = other DNA
gagaatcacttgaacccaagaggcagaggttgcagtgagccaagatccagccactgcactccagcctgagagacagagtgatacgctgtgtcaaatatatacgtatatatttataaatat

SEQ ID NO: 81281 - DNA, 120 bp, synthetic construct
  source 1..120: mol_type = other DNA
cgagtagctgagattacaggcatgtgccaccacgccgggctaattttgtatttttggttgagacagggtttccctatgttggtcaggctagtctcgaactcctgacctcaggtgatccgc

SEQ ID NO: 81282 - DNA, 120 bp, synthetic construct
  source 1..120: mol_type = other DNA
gtagaaaccccgtcaagtggaacacgtgttctgttcacgtatttcacccacaaatttagtgccttttccatgcacttatcacacactgtagcagtagctttcgcaaaactaacaagaatt

SEQ ID NO: 81283 - DNA, 120 bp, synthetic construct
  source 1..120: mol_type = other DNA
aggtgaatatttcacaagtgagccagaacatttacagtgtaaacaagagcagttgctacctttgctttttttttcccacttcttcaatatgatcaccatgcttttcattaccctgctact

SEQ ID NO: 81284 - DNA, 120 bp, synthetic construct
  source 1..120: mol_type = other DNA
actccgtctcaaaaaaaaaaaaaaaaaaaagaaaagaaaagaaaaaaagacttcactagggcacagtggctcacgcctgtgatcccagaactttgggaggccgggacgggtggatcactt

SEQ ID NO: 81285 - DNA, 120 bp, synthetic construct
  source 1..120: mol_type = other DNA
ccctataatgaagaaaagaagatgttcaggtaatgtcaattaaatgaaagctcatctgtactaaaaacatgagacacatttttgtttcctcagcttttgtctgccatactctggaagcct

SEQ ID NO: 81286 - DNA, 120 bp, synthetic construct
  source 1..120: mol_type = other DNA
cccactctagccaaaatacatggagttttagatatttaatccaagtgtctgattgacctgttttggccactgggctctcagtttaaacttaagtttggaagccccaagttccacaacaga

SEQ ID NO: 81287 - DNA, 120 bp, synthetic construct
  source 1..120: mol_type = other DNA
gagctccttttcagatcctgataatgttttttgtttcccttactcagttctaatagaatcctagtaaaacccagctttctcctggataaacttgtctatgtttcattctccttgcgtgtg

SEQ ID NO: 81288 - DNA, 120 bp, synthetic construct
  source 1..120: mol_type = other DNA
accaccaatgaagacggcgggtttcattgccacgagtctcggattttcctggggttttcaaaaccatcttgatttaccagaagataatctgtgctactatcctatcctaaaaaaatgtgc

SEQ ID NO: 81289 - DNA, 120 bp, synthetic construct
  source 1..120: mol_type = other DNA
gcgattctcctgccttagcctaccgagtagctgggaccacaggcgcgtgccaccacggccagctgaatttttgtatttttagtagagacagggtttcactgtgttagccaggatggtctc

SEQ ID NO: 81290 - DNA, 120 bp, synthetic construct
  source 1..120: mol_type = other DNA
atatctaggaggccattgatttggactggcctcctccactaagcctaacagatcaaactaatatggagttgaattacagtagctgagctttaattacttgctggaggctctgtaaccaat

SEQ ID NO: 81291 - DNA, 120 bp, synthetic construct
  source 1..120: mol_type = other DNA
gccaccagctttatgtagcatcaaaattacattttccacagaaaacactccttccactttcccagaaagaccatccaccctaatgtctggtaattcagccaagcacatattataggagca

SEQ ID NO: 81292 - DNA, 120 bp, synthetic construct
  source 1..120: mol_type = other DNA
aggttaggctttagggcctttggaaggtgattaggtgataaaggtggaatcttcatgaatgggattagtgctcttataaaatatgcctgagagagacctttttctgtaaatggccaagta

SEQ ID NO: 81293 - DNA, 120 bp, synthetic construct
  source 1..120: mol_type = other DNA
acttccaaagccagtcagtgtttgatcatagtaattgagggcagttcttccccttcaaaaaaaaatttccatctcatccctgagttaaacacacacacacacacacacacacacacacac

SEQ ID NO: 81294 - DNA, 120 bp, synthetic construct
  source 1..120: mol_type = other DNA
ggacagtatagtcgctaaagctccagaacactctgttttcctccctcctgtcttccttgtcttccatctctttatgagtctagataaagagttgtaatgttccctagaaaaagtcactga

SEQ ID NO: 81295 - DNA, 120 bp, synthetic construct
  source 1..120: mol_type = other DNA
tatataaagagttaagaacaacaaattgaagtttagagagggaacgtatactgtaggcgtggattttaatacagtactggccagtgctcttgggattataattcaactataggcatgcga

SEQ ID NO: 81296 - DNA, 120 bp, synthetic construct
  source 1..120: mol_type = other DNA
ggctgaatccaattccctggcagtgtggaatggataggtggaggagggagatagaagaaaagtaacaggaattaaaaaacaaacaaaaaactttctgctcttccacatcctgttggttga

SEQ ID NO: 81297 - DNA, 120 bp, synthetic construct
  source 1..120: mol_type = other DNA
tgtggagcacattactgctaattattttcaatattcacctttttattaagagctagaacaagtctttattgtggatcggaagctgattgggaaactaggagctagttttaatgtaagaaa

SEQ ID NO: 81298 - DNA, 120 bp, synthetic construct
  source 1..120: mol_type = other DNA
tccagcgatctttctccaaccaacagaaaatgaaaccaacaaactgaaaacaagtgatattttatatataagccaacagaactctcatgcggtcagggggtgtagctcagtggtagagcg

SEQ ID NO: 81299 - DNA, 120 bp, synthetic construct
  source 1..120: mol_type = other DNA
gcctcgcgaacgcttaaaacatcatttgggtgactgaaaacagccagctctcgttcgctgcaatagcttacagcctacagcaagcgatctaccaacaggttttaaaagttaggtcttggc

SEQ ID NO: 81300 - DNA, 120 bp, synthetic construct
  source 1..120: mol_type = other DNA
ctgctgtctgaattatttctgggcaaagaaaaaatgatagaccttctttctctttgaccctcatttcattgactcctgattggcccgcagagttgccaaatcagtgaaaaacagcttgga

SEQ ID NO: 81301 - DNA, 120 bp, synthetic construct
  source 1..120: mol_type = other DNA
atccaggcagccttccgagagccacggcttcctgtggttactgaccccagggttgaccaccagcctttaatggaggcatcttatgttaacctacctaccattgctctgtgtaacacagat

SEQ ID NO: 81302 - DNA, 120 bp, synthetic construct
  source 1..120: mol_type = other DNA
ttactcttaccccgtgctcctggagagattctgaaacctcaaccatcacaatggcacaaataacagacactttcctcctgttgttaaattttggggtgtccaactatgtccacataaatt

SEQ ID NO: 81303 - DNA, 120 bp, synthetic construct
  source 1..120: mol_type = other DNA
tgtctcctaggctcctctataatgttttgttttgagacggaatatcgctctatcgcccaggctgcagtgcagtggcgcaatctcgaatcactgcaacctctgcctcccgggttcaagcga

SEQ ID NO: 81304 - DNA, 120 bp, synthetic construct
  source 1..120: mol_type = other DNA
ttttttgtatttttagtagagatggggtttcaccatgttagccaggatggtctaggagaacgagtcttctatgaccggcatgcctgttgcttcactctcaggggatcttgaataagcagc

SEQ ID NO: 81305 - DNA, 120 bp, synthetic construct
  source 1..120: mol_type = other DNA
ttccttgaagaaaacaggggggaatattcttgacattggtttaggcaatggtttcttgagtatgacaccaaaagcacaggcaacaaaagcaaaaatggataagcgagactatagcaaact

SEQ ID NO: 81306 - DNA, 120 bp, synthetic construct
  source 1..120: mol_type = other DNA
aatggtgattgtcagggaccagaggcagagggaaatggggagttgttgctcggtgagttaaaattttagttatgaaacatgaataagttctagagatctattgcacaacctagtgccttc

SEQ ID NO: 81307 - DNA, 120 bp, synthetic construct
  source 1..120: mol_type = other DNA
ctgactagctctggttttaaagacaacacaaacgaagccgaagacagaggactctttcagagcaaatttttttgagcaaggaggaaagcacaaaggaagctggtctcaacctgagaaaac

SEQ ID NO: 81308 - DNA, 120 bp, synthetic construct
  source 1..120: mol_type = other DNA
tagatacccactaaaaccatcgtacttctggctagctcagctggaaatgcatcaggccactagtccggaaatttaggaatcacgatcctgttctgatgtagatacttttcattttcccat

SEQ ID NO: 81309 - DNA, 120 bp, synthetic construct
  source 1..120: mol_type = other DNA
tttgaggtagcagtgagccatgcttgcagtgccactgcactccagcctgggtgacagggcgagacctcaactcaaaaaataaataaaataaactttacttaaaaaaaattactgagggga

SEQ ID NO: 81310 - DNA, 120 bp, synthetic construct
  source 1..120: mol_type = other DNA
tttgtttactaagagactgcaatctgcttgtagttcacccctgctcaagcaagacatacattcagttttgttttttcagttgtgagtaaatacctcttttcctcagcaatatgtgggtcc

SEQ ID NO: 81311 - DNA, 120 bp, synthetic construct
  source 1..120: mol_type = other DNA
gaaaaatttagaagatattagagttcccatataccctgcacccaatacccctactattatgatagtccttactattaagatggtacttttctgccgcgcgcgatgactcacgcctgtaat

SEQ ID NO: 81312 - DNA, 120 bp, synthetic construct
  source 1..120: mol_type = other DNA
aaagtcttgggaacaagccggtttttttttttttaactggcttgcagaaagctcaaggagatgtgcagaaagtaaagatatttcctgacaatagtaagaacacgaccacgaagggactcg

SEQ ID NO: 81313 - DNA, 120 bp, synthetic construct
  source 1..120: mol_type = other DNA
ctaaaggttgattgctctaagctcacctttggattgatccagaaaacagtctggggcgattttttgttaccctttccccagctatgtcccctatgttgatagggtaggaaagattaaaaa

SEQ ID NO: 81314 - DNA, 120 bp, synthetic construct
  source 1..120: mol_type = other DNA
ttcctgctgtttgcagagcaggggtaccctatagaaagtgtgtccaaagtagcctgaaatttctttcttcaggaagatgctaaaaaggattggcactgagatttgaaagaataatgctaa

SEQ ID NO: 81315 - DNA, 120 bp, synthetic construct
  source 1..120: mol_type = other DNA
catccaaaagacaggcaaggacgtggagaaaggagaaccctagtacactcttggtgggaatttaaattagtacaaccgctttggagaatagtatggaggttcctcagaaaactaaaaata

SEQ ID NO: 81316 - DNA, 120 bp, synthetic construct
  source 1..120: mol_type = other DNA
tcacatattctctctcatttgtggaagccaaaaataaaacaattgaactcatggagacagagagtagaatgatggttaccagatgctgggaagggtattggagggggcagtgagatggtt

SEQ ID NO: 81317 - DNA, 120 bp, synthetic construct
  source 1..120: mol_type = other DNA
gcaacatgaaacaaaatgaactgaacaaatggagaaatctagattacatactccgtgggttgcgtctacccagggcctggatagctcagttggtagaacatcagacttttaatctgacgg

SEQ ID NO: 81318 - DNA, 120 bp, synthetic construct
  source 1..120: mol_type = other DNA
caagaaaagagacaaaacaccttacctacagagaaaaccaatttgcataacagtgggtatcttatcagaaatcacagaagtcagaaagagtggcacaacagttttcaaggaccgaaagaa

SEQ ID NO: 81319 - DNA, 120 bp, synthetic construct
  source 1..120: mol_type = other DNA
tactcagacaaatcactaaaagagttatataaagagatcatttaaaaacactacagataggctgggcacagtggctcacacctgtaatgccagcactttgggaggctgagggggatcacc

SEQ ID NO: 81320 - DNA, 120 bp, synthetic construct
  source 1..120: mol_type = other DNA
ctcagcatcccacggtgctgggattacaggcgtgagctaccacgtctggcctaatataagctttagaacaaagaaaaattttaaaaatccaccaagaaggcataacaatcctaaatatgt

SEQ ID NO: 81321 - DNA, 120 bp, synthetic construct
  source 1..120: mol_type = other DNA
tgacatcaaaaggatatgtttttggatgatttcctttaaaaaatttagccgggctcggtggctcacacctgtaatcccagcatttaaaaaataactagccatgcatggtggcgggtgcct

SEQ ID NO: 81322 - DNA, 120 bp, synthetic construct
  source 1..120: mol_type = other DNA
taagggaatactattgtggtggtaaactgaggaacggaaagactgatacaggagaacaggaggatatttattttaaggtaagcagccactgagtggattcacatccaaaaagttgagcac

SEQ ID NO: 81323 - DNA, 120 bp, synthetic construct
  source 1..120: mol_type = other DNA
aaccctgtaactattaagggaattaaatttgtaacataatttaaaaaaaaaatcaagaatctggccgggcgtggtggctcatggctgtaatcccagcactttgggaggccaaggcgggct

SEQ ID NO: 81324 - DNA, 120 bp, synthetic construct
  source 1..120: mol_type = other DNA
ggtaaaagacagaatgtgtattagtccgttttcacactgctatgaagacactacctgagactgggtaatttttttttttttttaagatggagtcttgctctgtcgcccaggctggagggc

SEQ ID NO: 81325 - DNA, 120 bp, synthetic construct
  source 1..120: mol_type = other DNA
gaaacatgatccagagatcttgtaaaagctggttcttttttcctcctttcctctcctgctatgtcagttgctttggctggtacagaggctgaccaaatagaaatagaaataagagagcag

SEQ ID NO: 81326 - DNA, 120 bp, synthetic construct
  source 1..120: mol_type = other DNA
ttgagtttttgattgagaataggcagggaaccccgggaacagctcttcctcctcagcaggcgcctggccctggaccaccttcttaaacctctagaacagtgcttctcaaactttagcatc

SEQ ID NO: 81327 - DNA, 120 bp, synthetic construct
  source 1..120: mol_type = other DNA
gaagtgccaacacacctgcaatttactcacctttactttgcatctattttccattgtggcagaaaagctttctctactttttcatatggggcctctgtttgctgttaacagaggtttcca

SEQ ID NO: 81328 - DNA, 120 bp, synthetic construct
  source 1..120: mol_type = other DNA
cgtcgcaatcgccttaggtgatgttgaggcttacattatagagatgggagataagtgaaggcaatccattgggttacgtttttactctctatacgtgcagaaataggatagaaaaaggtg

SEQ ID NO: 81329 - DNA, 120 bp, synthetic construct
  source 1..120: mol_type = other DNA
gctatgatcacgccactgcactccagcttgggtgatggagtgagaccctgtatcaaaatcaaaaagaaaagaaaagaaaaatttataaggtgtgagtgaaacaacacctctagggatgac

SEQ ID NO: 81330 - DNA, 120 bp, synthetic construct
  source 1..120: mol_type = other DNA
gagcctttgccaacactcatgaaataacattgatcccttgtagaactggcagaaaacagcaggttatatggcagacttgtcttttcggttggctgatggaatttctagaacaaaaatagg

SEQ ID NO: 81331 - DNA, 120 bp, synthetic construct
  source 1..120: mol_type = other DNA
ttgaacctgggaggctgaggttgcagtgagccgacatcgggccactgcactccagcctgggtgacagagcgagaatccttcgcaaaaaaaaaaaaaaaaaaaaaaaatatatatatatgt

SEQ ID NO: 81332 - DNA, 120 bp, synthetic construct
  source 1..120: mol_type = other DNA
acctattatcccaacagagaatttcaagagaggagttgaagtgaaaaagggaaaatggggcacatgcacctgagtcttgactttgctgcccatttgctttcattttcagtattctagagc

SEQ ID NO: 81333 - DNA, 120 bp, synthetic construct
  source 1..120: mol_type = other DNA
tagcacgttggaatttcttaggttttaaaactaataacttcctaagtttaagactttaaataaggacgggcttagtggctcacgcctgaaatcccagcactttgagaggccgaggcaggt

SEQ ID NO: 81334 - DNA, 120 bp, synthetic construct
  source 1..120: mol_type = other DNA
ggatctcttatgtcctccagtacattctatctcttccttagagtttttaaaattgtggtctccacactggtgcataacaactcttttttgttgttgttttcgagacagggtcccgctctg

SEQ ID NO: 81335 - DNA, 120 bp, synthetic construct
  source 1..120: mol_type = other DNA
tctactctagttttatccccgccacgcgtctctccccagctgagtgcagcctcagcctatggtgcaaaaatgtttaaagctgagcatacagagaaggaaaagaagaaaaaaaaaatagaa

SEQ ID NO: 81336 - DNA, 120 bp, synthetic construct
  source 1..120: mol_type = other DNA
ttattagcttttgtctgaaatgcaaaagatgagaaagaaaattcccgtttgtttgctccacatacttctcttagaagcctatggaaagccaactttccccctgaagaaactcctcctggc

SEQ ID NO: 81337 - DNA, 120 bp, synthetic construct
  source 1..120: mol_type = other DNA
cgttgttttacaaagttaagaaactaatttaatatacacggcctgaaaattaagcttaatagtaggatgaggaggggtccaactaacctagtgactagagtagttagccatggattccag

SEQ ID NO: 81338 - DNA, 120 bp, synthetic construct
  source 1..120: mol_type = other DNA
gattggcttgggtgggctccatgagaccaggattttcttctggatggcgaacatagtcttaacatcaaatcctgggatataaagccttaatccttatgacatgccataataccatcgagc

SEQ ID NO: 81339 - DNA, 120 bp, synthetic construct
  source 1..120: mol_type = other DNA
gacaggcaaaaaccaaaaagagaagtaaataaaaagaattaatctaatggcttcacccgacttaggcacagttttaaggggcctgacccaggcttggggacctatgtttcttgctgggct

SEQ ID NO: 81340 - DNA, 120 bp, synthetic construct
  source 1..120: mol_type = other DNA
tactagtactagaaggtatttgtacctagcccggtgtggttttatttctgtaaagtcaacttcccacctttctcctggcaagtttcctcaaagacggtggcctgggctgggtttagcacc

SEQ ID NO: 81341 - DNA, 120 bp, synthetic construct
  source 1..120: mol_type = other DNA
atgcgagcatttgacatccatttgccagaagcacttcgtaataaagtctctacggcatgaggagcggtaaaggttaaattttgacctagagttaacttatcagcctcttagactaggctt

SEQ ID NO: 81342 - DNA, 120 bp, synthetic construct
  source 1..120: mol_type = other DNA
tgagtatgccagcttgtaacagtcattgaatatggggattaatctcctgtctagcctgctgactcataggatattgctttacctggacaggcaaggcagtggccaggagttctacaacca

SEQ ID NO: 81343 - DNA, 120 bp, synthetic construct
  source 1..120: mol_type = other DNA
tcttgacctctccgatggccgcagctaagatttttgcttgtcttttgtatgctttatcagctgctgcctgtgctgtttgttttcttttttcaaactctcgattgtcaaaaactttttggg

SEQ ID NO: 81344 - DNA, 120 bp, synthetic construct
  source 1..120: mol_type = other DNA
gcggaagtgcggtctggctcaaaacgaccttggaggcagaattatgaatggcgcatgagcggagccatggtggggagcttctgaccaaactcagccattgatcaatgtggggaaactgat

SEQ ID NO: 81345 - DNA, 120 bp, synthetic construct
  source 1..120: mol_type = other DNA
atggacctaggcgtcctccctctttccctggacctgtagcctaaatacttttggtgtctccacgactcaaaggcaaatagctcaaattcggccttttcttttaagagtttgaggagtgag

SEQ ID NO: 81346 - DNA, 120 bp, synthetic construct
  source 1..120: mol_type = other DNA
ctacaaactggggatccagaggcaggcccctggactcctcagtcgtgcacacattcacaaagagtttataacaatttttgttatttcccgttctaaacaaaggtcccagaagacctgaac

SEQ ID NO: 81347 - DNA, 120 bp, synthetic construct
  source 1..120: mol_type = other DNA
gtttagaaaggggagggggagcttagttgcagcaattctacagaagtaaaagcatgcaaaaaaattaaaaagacaaatggttacaaggaaacaaacagttccaggtgcaggggctctaaa

SEQ ID NO: 81348 - DNA, 120 bp, synthetic construct
  source 1..120: mol_type = other DNA
gattgcaatgcattgtgggctgcaacaaaatgcagcaagacaaccctaaaaaagagacacctaaagcctttgcctaacaatcagtaggcaaacgccgagaaaattgtaaccccatagcac

SEQ ID NO: 81349 - DNA, 120 bp, synthetic construct
  source 1..120: mol_type = other DNA
caacatggtgaaaccccatctctactaaaaatacaaaaaattagccaggcgaggtggcaagtgcctgtatttccagctattcaggaggctgaggcaggagaattgcttgaacccagaagg

SEQ ID NO: 81350 - DNA, 120 bp, synthetic construct
  source 1..120: mol_type = other DNA
tatacccccgcaggagatcaggagcttgggaaaatgttttggtgatctccgttgcctgagtctgtgctctgtgtcatcaagacaatcactgtatgtttccaattccactgtttatgaatt

SEQ ID NO: 81351 - DNA, 120 bp, synthetic construct
  source 1..120: mol_type = other DNA
ataactgattatcattcttgggaacttaaacaaataaatatggaggacgggacgattttccttacagtggtttgccaaatgataaatgtgaaagtgagtgccgggcgcagtggctcacgc

SEQ ID NO: 81352 - DNA, 120 bp, synthetic construct
  source 1..120: mol_type = other DNA
tcaaaaacatgtcggtgttgtgaaagacaagaagattaagaaactgttccaaattaaagggcactaaagagtcaagacaactagattcatatgtgattctgaaatggatcctagcttgga

SEQ ID NO: 81353 - DNA, 120 bp, synthetic construct
  source 1..120: mol_type = other DNA
agctgagatcgcgccactgcactccagcctgggagagagagcgagactacgtcttaaaaaaaaaaaaagaaaaaagaaagaaagtaaaagcagaagtgattagacggacaggaaacagca

SEQ ID NO: 81354 - DNA, 120 bp, synthetic construct
  source 1..120: mol_type = other DNA
gactgtaatcccagcactttggaaggccgaggcgggcggatcacaaagtcaggagattgagaccatcctgaccaacatggtgaaaccccatctctactaaaaaaaaaaaaaaaaaaaaaa

SEQ ID NO: 81355 - DNA, 120 bp, synthetic construct
  source 1..120: mol_type = other DNA
cattccattctcctgatgaatctcctggggcttttgctttttcttctttttgggtttttcaatcgtctcctcacacgctctgtcgcccagtctggagtgcagtagcgcaatcttggctca

SEQ ID NO: 81356 - DNA, 120 bp, synthetic construct
  source 1..120: mol_type = other DNA
tggctcacgcctgtaatcccagcactttgggaggccgaggcgcgtggattacaaggtcaggagttggagaccagcccggccaaaaaaaaaaaaaaaaaaaaaaaaaaaaaaaaaaaaaaa

SEQ ID NO: 81357 - DNA, 120 bp, synthetic construct
  source 1..120: mol_type = other DNA
ttaaagtgttttttaaattctcccttcttacatcttcttttccttctgccttcaagggctgtcacacgaagagtagcgtaggtggataaaaaaacagaatggtcagtaccgcctggggga

SEQ ID NO: 81358 - DNA, 120 bp, synthetic construct
  source 1..120: mol_type = other DNA
ttggttttcagaagtacttataccttgttcctaaggaattcagggtgtccagatttcaacctgcctagcagtgcgaagctctatgagtcgaatatcctaggctttcttccatatcagcaa

SEQ ID NO: 81359 - DNA, 120 bp, synthetic construct
  source 1..120: mol_type = other DNA
aatgattacagtgtcttcctcagagcttagaaacttccaagctctaaggaaaggccttaggtttcaaattgaaaggccaaaatagcttgagatggctccaggtattttggctggaaagag

SEQ ID NO: 81360 - DNA, 120 bp, synthetic construct
  source 1..120: mol_type = other DNA
tgggagttccctggtcatgcaatgcaattgtgatgggattgacagagaaagaacaaaaaaaatttgttttcttttgtttttacctgaggaagtgctcaacacacctgcgatccactcacc

SEQ ID NO: 81361 - DNA, 120 bp, synthetic construct
  source 1..120: mol_type = other DNA
ataaatggaggcaacccattgggttacgtctttactctctatatgtgcagaaataggacagaaaaaggtgcggaggcagaagtaagtctatgttgcttgagaattaggtttgagcactac

SEQ ID NO: 81362 - DNA, 120 bp, synthetic construct
  source 1..120: mol_type = other DNA
ttacctttatcggattttcaacagcaaaaaattggagttctatacacctttctgggattggcatgcaagtgttgtataagggttgtatcagccgagcgctgtgtcttacgcctgtaatcc

SEQ ID NO: 81363 - DNA, 120 bp, synthetic construct
  source 1..120: mol_type = other DNA
actaccactgagccacacctctctcgctacagaaacatcgtgaagatcttttttgacgcattagtcatatttctgagaggtcttcaaaaatatggtaagttggccggatagaaaatccac

SEQ ID NO: 81364 - DNA, 120 bp, synthetic construct
  source 1..120: mol_type = other DNA
gtgagccaagattgtgccgctgcactccagcctgggcagcacagcaagacactgtcgaaaaaaaaaacacaaaataatattgctcttcattggaatcatttaacccaaaaagtggataat

SEQ ID NO: 81365 - DNA, 120 bp, synthetic construct
  source 1..120: mol_type = other DNA
tcaaatgagtacagatttgctgtggtttgaaagtgtcccctccaaagcttaggtgtcaccatgtgataattatcaagacatagggcctttaagaagattaagccatgagggttccttcct

SEQ ID NO: 81366 - DNA, 120 bp, synthetic construct
  source 1..120: mol_type = other DNA
tgattattaggacttggatggacgggatggtacagtgagtctaagcgccacatccctccgtcgcttcctctggatatgagggaagaaaggtactttttttgtccttagggaggaagactc

SEQ ID NO: 81367 - DNA, 120 bp, synthetic construct
  source 1..120: mol_type = other DNA
atgcatagggaagcccacaagtttgcttggcttctgcagatggagagaggtcgcttttctgccttctggatgtttagtaacttattttttatttcctttgttggcatgaaatagagctga

SEQ ID NO: 81368 - DNA, 120 bp, synthetic construct
  source 1..120: mol_type = other DNA
gcgctctaccactgagctataccccctctggactcagggccttcggaaaacgctttggtgacggccaatatgtgagcctgccctctgtgtcaggataatcactatatgtttccaattcca

SEQ ID NO: 81369 - DNA, 120 bp, synthetic construct
  source 1..120: mol_type = other DNA
atagaggcaaattcaaatggcgttgtctatcgcttctcggccttttggctaagatcaagtgtaaaattgcattgtgaaacaataacatactcctacttgaaaaggaaagaactgatctat

SEQ ID NO: 81370 - DNA, 120 bp, synthetic construct
  source 1..120: mol_type = other DNA
aatttgcaaatccccattagaaaattagaaaatctggacaccatcagaatgctgataggtgcaggcaaaattataagtcaatgctaaaagtataggtaaaattttgatgaggatcaggat

SEQ ID NO: 81371 - DNA, 120 bp, synthetic construct
  source 1..120: mol_type = other DNA
tttgttctttcttggttaaataaagaagaaaaagaaagaagagagggaggcagggaaagaaatagaagacataacaatcctaaatatgtatccaccaaacaggagagctgcaacatatgt

SEQ ID NO: 81372 - DNA, 120 bp, synthetic construct
  source 1..120: mol_type = other DNA
attccaagatatcctaaaggagtgctgagagagaaatatacagcactaagtgcatacattagaaaagaaaaaagtcccaaatcagtcctctaagctcttacttgtagaaatcaggtggga

SEQ ID NO: 81373 - DNA, 120 bp, synthetic construct
  source 1..120: mol_type = other DNA
gtgtccgctgtggctgacatgccgctgtttgcctggagagaaccaatagatgccaggaaattaaaaaagaaaaagtatgaaacacaaagaaaatacatgacacgtgggtattaccttcct

SEQ ID NO: 81374 - DNA, 120 bp, synthetic construct
  source 1..120: mol_type = other DNA
gaaaacaaaaataacttaaaaaaaaaaagatgcccactggcatttttctctcttcttggtctttgcgtctctttaatcatagtacaaaatggaaggccgggcgcggtggctcacgcctgt

SEQ ID NO: 81375 - DNA, 120 bp, synthetic construct
  source 1..120: mol_type = other DNA
gctgttctgagcaggagatacttggtactaatgggggatacagattctttagaatactgtgtaggacttgaaacgaaaaacgaaagattagaaaagtgtcagataataaccacaagaagt

SEQ ID NO: 81376 - DNA, 120 bp, synthetic construct
  source 1..120: mol_type = other DNA
agactaaaaagtgtactttgagatatggaaattacaaacctattcgtgatatttgtaggcaacaaacaagttttcttctaactagttctcgaatcttgggacttatcacggtgagactgg

SEQ ID NO: 81377 - DNA, 120 bp, synthetic construct
  source 1..120: mol_type = other DNA
ttgttatacaaggccatttacgtatattattaaaactggacataaaagacggaaacagtaaacatcggggactactagggagtagctgggaaggggaaaggcttgaaaagctaactattg

SEQ ID NO: 81378 - DNA, 120 bp, synthetic construct
  source 1..120: mol_type = other DNA
tgttctgggagattcccagagccagagaacatggagcatggtctcccagtaattaagtttcatgccttgagtgttctcgacagaatgcatttctatgcataatctccttagatctttaca

SEQ ID NO: 81379 - DNA, 120 bp, synthetic construct
  source 1..120: mol_type = other DNA
tgggtgacagagtgagaccctgcctcagaaaaacaaaacaaagcaaaagttatttttccagcagtttaactgcggagctatggagttgactcaaggtacaaacccggttttttctaattg

SEQ ID NO: 81380 - DNA, 120 bp, synthetic construct
  source 1..120: mol_type = other DNA
cggattttctttttctggcttgctcttcaatggcatgtcataaaggaacagaagattagtggacactttaacacggtagtgggcttatagcttccgaaaaaagacatcctgagcgaggta

SEQ ID NO: 81381 - DNA, 120 bp, synthetic construct
  source 1..120: mol_type = other DNA
acatacacatctgtaatcatgagattgtatttatttatttttattttgacagtgtcccactctgccagactggagtgcagtggcaatctcctctcactgcaactttcacctcctggctca

SEQ ID NO: 81382 - DNA, 120 bp, synthetic construct
  source 1..120: mol_type = other DNA
ccccagctgggcgcagcctcagcctatgctgcagaaatgttaaaagttgaacatacagagaggaaaaaaatggaacgtgatgcggaaattaaaacagcagctacatataaatctcaacac

SEQ ID NO: 81383 - DNA, 120 bp, synthetic construct
  source 1..120: mol_type = other DNA
gatgcatacggaagcccacacgcttgcttggctcctgcagatggatagaggtcacttttctgccttctgggtgtttagtaacttatttttttttttgctttgttggcatgaaataaagat

SEQ ID NO: 81384 - DNA, 120 bp, synthetic construct
  source 1..120: mol_type = other DNA
ctaagcacgcgctctaccgctgagctataccccctctggaagacttgccttttagagaatattttgatgactattattgtctgagtctgggctctgtgtcatgataatctttatgttttc

SEQ ID NO: 81385 - DNA, 120 bp, synthetic construct
  source 1..120: mol_type = other DNA
cgagccaagatcgcaccaccgcactccagcctgggcgactaagactctgtctcaaaaaataaaaatagtacattttccctacagatctgtctgctaactgagcctggaagaaatacctta

SEQ ID NO: 81386 - DNA, 120 bp, synthetic construct
  source 1..120: mol_type = other DNA
atggatttcgtcttggggacgctatggctccagttctgacactcaagaaacgatggatggagaggagaacgaggaccaccttcgaaaagagttcgagagggaagcagggacgcggtgggg

SEQ ID NO: 81387 - DNA, 120 bp, synthetic construct
  source 1..120: mol_type = other DNA
tgtaaataaagcagcagctgaggtgtgtgtagaggaagagacaaacgtgaaaatgtagaaagtggatacagaattttttccaaggaggaagaggaatggtctgctcacaacgaggaactc

SEQ ID NO: 81388 - DNA, 120 bp, synthetic construct
  source 1..120: mol_type = other DNA
ggtctggaggcacacacacagccagtcctcagctaagcaggtttcatcagacagtatccctcctggatgctggttatagatattctcactggacaaaagaatcaagtaaggtcatgttag

SEQ ID NO: 81389 - DNA, 120 bp, synthetic construct
  source 1..120: mol_type = other DNA
aataacttaaaaaaaaatagatgccttcagggcgcttttctcccttctcctttgtctttgcgtctcattaatcatagtacaaaatgggagtgaaagcgagccgcctgtgaatgtgcacgc

SEQ ID NO: 81390 - DNA, 120 bp, synthetic construct
  source 1..120: mol_type = other DNA
gataagatttgatggaggaaagccacaatcagaagaaaacctgacagcgatgcacttagcattttttcataagggtccttagctggcgtggtgtcttacgcctgtactcccagctactct

SEQ ID NO: 81391 - DNA, 120 bp, synthetic construct
  source 1..120: mol_type = other DNA
tgagtgatagacttcactgaaggagaaactagagaattgttatagacaaaattgatgtgtattcatgtgtgtttgcctgcctgactgtgtctgtgtgtgtgcatgtaaatgatgggaagg

SEQ ID NO: 81392 - DNA, 120 bp, synthetic construct
  source 1..120: mol_type = other DNA
tatgttcaccacccaggtgatgggattaatctcaccccaaccccagcatcatgcactatacccatgtaacaaacctggacatgtaccccctgaatctaaaataaaagttgaaattattat

SEQ ID NO: 81393 - DNA, 120 bp, synthetic construct
  source 1..120: mol_type = other DNA
cctgccatttgtctaatcaaatgtttccttttttttttctttttttaagacagagtcttgctcttgttgcctagggtggagtgcaatgttgcgatcttggctcactgcaacctccgcttc

SEQ ID NO: 81394 - DNA, 120 bp, synthetic construct
  source 1..120: mol_type = other DNA
tgcttgtgccggggaggcggaggttgcagtgagctgagatcgttccactgcactctagcatgggtaacatagcaagattctgtctcaaaaaaaaaaaaaaaaagaaaaaagaaagaaaga

SEQ ID NO: 81395 - DNA, 120 bp, synthetic construct
  source 1..120: mol_type = other DNA
ggagttgactcaagatacaaaccgaggtgtttctttctttttttttttttgagacggagtgtcgctctgtcacccaggctggattgcagtggtgcgatctcagctcactgcaagctccgc

SEQ ID NO: 81396 - DNA, 120 bp, synthetic construct
  source 1..120: mol_type = other DNA
cccaactgagctatttcggctactctggagctgtcccgttggtcatttcttcaaaatataaaaactgcaatttgtaaggtcagtgtatcttccaacgcctaattcggttgtcttcaatat

SEQ ID NO: 81397 - DNA, 120 bp, synthetic construct
  source 1..120: mol_type = other DNA
ataatataaaatatacatgtatctctctctctatatatatatatagagagagagagagagagaagattccagcgagtgagagagagagagagagagacagggtcccactctgccagcctg

SEQ ID NO: 81398 - DNA, 120 bp, synthetic construct
  source 1..120: mol_type = other DNA
agaaagaaacataaaaagggagaggggtagaggacaaggaaaagcatcctcaagattattaggatttggatggacgggatgttagagtgagtctaagcactcacctctccgtcgcttctt

SEQ ID NO: 81399 - DNA, 120 bp, synthetic construct
  source 1..120: mol_type = other DNA
tgaaatagagctgaaaatagaaggcgatttccttttaacgagatagtattgagatgcttgcagagtatccccgcgtggattctgcttagctctgtgataccagcatcagaaactgtgcaa

SEQ ID NO: 81400 - DNA, 120 bp, synthetic construct
  source 1..120: mol_type = other DNA
acttgcttccatagtgcgtggttcaccttagtgactgctgggactgcttagaaagaataggtggataatcgtaagcagcaaataaccttaagtgaatgaacacgaattacctctctgtat

SEQ ID NO: 81401 - DNA, 120 bp, synthetic construct
  source 1..120: mol_type = other DNA
gcaatgagcaaagataattctatatattgattttcaaataccactccctactaaaaggaaccagcgatactgatagaaagtagctactggtgtcaactacactgactccgggactgtgcc

SEQ ID NO: 81402 - DNA, 120 bp, synthetic construct
  source 1..120: mol_type = other DNA
ttttgtcatatgtacatatacatatatatacacacacacatacacacacacacatatatattccactgttgctgattggttgttgaggtgaggaagaggcaagaccgtgttctgaaataa

SEQ ID NO: 81403 - DNA, 120 bp, synthetic construct
  source 1..120: mol_type = other DNA
ctgtttgcagatgacatgattgtatatttagaaaacctcatcatctcagcccaaaatctccttaagctgataagcaacttcagcaaagtctcaggatacaaaatcaatgtgcaaaaatca

SEQ ID NO: 81404 - DNA, 120 bp, synthetic construct
  source 1..120: mol_type = other DNA
caaaatagacaaatgggatctaattaaaccaaagagcttctgcacagcaaaagaaaccaccatcagagcgaacaggcaacctacagaatgggagaaaatttttgcaacctacccatctga

SEQ ID NO: 81405 - DNA, 120 bp, synthetic construct
  source 1..120: mol_type = other DNA
tgagttcatgtcctttgtagggacatggatgaagctgggaaccatcattctgaacaaactatcacaaggacagaaaaccaaacactgcacgttctcactcataggtgggaattgaacaat

SEQ ID NO: 81406 - DNA, 120 bp, synthetic construct
  source 1..120: mol_type = other DNA
gagcggagatggcgccactgcactccagccttggggacagagtgagactctgtctcaaaaaacaaacaaacaaaaacccaaaaaccctaaaaaggtatttctccaatctaaagatgtaaa

SEQ ID NO: 81407 - DNA, 120 bp, synthetic construct
  source 1..120: mol_type = other DNA
aaaaaaatgaacttcttcctagctgatcttcaaccctggaattcacactggttgtcaccatggccttgaaactttcacaaaagacccagaaagtctcatttcctggctagtttcccagta

SEQ ID NO: 81408 - DNA, 120 bp, synthetic construct
  source 1..120: mol_type = other DNA
tatctagactgtttgatggtgtgaaagttgtttccagagtcatcatgtaattattctctaacttgcacctgaagaaaccaagataccagttagattaccagaagttccccacaaggaggt

SEQ ID NO: 81409 - DNA, 120 bp, synthetic construct
  source 1..120: mol_type = other DNA
aagcaattctcctgcctcagcctcccaagtagcagtgattacaggtggtcgccaccatgcccagctgatttttgaaagaggtccttaatttctctgtggagaaaaatttttttaaaatat

SEQ ID NO: 81410 - DNA, 120 bp, synthetic construct
  source 1..120: mol_type = other DNA
aaatgtttcagagcaaggatacaaacttcccagtttacattagaagttagcacagcctttattgcaaaacttgcgaaaaagaaaataaaggccgggagtggtggctcatgcctgtaatcc

SEQ ID NO: 81411 - DNA, 120 bp, synthetic construct
  source 1..120: mol_type = other DNA
tttcccagtttggaaggctttgcgtttgtcagggctcagcctgcgatggatcatggctaaacaaggaccagaaaaaaaataaaggaaatcggctgggagcggtggtggcttactcctgta

SEQ ID NO: 81412 - DNA, 120 bp, synthetic construct
  source 1..120: mol_type = other DNA
ttttatttagttatttctgatatctcaaatttaggttttgcgtccctctttgctgacagctgagcaaaccgcattctacaccgaaggccctctattgatggccctgggatttttctgctc

SEQ ID NO: 81413 - DNA, 120 bp, synthetic construct
  source 1..120: mol_type = other DNA
atgtgacatagaatctgtgagatagagctaaagcatttatcagaaggaaatttatttcctcacatacctatatcgataacaaaaaataacaaatgaatcaaacacagctcaagatgctac

SEQ ID NO: 81414 - DNA, 120 bp, synthetic construct
  source 1..120: mol_type = other DNA
cagaaagacaaatttcacatcttttcagtcatatgtgggagtttaaaaagttgatctcatggaggtagagagtagaatcatagataccagggtcagggaagggtgtgtgcattggagctg

SEQ ID NO: 81415 - DNA, 120 bp, synthetic construct
  source 1..120: mol_type = other DNA
gaattgcttgaatcccaggaggcagaggttgcagtgagccaagatgtcaccacagcactccagcctgggtgagagagcaaaactccatctcaaataataataataataataaatactaaa

SEQ ID NO: 81416 - DNA, 120 bp, synthetic construct
  source 1..120: mol_type = other DNA
acaaagagaaacatgcaattgttaccacctctagctccagagtcctagctcagagatttttcctatagaaagaaatgagccagccgggcatggtggctcatgtctgtaatcccagcactt

SEQ ID NO: 81417 - DNA, 120 bp, synthetic construct
  source 1..120: mol_type = other DNA
atggcaataatcaaatatcatctcaattgagatacagaaaggattcaacaaaattcaacacacttttatgaaaaaagcactcagcggccaggcgcgatggctcacgcctgtaatcccagc

SEQ ID NO: 81418 - DNA, 120 bp, synthetic construct
  source 1..120: mol_type = other DNA
ggaaggaaagaacgaaagaaagaaacaaaagtcatccaaactggaaaagaaaactaaaattatctgtttacagatgacatgatcttatatgtggaaaccctgaagaccttcccacacaca

SEQ ID NO: 81419 - DNA, 120 bp, synthetic construct
  source 1..120: mol_type = other DNA
gtatacagactaatggaacagagagcccagaaataaatccttgcatatatggatgaataattttgacaatgatgccaagactacacaatggagaaaggacagagccttcagtaaacagta

SEQ ID NO: 81420 - DNA, 120 bp, synthetic construct
  source 1..120: mol_type = other DNA
gttataggttttcatccacagttactggttcataacttccatctcccttgttacagtcttttgttataatgttgtgtgtgttaggcctcaggggcaggcctcaaggaacagaatctacct

SEQ ID NO: 81421 - DNA, 120 bp, synthetic construct
  source 1..120: mol_type = other DNA
ttcccatataatccagcaaacctacttctgcaggggtttcaaaagaattcaaaagcattcaaagtaggatcctaaagagataactgtagcattattcacactagccaagaggtaaaagca

SEQ ID NO: 81422 - DNA, 120 bp, synthetic construct
  source 1..120: mol_type = other DNA
agtaaatttatagctgggaatgtttatgttaggaaagacaaaagatcttaaatcaatagcccttacattgtaagacactgaaaaaagacgagcaaactaaagctaacgcaacaggaagga

SEQ ID NO: 81423 - DNA, 120 bp, synthetic construct
  source 1..120: mol_type = other DNA
tgagtaggcaaacaaagtggcccagaagctcttattgggtggagtccaccacagctcaaggaggcctgcctgcctttgtagactccacctctggggggcagggcatagctgaacaaaagg

SEQ ID NO: 81424 - DNA, 120 bp, synthetic construct
  source 1..120: mol_type = other DNA
agaaagggtatcagtgattgaagatcaaattaatgaaacgaagcaagaagagaatttagagaaaaaagggtaaaaagaagccgggcgcggtggctcacgcctgtaatcccagcattttgg

SEQ ID NO: 81425 - DNA, 120 bp, synthetic construct
  source 1..120: mol_type = other DNA
cgggttacccgcaaagggaatcccatcagactaacagcagatctcttggcagaaactctacaagccagaagagagtgggggccaatatttatcattcttaaagaaaagaattttcaacct

SEQ ID NO: 81426 - DNA, 120 bp, synthetic construct
  source 1..120: mol_type = other DNA
ggattaagaacctcattcaaaactgcacaactacatggaaactgaacaacttactcctgaatgactactgggtaaataacaaaatgaaggcagaaataaagatgttctttgaaaccaatg

SEQ ID NO: 81427 - DNA, 120 bp, synthetic construct
  source 1..120: mol_type = other DNA
cttatccaccaagaacaagttggcttcatccctgggatacaaggcttgttcaacatatgaaaatcaataaatgtaatccatcacataaacagaaccaaagccaaaaaccatgtgattatc

SEQ ID NO: 81428 - DNA, 120 bp, synthetic construct
  source 1..120: mol_type = other DNA
acagagatatagaccaatggaacagaatagagccctcagaaataataccacacgtctacaaccatttgatctttgacaaacctgacaaaaacaagaaatggggaaaggattccctattta

SEQ ID NO: 81429 - DNA, 120 bp, synthetic construct
  source 1..120: mol_type = other DNA
atccatcaatgatagactggattaggaaaatgtggcacatatacaccatggaatactatgcagccataaaaaaggatgagttcatgtcctttgtagggacatggatgaagctggaaacca

SEQ ID NO: 81430 - DNA, 120 bp, synthetic construct
  source 1..120: mol_type = other DNA
aaagtctcaaccaacaccatagggagcactggattacatatggcctatactcctgtggtgccaaaacgacaaatctttttactccactgcaatcaattgttgaaggtgcatcatcccagg

SEQ ID NO: 81431 - DNA, 120 bp, synthetic construct
  source 1..120: mol_type = other DNA
ctttctttctctctttctttctctctcttttctttcttttctttttttgagtctgttgtttctgttgattttcacggagacttgtttgttcatgtgtatgcacgtttgtatgctgggttt

SEQ ID NO: 81432 - DNA, 120 bp, synthetic construct
  source 1..120: mol_type = other DNA
ttgggtccttgtggaggaattgcaacctagtttaatgggtagacaagattgaaaacctaacttaggaatatgtgcctataacaatagctgagtcttggccaatcccagtggctgtaattc

SEQ ID NO: 81433 - DNA, 120 bp, synthetic construct
  source 1..120: mol_type = other DNA
atccagtaccttatatctgtgctacaccctcatactgtagactttgtatgactgtacgatgctcttctttgcatgactatacaaggcccttcaaaacccgagaaaagtgttcctattctc

SEQ ID NO: 81434 - DNA, 120 bp, synthetic construct
  source 1..120: mol_type = other DNA
gacggaaaggtctttgtgtgaagcacaaatgtagttccaatttgagcatgacatcttgttgaaggtttaagaattaacctgtatactgagagtacatgtggcttcaggttgttcacatac

SEQ ID NO: 81435 - DNA, 120 bp, synthetic construct
  source 1..120: mol_type = other DNA
tgctgtccacctggtaggtatgacatgccacgtgtggctattgagcattgaaatgggaatagtacaacagctgttaccaaaacctaataacaagtatcattcaaagcttgcagattttgt

SEQ ID NO: 81436 - DNA, 120 bp, synthetic construct
  source 1..120: mol_type = other DNA
tttgcatgcccgtcttgataaatggttctgtctaggcagtgggcaagctgaactcattgggtggttacacattttcaaattttcagagctttccttagactaaaactttaccatcagtcc

SEQ ID NO: 81437 - DNA, 120 bp, synthetic construct
  source 1..120: mol_type = other DNA
cagagaaaggcagtttcttaacagatagaaaacacgtgaaactggtggtcggtcacttcccaataagatctcaggagtggggagaaataacacaagatttaggaactatgccaacgttta

SEQ ID NO: 81438 - DNA, 120 bp, synthetic construct
  source 1..120: mol_type = other DNA
ttgcacgtgaaccgagatggtgccattgcactctgcactccagcctgggagacagagtgagactcttgtctccaaaaaaaaaaaaaaaaaaagcctacaaaaagcttacaaagtctaaaa

SEQ ID NO: 81439 - DNA, 120 bp, synthetic construct
  source 1..120: mol_type = other DNA
tgattctgcttggaaaggttgccaggaaaccgcgagcataacgcagaaagataaaacgaaagccctaaacgccgccgtgggaatttaagtccaaggggcagagaaaacaggaggggaatt

SEQ ID NO: 81440 - DNA, 120 bp, synthetic construct
  source 1..120: mol_type = other DNA
gtgataagaccgtcaattcagaggggagaaaatgtacttggaggaaataaacgaagacacagagatgccaaagagaacctgaataaacaggctttgctaagttcaccccagtttataacc

SEQ ID NO: 81441 - DNA, 120 bp, synthetic construct
  source 1..120: mol_type = other DNA
tggtccattttacagagaactgactggtctgttttacagagagctgattggtccatcttcacagagtgctcattggcgcgtttacaatccctgagctagacacaaaagttctccaagtcc

SEQ ID NO: 81442 - DNA, 120 bp, synthetic construct
  source 1..120: mol_type = other DNA
agcaagcgaaggctgtgagggctgccagcaagctgtcacctctcagtatggcggctggctgttttagcaccatgtcgtttattgtcatgcatttgtaggattatgaaatgcttcctgaat

SEQ ID NO: 81443 - DNA, 120 bp, synthetic construct
  source 1..120: mol_type = other DNA
gatgctgagtgctttcagagtctccagaaaagggcccaggaattattatggggtgacagatgtcacagctagatcgtcctcacatctatggaatattgtgttatttaatatttcccagtt

SEQ ID NO: 81444 - DNA, 120 bp, synthetic construct
  source 1..120: mol_type = other DNA
atatcattattattttatagggagaggtatctgactggttgttgactgcttctggagttgcagctcagtctagaaagacattaccagctgccatgagtagcaggaacaacctatgggtat

SEQ ID NO: 81445 - DNA, 120 bp, synthetic construct
  source 1..120: mol_type = other DNA
tacaggccttgccaaccatttataaggagtgatgccatgtgtgctagtgggtgactcatttaaagtttgtatggctttatggagattcttagtccaggaacttaaagagccaacctgaaa

SEQ ID NO: 81446 - DNA, 120 bp, synthetic construct
  source 1..120: mol_type = other DNA
ttttctatccctccttcaggctgtccaaaacagtttgtaggatagtctccaaatctgtaagagactctagggtagcatgttatcattaatatagtgaaacagggagaccaaggcaggcaa

SEQ ID NO: 81447 - DNA, 120 bp, synthetic construct
  source 1..120: mol_type = other DNA
tatacctcataaaaacagcgtggacccaaagaatgaccagttggaaaatttattgcgcatagtgaaaaaaacaacgctttcacagtgcagaagagacaacccagcgggttgctaatgctg

SEQ ID NO: 81448 - DNA, 120 bp, synthetic construct
  source 1..120: mol_type = other DNA
ggaggtgctgagagcaagcgagggctctgaggactgccagcacgctgtcacctcagtgtgaccaatgccctatattataaatgccattttttgaattggaaatgatccagacattcaaca

SEQ ID NO: 81449 - DNA, 120 bp, synthetic construct
  source 1..120: mol_type = other DNA
gagaatcacttgaacttgggagatggaggttgcactgagccgagatctcaccgttgcactccagcttgggcaacaagagtgaaactccatctcaaaaaaaaaaaaaaggaaaaaaaaaaa

SEQ ID NO: 81450 - DNA, 120 bp, synthetic construct
  source 1..120: mol_type = other DNA
acccgggaggcggaggctgtagtgagctgcactccagcctgggtgacagagtgagaatctgtctctaaataaataaatagcatattcaaaataagcagaaacaaaaataaagagagaaat

SEQ ID NO: 81451 - DNA, 120 bp, synthetic construct
  source 1..120: mol_type = other DNA
ttacaggcatgtgccaccgcacccagcctctaaactgcttttaagcttattttctggctatttgtctactgtgtttgagtgatgagactgtttttcttagtaggttcctagatactctcc

SEQ ID NO: 81452 - DNA, 120 bp, synthetic construct
  source 1..120: mol_type = other DNA
tatgaatctaagtagcattttactcccaggatctgaagttcaagttctgatccctgtgcacccaaattacgtctttctcctccaggtagaaagctatcaaaatccagctttttcctgggc

SEQ ID NO: 81453 - DNA, 120 bp, synthetic construct
  source 1..120: mol_type = other DNA
aaggggatgaagctgtttggttttggacaagaatttaaaatacttaaaggcaacttcatggaaatgtctgataaacatgatctgtggatcggccattgcactccagccttggtgacagag

SEQ ID NO: 81454 - DNA, 120 bp, synthetic construct
  source 1..120: mol_type = other DNA
gggagagagagttgcacatattatacacaatatgtatgtgtattgcatcaaacacttataatgtgtcttgtacaggttccagtttccagttatttaaagggattaagaacttcaagactg

SEQ ID NO: 81455 - DNA, 120 bp, synthetic construct
  source 1..120: mol_type = other DNA
ctgtattggaatgacaagaagtacgatattattccaaatcttgtactcatgctagttcatatcctatgccactctgtggtctcttcctcatcaatgtcccttcctcatcgatgtccctgg

SEQ ID NO: 81456 - DNA, 120 bp, synthetic construct
  source 1..120: mol_type = other DNA
atttcaaacgaggaactttttattaagctggatctttgaagtcagcacttaaaaagcccccttccccaccatgttacattccctttgtgtgctatataagcatctgtctttggcggttgg

SEQ ID NO: 81457 - DNA, 120 bp, synthetic construct
  source 1..120: mol_type = other DNA
atcgtcatcacttaagcctaaaggcagaaaccaccaaaagctttaatccaaactgagctgtcctctagtgcaacctgtattagagtagtcatgataggttgaatttttgcaagtgggcca

SEQ ID NO: 81458 - DNA, 120 bp, synthetic construct
  source 1..120: mol_type = other DNA
gtaacttaaactacagtcatgtgtcacaacacctggctaatttttaattttttgtagagatgtggggggcagcatggactcaccatgttactcaagctggttttgaactcctggtctcaa

SEQ ID NO: 81459 - DNA, 120 bp, synthetic construct
  source 1..120: mol_type = other DNA
atgcacaaaagtttcttttgattaaattccatttatcatctatttgttgtctttcagatggagctgtcacccaggctggaatgcagtggcatgatctaagctcactgcagcctctacctc

SEQ ID NO: 81460 - DNA, 120 bp, synthetic construct
  source 1..120: mol_type = other DNA
atatacaatcctctagctagccataaaagttgtccaagtccgcacccgcctcaagagcccagctggctttgcctagtggatcccgcactggggccacgggcggagctgcccgccagtccc

SEQ ID NO: 81461 - DNA, 120 bp, synthetic construct
  source 1..120: mol_type = other DNA
ttctccacattgtggaaggtttgttttttttgctgtttgcaatgattcctgctgctgctcggtttttgcatgcgcattgcctttgtgggctgtgataattgctgtgaaagtctgcagttt

SEQ ID NO: 81462 - DNA, 120 bp, synthetic construct
  source 1..120: mol_type = other DNA
gtttccctttaatgaaaagctgattgcttttttgaagagaacttcgtattttttatctcagagtttccttttaaaagaagcaggccaggcgcggtggctcacgcctgtaatcccagcact

SEQ ID NO: 81463 - DNA, 120 bp, synthetic construct
  source 1..120: mol_type = other DNA
aatcactatgccagctacatgcatacaaagatgaggaagaaccatctggttccctttctctcaatttgtaccaacatcactagatctgtgtgacagtctgggaataggactacacatagt

SEQ ID NO: 81464 - DNA, 120 bp, synthetic construct
  source 1..120: mol_type = other DNA
taatgaagtgtgagctctcaatgcagacttccccaaatactttacttttataagacttctctcttgtgtgcagtctctcatacgatgtcaggcctccattgtgactaaagctttctccac

SEQ ID NO: 81465 - DNA, 120 bp, synthetic construct
  source 1..120: mol_type = other DNA
ggcaacatcatgagaccccatctctaaaaaaaaaaaaaaaaaaaaaaaaaaaagctgctcatggtggtgtgtacctgtagtcccagctactcaggaggctgagatgggaggattgcttga

SEQ ID NO: 81466 - DNA, 120 bp, synthetic construct
  source 1..120: mol_type = other DNA
ctttcagacagttgagaacagtttggtctagctggaacacagattgaatatgaaggcgaaaggagataaagctgaaaatgtaagctacatcatgaacagtcttgttgccaggataatgaa

SEQ ID NO: 81467 - DNA, 120 bp, synthetic construct
  source 1..120: mol_type = other DNA
attgattgattgattgattgattgatttagacaaaaggtctctgttgcctaggctggagtgcactggtgtgatctcggctcacagcaacttacacctcccgggtttaagtgattctccca

SEQ ID NO: 81468 - DNA, 120 bp, synthetic construct
  source 1..120: mol_type = other DNA
tgtacagataaccgcagtgacttatctgatagtcctttaacagacaggagtactagtgtagttactttgtttttatgtaactaggtaggtcttatgtaatgtcttatttgtctgaatgaa

SEQ ID NO: 81469 - DNA, 120 bp, synthetic construct
  source 1..120: mol_type = other DNA
cccagcaggacagtcaagaaaattgaaactggaaagtaccttggccttttaccccaaatctacacaattttacacagtggcagtgctttttcctctaacgctataatagaattctgcagg

SEQ ID NO: 81470 - DNA, 120 bp, synthetic construct
  source 1..120: mol_type = other DNA
agtgatccacctgcctcggcctcccaaagtgctgggattacaggcgtgagccaccactccgggcctaccatagggttttatttatttatttatttatttatttatttatttatttattaa

SEQ ID NO: 81471 - DNA, 120 bp, synthetic construct
  source 1..120: mol_type = other DNA
gattatctcgcactgcagcacagagaccaatcgctagtaacctctgcctttaattaggcgttttttggcccaaatctcgcggcttcgtaaaaatatcgcgatgcttccgcttttaatgtt

SEQ ID NO: 81472 - DNA, 120 bp, synthetic construct
  source 1..120: mol_type = other DNA
actggatcaagtctcttacgggccttataactgttatcgccatctcgaaaaacgtgtgcgggttttttttttttttttttttgctcccagcctgcccagatttcaggaaggaaagaagat

SEQ ID NO: 81473 - DNA, 120 bp, synthetic construct
  source 1..120: mol_type = other DNA
tacagtgaacactggttccccagtctccctccaatacatgagatttgtatattttctttcgattggaaggaaattgtccaggaagtgattcccaacatggcaactgtaatcttaccctaa

SEQ ID NO: 81474 - DNA, 120 bp, synthetic construct
  source 1..120: mol_type = other DNA
aggttcaagtgattctcgtctcagcctcccgagtagctggaactacacgcatgagccatcacactcagctaatttttttttgtatttttagtagaaacagggtttcaccatgttggtcag

SEQ ID NO: 81475 - DNA, 120 bp, synthetic construct
  source 1..120: mol_type = other DNA
tcactgcaacctccgcctcctgggttccagcaattctcctgtctcagcctcccgagtcgggattacagaaatgcaccaccacacctggctaatttttgtatttttagtagagatggggtt

SEQ ID NO: 81476 - DNA, 120 bp, synthetic construct
  source 1..120: mol_type = other DNA
aattcaacagataagccagatctaagaaatgtatcttttctccaacgggaaaaaggaaatgtaatggggcaatactgtcaaatggaagtactatttggcctggcatggtggcccatgcct

SEQ ID NO: 81477 - DNA, 120 bp, synthetic construct
  source 1..120: mol_type = other DNA
aagaagttattgaaaccgtaatgtataattaacaattgcagatgttctgaggaaagagaggggagtcaaaggaatcggagtgggccccatatgtctttagtgactcaattcctgactcgg

SEQ ID NO: 81478 - DNA, 120 bp, synthetic construct
  source 1..120: mol_type = other DNA
ggcacaatactacaaaaaggacttgagaaaatactttcctagtaaaattacaggattaaccaatataagaactgtaggcaggccgggcgcggttgctcacgcctgtaatcccagcacttt

SEQ ID NO: 81479 - DNA, 120 bp, synthetic construct
  source 1..120: mol_type = other DNA
ggatggagttgggcagaatattatcctggatgatatgcacccagcactagaatacacctttcattagaatgaagagaacagacaaagccctcagaaaagatacaaaggcagagacattga

SEQ ID NO: 81480 - DNA, 120 bp, synthetic construct
  source 1..120: mol_type = other DNA
aactcagactgaagtagggccggacaggcccacaaaaggtagcatgagagaaagtgaaggtgtgacacctctctgtcacgttgtagaaggagacctcaccagcatcatagtccaagaaaa

SEQ ID NO: 81481 - DNA, 120 bp, synthetic construct
  source 1..120: mol_type = other DNA
atgagccactgtgcctggcagatacgctgaattgaggttttcttacacgctcatcatcccttattctgaaaattccaggggccccaagtttcatagaattcagaatattacaggttttag

SEQ ID NO: 81482 - DNA, 120 bp, synthetic construct
  source 1..120: mol_type = other DNA
ggaggatcacttgagcccaggagtatgaggctgcagcaagctatcaccatgccactgcacaccagcctgggcaacagagaacctgcctctaaaatgaataataaaaaatttaaaaaatta

SEQ ID NO: 81483 - DNA, 120 bp, synthetic construct
  source 1..120: mol_type = other DNA
ctacttttggggaactgcggtttccaccctataatccttctttaacacctgagattgattttaccctatggcttcagctctgagacatttcaggaggcaaagatactgttaacacataga

SEQ ID NO: 81484 - DNA, 120 bp, synthetic construct
  source 1..120: mol_type = other DNA
agaaaagaagagccagatcaaggaaagtcatgcctgaactaaccacttctggtattatccactgtattgagtggagtttctccccatttgtcttgcttgtagaggacatgtatctgctag

SEQ ID NO: 81485 - DNA, 120 bp, synthetic construct
  source 1..120: mol_type = other DNA
aggctggccaatgggtatcacccttatcccacgtttcccactttcagtgcagatgttcttttttccaagcaactttacatcaaaagcccagtaggtagataaatttaccttggattttct

SEQ ID NO: 81486 - DNA, 120 bp, synthetic construct
  source 1..120: mol_type = other DNA
gaggctgactttgccagaaagcactagattccatgacagtccttgatatttatggtgggcaattaacccgaattctcaggttcccaaatatggaaagaatgacatgttcagatagaaagg

SEQ ID NO: 81487 - DNA, 120 bp, synthetic construct
  source 1..120: mol_type = other DNA
ggctctgtcgcccaggctagagtgcagtggcatgatctcagctcactgcaacctccgccacaagagtttgagcaattgtcctgcctcaacctcccaagtagctgggattacaggcatgca

SEQ ID NO: 81488 - DNA, 120 bp, synthetic construct
  source 1..120: mol_type = other DNA
tgatggaacatagagaaatagcaagagtaagaataagagccagaatccaggtggctcatcagtaattatgtaaatgcaggccagtcacacctttcttaggctttatttcccccattacag

SEQ ID NO: 81489 - DNA, 120 bp, synthetic construct
  source 1..120: mol_type = other DNA
atttcaaatacacggaaaagctgttagtacaaagaactccagtatactttttttttttttttttttgagacggagtctcgctctgtgtagcccaggctggagtgcaatggcgcgatcttg

SEQ ID NO: 81490 - DNA, 120 bp, synthetic construct
  source 1..120: mol_type = other DNA
ccatcacatcgttaaatatttgccttttctttatgcaagaagcattgcaattattctcctctagtcactttggactataaaataggccaggcgcagtggctcacgcctgtaatcccagca

SEQ ID NO: 81491 - DNA, 120 bp, synthetic construct; identical to SEQ ID NO: 27552
  source 1..120: mol_type = other DNA

SEQ ID NO: 81492 - DNA, 120 bp, synthetic construct; identical to SEQ ID NO: 27553
  source 1..120: mol_type = other DNA

SEQ ID NO: 81493 - DNA, 120 bp, synthetic construct
  source 1..120: mol_type = other DNA
agcatggctcctgcacaaggataacacacaaatttgtgaaccattttctactttttgtgttcaatgttcacagcagcactattgacaatagccaaaaggtgcaaacaaccaaaatgccca

SEQ ID NO: 81494 - DNA, 120 bp, synthetic construct
  source 1..120: mol_type = other DNA
taaaatggtgaaatttaggttacgtatattttacaattaaaaaaatgaagaaggctggaaggctggatgtggtggctcacacctgtaatcctagcactttgggaggctgaggcggatgga

SEQ ID NO: 81495 - DNA, 120 bp, synthetic construct
  source 1..120: mol_type = other DNA
actctgaaacaatcatttcttcccatacaacagaagactctctgacactaattcctggcatatgtactttagttctcatttccacctgccttctcaggaaccgcacattgctgatcagta

SEQ ID NO: 81496 - DNA, 120 bp, synthetic construct
  source 1..120: mol_type = other DNA
aaaaaagaaagaaagaaatacatttttctgatttttaccatttaaaaatgtaaactggcctgacgctgtggctcacacttgtaatcccaacactttgggaggccgaggagggcagatcac

SEQ ID NO: 81497 - DNA, 120 bp, synthetic construct
  source 1..120: mol_type = other DNA
ctaccaaggttaaatcacaggactgctcaggtaacctaaccactcctgctcaagtgctcattgttttgtggctatagtaatacattaaaactacaggatactggagtgaggagagtcttt

SEQ ID NO: 81498 - DNA, 120 bp, synthetic construct
  source 1..120: mol_type = other DNA
taaagatagggtgacagcctgcaatgaaagaaactggtaccatcttcacagaagcaatttcacacaatgttcatgtgatgaacaagaattcaccacataggcaatgagcgggaagccttt

SEQ ID NO: 81499 - DNA, 120 bp, synthetic construct
  source 1..120: mol_type = other DNA
acaaatccactattagcaattgtctgcagaatggtaccaacgcaagctaactgtatccaataattttacctatctcagctttgccaaggatcaaccctggtctacgcagttagcaggtta

SEQ ID NO: 81500 - DNA, 120 bp, synthetic construct
  source 1..120: mol_type = other DNA
gaactatgttgtattgtagctcttccatataggtacactgtgaaagtgacttatttccctcatgtgtgaaatgggcaaacaccatcttcccaacctactcaagagttctcaccagagtga

SEQ ID NO: 81501 - DNA, 120 bp, synthetic construct
  source 1..120: mol_type = other DNA
agccattttctaggcggaaaaaaggaagcccctttggctctctcctccctttgtccgactcgcgctcccgccctcccggatccgcgccctcaccttgaagccctccaccgcctcctcgag

SEQ ID NO: 81502 - DNA, 120 bp, synthetic construct
  source 1..120: mol_type = other DNA
tcctcttggaaaggccgaggaggctccgccactctcctttggactggtcgcgctgaagctctatcctagggcactggtcgcaagagcagatggtgccacacgctccgggcctacaaactt

SEQ ID NO: 81503 - DNA, 120 bp, synthetic construct
  source 1..120: mol_type = other DNA
tattgagtagcaactaaaaattgcttgctcctttctgaagtatagagaaactaagaatcctgcggtgacccagggtcttggagtcccacaatactcattgtcttatcatccagtagacct

SEQ ID NO: 81504 - DNA, 120 bp, synthetic construct
  source 1..120: mol_type = other DNA
ggttgcagggagccgagatcaggccactgcactccagcctgggcaacagagcaagactccgtttcaaaaaagaaaacaaaaggaaaaaattttaaaaaggtagaacaaaatagatgagtt

SEQ ID NO: 81505 - DNA, 120 bp, synthetic construct
  source 1..120: mol_type = other DNA
cgcgccactgcactccagcctgggcgacagagcgagactccgtctcaaaaaaagagtattaataaaatatactttttttttttttgagacagagtctcgctctgtcgcccaggctggagt

SEQ ID NO: 81506 - DNA, 120 bp, synthetic construct
  source 1..120: mol_type = other DNA
accttggctgacagaagaatgcgggttaagcttcctgctaccttagcgttatcaatcagtccaagttccattgtataaaatccctagcaagtctttgtttctttgtagtcagcttctctt

SEQ ID NO: 81507 - DNA, 120 bp, synthetic construct
  source 1..120: mol_type = other DNA
ttgcaggttggtgctatacattcaataaatgattgtggaataactggctagctacttgggagaaaaaagatctcatctcacttcttatactgaactatattattgatcaatgaaattttt

SEQ ID NO: 81508 - DNA, 120 bp, synthetic construct
  source 1..120: mol_type = other DNA
aaccttctactctgcttctctcccatctggacagagatgtttgattatacaaggattgccattacagcattgtttggatttgtaaaatactgggaccaacgtcaatatgctccaacaggg

SEQ ID NO: 81509 - DNA, 120 bp, synthetic construct
  source 1..120: mol_type = other DNA
cccagctatttttttttttttgtatttttagtaaacacgggttttcaccatattggccaggctagtctccaactcttgacctcaaatgatccacctacctcgacttcccaaagtgctgga

SEQ ID NO: 81510 - DNA, 120 bp, synthetic construct
  source 1..120: mol_type = other DNA
tgtgccagttggcttaggtttggttttactacctattcctgaaccaattactatggcaaggggactgagataatgctcactggtctatgcatcaagacccactgaaaaatgtaattgtca

SEQ ID NO: 81511 - DNA, 120 bp, synthetic construct
  source 1..120: mol_type = other DNA
gtgaaactctgtctcaaaaaacaaacaaacaaacaacaacaacaacagaaaacagggtgcagcccactcctccagccccttgaatctggtgggctggcctatgagtactgtgactaacac

SEQ ID NO: 81512 - DNA, 120 bp, synthetic construct
  source 1..120: mol_type = other DNA
aaaaaaaattatcttcaaatatagtcacattgggggttaaaattccaaaacatgagttgggagctgtgtgtatgtggtgggcagagtggacacaactcagtccatagtgatgtccaccta

SEQ ID NO: 81513 - DNA, 120 bp, synthetic construct
  source 1..120: mol_type = other DNA
aagttgccgtgagccaagattgtgtcactgtactccagccttggcaacacggagagagactccatctcaaaacaaaacaaaacaaaaaaagagaaatacctgagactgggtaatttataa

SEQ ID NO: 81514 - DNA, 120 bp, synthetic construct
  source 1..120: mol_type = other DNA
ctcctatcatgagcacttattggggttttaaattgttgtctgttatgaataaagctgccctaaacgttctggtggtatatgtctgttcatggacaaatgccctcatttctaggagtggaa

SEQ ID NO: 81515 - DNA, 120 bp, synthetic construct
  source 1..120: mol_type = other DNA
tgcctcagcctcccaaagtgctgggattacaggcgtgagccaccacgcccggcctccatttttcattttcttaatgatgttttttgatgaatagaagtttccagttttgatgaattttat

SEQ ID NO: 81516 - DNA, 120 bp, synthetic construct
  source 1..120: mol_type = other DNA
tcaagtgatccgcccacctcagcctcccaaagtgctgggattacaagtgtgagccaccacacaaggcctacttgttctttttaactaattataacatttacagcaactcatatgttgaag

SEQ ID NO: 81517 - DNA, 120 bp, synthetic construct
  source 1..120: mol_type = other DNA
tcaaaaccagctttctgacactattttctcgtcaaatgcatgaggcagtatgtcagttccattttcccccattggaaacaaccctcgtttagccctcttttttctattccaccgtagact

SEQ ID NO: 81518 - DNA, 120 bp, synthetic construct
  source 1..120: mol_type = other DNA
aggcagaggttgtggtgagccgagattgcatcattgcactccagcctgggcaacaagcgccaaaccccgtctcaagaaaaaaaaaaaagaaatttttaaaaatccagccatcataatatt

SEQ ID NO: 81519 - DNA, 120 bp, synthetic construct
  source 1..120: mol_type = other DNA
tgagctctttgattagtttgctaagcagcatctcgggaacagcccccgtgctatgtgttctttcttgtcatggatatgtgttttttcttgtcatgctatgtgttctttcttgttcaaggc

SEQ ID NO: 81520 - DNA, 120 bp, synthetic construct
  source 1..120: mol_type = other DNA
acaaaaaatggatactcgatccacctggggtctctcttgtcttctacttactaattgatttaaagtaattttgcaggggcagtttttttgttttggatggccaaacgcagggatgggagg

SEQ ID NO: 81521 - DNA, 120 bp, synthetic construct
  source 1..120: mol_type = other DNA
ccagctcccaggtggacatcttagcgtccagatgacccaacatataggtgtcctttagtatggatgaccaaactaggatgttatagtgctggatgtagtaattcattttttcaaatctta

SEQ ID NO: 81522 - DNA, 120 bp, synthetic construct
  source 1..120: mol_type = other DNA
gtctggagttaagaaggttgtactttttccttaggattgcccttggttggttcacaaatttcgcaaagtgaatgaaaacacatgaaggccactgaagggaataactaggggacgagatgt

SEQ ID NO: 81523 - DNA, 120 bp, synthetic construct
  source 1..120: mol_type = other DNA
aaaagagtgaactcattattatttgtcttgtcttcgtttcagaggcggtacatctacgaaagccctaatcatagagggaaagactcctcgttcctggcccagaaatgagatgagaaatcc

SEQ ID NO: 81524 - DNA, 120 bp, synthetic construct
  source 1..120: mol_type = other DNA
gaaaaagtgggtggagggttgtactaggggtgtggaaggtatagaatctaattatcaattactgacttggttatcttttaccattcttctggaatggcttaccaccaggttgccaccaat

SEQ ID NO: 81525 - DNA, 120 bp, synthetic construct
  source 1..120: mol_type = other DNA
aacctctgcctcccgggttcaagcgattctcctgcttcagcgtcccaggtagctggaattacaggcgcccgccacgacgtccagctaatttttgtatttttaccagagacggggtttcac

SEQ ID NO: 81526 - DNA, 120 bp, synthetic construct
  source 1..120: mol_type = other DNA
ctgcaactggcctgaatctgagtttttaacagtgactccaggagatttgaatgccatcagtgtggcaacattttggaagccccagtcaaggacttactcggcctatattcatttatccta

SEQ ID NO: 81527 - DNA, 120 bp, synthetic construct
  source 1..120: mol_type = other DNA
tcctccattctgactcattctttacataaagccagtgtactcttaaaagtaatctcatcatgtcatttcttcctgcttagaattcccagtggcttcacattgctgctagggtgcagtcag

SEQ ID NO: 81528 - DNA, 120 bp, synthetic construct
  source 1..120: mol_type = other DNA
tgttcccatgtgttaggagtattcttctttctggtgggttcgtggtctcgctaactcaggagtgaaactgcaaaccttcggagagagtattacagctcttaagacagcacgtctggaatt

SEQ ID NO: 81529 - DNA, 120 bp, synthetic construct
  source 1..120: mol_type = other DNA
agcgcagcgccggtgggctggcacctctgggggatccagtacaccctctgcagtcgctggcccgggtgctaagtcccttattgcccggggccggcagggcctgccggctgctccgagtgc

SEQ ID NO: 81530 - DNA, 120 bp, synthetic construct
  source 1..120: mol_type = other DNA
atagatgggaataaagaaaaggaacatggataggatttaagttggacgatatcaagtttctgcacctttttactcactagaatgtgcaggaagaaggcttttgcagggagcccggatagc

SEQ ID NO: 81531 - DNA, 120 bp, synthetic construct
  source 1..120: mol_type = other DNA
gcttgaaccagggaggcagaggttgcagcgagccgagatcgcacggctccactccatcctggtagacagagggagactcaaaataaataatacaaataagtaaataaaataaaaatagtg

SEQ ID NO: 81532 - DNA, 120 bp, synthetic construct
  source 1..120: mol_type = other DNA
caggttttcatctgtctattcattttttcaataaattaagttgcaccagtagaaggatactgtcccacgagggaattgaggtcagaagaactcggagaaaacagcaagcccactggaaag

SEQ ID NO: 81533 - DNA, 120 bp, synthetic construct
  source 1..120: mol_type = other DNA
atgtacagcaaacttcttgtaaggccgtcttaatgtacagcaaactccttgtaaggccgtctgttttaaaaaaatacctccctaagtcccactggcttttcaacccactgcagtcttccc

SEQ ID NO: 81534 - DNA, 120 bp, synthetic construct
  source 1..120: mol_type = other DNA
cgcaaagtgctgggattacaggcctgagccaccgcgcccggccttagtttaatttttaacattgtgaatattatggccagatttttagagtttagataacgaaaacgagaacgattatca

SEQ ID NO: 81535 - DNA, 120 bp, synthetic construct
  source 1..120: mol_type = other DNA
ttacatgtgacgtgttctgcacatgttgttcacaacactgctaagaggccgggcgtgatggctcacgcctgtaatcccagcactttaggaggccaaagctggtggatcacctgaggtcag

SEQ ID NO: 81536 - DNA, 120 bp, synthetic construct
  source 1..120: mol_type = other DNA
aggtggattggtaattacaaagtgactgtccttgtaaggttaaagcagaggatacttccttaacatgctggctgaggtagtctggacccttttctactggttattgtgaatctcctgttt

SEQ ID NO: 81537 - DNA, 120 bp, synthetic construct
  source 1..120: mol_type = other DNA
tagaaatactaaaaacatattgttatatttttcccaaacatattatttatgtaattagtcctattataaattacttctaattgccattattaactactcctattgagaggtgacagcatg

SEQ ID NO: 81538 - DNA, 120 bp, synthetic construct
  source 1..120: mol_type = other DNA
acaaaccttgagctagatatagagtgccgattggtgtatttacaatctctgagctagacataaaggttctccacatcctcaccagagcagctagatacagagtgtcgattggtgcactca

SEQ ID NO: 81539 - DNA, 120 bp, synthetic construct
  source 1..120: mol_type = other DNA
tctcagttggctccctaaaaagttgaacagcaacagcaactggttcaccagtttggggaaacactatttatgaaaagaataaagaattaagaggtctcagtgagcttcaaggacaacgtc

SEQ ID NO: 81540 - DNA, 120 bp, synthetic construct
  source 1..120: mol_type = other DNA
atatcaactgggccaaatgacattgagaggctgagcaaattgaagcctgaaaattgaacattgggagagcattgggaacattatggcagacgggagacaggactagattgcacctcttac

SEQ ID NO: 81541 - DNA, 120 bp, synthetic construct
  source 1..120: mol_type = other DNA
acaaaaatagagcattaaaccaccaaagctaagaaccgtcacggagtccatttcacaccctgccacctccactggaacagatgctggtatccaaggctgagagacccatagatggttcac

SEQ ID NO: 81542 - DNA, 120 bp, synthetic construct
  source 1..120: mol_type = other DNA
tcaggaaacattggacacatatatagaaatgcaaaatgctctggaaagtctcaccaatagaattgaacaagtagaataaggaaattcagagcttgaaggcaaggtctttgaattaaacca

SEQ ID NO: 81543 - DNA, 120 bp, synthetic construct
  source 1..120: mol_type = other DNA
actccagcctgggcgacagtgcaatactccgtctcaaaaagaaaaaaaaaaaagcggaggaaaacggcatttcattcaaacggacaataaaattgagcaggcgtagctattcttatatca

SEQ ID NO: 81544 - DNA, 120 bp, synthetic construct
  source 1..120: mol_type = other DNA
tgatagacctttagcaagattaaccaagaaaagaagagagaaaatccaaataacttcaataaaaaatgaaatgggagatattacagctgacaccacagaaatacaaaagatcattcaagg

SEQ ID NO: 81545 - DNA, 120 bp, synthetic construct
  source 1..120: mol_type = other DNA
gacattcaaagaagaattggtaccaatcctattgacgctattccacaagatagaggatgagggaaccctccctaattcattctatgaagccggtatcaccctaataccaaaaccaggaaa

SEQ ID NO: 81546 - DNA, 120 bp, synthetic construct
  source 1..120: mol_type = other DNA
gtaaaactacaaaacactgctgaaagaaatcatagacaacacaaacaaatggaaacacaacccttgctcatgggtagaatcaatattgtgaaaatgatcaaactgccaaaagcaatctat

SEQ ID NO: 81547 - DNA, 120 bp, synthetic construct
  source 1..120: mol_type = other DNA
agtgggctaaggacaggaatagacaattctcaaaagaagatatccaaatggccagcaaacatataaaaaatgctcaacaccactaatgatcagggaaatgcacatcaaaactacaatgtg

SEQ ID NO: 81548 - DNA, 120 bp, synthetic construct
  source 1..120: mol_type = other DNA
tcaccaataagctatgaggatgcaaaggcataagaatgatacaatggactttgggggaagggtgggaggagagtgaggaataaaatactacaaatagggtgcagtgtatacttctcgggt

SEQ ID NO: 81549 - DNA, 120 bp, synthetic construct
  source 1..120: mol_type = other DNA
tcctttgttccctgcccaccaaactatccttgaaaaaccctaacttctaaaccttcaggaagactgatttaagcaataactccatcttccacgtggctggccttgtgttaattaaactgg

SEQ ID NO: 81550 - DNA, 120 bp, synthetic construct
  source 1..120: mol_type = other DNA
tgacattggtatcatcaatgaccttgcggaacccatggatgtcgctctccacagactagcgcatggccagctctgtctcacactcgactctgaagtcaacagcagcaagtcgggcattgt

SEQ ID NO: 81551 - DNA, 120 bp, synthetic construct
  source 1..120: mol_type = other DNA
ccactaaaaaagtttgaaaaacagaatgggatatttagaaatgaaaaagtcaaggacctgggggagactaatggctgagggaatgcatgtccccctgcacacctgaaacccatttactag

SEQ ID NO: 81552 - DNA, 120 bp, synthetic construct
  source 1..120: mol_type = other DNA
tgttaaggagaggattactatcaagcacccccatcagctttgtaggcttcttttcactgggctccaaattcagtcttgctgactctggtaacttcaaaacattttagcatgcaatagcat

SEQ ID NO: 81553 - DNA, 120 bp, synthetic construct
  source 1..120: mol_type = other DNA
tcccaaagtgctgggattacaggcgtgagccaccatacccgccctaagggagtgtaattttgtctagttctgagttgtttttttgtttgtttgttttgttttttttgaggcggtgtctct

SEQ ID NO: 81554 - DNA, 120 bp, synthetic construct
  source 1..120: mol_type = other DNA
tgccctacaaaaaaagatttccagagaaggtgaatgggggctgaaatatgacctgagcactgagagctaagagtcctggagagaggacttttgacattttcccttttctatgcttcatca

SEQ ID NO: 81555 - DNA, 120 bp, synthetic construct
  source 1..120: mol_type = other DNA
agaagctgggagtggccattagcttacaggcagcaataaaacagagactttgatccaacaactgcaaacaactgaattttgccaataatctgaatgagcagaaaacagattctcccttgg

SEQ ID NO: 81556 - DNA, 120 bp, synthetic construct
  source 1..120: mol_type = other DNA
ctacaggcctcagccactgcttcatctttttactttggtccatgaacctttgattttctgctcaggtctacttgaactaggaactagtaattttcccaggcattcatacctttttagctt

SEQ ID NO: 81557 - DNA, 120 bp, synthetic construct
  source 1..120: mol_type = other DNA
tgcacccaacatgaaatcgtacaaatgtcatggcttccaccatggaaaaaattatgtatgcgtgaggacaagagctaaaaaacaagaaagaaaatgtctagagtcacttgtgaggctgga

SEQ ID NO: 81558 - DNA, 120 bp, synthetic construct
  source 1..120: mol_type = other DNA
tccccgtgttgggcgacggtgggaccgcgcctgcgagcaacgcctgcagttccgcccgggacatccgacgagacccggtctcttttaacttcccttttcgggatttcttttaaaaaatca

SEQ ID NO: 81559 - DNA, 120 bp, synthetic construct
  source 1..120: mol_type = other DNA
ttccagctttttcaggaacttcccacataaaaacctgtacacaactattcttatcggattggataaaacacctaaagagacatttcaccgaagaagatatacagatggcaaacgagcaca

SEQ ID NO: 81560 - DNA, 120 bp, synthetic construct
  source 1..120: mol_type = other DNA
attgcttaggtagttagggcaaaagagtcctcggcagaacttctcttctaacaaaaagcagccctagaaattattccttttctaacaaagagcagcctgcaagatggagctgcagacata

SEQ ID NO: 81561 - DNA, 120 bp, synthetic construct
  source 1..120: mol_type = other DNA
aaaatggaatgggtagagggttcaaaagctcagatggaatattaagtagacttggaaatgagagaccattcctccgagtaggaagacaggggttgaatatgccaagagctagcaaattag

SEQ ID NO: 81562 - DNA, 120 bp, synthetic construct
  source 1..120: mol_type = other DNA
gaaaaatatgaccccattttaggttctaaggagtgtttctgtattgtagaaggaaaattccatatttgtattgccgtgggcacaaaaaaccgagcgctctcatgccgaaacccgggatcg

SEQ ID NO: 81563 - DNA, 120 bp, synthetic construct
  source 1..120: mol_type = other DNA
agcgtagaccgagtgtccggcattgttctaagtaagcgctttaacatttttaactcaattgggtgattcagtaagcgggaaattccggagacaatccattaggagttagttgagattagc

SEQ ID NO: 81564 - DNA, 120 bp, synthetic construct
  source 1..120: mol_type = other DNA
ggcgtgagccaccgcttccagccaggatgtgatgttgttatgatccagttaaatgaagcaggactttttctaattaattgcactttctcttctcttccctggctccatatattcacagtt

SEQ ID NO: 81565 - DNA, 120 bp, synthetic construct
  source 1..120: mol_type = other DNA
gttgcgatgagtcaataacataatacacaaaagcagtcagccaattatccaaatccgtgttattaatattatcatcatcatcattcttctcaccgtacttggggaatgaaggagacagat

SEQ ID NO: 81566 - DNA, 120 bp, synthetic construct
  source 1..120: mol_type = other DNA
tctaaagagaggactcatcagagatctgttcaacttccaggaatctgtgaggatagctccaaatctcactctcatgcccagcctatcaaacaaagcaaaccggttggactgaagctgtgg

SEQ ID NO: 81567 - DNA, 120 bp, synthetic construct
  source 1..120: mol_type = other DNA
tcgtcctgaatactcagtgcccaggcacagagtaggcattcagtcaatacttgttgaacgggttaatggattcctgatgttcactggttgatatcgtcactttcaaataatttctcccat

SEQ ID NO: 81568 - DNA, 120 bp, synthetic construct
  source 1..120: mol_type = other DNA
gataggattttactctaaagtttctagagggagctggacgcagcccacaccttgattttggcccacatactgattgtggatttctggccttcagaaatacatatctgttgtaagagaata

SEQ ID NO: 81569 - DNA, 120 bp, synthetic construct
  source 1..120: mol_type = other DNA
gcgggtcaccttctgaatttttaccttcataaacagcaaggactgcgctctttcgcacggcgccccgttttttcgtagagttccgtcggccaaaaccacttgaaactcgctcagcggcgt

SEQ ID NO: 81570 - DNA, 120 bp, synthetic construct
  source 1..120: mol_type = other DNA
tgaaggattaatttatgtttggaatcagctgctgttcttcctccagcctctctgtagtgtgctcacttcacacttggaaccatagttatatggtatagagaagagacaactctagggaaa

SEQ ID NO: 81571 - DNA, 120 bp, synthetic construct
  source 1..120: mol_type = other DNA
ggtttggtattaaggttatacaggcctcataaaatgagtttaacattgggattattttcccttgcatgtttagtagaattaactggtgaaaacatctgacccttgagttttctttctggg

SEQ ID NO: 81572 - DNA, 120 bp, synthetic construct
  source 1..120: mol_type = other DNA
ttacttatatttttggtttgttttttagagatggggtcttgcaatattgcccaagctaacctcaaactttagggctcaaggagtcctcccacttcagcctcttaagtagctgggactaca

SEQ ID NO: 81573 - DNA, 120 bp, synthetic construct
  source 1..120: mol_type = other DNA
ggattacaggcaggagccactgcgcccggccaatacattttttttaatagaggaggactataaaacctatgggaagctctgatggcacgactatgacttgctgatgttcactacaggtta

SEQ ID NO: 81574 - DNA, 120 bp, synthetic construct
  source 1..120: mol_type = other DNA
ttgcctcttctgccattcttcctgattatgaatggttttactgtagcattagtgtagttctgagggggagcaataccaaatacacgtagtcaagctacaatccttaccaagaagtatctt

SEQ ID NO: 81575 - DNA, 120 bp, synthetic construct
  source 1..120: mol_type = other DNA
atgaacccccgtgcctgactcttatctgtgatttctaaacctgttctctccctgcctcccttttcactttgaatcttagcaatcctgatacaatatggagaagtaccattctagctttat

SEQ ID NO: 81576 - DNA, 120 bp, synthetic construct
  source 1..120: mol_type = other DNA
ttcttcgatgattggtcaagtttgacttcccactgaaagctttcccacactctaaacatttgtaaggtttctctccagtgtggattctctgatggatggtaaggcagtgcttatcttgga

SEQ ID NO: 81577 - DNA, 120 bp, synthetic construct
  source 1..120: mol_type = other DNA
ggtcacttcctcagagccttctttctcttctctcagtttctcccttatagatgtttcccattgattctctaatttgacatcctgaacacaaacttctctaaccttaggatcccgggaatc

SEQ ID NO: 81578 - DNA, 120 bp, synthetic construct
  source 1..120: mol_type = other DNA
tgcaatacctgacccaaaccaggtcagattctctaatcctggactttagaattgtgatctgacggcaggtaaggccagctctaagagtagctcagtctttagcacttaaatttgagaact

SEQ ID NO: 81579 - DNA, 120 bp, synthetic construct
  source 1..120: mol_type = other DNA
ctgtctcaatttatgagcactgcagtaactgacacacagaagggtaataaatattctgagattttttttttttttttgaggtggagtctcactgtgtcccccgggttggagtgcagtggt

SEQ ID NO: 81580 - DNA, 120 bp, synthetic construct
  source 1..120: mol_type = other DNA
gttttactttaggagaatgggagtctggtataggaagactatcagtttcaggcacatagaaggcagttcttgactaggagcggaatatagaacaccccataaaaaaatgagaggcttgag

SEQ ID NO: 81581 - DNA, 120 bp, synthetic construct
  source 1..120: mol_type = other DNA
gagggaagataagtaagccaagagtcaatatagcacagtattaatgaaatctcctgcattcgtcttctcttcctcaaatgtagaagcttctgcagctctaacctagggctttaggctact

SEQ ID NO: 81582 - DNA, 120 bp, synthetic construct
  source 1..120: mol_type = other DNA
gtgcccaccaccatgcctggctaattttttgtatttttagtagagatggggtttcaccatgttagccaggatggtctccatctcctgacatcatgatccacccgcctcggcctcccaaag

SEQ ID NO: 81583 - DNA, 120 bp, synthetic construct
  source 1..120: mol_type = other DNA
cacatgtcttaaatgtacccttagagaaactttgacaaaagcatacccctatgtaactcattccctactggtttttaccatatcttcttcacaactgggaaagtctgtcactcatagtga

SEQ ID NO: 81584 - DNA, 120 bp, synthetic construct
  source 1..120: mol_type = other DNA
cataagtcaccgcacccggcctaccatcagcttttatacaaatcttaaccacttttcctcctcacatacgccaccaaagagcacaaggcttcaatgggaaaacttttgcttcttcttttg

SEQ ID NO: 81585 - DNA, 120 bp, synthetic construct
  source 1..120: mol_type = other DNA
acaactacaaagctttaatgatcaccaggtcaagcagcaaaaacagtatctaggaggagacacctccaacagtatctagagtcagacacacctccactcacactgctttccttctttctt

SEQ ID NO: 81586 - DNA, 120 bp, synthetic construct
  source 1..120: mol_type = other DNA
agtggttcatacttaaaataaaacctgaagtccttaccgaggtatacaaggccctactgaatgtgcccgtgacttctaacttcctctcctgctcacccaaaataagagctgaagtcttaa

SEQ ID NO: 81587 - DNA, 120 bp, synthetic construct
  source 1..120: mol_type = other DNA
actctccccaagaaatgagaaacagaaatatacagaagctccacttcctagtccgccaattatcatttccggtgattttctaggaaaggcgtcaactctctggtctaggcgttcccttaa

SEQ ID NO: 81588 - DNA, 120 bp, synthetic construct
  source 1..120: mol_type = other DNA
atccttaggtggtgctatgtactttttgccacacatcaggaagcatataatgtttttgatgctaagattgaccagtgggtttaatacttgatagctgaatccttccatgtaaactttccc

SEQ ID NO: 81589 - DNA, 120 bp, synthetic construct
  source 1..120: mol_type = other DNA
attaggttataaaataatctacggcttctgttttggtctgtttttctttcgtagatcacacacccttgggaaagccaaatgccatgttgtaaggagaggcccaggtggtgaggaactgaa

SEQ ID NO: 81590 - DNA, 120 bp, synthetic construct
  source 1..120: mol_type = other DNA
cagactcttggatctcatacctagactactttggatataaatgcagcctttccagcccagtcgggtcttctatttattcaaagacaaaggaggtaagaaaatacttggcacagtagcaat

SEQ ID NO: 81591 - DNA, 120 bp, synthetic construct
  source 1..120: mol_type = other DNA
tccacagttcaccttcttactttttgaaaatttggatatttgtcagacttgggcatttgttgcactactcaaaaatgggcttcaggggtcctgtggccaatcctcctgaactttagtatg

SEQ ID NO: 81592 - DNA, 120 bp, synthetic construct
  source 1..120: mol_type = other DNA
atggtacatagaggaaacttaaatgcatattattaagtgaaagaagccaatttgaaaaggttacattctgtatgatttcaactatatgacattctggaaaaggcaaaactatggagacag

SEQ ID NO: 81593 - DNA, 120 bp, synthetic construct
  source 1..120: mol_type = other DNA
tctgttcctcccaaatggtaacagtgcaacactggccaagctgattcagacagcacagcttcccggtgtctgcagggctggaccaaagagaagagtcttccgcgggtgctagaaaagcga

SEQ ID NO: 81594 - DNA, 120 bp, synthetic construct
  source 1..120: mol_type = other DNA
actcactttactgtgaaggatgtgttacaaagggcacatgatcatgggatctactggtcctaccttattctatattacacagaaatggcagcctgtttttccccagctttgccaacataa

SEQ ID NO: 81595 - DNA, 120 bp, synthetic construct
  source 1..120: mol_type = other DNA
ctctccatgggattatgagaggattgagaactctatgcctcttgtgcctgactcttgctttctaagtttccccagtaaatcttattcccattccttcgttcatactatgtgatgttgtag

SEQ ID NO: 81596 - DNA, 120 bp, synthetic construct
  source 1..120: mol_type = other DNA
ctttgtgtatttttccagccacagaactgagtcattcattacccaaagctaaaccctgcctacatggtaacgcttttgtaaatgggattctttctctctgacatccctttttcctgcagt

SEQ ID NO: 81597 - DNA, 120 bp, synthetic construct
  source 1..120: mol_type = other DNA
ctagtggcgacttggagaacctttatgtctagctaagggattgtaaatataccaattagcactctgtatctagctaaactggtggggacttggagaacctttatgtctagctaagggatt

SEQ ID NO: 81598 - DNA, 120 bp, synthetic construct
  source 1..120: mol_type = other DNA
acacccagggctgcattctcatcagagacacctctaagttactgcgaagtcggagacaccagaaaggaagactccaacgtattccgagaggagtggaggcaaatgggatagactagccct

SEQ ID NO: 81599 - DNA, 120 bp, synthetic construct
  source 1..120: mol_type = other DNA
cgtagtggacttgggctcaggtgctttcttgagtgtgcaaactggtaagaactaattttttgaatcagatttggggattattcaggcagaaggggatccctaaatggaaacactgacatt

SEQ ID NO: 81600 - DNA, 120 bp, synthetic construct
  source 1..120: mol_type = other DNA
ttgtactccctagcttcatgagatcttctgttttagctcccacataggagtgagaacatgcagtattcatgaatcacactcatcatgagcgatcttcttggttgttgaattggggttgct

SEQ ID NO: 81601 - DNA, 120 bp, synthetic construct
  source 1..120: mol_type = other DNA
tgtgacttaagatatggtctgttctggagaatgtgccatgtgcaagtgaaaagaatgtgtactctgtagcagctgggtgaaatgttctataaatgtcaggcctacttggtctagtgtgta

SEQ ID NO: 81602 - DNA, 120 bp, synthetic construct
  source 1..120: mol_type = other DNA
gtagctgataccatagacacatgccaccatagccagctaagttttgtattttttgtagagatgaggttttgccatgttgcccagagtggttttgaactcctgagctcaagtgattagcta

SEQ ID NO: 81603 - DNA, 120 bp, synthetic construct
  source 1..120: mol_type = other DNA
taggcatgagccatggtgcccagccaacttttgtaatcctctttgtccttgacctttgagaatttgattattgtatgtcttggggtggtcttatttgggttgaatctgtttcatgttctc

SEQ ID NO: 81604 - DNA, 120 bp, synthetic construct
  source 1..120: mol_type = other DNA
ttgtctttgggaatatttctccctttaagtacttagggacagatctcttgccagggaatccaagatggtggggaaactggttatccacttcaatctcactttttccagtgtagaaactgg

SEQ ID NO: 81605 - DNA, 120 bp, synthetic construct
  source 1..120: mol_type = other DNA
aaatagtcctacctcagttcaggtcaggttttgttgccaacagagttatgaaaacttttagttttctacctgggtgtggtagctctcaccagtaataccagctacttgagagaactgctt

SEQ ID NO: 81606 - DNA, 120 bp, synthetic construct
  source 1..120: mol_type = other DNA
cgtgagccaccatgcccagtcacaaattcttgatactatattatgttattgttaccaggcaaaaggggctcactgctggatgtgctagaagctaatactatgacactggatttctaagaa

SEQ ID NO: 81607 - DNA, 120 bp, synthetic construct
  source 1..120: mol_type = other DNA
atattgtgtaactgcttatgtacagaggctctttggaggaccaccaaccattgtaataccaaagatttttgctacctccccttgaatcaattttgcccctgtggggatgatatcatccct

SEQ ID NO: 81608 - DNA, 120 bp, synthetic construct
  source 1..120: mol_type = other DNA
tttagagtcatctgcaaagaaaagataactattaggtactgggcttaacacctgggtgatgcaataagatgtataataaccccccatgacacgtgtttatgtaaccttcacatgtacccc

SEQ ID NO: 81609 - DNA, 120 bp, synthetic construct
  source 1..120: mol_type = other DNA
taacgatcataggccatcacagccaacagaagacattctgtggctcccaagtcaaggacaaaaaagaattggagtacacaccctccataagtaatagatttttttgggccccattgattt

SEQ ID NO: 81610 - DNA, 120 bp, synthetic construct
  source 1..120: mol_type = other DNA
aattatcctcaccaccaacttactcctcctccttatattttttttacccctcaacattgcaggcactgttgttattctatcaattttggtgttccctactacactgcctttttttgtgag

SEQ ID NO: 81611 - DNA, 120 bp, synthetic construct
  source 1..120: mol_type = other DNA
gcttcggcctgagccctggtgtcgagctaatggctgaattagtttaaacattttttctgctgataatttctgaccacgaaattcagacctaccatactttacatttatagtgtccttgag

SEQ ID NO: 81612 - DNA, 120 bp, synthetic construct
  source 1..120: mol_type = other DNA
gttgggaattaaaaggtcatgaatttcaaagtggaaaaaaacctcagaagtcatgaatctagccttctgctctgcataggagatccttcaacagaatcgctacacagctgctactggcat

SEQ ID NO: 81613 - DNA, 120 bp, synthetic construct
  source 1..120: mol_type = other DNA
actggctctctttaaactttggatcacgtaaagccctaggcattcttattagaaatgctgccaagtcaggcatgacaatttatgtagtttaatgttgtgaactcaaatacaggacttttc

SEQ ID NO: 81614 - DNA, 120 bp, synthetic construct
  source 1..120: mol_type = other DNA
aaaattcttgttggatgagttactaatgccctgaagaattggattaaccactggtcatactgacactacagtgccattcacacttaaatgcaacagctgaaataagatttaatagaagtc

SEQ ID NO: 81615 - DNA, 120 bp, synthetic construct
  source 1..120: mol_type = other DNA
cattgcactccggcctgtgaaacgagcgaaactcttgtctcaaaaaaaaaaaaaaaaaaaaaaaaaaagacgttgggtttcatcttttctttttctttttaagtttttaaatttaaaaat

SEQ ID NO: 81616 - DNA, 120 bp, synthetic construct
  source 1..120: mol_type = other DNA
tagtggctgtattaatgtacattcccactaacggtgtgcaagggttcctttttttccctacattctcaccaagctgttatctttgctttttatgacaatagccattctaagagtatgaag

SEQ ID NO: 81617 - DNA, 120 bp, synthetic construct
  source 1..120: mol_type = other DNA
gaggtatgcatgtaatttcgttcttcaacatgtggatattcagtttttcaacaccgtttattgaagagactgccctgtccccattgtgtgttcttggcacctttgttgaaaatcaattga

SEQ ID NO: 81618 - DNA, 120 bp, synthetic construct
  source 1..120: mol_type = other DNA
ggacattcagtactatgttgaacagaagtggtgagcgtgggcatctttatcttgttctggatcttagagggaaagctttcaactttttatcattatgatattagctgtgggcttgtaata

SEQ ID NO: 81619 - DNA, 120 bp, synthetic construct
  source 1..120: mol_type = other DNA
ttactgttgtaatgtaaaacacactagggtctgttttgaggcaatgttgtttcaatcatatgcaaatcaaactctttttcttttttgagacagagcctcactctgtcacccggactggaa

SEQ ID NO: 81620 - DNA, 120 bp, synthetic construct
  source 1..120: mol_type = other DNA
ttacttgagtaaattgtgtgttgctgaggtttggtgttcaaatcattttgtcacccagatagtgagcatagtacccaataagtagtttttcaatcctcaccctccttcctcctgccaccc

SEQ ID NO: 81621 - DNA, 120 bp, synthetic construct
  source 1..120: mol_type = other DNA
tttcttcttattttttgggggatatacctgtatttttcagctaatgtaaaacaacagagtagaaactctagttgatatttgctcttaagcattttagttcagagggactaaaagcaaggt

SEQ ID NO: 81622 - DNA, 120 bp, synthetic construct
  source 1..120: mol_type = other DNA
tgatccaccgcctcggcctcccaaagagctgggattacaggcgtgagcctctgtgcccggcccatagaatgtaatatttgaatgaataaatgcacttatatcaatagcctgacaaagtgt

SEQ ID NO: 81623 - DNA, 120 bp, synthetic construct
  source 1..120: mol_type = other DNA
tattccttcacagacactacagttgaaagaattggaggtcctaggtcagagacaaagacagattggaatagaagttgggaccgaaagtaaataagatcttccaaaacatggagcaagggg

SEQ ID NO: 81624 - DNA, 120 bp, synthetic construct
  source 1..120: mol_type = other DNA
aaatgccagagacctggatgaactgatatctataaaagtgataaaatgaatcaatgtacttcagtaagttgggtacatatttagacttataaattatcagcatctatacccaggtattgc

SEQ ID NO: 81625 - DNA, 120 bp, synthetic construct
  source 1..120: mol_type = other DNA
aagcccgttgagactggtgctccacaacagtaattaagcataattatgatgcaggtcaaggtaagacatttccgaaattttctaggacatgtttttgaaggcttgggatattctgcttag

SEQ ID NO: 81626 - DNA, 120 bp, synthetic construct
  source 1..120: mol_type = other DNA
ccacatttctaaaaattcacgtaaatccgccagttccacagatgtatgtcaaaagcctaactggtttcaaactagtcatattatctttccattaagttgagacaatcatggaataaacat

SEQ ID NO: 81627 - DNA, 120 bp, synthetic construct
  source 1..120: mol_type = other DNA
tctttggaagccctgttacctggttgcaggtacatgtagataatagttccatagaacatagacactacagtaagatgagatccacaggtattcattgcttttcgctggcttgcttttgac

SEQ ID NO: 81628 - DNA, 120 bp, synthetic construct
  source 1..120: mol_type = other DNA
aattgctttggtccatagtccttcaatgtctaaatcctagagtgagaaaaggaggaggaggaggtagatgatgatacaaggataaggagaaggaagaagaaggaagaagaggtagaggag

SEQ ID NO: 81629 - DNA, 120 bp, synthetic construct
  source 1..120: mol_type = other DNA
tcttagtgactaagcacctttgatctcctagtttgttatgtaggacatctggtgtttacccttggacgccttgtctctctcattcttaacgccttatcaccaaaactggtaaatttggat

SEQ ID NO: 81630 - DNA, 120 bp, synthetic construct
  source 1..120: mol_type = other DNA
gaaattacttccaactgtggccatgattcaaaagtggatacatttgtgagactaaccggagatggtggttgaaatagccgttttgagaaaatcattttgtgatttctttagcattagctt

SEQ ID NO: 81631 - DNA, 120 bp, synthetic construct
  source 1..120: mol_type = other DNA
acttctcgacttttgtagaatccacactatggaaaatagatcccggttaagcatttttttctccagggctgtaaatttctcatgatttccctgcagtgccacggagaattctgcttttcc

SEQ ID NO: 81632 - DNA, 120 bp, synthetic construct
  source 1..120: mol_type = other DNA
atagattgtggagccagactttctgggctgaaatcctggtggctacagttaccagatgtgtgaacttgggaaaattacttaaccttcattgcctccgatttcttatctataataggggat

SEQ ID NO: 81633 - DNA, 120 bp, synthetic construct
  source 1..120: mol_type = other DNA
gaagttattagcagtgcttccacaactggccgcatatcagagtaactgtattggctggcatatgtagaaattttagaaatacagtgtcctgagattcctatgcccttgccaaaggctcaa

SEQ ID NO: 81634 - DNA, 120 bp, synthetic construct
  source 1..120: mol_type = other DNA
tttgccaatttgaaatctttttagacttcctatgcacttaactataaaattcagactccttaccaagaactaccagatgcaccttgcctggctccttttcatccctccctccttctccca

SEQ ID NO: 81635 - DNA, 120 bp, synthetic construct
  source 1..120: mol_type = other DNA
ttccagtggctgtttggtgcctggaagggagtctagcatgtaacagggatcaataattgtttgttgactataaagcagttagaacaatatctgatgtgtatattaaatatcccattcagt

SEQ ID NO: 81636 - DNA, 120 bp, synthetic construct
  source 1..120: mol_type = other DNA
tcaggcaagagagagaaataaaaagcatccagataggaaaagaggagtcaaattatgctatgattctatgactagaaaaccccaaagactctgccaaaaggcttctagacctgataaaac

SEQ ID NO: 81637 - DNA, 120 bp, synthetic construct
  source 1..120: mol_type = other DNA
gtcctcaaaagcaattgcaacacacaaaaaattgacaaatgggacttaattaaaccaaagagcttctgcacagcaaaagtacctatcaacagaataaacagacatcttacagaatgggag

SEQ ID NO: 81638 - DNA, 120 bp, synthetic construct
  source 1..120: mol_type = other DNA
ggagaggagcaaggactgaaaaatttcctattgtatactatattcactgtctgggtgacaggattaatataagcccaaacctcagcatcacacaatatacccttgtaataaacctgccca

SEQ ID NO: 81639 - DNA, 120 bp, synthetic construct
  source 1..120: mol_type = other DNA
gctgttccaatttacattcccaccagtagtgcataaggattccctttctttctgaatccttgccaatacttgttatctcgtctcgataatagccatcctaacatgttggctgatctcatt

SEQ ID NO: 81640 - DNA, 120 bp, synthetic construct
  source 1..120: mol_type = other DNA
gatgatactgtaaatggcatttgtttttccagataattcagtgttactgtacagaaacacaattattttatggcacatgtatacatatgtaactaacctgcacaatgtgcacatgtaccc

SEQ ID NO: 81641 - DNA, 120 bp, synthetic construct
  source 1..120: mol_type = other DNA
caccaatagagtgcaagggttttctttctctgcatcctctccaacattatcttttattttttttgataatagccattctaacatgtgtgaggtgatctcactgtggttttaatttgcatt

SEQ ID NO: 81642 - DNA, 120 bp, synthetic construct
  source 1..120: mol_type = other DNA
ccaatccatgaacaaggaattttttcatttatcgtcttcaatttcttttaccaatgccttacagatttcactatacatatctttcacctctttggtttaatttatgcctgagcattttca

SEQ ID NO: 81643 - DNA, 120 bp, synthetic construct
  source 1..120: mol_type = other DNA
atttctctaatgaccagtgataatgaactttttttcatatgtttgttgggcacataaatgtcttcttttgagaagtgtctgtttatatcctttgcccactttttgatagggttgtttgat

SEQ ID NO: 81644 - DNA, 120 bp, synthetic construct
  source 1..120: mol_type = other DNA
ctctttgtagcaattgtgaatgagagttcactcatgatttggctatttgtttgtctattactggtgtataagaatgcttgtgatttttgcatgttgattttgtatcctgagagtttgctg

SEQ ID NO: 81645 - DNA, 120 bp, synthetic construct
  source 1..120: mol_type = other DNA
ctctgatggtagtttgtatttctgtgagatcagtggtgatatctctttatcgttttttgttgtgtctgattcttctctcttttctcccttttcataaagcatttcatggattcattgact

SEQ ID NO: 81646 - DNA, 120 bp, synthetic construct
  source 1..120: mol_type = other DNA
tttgcacatgagatgggtctcctgaatacagcacactgatgggtcttgactctttatccaatttatcagtatgtgtcttttaattggagcatttagcccatttatatttaaggttaatat

SEQ ID NO: 81647 - DNA, 120 bp, synthetic construct
  source 1..120: mol_type = other DNA
tcctgccttggcttcccaaagtgctgggattagaggtataagccaccatgcctggtcctttcatgagtttttatgcttgcaattcagattaataagtgaatgacagtgagaattcaattc

SEQ ID NO: 81648 - DNA, 120 bp, synthetic construct
  source 1..120: mol_type = other DNA
gttcacattgagttaaggtgatggctagctttggaactggagttcagccagtagaagatgtgttcaggtccttttaatcccaaaaggtggatgcgaaataaccataaatatatgtcagaa

SEQ ID NO: 81649 - DNA, 120 bp, synthetic construct
  source 1..120: mol_type = other DNA
atggatggtgccttctgtgtgtccggtgtaaagggcaaaacaggctccctttcctcaagcctcttgtcattaaagcctgtaaaaattacagtaaaagtattcagaatgggttaagcaatt

SEQ ID NO: 81650 - DNA, 120 bp, synthetic construct
  source 1..120: mol_type = other DNA
tttcctgactttttttttttttttttttttttttttttttgagacggagtctcgctctgtcgcccaggctggagtgcagtggcgcgatctcggctcactgcaagctccgcctcccgggtt

SEQ ID NO: 81651 - DNA, 120 bp, synthetic construct
  source 1..120: mol_type = other DNA
tttggcttaggattgacttggcaatgtgggctcttttttggttccatatgaactttaaagtacttttttccaattctgtgaagaaagtcattggtagcttgatggggatggcgctgaatc

SEQ ID NO: 81652 - DNA, 120 bp, synthetic construct
  source 1..120: mol_type = other DNA
cacttggcagtttcttataaagcttaaaataaactcaacatatgacccaaccccatcattcttcatagaactagaaaaaacaatcctaaaattcatgtggaaccaaaaaagagcccacat

SEQ ID NO: 81653 - DNA, 120 bp, synthetic construct
  source 1..120: mol_type = other DNA
tggctcaggcaaagatttctgaccaagaacccaaaagcaaatgcaacaaaatccaagataaataggtggggtttaatgaaactaaagagctttggcacagcaaaagaacagtcagcagag

SEQ ID NO: 81654 - DNA, 120 bp, synthetic construct
  source 1..120: mol_type = other DNA
gtaactcaggaatggaaaaccaaatattgtatgttcttgctcataagagggagcgaagcaatgaggatgcaaaggcataagaatgatacaatggactttggggactgggtgggggaaagg

SEQ ID NO: 81655 - DNA, 120 bp, synthetic construct
  source 1..120: mol_type = other DNA
gtcaacagaacactgccttcttacatcattatccaactttctactttgtcacctctatctcaaaattgacggtctgatagctagtttattttatatttgccccaggttgtgctctacctt

SEQ ID NO: 81656 - DNA, 120 bp, synthetic construct
  source 1..120: mol_type = other DNA
ctgttgctcaaagtgtagataaaagggttaagcataggagtcaccaaactgtagaacagggacatgaatttgtttttgtcctgggagttggcagagggctgtacatacatgctaattaca

SEQ ID NO: 81657 - DNA, 120 bp, synthetic construct
  source 1..120: mol_type = other DNA
tgcccaagaactacccatgctaactaacacgtgttaatttctttcatccaaaatctgttggccctggtcatgttctggttcaatttgtgagttgatgtaggtgagttcagaactcactga

SEQ ID NO: 81658 - DNA, 120 bp, synthetic construct
  source 1..120: mol_type = other DNA
aactgctccttgcctagcagggctatcctataggcagtgtgcccacagtagccttttttaaaatagtttttttagtatgcaaattttcataaggagatcacaacatgcatgtggttgtat

SEQ ID NO: 81659 - DNA, 120 bp, synthetic construct
  source 1..120: mol_type = other DNA
accaatttcacatgtgacactaagaaaatggaatgctataaaatcaatcctcatcaccgtggtagggatgctgttgcttttatcctgagtctttactgccaataagtgatgctgcttcca

SEQ ID NO: 81660 - DNA, 120 bp, synthetic construct
  source 1..120: mol_type = other DNA
gaaaactctggactaagtaaattttgaactcgaaaagttagaaggggtatcaattatattaacaacactttctttaaaaatagaatcactttcttttgaaatcaaccagagtggtgagat

SEQ ID NO: 81661 - DNA, 120 bp, synthetic construct
  source 1..120: mol_type = other DNA
gtggttttgcctgcgttgtccaaaccgaaaaatacaagttttccaaatttcttgtagagtcctaggaactggagcacactgctgaagccattgtagatccactcaaagaggaaagacatt

SEQ ID NO: 81662 - DNA, 120 bp, synthetic construct
  source 1..120: mol_type = other DNA
atttctgctaccatagagccatcataatcctagttccacatacagacaaaagaagtcttcaataatttcttccacaataacccaacacagtatagactttttaccttccattgactacat

SEQ ID NO: 81663 - DNA, 120 bp, synthetic construct
  source 1..120: mol_type = other DNA
gaagggggaaaagggaaaactcttaatggcacatcagttaataaatatagagggcatactaggattggagaattattaatagatgttaaaattagtgggtgaaagtttaagacatttaca

SEQ ID NO: 81664 - DNA, 120 bp, synthetic construct
  source 1..120: mol_type = other DNA
cccactagactataaagtttgtgagggaaggaattgtgtctgtcttattcactaacaaatactcggcaaatagcaaaatctgtatgtatagtaagcgattgaaaaacattaggcaaattt

SEQ ID NO: 81665 - DNA, 120 bp, synthetic construct
  source 1..120: mol_type = other DNA
agaagttaaacaatcactgtaaccactgggcagttcttgtgaggcgttccaaatgtgagtttggaaatgtccctatatcccactcattgaaaagtagctcctccatccattgttcttcat

SEQ ID NO: 81666 - DNA, 120 bp, synthetic construct
  source 1..120: mol_type = other DNA
ctaaaccaccctcaagtaggcctcagagtctacttttcccttctttgtgttcatgtgtactcagtgtttagttctcacttatgaatgagagtgtgaggtatttggttttctgtgcctacg

SEQ ID NO: 81667 - DNA, 120 bp, synthetic construct
  source 1..120: mol_type = other DNA
catctgccatgtgatccttttgccagtgcctcatattttaatttcctaacatttgtttcaggctgattgagaacctacctggaacattgttttgattgccagagggaaagagaacatggc

SEQ ID NO: 81668 - DNA, 120 bp, synthetic construct
  source 1..120: mol_type = other DNA
ttttgtatttttagtagagacggggtttcaccgtgttatccaggatgatctcgatctcctgacctcgtgatccacccgcctcggcctcccaaagtgctgggattacaggtgtgagccacc

SEQ ID NO: 81669 - DNA, 120 bp, synthetic construct
  source 1..120: mol_type = other DNA
gaatcattgccttctggaactagcacatttcttcagcagaggaactgtgatatttctcctctggactactgctgtcttgtgaacaataaatgtttattgaatgactaccacagataaaga

SEQ ID NO: 81670 - DNA, 120 bp, synthetic construct
  source 1..120: mol_type = other DNA
ggaaggcaatccatcaaagtctcctgactaccctgaagttgataggaaattgacatgacttgtctcaaggaacagagtacattgggggaacttctgaaaagaaaggagtttctaactttg

SEQ ID NO: 81671 - DNA, 120 bp, synthetic construct
  source 1..120: mol_type = other DNA
agatgaggatcaatgtcactggaattagaagaattagtacactaaagaagaagagctcagcctcaataggctttgtgtcagcacatgacaacttgagaagtgcaggcacctcacagaaaa

SEQ ID NO: 81672 - DNA, 120 bp, synthetic construct
  source 1..120: mol_type = other DNA
gcttcttttagtaacatctttacgtgtttttttgagttgtgtctgtctcctaaatgccatgcatgtaggtccatttccacaaagaactaccgtgggtattagtaataaaattatggctac

SEQ ID NO: 81673 - DNA, 120 bp, synthetic construct
  source 1..120: mol_type = other DNA
cattcttgtgctacattaaaaaacaatctctgacttgataaaaagagagtattgtgaagctcaagtgagacaatgtatacacatctgaacttaggaccctgtcccaagcatactaagcat

SEQ ID NO: 81674 - DNA, 120 bp, synthetic construct
  source 1..120: mol_type = other DNA
gaaaaatacttatgaggagaggaaaatgtgtatagttagtgtgtcttcagtcattggggcatttttgactgacatgggctctcctcaccaggttcctagtggatttctacaacgagaagt

SEQ ID NO: 81675 - DNA, 120 bp, synthetic construct
  source 1..120: mol_type = other DNA
gagaatcgctagaacctggggagacaagataagtcattgccctccagcctgggcaacaaaagcgaaactccatctccaaaaaaaaaaagctgatttatgcaagttatgacttaatatgtg

SEQ ID NO: 81676 - DNA, 120 bp, synthetic construct
  source 1..120: mol_type = other DNA
tctggctctagatctttgagaaatcgccacactgtcttccacaatggctgaactaatttacatttccactaacagtgtaaaagtgttcctatttctccccagcattgccaacatctgttg

SEQ ID NO: 81677 - DNA, 120 bp, synthetic construct
  source 1..120: mol_type = other DNA
gtgtctggttggaacatgaacatggaaacaaaccatttaatcatttactcaataaatctttatgtcatggtgataagtgtcaggcactgtcatgtgcacaggagatatattgataatcaa

SEQ ID NO: 81678 - DNA, 120 bp, synthetic construct
  source 1..120: mol_type = other DNA
tagtcatggttactttggtttaaatgtctaaataacatctttagttttaaaaatgtgtttgtaatttgtactattgacaggaggatattcttggactgcagcggttattggcaatgtgtg

SEQ ID NO: 81679 - DNA, 120 bp, synthetic construct
  source 1..120: mol_type = other DNA
aaacacaacataccacaacttatggcatgtagcaaaagaagatattagcaagaggaatgtttgtagtaataaatgcctatattaaaaaagaagaaagatcccaaacaacctaatgttaca

SEQ ID NO: 81680 - DNA, 120 bp, synthetic construct
  source 1..120: mol_type = other DNA
catgcatttgtggttaactgatttttgccaaagatgccaagaatgaacacactatggagaaagggcagtatctttaataaatgatgctgggaaaatcaaatacccaaatacagaacaatg

SEQ ID NO: 81681 - DNA, 120 bp, synthetic construct
  source 1..120: mol_type = other DNA
tcttgtctgactagtgtgtccagttcattcctaccaagataaccactctttaagagagccttgtccagaaaagaagttaatttcacgtatgtcagtcacgcgagacgcaagtaaaaaaaa

SEQ ID NO: 81682 - DNA, 120 bp, synthetic construct
  source 1..120: mol_type = other DNA
gtggaatctaaaaaagataaactcatgcaagtggagagtagaatatagctaccttgggggtaggggatggggaaaggggagattttaaacacaagatattttttaaccttttgcaggaaa

SEQ ID NO: 81683 - DNA, 120 bp, synthetic construct
  source 1..120: mol_type = other DNA
ttggcgcacttcttaaggggtgtacagcttctgtatttcaaaattgcaggaagtgtagattttaaatgttcttactacaaaaaaatgatgtgtgtgaggtgataggtacattaactagct

SEQ ID NO: 81684 - DNA, 120 bp, synthetic construct
  source 1..120: mol_type = other DNA
agttggctgtggcaggaggggagcagaagggggatggcaatgctatttaggaatattgaagaaaacccagaaatacaagttgtgactcagaatttaaagtatagttcagttattggccta

SEQ ID NO: 81685 - DNA, 120 bp, synthetic construct
  source 1..120: mol_type = other DNA
tgaaaaaaaatgcaagttttgaagacttctttcttctacttggattttctaactggcctcatctggaagtagttctctttgtggttatcttgatcttctacttgataacactgataggaa

SEQ ID NO: 81686 - DNA, 120 bp, synthetic construct
  source 1..120: mol_type = other DNA
agagactaatggggtgggaatgggggatgtgacagggaaatcatgttggctgttgtttttcctagggtcttatccattttgaaaggttgtttccctgcttctttgtgatttgtgtttcat

SEQ ID NO: 81687 - DNA, 120 bp, synthetic construct
  source 1..120: mol_type = other DNA
ttcatagctcctgtaggaagacagtgctattaaatgaaacaaagcagaatatgtgcttaatttgctttagttggcctagttaatgacatattaaagatagcttaaaactcttaacatcct

SEQ ID NO: 81688 - DNA, 120 bp, synthetic construct
  source 1..120: mol_type = other DNA
gtgtgtatgagatcacattttctttatccattcctccatcaatggatgcttaggttgtttcttcatcttggctgtcatgaatagtgctgcaatgaacatgggggcatagatacctcttcg

SEQ ID NO: 81689 - DNA, 120 bp, synthetic construct
  source 1..120: mol_type = other DNA
tggatgcatgttttcacttaatttgggtaaataccttttatttgtacctctccaggaggaccacatgcttagtgtatattatctttatgagatactgcaaaaatgttttcaagtggctgt

SEQ ID NO: 81690 - DNA, 120 bp, synthetic construct
  source 1..120: mol_type = other DNA
catgtccctgcaaaggacatgaacacatccttttcgatggctgcatagtactccatgttgtatatgtgaattttctaggccttaactccaactgagcttcccatctacaatgctttaata

SEQ ID NO: 81691 - DNA, 120 bp, synthetic construct
  source 1..120: mol_type = other DNA
ctaggcatcgaggataatgtttacgtatttttcacatggagttttcacaacaatcaagactactgaagccaagactgttttcagttgcttcacataagtggacaggaaaatacctgatca

SEQ ID NO: 81692 - DNA, 120 bp, synthetic construct
  source 1..120: mol_type = other DNA
agtagatgagggaagtgtaggcatttatgttggtgatttcaaggtgatcaaaatcagagatcagatcagtctgtgcatgatgagggcatcagctaggaagacaatatacagggaatgtgg

SEQ ID NO: 81693 - DNA, 120 bp, synthetic construct
  source 1..120: mol_type = other DNA
ccctcaagggctgtgacctctaagtcaagtaatcttcatgatttactctttgactattgctgctttttgattcagctatagcttttaaaattttcttttaaaacaatgtgcagactgatt

SEQ ID NO: 81694 - DNA, 120 bp, synthetic construct
  source 1..120: mol_type = other DNA
acacacctgcaactctaagaactacactcaggttctcctccattttcctgcccctcccacttttccttccttctctgttctctcactgaatttttatcttcctttcctttctgtaaagtt

SEQ ID NO: 81695 - DNA, 120 bp, synthetic construct
  source 1..120: mol_type = other DNA
tttttctgggctagttgagagtaagttggagatgacacgttcctttatgccaaatactttattcagtgttttttgtctaaggaaaaggatgttactttacataagtccagcacagtaccc

SEQ ID NO: 81696 - DNA, 120 bp, synthetic construct
  source 1..120: mol_type = other DNA
aatgatggcaagcccttcaaactggcttttattttttattcatgtgtgctgatatttttggatcatttgtttactcgttttttgagtttacctttcttttttttctctcaggtaatagga

SEQ ID NO: 81697 - DNA, 120 bp, synthetic construct
  source 1..120: mol_type = other DNA
tctaatctacaccctcagaaacaaagttgtaagaggggcagtgaagagactaatggggtgggaatgagcctgtgtatgtgtcatattaacaatataacagagtctcccctcacaatgatt

SEQ ID NO: 81698 - DNA, 120 bp, synthetic construct
  source 1..120: mol_type = other DNA
aaatctattttatagaagtaatcattttgttttatatattattgtcaaccatcttcgtttgaaataattgcgctatacctagagcaatttaaactgacagtcatagtcaaatgaagcgga

SEQ ID NO: 81699 - DNA, 120 bp, synthetic construct
  source 1..120: mol_type = other DNA
tctccactgctaacccctgacaagcatctttctgctactctgtgcttctatgattcattttatgtcgatttcacatatgagatcatgcagtatttgtttttctgtgcctggcttatttta

SEQ ID NO: 81700 - DNA, 120 bp, synthetic construct
  source 1..120: mol_type = other DNA
tattgtgaataatgctgcaataaacatacgtgtgcatgtgtctttatagcagcatgatttatagtcctttgggtatatacccagtaatgggatggctgggtcaaatggtatttctagttc

SEQ ID NO: 81701 - DNA, 120 bp, synthetic construct
  source 1..120: mol_type = other DNA
gggctacagagtctgacctggggggccaactggcactggaaagtcctattttgccattttattgataccacttctcactatctaaattctttttttttctttttaactttctgtgctctt

SEQ ID NO: 81702 - DNA, 120 bp, synthetic construct
  source 1..120: mol_type = other DNA
actaatgttaatatgcatttaaattttttttctaaactattacgctgtaatgcacatgttcccctaggttgtcacaagaatatttcctaaaaaagtatctaatccaggatcataaggtgg

SEQ ID NO: 81703 - DNA, 120 bp, synthetic construct
  source 1..120: mol_type = other DNA
tgtaggtgagatgggataactattgggaggcaacagtaatatcatagtctctattgtctgcatgagaaaactgaccacaacagagctagtaagtgatgaagcttggattcaaatgtgggc

SEQ ID NO: 81704 - DNA, 120 bp, synthetic construct
  source 1..120: mol_type = other DNA
atgagccaaggaaaacaggttgcttctagaagctggagtagttgagaaaacagattctctctgaaagcctacagaagaaatgcagccctgtagacccaatttagtattcctatctccaga

SEQ ID NO: 81705 - DNA, 120 bp, synthetic construct
  source 1..120: mol_type = other DNA
atgcatggaatagataacaccaaggcatggtaatattgttgacaaatatttatttagttataacatcacatttctttacccactcaggaaatggaaagtttttgtattgtgcttgagagt

SEQ ID NO: 81706 - DNA, 120 bp, synthetic construct
  source 1..120: mol_type = other DNA
tcctggccagagcaatcaggcaagagaaagaaatgaaaggcatccaaatagaaagagaagaagttaaactattcttggtagcaaaagacatgattctgtataaagaaaaccccataatct

SEQ ID NO: 81707 - DNA, 120 bp, synthetic construct
  source 1..120: mol_type = other DNA
tcatgccgaagatgccaaaagcaattgcaacaaaaacaaaaattgacaaatgaggcctatttaaactaaagaacttctcacagtaaaagaaactatcaacagtggaaacagacagtctac

SEQ ID NO: 81708 - DNA, 120 bp, synthetic construct
  source 1..120: mol_type = other DNA
ggtggagggtgggaggaggaagaagatcagaaaaaatacctattgagtactatgcttattacctggatgatgaaattatctgtactccaaacccctgtgatgcgcagtttacctgtataa

SEQ ID NO: 81709 - DNA, 120 bp, synthetic construct
  source 1..120: mol_type = other DNA
tgaagacaaatgtaatgttttaataaattaggctgattaaaaaagaatatgagtttggcgtgctggctcatgcctgtaatcccagaactttgggaggcagaggcgggtggatcacctgag

SEQ ID NO: 81710 - DNA, 120 bp, synthetic construct
  source 1..120: mol_type = other DNA
atggtagttccatttttagttctttgaaaagtctccatactgttttccacagggcttgtactaatttacattcccaccaacagtgtatgtattctttttttctctatacccttggcaaaa

SEQ ID NO: 81711 - DNA, 120 bp, synthetic construct
  source 1..120: mol_type = other DNA
gatcaatgttcagtcaaagggggttggaggaaatttgtttatgcttcttaaaacgcttttttttttcttttttgagacggagtcttgctctgttgcccaggatggagtgcagtggtgcca

SEQ ID NO: 81712 - DNA, 120 bp, synthetic construct
  source 1..120: mol_type = other DNA
gaaagtaaattctcacaaattcctttgtcactaaaacaaaagcactgaaaatttatgctagcaagaatgcaaagtgagggaaactctctttgattgctggaagaaatgcaaagtggtgca

SEQ ID NO: 81713 - DNA, 120 bp, synthetic construct
  source 1..120: mol_type = other DNA
tccaggtttctcactgttggtatgagaagttataggtaaacaagaaaggaaggccagaatgatcatgagggactgtgctagagtcagagttacactgtgacatcatgtttaaacacaagc

SEQ ID NO: 81714 - DNA, 120 bp, synthetic construct
  source 1..120: mol_type = other DNA
tcaagatgtggctacaaacctgggcatccctgttctcttgggtgccaggagccctgcccttctgggtgcagttgcaggtgcgcaagctgtggctgtggatctgggcatctccacactttt

SEQ ID NO: 81715 - DNA, 120 bp, synthetic construct
  source 1..120: mol_type = other DNA
aatggcatggctgaaagagcagtcacacaaacagggctaaaacataccctttcctcactcaccacattgcaggcgacaaaaaggagtgaagagctgctgcccttcggggagcccagacct

SEQ ID NO: 81716 - DNA, 120 bp, synthetic construct
  source 1..120: mol_type = other DNA
aaggaacaagatgtccaactagatgcagccaggaagcaccgctttcactgagagagaccaaattatcgagtaaatcaacataaattggacagatcttaggaaagaaaatgctgagcgtga

SEQ ID NO: 81717 - DNA, 120 bp, synthetic construct
  source 1..120: mol_type = other DNA
aagttagagttagcatgaataagttgtagtgtttcactgtaccatagcgtgactgttgttaacaataatataccgtatatttcaaaataggtagaaaagaggattttgaatgatctcgtc

SEQ ID NO: 81718 - DNA, 120 bp, synthetic construct
  source 1..120: mol_type = other DNA
tgattagaggatttgctgcacttaagaatttgagatctgagataatgaatcccctgagatagaagaagatgatgtccccatggtgcagttaactctactgtttgctcagtggaaggatat

SEQ ID NO: 81719 - DNA, 120 bp, synthetic construct
  source 1..120: mol_type = other DNA
caccttctgctcaatcctgcagacttaaaacatcatcaccactgtctttggctcatctctttcccagaggacacacatttaacaaaatttccaagttaacctcctatgttaatctctcac

SEQ ID NO: 81720 - DNA, 120 bp, synthetic construct
  source 1..120: mol_type = other DNA
attaactcatcatttacattaggtatttctcctagtgttatccctccccctgccccccaacccatgacaggcacccgtgtgtgatgttcctcgccctgtgtccaagtgttttcattgttc

SEQ ID NO: 81721 - DNA, 120 bp, synthetic construct
  source 1..120: mol_type = other DNA
ccaaggacggaggataatttgagagagtcagatgaactgtaatgggtttttatagcaaagcttttgacaaaaatcgttctgtgttttgccttcaaaactagaaattactatatacttctg

SEQ ID NO: 81722 - DNA, 120 bp, synthetic construct
  source 1..120: mol_type = other DNA
gttagttccaaaaggcattcctggctgttccaaattgtgcacggaaatgcttccaggttgtgtttcattattaatatcacttccttgttatctcactgattcgaagactcattattatag

SEQ ID NO: 81723 - DNA, 120 bp, synthetic construct
  source 1..120: mol_type = other DNA
ctagcataggaagcaagaattaagcatagtgggacagctaacataaaaatgcataccacagagagtgtgagctcgttagaacccttttcaccacaggcaatctttatcagaacaggaatc

SEQ ID NO: 81724 - DNA, 120 bp, synthetic construct
  source 1..120: mol_type = other DNA
tctttaggtgtctgatagagtaaatgtggcctggggctgaggaacaggatggttcattttcagaaacagtgctgcaaggcattactgaaatgctaagaagaataaacatattgaggtagc

SEQ ID NO: 81725 - DNA, 120 bp, synthetic construct
  source 1..120: mol_type = other DNA
gtgaatgttgccctttgattatatgctatctcacgccggaagtgtgcaaaacaataataacactctttccaactagtccttagtgaaccctctgtgtcaaacacccccatatgctttcta

SEQ ID NO: 81726 - DNA, 120 bp, synthetic construct
  source 1..120: mol_type = other DNA
cttttttgttaaaaatgaagacacaaacacacacattagcccaggcctacacagggtcaggatcatcaatatcattgtcttccagctccttgtcccactggaaggttttcaggggcaata

SEQ ID NO: 81727 - DNA, 120 bp, synthetic construct
  source 1..120: mol_type = other DNA
tttgtctgtgagtggtggtcacccagagctcctccatttctctggacatttccctgaagacatcagactaggaatgactaatcaatgtgatttaattttgaagtatatttaagctctgta

SEQ ID NO: 81728 - DNA, 120 bp, synthetic construct
  source 1..120: mol_type = other DNA
cctgcatttaagaacatccgttagagttgtatagctgactataaaccaccttttgaagaggattaaaacaagacaattgtctgtgtatgacaaaactcgttaccacagccactggcaaaa

SEQ ID NO: 81729 - DNA, 120 bp, synthetic construct
  source 1..120: mol_type = other DNA
aagtcagtacaagatacaggtcataaagaccttgctgataaaacagattactctaaagaagatggccaaaacccaccaaaaacaagatggcgatgagagtaaccactggtcatcctcgct

SEQ ID NO: 81730 - DNA, 120 bp, synthetic construct
  source 1..120: mol_type = other DNA
tctagttgcttcttagaaccactgagcagctgtttccaaaggttagaaaaggctccctgaaatgaaatgctctctgcctttcagatgtatattaggcagtggcagtatgatctacacata

SEQ ID NO: 81731 - DNA, 120 bp, synthetic construct
  source 1..120: mol_type = other DNA
aacaaattcaagtgcatgggatagcaaatacaaatttaaagggttttttttttaagatggagtcttgctgtgttgcccagtctggagtgcagtggtatgatctcagctcactgcaacctc

SEQ ID NO: 81732 - DNA, 120 bp, synthetic construct
  source 1..120: mol_type = other DNA
acacgcacacacacgcacacacactttttgtcatttcagaaacaatgactgataaaggaatttttttcttttaaacacatctctagcttatctacttttgctgaattccataaactttgg

SEQ ID NO: 81733 - DNA, 120 bp, synthetic construct
  source 1..120: mol_type = other DNA
gaagctttaggtttacaaaaaattgaatggaaggtgtagagaactcacatgtaaccccttttactccctcccccagagtttcttttattattaacaacttgcattcatgtggtacatttg

SEQ ID NO: 81734 - DNA, 120 bp, synthetic construct
  source 1..120: mol_type = other DNA
tcagctctttgaccctatttttaaagtagctgatgtaagcctttgtccaacaagttcaacacctagatttgctgctattgattgcatttccccctccttttatgacccatacttcctgtg

SEQ ID NO: 81735 - DNA, 120 bp, synthetic construct
  source 1..120: mol_type = other DNA
aactgtcggctcatgttctttgctcactttttaatggggttgtttttctttcttataaatttggaaaactaaatattttaaatactagaaatggcaactgtggaaaccagattctccctg

SEQ ID NO: 81736 - DNA, 120 bp, synthetic construct
  source 1..120: mol_type = other DNA
cacttttcattcttttttggtattttggtatttcaggagatttgattttttttgttctgatgcttatatttacacattagtccctcttttaggcatcattgattggttttctaaaatgag

SEQ ID NO: 81737 - DNA, 120 bp, synthetic construct
  source 1..120: mol_type = other DNA
ataggtaaattgtgtgtcacatgggtttggtgtacagattattttgtcacccatgtaataagtgtggtaaccaatgggttggttttgatcctcacctcccccatcataggccccagtttc

SEQ ID NO: 81738 - DNA, 120 bp, synthetic construct
  source 1..120: mol_type = other DNA
gatattagacctttgccagatgcatagtttgcaaatattttctcccattctgtaagttgtgtgtgtattccgttgatagtttcttttgctatgcagaagctctttagtttaattatattc

SEQ ID NO: 81739 - DNA, 120 bp, synthetic construct
  source 1..120: mol_type = other DNA
gttgctttttattgttagtgtatccattataagtttttgcactgtggtgtccatgaggcttacaaaaagtatcctataatataacatgtagtataaaactgatagcaacttaactttgct

SEQ ID NO: 81740 - DNA, 120 bp, synthetic construct
  source 1..120: mol_type = other DNA
tcaagaacatgcaaacttatctatgagggcataaattagagtagtagttgactaagtctgaaatcaaaagacaaaatagattttggagagtgatggaaatgttctctaccttgattgagg

SEQ ID NO: 81741 - DNA, 120 bp, synthetic construct
  source 1..120: mol_type = other DNA
ggtgtatatgtgccacattttcttaatctagcctatcattgatggacattccaagtcttttctatcatgaatagtgctacaatacacatatgtgtccatgtgtctttataatagcatgat

SEQ ID NO: 81742 - DNA, 120 bp, synthetic construct
  source 1..120: mol_type = other DNA
tttgtatagggtgtaaggaatggatccagttgcagctttctacatggtggctagccagttttcccagaaaatattataaacaactctatggaaataaactagaaaatctagaagaaattg

SEQ ID NO: 81743 - DNA, 120 bp, synthetic construct
  source 1..120: mol_type = other DNA
catctgtcttaagatattttttaatttcccttttgatttcttcattaaccctttgtttattcaagagcgtgttggttaatttccacgtatgtaatattttcaaattttatcgtattattt

SEQ ID NO: 81744 - DNA, 120 bp, synthetic construct
  source 1..120: mol_type = other DNA
tgtctttgtgtgtgccattttaatttatatgcgggtgcatcatatatcagacttaagactatttcacttcataattaaattgttcatacatatatattgaaagtgaacacccggccaaaa

SEQ ID NO: 81745 - DNA, 120 bp, synthetic construct
  source 1..120: mol_type = other DNA
aaaggtgaccaataaacatatggaaaaaattgttcatcattactaatcatcagagaaacggaaatcaaaaccacaatgagattccatctcacaccagtcagaatggctgctatttaaaag

SEQ ID NO: 81746 - DNA, 120 bp, synthetic construct
  source 1..120: mol_type = other DNA
ctaccagacctgtatgtgggaagagagaagtggtggaacaacaggccacatttggcgcattggagatgaaattcttggttgaaaattcttttctttaagaatgttgaatattggccccca

SEQ ID NO: 81747 - DNA, 120 bp, synthetic construct
  source 1..120: mol_type = other DNA
ggtttttgtgtgacggtcctttatgttgatgttgacgttgtttctgtttgttagttttccttataacagtcaggcccctcttctgcgggtctgctgcagtttgctggaagtgtactccag

SEQ ID NO: 81748 - DNA, 120 bp, synthetic construct
  source 1..120: mol_type = other DNA
ctcagttggaaatgcagaaatcacctgccatctggattggtcttgctgggagctgcaaaccagaactgctcctatttggccgtcttcggcttcatccttttgtgtttttaagaacagtct

SEQ ID NO: 81749 - DNA, 120 bp, synthetic construct
  source 1..120: mol_type = other DNA
cgctgcacccactaactcgcatctagcattaggtatatctcccaacgctatccctcccccctccccccaccccacaacagtccccagagtgtgatattccccttcctgtgtccatgtgat

SEQ ID NO: 81750 - DNA, 120 bp, synthetic construct
  source 1..120: mol_type = other DNA
gcagtttcatccgtcccagctcctctaaactactgagcaagtatagacagtactataccactcacaaagatggcttaataattcaatttccaaaacacagtatttcctatgaatttcagc

SEQ ID NO: 81751 - DNA, 120 bp, synthetic construct
  source 1..120: mol_type = other DNA
gtgtgattttctaactttatcatacatcacaacctctttccatctagaagggctaaatgtggcaaatgttttctatttaaaagttggggcgggggcagttgagagccgctttctcacttt

SEQ ID NO: 81752 - DNA, 120 bp, synthetic construct
  source 1..120: mol_type = other DNA
gtattgctgggtccaatggtagctctgtttttagttcttttggaaaatctccaaactgctttccacagtggctgaactaatgttcattctcaccaacagtgtataagcgttcgcgtttct

SEQ ID NO: 81753 - DNA, 120 bp, synthetic construct
  source 1..120: mol_type = other DNA
caacaatgaattatgaaaaaatagaaaatctgaacagactaatgagtaagggggttgaatcagtgataaaagtctcctaccaaagaaaagcccagaacctgatggttcatggattggagg

SEQ ID NO: 81754 - DNA, 120 bp, synthetic construct
  source 1..120: mol_type = other DNA
agatatcacctcatacctgttagaatgactattatcagtaaactaaaaggtaataagtactgacaaggatgtggggaatccttatatactaatggcaggaatgtaaattaatacaggcat

SEQ ID NO: 81755 - DNA, 120 bp, synthetic construct
  source 1..120: mol_type = other DNA
aaaaaatagtataagtagttttattacttaaagattccagagagaagagggcaacttgcctcacaggcctaatgggagaaagggcatcccttagagacatgcatgtgcaaccagtgggtg

SEQ ID NO: 81756 - DNA, 120 bp, synthetic construct
  source 1..120: mol_type = other DNA
agtagaatgatagctacctggggggcaggggatggagaaaggggggattttaaacaagtagatttaaatgttctcactataagaaaaataagtatgtgaggtgatgactgtgttagctgg

SEQ ID NO: 81757 - DNA, 120 bp, synthetic construct
  source 1..120: mol_type = other DNA
gtaggccaggtagagagtgacagggaacagggacaaacacaggaaggtcagtactgaaagaagttggtgcacttcttaaggggtagacagcttccatatttcaaaattgcagaaagtgta

SEQ ID NO: 81758 - DNA, 120 bp, synthetic construct
  source 1..120: mol_type = other DNA
ttgagttattaaaagtttttcaaaacactgaaggtgagtcgggtgtagatattagttttttgagacagagtcttgctctgtcacccaggctggagggcaatggcatgatctcagctcact

SEQ ID NO: 81759 - DNA, 120 bp, synthetic construct
  source 1..120: mol_type = other DNA
cttcttgtccttgtctaacaaacttgttatacattctttcaacttcgcataccacattcagacctctcttcactgttgtgcatccaaacactctccatttctctcttaccaacctatgtt

SEQ ID NO: 81760 - DNA, 120 bp, synthetic construct
  source 1..120: mol_type = other DNA
tctccggggcccggaaaagaccatctcgtatgctggttgcatggttcaactttactttgttcttgcactgggaatcacagagtgtgtcctactggtggtgatgtcatatgatcgttatgt

SEQ ID NO: 81761 - DNA, 120 bp, synthetic construct
  source 1..120: mol_type = other DNA
ttgggaatatttctaacaatgtgctaaattatgaactgatgatatatacagaaagagaagggcaatattgcaaagacttaggctaaaaaggtttttggttattgaataaaccttaaatga

SEQ ID NO: 81762 - DNA, 120 bp, synthetic construct
  source 1..120: mol_type = other DNA
cttccttagctaggttagaaatttctttcaattaccatttacctagaagtcaccataaaatgaatgggaagaactcgatagttattcttctataaggcaaatatatgaataaaatataaa

SEQ ID NO: 81763 - DNA, 120 bp, synthetic construct
  source 1..120: mol_type = other DNA
tagtgccgtaataaacatacgtgtgcatgtgtctttctagcagcatgatttataatcctttgggtatatacccagtaatgggatggctgggtcaaatggtatttctagttctagatccct

SEQ ID NO: 81764 - DNA, 120 bp, synthetic construct
  source 1..120: mol_type = other DNA
gtgaagaaagtcattggtagcttgatggggatcgcaccgaatctataaattaccttgggcagtatggccattttcgcgatattgattcttcctatccatgagcatggaatgttcttccat

SEQ ID NO: 81765 - DNA, 120 bp, synthetic construct
  source 1..120: mol_type = other DNA
cgtctggtcctggacttttttttggttggtaagctactaattattgcctcaatttcagagcctgttatttggtctattcagagattcaacttcttcctggtttagtcttgggagggtgta

SEQ ID NO: 81766 - DNA, 120 bp, synthetic construct
  source 1..120: mol_type = other DNA
gtctctaaggacttgttgtatgaatctgggtgctcttgtattgggtgcatgtatatttaggatagttagctcttcttgttgaattgatccctttaccattatgtaatggccttctttgtc

SEQ ID NO: 81767 - DNA, 120 bp, synthetic construct
  source 1..120: mol_type = other DNA
ttatccactagttttgcaatcatttatgtttttcttaacaccattatcccttctatgtttattaattagggatctactgttaggaatggctttttcttcaccattcatttatttactctt

SEQ ID NO: 81768 - DNA, 120 bp, synthetic construct
  source 1..120: mol_type = other DNA
ctgctacttctcaccctcattttcacttcctatggtgctattgcccaggctgtactgaggatgcagtcaaccactgggcttcagaaagtatttggaacatgtggagctcatcatatggtt

SEQ ID NO: 81769 - DNA, 120 bp, synthetic construct
  source 1..120: mol_type = other DNA
caaatagagaggctctgaaaatgacttgaagtcaatgggtgtataaaagaattatgtttaaatatactggaaaatttttatgataaaagctgttatatggaaaatgttagtttattttta

SEQ ID NO: 81770 - DNA, 120 bp, synthetic construct
  source 1..120: mol_type = other DNA
actatagtcaccatactatagaatagatctcttgaatttattccttctaactgaaactttgtaccctttgaccagcatctccccattttccctccctccactgctaacccctgacaagcc

SEQ ID NO: 81771 - DNA, 120 bp, synthetic construct
  source 1..120: mol_type = other DNA
tttatggctgcatagtattccaaggtgtatatgtgccacattttcttcatccagtctattattgatgggcatttgggttggttccaagtctttcctattgtaaatggtgctgcaataaac

SEQ ID NO: 81772 - DNA, 120 bp, synthetic construct
  source 1..120: mol_type = other DNA
atctgccgacctcggcctcccaaagtgttggaattacaggcataagccactgcgcctggccctattttaaatttatttaggaaacttcatagtgttttccctcatggctgtcctaattta

SEQ ID NO: 81773 - DNA, 120 bp, synthetic construct
  source 1..120: mol_type = other DNA
tgtttcggcccatccctttgtttcccttaaggaatacttttagttaatctataatctatagaaataatgcttatcactggcttcgtgtcaatcaatatgtgggtcaaactctgttcaggg

SEQ ID NO: 81774 - DNA, 120 bp, synthetic construct
  source 1..120: mol_type = other DNA
tctcagtaatatataagtgtcatgtggggaagtatgttgagattaggtagcattctgttttttaactagctttcatccactagttttattagtaagcatcccttaatattccttcccaga

SEQ ID NO: 81775 - DNA, 120 bp, synthetic construct
  source 1..120: mol_type = other DNA
ctggttctagatccttgaggaattgccccactgtcttccacaatggatgaactaatttacattctcaccaacagtgtaaaagcattcctatttctccacatcctctccagcatctgttgt

SEQ ID NO: 81776 - DNA, 120 bp, synthetic construct
  source 1..120: mol_type = other DNA
gttttggttactgtattcttgtagtatagtttaaagtcaggtagcatgatgcctccaactttctccttcttgcttaggattgtcttggttatacgggctctgttttggttccatgtgata

SEQ ID NO: 81777 - DNA, 120 bp, synthetic construct
  source 1..120: mol_type = other DNA
ccatcaggtcatttatgttcttctctaaactgattaatttagttaggaagtcttctatcttttcttcaaggttcttagcttccttgcattgggttaaaacatgctcctttagcttggagg

SEQ ID NO: 81778 - DNA, 120 bp, synthetic construct
  source 1..120: mol_type = other DNA
ataacaccaagagatggtaatattgttggcaaatatttattttgttataacaccacatttctttaccctctcaggaaatggaaagtttttgtattgtgcttgagagtggggcaatggtga

SEQ ID NO: 81779 - DNA, 120 bp, synthetic construct
  source 1..120: mol_type = other DNA
tggccagagcaatcaggcaagagaaagaaatgaaaggcatccaagtaagaagagaggaagttatactattcctggttgcaaaagacatgaatccgtatgagaaaaccccatagtcttggt

SEQ ID NO: 81780 - DNA, 120 bp, synthetic construct
  source 1..120: mol_type = other DNA
gaaataccattctggacataggacttgggaaacatttcatcatgaagatgccaaaagcaattgcaacaaaaacaaaaattgacaaatgaagcctaattaaactaaagaacgtctcacagt

SEQ ID NO: 81781 - DNA, 120 bp, synthetic construct; identical to SEQ ID NO: 81708
  source 1..120: mol_type = other DNA

SEQ ID NO: 81782 - DNA, 120 bp, synthetic construct
  source 1..120: mol_type = other DNA
gaaattccgtctctactaaaaatacaaaaaattagccaggcatggtggcaggtcctgtaatcccagctacttgggaggctgaggcaggataatccttgaacctgggaggcagaggttgca

SEQ ID NO: 81783 - DNA, 120 bp, synthetic construct
  source 1..120: mol_type = other DNA
ccagtaatgggattgctggatcgaatggtagctctatttttagttctttgaaaagtctccatactgttttccacagaggttgtactaatttacattcccaccaatagtgtatgtaatcct

SEQ ID NO: 81784 - DNA, 120 bp, synthetic construct
  source 1..120: mol_type = other DNA
tggcctcccaaagtgctgggattacaggtgtgagccaccgtgcctggcctcttacaagactcttcatggagagagaaataaaatagaaattaggttgtatgaataacattgaatcttgaa

SEQ ID NO: 81785 - DNA, 120 bp, synthetic construct
  source 1..120: mol_type = other DNA
attcttagagaaaaaaatgaaaaaactgacctgttcttatcaaagacatgatttcccacatttaaaaaaccttgtaatagttgatttacagttaagttgactgatggaaatctcactgat

SEQ ID NO: 81786 - DNA, 120 bp, synthetic construct
  source 1..120: mol_type = other DNA
caagatgtgggaagatcctagaatggtatgacagtggcaaatcaacctcactttatataaatatgtaagctaacaacactgaaaagggtagagaagaagtaaaaagtggcctaacttacc

SEQ ID NO: 81787 - DNA, 120 bp, synthetic construct
  source 1..120: mol_type = other DNA
ttccttactagtctattaatagtccccactttcagatgtggagctcatgatctcctttgttaagtgtaggctggactcagtgactgtcttccaaggaatagagtatggacaggtaacaat

SEQ ID NO: 81788 - DNA, 120 bp, synthetic construct
  source 1..120: mol_type = other DNA
tgccagcctcgcagactggagtggggacttacgatgctttttccaagcctgcccgtggctgcccaaggaccaatcagcaagcacttcctttcctctgaagtccataaaaattcccagact

SEQ ID NO: 81789 - DNA, 120 bp, synthetic construct
  source 1..120: mol_type = other DNA
tctgtttatgtggtgaatcacatttgtagatttgcagatgttcaaccaatcttgcatgccagaaatagagccttcttgattgtggtgtattaactttttgatgtgctgctggatttgttt

SEQ ID NO: 81790 - DNA, 120 bp, synthetic construct
  source 1..120: mol_type = other DNA
ggctgagatgattaaatcaaccaatttatgttgattaactcaataatttggtctctctcggtgaaagcagtgcttcctggctgcaactaattggacatcttgtcccttcccatctgtgta

SEQ ID NO: 81791 - DNA, 120 bp, synthetic construct
  source 1..120: mol_type = other DNA
ttcctgactttttaatggtcaccattctaactggcgtatgatggaatctcattgtggttttgatttgcgtttctctaatgatgagtgatgatgagcttttttcatgtttgttggctacat

SEQ ID NO: 81792 - DNA, 120 bp, synthetic construct
  source 1..120: mol_type = other DNA
ttctagcatagtgcagagaacatagtttcctcataagtgaaagtcaagtcaatagtaggagatatttggttatctgaagggcatagctgataacagtaattgactcagcagctcttcctt

SEQ ID NO: 81793 - DNA, 120 bp, synthetic construct
  source 1..120: mol_type = other DNA
cttagggattctgagtccctcaagtttaattggtcattgtgtccccagaggcaataagttaactctattcccaattgcactggtggcataatactgacacataggtagttcacaaattct

SEQ ID NO: 81794 - DNA, 120 bp, synthetic construct
  source 1..120: mol_type = other DNA
atgcttggactaaatctcccaaagatctgtggttaaaatattatttatatcatatgatgtcatttaacataaattaacacactgaagtttaaggttagcattaattcactggagcagaac

SEQ ID NO: 81795 - DNA, 120 bp, synthetic construct
  source 1..120: mol_type = other DNA
ttgtcaccttatactatagatcattcagaataaagtgctttccatatgtgatctcttttagactgtttatcagaaatgacgtcagtgaattaaaagtattagtataggctgggtgaggtg

SEQ ID NO: 81796 - DNA, 120 bp, synthetic construct
  source 1..120: mol_type = other DNA
cagagctatgctaggtttttcatcttccatcataaaatactgaagagaacgggactagctgtatattctgtaggccgtcacactggccaactatatctaacacatcatgcgtatcagaca

SEQ ID NO: 81797 - DNA, 120 bp, synthetic construct
  source 1..120: mol_type = other DNA
agcctcgcttacggtgatcttgaaaaatagtagtgaggaaaacgcctcccaatggacagagtttcagatggtacccagtcattcactttgtgtggaaagagaagtagtttgaagttagaa

SEQ ID NO: 81798 - DNA, 120 bp, synthetic construct
  source 1..120: mol_type = other DNA
tggagggatctgttgaagctacacctgaaattccagctcagatgaaatgtcatccttcaagacccagtactttaaatcaattatctttctatggtgctctgtcctcactaggaagaatgc

SEQ ID NO: 81799 - DNA, 120 bp, synthetic construct
  source 1..120: mol_type = other DNA
cactgaccaacaaggagatttaaggcttgccgttggcctcagctcagaacatcaatgaattgtcatctcatattgagaacttcctacagggttcagtgaaactttagtagtttgcattac

SEQ ID NO: 81800 - DNA, 120 bp, synthetic construct
  source 1..120: mol_type = other DNA
acatttacaaccataggaatggaggtgtgctggcttttaccatgaactcccccagatagtgttctgaaaagcagaggaggccaactaaaataaaatcacagggaaaactatatttgcagg

SEQ ID NO: 81801 - DNA, 120 bp, synthetic construct
  source 1..120: mol_type = other DNA
gaatttgcttctagtgtgttgataaagttaaatgtgatttatcataggtgggtaagaatatggttggtagataggagacaacagggctaggatattcagaaaataacctccagcaagctt

SEQ ID NO: 81802 - DNA, 120 bp, synthetic construct
  source 1..120: mol_type = other DNA
ataaagctaataggcagtgattagaactatgtaataaatgtggtaaatgtatactctttgagagcacagatgaaacacatctaatatttagcaaagtgattttcactagcaggtgcttac

SEQ ID NO: 81803 - DNA, 120 bp, synthetic construct
  source 1..120: mol_type = other DNA
gtactgatactacctacagtgaaattcagatgtctatcgccagtgttgtcctcctggtgatgcccttgatcattatcctttcctcttctggtgctattgctaaggctgtgctgagaatta

SEQ ID NO: 81804 - DNA, 120 bp, synthetic construct
  source 1..120: mol_type = other DNA
atactgtaatatggcaggtcttggttttaattgcttctgtctctctgtctcagcatgaccactgttgacctgtaatgtgactttcactatccaatgcaaagtgtttgccatgccaaagtc

SEQ ID NO: 81805 - DNA, 120 bp, synthetic construct
  source 1..120: mol_type = other DNA
agaagacaagaactgagctttgagaacctccgcctagatttcagaggatgtattgatgtgcctggatgtccaggaagaagtttgctgggttggcaagagccctcatggagaatctctgct

SEQ ID NO: 81806 - DNA, 120 bp, synthetic construct
  source 1..120: mol_type = other DNA
ataggagtggttactccccatgctgctgttctcatgatagtgagtgagttctcacaagatctgatgattttataaagagtttttccccttttgccctttttctctcttctgctgccatct

SEQ ID NO: 81807 - DNA, 120 bp, synthetic construct
  source 1..120: mol_type = other DNA
ttaatttaatattaagttccgggatgcatttgcaggacgtgcaggtttgttacataggtaaatgtatgtcatggtggtttgctgcacctattaacccaccacgtaggtattaagccccac

SEQ ID NO: 81808 - DNA, 120 bp, synthetic construct
  source 1..120: mol_type = other DNA
gaaactaatttctaatttcttagcagatacatactggcttctcagccaggctactgacctttaccccttacatacacaccttaacttctgtatgaacatggatgtgactgcattgggtaa

SEQ ID NO: 81809 - DNA, 120 bp, synthetic construct
  source 1..120: mol_type = other DNA
tcttaccctctactagatcttgctgtctgcccttgtctctgcgtattagtgagcgtcctctcctgactcaacaaagaaagtaagagaatgaagtgtatagaactgaaaatgccttgacat

SEQ ID NO: 81810 - DNA, 120 bp, synthetic construct
  source 1..120: mol_type = other DNA
accggggactgttgtgaggtggggggagaagggagggatagcattagtagatatacctaatgctaaatgacagttaatgggtgcagcacaccaacatggcacatgtatacatatgtaaca

SEQ ID NO: 81811 - DNA, 120 bp, synthetic construct
  source 1..120: mol_type = other DNA
ggtggtaagttgattatgagacccttcattctccttcttctacacttgagatctgaccaaacacaaaaagggataggttgccaaaaggagggctttgtttaacttttttggagtattaga

SEQ ID NO: 81812 - DNA, 120 bp, synthetic construct
  source 1..120: mol_type = other DNA
gtgaggccatgtctgttaccaggagacatgagactcacagcagatctctctggcttaacatgggagatggcggtaagtgcagctatatctgaatttttttaatagttaaaagctgacttt

SEQ ID NO: 81813 - DNA, 120 bp, synthetic construct
  source 1..120: mol_type = other DNA
gaatctttggaccagaaaatgcacagtatgaaaattagcttcaaaatctccaggacagagattaagtaattactgatatatatcaagaaaatgaaataaaacttcagatcatttacatat

SEQ ID NO: 81814 - DNA, 120 bp, synthetic construct
  source 1..120: mol_type = other DNA
ccacggggaaacaccatgatagactgagccaaatgtagagctcagctcttcctcccccaggatcataacatatcaccagataaacctttgaaaaaaaacgaaatgcaacaaaacaaaaag

SEQ ID NO: 81815 - DNA, 120 bp, synthetic construct
  source 1..120: mol_type = other DNA
ttaaagcatccgtgaggcagccttctaaaatttctcaggaagtggtagccagtgtgaaaatgtatcacctcaccttgcttcatatttcccttctctcagttccctttttttctcaccttt

SEQ ID NO: 81816 - DNA, 120 bp, synthetic construct
  source 1..120: mol_type = other DNA
gataaccccgcctccctaaacagcagatgccatgttggagaggtgaatgcaattggaatcactgagcatttacttcacgttctcatttccaccgattttacctcatgcctcactatttaa

SEQ ID NO: 81817 - DNA, 120 bp, synthetic construct
  source 1..120: mol_type = other DNA
ctaactgctggtgaatgtcccttcttgtgaataactgaaataaaaaatcatgttatcaagtgttagaatgagtgatttggcctgttcccccagtttgccacagcctgctctagaacacag

SEQ ID NO: 81818 - DNA, 120 bp, synthetic construct
  source 1..120: mol_type = other DNA
tgacttgatccttatgaccaccttggctatatgtccataggacagcagtattagcactaagggcaagaggagcaagaccagtgaagcaacaaagagctgaacctcattatcatggatgtc

SEQ ID NO: 81819 - DNA, 120 bp, synthetic construct
  source 1..120: mol_type = other DNA
cactgactcagagatgttacagtgacccatggaataaattttgatatagaaatcacaaaagaagaccttaaagaaaatacataatacagagagatacatgaaggctattgtggaagcagt

SEQ ID NO: 81820 - DNA, 120 bp, synthetic construct
  source 1..120: mol_type = other DNA
aatggaaatgaaaagaagtcacaggaaaagtcagaggaggcatgggtaccccataaaaggatgaagacactgagtgatccctcaaaatagggggaggagagcacaatagtaaaaagagaa

SEQ ID NO: 81821 - DNA, 120 bp, synthetic construct
  source 1..120: mol_type = other DNA
catagagttcaaaccattattaccttcaagtgacaactcagtgtctaaggctcatgtattggttgtcggggctgttatttgagattggagatcactgaagatcagcaaatcaggagacac

SEQ ID NO: 81822 - DNA, 120 bp, synthetic construct
  source 1..120: mol_type = other DNA
aggtctatatgcagtaataaaagagtggtgaacattttgctgcacatgccacatctgaagaaaacaacaactgctgagcgctagttgaccaattttctatgcattgagccccaggattgc

SEQ ID NO: 81823 - DNA, 120 bp, synthetic construct
  source 1..120: mol_type = other DNA
aatttgtactcacctactaactaatgaagttgaccagtttctcttatatttatagtcattgagaaatcttttgtgtagtatccattcaagtccttgactttttccaaattcatttgtagg

SEQ ID NO: 81824 - DNA, 120 bp, synthetic construct
  source 1..120: mol_type = other DNA
gagtaattgacggcctgaggcgcagtctcaagacatcctgagaacaagtgcccaaggtgattgaattacaacttgatttacattttaggagcatgtaaaaaatcagtcaatacatgtggg

SEQ ID NO: 81825 - DNA, 120 bp, synthetic construct
  source 1..120: mol_type = other DNA
ttgacccaccttaatcttatggccagcaccatcttgtctgctccttattctacacgtggctgacaaagagaagggaagatggagccaccattttgatcatgcttaatcccaggtagcctt

SEQ ID NO: 81826 - DNA, 120 bp, synthetic construct
  source 1..120: mol_type = other DNA
taggttgattccatgtcttgcttttctggatagtgctgtgatgaacatttacctgcacatgtgctgtatccttttttttttttttttgagacaggatgtcactctctcgcccaggctgcg

SEQ ID NO: 81827 - DNA, 120 bp, synthetic construct
  source 1..120: mol_type = other DNA
gtacctgtttttgtaccagtacaatgctgtttggttaccatagttctgtagtgtagtttaaagttgggtgatgcctctagctttgttctttttgctttggattgcctttgctattcgggc

SEQ ID NO: 81828 - DNA, 120 bp, synthetic construct
  source 1..120: mol_type = other DNA
tccatatgtttttatttttcaactcccagttatgagtgaggacatgcagtgtttggttttctgttcctgtgttagtttgctgtgaacgatgatttccagcttcatccatgtccctgcaaa

SEQ ID NO: 81829 - DNA, 120 bp, synthetic construct
  source 1..120: mol_type = other DNA
atcctttccccattgcttgttttttgtcaggtttgtcaaagatcagatggtagtagacatgtggcattatttctgaggcctctattttgttccattggtctatatatctgttttggtacc

SEQ ID NO: 81830 - DNA, 120 bp, synthetic construct
  source 1..120: mol_type = other DNA
ttccatcaatacctagtttattgagtgtttttagaatcaagggttgttgaattttatcaaaagccttttctgcagctattgaaataatcatggggtttttatcattggttctgtttatgt

SEQ ID NO: 81831 - DNA, 120 bp, synthetic construct
  source 1..120: mol_type = other DNA
ttgtttactcttgcttctctggttcttttaattgtgatggtagggcgttgattttagatctctcccccttcctcctgtgggcatgtagtgctataaatttccctgtaaacactgctttag

SEQ ID NO: 81832 - DNA, 120 bp, synthetic construct
  source 1..120: mol_type = other DNA
tttacaatatggtatgtttttgcagtggctggtaccggcttttcctttccccacttattgcttcctttagaagctcttgtaaggtaggcctgggggtgacaaaatctctcattatttgct

SEQ ID NO: 81833 - DNA, 120 bp, synthetic construct
  source 1..120: mol_type = other DNA
ttggtgaccttcagatgggatcctgagtagacatttttctcttgatgttgatactattcctttctgtttgttagtatttcttctaaccatcaggcctctctgctgcaggtctcctggagt

SEQ ID NO: 81834 - DNA, 120 bp, synthetic construct
  source 1..120: mol_type = other DNA
ataaatggaaaacatgaatcctacaaactggttatgacaatcaatggtagcagtacattttaaagaaatatcactgaccccaaaaatccatcagagactatttcgagcacctctatgcac

SEQ ID NO: 81835 - DNA, 120 bp, synthetic construct
  source 1..120: mol_type = other DNA
tgagtgcccaagggggttcagtgtaattatttgcttggttggtgagtttttgggctctatccgtgagtttttttaggttgtcgtataccaggccagattgatttaggtaaaaacaatact

SEQ ID NO: 81836 - DNA, 120 bp, synthetic construct
  source 1..120: mol_type = other DNA
ggtagaagtactgtccagtcctttttaagttagaggctgagcttggtgaggtgtgttttttaaagagcattagtccattttacctttcctgaagattgaggacagtaaggggtatgaagt

SEQ ID NO: 81837 - DNA, 120 bp, synthetic construct
  source 1..120: mol_type = other DNA
ctggagtgagggctggaatattagtggatgtggaggcatcagctatttcttttgccgtcctgttggcataggcatttccttttgcaataagatcagtaggtttctggtgccctttataat

SEQ ID NO: 81838 - DNA, 120 bp, synthetic construct
  source 1..120: mol_type = other DNA
gaaaagggatgggacgagttggggagtgcaagtgtaggagctgtctccaggacctttttgagaaagtgaaaggaagaatggggaaaagacttaggatctatgggattagttaagttatcc

SEQ ID NO: 81839 - DNA, 120 bp, synthetic construct
  source 1..120: mol_type = other DNA
aggttttaatgggatgataaggggtgcatgatcggttgccaaagtaggagtagaggtatcccatacgtgtggattaaggtagggagacataaggggaggatgtgaaggagactttgaact

SEQ ID NO: 81840 - DNA, 120 bp, synthetic construct
  source 1..120: mol_type = other DNA
ttattgtacaccttgaaggcaaggttaattaagtcctgttgtggggtttgagggcggaatctaatttttggagctttttctaatgttgggagtggattgggtaataaaatacatattgag

SEQ ID NO: 81841 - DNA, 120 bp, synthetic construct
  source 1..120: mol_type = other DNA
ggtaagtttaaagagaaaagtagagacacagagaaggtgggggtgagtagccgtgggctgtaatgtgggtgagcagccaaagcaggtgtccccacaactgacttgtcaccaagggaatgt

SEQ ID NO: 81842 - DNA, 120 bp, synthetic construct
  source 1..120: mol_type = other DNA
agttaaagggggttgttctcttgcatgcaggtgcagcagtcgcaaggtgctcaatggggagctcctgagattcattgtccgggaaaaggaatgtcacagggtcaattgatcagttagggt

SEQ ID NO: 81843 - DNA, 120 bp, synthetic construct
  source 1..120: mol_type = other DNA
gcaagagaaagaaataaaagtcatccaaataggaagagggaaagtcaaacgatctctcttcagagatgatatgattatatacctagaaaactccactctctgccaaaaggctcctagatc

SEQ ID NO: 81844 - DNA, 120 bp, synthetic construct
  source 1..120: mol_type = other DNA
acacacacacacacacacacacacacaaaacaaagctggaggcatcacattacctgacttcaagctatactgcaaggctaccataattaaaacaacatggtactggtacaaaaacagact

SEQ ID NO: 81845 - DNA, 120 bp, synthetic construct
  source 1..120: mol_type = other DNA
agattgcgccactgcactccagcctggtgacagagtgagacttcgtctcagaaaaaaaaataaatgtggttcatttttgagggatagttttcctggatataagactcttggttcaacgtt

SEQ ID NO: 81846 - DNA, 120 bp, synthetic construct
  source 1..120: mol_type = other DNA
tcttgttttattttttgtttgttagtgacttggccaggctattttagtaaatttcctccacagtgtgaagcctctggtgttacccttcagagagcacagccttgggcatggacataaaca

SEQ ID NO: 81847 - DNA, 120 bp, synthetic construct
  source 1..120: mol_type = other DNA
cttccatcacactgagctgggtaggaaagcaggctgtggctcaagtgccatagactcttgctcttcttagtgagatttagtagagtatcttgaataagtattacttcatttgttgttttc

SEQ ID NO: 81848 - DNA, 120 bp, synthetic construct
  source 1..120: mol_type = other DNA
agtggtagagcattgaatatatcgtatttcatttgaatgatataatgcagcataatttgtcttactgcgacattattggtttttggagggtgatgtgcctcatgttagaagagttacata

SEQ ID NO: 81849 - DNA, 120 bp, synthetic construct
  source 1..120: mol_type = other DNA
ggagattttcacataagcagttatttaccagagggaagggcagggcccaagggatctcattatgaagtgaatggaattactggcattgatgatctcactttgttcctatcccaaaagatt

SEQ ID NO: 81850 - DNA, 120 bp, synthetic construct
  source 1..120: mol_type = other DNA
gatttaatcacctcccaagggcctacctgctaacaccatcacactggtgattaggttttaacatgttttgggggacacagacattcacaatacagtggtaggttacccaaatattgtgtt

SEQ ID NO: 81851 - DNA, 120 bp, synthetic construct
  source 1..120: mol_type = other DNA
tatattctgaatagttcttacacacacacacacattgcctctcttaatggacctcctttatatatttgatttgttaatatttagggatgtttgcaactgtgtttatgaaagatactgata

SEQ ID NO: 81852 - DNA, 120 bp, synthetic construct
  source 1..120: mol_type = other DNA
ggccaggaatttcttgtaaaaagatgttagtgacctattgtgtctccagaacctttttcttttccaataagccttttcatggcccacttgaactccttattccttagtgggatgggttca

SEQ ID NO: 81853 - DNA, 120 bp, synthetic construct
  source 1..120: mol_type = other DNA
tcgtgtttctttcttctttctttaactcttacagtttcctccatgactgtggtagccccacatgcaattttgaccattgcagatatttcacaaaaatagtgatccaggtggtggtctccg

SEQ ID NO: 81854 - DNA, 120 bp, synthetic construct
  source 1..120: mol_type = other DNA
agcaaaatggctaaataaaactggatggatctccccttattaaaaaggatattacgaaggggttagaaatctgttacaagttatcacctcctttagccaagggttcatagagaatgcagg

SEQ ID NO: 81855 - DNA, 120 bp, synthetic construct
  source 1..120: mol_type = other DNA
ccatgcaggaattatgggagctacaactgaagatgagatttgggtggggacacagccaaaccacatcaaacactgaaatagaaaaaaaaagacttgaaacaaacccacagatctgtggaa

SEQ ID NO: 81856 - DNA, 120 bp, synthetic construct
  source 1..120: mol_type = other DNA
acctaagaaaaccaaatattgatgaagatgtagagcaatggaaacacatacactgataagtgtttaatatggtgcaaccactctggaaaattttggcagtgtttcaaaaaacctgagtac

SEQ ID NO: 81857 - DNA, 120 bp, synthetic construct
  source 1..120: mol_type = other DNA
gaaaagtcactccagagcttaagtagttcctacaagtatctcaatttatgatgcttcaaaacagctattgaaacaattttactttaacttatctaatggagtatttagacttcaaaatcc

SEQ ID NO: 81858 - DNA, 120 bp, synthetic construct
  source 1..120: mol_type = other DNA
ttagcataatcaaaggagactattagagttaaattggtcaatatcaatataattgtaacatatataatccaaaagaaatcagtgcatagcatgttatttttagtgttggcactttagttt

SEQ ID NO: 81859 - DNA, 120 bp, synthetic construct
  source 1..120: mol_type = other DNA
tgccacatcaatgaaaagttgaaaggcacacccaccaaaggtaattcttttgtctttgccccagatactgaccaacatttgtgggactatatttgtggtataacagagatccaagatggc

SEQ ID NO: 81860 - DNA, 120 bp, synthetic construct
  source 1..120: mol_type = other DNA
ctttttctttcttttttttttttttttttttttttgagacggagtcttactctgttacccaggctggagtgcctgggtgatctctgctcactgcaacctctgcctcccaggttcaagtga

SEQ ID NO: 81861 - DNA, 120 bp, synthetic construct
  source 1..120: mol_type = other DNA
ataccattagatcttaaagctcaaggataatctttggtttcataatttgccttctgggtctactgggatgacagtcccactttctggacaaactgggatagtagatagtcggacctctgt

SEQ ID NO: 81862 - DNA, 120 bp, synthetic construct
  source 1..120: mol_type = other DNA
gccctaaacagaatagctattattgtgcatatttatagcatgcatccccaaattccttaacttctaccccttttccagttttaaagccacttctacattttcagctacatcccactcctg

SEQ ID NO: 81863 - DNA, 120 bp, synthetic construct
  source 1..120: mol_type = other DNA
atatctgaggcaatacctttaaagagggtatcagttatcatgattaatcacaacacaactaggtaggatgtttctgtctccctggagcatgctgagagatgacacttgttgtgtgcccat

SEQ ID NO: 81864 - DNA, 120 bp, synthetic construct
  source 1..120: mol_type = other DNA
gtagtggttctcccagcacgcagcttgagaactgagaacgggcagactgcctcctcaagtgggtccctgacccccaagtagcctaactgggaggcatcccccagtaggggcggactgaca

SEQ ID NO: 81865 - DNA, 120 bp, synthetic construct
  source 1..120: mol_type = other DNA
cttccccaatctagcaaggcaggccaacattcaaattcaggaaatacagagaatgccacaaagatactcctcgaggagagcaactccaagacacatgattgtcagattcaccaaagttga

SEQ ID NO: 81866 - DNA, 120 bp, synthetic construct
  source 1..120: mol_type = other DNA
taatgggagactttaacaccccactgtcaacattagacagatcaacgagacagaaagttaacaaggatacctgggaattgaactcagctctgcaccaagcggacctaatagacatctaca

SEQ ID NO: 81867 - DNA, 120 bp, synthetic construct
  source 1..120: mol_type = other DNA
gaattctaccagaagtacaaagaggagctgctaccattccttctgaaactattccaatcaatagaaaaagagggaatcctccctaactcattttatgaggccagcatcatcctgatacca

SEQ ID NO: 81868 - DNA, 120 bp, synthetic construct
  source 1..120: mol_type = other DNA
gatgtgaaggacctcttcaaggagaactacaaaccactgctcaatgaaataatagaggatacaaacaaatggaagaacattacctgctcatgtgtaggaagaatcaatatcgtgaaaatg

SEQ ID NO: 81869 - DNA, 120 bp, synthetic construct
  source 1..120: mol_type = other DNA
tggccatcagagaaatgcaaatcaaaaccacaatgagataccatctcacaccagttagaatggtgatcattaaaaagtcaggaaacaacaggtgctggacaggatgtggagaaataggaa

SEQ ID NO: 81870 - DNA, 120 bp, synthetic construct
  source 1..120: mol_type = other DNA
atgttggtttatttcatttcatactctaagcacatttttttcataatggaattatgctctacatgccctcctcaggaaacttcccaggaaggtcatcataatgctgttgttttgtgctca

SEQ ID NO: 81871 - DNA, 120 bp, synthetic construct
  source 1..120: mol_type = other DNA
aggctaatataatggagatagtgggccagaatatatgttgaattacaatttcaaccttcactctgaggggcctagattagttatgctcaataacttggaggaggaaaaactagatcaaat

SEQ ID NO: 81872 - DNA, 120 bp, synthetic construct
  source 1..120: mol_type = other DNA
gcatagagttatttatagtatcctctgatggtagtttgtatttctgtaagatcagtggtgatatcccccttatcattttttgtcgtgtctatttgattcttctctgttttcttctttatt

SEQ ID NO: 81873 - DNA, 120 bp, synthetic construct
  source 1..120: mol_type = other DNA
tgcctgaagtaatttagagattcaatgctatccccatcaagttactattgactttcttcacagaattagaaaaaaactactttaaatttcatatgaaaccaaaaaagagcccgtatagcc

SEQ ID NO: 81874 - DNA, 120 bp, synthetic construct
  source 1..120: mol_type = other DNA
agtgtggtgatttctgaaggatctagaaccagaaataccatttgacctagaaatcccattactggatatatacccaaaggattataaaacattccactataaagacacacgcacatatat

SEQ ID NO: 81875 - DNA, 120 bp, synthetic construct
  source 1..120: mol_type = other DNA
ggtcagtcttccaggactccgtatctccatgtcacattccagacaaactgatggattacaacccagcatcaggtaaatgttgaagggatttggagagggaatattaattaaagttgtcat

SEQ ID NO: 81876 - DNA, 120 bp, synthetic construct
  source 1..120: mol_type = other DNA
actccagcctgggtggcagaacagaaacaaaaacaaaaacaaacaacaacaaaaagttgtttaaatctatgacaatttagaacaagggaatctgatagcatggaattaaaactatagcaa

SEQ ID NO: 81877 - DNA, 120 bp, synthetic construct
  source 1..120: mol_type = other DNA
tttgaaatgtaggaaaagaaacacagctttcttcagatttagaacattatctgagttctaactaaatgagattctgaaagagactctagcaagaaaacaatccagacagaatgaaggtag

SEQ ID NO: 81878 - DNA, 120 bp, synthetic construct
  source 1..120: mol_type = other DNA
cggccgtaatcatatttttaaggctctattcctaaagactcactgtcccaggtgagaaatgggagaagaaaggaattggatagcaccagtttgaatgaagagtggcattatagagataca

SEQ ID NO: 81879 - DNA, 120 bp, synthetic construct
  source 1..120: mol_type = other DNA
tgagatgatccttacaggatacataacaacaatggcatttcacatcagcataaatacaaggggtcaagggggaaggtcacaagtttggttggatcagtgaatatgtctgcatggttcaag

SEQ ID NO: 81880 - DNA, 120 bp, synthetic construct
  source 1..120: mol_type = other DNA
gggtataattatgcttatttgaaagatgagaaaattgaagcacacaaagattaaatgacatctccaaagtcacacagctaatgaatggaatgactgggatttggaggaaatcccagtctt

SEQ ID NO: 81881 - DNA, 120 bp, synthetic construct
  source 1..120: mol_type = other DNA
atgccgattagagcaaaaatgaaaatttcatcttggcatctctgatctctaattctcagtggcttcctcctactgttgatgtctatccctaactgtgggtatttagaggtctcagctgga

SEQ ID NO: 81882 - DNA, 120 bp, synthetic construct
  source 1..120: mol_type = other DNA
tcacacccaccctcaacccattcatctacacattgagaaacaaggatgtgaaagctgccctgagaaggtcactgactaaagagttttggattaagacaagatgatatctgaaaagaagtc

SEQ ID NO: 81883 - DNA, 120 bp, synthetic construct
  source 1..120: mol_type = other DNA
ttagggacacaaactcagtgggaatttacatgttttgacaaggcagctttcttcaccacttgactgggtaatttagtcctatttcagtgtgggggtttgagaataccatgtggaattcaa

SEQ ID NO: 81884 - DNA, 120 bp, synthetic construct
  source 1..120: mol_type = other DNA
gaaatgttttgctgatgtgggtggctgctcaagatatgtcccccaagccctagaaatatattttgattcactttcattattacagatatgccagagaaaaattttatctttaaacagttt

SEQ ID NO: 81885 - DNA, 120 bp, synthetic construct
  source 1..120: mol_type = other DNA
aagataatgctaaacatagaaaaatctttcacgacttgcagaatgatgtgatttggctctgtgtccccatccaaatctcatctcgattgtaatccccatatgttgagggagggaggtgac

SEQ ID NO: 81886 - DNA, 120 bp, synthetic construct
  source 1..120: mol_type = other DNA
acaacgtttaaatatacataatacctaaaagcactgaatgtaattcatagtacactaaacattgagaagtcccatgatctgcagttggcatgctggagttcctgggccttgggaggaggc

SEQ ID NO: 81887 - DNA, 120 bp, synthetic construct
  source 1..120: mol_type = other DNA
ctccaaacacacccagaatgatgttcgaccaaatataggcctgtctcattttattgtgcttcactttattgcacctgaaggtttgtggcaaccttgcaagagcaaatctatcagtatcat

SEQ ID NO: 81888 - DNA, 120 bp, synthetic construct
  source 1..120: mol_type = other DNA
gccagaagctagggcttttgcaccagttagccaagttgtgaatgtaaagaaaagttattgaaaaaaattaaaatgcgctactccagtaaacacataaataagatagcaaaacagtcttat

SEQ ID NO: 81889 - DNA, 120 bp, synthetic construct
  source 1..120: mol_type = other DNA
cctgagctttctagtaattggaatgaatgacaattgcttttgtttgctaacacatccatttgtctacaattttcttaatgtatttaattctgaaatgattcattcagtttcggtctgatg

SEQ ID NO: 81890 - DNA, 120 bp, synthetic construct
  source 1..120: mol_type = other DNA
gcaacttcagcaaagtctgaggataaaaaatcaatgtgcaaaaatcacaagcattcttatacaccgataacagacagagagccaaatcatgagtgaactcccattcacaattgcttctaa

SEQ ID NO: 81891 - DNA, 120 bp, synthetic construct
  source 1..120: mol_type = other DNA
aaaggatatgaacagacacttctcaaaagaagacatttatggagccaaaaaacacatgaaaaaatgctcatcatcactggccatcagagaaatgcaaatcaaaaccacaatgagatacca

SEQ ID NO: 81892 - DNA, 120 bp, synthetic construct
  source 1..120: mol_type = other DNA
gagggctggattatcagtttcagagtaattttagaaaagacaccatgtttgaagaaagtttagctctctaagtcatggttttattctgagattctttgattctactattatgtatgggtt

SEQ ID NO: 81893 - DNA, 120 bp, synthetic construct
  source 1..120: mol_type = other DNA
gcaatctgggctccaaagagtgacaattcttcttgggtcgacagttaaactcaggtgaattataaatggaaagagacaatgtagctgtgttaaaagatagttaagtatttgccaaacaaa

SEQ ID NO: 81894 - DNA, 120 bp, synthetic construct
  source 1..120: mol_type = other DNA
ttggtgtttgattggatatacagattaaagcaaagttgtgccattctttgaaataggtcacagtgacagggagatgtctgggagaagagatgagtccttatgggaaagacccattcaggg

SEQ ID NO: 81895 - DNA, 120 bp, synthetic construct
  source 1..120: mol_type = other DNA
cctttgcgatagagcaaggttgagtatagggttggtcactgacttggaaaggaaaaaagagctctttctctgcctttgaaaccctagagtgggtggaattaaatcatgttagagatcatt

SEQ ID NO: 81896 - DNA, 120 bp, synthetic construct
  source 1..120: mol_type = other DNA
caaaactaccatccaatatttggagcaagttaagccaggcattaagattggcagcactggggattaagctatatcttatggaggaccaggaaaactgtaggagcaagaaagctagagaaa

SEQ ID NO: 81897 - DNA, 120 bp, synthetic construct
  source 1..120: mol_type = other DNA
caaccccaagttgtcataagaattttgagaattaaacgttctttgacggtgaacctttgtcacttagttgcaagatctccaaagctcaggattcaatgcctgatatcagtggcatctgca

SEQ ID NO: 81898 - DNA, 120 bp, synthetic construct
  source 1..120: mol_type = other DNA
agtgcattcttcaggttttcttcttcatagctctggcctcatcagaagtggccattctcacagtgatgtcttatgacaggtacgcagcaatctgtcaaccacttcattatgagactatta

SEQ ID NO: 81899 - DNA, 120 bp, synthetic construct
  source 1..120: mol_type = other DNA
attagtttggagtctggcctgtataatttaaaacttgttattaacaaataaggttggagatagatgaagctaactgggttaatattatggtgcatatatggtatttccagtgggcctcct

SEQ ID NO: 81900 - DNA, 120 bp, synthetic construct
  source 1..120: mol_type = other DNA
ctgccacatgagattttttcttttttttatatactttaagctctggggtacatgtgcagaacttgcaggtttgttacgtaggtatatacatgccatggtggtttgctgcacccatcaacc

SEQ ID NO: 81901 - DNA, 120 bp, synthetic construct
  source 1..120: mol_type = other DNA
ctgaggcaggagaatcgcttgaacctggagaatcccaaaagtgtctgttcacatccttcgcccacattttgatggggttgtttgtttttttcttgtaaatttgtttaaattctttgtaga

SEQ ID NO: 81902 - DNA, 120 bp, synthetic construct
  source 1..120: mol_type = other DNA
gaagaggtccttcacatgccttgtaagttgtattcctgggtattttattctctttgtagcagttatgaatgggagttcactcatgatttggctctctgttttttttattattggtgtata

SEQ ID NO: 81903 - DNA, 120 bp, synthetic construct
  source 1..120: mol_type = other DNA
agtattccctgatggtagtttctatttctgtgggatcagcagtgatatgccatttatcatttttatagtgtctattgatttttctctcttgtcttctttattagtctggctagcagtcta

SEQ ID NO: 81904 - DNA, 120 bp, synthetic construct
  source 1..120: mol_type = other DNA
cactttgggaggccgaggtggacggatgacgaggtcaggagatcaagaccatcttggctaccttgtcaggtattttgaaaaacttttagctttttaaacacattcatggtgatatatatc

SEQ ID NO: 81905 - DNA, 120 bp, synthetic construct
  source 1..120: mol_type = other DNA
ttcattgatctatgtgtttatttttaactaataccataccatactgatttcagcaactttataacgatttttttttgagacggagtcttgctctgtcgcccaggctggagtgcagtggca

SEQ ID NO: 81906 - DNA, 120 bp, synthetic construct
  source 1..120: mol_type = other DNA
tgtggttggatctcaagtgcagaaggttgagttcattacatttatcagttcatggcaccctgtcctcattaatatgtgcacgatctctctcatcttactttatttaaaacatttctttcc

SEQ ID NO: 81907 - DNA, 120 bp, synthetic construct
  source 1..120: mol_type = other DNA
ataaggaaattaaggcacaggtcactaatcaacttatctacagtcactagcaaactactagctaacctgggactcaaactcaaggcagtttggcccccaagttttcattctttaccacta

SEQ ID NO: 81908 - DNA, 120 bp, synthetic construct
  source 1..120: mol_type = other DNA
aaagggaaggaatgccagcctttccctaaagacacatgacacaacttgagaccaaaagtcatagcattataaacagaatccctacgtttataactctttctgtttgatttttaccctcag

SEQ ID NO: 81909 - DNA, 120 bp, synthetic construct
  source 1..120: mol_type = other DNA
caattgccccagtgccatttactgacttgcaatgtgtgtgtgtgtgtgtatgtatatatatatatatacatacacacacagatctctttggtgtcctctctttttgtccactcatctacc

SEQ ID NO: 81910 - DNA, 120 bp, synthetic construct
  source 1..120: mol_type = other DNA
tcttaatgcaccagctaaaacaatcaaaacagtgtggaattaaagtgataacaagtggcagtcatgtcttgttctcactgagtacatgttttgacctaggttttagatggacaactgttt

SEQ ID NO: 81911 - DNA, 120 bp, synthetic construct
  source 1..120: mol_type = other DNA
agcttaaatacagttagctaattgagtatctgaggaaaaacattccaagcagagaaaccaatgcaaagtccagagataggagcattcttagaatgtataattaatagcaaggaagccagt

SEQ ID NO: 81912 - DNA, 120 bp, synthetic construct
  source 1..120: mol_type = other DNA
tatttcctttccagatctttatgtacccaaccacatcatctattttcaaattttataccttctttgtcattttcctggctctattgggctactgagaagaaatattgacagtagtcattc

SEQ ID NO: 81913 - DNA, 120 bp, synthetic construct
  source 1..120: mol_type = other DNA
aaatagacatgagattgtcttctcagcacattacatcggaaggcacatgttgatctgtcccattactggtgatattagctataatcagttggctaagatggttctgccaggtttctccat

SEQ ID NO: 81914 - DNA, 120 bp, synthetic construct
  source 1..120: mol_type = other DNA
ctggatcaactggtagttctacctttagttctttaaggaatctccacattgttttccataatggttatactagtttacattcccaccaacagtgtaaaagtgttcccttttcaccacatc

SEQ ID NO: 81915 - DNA, 120 bp, synthetic construct
  source 1..120: mol_type = other DNA
gaccagtactgtgctgttttggtgactatggccttacagtatagtttgaagttggataatgtgatgcctccagatttgttctgtttgctgagtcttgctttgaatatgcaggctcttttt

SEQ ID NO: 81916 - DNA, 120 bp, synthetic construct
  source 1..120: mol_type = other DNA
tattaatagagctatttaacctggtttgttgaatgtgataatgattacagaaaacattgactaatgctgcttataataatgaaaaactggaaaagtgactggtatacaataggcaatcaa

SEQ ID NO: 81917 - DNA, 120 bp, synthetic construct
  source 1..120: mol_type = other DNA
gtttttaaagacgtaaagtagagctatgagctcaccaaagtccactgaagttcgccaaagagctgagttacttcagctctcatgagaccagtaatttttgcttgacgaaggtatttggca

SEQ ID NO: 81918 - DNA, 120 bp, synthetic construct
  source 1..120: mol_type = other DNA
gaccaagtccttagagcatatttccatttcatgatttatattcaagaaccaagcaacaagctggacagctgcctctgtaacactgtgtccaatagtggtgtcccagatagtttaagtgcc

SEQ ID NO: 81919 - DNA, 120 bp, synthetic construct
  source 1..120: mol_type = other DNA
gattcatctcagtcttttggcctggagattaggccaaacatcaagcatgttgggagggcaacaatttaaagcaacattattgactgtaaagcatttgccaggaatttacagtacaaaatg

SEQ ID NO: 81920 - DNA, 120 bp, synthetic construct
  source 1..120: mol_type = other DNA
ttatctactcagaccagaataaatttttacttggaattattattattttgagacggagtcttgctctgttgcccaggctggagtgcaatggcacgatctcagttcaccgcaatttccgcc

SEQ ID NO: 81921 - DNA, 120 bp, synthetic construct
  source 1..120: mol_type = other DNA
tcctctctaaaaaatggtatgtcatagatccaaacaaggcttccacagtttgtcaaagagtgcttattaaggcttctcattttctacagccttgctgtggaattctgccacatgcaggct

SEQ ID NO: 81922 - DNA, 120 bp, synthetic construct
  source 1..120: mol_type = other DNA
gggaacaatcactattgtttgtatagtgtccttcttcaggtctagccttttaagtaggggaatgtcatgggcactgctcttgcctgttccattttttgctctagctaagatatccctacc

SEQ ID NO: 81923 - DNA, 120 bp, synthetic construct
  source 1..120: mol_type = other DNA
atgagactcattaccaagtgactcgtcaacactcatatactgatgtgtattttgttttgtttgtttaaagacagtcttgctatgttgcccaggctggagtgccgtggtgattcacaggtg

SEQ ID NO: 81924 - DNA, 120 bp, synthetic construct
  source 1..120: mol_type = other DNA
aagtgcataggactatagaaacaaccccaaagaccctacctagtacaacactctccagatgagaaggaaccagcacaagaattctgccaccattaaaaatctgaatggaatgacatcatc

SEQ ID NO: 81925 - DNA, 120 bp, synthetic construct
  source 1..120: mol_type = other DNA
attgggggccttctcagcagaaatcttatgggggacttacattcagcattttttaaggaagagactccaaccaagaatttcatacaacaccaaaccaagcttcataagttaacaagaact

SEQ ID NO: 81926 - DNA, 120 bp, synthetic construct
  source 1..120: mol_type = other DNA
ggacataatagacatctacagaacactccacccagcaaccataggatatacattcttctcatttgcatatggaacatatgctaagattgaccacatgcttggacatcaggcaagtctcaa

SEQ ID NO: 81927 - DNA, 120 bp, synthetic construct
  source 1..120: mol_type = other DNA
ctggttcttgtcaaccagatcaataggacaccagctaaattaacaacaaagaaagagaagatctaaataagtgcaatcagaaatggcaaaagtgaaataacaaccaatcccacggatata

SEQ ID NO: 81928 - DNA, 120 bp, synthetic construct
  source 1..120: mol_type = other DNA
ggaaaagaggaagtcaaattatctccttgctgacaatacgattctatacctagaaaaccttaatgactttgccaaaaggcttgtagagctgataaaaacttcagtaaagtttcaggatac

SEQ ID NO: 81929 - DNA, 120 bp, synthetic construct
  source 1..120: mol_type = other DNA
gcctttctgtggctttgtttcaccatatttaaaaagccccacacatgaagaattatgcagcccaaaatgtcaattgttcttctgttgagaaaccctgaactaggtgcactgtgacttaag

SEQ ID NO: 81930 - DNA, 120 bp, synthetic construct
  source 1..120: mol_type = other DNA
gttctagccctttacagacatagaggtctggctctatagggacataagtacagttacaaggaactgaaagacttacggaaagtgggcagttaagaaactgaaagtatctttgaagccaaa

SEQ ID NO: 81931 - DNA, 120 bp, synthetic construct
  source 1..120: mol_type = other DNA
gcatcatcaacatagatgcctgggtgatggccatatttgatactggagagaagaaactggtatgggcacccaatatgcagttaggaacatgcctggaaaataagcatatgagcaaaataa

SEQ ID NO: 81932 - DNA, 120 bp, synthetic construct
  source 1..120: mol_type = other DNA
cataattatttttgtaagtaagagaaacatacagtttcactttgctttacaaaacagtcttttgggtaacagtgtataaattacttatactccaaatcacggttgccacacacaacaata

SEQ ID NO: 81933 - DNA, 120 bp, synthetic construct
  source 1..120: mol_type = other DNA
attgcacatacttaatatgtacaagttgatgagctttgacatatacaaatatccatgataccattaccacaatcaaggtaatagacgtatctatcaccttccaaagttccgttgcatccc

SEQ ID NO: 81934 - DNA, 120 bp, synthetic construct
  source 1..120: mol_type = other DNA
cctctgcccaactagtaacatgagaatatccttgcataatgtacctctgccccatataatattttacttagttatgtatgcagtctagtatcattgagcagatgatactttcatgcattt

SEQ ID NO: 81935 - DNA, 120 bp, synthetic construct
  source 1..120: mol_type = other DNA
aaaacaagagaataagtgaatgggtggctatgtgaatatatactgtacatacatagtccccagggtgaatgagaactggaactttgctaataccaactctctcccttgcctctctctctg

SEQ ID NO: 81936 - DNA, 120 bp, synthetic construct
  source 1..120: mol_type = other DNA
ctgtgaaagcaataaaccttgtagctaattttcagtatggcatatacaccagttaacaatacatcttttagaatcagatggtgtgagtttgaacaatgaaccaccaattgttaggtatgt

SEQ ID NO: 81937 - DNA, 120 bp, synthetic construct
  source 1..120: mol_type = other DNA
catcctatggatatatcctgcaaattggaagaaataatattgttaaaacgttcatgctattcaaagtaatctacagagtcagcataatctcatcaaaatatcgatgacatgtttcacaga

SEQ ID NO: 81938 - DNA, 120 bp, synthetic construct
  source 1..120: mol_type = other DNA
gtaagtatagccattatagaaaatagtatgaaagttctttaaaaaattaaaaataaaaccaccatatgatcaaggaatcccattacttggtatatatccaaggaaatgaaatcagcatat

SEQ ID NO: 81939 - DNA, 120 bp, synthetic construct
  source 1..120: mol_type = other DNA
tttctttatcctcacttcgcacagttcttactgtccttccttttctgttttgagaaaacagggctcaaattgtctgtgaacctctctagtggtattgaaatgggaaaagttcccttgtcc

SEQ ID NO: 81940 - DNA, 120 bp, synthetic construct
  source 1..120: mol_type = other DNA
ccagcacttctcttctccccttttgtatcatttaaagggaccacgttcttcccttcccagcactcccttatcagtatgctagcatattgcttttgggattcacttctctaggttttattg

SEQ ID NO: 81941 - DNA, 120 bp, synthetic construct
  source 1..120: mol_type = other DNA
agacgtgcaggtttgttacataggtaaacgtgtgccatggtgatttgctgcacctaaccacccatcacctaggtattaagccctgcatgcattagccatttgtcctgatgctctcccacc

SEQ ID NO: 81942 - DNA, 120 bp, synthetic construct
  source 1..120: mol_type = other DNA
ttttggtgtgcagaagctctttagttaattagatcctgcttgtcaatttttgcttttgttgcaattgcttttgacaatttcatcataaaatttttgcccatgcctattctctgaatggta

SEQ ID NO: 81943 - DNA, 120 bp, synthetic construct
  source 1..120: mol_type = other DNA
tgcctgattgccctggccagaacatccaatactatgttgaataggaatggtgaaagaggatttccctgtcttgtgatagttttcaaagggaatgcttccagcttttgcctattcagtatg

SEQ ID NO: 81944 - DNA, 120 bp, synthetic construct
  source 1..120: mol_type = other DNA
atttgcccttgctcctctagttcttttgttgtgatgttagggtgtcagtttgagttctttctagtgctacaaatttccctctaaacattgctttagctgcatcccagagattctggtatg

SEQ ID NO: 81945 - DNA, 120 bp, synthetic construct
  source 1..120: mol_type = other DNA
atttcagtgtgtttttgcagtggctgatactggtttttcctttctgccccccatgttcatatatttattcaggagtatttaccacctatgataggccaggaattattctcttcttggccc

SEQ ID NO: 81946 - DNA, 120 bp, synthetic construct
  source 1..120: mol_type = other DNA
ggaagaaaaagaagacggtcctgagagaatagtgaagaaagacactagacaacttgtatctacctgatctataagcctttttctatctctctttcaatctcttaggctcttacattgtat

SEQ ID NO: 81947 - DNA, 120 bp, synthetic construct
  source 1..120: mol_type = other DNA
cctgtgaggttcaataagtgagtttactatccaaagaggaaattggtggctgccacttgctccctatagttttgacagcttctttgatgtccttattcctcaatgtgtaaattatagggt

SEQ ID NO: 81948 - DNA, 120 bp, synthetic construct
  source 1..120: mol_type = other DNA
aaaactgcaattcatttaggttggagaatcccaagatgatgaattcagttatagctgtttgattctttctttccatgatgtcgcctggtttcctttcaggaattgggcaaagagaagacc

SEQ ID NO: 81949 - DNA, 120 bp, synthetic construct
  source 1..120: mol_type = other DNA
tagatcatcaatctggaaaattcaagagctatttggctggtgcaggaattagtgtctgtttcaacaaattattgttaagtgcttcatatagaaggatgctgataatctctgagcacttcc

SEQ ID NO: 81950 - DNA, 120 bp, synthetic construct
  source 1..120: mol_type = other DNA
tatatactttatcgattgccctcacctatagacaaatatgcatttcaatgtcaagtttgagaggtggcttaattgtgcttttgttgtaattgctgtcttctttcctcgtgaactactgtg

SEQ ID NO: 81951 - DNA, 120 bp, synthetic construct
  source 1..120: mol_type = other DNA
atgtgaggtggcagatatgttatttagcctgctgtactcattccaaaatatatacatgcattataacatcacgttatatatatactgcagactagagtggtgacaatttggttggataga

SEQ ID NO: 81952 - DNA, 120 bp, synthetic construct
  source 1..120: mol_type = other DNA
acatcaacagacagaactgttcactcccctggaaagggggctgaagccaagtgctctcactcagcgggtcccactcctatggagcccagcaagctaaggaccactggcttaaaattctca

SEQ ID NO: 81953 - DNA, 120 bp, synthetic construct
  source 1..120: mol_type = other DNA
aatgtcttttctccaaatgattgcaactcctctccagcaagtgcacaaaactgggcagagaatgagtttgatgaattcacagaagtaggcttcagaaggtgggaaataacaaactccatt

SEQ ID NO: 81954 - DNA, 120 bp, synthetic construct
  source 1..120: mol_type = other DNA
ttatgtcaccaccaggcctgctttacaagagctcctaaaggaagcactaaacagggaaaggaaaaagtagtaccagccactgcaaaaacacaccgtaatataaaaaccaaagacactatg

SEQ ID NO: 81955 - DNA, 120 bp, synthetic construct
  source 1..120: mol_type = other DNA
gggaggaataatgaagttatttgaaaccagtgagaacaaagagacaataaactataatctcagggacacagctagagcagtgttaagagaaaaatttagagcactaaatgcccacgtcag

SEQ ID NO: 81956 - DNA, 120 bp, synthetic construct
  source 1..120: mol_type = other DNA
aaaaaaagacctattcacaacaaacccatagccaatatcataatgaatgggcaaaagctggaagcgtactctttgaaaacctgcacaagtcaaggatgccctctctcaccactcctattc

SEQ ID NO: 81957 - DNA, 120 bp, synthetic construct
  source 1..120: mol_type = other DNA
cctgggcgacagagcgagactccgtctcaaaaaaaaaaaaaaaaaaaaaaaaaagaacaaagctggaggcatcatgttacctgacttcaaactagactacaaggctacagtaaccaaaac

SEQ ID NO: 81958 - DNA, 120 bp, synthetic construct
  source 1..120: mol_type = other DNA
ctgggtatatacccaaaggattataaatcattctactataaagacacatgcatacgtaggtttattgtggcattatttaaagtagcaaagacttggaaccaacacaaatgcccatcaatg

SEQ ID NO: 81959 - DNA, 120 bp, synthetic construct
  source 1..120: mol_type = other DNA
cattaagagaaggaattactttctcctggggatctcctgatgcttttgttttgttacccaagtcctctatgttctgtgatcattgccctttacttcaaaacatgcctttcccatgtccct

SEQ ID NO: 81960 - DNA, 120 bp, synthetic construct
  source 1..120: mol_type = other DNA
ttgcctctcataggcatagattgaccctgagacagaatagaattcaccacgcaaagcacaagtatttcacacagagttataggaaaattactgcttttccaagcagccatggtcttgact

SEQ ID NO: 81961 - DNA, 120 bp, synthetic construct
  source 1..120: mol_type = other DNA
gctgtttttaagaatacaacgaagtaacacaaaataatgttccctacagagtctgtgctgataaacttctgagtgatgggttttctaggtgagtgccaagactctactcagtccctgaag

SEQ ID NO: 81962 - DNA, 120 bp, synthetic construct
  source 1..120: mol_type = other DNA
cacctatggcttaaaatcaaatctcaattctcaacaaattaattacctactaggcattatccaatttcatcacttgctaaattcttaccggctgacttgggtacacacagcaagagagtt

SEQ ID NO: 81963 - DNA, 120 bp, synthetic construct
  source 1..120: mol_type = other DNA
tgtttgttagccacatgtatgtcttcttttgagagtgttttttcatgtcctttgcccatttattaatgggattattggctttctgcttgttgacttgtttaagttccctatagattctgg

SEQ ID NO: 81964 - DNA, 120 bp, synthetic construct
  source 1..120: mol_type = other DNA
gtttgtttctacaaaaaaaggagaaaaaaagttaacaaagtgtgaatttaagataaggcctggagtgctggctcacacctgtaatcctatcactttgggaggcagaggcaggaagatccc

SEQ ID NO: 81965 - DNA, 120 bp, synthetic construct
  source 1..120: mol_type = other DNA
aaaatggacaaagtatcaatgacctatgtcataatttcaagcagtctaacatatgtgcaagtggagtactaaagaagtgtttgattaaaaacattgaagaagtaatgactgagtttttcc

SEQ ID NO: 81966 - DNA, 120 bp, synthetic construct
  source 1..120: mol_type = other DNA
tttaattctatcaaaaatttatcaaatttaaattgtgcaaacactccaactgaaacaaagagcttgtcacattggcttaatgggtatgaaaatgcagttagatagaatgaagaacttcta

SEQ ID NO: 81967 - DNA, 120 bp, synthetic construct
  source 1..120: mol_type = other DNA
taaacaacttcctaccaaagattttcttcagagccatcatcacttctttgttcctaagggtgtagattagtggattcagtacaggggtgacggcgctatacatgatggccattatccggt

SEQ ID NO: 81968 - DNA, 120 bp, synthetic construct
  source 1..120: mol_type = other DNA
tggaggaacctaggggtgagcaacagtgtgaagaatagttacgaacagtaaaactaaatttatgtacaacaaaattgaggaagactaatatacctgataaattctgagctgttaaaatgg

SEQ ID NO: 81969 - DNA, 120 bp, synthetic construct
  source 1..120: mol_type = other DNA
ccagtgtaagttctccataaaataactctaaaaatagacagaaataaagacatagttaaaaccacaatcacaatgagaagatttaacaagtttctctctatacctgacagaagaatcagc

SEQ ID NO: 81970 - DNA, 120 bp, synthetic construct
  source 1..120: mol_type = other DNA
acaatgaaaaaggagcacttctatatttcttttataaggttagcacaactttgataccaacactttaaaaagaactcaacagaggccaggcgcggtggctcacggctgtaatcccagcac

SEQ ID NO: 81971 - DNA, 120 bp, synthetic construct
  source 1..120: mol_type = other DNA
atatctaaataaatagaggaatatggtatattcatgggctgaaagatatactataatgaagatgtctactctcctaaaagtaatctgaaaagtcaacgcaatcccagtacaagtccctga

SEQ ID NO: 81972 - DNA, 120 bp, synthetic construct
  source 1..120: mol_type = other DNA
accaaatttgactacataggcatcgaaaatgtctgcatgacaaaaatcctacaaataaaagatcaaaacgcatccaggaataaaatcacaaagcaaattgtagaccatgtgctaacattc

SEQ ID NO: 81973 - DNA, 120 bp, synthetic construct
  source 1..120: mol_type = other DNA
ccaacaacacagcacttgagtaaggggggcccatcaggaattctactaacccagagaagtactctactcagctcctctctccctgctgtctggcattctcttcccctaaagagagacaac

SEQ ID NO: 81974 - DNA, 120 bp, synthetic construct
  source 1..120: mol_type = other DNA
cctatctgaacaatgggagaaaacagactgagaaacaatgcaaagaacctcggggacctatgggacaataacaagagattcaactttcatatcatcagagctccagaagaagaggagaaa

SEQ ID NO: 81975 - DNA, 120 bp, synthetic construct
  source 1..120: mol_type = other DNA
gtaaagatgtcaatcctctccaaattgatatacaggtttaacacaattcttatcaaaatcccagaaatatttcttagtagacatagataggattattctaaaatgtgtatgtaaaggcaa

SEQ ID NO: 81976 - DNA, 120 bp, synthetic construct
  source 1..120: mol_type = other DNA
atagtgacaacaccaaatgctagggaggatacagaaagactggatcatgaatataaaactggtcaggatataaaatggtacaactgcgctggagagagtatagtcgtttcttacaaaatt

SEQ ID NO: 81977 - DNA, 120 bp, synthetic construct
  source 1..120: mol_type = other DNA
aaaattagacagaaccctaagagccaaagtaggggacgaggtgaattattacacctatgagagagaataatatgcagctttaaaatatatatatgtacatatatatacacacacaaagaa

SEQ ID NO: 81978 - DNA, 120 bp, synthetic construct
  source 1..120: mol_type = other DNA
cacctcggcctcccaaagtgttaggatcacaggtgtaagccaccatgcctggccaccatttattcttataggtagaattttgcatgtctgtctactcattggaatatcagattattagag

SEQ ID NO: 81979 - DNA, 120 bp, synthetic construct
  source 1..120: mol_type = other DNA
tcttcagtctcaccttttatattacttggatgtgatcctactggatatcttccaattcctcaaatatatcaaggtgtcccttgacagggacttcattcatgcttgtcctccctggatcac

SEQ ID NO: 81980 - DNA, 120 bp, synthetic construct
  source 1..120: mol_type = other DNA
ccacatctaaacctttgcagctgaacacgattggaggaaaatgcacctgtgctcacttgcctagatctaaattcattaatactcaactgcattgaaatcttgggaatgccattgactcag

SEQ ID NO: 81981 - DNA, 120 bp, synthetic construct
  source 1..120: mol_type = other DNA
tcaaaggacatggcaacacagaacataaacatgtatatttgtagaaaaagtaatggtttttagccaataggtacaggtttttccacaattcatttttggcatgacctgctctcaatggca

SEQ ID NO: 81982 - DNA, 120 bp, synthetic construct
  source 1..120: mol_type = other DNA
atggacagaaaatgaacaggctaaatcttctcagtaaaccttcccagtagcatcttgagcattaacactttgggattttctctccaaggacttattctctttatatttctcttcccctgt

SEQ ID NO: 81983 - DNA, 120 bp, synthetic construct
  source 1..120: mol_type = other DNA
aattggcctattccccttcaaagtcccatacaatggagagttatgctgccaatatggccatgaaagctccttagaggaataaaatgcaaaataaataaaacaaaaactaaacatcctaga

SEQ ID NO: 81984 - DNA, 120 bp, synthetic construct
  source 1..120: mol_type = other DNA
agtagcagtggtgggacagccctctgggacccgtgtagtccatgctgatattggcaatggctgtgacaggttgggcaggtcagttcccagatccacaggaggcacatgagtgtggatgtc

SEQ ID NO: 81985 - DNA, 120 bp, synthetic construct
  source 1..120: mol_type = other DNA
tgttctctcttagatgatctattcaacgtgtgattattgactggttattttggttactttacatggaagggccaagtaccagatgtatcaagtcagccatgttggagcctctccagctcc

SEQ ID NO: 81986 - DNA, 120 bp, synthetic construct
  source 1..120: mol_type = other DNA
gaaattacattgcagtgatccctaaaactaaagagccttattttgaatcctagtttcacaatccattgcaaggaaaaggaaactttacttaaatcctttgagccttggttttcttgtagt

SEQ ID NO: 81987 - DNA, 120 bp, synthetic construct
  source 1..120: mol_type = other DNA
atttttattgccaattttctttcactttatataccaaaatattttccaagggagccctcaagaagagaaagtgaatctgaacctctaccataggaaatgaaaggaaatttgactaggaaa

SEQ ID NO: 81988 - DNA, 120 bp, synthetic construct
  source 1..120: mol_type = other DNA
ttaaattgtttggaggcagtccttcatggaggtgtggtaaaggttagataatctctcaaaatttcctctagctgtaaagccaaatatcctatgggctccctagagatgtttcctagttca

SEQ ID NO: 81989 - DNA, 120 bp, synthetic construct
  source 1..120: mol_type = other DNA
acactattgggtaaaatgaaggaagaattgttgagtctattggaagagtttttcttattcagagattcaggggtgtgaaaaaggaaaaagtctcagtgcaactggaaactaaaggaacaa

SEQ ID NO: 81990 - DNA, 120 bp, synthetic construct
  source 1..120: mol_type = other DNA
catagattattttgtcttttgtctgaagtgatgctgaatacaacctcagtcaccgaatttctcctcttgggagtgacagacattcaagaactgcagccttttctcttcgtggttttcctc

SEQ ID NO: 81991 - DNA, 120 bp, synthetic construct
  source 1..120: mol_type = other DNA
gggggccttgggtagagtgatcagaaggctttgatttgaataaaccagagaactctactgaggcataaataaccagcaatgaaaaagtagagatgtgtaattttactgcttctcagatgg

SEQ ID NO: 81992 - DNA, 120 bp, synthetic construct
  source 1..120: mol_type = other DNA
tcattctatatatgtgcaagtctatttgtaggacaaacttccagacatggaaatgttaggtcaagagatatcgttattgtaattcagatagatactgccaaattgccctccccagaggtt

SEQ ID NO: 81993 - DNA, 120 bp, synthetic construct
  source 1..120: mol_type = other DNA
gagtgttataaccactcgtatctctccacccttggtcatgaaagatgatgactttaaacactctattattttggtttcgttttcctttatctgtccttattttgacagactgtaatgcat

SEQ ID NO: 81994 - DNA, 120 bp, synthetic construct
  source 1..120: mol_type = other DNA
tgactgtcatgtgcttctttaacagggaagcctcgggacagactttttcatgggggacagcaaaccaagacaaaaattgttagttgtctcaaagacaaaaaccaagaaccagcattaaca

SEQ ID NO: 81995 - DNA, 120 bp, synthetic construct
  source 1..120: mol_type = other DNA
tgtgatccacccacatgagcctcccaaagtgctgggattacagatctgagtcactgtgcctggcccaccaataatattccttttaaaatattttaggttcttaggattcttatttgggtt

SEQ ID NO: 81996 - DNA, 120 bp, synthetic construct
  source 1..120: mol_type = other DNA
tgattttctagatttgaaacaacaaaataaaaaatagacaagcaggactatgtaaagctaaaaagcttcttcacaacaaaggaaatgatcaacagagtgaaaagtcatcctatgaagcgg

SEQ ID NO: 81997 - DNA, 120 bp, synthetic construct
  source 1..120: mol_type = other DNA
tacagaaacaaaaacaacacaaaagagcatgaggacatttttggaggtggtggatatgcttactaccctggttgtggtgatgatagtatgtgtacatatgcccaaactcatcacgatgta

SEQ ID NO: 81998 - DNA, 120 bp, synthetic construct
  source 1..120: mol_type = other DNA
tagaacactaaactggataaatgagaatatattaactaggggacattgagttcttagacacggaatctggggcttaagtaaatgtgctgctagtgtggctcttacaagcacagggaaggc

SEQ ID NO: 81999 - DNA, 120 bp, synthetic construct
  source 1..120: mol_type = other DNA
ttacgaatggagtcatgttaaagtttagcttacagtacgtcacccagtactgtaggcacatccaatagtcgttcccacagtcactggctatacgattaggactgatatacttggcagtaa

SEQ ID NO: 82000 - DNA, 120 bp, synthetic construct
  source 1..120: mol_type = other DNA
tgctttctcagctgttacatctttaaatacagaccattctctttgtgctctttttctggacctcctttctaacagatgtgctgggaagttcacaacgtatttcctgcaatcaggcaagag

SEQ ID NO: 82001 - DNA, 120 bp, synthetic construct
  source 1..120: mol_type = other DNA
atacaaaaattaactcaagatggattaaagacttaaacataagacctaaaaccatagaaaccctagaagaaaacctaggcaataccattcaggtcataggcttgggcaaagacttcatga

SEQ ID NO: 82002 - DNA, 120 bp, synthetic construct
  source 1..120: mol_type = other DNA
agggacatggatgacactggaaagcatcattctcagcaaactatcacaagaacagaaaaccaaaacagagaaccgcttgttctcactcataggtgggagttgaacagtgagaacacatgc

SEQ ID NO: 82003 - DNA, 120 bp, synthetic construct
  source 1..120: mol_type = other DNA
aacccatacttttcccacagaactttgcaaccctcaggtcaggagatccctcatgaactcactccaccagggccttcagtctgacatgcaaagctatgtggagtctcgtcagagcatcca

SEQ ID NO: 82004 - DNA, 120 bp, synthetic construct
  source 1..120: mol_type = other DNA
tgctgtttgacaaacttcactgttgataccatcaggtactggaaaatctgaagtgactagggactggagcagatccccagaatatggtagcagctctatggaaaagtggtcagactgtat

SEQ ID NO: 82005 - DNA, 120 bp, synthetic construct
  source 1..120: mol_type = other DNA
ccctgcaagagagggggagaaagcaaacaacttggaaaacatatttcaggatatcaaccatgaaaacttccccaatcttgctagagaggccaatagtcaaatgcaggaaatacagaaaac

SEQ ID NO: 82006 - DNA, 120 bp, synthetic construct
  source 1..120: mol_type = other DNA
ataaagcaagttcttagagacctacaaagagacttagatgcccacacaatgggagtctccagtagggtatttcaacactcccctgacagtactagacagatcatcaaggcagaaaattaa

SEQ ID NO: 82007 - DNA, 120 bp, synthetic construct
  source 1..120: mol_type = other DNA
tgtgaagaaaccaataacgagctctgaaattgaatcagtaataaatagcctaccaaacaaagggggagtgactcctccccaactcattctatgaggccagcatcatcctgatacaaaaac

SEQ ID NO: 82008 - DNA, 120 bp, synthetic construct
  source 1..120: mol_type = other DNA
atgcagctaacaaggcaggtgaaaggtctctacaataagaactacaaaacactactcagagaaatcagagataatacaaacaaatggaaacagatttcttgttcatgggtagtaagaatc

SEQ ID NO: 82009 - DNA, 120 bp, synthetic construct
  source 1..120: mol_type = other DNA
atggtggactcctcattgtgtttgtgagatatgaaggcccttgacttaccatgtttttattgccataccttgttctcaattcaacatatctagttctctagacattatccaaagcaaaca

SEQ ID NO: 82010 - DNA, 120 bp, synthetic construct
  source 1..120: mol_type = other DNA
gagaggttagtattggtgaaaaaagaagagaaactactgaatctatcagaggaaatactattcttatccagggattcacagatttcctaggaaagaaagagtctaagatcaactggtgaa

SEQ ID NO: 82011 - DNA, 120 bp, synthetic construct
  source 1..120: mol_type = other DNA
gccatctaaaagccaaaaatgtaaaacttgtgaggttgaatcatgcaaaacaacaatactctccctccagatattcttggcttggtaagaaaattctgagctggaaggattctgattgtg

SEQ ID NO: 82012 - DNA, 120 bp, synthetic construct
  source 1..120: mol_type = other DNA
tgtatactgtggtcactccagtactaaacccactgatctacactttgaggaacaaggaagtgaaaggggcctttaatagagcaatgaaaaggtggctttggcctaaagaaatcttgaaga

SEQ ID NO: 82013 - DNA, 120 bp, synthetic construct
  source 1..120: mol_type = other DNA
ttaagctggtggactgacccttcaaggtccctgcatgcacttttgtaaatctaaacaattttattctgacttctctccatgcttcttttgtcttctaacttcaccttctttggtccctca

SEQ ID NO: 82014 - DNA, 120 bp, synthetic construct
  source 1..120: mol_type = other DNA
ctaagtgggattcatccttaggatgcaagaatgggttaacatacacaaattaataaatatgatatgccacattaacatactgagggataaaaaccatatgataataggtgcagaagaagc

SEQ ID NO: 82015 - DNA, 120 bp, synthetic construct
  source 1..120: mol_type = other DNA
cacaaaagactccaaatagccaaggctatcttgagcaaaaagaacaaagctggaggcacaactacctgaactcaaaatataccacaaagctatagtaatcaaaacagtatgatactggca

SEQ ID NO: 82016 - DNA, 120 bp, synthetic construct
  source 1..120: mol_type = other DNA
tgtatgttctcactgatatgtgggagctaagctataaggatgcaaatacataagaatgatacagtggacttaggggacttggggtgtagagtgggagggggggtgaaggataaaagacta

SEQ ID NO: 82017 - DNA, 120 bp, synthetic construct
  source 1..120: mol_type = other DNA
ccaatctagaattctgcactacatgaaattatccttcaaaagtgaatgagaaataaaccttctcagaggaacaaaaattgagggaatttattgccaatagacttgcctggtaaaaagtga

SEQ ID NO: 82018 - DNA, 120 bp, synthetic construct
  source 1..120: mol_type = other DNA
tcgcactgtgccaagagtagacattcattatagtgcttttacatctgtgaacacccccactacattgtgatcatttcctagattccttaacagctggtaacaaccatggaaattaggtcc

SEQ ID NO: 82019 - DNA, 120 bp, synthetic construct
  source 1..120: mol_type = other DNA
agtgggacaactaaatatcatgtgtctcaggatatgatgcaataaaaataacatagcaacttaagtcaatggcatgacaaaaaagtggggtctgctatgttataaagggactggaaagac

SEQ ID NO: 82020 - DNA, 120 bp, synthetic construct
  source 1..120: mol_type = other DNA
gacatggatggaattggaggctactatccttcgcaaactaacacaggaacagaaaatcaaataccgtatgtcttcactcataagtgggagctaaattatgaaaacatatggatacataga

SEQ ID NO: 82021 - DNA, 120 bp, synthetic construct
  source 1..120: mol_type = other DNA
agtgggtagcaaattgccaggtagcggtcatatgccatgacagccagcagtaagcattcagctgtggctagagagccgaagataaagaactggagcaagcaaccagccacagagatagtt

SEQ ID NO: 82022 - DNA, 120 bp, synthetic construct
  source 1..120: mol_type = other DNA
ttattgccttccttaaatagtagtttcatcaagtcattcaggagttggtagtgaaaatgtggtaaatggtaatagggaaggaagtaggtgccatgggagcagagaaggaccaaacccagc

SEQ ID NO: 82023 - DNA, 120 bp, synthetic construct
  source 1..120: mol_type = other DNA
caaatctgccttttgaatggaatcccattttccatacctctgctcattgctaacgttaaatcctcgaagacccagcttaagaacttatctctaccaagaatcccccttgactaatagagc

SEQ ID NO: 82024 - DNA, 120 bp, synthetic construct
  source 1..120: mol_type = other DNA
tctttctataggattcctgccaggagagaggtgagcatgtaaatcaggcaagaatacctctaataataaatagctcatgaccactacctcccctggaaatcaagagtatcattggagctg

SEQ ID NO: 82025 - DNA, 120 bp, synthetic construct
  source 1..120: mol_type = other DNA
actgactggtagagaagtaagaatagtgcaaaatgcctgtttgttgtctaacgaacaatcagccacacactcaattctaagtaaaaaccataaccctcattcaacccagactctgagata

SEQ ID NO: 82026 - DNA, 120 bp, synthetic construct
  source 1..120: mol_type = other DNA
atgatctgctaagatttgctgaagacttcagaatgttggaatttcctaccttcagctccctccctgcttgagctcaacctgaagtaacgtagaacattgattacaaatgtcacccttgtt

SEQ ID NO: 82027 - DNA, 120 bp, synthetic construct
  source 1..120: mol_type = other DNA
ttgaagcttccacagaaatcaggctgatatatttatttctcatccctaggagtgtgttgaaggcacttctgtgtcatttatcaaactcagaccctaacttcagctccactttctccctga

SEQ ID NO: 82028 - DNA, 120 bp, synthetic construct
  source 1..120: mol_type = other DNA
ttcagaaacctccacagtgtatttaatgactgtactaatttacgcttccaccaaaagtgtatgagttctccttttccacattttcatcaacatttatctcttatcttttctgtagtaggc

SEQ ID NO: 82029 - DNA, 120 bp, synthetic construct
  source 1..120: mol_type = other DNA
tggactttttaaggtcatcagttcagaccacagtcccatggataaagacaaggatctgtggggagtagatgtttgtattgttaatcaccctggtgagaggttaatcctggggtataaatg

SEQ ID NO: 82030 - DNA, 120 bp, synthetic construct
  source 1..120: mol_type = other DNA
ttcactagactacgaattagaagtaaatattatccagggcagatggtgtatcctattcatctttgtatcccaagaatattttagctgtgtcataaatgattagtgaataagtagcaatgc

SEQ ID NO: 82031 - DNA, 120 bp, synthetic construct
  source 1..120: mol_type = other DNA
gatcaggtgacaaaaatgtgaccaaaaactcataggaatctaaccctgcatctcccctaaagcaaggaattatttaatatttgctcctacagggttcaaggcaactttatagaatgcaac

SEQ ID NO: 82032 - DNA, 120 bp, synthetic construct
  source 1..120: mol_type = other DNA
tttgttgatgacgtaggatccagtcaaaaatcatgaatgacattttattgccatggcttttggtcttcttcaatctggaacgatgtcatctcccatctttgctttgtctttaaagacatg

SEQ ID NO: 82033 - DNA, 120 bp, synthetic construct
  source 1..120: mol_type = other DNA
ttgcaatctaagaaacagattcaaaataacagattaattggttttgtgaagcattctccccattggaaagccaagaatgcttggagactcagatcctcagagagcttaaagagagacaac

SEQ ID NO: 82034 - DNA, 120 bp, synthetic construct
  source 1..120: mol_type = other DNA
aggtaaaactggaaagacagtttaacatgttctttagaatgataggcactatcaggaagagatgaagtcagggattcaggctcagagagacaaatactcatccaggatcccaagagtgag

SEQ ID NO: 82035 - DNA, 120 bp, synthetic construct
  source 1..120: mol_type = other DNA
tcttctctttgcccttctgcggccccaataccatcccgcagttcttctgtgagatccagcctgtcctgcagctggtatgtggagacacctcgcttaatgaactgcagattatcctggcaa

SEQ ID NO: 82036 - DNA, 120 bp, synthetic construct
  source 1..120: mol_type = other DNA
ctcacagtgattatttagtcacccaggtaataagcatagtacctgataagcagtttattgatcctcacccttcttctatcctccaccctcaattatgtcctggtatctgttgttcctttc

SEQ ID NO: 82037 - DNA, 120 bp, synthetic construct
  source 1..120: mol_type = other DNA
caaatgcaacagtatttattgcaaactttctatgtgcctattgctctttggcactgtggagaatatcaagtacatacagggtggtgattctgtccagagagcacttgctgtcctgttaag

SEQ ID NO: 82038 - DNA, 120 bp, synthetic construct
  source 1..120: mol_type = other DNA
agtctgacttatatttggagatttggccatgttgtggtgtgtacagcagccattccttttcatttctgagtgatactccattgtatagatatgacataatttgttcatccattcacctgc

SEQ ID NO: 82039 - DNA, 120 bp, synthetic construct
  source 1..120: mol_type = other DNA
aggcctccccagtcatgtggaactgtaagtccaataaacctctttgttttgtaaattgcccagccttgggtaagtctttatcagcagtgtgaaaacagactaatacaccttggtaaagat

SEQ ID NO: 82040 - DNA, 120 bp, synthetic construct
  source 1..120: mol_type = other DNA
catgatccacctgccttggcctcccaaagagctgggattacaggcgtgagccactgtgcccagccagtatcctcattctttagctttgcagaactgaagtaagaagtgactgtggcatca

SEQ ID NO: 82041 - DNA, 120 bp, synthetic construct
  source 1..120: mol_type = other DNA
ttgcctatctccctcctcatcacccaatcccatttcctgcaagaagaggcaatattattaatctgtctcatctaccataaccaccacctggtttgtgcaatagcattttctggatgtttc

SEQ ID NO: 82042 - DNA, 120 bp, synthetic construct
  source 1..120: mol_type = other DNA
aacatagaaaccctgaccatccttgactccaagggtaaaaatactgccctaggcaatcatgatgcctcttatttactgcctttcaaatagaaactttctaaagcagccattgggaaatag

SEQ ID NO: 82043 - DNA, 120 bp, synthetic construct
  source 1..120: mol_type = other DNA
ccaagtagttggaactacaggtgtgcgccaccacacccagctaatttttgtatttttagtaaagatggggtttcaccaagttggccaggatggtctcgatctcttgacctcatgatctgc

SEQ ID NO: 82044 - DNA, 120 bp, synthetic construct
  source 1..120: mol_type = other DNA
agaaagcacagagaaccttggggcagtcacactattctgtatgtactaggattcacttgtccaaacacatagaatatatagtaccaagagtgagtcctgaagtaaacaatggacgttggg

SEQ ID NO: 82045 - DNA, 120 bp, synthetic construct
  source 1..120: mol_type = other DNA
ggtaacagcgtgacttagaataagtcctccaacttttctagctttctcaccgaaaaatgggcctgtggcagcacagttttatgagtaactaagatatgggatgtagaaagaccctagaag

SEQ ID NO: 82046 - DNA, 120 bp, synthetic construct
  source 1..120: mol_type = other DNA
aacagaccagagaacccagaaataatgccgcacacctacaaccatcttatcttcaacaaagtcaacaaaaataagcactcactattcaataaatggtgctgggctaactggctagccgta

SEQ ID NO: 82047 - DNA, 120 bp, synthetic construct
  source 1..120: mol_type = other DNA
aaaaccaaatgctgcatgttctcacttgtaagtgggagcaaaacattgaatacacatgaccacaaagaaagtaacaatagacaccagggcctacttgagttggaagaatggcaggatggt

SEQ ID NO: 82048 - DNA, 120 bp, synthetic construct
  source 1..120: mol_type = other DNA
atgttaaaggtattgtattaagtcagagtagactcttataagttcaggatccatatggtatccccaagaaaaaaacttgcactttaaatataaagacagcttaatcataaatacacttat

SEQ ID NO: 82049 - DNA, 120 bp, synthetic construct
  source 1..120: mol_type = other DNA
gtcccagcacaaaggcagatgcattagcagagaatggaagccttttgaaatcaaaagtatttgaccaaaaccttcacccaatcattgactgaacactaagctgtgcaagaacaagggaaa

SEQ ID NO: 82050 - DNA, 120 bp, synthetic construct
  source 1..120: mol_type = other DNA
cacccaaaaagtagaaacaatccaaatgtcatcaactggtgagatcagtggaactgaatagaaagtgcagaaatagagccaaacacataagatctattgattttacacaaagacaccaag

SEQ ID NO: 82051 - DNA, 120 bp, synthetic construct
  source 1..120: mol_type = other DNA
gcaggagtatcgcttgaacccaggaggcggaggttttagtgagccgagatcgtgccattgcactccagcctaggagacagaatgagacttgtctcaaaaaaaaaaaaaaaaaaaaggaaa

SEQ ID NO: 82052 - DNA, 120 bp, synthetic construct
  source 1..120: mol_type = other DNA
ggaaaccaccccacactgtttctctattacagcataaaaagttatcccaaaacttaatggcttcaaacaacaaatatttattatctcacagtttctatgggccagcaattcagaagcagc

SEQ ID NO: 82053 - DNA, 120 bp, synthetic construct
  source 1..120: mol_type = other DNA
aattttaaaaagagaaaggaaataaaccaaagtcaggggggattgaatgagcacattcgaggcttgagaggaaggctggaaatatgggacactcagaaggtgtggatcaggagagaatag

SEQ ID NO: 82054 - DNA, 120 bp, synthetic construct
  source 1..120: mol_type = other DNA
tgacactcattggcagggtaaccctgggcaagttacttaacctctttgagactgtttgttcttctgcagagatattaactgtctagcagggttcttttaagaagcagatattccaggaaa

SEQ ID NO: 82055 - DNA, 120 bp, synthetic construct
  source 1..120: mol_type = other DNA
tcagcacagtcttttacagcaaaaatgcatgtcacctcctcctaaaggctttccgtggcccacccacccagattcctcctttattgtgcagactctttcctaacccacacctcatcttaa

SEQ ID NO: 82056 - DNA, 120 bp, synthetic construct
  source 1..120: mol_type = other DNA
catgaagaagtgaagaggcattatatatacaactcactgttcagtagctcagggtaaatataattgcatatgcaaagataaagatgtaatgataaaaatgtcaagtgttagcactttact

SEQ ID NO: 82057 - DNA, 120 bp, synthetic construct
  source 1..120: mol_type = other DNA
ttcttggtttcctcacttctgctagacaacgtttgatcagaaggaacagggaacgagaaggagctgctggatgacgataagcctgggaaagggaggctgggtgagcagagacagaaaaga

SEQ ID NO: 82058 - DNA, 120 bp, synthetic construct
  source 1..120: mol_type = other DNA
aggaacaaggagataaagcgagcactcaggaggttactagggaaggaaagagactccagggaaagctggagagctgcttaatatactttcgaaagtaagaagagtttcttcaagatttat

SEQ ID NO: 82059 - DNA, 120 bp, synthetic construct
  source 1..120: mol_type = other DNA
ggagccagggaattggcacgtttggcttttacttcttttttatatgtaaataataagccatctaagtgtaaaagtggctcatatcttctccagccaaatcagctaggccatggccttgcc

SEQ ID NO: 82060 - DNA, 120 bp, synthetic construct
  source 1..120: mol_type = other DNA
catgagccagaagaaaatgaactgcttttccttaagcatctctctacccctgggtcacctccagtggagtggtatgtcaagaaatgtaatttgtcctttctgatgccataatctaccata

SEQ ID NO: 82061 - DNA, 120 bp, synthetic construct
  source 1..120: mol_type = other DNA
ggccaaaaccaagatggcaatgaaagtgacctctggtcctcctcactgttcattatactctaattataatgcattagcatgctgaatgacactcccatcaatgccgtgacagtttacaaa

SEQ ID NO: 82062 - DNA, 120 bp, synthetic construct
  source 1..120: mol_type = other DNA
cctaaccaagaacttaaaaacgaaatgtcagggaatgagatgcccataaaggggattgaaaagccttaatatactccagaaagttccgacggccacatgcatgcatagatgtgggcatga

SEQ ID NO: 82063 - DNA, 120 bp, synthetic construct
  source 1..120: mol_type = other DNA
ctagaaccgagagagaataaacttctgtagtttaagctactcggtttgtggtctcagtcacgggagtccaagctgatgatcacagttgtgatgagaactttacaaattgaatcatgggaa

SEQ ID NO: 82064 - DNA, 120 bp, synthetic construct
  source 1..120: mol_type = other DNA
tcagaagacatgaatgacagggtgggaggtgtcttccatgtctgtccatggcacagcacccctgtgattcccaagggctgccaggggcccattcatctgagctctttatagatcctacat

SEQ ID NO: 82065 - DNA, 120 bp, synthetic construct
  source 1..120: mol_type = other DNA
agatgaggaacaagccaagaatgttggctctcaccacttatttcagcgtcttaagaagataccatcagggcaaaggactccttccttaaatagacacagatttccatgtggagtcattat

SEQ ID NO: 82066 - DNA, 120 bp, synthetic construct
  source 1..120: mol_type = other DNA
ctcagcccttatttccaggtggggatcaccccagaggagtaattcttgagatgtggtccccaacacctttttaggggaagggaggccaacataatcttcaggtaatacttgaagtattga

SEQ ID NO: 82067 - DNA, 120 bp, synthetic construct
  source 1..120: mol_type = other DNA
atacctagccttgacatttttgtttttctgagtgagtgagagaattcaggaaactgaggactgtctgtgttgccaggagctcatcagctgcaaggataatagagacgtttccacaaaaaa

SEQ ID NO: 82068 - DNA, 120 bp, synthetic construct
  source 1..120: mol_type = other DNA
aattacaagaacactgggaacaatctccaaagacgtgttcgtcgaattctagttagaatatggttgggaagcctcaagaaggcagagacaatgaaaacatgtggaaacatgcaaggtgga

SEQ ID NO: 82069 - DNA, 120 bp, synthetic construct
  source 1..120: mol_type = other DNA
cgccagaaacaacttgttatggcactcttactgaatcgctttcctggcttttgtaggaagggatggatggaaacttgaggccataatggtggaggaacatcaggatcatgaatcagtctc

SEQ ID NO: 82070 - DNA, 120 bp, synthetic construct
  source 1..120: mol_type = other DNA
aaaagaagaagccaggaaggtctgctttgctcctgacctgcctttccagagggtttccatgggaattgagaataatgggctatcaacagaagcaaagtaattttgtcttgaattcagtca

SEQ ID NO: 82071 - DNA, 120 bp, synthetic construct
  source 1..120: mol_type = other DNA
gattttctccagcaggatcacagttacacaggagaggttgaccatatcaacagtggccaggttaaggatgtaggtcacataggggctgctccagacctgtgagtagagaagccagcagat

SEQ ID NO: 82072 - DNA, 120 bp, synthetic construct
  source 1..120: mol_type = other DNA
ggcagtctatgatattcacttacttgcttttgtgggaatcatgccctggaatggaagttccatgagaatttactttgtctttaaaattctgttcactgccttttctccagcccctggaac

SEQ ID NO: 82073 - DNA, 120 bp, synthetic construct
  source 1..120: mol_type = other DNA
ttatacatggaatcatgggaagtctcagaatggtgagacgaacctggtcctacaaccctgagctactgaagctttgtttatggatcacagaggcttctaaaacaaagattgttccacaaa

SEQ ID NO: 82074 - DNA, 120 bp, synthetic construct
  source 1..120: mol_type = other DNA
ttgggattgaagtatttgctctgattctgaggcgagagcccaccctccccacttaatttttatctgaggtgaaattcacataacagaaattaaccaatttagagtgcacagttctgcctc

SEQ ID NO: 82075 - DNA, 120 bp, synthetic construct
  source 1..120: mol_type = other DNA
tatcagagcccaggcctttaactgaagcatctttatctcaacatctcacgatatcccccaatcctgtctgactctattactctgtccttaagaactgtcccctgaaacaaagaagaatct

SEQ ID NO: 82076 - DNA, 120 bp, synthetic construct
  source 1..120: mol_type = other DNA
ggaatgtgactttatgggacagtactgatcctccctacaagggagccattaagggtctagagcagctgttacctttggtcctatctcctctatatttcatgtagtttttatattcaagag

SEQ ID NO: 82077 - DNA, 120 bp, synthetic construct
  source 1..120: mol_type = other DNA
tttaactggcatgagatggtatctcattgtggttttgatttgcatttctctaatgaccagtgatgataagcccttttcatatgtttgtttgccacataaatgtcttcttttaagaagtgt

SEQ ID NO: 82078 - DNA, 120 bp, synthetic construct
  source 1..120: mol_type = other DNA
tcacgatattgattcttcctatccacaagcatggaatgttttcccatttgtttgtgtcctcttttgtttccttgagaagcagtttgttgttctccttgaagaggtccttcacatcccttg

SEQ ID NO: 82079 - DNA, 120 bp, synthetic construct
  source 1..120: mol_type = other DNA
tctgtgaaaactcttcttagagtcataccacatagaatgtcctgcgatatctcattggaatgccctcaccataaccaacacttaggcctttttcacctacccccaaattatatacacctc

SEQ ID NO: 82080 - DNA, 120 bp, synthetic construct
  source 1..120: mol_type = other DNA
agatgcatctctgcagtagggacagtgggattttctgccttgggagcaggtaaaaccagtattgttgcaataaacaccctgtcacggatatcacttggtaacactattttgtctctgtaa

SEQ ID NO: 82081 - DNA, 120 bp, synthetic construct
  source 1..120: mol_type = other DNA
agaatggcaattctagtccttgaaggattgtctaaaatcacagatataaaattaataaggcttaaataaagggtatgtacttaaagggaatgcaatttttattcaaattacaaagaggta

SEQ ID NO: 82082 - DNA, 120 bp, synthetic construct
  source 1..120: mol_type = other DNA
aactttatcctcctcttgcataagatgaaacagagttacagagagttatttgcccacaataacatgctttgaatgggagagccaaagtttggacaaaggcaatctgggtccaaaaccctg

SEQ ID NO: 82083 - DNA, 120 bp, synthetic construct
  source 1..120: mol_type = other DNA
gaagagcccagaaagctttagaaatatgacacatgcctttacatgtttccagtaagttaggaaaagtgattttactatgttgatgcaaaaaggcaggccccagatgagggtgcagacaac

SEQ ID NO: 82084 - DNA, 120 bp, synthetic construct
  source 1..120: mol_type = other DNA
tacccacatagacccaatatcttgttgttgggcactaatgaggcactaaacattgggaatggagatttgtgtctggtccaggttctactcatgagacactagtgtctcatctcttttttt

SEQ ID NO: 82085 - DNA, 120 bp, synthetic construct
  source 1..120: mol_type = other DNA
tcccaggtttattgaaaataaaatccagtgactgctgtatattacagcattggagaaagagtcaaacagctccacgaggcattttgaaattcatcccaactgtaggccgagtgacctgca

SEQ ID NO: 82086 - DNA, 120 bp, synthetic construct
  source 1..120: mol_type = other DNA
aaactaataataattgttatttttatagaatctggaattgtggagcagacttcgcaaggcttctctgacctctgcctcccgctctgggatctgtgaaacacactgggctcttcttctaga

SEQ ID NO: 82087 - DNA, 120 bp, synthetic construct
  source 1..120: mol_type = other DNA
ctgtctcttttcaagactctgagacagaggccaagagcctagcatgcaaaacacctcagacaatgcatccagggtaggggagaactgatatgaaccattcacccttagccaaaaacctgc

SEQ ID NO: 82088 - DNA, 120 bp, synthetic construct
  source 1..120: mol_type = other DNA
tcacacactgttggtgaaaatgcaaaatggcgcagctgctgtgaaaagcagtatggaaattcctcaaaaaattaacagtagaactgcaccgtatggtccagaaatcccacttctgagtat

SEQ ID NO: 82089 - DNA, 120 bp, synthetic construct
  source 1..120: mol_type = other DNA
tactctgaaggaaaaaaaaaagtggcagtgggatggactatcttaaggaaaacgggaaagacagtgagccacttaggttggtcctttctgagctgacaatattttctggctttttcagga

SEQ ID NO: 82090 - DNA, 120 bp, synthetic construct
  source 1..120: mol_type = other DNA
gaattcttaccaaaatgaagcaaaattcgcacacaaaaaaagaataagcaaggatggattccagtccccagtcctcaaatgaagggttgcactgtcctgataatgttctttcccttgggg

SEQ ID NO: 82091 - DNA, 120 bp, synthetic construct
  source 1..120: mol_type = other DNA
gtaaacagttatttcattttctctgttcaaagatggtttgtacccaccatcttcatgtaacagtttcttggtcacttaccatgtgaatatgcagtctctgggcatggagtcccctggact

SEQ ID NO: 82092 - DNA, 120 bp, synthetic construct
  source 1..120: mol_type = other DNA
gggtttggtccatcttcccaaatggagctaaagatccatgctggaaatttccctgctctagaacagacagcttggagtgatgagtcatgatgaagacctttctattgattcttcattgct

SEQ ID NO: 82093 - DNA, 120 bp, synthetic construct
  source 1..120: mol_type = other DNA
atgtccagaggatgatgtgaagatgggaaaggacattttccctggacaccatttctgaagttacatctctgtgtgtgctttcattggtgatgccatttctctttgctttctcttcttttc

SEQ ID NO: 82094 - DNA, 120 bp, synthetic construct
  source 1..120: mol_type = other DNA
ccccatggctctgcatgtccccactgaggtcctgttccagtgtctgcaagtccctcctgatattaacatataaccactggcaattatctcaacatttctattttctaaataattttcatt

SEQ ID NO: 82095 - DNA, 120 bp, synthetic construct
  source 1..120: mol_type = other DNA
atcttcttaaatttgttaagatttgttttgtggcttaatatatgatctatcttagagaatgttctgtgtatgcttgagaagaatggtcattctgctgctgttgaatgtaatgtcccataa

SEQ ID NO: 82096 - DNA, 120 bp, synthetic construct
  source 1..120: mol_type = other DNA
tacctactacaggtttttgtttgttgttgccataagacttacataaaatatcttacagtttttagtctatgtgaagctgctaataacttaacttcaactgcatacaaaaaccctacactt

SEQ ID NO: 82097 - DNA, 120 bp, synthetic construct
  source 1..120: mol_type = other DNA
tgggctcagctgcagagaccaggggacgggctggaccacattctctttctgccatatgcagctgccttacactacaagagggggaagaagggagctgaggaggtaaaaagagaaaagacc

SEQ ID NO: 82098 - DNA, 120 bp, synthetic construct
  source 1..120: mol_type = other DNA
actgtgtggtgtttccacaaagttgcatctttgagcacctcacagagaatctggagcctctcaaccaggacaacgtgagaaaaaaatctgaagaaaaaggcccaggtgcttggggtaaga

SEQ ID NO: 82099 - DNA, 120 bp, synthetic construct
  source 1..120: mol_type = other DNA
caaagggcatgggaacctcctgggctgtgaccagtcatcacctgggatcccactgccacagctcagagctaaagacagaaacacccagcatttcactgcacgctgatctcagccagcact

SEQ ID NO: 82100 - DNA, 120 bp, synthetic construct
  source 1..120: mol_type = other DNA
tgcagcttctctctggggtgacaatagcatgtgtagcctcaacagggacactataagaataaaagagtgtgctattactatttatgccatgatcacaggaatacccaggactgtccctga

SEQ ID NO: 82101 - DNA, 120 bp, synthetic construct
  source 1..120: mol_type = other DNA
ctgaccactgagtcacaaacctccctgttccctctctatctggctattttcttggtaggaccagaaaaacttttttttatagtcttgccaccatgccatgtagttttcgtacattgcagc

SEQ ID NO: 82102 - DNA, 120 bp, synthetic construct
  source 1..120: mol_type = other DNA
aaaagcatcaatcaaaagagatgagccttgctggtgggggccaggaagggtgcagagtgaaaagggggtgttcagtgatgggtgcacatctgattgacaaacttttgcagaatcatttcc

SEQ ID NO: 82103 - DNA, 120 bp, synthetic construct
  source 1..120: mol_type = other DNA
gccagggcacccttttcacaaagtggagtggatgaaaagaacaggaaagagcaccaaccctgctgctgtccccatatgacagaggctgctgtgggggcatctgttgtacttgggtgagca

SEQ ID NO: 82104 - DNA, 120 bp, synthetic construct
  source 1..120: mol_type = other DNA
gaacacaggaacccacacatgggagaatagcaggcatttgactggactgtgccaaaagagttgttcaagtacaatatcaagcaagactgtagttgcaaaaagacataaccaacaacttgg

SEQ ID NO: 82105 - DNA, 120 bp, synthetic construct
  source 1..120: mol_type = other DNA
gggtccttgtgttcatttcccatggccacaataacagaggaccacaaactggtgactgaaaacaacagaagtgaattccttcacagttctgaaagcaaagtccaagatcgaggagtcggc

SEQ ID NO: 82106 - DNA, 120 bp, synthetic construct
  source 1..120: mol_type = other DNA
ccaggatactaggatatgacactgtctcccagatcatgagcaggttgagtcaggtacgagggaagaggagccagcagatgacactgtctaaacccatctggtcatctcaggaaggcagaa

SEQ ID NO: 82107 - DNA, 120 bp, synthetic construct
  source 1..120: mol_type = other DNA
tctaaataaaaatcaaaaaagaaaataaaacaacaaaatgaagagctgcctgggagagatgaacccatggtccccgtcttcacgctaagatgcaaaagagcagagcttccagcttccaac

SEQ ID NO: 82108 - DNA, 120 bp, synthetic construct
  source 1..120: mol_type = other DNA
ttgtttctgggatcatcagctatcacatgttgtattagtccgttctcacgctgctataagacagcctaagactgggtaatttataaaggaaagaggtttaattgactcccaggtctgcag

SEQ ID NO: 82109 - DNA, 120 bp, synthetic construct
  source 1..120: mol_type = other DNA
acccccagtatctcagaatgtgactttctttggaaatagtgtctttatagaattaaaatgagatcattagggtgggccctaagaggatattagggcacagacactcacagagggacaact

SEQ ID NO: 82110 - DNA, 120 bp, synthetic construct
  source 1..120: mol_type = other DNA
cccaagaaagatacattgaagctctactccccaaacctcagaatgtgcccttatttggaaatagcagcattgcagatgtcattagttaagacaaagttatactagagtagagcaggccct

SEQ ID NO: 82111 - DNA, 120 bp, synthetic construct
  source 1..120: mol_type = other DNA
ataaaattcaatagaataaaacaaaatgaacgacatgaagcccaacacctcactggaacatgcaaaacccttcctttattctctggtggatcccatttctcgccattgttcagtgctctc

SEQ ID NO: 82112 - DNA, 120 bp, synthetic construct
  source 1..120: mol_type = other DNA
gctgggattacaggcgcctgccaccaggcccggctaattttttggatttttagtagagatggggtttcaccatcttggccagtctggtcttgaactcctgacctcgtgatccaccagcct

SEQ ID NO: 82113 - DNA, 120 bp, synthetic construct
  source 1..120: mol_type = other DNA
tccacacagacacccgtacacaaactgttataaaagctccagtcataataggcaaaacccagaagcaaactaaatgtcctttaacaggtgaacgtgtaaacaaactatggtgcatccata

SEQ ID NO: 82114 - DNA, 120 bp, synthetic construct
  source 1..120: mol_type = other DNA
tgcaggtataggttcccaatatgtccccaccccagttcaatttcaatgaccaagggagatagcagaggtaaagaaaacagataagagggggtcacctgacacctggtggacagaagctga

SEQ ID NO: 82115 - DNA, 120 bp, synthetic construct
  source 1..120: mol_type = other DNA
tttctcttcactgaccatgtattgcagccgtctcattcaccctcacactgacttcgtggaatgggtgctaatgtacccatttgaagatgagatgcctgaggtcagaggggaggcaactga

SEQ ID NO: 82116 - DNA, 120 bp, synthetic construct
  source 1..120: mol_type = other DNA
gattcactggccacagtgagtaaagatttgagtggaacagaacactcatgagatttcttctttcctatagaaaactgggcatcttcatggtgtctgaacaatagcaggaggctgatcata

SEQ ID NO: 82117 - DNA, 120 bp, synthetic construct
  source 1..120: mol_type = other DNA
gtgtagagtgggaatcaggggctgatagccttcagagctgagagccatgaatggagttagacccacatattaattgacagtaagccagtgataagcattgcttctatagattatatatta

SEQ ID NO: 82118 - DNA, 120 bp, synthetic construct
  source 1..120: mol_type = other DNA
agaaaataaagcagcagggcaagatgtcctcagcgaaaataaaccagattgacctggacatgaagtgcaccttcagacaccatgtcatgttttgggagcactacagagtcaggtaaggcc

SEQ ID NO: 82119 - DNA, 120 bp, synthetic construct
  source 1..120: mol_type = other DNA
accaaagtgataactcaaagatttcaaaaaaaaaaaagtcaaaagacaaaaccattactctttgagagaggagacttaattttccaaacaataagccctaataaagatagcatgaggcca

SEQ ID NO: 82120 - DNA, 120 bp, synthetic construct
  source 1..120: mol_type = other DNA
tttagcatcatgtcacagtagcagttagaacctgaggaaaaaaaattatagaaactgacaagaaagttggagagagcgattatctcaggacttatgaaggggagagaaaggtgaaaacag

SEQ ID NO: 82121 - DNA, 120 bp, synthetic construct
  source 1..120: mol_type = other DNA
gtgaatgacccagacatttaataaatgcctgttatgtaatataactttagattctaaattatattatgcttatttacaagcattccttccattacatttacctaacttatttttaatagt

SEQ ID NO: 82122 - DNA, 120 bp, synthetic construct
  source 1..120: mol_type = other DNA
tcaaatgtaacacaaatatcaaaccagtaaagactttatttaggaaccaaacccaggctgccatggtggaaaaagggcagaaccttagctactgaactacagcatggggcaaccactatt

SEQ ID NO: 82123 - DNA, 120 bp, synthetic construct
  source 1..120: mol_type = other DNA
gaggcaagttttagagccaagagtgaaaatttattaaaaagctttagagcagaaactgaagaaagtaaagtccacttgaaagagggccgagtgggtgacttgagagatcaagttcatggt

SEQ ID NO: 82124 - DNA, 120 bp, synthetic construct
  source 1..120: mol_type = other DNA
accttcactcagagtctcttccgttggttgccaacttgtaaacgaaaaagtatgtcagataggtctcaatcagtttagaattttcattttgccaaggttaaggacgcacccaggaaacag

SEQ ID NO: 82125 - DNA, 120 bp, synthetic construct
  source 1..120: mol_type = other DNA
gttcttaacggccctcacctatgccttttctggccacacatgagtttggatgaagcaggagtctcttccatagctccttttcatctgagatgtccatgactggctcaagtgaaccacagt

SEQ ID NO: 82126 - DNA, 120 bp, synthetic construct
  source 1..120: mol_type = other DNA
attagctcacagtggacagctacccacgaggcatcacacagccaggacaggggacggccacactggctgggtaattgtgacttacagacaaggcaccttctgtcccctgctcattttgag

SEQ ID NO: 82127 - DNA, 120 bp, synthetic construct
  source 1..120: mol_type = other DNA
ggggtctggaatacagaggttttcacggaagcccaggggaccctgaacacttctattccttctatcaggacaaggaagggttgtgcatccggctttccaccttaaactggtttctatggt

SEQ ID NO: 82128 - DNA, 120 bp, synthetic construct
  source 1..120: mol_type = other DNA
tgggcagggagtggacccaggtaccaaacccactcctgacacaacccagatgaaaggcaagagtgtgttgagcacttccctgcccaggccttcctccagctgtggttttctgtgaacatc

SEQ ID NO: 82129 - DNA, 120 bp, synthetic construct
  source 1..120: mol_type = other DNA
aggagtggagggtgtctcatccactgtggagataagcccccatattgcgtggcaaaggggctaggtaacagttaaggcctcatccatctgagctctgaatcaaggctaaagcccaggcta

SEQ ID NO: 82130 - DNA, 120 bp, synthetic construct
  source 1..120: mol_type = other DNA
ctacagctgatcactcttggcagacagtgaacatcacggcccagaaggagccagggcagcacttggcaagctgccccaaagccccagagagctccttagacatggaaagtcaatactgat

SEQ ID NO: 82131 - DNA, 120 bp, synthetic construct
  source 1..120: mol_type = other DNA
cttattttgattaaagcacaataaagtctttgttgttatgtcctgcctgtttttgagttgcccagagctctctgcaggaagccctggacatactggggtggatgggaaatgaagatggca

SEQ ID NO: 82132 - DNA, 120 bp, synthetic construct
  source 1..120: mol_type = other DNA
tattgcactgtgtaatgccatcgtcgggacctcagagcaatagaaaccagtggacccctttaggcttttctttccaatgggacataaagaagttatatggacagaagttatatcctgttt

SEQ ID NO: 82133 - DNA, 120 bp, synthetic construct
  source 1..120: mol_type = other DNA
tttgactcctgagggccacgaggagtccactccccagagctttttgtagaacctgcatatgagtccatcagaggtgagatttgcaaatacttcctccagcctgggacttgtcttttcatt

SEQ ID NO: 82134 - DNA, 120 bp, synthetic construct
  source 1..120: mol_type = other DNA
tctagcagtgcaaagggctccttcctttagtagactcagatttccatctggagtcattattctcctgctagatggatgtcctttaccatttctcaatctgtacatctcctggtgatgatt

SEQ ID NO: 82135 - DNA, 120 bp, synthetic construct
  source 1..120: mol_type = other DNA
attgtaagtttcctgaggcctccccagccatgcttcctgtacagcctgtcaaactgtcagccaattaatcctcttttctttataaattacccagtctcagatatttctttatagcagtgt

SEQ ID NO: 82136 - DNA, 120 bp, synthetic construct
  source 1..120: mol_type = other DNA
aatattcatggccaccaggagacagagactcactgtgtcagagaaataggacacaggctccagaaacatggccacctgcaatgtcacctggtgatacagcatgaggattttctccaacag

SEQ ID NO: 82137 - DNA, 120 bp, synthetic construct
  source 1..120: mol_type = other DNA
ttctgcagaaatccctctgtgggaatggaagatttatcaggttttttattctcttcacaatgttgttcaataacttctccagctcctggaacagggtttgacatagaggactcacttggg

SEQ ID NO: 82138 - DNA, 120 bp, synthetic construct
  source 1..120: mol_type = other DNA
ttggatctcagactttcagcctcctaaaactgagagaatgaacttctgctgtttaagccactcagtctgtgatctctgtcatgggagcctgaactgatgatcacatttatgatgaaaagt

SEQ ID NO: 82139 - DNA, 120 bp, synthetic construct
  source 1..120: mol_type = other DNA
caaggagcataaacaacaaacaggttggatcctgggattcagggagccagctctgatggaagtgctcaggttgatgcagccaaaatagccaagtaacctttgcattgggattgaagtact

SEQ ID NO: 82140 - DNA, 120 bp, synthetic construct
  source 1..120: mol_type = other DNA
gagttaaaatggtttgaaaatgaaagaaggaagagagatcttttctcatacctgggaagtcttggatagaattggtaccacagaggccaatgtcctgagagatgaaagttctgcccacag

SEQ ID NO: 82141 - DNA, 120 bp, synthetic construct
  source 1..120: mol_type = other DNA
agataaattgagaagtcaaaacaatgcccaacaacatagcatctttattcctccctcccctaatgacctgggaagcagtttgtgaccccaaagcacttgcttatatgttattctctccag

SEQ ID NO: 82142 - DNA, 120 bp, synthetic construct
  source 1..120: mol_type = other DNA
ctcttcttttccttgcttcttaccatagaaagttgaattactgattagaggtatttttcttttccaatgtaggcatttacagctacagattttcctctaagcactggtttatctccatct

SEQ ID NO: 82143 - DNA, 120 bp, synthetic construct
  source 1..120: mol_type = other DNA
gaactaaaggaatgcatgagaatgatatctcaccaaatacaaaacatcaataatgagatggaatgttaaaaaagaaacaaggctgggcgcggtggctcacgcctgtaatcccagcacttt

SEQ ID NO: 82144 - DNA, 120 bp, synthetic construct
  source 1..120: mol_type = other DNA
gagaagctgtaattaccagacctgtcttatgggaaattataaaagcagtcttgcaggttgacatgaaaggacactacatagcaactcgaatccacatgaagaaatgaagaactccagtaa

SEQ ID NO: 82145 - DNA, 120 bp, synthetic construct
  source 1..120: mol_type = other DNA
actccctctcctagccaagggaagccgaagccttgagggactgtgtggggaggaacggtgcactctggcacagatactgcgctttcctcacgtcttcgaaacctatagaccaggagattc

SEQ ID NO: 82146 - DNA, 120 bp, synthetic construct
  source 1..120: mol_type = other DNA
caataaaggagattaagaaggagcagctgggagactttggtgatttgaagctgtcagtcagctcagactgccataacaaaataccataaactgggtggcttcaacaacagaagttgattt

SEQ ID NO: 82147 - DNA, 120 bp, synthetic construct
  source 1..120: mol_type = other DNA
ctggcatcagacagatgcaaaatagtatattcctagcagtatcagaagaaaaggtggagtcccatatgtgagcacagatgcaagtaggtgaacagatgggttagtaagaacttctctttt

SEQ ID NO: 82148 - DNA, 120 bp, synthetic construct
  source 1..120: mol_type = other DNA
ccttcatgcaaagtactaatgataggagtgggacatctattccccagagctccatcctctcttctaaataacagggaacgttgagtcccctgttttttctctagtgagagcactcatcag

SEQ ID NO: 82149 - DNA, 120 bp, synthetic construct
  source 1..120: mol_type = other DNA
ctccacagtctctagcacagtggatcctggttgatcaaacaggaaggacctcgaagttagtcaaatataagtggaaaacctattaagcatttacaaataatgtggccttgggcaagtaat

SEQ ID NO: 82150 - DNA, 120 bp, synthetic construct
  source 1..120: mol_type = other DNA
ttttctacccaacttattcctgatttaaaggctagtatacgtgtgctgatctcccctcagtgggaggggcatggacgttgggagtagtctctattcacaacaaattaaaaatcagtaatc

SEQ ID NO: 82151 - DNA, 120 bp, synthetic construct
  source 1..120: mol_type = other DNA
cacacgcccatgtactacttcctctgccacctggccttggtagacgcgggcttcactactagcgtggtgccgccgctgctggccaacctgcgcggaccagcgctctggctgccgcgcagc

SEQ ID NO: 82152 - DNA, 120 bp, synthetic construct
  source 1..120: mol_type = other DNA
tggtctctgcaatcagaagtctcaagttgacaagaaaatcatagtccctaccctgcaggagagggtacatccagaaaaagcgaccatggactctattctcagaaatcagtccaacttagt

SEQ ID NO: 82153 - DNA, 120 bp, synthetic construct
  source 1..120: mol_type = other DNA
cactggacttaacaaagacagaaatacagaaatcagtagaacatggatcccaacctaaaacttactctcttgtcataaaggaaaggagataggagtttttgcataaataacaaggtatca

SEQ ID NO: 82154 - DNA, 120 bp, synthetic construct
  source 1..120: mol_type = other DNA
atggctccccctcttccactatctatctggtcctctagctcctattcagtagccagtgtccctctctttcttggaacttcttttttggaattaccaagttacaacacaaataagataatt

SEQ ID NO: 82155 - DNA, 120 bp, synthetic construct
  source 1..120: mol_type = other DNA
tgataagagaccactgaccatggactggttctggctagtttacagaagctgtgcatttgaatgcctttgtgtccctgcttcaccttttcatgtataaggcctaactgtaatgcaattaaa

SEQ ID NO: 82156 - DNA, 120 bp, synthetic construct
  source 1..120: mol_type = other DNA
agccaatcatctattgcctgagatcacagcgggagggacaatgatcgggatataaacacaggcattcgagccagcaacgctaccctctttgggtcccctccctttgtatgggagctctgt

SEQ ID NO: 82157 - DNA, 120 bp, synthetic construct
  source 1..120: mol_type = other DNA
agtagctagtccaatgttttatttaaaaaagaacacagaagccagataaccagcttctcttcagacaatccctcttcccattctgcaaatgtcaatgccagcctcttctcctgaaggatg

SEQ ID NO: 82158 - DNA, 120 bp, synthetic construct
  source 1..120: mol_type = other DNA
aacaatagcatcgtctgcttgtctgtaatctttagaaaagagtaggaatcttgggggtcgtgattgtgtcttaattaacttgtatctttagcactgttccagcatgctgtcaggcacagg

SEQ ID NO: 82159 - DNA, 120 bp, synthetic construct
  source 1..120: mol_type = other DNA
ggggttactgtgagggcaaatctaatatactctcagaaaaaactaattcaggggattccctacccagagatgacctggattctgggaaatagtgccctttcaagaaaacatatgaacaac

SEQ ID NO: 82160 - DNA, 120 bp, synthetic construct
  source 1..120: mol_type = other DNA
gcacaaagtacaggttataaagaccttgcaaataaaaggaagcagtaaagaagccagccaaaacccaccaaaaccaagatggcaacgaaagtgacttctggtcattctcactgctcatta

SEQ ID NO: 82161 - DNA, 120 bp, synthetic construct
  source 1..120: mol_type = other DNA
aatagaaggatcatacctgcaaacaacgatacagatgaatgtgctagaacctattgagtgaaaaaagtgttagaaacaaatgcttattccacggtgccgcaaagaaatagcactcagaca

SEQ ID NO: 82162 - DNA, 120 bp, synthetic construct
  source 1..120: mol_type = other DNA
tgttccaaagaaaactaaacataagcaaaactgaatatagtatctagaactacatatgtaagcaataaggctcttataaaaatgtaaaaaccatgagtgttcattatgctactattatgt

SEQ ID NO: 82163 - DNA, 120 bp, synthetic construct
  source 1..120: mol_type = other DNA
tagtatattttttatgtagtcatcagctcagaatggagctggctataagctatgcaccaatgggaaccagtttcagtgctcatcactagttgacaggcaaagggccatgaaaagttggtg

SEQ ID NO: 82164 - DNA, 120 bp, synthetic construct
  source 1..120: mol_type = other DNA
ttaggagacagatgtagaaactgccattttaaaaagccaaacagaaatgctggaactgaaaaatacaatatcgttgacccttgaacaacaagggtttgaactgcatgggtccattgaatg

SEQ ID NO: 82165 - DNA, 120 bp, synthetic construct
  source 1..120: mol_type = other DNA
cgagacccatatagtgatgctggaagttttccctggagacagagaaaagccataacattacaggaaaaagttgaattgcttgatatgtgctatagattgaggtctgctgctgcagtttcc

SEQ ID NO: 82166 - DNA, 120 bp, synthetic construct
  source 1..120: mol_type = other DNA
gtaaggaccaataaagcacatgataagatgtttaacaccattaaccatcacagagcaaattgaaacgacttgagggagcacttcacagccgatagaatgcctaaaaccaagagactgaca

SEQ ID NO: 82167 - DNA, 120 bp, synthetic construct
  source 1..120: mol_type = other DNA
tatatgaaacactatgaatgaatttccataacaagccagataacagaagccagaaataaggcatgaagctaggcatggtggctcatgcctgtaattctagcattttgggagtccaaggtg

SEQ ID NO: 82168 - DNA, 120 bp, synthetic construct
  source 1..120: mol_type = other DNA
cctgggctcaggtgatccattcctcttggcctcttaaagtgctgggattacagatgtgagccaccatgcccagactgaagttgattttaaaagcagaaatgagctactgatacttgaaac

SEQ ID NO: 82169 - DNA, 120 bp, synthetic construct
  source 1..120: mol_type = other DNA
tagaatatagaaatattatccaggtcatacagaggttgtgaagtgctttgaaaggtgtggcagcagcattagaagtcaacattactacctgagccctaatccaccaccctttcaaaggtg

SEQ ID NO: 82170 - DNA, 120 bp, synthetic construct
  source 1..120: mol_type = other DNA
gaagcaatgaattaccaagagtataagagtgtaagagagggatgcagaaagtgtattagaatgatggttgacagataaataaggaggagttggctattttttaccaacacaaagggtgta

SEQ ID NO: 82171 - DNA, 120 bp, synthetic construct
  source 1..120: mol_type = other DNA
agtttattgaatttaattgctgtacagtgttaattaagatcatcttgttgtagaatatgaatactaagacaataaggagaaagaggcatgatgtccacaagttattcccaagtgactcag

SEQ ID NO: 82172 - DNA, 120 bp, synthetic construct
  source 1..120: mol_type = other DNA
tgtgaggctcaatccgttgttgagcacattaatggtttcctcactcccactagacaatgtttgatcagaaggaacaggggatgagaaggagctgcttgatggtgatgagactgggaaagg

SEQ ID NO: 82173 - DNA, 120 bp, synthetic construct
  source 1..120: mol_type = other DNA
tcatccttgtctcttatggagccattgcctgggcagtgctaaggactaactgcaaaagggcagaggaaagcttttgggacctgctcctcccatctcactgtggtcaccctcttctacagc

SEQ ID NO: 82174 - DNA, 120 bp, synthetic construct
  source 1..120: mol_type = other DNA
aagtgctgggattataggagtgagccacatcacccagccacttctgattctgacaatgtcttctttcctttgtcatcaggatggttcatctccacttgcttgaggtggactgacaggaag

SEQ ID NO: 82175 - DNA, 120 bp, synthetic construct
  source 1..120: mol_type = other DNA
agcacttagtttccaatcggaagtggcataacactttgactcattggtcatttgccaaagcaaatctcatggctacatataacttcaaggtgaggggaaataaaccaatcatgtggcagg

SEQ ID NO: 82176 - DNA, 120 bp, synthetic construct
  source 1..120: mol_type = other DNA
tctagaggagtcaagaaagccatcaccaacgtcgttcagcaggaagtaaaatccctttgtgtcttggaagcctcccaggttcctgcagaagaagctgtttctggagctagtgagccctat

SEQ ID NO: 82177 - DNA, 120 bp, synthetic construct
  source 1..120: mol_type = other DNA
aatgctgagagggcagcatgccccagaagctctgtaacccttcccacacaccttttcctgtacatctcttctattttgttgttcatttgtatcctttggaatatcctctataataaactg

SEQ ID NO: 82178 - DNA, 120 bp, synthetic construct
  source 1..120: mol_type = other DNA
gactagaagtgttgaatgttgagaatatagtaggagaaaatggtcagtttgggggttttctacaaatacacagagccctttcgcattgcgcagcatccaatttgaatcctggacctgcaa

SEQ ID NO: 82179 - DNA, 120 bp, synthetic construct
  source 1..120: mol_type = other DNA
ctccttgctatcctggagtcctgaatttccaagtaaaaagtctatcatgctgggcagaccatgtagaaaggccctgagatagcatgaagacagagaaaatgagcccaaacttacagtgaa

SEQ ID NO: 82180 - DNA, 120 bp, synthetic construct
  source 1..120: mol_type = other DNA
gctacagaaacaggcagaaaagaacgtggagaagaaaactgacaaatacacacagttctcctcaagacctatggactcctggtctgagcctaataaagactgtttattccaaaaaacacc

SEQ ID NO: 82181 - DNA, 120 bp, synthetic construct
  source 1..120: mol_type = other DNA
cctcctggttcagaagtgattttccattaggctatcttttaatttaaacatgaactctgctgtgcccatcactgtctgtgtgcagtcacaggtagagggagagccttcagatggcaccct

SEQ ID NO: 82182 - DNA, 120 bp, synthetic construct
  source 1..120: mol_type = other DNA
gtaaatgtacacttatatccatacctgtaaattcaaactgcctttggtctttcttcctgatagtatttgaaaagaacacattcagccaggcacggtggctcacgtctgtaatcccagcat

SEQ ID NO: 82183 - DNA, 120 bp, synthetic construct
  source 1..120: mol_type = other DNA
actggaggtgggagtagagacactgtcctttttcttcctgttgacagaaagaagcaatgagtgacctcttttacctaccacagtgatgactattgttggcatatttcctatagatattcc

SEQ ID NO: 82184 - DNA, 120 bp, synthetic construct
  source 1..120: mol_type = other DNA
ttggctgtgagatatcagtttccgcctatcctcaacactggaggaccagatttggagttaaacttactctaaaatcctagtcctagcacttattgactaggtaaccttctacaagtctct

SEQ ID NO: 82185 - DNA, 120 bp, synthetic construct
  source 1..120: mol_type = other DNA
cttgggaggctgaggcaggagaatagcttgagcccaggaggtggaagttgcagtgagcagagatcgtgccattgcactccagcctgggctataaaacgtgactctaaaaaaaaaaaaaaa

SEQ ID NO: 82186 - DNA, 120 bp, synthetic construct
  source 1..120: mol_type = other DNA
ctgaaagactacaagatttagggagagtgattcttggagtctttcgataatgttcctgtgaaccctggtgattttaacatgcttgtggccactcttgcctcctacttgtaagctactcat

SEQ ID NO: 82187 - DNA, 120 bp, synthetic construct
  source 1..120: mol_type = other DNA
cttcctccttctgggcttctctgaacacccagggctggaaaggactctcttcgtggttgtcctcacttcctacctcctaaccctagtgggcaacacactcatcatcctgctgtctgcgct

SEQ ID NO: 82188 - DNA, 120 bp, synthetic construct
  source 1..120: mol_type = other DNA
cacacccattacattgtgggaatggatgaaagccacatgtctgtgtgtgtgcatgtatgtgtgcaagagacagcgactgaaatgtagtaaagggaggtatctttatgcgaaaaattatag

SEQ ID NO: 82189 - DNA, 120 bp, synthetic construct
  source 1..120: mol_type = other DNA
gaaaatattgtaagttgaatatgcatttcatacacctaacctaccaaacatcatagcttagcctagcctaccttaaacatactcagaacacttacattagcctacagttcagcaaaatcc

SEQ ID NO: 82190 - DNA, 120 bp, synthetic construct
  source 1..120: mol_type = other DNA
tagccatccttgtgttaatcttattgtctccttgacctcgttattagagcatattctaatcttaatgtagagcccccattttatatttaataatcctaatcagtcaggcgcagtggctca

SEQ ID NO: 82191 - DNA, 120 bp, synthetic construct
  source 1..120: mol_type = other DNA
tcatggaagcctcttagaggtttgaaccacagaagagtaaacaaaataagaagtatttgctgactgtgtagaaatgagatgatgcaaagaccccctttttaggggcttggggactcctaa

SEQ ID NO: 82192 - DNA, 120 bp, synthetic construct
  source 1..120: mol_type = other DNA
gccaagatcacacagctgcactccagcctgggcaaccgagcaagactccatctcaaaaaaaaatgtggaacctctatgcactgatttccaatgttccttgtagcttctgcttttctgaaa

SEQ ID NO: 82193 - DNA, 120 bp, synthetic construct
  source 1..120: mol_type = other DNA
cctcagtcagattctttcttctgaggaggcaaaaattgaggttgctgcagacctgtacagattcgcagctgctaacatattttcatgccatgtaactctgatacattctgccgctaatac

SEQ ID NO: 82194 - DNA, 120 bp, synthetic construct
  source 1..120: mol_type = other DNA
ggaaggggaaaccttctggctcctcctatgcagaattaatcgctcacccttgaagggtaccagtatatgccacctcaaactatctttagcatgtggattattttgagctaacaattgaaa

SEQ ID NO: 82195 - DNA, 120 bp, synthetic construct
  source 1..120: mol_type = other DNA
gcggaggttgcagtgagccgagatggtgccactgcactccaacctgggcgacaaagactccatctcaaataaataaataaataaataagagaaaagtatgtcatgtgtaaaccaaaaata

SEQ ID NO: 82196 - DNA, 120 bp, synthetic construct
  source 1..120: mol_type = other DNA
aaccaaaaatttggccaggcacttagggaggctaggtgggcagattgcttgaatccaggagttcatgaccaatccgagcaatatggtaaaaccccatctctactaaaaatacaaaaaatt

SEQ ID NO: 82197 - DNA, 120 bp, synthetic construct
  source 1..120: mol_type = other DNA
ctattagtagctaagtttggagagagtcaacagttatgtgcagattttcgtttgtgtgtggggtcagtaaccctaaaccccaagttgttcaaggggcaactatatgagctccaaattctt

SEQ ID NO: 82198 - DNA, 120 bp, synthetic construct
  source 1..120: mol_type = other DNA
taccttttggtaagcttcatgtcaagtgatagcttccctcaagggcaaagtcacagaattatctgtttcaaaagcctgagtggataaacaaactgttgcctatccagggtgtcctaaaac

SEQ ID NO: 82199 - DNA, 120 bp, synthetic construct
  source 1..120: mol_type = other DNA
cctggttgctctcttaagtgatctcgtttgtttttctgcttactggtcatcttcccacgtcgagaaggtacaacgcttgaaagccatcttactcaccattttgcctcagtgccaaaaaaa

SEQ ID NO: 82200 - DNA, 120 bp, synthetic construct
  source 1..120: mol_type = other DNA
tcgactcctgcactcctgctagcagagtgtctggcttacctttggccacagtagaacttttcaccctttgtttataatttacagcccacttaagtgcaatgcaagtttgagatgataatt

SEQ ID NO: 82201 - DNA, 120 bp, synthetic construct
  source 1..120: mol_type = other DNA
ggacagaggctaacattcacgcaacatataccatggcccaagggccaacctaggcacctgaatgcacaatttataatagtctttgtacccaacctatggaggaatgtattactgttattc

SEQ ID NO: 82202 - DNA, 120 bp, synthetic construct
  source 1..120: mol_type = other DNA
ggtacatatggctctgtcagaagaataccatgatttaagggaagaaagtacacaaggtacatggagggtacacagggaaagtacatggataaacatggacgtgtgcaaataggaaagaca

SEQ ID NO: 82203 - DNA, 120 bp, synthetic construct
  source 1..120: mol_type = other DNA
aagggcacagggaaagagaggaagggcacagaaaaatgtagggggaggacgtagggtaagtggacagaataaattaaaaggagaaatcaaaacagaacaagaaaagccagagaacataag

SEQ ID NO: 82204 - DNA, 120 bp, synthetic construct
  source 1..120: mol_type = other DNA
agtaatataggaaggagggatggagggaacatgggaacaaagagggtgggagaaaagccagatccttaccttgggcacaaagagcacaacaagagtgatataggaggagaaaactatggc

SEQ ID NO: 82205 - DNA, 120 bp, synthetic construct
  source 1..120: mol_type = other DNA
ccctatcccttatgtccacccaacttgcccagaccacatcactttttcctgggattcacacaggaaagcaatggtggcaagctgctgtcagtcaggcaagggcttgttgaatatctagaa

SEQ ID NO: 82206 - DNA, 120 bp, synthetic construct
  source 1..120: mol_type = other DNA
aacgcttctcagtctctggcttccaactgttttcctatgagaccctcaatgctgatgccaaatctcattctaggcctaagaatgttttcctgaacccttggaggtgcttgttccccactt

SEQ ID NO: 82207 - DNA, 120 bp, synthetic construct
  source 1..120: mol_type = other DNA
actctctttcatgtattttctagccacacgatgctccctatgcccctgaagtagccttcctctatttctctagctgataaaatcctatttgtccttcagtattcaaatgccacctcttca

SEQ ID NO: 82208 - DNA, 120 bp, synthetic construct
  source 1..120: mol_type = other DNA
ggagagagaattacccctcttctccagggaggctgagctctccaaataccacgcaatggcatgaccctaatttcagggccaggggctaaaggaagacaggattggagaagacagtggagc

SEQ ID NO: 82209 - DNA, 120 bp, synthetic construct
  source 1..120: mol_type = other DNA
cgttaggaagcaaccagaaatgagatgagaagatggagtgaatggtctatccataggttgggaaatgctgaggcatgtccccaaagttgtagtctttgtttttgtttgttctttaagttt

SEQ ID NO: 82210 - DNA, 120 bp, synthetic construct
  source 1..120: mol_type = other DNA
tttggcagatgacaattacatgaggttttccctcctcctccatagtttaagcaaccgttttcctgacagagacagacaaagagacagctctgggcttgaagtagctggttcaaatatatc

SEQ ID NO: 82211 - DNA, 120 bp, synthetic construct
  source 1..120: mol_type = other DNA
tctaagatttctgttctagaactgtttccgttaccataacttttccttcaaaagccaactcacactcctttcaccatggctgaagtccatttcctcttgtcctggatacaaagaggagct

SEQ ID NO: 82212 - DNA, 120 bp, synthetic construct
  source 1..120: mol_type = other DNA
gtagttaagcttattattattattatttacaagcttgatgaacagagttaaaagagaagggcagaagttgggaggtgccagggcaatcttgtgatgtctctggcattcttccccaggggg

SEQ ID NO: 82213 - DNA, 120 bp, synthetic construct
  source 1..120: mol_type = other DNA
agattgggaagacaggggagtatgaaggaagttttaactcacagagacaccctcaaaggacgaagagttcattgcccggtagatttggtcggtaatggtctggttgttgtagttgaagtc

SEQ ID NO: 82214 - DNA, 120 bp, synthetic construct
  source 1..120: mol_type = other DNA
tcctacccacacccctcccaacactcaaccttctttttccatgaaagctaaaaagaatgatagttcctttaactctctcatgaactgggtcaagagacctgacttcatataccttgcagt

SEQ ID NO: 82215 - DNA, 120 bp, synthetic construct
  source 1..120: mol_type = other DNA
cacacctttaatcctagcactttgggaggccaaggtaagcagactgcctgagctcaggagttaaagaccagctgggcaacatggtgaaaccccatctctactaaaatacaaaaaattagc

SEQ ID NO: 82216 - DNA, 120 bp, synthetic construct
  source 1..120: mol_type = other DNA
gaatggcttgaacctgggaggcggaggttgctgtgagccaagatcgcgccattgcactcaagcctgggcaataagaatgaaactctgtctcaaaaaaaaaaatacaaaaattagctgggt

SEQ ID NO: 82217 - DNA, 120 bp, synthetic construct
  source 1..120: mol_type = other DNA
ataaaaatgctgggtatgaagtaagttacattttctctacgtgaatttccttgactctcaacctcatctttgttattgatactcagatctataatttcagcccaatatttcaagtccata

SEQ ID NO: 82218 - DNA, 120 bp, synthetic construct
  source 1..120: mol_type = other DNA
aaattgaaagattggtctatccaatcttcagttcaaggtaaatatggcatcaaaaaaatcacccagaaagaaagggattaatctgctcagcacgatgcggtcccctgctcaggtggtcag

SEQ ID NO: 82219 - DNA, 120 bp, synthetic construct
  source 1..120: mol_type = other DNA
aatcagaatttccaggggaagggcctgataacctgtgaactaactacctttccaggtggttctgacggatgttaaagtttgagaactattgatctaaacataaggccatccttagggaat

SEQ ID NO: 82220 - DNA, 120 bp, synthetic construct
  source 1..120: mol_type = other DNA
ttggagccagatttaactaggattcaattccagctggactgctgagtagctgcatgacctgagacaagtcattaaaccactctgagtctcattttcctggtctacaaaatgtagataagt

SEQ ID NO: 82221 - DNA, 120 bp, synthetic construct
  source 1..120: mol_type = other DNA
atgctgcgggtattggcaggattcagcatgacaatctcagttgtgatgtggccctccaccgcctcagtcatctcatccactgtgcagttgatagaagggtcgtagatcttgaaccaattg

SEQ ID NO: 82222 - DNA, 120 bp, synthetic construct
  source 1..120: mol_type = other DNA
tttttgacgggcacagctggatctgagaagaaactctggcggaaagtaatctcaattccagcctccttcactcgttcctccaggtcgtccagagtcttgggtgggaataaaaaacaagtt

SEQ ID NO: 82223 - DNA, 120 bp, synthetic construct
  source 1..120: mol_type = other DNA
agacagagaggatcccaaaaactcaactcattctttcccctggctacagaaagaactgcacttaatccacatggaatgcgttctctttcaatgaagaatcaagttcttgcccctaaaagt

SEQ ID NO: 82224 - DNA, 120 bp, synthetic construct
  source 1..120: mol_type = other DNA
gggcccctcccctgtctgcaattcctgctcttatctttctcgaacaaattagttcctttctcaattactcactttcatcattaattaccgttttcttctcctttctggcatctcttcctg

SEQ ID NO: 82225 - DNA, 120 bp, synthetic construct
  source 1..120: mol_type = other DNA
tcaacaacattggaaggttttctctttatgcctcccactagggcaactttgtaaatctttaccattctcaggacccaccttcctgcactctccccacatctattactccagatcctgctc

SEQ ID NO: 82226 - DNA, 120 bp, synthetic construct
  source 1..120: mol_type = other DNA
tattttcctgtaccctgctgctcttcccataggcattctggggttagcttacagctcaggaatccaccaagataggatgtctattagtaaaaatacagataaatacttgggattcatccc

SEQ ID NO: 82227 - DNA, 120 bp, synthetic construct
  source 1..120: mol_type = other DNA
acagggttgggaatagaaggatgagaaggagtcaggtagggctcaccactaccttgctgttttgttaagataaataaactagagctctcaagtctctcaaaattttcctcattctgtccc

SEQ ID NO: 82228 - DNA, 120 bp, synthetic construct
  source 1..120: mol_type = other DNA
ctgctaagagggtgccggggaggcgcctccatccctgattttgtggggaggagggggcgagggccccggagaagcagggaaggttggcttcctacggcccccgcggctctcgccaccgtc

SEQ ID NO: 82229 - DNA, 120 bp, synthetic construct
  source 1..120: mol_type = other DNA
cctaagggcagaatttcaggggggtggagggtgcagagtgaaggggagggcattgcagtgcgcgcggtaagggtttctcatctcacctgagtgtggcgttcgattcactggcagcaggaa

SEQ ID NO: 82230 - DNA, 120 bp, synthetic construct
  source 1..120: mol_type = other DNA
tcttcttcccaccccatccctgagttgttcttcatcttctgataatgctgcctccaattttaagtcttttaccctaatatgtttccacccccagagctccccttctcaatttttcttagt

SEQ ID NO: 82231 - DNA, 120 bp, synthetic construct
  source 1..120: mol_type = other DNA
cttacctgtgcaagcatccacacattcccaaaagaaaaaaaaaattaccattttaggaacccaagatggggctataagcacacaaaatgggatctcttcaaagtcagctacagtgggcgg

SEQ ID NO: 82232 - DNA, 120 bp, synthetic construct
  source 1..120: mol_type = other DNA
taaagctgatgagagaacccacaagtggggagggaagggtgctgggtggaggtaagaaagaaaagtaattaagaaatcatgaagggtatgatatgtgggtggagcttttctttaaaaaaa

SEQ ID NO: 82233 - DNA, 120 bp, synthetic construct
  source 1..120: mol_type = other DNA
gactccacctctcaccacctcctctcccccggcccccgcggctcgcagaagcctggcttacccacgctcccggcatcggccgcctcagcgctccccgattccatccccgcggttcctcct

SEQ ID NO: 82234 - DNA, 120 bp, synthetic construct
  source 1..120: mol_type = other DNA
tctgcagggaacgcgcagaacggattggaggcaaaaaacaaaacagggagggggacatcaaggagagaaattgaagtacgaagggagtaaaaggacaagagaaaagaacctcagggtggt

SEQ ID NO: 82235 - DNA, 120 bp, synthetic construct
  source 1..120: mol_type = other DNA
gaaaagtaacttgcaataaaataacataaacagtattttaatgtgtgagtgccaaggcccgactaccctagaagtcctgatggagtaagcagatgcttccacctattcacagaaccacgg

SEQ ID NO: 82236 - DNA, 120 bp, synthetic construct
  source 1..120: mol_type = other DNA
tgtccttggttttacaatgataaatgaaaaacattaaaattctccaattgaacaaggtatgcaaggatttttatgttgttgtttttttgttgttgttgttaaaacagtgagagcaaaata

SEQ ID NO: 82237 - DNA, 120 bp, synthetic construct
  source 1..120: mol_type = other DNA
tgcgcgcacgtcgtgctctccctccctccaccctcacttttctttttttttctttcttttttttggtggggggacggagtttcactcttgtcacccaggctggagtgcaatggcgtgatc

SEQ ID NO: 82238 - DNA, 120 bp, synthetic construct
  source 1..120: mol_type = other DNA
tattcttatttatttatttttattttatttatttatttattttttgagacagtctcacactgtcgcccgggctggagtgcagtggcgcgatctcgctcactgcaacctctgcctcctggg

SEQ ID NO: 82239 - DNA, 120 bp, synthetic construct
  source 1..120: mol_type = other DNA
tgggtgaatggaagatgttcatgtcctcttgggttaggatgaaagacctgtcttctgggagagttttctgtcctgtaacagctcttgctctttagaaaaatgtatagggcaaaggtttat

SEQ ID NO: 82240 - DNA, 120 bp, synthetic construct
  source 1..120: mol_type = other DNA
acattcttggcagttctggccttggtttattgtgccaataaaagtaagctcatgaagctatttctatcatgtctttacaggcatgtacaggtgagcccagtttgggagtcacaaaacttc

SEQ ID NO: 82241 - DNA, 120 bp, synthetic construct
  source 1..120: mol_type = other DNA
ttgctaggggatttgtttgttcattttgctgcaatagatttctgtctctcgtcatattctgttcaagtacctaaaatgattgctcacttattcgaagcacactaatgaaataatactcag

SEQ ID NO: 82242 - DNA, 120 bp, synthetic construct
  source 1..120: mol_type = other DNA
agcttggcttttagcaattgagagtaaacaaacacctgctgagtttactcttccttgcctgtctttctaagccatcactctgaagacctaaaaagcagacatgactcatacacaccttca

SEQ ID NO: 82243 - DNA, 120 bp, synthetic construct
  source 1..120: mol_type = other DNA
atcgatttagcctaggaagtcaaggtcagtaagctgcgatcatgccaatgcactccagcctgggtgacagagagagactctgtctcaaaataaaaataaaaccacaaaacttatctcagt

SEQ ID NO: 82244 - DNA, 120 bp, synthetic construct
  source 1..120: mol_type = other DNA
atggtggcccacatcgggaataggagtagagcaagatgttaccaggaagagggccttacttctcttctctctcttctcgctgcttttttgtttgtttgtttgtttgtttgtttgttttgt

SEQ ID NO: 82245 - DNA, 120 bp, synthetic construct
  source 1..120: mol_type = other DNA
aatttgagtttgttaacttttttttttttttttaacagtcttgctctgtcacccaggctggagtgcagtggtgcaagcttggctcactgcaatctccacctcctgggcttaagcaattct

SEQ ID NO: 82246 - DNA, 120 bp, synthetic construct
  source 1..120: mol_type = other DNA
tcctgagtagttgggactacagcactcacaactgtgcctgacccttctcttaattttaactcctgagtgattttcttctctggaccccaaggagtcatgatatctctaaattatatcctg

SEQ ID NO: 82247 - DNA, 120 bp, synthetic construct
  source 1..120: mol_type = other DNA
tggcccagaaaatattattgttatttaatatgacctgccataactaccattaaaagtagtacaggtgtgcaaaagaaacttatctggctatggctgggcgcggtgctcacgcctgtaatc

SEQ ID NO: 82248 - DNA, 120 bp, synthetic construct
  source 1..120: mol_type = other DNA
gctttgttgctgaaaatcacctctccaaacatagagttcaggttggggcaaataaaaaattgcataaaacaaaaaggctaagaaatggtacaaaaaactcagagaaccactacttcacgt

SEQ ID NO: 82249 - DNA, 120 bp, synthetic construct
  source 1..120: mol_type = other DNA
cacgaggtcaggagatcgagatcatcctggctaacacgacgaaaccccgtctacttaaaaaaaaatacaaaaattagccgagggtggtggcgggcgcctgaaatcccagctactcaggag

SEQ ID NO: 82250 - DNA, 120 bp, synthetic construct
  source 1..120: mol_type = other DNA
aaaaaaaaaaagagagatttctttaagctctttgcctagggtcacaggtctttccacaggaccgtagactagagtcagatgtgttcctcaatcaattaggaaagggtggtgctggaattt

SEQ ID NO: 82251 - DNA, 120 bp, synthetic construct
  source 1..120: mol_type = other DNA
atgtatattcttgtatcatcctacagctaggcaaaaatattaggataatgtggcctaacctccagttctatgttggctggaaaatccaggaatgggaagctcactcccgtagttcccact

SEQ ID NO: 82252 - DNA, 120 bp, synthetic construct
  source 1..120: mol_type = other DNA
tcatgcctgcaatcccagcactttgggaggacgaggcgggtggatcacgaggtcaggaaatcgagcccatcctgaccaatatggtgaaacctcgtctctactaaaatacaaaaaattagc

SEQ ID NO: 82253 - DNA, 120 bp, synthetic construct
  source 1..120: mol_type = other DNA
cttaataattttatctttcaatttgtgtcttataatgaagtccgatgagaaagcagaacatgggctagagacttttggagcctggctcaagcgaggtcctgctccccatgcctcccagcc

SEQ ID NO: 82254 - DNA, 120 bp, synthetic construct
  source 1..120: mol_type = other DNA
tggcctgacattgatcaatttgtgcctttaggtaacatataactgtaatataactgcaatacaactagaatataactcataaaggcaagaatcttgtctgccttgctgaaagttttataa

SEQ ID NO: 82255 - DNA, 120 bp, synthetic construct
  source 1..120: mol_type = other DNA
atgtgtcactctgaatatattactgtgtacatggtctgtcattggacatggtgagagatgcagattaagctgaaattactgaggacagcaacactggaagaaaattgagctgggtgtagt

SEQ ID NO: 82256 - DNA, 120 bp, synthetic construct
  source 1..120: mol_type = other DNA
ttcaggaaatttgaggcagttgagggcatgaaagtaaataagctgagctcatcagaggccttgtattgtggtggttaaaagagccagttctaggactagaaagcctggcttgaaatccca

SEQ ID NO: 82257 - DNA, 120 bp, synthetic construct
  source 1..120: mol_type = other DNA
tgtaattaattttaagtggccacatgcagggagtgactgctgcattggacagcacggctctaaattgagccttttttccttatttggtgaggcatacttgccttaagattgggaagtcta

SEQ ID NO: 82258 - DNA, 120 bp, synthetic construct
  source 1..120: mol_type = other DNA
cttttcagcagtaaggggacatgcaccccaagggcctccacttggcctgaccttgctgcgggggctctctgtccccaggaacagtagagatggcaagcttatcaagaccctctctgccca

SEQ ID NO: 82259 - DNA, 120 bp, synthetic construct
  source 1..120: mol_type = other DNA
aattataatatcttgtcatgtttgagactttgctctgcataatcaggcaccagtaggtttttataaaggaacccggctgtcacgtgcagaggagaaataaacagaaagtttcccatcctc

SEQ ID NO: 82260 - DNA, 120 bp, synthetic construct
  source 1..120: mol_type = other DNA
aaggaagaagaagaagaagaacaattgcaatcctccctggctctagaatgtcatttaaaagtcgagtgtcttcttccttccctgttttgaagcagcccttctcatgacaggcttgcttgc

SEQ ID NO: 82261 - DNA, 120 bp, synthetic construct
  source 1..120: mol_type = other DNA
gtttggaggccttctataaggtattattgagtgataagagcaagctgctgtaggatacaaaaacaaaaacaaaaccctagggcatggtggtttgcctcgcagctactcaggaggctgaga

SEQ ID NO: 82262 - DNA, 120 bp, synthetic construct
  source 1..120: mol_type = other DNA
tggagaatattttttgctctatcgcaggatgattaagatgtggacaaggtgaagccgatggagggggagctttgaaagttacttgctatttaattgaggaactaaactgctttgagagcc

SEQ ID NO: 82263 - DNA, 120 bp, synthetic construct
  source 1..120: mol_type = other DNA
ctcctgttcccacctcttcgtctgcatgcctaagaaactgttttacaagtaaataagggacgctttgtctaggctttggagccaggaagttgagacaaatttaggaatgagatgaagtaa

SEQ ID NO: 82264 - DNA, 120 bp, synthetic construct
  source 1..120: mol_type = other DNA
gtactttgggagcccaaggagggcgaatcatgaggtcaagagattgagaccatcctagctaacatggtgaaaccccatttctactacaaatacaaaaacaaaattagcctggcgtggtgg

SEQ ID NO: 82265 - DNA, 120 bp, synthetic construct
  source 1..120: mol_type = other DNA
tgcattttcccctagggaacacaatgatagacaggagccttagtctacagcttgaaggattgtaattatacctaagcaaccctcctggaccagtttaatgttattagctgtgatgtatcc

SEQ ID NO: 82266 - DNA, 120 bp, synthetic construct
  source 1..120: mol_type = other DNA
gctcaagcaatcttcctgccttggcctcccaaagtggtgggattacaggggagagccaccacacctagccagaagaatgttttaaatacaccaaataaaacatttataccaaaatacagt

SEQ ID NO: 82267 - DNA, 120 bp, synthetic construct
  source 1..120: mol_type = other DNA
taaaaagtcccttgagggacttcagatgtaagtcccttagctgctcgttaaaactcccccagcctgacccaatacacaatcttgactttaaaccacttgtcattctaaatcactagcatt

SEQ ID NO: 82268 - DNA, 120 bp, synthetic construct
  source 1..120: mol_type = other DNA
gatcaacaacaaagtcctttctctcaccttgaattcatcccagatgcctgcttgtttacttcttccacacaaaaaaaggccttcagccctcatggctgagcagaaagaatctgaatgtta

SEQ ID NO: 82269 - DNA, 120 bp, synthetic construct
  source 1..120: mol_type = other DNA
ataacaaagactcaggataaaagatcctttttgagtgccctactaaatccatttccatttgtttctctttcagagaatctccaccggacttttggtaagttccggcatgtctaggccctc

SEQ ID NO: 82270 - DNA, 120 bp, synthetic construct
  source 1..120: mol_type = other DNA
agaggaggaatagtatctttgttttggaggacttgactatgaaaggtcttaactcctttttgtaccatgaatctctctggcactccagtgaagtctaaaggacccctttgcagaatgttt

SEQ ID NO: 82271 - DNA, 120 bp, synthetic construct
  source 1..120: mol_type = other DNA
aattaagtcacaggtactgctcatattgtggttagttgtaaaatgttttggtttgttttgttttttccaagacttgggggaatgggtgttggtgggatcaacaagagtcttgctctgtgg

SEQ ID NO: 82272 - DNA, 120 bp, synthetic construct
  source 1..120: mol_type = other DNA
tgtgggtcactccaaatgtccatagggaggatgtggggaaggtgctattcatcttccactaatcacatatttgtttctttttgttttcagggcaattccttgaagagctacgtaagttct

SEQ ID NO: 82273 - DNA, 120 bp, synthetic construct
  source 1..120: mol_type = other DNA
aaaattacagtatggtaactttgcaaatggtggttgtttcttccaagactccagccctgattgcgcaaaactgaaaggcatgtgaagggaaggaagaggaagagtgcaaaacattgaaga

SEQ ID NO: 82274 - DNA, 120 bp, synthetic construct
  source 1..120: mol_type = other DNA
aaaggccatttatttatgtttcaagatgctcactgcctcctttgttttgtctcctttgcaggccttctctcttaggcctcttctcctgggggtatggatcctggggggagattgatcacc

SEQ ID NO: 82275 - DNA, 120 bp, synthetic construct
  source 1..120: mol_type = other DNA
tccgaaacaacttcccacactgactgcagctgttagtcagcttgggattgtgaacaaactggtggctatagaggtaggagcgcctgctgaaacatttgccacaggtgtagcaaaaaaagg

SEQ ID NO: 82276 - DNA, 120 bp, synthetic construct
  source 1..120: mol_type = other DNA
aaactcccatagacaatccacagacacccacataataatgcatcatgaacactgggccacttgagggtgaaaagaggtgttattaataatcaagctgggatgagaagtataaaccaggac

SEQ ID NO: 82277 - DNA, 120 bp, synthetic construct
  source 1..120: mol_type = other DNA
tagcctttgtttaagaaccataacctgggacatgtagatgcggaaaggagacattaaaaggccagctgctagcaaagtacctggttctcaggagtgacttagtaaatatttgtttgatga

SEQ ID NO: 82278 - DNA, 120 bp, synthetic construct
  source 1..120: mol_type = other DNA
tgtgggggagaggaaagaggatatgcagatatgcagaatataaacaggaaagcaaagcgaaggaaaaaatgctgccactctaacaaatttcaggaagtactccatgaaggatgccaggat

SEQ ID NO: 82279 - DNA, 120 bp, synthetic construct
  source 1..120: mol_type = other DNA
gttaatgttagactcagtaccattggaaatcatgtagctggggtaaccaggctaggatctgtcacagatcacctcgagtgagtctctttattctttctgacttggtttcatcagaaatgt

SEQ ID NO: 82280 - DNA, 120 bp, synthetic construct
  source 1..120: mol_type = other DNA
tatcattattatgtatgtatagaaaaagaaaaccatagtgtatacagggtttggtactattcatggtttcaaagtatccactggggtggggcgcggtggatcacttcagggcaggaattt

SEQ ID NO: 82281 - DNA, 120 bp, synthetic construct
  source 1..120: mol_type = other DNA
ggcggatcacctgaggtcaggagtttgagaccagcctgaccaacatggacctcgtctctactaaaaatacaaaattatcccggcgtggtggcgcatgcctgtaatcgtagctactaggga

SEQ ID NO: 82282 - DNA, 120 bp, synthetic construct
  source 1..120: mol_type = other DNA
tgttagcacccactgaatgcgcttatgtgctcagaaacggtcccattggttgggactaccttccccgatgcccatccgcccagaatcttccttctgggatgccgactttttcaacacgtg

SEQ ID NO: 82283 - DNA, 120 bp, synthetic construct
  source 1..120: mol_type = other DNA
ctattaaaaatacaaaagttagccggtggtggtgacgcacacctgtaatcccagctacttgggagacattgccgttactgggcaagtgttctttcaagagcatcttatctgaattactat

SEQ ID NO: 82284 - DNA, 120 bp, synthetic construct
  source 1..120: mol_type = other DNA
acaggcgtgagccaccgcgcccggctagaaaagatttctttcttttttcttttttttttttaattatactgtaagttttagggtacatatgcacaacatgccggttagttacatatgtat

SEQ ID NO: 82285 - DNA, 120 bp, synthetic construct
  source 1..120: mol_type = other DNA
tgaatgtgaaaggagggaaattaacaatagctattggcagagccaaacaaatcattacactttagctggatcatctgggagttgagaccttgagggtataaggaggtagcatgtcaatgc

SEQ ID NO: 82286 - DNA, 120 bp, synthetic construct
  source 1..120: mol_type = other DNA
tgtagagaagttctaatgggatacattcatttgcagtagtcccccaaggtactgtgataggcagaattctaaagatgctttccccctcaagattgcttcccctggttattcagtcaaata

SEQ ID NO: 82287 - DNA, 120 bp, synthetic construct
  source 1..120: mol_type = other DNA
ttctgatcgcttgtaaaactgacacagctataattatcatccatgttaaaaacaccatcccagttagaaacctgtgagcctctccccaagcagaacccatttatcctacacaggtgtcat

SEQ ID NO: 82288 - DNA, 120 bp, synthetic construct
  source 1..120: mol_type = other DNA
ttgggaggccgaggcagatggattacctgaggtggggggtttgagaccagcctgaccaatatggagaaatcctctctctactaaaaatacaaaattagccgggcatggtggtgcattcct

SEQ ID NO: 82289 - DNA, 120 bp, synthetic construct
  source 1..120: mol_type = other DNA
tctctgaggttccaatcttttctccctcttcccagccccttgataggaaaccctgggaaaactaaaaagtatactgttttttctttaactccctattcctttcctcttctgagggttgtt

SEQ ID NO: 82290 - DNA, 120 bp, synthetic construct
  source 1..120: mol_type = other DNA
tgtgagccaccatgcccagccaggtttcattagttcttttaacttcctttttctgtcacaggatttcatcgaggatatcacattgtatttagtcctaatcatgtctccttaaggctcctc

SEQ ID NO: 82291 - DNA, 120 bp, synthetic construct
  source 1..120: mol_type = other DNA
gtaaataggtaagaattccacaaaactcaatgtactgaaggttcattttactctctaaaggaggaagaacagtcgtcttgatgggtgtgtttaaggggcaatgattgtgatggagtctca

SEQ ID NO: 82292 - DNA, 120 bp, synthetic construct
  source 1..120: mol_type = other DNA
ggcttcccaaagtgctaggattacaggcgtgagccaccgcgcccggcctctgtaccattttctccactttgaggcagagtctctctctgtcgcccaggctggagtgcagtggcgggatct

SEQ ID NO: 82293 - DNA, 120 bp, synthetic construct
  source 1..120: mol_type = other DNA
tgggaaaccaaacattgtatgttctcactgatatgtagaagctgagttatgaagacacaaaggcatatgaatgatgcaatggactttggggacttgagaggaagaataggagggggcaag

SEQ ID NO: 82294 - DNA, 120 bp, synthetic construct
  source 1..120: mol_type = other DNA
ctcagcctcccaaagcgctgggattagtcgtgagccacctcgcccggcctagtcccttctttcaaatttcatcaccactctttgcttgtttttctttttttcttttcttttctttttttt

SEQ ID NO: 82295 - DNA, 120 bp, synthetic construct
  source 1..120: mol_type = other DNA
ccacccaccttagcctcccaaagtactgggattacaggcgtgacccaccgtgcccggcctgaaaaatccactgttagactgatggaatttcctatataggtttttaggacactttttctc

SEQ ID NO: 82296 - DNA, 120 bp, synthetic construct
  source 1..120: mol_type = other DNA
taggatctattgctagaaagttagtgtaatgttttggggatgtcataacactcttttttcagagtatgttttcaaaacattctactgttttcaacagagaaacaaaggacttacttaaaa

SEQ ID NO: 82297 - DNA, 120 bp, synthetic construct
  source 1..120: mol_type = other DNA
tctctatctccaactgcaatgtagttgagactcattaaagatgtcttctcctcagctcaccatttaaatgtctttggtgcagagcatcctccctcaaccccaaacacatagcttttcttt

SEQ ID NO: 82298 - DNA, 120 bp, synthetic construct
  source 1..120: mol_type = other DNA
gcaagttggttgtctggtgtgatgccctccagaagttcccaaatcgccatgcacatcagtgtttggctttgtgagggcagaggagctctccgacagttcagatactggtggtcttcctta

SEQ ID NO: 82299 - DNA, 120 bp, synthetic construct
  source 1..120: mol_type = other DNA
acctcatgatccgcccgccttggcctcccaaaatgctgggattacaggcatgaaccaccgcacccagccaaatgatttttaaaaaataattactatgtataaaataacaaataggtaatt

SEQ ID NO: 82300 - DNA, 120 bp, synthetic construct
  source 1..120: mol_type = other DNA
tccctccaacctttgataaccattaacctgttttctgtccccatagatctgctttttccagaatggtatatgaattgagtcagataaaatgaagccttttgtgtctgacatttttttcac

SEQ ID NO: 82301 - DNA, 120 bp, synthetic construct
  source 1..120: mol_type = other DNA
gggattacaggtgtaagccacctcatctggcctgacaatagctcatttcttatgatccatatggttataccacagtttgcttagtcttgcatggctgaaagatatcttggttgtttacag

SEQ ID NO: 82302 - DNA, 120 bp, synthetic construct
  source 1..120: mol_type = other DNA
catattatctttacaagtcctttgtcacatctataacttccagttttttgacaagtattttcttccagtctgtgccttgtcttcttttcattcacttaccagtgtttttgtaaagcaaaa

SEQ ID NO: 82303 - DNA, 120 bp, synthetic construct
  source 1..120: mol_type = other DNA
ctgttgaacacagtgactgtaaatgtcagatcaagacggttgatagtgttgttcatttgtatttttaaaaaactaagaaaaagctgggcgcggtggctcacgcctgtaatcccagcactt

SEQ ID NO: 82304 - DNA, 120 bp, synthetic construct
  source 1..120: mol_type = other DNA
cctgatctacacacacacacacacatgcacacacaacttctaacagggcccttctcgtttttctctcccccctggttccttccactctcccccttctcttatgatccatttcatctccct

SEQ ID NO: 82305 - DNA, 120 bp, synthetic construct
  source 1..120: mol_type = other DNA
cctgggttgactgccctgggcacacctgactcttgatggggttgccaaaatgtagcttggcatttacaaaaattctttccaaagattgcatcaaagtccaaaagaattatgtacaatttc

SEQ ID NO: 82306 - DNA, 120 bp, synthetic construct
  source 1..120: mol_type = other DNA
aacaatggcaaatggagagaaagagcagagagacagacagagatagatacacacgtacacacacacatagagaaaatgaatatccatccatccatccatccatctatccatccatccatc

SEQ ID NO: 82307 - DNA, 120 bp, synthetic construct
  source 1..120: mol_type = other DNA
tcctcactgactttactcatgtcctactggaaaaggatggatttctagaaatgtcccaatggcttggaacactcaatttctctgtgtgcactgcaagcaaactgacagtttgacttttca

SEQ ID NO: 82308 - DNA, 120 bp, synthetic construct
  source 1..120: mol_type = other DNA
ggcacacatatgaccagacctccccctgggtcctgctcccattcctctgtccatcgctcttgctctgtctgccctaggggaaatttcctgaaggaaacaggaaaaggaacctctattcct

SEQ ID NO: 82309 - DNA, 120 bp, synthetic construct
  source 1..120: mol_type = other DNA
taatttgaagtcaaaccacagggacaaaatgtttttagatgtctccaaattcctcacttccctcctctaaattcaggtgggtcacttcatactttctcccaaccgcaggttcccaatagg

SEQ ID NO: 82310 - DNA, 120 bp, synthetic construct
  source 1..120: mol_type = other DNA
ttagcaaacacccaacaagaaaagcacttattttcttttccttatacagtacaagaaagagtaattgggatctcattcactttcagccaccatttgccctagatgtccttcactcaaaac

SEQ ID NO: 82311 - DNA, 120 bp, synthetic construct
  source 1..120: mol_type = other DNA
acttctggaatcatctttttggtcatggtggctactgctgtactgtccttctgaggtcagtgagatagggtgttcacagcctcacttgaaaggaaacaagagacttgtcaggttgatgga

SEQ ID NO: 82312 - DNA, 120 bp, synthetic construct
  source 1..120: mol_type = other DNA
ggagtcagcatcctaaagtaaaaggagagactttaacagaaatacctgagcttttcaatgagaatgaacagggccttttaccctctggcaactgtgtatttcccattgacatgtttcttg

SEQ ID NO: 82313 - DNA, 120 bp, synthetic construct
  source 1..120: mol_type = other DNA
tgatagctgatgacatcattttaaaagtcacagtactacagagatgtttggacactcatcagaggcagacctgctgtgggaaagtcaaggccttggtgcggaaacctaagattctgcaaa

SEQ ID NO: 82314 - DNA, 120 bp, synthetic construct
  source 1..120: mol_type = other DNA
tgacatctgtgatgagaaagcaagaattgatgagcagggggctgagggtgtttaactcaatacaaagtcatgatcccattctcaattcctaaacgtcaaccaagtttcagattcagatcc

SEQ ID NO: 82315 - DNA, 120 bp, synthetic construct
  source 1..120: mol_type = other DNA
atctgaagaacctggcatcctatagaatggtaaatcagcttatttcatcaacaacatcatgttgactaggatggatgagtaggagatgggaagtatgctgaaggccttggcaaaacacgt

SEQ ID NO: 82316 - DNA, 120 bp, synthetic construct
  source 1..120: mol_type = other DNA
gaatgtccaactcattagcatttgaggccaatgatgtgcctcagtggggctatatttctttaggtgactaaagcaacactcgctgctaagtgattagttgagccacttccattctggaag

SEQ ID NO: 82317 - DNA, 120 bp, synthetic construct
  source 1..120: mol_type = other DNA
ccccttgtcccattgtaagtgttagtggaattgtccagcaaccaatcctgagggaatttgatttccaagggcccagaaacctcaggaaggaagatttgaaccatgctcccagataatctc

SEQ ID NO: 82318 - DNA, 120 bp, synthetic construct
  source 1..120: mol_type = other DNA
tgccacagtgtatgggatacaagtaaagaacaggaagttattaacagagtctgagtaaaaagtgcctggtgtaattctgcggccaagacagtgactttgaactcttacaggctgatgcaa

SEQ ID NO: 82319 - DNA, 120 bp, synthetic construct
  source 1..120: mol_type = other DNA
aactcattaaagagaacattgttattaaaggtatttgcaagaaaaacttagagatactatagtatctcctttctctgtctcaaacttttttcccctcaatacccaaggctctgtgatgtc

SEQ ID NO: 82320 - DNA, 120 bp, synthetic construct
  source 1..120: mol_type = other DNA
agctctctgcctgactccatctccaaaagtgctgggattacaggcatgagccaccaccacacccaacctaaattaattataaaatattaaacatgtcatttggttttaagaggtaagagg

SEQ ID NO: 82321 - DNA, 120 bp, synthetic construct
  source 1..120: mol_type = other DNA
tctctgcccggccgctccgtctgagaagtgaggaaaccctctgcctggcaaccgccccgtctgagaagtgaggagcccctccgtctggcaaccaccccgtctgggaagtgaggagcgtct

SEQ ID NO: 82322 - DNA, 120 bp, synthetic construct
  source 1..120: mol_type = other DNA
aaaataaaaaaaaaaaaaaaaaaaaaaaaaaaaaaaagaaagacccaagccttgctaggctgattctatcatcccccccatgatagacgtgtaaccttggtcattcacctgaccccagtt

SEQ ID NO: 82323 - DNA, 120 bp, synthetic construct
  source 1..120: mol_type = other DNA
ctgcacttcaccgtggataacagagggagaccatgtctctaaaaataaataaataaatacaataaatgggtgttgtttaaagccagtgtttgtggtaatttgttatgcagtcatacaaaa

SEQ ID NO: 82324 - DNA, 120 bp, synthetic construct
  source 1..120: mol_type = other DNA
aacttaggagctctgagagttgtacaactgtaatgcatttagacacatttatatatcaaggggccaaagtaacagtttttacacataagattcctgattggtcgggcgcggtggctcatg

SEQ ID NO: 82325 - DNA, 120 bp, synthetic construct
  source 1..120: mol_type = other DNA
gggagtccaggtatggaatgggaggcagaaagttcaatcaagggactgggatttcggaatgaataatgaagggagatggactgggtccatgccgaaggtttctccctggtttctcagccc

SEQ ID NO: 82326 - DNA, 120 bp, synthetic construct
  source 1..120: mol_type = other DNA
tccctcagagtctccggatccgaaatctaccccgaggcagcgggacccgcccagaccctccacccgggagagtcccaggcgcctttacccaggttcattttcagtttaggccaaaatccc

SEQ ID NO: 82327 - DNA, 120 bp, synthetic construct
  source 1..120: mol_type = other DNA
attctcaggttggtcacatgggtgctgctggggtttcccatgaggagtgcaaagtgcctgaattttctgactcttctcagatcctccaaaggcacacgttgcccaccaccccatctctga

SEQ ID NO: 82328 - DNA, 120 bp, synthetic construct
  source 1..120: mol_type = other DNA
atctgctttcttcatatttcttgatcctgccctggatctacagttacacttttctggaaacttctctgggatcaaagactaggggtttgctctaggaccttatggccctgcctcctttct

SEQ ID NO: 82329 - DNA, 120 bp, synthetic construct
  source 1..120: mol_type = other DNA
cttgttggctttaacatccacagtgaacacaagtaggctgttgttttctatcttcttcacagcctactcagtggtcagcggaaacttgatgataacatggtggtcaagcttatttctcct

SEQ ID NO: 82330 - DNA, 120 bp, synthetic construct
  source 1..120: mol_type = other DNA
catattatttcccctgatgcctttaacttttttcctctaactgctatgcctcctaaggacctatgtagctctgggttaaacatttggcagcaatgtttacaggaggagctgtgaccgcac

SEQ ID NO: 82331 - DNA, 120 bp, synthetic construct
  source 1..120: mol_type = other DNA
accttctatcactgctagtgaagtgccaaaaagaagtgcaaggtcatctgcccttgtaggaaccacacaggaaggcagagtgtccaccaatgtcaaattccatcaaagaaataatatttt

SEQ ID NO: 82332 - DNA, 120 bp, synthetic construct
  source 1..120: mol_type = other DNA
aatggttcaaggaactcaacttaggagttcaacctataaatcttttagaagaaaacattgaagaaaatcttaggaacattggatgtggcaatggcttcttggctggtgagcaaaagcaca

SEQ ID NO: 82333 - DNA, 120 bp, synthetic construct
  source 1..120: mol_type = other DNA
gggcagctttggtttaatgggtccagtttctgttgggatgatgaaaatgttctggaaatgcatattggtggtggttacacaacattgtaaatgtgctttaggccaccgaattgtacactg

SEQ ID NO: 82334 - DNA, 120 bp, synthetic construct
  source 1..120: mol_type = other DNA
tgcaacactcaagagtccaaagaccatacaacctggagttctgatgtccaagggcaggaaaagtgtcccagattgagagagagagagagagaaaatttgactcctttctgcttttttgtt

SEQ ID NO: 82335 - DNA, 120 bp, synthetic construct
  source 1..120: mol_type = other DNA
cttatctgagatgggatgcagcttgtaaaagtgtgtcaactttttaaatttaaaaatttttttagatggagtctcattctgtcacccaggctggagtacagtggcagtgatctcggctca

SEQ ID NO: 82336 - DNA, 120 bp, synthetic construct
  source 1..120: mol_type = other DNA
aggacagctccagggaccaacagtcacactgagtccaggaaggttcaacaatacaatagcagtgatatttttgaggggagacctaggtggtatttcttctgtgtattttattttttttaa

SEQ ID NO: 82337 - DNA, 120 bp, synthetic construct
  source 1..120: mol_type = other DNA
gaggtgtatggtgttcctagagctattgttagttcctctgctgtgaactccaccccgggcatacaaaaattatatactcactggtaagcaggatcctttttaggaaagcaaatgactttc

SEQ ID NO: 82338 - DNA, 120 bp, synthetic construct
  source 1..120: mol_type = other DNA
taggaaaaacaaaggaagaattaaacaccaaaaatatacatgttactactagcttttataggactactatatatagtactatatatatatgcacacacacacacacacacacacacatat

SEQ ID NO: 82339 - DNA, 120 bp, synthetic construct
  source 1..120: mol_type = other DNA
ctggtctctttgtaaaatttctacctttttattgatgttctctatttggggaaacctgcaaccaccatcttctgaagctctgcccatgtcaagaggtctgtgcatacctctctcttccat

SEQ ID NO: 82340 - DNA, 120 bp, synthetic construct
  source 1..120: mol_type = other DNA
tttgggacacaaatgcatgcatttctattggtatataacaaaaagtggaattgctgggtcataggtgattagaaacttggtttagtctctcaaaaaacaagtttctactgaatagataac

SEQ ID NO: 82341 - DNA, 120 bp, synthetic construct
  source 1..120: mol_type = other DNA
ctctccagaagtggagatgacaccattcctcctctaacatggtccaatctcgtgcttgttctgctttacaggaaagttgactcatactggtgtccagtgaagaaacccaggcgcataaga

SEQ ID NO: 82342 - DNA, 120 bp, synthetic construct
  source 1..120: mol_type = other DNA
caccaacacatgaatgaagaaaatgtggtatatatcgacaacggaatatcattcagccttaagaaggaaacctggtcacaggctgcaacagggataaacctgaaggacactgctaagtaa

SEQ ID NO: 82343 - DNA, 120 bp, synthetic construct
  source 1..120: mol_type = other DNA
gagatggctgaactaaacataatcactatataaatatactgggaagagtgaaagagaacaagtactcttaactgttgcatccaccattgcgctgtgcaacaatgggtgcatctgaaaaaa

SEQ ID NO: 82344 - DNA, 120 bp, synthetic construct
  source 1..120: mol_type = other DNA
tgaactgataatgggagatgctgatacttgctttactcatcctcattcccagttcatttattcttcattaattcagtccaatctccccaggggtcacttaaccccagaagcagactgatc

SEQ ID NO: 82345 - DNA, 120 bp, synthetic construct
  source 1..120: mol_type = other DNA
ggctcacgcgctctggaaaaaagagagaaaccaataaatgctcccctgggtgcagagtgctgctttttattccctgaggagttctccctcctcagtcactcccaaatcagatttaccctt

SEQ ID NO: 82346 - DNA, 120 bp, synthetic construct
  source 1..120: mol_type = other DNA
atctttattggacatcaacattgaaagcaggaattttgagaaattagcatgtgattttcacaacctttttctggccaatgccccagtgacctacaaggaaacctttactgcccacaggga

SEQ ID NO: 82347 - DNA, 120 bp, synthetic construct
  source 1..120: mol_type = other DNA
actgccccgttttctcacctggactctgcagctgatgttgtcttcttcttgcaccaaaggacacagagaatactactactactactaatactaataataatgacagtagcaatagcagca

SEQ ID NO: 82348 - DNA, 120 bp, synthetic construct
  source 1..120: mol_type = other DNA
aatttcagatatcaccatagcttttgcatgtagtctgcctgcacagggcaatagtgtgtcttggtctgcatggcattttcctcccagaaatttgtgacattcatagccaaagtctgagtt

SEQ ID NO: 82349 - DNA, 120 bp, synthetic construct
  source 1..120: mol_type = other DNA
gaggcaggaaatgcacacgggcaaagggacaagaatgaggatttcagacgcaaggaaaactgggaaggtgggaggatagaggaggggactgaggaacagaagaagggggaatggggatgg

SEQ ID NO: 82350 - DNA, 120 bp, synthetic construct
  source 1..120: mol_type = other DNA
gacattcaactaatacaaaagtaggcaaaggacttgcatagccaattccccaaacaagatgtacaaatggccaacagacacatgaaaagacgctcagcatcagcagtcattagggaaatg

SEQ ID NO: 82351 - DNA, 120 bp, synthetic construct
  source 1..120: mol_type = other DNA
aacattagcactagggctccccttgggtggtctagaggggagtgggacggagggaagaccctgggacaaaaggcggcaccagagagttagggtcagggagagttgggagtgggaggcata

SEQ ID NO: 82352 - DNA, 120 bp, synthetic construct
  source 1..120: mol_type = other DNA
agtgcggatcaggaacagcaggactaggctcatctccatggcccagactttgctttcctcgcagtggctcaagcggctgccaacccagcggagccgcgaaggcccaccagaaatttcctg

SEQ ID NO: 82353 - DNA, 120 bp, synthetic construct
  source 1..120: mol_type = other DNA
tcaagtactcaaagctcctccaaccctattttgatcccacagccactactttagtctcggctttcagcctagatcactgcacaagattcagcctagatcactgtacaggcttcctaaaca

SEQ ID NO: 82354 - DNA, 120 bp, synthetic construct
  source 1..120: mol_type = other DNA
tagacttcagggagtaggtgaatgctatgaatcccaggcagtgggggttcatgaagaggatgttggacagggaccagacaacatagtcagacacggaggtctcgctgcagatatggatca

SEQ ID NO: 82355 - DNA, 120 bp, synthetic construct
  source 1..120: mol_type = other DNA
atccacattcactgattatttattttgatcatcataatctattgcgcacagcagggactggggtcctgtccccaccttagggggattatttacactcctaaagattacaagagtagtgag

SEQ ID NO: 82356 - DNA, 120 bp, synthetic construct
  source 1..120: mol_type = other DNA
gggccgcccacggattccaggatccgaaaacgcttccagctgctccgccaccccaggaaggcagcgcctgcctctgggcggttctgacggaaactggctcctccgcctgcaggaaaactc

SEQ ID NO: 82357 - DNA, 120 bp, synthetic construct
  source 1..120: mol_type = other DNA
tgcatagctcgttgtgttttggctgttgtacacacccacatctccactaccacaatgaagatgtagaacatttccatcggactccaaagagctgctatgcaatacaattttatagggtca

SEQ ID NO: 82358 - DNA, 120 bp, synthetic construct
  source 1..120: mol_type = other DNA
ctctgaaatgttggaattttatattacagtattaacttggatttggcttggcccggtggtttgtacctgtaatttcagctctggaaggtgaggcagaattgcttgagaccaggagttcga

SEQ ID NO: 82359 - DNA, 120 bp, synthetic construct
  source 1..120: mol_type = other DNA
gatgagttcaaactaggaggacactaagacgtgtcttttgcaaggtagactccttatctcgcactctgtctggttttctaagtccatcctaatgaaacacaaaaaccaagagccaaattc

SEQ ID NO: 82360 - DNA, 120 bp, synthetic construct
  source 1..120: mol_type = other DNA
gcagtgcacagtgaggccatttctggggaagaaatgtagactctccttgggggaggttttatacttagttactgactttgcattcgttgacttcatctttgaacatcttacagttacgta

SEQ ID NO: 82361 - DNA, 120 bp, synthetic construct
  source 1..120: mol_type = other DNA
gcttagagctacttcctgctatggtccttggacttgtgatgtgcaagaagttctcaggtatgggagggactagaatgatggctttgccccatctcacatgtagggatcccgctgctcttg

SEQ ID NO: 82362 - DNA, 120 bp, synthetic construct
  source 1..120: mol_type = other DNA
ctaactcctgaaatagacaggatggagccaccgtctcattcctcacttatcccatggtcctgcctcaaatacagtctcctcctgcaggctctgctgggtctttttattatcattctccag

SEQ ID NO: 82363 - DNA, 120 bp, synthetic construct
  source 1..120: mol_type = other DNA
tccactttatctggcatatttttatatgttgatctgatcctcctcataagggatgtatatgagcattattttgtaggagagccgctatgtcccacagtggccatgctctgtccctgacac

SEQ ID NO: 82364 - DNA, 120 bp, synthetic construct
  source 1..120: mol_type = other DNA
gtgtagggggcaggatggaagagagtggatgatggctctgtgaggagatggaagctgagaataatgcacttgcttacagtgttcacattcttcatggaatttacttaaatacactagcat

SEQ ID NO: 82365 - DNA, 120 bp, synthetic construct
  source 1..120: mol_type = other DNA
catttatcttcttaaagcagggggaaggggatgagtctttcaagttcccatggacccatggacatcatgagatcaacctaattgccctcattccattttcctttactttgcagaaaagaa

SEQ ID NO: 82366 - DNA, 120 bp, synthetic construct
  source 1..120: mol_type = other DNA
taggctgtgagatacacaggcaaatgttatattgaagcctttgtttctcttacactgaggtaacactactgcagcagagcaaaccttattgtatcagtgcaccaaccccaagttcatgtt

SEQ ID NO: 82367 - DNA, 120 bp, synthetic construct
  source 1..120: mol_type = other DNA
aggcaatagcctcctttaatttggcaacagcttttcgttatcatctccactttccaaggcaggaaaagtgtaggcaacagctccgagagatcctggaagaggaaacaccatggcaggtga

SEQ ID NO: 82368 - DNA, 120 bp, synthetic construct
  source 1..120: mol_type = other DNA
tatgacactagtactagcctcaagctctgttggattagcgagcctcactccacacctcctgaactagaaccaaagctctgtgcacacaccattcatgtgagtctgtagagatctcagctt

SEQ ID NO: 82369 - DNA, 120 bp, synthetic construct
  source 1..120: mol_type = other DNA
ctcagggtcacgagtgaatcctctaagacccctcctccctcagacactccatccagtcatcagaaggtccacacagcactaagacccaaccacctcactgtcttcacctccatggagaga

SEQ ID NO: 82370 - DNA, 120 bp, synthetic construct
  source 1..120: mol_type = other DNA
aggattggatgtgctttaggcaccagagagaagtctctaggatctaagggtgctcccaaaaaggaagtgggaagctcagttctatctgcaggaagtgaattcagacaagaacctgaataa

SEQ ID NO: 82371 - DNA, 120 bp, synthetic construct
  source 1..120: mol_type = other DNA
cagcctcctcctggcctgggtgactcttacataccttctctctgtcctcacacatccaatcttccttccccattcttacttccgctgatgatcttgcttcctacttcactgagaaaactg

SEQ ID NO: 82372 - DNA, 120 bp, synthetic construct
  source 1..120: mol_type = other DNA
tatcaagggtgatccatgaaaatgaccaaaactggaaatttgaaataagctttcccactgcctgtcaggccaagaggatgccatctaggttagcgggggacaaagaaagtccatagagaa

SEQ ID NO: 82373 - DNA, 120 bp, synthetic construct
  source 1..120: mol_type = other DNA
acatggggtaaacccactactggggtgagtccatatagactggaaaaaatgatgcccaactctcaacaaggtagatatgacctagttatcctggaacatgtagaggatgcaataacaagg

SEQ ID NO: 82374 - DNA, 120 bp, synthetic construct
  source 1..120: mol_type = other DNA
aaacctctgaaactgcccccatcctggccaaatcaaaaatcatagtgtgtcccagcgtgggtcttgtgaaggacactgcaagtattgtgggggtcacaccaccattacaaagctgaagga

SEQ ID NO: 82375 - DNA, 120 bp, synthetic construct
  source 1..120: mol_type = other DNA
tgcattttgcatccttactgcaaaaaaagaaagcacactctccggtgagcctcttggagttctgacgacagcacattccacatgtagaaatgttgctttggcccacactctaggtgacat

SEQ ID NO: 82376 - DNA, 120 bp, synthetic construct
  source 1..120: mol_type = other DNA
gcaaaactcagtgtcatcctggaggaagcactctgaggggtgggggccgtttttcaggacatggtgcattgtttgaatcagagacatctctacggtgctgtgttctcaataggaagaata

SEQ ID NO: 82377 - DNA, 120 bp, synthetic construct
  source 1..120: mol_type = other DNA
cctgcctccgttgctatatctctgacaggtgtgtcccctaataaaatcctgtaactttaatcccatgatggcacttggaatgcaaaatcattttcatctgcacaccagtgacctcttact

SEQ ID NO: 82378 - DNA, 120 bp, synthetic construct
  source 1..120: mol_type = other DNA
ctccagcctgggcgacagagcaagactccgtcaaaaaaaaaatctgctataattctgcagccaaggcagttgctattaactcttaattccttcaactcagtgttttcagaacacatcaac

SEQ ID NO: 82379 - DNA, 120 bp, synthetic construct
  source 1..120: mol_type = other DNA
aaccagtgatggaatagcaaatatgaatggaaaacacaacaggattgctcaaaaaaacttgaaagcacaaaattgcagtgccatttagaatcatagtggtgtccaaatcacttctatcgt

SEQ ID NO: 82380 - DNA, 120 bp, synthetic construct
  source 1..120: mol_type = other DNA
atcttcaacaaacctgatgaaaacaagcaacagggaaatgattccatatttaataaatgatgttgggaaaacgggctagccatttgcagaaaactgaaactggaccccttccttacatct

SEQ ID NO: 82381 - DNA, 120 bp, synthetic construct
  source 1..120: mol_type = other DNA
agctcattcatgctaggcttaatacctaggtgctgggttgataagtgtagcaaaacaccatggcacacgtttacctatgtaacaaatctgcacatcctgcatatgtaccctgaaacttaa

SEQ ID NO: 82382 - DNA, 120 bp, synthetic construct
  source 1..120: mol_type = other DNA
gccagaagcactcagggaaaccttgctcctggattcctgaccattggaaactgcggtagatgatgtttgttgttttgcgctgctaagttttatgtaatttgttatgcaatagtaaataac

SEQ ID NO: 82383 - DNA, 120 bp, synthetic construct
  source 1..120: mol_type = other DNA
aaactcagtcttaacgactgtcagaaactgaattctgccgcctctatatatgcttgaaggaggattcaaaatgaaaacacagctttgggaagccctgaatagagaccccgtctacatcat

SEQ ID NO: 82384 - DNA, 120 bp, synthetic construct
  source 1..120: mol_type = other DNA
ccctaatactgcacttttcctatggtcttagcaaacggcacaccgagagattatatcccatgcctggctcgcagggtcctacacccacagagcctcgctcattgccagcacagcagtctg

SEQ ID NO: 82385 - DNA, 120 bp, synthetic construct
  source 1..120: mol_type = other DNA
ctaactagaataaccaatgcagagaagtccttaaaggacctgatggagctgaaaactacggcacgagaactaagtgatgaatgcacaagcttcagtagctgattcgatcaactggaagaa

SEQ ID NO: 82386 - DNA, 120 bp, synthetic construct
  source 1..120: mol_type = other DNA
tatatatgcacccaatacaggagcacccagattcataaagcaagtccgtagagacatataaagagacttagactcccacacaatagtaatgggaaactttaacaccccactgtcaacatc

SEQ ID NO: 82387 - DNA, 120 bp, synthetic construct
  source 1..120: mol_type = other DNA
aatactataaacacctctatgcaaataaactagaaaatctagaagaaatggataaattcctcgacgcatacaccctcccaagactaaaccaggaagaagttgaatctctgaatataccaa

SEQ ID NO: 82388 - DNA, 120 bp, synthetic construct
  source 1..120: mol_type = other DNA
ccaacttacaagggatgtgaaggacctcttcaaggagaactacaaacctgctcaatgaaataaaagaggatataaacaaatggaagaacattccacgttcatggataggaagaatccata

SEQ ID NO: 82389 - DNA, 120 bp, synthetic construct
  source 1..120: mol_type = other DNA
ataaaaagtgggcaaaggatatgaacaggcacttctcaaaagaagacatttatgcagccaacagacacatgaaaaaatgctcatcatcactggccatcagagaaatgcaaatcaaaacca

SEQ ID NO: 82390 - DNA, 120 bp, synthetic construct
  source 1..120: mol_type = other DNA
ccaggatgccatgaaaatggacttggctaaaaataggtcatttaacccttggctgactggcatctctctagattttcagttatacaatgttcaatctgctgtgcaaggtaattccatctt

SEQ ID NO: 82391 - DNA, 120 bp, synthetic construct
  source 1..120: mol_type = other DNA
agagttactgttgcatatcctttctctgtttcaaactgttttctcctaagcacccaaggctctgtgatgtctgaaacagttaatcattaattttaaaagataagcttatcgtggaattag

SEQ ID NO: 82392 - DNA, 120 bp, synthetic construct
  source 1..120: mol_type = other DNA
accagatgctggcgaggttgtggagaaataggaaggcttttacactgttgctggaaatgtaaattggttgaaccattgtggaagacagtttggtgattcctcaaagatttagaaccagaa

SEQ ID NO: 82393 - DNA, 120 bp, synthetic construct
  source 1..120: mol_type = other DNA
ccatgtgaagaaggacgtgtttgcctccacttctgccatgattgtaagtttcatggggcagccttctcagcaatgcagaactatgagtcaattaaacctctttcctttataaattaccca

SEQ ID NO: 82394 - DNA, 120 bp, synthetic construct
  source 1..120: mol_type = other DNA
aggctgatcttcaacatctggagtcaacaaatctgccttcctctgccttccacggtgctagaatcacaggtgtgagccaccacacctggcctaaattaattataagacattacacatgta

SEQ ID NO: 82395 - DNA, 120 bp, synthetic construct
  source 1..120: mol_type = other DNA
tttcattcattcagtcaagaaaaattaatttaatccctacaatgaaccaggtgtgccctcatatgcttacgtgcctgacattccagaagcttcacaagaccaaggtggagccagtggaat

SEQ ID NO: 82396 - DNA, 120 bp, synthetic construct
  source 1..120: mol_type = other DNA
gtgatttttcttctagaagagtccacggggacaggtaaggagtaggaggcagggagtccagttctgggacggggattccgtgatgcaaagtgaagagagagggacggggcccattccgag

SEQ ID NO: 82397 - DNA, 120 bp, synthetic construct
  source 1..120: mol_type = other DNA
gggccggaatattgggaagaggagacagggaccgccaaggccaaagcacagttttaccgagtgaacctgcggaccctgagcggctactacaaccagagtgaggcctgtgagtgacaccgg

SEQ ID NO: 82398 - DNA, 120 bp, synthetic construct
  source 1..120: mol_type = other DNA
aggagacatttaaatgagagtccatggaaatatacattatggctgcccccagggatgtttgaatagtatgtgtccagatacaagcaggtgagaagaggaggaggcagggctgctatcaca

SEQ ID NO: 82399 - DNA, 120 bp, synthetic construct
  source 1..120: mol_type = other DNA
gtctttctctgtccttccttccttctttcctcctttcctccctcagagctttctccctccctccatttttttcataaactccaagtgtttaggccaaaaggaagcattatttgaacttta

SEQ ID NO: 82400 - DNA, 120 bp, synthetic construct
  source 1..120: mol_type = other DNA
ttctttctttctttctttctttctttctttctttctttctttcttttcgagatggagtctccctcttgttgcccaggctggagtgcagtggcatgatctcagttcactgcaacctccgcc

SEQ ID NO: 82401 - DNA, 120 bp, synthetic construct
  source 1..120: mol_type = other DNA
gatgcccactgaatagccagttattgaaaaatcttgttcctagattggagtaaacaatttctgcctaccctagccaaacaaattattgtcatgatgctaagctagtgtatagacagaggt

SEQ ID NO: 82402 - DNA, 120 bp, synthetic construct
  source 1..120: mol_type = other DNA
gaaacttctcctggattcctgaccatggataactgtgggagatgataaatatttgttgatttgagctgctaagttgtaggtgacttgttatgcagcagtagataactaatacagcttcac

SEQ ID NO: 82403 - DNA, 120 bp, synthetic construct
  source 1..120: mol_type = other DNA
cattcaacaaaaattaacttagtgcctactatgtggcagatatacttttatattctgtagatacaactttgatcaaagcaacccaaagcccctgtgcttgtgccttccattctagaggct

SEQ ID NO: 82404 - DNA, 120 bp, synthetic construct
  source 1..120: mol_type = other DNA
atgtctcaataaaatatacacatagcttagatgtgaataattcataataataggcaagtgcatgggccggccattatagctcatgcctgtaataccagcattttgggaggctgaggcggg

SEQ ID NO: 82405 - DNA, 120 bp, synthetic construct
  source 1..120: mol_type = other DNA
aacataccctacgatggcgccagttacctcgtcctaaaccaggaactgctctcttggaccgcagcggaaaaggcggctcagatgttttggaggaggaacatgcagagctgctcaaaacct

SEQ ID NO: 82406 - DNA, 120 bp, synthetic construct
  source 1..120: mol_type = other DNA
gagaagcagaggtacacatgccatgtgcagcacgaggggttgcctgagcccctcacactaagatggggtaaggagacgaatgaggggtcatgtctcttctcaggcaaagcagaagtcctt

SEQ ID NO: 82407 - DNA, 120 bp, synthetic construct
  source 1..120: mol_type = other DNA
ggcttgtaaaagtgacaccttagagggcctgaagtgaaagaggagttgggcagaggggacacaactaagctctggagattctttgatttggaatttttcaaggtgtggtgggctgttcag

SEQ ID NO: 82408 - DNA, 120 bp, synthetic construct
  source 1..120: mol_type = other DNA
tcttcctatggactagatgtcccagtcttgccttccctttgataatgcagtaagggaccccattttatgacacaggacaggcaagaagacaaccagcttgatgggatctacatcatgtgc

SEQ ID NO: 82409 - DNA, 120 bp, synthetic construct
  source 1..120: mol_type = other DNA
tgttatgcattggcaaataacttggaggcattgttccccctccctagggatctgtagaactttgaacttgagagtgatgtataagggtatctggtggaagaaatttctaagcagcatagc

SEQ ID NO: 82410 - DNA, 120 bp, synthetic construct
  source 1..120: mol_type = other DNA
atataaatatttatccccagatacctcatgttaaaatctgatccccaatgttggacttagggcctaatgggtggcgtttgggtcttgggggccaatcttttatgaacagagagatactgc

SEQ ID NO: 82411 - DNA, 120 bp, synthetic construct
  source 1..120: mol_type = other DNA
gtcttttccagttctagaagtgacattaggtttggctgctgtgctggcctagactgcatgcagcaatagtattctaccatgtcttctcttaatctactcttgatcatagacagtaggtta

SEQ ID NO: 82412 - DNA, 120 bp, synthetic construct
  source 1..120: mol_type = other DNA
attagtctggcttgccagctatgaatgatcaaagcttcccactacagaatctgtcacagagctgcctctgtctgttttcttgaccaaaagtcaaaacagacagtatgagaaatgagataa

SEQ ID NO: 82413 - DNA, 120 bp, synthetic construct
  source 1..120: mol_type = other DNA
atgcttgctgaagaaagactgaatgcttttctcctaagatggagatcaatgcaaggatgtccaatccaacacttctacttaacattgtactggagattgcagctggtgcaataaggcaaa

SEQ ID NO: 82414 - DNA, 120 bp, synthetic construct
  source 1..120: mol_type = other DNA
gctccaaaagacaatattgagaaaatgagaagacaagccgtagattgagagaaaatatttcacaatttatcacaaattacatctgtgatgaagaacatgtatccagaatatgtgaaaagt

SEQ ID NO: 82415 - DNA, 120 bp, synthetic construct
  source 1..120: mol_type = other DNA
ggacgcagaggaactgggacactcttatattgctggtagggatgtattttaaaatggtacagccgctctggaaatgagtattgtagttttcttcaaaccgaacatgcaatttaccttatg

SEQ ID NO: 82416 - DNA, 120 bp, synthetic construct
  source 1..120: mol_type = other DNA
accactctgccgtatttggttaatatctctttatatacataaaaggagagtgtgaaatgatggaccatggagacccagaagggtaagggggttggcagttggtgtataatagaggggttt

SEQ ID NO: 82417 - DNA, 120 bp, synthetic construct
  source 1..120: mol_type = other DNA
tttactcatcctcaatcccagctcacttattcttcattaattcaatccaatctccccagcagtcacttcaccccagaagctgactgacctctactcttcgtaatcaggaaaccacaaagc

SEQ ID NO: 82418 - DNA, 120 bp, synthetic construct
  source 1..120: mol_type = other DNA
aagagagaaaccaataaatgctcccctgggtgcagagtgctgctttttattccctgaggagttctccctcctcagtcactcccaaatcagatttaccctttctctgacggaagatgacgt

SEQ ID NO: 82419 - DNA, 120 bp, synthetic construct
  source 1..120: mol_type = other DNA
atacttaaagcaggaattttgagaaactaacatgtaattttcatgcctttttctggccaatgtcccagtgacctacgagaaaacctttcctgcctacagggaaccagaactgacaatccc

SEQ ID NO: 82420 - DNA, 120 bp, synthetic construct
  source 1..120: mol_type = other DNA
aagtggacagaggatggccatgtgcactcaggactctccctgttacaaggggacctcaaaggggctgtacacatgggggccctcattctgggcctcgtgggtctttttcttgatgtcctc

SEQ ID NO: 82421 - DNA, 120 bp, synthetic construct
  source 1..120: mol_type = other DNA
actagggaataaattgttgaaactctccctggtgtgcctgcattccagacacccaatattgcaaaaccgtcactaacactctcacttttgctgttctctgggtctcagagtccattcttt

SEQ ID NO: 82422 - DNA, 120 bp, synthetic construct
  source 1..120: mol_type = other DNA
aggtgtgtcccctccaaggtaaaagacaaactgtttcatcttgcatcctcaccagaaggaaggaagcacactgcctgatgagcctctttgagttctgatgacaccacattccacatttag

SEQ ID NO: 82423 - DNA, 120 bp, synthetic construct
  source 1..120: mol_type = other DNA
aacaagtgactacatttagctacttccatcctggaagggccagaggttcatcttcacagaaataggcccatattccatgggtgggttttcctgtcttgctctgacactcagccagcacca

SEQ ID NO: 82424 - DNA, 120 bp, synthetic construct
  source 1..120: mol_type = other DNA
atttagcctgagaggatttgatttccaagaacccagacccatctgggcagcaggtttgagtcacactcctgggtaatctcccaaggccctgctcctgtgctctgacatcctcagtagcat

SEQ ID NO: 82425 - DNA, 120 bp, synthetic construct
  source 1..120: mol_type = other DNA
tcttctctatttccattcaacctctcgccttccctcctttttactctgctttccttcccttttcttccccttccccttccttcttttcttctttcactccttcttctcttcctccttctt

SEQ ID NO: 82426 - DNA, 120 bp, synthetic construct
  source 1..120: mol_type = other DNA
ggcacaatcactttggaaatcatattattattatctagtatggttaaaggccatataacatatcatccaatcatcccactcctaatcatacactctgcgggctttcttgcctatgtgccc

SEQ ID NO: 82427 - DNA, 120 bp, synthetic construct
  source 1..120: mol_type = other DNA
gaggaccacgaggccatgaaaacggctttggctacaaataggtcatttgatccttggctcactggcatctctgtagattttcatgtatacaatcttcaatctgatgtgcaaggtaattcc

SEQ ID NO: 82428 - DNA, 120 bp, synthetic construct
  source 1..120: mol_type = other DNA
aactcattgaagagaacattgctgttattaaagatattggcaagaaaaactcagagatactgttgtatctcctttctctgcctcaaactgttttcccctcaacacctaaggctctgtgat

SEQ ID NO: 82429 - DNA, 120 bp, synthetic construct
  source 1..120: mol_type = other DNA
tattaaaagtcaagaaacaacagatgctggcaaggttgcagagaaataggaaggcttttacactgttggtggaaatgtaaattggttcaaccattgtggaagacagtgtggcaattcctc

SEQ ID NO: 82430 - DNA, 120 bp, synthetic construct
  source 1..120: mol_type = other DNA
taattccctctcttaagtgtggcttggacttaatgatgcacttctgatatggcctgtctctgtgttcccacccaaatctcattttgaattgtcatgcgaattctaatccccacatattgg

SEQ ID NO: 82431 - DNA, 120 bp, synthetic construct
  source 1..120: mol_type = other DNA
tcaggaaaaccgctcctggattcctgaccattagaaactgtgggagatgatgaatatttgttgttttgagctgctaagttttacataatttgttacacaatagtaaataactaatacatt

SEQ ID NO: 82432 - DNA, 120 bp, synthetic construct
  source 1..120: mol_type = other DNA
ataaggggtttcctccactgtgggctttgaaaatgaaggggctgtgtaggaaaggacgctggtgggcaccatgcattgagtgcagccctccctgttctctacagtgacagccagtgagga

SEQ ID NO: 82433 - DNA, 120 bp, synthetic construct
  source 1..120: mol_type = other DNA
atgagagggacggagggaagggctggaggagcaggaggtgaggaaaaggagcagaggaaagaattccaaagcagcagaactcttaggtttaaacacattgttttatagattttaatacat

SEQ ID NO: 82434 - DNA, 120 bp, synthetic construct
  source 1..120: mol_type = other DNA
aagcgtggctctcagggtctcaggccccacaggcggtgtatgggttggggaggccccgcgttggggattctctcctccttctcctaacctgtgtcgggtccttcttcctggatactcacc

SEQ ID NO: 82435 - DNA, 120 bp, synthetic construct
  source 1..120: mol_type = other DNA
acactgcggctcagatctccaagcgcaagtgtgaggcggccaatgtggctgaacaaaggagagcctacctggagggcacgtgcgtggagtggctccacagatacctggagaacgggaagg

SEQ ID NO: 82436 - DNA, 120 bp, synthetic construct
  source 1..120: mol_type = other DNA
tctggagaggagcagagatacacgtgccatgtgcagcatgaggggctgccggagcccctcatgctgagatggagtaaggagggagatggaggcatcatgtctgttagggaaagcaggagc

SEQ ID NO: 82437 - DNA, 120 bp, synthetic construct
  source 1..120: mol_type = other DNA
gctctaatgtgtctctcacggcttgtaaatgtgacaccccggggggcctgatgtgtgtgggttgttgaggggaacaggggacatagctgtgctatgaggtttctttgacttcaatgtatt

SEQ ID NO: 82438 - DNA, 120 bp, synthetic construct
  source 1..120: mol_type = other DNA
caggtctctttcaattgtattttccatctttttttttttttttttttttagatggagcctcactcaggctggagtgcagtggtgcaatctcaactcattgcaacctccacctcccgggtt

SEQ ID NO: 82439 - DNA, 120 bp, synthetic construct
  source 1..120: mol_type = other DNA
atgcaagcttgtccaacctgcagctctcgggatgcatgtggcccaggacagctttagaatgtgacgatttttttgcttatctgtagtggcagatatcatgaaaattatccatgcattttt

SEQ ID NO: 82440 - DNA, 120 bp, synthetic construct
  source 1..120: mol_type = other DNA
ctatcctacttccaccacccctgtgtctcagagccagagcattgattctcccctgtgctgtctgcacaggtaggtgaaagtcagggaagttatggtctgctgttggttataataagtcac

SEQ ID NO: 82441 - DNA, 120 bp, synthetic construct
  source 1..120: mol_type = other DNA
cattttgagatatactaaaccaagggtttggaaggattaactgaatgcagaaataaaggaagaaaatagatttgtttaaaagatggttagaatctttaaagaaacaacatctttttaaag

SEQ ID NO: 82442 - DNA, 120 bp, synthetic construct
  source 1..120: mol_type = other DNA
tagctctgtgcatttagtgcttaggcttttaacctggggtccgcgaacccactttcccatgacactgcgtgcagaagtgatgttacatgcacacatgacttcattacaggacattggata

SEQ ID NO: 82443 - DNA, 120 bp, synthetic construct
  source 1..120: mol_type = other DNA
agatgccaacttcacattcaacatctttcaattattttctttactttgtctaagcagagaatttaaacttgtttctgaagcagaaaaccagggactggttatttgagctatcaccccact

SEQ ID NO: 82444 - DNA, 120 bp, synthetic construct
  source 1..120: mol_type = other DNA
ttaatatccagactacatacagaactacaacttaacaatagcaaaacaatctcattcaaaaatgggtaaaagacatgaatagacaattctccagagaagatacacagtaaggacataaaa

SEQ ID NO: 82445 - DNA, 120 bp, synthetic construct
  source 1..120: mol_type = other DNA
gtatgtgtgttttaccacaattttaaaaatatatatcaacaccaaatccaatcacttctcactcctctgccacctccaccccagaaccatcctcactaggatagaaaaccggaagggcct

SEQ ID NO: 82446 - DNA, 120 bp, synthetic construct
  source 1..120: mol_type = other DNA
agagacagagagagacagagagacagagacagagagaaattttacttctatctacctttctgttctatctgggccactaggtgattggactgtggctgcccacagtgagagagcatcttc

SEQ ID NO: 82447 - DNA, 120 bp, synthetic construct
  source 1..120: mol_type = other DNA
gtgagccgagatcatgccactgcactccagcccctgggggacagagtgagactccatcttaaaaaaaaccccaaaacttatgaatgcaactttctacaatgaaagcatatataaaaatat

SEQ ID NO: 82448 - DNA, 120 bp, synthetic construct
  source 1..120: mol_type = other DNA
acctgagagagtgagatggattcttttcttccacagatgaaaatctgagtccctgagaacctagggttttggtatgggttcactgaaaatgttggccttgagaattaggaaacagcttcc

SEQ ID NO: 82449 - DNA, 120 bp, synthetic construct
  source 1..120: mol_type = other DNA
gaccctgtcgccacaaatccacttctttctctatcgacttgcctcttatgaatatttcacaaaaatgggctcataagttacgtagcctcctgtgactggcttccttcacttgtcttgttt

SEQ ID NO: 82450 - DNA, 120 bp, synthetic construct
  source 1..120: mol_type = other DNA
tttattgatgttctctatttgagttaagatagttcttctgatttcctttagttttttgcccatagtttcctttagctctgtgaacatatttaagcagtcaattcaaagttgtttgtccag

SEQ ID NO: 82451 - DNA, 120 bp, synthetic construct
  source 1..120: mol_type = other DNA
tacaggcacatgccataatgcccagttaatttttgtattttttgtagaaatggagtttcaccatgttgtctaggctggtctcaaactcctgaactcaagaaatgcacccagctgagcttc

SEQ ID NO: 82452 - DNA, 120 bp, synthetic construct
  source 1..120: mol_type = other DNA
gccactatgttctctgatgtcactcctcagccacctttgaattgtgcttatgcatcagaattcctgatctgctaagtacttccaggaaactcattcaaatggtaaacatcattaagcacc

SEQ ID NO: 82453 - DNA, 120 bp, synthetic construct
  source 1..120: mol_type = other DNA
tgactcattccagttacctgcaccaccctgactcattctgatcacctgtttcactctctttaaattagccaatctgaattagtttagcctgtgcggtctaaccctagccaataggggaat

SEQ ID NO: 82454 - DNA, 120 bp, synthetic construct
  source 1..120: mol_type = other DNA
gaagactgagactacaactctttgccatccgtaatgaatgaacagatctagccactgaacagcaatgacaattttcatcaccaaagggaaataaccagtattaaactcttccccttgttg

SEQ ID NO: 82455 - DNA, 120 bp, synthetic construct
  source 1..120: mol_type = other DNA
ccagaacaaccggcagccccaggacccctggcaaggctgtctcattactgagtgtgcattcagctccacgtcgctggagacaatgtccacagtttattttttgagtcctggatgaacctg

SEQ ID NO: 82456 - DNA, 120 bp, synthetic construct
  source 1..120: mol_type = other DNA
aaaataacccatgataagccaatgtttataatgtactaacaccactgagccagtgtttataatgtactgacacactccaagtgtgggcacagctgcagacatgccttgtctcttgggtca

SEQ ID NO: 82457 - DNA, 120 bp, synthetic construct
  source 1..120: mol_type = other DNA
tgtgcttactatgaaaaagagatgcagaaaactgtgagacaaaaagagagatccttgctaccccagctattatccatgaaccagcagaaccagcatctcatgaaactggacagaaaggct

SEQ ID NO: 82458 - DNA, 120 bp, synthetic construct
  source 1..120: mol_type = other DNA
tcccagcgccccctcctcctgtcgctgctgcagtgcctgtgtgtgggtcctgaggggttttggggaggtagaatatttttatttatttaaataaattaaaaaataagaaaaaaatacaaa

SEQ ID NO: 82459 - DNA, 120 bp, synthetic construct
  source 1..120: mol_type = other DNA
tatttttcactaattcagtccacatctcctagaagcagactgacccctacccttcataatcaggaaaccccagagcactttttatcccctccagaatataacacttcagctctgcatcat

SEQ ID NO: 82460 - DNA, 120 bp, synthetic construct
  source 1..120: mol_type = other DNA
tgcaggctcatgtgctctggagaaaagagaaaaaatagtaagtgctcccctgggtgcacagtgctgctttttactccctgacgacttctccctcctcagtcagtcccaaatcagattcac

SEQ ID NO: 82461 - DNA, 120 bp, synthetic construct
  source 1..120: mol_type = other DNA
accgtcctggagagggagctccacatttgagttcctgtttcatttgatatgggttacaacattagtattggtggaaatccttttaagacccagctgaaactacgaacatctttattggac

SEQ ID NO: 82462 - DNA, 120 bp, synthetic construct
  source 1..120: mol_type = other DNA
ctaggggagctcacatattcttggaaccagaaagcaatgtcccagcatgttcattgcagcagtgtctttaataaagactatgtagaggtcaatgaagtggggaagagataaattgtagca

SEQ ID NO: 82463 - DNA, 120 bp, synthetic construct
  source 1..120: mol_type = other DNA
aattgagcaaaataaaaaggagtcgttgagtgtgaggaaagctacagagaagtaaagacaggtggagacatgacaatactgagcatgttagtgaccttcacagtaactgacttcctggag

SEQ ID NO: 82464 - DNA, 120 bp, synthetic construct
  source 1..120: mol_type = other DNA
tcctgacagccgtcagatcaatggctgctggaggcatggaagctgagttgaagggagaaaaagggatctttatgtacattgatagtggcaagagtaatatgctgtattggtcaaaattca

SEQ ID NO: 82465 - DNA, 120 bp, synthetic construct
  source 1..120: mol_type = other DNA
ctaagaatcaatttaccccaggaagtaaaacaaaaactataaggcactgatgaaggaaattgaagagtacacaaaactggaagagccaggcgcagtggcacatacctgtaatcctggcac

SEQ ID NO: 82466 - DNA, 120 bp, synthetic construct
  source 1..120: mol_type = other DNA
tagacaagtgggactatattaaactaaatagcttcagcacagcaaatgaaacaatcaacagaatgaagaggcaacctgttgaatagagaaaatatttgctatgtattcatccagcaagga

SEQ ID NO: 82467 - DNA, 120 bp, synthetic construct
  source 1..120: mol_type = other DNA
gtttgatagcacagcagactgactaaagttaacaaaaatgtatatttcaaaatagctataagagtggatttggctgggcgtggtggctcatgcctgtgatcccagcactttgggaggccg

SEQ ID NO: 82468 - DNA, 120 bp, synthetic construct
  source 1..120: mol_type = other DNA
ttttttagaacatccattgtcaaagacgatccagactgttacaagaggaattgtgttcctacgccaccaaaatccacatgttgaagccctatgttgagaaggcagaagaagtggccatct

SEQ ID NO: 82469 - DNA, 120 bp, synthetic construct
  source 1..120: mol_type = other DNA
ttactgggctggggcatggagacagaggctgccactgattctcttaactccagcttctattaccagtcactaagctgaaagcaggaaagtttatcttctgcacttggtccatcagaacta

SEQ ID NO: 82470 - DNA, 120 bp, synthetic construct
  source 1..120: mol_type = other DNA
atagctcaagatgctcttctggatttctgcctcttcctggttcctggccaagcaaatcttcactgctttgctagcccatctataaattcaaccagacttttcaaatatgtattttcctcc

SEQ ID NO: 82471 - DNA, 120 bp, synthetic construct
  source 1..120: mol_type = other DNA
tgcagtgagccgagatggtgccactgcactccagcatgggcaacgagagcaaaactccatctaaaaaaaaaaaaaaaaaaaacaccaacagcgataatatcatacactgtcatggtgcta

SEQ ID NO: 82472 - DNA, 120 bp, synthetic construct
  source 1..120: mol_type = other DNA
caactcctgctgctctatgagccctgaccttggggagacctgggctagtgaggagaggatcaagatgaactgggctggggaggcaggaggtaaagggcggcctggagagctcagcagctc

SEQ ID NO: 82473 - DNA, 120 bp, synthetic construct
  source 1..120: mol_type = other DNA
actgattccccctttataatccatgccataaacttcattgtcttattttaagaaattgccacagcagcctttagcaaccaccctcttgaacagccggtagtcatcaacattgaggcaaga

SEQ ID NO: 82474 - DNA, 120 bp, synthetic construct
  source 1..120: mol_type = other DNA
gggattcccctcttgtctcttagtgctagggttatgcatgactcgtgcttgaattacagtgtgtacacagctgaaagtcttaattattagaatataagaggcccaaactactgctgttac

SEQ ID NO: 82475 - DNA, 120 bp, synthetic construct
  source 1..120: mol_type = other DNA
cctaaaacccctaggctgtcatcagattagagccccatttgcctcactgtaaccattccctgtgggccccaggctgttcttctcaatcctgagtcttgtagctcctggttcactgtcacc

SEQ ID NO: 82476 - DNA, 120 bp, synthetic construct
  source 1..120: mol_type = other DNA
cacagatactatcattttatcatatgctgtgatgtaatatcagtggaccactcatcgcatatgtgcttgctttccacgcttggagtctaccctgtagtacatcaattccaacaatcgttc

SEQ ID NO: 82477 - DNA, 120 bp, synthetic construct
  source 1..120: mol_type = other DNA
ctcttgaagtctgaaatctattgccacatttgctctgagactatgcccacccctggctttttccagccaatgattgaggaaagtagggcagaaactaaggcaggacatttctcttctgaa

SEQ ID NO: 82478 - DNA, 120 bp, synthetic construct
  source 1..120: mol_type = other DNA
tttggcttgaagacactttctcagggcatggatttatcaaacactccaggactttgataagtggaataaacccactgctgggatgtatccacatagtctagaaaaaaacatgcccaactc

SEQ ID NO: 82479 - DNA, 120 bp, synthetic construct
  source 1..120: mol_type = other DNA
tgacattgatgcccagatgcccacagcactatcatgtctcccatcacagtggggcttacggaggtcagggagtaaacctggacacattacagcccacaatggaactactggttccataga

SEQ ID NO: 82480 - DNA, 120 bp, synthetic construct
  source 1..120: mol_type = other DNA
ggtggatcacctgaggttgggagttggagactagcctaaccaacacggagagaccccgtctctactaaaaatgcaaaattatccaggcatggtggcgcatgccagtaatcccagctactc

SEQ ID NO: 82481 - DNA, 120 bp, synthetic construct
  source 1..120: mol_type = other DNA
taacaagttgactacatttagctacttccatcctggaagggccagaggttcatcttcacagggataggcttctattccatgggtgttttcatgtcctgctctcagaaactcagccagcac

SEQ ID NO: 82482 - DNA, 120 bp, synthetic construct
  source 1..120: mol_type = other DNA
ccttacctcattgtaagtgtgaacagaatcatccagcaattcagcctgagacagcttgatttccaaggacccagacccatcagggcagaaggtttgagtaatgctgggtaatctcccaag

SEQ ID NO: 82483 - DNA, 120 bp, synthetic construct
  source 1..120: mol_type = other DNA
gtttcttttctcctttgttccttctgttttttgtttttttttttttttgagatggagtctcactctctcgcccaggctaaagtgcagtggctcaatctcagctcactgcaagctctgcct

SEQ ID NO: 82484 - DNA, 120 bp, synthetic construct
  source 1..120: mol_type = other DNA
ttatggcaaaaactggaatcagccacatgtacatcaataggaaactggtgaaattgtggtaaaacgatatgtaagccttcagcagtaaaaatgaatgaatgacagcctcccacaccacag

SEQ ID NO: 82485 - DNA, 120 bp, synthetic construct
  source 1..120: mol_type = other DNA
tcggcagctcctttaagcactccagtttctggcattaagttcaggtgttcctgagatgctttacatatttcttcttttaattttaaatccttatgttaagctcctacagtgggccatatc

SEQ ID NO: 82486 - DNA, 120 bp, synthetic construct
  source 1..120: mol_type = other DNA
taatgataggttcagttgcatttgtggggttccatattctctgtctctccctttctgcttttgcaactgctgttttagggagagattcattctttccactatggcttgtacttgagaatt

SEQ ID NO: 82487 - DNA, 120 bp, synthetic construct
  source 1..120: mol_type = other DNA
cattctcagcaccttcaattggtttaagtttattttagggagaatccaattagttaatttgaaaaactgaaacagcttcattttaggaaaatgattatccagaatacccacaaagtcagc

SEQ ID NO: 82488 - DNA, 120 bp, synthetic construct
  source 1..120: mol_type = other DNA
tgaattgatggctcttaagtcagttaacattctccatttacctgattttttcttaattaaaaaaaactggagaattccaaggggaaaatattggagctatgtgcccattttctaattgtt

SEQ ID NO: 82489 - DNA, 120 bp, synthetic construct
  source 1..120: mol_type = other DNA
aatggggcccgggacgggcccctcatggtgtttcctgagaatgagttcccttgtttatcaaacttagagtgacattgactagcccaatgttttccttttttacattttggacatatttca

SEQ ID NO: 82490 - DNA, 120 bp, synthetic construct
  source 1..120: mol_type = other DNA
ccttatgggaaacaaagggatgggccgaattaaaggaataagttgggctagttaattgcagcaggaacacacccttaagacagagatcactcatgctattgtttgtggcttaagaatgcc

SEQ ID NO: 82491 - DNA, 120 bp, synthetic construct
  source 1..120: mol_type = other DNA
gcaatttgattaggcatttttttctgcacagcaaaagaaactatcatcaatcacagtgaacagacatcctacagaatgggagaaaaattttgcagtctatccatctgacaaaagtctagt

SEQ ID NO: 82492 - DNA, 120 bp, synthetic construct
  source 1..120: mol_type = other DNA
aaccaacatggcacatgtttacctatgtaacaaacctgcacatcctgcacgtgtaccctgaaacttaaaaaaaattaaattaaaaaacaagcttaaagaaaaagacaagctgaaagagtt

SEQ ID NO: 82493 - DNA, 120 bp, synthetic construct
  source 1..120: mol_type = other DNA
tgcaaccttgtgagaggccccgagcaagaagcactcagggaaacctctcctggactcctgaccattggaaactgcggcagatgaggaatatttgttgttttgagctaagttttacataat

SEQ ID NO: 82494 - DNA, 120 bp, synthetic construct
  source 1..120: mol_type = other DNA
agaccatcctggctaacacggtgaaaccctgtctctactaagaatacaaaaaaaaaaaaaaaaatagccaagcgtagtggcgggtgcctgtagtcccagctgcttgggaggctgagacag

SEQ ID NO: 82495 - DNA, 120 bp, synthetic construct
  source 1..120: mol_type = other DNA
gggacaggacggcctgaaggatgagaagaatggagggaagggttggagaagcaggaggtgaagaaaaggagcagaggaaagaattcgaaagcagcagaattcttaggtttaaatacattg

SEQ ID NO: 82496 - DNA, 120 bp, synthetic construct
  source 1..120: mol_type = other DNA
aaactccgtgggtgagttttcttctagaagagtccaggtggacagggagtccagttcagggacggagattccgggatgaaaagtgaagggagagggacagggcccatgccgagggtttct

SEQ ID NO: 82497 - DNA, 120 bp, synthetic construct
  source 1..120: mol_type = other DNA
acacacagatctgcaaggcccaggcacagactgaacgagagaacctgcggatcgcgctccgctactacaaccagagcgagggcggtgagtgaccccggcccggggcgcaggtcacgaccc

SEQ ID NO: 82498 - DNA, 120 bp, synthetic construct
  source 1..120: mol_type = other DNA
gaattttccacggaataggagattatcccaggtgcctgtgtccaggctgttgtctgggttctgtgctcccttccccaccccaggcatcctgtccattctcaagatggccacatgcgtgct

SEQ ID NO: 82499 - DNA, 120 bp, synthetic construct
  source 1..120: mol_type = other DNA
ctgcagttgcacatttctggaaacttctctggggtccgagacttggaggttcctctaggaccttatggccctggcttctttctggcatctcacaggacattttcttcccacagatagaaa

SEQ ID NO: 82500 - DNA, 120 bp, synthetic construct
  source 1..120: mol_type = other DNA
ttttcaaattcttgccatgagaggttgatgacttaattaaaggagaagattcctaaaatttgagagacaaaataaatggaacacatgagaaccttccagagtccatgtgtttcttgtgct

SEQ ID NO: 82501 - DNA, 120 bp, synthetic construct
  source 1..120: mol_type = other DNA
tgactgcttttgcatttagaaagcatcattaaggtgaaaatagaaaaatttctggcgttgtggtacatatgttctagatgctagcttgtccaacccatagctcgcaggctgaatgtggcc

SEQ ID NO: 82502 - DNA, 120 bp, synthetic construct
  source 1..120: mol_type = other DNA
tgagtgcattctttcccattccatttagaaaatggatatggaatgattcacattcacatgggatttataatacatttattgatagcttgcctcagggctactttaactcctcaaccttct

SEQ ID NO: 82503 - DNA, 120 bp, synthetic construct
  source 1..120: mol_type = other DNA
tacttattgtaaaaatcttcagtgacaatgccaaggaatagcaaatacaagactcaagacataggttccttttaggggataggattggacaacagcctagggtggcttcataggttctgt

SEQ ID NO: 82504 - DNA, 120 bp, synthetic construct
  source 1..120: mol_type = other DNA
attttaaggagccatgtgagaggaccaggatgccatgaaaaacagccttggctacaaataggtcatttgatccttggctagttggcgactctctacattttctgatacacagtgttcaat

SEQ ID NO: 82505 - DNA, 120 bp, synthetic construct
  source 1..120: mol_type = other DNA
aatgagctgttgggtacacctcccagacagggtggcggccgggcagaggggctcctcacttcccagacggggtggccaggcagaggtgccccccacctcctggacggggtggctggccgg

SEQ ID NO: 82506 - DNA, 120 bp, synthetic construct
  source 1..120: mol_type = other DNA
gatggggaggaccaaatttaggacacagagcttgtggggaccagacctgcagggtatagaaccttccagaagtgggcagctgtggtgctgtcttctagagacaagtagagatacacatgc

SEQ ID NO: 82507 - DNA, 120 bp, synthetic construct
  source 1..120: mol_type = other DNA
gccaccccaaaattcctcctttagtcacatcacctgtgggctctgaccagactttgtttttgttccaccccaaacaggaacagtacccagggctctgatgtgtctctcaagtcttgtaaa

SEQ ID NO: 82508 - DNA, 120 bp, synthetic construct
  source 1..120: mol_type = other DNA
agccataaatgtggagctgcaaatggcattaggagcccagcagttgcaccagccactgtgctctggattcaaaatatacagtcaaaggagattcttttagacctttaagttttaatgtct

SEQ ID NO: 82509 - DNA, 120 bp, synthetic construct
  source 1..120: mol_type = other DNA
tagccaccgttcttaagatatccaggatccactcagccaagagtcttctcatcagtactctaaagacacttatcactcaagagagtctaaggtttttaggagaaaccagggacaaagtct

SEQ ID NO: 82510 - DNA, 120 bp, synthetic construct
  source 1..120: mol_type = other DNA
tgaggtgaagtgtagtctttattccagcatcctctcctcttcagaagaattgtatgtatcgtcataacagcatcgtcctgatccatcaggtaaaagagaggatgctacctagtggagtta

SEQ ID NO: 82511 - DNA, 120 bp, synthetic construct
  source 1..120: mol_type = other DNA
aaatattttgaaagctctttcagacaagaagagaggagggaagactttccagcccatttacagaactggcattaccctcatatcaaagtcacagcaagactcacaggaaaagagtgccat

SEQ ID NO: 82512 - DNA, 120 bp, synthetic construct
  source 1..120: mol_type = other DNA
gagagatgcgagttggaaagctcgataatactgttaagatggcagttctcccccagtagatctataggttcaacacaatccctatcaaaatcccagcagggattttatagaaaattgaca

SEQ ID NO: 82513 - DNA, 120 bp, synthetic construct
  source 1..120: mol_type = other DNA
atttacaaaagcacaaaaacaattcaatgaaggaaggagagctttcccaacaaacggtgctggagcaactggacaaccacagtggaaaaaaaataagctgagcccaaacctcacgcttta

SEQ ID NO: 82514 - DNA, 120 bp, synthetic construct
  source 1..120: mol_type = other DNA
ttgtctttcagtgggtgaaggagatctgctggttgaactcataactgagtctacacaagtgccctttctcaagactactatcctgcttctctttgcatatctcccattttctcacaaaga

SEQ ID NO: 82515 - DNA, 120 bp, synthetic construct
  source 1..120: mol_type = other DNA
cctgaatataaacatgaaagaatatgtctataaacatatctctggctagataacctatgaaagaattccctaccccagctcccttactggttaccctgtgaacacaggcaggcagggaac

SEQ ID NO: 82516 - DNA, 120 bp, synthetic construct
  source 1..120: mol_type = other DNA
agtcagcacaatttctttttctagacaagtttctcttattctcagggctcagccatgactgtgggtgaccaaacaactattcacaaaggacagagctcacttcaatgccagcttatgaat

SEQ ID NO: 82517 - DNA, 120 bp, synthetic construct
  source 1..120: mol_type = other DNA
ctttgatgctgtgttgggatgtttttctgactgttatgtggggtatctgttttctttcatcatattacatctctttccccactcccaagtctgtcctctaaatccacacagtacaccagc

SEQ ID NO: 82518 - DNA, 120 bp, synthetic construct
  source 1..120: mol_type = other DNA
tgaggcccttggaacctgtgttgcaagatctcatggtaagtgaggaattcgacgttgttttctctttttccagcccattagcttaagtccacctgtactgagaatcccagggagcaacct

SEQ ID NO: 82519 - DNA, 120 bp, synthetic construct
  source 1..120: mol_type = other DNA
aaaaatgtttctgccgctttaggcagaacttgctttagagcactggcacagccttccgccggtcgtgtgtctgattctcttggcactgtgccttttttcacttattcttctgcaaggaag

SEQ ID NO: 82520 - DNA, 120 bp, synthetic construct
  source 1..120: mol_type = other DNA
agaagggagtggatggccccggttttgatcatctggggacaagaaggtcctgagataaaaacccatgttttggaaaacaaaactgcctgagactgaaaagtggctaaccaattcgctatc

SEQ ID NO: 82521 - DNA, 120 bp, synthetic construct
  source 1..120: mol_type = other DNA
aaggctctgaacaccactattctgtctccccaacctcctgaaccacagaaatcttcccagtgcaccccctggaatctcagtcaatgatcagcaaaacctccacaccctccctcaggatgt

SEQ ID NO: 82522 - DNA, 120 bp, synthetic construct
  source 1..120: mol_type = other DNA
ccccaggaaggaacacagacctgcccataccttgaccttagccccataagactgtgcggacttgcaacctacaggactgtaacatgataattaggtgctgtttaaagccacttggtttgt

SEQ ID NO: 82523 - DNA, 120 bp, synthetic construct
  source 1..120: mol_type = other DNA
ctcagctagagtaagcagaattgatagtggcctcaacttttgaatcctgaaacctattgccacatttgctctgagaccacacctgccccctgtcttttcctgccaatgactgaggaaagc

SEQ ID NO: 82524 - DNA, 120 bp, synthetic construct
  source 1..120: mol_type = other DNA
tgggcatgcataggaggctcacccttctctagtaatggttcccacttcctatgctggaagatgctacagaagtctcacccccatgatacagcaggaatcccactgaagagctttgcagga

SEQ ID NO: 82525 - DNA, 120 bp, synthetic construct
  source 1..120: mol_type = other DNA
aattccctcagtccttcagcaaaggaacctatagccatttactcaggagattgtacactggcgaaaggaaagatgcagaactggtcagattattgacactgagtgagagctgacattgat

SEQ ID NO: 82526 - DNA, 120 bp, synthetic construct
  source 1..120: mol_type = other DNA
ttctataggatattaaatcagctcatttcactgacaacttcatgttgactgcggtgaatgagcagcaggtagaaagtgcactggagtcattggcaaaacacacgcactccagtatgtgaa

SEQ ID NO: 82527 - DNA, 120 bp, synthetic construct
  source 1..120: mol_type = other DNA
tttctttaggtgactagccattaactaagaagttgactacatttacctacttccatcctggaaggaccagaggttcatcttcacagggttaggtacctattctaggggggtttttctgtc

SEQ ID NO: 82528 - DNA, 120 bp, synthetic construct
  source 1..120: mol_type = other DNA
aggaggcatggctactttcacacaataaaggcagaagtgtggaaaccagagatccacctgggggccttctgttttccctcaccccattgcaagtgtgagtagaattatccagcaattcag

SEQ ID NO: 82529 - DNA, 120 bp, synthetic construct
  source 1..120: mol_type = other DNA
cccaacgcctattcttttctttattttagtttcttttctcctttgttccttctttttctctttccttctgtccctccttccctctttacttccattctatctctcaccctccttctccct

SEQ ID NO: 82530 - DNA, 120 bp, synthetic construct
  source 1..120: mol_type = other DNA
tctctctctgggggatgtgactgggcagcagcccaggggagctttacaggtttgtgttttacaccagtgttgggcatctttttagttacatgattgtaatttgttaaacagagttttcaa

SEQ ID NO: 82531 - DNA, 120 bp, synthetic construct
  source 1..120: mol_type = other DNA
aacattgttattaaaggtatttacaagagaaacgcagagatactgttgtttctcctttctctgtctcaaactgttttctctgcagcacccaaggctctgtcatgtctcaaacatttaatc

SEQ ID NO: 82532 - DNA, 120 bp, synthetic construct
  source 1..120: mol_type = other DNA
tacccaaaggaatataaatcattctattataaagatatgtgcatgtgtttgttcattgcagcacaattcacaacagcaaagacatggaatcaacccaaatgcccaccaatgagggactag

SEQ ID NO: 82533 - DNA, 120 bp, synthetic construct
  source 1..120: mol_type = other DNA
gttttcttccacttctgccatgattgtaagtttcctggggtggcctcctcagccatgcagaactgggagtcagttaaacctctttcctttataaattacccagtctcaggtatttcttta

SEQ ID NO: 82534 - DNA, 120 bp, synthetic construct
  source 1..120: mol_type = other DNA
gtcaacaaatctgccttcctctgccttccacaatgctaggattgcaggtgtgagccaccaaatctggcctaaattaattaaaagatataaatatgtaacttagttttaaaaggtaaggag

SEQ ID NO: 82535 - DNA, 120 bp, synthetic construct
  source 1..120: mol_type = other DNA
aggagtttgaggctgcagtgagccatgatcatgtgactgcacttcaccctggatgacagagggagactctgtctctaaaaacaaataaatcaacaataattgggtgttgtttaaagtcaa

SEQ ID NO: 82536 - DNA, 120 bp, synthetic construct
  source 1..120: mol_type = other DNA
gcctcgctcagtgttctttgcagttggcctttaatacctaatgtaggactgcctaaaaactaatgttttttatgttaataaggtttaaaaaacacttagtgttccttctttgcagttggc

SEQ ID NO: 82537 - DNA, 120 bp, synthetic construct
  source 1..120: mol_type = other DNA
ttctagaagagttcagggaaataggtaaggagtgggaggcagggagtccagttctgggacggggattccgggatgaaaaatgaagagggacggggcccatgacgagggtttctccctggt

SEQ ID NO: 82538 - DNA, 120 bp, synthetic construct
  source 1..120: mol_type = other DNA
gagggaccggagtattgggaccggagcacacggaacatcaggcccgcgcacagactgacaagagtgaacctgcccatgccgcgccgctactaccaccagagctaggccggtgaatgaccc

SEQ ID NO: 82539 - DNA, 120 bp, synthetic construct
  source 1..120: mol_type = other DNA
cctcctgggtttccagatcctgtacaagagagtgactctgagggtctgccctgctctctgatacaattaagggatgaaatctctgaggaaatgaagggaagacaatccctggaatactga

SEQ ID NO: 82540 - DNA, 120 bp, synthetic construct
  source 1..120: mol_type = other DNA
tttctgctgtgatgtgcaggaagaagaactcaggtaaggaatggatgaggagtggggtctgagatttcttgtcccactgagggtttcaagccccagttagaagtgtgtcctgcctggtta

SEQ ID NO: 82541 - DNA, 120 bp, synthetic construct
  source 1..120: mol_type = other DNA
gaggcaagatttgttcacgccttccctttgtgacttcaaaaaccctgactctctttctgcaaaggcacctgaatgtgcctgtgttcctgtaggcataatatgaggaggtggggagaccaa

SEQ ID NO: 82542 - DNA, 120 bp, synthetic construct
  source 1..120: mol_type = other DNA
taatatccagccttctacaagaagctggtggagcagagtgttccccgactcctccaaggaagggagactccctttcatggtctgctaagtaacaggtgccttcctagacactggtgttac

SEQ ID NO: 82543 - DNA, 120 bp, synthetic construct
  source 1..120: mol_type = other DNA
gccctggtgagaaaagatctggtggcactgatgtcagtgtgagatgatgttgttctgtagctgccacaaaaataaagcatttgtcctgaggctacattaataaagatattgcctctagaa

SEQ ID NO: 82544 - DNA, 120 bp, synthetic construct
  source 1..120: mol_type = other DNA
aagtgccaagattgcagcctctgcccggccgccaccctgtctgggatgtgaggagcccctctgcctgactgcccagtctggaaagtgaggagcatctctgcctggccgccatcccatcta

SEQ ID NO: 82545 - DNA, 120 bp, synthetic construct
  source 1..120: mol_type = other DNA
aaaaaaaaaaagaattgaggagcaagcttcacattcagaatccagtggctgaggaagtatccatatccctaagagaaagaaccttgggacaccatgactgttacatgctgggacaattcc

SEQ ID NO: 82546 - DNA, 120 bp, synthetic construct
  source 1..120: mol_type = other DNA
ttagtttcttttctcctttgttccatcctttttttttcttttttcttttcttttctttttttttttttttttttttgagacaaagtctcgttctgtcgcccaggctggagtgcagtggct

SEQ ID NO: 82547 - DNA, 120 bp, synthetic construct
  source 1..120: mol_type = other DNA
cgtatcatccaaccaacccattcctaatcatccactctggggggctttcttgcctatgtgcacaggagacatgcacactaatatttatggcaaaaactggaatcagccacatatacatca

SEQ ID NO: 82548 - DNA, 120 bp, synthetic construct
  source 1..120: mol_type = other DNA
ggacttgctcccaacagtctccttctggaggatgactgggtagcagcccagggtagttttacagttttgtgttttacaccagtgctgggccccctggtagttacttgattataattcctt

SEQ ID NO: 82549 - DNA, 120 bp, synthetic construct
  source 1..120: mol_type = other DNA
caaatcaaaacgacaaatgagataccattttatgccagtcagaatggcaattattaaatagtcaagaaacaacagatgctggcaaggttgcggagaaataggaatgcttttacactgttg

SEQ ID NO: 82550 - DNA, 120 bp, synthetic construct
  source 1..120: mol_type = other DNA
ccccatgctgttctcctgatgctgagggaattctcatgagatctgatggttttataaggggcttttccctgcttcattgtgcatttctctctcctgtcaccacatgaagaaggacgggtt

SEQ ID NO: 82551 - DNA, 120 bp, synthetic construct
  source 1..120: mol_type = other DNA
cagtgtcgaacgcctggggtcaagggactctctgacctcagcctcctgagtagctgcgactaccatcatgaactaccatgcctggctaattttctaattttttgtatagatggaggtttt

SEQ ID NO: 82552 - DNA, 120 bp, synthetic construct
  source 1..120: mol_type = other DNA
ggaaagaacgctggtgagcaccgggaattgagcccctcccagttctctacattgacagctagccaggaacagggacctcagtcttacaactgcaagaaactgcattctgccacctctgta

SEQ ID NO: 82553 - DNA, 120 bp, synthetic construct
  source 1..120: mol_type = other DNA
gtgactgccttgaacagttgcaactttgaggtgaataaagcctgtaatggcttctggttgcaacatataggaacacagtggctactttgtattgaggagatgtcgtggactcacacagaa

SEQ ID NO: 82554 - DNA, 120 bp, synthetic construct
  source 1..120: mol_type = other DNA
ccaacctacgtagggtccttcatcctggatactcacgacgcggacccagttctcactcccattgggtgtcgggtttccagagaagccaatcagtgtcgtcgcggtcgctgttctaaagcc

SEQ ID NO: 82555 - DNA, 120 bp, synthetic construct; identical to SEQ ID NO: 27554
  source 1..120: mol_type = other DNA

SEQ ID NO: 82556 - DNA, 120 bp, synthetic construct; identical to SEQ ID NO: 27555
  source 1..120: mol_type = other DNA

SEQ ID NO: 82557 - DNA, 120 bp, synthetic construct; identical to SEQ ID NO: 27556
  source 1..120: mol_type = other DNA

SEQ ID NO: 82558 - DNA, 120 bp, synthetic construct; identical to SEQ ID NO: 27557
  source 1..120: mol_type = other DNA

SEQ ID NO: 82559 - DNA, 120 bp, synthetic construct
  source 1..120: mol_type = other DNA
ggaataaacctagatacattatgccccatggtggaatcaccagttccataaatcctgtcctggttatctccccattctctgagtgcataattggccttgatgcactggcaactggagtca

SEQ ID NO: 82560 - DNA, 120 bp, synthetic construct
  source 1..120: mol_type = other DNA
acaaagtaaaagacacacttgcatcttgcatcctcaccagaaggaaggatgcacactaccttgtgagcctctctgggttctagcaacaccacattccacatctaagtttattgctttggc

SEQ ID NO: 82561 - DNA, 120 bp, synthetic construct
  source 1..120: mol_type = other DNA
ataggctcacagggatgcgatgtggtgtggttttcctctctgctctcagaccctcagtcaacaacactattggcattcctgatccactggctcagaatttcagtacactatctgcctggg

SEQ ID NO: 82562 - DNA, 120 bp, synthetic construct
  source 1..120: mol_type = other DNA
gatactcctaggtaatgtcccacgtctctgcttctgtgctctgacatcctcagcaggattagtgcagaagccctgcttccatgagttgttcccagccagtgaccggtcacagcaagcaca

SEQ ID NO: 82563 - DNA, 120 bp, synthetic construct
  source 1..120: mol_type = other DNA
cctagggtgattctgtagccaagacaatggttttttaacatgtaatctccaccttcaactgaatgttttcagaacacatgagcaacataagttctttcccattcttggtacaagcacttg

SEQ ID NO: 82564 - DNA, 120 bp, synthetic construct
  source 1..120: mol_type = other DNA
tgcaaggatccttagcaataactacatgagttaaaacaaagccacagccaattgtaaggagccatgtgacagagagtaccaggatgccatgaaaaaatagcctttgatagaaataggtca

SEQ ID NO: 82565 - DNA, 120 bp, synthetic construct
  source 1..120: mol_type = other DNA
gcatgccactgcattccagccagggcaacagagtgttactttgtctaaaaataactaactagctaactaactaactaaataaataaataatggaggcagtgcacgagccctggtgaaggg

SEQ ID NO: 82566 - DNA, 120 bp, synthetic construct
  source 1..120: mol_type = other DNA
caataagaagatgaagcctcttccaacagccacgtgggatattcttgtgacttgtgaatccccagccccatttgagccctcagatgataaagccctggatgacaattagaccgcaatttt

SEQ ID NO: 82567 - DNA, 120 bp, synthetic construct
  source 1..120: mol_type = other DNA
agaatcccaatcttaagatgaggatacagctttgcgaaaccctgaacaaagaatctctgacactaggcctggatttctgatgaaggaaatgcagaaaaataaatgagtgctcttttaagc

SEQ ID NO: 82568 - DNA, 120 bp, synthetic construct
  source 1..120: mol_type = other DNA
cttcagtgagtcatgaacgtgccacagcactccagctagggcaacagagtgatactcggtctaaaaataactaactaactaaataaatgataaataaaggcggtgcatgagcactggtga

SEQ ID NO: 82569 - DNA, 120 bp, synthetic construct
  source 1..120: mol_type = other DNA
tgcagatctccttgagtcacattccaaaagaagggaaggaaaatgggaccaacgctaaaatatccctctccctcttgtgaggaggaagagtcctcccgggttttcagatcctatactaga

SEQ ID NO: 82570 - DNA, 120 bp, synthetic construct
  source 1..120: mol_type = other DNA
ttcttacagctgtcttcccagcccaccagccccatcatgggcatcgttactgtcctggttgttcttggtgctgttttcaccagagctgtggtcactgctgtgatgtgaagaataagagcc

SEQ ID NO: 82571 - DNA, 120 bp, synthetic construct
  source 1..120: mol_type = other DNA
tcttctctttctgccaaggtgtctgaatgtgtctacatccctggtatcatgtgagaagtggggagaccagcccaccctcatgtccaccatcacccctgatattgtttggatctgtgtctc

SEQ ID NO: 82572 - DNA, 120 bp, synthetic construct
  source 1..120: mol_type = other DNA
ctatcaggactactaaatggtggagccactggcaatgtgcaagctcagcttggaaaatccataggtattcaattttcacccatgagagcagctatatgggttatgttcagcaaacccaag

SEQ ID NO: 82573 - DNA, 120 bp, synthetic construct
  source 1..120: mol_type = other DNA
ataaattagtcagtctctgacatttctttatagcaacacaaaatggaataagacagcgctctcatcacaggtatgtgtctctggcattcagcccccattctcaagatatccagggtccgc

SEQ ID NO: 82574 - DNA, 120 bp, synthetic construct
  source 1..120: mol_type = other DNA
atctagaggagtcactcttgcagccccacccatgtggacagtgagcacattcatgaagatgtaaaagccagtccttcatgtttatattgcccaacaactatattgccagtttttagacaa

SEQ ID NO: 82575 - DNA, 120 bp, synthetic construct
  source 1..120: mol_type = other DNA
ataaaaccccatcttcacaagaggagatgggttatgctgtttgttggattagtgaattaagccccgtgttcccccttaaagagaaataaaaagagcatagtaaagagccctcacccagtg

SEQ ID NO: 82576 - DNA, 120 bp, synthetic construct
  source 1..120: mol_type = other DNA
tttgacccagcaatcccacaatcccactactggatatatacccaaaggattataaacattttactataaagatacatacacacatatgtttattgcggcactgttcacaatagcaaagac

SEQ ID NO: 82577 - DNA, 120 bp, synthetic construct
  source 1..120: mol_type = other DNA
aaatgcaagaccatagggagctaataattagagggattatgcagtccactcataggacacaaaacgtccccaaagcattcaagatccaacaacaagaagaggagactccctctgcatttc

SEQ ID NO: 82578 - DNA, 120 bp, synthetic construct
  source 1..120: mol_type = other DNA
taaatgaataagataacattaaggttttgttgttgttttagtgagaggctggaaggccaccaggggcagttagctgtcagtaaggcagcagaagggctggggtcgctacataaggaaaat

SEQ ID NO: 82579 - DNA, 120 bp, synthetic construct
  source 1..120: mol_type = other DNA
agaagacactatatatactaattccaaatatgcctataaagtagtacacacctttgaaaaaatctggacagagcagggcctagaaaatagcagggcaaaataattggtacatggggaaca

SEQ ID NO: 82580 - DNA, 120 bp, synthetic construct
  source 1..120: mol_type = other DNA
attatgggtgtatagaaatgtatgccctggctaaacaagtgtgtgggaattgtgtgaactcccaggaaacaacttaaggttaaaagaacttgtaacacaaaccccaccccttgagttcac

SEQ ID NO: 82581 - DNA, 120 bp, synthetic construct
  source 1..120: mol_type = other DNA
cttgtaaaagtctgtcattgctctttcccactttgcagagatcagatcctaaagcaatcccctcattctctatagggaatataaatcactcctgttgtcactctagacagaaggtgaggt

SEQ ID NO: 82582 - DNA, 120 bp, synthetic construct
  source 1..120: mol_type = other DNA
cataaagggatggcagggactaacaactctagtcaacgagctggcagaaaacacaggagtaaatgacctttttactaactggttagaaggttggtttgaaaaatggaaaggaatggtacc

SEQ ID NO: 82583 - DNA, 120 bp, synthetic construct
  source 1..120: mol_type = other DNA
agaaatagtttgttgaaactgtcccaggtgtacctgcactccagacacctgatcttgcaagactgtcattaaaagtctctctttcgctgttctctgggtctctgagtctattctttgggt

SEQ ID NO: 82584 - DNA, 120 bp, synthetic construct
  source 1..120: mol_type = other DNA
ccttctgcaagtctgtcctcaccctggggaccaattcctcaaggctggcagaaggatgggcctcgagactgtgtctttatgctctgggatccctgcattgatgctgaggaggggaatgtc

SEQ ID NO: 82585 - DNA, 120 bp, synthetic construct
  source 1..120: mol_type = other DNA
atcactcttgcctgctgccacctctcacctcccttctgtcccttgatatatgccagggcccttctgaggtcctgcccattctctgtcaagtcctcagtctctgtgtcccaggtctcagct

SEQ ID NO: 82586 - DNA, 120 bp, synthetic construct
  source 1..120: mol_type = other DNA
tccagaaacagtgccaggaaaacgacattcacatgcaaaaagaaatgaagttggactcctgacttacaccacatatacaagttaactctaaataaatcaaagacctacactcaggaacta

SEQ ID NO: 82587 - DNA, 120 bp, synthetic construct
  source 1..120: mol_type = other DNA
acaacaattaaacaacaaaaaagaaattgtcaccgcgtaccaaacaataatatagaattagaaagaggctggggtcctggtcagagagaaaaaaaccaaggcctgaggaagggccttcag

SEQ ID NO: 82588 - DNA, 120 bp, synthetic construct
  source 1..120: mol_type = other DNA
cctgcctaaggcccaactttcattagcaccagggctccccttaagtggcctggaggggagtgggatggagggaagactcccccgacaaaaggcagcaccagaaagttagggtcagggaca

SEQ ID NO: 82589 - DNA, 120 bp, synthetic construct
  source 1..120: mol_type = other DNA
cgctctagccgagggctagaacaatcctgccacctcagcctcctgagtagttgggactacaagcgagtgccaccacgtccagctgtcatttaccatctggtaccaacccccattagacaa

SEQ ID NO: 82590 - DNA, 120 bp, synthetic construct
  source 1..120: mol_type = other DNA
tgtaactcaggacgcggctgcgctgggcgcccgagcgcgttctcaggactgcggcccggagttcactgcgaggactgggatcacccatcaccccgccctggtctacggaaaatgacaagt

SEQ ID NO: 82591 - DNA, 120 bp, synthetic construct
  source 1..120: mol_type = other DNA
gaggtcaagctgcagagaacatgagcttctacctccagatgtgccagggtgcatctcgtgggtgcaagaacaagggttttgttttgttttacaaaatcaaagtacaaatctcaaatagaa

SEQ ID NO: 82592 - DNA, 120 bp, synthetic construct
  source 1..120: mol_type = other DNA
ttaagggggcttcatattttcatgtcattaaatctttctcaaagtatctttgatagagccgtttttagtgcagtagagagatgtgtaacaattttacaaaaggggcgggctgtaataaaa

SEQ ID NO: 82593 - DNA, 120 bp, synthetic construct
  source 1..120: mol_type = other DNA
agcaaaagaaactaccatcagggtgaacaggcaacctacaacatgggagaaaatttttgcaatctactcatctgacaaagggctaatatccagaatctacaatgaactccaacaaatgta

SEQ ID NO: 82594 - DNA, 120 bp, synthetic construct
  source 1..120: mol_type = other DNA
ataataataataataataataaagaccaaaaaaaaaaaagaatgtttgtgcggacagctacgctctaagaatccagctctcttgggctccaagctcaagctctctggggcttcacccagt

SEQ ID NO: 82595 - DNA, 120 bp, synthetic construct
  source 1..120: mol_type = other DNA
tgtgtgtgaatctgtgtgtgagagtgtgtctaaatatgtgtgtgaatgtgtgtgcgactgtgtgtgcctgtgtgtatcagttagcgtgtgtatctgtatatgagagagagtgtgtgtgta

SEQ ID NO: 82596 - DNA, 120 bp, synthetic construct
  source 1..120: mol_type = other DNA
ttaccccagccttaatattttaagtctatattttcccagctgttttttttgttgttgttgttgtttttgagaaggagtctcattctgtcacccaggctggagtgcagtggcacgatctcg

SEQ ID NO: 82597 - DNA, 120 bp, synthetic construct
  source 1..120: mol_type = other DNA
tgccattcagttctctgctcaaatgtcccttagtcaagttctcaggaacctcttatccaacaaaatatatctcctgccatcctcaccaccaccaatcttctaacccgagtatattttctc

SEQ ID NO: 82598 - DNA, 120 bp, synthetic construct
  source 1..120: mol_type = other DNA
gctctgccaggcagaggttcatccggatcctcccagtggggacacaggtgttttccatctttctgcttcactacattttttatattttctgtaattgagcagattctactttctaaaagg

SEQ ID NO: 82599 - DNA, 120 bp, synthetic construct
  source 1..120: mol_type = other DNA
actggagctattgccttttttctcctgaagaccccacccctgcacacaccaaaactttacattctttgtggagcaattttctttttagaaatgtaaacaccccctaatcttaaagccacc

SEQ ID NO: 82600 - DNA, 120 bp, synthetic construct
  source 1..120: mol_type = other DNA
agaagcttcataagacacaacatttgagctgcgttttgaggtataaataggagtctgacaggcatccaggacaggagagcattgctcagaacccaggacatgaatttttctctcctaggc

SEQ ID NO: 82601 - DNA, 120 bp, synthetic construct
  source 1..120: mol_type = other DNA
taccaagtgttctcttttctaaatatcacatacttgagctcacatggacagtagaggaagttctgagcctgctgaagccacaattggtacattggaccccgtagaattccttgtagattg

SEQ ID NO: 82602 - DNA, 120 bp, synthetic construct
  source 1..120: mol_type = other DNA
taaaattagccagaaacaatttataagaagtctaaaagcaaagccaggcaaggtggtgtacacttgtaatcctagcactttgggaggtcatggtgggtggatcgcttgagttcaggagtt

SEQ ID NO: 82603 - DNA, 120 bp, synthetic construct
  source 1..120: mol_type = other DNA
ggggcaaatatgggattgagtaggccagactgggaagcgtggatggattctaaacattccactttaggtctagcacttagagaaagagaaatcatgtttatttagctccttccacaatct

SEQ ID NO: 82604 - DNA, 120 bp, synthetic construct
  source 1..120: mol_type = other DNA
aacattgcttcttaatgagaactctcaaaggagttcctctgacaaaggaaccaagaatatacactggggaaagaacagtctcttaaataaatggtgctgggaaaatgctaccagatgcag

SEQ ID NO: 82605 - DNA, 120 bp, synthetic construct
  source 1..120: mol_type = other DNA
tattcacaatagcaaagatgtgaaatcaatggtgaatttatcaatgggtgaatgaataaagtaactgtagtatatacacaatggaatgcaattcagccataaaaaaagagtgaaatcctg

SEQ ID NO: 82606 - DNA, 120 bp, synthetic construct
  source 1..120: mol_type = other DNA
aagcaccaagccaaagggatatactctcttttattttttagaatatccactaccaaggatgatccacgctgttatgagacgaattgtgtccctccccaaccgaaattcatatgttggagt

SEQ ID NO: 82607 - DNA, 120 bp, synthetic construct
  source 1..120: mol_type = other DNA
ctgggtgccatgagaattacagcctttggttccttttacatgtagttcatttctgaacctgagaaggagaatgcacctcaggtgactaacagtttttgctcttctgtacttgtctgagaa

SEQ ID NO: 82608 - DNA, 120 bp, synthetic construct
  source 1..120: mol_type = other DNA
taactaaacatgaaacacaagtgcatctgcattatgtgtgggtgctctctccctttattgtatttggggtaagattattttagggcatggtccagggtaaattcctgtaaggcctggatg

SEQ ID NO: 82609 - DNA, 120 bp, synthetic construct
  source 1..120: mol_type = other DNA
ttgccttggggttttcagagcagcatctttgtgagtcctggagagctagggaccaggagggcaggaggaggtgaagacaacagcaccaagagatcctggaagagaaaggaccatggtagc

SEQ ID NO: 82610 - DNA, 120 bp, synthetic construct
  source 1..120: mol_type = other DNA
ccatgttgtagccattccctttgtgccccaagccattcctcttaatcctgacccttgtagctcctggttcactgtcaccctctccagcagtgcgtctccttgactcttggtgacttcaac

SEQ ID NO: 82611 - DNA, 120 bp, synthetic construct
  source 1..120: mol_type = other DNA
cagacactatcattttatcatatgctgtgatgtaatatcaatgaaccactcatttcctatgtgcctgcattccaggcttggagtccaccctgtggtacatcaattccaacaatccttcca

SEQ ID NO: 82612 - DNA, 120 bp, synthetic construct
  source 1..120: mol_type = other DNA
ttcactggggctcagagttgcagtgtggtctgatggctctcccagtgttttctgtctctctcctgaatttctctcacaagtatttccctgaataaatccttgcacatttactaccgtatt

SEQ ID NO: 82613 - DNA, 120 bp, synthetic construct
  source 1..120: mol_type = other DNA
ccccaggactttgataagtggagctaaacccaccgctggggtgaatccatatagattggaaaaaaagatgcccaactctcaacaaggtagacatgtcttagttgccctggaacatgtaaa

SEQ ID NO: 82614 - DNA, 120 bp, synthetic construct
  source 1..120: mol_type = other DNA
cttatggaggccagggagtaaacctggacaaattatggcccacaatgggaccactgggccaacagacccaacgctggatatctttcaattccctgagtgcatgattgacactgctgcact

SEQ ID NO: 82615 - DNA, 120 bp, synthetic construct
  source 1..120: mol_type = other DNA
atactgcatatcctttaggatattaaatcagcacatttcattgacaacttcatgttgactggagtagatgagcagcaggaagaaagtgcactgtagtcctttgcaaaacacacgcacccc

SEQ ID NO: 82616 - DNA, 120 bp, synthetic construct
  source 1..120: mol_type = other DNA
atgactacccactaagtaacaagttgactacatttagctacttccaacctggaagggccagagtttcatcttcacagggttaggtaccgattctatgggtgggttttcctgtcctgctct

SEQ ID NO: 82617 - DNA, 120 bp, synthetic construct
  source 1..120: mol_type = other DNA
tgttcccaacgactgatgggtcataccagtgacactaaggcaggacattcctaggagacaggggactcctctgatggccaattgtagctcgaggactcctctatggccttgctcagtgaa

SEQ ID NO: 82618 - DNA, 120 bp, synthetic construct
  source 1..120: mol_type = other DNA
aatcaggtgagtccttgaaaggattgggttcttcctgagcatagagattcacagtgtgagagggattcagcatgaggggtttcctccactgtgggctttgaaaatgaaggggctgtacag

SEQ ID NO: 82619 - DNA, 120 bp, synthetic construct
  source 1..120: mol_type = other DNA
ctggagtgttttaggtggagaaatgacacactttgactcacattagcaggaccactgtggagagaacagtcacgtagcaggtaacgggagagtgccagtgtcacaattcaggagtgacag

SEQ ID NO: 82620 - DNA, 120 bp, synthetic construct
  source 1..120: mol_type = other DNA
accaagctccctggggtgagttttctttttgaagagtccaggggaacaggtaagcagcggggaagcagggagtccatttcagggacaggaattcccggatgaaaagtgaaaggagaggga

SEQ ID NO: 82621 - DNA, 120 bp, synthetic construct
  source 1..120: mol_type = other DNA
gaggggccggagtattgggacctacagacactgggcgccaaggcccaggcacagactgaccgagtgaacctgcggaccctgctccgctactacaaccagagcgaggcgggtgagtgaccc

SEQ ID NO: 82622 - DNA, 120 bp, synthetic construct
  source 1..120: mol_type = other DNA
ctcaatgtgtcggagtctgactccagctcctctgagtcccttggcctccactcagatcaggaccagaagtccctgctaccctgctcagagactagaactttccaaggaataggagattat

SEQ ID NO: 82623 - DNA, 120 bp, synthetic construct
  source 1..120: mol_type = other DNA
ccagcctgggccctgtgtgccagcacttactcttttgtaagcacctgtgacaatgaaggacagatttctcaccttgatgattgtagtgatggggatctgaccccagtaatcacaggtcag

SEQ ID NO: 82624 - DNA, 120 bp, synthetic construct
  source 1..120: mol_type = other DNA
cctaaaatttgagagacaaaataaatggaagacatgagaaccttccagagtccacgtgtttcttgtgctgatttgttgcaggggaggagagtagatggggctgtgcccagtttctgttct

SEQ ID NO: 82625 - DNA, 120 bp, synthetic construct
  source 1..120: mol_type = other DNA
cttttttctattctttctgctcatcagctgtcattagtgtattttatgtgtggctcaagacaatgcttattcttcccaactggcccagggaagccaaaaaattggacacctctgtaggca

SEQ ID NO: 82626 - DNA, 120 bp, synthetic construct
  source 1..120: mol_type = other DNA
tctggcaggagtacacagaggagagggcatcgcaggcattcaatggaggagacatctatgaggaatgcaggtgaggggcccagatgcctctgcagctacagattcatcatccaatcactc

SEQ ID NO: 82627 - DNA, 120 bp, synthetic construct
  source 1..120: mol_type = other DNA
tacaggtgaggagcaacatcccagacaagtaaagtaaaataaattgatttacatcatccagagcagaatcgagaacacattccctgtgctaaaggaatcagaactctactaggggtcata

SEQ ID NO: 82628 - DNA, 120 bp, synthetic construct
  source 1..120: mol_type = other DNA
tccagatttccagccacgacttacgctcagaaaaaataacgtccaccttaattatctctccaaccctgtttttccctgtcccggctagttccctcccttgactccatcaacatcggcacc

SEQ ID NO: 82629 - DNA, 120 bp, synthetic construct
  source 1..120: mol_type = other DNA
tgccaacttcacattagacatctttcagttaatttccttactctgtctaagcagaatatttaaacttctttctgaagcagaaaaccagggactggttatgtgagctatcaccccactctg

SEQ ID NO: 82630 - DNA, 120 bp, synthetic construct
  source 1..120: mol_type = other DNA
aggagaatcacttgaacctgggaagtggaggttacagcgagccgagattgtgccactgcactccagcctggcaacagagcaagactctgtttcacaaaaaaaaaaaaaaaaggaatgcca

SEQ ID NO: 82631 - DNA, 120 bp, synthetic construct
  source 1..120: mol_type = other DNA
ggtcacagatagatgagagacaaatggttgcattcttttgagtttccgattagcctttccaaatgagggaatcagacatgtgtttatctcagtgagcagaggggcgactctgaacagatg

SEQ ID NO: 82632 - DNA, 120 bp, synthetic construct
  source 1..120: mol_type = other DNA
cctatagttctctgtacagacagtctggcagtacttaagggtcttacaatttggcttgcccaaagggcctgagatgattggtatataatttaaaaatccttatggggagctgatatgtgg

SEQ ID NO: 82633 - DNA, 120 bp, synthetic construct
  source 1..120: mol_type = other DNA
ttaaccataatagtaaagaaagtccaaccagatgcatctctgacctgagcagataaaaggccaatggcaaaggttatttagaactcctcaagatcttgagccagggaggagacacttgaa

SEQ ID NO: 82634 - DNA, 120 bp, synthetic construct
  source 1..120: mol_type = other DNA
ccttgatgttatacaaattctaggctatgacacattagcattcttacctgttctggacagtagtagcctttgtcttgcacagagcatgtatactcttcccctgtggtatataagccctgg

SEQ ID NO: 82635 - DNA, 120 bp, synthetic construct
  source 1..120: mol_type = other DNA
atcaaactgttttgcatttgtgagcaggaatacaactgctggacaacagatattccatcagccaacagaaactgtgactggctttaaagaaaatgggcttcccttggtcttgggaacaca

SEQ ID NO: 82636 - DNA, 120 bp, synthetic construct
  source 1..120: mol_type = other DNA
acccctacattagaagagtttacaacaaagatggtgcattcttccttttgctttctgaggacacctactctgtatctgagtaactttcaataaactatctccttctcactgcactctgtg

SEQ ID NO: 82637 - DNA, 120 bp, synthetic construct
  source 1..120: mol_type = other DNA
aaactcaaggacacctgagtaatgtatgacttttggttaaaaataatgcatcaatattggttcaataattgtaagaaatgaaccatactaatgttagatgttaataacaggagaaacaac

SEQ ID NO: 82638 - DNA, 120 bp, synthetic construct
  source 1..120: mol_type = other DNA
tactctgttgcttctaccttttggcagttgtgaataatgttgttataaacatgatgtacaaatatctgcttggtctctgctttaacttcttttgggtctgtacccagaagaggaattgct

SEQ ID NO: 82639 - DNA, 120 bp, synthetic construct
  source 1..120: mol_type = other DNA
ggaaattcaagtgtctccatacagcattatatgtcttggagattatgtatatgaaaagctttacagataggtgtgtctcagtgatgctgtgcagagtaacctgtggcctaagtcaagtca

SEQ ID NO: 82640 - DNA, 120 bp, synthetic construct
  source 1..120: mol_type = other DNA
gcatcacatcaaacgtttaccatttctttgtgatggaaacattcaaaatcatatcaaaaagataatccaccacaatcaagtgggtttcataccagggaagaagggatggttgaacacact

SEQ ID NO: 82641 - DNA, 120 bp, synthetic construct
  source 1..120: mol_type = other DNA
aaatcttgaggcatcacattacctgatttcaaactatactataaggccaaagtcaccaaaacagcatggtactggtatgaaaatgggcccatagaccaatggaacaaaatagagaaccca

SEQ ID NO: 82642 - DNA, 120 bp, synthetic construct
  source 1..120: mol_type = other DNA
aggctggagccaccgtgcctggcctgaacagagaacacttctacactgctgataggaatgtaaactagtacaaccactatggaaaacaaggtggagatttttttagagaactaaaagttg

SEQ ID NO: 82643 - DNA, 120 bp, synthetic construct
  source 1..120: mol_type = other DNA
atatggatatccagtttccccagcatcatttattgaagaaactgccctttcctcagtatatgttcttggtgattttgttaaaaataaattgagtggctgggcacggtggctcacgcctgt

SEQ ID NO: 82644 - DNA, 120 bp, synthetic construct
  source 1..120: mol_type = other DNA
cctctatggcctttattgtgtttaggtacattccatctatacctaattggttggaagtttttatcatgaagtgatattgaattttatcaaatgctttttctgcagctatagagatgataa

SEQ ID NO: 82645 - DNA, 120 bp, synthetic construct
  source 1..120: mol_type = other DNA
gaactccttcccccttcaattttttggaatagtttcagatgaattggtgtcagtctctctttaaatgtttggtggaactgaacaatgaaggcatccagtactgggcttttctttgttggg

SEQ ID NO: 82646 - DNA, 120 bp, synthetic construct
  source 1..120: mol_type = other DNA
aggccactgtactctagcctgggggacagagtgagaccccatctcaaaaaaaaaaaaaaaaggtgtctaggtggttgattaccatggagctattgtaatctgtaaagccattaatttcaa

SEQ ID NO: 82647 - DNA, 120 bp, synthetic construct
  source 1..120: mol_type = other DNA
cggagcttgcagcgagcccagatcacaccactgcactcccgcctgggcaacacggcaagactcagtctcaaaaaaaagaaattagttgatatatcctatggtggtgaaaatggattcaac

SEQ ID NO: 82648 - DNA, 120 bp, synthetic construct
  source 1..120: mol_type = other DNA
tggtgaaattggctgctcttgtattttatttaaaaaatgatttttttaacctttatacaaataagcaaaaatactttaactgctgtaaaccttcaaaagttaatagaagtgagatcgtac

SEQ ID NO: 82649 - DNA, 120 bp, synthetic construct
  source 1..120: mol_type = other DNA
agctccctttcatatacccctctcctctcaatatagttattttataattttggttagctgggtgttcactatttatattattatgaccacagaaatgctattcacagctagactaggaaa

SEQ ID NO: 82650 - DNA, 120 bp, synthetic construct
  source 1..120: mol_type = other DNA
ggctctcctattgcctggatcccatgtgtccccttttttggttttctccatcgtttttgtttctcatttcatctgtgttcctaagggaacatggaaagtaaaatctgaaagcctaagctt

SEQ ID NO: 82651 - DNA, 120 bp, synthetic construct
  source 1..120: mol_type = other DNA
tcacatgattcatcagaggacttgaaatacatgctgaatgaggaaatataagtgtggttaggcagggaaatcagacttccttgatcaattgccccttgatgttctcctgagcactgtatc

SEQ ID NO: 82652 - DNA, 120 bp, synthetic construct
  source 1..120: mol_type = other DNA
cagctcttgacttctgacactgacagtaggtttcagtactgttagaagctgtcctactgctcaacactaggccatattattcttttcttggacataaaccatattacacaacatcagaca

SEQ ID NO: 82653 - DNA, 120 bp, synthetic construct
  source 1..120: mol_type = other DNA
aagcaaagagttctaaggtggagttttaacatttaaaacctggtcaggtgtggtggctcacgcctgtaatcctagcacttttggagggcaaggtaggcagatcactcgaggtcaggagtt

SEQ ID NO: 82654 - DNA, 120 bp, synthetic construct
  source 1..120: mol_type = other DNA
agccacattccaagtgctcaataaccacatgtaactagtggctcccatattggacagtgcagatatagatcaatttcatcatcacagaatgttctattgaacagcactactgctatagag

SEQ ID NO: 82655 - DNA, 120 bp, synthetic construct
  source 1..120: mol_type = other DNA
tatttctcatagagattgcaaattcaaagtgggtcaggagtgaaatctctattttgtgcttttaggcgcaaaccattcccagctccaaaatggaaacacatttgccacctctgttcccag

SEQ ID NO: 82656 - DNA, 120 bp, synthetic construct
  source 1..120: mol_type = other DNA
aaccctgtcccttccacataatcaactgatggtattattcccaatgataaaaggcaagctctcaagagaaaattagaatcctggggaacttgtatccaccatcataagcctgatggcttc

SEQ ID NO: 82657 - DNA, 120 bp, synthetic construct
  source 1..120: mol_type = other DNA
agaagaaaattcattaatcttctaatgagacacataagaaaaggatttacaaacatacaaaatgtaaaaagatgcactcttctcactatactgtttactttgggaaatactgactttgca

SEQ ID NO: 82658 - DNA, 120 bp, synthetic construct
  source 1..120: mol_type = other DNA
tcaacatgagtggttgtttcactgtagctgccacaaaacagcatgtggtctgcagctacattaataaagatactgtttctagaatagggaggtgctgtacactggtcattcatttagcca

SEQ ID NO: 82659 - DNA, 120 bp, synthetic construct
  source 1..120: mol_type = other DNA
ctgaaaggggcatatttgaggagggggcactataggcattcaatttaggaaatgttgaatctcagatgtcagacattcaagtgaggttgttgtgttggcagatggatatgcaagttggaa

SEQ ID NO: 82660 - DNA, 120 bp, synthetic construct
  source 1..120: mol_type = other DNA
tgtgagaataggcttaaagctacatagctagaagcagcatctataatcccatcctaggtggagtctcacataggaatcactgcccctgatgctgggcacagatgtcactgttcataccaa

SEQ ID NO: 82661 - DNA, 120 bp, synthetic construct
  source 1..120: mol_type = other DNA
tttgtaaccctattttaggaaaccctctctcaaaccacattttccctctgctctcataccacaacaatcatcaacacagaagacttctgtgaccaaagatgtgggggtttttccccacac

SEQ ID NO: 82662 - DNA, 120 bp, synthetic construct
  source 1..120: mol_type = other DNA
acctccaaaaggccccacctctaagtatcatcacactggggattaagttttaaacataggaatttgggtgggggattggagacacaaacattcagtctagagcatccataaaagtctaaa

SEQ ID NO: 82663 - DNA, 120 bp, synthetic construct
  source 1..120: mol_type = other DNA
cttcctccaacactggggactacagtttgacataagatttgggcgggtacacaaatccaaaccacatcaatatttaatggtgaaagactggttgctttcctcctaagatcagcaattaaa

SEQ ID NO: 82664 - DNA, 120 bp, synthetic construct
  source 1..120: mol_type = other DNA
aactgaaattcagaaataaaaccatgtgtctactgtcaactgattttcagcaagggtgctgagcacattcaacgggggaaagcacagtcttttcaacaaatggtactggggaaacttgat

SEQ ID NO: 82665 - DNA, 120 bp, synthetic construct
  source 1..120: mol_type = other DNA
tgcagtgagccgagatcacaccactccactccagcctgggcaacagagtgagactccgtctcaaatatatatatatatatatatatatatatatatttatgaactcaggttggacaatgg

SEQ ID NO: 82666 - DNA, 120 bp, synthetic construct
  source 1..120: mol_type = other DNA
aatagccaataagttcataaaaaagatgatcgacattattagggaaatgcaatttaaaaccacagtgaaggctgggcatggtggctcacacctgtaattccagcactttgggaggccaag

SEQ ID NO: 82667 - DNA, 120 bp, synthetic construct
  source 1..120: mol_type = other DNA
ttacatatgaattttccaaaataggcaaatccatacaggtaggacatagattaactcttgcttagggtttggggtgatggggaagggggaataagagagtaatagctatagggcatgggg

SEQ ID NO: 82668 - DNA, 120 bp, synthetic construct
  source 1..120: mol_type = other DNA
ttccctgtctttgctattgtaaatagtaccacagtaaacatgggggtgccagtatccctttgatgtatcgatttccttacctttggataaatacccagtggtggtattgctggatcacac

SEQ ID NO: 82669 - DNA, 120 bp, synthetic construct
  source 1..120: mol_type = other DNA
attactatagcttaactattggatggggctcttttgtggttccatatgaattttttttatttttgagatagggtctcactttgtcacccaggctgcaacacagtggcgcaataccagctc

SEQ ID NO: 82670 - DNA, 120 bp, synthetic construct
  source 1..120: mol_type = other DNA
ccttgaggagacgacatgtgggtgatcttttctagaaggcagtggagtgaaagttttgggaaaagtgacagaaagagaaacaaatcctgtactggaagctcactgaaaaccaactaagta

SEQ ID NO: 82671 - DNA, 120 bp, synthetic construct
  source 1..120: mol_type = other DNA
gatgatggatgcaggtttggacaaactgagttcctgaaacatagacttttattcttagccgtattaggtgtgaaattgccctgagagcaccagttgcttttatgctagatttggagggga

SEQ ID NO: 82672 - DNA, 120 bp, synthetic construct
  source 1..120: mol_type = other DNA
actgaggagcacagacacagaacatttgtatcagtggctgacctagcagtatccagggtaaagggtgttctgctagtaaagcaaggtgggcatcagaattatcacaacttaagcataata

SEQ ID NO: 82673 - DNA, 120 bp, synthetic construct
  source 1..120: mol_type = other DNA
catcaaaataaccttggagggctgggaacagggagaataagagaagaagattagaacaattctttattcaccaccattgcccaaccccggtctttccaagtggggaaactaacatttatg

SEQ ID NO: 82674 - DNA, 120 bp, synthetic construct
  source 1..120: mol_type = other DNA
actgtcttgctgctgttgtatgcacaccacctagattctgtcaaagtgaagtcagaaatttataatgtgatcatctttttcctttgaacacatttaaacaggagccaagcccaccctccc

SEQ ID NO: 82675 - DNA, 120 bp, synthetic construct
  source 1..120: mol_type = other DNA
acaatgccaatcatccttcactctaaatccattatgagactattccctgttgaacccctcaggatggcaatttgtggttactctgggtttatttatagaggaggctgatggcaacacaaa

SEQ ID NO: 82676 - DNA, 120 bp, synthetic construct
  source 1..120: mol_type = other DNA
tatgcatgttctgggctctcacattttgtacctactagcacagttttattatattctaattattcattcatgttccttgaggtcagagaacacagatttcaactttgcaggctcagcctc

SEQ ID NO: 82677 - DNA, 120 bp, synthetic construct
  source 1..120: mol_type = other DNA
gtcagctgtccacttaacggatgacataatgaattaagagttcgataggcggcaggcacaactaaaagccaaactcgacctaagtcttatgaaatcctacttaatgagctttcttgacta

SEQ ID NO: 82678 - DNA, 120 bp, synthetic construct
  source 1..120: mol_type = other DNA
ttatatactcctaggtcctgggacagaatagttacgacctctgggacaggaactcttctctcttttgttaataaacttccaactccctcctcagacccgaccgcatgtctgtcatggacc

SEQ ID NO: 82679 - DNA, 120 bp, synthetic construct
  source 1..120: mol_type = other DNA
ccagtgaaataaaccttttaggatttttttttttttttttttttttttttgacagggtgtcgctctgtcacctagcctggagtgcagcgaggcaatcttggctcactgcaacctccgcct

SEQ ID NO: 82680 - DNA, 120 bp, synthetic construct
  source 1..120: mol_type = other DNA
ctctttatgccaccttctgagtaatttcttcaggtccctcttccatgtcactaattctgtcttcagtttatttcaagtattattattttttactattgttattattttgagttctattta

SEQ ID NO: 82681 - DNA, 120 bp, synthetic construct
  source 1..120: mol_type = other DNA
tttttcccagcgtgtggcttgcctattttcttaaccctctttaaatgagcagaagttttaagtttttataaggttcagcttatccttttttttttcttttacagctagtgctttctgtgt

SEQ ID NO: 82682 - DNA, 120 bp, synthetic construct
  source 1..120: mol_type = other DNA
aactgcttgagtctacatatatgtggattttcttctacttctgagacccataagatagcagcacatttaagccctccttttcctcctcctgagcctactcaacatgaaaatgtgatccac

SEQ ID NO: 82683 - DNA, 120 bp, synthetic construct
  source 1..120: mol_type = other DNA
actccctcagatccaagcggtacaaaactccatttcctgtagtgcacacatctacaactttttaagctgctcttctaaaaaaacctacttgtcggccttcctggttcttgttttaccact

SEQ ID NO: 82684 - DNA, 120 bp, synthetic construct
  source 1..120: mol_type = other DNA
gaataaagaaggtggaggatcctggctaccactctgaatccgataccgcttctcttagacctcagcgacagaaaaagggaagggtgtctcatcccccttcctcctctcctccctgtcctg

SEQ ID NO: 82685 - DNA, 120 bp, synthetic construct
  source 1..120: mol_type = other DNA
ctaccaaggatgatttggggaggaagacggagaaacagcaaggattatattttcctttgaagagttgctgggacctttcctaggttaggaattgtgtcttctcttatactggtggtataa

SEQ ID NO: 82686 - DNA, 120 bp, synthetic construct
  source 1..120: mol_type = other DNA
ggtaggagaaaataggaattttcactgagtttgagtgggaatggaactgactatatatcttacccttcctcctctttaactgggctcctccctctaaatctaggctgctgtatttatgag

SEQ ID NO: 82687 - DNA, 120 bp, synthetic construct
  source 1..120: mol_type = other DNA
cccttctcctcctgctaacccttctcacaccctcaagaggagttagaaaagaggtccttgtcattctcacctcttatggaaaatggaataagaaataatcatatcctttcttcccaccct

SEQ ID NO: 82688 - DNA, 120 bp, synthetic construct
  source 1..120: mol_type = other DNA
gagagaagattctgagagccagaaggcaggaatggatttggttttgagcagggacgtggaaacgtggagaccaggtgaggtctcattattttggggcgaaaatgtgggttgctattaata

SEQ ID NO: 82689 - DNA, 120 bp, synthetic construct
  source 1..120: mol_type = other DNA
catgagagagttttctaaatcacaggcggggtagggtggagaatagtcaacgaagatcacgtaaaagactgagagctagtgaccacacaacagctcaaaaggcgactgcaggaccaaaaa

SEQ ID NO: 82690 - DNA, 120 bp, synthetic construct
  source 1..120: mol_type = other DNA
aaggtcattagggtgggctctaatccagattgctgacttacaaaaagaggaaatttggacacagagacaaatgcatacaaaagaaaatgtgcagacctatcacccaaagaacatgtgagg

SEQ ID NO: 82691 - DNA, 120 bp, synthetic construct
  source 1..120: mol_type = other DNA
gtgagttctgtctgagttagcagtgtccctcctcacctttcagagtgatctcacctctttacacactgtgctcctttccctctcattctcctccttcacctttcatgatccctccttcct

SEQ ID NO: 82692 - DNA, 120 bp, synthetic construct
  source 1..120: mol_type = other DNA
taacaataacaaacaacacagggcttagcttgagccagagtccgagaccaacccccacgacgctacggggaggtttggatatgccccaaccccttgctcccttcctccatcctcttgtca

SEQ ID NO: 82693 - DNA, 120 bp, synthetic construct
  source 1..120: mol_type = other DNA
ccttccgcgaccaccgtgaccgccttcgagcgcgcagatggcgggccgcccctgctgcttgctgtgtagatgcccttctctccgactcccgcattaacttttgccgctttccgcccctct

SEQ ID NO: 82694 - DNA, 120 bp, synthetic construct
  source 1..120: mol_type = other DNA
ttcctccctgctccctcctcttcctagcttctctacccttccaatgccaggcctagctaactggatactcatgggggtttgtgcataagtaaacatccagatgtctacaactatgatcac

SEQ ID NO: 82695 - DNA, 120 bp, synthetic construct
  source 1..120: mol_type = other DNA
agctgcaaaagacgagggaatggattctctagcagaccattcagaaggaacctagcactgctgacaccttaatttttgcccagtaagacccatttcagactctgaactacagaataataa

SEQ ID NO: 82696 - DNA, 120 bp, synthetic construct
  source 1..120: mol_type = other DNA
atcttcatgctatttattactgtctgcagtgatctatttatggacttttgatgtgtctctgtccaatagaaggtgagtgaacagggacctaaccttcatgtttgctgctgctttccctgc

SEQ ID NO: 82697 - DNA, 120 bp, synthetic construct
  source 1..120: mol_type = other DNA
gactgatcacaggacagtcatggtccctgcccttaggaagtgtgataaggcaggtaaagtgtatccatcatcaacaaaatttagcattactgaattagggtgtgtaagaaggcagataaa

SEQ ID NO: 82698 - DNA, 120 bp, synthetic construct
  source 1..120: mol_type = other DNA
ccctttaaatccctgcttagggctaacagtttctctgaaatgttgcccatccttcaagttcatgtaggtgctcacttattctctttccttccaacaacccacctatcaatgtcactaata

SEQ ID NO: 82699 - DNA, 120 bp, synthetic construct
  source 1..120: mol_type = other DNA
tggctgcataaatgtcttcttttgagaagtgtctgttcatgtccttcgcccattttttgatggggttgtttgtttttttcttgtaaatttgtttgagttcattgtagattctggatatta

SEQ ID NO: 82700 - DNA, 120 bp, synthetic construct
  source 1..120: mol_type = other DNA
ttgaagaggtccttcacatcccttataagttggattcctaggtattttattctctttgaagcaattgtgaatgggagttcactcatgatttggctctgtgtttgtctgttgttggtgtat

SEQ ID NO: 82701 - DNA, 120 bp, synthetic construct
  source 1..120: mol_type = other DNA
tgtgtcaaggaatttatccatttcttctagattttctagtttatttgcatagaggtgtttgtagtattctctgatggtagtttctgtttctgtgggatcggtgatgatatcccctttatc

SEQ ID NO: 82702 - DNA, 120 bp, synthetic construct
  source 1..120: mol_type = other DNA
agagctgagttcaattcctgggtatccttgttaactttctgtcttgttgatctgtctaatgttgacagtggggtgttaaagtctcccattattaatgcatgggaatctaagtctctttgt

SEQ ID NO: 82703 - DNA, 120 bp, synthetic construct
  source 1..120: mol_type = other DNA
gtagatttggtcttttcacatagtcccatatttcttggaggctttgctcgtttctttttattcctttttctctaaacttcccttctcgcttcatttcattcatttcatcttccatcgctg

SEQ ID NO: 82704 - DNA, 120 bp, synthetic construct
  source 1..120: mol_type = other DNA
gccgttttttaagcccgtcggaaaagcgcagtattcgggtgagagtgacccgattttccaggtgccctctgtcacccctttctttgactaggaaagggaactccctgaccccttgtgctt

SEQ ID NO: 82705 - DNA, 120 bp, synthetic construct
  source 1..120: mol_type = other DNA
ttcatccattcatttaatcattcaacaactatttactaagcacctactatgtaccatgcgttgttctaggagttaggaagagtggagagcaagccagccatagtcccttgtcctctggta

SEQ ID NO: 82706 - DNA, 120 bp, synthetic construct
  source 1..120: mol_type = other DNA
gttgtagggaacattaacaatgtgtagtctagcccttacaacatggataagaaaattgattcccagagagatgatcttgctggtgtgtaagtagggaaaactttcggatcctcatctgtc

SEQ ID NO: 82707 - DNA, 120 bp, synthetic construct
  source 1..120: mol_type = other DNA
ttatttgataaatctgacattttgacaaatctccagcacagagactgagagcagaagtccttaatttagatgggggacattgaggaaggcccatcttccaaggtgatatttaaggggaga

SEQ ID NO: 82708 - DNA, 120 bp, synthetic construct
  source 1..120: mol_type = other DNA
tctcctttttattctctgtcctttctttctgttctgtagtcatcctatttccttgacagaatcgaagcctcagccagtgagatagatggagtgtaggcagctagaaatggaaaggattcc

SEQ ID NO: 82709 - DNA, 120 bp, synthetic construct
  source 1..120: mol_type = other DNA
ctctcaggtctgcccttaaatatcacctagagagatgggccttctcaatgctggatggagtgctggatggagtagatagagttacaatctcaatagattctatttgagcaaagatttgaa

SEQ ID NO: 82710 - DNA, 120 bp, synthetic construct
  source 1..120: mol_type = other DNA
cctctgtgtcttggtccacatgatagactctccctccctcccttccttcctctcctctggtgaccagtagctaaaacatcactggcacgctgctggcatccagcctgccaattagttcag

SEQ ID NO: 82711 - DNA, 120 bp, synthetic construct
  source 1..120: mol_type = other DNA
cggggggagagacatgatcttacagaacgggctggacctggggagaggattttgtcagaactatggaaagtttgaaatgaggttgaagaaggagtgatggtaatactttttacattttta

SEQ ID NO: 82712 - DNA, 120 bp, synthetic construct
  source 1..120: mol_type = other DNA
ggcaggaggatcacttagcccaggagtgagagaccagcctgggcaacatagcaagatttgtcccaatgaaaaaaaatactaaatgtttttaaaaggcacaatgcatagctgtaataacag

SEQ ID NO: 82713 - DNA, 120 bp, synthetic construct
  source 1..120: mol_type = other DNA
acaacctcacttgatcccacaaacacatatcctcactattcccactgtccctggtttatagctatttcaaatacacacacacacacacacacacacacacacacacacacatttctatgt

SEQ ID NO: 82714 - DNA, 120 bp, synthetic construct
  source 1..120: mol_type = other DNA
aaccaacaaagaattcatatctaataggttttcctcagggctcagatgagtaggtttgggagttactgggaggctgtgataccaggcaggatgacaaacaaaaacagtcagccaagaaaa

SEQ ID NO: 82715 - DNA, 120 bp, synthetic construct
  source 1..120: mol_type = other DNA
cagatccaaaaaaagacactgtgccacccacaaaataccaaacaccccttctcttggttaacagaaatgtttgctacttctttaccaattatagctttcccctcattctagtctcccctc

SEQ ID NO: 82716 - DNA, 120 bp, synthetic construct
  source 1..120: mol_type = other DNA
ggggttaggctgaaggcaggccaacgtgcagttcaggctttatcctttagagaagggaggcattattgaaagtccaacaagttctaacatgaccagattatatttttagaaatcatttga

SEQ ID NO: 82717 - DNA, 120 bp, synthetic construct
  source 1..120: mol_type = other DNA
tttatgttctcgctttcctgtgggtgacagattatggagttgtgggttgaattttgtctgccaaggacatattgaagtcctagccccaggtacctacgtatgtggctttattcaaaaata

SEQ ID NO: 82718 - DNA, 120 bp, synthetic construct
  source 1..120: mol_type = other DNA
agagaatgtgtcattgtttcaagccacacagtctatggtgatgtgttatggaagccctaggaaactaatatagcagataagttgtgtgtgtgtgtgtgcatgtatacgtgtgtgtgtgtc

SEQ ID NO: 82719 - DNA, 120 bp, synthetic construct
  source 1..120: mol_type = other DNA
gtaccccattctagggtccgtgctaagtgtctggggttggtagagtcaggaagtataaaatcaacttaagacatttgggaaagatctccctttgtagtaaggaagttgaatctgtacaca

SEQ ID NO: 82720 - DNA, 120 bp, synthetic construct
  source 1..120: mol_type = other DNA
caactgtgctgcaatgaacagccttgtgtatagccttttagtgtatttgagcctttcttttcgacccaggcatattgtaaggagagaggaactgagatagaaggaatatttaaagcaggg

SEQ ID NO: 82721 - DNA, 120 bp, synthetic construct
  source 1..120: mol_type = other DNA
agaagtcttaggcccggcaccgcctcctcctcctcaaagttaatccctaaatttcacaatgtgttgttctgtgggcgcagagagaagttcttcattggtggtggtggtgagatcatttca

SEQ ID NO: 82722 - DNA, 120 bp, synthetic construct
  source 1..120: mol_type = other DNA
gttctctgagctggcttagcttgaaggaacctcacaaaaccaagcccggatcgctgtcagccactcactcagtgccgcatggagctcctcggacagcgcaacgtcaaatgtcttcgtatc

SEQ ID NO: 82723 - DNA, 120 bp, synthetic construct
  source 1..120: mol_type = other DNA
aggatccctaaatcctgctctctggctttggaatgcattctgtagtttctggctttggagaaaggagttctaattctctctctttcacttaatgatcatatgacctgggtaacttacctc

SEQ ID NO: 82724 - DNA, 120 bp, synthetic construct
  source 1..120: mol_type = other DNA
tcctgtggtgactgcctagcccagcactgtccagtatgaatgatgaatgtaatctgagtcacgaatgtgagccacttatatatttttaaattttctagtagtcacatttaaaaagtagaa

SEQ ID NO: 82725 - DNA, 120 bp, synthetic construct
  source 1..120: mol_type = other DNA
ggctttaatagggccaggtggccattgtgccttcttctttggggtaaaaataaaataaaaataagagaaaaaaaaaagaaggaaatagggccaggtgggagttgggggactgtgtgtgtg

SEQ ID NO: 82726 - DNA, 120 bp, synthetic construct
  source 1..120: mol_type = other DNA
aaacacagaaaggtttatgaaaaatatctggcgaacatctaaaacccaagtcatccactactgttctgctgatttctgtttccctgtaaggctggaagaggtttctccccagaatgtcac

SEQ ID NO: 82727 - DNA, 120 bp, synthetic construct
  source 1..120: mol_type = other DNA
attgcaccactgcactccagcctgagcaacaagagcaaagctccatctcaaaaaaaaaaaaaaaaaaaaaaaaagaagacctggcggttaagggatagtgagctgggagtcagaaagtca

SEQ ID NO: 82728 - DNA, 120 bp, synthetic construct
  source 1..120: mol_type = other DNA
aataaataggtttttgaacctgtgggagaatagatgacttgaggaggaatcatctcagcttattttaagcaccagctagacttgcactgtccaatatggtagccaccaaccacatgtggc

SEQ ID NO: 82729 - DNA, 120 bp, synthetic construct
  source 1..120: mol_type = other DNA
catgtggccagaattatatttatgaattacatatgtggctcacattttcattctaatacatgcggctcacatattgctattggacagcactgggctagaggtaggatggttggggcaatc

SEQ ID NO: 82730 - DNA, 120 bp, synthetic construct
  source 1..120: mol_type = other DNA
cccggctagttttctttctttttttttttaattaagaggagagtctcgctatgttgcccaggctggtctcaaactcctgggctcaagcgatcctcagcctcccagagtgctgtgattact

SEQ ID NO: 82731 - DNA, 120 bp, synthetic construct
  source 1..120: mol_type = other DNA
tcccttcatctgtcctaccaacaactttaagagagttgttttgtttttgccatttgaaaggtgaggtacctgaggctcagagaggtaaagtgattccttgcaggttgtacagtaaactca

SEQ ID NO: 82732 - DNA, 120 bp, synthetic construct
  source 1..120: mol_type = other DNA
tgcttataaagtgaaataagttgtcctgaactttggactaaaggtatgtttgtatggtggttgactaagatcagaatgaccggggcaccaaacaccacttatgggggatttcccaatcag

SEQ ID NO: 82733 - DNA, 120 bp, synthetic construct
  source 1..120: mol_type = other DNA
ggcccctagaagcagaatttaacttttgacaggttttgtttgactggcatgatgatttagaaaataatgataatgtagatgcctttagagagggtggctatgttccccaccgctctgcta

SEQ ID NO: 82734 - DNA, 120 bp, synthetic construct
  source 1..120: mol_type = other DNA
ccttgaatggatatcttaaactcttagtaggctcagtagtctgaaaccaaatgcctccaatttgcaagggctagggtcttgagatagttggtattgtgttagttccaaaggacttccaag

SEQ ID NO: 82735 - DNA, 120 bp, synthetic construct
  source 1..120: mol_type = other DNA
tccaaataagttctttctggaaggataagaatttaataactaacaatggttgtctctaaggagagggactgactagccagggaacaggggtggaagagaggcttttctttgtatgacata

SEQ ID NO: 82736 - DNA, 120 bp, synthetic construct
  source 1..120: mol_type = other DNA
agaagtattattattcccattttgaggacaagtcaacggagatcaagagagattaagcaatttgccccaaaggtcattcagtaagtaaatagtggaatggggacttgaacccaggtagcc

SEQ ID NO: 82737 - DNA, 120 bp, synthetic construct
  source 1..120: mol_type = other DNA
gcctgaaaggatacatactaaatttatggcagtgtttgcttccgggaggagagagagaaagagcgagagaggaatggaactaagaagagaactaaatggacagagggattctcaaatttt

SEQ ID NO: 82738 - DNA, 120 bp, synthetic construct
  source 1..120: mol_type = other DNA
tctttctttctttctttttctttttctttttcttttcttttcttttcgagacagagttttgctttggttgcccaggctggggtgcaatggtgcaatctcagctcactgcaacctccgcct

SEQ ID NO: 82739 - DNA, 120 bp, synthetic construct
  source 1..120: mol_type = other DNA
agaaataaaaatatgcttgggtttgaggatctaaatgcccccatcagaacacatcagactatgtaatattcttgtaccacagaagtacggtgtccagagcctaacacagagctcttggta

SEQ ID NO: 82740 - DNA, 120 bp, synthetic construct
  source 1..120: mol_type = other DNA
ccaccgcacccggcacaaagttcttaatgtgcagaggaagccttcaggtagcaggcttcagagagaatagattataaatgttttttattagactcaaaaagggtgccagactcttgatta

SEQ ID NO: 82741 - DNA, 120 bp, synthetic construct
  source 1..120: mol_type = other DNA
ttaatcagactgcactttgactcacttccttgaaaccaaaagtcatgtaacactagacactgaccagtcatatccccattgttgctctaggtaggatttctgacataagaatcagccaag

SEQ ID NO: 82742 - DNA, 120 bp, synthetic construct
  source 1..120: mol_type = other DNA
cagttttcaatagagctgtcaaaataggcttgagaaggtgaaaactggcatcaacttgcaggcagttaacagtaaggtgccaatagttgttattgctggttggtgaaattatgggtaatt

SEQ ID NO: 82743 - DNA, 120 bp, synthetic construct
  source 1..120: mol_type = other DNA
acagagtgagactcctcaccaaaaaaaaaaaaaaaagaaaaaaaaagatattcctggggagtagatgggtggtggagggcgggggaacaagggtggggtattgttaaaacatcgtaaaag

SEQ ID NO: 82744 - DNA, 120 bp, synthetic construct
  source 1..120: mol_type = other DNA
taaaagctcttacccatggccatagtttttcatcttgacatcctcagcacttaccatggtacctggcacaaaacagctaatttttcagttgccatactgaacagccattgtatacaggct

SEQ ID NO: 82745 - DNA, 120 bp, synthetic construct
  source 1..120: mol_type = other DNA
caactgacttttgcattttttgtagaaacggagtttcaccatgttgtgcaggctggtcttgaactcttgagctcaagtaattccccagcctcagcctcccaaagtgctggtatggcaagc

SEQ ID NO: 82746 - DNA, 120 bp, synthetic construct
  source 1..120: mol_type = other DNA
ggtgccaaatgctgccttagaaatctgtaagccagctaagagttctgcagtctcaactaaacaaaacttttttattccattggtttggggtgtactgttcttagggcttttgccaactga

SEQ ID NO: 82747 - DNA, 120 bp, synthetic construct
  source 1..120: mol_type = other DNA
tctcacctgttccttctctatccactgagccctgacacgtaggaccagcgctactaacagacttgttttccggttcagctccccttagggctcctgttggaaaccgaccctatctgggga

SEQ ID NO: 82748 - DNA, 120 bp, synthetic construct
  source 1..120: mol_type = other DNA
ggagaagcctctgtgaagagtttcctatgtaagcctgagatttcagggcatttcaagttttcttgggcagtgactaatcttaaatactcttttaagttgctgaaagtcattggcctgttt

SEQ ID NO: 82749 - DNA, 120 bp, synthetic construct
  source 1..120: mol_type = other DNA
ttgcttaccctttttgattcttccctgtgcctcagtttggagttggaagctcataaattcccctattatagggaagtggctgattgtgtaaccctatccttttgttgaaataggtgtgtc

SEQ ID NO: 82750 - DNA, 120 bp, synthetic construct
  source 1..120: mol_type = other DNA
gtattgagtgctggtctaaaggacaggtttcagcagaggacacaatctcagagcagacaacttaagtttcagtattaggcatttccgttcttaaacattccttcactatttctgcccaag

SEQ ID NO: 82751 - DNA, 120 bp, synthetic construct
  source 1..120: mol_type = other DNA
gacatagtcctatccctcatgaagctaaatgtgagccaaagccagggaagttggcaaaaatcaaatggtaataaatgagacggtgatttaggaaagagagatccatgtagaacctgcagg

SEQ ID NO: 82752 - DNA, 120 bp, synthetic construct
  source 1..120: mol_type = other DNA
tttttattttttaaaatcagtaatctatgtgtccaaagcataaaccaggcatgggcatagaccagaagccaagctgggataaacagggggttgctttgttcctgtctgatgtgagatggg

SEQ ID NO: 82753 - DNA, 120 bp, synthetic construct
  source 1..120: mol_type = other DNA
ttctatgaaatgtctgctgagatacctctgcccaattttcttcttggtagttgataaattcttatttgcaagagctgtatataaaaggtaattagccctttgattttgatggcagttgta

SEQ ID NO: 82754 - DNA, 120 bp, synthetic construct
  source 1..120: mol_type = other DNA
atgtggatgcactcaccaacctggaatctctccaaacctctttgttcaggatcttacagaggttccattatttaggtatgattgatcaaatcactggctgttggtgattaactcagtccc

SEQ ID NO: 82755 - DNA, 120 bp, synthetic construct
  source 1..120: mol_type = other DNA
atttgatgttccagcatcttgagtgggtgccattattctgtgacacctggatcctggggttccataagctggggttctaggatgtccattcttagttgagtctcatttcctgtcatatcg

SEQ ID NO: 82756 - DNA, 120 bp, synthetic construct
  source 1..120: mol_type = other DNA
aaaataatttcaagtttaacaaacacaaggaaaccgcagggtccatgtcaaagctgatgagctatttctgaaactcgtgcagaattgtggtttgtgtggtctatgtcacggcacccttga

SEQ ID NO: 82757 - DNA, 120 bp, synthetic construct
  source 1..120: mol_type = other DNA
cctttcaggactaaaactgtgtgaactcctggttgatagtactagaaacttggctagaaatgtaatcaggttttatatacactagtaattatcctgcaaatatattaaaacctgaaagtt

SEQ ID NO: 82758 - DNA, 120 bp, synthetic construct
  source 1..120: mol_type = other DNA
tctttattttgccaattagctttggaattatttttatcaacctttcccctgaccctaatccagttagtatttgactggacaattgacaatattttcacatggcatccttctatccaatag

SEQ ID NO: 82759 - DNA, 120 bp, synthetic construct
  source 1..120: mol_type = other DNA
ttagtagaaacagggtttcaccatcttggccaggctggtcttgaactcctgacctcatgatccatctgcgctggcctcccaaaagaactgtaactttttattagttaggaagaaaataaa

SEQ ID NO: 82760 - DNA, 120 bp, synthetic construct
  source 1..120: mol_type = other DNA
gaaccaacccaaatgcccatcaacgatagactggataaagaaaatatggcacatatacaccatggaatactatgcagccataaaaacagatgagttcacgtcctttacagggacgtggat

SEQ ID NO: 82761 - DNA, 120 bp, synthetic construct
  source 1..120: mol_type = other DNA
acaggatgagttgccagaaaggcaggagaaaaacaaggggaatggtgccccagctgctaagagagaagggtattttaagagattataatagattgcattgaacaatgctaacacttcagt

SEQ ID NO: 82762 - DNA, 120 bp, synthetic construct
  source 1..120: mol_type = other DNA
ttagtaagtgtgtgacagtgatgtacgttgttttactttgcttgattatgaatgctagtagtggtgaggcttttatccatgaagactcgctgtctgcattttcccctagaatcagggcat

SEQ ID NO: 82763 - DNA, 120 bp, synthetic construct
  source 1..120: mol_type = other DNA
accagtaccaagatacatcactaacggctttccactatgtatctgaatcagatattaaattgtctttacttaaacctcatgtgccctgactctattgagggtagctatgtattttacaac

SEQ ID NO: 82764 - DNA, 120 bp, synthetic construct
  source 1..120: mol_type = other DNA
tgctgggtgaaggagtttgggcttatctttgttgctgagaagccattttgaagggaggactaacatcaacaaaggtgaaatgtgacagatttcaagctgaatggcaggcagaatggcagt

SEQ ID NO: 82765 - DNA, 120 bp, synthetic construct
  source 1..120: mol_type = other DNA
gatttagtgaaacacacacttttcagctaatagcacatcctgatctttagttcacaaatctcttctcgttttgttttctattttatcattcaccctccaactgccccccgaaccatgggc

SEQ ID NO: 82766 - DNA, 120 bp, synthetic construct
  source 1..120: mol_type = other DNA
tcgtcaactgaaaattactacacaagccataggcctctgtttctttttattttattttattttttttttgagatggagccttgctctgtcgcccaggctggagtgcagtggcacgaactc

SEQ ID NO: 82767 - DNA, 120 bp, synthetic construct
  source 1..120: mol_type = other DNA
ctacagagtgctgctgcagcagaatgggcacagaagaggggtgttgctatgttcccccagttctcaaggtggcaccccagagtggcctccaagagtgaattgggaaaggaatttggaggt

SEQ ID NO: 82768 - DNA, 120 bp, synthetic construct
  source 1..120: mol_type = other DNA
tgagttcctgcagtacttgttgtctgtaccactcacctggcacttatttattattgttgtggaagacagactcaaagacagcctcccttcatgatcctcacctcttggaattcatgccct

SEQ ID NO: 82769 - DNA, 120 bp, synthetic construct
  source 1..120: mol_type = other DNA
gaatacaattgtatattagtcatttttgtataagcctcacttctttgggtgagcagggatcatattctgtctgtgtcctcatgtctagaacagtgtctggctcatagctggtgtccagta

SEQ ID NO: 82770 - DNA, 120 bp, synthetic construct
  source 1..120: mol_type = other DNA
ttccacttcaccatccagaagtttataatttagctgtggaactatgactaaacagctacagaataagaagagagcgtgtaactgcactgaattaggtatcacagaggctaagtgccctgg

SEQ ID NO: 82771 - DNA, 120 bp, synthetic construct
  source 1..120: mol_type = other DNA
aagggatccatgatgaatgtgtcattagttggcaagaagagcagacacagagagaatcagagatgcatgtgcagccacgatgtattggaacaggtgtccatgacccatgctgctgagagg

SEQ ID NO: 82772 - DNA, 120 bp, synthetic construct
  source 1..120: mol_type = other DNA
aaaaagaagaaatataaattgtatttctgaatccaagtcacctgtgggggtgtagccagcattaaaataatcgccaggacccatgcaggcatctatctctgaatgaggcagtgcagcata

SEQ ID NO: 82773 - DNA, 120 bp, synthetic construct
  source 1..120: mol_type = other DNA
gacccatttgctcccactatctcatttcttgacctcagatggtaatcaactgatcaggaagacaatttccctagggttgagtgtggtccctgggttatgatttatggctataccttatgt

SEQ ID NO: 82774 - DNA, 120 bp, synthetic construct
  source 1..120: mol_type = other DNA
catcccatcttctaaagcagtcatttctattccaagtcatccaggtgattcagccagggatcaagtccacatggtacttgggttgatatgagtcctgtacttagaggagagtaggtaact

SEQ ID NO: 82775 - DNA, 120 bp, synthetic construct
  source 1..120: mol_type = other DNA
cacccctgggttattcactctgcctcagtaattctgaaactgtcagagtctgaggaccactttttaccaccaaaaactgctgcagagccttgcgttttgttacttttagtattcataaat

SEQ ID NO: 82776 - DNA, 120 bp, synthetic construct
  source 1..120: mol_type = other DNA
attagtcttacaaaaccatcagacacttaatgatgagaaaactgaggccaagaagagggaagggacaagaagaagaatgtaagctggaatcctctagaccagtggttccaagcttgcatc

SEQ ID NO: 82777 - DNA, 120 bp, synthetic construct
  source 1..120: mol_type = other DNA
tcattgtcacaatatcctaataggcagattttataaaaatctgcaaataaggaaatcaaggcacaggaaggaataaggcttgccaaagtcacacctttcagcagtggagcgtggaggcca

SEQ ID NO: 82778 - DNA, 120 bp, synthetic construct
  source 1..120: mol_type = other DNA
aacctcctgggctcaagggatcctcctacctcagcatcttgagtagctgggactacaggtgtttgtcaccatgcctggctaattttctttttttttttttttttttttttgtagagatgg

SEQ ID NO: 82779 - DNA, 120 bp, synthetic construct
  source 1..120: mol_type = other DNA
accagcaaatcaaattcatcccgttgcctcaagatgtccccatcctggctctccaattgtgctaagaggatgctctgctgttcctctagaaacttcctcaggtgtgcgaactcagaaatc

SEQ ID NO: 82780 - DNA, 120 bp, synthetic construct
  source 1..120: mol_type = other DNA
tttggatcaggactttccccctttatcctgtgccattagaggctgtgacttggttttcccacttgagtctttcttcaggtttaacattctattgtgttttgcttcgggtaagtggtatct

SEQ ID NO: 82781 - DNA, 120 bp, synthetic construct
  source 1..120: mol_type = other DNA
ccacgcacaactgcatctcatcatcctcacagaagaagtagatcttctctccgtgctcttggcagacatcctcctctcccaaacccagtgtggacaccagctggaggcgctcaatgttct

SEQ ID NO: 82782 - DNA, 120 bp, synthetic construct
  source 1..120: mol_type = other DNA
agcaatttaaaagtatgatcttatttctgtgtctgctctgcaacatcagtgctattaggatctccatttcataaatgagaaagctgaggcccagccaggttattcagcttgccctaggca

SEQ ID NO: 82783 - DNA, 120 bp, synthetic construct
  source 1..120: mol_type = other DNA
gtgtgggaggagcgtagggctttaagccaggagactgggatcgtccttaacgtgatactttctagctttgtgacctttggaaagtcactttacatttggaaagtcagtttacatttcttt

SEQ ID NO: 82784 - DNA, 120 bp, synthetic construct
  source 1..120: mol_type = other DNA
tctctgtctcttagccttgcagccgtttccctctgcgattcatgtaagtgtgactcgatttcagggaaagggaactcgcgtgggctgaggagaccggagtggacgggctggggaaggcac

SEQ ID NO: 82785 - DNA, 120 bp, synthetic construct
  source 1..120: mol_type = other DNA
ctcttgtcatccagtcaccaggtctggaagtggttaccttagaaacatctcccaaatctttaattctgccttatcctcacagccaggttctccctatctcttgcgcagactttgcagtct

SEQ ID NO: 82786 - DNA, 120 bp, synthetic construct
  source 1..120: mol_type = other DNA
acagtaggataatttataatcctctgggtatatacccagtaatgggattgccaggtcaaatggtatttctcattctagattcttgaggagttgccacactgtcttccacaacggttgaac

SEQ ID NO: 82787 - DNA, 120 bp, synthetic construct
  source 1..120: mol_type = other DNA
tctgaggcccttcttctgttccatttgtctatatgtctgttttgataccagacatatttgatatcatatactacagccttgtagtatagtttgaagtcaggtagcatgatgcctccagct

SEQ ID NO: 82788 - DNA, 120 bp, synthetic construct
  source 1..120: mol_type = other DNA
gctgcacaaaggcatttgggatctcagaccatgagcactagaagtggttctgatgtcttgcaatccaagatccatcttgtatatcacattttacagagcagaaaacttaggaccagaaaa

SEQ ID NO: 82789 - DNA, 120 bp, synthetic construct
  source 1..120: mol_type = other DNA
taaccatgtctgccttttatcccttgaagactcagatcgaaagcaagaagcatcaggtggaaacagcttttgagaggctgcagcaggagctggagcagcagcgatgtctcctgctggcca

SEQ ID NO: 82790 - DNA, 120 bp, synthetic construct
  source 1..120: mol_type = other DNA
gttcatattttaagggaaaagtgatgtacagaatccctgacaggaaggacttatggaaactaaatgtatgttcttgtctttcttttgcaggatgtcagagtcaaccagagcaggtagggc

SEQ ID NO: 82791 - DNA, 120 bp, synthetic construct
  source 1..120: mol_type = other DNA
gatctctgtccctcagcccctacagaaccaaacattctcctaaaggggcttacctccaattcttgagaagtgattatccttagttcctcttaggtttaactgaaatgcctactattttag

SEQ ID NO: 82792 - DNA, 120 bp, synthetic construct
  source 1..120: mol_type = other DNA
cagagcaataaaatgcatgaattctggagcttgattgcttgagttctcgattccagttcttgctagctctgagacactgggcaagttattaagcctctgtcccacaatattttcttcatc

SEQ ID NO: 82793 - DNA, 120 bp, synthetic construct
  source 1..120: mol_type = other DNA
ggaagacaggaagtcagtgaggtacacccggcagaagaagagcctgccagacagccccctgcgcttcgacggcctcccggcggttctgggcttcccgggcttctcctccgggcgccaccg

SEQ ID NO: 82794 - DNA, 120 bp, synthetic construct
  source 1..120: mol_type = other DNA
caatcctgtcccttcttttagtcaggatatccctgatgacagacagtgggacaatcaccaggccccattgtttaagaaaacgaggcttttgctcaggtctaactaacctctcaaatattt

SEQ ID NO: 82795 - DNA, 120 bp, synthetic construct
  source 1..120: mol_type = other DNA
tgaggtcaggagtttgagcctggccaacatggtgaaaccccatctccactaaatatacaaaaattagctgggtgtggtggcagaccagctacttgggaggctgaagcaggggaatcactt

SEQ ID NO: 82796 - DNA, 120 bp, synthetic construct
  source 1..120: mol_type = other DNA
gacctattttgtttttctcatgtggtggttgagaaaactggcacacagttaaatgaacttgtctaacaattttcacagctggtccttgtgacctgctgaagtagaatctacctgtcctgg

SEQ ID NO: 82797 - DNA, 120 bp, synthetic construct
  source 1..120: mol_type = other DNA
gagtgttgactcagtcatacctctcagttcttggaacactatcatcatcagtccatgcaaggtcttctggtttcatttgtattttctcctctctccccaatttttattcccattctcctc

SEQ ID NO: 82798 - DNA, 120 bp, synthetic construct
  source 1..120: mol_type = other DNA
gcaagtattactaatctattaattactaaactccctttaatccaagagtatttgttctttgtgctcaggatttctttggctatttgggctttttttgggaggggggggttggtccatatg

SEQ ID NO: 82799 - DNA, 120 bp, synthetic construct
  source 1..120: mol_type = other DNA
ggtgttgtggtgtatctgtctggttttagtattagggtgatgctgacctcatataattagttagggaaaattccttcctctttgacttgtttgaacagtttcaggaggatcggtattagt

SEQ ID NO: 82800 - DNA, 120 bp, synthetic construct
  source 1..120: mol_type = other DNA
gggattacaggtgtgagccaccatgcctggccttctatcttaatttgttcattgacccagtggtcattcaggaccatgtggtttaatatctatgtatttgtatagtttccaaagttcctc

SEQ ID NO: 82801 - DNA, 120 bp, synthetic construct
  source 1..120: mol_type = other DNA
tgtgtttttatgatggtaaatatcatcctatcacttccaggtttaggactcccttgagcatttctcgtaggactgatctagtggtaacaaattccctcagtatttgcctgtctgggaaag

SEQ ID NO: 82802 - DNA, 120 bp, synthetic construct
  source 1..120: mol_type = other DNA
ctgtcacccaggctgcagtgcagtggcacgatctcagctcactgcaagctccgcctcccgggttcacgccattctcctgcctcagcctcccgagtagctgggactacaggcacccaccac

SEQ ID NO: 82803 - DNA, 120 bp, synthetic construct
  source 1..120: mol_type = other DNA
agtaccctgacccactggtagcatgtgtgggtgggtgtcagttgtggtggtattggtagattgagttggactgacctcagatcctgacaggaatgattcagatgccagtggtggtagatt

SEQ ID NO: 82804 - DNA, 120 bp, synthetic construct
  source 1..120: mol_type = other DNA
cagcctgggcaacagagcgagactccgtctctattaaaaaaaaaagagaaaatctatggctctttctgttctcccataaccatactctaaatgcactctttctgtacccagtttgtccct

SEQ ID NO: 82805 - DNA, 120 bp, synthetic construct
  source 1..120: mol_type = other DNA
aatatgctctttgccactagcgtaattttacaggtagtttcgtataatcctcccttttccatctttaagatggcaatttaaaaaatcagaaaggactgctgggcgcgatggctcacgcct

SEQ ID NO: 82806 - DNA, 120 bp, synthetic construct
  source 1..120: mol_type = other DNA
agatatagacctacaaatacagatctccaggctgttcattcaacaagtctttattgagcacctactctgtgcccagcactgcactaggtgccatgagaatacaagagtagtataagatgt

SEQ ID NO: 82807 - DNA, 120 bp, synthetic construct
  source 1..120: mol_type = other DNA
gtctgtttaaaatgccagggaaggtgggcagcagagtggatttgtgcaagaaggaacctggggggtttaaggacagcaaaatgatcttaggcgtaattgactggtttttctgaggtcttg

SEQ ID NO: 82808 - DNA, 120 bp, synthetic construct
  source 1..120: mol_type = other DNA
gccgactgtgggtccagggtgacgctcactgtggggacaagggaaaaaaaaaaaaacagcatcactgttttgttttgttttttaagtcagagggaataaaatttattttggcagatagcg

SEQ ID NO: 82809 - DNA, 120 bp, synthetic construct; identical to SEQ ID NO: 27558
  source 1..120: mol_type = other DNA

SEQ ID NO: 82810 - DNA, 120 bp, synthetic construct; identical to SEQ ID NO: 27559
  source 1..120: mol_type = other DNA

SEQ ID NO: 82811 - DNA, 120 bp, synthetic construct
  source 1..120: mol_type = other DNA
tcttcttactttccttcatacttatctctcaatcctcatggcaattatgaaggggagaggaaaggtatgattatccccaaacaagtgacagaaaaacagtggcccaaagacaccagctga

SEQ ID NO: 82812 - DNA, 120 bp, synthetic construct
  source 1..120: mol_type = other DNA
gagttattgctggtcaggcggccacctgggaagactacattttccagatcccctacgacaaggtctggtcatgagactaagttccagccaatggaatgtgatagaaagcaatgaccataa

SEQ ID NO: 82813 - DNA, 120 bp, synthetic construct
  source 1..120: mol_type = other DNA
agggtgagatttgggaaacaaatggaattaacaaattgtggctgctgatgactgcttccaaaagtttgggaagagttgtgagctttactccagaggaataagacaagaagtcagaggcac

SEQ ID NO: 82814 - DNA, 120 bp, synthetic construct
  source 1..120: mol_type = other DNA
agcctcccaaagtgctggaattataggtgtgaatcaccacaccagcctcacctgtatttctctatcagacttctggaccctattttaggtctttttcttactatactttgacagccaaat

SEQ ID NO: 82815 - DNA, 120 bp, synthetic construct
  source 1..120: mol_type = other DNA
ctaatccacaagcatggaatatttttccatttgtttgtgtcctcttcaatttctttcatcagtgttttgtagttttcattaaagaggtctttcacctccttggttaacttcattcccagg

SEQ ID NO: 82816 - DNA, 120 bp, synthetic construct
  source 1..120: mol_type = other DNA
tcaagaccagcctggccaacatggtgaaaccctgactctaccaaaaatacagaaaatagccaggtgtggtgatgtgcgcctgtaatcccagctatttgggaggctgaggcaggagaatcg

SEQ ID NO: 82817 - DNA, 120 bp, synthetic construct
  source 1..120: mol_type = other DNA
gagtctgccttgctatctctccctcctagctattgccctgccattagcctgggactccaccttcctagagatcctgggtggctctgctgctgacagacagacccagccaccctaaacagt

SEQ ID NO: 82818 - DNA, 120 bp, synthetic construct
  source 1..120: mol_type = other DNA
cagctgttccagcaggtgttcctcccgctccctcaggaactgatgaccctgctcaaactcagccacaatgtactgcctctggtcctggagcttcttctgcagggggcaggaaggggagaa

SEQ ID NO: 82819 - DNA, 120 bp, synthetic construct
  source 1..120: mol_type = other DNA
tcaacatacacagttccccagaaaatcagaaccatttgatcagttccccccaaccccatctctaatcaagtacataatgtgctgcctgttttctaactacagttgtcccttggtatcagt

SEQ ID NO: 82820 - DNA, 120 bp, synthetic construct
  source 1..120: mol_type = other DNA
gatatcagcttctccctttgcctggaagccctgaattttgtctctgtccctccttagggtactcaggtggttcaggattttttcctgtggaaaaacaagcagtggcaacaggtggatgct

SEQ ID NO: 82821 - DNA, 120 bp, synthetic construct
  source 1..120: mol_type = other DNA
ccttgctgttgggagagcctcaacaccctttccttctatctgttggaaaatcgctgtaatgcaccaactgtaataaaaaatctctcactacctgctgggaaactcataatgatacacata

SEQ ID NO: 82822 - DNA, 120 bp, synthetic construct
  source 1..120: mol_type = other DNA
ctcgagaagcatcaggaagcttcaggagtctgactgtcagcatttccctttgtgagtatttccctgggctgttctatagtttgggtttaatttgcttcccctagaaggctggactctaaa

SEQ ID NO: 82823 - DNA, 120 bp, synthetic construct
  source 1..120: mol_type = other DNA
gttcagtggcctctgtcagtagtgacattaatgggacagaaataaaacccccagtctataagacccaagagtaaacaaaacagggatataacgtccactcattgagggtctagtacaata

SEQ ID NO: 82824 - DNA, 120 bp, synthetic construct
  source 1..120: mol_type = other DNA
cttcttccatgcaaaacaggacacctcatcacccaggctccatgctggggtttgatggtctctaaacctcctgaaactgtctaaaaattattgcatatgtactagatacctaaaattgtc

SEQ ID NO: 82825 - DNA, 120 bp, synthetic construct
  source 1..120: mol_type = other DNA
gccatcctcccacctcagcctcccaaagtgctgggattataggcatgagcaactgcaccatgtctaaaattattttcttaatggtatttactgaggttatgtatgagaatgcctatactt

SEQ ID NO: 82826 - DNA, 120 bp, synthetic construct
  source 1..120: mol_type = other DNA
aagggctttgtaagcggagtaatgctgacaaaagaaagggggcatatattctgctgatactgaccaaaagcaccctagccttagctatgacaaactttcacatatggggtgagcaataaa

SEQ ID NO: 82827 - DNA, 120 bp, synthetic construct
  source 1..120: mol_type = other DNA
gcggaggttgcagtgagctgagatcacgccaattgcactccagcctgggcaacaagagcaaaactccatctcaaaaaataaaaatgaaaaaataaaccagaagctagctgcaattctata

SEQ ID NO: 82828 - DNA, 120 bp, synthetic construct
  source 1..120: mol_type = other DNA
ccagattaatccccatattttaatctgagataagcaaactctccatggggtaaacttccgtgagacacctctaacaaacctggagaggccagaattcggggcaaaaagcaagtgatctgg

SEQ ID NO: 82829 - DNA, 120 bp, synthetic construct
  source 1..120: mol_type = other DNA
ggttaagaattttggactttatcctaacagccctgggaagccattgagggtttaagcagcaggatgttgaaagttattcaacagctagcagatgtttattaggtgccgactatgtgtcag

SEQ ID NO: 82830 - DNA, 120 bp, synthetic construct
  source 1..120: mol_type = other DNA
cacaaagaagatgcttcctacacatctgctgaaggaatgcgaacaatcttagccacctgccctttctctccagcaagatggtagtaaattggtagagagagaagcaatttcttcatattc

SEQ ID NO: 82831 - DNA, 120 bp, synthetic construct
  source 1..120: mol_type = other DNA
ttggtaacttaccatctatgagttagtgagatggagacatcctaaccattaatccagggaaagggaggaatctaagccatcagcaagggagttagtgcttttcatcaaatttgagacacc

SEQ ID NO: 82832 - DNA, 120 bp, synthetic construct
  source 1..120: mol_type = other DNA
gctgagatcacgccactgcactccagcctgggtgacagagcgagactctgactcaaaacaaaaaaaaaaaactgcacagacatcctcccctgccctgcatccggctagccccaacttacc

SEQ ID NO: 82833 - DNA, 120 bp, synthetic construct
  source 1..120: mol_type = other DNA
ggctgtaattgatatttttatctgtcttctctcccaccagaatgtgaacccaaaggtcatgcctcactgacctttttatctccaatatctggcacaaagtagggggtctgcaaatgtttg

SEQ ID NO: 82834 - DNA, 120 bp, synthetic construct
  source 1..120: mol_type = other DNA
agtcataaatcatgttagtacatgcccttgatacgatgggatgataatggcaatctacctctgtggtcttcctcccagttacccataagcccagtcttaggagaaaaacatcaaattcca

SEQ ID NO: 82835 - DNA, 120 bp, synthetic construct
  source 1..120: mol_type = other DNA
tacttctggttccgcagactagaatggatgggagtctgagtaggataccagaaagcgagaaagacccaagaggagggggagaatgtaaggacaagcaaacaggagggatctggctggcag

SEQ ID NO: 82836 - DNA, 120 bp, synthetic construct
  source 1..120: mol_type = other DNA
attcgacggaaggaaaaactgaggttccaggagcttaagggtctgggcccagttcaggggggttgttttcgctcctcgacgctgaatttagaaaccagaggctacaaagcgggccgagac

SEQ ID NO: 82837 - DNA, 120 bp, synthetic construct
  source 1..120: mol_type = other DNA
ccactgcactccagcctggggacggagcgagactccgtctcaaaaaataataataaaataaaaaataatgctgtgccactaagcgttttctccctgtcctgaggtctttggcctattcac

SEQ ID NO: 82838 - DNA, 120 bp, synthetic construct
  source 1..120: mol_type = other DNA
cactacatcttgattgatacagcttctcaagtccaagtaagggtaacagaaatggatgctgggaacacaatttctgctttgtgttggaggagacagctttggagcagctttgtagctttg

SEQ ID NO: 82839 - DNA, 120 bp, synthetic construct
  source 1..120: mol_type = other DNA
ttctcagtttatcaccgttagctcatacacttttgtccttgcaatcatacatctgcctgactgtctatacaactacacaaatgtccccatttctttgggttttcgtttctgaaagttccc

SEQ ID NO: 82840 - DNA, 120 bp, synthetic construct
  source 1..120: mol_type = other DNA
tggcctcccaaagtgctgggattacaggcttgatacaacgcgcccggccgacactgtagcattttctaataggcctacgtaaaaattatctaattctctagggtagtttaactttgattt

SEQ ID NO: 82841 - DNA, 120 bp, synthetic construct
  source 1..120: mol_type = other DNA
ctcccaaagtgctgggattgcaggcgtaagccaccactcccggctgggttcaattttttaaggagaatacttcaaaagcagtgctgtgtacctatggtatcacatttagaggtatatgat

SEQ ID NO: 82842 - DNA, 120 bp, synthetic construct
  source 1..120: mol_type = other DNA
aagtgctgggattacaggcgtgagccactgcgcctggccagtaacataagtttttaaaaggtttttgcttcaggtactctcctattttcctgctccacatttacagcaaaattagaaaat

SEQ ID NO: 82843 - DNA, 120 bp, synthetic construct
  source 1..120: mol_type = other DNA
tttcttcttattattatttttgtagagatggtgtctagctatgtcgcccaggcttgtctcaaactcctggcctcaagcaatcctactgcctcaacctcccatagttctaggattaaagac

SEQ ID NO: 82844 - DNA, 120 bp, synthetic construct
  source 1..120: mol_type = other DNA
ctttcggaggccaaggcaggcggctgggaggtggaggttgtagcgagctgagatcatgccactgcactccagcctgggcaacattgagcactgagtgagcgagactccgtctgcaatccc

SEQ ID NO: 82845 - DNA, 120 bp, synthetic construct
  source 1..120: mol_type = other DNA
ctattggctatttttagttttcttttggatttgttaccaaaatgccaagggtttggtctaggttgctcactgcacagtaagccaatcactgagacaacaagtattgtgagggaagaaggc

SEQ ID NO: 82846 - DNA, 120 bp, synthetic construct
  source 1..120: mol_type = other DNA
gagaacattcatctgaaactgactgtgcaccctgagctcagacttcccctacctctagaactatgagaaataagtggttgttatttaagccacccagtctatggtatttttgtcatagag

SEQ ID NO: 82847 - DNA, 120 bp, synthetic construct
  source 1..120: mol_type = other DNA
gttagagaagtccttacagagaaagtgatatttcagcaaatgcctgaaagaggttagagagccagctttgagaatatctgagagaaatgtgttctaggcaacgggaagagtctgcacaaa

SEQ ID NO: 82848 - DNA, 120 bp, synthetic construct
  source 1..120: mol_type = other DNA
ttcctgatgcacactcttgcgttgcagcctgggactctacatttcaagcaagatattcttacacataacaaagcttgaaaagcattgctttaagctttcctttgtctctccaagtacctc

SEQ ID NO: 82849 - DNA, 120 bp, synthetic construct
  source 1..120: mol_type = other DNA
gaagtgctgggattacaggtgtgagccacctttcctggcctagtaaatattattaatctattcccttaaccataaatgtctagaggctaggaatacctatatttctggaaatgcaccccg

SEQ ID NO: 82850 - DNA, 120 bp, synthetic construct
  source 1..120: mol_type = other DNA
atttgtagctaatagcttcttgggcttttggtgctgattggctggagatgggtagctacatcatgaacaaagggctttcgttctctttcccaggctgtatagggtatcaagaacttgtaa

SEQ ID NO: 82851 - DNA, 120 bp, synthetic construct
  source 1..120: mol_type = other DNA
tatcataggttctggtgatacagtaatgaaccaaacaaaggccccaaccttcatgagtttatgtctcagtgaaatcccatatgcaatactatgaatgtatctctttattttttagtacac

SEQ ID NO: 82852 - DNA, 120 bp, synthetic construct
  source 1..120: mol_type = other DNA
cacctgtgaaatcatcaccacaattaaaataatgaatatatctgtcaccccccatagcttttccctgctcctttgaattcaacccatcctataatccatccccaggcaaatactggtctg

SEQ ID NO: 82853 - DNA, 120 bp, synthetic construct
  source 1..120: mol_type = other DNA
aaaactaataccttcctctaagcttttcccaaaggccttgtattaaggcaaacagaaggacagacgcctaaggaaacaattagattaaaggagttttcttcccactcaaagttgttacca

SEQ ID NO: 82854 - DNA, 120 bp, synthetic construct
  source 1..120: mol_type = other DNA
cttctctcaaacaaataaagtatagctgagacctggccggaccacatttcctagccctctttgcagttagatgtagccatgtgactagggtcttgacaaaggaatataagttgtgataaa

SEQ ID NO: 82855 - DNA, 120 bp, synthetic construct
  source 1..120: mol_type = other DNA
cctcctcagcctcccaaagtgttgggattacaggcgtgagccaccgtgcccagccaggtgttctttttaactagataaactgattcaaagattcatatgaaaaataaagaaagaatacca

SEQ ID NO: 82856 - DNA, 120 bp, synthetic construct
  source 1..120: mol_type = other DNA
catgtctttcctgtcagattggcaaaaagttaaaagtttggcaacaccctctgttgacaaggctatggagaaacaagcactttgatttattggttataggagtccagtttgggacaaacc

SEQ ID NO: 82857 - DNA, 120 bp, synthetic construct
  source 1..120: mol_type = other DNA
actttaggtgtgattgacatgcatttgtagatgtgttagtgcagattgcacttcatggcacaaggtcctatttggagccataacagcagcttcttaatgaaagaaggaaggtggcaatac

SEQ ID NO: 82858 - DNA, 120 bp, synthetic construct
  source 1..120: mol_type = other DNA
tgctttgttagtgttatgagtatgaagatgaatagattttgagttgcctatcaaaactctgtttttcctacaaacacttgtttttttgtgaacatttccatatgaattcaaggacctgct

SEQ ID NO: 82859 - DNA, 120 bp, synthetic construct
  source 1..120: mol_type = other DNA
tagactgggacatgagtgacttttttactgtgatgtttcaaaacatgtttgaaaaaaattagtttaaaccatgatgaagagatttctcaggcagtgtatgaataacagacctgtggatga

SEQ ID NO: 82860 - DNA, 120 bp, synthetic construct
  source 1..120: mol_type = other DNA
cgagactccgtctcggggaaaaaaaaattacatatatgagcaccctttgaaatgcttacagcagagctagctgcctaaaattaacattcatctaacactgcaagccagaacgtgttctga

SEQ ID NO: 82861 - DNA, 120 bp, synthetic construct
  source 1..120: mol_type = other DNA
tgagtttgtagatgagtatacacctctgaaaccatcatcacagcaaaaacacgtctatcactttccaaactttccacacaccctctttattgttattattttgtgtgtgtgataagaaca

SEQ ID NO: 82862 - DNA, 120 bp, synthetic construct
  source 1..120: mol_type = other DNA
gcacttttggaggccgaggcgggcggatcacagggtcaggagatcgagaccatcctggcacacacagtgaaatcctgtctctactaaaaatacaaaaaattagccgggcgtggtggcggg

SEQ ID NO: 82863 - DNA, 120 bp, synthetic construct
  source 1..120: mol_type = other DNA
tgttgccaaggtatgccctcaaagacttgggctcaagagatacttcacccttattttcccaaatagctgggactacaggcacataccactgcacccaccttctatttttgttttattaat

SEQ ID NO: 82864 - DNA, 120 bp, synthetic construct
  source 1..120: mol_type = other DNA
ttctgaagggatacaaggatagcattcagaattctcaatctatgggagaagatgagattcaggccctggtggtaagagaggtctctagtaaatgttctgtatgaatgtgtgtatgtgtgt

SEQ ID NO: 82865 - DNA, 120 bp, synthetic construct
  source 1..120: mol_type = other DNA
gaaaggagctaaacattccacttggtagggggtggggacacactagttacaattagataaatgaatgtaataataaacttggtatatgtgttggcaggtgggcataggtgctggggaaga

SEQ ID NO: 82866 - DNA, 120 bp, synthetic construct
  source 1..120: mol_type = other DNA
aacaagaaaagaaaagaaaaaaagaaactgcaacagagggaggacaggtccgggtccatcagaataattctctgttcagtcctggtgtatacccatttctcaatgatcccacagtagaga

SEQ ID NO: 82867 - DNA, 120 bp, synthetic construct
  source 1..120: mol_type = other DNA
aaaatgaggttgacacagaatgggtaatacttcttgccttgaagtgttttgtccgctttagcaaaattattccagctttatattgattagtgttcacatggcatttctttttctgtcctt

SEQ ID NO: 82868 - DNA, 120 bp, synthetic construct
  source 1..120: mol_type = other DNA
catagttttcaagtcttgtgataagaaaagtttgctatgtctactttttggactttttttgaggctttctaggttatatgttgtaaatttttggacagtttcagacacttgaaaagaagg

SEQ ID NO: 82869 - DNA, 120 bp, synthetic construct
  source 1..120: mol_type = other DNA
gattctcctgccttggactcccaaagtactgggattataggcataagccatagcacttcgcctataatctttaagtaacaaaaaatgttgttgtcttatttaatatttttctctcccaaa

SEQ ID NO: 82870 - DNA, 120 bp, synthetic construct
  source 1..120: mol_type = other DNA
atcttaattttcatttaatctgatatatatccccaaataattcctttagaggttgtaacagcgaggaaggagccaagatggccgaataggaacagctccggtctacagctcccagcgtga

SEQ ID NO: 82871 - DNA, 120 bp, synthetic construct
  source 1..120: mol_type = other DNA
tccccagtctagcaaggcaggccaacattcagattgaggaaatacagagaacgccacaaagatactcctcgagaagagcaactccaagacacataattgtcagattcaccaaagttgaaa

SEQ ID NO: 82872 - DNA, 120 bp, synthetic construct
  source 1..120: mol_type = other DNA
agacacacataggctcaaaataaaaggatggaggaagatctaccaagccaatggaaaacaaaaaaaagcaggggttgcaatcctagtctctgataaaacagactttaaaccaacaaagat

SEQ ID NO: 82873 - DNA, 120 bp, synthetic construct
  source 1..120: mol_type = other DNA
aattgatagaccgctagcaagactaataaagaaaaaaagagagaagaatcaaatagacgcaataaaaaatgataaaggggatatcaccaccgatcccacagaaatacaaactagtatcag

SEQ ID NO: 82874 - DNA, 120 bp, synthetic construct
  source 1..120: mol_type = other DNA
tttgcagatggcatgattgtatacctagaaaaccccgttgtctcagcccaaaatctccttaagctgctaagcaacttcggcaaagtctcaggatacaaaatcaatgtgcaaaaatcacaa

SEQ ID NO: 82875 - DNA, 120 bp, synthetic construct
  source 1..120: mol_type = other DNA
aggaactcaaacaaatttacaagaaaaaacaaacaaccccatcaacaaatgggcaaagatatcaacaggcacttctcaaaagaagacatttatgcagccaacagacacatgaaaacatgc

SEQ ID NO: 82876 - DNA, 120 bp, synthetic construct
  source 1..120: mol_type = other DNA
tcaggaagcagcccttaccatacatggactcttcccaggccttgatctttgactttccagcctccagaattgtgagaaatagatttctgttgtttgcaagccacatagtctatggtattc

SEQ ID NO: 82877 - DNA, 120 bp, synthetic construct
  source 1..120: mol_type = other DNA
ctttcaatttaatctatgcagccagctttcacagtcaggcgtgagtatctggcttttccaggtgcacagtgcaagctgttggtcaatctaccattctgagatttggagcaccgtggccct

SEQ ID NO: 82878 - DNA, 120 bp, synthetic construct
  source 1..120: mol_type = other DNA
ttactgtattagtgcgttttcatgctgctcataaagaaatacccaagactgagatgaaaaagaggtttaactggacttagaattccacatggttggggaggcctcagaatcatggcggga

SEQ ID NO: 82879 - DNA, 120 bp, synthetic construct
  source 1..120: mol_type = other DNA
ttgtttaaaacaccttacgagcatcctaactagtgcaatatggcaagaaaatgaaataaaagaccaataaaagggccaagtgtggtgcctcatgcctgtaatctcagcactttgggaggc

SEQ ID NO: 82880 - DNA, 120 bp, synthetic construct
  source 1..120: mol_type = other DNA
agaagggggtgagggtgggaggcaaggattaaatagaaaaggggcataaggaaagtttttagggaaaagaaactgtcctctatctgggcaatgtggtagttacatgactataaataatta

SEQ ID NO: 82881 - DNA, 120 bp, synthetic construct
  source 1..120: mol_type = other DNA
gggaaaggactctaaagcagtggaggagcctagcagggggttcttgacatgcattcggtatttaatacattttgtgggactgccaaaaactaatggcctcctcatgattaaaaacataag

SEQ ID NO: 82882 - DNA, 120 bp, synthetic construct
  source 1..120: mol_type = other DNA
agggttggggattgcccactcccctgagttttggttctcccaaccttcttcctggatacttgtgacataatcccacttctcactcccattgggtgccgggtttttagagaagccaatcag

SEQ ID NO: 82883 - DNA, 120 bp, synthetic construct
  source 1..120: mol_type = other DNA
gaacagttcgcctacgatggcaaggattacatcgccctgaacgaggacctgcactcctggaccgccgcgaacacagcggctcagatctcccagcacaagtgggaagcggacaaatactca

SEQ ID NO: 82884 - DNA, 120 bp, synthetic construct
  source 1..120: mol_type = other DNA
gagaggagcagagatacatgtgccatgtgcagcatgaggggctgccagagcccctcaccctgagatggggtaaggaggggtgtaagttgtctcctctcagggaaagcaggagaccttcag

SEQ ID NO: 82885 - DNA, 120 bp, synthetic construct
  source 1..120: mol_type = other DNA
atgattctgttgaggggttctctggatttagacatcttgaccatgtggtaggctgttcagagtgtcaccaggtacagtgactgccctggatttgtttatgattattttctcctgtagctt

SEQ ID NO: 82886 - DNA, 120 bp, synthetic construct
  source 1..120: mol_type = other DNA
aagcccgtgcagcttttaccctatttccagggctctttcttggattgtattttctatcttttccccaacctttttaaaggaactagattctgaaattagcagagaagagggatgccacaa

SEQ ID NO: 82887 - DNA, 120 bp, synthetic construct
  source 1..120: mol_type = other DNA
ttgattttgaatgagatagttttaagcagaataaagacatgccacaacttctcttttaaaaggatcactgtagctgctctgctgagaacagaatccaaaggccggcgatgagcaaggcag

SEQ ID NO: 82888 - DNA, 120 bp, synthetic construct
  source 1..120: mol_type = other DNA
aaacctggtgctcagccagatttgatatcactgagatcagtagttggagaatgcccaggatggggaggggtctcagacccacatttaagtgttgctttattctgggttttttatttattt

SEQ ID NO: 82889 - DNA, 120 bp, synthetic construct
  source 1..120: mol_type = other DNA
attagaagcccacatgtggttatctaaattgtgcagccaaagcctcttgcagtgtttaactgcaataatgttggggaaagtgaatttttctcctttgtagaaggaggtagtccctgcctt

SEQ ID NO: 82890 - DNA, 120 bp, synthetic construct
  source 1..120: mol_type = other DNA
gggcaggatttagaaaaagggaagttgcttttatcttgagggcgtttgccaaatctggaaaaatcttagctttggttttctcagcttcatatggtatagtgcaaaggaggtaattctcag

SEQ ID NO: 82891 - DNA, 120 bp, synthetic construct
  source 1..120: mol_type = other DNA
attaactttgattttaaaatttttaacttagttgaattaaaaattgaaaagtcatgatctattgacttttgctttggattatgatggaataacaaggaccagatttactctcatgcctta

SEQ ID NO: 82892 - DNA, 120 bp, synthetic construct
  source 1..120: mol_type = other DNA
caggagaattgcttgaacccaggaggcagaggttgcagtgagccaagttctcaccattgcactccaggcaacaagagggaaactctgtctcaaaataataataataataataaagctcat

SEQ ID NO: 82893 - DNA, 120 bp, synthetic construct
  source 1..120: mol_type = other DNA
agatctgcacactgaaagccataacagtgacaaaaaaaattgaagaagccacaaataattggaaagatatccttgttcttggatcagaagaatcatattgcgaaaatgtccatactaccc

SEQ ID NO: 82894 - DNA, 120 bp, synthetic construct
  source 1..120: mol_type = other DNA
catcagagagctgcaaatcaaaactgcattgacatatcaccttacatcagtaagaatagccattaacaaaaagacaagagataatcagtgttggtaaactgtagagaaagggaaccctta

SEQ ID NO: 82895 - DNA, 120 bp, synthetic construct
  source 1..120: mol_type = other DNA
accaacttgcagttatagggtgaataagttctggaaacctaatgtacagtgtgaaaggaaaaataatctcaggtccccaaaatcactaagccaaagtgatttgggcttacaacaggatgg

SEQ ID NO: 82896 - DNA, 120 bp, synthetic construct
  source 1..120: mol_type = other DNA
tgaagtgttacctcacacctgtcagaatagttattatcaaaaagataagaggtaataagtgttaatgagggtgtagaggaaagggaatccttatacatggttggtgggaatgtaaattgg

SEQ ID NO: 82897 - DNA, 120 bp, synthetic construct
  source 1..120: mol_type = other DNA
taagccagacacagaaagacaaatattatataacctcatatttgcaatctaaaacaagtgaaactcctagaaacagaggtagaacggtggttaccaggggcttgagtgggagaaatgggg

SEQ ID NO: 82898 - DNA, 120 bp, synthetic construct
  source 1..120: mol_type = other DNA
ggaattcttgcacactgctggtaagaatgtaaaatggtgcagcctcttaaagaatagcttggcagttcctcaaagtttgaatgtagaatgagtatttgacccagcaattccattcccagg

SEQ ID NO: 82899 - DNA, 120 bp, synthetic construct
  source 1..120: mol_type = other DNA
gctagaggccagctggcagcaaggcagaatcaaaatggacaaaatccccaaaatagtgagtaatgttagaatggaagccaggaaatcctgactgcaagggatttagggaaattattaaga

SEQ ID NO: 82900 - DNA, 120 bp, synthetic construct
  source 1..120: mol_type = other DNA
agatttattgtttttgtatattatataatgccattgatctgcctaaatgcattcttttaaatacctataaaaaggagggccagaagcgagttttattcacagaggacaaataataataca

SEQ ID NO: 82901 - DNA, 120 bp, synthetic construct
  source 1..120: mol_type = other DNA
tccacagtagctaggactataggtgtgaaccactacaactgcctaattttttttttgtattttgtagaaatcaggttttgccatgttgctcgggctggtcttgaacttctgggctcaagt

SEQ ID NO: 82902 - DNA, 120 bp, synthetic construct
  source 1..120: mol_type = other DNA
ctgggcctcccaaagtgctgggattacaggcatgagccaccacgcatggcctgtatgtcttcttttgagaaatgtctattcaaatcttttgcccatttttttacttagacttttagaatt

SEQ ID NO: 82903 - DNA, 120 bp, synthetic construct
  source 1..120: mol_type = other DNA
ggtgattatagctctgtagcataatttgaagtcaggtaatgtgattcctccagttttgatctttttgcttaatataattttggctattctgggcattctgtgttttcatataaattttgg

SEQ ID NO: 82904 - DNA, 120 bp, synthetic construct
  source 1..120: mol_type = other DNA
ttggtcatgataaatgattttttttttaatggagtctcactctgtcaccaaggctggagtgcagtgccacaatctcagctcactgcaacctccacctcctgggttcaagtgattctcctg

SEQ ID NO: 82905 - DNA, 120 bp, synthetic construct
  source 1..120: mol_type = other DNA
tctggttaaggttcattgttaaattgcttatttgaagtttttcctcttttttcatgtaggcacttatagctatcaatttgcctcttagtactgcttttgccgtatcccataggttttggt

SEQ ID NO: 82906 - DNA, 120 bp, synthetic construct
  source 1..120: mol_type = other DNA
caggctcaacctccaaaatttaggattacaattgaacatgagattttggtggggatgcagatccaaatcatattattccacctctggtgtctcccaaatctcatgtccttctcatactgc

SEQ ID NO: 82907 - DNA, 120 bp, synthetic construct
  source 1..120: mol_type = other DNA
tgtgatgggagaggctgcccccaaggtatctgaaatgccttcaaggtgtttttcccactatcttggctatcaacattttgctccttgttacttgcaattttctgcagctagcttgaattc

SEQ ID NO: 82908 - DNA, 120 bp, synthetic construct
  source 1..120: mol_type = other DNA
atctaatcacgtcccaccaggccccacctccaacattgaggattacaatagaacacgaaatttgggtggggcacaaatggaaaccatattaacccctttatcattgtatagtgactttat

SEQ ID NO: 82909 - DNA, 120 bp, synthetic construct
  source 1..120: mol_type = other DNA
atgattctttgttgctcattaatgtctgtttctttctgaccaaagtactcccttaagcgtttcttatgggaccagtctagtgttgatgaaatccctcagcttttgtttgtctggggaagt

SEQ ID NO: 82910 - DNA, 120 bp, synthetic construct
  source 1..120: mol_type = other DNA
ggattggtgagtcaaatggtagttgtttttagctctctgaggaatcaccacactgctgtccacagtgattgaactaatttacactcctaacaagtgtataagttccttttctccataacc

SEQ ID NO: 82911 - DNA, 120 bp, synthetic construct
  source 1..120: mol_type = other DNA
cctttacttccttggttagctgcattcctgggtattttattcttttttgtggcaattatgaatgggattgtgctcctgatttggctcttggcttggcgactgtgtataggaatgttagtg

SEQ ID NO: 82912 - DNA, 120 bp, synthetic construct
  source 1..120: mol_type = other DNA
ctgatctcacagcttctccttaggtgacattcacactttagacaaagttgtttggtcccctgattatgatctcctttacttgctgtcagctctgcctgggaagaggtctatgctcagttc

SEQ ID NO: 82913 - DNA, 120 bp, synthetic construct
  source 1..120: mol_type = other DNA
taacttctagctgcttggaaagtctcattttcttcatctactcaaatcatacacatccctcgggttccatgcaaagttccatctcattcatgaaactccctgaccactgggatatctggc

SEQ ID NO: 82914 - DNA, 120 bp, synthetic construct
  source 1..120: mol_type = other DNA
ataacttttgacaaaactcacagatggcttattattgctagcaatgtaaatattggatgcaaatcatgctcaaaagctgtgtgaatagccaaaagtgctaagcacattctgtcagtgctc

SEQ ID NO: 82915 - DNA, 120 bp, synthetic construct
  source 1..120: mol_type = other DNA
attcccaggcactagacagaagcagtcgggaaaggaatcatttcctgattgcctgtgggggaaaaagaaacttttttggatagaacagtctggatggactctaacacagtaaaaagtgaa

SEQ ID NO: 82916 - DNA, 120 bp, synthetic construct
  source 1..120: mol_type = other DNA
gtgaaaggctgagtacgcatcatgttcaggtagtagggtgttaaacgaaatagttcctcacagcaatgcccaaagtcatccttggtcacaataaaggagaataaagggaaaaaagtatga

SEQ ID NO: 82917 - DNA, 120 bp, synthetic construct
  source 1..120: mol_type = other DNA
gaggacaacaggagttgacagggaagagtatttcctagagcgagaaactggaggcagctgtagtgaggtgctgatgggttctggccaccacctggaccacctagatttgatgtttctcca

SEQ ID NO: 82918 - DNA, 120 bp, synthetic construct
  source 1..120: mol_type = other DNA
gaaatttggttctgtgagcagcatctattggcaggatgaccagcaattcttgtgtgtggtttgcaaagatcttaacggagaacaaatgttacttagtgctgcagaaggagaacaatgcta

SEQ ID NO: 82919 - DNA, 120 bp, synthetic construct
  source 1..120: mol_type = other DNA
ttaaccttgtcaacatggggattcattatcttatttagcaaactaaaggaacaataatgtaactgcacctcaggtacaactggaaccagggatttgaatgcaactaagacttcccatctt

SEQ ID NO: 82920 - DNA, 120 bp, synthetic construct
  source 1..120: mol_type = other DNA
gtgtcccggtccgtgacaacaaaatctttgtaatctaaagtttgaagcatttcagaggtcagaagggtgtttgctgttacgactcttgctctcacttctacctgacaagagagaagaatt

SEQ ID NO: 82921 - DNA, 120 bp, synthetic construct
  source 1..120: mol_type = other DNA
aaattacaatgttgtgggggttgtgtatacagataattttgtcgcccaggtaatcagcataatacccaaaaggtagtttttaagtcttcaccctcctttcaccctccaccctcaagtagg

SEQ ID NO: 82922 - DNA, 120 bp, synthetic construct
  source 1..120: mol_type = other DNA
tgcttactaagttccttatagattctggttattaaacctttgtcagatgcacagtttgcagatgttttctcccattctgtaggctgtttactctgttgacagttccattttctgtgcagg

SEQ ID NO: 82923 - DNA, 120 bp, synthetic construct
  source 1..120: mol_type = other DNA
ctgctgaagttctttttcagatctagaagccctcaggaagagaccatggagttttctaggtatagaatcattatctatgaagagagataatttgacttcctctcttcctatttggatgcc

SEQ ID NO: 82924 - DNA, 120 bp, synthetic construct
  source 1..120: mol_type = other DNA
ggttgtatgttcccaggaatttatccattcttctaggttttctagtttgtgtgcagaggtgttcataatagtctccaagcggtttttgtatttttgtgtggtcagtgacaacgtcccctt

SEQ ID NO: 82925 - DNA, 120 bp, synthetic construct
  source 1..120: mol_type = other DNA
tgttttttgttttccatttgcttgatagatctttctccatcccttactttgaggctattggtgtccctgcatatgagatgggtctcttgaagacatacagttgggtcttgcttctctgtc

SEQ ID NO: 82926 - DNA, 120 bp, synthetic construct
  source 1..120: mol_type = other DNA
catacataacttatgataaggaaacttatgcttaggaagattaattaggaggttaaggtcaccaagcctctagactgtttcgccaggacccaacccaggtctggcttctgtttggttttg

SEQ ID NO: 82927 - DNA, 120 bp, synthetic construct
  source 1..120: mol_type = other DNA
gttaacattcagggcgaggaaagactttagaaatcattccaaatttcatgagggtaaatcaattgtaagggccattaaggttggcaagtggcagaatatggatgcaaacctagggccctt

SEQ ID NO: 82928 - DNA, 120 bp, synthetic construct
  source 1..120: mol_type = other DNA
atagagatatacaggaagtcctctttcctcacctggagaagaaagaagacagcaaaaaaaattaggtcaaccccacaatcaaggtagagctgctctaaaatctgaggtagccaatgacca

SEQ ID NO: 82929 - DNA, 120 bp, synthetic construct
  source 1..120: mol_type = other DNA
tcctaaacatcatcatttcattttcagcccacagccctcccctgctcagatttcccaccatctaaggcagcaatcctcaaatgctagtgtgcacaaggatctaaggcacttgccgaaaat

SEQ ID NO: 82930 - DNA, 120 bp, synthetic construct
  source 1..120: mol_type = other DNA
ttcataatttttgtcttagggttaaaaagactcccccaaggacagaaaattgtacctaatgatacagcctagagcgcatgttgttccttttgtctacagtaccttctacctctggctcaa

SEQ ID NO: 82931 - DNA, 120 bp, synthetic construct
  source 1..120: mol_type = other DNA
atcatttgctattcaatattggaaaatacatctcaccccatattgagatcctagtctgggctagctgagttacgggggctgctaaaactctagtaatagcaacagctgtctgccttccat

SEQ ID NO: 82932 - DNA, 120 bp, synthetic construct
  source 1..120: mol_type = other DNA
gaagggaaaagctgacatgaccagaactagaacacagcccagggaatgcaagtctgggtagatcatggtactcgaagcccaaggatcatttgaaagaggtttaaaaaaataaaaaaagga

SEQ ID NO: 82933 - DNA, 120 bp, synthetic construct
  source 1..120: mol_type = other DNA
acctggcctggcttttttttttttttttttaatggagtgtagctctattgctcaggctggagtacagcgatgcgatctcggctcactgcaatctctgcctcccaggttcaagcaattctc

SEQ ID NO: 82934 - DNA, 120 bp, synthetic construct
  source 1..120: mol_type = other DNA
gataaagggaagagaaagtgatgttactaaccctccatgtaatgataatctccaaatagctcttcccagcagttccatacttaagggtcaggatctccattcagggatctttctgtggtg

SEQ ID NO: 82935 - DNA, 120 bp, synthetic construct
  source 1..120: mol_type = other DNA
agcccaggcaacatggcaaaaccccatacaaatacaaatacaaaacgttagctgggcatgttggtgcatgcctatagtcctagctacttgggaggctgaggcattagaattacttgaacg

SEQ ID NO: 82936 - DNA, 120 bp, synthetic construct
  source 1..120: mol_type = other DNA
ctgacttctgtgcagtgtttttctctttgtagttggtaagtggctaaagatctggattcttcttctagctctgccatacaccagatgtgtgacctttggcaaattactcaatcatgctga

SEQ ID NO: 82937 - DNA, 120 bp, synthetic construct
  source 1..120: mol_type = other DNA
ctaattttcttagcttcctataattagatatgtacatatgagctagtagcagccacagtcctacaatctgactagttcatgcccaactgcatgcctgcatcagggacatctggctattgt

SEQ ID NO: 82938 - DNA, 120 bp, synthetic construct
  source 1..120: mol_type = other DNA
accctgtggtgtttttatatacatctacaagttctgtgatatgcttcctttgaaaaaggcagagcctaattcccctccctttgagtgtggtcagtgctcgatgacttgcttttaacaaac

SEQ ID NO: 82939 - DNA, 120 bp, synthetic construct
  source 1..120: mol_type = other DNA
acagaagctactgctgtaccatttatattcccttagaccaagatctggctacagaatttgtgaatccctgtgcaaaacaaaaacgtggggtcccttgttcaagaatttcaagaggacagc

SEQ ID NO: 82940 - DNA, 120 bp, synthetic construct
  source 1..120: mol_type = other DNA
ctcgcaactggtaaataggacaggatatctacctggatgactacccacatcattgaccaaaatggagaaagcacactaagttgtcaagaataaatcaatctgtgtcacataagtggccac

SEQ ID NO: 82941 - DNA, 120 bp, synthetic construct
  source 1..120: mol_type = other DNA
cattgtcagcgggaagaagatacaagcttggagatatgcatcagaatgactacccatgcaaattcttgaattttcacctgagggaggtgttggaggaataaattgttctacgggacaaaa

SEQ ID NO: 82942 - DNA, 120 bp, synthetic construct
  source 1..120: mol_type = other DNA
gccacaccaagcttctagctactgctcagcacacacttaccacctggtttccctgtgcttctcatttgtaattttggattttagtctagttcagacattccttcaattcacattaagcat

SEQ ID NO: 82943 - DNA, 120 bp, synthetic construct
  source 1..120: mol_type = other DNA
tgaatatagagtcaagggtgattattccccagctttgagatttaatgtctgccctcttaggctttggacttgcttggggcttattaaccctttcttttggcctacttttcccttttcaaa

SEQ ID NO: 82944 - DNA, 120 bp, synthetic construct
  source 1..120: mol_type = other DNA
aatactcagtaaaaatggccaaaattcaaaagtctgaaaataccaagtactgagagaatgtgaagcaatagggactctgcactgcttggtggagctgctgtgagctgatactagggagaa

SEQ ID NO: 82945 - DNA, 120 bp, synthetic construct
  source 1..120: mol_type = other DNA
aataaaaaatattgtaagaaaccgaagaaagcaaattagaatctggaggtcaggatggatttcttaatgaggacaggtaggggtgtgtgtgtgtgtgtgcgtttgcatgcatggacacac

SEQ ID NO: 82946 - DNA, 120 bp, synthetic construct
  source 1..120: mol_type = other DNA
cgattgctgttaataggaagttttttttggtgatgtttcccacccacaattttaatgacttttctatcttaaccaagtgcttaacatgcactgtggctgcaacttttccattttgaagtg

SEQ ID NO: 82947 - DNA, 120 bp, synthetic construct
  source 1..120: mol_type = other DNA
tatatacatctctgaaatgccatgccgaaactctttttactatcctaagctcctgccttaaggtccataaatacctctaaagaaaaatccatggcagcacacttagtcctcttgctgagg

SEQ ID NO: 82948 - DNA, 120 bp, synthetic construct
  source 1..120: mol_type = other DNA
aaggctgtttcagttcttcctttctaataaactttccttttttcaaacctatactgtttgtaggtatggtaaattcattttaccaacctgcgagttgaccacttcccggtgccagggctc

SEQ ID NO: 82949 - DNA, 120 bp, synthetic construct
  source 1..120: mol_type = other DNA
tcaaaactcggtgttattccacttttcttgaactgtaatcctttttaaacaaggaatataccttttcttgtttagagaatatacgtacattcataaatcttggcaactttcaaaggccat

SEQ ID NO: 82950 - DNA, 120 bp, synthetic construct
  source 1..120: mol_type = other DNA
gcaaggagaaagctgagtatggaccacaaggccaaaaagatgtcctctctggctctctacagcaaagatttgccaagccctgttatatgtcatactacttgcgcttcataattttatagt

SEQ ID NO: 82951 - DNA, 120 bp, synthetic construct
  source 1..120: mol_type = other DNA
taatgcaaaagtccgcagtccctacacaaacactatctgctcctgcggagaaactcaagtcacagccccagaagtggaaagaacaggccttggctctcacccagttaacaagcgtttatc

SEQ ID NO: 82952 - DNA, 120 bp, synthetic construct
  source 1..120: mol_type = other DNA
gaaactctgacgcagtcaccgcgggtctcggcagcgtcatagcggcgggcatcccatctgcacgtcacacctctttctcacctggacacgcatcccttcctaccctgccagccacgacgt

SEQ ID NO: 82953 - DNA, 120 bp, synthetic construct
  source 1..120: mol_type = other DNA
gagatctcattgcctcttttgtgtctcttaattcgcaaccactccaggacctataagttggagacacactatgcccagggtgttagttatcaatagctatattgaaagattccagtcact

SEQ ID NO: 82954 - DNA, 120 bp, synthetic construct
  source 1..120: mol_type = other DNA
aaaaagaaaaaacctccaattaatatttttattttctctgtcctcttccccactcccaagttaaattatggcagagacaagtctgttagaggctggggcctctgcagcctctacagctgc

SEQ ID NO: 82955 - DNA, 120 bp, synthetic construct
  source 1..120: mol_type = other DNA
gattaaacttaggaagaactgaaaagtagtctggtttcttcattctgcctgcctgctcagaatgctccttgttttcacactggttattgggcataggtaatatcgcttgagactgatacc

SEQ ID NO: 82956 - DNA, 120 bp, synthetic construct
  source 1..120: mol_type = other DNA
ggaggttgcagtgagccaagatcacaccattgtactccagcctgggcaacagagcaaggctctgtctcaaacaaacaaaaaaaacaaacaaaaaaaaaaagaacaatgtagttctctcaa

SEQ ID NO: 82957 - DNA, 120 bp, synthetic construct
  source 1..120: mol_type = other DNA
gtccaagatcataaagccagtaagtggcaaaaccaggaatactagttcttcgtgaatcagtaaatatttgttaagctcctggtttaggccaaacccggtatttgacactggggaacaatg

SEQ ID NO: 82958 - DNA, 120 bp, synthetic construct
  source 1..120: mol_type = other DNA
tactctgtgtttatactatataaaatggcattcaagcccaggcctatgtttttgtttttgtggttttttttttttttttttttttgagacggcgtctcgctctgtcatccaggctggagt

SEQ ID NO: 82959 - DNA, 120 bp, synthetic construct
  source 1..120: mol_type = other DNA
atcatcagtcacatgatgcttggggaattctttagggagatcactatttgttgtagtggagatgcagaagagaggatgtgctgataattctcagaaagtgttatggctggtgtttgagtc

SEQ ID NO: 82960 - DNA, 120 bp, synthetic construct
  source 1..120: mol_type = other DNA
tttctttctttcttttctttctgtctttgtctttctgtctttctttcctgtctgtctgtctttcatctcgatctgttgcccaagctggagtgcaatggtgcaacaatttcagcttactcc

SEQ ID NO: 82961 - DNA, 120 bp, synthetic construct
  source 1..120: mol_type = other DNA
ctttctgccaggtgtactcaaagggtctttgctacggaaaagtgatttctcccatccccttctaaccatttttgtgttcttatctctggtcagcaattatgtgcttaatctgttccaaag

SEQ ID NO: 82962 - DNA, 120 bp, synthetic construct
  source 1..120: mol_type = other DNA
ttcttgatccatgggctgccgattggatgttgtgttagcggacgtgaaaacaacatgaatctcattttacatctctatcagaacttttgggtgatcaagtgcattgtcagtgagcagtaa

SEQ ID NO: 82963 - DNA, 120 bp, synthetic construct
  source 1..120: mol_type = other DNA
tttcttctgcagcttccttacctctctcagctttcatagaactgaaggagttaacagccttgctctggattgggctttggcttaagggaatcatgtgatcttatatccagatcactaaaa

SEQ ID NO: 82964 - DNA, 120 bp, synthetic construct
  source 1..120: mol_type = other DNA
gaagcagtgaggcttcattgtacatttatttttatgttacgtattgcttggtatttgttcctatggcctttcatgtatgtgtgttctgccttccatattaaactgggaaatccttgtggg

SEQ ID NO: 82965 - DNA, 120 bp, synthetic construct
  source 1..120: mol_type = other DNA
gggcagggtatgggagaatgttcattgtgcccatgaagccagttagagaacaaattattgggaataataatcccttttcccctttgaacatcaggacttcttgagaaggagaatgataag

SEQ ID NO: 82966 - DNA, 120 bp, synthetic construct
  source 1..120: mol_type = other DNA
tgaggtcaggagttcgacatcagcctggccaacacggtgaaaccccatctctactaaaaatataaaaattagccagatgtggtgttgggcgcctgtaatcccagctcctctggaggctga

SEQ ID NO: 82967 - DNA, 120 bp, synthetic construct
  source 1..120: mol_type = other DNA
gggtgcggctatggaatggggacaaatatgcagccaccaccacaccttttacccctttgcacatcaaggtgaaacccaagcgggtaggcatattcctagactatgaggccggcacactgt

SEQ ID NO: 82968 - DNA, 120 bp, synthetic construct
  source 1..120: mol_type = other DNA
cctttcacagtgttcccaagggaacttggaaaggagagtcaggtattagaggaaagagaagggtatttgtatacaaagccctggccttaaagaatgttacttagtagctactcccaaatt

SEQ ID NO: 82969 - DNA, 120 bp, synthetic construct
  source 1..120: mol_type = other DNA
aactcaagtaatctacctgcctcagccactcaaagtgctaggattacaggtgtgagccaccgtgcccagcctacatctacattttaaacacaccactctcatttgagtccgaaaaccctt

SEQ ID NO: 82970 - DNA, 120 bp, synthetic construct
  source 1..120: mol_type = other DNA
tccactaggtctctaggtgatataattggtcatgagcttgaggaagacaaaagcactgaaaattcataaagggaccctgggcatggattgctggggttgtgtttagaaaccgatgagttt

SEQ ID NO: 82971 - DNA, 120 bp, synthetic construct
  source 1..120: mol_type = other DNA
attacggtctgatgggacagactaagaaacaaaatggtgtagaaaaagattaactgggggagtagaatgctcacttactcatgccagtggtggcgaagtttatgataagcaaagggagtg

SEQ ID NO: 82972 - DNA, 120 bp, synthetic construct
  source 1..120: mol_type = other DNA
agaaatatggggcagcggagagtgtttgtatcctctaggcccactcatagtcagaaaagactcaggtcttttcccagtctcaaagttgtctttaataaaattctgataaaggaaatggcg

SEQ ID NO: 82973 - DNA, 120 bp, synthetic construct
  source 1..120: mol_type = other DNA
aaaaaaaaaagtgtttatcgagcctctgttggggtcacacttgctaatgttcccttggccaaagcaaggcacagtgccaatgccagattcaatgtggaaggggctacactggagtttgaa

SEQ ID NO: 82974 - DNA, 120 bp, synthetic construct
  source 1..120: mol_type = other DNA
ggagatcatgggaatcaggtcccagtcaggatgagcggcagacaaaacagtatctggaatctggttcacttgtgagtctttgtggtttctttatttgttgtgggtttctatcaatatata

SEQ ID NO: 82975 - DNA, 120 bp, synthetic construct
  source 1..120: mol_type = other DNA
tccagatctttttcatcatcccaaacagaaacctgtttccattaaacagtcacttccaatttttccctattccagcccttagcaaccactaatctgtttctgcctttacggatttgtcta

SEQ ID NO: 82976 - DNA, 120 bp, synthetic construct
  source 1..120: mol_type = other DNA
taaaagcttttaattttcatgatcttgcagctacttcctcaagaaccaaactgtctctctcagaccttatcttctgcctccatcctgattctttttggagcttgttctaaccctggccct

SEQ ID NO: 82977 - DNA, 120 bp, synthetic construct
  source 1..120: mol_type = other DNA
gagagtgggcctctggagtacttagccacaattacaaattggattctaggtttgtgtgtatggaaattacctgaggaaagtcaaattttccttcagcttccacagtctatactccctagc

SEQ ID NO: 82978 - DNA, 120 bp, synthetic construct
  source 1..120: mol_type = other DNA
agcatgctggaagcatcagcccttcccactgcctttgctttctgttgatgacccattcttcatggagagtggtgtttctcttgtccttaactcaactataacttttctctttttacattt

SEQ ID NO: 82979 - DNA, 120 bp, synthetic construct
  source 1..120: mol_type = other DNA
ttaccttctttcaaatgttctgcccataaacaatatgtaaagcttaggtatggctatacatccagcatggatgagtcttcaaaacatactattcagtggctgggtgtggtgcctcacgcc

SEQ ID NO: 82980 - DNA, 120 bp, synthetic construct
  source 1..120: mol_type = other DNA
ggtttctgtgtatgtgtgtgtgtgtgtgtttctgttatagggccctaataatgatttatgtaaatgtgtacagaagtaactctttcaagtggtcaggctccagtgggtgggaaacacctt

SEQ ID NO: 82981 - DNA, 120 bp, synthetic construct
  source 1..120: mol_type = other DNA
aaaactaaattaaaaactaacttgggccatgtgtgtctataatcctagcactttggggggctgaggctaaagaatcgcttgaggccaggagtttagaaccaatctgggcaacatattgag

SEQ ID NO: 82982 - DNA, 120 bp, synthetic construct
  source 1..120: mol_type = other DNA
ttgagacacctaggaaacagcagaaattagcaatgattagtgagataaagagaaggttattaataaagccctccctttattacatcggtccttcctaaaaccccagtgtggatggtaaca

SEQ ID NO: 82983 - DNA, 120 bp, synthetic construct
  source 1..120: mol_type = other DNA
cccttactgacctatgaaagaaggcagaagtcctagcgcataagaaacgctagagggggctgtagcccagagaaaaccaatcaacctaccaaatagagccccagaaagaaacctcctcct

SEQ ID NO: 82984 - DNA, 120 bp, synthetic construct
  source 1..120: mol_type = other DNA
actgttttcaaggacagtactgaggcagcacgtttgcagagtgatatttttcaaaaatgctgtaagaaactataaaatcagctggagatattctgttgaaatgtgtttttctacaaagca

SEQ ID NO: 82985 - DNA, 120 bp, synthetic construct
  source 1..120: mol_type = other DNA
gccccaaattcaggattctctactttcagttcatcgtggcttttgtggagcagggctacacattgtgggtaatctgtggggtttcagttacctattgcaagacattgtttactcttctca

SEQ ID NO: 82986 - DNA, 120 bp, synthetic construct
  source 1..120: mol_type = other DNA
tttctttgccttcagtcttgttctcctccaaagactgcctgcaaccagagaggtctttgtaaaggaaaatgtcatctgtctctctcctacttcaaaactttcatggtccacataatcatc

SEQ ID NO: 82987 - DNA, 120 bp, synthetic construct
  source 1..120: mol_type = other DNA
tccctaatctcatcctaatccccagaaactgtgagtgttgccttatttgggaaaaaggactttgtaaatgtgattaagaatcttgagagagattatcttggatttgctgggtgggcccaa

SEQ ID NO: 82988 - DNA, 120 bp, synthetic construct
  source 1..120: mol_type = other DNA
tagccctactgagatcttgatttggggctcctggcctccaaggttgtgagaagatagatttctgttgttttaaaccatcaagtttatggcaatttgttgcagcaaccacaggaaactaat

SEQ ID NO: 82989 - DNA, 120 bp, synthetic construct
  source 1..120: mol_type = other DNA
cagtgctggtggtgctcaatggttgttatggaaaccagggattaggtaatgttctctagtttctacataggaaaactgatcacattcaactgaggaaacattgctcactaaggaaacgga

SEQ ID NO: 82990 - DNA, 120 bp, synthetic construct
  source 1..120: mol_type = other DNA
aacctctgcctcccaggttcaagtgattcttctgcctcagcctcctgagtagcccatctaattttgtatttttagtggagacggggtttcaccatgctggccaggatggtctcgatctcc

SEQ ID NO: 82991 - DNA, 120 bp, synthetic construct
  source 1..120: mol_type = other DNA
tcctgctttcctaaggagaaaggatggaggaaaggagcctggtctcttcaggatttttttcatatttaggcccttctagcctgggaatgaaaggacaccacacattagtgagcaattatg

SEQ ID NO: 82992 - DNA, 120 bp, synthetic construct
  source 1..120: mol_type = other DNA
ttggaagtttagcctgctttcctgaaactggctttgctcttcctcctttcttttctcacagatcctttccttccttctcaaagcactttttgtagtagcttctattcatctggctcatgt

SEQ ID NO: 82993 - DNA, 120 bp, synthetic construct
  source 1..120: mol_type = other DNA
ccacacacatccacagaaaccttgacctattgacagatgtaagagggtggcctttgagagttctgaatccctacctcataggattctggatatctggacactttcttcttacgctgtttc

SEQ ID NO: 82994 - DNA, 120 bp, synthetic construct
  source 1..120: mol_type = other DNA
ggccatcctaagcaaaaagaacaaagctggaggcattatgctatctgacttcaaactatactgcagtgctacaataaccaaaacagcatggtattggtacataaacagacacatagacca

SEQ ID NO: 82995 - DNA, 120 bp, synthetic construct
  source 1..120: mol_type = other DNA
ttcattgcagcactattcacaacagcaaagacgtggaatcaacctaaatgcctaccaatggtagactagataaagaaaatgtggtacatatacatcatggaatattatgcagccataaaa

SEQ ID NO: 82996 - DNA, 120 bp, synthetic construct
  source 1..120: mol_type = other DNA
cacattttccaatcagagaaacttgcatgagatatggtgcccagaagagatggagagacaggcctctacccatcagtcgtggctgcaggcagaagagtaggcagatgtcaggttctcagt

SEQ ID NO: 82997 - DNA, 120 bp, synthetic construct
  source 1..120: mol_type = other DNA
acctttctattatcttttttttttttttttttttttgaggggagtgtcgctctgttgcccaggctggagtgcagcggcgcgatctcggctcactgcaagctccacctcctgggttcactc

SEQ ID NO: 82998 - DNA, 120 bp, synthetic construct
  source 1..120: mol_type = other DNA
cattcattatatacaagtcagtggtttttagtatattcacatagttgtgccaacattatcattatcaattccagaacattttcatcaccccacaaaaaaccccatacccattggcagcca

SEQ ID NO: 82999 - DNA, 120 bp, synthetic construct
  source 1..120: mol_type = other DNA
aaagcagaatcacatcaaagtttggaagcaggaatacgtccagtgtagattacagaagcatgatcactatgcccgtcagacattatcttatgtgcagggaaaagcaagggcattcatctt

SEQ ID NO: 83000 - DNA, 120 bp, synthetic construct
  source 1..120: mol_type = other DNA
ggcctcccaaaatgctgggattacagacatgagccatcgtgcctggcctgtttccttctaagagttttctaatgttaactctttcacttaggtctttgatacattttgagctacttttta

SEQ ID NO: 83001 - DNA, 120 bp, synthetic construct
  source 1..120: mol_type = other DNA
ctgagcacatcatagctcttttcatacctcagtcttattcaaatatttaatttatcaagctcacttataaatgccaagcctctcatttggccacctctgaccctacagctccaaagcccc

SEQ ID NO: 83002 - DNA, 120 bp, synthetic construct
  source 1..120: mol_type = other DNA
ttattaggataagaagataccatcaatctgatttttcccccatatttttaaaggagaggagagagaacaatttggaaggtcaagaagttggtatgcccaggagctcacaactctcacctt

SEQ ID NO: 83003 - DNA, 120 bp, synthetic construct
  source 1..120: mol_type = other DNA
atgaactgattggtgcatcctctgcttaattgattcttcccatttgacttggaggatggtgttggccagaggtccttttttgcggaggcctttaaagatatttattcagaagaatgtacc

SEQ ID NO: 83004 - DNA, 120 bp, synthetic construct
  source 1..120: mol_type = other DNA
taagattgcaccattgcactccagtctgggcaaagagagcaaaactctgtctcaaaagaaagaaagaaggaaggagggagggagggaaggaaggaaggaaggaaggaaggaaggaaggaa

SEQ ID NO: 83005 - DNA, 120 bp, synthetic construct
  source 1..120: mol_type = other DNA
tttatcttgtatcttccaaccaggatttcgccttttgcctgaagcatattctttagaactcccttcagtaaaagcgtgtttgtgtcaaattgtctttgcttggaaaaaatccattgagac

SEQ ID NO: 83006 - DNA, 120 bp, synthetic construct
  source 1..120: mol_type = other DNA
gttagcatgagagtaggcgtagatacctaatatgccacattagtggttcacaccttatccttaaagctccttatcacaaaccttcccatcttgttcctttgaagtcattgaatacctgag

SEQ ID NO: 83007 - DNA, 120 bp, synthetic construct
  source 1..120: mol_type = other DNA
ttaataacaccggtgcagttatttttcaaagagcttgtactccaatcttggaggaattccttgagttgaaaagcccagggcctgaataatgagggagtctcatttccaacagcttccaat

SEQ ID NO: 83008 - DNA, 120 bp, synthetic construct
  source 1..120: mol_type = other DNA
aagaacctagagtgaggtctacccttgaaagagtgaaataatcctggcaatatctgaaagtctgcagtaacatagactgcttgcatttgtcaacctgcatacaacacaggcagaagaaag

SEQ ID NO: 83009 - DNA, 120 bp, synthetic construct
  source 1..120: mol_type = other DNA
aataataataataataataataaagcgaagagaacttacttatgactgtggggagggcaccaagccattcatgagggatctacccccatgacccaaacagcttccactaggccccacctg

SEQ ID NO: 83010 - DNA, 120 bp, synthetic construct
  source 1..120: mol_type = other DNA
cctggtgggaccagagagctcccagcacagcctttgggcaggtgggaccgccgatcattttaaaataattttttattgatttaacttatattttgagttcaggcatacatgtgcaggttt

SEQ ID NO: 83011 - DNA, 120 bp, synthetic construct
  source 1..120: mol_type = other DNA
caaaatctctgggatatagccaaagcagtgaaaataagaaagttcatagcaataagtgctgacttaaaaaagcctgaaagagcccgggcacagtggcttatgcctgtaatcccagcactt

SEQ ID NO: 83012 - DNA, 120 bp, synthetic construct
  source 1..120: mol_type = other DNA
atccccaatgaacatacatgcaaaaatgttcaacacaatactagctaaccaaatccagtagcctatcaaaaaaataatacaccatgttgaagtgggtttcatcccagggatgcagagatg

SEQ ID NO: 83013 - DNA, 120 bp, synthetic construct
  source 1..120: mol_type = other DNA
accccaaaattcatgtggaaccaaaaaagagcccacgtatccaaagcaatactaagcaaaaataacaaatctggaagcgacccattaacagacttcaagttacactacgaggctatcgtt

SEQ ID NO: 83014 - DNA, 120 bp, synthetic construct
  source 1..120: mol_type = other DNA
gcttctacacagcaaaagaaataatcagcagagtaaacagacaacccacacagtaggggaaaatattcacagactatacatccaacaaaggactaatatccagaatctacaaggaacgca

SEQ ID NO: 83015 - DNA, 120 bp, synthetic construct
  source 1..120: mol_type = other DNA
ggagtgagataaaagactacatattgggtacagtgtatattgcttgggtgacaggtgcactaaagtctcagaattcaccactaaagaactcatccattaaaccaaaacccacctgtaccc

SEQ ID NO: 83016 - DNA, 120 bp, synthetic construct
  source 1..120: mol_type = other DNA
cttcacatctctgcaaccttgggcttagtggatttcccaggaaagaaatgcttccaccaaataagaacctcagctggccattttatatttccataaaatatagtggtatgagggttctaa

SEQ ID NO: 83017 - DNA, 120 bp, synthetic construct
  source 1..120: mol_type = other DNA
gtccttacataccagagctcttcttccgcttcatcgcaagtgtagccaccacagctcaagtaaccacatctccaatgaaatttgatagtgcataccagagtatcttagtttttaatctcc

SEQ ID NO: 83018 - DNA, 120 bp, synthetic construct
  source 1..120: mol_type = other DNA
tccctgggatttaattaattagtagttatgactgaatgatgacacagagaggtctatgccactgaaaaaagagtttattacccactgacataggaagcacagcacaacaggcagcaccaa

SEQ ID NO: 83019 - DNA, 120 bp, synthetic construct
  source 1..120: mol_type = other DNA
gatggcattgaaaagtggtacaaaacttctaaagggcacttttgcaaaatgtctcaataatttaaatgttctgacgtttttgagacagagtcttgctctgtcgcccaggctggagtgcag

SEQ ID NO: 83020 - DNA, 120 bp, synthetic construct
  source 1..120: mol_type = other DNA
ggttgaaccctggagattttctctcagaggccttgttgacttgtcttccattgattctctcttcatctgcaccttacacaagtgaactgttttgatgtcccagaatgttctatggacagg

SEQ ID NO: 83021 - DNA, 120 bp, synthetic construct
  source 1..120: mol_type = other DNA
atgacaacaaaatttcagagagtgaaagacagagcaagaccaatggacaaaggaatggcaggaggtctggtcgtgtgtgtgcatttcctccttcccgtctgtcattgtccttcctcacca

SEQ ID NO: 83022 - DNA, 120 bp, synthetic construct
  source 1..120: mol_type = other DNA
acatgtttcctccgcaatttactctctggaggggaatacattgaaaacccagtttattttcagatactgagtgggattgaaaagctgaattgtctgttttcctgcagggcacacagagga

SEQ ID NO: 83023 - DNA, 120 bp, synthetic construct
  source 1..120: mol_type = other DNA
tctatctctgttctgcctttctgttttgtctctggctctgtctgtatctgccattgtcccttcacaaccatgccttcactattatcagtaacatcttttacctggtcttataggatcttg

SEQ ID NO: 83024 - DNA, 120 bp, synthetic construct
  source 1..120: mol_type = other DNA
agtccattcagcttcccaaaatccatgttgacaatgacatttcctctcaccactgagtgactggacttttgcctcagagcagagagaggcctccagggcaaaacagtgggatcagatgtg

SEQ ID NO: 83025 - DNA, 120 bp, synthetic construct
  source 1..120: mol_type = other DNA
gccctgctctctgccaacctgaactccaggaccctgcagccccaccccaaaattgcttgataatacagtgattctattttcagtgttttgaaaactctgtatactgttttttacagttgc

SEQ ID NO: 83026 - DNA, 120 bp, synthetic construct
  source 1..120: mol_type = other DNA
ccaaagtgctgggattacaggagtgagccacagtacctggcctttgtgctgtgttttgattcatcgttatctcctaagccctttcccagcattgatattttactaaacaccctatgatta

SEQ ID NO: 83027 - DNA, 120 bp, synthetic construct
  source 1..120: mol_type = other DNA
tttaattttttttttacttttaaatcttttctgttaaaaaaaaaagacataaattagcctaggctgacacagggttaggatcaacaatatcactatctttagcctttacatcttgtccca

SEQ ID NO: 83028 - DNA, 120 bp, synthetic construct
  source 1..120: mol_type = other DNA
agaatatgtggcatgccaagcagcagaaaaaatgcaacaagtggagataaaataatcaacagaagccgactcagatgatctggatactgaagccagcgagcaaggacattcttcaatata

SEQ ID NO: 83029 - DNA, 120 bp, synthetic construct
  source 1..120: mol_type = other DNA
actaaaaatacaaaaaaattagctgggcgtgatgacaggtgcctgtaatcccagctactcaagagactaaggcaggagaatcgcttgaacctgataattgctaggctttgagtaaagtag

SEQ ID NO: 83030 - DNA, 120 bp, synthetic construct
  source 1..120: mol_type = other DNA
cccataaggactgttctgtttaagaagagacagagacagcatatggctatgtagcaaattctctcatgggaaggtcttgaaaatagatagctggcaaattagactgataccagtacccct

SEQ ID NO: 83031 - DNA, 120 bp, synthetic construct
  source 1..120: mol_type = other DNA
aaatccgtacttcatctcagatgcaaatgcttagagcactataatagaacctggacgggagatattgcaaccatttgcatcactgagtcacatttcttcacaccaggaaacacatttgcc

SEQ ID NO: 83032 - DNA, 120 bp, synthetic construct
  source 1..120: mol_type = other DNA
tgcacttcatctgcctgctcatttgtatcctttacaactgctattgtttgaatgtttccccagaaaagcgtctgttggaaacttaatccccagtgcaacaatgttaagagatgggacctt

SEQ ID NO: 83033 - DNA, 120 bp, synthetic construct
  source 1..120: mol_type = other DNA
tcacaatctgctcacaatgtaattccttgtgggccccaacatctttaccctaaaacagagttttgttgacttttcccctgacaatgtaaagtaacagcttatcttcacaggtacaggaca

SEQ ID NO: 83034 - DNA, 120 bp, synthetic construct
  source 1..120: mol_type = other DNA
ccaaccggcaattaagagctgcacagcctgcaattaccttgctcaattaattttaaaacaaaaaggagtagatgttggaggccgcacgaatgtttcttatgatttgccacaattgaagcc

SEQ ID NO: 83035 - DNA, 120 bp, synthetic construct
  source 1..120: mol_type = other DNA
accgtgttccagaccccaaaatggtagatccaccaacagtttgcactgtgcatctggaaaagtcacagacactcagcgccagactgtgaaagcagccaggagggaacatataccctgcaa

SEQ ID NO: 83036 - DNA, 120 bp, synthetic construct
  source 1..120: mol_type = other DNA
caattcatcagtgaagccttctggacctagactttcctatattagaaggattttgattacaaattcaatttctacaatcaatatatggctgaccacattttctatctcttctcaggtcag

SEQ ID NO: 83037 - DNA, 120 bp, synthetic construct
  source 1..120: mol_type = other DNA
gccttgaaagcagggaacaaagagccaggatgctgagcaagttaacccttaaagaggaactctttttatatctaacactacttcaactgcatcccatacatttgatatgttgtgcttcag

SEQ ID NO: 83038 - DNA, 120 bp, synthetic construct
  source 1..120: mol_type = other DNA
ttttgcatgcagatgtatgttcattgcagcacttgtcacaatagaaaagacatggaatcaacctaaatgcccatcaatggtgaactggataaagaaaatgtggcacatatgcaccatgga

SEQ ID NO: 83039 - DNA, 120 bp, synthetic construct
  source 1..120: mol_type = other DNA
gctgtgcttcagtggtcacgctcctgtttgactctcatgttccaccctctacacctggctcagccttctaaatagcagtagcaaaaattagtgaaagtactaaagtctttgaaatacata

SEQ ID NO: 83040 - DNA, 120 bp, synthetic construct
  source 1..120: mol_type = other DNA
gaaagtgtctcaggctaaaagcaaatgataccaggtggaaaatgagattatcagaaaagatgaagaatgtgagaagtggtaaatattaagtgcgaaaggctatcttgctcccccaccccc

SEQ ID NO: 83041 - DNA, 120 bp, synthetic construct
  source 1..120: mol_type = other DNA
gatgtaataatcctcaacaaggtacttgcaaaccaaatccagcagtccatcaaaaagctaatctcaatgatcaagtaggcttcatatccaggatgcaagattggttcaacacgtgcaaat

SEQ ID NO: 83042 - DNA, 120 bp, synthetic construct
  source 1..120: mol_type = other DNA
tactacaaaactgtcaacacttagccacttctgcttcctcaggaaggtcggggcagcagatctgtgtgttaaatatctatgtgaagttatttccaggaagaagtttcatctgtggtttct

SEQ ID NO: 83043 - DNA, 120 bp, synthetic construct
  source 1..120: mol_type = other DNA
cagaccttagctatgaatatcagaaatttctgggatgaagatgccacacaggccaagacactttcaccctgtgatggcagaccgtctgcagaaactacagtaacatctcgaatcctagga

SEQ ID NO: 83044 - DNA, 120 bp, synthetic construct
  source 1..120: mol_type = other DNA
gagtgcccagtgtgcaacaaggccctttttttcagggaaagccctgatgcttcagagtctatggcaaccgttccgtatgttgcggctgctgctgtttttgttatcattattattattctc

SEQ ID NO: 83045 - DNA, 120 bp, synthetic construct
  source 1..120: mol_type = other DNA
ttgcagataatatggatgagaagatacgcagatgtctctgagccatttggggagtggtgaccagccccttgtcagggcagctgtcatccctgttttcatcctacttctaggtgtttcctt

SEQ ID NO: 83046 - DNA, 120 bp, synthetic construct
  source 1..120: mol_type = other DNA
ttgatgttgtaaagcatgtacaatcaaatgagaagtcaagcttggagcttcctctccaggagggtccatgttggagatggtggttgtggcagtggcaatcctggagtgcagagggtgggt

SEQ ID NO: 83047 - DNA, 120 bp, synthetic construct
  source 1..120: mol_type = other DNA
tctcaccagcactttccctcttgatgcctcagtttcctcatatattaaatgggaaactaacagcacttatttcttgtggtcagggattgacaactgttagttgctatgaggtgtttgcag

SEQ ID NO: 83048 - DNA, 120 bp, synthetic construct
  source 1..120: mol_type = other DNA
taaagaattaattcaggtaaccaaacaccacccacccctaaaaaccttgaaataaaaaataattttttaaaaaagtggccgggcacggtggctcacgcctgtaatcccagcacttcggga

SEQ ID NO: 83049 - DNA, 120 bp, synthetic construct
  source 1..120: mol_type = other DNA
tctgccctccatgtctgtgtgtttcacatctgtgaatttaactacctgaggatcgaaactgttgttgctgctgatgtatactatgtagttaggcctacctacagcggttacatctgtact

SEQ ID NO: 83050 - DNA, 120 bp, synthetic construct
  source 1..120: mol_type = other DNA
tttattatactttaagttttagcgtacatgtgcacaacatgcaagttagttacatatgtatgcatgtgccatgttggtgtgctgcacccattaactcgtcatttaacattaggtatatct

SEQ ID NO: 83051 - DNA, 120 bp, synthetic construct
  source 1..120: mol_type = other DNA
tatggctgcatagtattccatggtgtatatgtgccacattttcttaatccagtctatcattgttgggcatttgggttggttccaagactttgctattgtgaatagtgctgcaataaacat

SEQ ID NO: 83052 - DNA, 120 bp, synthetic construct
  source 1..120: mol_type = other DNA
tacatatggctagccagttttctcagcaccatttattaaatagggaatcctttcccaaggcttgattttagactttgctactttgctatttcagtgtggtacttactccaaggccacggc

SEQ ID NO: 83053 - DNA, 120 bp, synthetic construct
  source 1..120: mol_type = other DNA
cacgtatacgactgtcatcctattaaacggagctgaaaaattcctatcacctagtgacattgtagccattgtaatgtcataacacaatgcattaatcatgtgcttgtggtgatgctgatg

SEQ ID NO: 83054 - DNA, 120 bp, synthetic construct
  source 1..120: mol_type = other DNA
aataaacagtctctcagaccacagcacaatcaaattagaaaccaaaagtaagaaattcgctcaaaaccatacaactacatggaaattgaacaacctgctcctgaatgactgttgggtaaa

SEQ ID NO: 83055 - DNA, 120 bp, synthetic construct
  source 1..120: mol_type = other DNA
gcttcatccccaggatgcaaggttggttcaacatacacaaatcaataaatgcgattcataacataaacagaactaaagaaaaaaaccacatgattatctcaatagatgcagaaaaggcac

SEQ ID NO: 83056 - DNA, 120 bp, synthetic construct
  source 1..120: mol_type = other DNA
atctgtccacctcagcctcccaaagtgctgggattataggcgtgggccactgcgcctagcctgaaaaaaaaaacaaaactatttttaaattcatatggaaccaaaaaaagagcctgaata

SEQ ID NO: 83057 - DNA, 120 bp, synthetic construct
  source 1..120: mol_type = other DNA
aacaagagatgctggtgaagtcacagagaaaaagcaatgctttcacactgttggtggaaatgtaaattcgttcaaccattgtggaagacagtgtggtgattcctcaaaaacctagaggca

SEQ ID NO: 83058 - DNA, 120 bp, synthetic construct
  source 1..120: mol_type = other DNA
atgaaatgtaggggatttctccccaaaaacaagcaaacaattggttctgttatggacgccagctgggtatcctctaactcaattctgacactatctccctggagataattttagatcccg

SEQ ID NO: 83059 - DNA, 120 bp, synthetic construct
  source 1..120: mol_type = other DNA
acagctccagtctatagctcccagcgtgagccatgcagaagatgggtgatttctgcatatccaactgaggtaccagggtcatctcactggggcttgtcggacagtgggtgcagaacagtg

SEQ ID NO: 83060 - DNA, 120 bp, synthetic construct
  source 1..120: mol_type = other DNA
ccaaaaccccatctgtacgtcaccatcatcaaagaccaaaggtagataaaaccacaaagatggggaaaaaacagagcagaaaaattgaaaattctaaaactcagagtgcctctcctcctc

SEQ ID NO: 83061 - DNA, 120 bp, synthetic construct
  source 1..120: mol_type = other DNA
cttcataagtgaaggagaaataaaatactttacagacaagcaaatgctcagaaattttgtcacctccaggcctgccctacgagagctcctgaaggaagcactaaacatggaaaggaacaa

SEQ ID NO: 83062 - DNA, 120 bp, synthetic construct
  source 1..120: mol_type = other DNA
caaactgttgctcagaccacagtgcaaccaaactagaactcaggattaacaaactcactcaaaaccgctcaactacatggaaactgaacaacctgctcctgaatgactactgggtacata

SEQ ID NO: 83063 - DNA, 120 bp, synthetic construct
  source 1..120: mol_type = other DNA
ccattgcaatcaagttggctttgtccctgggatgcaaggctggttcaacatatgcaaatcaataaacataatccatcacataaactgaaccaatgacaaaaaccacatgattatctcaat

SEQ ID NO: 83064 - DNA, 120 bp, synthetic construct
  source 1..120: mol_type = other DNA
gaaccaaaaaaaaagcctgcattgccaatacaatcctaagccaaaagaacaaagctggaggcatcacgctacttgacttcaaactatactacaaggctacagtaaccacaacagcatggt

SEQ ID NO: 83065 - DNA, 120 bp, synthetic construct
  source 1..120: mol_type = other DNA
aaagacacatgcacacatatgtttattgtggcactattcacaatagcaaagacttgacaccaacccaaatgtccatcaatgatagactggattaagaaaatgtggcacatatacaccatg

SEQ ID NO: 83066 - DNA, 120 bp, synthetic construct
  source 1..120: mol_type = other DNA
aacctaccaagattgaatggtgaacaaaatccaaaacctgaacagaccaatagcaagtaatcagataaaagtcataacaaaaagtctcccagcaaagaaaagccctgatggcttcactgc

SEQ ID NO: 83067 - DNA, 120 bp, synthetic construct
  source 1..120: mol_type = other DNA
tttaccaaaaaaaaaaaaaaattgtaattagctgagtgtggtgacatgtgcctgtggtcccaactacttggcaggctgaggttgtaggttgagactgcagtaagttgtagtcatgccact

SEQ ID NO: 83068 - DNA, 120 bp, synthetic construct
  source 1..120: mol_type = other DNA
gctgaaattcacatcatctgcatggtccaaaatgggaatccactgatgctgtaagtccatccagcctagtggagcatagtgtgggctagataaggatgatatgaaataatgaatgcaaaa

SEQ ID NO: 83069 - DNA, 120 bp, synthetic construct
  source 1..120: mol_type = other DNA
ttacagcagagatatgtggtttcatttccttctagtcagttatatattttcctgctgctgccccattactggatgtgtgccattctctctctctctctatctctctctctctctctctct

SEQ ID NO: 83070 - DNA, 120 bp, synthetic construct
  source 1..120: mol_type = other DNA
tatcttggtaatttttgctaaatgtccgtctctctcatgacagtgcaagctccatatcatcaagatcttactttagctcttcttctatcttcaatgtctagctaatatcttgattcacct

SEQ ID NO: 83071 - DNA, 120 bp, synthetic construct
  source 1..120: mol_type = other DNA
tcaagcaatctgcccacctcagcttcccaaagtgctgggattacaggcattaagccaacatgcctgactctttagaaattgtatgccagtatttaatcccatcaacttttatgacagtaa

SEQ ID NO: 83072 - DNA, 120 bp, synthetic construct
  source 1..120: mol_type = other DNA
aggtcatgcttagagaatccttcttcactgcccaattgtagacacttcatgtattgttccagctaggttgtgacaatgaggaaagaggagtccaagggtgaagaaaacaaaattgttgga

SEQ ID NO: 83073 - DNA, 120 bp, synthetic construct
  source 1..120: mol_type = other DNA
gttccagttctcagggggaatgctttcatcttttctctgtgcagtataaggttggctgtgggtgtgtcataaagggcttttattactttaaggtatgtcccttctatgctgattttgctg

SEQ ID NO: 83074 - DNA, 120 bp, synthetic construct
  source 1..120: mol_type = other DNA
gaaaatggctttcactgttggaggggatcttgaatccagaatctgttcccaaaaaagagaaagaaaagcagatttgggtgacctcaaaagtttcaaactaccttcccacgtatcctaaaa

SEQ ID NO: 83075 - DNA, 120 bp, synthetic construct
  source 1..120: mol_type = other DNA
aaaagaaaagagatcagactcctcccagaaaaacaatgaaagaaggaggtgtcacaccaagatcagtcaaacctccttcctacatttgtaaatccatccaagcactagctctgtgaccct

SEQ ID NO: 83076 - DNA, 120 bp, synthetic construct
  source 1..120: mol_type = other DNA
agagccttggacataccaagtgctctgtaaatgttagccttacaaatgtaaggtggtgttttagatttacagaacacagtatatcctaaggtatcacaggcttgttgatgaactctgttg

SEQ ID NO: 83077 - DNA, 120 bp, synthetic construct
  source 1..120: mol_type = other DNA
tgcaagaccctatctctacaagaaataaattaataaaagacttcttcggacatgactagaacccaagaggtgggtacctggtagagttatatgggaagaatggagcaatgggtttggcag

SEQ ID NO: 83078 - DNA, 120 bp, synthetic construct
  source 1..120: mol_type = other DNA
cctgaatccaaccctgtaaaataagaagaaattcagacattgcaaggcatgaaaaattttctcccaatagcaaaggtgaaggatgtactcggagaggagggaacataccaagaagagaag

SEQ ID NO: 83079 - DNA, 120 bp, synthetic construct
  source 1..120: mol_type = other DNA
gaagaggaggccttcggaccttttacctgagcagcctggtttactctaggctctgtcttgtttcctgtccagagattaatgcaacaaactgtctccaaattcatccaagggagtggagtt

SEQ ID NO: 83080 - DNA, 120 bp, synthetic construct
  source 1..120: mol_type = other DNA
ctcagtatttagtatttagagatgtagtatttagtatttagagattcctaaacactgaggggctctgcccagtctccttcctcacactgtggggccttggctttccctcccaactccaca

SEQ ID NO: 83081 - DNA, 120 bp, synthetic construct
  source 1..120: mol_type = other DNA
tggtgactagagaccccatgagcccccaccctccagcctggggcgggatagcccaatcggatgctggggggtccgtttggaaaccactctctgctttgaggacacgcgcggagcttccct

SEQ ID NO: 83082 - DNA, 120 bp, synthetic construct
  source 1..120: mol_type = other DNA
cgcagtgcaggaagaatgcaggggcgcttggtggggaggtgagtgagtgcagagggtctccgggaactccttgggcctttggggtagctccctctcagactgtcctgcaggtccttacaa

SEQ ID NO: 83083 - DNA, 120 bp, synthetic construct
  source 1..120: mol_type = other DNA
ggtaaccgacggattggggacaaatgctctgcccagtctgatcccagacatccttgtaacccaatatagttacagctccgacgccatgttcttcctgggtccagctccaacgccatgtcc

SEQ ID NO: 83084 - DNA, 120 bp, synthetic construct
  source 1..120: mol_type = other DNA
aaagttgcaatggtagtacagagttgccatccgctccacagtcagtttcccctgatgttaacatctctcattactatggtccatttgtcacagctaatgaagccattttcataccttatt

SEQ ID NO: 83085 - DNA, 120 bp, synthetic construct
  source 1..120: mol_type = other DNA
gaagagacttatactgagtttgttgcttgatttttcctctgcttctgaatatcttttgagagcaaaatttactttctaaaatggtaaggatgagtcaactccttaaaagctgtttgggct

SEQ ID NO: 83086 - DNA, 120 bp, synthetic construct
  source 1..120: mol_type = other DNA
gttaatttggatcttcaatggccatccttggggtcttttgagttccccaaacttgtctttcttaaaactaaagtaggctgggcgcggtggctcacgccggtaatcccagcactttgggaa

SEQ ID NO: 83087 - DNA, 120 bp, synthetic construct
  source 1..120: mol_type = other DNA
gcattgctataaagaatacatgagactgggtaatttataaagaaaaatgagtttaattggctcacagttctgcaggctttatgggaagcacggtgctgggcatctgatcagcttctgatg

SEQ ID NO: 83088 - DNA, 120 bp, synthetic construct
  source 1..120: mol_type = other DNA
ggatcaggccagccagtatctttttgcctttaccttggaaggccaacaattcacctggacagtaatgcctcttgcttttactgaaaacccttcctgtgtttttcaaatattaaaggaaca

SEQ ID NO: 83089 - DNA, 120 bp, synthetic construct
  source 1..120: mol_type = other DNA
agatatctgcaagcagcctggtgatctcaaatcataaaaaatgcaacagatatacaaaaaataaacaacaggaaattaaatcatatcaccagagaatcaccttcactaaaaggaagacat

SEQ ID NO: 83090 - DNA, 120 bp, synthetic construct
  source 1..120: mol_type = other DNA
tagaaacaaaagttatgtgagcattcacaaaacctggtttttaacttcatataactgaaagaaacactgagaagggtaggatgttgtcccgaattgccaatgccgccccagccccatcct

SEQ ID NO: 83091 - DNA, 120 bp, synthetic construct
  source 1..120: mol_type = other DNA
cattgtttctggtctcaatgcactttcaccacatctgattttcaactatgtgagttaggacacctatatggtcaatcaatcaaccagggaaagaaactaaggtccagagccctaaggatg

SEQ ID NO: 83092 - DNA, 120 bp, synthetic construct
  source 1..120: mol_type = other DNA
tggttgtttgccaggaagctggtggctaggaaggattgagagggagtagaggggagaccatgttttgtaacaggggaaatgaaagggaagcaggtagcacctggagcctgcctcatgtag

SEQ ID NO: 83093 - DNA, 120 bp, synthetic construct
  source 1..120: mol_type = other DNA
gtcagtcacctgtgcctgcagatgagaaaccgccgcctaacctttctgaacctcatgcggaaaaaatgtttgcaccactagcctccagcacagagattccatcccagctcagtatttagt

SEQ ID NO: 83094 - DNA, 120 bp, synthetic construct
  source 1..120: mol_type = other DNA
acggctgcttctctccgaggtttgtggcctgagaaactctccgctgcgaatctgggctggcctctccgggaagccttgaaactcaactcccgggtgggccaggaaggctgcccgacttgg

SEQ ID NO: 83095 - DNA, 120 bp, synthetic construct
  source 1..120: mol_type = other DNA
actaagtgaggggcacaggtgcaacagaaagaaagactgatttgcaattgacttgtaggtgtaatcggttttagtccctatttgaccaccagaggtctgcagctctatccttggtgagtt

SEQ ID NO: 83096 - DNA, 120 bp, synthetic construct
  source 1..120: mol_type = other DNA
ttctggggccagttacttccctttcttagccaccccatgctttacagaactgaactccacagtcatactcatctctcccagtgaagctcaaaggaattattaataaaaaacacaaaaaca

SEQ ID NO: 83097 - DNA, 120 bp, synthetic construct
  source 1..120: mol_type = other DNA
aacagttcaactcagaccaaaagataaagctgatctcgaggtaaccgcgctcactaatgaagatctcgtggacccgcttgcgaggtataaagagaaacctagtcctactggagaacaacc

SEQ ID NO: 83098 - DNA, 120 bp, synthetic construct
  source 1..120: mol_type = other DNA
taatggcttcaggacacaaaaccttcgttgtcagtaggatgactggaaatttcaagcatgcagctcctattctgcaactcagtaaattttcaaacataccccaaactccaaagagaccac

SEQ ID NO: 83099 - DNA, 120 bp, synthetic construct
  source 1..120: mol_type = other DNA
ggtgtttatgaggaaaactacagcaataatctcttctgtaacttttattaatagtaatgttagactcagaaatggtggcctccatgttcttccgcccgctgttggtggccgccacccttc

SEQ ID NO: 83100 - DNA, 120 bp, synthetic construct
  source 1..120: mol_type = other DNA
gaaaggaacaaagatgctgctaaggcagatctcaactacactggcctcgatggaagtataggctgcctagtaaatggtgctggtttggctatggccacaatggatataataaaacttcat

SEQ ID NO: 83101 - DNA, 120 bp, synthetic construct
  source 1..120: mol_type = other DNA
cagcaccaaatacataataaatgtaacaatcactatttataaacagagctttcaaacactcctcagaaaatcaaaatacttctaagtattttgatgaagtaactttgtaattatgtgaac

SEQ ID NO: 83102 - DNA, 120 bp, synthetic construct
  source 1..120: mol_type = other DNA
gcgcccggcctgaaggacacccttagagaagtgcaaaatactatggcaggtttcaacaatagaatcaaacaactagaagaaagaacttcagagctctaagacaaggctttcaaattaact

SEQ ID NO: 83103 - DNA, 120 bp, synthetic construct
  source 1..120: mol_type = other DNA
caatgtaaatggcctaaatgctccacttgaaagatatggaattgcaaaatggataagaattccccaactaagtatttgctgtcttcaagagactcacctaacacataaggacacatacaa

SEQ ID NO: 83104 - DNA, 120 bp, synthetic construct
  source 1..120: mol_type = other DNA
gagcagcctgactgatatggtgaaaccttgtctatactaaaaatacaaaaattagcttggtgtggtggtgggtacctgtagtcccagctactcaggaggctgagacaggagaattgcttt

SEQ ID NO: 83105 - DNA, 120 bp, synthetic construct
  source 1..120: mol_type = other DNA
gcaggcgcgcgccgccacgcctgactagttttcgtatttttttggtggagacggggtttcgctgtgttggccgggctggtctccagctcctaaccgcgagtgatctgccagcctcggcct

SEQ ID NO: 83106 - DNA, 120 bp, synthetic construct
  source 1..120: mol_type = other DNA
ccctctgcccggccaccaccccgtctgggaggtgtacccaacagctcattgagaacgggccaggatgacaatcgcggttttgtggaatagaaagaggggaaaggtggggaaaagattgag

SEQ ID NO: 83107 - DNA, 120 bp, synthetic construct
  source 1..120: mol_type = other DNA
ccctaataccaaaaccaggagaggacataacaaaaaaaaaacaaaactacaggccaatatacctaatgagcatagatgcaaaaatcctcaaaacatactagtggccgggcgtggtggctc

SEQ ID NO: 83108 - DNA, 120 bp, synthetic construct
  source 1..120: mol_type = other DNA
ataccttaaggaaataaaaggcatctatgacaaacccagagccaacattatactgaacgggggaaagttgaaaccattcccgctgagaactgggacaagtcaaggattcccactttcacc

SEQ ID NO: 83109 - DNA, 120 bp, synthetic construct
  source 1..120: mol_type = other DNA
gggagaggacaccgtattcaacaaatggtcctgggttaattggcaggccatatatagaagaatgaaaccggattctcttctctcatcctatacaaaaatcaactcaaggtggatcaaaga

SEQ ID NO: 83110 - DNA, 120 bp, synthetic construct
  source 1..120: mol_type = other DNA
aaccaaacatggtatgtcctcactcataaatggtagctaagctatgaggatgcaaaggcataagaatgataaaatggactttgaggactcaggggaagaggggtagggaggtgagagata

SEQ ID NO: 83111 - DNA, 120 bp, synthetic construct
  source 1..120: mol_type = other DNA
aaattccttaattttacatcctgccatgtcaagatttcttccagttccggggattctaggatttgcagaagacatcagtaccacttacatttccaactctgggtcccggaaagaaagagt

SEQ ID NO: 83112 - DNA, 120 bp, synthetic construct
  source 1..120: mol_type = other DNA
gacaatcgacaagaccagaaattagatttgagtccagaatcaaggacctttaagcagggattggagatggcagggggccaggattaagggatatagacagcaggtcctgtctgcttaggt

SEQ ID NO: 83113 - DNA, 120 bp, synthetic construct
  source 1..120: mol_type = other DNA
ctgaggtttccaactcctccttgcaaaccctccctccagccttttcatggcaacactccaggaaaatggaaagttgatcatttttttcttccactccttaatcctttcctgactgctact

SEQ ID NO: 83114 - DNA, 120 bp, synthetic construct
  source 1..120: mol_type = other DNA
acatatctttgtggggacaaccattcaacccactacatctggctaagctaatatttcccagagtggcaatccaccagtgcaccccaggttacaatcctcattctaattcccaaataaact

SEQ ID NO: 83115 - DNA, 120 bp, synthetic construct
  source 1..120: mol_type = other DNA
ggatcttcaatggccatccttggggccttttgagttccccaaacttgtcttccttaaaacaaaactagaagaccatggtcctaaaattaaacaatgtgaatgggaggcttagtttacttg

SEQ ID NO: 83116 - DNA, 120 bp, synthetic construct
  source 1..120: mol_type = other DNA
taatggcattcaaagcaacctggatggagctggagaccattattctgagtgaattaactccggaatggaaaaccaagcattgtatgttctcacttataaatgggagctaagctatgagaa

SEQ ID NO: 83117 - DNA, 120 bp, synthetic construct
  source 1..120: mol_type = other DNA
ggacacagccggcctggagaaattcagtggactgagagatggctattatatccaagcccagagtaccatcatagtgtttgatgtaacatcgagagttacttacaagaatgtgcctaactg

SEQ ID NO: 83118 - DNA, 120 bp, synthetic construct
  source 1..120: mol_type = other DNA
tgcaggaacagaaaaccaaatactgcatcttctcacttataattgggagctaaacactgagcacacatagacataaacatgtgtataacagacactgtagacgactagagtggagagggt

SEQ ID NO: 83119 - DNA, 120 bp, synthetic construct
  source 1..120: mol_type = other DNA
aaagtgagggggaggaatattcatatgttttatgggaacaggcagtgaacttctccaaactggtaataccgctttccttttggtccttttaggacttcttctactcatcgtcatggagat

SEQ ID NO: 83120 - DNA, 120 bp, synthetic construct
  source 1..120: mol_type = other DNA
tatgataaaaattgatacaatccacagaaacaaaatttatttgggtcctcactaatttcttttttcttgttgcccaggctggagggcaatggcacgatcttggctcaccgcaacctcctc

SEQ ID NO: 83121 - DNA, 120 bp, synthetic construct
  source 1..120: mol_type = other DNA
gccgtggatggagcaggaggggtcagagtattgggaccgggagacacggagcgccagggacaccgcacagattttccgagtgaatctgcggacgctgcgcggctactacaatcagagcga

SEQ ID NO: 83122 - DNA, 120 bp, synthetic construct
  source 1..120: mol_type = other DNA
gctagctcatcccgattctagaactttccaaggaataagaggctatcccagatccctaagtccaggctggtgtcaaggttttgtcctcttctcctactataattgtcctcttccttctca

SEQ ID NO: 83123 - DNA, 120 bp, synthetic construct
  source 1..120: mol_type = other DNA
ggttcaagcaattctcctgcctcagcctccctagtagctgggactacacatgcgtgccaccacacctggctaatttttttttttgtatttttagtggagatggggtttcactatgttggc

SEQ ID NO: 83124 - DNA, 120 bp, synthetic construct
  source 1..120: mol_type = other DNA
ccctgttagcacaatgtgaggaggtagagaaacagtccacctctgtgtctaccatgacccccttcctcacactgacctgtgttccttccctgttctcttttctattaaaaataagaacct

SEQ ID NO: 83125 - DNA, 120 bp, synthetic construct
  source 1..120: mol_type = other DNA
aagagattattctcttcccacagataccttttctctcccatgaccctttaacagcatctgcttcattcccctcaccttcccaggctgatctgaggtaaactttgaagtaaaataaaagct

SEQ ID NO: 83126 - DNA, 120 bp, synthetic construct
  source 1..120: mol_type = other DNA
taagtcttttttttttttttttttgagactgagtttcactcttgtcacccaggctagagtgcaatggcatgaccttggctcactgcaaacttggcctcccaggtttaagtgattctcctg

SEQ ID NO: 83127 - DNA, 120 bp, synthetic construct
  source 1..120: mol_type = other DNA
tctgagggtgatgggagacactgacaggtcatcaggcattagattctcataggagcgagcaacctagatccctcgcatgcacagttcacaataagattcacactcctatgagaatctaac

SEQ ID NO: 83128 - DNA, 120 bp, synthetic construct
  source 1..120: mol_type = other DNA
tttaacagcccctctcagccagctagcccagactaggatcttaacgggggctgggacttacttccatatattgtaaatgatgtaaccttgtcttcatgatgaccttaaatatatcttgat

SEQ ID NO: 83129 - DNA, 120 bp, synthetic construct
  source 1..120: mol_type = other DNA
atgcaaatcagcgtccctgcagggtatgtaaaggacctctacctatgctttctatgggggaacaaatatcccatgggacactgaaagactatggaacattgtagaacatgtatttaccaa

SEQ ID NO: 83130 - DNA, 120 bp, synthetic construct
  source 1..120: mol_type = other DNA
tcagacgatgggcggccgggcagatacgctcctcacttcctagatggggtggtggccgggcagaggctgcagtctcggcactttgggaggccaaggcaggcggctgggaggtggaggctg

SEQ ID NO: 83131 - DNA, 120 bp, synthetic construct
  source 1..120: mol_type = other DNA
tttttattgcacatctataaaaacaagaaaagaattttcttgcttttcttttttttgagacacagtctcgcactgtcgcccaggctggagtgcaatggcacaacctctgctcactgcaaa

SEQ ID NO: 83132 - DNA, 120 bp, synthetic construct
  source 1..120: mol_type = other DNA
cgccgagttagtggtggcaaccaaagcgaacagaggacttggcttcctgaaaacagaggcaaagaagtatagctatccaaccttctgagtcttgtctctatatggagatgcccatatgga

SEQ ID NO: 83133 - DNA, 120 bp, synthetic construct
  source 1..120: mol_type = other DNA
tatgttaaagattttttagcccttgaactgctgtctgaaattctttttctttcttttttttttttctttttttgagacagtctcactctgtcgcccaggctggagtgcagtggtgcgatc

SEQ ID NO: 83134 - DNA, 120 bp, synthetic construct
  source 1..120: mol_type = other DNA
cctttgctttatgtatttaattttatatattaactgattcttatttttctacaattaatccagcttctgtaatttttaatatttcctctggaaaggataaagataacattgacatctctg

SEQ ID NO: 83135 - DNA, 120 bp, synthetic construct
  source 1..120: mol_type = other DNA
tcatcagttttataagtctgaaatttagtatttaagtcactaataaaaacacatttttgtggccgggcgtggtggctcacacctgtaatcccagcactttgagaggccaaggtgtgcgga

SEQ ID NO: 83136 - DNA, 120 bp, synthetic construct
  source 1..120: mol_type = other DNA
cagctcactgcaacctccacctcctgggttcaaatgattatcctgcctcagcctccccagtagctaggattacaggcatgcaccaccacacctggctaattttatatttttagtagagac

SEQ ID NO: 83137 - DNA, 120 bp, synthetic construct
  source 1..120: mol_type = other DNA
tctgtctcaaaaaaaataaaataaaacaaaaatataaaaatttggtgggtgtggtggcacacacctgtagtcccagctactcaggagactgaggcaggaagatcgcttgaacctgggaga

SEQ ID NO: 83138 - DNA, 120 bp, synthetic construct
  source 1..120: mol_type = other DNA
gttcaagcaattcctgcctcagcctcctaggtagctgggattacagggatgtgccaccacacctcgctaattttgtatttttagtagagacgggttttctttttttctttttttttttgg

SEQ ID NO: 83139 - DNA, 120 bp, synthetic construct
  source 1..120: mol_type = other DNA
aaagaatgcatgagtttgttcataaagcataacagtgggcgtgggtaaccaatgaagactgctcggaatatccattaagcacaaattcctgcgaaaatacataagaccacaggcaccaga

SEQ ID NO: 83140 - DNA, 120 bp, synthetic construct
  source 1..120: mol_type = other DNA
atatccatgagtagacaataagagtttgtggcttttatcttgctagcagactcatttactgactcaagtaatcaagctgccatgttaaggaggtccatgtggtgaggaactgagagtgct

SEQ ID NO: 83141 - DNA, 120 bp, synthetic construct
  source 1..120: mol_type = other DNA
ggcctgacactcaatcttctcttgggaactaattatggcaatgtaccacgaggtactgttcctcagactaaacgtggttttttgtttgtttgtttgttttttagacaggctctcactctg

SEQ ID NO: 83142 - DNA, 120 bp, synthetic construct
  source 1..120: mol_type = other DNA
ggagaaacggtcgattctaggactggggcatcctatgatgtcagaaagtatttacatgctcgattaaaaggtgagaaccatatcaaagggacacaggagccaactggaaataattccaat

SEQ ID NO: 83143 - DNA, 120 bp, synthetic construct
  source 1..120: mol_type = other DNA
tatctgaagcctcatactgcatactgcaagggaaaaggactccactgaattagtacaggcaagtcactataaaaatatctgaaccctcatactgcaagggaaagggactccacagaatta

SEQ ID NO: 83144 - DNA, 120 bp, synthetic construct
  source 1..120: mol_type = other DNA
aacatatgcaaatttgggggttagtggggagaagctagcaatcaagaattttacatcaagaaaaattatccttcaaaactgaagaccggtacagggacagtggtttgcacccataatccc

SEQ ID NO: 83145 - DNA, 120 bp, synthetic construct
  source 1..120: mol_type = other DNA
cccctcacctcagcctcctcctgagtagctgggactacagatgcacaccgccatgcctggctccttttcatttcttaactgttttaaaagaaattacataaaacaacaattataaaatta

SEQ ID NO: 83146 - DNA, 120 bp, synthetic construct
  source 1..120: mol_type = other DNA
acaagccaagatcgcaccactgcactccagcctgtgcaacaggagcgagcctccatctcaaaaaaaaagaaactcaaaagaaagtaaccatttgtctcttatctacctatgacctggaag

SEQ ID NO: 83147 - DNA, 120 bp, synthetic construct
  source 1..120: mol_type = other DNA
gatagatagatagatgatagatagatatatagttttttttttttttttttttttgagacggagtttcgctcttgccgctgcccaggctatagtgcaatggcgccatctcggctcaccgca

SEQ ID NO: 83148 - DNA, 120 bp, synthetic construct
  source 1..120: mol_type = other DNA
cagctcacttattgccccagatgtatgtggagtaaccgccttcagtttcctggttctgagtttccgtgttactcaagcaatgcttctgctgaatttgtcttttttttttttttgagacag

SEQ ID NO: 83149 - DNA, 120 bp, synthetic construct
  source 1..120: mol_type = other DNA
ctcagcctcccaaagtgctgggattacaggcgtgagccaccgtgcctggtctcgttctttattttttattttattttttgacaccagatctgctctgttactcaggctagagtgcagtgg

SEQ ID NO: 83150 - DNA, 120 bp, synthetic construct
  source 1..120: mol_type = other DNA
tccacaccgtaaaagctgctttgttcttttgctttttgcagtaaatcttagtgctcctcactctttgcgtctacgctgcttttatgaactgttaacactcactgtgaaggtctgcagctt

SEQ ID NO: 83151 - DNA, 120 bp, synthetic construct
  source 1..120: mol_type = other DNA
atgtttaatacttttcctccacttaacaaacatggctacgatttgccaagttgctgatcatcctttttttttttttttcgagacagagtttcacccttgttgcccaggctggagtgcagt

SEQ ID NO: 83152 - DNA, 120 bp, synthetic construct
  source 1..120: mol_type = other DNA
gagggatgctcgccaatctcctctgaattttgcaaccctgtgtgttaaaaacaggtatttctggtctttaaagacacttggaaaagacagacttgttgaatacttagaaaggccaagcca

SEQ ID NO: 83153 - DNA, 120 bp, synthetic construct
  source 1..120: mol_type = other DNA
cccagcatggcatttgagctccgaaaatggacagactgcctcctcaagtcggtccttgacccccgtgtaccctgactgggagacacctcccagtaggggccaacagacacctcacacagg

SEQ ID NO: 83154 - DNA, 120 bp, synthetic construct
  source 1..120: mol_type = other DNA
aaagtgacggggagaatggaaccaagttacaaaatactcttcaggatgttatccaggaggacttccctaacctagcaaggcaggaaaacattcaaatttaggaaatacaaagaacaccac

SEQ ID NO: 83155 - DNA, 120 bp, synthetic construct
  source 1..120: mol_type = other DNA
aagagatttagactcccacacagtaataatgggagactttaataccccactgtcaatattagacagatcaatgagacagaaggttaacaagcatatccaggacttgaactcagctctgga

SEQ ID NO: 83156 - DNA, 120 bp, synthetic construct
  source 1..120: mol_type = other DNA
caaaaaaagtccaggaccagacggattcacagccaaattctactggaggtacaaagaggagttggtaccattccttcggaaactattccaatcaatagaaaaagagagaatcctccctaa

SEQ ID NO: 83157 - DNA, 120 bp, synthetic construct
  source 1..120: mol_type = other DNA
aaacagagagccaaatcatgaatggactcccattcacaattactacaaagaaaataaaatacctaggaatccaacttacaagggatgtgaaggacctcttcaaggagaactacaaaccac

SEQ ID NO: 83158 - DNA, 120 bp, synthetic construct
  source 1..120: mol_type = other DNA
tctgcacagcaaaagaaactatcatcacagtgaacaggcaacctacagaatggggaaaaattttgcaatctacccatctggcaaagggctaatatccagaagctacaaagaacttaaaca

SEQ ID NO: 83159 - DNA, 120 bp, synthetic construct
  source 1..120: mol_type = other DNA
gttgatgggtgcagcaaaccaccatggcacaggtatacctatgtaacaaacatgcatgttgtgcacatgtaccccagatcttaaagtataataaaataaaaaataaaaaaaatcttccct

SEQ ID NO: 83160 - DNA, 120 bp, synthetic construct
  source 1..120: mol_type = other DNA
agaatggtgtgaaccttgcagtgagccgagatcacgccactgcactacagcctgggcaacagagcgaaaccccgtctcaaaaaaaaaaaaaaagaaagaaaaaaaaaagaaataacttct

SEQ ID NO: 83161 - DNA, 120 bp, synthetic construct
  source 1..120: mol_type = other DNA
tcacacctgtaatctcagaactttgggaaacaggcaggatcacttcagcccagaagtgtgggaccagtctgggcaacatagtgagatcctgtctcttaaaaaaaaaaagaaaagaatcaa

SEQ ID NO: 83162 - DNA, 120 bp, synthetic construct
  source 1..120: mol_type = other DNA
aagaaaaaaaaagaagaagaacttcttgacttgactcagcaggactttttccatgggtctaaagctaggtgtgaagagagtgagctcgtggtgagaggaacttgttcatcaaaaggagtc

SEQ ID NO: 83163 - DNA, 120 bp, synthetic construct
  source 1..120: mol_type = other DNA
cagaagtggactcagtgcacgaggaccattttccacatccctatgattgcatcccaatcaatcagcagcacccattccctagccacctgcccagcaaactatctttttttttcttttttt

SEQ ID NO: 83164 - DNA, 120 bp, synthetic construct
  source 1..120: mol_type = other DNA
gcctcccaaaatgctgggattacaggcatgagccactgcacccagcttaaaacaatgttttaacctcttgttgataagagtgtaaacttatcacctttgggggaagtaatttagtaccta

SEQ ID NO: 83165 - DNA, 120 bp, synthetic construct
  source 1..120: mol_type = other DNA
tttatccaaacctcattatagcccaggccccacctccaaagactatcacattgggaattagagagcttcaacatacagtttgaggggactacaaacattccattcatggcaactaggaat

SEQ ID NO: 83166 - DNA, 120 bp, synthetic construct
  source 1..120: mol_type = other DNA
aatcttcccctccatccatctttgctgatatataaacaggaaaaagttgggggagagaatacaggaacacggaacaaacagtaaacaatggttatctcatagacgtgattggcggcattt

SEQ ID NO: 83167 - DNA, 120 bp, synthetic construct
  source 1..120: mol_type = other DNA
atatctggacaccatggcccagacaagttgacacataaaattaaacatcgtaatgagatctgctgctatctatgaatttatgtttctagtgtatttgtaaggtacatggatcattccttt

SEQ ID NO: 83168 - DNA, 120 bp, synthetic construct
  source 1..120: mol_type = other DNA
gttactcatggggtgacttcagaagccctaaaagattttgtttcccaatttttttttttttttgacaagatcttgctctgttgcccaggctagagtgcagtggcacgatcatagctcaca

SEQ ID NO: 83169 - DNA, 120 bp, synthetic construct
  source 1..120: mol_type = other DNA
tgagatcacgccactgcattccagcctgggcgacagagcaagactcggcctcaaaaaaaaaaaaaaaaaaaaaaaaagatggctgattttggccaagtgcagtggctcatgcctgtaatc

SEQ ID NO: 83170 - DNA, 120 bp, synthetic construct
  source 1..120: mol_type = other DNA
ttcgagcacaaaaaaataatgactgtaaccaattgtgaaatattaaatggatacctggcatggtgtagtcccagcactttgaggccaaggcaggtggatcacttaatctcaggcaacatg

SEQ ID NO: 83171 - DNA, 120 bp, synthetic construct
  source 1..120: mol_type = other DNA
aattgggggaaaacccctcaaaactcagggagacagatgaacacattaagtgacatcaaagaaacagtaagacaaatctagaatgttgaacagtctaaaagacaactgccctagtatcct

SEQ ID NO: 83172 - DNA, 120 bp, synthetic construct
  source 1..120: mol_type = other DNA
gaggcagaggttgcagtgaaccaagattgcaccactgcactccaacctgggtgacagagcaaaactccatctcaaaaagaaaaaaaaagttcaaatggttgagaaaagacaacacttgta

SEQ ID NO: 83173 - DNA, 120 bp, synthetic construct
  source 1..120: mol_type = other DNA
gctgagtgaagtaagccaggcacagaaagacaaatactgtatgttctcacttataagtggaatctaaaacaatcgaacttaaaggaggagagagcagaatagtagttaccagaggctggg

SEQ ID NO: 83174 - DNA, 120 bp, synthetic construct
  source 1..120: mol_type = other DNA
cattcctggctgcagctcattaatatttcttctttgttctcctgaggaatcaaaagattctcatttatgatatgtcaaaaggcacataaagaaacatatccaaactttgttgtctcttca

SEQ ID NO: 83175 - DNA, 120 bp, synthetic construct
  source 1..120: mol_type = other DNA
tagcttcatcacaccacgttactaggtttttcctgtctcactggctcctttccctgctctcctttttatatgtttcctgctttcttcctcagccttctctgctccccacacctatatgtt

SEQ ID NO: 83176 - DNA, 120 bp, synthetic construct
  source 1..120: mol_type = other DNA
acagactactgattttttgtgtttgttttgttttggcagtctgacataactttatactaatgcagcttctagccctgtcccccactccttcctgatcagtatcccaatgtccctcctata

SEQ ID NO: 83177 - DNA, 120 bp, synthetic construct
  source 1..120: mol_type = other DNA
ccctagactctcccaaatacccctgatgaaacccctgaggtggaaaaagataaagacaagcaaagataaacagcacaggaagcagaggtacaaatagaattctgatttttctcctttctc

SEQ ID NO: 83178 - DNA, 120 bp, synthetic construct
  source 1..120: mol_type = other DNA
aactaaaaatttgtatcaacatgaagtcctagaattatactgcatgagcccccaggatttggagaacatcattcacccttcttaatccaaaaacttgggtgcctgaaggtggggttttga

SEQ ID NO: 83179 - DNA, 120 bp, synthetic construct
  source 1..120: mol_type = other DNA
gcctggggaaccaaaacaagaaaaaaatggaggagagttttgagcaagaactaaagccaaggaaagatggggaagaggcaaagactaggaataacaataatctttagagctgctggcatt

SEQ ID NO: 83180 - DNA, 120 bp, synthetic construct
  source 1..120: mol_type = other DNA
aacctgagggaaatgagcactcagtactttcctcaatgtcccaccttctctctttcccttacccaccctccccgtcatacctgcaactgcctaggcagaagagatgggaagatgaggcct

SEQ ID NO: 83181 - DNA, 120 bp, synthetic construct
  source 1..120: mol_type = other DNA
gttgcagtgagctgagattgcaccattgcactccagcctgggcaataagagggaaactccatctcaaaaaataataataataattacgatgacttgtccaaggagaaaactggaagcctt

SEQ ID NO: 83182 - DNA, 120 bp, synthetic construct
  source 1..120: mol_type = other DNA
tacagggatgagccaccataccggccgccactcatccttcttgatcataatcctctccctctatacatgcaagctttatccttttaaggaaatcaactccttacatttctctttagttta

SEQ ID NO: 83183 - DNA, 120 bp, synthetic construct
  source 1..120: mol_type = other DNA
tgcctattcaacatctccactagggatatttaaaaagaatctgaaatttcatttctgattcccctctcctccccaaagccttcaaatctgcttctcccccagtcttcccatctcagtatt

SEQ ID NO: 83184 - DNA, 120 bp, synthetic construct
  source 1..120: mol_type = other DNA
acctttttgccatttccacagcagtatgtcccatccctagaatatctggcacctggttaagtgttcagtacatatttgttgaatgggtaaatgaatgagagctggagggaaatccaaact

SEQ ID NO: 83185 - DNA, 120 bp, synthetic construct
  source 1..120: mol_type = other DNA
cctcagcctcccaaagcgctgggactatataggcatgagccctcacacatggccgtcatccattcttttactcaggtatcaatgtccttatttttaaaatcaaagtaactaagactcaga

SEQ ID NO: 83186 - DNA, 120 bp, synthetic construct
  source 1..120: mol_type = other DNA
tccgactcttcttcaagactgagatcagagggcacaaaaggatgggcacacgggcttaggcctctcatctctcccaccacccttaggcccaagaccaggtgcccccttgtcaataagcct

SEQ ID NO: 83187 - DNA, 120 bp, synthetic construct
  source 1..120: mol_type = other DNA
aatgagataaggaagaaagggcatctttgggctgggcaggaggaagtccccagctgcattcatagaatccctggagctccaacacttggattttctattggtctgtgatgagctaaagga

SEQ ID NO: 83188 - DNA, 120 bp, synthetic construct
  source 1..120: mol_type = other DNA
ctgctgtctctctcaaaatgcagtcggtatctaagggaacagggaccgagacatccagagcaatcctgtggccacaaactcctattttctcccctcttgtacaatcaacttcgcaaacca

SEQ ID NO: 83189 - DNA, 120 bp, synthetic construct
  source 1..120: mol_type = other DNA
tcccgtttgtcctgcaactgcttcttcttctgcttcacgctgaatggcttcttcctcggcatggcccggaccagtcacctggcccgccctccgccgagctcccgccgcctcaactgactg

SEQ ID NO: 83190 - DNA, 120 bp, synthetic construct
  source 1..120: mol_type = other DNA
gcggaaacagaatccccgcgtgccccttcctcactaccctccaaatcccgctgcagccattgccgcagacacgatgccgaaacgaaagaagcagaatcatcaccagccaccgacacagca

SEQ ID NO: 83191 - DNA, 120 bp, synthetic construct
  source 1..120: mol_type = other DNA
gatccttgtattaggtcgtagagaagacagcaagggaggggataaaacccaggaaggacttaaaaataaaagatcagggattccatccctaaatgaatggagagaagttgtatatttgct

SEQ ID NO: 83192 - DNA, 120 bp, synthetic construct
  source 1..120: mol_type = other DNA
aatcccagcactttgggaggccgaggcgggcgaatcacgaggtcagcagttcaagaccagcctgaccaacatggtgaaacccctgtctctactaaaaatacaaaaattagccgggcatgg

SEQ ID NO: 83193 - DNA, 120 bp, synthetic construct
  source 1..120: mol_type = other DNA
gatgaactttgaggactttatgttaagtaaagacatagtgtattattccacttatctgaggtgtctaaagtcaaattcaggggctgggcatggtgcttcacgcctgtaatcccagcactt

SEQ ID NO: 83194 - DNA, 120 bp, synthetic construct
  source 1..120: mol_type = other DNA
ttaggagaccaaggtgggaggatcacttgagcccaagagttcaagaccagcctgggcagtgtggcaagacccaatctctcattaaataaataataataaccaaacaaaaaaataaccacc

SEQ ID NO: 83195 - DNA, 120 bp, synthetic construct
  source 1..120: mol_type = other DNA
cttcaataaaaaaaatttttttaatcacggtttatcaggattcagctgcccattagacacctttctgtgtctctctctctctctctctccagctcttcacagaggtcctccaggatcaag

SEQ ID NO: 83196 - DNA, 120 bp, synthetic construct
  source 1..120: mol_type = other DNA
ctgtagagactcgcctttgggacccatctttgcttcctttcagttgcctcctggatcttctttcccgtcatcaaatgactgctgaacaggaaacctctttggtgctgtttcttgtgcatc

SEQ ID NO: 83197 - DNA, 120 bp, synthetic construct
  source 1..120: mol_type = other DNA
tggaaaccagcattttatttaatccctgtgttctagtcatctctggagttgcagatgaagctgttctcacctggtggagtcagcttattctttagttcatacacactagtgatggggaat

SEQ ID NO: 83198 - DNA, 120 bp, synthetic construct
  source 1..120: mol_type = other DNA
caaaataaaagtatcagatttctccaggtagttctggcttatgtaactgccatttaaaaagaagtcttaagatagaagtttatggctgggcgcggtggctcacgcctgtaatcccagcac

SEQ ID NO: 83199 - DNA, 120 bp, synthetic construct
  source 1..120: mol_type = other DNA
ctcccaaagtgctgggattacaggtgtgagccaccacgcccagccggaagaaacttcttaaaagttaacttataactcctcaacttatgggcaagcatttaagttgagtttattaattct

SEQ ID NO: 83200 - DNA, 120 bp, synthetic construct
  source 1..120: mol_type = other DNA
tccatatccaaaaaaaaaaaagacatggtggctaggatagacctctctgaggaatctgtagatgaagggcccagaacttagccttgaggaactctgacattgaattgctaagtgaagaag

SEQ ID NO: 83201 - DNA, 120 bp, synthetic construct
  source 1..120: mol_type = other DNA
aggatcctttgaggttgcagtgagctatgattataccactacactccagcttgaatgacagaccaagatcctggttcaaaaaaaaaaaaaaaagcccagtgtggctagactgtgggagat

SEQ ID NO: 83202 - DNA, 120 bp, synthetic construct
  source 1..120: mol_type = other DNA
tgcttctgtcatttctgcccattctttgctgcctgccccctcccacctcccgcccaggttgttctcagcacagcctccagagtcatcctttttatttaacaatttaaaaaatgttatagg

SEQ ID NO: 83203 - DNA, 120 bp, synthetic construct
  source 1..120: mol_type = other DNA
atttaaatcaacagaagaagccaaaatccttaagataatttaaaagacctttcccaatccagaccctgctttacttctcttttcacctttcccacaactctggctcactcgtgccactcc

SEQ ID NO: 83204 - DNA, 120 bp, synthetic construct
  source 1..120: mol_type = other DNA
ctagattaaggagagtgtcaaagatttagccctgaggcacttcaacatttagacttcaggagaagcccattagatgcaaaggaaacctatagagagtagtgtccctgaagaaaacaaagg

SEQ ID NO: 83205 - DNA, 120 bp, synthetic construct
  source 1..120: mol_type = other DNA
aaacaaaaaacaaaacaaacaaaaaaacagtatgcctcaactccttcatactagtaggaaattattatgttcattccttgagtctcgcggcgtcgggaggtcacggcgtcaggcttccca

SEQ ID NO: 83206 - DNA, 120 bp, synthetic construct
  source 1..120: mol_type = other DNA
atcctcccagggttgaagtcagttttaagggggacataaatggacacaactaaccccagtaggtacacagtaactaattttaaaagcacttattggatgcctactgtataccaggtactg

SEQ ID NO: 83207 - DNA, 120 bp, synthetic construct
  source 1..120: mol_type = other DNA
gccaaggcctgaagaataaagagttactaaggaggcggcattgatcggaactgagaactgattaaatgaagggagaagtaaggttgacacttaagtaacccagtgactagtagactatta

SEQ ID NO: 83208 - DNA, 120 bp, synthetic construct
  source 1..120: mol_type = other DNA
tggcttattttttgtttgtttttgttttttgttttctgtagagatgaggtcttgctatgttgcccaggctaatcttgaacctctggcctcaaccagtcctcccaccttggtccccaaaat

SEQ ID NO: 83209 - DNA, 120 bp, synthetic construct
  source 1..120: mol_type = other DNA
ttgtgatccacccaccttggcctcccaatgtgctgagattacaggcctgagccgccgcacccgaccaatttttttttttttaatattaaatactgaaatgcttaagggtagaattagata

SEQ ID NO: 83210 - DNA, 120 bp, synthetic construct
  source 1..120: mol_type = other DNA
ttttttttttttttttttttttttgagatagagtcttgctctgtcacccaggctgcagtacaatagcgtgatctcagctcactgcaacctccgcctcctgggttcaagcaattctcctgt

SEQ ID NO: 83211 - DNA, 120 bp, synthetic construct
  source 1..120: mol_type = other DNA
cctatttaaaaatctctcttcctatagcctgcaagctccagaggagaccacatttgtcttgttcattgctatgatcccctacgctagcacaatatctgacacatggtagctgtttagtag

SEQ ID NO: 83212 - DNA, 120 bp, synthetic construct
  source 1..120: mol_type = other DNA
cttcattttctcactgttcttttgctctcagcagcaaaaaaaaaagcgagatacccgaaaaggcaggcggaagaaggatgtggatgatgatggagaagagaaagagctcatggagcgtct

SEQ ID NO: 83213 - DNA, 120 bp, synthetic construct
  source 1..120: mol_type = other DNA
acaaaaaaaaccatgccatttttatcactcagaaatctacagtgattctgttgctttaagcacagaacctgaaacaaagccccaggtccttgctcttctacttgtgactcttctgcgtgt

SEQ ID NO: 83214 - DNA, 120 bp, synthetic construct
  source 1..120: mol_type = other DNA
agggcaaaaagggaaaggaagagaagtcaaaagggaaggctaaggtgagagagtaactagcaggaggaggtattggggcccaggaattaaaacatttcatcagggctgggcgcggtggct

SEQ ID NO: 83215 - DNA, 120 bp, synthetic construct
  source 1..120: mol_type = other DNA
tcccaaaatgctgggtttacaggtgtgagccagcatgccagccagcaaactttttctataaagggccatatagtaaatgtttttggctttgcaggccacatacaatctctatcacatatt

SEQ ID NO: 83216 - DNA, 120 bp, synthetic construct
  source 1..120: mol_type = other DNA
taaatacacattcataccatttgtcttgtaccattcctggtagcagaaattaataaaggacctcagggagaccaggggctgggtatgagaatgagagaggatcccaagatattttaggac

SEQ ID NO: 83217 - DNA, 120 bp, synthetic construct
  source 1..120: mol_type = other DNA
tgtttcatggtgatgggaaactggtagactgtggcttcaaatgtagtttttcctaccttctcagatggagtatgagcgccaagtggcttcattaaaagcagccaatgcagctgaaaatga

SEQ ID NO: 83218 - DNA, 120 bp, synthetic construct
  source 1..120: mol_type = other DNA
gagggtcaatgaggaacttgagagtgttttatttggaacaagtacaaagagctgggcagggtcaggcaaaacagaaatgtaattgaagggaaagaaagatgagactcttggctcttgagg

SEQ ID NO: 83219 - DNA, 120 bp, synthetic construct
  source 1..120: mol_type = other DNA
ctcaaaaaaattaaaccgtatcctgcccgagaacttctctgaggagagcttgggaaggagtgttcatggtctcaggctctatctccgagttttctctggggttgtctgagcaaggatctt

SEQ ID NO: 83220 - DNA, 120 bp, synthetic construct
  source 1..120: mol_type = other DNA
tcaggtttctcttttttcctcttcctctccaggaaaaacaaacgaaggaagccctgactcggaagcagcagaaatgccgacggaaaaaccaagatgaggaatcccaggaggcccctgagc

SEQ ID NO: 83221 - DNA, 120 bp, synthetic construct
  source 1..120: mol_type = other DNA
ggcacacccacgtgttttggttatacaagaaatatatgtcttttatagaacgattaaaaattgcataaacgggccaggcacagtagctcactcctataatcccagcagggatcacctaag

SEQ ID NO: 83222 - DNA, 120 bp, synthetic construct
  source 1..120: mol_type = other DNA
gaggttccagttagccgaggtcgtgccactgcactccagtctaagtgacagagtgaggctctgtcaaaaaaaaaaaaaaaatgcttaagtcaagagaaaaatctggagataaccagtttt

SEQ ID NO: 83223 - DNA, 120 bp, synthetic construct
  source 1..120: mol_type = other DNA
tacaggtgtgagccaccacgcccggcaaactctaccattttatttgaacttttgtaatatattgccatctagtgtgttagaaagtttgtagccatttctgctctctctagcagtgttgag

SEQ ID NO: 83224 - DNA, 120 bp, synthetic construct
  source 1..120: mol_type = other DNA
gactccgtctcaaaaaaaaaaaaaaaaagttgatgtatggagctgcagcacctttttcccttgccctcctcttaactactttgtcttcccttgcagacccatggggaaatgagaaagaac

SEQ ID NO: 83225 - DNA, 120 bp, synthetic construct
  source 1..120: mol_type = other DNA
cccttatttcatgttctgattcccctctttctcctttcttcctgccctctgttgttgctatctttcttcaaagctgtgatcgttgtcagccatgatgcccgactcatcacagaaaccaat

SEQ ID NO: 83226 - DNA, 120 bp, synthetic construct
  source 1..120: mol_type = other DNA
ctaaatggatcttgtttgcagtcttgctgacagtgtttgctgtttaaggatcataggattcctttcccccaacccttcacgcaaggaaaaagcaaagtgattcataccttctatcttgga

SEQ ID NO: 83227 - DNA, 120 bp, synthetic construct
  source 1..120: mol_type = other DNA
aatttgggtctcattgtccaagttaatctcatgaatgaggaggtgctctgccctgtggccagggaccagggtattgattctctcaaaaattattaaatcatctagccaaaatgtacggta

SEQ ID NO: 83228 - DNA, 120 bp, synthetic construct
  source 1..120: mol_type = other DNA
tgcctgtaatcccagcactttgggaggcgggcagatcatgaggtcaggagttcgagagcaccctgaccaacatattgaaaccccatctccactaaaaatacaaaaaaattagccgagcgt

SEQ ID NO: 83229 - DNA, 120 bp, synthetic construct
  source 1..120: mol_type = other DNA
aatttcatttctctctctgttctttttttttttttttttttttaaagatgaggccttgctatattgcccaggctggtcccaaactcctggcctcaagcagtcctttctcctaggctcccc

SEQ ID NO: 83230 - DNA, 120 bp, synthetic construct
  source 1..120: mol_type = other DNA
tgggtgtggggagacagggaaaagagatgccaggagaacagctcaatattactttggaaagaagattctcttcatctaagaatggaatggaagggagataatgtagactcagatatttcc

SEQ ID NO: 83231 - DNA, 120 bp, synthetic construct
  source 1..120: mol_type = other DNA
caaaaaacaaggaaaatcttctctttatataatctaaagtttttacgtaagtaaaaaggaacaggtaggccgggtgccgtgactcacacctgtaatcccagcactttgggaggccaaggc

SEQ ID NO: 83232 - DNA, 120 bp, synthetic construct
  source 1..120: mol_type = other DNA
gccattctcctgcctcagtctcctcagtagctgggattacaggcacccgccaccacacccacctaagtttttgtatttttagtagagaaggggtttcaccttgttagccaggatggtctc

SEQ ID NO: 83233 - DNA, 120 bp, synthetic construct
  source 1..120: mol_type = other DNA
tcagaattttgctggaccctacccccaatctgtctgttttttctttttgttttgtttttgttttttgagatggagatggagtctggctctgtcacccaagctgaagtgcagtggtgtgat

SEQ ID NO: 83234 - DNA, 120 bp, synthetic construct
  source 1..120: mol_type = other DNA
atccaactgcttcggcctcccaaggtgctgggattacaggcgtgagccaccacgcccagctttaatttctggtttaagagtggaggccaggcgcggaaatggggaaatggagtttcccta

SEQ ID NO: 83235 - DNA, 120 bp, synthetic construct
  source 1..120: mol_type = other DNA
tttatctgactccagcatcctcaggatttcctcccttatctgtagaatgtggataagatgaccaagaacacatcctagagggcacgatagccaggataggactgttctaggaacacacac

SEQ ID NO: 83236 - DNA, 120 bp, synthetic construct
  source 1..120: mol_type = other DNA
ccagctaaaacttgcaccggatgcagatacgagttcgccatcatcgaacctagcagacccaggacgcagactgggtgttcacagaaagttgaaggtcccacttgagaaaggactaagaat

SEQ ID NO: 83237 - DNA, 120 bp, synthetic construct
  source 1..120: mol_type = other DNA
agaactgtctttcagagacaatcttggggatttgggggaagggcatagagtaggaactgctatgcatactaggacatcaaagagacgggtacctcacgttctgcctagctaccaacagta

SEQ ID NO: 83238 - DNA, 120 bp, synthetic construct
  source 1..120: mol_type = other DNA
acaaaaaagagagacagtatcagctaccaggaactgccatctcccaacctaaaccaccacctcccaccttccagtcaatcctatactattatcagactgaaattaagcagataagcccat

SEQ ID NO: 83239 - DNA, 120 bp, synthetic construct
  source 1..120: mol_type = other DNA
gattgacagaacagagacattctcatatgaaagatgcaccgaattcaatgaccatcacaacttccatcatcacagaacattgacttacctcatctagggggatgagtttagggggtatgg

SEQ ID NO: 83240 - DNA, 120 bp, synthetic construct
  source 1..120: mol_type = other DNA
ttggctattgtgaaagaaaaggaagttaatgaactgactggaaagccaagggcaaggcaattagtccagggtcccaggcacagtcccccaacagttcctatataaaggaagactctgtct

SEQ ID NO: 83241 - DNA, 120 bp, synthetic construct
  source 1..120: mol_type = other DNA
gtgagccaagaccgtgccactgcactccagcctgggtgacagagtgagactctgtctccaaaaaaaaaaaaaaaaaagtttgctcctaattcaaagtacatcttccccactttagactca

SEQ ID NO: 83242 - DNA, 120 bp, synthetic construct
  source 1..120: mol_type = other DNA
gtcgctgacaaggactgaggccaatttccggagctctgcaggtgacagaaaggggaaatgcctaaataatgtaaagtaacattcttccaggaacagaaaatgggaggtttgagaaaatat

SEQ ID NO: 83243 - DNA, 120 bp, synthetic construct
  source 1..120: mol_type = other DNA
ttgacttgctcagctgcttcaccagtttagctgtgttgttctatgagagatgggagcagcagaaaggtaaatgccaggaggcaaataattccacttagagctaaaaacgacaaaagttac

SEQ ID NO: 83244 - DNA, 120 bp, synthetic construct
  source 1..120: mol_type = other DNA
ttgaatacgtcagccaattgttaagaagtttgtagccgccaacgtcaataaatctgcaggcaggcaggagagtctatcagtaatgccctttctaggttttgacagtaccacatcctacaa

SEQ ID NO: 83245 - DNA, 120 bp, synthetic construct
  source 1..120: mol_type = other DNA
catgatggtggtttctatggtaagaggacaaaacaaacaaacccacagaataaatgggtggcaaggactacccgagtaggccctctaataaaccacatctctatatttgacaaagtataa

SEQ ID NO: 83246 - DNA, 120 bp, synthetic construct
  source 1..120: mol_type = other DNA
gaagttccagaaaggtaatttaggatcaatatggttctgattgggatttttatctacactgcctctaaatacttgcttctaagacccaaaaaagaggctgggtgcagtggctcatgcctg

SEQ ID NO: 83247 - DNA, 120 bp, synthetic construct
  source 1..120: mol_type = other DNA
tcaaggagaatactggaaaagattagatgtccgtgggccaaatccactcaagtgtggtgattcctacacacacagagacagacacagaaataaaggtattcttcccatgtagtgagatac

SEQ ID NO: 83248 - DNA, 120 bp, synthetic construct
  source 1..120: mol_type = other DNA
tagtttccttgctttgaagtcagtatattttggaaaaaaaccaaacaatttccaaggcgctcaagtggaaaggaatgtaaagtccaacatttcgggcacagggctacagcagagaaggca

SEQ ID NO: 83249 - DNA, 120 bp, synthetic construct
  source 1..120: mol_type = other DNA
aagatgcaaaatgatataccaccctgactcatagaaaaagaccccagactagaactctggccacaaactacaaggatcaggttttccaagattttctgaatggatgtggttcccctagta

SEQ ID NO: 83250 - DNA, 120 bp, synthetic construct
  source 1..120: mol_type = other DNA
cttatcctagtaccaatgtacaggaactaatcaagtgcagaacgtgatacagcactgaatacagtttatccccaaactgagaggtgggaatgagggcgatttagaagaaagtcctaaaag

SEQ ID NO: 83251 - DNA, 120 bp, synthetic construct
  source 1..120: mol_type = other DNA
aaaattaaagcaattaaaatattaaaaagaacaattttctgcagggaagaactgaatttgcaacggaggttcaaccggctaccatcgaccacccccatcctccctatagagggaaagggg

SEQ ID NO: 83252 - DNA, 120 bp, synthetic construct
  source 1..120: mol_type = other DNA
gggagagagaacaagactgtttagacccacaggccctttttaatggagattaagtgaccagattggtccttctccagttctctatttgttctatggtctcatttcttcctctcattattt

SEQ ID NO: 83253 - DNA, 120 bp, synthetic construct
  source 1..120: mol_type = other DNA
aaccgctttaagccgtggctctcaaatgaacccatccatccctatcccgcttcccagatccaacgctctccgcaaaattttacccactagacgacaaagtaggcaaacttacctctaaac

SEQ ID NO: 83254 - DNA, 120 bp, synthetic construct
  source 1..120: mol_type = other DNA
ttctaatcccgagccgaggactaaacgccagggttaggtatcatcctttttccaaaatgccatttcagtaaaataacttaagtgatggaattgacccctgtccaccctcagtcatgcata

SEQ ID NO: 83255 - DNA, 120 bp, synthetic construct
  source 1..120: mol_type = other DNA
tcccaaagtgctgggattacagacgtgagccactgcgcccggccttgtactagactttttatttgtcttctgaaataagattgttttttaggcatatatcccctaacttagcttttcttt

SEQ ID NO: 83256 - DNA, 120 bp, synthetic construct
  source 1..120: mol_type = other DNA
aaggagagtcttttctttttagggtaagaaaaataaagattaggggctgggcgcggtggctcacgcctgtaatcccagcactttgggaggccaaggcaggtggatcatgaggtcaggaga

SEQ ID NO: 83257 - DNA, 120 bp, synthetic construct
  source 1..120: mol_type = other DNA
tgaggttttctttatttccttgtcaatgttcagtgccatgctggcacctggggctggagggcaggtatatgaagcaagatagagtccattatttttcaaaaagccttcaatatgtgagaa

SEQ ID NO: 83258 - DNA, 120 bp, synthetic construct
  source 1..120: mol_type = other DNA
ggttacagtgaaccaagattgcaccactgcactccagcctgagcagcagagcgagactccgtctcaaaaacaaaacaaaacagagattataattaattacataactgagagagagaaatg

SEQ ID NO: 83259 - DNA, 120 bp, synthetic construct
  source 1..120: mol_type = other DNA
tacacaggttagcccatcatccctgcaccaccagagagcttttccttgtggcatgccttgtttatgtagttggccaataggtatttgttcagtggctcctgcttatagcctaaaaggtct

SEQ ID NO: 83260 - DNA, 120 bp, synthetic construct
  source 1..120: mol_type = other DNA
ctagacagaaaaattttgctaacccctgctctgaagcaagacaaatttgcagagaataattttttgttgttttttttttttgagacgaagtttcactcttgttgcccaggctggagtgca

SEQ ID NO: 83261 - DNA, 120 bp, synthetic construct
  source 1..120: mol_type = other DNA
gtcattaggtaaagccaatccttcccaatctacccctctgtcaccatatggaagcagttgtgttctattatttactgtgccttaaagaacaagatatttttctccccacaggagtctgtg

SEQ ID NO: 83262 - DNA, 120 bp, synthetic construct
  source 1..120: mol_type = other DNA
agacaggccctcagagtgctctgtaggagctgtagactgggaagagaggccaggcgtggtggctcactcctgtaatcccagcactttgggaagccaaggtgggctgatcacttgatccca

SEQ ID NO: 83263 - DNA, 120 bp, synthetic construct
  source 1..120: mol_type = other DNA
aggttggacagtgagacactgggccaaggaagactacgttgccatggcactcactgccgtgggatgcagggatggaaaggagtggcactgctaggggcacagctggtttggcaagaaaaa

SEQ ID NO: 83264 - DNA, 120 bp, synthetic construct
  source 1..120: mol_type = other DNA
acttgcagaaagtctgacttaatcttccctgcaggcccagaatctttccgctcctatcactagtgcatcaaggatgcagagtaaccgccatgttgtttatattctcaaagacagttcagc

SEQ ID NO: 83265 - DNA, 120 bp, synthetic construct
  source 1..120: mol_type = other DNA
cattttctacaaccaggctctttctttctcttgtggtaccatctctcatcctgtagtgacttctttctcatctattttgatttttttttttgagatggagtctcgccatgctgcccaggc

SEQ ID NO: 83266 - DNA, 120 bp, synthetic construct
  source 1..120: mol_type = other DNA
ttttttgtatttttagtagagatggggtttcaccgtgttagccaggatggtctagatctcctgaccttgtgatctgcccgcctcggcctcccaaagtgctgggattacaggcgtgagcca

SEQ ID NO: 83267 - DNA, 120 bp, synthetic construct
  source 1..120: mol_type = other DNA
aatcacttgaggtcaggagtttgagaccagcctggtcaacatggtaaaaccccgtctctattaaaaatacaaaaattagcggggcatgatggtgggtacctgtaatcccagctacccagg

SEQ ID NO: 83268 - DNA, 120 bp, synthetic construct
  source 1..120: mol_type = other DNA
gagactccatctcaaaaaaaaagaataaaaaccaaggctgggcgtggtgacttacatctgcaatcctagtacttagggaggccgaggtgggtggatcacttgagcccaggagttcgagac

SEQ ID NO: 83269 - DNA, 120 bp, synthetic construct
  source 1..120: mol_type = other DNA
gcagaggttgcagtgagctgagatcgcactactgcactccagcctggataacagaacgagactccatcaaagaaaaaagaaaaagatcattttggctgtgatcttgattttttccttttt

SEQ ID NO: 83270 - DNA, 120 bp, synthetic construct
  source 1..120: mol_type = other DNA
aggaggtttggggaggagagttttcagcatacatctggtatctaaagccaacagacaggatgcgatcaccatagaaagattatagatagagaagctgcccctttgggccctctttaagaa

SEQ ID NO: 83271 - DNA, 120 bp, synthetic construct
  source 1..120: mol_type = other DNA
agctaatttttgtatttttagcagagacaggctttcaccaggttggccaggatggtttctatctcctgaccttgtgatccacctacctcggcctcccaaagtgctcgaattacaggcgtg

SEQ ID NO: 83272 - DNA, 120 bp, synthetic construct
  source 1..120: mol_type = other DNA
gaggttgcagtaagccgagatcatgccattgcactccagcctgggcaacaaagcgaaactccatctcaaaaaaaaaaaaaaagaaaagaaaactgaaaagtaaggtgacctcaaaggcca

SEQ ID NO: 83273 - DNA, 120 bp, synthetic construct
  source 1..120: mol_type = other DNA
cttgcagtgagcccagatcatgccactgcactccagcctgggcgacagagcaagacactgtctcaaaaaaaataaataaataaataaaaataaaccacctttcaggacactacaagcagt

SEQ ID NO: 83274 - DNA, 120 bp, synthetic construct
  source 1..120: mol_type = other DNA
actcaggaggctgagacaggagaagagcttgaacctgggaggtggaagttgcagggagccgagatgacaccattgcactccagcatgggcaacagagtgagattccatgttaaaaaaaaa

SEQ ID NO: 83275 - DNA, 120 bp, synthetic construct
  source 1..120: mol_type = other DNA
aatggattctcctgcctcagcctcctgagtagctaggattacaggcgcacgtcaccacacccagctaatttttgtatttttagtagagacagggtctcgaactcctgacctcaagtgatc

SEQ ID NO: 83276 - DNA, 120 bp, synthetic construct
  source 1..120: mol_type = other DNA
gcacttatcagatgtatgacttgcaaacattttctcccattctgtagattgtcttttcactttctttctttttttttttttttgagacggagtcttgctccatcgcccaggctggagtgc

SEQ ID NO: 83277 - DNA, 120 bp, synthetic construct
  source 1..120: mol_type = other DNA
gtattttgtttgtttcatcttccaggtgaacaactttgtgatctttgaaggcttctttgcccatcaacatcgtaagtttttgcattttgttggtcacgtagtcggggtgagggaaaggaa

SEQ ID NO: 83278 - DNA, 120 bp, synthetic construct
  source 1..120: mol_type = other DNA
cttaagtgaatttgctgagaagtctttcatttgccacacatacatgatggagaatctcttgagagggaaagccgggagcaagtagagaagtgaggagggggaggctgaactttggacatt

SEQ ID NO: 83279 - DNA, 120 bp, synthetic construct
  source 1..120: mol_type = other DNA
gctgggcatggtggctcatgcctgtaatcccagcactttgagaggctaaggcaggcagatcgcctgagtccaggggttcaagaccagcctggccaacatggtgaaaccccgtctctacta

SEQ ID NO: 83280 - DNA, 120 bp, synthetic construct
  source 1..120: mol_type = other DNA
tgacagagagtgggaagccactggcttgtgtgccaagagtccatcgcagcaggcagggagtgggcatttcctttatttctctccctttctcttcacctctgacttctctgtttttctctc

SEQ ID NO: 83281 - DNA, 120 bp, synthetic construct
  source 1..120: mol_type = other DNA
gatccagattctctgagggaggttgtttcttgagagtagatccagagtgtcaaggatctgttagatcctggaatcccttcttgcatccatccctccctggtagctaggtcccgatatact

SEQ ID NO: 83282 - DNA, 120 bp, synthetic construct
  source 1..120: mol_type = other DNA
ccttccttttcctcctaaattcaaaattcagccttgtcacttcctatttccctctggtctaaggaatctttttttttttttttgagatggagtcttgctctgtcgccaggctggagtgca

SEQ ID NO: 83283 - DNA, 120 bp, synthetic construct
  source 1..120: mol_type = other DNA
ctttcccccacaggttcaactctggtacttccctttggaatacggattctctgagaggttttaaatttggacatagcactaatggttccagcttcatacccatcatgtgtcctacattaa

SEQ ID NO: 83284 - DNA, 120 bp, synthetic construct
  source 1..120: mol_type = other DNA
aggaggctccttctccactcccggaagatcatgtaccagcccagccggggtgcggcccggcgtctcggcccttgcctgcgcgcctaccaggctcgaccccaggtgagcggaggagaagag

SEQ ID NO: 83285 - DNA, 120 bp, synthetic construct
  source 1..120: mol_type = other DNA
gtatgtattacatgattcttgcgataagagaggtgaaactgcccccagtgttggaatctttttttttttttttttgaaatggagtcttgctccgtcacccaggctgaagtgcattggcac

SEQ ID NO: 83286 - DNA, 120 bp, synthetic construct
  source 1..120: mol_type = other DNA
gagatcgtgctactgcactccagcctggcaacagagcgagactccatctcaaaataaataataaaataaaatggtttcctcctgttttcagtagagatggagatgaatccatcccttttt

SEQ ID NO: 83287 - DNA, 120 bp, synthetic construct
  source 1..120: mol_type = other DNA
aggcgcagtgaaaggagatatctccattgtactccagcctaggcaacagagcgagactccgtctcaaaaaaaaaaaaaagaaagaaaatgatgttcctcattttgggttaagggaggtta

SEQ ID NO: 83288 - DNA, 120 bp, synthetic construct
  source 1..120: mol_type = other DNA
cggttctacaagcgtgacaaagacgagcattaccggtaagagagaaatgagaaaggacccaaactataatcagttccttttttttttttttttgagacggagtctcactctgtcacccag

SEQ ID NO: 83289 - DNA, 120 bp, synthetic construct
  source 1..120: mol_type = other DNA
gagccttacaacctggtaaatttccgcctgggagtagaatcccaataaattgttagactcagccacaaacattggatataagtttttaaaccagcagttcccaaactgctgcacagtaga

SEQ ID NO: 83290 - DNA, 120 bp, synthetic construct
  source 1..120: mol_type = other DNA
ttggccttataataatggggagccacctccagaagccaactgctctcaatctccagtacctaggagagagaaaagatcaatggagttcccttctttccaacatagatcttttgttgttgt

SEQ ID NO: 83291 - DNA, 120 bp, synthetic construct
  source 1..120: mol_type = other DNA
acctatacagtagccattcaaatatttattgaataagtgtctagttctcagatcttggaagatgctgacacacctgttagaaaggatgtctttgggctgggcatggtggctcacacctgt

SEQ ID NO: 83292 - DNA, 120 bp, synthetic construct
  source 1..120: mol_type = other DNA
cctaagaatgcactacctttttagttcaggcttcaggaaaactagagaggtaaggaatgcatgaagaacttcccaggaatgaaccttcagtggtctggggaagaaagggccctgggagga

SEQ ID NO: 83293 - DNA, 120 bp, synthetic construct
  source 1..120: mol_type = other DNA
ggcttctgcagaaagtgtgcattcactatgtgcatttggaaaagatctctgacagcagaggaatggcatttaaaggtcatccctccacagctacatctaaatgttctagttggaaacctt

SEQ ID NO: 83294 - DNA, 120 bp, synthetic construct
  source 1..120: mol_type = other DNA
agctcttctgcttacagaaccctggatccagcacataaatgatgccctcaatggtgagtgatgtctcagcaatgttcgttgccacaaccacctgagtgataggatatggggtcacccagt

SEQ ID NO: 83295 - DNA, 120 bp, synthetic construct
  source 1..120: mol_type = other DNA
cctactatgctgccttgtatctcttcatagcactggccacaaattgacaatatgtatttatgcatccactgcttccccgatagaccacaagtgcaagtttgttaggctaaggactttgtt

SEQ ID NO: 83296 - DNA, 120 bp, synthetic construct
  source 1..120: mol_type = other DNA
aaaaagaaaaataaataaagtccaaactttcctgtcatcaaaggccctccctaatcttagccccaaattgtttttagccttgtctcctactccttcaccacatgaacctcccactaagcc

SEQ ID NO: 83297 - DNA, 120 bp, synthetic construct
  source 1..120: mol_type = other DNA
ctgggtcacatggatctgcaacacagatactacacaagcttccaagtagtcagcctctggagcctggagagcagaaagagatggggtcacaggagggccacctgcttaggcaaacctttc

SEQ ID NO: 83298 - DNA, 120 bp, synthetic construct
  source 1..120: mol_type = other DNA
acagagcgagactccatctaaaaaaagaaaaaagaaaaagtggaaggattttttttttgagacagtcttgctctgttgcaggctggagtgtagtggcatgatctcagctcactgcaagct

SEQ ID NO: 83299 - DNA, 120 bp, synthetic construct
  source 1..120: mol_type = other DNA
tccatgggttcttagagatcttttgcaagggatatgaaggataaaatcctatctgtccaattgctccactgtgatcttccaagaccagaaattcacagcctctgaagagtcaaaaaggca

SEQ ID NO: 83300 - DNA, 120 bp, synthetic construct
  source 1..120: mol_type = other DNA
agaggaactcccggagaagcatcccatctgtcatgtagcggaggacagttcgctctgatgtgcagtcctcaaagcggatgctgtagccaacctggtcaagggaaccattagcaaccaagt

SEQ ID NO: 83301 - DNA, 120 bp, synthetic construct
  source 1..120: mol_type = other DNA
cagacggatctcctgaggttgggagttcgagaccagcctggccaaaatggtgaaaccccgtctactaaaaatacaaaaaattagccgagcatggtggtgcatgcctgtatttccagctac

SEQ ID NO: 83302 - DNA, 120 bp, synthetic construct
  source 1..120: mol_type = other DNA
actccagcctgggtgacagagcaagactccgtctccaaaaaaaaaaaaaaaaaactaacaaaaaggcaggaaaatagtcctttaactccttgttttttggccacgttggagcatagggag

SEQ ID NO: 83303 - DNA, 120 bp, synthetic construct
  source 1..120: mol_type = other DNA
aagaaaggggatgacccacgtgttgcccaatcccctgaagccttccccacaacttgtcttggggaccaaggctgaagcagacgccgcttcacctcacctgtcctcgggtttccttgggca

SEQ ID NO: 83304 - DNA, 120 bp, synthetic construct
  source 1..120: mol_type = other DNA
tgtgtctcacttagtttctacacatttacctttgatacaaacttttcaggacacattatggatgacagcagaaaactggcaatatctataaggccctttcctgccaggagtcctcccact

SEQ ID NO: 83305 - DNA, 120 bp, synthetic construct
  source 1..120: mol_type = other DNA
aagaaggaactgtagcttgttcctagttgttgaggaaaagctcttctttatagacaaattctagccaatacacgtaacaggaatgacagaatcaaaaaatcaccatttcggccgggcgcg

SEQ ID NO: 83306 - DNA, 120 bp, synthetic construct
  source 1..120: mol_type = other DNA
attctttcaacttccctatgtgcttaaatatttttgtaatcgaaaaagaaaaattacagctgggcacagtggctcacgcctgtaatcttaacattttgggagaccgaggggggtggatcg

SEQ ID NO: 83307 - DNA, 120 bp, synthetic construct
  source 1..120: mol_type = other DNA
tttcaaaaaaataaataaatgaattttaaaaagtaaaaacggccaggcgtagtggctcatgcctataatcccaacactttgggaggccaaggcgggcagatcacaaggtcaagagatcaa

SEQ ID NO: 83308 - DNA, 120 bp, synthetic construct
  source 1..120: mol_type = other DNA
actaatagagtatatttgatcctaaagttaagagtcaaggaggacttatgggtagcctccttccccctacaacttaagaaggatccttccctcaacaacataagtctatcctcagctggc

SEQ ID NO: 83309 - DNA, 120 bp, synthetic construct
  source 1..120: mol_type = other DNA
atccaggggattaaataagggcatagagaacacttcagcctgccccatcctctctcaccctgcttctgacttaccctgttttcttcttccctttctcagaagcctcttcctcctcttctt

SEQ ID NO: 83310 - DNA, 120 bp, synthetic construct
  source 1..120: mol_type = other DNA
tgtaatctcagcactctgagggggctgagagaggattgcttgagctgaggagttagagaccagcctgcgcaacacaccaaggcctcatctctaaaaataaaaataaaaataaaagatatt

SEQ ID NO: 83311 - DNA, 120 bp, synthetic construct
  source 1..120: mol_type = other DNA
ctgtactttttcggcctctaagcactacggtggccgagcgagttcaaacctcgcggaaccatacctgaaaactcggggtaattcttttttcttcatttcgcctctgtccagtttctctga

SEQ ID NO: 83312 - DNA, 120 bp, synthetic construct
  source 1..120: mol_type = other DNA
atctctacaaaaaattagccaggtgtggaggtgtgcacctgtagtcccagctactctggagactgagacaggagaatttttttttttttttttggagacagagtctcgctctgttgccca

SEQ ID NO: 83313 - DNA, 120 bp, synthetic construct
  source 1..120: mol_type = other DNA
agcttcctaactctgttttcctgggtcacaactggaaactttttaagacctttacctaacaggctactaatataatcattctgtttccttccctacccagaccttctctgaactggctga

SEQ ID NO: 83314 - DNA, 120 bp, synthetic construct
  source 1..120: mol_type = other DNA
atacttacttcattttgcagcaatttcagatttagtattcgtagccccagctctttaagtaagtatccctggattagccacatgggttgtgtcatacactacctagctgccttcatggca

SEQ ID NO: 83315 - DNA, 120 bp, synthetic construct
  source 1..120: mol_type = other DNA
aagggaggaggcaggagctgtaaacaaaggggcagtgacctaggaaatgaaggagatgtgcctataaatggagtggggtctgggcctcccagagagacgagtgcttaaatcccgagagtc

SEQ ID NO: 83316 - DNA, 120 bp, synthetic construct
  source 1..120: mol_type = other DNA
aaaattacttaatattttctacaagtctaggaggtagtttttggtttctgtttttttgagacagaatttcactctgtcacccaggctggagtgtagtggcgtcatctcggctcactgcaa

SEQ ID NO: 83317 - DNA, 120 bp, synthetic construct
  source 1..120: mol_type = other DNA
cgatccacccgtcttggcttcccgaagtgctgggattacaggcatgagccacaggaggtagttattattaacttcatttcataaataataaactaaagcaagagatcagatggtttccct

SEQ ID NO: 83318 - DNA, 120 bp, synthetic construct
  source 1..120: mol_type = other DNA
ctatttcgagtgtgggaggcagaggggtaaaaagaaattaaaatacatggcgataagtcttgtgatcagaaccgagtctttgggcaccttgggggcaatcgagtgaacttcccagaggag

SEQ ID NO: 83319 - DNA, 120 bp, synthetic construct
  source 1..120: mol_type = other DNA
accagatatgacacctgggtccccatgggaaggtagaactcaggaactgtatatgttactccttgttggctctgaaccctgcagtgtctccccatctcacttggagcaaaaagtctactc

SEQ ID NO: 83320 - DNA, 120 bp, synthetic construct
  source 1..120: mol_type = other DNA
ccaggctgggagacagcgagactgtctcagaaaaaaaaaagaaaagaaaagaaaaaagaaaggagcttagaagttggtacaatgcaagaggttagggtttgttcagacctcacatgaggt

SEQ ID NO: 83321 - DNA, 120 bp, synthetic construct
  source 1..120: mol_type = other DNA
aagaacaggttgctgacagggggtagagggtggagggtgaggcgtctgggtcagaggaactctgtgctgcctcctccccacccccacccaagcagcggctgcttccttattctctcacca

SEQ ID NO: 83322 - DNA, 120 bp, synthetic construct
  source 1..120: mol_type = other DNA
gtgcctgttctcaaaactgtctccaaattcacttctctcttttgctaccctaaggggagggaaagtccaggatggcaggaaaagaggggaaaaccgatccctgagccagttcttgggagg

SEQ ID NO: 83323 - DNA, 120 bp, synthetic construct
  source 1..120: mol_type = other DNA
aggcagctgcggctgagacggaggtagccccccagaaccaagatctcctcggcagttgggtaccgcttcttcccagcccccgggactgcagcatcaactgtggctggagaggttggggtg

SEQ ID NO: 83324 - DNA, 120 bp, synthetic construct
  source 1..120: mol_type = other DNA
gtcaggcccaacttctggtaggcagattcccctgggctcagtctactttccacctcttttctcctggggctttgctctcgagactctgctagtctcagactccgctctggagtttctcca

SEQ ID NO: 83325 - DNA, 120 bp, synthetic construct
  source 1..120: mol_type = other DNA
aggagccagatgtggcagcacagggttaatgcgtattaaagaccgtctctaggatgtgagaaagagagagaagggcgaaaaggaaagttggcgtgagggagaagagagaaatgtggcagg

SEQ ID NO: 83326 - DNA, 120 bp, synthetic construct
  source 1..120: mol_type = other DNA
accgctttgtctaaggacaatgaggagagggaagggggcgcagggcggagccgaggagagggcggggcctagatccctcccaccccgcgtgggactcgctgcgggactgccctcttctcg

SEQ ID NO: 83327 - DNA, 120 bp, synthetic construct
  source 1..120: mol_type = other DNA
ggagtggtcagggcagatcctttccttctcaggaggctgttgagggggagagtgtcatgctctaaacagtgaagggacagatgacttccataccccactcttccttgctggtgagaagtg

SEQ ID NO: 83328 - DNA, 120 bp, synthetic construct
  source 1..120: mol_type = other DNA
ccagacccagatctgcccccaccacaggctagcctgcaactctcccccacctctctcctaagcatcaccaccaaatattcaccatgtggagggtgcgtgctgggtgaggtcccaaagatg

SEQ ID NO: 83329 - DNA, 120 bp, synthetic construct
  source 1..120: mol_type = other DNA
aaaagcatggctggagaggccacgctggattgcccctcttacttcggttctccaaatgctccttctttttaacactctcctctcaacagtcctctctacaaaacactttacttagaatac

SEQ ID NO: 83330 - DNA, 120 bp, synthetic construct
  source 1..120: mol_type = other DNA
gttgagttgttgactggccagttgctaagaatggcaaataacttctctgtaaatactgaaaggtttgttgtaatagtgccagagattgttgattagtaaccacgagaataaacatgttaa

SEQ ID NO: 83331 - DNA, 120 bp, synthetic construct
  source 1..120: mol_type = other DNA
ccaaattatcctaatttcactgtgctattcatttcctgctaggaccatgaatagagacacttaccacacaaagcaatgtgctacaagctatggggttcattggaagtgtaagaggccaga

SEQ ID NO: 83332 - DNA, 120 bp, synthetic construct
  source 1..120: mol_type = other DNA
gctcatgcctgttatcccagcactatgggaggcctaggtgggtggatcacgaggtcaggggttagagaccagcctgaccaacatggcgaaaccccgtctctactaaaaatacaaaaatta

SEQ ID NO: 83333 - DNA, 120 bp, synthetic construct
  source 1..120: mol_type = other DNA
aactccttggctcaagtgatcctgctgccttagcctcccagggtgccaccatgccttgcctaaccactttattgtatttatttatttatttatttttgagacagagtttcgctcttattg

SEQ ID NO: 83334 - DNA, 120 bp, synthetic construct
  source 1..120: mol_type = other DNA
cccaccccacagccactggcaaccacaaatctgctcttgttctctatgggtttacctattctggatattccttacatgtgtaatcacataatatgtgttctgtttctggctttccttcac

SEQ ID NO: 83335 - DNA, 120 bp, synthetic construct
  source 1..120: mol_type = other DNA
gtatcgaactcctgacctcaggtgatccaaccaccttcggcctcccaaaatgctgggattacaggcatgagccaccacacccggctaatttttgtattttttagtagagatggggttttg

SEQ ID NO: 83336 - DNA, 120 bp, synthetic construct
  source 1..120: mol_type = other DNA
tattccttgtgatagtgcttcactttttcatagataagcttcctccttgccttttgaatcatcttttgggcaaatttctttctcgggcctttgatcttcagctctgggaaattccttcgc

SEQ ID NO: 83337 - DNA, 120 bp, synthetic construct
  source 1..120: mol_type = other DNA
tggtctctaactcctgacctcaggtgatccacctgtcttgacttcccaaagtgctgggattacaggcatgagctgccgtgactggccttttatttttttgagacaaggtctcactctgtt

SEQ ID NO: 83338 - DNA, 120 bp, synthetic construct
  source 1..120: mol_type = other DNA
accagcctgggcaacatgacaaaacctcatctctaccaaaaatacaaaaatttagtagagccccgtctctactaaacaataaaaaaaagaaaattagccaggcatggtggtgtgtgcctg

SEQ ID NO: 83339 - DNA, 120 bp, synthetic construct
  source 1..120: mol_type = other DNA
taaagatttctggtcccacccatgttccaggacaagttgtatcaatataccccaatcctttctaacgccctgagttctttcttccacatatcttctaattcgtggtctgggagggaaaag

SEQ ID NO: 83340 - DNA, 120 bp, synthetic construct
  source 1..120: mol_type = other DNA
accatcctggccaacatggtgaaaccccgtctttagtaaaaataaaaaaattagctgggcgtggtggtgtgcgcctgtagtcccagctactcgggaggttgaggcaggagaacagcttga

SEQ ID NO: 83341 - DNA, 120 bp, synthetic construct
  source 1..120: mol_type = other DNA
agaatggtgtgaacccaggaggcggagattgtagtgagccgagattgtgccactgcactccagcctgagagtgagactccatctcaaaaaaaaaaaaaaaaaaaaaaaaagaaaatcaaa

SEQ ID NO: 83342 - DNA, 120 bp, synthetic construct
  source 1..120: mol_type = other DNA
tcaccaatgcccctgtcttcctgtaacgcctcttcccttccaccactttctagggcactatatgagcagtcttgccactatatcggtctgtcatcatcccttggcctctcacctgatgca

SEQ ID NO: 83343 - DNA, 120 bp, synthetic construct
  source 1..120: mol_type = other DNA
ttgagtaataggctcaggggaaataggctggtctgtggtgacaggagattggaattcaggggtggtaggaaccggcatagctcttactgtggaagacctcagtgttttgctctgaccacc

SEQ ID NO: 83344 - DNA, 120 bp, synthetic construct
  source 1..120: mol_type = other DNA
gtgacaggctgctctgtggaggtggaaggtgggagctcaggggctatagggacagttgattcagggttcttcacagaggacatatttgtcctgctcctagtggtccgagatgtgggctta

SEQ ID NO: 83345 - DNA, 120 bp, synthetic construct
  source 1..120: mol_type = other DNA
acaagcatctggagattcctgatcgccctagggagaaacagaagcaagtgagggggaggaggtggagaaaagagatagaacttggatactgttcttgatacttgtttatggttagatagg

SEQ ID NO: 83346 - DNA, 120 bp, synthetic construct
  source 1..120: mol_type = other DNA
caaaaaatatgctcactggattttcctttctgtctatgatctctcctccattagactgggatctacctgggaagctacctttttcccacagacctgtctccataatgctactatagtgtt

SEQ ID NO: 83347 - DNA, 120 bp, synthetic construct
  source 1..120: mol_type = other DNA
gtctcaatttctaccttcaaactctccctatctctttcaggacttgcactttccccatttttgtcagattcttgtctctgggtgtctctagctaacaactgtttttgttctctgtcctgt

SEQ ID NO: 83348 - DNA, 120 bp, synthetic construct
  source 1..120: mol_type = other DNA
aggtaggagaactacttgaaccccaaaggtcaagactgtagtgagctgtgatcataccactgcacttcagcctgagtgacagagactctgtctcaaaaaaaaaaaaaaaaaaaaacccaa

SEQ ID NO: 83349 - DNA, 120 bp, synthetic construct
  source 1..120: mol_type = other DNA
tttatgcattctgtccctctacccttcctagcctttggtaaccaccattctactctctacttccatgagatccatgtttttagctcccacatgagtgagcatacaatatttgcctttctg

SEQ ID NO: 83350 - DNA, 120 bp, synthetic construct
  source 1..120: mol_type = other DNA
ctcccaaagtgttgggattagaggtgtgagccactgtgcccgaccccggcctacattttctttatccattcatctgttgatggacatttagtttgatttcatatctgcctattgtgaaca

SEQ ID NO: 83351 - DNA, 120 bp, synthetic construct
  source 1..120: mol_type = other DNA
aggccctgattctccagaaagcactgggtagcttgtaggtccagatcttcagaatctggtcggggaggaatataagacagtttaaaacaaaaatcatacctgacactaaactccttaaat

SEQ ID NO: 83352 - DNA, 120 bp, synthetic construct
  source 1..120: mol_type = other DNA
atctctgttccatatagcaggctggctctctttcagatgtgccaaagtcagcgctgctgagacttcttcctcgtcatctgtatcgctgttgataaccatggaagcttggcttttctccag

SEQ ID NO: 83353 - DNA, 120 bp, synthetic construct
  source 1..120: mol_type = other DNA
ctccataaaaattcagctgagtgaatgaatatgtatggttccccagccccaactctcatgataatcatctcttttagagattgatcctccagcccctggttcttcctcattttgaagact

SEQ ID NO: 83354 - DNA, 120 bp, synthetic construct
  source 1..120: mol_type = other DNA
gattttttttttttttttgagacagggtctcattctgtcacccaggctagaatgcagtgtcatgatcatagatcagtgcaatcttgaactcttgggttcaagtgatcatctggctcagcc

SEQ ID NO: 83355 - DNA, 120 bp, synthetic construct
  source 1..120: mol_type = other DNA
ccaagtagctgagattacaggcacctgccaccatgcctggctaatttttgtatttttagaagagatggggttttgccatattggccagggtggactcgaactcttgaccttgggtgatcc

SEQ ID NO: 83356 - DNA, 120 bp, synthetic construct
  source 1..120: mol_type = other DNA
ctttctcagcaaaccctttcctggcgtgttccctgccttctcgtgttcctggtgtatcctgcctgttccacagtggtcaatggatttgtgcttactctaagatctctcgctatattgtaa

SEQ ID NO: 83357 - DNA, 120 bp, synthetic construct
  source 1..120: mol_type = other DNA
agagttcaaataggtggtgtctcccaggctgctgagatcagttaatgagacggtaattgaaggccgccgtgcgccaacagaataatgcacgtcgattgggcagctccaagggacaaccca

SEQ ID NO: 83358 - DNA, 120 bp, synthetic construct
  source 1..120: mol_type = other DNA
aaagtggtgggattacaggcgtaaaccaccgcatgcggccatctatattttattttttgagacggactttcgctcttgttgcctaggctggagtgcaatggcgcgatctcgactcaccgc

SEQ ID NO: 83359 - DNA, 120 bp, synthetic construct
  source 1..120: mol_type = other DNA
gatcgaatgtgaattaacaatgacgttgacttgatactacatttctgagtggttaccacattttattgattgtatgcttctcaccagactgcaacatcctggaggacagggagctaattc

SEQ ID NO: 83360 - DNA, 120 bp, synthetic construct
  source 1..120: mol_type = other DNA
actgctcactttttgtacaaaaacctcaggcatagaggaaaggaatcttgcgcaaggtcgtttttcatttacaaaacaaaaaccccatgaaaaccaaaccggtacccacccattcgtcac

SEQ ID NO: 83361 - DNA, 120 bp, synthetic construct
  source 1..120: mol_type = other DNA
ggccggtcctgtatttgttcctgggtggaaggagaataagaacgggattaattttacttgctttcatggcccctaagagagacttttttagggcgtgaacagatatgtcgagaaaatggg

SEQ ID NO: 83362 - DNA, 120 bp, synthetic construct
  source 1..120: mol_type = other DNA
aacaggaagaccctgtcttaaaaattagaagaagctgggcgcggtggctcacccttgtaatcccagcactttgggaggccaaggtgggcggatcacgaggtcaagagatctagaccatcc

SEQ ID NO: 83363 - DNA, 120 bp, synthetic construct
  source 1..120: mol_type = other DNA
gacacagcaaaagttaggagatgattgttgtattggagtgctaatacagaaatgtgttctgaaatctaacggagggtagaggtagtgcctactattgctggtaaattatggggcagtagg

SEQ ID NO: 83364 - DNA, 120 bp, synthetic construct
  source 1..120: mol_type = other DNA
acagcagctactttgtggaatggatccccaacaatgtcaagacagccgtctgtgacatcccacctcgtggcctcaagatggcagtcaccttcattggcaatagcacagccatccaggagc

SEQ ID NO: 83365 - DNA, 120 bp, synthetic construct
  source 1..120: mol_type = other DNA
aaagaatgaacacccctgactctggagtggtgtatactgccacatcagtgtttgagtcagtccccagaggagaggggaaccctcctccatcttttttgcaacatctcatttcttcctttt

SEQ ID NO: 83366 - DNA, 120 bp, synthetic construct
  source 1..120: mol_type = other DNA
aaataaatgcaagtttttcatcccacccagatgtactgaaccataaatggttgaactggccttggccacccagcccaggattcctttgggttatgtgtacccatggccatttcctgtgat

SEQ ID NO: 83367 - DNA, 120 bp, synthetic construct
  source 1..120: mol_type = other DNA
taacttgcttttctcccattctagaaagcctattgtatgcaagaaagcctattgtatgcaagggaagaagctacattctagcattcattttctttctaatagagccaggatcttgctttg

SEQ ID NO: 83368 - DNA, 120 bp, synthetic construct
  source 1..120: mol_type = other DNA
tctttctggtgccctaccacctgtttccccaaacaaagacatcaggacccacatacaataaatcactgaagagaggagagggggcagagccttgtttgcacactctccttagctctgaat

SEQ ID NO: 83369 - DNA, 120 bp, synthetic construct
  source 1..120: mol_type = other DNA
agcttcccgagtagctgagattacaggcatgcaccaccaagcctggctaatttttttttgtatttttagtaaagatggtgtttcaccatgttggccaggctggtctccaactcctaacct

SEQ ID NO: 83370 - DNA, 120 bp, synthetic construct
  source 1..120: mol_type = other DNA
gatcttattggctgaagtcaagggaccactgatctcctctgccacctggcaggagagagacacccactcagtgcccatgatctgaccacattcctcataaaacaacttactctgggtttt

SEQ ID NO: 83371 - DNA, 120 bp, synthetic construct
  source 1..120: mol_type = other DNA
tcctcaatctgctgcttagtcttggccacctgggtaggagggtgaagtcaggttcacgctctgagtcagaggtgaagagcaagtgcccgggaaccagagctccagagtgggatataaaaa

SEQ ID NO: 83372 - DNA, 120 bp, synthetic construct
  source 1..120: mol_type = other DNA
acatctacaagaatgtgtgtattcatagaattcctcttatttaggcagatttctttctttttttttgaggcagtttcgctctattgcccaggctggagtgcagtggcacgatcagctcag

SEQ ID NO: 83373 - DNA, 120 bp, synthetic construct
  source 1..120: mol_type = other DNA
tcacctctctcctgtgtcccttaggcaaccatttgtctgtttctttttccttcctgtctatgcccaccttttggtgaaactcaacctccagaagcttcctcagaaagaatataaagacaa

SEQ ID NO: 83374 - DNA, 120 bp, synthetic construct
  source 1..120: mol_type = other DNA
tataatcccagcactttgggaggctaaggtgggaggataacttgaacccaggagttcaagaccagcctgtgcaatatggcaagatctcacctctagaaaaaaatttaaaaattagctggg

SEQ ID NO: 83375 - DNA, 120 bp, synthetic construct
  source 1..120: mol_type = other DNA
tttatttttcccctttgtcagctcttgccaggttaccaagcataccctgtccctggctttcttggttgctcccaaatctgtgatggcttgctctgttgcccaggctggaatgaaatggca

SEQ ID NO: 83376 - DNA, 120 bp, synthetic construct
  source 1..120: mol_type = other DNA
aaaacataaataaaatagataaataagataataaacctccagatgtctgttggagcagggcaggaaccattacccagaggcagtgaggggctctgagaaggtgcttttcacatgttcctc

SEQ ID NO: 83377 - DNA, 120 bp, synthetic construct
  source 1..120: mol_type = other DNA
aggagagagtaaaattagctacatttgtttaatccatcatctctgaaaaagagcccaactcatcttttgcttttttttttgagacagagtctcactctgtcatccaggctggagtgcagt

SEQ ID NO: 83378 - DNA, 120 bp, synthetic construct
  source 1..120: mol_type = other DNA
tgttgggattacaggcatgaaccaccgcgcccagccactttttaagtatgactacttaaaaagcacaggctagaatattcttggctcagaactgtacattgttccttcttatctccaagt

SEQ ID NO: 83379 - DNA, 120 bp, synthetic construct
  source 1..120: mol_type = other DNA
ccatgaatgctgaattagttaatacctaatttgttcctagaagaaatacaggctaggttcccgtgagcctctggtcaaaacattttcatcaactgatcaacatagagccttgctttatat

SEQ ID NO: 83380 - DNA, 120 bp, synthetic construct
  source 1..120: mol_type = other DNA
tcagccttattgatcatatcccttcttggccttctcttttttttttttctttttttgagatggagtctcactctgtcacccaggctggagtgcaatggcgtggtctcagctcactgcaac

SEQ ID NO: 83381 - DNA, 120 bp, synthetic construct
  source 1..120: mol_type = other DNA
cccagcatctctcttggcctctgcttctccaatccgtgcatctttttggacttgagctgttcgagccttccccaaagagtgcaaatagtcctgtgggagagatgtagaaattagtccttt

SEQ ID NO: 83382 - DNA, 120 bp, synthetic construct
  source 1..120: mol_type = other DNA
ctggatttttacctgtagccagagtaggggtaggaaaggtgtggtgggggtctcatgaagtcagagaaaaagcagagagagaagggagagccctctaagaaatgcttcttccatttcagg

SEQ ID NO: 83383 - DNA, 120 bp, synthetic construct
  source 1..120: mol_type = other DNA
ctgggaagggaacaacagtacttaccggagaccaccatggcctcatttgggccacaagtgaaaaacatggttcaggctggagctggaggagagggagggaaagcctttgcggatggggaa

SEQ ID NO: 83384 - DNA, 120 bp, synthetic construct
  source 1..120: mol_type = other DNA
aaagatacactcaagactgcagacagtaaatcaattttatttgtgttcacagaacatactaggcgatctcgacagtcgctccgtgacagcccaccaacccccaaccctctacctcgcagc

SEQ ID NO: 83385 - DNA, 120 bp, synthetic construct
  source 1..120: mol_type = other DNA
tcagccatcaggatctggcagaagacgatggtgagcagcagaaagagaagccttttggctgggttcggttcctcgactggcagctggcgccggacctaaggggagacaaaacaggagaca

SEQ ID NO: 83386 - DNA, 120 bp, synthetic construct
  source 1..120: mol_type = other DNA
agggtggtctcgatttcctgacctcgtgatctgcctcgctccctccgtccttcttctagtagtctcaagttgctattgttgccatctttacgtccacgagttcccaatgtttggttccca

SEQ ID NO: 83387 - DNA, 120 bp, synthetic construct
  source 1..120: mol_type = other DNA
ggggggctaaggtgggaggatcacttgagctcaggagcctgggcaacatagtgagaccttgtcactataaaataacaacaacaacaacaacaatacacaattaaatattattcagccata

SEQ ID NO: 83388 - DNA, 120 bp, synthetic construct
  source 1..120: mol_type = other DNA
accatggccaggagagctctctatctgtctgtctctgttgctctctctctctctctttttttgttatattgagtttctgcctgaaggaaaggcaagctttcttgaagatcctaagaaagg

SEQ ID NO: 83389 - DNA, 120 bp, synthetic construct
  source 1..120: mol_type = other DNA
caaagtgaatacatatatgatctcttccactggaggctgtgtcatacacatctttgtgtcctccagagaacccagcatggtaccttgtaggcagcagttgctcaataatcttgttaaatg

SEQ ID NO: 83390 - DNA, 120 bp, synthetic construct
  source 1..120: mol_type = other DNA
tgatggaagaaaactagtgggtgggagagagagagaagcaccaaaggttaggaatgcattacttgtttatgatggaaaatttctctagggcattaggcagaggaggggaaatgaagggga

SEQ ID NO: 83391 - DNA, 120 bp, synthetic construct
  source 1..120: mol_type = other DNA
atgggagcatctgagaaaggaaagcagggtgaagggactgcaccagggtcctgggggtagggaatgacaaagtgaaagctttttagctgcacctggtattcagtagatcctcaataacta

SEQ ID NO: 83392 - DNA, 120 bp, synthetic construct
  source 1..120: mol_type = other DNA
aggtctcaaaattctgggctcaagcgatcctcccgcctcaacctcccaaagtgttgggattacaggcgtgagccacaaagtctggcctttatttatttaaaaaatttagtttggctgggc

SEQ ID NO: 83393 - DNA, 120 bp, synthetic construct
  source 1..120: mol_type = other DNA
ctcctcctttggtcttggtttctttcccaccagattataactccaccagagtaggactttatctatcttgtgtactgctctattttcagtgcctagaactgtgcctgtcaatcaatacag

SEQ ID NO: 83394 - DNA, 120 bp, synthetic construct
  source 1..120: mol_type = other DNA
ctcttttatgacactttcccttcccagacacttggtcatttctttccccaggttgggaatcccacctaccatagaaggggaattgcacacaaggggaggttgcaaatctctgtgttcctt

SEQ ID NO: 83395 - DNA, 120 bp, synthetic construct
  source 1..120: mol_type = other DNA
tgagccgagatcacgctatcgcactccagcctgggggacaagagcaagacttctcaaaaaaaaaaaaaatcagtaagaaatgtataaaccagatattctcaacctatccctgtgggttga

SEQ ID NO: 83396 - DNA, 120 bp, synthetic construct
  source 1..120: mol_type = other DNA
ttttaagacatgtattcttatttctcttgagcagatgtctaggagtagtataactaggtgcatgtttagcttagtaagaaatcgctgctgtgcccagtggctcacacctgtgatcccagc

SEQ ID NO: 83397 - DNA, 120 bp, synthetic construct
  source 1..120: mol_type = other DNA
gactggctctgcccaggtcttgtggggtagtgtgaagtgacactagcccacacacctgagcatgtatgatgcctcagaggcactgtgtgtttttttttgtttgtttgtttgtttgagatg

SEQ ID NO: 83398 - DNA, 120 bp, synthetic construct
  source 1..120: mol_type = other DNA
tgggctcaagcaatcctgccacttcagcttcctgagtttctaggactacaggcgtgtgccaccatgcccaactaattaaaaaaaatttttttttttttttggtagagatagggtctcact

SEQ ID NO: 83399 - DNA, 120 bp, synthetic construct
  source 1..120: mol_type = other DNA
ttaggtctatgctgtctaatacagtagcatgtggctatttattttattttattttttgagatggagtctcactctgtcgcccaggctggaatgtagtggcatgatcttggctcactgcaa

SEQ ID NO: 83400 - DNA, 120 bp, synthetic construct
  source 1..120: mol_type = other DNA
gcattgggaaaatgcttggtataggctgatggctttaatctgcttttgacacttttaaaagagtcaagatcacttgtctctcattagattgtatcgcacactgcccattcagaggtccag

SEQ ID NO: 83401 - DNA, 120 bp, synthetic construct
  source 1..120: mol_type = other DNA
aaacacagatacaattcctggtttccctactagacacttcccaggctctcaattgcttgtagtttttgtttgctttttttttttaagacatggtctcactctgtggcccaggctggagtg

SEQ ID NO: 83402 - DNA, 120 bp, synthetic construct
  source 1..120: mol_type = other DNA
ctgccaggagcaattttaaaatgttcttctaaagccctgtgcacttcgccttggcttcctttaacttttcttttctctttttttttttgagagggagtttcgctcttgttgcccaggctg

SEQ ID NO: 83403 - DNA, 120 bp, synthetic construct
  source 1..120: mol_type = other DNA
taaagaaaatatatgcaaaatgcctattaccttacttggcatgtagcaaggttcattaaatgtcagtcccatttcaccccttcccattcacccactgttgtgctgaagccagctcacacc

SEQ ID NO: 83404 - DNA, 120 bp, synthetic construct
  source 1..120: mol_type = other DNA
agaatgaaactctgtctcagaaaaaaaaaaaaaaaagaacagacagtcatgtagaaatgtgactgaacacaggctgggcacggtggcttatgcctgtaatcctagcacttagggaggcca

SEQ ID NO: 83405 - DNA, 120 bp, synthetic construct
  source 1..120: mol_type = other DNA
catctgctcctttctttccttcacaagttgtgagaagaaccaagttagcattaggttgacctgtgagtgacaaaaaccgaatagaacaatggcttcctagatggaagtccatttctctct

SEQ ID NO: 83406 - DNA, 120 bp, synthetic construct
  source 1..120: mol_type = other DNA
gtgtgtgaataggtgtgggtcacagacatcaagtacttcacaaggtaatagaatatcgaaaggcaaatggaggcagggcgggatcacaggaccacaggaccggggcgagattaaaattgc

SEQ ID NO: 83407 - DNA, 120 bp, synthetic construct
  source 1..120: mol_type = other DNA
aaaatgtattcaaactgatggctggtctgaaagggagttgtaggctggggtgatgagagacaggtctcatagcaacagggtaaacaaagtaaacttggcttggttggtgttttatttatt

SEQ ID NO: 83408 - DNA, 120 bp, synthetic construct
  source 1..120: mol_type = other DNA
aacagtgtccatgatagtgaatccattttggttgtgttggatttgaggtggcaaagaaataaggaactggcatgtgactgcgggaaattggagctacaagacaggagttcaggtgaaaag

SEQ ID NO: 83409 - DNA, 120 bp, synthetic construct
  source 1..120: mol_type = other DNA
agttagctcagggacctcagggtttctacctgtggtctagttagagtttctcttgcatagtggctgggttgctgtgagggaaccaggcatgaactgctttttttttttttgaggcggagt

SEQ ID NO: 83410 - DNA, 120 bp, synthetic construct
  source 1..120: mol_type = other DNA
tgcttactgactggttggcatttgatacatatgatgatttaacatgaagatttagtgtgattttgcatctcttcatgggagcagggtcaggaccaggtcctgttgcggaattcagctttg

SEQ ID NO: 83411 - DNA, 120 bp, synthetic construct
  source 1..120: mol_type = other DNA
atatacacaaaagagaataaaaagcaccaataattccataacccaaattagctaacattacattccggtggatttccatctggcattctcctcgccagaactccgtccagcttcaggcct

SEQ ID NO: 83412 - DNA, 120 bp, synthetic construct
  source 1..120: mol_type = other DNA
tgttttatcttgttaatgcatttacttcacagaatcacaggataatggaattggacggcaccatgagatcagcaggcccatctcttcctgtacagatgaggaaactaaagtggtgaaggg

SEQ ID NO: 83413 - DNA, 120 bp, synthetic construct
  source 1..120: mol_type = other DNA
ctctttctttctctttttttttttttttttgagacagagagagtcttgctctgtcacccaggctagagtgcaatggcatgatctcggctcactgcaaactctgcctcccaggttcaagtg

SEQ ID NO: 83414 - DNA, 120 bp, synthetic construct
  source 1..120: mol_type = other DNA
atacatttccattgacctgagctgtcctcagagagtatatgtattttgttgtctaatttgggttgaaatctctcagaagggtcctatctgttccttacttgaaatctcctatcccgtgcc

SEQ ID NO: 83415 - DNA, 120 bp, synthetic construct
  source 1..120: mol_type = other DNA
agagggtgctacatattgactgcaagggaaacaagggagactcctgggttgaagctatcttgtctagatggtggttaaatgggtaaatataaatgtaaaagctcatcggtttgtttcctg

SEQ ID NO: 83416 - DNA, 120 bp, synthetic construct
  source 1..120: mol_type = other DNA
ccctgagacacaggtacgaggtggttgctcattgacagagtgaaggaatgttctagcaccaggcctgatccgtcttggcacactccacaggcttttctatgtttagcctcctttccagct

SEQ ID NO: 83417 - DNA, 120 bp, synthetic construct
  source 1..120: mol_type = other DNA
gttttgtctggaaggtttctaacaattgtggtgcaagttttataacccacctggttttgtcttgggaattagaagtctctcaatgttttggagagagattctgatgcccctcaccagaag

SEQ ID NO: 83418 - DNA, 120 bp, synthetic construct
  source 1..120: mol_type = other DNA
tgtgattatcagacctatttttaaatacttgaggccctctttccttcaaagggtgtaagaaaattgaactttgccactccatttaactcctacccactaatccaggcgtggctacgtgac

SEQ ID NO: 83419 - DNA, 120 bp, synthetic construct
  source 1..120: mol_type = other DNA
aagcaacaaaggtacagaaatgtaatacagaggaaaggaaaagaaacaaagtgataaagaaggcgagacaaagtataaaaacagggaagaaagaggtacagagggccaggcagggtggct

SEQ ID NO: 83420 - DNA, 120 bp, synthetic construct
  source 1..120: mol_type = other DNA
tggagagggattcagggtcctatcacagagactcaaatgttaagatgttggtctttaagtggatgggctcggggatatttgggctgttatgtggggaagtgacatggtcagatttttagc

SEQ ID NO: 83421 - DNA, 120 bp, synthetic construct
  source 1..120: mol_type = other DNA
tagaatttgtcacaattctttacagcctagaggcaagtttgcaggaacggacggggtttgctccatggtgggactggaaaacatgccgctctggggcaatgtcaatcagggacatgaact

SEQ ID NO: 83422 - DNA, 120 bp, synthetic construct
  source 1..120: mol_type = other DNA
aaaatgtttcaggggagcaacggctatctgggctggcggctcaggggtaagagaatttaccaagacagttgtaggtagagaaaggcaaatttattagagaaagtagaaaaacaggagagc

SEQ ID NO: 83423 - DNA, 120 bp, synthetic construct
  source 1..120: mol_type = other DNA
tgtagtcactctccattctgcccctcaggatctgcttctcccaggaagcctctcacagaggcagaattttgcattggcatcctgcttcaagcttatgaaatcttctatacagatgacctc

SEQ ID NO: 83424 - DNA, 120 bp, synthetic construct
  source 1..120: mol_type = other DNA
catgttatactttgttgagttatataacagttgggggaaaacctaaacaatggtacatgtgttaaggtagacagttaaattgtccctccaccactccctgtctcattcccaaccctgctc

SEQ ID NO: 83425 - DNA, 120 bp, synthetic construct
  source 1..120: mol_type = other DNA
cacgagtgtaatcccagcactttgggaggccgaagtgggcggatcacctgaggtcaggaattcaagaccagcctggccaacattgcgaaaccccgtctctacttaaaatacaaaaattag

SEQ ID NO: 83426 - DNA, 120 bp, synthetic construct
  source 1..120: mol_type = other DNA
ttccattatatgtatatatgtattatacaattttttttttttttttgggtggagacagagtctccttctgttgcccaggctggaatgcagtggtgcgatctcagcccactgcaacctcag

SEQ ID NO: 83427 - DNA, 120 bp, synthetic construct
  source 1..120: mol_type = other DNA
cacaattttagaacattttcatcacactcaaagacgtcccatgctcattagcagtcatttccggttttacccccaatctctccccttcccagccttaagcaaccactaatctactttttg

SEQ ID NO: 83428 - DNA, 120 bp, synthetic construct
  source 1..120: mol_type = other DNA
tcggcctcccaaagtgctgagtcaccgcgcctggcctgaacgtcttctcatgtgcttattggtcatttgtatacctttggagaaatgtttattcagatcctttgcgtattttttaattga

SEQ ID NO: 83429 - DNA, 120 bp, synthetic construct
  source 1..120: mol_type = other DNA
aataacttgcataggtcagtcagttggaaggtggccagatatggctcaaacccagatcttctcatctaattcttttttttttttttgagatggagtcttgtcgtcaggctggagtgcagt

SEQ ID NO: 83430 - DNA, 120 bp, synthetic construct
  source 1..120: mol_type = other DNA
tccttctagggtagttttatagttggaaagttcttctaaatctcggaccacaacctcctgctgcaaaattgtgccataaatccccatgagtgttcagtgtaaccattgactataggacct

SEQ ID NO: 83431 - DNA, 120 bp, synthetic construct
  source 1..120: mol_type = other DNA
gacctgctagtgagagtgttaaatattcaggaaatttgcaagctggttgttaaactgtcagtggttggaaattggtcatgggaggaagtatctacaccacggaataactacacacggata

SEQ ID NO: 83432 - DNA, 120 bp, synthetic construct
  source 1..120: mol_type = other DNA
acacacctggctaatttttgtgtttttttggtagagatggggttattccaggctgggatctgtgaagagcagaacaactctaagccccagggcaaaaatctgcagagctgagtctcatgc

SEQ ID NO: 83433 - DNA, 120 bp, synthetic construct
  source 1..120: mol_type = other DNA
tccaggtaaccccaacacagtgaggggtggagcggggatgtggtcattcgttccaggtattgttgattctcttgaggttcaatccagggctagagattgtgattaaagagatacccagat

SEQ ID NO: 83434 - DNA, 120 bp, synthetic construct
  source 1..120: mol_type = other DNA
gcatgagccatcgaacccggcccaagaagaaagacattgaacaagtaattacagggtattgggtgttatgaaagaaaagcatggtactgtataatgaggtcatctaatttagtctggggt

SEQ ID NO: 83435 - DNA, 120 bp, synthetic construct
  source 1..120: mol_type = other DNA
agtgctgggattacaggcgcgagccaccgtgcccggccccactattgttatttatgtacaccaaatttatatccaaagggactttgatagttacaagaaaagacatataagtccagatat

SEQ ID NO: 83436 - DNA, 120 bp, synthetic construct
  source 1..120: mol_type = other DNA
aggctgctgcttcctgtttgtattctcttaccacaagttatctgctgttcctactttcacttaagctttgtatcgtactctgtgagaaatgtttgagctggctggacacatttcctgaaa

SEQ ID NO: 83437 - DNA, 120 bp, synthetic construct
  source 1..120: mol_type = other DNA
tcctagcactttggaaggccaaggcaggcagattgcttgagtccaggagtttgagactggcctgggcaagatgacaaaaccctgtctctactaaaaataaaaaacaaaaaattaatttaa

SEQ ID NO: 83438 - DNA, 120 bp, synthetic construct
  source 1..120: mol_type = other DNA
ggttgttgcctacagattgttgagggtaataatgggatgaggcataaaaaggacctagcctagcagcaggcatgtagtaagagctcagtaagtattacatttgtttaattagtgtctgcc

SEQ ID NO: 83439 - DNA, 120 bp, synthetic construct
  source 1..120: mol_type = other DNA
agatggtccaaccctgtggttctggactctgaagtggtctttactgaaaacagcagattcctaggctcagaacagtggcaaaatagcttggaatttaggggtctctgatttttttcagat

SEQ ID NO: 83440 - DNA, 120 bp, synthetic construct
  source 1..120: mol_type = other DNA
ttctcagggaatgttgtgaacattcacccagaggtacatgctgtctgcttgtgtccgtctcttttggtgatgttctaagtcattcgtgatcatcgactaatccattatttcattaggagt

SEQ ID NO: 83441 - DNA, 120 bp, synthetic construct
  source 1..120: mol_type = other DNA
tcaatattatcgccattaatatgataatgcttttccatgaaagggccatacatgcaaagtggcccccaaaggtcaaaggagctgagaaaccaaagaacaaggtaggcaagtccagtttgt

SEQ ID NO: 83442 - DNA, 120 bp, synthetic construct
  source 1..120: mol_type = other DNA
cagcccgccttggcctctcaaaaagtgctaggattacagccaccatgctcggcctatttctagtcttttgttatgacaaacagagctgcaataaatagcctacacaaatactttttcata

SEQ ID NO: 83443 - DNA, 120 bp, synthetic construct
  source 1..120: mol_type = other DNA
ttgatattactagctcctctctcccactccctcccttcagcttgatttttcctggacattttattattttcttggccaaagctggacatggatcaaaataaacgtctgttcaactccctg

SEQ ID NO: 83444 - DNA, 120 bp, synthetic construct
  source 1..120: mol_type = other DNA
taagtagtgggatttgggtctgtgtgacatcagattccaggctcaaaacgtctaagtttgtggcctccgcaaaaaaggctcataacagtctgtatttctgtttgcttttccatctaaaga

SEQ ID NO: 83445 - DNA, 120 bp, synthetic construct
  source 1..120: mol_type = other DNA
ctcttatctgatccaactagaaagcaaagcaaaacaaaaacctgactgccttctacagacaagccaatgtgaaggtattcagctcacacaggttgcaaaagacagagaaacacccaagtt

SEQ ID NO: 83446 - DNA, 120 bp, synthetic construct
  source 1..120: mol_type = other DNA
caaaataataataataataaattaaaaaagaaaatacagaaatttggctgggtgcagtggctcatgcctgtaatccctgcactttgggaggccgaggtgggcggatcacttgaggtcagg

SEQ ID NO: 83447 - DNA, 120 bp, synthetic construct
  source 1..120: mol_type = other DNA
cactcacaacaatcattaacacagaaggcttctgtgaccaaatgtgaggagttttgtctctacacatcaagcaagcaattaaatctgcagcagacaccagttgggtgtcttctaatccaa

SEQ ID NO: 83448 - DNA, 120 bp, synthetic construct
  source 1..120: mol_type = other DNA
aggaaccatggactaaaacctatatataaattataatagcacagaatcccaaaggctggaaaacttgtgggcttccctttcaccatatagagccactgttctctccacagtgcctgcata

SEQ ID NO: 83449 - DNA, 120 bp, synthetic construct
  source 1..120: mol_type = other DNA
taagacccacagggaaaattctcattttttatgcttagagttgatgaagaatggatggtcatgtggaagcattatgggacagaaagggtatgatctcctggaggaatccagcaatgcctg

SEQ ID NO: 83450 - DNA, 120 bp, synthetic construct
  source 1..120: mol_type = other DNA
caatccctgagctagacataaagactctccacatcctcaccagactcaggagcccagctggcttcacctagtggaccccacactggggctgcaggtggagctgcctgccagtcctgtgcc

SEQ ID NO: 83451 - DNA, 120 bp, synthetic construct
  source 1..120: mol_type = other DNA
gagtcttcccaatgtcctttagttcaaagtattcagcatgccaaagtgccacactttggggtattgttttctgagccccagtgttttcttcctctcttcttcattctttctcaatctctt

SEQ ID NO: 83452 - DNA, 120 bp, synthetic construct
  source 1..120: mol_type = other DNA
ggtcaaggctgtagaaaactttgattgtgctactgcactccagcttgggtgacagagcaagaccctggctccaaaaaaaaagaagaaaaaaagtcttcaatctcaacaattaagaattgg

SEQ ID NO: 83453 - DNA, 120 bp, synthetic construct
  source 1..120: mol_type = other DNA
agttgcagtgagccgagatggcatcactgcactccagcctgggtgacggagtgagactccatctcaaaaaaaaaaaaaagttaatatttaatgcattgatgtaaagctaacttcaggacc

SEQ ID NO: 83454 - DNA, 120 bp, synthetic construct
  source 1..120: mol_type = other DNA
atgtttctagggaactgtgagtaaatgtcttcctccatgaaagtgattcctgtgtctgcacgtcttgccacacctgattaaaacaaaccctggctacctttacaacccccaggtccatcc

SEQ ID NO: 83455 - DNA, 120 bp, synthetic construct
  source 1..120: mol_type = other DNA
ttatggtaagttcctagaactgaaaacagggcctggcatgtatttactgaaaaagtgattaagtgctctccagttgatggctggagttcagaccatcatggttttgtttcaggctggagg

SEQ ID NO: 83456 - DNA, 120 bp, synthetic construct
  source 1..120: mol_type = other DNA
acccagctaatttttgtatttttagtagagaacagggtttcatcatgttggccaggctggtctcaaactctctacctcaagtgatctgctcgtcttggcctcccaaagtgctagaattac

SEQ ID NO: 83457 - DNA, 120 bp, synthetic construct
  source 1..120: mol_type = other DNA
aaaagtcaaggagagtttagagtaataattccagtttttatggcttttgcttcggggaaaaagggttctagtttctaggacctaccgtggggaagaggattctggtttctatgactcact

SEQ ID NO: 83458 - DNA, 120 bp, synthetic construct
  source 1..120: mol_type = other DNA
accaaacacaatatttattgagatggcatttcactcttattgcccaggcttgtgtgtggtggcctgacctcagctcactacaacctctaccccccatccagccctgctccaggttcaagc

SEQ ID NO: 83459 - DNA, 120 bp, synthetic construct
  source 1..120: mol_type = other DNA
tcgattggtgcactcacaaaccctgagctagacacagggtgctgattggcgtgtttacaaaccttgagttagatacagagtgccgattggtgtatttacaatccctgagctaaatgtaaa

SEQ ID NO: 83460 - DNA, 120 bp, synthetic construct
  source 1..120: mol_type = other DNA
ttggcctcccaaaatgctgggattacaggcatcagccactgctcctggcctctgtgtagttttgtttggagctgcagtaaatagtgtctaatcttttccttccttacaggctatttctcc

SEQ ID NO: 83461 - DNA, 120 bp, synthetic construct
  source 1..120: mol_type = other DNA
gaaaagttaatggggcagtgattttggccttttctacccacctccttgtaataatattattttaacaatctggctgggtatgtggctcatacctataatcccagcactttgggaggccaa

SEQ ID NO: 83462 - DNA, 120 bp, synthetic construct
  source 1..120: mol_type = other DNA
aatacctcctatttaagcctttgccacacaggtataggcctggaaataaaaggtgtggctaaaagctacctgctcagagaactctttttttgttgttgttgttttgagatggagtctcgc

SEQ ID NO: 83463 - DNA, 120 bp, synthetic construct
  source 1..120: mol_type = other DNA
ggagatagccagcagccaattagatatgggaatcggaagcctagcagagaggatagctggagagtacatttcaaagtcactgccatataaacaggaattaaaaccctgatagtgggtggg

SEQ ID NO: 83464 - DNA, 120 bp, synthetic construct
  source 1..120: mol_type = other DNA
gactatactcagctcttctcggggctcacgaaacactttacaaaacatctttctgtatctcatttgagggtttttgcctacagtcattgccaaggccacttatctgtagttttcttttct

SEQ ID NO: 83465 - DNA, 120 bp, synthetic construct
  source 1..120: mol_type = other DNA
agaccaggaggtttgaacacatttggagcagctactcttgctgttattattatttttttcaggtgttatggtgattcccacttagcagtggccgttctgctgtttcctagtcaaattcca

SEQ ID NO: 83466 - DNA, 120 bp, synthetic construct
  source 1..120: mol_type = other DNA
tagatttgtttattcaacaagcattccaggcaccatataggggctgggaagaaagagtaaataaggcagagttccaactttcaaagagctttctaatcttggtttttagtcccacagggg

SEQ ID NO: 83467 - DNA, 120 bp, synthetic construct
  source 1..120: mol_type = other DNA
tgttatcccagcactttgggaggccaacatgcgagaattgcttgagccaggagtttgagaccagcctaggcaacatagtgagacctcatctctgcaaaagttttaaacaattagccagac

SEQ ID NO: 83468 - DNA, 120 bp, synthetic construct
  source 1..120: mol_type = other DNA
tgcaaccttccatagcacgttccgcttggatcactttctctttctctgttttataattgtccattacatacagccactgataactgaaaaggctcgcagtgtttggatgaggaaccatat

SEQ ID NO: 83469 - DNA, 120 bp, synthetic construct
  source 1..120: mol_type = other DNA
gtacaataattagtctcgtatgacggaggaaatagaagcctggagaggtcaagtaacttgcccaaagtcatacccagaaaggctggattcagagactgttgccaacattttccttattta

SEQ ID NO: 83470 - DNA, 120 bp, synthetic construct
  source 1..120: mol_type = other DNA
acattatatgtttaactgcctccttgaggatactgaagactctttccaatgattatattcttttcacttcacctgtcatgcatcaagtgttgatgttgctggctgcctttctcagtgtta

SEQ ID NO: 83471 - DNA, 120 bp, synthetic construct
  source 1..120: mol_type = other DNA
ttgacatgatcactggatgaacatctgaagtttcatatgtgatgggatctccccagaaaacaatagtgcacatcacagccaggaggcacccagagcattgtgttgctgtgttttttgaac

SEQ ID NO: 83472 - DNA, 120 bp, synthetic construct
  source 1..120: mol_type = other DNA
caaatgcagtcatttagcatcttcctctttcagagtcctgtatcccagcgatggggatcaagattcagacttaaggacaccctacctggaccttggcaaggagatttttacagtgggaat

SEQ ID NO: 83473 - DNA, 120 bp, synthetic construct
  source 1..120: mol_type = other DNA
tgggatacaggactctgaagaggaagacgctaatgatgacattgagttgactccacagcatctcacaattctttctttttctaagtcatctgcatttagtatccactgaccaagcaggca

SEQ ID NO: 83474 - DNA, 120 bp, synthetic construct
  source 1..120: mol_type = other DNA
cagtgagctgcaattttgccactgtactccaacctgggtgacagagagagacctcatctctagaaaaaaaaaaaaaaacaacttctgatttatttcatctgtatctctccctcctcccct

SEQ ID NO: 83475 - DNA, 120 bp, synthetic construct
  source 1..120: mol_type = other DNA
gcacttctctgtatgtatgttttatttatataaaaacatttttttaaaagatagaagtagctggatgcagtggctcacgcctgtaatcccagcactttgggaggccaaggcggatggatc

SEQ ID NO: 83476 - DNA, 120 bp, synthetic construct
  source 1..120: mol_type = other DNA
atcatctactgatttctctctctctcttcttttttttttttttgagacaagatctcactctgttgcctaggctggagtgcagtggcacaatcctagctcattgcagccttgacttcccag

SEQ ID NO: 83477 - DNA, 120 bp, synthetic construct
  source 1..120: mol_type = other DNA
acaagactctgtctcaggaaaaaaaaaaaaaaaaaaaaaagtttcaaattcaggctgggcacagtggtgctccgtaatcctagaactttgggaggctgaggcagggggattacttgaggt

SEQ ID NO: 83478 - DNA, 120 bp, synthetic construct
  source 1..120: mol_type = other DNA
ggtagtgatggcatttggattatgcgcaaacacctaggctaagagaggcagaagtggactgtgggtgtgtcttgagcagaggttgagattctctagggtctggaaatttggtgctttctc

SEQ ID NO: 83479 - DNA, 120 bp, synthetic construct
  source 1..120: mol_type = other DNA
aaaccagcctggccaacatggtgaaaccccatctctactaaaaatacaaagaattagctgggcatggtggcgggcacctgtagtcccagctattcaggaggctgaggcaggacaattgct

SEQ ID NO: 83480 - DNA, 120 bp, synthetic construct
  source 1..120: mol_type = other DNA
taataaatcgtccagatatggatttttaaaattctatgtatgttttttgagacagggttttgctctgtcacccacgctgaagtgcagtggctcactgaagccttcaactcttgggctcaa

SEQ ID NO: 83481 - DNA, 120 bp, synthetic construct
  source 1..120: mol_type = other DNA
tggactcttgccaaccaaggaaagatttatgtataagttcaacatggatgcacttaggctaattctccttcctgcatttccttcagaacatcctcagtctcctcactcatttcagatacc

SEQ ID NO: 83482 - DNA, 120 bp, synthetic construct
  source 1..120: mol_type = other DNA
ctagctagtcccaagacttgttcaactctttcttatggatggttttgcagaatacatacatggaaaccgtccacaaattctagcccaccaattaatgctgtcagactgggaacttcatga

SEQ ID NO: 83483 - DNA, 120 bp, synthetic construct
  source 1..120: mol_type = other DNA
tgaaggagcacaaagtcctttctcctggcttggaagtgcagggtggtgcgaagagtgggagggaggcagggttaggtgaggaaaaaacagaaaacacaaattaatttgacaatgatatgt

SEQ ID NO: 83484 - DNA, 120 bp, synthetic construct
  source 1..120: mol_type = other DNA
tttcccagtatgcaggcaggtgattctccagggaccctcccctttatctgtctcctgcatctatcattatctattttattttatacatttaaaacactattctgccgggtgtggtgacct

SEQ ID NO: 83485 - DNA, 120 bp, synthetic construct
  source 1..120: mol_type = other DNA
acatctgctttctgtccgctgctcagtgtctccagtggattcacaaaacaactgcctttctccctttccacctcagttcattatcaagaacaaccctggggtttcccaccttaatcaggc

SEQ ID NO: 83486 - DNA, 120 bp, synthetic construct
  source 1..120: mol_type = other DNA
accatgcccggctaattttttttgtatttttagtagagacggggtttcaccctgttagccaggatggcctcgatctcctgacctcatgatccatctgcctcagcctcccaaagtgctggg

SEQ ID NO: 83487 - DNA, 120 bp, synthetic construct
  source 1..120: mol_type = other DNA
ctgttcccctcacccttcaatgcgtctgcgttcctagcttttcctgcttgtgtgacaagaacctggttttagggtttaaggaacaaagttctgcatcaataagattcaaaagaaatcatt

SEQ ID NO: 83488 - DNA, 120 bp, synthetic construct
  source 1..120: mol_type = other DNA
aaggaagacagctcacctggcccaggcttcaatgctcagcccctcttattccttctagcaagagcttcttgcaaatacctcaatttttttttttatcttctgcagctgatgctcaaactg

SEQ ID NO: 83489 - DNA, 120 bp, synthetic construct
  source 1..120: mol_type = other DNA
tcttgagctcctgagctcaagcaatccacctgccttggcctcccaaagtgctggaattacaagcatgaaccactgtacctggcctttcataggagattaatggctgattttacccaccaa

SEQ ID NO: 83490 - DNA, 120 bp, synthetic construct
  source 1..120: mol_type = other DNA
cagagattataaacaatgtatacttgactttgtggcagtgatcactattgtacaatagttacttaaactcaggaggcagaggctgcagtgagccaagatagctccactgcactccagcct

SEQ ID NO: 83491 - DNA, 120 bp, synthetic construct
  source 1..120: mol_type = other DNA
tactaatctggggggtacccacaaccccctcgggtttgataatttgctagaacaactcaccaaactcaggagaatgttatacttacgattacaggcttgttacaaaggatacaaatcagg

SEQ ID NO: 83492 - DNA, 120 bp, synthetic construct
  source 1..120: mol_type = other DNA
attttgagtatagagagataattctaattattattgtttttcaaatgttagccagttgaaccatttatcataatcaaggtgataatatggcttattttctttggcctacagagatgataa

SEQ ID NO: 83493 - DNA, 120 bp, synthetic construct
  source 1..120: mol_type = other DNA
tattttgcattacatcccattcttattgagtccctgcaagctgagagccgactgccaaagcacaattcactgtaagagattctgtgaagggttaaaacaaacagtccaaattcacagtgc

SEQ ID NO: 83494 - DNA, 120 bp, synthetic construct
  source 1..120: mol_type = other DNA
ttggtaccagtaaagtggggtactgctataaagatacctgaaaatgtggaaatgggtaacaggcagaggttagaagtttagagggctcagaagaagacacaaaaatgtgggaaagtttgg

SEQ ID NO: 83495 - DNA, 120 bp, synthetic construct
  source 1..120: mol_type = other DNA
aagccttgatagcttacaaatgtgctgggcctgtgggtgcacagaagtcaagaattgaggtttgagaacctctgcctaggtttcagagcatgtatgtaaatgcctagatgtctaggcaga

SEQ ID NO: 83496 - DNA, 120 bp, synthetic construct
  source 1..120: mol_type = other DNA
atagtgaataagtcttatgagatctgatggttttataaagggctgttcccctgagcatgctcttgcctgctgccatgtacaacatgcttttgctcctccttcactttccaccatgattat

SEQ ID NO: 83497 - DNA, 120 bp, synthetic construct
  source 1..120: mol_type = other DNA
tgaaaccccgtctctactaaaaatacaaaaaattagccgggcaaggtggcaggcgcctgtagtcccagctactcgggaggctgaggcaggagaatggcgtgaaccccagggggcggagcc

SEQ ID NO: 83498 - DNA, 120 bp, synthetic construct
  source 1..120: mol_type = other DNA
tgacatttataaaccatcttggtgctggtggggggtgacttttggcatgctaatgcattataattagcatgtaatgggcagtgaggatgaccaaaagtcacttttgtcaccatcttggtt

SEQ ID NO: 83499 - DNA, 120 bp, synthetic construct
  source 1..120: mol_type = other DNA
ttagtaagactcccaaatttttgctggacttatggccagcctgaaacaagactacattttccagtatcccttgcagccaggtgtggctgtgagactaacttttggccaacggatctgaat

SEQ ID NO: 83500 - DNA, 120 bp, synthetic construct
  source 1..120: mol_type = other DNA
gttcttttttgttgtgtgtgtgtctttgtgtgtatatgtgtttttccatttccagaaatgaaccagctagctgctcaccctgtcctccaaattgcaggaacatatattcagctccctgac

SEQ ID NO: 83501 - DNA, 120 bp, synthetic construct
  source 1..120: mol_type = other DNA
ttgtgcagagcttgtagaaccacagcttctatgttgaccttcagctttctttttgcttcggatggaggcaggactggactaaatgtggtgacaaacaacattcatttactcttttattca

SEQ ID NO: 83502 - DNA, 120 bp, synthetic construct
  source 1..120: mol_type = other DNA
gaaactgctgttgtccccaagtatccattctcctcttcttccttactaatgagactcccaaatttttgctggacttgtggccatcctgaatcaagactacatttcccagtatcacatgct

SEQ ID NO: 83503 - DNA, 120 bp, synthetic construct
  source 1..120: mol_type = other DNA
gtcctcacatttcaaaaccaatcatgccttcccaacagtcttaactcatttcagcataaacttaaaagtccacagtccaaagtctcatctgagacaaggcaagtcccttccaactatgag

SEQ ID NO: 83504 - DNA, 120 bp, synthetic construct
  source 1..120: mol_type = other DNA
acgcctgtaatcccaacactttgggaggccacggcaggcagatcacttgaggtcagtagttcaagaccagcctggtcagccaacatgatgaaaccctgtctctactaaaaatacaaaatt

SEQ ID NO: 83505 - DNA, 120 bp, synthetic construct
  source 1..120: mol_type = other DNA
acccaagactgggtaatttataaagaaaaagaagagatttaatggactcacagttccacatggctggggaggcctcacaatcacaattgaaggcaaaagccatgtcttacatggtggcag

SEQ ID NO: 83506 - DNA, 120 bp, synthetic construct
  source 1..120: mol_type = other DNA
acaaaaatataaaagggggccagggacttgctaatcttgccggagagtcggcgcagctcagtgcaaggacttgggaaggcagggaactttgagagaaggtaaaaaggaggtggattcatg

SEQ ID NO: 83507 - DNA, 120 bp, synthetic construct
  source 1..120: mol_type = other DNA
cctttttaatttgcttgctttcttgttggtctgtgtcttggaacataggaactttcaatccctccaatatgggctccatccaaatctcaagttgaactgtaattcccagtgttggagtgt

SEQ ID NO: 83508 - DNA, 120 bp, synthetic construct
  source 1..120: mol_type = other DNA
agtaggatgctctagaactgatgttataaagtcagtttaatgatttaaatcccattgtggagaaaatagatctctgcagaaaagtacatccctgccctttcccagctccccagtcaaggg

SEQ ID NO: 83509 - DNA, 120 bp, synthetic construct
  source 1..120: mol_type = other DNA
gacagttttgctgctcctgggatggaataggtatgatggtgatccatccacctgcaagttctggtttcccagtacgtatatgatttagaattagaagcacataatacatagccttgttac

SEQ ID NO: 83510 - DNA, 120 bp, synthetic construct
  source 1..120: mol_type = other DNA
gagctgagatcacatcactgtactccagccttagtgtcagagtgataccctgtcttggaaaaaaaaataaaaaagaaagaaagcctgtctgatttcacgaaaggtttttgcaggacacgc

SEQ ID NO: 83511 - DNA, 120 bp, synthetic construct
  source 1..120: mol_type = other DNA
tttctctctctctcttttttttttttttttttttttttttgagacagagtcttactcttgttgcccaggctggagtgcagtggtgcgatatcagctcactgcaacctctgcctcccagat

SEQ ID NO: 83512 - DNA, 120 bp, synthetic construct
  source 1..120: mol_type = other DNA
agcctctaacaagagagtcagactgtcctttgaagctttgaagccaggcaggcattgacttttcctctgtagctatgaatgtcctagatggcctcttcttccaatataaagctattttat

SEQ ID NO: 83513 - DNA, 120 bp, synthetic construct
  source 1..120: mol_type = other DNA
tcttaatcctattatcttcataaactgagaatgtacgtcacctcaggaccactattgtacaaattggttgtagaacatgtgtgtttgaacaatatgaaatctgattgtaaaacatgtggg

SEQ ID NO: 83514 - DNA, 120 bp, synthetic construct
  source 1..120: mol_type = other DNA
aaataatgtgaggttttggcaacacaaaagaactatacagatgtatcactgtgattatatatcaatcaagaaaggtcagccaggcgtggtggctcacgcctgtaatcacagcgctttggg

SEQ ID NO: 83515 - DNA, 120 bp, synthetic construct
  source 1..120: mol_type = other DNA
acactggcctttgaagctatttcctggaagtgatatatgttgcttctgctcacatttgattggccacagaaggtcacatagccaaacctgatgccaaggagtgaaataatgtaatcttcc

SEQ ID NO: 83516 - DNA, 120 bp, synthetic construct
  source 1..120: mol_type = other DNA
cagctccatcctgtttctcctctccttctgggaccccaataacatgaatgctagatcttttgttacagtcacatagttatgttcattgtggtctgaggttacgttcatttttttcctatc

SEQ ID NO: 83517 - DNA, 120 bp, synthetic construct
  source 1..120: mol_type = other DNA
taccactagccatgtggttgccactgataacctgggggtaaggtggagggacagaggctttatcaccactggatgatggtacaagttccagctttcctcttggcttcctctactcagaag

SEQ ID NO: 83518 - DNA, 120 bp, synthetic construct
  source 1..120: mol_type = other DNA
atttatttatttctgtatttatttactcatttttgagacacagtctcactctgtggtccagcctggagtacagtggtatggctcactgcaacctccatctctcaggctcaaatgatcctc

SEQ ID NO: 83519 - DNA, 120 bp, synthetic construct
  source 1..120: mol_type = other DNA
gaggtggaggtggcagtaagctgagatctcaccactgcactccagcctgggcagcaagagtgaaactccatctcaaaaataaataaataaataaaataaaaaataaaaaggggaggcatg

SEQ ID NO: 83520 - DNA, 120 bp, synthetic construct
  source 1..120: mol_type = other DNA
ttggtaaggtttctcttttaatggaaagcaggcccaaatcatttttccttctaacaaagagcagcctgtaaaatcgggctgcagacatagatgacggcagttgtgccaatcatgttcaaa

SEQ ID NO: 83521 - DNA, 120 bp, synthetic construct
  source 1..120: mol_type = other DNA
cttttcaaatgctactaaggaaagttagacatggaacttaatagttttcacaggtattcacgagtcctcaggagtccagagacctcagtttgagaacactatcctagcactgaccttgac

SEQ ID NO: 83522 - DNA, 120 bp, synthetic construct
  source 1..120: mol_type = other DNA
aggatggcttgagaggttgcattgagttataattgtacccctgcactccagcctgggtgacagagagcttgtctctataaaacaaataaacaaacaactgagatctgaattccagatctg

SEQ ID NO: 83523 - DNA, 120 bp, synthetic construct
  source 1..120: mol_type = other DNA
aagttctgggtaggaagcagccacttgccattaagtggcaattaaattgctattgcaatttaaggtaaatcgcagcccctctgggcctagttttcttttttctcactctttttttggcga

SEQ ID NO: 83524 - DNA, 120 bp, synthetic construct
  source 1..120: mol_type = other DNA
actctctagattgtaaaggcctggaaggtggggagtgggttccattactgaatgcatctttcatagctctcgctgtcagagccctgccctatgcaaactcttttatttttatttatttat

SEQ ID NO: 83525 - DNA, 120 bp, synthetic construct
  source 1..120: mol_type = other DNA
ctccaagcctaattcatcacctttggctttgggatcatagtttccaaaccaaggattgtctgaacattgtctgacaatgccctttttttttttttttaggcagggtcttgctctgttgcc

SEQ ID NO: 83526 - DNA, 120 bp, synthetic construct
  source 1..120: mol_type = other DNA
ctcggacaaagccaggcagcgttggcagccccagacccgaccccaaaggcctgagactggggtgactgggacctaagagaatcctgagctggaggtgagaggggggaagccagagatgaa

SEQ ID NO: 83527 - DNA, 120 bp, synthetic construct
  source 1..120: mol_type = other DNA
ctcgctggtcgtgctgggcttccctcctgtggccaggtggtctgcaggcctgaagctgccttctcccctctcctacgtgcctctcctcacattttttcagctgtttcccatcctctcctt

SEQ ID NO: 83528 - DNA, 120 bp, synthetic construct
  source 1..120: mol_type = other DNA
ttcccaagggccagcttcttcctggtagtgcttttgtgtacttgtctggttgggacttcgtgtttctttcttgggattgttgtctgggactgcaagcagggtatgtttttatctactgtg

SEQ ID NO: 83529 - DNA, 120 bp, synthetic construct
  source 1..120: mol_type = other DNA
tctgggctaactcccgcagctgggctgggccgagcctgtgggaacctgcttcttcctctgtgccctggggctgctcccctttgcctctcccaccaggaaccgatcccagaagtaggaggg

SEQ ID NO: 83530 - DNA, 120 bp, synthetic construct
  source 1..120: mol_type = other DNA
cagaaagagttttgagcctccagccttgaggcaagtcccctctcactcagtgcggaggaactgagccccgggaggaggtgctcctgtgcagccccactgagtcagctcatctatcgcctg

SEQ ID NO: 83531 - DNA, 120 bp, synthetic construct
  source 1..120: mol_type = other DNA
aactctgtgagggttgtcagggacactgagaggtgggtgtgtgcatgccacatttagcctcgctgtttacagccagttcagtaagtttgtgtgtttcaccgtgtgtgtgtgtacagagct

SEQ ID NO: 83532 - DNA, 120 bp, synthetic construct
  source 1..120: mol_type = other DNA
cagggctctgagaccagtacaggttaggatagcttttcctgcagcaggggaggggagagtagttacttgggtttgtaaggagatgccatttagaatagttttatgtggggtaagcttcct

SEQ ID NO: 83533 - DNA, 120 bp, synthetic construct
  source 1..120: mol_type = other DNA
acccagacctgcacatatgttcttacttcctggtgcttctctctcgagggaatgctgggtcgaagaggatgtgcatttttaattataatagacattgctagattgctttccaaatagaag

SEQ ID NO: 83534 - DNA, 120 bp, synthetic construct
  source 1..120: mol_type = other DNA
cccgagggatcaggagctatgggaccagaggccctgtcatctttactgctgctgctcttggtggcaagtggagatgctgacatgaagggacattttgatcctggtgaggagactgaatca

SEQ ID NO: 83535 - DNA, 120 bp, synthetic construct
  source 1..120: mol_type = other DNA
aaacaatattgtaaacctggccaccttttggatttctccacttagatgtctttttttttttttctaatagatggggtcttgctgtgttgcccaggctggtcttgaactcctgggctcagt

SEQ ID NO: 83536 - DNA, 120 bp, synthetic construct
  source 1..120: mol_type = other DNA
ttctgctgaatgaacagagggaatgggctgaaatgaaggggaagctgaggcaggggtgcagggctgtgaggattggggagaatctgggcacaatgggatgataggcttggagacaaatgg

SEQ ID NO: 83537 - DNA, 120 bp, synthetic construct
  source 1..120: mol_type = other DNA
cttacaccgcccctgtggggcagacaatgtatttatctgaggccgtgtacctcaacgactccacctatgacggacataccgtgggcgggtaagaaaggcccctgcaggatatggagtttg

SEQ ID NO: 83538 - DNA, 120 bp, synthetic construct
  source 1..120: mol_type = other DNA
cttcatctctggtaagccctggagtagcccagtctccagtccctgaaattgacaactgatttcattcctaaccctgcagtgtccctaaaatactcattccttgcattatatctacccatc

SEQ ID NO: 83539 - DNA, 120 bp, synthetic construct
  source 1..120: mol_type = other DNA
actagcatcccaagaggagggcttagtaaagagaccacttacaccatgtcaaagagggtatggggctcacagggagggctgctccccagctctgggtctgctcagcggagaggagcaaat

SEQ ID NO: 83540 - DNA, 120 bp, synthetic construct
  source 1..120: mol_type = other DNA
gtaagacctgccttgttccagtcgcacctctgtcctctctgctgttttcttattgtatccctttcccattctctttttttcctgtcttccccagtttccacttgttttcttctttctgtg

SEQ ID NO: 83541 - DNA, 120 bp, synthetic construct
  source 1..120: mol_type = other DNA
ggcctattctgctctcctgagctcccaaggaggaagctcttgtgcccttagctcatctctgctgctgcttgctcttttttaaggtcccccccttgagctgaggagtagaaagcttactgg

SEQ ID NO: 83542 - DNA, 120 bp, synthetic construct
  source 1..120: mol_type = other DNA
aaaagctctggaatagctaactctcgtcccatgccagtgtcttcctggtttgaggttggcgcatggaatactgggaagatacagcatagacccagtctctcactcaaccgggagacacag

SEQ ID NO: 83543 - DNA, 120 bp, synthetic construct
  source 1..120: mol_type = other DNA
tctccaggaatgatttcctgaaagaggtgaagatcatgtcgaggctcaaggacccaaacatcattcggctgctgggcgtgtgtgtgcaggacgaccccctctgcatgattactgactaca

SEQ ID NO: 83544 - DNA, 120 bp, synthetic construct
  source 1..120: mol_type = other DNA
agccctggtctccatcagtcacacactttctctgggttgcattttacagaatctcatctataatatgaggttctcctagcccaagggactggggaaagcaggagctgcagtgtgatgggc

SEQ ID NO: 83545 - DNA, 120 bp, synthetic construct
  source 1..120: mol_type = other DNA
cagctgcatcggttcctggcagaggatgcactcaacacggtgtgaatcacacatccagctgcccctccctcagggagcgatccaggggaagccagtgacactaaaacaagaggacacaat

SEQ ID NO: 83546 - DNA, 120 bp, synthetic construct
  source 1..120: mol_type = other DNA
ttccatttcccatcacctgttttgcccagcattgtgttctgtttctggataatccaggcctttgcctgtgggacctcaggagatgcatgaatgtctgagtgcatgaaccttctcaactca

SEQ ID NO: 83547 - DNA, 120 bp, synthetic construct
  source 1..120: mol_type = other DNA
ttgttggaatggaaaccagaaccagaaaccagaatcaagagcctcagttatctcagaggcttggaaggatgagctgcaaccaccaagagaacaattaaagggttcaaatttggttggaaa

SEQ ID NO: 83548 - DNA, 120 bp, synthetic construct
  source 1..120: mol_type = other DNA
ggtctcaaactcctgacctcgtgatccgcccaccttggcctcccaaggtgctgggattacaggcgtgagccaccgtgcccagccccacctgcagttaatttaaaagtcaggccctgcttg

SEQ ID NO: 83549 - DNA, 120 bp, synthetic construct
  source 1..120: mol_type = other DNA
ctttgtggcacttactacgtgtgtaattttacatatctttttatacctgcccctcccaccaaactataagttgcacaagggcaaaatcttggaacacagggctcaatattggttgaaaga

SEQ ID NO: 83550 - DNA, 120 bp, synthetic construct
  source 1..120: mol_type = other DNA
gattgcagtgagccaagattgtgccactgcatttgacctgggtgacactgtaagactctgtcccctcaccccctccaaaagaggtgtgcctatttcaatttttttttttttttttttttt

SEQ ID NO: 83551 - DNA, 120 bp, synthetic construct
  source 1..120: mol_type = other DNA
gtgtgagccactgcctccggccgatttatttatttttatttttatttatttatttattttgagatggagtttcactcttgcccaggctggagtgcaatggtgtggtctcagctcactgca

SEQ ID NO: 83552 - DNA, 120 bp, synthetic construct
  source 1..120: mol_type = other DNA
ggcctcccaaagtgtcgggattacaggcgtgagccaccgtgcccagccaattttttgatttttgaaacatttctgatattctgtttaactttctttttgctttggccaatctttctttct

SEQ ID NO: 83553 - DNA, 120 bp, synthetic construct
  source 1..120: mol_type = other DNA
cttgggcacttcctgtctgattgtagggattttttttttaatttttttttttttagagatgggcatctcaggttgggctcagtggctcatgcctgtaatcccaacactttgggaagctga

SEQ ID NO: 83554 - DNA, 120 bp, synthetic construct
  source 1..120: mol_type = other DNA
gtatttttagtaaagacgggggtttcaccatgttggccaggatggtctcgaactcctgacctcgggtgattcgccgcctcggcctcccaaagtgctaggattacaggcgtgagtcaccgc

SEQ ID NO: 83555 - DNA, 120 bp, synthetic construct
  source 1..120: mol_type = other DNA
caagtcattgaaatacaaaatgatcttgcaaacactggacagttaacaattctgtcacttggtaattgagggaagactggagttgaagggcagaaatagggtgaggaggcaagaaaggga

SEQ ID NO: 83556 - DNA, 120 bp, synthetic construct
  source 1..120: mol_type = other DNA
tatcttccctcttaaagagttatgtgtgatatctgtaatgaggctctgataagtaatgcagtaaagaatttgtcttaggaagatactaatttcactctgtggaacagtgttccaagggtc

SEQ ID NO: 83557 - DNA, 120 bp, synthetic construct
  source 1..120: mol_type = other DNA
cttgacaagtacgccgaggagcgatgggaggtaagcacttgggagtgtgtgtgtctctgcttgtgcttctacttcccatggcccttggggcatggtctccctgttctcttctgttcttca

SEQ ID NO: 83558 - DNA, 120 bp, synthetic construct
  source 1..120: mol_type = other DNA
agataagaatgaaaacagaacgaacagagatggagaaagaaagaatgaatgtatggggttgggggtgggtgggttgtgttttggaccccagctggaaacctctgttcctcaggattactc

SEQ ID NO: 83559 - DNA, 120 bp, synthetic construct
  source 1..120: mol_type = other DNA
gtcacattatggaaggctagctctgagtctgttataataggtggtggtgagttgtctgtgtttgaagagaaatgaaggctttgggtgtgagaataggtagacccttgaggggaaaaaaac

SEQ ID NO: 83560 - DNA, 120 bp, synthetic construct
  source 1..120: mol_type = other DNA
tgcactttggatttggctaggtgagggaataattcacagtaatttgtattaggcctttctgaatatggctggatcacactggtgttaagatgaacccctgagcagacaagcatagagaat

SEQ ID NO: 83561 - DNA, 120 bp, synthetic construct
  source 1..120: mol_type = other DNA
ccatggcgctgtctgtcgataccatgcactctagctctcaaggaggaaaggttttgtggaagggaatagagacttggaataacagacctgtgctaattagagacaggaaagatggaacaa

SEQ ID NO: 83562 - DNA, 120 bp, synthetic construct
  source 1..120: mol_type = other DNA
tccactctcctcttatttgcaggacagttcttccttgaagttctttctgttctggagacagtagagggtgctctttccccaatccaattctctcttgcccctttgactttttttcttcct

SEQ ID NO: 83563 - DNA, 120 bp, synthetic construct
  source 1..120: mol_type = other DNA
ggtctgttatctcatgccatctctgtgaagcatccttggatttcccacaatatggctatccctcctctcttcctatagaatcttttgcctcttttaatatcttagaaaaccccatactgg

SEQ ID NO: 83564 - DNA, 120 bp, synthetic construct
  source 1..120: mol_type = other DNA
tcagtgaatatttattagaagtgtgactgcacgagcattgggtgagggcagagggaggtagctcccgaatcctccaaatggcttttagatggattgcagggaggctgggcagatggatga

SEQ ID NO: 83565 - DNA, 120 bp, synthetic construct
  source 1..120: mol_type = other DNA
tacagcatttgtgattaggacactgagaatccccagtgtcctctgggcacccagcaagaattctattatagttgctttaattaatgctgcccccatttcttccatgcaaattatcaggga

SEQ ID NO: 83566 - DNA, 120 bp, synthetic construct
  source 1..120: mol_type = other DNA
atagagtaattgtgctgagaatgaatttgtctctaggcccaaaagcctaaaatatctacattctggccccttaagagtttgctgaccttgctctagcttgctaccttccactttctacct

SEQ ID NO: 83567 - DNA, 120 bp, synthetic construct
  source 1..120: mol_type = other DNA
ctcattttaactcctttactaagggctaccccaaaagggaatgtatggagcttaagggtgacaataggatgggctctgcacccctccgttagaatacgagctccgtgtcggttttattcg

SEQ ID NO: 83568 - DNA, 120 bp, synthetic construct
  source 1..120: mol_type = other DNA
tcatgtaaccttctgcgcgatcaaggctccctgaagtggcatttctttatctcacccctgggggaacctggccactctaagaccacatgaggacgtgaaaaccaagtgacatttacacct

SEQ ID NO: 83569 - DNA, 120 bp, synthetic construct
  source 1..120: mol_type = other DNA
tgtgactccagtgttccccaaaccttgtcctcccttctaacccctaatgtggtcctttccacgttgctgattcctttttcctaattcacttcctaccctacccccaaaagtatggaggcc

SEQ ID NO: 83570 - DNA, 120 bp, synthetic construct
  source 1..120: mol_type = other DNA
gtcactcatgccctgcaccacttctggcttcacaacctctgtgacgtctacctggtgagtgaggctgggggaggcttggtattcccatgcctgcttctaattcctctggaaatttccaag

SEQ ID NO: 83571 - DNA, 120 bp, synthetic construct
  source 1..120: mol_type = other DNA
tgcagcttggtgagtcccaagcaccttggagtgggtctgtgggtgaatgggggggagcaccttctgaaggggtttgctgcagggggctcatctgcaggaatggttcgtactttactgtgg

SEQ ID NO: 83572 - DNA, 120 bp, synthetic construct
  source 1..120: mol_type = other DNA
aaaagagcagagcctgaagggccaacccccccgttaggaggtgcagggtaggaagggaggcaggagctgaggccttgcccctgacagtttctttctttccagtgctgctgcagagctcag

SEQ ID NO: 83573 - DNA, 120 bp, synthetic construct
  source 1..120: mol_type = other DNA
gattgagataaacttttgaaatcccaaacatgtctgtttatggctctttggtcccctttgctcccagtggtgacttttgtgcttctgagttgtcccctgagagcttggtctgggaaaaga

SEQ ID NO: 83574 - DNA, 120 bp, synthetic construct
  source 1..120: mol_type = other DNA
tgctaatttttaaaattgttctgtagagatagggttttgccatgttggccagggtggtcttgaacttctgggctcaaataatccacctgccttggcctcccaaggtgttgggattacaag

SEQ ID NO: 83575 - DNA, 120 bp, synthetic construct
  source 1..120: mol_type = other DNA
ggtagttgcatgtggccagtggctactatgttcgtcagcacggttataaaacatttccatcatcacagaaagttctattggaaagcactgatctaagaccttataggctgtttcaagaac

SEQ ID NO: 83576 - DNA, 120 bp, synthetic construct
  source 1..120: mol_type = other DNA
agtcaatttttttttttttttttttttttttgagacagagtcttgctctgtagtccaggctggagtgcatggtcttggctcactacagcctctgcttcccaggttcaagcaattctgcct

SEQ ID NO: 83577 - DNA, 120 bp, synthetic construct
  source 1..120: mol_type = other DNA
gattcaggcagtggcatacaccgttaagtaacctggtaggggacctgtcacactacagcaggtaccatcattgttcccattttgcgagtgaagaaatggaggctccaagaggataagaaa

SEQ ID NO: 83578 - DNA, 120 bp, synthetic construct
  source 1..120: mol_type = other DNA
caggcttcaatggctgtcatgtgttgcagacaacatggtgttgagatcttgcatggtggagggtgacgctggtccctgaagggagatggaggaggaggcagagctgggaacaaagggtta

SEQ ID NO: 83579 - DNA, 120 bp, synthetic construct
  source 1..120: mol_type = other DNA
tctttagagattaattattaactgcagctaattttcatcattcttgacaccgaagggctcaggaatgtgggcccaaaagggaggggtggattaagccaagtttcttccagaacccaggtg

SEQ ID NO: 83580 - DNA, 120 bp, synthetic construct
  source 1..120: mol_type = other DNA
tcctttccttcctttttttttttttttttttttgacagcgtctcatccctgtcgcccaggctggggtgcagtggtgcaatcttctcctggctcagcctcccgagtagctgggattacagg

SEQ ID NO: 83581 - DNA, 120 bp, synthetic construct
  source 1..120: mol_type = other DNA
ggttaatcccctgggacaacttggcgacctctctctggggatggagattctggtgttggtggaggccccggcacaactggctctcccgggactcataataggccccagagcctttaaaga

SEQ ID NO: 83582 - DNA, 120 bp, synthetic construct
  source 1..120: mol_type = other DNA
agtggaagcagctcccttgcctttgtggctatacaagggcctctctttctgttttccaattcatcacctttttctgtcatgattagttcctgttgtatcctaagacttttttggctactt

SEQ ID NO: 83583 - DNA, 120 bp, synthetic construct
  source 1..120: mol_type = other DNA
tgggtcacttacagtaaaatgttggtgggcctattctctctcatttccctgcagccacccctggctccttgggaggagttcagggagagtcattagctcctgctttcaactgtattttaa

SEQ ID NO: 83584 - DNA, 120 bp, synthetic construct
  source 1..120: mol_type = other DNA
ctcagctctaggcaatgaaggaccagttctgtggagccacattcacctgggcttgaatccttgtgcaagttacttaatctgtctgtgctccggattcttcattaataataatacttaaat

SEQ ID NO: 83585 - DNA, 120 bp, synthetic construct
  source 1..120: mol_type = other DNA
cagcgtaaggaggagtctactgtcagtcacaagattctgctctctgtcctgccgccagccatgcagactgcgggaaggtgcccagcttctccgagggcagttttctcatctgtagaagga

SEQ ID NO: 83586 - DNA, 120 bp, synthetic construct
  source 1..120: mol_type = other DNA
cctagatgccagtagcatcccactccaaattgtgacaaaaatgtctccagaaatttccaaatgttccctgatgtgggcaaaattactcctccctgtacagaaccaccgtcctagaggctt

SEQ ID NO: 83587 - DNA, 120 bp, synthetic construct
  source 1..120: mol_type = other DNA
atatgtccctgtggttctgtgtcttgtctctgtcactgcctctgcactctccacatattgttgtatgacctctgaacatcatgaagcacctttctctgcagcgagggtcattcgagggct

SEQ ID NO: 83588 - DNA, 120 bp, synthetic construct
  source 1..120: mol_type = other DNA
gagcaccgtgcacggaattcacagctgctcatggtgatttctttcttcttcttcttcttcttcttcttttttttttttttttttttgagaaggagtcttgctctgttgcctaggctggag

SEQ ID NO: 83589 - DNA, 120 bp, synthetic construct
  source 1..120: mol_type = other DNA
gactatggacaagttcgacgaacaaaacataccctaaagataagatgaaattatgaaattagttcacttagtcaagaaacggactgctactgaacccggggagcagagatgctgaacaca

SEQ ID NO: 83590 - DNA, 120 bp, synthetic construct
  source 1..120: mol_type = other DNA
agacagataactagatcctggaaccccagagtctgcatcatgcagtcacagaaccacaggtacaatctagattaaatcatccgagggcagcacaggtgcagtccagattaaatcatcaca

SEQ ID NO: 83591 - DNA, 120 bp, synthetic construct
  source 1..120: mol_type = other DNA
tcatactgtataggtattttaacaaacatttacccacattattgcaaatggagcatgccatttatgggggtaaggataccaggaaacactagagatgctcttttgggacagcgtgccctg

SEQ ID NO: 83592 - DNA, 120 bp, synthetic construct
  source 1..120: mol_type = other DNA
tttcaacgtcttttaatctcagagctcaattactgaacagcggaagtcgcccttggtcttccagcctgtggaggtcacaaatacatttggtttttacttaacgtgcatgatgaaatgttg

SEQ ID NO: 83593 - DNA, 120 bp, synthetic construct
  source 1..120: mol_type = other DNA
aatttaattgtatttatcacatatcagaaagtgatgagtgctgtgttattaaaacacagcagagaaagtggcccaggaatgcagaggctgctgttttcaagaaggtggccacagcaggtg

SEQ ID NO: 83594 - DNA, 120 bp, synthetic construct
  source 1..120: mol_type = other DNA
aacgttgcccattgctattgttgtgggactatgtacaggtcacttttcctccgtgaaatgtaaatttctcagatgtaaaataggggaagttgaccgcttctaaagagccttatggagcat

SEQ ID NO: 83595 - DNA, 120 bp, synthetic construct
  source 1..120: mol_type = other DNA
acaatttgtgtctacctgctaatccctatgggaagttctgccagaggtcttacctcaatttctcacactgttacatttgggatggtgttagaatgttatggaaaggtgaagagtctaacg

SEQ ID NO: 83596 - DNA, 120 bp, synthetic construct; identical to SEQ ID NO: 27560
  source 1..120: mol_type = other DNA

SEQ ID NO: 83597 - DNA, 120 bp, synthetic construct; identical to SEQ ID NO: 27561
  source 1..120: mol_type = other DNA

SEQ ID NO: 83598 - DNA, 120 bp, synthetic construct; identical to SEQ ID NO: 27562
  source 1..120: mol_type = other DNA

SEQ ID NO: 83599 - DNA, 120 bp, synthetic construct; identical to SEQ ID NO: 27563
  source 1..120: mol_type = other DNA

SEQ ID NO: 83600 - DNA, 120 bp, synthetic construct
  source 1..120: mol_type = other DNA
cagtaatagagggagagttttggtgaaaactaaggagaaagacaataaatacacaggaggtaaaaagctggaattggggacaaggctgtggctgagaatgaaagggtgtgaaagagaaag

SEQ ID NO: 83601 - DNA, 120 bp, synthetic construct
  source 1..120: mol_type = other DNA
ctggagaaaaaaaagtccagaagaaatcataaatatctctcatctacatggttgcttcctcttcctcccaaatcccttagttttcctaaatgtctacagtggacgccctgttggtttggc

SEQ ID NO: 83602 - DNA, 120 bp, synthetic construct
  source 1..120: mol_type = other DNA
agagttgtcacaagttaggtgctatatagaataaaacaacaccctaattcattaagcccaactccgtgagcatctactatgccccctatttatgttaggacaccagccctgctccaaaac

SEQ ID NO: 83603 - DNA, 120 bp, synthetic construct
  source 1..120: mol_type = other DNA
gtgtctccctcccactttcctctctattccccgctaattatcactttgaaatctaggcggaaatcctttaacaagctccggggctgggccctcattagggataattacttaatcagtagg

SEQ ID NO: 83604 - DNA, 120 bp, synthetic construct
  source 1..120: mol_type = other DNA
gtgctggcaaagtaagaagatccaatgatttgggacacagtcaccttcatttttctcccctctgcctcctacaaaggcctctgtcccagaaatgagacatcccagagaaaacaggtttct

SEQ ID NO: 83605 - DNA, 120 bp, synthetic construct
  source 1..120: mol_type = other DNA
attagagctaggctccaagtctaaagccaagtgaaatgaaaatatcacttccagaaatactgcctaaattaaaatcctcagtagggctttcataatccccggatagagacagggagggat

SEQ ID NO: 83606 - DNA, 120 bp, synthetic construct
  source 1..120: mol_type = other DNA
tccccttccagtttttccttctccttctacagggtccttcccaacaccagccaaataagccctaagcagtgtgcacaggaagcacccagaggagagtatttttaaaaagtagatttctaa

SEQ ID NO: 83607 - DNA, 120 bp, synthetic construct
  source 1..120: mol_type = other DNA
gcaaaaactagcacggatgcaccctcccccttttcatgtccaattcctgttctccagaggagacgacttttaacttttagctttttatcccagtatttgcaagtgcagatttaaacatca

SEQ ID NO: 83608 - DNA, 120 bp, synthetic construct
  source 1..120: mol_type = other DNA
aaacaaactgtatgaaaatatgacagtgcatttactgttaactcctgcttatgttttagaaagctcttatggaaagaaaaaaaaaatgctttccaggtagcagacacagataggttattt

SEQ ID NO: 83609 - DNA, 120 bp, synthetic construct
  source 1..120: mol_type = other DNA
ctgctgtgctggagctctcctgacacagctttcccagctgcacagtcgttgctatgtagaggaactaatacttgagcgactattttcttatagttggataactctgtttccttataaata

SEQ ID NO: 83610 - DNA, 120 bp, synthetic construct
  source 1..120: mol_type = other DNA
agaaaacattgtggcaatttgctcagaagcgctacttttccatattcagaagggcactgtcacagtacggcttccattttgaaaaaccagtctgcaggtatttctttgctttgggcctct

SEQ ID NO: 83611 - DNA, 120 bp, synthetic construct
  source 1..120: mol_type = other DNA
aagctgccctcctatgacctccttgtcacttccacccagacaaggggattcttctgatcagtccagatgacctggatgaagttttctttctttctttctttttttttttttttgagacag

SEQ ID NO: 83612 - DNA, 120 bp, synthetic construct
  source 1..120: mol_type = other DNA
taaaaattgatatttttcaggaaggactatgcccccagggcccactgtagcctttgagaccatggtggagtctgtgtccacaatggcctcaaccacaggctctgagagtacctcaacctc

SEQ ID NO: 83613 - DNA, 120 bp, synthetic construct
  source 1..120: mol_type = other DNA
aatctccacaaaagcctctgggacaactgtagagtctgcgccctctacagcccctccaacacctgctgagaccaccacagcatctgtgcccaccacaacctctaccacaggctctgagaa

SEQ ID NO: 83614 - DNA, 120 bp, synthetic construct
  source 1..120: mol_type = other DNA
ataatagtatctatgcccacaaccgcctcctccacagactctgagaccaccacagcctccactgcaatatccacgagcaacatggctgtgagcacagcctctgaggtcacttcagggtct

SEQ ID NO: 83615 - DNA, 120 bp, synthetic construct
  source 1..120: mol_type = other DNA
tgatgctttgcaaaatacatttgtgagggcagcacctgcatatctgaagagccctataattgctcttctctgtatgtcagatctaacagtgggaaccgccgtcagtcaactgcaaaattt

SEQ ID NO: 83616 - DNA, 120 bp, synthetic construct
  source 1..120: mol_type = other DNA
aaaaaaaaaaaaaaaaaaagtaggcgtttatagaagtcaggtaattaatggagttttagcccaggtctgacttatagtgggtcccgtgggtccctggactcatcctgtgatcatttcctc

SEQ ID NO: 83617 - DNA, 120 bp, synthetic construct
  source 1..120: mol_type = other DNA
aaccaagaaagaagcacaacgcctagtgggcttacttggattttggaagcaacacattccacatttgagtgtgttactccagctcatttattgagtcacccgaaaggctgacagttttga

SEQ ID NO: 83618 - DNA, 120 bp, synthetic construct
  source 1..120: mol_type = other DNA
tcagatgtgtgattatttactgatgcataatcagtagggggtttggctggatggtcagggacttggaagaagcacgattggaaaattggtgacaaagaaatgtgggaaagagttatgtgg

SEQ ID NO: 83619 - DNA, 120 bp, synthetic construct
  source 1..120: mol_type = other DNA
ctagaaggctgtgtatgctctgaatcagtgtccattgtatggtactgtttctcccatagccagcattcctgggtccaggaagcaagggatggaagtggaagtggcaccactcaccatcac

SEQ ID NO: 83620 - DNA, 120 bp, synthetic construct
  source 1..120: mol_type = other DNA
agtgtcaacctgattggattgaaggacacaaagtattgatcgtgggtgtgtctgcgagggtgttaccaaaggagatgaacatttgagtcagtggcctcagaaaggcagacccacccttaa

SEQ ID NO: 83621 - DNA, 120 bp, synthetic construct
  source 1..120: mol_type = other DNA
ctccttacacccagtgatcacagtcacaaaagaagcagggcctgccactttgtatacaagcccgccctcttctatttgggtggccacttccgaagtcaaatagatcttccacttccatac

SEQ ID NO: 83622 - DNA, 120 bp, synthetic construct
  source 1..120: mol_type = other DNA
gaaagcagggctgtttgtaaaggggtcaccggcagcttgaaactgtgaaatagattgtttccttggaaactacagttaaaatgaacgtggaatgttgtattcagagaaaccccttatctg

SEQ ID NO: 83623 - DNA, 120 bp, synthetic construct
  source 1..120: mol_type = other DNA
tttcactttcaagacagacaaaatcataagctccttccagggtgagagtggggcatgtcccacctcatgcctttatgattttacccaagtgaaaacaaattcacttttctaggtacctct

SEQ ID NO: 83624 - DNA, 120 bp, synthetic construct
  source 1..120: mol_type = other DNA
tatttttagtagagatggggtgtcaccatgttggccaggctgctctcgaactcctgacctcatcatctgtccacatcggcctcccaaagtgctgggattacaggcgtgaaccaccgcacc

SEQ ID NO: 83625 - DNA, 120 bp, synthetic construct
  source 1..120: mol_type = other DNA
aaaggttaaaagttaaattacacttaaaaataaaaagaacagccgggcgcagttctgtaacctcaacactttgggaggctgaggcggatggatcatctgaggtaaggagttcaagaccag

SEQ ID NO: 83626 - DNA, 120 bp, synthetic construct
  source 1..120: mol_type = other DNA
aagttttgggattacaggcacgagccaccatgcccagacttatcttgtcttgaaagttgagcagcatagatccctaccaaggtacaagtatactaattaggaagactgttttctccaata

SEQ ID NO: 83627 - DNA, 120 bp, synthetic construct
  source 1..120: mol_type = other DNA
atttgtaacttcaaactctacaaactgagtagatcagaaaatcctgttagactcactcagtgccctccagttcttcatctttgggaagagtctccctccctacttctttgcctctttcaa

SEQ ID NO: 83628 - DNA, 120 bp, synthetic construct
  source 1..120: mol_type = other DNA
attgcctgtctctaaatttggtgcagaggagggtagagggagtatcccttgagaaataaattgtaaccacaacaaccaacaataccttacttacatggtttgtagccacaaatcatgcag

SEQ ID NO: 83629 - DNA, 120 bp, synthetic construct
  source 1..120: mol_type = other DNA
attaaccatctctacctcccccagtcctccccactacctttcccagcctctggtaaccattcttctagactctatgtccatgagttcagttgtttttgatttttagatcccacaaataaa

SEQ ID NO: 83630 - DNA, 120 bp, synthetic construct
  source 1..120: mol_type = other DNA
cattaatagacacttccaaatcttagctattgcaaacagtgctgcaacaaacgttggagtgcggatatttctttgatacactgatttcttttcttttggctacctcctcagcagtggggt

SEQ ID NO: 83631 - DNA, 120 bp, synthetic construct
  source 1..120: mol_type = other DNA
ccattctcaaccagtgagttctcactcttagttcccacaagaactggttgttgaaaagatcctgtcacctcctccattccttctttccagcttcctctctctcgctatatgatctgtgca

SEQ ID NO: 83632 - DNA, 120 bp, synthetic construct
  source 1..120: mol_type = other DNA
tgccccagagaccccaaacatgttttcattatctctcttcattatgtcttctggatctctcttcccctgttccttcaatgtgcattgttgagtgcttactgcatactcagtaatactcca

SEQ ID NO: 83633 - DNA, 120 bp, synthetic construct
  source 1..120: mol_type = other DNA
aatcacttcagcctaacaaggtatgtcatgcaggaagcagtcagacacagtggttaaaattgggctctggtctcacattgcctacatttgaattatggctccatctattaactgtgtact

SEQ ID NO: 83634 - DNA, 120 bp, synthetic construct
  source 1..120: mol_type = other DNA
atcaagggcaaaaatttgacataaccttaactccagccaagcctccaagaagttaaaagccttccctctacctttagacgttggtttacagcccttattcctgggagctcttatgtattt

SEQ ID NO: 83635 - DNA, 120 bp, synthetic construct; identical to SEQ ID NO: 27564
  source 1..120: mol_type = other DNA

SEQ ID NO: 83636 - DNA, 120 bp, synthetic construct; identical to SEQ ID NO: 27565
  source 1..120: mol_type = other DNA

SEQ ID NO: 83637 - DNA, 120 bp, synthetic construct; identical to SEQ ID NO: 27566
  source 1..120: mol_type = other DNA

SEQ ID NO: 83638 - DNA, 120 bp, synthetic construct; identical to SEQ ID NO: 27567
  source 1..120: mol_type = other DNA

SEQ ID NO: 83639 - DNA, 120 bp, synthetic construct; identical to SEQ ID NO: 27568
  source 1..120: mol_type = other DNA

SEQ ID NO: 83640 - DNA, 120 bp, synthetic construct
  source 1..120: mol_type = other DNA
tagagattgcaaaggcctttaaacaactaccgaggaaatccctggctgcttggatggtctgattgtgggacacaggggctgatgatatttccttaacaggagaagcagaaaaaatgagta

SEQ ID NO: 83641 - DNA, 120 bp, synthetic construct
  source 1..120: mol_type = other DNA
tgccattgcactccagcctgagcaacaacagcgaaacttcgtcttaaaaaaaaaaaaaaaaagatgtatatgacgtaggagaagccatcacagatttgggagctactgagaaagctaggg

SEQ ID NO: 83642 - DNA, 120 bp, synthetic construct
  source 1..120: mol_type = other DNA
gcagagggagatttggcagggtcataggacaataatggagggaaggtcagcagataaacaagtgaacaaaggtctctggttttcctaggcagaggaccctgaggccttccgcagtgtttg

SEQ ID NO: 83643 - DNA, 120 bp, synthetic construct
  source 1..120: mol_type = other DNA
ggcggccaggaagaggtgttcctcacttcctagatgggatggcggccgggctgagacgctcctcactttccagactgggcagccaggcagaggggctcctcacatcccagacgatgggcg

SEQ ID NO: 83644 - DNA, 120 bp, synthetic construct
  source 1..120: mol_type = other DNA
cctccagctccatccatgtccctgcaaaggacatgatgttgttctttttgtatgactgcatagtagtccatgatgtatatataccacattttctttatccagtctatcgctgatgggcat

SEQ ID NO: 83645 - DNA, 120 bp, synthetic construct
  source 1..120: mol_type = other DNA
tatgcgtttctctaataatcaatgatgtttagctttttaaaatatgtttgttggccacatgtatgtcttcttttgggaagtgtctgttcatgtcctttgtccactttttgatggaattgt

SEQ ID NO: 83646 - DNA, 120 bp, synthetic construct
  source 1..120: mol_type = other DNA
aaagtgttaggattacaggtgtgagccattgcacccggcccacagtgaagtttttaggggttacatggttgggtaacactcctttgatactgggtgcaataattgacaaagcccaacaat

SEQ ID NO: 83647 - DNA, 120 bp, synthetic construct
  source 1..120: mol_type = other DNA
aactagaaaagtggatgattatgcacaaacctatatggggcatgaacatgtggcaagacatacggaaaaagccgcaaagccttgtggctgatttaactgtatttcaggtgactgcacata

SEQ ID NO: 83648 - DNA, 120 bp, synthetic construct
  source 1..120: mol_type = other DNA
acattcagatattcagaaggctgtccaccatgtaacagattggcaagtggattatttagatactgtccctgtaagccaaggaaataaatacatgttaacctgcatggacaccgctactgg

SEQ ID NO: 83649 - DNA, 120 bp, synthetic construct
  source 1..120: mol_type = other DNA
ttattggtatgattgtttggcctccatttgtcttcctcatccggttattgaagatattatctggcatatagaaactctataaagcctgtaatccctgcactttgggaggccaaggcaggt

SEQ ID NO: 83650 - DNA, 120 bp, synthetic construct
  source 1..120: mol_type = other DNA
atcatggaagagatgagcacgtgaaattgtcagggccagttttgagaggtggagtgtaggaatacagcctgttgcacggcaacagggacgccattttgaagcaaagctgccattgagagg

SEQ ID NO: 83651 - DNA, 120 bp, synthetic construct
  source 1..120: mol_type = other DNA
gtggggccagataagagaataaaagcaggctgccccagccagcagtggtaacccgttctggtccttttcctgactgtggaagctttgttcttttgctctttgcaataaatcttgctactg

SEQ ID NO: 83652 - DNA, 120 bp, synthetic construct
  source 1..120: mol_type = other DNA
gcttaccccggaaagggtgtatacttcctgtagagacaattaaaagcaacctttcagaacaggcaggaatgctatgtgcgtcgtagcctgtaatttatgccataatatcaaggttgcttt

SEQ ID NO: 83653 - DNA, 120 bp, synthetic construct
  source 1..120: mol_type = other DNA
tagtaatccggaagagcaagcgcgaaaaataactcaaacagacacaattatacaggaataaaaatcacccggcaaatataatacatttggaggatagatccaggaagactaacgtgcaag

SEQ ID NO: 83654 - DNA, 120 bp, synthetic construct
  source 1..120: mol_type = other DNA
atagctcaatacagctcttaaatttttaccaggcacattatgtaaataaaaatttttatttcctggccggacatggtggctcacacctgtgatcccagcattctgggaggctgaggcagg

SEQ ID NO: 83655 - DNA, 120 bp, synthetic construct
  source 1..120: mol_type = other DNA
tacctcaaaaaccacctctaatttagggatcatatacccagagtaggacttcctgttttctcctgcctcatataaattcctgtgaagggctacgtggagtgtaaggaactggtaattttg

SEQ ID NO: 83656 - DNA, 120 bp, synthetic construct
  source 1..120: mol_type = other DNA
ggttgcagtgagccgagattgcaccactgcactccagcctggtcgacagagcgagactccgtctcaaaaaaatgaaaaataaaaaatgttaggtaagttaatgattcatattttcttgaa

SEQ ID NO: 83657 - DNA, 120 bp, synthetic construct
  source 1..120: mol_type = other DNA
gctgaggcgggaggattgcttgagcccaagagttcaacaccagcctgagcaatatagtgagaccccccacatctcttaaagtaaaataaaatttaaaaaaaggataatgatgagtattga

SEQ ID NO: 83658 - DNA, 120 bp, synthetic construct
  source 1..120: mol_type = other DNA
tttcccgacatgtcccttatgatgactcgtccatctgtttttcaaattccacatagctgggcctctgtagctttgtggttttatattccgcatactttctaacagtgacagctccagaat

SEQ ID NO: 83659 - DNA, 120 bp, synthetic construct
  source 1..120: mol_type = other DNA
ccccaagcttactgaggtaaaatagacaaaaattatatgttttcagcgtgtacaatgtgttgatttgatgagtatacattgtgaaataattaccactatcaaactaatgaacacatcacc

SEQ ID NO: 83660 - DNA, 120 bp, synthetic construct
  source 1..120: mol_type = other DNA
tgtcctgatgctcttatcaccctccaaatccccagcttcccctagatagactgctattgacctttaccatccatttgtttccttttcttctcttcttccttctttcttctacaaaggcct

SEQ ID NO: 83661 - DNA, 120 bp, synthetic construct
  source 1..120: mol_type = other DNA
atccttctttgttttttttccataggttatttgggtacaggtgatatttggttatgtaagtgctttattggtgaattgtgagactttggtgcacccgtcaccaagcagtgtacaccgcac

SEQ ID NO: 83662 - DNA, 120 bp, synthetic construct
  source 1..120: mol_type = other DNA
attggctcatccattccattgcctttactgtaggatggctcgtcaagaagtgggaggtgcggttgaaagagaaggtataggttggatgatgtggaggatttggagtgcttcccccttctt

SEQ ID NO: 83663 - DNA, 120 bp, synthetic construct
  source 1..120: mol_type = other DNA
accaaacactgaatgatgtccatcctaacgtccccgcatcactcctcagccaccacctctccctccactctcctcctcacccccattcttttttttttttttggagatggagtgtggctc

SEQ ID NO: 83664 - DNA, 120 bp, synthetic construct
  source 1..120: mol_type = other DNA
tccttctaatgaaaagaaagatttaggttagaccactccccctacacacttactgtctcacattcccgctcacaattctccccaaatgactgtatcaaatttttggtgttaaactagcat

SEQ ID NO: 83665 - DNA, 120 bp, synthetic construct
  source 1..120: mol_type = other DNA
tttccagtgtcatcatcatttcagcccaaggagagggaagaaaaacagtattttgtattattttatgatacagtcagtcaaagtgcagccacaagaggagaggcttacaggccctagaga

SEQ ID NO: 83666 - DNA, 120 bp, synthetic construct
  source 1..120: mol_type = other DNA
tggatgtttgacctcctgggctgacactctaattttcttatatttcttcttctgtcttccaactctgtcgttttatttttcttctggggagatttcctcagcttctaaagtcttcaaatc

SEQ ID NO: 83667 - DNA, 120 bp, synthetic construct
  source 1..120: mol_type = other DNA
aacttagcacccgggccagcagctgcggagggtgcgccaggttccccagcagtgccagcgggtgctgcgctccaattctcgccggacctcagctgcctccctgaggggcacggcttggga

SEQ ID NO: 83668 - DNA, 120 bp, synthetic construct
  source 1..120: mol_type = other DNA
agtggcaatccgcttgggtactcttctatagtgtggaaactttgttctttcactctttgtgataaatattgctgctgctcactctttgagtccacactgcgtttatgagttgtaacactc

SEQ ID NO: 83669 - DNA, 120 bp, synthetic construct
  source 1..120: mol_type = other DNA
agagcctctctattctcttgacttccttgattcactttttagagttttctttctgccttagtggatgctccttctcagtctcattcatttgcgtctcctcctctatctgagtgatgcagt

SEQ ID NO: 83670 - DNA, 120 bp, synthetic construct
  source 1..120: mol_type = other DNA
ggcaaaactctgtttctactagaaatacaaaaattagctgggtgtggtagcgcatgtctgtatttccagctactcaggaggctgaggcaggagaatcccttgaacccgggaggtggaagt

SEQ ID NO: 83671 - DNA, 120 bp, synthetic construct
  source 1..120: mol_type = other DNA
gcttgcagggaggtgtggagggagaggtgcgagcgggaaccgggactgtgcgcggcgcttgcgggccagctgcagttccaggtaggcgtgggcttggcggccccgcactcgaagcagcca

SEQ ID NO: 83672 - DNA, 120 bp, synthetic construct
  source 1..120: mol_type = other DNA
gctcaaagtttgtgagtgcaccaatcgacactctgtatctagctgctctggaggggccttggaggacctctgtgtccatattctgtatctaactaatctgatggggacgtggagaacctt

SEQ ID NO: 83673 - DNA, 120 bp, synthetic construct
  source 1..120: mol_type = other DNA
aataatgaattatgaggcttatatgtagacataaaatgtatgacaacagtggtacaagggatagaaaaaggaaatggaagtgtactgtgttgagactctcatgcctttacaggaagagga

SEQ ID NO: 83674 - DNA, 120 bp, synthetic construct
  source 1..120: mol_type = other DNA
cccatctttacaagaaataaaaattaaaaagtaattagccaggcatcatgactcgtgcctgtgatcctagatagttcggaggctgaggcaggaggatttcttgagcttagaaagtcaagg

SEQ ID NO: 83675 - DNA, 120 bp, synthetic construct
  source 1..120: mol_type = other DNA
gactaaagagacagaacaacgaaaaacaacacacgattctgaattgaactggtttactattaaagacattattagaacaactaacaaaacttgaaagggatctaaggatcaggtggcagc

SEQ ID NO: 83676 - DNA, 120 bp, synthetic construct
  source 1..120: mol_type = other DNA
tggctgccttcttatccttcagatctcagttcatatgtcagttcctcagagagaccttttctgactccagtatctaaagcagcaccactgctttctttaacagcacttaagccaatgtgt

SEQ ID NO: 83677 - DNA, 120 bp, synthetic construct
  source 1..120: mol_type = other DNA
agtctctaccacaggctctgagaccaccaccacctccactgcaagctctgaggccactaaagtctctaccacaggctctgaaaccaccacagcatctactgcaggttctgagaccaccac

SEQ ID NO: 83678 - DNA, 120 bp, synthetic construct
  source 1..120: mol_type = other DNA
agcctctactgaagattctgaaaccaacacagcatttactgaagattctaagactaccacagcctctactacagggtttgagacaaccgcagcctctactacaggctctgagcctaccat

SEQ ID NO: 83679 - DNA, 120 bp, synthetic construct
  source 1..120: mol_type = other DNA
gcaggctctgagaccaccacagtctctactgcagattctgagaacaccacagcatctactgcagattctgagaccacctcagcctctactacaggctctgagaccaccacagcctctact

SEQ ID NO: 83680 - DNA, 120 bp, synthetic construct
  source 1..120: mol_type = other DNA
agcctctactgaaggctctgagactaccaccacctctactgaaggctctgagaccaccacagcctctactgaaggctctgagatcactacagtttctaccacaggctctgagaccaccac

SEQ ID NO: 83681 - DNA, 120 bp, synthetic construct
  source 1..120: mol_type = other DNA
agaccaacacagcctgtaccacaggttctgagacctccacaccctccagtgcaggctctgagaccaacactgccttcatcataggctctgagagcaccatagcttccactgcaagcttgg

SEQ ID NO: 83682 - DNA, 120 bp, synthetic construct
  source 1..120: mol_type = other DNA
aatgtattgactctagaccagaggctggcagaccacatttcatgggtcaagtctcacctgttacctggttttgtaaagttttactggaacatagtcatgcccattcatttatggtttgtc

SEQ ID NO: 83683 - DNA, 120 bp, synthetic construct
  source 1..120: mol_type = other DNA
aatgctgttaattcattcatttttatcagcccaccctcttctatttgggtggccacttctgaagtcaaatagatcttccacttctgaacccatcgcgataacgtttcctcaaacttctgc

SEQ ID NO: 83684 - DNA, 120 bp, synthetic construct
  source 1..120: mol_type = other DNA
gatcacttgagtccaggcatttgagaccagcctggccaacatggtgaaacttgtctttactaaaaatacaaaaattagtcgagagtggtagcatggacctgtagtcccagctactttgga

SEQ ID NO: 83685 - DNA, 120 bp, synthetic construct
  source 1..120: mol_type = other DNA
ttgcaagatcaagagagaataacgaaagtgaacattgagtttttactgcctgctaggctcaaggctgaatgtttaaaatgcataatgttatttaatctggcctacaatcccgtggccata

SEQ ID NO: 83686 - DNA, 120 bp, synthetic construct
  source 1..120: mol_type = other DNA
acggcaggacaagatggctgtggccatagattgggtatcaaaacatattatgggtgggagggggtcatggaggagaaaaaaataatgatcatgaaataattaaaatggagcataggaagc

SEQ ID NO: 83687 - DNA, 120 bp, synthetic construct
  source 1..120: mol_type = other DNA
tggtgaccttgaggtaggcaaagatacttagatacttaagcaagacacaaaaagcactagctattaaaagaaagtgtgatgatttggacttcattaaagcctagtatcagcatatacctt

SEQ ID NO: 83688 - DNA, 120 bp, synthetic construct
  source 1..120: mol_type = other DNA
gaaaaagatattctgaggctattttctcagcatattatgatttccttggtcagagaatgtggttggagacacatgacgataaatgaggcatttggtaagcccaaagacagtggtgctgca

SEQ ID NO: 83689 - DNA, 120 bp, synthetic construct
  source 1..120: mol_type = other DNA
gcagacaacacccagttcataaagggcagctcatgtttcatgaaccctcgcatgctgaggacccaagattaagtcagatgctaggatgtggaagagggcttgcttttgctccaaaactct

SEQ ID NO: 83690 - DNA, 120 bp, synthetic construct
  source 1..120: mol_type = other DNA
gatcaagtaagattttagtggttaattgattaatgattaattagccatagccaaagagccctgattacagctctggtcgtgatgcccacatcgataatcatgcctgtcttgtctctggag

SEQ ID NO: 83691 - DNA, 120 bp, synthetic construct
  source 1..120: mol_type = other DNA
cctggaaatatgttactttatatggcaaaagggactctgcatgcatgatcgcattaaggatcttgtaatggggagattatcctggattatctgtatgggcccaatgtgatcacaaaggtc

SEQ ID NO: 83692 - DNA, 120 bp, synthetic construct
  source 1..120: mol_type = other DNA
aatctgcagaatcaaactgtgggtctggttttttcatacatagtccctgtggctttgagagataagcatgtcttttagaatattcagagaaagctctgtgttcgctggcaatgccttgac

SEQ ID NO: 83693 - DNA, 120 bp, synthetic construct
  source 1..120: mol_type = other DNA
aaggagcggcagaaaacaaatatgggaacggggtaattggcttccagttccttcattcgcaggtcatgaaaaaaacctggggctagactccatgagagtttttttgttttctgttttgtt

SEQ ID NO: 83694 - DNA, 120 bp, synthetic construct
  source 1..120: mol_type = other DNA
cctcaagattctcattttctgcctttcccttctaaggcttaatcccatcgggactaagggaggagccttcccttccagcctcacacaggcagactatctcaaaagaaagagaaagcaatt

SEQ ID NO: 83695 - DNA, 120 bp, synthetic construct
  source 1..120: mol_type = other DNA
tagaaaataggcatgacagggaaagaagctcagtctcaccttaactctaactgatccaacaagaaagctgagccactttcctgaatcccagaagatcttatttcttcaagctgacatgac

SEQ ID NO: 83696 - DNA, 120 bp, synthetic construct
  source 1..120: mol_type = other DNA
gtgagcattcttaaatgacagccactattattatcactagtattactcatagtagcggtagtggtgaacaaaaccaaatttccagtggagccaaccagccaccctttcttaaccagctgt

SEQ ID NO: 83697 - DNA, 120 bp, synthetic construct
  source 1..120: mol_type = other DNA
cttttgttttctagagaaactctctgtgcctaagaaacctcttcaccaaagatcttcacatcccaaaccttggtccatgtcctcaaggatatcatggagtccaagatgggtcaagtgaga

SEQ ID NO: 83698 - DNA, 120 bp, synthetic construct
  source 1..120: mol_type = other DNA
tcgcacacgcaccccactgattcttcctccctgtgaatcactcgcctctgctttatcagtttcaccctctgctaagtctcttcagcttctgggattctcctgggtctttgggagagcctt

SEQ ID NO: 83699 - DNA, 120 bp, synthetic construct
  source 1..120: mol_type = other DNA
gtgatggtgccactgcactccaacccgggcaacagagtgagaccctgtctcaaaaaaacaaaacaaaacaagaaacctccactaactgaattcttaagatctgtgcatttcactttttgt

SEQ ID NO: 83700 - DNA, 120 bp, synthetic construct
  source 1..120: mol_type = other DNA
ttgtaatgcccctgcaaagaaagaagcaaatagacaaatctaagaccacaaaacatggaaatgggaaagaagaaaagaagtggaggctgggcacagtagctcatgcctgtaatcctaaca

SEQ ID NO: 83701 - DNA, 120 bp, synthetic construct
  source 1..120: mol_type = other DNA
caaaaagtgatttttagggtatggaaattcagcaaatcaaccaggatgtggagggaaagatggaaagcagactctgacaaatgactcatgtaagcacagtgaaacggatggagaagaagg

SEQ ID NO: 83702 - DNA, 120 bp, synthetic construct
  source 1..120: mol_type = other DNA
cagacaggtaattgcagaaataaatacagacctgtgtttatgcatgagttagtttacatacatacgtttcctagctctaacttccgtgggggcaagaagcagtgacacccactatgaatg

SEQ ID NO: 83703 - DNA, 120 bp, synthetic construct
  source 1..120: mol_type = other DNA
agtttgaggctgtatgatgatgccactgcaattcagcctaggaaacgcagtgaagtcttgtctcataaataaaacaaaacaaaaaaaggatggaggacattaaaacggcactggagccca

SEQ ID NO: 83704 - DNA, 120 bp, synthetic construct
  source 1..120: mol_type = other DNA
aaatacatacaaattcttttgagtgtgtttaaatactatgtttgaaaatgttgctgggtgatgtggctcacacctgtaatcccagcactttgggaggctgatgagggaggatctcttgag

SEQ ID NO: 83705 - DNA, 120 bp, synthetic construct
  source 1..120: mol_type = other DNA
ttttcttcccagtcttgggtatgtctttatcagcagcgtgaaaacagactaatacatgcagtaattgagaaagctcactggggtgagggcactcgagcagggggagcaaggagagagatc

SEQ ID NO: 83706 - DNA, 120 bp, synthetic construct
  source 1..120: mol_type = other DNA
atgtggattctcttgagatgagaagaaaatgccccgctacgtcccccttctgctgctcctgcttctcctgaggtgttcagaacggggtggaggagttaattttggtgagaaggatgcaaa

SEQ ID NO: 83707 - DNA, 120 bp, synthetic construct
  source 1..120: mol_type = other DNA
aggaaggaagacttgaaccctattagaaaaatgtggagcgtcagcagtagggagggatgactagatttgggcagagtaccaaaagttcaaaatttatgccatgtaagctacatgtattcc

SEQ ID NO: 83708 - DNA, 120 bp, synthetic construct
  source 1..120: mol_type = other DNA
tgagattactttttagtaggactaagccaaagcatttccactaagcacccagagaccagccctaaagactcaagaataagagaaaatgatgtaactgcagatggaaggaccactgaggac

SEQ ID NO: 83709 - DNA, 120 bp, synthetic construct
  source 1..120: mol_type = other DNA
gagagtgagaaacataagaacacaaacatggtaagacacagcgggagtcagggcaaagcatgaaccgttaggtacagatggatgtaaaagaggaaattttcctaagaagacaaggaactg

SEQ ID NO: 83710 - DNA, 120 bp, synthetic construct
  source 1..120: mol_type = other DNA
gatgccattgtgcactgacccctgctccaagatgcaaatccacagctttggatcagtttgtaagtgtgagtaaagccgaaagtaatgcatgatacagatgaggtgttcacatttaattct

SEQ ID NO: 83711 - DNA, 120 bp, synthetic construct
  source 1..120: mol_type = other DNA
gctgagatcgtgccattgcactccagcgtgggcaacagagcgagactccatctaaaaaaaaaaaaaaacaaaaggcttttttttccccctaaatgtcgtccacatttttggcaagtattg

SEQ ID NO: 83712 - DNA, 120 bp, synthetic construct
  source 1..120: mol_type = other DNA
ccttaacaaaatatttattcagtgcctagcatgagctcaacactctacgtctcccagtctgtctatctcagtctacctgtaagctgaaggatacaacttatctcttaagaggactatgcc

SEQ ID NO: 83713 - DNA, 120 bp, synthetic construct
  source 1..120: mol_type = other DNA
gcctcccaaagtgctgggattacagtgtgggccaccgtgcctggctggaaaagagattttttgagaactcgccatgttggcttaaacgtaaatatatatgaaacagaaaatgaagtataa

SEQ ID NO: 83714 - DNA, 120 bp, synthetic construct
  source 1..120: mol_type = other DNA
gagctcagtgaggtgagcttcttgtgattccagctaaatgggatcctaaatgatatgacacataaacatcatctagaacatgcagacttctgcgaatatctccatgacacatttgggaag

SEQ ID NO: 83715 - DNA, 120 bp, synthetic construct
  source 1..120: mol_type = other DNA
gacagagcaagatcctgtctcaaaaaaaaaagaaaaaaagaaagaaagaaagaaaaaggctgggcacagtggctcacgcttgtaatcccaacactttgggaggctgaggcaggaggattg

SEQ ID NO: 83716 - DNA, 120 bp, synthetic construct
  source 1..120: mol_type = other DNA
ctttggtaaatgcatacagttaatcatacagctaatcctccttttctctttatgaagtccagtgtttaaaggacctcttcaggtgtcatcaaggagtcataccaggtccagctgaaccca

SEQ ID NO: 83717 - DNA, 120 bp, synthetic construct
  source 1..120: mol_type = other DNA
cccagagctaggagttagagacctgcctgggcaacatcgcaagacactgcctaaaaaaaaaaaccaagaaacgtttaaaaatggaaaagtgtcttacacttgatagcacatcatgaacca

SEQ ID NO: 83718 - DNA, 120 bp, synthetic construct
  source 1..120: mol_type = other DNA
atttggactgaatctcaagtgatgaactgttctgcactgtctctacaaaaatcactcacaggtatgaacacttttatccttcagtcttctcttctttaggcttgcaatggcaggctctcg

SEQ ID NO: 83719 - DNA, 120 bp, synthetic construct
  source 1..120: mol_type = other DNA
gcacatgtttcagagagcacggggttgggggtaaggttatagattaacagcatcccaaggcagaagaatttttcttagtacagaacaaaatggagtctcccctgtctacttccctctaca

SEQ ID NO: 83720 - DNA, 120 bp, synthetic construct
  source 1..120: mol_type = other DNA
ggcatcagagggagaccgtggagagagagggagagggagagggagagggagacagtggggaaagggagagggagaccgtggggagagggagggggagagggagaccgcggggagagggag

SEQ ID NO: 83721 - DNA, 120 bp, synthetic construct
  source 1..120: mol_type = other DNA
tagtatatattcagcatgcaaaaacagataatcaggggaaatgcagtgacagtcaaagcaactatggaaacaatatccatggcaacaaatggcctggtcggaagagaggcccaaagactg

SEQ ID NO: 83722 - DNA, 120 bp, synthetic construct
  source 1..120: mol_type = other DNA
tgtgagtcagtgagtccgtgaccctaagtgagtttcagagtgaaaacagacaccagataagaagccagaaaacctgggttctagtctagttcttccccttaatagtttatttaatctgtc

SEQ ID NO: 83723 - DNA, 120 bp, synthetic construct
  source 1..120: mol_type = other DNA
cgagctaatcctgtctgatgtggccacctacaggcatcaacaggcctcagcagagagaagctgaagtgattactgcattcctatgagctgtgggaggaataaatcgtggaaagaaatcct

SEQ ID NO: 83724 - DNA, 120 bp, synthetic construct
  source 1..120: mol_type = other DNA
ataataacttattcttgagacacatgcgatgcaagacaagtatttattgctaggatctcctcaggtaagctgtgcagtaagtctgtgctgtcctacatggtagccattagccacatgtag

SEQ ID NO: 83725 - DNA, 120 bp, synthetic construct
  source 1..120: mol_type = other DNA
ccagcttgctgcgggtcgctgctgttctctttgtgtctcttagcctgtgacttcaatgcagtcatctcatttctgggaatctatccaattctcaattgtgtaaaaagctttataaacaaa

SEQ ID NO: 83726 - DNA, 120 bp, synthetic construct
  source 1..120: mol_type = other DNA
cctggaggcagaattccctcttccttgggggatgtcagacccactcacatacgggagggtaatttgctttattcaaagtccatccatttaaatgttgatttcatctacaaaataccttag

SEQ ID NO: 83727 - DNA, 120 bp, synthetic construct
  source 1..120: mol_type = other DNA
gaccgcccttctgaggggcacagacacgtgagtggagggagctcatgttccagtttctttgcaaaaatcaacttgataaagtttttcctgttttgttaaaattgcctaaaattttttagc

SEQ ID NO: 83728 - DNA, 120 bp, synthetic construct
  source 1..120: mol_type = other DNA
gaaccagcagttaactgagtcaccagccatatcataaagcatgactacaactacgcaggcctggtccctaaccccatgttgttacagcaaaatataacccattcttatttcagaaaaaga

SEQ ID NO: 83729 - DNA, 120 bp, synthetic construct
  source 1..120: mol_type = other DNA
ggtgtcccaaagtgctggtattacagatgtgagccaccatgtccagccttatttttaaaagaaggagaaaattattgagcaagagagtctctctgcagttcttaagattgctgtcagaac

SEQ ID NO: 83730 - DNA, 120 bp, synthetic construct
  source 1..120: mol_type = other DNA
aaatcccaccaaaatgtgataaaggggttttaaaaggcaaggactgacaagaacaaaaggcggggggagaggagagagagagagagagagagagaaactgactacacaatctaaataaat

SEQ ID NO: 83731 - DNA, 120 bp, synthetic construct
  source 1..120: mol_type = other DNA
gggttctgacggatattaagctactgtcacttgacttcaaaaccctcttccactctctccttcccagctggctccctcttaggtgtagagggaggtgtcagcactggaggaagaagggat

SEQ ID NO: 83732 - DNA, 120 bp, synthetic construct
  source 1..120: mol_type = other DNA
ccccatccccaacacacacacctggagtttccaaacagcttaagatctaactaagccaaggattactgtatcattcacaaagcccaagccccaatttgagcagagaaagtttattattag

SEQ ID NO: 83733 - DNA, 120 bp, synthetic construct
  source 1..120: mol_type = other DNA
gggaggtcgaggcttcattgagctgtgattaagccattgccctggaccacaacagagagaccctgtcaaaaaaaaaaaaaaaaaaaaaagaagaagaagaagaagaggaaatttagagaa

SEQ ID NO: 83734 - DNA, 120 bp, synthetic construct
  source 1..120: mol_type = other DNA
catgcccagctaatttttaaatttaattttattttttgtagagacgaaatcttactacgttgcccaggctggtcttgaactcctgggctcaagcaatcctcccactttggcttcccaaag

SEQ ID NO: 83735 - DNA, 120 bp, synthetic construct
  source 1..120: mol_type = other DNA
cttctgcctgggtgacagagtggatctcaaaaagaaaaaagaaaaaaaaaaaaggcttggggccaaaacctcagggattaagaaaattcctttacctggttacagaaagatattaccaag

SEQ ID NO: 83736 - DNA, 120 bp, synthetic construct
  source 1..120: mol_type = other DNA
tgcctgggtaacagagtgagactccgtctaaaaatgaaagtggcatctgatacagagaagattagcatggcccctgctcaaggatgacacacaaatttgtgaagggttccatttaaaaaa

SEQ ID NO: 83737 - DNA, 120 bp, synthetic construct
  source 1..120: mol_type = other DNA
attcccagtactctgtgcatatgccctcctcaattccatctcctagacttgccagatgtaggtcgagtcctcaaagatgagataaccaagatgcaaaatcctaaaatcctccattaagca

SEQ ID NO: 83738 - DNA, 120 bp, synthetic construct
  source 1..120: mol_type = other DNA
atgtcctgtgcactcttcacgcagcttccccagtggtaagctcttacatactacagtacattatcagaacaagcaattgatgcatattttctcaatgcattgcagtaggtggatttggta

SEQ ID NO: 83739 - DNA, 120 bp, synthetic construct
  source 1..120: mol_type = other DNA
tctaaattccagcctggctgtcctagcctggattccccagaaaacagattctcagatagatttatctgcagaagttttattggggaacaatcttgggacaaacacctttaaaagctgaga

SEQ ID NO: 83740 - DNA, 120 bp, synthetic construct
  source 1..120: mol_type = other DNA
gagacccacattcaggaagtaagatagatatcagcctggactgctgaatagatgccctgtgatttatcttcagacatgactcagtggaaatgcagttgactccattctaaaacctctctt

SEQ ID NO: 83741 - DNA, 120 bp, synthetic construct
  source 1..120: mol_type = other DNA
gggtgatagtagcaagcctcattgttagtcacctaagaagttaagacaataagaaatcattcaaaaaataaaatggtggcaggacgaggtggctcacgcctgtaatcccagcattttggg

SEQ ID NO: 83742 - DNA, 120 bp, synthetic construct
  source 1..120: mol_type = other DNA
gtcgattagaggttaccaggggctgggcggaaaggagaatggggagttattgcttaatgggtaatgagtttctgtttggagtaatgaaaaaaatttggaaacagatagtggttgacagct

SEQ ID NO: 83743 - DNA, 120 bp, synthetic construct
  source 1..120: mol_type = other DNA
gagccagcgaagtccaggctgcagtgagctgtgattgtgccactgcactccagcctgggtgatagagccagaccttgtctcataataataataataatgattaattaatttaattaatta

SEQ ID NO: 83744 - DNA, 120 bp, synthetic construct
  source 1..120: mol_type = other DNA
aaaaatacgaaggcaagtaaagagttagaaaaatcagataaaaccagtaagattagtataaacatcatgctgtgctgggggtgggggtcgcaggtttggaactgagctctctagaagcca

SEQ ID NO: 83745 - DNA, 120 bp, synthetic construct
  source 1..120: mol_type = other DNA
cctgcaatctcttagggaggctgaggtgggagaatcacttgagcccaggagatcagcctgggtaacataccagaccctgtctctattaaagaaaattaagaaaataaaattaaaataggt

SEQ ID NO: 83746 - DNA, 120 bp, synthetic construct
  source 1..120: mol_type = other DNA
atcgcaccactgcactctagactaggtgacagagcgagtctcaaaaaaaaaaaaaaaaaaaaaattagccgggggcgtattcccagctactcaggaggctaaggcaggagaatcctttga

SEQ ID NO: 83747 - DNA, 120 bp, synthetic construct
  source 1..120: mol_type = other DNA
tagctttagtctttcccctgaaccaaacacatttatttatttatttatttatttatttatttttggaattggagtctcactctgtcacccaggctggagtgcagtagtgcgatctcagct

SEQ ID NO: 83748 - DNA, 120 bp, synthetic construct
  source 1..120: mol_type = other DNA
gtgggtatgaggccagttaggagagtgctgtcaccacccaggcaggaggccatgaacatccccatatgagaaagaagggcataaacaggaaacaaatttaacaattaaataaaagcacct

SEQ ID NO: 83749 - DNA, 120 bp, synthetic construct
  source 1..120: mol_type = other DNA
aggatacaacaaacagcatgttaagttagcaaatttgacattaacgtctatcttaaaaagtggccaactatgggccaggcacagtggatcacacttgtaatcccagcattttgggaggct

SEQ ID NO: 83750 - DNA, 120 bp, synthetic construct
  source 1..120: mol_type = other DNA
aggaaggaaagtaagtcaaggacagtgcttaaaaagacaaaggagccaatttcaaagagctcccattgttcaagttgacagtcgggcatgaaagaaagaagatgggaggaggaatgataa

SEQ ID NO: 83751 - DNA, 120 bp, synthetic construct
  source 1..120: mol_type = other DNA
gtggcacacctgtaatcccagcactttgggaggccaaggtgggcagatcacctgagattaggagtttgagatcagcctggccaacatggtgaaaccccgtctctactaaaaatacaaaaa

SEQ ID NO: 83752 - DNA, 120 bp, synthetic construct
  source 1..120: mol_type = other DNA
aatttttgttttttcagtagagacagggttttgccatgttggccggactggtcttgaactcctgacctcaggtgatccattctcctcagcctaccaaagtgctgggattacaggtgtgag

SEQ ID NO: 83753 - DNA, 120 bp, synthetic construct
  source 1..120: mol_type = other DNA
tgggtttgggctttcttttggggttgatgaaaatgttctgaaattgattatggtgttggttttgtaactccatgagtatactaaaaactactccctggttttgtacatttatttattttt

SEQ ID NO: 83754 - DNA, 120 bp, synthetic construct
  source 1..120: mol_type = other DNA
attattgactgtagtcctcctgttgtgctatcaaataccaggtcttattcatgctttctaactattttttttgtcccattaaccatccccacgtgtcccccatagctctactcttcccag

SEQ ID NO: 83755 - DNA, 120 bp, synthetic construct
  source 1..120: mol_type = other DNA
ttctacaattcagagattctgtcttttctgaaagattaaaataaataaaattttaaaaaggctgggcacagtgggtcacacctgaaatccaagcactttgaaaggccaaggcaggcggat

SEQ ID NO: 83756 - DNA, 120 bp, synthetic construct
  source 1..120: mol_type = other DNA
tcagcctcccaaagtgctgggatttcaggcatgagccaccgtacccggcccttgaatttcttttagtttcctcaaaacatctattttgaatgatctatctgaaagatcatatatctcttt

SEQ ID NO: 83757 - DNA, 120 bp, synthetic construct
  source 1..120: mol_type = other DNA
gatggtacaactgcactccagtcagggtgacagcaagactccgtctcgaaaaaataaaaataaaaattaaagcccaagaactcttccatcagcttgtggtgaatgttgccaagcctggga

SEQ ID NO: 83758 - DNA, 120 bp, synthetic construct
  source 1..120: mol_type = other DNA
taggaattgcagtccttgggtcctagactgccttttcttttttttcttttgtggaaatatggcctccttatgttgcccaggctggtctcagactcctgggctcaagtgtccctcctgcct

SEQ ID NO: 83759 - DNA, 120 bp, synthetic construct
  source 1..120: mol_type = other DNA
cacttcagcctgggtgatagaggaagactctgtctccaaaaaataaaaataaaataataataataattgcattcgtaggccgggtgcagtggctcacacctgtaatctcagcagtttggg

SEQ ID NO: 83760 - DNA, 120 bp, synthetic construct
  source 1..120: mol_type = other DNA
ctgggaggcagaggttgcagtgagccgacatcacgccactgcactccagcctgggtgacagagaagactccgtctcaaaaaaataaataaataaataaataaataaataaataaataaat

SEQ ID NO: 83761 - DNA, 120 bp, synthetic construct
  source 1..120: mol_type = other DNA
agtcacaactgccatcctgaggccaagaagaactaaatggtctcaaaattatttcacaacttgttgctaccacctttccacagtggggcttgtctagccagagaatcaaacattaattca

SEQ ID NO: 83762 - DNA, 120 bp, synthetic construct
  source 1..120: mol_type = other DNA
gcgccctcctaggataggagaaatgaatgactcttgctactccagccaccacttccactaattaaccactaataaaaatgtaaaaatcagtatgccagcagtagtccctgttgcaaacat

SEQ ID NO: 83763 - DNA, 120 bp, synthetic construct
  source 1..120: mol_type = other DNA
ttgggattacaggtgtgagccaccatgcccggcctactcttaattttttttttaagtgctcaagctaattttttaattactatttgtagagatgaggtctccctatgttgcccaggctgg

SEQ ID NO: 83764 - DNA, 120 bp, synthetic construct
  source 1..120: mol_type = other DNA
gccaccgtgcctggccgcaaaaatcttataatgccttcctcacagagaataatgaaggttaaatgatgaaacgcacagagcattttaatgctgagaagggcttcatgaggttgttgaaaa

SEQ ID NO: 83765 - DNA, 120 bp, synthetic construct
  source 1..120: mol_type = other DNA
ctgccgtcactccaactcctgtgtgaggatgttgagctcctgggaaaaccgaagggagggcaggagagacaatactgtgaccaaaggctgagactgtgtcatcacttgggaatgaaagca

SEQ ID NO: 83766 - DNA, 120 bp, synthetic construct
  source 1..120: mol_type = other DNA
cagactcacttcagcttatgcccagaaacaaagaaaccaaggagaagcaaattccataagtgcttttattttattggagatgagcaggggaggcactgaaaagtggggatagtgctggaa

SEQ ID NO: 83767 - DNA, 120 bp, synthetic construct
  source 1..120: mol_type = other DNA
ccaagtcattagacctagggtccagagcgggctgcggatgttcagagttagaggggccagtggaggaaggttgtccgagctgaggcaagttggtccccaagttttgggaaactttctcct

SEQ ID NO: 83768 - DNA, 120 bp, synthetic construct
  source 1..120: mol_type = other DNA
ggatctagctagggaaatggacctggatgccatccttatgagatactgactaattcctgctgctgcagtgacaaattaccatgaaccgaatggcttacaacaacatggatttattacttt

SEQ ID NO: 83769 - DNA, 120 bp, synthetic construct
  source 1..120: mol_type = other DNA
ttttggatgacatgcatgagttttacacaagcttttaatttggagcacagcaggagactcgaggaaacaccacatcagagagccttctctccctgcaattcccattcatgaagcatctga

SEQ ID NO: 83770 - DNA, 120 bp, synthetic construct
  source 1..120: mol_type = other DNA
aatgaggaatgggaagagaatggatttcctggagcaatgagagaggagggaaatggcggaaggatctgggaggccaggcaatctctgctttcagttcaacaaatatttattgtcttcctc

SEQ ID NO: 83771 - DNA, 120 bp, synthetic construct
  source 1..120: mol_type = other DNA
acttctcccatatgggatatagtgtatgtgcttgtttgtgcccaaggcatgcacacacacaacagttgacttcttatggactgttgagtaactctccttggggtaggaaaacttcagggt

SEQ ID NO: 83772 - DNA, 120 bp, synthetic construct
  source 1..120: mol_type = other DNA
ataccccaaaggtctgggaagaggaagagctttgtccaggctgggaagggtttagtattccgcggtaagagttgtcattggttggcagagcagagccattccctacttggaagctgctgc

SEQ ID NO: 83773 - DNA, 120 bp, synthetic construct
  source 1..120: mol_type = other DNA
gtaaattcttaggggaaaaatcctgggccagacagtgggaccaaagggaagaagacaaaaggcaaaacaatggagggctgagaagtggagacacatatagaaggagacactggaaaaaga

SEQ ID NO: 83774 - DNA, 120 bp, synthetic construct
  source 1..120: mol_type = other DNA
aacctcaggcgattcacctgccttggcctcctgaaatgttgggattacaggcacaagctatcatgtgcggccagatgttttagaaagtgtaaagcattatatattatgaattattactgc

SEQ ID NO: 83775 - DNA, 120 bp, synthetic construct
  source 1..120: mol_type = other DNA
caaagtacatatcacatacattatttaatttgagacacacagactagagttaggtgtcattaaccccacttcagagtttcagaaactggggctcaggaagtttaagaaacttacctgagg

SEQ ID NO: 83776 - DNA, 120 bp, synthetic construct
  source 1..120: mol_type = other DNA
actccccaagtaccaggccagccacatacctattacgtgttccatcacctggggaactttctccttctcagaaatggggcaccacattcccaaaaccaactccctgacctgtcgcttctg

SEQ ID NO: 83777 - DNA, 120 bp, synthetic construct
  source 1..120: mol_type = other DNA
agaatgaagatgacgtgggttcaagtcccagctaacctcttggctttgggcggctcttcaaacctttctgaacttccatctcctcatctgtgaaatgggggtattttaaataacacttat

SEQ ID NO: 83778 - DNA, 120 bp, synthetic construct
  source 1..120: mol_type = other DNA
gcggaacagtggaatctgtggcttcttcttttccaacacaaacttcccctgaccagccagaggtagcaaagtttgtcttgttttctttgtcacattcctcctggctgccgtcagaacttg

SEQ ID NO: 83779 - DNA, 120 bp, synthetic construct
  source 1..120: mol_type = other DNA
ggctgcttggatcaggattgtagatgacctacaacaccaggttaaaagaatttggattctataggaattgcagtaaatgtgagagggtgcagggaaccaaacggctttgaatgatcacaa

SEQ ID NO: 83780 - DNA, 120 bp, synthetic construct
  source 1..120: mol_type = other DNA
cagaagttctagcacaagtgtttcacataggggtccttggtagaccagggcttaggcttggaagaaggaaaatggagtgagcacgaggaagagaaaaagcctggaaaagcagcttatttt

SEQ ID NO: 83781 - DNA, 120 bp, synthetic construct
  source 1..120: mol_type = other DNA
cattcctcacgggtgactgtctcccctgagccactcttctctctattggattagctccttttatttccccctagggatgcaacacatttttatgaacaaacagcagtgttcacatggctg

SEQ ID NO: 83782 - DNA, 120 bp, synthetic construct
  source 1..120: mol_type = other DNA
gtgagagtcctcacaggagggagcttctcctactgcccagtgtctccctggcacctgaggcatcacccagcacacagaggtgaccaggaaacacagactcctgttagagaggcatctcgt

SEQ ID NO: 83783 - DNA, 120 bp, synthetic construct
  source 1..120: mol_type = other DNA
ggagtttagaggttattaaagaaatccccctaaagtcccatcccaaggtcacatagagaacgaatggctaagtagcgacaagaacccaagtcacagtctgttgatctcactaccatgcta

SEQ ID NO: 83784 - DNA, 120 bp, synthetic construct
  source 1..120: mol_type = other DNA
taactatctgtcatgtccaaggttctgggctattgttctgtaaatctgtgatcctattctgttatttaattccgtgactctgtgttgacatagacgtgacggtgtccctggggcatttac

SEQ ID NO: 83785 - DNA, 120 bp, synthetic construct
  source 1..120: mol_type = other DNA
cctccttcttcctttctatccttagcttcctgccacagtatacccagagatgtatgtgtttctccccaccctaggcacaattttttttttttttctgagacagctctgtcatccaagctg

SEQ ID NO: 83786 - DNA, 120 bp, synthetic construct
  source 1..120: mol_type = other DNA
tgttaattgggcccttcattaaataatttagcctttcacaaaacacacattaagtgtgcatgacggcccaggcactgtattctctgtcagggttacacagatgaataaagagctgggatg

SEQ ID NO: 83787 - DNA, 120 bp, synthetic construct
  source 1..120: mol_type = other DNA
ggtttcttgagctcaggagtttgagaccaggttgggcaatatagtaagacccaatctctacaaaaaaaattagccagacgtggtggcatgcgcctgtgatccagctacttgggaggctta

SEQ ID NO: 83788 - DNA, 120 bp, synthetic construct
  source 1..120: mol_type = other DNA
aaaaaaaaaaagtaatgagggtggggaggagtggaaagggagtgggaaagtgggacccaagcacatgagtggaaccaagctaagtctcatggagggctggggtactgacaccttcatatt

SEQ ID NO: 83789 - DNA, 120 bp, synthetic construct
  source 1..120: mol_type = other DNA
acccggcattcgtggacacattgaggaagtaagataatgaatgaatgaatgggtgaatccagtccagcttggggcctatttaattctactaggctcaacctacaattcttatgtgttctc

SEQ ID NO: 83790 - DNA, 120 bp, synthetic construct
  source 1..120: mol_type = other DNA
ttgacagtagaccattgggatctctgagctcctgtccttctaacctgattgcctctttaaaggattttgaaaaactatgtcccttgcacatttgtattgttttgagacacggtctcactc

SEQ ID NO: 83791 - DNA, 120 bp, synthetic construct
  source 1..120: mol_type = other DNA
cacggtaaaaccccatctctaaaaacaaaacaaaactaaactaaacaaatacaaaaaattagtcaggggtggtgcacctgtagtctcagctacgccagaggctgagataggaggattgct

SEQ ID NO: 83792 - DNA, 120 bp, synthetic construct
  source 1..120: mol_type = other DNA
taagccccagagccttacatgctggacatgggcaagataggaactcaagttacttccaggtctccgtaagtttaggactgtgaagagggcatcctaatagtcaaaaacataagtgttggc

SEQ ID NO: 83793 - DNA, 120 bp, synthetic construct
  source 1..120: mol_type = other DNA
aagtatggatctcaggaggggacaggaaatattgagaacaccaccttacgggttcagaataaaaccgagggaatgaggaagaggtttaaggagacaggctaaattgggaagaattcacgg

SEQ ID NO: 83794 - DNA, 120 bp, synthetic construct
  source 1..120: mol_type = other DNA
cgttaatcctgaccgactttgccacatggagccagcaaaccatttctggtgagagccaaatgcaccttctgcaccatgtcccccacccaatgtgtccagaaagccatttctggtgagcca

SEQ ID NO: 83795 - DNA, 120 bp, synthetic construct
  source 1..120: mol_type = other DNA
aactctattgtactcgtctcctccctcccattctccttttggtctcagctccttgatctaagcctcccagagagacccctagaacgtttccctcaaggacctttctgcctggaagtctgt

SEQ ID NO: 83796 - DNA, 120 bp, synthetic construct
  source 1..120: mol_type = other DNA
aactgctcaattatgccctcctggggaagtgacctggttagacccacccatctgctgcgctgggtgccgggagcaatcgctgaccacagtgcgtggatatgtgtacctcactctggaagg

SEQ ID NO: 83797 - DNA, 120 bp, synthetic construct
  source 1..120: mol_type = other DNA
gtcagtttctatcatatcatcgtactgtactttctcttcaagcacttatttgaaacgatctcgttcatctgtttaggtcccatctgctcgctcgctctcccactaggatgtaggctctca

SEQ ID NO: 83798 - DNA, 120 bp, synthetic construct
  source 1..120: mol_type = other DNA
ctaaaagaggctaagggcctcgaaggaccgcagagaacaacactcatcatgcgagagtctgaagaggagattcctgaagtgcgcgcatttgtcccttgtccctttgtgcttggcccaaga

SEQ ID NO: 83799 - DNA, 120 bp, synthetic construct
  source 1..120: mol_type = other DNA
gaggtcacagtgagccaagatcatgccactgcactccagctggtgacagaggaagactctgtctcaaacaacaacaacaacaaaacattaaatgattacaacttaaagtgattcaaaaga

SEQ ID NO: 83800 - DNA, 120 bp, synthetic construct
  source 1..120: mol_type = other DNA
agctgctgccgctctgcctcccctaaaaggagggggtgctgggtcaggcctctcccagcaccctagacaccgggtttttcctcatcctctccaccccctggcaaccaggtgtaccttgct

SEQ ID NO: 83801 - DNA, 120 bp, synthetic construct
  source 1..120: mol_type = other DNA
tttttaagcaacctgttaagcttatttctcacaactgtgttttgctcactatcgtgtatcaaagagtaaagttatcctctctgatcaggggcagtggctcctgcctgtaatcccagcact

SEQ ID NO: 83802 - DNA, 120 bp, synthetic construct
  source 1..120: mol_type = other DNA
cacagtgcatctttctgttctcctggaggtagggggcacccgcgatggattgaacctgggtggtaggtcattataactagtttaattccgtgcaagtttgaaatttttcataatttttaa

SEQ ID NO: 83803 - DNA, 120 bp, synthetic construct
  source 1..120: mol_type = other DNA
gagccaagattgcgccattgcactccagcctgggtgacagagcgagactttgtctcaaaataaataaataaatagactaaatttttctccagtgaaacggattgcccgtaaaattttaga

SEQ ID NO: 83804 - DNA, 120 bp, synthetic construct
  source 1..120: mol_type = other DNA
aggccacctgggggaggagagagagctaggcagggccctctagagctaaaagatgaggggggcactggaagcaaagtggcaggtgcagagatctctgtaagaatgccatgcaggggctgg

SEQ ID NO: 83805 - DNA, 120 bp, synthetic construct
  source 1..120: mol_type = other DNA
catcactttgggaggctgaggcaggtgaatcacctgaggtcaggagttcaagaccaaagtgatcgcattataggtgtgagccactgcacctggcttcaatctttctatcgcacatataat

SEQ ID NO: 83806 - DNA, 120 bp, synthetic construct
  source 1..120: mol_type = other DNA
gcagaggaaagcagcccctctgtagggcctccatgccgccttaggtaccaccttctctcccggaggctgtgctctacacgctcctccaagggccacgcttgcctcccaacctgatcccta

SEQ ID NO: 83807 - DNA, 120 bp, synthetic construct
  source 1..120: mol_type = other DNA
gagcacttagcactgaccatatcttgcttatgtgtatgtgttactatctgtcggaccacactggaaggaaagctccaggaaaggaggaattttgtgtcttttgctcatggcacctcaaag

SEQ ID NO: 83808 - DNA, 120 bp, synthetic construct
  source 1..120: mol_type = other DNA
atttcttccataaaatagagatgggggtctcgctttgttgcccaggctggtctcaaactcctgggctcaaatgatccttccaccttggcctcccaaagtgctaggattacaggtatgagc

SEQ ID NO: 83809 - DNA, 120 bp, synthetic construct
  source 1..120: mol_type = other DNA
cctcccaaaatgctgggattacaggcgtgagccactgcgcccagggctatggtttctttccttgacatgtcaactggttacagtggccttccctgaaccccagactaagttagtgctttc

SEQ ID NO: 83810 - DNA, 120 bp, synthetic construct
  source 1..120: mol_type = other DNA
tcaaagacaggttagtgcaggtgagacttgtctccagtgctggaaggatagttgagggcataaacatagccaggagaaggaaaagaggacccctctgcttccgtgtggggaggtgaaggg

SEQ ID NO: 83811 - DNA, 120 bp, synthetic construct
  source 1..120: mol_type = other DNA
tatactttatgaggagtctgagagaacagtacataaataacacagtgccagcctttagagaaatcgtctaccaatgtcacgtgaagtttaatccagcttggaacatggctcctgaggcag

SEQ ID NO: 83812 - DNA, 120 bp, synthetic construct
  source 1..120: mol_type = other DNA
atgcactgtaggaactaattgcttacataaaaatgagtacgttctggaaactagggccgaaatagggtaaggagtttattccagtgaggaagggtcactagcaagcaagcctgagaaaac

SEQ ID NO: 83813 - DNA, 120 bp, synthetic construct
  source 1..120: mol_type = other DNA
attcaaatctttcctgcggctgttctctcagcttctctctactatccccttagcttccatgcctgctgcccgcctcctctttctcgagtcctaacacatagtgggcactttaagatcttc

SEQ ID NO: 83814 - DNA, 120 bp, synthetic construct
  source 1..120: mol_type = other DNA
ccttcctgtttttatcccacctagagaagccgggaagtaggggtttaggtccaatttgttggagtacttaaggactcgtttgcactttcttttgggggatgacagtggattcattgccct

SEQ ID NO: 83815 - DNA, 120 bp, synthetic construct
  source 1..120: mol_type = other DNA
gtccagaccttcatcttcccaccagaagtgtgcacagtcagaagctctctgccagactgaccctttttggtcccgtttagctcatacaggacctgggatatcatcagaaagatatcacag

SEQ ID NO: 83816 - DNA, 120 bp, synthetic construct
  source 1..120: mol_type = other DNA
ccatctcaaacaaacaaacaaacaaaaagcttgcccagggtcacataactggtaagtggtagagctaggatctgaacgagctggagctgggggagagtgagcatgtttgaaaactggacc

SEQ ID NO: 83817 - DNA, 120 bp, synthetic construct
  source 1..120: mol_type = other DNA
gcccctcaccttctcccctagttggggtggaccaaagagcctgcctgttcccgccccacctggggaaatggggaccacgccttctgctccaccacaacgcaatcggaggaaatctgttca

SEQ ID NO: 83818 - DNA, 120 bp, synthetic construct
  source 1..120: mol_type = other DNA
acacacctgcccatgagtagacacagcagcgagcaaataggtctgataaataccccccttcccttccctccccaggagggaatgactacagggaagaaggatggattgatgtggactcat

SEQ ID NO: 83819 - DNA, 120 bp, synthetic construct
  source 1..120: mol_type = other DNA
cccctaatgaactagtggcagagccaggaataaaacttgagtaactaatgagtcacttatgggcagagtatgcaaaaaccttaagtggaaaccaaatagaccctggtatcaagaaagcac

SEQ ID NO: 83820 - DNA, 120 bp, synthetic construct
  source 1..120: mol_type = other DNA
accacactcggaccacctgcaagtgaatgacagaaaggagaatgacattagacaatgagctgagacgggcctgactctgcttggacattctatccaaagccaacagccctagagcagtta

SEQ ID NO: 83821 - DNA, 120 bp, synthetic construct
  source 1..120: mol_type = other DNA
tggcaaattgctcgagttctttctgcagagctttgatgtcctgggactggattttaaaaggcagaagacttgtaagaacataaacacaccagttatcaatctcccctttccattcgggat

SEQ ID NO: 83822 - DNA, 120 bp, synthetic construct
  source 1..120: mol_type = other DNA
atttttaaattcaagagatttatcgagcaccttctataagccagcggctatacaaagtggacaaagagccctgacatccagcatgacagaagtgctatttggcacttgttcttcaagttg

SEQ ID NO: 83823 - DNA, 120 bp, synthetic construct
  source 1..120: mol_type = other DNA
agcccaaagctggtctggtggctaggtagatcctgttgcagacatagtgactttgttttagtccaagcgaaatgatctctcaccctttttctccccaccaagacggaatctcgttctatc

SEQ ID NO: 83824 - DNA, 120 bp, synthetic construct
  source 1..120: mol_type = other DNA
tgccggcagacagaggtgcacagctagtgagaaaaaaacaaggcctttttgtagttctgaagcctcaaggaagtgtttcaatggtgcttgatcatatcaatttcaaataggctgttttca

SEQ ID NO: 83825 - DNA, 120 bp, synthetic construct
  source 1..120: mol_type = other DNA
actgtttttaccctcaggctatgcttaaccctaaggccaaaatcttgggtctgataagggtcaaattttcaagcaggactaagggtgggaaaaggggctcaaaccaaccccaagctgggt

SEQ ID NO: 83826 - DNA, 120 bp, synthetic construct
  source 1..120: mol_type = other DNA
gatgggtggaggagagggaggtggggggagaaactgaggcgaaggatgtttgcctaatggtggtggcaatggtgtctgtggaaggggaaaaccgggagacacaactggcgcccctccagg

SEQ ID NO: 83827 - DNA, 120 bp, synthetic construct
  source 1..120: mol_type = other DNA
agtttcccaacctttgctgaaacagagtgataagacacccgctttgggccccctccactatggaacctgcacatcaggttccttgctcccctctcaaccaaaactcagacatctaatacc

SEQ ID NO: 83828 - DNA, 120 bp, synthetic construct
  source 1..120: mol_type = other DNA
ttggtggcatccgtgagtcttttgagacttttcccccactcttatgttgcctctgttcgtgtgcccatctcctgtctgtgtagactttttgagcctaattgtatgcgtgcatttcaatac

SEQ ID NO: 83829 - DNA, 120 bp, synthetic construct
  source 1..120: mol_type = other DNA
gagactggaagccaggctgagtcatcagaactggtcccatgattccctgggttttagaaagtcaccataaaaagatacttcacacacacctttattattacagtgcaatgtcaagaccct

SEQ ID NO: 83830 - DNA, 120 bp, synthetic construct
  source 1..120: mol_type = other DNA
ttacttgacatgggaatgtagacttctctgcacacctgtgaagagaaatgggggtaggaaagctgggagtggtgttcaatgagaagttggcataggcctccctgtaccctgccacctacc

SEQ ID NO: 83831 - DNA, 120 bp, synthetic construct
  source 1..120: mol_type = other DNA
gaacttgaacaccaagtgggaaaagggctgaccaagcacgggagagggaaggaaagcagagtggctaggacggtcagcaacagagctgtgttcatttaggacatgggtattgaaatggag

SEQ ID NO: 83832 - DNA, 120 bp, synthetic construct
  source 1..120: mol_type = other DNA
ggtcaccaggtttcttattaactactggtggtggcgagagaggtgaatgtcagaaaaaggccagtttttcccatttcctggatttgagaaagttggataaatttttttcacctggccggg

SEQ ID NO: 83833 - DNA, 120 bp, synthetic construct
  source 1..120: mol_type = other DNA
acttctgtcctactcttgctaatacctaagacccagtccttttggcaccactgggtacataaaacaaggtttgagtcagggatgaactcccccaggcaggaggagatagcatcaggatct

SEQ ID NO: 83834 - DNA, 120 bp, synthetic construct
  source 1..120: mol_type = other DNA
aacaaaaaggctcacagaccaaatgtaaatgctcaaataacatcgtttattaaataaatgtaaaacacattctgagaagcaggaggcaggtgctggggtgggtcaacacacgggagaggg

SEQ ID NO: 83835 - DNA, 120 bp, synthetic construct
  source 1..120: mol_type = other DNA
catccctcttggggccatctcttgtggacaagaatatgagccacattcttcatatatgagaaaattacaccaatctcagaggattagaggtcatgccaaaaaacacacctggtagttatg

SEQ ID NO: 83836 - DNA, 120 bp, synthetic construct
  source 1..120: mol_type = other DNA
aaaagcactcccaagaggcctcataaaggccacagtttggggaaggttatggctcaggggaaggggagaggtgctaaataattaagcccccctactactcagcacccgcgtgaggcatcg

SEQ ID NO: 83837 - DNA, 120 bp, synthetic construct
  source 1..120: mol_type = other DNA
gggagactgaggaaggagaatcgcttgaatccgggaggcggaggttgcagtgagccgatatagctagcgccactgcactccagcctgggcgacagagtgagactccgtctcaaaaaaaga

SEQ ID NO: 83838 - DNA, 120 bp, synthetic construct
  source 1..120: mol_type = other DNA
attggaactccaccatgtaactttttgtggtaccattatacagtttttgcccaagacaactaagccgccaaacaggatcttttttatcttctttttaagtagcccaaatgacacaagacc

SEQ ID NO: 83839 - DNA, 120 bp, synthetic construct
  source 1..120: mol_type = other DNA
gagactttctgtttaggttttgcctaagagttagctcatctgcttcttgtgctaacagggcagttgctgccagggcccttggacatgggggccagcctttggaaaccccgtctagttgtt

SEQ ID NO: 83840 - DNA, 120 bp, synthetic construct
  source 1..120: mol_type = other DNA
taacaattgattttgtttaacgtgcagatggaatatttaatccattccaaccaggcatttgcatcttggtatgctgtcttaactgccaaagtttgttttaagtctttaacttctatgatc

SEQ ID NO: 83841 - DNA, 120 bp, synthetic construct
  source 1..120: mol_type = other DNA
gaatttaccatataacactctttttacataaattctgcctcccccgctttttttttttaaagtgaactttttttttgtctttggactagactgtctaaggccacaagattagaagttacc

SEQ ID NO: 83842 - DNA, 120 bp, synthetic construct
  source 1..120: mol_type = other DNA
ggatgctccacagggcaggcctaagccacccaaggggctgccttggccgtccgtcagttacctcgcttcctgttcagggaaccaagaaatgtagcaggacgagccccagacaaaaccttt

SEQ ID NO: 83843 - DNA, 120 bp, synthetic construct
  source 1..120: mol_type = other DNA
ggtagatgagagtagacaattctgattatttgaggagggtttgtggtttaggaagtgagcttctcaccgattttatttatttattttgagacggagtctcactctgtcacccaggctgga

SEQ ID NO: 83844 - DNA, 120 bp, synthetic construct
  source 1..120: mol_type = other DNA
taattttttgtattttttttttttgagatagagtctcgctctgtcgcccaggctggagtgcaatggtgtgatctggctcactgcaatctccacctctcgggttcaagtgattctcctgcc

SEQ ID NO: 83845 - DNA, 120 bp, synthetic construct
  source 1..120: mol_type = other DNA
atacatgtgccatggtgatttctgcacctatcaacctgtcatccaggttttaagccccgcctgcattgggtatttgtcctaatgctctccctccctttgtccccaaccctattttatttt

SEQ ID NO: 83846 - DNA, 120 bp, synthetic construct
  source 1..120: mol_type = other DNA
gtgctgggattacaggtgtgagccactgtgctgggctgcctgttttaaaacttcctataaatgcatgcataggtatggcctcttttgtgtctggctttttgtatttggcataatatctat

SEQ ID NO: 83847 - DNA, 120 bp, synthetic construct
  source 1..120: mol_type = other DNA
caggtgatccgcccgcctcggcctcccaaagtgctggaattacaggcgtgggccaccaagcccgaacaaatgtcttaagtttgttttctttctttctttaattaattaatttatttattt

SEQ ID NO: 83848 - DNA, 120 bp, synthetic construct
  source 1..120: mol_type = other DNA
ttatatcactcctttttttttttttttttttgagatggagtcttgctgtgttggccaggctggagtgcagtgatgcaatcttggctcactgcaacctctgccttaagagctcaagcaatt

SEQ ID NO: 83849 - DNA, 120 bp, synthetic construct
  source 1..120: mol_type = other DNA
catgttggccaaggtggtctggaactcctggcctcaagtgatccattggccttggtctcccaaagtgctgggattacaggtgtgagccaccatgcccggcctttttattttattttattt

SEQ ID NO: 83850 - DNA, 120 bp, synthetic construct
  source 1..120: mol_type = other DNA
taaataaaaaaggaaatgcaattctctggcctggcccacacatattatatcagaaactgcagtttaacctccccccacccctggagaattctgcttttcgaatcaggcctttctcttttt

SEQ ID NO: 83851 - DNA, 120 bp, synthetic construct
  source 1..120: mol_type = other DNA
aaagagaagactgctccacaaggaatgtacagttttgatatgtgcagggctcaggtcttcaggggataaataagttcctaaatgcgccatcaacaggaatttccttcaggataaatagga

SEQ ID NO: 83852 - DNA, 120 bp, synthetic construct
  source 1..120: mol_type = other DNA
taaacacaccaatcagcaccctgtgtttagctcaaggtttgtgaatgcaccaatctacactctgtatctagctgctctggtggggccttggagaacctttgtgtccatactgtgtatcta

SEQ ID NO: 83853 - DNA, 120 bp, synthetic construct
  source 1..120: mol_type = other DNA
cctccgaaaactctagttttacagatatgaaccatagcgctagctcttactgtctttcttcaacacgtcctcccatccttccctcctttctccactctgcatttgaccccggtgtattcc

SEQ ID NO: 83854 - DNA, 120 bp, synthetic construct
  source 1..120: mol_type = other DNA
ccgtttctcttttttttccggaccccgcagtggcgcctaaagtctgcaaggaggaggtcgcctctgtgctgtgggtccaggaatctaaggcgagtgctgagggagaaaatgtagttgatg

SEQ ID NO: 83855 - DNA, 120 bp, synthetic construct
  source 1..120: mol_type = other DNA
gagagagagagaggaagggagggagggagggagttgaggttcagaatatgtaacagtgtttattgctatactccattcaatggactatggactattatgcagtgatttaaaagtaggagt

SEQ ID NO: 83856 - DNA, 120 bp, synthetic construct
  source 1..120: mol_type = other DNA
gagactagtcttctttaccccaggcatcttctttattctggaatgagcctgcccatccctcaggaagactgaaaggaattcggtcagaagaatattattgacttttatccagacttgatt

SEQ ID NO: 83857 - DNA, 120 bp, synthetic construct
  source 1..120: mol_type = other DNA
ccagcatgatgaaaccctgtttctactaaaaatacaaaaattagctgggcgtggtggtaggtgcctgtaatcccagctgcttgggaggctgaggcaggagaatcgcttgaaaccagaacg

SEQ ID NO: 83858 - DNA, 120 bp, synthetic construct
  source 1..120: mol_type = other DNA
aaaaaaaaaaaatgcaaagttgacaatcaatgcaaagtaatagaggtggcattttaagtagggtggtcagggtgggcctcatgaaggtgccatttgagcagacttgaagaggagagaaac

SEQ ID NO: 83859 - DNA, 120 bp, synthetic construct
  source 1..120: mol_type = other DNA
ttatttggaaatttttctcactctaaccttccttcctgccgcaccttctgccccatccccaggctctggcctctctctctcctcttctaccctttagcaggtaatgactcagttcccact

SEQ ID NO: 83860 - DNA, 120 bp, synthetic construct
  source 1..120: mol_type = other DNA
cccataaagggagtttctccagcagtgatcaatgctgtctcatccttaggagcagcccaccctgaatcctctcagggtgtacagtttattttgcacttaactttcaaaataatatttttc

SEQ ID NO: 83861 - DNA, 120 bp, synthetic construct
  source 1..120: mol_type = other DNA
acttgtttgttaatcaagtaatctcttcaaagatttttgttcaccttgagggacacattagatctacttttgccaacagtccccattcctccaggctctgtgtgttctgagactcctctg

SEQ ID NO: 83862 - DNA, 120 bp, synthetic construct
  source 1..120: mol_type = other DNA
cacttacaaatctccaaaacaattctcacgcactgtgactttgctcccttcagctgatttatcagttcatcctgatagcctgataggtgacaagcagaggtgaggacttcaaagttcaca

SEQ ID NO: 83863 - DNA, 120 bp, synthetic construct
  source 1..120: mol_type = other DNA
gccacagtgcccagccctggaagaaaactaattgctgggtgaaatatattttctaccaaattccccttacgagacctagaaagcctaatgaacatagctacttacatgtcctaagctgtt

SEQ ID NO: 83864 - DNA, 120 bp, synthetic construct
  source 1..120: mol_type = other DNA
actgcactccatcctgggtgacagagcgagactctgtctcaaaaaagaatttggggaaatctaacataattaatgactctataataagaaatataccagctgggtgcaacagtggccctt

SEQ ID NO: 83865 - DNA, 120 bp, synthetic construct
  source 1..120: mol_type = other DNA
aaagactaaagagaccaaaggcaaaaaacagctcctatgtggcaatcagccccagtcacagcaatggagcctcggatgaccctggacatgacaggcaaaaatatcaatatccttttaaag

SEQ ID NO: 83866 - DNA, 120 bp, synthetic construct
  source 1..120: mol_type = other DNA
tccatttttatctatgaataatagcttcactctgccaaggggaaaattgctttcttaccttgctttttacccagagcaattccccttctgcctttacagcaaccatgccagtttcactcc

SEQ ID NO: 83867 - DNA, 120 bp, synthetic construct
  source 1..120: mol_type = other DNA
attacccaggcagacaaaattgaatatttaggagcttccgtgggaacttggaagcaatggctgttttctgccttgctccctttaacaatgccagtcattaccatatgtttagctctaact

SEQ ID NO: 83868 - DNA, 120 bp, synthetic construct
  source 1..120: mol_type = other DNA
ctatctccagtagggaatttaccctgtagagagcatgcgcattttgattttacctaccgtcaaactgacccttagctcattacaatagtaagaaacacacacctgggtggagatttaaga

SEQ ID NO: 83869 - DNA, 120 bp, synthetic construct
  source 1..120: mol_type = other DNA
ttcccaacctgatctatagaatcaatgcaatcccagtcaaaaccccaggacgttattttgtgtatactcacaagctgatttaaaaatttatatggagaggccgggcacagtggctcatgc

SEQ ID NO: 83870 - DNA, 120 bp, synthetic construct
  source 1..120: mol_type = other DNA
aataagccaggcgcaaaaagacaaacatgatctcacatatatgtggaatgtaaaaaaagccaaactcatatacatggtgagtaaaccggtagttgtcagaggctgggaggtgggaggatt

SEQ ID NO: 83871 - DNA, 120 bp, synthetic construct
  source 1..120: mol_type = other DNA
ttatttgaagcattattaccacaaaaagtatgtgaggtaatgtatatgttaatggcttgctttagccattttacaatgtatacgtatatgaaaacatgatgctatacacccaaatataac

SEQ ID NO: 83872 - DNA, 120 bp, synthetic construct
  source 1..120: mol_type = other DNA
cctgtagtgtcatcccatggtgaaagaggtagggcaaaggggccaaacatactttttatcaggagcccactcccacaataatgacattaatctattcaacctaatcaactcttaaaggtc

SEQ ID NO: 83873 - DNA, 120 bp, synthetic construct
  source 1..120: mol_type = other DNA
gctgggattacaggagtcagccaccgagcctggcctggtttatgtatatttatctttattcctacatttccatgattatgagattcacagttcatccaatagacttgaactgacccaatg

SEQ ID NO: 83874 - DNA, 120 bp, synthetic construct
  source 1..120: mol_type = other DNA
tgaactcctgacctcatgatctgcctgccttggcctcccaaagtgctgtgattacaggcatgagccaatgtgcccagcctcttttttttttttttttttgagacggagtttcactctgtt

SEQ ID NO: 83875 - DNA, 120 bp, synthetic construct
  source 1..120: mol_type = other DNA
agtctaacctcttctgctagaatgatttattcctggaagattagatcccatgttgctaggaaggcttattcttaggggcttgtaaagtctcttgtcccatggagaaaaatagagggagga

SEQ ID NO: 83876 - DNA, 120 bp, synthetic construct
  source 1..120: mol_type = other DNA
tcaggtgatccatccgccttggcttcccaaagttctgggattacaggcctgagccactgtgcatggccctaggctctttttgaattggttttgctagagcttttcataaggaatctcaga

SEQ ID NO: 83877 - DNA, 120 bp, synthetic construct
  source 1..120: mol_type = other DNA
tgactctgaaaaacaaagcaaaaagaatcagcaatgtttccaacaaaaaaagttataaaagattattttggccaggcgtggtggctcacctgtaatcccagcactttgggaggccaaggc

SEQ ID NO: 83878 - DNA, 120 bp, synthetic construct
  source 1..120: mol_type = other DNA
ctctgtgatcagcccatttcccagccattgtatacgccaaagtcaagttttctcacaatataaagtgatttctgatcccattcaaagccaaaatcaggtcatgcaaggcaaaggaacaga

SEQ ID NO: 83879 - DNA, 120 bp, synthetic construct
  source 1..120: mol_type = other DNA
cctgagccatggcagaagtgtttaatgtttttttttttagttttgctctgttgcccaggctggagcacagtggtgtgatctcgcctcactgcagcctccgcctctcaggttcaagcgatt

SEQ ID NO: 83880 - DNA, 120 bp, synthetic construct
  source 1..120: mol_type = other DNA
gaaccccaggatcagaaatatcccagctgctcccaggccactgggaaaatggaagagaccacaaaaggccagaagttagcagtgtgatggttaatactgagtgtcaacttggttggattg

SEQ ID NO: 83881 - DNA, 120 bp, synthetic construct
  source 1..120: mol_type = other DNA
tagctgggattacaggcgctcgtcatcacgcccggttatttttgtatttgtagtagacgctgggtttctccatattggtcaggctggtcttgaacttccgacttcaggtgatccacccgc

SEQ ID NO: 83882 - DNA, 120 bp, synthetic construct
  source 1..120: mol_type = other DNA
atccacttgatgtctatgacgtggcccaataggttggtaaccatagaactggtcattgaaaatcttttggggtcattcttggacatgtgcagaacagcaaacaattttagtcacctgatg

SEQ ID NO: 83883 - DNA, 120 bp, synthetic construct
  source 1..120: mol_type = other DNA
cagcaatgttttcagccagctgaacaaataggtttttggctaaaggaggaggctctgataacttccggtttatatgctcaaagaatgacttaaagactcagaattgctcctgggctgact

SEQ ID NO: 83884 - DNA, 120 bp, synthetic construct
  source 1..120: mol_type = other DNA
gggattacaggcgtgagccaccgcgcccggccttataagtacaagttcttaagcgagtctttgtacacttataagtatggtacaacagagttctagttgtactgttctttgactaagtag

SEQ ID NO: 83885 - DNA, 120 bp, synthetic construct
  source 1..120: mol_type = other DNA
ttttccttcaactttgctctagaaaaaagaagtgtccaaggcctatttttttagccctagctattcagacagtgttatcttataactgtccttgggttgggcacggtagctcacgcctgt

SEQ ID NO: 83886 - DNA, 120 bp, synthetic construct
  source 1..120: mol_type = other DNA
ggaaactgctcccttcgttgctctttcaagcttcaagatgaaaacagtttcctgccaggaataatcccagggagcttcagcgccctttgtggctttcttagccctgccggcacctgtgta

SEQ ID NO: 83887 - DNA, 120 bp, synthetic construct
  source 1..120: mol_type = other DNA
atcccagcacacggggggatccagacaaatacacaagaaatgaccacagcaggaactttattgagcacggagcaagggtgcacaccactcagcacctgcccctccacctgtccttctctc

SEQ ID NO: 83888 - DNA, 120 bp, synthetic construct
  source 1..120: mol_type = other DNA
caaatccactagaatttctaaattaaaatcactgactattccaaatgttggtgcgaatatggaccatcaagagctgtcacacactttgtctagcagtgtggcatcatctctttgggtagg

SEQ ID NO: 83889 - DNA, 120 bp, synthetic construct
  source 1..120: mol_type = other DNA
accactgtccaacccccttctgcagtgatggagtgtctatatctgagctattcattatggcacagatacagacattcatattctgtgaattctgagtacttgaaatatatggctggtgca

SEQ ID NO: 83890 - DNA, 120 bp, synthetic construct
  source 1..120: mol_type = other DNA
gcaggctgcagattgtttaccacaggaattgtaaatgcaaaccgttcactgtcttgcttagctaagggtatagtaaagaaagagtccttcctggctgtaatgctcctatagcttgtataa

SEQ ID NO: 83891 - DNA, 120 bp, synthetic construct
  source 1..120: mol_type = other DNA
agttatttcacaggtaggacgtttatcagtaatttgattcacccaataagctgctttgccttgtttatttgtgcttccaaatcctcctgtttgtttaatttcacttttcccattcccaca

SEQ ID NO: 83892 - DNA, 120 bp, synthetic construct
  source 1..120: mol_type = other DNA
aagcagcctggcaatcgagattaacattgccaaaagctaataactgcaacactatactctgagcagctgaatctgaaatcacctttttaagagactcctgtcttaagagattccaagcta

SEQ ID NO: 83893 - DNA, 120 bp, synthetic construct
  source 1..120: mol_type = other DNA
agtgtgaaaaagttccaaggtggaacgaaccagagcccacacttgtcccattgttaccggatgcttccaagctccccatcttactcactacgaggattgcttaagagtacttgggtgtcc

SEQ ID NO: 83894 - DNA, 120 bp, synthetic construct
  source 1..120: mol_type = other DNA
tttctttctttctttctttctttctttctttctttctttcctccttccttccttccttgttttttgtttttgagacaggttctcactctgttgccgtgtctggagtgcagtggtgcgatc

SEQ ID NO: 83895 - DNA, 120 bp, synthetic construct
  source 1..120: mol_type = other DNA
tcccactcagcctcctgagtagctgggactgcaggtgtgcaccaccatgtccagcttaacattttattttatctgatagtagagtgaagcacttgcattacaaaaataaaatacatacaa

SEQ ID NO: 83896 - DNA, 120 bp, synthetic construct
  source 1..120: mol_type = other DNA
gatataaagacacctgcctccctggccagaaaccaacttccaggattcaggattcaggagtaaagtgtcccaataattagaaggtttcctggtctctctcaaattcagtgctcatttggc

SEQ ID NO: 83897 - DNA, 120 bp, synthetic construct
  source 1..120: mol_type = other DNA
agaaatcattatgtgtgcaggaaagcacatgcaattagaaaactgggacatgattcataaggcaggagggacccttttctctttcgtggtagatgtgggactccctgtcatctttgtcct

SEQ ID NO: 83898 - DNA, 120 bp, synthetic construct
  source 1..120: mol_type = other DNA
gtttaggatttttttttttttttgagatggagtttcactcttgttgcccaggctggaatgcaattgcacgatctctgcttactgcaacctctccccactgtgttcaagcaattcacctac

SEQ ID NO: 83899 - DNA, 120 bp, synthetic construct
  source 1..120: mol_type = other DNA
atgccaatttttggagggatgcaatttagcccataacagtctggattaacctggagactccttttccttccttccttccttccttccttccttccttcctttttctttctttctttcttt

SEQ ID NO: 83900 - DNA, 120 bp, synthetic construct
  source 1..120: mol_type = other DNA
tatccttatcgataccccatattgtgatgaatatgttggcttcattttggcagaagggacatgacactggacattttgagccacaatttctctgggcctttccatgggattcagtttcag

SEQ ID NO: 83901 - DNA, 120 bp, synthetic construct
  source 1..120: mol_type = other DNA
tccatcctttcattttcaacttgtatgtgtccttagatccaaagtgagtatcttgtagccagcatatggttagaatctttttattatatccattgtgataatctcaattctgattgggga

SEQ ID NO: 83902 - DNA, 120 bp, synthetic construct
  source 1..120: mol_type = other DNA
cccccaaccctgtgctctctgaaacatgtgctgtgtccactcaggattaaatggattaagggcggtgcaagatgtgctttgttaaacagatgcttgaaggcagcatgctcgttaagagtc

SEQ ID NO: 83903 - DNA, 120 bp, synthetic construct
  source 1..120: mol_type = other DNA
agtgatccttctacctcaacctcctaagtagctgggactgcaagcacaccaccaagtctgactaattttttgtatgtattttcagtagagatggaatttcagcatgttgcccgggttggt

SEQ ID NO: 83904 - DNA, 120 bp, synthetic construct
  source 1..120: mol_type = other DNA
ccattcatagatcagcaacctcaaagaatgaagatagataagcccactaagatgagaatcagcacaacaatgctgaaaactcaaaaagccagcaagggtttggaaccaggctaaagctga

SEQ ID NO: 83905 - DNA, 120 bp, synthetic construct
  source 1..120: mol_type = other DNA
gacagttaccagccactacaaaaacaagctgaagtacatagaccagtgacgcaataaagcaaccacataagcaagtctgcaaagtaaccagctaacaccatgatgacaggatcaaatcca

SEQ ID NO: 83906 - DNA, 120 bp, synthetic construct
  source 1..120: mol_type = other DNA
gcagtaaatgcccacatcaaaaagttagaaagatctcaagtcaacaacctaaaatcaaacctataagaacttaagaatgaagagcaaacatatcccgaagctagcagaagacaagaaata

SEQ ID NO: 83907 - DNA, 120 bp, synthetic construct
  source 1..120: mol_type = other DNA
atgacaaacccacagccaacttcatactgaatgggcaaaactagaagcattctccttgaaatcagcacaagacaaggatgccttctctcactgctcctgttcaacacagtattggaaatt

SEQ ID NO: 83908 - DNA, 120 bp, synthetic construct
  source 1..120: mol_type = other DNA
tttagaaaggtattattttctgggaatagaatctagtttcacagtattttccttttaggactttaaagatgttgctcatctgtcttctcatttgcattgtttccagtgaaataacggctg

SEQ ID NO: 83909 - DNA, 120 bp, synthetic construct
  source 1..120: mol_type = other DNA
tcctatggaaatcacgatggtaatttgagaggttcattaatgtaagacacgttgatgcctgatatagagtggatgttgttcttgcccgaatctcatgttggatggaatccccagcattag

SEQ ID NO: 83910 - DNA, 120 bp, synthetic construct
  source 1..120: mol_type = other DNA
acccaaccttctcaatggctcacaagcaaggtttcttaaagacaggggtaaatttcaggaaagcagagttacaggcaacatcataaatcaatgcatagaagttacacactggtttggcct

SEQ ID NO: 83911 - DNA, 120 bp, synthetic construct
  source 1..120: mol_type = other DNA
tgaaagtatcctctcttttccttgtggatcaggggaaggtgctggtgtgatctatatacaatccttcccaaggtgggaggacactggaatgatgactgtactttacctcaacttgctttt

SEQ ID NO: 83912 - DNA, 120 bp, synthetic construct
  source 1..120: mol_type = other DNA
cggtgtgctgcacccattaactcgtcatttgcattaggtatttctcctaatgctatccctcccccctgtccccaccccatgacaggccctggtgtgtgatgttccccaccctgagttcaa

SEQ ID NO: 83913 - DNA, 120 bp, synthetic construct
  source 1..120: mol_type = other DNA
cttcttttgagaagtgtctgttcatatcctttgcctactttttgatggggttgtttgattttttcttgtaaatttgtttaagttctttgtagattctggatattagtcctttgtcagatg

SEQ ID NO: 83914 - DNA, 120 bp, synthetic construct
  source 1..120: mol_type = other DNA
ttgagtagtggtttgtagttctccttgaagaggtccttcacatcccttgtaagttttattcctaggtattttattctctttgaagcaattgtgaatgggagttcactcatgatttggctc

SEQ ID NO: 83915 - DNA, 120 bp, synthetic construct
  source 1..120: mol_type = other DNA
gacttttttgggttggtaggctattaattattgcctcaatttcagagcctattattggtctattcagggattcaacttcttcctggtttagtcttgggagggtgtatgtgtccaggaatt

SEQ ID NO: 83916 - DNA, 120 bp, synthetic construct
  source 1..120: mol_type = other DNA
tggtgctgagaagaaggtattttctgttgatttggggtggagagttctgtcgatgtctattaggtctgcctggtgcagagctgagttcaagtcctggatatccttgttaactttctgtct

SEQ ID NO: 83917 - DNA, 120 bp, synthetic construct
  source 1..120: mol_type = other DNA
ggaagttctcctggataatatcctgaagagtgttttccaacttggttccattctctcggtcattttcaggtacaccaatcaaatgtagatttggtcttttcacatagtcccatatttctt

SEQ ID NO: 83918 - DNA, 120 bp, synthetic construct
  source 1..120: mol_type = other DNA
acttgaggaggcaatctgtccgttctcagatctcaaactccatgctggtagaaccactgctctcttcaaagctgtcagactgggacatttaagtctgcagaagtttctgctgccttttgt

SEQ ID NO: 83919 - DNA, 120 bp, synthetic construct
  source 1..120: mol_type = other DNA
agacttgtaattccatcagtttcggaggccatggtaggaggattgtttaaggccaggagtttgagaccaaccagggcaaaatagtgagaccccattcctacaaaatctttaaaaaattag

SEQ ID NO: 83920 - DNA, 120 bp, synthetic construct
  source 1..120: mol_type = other DNA
cttattccccctacctctcaccctctcttgcccttttgctttctaccaggtacagtccttggtcttggaattcccatcctcaacaaccatgaacaaaataaatttctgttcattttaagt

SEQ ID NO: 83921 - DNA, 120 bp, synthetic construct
  source 1..120: mol_type = other DNA
gaaagcatagttgcctgttcctttttcctctcctgcctgctctttctcctgtaaatattgaagtcctcaaaaccctcttagtaaaaagcatgggccacagatgctacaataatttgtgtc
